United States Patent Application Publication US 2006/0003322 A1 - sequence listing, part 5

SEQ ID NO: 148000 - RNA, 18 nt, Human
cuccuuucagucucagcc

SEQ ID NO: 148001 - RNA, 18 nt, Human
cucugcagcuaguuccuc

SEQ ID NO: 148002 - RNA, 25 nt, Human
cuuccacaucccaacuccacaguca

SEQ ID NO: 148003 - RNA, 25 nt, Human
gccggagcacaaagcuguuccucug

SEQ ID NO: 148004 - RNA, 18 nt, Human
ggaggcacaugguugcua

SEQ ID NO: 148005 - RNA, 24 nt, Human
guuccagccccacuuccacauccc

SEQ ID NO: 148006 - RNA, 21 nt, Human
ucacacccaaaggagcaggca

SEQ ID NO: 148007 - RNA, 19 nt, Human
ucccucugcagcuaguucc

SEQ ID NO: 148008 - RNA, 23 nt, Human
uccucacuugucccagcccagga

SEQ ID NO: 148009 - RNA, 21 nt, Human
uccuccaacugccgggccugc

SEQ ID NO: 148010 - RNA, 23 nt, Human
uccucuggccuuccuccaacugc

SEQ ID NO: 148011 - RNA, 23 nt, Human
ucucucacggucaccacuuccgc

SEQ ID NO: 148012 - RNA, 22 nt, Human
ugggaggcacaugguugcuagc

SEQ ID NO: 148013 - RNA, 20 nt, Human
uuaacauauacaagcagcag

SEQ ID NO: 148014 - RNA, 20 nt, Human
uuaauauuaacauauacaag

SEQ ID NO: 148015 - RNA, 20 nt, Human
aaaaaaaaaguauccaaaaa

SEQ ID NO: 148016 - RNA, 22 nt, Human
aaaaagugcccugcauaucccu

SEQ ID NO: 148017 - RNA, 27 nt, Human
aaaagggaaaggaagccaggcaaagag

SEQ ID NO: 148018 - RNA, 20 nt, Human
aaaauaccuccuucccaauc

SEQ ID NO: 148019 - RNA, 20 nt, Human
aaacagcagccagaggcucu

SEQ ID NO: 148020 - RNA, 23 nt, Human
aaaccagcuccaaggaguggaca

SEQ ID NO: 148021 - RNA, 24 nt, Human
aaaccagcuccaaggaguggacag

SEQ ID NO: 148022 - RNA, 20 nt, Human
aaaggaagccaggcaaagag

SEQ ID NO: 148023 - RNA, 19 nt, Human
aaaggagagaacacaaacu

SEQ ID NO: 148024 - RNA, 20 nt, Human
aaagugcccugcauaucccu

SEQ ID NO: 148025 - RNA, 21 nt, Human
aaaugcuaugaaaguaacucc

SEQ ID NO: 148026 - RNA, 23 nt, Human
aacacucaaacccaggauaccca

SEQ ID NO: 148027 - RNA, 24 nt, Human
aacacucaaacccaggauacccaa

SEQ ID NO: 148028 - RNA, 19 nt, Human
aaccagcuuuugucugcag

SEQ ID NO: 148029 - RNA, 24 nt, Human
aagaacucauuucuugucauugcc

SEQ ID NO: 148030 - RNA, 20 nt, Human
aagagagaagaggaaaagga

SEQ ID NO: 148031 - RNA, 18 nt, Human
aagaugcacuugcaagaa

SEQ ID NO: 148032 - RNA, 24 nt, Human
aagcaggacacaaacacaaaucuc

SEQ ID NO: 148033 - RNA, 21 nt, Human
aagcccggccgcucgcgccgc

SEQ ID NO: 148034 - RNA, 19 nt, Human
aagccugacccugccagcu

SEQ ID NO: 148035 - RNA, 18 nt, Human
aagcuugcugccaacacc

SEQ ID NO: 148036 - RNA, 18 nt, Human
aaggccaacagagaccaa

SEQ ID NO: 148037 - RNA, 24 nt, Human
aagggaaaggaagccaggcaaaga

SEQ ID NO: 148038 - RNA, 23 nt, Human
aaggugggggguggcagcugggg

SEQ ID NO: 148039 - RNA, 19 nt, Human
aagugcccugcauaucccu

SEQ ID NO: 148040 - RNA, 20 nt, Human
acaauguagccaaccagaac

SEQ ID NO: 148041 - RNA, 21 nt, Human
acacucaaacccaggauaccc

SEQ ID NO: 148042 - RNA, 20 nt, Human
acacugcaaucuaggaugag

SEQ ID NO: 148043 - RNA, 20 nt, Human
acagccaaaccccaugucuc

SEQ ID NO: 148044 - RNA, 18 nt, Human
acaugauuccagguccaa

SEQ ID NO: 148045 - RNA, 23 nt, Human
accagauuuagaaaaagcaauga

SEQ ID NO: 148046 - RNA, 25 nt, Human
accccauuccccaaagaaagguaca

SEQ ID NO: 148047 - RNA, 20 nt, Human
accuccucucccacccccac

SEQ ID NO: 148048 - RNA, 22 nt, Human
acucaacaguccugaugcuuuc

SEQ ID NO: 148049 - RNA, 24 nt, Human
acuuucucaagccccucacuuucc

SEQ ID NO: 148050 - RNA, 23 nt, Human
agaagcaauagggagcagcaaaa

SEQ ID NO: 148051 - RNA, 23 nt, Human
agaagcaccacuuaaaccaaauc

SEQ ID NO: 148052 - RNA, 18 nt, Human
agaagccaagagugaaaa

SEQ ID NO: 148053 - RNA, 19 nt, Human
agacaggcaggcaggcagg

SEQ ID NO: 148054 - RNA, 20 nt, Human
agacaggcaggcaggcaggc

SEQ ID NO: 148055 - RNA, 20 nt, Human
agagagaagaggaaaaggaa

SEQ ID NO: 148056 - RNA, 20 nt, Human
agauggggugaggggugggg

SEQ ID NO: 148057 - RNA, 21 nt, Human
agaugugacaagaugggguga

SEQ ID NO: 148058 - RNA, 24 nt, Human
agcaagcaagcagagugaauagaa

SEQ ID NO: 148059 - RNA, 21 nt, Human
agccaaccagaacagaaccug

SEQ ID NO: 148060 - RNA, 19 nt, Human
agccucucucccugcccag

SEQ ID NO: 148061 - RNA, 18 nt, Human
agccuggaccccaucuug

SEQ ID NO: 148062 - RNA, 20 nt, Human
agcuaagccugacccugcca

SEQ ID NO: 148063 - RNA, 18 nt, Human
agcugccuccucccagag

SEQ ID NO: 148064 - RNA, 23 nt, Human
aggaaaaaaaugaacagucaagg

SEQ ID NO: 148065 - RNA, 18 nt, Human
aggaaagcgaaaaccaga

SEQ ID NO: 148066 - RNA, 20 nt, Human
aggagaaaaggaggcauaag

SEQ ID NO: 148067 - RNA, 29 nt, Human
aggcaaaacagugguacaaaggggacccc

SEQ ID NO: 148068 - RNA, 20 nt, Human
aggcagacaggcaggcaggc

SEQ ID NO: 148069 - RNA, 18 nt, Human
aggcaggcaggcaggcag

SEQ ID NO: 148070 - RNA, 18 nt, Human
aggcaggcaggcaggcag

SEQ ID NO: 148071 - RNA, 18 nt, Human
aggcaggcaggcaggcag

SEQ ID NO: 148072 - RNA, 18 nt, Human
aggcaggcaggcaggcag

SEQ ID NO: 148073 - RNA, 19 nt, Human
aggcaggcaggcaggcagg

SEQ ID NO: 148074 - RNA, 19 nt, Human
aggcaggcaggcaggcagg

SEQ ID NO: 148075 - RNA, 19 nt, Human
aggcaggcaggcaggcagg

SEQ ID NO: 148076 - RNA, 19 nt, Human
aggcaggcaggcaggcagg

SEQ ID NO: 148077 - RNA, 20 nt, Human
aggcaggcaggcaggccggc

SEQ ID NO: 148078 - RNA, 24 nt, Human
agggaaaggaagccaggcaaagag

SEQ ID NO: 148079 - RNA, 19 nt, Human
agggagaaaagaagccaag

SEQ ID NO: 148080 - RNA, 21 nt, Human
agggaggagaaguaagguggg

SEQ ID NO: 148081 - RNA, 18 nt, Human
aggggugggggacaugag

SEQ ID NO: 148082 - RNA, 21 nt, Human
aggggugggggacaugagguu

SEQ ID NO: 148083 - RNA, 22 nt, Human
aggguaaggugggggguggcag

SEQ ID NO: 148084 - RNA, 20 nt, Human
aggugggggguggcagcugg

SEQ ID NO: 148085 - RNA, 18 nt, Human
agucagugcacccuuggc

SEQ ID NO: 148086 - RNA, 21 nt, Human
agugcacccuuggcugcccau

SEQ ID NO: 148087 - RNA, 22 nt, Human
auagauccaagcccaggcuccu

SEQ ID NO: 148088 - RNA, 21 nt, Human
aucuuccuacaaacuggauuc

SEQ ID NO: 148089 - RNA, 18 nt, Human
augcaaacaaguacacag

SEQ ID NO: 148090 - RNA, 22 nt, Human
auucuguucuucagcugggcuc

SEQ ID NO: 148091 - RNA, 21 nt, Human
caaaauagcuggcuuucuggc

SEQ ID NO: 148092 - RNA, 19 nt, Human
caaaauuccccagccuguc

SEQ ID NO: 148093 - RNA, 18 nt, Human
caaacagcagccagaggc

SEQ ID NO: 148094 - RNA, 22 nt, Human
caaagcuugcugccaacaccac

SEQ ID NO: 148095 - RNA, 24 nt, Human
caaaugcaaacaaguacacagcug

SEQ ID NO: 148096 - RNA, 19 nt, Human
caacaguccugaugcuuuc

SEQ ID NO: 148097 - RNA, 23 nt, Human
caaccagaacagaaccugggaua

SEQ ID NO: 148098 - RNA, 18 nt, Human
caacuccccaucccaagc

SEQ ID NO: 148099 - RNA, 21 nt, Human
caagccccagcugaaaaccaa

SEQ ID NO: 148100 - RNA, 28 nt, Human
caaggcauccuacacuccucccuacccc

SEQ ID NO: 148101 - RNA, 19 nt, Human
cacacugcaaucuaggaug

SEQ ID NO: 148102 - RNA, 21 nt, Human
cacccacuuucucaagccccu

SEQ ID NO: 148103 - RNA, 20 nt, Human
caccccauuccccaaagaaa

SEQ ID NO: 148104 - RNA, 23 nt, Human
caccccauuccccaaagaaaggu

SEQ ID NO: 148105 - RNA, 25 nt, Human
cacccccaccccauuccccaaagaa

SEQ ID NO: 148106 - RNA, 21 nt, Human
cacuccucccuaccccaccuc

SEQ ID NO: 148107 - RNA, 25 nt, Human
cacugugagucacaugagacaccug

SEQ ID NO: 148108 - RNA, 22 nt, Human
cacuuguguaaggaauguaggc

SEQ ID NO: 148109 - RNA, 21 nt, Human
cacuuucucaagccccucacu

SEQ ID NO: 148110 - RNA, 19 nt, Human
cagaaaauaccuccuuccc

SEQ ID NO: 148111 - RNA, 19 nt, Human
cagagaccaagcuagaacc

SEQ ID NO: 148112 - RNA, 27 nt, Human
cagcaacaguagccccaggcuuauccc

SEQ ID NO: 148113 - RNA, 21 nt, Human
cagcagcuccgagacuuguca

SEQ ID NO: 148114 - RNA, 21 nt, Human
cagccagaggcucuaagucag

SEQ ID NO: 148115 - RNA, 18 nt, Human
cagccucucucccugccc

SEQ ID NO: 148116 - RNA, 21 nt, Human
cagcgugaggggccuagguac

SEQ ID NO: 148117 - RNA, 18 nt, Human
cagcucaaagcaggacac

SEQ ID NO: 148118 - RNA, 23 nt, Human
cagcuggccuccaagccugggcu

SEQ ID NO: 148119 - RNA, 18 nt, Human
caggacacacugcaaucu

SEQ ID NO: 148120 - RNA, 23 nt, Human
caggacacacugcaaucuaggau

SEQ ID NO: 148121 - RNA, 25 nt, Human
caggcaggcaggcaggcaggcaggc

SEQ ID NO: 148122 - RNA, 25 nt, Human
caggcaggcaggcaggcaggcaggc

SEQ ID NO: 148123 - RNA, 26 nt, Human
caggcaggcaggcaggcaggcaggcc

SEQ ID NO: 148124 - RNA, 23 nt, Human
cagguccaaaacugucccaccag

SEQ ID NO: 148125 - RNA, 24 nt, Human
caguccaggggaaggaaaaagaug

SEQ ID NO: 148126 - RNA, 21 nt, Human
cauccuacacuccucccuacc

SEQ ID NO: 148127 - RNA, 24 nt, Human
caucuugagguugugaucuuuuaa

SEQ ID NO: 148128 - RNA, 20 nt, Human
cauucuguucuucagcuggg

SEQ ID NO: 148129 - RNA, 20 nt, Human
cauuuuuguaaacagaagca

SEQ ID NO: 148130 - RNA, 19 nt, Human
ccaaaacugucccaccagc

SEQ ID NO: 148131 - RNA, 18 nt, Human
ccaacccagccucucucc

SEQ ID NO: 148132 - RNA, 19 nt, Human
ccaagcccggccgcucgcg

SEQ ID NO: 148133 - RNA, 23 nt, Human
ccagauuuagaaaaagcaaugag

SEQ ID NO: 148134 - RNA, 21 nt, Human
ccaggagaacuccccucccca

SEQ ID NO: 148135 - RNA, 19 nt, Human
ccaggcuuaucccuggagg

SEQ ID NO: 148136 - RNA, 20 nt, Human
ccagguggacaucucugggc

SEQ ID NO: 148137 - RNA, 22 nt, Human
ccaucugcaugcaccaccuuuc

SEQ ID NO: 148138 - RNA, 21 nt, Human
ccaugcuggacuugagaggga

SEQ ID NO: 148139 - RNA, 20 nt, Human
cccaaagggugacagaacac

SEQ ID NO: 148140 - RNA, 23 nt, Human
cccaccagccuuacagauauccu

SEQ ID NO: 148141 - RNA, 22 nt, Human
cccacccccaccccauucccca

SEQ ID NO: 148142 - RNA, 21 nt, Human
cccacugucccaggagaacuc

SEQ ID NO: 148143 - RNA, 19 nt, Human
cccagagcccuccauucug

SEQ ID NO: 148144 - RNA, 23 nt, Human
cccagcaacaguagccccaggcu

SEQ ID NO: 148145 - RNA, 19 nt, Human
cccaggagaacuccccucc

SEQ ID NO: 148146 - RNA, 25 nt, Human
cccaucccaagcaguggggcaggaa

SEQ ID NO: 148147 - RNA, 21 nt, Human
cccaucuaaaguaucaaaccc

SEQ ID NO: 148148 - RNA, 26 nt, Human
cccaucuaccuccucucccaccccca

SEQ ID NO: 148149 - RNA, 23 nt, Human
ccccaaagaaagguacaaaaggu

SEQ ID NO: 148150 - RNA, 19 nt, Human
ccccacacucucgcugcuc

SEQ ID NO: 148151 - RNA, 23 nt, Human
ccccaccccauuccccaaagaaa

SEQ ID NO: 148152 - RNA, 22 nt, Human
ccccagccuguccacaggacac

SEQ ID NO: 148153 - RNA, 18 nt, Human
cccgggccgggcucggcu

SEQ ID NO: 148154 - RNA, 21 nt, Human
cccuaccaagcccggccgcuc

SEQ ID NO: 148155 - RNA, 19 nt, Human
cccuaccccaccucccucc

SEQ ID NO: 148156 - RNA, 18 nt, Human
cccuuucccaccucauuc

SEQ ID NO: 148157 - RNA, 21 nt, Human
ccgccgcccccgcagccuccg

SEQ ID NO: 148158 - RNA, 22 nt, Human
ccggccgcucgcgccgccgccc

SEQ ID NO: 148159 - RNA, 22 nt, Human
ccguugccgccgccgcggagcc

SEQ ID NO: 148160 - RNA, 19 nt, Human
ccuaaaaaauccuucccuc

SEQ ID NO: 148161 - RNA, 25 nt, Human
ccuaacacucaaacccaggauaccc

SEQ ID NO: 148162 - RNA, 19 nt, Human
ccuccagcuggccuccaag

SEQ ID NO: 148163 - RNA, 19 nt, Human
ccuccaggaauagugcccu

SEQ ID NO: 148164 - RNA, 21 nt, Human
ccucccagagcccuccauucu

SEQ ID NO: 148165 - RNA, 20 nt, Human
ccucccuccuccuugcuucc

SEQ ID NO: 148166 - RNA, 18 nt, Human
ccuccucucccaccccca

SEQ ID NO: 148167 - RNA, 18 nt, Human
ccugcauaucccugccau

SEQ ID NO: 148168 - RNA, 19 nt, Human
ccuuucccaccuuuuauuc

SEQ ID NO: 148169 - RNA, 21 nt, Human
cgcucgcgccgccgcccccgc

SEQ ID NO: 148170 - RNA, 26 nt, Human
cgggaucccgggccgggcucggcucc

SEQ ID NO: 148171 - RNA, 20 nt, Human
cgggcucggcuccccuacca

SEQ ID NO: 148172 - RNA, 21 nt, Human
cgggguauuuuucaagucuca

SEQ ID NO: 148173 - RNA, 25 nt, Human
cguugccgccgccgcggagccugca

SEQ ID NO: 148174 - RNA, 18 nt, Human
cuaccuccucucccaccc

SEQ ID NO: 148175 - RNA, 21 nt, Human
cuacuacaccaagggacucag

SEQ ID NO: 148176 - RNA, 18 nt, Human
cuagaaccaccaccuucu

SEQ ID NO: 148177 - RNA, 18 nt, Human
cuccagugagcugccucc

SEQ ID NO: 148178 - RNA, 21 nt, Human
cucccacccccaccccauucc

SEQ ID NO: 148179 - RNA, 19 nt, Human
cucccuccuccuugcuucc

SEQ ID NO: 148180 - RNA, 20 nt, Human
cucccuuucccaccucauuc

SEQ ID NO: 148181 - RNA, 19 nt, Human
cuccucccuaccccaccuc

SEQ ID NO: 148182 - RNA, 21 nt, Human
cucugggcuuggggaacaggu

SEQ ID NO: 148183 - RNA, 21 nt, Human
cugauccuagccccaaaaugu

SEQ ID NO: 148184 - RNA, 23 nt, Human
cugggcuuggggaacagguucuu

SEQ ID NO: 148185 - RNA, 18 nt, Human
cuuuauguuaagccuaag

SEQ ID NO: 148186 - RNA, 21 nt, Human
cuuuauguuaagccuaaguuc

SEQ ID NO: 148187 - RNA, 24 nt, Human
cuuucucaagccccucacuuuccc

SEQ ID NO: 148188 - RNA, 21 nt, Human
gaaaggaagccaggcaaagag

SEQ ID NO: 148189 - RNA, 24 nt, Human
gaauugugcugcugcugcugcugc

SEQ ID NO: 148190 - RNA, 22 nt, Human
gacaagauggggugaggggugg

SEQ ID NO: 148191 - RNA, 21 nt, Human
gaccugggcggggcgggaggu

SEQ ID NO: 148192 - RNA, 20 nt, Human
gagaacuccccuccccaaag

SEQ ID NO: 148193 - RNA, 19 nt, Human
gagcugccuccucccagag

SEQ ID NO: 148194 - RNA, 24 nt, Human
gaggagaaguaagguggggcagaa

SEQ ID NO: 148195 - RNA, 20 nt, Human
gaggcugggggucccccaag

SEQ ID NO: 148196 - RNA, 20 nt, Human
gaguugcugaacaauguagc

SEQ ID NO: 148197 - RNA, 21 nt, Human
gcagcauuaccguuacaggga

SEQ ID NO: 148198 - RNA, 21 nt, Human
gcaggacagugcagaggaggg

SEQ ID NO: 148199 - RNA, 20 nt, Human
gccuccguugccgccgccgc

SEQ ID NO: 148200 - RNA, 22 nt, Human
gccuccucccagagcccuccau

SEQ ID NO: 148201 - RNA, 20 nt, Human
gcuaccauccuggauuggcc

SEQ ID NO: 148202 - RNA, 23 nt, Human
gcugccaccugcucccuauggac

SEQ ID NO: 148203 - RNA, 19 nt, Human
gcuugcuucagaaggaacu

SEQ ID NO: 148204 - RNA, 21 nt, Human
ggagaacuccccuccccaaag

SEQ ID NO: 148205 - RNA, 18 nt, Human
ggcaggggggaugcuugc

SEQ ID NO: 148206 - RNA, 21 nt, Human
ggccaaauaguaaaaagugcc

SEQ ID NO: 148207 - RNA, 22 nt, Human
ggccaggggccugucaucucag

SEQ ID NO: 148208 - RNA, 22 nt, Human
ggcucggcuccccuaccaagcc

SEQ ID NO: 148209 - RNA, 23 nt, Human
gggaggcuauagcaagaaaaagg

SEQ ID NO: 148210 - RNA, 18 nt, Human
gggguggcagcuggggga

SEQ ID NO: 148211 - RNA, 18 nt, Human
ggggugggggacaugagg

SEQ ID NO: 148212 - RNA, 19 nt, Human
gguggcagcugggggagga

SEQ ID NO: 148213 - RNA, 19 nt, Human
gucccccaauguaguuucc

SEQ ID NO: 148214 - RNA, 21 nt, Human
gugcugccccuuuugguccag

SEQ ID NO: 148215 - RNA, 20 nt, Human
gugcugcugcugcugcugcu

SEQ ID NO: 148216 - RNA, 24 nt, Human
guggggcagaaaauguggacagag

SEQ ID NO: 148217 - RNA, 21 nt, Human
uaaaaaauccuucccuccucc

SEQ ID NO: 148218 - RNA, 23 nt, Human
uaaaaaauccuucccuccuccca

SEQ ID NO: 148219 - RNA, 19 nt, Human
uaaaaauaacgucccccaa

SEQ ID NO: 148220 - RNA, 21 nt, Human
uaaaccaaauccacaugagcc

SEQ ID NO: 148221 - RNA, 24 nt, Human
uaaaccaaauccacaugagccaaa

SEQ ID NO: 148222 - RNA, 21 nt, Human
uaacauuuuguuuucucucuu

SEQ ID NO: 148223 - RNA, 19 nt, Human
uaagaagcaccacuuaaac

SEQ ID NO: 148224 - RNA, 19 nt, Human
uaagacaccccaguuaaga

SEQ ID NO: 148225 - RNA, 18 nt, Human
uaaggguaaggugggggg

SEQ ID NO: 148226 - RNA, 18 nt, Human
uaagucaguaugaguaga

SEQ ID NO: 148227 - RNA, 19 nt, Human
uaagugcaacaucacauac

SEQ ID NO: 148228 - RNA, 21 nt, Human
uaagugcaacaucacauacca

SEQ ID NO: 148229 - RNA, 20 nt, Human
uacacaguucauucugaugg

SEQ ID NO: 148230 - RNA, 24 nt, Human
uacaccaccucuauaggggaagcc

SEQ ID NO: 148231 - RNA, 22 nt, Human
uaccuccucucccacccccacc

SEQ ID NO: 148232 - RNA, 24 nt, Human
uacucaacaguccugaugcuuucu

SEQ ID NO: 148233 - RNA, 18 nt, Human
uagaagaaaagggaaagg

SEQ ID NO: 148234 - RNA, 23 nt, Human
uagcucauuccuuccccucccuu

SEQ ID NO: 148235 - RNA, 23 nt, Human
uagguaccccacacucucgcugc

SEQ ID NO: 148236 - RNA, 19 nt, Human
uaguauaagcuugagggca

SEQ ID NO: 148237 - RNA, 18 nt, Human
ucaaacccaaaccuaacc

SEQ ID NO: 148238 - RNA, 22 nt, Human
ucaaacccaaaccuaaccagcu

SEQ ID NO: 148239 - RNA, 22 nt, Human
ucaaacccaggauacccaaaua

SEQ ID NO: 148240 - RNA, 18 nt, Human
ucaaagcaggacacaaac

SEQ ID NO: 148241 - RNA, 23 nt, Human
ucaacccuaagacaaucucagaa

SEQ ID NO: 148242 - RNA, 23 nt, Human
ucaccagaucaggauagauccaa

SEQ ID NO: 148243 - RNA, 19 nt, Human
ucacucucuuuaggcacuu

SEQ ID NO: 148244 - RNA, 22 nt, Human
ucagggaggagaaguaaggugg

SEQ ID NO: 148245 - RNA, 24 nt, Human
ucagggaggagaaguaaggugggg

SEQ ID NO: 148246 - RNA, 23 nt, Human
ucauucugauggcucaauguuuc

SEQ ID NO: 148247 - RNA, 21 nt, Human
uccaaaaacacugcugcuuag

SEQ ID NO: 148248 - RNA, 18 nt, Human
uccaaaacugucccacca

SEQ ID NO: 148249 - RNA, 26 nt, Human
uccacaggacacacugcaaucuagga

SEQ ID NO: 148250 - RNA, 24 nt, Human
ucccaaucugcuuagaaggccaaa

SEQ ID NO: 148251 - RNA, 23 nt, Human
ucccaccagccuuacagauaucc

SEQ ID NO: 148252 - RNA, 19 nt, Human
ucccacccccaccccauuc

SEQ ID NO: 148253 - RNA, 21 nt, Human
uccccaaagaaagguacaaaa

SEQ ID NO: 148254 - RNA, 20 nt, Human
ucccuaccccaccucccucc

SEQ ID NO: 148255 - RNA, 19 nt, Human
uccucccacccacuuucuc

SEQ ID NO: 148256 - RNA, 21 nt, Human
uccucccagagcccuccauuc

SEQ ID NO: 148257 - RNA, 19 nt, Human
uccucucccacccccaccc

SEQ ID NO: 148258 - RNA, 19 nt, Human
uccuggggcuuggaaagcu

SEQ ID NO: 148259 - RNA, 19 nt, Human
uccuggggcuuggaaagcu

SEQ ID NO: 148260 - RNA, 22 nt, Human
uccuggggcuuggaaagcuuuc

SEQ ID NO: 148261 - RNA, 18 nt, Human
uccuugcuuccucuggau

SEQ ID NO: 148262 - RNA, 22 nt, Human
ucuacaggccaggauuuagacc

SEQ ID NO: 148263 - RNA, 24 nt, Human
ucucaagacaaaaaaaaaaaaaaa

SEQ ID NO: 148264 - RNA, 22 nt, Human
ucuccuuucccaccuuuuauuc

SEQ ID NO: 148265 - RNA, 19 nt, Human
ucuguucuucagcugggcu

SEQ ID NO: 148266 - RNA, 21 nt, Human
ucuuuuuucucauuuuagacc

SEQ ID NO: 148267 - RNA, 20 nt, Human
ugaauagaagaaaagggaaa

SEQ ID NO: 148268 - RNA, 21 nt, Human
ugaggggugggggacaugagg

SEQ ID NO: 148269 - RNA, 22 nt, Human
ugcaaacaaguacacagcugug

SEQ ID NO: 148270 - RNA, 21 nt, Human
ugcaugcaccaccuuucaaac

SEQ ID NO: 148271 - RNA, 22 nt, Human
ugcaugcaccaccuuucaaacu

SEQ ID NO: 148272 - RNA, 21 nt, Human
ugccuccucccagagcccucc

SEQ ID NO: 148273 - RNA, 25 nt, Human
ugccuuaaguauuacuaggggcugg

SEQ ID NO: 148274 - RNA, 23 nt, Human
ugcuacuacaccaagggacucuu

SEQ ID NO: 148275 - RNA, 18 nt, Human
ugcugccaacaccacuuc

SEQ ID NO: 148276 - RNA, 19 nt, Human
ugcugccccuuuuggucca

SEQ ID NO: 148277 - RNA, 18 nt, Human
ugcugcugcugcugaugu

SEQ ID NO: 148278 - RNA, 21 nt, Human
ugcugcugcugcugcugcugc

SEQ ID NO: 148279 - RNA, 18 nt, Human
ugcuggugaaugacugga

SEQ ID NO: 148280 - RNA, 21 nt, Human
ugcuucaaggccaacagagac

SEQ ID NO: 148281 - RNA, 22 nt, Human
uggaaaaugccagaaacccucc

SEQ ID NO: 148282 - RNA, 20 nt, Human
uggaaagcuuucuucuaucc

SEQ ID NO: 148283 - RNA, 18 nt, Human
uggaaaggccaggggccu

SEQ ID NO: 148284 - RNA, 20 nt, Human
uggacagagaggaauaaggg

SEQ ID NO: 148285 - RNA, 19 nt, Human
uggaucagguuggacugga

SEQ ID NO: 148286 - RNA, 18 nt, Human
uggcagcugggggaggag

SEQ ID NO: 148287 - RNA, 24 nt, Human
uggcuggagguuuguugggucugg

SEQ ID NO: 148288 - RNA, 22 nt, Human
ugggauaauuucacaauggacu

SEQ ID NO: 148289 - RNA, 24 nt, Human
ugggggaggagcaaccaaaaccau

SEQ ID NO: 148290 - RNA, 26 nt, Human
ugggggguggcagcugggggaggagc

SEQ ID NO: 148291 - RNA, 24 nt, Human
ugggucugggguauuucuucccca

SEQ ID NO: 148292 - RNA, 18 nt, Human
uguaguuuccaaaacugc

SEQ ID NO: 148293 - RNA, 20 nt, Human
ugucagggaggagaaguaag

SEQ ID NO: 148294 - RNA, 22 nt, Human
ugucagggaggagaaguaaggu

SEQ ID NO: 148295 - RNA, 24 nt, Human
uguugcugggaguagaggcugcca

SEQ ID NO: 148296 - RNA, 18 nt, Human
uuaaguauuacuaggggc

SEQ ID NO: 148297 - RNA, 22 nt, Human
uuagaaacuaaagugaaaacca

SEQ ID NO: 148298 - RNA, 18 nt, Human
uuaggagcuuuuuaggga

SEQ ID NO: 148299 - RNA, 24 nt, Human
uucaagccccagcugaaaaccaac

SEQ ID NO: 148300 - RNA, 25 nt, Human
uuccacacugaaguugcaacucccc

SEQ ID NO: 148301 - RNA, 21 nt, Human
uuccagcuaccauccuggauu

SEQ ID NO: 148302 - RNA, 19 nt, Human
uuccccagccuguccacag

SEQ ID NO: 148303 - RNA, 19 nt, Human
uuccucuggauuugggugg

SEQ ID NO: 148304 - RNA, 21 nt, Human
uucuucagcugggcuugugcc

SEQ ID NO: 148305 - RNA, 22 nt, Human
uuggaugcccaaacagcagcca

SEQ ID NO: 148306 - RNA, 21 nt, Human
uuucuuggaugcccaaacagc

SEQ ID NO: 148307 - RNA, 18 nt, Human
uuuguaaacagaagcaau

SEQ ID NO: 148308 - RNA, 23 nt, Human
aaaaaaaaaagagaauaaccuua

SEQ ID NO: 148309 - RNA, 23 nt, Human
aaaacaaaacaaaauuaaacaaa

SEQ ID NO: 148310 - RNA, 26 nt, Human
aaaacaaaacaaaauuaaacaaacaa

SEQ ID NO: 148311 - RNA, 22 nt, Human
aaacaaaaaaacagaacugcau

SEQ ID NO: 148312 - RNA, 24 nt, Human
aaacaacgcagaaaaaaaucucaa

SEQ ID NO: 148313 - RNA, 20 nt, Human
aacaugcugaaaccccgucu

SEQ ID NO: 148314 - RNA, 21 nt, Human
aacaugcugaaaccccgucuc

SEQ ID NO: 148315 - RNA, 24 nt, Human
aaucgcuugaacccggggggcaga

SEQ ID NO: 148316 - RNA, 26 nt, Human
acaaaacaaaauuaaacaaacaaaaa

SEQ ID NO: 148317 - RNA, 23 nt, Human
acaaacaaaaaaacagaacugca

SEQ ID NO: 148318 - RNA, 21 nt, Human
acagagccagacucaaaaaca

SEQ ID NO: 148319 - RNA, 20 nt, Human
accaaaaaaaaaaaaaaaga

SEQ ID NO: 148320 - RNA, 18 nt, Human
acccugaggucaggagag

SEQ ID NO: 148321 - RNA, 18 nt, Human
acgccacugcacuccagc

SEQ ID NO: 148322 - RNA, 22 nt, Human
acgccacugcacuccagccugg

SEQ ID NO: 148323 - RNA, 24 nt, Human
acugcacuccagccugggugacag

SEQ ID NO: 148324 - RNA, 26 nt, Human
acugcacuccagccugggugacagag

SEQ ID NO: 148325 - RNA, 24 nt, Human
agcacuuugugaggccgagguggg

SEQ ID NO: 148326 - RNA, 24 nt, Human
agccugggugacagagccagacuc

SEQ ID NO: 148327 - RNA, 21 nt, Human
aggaagacuuggauuucaggc

SEQ ID NO: 148328 - RNA, 24 nt, Human
aggcaggagaaucgcuugaacccg

SEQ ID NO: 148329 - RNA, 21 nt, Human
aggccgaggugggcugaucac

SEQ ID NO: 148330 - RNA, 20 nt, Human
aggcugaggcaggagaaucg

SEQ ID NO: 148331 - RNA, 24 nt, Human
aggcugaggcaggagaaucgcuug

SEQ ID NO: 148332 - RNA, 19 nt, Human
agucccuaaguuuucauaa

SEQ ID NO: 148333 - RNA, 24 nt, Human
aucacgccacugcacuccagccug

SEQ ID NO: 148334 - RNA, 25 nt, Human
caaaauuucaaagauaaagcaacau

SEQ ID NO: 148335 - RNA, 24 nt, Human
caacaugcugaaaccccgucucua

SEQ ID NO: 148336 - RNA, 19 nt, Human
caacgcagaaaaaaaucuc

SEQ ID NO: 148337 - RNA, 21 nt, Human
caccuguaaucucagcuacuc

SEQ ID NO: 148338 - RNA, 24 nt, Human
caccuguaaucucagcuacucggg

SEQ ID NO: 148339 - RNA, 24 nt, Human
cacgccuguaaucccagcacuuug

SEQ ID NO: 148340 - RNA, 22 nt, Human
cacuccagccugggugacagag

SEQ ID NO: 148341 - RNA, 19 nt, Human
cacugcacuccagccuggg

SEQ ID NO: 148342 - RNA, 19 nt, Human
cacugcacuccagccuggg

SEQ ID NO: 148343 - RNA, 22 nt, Human
cacugcacuccagccuggguga

SEQ ID NO: 148344 - RNA, 23 nt, Human
cacugcacuccagccugggugac

SEQ ID NO: 148345 - RNA, 24 nt, Human
cacugcacuccagccugggugaca

SEQ ID NO: 148346 - RNA, 25 nt, Human
cacugcacuccagccugggugacag

SEQ ID NO: 148347 - RNA, 20 nt, Human
cagaaaaaaaucucaaggca

SEQ ID NO: 148348 - RNA, 20 nt, Human
cagcaaaggcugguuguggc

SEQ ID NO: 148349 - RNA, 21 nt, Human
cagcaaaggcugguuguggca

SEQ ID NO: 148350 - RNA, 24 nt, Human
cagcacuuugugaggccgaggugg

SEQ ID NO: 148351 - RNA, 24 nt, Human
cagcuacucgggaggcugaggcag

SEQ ID NO: 148352 - RNA, 22 nt, Human
caggagagaccggccuagccaa

SEQ ID NO: 148353 - RNA, 23 nt, Human
cauaaccaaaaaaaaaaaaaaag

SEQ ID NO: 148354 - RNA, 28 nt, Human
ccaauuuuuauauuaauuuuagucccua

SEQ ID NO: 148355 - RNA, 20 nt, Human
ccacugcacuccagccuggg

SEQ ID NO: 148356 - RNA, 20 nt, Human
ccacugcacuccagccuggg

SEQ ID NO: 148357 - RNA, 20 nt, Human
ccacugcacuccagccuggg

SEQ ID NO: 148358 - RNA, 21 nt, Human
ccacugcacuccagccugggu

SEQ ID NO: 148359 - RNA, 21 nt, Human
ccacugcacuccagccugggu

SEQ ID NO: 148360 - RNA, 23 nt, Human
ccacugcacuccagccuggguga

SEQ ID NO: 148361 - RNA, 24 nt, Human
ccacugcacuccagccugggugac

SEQ ID NO: 148362 - RNA, 19 nt, Human
ccccuugguuguuaagagg

SEQ ID NO: 148363 - RNA, 21 nt, Human
cccuaaguuuucauaaccaaa

SEQ ID NO: 148364 - RNA, 23 nt, Human
ccuagccaacaugcugaaacccc

SEQ ID NO: 148365 - RNA, 24 nt, Human
ccuagccaacaugcugaaaccccg

SEQ ID NO: 148366 - RNA, 22 nt, Human
ccugggugacagagccagacuc

SEQ ID NO: 148367 - RNA, 21 nt, Human
ccuguaaucucagcuacucgg

SEQ ID NO: 148368 - RNA, 25 nt, Human
cgaggugggcugaucacccugaggu

SEQ ID NO: 148369 - RNA, 26 nt, Human
cgccacugcacuccagccugggugac

SEQ ID NO: 148370 - RNA, 18 nt, Human
cgccuguaaucccagcac

SEQ ID NO: 148371 - RNA, 22 nt, Human
cucacgccuguaaucccagcac

SEQ ID NO: 148372 - RNA, 24 nt, Human
cucacgccuguaaucccagcacuu

SEQ ID NO: 148373 - RNA, 21 nt, Human
cuguaaucucagcuacucggg

SEQ ID NO: 148374 - RNA, 23 nt, Human
cuugaccuuuugaaacauccaaa

SEQ ID NO: 148375 - RNA, 21 nt, Human
gaaggucuucaaggagaauuu

SEQ ID NO: 148376 - RNA, 23 nt, Human
gagaaucgcuugaacccgggggg

SEQ ID NO: 148377 - RNA, 19 nt, Human
gagcaaggggagaaaaaua

SEQ ID NO: 148378 - RNA, 26 nt, Human
gaggugggcugaucacccugagguca

SEQ ID NO: 148379 - RNA, 20 nt, Human
gaucacccugaggucaggaa

SEQ ID NO: 148380 - RNA, 21 nt, Human
gaucacccugaggucaggaga

SEQ ID NO: 148381 - RNA, 24 nt, Human
gcacuccagccugggugacagagc

SEQ ID NO: 148382 - RNA, 24 nt, Human
gcagaucacgccacugcacuccag

SEQ ID NO: 148383 - RNA, 22 nt, Human
gccaaaauguagauucaaucca

SEQ ID NO: 148384 - RNA, 24 nt, Human
gccaacaugcugaaaccccgucuc

SEQ ID NO: 148385 - RNA, 19 nt, Human
gccacugcacuccagccug

SEQ ID NO: 148386 - RNA, 24 nt, Human
gccacugcacuccagccuggguga

SEQ ID NO: 148387 - RNA, 23 nt, Human
ggcaagguggcucacgccuguaa

SEQ ID NO: 148388 - RNA, 18 nt, Human
gggaauguuuaacuucug

SEQ ID NO: 148389 - RNA, 23 nt, Human
ggugacagagccagacucaaaaa

SEQ ID NO: 148390 - RNA, 23 nt, Human
gguggcucacgccuguaauccca

SEQ ID NO: 148391 - RNA, 24 nt, Human
gguggcucacgccuguaaucccag

SEQ ID NO: 148392 - RNA, 18 nt, Human
gguuguggcaaaguuuca

SEQ ID NO: 148393 - RNA, 23 nt, Human
guggcucacgccuguaaucccag

SEQ ID NO: 148394 - RNA, 20 nt, Human
uaaaagggagaaggucuuca

SEQ ID NO: 148395 - RNA, 18 nt, Human
uaaaaugaaggccuaaaa

SEQ ID NO: 148396 - RNA, 25 nt, Human
uaaacaaacaaaaaaacagaacugc

SEQ ID NO: 148397 - RNA, 24 nt, Human
uaaccaaaaaaaaaaaaaaagaga

SEQ ID NO: 148398 - RNA, 20 nt, Human
uagccaacaugcugaaaccc

SEQ ID NO: 148399 - RNA, 19 nt, Human
uaugaugugggcugggcaa

SEQ ID NO: 148400 - RNA, 18 nt, Human
ucaauccaacauuaugcc

SEQ ID NO: 148401 - RNA, 23 nt, Human
ucacgccacugcacuccagccug

SEQ ID NO: 148402 - RNA, 18 nt, Human
ucaggcauuaaacaacgc

SEQ ID NO: 148403 - RNA, 19 nt, Human
ucaucuagaauuauuuggu

SEQ ID NO: 148404 - RNA, 20 nt, Human
ucaugaaaaagaaaaaaaac

SEQ ID NO: 148405 - RNA, 21 nt, Human
ucauucgaauccauucauuuc

SEQ ID NO: 148406 - RNA, 23 nt, Human
ucauuucaaacuguaugaugugg

SEQ ID NO: 148407 - RNA, 19 nt, Human
uccaacuuccaaauccauc

SEQ ID NO: 148408 - RNA, 24 nt, Human
uccagccugggugacagagccaga

SEQ ID NO: 148409 - RNA, 18 nt, Human
ucgcuugaacccgggggg

SEQ ID NO: 148410 - RNA, 24 nt, Human
ucgggaggcugaggcaggagaauc

SEQ ID NO: 148411 - RNA, 25 nt, Human
ugaaaaagaaaaaaaacuuuauuuc

SEQ ID NO: 148412 - RNA, 20 nt, Human
ugaggcaggagaaucgcuug

SEQ ID NO: 148413 - RNA, 24 nt, Human
ugaggcaggagaaucgcuugaacc

SEQ ID NO: 148414 - RNA, 25 nt, Human
ugaggcaggagaaucgcuugaaccc

SEQ ID NO: 148415 - RNA, 18 nt, Human
ugaggucaggagagaccg

SEQ ID NO: 148416 - RNA, 19 nt, Human
ugaucacccugaggucagg

SEQ ID NO: 148417 - RNA, 22 nt, Human
uggcgcgcaccuguaaucucag

SEQ ID NO: 148418 - RNA, 22 nt, Human
uggcucacgccuguaaucccag

SEQ ID NO: 148419 - RNA, 24 nt, Human
uggcucacgccuguaaucccagca

SEQ ID NO: 148420 - RNA, 24 nt, Human
ugguggcgcgcaccuguaaucuca

SEQ ID NO: 148421 - RNA, 20 nt, Human
ugugaggccgaggugggcug

SEQ ID NO: 148422 - RNA, 20 nt, Human
ugugcuacagcaaaggcugg

SEQ ID NO: 148423 - RNA, 23 nt, Human
ugugggcugggcaagguggcuca

SEQ ID NO: 148424 - RNA, 23 nt, Human
uucauaaccaaaaaaaaaaaaaa

SEQ ID NO: 148425 - RNA, 20 nt, Human
uuuugcuuucuaacaucuuu

SEQ ID NO: 148426 - RNA, 25 nt, Human
uuuuuuuuuuuuuuuugcuuucuaa

SEQ ID NO: 148427 - RNA, 18 nt, Human
uuuuuuuuuuuuuuuuug

SEQ ID NO: 148428 - RNA, 23 nt, Human
uuuuuuuuuuuuuuuuuugcuuu

SEQ ID NO: 148429 - RNA, 19 nt, Human
aaaagaaagaaaauuagga

SEQ ID NO: 148430 - RNA, 21 nt, Human
aaauuccagaaaauggcaugg

SEQ ID NO: 148431 - RNA, 18 nt, Human
aacacagucauuacuaca

SEQ ID NO: 148432 - RNA, 24 nt, Human
aagaaagaaaauuaggaaagagaa

SEQ ID NO: 148433 - RNA, 20 nt, Human
aagcacaaguauaauaaucc

SEQ ID NO: 148434 - RNA, 24 nt, Human
acagcagcaaguucuguguuggcu

SEQ ID NO: 148435 - RNA, 19 nt, Human
agaaaaaacacagcagcaa

SEQ ID NO: 148436 - RNA, 23 nt, Human
agaaagaaaauuaggaaagagaa

SEQ ID NO: 148437 - RNA, 22 nt, Human
agcguaaggucccacgcgccuc

SEQ ID NO: 148438 - RNA, 19 nt, Human
augaaauaaugcaacaccc

SEQ ID NO: 148439 - RNA, 23 nt, Human
caacacccuuaaauuccagaaaa

SEQ ID NO: 148440 - RNA, 25 nt, Human
caacauuaaagaauccaauuuagau

SEQ ID NO: 148441 - RNA, 23 nt, Human
caaguaaaaucuaaagaaaaccc

SEQ ID NO: 148442 - RNA, 23 nt, Human
cacaaguauaauaauccuugaau

SEQ ID NO: 148443 - RNA, 18 nt, Human
cacccuuaaauuccagaa

SEQ ID NO: 148444 - RNA, 20 nt, Human
cagaaaaaaacucagcgaua

SEQ ID NO: 148445 - RNA, 21 nt, Human
cagcgaacucucuaguggccc

SEQ ID NO: 148446 - RNA, 20 nt, Human
cauuaaagaauccaauuuag

SEQ ID NO: 148447 - RNA, 24 nt, Human
cauuacuacaaauuacuuguugaa

SEQ ID NO: 148448 - RNA, 18 nt, Human
cccacgcgccucgccagc

SEQ ID NO: 148449 - RNA, 19 nt, Human
cccacgcgccucgccagca

SEQ ID NO: 148450 - RNA, 19 nt, Human
cccgggccgggagaggaga

SEQ ID NO: 148451 - RNA, 20 nt, Human
ccggcgucagcgaacucucu

SEQ ID NO: 148452 - RNA, 21 nt, Human
ccucaaaauaccuaaaauagg

SEQ ID NO: 148453 - RNA, 21 nt, Human
cuauuggcaacagaaaaaaac

SEQ ID NO: 148454 - RNA, 19 nt, Human
gaaccagcguaagguccca

SEQ ID NO: 148455 - RNA, 24 nt, Human
gaugaaauaaugcaacacccuuaa

SEQ ID NO: 148456 - RNA, 20 nt, Human
ggugugaaaauuguuucagg

SEQ ID NO: 148457 - RNA, 19 nt, Human
uaaacgauuccuccaaacc

SEQ ID NO: 148458 - RNA, 19 nt, Human
uaaucuugucauuacaaca

SEQ ID NO: 148459 - RNA, 19 nt, Human
uaccugaagggucacauuu

SEQ ID NO: 148460 - RNA, 23 nt, Human
uaugguaaauaccucaaaauacc

SEQ ID NO: 148461 - RNA, 22 nt, Human
uccaaauuauuaucagauauuu

SEQ ID NO: 148462 - RNA, 23 nt, Human
ugaaaggcaugaauucuccauua

SEQ ID NO: 148463 - RNA, 20 nt, Human
ugaaauaaugcaacacccuu

SEQ ID NO: 148464 - RNA, 21 nt, Human
ugaagcacaaguauaauaauc

SEQ ID NO: 148465 - RNA, 22 nt, Human
ugugaucaaaccuauuuaagac

SEQ ID NO: 148466 - RNA, 25 nt, Human
ugugaucaaaccuauuuaagacacc

SEQ ID NO: 148467 - RNA, 18 nt, Human
uucaaaagaaagaaaauu

SEQ ID NO: 148468 - RNA, 22 nt, Human
uucaaaagaaagaaaauuagga

SEQ ID NO: 148469 - RNA, 24 nt, Human
uucaaaagaaagaaaauuaggaaa

SEQ ID NO: 148470 - RNA, 21 nt, Human
uucaucuuuaacauagcuacu

SEQ ID NO: 148471 - RNA, 21 nt, Human
uuccagaaaauggcaugguuu

SEQ ID NO: 148472 - RNA, 24 nt, Human
uuucaaaaucaaaaaaaaaguauc

SEQ ID NO: 148473 - RNA, 26 nt, Human
uuucuaaauuuaguuuaugguaaaua

SEQ ID NO: 148474 - RNA, 22 nt, Human
uuuucuuuuuugucaacaaaug

SEQ ID NO: 148475 - RNA, 18 nt, Human
uuuuucuuuuuugucaac

SEQ ID NO: 148476 - RNA, 19 nt, Human
aagcucacaaagcacuggu

SEQ ID NO: 148477 - RNA, 24 nt, Human
caggucaaaaaagcucacaaagca

SEQ ID NO: 148478 - RNA, 24 nt, Human
cccgcaggucaaaaaagcucacaa

SEQ ID NO: 148479 - RNA, 18 nt, Human
cccggcugugacgcgagg

SEQ ID NO: 148480 - RNA, 27 nt, Human
cgcaggucaaaaaagcucacaaagcac

SEQ ID NO: 148481 - RNA, 20 nt, Human
gggcucauuguugucaaucu

SEQ ID NO: 148482 - RNA, 21 nt, Human
gucaaaaaagcucacaaagca

SEQ ID NO: 148483 - RNA, 18 nt, Human
ucaaaaaagcucacaaag

SEQ ID NO: 148484 - RNA, 21 nt, Human
ucaaaaaagcucacaaagcac

SEQ ID NO: 148485 - RNA, 22 nt, Human
ugugacgcgaggaaggccgcaa

SEQ ID NO: 148486 - RNA, 24 nt, Human
caauaugcaaauauauuucuucca

SEQ ID NO: 148487 - RNA, 19 nt, Human
cauguuaacuucuuuucug

SEQ ID NO: 148488 - RNA, 18 nt, Human
cugugcuuuucaauaugc

SEQ ID NO: 148489 - RNA, 22 nt, Human
uagccaaaaucggcaaugacac

SEQ ID NO: 148490 - RNA, 20 nt, Human
ugacuucaagaguucauguu

SEQ ID NO: 148491 - RNA, 24 nt, Human
uucauguuaacuucuuuucuggaa

SEQ ID NO: 148492 - RNA, 24 nt, Human
uuuuuuuuuuuuuuuuuuuauuuu

SEQ ID NO: 148493 - RNA, 23 nt, Human
cuuugauaguuuuuuuuuucauc

SEQ ID NO: 148494 - RNA, 22 nt, Human
ucaauuuuauuccaauucuuca

SEQ ID NO: 148495 - RNA, 18 nt, Human
uccaaaauguaagucacc

SEQ ID NO: 148496 - RNA, 19 nt, Human
uuccaaaauguaagucacc

SEQ ID NO: 148497 - RNA, 22 nt, Human
ccccagagauugagcccuggcu

SEQ ID NO: 148498 - RNA, 25 nt, Human
cccuggcuggggcuggggagcucau

SEQ ID NO: 148499 - RNA, 19 nt, Human
cccuggcuggggcugggug

SEQ ID NO: 148500 - RNA, 18 nt, Human
cccuucccuccccccucc

SEQ ID NO: 148501 - RNA, 23 nt, Human
cccuucccuccccccuccugcug

SEQ ID NO: 148502 - RNA, 27 nt, Human
cucagcccccagagauugagcccuggc

SEQ ID NO: 148503 - RNA, 20 nt, Human
cuccccccuccugcugcucc

SEQ ID NO: 148504 - RNA, 21 nt, Human
cugcugcuccucagcccccag

SEQ ID NO: 148505 - RNA, 20 nt, Human
ucccuucccuccccccuccu

SEQ ID NO: 148506 - RNA, 19 nt, Human
ucccuuggcucccuucccu

SEQ ID NO: 148507 - RNA, 21 nt, Human
uggcucccuucccuccccccc

SEQ ID NO: 148508 - RNA, 18 nt, Human
aaacaaaaugcauucaaa

SEQ ID NO: 148509 - RNA, 19 nt, Human
aagaaagaagcacaaugca

SEQ ID NO: 148510 - RNA, 20 nt, Human
aagaagcacaaugcacguug

SEQ ID NO: 148511 - RNA, 18 nt, Human
acaaccauuucuacagaa

SEQ ID NO: 148512 - RNA, 18 nt, Human
acccaccccaacagucua

SEQ ID NO: 148513 - RNA, 18 nt, Human
acucuaaagaggauaaag

SEQ ID NO: 148514 - RNA, 28 nt, Human
agaaagaagcacaaugcacguugugauc

SEQ ID NO: 148515 - RNA, 19 nt, Human
auacaauuuauuuaacauu

SEQ ID NO: 148516 - RNA, 19 nt, Human
auagagaacaucuaauaca

SEQ ID NO: 148517 - RNA, 22 nt, Human
caacagucuaacucuaaagagg

SEQ ID NO: 148518 - RNA, 18 nt, Human
cacugcauccaaaacucu

SEQ ID NO: 148519 - RNA, 20 nt, Human
cacugcauccaaaacucuca

SEQ ID NO: 148520 - RNA, 20 nt, Human
ccaaagaaagaagcacaaug

SEQ ID NO: 148521 - RNA, 24 nt, Human
cccaaagaaagaagcacaaugcac

SEQ ID NO: 148522 - RNA, 18 nt, Human
ccccaacagucuaacucu

SEQ ID NO: 148523 - RNA, 21 nt, Human
cuauucagcaacagcgagcac

SEQ ID NO: 148524 - RNA, 21 nt, Human
gcgagcacugcauccaaaacu

SEQ ID NO: 148525 - RNA, 24 nt, Human
uaaaugauagagaacaucuaauac

SEQ ID NO: 148526 - RNA, 24 nt, Human
uaaaugauagagaacaucuaauac

SEQ ID NO: 148527 - RNA, 26 nt, Human
uaaaugauagagaacaucuaauacaa

SEQ ID NO: 148528 - RNA, 23 nt, Human
uaauacaaccauuucuacagaac

SEQ ID NO: 148529 - RNA, 22 nt, Human
uacccaccccaacagucuaacu

SEQ ID NO: 148530 - RNA, 23 nt, Human
ucaaaugcuuucuaaaaaaauuu

SEQ ID NO: 148531 - RNA, 19 nt, Human
ucccaaagaaagaagcaca

SEQ ID NO: 148532 - RNA, 21 nt, Human
ucccaaagaaagaagcacaau

SEQ ID NO: 148533 - RNA, 19 nt, Human
uccguuaugagcauugaga

SEQ ID NO: 148534 - RNA, 21 nt, Human
ucuaaaaaaauuuuaaaggcc

SEQ ID NO: 148535 - RNA, 27 nt, Human
ucuaagaaagaaagauuuuacagacua

SEQ ID NO: 148536 - RNA, 21 nt, Human
ugacaaacacaauaaaggcag

SEQ ID NO: 148537 - RNA, 25 nt, Human
uuaaaggccuuucuacucaggcuaa

SEQ ID NO: 148538 - RNA, 24 nt, Human
uugcuggggcuuagcaacaggguc

SEQ ID NO: 148539 - RNA, 22 nt, Human
uuucuacucaggcuaaugacaa

SEQ ID NO: 148540 - RNA, 26 nt, Human
aaaaaaaaaaaaaaaugaacacagaa

SEQ ID NO: 148541 - RNA, 25 nt, Human
aaaaaaaaaaaaaauuuaagcaaaa

SEQ ID NO: 148542 - RNA, 25 nt, Human
aaaaaaaugaacacagaaguacaag

SEQ ID NO: 148543 - RNA, 23 nt, Human
aaaaaacaaaaaaaauuaccaaa

SEQ ID NO: 148544 - RNA, 21 nt, Human
aaaaagaaacaaagaaaauug

SEQ ID NO: 148545 - RNA, 23 nt, Human
aaaacaaaaaaaauuaccaaaga

SEQ ID NO: 148546 - RNA, 24 nt, Human
aaaacaaaaaaaauuaccaaagaa

SEQ ID NO: 148547 - RNA, 19 nt, Human
aaaauacagcauaaagaua

SEQ ID NO: 148548 - RNA, 20 nt, Human
aaaauacagcauaaagauac

SEQ ID NO: 148549 - RNA, 22 nt, Human
aaaauacagcauaaagauacaa

SEQ ID NO: 148550 - RNA, 21 nt, Human
aaacaaaugaaaaacugaaau

SEQ ID NO: 148551 - RNA, 25 nt, Human
aaacaaaugaaaaacugaaaucaga

SEQ ID NO: 148552 - RNA, 18 nt, Human
aaaugccaaguuguuuuc

SEQ ID NO: 148553 - RNA, 25 nt, Human
aagaaaauugcuagaaaacuguaug

SEQ ID NO: 148554 - RNA, 26 nt, Human
acaaaaaacaaaaaaaauuaccaaag

SEQ ID NO: 148555 - RNA, 22 nt, Human
acaaaaacagacauacuaauuc

SEQ ID NO: 148556 - RNA, 24 nt, Human
acaaaugaaaaacugaaaucagaa

SEQ ID NO: 148557 - RNA, 18 nt, Human
agguaaaaucuguaugua

SEQ ID NO: 148558 - RNA, 26 nt, Human
auaugcuucugcauaaaauggaacaa

SEQ ID NO: 148559 - RNA, 18 nt, Human
caaagaaaauugcuagaa

SEQ ID NO: 148560 - RNA, 24 nt, Human
caaugcuguaaaaagaaacaaaga

SEQ ID NO: 148561 - RNA, 22 nt, Human
caccacaaaagaggacauaaua

SEQ ID NO: 148562 - RNA, 27 nt, Human
cagcaaagacaaugcuguaaaaagaaa

SEQ ID NO: 148563 - RNA, 18 nt, Human
cagcaagaguacagcaaa

SEQ ID NO: 148564 - RNA, 23 nt, Human
cccaaaucucgauugcuugacgc

SEQ ID NO: 148565 - RNA, 21 nt, Human
cuacuugagccauuuuuaacc

SEQ ID NO: 148566 - RNA, 18 nt, Human
cucuagccaaaaaaaaaa

SEQ ID NO: 148567 - RNA, 23 nt, Human
cucuagccaaaaaaaaaaaaaaa

SEQ ID NO: 148568 - RNA, 19 nt, Human
cuuugugucauauuccugg

SEQ ID NO: 148569 - RNA, 23 nt, Human
cuuugugucauauuccuggaucc

SEQ ID NO: 148570 - RNA, 20 nt, Human
gaacacagaaguacaagaca

SEQ ID NO: 148571 - RNA, 23 nt, Human
gacugcuuuucuacuugagccau

SEQ ID NO: 148572 - RNA, 18 nt, Human
gauggagaaauaaaagga

SEQ ID NO: 148573 - RNA, 23 nt, Human
gcaaaauaugcuucugcauaaaa

SEQ ID NO: 148574 - RNA, 19 nt, Human
gccaaaaaaaaaaaaaaaa

SEQ ID NO: 148575 - RNA, 20 nt, Human
guagcaaagcuuuguaguua

SEQ ID NO: 148576 - RNA, 19 nt, Human
guuuucugacuauugugga

SEQ ID NO: 148577 - RNA, 24 nt, Human
uaaaaagaaacaaagaaaauugcu

SEQ ID NO: 148578 - RNA, 21 nt, Human
uauaaagauggagaaauaaaa

SEQ ID NO: 148579 - RNA, 22 nt, Human
ucaaaccagcaaaauaugcuuc

SEQ ID NO: 148580 - RNA, 23 nt, Human
ucagcaagaguacagcaaagaca

SEQ ID NO: 148581 - RNA, 23 nt, Human
uccuucaccaauguuacaugagg

SEQ ID NO: 148582 - RNA, 25 nt, Human
ucuagccaaaaaaaaaaaaaaaaaa

SEQ ID NO: 148583 - RNA, 25 nt, Human
ucuccuaugagaauacucagaaggu

SEQ ID NO: 148584 - RNA, 22 nt, Human
ugaaaaacugaaaucagaauca

SEQ ID NO: 148585 - RNA, 20 nt, Human
ugaaaugcauaaauuuguag

SEQ ID NO: 148586 - RNA, 20 nt, Human
ugcaauaagaaguacaaauu

SEQ ID NO: 148587 - RNA, 23 nt, Human
ugcuccaaacuuaugcuguucac

SEQ ID NO: 148588 - RNA, 22 nt, Human
uggaagacaccacaaaagagga

SEQ ID NO: 148589 - RNA, 20 nt, Human
uggagaaauaaaaggacaaa

SEQ ID NO: 148590 - RNA, 21 nt, Human
uggauccuucaccaauguuag

SEQ ID NO: 148591 - RNA, 22 nt, Human
ugggccaggaacacauuuaugg

SEQ ID NO: 148592 - RNA, 22 nt, Human
uguaaaaagaaacaaagaaaau

SEQ ID NO: 148593 - RNA, 21 nt, Human
uguacuguaauucuuugauug

SEQ ID NO: 148594 - RNA, 20 nt, Human
uguagcaaagcuuuguaguu

SEQ ID NO: 148595 - RNA, 19 nt, Human
uguggauagguaaaaucug

SEQ ID NO: 148596 - RNA, 22 nt, Human
uguuaaaauacagcauaaagau

SEQ ID NO: 148597 - RNA, 22 nt, Human
uugugucauauuccuggauccu

SEQ ID NO: 148598 - RNA, 24 nt, Human
uuuaagcaaaacaaaugaaaaacu

SEQ ID NO: 148599 - RNA, 21 nt, Human
uuuccuguaaaguauagaaau

SEQ ID NO: 148600 - RNA, 20 nt, Human
agaggagggggcaggugccc

SEQ ID NO: 148601 - RNA, 20 nt, Human
aggagggggcaggugcccug

SEQ ID NO: 148602 - RNA, 20 nt, Human
agggagcuuucccaagcacc

SEQ ID NO: 148603 - RNA, 18 nt, Human
cagcagcgaggggcugga

SEQ ID NO: 148604 - RNA, 19 nt, Human
cagcagcgaggggcuggaa

SEQ ID NO: 148605 - RNA, 18 nt, Human
caguggaggcacaaggag

SEQ ID NO: 148606 - RNA, 19 nt, Human
ccaagcacaucaaccuaag

SEQ ID NO: 148607 - RNA, 21 nt, Human
ccaagcacaucaaccuaagga

SEQ ID NO: 148608 - RNA, 21 nt, Human
cccaagcacaucaaccuaagg

SEQ ID NO: 148609 - RNA, 20 nt, Human
ccccacgccaacgccugccc

SEQ ID NO: 148610 - RNA, 21 nt, Human
cccgcgaaccucucgcugccc

SEQ ID NO: 148611 - RNA, 20 nt, Human
cccugagugagggagaaagg

SEQ ID NO: 148612 - RNA, 20 nt, Human
ccugcccaguaugaucacuu

SEQ ID NO: 148613 - RNA, 23 nt, Human
ccuggcuggugggacuccuccca

SEQ ID NO: 148614 - RNA, 19 nt, Human
cgcugcccucccgcgccuc

SEQ ID NO: 148615 - RNA, 21 nt, Human
cucccgcgccuccagccucgc

SEQ ID NO: 148616 - RNA, 21 nt, Human
cuccucccaggaaggcccuga

SEQ ID NO: 148617 - RNA, 18 nt, Human
cuccugcaucaguggagg

SEQ ID NO: 148618 - RNA, 21 nt, Human
cucucgcugcccucccgcgcc

SEQ ID NO: 148619 - RNA, 24 nt, Human
cugcacccgcgaaccucucgcugc

SEQ ID NO: 148620 - RNA, 21 nt, Human
cuggcaggggucacuccccuu

SEQ ID NO: 148621 - RNA, 21 nt, Human
cuggcuggugggacuccuccc

SEQ ID NO: 148622 - RNA, 21 nt, Human
cuuucccaagcacaucaaccu

SEQ ID NO: 148623 - RNA, 18 nt, Human
gcgccuccagccucgcuc

SEQ ID NO: 148624 - RNA, 18 nt, Human
ggaaggagggggagggag

SEQ ID NO: 148625 - RNA, 19 nt, Human
ggagcuuucccaagcacau

SEQ ID NO: 148626 - RNA, 18 nt, Human
gggaaggagggggaggga

SEQ ID NO: 148627 - RNA, 24 nt, Human
ggugguugcgcccccagcagcgag

SEQ ID NO: 148628 - RNA, 23 nt, Human
ugagggagaaagggcuggggugu

SEQ ID NO: 148629 - RNA, 23 nt, Human
uggcaggggucacuccccuuggg

SEQ ID NO: 148630 - RNA, 24 nt, Human
uggcugcagggugugcuggcaggg

SEQ ID NO: 148631 - RNA, 21 nt, Human
uguccgaccccacgccaacgc

SEQ ID NO: 148632 - RNA, 26 nt, Human
uuuuuuuuuuuuuuuuuuccuagggg

SEQ ID NO: 148633 - RNA, 23 nt, Human
aaaacagaacaaaguucugcaga

SEQ ID NO: 148634 - RNA, 21 nt, Human
aaaacagugucacaggguaac

SEQ ID NO: 148635 - RNA, 22 nt, Human
aaaaucaacuucaaacucaaaa

SEQ ID NO: 148636 - RNA, 22 nt, Human
aaaauuacaggguaugagggug

SEQ ID NO: 148637 - RNA, 20 nt, Human
aaacaacuaggaaagucaga

SEQ ID NO: 148638 - RNA, 20 nt, Human
aaacaacuaggaaagucaga

SEQ ID NO: 148639 - RNA, 22 nt, Human
aaacagaacaaaguucugcaga

SEQ ID NO: 148640 - RNA, 19 nt, Human
aaagcgaaagggucacaga

SEQ ID NO: 148641 - RNA, 25 nt, Human
aaaucaacuucaaacucaaaacaua

SEQ ID NO: 148642 - RNA, 22 nt, Human
aaauggccugguagagaaaaag

SEQ ID NO: 148643 - RNA, 23 nt, Human
aaauggccugguagagaaaaagg

SEQ ID NO: 148644 - RNA, 23 nt, Human
aaccauaggugggauacagggag

SEQ ID NO: 148645 - RNA, 20 nt, Human
aacguucuucagcggucauu

SEQ ID NO: 148646 - RNA, 18 nt, Human
aaggaaguggaccucaaa

SEQ ID NO: 148647 - RNA, 19 nt, Human
aagugccucuauuacuugg

SEQ ID NO: 148648 - RNA, 20 nt, Human
aauaaaaaaacaacuaggaa

SEQ ID NO: 148649 - RNA, 25 nt, Human
aaugcaaaagcgaaagggucacaga

SEQ ID NO: 148650 - RNA, 21 nt, Human
acaaacuccaaacaugcacac

SEQ ID NO: 148651 - RNA, 21 nt, Human
acagggagaagaaauggucag

SEQ ID NO: 148652 - RNA, 24 nt, Human
accacccacuacaaacuccaaaca

SEQ ID NO: 148653 - RNA, 19 nt, Human
acccacuacaaacuccaaa

SEQ ID NO: 148654 - RNA, 25 nt, Human
accccaagcccagacucuugcaaca

SEQ ID NO: 148655 - RNA, 18 nt, Human
agaaaacagaacaaaguu

SEQ ID NO: 148656 - RNA, 22 nt, Human
agaaaggaaguggaccucaaaa

SEQ ID NO: 148657 - RNA, 21 nt, Human
agaaauacagcaagggccuuc

SEQ ID NO: 148658 - RNA, 22 nt, Human
agaagacauuccucccagagga

SEQ ID NO: 148659 - RNA, 18 nt, Human
agaauacuaugaucaggc

SEQ ID NO: 148660 - RNA, 19 nt, Human
agaauacuaugaucaggcc

SEQ ID NO: 148661 - RNA, 24 nt, Human
agacagaagacauuccucccagag

SEQ ID NO: 148662 - RNA, 20 nt, Human
agacagggagaagaaauggu

SEQ ID NO: 148663 - RNA, 19 nt, Human
agacggggagguggagacu

SEQ ID NO: 148664 - RNA, 19 nt, Human
agaggaagaaagugaggga

SEQ ID NO: 148665 - RNA, 26 nt, Human
agaggaagaaagugagggagguaggg

SEQ ID NO: 148666 - RNA, 18 nt, Human
agaggaagacggggaggu

SEQ ID NO: 148667 - RNA, 22 nt, Human
agcaacgagaugcaagcaggga

SEQ ID NO: 148668 - RNA, 18 nt, Human
agcaaggcagaauggucc

SEQ ID NO: 148669 - RNA, 22 nt, Human
agcgaaagggucacagaaaaga

SEQ ID NO: 148670 - RNA, 18 nt, Human
agggagaagaaaugguca

SEQ ID NO: 148671 - RNA, 24 nt, Human
agggaggagagacagaggguaagg

SEQ ID NO: 148672 - RNA, 19 nt, Human
agguggagacuguaauggg

SEQ ID NO: 148673 - RNA, 21 nt, Human
agugagggagguagggagaga

SEQ ID NO: 148674 - RNA, 24 nt, Human
caaaacagugucacaggguaacgc

SEQ ID NO: 148675 - RNA, 23 nt, Human
caaaguucugcagacauccuucc

SEQ ID NO: 148676 - RNA, 21 nt, Human
caaaugcacuaaguaaaagaa

SEQ ID NO: 148677 - RNA, 24 nt, Human
caacaggaaaggcaagaaaacugg

SEQ ID NO: 148678 - RNA, 18 nt, Human
caaccagaaauucccagg

SEQ ID NO: 148679 - RNA, 20 nt, Human
caacuaccacaaugcucacu

SEQ ID NO: 148680 - RNA, 19 nt, Human
cacaaaggaaaaaaaugca

SEQ ID NO: 148681 - RNA, 21 nt, Human
caccaagcucuguaucccuuc

SEQ ID NO: 148682 - RNA, 18 nt, Human
cacuuugcuuucuugaag

SEQ ID NO: 148683 - RNA, 23 nt, Human
cagaguacaacaggaaaggcaag

SEQ ID NO: 148684 - RNA, 21 nt, Human
cagcaacgagaugcaagcagg

SEQ ID NO: 148685 - RNA, 25 nt, Human
cauagaacagcagacuugccuauga

SEQ ID NO: 148686 - RNA, 27 nt, Human
cauccccaaaacauuggaagguccuuc

SEQ ID NO: 148687 - RNA, 21 nt, Human
ccaccaaguggaagcuaaagu

SEQ ID NO: 148688 - RNA, 25 nt, Human
ccagcaacgagaugcaagcagggag

SEQ ID NO: 148689 - RNA, 19 nt, Human
cccacuacaaacuccaaac

SEQ ID NO: 148690 - RNA, 18 nt, Human
cccaggacaccaguggcu

SEQ ID NO: 148691 - RNA, 25 nt, Human
ccccaaaacauuggagauccagcuu

SEQ ID NO: 148692 - RNA, 21 nt, Human
ccucaagguaaaagggaaagc

SEQ ID NO: 148693 - RNA, 24 nt, Human
cuaccagaguugcacaagcugugc

SEQ ID NO: 148694 - RNA, 25 nt, Human
cucaagguaaaagggaaagcagcuc

SEQ ID NO: 148695 - RNA, 20 nt, Human
cucccagaggaaagaaagga

SEQ ID NO: 148696 - RNA, 21 nt, Human
cucuaagggcugcuuagcucu

SEQ ID NO: 148697 - RNA, 21 nt, Human
cugaaaacauaucuaaaaaua

SEQ ID NO: 148698 - RNA, 24 nt, Human
cugcaaucuaagaacaacuaccac

SEQ ID NO: 148699 - RNA, 19 nt, Human
cuugaaguacaagaggacu

SEQ ID NO: 148700 - RNA, 23 nt, Human
gaaaaucaacuucaaacucaaaa

SEQ ID NO: 148701 - RNA, 18 nt, Human
gagguggagacuguaaug

SEQ ID NO: 148702 - RNA, 21 nt, Human
gcaaaacugguuaccaagggc

SEQ ID NO: 148703 - RNA, 20 nt, Human
gccaaaucaggugcacacaa

SEQ ID NO: 148704 - RNA, 20 nt, Human
ggaaagcagcucucuuuuua

SEQ ID NO: 148705 - RNA, 20 nt, Human
ggaaaggaaggagagaggaa

SEQ ID NO: 148706 - RNA, 24 nt, Human
ggaaggagagaggaagaaagugag

SEQ ID NO: 148707 - RNA, 20 nt, Human
ggagacagggagaagaaaug

SEQ ID NO: 148708 - RNA, 18 nt, Human
ggcagaaaacagaacaaa

SEQ ID NO: 148709 - RNA, 24 nt, Human
gggaacaggagacagggagaagaa

SEQ ID NO: 148710 - RNA, 21 nt, Human
gguagggagagaaauucagag

SEQ ID NO: 148711 - RNA, 21 nt, Human
gguaggugggaaggaggguga

SEQ ID NO: 148712 - RNA, 19 nt, Human
ggugacauagaacagcaga

SEQ ID NO: 148713 - RNA, 20 nt, Human
gguguuaggcccaccaagcu

SEQ ID NO: 148714 - RNA, 20 nt, Human
uaaagaccccaagcccagac

SEQ ID NO: 148715 - RNA, 21 nt, Human
uaacugggaaggggaacagga

SEQ ID NO: 148716 - RNA, 22 nt, Human
uaagaaacugcaaucuaagaac

SEQ ID NO: 148717 - RNA, 21 nt, Human
uaagaacaacuaccacaaugc

SEQ ID NO: 148718 - RNA, 23 nt, Human
uaaguaaaagaaugggaagauga

SEQ ID NO: 148719 - RNA, 19 nt, Human
uaauaccaaagacagaaga

SEQ ID NO: 148720 - RNA, 22 nt, Human
uacaaaccacccacuacaaacu

SEQ ID NO: 148721 - RNA, 22 nt, Human
uaccaaagacagaagacauucc

SEQ ID NO: 148722 - RNA, 25 nt, Human
uaccaacacuucagguaucuuugau

SEQ ID NO: 148723 - RNA, 24 nt, Human
uaccacaaugcucacuggacuuaa

SEQ ID NO: 148724 - RNA, 23 nt, Human
uaggugggauacagggaggagag

SEQ ID NO: 148725 - RNA, 23 nt, Human
uauggaccugcucuaggagcaga

SEQ ID NO: 148726 - RNA, 19 nt, Human
ucccagaggaaagaaagga

SEQ ID NO: 148727 - RNA, 20 nt, Human
ucccuuccccagacuuccca

SEQ ID NO: 148728 - RNA, 24 nt, Human
ucuacagaaauacagcaagggccu

SEQ ID NO: 148729 - RNA, 21 nt, Human
ucugcagacauccuuccucuc

SEQ ID NO: 148730 - RNA, 22 nt, Human
ucugucuuuucacuguugaucc

SEQ ID NO: 148731 - RNA, 21 nt, Human
ucuucccaucauuuggcaccc

SEQ ID NO: 148732 - RNA, 22 nt, Human
ucuucugucuuuucacuguuga

SEQ ID NO: 148733 - RNA, 21 nt, Human
ugccuaugaacguuucucaac

SEQ ID NO: 148734 - RNA, 19 nt, Human
uggcagaaaacagaacaaa

SEQ ID NO: 148735 - RNA, 20 nt, Human
uggcagaaaacagaacaaag

SEQ ID NO: 148736 - RNA, 21 nt, Human
uggcagaaaacagaacaaagu

SEQ ID NO: 148737 - RNA, 27 nt, Human
ugggaagaugaacuauaauaccaaaga

SEQ ID NO: 148738 - RNA, 18 nt, Human
ugguauggaccugcucua

SEQ ID NO: 148739 - RNA, 21 nt, Human
uuacucucacccugggaucug

SEQ ID NO: 148740 - RNA, 23 nt, Human
uucaaacucaaaacauaagaaac

SEQ ID NO: 148741 - RNA, 18 nt, Human
uucucaacuuccuaacac

SEQ ID NO: 148742 - RNA, 20 nt, Human
uucuucagcggucauucuua

SEQ ID NO: 148743 - RNA, 19 nt, Human
uuggagauccagcuuauuc

SEQ ID NO: 148744 - RNA, 24 nt, Human
uuuaaagaccccaagcccagacuc

SEQ ID NO: 148745 - RNA, 24 nt, Human
uuucauaguucaaaagaaaaacaa

SEQ ID NO: 148746 - RNA, 21 nt, Human
caacagaacaacagacuccga

SEQ ID NO: 148747 - RNA, 22 nt, Human
cacgccaacagaacaacagacu

SEQ ID NO: 148748 - RNA, 22 nt, Human
cagguagcacgccaacagaaca

SEQ ID NO: 148749 - RNA, 21 nt, Human
cuccgaugacgccagcuucaa

SEQ ID NO: 148750 - RNA, 19 nt, Human
gccuguucuuaaaacauaa

SEQ ID NO: 148751 - RNA, 23 nt, Human
uaaaacauaaaaugcucuuccaa

SEQ ID NO: 148752 - RNA, 22 nt, Human
uaaaaugcucuuccaauuccuc

SEQ ID NO: 148753 - RNA, 18 nt, Human
ucaaugauggugccaucc

SEQ ID NO: 148754 - RNA, 20 nt, Human
ucuuccaauuccucuugucc

SEQ ID NO: 148755 - RNA, 19 nt, Human
ugcgugucagccuguucuu

SEQ ID NO: 148756 - RNA, 25 nt, Human
uuagcaccauuuauuaagugaucuc

SEQ ID NO: 148757 - RNA, 18 nt, Human
uuuuuuuuuuuuuuuuug

SEQ ID NO: 148758 - RNA, 24 nt, Human
uuuuuuuuuuuuuuuuuugaguuu

SEQ ID NO: 148759 - RNA, 19 nt, Human
aaaaaggaccccaggggca

SEQ ID NO: 148760 - RNA, 22 nt, Human
aacagcaggggugguacagggg

SEQ ID NO: 148761 - RNA, 23 nt, Human
aacuccccaccccccagcgggaa

SEQ ID NO: 148762 - RNA, 21 nt, Human
aagagcccaccucuccacccu

SEQ ID NO: 148763 - RNA, 22 nt, Human
aagcagguagguaggugccaga

SEQ ID NO: 148764 - RNA, 23 nt, Human
aagcagguagguaggugccagaa

SEQ ID NO: 148765 - RNA, 19 nt, Human
acagagcagcccuguacau

SEQ ID NO: 148766 - RNA, 22 nt, Human
acagcaggggugguacaggggc

SEQ ID NO: 148767 - RNA, 18 nt, Human
acaucacaaugccccucc

SEQ ID NO: 148768 - RNA, 23 nt, Human
accaaauuucaaaauuuucaaga

SEQ ID NO: 148769 - RNA, 20 nt, Human
accagcaguccccaagucag

SEQ ID NO: 148770 - RNA, 20 nt, Human
accucuccacccugccccaa

SEQ ID NO: 148771 - RNA, 19 nt, Human
agaaaauaaaaaaaaggac

SEQ ID NO: 148772 - RNA, 21 nt, Human
agaaaauaaaaaaaaggaccc

SEQ ID NO: 148773 - RNA, 24 nt, Human
agagcccaccucuccacccugccc

SEQ ID NO: 148774 - RNA, 19 nt, Human
agcaggggugguacagggg

SEQ ID NO: 148775 - RNA, 20 nt, Human
agcagguagguaggugccag

SEQ ID NO: 148776 - RNA, 18 nt, Human
aggcaacagcaggggugg

SEQ ID NO: 148777 - RNA, 22 nt, Human
agguccccggccccaccagccc

SEQ ID NO: 148778 - RNA, 26 nt, Human
agguccccggccccaccagcccucag

SEQ ID NO: 148779 - RNA, 21 nt, Human
aggugccagaaaccccuugag

SEQ ID NO: 148780 - RNA, 25 nt, Human
auucauguuuaauaauuacaggcac

SEQ ID NO: 148781 - RNA, 19 nt, Human
caacagcaggggugguaca

SEQ ID NO: 148782 - RNA, 21 nt, Human
cacaaugccccucccucccuc

SEQ ID NO: 148783 - RNA, 19 nt, Human
caccagcaguccccaaguc

SEQ ID NO: 148784 - RNA, 22 nt, Human
cacccugccccaaucuuaagac

SEQ ID NO: 148785 - RNA, 23 nt, Human
cacccuggggcccaggaccccca

SEQ ID NO: 148786 - RNA, 23 nt, Human
caccgugcccccccuucccccug

SEQ ID NO: 148787 - RNA, 22 nt, Human
cacuacaggcacccacugccac

SEQ ID NO: 148788 - RNA, 18 nt, Human
cagccccaagccauccug

SEQ ID NO: 148789 - RNA, 25 nt, Human
cagcucccacccuuaagagaccccc

SEQ ID NO: 148790 - RNA, 19 nt, Human
caggaagagcccaccucuc

SEQ ID NO: 148791 - RNA, 23 nt, Human
caggaagagcccaccucuccacc

SEQ ID NO: 148792 - RNA, 24 nt, Human
cauccugccucuucagccacuuua

SEQ ID NO: 148793 - RNA, 23 nt, Human
cauccuggaggggggcccaggca

SEQ ID NO: 148794 - RNA, 18 nt, Human
ccaacuccccacccccca

SEQ ID NO: 148795 - RNA, 24 nt, Human
ccacccuuaagagacccuugaucu

SEQ ID NO: 148796 - RNA, 18 nt, Human
ccaccgccgcugcugccg

SEQ ID NO: 148797 - RNA, 20 nt, Human
ccacugccaccgccgcugcu

SEQ ID NO: 148798 - RNA, 24 nt, Human
ccacugccaccgccgcugcugccg

SEQ ID NO: 148799 - RNA, 25 nt, Human
ccagcagcgaggacggcaguccgag

SEQ ID NO: 148800 - RNA, 20 nt, Human
ccagcaguccccaagucagu

SEQ ID NO: 148801 - RNA, 21 nt, Human
ccaggcagccccaagccaucc

SEQ ID NO: 148802 - RNA, 22 nt, Human
cccaccucuccacccugcccca

SEQ ID NO: 148803 - RNA, 23 nt, Human
ccccaagccauccugccucuuca

SEQ ID NO: 148804 - RNA, 20 nt, Human
ccccaccagcaguccccaag

SEQ ID NO: 148805 - RNA, 19 nt, Human
ccccagcucccacccuuaa

SEQ ID NO: 148806 - RNA, 21 nt, Human
ccccagcucccacccuuaaga

SEQ ID NO: 148807 - RNA, 18 nt, Human
ccccaggggaggagaggg

SEQ ID NO: 148808 - RNA, 19 nt, Human
cccccccuucccccugccc

SEQ ID NO: 148809 - RNA, 22 nt, Human
ccccccuucccccugcccaggc

SEQ ID NO: 148810 - RNA, 19 nt, Human
cccucccucccucaucccu

SEQ ID NO: 148811 - RNA, 23 nt, Human
cccuguacaucacaaugccccuc

SEQ ID NO: 148812 - RNA, 20 nt, Human
ccgccgcugcugccgccccc

SEQ ID NO: 148813 - RNA, 21 nt, Human
ccgcugcugccgccccccugc

SEQ ID NO: 148814 - RNA, 19 nt, Human
ccgugcccccccuuccccc

SEQ ID NO: 148815 - RNA, 27 nt, Human
ccugcaguccaggcggcuagccggagc

SEQ ID NO: 148816 - RNA, 26 nt, Human
ccugccccagcucccacccuuaagag

SEQ ID NO: 148817 - RNA, 18 nt, Human
ccugccucuucagccacu

SEQ ID NO: 148818 - RNA, 22 nt, Human
cgggaagcagguagguaggugc

SEQ ID NO: 148819 - RNA, 23 nt, Human
cuccccaccccccagcgggaagc

SEQ ID NO: 148820 - RNA, 24 nt, Human
cugccaccgccgcugcugccgccc

SEQ ID NO: 148821 - RNA, 18 nt, Human
cuuaagacucugggccaa

SEQ ID NO: 148822 - RNA, 24 nt, Human
gaaagaaagcuauaagaugagugg

SEQ ID NO: 148823 - RNA, 19 nt, Human
gaagagcccaccucuccac

SEQ ID NO: 148824 - RNA, 23 nt, Human
gacacaucacacuacaggcaccc

SEQ ID NO: 148825 - RNA, 20 nt, Human
gacucugggccaacucccca

SEQ ID NO: 148826 - RNA, 22 nt, Human
gccaccgccgcugcugccgccc

SEQ ID NO: 148827 - RNA, 18 nt, Human
gcccaccucuccacccug

SEQ ID NO: 148828 - RNA, 19 nt, Human
gcccaccucuccacccugc

SEQ ID NO: 148829 - RNA, 21 nt, Human
gccgccccccugcaguccagg

SEQ ID NO: 148830 - RNA, 23 nt, Human
ggaagcagguagguaggugccag

SEQ ID NO: 148831 - RNA, 24 nt, Human
ggcauccuggaggggggcccaggc

SEQ ID NO: 148832 - RNA, 19 nt, Human
gggccaacuccccaccccc

SEQ ID NO: 148833 - RNA, 19 nt, Human
gggcuccagguccccggcc

SEQ ID NO: 148834 - RNA, 22 nt, Human
guacaggggcuggggcauaugc

SEQ ID NO: 148835 - RNA, 26 nt, Human
gugauuuucagaaaauaaaaaaaagg

SEQ ID NO: 148836 - RNA, 24 nt, Human
uaaaaaaaaggaccccaggggcag

SEQ ID NO: 148837 - RNA, 20 nt, Human
uaagagacccuugaucucac

SEQ ID NO: 148838 - RNA, 19 nt, Human
uaagaugagugggaagcag

SEQ ID NO: 148839 - RNA, 20 nt, Human
uaccccaccagcagucccca

SEQ ID NO: 148840 - RNA, 24 nt, Human
ucacacuacaggcacccacugcca

SEQ ID NO: 148841 - RNA, 22 nt, Human
uccauggggcuccagguccccg

SEQ ID NO: 148842 - RNA, 19 nt, Human
uccccggccccaccagccc

SEQ ID NO: 148843 - RNA, 21 nt, Human
ucccugccccagcucccaccc

SEQ ID NO: 148844 - RNA, 18 nt, Human
ugaucucacagagcagcc

SEQ ID NO: 148845 - RNA, 19 nt, Human
ugcccaggcaacagcaggg

SEQ ID NO: 148846 - RNA, 20 nt, Human
ugccccucccucccucaucc

SEQ ID NO: 148847 - RNA, 21 nt, Human
uggaggggggcccaggcagcc

SEQ ID NO: 148848 - RNA, 18 nt, Human
ugggccaacuccccaccc

SEQ ID NO: 148849 - RNA, 21 nt, Human
uguguccauggggcuccaggu

SEQ ID NO: 148850 - RNA, 18 nt, Human
uuccuccuugguuuggau

SEQ ID NO: 148851 - RNA, 21 nt, Human
uuccuccuugguuuggaucuc

SEQ ID NO: 148852 - RNA, 25 nt, Human
aaaagaauaauauuaauagaugggg

SEQ ID NO: 148853 - RNA, 18 nt, Human
aaaaucagggcaugaaca

SEQ ID NO: 148854 - RNA, 23 nt, Human
aacaaaaaaaagggggagggaag

SEQ ID NO: 148855 - RNA, 30 nt, Human
aaggggaacggaaaacaaaaaaaaggggga

SEQ ID NO: 148856 - RNA, 21 nt, Human
aagggggagggaagggggagg

SEQ ID NO: 148857 - RNA, 23 nt, Human
aauacuauaauaggagggaccaa

SEQ ID NO: 148858 - RNA, 20 nt, Human
aauggauaaucaaauauugc

SEQ ID NO: 148859 - RNA, 22 nt, Human
acgaucucucaaaacugaucag

SEQ ID NO: 148860 - RNA, 20 nt, Human
acugccucugcuugagaacu

SEQ ID NO: 148861 - RNA, 19 nt, Human
acuucaagggcauuaacga

SEQ ID NO: 148862 - RNA, 20 nt, Human
agaacucagcagcugccacc

SEQ ID NO: 148863 - RNA, 22 nt, Human
agaacucagcagcugccaccgc

SEQ ID NO: 148864 - RNA, 22 nt, Human
agcaacaguauguuuugcacaa

SEQ ID NO: 148865 - RNA, 19 nt, Human
agggaagggggaggaaggg

SEQ ID NO: 148866 - RNA, 19 nt, Human
agggggaggaaggagucgg

SEQ ID NO: 148867 - RNA, 20 nt, Human
agggggagggaagggggagg

SEQ ID NO: 148868 - RNA, 23 nt, Human
aguuuucuaacuuaaaacagccu

SEQ ID NO: 148869 - RNA, 21 nt, Human
auacaaguauauaaaaucagg

SEQ ID NO: 148870 - RNA, 23 nt, Human
augauaacuggcagcaaagaagg

SEQ ID NO: 148871 - RNA, 23 nt, Human
caacucaaguauuacugagcaag

SEQ ID NO: 148872 - RNA, 19 nt, Human
cagccuaugauaacuggca

SEQ ID NO: 148873 - RNA, 23 nt, Human
caggagaaaugaaauaccuucac

SEQ ID NO: 148874 - RNA, 23 nt, Human
ccaccuccauagagcuccgacuc

SEQ ID NO: 148875 - RNA, 21 nt, Human
ccaggcucaaggauauuaaaa

SEQ ID NO: 148876 - RNA, 22 nt, Human
cccaggcucaaggauauuaaaa

SEQ ID NO: 148877 - RNA, 21 nt, Human
cccauuacuagagguagaaau

SEQ ID NO: 148878 - RNA, 22 nt, Human
cucaaggauauuaaaaucuagc

SEQ ID NO: 148879 - RNA, 24 nt, Human
gaaaacaaaaaaaagggggaggga

SEQ ID NO: 148880 - RNA, 21 nt, Human
gaaggagucggggacggccuc

SEQ ID NO: 148881 - RNA, 21 nt, Human
gagggaagggggaggaaggag

SEQ ID NO: 148882 - RNA, 18 nt, Human
gcaaguaaaccauguuuc

SEQ ID NO: 148883 - RNA, 21 nt, Human
ggagggaagggggaggaagga

SEQ ID NO: 148884 - RNA, 22 nt, Human
ggcaauauacuauuacggcaac

SEQ ID NO: 148885 - RNA, 24 nt, Human
gggaagggggaggaaggagucggg

SEQ ID NO: 148886 - RNA, 20 nt, Human
gggagggaagggggaggaag

SEQ ID NO: 148887 - RNA, 25 nt, Human
gggagggaagggggaggaaggaguc

SEQ ID NO: 148888 - RNA, 19 nt, Human
gggguggggaggggagggg

SEQ ID NO: 148889 - RNA, 24 nt, Human
gggguggggaggggaggggacagg

SEQ ID NO: 148890 - RNA, 22 nt, Human
guugcuauucaguuuucuaacu

SEQ ID NO: 148891 - RNA, 24 nt, Human
uaaaacagccuaugauaacuggca

SEQ ID NO: 148892 - RNA, 22 nt, Human
uaagacauuacacuacaaaaaa

SEQ ID NO: 148893 - RNA, 21 nt, Human
uaauaggagggaccaauucaa

SEQ ID NO: 148894 - RNA, 19 nt, Human
uaauauacuaucuaaacau

SEQ ID NO: 148895 - RNA, 19 nt, Human
uaauauuaauagauggggu

SEQ ID NO: 148896 - RNA, 23 nt, Human
uacaaaaaaaccuuaugcagaag

SEQ ID NO: 148897 - RNA, 19 nt, Human
uacaucauagcaacaguau

SEQ ID NO: 148898 - RNA, 22 nt, Human
uagaaauacaggcaauauacua

SEQ ID NO: 148899 - RNA, 23 nt, Human
uagacuaugauuaagacauuaca

SEQ ID NO: 148900 - RNA, 21 nt, Human
uaucacaauguuuauugauag

SEQ ID NO: 148901 - RNA, 19 nt, Human
uauuacugagcaaagugca

SEQ ID NO: 148902 - RNA, 23 nt, Human
uauugugaaaacauuacagcgac

SEQ ID NO: 148903 - RNA, 21 nt, Human
ucaaggauauuaaaaucuagc

SEQ ID NO: 148904 - RNA, 18 nt, Human
ucacacccacaaaaacca

SEQ ID NO: 148905 - RNA, 24 nt, Human
ucagcagcugccaccgcagcugcc

SEQ ID NO: 148906 - RNA, 22 nt, Human
ucgcugcugcagccgccacucg

SEQ ID NO: 148907 - RNA, 20 nt, Human
ucuacaguauucaguguugc

SEQ ID NO: 148908 - RNA, 20 nt, Human
ugcaauagacugccucugcu

SEQ ID NO: 148909 - RNA, 19 nt, Human
ugcagaaggaaauccuaac

SEQ ID NO: 148910 - RNA, 19 nt, Human
uggggaggggaggggacag

SEQ ID NO: 148911 - RNA, 19 nt, Human
uggggaggggaggggacag

SEQ ID NO: 148912 - RNA, 20 nt, Human
uggggaggggaggggacagg

SEQ ID NO: 148913 - RNA, 23 nt, Human
uuaaauauugugaaaacauuaca

SEQ ID NO: 148914 - RNA, 23 nt, Human
uucaaaagaauaauauuaauaga

SEQ ID NO: 148915 - RNA, 22 nt, Human
uucuacaguauucaguguugcu

SEQ ID NO: 148916 - RNA, 20 nt, Human
uugaugguagacuaugauuc

SEQ ID NO: 148917 - RNA, 24 nt, Human
uuuuuuuuuuuuuuuuuuuucaag

SEQ ID NO: 148918 - RNA, 33 nt, Human
aaaaaaaaaaaaaaaagacuaaaccacaagccg

SEQ ID NO: 148919 - RNA, 27 nt, Human
aaaaaaagacuaaaccacaagcagcag

SEQ ID NO: 148920 - RNA, 20 nt, Human
aaaagacuaaaccacaagca

SEQ ID NO: 148921 - RNA, 20 nt, Human
aaccaaaauaaaacgucaaa

SEQ ID NO: 148922 - RNA, 22 nt, Human
aaccacaagcagcacccacccc

SEQ ID NO: 148923 - RNA, 22 nt, Human
aagaggcuucgauuccaacucg

SEQ ID NO: 148924 - RNA, 19 nt, Human
acccacccccuucuccccc

SEQ ID NO: 148925 - RNA, 19 nt, Human
accgccgccgccgcccucg

SEQ ID NO: 148926 - RNA, 20 nt, Human
aggcaggcgagggggcuggu

SEQ ID NO: 148927 - RNA, 21 nt, Human
aggcaggcgagggggcugguc

SEQ ID NO: 148928 - RNA, 21 nt, Human
agggcuaugggcaacagggga

SEQ ID NO: 148929 - RNA, 24 nt, Human
agucuguugggguggugcucaggg

SEQ ID NO: 148930 - RNA, 25 nt, Human
aucacugcugccaccaccgccaucc

SEQ ID NO: 148931 - RNA, 21 nt, Human
cacaagcagcacccacccccu

SEQ ID NO: 148932 - RNA, 19 nt, Human
caccagggcuguaguguga

SEQ ID NO: 148933 - RNA, 22 nt, Human
cacccccuucucccccaccagg

SEQ ID NO: 148934 - RNA, 23 nt, Human
cagcacccacccccuucuccccc

SEQ ID NO: 148935 - RNA, 22 nt, Human
cagguccccuccccucuccucc

SEQ ID NO: 148936 - RNA, 26 nt, Human
ccagagccaggccaggcucggggagg

SEQ ID NO: 148937 - RNA, 33 nt, Human
ccagauugaauuuaaaaaaaaaaaaaaaaaaaa

SEQ ID NO: 148938 - RNA, 24 nt, Human
ccaugggggcagggcccucccaga

SEQ ID NO: 148939 - RNA, 22 nt, Human
cccacccccuucucccccacca

SEQ ID NO: 148940 - RNA, 18 nt, Human
ccccucuccuccucuucc

SEQ ID NO: 148941 - RNA, 25 nt, Human
cccgcugccgccgccgccgccgccu

SEQ ID NO: 148942 - RNA, 18 nt, Human
ccgccgccgcccucgugc

SEQ ID NO: 148943 - RNA, 19 nt, Human
ccgccgccgcccucgugcc

SEQ ID NO: 148944 - RNA, 27 nt, Human
ccgccgccgccgccgccucuaccgccg

SEQ ID NO: 148945 - RNA, 27 nt, Human
ccgccgccgccgccucuaccgccgccg

SEQ ID NO: 148946 - RNA, 19 nt, Human
ccgccgccgccucuaccgc

SEQ ID NO: 148947 - RNA, 32 nt, Human
ccgccgccgccucuaccgccgccgccgccccc

SEQ ID NO: 148948 - RNA, 29 nt, Human
ccgccgccucuaccgccgccgccgccccc

SEQ ID NO: 148949 - RNA, 30 nt, Human
ccgccgccucuaccgccgccgccgcccuuc

SEQ ID NO: 148950 - RNA, 18 nt, Human
ccgcugccgccgccgccg

SEQ ID NO: 148951 - RNA, 23 nt, Human
ccgcugccgccgccgccgccgcc

SEQ ID NO: 148952 - RNA, 22 nt, Human
ccgcugccgccgccgccgccgg

SEQ ID NO: 148953 - RNA, 18 nt, Human
ccgggccagagccaggcc

SEQ ID NO: 148954 - RNA, 19 nt, Human
ccuccgagcccgcugccgc

SEQ ID NO: 148955 - RNA, 21 nt, Human
ccucuccuccucuucccuccc

SEQ ID NO: 148956 - RNA, 18 nt, Human
ccucuucccuccccaucu

SEQ ID NO: 148957 - RNA, 21 nt, Human
ccucuucccuccccaucuaaa

SEQ ID NO: 148958 - RNA, 21 nt, Human
cgccucuaccgccgccgccgc

SEQ ID NO: 148959 - RNA, 21 nt, Human
cucgccgcgagcccaaccgcu

SEQ ID NO: 148960 - RNA, 20 nt, Human
cugaggagggggcagguccc

SEQ ID NO: 148961 - RNA, 20 nt, Human
cugccgccgccgccgccgcc

SEQ ID NO: 148962 - RNA, 19 nt, Human
cuucucccccaccagggcu

SEQ ID NO: 148963 - RNA, 26 nt, Human
gaccagaccagggaugaguggggagg

SEQ ID NO: 148964 - RNA, 25 nt, Human
gagggcacaaggaccauuugccaga

SEQ ID NO: 148965 - RNA, 22 nt, Human
gaggggguggggaaaaccaaaa

SEQ ID NO: 148966 - RNA, 23 nt, Human
gcacccacccccuucucccccac

SEQ ID NO: 148967 - RNA, 18 nt, Human
gccaccaccgccauccug

SEQ ID NO: 148968 - RNA, 22 nt, Human
gcgaacgcacugacucgacccc

SEQ ID NO: 148969 - RNA, 20 nt, Human
ggagcuaggugaagggcagg

SEQ ID NO: 148970 - RNA, 26 nt, Human
ggagggcagcuucaccaaggccacaa

SEQ ID NO: 148971 - RNA, 20 nt, Human
ggcagggcccucccagaugc

SEQ ID NO: 148972 - RNA, 27 nt, Human
gggccagagccaggccaggcucgggga

SEQ ID NO: 148973 - RNA, 25 nt, Human
gggggcagggcccucccagaugccu

SEQ ID NO: 148974 - RNA, 25 nt, Human
guuuggggagagacacaggcaggcc

SEQ ID NO: 148975 - RNA, 21 nt, Human
uagugugaggggagaagagga

SEQ ID NO: 148976 - RNA, 23 nt, Human
uagugugaggggagaagaggagg

SEQ ID NO: 148977 - RNA, 23 nt, Human
ucuaccgccgccgccgcccucgu

SEQ ID NO: 148978 - RNA, 19 nt, Human
ucuccuccucuucccuccc

SEQ ID NO: 148979 - RNA, 23 nt, Human
ucugcagguucagaggaucacug

SEQ ID NO: 148980 - RNA, 25 nt, Human
ucugcagguucagaggaucacugcu

SEQ ID NO: 148981 - RNA, 23 nt, Human
ugaauuuaaaaaaaaaaaaaaag

SEQ ID NO: 148982 - RNA, 20 nt, Human
ugaggagggggcaggucccc

SEQ ID NO: 148983 - RNA, 20 nt, Human
ugaggggguggggaaaacca

SEQ ID NO: 148984 - RNA, 24 nt, Human
ugggggcagggcccucccagaugc

SEQ ID NO: 148985 - RNA, 23 nt, Human
uguaguuuuauucagguuugauu

SEQ ID NO: 148986 - RNA, 20 nt, Human
ugugaggggagaagaggagg

SEQ ID NO: 148987 - RNA, 20 nt, Human
uuaaaaaaaaaaaaaaaaaa

SEQ ID NO: 148988 - RNA, 21 nt, Human
aaaacccugguuuaucaucua

SEQ ID NO: 148989 - RNA, 21 nt, Human
aaacaacugagaaacaacuuu

SEQ ID NO: 148990 - RNA, 24 nt, Human
aaagcaaaaacaacugagaaacaa

SEQ ID NO: 148991 - RNA, 24 nt, Human
aaauuccaaagucaaauagcuacu

SEQ ID NO: 148992 - RNA, 23 nt, Human
aacccagcacaaucugaaaacaa

SEQ ID NO: 148993 - RNA, 20 nt, Human
aauugcuugcaaaacuaacc

SEQ ID NO: 148994 - RNA, 24 nt, Human
acaaauacaaacuuaggcuuccuc

SEQ ID NO: 148995 - RNA, 23 nt, Human
acaacugagaaacaacuuuucau

SEQ ID NO: 148996 - RNA, 24 nt, Human
acaaugaaaaaaaauuugacuaga

SEQ ID NO: 148997 - RNA, 24 nt, Human
acaggaaaaaauuauauuggaaca

SEQ ID NO: 148998 - RNA, 19 nt, Human
accaccauauaagguuaca

SEQ ID NO: 148999 - RNA, 19 nt, Human
acugucuuuugugucuucc

SEQ ID NO: 149000 - RNA, 20 nt, Human
agauuuaccaaaacaguuug

SEQ ID NO: 149001 - RNA, 21 nt, Human
agcaaaaggcacaaaaagccu

SEQ ID NO: 149002 - RNA, 22 nt, Human
agguaauacaaaguccaaaagc

SEQ ID NO: 149003 - RNA, 21 nt, Human
aguauaccucgaaugcaaaau

SEQ ID NO: 149004 - RNA, 18 nt, Human
aguggugugaucucagcu

SEQ ID NO: 149005 - RNA, 24 nt, Human
auaaaacauacagguaauacaaag

SEQ ID NO: 149006 - RNA, 22 nt, Human
auaguuggaaaacaagcauugc

SEQ ID NO: 149007 - RNA, 22 nt, Human
caaaguuaaaagcaaaaacaac

SEQ ID NO: 149008 - RNA, 23 nt, Human
caacuaaacgagaaaaagauuuc

SEQ ID NO: 149009 - RNA, 24 nt, Human
caauaccacuuuaugcuacauugu

SEQ ID NO: 149010 - RNA, 19 nt, Human
cacagagcaacuaaacgag

SEQ ID NO: 149011 - RNA, 22 nt, Human
cacaugguugcauguggccacc

SEQ ID NO: 149012 - RNA, 19 nt, Human
caccucuuuucccaacuca

SEQ ID NO: 149013 - RNA, 24 nt, Human
cagauaaacaagguacuguaugga

SEQ ID NO: 149014 - RNA, 21 nt, Human
cauaguaucauguaaagcaga

SEQ ID NO: 149015 - RNA, 20 nt, Human
caugguugcauguggccacc

SEQ ID NO: 149016 - RNA, 21 nt, Human
cauugcucugacuugaaagau

SEQ ID NO: 149017 - RNA, 27 nt, Human
ccacagagcaacuaaacgagaaaaaga

SEQ ID NO: 149018 - RNA, 23 nt, Human
cccggguucaagcaauucucaug

SEQ ID NO: 149019 - RNA, 19 nt, Human
ccuucugccaaccauaaga

SEQ ID NO: 149020 - RNA, 19 nt, Human
ccuucugcugucacuuucc

SEQ ID NO: 149021 - RNA, 18 nt, Human
cuaacuaaaacacaggaa

SEQ ID NO: 149022 - RNA, 19 nt, Human
cuagaauccuagccaucca

SEQ ID NO: 149023 - RNA, 18 nt, Human
cucaaaaaaaaaaaaaaa

SEQ ID NO: 149024 - RNA, 25 nt, Human
cucaaaaaaaaaaaaaaaaaaggaa

SEQ ID NO: 149025 - RNA, 22 nt, Human
cucacggcaaccuucacuuccc

SEQ ID NO: 149026 - RNA, 28 nt, Human
cucaugccucaaaaaaaaaaaaaaaaaa

SEQ ID NO: 149027 - RNA, 21 nt, Human
cugacuugaaagaugaacgua

SEQ ID NO: 149028 - RNA, 25 nt, Human
cuguuuuuuuuuuuguuuccaguuu

SEQ ID NO: 149029 - RNA, 18 nt, Human
cuugcaaaacuaacccag

SEQ ID NO: 149030 - RNA, 21 nt, Human
cuugcuaacuaacuuucaccc

SEQ ID NO: 149031 - RNA, 23 nt, Human
gaaugcaaaauuccaaagucaaa

SEQ ID NO: 149032 - RNA, 18 nt, Human
gacuagaggauggcauaa

SEQ ID NO: 149033 - RNA, 18 nt, Human
gacugacauacugaaaac

SEQ ID NO: 149034 - RNA, 26 nt, Human
gaguauuuacugauaaauauuacuau

SEQ ID NO: 149035 - RNA, 22 nt, Human
gaucugaguagacagagaaugu

SEQ ID NO: 149036 - RNA, 21 nt, Human
gcaguggugugaucucagcuc

SEQ ID NO: 149037 - RNA, 19 nt, Human
gccaccuucugcugucacu

SEQ ID NO: 149038 - RNA, 21 nt, Human
gggcaggggagaugguaguuu

SEQ ID NO: 149039 - RNA, 20 nt, Human
ggugugaucucagcucacgg

SEQ ID NO: 149040 - RNA, 21 nt, Human
guaaagcagaucacucccuuu

SEQ ID NO: 149041 - RNA, 24 nt, Human
uaaaagcaaaaacaacugagaaac

SEQ ID NO: 149042 - RNA, 18 nt, Human
uaagaagcagauaaacaa

SEQ ID NO: 149043 - RNA, 24 nt, Human
uaagagauuuaccaaaaccggggc

SEQ ID NO: 149044 - RNA, 24 nt, Human
uaauacaaaguccaaaagccuguc

SEQ ID NO: 149045 - RNA, 23 nt, Human
uacauuaagagauuuaccaaaac

SEQ ID NO: 149046 - RNA, 24 nt, Human
uacauuaagagauuuaccaaaaca

SEQ ID NO: 149047 - RNA, 22 nt, Human
uacuguauggaacgaucaaaac

SEQ ID NO: 149048 - RNA, 21 nt, Human
uauggcaguggugugaucuca

SEQ ID NO: 149049 - RNA, 21 nt, Human
ucaaaacuuggccugagcugu

SEQ ID NO: 149050 - RNA, 21 nt, Human
ucaacccucuuugccacuguc

SEQ ID NO: 149051 - RNA, 24 nt, Human
ucaugccucaaaaaaaaaaaaaaa

SEQ ID NO: 149052 - RNA, 20 nt, Human
ucccggguucaagcaauucu

SEQ ID NO: 149053 - RNA, 21 nt, Human
ucccggguucaagcaauucuc

SEQ ID NO: 149054 - RNA, 24 nt, Human
ucccggguucaagcaauucucaug

SEQ ID NO: 149055 - RNA, 18 nt, Human
uccgaucagaaaugccac

SEQ ID NO: 149056 - RNA, 22 nt, Human
ucgaaugcaaaauuccaaaguc

SEQ ID NO: 149057 - RNA, 24 nt, Human
ucucaugccucaaaaaaaaaaaaa

SEQ ID NO: 149058 - RNA, 21 nt, Human
ucuucugauaauuaauccuag

SEQ ID NO: 149059 - RNA, 22 nt, Human
ugaaaaaaaauuugacuagagg

SEQ ID NO: 149060 - RNA, 23 nt, Human
ugaaaaaaaauuugacuagagga

SEQ ID NO: 149061 - RNA, 22 nt, Human
ugaaagaugaacguauauauga

SEQ ID NO: 149062 - RNA, 18 nt, Human
ugacauacugaaaaccac

SEQ ID NO: 149063 - RNA, 18 nt, Human
ugcaaaacuaacccagca

SEQ ID NO: 149064 - RNA, 20 nt, Human
uggaaaacaagcauugcaua

SEQ ID NO: 149065 - RNA, 22 nt, Human
ugggcaggggagaugguaguuu

SEQ ID NO: 149066 - RNA, 24 nt, Human
uggugugaucucagcucacggcaa

SEQ ID NO: 149067 - RNA, 23 nt, Human
ugucauguuuauggcaguggugu

SEQ ID NO: 149068 - RNA, 18 nt, Human
uguuguccaaggacacaa

SEQ ID NO: 149069 - RNA, 21 nt, Human
uguuuauggcaguggugugau

SEQ ID NO: 149070 - RNA, 19 nt, Human
uuaaaacccugguuuauca

SEQ ID NO: 149071 - RNA, 22 nt, Human
uuaaaagcaaaaacaacugaga

SEQ ID NO: 149072 - RNA, 26 nt, Human
uuaaaagcaaaaacaacugagaaaca

SEQ ID NO: 149073 - RNA, 21 nt, Human
uucaagaaaugacaguauacc

SEQ ID NO: 149074 - RNA, 24 nt, Human
uucaagaaaugacaguauaccucg

SEQ ID NO: 149075 - RNA, 20 nt, Human
uucaauaccacuuuaugcua

SEQ ID NO: 149076 - RNA, 23 nt, Human
uucacccaacaguucagugcccu

SEQ ID NO: 149077 - RNA, 20 nt, Human
uuccaagaagaggcuguuuu

SEQ ID NO: 149078 - RNA, 24 nt, Human
uuuuuuuuuuuuuuuuuuuuuggg

SEQ ID NO: 149079 - RNA, 21 nt, Human
ccagaugcuggagaguguggg

SEQ ID NO: 149080 - RNA, 24 nt, Human
ccagaugcuggagagugugggugu

SEQ ID NO: 149081 - RNA, 23 nt, Human
cuggggcuccggggucucugccc

SEQ ID NO: 149082 - RNA, 18 nt, Human
ggggcuggggcuccgggg

SEQ ID NO: 149083 - RNA, 19 nt, Human
ggggcuggggcuccggggu

SEQ ID NO: 149084 - RNA, 19 nt, Human
uccggggucucugccccuc

SEQ ID NO: 149085 - RNA, 21 nt, Human
uggggcuggggcuccgggguc

SEQ ID NO: 149086 - RNA, 18 nt, Human
aaacugagaaagccgccg

SEQ ID NO: 149087 - RNA, 21 nt, Human
acgcccgcguuucccgugccc

SEQ ID NO: 149088 - RNA, 21 nt, Human
cgcccgcguuucccgugcccu

SEQ ID NO: 149089 - RNA, 23 nt, Human
cuugcuuccguguggcagccucc

SEQ ID NO: 149090 - RNA, 22 nt, Human
gacccacugauccuguuacucu

SEQ ID NO: 149091 - RNA, 20 nt, Human
gcccgucuccaccaaaacug

SEQ ID NO: 149092 - RNA, 21 nt, Human
gccuccugggggaccgugcuc

SEQ ID NO: 149093 - RNA, 19 nt, Human
ggagcccaagccucggcac

SEQ ID NO: 149094 - RNA, 19 nt, Human
ggagggcagauacgggugc

SEQ ID NO: 149095 - RNA, 23 nt, Human
uaaaaacugccuugaaaugaaau

SEQ ID NO: 149096 - RNA, 20 nt, Human
uaagucucggacacuuagac

SEQ ID NO: 149097 - RNA, 22 nt, Human
uaccagcaaggagggcagauac

SEQ ID NO: 149098 - RNA, 26 nt, Human
ucaaucuuuauugcagcugaaauacu

SEQ ID NO: 149099 - RNA, 18 nt, Human
uccaccaaaacugagaaa

SEQ ID NO: 149100 - RNA, 19 nt, Human
ucuccaccaaaacugagaa

SEQ ID NO: 149101 - RNA, 19 nt, Human
ucucuggugugcagggaau

SEQ ID NO: 149102 - RNA, 24 nt, Human
ugaaaugaaauuaguucaucugcu

SEQ ID NO: 149103 - RNA, 18 nt, Human
ugccuugaaaugaaauua

SEQ ID NO: 149104 - RNA, 23 nt, Human
uucaucugcuugcuuccgugugg

SEQ ID NO: 149105 - RNA, 22 nt, Human
uuccguguggcagccuccuggc

SEQ ID NO: 149106 - RNA, 18 nt, Human
uuuuuuuuuuuuuuuuug

SEQ ID NO: 149107 - RNA, 19 nt, Human
uuuuuuuuuuuuuuuuugc

SEQ ID NO: 149108 - RNA, 21 nt, Human
uuuuuuuuuuuuuuuuugcaa

SEQ ID NO: 149109 - RNA, 18 nt, Human
acaaaaaaagcaugagcg

SEQ ID NO: 149110 - RNA, 22 nt, Human
caaagacaaacacuugugaaaa

SEQ ID NO: 149111 - RNA, 18 nt, Human
cgggcgggaggcggcggc

SEQ ID NO: 149112 - RNA, 30 nt, Human
gcgggcccggggcugcuccggggcgggcgg

SEQ ID NO: 149113 - RNA, 19 nt, Human
ggaggcggcggcggcgcgg

SEQ ID NO: 149114 - RNA, 19 nt, Human
ggcgggaggcggcggcggc

SEQ ID NO: 149115 - RNA, 20 nt, Human
gggcccggggcugcuccggg

SEQ ID NO: 149116 - RNA, 23 nt, Human
gggcgggcgggaggcggcggcgg

SEQ ID NO: 149117 - RNA, 19 nt, Human
ucagacaaagacaaacacu

SEQ ID NO: 149118 - RNA, 23 nt, Human
ucggccucgguagcgguggcggc

SEQ ID NO: 149119 - RNA, 23 nt, Human
uguacacuaacaagaaaaguuuc

SEQ ID NO: 149120 - RNA, 22 nt, Human
uucaacuccuucacucuuaauu

SEQ ID NO: 149121 - RNA, 19 nt, Human
aaaaaaaagacacaaccaa

SEQ ID NO: 149122 - RNA, 23 nt, Human
aaaaaaaagacacaaccaacuga

SEQ ID NO: 149123 - RNA, 27 nt, Human
aaaaaaaagacacaaccaacugaagaa

SEQ ID NO: 149124 - RNA, 25 nt, Human
aaaaaggaaaaaggggggaaaaaaa

SEQ ID NO: 149125 - RNA, 21 nt, Human
aaaagaagcaaauaaaaagaa

SEQ ID NO: 149126 - RNA, 22 nt, Human
aaaaggggcaagaaaaacaaac

SEQ ID NO: 149127 - RNA, 21 nt, Human
aaacagacauaacagcaaugc

SEQ ID NO: 149128 - RNA, 20 nt, Human
aaagaagcaaauaaaaagaa

SEQ ID NO: 149129 - RNA, 19 nt, Human
aaagacacaaccaacugaa

SEQ ID NO: 149130 - RNA, 21 nt, Human
aaagacggagagacuacccuc

SEQ ID NO: 149131 - RNA, 22 nt, Human
aagaaaagagacgaaagaacgu

SEQ ID NO: 149132 - RNA, 20 nt, Human
aagaacagaaauagggggag

SEQ ID NO: 149133 - RNA, 20 nt, Human
aagaguuuaaaaagacggaa

SEQ ID NO: 149134 - RNA, 23 nt, Human
aaggggggaaaaaaaagacacaa

SEQ ID NO: 149135 - RNA, 22 nt, Human
acagguaaaacccuguaccucu

SEQ ID NO: 149136 - RNA, 21 nt, Human
acauaacagcaaugcuuuaaa

SEQ ID NO: 149137 - RNA, 21 nt, Human
agaaaaacaaaccaaggaaca

SEQ ID NO: 149138 - RNA, 23 nt, Human
agaaaaacaaaccaaggaacaaa

SEQ ID NO: 149139 - RNA, 26 nt, Human
agaaaaacaaaccaaggaacaaagaa

SEQ ID NO: 149140 - RNA, 19 nt, Human
agaaacgcuuucgaccccc

SEQ ID NO: 149141 - RNA, 18 nt, Human
agaaauagggggaggacc

SEQ ID NO: 149142 - RNA, 20 nt, Human
agacagcacgaaaccuaaac

SEQ ID NO: 149143 - RNA, 27 nt, Human
aggaacaaagaaaagagaccgguaccc

SEQ ID NO: 149144 - RNA, 18 nt, Human
caaaccaaggaacaaaga

SEQ ID NO: 149145 - RNA, 21 nt, Human
caacugaagaauuacaacaca

SEQ ID NO: 149146 - RNA, 18 nt, Human
caaggaacaaagaaaaga

SEQ ID NO: 149147 - RNA, 25 nt, Human
cagcaaugcuuuaaauguaaaccaa

SEQ ID NO: 149148 - RNA, 19 nt, Human
caggcucacaguaacuaug

SEQ ID NO: 149149 - RNA, 20 nt, Human
caucucuaacuaagaacaga

SEQ ID NO: 149150 - RNA, 19 nt, Human
ccccaaaguccaaagcuaa

SEQ ID NO: 149151 - RNA, 21 nt, Human
cccccccuuccccaacccaaa

SEQ ID NO: 149152 - RNA, 18 nt, Human
ccuguaccucuuguccau

SEQ ID NO: 149153 - RNA, 22 nt, Human
cuaaaagaaauggcccaaaaaa

SEQ ID NO: 149154 - RNA, 19 nt, Human
cucacagguucaaggcagu

SEQ ID NO: 149155 - RNA, 24 nt, Human
cucuuaagacagcacgaaaccuaa

SEQ ID NO: 149156 - RNA, 26 nt, Human
cugaagaauuacaacacaaagccuca

SEQ ID NO: 149157 - RNA, 24 nt, Human
cuguaccucuuguccauauucaac

SEQ ID NO: 149158 - RNA, 23 nt, Human
cuuguccauauucaacauaaaag

SEQ ID NO: 149159 - RNA, 25 nt, Human
cuuuaaauguaaaccaaacacaaag

SEQ ID NO: 149160 - RNA, 25 nt, Human
gaaaaaaaagacacaaccaacugaa

SEQ ID NO: 149161 - RNA, 29 nt, Human
gaaaaaaaagacacaaccaacugaagaag

SEQ ID NO: 149162 - RNA, 18 nt, Human
gacugaggacaagagcuc

SEQ ID NO: 149163 - RNA, 27 nt, Human
gcaagaaaaacaaaccaaggaacaaag

SEQ ID NO: 149164 - RNA, 18 nt, Human
gccuccuucaacugccuu

SEQ ID NO: 149165 - RNA, 26 nt, Human
gcugcugcaucucuaaccgggugucc

SEQ ID NO: 149166 - RNA, 23 nt, Human
ggcaagaaaaacaaaccaaggaa

SEQ ID NO: 149167 - RNA, 25 nt, Human
uaaaaagaaacgcuuucgaccccca

SEQ ID NO: 149168 - RNA, 18 nt, Human
uaaaagaaauggcccaaa

SEQ ID NO: 149169 - RNA, 22 nt, Human
uaaaagaagcaaauaaaaagaa

SEQ ID NO: 149170 - RNA, 20 nt, Human
uaaacuucaaaauacuuuuc

SEQ ID NO: 149171 - RNA, 19 nt, Human
uaaaguaacggugcaguuc

SEQ ID NO: 149172 - RNA, 25 nt, Human
uaagaacagaaauagggggaggacg

SEQ ID NO: 149173 - RNA, 19 nt, Human
uaagacagcacgaaaccua

SEQ ID NO: 149174 - RNA, 18 nt, Human
uacaacacaaagccucaa

SEQ ID NO: 149175 - RNA, 24 nt, Human
uagcccccccuuccccaacccaaa

SEQ ID NO: 149176 - RNA, 23 nt, Human
ucaaagaaggcaauagaaugcaa

SEQ ID NO: 149177 - RNA, 23 nt, Human
ucaacacugacuuacaaagacau

SEQ ID NO: 149178 - RNA, 23 nt, Human
ucacagguucaaggcaguuaugu

SEQ ID NO: 149179 - RNA, 21 nt, Human
ucaccaaccccuucucugccu

SEQ ID NO: 149180 - RNA, 24 nt, Human
ucaccaaccccuucucugccuccu

SEQ ID NO: 149181 - RNA, 24 nt, Human
uccaaagcuaaaagaaauggccca

SEQ ID NO: 149182 - RNA, 23 nt, Human
ucucugccuccuucaacugccuu

SEQ ID NO: 149183 - RNA, 19 nt, Human
ugaaacacuuuaaaagguc

SEQ ID NO: 149184 - RNA, 18 nt, Human
ugaaaggggaggggaaac

SEQ ID NO: 149185 - RNA, 24 nt, Human
ugacagguaaaacccuguaccucu

SEQ ID NO: 149186 - RNA, 20 nt, Human
ugacuuacaaagacauuuac

SEQ ID NO: 149187 - RNA, 21 nt, Human
ugccuccuucaacugccuuuu

SEQ ID NO: 149188 - RNA, 20 nt, Human
uuaaaaagacggagagacua

SEQ ID NO: 149189 - RNA, 23 nt, Human
uuaaacagacauaacagcaaugc

SEQ ID NO: 149190 - RNA, 24 nt, Human
uuaaaguaacggugcaguucuccc

SEQ ID NO: 149191 - RNA, 22 nt, Human
uuauguaaaaagaaaagaaaug

SEQ ID NO: 149192 - RNA, 24 nt, Human
uucaacauaaaagauauuuaagaa

SEQ ID NO: 149193 - RNA, 18 nt, Human
uucgacccccaaagucca

SEQ ID NO: 149194 - RNA, 20 nt, Human
uuucucuuaacuugccuuug

SEQ ID NO: 149195 - RNA, 24 nt, Human
aaacaaaaaccuucaccaugaacc

SEQ ID NO: 149196 - RNA, 20 nt, Human
aaccuguuccuccuacccca

SEQ ID NO: 149197 - RNA, 23 nt, Human
agcccagccuggggugggggcag

SEQ ID NO: 149198 - RNA, 21 nt, Human
agccgaaaaaagaaacaaaaa

SEQ ID NO: 149199 - RNA, 19 nt, Human
agggggugggagggcaggc

SEQ ID NO: 149200 - RNA, 21 nt, Human
agggggugggagggcaggcgg

SEQ ID NO: 149201 - RNA, 19 nt, Human
agggugggggugggggcaa

SEQ ID NO: 149202 - RNA, 26 nt, Human
caaaaauagaguuuuucuuccccucc

SEQ ID NO: 149203 - RNA, 18 nt, Human
caagacgagagagugaac

SEQ ID NO: 149204 - RNA, 18 nt, Human
cacaucucugcauucuuu

SEQ ID NO: 149205 - RNA, 19 nt, Human
caccaugaaccaaaccaag

SEQ ID NO: 149206 - RNA, 22 nt, Human
cacuccuaggggggcgcccgau

SEQ ID NO: 149207 - RNA, 27 nt, Human
caucucugcauucuuuuuagccgaaaa

SEQ ID NO: 149208 - RNA, 19 nt, Human
ccacaccccuccucacggu

SEQ ID NO: 149209 - RNA, 21 nt, Human
ccaggccccaccuaggugcug

SEQ ID NO: 149210 - RNA, 19 nt, Human
cccaccccagagugcucac

SEQ ID NO: 149211 - RNA, 21 nt, Human
cccaguaaaaauucuccacga

SEQ ID NO: 149212 - RNA, 24 nt, Human
ccccuggagccccccaagccaucc

SEQ ID NO: 149213 - RNA, 25 nt, Human
ccccuggagccccccaagccauccc

SEQ ID NO: 149214 - RNA, 24 nt, Human
cccugcagacccucccaccccaga

SEQ ID NO: 149215 - RNA, 21 nt, Human
ccgaaaaaagaaacaaaaacc

SEQ ID NO: 149216 - RNA, 18 nt, Human
ccuccuaccccaggcccc

SEQ ID NO: 149217 - RNA, 23 nt, Human
ccugcagacccucccaccccaga

SEQ ID NO: 149218 - RNA, 21 nt, Human
ccugcagacccucccaccccg

SEQ ID NO: 149219 - RNA, 27 nt, Human
ccuguuccuccuaccccaggccccacc

SEQ ID NO: 149220 - RNA, 19 nt, Human
cgaaaaaagaaacaaaaac

SEQ ID NO: 149221 - RNA, 25 nt, Human
cucucugcugcccggggagggggug

SEQ ID NO: 149222 - RNA, 21 nt, Human
cuggagccccccaagccaucc

SEQ ID NO: 149223 - RNA, 21 nt, Human
cuggggugggggcaggaggau

SEQ ID NO: 149224 - RNA, 25 nt, Human
gaaacaaaaaccuucaccaugaacc

SEQ ID NO: 149225 - RNA, 20 nt, Human
gaggauggggcgggggaucc

SEQ ID NO: 149226 - RNA, 23 nt, Human
gagugcucacccuguggcuuccg

SEQ ID NO: 149227 - RNA, 21 nt, Human
gcccagccuggggugggggca

SEQ ID NO: 149228 - RNA, 19 nt, Human
gccccacugccugcucccc

SEQ ID NO: 149229 - RNA, 22 nt, Human
gccugcucccccgcauuccacc

SEQ ID NO: 149230 - RNA, 22 nt, Human
ggagccccccaagccaucccau

SEQ ID NO: 149231 - RNA, 18 nt, Human
ggaggccugggcaagggg

SEQ ID NO: 149232 - RNA, 19 nt, Human
ggcaggaggauggggcggg

SEQ ID NO: 149233 - RNA, 24 nt, Human
ggccugggcaagggggucugggag

SEQ ID NO: 149234 - RNA, 21 nt, Human
gggagggggugggagggcagg

SEQ ID NO: 149235 - RNA, 18 nt, Human
gggcacccccccaauucc

SEQ ID NO: 149236 - RNA, 18 nt, Human
gggcaggaggauggggcg

SEQ ID NO: 149237 - RNA, 20 nt, Human
gggcaggaggauggggcggg

SEQ ID NO: 149238 - RNA, 22 nt, Human
gggcaggaggauggggcggggg

SEQ ID NO: 149239 - RNA, 19 nt, Human
gggcgcgguccguguugag

SEQ ID NO: 149240 - RNA, 19 nt, Human
gggggcacaucucugcauu

SEQ ID NO: 149241 - RNA, 23 nt, Human
gggggugcccacaccccuccuca

SEQ ID NO: 149242 - RNA, 20 nt, Human
gggggugggagggcaggcgg

SEQ ID NO: 149243 - RNA, 19 nt, Human
gggugggggcaggaggaug

SEQ ID NO: 149244 - RNA, 18 nt, Human
gguggucgaggguggggg

SEQ ID NO: 149245 - RNA, 22 nt, Human
gguggugcacuccuaggggggc

SEQ ID NO: 149246 - RNA, 18 nt, Human
gucacgcugggguccgcc

SEQ ID NO: 149247 - RNA, 21 nt, Human
uaaaaauucuccacgaggucu

SEQ ID NO: 149248 - RNA, 23 nt, Human
uaccccaggccccaccuaggugc

SEQ ID NO: 149249 - RNA, 18 nt, Human
uagccgaaaaaagaaaca

SEQ ID NO: 149250 - RNA, 27 nt, Human
ucacccuguggcuuccgcagggacugg

SEQ ID NO: 149251 - RNA, 18 nt, Human
uccccgggcaccccccca

SEQ ID NO: 149252 - RNA, 22 nt, Human
uccccgggcacccccccaauuc

SEQ ID NO: 149253 - RNA, 18 nt, Human
ucucucucuuucucucuc

SEQ ID NO: 149254 - RNA, 18 nt, Human
ucucugcauucuuuuuac

SEQ ID NO: 149255 - RNA, 19 nt, Human
ucuuucucucucucucucc

SEQ ID NO: 149256 - RNA, 18 nt, Human
ugaggggggcuccggggg

SEQ ID NO: 149257 - RNA, 22 nt, Human
ugcugucucucuugggccccuu

SEQ ID NO: 149258 - RNA, 20 nt, Human
uggggcccucgcgucguccg

SEQ ID NO: 149259 - RNA, 19 nt, Human
ugggggcaggaggaugggg

SEQ ID NO: 149260 - RNA, 19 nt, Human
ugggggcaggaggaugggg

SEQ ID NO: 149261 - RNA, 20 nt, Human
ugggggugggggcacaucuc

SEQ ID NO: 149262 - RNA, 19 nt, Human
uggucgagggugggggugg

SEQ ID NO: 149263 - RNA, 20 nt, Human
ugugugcccggcgggcgcgg

SEQ ID NO: 149264 - RNA, 27 nt, Human
uucccugcagacccucccaccccagag

SEQ ID NO: 149265 - RNA, 20 nt, Human
uuucauuuuguuucugcuuc

SEQ ID NO: 149266 - RNA, 20 nt, Human
uuuuucuuccccucccaccc

SEQ ID NO: 149267 - RNA, 26 nt, Human
uuuuucuuccccucccaccccccuuu

SEQ ID NO: 149268 - RNA, 20 nt, Human
uuuuuuuuuuuuuuuuuugg

SEQ ID NO: 149269 - RNA, 24 nt, Human
uuuuuuuuuuuuuuuuuugucuuu

SEQ ID NO: 149270 - RNA, 25 nt, Human
aaaaagaaaaggagcagugagcuga

SEQ ID NO: 149271 - RNA, 19 nt, Human
aaagaaaaaaaagaaaagg

SEQ ID NO: 149272 - RNA, 19 nt, Human
agaaaaaaaagaaaaggag

SEQ ID NO: 149273 - RNA, 28 nt, Human
auauaauuaaagauccacaaaacacagg

SEQ ID NO: 149274 - RNA, 22 nt, Human
augugugugugugcgcgcgugu

SEQ ID NO: 149275 - RNA, 23 nt, Human
augugugugugugcgcgcgugug

SEQ ID NO: 149276 - RNA, 23 nt, Human
gagcagugagcugaaacccccga

SEQ ID NO: 149277 - RNA, 23 nt, Human
uaugugugugugugcgcgcgugu

SEQ ID NO: 149278 - RNA, 21 nt, Human
uauuggcaaauauugggucuc

SEQ ID NO: 149279 - RNA, 21 nt, Human
ucagaauauauauuuaaaaug

SEQ ID NO: 149280 - RNA, 24 nt, Human
ucuguuaaaauuugcaaagauuuc

SEQ ID NO: 149281 - RNA, 20 nt, Human
ugugugugugcgcgcgugug

SEQ ID NO: 149282 - RNA, 26 nt, Human
ugugugugugcgcgcguguguuuuga

SEQ ID NO: 149283 - RNA, 23 nt, Human
uuaauacuuaggcaacacuggcu

SEQ ID NO: 149284 - RNA, 23 nt, Human
uucuaagcauuauaaaauccuuu

SEQ ID NO: 149285 - RNA, 22 nt, Human
uucucucucuuucguguaugug

SEQ ID NO: 149286 - RNA, 21 nt, Human
uuuuugggggggugggcgggg

SEQ ID NO: 149287 - RNA, 19 nt, Human
uuuuuuuuuuuuuuucuaa

SEQ ID NO: 149288 - RNA, 20 nt, Human
aaagaagugcuggagccccu

SEQ ID NO: 149289 - RNA, 23 nt, Human
aaaucaguccuaaacaaggacaa

SEQ ID NO: 149290 - RNA, 20 nt, Human
aagucagcuucaaaccccag

SEQ ID NO: 149291 - RNA, 21 nt, Human
acaucagguccaaacccuagc

SEQ ID NO: 149292 - RNA, 22 nt, Human
agacaaagguuagaaaaagccc

SEQ ID NO: 149293 - RNA, 18 nt, Human
agaugcuucugaccucag

SEQ ID NO: 149294 - RNA, 19 nt, Human
aggcaggccggcaggcggg

SEQ ID NO: 149295 - RNA, 20 nt, Human
aggcaggccggcaggcggga

SEQ ID NO: 149296 - RNA, 18 nt, Human
aggguggggaggcgaggc

SEQ ID NO: 149297 - RNA, 19 nt, Human
aggguggggaggcgaggcc

SEQ ID NO: 149298 - RNA, 19 nt, Human
auacaguuuacagcacacu

SEQ ID NO: 149299 - RNA, 21 nt, Human
auccaaaggcccaaauuucag

SEQ ID NO: 149300 - RNA, 22 nt, Human
caaaacaucagcuucucuccac

SEQ ID NO: 149301 - RNA, 22 nt, Human
caauacaccaaaacaucagcuu

SEQ ID NO: 149302 - RNA, 23 nt, Human
caauucuagacaucuugagaaca

SEQ ID NO: 149303 - RNA, 22 nt, Human
cagcagaugcuucugaccucag

SEQ ID NO: 149304 - RNA, 23 nt, Human
cagcuucucuccacagcacagcu

SEQ ID NO: 149305 - RNA, 21 nt, Human
cagguccaaacccuagccuaa

SEQ ID NO: 149306 - RNA, 19 nt, Human
caucacggugcucccuagg

SEQ ID NO: 149307 - RNA, 22 nt, Human
ccaacagucucagcugcuuccu

SEQ ID NO: 149308 - RNA, 24 nt, Human
ccaagcacugagcagggaggugaa

SEQ ID NO: 149309 - RNA, 23 nt, Human
ccacaccugcuacaggaaaucug

SEQ ID NO: 149310 - RNA, 21 nt, Human
ccagaaagaagugcuggagcc

SEQ ID NO: 149311 - RNA, 21 nt, Human
cccacaccugcuacaggaaau

SEQ ID NO: 149312 - RNA, 20 nt, Human
ccccugcucuguccucucca

SEQ ID NO: 149313 - RNA, 18 nt, Human
cccugcucuguccucucc

SEQ ID NO: 149314 - RNA, 24 nt, Human
ccggcucuaaauagagccugcguc

SEQ ID NO: 149315 - RNA, 19 nt, Human
ccucaguguucugaguuca

SEQ ID NO: 149316 - RNA, 19 nt, Human
ccucccagcccaguccaug

SEQ ID NO: 149317 - RNA, 21 nt, Human
cuagggccucccaagccuccu

SEQ ID NO: 149318 - RNA, 21 nt, Human
cucccagcccaguccaugugu

SEQ ID NO: 149319 - RNA, 18 nt, Human
cuccccuacccggcucua

SEQ ID NO: 149320 - RNA, 18 nt, Human
cucucucucucucucucu

SEQ ID NO: 149321 - RNA, 21 nt, Human
cugcauuuagugucugagacu

SEQ ID NO: 149322 - RNA, 24 nt, Human
cuguccucuccaucacggugcucc

SEQ ID NO: 149323 - RNA, 19 nt, Human
cuucauuuuccuccccucc

SEQ ID NO: 149324 - RNA, 23 nt, Human
cuucgucagccuuugcccucacc

SEQ ID NO: 149325 - RNA, 21 nt, Human
cuuggucaaggucaaggucac

SEQ ID NO: 149326 - RNA, 22 nt, Human
cuuguaacguucuccaacaguc

SEQ ID NO: 149327 - RNA, 25 nt, Human
gaauucgcggccgcgucgaccucga

SEQ ID NO: 149328 - RNA, 22 nt, Human
gaggggaauguuuuagaaaaaa

SEQ ID NO: 149329 - RNA, 18 nt, Human
gaguggggaggggaaugu

SEQ ID NO: 149330 - RNA, 23 nt, Human
gaugcuucugaccucaguguucu

SEQ ID NO: 149331 - RNA, 24 nt, Human
gcaaaaccaucuauuccacaaggc

SEQ ID NO: 149332 - RNA, 18 nt, Human
gcccucacccucauccug

SEQ ID NO: 149333 - RNA, 20 nt, Human
ggagaaaggagcugggagcc

SEQ ID NO: 149334 - RNA, 18 nt, Human
ggagaggaguggggaggg

SEQ ID NO: 149335 - RNA, 18 nt, Human
ggagaggaguggggaggg

SEQ ID NO: 149336 - RNA, 21 nt, Human
ggagugcucugaccccugccc

SEQ ID NO: 149337 - RNA, 22 nt, Human
gggucccagcaucagcccacug

SEQ ID NO: 149338 - RNA, 19 nt, Human
uaaagucagcuucaaaccc

SEQ ID NO: 149339 - RNA, 21 nt, Human
uaacguucuccaacagucuca

SEQ ID NO: 149340 - RNA, 22 nt, Human
uaagacaaagguuagaaaaagc

SEQ ID NO: 149341 - RNA, 21 nt, Human
uacacagguagcuaagacaaa

SEQ ID NO: 149342 - RNA, 27 nt, Human
uacaccaaaacaucagcuucucuccaa

SEQ ID NO: 149343 - RNA, 18 nt, Human
uagaaaaagcccagaagg

SEQ ID NO: 149344 - RNA, 20 nt, Human
uagaaaaagcccagaaggca

SEQ ID NO: 149345 - RNA, 18 nt, Human
uagcacauaaauuaggga

SEQ ID NO: 149346 - RNA, 22 nt, Human
uagggccucccaagccuccuug

SEQ ID NO: 149347 - RNA, 20 nt, Human
ucaaggucacucgagcggug

SEQ ID NO: 149348 - RNA, 25 nt, Human
ucacccucauccugguagaccuuca

SEQ ID NO: 149349 - RNA, 22 nt, Human
uccagaaagaagugcuggagcc

SEQ ID NO: 149350 - RNA, 24 nt, Human
uccagaaagaagugcuggagcccc

SEQ ID NO: 149351 - RNA, 21 nt, Human
ucccagcccaguccauguguc

SEQ ID NO: 149352 - RNA, 23 nt, Human
ucccaggaagguuugcaggccuc

SEQ ID NO: 149353 - RNA, 21 nt, Human
uccgugaguuuggucccgggu

SEQ ID NO: 149354 - RNA, 18 nt, Human
ucugaguucauguccuuc

SEQ ID NO: 149355 - RNA, 19 nt, Human
ucuguaagcccacaccugc

SEQ ID NO: 149356 - RNA, 21 nt, Human
ugaccccugcccguggagccc

SEQ ID NO: 149357 - RNA, 21 nt, Human
ugagacuggguuugaggaggc

SEQ ID NO: 149358 - RNA, 18 nt, Human
ugaguucauguccuucuu

SEQ ID NO: 149359 - RNA, 18 nt, Human
ugcucuguccucuccauc

SEQ ID NO: 149360 - RNA, 21 nt, Human
uggcaggcaggccggcaggcg

SEQ ID NO: 149361 - RNA, 18 nt, Human
uggcggaguccggcugug

SEQ ID NO: 149362 - RNA, 20 nt, Human
ugggagaggaguggggaggg

SEQ ID NO: 149363 - RNA, 25 nt, Human
ugggagcauuccccaguggaggggc

SEQ ID NO: 149364 - RNA, 19 nt, Human
uggggaggcgaggccauag

SEQ ID NO: 149365 - RNA, 24 nt, Human
ugucugagacuggguuugaggagg

SEQ ID NO: 149366 - RNA, 24 nt, Human
uucuccaacagucucagcugcuuc

SEQ ID NO: 149367 - RNA, 18 nt, Human
uucucucucucucucucu

SEQ ID NO: 149368 - RNA, 24 nt, Human
uugagaacaucagguccaaacccu

SEQ ID NO: 149369 - RNA, 22 nt, Human
uuggaggucucugccuccauuc

SEQ ID NO: 149370 - RNA, 19 nt, Human
uuuauuggaggucucugcc

SEQ ID NO: 149371 - RNA, 21 nt, Human
uuugucagacucaaaagcugg

SEQ ID NO: 149372 - RNA, 22 nt, Human
uuuuuuuuuuuuuuuuuccuuu

SEQ ID NO: 149373 - RNA, 23 nt, Human
uuuuuuuuuuuuuuuuuuccuuu

SEQ ID NO: 149374 - RNA, 25 nt, Human
aggcaagagaaggcaggcgcuccca

SEQ ID NO: 149375 - RNA, 18 nt, Human
caaggcaagagaaggcag

SEQ ID NO: 149376 - RNA, 19 nt, Human
cuagguccaaagaggaggc

SEQ ID NO: 149377 - RNA, 25 nt, Human
gagggcagcgguggcuaggggaagc

SEQ ID NO: 149378 - RNA, 19 nt, Human
ucaaggcaagagaaggcag

SEQ ID NO: 149379 - RNA, 20 nt, Human
ucaaggcaagagaaggcagg

SEQ ID NO: 149380 - RNA, 20 nt, Human
ugagggcagcgguggcuagg

SEQ ID NO: 149381 - RNA, 19 nt, Human
aaacaggcaggaccccagg

SEQ ID NO: 149382 - RNA, 20 nt, Human
aaaucccuuccuucccaccc

SEQ ID NO: 149383 - RNA, 23 nt, Human
aagaaaggucguucucaagccag

SEQ ID NO: 149384 - RNA, 26 nt, Human
aaucccuuccuucccacccaccccac

SEQ ID NO: 149385 - RNA, 22 nt, Human
aauucuucccaaggauccccac

SEQ ID NO: 149386 - RNA, 18 nt, Human
acaggaacaauuccccau

SEQ ID NO: 149387 - RNA, 20 nt, Human
acaggugagcccaggagucu

SEQ ID NO: 149388 - RNA, 22 nt, Human
agaacaaaagggacauuccucc

SEQ ID NO: 149389 - RNA, 22 nt, Human
agacgaguguagcacugucccc

SEQ ID NO: 149390 - RNA, 22 nt, Human
aggaaauuggggggcugggagg

SEQ ID NO: 149391 - RNA, 25 nt, Human
aggaauaauaaaacaaaacaaacua

SEQ ID NO: 149392 - RNA, 19 nt, Human
aggcggcgguggagguggu

SEQ ID NO: 149393 - RNA, 27 nt, Human
aggcggcgguggagguggugguggcgg

SEQ ID NO: 149394 - RNA, 24 nt, Human
agguggugguggcgguggcggcgg

SEQ ID NO: 149395 - RNA, 22 nt, Human
caccccccaaaaaaacccucca

SEQ ID NO: 149396 - RNA, 23 nt, Human
cagacagggcucccucaucuccc

SEQ ID NO: 149397 - RNA, 18 nt, Human
cagacggggaccaccccc

SEQ ID NO: 149398 - RNA, 20 nt, Human
cagcaccuagaagccgcccc

SEQ ID NO: 149399 - RNA, 23 nt, Human
caggaauaauaaaacaaaacaaa

SEQ ID NO: 149400 - RNA, 20 nt, Human
cauuccucccucccaacucc

SEQ ID NO: 149401 - RNA, 19 nt, Human
cauugggaggaaacaggca

SEQ ID NO: 149402 - RNA, 23 nt, Human
ccaaaucccuuccuucccaccca

SEQ ID NO: 149403 - RNA, 23 nt, Human
ccaacccccaggucccaaggccu

SEQ ID NO: 149404 - RNA, 30 nt, Human
ccaccccaccaaauauaggaagagaugacu

SEQ ID NO: 149405 - RNA, 19 nt, Human
ccaccccccaaaaaaaccc

SEQ ID NO: 149406 - RNA, 19 nt, Human
ccagaaggggugguggugg

SEQ ID NO: 149407 - RNA, 21 nt, Human
ccagaagggguggugguggug

SEQ ID NO: 149408 - RNA, 26 nt, Human
ccaggagucuuuugaacccacucucu

SEQ ID NO: 149409 - RNA, 22 nt, Human
ccauacgcggccccaccgcccc

SEQ ID NO: 149410 - RNA, 22 nt, Human
cccaaaucccuuccuucccacc

SEQ ID NO: 149411 - RNA, 25 nt, Human
cccaaaucccuuccuucccacccac

SEQ ID NO: 149412 - RNA, 19 nt, Human
cccaaggauccccacccca

SEQ ID NO: 149413 - RNA, 21 nt, Human
cccaccaaauauaggaagaga

SEQ ID NO: 149414 - RNA, 22 nt, Human
cccaccccaccaaauauaggaa

SEQ ID NO: 149415 - RNA, 23 nt, Human
cccaccccaccacaaucagagca

SEQ ID NO: 149416 - RNA, 23 nt, Human
cccaccccaccacaaucagagcc

SEQ ID NO: 149417 - RNA, 23 nt, Human
ccccaaaucccuuccuucccacc

SEQ ID NO: 149418 - RNA, 22 nt, Human
ccccaagggcaggcugagaaau

SEQ ID NO: 149419 - RNA, 21 nt, Human
ccccaccccaccacaaucaga

SEQ ID NO: 149420 - RNA, 21 nt, Human
ccccaccgccccccaggccug

SEQ ID NO: 149421 - RNA, 22 nt, Human
ccccagaagggguggugguggu

SEQ ID NO: 149422 - RNA, 20 nt, Human
cccccaaaaaaacccuccau

SEQ ID NO: 149423 - RNA, 18 nt, Human
cccccaaaucaccaaccc

SEQ ID NO: 149424 - RNA, 22 nt, Human
cccccaaaucccuuccuuccca

SEQ ID NO: 149425 - RNA, 20 nt, Human
ccccccaaaaaaacccucca

SEQ ID NO: 149426 - RNA, 24 nt, Human
ccccccagacggggaccacccccc

SEQ ID NO: 149427 - RNA, 20 nt, Human
ccccccaggccuggguuccc

SEQ ID NO: 149428 - RNA, 31 nt, Human
cccccccaaaucccuuccuucccacccaccu

SEQ ID NO: 149429 - RNA, 24 nt, Human
ccuggaccccugaguauggccagg

SEQ ID NO: 149430 - RNA, 25 nt, Human
ccuggaccccugaguauggccagga

SEQ ID NO: 149431 - RNA, 21 nt, Human
cggcagcaccuagaagccgcc

SEQ ID NO: 149432 - RNA, 28 nt, Human
cgguggagguggugguggcgguggcggc

SEQ ID NO: 149433 - RNA, 23 nt, Human
cgugggcccgaggaggaggagcc

SEQ ID NO: 149434 - RNA, 19 nt, Human
cucagggggaagaacaaaa

SEQ ID NO: 149435 - RNA, 26 nt, Human
cuccauacgcggccccaccgcccccc

SEQ ID NO: 149436 - RNA, 22 nt, Human
cucccaacccauuaaaugguac

SEQ ID NO: 149437 - RNA, 22 nt, Human
cuccccuauugaaaagccccau

SEQ ID NO: 149438 - RNA, 21 nt, Human
cucccucuccccuauugaaaa

SEQ ID NO: 149439 - RNA, 24 nt, Human
cugucugagagaaagguuggggga

SEQ ID NO: 149440 - RNA, 21 nt, Human
cuucccaaggauccccacccc

SEQ ID NO: 149441 - RNA, 23 nt, Human
cuucccaaggauccccaccccac

SEQ ID NO: 149442 - RNA, 19 nt, Human
cuucccacccaccccacca

SEQ ID NO: 149443 - RNA, 23 nt, Human
cuuccuggaccccugaguauggc

SEQ ID NO: 149444 - RNA, 22 nt, Human
cuuuagaaaaaaaaaaggucca

SEQ ID NO: 149445 - RNA, 21 nt, Human
gaccaccccccaaaaaaaccc

SEQ ID NO: 149446 - RNA, 26 nt, Human
gaccaccccccaaaaaaacccuccau

SEQ ID NO: 149447 - RNA, 18 nt, Human
gagagaaagguuggggga

SEQ ID NO: 149448 - RNA, 18 nt, Human
gaggugggggagaugucc

SEQ ID NO: 149449 - RNA, 19 nt, Human
gaguggggaggaggcagaa

SEQ ID NO: 149450 - RNA, 24 nt, Human
gauccccaccccaccacaaucaga

SEQ ID NO: 149451 - RNA, 18 nt, Human
gccccuaccauugaagua

SEQ ID NO: 149452 - RNA, 18 nt, Human
gcccgaggaggaggagcc

SEQ ID NO: 149453 - RNA, 19 nt, Human
gccuggguuccgaggcggc

SEQ ID NO: 149454 - RNA, 22 nt, Human
gcuccucccaguggccuucaaa

SEQ ID NO: 149455 - RNA, 19 nt, Human
ggaauaauaaaacaaaaca

SEQ ID NO: 149456 - RNA, 19 nt, Human
ggaccaccccccaaaaaaa

SEQ ID NO: 149457 - RNA, 21 nt, Human
ggagagacagggagaccugga

SEQ ID NO: 149458 - RNA, 23 nt, Human
ggagggaacugaaaauucauguu

SEQ ID NO: 149459 - RNA, 23 nt, Human
ggagguggugguggcgguggcgg

SEQ ID NO: 149460 - RNA, 19 nt, Human
ggcccgaggaggaggagcc

SEQ ID NO: 149461 - RNA, 22 nt, Human
ggcgguggagguggugguggcg

SEQ ID NO: 149462 - RNA, 18 nt, Human
ggcugggagggagggaac

SEQ ID NO: 149463 - RNA, 25 nt, Human
gggaagaacaaaagggaccgguacc

SEQ ID NO: 149464 - RNA, 23 nt, Human
gggcucccucaucuccccaaggg

SEQ ID NO: 149465 - RNA, 18 nt, Human
ggggaagaacaaaaggga

SEQ ID NO: 149466 - RNA, 23 nt, Human
guggagguggugguggcgguggc

SEQ ID NO: 149467 - RNA, 24 nt, Human
guggcgguggcggcggcagcaccu

SEQ ID NO: 149468 - RNA, 24 nt, Human
gugggcccgaggaggaggagccca

SEQ ID NO: 149469 - RNA, 21 nt, Human
gugguggcgguggcggcggca

SEQ ID NO: 149470 - RNA, 24 nt, Human
gugguggcgguggcggcggcagca

SEQ ID NO: 149471 - RNA, 20 nt, Human
guggugguggcgguggcggc

SEQ ID NO: 149472 - RNA, 20 nt, Human
guggugguggcgguggcggc

SEQ ID NO: 149473 - RNA, 24 nt, Human
uaaaacaaacaguggagacgagug

SEQ ID NO: 149474 - RNA, 19 nt, Human
uaacaggugagcccaggag

SEQ ID NO: 149475 - RNA, 18 nt, Human
uaauaaaacaaaacaaac

SEQ ID NO: 149476 - RNA, 24 nt, Human
uaauaaaacaaaacaaacuaacuc

SEQ ID NO: 149477 - RNA, 23 nt, Human
uagagacaggacaggcuuuaugu

SEQ ID NO: 149478 - RNA, 24 nt, Human
uaggagacguguaagggcggccac

SEQ ID NO: 149479 - RNA, 19 nt, Human
ucaaaaauaaacacuugga

SEQ ID NO: 149480 - RNA, 19 nt, Human
uccauacgcggccccaccg

SEQ ID NO: 149481 - RNA, 22 nt, Human
uccauacgcggccccaccgccc

SEQ ID NO: 149482 - RNA, 23 nt, Human
ucccaaggccugggcugggccag

SEQ ID NO: 149483 - RNA, 18 nt, Human
ucccacccaccccaccaa

SEQ ID NO: 149484 - RNA, 21 nt, Human
ucccucaucuccccaagggca

SEQ ID NO: 149485 - RNA, 21 nt, Human
ucccuuccuucccacccaccc

SEQ ID NO: 149486 - RNA, 24 nt, Human
ucccuuccuucccacccaccccac

SEQ ID NO: 149487 - RNA, 19 nt, Human
uccggggggcgggggcucc

SEQ ID NO: 149488 - RNA, 18 nt, Human
uccuaaccacccuaaaag

SEQ ID NO: 149489 - RNA, 23 nt, Human
ucucucuugccuagaauagagac

SEQ ID NO: 149490 - RNA, 21 nt, Human
uggaccccugaguauggccag

SEQ ID NO: 149491 - RNA, 19 nt, Human
uggagagagcauggaugga

SEQ ID NO: 149492 - RNA, 18 nt, Human
uggaguggggaggaggca

SEQ ID NO: 149493 - RNA, 26 nt, Human
uggcagacaaaggaauggcuucucag

SEQ ID NO: 149494 - RNA, 19 nt, Human
uggcagcuccggggggcgg

SEQ ID NO: 149495 - RNA, 25 nt, Human
uggccaggaauaauaaaacaaaaca

SEQ ID NO: 149496 - RNA, 24 nt, Human
uggcggcggcagcaccuagaagcc

SEQ ID NO: 149497 - RNA, 21 nt, Human
uggcuucucagggggaagaac

SEQ ID NO: 149498 - RNA, 23 nt, Human
ugggacucuuuagaaaaaaaaaa

SEQ ID NO: 149499 - RNA, 24 nt, Human
ugggacucuuuagaaaaaaaaaag

SEQ ID NO: 149500 - RNA, 19 nt, Human
uggggaaaaaaguggggag

SEQ ID NO: 149501 - RNA, 22 nt, Human
uggggaaaaaaguggggaggug

SEQ ID NO: 149502 - RNA, 22 nt, Human
uggggaggaggcagaagauucc

SEQ ID NO: 149503 - RNA, 20 nt, Human
ugguaucaaaaauaaacacu

SEQ ID NO: 149504 - RNA, 18 nt, Human
ugguggcgguggcggcgg

SEQ ID NO: 149505 - RNA, 18 nt, Human
uggugguggcgguggcgg

SEQ ID NO: 149506 - RNA, 19 nt, Human
uguaagggcggccacuggg

SEQ ID NO: 149507 - RNA, 22 nt, Human
ugucccccaaaucaccaacccc

SEQ ID NO: 149508 - RNA, 23 nt, Human
ugucccccaaaucaccaaccccc

SEQ ID NO: 149509 - RNA, 19 nt, Human
ugucccccauuccucccuc

SEQ ID NO: 149510 - RNA, 27 nt, Human
ugucugagagaaagguugggggaggug

SEQ ID NO: 149511 - RNA, 18 nt, Human
uuccucccucccaacucc

SEQ ID NO: 149512 - RNA, 19 nt, Human
uuccucccucccaacucca

SEQ ID NO: 149513 - RNA, 21 nt, Human
uuccuuggccaagacucccaa

SEQ ID NO: 149514 - RNA, 22 nt, Human
uucucagggggaagaacaaaag

SEQ ID NO: 149515 - RNA, 19 nt, Human
uucuccuugagauggcugg

SEQ ID NO: 149516 - RNA, 26 nt, Human
uuggcaauguuggcagcuccgggggg

SEQ ID NO: 149517 - RNA, 27 nt, Human
agauccugauuuuucccccuuuuuuuc

SEQ ID NO: 149518 - RNA, 20 nt, Human
auuuuucccccuuuuuuucu

SEQ ID NO: 149519 - RNA, 18 nt, Human
cugcauuauuccccaggc

SEQ ID NO: 149520 - RNA, 22 nt, Human
cuuuuuuucuuucucucgcucc

SEQ ID NO: 149521 - RNA, 23 nt, Human
gcuccucuuuuuuuuuccccucu

SEQ ID NO: 149522 - RNA, 21 nt, Human
ggaaguuggagcagucaggcc

SEQ ID NO: 149523 - RNA, 19 nt, Human
uacugcauuauuccccagg

SEQ ID NO: 149524 - RNA, 24 nt, Human
uccccaggcggugugcagucugug

SEQ ID NO: 149525 - RNA, 18 nt, Human
ugagagcaggaaguugga

SEQ ID NO: 149526 - RNA, 28 nt, Human
ugauuuuucccccuuuuuuucuuucucu

SEQ ID NO: 149527 - RNA, 19 nt, Human
uguaaugagauccugauuu

SEQ ID NO: 149528 - RNA, 26 nt, Human
uucaucaguuaaugaguccuuaauug

SEQ ID NO: 149529 - RNA, 19 nt, Human
uucuuucucucgcuccucu

SEQ ID NO: 149530 - RNA, 22 nt, Human
uuucccccuuuuuuucuuucuc

SEQ ID NO: 149531 - RNA, 19 nt, Human
uuucuuucucucgcuccuc

SEQ ID NO: 149532 - RNA, 20 nt, Human
uuucuuucucucgcuccucu

SEQ ID NO: 149533 - RNA, 21 nt, Human
uuuuucccccuuuuuuucuuu

SEQ ID NO: 149534 - RNA, 23 nt, Human
uuuuuucuuucucucgcuccucu

SEQ ID NO: 149535 - RNA, 22 nt, Human
aaaagaaaaggaaaagacagag

SEQ ID NO: 149536 - RNA, 22 nt, Human
aaacucgaggacggcgcggcag

SEQ ID NO: 149537 - RNA, 21 nt, Human
aaagaaaaagaaaaggaaaag

SEQ ID NO: 149538 - RNA, 18 nt, Human
aaagauguuuucaauggg

SEQ ID NO: 149539 - RNA, 21 nt, Human
aagaaaaagaaaaggaaaaga

SEQ ID NO: 149540 - RNA, 19 nt, Human
aagcauaauuuuuccuggc

SEQ ID NO: 149541 - RNA, 23 nt, Human
agaaaaaccaaccugaauucagg

SEQ ID NO: 149542 - RNA, 18 nt, Human
agaaaaggaaaagacaga

SEQ ID NO: 149543 - RNA, 19 nt, Human
agcauaauuuuuccuggcc

SEQ ID NO: 149544 - RNA, 22 nt, Human
agcccaccaaaaacuucuucag

SEQ ID NO: 149545 - RNA, 20 nt, Human
aggaaagaaaaagaaaagga

SEQ ID NO: 149546 - RNA, 18 nt, Human
aggaaggaaggaaagaaa

SEQ ID NO: 149547 - RNA, 23 nt, Human
augaggugugugaaaaaucuauu

SEQ ID NO: 149548 - RNA, 24 nt, Human
caacuuguuacucaacaucacacc

SEQ ID NO: 149549 - RNA, 27 nt, Human
caauaguuuuucccccuacaagugguu

SEQ ID NO: 149550 - RNA, 22 nt, Human
cagccuccuccucacgcuggaa

SEQ ID NO: 149551 - RNA, 19 nt, Human
cccgcggcggaguagaagg

SEQ ID NO: 149552 - RNA, 24 nt, Human
cccucagccuccuccucacgcugg

SEQ ID NO: 149553 - RNA, 18 nt, Human
cccucggucuccgccucg

SEQ ID NO: 149554 - RNA, 22 nt, Human
cccucggucuccgccucgaaca

SEQ ID NO: 149555 - RNA, 23 nt, Human
ccucgaacacgaugcgccucucc

SEQ ID NO: 149556 - RNA, 19 nt, Human
ccuggccaaagggucccaa

SEQ ID NO: 149557 - RNA, 23 nt, Human
cgcggggcucccccucggucucc

SEQ ID NO: 149558 - RNA, 25 nt, Human
cuaaaguaacuguaccaacuuguua

SEQ ID NO: 149559 - RNA, 22 nt, Human
cuacuguuuucuaacuugagau

SEQ ID NO: 149560 - RNA, 18 nt, Human
cucaaaauauuuuuaaag

SEQ ID NO: 149561 - RNA, 22 nt, Human
gccuccuccucacgcuggaaac

SEQ ID NO: 149562 - RNA, 24 nt, Human
ggaaaagacagagggagguggagu

SEQ ID NO: 149563 - RNA, 21 nt, Human
ggcucccccucggucuccgcc

SEQ ID NO: 149564 - RNA, 22 nt, Human
gggcucccccucggucuccgcc

SEQ ID NO: 149565 - RNA, 23 nt, Human
gggcucccccucggucuccgccu

SEQ ID NO: 149566 - RNA, 18 nt, Human
gguggaguuuagacucca

SEQ ID NO: 149567 - RNA, 22 nt, Human
uaaagcccaccaaaaacuucuu

SEQ ID NO: 149568 - RNA, 22 nt, Human
uaaauucugagauucuggugcu

SEQ ID NO: 149569 - RNA, 20 nt, Human
uacauggaugaguucuuugg

SEQ ID NO: 149570 - RNA, 24 nt, Human
uacauggaugaguucuuugguggu

SEQ ID NO: 149571 - RNA, 19 nt, Human
ucacgcuggaaacucgagg

SEQ ID NO: 149572 - RNA, 20 nt, Human
ucgaggacggcgcggcagcc

SEQ ID NO: 149573 - RNA, 22 nt, Human
ugagauucuggugcucaaccuc

SEQ ID NO: 149574 - RNA, 21 nt, Human
ugcaaagcacagucacuaaag

SEQ ID NO: 149575 - RNA, 25 nt, Human
uuaaaggagaaaagaaaaggaaggg

SEQ ID NO: 149576 - RNA, 19 nt, Human
uuccaaauagaaaaaccaa

SEQ ID NO: 149577 - RNA, 21 nt, Human
uucuuuggugguaaauucuga

SEQ ID NO: 149578 - RNA, 25 nt, Human
uugaaugucuguuucuucguuccuu

SEQ ID NO: 149579 - RNA, 19 nt, Human
uuuaggaggaaauagaaaa

SEQ ID NO: 149580 - RNA, 22 nt, Human
uuuuuuuuuuuuuuuuucauuu

SEQ ID NO: 149581 - RNA, 22 nt, Human
aaaccgaggacaucgcaaagaa

SEQ ID NO: 149582 - RNA, 19 nt, Human
aaagcccucugcccccuug

SEQ ID NO: 149583 - RNA, 19 nt, Human
aagaaaagucugacgccgc

SEQ ID NO: 149584 - RNA, 21 nt, Human
accagcagaggccaccugccc

SEQ ID NO: 149585 - RNA, 21 nt, Human
acccagggcagcggcuagacc

SEQ ID NO: 149586 - RNA, 20 nt, Human
acccucccagauccccgcca

SEQ ID NO: 149587 - RNA, 20 nt, Human
agagccagagaccagcagag

SEQ ID NO: 149588 - RNA, 18 nt, Human
agagggacggagggaggc

SEQ ID NO: 149589 - RNA, 18 nt, Human
agcagcagcaacaaaugg

SEQ ID NO: 149590 - RNA, 19 nt, Human
aggcaggacccagggcagc

SEQ ID NO: 149591 - RNA, 18 nt, Human
aggcaggcgcgccacccc

SEQ ID NO: 149592 - RNA, 22 nt, Human
aggcaggcgcgccaccccaagg

SEQ ID NO: 149593 - RNA, 21 nt, Human
aggcagugggcuuccugggga

SEQ ID NO: 149594 - RNA, 23 nt, Human
aggcagugggcuuccuggggagc

SEQ ID NO: 149595 - RNA, 23 nt, Human
aguggcugucuuuguauaaaacu

SEQ ID NO: 149596 - RNA, 18 nt, Human
caaaauagccaccugggc

SEQ ID NO: 149597 - RNA, 20 nt, Human
caaaauagccaccugggcca

SEQ ID NO: 149598 - RNA, 23 nt, Human
caaaauagccaccugggccaccc

SEQ ID NO: 149599 - RNA, 19 nt, Human
caaggucucaacagugugg

SEQ ID NO: 149600 - RNA, 23 nt, Human
cagaaacacaguggcccccgaca

SEQ ID NO: 149601 - RNA, 23 nt, Human
cagauccccgccaucggggaggg

SEQ ID NO: 149602 - RNA, 21 nt, Human
cagcaacaaaugggaaaccga

SEQ ID NO: 149603 - RNA, 25 nt, Human
cagcagcaacaaaugggaaacccua

SEQ ID NO: 149604 - RNA, 22 nt, Human
cagcagcagcaacaaaugggaa

SEQ ID NO: 149605 - RNA, 23 nt, Human
cagcagcagcaacaaaugggaaa

SEQ ID NO: 149606 - RNA, 19 nt, Human
caggacccagggcagcggc

SEQ ID NO: 149607 - RNA, 24 nt, Human
caucgagaccacaaggucucaaca

SEQ ID NO: 149608 - RNA, 21 nt, Human
ccacaaguggacagagggacg

SEQ ID NO: 149609 - RNA, 21 nt, Human
ccagcagaggccaccugccca

SEQ ID NO: 149610 - RNA, 21 nt, Human
cccaaggaggagaggcugggg

SEQ ID NO: 149611 - RNA, 31 nt, Human
cccaucauaagcagggacugcucaggaagcu

SEQ ID NO: 149612 - RNA, 22 nt, Human
ccccaagggccuaggagucuuc

SEQ ID NO: 149613 - RNA, 19 nt, Human
cccccgacccucccagauc

SEQ ID NO: 149614 - RNA, 23 nt, Human
ccccggaggcugcagccagggag

SEQ ID NO: 149615 - RNA, 18 nt, Human
cccucccagauccccgcc

SEQ ID NO: 149616 - RNA, 25 nt, Human
cccucugcccccuuggcucugagca

SEQ ID NO: 149617 - RNA, 20 nt, Human
cccuggguguccgaggagag

SEQ ID NO: 149618 - RNA, 22 nt, Human
ccgccuuuugcucccccgaccc

SEQ ID NO: 149619 - RNA, 24 nt, Human
ccuuuugcucccccgacccuccca

SEQ ID NO: 149620 - RNA, 18 nt, Human
cgagacaggaggcugaac

SEQ ID NO: 149621 - RNA, 22 nt, Human
cgagacaggaggcugaaccccg

SEQ ID NO: 149622 - RNA, 21 nt, Human
cgcagggagggccgagguggg

SEQ ID NO: 149623 - RNA, 21 nt, Human
cuagacccuggguguccgagg

SEQ ID NO: 149624 - RNA, 22 nt, Human
cuagacccuggguguccgagga

SEQ ID NO: 149625 - RNA, 25 nt, Human
cucaaaauagccaccugggccaccc

SEQ ID NO: 149626 - RNA, 26 nt, Human
cucaaaauagccaccugggccacccu

SEQ ID NO: 149627 - RNA, 20 nt, Human
cucaccgccuuuugcucccc

SEQ ID NO: 149628 - RNA, 22 nt, Human
cucccccgacccucccagaucc

SEQ ID NO: 149629 - RNA, 19 nt, Human
cugaaagcccucugccccc

SEQ ID NO: 149630 - RNA, 25 nt, Human
cugaaagcccucugcccccuuggcu

SEQ ID NO: 149631 - RNA, 23 nt, Human
cugcagccagggaggaggcagug

SEQ ID NO: 149632 - RNA, 26 nt, Human
cugcccauuccccacgcccucagaac

SEQ ID NO: 149633 - RNA, 24 nt, Human
cuuccucggguuuauuuuuuuaaa

SEQ ID NO: 149634 - RNA, 23 nt, Human
cuugcagccacccgccagggcca

SEQ ID NO: 149635 - RNA, 26 nt, Human
cuugcagccacccgccagggccagac

SEQ ID NO: 149636 - RNA, 21 nt, Human
gaggagagggaggcacagguu

SEQ ID NO: 149637 - RNA, 19 nt, Human
gaggaggcagugggcuucc

SEQ ID NO: 149638 - RNA, 21 nt, Human
gagucucaacuuggagcacag

SEQ ID NO: 149639 - RNA, 23 nt, Human
gcacagaaacacaguggcccccg

SEQ ID NO: 149640 - RNA, 22 nt, Human
gcagcaacaaaugggaaaccga

SEQ ID NO: 149641 - RNA, 23 nt, Human
gcagcagcagcaacaaaugggaa

SEQ ID NO: 149642 - RNA, 21 nt, Human
gcagugggcuuccuggggagc

SEQ ID NO: 149643 - RNA, 19 nt, Human
gccacccgccagggccaga

SEQ ID NO: 149644 - RNA, 21 nt, Human
gcccaaggaggagaggcuggg

SEQ ID NO: 149645 - RNA, 22 nt, Human
gcgccaccccaagggccuagga

SEQ ID NO: 149646 - RNA, 18 nt, Human
ggacggagggaggccagc

SEQ ID NO: 149647 - RNA, 18 nt, Human
ggagaggcuggggaaagg

SEQ ID NO: 149648 - RNA, 21 nt, Human
ggaggagaggcuggggaaagg

SEQ ID NO: 149649 - RNA, 24 nt, Human
ggaggagaggcuggggaaaggggu

SEQ ID NO: 149650 - RNA, 18 nt, Human
gggccgaggugggcuugc

SEQ ID NO: 149651 - RNA, 21 nt, Human
gucugcaggggcugcccugaa

SEQ ID NO: 149652 - RNA, 20 nt, Human
uaaacguagagccagagacc

SEQ ID NO: 149653 - RNA, 22 nt, Human
uaaacguagagccagagaccag

SEQ ID NO: 149654 - RNA, 19 nt, Human
uagagccagagaccagcag

SEQ ID NO: 149655 - RNA, 20 nt, Human
uauaaaacuagaaaaggcag

SEQ ID NO: 149656 - RNA, 26 nt, Human
uccccacgcccucagaacgcagcugc

SEQ ID NO: 149657 - RNA, 18 nt, Human
ucgcaaagaaaagucuga

SEQ ID NO: 149658 - RNA, 27 nt, Human
ucucucaccgccuuuugcucccccgac

SEQ ID NO: 149659 - RNA, 20 nt, Human
ugagcagcagcagcaacaaa

SEQ ID NO: 149660 - RNA, 21 nt, Human
ugcaccuuucgacgaccucug

SEQ ID NO: 149661 - RNA, 20 nt, Human
ugcagccagggaggaggcag

SEQ ID NO: 149662 - RNA, 21 nt, Human
ugcaggcaggacccagggcag

SEQ ID NO: 149663 - RNA, 22 nt, Human
ugcccaaggaggagaggcuggg

SEQ ID NO: 149664 - RNA, 23 nt, Human
ugccuaaacguagagccagagac

SEQ ID NO: 149665 - RNA, 21 nt, Human
uggagcagagacccugcccaa

SEQ ID NO: 149666 - RNA, 21 nt, Human
uggcccccgacagcugagggc

SEQ ID NO: 149667 - RNA, 26 nt, Human
uguggaaugagcagcagcagcaacaa

SEQ ID NO: 149668 - RNA, 18 nt, Human
uuagcaguagcuaaaagu

SEQ ID NO: 149669 - RNA, 25 nt, Human
uuccucggguuuauuuuuuuaaaua

SEQ ID NO: 149670 - RNA, 21 nt, Human
uugcuggagcagagacccugc

SEQ ID NO: 149671 - RNA, 21 nt, Human
uuuguacaaaaauagacucaa

SEQ ID NO: 149672 - RNA, 23 nt, Human
uuuguacaaaaauagacucaagu

SEQ ID NO: 149673 - RNA, 18 nt, Human
aaaaaaaaaacuaaccca

SEQ ID NO: 149674 - RNA, 23 nt, Human
aaaaaaaaaacuaacccaaaacu

SEQ ID NO: 149675 - RNA, 26 nt, Human
aaaaaaacuaacccaaaacucuugca

SEQ ID NO: 149676 - RNA, 19 nt, Human
aaaaacaaagcaaaaaaaa

SEQ ID NO: 149677 - RNA, 18 nt, Human
aaaccccagacuagcugg

SEQ ID NO: 149678 - RNA, 22 nt, Human
aaagaggaacagagcaaggcaa

SEQ ID NO: 149679 - RNA, 22 nt, Human
aacaaagcaaaaaaaaaaaaaa

SEQ ID NO: 149680 - RNA, 21 nt, Human
aacaccaaacgcuuggauagc

SEQ ID NO: 149681 - RNA, 19 nt, Human
aacagagcaaggcaaaagc

SEQ ID NO: 149682 - RNA, 24 nt, Human
aacagagcaaggcaaaagcaggga

SEQ ID NO: 149683 - RNA, 19 nt, Human
aaccacaaauacugauucu

SEQ ID NO: 149684 - RNA, 20 nt, Human
aagaggcugggagcgugggu

SEQ ID NO: 149685 - RNA, 24 nt, Human
aagcaaaaaaaaaaaaaaaacuaa

SEQ ID NO: 149686 - RNA, 30 nt, Human
aagcaaaaaaaaaaaaaaaacuaacccaag

SEQ ID NO: 149687 - RNA, 21 nt, Human
aagcugcugccaccacaaagc

SEQ ID NO: 149688 - RNA, 19 nt, Human
aaggacgguuccaaggcgu

SEQ ID NO: 149689 - RNA, 23 nt, Human
acaaagcaaaaaaaaaaaaaaaa

SEQ ID NO: 149690 - RNA, 20 nt, Human
acagagcaaggcaaaagcag

SEQ ID NO: 149691 - RNA, 23 nt, Human
acagagcaaggcaaaagcaggga

SEQ ID NO: 149692 - RNA, 18 nt, Human
agacaggggccuuggggc

SEQ ID NO: 149693 - RNA, 22 nt, Human
agacaggggccuuggggcacug

SEQ ID NO: 149694 - RNA, 18 nt, Human
agacucuuuuguccaaaa

SEQ ID NO: 149695 - RNA, 18 nt, Human
agagaggggaaaggagga

SEQ ID NO: 149696 - RNA, 21 nt, Human
agccaugugaacagagacccg

SEQ ID NO: 149697 - RNA, 22 nt, Human
aggaagggcaugccugcagagg

SEQ ID NO: 149698 - RNA, 23 nt, Human
aggaagggcaugccugcagaggg

SEQ ID NO: 149699 - RNA, 24 nt, Human
aggaagggcaugccugcagagggc

SEQ ID NO: 149700 - RNA, 19 nt, Human
aggcaaaagcagggagaga

SEQ ID NO: 149701 - RNA, 21 nt, Human
aggcaaaagcagggagagagg

SEQ ID NO: 149702 - RNA, 22 nt, Human
aggggaaaggaggauguggggu

SEQ ID NO: 149703 - RNA, 23 nt, Human
aggggcugaaaguugccagggcu

SEQ ID NO: 149704 - RNA, 21 nt, Human
aguugcagcaggaccucccag

SEQ ID NO: 149705 - RNA, 21 nt, Human
augguuccugaguaagcuugu

SEQ ID NO: 149706 - RNA, 27 nt, Human
caaaaaaaaaaaaaaaacuaacccaaa

SEQ ID NO: 149707 - RNA, 24 nt, Human
caaaaacaaagcaaaaaaaaaaaa

SEQ ID NO: 149708 - RNA, 24 nt, Human
caaacgcuuggauagcaacagucc

SEQ ID NO: 149709 - RNA, 19 nt, Human
caagaugccagcuaggggc

SEQ ID NO: 149710 - RNA, 25 nt, Human
caucacaauccauuuuauuccacag

SEQ ID NO: 149711 - RNA, 22 nt, Human
cauuugugcuuucagcuaagag

SEQ ID NO: 149712 - RNA, 23 nt, Human
ccagggcuagaggugaugcugaa

SEQ ID NO: 149713 - RNA, 20 nt, Human
ccccugaagaacaaugugcu

SEQ ID NO: 149714 - RNA, 21 nt, Human
cuggggcugcuggcuuuccug

SEQ ID NO: 149715 - RNA, 23 nt, Human
gaagaaggcaguucuggccuggg

SEQ ID NO: 149716 - RNA, 19 nt, Human
gacuuagagucgucccccu

SEQ ID NO: 149717 - RNA, 22 nt, Human
gagaggugggaggagauuugag

SEQ ID NO: 149718 - RNA, 19 nt, Human
gaggugggaggagauuuga

SEQ ID NO: 149719 - RNA, 20 nt, Human
gcaguucuggccuggggcag

SEQ ID NO: 149720 - RNA, 22 nt, Human
gcuaagaggcugggagcguggg

SEQ ID NO: 149721 - RNA, 23 nt, Human
ggaaggaagggcaugccugcaga

SEQ ID NO: 149722 - RNA, 19 nt, Human
ggaagggcccuuuggccuu

SEQ ID NO: 149723 - RNA, 20 nt, Human
ggaugugggguuuggucuuc

SEQ ID NO: 149724 - RNA, 20 nt, Human
ggcaugggaccuguggacug

SEQ ID NO: 149725 - RNA, 20 nt, Human
ggggcaugucugggcccggc

SEQ ID NO: 149726 - RNA, 22 nt, Human
gugaugcugaagggaaugugga

SEQ ID NO: 149727 - RNA, 19 nt, Human
uaacccaaaacucuugcaa

SEQ ID NO: 149728 - RNA, 22 nt, Human
uacaaugauguaaacuuggaug

SEQ ID NO: 149729 - RNA, 23 nt, Human
uagagucgucccccugaagaaca

SEQ ID NO: 149730 - RNA, 18 nt, Human
uagcaacaguccguccua

SEQ ID NO: 149731 - RNA, 24 nt, Human
uaggggcugaaaguugccagggcu

SEQ ID NO: 149732 - RNA, 21 nt, Human
uccaaaaacaaagcaaaaaaa

SEQ ID NO: 149733 - RNA, 22 nt, Human
ucccaccaguggacugcagcca

SEQ ID NO: 149734 - RNA, 24 nt, Human
ucccaccaguggacugcagccaug

SEQ ID NO: 149735 - RNA, 21 nt, Human
uccguccuagaggcauuuagg

SEQ ID NO: 149736 - RNA, 21 nt, Human
ucuagagagaggggaaaggag

SEQ ID NO: 149737 - RNA, 22 nt, Human
ucuugcaaauuguaaauaccag

SEQ ID NO: 149738 - RNA, 22 nt, Human
ugaacagagacccgccgcacac

SEQ ID NO: 149739 - RNA, 19 nt, Human
ugagccaugugaacagaga

SEQ ID NO: 149740 - RNA, 19 nt, Human
ugcucuugucccaccagug

SEQ ID NO: 149741 - RNA, 21 nt, Human
uggaacuugaguugcagcagg

SEQ ID NO: 149742 - RNA, 18 nt, Human
uggaauaccaccagaugg

SEQ ID NO: 149743 - RNA, 21 nt, Human
ugggcagucuggggcugcugg

SEQ ID NO: 149744 - RNA, 20 nt, Human
uggugaggagggaagauuug

SEQ ID NO: 149745 - RNA, 21 nt, Human
uggugcgagaugauucuagag

SEQ ID NO: 149746 - RNA, 24 nt, Human
uguccaaaaacaaagcaaaaaaaa

SEQ ID NO: 149747 - RNA, 20 nt, Human
ugugaacagagacccgccgc

SEQ ID NO: 149748 - RNA, 21 nt, Human
ugugaacagagacccgccgca

SEQ ID NO: 149749 - RNA, 18 nt, Human
ugugcuggaauaccacca

SEQ ID NO: 149750 - RNA, 21 nt, Human
uguggacccacagcuucccuu

SEQ ID NO: 149751 - RNA, 19 nt, Human
uguguuuucauuccucucu

SEQ ID NO: 149752 - RNA, 19 nt, Human
uucaccauuugugcuuuca

SEQ ID NO: 149753 - RNA, 24 nt, Human
aaaaacacagacacggcugccuua

SEQ ID NO: 149754 - RNA, 25 nt, Human
aaaaagacaaaagcaaaagccucag

SEQ ID NO: 149755 - RNA, 23 nt, Human
aaacaugguuacugacaggaagc

SEQ ID NO: 149756 - RNA, 23 nt, Human
aaacaugguuacugacaggaagc

SEQ ID NO: 149757 - RNA, 21 nt, Human
aacuuguucuccauguaccuc

SEQ ID NO: 149758 - RNA, 19 nt, Human
aagcaaaagacaaggcacc

SEQ ID NO: 149759 - RNA, 23 nt, Human
aagcaaaagacaaggcaccagaa

SEQ ID NO: 149760 - RNA, 21 nt, Human
aaggccaaaggaaagcaaacu

SEQ ID NO: 149761 - RNA, 20 nt, Human
aaugccaaugugcuaacgua

SEQ ID NO: 149762 - RNA, 21 nt, Human
acaaaaacacagacacggcug

SEQ ID NO: 149763 - RNA, 24 nt, Human
accucuuucuacaccucccuccag

SEQ ID NO: 149764 - RNA, 25 nt, Human
agacaaaaacacagacacggcugcc

SEQ ID NO: 149765 - RNA, 26 nt, Human
agacaaaaacacagacacggcugccc

SEQ ID NO: 149766 - RNA, 26 nt, Human
agacaaaaacacagacacggcugccu

SEQ ID NO: 149767 - RNA, 18 nt, Human
agacaaaagcaaaagccu

SEQ ID NO: 149768 - RNA, 20 nt, Human
agacaaggcaccagaaugua

SEQ ID NO: 149769 - RNA, 18 nt, Human
agacagggaccaagagga

SEQ ID NO: 149770 - RNA, 18 nt, Human
agagcacccugccuucau

SEQ ID NO: 149771 - RNA, 19 nt, Human
agagggcaggacuuggcca

SEQ ID NO: 149772 - RNA, 20 nt, Human
agcuggguuuucccugcagc

SEQ ID NO: 149773 - RNA, 20 nt, Human
agcuggguuuucccugcagc

SEQ ID NO: 149774 - RNA, 18 nt, Human
aggaagcuccuggcugcc

SEQ ID NO: 149775 - RNA, 23 nt, Human
agggaccaagaggaaacucuggg

SEQ ID NO: 149776 - RNA, 22 nt, Human
agggcaggacuuggccaggagg

SEQ ID NO: 149777 - RNA, 23 nt, Human
auaguaaugaaaauauauaguac

SEQ ID NO: 149778 - RNA, 26 nt, Human
aucacuacagauucuguacaagcaaa

SEQ ID NO: 149779 - RNA, 24 nt, Human
auggugauggagugggcagagcac

SEQ ID NO: 149780 - RNA, 20 nt, Human
augugggggaagagcaguag

SEQ ID NO: 149781 - RNA, 24 nt, Human
caaaaacacagacacggcugccuu

SEQ ID NO: 149782 - RNA, 18 nt, Human
caaaagacaaggcaccag

SEQ ID NO: 149783 - RNA, 20 nt, Human
caagaggaaacucugggugg

SEQ ID NO: 149784 - RNA, 25 nt, Human
cacagucuaggcccaggccucagcu

SEQ ID NO: 149785 - RNA, 18 nt, Human
caccauaugaagcuggag

SEQ ID NO: 149786 - RNA, 21 nt, Human
cacccugccuucaugacucuu

SEQ ID NO: 149787 - RNA, 25 nt, Human
caccucccuccagggcgcagacccu

SEQ ID NO: 149788 - RNA, 24 nt, Human
cacuaggaagggaaggccaacuuc

SEQ ID NO: 149789 - RNA, 26 nt, Human
cacuucaaggcucucaacacgcccaa

SEQ ID NO: 149790 - RNA, 20 nt, Human
cagagcacccugccuucaug

SEQ ID NO: 149791 - RNA, 20 nt, Human
caggaagcuccuggcuguug

SEQ ID NO: 149792 - RNA, 20 nt, Human
caggcucaggaggaaaaggu

SEQ ID NO: 149793 - RNA, 26 nt, Human
caguagaaucuagugaccucaccaca

SEQ ID NO: 149794 - RNA, 19 nt, Human
caucaaaaaagacaaaagc

SEQ ID NO: 149795 - RNA, 20 nt, Human
caucaaaaaagacaaaagca

SEQ ID NO: 149796 - RNA, 28 nt, Human
caucaaaaaagacaaaagcaaaagccuc

SEQ ID NO: 149797 - RNA, 21 nt, Human
ccacagucuaggcccaggccu

SEQ ID NO: 149798 - RNA, 24 nt, Human
ccaugccaggccaccaauacugaa

SEQ ID NO: 149799 - RNA, 25 nt, Human
cccaaaaucccuucuccuggguacc

SEQ ID NO: 149800 - RNA, 19 nt, Human
cccaacacaccuguccucu

SEQ ID NO: 149801 - RNA, 20 nt, Human
cuacaccucccuccagggcg

SEQ ID NO: 149802 - RNA, 21 nt, Human
cuagugaccucaccacagucu

SEQ ID NO: 149803 - RNA, 19 nt, Human
cuccuggcuguuguuaaau

SEQ ID NO: 149804 - RNA, 19 nt, Human
cuccugggcccaaaauccc

SEQ ID NO: 149805 - RNA, 20 nt, Human
cuccugggcccaaaaucccu

SEQ ID NO: 149806 - RNA, 19 nt, Human
cucucaacacgcccaacac

SEQ ID NO: 149807 - RNA, 27 nt, Human
cugggccagcuguugcucacgugggga

SEQ ID NO: 149808 - RNA, 19 nt, Human
cuggguuuucccugcagcg

SEQ ID NO: 149809 - RNA, 23 nt, Human
gacuugcugggaugagacugagc

SEQ ID NO: 149810 - RNA, 25 nt, Human
gagccaaccucagaagcagcaacgu

SEQ ID NO: 149811 - RNA, 19 nt, Human
gcacuaggaagggaaggcc

SEQ ID NO: 149812 - RNA, 19 nt, Human
gccaaccucagaagcagca

SEQ ID NO: 149813 - RNA, 25 nt, Human
gccaaccucagaagcaggggaacgc

SEQ ID NO: 149814 - RNA, 19 nt, Human
gccaggaggucuuugacuu

SEQ ID NO: 149815 - RNA, 21 nt, Human
gccaggaggucuuugacuugc

SEQ ID NO: 149816 - RNA, 31 nt, Human
gcccucaucaaaaaagacaaaagcaaaagcu

SEQ ID NO: 149817 - RNA, 19 nt, Human
gcuccuggcugcucucugg

SEQ ID NO: 149818 - RNA, 25 nt, Human
gcugcaauucagguuaggggagauu

SEQ ID NO: 149819 - RNA, 18 nt, Human
ggacuggaaggcaagggc

SEQ ID NO: 149820 - RNA, 20 nt, Human
ggcaggacuuggccaggagg

SEQ ID NO: 149821 - RNA, 19 nt, Human
gggcaggacuuggccagga

SEQ ID NO: 149822 - RNA, 19 nt, Human
gggucuggaaggccaaagg

SEQ ID NO: 149823 - RNA, 18 nt, Human
guguggccucagccggcc

SEQ ID NO: 149824 - RNA, 21 nt, Human
uacaagcaaaagacaaggcac

SEQ ID NO: 149825 - RNA, 19 nt, Human
uacaugaaagaguauuuau

SEQ ID NO: 149826 - RNA, 19 nt, Human
uacaugaaagaguauuuau

SEQ ID NO: 149827 - RNA, 23 nt, Human
uacaugaaagaguauuuauugaa

SEQ ID NO: 149828 - RNA, 23 nt, Human
uacaugaaagaguauuuauugaa

SEQ ID NO: 149829 - RNA, 24 nt, Human
uagagccaaccucagaagcagcaa

SEQ ID NO: 149830 - RNA, 23 nt, Human
uauuuauugaaaacaugguuacu

SEQ ID NO: 149831 - RNA, 23 nt, Human
uauuuauugaaaacaugguuacu

SEQ ID NO: 149832 - RNA, 20 nt, Human
ucaaaaaagacaaaagcaaa

SEQ ID NO: 149833 - RNA, 21 nt, Human
ucaccacagucuaggcccagg

SEQ ID NO: 149834 - RNA, 25 nt, Human
ucacuacagauucuguacaagcaaa

SEQ ID NO: 149835 - RNA, 20 nt, Human
ucagccagcucccugaaauc

SEQ ID NO: 149836 - RNA, 24 nt, Human
ucagccggccucagccagcucccu

SEQ ID NO: 149837 - RNA, 22 nt, Human
ucuacaccucccuccagggcgc

SEQ ID NO: 149838 - RNA, 24 nt, Human
ucuccauguaccucuuuucccaag

SEQ ID NO: 149839 - RNA, 21 nt, Human
ucucugaggaaggaaaagguc

SEQ ID NO: 149840 - RNA, 19 nt, Human
ucucugguuacaaucuugg

SEQ ID NO: 149841 - RNA, 22 nt, Human
ucucugguuacaaucuuggcuc

SEQ ID NO: 149842 - RNA, 22 nt, Human
ucuuggacuggaaggcaagggc

SEQ ID NO: 149843 - RNA, 20 nt, Human
ugaaaucauggccaauggca

SEQ ID NO: 149844 - RNA, 21 nt, Human
ugcagggagaaauuuccgucu

SEQ ID NO: 149845 - RNA, 18 nt, Human
ugcugggaugagacugag

SEQ ID NO: 149846 - RNA, 18 nt, Human
uggcuggcauuuacuggc

SEQ ID NO: 149847 - RNA, 19 nt, Human
ugggggaagagcaguagaa

SEQ ID NO: 149848 - RNA, 18 nt, Human
ugggugguccgagguggg

SEQ ID NO: 149849 - RNA, 20 nt, Human
uguaccucuuucuacaccuc

SEQ ID NO: 149850 - RNA, 22 nt, Human
ugugcuaacguauguccaggga

SEQ ID NO: 149851 - RNA, 23 nt, Human
uguggccucagccggccucagcc

SEQ ID NO: 149852 - RNA, 25 nt, Human
uguugcucacguggggauccagcug

SEQ ID NO: 149853 - RNA, 26 nt, Human
uguuuguuccucguggcccaauccca

SEQ ID NO: 149854 - RNA, 21 nt, Human
uuauauaaauauauauacacg

SEQ ID NO: 149855 - RNA, 19 nt, Human
uuuccugggccagcuguug

SEQ ID NO: 149856 - RNA, 20 nt, Human
uuuuuuuuuuuuuuuguaca

SEQ ID NO: 149857 - RNA, 20 nt, Human
uuuuuuuuuuuuuuuguaca

SEQ ID NO: 149858 - RNA, 18 nt, Human
uuuuuuuuuuuuuuuuug

SEQ ID NO: 149859 - RNA, 19 nt, Human
uuuuuuuuuuuuuuuuugu

SEQ ID NO: 149860 - RNA, 19 nt, Human
uuuuuuuuuuuuuuuuugu

SEQ ID NO: 149861 - RNA, 23 nt, Human
uuuuuuuuuuuuuuuuuuuuggg

SEQ ID NO: 149862 - RNA, 18 nt, Human
acccacugcccuucaugg

SEQ ID NO: 149863 - RNA, 23 nt, Human
agacuuuauuucugcagcaaucu

SEQ ID NO: 149864 - RNA, 20 nt, Human
agcugcucagccucaagguc

SEQ ID NO: 149865 - RNA, 25 nt, Human
caagagcugcucagccucaaggucg

SEQ ID NO: 149866 - RNA, 22 nt, Human
caccuccuucagcacagcggcc

SEQ ID NO: 149867 - RNA, 24 nt, Human
ccauccgcaaacugcagggcguaa

SEQ ID NO: 149868 - RNA, 19 nt, Human
cccaagagcugcucagccu

SEQ ID NO: 149869 - RNA, 26 nt, Human
ccgaggccagcggaacaaggcgcccc

SEQ ID NO: 149870 - RNA, 24 nt, Human
ccugcacuccucuacccacugccc

SEQ ID NO: 149871 - RNA, 23 nt, Human
ccuucagcacagcggccaggggc

SEQ ID NO: 149872 - RNA, 24 nt, Human
cgaggccagcggaacaaggcgccc

SEQ ID NO: 149873 - RNA, 24 nt, Human
cgcucagagugcgucaggcuccac

SEQ ID NO: 149874 - RNA, 18 nt, Human
cucuacccacugcccuuc

SEQ ID NO: 149875 - RNA, 22 nt, Human
cugcaguggccgcagcuguggc

SEQ ID NO: 149876 - RNA, 22 nt, Human
cugcugcaguggccgcagcugu

SEQ ID NO: 149877 - RNA, 25 nt, Human
gagcugcucagccucaaggucuggg

SEQ ID NO: 149878 - RNA, 18 nt, Human
gccgugcugaggcacagg

SEQ ID NO: 149879 - RNA, 18 nt, Human
ggccaggggcuucgccug

SEQ ID NO: 149880 - RNA, 22 nt, Human
uguggcccauggccagccacac

SEQ ID NO: 149881 - RNA, 20 nt, Human
aaggaaaacguuacuccaaa

SEQ ID NO: 149882 - RNA, 19 nt, Human
aaggcagggccaagcggaa

SEQ ID NO: 149883 - RNA, 20 nt, Human
aaucccuuugcaacaucccu

SEQ ID NO: 149884 - RNA, 19 nt, Human
acaccaucaucaucaagcc

SEQ ID NO: 149885 - RNA, 21 nt, Human
accuuguaacaucaagcauug

SEQ ID NO: 149886 - RNA, 22 nt, Human
aggagaaagcggagacccagag

SEQ ID NO: 149887 - RNA, 21 nt, Human
augaaaaaucaggaacagccc

SEQ ID NO: 149888 - RNA, 26 nt, Human
auuacaaccaaaauuauacucugacu

SEQ ID NO: 149889 - RNA, 19 nt, Human
caacaccaucaucaucaag

SEQ ID NO: 149890 - RNA, 24 nt, Human
caacaccuuguaacaucaagcauu

SEQ ID NO: 149891 - RNA, 23 nt, Human
cacauuugucuuuucuccccacc

SEQ ID NO: 149892 - RNA, 20 nt, Human
cacauuuucagcuuuggaca

SEQ ID NO: 149893 - RNA, 25 nt, Human
cagaccgaagaaugagugacuauaa

SEQ ID NO: 149894 - RNA, 19 nt, Human
cagcacauaaauguaacua

SEQ ID NO: 149895 - RNA, 22 nt, Human
cagcauacauccuacacaugca

SEQ ID NO: 149896 - RNA, 21 nt, Human
cauagagcacauuugucuuuu

SEQ ID NO: 149897 - RNA, 18 nt, Human
cccacagugauuugugcc

SEQ ID NO: 149898 - RNA, 21 nt, Human
cccagagagagggcugacccc

SEQ ID NO: 149899 - RNA, 19 nt, Human
cccggcugcgucuucuccu

SEQ ID NO: 149900 - RNA, 21 nt, Human
ccggaggcgguggcggccgac

SEQ ID NO: 149901 - RNA, 19 nt, Human
ccucuaacggcggcggccc

SEQ ID NO: 149902 - RNA, 25 nt, Human
ccugaaauuuuauaugauaugggag

SEQ ID NO: 149903 - RNA, 21 nt, Human
cggcaggagaaagcggagacc

SEQ ID NO: 149904 - RNA, 25 nt, Human
cuaguaaucccuuugcaacaucccu

SEQ ID NO: 149905 - RNA, 21 nt, Human
cuccccacccccaagcucucc

SEQ ID NO: 149906 - RNA, 21 nt, Human
cugcgucuucuccugcuccuc

SEQ ID NO: 149907 - RNA, 18 nt, Human
gaauagcucuugggaacc

SEQ ID NO: 149908 - RNA, 20 nt, Human
gagcggcggccgggaacccc

SEQ ID NO: 149909 - RNA, 23 nt, Human
gagcgggcgcuggcggcaggaga

SEQ ID NO: 149910 - RNA, 20 nt, Human
gccgacggggcgagcggcgg

SEQ ID NO: 149911 - RNA, 19 nt, Human
gcggccgggaaccccucua

SEQ ID NO: 149912 - RNA, 19 nt, Human
gcugaaaucagguagcagg

SEQ ID NO: 149913 - RNA, 21 nt, Human
ggacauagagcacauuugucu

SEQ ID NO: 149914 - RNA, 18 nt, Human
ggagaaagcggagacccg

SEQ ID NO: 149915 - RNA, 22 nt, Human
ggcccggcugcgucuucuccug

SEQ ID NO: 149916 - RNA, 20 nt, Human
ggcggccgacggggcgagcg

SEQ ID NO: 149917 - RNA, 21 nt, Human
uaacaacaccuuguaacauca

SEQ ID NO: 149918 - RNA, 23 nt, Human
uaacaacaccuuguaacaucaag

SEQ ID NO: 149919 - RNA, 25 nt, Human
uaauaaagacaugaguuguuucaug

SEQ ID NO: 149920 - RNA, 23 nt, Human
uagcaccaaggagucaagaauau

SEQ ID NO: 149921 - RNA, 18 nt, Human
uagcuuacaaaauauucu

SEQ ID NO: 149922 - RNA, 20 nt, Human
uagcuuacaaaauauucuga

SEQ ID NO: 149923 - RNA, 22 nt, Human
uaugaaaaaucaggaacagcca

SEQ ID NO: 149924 - RNA, 19 nt, Human
ucauuacacacugagcaac

SEQ ID NO: 149925 - RNA, 23 nt, Human
uccacauaugaaaaaucaggaac

SEQ ID NO: 149926 - RNA, 24 nt, Human
uccacauaugaaaaaucaggaaca

SEQ ID NO: 149927 - RNA, 21 nt, Human
ucccuuugcaacaucccuuaa

SEQ ID NO: 149928 - RNA, 24 nt, Human
ucucugggucaccagacaagacuu

SEQ ID NO: 149929 - RNA, 20 nt, Human
ucuggagaauaucaaggcua

SEQ ID NO: 149930 - RNA, 24 nt, Human
ugaaaaaucaggaacagccauaaa

SEQ ID NO: 149931 - RNA, 22 nt, Human
ugaaagagaaggauaguuucac

SEQ ID NO: 149932 - RNA, 19 nt, Human
ugaauagcucuugggaacc

SEQ ID NO: 149933 - RNA, 18 nt, Human
ugauaugggaguuuuucc

SEQ ID NO: 149934 - RNA, 23 nt, Human
ugcagcuuugacauguuguugag

SEQ ID NO: 149935 - RNA, 20 nt, Human
ugucuuuucuccccaccccc

SEQ ID NO: 149936 - RNA, 19 nt, Human
uuaaugauugcuuuggucu

SEQ ID NO: 149937 - RNA, 19 nt, Human
uuacugcaauucuuucuua

SEQ ID NO: 149938 - RNA, 24 nt, Human
uuagcaccaaggagucaagaauau

SEQ ID NO: 149939 - RNA, 22 nt, Human
uucaaaugcugccuuuucauca

SEQ ID NO: 149940 - RNA, 18 nt, Human
uucauuuguaaauagcaa

SEQ ID NO: 149941 - RNA, 19 nt, Human
uucuuauuuucaccaacac

SEQ ID NO: 149942 - RNA, 21 nt, Human
uugcaccaaaauggguuuaua

SEQ ID NO: 149943 - RNA, 18 nt, Human
uugcuucuguuuucccug

SEQ ID NO: 149944 - RNA, 21 nt, Human
uugucuuucucuaguaauccc

SEQ ID NO: 149945 - RNA, 19 nt, Human
uugugcugaaaucagguag

SEQ ID NO: 149946 - RNA, 24 nt, Human
uuuccucacugucaacaacaguua

SEQ ID NO: 149947 - RNA, 25 nt, Human
uuuuuuuuuuuuuuuuuuuauuuuu

SEQ ID NO: 149948 - RNA, 24 nt, Human
aaaaacacauaaagccccugcccc

SEQ ID NO: 149949 - RNA, 22 nt, Human
aaaacacauaaagccccugccc

SEQ ID NO: 149950 - RNA, 19 nt, Human
aaagaccuagcucugaagc

SEQ ID NO: 149951 - RNA, 24 nt, Human
aaagaccuagcucugaagcccaga

SEQ ID NO: 149952 - RNA, 19 nt, Human
aaagccccugccccugccc

SEQ ID NO: 149953 - RNA, 19 nt, Human
aaagccccugccccugccc

SEQ ID NO: 149954 - RNA, 20 nt, Human
aagcaaaaacacauaaagcc

SEQ ID NO: 149955 - RNA, 19 nt, Human
aauccccuccccccaacaa

SEQ ID NO: 149956 - RNA, 18 nt, Human
acaagaugacaaaaggag

SEQ ID NO: 149957 - RNA, 23 nt, Human
agaggaccauggagggccugagu

SEQ ID NO: 149958 - RNA, 24 nt, Human
agccaggacuuccccaaagaccua

SEQ ID NO: 149959 - RNA, 20 nt, Human
aggcagucagccaggacuuc

SEQ ID NO: 149960 - RNA, 22 nt, Human
aggccuggcggcggcccgggcc

SEQ ID NO: 149961 - RNA, 23 nt, Human
aggccuggcggcggcccgggccu

SEQ ID NO: 149962 - RNA, 22 nt, Human
caaaaacaaagucaggguggcc

SEQ ID NO: 149963 - RNA, 23 nt, Human
caaaaacaaagucaggguggccc

SEQ ID NO: 149964 - RNA, 22 nt, Human
caaagaccuagcucugaagccc

SEQ ID NO: 149965 - RNA, 18 nt, Human
caagaugacaaaaggagg

SEQ ID NO: 149966 - RNA, 21 nt, Human
caagcaaaaacacauaaagcc

SEQ ID NO: 149967 - RNA, 24 nt, Human
cacauaaagccccugccccugccc

SEQ ID NO: 149968 - RNA, 18 nt, Human
cacccccacccccacugc

SEQ ID NO: 149969 - RNA, 22 nt, Human
cagccaggacuuccccaaagac

SEQ ID NO: 149970 - RNA, 21 nt, Human
cagcgccccccaagcaaaaac

SEQ ID NO: 149971 - RNA, 21 nt, Human
cccaacaagaugacaaaagga

SEQ ID NO: 149972 - RNA, 21 nt, Human
cccaagcaaaaacacauaaag

SEQ ID NO: 149973 - RNA, 27 nt, Human
cccacugcuaaggcagucagccaggac

SEQ ID NO: 149974 - RNA, 27 nt, Human
ccccaaagaccuagcucugaagcccag

SEQ ID NO: 149975 - RNA, 22 nt, Human
cccccacccccacccccacugc

SEQ ID NO: 149976 - RNA, 25 nt, Human
cucugggcuaggcccagcgcccccc

SEQ ID NO: 149977 - RNA, 20 nt, Human
cugcccccacccccaccccc

SEQ ID NO: 149978 - RNA, 20 nt, Human
cugccccugcccccaccccc

SEQ ID NO: 149979 - RNA, 19 nt, Human
gcccccacccccaccccca

SEQ ID NO: 149980 - RNA, 20 nt, Human
gcccgggccuaccaaaaccg

SEQ ID NO: 149981 - RNA, 19 nt, Human
ggcccgggccuaccaaaac

SEQ ID NO: 149982 - RNA, 18 nt, Human
ggccugagucugcugccu

SEQ ID NO: 149983 - RNA, 18 nt, Human
ggggagcaagcacuacuc

SEQ ID NO: 149984 - RNA, 23 nt, Human
ggugcgggcucaggcggaggccu

SEQ ID NO: 149985 - RNA, 18 nt, Human
gugggacaaggcaggggg

SEQ ID NO: 149986 - RNA, 18 nt, Human
uaauccccuccccccaac

SEQ ID NO: 149987 - RNA, 25 nt, Human
ucaacaaaaugacaaagaggaccau

SEQ ID NO: 149988 - RNA, 27 nt, Human
ucaacaaaaugacaaagaggaccaugg

SEQ ID NO: 149989 - RNA, 22 nt, Human
ucccuggugggacaaggcaggg

SEQ ID NO: 149990 - RNA, 22 nt, Human
ugacaaagaggaccauggaggg

SEQ ID NO: 149991 - RNA, 21 nt, Human
ugccccugcccccacccccac

SEQ ID NO: 149992 - RNA, 22 nt, Human
uguguguccacaaaaacaaagu

SEQ ID NO: 149993 - RNA, 21 nt, Human
uuugguuaauccccucccccc

SEQ ID NO: 149994 - RNA, 21 nt, Human
aaacaaccagugccauagagc

SEQ ID NO: 149995 - RNA, 19 nt, Human
aaacagaaaucacagugac

SEQ ID NO: 149996 - RNA, 20 nt, Human
aaacuuggaaacgccugugu

SEQ ID NO: 149997 - RNA, 18 nt, Human
aauguaaacguugcaacc

SEQ ID NO: 149998 - RNA, 19 nt, Human
acaacaaaagugaacacgg

SEQ ID NO: 149999 - RNA, 19 nt, Human
acaguuuuccugagguuug

SEQ ID NO: 150000 - RNA, 18 nt, Human
agguagccggcggagggc

SEQ ID NO: 150001 - RNA, 22 nt, Human
auacauuccccaauguaaacaa

SEQ ID NO: 150002 - RNA, 24 nt, Human
caaguaauauacacaagaaggugg

SEQ ID NO: 150003 - RNA, 20 nt, Human
cacugaaacuuggaaacgcc

SEQ ID NO: 150004 - RNA, 18 nt, Human
cagugaccaaggguaaug

SEQ ID NO: 150005 - RNA, 18 nt, Human
cagugccauagagcucag

SEQ ID NO: 150006 - RNA, 20 nt, Human
ccgcgcccgcuccccggccc

SEQ ID NO: 150007 - RNA, 20 nt, Human
ccggccgcgccgccgccgcu

SEQ ID NO: 150008 - RNA, 20 nt, Human
ccuugcccaugcugcucccc

SEQ ID NO: 150009 - RNA, 23 nt, Human
cuccccggcccggccgcgccgcc

SEQ ID NO: 150010 - RNA, 20 nt, Human
cugcagguuuaugguacgcu

SEQ ID NO: 150011 - RNA, 18 nt, Human
gaugcaagccaggugggu

SEQ ID NO: 150012 - RNA, 21 nt, Human
gcacaagagggauacaagccc

SEQ ID NO: 150013 - RNA, 20 nt, Human
gcgugugaacaagggauggg

SEQ ID NO: 150014 - RNA, 21 nt, Human
ggcccggccgcgccgccgccg

SEQ ID NO: 150015 - RNA, 18 nt, Human
gggggaugcaagccaggu

SEQ ID NO: 150016 - RNA, 21 nt, Human
uaaaaggcauucugugaccau

SEQ ID NO: 150017 - RNA, 19 nt, Human
uaaacaaaacagaaaucac

SEQ ID NO: 150018 - RNA, 23 nt, Human
uaaauauuugacuuagcaagcua

SEQ ID NO: 150019 - RNA, 24 nt, Human
uaauacaugguguuuacuggugcc

SEQ ID NO: 150020 - RNA, 27 nt, Human
ucagaacucaaucuuaucucauacugu

SEQ ID NO: 150021 - RNA, 18 nt, Human
ucagggcgugugaacaag

SEQ ID NO: 150022 - RNA, 24 nt, Human
ucaguuauucacucuucugaagug

SEQ ID NO: 150023 - RNA, 21 nt, Human
ucgcccaugcacaaaagacag

SEQ ID NO: 150024 - RNA, 19 nt, Human
ucugcaguaggcuggugau

SEQ ID NO: 150025 - RNA, 21 nt, Human
ugaaucagggcgugugaacaa

SEQ ID NO: 150026 - RNA, 24 nt, Human
ugaccaaggguaaugcgagucuga

SEQ ID NO: 150027 - RNA, 18 nt, Human
ugacuuggucuacuuggu

SEQ ID NO: 150028 - RNA, 21 nt, Human
ugaucuguccuuuuaggacca

SEQ ID NO: 150029 - RNA, 19 nt, Human
ugccauagagcucagauaa

SEQ ID NO: 150030 - RNA, 18 nt, Human
ugcccugcacuucugcag

SEQ ID NO: 150031 - RNA, 20 nt, Human
ugggugugaagaggcugacc

SEQ ID NO: 150032 - RNA, 22 nt, Human
ugguacgcucgagagagaucuu

SEQ ID NO: 150033 - RNA, 26 nt, Human
ugucacugaaacuuggaaacgccugu

SEQ ID NO: 150034 - RNA, 19 nt, Human
ugugcacugugucauauau

SEQ ID NO: 150035 - RNA, 21 nt, Human
uguguacccugcugaaauauu

SEQ ID NO: 150036 - RNA, 21 nt, Human
ugugucuuccuugcccaugcu

SEQ ID NO: 150037 - RNA, 24 nt, Human
uuagcacaagagggauacaagccc

SEQ ID NO: 150038 - RNA, 21 nt, Human
uuaucucauacuguaaugggu

SEQ ID NO: 150039 - RNA, 23 nt, Human
uucgagacuucucucugcagguu

SEQ ID NO: 150040 - RNA, 21 nt, Human
aaagaccauggcaugaggucu

SEQ ID NO: 150041 - RNA, 18 nt, Human
aaaguacuagccaacuac

SEQ ID NO: 150042 - RNA, 24 nt, Human
aagaaaacgucuucccaaaaaacc

SEQ ID NO: 150043 - RNA, 25 nt, Human
aagaagcccaauacaguacuagaac

SEQ ID NO: 150044 - RNA, 24 nt, Human
aagccagagcuaccacugagccua

SEQ ID NO: 150045 - RNA, 21 nt, Human
aaggacccgccucccgagguu

SEQ ID NO: 150046 - RNA, 21 nt, Human
aagggccuguuguuugguuuu

SEQ ID NO: 150047 - RNA, 20 nt, Human
aaugguuugggauuugaccu

SEQ ID NO: 150048 - RNA, 21 nt, Human
acaaaguucaucuucccacag

SEQ ID NO: 150049 - RNA, 23 nt, Human
accaaaaaucauggcauaacaac

SEQ ID NO: 150050 - RNA, 20 nt, Human
accuccacuucccucccaga

SEQ ID NO: 150051 - RNA, 24 nt, Human
acuccagaagagcugccuuggcuu

SEQ ID NO: 150052 - RNA, 21 nt, Human
acugaauuccacagagcuaaa

SEQ ID NO: 150053 - RNA, 19 nt, Human
agccaacuacuuucucccc

SEQ ID NO: 150054 - RNA, 20 nt, Human
agccaacuacuuucucccca

SEQ ID NO: 150055 - RNA, 21 nt, Human
agccuagguaauuugguggcu

SEQ ID NO: 150056 - RNA, 19 nt, Human
aggagaaagcuaauaaaga

SEQ ID NO: 150057 - RNA, 22 nt, Human
aggagaaagcuaauaaagaaaa

SEQ ID NO: 150058 - RNA, 19 nt, Human
aggugcuggcagcagcccu

SEQ ID NO: 150059 - RNA, 22 nt, Human
caaaaaaccccuuuagacagaa

SEQ ID NO: 150060 - RNA, 23 nt, Human
caaagccccccaguaggcacuuc

SEQ ID NO: 150061 - RNA, 24 nt, Human
caagggccuguuguuugguuuugg

SEQ ID NO: 150062 - RNA, 19 nt, Human
cacaggccaaagcccccca

SEQ ID NO: 150063 - RNA, 22 nt, Human
cacugagccuaggagcccugau

SEQ ID NO: 150064 - RNA, 19 nt, Human
cagaaguggggcugguguu

SEQ ID NO: 150065 - RNA, 22 nt, Human
cagaaucugagauggcuuaaaa

SEQ ID NO: 150066 - RNA, 20 nt, Human
cagcaaccuccacuucccuc

SEQ ID NO: 150067 - RNA, 20 nt, Human
cagcagacagcucgucuacc

SEQ ID NO: 150068 - RNA, 22 nt, Human
cagcagcccugguccgcucuuc

SEQ ID NO: 150069 - RNA, 24 nt, Human
cagcagcccugguccgcucuucug

SEQ ID NO: 150070 - RNA, 18 nt, Human
caggauggcuuccaggcu

SEQ ID NO: 150071 - RNA, 23 nt, Human
caguacuagaacaauccaccaga

SEQ ID NO: 150072 - RNA, 18 nt, Human
cagugcaugacccagaag

SEQ ID NO: 150073 - RNA, 19 nt, Human
caugacccagaaguggggc

SEQ ID NO: 150074 - RNA, 21 nt, Human
cauggcauaacaacuccccaa

SEQ ID NO: 150075 - RNA, 19 nt, Human
ccccaccccccagaucccc

SEQ ID NO: 150076 - RNA, 20 nt, Human
ccccagauccccaugaacuc

SEQ ID NO: 150077 - RNA, 21 nt, Human
ccgcacugaggggaaggaccc

SEQ ID NO: 150078 - RNA, 20 nt, Human
ccucaccugugaagugggau

SEQ ID NO: 150079 - RNA, 20 nt, Human
ccucugcugguguacugggg

SEQ ID NO: 150080 - RNA, 21 nt, Human
ccugggguagaucuucucagg

SEQ ID NO: 150081 - RNA, 18 nt, Human
cgaauuguucacuaguga

SEQ ID NO: 150082 - RNA, 20 nt, Human
cgacugggcucugaccaucc

SEQ ID NO: 150083 - RNA, 22 nt, Human
cucacaggccaaagccccccag

SEQ ID NO: 150084 - RNA, 22 nt, Human
cuccuccccaccccccagaucc

SEQ ID NO: 150085 - RNA, 20 nt, Human
cucuaaccucagccuaggua

SEQ ID NO: 150086 - RNA, 18 nt, Human
cugauggggccccagaca

SEQ ID NO: 150087 - RNA, 19 nt, Human
cugguggcugcagggaggc

SEQ ID NO: 150088 - RNA, 20 nt, Human
cuguacagcaaccuccacuu

SEQ ID NO: 150089 - RNA, 24 nt, Human
cuuaaccaggaauaacauacuacu

SEQ ID NO: 150090 - RNA, 23 nt, Human
cuuacaaacucucuuuccuccuc

SEQ ID NO: 150091 - RNA, 25 nt, Human
cuucacaauuauauagcaccuuuca

SEQ ID NO: 150092 - RNA, 18 nt, Human
cuuucagcaagaggccua

SEQ ID NO: 150093 - RNA, 19 nt, Human
cuuucagcaagaggccuag

SEQ ID NO: 150094 - RNA, 25 nt, Human
gaaauaaucuauuaacgaagaagcc

SEQ ID NO: 150095 - RNA, 24 nt, Human
gacagaaucugagauggcuuaaaa

SEQ ID NO: 150096 - RNA, 21 nt, Human
gacccagaaguggggcuggug

SEQ ID NO: 150097 - RNA, 20 nt, Human
gagaauccccucaguaaugg

SEQ ID NO: 150098 - RNA, 22 nt, Human
gaucacuccagguggugucuaa

SEQ ID NO: 150099 - RNA, 19 nt, Human
gcaaugccugcuuaaccag

SEQ ID NO: 150100 - RNA, 23 nt, Human
gcauaacaacuccccaaaaagga

SEQ ID NO: 150101 - RNA, 19 nt, Human
gcccucaacauuuccuuaa

SEQ ID NO: 150102 - RNA, 28 nt, Human
gcuaccacugagccuaggagcccugauc

SEQ ID NO: 150103 - RNA, 20 nt, Human
gcuggcagcagcccuggucc

SEQ ID NO: 150104 - RNA, 21 nt, Human
ggaauaacauacuacuucuaa

SEQ ID NO: 150105 - RNA, 20 nt, Human
ggcugcagggaggcucucug

SEQ ID NO: 150106 - RNA, 18 nt, Human
ggcuuaaaauagcugcuc

SEQ ID NO: 150107 - RNA, 21 nt, Human
ggcuuccuccuccccaccccc

SEQ ID NO: 150108 - RNA, 22 nt, Human
gggaauccuaaaaacauaaccc

SEQ ID NO: 150109 - RNA, 18 nt, Human
gggcugguguuguggcag

SEQ ID NO: 150110 - RNA, 22 nt, Human
guauucagcacaaagacaguau

SEQ ID NO: 150111 - RNA, 27 nt, Human
gucuucccaaaaaaccccuuuagacag

SEQ ID NO: 150112 - RNA, 19 nt, Human
guguaauuuugcggugaga

SEQ ID NO: 150113 - RNA, 21 nt, Human
uaaaagaaacacugacugcau

SEQ ID NO: 150114 - RNA, 23 nt, Human
uaaaauagcugcuccagggcaaa

SEQ ID NO: 150115 - RNA, 21 nt, Human
uaaccaggaauaacauacuac

SEQ ID NO: 150116 - RNA, 23 nt, Human
uaacccaccagcaugaccuuaca

SEQ ID NO: 150117 - RNA, 22 nt, Human
uaacccaccagcaugaccuuag

SEQ ID NO: 150118 - RNA, 21 nt, Human
uaacccuaacauggcacuguu

SEQ ID NO: 150119 - RNA, 21 nt, Human
uaaguccuguauagaggugcu

SEQ ID NO: 150120 - RNA, 22 nt, Human
uacaaacucucuuuccuccucc

SEQ ID NO: 150121 - RNA, 21 nt, Human
uaccaaaaaucauggcauaac

SEQ ID NO: 150122 - RNA, 22 nt, Human
uaccaaaaaucauggcauaaca

SEQ ID NO: 150123 - RNA, 19 nt, Human
uagacaaaacuuccucaaa

SEQ ID NO: 150124 - RNA, 23 nt, Human
uagacagaaucugagauggcuua

SEQ ID NO: 150125 - RNA, 22 nt, Human
uagagaaauagaauuaguaaua

SEQ ID NO: 150126 - RNA, 21 nt, Human
uagcuaacccaccagcaugac

SEQ ID NO: 150127 - RNA, 24 nt, Human
uaggcaagaugucucagauucucc

SEQ ID NO: 150128 - RNA, 23 nt, Human
uaguuugugugguacuuuuacca

SEQ ID NO: 150129 - RNA, 21 nt, Human
ucaaaguacuagccaacuacu

SEQ ID NO: 150130 - RNA, 18 nt, Human
ucaguaaugguuugggau

SEQ ID NO: 150131 - RNA, 18 nt, Human
uccacagagcuaaauauc

SEQ ID NO: 150132 - RNA, 20 nt, Human
uccagguggugucuaagcca

SEQ ID NO: 150133 - RNA, 21 nt, Human
ucccauaguuugugugguacu

SEQ ID NO: 150134 - RNA, 18 nt, Human
ucccccuccccccucccc

SEQ ID NO: 150135 - RNA, 24 nt, Human
uccccuaucucgguuuuuccugua

SEQ ID NO: 150136 - RNA, 20 nt, Human
ucccgagguuauaaguuucc

SEQ ID NO: 150137 - RNA, 25 nt, Human
uccucaaaaauguuagaggaagagu

SEQ ID NO: 150138 - RNA, 21 nt, Human
uccugcggcagcagacagcuc

SEQ ID NO: 150139 - RNA, 20 nt, Human
ucgguuuuuccuguacagca

SEQ ID NO: 150140 - RNA, 21 nt, Human
ucuaaccucagccuagguaau

SEQ ID NO: 150141 - RNA, 23 nt, Human
ucuucccaaaaaaccccuuuaga

SEQ ID NO: 150142 - RNA, 24 nt, Human
ucuuuuuuuuuugguaacuuguga

SEQ ID NO: 150143 - RNA, 22 nt, Human
ugaccuccccccuuugcuuccc

SEQ ID NO: 150144 - RNA, 24 nt, Human
ugaccuuacaaacucucuuuccuc

SEQ ID NO: 150145 - RNA, 18 nt, Human
ugacuuuagagaaacucc

SEQ ID NO: 150146 - RNA, 22 nt, Human
ugagacauaaaugucacagaaa

SEQ ID NO: 150147 - RNA, 23 nt, Human
ugagcaaagagaguucugaaggg

SEQ ID NO: 150148 - RNA, 18 nt, Human
ugagccuaggagcccuga

SEQ ID NO: 150149 - RNA, 21 nt, Human
ugaggucucgacugggcucug

SEQ ID NO: 150150 - RNA, 21 nt, Human
ugaguggcaggugcuggcagc

SEQ ID NO: 150151 - RNA, 24 nt, Human
ugccuuggcuuucagcaagaggcc

SEQ ID NO: 150152 - RNA, 22 nt, Human
uggaaguaugugaccgcacuga

SEQ ID NO: 150153 - RNA, 22 nt, Human
uggaccucagugcaugacccag

SEQ ID NO: 150154 - RNA, 23 nt, Human
uggcauaacaacuccccaaaaag

SEQ ID NO: 150155 - RNA, 22 nt, Human
uggcugcagggaggcucucugg

SEQ ID NO: 150156 - RNA, 21 nt, Human
ugggcucugaccaucccccag

SEQ ID NO: 150157 - RNA, 23 nt, Human
ugggucagaagggcaggauggcu

SEQ ID NO: 150158 - RNA, 21 nt, Human
ugguccgcucuucuggaagua

SEQ ID NO: 150159 - RNA, 24 nt, Human
ugguuuagcuaacccaccagcaug

SEQ ID NO: 150160 - RNA, 19 nt, Human
ugguuugggauuugaccuc

SEQ ID NO: 150161 - RNA, 20 nt, Human
ugugaggucucgacugggcu

SEQ ID NO: 150162 - RNA, 18 nt, Human
uguggcagcugauggggc

SEQ ID NO: 150163 - RNA, 23 nt, Human
uguuugguuuugguuuaugugug

SEQ ID NO: 150164 - RNA, 25 nt, Human
uguuugguuuugguuuauguguguu

SEQ ID NO: 150165 - RNA, 18 nt, Human
uuagcuaacccaccagca

SEQ ID NO: 150166 - RNA, 22 nt, Human
uugcccucaacauuuccuuaac

SEQ ID NO: 150167 - RNA, 19 nt, Human
uuggcucuuuuuuuuuugg

SEQ ID NO: 150168 - RNA, 24 nt, Human
uugguaacuugugagcaaagagag

SEQ ID NO: 150169 - RNA, 23 nt, Human
uuuccugggaaugcaggcacucu

SEQ ID NO: 150170 - RNA, 20 nt, Human
uuugcacuaagacagccuuc

SEQ ID NO: 150171 - RNA, 23 nt, Human
uuugcuucccccuccccccuccc

SEQ ID NO: 150172 - RNA, 23 nt, Human
uuuuuuuuuuuugaagggaauca

SEQ ID NO: 150173 - RNA, 19 nt, Human
aagcaacccagcuccggaa

SEQ ID NO: 150174 - RNA, 19 nt, Human
acugcagcagaagcaaccc

SEQ ID NO: 150175 - RNA, 24 nt, Human
agcuggaucgacggacuggcuggg

SEQ ID NO: 150176 - RNA, 25 nt, Human
aggggucacguuuaaagcccagagc

SEQ ID NO: 150177 - RNA, 20 nt, Human
cagcagaagcaacccagcuc

SEQ ID NO: 150178 - RNA, 25 nt, Human
cguuugcuagaaaaaccucaaaaaa

SEQ ID NO: 150179 - RNA, 25 nt, Human
gcagcagaagcaacccagcuccgga

SEQ ID NO: 150180 - RNA, 19 nt, Human
gccggcgcuggcggcugcg

SEQ ID NO: 150181 - RNA, 18 nt, Human
ucuuuuuuuuuuuuuuuu

SEQ ID NO: 150182 - RNA, 20 nt, Human
uggcuuuuaaaggaaacaau

SEQ ID NO: 150183 - RNA, 25 nt, Human
uuuuuuuuuuuuuuuuggcuuuuaa

SEQ ID NO: 150184 - RNA, 18 nt, Human
uuuuuuuuuuuuuuuuug

SEQ ID NO: 150185 - RNA, 25 nt, Human
uuuuuuuuuuuuuuuuuuggcuuuu

SEQ ID NO: 150186 - RNA, 25 nt, Human
uuuuuuuuuuuuuuuuuuucuuuuu

SEQ ID NO: 150187 - RNA, 22 nt, Human
uuuuuuuuuuuuuuuuuuuggc

SEQ ID NO: 150188 - RNA, 19 nt, Human
aacccuuucucucucgcuc

SEQ ID NO: 150189 - RNA, 19 nt, Human
aagccgagagccgcgaaaa

SEQ ID NO: 150190 - RNA, 27 nt, Human
acccucccgaggcccccgccucucuca

SEQ ID NO: 150191 - RNA, 21 nt, Human
cacccucccgaggcccccgcc

SEQ ID NO: 150192 - RNA, 20 nt, Human
caccgccuuccucccucccu

SEQ ID NO: 150193 - RNA, 21 nt, Human
ccccgcccuucuccucccucc

SEQ ID NO: 150194 - RNA, 22 nt, Human
ccccgcccuucuccucccuccu

SEQ ID NO: 150195 - RNA, 25 nt, Human
ccccgccucucucaccgccuuccuc

SEQ ID NO: 150196 - RNA, 22 nt, Human
cccucccuugcucuccccucca

SEQ ID NO: 150197 - RNA, 24 nt, Human
cccucccuugcucuccccuccaau

SEQ ID NO: 150198 - RNA, 18 nt, Human
cccuucuccucccuccuu

SEQ ID NO: 150199 - RNA, 19 nt, Human
cccuucuccucccuccuuu

SEQ ID NO: 150200 - RNA, 20 nt, Human
cccuucuccucccuccuuuc

SEQ ID NO: 150201 - RNA, 18 nt, Human
ccgcccuucuccucccuc

SEQ ID NO: 150202 - RNA, 23 nt, Human
ccucccgaggcccccgccucucu

SEQ ID NO: 150203 - RNA, 21 nt, Human
ccucccuccuuucacccuccc

SEQ ID NO: 150204 - RNA, 21 nt, Human
ccucccuccuuucacccuccc

SEQ ID NO: 150205 - RNA, 23 nt, Human
ccucccuccuuucacccucccga

SEQ ID NO: 150206 - RNA, 19 nt, Human
ccucccuugcucuccccuc

SEQ ID NO: 150207 - RNA, 23 nt, Human
ccuccugcccucacugucugggc

SEQ ID NO: 150208 - RNA, 23 nt, Human
ccucgcucgggccuccgugcccc

SEQ ID NO: 150209 - RNA, 21 nt, Human
cgccuuccucccucccuugcu

SEQ ID NO: 150210 - RNA, 20 nt, Human
cgcgaaaaaagucagagcug

SEQ ID NO: 150211 - RNA, 19 nt, Human
cgggaaggggcgggggcag

SEQ ID NO: 150212 - RNA, 19 nt, Human
cgggggcagccgagcgagg

SEQ ID NO: 150213 - RNA, 22 nt, Human
cucccgaggcccccgccucucu

SEQ ID NO: 150214 - RNA, 22 nt, Human
cucccuccuuucacccucccga

SEQ ID NO: 150215 - RNA, 20 nt, Human
cucccuugcucuccccucca

SEQ ID NO: 150216 - RNA, 23 nt, Human
cucccuugcucuccccuccaauc

SEQ ID NO: 150217 - RNA, 22 nt, Human
cuccugcccucacugucugggc

SEQ ID NO: 150218 - RNA, 18 nt, Human
cucgcucgcucuccuucu

SEQ ID NO: 150219 - RNA, 23 nt, Human
cucuccccuccaauccagaaccc

SEQ ID NO: 150220 - RNA, 21 nt, Human
gagagccgcgaaaaaagucag

SEQ ID NO: 150221 - RNA, 18 nt, Human
gccuccgugccccgcccu

SEQ ID NO: 150222 - RNA, 19 nt, Human
gcgucucuucucucccucc

SEQ ID NO: 150223 - RNA, 20 nt, Human
ggccgggaaggggcgggggc

SEQ ID NO: 150224 - RNA, 18 nt, Human
gggaaggggcgggggcag

SEQ ID NO: 150225 - RNA, 20 nt, Human
gggccuccgugccccgcccu

SEQ ID NO: 150226 - RNA, 18 nt, Human
ucccucgcucgggccucc

SEQ ID NO: 150227 - RNA, 19 nt, Human
ucgcucgcucuccuucugc

SEQ ID NO: 150228 - RNA, 20 nt, Human
ucucccuccugcccucacug

SEQ ID NO: 150229 - RNA, 20 nt, Human
ucugcgucucuucucucccu

SEQ ID NO: 150230 - RNA, 19 nt, Human
ucuucucucccuccugccc

SEQ ID NO: 150231 - RNA, 24 nt, Human
ugccccgcccuucuccucccuccu

SEQ ID NO: 150232 - RNA, 20 nt, Human
uucuccucccuccuuucacc

SEQ ID NO: 150233 - RNA, 21 nt, Human
uucuccucccuccuuucaccc

SEQ ID NO: 150234 - RNA, 25 nt, Human
uucuccucccuccuuucacccuccc

SEQ ID NO: 150235 - RNA, 20 nt, Human
aagaaguugcagagcacgaa

SEQ ID NO: 150236 - RNA, 22 nt, Human
accacaggaagacggcccccaa

SEQ ID NO: 150237 - RNA, 22 nt, Human
agaaaacaaaaugguagccagg

SEQ ID NO: 150238 - RNA, 18 nt, Human
agaggguucuggggcugg

SEQ ID NO: 150239 - RNA, 20 nt, Human
aggaagacggcccccaacau

SEQ ID NO: 150240 - RNA, 21 nt, Human
auugaauuugggucuguucuc

SEQ ID NO: 150241 - RNA, 24 nt, Human
caaccacaggaagacggcccccaa

SEQ ID NO: 150242 - RNA, 20 nt, Human
caggagaaaacaaaauggua

SEQ ID NO: 150243 - RNA, 18 nt, Human
ccccagaggguucugggg

SEQ ID NO: 150244 - RNA, 26 nt, Human
ccccagaggguucugggggguugaac

SEQ ID NO: 150245 - RNA, 19 nt, Human
cgacaaaucauuuauugag

SEQ ID NO: 150246 - RNA, 21 nt, Human
cgcuuagaaccaugcaccaac

SEQ ID NO: 150247 - RNA, 20 nt, Human
cggcccccaacauucuuccc

SEQ ID NO: 150248 - RNA, 23 nt, Human
cucagaaacucuggaauugaaga

SEQ ID NO: 150249 - RNA, 20 nt, Human
cucugugucaggcguaugau

SEQ ID NO: 150250 - RNA, 21 nt, Human
cuggugggauccucauuucca

SEQ ID NO: 150251 - RNA, 18 nt, Human
ggaagacggcccccaaca

SEQ ID NO: 150252 - RNA, 25 nt, Human
guagccagguguucuuggucaugcc

SEQ ID NO: 150253 - RNA, 22 nt, Human
uccccagaggguucuggggcug

SEQ ID NO: 150254 - RNA, 25 nt, Human
ucuggaauugaagaaguugcagagc

SEQ ID NO: 150255 - RNA, 24 nt, Human
ugcagagcacgaagauaaaauggu

SEQ ID NO: 150256 - RNA, 22 nt, Human
ugcauacaaccacaggaagacg

SEQ ID NO: 150257 - RNA, 18 nt, Human
ugggucuguucucagaaa

SEQ ID NO: 150258 - RNA, 19 nt, Human
ugggucuguucucagaaac

SEQ ID NO: 150259 - RNA, 24 nt, Human
uuccccagaggguucuggggcugg

SEQ ID NO: 150260 - RNA, 25 nt, Human
uuuuuuuuuuuuuuuuuuuuagggg

SEQ ID NO: 150261 - RNA, 23 nt, Human
aaaaaaaaaaaaaaaacagaaaa

SEQ ID NO: 150262 - RNA, 26 nt, Human
aaaaaaaaaaaaaacagaaaaaaccc

SEQ ID NO: 150263 - RNA, 21 nt, Human
aaaaaaaaaaaaacagaaaaa

SEQ ID NO: 150264 - RNA, 24 nt, Human
aaaaaaaaacagaaaaaacccaaa

SEQ ID NO: 150265 - RNA, 22 nt, Human
aaaaaaaaacagaaaaaacccu

SEQ ID NO: 150266 - RNA, 19 nt, Human
aaaaaaaacagaaaaaacc

SEQ ID NO: 150267 - RNA, 23 nt, Human
aaaaaaaacagaaaaaacccaaa

SEQ ID NO: 150268 - RNA, 24 nt, Human
aaaaaaaacagaaaaaacccaaaa

SEQ ID NO: 150269 - RNA, 20 nt, Human
aaaaaaacagaaaaaaccca

SEQ ID NO: 150270 - RNA, 28 nt, Human
aaaaaacagaaaaaacccaaaaccaccc

SEQ ID NO: 150271 - RNA, 24 nt, Human
aaaaacagaaaaaacccaaaacca

SEQ ID NO: 150272 - RNA, 25 nt, Human
aaaaacccaaaaccacccaagaacc

SEQ ID NO: 150273 - RNA, 23 nt, Human
aaaaagaaaaaaaaaaccaucaa

SEQ ID NO: 150274 - RNA, 23 nt, Human
aaaaagaaaaaaaaaaccaucaa

SEQ ID NO: 150275 - RNA, 24 nt, Human
aaaacagaaaaaacccaaaaccac

SEQ ID NO: 150276 - RNA, 20 nt, Human
aaaaccagggucucugcuag

SEQ ID NO: 150277 - RNA, 20 nt, Human
aaaaccagggucucugcuag

SEQ ID NO: 150278 - RNA, 26 nt, Human
aaaacccaaaaccacccaagaaccaa

SEQ ID NO: 150279 - RNA, 27 nt, Human
aaaagcaucagcaaaaguuggagaccc

SEQ ID NO: 150280 - RNA, 20 nt, Human
aaacacaguaauccaaugag

SEQ ID NO: 150281 - RNA, 22 nt, Human
aaagcaaggaugaugagaaaau

SEQ ID NO: 150282 - RNA, 22 nt, Human
aaagcaaggaugaugagaaaau

SEQ ID NO: 150283 - RNA, 23 nt, Human
aaagugaguggccacaaaugcca

SEQ ID NO: 150284 - RNA, 25 nt, Human
aaaugcaccucaggagcaaaaacac

SEQ ID NO: 150285 - RNA, 25 nt, Human
aaaugcaccucaggagcaaaaacac

SEQ ID NO: 150286 - RNA, 22 nt, Human
aacccaaaaccacccaagaacc

SEQ ID NO: 150287 - RNA, 18 nt, Human
aacuacugaaauugaaca

SEQ ID NO: 150288 - RNA, 18 nt, Human
aacuacugaaauugaaca

SEQ ID NO: 150289 - RNA, 22 nt, Human
aagagaaugcgagcucccugaa

SEQ ID NO: 150290 - RNA, 22 nt, Human
aagagaaugcgagcucccugaa

SEQ ID NO: 150291 - RNA, 22 nt, Human
aagcaaggaugaugagaaaaug

SEQ ID NO: 150292 - RNA, 22 nt, Human
aagcaaggaugaugagaaaaug

SEQ ID NO: 150293 - RNA, 22 nt, Human
acaaagugaguggccacaaaug

SEQ ID NO: 150294 - RNA, 18 nt, Human
acaggaaaaaaaccaggg

SEQ ID NO: 150295 - RNA, 18 nt, Human
acaggaaaaaaaccaggg

SEQ ID NO: 150296 - RNA, 18 nt, Human
acaggaaaaaaaccaggg

SEQ ID NO: 150297 - RNA, 30 nt, Human
acagucaauuuggcaaaaaagaaaaaaaaa

SEQ ID NO: 150298 - RNA, 21 nt, Human
acccaaaaccacccaagaacc

SEQ ID NO: 150299 - RNA, 22 nt, Human
acccaaaaccacccaagaacca

SEQ ID NO: 150300 - RNA, 19 nt, Human
accucauugcucauugugg

SEQ ID NO: 150301 - RNA, 19 nt, Human
accucauugcucauugugg

SEQ ID NO: 150302 - RNA, 20 nt, Human
acgguaugacauaggcagau

SEQ ID NO: 150303 - RNA, 20 nt, Human
acgguaugacauaggcagau

SEQ ID NO: 150304 - RNA, 22 nt, Human
acuugaugggcacgagggcaac

SEQ ID NO: 150305 - RNA, 22 nt, Human
acuugaugggcacgagggcaac

SEQ ID NO: 150306 - RNA, 27 nt, Human
agaaaaaacccaaaaccacccaagaac

SEQ ID NO: 150307 - RNA, 18 nt, Human
aggaaaaaaaccaggguc

SEQ ID NO: 150308 - RNA, 18 nt, Human
aggaaaaaaaccaggguc

SEQ ID NO: 150309 - RNA, 18 nt, Human
aggaaggagaugaguuuc

SEQ ID NO: 150310 - RNA, 18 nt, Human
aggaaggagaugaguuuc

SEQ ID NO: 150311 - RNA, 21 nt, Human
aggaaggagaugaguuuccua

SEQ ID NO: 150312 - RNA, 18 nt, Human
aggaggaggguuccuggc

SEQ ID NO: 150313 - RNA, 18 nt, Human
aggaggaggguuccuggc

SEQ ID NO: 150314 - RNA, 22 nt, Human
aucagccuuugugaaaagccaa

SEQ ID NO: 150315 - RNA, 22 nt, Human
aucagccuuugugaaaagccaa

SEQ ID NO: 150316 - RNA, 23 nt, Human
auucuguggcauaaacauuuuca

SEQ ID NO: 150317 - RNA, 19 nt, Human
caaaaccacccaagaacca

SEQ ID NO: 150318 - RNA, 20 nt, Human
caaaaccacccaagaaccaa

SEQ ID NO: 150319 - RNA, 23 nt, Human
caaaaccacccaagaaccaaaga

SEQ ID NO: 150320 - RNA, 28 nt, Human
caaaagcaucagcaaaaguuggagaccc

SEQ ID NO: 150321 - RNA, 22 nt, Human
caaacuacugaaauugaacaug

SEQ ID NO: 150322 - RNA, 22 nt, Human
caaacuacugaaauugaacaug

SEQ ID NO: 150323 - RNA, 23 nt, Human
caaagaaggccugaucuguagug

SEQ ID NO: 150324 - RNA, 24 nt, Human
caaagugaguggccacaaaugcca

SEQ ID NO: 150325 - RNA, 23 nt, Human
caaauucuguggcauaaacauuu

SEQ ID NO: 150326 - RNA, 23 nt, Human
caaauucuguggcauaaacauuu

SEQ ID NO: 150327 - RNA, 21 nt, Human
caaugaggaauuuccaggcau

SEQ ID NO: 150328 - RNA, 23 nt, Human
cacaggaaaaaaaccagggucuc

SEQ ID NO: 150329 - RNA, 23 nt, Human
cacaggaaaaaaaccagggucuc

SEQ ID NO: 150330 - RNA, 22 nt, Human
cagaaaaaacccaaaaccaccc

SEQ ID NO: 150331 - RNA, 20 nt, Human
cagcagagcaggcacugccu

SEQ ID NO: 150332 - RNA, 20 nt, Human
cagcagagcaggcacugccu

SEQ ID NO: 150333 - RNA, 21 nt, Human
cagccuuugugaaaagccaag

SEQ ID NO: 150334 - RNA, 21 nt, Human
cagccuuugugaaaagccaag

SEQ ID NO: 150335 - RNA, 22 nt, Human
caggaaggagaugaguuuccua

SEQ ID NO: 150336 - RNA, 26 nt, Human
ccaaaaccacccaagaaccaaagaag

SEQ ID NO: 150337 - RNA, 19 nt, Human
ccaaggccgagaggccaug

SEQ ID NO: 150338 - RNA, 19 nt, Human
ccaaggccgagaggccaug

SEQ ID NO: 150339 - RNA, 20 nt, Human
ccagccucccggcuccucag

SEQ ID NO: 150340 - RNA, 19 nt, Human
ccaggcaccaggcucuacu

SEQ ID NO: 150341 - RNA, 25 nt, Human
cccaggcugcccgguggcccaggga

SEQ ID NO: 150342 - RNA, 25 nt, Human
cccaggcugcccgguggcccaggga

SEQ ID NO: 150343 - RNA, 25 nt, Human
ccccaccuucaaaaaaaaaaaaaaa

SEQ ID NO: 150344 - RNA, 25 nt, Human
ccccaccuucaaaaaaaaaaaaaaa

SEQ ID NO: 150345 - RNA, 18 nt, Human
ccccagcagugagacucu

SEQ ID NO: 150346 - RNA, 18 nt, Human
ccccagcagugagacucu

SEQ ID NO: 150347 - RNA, 21 nt, Human
cccgacugcacuugaugggca

SEQ ID NO: 150348 - RNA, 21 nt, Human
cccgacugcacuugaugggca

SEQ ID NO: 150349 - RNA, 21 nt, Human
cccgcggggcaggggaggauu

SEQ ID NO: 150350 - RNA, 18 nt, Human
ccgccgcgccagccgcuc

SEQ ID NO: 150351 - RNA, 22 nt, Human
ccgcgccagccgcucccaggca

SEQ ID NO: 150352 - RNA, 22 nt, Human
ccgcuuggagauaaaaggcugu

SEQ ID NO: 150353 - RNA, 18 nt, Human
ccgggggggggcuggggg

SEQ ID NO: 150354 - RNA, 18 nt, Human
ccucaggaaggagaugag

SEQ ID NO: 150355 - RNA, 18 nt, Human
ccucaggaaggagaugag

SEQ ID NO: 150356 - RNA, 22 nt, Human
ccucaggaaggagaugaguuuc

SEQ ID NO: 150357 - RNA, 19 nt, Human
ccuccccagcagugagacu

SEQ ID NO: 150358 - RNA, 19 nt, Human
ccuccccagcagugagacu

SEQ ID NO: 150359 - RNA, 20 nt, Human
ccuucaaaaaaaaaaaaaaa

SEQ ID NO: 150360 - RNA, 20 nt, Human
ccuucaaaaaaaaaaaaaaa

SEQ ID NO: 150361 - RNA, 24 nt, Human
cgccccaggcugcccgguggccca

SEQ ID NO: 150362 - RNA, 24 nt, Human
cgccccaggcugcccgguggccca

SEQ ID NO: 150363 - RNA, 21 nt, Human
cggcggggacaggagaggcuc

SEQ ID NO: 150364 - RNA, 19 nt, Human
cuacacccccauugacagg

SEQ ID NO: 150365 - RNA, 19 nt, Human
cuacacccccauugacagg

SEQ ID NO: 150366 - RNA, 21 nt, Human
cucccaggcaccaggcucuac

SEQ ID NO: 150367 - RNA, 22 nt, Human
cuccccagcagugagacucuag

SEQ ID NO: 150368 - RNA, 22 nt, Human
cuccccagcagugagacucuag

SEQ ID NO: 150369 - RNA, 18 nt, Human
cucugggugacuuagcuc

SEQ ID NO: 150370 - RNA, 18 nt, Human
cucugggugacuuagcuc

SEQ ID NO: 150371 - RNA, 18 nt, Human
cuggaaagacacaccgcc

SEQ ID NO: 150372 - RNA, 21 nt, Human
cuggaaagacacaccgcccaa

SEQ ID NO: 150373 - RNA, 20 nt, Human
cugggugacuuagcuccggg

SEQ ID NO: 150374 - RNA, 20 nt, Human
cugggugacuuagcuccggg

SEQ ID NO: 150375 - RNA, 19 nt, Human
cuguggggggaccuugggg

SEQ ID NO: 150376 - RNA, 19 nt, Human
cuguggggggaccuugggg

SEQ ID NO: 150377 - RNA, 19 nt, Human
gaaaaaacccaaaaccacc

SEQ ID NO: 150378 - RNA, 21 nt, Human
gacaguccuuccugccuaccc

SEQ ID NO: 150379 - RNA, 21 nt, Human
gacaguccuuccugccuaccc

SEQ ID NO: 150380 - RNA, 21 nt, Human
gccacaaaugccaggacagcg

SEQ ID NO: 150381 - RNA, 21 nt, Human
gccacaaaugccaggacagcg

SEQ ID NO: 150382 - RNA, 21 nt, Human
gccaggacagcgguguccugg

SEQ ID NO: 150383 - RNA, 21 nt, Human
gccaggacagcgguguccugg

SEQ ID NO: 150384 - RNA, 23 nt, Human
gcgcagcuccgggggggggcugg

SEQ ID NO: 150385 - RNA, 24 nt, Human
gcgcagcuccggggggggggaacc

SEQ ID NO: 150386 - RNA, 25 nt, Human
gcgcagcuccggggggggggaacgc

SEQ ID NO: 150387 - RNA, 25 nt, Human
gcgcagcuccgggggggggggaacc

SEQ ID NO: 150388 - RNA, 26 nt, Human
gcgcagcuccgggggggggggaacgc

SEQ ID NO: 150389 - RNA, 19 nt, Human
gcggggacaggagaggcuc

SEQ ID NO: 150390 - RNA, 21 nt, Human
gcgguguccuggagcuguggg

SEQ ID NO: 150391 - RNA, 18 nt, Human
gcucccagcagcccuccc

SEQ ID NO: 150392 - RNA, 18 nt, Human
gcucccagcagcccuccc

SEQ ID NO: 150393 - RNA, 20 nt, Human
gcuccgggggggggcugggg

SEQ ID NO: 150394 - RNA, 20 nt, Human
ggcaacacgaacacaagaga

SEQ ID NO: 150395 - RNA, 20 nt, Human
ggcaacacgaacacaagaga

SEQ ID NO: 150396 - RNA, 19 nt, Human
ggcacgagggcaacacgaa

SEQ ID NO: 150397 - RNA, 19 nt, Human
ggcacgagggcaacacgaa

SEQ ID NO: 150398 - RNA, 24 nt, Human
ggcgcagcuccgggggggggcugg

SEQ ID NO: 150399 - RNA, 18 nt, Human
gggaccuuggggaagaac

SEQ ID NO: 150400 - RNA, 18 nt, Human
gggaccuuggggaagaac

SEQ ID NO: 150401 - RNA, 19 nt, Human
gguagagaugaggacaagc

SEQ ID NO: 150402 - RNA, 19 nt, Human
gguagagaugaggacaagc

SEQ ID NO: 150403 - RNA, 18 nt, Human
gguguccuggagcugugg

SEQ ID NO: 150404 - RNA, 23 nt, Human
gugaccuucuggaaagacacacc

SEQ ID NO: 150405 - RNA, 23 nt, Human
gugaccuucuggaaagacacacc

SEQ ID NO: 150406 - RNA, 19 nt, Human
guggggggaccuuggggaa

SEQ ID NO: 150407 - RNA, 19 nt, Human
guggggggaccuuggggaa

SEQ ID NO: 150408 - RNA, 21 nt, Human
uaaaacacaguaauccaauga

SEQ ID NO: 150409 - RNA, 23 nt, Human
uacaauaaguugcauauaaaacc

SEQ ID NO: 150410 - RNA, 23 nt, Human
uacaauaaguugcauauaaaacc

SEQ ID NO: 150411 - RNA, 19 nt, Human
uacacccccauugacagga

SEQ ID NO: 150412 - RNA, 19 nt, Human
uacacccccauugacagga

SEQ ID NO: 150413 - RNA, 18 nt, Human
uagugugaggauccaggg

SEQ ID NO: 150414 - RNA, 25 nt, Human
uauauuccccuccccaccuucaaaa

SEQ ID NO: 150415 - RNA, 25 nt, Human
uauauuccccuccccaccuucaaaa

SEQ ID NO: 150416 - RNA, 22 nt, Human
ucaaaaaaaaaaaaaaaaaaaa

SEQ ID NO: 150417 - RNA, 22 nt, Human
ucaaaaaaaaaaaaaaaaaaaa

SEQ ID NO: 150418 - RNA, 23 nt, Human
ucaaaaaaaaaaaaaaaaaaaaa

SEQ ID NO: 150419 - RNA, 23 nt, Human
ucaaaaaaaaaaaaaaaaaaaaa

SEQ ID NO: 150420 - RNA, 20 nt, Human
ucaacugaucaaacuacuga

SEQ ID NO: 150421 - RNA, 20 nt, Human
ucaacugaucaaacuacuga

SEQ ID NO: 150422 - RNA, 18 nt, Human
ucaaugcauaaaaccaau

SEQ ID NO: 150423 - RNA, 18 nt, Human
ucaaugcauaaaaccaau

SEQ ID NO: 150424 - RNA, 22 nt, Human
ucaaugcauaaaaccaauuacc

SEQ ID NO: 150425 - RNA, 22 nt, Human
ucaaugcauaaaaccaauuacc

SEQ ID NO: 150426 - RNA, 26 nt, Human
ucaauuuggcaaaaaagaaaaaaaaa

SEQ ID NO: 150427 - RNA, 19 nt, Human
ucacgggcacuccgggacc

SEQ ID NO: 150428 - RNA, 19 nt, Human
ucacgggcacuccgggacc

SEQ ID NO: 150429 - RNA, 20 nt, Human
ucaggaaggagaugaguuuc

SEQ ID NO: 150430 - RNA, 21 nt, Human
uccagccucccggcuccucag

SEQ ID NO: 150431 - RNA, 18 nt, Human
ucccaaggccgagaggcc

SEQ ID NO: 150432 - RNA, 18 nt, Human
ucccaaggccgagaggcc

SEQ ID NO: 150433 - RNA, 23 nt, Human
ucccaaggccgagaggccaugcu

SEQ ID NO: 150434 - RNA, 23 nt, Human
ucccaaggccgagaggccaugcu

SEQ ID NO: 150435 - RNA, 26 nt, Human
uccccaccuucaaaaaaaaaaaaaaa

SEQ ID NO: 150436 - RNA, 26 nt, Human
uccccaccuucaaaaaaaaaaaaaaa

SEQ ID NO: 150437 - RNA, 30 nt, Human
uccccaccuucaaaaaaaaaaaaaaaaaaa

SEQ ID NO: 150438 - RNA, 30 nt, Human; identical to SEQ ID NO: 150437

SEQ ID NO: 150439 - RNA, 23 nt, Human
ucuguagugugaggauccagggc

SEQ ID NO: 150440 - RNA, 23 nt, Human
ugacaggaggaggguuccuggcg

SEQ ID NO: 150441 - RNA, 23 nt, Human
ugacaggaggaggguuccuggcg

SEQ ID NO: 150442 - RNA, 19 nt, Human
ugagaaaaugcaccucagg

SEQ ID NO: 150443 - RNA, 19 nt, Human
ugagaaaaugcaccucagg

SEQ ID NO: 150444 - RNA, 20 nt, Human
ugaggaauuuccaggcauug

SEQ ID NO: 150445 - RNA, 18 nt, Human
ugaugagaaaaugcaccu

SEQ ID NO: 150446 - RNA, 18 nt, Human
ugaugagaaaaugcaccu

SEQ ID NO: 150447 - RNA, 22 nt, Human
ugaugggcacgagggcaacacg

SEQ ID NO: 150448 - RNA, 22 nt, Human
ugaugggcacgagggcaacacg

SEQ ID NO: 150449 - RNA, 22 nt, Human
ugccaggacagcgguguccugg

SEQ ID NO: 150450 - RNA, 22 nt, Human
ugccaggacagcgguguccugg

SEQ ID NO: 150451 - RNA, 28 nt, Human
ugcuuguccugggaggucccgacugcac

SEQ ID NO: 150452 - RNA, 28 nt, Human
ugcuuguccugggaggucccgacugcac

SEQ ID NO: 150453 - RNA, 20 nt, Human
uggaaagacacaccgcccac

SEQ ID NO: 150454 - RNA, 20 nt, Human
uggaaagacacaccgcccac

SEQ ID NO: 150455 - RNA, 23 nt, Human
uggcaaaaaagaaaaaaaaaacc

SEQ ID NO: 150456 - RNA, 23 nt, Human
uggcaaaaaagaaaaaaaaaacc

SEQ ID NO: 150457 - RNA, 22 nt, Human
uggcaaaaauacuacaccccca

SEQ ID NO: 150458 - RNA, 22 nt, Human
uggcaaaaauacuacaccccca

SEQ ID NO: 150459 - RNA, 22 nt, Human
uggcacacacaccgccccaggc

SEQ ID NO: 150460 - RNA, 22 nt, Human
uggcacacacaccgccccaggc

SEQ ID NO: 150461 - RNA, 21 nt, Human
ugggcacaggaaaaaaaccag

SEQ ID NO: 150462 - RNA, 21 nt, Human
ugggcacaggaaaaaaaccag

SEQ ID NO: 150463 - RNA, 23 nt, Human
ugggcacaggaaaaaaaccaggg

SEQ ID NO: 150464 - RNA, 23 nt, Human
ugggcacaggaaaaaaaccaggg

SEQ ID NO: 150465 - RNA, 27 nt, Human
ugggcacaggaaaaaaaccagggucuc

SEQ ID NO: 150466 - RNA, 27 nt, Human
ugggcacaggaaaaaaaccagggucuc

SEQ ID NO: 150467 - RNA, 19 nt, Human
uggggucgguccggcccgg

SEQ ID NO: 150468 - RNA, 23 nt, Human
ugggugacuuagcuccggguuaa

SEQ ID NO: 150469 - RNA, 23 nt, Human
ugggugacuuagcuccggguuaa

SEQ ID NO: 150470 - RNA, 23 nt, Human
uguuuaaaacacaguaauccaau

SEQ ID NO: 150471 - RNA, 19 nt, Human
uuccugccuacccgccaca

SEQ ID NO: 150472 - RNA, 19 nt, Human
uuccugccuacccgccaca

SEQ ID NO: 150473 - RNA, 23 nt, Human
uugacaggaggaggguuccuggc

SEQ ID NO: 150474 - RNA, 24 nt, Human
uugacaggaggaggguuccuggcg

SEQ ID NO: 150475 - RNA, 24 nt, Human
uuggcaaaaaagaaaaaaaaaacc

SEQ ID NO: 150476 - RNA, 24 nt, Human
uuggcaaaaaagaaaaaaaaaacc

SEQ ID NO: 150477 - RNA, 23 nt, Human
uuuaaaacacaguaauccaauga

SEQ ID NO: 150478 - RNA, 24 nt, Human
uuuuuuuuuuuuuuuuuuuucacg

SEQ ID NO: 150479 - RNA, 18 nt, Human
ccuccuccagcuucugcc

SEQ ID NO: 150480 - RNA, 20 nt, Human
uccuccuccagcuucugccg

SEQ ID NO: 150481 - RNA, 25 nt, Human
uuccuccuccagcuucugccguuug

SEQ ID NO: 150482 - RNA, 21 nt, Human
aaaaaacaaaaaaguccugug

SEQ ID NO: 150483 - RNA, 25 nt, Human
aaaaaacaaaaaaguccugugccug

SEQ ID NO: 150484 - RNA, 22 nt, Human
aaacuugccgccgugcgcuugg

SEQ ID NO: 150485 - RNA, 21 nt, Human
aaauaaaaagcacacagaacc

SEQ ID NO: 150486 - RNA, 26 nt, Human
aagaauuugcaggcguggauuggggu

SEQ ID NO: 150487 - RNA, 21 nt, Human
aaggaaaaaggaaaggagggg

SEQ ID NO: 150488 - RNA, 22 nt, Human
aaggagccuccauccucugcca

SEQ ID NO: 150489 - RNA, 20 nt, Human
aaucaucuugucuccccggu

SEQ ID NO: 150490 - RNA, 21 nt, Human
acacagcgaagugcaaaaaac

SEQ ID NO: 150491 - RNA, 23 nt, Human
acacagcgaagugcaaaaaacaa

SEQ ID NO: 150492 - RNA, 24 nt, Human
acacagcgaagugcaaaaaacaaa

SEQ ID NO: 150493 - RNA, 22 nt, Human
acuugccgccgugcgcuuggcc

SEQ ID NO: 150494 - RNA, 21 nt, Human
agaaacucagugcuugaaaac

SEQ ID NO: 150495 - RNA, 28 nt, Human
aggaaaaaggaaaggaggggggagggag

SEQ ID NO: 150496 - RNA, 21 nt, Human
aggaaaggaaaggaaaaagga

SEQ ID NO: 150497 - RNA, 25 nt, Human
aggaaagggaauguccaagaaauau

SEQ ID NO: 150498 - RNA, 26 nt, Human
aggaggggggagggagagggagaggc

SEQ ID NO: 150499 - RNA, 21 nt, Human
agggagaggcaaagccgagga

SEQ ID NO: 150500 - RNA, 20 nt, Human
auggaauuuuuguuuuuuau

SEQ ID NO: 150501 - RNA, 25 nt, Human
auuuuuuuucuuuuuuuuucuuuuu

SEQ ID NO: 150502 - RNA, 22 nt, Human
caaggauuugaaacaggugugg

SEQ ID NO: 150503 - RNA, 24 nt, Human
cacagcgaagugcaaaaaacaaaa

SEQ ID NO: 150504 - RNA, 19 nt, Human
cacccccagcccccccguc

SEQ ID NO: 150505 - RNA, 18 nt, Human
cacccucccccgccaccc

SEQ ID NO: 150506 - RNA, 28 nt, Human
cacccucccccgccacccccagcccccc

SEQ ID NO: 150507 - RNA, 21 nt, Human
caccucucccugucucuuuug

SEQ ID NO: 150508 - RNA, 19 nt, Human
cagcccccccgucguccug

SEQ ID NO: 150509 - RNA, 21 nt, Human
cagcugccucuuuagacgagg

SEQ ID NO: 150510 - RNA, 22 nt, Human
cauuccgcugcucccuccgauu

SEQ ID NO: 150511 - RNA, 24 nt, Human
ccaagaaauauaauuaauuuaggg

SEQ ID NO: 150512 - RNA, 21 nt, Human
ccagagucuucgccgcauucc

SEQ ID NO: 150513 - RNA, 24 nt, Human
cccccagcccccccgucguccugc

SEQ ID NO: 150514 - RNA, 20 nt, Human
cccccgccacccccagcccc

SEQ ID NO: 150515 - RNA, 22 nt, Human
cccccgccacccccagcccccc

SEQ ID NO: 150516 - RNA, 21 nt, Human
ccccgccacccccagcccccc

SEQ ID NO: 150517 - RNA, 21 nt, Human
ccccgccacccccagcccccc

SEQ ID NO: 150518 - RNA, 19 nt, Human
ccccgucguccugcucccc

SEQ ID NO: 150519 - RNA, 19 nt, Human
ccccgucguccugcucccc

SEQ ID NO: 150520 - RNA, 20 nt, Human
ccccgucguccugcuccccg

SEQ ID NO: 150521 - RNA, 22 nt, Human
cccgagaaucuugcaccaaacg

SEQ ID NO: 150522 - RNA, 20 nt, Human
cccgucguccugcuccccgu

SEQ ID NO: 150523 - RNA, 20 nt, Human
cccucccccgccacccccag

SEQ ID NO: 150524 - RNA, 19 nt, Human
cccucccucuuucuccuuc

SEQ ID NO: 150525 - RNA, 22 nt, Human
cccucgcuguccagagucuucg

SEQ ID NO: 150526 - RNA, 19 nt, Human
cccucuuucuccuucucuc

SEQ ID NO: 150527 - RNA, 19 nt, Human
ccgccgcacgcugccuccg

SEQ ID NO: 150528 - RNA, 20 nt, Human
ccgccgcccgcugcccgcgg

SEQ ID NO: 150529 - RNA, 21 nt, Human
cgaggagcgggcgcccugggc

SEQ ID NO: 150530 - RNA, 21 nt, Human
cgcacgcugccuccgccgccc

SEQ ID NO: 150531 - RNA, 21 nt, Human
cgcccaacaacugcuacaugc

SEQ ID NO: 150532 - RNA, 22 nt, Human
cgcccugggcucccagcuccug

SEQ ID NO: 150533 - RNA, 21 nt, Human
cgcugcccgcggcgaggacgg

SEQ ID NO: 150534 - RNA, 18 nt, Human
cucccccgccacccccag

SEQ ID NO: 150535 - RNA, 23 nt, Human
cucccugucucuuuugcuccaug

SEQ ID NO: 150536 - RNA, 22 nt, Human
cucgcuguccagagucuucgcc

SEQ ID NO: 150537 - RNA, 25 nt, Human
cucguuuguuugggguggggguggg

SEQ ID NO: 150538 - RNA, 18 nt, Human
cucuuucuccuucucucu

SEQ ID NO: 150539 - RNA, 22 nt, Human
gaaaggaaaggaaaaaggaaag

SEQ ID NO: 150540 - RNA, 20 nt, Human
gacaaaauauugacauugac

SEQ ID NO: 150541 - RNA, 24 nt, Human
gagagggagaggcaaagccgagga

SEQ ID NO: 150542 - RNA, 21 nt, Human
gagggagagggagaggcaaag

SEQ ID NO: 150543 - RNA, 20 nt, Human
gaggggggaaaauccuucca

SEQ ID NO: 150544 - RNA, 24 nt, Human
gcccgcugcccgcggcgaggacgg

SEQ ID NO: 150545 - RNA, 20 nt, Human
gcgguuuguuuuuguuuugu

SEQ ID NO: 150546 - RNA, 20 nt, Human
ggaaaggaaaaaggaaagga

SEQ ID NO: 150547 - RNA, 24 nt, Human
ggaaaggaaaaaggaaaggagggg

SEQ ID NO: 150548 - RNA, 19 nt, Human
ggagagggagaggcaaagc

SEQ ID NO: 150549 - RNA, 18 nt, Human
ggaggggggagggagagg

SEQ ID NO: 150550 - RNA, 22 nt, Human
ggccucgguuugggacccugug

SEQ ID NO: 150551 - RNA, 20 nt, Human
ggcgaccgccgcacgcugcc

SEQ ID NO: 150552 - RNA, 20 nt, Human
gggggagggagagggagagg

SEQ ID NO: 150553 - RNA, 23 nt, Human
ggggugggggugggggugggggg

SEQ ID NO: 150554 - RNA, 19 nt, Human
ggguggggguggggguggg

SEQ ID NO: 150555 - RNA, 18 nt, Human
gguggggguggggggaag

SEQ ID NO: 150556 - RNA, 27 nt, Human
guccagagucuucgccgcauuccgcug

SEQ ID NO: 150557 - RNA, 19 nt, Human
guuagaauucuaacaaauu

SEQ ID NO: 150558 - RNA, 25 nt, Human
uaaaaagcacacagaaccugucuuu

SEQ ID NO: 150559 - RNA, 24 nt, Human
uaacacaaaacacaaaaauauuua

SEQ ID NO: 150560 - RNA, 20 nt, Human
uaagucuaugaucuuggaau

SEQ ID NO: 150561 - RNA, 20 nt, Human
uagaaacucagugcuugaaa

SEQ ID NO: 150562 - RNA, 21 nt, Human
ucagaagguaucaaaaagugu

SEQ ID NO: 150563 - RNA, 23 nt, Human
ucaucaucauuuuuuaaguggac

SEQ ID NO: 150564 - RNA, 22 nt, Human
uccagagucuucgccgcauucc

SEQ ID NO: 150565 - RNA, 18 nt, Human
uccauguuguccguuucu

SEQ ID NO: 150566 - RNA, 20 nt, Human
uccauguuguccguuucugu

SEQ ID NO: 150567 - RNA, 21 nt, Human
ucccccgccacccccagcccc

SEQ ID NO: 150568 - RNA, 23 nt, Human
uccccguuucucuguaagaggac

SEQ ID NO: 150569 - RNA, 21 nt, Human
ucccuccgauucccucucccu

SEQ ID NO: 150570 - RNA, 19 nt, Human
uccuucuccaccucucccu

SEQ ID NO: 150571 - RNA, 27 nt, Human
ucguuuguuuggggugggggugggggu

SEQ ID NO: 150572 - RNA, 18 nt, Human
ucucacucagcugccucu

SEQ ID NO: 150573 - RNA, 23 nt, Human
ucucacucagcugccucuuuaga

SEQ ID NO: 150574 - RNA, 24 nt, Human
ucucucucccucccucuuucuccu

SEQ ID NO: 150575 - RNA, 22 nt, Human
ucucucucuuucucucucuccc

SEQ ID NO: 150576 - RNA, 20 nt, Human
ucucugugucucucacucag

SEQ ID NO: 150577 - RNA, 26 nt, Human
ucuuucuccuucucucugugucucuc

SEQ ID NO: 150578 - RNA, 18 nt, Human
ucuuucucucucuuucuc

SEQ ID NO: 150579 - RNA, 21 nt, Human
ucuuuuuuuuucuuuuuuuuu

SEQ ID NO: 150580 - RNA, 24 nt, Human
ugaaaggagaaguuugcaucaggg

SEQ ID NO: 150581 - RNA, 18 nt, Human
ugaagagaggggggaaaa

SEQ ID NO: 150582 - RNA, 18 nt, Human
ugauugacagcuccccuu

SEQ ID NO: 150583 - RNA, 21 nt, Human
uggauugggguaauuuuuuuu

SEQ ID NO: 150584 - RNA, 18 nt, Human
ugggacccugugcccucg

SEQ ID NO: 150585 - RNA, 22 nt, Human
ugggcucccagcuccuggcgac

SEQ ID NO: 150586 - RNA, 18 nt, Human
ugggggggaaacacagcg

SEQ ID NO: 150587 - RNA, 21 nt, Human
uggggguggggggaaggaaag

SEQ ID NO: 150588 - RNA, 19 nt, Human
ugggggugggggugggggg

SEQ ID NO: 150589 - RNA, 21 nt, Human
ugggguaauuuuuuuucuuuu

SEQ ID NO: 150590 - RNA, 19 nt, Human
uggggugggggugggggug

SEQ ID NO: 150591 - RNA, 18 nt, Human
uguccguuucuguggggu

SEQ ID NO: 150592 - RNA, 21 nt, Human
uuagaauucuaacaaauuaac

SEQ ID NO: 150593 - RNA, 22 nt, Human
uugggguggggguggggguggg

SEQ ID NO: 150594 - RNA, 21 nt, Human
uuuuccuucuccaccucuccc

SEQ ID NO: 150595 - RNA, 22 nt, Human
uuuucggucuuuaaacaccauu

SEQ ID NO: 150596 - RNA, 24 nt, Human
uuuugcaauagauagauuuaaagu

SEQ ID NO: 150597 - RNA, 24 nt, Human
uuuuuuuucuuuuuuuuucuuuuu

SEQ ID NO: 150598 - RNA, 21 nt, Human
aaaaaaagaaaaagaaaagga

SEQ ID NO: 150599 - RNA, 18 nt, Human
aaaaaaaucacccaggca

SEQ ID NO: 150600 - RNA, 23 nt, Human
aaaagaaaaagaaaaggaaaaag

SEQ ID NO: 150601 - RNA, 18 nt, Human
aaaaggaaaaagaaagca

SEQ ID NO: 150602 - RNA, 24 nt, Human
aaaaggaaaaagaaagcaagaaaa

SEQ ID NO: 150603 - RNA, 22 nt, Human
aaaagucccagagaaaccaggg

SEQ ID NO: 150604 - RNA, 24 nt, Human
aaagaaaagucccagagaaaccag

SEQ ID NO: 150605 - RNA, 20 nt, Human
aaaggaaacacacucucgca

SEQ ID NO: 150606 - RNA, 21 nt, Human
aaaggagauuaauaaaaaugu

SEQ ID NO: 150607 - RNA, 19 nt, Human
aaagucccagagaaaccag

SEQ ID NO: 150608 - RNA, 20 nt, Human
aacacacucucgcacacaaa

SEQ ID NO: 150609 - RNA, 19 nt, Human
aaccagggccggcgaugcg

SEQ ID NO: 150610 - RNA, 22 nt, Human
aagaaaaagaaaaggaaaaaga

SEQ ID NO: 150611 - RNA, 20 nt, Human
aagcaagaaaaaaagcucca

SEQ ID NO: 150612 - RNA, 19 nt, Human
aaugaaaaaggcaacgaaa

SEQ ID NO: 150613 - RNA, 19 nt, Human
aaugaaggaaaaaaagaaa

SEQ ID NO: 150614 - RNA, 19 nt, Human
acaaagaaaagucccagag

SEQ ID NO: 150615 - RNA, 26 nt, Human
acacaaagaaaagucccagagaaacc

SEQ ID NO: 150616 - RNA, 23 nt, Human
acacucucgcacacaaagaaaag

SEQ ID NO: 150617 - RNA, 23 nt, Human
agaacagacagaccgacagaagg

SEQ ID NO: 150618 - RNA, 19 nt, Human
agacuacagguuucugaac

SEQ ID NO: 150619 - RNA, 18 nt, Human
agaugcuuucucccccag

SEQ ID NO: 150620 - RNA, 21 nt, Human
agccacggccaaaaaaaugaa

SEQ ID NO: 150621 - RNA, 19 nt, Human
aggaaaaagaaagcaagaa

SEQ ID NO: 150622 - RNA, 24 nt, Human
aggaaaaagaaagcaagaaaaaaa

SEQ ID NO: 150623 - RNA, 21 nt, Human
aggcaaauggagaagcaacuc

SEQ ID NO: 150624 - RNA, 22 nt, Human
aggcaguagugagggguuugac

SEQ ID NO: 150625 - RNA, 28 nt, Human
aggccgggacucaggagggggcagaaga

SEQ ID NO: 150626 - RNA, 20 nt, Human
agggacccgggagguggggg

SEQ ID NO: 150627 - RNA, 23 nt, Human
agggccggcgaugcgggucggga

SEQ ID NO: 150628 - RNA, 22 nt, Human
aggggugaauuuugggauguag

SEQ ID NO: 150629 - RNA, 21 nt, Human
aggugggggagaagagguggg

SEQ ID NO: 150630 - RNA, 18 nt, Human
agguuucugaacauaaua

SEQ ID NO: 150631 - RNA, 24 nt, Human
agguuucugaacauaauaaaaucu

SEQ ID NO: 150632 - RNA, 23 nt, Human
auggagaagcaacuccauaaaca

SEQ ID NO: 150633 - RNA, 27 nt, Human
caaacucucucgcuuaaaaaaaaaauc

SEQ ID NO: 150634 - RNA, 20 nt, Human
caacuuguuagagaaaugcu

SEQ ID NO: 150635 - RNA, 23 nt, Human
cacaaagaaaagucccagagaaa

SEQ ID NO: 150636 - RNA, 23 nt, Human
caccccacuuugccagcggcccg

SEQ ID NO: 150637 - RNA, 19 nt, Human
caccggagaagcaaugaca

SEQ ID NO: 150638 - RNA, 27 nt, Human
cacggccaaaaaaaugaaggaaaaaaa

SEQ ID NO: 150639 - RNA, 24 nt, Human
cacuuuuugccuucaaaccggaag

SEQ ID NO: 150640 - RNA, 22 nt, Human
cagcgccuuuaaucgccuuugc

SEQ ID NO: 150641 - RNA, 19 nt, Human
cccacccgcgccgcacccg

SEQ ID NO: 150642 - RNA, 21 nt, Human
cccacccgcgccgcacccgcg

SEQ ID NO: 150643 - RNA, 22 nt, Human
cccaccgccucgcuccccaccc

SEQ ID NO: 150644 - RNA, 22 nt, Human
cccaggcacacuuuuugccuuc

SEQ ID NO: 150645 - RNA, 20 nt, Human
cccccaccgccucgcucccc

SEQ ID NO: 150646 - RNA, 19 nt, Human
ccccgccgccccggccgcc

SEQ ID NO: 150647 - RNA, 19 nt, Human
cccgcgucccucccccucc

SEQ ID NO: 150648 - RNA, 18 nt, Human
cccucccccacccgcgcc

SEQ ID NO: 150649 - RNA, 24 nt, Human
cccugugcgucggguccgcccucc

SEQ ID NO: 150650 - RNA, 19 nt, Human
cccuuauacugggaauaga

SEQ ID NO: 150651 - RNA, 22 nt, Human
ccgcacccgcgucccucccccu

SEQ ID NO: 150652 - RNA, 21 nt, Human
ccgccccgccgccccggccgc

SEQ ID NO: 150653 - RNA, 19 nt, Human
ccgccgcgccggcccccgc

SEQ ID NO: 150654 - RNA, 21 nt, Human
ccgccucgcuccccaccccac

SEQ ID NO: 150655 - RNA, 19 nt, Human
ccgcgccggcccccgcccc

SEQ ID NO: 150656 - RNA, 22 nt, Human
ccggccgccgcgccggcccccg

SEQ ID NO: 150657 - RNA, 20 nt, Human
cgcggccccggccuguggcc

SEQ ID NO: 150658 - RNA, 24 nt, Human
cgcuuaaaaaaaaaaucacccagg

SEQ ID NO: 150659 - RNA, 21 nt, Human
cggcccaaugggcgcgcgcgg

SEQ ID NO: 150660 - RNA, 18 nt, Human
cgggagacgacggcggcg

SEQ ID NO: 150661 - RNA, 18 nt, Human
cgggagggggcgcgggcg

SEQ ID NO: 150662 - RNA, 22 nt, Human
cgggaggggugaauuuugggau

SEQ ID NO: 150663 - RNA, 21 nt, Human
cguuucaacgucauuguccau

SEQ ID NO: 150664 - RNA, 26 nt, Human
cucggcgcuggcccugugccgguucc

SEQ ID NO: 150665 - RNA, 25 nt, Human
cucguucuuaucuagcagauagauc

SEQ ID NO: 150666 - RNA, 18 nt, Human
cugcaaccagauucaaug

SEQ ID NO: 150667 - RNA, 25 nt, Human
cuuaaagggaaaaaaauaguauuua

SEQ ID NO: 150668 - RNA, 23 nt, Human
cuuucugucucucucgcucuuuu

SEQ ID NO: 150669 - RNA, 19 nt, Human
gagacacuuggcuauuucu

SEQ ID NO: 150670 - RNA, 22 nt, Human
gcacaaacucucucgcuuaaaa

SEQ ID NO: 150671 - RNA, 23 nt, Human
gcagaacagacagaccgacagaa

SEQ ID NO: 150672 - RNA, 24 nt, Human
gccacggccaaaaaaaugaaggaa

SEQ ID NO: 150673 - RNA, 23 nt, Human
gcccccaccgccucgcuccccac

SEQ ID NO: 150674 - RNA, 19 nt, Human
ggacccgggagguggggga

SEQ ID NO: 150675 - RNA, 21 nt, Human
ggagccaauggcgagccggga

SEQ ID NO: 150676 - RNA, 19 nt, Human
ggaggugggggagaagagg

SEQ ID NO: 150677 - RNA, 24 nt, Human
ggcagaacagacagaccgacagaa

SEQ ID NO: 150678 - RNA, 27 nt, Human
ggcagacacgaaaggaaacacacucuc

SEQ ID NO: 150679 - RNA, 21 nt, Human
ggccgccccgccgccccggcc

SEQ ID NO: 150680 - RNA, 21 nt, Human
ggcgggggcagcgaggcggug

SEQ ID NO: 150681 - RNA, 25 nt, Human
ggcugguuuuuuuuuuuuuguuuuu

SEQ ID NO: 150682 - RNA, 21 nt, Human
gggcagaagaaaccgggaggg

SEQ ID NO: 150683 - RNA, 28 nt, Human
gggcagacacgaaaggaaacacacucuc

SEQ ID NO: 150684 - RNA, 19 nt, Human
gggcgcgggcgcggccccg

SEQ ID NO: 150685 - RNA, 21 nt, Human
gggggcagaagaaaccgggag

SEQ ID NO: 150686 - RNA, 19 nt, Human
guauguguuuuccuuaccu

SEQ ID NO: 150687 - RNA, 20 nt, Human
uauuucagacuacagguuuc

SEQ ID NO: 150688 - RNA, 26 nt, Human
uccauaaacaacuuguuagagaaaug

SEQ ID NO: 150689 - RNA, 23 nt, Human
ucccagagaaaccagggccggcg

SEQ ID NO: 150690 - RNA, 26 nt, Human
ucccuccuuggagcagaugcuuucuc

SEQ ID NO: 150691 - RNA, 18 nt, Human
ucccugcgcucccucccu

SEQ ID NO: 150692 - RNA, 22 nt, Human
uccgcccucccccacccgcgcc

SEQ ID NO: 150693 - RNA, 20 nt, Human
ucucucgcuuaaaaaaaaaa

SEQ ID NO: 150694 - RNA, 27 nt, Human
ucugcaaccagauucaaugauuugauu

SEQ ID NO: 150695 - RNA, 23 nt, Human
ugaaaaaggcaacgaaaacgaaa

SEQ ID NO: 150696 - RNA, 21 nt, Human
ugaaggaaaaaaagaaaaaga

SEQ ID NO: 150697 - RNA, 22 nt, Human
ugaaggaaaaaaagaaaaagaa

SEQ ID NO: 150698 - RNA, 19 nt, Human
ugagucagggccgcacgug

SEQ ID NO: 150699 - RNA, 19 nt, Human
ugccagcggcccguggggg

SEQ ID NO: 150700 - RNA, 21 nt, Human
uggcuuguagcggcgguucag

SEQ ID NO: 150701 - RNA, 18 nt, Human
ugggcgcgcgcgggacuu

SEQ ID NO: 150702 - RNA, 22 nt, Human
ugugcccagagcgugaggcugg

SEQ ID NO: 150703 - RNA, 19 nt, Human
uuagagaaaugcaggauua

SEQ ID NO: 150704 - RNA, 19 nt, Human
uuucucaacaagucuccgg

SEQ ID NO: 150705 - RNA, 18 nt, Human
uuuuuuuucaaaucucug

SEQ ID NO: 150706 - RNA, 27 nt, Human
uuuuuuuuuguuuuuuuuuuuuuuuuc

SEQ ID NO: 150707 - RNA, 27 nt, Human
aaaaaaagaaaaaaauagggaagaaaa

SEQ ID NO: 150708 - RNA, 26 nt, Human
aaaaaacagaaaccaacuuugcuucc

SEQ ID NO: 150709 - RNA, 20 nt, Human
aaaaaagaaaaaaauaggga

SEQ ID NO: 150710 - RNA, 22 nt, Human
aaaaacaagaaaagacaaaaag

SEQ ID NO: 150711 - RNA, 25 nt, Human
aaaaagaaaaaaauagggaagaaaa

SEQ ID NO: 150712 - RNA, 18 nt, Human
aaaaagaagaagaaagga

SEQ ID NO: 150713 - RNA, 19 nt, Human
aaaaaucuuuggacuucag

SEQ ID NO: 150714 - RNA, 21 nt, Human
aaaagaagaagaaaggaggag

SEQ ID NO: 150715 - RNA, 19 nt, Human
aaaaggagggucgccccac

SEQ ID NO: 150716 - RNA, 19 nt, Human
aaaauuagcauaaucucau

SEQ ID NO: 150717 - RNA, 18 nt, Human
aaacaaaaaacagaaacc

SEQ ID NO: 150718 - RNA, 20 nt, Human
aaacaaaaaacagaaaccaa

SEQ ID NO: 150719 - RNA, 19 nt, Human
aaacuaaaacaacaaagaa

SEQ ID NO: 150720 - RNA, 24 nt, Human
aaacuaaaacaacaaagaaaacaa

SEQ ID NO: 150721 - RNA, 24 nt, Human
aaagaaaaaaauaaaggaaaaaaa

SEQ ID NO: 150722 - RNA, 23 nt, Human
aaagaagaagaaaggaggagcag

SEQ ID NO: 150723 - RNA, 19 nt, Human
aaagacaagguagccacau

SEQ ID NO: 150724 - RNA, 20 nt, Human
aaagacaagguagccacaug

SEQ ID NO: 150725 - RNA, 19 nt, Human
aacaaagaaaacaaaaaac

SEQ ID NO: 150726 - RNA, 23 nt, Human
aacaugcuuagcgauccgaaaga

SEQ ID NO: 150727 - RNA, 20 nt, Human
aaccugagacacuuucacuc

SEQ ID NO: 150728 - RNA, 23 nt, Human
aagaaaaaaauaaaggaaaaaaa

SEQ ID NO: 150729 - RNA, 21 nt, Human
aagaaaacaaaaaacagaaac

SEQ ID NO: 150730 - RNA, 26 nt, Human
aagaaaagacaaaaagugagggaccc

SEQ ID NO: 150731 - RNA, 24 nt, Human
aagaagaagaaaggaggagcagga

SEQ ID NO: 150732 - RNA, 18 nt, Human
aagacuucaaaaccaagu

SEQ ID NO: 150733 - RNA, 22 nt, Human
aagacuucaaaaccaagucgcc

SEQ ID NO: 150734 - RNA, 18 nt, Human
aagcagcccccuucgcaa

SEQ ID NO: 150735 - RNA, 22 nt, Human
aagcagcccccuucgcaaaaaa

SEQ ID NO: 150736 - RNA, 23 nt, Human
aagccaacacaaacaaaguggca

SEQ ID NO: 150737 - RNA, 21 nt, Human
aaucuuuauacacuggcccuu

SEQ ID NO: 150738 - RNA, 23 nt, Human
acaaaaaacagaaaccaacuuug

SEQ ID NO: 150739 - RNA, 23 nt, Human
acaaagaaaacaaaaaacagaaa

SEQ ID NO: 150740 - RNA, 22 nt, Human
acacaaaaaacucaaaaaaaua

SEQ ID NO: 150741 - RNA, 20 nt, Human
acacacuuucuuccuucuuu

SEQ ID NO: 150742 - RNA, 22 nt, Human
acacggagacccccgcgccccc

SEQ ID NO: 150743 - RNA, 22 nt, Human
acagagccuucugccagcccag

SEQ ID NO: 150744 - RNA, 18 nt, Human
accagguccccuaagcuc

SEQ ID NO: 150745 - RNA, 21 nt, Human
agaaaagaaaaaaauaaagga

SEQ ID NO: 150746 - RNA, 21 nt, Human
agaaaagaaaaaaauaaagga

SEQ ID NO: 150747 - RNA, 19 nt, Human
agaaaagaaaaaggaaagg

SEQ ID NO: 150748 - RNA, 20 nt, Human
agaaaagaaaaaggaaagga

SEQ ID NO: 150749 - RNA, 22 nt, Human
agaaaagaaaaaggaaaggaag

SEQ ID NO: 150750 - RNA, 20 nt, Human
agaagaaaaagaagaagaaa

SEQ ID NO: 150751 - RNA, 21 nt, Human
agaagaaaaagaagaagaaag

SEQ ID NO: 150752 - RNA, 23 nt, Human
agaagaaaaagaagaagaaagga

SEQ ID NO: 150753 - RNA, 24 nt, Human
agaagaagaaaggaggagcaggag

SEQ ID NO: 150754 - RNA, 19 nt, Human
agaaggaggagggaguuag

SEQ ID NO: 150755 - RNA, 29 nt, Human
agacaaaaagugaugauaagagggacccc

SEQ ID NO: 150756 - RNA, 18 nt, Human
agacccccgcgcccccac

SEQ ID NO: 150757 - RNA, 19 nt, Human
agagggagccgggugaggc

SEQ ID NO: 150758 - RNA, 18 nt, Human
agcagcccgccgccccuc

SEQ ID NO: 150759 - RNA, 21 nt, Human
agcauaaucucauaaacacaa

SEQ ID NO: 150760 - RNA, 19 nt, Human
aggaaagagaaggaggagg

SEQ ID NO: 150761 - RNA, 21 nt, Human
aggaaggaaggaggaggagga

SEQ ID NO: 150762 - RNA, 21 nt, Human
aggaaggaaggaggaggagga

SEQ ID NO: 150763 - RNA, 21 nt, Human
aggagaagaaaaagaagaaga

SEQ ID NO: 150764 - RNA, 23 nt, Human
aggaggaagaggaggaaaaagga

SEQ ID NO: 150765 - RNA, 21 nt, Human
aggaggaaggaggaagaggag

SEQ ID NO: 150766 - RNA, 21 nt, Human
aggagggaguuaggugcagga

SEQ ID NO: 150767 - RNA, 23 nt, Human
aggagggaguuaggugcaggagg

SEQ ID NO: 150768 - RNA, 24 nt, Human
aggagggaguuaggugcaggaggg

SEQ ID NO: 150769 - RNA, 25 nt, Human
aggagggaguuaggugcaggagggu

SEQ ID NO: 150770 - RNA, 19 nt, Human
aggauucugaguucuuuug

SEQ ID NO: 150771 - RNA, 19 nt, Human
agggaagaaaagaaaaagg

SEQ ID NO: 150772 - RNA, 21 nt, Human
agggaguuaggugcaggaggg

SEQ ID NO: 150773 - RNA, 22 nt, Human
agguagccacauguuucagaac

SEQ ID NO: 150774 - RNA, 23 nt, Human
auaauaaaaaaguguccaauguc

SEQ ID NO: 150775 - RNA, 21 nt, Human
auacauagaauauuucagaac

SEQ ID NO: 150776 - RNA, 19 nt, Human
augagagauucaacagagc

SEQ ID NO: 150777 - RNA, 23 nt, Human
caaagaaaacaaaaaacagaaac

SEQ ID NO: 150778 - RNA, 24 nt, Human
caaaguggcagaagucauagacca

SEQ ID NO: 150779 - RNA, 24 nt, Human
caaaucccagaacuggcccaagga

SEQ ID NO: 150780 - RNA, 22 nt, Human
caacacaaacaaaguggcagaa

SEQ ID NO: 150781 - RNA, 20 nt, Human
caagaauuucaacacacaaa

SEQ ID NO: 150782 - RNA, 23 nt, Human
caaguccucgacuucgccgcgca

SEQ ID NO: 150783 - RNA, 18 nt, Human
caagucgcccgccccccu

SEQ ID NO: 150784 - RNA, 19 nt, Human
cacaaacaaaguggcagaa

SEQ ID NO: 150785 - RNA, 24 nt, Human
cacacaccccaggccuuuagcccc

SEQ ID NO: 150786 - RNA, 20 nt, Human
cacacauauuuaucuuggaa

SEQ ID NO: 150787 - RNA, 21 nt, Human
cacaccccaggccuuuagccc

SEQ ID NO: 150788 - RNA, 23 nt, Human
cacaccccaggccuuuagcccca

SEQ ID NO: 150789 - RNA, 22 nt, Human
cacacggagacccccgcgcccc

SEQ ID NO: 150790 - RNA, 23 nt, Human
cacacggagacccccgcgccccc

SEQ ID NO: 150791 - RNA, 18 nt, Human
cacagaccacagacgcag

SEQ ID NO: 150792 - RNA, 23 nt, Human
cacccaugauggcugguggaguc

SEQ ID NO: 150793 - RNA, 24 nt, Human
caccccgccgagucuuccgagggc

SEQ ID NO: 150794 - RNA, 21 nt, Human
caccccugggucagccguggg

SEQ ID NO: 150795 - RNA, 21 nt, Human
cacuguaccacaccuucaaaa

SEQ ID NO: 150796 - RNA, 22 nt, Human
cagagcccccucgagugacguc

SEQ ID NO: 150797 - RNA, 19 nt, Human
cagagccuucugccagccc

SEQ ID NO: 150798 - RNA, 20 nt, Human
cagagccuucugccagccca

SEQ ID NO: 150799 - RNA, 22 nt, Human
cagccacuccaagaaaagaaaa

SEQ ID NO: 150800 - RNA, 23 nt, Human
cagcccccuucgcaaaaaagaaa

SEQ ID NO: 150801 - RNA, 23 nt, Human
cagccgugugcacaccccugggu

SEQ ID NO: 150802 - RNA, 19 nt, Human
cagcgcguuccccggcgcu

SEQ ID NO: 150803 - RNA, 20 nt, Human
caggaaauuccuggggccaa

SEQ ID NO: 150804 - RNA, 19 nt, Human
caggagcagcccgccgccc

SEQ ID NO: 150805 - RNA, 20 nt, Human
caggagggugaggagaggga

SEQ ID NO: 150806 - RNA, 19 nt, Human
cauacggccgcauuccacc

SEQ ID NO: 150807 - RNA, 19 nt, Human
caucucccucuacagagcc

SEQ ID NO: 150808 - RNA, 21 nt, Human
ccagcccagaaacagugagcc

SEQ ID NO: 150809 - RNA, 18 nt, Human
ccagggccaaaucccaga

SEQ ID NO: 150810 - RNA, 21 nt, Human
cccagaacuggcccaaggacc

SEQ ID NO: 150811 - RNA, 21 nt, Human
cccauaaaauuagcauaaucu

SEQ ID NO: 150812 - RNA, 21 nt, Human
ccccaggccuuuagccccaga

SEQ ID NO: 150813 - RNA, 18 nt, Human
cccccgcgcccccacccc

SEQ ID NO: 150814 - RNA, 19 nt, Human
cccccgcgcccccaccccg

SEQ ID NO: 150815 - RNA, 20 nt, Human
cccccgcgcccccaccccgc

SEQ ID NO: 150816 - RNA, 22 nt, Human
ccccgcgcccccaccccgccga

SEQ ID NO: 150817 - RNA, 21 nt, Human
ccccgcuccucuccgcguccg

SEQ ID NO: 150818 - RNA, 21 nt, Human
ccccucucucccaccaggucc

SEQ ID NO: 150819 - RNA, 22 nt, Human
ccccucucucccaccagguccc

SEQ ID NO: 150820 - RNA, 22 nt, Human
ccccuggcugucccagccacag

SEQ ID NO: 150821 - RNA, 19 nt, Human
cccgcacgcccuagccggc

SEQ ID NO: 150822 - RNA, 19 nt, Human
cccgcccgggccggcuccg

SEQ ID NO: 150823 - RNA, 21 nt, Human
cccgccgccccuccuccccuu

SEQ ID NO: 150824 - RNA, 22 nt, Human
cccgccgccccuccuccccuua

SEQ ID NO: 150825 - RNA, 18 nt, Human
cccgcuccgggugcggga

SEQ ID NO: 150826 - RNA, 18 nt, Human
cccggccguccccgcccg

SEQ ID NO: 150827 - RNA, 25 nt, Human
cccggcgacagccccgccaggucac

SEQ ID NO: 150828 - RNA, 19 nt, Human
cccuaagcagcccccuucg

SEQ ID NO: 150829 - RNA, 21 nt, Human
cccuaagcuccccaaggccuu

SEQ ID NO: 150830 - RNA, 22 nt, Human
cccucgccgccucggccuccgc

SEQ ID NO: 150831 - RNA, 24 nt, Human
ccgaaagagcgggggaaugcagua

SEQ ID NO: 150832 - RNA, 21 nt, Human
ccgcccgggccggcuccggcc

SEQ ID NO: 150833 - RNA, 23 nt, Human
ccgcccgggccggcuccggccgc

SEQ ID NO: 150834 - RNA, 23 nt, Human
ccgcccucgccgccucggccucc

SEQ ID NO: 150835 - RNA, 24 nt, Human
ccgcccucgccgccucggccuccg

SEQ ID NO: 150836 - RNA, 22 nt, Human
ccgccgcccggccguccccgcc

SEQ ID NO: 150837 - RNA, 18 nt, Human
ccgccgccgcccggccgu

SEQ ID NO: 150838 - RNA, 20 nt, Human
ccgccgccgcccggccgucc

SEQ ID NO: 150839 - RNA, 20 nt, Human
ccgccgccgccgcccggccg

SEQ ID NO: 150840 - RNA, 19 nt, Human
ccgcgcccccgccgagccc

SEQ ID NO: 150841 - RNA, 20 nt, Human
ccgcgcccccgccgagcccc

SEQ ID NO: 150842 - RNA, 24 nt, Human
ccgcgcccccgccgagccccgcag

SEQ ID NO: 150843 - RNA, 23 nt, Human
ccgcugggugacaggagcagccc

SEQ ID NO: 150844 - RNA, 19 nt, Human
ccggccgccgccgccgccc

SEQ ID NO: 150845 - RNA, 20 nt, Human
ccgggcugggccgcccgcgc

SEQ ID NO: 150846 - RNA, 22 nt, Human
ccguccgccgcccucgccgccu

SEQ ID NO: 150847 - RNA, 26 nt, Human
ccguccgccgcccucgccgccucggc

SEQ ID NO: 150848 - RNA, 23 nt, Human
ccucccgcggcgcacacggagac

SEQ ID NO: 150849 - RNA, 22 nt, Human
ccucccgggcuccccgcuccuc

SEQ ID NO: 150850 - RNA, 22 nt, Human
ccugagacacuuucacucugga

SEQ ID NO: 150851 - RNA, 24 nt, Human
ccugcggcaggacugcggugggac

SEQ ID NO: 150852 - RNA, 22 nt, Human
ccugggccgcccggggcgagag

SEQ ID NO: 150853 - RNA, 25 nt, Human
ccugggguacgcugggcugcuuccc

SEQ ID NO: 150854 - RNA, 21 nt, Human
cgaggccagggcccggccggg

SEQ ID NO: 150855 - RNA, 20 nt, Human
cgagggcgugcgcggcggcc

SEQ ID NO: 150856 - RNA, 18 nt, Human
cgcaaaaaagaaaaaaac

SEQ ID NO: 150857 - RNA, 22 nt, Human
cgcccgcgcuccccggccgucc

SEQ ID NO: 150858 - RNA, 20 nt, Human
cgccgagccccgcagagcuc

SEQ ID NO: 150859 - RNA, 23 nt, Human
cgccucccgggcuccccgcuccu

SEQ ID NO: 150860 - RNA, 22 nt, Human
cgccucggccuccgcgcgggcu

SEQ ID NO: 150861 - RNA, 25 nt, Human
cgcggucagcgcgcccgccaccgcc

SEQ ID NO: 150862 - RNA, 20 nt, Human
cggcccgagucgcaugggug

SEQ ID NO: 150863 - RNA, 22 nt, Human
cggccgcgcccccgccgagccc

SEQ ID NO: 150864 - RNA, 19 nt, Human
cggccgggccgggcugggc

SEQ ID NO: 150865 - RNA, 20 nt, Human
cggccgggccgggcugggcc

SEQ ID NO: 150866 - RNA, 21 nt, Human
cggcgcaaccugagacacuuu

SEQ ID NO: 150867 - RNA, 20 nt, Human
cgggcugggccgggcugggc

SEQ ID NO: 150868 - RNA, 22 nt, Human
cguaaaacuauuacugcaauga

SEQ ID NO: 150869 - RNA, 25 nt, Human
cgugggcacacccccuggcuguccc

SEQ ID NO: 150870 - RNA, 25 nt, Human
cgugugcagggaggcgcgugcauac

SEQ ID NO: 150871 - RNA, 23 nt, Human
cucaccaagccaacacaaacaaa

SEQ ID NO: 150872 - RNA, 22 nt, Human
cucccaccagguccccuaagcu

SEQ ID NO: 150873 - RNA, 21 nt, Human
cuccggccgccgccgccgccc

SEQ ID NO: 150874 - RNA, 18 nt, Human
cucgcccgcgcuuucccu

SEQ ID NO: 150875 - RNA, 22 nt, Human
cucggagguucuaaaggaaucc

SEQ ID NO: 150876 - RNA, 23 nt, Human
cucucccaccagguccccuaagc

SEQ ID NO: 150877 - RNA, 18 nt, Human
cucuccgcguccggccgc

SEQ ID NO: 150878 - RNA, 25 nt, Human
cuggaaguccccucucucccaccag

SEQ ID NO: 150879 - RNA, 21 nt, Human
cuuccugucuuaaacgcagag

SEQ ID NO: 150880 - RNA, 20 nt, Human
cuucgcaaaaaagaaaaaaa

SEQ ID NO: 150881 - RNA, 25 nt, Human
cuuuaggccacacaccccaggccuu

SEQ ID NO: 150882 - RNA, 21 nt, Human
gaaacagugagccauggccuc

SEQ ID NO: 150883 - RNA, 19 nt, Human
gaacuggguuagaaacacc

SEQ ID NO: 150884 - RNA, 21 nt, Human
gaaggaggagggaguuaggug

SEQ ID NO: 150885 - RNA, 26 nt, Human
gaauccacgaacuggguuagaaacac

SEQ ID NO: 150886 - RNA, 18 nt, Human
gagaagaaaaagaagaag

SEQ ID NO: 150887 - RNA, 25 nt, Human
gagaagaaaaagaagaagaaaggag

SEQ ID NO: 150888 - RNA, 23 nt, Human
gagagacccccgaccgcgucucc

SEQ ID NO: 150889 - RNA, 20 nt, Human
gagcaggccugggguacgcu

SEQ ID NO: 150890 - RNA, 20 nt, Human
gagcauggagccgacuuccc

SEQ ID NO: 150891 - RNA, 27 nt, Human
gagccgggugaggcugcgggccugggc

SEQ ID NO: 150892 - RNA, 19 nt, Human
gaggaagaggaggaaaaag

SEQ ID NO: 150893 - RNA, 19 nt, Human
gaggaagaggaggaaaaag

SEQ ID NO: 150894 - RNA, 18 nt, Human
gaggagcaggaggaagga

SEQ ID NO: 150895 - RNA, 20 nt, Human
gaggaggaggaaggaaggag

SEQ ID NO: 150896 - RNA, 24 nt, Human
gaucgcuauuuuuaagauuuccau

SEQ ID NO: 150897 - RNA, 22 nt, Human
gcacauggaggcccccuccucg

SEQ ID NO: 150898 - RNA, 19 nt, Human
gcagcccccuucgcaaaaa

SEQ ID NO: 150899 - RNA, 19 nt, Human
gcaggagggugaggagagg

SEQ ID NO: 150900 - RNA, 24 nt, Human
gcagugguccggcggggacgcggg

SEQ ID NO: 150901 - RNA, 18 nt, Human
gccaaaaggagggucgcc

SEQ ID NO: 150902 - RNA, 20 nt, Human
gccacacaccccaggccuuu

SEQ ID NO: 150903 - RNA, 18 nt, Human
gcccgccaccgcccgcac

SEQ ID NO: 150904 - RNA, 20 nt, Human
gcccggccgggccgggcugg

SEQ ID NO: 150905 - RNA, 22 nt, Human
gcccggccguccccgcccgcac

SEQ ID NO: 150906 - RNA, 18 nt, Human
gccgagccccgcagagcu

SEQ ID NO: 150907 - RNA, 22 nt, Human
gccgcccgcgcuccccggccgu

SEQ ID NO: 150908 - RNA, 20 nt, Human
gccgcgcccccgccgagccc

SEQ ID NO: 150909 - RNA, 20 nt, Human
gccgggcugggccgggcugg

SEQ ID NO: 150910 - RNA, 20 nt, Human
gccugggcggcugcugguga

SEQ ID NO: 150911 - RNA, 20 nt, Human
gcgacacagaccacagacgc

SEQ ID NO: 150912 - RNA, 22 nt, Human
gcgcaggacacuccuccugcag

SEQ ID NO: 150913 - RNA, 28 nt, Human
gcgccuggugugugugugugugugugug

SEQ ID NO: 150914 - RNA, 18 nt, Human
gcgcggcggccgcggcca

SEQ ID NO: 150915 - RNA, 24 nt, Human
gcggucagcgcgcccgccaccgcc

SEQ ID NO: 150916 - RNA, 22 nt, Human
gcuuuaggccacacaccccagg

SEQ ID NO: 150917 - RNA, 19 nt, Human
ggaaagagaaggaggagga

SEQ ID NO: 150918 - RNA, 19 nt, Human
ggacagcgacacagaccac

SEQ ID NO: 150919 - RNA, 20 nt, Human
ggacucgggcgcgccuggug

SEQ ID NO: 150920 - RNA, 22 nt, Human
ggagacccccgcgcccccaccc

SEQ ID NO: 150921 - RNA, 22 nt, Human
ggagagggagccgggugaggcu

SEQ ID NO: 150922 - RNA, 20 nt, Human
ggaggaaggaaggaggagga

SEQ ID NO: 150923 - RNA, 20 nt, Human
ggcacccaugauggcuggug

SEQ ID NO: 150924 - RNA, 19 nt, Human
ggcaggaggguuaggccug

SEQ ID NO: 150925 - RNA, 18 nt, Human
ggccgggcugggccgggc

SEQ ID NO: 150926 - RNA, 24 nt, Human
gggacgcccuuccaaaucagccuu

SEQ ID NO: 150927 - RNA, 18 nt, Human
gggccgggcugggccgcc

SEQ ID NO: 150928 - RNA, 21 nt, Human
gggcgcccgcggucagcgcgc

SEQ ID NO: 150929 - RNA, 18 nt, Human
gggcugggccgggcuggg

SEQ ID NO: 150930 - RNA, 22 nt, Human
gggcugggccgggcugggccgc

SEQ ID NO: 150931 - RNA, 24 nt, Human
gggcuuuaggccacacaccccagg

SEQ ID NO: 150932 - RNA, 18 nt, Human
gggugaggagagggagcc

SEQ ID NO: 150933 - RNA, 25 nt, Human
ggguuaggccugcggcaggacugcg

SEQ ID NO: 150934 - RNA, 24 nt, Human
ggugcaggagggugaggagaggga

SEQ ID NO: 150935 - RNA, 19 nt, Human
guccaaugucauauaaugg

SEQ ID NO: 150936 - RNA, 23 nt, Human
gugaaacccuaagcagccccccc

SEQ ID NO: 150937 - RNA, 23 nt, Human
gugugcagggaggcgcgugcaua

SEQ ID NO: 150938 - RNA, 18 nt, Human
gugugugugugugugugu

SEQ ID NO: 150939 - RNA, 20 nt, Human
gugugugugugugugugugu

SEQ ID NO: 150940 - RNA, 21 nt, Human
gugugugugugugugugugug

SEQ ID NO: 150941 - RNA, 21 nt, Human
gugugugugugugugugugug

SEQ ID NO: 150942 - RNA, 23 nt, Human
guguguguguguguguucacaug

SEQ ID NO: 150943 - RNA, 23 nt, Human
guuuagcgcggacugagaccugg

SEQ ID NO: 150944 - RNA, 21 nt, Human
uaaaaaaaggugaaacccuaa

SEQ ID NO: 150945 - RNA, 20 nt, Human
uaaaaaacaagaaaagacaa

SEQ ID NO: 150946 - RNA, 22 nt, Human
uaaaacaacaaagaaaacaaaa

SEQ ID NO: 150947 - RNA, 24 nt, Human
uaaaacaacaaagaaaacaaaaaa

SEQ ID NO: 150948 - RNA, 26 nt, Human
uaaaacaacaaagaaaacaaaaaaca

SEQ ID NO: 150949 - RNA, 21 nt, Human
uaaaauuagcauaaucucaua

SEQ ID NO: 150950 - RNA, 20 nt, Human
uaagcuccccaaggccuuga

SEQ ID NO: 150951 - RNA, 18 nt, Human
uacaagucgccggccgcg

SEQ ID NO: 150952 - RNA, 22 nt, Human
uacacaauauuuucacuauuaa

SEQ ID NO: 150953 - RNA, 19 nt, Human
uaccguggggcgaaauccc

SEQ ID NO: 150954 - RNA, 20 nt, Human
uaccguggggcgaaauccca

SEQ ID NO: 150955 - RNA, 22 nt, Human
uagaaacaccacgagccgcccc

SEQ ID NO: 150956 - RNA, 21 nt, Human
uagauccuggaggauucugag

SEQ ID NO: 150957 - RNA, 20 nt, Human
uagcgcggacugagaccugg

SEQ ID NO: 150958 - RNA, 20 nt, Human
uaggccacacaccccaggcc

SEQ ID NO: 150959 - RNA, 28 nt, Human
uauagucagauauuuuggauuuuauacc

SEQ ID NO: 150960 - RNA, 23 nt, Human
uauuauguacaacguaaaacuau

SEQ ID NO: 150961 - RNA, 23 nt, Human
uauuguaagugugcgugugugug

SEQ ID NO: 150962 - RNA, 19 nt, Human
uauuucagaaccuuagcua

SEQ ID NO: 150963 - RNA, 26 nt, Human
ucaaaaccaagucgcccgccccccuc

SEQ ID NO: 150964 - RNA, 18 nt, Human
ucaacacacaaaaaugcg

SEQ ID NO: 150965 - RNA, 23 nt, Human
ucaacacacaaaaaugcgggggu

SEQ ID NO: 150966 - RNA, 23 nt, Human
uccacgaacuggguuagaaacac

SEQ ID NO: 150967 - RNA, 23 nt, Human
uccccucucucccaccagguccc

SEQ ID NO: 150968 - RNA, 24 nt, Human
ucgcccgcgcuuucccugucgcuu

SEQ ID NO: 150969 - RNA, 18 nt, Human
ucuacagagccuucugcc

SEQ ID NO: 150970 - RNA, 23 nt, Human
ucuacagagccuucugccagccc

SEQ ID NO: 150971 - RNA, 18 nt, Human
ucuauagcagaagcagcc

SEQ ID NO: 150972 - RNA, 18 nt, Human
ucuccuggacacgugccu

SEQ ID NO: 150973 - RNA, 24 nt, Human
ucucuauagcagaagcagccacuc

SEQ ID NO: 150974 - RNA, 25 nt, Human
ucugccagcccagaaacagugagcc

SEQ ID NO: 150975 - RNA, 23 nt, Human
ucuuuggacuucagcaaguuguu

SEQ ID NO: 150976 - RNA, 19 nt, Human
ugaaacaugcuuagcgauc

SEQ ID NO: 150977 - RNA, 18 nt, Human
ugaaacccuaagcagccc

SEQ ID NO: 150978 - RNA, 22 nt, Human
ugaaauaaagagguuuaaggca

SEQ ID NO: 150979 - RNA, 22 nt, Human
ugaauccacgaacuggguuaga

SEQ ID NO: 150980 - RNA, 20 nt, Human
ugagcauggagccgacuucc

SEQ ID NO: 150981 - RNA, 18 nt, Human
ugaggaggaggaggaaag

SEQ ID NO: 150982 - RNA, 19 nt, Human
ugaggaggaggaggaaaga

SEQ ID NO: 150983 - RNA, 22 nt, Human
ugaggcugcgggccugggcgac

SEQ ID NO: 150984 - RNA, 26 nt, Human
ugagguggcugguccaggcuugaggu

SEQ ID NO: 150985 - RNA, 22 nt, Human
ugaggugugggccccuccugcu

SEQ ID NO: 150986 - RNA, 21 nt, Human
ugcacaccccugggucagccg

SEQ ID NO: 150987 - RNA, 23 nt, Human
ugcauacagacauauguguaaca

SEQ ID NO: 150988 - RNA, 21 nt, Human
ugcgcgcaugcaggcagcgcg

SEQ ID NO: 150989 - RNA, 22 nt, Human
ugcgggccugggcggcugcugg

SEQ ID NO: 150990 - RNA, 20 nt, Human
uggaggauucugaguucuuu

SEQ ID NO: 150991 - RNA, 22 nt, Human
uggaggauucugaguucuuuug

SEQ ID NO: 150992 - RNA, 20 nt, Human
uggcugguccaggcuugagg

SEQ ID NO: 150993 - RNA, 19 nt, Human
ugggacccuggcuggcacc

SEQ ID NO: 150994 - RNA, 21 nt, Human
ugggacccuggcuggcaccca

SEQ ID NO: 150995 - RNA, 24 nt, Human
ugggacccuggcuggcacccauga

SEQ ID NO: 150996 - RNA, 23 nt, Human
ugggacuggggacagcgacacag

SEQ ID NO: 150997 - RNA, 20 nt, Human
ugggcccuuggugaggagga

SEQ ID NO: 150998 - RNA, 21 nt, Human
ugggcugcuucccagggccaa

SEQ ID NO: 150999 - RNA, 23 nt, Human
uggggacagcgacacagaccaca

SEQ ID NO: 151000 - RNA, 22 nt, Human
uggugugugugugugugugugu

SEQ ID NO: 151001 - RNA, 20 nt, Human
ugugcgugugugugcgugug

SEQ ID NO: 151002 - RNA, 18 nt, Human
ugugugugugugugugug

SEQ ID NO: 151003 - RNA, 18 nt, Human
ugugugugugugugugug

SEQ ID NO: 151004 - RNA, 18 nt, Human
ugugugugugugugugug

SEQ ID NO: 151005 - RNA, 18 nt, Human
ugugugugugugugugug

SEQ ID NO: 151006 - RNA, 18 nt, Human
ugugugugugugugugug

SEQ ID NO: 151007 - RNA, 18 nt, Human
ugugugugugugugugug

SEQ ID NO: 151008 - RNA, 21 nt, Human
ugugugugugugugugugugu

SEQ ID NO: 151009 - RNA, 21 nt, Human
ugugugugugugugugugugu

SEQ ID NO: 151010 - RNA, 21 nt, Human
ugugugugugugugugugugu

SEQ ID NO: 151011 - RNA, 21 nt, Human
ugugugugugugugugugugu

SEQ ID NO: 151012 - RNA, 21 nt, Human
ugugugugugugugugugugu

SEQ ID NO: 151013 - RNA, 21 nt, Human
ugugugugugugugugugugu

SEQ ID NO: 151014 - RNA, 21 nt, Human
ugugugugugugugugugugu

SEQ ID NO: 151015 - RNA, 21 nt, Human
ugugugugugugugugugugu

SEQ ID NO: 151016 - RNA, 21 nt, Human
ugugugugugugugugugugu

SEQ ID NO: 151017 - RNA, 21 nt, Human
ugugugugugugugugugugu

SEQ ID NO: 151018 - RNA, 22 nt, Human
ugugugugugugugugugugug

SEQ ID NO: 151019 - RNA, 22 nt, Human
ugugugugugugugugugugug

SEQ ID NO: 151020 - RNA, 19 nt, Human
uguguguguguguguucac

SEQ ID NO: 151021 - RNA, 20 nt, Human
uguguguguguguguucaca

SEQ ID NO: 151022 - RNA, 22 nt, Human
uguguucacaugcauacagugu

SEQ ID NO: 151023 - RNA, 28 nt, Human
uguucacaugcauacagacauaugugua

SEQ ID NO: 151024 - RNA, 24 nt, Human
uuauucgguucacaguugugugaa

SEQ ID NO: 151025 - RNA, 21 nt, Human
uucacaguugugugaaaugca

SEQ ID NO: 151026 - RNA, 26 nt, Human
uuccccauacacuaaacagaagacag

SEQ ID NO: 151027 - RNA, 20 nt, Human
uuccuggggccaagccaaaa

SEQ ID NO: 151028 - RNA, 18 nt, Human
uugcugauggagaggaau

SEQ ID NO: 151029 - RNA, 22 nt, Human
uuuaaauuauugcauuguuuag

SEQ ID NO: 151030 - RNA, 19 nt, Human
uuuaacagagcccccucga

SEQ ID NO: 151031 - RNA, 21 nt, Human
uuuuuaaaaagguuuacacua

SEQ ID NO: 151032 - RNA, 22 nt, Human
aaaaaaaaaaaaaacaacuaaa

SEQ ID NO: 151033 - RNA, 27 nt, Human
aaaaaaaaaaaaaacaacuaaacauug

SEQ ID NO: 151034 - RNA, 21 nt, Human
aaaaaaaaaaaacaacuaaac

SEQ ID NO: 151035 - RNA, 21 nt, Human
aaaaaaacaacuaaacauuga

SEQ ID NO: 151036 - RNA, 24 nt, Human
aaaagaaggaagaaagcuaagaaa

SEQ ID NO: 151037 - RNA, 25 nt, Human
aaaaggaaacuaacucagacaagug

SEQ ID NO: 151038 - RNA, 22 nt, Human
aaaaugcuugaagagaauauug

SEQ ID NO: 151039 - RNA, 18 nt, Human
aaagguaaagagaguggc

SEQ ID NO: 151040 - RNA, 23 nt, Human
aaaugguguaacagggaaaaaga

SEQ ID NO: 151041 - RNA, 20 nt, Human
aaaugucuucuacagauccc

SEQ ID NO: 151042 - RNA, 19 nt, Human
aacugaacugugucuacuu

SEQ ID NO: 151043 - RNA, 21 nt, Human
aagacaguguuucccaaaaug

SEQ ID NO: 151044 - RNA, 20 nt, Human
aagcaaaaggaaacuaacuc

SEQ ID NO: 151045 - RNA, 22 nt, Human
aaggaaacuaacucagacaagu

SEQ ID NO: 151046 - RNA, 24 nt, Human
aagugauauacagagagaaaaaga

SEQ ID NO: 151047 - RNA, 19 nt, Human
aaugauaaagguaaagaga

SEQ ID NO: 151048 - RNA, 20 nt, Human
acaagcaaaaaacguacagu

SEQ ID NO: 151049 - RNA, 23 nt, Human
acaagcaaaaaacguacagugca

SEQ ID NO: 151050 - RNA, 22 nt, Human
acacaagcaaaaaacguacagu

SEQ ID NO: 151051 - RNA, 22 nt, Human
acagaacagauagguuggaaga

SEQ ID NO: 151052 - RNA, 19 nt, Human
acccuaagauaacuaaaaa

SEQ ID NO: 151053 - RNA, 23 nt, Human
agaaaaaaaaugcuugaagagaa

SEQ ID NO: 151054 - RNA, 20 nt, Human
agaaaaagaaaugauaaagg

SEQ ID NO: 151055 - RNA, 18 nt, Human
agaaaggaaucagagagg

SEQ ID NO: 151056 - RNA, 25 nt, Human
agaaaggaaucagagaggagaggga

SEQ ID NO: 151057 - RNA, 20 nt, Human
agaaggaagaaagcuaagaa

SEQ ID NO: 151058 - RNA, 19 nt, Human
agacauaaagaagagacua

SEQ ID NO: 151059 - RNA, 22 nt, Human
agacauaauggaggagguagac

SEQ ID NO: 151060 - RNA, 18 nt, Human
agagcaaaagaagucauc

SEQ ID NO: 151061 - RNA, 24 nt, Human
agcaaggcauauagaaauauccac

SEQ ID NO: 151062 - RNA, 19 nt, Human
agcacauacugguagaauc

SEQ ID NO: 151063 - RNA, 22 nt, Human
aggaagaaagcuaagaaaaaga

SEQ ID NO: 151064 - RNA, 18 nt, Human
aggagagggauuaguuga

SEQ ID NO: 151065 - RNA, 18 nt, Human
agggagaucucaagaagc

SEQ ID NO: 151066 - RNA, 24 nt, Human
aggguacgauuuggagaguggaua

SEQ ID NO: 151067 - RNA, 19 nt, Human
caaaaggaaacuaacucag

SEQ ID NO: 151068 - RNA, 22 nt, Human
caaaaggaaacuaacucagaca

SEQ ID NO: 151069 - RNA, 20 nt, Human
caaauugcugaagccaggga

SEQ ID NO: 151070 - RNA, 23 nt, Human
caguaggggauggccuggauaau

SEQ ID NO: 151071 - RNA, 23 nt, Human
cagugauuucucuuuccccaaga

SEQ ID NO: 151072 - RNA, 21 nt, Human
cauucagcauccuagacaguc

SEQ ID NO: 151073 - RNA, 21 nt, Human
ccccaaauuuuugagauguug

SEQ ID NO: 151074 - RNA, 22 nt, Human
ccuucuugcuuuuuuaaggucu

SEQ ID NO: 151075 - RNA, 18 nt, Human
cgguguuuucaugggagu

SEQ ID NO: 151076 - RNA, 22 nt, Human
cugaacuaguaaaaaaaaaaaa

SEQ ID NO: 151077 - RNA, 25 nt, Human
cugaacuaguaaaaaaaaaaaaaaa

SEQ ID NO: 151078 - RNA, 22 nt, Human
gaaccauugguauagaauguca

SEQ ID NO: 151079 - RNA, 25 nt, Human
gaagaaaaaaaaugcuugaagagaa

SEQ ID NO: 151080 - RNA, 22 nt, Human
gaagaaaccaaugccaauuaga

SEQ ID NO: 151081 - RNA, 21 nt, Human
gaagggaagaaaggaaucaga

SEQ ID NO: 151082 - RNA, 23 nt, Human
gacccuaagauaacuaaaaacaa

SEQ ID NO: 151083 - RNA, 19 nt, Human
gagaauauugaguaggaaa

SEQ ID NO: 151084 - RNA, 22 nt, Human
gauaacuaaaaacaaaguagcu

SEQ ID NO: 151085 - RNA, 26 nt, Human
gaucaccaagacagucagacacuuaa

SEQ ID NO: 151086 - RNA, 26 nt, Human
gaucccuucuaacgcugaaauucuau

SEQ ID NO: 151087 - RNA, 22 nt, Human
gcaaguuucgaggcagggaugg

SEQ ID NO: 151088 - RNA, 22 nt, Human
gccuuucagucuugaaaaacca

SEQ ID NO: 151089 - RNA, 24 nt, Human
ggaagaaaaaaaaugcuugaagag

SEQ ID NO: 151090 - RNA, 21 nt, Human
ggggaggggaauguaagcagu

SEQ ID NO: 151091 - RNA, 21 nt, Human
ggguacgauuuggagagugga

SEQ ID NO: 151092 - RNA, 23 nt, Human
guaaaaaaaaaaaaaaacaacua

SEQ ID NO: 151093 - RNA, 23 nt, Human
guagaauggaaaguuaaucugcc

SEQ ID NO: 151094 - RNA, 23 nt, Human
uaaccugagaagaaaccaaugcc

SEQ ID NO: 151095 - RNA, 20 nt, Human
uaacugaacugugucuacuu

SEQ ID NO: 151096 - RNA, 21 nt, Human
uagaaaugguuaaaauagcua

SEQ ID NO: 151097 - RNA, 22 nt, Human
uagacauaaagaagagacuaga

SEQ ID NO: 151098 - RNA, 25 nt, Human
uaguagcacauacugguagaauccc

SEQ ID NO: 151099 - RNA, 27 nt, Human
uauccacuuuucaaaauaauuuacaca

SEQ ID NO: 151100 - RNA, 23 nt, Human
uauccugccuucccuucuccuua

SEQ ID NO: 151101 - RNA, 22 nt, Human
ucaaaaaggcucaaaauaaaaa

SEQ ID NO: 151102 - RNA, 22 nt, Human
ucaacacaagcaaaaaacguac

SEQ ID NO: 151103 - RNA, 22 nt, Human
ucaagaaaaauuuaggguacga

SEQ ID NO: 151104 - RNA, 18 nt, Human
ucacucagauaucauguu

SEQ ID NO: 151105 - RNA, 21 nt, Human
ucacucagauaucauguucag

SEQ ID NO: 151106 - RNA, 21 nt, Human
ucaguaucaaaaaggcucaaa

SEQ ID NO: 151107 - RNA, 22 nt, Human
uccaaaauauauucuguaauga

SEQ ID NO: 151108 - RNA, 24 nt, Human
uccccagaggccuaaucucagcuc

SEQ ID NO: 151109 - RNA, 21 nt, Human
ucuacuugguagagacccuaa

SEQ ID NO: 151110 - RNA, 22 nt, Human
ucuuaggaaguuuucaacguug

SEQ ID NO: 151111 - RNA, 26 nt, Human
ugaacuaguaaaaaaaaaaaaaaaca

SEQ ID NO: 151112 - RNA, 19 nt, Human
ugagaagaaaccaaugcca

SEQ ID NO: 151113 - RNA, 27 nt, Human
ugagaagaaaccaaugccaauuagaag

SEQ ID NO: 151114 - RNA, 22 nt, Human
ugagggagagagaaaagaagga

SEQ ID NO: 151115 - RNA, 23 nt, Human
uggaaauguugcugaauauauaa

SEQ ID NO: 151116 - RNA, 20 nt, Human
uggaacuuugagagcaaaag

SEQ ID NO: 151117 - RNA, 21 nt, Human
uggaagaaaaaaaaugcuuga

SEQ ID NO: 151118 - RNA, 25 nt, Human
uggcaaguccuagucuuuuuuccug

SEQ ID NO: 151119 - RNA, 20 nt, Human
ugguggcucauucagcaucc

SEQ ID NO: 151120 - RNA, 23 nt, Human
uguguuuccccaaauuuuugaga

SEQ ID NO: 151121 - RNA, 23 nt, Human
uguuaugaaaucugccccugaag

SEQ ID NO: 151122 - RNA, 20 nt, Human
uguuuucaugggaguguuga

SEQ ID NO: 151123 - RNA, 21 nt, Human
uuaaaagacaguuuuauacag

SEQ ID NO: 151124 - RNA, 23 nt, Human
uuccaaaauauauucuguaauga

SEQ ID NO: 151125 - RNA, 21 nt, Human
uucuaugauggaaauguugcu

SEQ ID NO: 151126 - RNA, 20 nt, Human
uugaagacacugugcuaggu

SEQ ID NO: 151127 - RNA, 23 nt, Human
uuuauaagccuuuaagaaaaaua

SEQ ID NO: 151128 - RNA, 20 nt, Human
uuuuccugcucuaggcaagg

SEQ ID NO: 151129 - RNA, 20 nt, Human
aaaauaagaagaaccuucuc

SEQ ID NO: 151130 - RNA, 25 nt, Human
aaacaaguacauaugaacaugaaca

SEQ ID NO: 151131 - RNA, 20 nt, Human
aaagaaaaaaacuguaaagc

SEQ ID NO: 151132 - RNA, 24 nt, Human
aaagcacaucucaacagccacaaa

SEQ ID NO: 151133 - RNA, 22 nt, Human
aauccaccccuccccagcccac

SEQ ID NO: 151134 - RNA, 22 nt, Human
acaugcuuaguaaacaagcacu

SEQ ID NO: 151135 - RNA, 22 nt, Human
acauuuuaaaaauccaccccuc

SEQ ID NO: 151136 - RNA, 19 nt, Human
accaaauggcuaccaacaa

SEQ ID NO: 151137 - RNA, 19 nt, Human
acuacagcccacucauuca

SEQ ID NO: 151138 - RNA, 23 nt, Human
acugugcugugaauuguauuugc

SEQ ID NO: 151139 - RNA, 25 nt, Human
acuugcaccaaaaaucccacccccc

SEQ ID NO: 151140 - RNA, 21 nt, Human
agacaaugcaaacacagucac

SEQ ID NO: 151141 - RNA, 23 nt, Human
agacauuugcauugcuuagaaca

SEQ ID NO: 151142 - RNA, 18 nt, Human
agagcaagccugccacug

SEQ ID NO: 151143 - RNA, 19 nt, Human
agcaagaagagaaugaguu

SEQ ID NO: 151144 - RNA, 19 nt, Human
aggaggcgggcugugcgcu

SEQ ID NO: 151145 - RNA, 23 nt, Human
aggggcuacacaauuauaccaga

SEQ ID NO: 151146 - RNA, 25 nt, Human
auaagaagaaccuucucugucuuau

SEQ ID NO: 151147 - RNA, 19 nt, Human
auaggggccacugccuaca

SEQ ID NO: 151148 - RNA, 22 nt, Human
aucauaaacuacagagcuguaa

SEQ ID NO: 151149 - RNA, 28 nt, Human
auccaccccuccccagcccacccuccag

SEQ ID NO: 151150 - RNA, 25 nt, Human
aucccaccccccucccucgccccuu

SEQ ID NO: 151151 - RNA, 20 nt, Human
aucuccagcagcagcuggug

SEQ ID NO: 151152 - RNA, 18 nt, Human
auuuugucauccuucccu

SEQ ID NO: 151153 - RNA, 21 nt, Human
caaaauaagaagaaccuucuc

SEQ ID NO: 151154 - RNA, 23 nt, Human
caacagccacaaaaugugcaaaa

SEQ ID NO: 151155 - RNA, 20 nt, Human
caacugaguucuagcgacgg

SEQ ID NO: 151156 - RNA, 23 nt, Human
caagcucuguccucagagagagg

SEQ ID NO: 151157 - RNA, 25 nt, Human
cacaaagaaaaaaacuguaaagcaa

SEQ ID NO: 151158 - RNA, 24 nt, Human
cacaaccaaaccccaugaaauccc

SEQ ID NO: 151159 - RNA, 25 nt, Human
cacaaccaaaccccaugaaauccca

SEQ ID NO: 151160 - RNA, 19 nt, Human
caccaaaaaucccaccccc

SEQ ID NO: 151161 - RNA, 22 nt, Human
caccaaaaaucccaccccccuc

SEQ ID NO: 151162 - RNA, 22 nt, Human
cacgggcaaggaggcgacgaac

SEQ ID NO: 151163 - RNA, 21 nt, Human
cacuaauaccuacgacggcac

SEQ ID NO: 151164 - RNA, 24 nt, Human
cagaaagcagccuccccuuacccu

SEQ ID NO: 151165 - RNA, 19 nt, Human
cagaaaguucccuacaggc

SEQ ID NO: 151166 - RNA, 23 nt, Human
cagcagcagcugguguggaggcu

SEQ ID NO: 151167 - RNA, 22 nt, Human
cagcagcugguguggaggcuuc

SEQ ID NO: 151168 - RNA, 20 nt, Human
cagcccagggaagcgguggc

SEQ ID NO: 151169 - RNA, 20 nt, Human
caggacccgcagagcgucuc

SEQ ID NO: 151170 - RNA, 21 nt, Human
caggacccgcagagcgucucc

SEQ ID NO: 151171 - RNA, 22 nt, Human
cauggcauggacggacaaacac

SEQ ID NO: 151172 - RNA, 19 nt, Human
cauguccaguuagagcauu

SEQ ID NO: 151173 - RNA, 25 nt, Human
cauucacacacguccauacaugugg

SEQ ID NO: 151174 - RNA, 22 nt, Human
cauuuugucauccuucccuguc

SEQ ID NO: 151175 - RNA, 21 nt, Human
ccaaaaaucccaccccccucc

SEQ ID NO: 151176 - RNA, 23 nt, Human
ccaaaugccuauaucgauucaaa

SEQ ID NO: 151177 - RNA, 21 nt, Human
ccaaauggcuaccaacaaagu

SEQ ID NO: 151178 - RNA, 22 nt, Human
ccaagggaaaguuuaaagucac

SEQ ID NO: 151179 - RNA, 24 nt, Human
ccacccuccaguuaugcuccaaau

SEQ ID NO: 151180 - RNA, 21 nt, Human
ccagcccagccagcuucccuc

SEQ ID NO: 151181 - RNA, 21 nt, Human
ccauggaaaucaaaugcugaa

SEQ ID NO: 151182 - RNA, 24 nt, Human
cccaaagaaaaggggcuacacaau

SEQ ID NO: 151183 - RNA, 22 nt, Human
cccagccagcuucccucucgga

SEQ ID NO: 151184 - RNA, 21 nt, Human
cccagggaagcgguggcgaau

SEQ ID NO: 151185 - RNA, 22 nt, Human
ccccgaacgauggcucgcggac

SEQ ID NO: 151186 - RNA, 24 nt, Human
cccuccccagcccacccuccaguu

SEQ ID NO: 151187 - RNA, 24 nt, Human
cccucucggacccacaguugggcu

SEQ ID NO: 151188 - RNA, 22 nt, Human
cccugcaccucaggggaagcac

SEQ ID NO: 151189 - RNA, 19 nt, Human
ccuccccagcccacccucc

SEQ ID NO: 151190 - RNA, 23 nt, Human
ccugucuugacauuuuaaaaauc

SEQ ID NO: 151191 - RNA, 24 nt, Human
ccuuacccuaucagcacaaccaaa

SEQ ID NO: 151192 - RNA, 24 nt, Human
cgccccgaacgauggcucgcggac

SEQ ID NO: 151193 - RNA, 19 nt, Human
cuaaaauacagcaauguga

SEQ ID NO: 151194 - RNA, 21 nt, Human
cuggccgcaacgcacaacuga

SEQ ID NO: 151195 - RNA, 18 nt, Human
cuuacccuaucagcacaa

SEQ ID NO: 151196 - RNA, 22 nt, Human
cuucauguccaguuagagcauu

SEQ ID NO: 151197 - RNA, 20 nt, Human
gaaaaaaaaaaaaauaacag

SEQ ID NO: 151198 - RNA, 18 nt, Human
gaaaaaaacuguaaagca

SEQ ID NO: 151199 - RNA, 21 nt, Human
gaacacaucuaggaaccaggg

SEQ ID NO: 151200 - RNA, 19 nt, Human
gaaugccccggagaaagga

SEQ ID NO: 151201 - RNA, 20 nt, Human
gagaaacauggacgaaagca

SEQ ID NO: 151202 - RNA, 20 nt, Human
gagcagaccccuuagagauu

SEQ ID NO: 151203 - RNA, 22 nt, Human
gaggcuucaagcucuguccuca

SEQ ID NO: 151204 - RNA, 21 nt, Human
gaguggggagaagggcagaaa

SEQ ID NO: 151205 - RNA, 24 nt, Human
gaguugcaaacuuuggucuucccc

SEQ ID NO: 151206 - RNA, 23 nt, Human
gcaaagcauucuuaggguaauaa

SEQ ID NO: 151207 - RNA, 21 nt, Human
gcagaaagcagccuccccuua

SEQ ID NO: 151208 - RNA, 23 nt, Human
gccaagggaaaguuuaaagucac

SEQ ID NO: 151209 - RNA, 20 nt, Human
gccagccggggagaggacug

SEQ ID NO: 151210 - RNA, 18 nt, Human
gcgcucgggggagggagc

SEQ ID NO: 151211 - RNA, 18 nt, Human
gcuucaagcucuguccuc

SEQ ID NO: 151212 - RNA, 20 nt, Human
ggaaaacuucucaauagggg

SEQ ID NO: 151213 - RNA, 21 nt, Human
ggaagcaccuauuugagacua

SEQ ID NO: 151214 - RNA, 26 nt, Human
ggacggacaaacacaauuagucuaaa

SEQ ID NO: 151215 - RNA, 21 nt, Human
ggagcuagaaagcgccuugug

SEQ ID NO: 151216 - RNA, 20 nt, Human
ggcagaaagcagccuccccu

SEQ ID NO: 151217 - RNA, 19 nt, Human
ggcuucaagcucuguccuc

SEQ ID NO: 151218 - RNA, 20 nt, Human
gguacagcaagggaaaaggu

SEQ ID NO: 151219 - RNA, 25 nt, Human
gugcagcagauuuuauucgagucuu

SEQ ID NO: 151220 - RNA, 19 nt, Human
uaaaaauccaccccucccc

SEQ ID NO: 151221 - RNA, 24 nt, Human
uaaaauacagcaaugugagaaaca

SEQ ID NO: 151222 - RNA, 25 nt, Human
uaaauaaauaaauaaacuuuggaca

SEQ ID NO: 151223 - RNA, 24 nt, Human
uaacugcuacaauauaaacgacac

SEQ ID NO: 151224 - RNA, 18 nt, Human
uaagaagaaccuucucug

SEQ ID NO: 151225 - RNA, 26 nt, Human
uacagcaaccagcccacaaaauaaga

SEQ ID NO: 151226 - RNA, 19 nt, Human
uacccuaucagcacaacca

SEQ ID NO: 151227 - RNA, 23 nt, Human
uagacaaugcaaacacagucaca

SEQ ID NO: 151228 - RNA, 20 nt, Human
uaugaacaugaacauuuucc

SEQ ID NO: 151229 - RNA, 19 nt, Human
ucacaauguaaaagguugu

SEQ ID NO: 151230 - RNA, 22 nt, Human
ucagagagaggugacaaccauu

SEQ ID NO: 151231 - RNA, 22 nt, Human
ucagcacaaccaaaccccauga

SEQ ID NO: 151232 - RNA, 25 nt, Human
ucaggggaagcaccuauuugagacu

SEQ ID NO: 151233 - RNA, 24 nt, Human
ucauuuauuuaggcccaacuacag

SEQ ID NO: 151234 - RNA, 26 nt, Human
uccacaauuacaagacaaggacuaga

SEQ ID NO: 151235 - RNA, 19 nt, Human
uccacgguuucucuaccuc

SEQ ID NO: 151236 - RNA, 22 nt, Human
ucccaccccccucccucgcccc

SEQ ID NO: 151237 - RNA, 27 nt, Human
ucccaccccccucccucgccccuuucc

SEQ ID NO: 151238 - RNA, 18 nt, Human
ucccucgccccuuuccuu

SEQ ID NO: 151239 - RNA, 20 nt, Human
uccuggggagcagaccccuu

SEQ ID NO: 151240 - RNA, 19 nt, Human
uccuuuuuuucucuucauu

SEQ ID NO: 151241 - RNA, 22 nt, Human
ucuaauaauuuauugaccuuca

SEQ ID NO: 151242 - RNA, 21 nt, Human
ucuacacauaaaugguggggc

SEQ ID NO: 151243 - RNA, 21 nt, Human
ucucaauaggggccacugccu

SEQ ID NO: 151244 - RNA, 19 nt, Human
ucuccagcagcagcuggug

SEQ ID NO: 151245 - RNA, 19 nt, Human
ucuggaccgggucuccgca

SEQ ID NO: 151246 - RNA, 21 nt, Human
ugaacaugaacauuuuccuuu

SEQ ID NO: 151247 - RNA, 20 nt, Human
ugaaguauacauugugccaa

SEQ ID NO: 151248 - RNA, 23 nt, Human
ugaauuaaguaaaucagauggga

SEQ ID NO: 151249 - RNA, 19 nt, Human
ugagaaacauggacgaaag

SEQ ID NO: 151250 - RNA, 24 nt, Human
ugaguuaauuuacaucugugauac

SEQ ID NO: 151251 - RNA, 21 nt, Human
ugcaccaaaaaucccaccccc

SEQ ID NO: 151252 - RNA, 23 nt, Human
ugcaggcgccgcggaaggaggcg

SEQ ID NO: 151253 - RNA, 21 nt, Human
ugcuacgggugagcacugaag

SEQ ID NO: 151254 - RNA, 20 nt, Human
ugggaguggggagaagggca

SEQ ID NO: 151255 - RNA, 24 nt, Human
ugggaguggggagaagggcagaaa

SEQ ID NO: 151256 - RNA, 18 nt, Human
ugucauccuucccugucu

SEQ ID NO: 151257 - RNA, 26 nt, Human
uguggccaaauguguuacuugugcac

SEQ ID NO: 151258 - RNA, 27 nt, Human
uguggccaaauguguuacuugugcacc

SEQ ID NO: 151259 - RNA, 24 nt, Human
uuagacauuugcauugcuuagaac

SEQ ID NO: 151260 - RNA, 23 nt, Human
uucaguuucacauugugaaaaaa

SEQ ID NO: 151261 - RNA, 24 nt, Human
uucauucauauuuaaaccaugugc

SEQ ID NO: 151262 - RNA, 20 nt, Human
uuccauagaauuuuccagga

SEQ ID NO: 151263 - RNA, 18 nt, Human
uuuccauuuugucauccu

SEQ ID NO: 151264 - RNA, 18 nt, Human
uuugaaucuccagcagca

SEQ ID NO: 151265 - RNA, 21 nt, Human
cacacacccacagucucacug

SEQ ID NO: 151266 - RNA, 27 nt, Human
ccaaaaaucaccaccuuuaauacuccc

SEQ ID NO: 151267 - RNA, 20 nt, Human
ccaacgagggcacagggcug

SEQ ID NO: 151268 - RNA, 24 nt, Human
ccacucacaaacacugccaagggc

SEQ ID NO: 151269 - RNA, 19 nt, Human
ccccggccugcacacaccc

SEQ ID NO: 151270 - RNA, 25 nt, Human
ccgcgucgcgggauccaacgagggc

SEQ ID NO: 151271 - RNA, 22 nt, Human
ccucggaacccagccucgugcc

SEQ ID NO: 151272 - RNA, 23 nt, Human
cggacgauagcgugaccucccuu

SEQ ID NO: 151273 - RNA, 19 nt, Human
cuuccacucacaaacacug

SEQ ID NO: 151274 - RNA, 18 nt, Human
ugcacacacccacagucu

SEQ ID NO: 151275 - RNA, 19 nt, Human
ugccaagggcuugggccuc

SEQ ID NO: 151276 - RNA, 19 nt, Human
ugcuggggccgcggacgau

SEQ ID NO: 151277 - RNA, 23 nt, Human
aaaaacuuuuuaaaaagcaaaaa

SEQ ID NO: 151278 - RNA, 22 nt, Human
aaaaagcaaaaagcaaagccac

SEQ ID NO: 151279 - RNA, 22 nt, Human
aaaacuuuuuaaaaagcaaaaa

SEQ ID NO: 151280 - RNA, 23 nt, Human
aaagagaaaaacuuuuuaaaaag

SEQ ID NO: 151281 - RNA, 19 nt, Human
aagcaaaaagcaaagccac

SEQ ID NO: 151282 - RNA, 22 nt, Human
aagcaaaaagcaaagccacuaa

SEQ ID NO: 151283 - RNA, 19 nt, Human
acacggcgagaccacaucu

SEQ ID NO: 151284 - RNA, 20 nt, Human
acacggcgagaccacaucuc

SEQ ID NO: 151285 - RNA, 21 nt, Human
acacggcgagaccacaucucu

SEQ ID NO: 151286 - RNA, 18 nt, Human
accaccgcacuccagccu

SEQ ID NO: 151287 - RNA, 18 nt, Human
accgcacuccagccugga

SEQ ID NO: 151288 - RNA, 25 nt, Human
accgcacuccagccuggaugacacg

SEQ ID NO: 151289 - RNA, 23 nt, Human
agcugagggugauggugugugcc

SEQ ID NO: 151290 - RNA, 18 nt, Human
aggauugcuuaagcccag

SEQ ID NO: 151291 - RNA, 19 nt, Human
aggcaggaggauugcuuaa

SEQ ID NO: 151292 - RNA, 23 nt, Human
aggcaggaggauugcuuaagccc

SEQ ID NO: 151293 - RNA, 24 nt, Human
aggcaggaggauugcuuaagccca

SEQ ID NO: 151294 - RNA, 24 nt, Human
caccgcacuccagccuggaugaca

SEQ ID NO: 151295 - RNA, 23 nt, Human
cacuccagccuggaugacacggc

SEQ ID NO: 151296 - RNA, 18 nt, Human
cagaaguuugaggcuaua

SEQ ID NO: 151297 - RNA, 19 nt, Human
ccaccgcacuccagccugg

SEQ ID NO: 151298 - RNA, 20 nt, Human
ccaccgcacuccagccugga

SEQ ID NO: 151299 - RNA, 21 nt, Human
ccaccgcacuccagccuggau

SEQ ID NO: 151300 - RNA, 23 nt, Human
ccaccgcacuccagccuggauga

SEQ ID NO: 151301 - RNA, 19 nt, Human
ccuguagucccagcugcuc

SEQ ID NO: 151302 - RNA, 21 nt, Human
ccuguagucccagcugcucag

SEQ ID NO: 151303 - RNA, 19 nt, Human
gacacggcgagaccacauc

SEQ ID NO: 151304 - RNA, 22 nt, Human
ggcagaggcaggaggauugcuu

SEQ ID NO: 151305 - RNA, 23 nt, Human
ggugauggugugugccuguaguc

SEQ ID NO: 151306 - RNA, 28 nt, Human
uaaaaagcaaaaagcaaagccacuaaaa

SEQ ID NO: 151307 - RNA, 23 nt, Human
uagcugagggugauggugugugc

SEQ ID NO: 151308 - RNA, 25 nt, Human
uccaccaccgcacuccagccuggau

SEQ ID NO: 151309 - RNA, 24 nt, Human
uccagccuggaugacacggcgaga

SEQ ID NO: 151310 - RNA, 22 nt, Human
ugacacggcgagaccacaucuc

SEQ ID NO: 151311 - RNA, 24 nt, Human
ugauggugugugccuguaguccca

SEQ ID NO: 151312 - RNA, 22 nt, Human
ugauuccaccaccgcacuccag

SEQ ID NO: 151313 - RNA, 24 nt, Human
ugccuguagucccagcugcucagg

SEQ ID NO: 151314 - RNA, 25 nt, Human
ugccuguagucccagcugcucaggg

SEQ ID NO: 151315 - RNA, 22 nt, Human
uggaugacacggcgagaccaca

SEQ ID NO: 151316 - RNA, 18 nt, Human
uggugugugccuguaguc

SEQ ID NO: 151317 - RNA, 24 nt, Human
uggugugugccuguagucccagcu

SEQ ID NO: 151318 - RNA, 23 nt, Human
ugugccuguagucccagcugcuc

SEQ ID NO: 151319 - RNA, 24 nt, Human
uugcuuaagcccagaaguuugagg

SEQ ID NO: 151320 - RNA, 21 nt, Human
aaucuguuucaaguucucccu

SEQ ID NO: 151321 - RNA, 18 nt, Human
acgcggggcugggcugga

SEQ ID NO: 151322 - RNA, 21 nt, Human
acuguucuugccacccucugg

SEQ ID NO: 151323 - RNA, 23 nt, Human
agagcaggcuccauucugggucg

SEQ ID NO: 151324 - RNA, 19 nt, Human
agagggaggcgggaagggu

SEQ ID NO: 151325 - RNA, 20 nt, Human
agauccagguggcucugggc

SEQ ID NO: 151326 - RNA, 18 nt, Human
agcgggagcgggggcagg

SEQ ID NO: 151327 - RNA, 19 nt, Human
agcuaggcucccaacgccc

SEQ ID NO: 151328 - RNA, 21 nt, Human
agcuuggcuacucccccucug

SEQ ID NO: 151329 - RNA, 21 nt, Human
aggcccaggacaagcagcuug

SEQ ID NO: 151330 - RNA, 19 nt, Human
aggcggccggagcgacggc

SEQ ID NO: 151331 - RNA, 22 nt, Human
aggcuccugucuccccugccag

SEQ ID NO: 151332 - RNA, 19 nt, Human
aggcugggcuccgcuaggc

SEQ ID NO: 151333 - RNA, 26 nt, Human
agggaccccaagguguuccaagccag

SEQ ID NO: 151334 - RNA, 20 nt, Human
agggaggcgggaaggguagg

SEQ ID NO: 151335 - RNA, 22 nt, Human
aggggcaggcccaggacaagca

SEQ ID NO: 151336 - RNA, 22 nt, Human
agggggcuccauguggcaggag

SEQ ID NO: 151337 - RNA, 21 nt, Human
agguguggaggccgcagggau

SEQ ID NO: 151338 - RNA, 23 nt, Human
aguggaggacuggcucccagggu

SEQ ID NO: 151339 - RNA, 24 nt, Human
aguggcagggcugcgggcgggcac

SEQ ID NO: 151340 - RNA, 22 nt, Human
aguggucugucuccugggcagc

SEQ ID NO: 151341 - RNA, 22 nt, Human
augacagggacuuggguuuuua

SEQ ID NO: 151342 - RNA, 19 nt, Human
caaguucucccuuccugcc

SEQ ID NO: 151343 - RNA, 21 nt, Human
cacccucugggcucccaggcu

SEQ ID NO: 151344 - RNA, 19 nt, Human
cacugggcucccccgggug

SEQ ID NO: 151345 - RNA, 24 nt, Human
cacuguucuugccacccucugggc

SEQ ID NO: 151346 - RNA, 21 nt, Human
cagagggggcuccauguggca

SEQ ID NO: 151347 - RNA, 25 nt, Human
cagccaccgccaccacgggcucccg

SEQ ID NO: 151348 - RNA, 25 nt, Human
cagcguggcaaguggucugucuccu

SEQ ID NO: 151349 - RNA, 18 nt, Human
caggacaagcagcuuggc

SEQ ID NO: 151350 - RNA, 18 nt, Human
cagggcugcgggcgggca

SEQ ID NO: 151351 - RNA, 19 nt, Human
cagucucuccugcugggcg

SEQ ID NO: 151352 - RNA, 22 nt, Human
ccaccgccaccacgggcucccg

SEQ ID NO: 151353 - RNA, 23 nt, Human
ccacgggcucccgcuugcugggg

SEQ ID NO: 151354 - RNA, 22 nt, Human
ccagguggcucugggcugggcc

SEQ ID NO: 151355 - RNA, 18 nt, Human
ccagugcuggauccaggu

SEQ ID NO: 151356 - RNA, 23 nt, Human
cccagacccacuggguugaaggu

SEQ ID NO: 151357 - RNA, 19 nt, Human
cccccucugcuggcugccc

SEQ ID NO: 151358 - RNA, 22 nt, Human
ccgaugcugugguuggugcugc

SEQ ID NO: 151359 - RNA, 19 nt, Human
ccucugagagggaggcggg

SEQ ID NO: 151360 - RNA, 18 nt, Human
cgaugcugugguuggugc

SEQ ID NO: 151361 - RNA, 23 nt, Human
cgccaccacgggcucccgcuugc

SEQ ID NO: 151362 - RNA, 21 nt, Human
cgcccacuguucuugccaccc

SEQ ID NO: 151363 - RNA, 19 nt, Human
cggcugcucagucucuccu

SEQ ID NO: 151364 - RNA, 19 nt, Human
cggggagggggugcugggc

SEQ ID NO: 151365 - RNA, 22 nt, Human
cguggcaaguggucugucuccu

SEQ ID NO: 151366 - RNA, 18 nt, Human
cucccagcuggcggcugc

SEQ ID NO: 151367 - RNA, 21 nt, Human
cucccccucugcuggcugccc

SEQ ID NO: 151368 - RNA, 22 nt, Human
cucccccucugcuggcugcccg

SEQ ID NO: 151369 - RNA, 22 nt, Human
cucccgcuugcugggggaaccu

SEQ ID NO: 151370 - RNA, 25 nt, Human
cucugggcugggcccucuucucuuc

SEQ ID NO: 151371 - RNA, 23 nt, Human
cugcccagcucaguucaccagug

SEQ ID NO: 151372 - RNA, 20 nt, Human
cuggaguugcuguccgaagg

SEQ ID NO: 151373 - RNA, 19 nt, Human
cugggcccucuucucuucc

SEQ ID NO: 151374 - RNA, 20 nt, Human
cugggggaaccugggagcgg

SEQ ID NO: 151375 - RNA, 18 nt, Human
cuggguugaagguucugg

SEQ ID NO: 151376 - RNA, 20 nt, Human
cugugcgcugggccuuaucc

SEQ ID NO: 151377 - RNA, 19 nt, Human
cuguguccaguggcagggc

SEQ ID NO: 151378 - RNA, 22 nt, Human
gagcucccggcucauccagccc

SEQ ID NO: 151379 - RNA, 22 nt, Human
gcagcaguccuggccccagggc

SEQ ID NO: 151380 - RNA, 19 nt, Human
gcaggagcuaggcucccaa

SEQ ID NO: 151381 - RNA, 18 nt, Human
gcggagagcaggcuccau

SEQ ID NO: 151382 - RNA, 22 nt, Human
gcggcugcucagucucuccugc

SEQ ID NO: 151383 - RNA, 21 nt, Human
gcuaugccaugcugcuggugg

SEQ ID NO: 151384 - RNA, 21 nt, Human
gcucccagcuggcggcugcuc

SEQ ID NO: 151385 - RNA, 18 nt, Human
gcucccagggugaguuca

SEQ ID NO: 151386 - RNA, 20 nt, Human
gcuccugucuccccugccag

SEQ ID NO: 151387 - RNA, 19 nt, Human
gcugcugcucuccgaggag

SEQ ID NO: 151388 - RNA, 21 nt, Human
ggaaccugggagcgggagcgg

SEQ ID NO: 151389 - RNA, 24 nt, Human
ggaaccugggagcgggagcggggg

SEQ ID NO: 151390 - RNA, 18 nt, Human
ggagagcaggcuccauuc

SEQ ID NO: 151391 - RNA, 18 nt, Human
ggagcagggggugcucug

SEQ ID NO: 151392 - RNA, 19 nt, Human
ggaggacuggcucccaggg

SEQ ID NO: 151393 - RNA, 24 nt, Human
ggagggggugcugggcuccaaugg

SEQ ID NO: 151394 - RNA, 21 nt, Human
ggcggggagggggugcugggc

SEQ ID NO: 151395 - RNA, 22 nt, Human
ggcuacucccccucugcuggcu

SEQ ID NO: 151396 - RNA, 21 nt, Human
gggagcgggagcgggggcagg

SEQ ID NO: 151397 - RNA, 18 nt, Human
gggcggaggucagggucc

SEQ ID NO: 151398 - RNA, 22 nt, Human
gggcggggagggggugcugggc

SEQ ID NO: 151399 - RNA, 18 nt, Human
ggggagggggugcugggc

SEQ ID NO: 151400 - RNA, 21 nt, Human
ggucgaguggaggacuggcuc

SEQ ID NO: 151401 - RNA, 19 nt, Human
guccaguggcagggcugcg

SEQ ID NO: 151402 - RNA, 24 nt, Human
guggagggaccccaagguguucca

SEQ ID NO: 151403 - RNA, 19 nt, Human
guggcucugggcugggccc

SEQ ID NO: 151404 - RNA, 18 nt, Human
guguuccaagccaguggc

SEQ ID NO: 151405 - RNA, 22 nt, Human
uaugaccggcagcagggagcuc

SEQ ID NO: 151406 - RNA, 19 nt, Human
ucaggagaaguggacacag

SEQ ID NO: 151407 - RNA, 18 nt, Human
uccaguggcagggcugcg

SEQ ID NO: 151408 - RNA, 20 nt, Human
uccauucugggucgagugga

SEQ ID NO: 151409 - RNA, 19 nt, Human
ucccaacgcccacuguucu

SEQ ID NO: 151410 - RNA, 22 nt, Human
ucccucagaggcuucacugggc

SEQ ID NO: 151411 - RNA, 25 nt, Human
ucccucagaggcuucacugggcucc

SEQ ID NO: 151412 - RNA, 24 nt, Human
uccugggcagccauaucccagacc

SEQ ID NO: 151413 - RNA, 23 nt, Human
ucuccgaggaggccggggcagcc

SEQ ID NO: 151414 - RNA, 18 nt, Human
ucuguuucaaguucuccc

SEQ ID NO: 151415 - RNA, 20 nt, Human
ugaccggcagcagggagcuc

SEQ ID NO: 151416 - RNA, 19 nt, Human
ugccagggccccucaaucc

SEQ ID NO: 151417 - RNA, 18 nt, Human
ugcgcugggccuuauccu

SEQ ID NO: 151418 - RNA, 18 nt, Human
ugcuccagccuucugggg

SEQ ID NO: 151419 - RNA, 23 nt, Human
ugcugcucuccgaggaggccggg

SEQ ID NO: 151420 - RNA, 20 nt, Human
ugcugcugguggagcagggg

SEQ ID NO: 151421 - RNA, 21 nt, Human
ugcugcugguggagcaggggg

SEQ ID NO: 151422 - RNA, 18 nt, Human
ugcugggcgagcgcgggg

SEQ ID NO: 151423 - RNA, 19 nt, Human
ugcugugguuggugcugcu

SEQ ID NO: 151424 - RNA, 20 nt, Human
uggaguugcuguccgaagga

SEQ ID NO: 151425 - RNA, 23 nt, Human
uggauggcagugacagcagcagu

SEQ ID NO: 151426 - RNA, 23 nt, Human
uggcagggcugcgggcgggcacc

SEQ ID NO: 151427 - RNA, 23 nt, Human
uggcagugacagcagcaguccug

SEQ ID NO: 151428 - RNA, 23 nt, Human
uggcggcugcucagucucuccug

SEQ ID NO: 151429 - RNA, 19 nt, Human
uggcuacucccccucugcu

SEQ ID NO: 151430 - RNA, 18 nt, Human
uggcucugggcugggccc

SEQ ID NO: 151431 - RNA, 19 nt, Human
uggcucugggcugggcccu

SEQ ID NO: 151432 - RNA, 21 nt, Human
uggcugggcuggccugaaucu

SEQ ID NO: 151433 - RNA, 25 nt, Human
ugggcggggagggggugcugggcuc

SEQ ID NO: 151434 - RNA, 21 nt, Human
ugggggccugugcgcugggcc

SEQ ID NO: 151435 - RNA, 19 nt, Human
uggucugucuccugggcag

SEQ ID NO: 151436 - RNA, 22 nt, Human
uggugaauacacaggggcaggc

SEQ ID NO: 151437 - RNA, 22 nt, Human
ugguggugaauacacaggggca

SEQ ID NO: 151438 - RNA, 19 nt, Human
uuauccuguguccaguggc

SEQ ID NO: 151439 - RNA, 19 nt, Human
uugcuguccgaaggauggg

SEQ ID NO: 151440 - RNA, 24 nt, Human
uuucauggucugauuuauuggugg

SEQ ID NO: 151441 - RNA, 25 nt, Human
uuuuuuuucagguuucauggucuga

SEQ ID NO: 151442 - RNA, 21 nt, Human
uuuuuuuuuuuuucagguuuc

SEQ ID NO: 151443 - RNA, 18 nt, Human
augcagggccacgacucc

SEQ ID NO: 151444 - RNA, 19 nt, Human
caccgcggcagcugugggc

SEQ ID NO: 151445 - RNA, 21 nt, Human
cagggcccagggagccccagg

SEQ ID NO: 151446 - RNA, 24 nt, Human
cccaggcucgggccaggagccagg

SEQ ID NO: 151447 - RNA, 21 nt, Human
ccccaggcucgggccaggagc

SEQ ID NO: 151448 - RNA, 23 nt, Human
ccccaggcucgggccaggagcca

SEQ ID NO: 151449 - RNA, 20 nt, Human
ccugcuuggcccggccaggg

SEQ ID NO: 151450 - RNA, 24 nt, Human
gaggauaagguggguggggcaggg

SEQ ID NO: 151451 - RNA, 18 nt, Human
gcgcugcucugcgucggg

SEQ ID NO: 151452 - RNA, 20 nt, Human
ggccacgacuccaggccccu

SEQ ID NO: 151453 - RNA, 25 nt, Human
ggccagcaccggugugcuguggugg

SEQ ID NO: 151454 - RNA, 24 nt, Human
gugguggagggaguggggugggag

SEQ ID NO: 151455 - RNA, 19 nt, Human
uaaggcaaccauugccagc

SEQ ID NO: 151456 - RNA, 19 nt, Human
ugccagcccuacccagaaa

SEQ ID NO: 151457 - RNA, 20 nt, Human
ugccagcccuacccagaaau

SEQ ID NO: 151458 - RNA, 18 nt, Human
ugcuguggugguggaggg

SEQ ID NO: 151459 - RNA, 20 nt, Human
ugcuguggugguggagggag

SEQ ID NO: 151460 - RNA, 20 nt, Human
ugggaggauaaggugggugg

SEQ ID NO: 151461 - RNA, 23 nt, Human
uggggcagggcccagggagcccc

SEQ ID NO: 151462 - RNA, 24 nt, Human
uggggugggaggauaaggugggug

SEQ ID NO: 151463 - RNA, 25 nt, Human
uggggugggaggauaaggugggugg

SEQ ID NO: 151464 - RNA, 21 nt, Human
uggguggggcagggcccaggg

SEQ ID NO: 151465 - RNA, 22 nt, Human
uggguggggcagggcccaggga

SEQ ID NO: 151466 - RNA, 20 nt, Human
ugguggagggaguggggugg

SEQ ID NO: 151467 - RNA, 18 nt, Human
ugguguggccagcaccgg

SEQ ID NO: 151468 - RNA, 18 nt, Human
uguggugguggagggagu

SEQ ID NO: 151469 - RNA, 21 nt, Human
uguggugguggagggaguggg

SEQ ID NO: 151470 - RNA, 19 nt, Human
cacagauacuguccgcgcc

SEQ ID NO: 151471 - RNA, 23 nt, Human
cagacaccgaggugaacguaaag

SEQ ID NO: 151472 - RNA, 21 nt, Human
cccacagauacuguccgcgcc

SEQ ID NO: 151473 - RNA, 21 nt, Human
ccgcccgcgccgacuuccugc

SEQ ID NO: 151474 - RNA, 22 nt, Human
ccggguacccacagauacuguc

SEQ ID NO: 151475 - RNA, 21 nt, Human
cgaagggcuugccugcccaca

SEQ ID NO: 151476 - RNA, 21 nt, Human
cugacacgaggggaggggucu

SEQ ID NO: 151477 - RNA, 20 nt, Human
gaagcggagggugcugcaga

SEQ ID NO: 151478 - RNA, 18 nt, Human
gagcugccugagcugaca

SEQ ID NO: 151479 - RNA, 24 nt, Human
uaaggaagcgguacgaacuccacg

SEQ ID NO: 151480 - RNA, 21 nt, Human
uacuguccgcgccgcccgcgc

SEQ ID NO: 151481 - RNA, 24 nt, Human
uagccuguggccaccccggagaug

SEQ ID NO: 151482 - RNA, 25 nt, Human
uagccuguggccaccccggagauga

SEQ ID NO: 151483 - RNA, 23 nt, Human
ucacaugacucuagacacuuggu

SEQ ID NO: 151484 - RNA, 18 nt, Human
ucgggggccucgagcucc

SEQ ID NO: 151485 - RNA, 18 nt, Human
ucuagacacuugguggaa

SEQ ID NO: 151486 - RNA, 24 nt, Human
ugacacgaggggaggggucugugu

SEQ ID NO: 151487 - RNA, 24 nt, Human
ugacuugggccaauuacacgacug

SEQ ID NO: 151488 - RNA, 19 nt, Human
ugagcugacacgaggggag

SEQ ID NO: 151489 - RNA, 24 nt, Human
ugaggcgagaaaaacaaugacuug

SEQ ID NO: 151490 - RNA, 20 nt, Human
uggccaccccggagaugacc

SEQ ID NO: 151491 - RNA, 31 nt, Human
aaaacucccccaggcacacagccuccgcucu

SEQ ID NO: 151492 - RNA, 21 nt, Human
aagagcaaagcacaagugaca

SEQ ID NO: 151493 - RNA, 19 nt, Human
aagcacaagugacacaugg

SEQ ID NO: 151494 - RNA, 19 nt, Human
aagccaaggagcagcggag

SEQ ID NO: 151495 - RNA, 23 nt, Human
aaggaagaaguggaaagugcgga

SEQ ID NO: 151496 - RNA, 20 nt, Human
aagugacacauggucccucu

SEQ ID NO: 151497 - RNA, 22 nt, Human
aaugaguagggcacagaaagga

SEQ ID NO: 151498 - RNA, 18 nt, Human
acagaaaggagggcgagc

SEQ ID NO: 151499 - RNA, 20 nt, Human
accaacccugacgcucccau

SEQ ID NO: 151500 - RNA, 23 nt, Human
accaacccugacgcucccaucac

SEQ ID NO: 151501 - RNA, 18 nt, Human
accucagcacaccaaccc

SEQ ID NO: 151502 - RNA, 19 nt, Human
agacagcaagaggucaggu

SEQ ID NO: 151503 - RNA, 20 nt, Human
agagagaaagagaaaggaag

SEQ ID NO: 151504 - RNA, 21 nt, Human
agccaggcgugaucacaugcc

SEQ ID NO: 151505 - RNA, 19 nt, Human
aguggcaguggcggcggcg

SEQ ID NO: 151506 - RNA, 20 nt, Human
aguggcaguggcggcggcgg

SEQ ID NO: 151507 - RNA, 22 nt, Human
aguggcaguggcggcggcggcu

SEQ ID NO: 151508 - RNA, 25 nt, Human
auagaggaaaacucccccaggcaca

SEQ ID NO: 151509 - RNA, 22 nt, Human
caccucagcacaccaacccuga

SEQ ID NO: 151510 - RNA, 20 nt, Human
cacuaaagccuuauuagcca

SEQ ID NO: 151511 - RNA, 20 nt, Human
cagcaagaggucagguaagc

SEQ ID NO: 151512 - RNA, 21 nt, Human
cagcacaccaacccugacgcu

SEQ ID NO: 151513 - RNA, 19 nt, Human
caggagcugccggcggagg

SEQ ID NO: 151514 - RNA, 19 nt, Human
caggcacacagccuccgcu

SEQ ID NO: 151515 - RNA, 25 nt, Human
cauucacauuucuaguuucugaggg

SEQ ID NO: 151516 - RNA, 23 nt, Human
ccccaaugaguagggcacagaaa

SEQ ID NO: 151517 - RNA, 18 nt, Human
ccgggcggcgggcggagg

SEQ ID NO: 151518 - RNA, 20 nt, Human
cucccccaggcacacagccu

SEQ ID NO: 151519 - RNA, 21 nt, Human
gacacaucguucccccaaguc

SEQ ID NO: 151520 - RNA, 18 nt, Human
gagucaggagcugccggc

SEQ ID NO: 151521 - RNA, 20 nt, Human
gcacagaaaggagggcgagc

SEQ ID NO: 151522 - RNA, 21 nt, Human
gcccaacacuccccuccaucc

SEQ ID NO: 151523 - RNA, 22 nt, Human
gcggcggcugcggcucccgggc

SEQ ID NO: 151524 - RNA, 20 nt, Human
gcgguggcgguggcgguggc

SEQ ID NO: 151525 - RNA, 21 nt, Human
ggcgacggcggcgcugagaga

SEQ ID NO: 151526 - RNA, 19 nt, Human
gggaaccuaggguugggga

SEQ ID NO: 151527 - RNA, 23 nt, Human
ggucagguaagccaaggagcagc

SEQ ID NO: 151528 - RNA, 24 nt, Human
guggcaguggcggcggcggcugcg

SEQ ID NO: 151529 - RNA, 20 nt, Human
guggcgguggcgacggcggc

SEQ ID NO: 151530 - RNA, 20 nt, Human
guggcgguggcgguggcgac

SEQ ID NO: 151531 - RNA, 20 nt, Human
guggcgguggcgguggcggu

SEQ ID NO: 151532 - RNA, 20 nt, Human
gugggacaagagcaaagcac

SEQ ID NO: 151533 - RNA, 19 nt, Human
gugguaguggcgguggcgg

SEQ ID NO: 151534 - RNA, 20 nt, Human
gugguaguggcgguggcggu

SEQ ID NO: 151535 - RNA, 26 nt, Human
uaaauacacuaaagccuuauuagcca

SEQ ID NO: 151536 - RNA, 23 nt, Human
uaaugggaugaaugaaaaacaaa

SEQ ID NO: 151537 - RNA, 22 nt, Human
uagcaagaccucccaccccagu

SEQ ID NO: 151538 - RNA, 23 nt, Human
uagggccgcgcgggcgcauguga

SEQ ID NO: 151539 - RNA, 21 nt, Human
uaguggcgguggcgguggcgg

SEQ ID NO: 151540 - RNA, 23 nt, Human
uaugacccuucccauucuagcaa

SEQ ID NO: 151541 - RNA, 24 nt, Human
uaugcacaguucacggcucauaug

SEQ ID NO: 151542 - RNA, 25 nt, Human
ucaaggcccuuucuaugacccuucc

SEQ ID NO: 151543 - RNA, 24 nt, Human
ucagacggugguaguggcgguuuu

SEQ ID NO: 151544 - RNA, 24 nt, Human
ucaggacagcaagguuccaggagg

SEQ ID NO: 151545 - RNA, 24 nt, Human
uccacggacccccuuuuauaauaa

SEQ ID NO: 151546 - RNA, 22 nt, Human
ucccccaggcacacagccuccg

SEQ ID NO: 151547 - RNA, 22 nt, Human
ucuagcaagaccucccacccca

SEQ ID NO: 151548 - RNA, 24 nt, Human
ucuugggaucuacagccacaugaa

SEQ ID NO: 151549 - RNA, 19 nt, Human
ugagagagcgggaguggca

SEQ ID NO: 151550 - RNA, 21 nt, Human
ugagggaagagagaaagagaa

SEQ ID NO: 151551 - RNA, 22 nt, Human
ugaguacacacaaaggaacuga

SEQ ID NO: 151552 - RNA, 20 nt, Human
ugauuaaugggaugaaugaa

SEQ ID NO: 151553 - RNA, 21 nt, Human
ugccacagaggugguggcaac

SEQ ID NO: 151554 - RNA, 18 nt, Human
ugcccaacacuccccucc

SEQ ID NO: 151555 - RNA, 23 nt, Human
ugcccaacacuccccuccauccc

SEQ ID NO: 151556 - RNA, 25 nt, Human
ugcggaaccccaaugaguagggcac

SEQ ID NO: 151557 - RNA, 21 nt, Human
uggcaacuguggaacguggca

SEQ ID NO: 151558 - RNA, 19 nt, Human
uggcaguggcggcggcggc

SEQ ID NO: 151559 - RNA, 21 nt, Human
uggcauggggagugagagguu

SEQ ID NO: 151560 - RNA, 18 nt, Human
uggcggcggcggcugcgg

SEQ ID NO: 151561 - RNA, 23 nt, Human
uggcgguggcgacggcggcgcug

SEQ ID NO: 151562 - RNA, 18 nt, Human
ugggaucuacagccacau

SEQ ID NO: 151563 - RNA, 20 nt, Human
ugggaugaaugaaaaacaaa

SEQ ID NO: 151564 - RNA, 21 nt, Human
ugggaugaaugaaaaacaaau

SEQ ID NO: 151565 - RNA, 23 nt, Human
agaccugggucuguccaguggag

SEQ ID NO: 151566 - RNA, 22 nt, Human
ccccagggcuggaagauucacc

SEQ ID NO: 151567 - RNA, 25 nt, Human
cuaccuccacccccagggcuggaag

SEQ ID NO: 151568 - RNA, 19 nt, Human
uguccaguggaguccugga

SEQ ID NO: 151569 - RNA, 20 nt, Human
aggcaguuuuaggugugguc

SEQ ID NO: 151570 - RNA, 18 nt, Human
aguauuuuggcuucuguu

SEQ ID NO: 151571 - RNA, 24 nt, Human
augggcuaccccaacccuacuaua

SEQ ID NO: 151572 - RNA, 18 nt, Human
caauaguaagaaagauuc

SEQ ID NO: 151573 - RNA, 20 nt, Human
cagcuacuucuccuuuaaga

SEQ ID NO: 151574 - RNA, 22 nt, Human
ccaaucaaaaaauuaaaaagaa

SEQ ID NO: 151575 - RNA, 20 nt, Human
cccgccgggcccucccgggg

SEQ ID NO: 151576 - RNA, 19 nt, Human
cccggggagcgcgcccgcc

SEQ ID NO: 151577 - RNA, 24 nt, Human
ccgaacuugaucaauguauacaau

SEQ ID NO: 151578 - RNA, 26 nt, Human
ccgccccccgcgcagccgucgcgcuc

SEQ ID NO: 151579 - RNA, 19 nt, Human
ccgccgcggcucccgcccc

SEQ ID NO: 151580 - RNA, 21 nt, Human
ccgccgcggcucccgcccccc

SEQ ID NO: 151581 - RNA, 24 nt, Human
cguuccccgccgggcccucccggg

SEQ ID NO: 151582 - RNA, 20 nt, Human
cuaaagaaauccaaucaaaa

SEQ ID NO: 151583 - RNA, 22 nt, Human
cucuccacugcugugcugagua

SEQ ID NO: 151584 - RNA, 20 nt, Human
cuuuaagagaagcagaaagg

SEQ ID NO: 151585 - RNA, 24 nt, Human
gaagcagaaaggcaguuuuaggug

SEQ ID NO: 151586 - RNA, 18 nt, Human
ggccagcaaggacgcggc

SEQ ID NO: 151587 - RNA, 26 nt, Human
ggggccagcaaggacgcggccgccug

SEQ ID NO: 151588 - RNA, 23 nt, Human
uaaaaagaaaacacauaagauua

SEQ ID NO: 151589 - RNA, 20 nt, Human
uaaaagauauccagaaccac

SEQ ID NO: 151590 - RNA, 22 nt, Human
uaacaugggcuaccccaacccu

SEQ ID NO: 151591 - RNA, 19 nt, Human
uaagagaagcagaaaggca

SEQ ID NO: 151592 - RNA, 25 nt, Human
uacaaugaaaagaaaugaaacucca

SEQ ID NO: 151593 - RNA, 23 nt, Human
uaccccaacccuacuauaagucu

SEQ ID NO: 151594 - RNA, 21 nt, Human
ucaaauaucugguauccagac

SEQ ID NO: 151595 - RNA, 21 nt, Human
uccaucguggccccggccgcu

SEQ ID NO: 151596 - RNA, 23 nt, Human
ucgccgccgcggcucccgccccc

SEQ ID NO: 151597 - RNA, 26 nt, Human
ucgcggccguuccccgccgggccccg

SEQ ID NO: 151598 - RNA, 19 nt, Human
ucggcagcguggcugcggc

SEQ ID NO: 151599 - RNA, 24 nt, Human
ugcuuacacauucaaauaugugca

SEQ ID NO: 151600 - RNA, 24 nt, Human
uggucgacaguuucugaacaaugc

SEQ ID NO: 151601 - RNA, 21 nt, Human
acaagcucuacucagaacaca

SEQ ID NO: 151602 - RNA, 21 nt, Human
aguacaggacuaaauguggca

SEQ ID NO: 151603 - RNA, 22 nt, Human
cacaaggcuaccuaaaucaagc

SEQ ID NO: 151604 - RNA, 22 nt, Human
cagaacacaaggcuaccuaaau

SEQ ID NO: 151605 - RNA, 18 nt, Human
caguggagucauucaggc

SEQ ID NO: 151606 - RNA, 23 nt, Human
cuaaaucaagcauuagagaaaaa

SEQ ID NO: 151607 - RNA, 22 nt, Human
cuguacugcagaugcucagaaa

SEQ ID NO: 151608 - RNA, 19 nt, Human
gaagccuuuugcagcgugu

SEQ ID NO: 151609 - RNA, 18 nt, Human
uacugcagaugcucagaa

SEQ ID NO: 151610 - RNA, 24 nt, Human
uagaagcuuccacuuuuucucaag

SEQ ID NO: 151611 - RNA, 28 nt, Human
uauuacaagcucuacucagaacacaagg

SEQ ID NO: 151612 - RNA, 19 nt, Human
aacccuucuccuugcgaag

SEQ ID NO: 151613 - RNA, 22 nt, Human
aacucccaccaccugccuuccc

SEQ ID NO: 151614 - RNA, 18 nt, Human
agcugucggggacuggca

SEQ ID NO: 151615 - RNA, 27 nt, Human
aggggucugguggcccagcaucuccag

SEQ ID NO: 151616 - RNA, 24 nt, Human
aguaucuucuuggagagccaaccc

SEQ ID NO: 151617 - RNA, 23 nt, Human
agugcaauggcgcaaucuuggcu

SEQ ID NO: 151618 - RNA, 24 nt, Human
agugcaauggcgcaaucuuggcuc

SEQ ID NO: 151619 - RNA, 22 nt, Human
caagcgagucuccugccucagc

SEQ ID NO: 151620 - RNA, 20 nt, Human
cacugagccacauggugccc

SEQ ID NO: 151621 - RNA, 21 nt, Human
cacugcaaccucugccucccg

SEQ ID NO: 151622 - RNA, 23 nt, Human
cacugcaaccucugccucccggg

SEQ ID NO: 151623 - RNA, 26 nt, Human
cagccucccaagcccggaauuccuuu

SEQ ID NO: 151624 - RNA, 26 nt, Human
caguggaugugcugguucuaaaacuc

SEQ ID NO: 151625 - RNA, 19 nt, Human
ccacucggggggucagguu

SEQ ID NO: 151626 - RNA, 19 nt, Human
cccaccaccugccuucccu

SEQ ID NO: 151627 - RNA, 21 nt, Human
cccggguucaagcgagucucc

SEQ ID NO: 151628 - RNA, 23 nt, Human
cccggguucaagcgagucuccug

SEQ ID NO: 151629 - RNA, 18 nt, Human
ccgguuuuuuuuuuaagg

SEQ ID NO: 151630 - RNA, 21 nt, Human
ccucccaagcccggaauuccg

SEQ ID NO: 151631 - RNA, 22 nt, Human
ccucccaagcccggaauuccgg

SEQ ID NO: 151632 - RNA, 24 nt, Human
cucacugcaaccucugccucccgg

SEQ ID NO: 151633 - RNA, 18 nt, Human
cucccagggcuguucagc

SEQ ID NO: 151634 - RNA, 23 nt, Human
cuccugccucagccucccaagcc

SEQ ID NO: 151635 - RNA, 19 nt, Human
cugcaaccucugccucccg

SEQ ID NO: 151636 - RNA, 23 nt, Human
cugcaaccucugccucccggguu

SEQ ID NO: 151637 - RNA, 24 nt, Human
cugcaaccucugccucccggguuc

SEQ ID NO: 151638 - RNA, 24 nt, Human
cuguagcucacgccaacuuuaugc

SEQ ID NO: 151639 - RNA, 21 nt, Human
gaacuuugaaucuugaagggu

SEQ ID NO: 151640 - RNA, 22 nt, Human
gcaaccucugccucccggguuc

SEQ ID NO: 151641 - RNA, 24 nt, Human
gcgagucuccugccucagccuccc

SEQ ID NO: 151642 - RNA, 21 nt, Human
gcucacugcaaccucugccuc

SEQ ID NO: 151643 - RNA, 19 nt, Human
ggcagggagccuggagaac

SEQ ID NO: 151644 - RNA, 21 nt, Human
gggucaugaugaggcugagau

SEQ ID NO: 151645 - RNA, 22 nt, Human
guaucagggucucuccaggguc

SEQ ID NO: 151646 - RNA, 26 nt, Human
gugacauuucuccuugcucauucucu

SEQ ID NO: 151647 - RNA, 20 nt, Human
uaaaacucuccuuucucucc

SEQ ID NO: 151648 - RNA, 20 nt, Human
uaacaguauuuugcaauagu

SEQ ID NO: 151649 - RNA, 20 nt, Human
uaauguuuucuauacuguuu

SEQ ID NO: 151650 - RNA, 20 nt, Human
uauuuuauuuauuuauuuuu

SEQ ID NO: 151651 - RNA, 25 nt, Human
uauuuugcccacucagcccugucua

SEQ ID NO: 151652 - RNA, 24 nt, Human
ucaacuuuuauucuuuccuucccc

SEQ ID NO: 151653 - RNA, 24 nt, Human
ucacugcaaccucugccucccggg

SEQ ID NO: 151654 - RNA, 25 nt, Human
ucacugcaaccucugccucccgggu

SEQ ID NO: 151655 - RNA, 22 nt, Human
ucagccuguuucuggcaguggc

SEQ ID NO: 151656 - RNA, 21 nt, Human
ucccagggcuguucagccugu

SEQ ID NO: 151657 - RNA, 21 nt, Human
ucccggguucaagcgagucuc

SEQ ID NO: 151658 - RNA, 24 nt, Human
ucccggguucaagcgagucuccug

SEQ ID NO: 151659 - RNA, 22 nt, Human
uccgcuuagaggugguuugcug

SEQ ID NO: 151660 - RNA, 18 nt, Human
uccggccugaaugggugg

SEQ ID NO: 151661 - RNA, 19 nt, Human
uccggccugaauggguggg

SEQ ID NO: 151662 - RNA, 22 nt, Human
ucuaaaacucuccuuucucucc

SEQ ID NO: 151663 - RNA, 25 nt, Human
ucuccaugaacaacucccaccaccu

SEQ ID NO: 151664 - RNA, 23 nt, Human
ucuccugccucagccucccaagc

SEQ ID NO: 151665 - RNA, 26 nt, Human
ucugucacccaggcucuggagugcaa

SEQ ID NO: 151666 - RNA, 19 nt, Human
ucuugcucugucacccagg

SEQ ID NO: 151667 - RNA, 25 nt, Human
ucuugcucugucacccaggcucugg

SEQ ID NO: 151668 - RNA, 26 nt, Human
ucuugcucugucacccaggcucugga

SEQ ID NO: 151669 - RNA, 20 nt, Human
ugagaucaaaugaggcacca

SEQ ID NO: 151670 - RNA, 22 nt, Human
ugagccacauggugcccucugu

SEQ ID NO: 151671 - RNA, 22 nt, Human
ugaugaggcugagaucaaauga

SEQ ID NO: 151672 - RNA, 23 nt, Human
ugcaauggcgcaaucuuggcuca

SEQ ID NO: 151673 - RNA, 26 nt, Human
ugccuaagcugucggggacuggggcc

SEQ ID NO: 151674 - RNA, 22 nt, Human
ugccucagccucccaagcccgg

SEQ ID NO: 151675 - RNA, 20 nt, Human
ugccuggaaaucccguucuu

SEQ ID NO: 151676 - RNA, 25 nt, Human
ugcgaagugccuuugcuccggggcg

SEQ ID NO: 151677 - RNA, 26 nt, Human
ugcucugucacccaggcucuggagug

SEQ ID NO: 151678 - RNA, 23 nt, Human
uggagugcaauggcgcaaucuug

SEQ ID NO: 151679 - RNA, 24 nt, Human
uggagugcaauggcgcaaucuugg

SEQ ID NO: 151680 - RNA, 18 nt, Human
uggcagaugguaucaggg

SEQ ID NO: 151681 - RNA, 21 nt, Human
ugggaggggucugguggccca

SEQ ID NO: 151682 - RNA, 25 nt, Human
ugucaaauggaacuuugaaucuuga

SEQ ID NO: 151683 - RNA, 23 nt, Human
uucuaaaacucuccuuucucucc

SEQ ID NO: 151684 - RNA, 21 nt, Human
uugagauguagucuugcucug

SEQ ID NO: 151685 - RNA, 19 nt, Human
uugcucauucucucugcug

SEQ ID NO: 151686 - RNA, 18 nt, Human
uuugugacauuucuccuu

SEQ ID NO: 151687 - RNA, 23 nt, Human
aagcaggaaggggcaggagccag

SEQ ID NO: 151688 - RNA, 22 nt, Human
acccgagccaccuccugacccc

SEQ ID NO: 151689 - RNA, 18 nt, Human
agaagggaagggggaggg

SEQ ID NO: 151690 - RNA, 21 nt, Human
agggaggggaagcgucucagg

SEQ ID NO: 151691 - RNA, 25 nt, Human
aggggcaggagccagcacaggaccc

SEQ ID NO: 151692 - RNA, 23 nt, Human
agguaaaacaaaaaagguucaag

SEQ ID NO: 151693 - RNA, 18 nt, Human
auuucucccaacuguuau

SEQ ID NO: 151694 - RNA, 23 nt, Human
caacaggaaagggcuucugccuc

SEQ ID NO: 151695 - RNA, 19 nt, Human
cagcacaggacccgggugg

SEQ ID NO: 151696 - RNA, 19 nt, Human
cagcccaagggguccaugu

SEQ ID NO: 151697 - RNA, 19 nt, Human
caggacccggguggggcag

SEQ ID NO: 151698 - RNA, 23 nt, Human
caggacccggguggggcagggag

SEQ ID NO: 151699 - RNA, 19 nt, Human
caggagccagcacaggacc

SEQ ID NO: 151700 - RNA, 18 nt, Human
caggaucuggcagagccc

SEQ ID NO: 151701 - RNA, 22 nt, Human
ccacacccgagccaccuccuga

SEQ ID NO: 151702 - RNA, 23 nt, Human
ccacacccgagccaccuccugac

SEQ ID NO: 151703 - RNA, 19 nt, Human
ccagcccacacccgagcca

SEQ ID NO: 151704 - RNA, 22 nt, Human
ccagcccacacccgagccaccu

SEQ ID NO: 151705 - RNA, 25 nt, Human
cccacacccgagccaccuccugacc

SEQ ID NO: 151706 - RNA, 20 nt, Human
ccccuggcugcaaaagcagg

SEQ ID NO: 151707 - RNA, 24 nt, Human
cgggaaggcaaccggagaagggaa

SEQ ID NO: 151708 - RNA, 19 nt, Human
cuccagcccacacccgagc

SEQ ID NO: 151709 - RNA, 27 nt, Human
cuccugaccccuggcugcaaaagcagg

SEQ ID NO: 151710 - RNA, 20 nt, Human
gaagggaagggggaggggaa

SEQ ID NO: 151711 - RNA, 18 nt, Human
gagaagggaagggggagg

SEQ ID NO: 151712 - RNA, 22 nt, Human
gaucuggcagagccccgggcag

SEQ ID NO: 151713 - RNA, 20 nt, Human
ggagaagggaagggggaggg

SEQ ID NO: 151714 - RNA, 26 nt, Human
gguaaaacaaaaaagguucaaggucu

SEQ ID NO: 151715 - RNA, 24 nt, Human
gugcucagcccaagggguccaugu

SEQ ID NO: 151716 - RNA, 20 nt, Human
guggaguguaaggggcccgg

SEQ ID NO: 151717 - RNA, 20 nt, Human
uccaugugcugggacaccaa

SEQ ID NO: 151718 - RNA, 20 nt, Human
ucuccagcccacacccgagc

SEQ ID NO: 151719 - RNA, 26 nt, Human
ucuccagcccacacccgagccaccuc

SEQ ID NO: 151720 - RNA, 19 nt, Human
uggaguguaaggggcccgg

SEQ ID NO: 151721 - RNA, 20 nt, Human
uggggcagggaggggaagcg

SEQ ID NO: 151722 - RNA, 22 nt, Human
uggggcagggaggggaagcguc

SEQ ID NO: 151723 - RNA, 18 nt, Human
uggugcucagcccaaggg

SEQ ID NO: 151724 - RNA, 20 nt, Human
ugugcugggacaccaacagg

SEQ ID NO: 151725 - RNA, 25 nt, Human
aaagaaaggcuucaguaaaagccaa

SEQ ID NO: 151726 - RNA, 20 nt, Human
aaagagacaguaucugccga

SEQ ID NO: 151727 - RNA, 19 nt, Human
aacuuccccuuugcccucu

SEQ ID NO: 151728 - RNA, 19 nt, Human
acagggaaggauggccuug

SEQ ID NO: 151729 - RNA, 22 nt, Human
agcacaaaguacaaaggagaaa

SEQ ID NO: 151730 - RNA, 20 nt, Human
caagcacaaaguacaaagga

SEQ ID NO: 151731 - RNA, 19 nt, Human
cacagcaccaaaacuggag

SEQ ID NO: 151732 - RNA, 25 nt, Human
ccagccagcauauuucagcugcuuu

SEQ ID NO: 151733 - RNA, 22 nt, Human
ccuauacaagcacaaaguacaa

SEQ ID NO: 151734 - RNA, 27 nt, Human
ccuggacgauuuuuuccucacuccagc

SEQ ID NO: 151735 - RNA, 27 nt, Human
cugaaguuucacugacaaucgcugacc

SEQ ID NO: 151736 - RNA, 23 nt, Human
cugacaaucgcugacaaaaaagg

SEQ ID NO: 151737 - RNA, 18 nt, Human
gaacacugcgauggagga

SEQ ID NO: 151738 - RNA, 28 nt, Human
gacaaaaaaggcagguuaauaggagaaa

SEQ ID NO: 151739 - RNA, 24 nt, Human
gauauugaauaccuccaaaagaaa

SEQ ID NO: 151740 - RNA, 19 nt, Human
gcacaaaguacaaaggaga

SEQ ID NO: 151741 - RNA, 19 nt, Human
ucaguaaaagccaaggaag

SEQ ID NO: 151742 - RNA, 24 nt, Human
uccucacuccagccagcauauuuc

SEQ ID NO: 151743 - RNA, 20 nt, Human
uccuugaggcaaaggauauu

SEQ ID NO: 151744 - RNA, 20 nt, Human
ucuuuuauaaagcaaagauu

SEQ ID NO: 151745 - RNA, 27 nt, Human
ugaaagagacaguaucugccgaagucc

SEQ ID NO: 151746 - RNA, 20 nt, Human
ugacaaaaaaggcagguuaa

SEQ ID NO: 151747 - RNA, 21 nt, Human
ugacaaucgcugacaaaaaag

SEQ ID NO: 151748 - RNA, 20 nt, Human
uucacugacaaucgcugaca

SEQ ID NO: 151749 - RNA, 21 nt, Human
uucacugacaaucgcugacaa

SEQ ID NO: 151750 - RNA, 22 nt, Human
uuuuuuuuuucuagacaaaguc

SEQ ID NO: 151751 - RNA, 19 nt, Human
acagggguugggggaggga

SEQ ID NO: 151752 - RNA, 21 nt, Human
gaguacgggguggggauacag

SEQ ID NO: 151753 - RNA, 22 nt, Human
gggguugggggagggauggggc

SEQ ID NO: 151754 - RNA, 22 nt, Human
uggggcagcugcccccgucggc

SEQ ID NO: 151755 - RNA, 22 nt, Human
aaaaacuauaaaaugagauucu

SEQ ID NO: 151756 - RNA, 18 nt, Human
aaaagccuagcaaaggca

SEQ ID NO: 151757 - RNA, 25 nt, Human
aagaccaaugggaaaaaccgguacc

SEQ ID NO: 151758 - RNA, 21 nt, Human
aagcaaaagccuagcaaaggc

SEQ ID NO: 151759 - RNA, 22 nt, Human
aagcaaaagccuagcaaaggca

SEQ ID NO: 151760 - RNA, 23 nt, Human
aaggcgacuagcgcugccgcaga

SEQ ID NO: 151761 - RNA, 21 nt, Human
aauauaaagagccugaccuua

SEQ ID NO: 151762 - RNA, 21 nt, Human
aauggugacaaaaauauauac

SEQ ID NO: 151763 - RNA, 19 nt, Human
accuguaugacagaagccu

SEQ ID NO: 151764 - RNA, 23 nt, Human
agaagccuggcuguggcugcugc

SEQ ID NO: 151765 - RNA, 24 nt, Human
augacaaacacacagguugcaauc

SEQ ID NO: 151766 - RNA, 18 nt, Human
augauaacaauggaaagu

SEQ ID NO: 151767 - RNA, 22 nt, Human
auggaaagucagcccuuugcua

SEQ ID NO: 151768 - RNA, 20 nt, Human
augggaaaaacuauaaaaug

SEQ ID NO: 151769 - RNA, 20 nt, Human
auggugagaugaggaugaug

SEQ ID NO: 151770 - RNA, 18 nt, Human
cacagaauagccaaggga

SEQ ID NO: 151771 - RNA, 21 nt, Human
cagagaggucuaugaucuggg

SEQ ID NO: 151772 - RNA, 20 nt, Human
cagcuaagaaacagcaauau

SEQ ID NO: 151773 - RNA, 19 nt, Human
cauugccuggugccaccca

SEQ ID NO: 151774 - RNA, 19 nt, Human
cccuuugcuaagcaaaagc

SEQ ID NO: 151775 - RNA, 20 nt, Human
cccuuugcuaagcaaaagcu

SEQ ID NO: 151776 - RNA, 21 nt, Human
ccugucucuucucuguucccc

SEQ ID NO: 151777 - RNA, 24 nt, Human
cuaagaaacagcaauaugaaauaa

SEQ ID NO: 151778 - RNA, 27 nt, Human
cuaagcagccauuggacuccaggagcc

SEQ ID NO: 151779 - RNA, 21 nt, Human
cucuaagcagccauuggacuc

SEQ ID NO: 151780 - RNA, 25 nt, Human
gaaaaacuauaaaaugagauucuga

SEQ ID NO: 151781 - RNA, 20 nt, Human
gacagaagccuggcuguggc

SEQ ID NO: 151782 - RNA, 28 nt, Human
gauaacaauggaaagucagccgguaccc

SEQ ID NO: 151783 - RNA, 18 nt, Human
gcccugaggucaauucuu

SEQ ID NO: 151784 - RNA, 21 nt, Human
gcuggaguucuuucucauucg

SEQ ID NO: 151785 - RNA, 24 nt, Human
ggagauaaauauuccugcagcuuc

SEQ ID NO: 151786 - RNA, 18 nt, Human
ggagggaaauggaaacug

SEQ ID NO: 151787 - RNA, 21 nt, Human
ggaguucuuucucauucgacu

SEQ ID NO: 151788 - RNA, 23 nt, Human
guagugaggucucugaagaacaa

SEQ ID NO: 151789 - RNA, 24 nt, Human
uagcaaaggcaguaaaaucuggaa

SEQ ID NO: 151790 - RNA, 22 nt, Human
uauuccugcagcuuccuuuucu

SEQ ID NO: 151791 - RNA, 19 nt, Human
uccccaaagucaagaccua

SEQ ID NO: 151792 - RNA, 21 nt, Human
ucuaccuguaugacagaagcu

SEQ ID NO: 151793 - RNA, 20 nt, Human
ugaaauaaugcugauuuuua

SEQ ID NO: 151794 - RNA, 24 nt, Human
ugacaaaaauauauacaccaugau

SEQ ID NO: 151795 - RNA, 23 nt, Human
ugacaaacacacagguugcaauc

SEQ ID NO: 151796 - RNA, 27 nt, Human
ugacagaagccuggcuggucaagcgug

SEQ ID NO: 151797 - RNA, 19 nt, Human
ugaccagagcccuaagugg

SEQ ID NO: 151798 - RNA, 25 nt, Human
ugagggagggaaauggaaacugagc

SEQ ID NO: 151799 - RNA, 18 nt, Human
ugcagcuuccuuuucuuu

SEQ ID NO: 151800 - RNA, 19 nt, Human
ugccaggaagaauacugag

SEQ ID NO: 151801 - RNA, 21 nt, Human
ugccucaagaggugcuguggc

SEQ ID NO: 151802 - RNA, 25 nt, Human
uggagauaaauauuccugcagcuuc

SEQ ID NO: 151803 - RNA, 23 nt, Human
ugggaaaaacuauaaaaugagau

SEQ ID NO: 151804 - RNA, 19 nt, Human
ugggaaaguaauugguuag

SEQ ID NO: 151805 - RNA, 23 nt, Human
ugggagggcauagcaauacaaug

SEQ ID NO: 151806 - RNA, 23 nt, Human
uggugagaugaggaugaugacaa

SEQ ID NO: 151807 - RNA, 28 nt, Human
uuaguggccugucucuucucuguucccc

SEQ ID NO: 151808 - RNA, 21 nt, Human
uuaguuaguuguauuuccuga

SEQ ID NO: 151809 - RNA, 18 nt, Human
acaaggaaaacgcgcgcg

SEQ ID NO: 151810 - RNA, 20 nt, Human
agggaggaaaaaaauacuga

SEQ ID NO: 151811 - RNA, 19 nt, Human
aguggaaugaggcacucaa

SEQ ID NO: 151812 - RNA, 23 nt, Human
auuucuuuguugaccaggaacaa

SEQ ID NO: 151813 - RNA, 20 nt, Human
ccagggaccugucccugggc

SEQ ID NO: 151814 - RNA, 23 nt, Human
cucgcacaccugcagaggcaauu

SEQ ID NO: 151815 - RNA, 18 nt, Human
gcagcaguucacauuaga

SEQ ID NO: 151816 - RNA, 22 nt, Human
guguacucuugagugguuaggc

SEQ ID NO: 151817 - RNA, 22 nt, Human
uaaaucucuaggcucaagucca

SEQ ID NO: 151818 - RNA, 23 nt, Human
uauagggaggaaaaaaauacuga

SEQ ID NO: 151819 - RNA, 19 nt, Human
ucaaaggguugaaaugcga

SEQ ID NO: 151820 - RNA, 19 nt, Human
uccacauuucuuuguugac

SEQ ID NO: 151821 - RNA, 23 nt, Human
ucucucuuuuucaggggaggugg

SEQ ID NO: 151822 - RNA, 19 nt, Human
ugaucuugucuguaugagg

SEQ ID NO: 151823 - RNA, 18 nt, Human
ugcucuggugccagcugu

SEQ ID NO: 151824 - RNA, 24 nt, Human
uggcucacagggcucucugugaug

SEQ ID NO: 151825 - RNA, 23 nt, Human
uggguggaggcuuuuguugcaga

SEQ ID NO: 151826 - RNA, 22 nt, Human
ugucccagacuaguucagaaac

SEQ ID NO: 151827 - RNA, 21 nt, Human
uucagaaacuaagugcucucu

SEQ ID NO: 151828 - RNA, 19 nt, Human
uuuuucuuugguuuccagg

SEQ ID NO: 151829 - RNA, 21 nt, Human
uuuuuuuuuuuuuuuucucuc

SEQ ID NO: 151830 - RNA, 27 nt, Human
uuuuuuuuuuuuuuuuucucucuuuuu

SEQ ID NO: 151831 - RNA, 18 nt, Human
aagaggugucucccucca

SEQ ID NO: 151832 - RNA, 19 nt, Human
aagcagcacagccacaaau

SEQ ID NO: 151833 - RNA, 24 nt, Human
acagguggcauugagcagggccca

SEQ ID NO: 151834 - RNA, 24 nt, Human
agcugacccguggcacagcugcac

SEQ ID NO: 151835 - RNA, 26 nt, Human
aggaagagcaaacacacucaagucca

SEQ ID NO: 151836 - RNA, 23 nt, Human
aggaaggggagcucugcccuggg

SEQ ID NO: 151837 - RNA, 21 nt, Human
aggcugaugccagggcagcac

SEQ ID NO: 151838 - RNA, 23 nt, Human
agggacaugcacagcagcagcca

SEQ ID NO: 151839 - RNA, 23 nt, Human
aggugggcggaugguggcccgag

SEQ ID NO: 151840 - RNA, 23 nt, Human
agguggggucagcccgagguggg

SEQ ID NO: 151841 - RNA, 18 nt, Human
caagcacuuggcacccac

SEQ ID NO: 151842 - RNA, 22 nt, Human
cacacucaaguccagaguuccc

SEQ ID NO: 151843 - RNA, 21 nt, Human
caccaggccuucugcaagucc

SEQ ID NO: 151844 - RNA, 21 nt, Human
caccgccucccagacucuugc

SEQ ID NO: 151845 - RNA, 21 nt, Human
cagacacugcugacggggaca

SEQ ID NO: 151846 - RNA, 25 nt, Human
cagccaggacagccugcaccgccuc

SEQ ID NO: 151847 - RNA, 27 nt, Human
cagccaggacagccugcaccgccuccc

SEQ ID NO: 151848 - RNA, 21 nt, Human
caggcggcagccggucuuuug

SEQ ID NO: 151849 - RNA, 22 nt, Human
cagugugugccugugguucugu

SEQ ID NO: 151850 - RNA, 19 nt, Human
caugagguucagcucgugc

SEQ ID NO: 151851 - RNA, 20 nt, Human
caugcacagcagcagccaca

SEQ ID NO: 151852 - RNA, 27 nt, Human
ccacacugcccccucagugugugccug

SEQ ID NO: 151853 - RNA, 19 nt, Human
cccaaggaagagcaaacac

SEQ ID NO: 151854 - RNA, 23 nt, Human
cccaaggaagagcaaacacacuc

SEQ ID NO: 151855 - RNA, 23 nt, Human
cccacacgacagagacgucacuc

SEQ ID NO: 151856 - RNA, 27 nt, Human
ccccgccccggccggcgccaccccggc

SEQ ID NO: 151857 - RNA, 27 nt, Human
cccgcggacggggcauggggaugggac

SEQ ID NO: 151858 - RNA, 19 nt, Human
cccggcauccgcccaugcu

SEQ ID NO: 151859 - RNA, 25 nt, Human
cccguggcacagcugcaccuaagac

SEQ ID NO: 151860 - RNA, 19 nt, Human
ccuucugcaagucccagag

SEQ ID NO: 151861 - RNA, 20 nt, Human
cgacacugacgccacacuga

SEQ ID NO: 151862 - RNA, 21 nt, Human
cgagagcuugguucugggacu

SEQ ID NO: 151863 - RNA, 24 nt, Human
cguggcacagcugcaccuaagaca

SEQ ID NO: 151864 - RNA, 18 nt, Human
cucagccccgacacugac

SEQ ID NO: 151865 - RNA, 20 nt, Human
cucagccccgacacugacgc

SEQ ID NO: 151866 - RNA, 21 nt, Human
cucccuccaucauuaacccca

SEQ ID NO: 151867 - RNA, 18 nt, Human
cugaagcagcucaagggg

SEQ ID NO: 151868 - RNA, 20 nt, Human
cugcccccucagugugugcc

SEQ ID NO: 151869 - RNA, 20 nt, Human
gacagagacgucacucaagc

SEQ ID NO: 151870 - RNA, 20 nt, Human
gagagcuugguucugggacu

SEQ ID NO: 151871 - RNA, 21 nt, Human
gaggaaacugacaggcuggga

SEQ ID NO: 151872 - RNA, 18 nt, Human
gaguggaacacaugaggu

SEQ ID NO: 151873 - RNA, 22 nt, Human
gcacagcagcagccacagcccc

SEQ ID NO: 151874 - RNA, 21 nt, Human
gcagccaggacagccugcacc

SEQ ID NO: 151875 - RNA, 23 nt, Human
gcagggagccacacugcccccuc

SEQ ID NO: 151876 - RNA, 21 nt, Human
gcauggggaugggacaggcag

SEQ ID NO: 151877 - RNA, 24 nt, Human
gcccaugcugggagacucccugaa

SEQ ID NO: 151878 - RNA, 20 nt, Human
gcccggggcucacacugucc

SEQ ID NO: 151879 - RNA, 19 nt, Human
gccugugcuguggcuccuc

SEQ ID NO: 151880 - RNA, 20 nt, Human
ggagacaagacucccaucgc

SEQ ID NO: 151881 - RNA, 23 nt, Human
ggagcaggcggcagccggucuuu

SEQ ID NO: 151882 - RNA, 19 nt, Human
gucacguccaggacaggag

SEQ ID NO: 151883 - RNA, 21 nt, Human
gucucccuccaucauuaaccc

SEQ ID NO: 151884 - RNA, 22 nt, Human
uacacaagcacuuggcacccac

SEQ ID NO: 151885 - RNA, 20 nt, Human
uacagcagcucaugcccggc

SEQ ID NO: 151886 - RNA, 22 nt, Human
uacccaaggaagagcaaacaca

SEQ ID NO: 151887 - RNA, 21 nt, Human
ucacacauucauacccaagga

SEQ ID NO: 151888 - RNA, 18 nt, Human
ucacucaagcagcacagc

SEQ ID NO: 151889 - RNA, 20 nt, Human
ucacugaagcagcucaaggg

SEQ ID NO: 151890 - RNA, 19 nt, Human
uccaucauuaaccccaaac

SEQ ID NO: 151891 - RNA, 24 nt, Human
uccccagagcagccaggacagccu

SEQ ID NO: 151892 - RNA, 21 nt, Human
ucccuccaucauuaaccccaa

SEQ ID NO: 151893 - RNA, 22 nt, Human
ucuaugaagaggugucucccuc

SEQ ID NO: 151894 - RNA, 18 nt, Human
ucuguccugguccugccc

SEQ ID NO: 151895 - RNA, 21 nt, Human
ugacggggacagggauggcuc

SEQ ID NO: 151896 - RNA, 21 nt, Human
ugagguucagcucgugccggg

SEQ ID NO: 151897 - RNA, 18 nt, Human
ugccagcacggccugugc

SEQ ID NO: 151898 - RNA, 24 nt, Human
ugccagggcagcaccaggccuucu

SEQ ID NO: 151899 - RNA, 22 nt, Human
ugggacaggcagggagccacac

SEQ ID NO: 151900 - RNA, 21 nt, Human
uggggaggaaacugacaggcu

SEQ ID NO: 151901 - RNA, 22 nt, Human
uguacauucacugaagcagcuc

SEQ ID NO: 151902 - RNA, 23 nt, Human
ugugacuggaagaggcugaugcc

SEQ ID NO: 151903 - RNA, 19 nt, Human
ugugugaggagagcaggcc

SEQ ID NO: 151904 - RNA, 23 nt, Human
uuccaugcaccgcgcgcuccgcc

SEQ ID NO: 151905 - RNA, 24 nt, Human
uuuuuuuuuuuugaaggagaagcc

SEQ ID NO: 151906 - RNA, 21 nt, Human
uuuuuuuuuuuuuuuugaagg

SEQ ID NO: 151907 - RNA, 18 nt, Human
uuuuuuuuuuuuuuuuug

SEQ ID NO: 151908 - RNA, 21 nt, Human
aaaaccuauuggaggugcaag

SEQ ID NO: 151909 - RNA, 19 nt, Human
aaaccacaaacggcuacug

SEQ ID NO: 151910 - RNA, 18 nt, Human
aaaccagaauccucagga

SEQ ID NO: 151911 - RNA, 22 nt, Human
accagaauccucaggaaaucuc

SEQ ID NO: 151912 - RNA, 24 nt, Human
accuccucccggugcccccucccg

SEQ ID NO: 151913 - RNA, 24 nt, Human
acucaccuccucccggugcccccu

SEQ ID NO: 151914 - RNA, 19 nt, Human
agaacucgcccgagccgag

SEQ ID NO: 151915 - RNA, 18 nt, Human
agagaaaaaaaacuggua

SEQ ID NO: 151916 - RNA, 20 nt, Human
agaggcgcaguccccggccc

SEQ ID NO: 151917 - RNA, 22 nt, Human
agcauauuguuuggcuucacag

SEQ ID NO: 151918 - RNA, 19 nt, Human
agcccauaacaaaaauaua

SEQ ID NO: 151919 - RNA, 20 nt, Human
aggccucagccuccucccag

SEQ ID NO: 151920 - RNA, 23 nt, Human
aggcggccccuccucgcgccggc

SEQ ID NO: 151921 - RNA, 21 nt, Human
agugaggaaaauagggaaaaa

SEQ ID NO: 151922 - RNA, 19 nt, Human
auaaagugaggaaaauagg

SEQ ID NO: 151923 - RNA, 21 nt, Human
auagaaaagguaagggcaagu

SEQ ID NO: 151924 - RNA, 22 nt, Human
auuggaggugcaaggcaggagc

SEQ ID NO: 151925 - RNA, 24 nt, Human
caaaggggaagaaaggcugguggu

SEQ ID NO: 151926 - RNA, 24 nt, Human
caagagcacaaauucgccgaggcc

SEQ ID NO: 151927 - RNA, 18 nt, Human
caaggaggcgggggcgaa

SEQ ID NO: 151928 - RNA, 18 nt, Human
cacacacaaaggggaaga

SEQ ID NO: 151929 - RNA, 23 nt, Human
cacgccggcggccagugcuggag

SEQ ID NO: 151930 - RNA, 21 nt, Human
cacggccggccccugcccagc

SEQ ID NO: 151931 - RNA, 23 nt, Human
cagaauccucaggaaaucucuuc

SEQ ID NO: 151932 - RNA, 20 nt, Human
ccacaaacggcuacugcaca

SEQ ID NO: 151933 - RNA, 21 nt, Human
ccacacacacaaaggggaaga

SEQ ID NO: 151934 - RNA, 19 nt, Human
ccaggggugggcugggggg

SEQ ID NO: 151935 - RNA, 19 nt, Human
ccagugcacacuugaacca

SEQ ID NO: 151936 - RNA, 20 nt, Human
ccagugcacacuugaaccac

SEQ ID NO: 151937 - RNA, 18 nt, Human
cccccugccacuguucug

SEQ ID NO: 151938 - RNA, 21 nt, Human
cccccugccacuguucuggcc

SEQ ID NO: 151939 - RNA, 21 nt, Human
ccccuuuuguccucugguuua

SEQ ID NO: 151940 - RNA, 23 nt, Human
cccgccacggccggccccugccc

SEQ ID NO: 151941 - RNA, 23 nt, Human
cccgggccugcgcccccacccuc

SEQ ID NO: 151942 - RNA, 18 nt, Human
cccuccuucgccuuccuu

SEQ ID NO: 151943 - RNA, 20 nt, Human
cccuccuucgccuuccuuuc

SEQ ID NO: 151944 - RNA, 24 nt, Human
ccgcaccggccccuaauggccgca

SEQ ID NO: 151945 - RNA, 22 nt, Human
ccgccacggccggccccugccc

SEQ ID NO: 151946 - RNA, 20 nt, Human
ccgccgcgcuccgcgccgcc

SEQ ID NO: 151947 - RNA, 25 nt, Human
ccgccgcgcuccgcgccgccgccgg

SEQ ID NO: 151948 - RNA, 22 nt, Human
ccggcccgccacggccggcccc

SEQ ID NO: 151949 - RNA, 20 nt, Human
ccucacaucgcgcggcggcc

SEQ ID NO: 151950 - RNA, 21 nt, Human
ccucacaucgcgcggcggccg

SEQ ID NO: 151951 - RNA, 21 nt, Human
ccuccgaacccuccuccugcc

SEQ ID NO: 151952 - RNA, 26 nt, Human
ccuccucccggugcccccucccgggc

SEQ ID NO: 151953 - RNA, 18 nt, Human
ccugcgcccccacccucc

SEQ ID NO: 151954 - RNA, 21 nt, Human
cgaaaaggggggagaggagga

SEQ ID NO: 151955 - RNA, 22 nt, Human
cgacaagagacacucaccuccu

SEQ ID NO: 151956 - RNA, 21 nt, Human
cgagcagcgccgcccgcacgc

SEQ ID NO: 151957 - RNA, 19 nt, Human
cgccgcacccagggguggg

SEQ ID NO: 151958 - RNA, 19 nt, Human
cgccgcccgcacgcccgcg

SEQ ID NO: 151959 - RNA, 21 nt, Human
cgccggcgcuccccuccuucg

SEQ ID NO: 151960 - RNA, 18 nt, Human
cgccgggagcggagcugg

SEQ ID NO: 151961 - RNA, 18 nt, Human
cggcggccagugcuggag

SEQ ID NO: 151962 - RNA, 18 nt, Human
cggcgggagaagacggcc

SEQ ID NO: 151963 - RNA, 20 nt, Human
cgggcgcaggcggccccucc

SEQ ID NO: 151964 - RNA, 18 nt, Human
cucagguucaucuugcau

SEQ ID NO: 151965 - RNA, 20 nt, Human
cucccccccagccuagcaca

SEQ ID NO: 151966 - RNA, 22 nt, Human
cucccgggccugcgcccccacc

SEQ ID NO: 151967 - RNA, 20 nt, Human
cucgcccucucuccccccca

SEQ ID NO: 151968 - RNA, 18 nt, Human
cugcgcccccacccuccg

SEQ ID NO: 151969 - RNA, 22 nt, Human
cuggccccugccgccucucucc

SEQ ID NO: 151970 - RNA, 20 nt, Human
cuucacaggccucagccucc

SEQ ID NO: 151971 - RNA, 20 nt, Human
cuuccuccucggcgcugucc

SEQ ID NO: 151972 - RNA, 19 nt, Human
gacuccccuccgcacucuc

SEQ ID NO: 151973 - RNA, 21 nt, Human
gcaguggcuggagagggaugc

SEQ ID NO: 151974 - RNA, 19 nt, Human
gccccgggcccccugccac

SEQ ID NO: 151975 - RNA, 22 nt, Human
gcccgggguccccgcgccgcac

SEQ ID NO: 151976 - RNA, 18 nt, Human
gcgcggcggccggcggag

SEQ ID NO: 151977 - RNA, 20 nt, Human
gcgcuccccuccuucgccuu

SEQ ID NO: 151978 - RNA, 21 nt, Human
gcggagcuggccggaccagag

SEQ ID NO: 151979 - RNA, 20 nt, Human
gcggcggcgggagaagacgg

SEQ ID NO: 151980 - RNA, 19 nt, Human
ggacucgauagaaaaggua

SEQ ID NO: 151981 - RNA, 23 nt, Human
ggacucgauagaaaagguaaggg

SEQ ID NO: 151982 - RNA, 21 nt, Human
ggcgcaggcggccccuccucg

SEQ ID NO: 151983 - RNA, 20 nt, Human
gggagaagacggccggggcg

SEQ ID NO: 151984 - RNA, 20 nt, Human
gggagaggaggaggcgacaa

SEQ ID NO: 151985 - RNA, 21 nt, Human
gggagggggcugggggucgcc

SEQ ID NO: 151986 - RNA, 19 nt, Human
gggccgggccgagcagcgc

SEQ ID NO: 151987 - RNA, 23 nt, Human
gggccugcgcccccacccuccga

SEQ ID NO: 151988 - RNA, 23 nt, Human
gggcgaaaaggggggagaggagg

SEQ ID NO: 151989 - RNA, 19 nt, Human
gggcgcaggcggccccucc

SEQ ID NO: 151990 - RNA, 21 nt, Human
gggcgccgcggcggcgggaga

SEQ ID NO: 151991 - RNA, 21 nt, Human
gggggaaguuccuuuuucucu

SEQ ID NO: 151992 - RNA, 20 nt, Human
ggggucgccucagcccgugc

SEQ ID NO: 151993 - RNA, 18 nt, Human
gugcgaggggccggccug

SEQ ID NO: 151994 - RNA, 26 nt, Human
gugcggacgggagggggcuggggguc

SEQ ID NO: 151995 - RNA, 22 nt, Human
uaaaccacaaacggcuacugca

SEQ ID NO: 151996 - RNA, 18 nt, Human
uagcacucagcccggcgu

SEQ ID NO: 151997 - RNA, 20 nt, Human
uauauauuuauauauauaua

SEQ ID NO: 151998 - RNA, 23 nt, Human
uauucuaucaucccucagguuca

SEQ ID NO: 151999 - RNA, 19 nt, Human
ucagccuccucccagugca

SEQ ID NO: 152000 - RNA, 21 nt, Human
uccccgcgccgcacccagggg

SEQ ID NO: 152001 - RNA, 20 nt, Human
uccccggcccgccacggccg

SEQ ID NO: 152002 - RNA, 23 nt, Human
ucccgggccugcgcccccacccu

SEQ ID NO: 152003 - RNA, 22 nt, Human
uccucccagugcacacuugaac

SEQ ID NO: 152004 - RNA, 20 nt, Human
uccucccggugcccccuccc

SEQ ID NO: 152005 - RNA, 20 nt, Human
uccucggcgcuguccuccuc

SEQ ID NO: 152006 - RNA, 19 nt, Human
ucgccucagcccgugcgcc

SEQ ID NO: 152007 - RNA, 20 nt, Human
ucucccccccagccuagcac

SEQ ID NO: 152008 - RNA, 18 nt, Human
ucuccgacccgacucccc

SEQ ID NO: 152009 - RNA, 23 nt, Human
ucucucgcccucucuccccccca

SEQ ID NO: 152010 - RNA, 25 nt, Human
ucuggccccugccgccucucuccga

SEQ ID NO: 152011 - RNA, 23 nt, Human
ugcccagccgaggucucucggag

SEQ ID NO: 152012 - RNA, 24 nt, Human
ugcccagccgaggucucucggagc

SEQ ID NO: 152013 - RNA, 21 nt, Human
ugggggugugugcggacggga

SEQ ID NO: 152014 - RNA, 24 nt, Human
uuagcacucagcccggcguccugc

SEQ ID NO: 152015 - RNA, 24 nt, Human
uuggcuucacaggccucagccucc

SEQ ID NO: 152016 - RNA, 18 nt, Human
aacugggccagugccuag

SEQ ID NO: 152017 - RNA, 22 nt, Human
acacaacgucccagcacacucc

SEQ ID NO: 152018 - RNA, 18 nt, Human
agcacacuccacucucca

SEQ ID NO: 152019 - RNA, 21 nt, Human
aggcccaccugccagcagcuc

SEQ ID NO: 152020 - RNA, 23 nt, Human
caagugccugcuccagcuccagu

SEQ ID NO: 152021 - RNA, 21 nt, Human
cacacaacgucccagcacacu

SEQ ID NO: 152022 - RNA, 19 nt, Human
cacacugccugcuccaggg

SEQ ID NO: 152023 - RNA, 24 nt, Human
cacccgcggugcucccagagcugg

SEQ ID NO: 152024 - RNA, 19 nt, Human
cagagcugggcuauccucc

SEQ ID NO: 152025 - RNA, 23 nt, Human
caggcucuagcaaaaggcugggg

SEQ ID NO: 152026 - RNA, 19 nt, Human
ccacacugccugcuccagg

SEQ ID NO: 152027 - RNA, 18 nt, Human
ccacgucagggagggcuc

SEQ ID NO: 152028 - RNA, 24 nt, Human
ccagcacacuccacucuccaccca

SEQ ID NO: 152029 - RNA, 26 nt, Human
ccagcagcucucaccuggccagccca

SEQ ID NO: 152030 - RNA, 23 nt, Human
cccacccgcggugcucccagagc

SEQ ID NO: 152031 - RNA, 21 nt, Human
cccagcacacuccacucucca

SEQ ID NO: 152032 - RNA, 22 nt, Human
cccaucagcuuugauaagggga

SEQ ID NO: 152033 - RNA, 18 nt, Human
cccgcggugcucccagag

SEQ ID NO: 152034 - RNA, 23 nt, Human
cccggcacacccuggcuuucccg

SEQ ID NO: 152035 - RNA, 21 nt, Human
ccuccacaggcaggcccaccu

SEQ ID NO: 152036 - RNA, 19 nt, Human
ccucucuguccucccuucc

SEQ ID NO: 152037 - RNA, 19 nt, Human
ccugccagcagcucucacc

SEQ ID NO: 152038 - RNA, 19 nt, Human
ccugcuccagcuccagucc

SEQ ID NO: 152039 - RNA, 21 nt, Human
ccugcuccagggacucgaguc

SEQ ID NO: 152040 - RNA, 18 nt, Human
ccuggggccucucugucc

SEQ ID NO: 152041 - RNA, 18 nt, Human
ccugugaguaucuuggcc

SEQ ID NO: 152042 - RNA, 21 nt, Human
cuccagcuccagucccagccu

SEQ ID NO: 152043 - RNA, 20 nt, Human
cuccagggacucgaguccac

SEQ ID NO: 152044 - RNA, 18 nt, Human
cuccagucccagccccuc

SEQ ID NO: 152045 - RNA, 21 nt, Human
cuggccagcccaccuucaugu

SEQ ID NO: 152046 - RNA, 21 nt, Human
cuuggcccggcacacccuggc

SEQ ID NO: 152047 - RNA, 26 nt, Human
gagaccucucuauugcacacaacguc

SEQ ID NO: 152048 - RNA, 19 nt, Human
gccugugaguaucuuggcc

SEQ ID NO: 152049 - RNA, 22 nt, Human
ggcacacccuggcuuucccggc

SEQ ID NO: 152050 - RNA, 27 nt, Human
ggccucucuguccucccuuccuuggcc

SEQ ID NO: 152051 - RNA, 18 nt, Human
ggugcucccagagcuggg

SEQ ID NO: 152052 - RNA, 21 nt, Human
gugccugcuccagcuccaguc

SEQ ID NO: 152053 - RNA, 24 nt, Human
uagcaaaaggcuggggggucccca

SEQ ID NO: 152054 - RNA, 24 nt, Human
ucaagcucgcacagccgugcaggc

SEQ ID NO: 152055 - RNA, 22 nt, Human
uccacacugccugcuccaggga

SEQ ID NO: 152056 - RNA, 19 nt, Human
uccacggagagccuugccc

SEQ ID NO: 152057 - RNA, 18 nt, Human
ugccagcagcucucaccu

SEQ ID NO: 152058 - RNA, 23 nt, Human
ugcuccagcuccagucccagccc

SEQ ID NO: 152059 - RNA, 18 nt, Human
uggacuggcugccagggc

SEQ ID NO: 152060 - RNA, 19 nt, Human
uggacuggcugccagggcc

SEQ ID NO: 152061 - RNA, 23 nt, Human
ugggggguccccagcgaccccca

SEQ ID NO: 152062 - RNA, 22 nt, Human
uguggagaccucucuauugcaa

SEQ ID NO: 152063 - RNA, 24 nt, Human
uguggccagccugugaguaucuug

SEQ ID NO: 152064 - RNA, 25 nt, Human
uuccuggcucggguccacuccgagg

SEQ ID NO: 152065 - RNA, 23 nt, Human
uuucccggcugcaagugccugcu

SEQ ID NO: 152066 - RNA, 22 nt, Human
uuuuuuuuuuuuuuggugugga

SEQ ID NO: 152067 - RNA, 19 nt, Human
cccgagcgccccgcgcagu

SEQ ID NO: 152068 - RNA, 18 nt, Human
cccucguccgcuccccgc

SEQ ID NO: 152069 - RNA, 20 nt, Human
ccuggcggguggggggcugu

SEQ ID NO: 152070 - RNA, 19 nt, Human
cgcaggucccgagcgcccc

SEQ ID NO: 152071 - RNA, 23 nt, Human
cguucagacgccgagcaccuggg

SEQ ID NO: 152072 - RNA, 23 nt, Human
cuggcggguggggggcuguggcc

SEQ ID NO: 152073 - RNA, 22 nt, Human
cuguggcccucguccgcucccc

SEQ ID NO: 152074 - RNA, 18 nt, Human
ggcggguggggggcugug

SEQ ID NO: 152075 - RNA, 20 nt, Human
gguggugaagguccgaggug

SEQ ID NO: 152076 - RNA, 19 nt, Human
uccccgcggcccgggcggg

SEQ ID NO: 152077 - RNA, 21 nt, Human
uccgcuccccgcggcccgggc

SEQ ID NO: 152078 - RNA, 21 nt, Human
uggcggguggggggcuguggc

SEQ ID NO: 152079 - RNA, 20 nt, Human
uggggggcuguggcccucgu

SEQ ID NO: 152080 - RNA, 21 nt, Human
aaccccccaaaacucuuaaaa

SEQ ID NO: 152081 - RNA, 22 nt, Human
aaggaucaaugagaucuagaag

SEQ ID NO: 152082 - RNA, 24 nt, Human
aaugaucucuucaucaagacuggu

SEQ ID NO: 152083 - RNA, 23 nt, Human
acaaaccacccaauuaaaaaccc

SEQ ID NO: 152084 - RNA, 21 nt, Human
accacccaauuaaaaaccccc

SEQ ID NO: 152085 - RNA, 18 nt, Human
accccccaaaacucuuaa

SEQ ID NO: 152086 - RNA, 20 nt, Human
agugaaaaguugaacaauuc

SEQ ID NO: 152087 - RNA, 24 nt, Human
auaagaagacucuaaaaauaauuc

SEQ ID NO: 152088 - RNA, 22 nt, Human
aucucuucaucaagacugguuc

SEQ ID NO: 152089 - RNA, 23 nt, Human
auuaaaaaccccccaaaacucuu

SEQ ID NO: 152090 - RNA, 25 nt, Human
caaguccuucuccuuccuuaauuuc

SEQ ID NO: 152091 - RNA, 19 nt, Human
cagaaauaagaagacucua

SEQ ID NO: 152092 - RNA, 24 nt, Human
ccacccaauuaaaaaccccccaaa

SEQ ID NO: 152093 - RNA, 26 nt, Human
cccccaaaacucuuaaaacagucuau

SEQ ID NO: 152094 - RNA, 19 nt, Human
ccgaccgcguucucggucg

SEQ ID NO: 152095 - RNA, 19 nt, Human
ccugccacuuugccccucu

SEQ ID NO: 152096 - RNA, 22 nt, Human
cggacaccugagauuugggccu

SEQ ID NO: 152097 - RNA, 21 nt, Human
cuucaaguccuucuccuuccu

SEQ ID NO: 152098 - RNA, 19 nt, Human
gagaucuagaagaaucucu

SEQ ID NO: 152099 - RNA, 22 nt, Human
gcugggugcggcggggaccggg

SEQ ID NO: 152100 - RNA, 19 nt, Human
ggaugggagaagggcagag

SEQ ID NO: 152101 - RNA, 18 nt, Human
ggccugaguuuauggcuu

SEQ ID NO: 152102 - RNA, 19 nt, Human
ucaaguccuucuccuuccu

SEQ ID NO: 152103 - RNA, 18 nt, Human
ucacaccaauuaucuccu

SEQ ID NO: 152104 - RNA, 24 nt, Human
ucacaugcuucagaaauaagaaga

SEQ ID NO: 152105 - RNA, 21 nt, Human
ucaggagcugcaauuggggcc

SEQ ID NO: 152106 - RNA, 22 nt, Human
uccaaagaugggucuguuuuga

SEQ ID NO: 152107 - RNA, 18 nt, Human
uccuucuguuggugcugu

SEQ ID NO: 152108 - RNA, 20 nt, Human
ucuugaaagucugaagucug

SEQ ID NO: 152109 - RNA, 21 nt, Human
ugaaaguccucugcuuucuga

SEQ ID NO: 152110 - RNA, 19 nt, Human
ugagguucuuguuggccug

SEQ ID NO: 152111 - RNA, 20 nt, Human
uggcuuccucacccucuucc

SEQ ID NO: 152112 - RNA, 21 nt, Human
uggugcugugaauuuucggcc

SEQ ID NO: 152113 - RNA, 23 nt, Human
uuacaaaccacccaauuaaaaac

SEQ ID NO: 152114 - RNA, 22 nt, Human
uucaaguccuucuccuuccuua

SEQ ID NO: 152115 - RNA, 22 nt, Human
uucaccuuguguucacaccaau

SEQ ID NO: 152116 - RNA, 23 nt, Human
uucauguguaggagugucuccau

SEQ ID NO: 152117 - RNA, 22 nt, Human
uuccaaauucuaucucuuucug

SEQ ID NO: 152118 - RNA, 21 nt, Human
uuccugccacuuugccccucu

SEQ ID NO: 152119 - RNA, 22 nt, Human
uucucugaguucuuccugagca

SEQ ID NO: 152120 - RNA, 19 nt, Human
uucugauugguuuuuggga

SEQ ID NO: 152121 - RNA, 18 nt, Human
uuggaugggagaagggca

SEQ ID NO: 152122 - RNA, 23 nt, Human
uugggguagguuaguuccugagc

SEQ ID NO: 152123 - RNA, 18 nt, Human
uuugacaagauuccuccu

SEQ ID NO: 152124 - RNA, 19 nt, Human
uuuugggaagcuuuuaauu

SEQ ID NO: 152125 - RNA, 23 nt, Human
aaacagaaaacaaaaccaaaacc

SEQ ID NO: 152126 - RNA, 27 nt, Human
aaaccccuuaauuaacaacaacaaaaa

SEQ ID NO: 152127 - RNA, 23 nt, Human
aaaguaaacagaaaacaaaacca

SEQ ID NO: 152128 - RNA, 18 nt, Human
aacagaacaccaccacag

SEQ ID NO: 152129 - RNA, 20 nt, Human
aagcaagaguucuacccaag

SEQ ID NO: 152130 - RNA, 19 nt, Human
aagcacuaagguuuuaagc

SEQ ID NO: 152131 - RNA, 24 nt, Human
aaguaaacagaaaacaaaaccaaa

SEQ ID NO: 152132 - RNA, 19 nt, Human
aauaguauuacaggaagca

SEQ ID NO: 152133 - RNA, 24 nt, Human
aaugaaaagaauccagaagaagga

SEQ ID NO: 152134 - RNA, 20 nt, Human
acaggacuggaaagucaaaa

SEQ ID NO: 152135 - RNA, 22 nt, Human
acauguguagacaaagagguuu

SEQ ID NO: 152136 - RNA, 25 nt, Human
accaaaaccccuuaauuaacaacaa

SEQ ID NO: 152137 - RNA, 18 nt, Human
accacagcccccuccccc

SEQ ID NO: 152138 - RNA, 28 nt, Human
accacagcccccucccccucuccccagg

SEQ ID NO: 152139 - RNA, 19 nt, Human
agaaaacaaaaccaaaacc

SEQ ID NO: 152140 - RNA, 24 nt, Human
agaaagcacuaagguuuuaagcug

SEQ ID NO: 152141 - RNA, 23 nt, Human
agaacaccaccacagcccccucc

SEQ ID NO: 152142 - RNA, 19 nt, Human
agaccagagcugguaagga

SEQ ID NO: 152143 - RNA, 23 nt, Human
agaccagagcugguaaggaaagg

SEQ ID NO: 152144 - RNA, 22 nt, Human
agcaccuguucaagugaacagc

SEQ ID NO: 152145 - RNA, 19 nt, Human
auaaaacaaaauaauauau

SEQ ID NO: 152146 - RNA, 23 nt, Human
caaaaccccuuaauuaacaacaa

SEQ ID NO: 152147 - RNA, 21 nt, Human
caaauaauggaaagaauugaa

SEQ ID NO: 152148 - RNA, 20 nt, Human
caacagaacaccaccacagc

SEQ ID NO: 152149 - RNA, 25 nt, Human
cacagcuuaugcccaggagcugccu

SEQ ID NO: 152150 - RNA, 22 nt, Human
caccuguucaagugaacagcac

SEQ ID NO: 152151 - RNA, 19 nt, Human
cacuguggugcggcagggu

SEQ ID NO: 152152 - RNA, 21 nt, Human
cagaacaccaccacagccccc

SEQ ID NO: 152153 - RNA, 22 nt, Human
cagaacaccaccacagcccccu

SEQ ID NO: 152154 - RNA, 18 nt, Human
cagcccccucccccucuc

SEQ ID NO: 152155 - RNA, 18 nt, Human
cagcuugggcuggcuuug

SEQ ID NO: 152156 - RNA, 19 nt, Human
ccaccacagcccccucccc

SEQ ID NO: 152157 - RNA, 20 nt, Human
ccccagcauccucaaaccug

SEQ ID NO: 152158 - RNA, 22 nt, Human
gagcaauauagaccagagcugg

SEQ ID NO: 152159 - RNA, 20 nt, Human
gcacuguggugcggcagggu

SEQ ID NO: 152160 - RNA, 21 nt, Human
gccacagcuuaugcccaggag

SEQ ID NO: 152161 - RNA, 21 nt, Human
ggagcugccucgccgcgggac

SEQ ID NO: 152162 - RNA, 20 nt, Human
gggucaaaggcaaaggaaaa

SEQ ID NO: 152163 - RNA, 22 nt, Human
uaaacagaaaacaaaaccaaaa

SEQ ID NO: 152164 - RNA, 18 nt, Human
uauguuaagaaagaaagc

SEQ ID NO: 152165 - RNA, 25 nt, Human
uauuagaaaauuuucaagauguaag

SEQ ID NO: 152166 - RNA, 24 nt, Human
ucaaaagggucccaauauaaaaaa

SEQ ID NO: 152167 - RNA, 23 nt, Human
ucacugucauuugaucaaaguga

SEQ ID NO: 152168 - RNA, 22 nt, Human
uccccagcauccucaaaccugu

SEQ ID NO: 152169 - RNA, 21 nt, Human
ucugcgcaacagcaccuguuc

SEQ ID NO: 152170 - RNA, 23 nt, Human
ucuuguaaccaacagaacaccac

SEQ ID NO: 152171 - RNA, 22 nt, Human
ugaacagcaccuuaccagcuug

SEQ ID NO: 152172 - RNA, 24 nt, Human
ugcacacaaaguaaacagaaaaca

SEQ ID NO: 152173 - RNA, 23 nt, Human
uggaaagaauugaaauuugggua

SEQ ID NO: 152174 - RNA, 18 nt, Human
uggcaucguaacuauaca

SEQ ID NO: 152175 - RNA, 22 nt, Human
uguaaccaacagaacaccacca

SEQ ID NO: 152176 - RNA, 19 nt, Human
ugucauuugaucaaaguga

SEQ ID NO: 152177 - RNA, 18 nt, Human
ugucugacaagcauuggc

SEQ ID NO: 152178 - RNA, 19 nt, Human
uguucuggaaugcugccga

SEQ ID NO: 152179 - RNA, 24 nt, Human
uuaaaagcagguaguugcacacaa

SEQ ID NO: 152180 - RNA, 23 nt, Human
uuaauuaacaacaacaaaaagaa

SEQ ID NO: 152181 - RNA, 18 nt, Human
uuagucacagaguuuccu

SEQ ID NO: 152182 - RNA, 20 nt, Human
uucacaaaguugaguguugu

SEQ ID NO: 152183 - RNA, 21 nt, Human
uuggcauuuuaauucuucagg

SEQ ID NO: 152184 - RNA, 27 nt, Human
uuguaaccaacagaacaccaccacagc

SEQ ID NO: 152185 - RNA, 20 nt, Human
uuucuuguaaccaacagaac

SEQ ID NO: 152186 - RNA, 21 nt, Human
uuugcugcaauuugaaaacuc

SEQ ID NO: 152187 - RNA, 21 nt, Human
aaaaccuccccccacuacucc

SEQ ID NO: 152188 - RNA, 19 nt, Human
accuccccccacuacuccu

SEQ ID NO: 152189 - RNA, 19 nt, Human
accuugaagccucuugcuu

SEQ ID NO: 152190 - RNA, 20 nt, Human
acucggaagagaggcaggcc

SEQ ID NO: 152191 - RNA, 19 nt, Human
agacagaaaauaugaaggc

SEQ ID NO: 152192 - RNA, 18 nt, Human
agacucggaagagaggca

SEQ ID NO: 152193 - RNA, 19 nt, Human
agacucggaagagaggcag

SEQ ID NO: 152194 - RNA, 22 nt, Human
aggcaggaauacgccuggcagc

SEQ ID NO: 152195 - RNA, 19 nt, Human
aggcaggccacaaacagga

SEQ ID NO: 152196 - RNA, 19 nt, Human
auagcaaaaccucccccca

SEQ ID NO: 152197 - RNA, 21 nt, Human
caggaauacgccuggcagccc

SEQ ID NO: 152198 - RNA, 22 nt, Human
ccagacagaaaauaugaaggca

SEQ ID NO: 152199 - RNA, 19 nt, Human
ccccacuacuccugugagc

SEQ ID NO: 152200 - RNA, 22 nt, Human
ccccacuacuccugugagcacc

SEQ ID NO: 152201 - RNA, 19 nt, Human
ccuccccccacuacuccug

SEQ ID NO: 152202 - RNA, 21 nt, Human
ccugccaacuagagaagccua

SEQ ID NO: 152203 - RNA, 21 nt, Human
cguuaucuggacugcacugga

SEQ ID NO: 152204 - RNA, 20 nt, Human
cuagagaagccuagaacaaa

SEQ ID NO: 152205 - RNA, 22 nt, Human
cucucugcugguaucuccugga

SEQ ID NO: 152206 - RNA, 21 nt, Human
cuucugggcuuucugucuucc

SEQ ID NO: 152207 - RNA, 23 nt, Human
cuugaagccucuugcuucagugg

SEQ ID NO: 152208 - RNA, 26 nt, Human
gaauacgccuggcagcccugggggag

SEQ ID NO: 152209 - RNA, 24 nt, Human
gaucguuaucuggacugcacugga

SEQ ID NO: 152210 - RNA, 21 nt, Human
gcaggagaguggugauagagc

SEQ ID NO: 152211 - RNA, 19 nt, Human
gcccugggggagggggugg

SEQ ID NO: 152212 - RNA, 24 nt, Human
ggaaauagcaaaaccuccccccac

SEQ ID NO: 152213 - RNA, 19 nt, Human
ggagggggugggaucgggg

SEQ ID NO: 152214 - RNA, 19 nt, Human
ggcccaggcaggaauacgc

SEQ ID NO: 152215 - RNA, 19 nt, Human
uagcaaaaccuccccccaa

SEQ ID NO: 152216 - RNA, 19 nt, Human
uaucuggacugcacuggaa

SEQ ID NO: 152217 - RNA, 20 nt, Human
uccagacagaaaauaugaag

SEQ ID NO: 152218 - RNA, 20 nt, Human
uccucuuauccacuuggccg

SEQ ID NO: 152219 - RNA, 22 nt, Human
ucugcugguaucuccuggacca

SEQ ID NO: 152220 - RNA, 26 nt, Human
ucuucucuccuacucccucucugcug

SEQ ID NO: 152221 - RNA, 22 nt, Human
ucuugcuucaguggucucaaga

SEQ ID NO: 152222 - RNA, 23 nt, Human
uggccgcagaagcgccucucuca

SEQ ID NO: 152223 - RNA, 22 nt, Human
uucaguggucucaagagacucu

SEQ ID NO: 152224 - RNA, 23 nt, Human
uuggccgcagaagcgccucucuc

SEQ ID NO: 152225 - RNA, 21 nt, Human
uuuuaucucuugugccaggag

SEQ ID NO: 152226 - RNA, 21 nt, Human
aagacagccaaccggccuaac

SEQ ID NO: 152227 - RNA, 24 nt, Human
aagagcagcugggagugugggggc

SEQ ID NO: 152228 - RNA, 22 nt, Human
aagcaaccuuuuaauuccaagc

SEQ ID NO: 152229 - RNA, 18 nt, Human
aagcagcagggguaaggg

SEQ ID NO: 152230 - RNA, 20 nt, Human
aagcagcagggguaaggggg

SEQ ID NO: 152231 - RNA, 22 nt, Human
aagcagcagggguaagggggcc

SEQ ID NO: 152232 - RNA, 19 nt, Human
aagcaggcuggcgucggug

SEQ ID NO: 152233 - RNA, 22 nt, Human
aagcucgggguuugcgagcggg

SEQ ID NO: 152234 - RNA, 20 nt, Human
aaugccccucauuccucuca

SEQ ID NO: 152235 - RNA, 24 nt, Human
aauucccauuucguggccuggagg

SEQ ID NO: 152236 - RNA, 20 nt, Human
acacacacaguggaaaggga

SEQ ID NO: 152237 - RNA, 22 nt, Human
acagggagggccagggacgaga

SEQ ID NO: 152238 - RNA, 20 nt, Human
accccaccuccugccccucc

SEQ ID NO: 152239 - RNA, 22 nt, Human
accccaccuccugccccuccca

SEQ ID NO: 152240 - RNA, 23 nt, Human
accccaccuccugccccucccaa

SEQ ID NO: 152241 - RNA, 19 nt, Human
acccgccggggaaaaaccc

SEQ ID NO: 152242 - RNA, 22 nt, Human
acccugaagcagcagggguaag

SEQ ID NO: 152243 - RNA, 23 nt, Human
agcaaccuuuuaauuccaagcag

SEQ ID NO: 152244 - RNA, 21 nt, Human
agcagagucccccucccccag

SEQ ID NO: 152245 - RNA, 20 nt, Human
agcagcugggaguguggggg

SEQ ID NO: 152246 - RNA, 21 nt, Human
agccaggacacuccaaaaugu

SEQ ID NO: 152247 - RNA, 21 nt, Human
agcggaggucagggcaagcug

SEQ ID NO: 152248 - RNA, 18 nt, Human
aggcagguggagggccag

SEQ ID NO: 152249 - RNA, 19 nt, Human
aggcugaggccggcuggug

SEQ ID NO: 152250 - RNA, 19 nt, Human
aggcuggcgucgguggggg

SEQ ID NO: 152251 - RNA, 20 nt, Human
agggaugucagggucugggc

SEQ ID NO: 152252 - RNA, 20 nt, Human
agggcuggagcaaaaggcuu

SEQ ID NO: 152253 - RNA, 20 nt, Human
aggguccagccaggcugagg

SEQ ID NO: 152254 - RNA, 19 nt, Human
agguagggcaggggcaggu

SEQ ID NO: 152255 - RNA, 27 nt, Human
caacccgccggggaaaaaggccaaugg

SEQ ID NO: 152256 - RNA, 19 nt, Human
caagcuggggguguaaggu

SEQ ID NO: 152257 - RNA, 18 nt, Human
caagggaggcggaaggcc

SEQ ID NO: 152258 - RNA, 18 nt, Human
caccccaccuccugcccc

SEQ ID NO: 152259 - RNA, 21 nt, Human
cacccuaagcccaggcuucug

SEQ ID NO: 152260 - RNA, 22 nt, Human
cacccuauuuccaccccaccuc

SEQ ID NO: 152261 - RNA, 20 nt, Human
cacguggacuggaaagaagu

SEQ ID NO: 152262 - RNA, 23 nt, Human
cagagcccagacuggcuuugccc

SEQ ID NO: 152263 - RNA, 23 nt, Human
cagcauggucacacacacagugg

SEQ ID NO: 152264 - RNA, 21 nt, Human
cagccaggcugaggccggcug

SEQ ID NO: 152265 - RNA, 21 nt, Human
caggagcaauacccagaccug

SEQ ID NO: 152266 - RNA, 18 nt, Human
cagggcaagcugaagugg

SEQ ID NO: 152267 - RNA, 21 nt, Human
caucuccacccuaagcccagg

SEQ ID NO: 152268 - RNA, 19 nt, Human
ccaagcagagucccccucc

SEQ ID NO: 152269 - RNA, 22 nt, Human
ccaaugccccucauuccucuca

SEQ ID NO: 152270 - RNA, 18 nt, Human
ccaccuccugccccuccc

SEQ ID NO: 152271 - RNA, 23 nt, Human
ccaccuccugccccucccaaccc

SEQ ID NO: 152272 - RNA, 23 nt, Human
ccaggacacuccaaaaugugcca

SEQ ID NO: 152273 - RNA, 20 nt, Human
cccaccuccugccccuccca

SEQ ID NO: 152274 - RNA, 18 nt, Human
ccccaccuccugccccuc

SEQ ID NO: 152275 - RNA, 21 nt, Human
ccccaccuccugccccuccca

SEQ ID NO: 152276 - RNA, 24 nt, Human
ccccgcuucgccuucuccuguucu

SEQ ID NO: 152277 - RNA, 19 nt, Human
ccccucauuccucucaccu

SEQ ID NO: 152278 - RNA, 19 nt, Human
ccccugcaucuucccucca

SEQ ID NO: 152279 - RNA, 22 nt, Human
cccucggcggugacucuccagg

SEQ ID NO: 152280 - RNA, 22 nt, Human
cccucucucccuuucuuccucc

SEQ ID NO: 152281 - RNA, 22 nt, Human
cccucucucccuuucuuccucc

SEQ ID NO: 152282 - RNA, 20 nt, Human
ccuggcccucucucccuuuc

SEQ ID NO: 152283 - RNA, 22 nt, Human
cguggccuggaggcagguggag

SEQ ID NO: 152284 - RNA, 22 nt, Human
cuccacccuaagcccaggcuuc

SEQ ID NO: 152285 - RNA, 18 nt, Human
cugcaucuucccuccagc

SEQ ID NO: 152286 - RNA, 22 nt, Human
cugccccucccaacccgccggg

SEQ ID NO: 152287 - RNA, 23 nt, Human
cuggcccucucucccuuucuucc

SEQ ID NO: 152288 - RNA, 19 nt, Human
cuggccgcuucccaccccu

SEQ ID NO: 152289 - RNA, 18 nt, Human
cuggggaagccgcagggc

SEQ ID NO: 152290 - RNA, 24 nt, Human
cugucaggagugaguaugggaggg

SEQ ID NO: 152291 - RNA, 23 nt, Human
gaaagcagcuggcgcguuccccc

SEQ ID NO: 152292 - RNA, 18 nt, Human
gaaagcagcugggggggc

SEQ ID NO: 152293 - RNA, 20 nt, Human
gaagagcagcugggagugug

SEQ ID NO: 152294 - RNA, 22 nt, Human
gagcaaaaggcuuggaagcucg

SEQ ID NO: 152295 - RNA, 23 nt, Human
gagcagcugggagugugggggcc

SEQ ID NO: 152296 - RNA, 19 nt, Human
gcaagcugaaguggagggg

SEQ ID NO: 152297 - RNA, 19 nt, Human
gccacacaggcagcagggu

SEQ ID NO: 152298 - RNA, 23 nt, Human
gcccggugccuggcuuagugcug

SEQ ID NO: 152299 - RNA, 20 nt, Human
gcccucucucccuuucuucc

SEQ ID NO: 152300 - RNA, 21 nt, Human
gcugcagugcaggaaagcugg

SEQ ID NO: 152301 - RNA, 19 nt, Human
ggacuggaaagaagucaag

SEQ ID NO: 152302 - RNA, 23 nt, Human
ggagcaaaaggcuuggaagcucg

SEQ ID NO: 152303 - RNA, 24 nt, Human
ggagcucuuucugccuggccgcuu

SEQ ID NO: 152304 - RNA, 21 nt, Human
ggcaggagcaauacccagacc

SEQ ID NO: 152305 - RNA, 23 nt, Human
ggcaggagcaauacccagaccug

SEQ ID NO: 152306 - RNA, 21 nt, Human
ggcgacacaagagccuggagc

SEQ ID NO: 152307 - RNA, 21 nt, Human
gggaaaaacccugaagcagca

SEQ ID NO: 152308 - RNA, 18 nt, Human
gggagggccagggacgag

SEQ ID NO: 152309 - RNA, 21 nt, Human
gggccagggacgagagcagga

SEQ ID NO: 152310 - RNA, 21 nt, Human
gggcugggugggcgacacaag

SEQ ID NO: 152311 - RNA, 22 nt, Human
ggggugaggggcagggagaggg

SEQ ID NO: 152312 - RNA, 21 nt, Human
ggggugcguggguguaggugu

SEQ ID NO: 152313 - RNA, 19 nt, Human
gguccagccaggcugaggc

SEQ ID NO: 152314 - RNA, 19 nt, Human
uaaccaccaaugccccuca

SEQ ID NO: 152315 - RNA, 18 nt, Human
uaccugaggaaaggagcc

SEQ ID NO: 152316 - RNA, 18 nt, Human
uaggcggcaucuccaccc

SEQ ID NO: 152317 - RNA, 24 nt, Human
uaugaaacgaggcaagucauccaa

SEQ ID NO: 152318 - RNA, 19 nt, Human
uaugggagggcuggguggg

SEQ ID NO: 152319 - RNA, 22 nt, Human
ucacugccggggacugcagagg

SEQ ID NO: 152320 - RNA, 21 nt, Human
uccaagggaggcggaaggccc

SEQ ID NO: 152321 - RNA, 25 nt, Human
ucccaccccugcaucuucccuccag

SEQ ID NO: 152322 - RNA, 22 nt, Human
ucgcggaggcugagcuggggcc

SEQ ID NO: 152323 - RNA, 20 nt, Human
ucugugugccagagcccaga

SEQ ID NO: 152324 - RNA, 24 nt, Human
ugaaacgaggcaagucauccaagc

SEQ ID NO: 152325 - RNA, 22 nt, Human
ugaggaaagcagcugggggggc

SEQ ID NO: 152326 - RNA, 18 nt, Human
ugaggaaaggagcccacc

SEQ ID NO: 152327 - RNA, 22 nt, Human
ugccagagcccagacuggcuuu

SEQ ID NO: 152328 - RNA, 21 nt, Human
ugcguggguguaggugugaga

SEQ ID NO: 152329 - RNA, 21 nt, Human
uggaaagaagucaagcugggg

SEQ ID NO: 152330 - RNA, 25 nt, Human
uggcccucucucccuuucuuccucc

SEQ ID NO: 152331 - RNA, 19 nt, Human
uggccucuugaccccaucc

SEQ ID NO: 152332 - RNA, 20 nt, Human
ugggagggcugggugggcga

SEQ ID NO: 152333 - RNA, 26 nt, Human
uggggugaggggcagggagagggcgg

SEQ ID NO: 152334 - RNA, 21 nt, Human
ugugagggggugcgugggugu

SEQ ID NO: 152335 - RNA, 21 nt, Human
ugugugagggggugcgugggu

SEQ ID NO: 152336 - RNA, 22 nt, Human
ugugugagggggugcgugggug

SEQ ID NO: 152337 - RNA, 21 nt, Human
uucccccgggcuggcgcgucc

SEQ ID NO: 152338 - RNA, 19 nt, Human
aaaaagaaaagcccuaccc

SEQ ID NO: 152339 - RNA, 19 nt, Human
aaaaguacuguuacucuaa

SEQ ID NO: 152340 - RNA, 18 nt, Human
aaaauuagcugggcaugg

SEQ ID NO: 152341 - RNA, 20 nt, Human
aaacacggcuggauuuagaa

SEQ ID NO: 152342 - RNA, 22 nt, Human
aaaccccgucucuacuaaaaaa

SEQ ID NO: 152343 - RNA, 19 nt, Human
aaagaaaagcccuacccuc

SEQ ID NO: 152344 - RNA, 24 nt, Human
aaagaaaggcucaaaauaaguuaa

SEQ ID NO: 152345 - RNA, 19 nt, Human
aaagacagaacaaggagga

SEQ ID NO: 152346 - RNA, 18 nt, Human
aaagaggaaauguuacaa

SEQ ID NO: 152347 - RNA, 19 nt, Human
aacauggugaaaccccguc

SEQ ID NO: 152348 - RNA, 20 nt, Human
aacauggugaaaccccgucu

SEQ ID NO: 152349 - RNA, 21 nt, Human
aacauggugaaaccccgucuc

SEQ ID NO: 152350 - RNA, 18 nt, Human
aacucagagucucaaaga

SEQ ID NO: 152351 - RNA, 22 nt, Human
aagcagaaguccagguugcuca

SEQ ID NO: 152352 - RNA, 18 nt, Human
aaggaaccaaaaguacug

SEQ ID NO: 152353 - RNA, 18 nt, Human
aaggcagaaaagucaagg

SEQ ID NO: 152354 - RNA, 24 nt, Human
aaucucuugaacccaggaggcgga

SEQ ID NO: 152355 - RNA, 23 nt, Human
acaacagauaaaaccaucauuua

SEQ ID NO: 152356 - RNA, 25 nt, Human
acaacagauaaaaccaucauuuaaa

SEQ ID NO: 152357 - RNA, 19 nt, Human
acaagagugaaacuccauc

SEQ ID NO: 152358 - RNA, 20 nt, Human
acaagagugaaacuccaucu

SEQ ID NO: 152359 - RNA, 21 nt, Human
acaagagugaaacuccaucuc

SEQ ID NO: 152360 - RNA, 19 nt, Human
acaaggcagaaaagucaag

SEQ ID NO: 152361 - RNA, 19 nt, Human
acagaacaaggaggaauca

SEQ ID NO: 152362 - RNA, 18 nt, Human
acagcccagguucuugcc

SEQ ID NO: 152363 - RNA, 22 nt, Human
accaaaaguacuguuacucuaa

SEQ ID NO: 152364 - RNA, 24 nt, Human
acccaggaggcggagguugcagug

SEQ ID NO: 152365 - RNA, 23 nt, Human
accccgucucuacuaaaaaacaa

SEQ ID NO: 152366 - RNA, 25 nt, Human
acuccagccugggcaacaagaguga

SEQ ID NO: 152367 - RNA, 18 nt, Human
agacaggagaacucaagg

SEQ ID NO: 152368 - RNA, 23 nt, Human
agagcuccuucuaugcgucccuu

SEQ ID NO: 152369 - RNA, 23 nt, Human
agcacuuuggaggcagagguggg

SEQ ID NO: 152370 - RNA, 22 nt, Human
agccuggccaacauggugaaac

SEQ ID NO: 152371 - RNA, 24 nt, Human
agccuggccaacauggugaaaccc

SEQ ID NO: 152372 - RNA, 21 nt, Human
agccuguaauccagcacuuug

SEQ ID NO: 152373 - RNA, 22 nt, Human
agccuguaaucccagcuacugg

SEQ ID NO: 152374 - RNA, 23 nt, Human
agccuguaaucccagcuacuggg

SEQ ID NO: 152375 - RNA, 23 nt, Human
agcugggcaugguggcaugagcc

SEQ ID NO: 152376 - RNA, 22 nt, Human
aggaaccaaaaguacuguuacu

SEQ ID NO: 152377 - RNA, 21 nt, Human
aggcagagguggguggaucac

SEQ ID NO: 152378 - RNA, 23 nt, Human
aggcaggagaaucucuugaaccc

SEQ ID NO: 152379 - RNA, 24 nt, Human
aggcaggagaaucucuugaaccca

SEQ ID NO: 152380 - RNA, 21 nt, Human
aggcggagguugcagugagcc

SEQ ID NO: 152381 - RNA, 24 nt, Human
aggcggagguugcagugagccgag

SEQ ID NO: 152382 - RNA, 24 nt, Human
aggcugaggcaggagaaucucuug

SEQ ID NO: 152383 - RNA, 22 nt, Human
agguggguggaucaccugaggu

SEQ ID NO: 152384 - RNA, 24 nt, Human
aucaugcuauugcacuccagccug

SEQ ID NO: 152385 - RNA, 18 nt, Human
auugcacuccagccuggg

SEQ ID NO: 152386 - RNA, 23 nt, Human
auugcacuccagccugggcaaca

SEQ ID NO: 152387 - RNA, 24 nt, Human
auugcacuccagccugggcaacaa

SEQ ID NO: 152388 - RNA, 24 nt, Human
caacauggugaaaccccgucucua

SEQ ID NO: 152389 - RNA, 22 nt, Human
caauaacucagcuagagccaga

SEQ ID NO: 152390 - RNA, 28 nt, Human
cacaaggcagaaaagucaaggucauuua

SEQ ID NO: 152391 - RNA, 19 nt, Human
cacaguguaccacaguuaa

SEQ ID NO: 152392 - RNA, 20 nt, Human
cacauaugaccuggagaagc

SEQ ID NO: 152393 - RNA, 18 nt, Human
caccuggagaaacuucug

SEQ ID NO: 152394 - RNA, 23 nt, Human
cacggcuggauuuagaaaauaaa

SEQ ID NO: 152395 - RNA, 23 nt, Human
cacuccagccugggcaacaagag

SEQ ID NO: 152396 - RNA, 24 nt, Human
cacuccagccugggcaacaagagu

SEQ ID NO: 152397 - RNA, 25 nt, Human
cacuccagccugggcaacaagagug

SEQ ID NO: 152398 - RNA, 23 nt, Human
cacuggcacuguguuccuagagc

SEQ ID NO: 152399 - RNA, 18 nt, Human
cacuuuugugacaaauau

SEQ ID NO: 152400 - RNA, 19 nt, Human
cagaaaagguuuucaguca

SEQ ID NO: 152401 - RNA, 22 nt, Human
cagagguggguggaucaccuga

SEQ ID NO: 152402 - RNA, 25 nt, Human
cagagguggguggaucaccugaggu

SEQ ID NO: 152403 - RNA, 23 nt, Human
cagcacuuuggaggcagaggugg

SEQ ID NO: 152404 - RNA, 22 nt, Human
cauaugaccuggagaagcuggu

SEQ ID NO: 152405 - RNA, 25 nt, Human
cauauggaaaaagaaaagcccuacc

SEQ ID NO: 152406 - RNA, 23 nt, Human
caucacuuucugcaaagcauuua

SEQ ID NO: 152407 - RNA, 18 nt, Human
ccaaaaguacuguuacuc

SEQ ID NO: 152408 - RNA, 24 nt, Human
ccaaaccagggugguagcucagcc

SEQ ID NO: 152409 - RNA, 22 nt, Human
ccaccuggagaaacuucugcac

SEQ ID NO: 152410 - RNA, 18 nt, Human
cccgccagcuuucuggcc

SEQ ID NO: 152411 - RNA, 20 nt, Human
ccucaagggugaaccacuuc

SEQ ID NO: 152412 - RNA, 24 nt, Human
ccucaauaacucagcuagagccag

SEQ ID NO: 152413 - RNA, 21 nt, Human
ccuggagaagcugguuguggu

SEQ ID NO: 152414 - RNA, 23 nt, Human
ccuggccaacauggugaaacccc

SEQ ID NO: 152415 - RNA, 24 nt, Human
ccuggccaacauggugaaaccccg

SEQ ID NO: 152416 - RNA, 22 nt, Human
ccuguaaucccagcuacugggg

SEQ ID NO: 152417 - RNA, 24 nt, Human
cgagaucaugcuauugcacuccag

SEQ ID NO: 152418 - RNA, 19 nt, Human
cgucccucccaagugauuu

SEQ ID NO: 152419 - RNA, 24 nt, Human
cgugacuagccuggccaacauggu

SEQ ID NO: 152420 - RNA, 20 nt, Human
cuauugcacuccagccuggg

SEQ ID NO: 152421 - RNA, 21 nt, Human
cuauugcacuccagccugggc

SEQ ID NO: 152422 - RNA, 24 nt, Human
cuauugcacuccagccugggcaac

SEQ ID NO: 152423 - RNA, 19 nt, Human
cucaaggaaccaaaaguac

SEQ ID NO: 152424 - RNA, 23 nt, Human
gagacaggagaacucaaggaacc

SEQ ID NO: 152425 - RNA, 30 nt, Human
gaggcagagguggguggaucaccugagguu

SEQ ID NO: 152426 - RNA, 22 nt, Human
gagguugcagugagccgagauc

SEQ ID NO: 152427 - RNA, 23 nt, Human
gaucaccugagguuaggaguucg

SEQ ID NO: 152428 - RNA, 22 nt, Human
gcaggagaaucucuugaaccca

SEQ ID NO: 152429 - RNA, 24 nt, Human
gccaacauggugaaaccccgucuc

SEQ ID NO: 152430 - RNA, 25 nt, Human
gcgucccucccaagugauuuaauuu

SEQ ID NO: 152431 - RNA, 22 nt, Human
gcuauugcacuccagccugggc

SEQ ID NO: 152432 - RNA, 24 nt, Human
gcuauugcacuccagccugggcaa

SEQ ID NO: 152433 - RNA, 20 nt, Human
ggaaagggaggccaccugga

SEQ ID NO: 152434 - RNA, 22 nt, Human
ggaggcggagguugcagugagc

SEQ ID NO: 152435 - RNA, 18 nt, Human
ggagguugcagugagccg

SEQ ID NO: 152436 - RNA, 20 nt, Human
ggagguugcagugagccgag

SEQ ID NO: 152437 - RNA, 22 nt, Human
ggagguugcagugagccgagau

SEQ ID NO: 152438 - RNA, 23 nt, Human
ggagguugcagugagccgagauc

SEQ ID NO: 152439 - RNA, 24 nt, Human
ggagguugcagugagccgagauca

SEQ ID NO: 152440 - RNA, 19 nt, Human
ggccugggugcuuaggggg

SEQ ID NO: 152441 - RNA, 24 nt, Human
gggcaugguggcaugagccuguaa

SEQ ID NO: 152442 - RNA, 24 nt, Human
gguggcaugagccuguaaucccag

SEQ ID NO: 152443 - RNA, 23 nt, Human
guacuguuacucuaagucucaga

SEQ ID NO: 152444 - RNA, 22 nt, Human
uaaccuacuacauaauaaucua

SEQ ID NO: 152445 - RNA, 27 nt, Human
uaacguugcacuggcucaauccucaau

SEQ ID NO: 152446 - RNA, 19 nt, Human
uaacugcuauacauucugg

SEQ ID NO: 152447 - RNA, 20 nt, Human
uaaggguuagaguaauguuu

SEQ ID NO: 152448 - RNA, 22 nt, Human
uaccuuauauaaaucaccaauc

SEQ ID NO: 152449 - RNA, 21 nt, Human
uagaacguagagaaaaauuuu

SEQ ID NO: 152450 - RNA, 24 nt, Human
uagccuggccaacauggugaaacc

SEQ ID NO: 152451 - RNA, 20 nt, Human
uagcugggcaugguggcaug

SEQ ID NO: 152452 - RNA, 22 nt, Human
uauaaugguuuccugaaguuau

SEQ ID NO: 152453 - RNA, 21 nt, Human
uaugaaaauaggcaacaguga

SEQ ID NO: 152454 - RNA, 24 nt, Human
uauugcacuccagccugggcaaca

SEQ ID NO: 152455 - RNA, 24 nt, Human
ucacaaggcagaaaagucaagguc

SEQ ID NO: 152456 - RNA, 22 nt, Human
ucagaaaaaaaaaaaaaaaaaa

SEQ ID NO: 152457 - RNA, 19 nt, Human
ucagcuagagccagauaca

SEQ ID NO: 152458 - RNA, 21 nt, Human
ucaguggaagucaaaacaagg

SEQ ID NO: 152459 - RNA, 18 nt, Human
ucauaaaagaaaggcuca

SEQ ID NO: 152460 - RNA, 23 nt, Human
ucaugcuauugcacuccagccug

SEQ ID NO: 152461 - RNA, 19 nt, Human
ucauuagucuuggcuauuu

SEQ ID NO: 152462 - RNA, 23 nt, Human
uccaucucagaaaaaaaaaaaaa

SEQ ID NO: 152463 - RNA, 19 nt, Human
ucccuaaaauaagcuugaa

SEQ ID NO: 152464 - RNA, 19 nt, Human
ucuggagacaggagaacuc

SEQ ID NO: 152465 - RNA, 24 nt, Human
ucuuaaaaaaguauuuuaguccuu

SEQ ID NO: 152466 - RNA, 25 nt, Human
ugacauauggaaaaagaaaagcccu

SEQ ID NO: 152467 - RNA, 21 nt, Human
ugaccuggagaagcugguugu

SEQ ID NO: 152468 - RNA, 22 nt, Human
ugagccgagaucaugcuauugc

SEQ ID NO: 152469 - RNA, 23 nt, Human
ugagccuguaaucccagcuacug

SEQ ID NO: 152470 - RNA, 24 nt, Human
ugagcuaaagagagcuauaaaggc

SEQ ID NO: 152471 - RNA, 20 nt, Human
ugaggcaggagaaucucuug

SEQ ID NO: 152472 - RNA, 24 nt, Human
ugaggcaggagaaucucuugaacc

SEQ ID NO: 152473 - RNA, 25 nt, Human
ugaggcaggagaaucucuugaaccc

SEQ ID NO: 152474 - RNA, 19 nt, Human
ugaguuaaaggcuaauuug

SEQ ID NO: 152475 - RNA, 24 nt, Human
ugcaaaacuagagaugucuccuaa

SEQ ID NO: 152476 - RNA, 18 nt, Human
ugcacuccagccugggca

SEQ ID NO: 152477 - RNA, 19 nt, Human
ugcacuccagccugggcaa

SEQ ID NO: 152478 - RNA, 19 nt, Human
ugcacuccagccugggcaa

SEQ ID NO: 152479 - RNA, 20 nt, Human
ugcacuccagccugggcaac

SEQ ID NO: 152480 - RNA, 22 nt, Human
ugcacuccagccugggcaacaa

SEQ ID NO: 152481 - RNA, 18 nt, Human
ugccuguggccugggugc

SEQ ID NO: 152482 - RNA, 20 nt, Human
ugccuguggccugggugcuu

SEQ ID NO: 152483 - RNA, 24 nt, Human
ugcuauugcacuccagccugggca

SEQ ID NO: 152484 - RNA, 21 nt, Human
uggaaagggaggccaccugga

SEQ ID NO: 152485 - RNA, 18 nt, Human
uggaggcagaggugggug

SEQ ID NO: 152486 - RNA, 24 nt, Human
uggaucaccugagguuaggaguuc

SEQ ID NO: 152487 - RNA, 22 nt, Human
uggcaugagccuguaaucccag

SEQ ID NO: 152488 - RNA, 24 nt, Human
uggccaacauggugaaaccccguc

SEQ ID NO: 152489 - RNA, 20 nt, Human
uggccugggugcuuaggggg

SEQ ID NO: 152490 - RNA, 19 nt, Human
uggcucaauccucaauaac

SEQ ID NO: 152491 - RNA, 18 nt, Human
ugggcaugguggcaugag

SEQ ID NO: 152492 - RNA, 24 nt, Human
uggguggaucaccugagguuagga

SEQ ID NO: 152493 - RNA, 24 nt, Human
ugguggcaugagccuguaauccca

SEQ ID NO: 152494 - RNA, 20 nt, Human
ugguguaaggucaucacuuu

SEQ ID NO: 152495 - RNA, 27 nt, Human
uguaaucaacauauuucacaguguacc

SEQ ID NO: 152496 - RNA, 21 nt, Human
uguacauuguuggaaagggag

SEQ ID NO: 152497 - RNA, 18 nt, Human
uuagcugggcaugguggc

SEQ ID NO: 152498 - RNA, 21 nt, Human
uucacaaggcagaaaagucaa

SEQ ID NO: 152499 - RNA, 24 nt, Human
uugaacccaggaggcggagguugc

SEQ ID NO: 152500 - RNA, 21 nt, Human
uugcaaaacuagagaugucuc

SEQ ID NO: 152501 - RNA, 20 nt, Human
uugcagugagccgagaucau

SEQ ID NO: 152502 - RNA, 21 nt, Human
uugcagugagccgagaucaug

SEQ ID NO: 152503 - RNA, 22 nt, Human
uugcagugagccgagaucaugc

SEQ ID NO: 152504 - RNA, 19 nt, Human
uuggaggcagaggugggug

SEQ ID NO: 152505 - RNA, 19 nt, Human
uuucuggccaguaagcaga

SEQ ID NO: 152506 - RNA, 20 nt, Human
aggcagaaaaucauuuccug

SEQ ID NO: 152507 - RNA, 20 nt, Human
agguuuucuggggugcagag

SEQ ID NO: 152508 - RNA, 24 nt, Human
auguguauguauguauauauauua

SEQ ID NO: 152509 - RNA, 19 nt, Human
ccaccucccuuuuaaaaca

SEQ ID NO: 152510 - RNA, 23 nt, Human
cgaccuuggccccguccuugcuc

SEQ ID NO: 152511 - RNA, 19 nt, Human
cggggcgggccgggcgggg

SEQ ID NO: 152512 - RNA, 18 nt, Human
cuggcagguugugggaag

SEQ ID NO: 152513 - RNA, 25 nt, Human
cuucuacccccaccucccuuuuaaa

SEQ ID NO: 152514 - RNA, 26 nt, Human
gaucauccuuuuacuucuacccccac

SEQ ID NO: 152515 - RNA, 25 nt, Human
gcaggguucuccuuaaagcgggcag

SEQ ID NO: 152516 - RNA, 19 nt, Human
gcauggggugagaggaggg

SEQ ID NO: 152517 - RNA, 20 nt, Human
gcucccucccaugaucaucc

SEQ ID NO: 152518 - RNA, 21 nt, Human
ggcauggggugagaggaggga

SEQ ID NO: 152519 - RNA, 19 nt, Human
gggcauggggugagaggag

SEQ ID NO: 152520 - RNA, 21 nt, Human
gggcauggggugagaggaggg

SEQ ID NO: 152521 - RNA, 22 nt, Human
gggccgggaccugggaccuggg

SEQ ID NO: 152522 - RNA, 23 nt, Human
gggccgggaccugggaccuggga

SEQ ID NO: 152523 - RNA, 18 nt, Human
guauguauguauauauau

SEQ ID NO: 152524 - RNA, 20 nt, Human
guccuugcuccuugcacccu

SEQ ID NO: 152525 - RNA, 19 nt, Human
gugccugcagcccugaugg

SEQ ID NO: 152526 - RNA, 26 nt, Human
uacccccaccucccuuuuaaaacaaa

SEQ ID NO: 152527 - RNA, 25 nt, Human
uagucuggcagguugugggaagggg

SEQ ID NO: 152528 - RNA, 18 nt, Human
uauauauauguguaugua

SEQ ID NO: 152529 - RNA, 18 nt, Human
uauauguguauguaugua

SEQ ID NO: 152530 - RNA, 27 nt, Human
uauguauguauauauauuaaccccucc

SEQ ID NO: 152531 - RNA, 22 nt, Human
uauguguauguauguauauaua

SEQ ID NO: 152532 - RNA, 27 nt, Human
uccgggccgggaccugggaccugggac

SEQ ID NO: 152533 - RNA, 18 nt, Human
uccuugcuccuugcaccc

SEQ ID NO: 152534 - RNA, 22 nt, Human
ucuccuuaaagcgggcagaagc

SEQ ID NO: 152535 - RNA, 20 nt, Human
ugaccaugagcgaccuuggc

SEQ ID NO: 152536 - RNA, 22 nt, Human
ugaccaugagcgaccuuggccc

SEQ ID NO: 152537 - RNA, 24 nt, Human
ugaugggugggauggaggcagaaa

SEQ ID NO: 152538 - RNA, 20 nt, Human
ugcaagggacuaggagagcg

SEQ ID NO: 152539 - RNA, 23 nt, Human
ugccugcagcccugauggguggg

SEQ ID NO: 152540 - RNA, 24 nt, Human
uggaggcagaaaaucauuuccugu

SEQ ID NO: 152541 - RNA, 22 nt, Human
uggcagguugugggaaggggcg

SEQ ID NO: 152542 - RNA, 21 nt, Human
uggccccguccuugcuccuug

SEQ ID NO: 152543 - RNA, 20 nt, Human
uggcccggaugcagcgccag

SEQ ID NO: 152544 - RNA, 20 nt, Human
ugggaaggggcgcagggagu

SEQ ID NO: 152545 - RNA, 21 nt, Human
ugggaaggggcgcagggagug

SEQ ID NO: 152546 - RNA, 19 nt, Human
uguauguauguauauauau

SEQ ID NO: 152547 - RNA, 18 nt, Human
uguguauguauguauaua

SEQ ID NO: 152548 - RNA, 18 nt, Human
uguguauguauguauaua

SEQ ID NO: 152549 - RNA, 20 nt, Human
uguguauguauguauauaua

SEQ ID NO: 152550 - RNA, 21 nt, Human
uguguauguauguauauauau

SEQ ID NO: 152551 - RNA, 19 nt, Human
uugcacccugauugggcau

SEQ ID NO: 152552 - RNA, 24 nt, Human
uuuacaacaauauauauaugugua

SEQ ID NO: 152553 - RNA, 23 nt, Human
uuucuggggugcagagcaggguu

SEQ ID NO: 152554 - RNA, 24 nt, Human
uuuucuggggugcagagcaggguu

SEQ ID NO: 152555 - RNA, 22 nt, Human
aaaaucuuuaacacugacagaa

SEQ ID NO: 152556 - RNA, 22 nt, Human
aaccaagcaucuugcaaaggcc

SEQ ID NO: 152557 - RNA, 28 nt, Human
aagaaggcacuagagggacagggaccgc

SEQ ID NO: 152558 - RNA, 18 nt, Human
aagcaucuugcaaaggcc

SEQ ID NO: 152559 - RNA, 19 nt, Human
aaggcacuagagggacagg

SEQ ID NO: 152560 - RNA, 24 nt, Human
acaaccaagcaucuugcaaaggcc

SEQ ID NO: 152561 - RNA, 25 nt, Human
acaaccaagcaucuugcaaaggccc

SEQ ID NO: 152562 - RNA, 20 nt, Human
acacacacauucucuccacu

SEQ ID NO: 152563 - RNA, 22 nt, Human
acacacauucucuccacaaagu

SEQ ID NO: 152564 - RNA, 21 nt, Human
acccagucaaguucacagucu

SEQ ID NO: 152565 - RNA, 23 nt, Human
agaauagaaacuuauccaaaagg

SEQ ID NO: 152566 - RNA, 24 nt, Human
agaauagaaacuuauccaaaagga

SEQ ID NO: 152567 - RNA, 25 nt, Human
agagauggggccgacuggggcaugg

SEQ ID NO: 152568 - RNA, 18 nt, Human
agcagggaggccacucug

SEQ ID NO: 152569 - RNA, 20 nt, Human
aggcggagggaaggucggcu

SEQ ID NO: 152570 - RNA, 23 nt, Human
agggacagggaccgcuuuggguc

SEQ ID NO: 152571 - RNA, 24 nt, Human
agggacagggaccgcuuugggucu

SEQ ID NO: 152572 - RNA, 19 nt, Human
agggaggccacucuguuuc

SEQ ID NO: 152573 - RNA, 25 nt, Human
agggucuaaagaaggcacuagaggg

SEQ ID NO: 152574 - RNA, 22 nt, Human
auggccucaugugggagaaggc

SEQ ID NO: 152575 - RNA, 18 nt, Human
augucuguccgaaggcug

SEQ ID NO: 152576 - RNA, 25 nt, Human
cacaaccaagcaucuugcaaaggcc

SEQ ID NO: 152577 - RNA, 22 nt, Human
cacccgcacgccugcacgccgg

SEQ ID NO: 152578 - RNA, 18 nt, Human
cacccucuguccccagcc

SEQ ID NO: 152579 - RNA, 18 nt, Human
caccggucccugaguccc

SEQ ID NO: 152580 - RNA, 19 nt, Human
cagaauagaaacuuaucca

SEQ ID NO: 152581 - RNA, 21 nt, Human
cagucugcccucuuaguguga

SEQ ID NO: 152582 - RNA, 20 nt, Human
caguucaggccaggguguca

SEQ ID NO: 152583 - RNA, 21 nt, Human
cauccgagaccccucagcgga

SEQ ID NO: 152584 - RNA, 22 nt, Human
ccagcccagcaucccuggucau

SEQ ID NO: 152585 - RNA, 24 nt, Human
cccagcaucccuggucaucuccuc

SEQ ID NO: 152586 - RNA, 20 nt, Human
ccccccgagcccggcucccg

SEQ ID NO: 152587 - RNA, 19 nt, Human
cccgcacgccugcacgccg

SEQ ID NO: 152588 - RNA, 19 nt, Human
ccgaaggcuguggcggggc

SEQ ID NO: 152589 - RNA, 25 nt, Human
ccucaacacaaccaagcaucuugca

SEQ ID NO: 152590 - RNA, 21 nt, Human
ccucaugugggagaaggcgga

SEQ ID NO: 152591 - RNA, 22 nt, Human
cgcacacccgcacgccugcacg

SEQ ID NO: 152592 - RNA, 21 nt, Human
cucacgaauguuugacacccu

SEQ ID NO: 152593 - RNA, 21 nt, Human
cuccugcagcaccggucccug

SEQ ID NO: 152594 - RNA, 19 nt, Human
cugggccaagcccuccauc

SEQ ID NO: 152595 - RNA, 23 nt, Human
cuuggcgcugggccaagcccucc

SEQ ID NO: 152596 - RNA, 18 nt, Human
gaaggcacuagagggaca

SEQ ID NO: 152597 - RNA, 18 nt, Human
gcagggaggccacucugu

SEQ ID NO: 152598 - RNA, 23 nt, Human
gcccagcauggcacagcagggag

SEQ ID NO: 152599 - RNA, 24 nt, Human
gccucgguguccgcucccgcccgc

SEQ ID NO: 152600 - RNA, 23 nt, Human
gcggugccugcuaagugcucagc

SEQ ID NO: 152601 - RNA, 18 nt, Human
ggccgauggggcuccagc

SEQ ID NO: 152602 - RNA, 22 nt, Human
gggaugaggauggggcccgagg

SEQ ID NO: 152603 - RNA, 21 nt, Human
uaaaaaccucaacacaaccaa

SEQ ID NO: 152604 - RNA, 23 nt, Human
uacccuguuuacuuggcgcuggg

SEQ ID NO: 152605 - RNA, 19 nt, Human
uagagggacagggaccgcu

SEQ ID NO: 152606 - RNA, 18 nt, Human
uagugugaggaaaugggg

SEQ ID NO: 152607 - RNA, 26 nt, Human
uauuuaaaaaccucaacacaaccaag

SEQ ID NO: 152608 - RNA, 19 nt, Human
ucacagucugcccucuuag

SEQ ID NO: 152609 - RNA, 19 nt, Human
uccucaguucaggccaggg

SEQ ID NO: 152610 - RNA, 24 nt, Human
ucugcccucuuagugugaggaaau

SEQ ID NO: 152611 - RNA, 24 nt, Human
ugacagaauagaaacuuauccaaa

SEQ ID NO: 152612 - RNA, 19 nt, Human
ugagagauggggccgacug

SEQ ID NO: 152613 - RNA, 23 nt, Human
ugggagaaggcggagggaagguc

SEQ ID NO: 152614 - RNA, 23 nt, Human
uguccccagcccuggcggggccc

SEQ ID NO: 152615 - RNA, 21 nt, Human
uucaaguauucuuggccgaug

SEQ ID NO: 152616 - RNA, 20 nt, Human
uuuucuaacaauaaauauaa

SEQ ID NO: 152617 - RNA, 19 nt, Human
aaaaaaauaccccacccac

SEQ ID NO: 152618 - RNA, 19 nt, Human
aaaauaccccacccaccca

SEQ ID NO: 152619 - RNA, 21 nt, Human
aaacaccagugauacagagga

SEQ ID NO: 152620 - RNA, 19 nt, Human
aaauaccccacccacccau

SEQ ID NO: 152621 - RNA, 20 nt, Human
aaauaccuguuacagauuuc

SEQ ID NO: 152622 - RNA, 25 nt, Human
aacaauaaaaacaauucaaaagaaa

SEQ ID NO: 152623 - RNA, 22 nt, Human
aaccacagccaaaauaagugaa

SEQ ID NO: 152624 - RNA, 19 nt, Human
acaaaacagaucauauggu

SEQ ID NO: 152625 - RNA, 21 nt, Human
agagagcauuuggcacuuggc

SEQ ID NO: 152626 - RNA, 22 nt, Human
agcaagcucauaguuagccuuu

SEQ ID NO: 152627 - RNA, 19 nt, Human
agccaccacuuccguccag

SEQ ID NO: 152628 - RNA, 21 nt, Human
agccugauuugacuaaggaau

SEQ ID NO: 152629 - RNA, 21 nt, Human
aggggaaaauaaagaguuuuu

SEQ ID NO: 152630 - RNA, 23 nt, Human
auuccaaacacaaaauacuugau

SEQ ID NO: 152631 - RNA, 20 nt, Human
auugcuggagaaguuaccau

SEQ ID NO: 152632 - RNA, 21 nt, Human
caaggcauaaauagaaaacaa

SEQ ID NO: 152633 - RNA, 21 nt, Human
caccaaaacugcaccaugugc

SEQ ID NO: 152634 - RNA, 19 nt, Human
cacuggagauaaggaggag

SEQ ID NO: 152635 - RNA, 23 nt, Human
cagcucagcaaguuucagcaaca

SEQ ID NO: 152636 - RNA, 24 nt, Human
cauauccgaaggagcacaaucuaa

SEQ ID NO: 152637 - RNA, 22 nt, Human
cauaucuccaugaagcaugcca

SEQ ID NO: 152638 - RNA, 20 nt, Human
cauuguacaacauaaacaca

SEQ ID NO: 152639 - RNA, 20 nt, Human
cuaagucuuauuacacuaaa

SEQ ID NO: 152640 - RNA, 21 nt, Human
cucagcaaguuucagcaacaa

SEQ ID NO: 152641 - RNA, 19 nt, Human
cucauauuugagugucuua

SEQ ID NO: 152642 - RNA, 19 nt, Human
cugguacuaaugaucacaa

SEQ ID NO: 152643 - RNA, 22 nt, Human
gaaacaaaauaccuguuacaga

SEQ ID NO: 152644 - RNA, 25 nt, Human
gagcauuuggcacuuggcuguaaca

SEQ ID NO: 152645 - RNA, 20 nt, Human
gcaauuacaaaaaaauaccc

SEQ ID NO: 152646 - RNA, 29 nt, Human
ggaaaaggauuucauuuuuuaaaaauauu

SEQ ID NO: 152647 - RNA, 21 nt, Human
guacaacauaaacacauauug

SEQ ID NO: 152648 - RNA, 25 nt, Human
guacacuuauguuuacauauguaca

SEQ ID NO: 152649 - RNA, 21 nt, Human
gucuucagcgugcgcugaagc

SEQ ID NO: 152650 - RNA, 18 nt, Human
gugaaauagauucaacaa

SEQ ID NO: 152651 - RNA, 27 nt, Human
uaaacacauauugccaaucauaucaca

SEQ ID NO: 152652 - RNA, 22 nt, Human
uaacaauuuaaaaauguguagu

SEQ ID NO: 152653 - RNA, 20 nt, Human
uaacacggcuccuucacuaa

SEQ ID NO: 152654 - RNA, 19 nt, Human
uaagguaguaaauauggcc

SEQ ID NO: 152655 - RNA, 25 nt, Human
uaagugaaauagauucaacaauccu

SEQ ID NO: 152656 - RNA, 18 nt, Human
uaagugacuuuucaaagc

SEQ ID NO: 152657 - RNA, 18 nt, Human
uaauaguaagucuaaauc

SEQ ID NO: 152658 - RNA, 24 nt, Human
uacauggcuugauugauauuuagc

SEQ ID NO: 152659 - RNA, 19 nt, Human
uaccaugcuccgcucgcag

SEQ ID NO: 152660 - RNA, 23 nt, Human
uagaaaacaauaaaaacaauuca

SEQ ID NO: 152661 - RNA, 26 nt, Human
uagaaagaguaucaauagagcuaaaa

SEQ ID NO: 152662 - RNA, 19 nt, Human
uaguguaugaacaggaaaa

SEQ ID NO: 152663 - RNA, 18 nt, Human
uaugaacaggaaaaggau

SEQ ID NO: 152664 - RNA, 22 nt, Human
uauuacacuaaguugugagcau

SEQ ID NO: 152665 - RNA, 18 nt, Human
ucauaguuagccuuuaug

SEQ ID NO: 152666 - RNA, 25 nt, Human
ucauuauguuuauuauaaaaauaua

SEQ ID NO: 152667 - RNA, 19 nt, Human
uccaguaaauucaaagaag

SEQ ID NO: 152668 - RNA, 20 nt, Human
uccaguaaauucaaagaagu

SEQ ID NO: 152669 - RNA, 18 nt, Human
ucccuggguccuagugcc

SEQ ID NO: 152670 - RNA, 21 nt, Human
uccgcgaaccccgcucgggga

SEQ ID NO: 152671 - RNA, 18 nt, Human
ugagaaacaaucauaucc

SEQ ID NO: 152672 - RNA, 21 nt, Human
ugagaaauuucucuccugcuu

SEQ ID NO: 152673 - RNA, 20 nt, Human
ugagagagcauuuggcacuu

SEQ ID NO: 152674 - RNA, 24 nt, Human
ugagagauuugguuaguguaugaa

SEQ ID NO: 152675 - RNA, 20 nt, Human
ugcuacgccuuccacagcca

SEQ ID NO: 152676 - RNA, 19 nt, Human
ugcuagaugaccaacuauu

SEQ ID NO: 152677 - RNA, 18 nt, Human
ugcuggugcagagggcag

SEQ ID NO: 152678 - RNA, 19 nt, Human
uggagauaaggaggagucu

SEQ ID NO: 152679 - RNA, 20 nt, Human
uggccagauaguuugaggua

SEQ ID NO: 152680 - RNA, 18 nt, Human
ugguacauaacaucaugu

SEQ ID NO: 152681 - RNA, 26 nt, Human
uguccauuuuguuauuucacuugauc

SEQ ID NO: 152682 - RNA, 24 nt, Human
uuauuacacuaaaucuacaacaga

SEQ ID NO: 152683 - RNA, 20 nt, Human
uugacacuggagauaaggag

SEQ ID NO: 152684 - RNA, 23 nt, Human
uuuauguuuacugaaagucaaug

SEQ ID NO: 152685 - RNA, 19 nt, Human
aacggcccccgggaugggg

SEQ ID NO: 152686 - RNA, 18 nt, Human
aagacaggaucccccccc

SEQ ID NO: 152687 - RNA, 19 nt, Human
aagcagcggugagagccgg

SEQ ID NO: 152688 - RNA, 24 nt, Human
acacacaugcacgcacacagaggc

SEQ ID NO: 152689 - RNA, 18 nt, Human
acacgcucauaacaugca

SEQ ID NO: 152690 - RNA, 19 nt, Human
acaucauccaccaucaccc

SEQ ID NO: 152691 - RNA, 20 nt, Human
accacagagaggcagauccc

SEQ ID NO: 152692 - RNA, 23 nt, Human
acccugagagggaccacacacua

SEQ ID NO: 152693 - RNA, 18 nt, Human
acguggaggccccaggcu

SEQ ID NO: 152694 - RNA, 19 nt, Human
acuagagugaggggccaca

SEQ ID NO: 152695 - RNA, 21 nt, Human
acuagagugaggggccacacu

SEQ ID NO: 152696 - RNA, 18 nt, Human
acugaccgggaacccugu

SEQ ID NO: 152697 - RNA, 18 nt, Human
acugaguucccugcucac

SEQ ID NO: 152698 - RNA, 19 nt, Human
acugaguucccugcucaca

SEQ ID NO: 152699 - RNA, 18 nt, Human
agacaggauccccccccc

SEQ ID NO: 152700 - RNA, 23 nt, Human
agcugggcucgccacucccucug

SEQ ID NO: 152701 - RNA, 20 nt, Human
aggagggagagggggcucag

SEQ ID NO: 152702 - RNA, 23 nt, Human
aggcagagacgagggugggccug

SEQ ID NO: 152703 - RNA, 26 nt, Human
aggcaggcgagugauguccugguuuu

SEQ ID NO: 152704 - RNA, 24 nt, Human
aggcaucagaggcuagaggaggcu

SEQ ID NO: 152705 - RNA, 21 nt, Human
aggccuggggccgcccugccu

SEQ ID NO: 152706 - RNA, 21 nt, Human
aggcucuggaaaagagaaggu

SEQ ID NO: 152707 - RNA, 20 nt, Human
aggcugcugagcccccggcc

SEQ ID NO: 152708 - RNA, 23 nt, Human
aggggugggcugggugcugagaa

SEQ ID NO: 152709 - RNA, 21 nt, Human
agugcugguguccccgcggga

SEQ ID NO: 152710 - RNA, 20 nt, Human
aguggccccuggcuccagcc

SEQ ID NO: 152711 - RNA, 21 nt, Human
augacugugaggauccagagc

SEQ ID NO: 152712 - RNA, 23 nt, Human
auggggagggggggcagggcugg

SEQ ID NO: 152713 - RNA, 20 nt, Human
cacaucauccaccaucaccc

SEQ ID NO: 152714 - RNA, 19 nt, Human
cacaugagaucccaugacc

SEQ ID NO: 152715 - RNA, 23 nt, Human
caccaggguggccaccaaaggcc

SEQ ID NO: 152716 - RNA, 24 nt, Human
caccaucacccacaugugccucca

SEQ ID NO: 152717 - RNA, 18 nt, Human
cacccacaugugccucca

SEQ ID NO: 152718 - RNA, 19 nt, Human
caccccccaccacacacac

SEQ ID NO: 152719 - RNA, 19 nt, Human
caccccccaccacacacac

SEQ ID NO: 152720 - RNA, 20 nt, Human
caccccccaccacacacaca

SEQ ID NO: 152721 - RNA, 31 nt, Human
caccccccaccacacacacacaugcacgcag

SEQ ID NO: 152722 - RNA, 20 nt, Human
caccccucucuccaggccuu

SEQ ID NO: 152723 - RNA, 19 nt, Human
caggcucuggaaaagagaa

SEQ ID NO: 152724 - RNA, 21 nt, Human
cauaacaugcacacguccaug

SEQ ID NO: 152725 - RNA, 18 nt, Human
ccaagcccagcugaggac

SEQ ID NO: 152726 - RNA, 20 nt, Human
ccacacuuuugcaagugcca

SEQ ID NO: 152727 - RNA, 18 nt, Human
ccacaugugccuccagcc

SEQ ID NO: 152728 - RNA, 26 nt, Human
ccaccaucacccacaugugccuccag

SEQ ID NO: 152729 - RNA, 22 nt, Human
ccagaccugagauacagccggg

SEQ ID NO: 152730 - RNA, 21 nt, Human
ccagcaccugagaggagggca

SEQ ID NO: 152731 - RNA, 19 nt, Human
ccagccuccaggugugggg

SEQ ID NO: 152732 - RNA, 23 nt, Human
ccagguccuguggcgaagccuuc

SEQ ID NO: 152733 - RNA, 21 nt, Human
cccacaugugccuccagccuu

SEQ ID NO: 152734 - RNA, 18 nt, Human
ccccaccacacacacaca

SEQ ID NO: 152735 - RNA, 29 nt, Human
ccccaccacacacacacaugcacgcacac

SEQ ID NO: 152736 - RNA, 26 nt, Human
cccccagcgcccuugugggauggugu

SEQ ID NO: 152737 - RNA, 18 nt, Human
ccccuggcuccagccucc

SEQ ID NO: 152738 - RNA, 21 nt, Human
cccgcccccaugggugcugga

SEQ ID NO: 152739 - RNA, 19 nt, Human
cccgcgcgucgggagggag

SEQ ID NO: 152740 - RNA, 22 nt, Human
cccgcgcgucgggagggagcgc

SEQ ID NO: 152741 - RNA, 19 nt, Human
cccggcccuggccaggcag

SEQ ID NO: 152742 - RNA, 18 nt, Human
cccugauccuaggccugg

SEQ ID NO: 152743 - RNA, 19 nt, Human
cccugauccuaggccuggg

SEQ ID NO: 152744 - RNA, 20 nt, Human
cccugcucacacaccuccuc

SEQ ID NO: 152745 - RNA, 21 nt, Human
cccugggugcuuuuuaugugc

SEQ ID NO: 152746 - RNA, 22 nt, Human
ccuccagccuuaacggauaagc

SEQ ID NO: 152747 - RNA, 21 nt, Human
ccucggcuagagggaggaccc

SEQ ID NO: 152748 - RNA, 21 nt, Human
ccuggggccgcccugccugcu

SEQ ID NO: 152749 - RNA, 24 nt, Human
cgaagggguggacacacuugauca

SEQ ID NO: 152750 - RNA, 23 nt, Human
cgacuuccauaggaaggaagaac

SEQ ID NO: 152751 - RNA, 22 nt, Human
cgcggcaccuggauggggcuga

SEQ ID NO: 152752 - RNA, 22 nt, Human
cuaggccugggggacaaagggc

SEQ ID NO: 152753 - RNA, 27 nt, Human
cuccucauucaugacacaucauccacc

SEQ ID NO: 152754 - RNA, 22 nt, Human
cugagaggagggcagaggccug

SEQ ID NO: 152755 - RNA, 19 nt, Human
cugagcccccggcccuggc

SEQ ID NO: 152756 - RNA, 21 nt, Human
cugccaugaugccuccaugaa

SEQ ID NO: 152757 - RNA, 23 nt, Human
cugggcucgccacucccucuggg

SEQ ID NO: 152758 - RNA, 20 nt, Human
gacaagagccuuggcaggag

SEQ ID NO: 152759 - RNA, 18 nt, Human
gaccccugauaacuccag

SEQ ID NO: 152760 - RNA, 23 nt, Human
gaccugggccguggagggaaggc

SEQ ID NO: 152761 - RNA, 21 nt, Human
gaccuggggugggcuuggugg

SEQ ID NO: 152762 - RNA, 22 nt, Human
gaggacaucucaugugcucugc

SEQ ID NO: 152763 - RNA, 19 nt, Human
gaggucagugugagagggg

SEQ ID NO: 152764 - RNA, 18 nt, Human
gauccagagcccagaaau

SEQ ID NO: 152765 - RNA, 25 nt, Human
gcacacguccaugcugagacccgaa

SEQ ID NO: 152766 - RNA, 19 nt, Human
gccaagcccagcugaggac

SEQ ID NO: 152767 - RNA, 20 nt, Human
gccgcugcggcccgcgcguc

SEQ ID NO: 152768 - RNA, 19 nt, Human
gccgggccgggcgggcggg

SEQ ID NO: 152769 - RNA, 20 nt, Human
gccuccucggcuagagggag

SEQ ID NO: 152770 - RNA, 21 nt, Human
gcggcaccuggauggggcuga

SEQ ID NO: 152771 - RNA, 22 nt, Human
gcucagugcugguguccccgcg

SEQ ID NO: 152772 - RNA, 27 nt, Human
gcuggcagggggcacacggugggguuc

SEQ ID NO: 152773 - RNA, 23 nt, Human
ggaaaaaauauucugacauggua

SEQ ID NO: 152774 - RNA, 21 nt, Human
ggaaggggugggcugggugcu

SEQ ID NO: 152775 - RNA, 23 nt, Human
ggcagggcugggcagcugggcuc

SEQ ID NO: 152776 - RNA, 19 nt, Human
ggccuggggccgcccugcc

SEQ ID NO: 152777 - RNA, 24 nt, Human
ggcuauggggagggggggcagggc

SEQ ID NO: 152778 - RNA, 20 nt, Human
gggagcgcgcucccucgcuc

SEQ ID NO: 152779 - RNA, 19 nt, Human
gggagggggggcagggcug

SEQ ID NO: 152780 - RNA, 22 nt, Human
gggagggggggcagggcugggc

SEQ ID NO: 152781 - RNA, 19 nt, Human
gggcagggcugggcagcug

SEQ ID NO: 152782 - RNA, 25 nt, Human
gggcuuccagggcacuuccaccccc

SEQ ID NO: 152783 - RNA, 21 nt, Human
ggggagggggggcagggcugg

SEQ ID NO: 152784 - RNA, 22 nt, Human
gggugggguggggaggaagaca

SEQ ID NO: 152785 - RNA, 25 nt, Human
gggugggguggggaggaagacagga

SEQ ID NO: 152786 - RNA, 20 nt, Human
ggugggcugggugcugagaa

SEQ ID NO: 152787 - RNA, 29 nt, Human
gugaggaaaaaauauucugacaugguaga

SEQ ID NO: 152788 - RNA, 18 nt, Human
gugcuuugaagaccauuu

SEQ ID NO: 152789 - RNA, 18 nt, Human
gugcuuuuuaugugcuuu

SEQ ID NO: 152790 - RNA, 19 nt, Human
guggcugccugggcccugc

SEQ ID NO: 152791 - RNA, 23 nt, Human
gugugagaggggaggggcuucca

SEQ ID NO: 152792 - RNA, 21 nt, Human
guucacaugagaucccaugac

SEQ ID NO: 152793 - RNA, 25 nt, Human
uaacaugcacacguccaugcugaga

SEQ ID NO: 152794 - RNA, 27 nt, Human
uaagcacacgcucauaacaugcacacg

SEQ ID NO: 152795 - RNA, 18 nt, Human
uacaggaaggggugggcu

SEQ ID NO: 152796 - RNA, 24 nt, Human
uaggccugggggacaaagggcagg

SEQ ID NO: 152797 - RNA, 19 nt, Human
ucacacugaguucccugcu

SEQ ID NO: 152798 - RNA, 20 nt, Human
ucacaugagaucccaugacc

SEQ ID NO: 152799 - RNA, 20 nt, Human
ucagggcugggcauugaaag

SEQ ID NO: 152800 - RNA, 20 nt, Human
ucagugugagaggggagggg

SEQ ID NO: 152801 - RNA, 21 nt, Human
ucauccaccaucacccacaug

SEQ ID NO: 152802 - RNA, 26 nt, Human
uccacccccagcgcccuugugggaug

SEQ ID NO: 152803 - RNA, 21 nt, Human
uccaugacugugaggauccag

SEQ ID NO: 152804 - RNA, 24 nt, Human
uccaugacugugaggauccagagc

SEQ ID NO: 152805 - RNA, 21 nt, Human
uccaugcugagacccgaaggg

SEQ ID NO: 152806 - RNA, 20 nt, Human
ucccugauccuaggccuggg

SEQ ID NO: 152807 - RNA, 23 nt, Human
ucccugccugccaacggcccccg

SEQ ID NO: 152808 - RNA, 22 nt, Human
ucccugcucacacaccuccuca

SEQ ID NO: 152809 - RNA, 24 nt, Human
uccuaggccugggggacaaagggc

SEQ ID NO: 152810 - RNA, 19 nt, Human
uccucggcuagagggagga

SEQ ID NO: 152811 - RNA, 21 nt, Human
uccucuggucccugauccuag

SEQ ID NO: 152812 - RNA, 19 nt, Human
ugaaagguuggcgaaggga

SEQ ID NO: 152813 - RNA, 22 nt, Human
ugacguggaggccccaggcucu

SEQ ID NO: 152814 - RNA, 20 nt, Human
ugacugugaggauccagagc

SEQ ID NO: 152815 - RNA, 21 nt, Human
ugagaagauaggauccucugg

SEQ ID NO: 152816 - RNA, 19 nt, Human
ugagaggagggcagaggcc

SEQ ID NO: 152817 - RNA, 22 nt, Human
ugagcccccggcccuggccagg

SEQ ID NO: 152818 - RNA, 22 nt, Human
ugaggauccagagcccagaaau

SEQ ID NO: 152819 - RNA, 18 nt, Human
ugauaacuccagguccug

SEQ ID NO: 152820 - RNA, 18 nt, Human
ugcaggagggagaggggg

SEQ ID NO: 152821 - RNA, 21 nt, Human
ugccaugaugccuccaugaag

SEQ ID NO: 152822 - RNA, 22 nt, Human
ugcccugggggacagguguccu

SEQ ID NO: 152823 - RNA, 19 nt, Human
ugccuccagccuuaacgga

SEQ ID NO: 152824 - RNA, 19 nt, Human
uggcagggggcacacggug

SEQ ID NO: 152825 - RNA, 21 nt, Human
uggccaccaaaggccccuucc

SEQ ID NO: 152826 - RNA, 19 nt, Human
uggccaggcagccaagccc

SEQ ID NO: 152827 - RNA, 19 nt, Human
uggccccuggcuccagccu

SEQ ID NO: 152828 - RNA, 26 nt, Human
uggcgaagggacuuugagugaggaga

SEQ ID NO: 152829 - RNA, 20 nt, Human
uggggaggaagacaggaucc

SEQ ID NO: 152830 - RNA, 21 nt, Human
uggggggacguaggggugagc

SEQ ID NO: 152831 - RNA, 21 nt, Human
uggggugggguggggaggaag

SEQ ID NO: 152832 - RNA, 21 nt, Human
ugguggcugccugggcccugc

SEQ ID NO: 152833 - RNA, 18 nt, Human
ugugagaggggaggggcu

SEQ ID NO: 152834 - RNA, 24 nt, Human
uuauugcaggagggagagggggcu

SEQ ID NO: 152835 - RNA, 21 nt, Human
uucccaggcgccugaccccug

SEQ ID NO: 152836 - RNA, 23 nt, Human
aaacaaaagaaaaacgagguuuu

SEQ ID NO: 152837 - RNA, 19 nt, Human
aacaugcuucugucacugg

SEQ ID NO: 152838 - RNA, 25 nt, Human
aagccgaggcagcagcgccgggaga

SEQ ID NO: 152839 - RNA, 19 nt, Human
aaggagaaaagaaaagaau

SEQ ID NO: 152840 - RNA, 22 nt, Human
aauuugugguuucuuuuuccuu

SEQ ID NO: 152841 - RNA, 21 nt, Human
acaucuggagacucaggagcu

SEQ ID NO: 152842 - RNA, 24 nt, Human
acccugguccuuuucccuccucuc

SEQ ID NO: 152843 - RNA, 23 nt, Human
agaacaacaucuggagacucagg

SEQ ID NO: 152844 - RNA, 19 nt, Human
agcuggguuuacucuuguu

SEQ ID NO: 152845 - RNA, 24 nt, Human
caaccucuggucccccuugacccu

SEQ ID NO: 152846 - RNA, 20 nt, Human
caucucaaacaugcuucugu

SEQ ID NO: 152847 - RNA, 20 nt, Human
caugcaguggucagcaaagu

SEQ ID NO: 152848 - RNA, 21 nt, Human
cccgcaggccgagaccaagcc

SEQ ID NO: 152849 - RNA, 22 nt, Human
cccggaccggacuucccggagc

SEQ ID NO: 152850 - RNA, 23 nt, Human
ccgcugcgcucuccgcggguggc

SEQ ID NO: 152851 - RNA, 18 nt, Human
ccuccuucccuuucuucc

SEQ ID NO: 152852 - RNA, 18 nt, Human
ccuccuucccuuucuucc

SEQ ID NO: 152853 - RNA, 24 nt, Human
ccucuccuuccccaagaaacaaga

SEQ ID NO: 152854 - RNA, 22 nt, Human
ccugugguugggcaacugcagc

SEQ ID NO: 152855 - RNA, 19 nt, Human
ccuuucuuccugugguugg

SEQ ID NO: 152856 - RNA, 18 nt, Human
ccuuuucccuccucuccu

SEQ ID NO: 152857 - RNA, 23 nt, Human
ccuuuucccuccucuccuucccc

SEQ ID NO: 152858 - RNA, 18 nt, Human
cgaggcagcagcgccggg

SEQ ID NO: 152859 - RNA, 20 nt, Human
cgcugcgugggcgugggcag

SEQ ID NO: 152860 - RNA, 21 nt, Human
cggagcgcugcgugggcgugg

SEQ ID NO: 152861 - RNA, 24 nt, Human
cuucuucaauaugaagacauuaau

SEQ ID NO: 152862 - RNA, 18 nt, Human
gaagggaggggacucuca

SEQ ID NO: 152863 - RNA, 18 nt, Human
gacagaacaacaucugga

SEQ ID NO: 152864 - RNA, 22 nt, Human
gcccggaccggacuucccggag

SEQ ID NO: 152865 - RNA, 19 nt, Human
gcggugcgggcgcgcgugg

SEQ ID NO: 152866 - RNA, 24 nt, Human
gcguggggcggugcgggcgcgcgu

SEQ ID NO: 152867 - RNA, 25 nt, Human
gggaggggacucucagggaggagua

SEQ ID NO: 152868 - RNA, 23 nt, Human
gggcgcgcgugggugugggugug

SEQ ID NO: 152869 - RNA, 20 nt, Human
guccuuuucccuccucucca

SEQ ID NO: 152870 - RNA, 18 nt, Human
gugaggaagaaaauggaa

SEQ ID NO: 152871 - RNA, 21 nt, Human
gugcgggcgcgcgugggugug

SEQ ID NO: 152872 - RNA, 20 nt, Human
guuucuuuuuccuuuuugca

SEQ ID NO: 152873 - RNA, 20 nt, Human
uaccuccuucccuuucuucc

SEQ ID NO: 152874 - RNA, 21 nt, Human
uacucuuguucuccugaugca

SEQ ID NO: 152875 - RNA, 21 nt, Human
uauauuugguuucccacggca

SEQ ID NO: 152876 - RNA, 22 nt, Human
uccaguacauuccacagugguc

SEQ ID NO: 152877 - RNA, 21 nt, Human
uccugugguugggcaacugca

SEQ ID NO: 152878 - RNA, 19 nt, Human
uccuuuucccuccucuccu

SEQ ID NO: 152879 - RNA, 22 nt, Human
ucuaccuccuucccuuucuucc

SEQ ID NO: 152880 - RNA, 22 nt, Human
ucuggagacucaggagcugggu

SEQ ID NO: 152881 - RNA, 19 nt, Human
ucuggucccccuugacccu

SEQ ID NO: 152882 - RNA, 22 nt, Human
ucuguuucuucccucuaccucc

SEQ ID NO: 152883 - RNA, 21 nt, Human
ugacagaacaacaucuggaga

SEQ ID NO: 152884 - RNA, 20 nt, Human
ugacccugguccuuuucccu

SEQ ID NO: 152885 - RNA, 18 nt, Human
ugagcaaagggaaacgag

SEQ ID NO: 152886 - RNA, 21 nt, Human
ugagcaaagggaaacgagugu

SEQ ID NO: 152887 - RNA, 24 nt, Human
ugcagaaaaugcaaacaaaagaaa

SEQ ID NO: 152888 - RNA, 20 nt, Human
ugcgugggcgugggcaggag

SEQ ID NO: 152889 - RNA, 19 nt, Human
ugggagaagggaggggacu

SEQ ID NO: 152890 - RNA, 20 nt, Human
ugggugugggugugcaugug

SEQ ID NO: 152891 - RNA, 18 nt, Human
uggugaggaagaaaaugg

SEQ ID NO: 152892 - RNA, 23 nt, Human
uguuugaagaaacuucccuacag

SEQ ID NO: 152893 - RNA, 18 nt, Human
uuauauauuugguuuccc

SEQ ID NO: 152894 - RNA, 21 nt, Human
uucacuucuguugaacaucac

SEQ ID NO: 152895 - RNA, 23 nt, Human
uuuuuccuuuuugcagaaaaugc

SEQ ID NO: 152896 - RNA, 28 nt, Human
aaaaaacaacccaacaaacaaacccccc

SEQ ID NO: 152897 - RNA, 28 nt, Human
aaaaaacaacccaacaaacaaacccccc

SEQ ID NO: 152898 - RNA, 22 nt, Human
aaaaaaccaaaaaacaaaaaac

SEQ ID NO: 152899 - RNA, 22 nt, Human
aaaaaaccaaaaaacaaaaaac

SEQ ID NO: 152900 - RNA, 22 nt, Human
aaaaauuggugaagguuaugaa

SEQ ID NO: 152901 - RNA, 21 nt, Human
aaaagaaacaacaaacaugug

SEQ ID NO: 152902 - RNA, 20 nt, Human
aaacaaacccccuaaaccaa

SEQ ID NO: 152903 - RNA, 20 nt, Human
aaacaaacccccuaaaccaa

SEQ ID NO: 152904 - RNA, 22 nt, Human
aaacaaacccccuaaaccaaaa

SEQ ID NO: 152905 - RNA, 22 nt, Human
aaacaaacccccuaaaccaaaa

SEQ ID NO: 152906 - RNA, 22 nt, Human
aaacaacccaacaaacaaaccc

SEQ ID NO: 152907 - RNA, 22 nt, Human
aaacaacccaacaaacaaaccc

SEQ ID NO: 152908 - RNA, 23 nt, Human
aaaccaaaaccacccugugacca

SEQ ID NO: 152909 - RNA, 23 nt, Human
aaaccaaaaccacccugugacca

SEQ ID NO: 152910 - RNA, 21 nt, Human
aaaccacccugugaccaaaau

SEQ ID NO: 152911 - RNA, 21 nt, Human
aaaccacccugugaccaaaau

SEQ ID NO: 152912 - RNA, 25 nt, Human
aaacccccuaaaccaaaaccacccu

SEQ ID NO: 152913 - RNA, 25 nt, Human
aaacccccuaaaccaaaaccacccu

SEQ ID NO: 152914 - RNA, 24 nt, Human
aacaaacaaacccccuaaaccaaa

SEQ ID NO: 152915 - RNA, 24 nt, Human
aacaaacaaacccccuaaaccaaa

SEQ ID NO: 152916 - RNA, 25 nt, Human
aacaaacauguggccaacaaacaua

SEQ ID NO: 152917 - RNA, 26 nt, Human
aacaacaaacauguggccaacaaaca

SEQ ID NO: 152918 - RNA, 27 nt, Human
aacaacaaacauguggccaacaaacau

SEQ ID NO: 152919 - RNA, 24 nt, Human
aacaacccaacaaacaaacccccu

SEQ ID NO: 152920 - RNA, 24 nt, Human
aacaaccucaucaaaaauugguga

SEQ ID NO: 152921 - RNA, 19 nt, Human
aaccaaaaaacaaaaaaca

SEQ ID NO: 152922 - RNA, 19 nt, Human
aaccaaaaaacaaaaaaca

SEQ ID NO: 152923 - RNA, 20 nt, Human
aaccaaaaaacaaaaaacaa

SEQ ID NO: 152924 - RNA, 20 nt, Human
aaccaaaaaacaaaaaacaa

SEQ ID NO: 152925 - RNA, 23 nt, Human
aaccagaaaaaccauuugaccca

SEQ ID NO: 152926 - RNA, 24 nt, Human
aaccagaaaaaccauuugacccag

SEQ ID NO: 152927 - RNA, 23 nt, Human
aacccacaaugagauaccaucuc

SEQ ID NO: 152928 - RNA, 20 nt, Human
aacuugguuucauucucccu

SEQ ID NO: 152929 - RNA, 20 nt, Human
aauagauuuucccagagggg

SEQ ID NO: 152930 - RNA, 23 nt, Human
aauugcuguaaacaaacccagau

SEQ ID NO: 152931 - RNA, 23 nt, Human
aauugcuguaaacaaacccagau

SEQ ID NO: 152932 - RNA, 22 nt, Human
acaaaaaacaacccaacaaaca

SEQ ID NO: 152933 - RNA, 22 nt, Human
acaaaaaacaacccaacaaaca

SEQ ID NO: 152934 - RNA, 18 nt, Human
acaaacaaccucaucaaa

SEQ ID NO: 152935 - RNA, 25 nt, Human
acaacaaacauguggccaacaaaca

SEQ ID NO: 152936 - RNA, 19 nt, Human
acaacccaacaaacaaacc

SEQ ID NO: 152937 - RNA, 19 nt, Human
acaacccaacaaacaaacc

SEQ ID NO: 152938 - RNA, 23 nt, Human
acaacccaacaaacaaacccccu

SEQ ID NO: 152939 - RNA, 21 nt, Human
accaaaaaacaaaaaacaacc

SEQ ID NO: 152940 - RNA, 21 nt, Human
accaaaaaacaaaaaacaacc

SEQ ID NO: 152941 - RNA, 27 nt, Human
agaaaagaacaaacaaccucaucaaaa

SEQ ID NO: 152942 - RNA, 18 nt, Human
agauagauuggggcagga

SEQ ID NO: 152943 - RNA, 21 nt, Human
agauagauuggggcaggagag

SEQ ID NO: 152944 - RNA, 20 nt, Human
agauuggggcaggagagugg

SEQ ID NO: 152945 - RNA, 18 nt, Human
agcaaaggucuggugggg

SEQ ID NO: 152946 - RNA, 19 nt, Human
agccaagggcggccccugu

SEQ ID NO: 152947 - RNA, 20 nt, Human
agccaagggcggccccuguc

SEQ ID NO: 152948 - RNA, 20 nt, Human
agggaagagugucaaugaaa

SEQ ID NO: 152949 - RNA, 19 nt, Human
agggcacucaggagccuca

SEQ ID NO: 152950 - RNA, 24 nt, Human
agggguucucaggguggcugucug

SEQ ID NO: 152951 - RNA, 24 nt, Human
agggguucucaggguggcugucug

SEQ ID NO: 152952 - RNA, 19 nt, Human
aggugggaggagggaagag

SEQ ID NO: 152953 - RNA, 24 nt, Human
aguggcuggcccugcaguggauag

SEQ ID NO: 152954 - RNA, 18 nt, Human
auagagcaccaggagggc

SEQ ID NO: 152955 - RNA, 23 nt, Human
auuucuccuuugcuuaugaagcu

SEQ ID NO: 152956 - RNA, 30 nt, Human
caaaaaacaacccaacaaacaaaccccccc

SEQ ID NO: 152957 - RNA, 30 nt, Human; identical to SEQ ID NO: 152956

SEQ ID NO: 152958 - RNA, 18 nt, Human
caaaaccacccugugacc

SEQ ID NO: 152959 - RNA, 18 nt, Human
caaaaccacccugugacc

SEQ ID NO: 152960 - RNA, 19 nt, Human
caaaaccacccugugacca

SEQ ID NO: 152961 - RNA, 19 nt, Human
caaaaccacccugugacca

SEQ ID NO: 152962 - RNA, 20 nt, Human
caaaaccacccugugaccaa

SEQ ID NO: 152963 - RNA, 20 nt, Human
caaaaccacccugugaccaa

SEQ ID NO: 152964 - RNA, 22 nt, Human
caaaauacccccgaguccagga

SEQ ID NO: 152965 - RNA, 22 nt, Human
caaaauacccccgaguccagga

SEQ ID NO: 152966 - RNA, 25 nt, Human
caaacccccuaaaccaaaaccaccc

SEQ ID NO: 152967 - RNA, 26 nt, Human
caaacccccuaaaccaaaaccacccu

SEQ ID NO: 152968 - RNA, 25 nt, Human
caacccaacaaacaaacccccuaaa

SEQ ID NO: 152969 - RNA, 25 nt, Human
caacccaacaaacaaacccccuaaa

SEQ ID NO: 152970 - RNA, 22 nt, Human
caagaaaagaacaaacaaccuc

SEQ ID NO: 152971 - RNA, 27 nt, Human
caaguccucaaaagguaggaaauguca

SEQ ID NO: 152972 - RNA, 25 nt, Human
cacaaugagauaccaucucacacca

SEQ ID NO: 152973 - RNA, 19 nt, Human
cacacccaaaucucacucc

SEQ ID NO: 152974 - RNA, 21 nt, Human
cacacuuucucuccagggaag

SEQ ID NO: 152975 - RNA, 18 nt, Human
cacgugagaugggucucc

SEQ ID NO: 152976 - RNA, 19 nt, Human
cagaucccuagacugaggg

SEQ ID NO: 152977 - RNA, 19 nt, Human
cagcaaaggucuggugggg

SEQ ID NO: 152978 - RNA, 21 nt, Human
cagccucagagcccacuuccu

SEQ ID NO: 152979 - RNA, 20 nt, Human
cagcggcagucggagcugac

SEQ ID NO: 152980 - RNA, 20 nt, Human
cagcggcagucggagcugac

SEQ ID NO: 152981 - RNA, 19 nt, Human
caggaaacaacagaugcug

SEQ ID NO: 152982 - RNA, 23 nt, Human
caggaaacaacagaugcuggaga

SEQ ID NO: 152983 - RNA, 22 nt, Human
caggaucaacccuucucagcgg

SEQ ID NO: 152984 - RNA, 23 nt, Human
caggggcuggcgggagugggcac

SEQ ID NO: 152985 - RNA, 23 nt, Human
caggggcuggcgggagugggcac

SEQ ID NO: 152986 - RNA, 19 nt, Human
cagucggagcugacggcag

SEQ ID NO: 152987 - RNA, 19 nt, Human
cagucggagcugacggcag

SEQ ID NO: 152988 - RNA, 22 nt, Human
cagugucuuucauuggaguuuc

SEQ ID NO: 152989 - RNA, 22 nt, Human
cagugucuuucauuggaguuuc

SEQ ID NO: 152990 - RNA, 21 nt, Human
cauggccaagaccuuuaggcc

SEQ ID NO: 152991 - RNA, 23 nt, Human
cauggccaagaccuuuaggcccc

SEQ ID NO: 152992 - RNA, 21 nt, Human
cauuaaaaagucaggaaacaa

SEQ ID NO: 152993 - RNA, 20 nt, Human
ccaaaaaacaaaaaacaacc

SEQ ID NO: 152994 - RNA, 20 nt, Human
ccaaaaaacaaaaaacaacc

SEQ ID NO: 152995 - RNA, 24 nt, Human
ccaaaauacccccgaguccaggaa

SEQ ID NO: 152996 - RNA, 25 nt, Human
ccaaaauacccccgaguccaggaau

SEQ ID NO: 152997 - RNA, 23 nt, Human
ccacacccaaaucucacuccagu

SEQ ID NO: 152998 - RNA, 18 nt, Human
ccagauggccccauggca

SEQ ID NO: 152999 - RNA, 22 nt, Human
cccaacaaacaaacccccuaaa

SEQ ID NO: 153000 - RNA, 22 nt, Human
cccaacaaacaaacccccuaaa

SEQ ID NO: 153001 - RNA, 25 nt, Human
cccaacaaacaaacccccuaaacca

SEQ ID NO: 153002 - RNA, 25 nt, Human
cccaacaaacaaacccccuaaacca

SEQ ID NO: 153003 - RNA, 30 nt, Human
cccaacaaacaaacccccuaaaccaaaacc

SEQ ID NO: 153004 - RNA, 30 nt, Human; identical to SEQ ID NO: 153003

SEQ ID NO: 153005 - RNA, 20 nt, Human
cccagcaaaggucugguggg

SEQ ID NO: 153006 - RNA, 22 nt, Human
cccauggccaagaccuuuaggc

SEQ ID NO: 153007 - RNA, 20 nt, Human
cccauucccuuuuuuuuucc

SEQ ID NO: 153008 - RNA, 19 nt, Human
ccccgaguccaggaauugc

SEQ ID NO: 153009 - RNA, 19 nt, Human
ccccgaguccaggaauugc

SEQ ID NO: 153010 - RNA, 27 nt, Human
ccccuaaaccaaaaccacccugugacc

SEQ ID NO: 153011 - RNA, 27 nt, Human
ccccuaaaccaaaaccacccugugacc

SEQ ID NO: 153012 - RNA, 21 nt, Human
ccccugucucuccccuucaca

SEQ ID NO: 153013 - RNA, 21 nt, Human
ccccugucucuccccuucaca

SEQ ID NO: 153014 - RNA, 26 nt, Human
cccuccacacccaaaucucacuccag

SEQ ID NO: 153015 - RNA, 22 nt, Human
cccucuggagggcaggguauca

SEQ ID NO: 153016 - RNA, 23 nt, Human
cccugcaguggauagagcaccag

SEQ ID NO: 153017 - RNA, 22 nt, Human
ccgauuggacacaucgcaugaa

SEQ ID NO: 153018 - RNA, 22 nt, Human
ccgauuggacacaucgcaugaa

SEQ ID NO: 153019 - RNA, 22 nt, Human
ccuaaaccaaaaccacccugug

SEQ ID NO: 153020 - RNA, 19 nt, Human
ccucagagcccacuuccuc

SEQ ID NO: 153021 - RNA, 20 nt, Human
ccucagagcccacuuccucc

SEQ ID NO: 153022 - RNA, 18 nt, Human
ccucccccuccacaccca

SEQ ID NO: 153023 - RNA, 22 nt, Human
ccucccccuccacacccaaauc

SEQ ID NO: 153024 - RNA, 24 nt, Human
ccugaagaguguuuuccaacuugg

SEQ ID NO: 153025 - RNA, 24 nt, Human
ccugcaguggauagagccgggguc

SEQ ID NO: 153026 - RNA, 18 nt, Human
ccuuguauuucccgcccc

SEQ ID NO: 153027 - RNA, 26 nt, Human
cuaaaauacucuccaaagacagaaaa

SEQ ID NO: 153028 - RNA, 23 nt, Human
cuagaaccagaaaaaccauuuga

SEQ ID NO: 153029 - RNA, 20 nt, Human
cucaaaagaaacaacaaaca

SEQ ID NO: 153030 - RNA, 19 nt, Human
cuccacacccaaaucucac

SEQ ID NO: 153031 - RNA, 22 nt, Human
cugaaaguguuucuuggcucug

SEQ ID NO: 153032 - RNA, 22 nt, Human
cugaaaguguuucuuggcucug

SEQ ID NO: 153033 - RNA, 28 nt, Human
cugagggcacucaggagccucaaagggg

SEQ ID NO: 153034 - RNA, 18 nt, Human
cuggccaggucaccuucc

SEQ ID NO: 153035 - RNA, 18 nt, Human
cuucucaaaagaaacaac

SEQ ID NO: 153036 - RNA, 18 nt, Human
cuuguaaggcaggccugg

SEQ ID NO: 153037 - RNA, 23 nt, Human
cuuugcacgugagaugggucucc

SEQ ID NO: 153038 - RNA, 21 nt, Human
gaaaaccguauaaaaaaaucc

SEQ ID NO: 153039 - RNA, 26 nt, Human
gaaacaacaaacauguggccaacaaa

SEQ ID NO: 153040 - RNA, 23 nt, Human
gaagcuccuccaccuuggcgccu

SEQ ID NO: 153041 - RNA, 22 nt, Human
gagaaaugcaaaucaaacccac

SEQ ID NO: 153042 - RNA, 26 nt, Human
gaggaagaggugagccgaggcaggug

SEQ ID NO: 153043 - RNA, 20 nt, Human
gaguuucuaaaauacucucc

SEQ ID NO: 153044 - RNA, 20 nt, Human
gaguuucuaaaauacucucc

SEQ ID NO: 153045 - RNA, 18 nt, Human
gaucaaguccucaaaagg

SEQ ID NO: 153046 - RNA, 20 nt, Human
gcacccucuggagggcaggg

SEQ ID NO: 153047 - RNA, 22 nt, Human
gcccagauggccccauggcagu

SEQ ID NO: 153048 - RNA, 20 nt, Human
gccccugucucuccccuuca

SEQ ID NO: 153049 - RNA, 20 nt, Human
gccccugucucuccccuuca

SEQ ID NO: 153050 - RNA, 21 nt, Human
gccccugucucuccccuucac

SEQ ID NO: 153051 - RNA, 21 nt, Human
gccccugucucuccccuucac

SEQ ID NO: 153052 - RNA, 22 nt, Human
gcgggagugggcaccaggaggg

SEQ ID NO: 153053 - RNA, 22 nt, Human
gcgggagugggcaccaggaggg

SEQ ID NO: 153054 - RNA, 20 nt, Human
ggaucaacccuucucagcgg

SEQ ID NO: 153055 - RNA, 21 nt, Human
ggcgaguggcuggcccugcag

SEQ ID NO: 153056 - RNA, 20 nt, Human
ggcucuggccaggucaccuu

SEQ ID NO: 153057 - RNA, 20 nt, Human
ggcucuggccaggucaccuu

SEQ ID NO: 153058 - RNA, 21 nt, Human
gggaaggaggugggagagaaa

SEQ ID NO: 153059 - RNA, 19 nt, Human
gggcagagggggcggggcu

SEQ ID NO: 153060 - RNA, 19 nt, Human
gggcagagggggcggggcu

SEQ ID NO: 153061 - RNA, 19 nt, Human
ggggcagagggggcggggc

SEQ ID NO: 153062 - RNA, 24 nt, Human
ggggcagagggggcggggcuugga

SEQ ID NO: 153063 - RNA, 18 nt, Human
ggguuuugaccaucugag

SEQ ID NO: 153064 - RNA, 25 nt, Human
ggucaccuucccagagggaguugga

SEQ ID NO: 153065 - RNA, 25 nt, Human
ggucaccuucccagagggaguugga

SEQ ID NO: 153066 - RNA, 21 nt, Human
gguucacaggagggagucugu

SEQ ID NO: 153067 - RNA, 20 nt, Human
guaaggcaggccugguggug

SEQ ID NO: 153068 - RNA, 23 nt, Human
gugaaugauccggguccuggccu

SEQ ID NO: 153069 - RNA, 23 nt, Human
guucuucccguggcccguggccu

SEQ ID NO: 153070 - RNA, 18 nt, Human
uaaaaaaaaccaaaaaac

SEQ ID NO: 153071 - RNA, 21 nt, Human
uaaaaaaaaccaaaaaacaaa

SEQ ID NO: 153072 - RNA, 24 nt, Human
uaaaaaaaaccaaaaaacaaaaaa

SEQ ID NO: 153073 - RNA, 24 nt, Human
uaaaaaaaaccaaaaaacaaaaaa

SEQ ID NO: 153074 - RNA, 25 nt, Human
uaaaauacucuccaaagacagaaaa

SEQ ID NO: 153075 - RNA, 24 nt, Human
uacaagaaaagaacaaacaaccuc

SEQ ID NO: 153076 - RNA, 20 nt, Human
uaggcccagcaaaggucugg

SEQ ID NO: 153077 - RNA, 21 nt, Human
uaugaacagacacuucucaaa

SEQ ID NO: 153078 - RNA, 30 nt, Human
ucaaaagaaacaacaaacauguggccaacc

SEQ ID NO: 153079 - RNA, 18 nt, Human
ucaaccuuggugaaucug

SEQ ID NO: 153080 - RNA, 23 nt, Human
ucaauggucucuacaauuugggg

SEQ ID NO: 153081 - RNA, 23 nt, Human
ucaguaagcagaaagcaccuucu

SEQ ID NO: 153082 - RNA, 19 nt, Human
uccaaagacagaaaaauuc

SEQ ID NO: 153083 - RNA, 19 nt, Human
ucccagagggaaaacuggg

SEQ ID NO: 153084 - RNA, 19 nt, Human
ucccagagggguucucagg

SEQ ID NO: 153085 - RNA, 19 nt, Human
ucccagagggguucucagg

SEQ ID NO: 153086 - RNA, 26 nt, Human
ucccaggaucuguuuucuuuuuuccc

SEQ ID NO: 153087 - RNA, 26 nt, Human
ucccuuuuuuuuuccgucguuugagu

SEQ ID NO: 153088 - RNA, 18 nt, Human
uccuggcgaguggcuggc

SEQ ID NO: 153089 - RNA, 22 nt, Human
ucuaaaauacucuccaaagaca

SEQ ID NO: 153090 - RNA, 22 nt, Human
ucuaaaauacucuccaaagaca

SEQ ID NO: 153091 - RNA, 23 nt, Human
ucucugaauggcccagauggccc

SEQ ID NO: 153092 - RNA, 19 nt, Human
ucucugagcgcacccucug

SEQ ID NO: 153093 - RNA, 19 nt, Human
ucugagcgcacccucugga

SEQ ID NO: 153094 - RNA, 20 nt, Human
ucuguggccagaucccuaga

SEQ ID NO: 153095 - RNA, 21 nt, Human
ugaaaaaaagcucaucuucac

SEQ ID NO: 153096 - RNA, 19 nt, Human
ugaacguuggucugucuug

SEQ ID NO: 153097 - RNA, 19 nt, Human
ugaagaguguuuuccaacu

SEQ ID NO: 153098 - RNA, 21 nt, Human
ugaagaguguuuuccaacuug

SEQ ID NO: 153099 - RNA, 18 nt, Human
ugaauacggcacaccaau

SEQ ID NO: 153100 - RNA, 24 nt, Human
ugaccaaaauacccccgaguccag

SEQ ID NO: 153101 - RNA, 24 nt, Human
ugaccaaaauacccccgaguccag

SEQ ID NO: 153102 - RNA, 19 nt, Human
ugaggccuagaggagcagc

SEQ ID NO: 153103 - RNA, 19 nt, Human
ugaggccuagaggagcagc

SEQ ID NO: 153104 - RNA, 19 nt, Human
ugauccggguccuggccuc

SEQ ID NO: 153105 - RNA, 24 nt, Human
ugcaguaucaguccucgaggcagg

SEQ ID NO: 153106 - RNA, 24 nt, Human
ugcaguaucaguccucgaggcagg

SEQ ID NO: 153107 - RNA, 24 nt, Human
ugcccgugucucugagcgcacccu

SEQ ID NO: 153108 - RNA, 18 nt, Human
uggaaaugucaaaguguc

SEQ ID NO: 153109 - RNA, 18 nt, Human
uggcaaucauuaaaaagu

SEQ ID NO: 153110 - RNA, 18 nt, Human
uggcaccgcuugguucuu

SEQ ID NO: 153111 - RNA, 23 nt, Human
uggcaggaauagauuuucccaga

SEQ ID NO: 153112 - RNA, 23 nt, Human
uggcaggaauagauuuucccaga

SEQ ID NO: 153113 - RNA, 22 nt, Human
uggcagugggcuuuggugaggc

SEQ ID NO: 153114 - RNA, 24 nt, Human
uggcagugggcuuuggugaggccu

SEQ ID NO: 153115 - RNA, 22 nt, Human
uggccaggucaccuucccagag

SEQ ID NO: 153116 - RNA, 22 nt, Human
uggccaggucaccuucccagag

SEQ ID NO: 153117 - RNA, 24 nt, Human
uggccaggucaccuucccagaggg

SEQ ID NO: 153118 - RNA, 24 nt, Human
uggccaggucaccuucccagaggg

SEQ ID NO: 153119 - RNA, 20 nt, Human
uggcccguggccuccuggcg

SEQ ID NO: 153120 - RNA, 22 nt, Human
ugggaagugggcaaggacuucc

SEQ ID NO: 153121 - RNA, 18 nt, Human
uggggggaaggagguggg

SEQ ID NO: 153122 - RNA, 21 nt, Human
ugguggcaggugggaggaggg

SEQ ID NO: 153123 - RNA, 25 nt, Human
ugucuuugcacgugagaugggucuc

SEQ ID NO: 153124 - RNA, 24 nt, Human
ugugagccaacaggagaaacagug

SEQ ID NO: 153125 - RNA, 24 nt, Human
ugugagccaacaggagaaacagug

SEQ ID NO: 153126 - RNA, 19 nt, Human
uguuucuuggcucuggcca

SEQ ID NO: 153127 - RNA, 19 nt, Human
uguuucuuggcucuggcca

SEQ ID NO: 153128 - RNA, 19 nt, Human
uuaaaaaaaaccaaaaaac

SEQ ID NO: 153129 - RNA, 19 nt, Human
uuaaaaaaaaccaaaaaac

SEQ ID NO: 153130 - RNA, 24 nt, Human
uuaaccaauuugccagucugcguc

SEQ ID NO: 153131 - RNA, 22 nt, Human
uuacuggguacauacccagagg

SEQ ID NO: 153132 - RNA, 24 nt, Human
uucaaccuuggugaaucugacaau

SEQ ID NO: 153133 - RNA, 22 nt, Human
uuccauauuuagugcuuccuuc

SEQ ID NO: 153134 - RNA, 19 nt, Human
uuccugaauuugaacguug

SEQ ID NO: 153135 - RNA, 24 nt, Human
uucuuggcucuggccaggucaccu

SEQ ID NO: 153136 - RNA, 18 nt, Human
uuguuuguuccuuuucau

SEQ ID NO: 153137 - RNA, 23 nt, Human
uuucccauucccuuuuuuuuucc

SEQ ID NO: 153138 - RNA, 18 nt, Human
uuugccagucugcgucuu

SEQ ID NO: 153139 - RNA, 21 nt, Human
uuugcccauuaguugacacgg

SEQ ID NO: 153140 - RNA, 23 nt, Human
uuuggugaggccugguggcaggu

SEQ ID NO: 153141 - RNA, 24 nt, Human
uuuucuuuuuucccauucccuuuu

SEQ ID NO: 153142 - RNA, 18 nt, Human
uuuuuuuuuuuuuuuuug

SEQ ID NO: 153143 - RNA, 28 nt, Human
uuuuuuuuuuuuuuuuuuuuuuuggggg

SEQ ID NO: 153144 - RNA, 20 nt, Human
aagaguccgaaaguccagcc

SEQ ID NO: 153145 - RNA, 18 nt, Human
aagcuuuuacacgcucac

SEQ ID NO: 153146 - RNA, 21 nt, Human
acacacacacacacucacaca

SEQ ID NO: 153147 - RNA, 24 nt, Human
acacacacacacacucacacaucc

SEQ ID NO: 153148 - RNA, 22 nt, Human
acacacacacgcgcgcgcgcgc

SEQ ID NO: 153149 - RNA, 19 nt, Human
agcuucugggccacagccu

SEQ ID NO: 153150 - RNA, 21 nt, Human
aggacaaaucccugugcaaac

SEQ ID NO: 153151 - RNA, 19 nt, Human
aucacccccucuccuaauc

SEQ ID NO: 153152 - RNA, 20 nt, Human
aucccugugcaaacuggagg

SEQ ID NO: 153153 - RNA, 24 nt, Human
caaacuuccagcuucugggccaca

SEQ ID NO: 153154 - RNA, 20 nt, Human
caacuccucagccugccccu

SEQ ID NO: 153155 - RNA, 22 nt, Human
caagggcggggguggggacagg

SEQ ID NO: 153156 - RNA, 27 nt, Human
cacacacacacacacacucacacaucc

SEQ ID NO: 153157 - RNA, 18 nt, Human
cacacacgcgcgcgcgcg

SEQ ID NO: 153158 - RNA, 22 nt, Human
cacacacucacacaucccaucu

SEQ ID NO: 153159 - RNA, 20 nt, Human
cacacgcgcgcgcgcgcgca

SEQ ID NO: 153160 - RNA, 22 nt, Human
cacagccuaaggccaggcaucc

SEQ ID NO: 153161 - RNA, 24 nt, Human
cacagccuaaggccaggcauccaa

SEQ ID NO: 153162 - RNA, 19 nt, Human
cacccccucuccuaaucca

SEQ ID NO: 153163 - RNA, 18 nt, Human
cacgcgcgcgcgcgcgca

SEQ ID NO: 153164 - RNA, 22 nt, Human
cagcuggccccauuguagggca

SEQ ID NO: 153165 - RNA, 22 nt, Human
cagucucuggggggcaaagggc

SEQ ID NO: 153166 - RNA, 19 nt, Human
cauccaaaaguccaagagu

SEQ ID NO: 153167 - RNA, 25 nt, Human
caucucuggcucugagagucagucu

SEQ ID NO: 153168 - RNA, 18 nt, Human
ccagccggcugcuuggca

SEQ ID NO: 153169 - RNA, 23 nt, Human
ccagcuggccccauuguagggca

SEQ ID NO: 153170 - RNA, 21 nt, Human
ccagcuucugggccacagccu

SEQ ID NO: 153171 - RNA, 24 nt, Human
ccaguuccugagggagggacugcu

SEQ ID NO: 153172 - RNA, 22 nt, Human
cccagccugacccugccaggac

SEQ ID NO: 153173 - RNA, 27 nt, Human
ccccauuccuggaguccccuccuccag

SEQ ID NO: 153174 - RNA, 21 nt, Human
ccccugcuggagagcaggaag

SEQ ID NO: 153175 - RNA, 18 nt, Human
cccucagcccccaggaca

SEQ ID NO: 153176 - RNA, 21 nt, Human
ccucagccugccccugccugc

SEQ ID NO: 153177 - RNA, 22 nt, Human
ccugcccuuuuaugacagcacc

SEQ ID NO: 153178 - RNA, 23 nt, Human
ccuguggaaccccggcuuacccc

SEQ ID NO: 153179 - RNA, 24 nt, Human
ccuguggaaccccggcuuacccca

SEQ ID NO: 153180 - RNA, 20 nt, Human
cgcacacacacacacacaca

SEQ ID NO: 153181 - RNA, 23 nt, Human
cgccuaccuggggggccagaccc

SEQ ID NO: 153182 - RNA, 27 nt, Human
cgcgcacacacacacacacacacucac

SEQ ID NO: 153183 - RNA, 25 nt, Human
cgugcacacacacacgcgcgcgcgc

SEQ ID NO: 153184 - RNA, 26 nt, Human
cuccagcacugaagaacaggguaccc

SEQ ID NO: 153185 - RNA, 18 nt, Human
cucuccgccuaccugggg

SEQ ID NO: 153186 - RNA, 22 nt, Human
cugaagaacagacaagugugaa

SEQ ID NO: 153187 - RNA, 21 nt, Human
cugccccugccugcccuuuua

SEQ ID NO: 153188 - RNA, 23 nt, Human
cuggaguccccuccuccaguucc

SEQ ID NO: 153189 - RNA, 22 nt, Human
cugggcccuguggaaccccggc

SEQ ID NO: 153190 - RNA, 23 nt, Human
gaacacaggccuggagaaguccc

SEQ ID NO: 153191 - RNA, 18 nt, Human
gagagcaggaaggucugg

SEQ ID NO: 153192 - RNA, 22 nt, Human
gagcaggaaggucugggcccuu

SEQ ID NO: 153193 - RNA, 20 nt, Human
gccaggaccuccagcacuga

SEQ ID NO: 153194 - RNA, 24 nt, Human
gcgcgcacacacacacacacacac

SEQ ID NO: 153195 - RNA, 21 nt, Human
gcucacccaugcucucugugc

SEQ ID NO: 153196 - RNA, 22 nt, Human
ggaccuccagcacugaagaaca

SEQ ID NO: 153197 - RNA, 20 nt, Human
gggagggaacacaggccugg

SEQ ID NO: 153198 - RNA, 22 nt, Human
gggcccuguggaaccccggcuu

SEQ ID NO: 153199 - RNA, 21 nt, Human
gggcggggguggggacagggc

SEQ ID NO: 153200 - RNA, 22 nt, Human
gggcggggguggggacagggcc

SEQ ID NO: 153201 - RNA, 22 nt, Human
ggggacagggcccucagccccc

SEQ ID NO: 153202 - RNA, 18 nt, Human
ggggagggaacacaggcc

SEQ ID NO: 153203 - RNA, 22 nt, Human
gucaucacccccucuccuaauc

SEQ ID NO: 153204 - RNA, 18 nt, Human
gugcacacacacacgcgc

SEQ ID NO: 153205 - RNA, 23 nt, Human
gugcacacacacacgcgcgcgcg

SEQ ID NO: 153206 - RNA, 23 nt, Human
ucccugugcaaacuggaggugca

SEQ ID NO: 153207 - RNA, 19 nt, Human
uccucagccugccccugcc

SEQ ID NO: 153208 - RNA, 18 nt, Human
uccucaggguccccgugg

SEQ ID NO: 153209 - RNA, 26 nt, Human
ucugugcaggccagugcgugcacaca

SEQ ID NO: 153210 - RNA, 22 nt, Human
ugagggagggacugcucuccgc

SEQ ID NO: 153211 - RNA, 25 nt, Human
ugcacacacacacgcgcgcgcgcgc

SEQ ID NO: 153212 - RNA, 25 nt, Human
ugcgugcacacacacacgcgcgcgg

SEQ ID NO: 153213 - RNA, 23 nt, Human
uggaaccccggcuuaccccagcc

SEQ ID NO: 153214 - RNA, 19 nt, Human
uggggagggaacacaggcc

SEQ ID NO: 153215 - RNA, 18 nt, Human
uguggggauccccugcug

SEQ ID NO: 153216 - RNA, 20 nt, Human
uuccagcuucugggccacag

SEQ ID NO: 153217 - RNA, 23 nt, Human
aaaacaaaacgaagaaacaaaaa

SEQ ID NO: 153218 - RNA, 19 nt, Human
aaaacaaaacucaaaaacc

SEQ ID NO: 153219 - RNA, 24 nt, Human
aaaauuaagaccaaaaacaaaacu

SEQ ID NO: 153220 - RNA, 19 nt, Human
aaacaaaaagggaacgggg

SEQ ID NO: 153221 - RNA, 24 nt, Human
aaacaaaacucaaaaaccuucaau

SEQ ID NO: 153222 - RNA, 19 nt, Human
aaauauaauuuaagaaccc

SEQ ID NO: 153223 - RNA, 23 nt, Human
aacaaaaagggaacggggagaaa

SEQ ID NO: 153224 - RNA, 19 nt, Human
aacaaaacgaagaaacaaa

SEQ ID NO: 153225 - RNA, 20 nt, Human
aacgaagaaacaaaaaggga

SEQ ID NO: 153226 - RNA, 25 nt, Human
aaggacgguagaaaaacaaaacgaa

SEQ ID NO: 153227 - RNA, 19 nt, Human
acaaaaagggaacggggag

SEQ ID NO: 153228 - RNA, 22 nt, Human
acagguucccuccaacacaaag

SEQ ID NO: 153229 - RNA, 24 nt, Human
agaaaaacaaaacgaagaaacaaa

SEQ ID NO: 153230 - RNA, 27 nt, Human
agaaaaacaaaacgaagaaacaaaaag

SEQ ID NO: 153231 - RNA, 18 nt, Human
agaaacaaaaagggaacc

SEQ ID NO: 153232 - RNA, 21 nt, Human
agaaccccuccaagcaccggc

SEQ ID NO: 153233 - RNA, 21 nt, Human
augacaaggacgguagaaaaa

SEQ ID NO: 153234 - RNA, 21 nt, Human
caacuccucaccccacgggcu

SEQ ID NO: 153235 - RNA, 24 nt, Human
caccccacaccccuucauaggaca

SEQ ID NO: 153236 - RNA, 22 nt, Human
caccccacgggcucaaagugca

SEQ ID NO: 153237 - RNA, 25 nt, Human
caccccacgggcucaaagugcaauc

SEQ ID NO: 153238 - RNA, 24 nt, Human
caccccuucauaggacacagcuug

SEQ ID NO: 153239 - RNA, 23 nt, Human
cagaacccccaaauccugucucu

SEQ ID NO: 153240 - RNA, 21 nt, Human
cagcggggcacagggcugggg

SEQ ID NO: 153241 - RNA, 21 nt, Human
cagguucccuccaacacaaag

SEQ ID NO: 153242 - RNA, 23 nt, Human
caguccugagggaaaggcgcccu

SEQ ID NO: 153243 - RNA, 21 nt, Human
ccaacuccucaccccacgggc

SEQ ID NO: 153244 - RNA, 19 nt, Human
ccagcggggcacagggcug

SEQ ID NO: 153245 - RNA, 19 nt, Human
cccaaauccugucucucca

SEQ ID NO: 153246 - RNA, 22 nt, Human
ccccaaauccugucucuccaaa

SEQ ID NO: 153247 - RNA, 21 nt, Human
cccccaaauccugucucucca

SEQ ID NO: 153248 - RNA, 24 nt, Human
cccccccaggucugacucucccug

SEQ ID NO: 153249 - RNA, 21 nt, Human
cccccugggacagccccccca

SEQ ID NO: 153250 - RNA, 19 nt, Human
ccccugggacagccccccc

SEQ ID NO: 153251 - RNA, 20 nt, Human
ccucgcccccccaggucuga

SEQ ID NO: 153252 - RNA, 20 nt, Human
ccucuggucacacccagucc

SEQ ID NO: 153253 - RNA, 21 nt, Human
ccugucucuccaaauugccag

SEQ ID NO: 153254 - RNA, 24 nt, Human
ccuucauaggacacagcuuggggg

SEQ ID NO: 153255 - RNA, 27 nt, Human
cgcccucacccuuggucuggaguucuu

SEQ ID NO: 153256 - RNA, 23 nt, Human
cggggagaaaaauuaagaccaaa

SEQ ID NO: 153257 - RNA, 18 nt, Human
cgggguccggggaugugg

SEQ ID NO: 153258 - RNA, 19 nt, Human
cucaccccacaccccuuca

SEQ ID NO: 153259 - RNA, 23 nt, Human
cuggaguuccccgagguggcugg

SEQ ID NO: 153260 - RNA, 23 nt, Human
gaacugaguuuggggggcccucg

SEQ ID NO: 153261 - RNA, 23 nt, Human
gcccugacaccccuucuugcccc

SEQ ID NO: 153262 - RNA, 18 nt, Human
ggaggcggugucccuggg

SEQ ID NO: 153263 - RNA, 20 nt, Human
ggggccucugugagucccca

SEQ ID NO: 153264 - RNA, 21 nt, Human
ggugacagcagcaaguuggga

SEQ ID NO: 153265 - RNA, 23 nt, Human
gucccugggguggggaguuccug

SEQ ID NO: 153266 - RNA, 23 nt, Human
uaagaccaaaaacaaaacucaaa

SEQ ID NO: 153267 - RNA, 22 nt, Human
uagugaaacagguucccuccaa

SEQ ID NO: 153268 - RNA, 19 nt, Human
uaugaaggcagcagcuggg

SEQ ID NO: 153269 - RNA, 22 nt, Human
uaugacaaggacgguagaaaaa

SEQ ID NO: 153270 - RNA, 24 nt, Human
ucaaaaaccuucaauaugaaggca

SEQ ID NO: 153271 - RNA, 26 nt, Human
ucaaagugcaauccagcggggcacag

SEQ ID NO: 153272 - RNA, 19 nt, Human
uccaccaccaacuaccgcc

SEQ ID NO: 153273 - RNA, 27 nt, Human
uccccuccuauuauggcagaaccccca

SEQ ID NO: 153274 - RNA, 23 nt, Human
uccguuucuggguuccaccacca

SEQ ID NO: 153275 - RNA, 18 nt, Human
ucuccaaauugccaacuc

SEQ ID NO: 153276 - RNA, 27 nt, Human
ucuuuggucugcgggaacgcacccauc

SEQ ID NO: 153277 - RNA, 22 nt, Human
ugaaacagguucccuccaacac

SEQ ID NO: 153278 - RNA, 18 nt, Human
ugaaggcagcagcugggg

SEQ ID NO: 153279 - RNA, 26 nt, Human
ugaccaaggcacuguucuggaaacag

SEQ ID NO: 153280 - RNA, 24 nt, Human
ugaugggccccuguuucaacuugg

SEQ ID NO: 153281 - RNA, 22 nt, Human
ugcaauccagcggggcacaggg

SEQ ID NO: 153282 - RNA, 19 nt, Human
uggcaagggagucacacuc

SEQ ID NO: 153283 - RNA, 22 nt, Human
uggcaagggagucacacucucu

SEQ ID NO: 153284 - RNA, 20 nt, Human
ugggcaaaggaggccauagu

SEQ ID NO: 153285 - RNA, 23 nt, Human
uggggaggcugggagauguuggg

SEQ ID NO: 153286 - RNA, 22 nt, Human
ugggggccucugugagucccca

SEQ ID NO: 153287 - RNA, 24 nt, Human
ugggggccucugugaguccccacu

SEQ ID NO: 153288 - RNA, 18 nt, Human
uggggggugauuuucccc

SEQ ID NO: 153289 - RNA, 18 nt, Human
ugggguggggaguuccug

SEQ ID NO: 153290 - RNA, 19 nt, Human
uuacaagggaaaaaaauga

SEQ ID NO: 153291 - RNA, 19 nt, Human
uucuggaaacagacaugau

SEQ ID NO: 153292 - RNA, 25 nt, Human
uugggggucccaggcgggguccggg

SEQ ID NO: 153293 - RNA, 21 nt, Human
uuuaagaaccccuccaagcac

SEQ ID NO: 153294 - RNA, 18 nt, Human
aagagaggcuucgccagg

SEQ ID NO: 153295 - RNA, 22 nt, Human
acaaagaagagggcagucugaa

SEQ ID NO: 153296 - RNA, 20 nt, Human
acccgcgucuucuccagucc

SEQ ID NO: 153297 - RNA, 19 nt, Human
acccggggcuccuggagcu

SEQ ID NO: 153298 - RNA, 23 nt, Human
accggcccggguccguucggcgc

SEQ ID NO: 153299 - RNA, 20 nt, Human
acgcagcccggcccgccccc

SEQ ID NO: 153300 - RNA, 24 nt, Human
agacaaacaggcuuggcaccuccu

SEQ ID NO: 153301 - RNA, 19 nt, Human
agaggcuguuggagcccgg

SEQ ID NO: 153302 - RNA, 22 nt, Human
aggcuuggcaccuccuuugcuu

SEQ ID NO: 153303 - RNA, 21 nt, Human
aguggacccggggcuccugga

SEQ ID NO: 153304 - RNA, 20 nt, Human
auaaucccuuuauuucuucc

SEQ ID NO: 153305 - RNA, 22 nt, Human
aucccuuuauuucuucccguug

SEQ ID NO: 153306 - RNA, 20 nt, Human
caaauucccuucuuucccuu

SEQ ID NO: 153307 - RNA, 23 nt, Human
caccaucgccccagccaccaccc

SEQ ID NO: 153308 - RNA, 19 nt, Human
cacccgcgucuucuccagu

SEQ ID NO: 153309 - RNA, 21 nt, Human
cacccgcgucuucuccagucc

SEQ ID NO: 153310 - RNA, 18 nt, Human
cacucuguucccuaacug

SEQ ID NO: 153311 - RNA, 20 nt, Human
cagccaccacccugcuccug

SEQ ID NO: 153312 - RNA, 18 nt, Human
cagcccggcccgcccccu

SEQ ID NO: 153313 - RNA, 23 nt, Human
caugucccuucucggaccagugu

SEQ ID NO: 153314 - RNA, 21 nt, Human
cccccgaggccucgcagugga

SEQ ID NO: 153315 - RNA, 21 nt, Human
cccgaggccucgcaguggacc

SEQ ID NO: 153316 - RNA, 19 nt, Human
ccgcccgcugcuguagagc

SEQ ID NO: 153317 - RNA, 23 nt, Human
ccucgcaguggacccggggcucc

SEQ ID NO: 153318 - RNA, 20 nt, Human
ccuuuaaugaggagggggcc

SEQ ID NO: 153319 - RNA, 24 nt, Human
cgagagucccugggauuccggggu

SEQ ID NO: 153320 - RNA, 19 nt, Human
cgcagcccggcccgccccc

SEQ ID NO: 153321 - RNA, 21 nt, Human
cgccgagagucccugggauuc

SEQ ID NO: 153322 - RNA, 21 nt, Human
cgccgggagaauccugggggc

SEQ ID NO: 153323 - RNA, 23 nt, Human
cggcaggggcugcuccagaggug

SEQ ID NO: 153324 - RNA, 19 nt, Human
cguccaccaucgccccagc

SEQ ID NO: 153325 - RNA, 26 nt, Human
cuaagcuucccuuuuuuuuuuuuucu

SEQ ID NO: 153326 - RNA, 21 nt, Human
cuccaacagccaccccuuuuu

SEQ ID NO: 153327 - RNA, 19 nt, Human
cucccuuccuccaacagcc

SEQ ID NO: 153328 - RNA, 21 nt, Human
cuccucccuuccuccaacagc

SEQ ID NO: 153329 - RNA, 26 nt, Human
cugcaggucugcgccccccgaggccu

SEQ ID NO: 153330 - RNA, 20 nt, Human
cugcuguagagccgcggcug

SEQ ID NO: 153331 - RNA, 21 nt, Human
cugggcagccccuucaguagc

SEQ ID NO: 153332 - RNA, 22 nt, Human
cuucccagcaucuagacuccag

SEQ ID NO: 153333 - RNA, 23 nt, Human
cuucccagcaucuagacuccagu

SEQ ID NO: 153334 - RNA, 24 nt, Human
gaagagggcagucugaaaccuaga

SEQ ID NO: 153335 - RNA, 19 nt, Human
gacaucuucagggcgucca

SEQ ID NO: 153336 - RNA, 19 nt, Human
gacccggggcuccuggagc

SEQ ID NO: 153337 - RNA, 20 nt, Human
gaggaccagggaaugcagcc

SEQ ID NO: 153338 - RNA, 20 nt, Human
gaggcuguuggagcccggcu

SEQ ID NO: 153339 - RNA, 20 nt, Human
gaggguuggguuuggugugg

SEQ ID NO: 153340 - RNA, 18 nt, Human
gcgccccccgaggccucg

SEQ ID NO: 153341 - RNA, 20 nt, Human
gcgccgggagaauccugggg

SEQ ID NO: 153342 - RNA, 21 nt, Human
gcuuggcaccuccuuugcuug

SEQ ID NO: 153343 - RNA, 22 nt, Human
ggcaucucucacagaggcuguu

SEQ ID NO: 153344 - RNA, 22 nt, Human
gggcagucugaaaccuagaaga

SEQ ID NO: 153345 - RNA, 18 nt, Human
guccaccaucgccccagc

SEQ ID NO: 153346 - RNA, 19 nt, Human
gucccgggucccgccgccc

SEQ ID NO: 153347 - RNA, 19 nt, Human
guccguucggcgccgagag

SEQ ID NO: 153348 - RNA, 18 nt, Human
uaaugaggagggggcugg

SEQ ID NO: 153349 - RNA, 21 nt, Human
uccaccaucgccccagccacc

SEQ ID NO: 153350 - RNA, 20 nt, Human
ucccuuuauuucuucccguu

SEQ ID NO: 153351 - RNA, 25 nt, Human
ucggcgccgagagucccugggauuc

SEQ ID NO: 153352 - RNA, 18 nt, Human
ucuccucccuuccuccaa

SEQ ID NO: 153353 - RNA, 20 nt, Human
ucugaaaccuagaagagagg

SEQ ID NO: 153354 - RNA, 20 nt, Human
ucuucauuuacucuccuccc

SEQ ID NO: 153355 - RNA, 19 nt, Human
ugaagacaaacaggcuugg

SEQ ID NO: 153356 - RNA, 22 nt, Human
ugaccaugccggcacccugauc

SEQ ID NO: 153357 - RNA, 18 nt, Human
ugaggagggggcuggugg

SEQ ID NO: 153358 - RNA, 23 nt, Human
ugaggagggggcugguggagagg

SEQ ID NO: 153359 - RNA, 23 nt, Human
ugcaggucugcgccccccgaggc

SEQ ID NO: 153360 - RNA, 19 nt, Human
ugccacccgcgucuucucc

SEQ ID NO: 153361 - RNA, 20 nt, Human
ugcuguagagccgcggcugg

SEQ ID NO: 153362 - RNA, 24 nt, Human
ugcuguagagccgcggcuggagcg

SEQ ID NO: 153363 - RNA, 23 nt, Human
uggacuucccagcaucuagacuc

SEQ ID NO: 153364 - RNA, 23 nt, Human
uggcggcaggggcugcuccagag

SEQ ID NO: 153365 - RNA, 22 nt, Human
ugggucccgggucccgccgccc

SEQ ID NO: 153366 - RNA, 20 nt, Human
uucccuaacugggcagcccc

SEQ ID NO: 153367 - RNA, 22 nt, Human
uucccuucuuucccuuuaauga

SEQ ID NO: 153368 - RNA, 23 nt, Human
uucgaggacacaacaaagaagag

SEQ ID NO: 153369 - RNA, 23 nt, Human
uugcaaauucccuucuuucccuu

SEQ ID NO: 153370 - RNA, 23 nt, Human
uuggcgguucucuaucucuccuc

SEQ ID NO: 153371 - RNA, 21 nt, Human
uuugcaaauucccuucuuucc

SEQ ID NO: 153372 - RNA, 18 nt, Human
agaagcacugcugucgcu

SEQ ID NO: 153373 - RNA, 23 nt, Human
agagaggcagggcaggcugcagg

SEQ ID NO: 153374 - RNA, 26 nt, Human
agagcuguggagcucugcaccuggcg

SEQ ID NO: 153375 - RNA, 22 nt, Human
caccuggcgaugcucuaagggc

SEQ ID NO: 153376 - RNA, 19 nt, Human
caggcugcaggcacuggcc

SEQ ID NO: 153377 - RNA, 24 nt, Human
cagugcuuucaccuguccaccagg

SEQ ID NO: 153378 - RNA, 24 nt, Human
ccccacuccccacggccuucugac

SEQ ID NO: 153379 - RNA, 20 nt, Human
ccuguaccucagcacaggga

SEQ ID NO: 153380 - RNA, 20 nt, Human
cucugcaccuggcgaugcuc

SEQ ID NO: 153381 - RNA, 19 nt, Human
gcaggcggggggagagggg

SEQ ID NO: 153382 - RNA, 18 nt, Human
ggaggggugaggggguga

SEQ ID NO: 153383 - RNA, 18 nt, Human
ggaguuggggguugggga

SEQ ID NO: 153384 - RNA, 24 nt, Human
ggccuucugacaauugcacagucc

SEQ ID NO: 153385 - RNA, 20 nt, Human
gggagugagcuuggaggggu

SEQ ID NO: 153386 - RNA, 20 nt, Human
gggggagguggcaggcgggg

SEQ ID NO: 153387 - RNA, 20 nt, Human
gggugagggggugagcgugg

SEQ ID NO: 153388 - RNA, 18 nt, Human
uaccucagcacagggaga

SEQ ID NO: 153389 - RNA, 24 nt, Human
uccuugggaaagagagcuguggag

SEQ ID NO: 153390 - RNA, 18 nt, Human
ucuaagggccugugagag

SEQ ID NO: 153391 - RNA, 23 nt, Human
ucugacaauugcacaguccugcc

SEQ ID NO: 153392 - RNA, 26 nt, Human
ugagagaggcagggcaggcugcaggc

SEQ ID NO: 153393 - RNA, 24 nt, Human
ugcaggcacuggcccccacucccc

SEQ ID NO: 153394 - RNA, 25 nt, Human
uggaggggugagggggugagcgugg

SEQ ID NO: 153395 - RNA, 18 nt, Human
uggggagugagcuuggag

SEQ ID NO: 153396 - RNA, 23 nt, Human
uggggguuggggagugagcuugg

SEQ ID NO: 153397 - RNA, 22 nt, Human
accccauucugucccccuacag

SEQ ID NO: 153398 - RNA, 24 nt, Human
caaagagaaaucaccaccuggcca

SEQ ID NO: 153399 - RNA, 23 nt, Human
caggacacuaaggguucuuacag

SEQ ID NO: 153400 - RNA, 18 nt, Human
caucccaaucucugcuaa

SEQ ID NO: 153401 - RNA, 24 nt, Human
cauucugucccccuacaggacacu

SEQ ID NO: 153402 - RNA, 22 nt, Human
cccccuacaggacacuaagggu

SEQ ID NO: 153403 - RNA, 21 nt, Human
ccuucagaacaaugcugccau

SEQ ID NO: 153404 - RNA, 25 nt, Human
ccuucagaacaaugcugccauccau

SEQ ID NO: 153405 - RNA, 19 nt, Human
cuaaggguucuuacagaua

SEQ ID NO: 153406 - RNA, 21 nt, Human
uacaggacacuaaggguucuu

SEQ ID NO: 153407 - RNA, 26 nt, Human
uacaggacacuaaggguucuuacaga

SEQ ID NO: 153408 - RNA, 25 nt, Human
uagcuuuauugaguaaggcauccca

SEQ ID NO: 153409 - RNA, 24 nt, Human
uauacuaagaauggugccccagca

SEQ ID NO: 153410 - RNA, 20 nt, Human
ucuaaaugaacggcugauuu

SEQ ID NO: 153411 - RNA, 20 nt, Human
ucuaaaugaacggcugauuu

SEQ ID NO: 153412 - RNA, 18 nt, Human
ucugcuaagauucuucua

SEQ ID NO: 153413 - RNA, 20 nt, Human
ugcauuggucaaagagaaau

SEQ ID NO: 153414 - RNA, 21 nt, Human
uggaaggauggcacaccugcu

SEQ ID NO: 153415 - RNA, 24 nt, Human
uggcacaccugcugagcgugggca

SEQ ID NO: 153416 - RNA, 19 nt, Human
uguaaagaaaaucuuuuuu

SEQ ID NO: 153417 - RNA, 22 nt, Human
uguaaagaaaaucuuuuuuuuc

SEQ ID NO: 153418 - RNA, 22 nt, Human
uuuucugcaaaccccuucagaa

SEQ ID NO: 153419 - RNA, 18 nt, Human
cucaagccugucccgagc

SEQ ID NO: 153420 - RNA, 24 nt, Human
cuccggccgggccgcgggcucucc

SEQ ID NO: 153421 - RNA, 23 nt, Human
gccccgccgcucaagccuguccc

SEQ ID NO: 153422 - RNA, 18 nt, Human
ggcagcgcgccccgccgc

SEQ ID NO: 153423 - RNA, 19 nt, Human
gggcucuccggucuccgcc

SEQ ID NO: 153424 - RNA, 25 nt, Human
ucuccggucuccgccucaggccccg

SEQ ID NO: 153425 - RNA, 22 nt, Human
ugagaaucaauaaacaaacuuc

SEQ ID NO: 153426 - RNA, 19 nt, Human
ugauuugguucauugcagc

SEQ ID NO: 153427 - RNA, 21 nt, Human
uucauugcagcaggaaucuug

SEQ ID NO: 153428 - RNA, 23 nt, Human
aaaaaagaucuuuguaucaugga

SEQ ID NO: 153429 - RNA, 22 nt, Human
aagagaaaacgggguucgggga

SEQ ID NO: 153430 - RNA, 20 nt, Human
aagcaaaugucaucuccccu

SEQ ID NO: 153431 - RNA, 20 nt, Human
aaguccugaaagccaucacu

SEQ ID NO: 153432 - RNA, 21 nt, Human
aauacagccccaaaacaaagc

SEQ ID NO: 153433 - RNA, 25 nt, Human
aaugucaucuccccuaagugccacc

SEQ ID NO: 153434 - RNA, 26 nt, Human
acagccccaaaacaaaggggaacgcc

SEQ ID NO: 153435 - RNA, 21 nt, Human
acagugcuguaaagcaaaggc

SEQ ID NO: 153436 - RNA, 19 nt, Human
accaacaucaucccaggcu

SEQ ID NO: 153437 - RNA, 23 nt, Human
agcaaaaggaacaaagguaaaaa

SEQ ID NO: 153438 - RNA, 25 nt, Human
aggaaaaagacaguuuauuccaaaa

SEQ ID NO: 153439 - RNA, 25 nt, Human
aggcaggauaaaaaacaaguccuga

SEQ ID NO: 153440 - RNA, 25 nt, Human
aggcauauugacuauacccugagaa

SEQ ID NO: 153441 - RNA, 21 nt, Human
aggccucgucugccugcaggc

SEQ ID NO: 153442 - RNA, 22 nt, Human
aggcggccgcagcgauugggcg

SEQ ID NO: 153443 - RNA, 19 nt, Human
aguggaaauguguccuggc

SEQ ID NO: 153444 - RNA, 23 nt, Human
auacaacuaauuuccuagauucu

SEQ ID NO: 153445 - RNA, 23 nt, Human
auacagccccaaaacaaagcaua

SEQ ID NO: 153446 - RNA, 24 nt, Human
aucaucccaggcuccuuagggaaa

SEQ ID NO: 153447 - RNA, 23 nt, Human
aucccauucauugaggaaaaaga

SEQ ID NO: 153448 - RNA, 27 nt, Human
caaaaggaacaaagguaaaaauccacc

SEQ ID NO: 153449 - RNA, 20 nt, Human
caacaacaaaugagagauaa

SEQ ID NO: 153450 - RNA, 19 nt, Human
cacggcacacauacuagug

SEQ ID NO: 153451 - RNA, 22 nt, Human
cacuacaugaugcugggaaaac

SEQ ID NO: 153452 - RNA, 28 nt, Human
cagccccaaaacaaagcauaaucgaaag

SEQ ID NO: 153453 - RNA, 18 nt, Human
caggaacugcauauuaua

SEQ ID NO: 153454 - RNA, 21 nt, Human
caggguuguuggguagagaag

SEQ ID NO: 153455 - RNA, 20 nt, Human
caucacgcggcucccaagcc

SEQ ID NO: 153456 - RNA, 24 nt, Human
cauuaugacuguaaaugaguuacc

SEQ ID NO: 153457 - RNA, 20 nt, Human
ccaccugugggcgcugggga

SEQ ID NO: 153458 - RNA, 22 nt, Human
ccaggccggcgggaagggguca

SEQ ID NO: 153459 - RNA, 22 nt, Human
ccccgcgggcgguugauuucca

SEQ ID NO: 153460 - RNA, 21 nt, Human
cccgagcacuaggcggccgca

SEQ ID NO: 153461 - RNA, 21 nt, Human
ccgcgggcgguugauuuccac

SEQ ID NO: 153462 - RNA, 24 nt, Human
ccgcgggcgguugauuuccaccac

SEQ ID NO: 153463 - RNA, 22 nt, Human
ccuuucaguucagguagaaucc

SEQ ID NO: 153464 - RNA, 21 nt, Human
cgcuauagaaacuccugcagg

SEQ ID NO: 153465 - RNA, 24 nt, Human
cgggcccggaguccccgcggcugg

SEQ ID NO: 153466 - RNA, 22 nt, Human
cgggcggcggcggcgcgaauac

SEQ ID NO: 153467 - RNA, 23 nt, Human
cgguugauuuccaccugugggag

SEQ ID NO: 153468 - RNA, 21 nt, Human
cguccucugagcuccacugaa

SEQ ID NO: 153469 - RNA, 23 nt, Human
cguccucugagcuccacugaaac

SEQ ID NO: 153470 - RNA, 23 nt, Human
cgugcaacacauacagugcugua

SEQ ID NO: 153471 - RNA, 22 nt, Human
cuccccguccucugagcuccac

SEQ ID NO: 153472 - RNA, 19 nt, Human
cucugagcuccacugaaac

SEQ ID NO: 153473 - RNA, 23 nt, Human
cucuggucuuaaaacagcccauc

SEQ ID NO: 153474 - RNA, 23 nt, Human
cugcaggcagcaggaacugcacg

SEQ ID NO: 153475 - RNA, 19 nt, Human
cuggucuuaaaacagccca

SEQ ID NO: 153476 - RNA, 22 nt, Human
gaaaacgggguucggggaggga

SEQ ID NO: 153477 - RNA, 23 nt, Human
gacaucucaacuauaaaaaacaa

SEQ ID NO: 153478 - RNA, 22 nt, Human
gcagcacauuuuugaaggcaaa

SEQ ID NO: 153479 - RNA, 20 nt, Human
gcaggauaaaaaacaagucc

SEQ ID NO: 153480 - RNA, 22 nt, Human
gcaggucuguuucuaggcagca

SEQ ID NO: 153481 - RNA, 19 nt, Human
gcccagacuucguccaggc

SEQ ID NO: 153482 - RNA, 21 nt, Human
gcgguggugugggagccccgg

SEQ ID NO: 153483 - RNA, 28 nt, Human
ggcgcuggggacacgcgaccggaagaaa

SEQ ID NO: 153484 - RNA, 20 nt, Human
ggcggcggcgcgaauacccg

SEQ ID NO: 153485 - RNA, 19 nt, Human
ggcgggcggcggcggcgcg

SEQ ID NO: 153486 - RNA, 23 nt, Human
ggcuugggggaggucacacaguc

SEQ ID NO: 153487 - RNA, 21 nt, Human
gguagagaaggaaggugaugc

SEQ ID NO: 153488 - RNA, 23 nt, Human
gugcuguucugcgccuucuuugg

SEQ ID NO: 153489 - RNA, 21 nt, Human
uaaaaaacaaguccugaaagc

SEQ ID NO: 153490 - RNA, 22 nt, Human
uaaagcaaaggccucgucugcc

SEQ ID NO: 153491 - RNA, 23 nt, Human
uaaauaagagucucuugcaucua

SEQ ID NO: 153492 - RNA, 21 nt, Human
uaaaugcacuacaugaugcug

SEQ ID NO: 153493 - RNA, 24 nt, Human
uaauuaggaaaguaagggcuuuga

SEQ ID NO: 153494 - RNA, 25 nt, Human
uacagccccaaaacaaagcauaauc

SEQ ID NO: 153495 - RNA, 19 nt, Human
uacaguugguugaaugcag

SEQ ID NO: 153496 - RNA, 21 nt, Human
uacccgggcccggaguccccg

SEQ ID NO: 153497 - RNA, 24 nt, Human
uagggaaaucaggagggggcagaa

SEQ ID NO: 153498 - RNA, 18 nt, Human
uaucagagcaaaaggaac

SEQ ID NO: 153499 - RNA, 18 nt, Human
uaucauggagauaaugag

SEQ ID NO: 153500 - RNA, 22 nt, Human
ucaacuauaaaaaacaagggua

SEQ ID NO: 153501 - RNA, 19 nt, Human
ucaggagggggcagaagca

SEQ ID NO: 153502 - RNA, 20 nt, Human
ucagugcaacaggaaagugc

SEQ ID NO: 153503 - RNA, 19 nt, Human
ucaugagaccuuggacaag

SEQ ID NO: 153504 - RNA, 19 nt, Human
uccaccugugggcgcuggg

SEQ ID NO: 153505 - RNA, 20 nt, Human
uccauaucuuuuccucuaca

SEQ ID NO: 153506 - RNA, 22 nt, Human
ucccaggugaaagugguuggcu

SEQ ID NO: 153507 - RNA, 27 nt, Human
ucccaggugaaagugguuggcuugggg

SEQ ID NO: 153508 - RNA, 21 nt, Human
ucgucugccugcaggcagcag

SEQ ID NO: 153509 - RNA, 23 nt, Human
ugagaaagacaaaacuaaaugca

SEQ ID NO: 153510 - RNA, 25 nt, Human
ugagaaagacaaaacuaaaugcacu

SEQ ID NO: 153511 - RNA, 22 nt, Human
ugaugcugggaaaacaaguugu

SEQ ID NO: 153512 - RNA, 26 nt, Human
ugcacaaaauacaacuaauuuccuag

SEQ ID NO: 153513 - RNA, 24 nt, Human
ugccccgcaaccccgcgggcgguu

SEQ ID NO: 153514 - RNA, 24 nt, Human
ugcuguucugcgccuucuuuggga

SEQ ID NO: 153515 - RNA, 19 nt, Human
uggaaauuaugaagcugga

SEQ ID NO: 153516 - RNA, 22 nt, Human
uggaacagacuuuaacaacugu

SEQ ID NO: 153517 - RNA, 23 nt, Human
uggaagagaaaacgggguucggg

SEQ ID NO: 153518 - RNA, 19 nt, Human
uggcaggcgcggcccgagc

SEQ ID NO: 153519 - RNA, 19 nt, Human
uggcuagcugccucugccc

SEQ ID NO: 153520 - RNA, 18 nt, Human
uggugugggagccccggg

SEQ ID NO: 153521 - RNA, 18 nt, Human
ugguuggcuugggggagg

SEQ ID NO: 153522 - RNA, 19 nt, Human
ugucccccacgccuucuaa

SEQ ID NO: 153523 - RNA, 21 nt, Human
ugugaagauuaaacuggauau

SEQ ID NO: 153524 - RNA, 23 nt, Human
uuaaugcuagcuuauaaauuuaa

SEQ ID NO: 153525 - RNA, 19 nt, Human
uucuuuggcaacugaucag

SEQ ID NO: 153526 - RNA, 20 nt, Human
uuggacaagcuaccuaugcu

SEQ ID NO: 153527 - RNA, 19 nt, Human
uugguugaaugcaggucug

SEQ ID NO: 153528 - RNA, 21 nt, Human
uuuaacuucuugacaucucaa

SEQ ID NO: 153529 - RNA, 23 nt, Human
uuugaccaacaucaucccaggcu

SEQ ID NO: 153530 - RNA, 23 nt, Human
uuuuuuuuuucuuuuuuuuuggg

SEQ ID NO: 153531 - RNA, 22 nt, Human
aaacagguaaaucgccuccaaa

SEQ ID NO: 153532 - RNA, 23 nt, Human
aagcugcucucugaaugcuuccu

SEQ ID NO: 153533 - RNA, 25 nt, Human
accccaugagagccagaggccagcc

SEQ ID NO: 153534 - RNA, 21 nt, Human
agagccagaggccagccccca

SEQ ID NO: 153535 - RNA, 22 nt, Human
agagcgggcgcgguggccccgg

SEQ ID NO: 153536 - RNA, 24 nt, Human
agcuugccaccuaaguucuccagg

SEQ ID NO: 153537 - RNA, 20 nt, Human
aguucuccaggucauccugu

SEQ ID NO: 153538 - RNA, 21 nt, Human
auccuuagaucucagaguugc

SEQ ID NO: 153539 - RNA, 25 nt, Human
augcccgugagaccuggagaaguca

SEQ ID NO: 153540 - RNA, 24 nt, Human
caggcgucuucccagcauggcucu

SEQ ID NO: 153541 - RNA, 22 nt, Human
ccagccccacgggccuggagga

SEQ ID NO: 153542 - RNA, 23 nt, Human
cccauccugucuucaugguuccc

SEQ ID NO: 153543 - RNA, 21 nt, Human
cccaugcccgugagaccugga

SEQ ID NO: 153544 - RNA, 24 nt, Human
cgaaaacagguaaaucgccuccaa

SEQ ID NO: 153545 - RNA, 24 nt, Human
cuccgcgccuggccggggucccuc

SEQ ID NO: 153546 - RNA, 21 nt, Human
cucucuggacaguuccucugg

SEQ ID NO: 153547 - RNA, 21 nt, Human
gaagaauacacaaaacuugga

SEQ ID NO: 153548 - RNA, 26 nt, Human
gacaggcuggcgcugagccggacccc

SEQ ID NO: 153549 - RNA, 23 nt, Human
gaccuggggcgcgccgggugacc

SEQ ID NO: 153550 - RNA, 22 nt, Human
gccggggucccucagcgaccug

SEQ ID NO: 153551 - RNA, 19 nt, Human
gcgcggugucggagcagag

SEQ ID NO: 153552 - RNA, 18 nt, Human
ggaguggcgggggagggu

SEQ ID NO: 153553 - RNA, 23 nt, Human
ggccuggaggagagggcggcugu

SEQ ID NO: 153554 - RNA, 22 nt, Human
ggcggcuguccagggggcgcgg

SEQ ID NO: 153555 - RNA, 20 nt, Human
ggggcccucaucccgggaag

SEQ ID NO: 153556 - RNA, 20 nt, Human
uacacaaaacuuggacccca

SEQ ID NO: 153557 - RNA, 18 nt, Human
ucuccaggucauccuguc

SEQ ID NO: 153558 - RNA, 23 nt, Human
ucucugaaugcuuccugcucugg

SEQ ID NO: 153559 - RNA, 23 nt, Human
ucucuggacaguuccucuggccc

SEQ ID NO: 153560 - RNA, 25 nt, Human
ugaccacaccgggggcccucauccc

SEQ ID NO: 153561 - RNA, 18 nt, Human
ugagaugucauugcuggc

SEQ ID NO: 153562 - RNA, 19 nt, Human
ugccgagugagcucaggcg

SEQ ID NO: 153563 - RNA, 22 nt, Human
uggaccccaugagagccagagg

SEQ ID NO: 153564 - RNA, 23 nt, Human
uggcaucaaauuuugcagggugc

SEQ ID NO: 153565 - RNA, 22 nt, Human
uggccggggucccucagcgacc

SEQ ID NO: 153566 - RNA, 21 nt, Human
ugggacaggcuggcgcugagc

SEQ ID NO: 153567 - RNA, 18 nt, Human
uggugagggagguggugg

SEQ ID NO: 153568 - RNA, 22 nt, Human
ugguggauaugcccagguggac

SEQ ID NO: 153569 - RNA, 19 nt, Human
uugucaaugagguugaaga

SEQ ID NO: 153570 - RNA, 22 nt, Human
uuuuuuuuuuuuggugguuuca

SEQ ID NO: 153571 - RNA, 20 nt, Human
acauauuuaaaaauacugca

SEQ ID NO: 153572 - RNA, 22 nt, Human
agacaaaaucagcaaugccccu

SEQ ID NO: 153573 - RNA, 18 nt, Human
caaaaucagcaaugcccc

SEQ ID NO: 153574 - RNA, 19 nt, Human
cacagcugggucagcagcu

SEQ ID NO: 153575 - RNA, 21 nt, Human
cagcaaugccccugcuccuga

SEQ ID NO: 153576 - RNA, 24 nt, Human
caucccuguuccauaagucuugag

SEQ ID NO: 153577 - RNA, 19 nt, Human
ccuccgccggacgcagcug

SEQ ID NO: 153578 - RNA, 23 nt, Human
cugcacugguucucugagucaua

SEQ ID NO: 153579 - RNA, 18 nt, Human
ucagcagcugccuccgcc

SEQ ID NO: 153580 - RNA, 19 nt, Human
uccacagcugggucagcag

SEQ ID NO: 153581 - RNA, 20 nt, Human
uccauaagucuugagucugc

SEQ ID NO: 153582 - RNA, 20 nt, Human
ucccugaucaucugcagccu

SEQ ID NO: 153583 - RNA, 26 nt, Human
ugaccaggcccuucccgaccaggcgc

SEQ ID NO: 153584 - RNA, 21 nt, Human
uggaucccugaucaucugcag

SEQ ID NO: 153585 - RNA, 24 nt, Human
uggaucccugaucaucugcagccu

SEQ ID NO: 153586 - RNA, 23 nt, Human
ugggcagacaaaaucagcaaugc

SEQ ID NO: 153587 - RNA, 22 nt, Human
uuccugagcaggauggauuggg

SEQ ID NO: 153588 - RNA, 24 nt, Human
uuuaaaaauacugcaagguugugg

SEQ ID NO: 153589 - RNA, 23 nt, Human
ccagcuguaguugcaacucuagc

SEQ ID NO: 153590 - RNA, 24 nt, Human
uaauuguccugugugacuucauuu

SEQ ID NO: 153591 - RNA, 22 nt, Human
ugagaagauacuaauaucaaug

SEQ ID NO: 153592 - RNA, 23 nt, Human
ugagaagauacuaauaucaaugc

SEQ ID NO: 153593 - RNA, 18 nt, Human
ugagaggaguugaagagg

SEQ ID NO: 153594 - RNA, 21 nt, Human
uuguccugugugacuucauuu

SEQ ID NO: 153595 - RNA, 28 nt, Human
aaaaaaaagacgaaucuguaaugaagaa

SEQ ID NO: 153596 - RNA, 31 nt, Human
aaaaaaaagacgaaucuguaaugaagaaaaa

SEQ ID NO: 153597 - RNA, 25 nt, Human
aaagcaauaugauauaaaacacauc

SEQ ID NO: 153598 - RNA, 23 nt, Human
aagaacuaaacaggacagggcca

SEQ ID NO: 153599 - RNA, 27 nt, Human
aagcucacaguaaauguaucccagaac

SEQ ID NO: 153600 - RNA, 19 nt, Human
aaggugaauuugucugacu

SEQ ID NO: 153601 - RNA, 22 nt, Human
acuaaacaggacagggccacgg

SEQ ID NO: 153602 - RNA, 19 nt, Human
agaacuaaacaggacaggg

SEQ ID NO: 153603 - RNA, 27 nt, Human
aggaaaagaucgaaucugaggcuauaa

SEQ ID NO: 153604 - RNA, 20 nt, Human
aggugauaaauuuucuccac

SEQ ID NO: 153605 - RNA, 22 nt, Human
agugaguaaauaaacuaaacca

SEQ ID NO: 153606 - RNA, 20 nt, Human
aucacuuaaaaugaacauuu

SEQ ID NO: 153607 - RNA, 23 nt, Human
aucuguaaugaagaaaaaaaaaa

SEQ ID NO: 153608 - RNA, 20 nt, Human
caagaagaaaugaauuggau

SEQ ID NO: 153609 - RNA, 23 nt, Human
cacacugagagguaucuguugau

SEQ ID NO: 153610 - RNA, 28 nt, Human
caccaaucauaaaagaaauaagauauuc

SEQ ID NO: 153611 - RNA, 22 nt, Human
cacuaagaacuaaacaggacag

SEQ ID NO: 153612 - RNA, 21 nt, Human
caggacagggccacggcaaag

SEQ ID NO: 153613 - RNA, 23 nt, Human
cguguuaaacaaaauuaaaauga

SEQ ID NO: 153614 - RNA, 18 nt, Human
cuacagcaucccuuuucc

SEQ ID NO: 153615 - RNA, 20 nt, Human
cucagauuaacacagaucaa

SEQ ID NO: 153616 - RNA, 21 nt, Human
cucccaauuaaaaaaacaaga

SEQ ID NO: 153617 - RNA, 18 nt, Human
cuuaaaaugaacauuuuc

SEQ ID NO: 153618 - RNA, 18 nt, Human
gaaaagaucgaaucugag

SEQ ID NO: 153619 - RNA, 21 nt, Human
gaagaaaaaaaaaaaauccua

SEQ ID NO: 153620 - RNA, 25 nt, Human
gagguaucuguugaucuaaaauucu

SEQ ID NO: 153621 - RNA, 25 nt, Human
gcaaaaguacaaaaauuaacccagu

SEQ ID NO: 153622 - RNA, 19 nt, Human
gcagaagcuugggugcucu

SEQ ID NO: 153623 - RNA, 18 nt, Human
ggcagaagcuugggugcu

SEQ ID NO: 153624 - RNA, 23 nt, Human
ggggcggggaggaggcggaggga

SEQ ID NO: 153625 - RNA, 19 nt, Human
uaaaauagcacaggcaggc

SEQ ID NO: 153626 - RNA, 18 nt, Human
uaacccacuaagaacuag

SEQ ID NO: 153627 - RNA, 21 nt, Human
uaagaaaaaaaaaaaagacga

SEQ ID NO: 153628 - RNA, 22 nt, Human
uaagaaaaaaaaaaaagacgaa

SEQ ID NO: 153629 - RNA, 24 nt, Human
uaagucaguaaccguguuaaacaa

SEQ ID NO: 153630 - RNA, 25 nt, Human
uauaagaaaaaaaaaaaagacgaau

SEQ ID NO: 153631 - RNA, 19 nt, Human
uauuucacacaugaggcuu

SEQ ID NO: 153632 - RNA, 18 nt, Human
ucagugaaaguuuuuaca

SEQ ID NO: 153633 - RNA, 23 nt, Human
ucauuaaaaaaaaaaaaaaacaa

SEQ ID NO: 153634 - RNA, 19 nt, Human
ucuaaaauucucuaaaucc

SEQ ID NO: 153635 - RNA, 28 nt, Human
ucuaaaauucucuaaauccagauaaauc

SEQ ID NO: 153636 - RNA, 24 nt, Human
ucucccaauuaaaaaaacaagagu

SEQ ID NO: 153637 - RNA, 21 nt, Human
ucuucugcaaaaguacaaaaa

SEQ ID NO: 153638 - RNA, 25 nt, Human
ugaagugaguaaauaaacuaaacca

SEQ ID NO: 153639 - RNA, 25 nt, Human
ugagccuucauuaaaaaaaaaaaaa

SEQ ID NO: 153640 - RNA, 29 nt, Human
ugagccuucauuaaaaaaaaaaaaaaaaa

SEQ ID NO: 153641 - RNA, 22 nt, Human
uggacaaaaagcaauaugauau

SEQ ID NO: 153642 - RNA, 22 nt, Human
uggcaggucucuucucucccaa

SEQ ID NO: 153643 - RNA, 19 nt, Human
uggggcucggggcggggag

SEQ ID NO: 153644 - RNA, 19 nt, Human
uggguauauuuuaggugau

SEQ ID NO: 153645 - RNA, 24 nt, Human
uggucuuuuaacaugaagaggucu

SEQ ID NO: 153646 - RNA, 21 nt, Human
uuaaaaaaaaaaaaaaacaaa

SEQ ID NO: 153647 - RNA, 23 nt, Human
uuaacacagaucaauaccaccuu

SEQ ID NO: 153648 - RNA, 19 nt, Human
uuauaggugaaaaacauga

SEQ ID NO: 153649 - RNA, 21 nt, Human
uucaaguaaaugagccuucau

SEQ ID NO: 153650 - RNA, 22 nt, Human
uucucuauauuccagaaggcag

SEQ ID NO: 153651 - RNA, 21 nt, Human
uuuacaaguaaaauagcacag

SEQ ID NO: 153652 - RNA, 19 nt, Human
uuuguauucagugaaaguu

SEQ ID NO: 153653 - RNA, 24 nt, Human
uuuuuugcuagcuugacaauuuua

SEQ ID NO: 153654 - RNA, 24 nt, Human
aaaaacaauggaguuuaaauacaa

SEQ ID NO: 153655 - RNA, 21 nt, Human
aaaaauaaugggccuagaagc

SEQ ID NO: 153656 - RNA, 23 nt, Human
aaagcauguuggaauaaugccaa

SEQ ID NO: 153657 - RNA, 18 nt, Human
aaauacuugacacagaua

SEQ ID NO: 153658 - RNA, 21 nt, Human
aacauuguugcuuuguugcag

SEQ ID NO: 153659 - RNA, 27 nt, Human
aagcauguuggaauaaugccaaaaaca

SEQ ID NO: 153660 - RNA, 23 nt, Human
acauucuuacauaacaucuguuu

SEQ ID NO: 153661 - RNA, 21 nt, Human
acuccaccacuaucaaaacaa

SEQ ID NO: 153662 - RNA, 24 nt, Human
agaaaaauauuuuccaaggucaaa

SEQ ID NO: 153663 - RNA, 25 nt, Human
caaaauacuguaaugcacaccaaug

SEQ ID NO: 153664 - RNA, 27 nt, Human
caaaauacuguaaugcacaccaaugca

SEQ ID NO: 153665 - RNA, 18 nt, Human
caaggucaaaaaauucag

SEQ ID NO: 153666 - RNA, 22 nt, Human
cacaguauacauaauaagcaga

SEQ ID NO: 153667 - RNA, 21 nt, Human
caccauauucacaggcaaaau

SEQ ID NO: 153668 - RNA, 21 nt, Human
cacccagcuaaagagcagcga

SEQ ID NO: 153669 - RNA, 25 nt, Human
cagauaaacacauaaaauggcccca

SEQ ID NO: 153670 - RNA, 25 nt, Human
caucaagaaaaaugaaucugacauu

SEQ ID NO: 153671 - RNA, 19 nt, Human
ccccaaucugauucgcgcc

SEQ ID NO: 153672 - RNA, 27 nt, Human
cccugaaugacagacaccaaccauugg

SEQ ID NO: 153673 - RNA, 18 nt, Human
cccugggauggggauaaa

SEQ ID NO: 153674 - RNA, 20 nt, Human
ccucggggccacggcuuucc

SEQ ID NO: 153675 - RNA, 22 nt, Human
ccucggggccacggcuuucccc

SEQ ID NO: 153676 - RNA, 19 nt, Human
ccuugguaaaguaagaaaa

SEQ ID NO: 153677 - RNA, 23 nt, Human
cuccaccacuaucaaaacaauuc

SEQ ID NO: 153678 - RNA, 24 nt, Human
gagcagcgaucuccgaggcgagca

SEQ ID NO: 153679 - RNA, 23 nt, Human
gcagcgaucuccgaggcgagcac

SEQ ID NO: 153680 - RNA, 19 nt, Human
ggagacgccgcgagcccag

SEQ ID NO: 153681 - RNA, 20 nt, Human
ggucaaaaaauucaguuuaa

SEQ ID NO: 153682 - RNA, 24 nt, Human
guacuuuacaguucauucaaaugu

SEQ ID NO: 153683 - RNA, 24 nt, Human
uaagaaaaauauuuuccaagguca

SEQ ID NO: 153684 - RNA, 24 nt, Human
uaagcagaauauaaacuaaaucaa

SEQ ID NO: 153685 - RNA, 22 nt, Human
uacauaacaucuguuuuauaua

SEQ ID NO: 153686 - RNA, 21 nt, Human
uagauuuugaaucauggacaa

SEQ ID NO: 153687 - RNA, 21 nt, Human
uagucuaauuaaggaaacuuc

SEQ ID NO: 153688 - RNA, 19 nt, Human
uauguuaaaauauacaaca

SEQ ID NO: 153689 - RNA, 20 nt, Human
ucaacagagccaugacaaac

SEQ ID NO: 153690 - RNA, 19 nt, Human
ucggggccacggcuuuccc

SEQ ID NO: 153691 - RNA, 19 nt, Human
ucguccgcgagccgcggag

SEQ ID NO: 153692 - RNA, 25 nt, Human
ucuuucuuuucucuauguggaaucu

SEQ ID NO: 153693 - RNA, 22 nt, Human
ugacaaaaauuguguuuccaaa

SEQ ID NO: 153694 - RNA, 22 nt, Human
ugcacaccaaugcagacuacuu

SEQ ID NO: 153695 - RNA, 22 nt, Human
ugcccugaaugacagacaccau

SEQ ID NO: 153696 - RNA, 19 nt, Human
ugcuuagauuuugaaucau

SEQ ID NO: 153697 - RNA, 20 nt, Human
uggaauaaugccaaaaacaa

SEQ ID NO: 153698 - RNA, 19 nt, Human
ugggauggggauaaaauaa

SEQ ID NO: 153699 - RNA, 18 nt, Human
uguccaagguauggcugu

SEQ ID NO: 153700 - RNA, 22 nt, Human
ugugcucacucagguuugcaug

SEQ ID NO: 153701 - RNA, 18 nt, Human
uuauacccugggaugggg

SEQ ID NO: 153702 - RNA, 21 nt, Human
uuccaaggucaaaaaauucag

SEQ ID NO: 153703 - RNA, 21 nt, Human
uucccuucaaggcuucuuaaa

SEQ ID NO: 153704 - RNA, 21 nt, Human
uugcaaucaacagagccauga

SEQ ID NO: 153705 - RNA, 19 nt, Human
uuguguuuccaaaaauaac

SEQ ID NO: 153706 - RNA, 25 nt, Human
aaaaaaguaaaaacuaaacagaaaa

SEQ ID NO: 153707 - RNA, 22 nt, Human
aaaaaguaaaaacuaaacagaa

SEQ ID NO: 153708 - RNA, 21 nt, Human
aaaagcacucuguacaaagcc

SEQ ID NO: 153709 - RNA, 19 nt, Human
aaacuaaacagaaaagcac

SEQ ID NO: 153710 - RNA, 22 nt, Human
aacaaaacaaaaaaaguaaaaa

SEQ ID NO: 153711 - RNA, 22 nt, Human
aacacccauucuccccuggguc

SEQ ID NO: 153712 - RNA, 19 nt, Human
aagcacucuguacaaagcc

SEQ ID NO: 153713 - RNA, 20 nt, Human
aagcaggaaggaagguuccu

SEQ ID NO: 153714 - RNA, 23 nt, Human
aagcaggaaggaagguuccuuag

SEQ ID NO: 153715 - RNA, 26 nt, Human
acaaaacaaaaaaaguaaaaacuaaa

SEQ ID NO: 153716 - RNA, 27 nt, Human
agaaaagcacucuguacaaagccugga

SEQ ID NO: 153717 - RNA, 27 nt, Human
agaaggaccccccacacuuuguaccuc

SEQ ID NO: 153718 - RNA, 22 nt, Human
aggccuucccugcucccugagg

SEQ ID NO: 153719 - RNA, 20 nt, Human
agguuccuggcauggcaggu

SEQ ID NO: 153720 - RNA, 22 nt, Human
caaagacuccccagugcuguuc

SEQ ID NO: 153721 - RNA, 18 nt, Human
caaauggacaaagugggu

SEQ ID NO: 153722 - RNA, 18 nt, Human
caacgaggcuggaccccu

SEQ ID NO: 153723 - RNA, 19 nt, Human
cagaauccacaaagacucc

SEQ ID NO: 153724 - RNA, 20 nt, Human
cagaauccacaaagacuccc

SEQ ID NO: 153725 - RNA, 22 nt, Human
caggccagcuucccuaaggcuu

SEQ ID NO: 153726 - RNA, 20 nt, Human
cauggggggcaguacuaggu

SEQ ID NO: 153727 - RNA, 23 nt, Human
ccagcagaagucaggccuucccu

SEQ ID NO: 153728 - RNA, 19 nt, Human
cccagugcuguuccucuuc

SEQ ID NO: 153729 - RNA, 18 nt, Human
ccucagaauccacaaaga

SEQ ID NO: 153730 - RNA, 21 nt, Human
ccucuugaugccagcagaagu

SEQ ID NO: 153731 - RNA, 23 nt, Human
ccuggcauggcagguuccccugg

SEQ ID NO: 153732 - RNA, 21 nt, Human
cgcccucgagcucgucgaccc

SEQ ID NO: 153733 - RNA, 19 nt, Human
cggcugggagggcgcgggg

SEQ ID NO: 153734 - RNA, 29 nt, Human
cgucuuuaaaaaaacaaaacaaaaaaagg

SEQ ID NO: 153735 - RNA, 21 nt, Human
cucagaauccacaaagacucc

SEQ ID NO: 153736 - RNA, 25 nt, Human
cuccccagugcuguuccucuuccaa

SEQ ID NO: 153737 - RNA, 21 nt, Human
cucucaggccagcuucccuaa

SEQ ID NO: 153738 - RNA, 20 nt, Human
cuggcauggcagguuccccu

SEQ ID NO: 153739 - RNA, 24 nt, Human
cuuagggccgcuuccccucucagg

SEQ ID NO: 153740 - RNA, 18 nt, Human
gaucuggaaggaaagggc

SEQ ID NO: 153741 - RNA, 21 nt, Human
gcacucuguacaaagccugga

SEQ ID NO: 153742 - RNA, 22 nt, Human
gcggggcgcggggugcugcgag

SEQ ID NO: 153743 - RNA, 20 nt, Human
ggagggcgcggggcgcgggg

SEQ ID NO: 153744 - RNA, 20 nt, Human
ggcuguggcauccacuggac

SEQ ID NO: 153745 - RNA, 20 nt, Human
gggcgcggggugcugcgagg

SEQ ID NO: 153746 - RNA, 18 nt, Human
uagguuucagggacaguc

SEQ ID NO: 153747 - RNA, 21 nt, Human
uagguuucagggacagucucu

SEQ ID NO: 153748 - RNA, 21 nt, Human
ucacugcggcuccggccccau

SEQ ID NO: 153749 - RNA, 22 nt, Human
ucauggggggcaguacuagguu

SEQ ID NO: 153750 - RNA, 22 nt, Human
uccccauacaacacccauucuc

SEQ ID NO: 153751 - RNA, 21 nt, Human
ucccugaggacacaucagggc

SEQ ID NO: 153752 - RNA, 26 nt, Human
ucccugaggacacaucagggcuucug

SEQ ID NO: 153753 - RNA, 18 nt, Human
ucccugcucccugaggac

SEQ ID NO: 153754 - RNA, 18 nt, Human
uccggcuggacccggcug

SEQ ID NO: 153755 - RNA, 21 nt, Human
ucucauugggcagggccucag

SEQ ID NO: 153756 - RNA, 21 nt, Human
ugcgaggggugggggccgggc

SEQ ID NO: 153757 - RNA, 25 nt, Human
ugcgaggggugggggccgggcgcgc

SEQ ID NO: 153758 - RNA, 21 nt, Human
ugcugcgaggggugggggccg

SEQ ID NO: 153759 - RNA, 22 nt, Human
uggaaggaaagggccaagcugg

SEQ ID NO: 153760 - RNA, 22 nt, Human
uggcauggcagguuccccugga

SEQ ID NO: 153761 - RNA, 21 nt, Human
aaaaaauuaaaaacugaauca

SEQ ID NO: 153762 - RNA, 25 nt, Human
aaaaacaaauaaaauuaauggucug

SEQ ID NO: 153763 - RNA, 21 nt, Human
aaaacacuauuacacugauac

SEQ ID NO: 153764 - RNA, 22 nt, Human
aaaagaaaaaaaaaaaaaaaag

SEQ ID NO: 153765 - RNA, 23 nt, Human
aaaagucuuaauuaaaaucaagg

SEQ ID NO: 153766 - RNA, 25 nt, Human
aaaauaaaccuacaaucuauacaaa

SEQ ID NO: 153767 - RNA, 25 nt, Human
aaaauacagcacauuucuucuacua

SEQ ID NO: 153768 - RNA, 20 nt, Human
aaacaaaauuaauaaaccuc

SEQ ID NO: 153769 - RNA, 20 nt, Human
aaacagauugcaaguaccac

SEQ ID NO: 153770 - RNA, 22 nt, Human
aaagaggcuuuccuaaaccuuc

SEQ ID NO: 153771 - RNA, 26 nt, Human
aaagguuccagacuagccucaacuaa

SEQ ID NO: 153772 - RNA, 24 nt, Human
aacgaggaucuccgccgaaaaaaa

SEQ ID NO: 153773 - RNA, 22 nt, Human
aagaagugcaauauuugaguuc

SEQ ID NO: 153774 - RNA, 24 nt, Human
aagaguagguggcuuugguggggg

SEQ ID NO: 153775 - RNA, 23 nt, Human
aagccaacacuucaaaucucuug

SEQ ID NO: 153776 - RNA, 19 nt, Human
acaaagcauaacagauuaa

SEQ ID NO: 153777 - RNA, 22 nt, Human
acaggcaacacaaucuuaaaac

SEQ ID NO: 153778 - RNA, 19 nt, Human
accuguagaaacagcccuu

SEQ ID NO: 153779 - RNA, 22 nt, Human
agauuuuuauagaaaauaacug

SEQ ID NO: 153780 - RNA, 22 nt, Human
agcaauucucuaucacugugcc

SEQ ID NO: 153781 - RNA, 21 nt, Human
agcuccaaguguacuguuucc

SEQ ID NO: 153782 - RNA, 21 nt, Human
aggcaacacaaucuuaaaacu

SEQ ID NO: 153783 - RNA, 19 nt, Human
auuggucuucuauggcacu

SEQ ID NO: 153784 - RNA, 18 nt, Human
auuuguuacaguaacuag

SEQ ID NO: 153785 - RNA, 24 nt, Human
caaagcauaacagauuaaaaauuc

SEQ ID NO: 153786 - RNA, 21 nt, Human
caagaacagauccugccgagc

SEQ ID NO: 153787 - RNA, 22 nt, Human
caaggccaaacaaaaaucaaag

SEQ ID NO: 153788 - RNA, 23 nt, Human
caagggccaaugcaaggccaaac

SEQ ID NO: 153789 - RNA, 23 nt, Human
caauggcuaugacaagaacagau

SEQ ID NO: 153790 - RNA, 22 nt, Human
cacaaagcuugcuuugguuucc

SEQ ID NO: 153791 - RNA, 18 nt, Human
cacagaaaaugcauggac

SEQ ID NO: 153792 - RNA, 18 nt, Human
caccagcaccaccuucac

SEQ ID NO: 153793 - RNA, 23 nt, Human
caccaguagcaaauguauaguca

SEQ ID NO: 153794 - RNA, 22 nt, Human
cacugugccaguuucacaaagc

SEQ ID NO: 153795 - RNA, 18 nt, Human
cagauugcaaguaccacc

SEQ ID NO: 153796 - RNA, 20 nt, Human
cauaacacagaaaaugcaug

SEQ ID NO: 153797 - RNA, 21 nt, Human
cauccccauucuuugcuucca

SEQ ID NO: 153798 - RNA, 19 nt, Human
ccaaaaauaaaccuacaau

SEQ ID NO: 153799 - RNA, 22 nt, Human
ccaaaaauaaaccuacaaucua

SEQ ID NO: 153800 - RNA, 18 nt, Human
ccaccuucaccuacucac

SEQ ID NO: 153801 - RNA, 20 nt, Human
ccaccuucaccuacucacuc

SEQ ID NO: 153802 - RNA, 19 nt, Human
ccccuguaaguaucuucca

SEQ ID NO: 153803 - RNA, 24 nt, Human
ccgaaaaaaaaagaaaaaaaaaaa

SEQ ID NO: 153804 - RNA, 23 nt, Human
ccucccacagaagaagaguaggu

SEQ ID NO: 153805 - RNA, 24 nt, Human
cuaccacguagcucuccccauccc

SEQ ID NO: 153806 - RNA, 18 nt, Human
cuagcaagaauggaaagu

SEQ ID NO: 153807 - RNA, 26 nt, Human
cucuccccauccccauucuuugcuuc

SEQ ID NO: 153808 - RNA, 19 nt, Human
cuuuggauccagcugaaua

SEQ ID NO: 153809 - RNA, 20 nt, Human
gacaaaaacaaauaaaauua

SEQ ID NO: 153810 - RNA, 19 nt, Human
gauccagcugaauaucucu

SEQ ID NO: 153811 - RNA, 19 nt, Human
gcgggacaccgucucaggg

SEQ ID NO: 153812 - RNA, 21 nt, Human
gcgggcuggcuuccuggucuc

SEQ ID NO: 153813 - RNA, 20 nt, Human
gcuuccuggucucgaguuuu

SEQ ID NO: 153814 - RNA, 27 nt, Human
ggagaaaaacauuaauaccaguugaau

SEQ ID NO: 153815 - RNA, 22 nt, Human
ggcauaaaagcuaugagagaga

SEQ ID NO: 153816 - RNA, 26 nt, Human
gguuggggugcgggcuggcuuccugg

SEQ ID NO: 153817 - RNA, 24 nt, Human
guagcucuccccauccccauucuu

SEQ ID NO: 153818 - RNA, 19 nt, Human
gugcgggcuggcuuccugg

SEQ ID NO: 153819 - RNA, 19 nt, Human
gugcugccuacuuacucuu

SEQ ID NO: 153820 - RNA, 23 nt, Human
uaaacaaagcauaacagauuaaa

SEQ ID NO: 153821 - RNA, 22 nt, Human
uaaaccucuaucaucaaauauu

SEQ ID NO: 153822 - RNA, 20 nt, Human
uaacacagaaaaugcaugga

SEQ ID NO: 153823 - RNA, 22 nt, Human
uaaguaucuuccaauaaaucuu

SEQ ID NO: 153824 - RNA, 24 nt, Human
uacacacuggcaggccucaaggac

SEQ ID NO: 153825 - RNA, 24 nt, Human
uagacaaaaacaaauaaaauuaau

SEQ ID NO: 153826 - RNA, 19 nt, Human
uagcaagaauggaaaguga

SEQ ID NO: 153827 - RNA, 18 nt, Human
uagcucuccccaucccca

SEQ ID NO: 153828 - RNA, 23 nt, Human
uauagucaauggcuaugacaaga

SEQ ID NO: 153829 - RNA, 25 nt, Human
uaucacugugccaguuucacaaagc

SEQ ID NO: 153830 - RNA, 23 nt, Human
uaugcacauagcaaaagccaaca

SEQ ID NO: 153831 - RNA, 23 nt, Human
ucaccaguagcaaauguauaguc

SEQ ID NO: 153832 - RNA, 18 nt, Human
ucacugugccaguuucac

SEQ ID NO: 153833 - RNA, 18 nt, Human
uccauaaaaaucaauucc

SEQ ID NO: 153834 - RNA, 21 nt, Human
uccccgcuuuuuuuguccaca

SEQ ID NO: 153835 - RNA, 20 nt, Human
ucccuuugcucuauaacucu

SEQ ID NO: 153836 - RNA, 24 nt, Human
uccgccgaaaaaaaaagaaaaaaa

SEQ ID NO: 153837 - RNA, 25 nt, Human
uccgccgaaaaaaaaagaaaaaaaa

SEQ ID NO: 153838 - RNA, 23 nt, Human
ucgcuugacaugauuuccuuccc

SEQ ID NO: 153839 - RNA, 19 nt, Human
ucucagggcagcuuuuuca

SEQ ID NO: 153840 - RNA, 18 nt, Human
ucuccgccgaaaaaaaaa

SEQ ID NO: 153841 - RNA, 25 nt, Human
ugaaauccaaaaauaaaccuacaau

SEQ ID NO: 153842 - RNA, 22 nt, Human
ugaagugcaauaaccaaauauu

SEQ ID NO: 153843 - RNA, 20 nt, Human
ugagagagauagcucugcca

SEQ ID NO: 153844 - RNA, 21 nt, Human
ugaguuaaaauuuacaaagag

SEQ ID NO: 153845 - RNA, 21 nt, Human
ugcaaggccaaacaaaaauca

SEQ ID NO: 153846 - RNA, 25 nt, Human
ugcacacaguucagucauguauaug

SEQ ID NO: 153847 - RNA, 23 nt, Human
ugcacauagcaaaagccaacacu

SEQ ID NO: 153848 - RNA, 24 nt, Human
ugccaucugucucugggcuaaaau

SEQ ID NO: 153849 - RNA, 20 nt, Human
uggcaggccucaaggaccca

SEQ ID NO: 153850 - RNA, 24 nt, Human
uggcuuugguggggguuggggugc

SEQ ID NO: 153851 - RNA, 21 nt, Human
ugggcuaaaaucaaggcuaac

SEQ ID NO: 153852 - RNA, 18 nt, Human
uggggguuggggugcggg

SEQ ID NO: 153853 - RNA, 23 nt, Human
uggggugcgggcuggcuuccugg

SEQ ID NO: 153854 - RNA, 19 nt, Human
uguggacuggccucccaca

SEQ ID NO: 153855 - RNA, 21 nt, Human
uuaaaaauuuccugugacuaa

SEQ ID NO: 153856 - RNA, 23 nt, Human
uuaauaaaccucuaucaucaaau

SEQ ID NO: 153857 - RNA, 22 nt, Human
uuacaaagaguuguuaaagggu

SEQ ID NO: 153858 - RNA, 19 nt, Human
uucacauauuuuuaaaagu

SEQ ID NO: 153859 - RNA, 21 nt, Human
uucacauuuaauguuaccugu

SEQ ID NO: 153860 - RNA, 21 nt, Human
uucccagccccaacgaggauc

SEQ ID NO: 153861 - RNA, 19 nt, Human
uugaacaccuuuacacacu

SEQ ID NO: 153862 - RNA, 25 nt, Human
uugcugcuuaaaauaaaaauuauaa

SEQ ID NO: 153863 - RNA, 18 nt, Human
uuuuguuucauuugcugc

SEQ ID NO: 153864 - RNA, 21 nt, Human
uuuuuuuuuuuuuugucuuaa

SEQ ID NO: 153865 - RNA, 18 nt, Human
uuuuuuuuuuuuuuuuug

SEQ ID NO: 153866 - RNA, 24 nt, Human
aaagugcugagauuacaggcauga

SEQ ID NO: 153867 - RNA, 18 nt, Human
aaaugcucccugagugcc

SEQ ID NO: 153868 - RNA, 26 nt, Human
aagcuucugucuuucuaggggguuuu

SEQ ID NO: 153869 - RNA, 26 nt, Human
aagugcugagauuacaggcaugagcc

SEQ ID NO: 153870 - RNA, 23 nt, Human
acuauguuggcuaagcuggucuc

SEQ ID NO: 153871 - RNA, 19 nt, Human
agaggaagggauauggaga

SEQ ID NO: 153872 - RNA, 19 nt, Human
agagggugaagggagccca

SEQ ID NO: 153873 - RNA, 22 nt, Human
agauuacaggcaugagccacca

SEQ ID NO: 153874 - RNA, 24 nt, Human
agauuacaggcaugagccaccaug

SEQ ID NO: 153875 - RNA, 24 nt, Human
agcuggucucaaacuccuugccuc

SEQ ID NO: 153876 - RNA, 21 nt, Human
aggcaugagccaccaugcccg

SEQ ID NO: 153877 - RNA, 21 nt, Human
auggcaggggaggggugugug

SEQ ID NO: 153878 - RNA, 22 nt, Human
augggggucuuacuauguuggc

SEQ ID NO: 153879 - RNA, 20 nt, Human
caaaauaaggaaaaccuuuc

SEQ ID NO: 153880 - RNA, 24 nt, Human
caaaauuacacuuuccucugcuag

SEQ ID NO: 153881 - RNA, 24 nt, Human
caaagugcugagauuacaggcaug

SEQ ID NO: 153882 - RNA, 25 nt, Human
caagagccaccugaaccgcuggccg

SEQ ID NO: 153883 - RNA, 22 nt, Human
cacauaagagccuaguuccaag

SEQ ID NO: 153884 - RNA, 18 nt, Human
caccaugcccgacuuccc

SEQ ID NO: 153885 - RNA, 22 nt, Human
cagguaauccuucugccucagc

SEQ ID NO: 153886 - RNA, 23 nt, Human
ccaaagugcugagauuacaggca

SEQ ID NO: 153887 - RNA, 24 nt, Human
ccaaagugcugagauuacaggcau

SEQ ID NO: 153888 - RNA, 21 nt, Human
cccucuaaaggcacuagcugc

SEQ ID NO: 153889 - RNA, 21 nt, Human
ccuaggcuaggacaucgaggc

SEQ ID NO: 153890 - RNA, 26 nt, Human
ccuucugccucagccucccaaagugc

SEQ ID NO: 153891 - RNA, 19 nt, Human
cgacggcagcggagguugc

SEQ ID NO: 153892 - RNA, 25 nt, Human
cggggagggauggcaggggaggggu

SEQ ID NO: 153893 - RNA, 25 nt, Human
cucaaacuccuugccucagguaauc

SEQ ID NO: 153894 - RNA, 21 nt, Human
cucccaaagugcugagauuac

SEQ ID NO: 153895 - RNA, 23 nt, Human
cugccucagccucccaaagugcu

SEQ ID NO: 153896 - RNA, 21 nt, Human
cugggacuggggaaaaggggc

SEQ ID NO: 153897 - RNA, 21 nt, Human
cuuuccucuucuugacagucu

SEQ ID NO: 153898 - RNA, 19 nt, Human
gaagaagcugaggaauggg

SEQ ID NO: 153899 - RNA, 22 nt, Human
gaagacgguacccucuaaaggc

SEQ ID NO: 153900 - RNA, 27 nt, Human
gagccggagccggaguccggggaggga

SEQ ID NO: 153901 - RNA, 24 nt, Human
gaggcaagagccaccugaaccgcu

SEQ ID NO: 153902 - RNA, 18 nt, Human
gauuacaggcaugagcca

SEQ ID NO: 153903 - RNA, 24 nt, Human
gauuacaggcaugagccaccaugc

SEQ ID NO: 153904 - RNA, 21 nt, Human
gccucagccucccaaagugcu

SEQ ID NO: 153905 - RNA, 22 nt, Human
ggaaaaggggcugggaccuggg

SEQ ID NO: 153906 - RNA, 22 nt, Human
ggagaagacgguacccucuaaa

SEQ ID NO: 153907 - RNA, 24 nt, Human
ggagccggagccggaguccgggga

SEQ ID NO: 153908 - RNA, 22 nt, Human
ggagugccugugaagaagcuga

SEQ ID NO: 153909 - RNA, 19 nt, Human
gggaauagggagaagacgg

SEQ ID NO: 153910 - RNA, 21 nt, Human
gggcugggaccugggagagag

SEQ ID NO: 153911 - RNA, 23 nt, Human
ggggaaaaggggcugggaccugg

SEQ ID NO: 153912 - RNA, 23 nt, Human
ggggagggauggcaggggagggg

SEQ ID NO: 153913 - RNA, 20 nt, Human
gggguugggaaagagaagaa

SEQ ID NO: 153914 - RNA, 24 nt, Human
guaauccuucugccucagccuccc

SEQ ID NO: 153915 - RNA, 23 nt, Human
uacaggcaugagccaccaugccc

SEQ ID NO: 153916 - RNA, 21 nt, Human
uacuauguuggcuaagcuggu

SEQ ID NO: 153917 - RNA, 23 nt, Human
uaguuccaaguagucaagagccu

SEQ ID NO: 153918 - RNA, 24 nt, Human
uauguuggcuaagcuggucucaaa

SEQ ID NO: 153919 - RNA, 24 nt, Human
ucccaaagugcugagauuacaggc

SEQ ID NO: 153920 - RNA, 24 nt, Human
uccuaaccucuuucuucacagauu

SEQ ID NO: 153921 - RNA, 19 nt, Human
ucggagccggagccggagu

SEQ ID NO: 153922 - RNA, 22 nt, Human
ucugggacuggggaaaaggggc

SEQ ID NO: 153923 - RNA, 23 nt, Human
ucuuacuauguuggcuaagcugg

SEQ ID NO: 153924 - RNA, 24 nt, Human
ucuuacuauguuggcuaagcuggu

SEQ ID NO: 153925 - RNA, 22 nt, Human
ugaagggagcccagccaagucc

SEQ ID NO: 153926 - RNA, 23 nt, Human
ugagauaauauguaugucacaga

SEQ ID NO: 153927 - RNA, 22 nt, Human
ugagauuacaggcaugagccac

SEQ ID NO: 153928 - RNA, 23 nt, Human
ugagauuacaggcaugagccacc

SEQ ID NO: 153929 - RNA, 24 nt, Human
ugagauuacaggcaugagccacca

SEQ ID NO: 153930 - RNA, 24 nt, Human
ugccucagccucccaaagugcuga

SEQ ID NO: 153931 - RNA, 21 nt, Human
ugccucagguaauccuucugc

SEQ ID NO: 153932 - RNA, 23 nt, Human
ugccucagguaauccuucugccu

SEQ ID NO: 153933 - RNA, 25 nt, Human
ugccucagguaauccuucugccuca

SEQ ID NO: 153934 - RNA, 24 nt, Human
uggcuaagcuggucucaaacuccu

SEQ ID NO: 153935 - RNA, 19 nt, Human
ugggaaacaaaggcacaca

SEQ ID NO: 153936 - RNA, 21 nt, Human
ugggaccugggagagagaggg

SEQ ID NO: 153937 - RNA, 24 nt, Human
ugggacuggggaaaaggggcuggg

SEQ ID NO: 153938 - RNA, 21 nt, Human
ugucacagaauuguuuuaagg

SEQ ID NO: 153939 - RNA, 24 nt, Human
uugccucagguaauccuucugccu

SEQ ID NO: 153940 - RNA, 18 nt, Human
uugguggcugcugcggcg

SEQ ID NO: 153941 - RNA, 21 nt, Human
aaaaaaaaaaaaagaagagga

SEQ ID NO: 153942 - RNA, 23 nt, Human
aaaaaaaaaaagaagaggaagaa

SEQ ID NO: 153943 - RNA, 22 nt, Human
aaaaaaaaaagaagaggaagaa

SEQ ID NO: 153944 - RNA, 18 nt, Human
aaaaaagaagaggaagaa

SEQ ID NO: 153945 - RNA, 24 nt, Human
aaaacaaaaugaaaaaaaccaaaa

SEQ ID NO: 153946 - RNA, 22 nt, Human
aaagaaaaagaaaaaaagugac

SEQ ID NO: 153947 - RNA, 22 nt, Human
aaagaaaaagaaaaagaaaaaa

SEQ ID NO: 153948 - RNA, 21 nt, Human
aaagaaagaaaaagaaaaaga

SEQ ID NO: 153949 - RNA, 26 nt, Human
aaagaagaggaagaaagaaacaaaga

SEQ ID NO: 153950 - RNA, 21 nt, Human
aaaugaaaaaaaccaaaaagu

SEQ ID NO: 153951 - RNA, 19 nt, Human
aaauguacuuaaauuaguu

SEQ ID NO: 153952 - RNA, 24 nt, Human
aacaaagaaagaaaaagaaaaaga

SEQ ID NO: 153953 - RNA, 24 nt, Human
aacugucucuuaguuucccuucua

SEQ ID NO: 153954 - RNA, 19 nt, Human
aagaaagaaaaagaaaaag

SEQ ID NO: 153955 - RNA, 20 nt, Human
aagaaagaaaaagaaaaaga

SEQ ID NO: 153956 - RNA, 23 nt, Human
aagaaagaaacaaagaaagaaaa

SEQ ID NO: 153957 - RNA, 22 nt, Human
aagaagaggaagaaagaaacaa

SEQ ID NO: 153958 - RNA, 24 nt, Human
aaguaucaguaguuuuccugaacc

SEQ ID NO: 153959 - RNA, 25 nt, Human
aaguguugaaaacauaauuacuucg

SEQ ID NO: 153960 - RNA, 27 nt, Human
acaaagaaagaaaaagaaaaagaaaaa

SEQ ID NO: 153961 - RNA, 22 nt, Human
acauaacuaucauugcaucucu

SEQ ID NO: 153962 - RNA, 24 nt, Human
agaaaaaaaaauguugaaaaaugu

SEQ ID NO: 153963 - RNA, 22 nt, Human
agaaaaagaaaaaaagugacag

SEQ ID NO: 153964 - RNA, 21 nt, Human
agaaaaagaaaaagaaaaaaa

SEQ ID NO: 153965 - RNA, 19 nt, Human
agaaaaagaacaaauaaaa

SEQ ID NO: 153966 - RNA, 25 nt, Human
agaagaggaagaaagaaacaaagaa

SEQ ID NO: 153967 - RNA, 21 nt, Human
agacauacccaauccagugug

SEQ ID NO: 153968 - RNA, 18 nt, Human
agagaaagagaggggggu

SEQ ID NO: 153969 - RNA, 22 nt, Human
agaggaagaaagaaacaaagaa

SEQ ID NO: 153970 - RNA, 24 nt, Human
agagggggguggggaaauuggagc

SEQ ID NO: 153971 - RNA, 20 nt, Human
agcaaaacaaaaugaaaaaa

SEQ ID NO: 153972 - RNA, 26 nt, Human
agcaaaacaaaaugaaaaaaaccaaa

SEQ ID NO: 153973 - RNA, 19 nt, Human
agcuuaagugcaaacuaca

SEQ ID NO: 153974 - RNA, 23 nt, Human
aggaagaaagaaacaaagaaaga

SEQ ID NO: 153975 - RNA, 24 nt, Human
aggacagaaacugcuggggaaaga

SEQ ID NO: 153976 - RNA, 21 nt, Human
agggggguggggaaauuggag

SEQ ID NO: 153977 - RNA, 24 nt, Human
caaaauggaguucagaaaaagaac

SEQ ID NO: 153978 - RNA, 21 nt, Human
caaaggugacauaugaagaua

SEQ ID NO: 153979 - RNA, 27 nt, Human
caaauaaaauuacagcuuaagugcaaa

SEQ ID NO: 153980 - RNA, 24 nt, Human
caacccaugcagagaaaugaagaa

SEQ ID NO: 153981 - RNA, 19 nt, Human
caaggaccuaucccuaagc

SEQ ID NO: 153982 - RNA, 20 nt, Human
cacauuuauuuacaacuuuu

SEQ ID NO: 153983 - RNA, 19 nt, Human
caccuaaaaaaccacaacu

SEQ ID NO: 153984 - RNA, 25 nt, Human
cacuauauuaaaauauuucuugcuu

SEQ ID NO: 153985 - RNA, 23 nt, Human
caguguguuucuuccaguucaau

SEQ ID NO: 153986 - RNA, 24 nt, Human
caucucuguaucuuccacugggaa

SEQ ID NO: 153987 - RNA, 28 nt, Human
ccaucugcuuuaaaaaaaaaaaaaaaaa

SEQ ID NO: 153988 - RNA, 24 nt, Human
cccaugcagagaaaugaagaaaca

SEQ ID NO: 153989 - RNA, 18 nt, Human
cgaaguauacgaacugaa

SEQ ID NO: 153990 - RNA, 19 nt, Human
cucuagcuguuucauucuc

SEQ ID NO: 153991 - RNA, 20 nt, Human
cucuagcuguuucauucucc

SEQ ID NO: 153992 - RNA, 21 nt, Human
gaaaauguuauucuuuuguuc

SEQ ID NO: 153993 - RNA, 21 nt, Human
gaaacugcuggggaaagaaac

SEQ ID NO: 153994 - RNA, 24 nt, Human
gaagaaagaaacaaagaaagaaaa

SEQ ID NO: 153995 - RNA, 23 nt, Human
gaccaccagagaaagagaggggg

SEQ ID NO: 153996 - RNA, 22 nt, Human
gagcaaaacaaaaugaaaaaaa

SEQ ID NO: 153997 - RNA, 26 nt, Human
gagcaaaacaaaaugaaaaaaaccaa

SEQ ID NO: 153998 - RNA, 22 nt, Human
gcaauuagaaauuaaagccaaa

SEQ ID NO: 153999 - RNA, 23 nt, Human
gccuugggguagaaggaagacca

SEQ ID NO: 154000 - RNA, 18 nt, Human
ggaacagauagcaugggu

SEQ ID NO: 154001 - RNA, 23 nt, Human
ggagaaaaaaaaauguugaaaaa

SEQ ID NO: 154002 - RNA, 23 nt, Human
ggauucccucauugggccacccu

SEQ ID NO: 154003 - RNA, 21 nt, Human
gggaaagaaacuggauucuca

SEQ ID NO: 154004 - RNA, 20 nt, Human
gggggguggggaaauuggag

SEQ ID NO: 154005 - RNA, 24 nt, Human
guuccuccuaucuuucucuuucaa

SEQ ID NO: 154006 - RNA, 22 nt, Human
uaacuuuaauggagauuuuuaa

SEQ ID NO: 154007 - RNA, 24 nt, Human
uagcaugaaaaauauuagccuccc

SEQ ID NO: 154008 - RNA, 21 nt, Human
uaggaacagauagcaugggug

SEQ ID NO: 154009 - RNA, 21 nt, Human
uagguaagcacauaacuauca

SEQ ID NO: 154010 - RNA, 26 nt, Human
uaucuuucucuuucagucuuucccuc

SEQ ID NO: 154011 - RNA, 22 nt, Human
uccaaaauggaguucagaaaaa

SEQ ID NO: 154012 - RNA, 26 nt, Human
ucccucauugggccaccccugaaagu

SEQ ID NO: 154013 - RNA, 18 nt, Human
uccugaaccacagagaac

SEQ ID NO: 154014 - RNA, 18 nt, Human
uccuugcguagcaaaggu

SEQ ID NO: 154015 - RNA, 21 nt, Human
ucuccaccuaaaaaaccacaa

SEQ ID NO: 154016 - RNA, 20 nt, Human
ucucuguaucuuccacuggg

SEQ ID NO: 154017 - RNA, 25 nt, Human
ucugccagguagacauacccaaucc

SEQ ID NO: 154018 - RNA, 23 nt, Human
ucugcuuuaaaaaaaaaaaaaaa

SEQ ID NO: 154019 - RNA, 28 nt, Human
ucugcuuuaaaaaaaaaaaaaaaaagaa

SEQ ID NO: 154020 - RNA, 21 nt, Human
ucuucagacaaccaacggccu

SEQ ID NO: 154021 - RNA, 18 nt, Human
ucuuucucuuucagucuu

SEQ ID NO: 154022 - RNA, 20 nt, Human
ucuuuuuauuauaccaauuu

SEQ ID NO: 154023 - RNA, 18 nt, Human
ugaaaaaaaccaaaaagu

SEQ ID NO: 154024 - RNA, 30 nt, Human
ugaaaaaaaccaaaaaguguugaaaacauu

SEQ ID NO: 154025 - RNA, 22 nt, Human
ugaaaaauguaaaggaugaggg

SEQ ID NO: 154026 - RNA, 19 nt, Human
ugaaccacagagaacuguc

SEQ ID NO: 154027 - RNA, 20 nt, Human
ugaagaaacauugugguucc

SEQ ID NO: 154028 - RNA, 20 nt, Human
ugacccaaggaccuaucccu

SEQ ID NO: 154029 - RNA, 18 nt, Human
ugccagguagacauaccc

SEQ ID NO: 154030 - RNA, 21 nt, Human
ugcuuccauauugcuugauuc

SEQ ID NO: 154031 - RNA, 18 nt, Human
ugcuuuaaaaaaaaaaaa

SEQ ID NO: 154032 - RNA, 26 nt, Human
uguuucauucuccugaccaacccaug

SEQ ID NO: 154033 - RNA, 22 nt, Human
uuacauuuucugguccuucucu

SEQ ID NO: 154034 - RNA, 21 nt, Human
uucaagccaauccuuacucgc

SEQ ID NO: 154035 - RNA, 23 nt, Human
uucuuacuugcuaggacagaaac

SEQ ID NO: 154036 - RNA, 26 nt, Human
uugcaauuagaaauuaaagccaaaaa

SEQ ID NO: 154037 - RNA, 24 nt, Human
uugcuugauucaaaauccaaaaug

SEQ ID NO: 154038 - RNA, 26 nt, Human
uuuaaaaaaaaaaaaaaaaagaagag

SEQ ID NO: 154039 - RNA, 22 nt, Human
aucgaggcggcccacugccagc

SEQ ID NO: 154040 - RNA, 18 nt, Human
cagcguggcccagggcuc

SEQ ID NO: 154041 - RNA, 21 nt, Human
cuggagccugugguccgggcc

SEQ ID NO: 154042 - RNA, 18 nt, Human
gcccagggcucgcagcac

SEQ ID NO: 154043 - RNA, 19 nt, Human
ggagccugugguccgggcc

SEQ ID NO: 154044 - RNA, 25 nt, Human
gugguccgggccucacgguuucagc

SEQ ID NO: 154045 - RNA, 23 nt, Human
uggccugggaggacgauuuauua

SEQ ID NO: 154046 - RNA, 24 nt, Human
aaaacccuagaugaccuaugaagg

SEQ ID NO: 154047 - RNA, 29 nt, Human
aaauauugucuccuccuccuuuauaaaaa

SEQ ID NO: 154048 - RNA, 19 nt, Human
aaaugaccccacuccccaa

SEQ ID NO: 154049 - RNA, 22 nt, Human
aaggaaaauguuaugcugaaaa

SEQ ID NO: 154050 - RNA, 21 nt, Human
acagaaaugaccccacucccc

SEQ ID NO: 154051 - RNA, 19 nt, Human
agaaaugaccccacucccc

SEQ ID NO: 154052 - RNA, 23 nt, Human
agaugaccuaugaaggcacagcc

SEQ ID NO: 154053 - RNA, 22 nt, Human
agcagcagagagaagaugaccc

SEQ ID NO: 154054 - RNA, 22 nt, Human
cagcagagagaagaugaccccg

SEQ ID NO: 154055 - RNA, 21 nt, Human
cagcagcagagagaagaugac

SEQ ID NO: 154056 - RNA, 22 nt, Human
cagcuacagcagcagagagaag

SEQ ID NO: 154057 - RNA, 23 nt, Human
cauaaauacaccuuaaauauuaa

SEQ ID NO: 154058 - RNA, 18 nt, Human
ccaacgcuggagggaagg

SEQ ID NO: 154059 - RNA, 19 nt, Human
ccccaaaaaguuugaaaaa

SEQ ID NO: 154060 - RNA, 18 nt, Human
ccccgcucccacaggccc

SEQ ID NO: 154061 - RNA, 20 nt, Human
ccggucuugaacgaaguacc

SEQ ID NO: 154062 - RNA, 24 nt, Human
cugguucaaugguccauucuguuu

SEQ ID NO: 154063 - RNA, 22 nt, Human
gaaggucaaagagguggaagga

SEQ ID NO: 154064 - RNA, 23 nt, Human
uacagaaaugaccccacucccca

SEQ ID NO: 154065 - RNA, 24 nt, Human
uauacagaaaugaccccacucccc

SEQ ID NO: 154066 - RNA, 19 nt, Human
ucccacaggcccgccgcgg

SEQ ID NO: 154067 - RNA, 19 nt, Human
uccccaaaaaguuugaaaa

SEQ ID NO: 154068 - RNA, 24 nt, Human
ugaaaaaauauugucuccuccucc

SEQ ID NO: 154069 - RNA, 20 nt, Human
ugaccuaugaaggcacagcc

SEQ ID NO: 154070 - RNA, 21 nt, Human
ugcugaaaaucccuuuccaac

SEQ ID NO: 154071 - RNA, 19 nt, Human
uuccucagcacaauuuggc

SEQ ID NO: 154072 - RNA, 21 nt, Human
acugcaccgccgccuaggacc

SEQ ID NO: 154073 - RNA, 23 nt, Human
caacuucuacucuaauucuucua

SEQ ID NO: 154074 - RNA, 22 nt, Human
cagaagccacgguuuuccagug

SEQ ID NO: 154075 - RNA, 20 nt, Human
cccgacaacuucuacucuaa

SEQ ID NO: 154076 - RNA, 23 nt, Human
cccgacaacuucuacucuaauuc

SEQ ID NO: 154077 - RNA, 19 nt, Human
ccgacaacuucuacucuaa

SEQ ID NO: 154078 - RNA, 21 nt, Human
cgggaggaagcccucccugcu

SEQ ID NO: 154079 - RNA, 22 nt, Human
cugcaccgccgccuaggacccc

SEQ ID NO: 154080 - RNA, 22 nt, Human
cugcuccuacacaacaaagaug

SEQ ID NO: 154081 - RNA, 18 nt, Human
gaagcccucccugcuccu

SEQ ID NO: 154082 - RNA, 19 nt, Human
gcugcguccuaagagcgga

SEQ ID NO: 154083 - RNA, 25 nt, Human
gggagcgcauuaaagcggagagacu

SEQ ID NO: 154084 - RNA, 21 nt, Human
uaggaccccgggaggaagccc

SEQ ID NO: 154085 - RNA, 18 nt, Human
uuccagugggggacggca

SEQ ID NO: 154086 - RNA, 25 nt, Human
uuccagugggggacggcacuaaugg

SEQ ID NO: 154087 - RNA, 22 nt, Human
uucuacgacggacugcaccgcc

SEQ ID NO: 154088 - RNA, 20 nt, Human
aaacaucaagugcagccaac

SEQ ID NO: 154089 - RNA, 20 nt, Human
aaacaugauuauuaauaaua

SEQ ID NO: 154090 - RNA, 21 nt, Human
acccagggccgcgcgagcgcc

SEQ ID NO: 154091 - RNA, 23 nt, Human
caaacaaacaucaagugcagcca

SEQ ID NO: 154092 - RNA, 28 nt, Human
caaacaaacaucaagugcagccaacuuc

SEQ ID NO: 154093 - RNA, 21 nt, Human
cccacaaggaaacagagacgc

SEQ ID NO: 154094 - RNA, 21 nt, Human
cgagcgcccacaaggaaacag

SEQ ID NO: 154095 - RNA, 19 nt, Human
cgccagccgccuuggaacc

SEQ ID NO: 154096 - RNA, 18 nt, Human
cuacccagggccgcgcga

SEQ ID NO: 154097 - RNA, 18 nt, Human
cuaccgccgccagccgcc

SEQ ID NO: 154098 - RNA, 21 nt, Human
cuaccgccgccagccgccuug

SEQ ID NO: 154099 - RNA, 18 nt, Human
guagacaucaugcaaaca

SEQ ID NO: 154100 - RNA, 21 nt, Human
uccauugacaaacaugauuau

SEQ ID NO: 154101 - RNA, 22 nt, Human
uccauugacaaacaugauuauu

SEQ ID NO: 154102 - RNA, 19 nt, Human
ugagguagacaucaugcaa

SEQ ID NO: 154103 - RNA, 21 nt, Human
ugagguagacaucaugcaaac

SEQ ID NO: 154104 - RNA, 22 nt, Human
uuaaaguuuuaauucugaggua

SEQ ID NO: 154105 - RNA, 23 nt, Human
aaaaaaaaaagaaagagaaagaa

SEQ ID NO: 154106 - RNA, 23 nt, Human
aaaagaaagagaaagaaaaagag

SEQ ID NO: 154107 - RNA, 18 nt, Human
aaacaggauuacuaugau

SEQ ID NO: 154108 - RNA, 21 nt, Human
aaagaaagagaaagaaaaaga

SEQ ID NO: 154109 - RNA, 19 nt, Human
aaaguagauaugaacaguu

SEQ ID NO: 154110 - RNA, 25 nt, Human
aacaagauccucacauuucaucuaa

SEQ ID NO: 154111 - RNA, 21 nt, Human
aagaaaaagaggagguaacgg

SEQ ID NO: 154112 - RNA, 20 nt, Human
aagaaagagaaagaaaaaga

SEQ ID NO: 154113 - RNA, 21 nt, Human
aagcccaccccaaccccccca

SEQ ID NO: 154114 - RNA, 22 nt, Human
acaccgccgccguuacacgagc

SEQ ID NO: 154115 - RNA, 18 nt, Human
accccccaccccaucuug

SEQ ID NO: 154116 - RNA, 24 nt, Human
acuacagcacgcuguacacaccug

SEQ ID NO: 154117 - RNA, 20 nt, Human
agaaaaagaggagguaacgg

SEQ ID NO: 154118 - RNA, 24 nt, Human
agaaaaagaggagguaacgggggg

SEQ ID NO: 154119 - RNA, 20 nt, Human
agcagcugccgacaccgccg

SEQ ID NO: 154120 - RNA, 20 nt, Human
agcccaccccaaccccccca

SEQ ID NO: 154121 - RNA, 21 nt, Human
agcccaccccaacccccccag

SEQ ID NO: 154122 - RNA, 24 nt, Human
aguaaaaaaaaaaaaaagaaagag

SEQ ID NO: 154123 - RNA, 18 nt, Human
auuuccaccccccacccc

SEQ ID NO: 154124 - RNA, 20 nt, Human
auuuccaccccccaccccau

SEQ ID NO: 154125 - RNA, 23 nt, Human
caccccaacccccccagugcuuc

SEQ ID NO: 154126 - RNA, 24 nt, Human
caccccaacccccccagugcuucc

SEQ ID NO: 154127 - RNA, 18 nt, Human
caccccccaccccaucuu

SEQ ID NO: 154128 - RNA, 22 nt, Human
cccaccccaacccccccagugc

SEQ ID NO: 154129 - RNA, 20 nt, Human
cccaccccaucuugaagaag

SEQ ID NO: 154130 - RNA, 22 nt, Human
ccccaacccccccagugcuucc

SEQ ID NO: 154131 - RNA, 25 nt, Human
ccccaacccccccagugcuuccaac

SEQ ID NO: 154132 - RNA, 18 nt, Human
ccccaccccaucuugaag

SEQ ID NO: 154133 - RNA, 20 nt, Human
ccccccaccccaucuugaag

SEQ ID NO: 154134 - RNA, 23 nt, Human
cgaagaacaacuuccaucuaaau

SEQ ID NO: 154135 - RNA, 24 nt, Human
gaacaguugaaggacuggaaccaa

SEQ ID NO: 154136 - RNA, 20 nt, Human
gagcuuaacuacaacgccgc

SEQ ID NO: 154137 - RNA, 23 nt, Human
uaccaagacuuuaucuugaggac

SEQ ID NO: 154138 - RNA, 20 nt, Human
ugacgaagaacaacuuccau

SEQ ID NO: 154139 - RNA, 22 nt, Human
uggaaccaacauuaagugacga

SEQ ID NO: 154140 - RNA, 19 nt, Human
uuccaagcccaccccaacc

SEQ ID NO: 154141 - RNA, 25 nt, Human
uuuaaguaaaaaaaaaaaaaagaaa

SEQ ID NO: 154142 - RNA, 18 nt, Human
cagcauggagaccauuug

SEQ ID NO: 154143 - RNA, 21 nt, Human
cauggagaccauuuguguggc

SEQ ID NO: 154144 - RNA, 22 nt, Human
aaguaaaaggcggggcucaaga

SEQ ID NO: 154145 - RNA, 22 nt, Human
aauuuuuuuuuuuuuugcucag

SEQ ID NO: 154146 - RNA, 22 nt, Human
augccccgccccuccgguccca

SEQ ID NO: 154147 - RNA, 21 nt, Human
cagaagaagcgggccgaagua

SEQ ID NO: 154148 - RNA, 23 nt, Human
cagaagaagcgggccgaaguaaa

SEQ ID NO: 154149 - RNA, 21 nt, Human
ccauaugaugccccgccccuc

SEQ ID NO: 154150 - RNA, 18 nt, Human
cccgccccuccgguccca

SEQ ID NO: 154151 - RNA, 18 nt, Human
cccuccggucccacucac

SEQ ID NO: 154152 - RNA, 19 nt, Human
ccgccggggccucgccuca

SEQ ID NO: 154153 - RNA, 21 nt, Human
ccggucccacucacucucggc

SEQ ID NO: 154154 - RNA, 22 nt, Human
cgaaguaaaaggcggggcucaa

SEQ ID NO: 154155 - RNA, 22 nt, Human
cuuuuagcacuauaaaauccaa

SEQ ID NO: 154156 - RNA, 21 nt, Human
gccccgccccuccggucccac

SEQ ID NO: 154157 - RNA, 20 nt, Human
ugccccgccccuccgguccc

SEQ ID NO: 154158 - RNA, 19 nt, Human
uucaacuauagaauaaagc

SEQ ID NO: 154159 - RNA, 20 nt, Human
aacaaagucaccacccacgg

SEQ ID NO: 154160 - RNA, 25 nt, Human
acuugagggagguggggccagaggu

SEQ ID NO: 154161 - RNA, 19 nt, Human
agagguggggucccggggg

SEQ ID NO: 154162 - RNA, 20 nt, Human
aggcccgggcuaggccgcgc

SEQ ID NO: 154163 - RNA, 22 nt, Human
aggcggagcggcugugggcccg

SEQ ID NO: 154164 - RNA, 25 nt, Human
agggagguggggccagaggugggga

SEQ ID NO: 154165 - RNA, 21 nt, Human
agggcuggggauacggggggc

SEQ ID NO: 154166 - RNA, 19 nt, Human
aggggagggcugugcggcu

SEQ ID NO: 154167 - RNA, 22 nt, Human
agggggcugcauccuggagggg

SEQ ID NO: 154168 - RNA, 23 nt, Human
aguuggagacacagggucagggc

SEQ ID NO: 154169 - RNA, 20 nt, Human
auagucaacgaacaugcaaa

SEQ ID NO: 154170 - RNA, 19 nt, Human
caccagggccuggcuggcu

SEQ ID NO: 154171 - RNA, 19 nt, Human
cagggccccucauccucua

SEQ ID NO: 154172 - RNA, 20 nt, Human
cagggugggggucagggagg

SEQ ID NO: 154173 - RNA, 22 nt, Human
caguguugccaagggcugggga

SEQ ID NO: 154174 - RNA, 21 nt, Human
ccacccacggggcuggggaga

SEQ ID NO: 154175 - RNA, 21 nt, Human
ccacccaggaugcgccagcga

SEQ ID NO: 154176 - RNA, 21 nt, Human
ccacggggcuggggagagcuc

SEQ ID NO: 154177 - RNA, 22 nt, Human
ccagagguggggucccgggggc

SEQ ID NO: 154178 - RNA, 22 nt, Human
cccgagcucggggccugccucc

SEQ ID NO: 154179 - RNA, 21 nt, Human
ccgcacucagcgccuucccca

SEQ ID NO: 154180 - RNA, 18 nt, Human
ccgcgugcggcgccgcga

SEQ ID NO: 154181 - RNA, 20 nt, Human
ccgcuccgcgcugccuggcg

SEQ ID NO: 154182 - RNA, 18 nt, Human
cgaggcugcggacaggag

SEQ ID NO: 154183 - RNA, 23 nt, Human
cgccgcgacuccgcacucagcgc

SEQ ID NO: 154184 - RNA, 21 nt, Human
cgggggagggggcugcauccc

SEQ ID NO: 154185 - RNA, 19 nt, Human
cuccgcacucagcgccuuc

SEQ ID NO: 154186 - RNA, 18 nt, Human
cuggggcuggggcggagg

SEQ ID NO: 154187 - RNA, 18 nt, Human
gaucugcgggccgggagg

SEQ ID NO: 154188 - RNA, 19 nt, Human
gcggagcggcugugggccc

SEQ ID NO: 154189 - RNA, 20 nt, Human
gcugugcggcucccagccuu

SEQ ID NO: 154190 - RNA, 21 nt, Human
gcuugggcacuuuuucugggc

SEQ ID NO: 154191 - RNA, 23 nt, Human
ggaaaacaaagucaccacccacg

SEQ ID NO: 154192 - RNA, 23 nt, Human
ggagggggcugcauccuggaggg

SEQ ID NO: 154193 - RNA, 21 nt, Human
ggccuggcuggcuggggcugg

SEQ ID NO: 154194 - RNA, 22 nt, Human
gggcaaccguggcggcgugugc

SEQ ID NO: 154195 - RNA, 18 nt, Human
gggccugccuccacccag

SEQ ID NO: 154196 - RNA, 19 nt, Human
gggcgcagacuugagggag

SEQ ID NO: 154197 - RNA, 20 nt, Human
gggcuggggauacggggggc

SEQ ID NO: 154198 - RNA, 21 nt, Human
ggggcuggggcggagggcccc

SEQ ID NO: 154199 - RNA, 20 nt, Human
gggggagggggcugcauccu

SEQ ID NO: 154200 - RNA, 21 nt, Human
gggugcagcaguuggagacac

SEQ ID NO: 154201 - RNA, 22 nt, Human
gguggcggagacagggucggga

SEQ ID NO: 154202 - RNA, 21 nt, Human
guggggccagagguggggucc

SEQ ID NO: 154203 - RNA, 21 nt, Human
uccaccggggcagugaaaggg

SEQ ID NO: 154204 - RNA, 18 nt, Human
uccagcgcaggaggggag

SEQ ID NO: 154205 - RNA, 19 nt, Human
uccccgagcucggggccug

SEQ ID NO: 154206 - RNA, 21 nt, Human
uccccgagcucggggccugcc

SEQ ID NO: 154207 - RNA, 22 nt, Human
ucugcgggccgggaggcggagc

SEQ ID NO: 154208 - RNA, 18 nt, Human
ugaaagggucccggcagc

SEQ ID NO: 154209 - RNA, 19 nt, Human
ugagaggaaacccuuggcg

SEQ ID NO: 154210 - RNA, 20 nt, Human
ugagggagguggggccagag

SEQ ID NO: 154211 - RNA, 22 nt, Human
ugagggagguggggccagaggu

SEQ ID NO: 154212 - RNA, 22 nt, Human
ugcacuccaguguugccaaggg

SEQ ID NO: 154213 - RNA, 19 nt, Human
ugcagcaguuggagacaca

SEQ ID NO: 154214 - RNA, 21 nt, Human
ugccaagggcuggggauacgg

SEQ ID NO: 154215 - RNA, 23 nt, Human
ugccaagggcuggggauacgggg

SEQ ID NO: 154216 - RNA, 21 nt, Human
ugccgcgugcggcgccgcgac

SEQ ID NO: 154217 - RNA, 21 nt, Human
ugcgggccagaggagcccgcg

SEQ ID NO: 154218 - RNA, 20 nt, Human
ugcgggggagggggcugcau

SEQ ID NO: 154219 - RNA, 19 nt, Human
uggcggggauaagaaauga

SEQ ID NO: 154220 - RNA, 21 nt, Human
uggcuggggcuggggcggagg

SEQ ID NO: 154221 - RNA, 23 nt, Human
uggggccagagguggggucccgg

SEQ ID NO: 154222 - RNA, 20 nt, Human
uggggucccgggggccacaa

SEQ ID NO: 154223 - RNA, 18 nt, Human
uuuuuuccagaugagagc

SEQ ID NO: 154224 - RNA, 21 nt, Human
uuuuuuuuuuuuuuuuccaga

SEQ ID NO: 154225 - RNA, 22 nt, Human
uuuuuuuuuuuuuuuuuuccag

SEQ ID NO: 154226 - RNA, 21 nt, Human
aaaaacaaaaaucaggaacuu

SEQ ID NO: 154227 - RNA, 24 nt, Human
aaaagauggauauuugggaccaaa

SEQ ID NO: 154228 - RNA, 19 nt, Human
aaaagcauuguuuaucacc

SEQ ID NO: 154229 - RNA, 22 nt, Human
aaaauaaaaacaaaaaucagga

SEQ ID NO: 154230 - RNA, 21 nt, Human
aaaauuagcugcccugaauaa

SEQ ID NO: 154231 - RNA, 20 nt, Human
aaacaaacagcaacaaaaga

SEQ ID NO: 154232 - RNA, 22 nt, Human
aaacaaagcaaagcugcgacaa

SEQ ID NO: 154233 - RNA, 21 nt, Human
aaacaagacauaccaagagaa

SEQ ID NO: 154234 - RNA, 23 nt, Human
aaacaucacuccaggcacaacuc

SEQ ID NO: 154235 - RNA, 26 nt, Human
aaagagcacagcccgagguuagaggc

SEQ ID NO: 154236 - RNA, 18 nt, Human
aaaggaaauugaaggaaa

SEQ ID NO: 154237 - RNA, 27 nt, Human
aacaagcaauguaauuucaaaaaaaua

SEQ ID NO: 154238 - RNA, 20 nt, Human
aacccugauuuuggauuauc

SEQ ID NO: 154239 - RNA, 21 nt, Human
aagaaacacagaccacuagcu

SEQ ID NO: 154240 - RNA, 23 nt, Human
aagccagaggcagagcuucagga

SEQ ID NO: 154241 - RNA, 18 nt, Human
aaugucuacucuccaggc

SEQ ID NO: 154242 - RNA, 23 nt, Human
acaaguauguuguuuccuucugg

SEQ ID NO: 154243 - RNA, 19 nt, Human
acaaguauguuguuucuag

SEQ ID NO: 154244 - RNA, 21 nt, Human
acagcaacaaaagaauuaugu

SEQ ID NO: 154245 - RNA, 21 nt, Human
acccaauaccaacaucagcca

SEQ ID NO: 154246 - RNA, 27 nt, Human
agagaacagaaacuggcauaauguuau

SEQ ID NO: 154247 - RNA, 23 nt, Human
agaucacgcucccaagacuugca

SEQ ID NO: 154248 - RNA, 21 nt, Human
agcccgagguuagaggcgacg

SEQ ID NO: 154249 - RNA, 20 nt, Human
agccuuggaaucccuuuggc

SEQ ID NO: 154250 - RNA, 22 nt, Human
agcuacgggaauccucacgcuu

SEQ ID NO: 154251 - RNA, 21 nt, Human
agcuccugggcucccgggccu

SEQ ID NO: 154252 - RNA, 20 nt, Human
aggcaugggcuauggcuugg

SEQ ID NO: 154253 - RNA, 18 nt, Human
aggcucagaaaccggcgg

SEQ ID NO: 154254 - RNA, 21 nt, Human
agggugcuauaauaaacccuu

SEQ ID NO: 154255 - RNA, 21 nt, Human
aggugcuucuuaaacaaacag

SEQ ID NO: 154256 - RNA, 21 nt, Human
aguugagaguaaguuuucagg

SEQ ID NO: 154257 - RNA, 23 nt, Human
auaaaauuguccccaaauuuaag

SEQ ID NO: 154258 - RNA, 21 nt, Human
auaaacauuaaaaagaaccca

SEQ ID NO: 154259 - RNA, 19 nt, Human
auccacuuccccaccauac

SEQ ID NO: 154260 - RNA, 22 nt, Human
augaauagaaacacauuggaug

SEQ ID NO: 154261 - RNA, 18 nt, Human
augaauuaacuggaaccc

SEQ ID NO: 154262 - RNA, 19 nt, Human
augacaagguagcuugaaa

SEQ ID NO: 154263 - RNA, 25 nt, Human
augacuguauacaugacaagguagc

SEQ ID NO: 154264 - RNA, 21 nt, Human
caaagcaaagcugcgacaaaa

SEQ ID NO: 154265 - RNA, 18 nt, Human
caaguacagugcccacug

SEQ ID NO: 154266 - RNA, 19 nt, Human
caccacagugaacaguuca

SEQ ID NO: 154267 - RNA, 23 nt, Human
caccccuguguaaggcacacaca

SEQ ID NO: 154268 - RNA, 26 nt, Human
caccuggaaaaagagcacagcccgag

SEQ ID NO: 154269 - RNA, 18 nt, Human
cacuuauuaauucaaguc

SEQ ID NO: 154270 - RNA, 23 nt, Human
cacuucaaguaaaaauacaaaga

SEQ ID NO: 154271 - RNA, 21 nt, Human
cagaaaauaucugcuguccau

SEQ ID NO: 154272 - RNA, 20 nt, Human
cagcccgagguuagaggcga

SEQ ID NO: 154273 - RNA, 22 nt, Human
cagccugaguagugacagcaac

SEQ ID NO: 154274 - RNA, 21 nt, Human
caggacgaacgcccuccgccg

SEQ ID NO: 154275 - RNA, 20 nt, Human
cagggaaggcugcccugugg

SEQ ID NO: 154276 - RNA, 22 nt, Human
cauugccauaggaauacaagag

SEQ ID NO: 154277 - RNA, 20 nt, Human
ccacccuucucccgugcccc

SEQ ID NO: 154278 - RNA, 18 nt, Human
ccacuuccccaccauacc

SEQ ID NO: 154279 - RNA, 26 nt, Human
ccagaggcagagcuucaggacacucu

SEQ ID NO: 154280 - RNA, 22 nt, Human
ccagggcacccccaaaggcaau

SEQ ID NO: 154281 - RNA, 20 nt, Human
ccagucaaauuaaauccaga

SEQ ID NO: 154282 - RNA, 22 nt, Human
ccauaccugagccccccagaua

SEQ ID NO: 154283 - RNA, 19 nt, Human
ccauuaguggcacuucaag

SEQ ID NO: 154284 - RNA, 24 nt, Human
cccaauaccaacaucagccagaaa

SEQ ID NO: 154285 - RNA, 24 nt, Human
cccaccauaccugagccccccaga

SEQ ID NO: 154286 - RNA, 24 nt, Human
cccaugaccggaaagccagaggca

SEQ ID NO: 154287 - RNA, 21 nt, Human
ccccaacccauagacugaguu

SEQ ID NO: 154288 - RNA, 21 nt, Human
ccccggcccugccccgggagc

SEQ ID NO: 154289 - RNA, 19 nt, Human
cccggcccugccccgggag

SEQ ID NO: 154290 - RNA, 21 nt, Human
cccuacuuucccucuuguucu

SEQ ID NO: 154291 - RNA, 26 nt, Human
ccgacacgcgagcucuggccccggcc

SEQ ID NO: 154292 - RNA, 20 nt, Human
ccgcagggcagaaggcucag

SEQ ID NO: 154293 - RNA, 18 nt, Human
ccugaagcugaccuuacu

SEQ ID NO: 154294 - RNA, 20 nt, Human
ccugggcucccgggccucca

SEQ ID NO: 154295 - RNA, 19 nt, Human
ccuuacugcaaguucaggg

SEQ ID NO: 154296 - RNA, 21 nt, Human
cgaacgcccuccgccagcucc

SEQ ID NO: 154297 - RNA, 21 nt, Human
cgggccuccaacuuuaaguac

SEQ ID NO: 154298 - RNA, 26 nt, Human
cggggucugcaaggaauguuccuagg

SEQ ID NO: 154299 - RNA, 23 nt, Human
cuacugaaccuuggugcacaccc

SEQ ID NO: 154300 - RNA, 22 nt, Human
cuccaaauacuuucaauacucu

SEQ ID NO: 154301 - RNA, 25 nt, Human
cucccaguacccacaguccaucucc

SEQ ID NO: 154302 - RNA, 18 nt, Human
cuccgccagcuccugggc

SEQ ID NO: 154303 - RNA, 21 nt, Human
cuccgccagcuccugggcucc

SEQ ID NO: 154304 - RNA, 18 nt, Human
cuccugggcucccgggcc

SEQ ID NO: 154305 - RNA, 21 nt, Human
cuccugggcucccgggccucc

SEQ ID NO: 154306 - RNA, 23 nt, Human
cugcuccuuucaacuaccauuua

SEQ ID NO: 154307 - RNA, 21 nt, Human
cugcuguccauuaguggcacu

SEQ ID NO: 154308 - RNA, 25 nt, Human
cuuaauauauuugccauuccccaga

SEQ ID NO: 154309 - RNA, 25 nt, Human
cuuagaaaacaauuuuaaaugacua

SEQ ID NO: 154310 - RNA, 22 nt, Human
gaaaagaaacacagaccacuag

SEQ ID NO: 154311 - RNA, 21 nt, Human
gaaaggaaaugcaguuggaaa

SEQ ID NO: 154312 - RNA, 25 nt, Human
gaacugagcaagcaaaugaauggcc

SEQ ID NO: 154313 - RNA, 20 nt, Human
gaaugcaaaggggucugugu

SEQ ID NO: 154314 - RNA, 23 nt, Human
gagcacagcccgagguuagaggc

SEQ ID NO: 154315 - RNA, 21 nt, Human
gagccuuuucccauaaaacaa

SEQ ID NO: 154316 - RNA, 21 nt, Human
gccacucaucuagaaagccau

SEQ ID NO: 154317 - RNA, 19 nt, Human
gccccagggugcugggcca

SEQ ID NO: 154318 - RNA, 24 nt, Human
ggaaaaagagcacagcccgagguu

SEQ ID NO: 154319 - RNA, 18 nt, Human
ggaaagccagaggcagag

SEQ ID NO: 154320 - RNA, 21 nt, Human
ggaaguaacccauaauugugc

SEQ ID NO: 154321 - RNA, 20 nt, Human
ggauuaucucuaaaccacca

SEQ ID NO: 154322 - RNA, 22 nt, Human
ggauuuucuuccccaaaccaaa

SEQ ID NO: 154323 - RNA, 25 nt, Human
ggccuccaacuuuaaguacuggucu

SEQ ID NO: 154324 - RNA, 21 nt, Human
ggcucccgggccuccaacuuu

SEQ ID NO: 154325 - RNA, 20 nt, Human
gggaaggaguacucuaagcc

SEQ ID NO: 154326 - RNA, 19 nt, Human
guccaugggaggcaugaau

SEQ ID NO: 154327 - RNA, 26 nt, Human
guccguggccgcgggcagggugcaga

SEQ ID NO: 154328 - RNA, 21 nt, Human
gugagagaacagaaacuggca

SEQ ID NO: 154329 - RNA, 20 nt, Human
gugcugggccaauuguagga

SEQ ID NO: 154330 - RNA, 25 nt, Human
uaaaaacgaggccacacuuuaauuc

SEQ ID NO: 154331 - RNA, 21 nt, Human
uaaaaagaacccacugaccca

SEQ ID NO: 154332 - RNA, 19 nt, Human
uaaaacaagagcucuacac

SEQ ID NO: 154333 - RNA, 21 nt, Human
uaaaagcaaaauuagcugccc

SEQ ID NO: 154334 - RNA, 23 nt, Human
uaaaugcaacaccagggccccug

SEQ ID NO: 154335 - RNA, 20 nt, Human
uaacacagacaucaccucuc

SEQ ID NO: 154336 - RNA, 22 nt, Human
uaacacagacaucaccucucaa

SEQ ID NO: 154337 - RNA, 26 nt, Human
uaacacagauacauaaaauugucccc

SEQ ID NO: 154338 - RNA, 19 nt, Human
uaagaucaacuuguugcuc

SEQ ID NO: 154339 - RNA, 24 nt, Human
uaaguauaaacauuaaaaagaacc

SEQ ID NO: 154340 - RNA, 22 nt, Human
uaccccagggaucccagggcac

SEQ ID NO: 154341 - RNA, 20 nt, Human
uaccugagccccccagauaa

SEQ ID NO: 154342 - RNA, 22 nt, Human
uacugaaaagauggauauuugg

SEQ ID NO: 154343 - RNA, 21 nt, Human
uagcaagggggaaagagagcu

SEQ ID NO: 154344 - RNA, 21 nt, Human
uagccacaacaauccugcaca

SEQ ID NO: 154345 - RNA, 30 nt, Human
uauaaccaaugaccucucugugaaugcaag

SEQ ID NO: 154346 - RNA, 18 nt, Human
ucaaauuaaauccagaac

SEQ ID NO: 154347 - RNA, 19 nt, Human
ucaggacacucugaaucug

SEQ ID NO: 154348 - RNA, 21 nt, Human
ucaggacacucugaaucugca

SEQ ID NO: 154349 - RNA, 24 nt, Human
ucaggcacaauuggaugcaaaaaa

SEQ ID NO: 154350 - RNA, 20 nt, Human
ucaucuagaaagccauuggu

SEQ ID NO: 154351 - RNA, 21 nt, Human
uccaaacaagacauaccaaga

SEQ ID NO: 154352 - RNA, 19 nt, Human
ucccaagacuugcaccaaa

SEQ ID NO: 154353 - RNA, 21 nt, Human
ucccaggacgaacgcccuccg

SEQ ID NO: 154354 - RNA, 22 nt, Human
uccccaaaccaaacccugauuu

SEQ ID NO: 154355 - RNA, 23 nt, Human
uccccaccauaccugagcccccc

SEQ ID NO: 154356 - RNA, 21 nt, Human
uccccagauuccugaauccac

SEQ ID NO: 154357 - RNA, 18 nt, Human
ucccgugccccagggugc

SEQ ID NO: 154358 - RNA, 19 nt, Human
ucccuguguggccccuugu

SEQ ID NO: 154359 - RNA, 22 nt, Human
uccgccagcuccugggcucccg

SEQ ID NO: 154360 - RNA, 26 nt, Human
uccguggccgcgggcagggugcagac

SEQ ID NO: 154361 - RNA, 18 nt, Human
uccugggcucccgggccu

SEQ ID NO: 154362 - RNA, 20 nt, Human
ucucaggcaccugcucaugg

SEQ ID NO: 154363 - RNA, 21 nt, Human
ucuuaacaugaauagaaacac

SEQ ID NO: 154364 - RNA, 24 nt, Human
ucuuugcuguggcuuauucuuaga

SEQ ID NO: 154365 - RNA, 19 nt, Human
ucuuuggaugaccuagccu

SEQ ID NO: 154366 - RNA, 29 nt, Human
ugaaaagauggauauuugggaccaacugg

SEQ ID NO: 154367 - RNA, 21 nt, Human
ugaaugcaaaggggucugugu

SEQ ID NO: 154368 - RNA, 20 nt, Human
ugaauggccacucaucuaga

SEQ ID NO: 154369 - RNA, 24 nt, Human
ugacuguauacaugacaagguagc

SEQ ID NO: 154370 - RNA, 18 nt, Human
ugagaaaauuguuuacag

SEQ ID NO: 154371 - RNA, 22 nt, Human
ugagcaagcaaaugaauggcca

SEQ ID NO: 154372 - RNA, 20 nt, Human
ugagcuacuguaugacuuua

SEQ ID NO: 154373 - RNA, 20 nt, Human
ugaggguaaaaugcagcagg

SEQ ID NO: 154374 - RNA, 18 nt, Human
ugcacagcucuaaacaca

SEQ ID NO: 154375 - RNA, 20 nt, Human
ugcaugccggaguguaugca

SEQ ID NO: 154376 - RNA, 24 nt, Human
ugccacuaagaacugagcaagcaa

SEQ ID NO: 154377 - RNA, 18 nt, Human
ugccccagggugcugggc

SEQ ID NO: 154378 - RNA, 20 nt, Human
ugcccuguggcuggaaugag

SEQ ID NO: 154379 - RNA, 18 nt, Human
ugcuggagaccccugggc

SEQ ID NO: 154380 - RNA, 19 nt, Human
uggagaccccugggcgaac

SEQ ID NO: 154381 - RNA, 21 nt, Human
uggauuaucucuaaaccacca

SEQ ID NO: 154382 - RNA, 18 nt, Human
uggcauaaugucacuuau

SEQ ID NO: 154383 - RNA, 21 nt, Human
uggccaacuaggggaucugcc

SEQ ID NO: 154384 - RNA, 21 nt, Human
uggcgaaaagaaacacagacc

SEQ ID NO: 154385 - RNA, 19 nt, Human
uggcuggaaugagccuuuc

SEQ ID NO: 154386 - RNA, 24 nt, Human
uggcuuaaacaucacuccaggcac

SEQ ID NO: 154387 - RNA, 18 nt, Human
ugggacaaguauguuguu

SEQ ID NO: 154388 - RNA, 23 nt, Human
ugggacaaguauguuguuucuag

SEQ ID NO: 154389 - RNA, 20 nt, Human
ugggcucccgggccuccaac

SEQ ID NO: 154390 - RNA, 25 nt, Human
ugggucauuggcuaacacagacauc

SEQ ID NO: 154391 - RNA, 18 nt, Human
uguaugcaggagacagaa

SEQ ID NO: 154392 - RNA, 21 nt, Human
ugucugauaaacaagcaaugu

SEQ ID NO: 154393 - RNA, 20 nt, Human
ugugucucaggcaccugcuc

SEQ ID NO: 154394 - RNA, 19 nt, Human
uguucagcccucaaaaggc

SEQ ID NO: 154395 - RNA, 21 nt, Human
uuacugcaaguucagggaggg

SEQ ID NO: 154396 - RNA, 22 nt, Human
uuagugcuauuuugucuacugu

SEQ ID NO: 154397 - RNA, 18 nt, Human
uucacauaacuagcuucc

SEQ ID NO: 154398 - RNA, 19 nt, Human
uucagcuccaugccccagg

SEQ ID NO: 154399 - RNA, 19 nt, Human
uuccuccaaauacuuucaa

SEQ ID NO: 154400 - RNA, 23 nt, Human
uugguuuuugcauguuaacccag

SEQ ID NO: 154401 - RNA, 18 nt, Human
uuucugcccuacuuuccc

SEQ ID NO: 154402 - RNA, 19 nt, Human
uuuguuaagaaaaaggaag

SEQ ID NO: 154403 - RNA, 19 nt, Human
uuuguucagcccucaaaag

SEQ ID NO: 154404 - RNA, 23 nt, Human
accggccuugccuucucuaaaau

SEQ ID NO: 154405 - RNA, 21 nt, Human
agcccgucgcagcucgggugg

SEQ ID NO: 154406 - RNA, 18 nt, Human
agcugagaaaacaccuug

SEQ ID NO: 154407 - RNA, 24 nt, Human
aggcaguuauuucucgcagccucc

SEQ ID NO: 154408 - RNA, 19 nt, Human
cagcccugccccgcagccc

SEQ ID NO: 154409 - RNA, 22 nt, Human
cagcucaggcuccgggcgccag

SEQ ID NO: 154410 - RNA, 19 nt, Human
ccccgcagccccagagccc

SEQ ID NO: 154411 - RNA, 21 nt, Human
ccugcagcucaggcuccgggc

SEQ ID NO: 154412 - RNA, 20 nt, Human
cgcccugcaaguuucaagag

SEQ ID NO: 154413 - RNA, 19 nt, Human
cgcucgccgccugcucuuc

SEQ ID NO: 154414 - RNA, 21 nt, Human
cuccugcagcucaggcuccgg

SEQ ID NO: 154415 - RNA, 20 nt, Human
cucgcagccuccgcgcuugc

SEQ ID NO: 154416 - RNA, 24 nt, Human
cucgcagccuccgcgcuugcaacu

SEQ ID NO: 154417 - RNA, 18 nt, Human
cuugcagauaaacacacc

SEQ ID NO: 154418 - RNA, 19 nt, Human
gccagcccugccccgcagc

SEQ ID NO: 154419 - RNA, 25 nt, Human
gccccagagcccgucgcagcucggg

SEQ ID NO: 154420 - RNA, 19 nt, Human
gccuucucuaaaaugcgga

SEQ ID NO: 154421 - RNA, 21 nt, Human
gcgcuugcaacugccuccugg

SEQ ID NO: 154422 - RNA, 23 nt, Human
uauaauggcuugcagauaaacac

SEQ ID NO: 154423 - RNA, 21 nt, Human
uccaaaaagccagcagcugga

SEQ ID NO: 154424 - RNA, 24 nt, Human
uccccggcccagcgcucgccgccu

SEQ ID NO: 154425 - RNA, 23 nt, Human
ucgcagcucggguggucccuccc

SEQ ID NO: 154426 - RNA, 22 nt, Human
ugagaaaacaccuugcaagaag

SEQ ID NO: 154427 - RNA, 21 nt, Human
ugccccgcagccccagagccc

SEQ ID NO: 154428 - RNA, 18 nt, Human
uugagauaacagcugaga

SEQ ID NO: 154429 - RNA, 24 nt, Human
uugagauaacagcugagaaaacac

SEQ ID NO: 154430 - RNA, 21 nt, Human
aacccccaccagucccacccc

SEQ ID NO: 154431 - RNA, 22 nt, Human
aagcagcagcaaaagcaucacc

SEQ ID NO: 154432 - RNA, 22 nt, Human
acucuggccuccauccccuucc

SEQ ID NO: 154433 - RNA, 25 nt, Human
agaccccagcuccgccccagcccuu

SEQ ID NO: 154434 - RNA, 19 nt, Human
aggagggggaggagagggc

SEQ ID NO: 154435 - RNA, 20 nt, Human
aggcucguugggagcugaug

SEQ ID NO: 154436 - RNA, 21 nt, Human
aggggcagcacugugcccaga

SEQ ID NO: 154437 - RNA, 24 nt, Human
agggggaggagagggcguggggcc

SEQ ID NO: 154438 - RNA, 24 nt, Human
aggggguaggauuaagcagcagca

SEQ ID NO: 154439 - RNA, 25 nt, Human
caaggggcagcacugugcccagagc

SEQ ID NO: 154440 - RNA, 22 nt, Human
caccgcgccgcguccccucacu

SEQ ID NO: 154441 - RNA, 25 nt, Human
cacugcccagaccccagcuccgccc

SEQ ID NO: 154442 - RNA, 19 nt, Human
cagcagcaaaagcaucacc

SEQ ID NO: 154443 - RNA, 22 nt, Human
cagcagcaaaagcaucacccac

SEQ ID NO: 154444 - RNA, 19 nt, Human
cagcuucugacacccccua

SEQ ID NO: 154445 - RNA, 24 nt, Human
caucccgugcagcccccuauggcu

SEQ ID NO: 154446 - RNA, 20 nt, Human
ccaccgcgccgcguccccuc

SEQ ID NO: 154447 - RNA, 21 nt, Human
ccagaacccccaccaguccca

SEQ ID NO: 154448 - RNA, 23 nt, Human
ccagaccccagcuccgccccagc

SEQ ID NO: 154449 - RNA, 18 nt, Human
ccagcuccgccccagccc

SEQ ID NO: 154450 - RNA, 20 nt, Human
cccacgcaucccgugcagcc

SEQ ID NO: 154451 - RNA, 23 nt, Human
cccacgcaucccgugcagccccc

SEQ ID NO: 154452 - RNA, 22 nt, Human
ccccaccgcgccgcguccccuc

SEQ ID NO: 154453 - RNA, 22 nt, Human
ccccaugucccugcgccucccu

SEQ ID NO: 154454 - RNA, 19 nt, Human
cccccuacacucugggggc

SEQ ID NO: 154455 - RNA, 18 nt, Human
ccccuaggagggggagga

SEQ ID NO: 154456 - RNA, 21 nt, Human
ccccuccuccgccgccuccuc

SEQ ID NO: 154457 - RNA, 18 nt, Human
cccuggccaaacccaaaa

SEQ ID NO: 154458 - RNA, 23 nt, Human
cccuggccaccccagggguccag

SEQ ID NO: 154459 - RNA, 19 nt, Human
ccgccccagcccuuggggc

SEQ ID NO: 154460 - RNA, 27 nt, Human
ccgccgccuccucgggccgcgccgccc

SEQ ID NO: 154461 - RNA, 25 nt, Human
ccugccagaacccccaccaguccca

SEQ ID NO: 154462 - RNA, 18 nt, Human
cgggcaggcaugggggcc

SEQ ID NO: 154463 - RNA, 21 nt, Human
cguucccagcuucugacaccc

SEQ ID NO: 154464 - RNA, 19 nt, Human
cuaggcagguccugccaga

SEQ ID NO: 154465 - RNA, 22 nt, Human
cuccgccccagcccuuggggcu

SEQ ID NO: 154466 - RNA, 25 nt, Human
cuccgccccagcccuuggggcugac

SEQ ID NO: 154467 - RNA, 21 nt, Human
cuccucgggccgcgccgcccc

SEQ ID NO: 154468 - RNA, 18 nt, Human
cucuccuacccccugagg

SEQ ID NO: 154469 - RNA, 21 nt, Human
cuggccaaacccaaaaauaaa

SEQ ID NO: 154470 - RNA, 21 nt, Human
cuggcccugccagcaggcugu

SEQ ID NO: 154471 - RNA, 19 nt, Human
cuggccuccauccccuucc

SEQ ID NO: 154472 - RNA, 22 nt, Human
cuggcuugccccaugucccugc

SEQ ID NO: 154473 - RNA, 23 nt, Human
gaacccccaccagucccaccccu

SEQ ID NO: 154474 - RNA, 20 nt, Human
gacucuggccuccauccccu

SEQ ID NO: 154475 - RNA, 21 nt, Human
gagccgggggccgcgggcggc

SEQ ID NO: 154476 - RNA, 23 nt, Human
gagccuggacacacguucccagc

SEQ ID NO: 154477 - RNA, 26 nt, Human
gccagaacccccaccagucccacccc

SEQ ID NO: 154478 - RNA, 19 nt, Human
gcccccuauggcuuccgca

SEQ ID NO: 154479 - RNA, 18 nt, Human
gcccugccagcaggcugu

SEQ ID NO: 154480 - RNA, 20 nt, Human
gcgcggucgggcaggcaugg

SEQ ID NO: 154481 - RNA, 20 nt, Human
ggaagcccuggccaccccag

SEQ ID NO: 154482 - RNA, 21 nt, Human
ggcccuggcuugccccauguc

SEQ ID NO: 154483 - RNA, 21 nt, Human
gggagacucuggccuccaucc

SEQ ID NO: 154484 - RNA, 23 nt, Human
gggccgcgggcggccccuccucc

SEQ ID NO: 154485 - RNA, 21 nt, Human
gggcguggggccuguucccag

SEQ ID NO: 154486 - RNA, 24 nt, Human
gggggaggagagggcguggggccu

SEQ ID NO: 154487 - RNA, 21 nt, Human
ggucgggcaggcaugggggcc

SEQ ID NO: 154488 - RNA, 23 nt, Human
uaagcagcagcaaaagcaucacc

SEQ ID NO: 154489 - RNA, 24 nt, Human
uauacauuaaaauagagucucugu

SEQ ID NO: 154490 - RNA, 20 nt, Human
uauauuuuuuucucauuaaa

SEQ ID NO: 154491 - RNA, 24 nt, Human
ucugggggcacguuauggcuugca

SEQ ID NO: 154492 - RNA, 19 nt, Human
ugagaggaggagcgaaggg

SEQ ID NO: 154493 - RNA, 19 nt, Human
ugauggggaagcccuggcc

SEQ ID NO: 154494 - RNA, 20 nt, Human
ugcaaaugaugagaggagga

SEQ ID NO: 154495 - RNA, 23 nt, Human
ugcagcaaauauacauuaaaaua

SEQ ID NO: 154496 - RNA, 19 nt, Human
ugccagaacccccaccagu

SEQ ID NO: 154497 - RNA, 23 nt, Human
ugccagaacccccaccaguccca

SEQ ID NO: 154498 - RNA, 20 nt, Human
ugcccagagccuggacacac

SEQ ID NO: 154499 - RNA, 18 nt, Human
ugcccuggcccugccagc

SEQ ID NO: 154500 - RNA, 19 nt, Human
uggccuccauccccuuccc

SEQ ID NO: 154501 - RNA, 18 nt, Human
uggcuuccgcaaggcccc

SEQ ID NO: 154502 - RNA, 22 nt, Human
uuaaaaccaaaagcgguuucuc

SEQ ID NO: 154503 - RNA, 20 nt, Human
uucccagcuucugacacccc

SEQ ID NO: 154504 - RNA, 19 nt, Human
aggacagugcuccaugggc

SEQ ID NO: 154505 - RNA, 20 nt, Human
cacagugacuaaggugggcc

SEQ ID NO: 154506 - RNA, 21 nt, Human
cacugccuuuuaugguccuau

SEQ ID NO: 154507 - RNA, 20 nt, Human
cacuggaucaccucuggccu

SEQ ID NO: 154508 - RNA, 22 nt, Human
cagugagccuaaccugcgcauc

SEQ ID NO: 154509 - RNA, 22 nt, Human
cccaggaaggggaggaugccuc

SEQ ID NO: 154510 - RNA, 23 nt, Human
ccucugagcagccugugugaccu

SEQ ID NO: 154511 - RNA, 19 nt, Human
ccugcagcucccaaaucac

SEQ ID NO: 154512 - RNA, 23 nt, Human
cuagggcagguguguccaggaag

SEQ ID NO: 154513 - RNA, 25 nt, Human
cuggccuagacagugagccuaaccu

SEQ ID NO: 154514 - RNA, 18 nt, Human
gcagguguguccaggaag

SEQ ID NO: 154515 - RNA, 25 nt, Human
gcccucugagcagccugugugaccu

SEQ ID NO: 154516 - RNA, 22 nt, Human
ucagcagcccucugagcagccu

SEQ ID NO: 154517 - RNA, 22 nt, Human
uccaggaagagcuuccauugcc

SEQ ID NO: 154518 - RNA, 24 nt, Human
ucucuuccaccccagggugagggc

SEQ ID NO: 154519 - RNA, 18 nt, Human
ugagcagccugugugacc

SEQ ID NO: 154520 - RNA, 23 nt, Human
ugcaagccaagcucauuucucuu

SEQ ID NO: 154521 - RNA, 22 nt, Human
uggccucaaaguucuggacacc

SEQ ID NO: 154522 - RNA, 22 nt, Human
uuuggcagggaaaaggaagucc

SEQ ID NO: 154523 - RNA, 23 nt, Human
aaaaaacccaacuaaucagaaac

SEQ ID NO: 154524 - RNA, 21 nt, Human
aaaccaacuucaaauguuaau

SEQ ID NO: 154525 - RNA, 21 nt, Human
aaacgcaggucauauaccuug

SEQ ID NO: 154526 - RNA, 24 nt, Human
aaagaauccugccuaccaucuuca

SEQ ID NO: 154527 - RNA, 22 nt, Human
aacagccaugaaaauaaauucc

SEQ ID NO: 154528 - RNA, 27 nt, Human
aagaaaaaaauaauaauauucagugga

SEQ ID NO: 154529 - RNA, 24 nt, Human
aagaauccugccuaccaucuucag

SEQ ID NO: 154530 - RNA, 23 nt, Human
aaucagaaacaugaaaaccagua

SEQ ID NO: 154531 - RNA, 23 nt, Human
acacaggaaaagagcaacuucag

SEQ ID NO: 154532 - RNA, 22 nt, Human
acgcaggucauauaccuuggcu

SEQ ID NO: 154533 - RNA, 18 nt, Human
agaaaaagguagaaauug

SEQ ID NO: 154534 - RNA, 21 nt, Human
agaaagaaaaagcuaagaaaa

SEQ ID NO: 154535 - RNA, 21 nt, Human
agaaagaaaaagcuaagaaaa

SEQ ID NO: 154536 - RNA, 26 nt, Human
agaaggaaguaaaaauagggggaccc

SEQ ID NO: 154537 - RNA, 19 nt, Human
agaccucugcggccuaagc

SEQ ID NO: 154538 - RNA, 22 nt, Human
agacuccucccaaagaccacac

SEQ ID NO: 154539 - RNA, 21 nt, Human
agcacagaacccaagcugagu

SEQ ID NO: 154540 - RNA, 23 nt, Human
aggaagagaggaggagcacagaa

SEQ ID NO: 154541 - RNA, 19 nt, Human
aggagcacagaacccaagc

SEQ ID NO: 154542 - RNA, 24 nt, Human
aggcuuuaaccaucauaaucacca

SEQ ID NO: 154543 - RNA, 21 nt, Human
aguggccucugggcacaaagc

SEQ ID NO: 154544 - RNA, 24 nt, Human
aguguucuauaggaagagaggagg

SEQ ID NO: 154545 - RNA, 21 nt, Human
auaaagcauucuuaucaaaga

SEQ ID NO: 154546 - RNA, 25 nt, Human
augcauuuuaaggagaguucugauu

SEQ ID NO: 154547 - RNA, 20 nt, Human
auuaaaaaaaaaaauuaacg

SEQ ID NO: 154548 - RNA, 25 nt, Human
caaaaaacuacucagccaugacaac

SEQ ID NO: 154549 - RNA, 27 nt, Human
caaaaugguucccuaguauagccgaag

SEQ ID NO: 154550 - RNA, 26 nt, Human
caacuaaucagaaacaugaaaaccag

SEQ ID NO: 154551 - RNA, 19 nt, Human
caaggaaugcuaugaaaaa

SEQ ID NO: 154552 - RNA, 19 nt, Human
caagguaaaggacuguguc

SEQ ID NO: 154553 - RNA, 23 nt, Human
caauuuagaaauccuagccuaga

SEQ ID NO: 154554 - RNA, 20 nt, Human
cacacaggaaaagagcaacu

SEQ ID NO: 154555 - RNA, 21 nt, Human
cacaggaaaagagcaacuuca

SEQ ID NO: 154556 - RNA, 21 nt, Human
cagaacggacagaguccagcg

SEQ ID NO: 154557 - RNA, 18 nt, Human
caggaaaagagcaacuuc

SEQ ID NO: 154558 - RNA, 22 nt, Human
caggaagaugcauaaguaaaga

SEQ ID NO: 154559 - RNA, 19 nt, Human
cauauaccuuggcuuacac

SEQ ID NO: 154560 - RNA, 20 nt, Human
ccaaagaccacacaggaaaa

SEQ ID NO: 154561 - RNA, 22 nt, Human
ccauaaagcugaggcaaaggca

SEQ ID NO: 154562 - RNA, 19 nt, Human
cuaguaaggaaagggaaag

SEQ ID NO: 154563 - RNA, 18 nt, Human
cucagccaugacaacagc

SEQ ID NO: 154564 - RNA, 21 nt, Human
cucuucauucuaagaacagag

SEQ ID NO: 154565 - RNA, 22 nt, Human
cuggaauauuucagagaaggaa

SEQ ID NO: 154566 - RNA, 19 nt, Human
gaaauauucauaagaaacc

SEQ ID NO: 154567 - RNA, 18 nt, Human
gaccugucaucguuccuu

SEQ ID NO: 154568 - RNA, 23 nt, Human
gcagcagcaucugcagaaaacgc

SEQ ID NO: 154569 - RNA, 22 nt, Human
gccaccaggugggagcuuuaac

SEQ ID NO: 154570 - RNA, 20 nt, Human
gccacgaaauauucauaaga

SEQ ID NO: 154571 - RNA, 18 nt, Human
ggccuaagccgccagccc

SEQ ID NO: 154572 - RNA, 19 nt, Human
ggguucuuggaaagaaucc

SEQ ID NO: 154573 - RNA, 24 nt, Human
guacuagacuccucccaaagacca

SEQ ID NO: 154574 - RNA, 24 nt, Human
gugacagcagcagcaucugcagaa

SEQ ID NO: 154575 - RNA, 22 nt, Human
uaaaaaaugcuuauuuucccau

SEQ ID NO: 154576 - RNA, 23 nt, Human
uaagccgccagcccugccgccgc

SEQ ID NO: 154577 - RNA, 19 nt, Human
uaaguaaagaucaucagua

SEQ ID NO: 154578 - RNA, 21 nt, Human
uacuagacuccucccaaagac

SEQ ID NO: 154579 - RNA, 19 nt, Human
uaguuugauauaaaaaacc

SEQ ID NO: 154580 - RNA, 21 nt, Human
uauaaaaaacccaacuaauca

SEQ ID NO: 154581 - RNA, 24 nt, Human
uauaaaaaacccaacuaaucagaa

SEQ ID NO: 154582 - RNA, 19 nt, Human
uaucaucauucauuuaucc

SEQ ID NO: 154583 - RNA, 18 nt, Human
ucaagguaugcacagugu

SEQ ID NO: 154584 - RNA, 24 nt, Human
ucagagaaggaaguaaaaauaggu

SEQ ID NO: 154585 - RNA, 23 nt, Human
ucagccaugacaacagccaugaa

SEQ ID NO: 154586 - RNA, 23 nt, Human
ucaucaaaaaacuacucagccau

SEQ ID NO: 154587 - RNA, 19 nt, Human
ucccaaagaccacacagga

SEQ ID NO: 154588 - RNA, 23 nt, Human
uccuaaacauaaagcauucuuau

SEQ ID NO: 154589 - RNA, 24 nt, Human
ucuagaaagaaaaagcuaagaaaa

SEQ ID NO: 154590 - RNA, 26 nt, Human
ucugcauaaauaauggguguacuuug

SEQ ID NO: 154591 - RNA, 24 nt, Human
ucugcggccuaagccgccagcccu

SEQ ID NO: 154592 - RNA, 20 nt, Human
ugagaauuuguaauuucuuu

SEQ ID NO: 154593 - RNA, 22 nt, Human
ugagacaugcauaugcaccuuc

SEQ ID NO: 154594 - RNA, 21 nt, Human
ugaguuaacuggaauauuuca

SEQ ID NO: 154595 - RNA, 19 nt, Human
ugcugcuuuuuucaccaau

SEQ ID NO: 154596 - RNA, 20 nt, Human
uggccaguuuuccccagugc

SEQ ID NO: 154597 - RNA, 19 nt, Human
uggguucuuggaaagaauc

SEQ ID NO: 154598 - RNA, 24 nt, Human
uguaaaaaaauacccauugaacau

SEQ ID NO: 154599 - RNA, 23 nt, Human
uguacuagacuccucccaaagac

SEQ ID NO: 154600 - RNA, 26 nt, Human
uguuuugaaaucuaugcaacaugaaa

SEQ ID NO: 154601 - RNA, 22 nt, Human
uuacauacacuuucuccugucu

SEQ ID NO: 154602 - RNA, 21 nt, Human
uuccccagugcuaauucuggc

SEQ ID NO: 154603 - RNA, 21 nt, Human
uuccccuggccaguuuucccc

SEQ ID NO: 154604 - RNA, 26 nt, Human
uucccuauaaaaucauuuuagccacg

SEQ ID NO: 154605 - RNA, 24 nt, Human
uucuucuacaaaaugguucccuag

SEQ ID NO: 154606 - RNA, 23 nt, Human
uuucaguuuuuguacuagacucc

SEQ ID NO: 154607 - RNA, 21 nt, Human
uuucugccuuuuuuuuuuuaa

SEQ ID NO: 154608 - RNA, 22 nt, Human
uuuucaguuuuuguacuagacu

SEQ ID NO: 154609 - RNA, 19 nt, Human
aaaagaaagaaggcaggca

SEQ ID NO: 154610 - RNA, 25 nt, Human
aaaagagaggaaugagaguagguaa

SEQ ID NO: 154611 - RNA, 19 nt, Human
aaaagcacauauauuggcu

SEQ ID NO: 154612 - RNA, 19 nt, Human
aaaagcacauauauuggcu

SEQ ID NO: 154613 - RNA, 27 nt, Human
aaaaggagaaaaaauaaagagaaagag

SEQ ID NO: 154614 - RNA, 22 nt, Human
aaaagugguaaagcugguacaa

SEQ ID NO: 154615 - RNA, 21 nt, Human
aaaauacaaucaccaacaccc

SEQ ID NO: 154616 - RNA, 22 nt, Human
aaacaggcaguaucacauuccu

SEQ ID NO: 154617 - RNA, 22 nt, Human
aaaggaaagggaaaaaggaaag

SEQ ID NO: 154618 - RNA, 24 nt, Human
aaagggaaaaaggaaagaaaggga

SEQ ID NO: 154619 - RNA, 23 nt, Human
aaauacaaucaccaacacccauu

SEQ ID NO: 154620 - RNA, 27 nt, Human
aacaacacagagcgaguuaauaacaac

SEQ ID NO: 154621 - RNA, 25 nt, Human
aacccugcacaaacuuucuggaaaa

SEQ ID NO: 154622 - RNA, 19 nt, Human
aagaaaagaaagaaggcag

SEQ ID NO: 154623 - RNA, 20 nt, Human
aagaagaaaaggagaaaaaa

SEQ ID NO: 154624 - RNA, 23 nt, Human
aagaagaaaaggagaaaaaauaa

SEQ ID NO: 154625 - RNA, 26 nt, Human
aagaagaaaaggagaaaaaauaaaga

SEQ ID NO: 154626 - RNA, 21 nt, Human
aagcacacaccacaagaaucc

SEQ ID NO: 154627 - RNA, 22 nt, Human
aagcagccgaugcaacguugcu

SEQ ID NO: 154628 - RNA, 20 nt, Human
aagcccaaguacuuuaaugu

SEQ ID NO: 154629 - RNA, 23 nt, Human
aauaaauggcugaaaagugguaa

SEQ ID NO: 154630 - RNA, 23 nt, Human
aauaauuugaguuacacaucuga

SEQ ID NO: 154631 - RNA, 20 nt, Human
acacaguauuccuagcacug

SEQ ID NO: 154632 - RNA, 21 nt, Human
acaccacaagaacaagacaac

SEQ ID NO: 154633 - RNA, 23 nt, Human
acaggcaguaucacauuccuaac

SEQ ID NO: 154634 - RNA, 19 nt, Human
acaguaugguucacaauaa

SEQ ID NO: 154635 - RNA, 21 nt, Human
accaaaaaguuuugcaacaac

SEQ ID NO: 154636 - RNA, 23 nt, Human
agaaaagcacagcaaacaugaaa

SEQ ID NO: 154637 - RNA, 18 nt, Human
agaaagaaacucaucagg

SEQ ID NO: 154638 - RNA, 23 nt, Human
agaaagauggaaagaaggucaag

SEQ ID NO: 154639 - RNA, 18 nt, Human
agaaagggaaaggaaagg

SEQ ID NO: 154640 - RNA, 26 nt, Human
agaagaaaaggagaaaaaauaaagag

SEQ ID NO: 154641 - RNA, 19 nt, Human
agagaaagagaaauguggg

SEQ ID NO: 154642 - RNA, 22 nt, Human
agagaggugcacuccugacaau

SEQ ID NO: 154643 - RNA, 20 nt, Human
agaggaaaggaaaggaaagg

SEQ ID NO: 154644 - RNA, 26 nt, Human
agcucucacacucuccuaaucaagga

SEQ ID NO: 154645 - RNA, 22 nt, Human
aggaaagaaagggaaaggaaag

SEQ ID NO: 154646 - RNA, 19 nt, Human
aggaaagggggaagggagg

SEQ ID NO: 154647 - RNA, 26 nt, Human
aggaagaaaaagaaagauggaaagaa

SEQ ID NO: 154648 - RNA, 18 nt, Human
aggcauuuucugucuuug

SEQ ID NO: 154649 - RNA, 19 nt, Human
agggaugugccaauuucug

SEQ ID NO: 154650 - RNA, 18 nt, Human
auaacuuuccaaaacuuc

SEQ ID NO: 154651 - RNA, 18 nt, Human
auacacaguauuccuagc

SEQ ID NO: 154652 - RNA, 23 nt, Human
auagaauauacuacuguagucuc

SEQ ID NO: 154653 - RNA, 22 nt, Human
aucacauuccuaaccaccaugg

SEQ ID NO: 154654 - RNA, 23 nt, Human
auccugaaaggcauaauaauuug

SEQ ID NO: 154655 - RNA, 23 nt, Human
caaacaggcaguaucacauuccu

SEQ ID NO: 154656 - RNA, 19 nt, Human
caaagcucucacacucucc

SEQ ID NO: 154657 - RNA, 21 nt, Human
caagaacaagacaacagucuu

SEQ ID NO: 154658 - RNA, 27 nt, Human
caagaauccaaacaccacaagaacaag

SEQ ID NO: 154659 - RNA, 24 nt, Human
cacaagaauccaaacaccacaaga

SEQ ID NO: 154660 - RNA, 21 nt, Human
cacagcuccuucugaggcaag

SEQ ID NO: 154661 - RNA, 22 nt, Human
cagccaguugggaccaaagcuc

SEQ ID NO: 154662 - RNA, 19 nt, Human
cauaauacagggagcagcu

SEQ ID NO: 154663 - RNA, 23 nt, Human
cauauggcaauuguaccucccaa

SEQ ID NO: 154664 - RNA, 19 nt, Human
ccacaagaauccaaacacc

SEQ ID NO: 154665 - RNA, 21 nt, Human
ccacaagaauccaaacaccac

SEQ ID NO: 154666 - RNA, 24 nt, Human
ccacaagaauccaaacaccacaag

SEQ ID NO: 154667 - RNA, 19 nt, Human
ccagacuggcacacaacau

SEQ ID NO: 154668 - RNA, 23 nt, Human
ccaucucucuucaguuagagacc

SEQ ID NO: 154669 - RNA, 23 nt, Human
ccuaggcagguaaacagagacgc

SEQ ID NO: 154670 - RNA, 21 nt, Human
cgugauaauaugcaccuuccc

SEQ ID NO: 154671 - RNA, 19 nt, Human
cuaggcagguaaacagaga

SEQ ID NO: 154672 - RNA, 21 nt, Human
cucagguuuucaguugguugg

SEQ ID NO: 154673 - RNA, 23 nt, Human
cucccaugaaaucuaauacugca

SEQ ID NO: 154674 - RNA, 22 nt, Human
cuugacagagcacagugcaauu

SEQ ID NO: 154675 - RNA, 21 nt, Human
gaaagaagaaaaggagaaaaa

SEQ ID NO: 154676 - RNA, 22 nt, Human
gaaaggaaagggaaaaggaaag

SEQ ID NO: 154677 - RNA, 18 nt, Human
gaaagggaaaaggaaagg

SEQ ID NO: 154678 - RNA, 18 nt, Human
gaacauuuagguaaacug

SEQ ID NO: 154679 - RNA, 18 nt, Human
gaagaaaaagaaagaugg

SEQ ID NO: 154680 - RNA, 23 nt, Human
gaagaaaaagaaagauggaaaga

SEQ ID NO: 154681 - RNA, 19 nt, Human
gaagaaagaggaaagaaga

SEQ ID NO: 154682 - RNA, 22 nt, Human
gacuugaaaaaacaauuaagga

SEQ ID NO: 154683 - RNA, 18 nt, Human
gagaaagagaaauguggg

SEQ ID NO: 154684 - RNA, 25 nt, Human
gauugaaacacaaguguaacuacaa

SEQ ID NO: 154685 - RNA, 21 nt, Human
ggaaaggaaagggggaaggga

SEQ ID NO: 154686 - RNA, 18 nt, Human
ggagaaugggaacuagga

SEQ ID NO: 154687 - RNA, 18 nt, Human
ggaugagaaaagagagga

SEQ ID NO: 154688 - RNA, 19 nt, Human
ggcucacagcuccuucuga

SEQ ID NO: 154689 - RNA, 22 nt, Human
gggaagaaagaggaaagaagau

SEQ ID NO: 154690 - RNA, 20 nt, Human
gggaaggaugagaaaagaga

SEQ ID NO: 154691 - RNA, 21 nt, Human
guagguaaagaaaagaaagaa

SEQ ID NO: 154692 - RNA, 19 nt, Human
uaaaagaagcaaaauuaaa

SEQ ID NO: 154693 - RNA, 18 nt, Human
uaaauaagaacgaaccua

SEQ ID NO: 154694 - RNA, 22 nt, Human
uaaauacauuuacacaaaugga

SEQ ID NO: 154695 - RNA, 25 nt, Human
uaacaaauaccuggaagacuugaaa

SEQ ID NO: 154696 - RNA, 20 nt, Human
uaacaacaucugagagauga

SEQ ID NO: 154697 - RNA, 22 nt, Human
uaagaagaaacaaaacauuuuu

SEQ ID NO: 154698 - RNA, 19 nt, Human
uaagaagcagccgaugcaa

SEQ ID NO: 154699 - RNA, 22 nt, Human
uaagaagcagccgaugcaacgu

SEQ ID NO: 154700 - RNA, 22 nt, Human
uacaacaaucugaucugauuga

SEQ ID NO: 154701 - RNA, 25 nt, Human
uagaaagaaacucaucaggaaccuc

SEQ ID NO: 154702 - RNA, 22 nt, Human
uagcuaaacuaacaaauaccug

SEQ ID NO: 154703 - RNA, 22 nt, Human
uaguagcuaaacuaacaaauac

SEQ ID NO: 154704 - RNA, 18 nt, Human
uaguauugcaugaaugaa

SEQ ID NO: 154705 - RNA, 21 nt, Human
uagugacaagccuauaggcac

SEQ ID NO: 154706 - RNA, 23 nt, Human
uauaaaauaaauacauuuacaca

SEQ ID NO: 154707 - RNA, 21 nt, Human
uauggaggaaucugaaagcug

SEQ ID NO: 154708 - RNA, 21 nt, Human
uauggcaauuguaccucccaa

SEQ ID NO: 154709 - RNA, 19 nt, Human
uauguugcacuguacuuuu

SEQ ID NO: 154710 - RNA, 21 nt, Human
ucccaggaguuguauuuucug

SEQ ID NO: 154711 - RNA, 19 nt, Human
uccuucaggauucauuugu

SEQ ID NO: 154712 - RNA, 18 nt, Human
ucuccuagugacaagccu

SEQ ID NO: 154713 - RNA, 18 nt, Human
ucugaagcccaaguacuu

SEQ ID NO: 154714 - RNA, 23 nt, Human
ugaaaagcacauauauuggcuua

SEQ ID NO: 154715 - RNA, 24 nt, Human
ugaaaagugguaaagcugguacaa

SEQ ID NO: 154716 - RNA, 23 nt, Human
ugaaacacaaguguaacuacaag

SEQ ID NO: 154717 - RNA, 24 nt, Human
ugaaaggcauaauaauuugaguua

SEQ ID NO: 154718 - RNA, 23 nt, Human
ugaagcccaucuacagcuauaga

SEQ ID NO: 154719 - RNA, 23 nt, Human
ugaaugcaacauaaaauucagaa

SEQ ID NO: 154720 - RNA, 23 nt, Human
ugacagagcacagugcaauuaac

SEQ ID NO: 154721 - RNA, 25 nt, Human
ugacagagcacagugcaauuaacac

SEQ ID NO: 154722 - RNA, 20 nt, Human
ugagaaaccacaaucuacaa

SEQ ID NO: 154723 - RNA, 18 nt, Human
ugagaguagguaaagaaa

SEQ ID NO: 154724 - RNA, 18 nt, Human
ugauaagaagcagccgau

SEQ ID NO: 154725 - RNA, 20 nt, Human
ugauaagaagcagccgaugc

SEQ ID NO: 154726 - RNA, 23 nt, Human
ugauaagaagcagccgaugcaac

SEQ ID NO: 154727 - RNA, 18 nt, Human
ugauugaaacacaagugu

SEQ ID NO: 154728 - RNA, 24 nt, Human
ugauuuaucuagaaucacacuaca

SEQ ID NO: 154729 - RNA, 23 nt, Human
uggaaaagcaaugauaagaagca

SEQ ID NO: 154730 - RNA, 26 nt, Human
uggaaagaaggucaagaggaaaggaa

SEQ ID NO: 154731 - RNA, 26 nt, Human
uggaaccugacuugacuuucaugcug

SEQ ID NO: 154732 - RNA, 24 nt, Human
uggcacacaacauaaauugcaucc

SEQ ID NO: 154733 - RNA, 19 nt, Human
ugguauagcauuugaugga

SEQ ID NO: 154734 - RNA, 18 nt, Human
uguaagaagaaacaaaac

SEQ ID NO: 154735 - RNA, 23 nt, Human
uuaaaaaucuuccuucaggauuc

SEQ ID NO: 154736 - RNA, 22 nt, Human
uucccauauuaauaaauggcug

SEQ ID NO: 154737 - RNA, 23 nt, Human
uuccuugacagagcacagugcaa

SEQ ID NO: 154738 - RNA, 21 nt, Human
aaaaguacccaauuugaaaac

SEQ ID NO: 154739 - RNA, 23 nt, Human
aaacaaauagcagagcccaaagc

SEQ ID NO: 154740 - RNA, 24 nt, Human
aaacagauggaaguaaacagugca

SEQ ID NO: 154741 - RNA, 25 nt, Human
aaaccaaaguguagggcugggucug

SEQ ID NO: 154742 - RNA, 18 nt, Human
aagcauauucaaaaaugu

SEQ ID NO: 154743 - RNA, 23 nt, Human
aaggagcugguucagaccaauaa

SEQ ID NO: 154744 - RNA, 23 nt, Human
aagugccuccuauuagcucaccc

SEQ ID NO: 154745 - RNA, 20 nt, Human
acaagagcaaccaauuucac

SEQ ID NO: 154746 - RNA, 21 nt, Human
acaccggcucccucucuccag

SEQ ID NO: 154747 - RNA, 24 nt, Human
acagaagccccaucauauccaucc

SEQ ID NO: 154748 - RNA, 23 nt, Human
acagcagucaggcacuaaagugu

SEQ ID NO: 154749 - RNA, 23 nt, Human
accaaaguguagggcugggucug

SEQ ID NO: 154750 - RNA, 21 nt, Human
acguaggacaccggcucccuc

SEQ ID NO: 154751 - RNA, 22 nt, Human
agaaccagaaacuuuacauuua

SEQ ID NO: 154752 - RNA, 23 nt, Human
agacauacucccuucauucaagu

SEQ ID NO: 154753 - RNA, 24 nt, Human
agagaccaagagagaaaugguucc

SEQ ID NO: 154754 - RNA, 19 nt, Human
agagcccaaagcaaaaaag

SEQ ID NO: 154755 - RNA, 21 nt, Human
agagcccaaagcaaaaaagcc

SEQ ID NO: 154756 - RNA, 18 nt, Human
agaugcuccaaccccacc

SEQ ID NO: 154757 - RNA, 21 nt, Human
agcaauagcacagaagcccca

SEQ ID NO: 154758 - RNA, 19 nt, Human
agcccaaagcaaaaaagcc

SEQ ID NO: 154759 - RNA, 19 nt, Human
agggcccaguccugggcgg

SEQ ID NO: 154760 - RNA, 23 nt, Human
auaaaaacuacaaaaggagcugc

SEQ ID NO: 154761 - RNA, 19 nt, Human
auaaaauacaagagcaacc

SEQ ID NO: 154762 - RNA, 25 nt, Human
auaaaauccucuuuaaauuucuucg

SEQ ID NO: 154763 - RNA, 24 nt, Human
auagcacagaagccccaucauauc

SEQ ID NO: 154764 - RNA, 21 nt, Human
auccaacacaaggaaacacau

SEQ ID NO: 154765 - RNA, 26 nt, Human
auggucuuaaauccauggugccagaa

SEQ ID NO: 154766 - RNA, 22 nt, Human
auggugccagaagcuguguccc

SEQ ID NO: 154767 - RNA, 19 nt, Human
caaacagauggaaguaaac

SEQ ID NO: 154768 - RNA, 21 nt, Human
caaaccaaaguguagggcugg

SEQ ID NO: 154769 - RNA, 21 nt, Human
caaacgccgggcacaaaugug

SEQ ID NO: 154770 - RNA, 25 nt, Human
caaagggcucccaaacgccgggcac

SEQ ID NO: 154771 - RNA, 19 nt, Human
caaaugugucugcaaacag

SEQ ID NO: 154772 - RNA, 27 nt, Human
caacacaaggaaacacauccaccuccc

SEQ ID NO: 154773 - RNA, 26 nt, Human
caaccccaccaggaggucaggaguuu

SEQ ID NO: 154774 - RNA, 24 nt, Human
caaggaaacacauccaccucccuu

SEQ ID NO: 154775 - RNA, 18 nt, Human
caauagcacagaagcccc

SEQ ID NO: 154776 - RNA, 22 nt, Human
cacauuugaaacagaugcucca

SEQ ID NO: 154777 - RNA, 19 nt, Human
caccggcucccucucucca

SEQ ID NO: 154778 - RNA, 18 nt, Human
cacgccaugaccuugcau

SEQ ID NO: 154779 - RNA, 20 nt, Human
cacuuuguucaacugucacc

SEQ ID NO: 154780 - RNA, 23 nt, Human
cagagcccaaagcaaaaaagccu

SEQ ID NO: 154781 - RNA, 23 nt, Human
caggaguuuauaauuacaugcag

SEQ ID NO: 154782 - RNA, 24 nt, Human
caguaaagaacagcagucaggcac

SEQ ID NO: 154783 - RNA, 24 nt, Human
cauaucagcuggguucaagucuga

SEQ ID NO: 154784 - RNA, 18 nt, Human
caucgcuaccacugggca

SEQ ID NO: 154785 - RNA, 28 nt, Human
ccaaagcaaaaaagccuguuguccggac

SEQ ID NO: 154786 - RNA, 18 nt, Human
ccaacacaaggaaacaca

SEQ ID NO: 154787 - RNA, 23 nt, Human
ccaaucccagcaauagcacagaa

SEQ ID NO: 154788 - RNA, 20 nt, Human
ccauguaaaugggucacugc

SEQ ID NO: 154789 - RNA, 19 nt, Human
cccaaagcaaaaaagccug

SEQ ID NO: 154790 - RNA, 20 nt, Human
cccaaucccagcaauagcac

SEQ ID NO: 154791 - RNA, 22 nt, Human
ccccaucauauccaucccaguc

SEQ ID NO: 154792 - RNA, 18 nt, Human
cccuaagguacugcugug

SEQ ID NO: 154793 - RNA, 22 nt, Human
ccuccuccucccuaagggccca

SEQ ID NO: 154794 - RNA, 21 nt, Human
cuauagagaaugcaaaggcua

SEQ ID NO: 154795 - RNA, 21 nt, Human
cucaugugagaagugcuugua

SEQ ID NO: 154796 - RNA, 21 nt, Human
cuccaaccccaccaggagguc

SEQ ID NO: 154797 - RNA, 23 nt, Human
cucgcggcggcggcggcucugac

SEQ ID NO: 154798 - RNA, 25 nt, Human
cugacguaggacaccggcucccucu

SEQ ID NO: 154799 - RNA, 25 nt, Human
cugggcggcagcggcugcuccuccc

SEQ ID NO: 154800 - RNA, 21 nt, Human
gaaacaacaagcauauucaaa

SEQ ID NO: 154801 - RNA, 21 nt, Human
gaagccccaucauauccaucc

SEQ ID NO: 154802 - RNA, 21 nt, Human
gacauacucccuucauucaag

SEQ ID NO: 154803 - RNA, 25 nt, Human
gacccauuuacaauggcaaaacccu

SEQ ID NO: 154804 - RNA, 22 nt, Human
gagcaaccaauuucaccaucca

SEQ ID NO: 154805 - RNA, 19 nt, Human
gcagcaauuuaauuuuucu

SEQ ID NO: 154806 - RNA, 18 nt, Human
gcggcggcggcggcucug

SEQ ID NO: 154807 - RNA, 22 nt, Human
gcggcggcucgcggcggcggcg

SEQ ID NO: 154808 - RNA, 21 nt, Human
ggcggcucgcggcggcggcgg

SEQ ID NO: 154809 - RNA, 27 nt, Human
gggggacgggguagcgugagggaguga

SEQ ID NO: 154810 - RNA, 18 nt, Human
gucuaagcugagaaugcc

SEQ ID NO: 154811 - RNA, 24 nt, Human
gugaaacaacaagcauauucaaaa

SEQ ID NO: 154812 - RNA, 24 nt, Human
guuccugugaaaaaccuugcaguu

SEQ ID NO: 154813 - RNA, 24 nt, Human
uaaaaguacccaauuugaaaacca

SEQ ID NO: 154814 - RNA, 21 nt, Human
uaaauccauggugccagaagc

SEQ ID NO: 154815 - RNA, 18 nt, Human
uaaauuaguccaaagugg

SEQ ID NO: 154816 - RNA, 24 nt, Human
uaaggcagggaucuguuuggauuc

SEQ ID NO: 154817 - RNA, 24 nt, Human
uacaaaaggagcugcauacccuaa

SEQ ID NO: 154818 - RNA, 25 nt, Human
uacaaaaggagcugcauacccuaaa

SEQ ID NO: 154819 - RNA, 25 nt, Human
uacugcugugaagagagcguguuug

SEQ ID NO: 154820 - RNA, 21 nt, Human
uagcacagaagccccaucaua

SEQ ID NO: 154821 - RNA, 20 nt, Human
ucaaaguccauuugguauac

SEQ ID NO: 154822 - RNA, 22 nt, Human
uccaacauuucaccacauauau

SEQ ID NO: 154823 - RNA, 22 nt, Human
uccaccucccuuuuaacaagga

SEQ ID NO: 154824 - RNA, 27 nt, Human
uccaccucccuuuuaacaaggauugac

SEQ ID NO: 154825 - RNA, 21 nt, Human
ucccaaacgccgggcacaaau

SEQ ID NO: 154826 - RNA, 21 nt, Human
ucccaaucccagcaauagcac

SEQ ID NO: 154827 - RNA, 21 nt, Human
ucccacguuggugaacaccaa

SEQ ID NO: 154828 - RNA, 19 nt, Human
ucccaucccuucccacccg

SEQ ID NO: 154829 - RNA, 18 nt, Human
ucucaugccauccaacac

SEQ ID NO: 154830 - RNA, 22 nt, Human
ucucaugccauccaacacaagg

SEQ ID NO: 154831 - RNA, 24 nt, Human
ucuccaaucaaaauaagaaacaaa

SEQ ID NO: 154832 - RNA, 26 nt, Human
ucucgccuccuccucccuaagggccc

SEQ ID NO: 154833 - RNA, 22 nt, Human
ucucuggucuugucauaucaca

SEQ ID NO: 154834 - RNA, 18 nt, Human
ucugcaaacagauggaag

SEQ ID NO: 154835 - RNA, 23 nt, Human
ucuguaaccugggaacaaggagc

SEQ ID NO: 154836 - RNA, 23 nt, Human
ugaaacagaugcuccaaccccac

SEQ ID NO: 154837 - RNA, 20 nt, Human
ugaagguuuacagcaguuaa

SEQ ID NO: 154838 - RNA, 23 nt, Human
ugagggagugaaguugaaagugc

SEQ ID NO: 154839 - RNA, 20 nt, Human
ugauacacacaucaauauau

SEQ ID NO: 154840 - RNA, 21 nt, Human
ugauacacacaucaauauaua

SEQ ID NO: 154841 - RNA, 24 nt, Human
ugcaaacaaauagcagagcccaaa

SEQ ID NO: 154842 - RNA, 20 nt, Human
ugcagcaauuuaauuuuucu

SEQ ID NO: 154843 - RNA, 18 nt, Human
ugcagucauacaugucug

SEQ ID NO: 154844 - RNA, 18 nt, Human
ugccauccaacacaagga

SEQ ID NO: 154845 - RNA, 24 nt, Human
uggaaguaaacagugcacuggccc

SEQ ID NO: 154846 - RNA, 25 nt, Human
ugggaacaaggagcuggucgggauc

SEQ ID NO: 154847 - RNA, 23 nt, Human
uggguguucugcaaacaaauagc

SEQ ID NO: 154848 - RNA, 25 nt, Human
uggucuuaaauccauggugccagaa

SEQ ID NO: 154849 - RNA, 20 nt, Human
ugucauaucacaucagaccc

SEQ ID NO: 154850 - RNA, 22 nt, Human
ugucccaucccuucccacccgc

SEQ ID NO: 154851 - RNA, 22 nt, Human
uguuuuauuucucccaauccca

SEQ ID NO: 154852 - RNA, 21 nt, Human
uuaauacucuucuccauuucu

SEQ ID NO: 154853 - RNA, 20 nt, Human
uuagcucacccuuucaacau

SEQ ID NO: 154854 - RNA, 23 nt, Human
uuccaauuguaaggcagggaucu

SEQ ID NO: 154855 - RNA, 20 nt, Human
uugacccaagcaaaauaaaa

SEQ ID NO: 154856 - RNA, 20 nt, Human
uugcuucuauguaugaaggu

SEQ ID NO: 154857 - RNA, 24 nt, Human
aaccacaaauaauuaaaaggaaac

SEQ ID NO: 154858 - RNA, 20 nt, Human
aucuguuagaaauuuucccu

SEQ ID NO: 154859 - RNA, 23 nt, Human
cucuccaugcuuuccaaugauug

SEQ ID NO: 154860 - RNA, 24 nt, Human
uaaaaggaaacacagcaaucccau

SEQ ID NO: 154861 - RNA, 26 nt, Human
uaaaaggaaacacagcaaucccauaa

SEQ ID NO: 154862 - RNA, 22 nt, Human
uuagaaauuuucccucaaauua

SEQ ID NO: 154863 - RNA, 18 nt, Human
uucuuuuuaaggcaugau

SEQ ID NO: 154864 - RNA, 21 nt, Human
uuggaaccacaaauaauuaac

SEQ ID NO: 154865 - RNA, 19 nt, Human
cuucccgccgcagccacuu

SEQ ID NO: 154866 - RNA, 22 nt, Human
uucccgccgcagccacuuacag

SEQ ID NO: 154867 - RNA, 24 nt, Human
uuuuuuuuuuuuuuuuugauguug

SEQ ID NO: 154868 - RNA, 21 nt, Human
accaggacucucggucggaca

SEQ ID NO: 154869 - RNA, 21 nt, Human
cuugccauacuugaaagaaac

SEQ ID NO: 154870 - RNA, 21 nt, Human
gcagaaagacauucugaaauc

SEQ ID NO: 154871 - RNA, 24 nt, Human
ggacacaacaggaggacuguccgc

SEQ ID NO: 154872 - RNA, 24 nt, Human
uaugcagaaagacauucugaaauc

SEQ ID NO: 154873 - RNA, 22 nt, Human
ucaccugccggaaagcaagagc

SEQ ID NO: 154874 - RNA, 20 nt, Human
ugcagaaagacauucugaaa

SEQ ID NO: 154875 - RNA, 24 nt, Human
ugcagaaagacauucugaaaucuc

SEQ ID NO: 154876 - RNA, 18 nt, Human
ugccauacuugaaagaaa

SEQ ID NO: 154877 - RNA, 21 nt, Human
uugaaagaaacuggcuagcug

SEQ ID NO: 154878 - RNA, 21 nt, Human
aaauccgacuuucuucccaaa

SEQ ID NO: 154879 - RNA, 18 nt, Human
aaauucccgcugccuuuc

SEQ ID NO: 154880 - RNA, 18 nt, Human
auccgacuuucuucccaa

SEQ ID NO: 154881 - RNA, 22 nt, Human
auuguuguuuuucuuuuuaaug

SEQ ID NO: 154882 - RNA, 21 nt, Human
caggggaaguuggcacuuugc

SEQ ID NO: 154883 - RNA, 19 nt, Human
cccccgcgcccggacggug

SEQ ID NO: 154884 - RNA, 24 nt, Human
cccgccgcgcgcccgcuccuccug

SEQ ID NO: 154885 - RNA, 18 nt, Human
ccgccgcgcgcccgcucc

SEQ ID NO: 154886 - RNA, 20 nt, Human
ccgccgcgcgcccgcuccuc

SEQ ID NO: 154887 - RNA, 22 nt, Human
ccgcgcgcccgcuccuccugcc

SEQ ID NO: 154888 - RNA, 25 nt, Human
ccucgcccgccgcgcgcccgcuccu

SEQ ID NO: 154889 - RNA, 22 nt, Human
cgaagugagcgcgcucgggucc

SEQ ID NO: 154890 - RNA, 22 nt, Human
cgcgcgcccgcuccuccugccc

SEQ ID NO: 154891 - RNA, 22 nt, Human
cgcucgggucccagccucgccc

SEQ ID NO: 154892 - RNA, 22 nt, Human
gcccgccgcgcgcccgcuccuc

SEQ ID NO: 154893 - RNA, 26 nt, Human
uccgacuuucuucccaaaaaucucaa

SEQ ID NO: 154894 - RNA, 19 nt, Human
ugcccggcccucgcccgga

SEQ ID NO: 154895 - RNA, 21 nt, Human
uuaguaacagggggaagggga

SEQ ID NO: 154896 - RNA, 25 nt, Human
aaaaaacacaaaaagcagggauuac

SEQ ID NO: 154897 - RNA, 23 nt, Human
aaaaacacaaaaagcagggauua

SEQ ID NO: 154898 - RNA, 23 nt, Human
aaaaagcagggauuaccccccac

SEQ ID NO: 154899 - RNA, 26 nt, Human
aaacaaacaaaaaaacacaaaaagca

SEQ ID NO: 154900 - RNA, 24 nt, Human
aaacaaacaaacaaaaaaacacaa

SEQ ID NO: 154901 - RNA, 25 nt, Human
aaacaaacaaacaaacaaaaaaaca

SEQ ID NO: 154902 - RNA, 18 nt, Human
aaacagccagaaccaucc

SEQ ID NO: 154903 - RNA, 21 nt, Human
aaaccccccaaaaacaaacaa

SEQ ID NO: 154904 - RNA, 23 nt, Human
aacuguuaagggauucugagaac

SEQ ID NO: 154905 - RNA, 22 nt, Human
aacuucucuuagucggcccuuu

SEQ ID NO: 154906 - RNA, 23 nt, Human
aagaaaaccccccaaaaacaaac

SEQ ID NO: 154907 - RNA, 22 nt, Human
aagaaaaucuaaaaauagucug

SEQ ID NO: 154908 - RNA, 19 nt, Human
aaggcaagaaaacccccca

SEQ ID NO: 154909 - RNA, 22 nt, Human
aaggcaagaaaaccccccaaaa

SEQ ID NO: 154910 - RNA, 23 nt, Human
acaaacaaacaaacaaaaaaaca

SEQ ID NO: 154911 - RNA, 20 nt, Human
acaaccaaggcaagaaaacc

SEQ ID NO: 154912 - RNA, 25 nt, Human
accccccaaaaacaaacaaacaaac

SEQ ID NO: 154913 - RNA, 23 nt, Human
acgacaugcucgcuccuuugaga

SEQ ID NO: 154914 - RNA, 22 nt, Human
agaaaaccccccaaaaacaaag

SEQ ID NO: 154915 - RNA, 22 nt, Human
agaggcgugguuugggaugcaa

SEQ ID NO: 154916 - RNA, 22 nt, Human
auaaaaacucccaaauguacaa

SEQ ID NO: 154917 - RNA, 22 nt, Human
auuuucaauccugccuuuccug

SEQ ID NO: 154918 - RNA, 26 nt, Human
caaaaaaacacaaaaagcagggauua

SEQ ID NO: 154919 - RNA, 27 nt, Human
caaacaaacaaaaaaacacaaaaagca

SEQ ID NO: 154920 - RNA, 30 nt, Human
caaacaaacaaaaaaacacaaaaagcuguc

SEQ ID NO: 154921 - RNA, 23 nt, Human
caaacaaacaaacaaaaaaacac

SEQ ID NO: 154922 - RNA, 23 nt, Human
caaacuaacuucugaaaugacau

SEQ ID NO: 154923 - RNA, 27 nt, Human
caaggcaagaaaaccccccaaaaacaa

SEQ ID NO: 154924 - RNA, 26 nt, Human
cacaaaaagcagggauuaccccccac

SEQ ID NO: 154925 - RNA, 22 nt, Human
cacccuccuacccucucaaaga

SEQ ID NO: 154926 - RNA, 25 nt, Human
cauuuucacuuaaaagcacugugag

SEQ ID NO: 154927 - RNA, 21 nt, Human
ccaaaaacaaacaaacaaaca

SEQ ID NO: 154928 - RNA, 23 nt, Human
ccaaaaacaaacaaacaaacaaa

SEQ ID NO: 154929 - RNA, 25 nt, Human
ccaaggcaagaaaaccccccaaaaa

SEQ ID NO: 154930 - RNA, 25 nt, Human
ccacugcuucuuggccacuuuccug

SEQ ID NO: 154931 - RNA, 25 nt, Human
cccaaaaacaaacaaacaaacaaac

SEQ ID NO: 154932 - RNA, 22 nt, Human
cccacccuccuacccucucaaa

SEQ ID NO: 154933 - RNA, 18 nt, Human
ccccaaaaacaaacaaac

SEQ ID NO: 154934 - RNA, 22 nt, Human
ccccccaaaaacaaacaaacaa

SEQ ID NO: 154935 - RNA, 18 nt, Human
cgagggcgccggccagag

SEQ ID NO: 154936 - RNA, 22 nt, Human
cggcucaggguggucccggcga

SEQ ID NO: 154937 - RNA, 21 nt, Human
cucggugcgcgccgggcgagg

SEQ ID NO: 154938 - RNA, 21 nt, Human
cugccaggcgccaggacggcu

SEQ ID NO: 154939 - RNA, 23 nt, Human
cugguugcaaaaggcaaaagaaa

SEQ ID NO: 154940 - RNA, 22 nt, Human
cugugaguagaauuagcugugc

SEQ ID NO: 154941 - RNA, 23 nt, Human
cuuccuggugccucuuucucgac

SEQ ID NO: 154942 - RNA, 20 nt, Human
cuucuuggccacuuuccugg

SEQ ID NO: 154943 - RNA, 18 nt, Human
gcgcgccgggcgagggcg

SEQ ID NO: 154944 - RNA, 23 nt, Human
ggacgguggcugcucggcgcccg

SEQ ID NO: 154945 - RNA, 21 nt, Human
ggaggccggacgcuggccggg

SEQ ID NO: 154946 - RNA, 19 nt, Human
guggcugcucggcgcccgc

SEQ ID NO: 154947 - RNA, 20 nt, Human
uaaaaccucagaugucugaa

SEQ ID NO: 154948 - RNA, 24 nt, Human
uaaauguaaauaauacauacuuua

SEQ ID NO: 154949 - RNA, 24 nt, Human
uacaaaguccuugccagacaacca

SEQ ID NO: 154950 - RNA, 18 nt, Human
uauuucaaauacaguuau

SEQ ID NO: 154951 - RNA, 23 nt, Human
ucaaacagccagaaccaucccgu

SEQ ID NO: 154952 - RNA, 21 nt, Human
ucaguccacgagccuggggcc

SEQ ID NO: 154953 - RNA, 26 nt, Human
uccacgacaugcucgcuccuuugaga

SEQ ID NO: 154954 - RNA, 23 nt, Human
ucccacccuccuacccucucaaa

SEQ ID NO: 154955 - RNA, 20 nt, Human
ucccacggacugccaggcgc

SEQ ID NO: 154956 - RNA, 21 nt, Human
ucccuguaagucuauuaaaug

SEQ ID NO: 154957 - RNA, 19 nt, Human
ucuuugcaaaauuccauau

SEQ ID NO: 154958 - RNA, 21 nt, Human
ugcaaaaggcaaaagaaaauc

SEQ ID NO: 154959 - RNA, 18 nt, Human
ugccagacaaccaaggca

SEQ ID NO: 154960 - RNA, 18 nt, Human
ugccaggcgccaggacgg

SEQ ID NO: 154961 - RNA, 23 nt, Human
ugcucgcuccuuugagaaucuca

SEQ ID NO: 154962 - RNA, 19 nt, Human
uggccgggcggcuccggga

SEQ ID NO: 154963 - RNA, 18 nt, Human
ugggcuucccacucaguc

SEQ ID NO: 154964 - RNA, 19 nt, Human
uggucaagaggcgugguuu

SEQ ID NO: 154965 - RNA, 23 nt, Human
ugugcuauugaaaaaugaaauaa

SEQ ID NO: 154966 - RNA, 19 nt, Human
uucaaauacaguuauauaa

SEQ ID NO: 154967 - RNA, 19 nt, Human
uuggcagauuaaaucuuug

SEQ ID NO: 154968 - RNA, 24 nt, Human
uuuccuggguccucggagcagcug

SEQ ID NO: 154969 - RNA, 25 nt, Human
uuuuuuuuugucaagaaaaauacug

SEQ ID NO: 154970 - RNA, 21 nt, Human
uuuuuuuuuuuuuuugucaag

SEQ ID NO: 154971 - RNA, 18 nt, Human
uuuuuuuuuuuuuuuuug

SEQ ID NO: 154972 - RNA, 19 nt, Human
uuuuuuuuuuuuuuuuugu

SEQ ID NO: 154973 - RNA, 22 nt, Human
aaaaaaggaaaagcgcaaaaaa

SEQ ID NO: 154974 - RNA, 21 nt, Human
aaaaaggaaaagcgcaaaaaa

SEQ ID NO: 154975 - RNA, 20 nt, Human
aggaaaagcgcaaaaaacgc

SEQ ID NO: 154976 - RNA, 24 nt, Human
auuacucccacccacccucaaaua

SEQ ID NO: 154977 - RNA, 18 nt, Human
caacaacagaaauaaaac

SEQ ID NO: 154978 - RNA, 18 nt, Human
ccacccacccucaaauaa

SEQ ID NO: 154979 - RNA, 24 nt, Human
cgcaaaaaacgcccugcuugacug

SEQ ID NO: 154980 - RNA, 25 nt, Human
cuuuuuguguauuauuauuuaaaaa

SEQ ID NO: 154981 - RNA, 25 nt, Human
uagaauaaugcaacaggaaaagccc

SEQ ID NO: 154982 - RNA, 20 nt, Human
uagcuuccuguuacacagaa

SEQ ID NO: 154983 - RNA, 19 nt, Human
ucacccauuagcuuccugu

SEQ ID NO: 154984 - RNA, 19 nt, Human
ucccucugcccauucaccc

SEQ ID NO: 154985 - RNA, 22 nt, Human
ucuguaucuugcagaaaaaagg

SEQ ID NO: 154986 - RNA, 21 nt, Human
uggcagaccauagaauaaugc

SEQ ID NO: 154987 - RNA, 21 nt, Human
aaaaaaccacacaacaacaaa

SEQ ID NO: 154988 - RNA, 22 nt, Human
aaaaucuuccuaaacaugccau

SEQ ID NO: 154989 - RNA, 22 nt, Human
aaacaaaaaaccacacaacaac

SEQ ID NO: 154990 - RNA, 20 nt, Human
aaacaugugaaccucccccu

SEQ ID NO: 154991 - RNA, 23 nt, Human
aaaccaaagaaaucuaucuugau

SEQ ID NO: 154992 - RNA, 21 nt, Human
aaauaaaccaaagaaaucuau

SEQ ID NO: 154993 - RNA, 19 nt, Human
aacaaaaaaccacacaaca

SEQ ID NO: 154994 - RNA, 23 nt, Human
aacaucauucccaaacaagauag

SEQ ID NO: 154995 - RNA, 21 nt, Human
aaccacacaacaacaaagucu

SEQ ID NO: 154996 - RNA, 27 nt, Human
aaccacacaacaacaaagucuuuugag

SEQ ID NO: 154997 - RNA, 26 nt, Human
aagaaaaaacaucauauauaugaaug

SEQ ID NO: 154998 - RNA, 23 nt, Human
aagaucaucacaaaccuaugaaa

SEQ ID NO: 154999 - RNA, 23 nt, Human
aaggaaaaaaaucacaaacaaaa

SEQ ID NO: 155000 - RNA, 23 nt, Human
acaaacaaaaaaccacacaacaa

SEQ ID NO: 155001 - RNA, 24 nt, Human
acaaacaaaaaaccacacaacaac

SEQ ID NO: 155002 - RNA, 25 nt, Human
acaaacaauaugcagaaaagggaac

SEQ ID NO: 155003 - RNA, 27 nt, Human
acaacaaagucuuuugagagacugcuu

SEQ ID NO: 155004 - RNA, 19 nt, Human
agagacugcuuucaacauc

SEQ ID NO: 155005 - RNA, 23 nt, Human
agcugugauggaaagcuauaacc

SEQ ID NO: 155006 - RNA, 24 nt, Human
aggaaaaaaaucacaaacaaaaaa

SEQ ID NO: 155007 - RNA, 22 nt, Human
aucuaucuugauacugaauagc

SEQ ID NO: 155008 - RNA, 23 nt, Human
auuugcauaaggaaaaaaaucac

SEQ ID NO: 155009 - RNA, 19 nt, Human
caaaaaaccacacaacaac

SEQ ID NO: 155010 - RNA, 20 nt, Human
caaaaaaccacacaacaaca

SEQ ID NO: 155011 - RNA, 22 nt, Human
cauaaggaaaaaaaucacaaac

SEQ ID NO: 155012 - RNA, 23 nt, Human
ccggcuccuccucauccaccccc

SEQ ID NO: 155013 - RNA, 19 nt, Human
cgccugcucuucccggcac

SEQ ID NO: 155014 - RNA, 22 nt, Human
cggcuccuccucauccaccccc

SEQ ID NO: 155015 - RNA, 23 nt, Human
cggcuccuccucauccacccccc

SEQ ID NO: 155016 - RNA, 21 nt, Human
cuccuccucauccaccccccc

SEQ ID NO: 155017 - RNA, 24 nt, Human
gcaaacaugugaaccucccccuuc

SEQ ID NO: 155018 - RNA, 20 nt, Human
ggaaccaaccaaauaaacca

SEQ ID NO: 155019 - RNA, 24 nt, Human
gucuccggcuccuccucauccacc

SEQ ID NO: 155020 - RNA, 23 nt, Human
uaagaacauugaggcaauccagu

SEQ ID NO: 155021 - RNA, 25 nt, Human
uaagggagagcuugguaguuucaca

SEQ ID NO: 155022 - RNA, 21 nt, Human
uauaaccaggaaagucaagag

SEQ ID NO: 155023 - RNA, 22 nt, Human
uaugcagaaaagggaaccaacc

SEQ ID NO: 155024 - RNA, 24 nt, Human
ucacaaacaaaaaaccacacaaca

SEQ ID NO: 155025 - RNA, 24 nt, Human
uccgcggcgucuccggcuccuccu

SEQ ID NO: 155026 - RNA, 18 nt, Human
ugaaagaaccacugggcu

SEQ ID NO: 155027 - RNA, 24 nt, Human
ugaacguaaagaucaucacaaacc

SEQ ID NO: 155028 - RNA, 25 nt, Human
ugcaaacaugugaaccucccccuuc

SEQ ID NO: 155029 - RNA, 24 nt, Human
ugcagaaaagggaaccaaccaaau

SEQ ID NO: 155030 - RNA, 18 nt, Human
ugcugugguuuugaugau

SEQ ID NO: 155031 - RNA, 21 nt, Human
uugauaagggagagcuuggua

SEQ ID NO: 155032 - RNA, 20 nt, Human
uuucuugggcaggaguauga

SEQ ID NO: 155033 - RNA, 26 nt, Human
uuuucuauuuuauuauugucauuaau

SEQ ID NO: 155034 - RNA, 23 nt, Human
aaaaaaaaaaaaaaaaauccaaa

SEQ ID NO: 155035 - RNA, 21 nt, Human
aaaaaaacaaaaaccauccgg

SEQ ID NO: 155036 - RNA, 19 nt, Human
aaaaacacaaacaaaacca

SEQ ID NO: 155037 - RNA, 22 nt, Human
aaaaacacaaacaaaaccacug

SEQ ID NO: 155038 - RNA, 19 nt, Human
aaacaaaaccacugcccuu

SEQ ID NO: 155039 - RNA, 21 nt, Human
aaacaaacaaaccccaaagaa

SEQ ID NO: 155040 - RNA, 23 nt, Human
aaacaaacaaaccccaaagaacc

SEQ ID NO: 155041 - RNA, 25 nt, Human
aaacaaacaaaccccaaagaacccc

SEQ ID NO: 155042 - RNA, 23 nt, Human
aaacaaaccccaaagaacccccg

SEQ ID NO: 155043 - RNA, 23 nt, Human
aaacaaacugaugaaauggaaau

SEQ ID NO: 155044 - RNA, 26 nt, Human
aaacaaccaccaaaacaaaacaaucc

SEQ ID NO: 155045 - RNA, 27 nt, Human
aaaucaguuuauaaacuguuuuuccaa

SEQ ID NO: 155046 - RNA, 18 nt, Human
aacaaaacaaucccccaa

SEQ ID NO: 155047 - RNA, 20 nt, Human
aacaaauaaaucucuagcca

SEQ ID NO: 155048 - RNA, 25 nt, Human
aaccaaaaacacaaacaaaaccacu

SEQ ID NO: 155049 - RNA, 19 nt, Human
aaccaccaaaacaaaacaa

SEQ ID NO: 155050 - RNA, 22 nt, Human
aacuuuuccucuacuuugagcu

SEQ ID NO: 155051 - RNA, 21 nt, Human
aagaacccccgaaaaaaacaa

SEQ ID NO: 155052 - RNA, 23 nt, Human
aagaacccccgaaaaaaacaaaa

SEQ ID NO: 155053 - RNA, 22 nt, Human
aagagaaagggggcuugcucua

SEQ ID NO: 155054 - RNA, 19 nt, Human
aagcaaacaaacaaacccc

SEQ ID NO: 155055 - RNA, 23 nt, Human
aagcaaacaaacaaaccccaaag

SEQ ID NO: 155056 - RNA, 22 nt, Human
aagcacaaagcaggcaacaagg

SEQ ID NO: 155057 - RNA, 19 nt, Human
aagcaguucaaagcacgug

SEQ ID NO: 155058 - RNA, 24 nt, Human
aagcaguucaaagcacgugucuca

SEQ ID NO: 155059 - RNA, 21 nt, Human
aaggagacuccauuuugaucu

SEQ ID NO: 155060 - RNA, 21 nt, Human
acaaaacaaucccccaaauca

SEQ ID NO: 155061 - RNA, 21 nt, Human
acaaaccccaaagaacccccg

SEQ ID NO: 155062 - RNA, 25 nt, Human
acaaccaaaaacacaaacaaaacca

SEQ ID NO: 155063 - RNA, 26 nt, Human
accaaaacaaaacaaucccccaaauc

SEQ ID NO: 155064 - RNA, 21 nt, Human
accccaaagaacccccgaaaa

SEQ ID NO: 155065 - RNA, 20 nt, Human
acccccgaaaaaaacaaaaa

SEQ ID NO: 155066 - RNA, 28 nt, Human
acucuggaaaagaagcaaacaaacaaac

SEQ ID NO: 155067 - RNA, 24 nt, Human
acuuugagagguuucagcauugag

SEQ ID NO: 155068 - RNA, 20 nt, Human
agaaaccucaucagaaucaa

SEQ ID NO: 155069 - RNA, 20 nt, Human
agaaaggaaaaccaaaucua

SEQ ID NO: 155070 - RNA, 18 nt, Human
agagagggcauguuagug

SEQ ID NO: 155071 - RNA, 24 nt, Human
agagguuucagcauugaguaauuu

SEQ ID NO: 155072 - RNA, 20 nt, Human
agcaaagccccucucaagcu

SEQ ID NO: 155073 - RNA, 22 nt, Human
agcgggccugggcgccugggcg

SEQ ID NO: 155074 - RNA, 19 nt, Human
aggaugcauacggcccugc

SEQ ID NO: 155075 - RNA, 22 nt, Human
agggggcuugcucuacuuggcg

SEQ ID NO: 155076 - RNA, 23 nt, Human
agggguagcucaagcuacagagg

SEQ ID NO: 155077 - RNA, 22 nt, Human
agguuuguuuuuguuuuuuguu

SEQ ID NO: 155078 - RNA, 26 nt, Human
aucccccaaaucagggcaaaacaaaa

SEQ ID NO: 155079 - RNA, 20 nt, Human
auugugcaaaucagagcccu

SEQ ID NO: 155080 - RNA, 18 nt, Human
caaaaacacaaacaaaac

SEQ ID NO: 155081 - RNA, 22 nt, Human
caaaaacacaaacaaaaccacu

SEQ ID NO: 155082 - RNA, 21 nt, Human
caaaaauguacaacucaggug

SEQ ID NO: 155083 - RNA, 19 nt, Human
caaaacaaaacaauccccc

SEQ ID NO: 155084 - RNA, 23 nt, Human
caaaacaaaacaaucccccaaau

SEQ ID NO: 155085 - RNA, 18 nt, Human
caaaacaaccaccaaaac

SEQ ID NO: 155086 - RNA, 22 nt, Human
caaaacaaccaccaaaacaaag

SEQ ID NO: 155087 - RNA, 22 nt, Human
caaacaaacaaaccccaaagaa

SEQ ID NO: 155088 - RNA, 24 nt, Human
caaaccccaaagaacccccgaaaa

SEQ ID NO: 155089 - RNA, 18 nt, Human
caaagcaggcaacaaggc

SEQ ID NO: 155090 - RNA, 22 nt, Human
caaccaaaaacacaaacaaaac

SEQ ID NO: 155091 - RNA, 25 nt, Human
caaccaaaaacacaaacaaaaccac

SEQ ID NO: 155092 - RNA, 20 nt, Human
cacagcuaagucucaaaccc

SEQ ID NO: 155093 - RNA, 22 nt, Human
caccaaaacaaaacaauccccc

SEQ ID NO: 155094 - RNA, 24 nt, Human
cacggaguggggaacagcuguucu

SEQ ID NO: 155095 - RNA, 20 nt, Human
cacucuggaaaagaagcaaa

SEQ ID NO: 155096 - RNA, 24 nt, Human
cagaaucaagaguugaggcacugg

SEQ ID NO: 155097 - RNA, 19 nt, Human
cagcaggggagggguagcu

SEQ ID NO: 155098 - RNA, 19 nt, Human
cagcuagaagagcuuucca

SEQ ID NO: 155099 - RNA, 21 nt, Human
cauacgaggaacaguguaguc

SEQ ID NO: 155100 - RNA, 23 nt, Human
ccaaaacaaaacaaucccccaaa

SEQ ID NO: 155101 - RNA, 21 nt, Human
ccaauauaauacagcaaugag

SEQ ID NO: 155102 - RNA, 20 nt, Human
ccagagacagcuuggguucu

SEQ ID NO: 155103 - RNA, 21 nt, Human
ccaugaauagaaaagcaguuc

SEQ ID NO: 155104 - RNA, 23 nt, Human
cccaaagaacccccgaaaaaaac

SEQ ID NO: 155105 - RNA, 25 nt, Human
cccaaaucagggcaaaaccgggguc

SEQ ID NO: 155106 - RNA, 19 nt, Human
ccccaaaucagggcaaaac

SEQ ID NO: 155107 - RNA, 21 nt, Human
cccccaaaucagggcaaaaca

SEQ ID NO: 155108 - RNA, 22 nt, Human
cccccaaaucagggcaaaacaa

SEQ ID NO: 155109 - RNA, 20 nt, Human
cccccgaaaaaaacaaaaac

SEQ ID NO: 155110 - RNA, 19 nt, Human
cccccuuuuucuagacaag

SEQ ID NO: 155111 - RNA, 20 nt, Human
ccccgaaaaaaacaaaaacc

SEQ ID NO: 155112 - RNA, 24 nt, Human
ccuccccaacuuagccuacucacu

SEQ ID NO: 155113 - RNA, 20 nt, Human
ccucccuguucccacucccc

SEQ ID NO: 155114 - RNA, 20 nt, Human
ccugggcgaaaggcugggcc

SEQ ID NO: 155115 - RNA, 23 nt, Human
ccuucuauguaaaggccauuuag

SEQ ID NO: 155116 - RNA, 21 nt, Human
ccuucuccuaaaauaaaaguc

SEQ ID NO: 155117 - RNA, 28 nt, Human
cgcaggcgcgcucacgcacgcgcgcagu

SEQ ID NO: 155118 - RNA, 23 nt, Human
cgcgcucacgcacgcgcgcagcg

SEQ ID NO: 155119 - RNA, 22 nt, Human
cggcccugcgcagggugaaagu

SEQ ID NO: 155120 - RNA, 20 nt, Human
cuagcacuguugcuuaccug

SEQ ID NO: 155121 - RNA, 19 nt, Human
cuccuccccuugcagcggc

SEQ ID NO: 155122 - RNA, 23 nt, Human
cucuucccagaaaccucaucaga

SEQ ID NO: 155123 - RNA, 23 nt, Human
cuuugagagguuucagcauugag

SEQ ID NO: 155124 - RNA, 22 nt, Human
cuuuuccaauauaauacagcaa

SEQ ID NO: 155125 - RNA, 20 nt, Human
gaaaaaaacaaaaaccaucc

SEQ ID NO: 155126 - RNA, 22 nt, Human
gaaagcacaaagcaggcaacaa

SEQ ID NO: 155127 - RNA, 19 nt, Human
gaaauggaaauugucauca

SEQ ID NO: 155128 - RNA, 22 nt, Human
gaacaaccaaaaacacaaacaa

SEQ ID NO: 155129 - RNA, 18 nt, Human
gagaacacggagugggga

SEQ ID NO: 155130 - RNA, 22 nt, Human
gagagggcauguuagugaacac

SEQ ID NO: 155131 - RNA, 20 nt, Human
gagcacagaauucuaccagc

SEQ ID NO: 155132 - RNA, 18 nt, Human
gauuuaaagaaaaaggaa

SEQ ID NO: 155133 - RNA, 23 nt, Human
gcaaacaaacaaaccccaaagaa

SEQ ID NO: 155134 - RNA, 23 nt, Human
gcaaagccccucucaagcugcag

SEQ ID NO: 155135 - RNA, 20 nt, Human
gccgggugguucccaagagu

SEQ ID NO: 155136 - RNA, 20 nt, Human
gccgggugguucccaagagu

SEQ ID NO: 155137 - RNA, 19 nt, Human
gccugggcgaaaggcuggg

SEQ ID NO: 155138 - RNA, 20 nt, Human
gcuaauuaaggcccaaucua

SEQ ID NO: 155139 - RNA, 27 nt, Human
gcugcagugucuucauaaguugcacgg

SEQ ID NO: 155140 - RNA, 21 nt, Human
gcugcccugcacacuucaaaa

SEQ ID NO: 155141 - RNA, 24 nt, Human
gcuuggcaggaugcauacggcccu

SEQ ID NO: 155142 - RNA, 19 nt, Human
ggccaaggggaagccucag

SEQ ID NO: 155143 - RNA, 19 nt, Human
gggaagccucagcaaagcc

SEQ ID NO: 155144 - RNA, 24 nt, Human
gggcaaaacaaaauacugucaaaa

SEQ ID NO: 155145 - RNA, 24 nt, Human
gggggaaaagggauccuccugagg

SEQ ID NO: 155146 - RNA, 25 nt, Human
gggugguucccaagaguagccaugg

SEQ ID NO: 155147 - RNA, 19 nt, Human
guaaagaaaggaaaaccaa

SEQ ID NO: 155148 - RNA, 19 nt, Human
gugcagaaagcacaaagca

SEQ ID NO: 155149 - RNA, 23 nt, Human
uaaaauaaaagucauccacacuc

SEQ ID NO: 155150 - RNA, 24 nt, Human
uaaaauaaaagucauccacacuca

SEQ ID NO: 155151 - RNA, 25 nt, Human
uaaagaaaaaggaaaacaaaacaaa

SEQ ID NO: 155152 - RNA, 20 nt, Human
uaaagugcaccccuuauccc

SEQ ID NO: 155153 - RNA, 30 nt, Human
uaaauccauucaaaaaaaaaaaaaaaaaaa

SEQ ID NO: 155154 - RNA, 24 nt, Human
uaaaucucuagccagcugggggua

SEQ ID NO: 155155 - RNA, 24 nt, Human
uaccugucaguaucacagcuaagu

SEQ ID NO: 155156 - RNA, 19 nt, Human
uaggaacaaccaaaaacac

SEQ ID NO: 155157 - RNA, 19 nt, Human
uagguuaagaaagcuauaa

SEQ ID NO: 155158 - RNA, 18 nt, Human
uauaaagugcaccccuua

SEQ ID NO: 155159 - RNA, 19 nt, Human
uaugguuuagaaagagucc

SEQ ID NO: 155160 - RNA, 24 nt, Human
uaugguuuagaaagaguccuuuga

SEQ ID NO: 155161 - RNA, 24 nt, Human
uauuucagauucagcuagaagagc

SEQ ID NO: 155162 - RNA, 22 nt, Human
ucaaaaaaaaaaaaaaaaaaaa

SEQ ID NO: 155163 - RNA, 22 nt, Human
ucaccaggugaccagguuucca

SEQ ID NO: 155164 - RNA, 19 nt, Human
uccaaaacaaccaccaaaa

SEQ ID NO: 155165 - RNA, 22 nt, Human
uccaaaacaaccaccaaaacaa

SEQ ID NO: 155166 - RNA, 25 nt, Human
uccaaaacaaccaccaaaacaaaac

SEQ ID NO: 155167 - RNA, 18 nt, Human
ucccuguucccacucccc

SEQ ID NO: 155168 - RNA, 19 nt, Human
uccgcgcaccagcggcugg

SEQ ID NO: 155169 - RNA, 21 nt, Human
uccuucacauacgaggaacag

SEQ ID NO: 155170 - RNA, 22 nt, Human
uccuucacauacgaggaacagu

SEQ ID NO: 155171 - RNA, 22 nt, Human
ucuacagguuuaccaccuuugu

SEQ ID NO: 155172 - RNA, 26 nt, Human
ucuggaaaagaagcaaacaaacaaac

SEQ ID NO: 155173 - RNA, 20 nt, Human
ugaaauggaaauugucauca

SEQ ID NO: 155174 - RNA, 22 nt, Human
ugagaacacggaguggggaaca

SEQ ID NO: 155175 - RNA, 18 nt, Human
ugaggcggccgcucuccu

SEQ ID NO: 155176 - RNA, 21 nt, Human
ugaucucuucccagaaaccuc

SEQ ID NO: 155177 - RNA, 23 nt, Human
ugcacggcccuggcuaaagacac

SEQ ID NO: 155178 - RNA, 18 nt, Human
ugcacuguagacuuucca

SEQ ID NO: 155179 - RNA, 24 nt, Human
ugcacuguagacuuuccacacucu

SEQ ID NO: 155180 - RNA, 24 nt, Human
ugccugaaugggaacugcuagcuc

SEQ ID NO: 155181 - RNA, 23 nt, Human
ugggcgccugggcgaaaggcugg

SEQ ID NO: 155182 - RNA, 21 nt, Human
uggggaacagcuguucugacu

SEQ ID NO: 155183 - RNA, 19 nt, Human
ugucacggggagcacagaa

SEQ ID NO: 155184 - RNA, 24 nt, Human
ugucuggugcagaaagcacaaagg

SEQ ID NO: 155185 - RNA, 19 nt, Human
uuaggaacaaccaaaaaca

SEQ ID NO: 155186 - RNA, 23 nt, Human
uuauaaacuguuuuuccaaaaca

SEQ ID NO: 155187 - RNA, 25 nt, Human
uucaaaaaaaaaaaaaaaaaaaauc

SEQ ID NO: 155188 - RNA, 21 nt, Human
uuccagagagggcauguuagu

SEQ ID NO: 155189 - RNA, 19 nt, Human
uuccauagcuauaaagugc

SEQ ID NO: 155190 - RNA, 18 nt, Human
uugggaagagaaaggggg

SEQ ID NO: 155191 - RNA, 24 nt, Human
uuguuuuuuguuuuucguuuuuuu

SEQ ID NO: 155192 - RNA, 21 nt, Human
uuuaagauguauuuuuaaccc

SEQ ID NO: 155193 - RNA, 19 nt, Human
uuucuuuuuaaaaaaaggc

SEQ ID NO: 155194 - RNA, 22 nt, Human
aaaaacaaaaacaccaugauac

SEQ ID NO: 155195 - RNA, 28 nt, Human
aaaacaaaaacaaaaacaaaaacaccau

SEQ ID NO: 155196 - RNA, 22 nt, Human
aaacaaaaacaaaaacaccaug

SEQ ID NO: 155197 - RNA, 19 nt, Human
aacaucagaugucuucccc

SEQ ID NO: 155198 - RNA, 18 nt, Human
acaaaaacaaaaacaaaa

SEQ ID NO: 155199 - RNA, 23 nt, Human
agaugaacgaugaagagucaaac

SEQ ID NO: 155200 - RNA, 20 nt, Human
aguaacaggaacagaccuga

SEQ ID NO: 155201 - RNA, 19 nt, Human
caaaaacaccaugauacua

SEQ ID NO: 155202 - RNA, 21 nt, Human
caacaguaacaggaacagacc

SEQ ID NO: 155203 - RNA, 19 nt, Human
cagaugucuuccccuagau

SEQ ID NO: 155204 - RNA, 23 nt, Human
caggaaaaagaggaaccugaacc

SEQ ID NO: 155205 - RNA, 18 nt, Human
caggaacagaccugaucc

SEQ ID NO: 155206 - RNA, 23 nt, Human
ccaaaucagaaggaaacgugaca

SEQ ID NO: 155207 - RNA, 25 nt, Human
ccaacaguaacaggaacagaccuga

SEQ ID NO: 155208 - RNA, 21 nt, Human
ccaagacccaacaguaacagg

SEQ ID NO: 155209 - RNA, 28 nt, Human
cguggcaggaaaaagaggaaccugaacc

SEQ ID NO: 155210 - RNA, 22 nt, Human
ggcaggaaaaagaggaaccuga

SEQ ID NO: 155211 - RNA, 22 nt, Human
gucacacuuccagcaauccugg

SEQ ID NO: 155212 - RNA, 20 nt, Human
guggcaggaaaaagaggaac

SEQ ID NO: 155213 - RNA, 27 nt, Human
uaaaacaaaaacaaaaacaaaaacacc

SEQ ID NO: 155214 - RNA, 20 nt, Human
uaacaggaacagaccugauc

SEQ ID NO: 155215 - RNA, 22 nt, Human
uaacaggaacagaccugaucca

SEQ ID NO: 155216 - RNA, 20 nt, Human
uccagggucccucuuggucu

SEQ ID NO: 155217 - RNA, 19 nt, Human
ugacauggagucccaggcu

SEQ ID NO: 155218 - RNA, 21 nt, Human
ugacauggagucccaggcucg

SEQ ID NO: 155219 - RNA, 20 nt, Human
ugaccagcugggcuugccgc

SEQ ID NO: 155220 - RNA, 19 nt, Human
ugagauuugcaaaaaauau

SEQ ID NO: 155221 - RNA, 19 nt, Human
uggcaggaaaaagaggaac

SEQ ID NO: 155222 - RNA, 23 nt, Human
uggugggcagggguucccugggc

SEQ ID NO: 155223 - RNA, 25 nt, Human
uuaaaacaaaaacaaaaacaaaaac

SEQ ID NO: 155224 - RNA, 18 nt, Human
uuuccacucuccucagcc

SEQ ID NO: 155225 - RNA, 23 nt, Human
aaaacaacaaaaaucuaucaccu

SEQ ID NO: 155226 - RNA, 22 nt, Human
aaaaggcagaaugagacagaua

SEQ ID NO: 155227 - RNA, 20 nt, Human
aaacaacaaaaaucuaucac

SEQ ID NO: 155228 - RNA, 27 nt, Human
aaacaacaaaaaucuaucaccuggaau

SEQ ID NO: 155229 - RNA, 23 nt, Human
aacccagccuuggccccagagac

SEQ ID NO: 155230 - RNA, 19 nt, Human
aacugguuggaaaacgggu

SEQ ID NO: 155231 - RNA, 23 nt, Human
aagaaaagugacaagugauucau

SEQ ID NO: 155232 - RNA, 23 nt, Human
aagaaauucaguaaaacaagaug

SEQ ID NO: 155233 - RNA, 18 nt, Human
aaggaggagcuauccaua

SEQ ID NO: 155234 - RNA, 21 nt, Human
aagugauucauccugcaaugg

SEQ ID NO: 155235 - RNA, 18 nt, Human
aaugugggaaggaaagag

SEQ ID NO: 155236 - RNA, 30 nt, Human
acaaaacaacaaaaaucuaucaccuggaag

SEQ ID NO: 155237 - RNA, 23 nt, Human
acaacaaaaaucuaucaccugga

SEQ ID NO: 155238 - RNA, 23 nt, Human
acaggcccauauuaccccuugac

SEQ ID NO: 155239 - RNA, 23 nt, Human
accccgaagccacaaauaaccuu

SEQ ID NO: 155240 - RNA, 19 nt, Human
accuauuugugaaccuuac

SEQ ID NO: 155241 - RNA, 25 nt, Human
accuuaauaaugaggcuguguauga

SEQ ID NO: 155242 - RNA, 21 nt, Human
acugcucaugaaagacccaca

SEQ ID NO: 155243 - RNA, 22 nt, Human
agaaacaccgaggaggcuuagc

SEQ ID NO: 155244 - RNA, 27 nt, Human
agaaagcugaagaaagaaaucaaccua

SEQ ID NO: 155245 - RNA, 18 nt, Human
agacagauauguaaugaa

SEQ ID NO: 155246 - RNA, 23 nt, Human
agaguccagcuucuuaaucuuuu

SEQ ID NO: 155247 - RNA, 24 nt, Human
aguaguaauaaauauaaccccgaa

SEQ ID NO: 155248 - RNA, 19 nt, Human
agucgauuaaaaacugaaa

SEQ ID NO: 155249 - RNA, 18 nt, Human
agugucuuaagggcaaaa

SEQ ID NO: 155250 - RNA, 22 nt, Human
auaaauauaaccccgaagccac

SEQ ID NO: 155251 - RNA, 22 nt, Human
auaccaaagucuuccuccccca

SEQ ID NO: 155252 - RNA, 20 nt, Human
augagcauagacuuugcucu

SEQ ID NO: 155253 - RNA, 20 nt, Human
auugcacuuuaaaacuuugc

SEQ ID NO: 155254 - RNA, 24 nt, Human
caaaacaacaaaaaucuaucaccu

SEQ ID NO: 155255 - RNA, 21 nt, Human
caaagucuuccucccccaaaa

SEQ ID NO: 155256 - RNA, 21 nt, Human
cacugugcuggcuccagaggg

SEQ ID NO: 155257 - RNA, 23 nt, Human
cagaaagcugaagaaagaaauca

SEQ ID NO: 155258 - RNA, 20 nt, Human
cagccuuggccccagagacc

SEQ ID NO: 155259 - RNA, 24 nt, Human
caguaaaacaagaugugucucaua

SEQ ID NO: 155260 - RNA, 22 nt, Human
ccaaagucuuccucccccaaaa

SEQ ID NO: 155261 - RNA, 23 nt, Human
ccagcacagaagaaaagugacaa

SEQ ID NO: 155262 - RNA, 18 nt, Human
ccagucgauuaaaaacug

SEQ ID NO: 155263 - RNA, 20 nt, Human
ccccaaaauaaacaagugaa

SEQ ID NO: 155264 - RNA, 23 nt, Human
ccccagagaccggacggggcaga

SEQ ID NO: 155265 - RNA, 19 nt, Human
ccgaagccacaaauaaccu

SEQ ID NO: 155266 - RNA, 19 nt, Human
cgggaggagcaagcaccgc

SEQ ID NO: 155267 - RNA, 21 nt, Human
cuccaacacccugccaaggcc

SEQ ID NO: 155268 - RNA, 21 nt, Human
cugccaaucuuuucauaucua

SEQ ID NO: 155269 - RNA, 19 nt, Human
cuggaaaagccaaagaaaa

SEQ ID NO: 155270 - RNA, 19 nt, Human
cuuggaaaucaucucagcu

SEQ ID NO: 155271 - RNA, 24 nt, Human
cuuugcucuguuguuauagaucau

SEQ ID NO: 155272 - RNA, 25 nt, Human
gaaaaaauuuacacucugaaauuaa

SEQ ID NO: 155273 - RNA, 21 nt, Human
gaaaauaucaaucuguaaaga

SEQ ID NO: 155274 - RNA, 20 nt, Human
gaaacaccuaacagccauaa

SEQ ID NO: 155275 - RNA, 21 nt, Human
gaaacaccuaacagccauaaa

SEQ ID NO: 155276 - RNA, 20 nt, Human
gaauuaaaaaagaaaaaaag

SEQ ID NO: 155277 - RNA, 20 nt, Human
gaauugggggggaaacauag

SEQ ID NO: 155278 - RNA, 23 nt, Human
gagacauaaaaauaaaaauguca

SEQ ID NO: 155279 - RNA, 21 nt, Human
gagcaagcaccgcguuuuccc

SEQ ID NO: 155280 - RNA, 18 nt, Human
gaguuccucaccugugcc

SEQ ID NO: 155281 - RNA, 20 nt, Human
gcacagaagaaaagugacaa

SEQ ID NO: 155282 - RNA, 18 nt, Human
gcaguagaguccagcuuc

SEQ ID NO: 155283 - RNA, 20 nt, Human
gcaguagaguccagcuucuu

SEQ ID NO: 155284 - RNA, 24 nt, Human
gcugcagaacugguuggaaaacgg

SEQ ID NO: 155285 - RNA, 23 nt, Human
ggaaaaacuguccauacauuuuu

SEQ ID NO: 155286 - RNA, 24 nt, Human
gggguguugcuugucuagaaucua

SEQ ID NO: 155287 - RNA, 20 nt, Human
uaaaacaagaugugucucau

SEQ ID NO: 155288 - RNA, 23 nt, Human
uaaauauaaccccgaagccacaa

SEQ ID NO: 155289 - RNA, 21 nt, Human
uaacaaaacaacaaaaaucua

SEQ ID NO: 155290 - RNA, 22 nt, Human
uaacuucaagaaauacuagggu

SEQ ID NO: 155291 - RNA, 20 nt, Human
uaaggagagacauaaaaaua

SEQ ID NO: 155292 - RNA, 23 nt, Human
uaccaaagucuuccucccccaaa

SEQ ID NO: 155293 - RNA, 18 nt, Human
uagaauuaaaaaagaaaa

SEQ ID NO: 155294 - RNA, 19 nt, Human
uagacaguauaaaaggcag

SEQ ID NO: 155295 - RNA, 20 nt, Human
ucagaaagcugaagaaagaa

SEQ ID NO: 155296 - RNA, 24 nt, Human
ucagaaagcugaagaaagaaauca

SEQ ID NO: 155297 - RNA, 25 nt, Human
ucaguaaaacaagaugugucucaua

SEQ ID NO: 155298 - RNA, 21 nt, Human
uccaacacccugccaaggcca

SEQ ID NO: 155299 - RNA, 23 nt, Human
ucuaccaguaugggggaaaaaaa

SEQ ID NO: 155300 - RNA, 24 nt, Human
ucucucagcuuuaauggcaguaga

SEQ ID NO: 155301 - RNA, 19 nt, Human
ucuuggaaaucaucucagc

SEQ ID NO: 155302 - RNA, 21 nt, Human
ugaagaaaaaauauaaaaugu

SEQ ID NO: 155303 - RNA, 18 nt, Human
ugaagaaagaaaucaacc

SEQ ID NO: 155304 - RNA, 28 nt, Human
ugcuccauaccaaagucuuccuccccca

SEQ ID NO: 155305 - RNA, 19 nt, Human
uggaaaagccaaagaaaag

SEQ ID NO: 155306 - RNA, 19 nt, Human
uggaaaucaucucagcuuc

SEQ ID NO: 155307 - RNA, 19 nt, Human
ugggaaacaccuaacagcc

SEQ ID NO: 155308 - RNA, 18 nt, Human
ugguuggaaaacggguca

SEQ ID NO: 155309 - RNA, 23 nt, Human
ugucagaaagcugaagaaagaaa

SEQ ID NO: 155310 - RNA, 25 nt, Human
ugugcuggcuccagagggguguugc

SEQ ID NO: 155311 - RNA, 20 nt, Human
uguuaaucagaaacaccgag

SEQ ID NO: 155312 - RNA, 24 nt, Human
uuaauggcaguagaguccagcuuc

SEQ ID NO: 155313 - RNA, 21 nt, Human
uuacauaguguuuaaagcaua

SEQ ID NO: 155314 - RNA, 23 nt, Human
uuagaugcuuucuauccuuugaa

SEQ ID NO: 155315 - RNA, 22 nt, Human
uuccauuuaaaguaguuuuggu

SEQ ID NO: 155316 - RNA, 21 nt, Human
uugaguuccucaccugugccu

SEQ ID NO: 155317 - RNA, 20 nt, Human
uuugguauuucuuugcucca

SEQ ID NO: 155318 - RNA, 20 nt, Human
uuuuuuuuuuuuuuuauaac

SEQ ID NO: 155319 - RNA, 18 nt, Human
uuuuuuuuuuuuuuuuug

SEQ ID NO: 155320 - RNA, 23 nt, Human
uuuuuuuuuuuuuuuuuugauuu

SEQ ID NO: 155321 - RNA, 22 nt, Human
ccagggcggcgacgcgggacuu

SEQ ID NO: 155322 - RNA, 22 nt, Human
ccccgccgcaucccgccgccug

SEQ ID NO: 155323 - RNA, 32 nt, Human
ccgcaucccgccgccugcugcaccgucccccc

SEQ ID NO: 155324 - RNA, 23 nt, Human
ccgccccgccgcaucccgccgcc

SEQ ID NO: 155325 - RNA, 25 nt, Human
ccgccccgccgcaucccgccgccuc

SEQ ID NO: 155326 - RNA, 18 nt, Human
ccgccgcaucccgccgcc

SEQ ID NO: 155327 - RNA, 20 nt, Human
ccugcuucucuccccuuccc

SEQ ID NO: 155328 - RNA, 24 nt, Human
cggcgacgcgggacuuggagcccg

SEQ ID NO: 155329 - RNA, 19 nt, Human
cugcaccguccccgccagg

SEQ ID NO: 155330 - RNA, 25 nt, Human
cuucccugcuucgccgagccggagg

SEQ ID NO: 155331 - RNA, 19 nt, Human
gacuccugcuucucucccc

SEQ ID NO: 155332 - RNA, 22 nt, Human
gacuuucuggccugugcagucu

SEQ ID NO: 155333 - RNA, 18 nt, Human
gcaucccgccgccugcug

SEQ ID NO: 155334 - RNA, 19 nt, Human
gcgacgcgggacuuggagc

SEQ ID NO: 155335 - RNA, 23 nt, Human
ggcgcucaggcugccgccccgcc

SEQ ID NO: 155336 - RNA, 18 nt, Human
ugccgccccgccgcaucc

SEQ ID NO: 155337 - RNA, 19 nt, Human
uucccugcuucgccgagcc

SEQ ID NO: 155338 - RNA, 19 nt, Human
aaacaaaaguacacaguuu

SEQ ID NO: 155339 - RNA, 22 nt, Human
aacugacuucauuuuuacucca

SEQ ID NO: 155340 - RNA, 20 nt, Human
accaaaccacagaugacaca

SEQ ID NO: 155341 - RNA, 19 nt, Human
agccuuaaaguaaaucugc

SEQ ID NO: 155342 - RNA, 21 nt, Human
auccagcaaggaagauaccau

SEQ ID NO: 155343 - RNA, 19 nt, Human
caaaccacagaugacacau

SEQ ID NO: 155344 - RNA, 22 nt, Human
cacaguuuagcucucucuaucu

SEQ ID NO: 155345 - RNA, 20 nt, Human
cacuuuuaaaaaccaaacca

SEQ ID NO: 155346 - RNA, 18 nt, Human
cugguguggauucugcca

SEQ ID NO: 155347 - RNA, 20 nt, Human
cuuuuaaaaaccaaaccaca

SEQ ID NO: 155348 - RNA, 24 nt, Human
gauaaucagaacaacacuuuggga

SEQ ID NO: 155349 - RNA, 23 nt, Human
uaaaaaccaaaccacagaugaca

SEQ ID NO: 155350 - RNA, 23 nt, Human
uaaaauuuuccucaaaugcuuag

SEQ ID NO: 155351 - RNA, 21 nt, Human
uaaggacacacuaaaacuagu

SEQ ID NO: 155352 - RNA, 21 nt, Human
uaauaguagaaaaacacuuuc

SEQ ID NO: 155353 - RNA, 20 nt, Human
uacacaguuuaaauaauuaa

SEQ ID NO: 155354 - RNA, 19 nt, Human
uacuccauaagccuucuca

SEQ ID NO: 155355 - RNA, 21 nt, Human
uaugcauuaggaauuugacuu

SEQ ID NO: 155356 - RNA, 23 nt, Human
ucaaaaucugauuauaacgugau

SEQ ID NO: 155357 - RNA, 26 nt, Human
ucauuuuuacuccauaagccuucuca

SEQ ID NO: 155358 - RNA, 20 nt, Human
uccauaagccuucucauugc

SEQ ID NO: 155359 - RNA, 21 nt, Human
ugggauuaaauaccaacugac

SEQ ID NO: 155360 - RNA, 23 nt, Human
uguguugguugauaagcuggugu

SEQ ID NO: 155361 - RNA, 24 nt, Human
uuaaaauuuuccucaaaugcuuag

SEQ ID NO: 155362 - RNA, 22 nt, Human
uuuaauuaucccuugcuaucuc

SEQ ID NO: 155363 - RNA, 27 nt, Human
uuuccacuuuuaaaaaccaaaccacag

SEQ ID NO: 155364 - RNA, 24 nt, Human
agauaguuccugaauaaaaaucaa

SEQ ID NO: 155365 - RNA, 22 nt, Human
aggauggaagaucagcuaaaaa

SEQ ID NO: 155366 - RNA, 19 nt, Human
aucucagcuguuaacuucu

SEQ ID NO: 155367 - RNA, 22 nt, Human
auguaaaauguacuauacuuua

SEQ ID NO: 155368 - RNA, 21 nt, Human
cagcuaaaaagcaaguuguaa

SEQ ID NO: 155369 - RNA, 23 nt, Human
cauauaaagaaaaaagagucauu

SEQ ID NO: 155370 - RNA, 20 nt, Human
uaaaaagcaaguuguaauau

SEQ ID NO: 155371 - RNA, 24 nt, Human
uaaauagauuacuguuaaauaacu

SEQ ID NO: 155372 - RNA, 24 nt, Human
uaacauauaaagaaaaaagaguca

SEQ ID NO: 155373 - RNA, 20 nt, Human
uacuauaauuaguaaauaga

SEQ ID NO: 155374 - RNA, 20 nt, Human
uauguagauuguuucagagu

SEQ ID NO: 155375 - RNA, 25 nt, Human
ugaaauggaaacauaaaaguuuauu

SEQ ID NO: 155376 - RNA, 28 nt, Human
ugaggauggaagaucagcuccgagggug

SEQ ID NO: 155377 - RNA, 18 nt, Human
uuagucucuuauuccucu

SEQ ID NO: 155378 - RNA, 19 nt, Human
uucaggggaaaaaaaacug

SEQ ID NO: 155379 - RNA, 22 nt, Human
uucccacaaacuuggaauauuu

SEQ ID NO: 155380 - RNA, 24 nt, Human
uuccucguuaucucagcuguuaac

SEQ ID NO: 155381 - RNA, 25 nt, Human
uucuuguucuaacuggacauuuugg

SEQ ID NO: 155382 - RNA, 26 nt, Human
uucuuguucuaacuggacauuuuggu

SEQ ID NO: 155383 - RNA, 25 nt, Human
acacacgcacuuccccacuggcucc

SEQ ID NO: 155384 - RNA, 25 nt, Human
acacgcacuuccccacuggcuccuu

SEQ ID NO: 155385 - RNA, 18 nt, Human
aggcaagugcuggcucag

SEQ ID NO: 155386 - RNA, 19 nt, Human
cacuggguggagguggagg

SEQ ID NO: 155387 - RNA, 18 nt, Human
caggugggaggcagcggg

SEQ ID NO: 155388 - RNA, 24 nt, Human
ccaagguuaggggagggagcccau

SEQ ID NO: 155389 - RNA, 21 nt, Human
ccccacuggcuccuuggcccg

SEQ ID NO: 155390 - RNA, 21 nt, Human
cugccugggaugaggcugcuc

SEQ ID NO: 155391 - RNA, 19 nt, Human
ggacagagggaagacccac

SEQ ID NO: 155392 - RNA, 22 nt, Human
ggcaccaagguuaggggaggga

SEQ ID NO: 155393 - RNA, 18 nt, Human
gggcaggugggaggcagc

SEQ ID NO: 155394 - RNA, 23 nt, Human
ggggagggagcccaucaccaugu

SEQ ID NO: 155395 - RNA, 21 nt, Human
uaaaacagugguuggacagag

SEQ ID NO: 155396 - RNA, 21 nt, Human
uauugggaucacuggguggag

SEQ ID NO: 155397 - RNA, 19 nt, Human
ucacuggguggagguggag

SEQ ID NO: 155398 - RNA, 23 nt, Human
ucacuggguggagguggaggaag

SEQ ID NO: 155399 - RNA, 19 nt, Human
uccuggucuggggauggau

SEQ ID NO: 155400 - RNA, 21 nt, Human
ucuggggauggaucaggcacc

SEQ ID NO: 155401 - RNA, 24 nt, Human
ugaggcaagagguguacguauccu

SEQ ID NO: 155402 - RNA, 23 nt, Human
uggaggaagaacugaguggcugc

SEQ ID NO: 155403 - RNA, 19 nt, Human
uggcccaacacacgcacuu

SEQ ID NO: 155404 - RNA, 24 nt, Human
uggcgaaagacggcaggagggcag

SEQ ID NO: 155405 - RNA, 19 nt, Human
accccggcucccugggucu

SEQ ID NO: 155406 - RNA, 22 nt, Human
accccggcucccugggucucca

SEQ ID NO: 155407 - RNA, 22 nt, Human
aggcgaggcuggcugagucccg

SEQ ID NO: 155408 - RNA, 19 nt, Human
aggcuggcugagucccggg

SEQ ID NO: 155409 - RNA, 18 nt, Human
cccucuccuuucccccuu

SEQ ID NO: 155410 - RNA, 19 nt, Human
cccugggucuccagcggcc

SEQ ID NO: 155411 - RNA, 22 nt, Human
cccuuggcguccuaggggcgag

SEQ ID NO: 155412 - RNA, 19 nt, Human
ccuaaccccggcucccugg

SEQ ID NO: 155413 - RNA, 18 nt, Human
ccucuccuuucccccuug

SEQ ID NO: 155414 - RNA, 19 nt, Human
ccucugugccgcaccgccu

SEQ ID NO: 155415 - RNA, 19 nt, Human
ccuuucccccuuggcgucc

SEQ ID NO: 155416 - RNA, 22 nt, Human
cgcgaccgcggcgguggcggug

SEQ ID NO: 155417 - RNA, 24 nt, Human
cucuccuuucccccuuggcguccu

SEQ ID NO: 155418 - RNA, 21 nt, Human
gaccgcggcgguggcgguggg

SEQ ID NO: 155419 - RNA, 18 nt, Human
gccggcagccaccagccc

SEQ ID NO: 155420 - RNA, 22 nt, Human
gggcgucuggagcgcgaccgcg

SEQ ID NO: 155421 - RNA, 21 nt, Human
ggugccugggagggcgcggag

SEQ ID NO: 155422 - RNA, 20 nt, Human
guccuuuuccgcccucuccu

SEQ ID NO: 155423 - RNA, 19 nt, Human
ugccugggagggcgcggag

SEQ ID NO: 155424 - RNA, 20 nt, Human
uggcggugggagcuaggguc

SEQ ID NO: 155425 - RNA, 24 nt, Human
uggcggugggagcuagggucaccu

SEQ ID NO: 155426 - RNA, 21 nt, Human
ugggagggcgcggagcugcug

SEQ ID NO: 155427 - RNA, 22 nt, Human
ugggagggcgcggagcugcugg

SEQ ID NO: 155428 - RNA, 24 nt, Human
ugggagggcgcggagcugcuggag

SEQ ID NO: 155429 - RNA, 24 nt, Human
uuccuaaccccggcucccuggguc

SEQ ID NO: 155430 - RNA, 24 nt, Human
aaaaaaaaaaaaaaaacaucacaa

SEQ ID NO: 155431 - RNA, 25 nt, Human
aaaaaaaaaaaacaucacaaccaug

SEQ ID NO: 155432 - RNA, 20 nt, Human
aaaaacaucacaaccaugaa

SEQ ID NO: 155433 - RNA, 18 nt, Human
aaacaucacaaccaugaa

SEQ ID NO: 155434 - RNA, 20 nt, Human
aaauacuaaaguacagacaa

SEQ ID NO: 155435 - RNA, 23 nt, Human
aauggugaaaaauacuaaaguac

SEQ ID NO: 155436 - RNA, 23 nt, Human
agggguucccauuguuaaagucu

SEQ ID NO: 155437 - RNA, 24 nt, Human
auuuuuaaaagaaggaagaaaaaa

SEQ ID NO: 155438 - RNA, 22 nt, Human
cacaaauggugaaaaauacuaa

SEQ ID NO: 155439 - RNA, 19 nt, Human
cauuuuuaaaagaaggaag

SEQ ID NO: 155440 - RNA, 18 nt, Human
gaaggaagaaaaaaaaac

SEQ ID NO: 155441 - RNA, 24 nt, Human
uaaaacauuuucugguuuaaaaaa

SEQ ID NO: 155442 - RNA, 19 nt, Human
uaagaggcccucuugguuc

SEQ ID NO: 155443 - RNA, 19 nt, Human
uauggaauuauaaauuuaa

SEQ ID NO: 155444 - RNA, 22 nt, Human
ucuccuuccuccucguucucuc

SEQ ID NO: 155445 - RNA, 22 nt, Human
ucuccuuccuccucguucucuc

SEQ ID NO: 155446 - RNA, 23 nt, Human
ucuuaaacaaccauuuuuaaaag

SEQ ID NO: 155447 - RNA, 27 nt, Human
ugaaaaauacuaaaguacagacaagga

SEQ ID NO: 155448 - RNA, 18 nt, Human
uucuccacaaugauacug

SEQ ID NO: 155449 - RNA, 19 nt, Human
uucuccacaaugauacuga

SEQ ID NO: 155450 - RNA, 24 nt, Human
aagcuuugcagcagucugcauuua

SEQ ID NO: 155451 - RNA, 21 nt, Human
agaaaaaauucuucaugcuga

SEQ ID NO: 155452 - RNA, 21 nt, Human
agaaaaaauucuucaugcuga

SEQ ID NO: 155453 - RNA, 19 nt, Human
cacccacggccggcaacgc

SEQ ID NO: 155454 - RNA, 22 nt, Human
cacuuuaucccucugucucgcg

SEQ ID NO: 155455 - RNA, 22 nt, Human
cacuuuaucccucugucucgcg

SEQ ID NO: 155456 - RNA, 21 nt, Human
ccagacgacacguuuccuuag

SEQ ID NO: 155457 - RNA, 21 nt, Human
ccagacgacacguuuccuuag

SEQ ID NO: 155458 - RNA, 23 nt, Human
cccgcuccgacgccccuaacuca

SEQ ID NO: 155459 - RNA, 22 nt, Human
cgagaagggacucuccuccucc

SEQ ID NO: 155460 - RNA, 24 nt, Human
cggagaugugcaggcguggccccc

SEQ ID NO: 155461 - RNA, 24 nt, Human
cggagaugugcaggcguggccccc

SEQ ID NO: 155462 - RNA, 19 nt, Human
cgguuggagaaacccgcuc

SEQ ID NO: 155463 - RNA, 21 nt, Human
cuaaaaagaguuuucucucac

SEQ ID NO: 155464 - RNA, 21 nt, Human
cuaaaaagaguuuucucucac

SEQ ID NO: 155465 - RNA, 20 nt, Human
cuaaaggcucugguccagcg

SEQ ID NO: 155466 - RNA, 18 nt, Human
cucgagguaacaauaaca

SEQ ID NO: 155467 - RNA, 18 nt, Human
cucgagguaacaauaaca

SEQ ID NO: 155468 - RNA, 21 nt, Human
cucucaacuccacucagugac

SEQ ID NO: 155469 - RNA, 23 nt, Human
cucucaacuccacucagugacug

SEQ ID NO: 155470 - RNA, 27 nt, Human
cugguccagcaguucucaaauuucaga

SEQ ID NO: 155471 - RNA, 21 nt, Human
gcacagaaugagaaaaaauuc

SEQ ID NO: 155472 - RNA, 21 nt, Human
gcacagaaugagaaaaaauuc

SEQ ID NO: 155473 - RNA, 23 nt, Human
ggagaugugcaggcguggccccc

SEQ ID NO: 155474 - RNA, 18 nt, Human
guacauaucucagagauc

SEQ ID NO: 155475 - RNA, 20 nt, Human
guguacauaucucagagauc

SEQ ID NO: 155476 - RNA, 19 nt, Human
guuggauguuaucucugac

SEQ ID NO: 155477 - RNA, 23 nt, Human
uaacaauaacagcaccaucuuca

SEQ ID NO: 155478 - RNA, 23 nt, Human
uaacaauaacagcaccaucuuca

SEQ ID NO: 155479 - RNA, 21 nt, Human
uaacuaccucucagaugauau

SEQ ID NO: 155480 - RNA, 21 nt, Human
ucagagaucgcauguggcacu

SEQ ID NO: 155481 - RNA, 21 nt, Human
ucagaggucgcauguggcacu

SEQ ID NO: 155482 - RNA, 21 nt, Human
ucagguuuguuaaauauaucc

SEQ ID NO: 155483 - RNA, 22 nt, Human
ucuaaaaagaguuuucucucac

SEQ ID NO: 155484 - RNA, 22 nt, Human
ucuaaaaagaguuuucucucac

SEQ ID NO: 155485 - RNA, 19 nt, Human
ucucugacuggggacaggg

SEQ ID NO: 155486 - RNA, 21 nt, Human
ucucugacuggggacaggggu

SEQ ID NO: 155487 - RNA, 24 nt, Human
ucucuugcaggcaaaagcuuugca

SEQ ID NO: 155488 - RNA, 20 nt, Human
ucuucugggccaggcaaaua

SEQ ID NO: 155489 - RNA, 20 nt, Human
ucuucugggccaggcaaaua

SEQ ID NO: 155490 - RNA, 18 nt, Human
ugagcggagccgauugcg

SEQ ID NO: 155491 - RNA, 20 nt, Human
ugagugcgauaguaagaaug

SEQ ID NO: 155492 - RNA, 20 nt, Human
ugagugcgauaguaagaaug

SEQ ID NO: 155493 - RNA, 25 nt, Human
ugcgauaguaagaaugacuguguac

SEQ ID NO: 155494 - RNA, 25 nt, Human
ugcgauaguaagaaugacuguguac

SEQ ID NO: 155495 - RNA, 23 nt, Human
uggcacagaaugagaaaaaauuc

SEQ ID NO: 155496 - RNA, 18 nt, Human
uggccagagcacccacgg

SEQ ID NO: 155497 - RNA, 19 nt, Human
uggcccccaagcccauucc

SEQ ID NO: 155498 - RNA, 19 nt, Human
uggcccccaagcccauucc

SEQ ID NO: 155499 - RNA, 21 nt, Human
ugggauucacuaguucucuca

SEQ ID NO: 155500 - RNA, 24 nt, Human
uggggacagggguuucuucccccg

SEQ ID NO: 155501 - RNA, 18 nt, Human
ugugcaggcguggccccc

SEQ ID NO: 155502 - RNA, 18 nt, Human
ugugcaggcguggccccc

SEQ ID NO: 155503 - RNA, 18 nt, Human
uguggccagagcacccac

SEQ ID NO: 155504 - RNA, 33 nt, Human
uguggccagagcacccacggccggcaacgcccc

SEQ ID NO: 155505 - RNA, 18 nt, Human
uuccuuaggccuuccgag

SEQ ID NO: 155506 - RNA, 26 nt, Human
uucucuugcaggcaaaagcuuugcag

SEQ ID NO: 155507 - RNA, 24 nt, Human
uuuuuuuuuuuuuuuuuuuuaaag

SEQ ID NO: 155508 - RNA, 27 nt, Human
aaacacaagaaucacccaaguuuccca

SEQ ID NO: 155509 - RNA, 25 nt, Human
aacaagacggaggaaaagaaagaga

SEQ ID NO: 155510 - RNA, 23 nt, Human
aaccucacaaaucccugcaucuc

SEQ ID NO: 155511 - RNA, 25 nt, Human
aagaaagagagaggggagaaaaaaa

SEQ ID NO: 155512 - RNA, 19 nt, Human
aagaaucacccaaguuucc

SEQ ID NO: 155513 - RNA, 19 nt, Human
acugggaagagagagcagc

SEQ ID NO: 155514 - RNA, 21 nt, Human
acuuucuccccuucggucuuu

SEQ ID NO: 155515 - RNA, 26 nt, Human
agaagccagugaggugaguuuggagc

SEQ ID NO: 155516 - RNA, 18 nt, Human
agagagcagcuugacccc

SEQ ID NO: 155517 - RNA, 21 nt, Human
agagagcagcuugacccccau

SEQ ID NO: 155518 - RNA, 20 nt, Human
aggaaaagaaagagagaggg

SEQ ID NO: 155519 - RNA, 21 nt, Human
aggcggcggcggcggcggcgc

SEQ ID NO: 155520 - RNA, 23 nt, Human
augcacgggagagagcggggcug

SEQ ID NO: 155521 - RNA, 22 nt, Human
caagaggauuguaaauaaacac

SEQ ID NO: 155522 - RNA, 19 nt, Human
cacaaaucccugcaucucu

SEQ ID NO: 155523 - RNA, 18 nt, Human
cagaagccagugagguga

SEQ ID NO: 155524 - RNA, 18 nt, Human
cagccggcuagugcaucu

SEQ ID NO: 155525 - RNA, 20 nt, Human
cagcuugacccccaucccuu

SEQ ID NO: 155526 - RNA, 25 nt, Human
cagcuugacccccaucccuucuugc

SEQ ID NO: 155527 - RNA, 18 nt, Human
caggagccaggaguugag

SEQ ID NO: 155528 - RNA, 19 nt, Human
cagugccggccccgagcag

SEQ ID NO: 155529 - RNA, 21 nt, Human
cauccaccacucuccgugcag

SEQ ID NO: 155530 - RNA, 20 nt, Human
ccagggcgggcgagcagcgg

SEQ ID NO: 155531 - RNA, 21 nt, Human
ccagggcgggcgagcagcgga

SEQ ID NO: 155532 - RNA, 21 nt, Human
ccaguccgccaucuucccgcc

SEQ ID NO: 155533 - RNA, 25 nt, Human
ccccgagcagcgcuucgcaggcccc

SEQ ID NO: 155534 - RNA, 22 nt, Human
cccgcgcgaacgcugccgaccg

SEQ ID NO: 155535 - RNA, 23 nt, Human
ccggccccgagcagcgcuucgca

SEQ ID NO: 155536 - RNA, 19 nt, Human
ccucucggcagcguggaaa

SEQ ID NO: 155537 - RNA, 23 nt, Human
ccuguaaagacuucaaacucucc

SEQ ID NO: 155538 - RNA, 22 nt, Human
cgcgaacgcugccgaccgccgc

SEQ ID NO: 155539 - RNA, 22 nt, Human
cggcggcggcggcgcugggugg

SEQ ID NO: 155540 - RNA, 29 nt, Human
cggcuggaggcggcggcggcggcggcgac

SEQ ID NO: 155541 - RNA, 25 nt, Human
cgggagagagcggggcugaauagug

SEQ ID NO: 155542 - RNA, 18 nt, Human
cuccgugcagagcacucc

SEQ ID NO: 155543 - RNA, 25 nt, Human
cugcagcggcuccaagacuccggcc

SEQ ID NO: 155544 - RNA, 24 nt, Human
cuuucagcuccaguccgccaucuu

SEQ ID NO: 155545 - RNA, 19 nt, Human
gaaaaugagccccgggaag

SEQ ID NO: 155546 - RNA, 18 nt, Human
gaggggagaaaaaaaaaa

SEQ ID NO: 155547 - RNA, 18 nt, Human
gaguggaucugcacuggg

SEQ ID NO: 155548 - RNA, 18 nt, Human
gcacaaucuggcucugcu

SEQ ID NO: 155549 - RNA, 24 nt, Human
gcagcgcuucgcaggcccccgcgc

SEQ ID NO: 155550 - RNA, 29 nt, Human
gccccgagcagcgcuucgcaggcccccgg

SEQ ID NO: 155551 - RNA, 19 nt, Human
gccccgggaaggcaacuuc

SEQ ID NO: 155552 - RNA, 20 nt, Human
gccccgggaaggcaacuuca

SEQ ID NO: 155553 - RNA, 19 nt, Human
gccggccccgagcagcgcu

SEQ ID NO: 155554 - RNA, 21 nt, Human
gcggcggcgcguccuccccgc

SEQ ID NO: 155555 - RNA, 30 nt, Human
gcggcggcgcuggguggcggcggcggcgac

SEQ ID NO: 155556 - RNA, 27 nt, Human
gcggcggcggcgcuggguggcggcggc

SEQ ID NO: 155557 - RNA, 30 nt, Human
gcggcggcggcggcgcuggguggcggcgac

SEQ ID NO: 155558 - RNA, 18 nt, Human
gcucccgauacccaauca

SEQ ID NO: 155559 - RNA, 20 nt, Human
ggaggcggcggcggcggcgg

SEQ ID NO: 155560 - RNA, 24 nt, Human
ggcggcgcuggguggcggcggcgg

SEQ ID NO: 155561 - RNA, 20 nt, Human
ggcggcggcggcggcggcgc

SEQ ID NO: 155562 - RNA, 22 nt, Human
ggcggcggcggcggcggcgcug

SEQ ID NO: 155563 - RNA, 19 nt, Human
gggacgcgcggcggcccgg

SEQ ID NO: 155564 - RNA, 20 nt, Human
uaaauaaacacaagaaucac

SEQ ID NO: 155565 - RNA, 21 nt, Human
uagugcaucuugcagcugggg

SEQ ID NO: 155566 - RNA, 20 nt, Human
ucauuggccuuuuuuuuuuu

SEQ ID NO: 155567 - RNA, 21 nt, Human
ucauuggccuuuuuuuuuuuu

SEQ ID NO: 155568 - RNA, 30 nt, Human
ucccaccuucucuggaugccuuuccccaag

SEQ ID NO: 155569 - RNA, 18 nt, Human
ucccaggagccaggaguu

SEQ ID NO: 155570 - RNA, 22 nt, Human
uccccaagccguggacugaucc

SEQ ID NO: 155571 - RNA, 21 nt, Human
uccccgcgggcagugccggcc

SEQ ID NO: 155572 - RNA, 19 nt, Human
ucuggugcagucccaggag

SEQ ID NO: 155573 - RNA, 24 nt, Human
ucuugcaugcaacaagacggagga

SEQ ID NO: 155574 - RNA, 19 nt, Human
ucuugcuuccccuccccca

SEQ ID NO: 155575 - RNA, 21 nt, Human
ugaauaucucgcacccagggc

SEQ ID NO: 155576 - RNA, 25 nt, Human
ugacccccaucccuucuugcuuccc

SEQ ID NO: 155577 - RNA, 20 nt, Human
ugccggccccgagcagcgcu

SEQ ID NO: 155578 - RNA, 19 nt, Human
uggaaaaugagccccggga

SEQ ID NO: 155579 - RNA, 20 nt, Human
uggaaaaugagccccgggaa

SEQ ID NO: 155580 - RNA, 25 nt, Human
uggaucugcacugggaagagagagc

SEQ ID NO: 155581 - RNA, 20 nt, Human
uggaugccuuuccccaagcc

SEQ ID NO: 155582 - RNA, 23 nt, Human
uuaacuuucuccccuucggucuu

SEQ ID NO: 155583 - RNA, 23 nt, Human
uucuugcuuccccucccccacuc

SEQ ID NO: 155584 - RNA, 22 nt, Human
uugucauucugcucaucuaagu

SEQ ID NO: 155585 - RNA, 20 nt, Human
uuuuuugucauucugcucau

SEQ ID NO: 155586 - RNA, 19 nt, Human
aaaaagccaaaccaaagag

SEQ ID NO: 155587 - RNA, 19 nt, Human
aaaagcaucucaaggagaa

SEQ ID NO: 155588 - RNA, 18 nt, Human
aaacagcaacucugagua

SEQ ID NO: 155589 - RNA, 23 nt, Human
aaagaacucauugauguaaauaa

SEQ ID NO: 155590 - RNA, 25 nt, Human
aaccaaagaggaauagcucauggaa

SEQ ID NO: 155591 - RNA, 19 nt, Human
aagaacagagguugcauag

SEQ ID NO: 155592 - RNA, 25 nt, Human
aagcaaacagauuccucuggagguu

SEQ ID NO: 155593 - RNA, 27 nt, Human
aagcaucucaaggagaaacagcaacuc

SEQ ID NO: 155594 - RNA, 18 nt, Human
aaguggguuaggugggug

SEQ ID NO: 155595 - RNA, 21 nt, Human
acaaagggagccucagcugga

SEQ ID NO: 155596 - RNA, 25 nt, Human
acacuccaaaagcaucucaaggaga

SEQ ID NO: 155597 - RNA, 23 nt, Human
accaaagaggaauagcucaugga

SEQ ID NO: 155598 - RNA, 20 nt, Human
accgcaagggaugccgcagg

SEQ ID NO: 155599 - RNA, 22 nt, Human
acuccaaaagcaucucaaggag

SEQ ID NO: 155600 - RNA, 26 nt, Human
acuccaaaagcaucucaaggagaaac

SEQ ID NO: 155601 - RNA, 24 nt, Human
acugaaaacaaagggagccucagc

SEQ ID NO: 155602 - RNA, 18 nt, Human
agccgccacugccagggc

SEQ ID NO: 155603 - RNA, 19 nt, Human
aggcgcgcucaggcuccgc

SEQ ID NO: 155604 - RNA, 21 nt, Human
aucaggaagcaaacagauucc

SEQ ID NO: 155605 - RNA, 23 nt, Human
caaacagauuccucuggagguuu

SEQ ID NO: 155606 - RNA, 29 nt, Human
caaaccaaagaggaauagcucauggaacc

SEQ ID NO: 155607 - RNA, 23 nt, Human
caaagucuuccacuuggcauuuu

SEQ ID NO: 155608 - RNA, 23 nt, Human
caaaucccaccaagauguuuggc

SEQ ID NO: 155609 - RNA, 21 nt, Human
caagaacagagguugcauagc

SEQ ID NO: 155610 - RNA, 21 nt, Human
caagggaugccgcaggccacc

SEQ ID NO: 155611 - RNA, 23 nt, Human
caagggaugccgcaggccaccac

SEQ ID NO: 155612 - RNA, 22 nt, Human
cacaguagaaaaaggaauaaaa

SEQ ID NO: 155613 - RNA, 18 nt, Human
cacugcgcaugcgggagc

SEQ ID NO: 155614 - RNA, 20 nt, Human
cagaggguaucagacauucc

SEQ ID NO: 155615 - RNA, 26 nt, Human
cagcagucuuccuguccgugaaguuu

SEQ ID NO: 155616 - RNA, 23 nt, Human
cagccucuuccucacacuccaaa

SEQ ID NO: 155617 - RNA, 24 nt, Human
caggccaaagacggaguuaaauau

SEQ ID NO: 155618 - RNA, 22 nt, Human
cauggaacugacaggauccuga

SEQ ID NO: 155619 - RNA, 25 nt, Human
ccaaaccaaagaggaauagcucaug

SEQ ID NO: 155620 - RNA, 21 nt, Human
ccaccggacccugaggcgcag

SEQ ID NO: 155621 - RNA, 24 nt, Human
ccagaaccucccuggcuaauguua

SEQ ID NO: 155622 - RNA, 19 nt, Human
ccccagaccucaaaugggc

SEQ ID NO: 155623 - RNA, 24 nt, Human
ccccugggaggaaucagaucccug

SEQ ID NO: 155624 - RNA, 22 nt, Human
cccuguggcucggccacggcug

SEQ ID NO: 155625 - RNA, 18 nt, Human
ccgcugcaguguuuuccc

SEQ ID NO: 155626 - RNA, 19 nt, Human
ccucccgcucggccccgag

SEQ ID NO: 155627 - RNA, 22 nt, Human
ccuccugcuggacaggaggagu

SEQ ID NO: 155628 - RNA, 26 nt, Human
ccucugucccagccucacauucagac

SEQ ID NO: 155629 - RNA, 21 nt, Human
ccuuccacccuuaaccuacua

SEQ ID NO: 155630 - RNA, 22 nt, Human
cgagcagcgagcgaggggccgg

SEQ ID NO: 155631 - RNA, 23 nt, Human
cgcaagggaugccgcaggccacc

SEQ ID NO: 155632 - RNA, 25 nt, Human
cucggccccgagcuuggucaccggc

SEQ ID NO: 155633 - RNA, 21 nt, Human
gaaaacaaagggagccucagc

SEQ ID NO: 155634 - RNA, 18 nt, Human
gaauagcucauggaacug

SEQ ID NO: 155635 - RNA, 18 nt, Human
gagaagaacccaucagag

SEQ ID NO: 155636 - RNA, 18 nt, Human
gagcagcgagcgaggggc

SEQ ID NO: 155637 - RNA, 18 nt, Human
gcaggacaucccccuggg

SEQ ID NO: 155638 - RNA, 20 nt, Human
gcuuuugcaccgaauucugg

SEQ ID NO: 155639 - RNA, 25 nt, Human
ggccuuguucucucccucuguccca

SEQ ID NO: 155640 - RNA, 18 nt, Human
ggcguguguucccagaca

SEQ ID NO: 155641 - RNA, 21 nt, Human
gugcugggaggccuuguucuc

SEQ ID NO: 155642 - RNA, 23 nt, Human
uaacacgcuucucuucuccagca

SEQ ID NO: 155643 - RNA, 26 nt, Human
uaacacgcuucucuucuccagcaguc

SEQ ID NO: 155644 - RNA, 24 nt, Human
uaacauuaaagacacucgucccac

SEQ ID NO: 155645 - RNA, 22 nt, Human
uaaccuacuacucugacaucag

SEQ ID NO: 155646 - RNA, 20 nt, Human
uagcagcauuuaacguuagc

SEQ ID NO: 155647 - RNA, 23 nt, Human
uagcucauggaacugacaggauc

SEQ ID NO: 155648 - RNA, 24 nt, Human
uauaccagcaacuguugcaaagca

SEQ ID NO: 155649 - RNA, 22 nt, Human
ucccaaggcauuuaucaaaucc

SEQ ID NO: 155650 - RNA, 21 nt, Human
uccccagaccucaaaugggcu

SEQ ID NO: 155651 - RNA, 18 nt, Human
uccccuugggaugggggg

SEQ ID NO: 155652 - RNA, 23 nt, Human
ucuuccacuuggcauuuucgaga

SEQ ID NO: 155653 - RNA, 18 nt, Human
ugaaagaacucauugaug

SEQ ID NO: 155654 - RNA, 24 nt, Human
ugacaauaccuuuaaaacauugac

SEQ ID NO: 155655 - RNA, 20 nt, Human
ugacacagacagccucuucc

SEQ ID NO: 155656 - RNA, 18 nt, Human
ugacucagcggcuggugc

SEQ ID NO: 155657 - RNA, 18 nt, Human
ugacuggaucuaaucagg

SEQ ID NO: 155658 - RNA, 22 nt, Human
ugauuuaaauauaccagcaacu

SEQ ID NO: 155659 - RNA, 18 nt, Human
ugccacaaagucuuccac

SEQ ID NO: 155660 - RNA, 22 nt, Human
ugccacaaagucuuccacuugg

SEQ ID NO: 155661 - RNA, 25 nt, Human
uggaacugaaaacaaagggagccuc

SEQ ID NO: 155662 - RNA, 22 nt, Human
uggcauccccuugggauggggg

SEQ ID NO: 155663 - RNA, 28 nt, Human
uggcucggccacggcugccccguacucg

SEQ ID NO: 155664 - RNA, 26 nt, Human
uguucucucccucugucccagccuca

SEQ ID NO: 155665 - RNA, 20 nt, Human
uguucuugagaaaguggguu

SEQ ID NO: 155666 - RNA, 21 nt, Human
uuccuguccgugaaguuuccu

SEQ ID NO: 155667 - RNA, 20 nt, Human
uuccuuggacuaucaggaau

SEQ ID NO: 155668 - RNA, 20 nt, Human
uucucugacaauaccuuuaa

SEQ ID NO: 155669 - RNA, 21 nt, Human
uugcauagcucgaggugcuug

SEQ ID NO: 155670 - RNA, 23 nt, Human
uugcauagcucgaggugcuugga

SEQ ID NO: 155671 - RNA, 21 nt, Human
uuuaaaacauugacuggaucu

SEQ ID NO: 155672 - RNA, 19 nt, Human
uuugggaccuucuuacgcu

SEQ ID NO: 155673 - RNA, 28 nt, Human
aaaaggacacgacacgacccgccccccg

SEQ ID NO: 155674 - RNA, 21 nt, Human
aagcaggaagagcagggccug

SEQ ID NO: 155675 - RNA, 21 nt, Human
aagcgcaaaggagaccgaacc

SEQ ID NO: 155676 - RNA, 19 nt, Human
aaggagaccgaacccauug

SEQ ID NO: 155677 - RNA, 19 nt, Human
acaggcuggagggagcugg

SEQ ID NO: 155678 - RNA, 20 nt, Human
acagugcagaggccagggcc

SEQ ID NO: 155679 - RNA, 21 nt, Human
accccggagaccuaguguccc

SEQ ID NO: 155680 - RNA, 21 nt, Human
agaagguaaggccacgccccc

SEQ ID NO: 155681 - RNA, 19 nt, Human
agacaaugcucugaaagac

SEQ ID NO: 155682 - RNA, 23 nt, Human
agaccgaacccauugggggcgga

SEQ ID NO: 155683 - RNA, 19 nt, Human
agaccuagugucccccccc

SEQ ID NO: 155684 - RNA, 20 nt, Human
agagauggggcuguucuuca

SEQ ID NO: 155685 - RNA, 23 nt, Human
agagcagggccuggggcgggaga

SEQ ID NO: 155686 - RNA, 22 nt, Human
agcaagcaggaagagcagggcc

SEQ ID NO: 155687 - RNA, 18 nt, Human
agcaggaagagcagggcc

SEQ ID NO: 155688 - RNA, 22 nt, Human
agccaggcaggaggaggccagg

SEQ ID NO: 155689 - RNA, 20 nt, Human
agccaguccuggggccugac

SEQ ID NO: 155690 - RNA, 21 nt, Human
agccccucuuccccgcagccc

SEQ ID NO: 155691 - RNA, 22 nt, Human
agcuugcuggccuggccccccu

SEQ ID NO: 155692 - RNA, 21 nt, Human
aggaagagcagggccuggggc

SEQ ID NO: 155693 - RNA, 21 nt, Human
aggacacgcgcuuuauuucgg

SEQ ID NO: 155694 - RNA, 19 nt, Human
aggcaggaggaggccaggu

SEQ ID NO: 155695 - RNA, 21 nt, Human
aggcaggaggaggccaggugg

SEQ ID NO: 155696 - RNA, 23 nt, Human
aggcggcuuggccagggacaggc

SEQ ID NO: 155697 - RNA, 18 nt, Human
aggcuccgcggcugaggg

SEQ ID NO: 155698 - RNA, 21 nt, Human
agggccgugucccccugcccu

SEQ ID NO: 155699 - RNA, 23 nt, Human
agucccugcucgcgcccagccca

SEQ ID NO: 155700 - RNA, 19 nt, Human
aucccgcuuuccucgcccc

SEQ ID NO: 155701 - RNA, 19 nt, Human
auggggcuguucuucagau

SEQ ID NO: 155702 - RNA, 19 nt, Human
caaccgggguccgacgugu

SEQ ID NO: 155703 - RNA, 23 nt, Human
caagccagccuuuucccucccag

SEQ ID NO: 155704 - RNA, 19 nt, Human
caagccccccaaacccuau

SEQ ID NO: 155705 - RNA, 19 nt, Human
cacaccugccuagccagag

SEQ ID NO: 155706 - RNA, 19 nt, Human
cacaucccggccgcccucu

SEQ ID NO: 155707 - RNA, 22 nt, Human
cacccuccacaucccggccgcc

SEQ ID NO: 155708 - RNA, 22 nt, Human
cacucccaucccuuuccagucg

SEQ ID NO: 155709 - RNA, 22 nt, Human
cagaaugcagggccgugucccc

SEQ ID NO: 155710 - RNA, 21 nt, Human
cagagcugggaccgaccugcu

SEQ ID NO: 155711 - RNA, 28 nt, Human
cagccgguguccccccgccuuggagggc

SEQ ID NO: 155712 - RNA, 19 nt, Human
cagcugccuugcaccauuu

SEQ ID NO: 155713 - RNA, 18 nt, Human
caggaggaggccaggugg

SEQ ID NO: 155714 - RNA, 19 nt, Human
caggaggcggcuuggccag

SEQ ID NO: 155715 - RNA, 18 nt, Human
caggcaggaggaggccag

SEQ ID NO: 155716 - RNA, 20 nt, Human
caggcaggaggaggccaggu

SEQ ID NO: 155717 - RNA, 21 nt, Human
cagggccguugugccaagccc

SEQ ID NO: 155718 - RNA, 19 nt, Human
cagucccuucuugcugagu

SEQ ID NO: 155719 - RNA, 25 nt, Human
ccaccuagaaacagucccuucuugc

SEQ ID NO: 155720 - RNA, 21 nt, Human
ccagcuugcuggccuggcccc

SEQ ID NO: 155721 - RNA, 18 nt, Human
ccaucccgcuuuccucgc

SEQ ID NO: 155722 - RNA, 20 nt, Human
cccacagucagggcuaggga

SEQ ID NO: 155723 - RNA, 20 nt, Human
cccagcagcugccuugcacc

SEQ ID NO: 155724 - RNA, 25 nt, Human
ccccaacuccauucucaccuauacc

SEQ ID NO: 155725 - RNA, 24 nt, Human
cccccaaacccuaugguaucacuc

SEQ ID NO: 155726 - RNA, 22 nt, Human
ccccccaacuccauucucaccu

SEQ ID NO: 155727 - RNA, 22 nt, Human
cccccccaacuccauucucacc

SEQ ID NO: 155728 - RNA, 21 nt, Human
ccccccccaacuccauucuca

SEQ ID NO: 155729 - RNA, 22 nt, Human
ccccccccaacuccauucucac

SEQ ID NO: 155730 - RNA, 24 nt, Human
ccccccugcucucaggacucugcc

SEQ ID NO: 155731 - RNA, 19 nt, Human
cccccugcccuccuggcug

SEQ ID NO: 155732 - RNA, 21 nt, Human
cccccugcccuccuggcugca

SEQ ID NO: 155733 - RNA, 22 nt, Human
ccccggagaccuaguguccccc

SEQ ID NO: 155734 - RNA, 18 nt, Human
ccccucuuccccgcagcc

SEQ ID NO: 155735 - RNA, 18 nt, Human
ccccugggagcugggcug

SEQ ID NO: 155736 - RNA, 21 nt, Human
ccccugggcacugcucuggcu

SEQ ID NO: 155737 - RNA, 21 nt, Human
cccgcagcccagcagcugccu

SEQ ID NO: 155738 - RNA, 18 nt, Human
cccgcuggcagacgcuuc

SEQ ID NO: 155739 - RNA, 21 nt, Human
cccugggagcugggcugagac

SEQ ID NO: 155740 - RNA, 26 nt, Human
ccgcucacccugucccgccgccgccc

SEQ ID NO: 155741 - RNA, 27 nt, Human
ccgcucacccugucccgccgccgcccu

SEQ ID NO: 155742 - RNA, 19 nt, Human
ccgugucccccugcccucc

SEQ ID NO: 155743 - RNA, 23 nt, Human
ccucccagcagggaccccugccc

SEQ ID NO: 155744 - RNA, 21 nt, Human
ccuccccuugccugagcagcc

SEQ ID NO: 155745 - RNA, 22 nt, Human
ccucguuuacccgcaccccucu

SEQ ID NO: 155746 - RNA, 19 nt, Human
ccugcccuccuggcugcac

SEQ ID NO: 155747 - RNA, 24 nt, Human
ccugggagcugggcugagaccuuu

SEQ ID NO: 155748 - RNA, 19 nt, Human
ccuggggcgggagaccaga

SEQ ID NO: 155749 - RNA, 25 nt, Human
ccuguggcuggagcuaaaauuagac

SEQ ID NO: 155750 - RNA, 21 nt, Human
ccuugccugagcagcccuggc

SEQ ID NO: 155751 - RNA, 22 nt, Human
ccuuggagggccaggagggcuc

SEQ ID NO: 155752 - RNA, 23 nt, Human
ccuuuggacaaccaagccagccu

SEQ ID NO: 155753 - RNA, 24 nt, Human
cgcgcccagcccaccuagaaacag

SEQ ID NO: 155754 - RNA, 27 nt, Human
cgcgcccagcccaccuagaaacagucc

SEQ ID NO: 155755 - RNA, 21 nt, Human
cgcuucugggcuguggccccu

SEQ ID NO: 155756 - RNA, 21 nt, Human
cgcuuuccucgccccacuccu

SEQ ID NO: 155757 - RNA, 18 nt, Human
cggagaccuagugucccc

SEQ ID NO: 155758 - RNA, 18 nt, Human
cgggacuaggaacccuag

SEQ ID NO: 155759 - RNA, 20 nt, Human
cuaggaacccuaggaauggg

SEQ ID NO: 155760 - RNA, 23 nt, Human
cucgggguccugauccccuaagg

SEQ ID NO: 155761 - RNA, 19 nt, Human
cucuggcugacgcaacccc

SEQ ID NO: 155762 - RNA, 21 nt, Human
cugccaggccauggggaccag

SEQ ID NO: 155763 - RNA, 22 nt, Human
cugcuaguccugugcugucauu

SEQ ID NO: 155764 - RNA, 20 nt, Human
cuggcagacgcuucugggcu

SEQ ID NO: 155765 - RNA, 22 nt, Human
cuguucuucagauuucucuucc

SEQ ID NO: 155766 - RNA, 22 nt, Human
cuuccccgcagcccagcagcug

SEQ ID NO: 155767 - RNA, 18 nt, Human
cuugaccuugcccucaac

SEQ ID NO: 155768 - RNA, 21 nt, Human
cuuugauggggucuccgcggg

SEQ ID NO: 155769 - RNA, 21 nt, Human
cuuuggacaaccaagccagcc

SEQ ID NO: 155770 - RNA, 22 nt, Human
gacaggcuggagggagcugggc

SEQ ID NO: 155771 - RNA, 24 nt, Human
gaccuaguguccccccccaacucc

SEQ ID NO: 155772 - RNA, 19 nt, Human
gagauggggcuguucuuca

SEQ ID NO: 155773 - RNA, 19 nt, Human
gagcaggagaagguaaggc

SEQ ID NO: 155774 - RNA, 19 nt, Human
gagcagggccuggggcggg

SEQ ID NO: 155775 - RNA, 21 nt, Human
gagcagggccuggggcgggag

SEQ ID NO: 155776 - RNA, 22 nt, Human
gagggagcugggcuggucuucc

SEQ ID NO: 155777 - RNA, 19 nt, Human
gcaggaggaggccaggugg

SEQ ID NO: 155778 - RNA, 20 nt, Human
gcccagcccaccuagaaaca

SEQ ID NO: 155779 - RNA, 23 nt, Human
gccgggcccccugggagcugggc

SEQ ID NO: 155780 - RNA, 27 nt, Human
gcgaaagcgcaaaggagaccgaaccca

SEQ ID NO: 155781 - RNA, 20 nt, Human
gcuccgcggcugagggcgag

SEQ ID NO: 155782 - RNA, 20 nt, Human
gcucgggguccugauccuua

SEQ ID NO: 155783 - RNA, 21 nt, Human
gcucucaggacucugccuucu

SEQ ID NO: 155784 - RNA, 19 nt, Human
gcucugaaagacgagcaga

SEQ ID NO: 155785 - RNA, 18 nt, Human
gcucuggcugacgcaacc

SEQ ID NO: 155786 - RNA, 22 nt, Human
gcuggucuucccacuccucccc

SEQ ID NO: 155787 - RNA, 18 nt, Human
gcuuuauuucggaaguga

SEQ ID NO: 155788 - RNA, 18 nt, Human
ggacaggccacuuguucc

SEQ ID NO: 155789 - RNA, 23 nt, Human
ggccauggggaccagucagagcu

SEQ ID NO: 155790 - RNA, 26 nt, Human
ggccuggccccccugcucucaggacu

SEQ ID NO: 155791 - RNA, 20 nt, Human
ggcgggagaccagagcuggg

SEQ ID NO: 155792 - RNA, 18 nt, Human
ggcuccgcggcugagggc

SEQ ID NO: 155793 - RNA, 20 nt, Human
gggcggagggggaggagggc

SEQ ID NO: 155794 - RNA, 21 nt, Human
gggcuguggccccuguggcug

SEQ ID NO: 155795 - RNA, 24 nt, Human
gggggaggagggccaggcaagucc

SEQ ID NO: 155796 - RNA, 18 nt, Human
guaguugccuucccggga

SEQ ID NO: 155797 - RNA, 23 nt, Human
gucagauagugagucaccagcca

SEQ ID NO: 155798 - RNA, 19 nt, Human
gucccuucuugcugaguuc

SEQ ID NO: 155799 - RNA, 19 nt, Human
uaccagcucgggacagucc

SEQ ID NO: 155800 - RNA, 18 nt, Human
uaggaauggguggcgggg

SEQ ID NO: 155801 - RNA, 20 nt, Human
uagugagucaccagccaggc

SEQ ID NO: 155802 - RNA, 18 nt, Human
uauaccagcucgggacag

SEQ ID NO: 155803 - RNA, 21 nt, Human
ucacagccugggugcagccgg

SEQ ID NO: 155804 - RNA, 19 nt, Human
ucagagcucccacaggagg

SEQ ID NO: 155805 - RNA, 19 nt, Human
uccgcggcugagggcgagc

SEQ ID NO: 155806 - RNA, 23 nt, Human
uccugugcugucauuguacagau

SEQ ID NO: 155807 - RNA, 20 nt, Human
ucucaggacucugccuucuc

SEQ ID NO: 155808 - RNA, 20 nt, Human
ugacaugauagguuuuaccg

SEQ ID NO: 155809 - RNA, 22 nt, Human
ugagaggagggcugucugccag

SEQ ID NO: 155810 - RNA, 21 nt, Human
ugagggcgagcaggagaaggu

SEQ ID NO: 155811 - RNA, 21 nt, Human
ugagggcgagcaggagaaggu

SEQ ID NO: 155812 - RNA, 21 nt, Human
ugcagccccucuuccccgcag

SEQ ID NO: 155813 - RNA, 21 nt, Human
ugcagccgguguccccccgcc

SEQ ID NO: 155814 - RNA, 20 nt, Human
ugcccuccuggcugcacccc

SEQ ID NO: 155815 - RNA, 20 nt, Human
ugcuggccuggccccccugc

SEQ ID NO: 155816 - RNA, 20 nt, Human
uggagaagcggagagcggcg

SEQ ID NO: 155817 - RNA, 18 nt, Human
uggcgggguggggcgggg

SEQ ID NO: 155818 - RNA, 21 nt, Human
uggcugccccugugcccgcug

SEQ ID NO: 155819 - RNA, 18 nt, Human
uggcuuggagcuaucaca

SEQ ID NO: 155820 - RNA, 20 nt, Human
ugggacccagcuugcuggcc

SEQ ID NO: 155821 - RNA, 18 nt, Human
ugggcccgcuggcugaca

SEQ ID NO: 155822 - RNA, 21 nt, Human
ugggcuggucuucccacuccu

SEQ ID NO: 155823 - RNA, 21 nt, Human
uggggcgggagaccagagcuc

SEQ ID NO: 155824 - RNA, 21 nt, Human
uggggcggggacaguucuguc

SEQ ID NO: 155825 - RNA, 24 nt, Human
uggggcggggacaguucugucucu

SEQ ID NO: 155826 - RNA, 21 nt, Human
uguucccaucccgcuuuccuc

SEQ ID NO: 155827 - RNA, 24 nt, Human
uucacccuccacaucccggccgcc

SEQ ID NO: 155828 - RNA, 22 nt, Human
uugccugagcagcccuggcugc

SEQ ID NO: 155829 - RNA, 23 nt, Human
uugggggcggagggggaggaggg

SEQ ID NO: 155830 - RNA, 21 nt, Human
uuggguaguugccuucccggg

SEQ ID NO: 155831 - RNA, 23 nt, Human
uuuuuuuuuuugcaaggacacgc

SEQ ID NO: 155832 - RNA, 21 nt, Human
uuuuuuuuuuuuuugcaagga

SEQ ID NO: 155833 - RNA, 18 nt, Human
uuuuuuuuuuuuuuuuug

SEQ ID NO: 155834 - RNA, 20 nt, Human
aaacaauaaaaucacugacc

SEQ ID NO: 155835 - RNA, 21 nt, Human
aaacagaggccuaguuaagaa

SEQ ID NO: 155836 - RNA, 23 nt, Human
aaaugccaggagucaaagaaacu

SEQ ID NO: 155837 - RNA, 26 nt, Human
aaaugccucucuugaguuucugaucc

SEQ ID NO: 155838 - RNA, 24 nt, Human
aaccagugcucuaccaauaaagau

SEQ ID NO: 155839 - RNA, 20 nt, Human
aaggcaaaugccaggaguca

SEQ ID NO: 155840 - RNA, 20 nt, Human
aauaagagggaaaggaggag

SEQ ID NO: 155841 - RNA, 20 nt, Human
aauguacauucucaagguca

SEQ ID NO: 155842 - RNA, 20 nt, Human
acaaauaucaagcaaacaac

SEQ ID NO: 155843 - RNA, 20 nt, Human
acaaggaaagcacuggcagc

SEQ ID NO: 155844 - RNA, 19 nt, Human
acauauacucuuuaaugua

SEQ ID NO: 155845 - RNA, 24 nt, Human
accucauuauuggaacauuagcca

SEQ ID NO: 155846 - RNA, 20 nt, Human
acuacccgaaucuaguaaca

SEQ ID NO: 155847 - RNA, 18 nt, Human
acugucccagucacaaaa

SEQ ID NO: 155848 - RNA, 21 nt, Human
agaagcacugcacuuuuuuuu

SEQ ID NO: 155849 - RNA, 20 nt, Human
agacacauauacucuuuaau

SEQ ID NO: 155850 - RNA, 22 nt, Human
agaggagaaggaggaauaagag

SEQ ID NO: 155851 - RNA, 18 nt, Human
agcaguuuucagguuugu

SEQ ID NO: 155852 - RNA, 21 nt, Human
agcuacucaaaugccaagcag

SEQ ID NO: 155853 - RNA, 19 nt, Human
aguugguaaacagaggccu

SEQ ID NO: 155854 - RNA, 18 nt, Human
auggcaaaaguuucuuuu

SEQ ID NO: 155855 - RNA, 19 nt, Human
caaaugccaggagucaaag

SEQ ID NO: 155856 - RNA, 22 nt, Human
caaccuggaaaaagugccgccc

SEQ ID NO: 155857 - RNA, 18 nt, Human
caaguguuuggcuuugua

SEQ ID NO: 155858 - RNA, 21 nt, Human
caaguguuuggcuuuguaaua

SEQ ID NO: 155859 - RNA, 24 nt, Human
cauaagaggcaaaaaaguacuacc

SEQ ID NO: 155860 - RNA, 20 nt, Human
ccuagaagcacugcacuuuu

SEQ ID NO: 155861 - RNA, 22 nt, Human
cuacuaaaauuaacugucccag

SEQ ID NO: 155862 - RNA, 19 nt, Human
cuggaagagcugguuggca

SEQ ID NO: 155863 - RNA, 20 nt, Human
cuggacugaguucguccugg

SEQ ID NO: 155864 - RNA, 20 nt, Human
cugguuggcagggccacaag

SEQ ID NO: 155865 - RNA, 23 nt, Human
cuuaacaaaaauaaaagcaugga

SEQ ID NO: 155866 - RNA, 19 nt, Human
gaaaggaggagaaagagaa

SEQ ID NO: 155867 - RNA, 21 nt, Human
gaaaugccucucuugaguuuc

SEQ ID NO: 155868 - RNA, 19 nt, Human
gaaugcaaguguuuggcuu

SEQ ID NO: 155869 - RNA, 18 nt, Human
gaggaauaagagggaaag

SEQ ID NO: 155870 - RNA, 23 nt, Human
gauguaaacaauaaaaucacuga

SEQ ID NO: 155871 - RNA, 22 nt, Human
gcaucuauccuucuccauuagc

SEQ ID NO: 155872 - RNA, 20 nt, Human
gcauggagaagcuacucaaa

SEQ ID NO: 155873 - RNA, 21 nt, Human
ggaaaaagugccgcccgcaaa

SEQ ID NO: 155874 - RNA, 20 nt, Human
ggaaagcacuggcagcugca

SEQ ID NO: 155875 - RNA, 21 nt, Human
guaaacaauaaaaucacugac

SEQ ID NO: 155876 - RNA, 21 nt, Human
guaaauguucacaaauaucaa

SEQ ID NO: 155877 - RNA, 26 nt, Human
guagaacagucucaggauguaaacaa

SEQ ID NO: 155878 - RNA, 25 nt, Human
gucucguuugcucauuuuuguuuuu

SEQ ID NO: 155879 - RNA, 23 nt, Human
uaaaaaaauacauagcauggaga

SEQ ID NO: 155880 - RNA, 18 nt, Human
uaaauguucacaaauauc

SEQ ID NO: 155881 - RNA, 21 nt, Human
uaacaaaaauaaaagcaugga

SEQ ID NO: 155882 - RNA, 25 nt, Human
uaacaaaaauaaaagcauggauggu

SEQ ID NO: 155883 - RNA, 24 nt, Human
uaacugacauuaucgauuuuuagu

SEQ ID NO: 155884 - RNA, 20 nt, Human
uaagaagaccuaacuggaua

SEQ ID NO: 155885 - RNA, 24 nt, Human
uaagacacauauacucuuuaaugu

SEQ ID NO: 155886 - RNA, 19 nt, Human
uaagaccaacuucuuggcu

SEQ ID NO: 155887 - RNA, 21 nt, Human
uaaggcaaaugccaggaguca

SEQ ID NO: 155888 - RNA, 21 nt, Human
uaccacaggcuuugcuaaaga

SEQ ID NO: 155889 - RNA, 19 nt, Human
uacccgaaucuaguaacac

SEQ ID NO: 155890 - RNA, 23 nt, Human
uagauugcaguagggccagccga

SEQ ID NO: 155891 - RNA, 20 nt, Human
uagcgugcaucuauccuucu

SEQ ID NO: 155892 - RNA, 24 nt, Human
uagcuucaguaauugacagaagca

SEQ ID NO: 155893 - RNA, 19 nt, Human
ucaguaauugacagaagca

SEQ ID NO: 155894 - RNA, 25 nt, Human
ucagugacaaaaugcacuacccgaa

SEQ ID NO: 155895 - RNA, 21 nt, Human
uccuuauagcuucaguaauug

SEQ ID NO: 155896 - RNA, 27 nt, Human
ucguuugcucauuuuuguuuuuuuuuc

SEQ ID NO: 155897 - RNA, 19 nt, Human
ucuaaaccaaguagcgugc

SEQ ID NO: 155898 - RNA, 27 nt, Human
ucucuugaguuucugauccuagaaaca

SEQ ID NO: 155899 - RNA, 22 nt, Human
ucuucagcuacuaaaauuaacu

SEQ ID NO: 155900 - RNA, 23 nt, Human
ugaccaaggaguuauaucccugg

SEQ ID NO: 155901 - RNA, 18 nt, Human
ugagacuauucucuucuu

SEQ ID NO: 155902 - RNA, 26 nt, Human
ugaguuucugauccuagaaacagcuu

SEQ ID NO: 155903 - RNA, 20 nt, Human
ugccaagcaguuuucagguu

SEQ ID NO: 155904 - RNA, 18 nt, Human
uggaguagauaaaauuca

SEQ ID NO: 155905 - RNA, 22 nt, Human
uggcguguaagaaauacagggu

SEQ ID NO: 155906 - RNA, 18 nt, Human
uggcuuuaccccauacca

SEQ ID NO: 155907 - RNA, 19 nt, Human
ugguuggcagggccacaag

SEQ ID NO: 155908 - RNA, 20 nt, Human
ugguuggcagggccacaagg

SEQ ID NO: 155909 - RNA, 19 nt, Human
uguaguugaaauuucauca

SEQ ID NO: 155910 - RNA, 19 nt, Human
uuaacaaccuggaaaaagu

SEQ ID NO: 155911 - RNA, 22 nt, Human
uuacaucaaaaccaugcuggac

SEQ ID NO: 155912 - RNA, 23 nt, Human
uucugauccuagaaacagcuugc

SEQ ID NO: 155913 - RNA, 22 nt, Human
uugcucauuuuuguuuuuuuuu

SEQ ID NO: 155914 - RNA, 19 nt, Human
uuuaguaagauucuuaguu

SEQ ID NO: 155915 - RNA, 21 nt, Human
uuuagugaaaaagcagagaaa

SEQ ID NO: 155916 - RNA, 21 nt, Human
uuuuccucuucauaugugacu

SEQ ID NO: 155917 - RNA, 23 nt, Human
aaaacucacacucccccagccaa

SEQ ID NO: 155918 - RNA, 24 nt, Human
aaaaugaacauuucauuuuccuca

SEQ ID NO: 155919 - RNA, 23 nt, Human
aaacacccuggaaucagacagac

SEQ ID NO: 155920 - RNA, 20 nt, Human
aaacgauaaaaggugccaca

SEQ ID NO: 155921 - RNA, 22 nt, Human
aaacucacacucccccagccaa

SEQ ID NO: 155922 - RNA, 24 nt, Human
aaagagcccagcuucaaaacagua

SEQ ID NO: 155923 - RNA, 22 nt, Human
aaagaucccauccuuccggaca

SEQ ID NO: 155924 - RNA, 23 nt, Human
aaaugaacauuucauuuuccuca

SEQ ID NO: 155925 - RNA, 19 nt, Human
aaaugccacucacacccuc

SEQ ID NO: 155926 - RNA, 27 nt, Human
aagcagggaguggaaagugggggaccc

SEQ ID NO: 155927 - RNA, 22 nt, Human
aagccagugacacaaggccagg

SEQ ID NO: 155928 - RNA, 20 nt, Human
aaggagccugcgcggucccg

SEQ ID NO: 155929 - RNA, 25 nt, Human
aaggugccacauucuugcugagaug

SEQ ID NO: 155930 - RNA, 20 nt, Human
aaucacagccucccauuguu

SEQ ID NO: 155931 - RNA, 22 nt, Human
acaaaagagcccagcuucaaaa

SEQ ID NO: 155932 - RNA, 23 nt, Human
acaaggcaccaaauaaaaugaac

SEQ ID NO: 155933 - RNA, 21 nt, Human
acaggcaggucagaggagaac

SEQ ID NO: 155934 - RNA, 20 nt, Human
acaguggccugcagagcccu

SEQ ID NO: 155935 - RNA, 18 nt, Human
accaaggaauuaucccaa

SEQ ID NO: 155936 - RNA, 23 nt, Human
accacacagacggccccagcuca

SEQ ID NO: 155937 - RNA, 23 nt, Human
accacacagacggccccggcuca

SEQ ID NO: 155938 - RNA, 23 nt, Human
accagcagaugugcccaaggucc

SEQ ID NO: 155939 - RNA, 25 nt, Human
acccaaaaaauuagcuuauuucagu

SEQ ID NO: 155940 - RNA, 18 nt, Human
acccggggucuguggcgc

SEQ ID NO: 155941 - RNA, 18 nt, Human
acucuuuggcuccccgag

SEQ ID NO: 155942 - RNA, 20 nt, Human
agagccugucugcaguccuu

SEQ ID NO: 155943 - RNA, 21 nt, Human
agagccugucugcaguccuuc

SEQ ID NO: 155944 - RNA, 22 nt, Human
agaggcccuggcuccaccacac

SEQ ID NO: 155945 - RNA, 24 nt, Human
agaguuagugugcuccccagacaa

SEQ ID NO: 155946 - RNA, 24 nt, Human
agccagcgcucacaguggccugca

SEQ ID NO: 155947 - RNA, 19 nt, Human
aggagcuccccacucuguc

SEQ ID NO: 155948 - RNA, 21 nt, Human
aggccaggacccaucuccgcc

SEQ ID NO: 155949 - RNA, 19 nt, Human
agggaacagaauccuaagc

SEQ ID NO: 155950 - RNA, 20 nt, Human
agggagccagcgcucacagu

SEQ ID NO: 155951 - RNA, 21 nt, Human
aggggugggguggauggacgu

SEQ ID NO: 155952 - RNA, 24 nt, Human
agggucaggcgcucccagggauuc

SEQ ID NO: 155953 - RNA, 22 nt, Human
aggguucaagaaacacgucaug

SEQ ID NO: 155954 - RNA, 23 nt, Human
aggugggugggagcuacacaaaa

SEQ ID NO: 155955 - RNA, 18 nt, Human
agguuccccuacugccac

SEQ ID NO: 155956 - RNA, 20 nt, Human
augaaacccaggaaaaacac

SEQ ID NO: 155957 - RNA, 21 nt, Human
augaccaggacaaaccugagc

SEQ ID NO: 155958 - RNA, 22 nt, Human
augaugccuuugccaacaauca

SEQ ID NO: 155959 - RNA, 23 nt, Human
caaaacgaucucuguuucacuga

SEQ ID NO: 155960 - RNA, 23 nt, Human
caaagaacauguccuuaaucuuu

SEQ ID NO: 155961 - RNA, 18 nt, Human
caaaugccauagcucuug

SEQ ID NO: 155962 - RNA, 18 nt, Human
caaggaauuaucccaagg

SEQ ID NO: 155963 - RNA, 19 nt, Human
caaggaauuaucccaaggc

SEQ ID NO: 155964 - RNA, 21 nt, Human
cacaauauagcgccacacacc

SEQ ID NO: 155965 - RNA, 19 nt, Human
cacacccuccuagguuccc

SEQ ID NO: 155966 - RNA, 18 nt, Human
cacacucccccagccaaa

SEQ ID NO: 155967 - RNA, 22 nt, Human
cacccuccuagguuccccuacu

SEQ ID NO: 155968 - RNA, 23 nt, Human
cacccuggaaucagacagacuuu

SEQ ID NO: 155969 - RNA, 19 nt, Human
caccggcaccacagcccuc

SEQ ID NO: 155970 - RNA, 18 nt, Human
cacgaaccagcuguccug

SEQ ID NO: 155971 - RNA, 18 nt, Human
cacuucagaaacgccuga

SEQ ID NO: 155972 - RNA, 24 nt, Human
cagaaacgccugaggcccacagca

SEQ ID NO: 155973 - RNA, 29 nt, Human
cagcagcaggaagcugaacagcccaccag

SEQ ID NO: 155974 - RNA, 27 nt, Human
cagccaagcugacauuagggguccaaa

SEQ ID NO: 155975 - RNA, 21 nt, Human
cagcccaaaccggagcagcaa

SEQ ID NO: 155976 - RNA, 27 nt, Human
cagcccaccagggucaggcgcucccag

SEQ ID NO: 155977 - RNA, 22 nt, Human
cagcccucccugcggcauguuu

SEQ ID NO: 155978 - RNA, 22 nt, Human
caggaagcugaacagcccacca

SEQ ID NO: 155979 - RNA, 24 nt, Human
caggaccccagcuggugagcccug

SEQ ID NO: 155980 - RNA, 22 nt, Human
cauaaccacacugccucagcag

SEQ ID NO: 155981 - RNA, 25 nt, Human
cauucggggcccgacaaccuggcuc

SEQ ID NO: 155982 - RNA, 20 nt, Human
ccaaaccggagcagcaagcc

SEQ ID NO: 155983 - RNA, 18 nt, Human
ccaaggucuagggaagac

SEQ ID NO: 155984 - RNA, 21 nt, Human
ccacagacagccaaggagacc

SEQ ID NO: 155985 - RNA, 21 nt, Human
ccaccacacagacggccccag

SEQ ID NO: 155986 - RNA, 21 nt, Human
ccaccacacagacggccccgg

SEQ ID NO: 155987 - RNA, 18 nt, Human
ccacuucagaccacagca

SEQ ID NO: 155988 - RNA, 20 nt, Human
ccacuuccagaaaguagggu

SEQ ID NO: 155989 - RNA, 18 nt, Human
ccaggcccaguguggcug

SEQ ID NO: 155990 - RNA, 23 nt, Human
cccacaaacuaggagcuccccac

SEQ ID NO: 155991 - RNA, 24 nt, Human
cccacaaacuaggagcuccccacu

SEQ ID NO: 155992 - RNA, 24 nt, Human
cccagaucacgucgggucacucgc

SEQ ID NO: 155993 - RNA, 20 nt, Human
cccaggaaaaacacccugga

SEQ ID NO: 155994 - RNA, 23 nt, Human
cccagggaacagaauccuaagca

SEQ ID NO: 155995 - RNA, 22 nt, Human
ccccacaaacuaggagcucccc

SEQ ID NO: 155996 - RNA, 23 nt, Human
ccccacaaacuaggagcucccca

SEQ ID NO: 155997 - RNA, 19 nt, Human
ccccagcucacugaguccc

SEQ ID NO: 155998 - RNA, 21 nt, Human
ccccagcucacugagucccgc

SEQ ID NO: 155999 - RNA, 21 nt, Human
cccccacaaacuaggagcucc

SEQ ID NO: 156000 - RNA, 25 nt, Human
ccccccacaaacuaggagcucccca

SEQ ID NO: 156001 - RNA, 23 nt, Human
ccccccagaucacgucgggucac

SEQ ID NO: 156002 - RNA, 19 nt, Human
ccccggggacuccgcccag

SEQ ID NO: 156003 - RNA, 20 nt, Human
ccccggggacuccgcccagg

SEQ ID NO: 156004 - RNA, 19 nt, Human
cccgccgccgccgccgccg

SEQ ID NO: 156005 - RNA, 25 nt, Human
cccgccgccgccgccgccgccgccu

SEQ ID NO: 156006 - RNA, 18 nt, Human
cccggccagccggguggg

SEQ ID NO: 156007 - RNA, 24 nt, Human
cccucugcucauccucuuccccag

SEQ ID NO: 156008 - RNA, 21 nt, Human
cccuggccugaggcacagucc

SEQ ID NO: 156009 - RNA, 19 nt, Human
cccuggcuccaccacacag

SEQ ID NO: 156010 - RNA, 21 nt, Human
cccuuagaaaggcaaaacuca

SEQ ID NO: 156011 - RNA, 18 nt, Human
ccgcccagggcuccaggc

SEQ ID NO: 156012 - RNA, 23 nt, Human
ccgccgccgccgccgccgccgcc

SEQ ID NO: 156013 - RNA, 24 nt, Human
ccgccgccgccgccgccgccgccu

SEQ ID NO: 156014 - RNA, 22 nt, Human
ccgccgccgccgccgccgccgg

SEQ ID NO: 156015 - RNA, 22 nt, Human
ccggccacccagagaacgaggc

SEQ ID NO: 156016 - RNA, 20 nt, Human
ccuacagccaagcugacauu

SEQ ID NO: 156017 - RNA, 24 nt, Human
ccuacugccaccgugacccaaaaa

SEQ ID NO: 156018 - RNA, 20 nt, Human
ccucaaaaaucgcuggcccc

SEQ ID NO: 156019 - RNA, 25 nt, Human
ccugaccagugacacuguggccacc

SEQ ID NO: 156020 - RNA, 19 nt, Human
ccugcaaaccacuucagac

SEQ ID NO: 156021 - RNA, 20 nt, Human
ccugcgagccaggacaaggu

SEQ ID NO: 156022 - RNA, 19 nt, Human
ccuggcuccaccacacaga

SEQ ID NO: 156023 - RNA, 20 nt, Human
ccuuccagcagaggcucugg

SEQ ID NO: 156024 - RNA, 21 nt, Human
ccuuccggacaggaccccagc

SEQ ID NO: 156025 - RNA, 19 nt, Human
ccuugcuguaaaacuuccc

SEQ ID NO: 156026 - RNA, 18 nt, Human
cgagccaggacaaggugg

SEQ ID NO: 156027 - RNA, 22 nt, Human
cgagccaggacaagguggccag

SEQ ID NO: 156028 - RNA, 23 nt, Human
cgccagaauacagaacaaaggag

SEQ ID NO: 156029 - RNA, 19 nt, Human
cgccgccgccgccgccgcc

SEQ ID NO: 156030 - RNA, 18 nt, Human
cgguuuccuuccacuccu

SEQ ID NO: 156031 - RNA, 21 nt, Human
cucacaguggccugcagagcc

SEQ ID NO: 156032 - RNA, 21 nt, Human
cuccaccacacagacggcccc

SEQ ID NO: 156033 - RNA, 21 nt, Human
cucugcucauccucuucccca

SEQ ID NO: 156034 - RNA, 24 nt, Human
cugaugaugaaacccaggaaaaac

SEQ ID NO: 156035 - RNA, 21 nt, Human
cugcaaaccacuucagaccac

SEQ ID NO: 156036 - RNA, 23 nt, Human
cugcaaaccacuucagaccacag

SEQ ID NO: 156037 - RNA, 21 nt, Human
cugcagccugccccccagauc

SEQ ID NO: 156038 - RNA, 19 nt, Human
cugcaguccuucaagccag

SEQ ID NO: 156039 - RNA, 20 nt, Human
cugcugccccuuccagcaga

SEQ ID NO: 156040 - RNA, 22 nt, Human
cugcugccccuuccagcagagg

SEQ ID NO: 156041 - RNA, 19 nt, Human
cuggccccagcagcaggaa

SEQ ID NO: 156042 - RNA, 18 nt, Human
cuuagauccaccagugag

SEQ ID NO: 156043 - RNA, 22 nt, Human
cuuucagggucaaggagggcug

SEQ ID NO: 156044 - RNA, 23 nt, Human
cuuugcuuccucauucucucuca

SEQ ID NO: 156045 - RNA, 21 nt, Human
gaacauaaccacacugccuca

SEQ ID NO: 156046 - RNA, 18 nt, Human
gaagcaccggcaccacag

SEQ ID NO: 156047 - RNA, 22 nt, Human
gacaaaugccacucacacccuc

SEQ ID NO: 156048 - RNA, 18 nt, Human
gaccagugacacuguggc

SEQ ID NO: 156049 - RNA, 21 nt, Human
gacccggggucuguggcgccg

SEQ ID NO: 156050 - RNA, 21 nt, Human
gagcacuucagaaacgccuga

SEQ ID NO: 156051 - RNA, 25 nt, Human
gaggcgcuccugcacccugcgagcc

SEQ ID NO: 156052 - RNA, 19 nt, Human
gaguccucugcagccugcc

SEQ ID NO: 156053 - RNA, 21 nt, Human
gauagaaagagccaucuggga

SEQ ID NO: 156054 - RNA, 21 nt, Human
gaugaugaaacccaggaaaaa

SEQ ID NO: 156055 - RNA, 24 nt, Human
gcaggcgccuugcuguaaaacuuc

SEQ ID NO: 156056 - RNA, 29 nt, Human
gccagaauacagaacaaaggagccugguc

SEQ ID NO: 156057 - RNA, 19 nt, Human
gccaggacaagguggccag

SEQ ID NO: 156058 - RNA, 21 nt, Human
gccaggacccaucuccgccag

SEQ ID NO: 156059 - RNA, 24 nt, Human
gccauaaccauggguugccggcgc

SEQ ID NO: 156060 - RNA, 26 nt, Human
gcgcagcucccagaaagagggaacgc

SEQ ID NO: 156061 - RNA, 21 nt, Human
gcgcagcucccagaaagaucc

SEQ ID NO: 156062 - RNA, 19 nt, Human
gcucugggccacccaccag

SEQ ID NO: 156063 - RNA, 19 nt, Human
gcugaggagggcgugcccc

SEQ ID NO: 156064 - RNA, 22 nt, Human
ggagaggaggcugaccugcaaa

SEQ ID NO: 156065 - RNA, 19 nt, Human
ggagaugaucuuuaaggaa

SEQ ID NO: 156066 - RNA, 21 nt, Human
ggagcacugcccagggagccc

SEQ ID NO: 156067 - RNA, 24 nt, Human
ggagccaucuuccucccucugcuc

SEQ ID NO: 156068 - RNA, 18 nt, Human
gggguugggggcggggaa

SEQ ID NO: 156069 - RNA, 19 nt, Human
gguaaggaagagaccuugu

SEQ ID NO: 156070 - RNA, 18 nt, Human
ggucccaccacacagacg

SEQ ID NO: 156071 - RNA, 18 nt, Human
uaaaaaccacgaaccagc

SEQ ID NO: 156072 - RNA, 18 nt, Human
uaaagggggucccaccac

SEQ ID NO: 156073 - RNA, 25 nt, Human
uaaauccucaaaaaucgcuggcccc

SEQ ID NO: 156074 - RNA, 19 nt, Human
uaacacaggauggggcucc

SEQ ID NO: 156075 - RNA, 21 nt, Human
uaagccagugacacaaggcca

SEQ ID NO: 156076 - RNA, 23 nt, Human
uagcacauaccaaaccucgggga

SEQ ID NO: 156077 - RNA, 23 nt, Human
uagcccuacaggugggugggagc

SEQ ID NO: 156078 - RNA, 21 nt, Human
uagcgccacacaccacacucu

SEQ ID NO: 156079 - RNA, 22 nt, Human
uagguuagaacagaaauaaaug

SEQ ID NO: 156080 - RNA, 19 nt, Human
uauauacacacacauauau

SEQ ID NO: 156081 - RNA, 23 nt, Human
ucaagaaacacgucaugggcuaa

SEQ ID NO: 156082 - RNA, 20 nt, Human
ucacagccucccauuguucu

SEQ ID NO: 156083 - RNA, 21 nt, Human
ucacugacacguuuccagaag

SEQ ID NO: 156084 - RNA, 24 nt, Human
ucagcacacgacuucuugaaagag

SEQ ID NO: 156085 - RNA, 21 nt, Human
ucagguagagggcaacuagaa

SEQ ID NO: 156086 - RNA, 21 nt, Human
uccaaaaaccacagauaacac

SEQ ID NO: 156087 - RNA, 18 nt, Human
uccacuccuccugcugcc

SEQ ID NO: 156088 - RNA, 23 nt, Human
uccagcagauuuuaaguucuggc

SEQ ID NO: 156089 - RNA, 21 nt, Human
ucccagggauucacugggaag

SEQ ID NO: 156090 - RNA, 21 nt, Human
uccccagaccgugcgcugccc

SEQ ID NO: 156091 - RNA, 21 nt, Human
uccccuacugccaccgugacc

SEQ ID NO: 156092 - RNA, 21 nt, Human
uccucaaaaaucgcuggcccc

SEQ ID NO: 156093 - RNA, 22 nt, Human
uccuuguuggaagcaccggcac

SEQ ID NO: 156094 - RNA, 21 nt, Human
ucugacccuauuccagcagau

SEQ ID NO: 156095 - RNA, 18 nt, Human
ucugcagagucgccacag

SEQ ID NO: 156096 - RNA, 19 nt, Human
ucugggccacccaccagca

SEQ ID NO: 156097 - RNA, 18 nt, Human
ugaaagagugaaccucca

SEQ ID NO: 156098 - RNA, 19 nt, Human
ugaaagagugaaccuccag

SEQ ID NO: 156099 - RNA, 21 nt, Human
ugaauguaaaaaccacgaacc

SEQ ID NO: 156100 - RNA, 23 nt, Human
ugacaaaugccacucacacccuc

SEQ ID NO: 156101 - RNA, 19 nt, Human
ugaccaggacaaaccugag

SEQ ID NO: 156102 - RNA, 18 nt, Human
ugaguuacagguugcuga

SEQ ID NO: 156103 - RNA, 26 nt, Human
ugaugaugaaacccaggaaaaacacc

SEQ ID NO: 156104 - RNA, 21 nt, Human
ugcaguccuucaagccagugu

SEQ ID NO: 156105 - RNA, 21 nt, Human
ugccaauggggagaguucccu

SEQ ID NO: 156106 - RNA, 23 nt, Human
ugccccuuccagcagaggcucug

SEQ ID NO: 156107 - RNA, 20 nt, Human
ugccuaggaaccuugggagc

SEQ ID NO: 156108 - RNA, 18 nt, Human
ugcugggaacauaaccac

SEQ ID NO: 156109 - RNA, 21 nt, Human
ugcugggguugggggcgggga

SEQ ID NO: 156110 - RNA, 22 nt, Human
uggaagcaccggcaccacagcc

SEQ ID NO: 156111 - RNA, 22 nt, Human
uggccaggggcggcccacagac

SEQ ID NO: 156112 - RNA, 23 nt, Human
uggccaggggcggcccacagaca

SEQ ID NO: 156113 - RNA, 19 nt, Human
uggcggcggccggguccgg

SEQ ID NO: 156114 - RNA, 22 nt, Human
uggcugacuucaagauaaaggc

SEQ ID NO: 156115 - RNA, 21 nt, Human
ugggaguggcgucuucagccc

SEQ ID NO: 156116 - RNA, 24 nt, Human
ugggaguggcgucuucagccccua

SEQ ID NO: 156117 - RNA, 22 nt, Human
uggugagcccuggccugaggca

SEQ ID NO: 156118 - RNA, 24 nt, Human
uguaaaacuucccggccagccggg

SEQ ID NO: 156119 - RNA, 25 nt, Human
uguaaaacuucccggccagccgggu

SEQ ID NO: 156120 - RNA, 20 nt, Human
ugugcauguauuuauauaca

SEQ ID NO: 156121 - RNA, 26 nt, Human
uucaaaacaguacuugaagaggaccc

SEQ ID NO: 156122 - RNA, 19 nt, Human
uuccacuccuccugcugcc

SEQ ID NO: 156123 - RNA, 18 nt, Human
uuccccccacaaacuagg

SEQ ID NO: 156124 - RNA, 23 nt, Human
aaacagcagaaucucaucccucg

SEQ ID NO: 156125 - RNA, 21 nt, Human
aaacucagauaaggcacggca

SEQ ID NO: 156126 - RNA, 22 nt, Human
aacacacaacuucagaaaagaa

SEQ ID NO: 156127 - RNA, 20 nt, Human
aaggcccucagaagaacuga

SEQ ID NO: 156128 - RNA, 20 nt, Human
aaguucuggaggccggcgcu

SEQ ID NO: 156129 - RNA, 20 nt, Human
acaaaauccuuacugacacu

SEQ ID NO: 156130 - RNA, 28 nt, Human
acacaacuucagaaaagaagggaacgcc

SEQ ID NO: 156131 - RNA, 22 nt, Human
acaguacuagagucaacagccg

SEQ ID NO: 156132 - RNA, 20 nt, Human
acaugauugucucagugaug

SEQ ID NO: 156133 - RNA, 20 nt, Human
accacagcuauucucuuguc

SEQ ID NO: 156134 - RNA, 19 nt, Human
acuaucaucuauauucuuu

SEQ ID NO: 156135 - RNA, 22 nt, Human
acucuuauggucugacaaaggu

SEQ ID NO: 156136 - RNA, 19 nt, Human
acugcuguguuauuucauc

SEQ ID NO: 156137 - RNA, 24 nt, Human
agaaaaaacuaauucaauugugaa

SEQ ID NO: 156138 - RNA, 24 nt, Human
agaaaauacgcacauagggaguaa

SEQ ID NO: 156139 - RNA, 18 nt, Human
agaaacccgccacagugg

SEQ ID NO: 156140 - RNA, 24 nt, Human
agacaccaaaaaguaaaccuucuu

SEQ ID NO: 156141 - RNA, 18 nt, Human
agagcucauuuuguuuca

SEQ ID NO: 156142 - RNA, 19 nt, Human
agcucggcgcagggggcag

SEQ ID NO: 156143 - RNA, 21 nt, Human
aguguggaaaugaaaaaguga

SEQ ID NO: 156144 - RNA, 23 nt, Human
aguguggaaaugaaaaagugagg

SEQ ID NO: 156145 - RNA, 18 nt, Human
aucugaacuggcuugaga

SEQ ID NO: 156146 - RNA, 20 nt, Human
augagacaccaaaaaguaaa

SEQ ID NO: 156147 - RNA, 21 nt, Human
caaaaaguaaaccuucuuuac

SEQ ID NO: 156148 - RNA, 19 nt, Human
caacuugaggaaacagcaa

SEQ ID NO: 156149 - RNA, 22 nt, Human
caaugugcuaaaauucaaagua

SEQ ID NO: 156150 - RNA, 18 nt, Human
cacaaaauuaaugaagaa

SEQ ID NO: 156151 - RNA, 23 nt, Human
cacaacgguggacacagcauacc

SEQ ID NO: 156152 - RNA, 25 nt, Human
cacggcacaugaauuugugcacgug

SEQ ID NO: 156153 - RNA, 22 nt, Human
cacuauccaggcauugcuaccu

SEQ ID NO: 156154 - RNA, 20 nt, Human
cacuggagaguuucuaccuc

SEQ ID NO: 156155 - RNA, 18 nt, Human
cacuugacauccaugcuu

SEQ ID NO: 156156 - RNA, 18 nt, Human
cagcaacaucugaacugg

SEQ ID NO: 156157 - RNA, 20 nt, Human
cagccgcggcgcuucuggga

SEQ ID NO: 156158 - RNA, 21 nt, Human
cagcggcagauagcaucugag

SEQ ID NO: 156159 - RNA, 24 nt, Human
cagcucccaccguucuguuuggua

SEQ ID NO: 156160 - RNA, 19 nt, Human
cauauaauacauuagugug

SEQ ID NO: 156161 - RNA, 23 nt, Human
caugaauuugugcacgugcugcc

SEQ ID NO: 156162 - RNA, 25 nt, Human
ccaaaaggaagaaaaaacuaauuca

SEQ ID NO: 156163 - RNA, 22 nt, Human
ccgcggcgcuucugggagugga

SEQ ID NO: 156164 - RNA, 18 nt, Human
ccucagggugacaggaag

SEQ ID NO: 156165 - RNA, 19 nt, Human
ccucugcaggggaaagcuc

SEQ ID NO: 156166 - RNA, 22 nt, Human
cgcaaaccacagcuauucucuu

SEQ ID NO: 156167 - RNA, 20 nt, Human
cggggcuuucuuuuuuuuuu

SEQ ID NO: 156168 - RNA, 23 nt, Human
cucggggcuuucuuuuccuaagg

SEQ ID NO: 156169 - RNA, 22 nt, Human
cugaccacuuuuggagaaacuc

SEQ ID NO: 156170 - RNA, 22 nt, Human
cuggagaguuucuaccucgccc

SEQ ID NO: 156171 - RNA, 19 nt, Human
cuguuugcuucaagccaaa

SEQ ID NO: 156172 - RNA, 20 nt, Human
cuuugcgcccagcgcuccuu

SEQ ID NO: 156173 - RNA, 23 nt, Human
cuuuuggucuugacaacauuauc

SEQ ID NO: 156174 - RNA, 19 nt, Human
gauuguguuuguuagauga

SEQ ID NO: 156175 - RNA, 23 nt, Human
gcaacacacaacuucagaaaaga

SEQ ID NO: 156176 - RNA, 18 nt, Human
gcagaguacaaaaacaua

SEQ ID NO: 156177 - RNA, 23 nt, Human
ggcuuucuuuuuuuuuuuuuuuu

SEQ ID NO: 156178 - RNA, 22 nt, Human
ggggcaggcgccuggccgcugc

SEQ ID NO: 156179 - RNA, 18 nt, Human
ggugacaggaagaaagag

SEQ ID NO: 156180 - RNA, 19 nt, Human
ggugacaggaagaaagaga

SEQ ID NO: 156181 - RNA, 24 nt, Human
uaaaaaaaaauccauuaucuacau

SEQ ID NO: 156182 - RNA, 24 nt, Human
uaaacacaaaauuaaugaagaaaa

SEQ ID NO: 156183 - RNA, 21 nt, Human
uaauucacaaaugacuauuuc

SEQ ID NO: 156184 - RNA, 20 nt, Human
uacaguaaggccaagauaaa

SEQ ID NO: 156185 - RNA, 21 nt, Human
uacauuaguguggaaaugaaa

SEQ ID NO: 156186 - RNA, 22 nt, Human
uaccucgccccaaacucggagc

SEQ ID NO: 156187 - RNA, 25 nt, Human
uacgcgcgggggcucucaggcgcuc

SEQ ID NO: 156188 - RNA, 21 nt, Human
uacuagagucaacagcuguuc

SEQ ID NO: 156189 - RNA, 19 nt, Human
uacuguacuugccauguug

SEQ ID NO: 156190 - RNA, 18 nt, Human
uagcaaaccuccauuccu

SEQ ID NO: 156191 - RNA, 27 nt, Human
uagcaaaccuccauuccugacauaguu

SEQ ID NO: 156192 - RNA, 20 nt, Human
ucaaagcugguguuuuuucc

SEQ ID NO: 156193 - RNA, 24 nt, Human
ucaaaguacuguacuugccauguu

SEQ ID NO: 156194 - RNA, 21 nt, Human
ucaagccaaaaggaagaaaaa

SEQ ID NO: 156195 - RNA, 21 nt, Human
ucacaaaugacuauuucuagc

SEQ ID NO: 156196 - RNA, 22 nt, Human
ucaugcuucacuauccaggcau

SEQ ID NO: 156197 - RNA, 24 nt, Human
uccccagauugaugccugucaugu

SEQ ID NO: 156198 - RNA, 20 nt, Human
uccccaggaagaaacccgcc

SEQ ID NO: 156199 - RNA, 21 nt, Human
ucccuggucacagagcagcug

SEQ ID NO: 156200 - RNA, 22 nt, Human
ucccuggucacagagcagcugu

SEQ ID NO: 156201 - RNA, 19 nt, Human
uccuucgaauuuucugggu

SEQ ID NO: 156202 - RNA, 18 nt, Human
ucuguuugguaacagcuu

SEQ ID NO: 156203 - RNA, 18 nt, Human
ucuuuuuuuuuuuuuuuu

SEQ ID NO: 156204 - RNA, 26 nt, Human
ucuuuuuuuuuuuuuuuuuuuuuuug

SEQ ID NO: 156205 - RNA, 18 nt, Human
ugaaaaagugagguggua

SEQ ID NO: 156206 - RNA, 18 nt, Human
ugaaaagguuaaaaaugg

SEQ ID NO: 156207 - RNA, 18 nt, Human
ugaggaaacagcaacauc

SEQ ID NO: 156208 - RNA, 18 nt, Human
ugaggaaacagcaacauc

SEQ ID NO: 156209 - RNA, 19 nt, Human
ugaggugguaggagagcuc

SEQ ID NO: 156210 - RNA, 20 nt, Human
ugaggugguaggagagcuca

SEQ ID NO: 156211 - RNA, 18 nt, Human
ugcagccgcggcgcuucu

SEQ ID NO: 156212 - RNA, 23 nt, Human
ugcaggaaaaaauuuuagaaaac

SEQ ID NO: 156213 - RNA, 24 nt, Human
ugcgcagccuuguaggucugccca

SEQ ID NO: 156214 - RNA, 22 nt, Human
ugcuuuuggucuugacaacauu

SEQ ID NO: 156215 - RNA, 22 nt, Human
uggagcgccucugcaggggaaa

SEQ ID NO: 156216 - RNA, 19 nt, Human
uggcaaugaaccuuccuuc

SEQ ID NO: 156217 - RNA, 24 nt, Human
uggcagacacauaacgcugugcua

SEQ ID NO: 156218 - RNA, 22 nt, Human
ugggaagaagcauuugaauagu

SEQ ID NO: 156219 - RNA, 21 nt, Human
ugucucagugauguacauauu

SEQ ID NO: 156220 - RNA, 19 nt, Human
uguggcagacacauaacgc

SEQ ID NO: 156221 - RNA, 22 nt, Human
uucacuauccaggcauugcuac

SEQ ID NO: 156222 - RNA, 23 nt, Human
uucaucaaggcccucagaagaac

SEQ ID NO: 156223 - RNA, 20 nt, Human
uugaaaaugcuaacaacuga

SEQ ID NO: 156224 - RNA, 18 nt, Human
uugagauguuugcacagc

SEQ ID NO: 156225 - RNA, 21 nt, Human
uugcuaccuuucaauaucauu

SEQ ID NO: 156226 - RNA, 23 nt, Human
uugugcacgugcugccucaugcu

SEQ ID NO: 156227 - RNA, 20 nt, Human
uuuacaagaaaauuccucca

SEQ ID NO: 156228 - RNA, 19 nt, Human
uuuauacaguaaggccaag

SEQ ID NO: 156229 - RNA, 22 nt, Human
uuugcuguauuggagaagcugu

SEQ ID NO: 156230 - RNA, 22 nt, Human
uuugugggaagaagcauuugaa

SEQ ID NO: 156231 - RNA, 26 nt, Human
uuuuuuuuuuuuuuuuuuugguuuuu

SEQ ID NO: 156232 - RNA, 28 nt, Human
uuuuuuuuuuuuuuuuuuuuuuuggggg

SEQ ID NO: 156233 - RNA, 21 nt, Human
aaaaaaccaaaccaaaccaac

SEQ ID NO: 156234 - RNA, 22 nt, Human
aaaaaaccaaaccaaaccaacg

SEQ ID NO: 156235 - RNA, 19 nt, Human
aaaaagaagacaagacaaa

SEQ ID NO: 156236 - RNA, 22 nt, Human
aaaccaaaccaacgacuaagaa

SEQ ID NO: 156237 - RNA, 23 nt, Human
aaaccaacgacuaagaaacccag

SEQ ID NO: 156238 - RNA, 23 nt, Human
aaagcacccauuccuucccagca

SEQ ID NO: 156239 - RNA, 22 nt, Human
aagaaacccagccacacaggua

SEQ ID NO: 156240 - RNA, 22 nt, Human
aagcaauagucuuuucaacagc

SEQ ID NO: 156241 - RNA, 18 nt, Human
aagcacccauuccuuccc

SEQ ID NO: 156242 - RNA, 21 nt, Human
aagucaaauacuccgaagcca

SEQ ID NO: 156243 - RNA, 20 nt, Human
acaagacaaacccauccccu

SEQ ID NO: 156244 - RNA, 21 nt, Human
accaggcaccccccaaaucag

SEQ ID NO: 156245 - RNA, 29 nt, Human
accaggcaccccccaaaucagcaauuccu

SEQ ID NO: 156246 - RNA, 19 nt, Human
acccauccccuccucauca

SEQ ID NO: 156247 - RNA, 25 nt, Human
acccauuccuucccagcaucccccu

SEQ ID NO: 156248 - RNA, 20 nt, Human
acugccuuccucucuaaugu

SEQ ID NO: 156249 - RNA, 22 nt, Human
agacaaacccauccccuccuca

SEQ ID NO: 156250 - RNA, 21 nt, Human
agcacccauuccuucccagca

SEQ ID NO: 156251 - RNA, 19 nt, Human
agguggggaaggcgagggg

SEQ ID NO: 156252 - RNA, 19 nt, Human
agucaaauacuccgaagcc

SEQ ID NO: 156253 - RNA, 21 nt, Human
agucuuacagaagagucuaga

SEQ ID NO: 156254 - RNA, 19 nt, Human
auaccaguucaaaaaacca

SEQ ID NO: 156255 - RNA, 21 nt, Human
auagagugcuuacauuagaac

SEQ ID NO: 156256 - RNA, 22 nt, Human
caaagucaaauacuccgaagcc

SEQ ID NO: 156257 - RNA, 20 nt, Human
caagacaaacccauccccuc

SEQ ID NO: 156258 - RNA, 24 nt, Human
caagacaaacccauccccuccuca

SEQ ID NO: 156259 - RNA, 23 nt, Human
cacaaagcacccauuccuuccca

SEQ ID NO: 156260 - RNA, 19 nt, Human
cacagguacaagagcauaa

SEQ ID NO: 156261 - RNA, 25 nt, Human
cacagguacaagagcauaauuccgg

SEQ ID NO: 156262 - RNA, 20 nt, Human
caccaggcaccccccaaauc

SEQ ID NO: 156263 - RNA, 24 nt, Human
caccccccaaaucagcaauuccuu

SEQ ID NO: 156264 - RNA, 19 nt, Human
cagcccuuuuccccaaagu

SEQ ID NO: 156265 - RNA, 23 nt, Human
cagcccuuuuccccaaagucaaa

SEQ ID NO: 156266 - RNA, 24 nt, Human
cauaccaguucaaaaaaccaaacc

SEQ ID NO: 156267 - RNA, 26 nt, Human
caucacaaagcacccauuccuuccca

SEQ ID NO: 156268 - RNA, 19 nt, Human
caucaccaggcacccccca

SEQ ID NO: 156269 - RNA, 21 nt, Human
caucaccaggcaccccccaaa

SEQ ID NO: 156270 - RNA, 24 nt, Human
cauccccuccucaucaccaggcac

SEQ ID NO: 156271 - RNA, 19 nt, Human
cauuccuucccagcauccc

SEQ ID NO: 156272 - RNA, 20 nt, Human
ccaaaccaaaccaacgacua

SEQ ID NO: 156273 - RNA, 18 nt, Human
ccauccccuccucaucac

SEQ ID NO: 156274 - RNA, 21 nt, Human
ccucaucaccaggcacccccc

SEQ ID NO: 156275 - RNA, 22 nt, Human
cgacuaagaaacccagccacac

SEQ ID NO: 156276 - RNA, 20 nt, Human
cuccucaucaccaggcaccc

SEQ ID NO: 156277 - RNA, 23 nt, Human
cugugagucuuacagaagagucu

SEQ ID NO: 156278 - RNA, 19 nt, Human
gaaccaccccacauaccag

SEQ ID NO: 156279 - RNA, 19 nt, Human
gaaggcgagggggucugag

SEQ ID NO: 156280 - RNA, 20 nt, Human
gacuaagaaacccagccaca

SEQ ID NO: 156281 - RNA, 23 nt, Human
gacuaagaaacccagccacacag

SEQ ID NO: 156282 - RNA, 19 nt, Human
gagacuaguccauaaauua

SEQ ID NO: 156283 - RNA, 21 nt, Human
gcaauagucuuuucaacagcu

SEQ ID NO: 156284 - RNA, 23 nt, Human
gccacacagguacaagagcauaa

SEQ ID NO: 156285 - RNA, 20 nt, Human
ggagguggggaaggcgaggg

SEQ ID NO: 156286 - RNA, 21 nt, Human
ggagguggggaaggcgagggg

SEQ ID NO: 156287 - RNA, 21 nt, Human
ggggagguggggaaggcgagg

SEQ ID NO: 156288 - RNA, 19 nt, Human
ggucucuggaguucucggu

SEQ ID NO: 156289 - RNA, 20 nt, Human
ggucucuggaguucucggug

SEQ ID NO: 156290 - RNA, 26 nt, Human
gguggggaaggcgagggggucugagg

SEQ ID NO: 156291 - RNA, 19 nt, Human
guucaaagaaugauugucc

SEQ ID NO: 156292 - RNA, 18 nt, Human
uaaaaacaaaaauaagca

SEQ ID NO: 156293 - RNA, 24 nt, Human
uaaaaacaaaaauaagcaauaguc

SEQ ID NO: 156294 - RNA, 18 nt, Human
uaaaaagaagacaagaca

SEQ ID NO: 156295 - RNA, 19 nt, Human
uagacuccgagccagcccu

SEQ ID NO: 156296 - RNA, 24 nt, Human
ucacuggacagucgucucggcugu

SEQ ID NO: 156297 - RNA, 22 nt, Human
uccaucacaaagcacccauucc

SEQ ID NO: 156298 - RNA, 23 nt, Human
uccgagccagcccuuuuccccaa

SEQ ID NO: 156299 - RNA, 20 nt, Human
uccucaucaccaggcacccc

SEQ ID NO: 156300 - RNA, 25 nt, Human
ucugagggugagauggcagguggag

SEQ ID NO: 156301 - RNA, 20 nt, Human
ugagauggucacuggacagu

SEQ ID NO: 156302 - RNA, 22 nt, Human
uggggaaggcgagggggucuga

SEQ ID NO: 156303 - RNA, 21 nt, Human
uggggagguggggaaggcgag

SEQ ID NO: 156304 - RNA, 23 nt, Human
uggggagguggggaaggcgaggg

SEQ ID NO: 156305 - RNA, 18 nt, Human
ugggucucuggaguucuc

SEQ ID NO: 156306 - RNA, 23 nt, Human
uucaaaaaaccaaaccaaaccaa

SEQ ID NO: 156307 - RNA, 18 nt, Human
uucaaagaaugauugucc

SEQ ID NO: 156308 - RNA, 22 nt, Human
uucaaagaaugauuguccccac

SEQ ID NO: 156309 - RNA, 24 nt, Human
uuccugguguccaacaucuggguc

SEQ ID NO: 156310 - RNA, 18 nt, Human
uucucgguggggaggugg

SEQ ID NO: 156311 - RNA, 19 nt, Human
acagagagagacagacaga

SEQ ID NO: 156312 - RNA, 19 nt, Human
agagaaagagagaaagaga

SEQ ID NO: 156313 - RNA, 23 nt, Human
agagacagagacacagagagaga

SEQ ID NO: 156314 - RNA, 27 nt, Human
agagauagagacagagacacagagaga

SEQ ID NO: 156315 - RNA, 18 nt, Human
agugaaaaggagcucaag

SEQ ID NO: 156316 - RNA, 23 nt, Human
cgaaacaggaacugagagaauau

SEQ ID NO: 156317 - RNA, 24 nt, Human
cuggccacaaugcaccaaaaggag

SEQ ID NO: 156318 - RNA, 21 nt, Human
gaaagagagagagauagagac

SEQ ID NO: 156319 - RNA, 20 nt, Human
gagacagacagagaaaguuc

SEQ ID NO: 156320 - RNA, 20 nt, Human
gagagaaagagagaaagaga

SEQ ID NO: 156321 - RNA, 20 nt, Human
gagggagagagagaaagaga

SEQ ID NO: 156322 - RNA, 21 nt, Human
ugagucugcuguagugucugg

SEQ ID NO: 156323 - RNA, 22 nt, Human
uggccacaaugcaccaaaagga

SEQ ID NO: 156324 - RNA, 24 nt, Human
aaaggagaagaaaagaaaaugaga

SEQ ID NO: 156325 - RNA, 25 nt, Human
aagaaaaugagagagcgcgcccagc

SEQ ID NO: 156326 - RNA, 22 nt, Human
aagcggggcggagggagaagcc

SEQ ID NO: 156327 - RNA, 24 nt, Human
aagcggggcggagggagaagccgg

SEQ ID NO: 156328 - RNA, 24 nt, Human
aaggagaagaaaagaaaaugagaa

SEQ ID NO: 156329 - RNA, 26 nt, Human
aagucagauucaaaccucagggcuga

SEQ ID NO: 156330 - RNA, 21 nt, Human
acaacaaauagcguacacaag

SEQ ID NO: 156331 - RNA, 19 nt, Human
acucauuugguguguacca

SEQ ID NO: 156332 - RNA, 18 nt, Human
agaaaagaaaaugagaga

SEQ ID NO: 156333 - RNA, 20 nt, Human
agaagaaaagaaaaugagag

SEQ ID NO: 156334 - RNA, 22 nt, Human
agaagaaaagaaaaugagagag

SEQ ID NO: 156335 - RNA, 23 nt, Human
aggagaagaaaagaaaaugagag

SEQ ID NO: 156336 - RNA, 20 nt, Human
agggggaggaggaaaggaag

SEQ ID NO: 156337 - RNA, 24 nt, Human
auauucccauuuccccucccauug

SEQ ID NO: 156338 - RNA, 19 nt, Human
auuucauccauuaagacaa

SEQ ID NO: 156339 - RNA, 23 nt, Human
caacaaaagaaagaaaaauugca

SEQ ID NO: 156340 - RNA, 22 nt, Human
caaccuccacagauuuuuaaaa

SEQ ID NO: 156341 - RNA, 22 nt, Human
caaguagaagcagcuuccuuca

SEQ ID NO: 156342 - RNA, 18 nt, Human
cacacauaaaaauucagu

SEQ ID NO: 156343 - RNA, 24 nt, Human
cacuaaaguuuaacuccauucagc

SEQ ID NO: 156344 - RNA, 18 nt, Human
cagacggagcaugugugu

SEQ ID NO: 156345 - RNA, 18 nt, Human
cagcaaccuccacagauu

SEQ ID NO: 156346 - RNA, 20 nt, Human
cagccgccgcagucgucacu

SEQ ID NO: 156347 - RNA, 19 nt, Human
caggggggaaaggagaaga

SEQ ID NO: 156348 - RNA, 21 nt, Human
ccaaacuuaaaaaagagacaa

SEQ ID NO: 156349 - RNA, 22 nt, Human
ccaaguagaagcagcuuccuuc

SEQ ID NO: 156350 - RNA, 18 nt, Human
cccaacaaaagaaagaaa

SEQ ID NO: 156351 - RNA, 20 nt, Human
cccgcagcucuuucccccuc

SEQ ID NO: 156352 - RNA, 21 nt, Human
cggggcggagggagaagccgg

SEQ ID NO: 156353 - RNA, 24 nt, Human
cuaaaguuuaacuccauucagcaa

SEQ ID NO: 156354 - RNA, 24 nt, Human
cuccgagggggaggaggaaaggaa

SEQ ID NO: 156355 - RNA, 26 nt, Human
gaacauucuguuugccaaacuuaaaa

SEQ ID NO: 156356 - RNA, 20 nt, Human
gagaagcggggcggagggag

SEQ ID NO: 156357 - RNA, 23 nt, Human
gccaaacuuaaaaaagagacaau

SEQ ID NO: 156358 - RNA, 18 nt, Human
ggaaaggagaagaaaaga

SEQ ID NO: 156359 - RNA, 26 nt, Human
gggagaagccggcuccgagggggagg

SEQ ID NO: 156360 - RNA, 21 nt, Human
gggaggaggaaaggaagagga

SEQ ID NO: 156361 - RNA, 23 nt, Human
gggggaggaggaaaggaagagga

SEQ ID NO: 156362 - RNA, 18 nt, Human
guagaagcagcuuccuuc

SEQ ID NO: 156363 - RNA, 24 nt, Human
gucacuccccggcuuuucccgcag

SEQ ID NO: 156364 - RNA, 25 nt, Human
uaaaaaauagaucuccggcuaaaga

SEQ ID NO: 156365 - RNA, 23 nt, Human
uaaaaaugacuaucucgucgccc

SEQ ID NO: 156366 - RNA, 22 nt, Human
uagcacuaaaguuuaacuccau

SEQ ID NO: 156367 - RNA, 25 nt, Human
uauuauauucccauuuccccuccca

SEQ ID NO: 156368 - RNA, 20 nt, Human
ucagauuuucuggguuaggu

SEQ ID NO: 156369 - RNA, 18 nt, Human
ucagcugcuaauaaaguc

SEQ ID NO: 156370 - RNA, 18 nt, Human
uccccggcuuuucccgca

SEQ ID NO: 156371 - RNA, 22 nt, Human
uccccucccauuggccucccca

SEQ ID NO: 156372 - RNA, 29 nt, Human
ucccgaagugucugucccagccgcgguuc

SEQ ID NO: 156373 - RNA, 24 nt, Human
uccgagggggaggaggaaaggaag

SEQ ID NO: 156374 - RNA, 19 nt, Human
uccugccacucccaaguag

SEQ ID NO: 156375 - RNA, 23 nt, Human
ucuacagagauuuuaaccaaagu

SEQ ID NO: 156376 - RNA, 25 nt, Human
ucuccugccacucccaaguagaagc

SEQ ID NO: 156377 - RNA, 21 nt, Human
ugaaaacaggacauccccuuc

SEQ ID NO: 156378 - RNA, 22 nt, Human
ugaggaauguuguugaccaccu

SEQ ID NO: 156379 - RNA, 20 nt, Human
uggaauuuuuauuccaaaua

SEQ ID NO: 156380 - RNA, 21 nt, Human
uggaauuuuuauuccaaauau

SEQ ID NO: 156381 - RNA, 25 nt, Human
uggccuccccaacaaaagaaagaaa

SEQ ID NO: 156382 - RNA, 21 nt, Human
ugucagacggagcaugugugu

SEQ ID NO: 156383 - RNA, 18 nt, Human
uguguaccagcaaccucc

SEQ ID NO: 156384 - RNA, 23 nt, Human
uguuugccaaacuuaaaaaagag

SEQ ID NO: 156385 - RNA, 19 nt, Human
uuccaauucagauuuucug

SEQ ID NO: 156386 - RNA, 20 nt, Human
uucccccucucuaaggcagc

SEQ ID NO: 156387 - RNA, 18 nt, Human
uuugaggaauguuguuga

SEQ ID NO: 156388 - RNA, 23 nt, Human
uuugccaaacuuaaaaaagagac

SEQ ID NO: 156389 - RNA, 25 nt, Human
uuuggacucauuugguguguaccag

SEQ ID NO: 156390 - RNA, 21 nt, Human
uuuucaucaauaauuuacaca

SEQ ID NO: 156391 - RNA, 21 nt, Human
uuuucccgcagcucuuucccc

SEQ ID NO: 156392 - RNA, 21 nt, Human
aaacacccacaaauccagcga

SEQ ID NO: 156393 - RNA, 22 nt, Human
aaacacccacaaauccagcgag

SEQ ID NO: 156394 - RNA, 24 nt, Human
aaacacccacaaauccagcgagcc

SEQ ID NO: 156395 - RNA, 21 nt, Human
aacagguguccagccuccauc

SEQ ID NO: 156396 - RNA, 22 nt, Human
aacagguguccagccuccaucc

SEQ ID NO: 156397 - RNA, 23 nt, Human
aagcuacaauuacaggcuagcgc

SEQ ID NO: 156398 - RNA, 21 nt, Human
aaguggagugggaagaagcgg

SEQ ID NO: 156399 - RNA, 23 nt, Human
acaggaaagcagauuacaccaau

SEQ ID NO: 156400 - RNA, 23 nt, Human
acagucucccauuucuguaacuc

SEQ ID NO: 156401 - RNA, 24 nt, Human
accccacuucuuccuucaugggac

SEQ ID NO: 156402 - RNA, 21 nt, Human
acccugaagcgauaagcaaca

SEQ ID NO: 156403 - RNA, 19 nt, Human
acuaucaucuggcugguuc

SEQ ID NO: 156404 - RNA, 18 nt, Human
acucgagcagcaguggug

SEQ ID NO: 156405 - RNA, 24 nt, Human
agacaggaaagcagauuacaccaa

SEQ ID NO: 156406 - RNA, 19 nt, Human
agcagcaguggugugagca

SEQ ID NO: 156407 - RNA, 21 nt, Human
aggagguaguaaggugaccug

SEQ ID NO: 156408 - RNA, 20 nt, Human
aggaugggaaacuggaggaa

SEQ ID NO: 156409 - RNA, 20 nt, Human
aggcuccccuaguccccacc

SEQ ID NO: 156410 - RNA, 21 nt, Human
aguaauuuggaacccacaguc

SEQ ID NO: 156411 - RNA, 23 nt, Human
aucacgcauaagucauccacccc

SEQ ID NO: 156412 - RNA, 22 nt, Human
aucuuauagaaugcaaggggaa

SEQ ID NO: 156413 - RNA, 24 nt, Human
augggacaacaaguggagugggaa

SEQ ID NO: 156414 - RNA, 19 nt, Human
auuugggugggaggagcuu

SEQ ID NO: 156415 - RNA, 18 nt, Human
cacaaugaauacaaacca

SEQ ID NO: 156416 - RNA, 22 nt, Human
cacacucuuucaguuugagccc

SEQ ID NO: 156417 - RNA, 21 nt, Human
cacaugaaauucuucugugug

SEQ ID NO: 156418 - RNA, 23 nt, Human
cacccacaaauccagcgagccag

SEQ ID NO: 156419 - RNA, 18 nt, Human
cacccuuucuacucaaca

SEQ ID NO: 156420 - RNA, 24 nt, Human
cagaacagguguccagccuccauc

SEQ ID NO: 156421 - RNA, 24 nt, Human
cagcgagccccuggcauuucaaau

SEQ ID NO: 156422 - RNA, 18 nt, Human
cagcucuugcuggcccca

SEQ ID NO: 156423 - RNA, 20 nt, Human
ccacacccuuucuacucaac

SEQ ID NO: 156424 - RNA, 21 nt, Human
ccacuuguaggcuccagggac

SEQ ID NO: 156425 - RNA, 23 nt, Human
ccagggaccacacuucacuuagc

SEQ ID NO: 156426 - RNA, 20 nt, Human
cccacaaauccagcgagcca

SEQ ID NO: 156427 - RNA, 22 nt, Human
ccccaccaccuugccccaucca

SEQ ID NO: 156428 - RNA, 21 nt, Human
cccuaaugcuucuucaauagc

SEQ ID NO: 156429 - RNA, 19 nt, Human
ccuaaguugauuccugagg

SEQ ID NO: 156430 - RNA, 23 nt, Human
ccucuaacccagaccacuuguag

SEQ ID NO: 156431 - RNA, 18 nt, Human
ccucugucuccccucuca

SEQ ID NO: 156432 - RNA, 23 nt, Human
ccugaagcgauaagcaacacugg

SEQ ID NO: 156433 - RNA, 23 nt, Human
ccugugcccaccuacccugaagc

SEQ ID NO: 156434 - RNA, 23 nt, Human
ccuugccucuauggggaauggaa

SEQ ID NO: 156435 - RNA, 21 nt, Human
cgaaagccaagacagugccgg

SEQ ID NO: 156436 - RNA, 21 nt, Human
cgagcagcaguggugugagca

SEQ ID NO: 156437 - RNA, 20 nt, Human
cgugguggggagggguugag

SEQ ID NO: 156438 - RNA, 21 nt, Human
cucacucgucugccucuccca

SEQ ID NO: 156439 - RNA, 25 nt, Human
cuccagggaccacacuucacuuagc

SEQ ID NO: 156440 - RNA, 22 nt, Human
cucucuucuucccccucccuca

SEQ ID NO: 156441 - RNA, 19 nt, Human
cugaaaacacccacaaauc

SEQ ID NO: 156442 - RNA, 22 nt, Human
cugcucacugaaggaagggugg

SEQ ID NO: 156443 - RNA, 21 nt, Human
cugcucccuacuguaacacuc

SEQ ID NO: 156444 - RNA, 22 nt, Human
cugcucccuacuguaacacucc

SEQ ID NO: 156445 - RNA, 23 nt, Human
cuggcccauuugggugggaggag

SEQ ID NO: 156446 - RNA, 22 nt, Human
cugggacaggagacugaccaca

SEQ ID NO: 156447 - RNA, 19 nt, Human
cuuaggccaaacucuaccc

SEQ ID NO: 156448 - RNA, 21 nt, Human
cuugccugcagcugcuaagcc

SEQ ID NO: 156449 - RNA, 19 nt, Human
cuuuccuucccccagccuu

SEQ ID NO: 156450 - RNA, 22 nt, Human
gaacugaagcugggacaggaga

SEQ ID NO: 156451 - RNA, 22 nt, Human
gaaggccugaaaacacccacaa

SEQ ID NO: 156452 - RNA, 23 nt, Human
gacaacaaguggagugggaagaa

SEQ ID NO: 156453 - RNA, 19 nt, Human
gagaauggcaggacacaac

SEQ ID NO: 156454 - RNA, 19 nt, Human
gagcagcaguggugugagc

SEQ ID NO: 156455 - RNA, 19 nt, Human
gagccccuggcauuucaaa

SEQ ID NO: 156456 - RNA, 19 nt, Human
gagugugugugcauguccc

SEQ ID NO: 156457 - RNA, 19 nt, Human
gcguagcuuuccuuccccc

SEQ ID NO: 156458 - RNA, 20 nt, Human
gcugccguuggggccuggga

SEQ ID NO: 156459 - RNA, 18 nt, Human
ggaagaagcggggcucug

SEQ ID NO: 156460 - RNA, 20 nt, Human
ggacaacaaguggaguggga

SEQ ID NO: 156461 - RNA, 21 nt, Human
ggaggagcuggagcacuggug

SEQ ID NO: 156462 - RNA, 21 nt, Human
ggagguaguaaggugaccugu

SEQ ID NO: 156463 - RNA, 20 nt, Human
ggaugcagauuucaggauca

SEQ ID NO: 156464 - RNA, 20 nt, Human
ggcaggacacaacagcagaa

SEQ ID NO: 156465 - RNA, 23 nt, Human
ggccaaucuauacccgcccacac

SEQ ID NO: 156466 - RNA, 21 nt, Human
gggaagaagcggggcucugag

SEQ ID NO: 156467 - RNA, 21 nt, Human
gggaauggaaggccugaaaac

SEQ ID NO: 156468 - RNA, 21 nt, Human
gggagggguugagacccaucu

SEQ ID NO: 156469 - RNA, 24 nt, Human
gggaguggguugggggguuucuca

SEQ ID NO: 156470 - RNA, 22 nt, Human
ggggaaguguuggguuuuacag

SEQ ID NO: 156471 - RNA, 21 nt, Human
gggguuucucagugugggaga

SEQ ID NO: 156472 - RNA, 21 nt, Human
ggugggaggagcuuucuguca

SEQ ID NO: 156473 - RNA, 20 nt, Human
gguggggagggguugagacc

SEQ ID NO: 156474 - RNA, 18 nt, Human
gucacaagccacaggacu

SEQ ID NO: 156475 - RNA, 20 nt, Human
gugcccaccuacccugaagc

SEQ ID NO: 156476 - RNA, 19 nt, Human
gugcugccguuggggccug

SEQ ID NO: 156477 - RNA, 21 nt, Human
gugcugccguuggggccuggg

SEQ ID NO: 156478 - RNA, 19 nt, Human
guggaaagcuacaauuaca

SEQ ID NO: 156479 - RNA, 22 nt, Human
guucucccucucuggccgggcc

SEQ ID NO: 156480 - RNA, 20 nt, Human
uaacuccuccucuucaucuu

SEQ ID NO: 156481 - RNA, 20 nt, Human
uaagaggucacaagccacag

SEQ ID NO: 156482 - RNA, 21 nt, Human
uacacagagaaggcuuucuca

SEQ ID NO: 156483 - RNA, 23 nt, Human
uacacagagaaggcuuucucaaa

SEQ ID NO: 156484 - RNA, 19 nt, Human
uaccaggcuccccuagucc

SEQ ID NO: 156485 - RNA, 22 nt, Human
uacccgcccacacccuuucuac

SEQ ID NO: 156486 - RNA, 21 nt, Human
uacccugaagcgauaagcaac

SEQ ID NO: 156487 - RNA, 18 nt, Human
uaccugcuucuucuccca

SEQ ID NO: 156488 - RNA, 21 nt, Human
uaugaguaauuuggaacccac

SEQ ID NO: 156489 - RNA, 18 nt, Human
ucaggaguugcugggugc

SEQ ID NO: 156490 - RNA, 21 nt, Human
ucauccaccccagccugugcu

SEQ ID NO: 156491 - RNA, 23 nt, Human
uccaggucuuaggaccacagagg

SEQ ID NO: 156492 - RNA, 26 nt, Human
ucccaggccaaucuauacccgcccac

SEQ ID NO: 156493 - RNA, 21 nt, Human
ucccuacuguaacacucccag

SEQ ID NO: 156494 - RNA, 22 nt, Human
ucugaaaacacuucuccaucua

SEQ ID NO: 156495 - RNA, 24 nt, Human
ucugccagugugcccugcacacgg

SEQ ID NO: 156496 - RNA, 21 nt, Human
ucuggcugguucucccucucu

SEQ ID NO: 156497 - RNA, 20 nt, Human
ucuguaacucucuguccugg

SEQ ID NO: 156498 - RNA, 19 nt, Human
ucuuucucugguuuucucc

SEQ ID NO: 156499 - RNA, 22 nt, Human
ugaaaacacccacaaauccagc

SEQ ID NO: 156500 - RNA, 26 nt, Human
ugaaaacacccacaaauccagcgagc

SEQ ID NO: 156501 - RNA, 23 nt, Human
ugaaaacacuucuccaucuaucu

SEQ ID NO: 156502 - RNA, 25 nt, Human
ugaaaacacuucuccaucuaucucc

SEQ ID NO: 156503 - RNA, 22 nt, Human
ugaagcugggacaggagacuga

SEQ ID NO: 156504 - RNA, 20 nt, Human
ugaaggaaggguggggucag

SEQ ID NO: 156505 - RNA, 23 nt, Human
ugaccugucuaccucugaguuca

SEQ ID NO: 156506 - RNA, 19 nt, Human
ugaguucagucugugcugc

SEQ ID NO: 156507 - RNA, 24 nt, Human
ugccagagaggguggcaccacagc

SEQ ID NO: 156508 - RNA, 20 nt, Human
ugccucugucuccccucuca

SEQ ID NO: 156509 - RNA, 18 nt, Human
ugcucccuacuguaacac

SEQ ID NO: 156510 - RNA, 18 nt, Human
ugcuggggccuggcccau

SEQ ID NO: 156511 - RNA, 18 nt, Human
ugcuguaaucuuauagaa

SEQ ID NO: 156512 - RNA, 18 nt, Human
ugcuuugcucugcaugaa

SEQ ID NO: 156513 - RNA, 18 nt, Human
ugggaacugccuaaguug

SEQ ID NO: 156514 - RNA, 18 nt, Human
ugggacaggagacugacc

SEQ ID NO: 156515 - RNA, 22 nt, Human
ugggacagguggucuaccugcu

SEQ ID NO: 156516 - RNA, 20 nt, Human
ugggggguuucucagugugg

SEQ ID NO: 156517 - RNA, 18 nt, Human
uggggucagucuagucuc

SEQ ID NO: 156518 - RNA, 24 nt, Human
ugguggggagggguugagacccau

SEQ ID NO: 156519 - RNA, 22 nt, Human
uguaacucucuguccugggaga

SEQ ID NO: 156520 - RNA, 21 nt, Human
uguacuuagaacccacacucu

SEQ ID NO: 156521 - RNA, 22 nt, Human
uguccagccuccaucccgagcc

SEQ ID NO: 156522 - RNA, 19 nt, Human
uguuggguuuuacagugug

SEQ ID NO: 156523 - RNA, 22 nt, Human
uuacaccaaucuuucuccucuc

SEQ ID NO: 156524 - RNA, 19 nt, Human
uucccagccagcccggcac

SEQ ID NO: 156525 - RNA, 25 nt, Human
uucccagccagcccggcacacccac

SEQ ID NO: 156526 - RNA, 19 nt, Human
uucucccacuucagauacc

SEQ ID NO: 156527 - RNA, 22 nt, Human
uugaaugccuguacuuagaacc

SEQ ID NO: 156528 - RNA, 22 nt, Human
uuuuggauucuaacacuuuauu

SEQ ID NO: 156529 - RNA, 22 nt, Human
aaggcagcuguuucagaggagg

SEQ ID NO: 156530 - RNA, 27 nt, Human
acuuugcaaauucagaauuucaaacug

SEQ ID NO: 156531 - RNA, 19 nt, Human
agaggaggggggaggaggu

SEQ ID NO: 156532 - RNA, 22 nt, Human
aggcagcuguuucagaggaggg

SEQ ID NO: 156533 - RNA, 19 nt, Human
cccccgcgcgccgccgccg

SEQ ID NO: 156534 - RNA, 22 nt, Human
cccccgcgcgccgccgccgccg

SEQ ID NO: 156535 - RNA, 20 nt, Human
cccgcgcgccgccgccgccg

SEQ ID NO: 156536 - RNA, 23 nt, Human
cccgcgcgccgccgccgccgccg

SEQ ID NO: 156537 - RNA, 19 nt, Human
cccgcgcgucgcccccgcg

SEQ ID NO: 156538 - RNA, 18 nt, Human
ccgccgccgccgccgccg

SEQ ID NO: 156539 - RNA, 19 nt, Human
ccgccgccgccgccgccgg

SEQ ID NO: 156540 - RNA, 25 nt, Human
ccgcgcgccgccgccgccgccgccg

SEQ ID NO: 156541 - RNA, 23 nt, Human
ccugaagcuaaggcagcuguuuc

SEQ ID NO: 156542 - RNA, 18 nt, Human
cgccgccgccgccggggc

SEQ ID NO: 156543 - RNA, 24 nt, Human
cuucugagucccaccgggugucgg

SEQ ID NO: 156544 - RNA, 18 nt, Human
ggaggggggaggagguag

SEQ ID NO: 156545 - RNA, 21 nt, Human
ucccgcgcgucgcccccgcgg

SEQ ID NO: 156546 - RNA, 25 nt, Human
ucgcccccgcgcgccgccgccgccg

SEQ ID NO: 156547 - RNA, 29 nt, Human
ucgcccccgcgcgccgccgccgccgccgg

SEQ ID NO: 156548 - RNA, 22 nt, Human
ugagaaggcaauaaaaaguuga

SEQ ID NO: 156549 - RNA, 22 nt, Human
ugccuucugagucccaccgggu

SEQ ID NO: 156550 - RNA, 23 nt, Human
uucagaauuucaaacugcauguu

SEQ ID NO: 156551 - RNA, 21 nt, Human
uucagaggaggggggaggagg

SEQ ID NO: 156552 - RNA, 19 nt, Human
uguggccgaguacuguguc

SEQ ID NO: 156553 - RNA, 19 nt, Human
aauggccccugggaaccca

SEQ ID NO: 156554 - RNA, 22 nt, Human
acaaacaccaagccccuucagc

SEQ ID NO: 156555 - RNA, 24 nt, Human
acucaacacccucucccagcaaau

SEQ ID NO: 156556 - RNA, 23 nt, Human
acuguggaggaagcaugcuggca

SEQ ID NO: 156557 - RNA, 18 nt, Human
auggucuucauccuccuc

SEQ ID NO: 156558 - RNA, 20 nt, Human
cacccucucccagcaaaucc

SEQ ID NO: 156559 - RNA, 21 nt, Human
ccaauggccccugggaaccca

SEQ ID NO: 156560 - RNA, 22 nt, Human
ccaauggccccugggaacccau

SEQ ID NO: 156561 - RNA, 22 nt, Human
cguguuacuguggaggaagcau

SEQ ID NO: 156562 - RNA, 23 nt, Human
cucaacacccucucccagcaaau

SEQ ID NO: 156563 - RNA, 18 nt, Human
cuuacaaacaccaagccc

SEQ ID NO: 156564 - RNA, 22 nt, Human
cuuacuugcugcaauucuuaau

SEQ ID NO: 156565 - RNA, 23 nt, Human
cuucagggacuccaauggccccu

SEQ ID NO: 156566 - RNA, 22 nt, Human
cuugugacaguuuguuuucuuc

SEQ ID NO: 156567 - RNA, 19 nt, Human
gugacaguuuguuuucuuc

SEQ ID NO: 156568 - RNA, 24 nt, Human
uacuguggaggaagcaugcuggca

SEQ ID NO: 156569 - RNA, 21 nt, Human
uccuggguccuucagggacuc

SEQ ID NO: 156570 - RNA, 21 nt, Human
ugaaaagaccuuguuggcuua

SEQ ID NO: 156571 - RNA, 23 nt, Human
uggcacagugaacucaacacccu

SEQ ID NO: 156572 - RNA, 19 nt, Human
uguggaggaagcaugcugg

SEQ ID NO: 156573 - RNA, 22 nt, Human
uguuauguaacauucucucuca

SEQ ID NO: 156574 - RNA, 20 nt, Human
uuaauaagggugcuuuucuu

SEQ ID NO: 156575 - RNA, 26 nt, Human
aaucuugccuuccaugccccagccac

SEQ ID NO: 156576 - RNA, 24 nt, Human
acaaucuugccuuccaugccccag

SEQ ID NO: 156577 - RNA, 23 nt, Human
caccaaggagggaaagaugaguc

SEQ ID NO: 156578 - RNA, 25 nt, Human
caccaaggagggaaagaugaguccc

SEQ ID NO: 156579 - RNA, 24 nt, Human
gaguuccucgccauccuggcgcgg

SEQ ID NO: 156580 - RNA, 20 nt, Human
gcggagcuggccgcacuggg

SEQ ID NO: 156581 - RNA, 22 nt, Human
gcggagcuggccgcacuggggg

SEQ ID NO: 156582 - RNA, 19 nt, Human
uccagcugccuauccagga

SEQ ID NO: 156583 - RNA, 23 nt, Human
ucucacugcggaaucaccaagga

SEQ ID NO: 156584 - RNA, 22 nt, Human
aaccugaccccgagaaagggga

SEQ ID NO: 156585 - RNA, 20 nt, Human
aaucacagucuacugaccua

SEQ ID NO: 156586 - RNA, 20 nt, Human
acagucucaaaggcuuagaa

SEQ ID NO: 156587 - RNA, 22 nt, Human
acuacaagaggccaaaugccag

SEQ ID NO: 156588 - RNA, 23 nt, Human
acucuggagcccucugcaguccu

SEQ ID NO: 156589 - RNA, 21 nt, Human
acuuccucaaacggacucggg

SEQ ID NO: 156590 - RNA, 22 nt, Human
agagaugggugaaauauaauca

SEQ ID NO: 156591 - RNA, 20 nt, Human
agcaggcagccuucucugua

SEQ ID NO: 156592 - RNA, 23 nt, Human
agcauguuuuugaaauauguggg

SEQ ID NO: 156593 - RNA, 20 nt, Human
agguccugcaggcgcucccc

SEQ ID NO: 156594 - RNA, 18 nt, Human
aggugguuaaguuucccc

SEQ ID NO: 156595 - RNA, 18 nt, Human
auucaauagacuugagug

SEQ ID NO: 156596 - RNA, 20 nt, Human
caaaugaugucagcauccuc

SEQ ID NO: 156597 - RNA, 18 nt, Human
caagagagaaucaguggc

SEQ ID NO: 156598 - RNA, 26 nt, Human
cacacccuagacauaucagagggaaa

SEQ ID NO: 156599 - RNA, 21 nt, Human
caccuaagucaaagcaagagc

SEQ ID NO: 156600 - RNA, 22 nt, Human
cagaaaggguuaaaguaaggga

SEQ ID NO: 156601 - RNA, 21 nt, Human
cagccuugcaaauacauagca

SEQ ID NO: 156602 - RNA, 18 nt, Human
cagguauugagcaaaucu

SEQ ID NO: 156603 - RNA, 24 nt, Human
cagucuacugaccuaaaucacacc

SEQ ID NO: 156604 - RNA, 30 nt, Human
cauuucauuuuaaaauuggauauugggagg

SEQ ID NO: 156605 - RNA, 19 nt, Human
ccaaaugccaggguucauc

SEQ ID NO: 156606 - RNA, 22 nt, Human
cccccaguauacuuaucacugu

SEQ ID NO: 156607 - RNA, 19 nt, Human
ccuaagucaaagcaagagc

SEQ ID NO: 156608 - RNA, 20 nt, Human
ccugcaggcgcuccccucca

SEQ ID NO: 156609 - RNA, 21 nt, Human
ccugucugggucuucacaccu

SEQ ID NO: 156610 - RNA, 21 nt, Human
cgccucggggacuuccucaaa

SEQ ID NO: 156611 - RNA, 20 nt, Human
cuagagcccaaaucaugugc

SEQ ID NO: 156612 - RNA, 23 nt, Human
cuagagcccaaaucaugugcuau

SEQ ID NO: 156613 - RNA, 21 nt, Human
cuccugcugaucaggccacag

SEQ ID NO: 156614 - RNA, 20 nt, Human
cucuuaugagcuaugagagc

SEQ ID NO: 156615 - RNA, 21 nt, Human
cugcaguccuucuauauaucu

SEQ ID NO: 156616 - RNA, 23 nt, Human
cuuucuuaucuccuuguaggugg

SEQ ID NO: 156617 - RNA, 20 nt, Human
gaggucucaacaugggugau

SEQ ID NO: 156618 - RNA, 21 nt, Human
gcaaauacauagcaggcagcc

SEQ ID NO: 156619 - RNA, 24 nt, Human
gcaaauacauagcaggcagccuuc

SEQ ID NO: 156620 - RNA, 21 nt, Human
gcaguccuucuauauaucugg

SEQ ID NO: 156621 - RNA, 18 nt, Human
gcuauuugcaaggcugag

SEQ ID NO: 156622 - RNA, 19 nt, Human
ggagaugauuccugagaga

SEQ ID NO: 156623 - RNA, 24 nt, Human
gugacacauucuauaaaaugcauc

SEQ ID NO: 156624 - RNA, 25 nt, Human
guuuggaaaagcauguuuuugaaau

SEQ ID NO: 156625 - RNA, 19 nt, Human
uaaagagauaaauucuuca

SEQ ID NO: 156626 - RNA, 24 nt, Human
uaacuuuauuuuaagcuucuauua

SEQ ID NO: 156627 - RNA, 23 nt, Human
uaaguuucccacaaaugcaauuu

SEQ ID NO: 156628 - RNA, 20 nt, Human
uaauacaaaugaugucagca

SEQ ID NO: 156629 - RNA, 22 nt, Human
uacaaaugaugucagcauccuc

SEQ ID NO: 156630 - RNA, 24 nt, Human
uauaaaaugcaucacaaaacuaca

SEQ ID NO: 156631 - RNA, 19 nt, Human
uaucuggucacuagauccg

SEQ ID NO: 156632 - RNA, 23 nt, Human
uauuuggagauguagccauuugu

SEQ ID NO: 156633 - RNA, 19 nt, Human
ucacauggaggguagaacc

SEQ ID NO: 156634 - RNA, 18 nt, Human
ucaggccacagugugaca

SEQ ID NO: 156635 - RNA, 18 nt, Human
ucccugguaagagagccc

SEQ ID NO: 156636 - RNA, 24 nt, Human
uccuuagccaagacuacaagaggc

SEQ ID NO: 156637 - RNA, 21 nt, Human
ucuaacaagguaaaucuaaaa

SEQ ID NO: 156638 - RNA, 21 nt, Human
ucugcaguccugucugggucu

SEQ ID NO: 156639 - RNA, 27 nt, Human
ucugugguugggucagaaccggggucc

SEQ ID NO: 156640 - RNA, 22 nt, Human
ugaaauauaaucacuaacuaaa

SEQ ID NO: 156641 - RNA, 20 nt, Human
ugaaauaugugggaucucca

SEQ ID NO: 156642 - RNA, 24 nt, Human
ugaccuaaaucacacccuagacau

SEQ ID NO: 156643 - RNA, 21 nt, Human
ugagagcuuaauuaaagcuaa

SEQ ID NO: 156644 - RNA, 22 nt, Human
ugagcaaaucucccugguaaga

SEQ ID NO: 156645 - RNA, 24 nt, Human
ugaggucucaacaugggugaugug

SEQ ID NO: 156646 - RNA, 20 nt, Human
ugccaagcugaggucucaac

SEQ ID NO: 156647 - RNA, 23 nt, Human
ugcuuggcugcaggugcaaaaug

SEQ ID NO: 156648 - RNA, 25 nt, Human
ugggaaaaauauucucacauggagg

SEQ ID NO: 156649 - RNA, 26 nt, Human
uggggaaucugaagucuuguuuuaaa

SEQ ID NO: 156650 - RNA, 18 nt, Human
ugugaugauaaaugauga

SEQ ID NO: 156651 - RNA, 19 nt, Human
uuaaaugaggccagguauu

SEQ ID NO: 156652 - RNA, 23 nt, Human
uuaaaugaggccagguauugagc

SEQ ID NO: 156653 - RNA, 23 nt, Human
uucauuuuaaaauuggauauugg

SEQ ID NO: 156654 - RNA, 21 nt, Human
uuggauauugggagacuuggc

SEQ ID NO: 156655 - RNA, 21 nt, Human
uugggcuuauuauaucucuga

SEQ ID NO: 156656 - RNA, 22 nt, Human
uugggucagaacuagcacuggc

SEQ ID NO: 156657 - RNA, 22 nt, Human
uuuggcaggcauuugcuuggcu

SEQ ID NO: 156658 - RNA, 20 nt, Human
aacuuauuuccucaaaauua

SEQ ID NO: 156659 - RNA, 24 nt, Human
aagcaaggaaaaacuccgaaguuu

SEQ ID NO: 156660 - RNA, 19 nt, Human
uaagcaaggaaaaacuccg

SEQ ID NO: 156661 - RNA, 21 nt, Human
ugaaauguucagcacaaauaa

SEQ ID NO: 156662 - RNA, 21 nt, Human
agucacuuuuauugggaacca

SEQ ID NO: 156663 - RNA, 21 nt, Human
agucacuuuuauugggaacca

SEQ ID NO: 156664 - RNA, 20 nt, Human
caggagcccagaauaugaga

SEQ ID NO: 156665 - RNA, 20 nt, Human
caggagcccagaauaugaga

SEQ ID NO: 156666 - RNA, 21 nt, Human
ucgcugagagucacuuuuauu

SEQ ID NO: 156667 - RNA, 24 nt, Human
ucuuucacgggauugguuccagga

SEQ ID NO: 156668 - RNA, 24 nt, Human
ucuuucacgggauugguuccagga

SEQ ID NO: 156669 - RNA, 21 nt, Human
aaaauugaaaacacuagaacu

SEQ ID NO: 156670 - RNA, 19 nt, Human
aaacaugaucaguucacag

SEQ ID NO: 156671 - RNA, 23 nt, Human
aaacuuuucuuuuuaaccuccca

SEQ ID NO: 156672 - RNA, 24 nt, Human
aaagugcugggauuacaggcguga

SEQ ID NO: 156673 - RNA, 20 nt, Human
aacacuagaacuucuacgca

SEQ ID NO: 156674 - RNA, 22 nt, Human
aacuacuagauguguuuacacc

SEQ ID NO: 156675 - RNA, 23 nt, Human
aacuucuuuagcugacaggccuu

SEQ ID NO: 156676 - RNA, 19 nt, Human
aagugcugggauuacaggc

SEQ ID NO: 156677 - RNA, 19 nt, Human
aagugcugggauuacaggc

SEQ ID NO: 156678 - RNA, 26 nt, Human
aagugcugggauuacaggcgugagcc

SEQ ID NO: 156679 - RNA, 25 nt, Human
acacucagcaccuauuggaguggcc

SEQ ID NO: 156680 - RNA, 19 nt, Human
acaggugccugccaccacg

SEQ ID NO: 156681 - RNA, 21 nt, Human
acaguggcgcgaucucggcuc

SEQ ID NO: 156682 - RNA, 24 nt, Human
acccaguggaugggcauccagaag

SEQ ID NO: 156683 - RNA, 21 nt, Human
acccauaucaaaacagaggcu

SEQ ID NO: 156684 - RNA, 25 nt, Human
acccgccucagccucccaaagugcu

SEQ ID NO: 156685 - RNA, 19 nt, Human
acggguuucaccguguuag

SEQ ID NO: 156686 - RNA, 23 nt, Human
acggguuucaccguguuagccag

SEQ ID NO: 156687 - RNA, 19 nt, Human
acuacaggugccugccacc

SEQ ID NO: 156688 - RNA, 22 nt, Human
acugcacugcaaauaauauaug

SEQ ID NO: 156689 - RNA, 22 nt, Human
acuuuuauaaacuuuucuuuuu

SEQ ID NO: 156690 - RNA, 23 nt, Human
agaacugacauuucagaacaacu

SEQ ID NO: 156691 - RNA, 18 nt, Human
aggaaggggccuccggcg

SEQ ID NO: 156692 - RNA, 18 nt, Human
aggcagagcgcagggugc

SEQ ID NO: 156693 - RNA, 19 nt, Human
aguagagacggguuucacc

SEQ ID NO: 156694 - RNA, 18 nt, Human
aguagcugggacuacagg

SEQ ID NO: 156695 - RNA, 21 nt, Human
agucuccugccucagccuccc

SEQ ID NO: 156696 - RNA, 25 nt, Human
auaucagaacugacauuucagaaca

SEQ ID NO: 156697 - RNA, 24 nt, Human
auuuuuaguagagacggguuucac

SEQ ID NO: 156698 - RNA, 24 nt, Human
caaagugcugggauuacaggcgug

SEQ ID NO: 156699 - RNA, 22 nt, Human
caacuuucuauuuuguuuaaaa

SEQ ID NO: 156700 - RNA, 21 nt, Human
caagaaauaguaacccaaaug

SEQ ID NO: 156701 - RNA, 21 nt, Human
caagcccaaacuauggagucu

SEQ ID NO: 156702 - RNA, 22 nt, Human
cacauacaucacacucuaugca

SEQ ID NO: 156703 - RNA, 24 nt, Human
cacauacaucacacucuaugcaug

SEQ ID NO: 156704 - RNA, 19 nt, Human
caccaugaaauguucaggg

SEQ ID NO: 156705 - RNA, 23 nt, Human
cacccgccucagccucccaaagu

SEQ ID NO: 156706 - RNA, 19 nt, Human
cacccucucuccugacuuc

SEQ ID NO: 156707 - RNA, 18 nt, Human
caccgucaucucguccug

SEQ ID NO: 156708 - RNA, 18 nt, Human
caccguguuagccaggau

SEQ ID NO: 156709 - RNA, 24 nt, Human
caccguguuagccaggauggucuc

SEQ ID NO: 156710 - RNA, 19 nt, Human
caccuagcuauauccagaa

SEQ ID NO: 156711 - RNA, 22 nt, Human
cacgccagucuccugccucagc

SEQ ID NO: 156712 - RNA, 20 nt, Human
cacucuguacacucagcacc

SEQ ID NO: 156713 - RNA, 22 nt, Human
cacucuguacacucagcaccuu

SEQ ID NO: 156714 - RNA, 19 nt, Human
caggugccugccaccacgc

SEQ ID NO: 156715 - RNA, 21 nt, Human
caggugccugccaccacgccc

SEQ ID NO: 156716 - RNA, 23 nt, Human
caggugccugccaccacgcccgg

SEQ ID NO: 156717 - RNA, 18 nt, Human
caguggcgcgaucucggc

SEQ ID NO: 156718 - RNA, 20 nt, Human
cauacaucuacauauacaca

SEQ ID NO: 156719 - RNA, 22 nt, Human
cauauacacacauguaaguaug

SEQ ID NO: 156720 - RNA, 22 nt, Human
ccaaagugcugggauuacaggc

SEQ ID NO: 156721 - RNA, 22 nt, Human
ccaaagugcugggauuacaggc

SEQ ID NO: 156722 - RNA, 24 nt, Human
ccaaagugcugggauuacaggcgu

SEQ ID NO: 156723 - RNA, 22 nt, Human
ccacaagaaauaguaacccaaa

SEQ ID NO: 156724 - RNA, 20 nt, Human
ccaccacgcccggcuaauuu

SEQ ID NO: 156725 - RNA, 26 nt, Human
ccacccgccucagccucccaaagugc

SEQ ID NO: 156726 - RNA, 18 nt, Human
ccaccgcgccuggccugc

SEQ ID NO: 156727 - RNA, 18 nt, Human
ccaccgcgccuggccugc

SEQ ID NO: 156728 - RNA, 20 nt, Human
ccaccgcgccuggccugcuc

SEQ ID NO: 156729 - RNA, 21 nt, Human
cccaggcuggagcacaguggc

SEQ ID NO: 156730 - RNA, 23 nt, Human
cccgaguagcugggacuacaggu

SEQ ID NO: 156731 - RNA, 24 nt, Human
cccgaguagcugggacuacaggug

SEQ ID NO: 156732 - RNA, 18 nt, Human
cccucggcgagcgcugug

SEQ ID NO: 156733 - RNA, 18 nt, Human
cccuuggaauaacaccgu

SEQ ID NO: 156734 - RNA, 19 nt, Human
ccgccgcucgcaagccccu

SEQ ID NO: 156735 - RNA, 23 nt, Human
ccgccucagccucccaaagugcu

SEQ ID NO: 156736 - RNA, 24 nt, Human
ccucagccgccgcucgcaagcccc

SEQ ID NO: 156737 - RNA, 21 nt, Human
ccuccggcgugcagugagagu

SEQ ID NO: 156738 - RNA, 20 nt, Human
ccugaccucgugauccaccc

SEQ ID NO: 156739 - RNA, 23 nt, Human
ccugccucagccucccgaguagc

SEQ ID NO: 156740 - RNA, 18 nt, Human
ccuguacugcauuguuuu

SEQ ID NO: 156741 - RNA, 19 nt, Human
cgccuccuggguucacgcc

SEQ ID NO: 156742 - RNA, 24 nt, Human
cgugauccacccgccucagccucc

SEQ ID NO: 156743 - RNA, 21 nt, Human
cuacgcacagauaguacuaag

SEQ ID NO: 156744 - RNA, 24 nt, Human
cucagccucccgaguagcugggac

SEQ ID NO: 156745 - RNA, 22 nt, Human
cucauaaacaugaucaguucac

SEQ ID NO: 156746 - RNA, 24 nt, Human
cuccugaccucgugauccacccgc

SEQ ID NO: 156747 - RNA, 20 nt, Human
cucuguugcccaggcuggag

SEQ ID NO: 156748 - RNA, 19 nt, Human
cugccccgccucgggcugc

SEQ ID NO: 156749 - RNA, 23 nt, Human
cugccucagccucccgaguagcu

SEQ ID NO: 156750 - RNA, 23 nt, Human
cuggaguccuccaucgggggcgg

SEQ ID NO: 156751 - RNA, 23 nt, Human
gaagucuuucauggucauuaccu

SEQ ID NO: 156752 - RNA, 22 nt, Human
gaccucgugauccacccgccuc

SEQ ID NO: 156753 - RNA, 24 nt, Human
gaccucgugauccacccgccucag

SEQ ID NO: 156754 - RNA, 21 nt, Human
gagauggagucuugcucuguu

SEQ ID NO: 156755 - RNA, 18 nt, Human
gauuacaggcgugagcca

SEQ ID NO: 156756 - RNA, 22 nt, Human
gauuacaggcgugagccaccgc

SEQ ID NO: 156757 - RNA, 22 nt, Human
gauuacaggcgugagccaccgc

SEQ ID NO: 156758 - RNA, 19 nt, Human
gcagagcgcagggugccca

SEQ ID NO: 156759 - RNA, 19 nt, Human
gccuauucuauacugcacu

SEQ ID NO: 156760 - RNA, 23 nt, Human
gccucagccucccaaagugcugg

SEQ ID NO: 156761 - RNA, 19 nt, Human
gcgcggcgcugcuccggga

SEQ ID NO: 156762 - RNA, 20 nt, Human
gcgcggcgcugcuccgggag

SEQ ID NO: 156763 - RNA, 19 nt, Human
gcggagcgaggaaggggcc

SEQ ID NO: 156764 - RNA, 25 nt, Human
gcucuguugcccaggcuggagcaca

SEQ ID NO: 156765 - RNA, 20 nt, Human
ggacuggggcgcgcggucgc

SEQ ID NO: 156766 - RNA, 23 nt, Human
ggagucuugcucuguugcccagg

SEQ ID NO: 156767 - RNA, 19 nt, Human
gggaaucagagauuauuuu

SEQ ID NO: 156768 - RNA, 20 nt, Human
gggcggagcgaggaaggggc

SEQ ID NO: 156769 - RNA, 21 nt, Human
ggggacuaauagaauccucag

SEQ ID NO: 156770 - RNA, 21 nt, Human
ggggcggggcgggacuggggc

SEQ ID NO: 156771 - RNA, 22 nt, Human
ggggcgguuagcggggcggggc

SEQ ID NO: 156772 - RNA, 20 nt, Human
gggucggggagccggucuuc

SEQ ID NO: 156773 - RNA, 22 nt, Human
ggguuucaccguguuagccagg

SEQ ID NO: 156774 - RNA, 20 nt, Human
ggucucgaucuccugaccuc

SEQ ID NO: 156775 - RNA, 26 nt, Human
guaacccaaauguucaaacuucuuua

SEQ ID NO: 156776 - RNA, 24 nt, Human
gucuugcucuguugcccaggcugg

SEQ ID NO: 156777 - RNA, 24 nt, Human
gugauccacccgccucagccuccc

SEQ ID NO: 156778 - RNA, 20 nt, Human
uaaaaugcuaccauuuuuuc

SEQ ID NO: 156779 - RNA, 18 nt, Human
uaaccucccagcaguccc

SEQ ID NO: 156780 - RNA, 22 nt, Human
uaagaucaggguccaagcgacc

SEQ ID NO: 156781 - RNA, 20 nt, Human
uaagcagacugacaugauug

SEQ ID NO: 156782 - RNA, 27 nt, Human
uaauuuuuuuugcauuuuuaguagaga

SEQ ID NO: 156783 - RNA, 19 nt, Human
uacaagguccgccuccugg

SEQ ID NO: 156784 - RNA, 22 nt, Human
uacaggcgugagccaccgcgcc

SEQ ID NO: 156785 - RNA, 22 nt, Human
uacaggcgugagccaccgcgcc

SEQ ID NO: 156786 - RNA, 23 nt, Human
uacaggcgugagccaccgcgccu

SEQ ID NO: 156787 - RNA, 23 nt, Human
uacaggugccugccaccacgccc

SEQ ID NO: 156788 - RNA, 24 nt, Human
uacauauacacacauguaaguaug

SEQ ID NO: 156789 - RNA, 28 nt, Human
uacauauacacacauguaaguauguaua

SEQ ID NO: 156790 - RNA, 18 nt, Human
uacugcauuguuuucauu

SEQ ID NO: 156791 - RNA, 20 nt, Human
uaguagagacggguuucacc

SEQ ID NO: 156792 - RNA, 23 nt, Human
uaguagagacggguuucaccgug

SEQ ID NO: 156793 - RNA, 24 nt, Human
uaguagagacggguuucaccgugu

SEQ ID NO: 156794 - RNA, 20 nt, Human
uaguggccccagucucacug

SEQ ID NO: 156795 - RNA, 19 nt, Human
uauuacuguagcauuggca

SEQ ID NO: 156796 - RNA, 21 nt, Human
ucaaaauacacuuauuugcaa

SEQ ID NO: 156797 - RNA, 20 nt, Human
ucaauaaaguuugggugggg

SEQ ID NO: 156798 - RNA, 18 nt, Human
ucacccucucuccugacu

SEQ ID NO: 156799 - RNA, 24 nt, Human
ucaccguguuagccaggauggucu

SEQ ID NO: 156800 - RNA, 24 nt, Human
ucacuacaagguccgccuccuggg

SEQ ID NO: 156801 - RNA, 25 nt, Human
ucagcaccuauuggaguggccacag

SEQ ID NO: 156802 - RNA, 23 nt, Human
ucagccucccgaguagcugggac

SEQ ID NO: 156803 - RNA, 21 nt, Human
uccacccgccucagccuccca

SEQ ID NO: 156804 - RNA, 24 nt, Human
ucccaaagugcugggauuacaggc

SEQ ID NO: 156805 - RNA, 23 nt, Human
ucccgaguagcugggacuacagg

SEQ ID NO: 156806 - RNA, 24 nt, Human
ucccgaguagcugggacuacaggu

SEQ ID NO: 156807 - RNA, 19 nt, Human
ucccuuggaauaacaccgu

SEQ ID NO: 156808 - RNA, 24 nt, Human
uccuggguucacgccagucuccug

SEQ ID NO: 156809 - RNA, 19 nt, Human
ucgcaagccccucuggcuc

SEQ ID NO: 156810 - RNA, 24 nt, Human
ucuccugccucagccucccgagua

SEQ ID NO: 156811 - RNA, 18 nt, Human
ucuguugcccaggcugga

SEQ ID NO: 156812 - RNA, 22 nt, Human
ucuugcucuguugcccaggcug

SEQ ID NO: 156813 - RNA, 23 nt, Human
ucuugcucuguugcccaggcugg

SEQ ID NO: 156814 - RNA, 24 nt, Human
ucuugcucuguugcccaggcugga

SEQ ID NO: 156815 - RNA, 20 nt, Human
ugacagcucccauaaaaagc

SEQ ID NO: 156816 - RNA, 23 nt, Human
ugacagcucccauaaaaagcagg

SEQ ID NO: 156817 - RNA, 20 nt, Human
ugcagcucucaggaauagcc

SEQ ID NO: 156818 - RNA, 19 nt, Human
ugcauuguuuucauuaagu

SEQ ID NO: 156819 - RNA, 20 nt, Human
ugcauuguuuucauuaaguu

SEQ ID NO: 156820 - RNA, 20 nt, Human
ugccaguuucucauaaacau

SEQ ID NO: 156821 - RNA, 21 nt, Human
ugcccaggcuggagcacagug

SEQ ID NO: 156822 - RNA, 24 nt, Human
ugcccaggcuggagcacaguggcg

SEQ ID NO: 156823 - RNA, 24 nt, Human
ugccucagccucccgaguagcugg

SEQ ID NO: 156824 - RNA, 22 nt, Human
ugccuggaguccuccaucgggg

SEQ ID NO: 156825 - RNA, 24 nt, Human
ugccuucuuucguuguuuuuaaga

SEQ ID NO: 156826 - RNA, 24 nt, Human
ugcugggauuacaggcgugagcca

SEQ ID NO: 156827 - RNA, 27 nt, Human
ugcuggggugcggggaaagaguguuuu

SEQ ID NO: 156828 - RNA, 24 nt, Human
uggagcacaguggcgcgaucucgg

SEQ ID NO: 156829 - RNA, 24 nt, Human
uggagucuugcucuguugcccagg

SEQ ID NO: 156830 - RNA, 20 nt, Human
uggaugggcauccagaaguc

SEQ ID NO: 156831 - RNA, 18 nt, Human
uggcaauauucccuugga

SEQ ID NO: 156832 - RNA, 24 nt, Human
uggcgcgaucucggcucacuacaa

SEQ ID NO: 156833 - RNA, 21 nt, Human
ugggacuacaggugccugcca

SEQ ID NO: 156834 - RNA, 22 nt, Human
ugggacuacaggugccugccac

SEQ ID NO: 156835 - RNA, 24 nt, Human
ugggacuacaggugccugccacca

SEQ ID NO: 156836 - RNA, 18 nt, Human
ugggauuacaggcgugag

SEQ ID NO: 156837 - RNA, 19 nt, Human
ugggauuacaggcgugagc

SEQ ID NO: 156838 - RNA, 21 nt, Human
ugggauuacaggcgugagcca

SEQ ID NO: 156839 - RNA, 22 nt, Human
ugggauuacaggcgugagccac

SEQ ID NO: 156840 - RNA, 23 nt, Human
ugggauuacaggcgugagccacc

SEQ ID NO: 156841 - RNA, 24 nt, Human
ugggauuacaggcgugagccaccg

SEQ ID NO: 156842 - RNA, 21 nt, Human
uggggcgcgcggucgcgcggg

SEQ ID NO: 156843 - RNA, 21 nt, Human
uggggugcggggaaagagugu

SEQ ID NO: 156844 - RNA, 21 nt, Human
uguaaguauguauaugucacc

SEQ ID NO: 156845 - RNA, 18 nt, Human
uguacugcauuguuuuca

SEQ ID NO: 156846 - RNA, 21 nt, Human
ugucuggggcgguuagcgggg

SEQ ID NO: 156847 - RNA, 20 nt, Human
ugugaggcucagcaggaagg

SEQ ID NO: 156848 - RNA, 18 nt, Human
ugugcauacaucuacaua

SEQ ID NO: 156849 - RNA, 22 nt, Human
ugugugcauacaucuacauaua

SEQ ID NO: 156850 - RNA, 26 nt, Human
ugugugcauacaucuacauauacaca

SEQ ID NO: 156851 - RNA, 18 nt, Human
uuaccuccuaggauauca

SEQ ID NO: 156852 - RNA, 21 nt, Human
uuaguagagacggguuucacc

SEQ ID NO: 156853 - RNA, 23 nt, Human
uuaguagagacggguuucaccgu

SEQ ID NO: 156854 - RNA, 24 nt, Human
uuaguagagacggguuucaccgug

SEQ ID NO: 156855 - RNA, 22 nt, Human
uucauggucauuaccuccuagg

SEQ ID NO: 156856 - RNA, 21 nt, Human
uugcauauuaaaucagggaau

SEQ ID NO: 156857 - RNA, 23 nt, Human
uugugugaaacauauuuauuaca

SEQ ID NO: 156858 - RNA, 24 nt, Human
uuuaguagagacggguuucaccgu

SEQ ID NO: 156859 - RNA, 19 nt, Human
uuucaccguguuagccagg

SEQ ID NO: 156860 - RNA, 18 nt, Human
uuuucaucuguuuccaua

SEQ ID NO: 156861 - RNA, 21 nt, Human
uuuuugcauuuuuaguagaga

SEQ ID NO: 156862 - RNA, 21 nt, Human
uuuuuugcauuuuuaguagag

SEQ ID NO: 156863 - RNA, 24 nt, Human
uuuuuugcauuuuuaguagagacg

SEQ ID NO: 156864 - RNA, 19 nt, Human
ccgggcgcgcggggaaucc

SEQ ID NO: 156865 - RNA, 24 nt, Human
ccuggaagccccgacgccgggcgc

SEQ ID NO: 156866 - RNA, 18 nt, Human
cgccgggcgcgcggggaa

SEQ ID NO: 156867 - RNA, 22 nt, Human
cugcugcgcgccuccccagggc

SEQ ID NO: 156868 - RNA, 22 nt, Human
gccgauucgaaacucagagcuc

SEQ ID NO: 156869 - RNA, 19 nt, Human
ucugcugcgcgccucccca

SEQ ID NO: 156870 - RNA, 21 nt, Human
ugccccgaaucggagccucug

SEQ ID NO: 156871 - RNA, 20 nt, Human
ugguauguggugagaccuuu

SEQ ID NO: 156872 - RNA, 24 nt, Human
ugguauguggugagaccuuuuuga

SEQ ID NO: 156873 - RNA, 18 nt, Human
aaacaaacaaacuacuaa

SEQ ID NO: 156874 - RNA, 19 nt, Human
aacauggugaaaccccguc

SEQ ID NO: 156875 - RNA, 20 nt, Human
aacauggugaaaccccgucu

SEQ ID NO: 156876 - RNA, 21 nt, Human
aacauggugaaaccccgucuc

SEQ ID NO: 156877 - RNA, 24 nt, Human
aagaucacuugaggucaggaguuc

SEQ ID NO: 156878 - RNA, 24 nt, Human
accccgucucuacuaaaaauacaa

SEQ ID NO: 156879 - RNA, 24 nt, Human
acuugaggucaggaguucaagacc

SEQ ID NO: 156880 - RNA, 22 nt, Human
agagguugcaaugagccaagau

SEQ ID NO: 156881 - RNA, 20 nt, Human
agaucacuugaggucaggaa

SEQ ID NO: 156882 - RNA, 22 nt, Human
agaucacuugaggucaggaguu

SEQ ID NO: 156883 - RNA, 23 nt, Human
agaucacuugaggucaggaguuc

SEQ ID NO: 156884 - RNA, 19 nt, Human
agcaauaaggcaaauggaa

SEQ ID NO: 156885 - RNA, 24 nt, Human
agcacuuugggaggcugaggccgg

SEQ ID NO: 156886 - RNA, 22 nt, Human
agccuggucaacauggugaaac

SEQ ID NO: 156887 - RNA, 24 nt, Human
agccuggucaacauggugaaaccc

SEQ ID NO: 156888 - RNA, 22 nt, Human
agcugggcauggugguguaauc

SEQ ID NO: 156889 - RNA, 22 nt, Human
aggaguucaagaccagccuggu

SEQ ID NO: 156890 - RNA, 19 nt, Human
aggcagagguugcaaugag

SEQ ID NO: 156891 - RNA, 24 nt, Human
aggcagagguugcaaugagccaag

SEQ ID NO: 156892 - RNA, 23 nt, Human
agucugggugauaaagugagacu

SEQ ID NO: 156893 - RNA, 24 nt, Human
agucugggugauaaagugagacuc

SEQ ID NO: 156894 - RNA, 21 nt, Human
aguggcucacgccuguaaucc

SEQ ID NO: 156895 - RNA, 23 nt, Human
aguggcucacgccuguaauccag

SEQ ID NO: 156896 - RNA, 24 nt, Human
auaaagugagacucagucucaaaa

SEQ ID NO: 156897 - RNA, 24 nt, Human
auagugccacugcacgccagucug

SEQ ID NO: 156898 - RNA, 19 nt, Human
caaacaaacaaacuacuaa

SEQ ID NO: 156899 - RNA, 20 nt, Human
caacauggugaaaccccguc

SEQ ID NO: 156900 - RNA, 22 nt, Human
caacauggugaaaccccgucuc

SEQ ID NO: 156901 - RNA, 24 nt, Human
caacauggugaaaccccgucucua

SEQ ID NO: 156902 - RNA, 24 nt, Human
caagaccagccuggucaacauggu

SEQ ID NO: 156903 - RNA, 20 nt, Human
cacaauuucaccucaguucc

SEQ ID NO: 156904 - RNA, 25 nt, Human
caccucaguuccaugugucagcagc

SEQ ID NO: 156905 - RNA, 20 nt, Human
cacugcacgccagucugggu

SEQ ID NO: 156906 - RNA, 23 nt, Human
cacugcacgccagucugggugau

SEQ ID NO: 156907 - RNA, 23 nt, Human
cacuugaggucaggaguucaaga

SEQ ID NO: 156908 - RNA, 25 nt, Human
cagcacuuugggaggcugaggccgg

SEQ ID NO: 156909 - RNA, 20 nt, Human
ccacugcacgccagucuggg

SEQ ID NO: 156910 - RNA, 20 nt, Human
ccacugcacgccagucuggg

SEQ ID NO: 156911 - RNA, 20 nt, Human
ccacugcacgccagucuggg

SEQ ID NO: 156912 - RNA, 23 nt, Human
ccacugcacgccagucuggguga

SEQ ID NO: 156913 - RNA, 24 nt, Human
ccacugcacgccagucugggugau

SEQ ID NO: 156914 - RNA, 25 nt, Human
ccugggaggcagagguugcaaugag

SEQ ID NO: 156915 - RNA, 23 nt, Human
ccuggucaacauggugaaacccc

SEQ ID NO: 156916 - RNA, 24 nt, Human
ccuggucaacauggugaaaccccg

SEQ ID NO: 156917 - RNA, 21 nt, Human
ccuguaauccagcacuuuggg

SEQ ID NO: 156918 - RNA, 26 nt, Human
cgccuguaauccagcacuuugggagg

SEQ ID NO: 156919 - RNA, 27 nt, Human
cguuaugaaaucuguaaaaucauggag

SEQ ID NO: 156920 - RNA, 23 nt, Human
cuacuugggaggcugaccuggga

SEQ ID NO: 156921 - RNA, 21 nt, Human
cucaaaaacaaacaaacaaac

SEQ ID NO: 156922 - RNA, 23 nt, Human
cucacgccuguaauccagcacuu

SEQ ID NO: 156923 - RNA, 21 nt, Human
cugggugauaaagugagacuc

SEQ ID NO: 156924 - RNA, 24 nt, Human
gaagaucacuugaggucaggaguu

SEQ ID NO: 156925 - RNA, 18 nt, Human
gagguugcaaugagccaa

SEQ ID NO: 156926 - RNA, 18 nt, Human
gaucacuugaggucagga

SEQ ID NO: 156927 - RNA, 23 nt, Human
gaucacuugaggucaggaguuca

SEQ ID NO: 156928 - RNA, 24 nt, Human
gaucacuugaggucaggaguucaa

SEQ ID NO: 156929 - RNA, 24 nt, Human
gccacugcacgccagucuggguga

SEQ ID NO: 156930 - RNA, 19 nt, Human
gcucuccugugccgugcag

SEQ ID NO: 156931 - RNA, 21 nt, Human
ggagcuccuugcacuaugcuu

SEQ ID NO: 156932 - RNA, 23 nt, Human
gggcauggugguguaaucccagc

SEQ ID NO: 156933 - RNA, 20 nt, Human
guagcugggcaugguggugu

SEQ ID NO: 156934 - RNA, 18 nt, Human
uaaugcuuuuguaauguu

SEQ ID NO: 156935 - RNA, 23 nt, Human
uacuaaaaauacaaguauuuuua

SEQ ID NO: 156936 - RNA, 24 nt, Human
ucacgccuguaauccagcacuuug

SEQ ID NO: 156937 - RNA, 23 nt, Human
ucacuugaggucaggaguucaag

SEQ ID NO: 156938 - RNA, 18 nt, Human
ucucuacuaaaaauacaa

SEQ ID NO: 156939 - RNA, 23 nt, Human
ugaccugggaggcagagguugca

SEQ ID NO: 156940 - RNA, 22 nt, Human
ugcaaugagccaagauagugcc

SEQ ID NO: 156941 - RNA, 23 nt, Human
uggcucacgccuguaauccagca

SEQ ID NO: 156942 - RNA, 18 nt, Human
uggcucaguggcucacgc

SEQ ID NO: 156943 - RNA, 24 nt, Human
uggcucaguggcucacgccuguaa

SEQ ID NO: 156944 - RNA, 19 nt, Human
ugggaggcugaccugggag

SEQ ID NO: 156945 - RNA, 24 nt, Human
ugggaggcugaggccggaagauca

SEQ ID NO: 156946 - RNA, 21 nt, Human
ugguguaaucccagcuacuug

SEQ ID NO: 156947 - RNA, 22 nt, Human
ugguguaaucccagcuacuugg

SEQ ID NO: 156948 - RNA, 20 nt, Human
uguaaucccagcuacuuggg

SEQ ID NO: 156949 - RNA, 25 nt, Human
uugggaggcugaggccggaagauca

SEQ ID NO: 156950 - RNA, 27 nt, Human
uuuuuaguagcugggcaugguggugua

SEQ ID NO: 156951 - RNA, 30 nt, Human
aaaaaaaaaaaaaaagaaaaguaaaagaag

SEQ ID NO: 156952 - RNA, 18 nt, Human
aaagugcugggauuacag

SEQ ID NO: 156953 - RNA, 20 nt, Human
aaagugcugggauuacaggc

SEQ ID NO: 156954 - RNA, 20 nt, Human
aaagugcugggauuacaggc

SEQ ID NO: 156955 - RNA, 23 nt, Human
aaagugcugggauuacaggcgug

SEQ ID NO: 156956 - RNA, 24 nt, Human
aaagugcugggauuacaggcguga

SEQ ID NO: 156957 - RNA, 20 nt, Human
aaagugcugggauugcaggu

SEQ ID NO: 156958 - RNA, 24 nt, Human
aaagugcugggauugcagguguga

SEQ ID NO: 156959 - RNA, 24 nt, Human
aacagcgcgagacucugucucagg

SEQ ID NO: 156960 - RNA, 20 nt, Human
aacauggugaaacuccgucu

SEQ ID NO: 156961 - RNA, 21 nt, Human
aacauggugaaacuccgucuu

SEQ ID NO: 156962 - RNA, 21 nt, Human
aagagacaucccaaagccaga

SEQ ID NO: 156963 - RNA, 22 nt, Human
aagagacaucccaaagccagaa

SEQ ID NO: 156964 - RNA, 24 nt, Human
aagcaauccuccaucuuggccucc

SEQ ID NO: 156965 - RNA, 26 nt, Human
aaggcugccccugcccccgcagaccc

SEQ ID NO: 156966 - RNA, 24 nt, Human
aagugauccauccgccuuggccuc

SEQ ID NO: 156967 - RNA, 25 nt, Human
aagugauccucccgccugugccucu

SEQ ID NO: 156968 - RNA, 19 nt, Human
aagugcugggauuacaggc

SEQ ID NO: 156969 - RNA, 19 nt, Human
aagugcugggauuacaggc

SEQ ID NO: 156970 - RNA, 18 nt, Human
aagugcugggauugcagg

SEQ ID NO: 156971 - RNA, 19 nt, Human
aagugcugggauugcaggu

SEQ ID NO: 156972 - RNA, 19 nt, Human
aaucauagcucacugcaac

SEQ ID NO: 156973 - RNA, 24 nt, Human
aaucauuugaacccaggaggccga

SEQ ID NO: 156974 - RNA, 24 nt, Human
acagaaagugaaaagaaggaucag

SEQ ID NO: 156975 - RNA, 24 nt, Human
acagcgcgagacucugucucagga

SEQ ID NO: 156976 - RNA, 21 nt, Human
acaggugcccaccaccacgcc

SEQ ID NO: 156977 - RNA, 19 nt, Human
acauggugaaacuccgucu

SEQ ID NO: 156978 - RNA, 21 nt, Human
accacaaccucccaggcucaa

SEQ ID NO: 156979 - RNA, 22 nt, Human
accauguuagccaggcuggucu

SEQ ID NO: 156980 - RNA, 18 nt, Human
accauguugcucaggcug

SEQ ID NO: 156981 - RNA, 20 nt, Human
accauguugcucaggcuggu

SEQ ID NO: 156982 - RNA, 19 nt, Human
acccaaagaauaaaaaaug

SEQ ID NO: 156983 - RNA, 23 nt, Human
acccccaccccccauugucccac

SEQ ID NO: 156984 - RNA, 22 nt, Human
acccgaaccccccagcacacac

SEQ ID NO: 156985 - RNA, 24 nt, Human
acccuauuuccaaauaaggucaca

SEQ ID NO: 156986 - RNA, 19 nt, Human
acccucggacgccagggag

SEQ ID NO: 156987 - RNA, 22 nt, Human
accgcaaccuccgccucccagg

SEQ ID NO: 156988 - RNA, 24 nt, Human
acgccacugcacuccagccugggc

SEQ ID NO: 156989 - RNA, 24 nt, Human
acgccacugcacuccagccugggc

SEQ ID NO: 156990 - RNA, 21 nt, Human
acuauaggcgcaugccacaau

SEQ ID NO: 156991 - RNA, 24 nt, Human
acugcacucaggcugcucugggcu

SEQ ID NO: 156992 - RNA, 24 nt, Human
acugcacuccagccugggcaacag

SEQ ID NO: 156993 - RNA, 22 nt, Human
acuguccacccccaccccccau

SEQ ID NO: 156994 - RNA, 19 nt, Human
agaagggaguuccaggucu

SEQ ID NO: 156995 - RNA, 19 nt, Human
agacaccagugcgucgugg

SEQ ID NO: 156996 - RNA, 22 nt, Human
agagaugcuggcagggcccagg

SEQ ID NO: 156997 - RNA, 19 nt, Human
agaggagggaaggcgaggg

SEQ ID NO: 156998 - RNA, 24 nt, Human
agagugcugagauuauaggcguga

SEQ ID NO: 156999 - RNA, 24 nt, Human
agauuauaggcgugagccacugca

SEQ ID NO: 157000 - RNA, 22 nt, Human
agccaccacacccacuaucucu

SEQ ID NO: 157001 - RNA, 21 nt, Human
agccccagcuucuggagccga

SEQ ID NO: 157002 - RNA, 22 nt, Human
agccuggccaacauggugaaac

SEQ ID NO: 157003 - RNA, 24 nt, Human
agccuggccaacauggugaaacuc

SEQ ID NO: 157004 - RNA, 24 nt, Human
agccugggcaacagcgcgagacuc

SEQ ID NO: 157005 - RNA, 28 nt, Human
agcucacugcaaccacaaccucccaggg

SEQ ID NO: 157006 - RNA, 18 nt, Human
agcucagcgccccgggcc

SEQ ID NO: 157007 - RNA, 22 nt, Human
aggaagcagaguuugauccuga

SEQ ID NO: 157008 - RNA, 18 nt, Human
aggaaggacgugaagugg

SEQ ID NO: 157009 - RNA, 20 nt, Human
aggacaccacccacacugga

SEQ ID NO: 157010 - RNA, 27 nt, Human
aggaggccgagcuugcagugagccgag

SEQ ID NO: 157011 - RNA, 21 nt, Human
aggaguuggagaccagccugg

SEQ ID NO: 157012 - RNA, 23 nt, Human
aggauuucaccauguuagccagg

SEQ ID NO: 157013 - RNA, 19 nt, Human
aggcaaauccguagaguug

SEQ ID NO: 157014 - RNA, 18 nt, Human
aggcaggagaaucauuug

SEQ ID NO: 157015 - RNA, 23 nt, Human
aggcaggagaaucauuugaaccc

SEQ ID NO: 157016 - RNA, 24 nt, Human
aggccgagcuugcagugagccgag

SEQ ID NO: 157017 - RNA, 25 nt, Human
aggccgagcuugcagugagccgaga

SEQ ID NO: 157018 - RNA, 20 nt, Human
aggcggaucacuugagggca

SEQ ID NO: 157019 - RNA, 19 nt, Human
aggcgugagccacugcacc

SEQ ID NO: 157020 - RNA, 19 nt, Human
aggcgugagccacugcacc

SEQ ID NO: 157021 - RNA, 23 nt, Human
aggcucaagugauccucccgccu

SEQ ID NO: 157022 - RNA, 20 nt, Human
aggcugaggcaggagaauca

SEQ ID NO: 157023 - RNA, 24 nt, Human
aggcugaggcaggagaaucauuug

SEQ ID NO: 157024 - RNA, 21 nt, Human
aggcugcucugggcuguggcc

SEQ ID NO: 157025 - RNA, 25 nt, Human
aggcuggagugcaguggcaccaucu

SEQ ID NO: 157026 - RNA, 21 nt, Human
agggaguuccaggucugcagc

SEQ ID NO: 157027 - RNA, 19 nt, Human
agguugcgguggguguggu

SEQ ID NO: 157028 - RNA, 18 nt, Human
aguagcugggauuacagg

SEQ ID NO: 157029 - RNA, 25 nt, Human
aguagcugggauuacaggcgccagc

SEQ ID NO: 157030 - RNA, 20 nt, Human
aguccaguggcgcaaucucg

SEQ ID NO: 157031 - RNA, 24 nt, Human
aguccaguggcgcaaucucggcuc

SEQ ID NO: 157032 - RNA, 21 nt, Human
agugcagugguacaaucauag

SEQ ID NO: 157033 - RNA, 23 nt, Human
agugcagugguacaaucauagcu

SEQ ID NO: 157034 - RNA, 22 nt, Human
agugcugagauuauaggcguga

SEQ ID NO: 157035 - RNA, 18 nt, Human
agugcugggauuacaggc

SEQ ID NO: 157036 - RNA, 18 nt, Human
agugcugggauuacaggc

SEQ ID NO: 157037 - RNA, 18 nt, Human
aguggcugggacuauagg

SEQ ID NO: 157038 - RNA, 19 nt, Human
aguggcugggacuauaggc

SEQ ID NO: 157039 - RNA, 24 nt, Human
auagcucacugcaaccacaaccuc

SEQ ID NO: 157040 - RNA, 24 nt, Human
aucacgccacugcacuccagccug

SEQ ID NO: 157041 - RNA, 22 nt, Human
aucuuaugaggacaccacccac

SEQ ID NO: 157042 - RNA, 24 nt, Human
augaucugcccaccucggccuucc

SEQ ID NO: 157043 - RNA, 18 nt, Human
augggguuuuaccauguu

SEQ ID NO: 157044 - RNA, 19 nt, Human
augggguuuuaccauguug

SEQ ID NO: 157045 - RNA, 18 nt, Human
auuaauuuagagacaggc

SEQ ID NO: 157046 - RNA, 22 nt, Human
auuacaggcgccagccaccaag

SEQ ID NO: 157047 - RNA, 24 nt, Human
auuuuuguauuuuugguagagaug

SEQ ID NO: 157048 - RNA, 24 nt, Human
caaagugcugggauugcaggugug

SEQ ID NO: 157049 - RNA, 21 nt, Human
caacauggugaaacuccgucu

SEQ ID NO: 157050 - RNA, 23 nt, Human
caacauggugaaacuccgucuug

SEQ ID NO: 157051 - RNA, 24 nt, Human
caaccacaaccucccaggcucaag

SEQ ID NO: 157052 - RNA, 20 nt, Human
caaccaggcucugggccugg

SEQ ID NO: 157053 - RNA, 20 nt, Human
caacguaaagucaggagaac

SEQ ID NO: 157054 - RNA, 19 nt, Human
caagagacaucccaaagcc

SEQ ID NO: 157055 - RNA, 25 nt, Human
caagagacaucccaaagccagaagc

SEQ ID NO: 157056 - RNA, 20 nt, Human
caagcgauccuucugccuca

SEQ ID NO: 157057 - RNA, 21 nt, Human
caagcgauccuucugccucag

SEQ ID NO: 157058 - RNA, 24 nt, Human
caaggucuugcucuguugcccagg

SEQ ID NO: 157059 - RNA, 19 nt, Human
caagugauccucccgccug

SEQ ID NO: 157060 - RNA, 23 nt, Human
cacacaaaaaggagugguguuuc

SEQ ID NO: 157061 - RNA, 23 nt, Human
cacacacaaaaaggagugguguu

SEQ ID NO: 157062 - RNA, 19 nt, Human
cacacacacaaaaaggagu

SEQ ID NO: 157063 - RNA, 21 nt, Human
cacacacuguccacccccacc

SEQ ID NO: 157064 - RNA, 25 nt, Human
cacacacuguccacccccacccccc

SEQ ID NO: 157065 - RNA, 19 nt, Human
cacaccccgacucccaccc

SEQ ID NO: 157066 - RNA, 24 nt, Human
caccaagcccagcuaauuuuugua

SEQ ID NO: 157067 - RNA, 24 nt, Human
caccacgccuggcuaauuuuugua

SEQ ID NO: 157068 - RNA, 21 nt, Human
caccauguuagccaggcuggu

SEQ ID NO: 157069 - RNA, 23 nt, Human
caccauguuagccaggcuggucu

SEQ ID NO: 157070 - RNA, 24 nt, Human
caccauguuagccaggcuggucuu

SEQ ID NO: 157071 - RNA, 27 nt, Human
caccauguuagccaggcuggucuugaa

SEQ ID NO: 157072 - RNA, 21 nt, Human
caccccccauugucccaccuu

SEQ ID NO: 157073 - RNA, 22 nt, Human
cacccuucuccaaagugaccuc

SEQ ID NO: 157074 - RNA, 20 nt, Human
cacuccagccugggcaacag

SEQ ID NO: 157075 - RNA, 21 nt, Human
cacuccagccugggcaacagc

SEQ ID NO: 157076 - RNA, 21 nt, Human
cacucccaucucugccucugc

SEQ ID NO: 157077 - RNA, 21 nt, Human
cacugcaaccacaaccuccca

SEQ ID NO: 157078 - RNA, 22 nt, Human
cacugcaaccacaaccucccag

SEQ ID NO: 157079 - RNA, 18 nt, Human
cacugcaaccucugccuc

SEQ ID NO: 157080 - RNA, 21 nt, Human
cacugcaaccucugccuccca

SEQ ID NO: 157081 - RNA, 18 nt, Human
cacugcacuccagccugg

SEQ ID NO: 157082 - RNA, 19 nt, Human
cacugcacuccagccuggg

SEQ ID NO: 157083 - RNA, 21 nt, Human
cacugcacuccagccugggca

SEQ ID NO: 157084 - RNA, 23 nt, Human
cacugcacuccagccugggcaac

SEQ ID NO: 157085 - RNA, 24 nt, Human
cacugcacuccagccugggcaaca

SEQ ID NO: 157086 - RNA, 24 nt, Human
cagagugcugagauuauaggcgug

SEQ ID NO: 157087 - RNA, 21 nt, Human
cagcccacucgcccgggaacu

SEQ ID NO: 157088 - RNA, 22 nt, Human
cagcccacucgcccgggaacug

SEQ ID NO: 157089 - RNA, 18 nt, Human
cagccggugccugacgug

SEQ ID NO: 157090 - RNA, 19 nt, Human
cagcgcgagacucugucuc

SEQ ID NO: 157091 - RNA, 24 nt, Human
cagcuacuugggaggcugaggcag

SEQ ID NO: 157092 - RNA, 19 nt, Human
cagcuccagccccaucuca

SEQ ID NO: 157093 - RNA, 19 nt, Human
cagggagggcuccccuggg

SEQ ID NO: 157094 - RNA, 19 nt, Human
cagggcccaggaagcagag

SEQ ID NO: 157095 - RNA, 19 nt, Human
caggugcccaccaccacgc

SEQ ID NO: 157096 - RNA, 22 nt, Human
caggugugagccaccacaccca

SEQ ID NO: 157097 - RNA, 20 nt, Human
caguauacugggggcagggc

SEQ ID NO: 157098 - RNA, 20 nt, Human
cagucuccugaguagcuggg

SEQ ID NO: 157099 - RNA, 22 nt, Human
caguucugcaggccagaagucc

SEQ ID NO: 157100 - RNA, 18 nt, Human
cauagcucacugcaacca

SEQ ID NO: 157101 - RNA, 22 nt, Human
caugccacaaugccugguucau

SEQ ID NO: 157102 - RNA, 25 nt, Human
caugccaggcagcuuaaaacaauga

SEQ ID NO: 157103 - RNA, 23 nt, Human
cauguuagccaggcuggucuuga

SEQ ID NO: 157104 - RNA, 24 nt, Human
cauguuagccaggcuggucuugaa

SEQ ID NO: 157105 - RNA, 23 nt, Human
cauguugcucaggcugguguuga

SEQ ID NO: 157106 - RNA, 24 nt, Human
cauguugcucaggcugguguugaa

SEQ ID NO: 157107 - RNA, 22 nt, Human
ccaaagaauaaaaaaugggacc

SEQ ID NO: 157108 - RNA, 21 nt, Human
ccaaagugcugggauugcagg

SEQ ID NO: 157109 - RNA, 21 nt, Human
ccaaagugcugggauugcagg

SEQ ID NO: 157110 - RNA, 24 nt, Human
ccaaagugcugggauugcaggugu

SEQ ID NO: 157111 - RNA, 19 nt, Human
ccacacccacuaucucucg

SEQ ID NO: 157112 - RNA, 20 nt, Human
ccacugcacuccagccuggg

SEQ ID NO: 157113 - RNA, 21 nt, Human
ccacugcacuccagccugggc

SEQ ID NO: 157114 - RNA, 23 nt, Human
ccacugcacuccagccugggcaa

SEQ ID NO: 157115 - RNA, 24 nt, Human
ccacugcacuccagccugggcaac

SEQ ID NO: 157116 - RNA, 20 nt, Human
ccacugccgccccccaccgc

SEQ ID NO: 157117 - RNA, 21 nt, Human
ccagaagcuggugggcaugag

SEQ ID NO: 157118 - RNA, 22 nt, Human
ccagagugcugagauuauaggc

SEQ ID NO: 157119 - RNA, 22 nt, Human
ccagagugcugagauuauaggc

SEQ ID NO: 157120 - RNA, 24 nt, Human
ccagagugcugagauuauaggcgu

SEQ ID NO: 157121 - RNA, 20 nt, Human
ccagggucaaggugguggca

SEQ ID NO: 157122 - RNA, 23 nt, Human
cccaaagaauaaaaaaugggacc

SEQ ID NO: 157123 - RNA, 24 nt, Human
cccacccacacaugcucagccaug

SEQ ID NO: 157124 - RNA, 24 nt, Human
cccagaacaggcaaauccguagag

SEQ ID NO: 157125 - RNA, 22 nt, Human
cccagcacacacuguccacccc

SEQ ID NO: 157126 - RNA, 24 nt, Human
cccagcacacacuguccaccccca

SEQ ID NO: 157127 - RNA, 27 nt, Human
cccagccccagcuccagccccaucuca

SEQ ID NO: 157128 - RNA, 24 nt, Human
cccagcuucuggagccgaggcgga

SEQ ID NO: 157129 - RNA, 22 nt, Human
cccaggcucaagugauccuccc

SEQ ID NO: 157130 - RNA, 19 nt, Human
cccagguucaagcgauccu

SEQ ID NO: 157131 - RNA, 20 nt, Human
cccagguucaagcgauccuu

SEQ ID NO: 157132 - RNA, 20 nt, Human
cccagguucaagcgauucuc

SEQ ID NO: 157133 - RNA, 23 nt, Human
cccagguucaagcgauucuccug

SEQ ID NO: 157134 - RNA, 21 nt, Human
cccagugggauggaaggaccc

SEQ ID NO: 157135 - RNA, 24 nt, Human
ccccaccgcggccugccacacccc

SEQ ID NO: 157136 - RNA, 21 nt, Human
ccccagccccagcuccagccc

SEQ ID NO: 157137 - RNA, 21 nt, Human
ccccagccccagcuccagccu

SEQ ID NO: 157138 - RNA, 21 nt, Human
cccccagcacacacuguccac

SEQ ID NO: 157139 - RNA, 25 nt, Human
cccccgcagacccaccagggccgcu

SEQ ID NO: 157140 - RNA, 19 nt, Human
cccccggcccggcccgguc

SEQ ID NO: 157141 - RNA, 18 nt, Human
ccccgggccuccuggccc

SEQ ID NO: 157142 - RNA, 19 nt, Human
cccgcacccccggcccggc

SEQ ID NO: 157143 - RNA, 21 nt, Human
cccgcacccccggcccggccc

SEQ ID NO: 157144 - RNA, 19 nt, Human
cccgcagacccaccagggc

SEQ ID NO: 157145 - RNA, 22 nt, Human
cccgccgcugccccacagaucc

SEQ ID NO: 157146 - RNA, 23 nt, Human
cccggcccggcccggucccugac

SEQ ID NO: 157147 - RNA, 18 nt, Human
cccggggcccgggugagu

SEQ ID NO: 157148 - RNA, 21 nt, Human
cccgucccaggccugucuccu

SEQ ID NO: 157149 - RNA, 21 nt, Human
cccgugcaaggcuuacaaccg

SEQ ID NO: 157150 - RNA, 19 nt, Human
cccucagccuccugggcag

SEQ ID NO: 157151 - RNA, 18 nt, Human
cccucggacgccagggag

SEQ ID NO: 157152 - RNA, 19 nt, Human
cccugagccccagcuucug

SEQ ID NO: 157153 - RNA, 20 nt, Human
cccugcccccgcagacccac

SEQ ID NO: 157154 - RNA, 21 nt, Human
ccgcaaccuccgccucccagg

SEQ ID NO: 157155 - RNA, 23 nt, Human
ccgcaaccuccgccucccagguu

SEQ ID NO: 157156 - RNA, 24 nt, Human
ccgcaaccuccgccucccagguuc

SEQ ID NO: 157157 - RNA, 18 nt, Human
ccgccccccaccgcggcc

SEQ ID NO: 157158 - RNA, 21 nt, Human
ccgccuuggccucuuaaagug

SEQ ID NO: 157159 - RNA, 20 nt, Human
ccggacccugagccccagcc

SEQ ID NO: 157160 - RNA, 20 nt, Human
ccgggucgagccugcgcccg

SEQ ID NO: 157161 - RNA, 21 nt, Human
ccgggucgagccugcgcccgc

SEQ ID NO: 157162 - RNA, 23 nt, Human
ccgggucgagccugcgcccgccg

SEQ ID NO: 157163 - RNA, 24 nt, Human
ccgugcucuccgggagugcguggu

SEQ ID NO: 157164 - RNA, 24 nt, Human
ccucccagguucaagcgauccuuc

SEQ ID NO: 157165 - RNA, 24 nt, Human
ccucccagguucaagcgauucucc

SEQ ID NO: 157166 - RNA, 20 nt, Human
ccucuggaggcugugaggga

SEQ ID NO: 157167 - RNA, 20 nt, Human
ccugacucagccuccccagu

SEQ ID NO: 157168 - RNA, 23 nt, Human
ccugaguagcugggauuacaggc

SEQ ID NO: 157169 - RNA, 24 nt, Human
ccugaguagcugggauuacaggcg

SEQ ID NO: 157170 - RNA, 23 nt, Human
ccugccacaccccgacucccacc

SEQ ID NO: 157171 - RNA, 18 nt, Human
ccugcgcccgccgcugcc

SEQ ID NO: 157172 - RNA, 23 nt, Human
ccuggccaacauggugaaacucc

SEQ ID NO: 157173 - RNA, 24 nt, Human
ccuggccaacauggugaaacuccg

SEQ ID NO: 157174 - RNA, 18 nt, Human
ccuggcccgggucgagcc

SEQ ID NO: 157175 - RNA, 18 nt, Human
ccuggcccgggucgagcc

SEQ ID NO: 157176 - RNA, 24 nt, Human
ccuggccucagaugaucugcccac

SEQ ID NO: 157177 - RNA, 21 nt, Human
ccuggcuucaagcaauccucc

SEQ ID NO: 157178 - RNA, 22 nt, Human
ccugggcucaagugauccaucc

SEQ ID NO: 157179 - RNA, 22 nt, Human
ccugggcucaagugauccaucc

SEQ ID NO: 157180 - RNA, 18 nt, Human
ccuguuaucccagcuacu

SEQ ID NO: 157181 - RNA, 21 nt, Human
cgaaggggacgggguugagag

SEQ ID NO: 157182 - RNA, 20 nt, Human
cgagccagagaugcuggcag

SEQ ID NO: 157183 - RNA, 24 nt, Human
cgccacugcacuccagccugggca

SEQ ID NO: 157184 - RNA, 19 nt, Human
cgcccgggaacugugcgcc

SEQ ID NO: 157185 - RNA, 22 nt, Human
cgccgcugccccacagaucccc

SEQ ID NO: 157186 - RNA, 18 nt, Human
cgccggacccugagcccc

SEQ ID NO: 157187 - RNA, 24 nt, Human
cgccgguggagauaaaccaggaag

SEQ ID NO: 157188 - RNA, 24 nt, Human
cgccuguuaucccagcuacuuggg

SEQ ID NO: 157189 - RNA, 22 nt, Human
cgcggagccacugccgcccccc

SEQ ID NO: 157190 - RNA, 21 nt, Human
cgcucuuucgcccaggcugga

SEQ ID NO: 157191 - RNA, 20 nt, Human
cggcccggcccggucccuga

SEQ ID NO: 157192 - RNA, 21 nt, Human
cgggagugcguggugggcagg

SEQ ID NO: 157193 - RNA, 20 nt, Human
cucaagugauccauccgccu

SEQ ID NO: 157194 - RNA, 24 nt, Human
cucaagugauccauccgccuuggc

SEQ ID NO: 157195 - RNA, 20 nt, Human
cucaagugauccucccgccu

SEQ ID NO: 157196 - RNA, 24 nt, Human
cucaagugauccucccgccugugc

SEQ ID NO: 157197 - RNA, 18 nt, Human
cucacaguucugcaggcc

SEQ ID NO: 157198 - RNA, 24 nt, Human
cucacugcaaccacaaccucccag

SEQ ID NO: 157199 - RNA, 24 nt, Human
cucacugcaaccucugccucccag

SEQ ID NO: 157200 - RNA, 24 nt, Human
cucacugcaaccucugccucccag

SEQ ID NO: 157201 - RNA, 24 nt, Human
cucagucuccugaguagcugggau

SEQ ID NO: 157202 - RNA, 19 nt, Human
cucccacccacacaugcuc

SEQ ID NO: 157203 - RNA, 25 nt, Human
cucccaggcucaagugauccucccg

SEQ ID NO: 157204 - RNA, 21 nt, Human
cucgccggacccugagcccca

SEQ ID NO: 157205 - RNA, 20 nt, Human
cucuguugcccaggcuggag

SEQ ID NO: 157206 - RNA, 18 nt, Human
cucuuucgcccaggcugg

SEQ ID NO: 157207 - RNA, 20 nt, Human
cucuuucgcccaggcuggag

SEQ ID NO: 157208 - RNA, 21 nt, Human
cugacucccacccacacaugc

SEQ ID NO: 157209 - RNA, 22 nt, Human
cugaguagcugggauuacaggc

SEQ ID NO: 157210 - RNA, 18 nt, Human
cugcaaccacaaccuccc

SEQ ID NO: 157211 - RNA, 23 nt, Human
cugcaaccacaaccucccaggcu

SEQ ID NO: 157212 - RNA, 23 nt, Human
cugcaaccucugccucccagguu

SEQ ID NO: 157213 - RNA, 24 nt, Human
cugcaaccucugccucccagguuc

SEQ ID NO: 157214 - RNA, 18 nt, Human
cugcccaccucggccuuc

SEQ ID NO: 157215 - RNA, 21 nt, Human
cugccccacagauccccagcc

SEQ ID NO: 157216 - RNA, 23 nt, Human
cugccucagucuccugaguagcu

SEQ ID NO: 157217 - RNA, 22 nt, Human
cuggauguaaggcccacccuuc

SEQ ID NO: 157218 - RNA, 21 nt, Human
cugugcgccggacccgcgugc

SEQ ID NO: 157219 - RNA, 19 nt, Human
cuguugcccaggcuggagu

SEQ ID NO: 157220 - RNA, 19 nt, Human
cuugcagugagccgagauc

SEQ ID NO: 157221 - RNA, 23 nt, Human
gaaaagaaggaucagccugcagg

SEQ ID NO: 157222 - RNA, 20 nt, Human
gaacuugcagugagucuccg

SEQ ID NO: 157223 - RNA, 19 nt, Human
gaaggcugccccugccccc

SEQ ID NO: 157224 - RNA, 18 nt, Human
gaagggaaguggcugggg

SEQ ID NO: 157225 - RNA, 20 nt, Human
gacagaaagugaaaagaagg

SEQ ID NO: 157226 - RNA, 20 nt, Human
gacccaguacagccuucccc

SEQ ID NO: 157227 - RNA, 22 nt, Human
gacccaguacagccuuccccac

SEQ ID NO: 157228 - RNA, 18 nt, Human
gacucugucucaggaaaa

SEQ ID NO: 157229 - RNA, 23 nt, Human
gagaaucauuugaacccaggagg

SEQ ID NO: 157230 - RNA, 21 nt, Human
gagaauggccaaccaggcucu

SEQ ID NO: 157231 - RNA, 23 nt, Human
gagaucacgccacugcacuccag

SEQ ID NO: 157232 - RNA, 18 nt, Human
gagaugggguuuuaccau

SEQ ID NO: 157233 - RNA, 25 nt, Human
gagccaccacacccacuaucucucg

SEQ ID NO: 157234 - RNA, 19 nt, Human
gagccacugccgcccccca

SEQ ID NO: 157235 - RNA, 21 nt, Human
gagccgaggcggacgagcaga

SEQ ID NO: 157236 - RNA, 19 nt, Human
gagcucagcgccccgggcc

SEQ ID NO: 157237 - RNA, 18 nt, Human
gagcuugcagugagccga

SEQ ID NO: 157238 - RNA, 22 nt, Human
gaggauggggugcccucagccu

SEQ ID NO: 157239 - RNA, 24 nt, Human
gaggauggggugcccucagccucc

SEQ ID NO: 157240 - RNA, 25 nt, Human
gagggugcgggguugagggcgggag

SEQ ID NO: 157241 - RNA, 21 nt, Human
gaucacuugagggcaggaguu

SEQ ID NO: 157242 - RNA, 24 nt, Human
gaucacuugagggcaggaguugga

SEQ ID NO: 157243 - RNA, 20 nt, Human
gaugagguugcggugggugu

SEQ ID NO: 157244 - RNA, 23 nt, Human
gauggguuuuggggagcagaguu

SEQ ID NO: 157245 - RNA, 18 nt, Human
gauuacaggcgccagcca

SEQ ID NO: 157246 - RNA, 18 nt, Human
gauuacaggcgugagcca

SEQ ID NO: 157247 - RNA, 21 nt, Human
gauuacaggcgugagccacca

SEQ ID NO: 157248 - RNA, 24 nt, Human
gauuacaggcgugagccaccaggc

SEQ ID NO: 157249 - RNA, 18 nt, Human
gauuauaggcgugagcca

SEQ ID NO: 157250 - RNA, 19 nt, Human
gauuauaggcgugagccac

SEQ ID NO: 157251 - RNA, 19 nt, Human
gauuccugggcugcccuga

SEQ ID NO: 157252 - RNA, 21 nt, Human
gauucuccugacucagccucc

SEQ ID NO: 157253 - RNA, 18 nt, Human
gauugcaggugugagcca

SEQ ID NO: 157254 - RNA, 21 nt, Human
gauugcaggugugagccacca

SEQ ID NO: 157255 - RNA, 22 nt, Human
gauugcaggugugagccaccac

SEQ ID NO: 157256 - RNA, 22 nt, Human
gcaggagaaucauuugaaccca

SEQ ID NO: 157257 - RNA, 18 nt, Human
gcaggaguuggagaccag

SEQ ID NO: 157258 - RNA, 21 nt, Human
gcaguggcaccaucucagcug

SEQ ID NO: 157259 - RNA, 23 nt, Human
gccaacauggugaaacuccgucu

SEQ ID NO: 157260 - RNA, 22 nt, Human
gccacugcacuccagccugggc

SEQ ID NO: 157261 - RNA, 24 nt, Human
gccacugcacuccagccugggcaa

SEQ ID NO: 157262 - RNA, 18 nt, Human
gcccacucgcccgggaac

SEQ ID NO: 157263 - RNA, 22 nt, Human
gcccagcuaauuuuuguauuuu

SEQ ID NO: 157264 - RNA, 21 nt, Human
gcccaggaagcagaguuugau

SEQ ID NO: 157265 - RNA, 19 nt, Human
gcccaggcuggagugcagu

SEQ ID NO: 157266 - RNA, 20 nt, Human
gcccaggcuggagugcagug

SEQ ID NO: 157267 - RNA, 23 nt, Human
gcccaggcuggagugcaguggca

SEQ ID NO: 157268 - RNA, 20 nt, Human
gcccgcacccccggcccggc

SEQ ID NO: 157269 - RNA, 20 nt, Human
gccgagaucacgccacugca

SEQ ID NO: 157270 - RNA, 20 nt, Human
gccggacccugagccccagc

SEQ ID NO: 157271 - RNA, 19 nt, Human
gccucaggcuuccugccuc

SEQ ID NO: 157272 - RNA, 24 nt, Human
gccucagucuccugaguagcuggg

SEQ ID NO: 157273 - RNA, 19 nt, Human
gcggagccacugccgcccc

SEQ ID NO: 157274 - RNA, 19 nt, Human
gcucaagugauccucccgc

SEQ ID NO: 157275 - RNA, 20 nt, Human
gcucaggcugguguugaacu

SEQ ID NO: 157276 - RNA, 25 nt, Human
gcucuguugcccaggcuggagugca

SEQ ID NO: 157277 - RNA, 19 nt, Human
gcucuuucgcccaggcugg

SEQ ID NO: 157278 - RNA, 19 nt, Human
gcugauggcgaugggguuu

SEQ ID NO: 157279 - RNA, 26 nt, Human
gcugccccacagauccccagccggug

SEQ ID NO: 157280 - RNA, 21 nt, Human
gcugccccugcccccgcagac

SEQ ID NO: 157281 - RNA, 20 nt, Human
gcuggagugcaguggcacca

SEQ ID NO: 157282 - RNA, 19 nt, Human
gcuggucccaaacuccugg

SEQ ID NO: 157283 - RNA, 23 nt, Human
gcuggucuugaacuccuggccuc

SEQ ID NO: 157284 - RNA, 19 nt, Human
gcuguuggcugugcuuggc

SEQ ID NO: 157285 - RNA, 23 nt, Human
ggaauggucaguauacugggggc

SEQ ID NO: 157286 - RNA, 24 nt, Human
ggagaccagccuggccaacauggu

SEQ ID NO: 157287 - RNA, 19 nt, Human
ggaguggggagugagugcu

SEQ ID NO: 157288 - RNA, 25 nt, Human
ggaucacuugagggcaggaguugga

SEQ ID NO: 157289 - RNA, 19 nt, Human
ggauuacaggcgugagcca

SEQ ID NO: 157290 - RNA, 19 nt, Human
ggcaggaguuggagaccag

SEQ ID NO: 157291 - RNA, 21 nt, Human
ggcagggcccaggaagcagag

SEQ ID NO: 157292 - RNA, 21 nt, Human
ggccagaaguccagggucaag

SEQ ID NO: 157293 - RNA, 23 nt, Human
ggccgaacggggugggugugguc

SEQ ID NO: 157294 - RNA, 24 nt, Human
ggccucagaugaucugcccaccuc

SEQ ID NO: 157295 - RNA, 23 nt, Human
ggcgaugggguuucuuuggggga

SEQ ID NO: 157296 - RNA, 25 nt, Human
ggcgaugggguuucuuugggggaaa

SEQ ID NO: 157297 - RNA, 19 nt, Human
ggcuggucccaaacuccug

SEQ ID NO: 157298 - RNA, 24 nt, Human
ggcuggucuugaacuccuggccuc

SEQ ID NO: 157299 - RNA, 18 nt, Human
gggaguguucagugcggg

SEQ ID NO: 157300 - RNA, 22 nt, Human
gggcacugaggauggggugccc

SEQ ID NO: 157301 - RNA, 24 nt, Human
gggcacugaggauggggugcccuc

SEQ ID NO: 157302 - RNA, 18 nt, Human
gggcucaagugauccauc

SEQ ID NO: 157303 - RNA, 22 nt, Human
gggguuuuaccauguugcucag

SEQ ID NO: 157304 - RNA, 18 nt, Human
gggucaaggugguggcag

SEQ ID NO: 157305 - RNA, 22 nt, Human
ggguguggucacuguggugggg

SEQ ID NO: 157306 - RNA, 21 nt, Human
gguagagauaggauuucacca

SEQ ID NO: 157307 - RNA, 19 nt, Human
ggugggcgggcgcucugcc

SEQ ID NO: 157308 - RNA, 21 nt, Human
guagagauaggauuucaccau

SEQ ID NO: 157309 - RNA, 22 nt, Human
guagagauaggauuucaccaug

SEQ ID NO: 157310 - RNA, 19 nt, Human
guagagaugggguuuuacc

SEQ ID NO: 157311 - RNA, 21 nt, Human
guagagaugggguuuuaccau

SEQ ID NO: 157312 - RNA, 22 nt, Human
guagagaugggguuuuaccaug

SEQ ID NO: 157313 - RNA, 23 nt, Human
guagagaugggguuuuaccaugu

SEQ ID NO: 157314 - RNA, 18 nt, Human
guagcugggauuacaggc

SEQ ID NO: 157315 - RNA, 21 nt, Human
gucagcggggaggggcguggc

SEQ ID NO: 157316 - RNA, 24 nt, Human
guccaguggcgcaaucucggcuca

SEQ ID NO: 157317 - RNA, 23 nt, Human
guccccagcagucaggggauagc

SEQ ID NO: 157318 - RNA, 20 nt, Human
gucccguagccuucgaggcc

SEQ ID NO: 157319 - RNA, 19 nt, Human
guccucuccucuucucuuu

SEQ ID NO: 157320 - RNA, 24 nt, Human
gugauccauccgccuuggccucuu

SEQ ID NO: 157321 - RNA, 19 nt, Human
gugcaaggcuuacaaccgg

SEQ ID NO: 157322 - RNA, 23 nt, Human
gugcacacacacaaaaaggagug

SEQ ID NO: 157323 - RNA, 20 nt, Human
gugcgugcgguuccgugcuc

SEQ ID NO: 157324 - RNA, 19 nt, Human
guggagcgcgccccugccc

SEQ ID NO: 157325 - RNA, 18 nt, Human
guguccucuccucuucuc

SEQ ID NO: 157326 - RNA, 20 nt, Human
guguccucuccucuucucuu

SEQ ID NO: 157327 - RNA, 22 nt, Human
guuuuggggagcagaguugggg

SEQ ID NO: 157328 - RNA, 22 nt, Human
uaaaaaaugggaccgaggcgga

SEQ ID NO: 157329 - RNA, 21 nt, Human
uaaaccaggaaggcugccccu

SEQ ID NO: 157330 - RNA, 21 nt, Human
uaaggcccacccuucuccaaa

SEQ ID NO: 157331 - RNA, 22 nt, Human
uaaggucacauucugagguccc

SEQ ID NO: 157332 - RNA, 24 nt, Human
uaauuuuuguauuuuugguagaga

SEQ ID NO: 157333 - RNA, 24 nt, Human
uaauuuuuguauuuuugguagaga

SEQ ID NO: 157334 - RNA, 22 nt, Human
uacaggcgugagccaccaggcc

SEQ ID NO: 157335 - RNA, 23 nt, Human
uacaggcgugagccaccaggccu

SEQ ID NO: 157336 - RNA, 22 nt, Human
uacaggugcccaccaccacgcc

SEQ ID NO: 157337 - RNA, 21 nt, Human
uaccauguugcucaggcuggu

SEQ ID NO: 157338 - RNA, 31 nt, Human
uaccauguugcucaggcugguguugaacucc

SEQ ID NO: 157339 - RNA, 18 nt, Human
uagagacaggcucucugu

SEQ ID NO: 157340 - RNA, 22 nt, Human
uagagauaggauuucaccaugu

SEQ ID NO: 157341 - RNA, 22 nt, Human
uagagaugggguuuuaccaugu

SEQ ID NO: 157342 - RNA, 21 nt, Human
uagcaggaggcugagccgugc

SEQ ID NO: 157343 - RNA, 24 nt, Human
uagccaggcuggucuugaacuccu

SEQ ID NO: 157344 - RNA, 21 nt, Human
uagcugggugggcaccucccu

SEQ ID NO: 157345 - RNA, 24 nt, Human
uaggauuucaccauguuagccagg

SEQ ID NO: 157346 - RNA, 23 nt, Human
uauaggcgugagccacugcaccu

SEQ ID NO: 157347 - RNA, 23 nt, Human
uauguugcccaggcuggucccaa

SEQ ID NO: 157348 - RNA, 24 nt, Human
uauguugcccaggcuggucccaaa

SEQ ID NO: 157349 - RNA, 19 nt, Human
uauuuuugguagagauggg

SEQ ID NO: 157350 - RNA, 23 nt, Human
ucacgccacugcacuccagccug

SEQ ID NO: 157351 - RNA, 24 nt, Human
ucacugcaaccacaaccucccagg

SEQ ID NO: 157352 - RNA, 19 nt, Human
ucacugcaaccucugccuc

SEQ ID NO: 157353 - RNA, 24 nt, Human
ucacugcaaccucugccucccagg

SEQ ID NO: 157354 - RNA, 25 nt, Human
ucacugcaaccucugccucccaggu

SEQ ID NO: 157355 - RNA, 19 nt, Human
ucacuugagggcaggaguu

SEQ ID NO: 157356 - RNA, 22 nt, Human
ucagauuccugggcugcccuga

SEQ ID NO: 157357 - RNA, 18 nt, Human
ucagccuccccaguagcu

SEQ ID NO: 157358 - RNA, 20 nt, Human
ucagccuccccaguagcugg

SEQ ID NO: 157359 - RNA, 24 nt, Human
ucaggaaaaaaaaaaaaaaagaaa

SEQ ID NO: 157360 - RNA, 23 nt, Human
ucagucuccugaguagcugggau

SEQ ID NO: 157361 - RNA, 20 nt, Human
ucauagcucacugcaaccac

SEQ ID NO: 157362 - RNA, 22 nt, Human
uccaaagugcugggauugcagg

SEQ ID NO: 157363 - RNA, 22 nt, Human
uccacccccaccccccauuguc

SEQ ID NO: 157364 - RNA, 25 nt, Human
uccagggucaaggugguggcagggc

SEQ ID NO: 157365 - RNA, 24 nt, Human
ucccagagugcugagauuauaggc

SEQ ID NO: 157366 - RNA, 21 nt, Human
ucccaggccugucuccuggcu

SEQ ID NO: 157367 - RNA, 23 nt, Human
ucccaggccugucuccuggcugc

SEQ ID NO: 157368 - RNA, 21 nt, Human
ucccaggcucaagugauccuc

SEQ ID NO: 157369 - RNA, 20 nt, Human
ucccagguucaagcgauccu

SEQ ID NO: 157370 - RNA, 24 nt, Human
ucccagguucaagcgauccuucug

SEQ ID NO: 157371 - RNA, 21 nt, Human
ucccagguucaagcgauucuc

SEQ ID NO: 157372 - RNA, 24 nt, Human
ucccagguucaagcgauucuccug

SEQ ID NO: 157373 - RNA, 24 nt, Human
uccugaguagcugggauuacaggc

SEQ ID NO: 157374 - RNA, 23 nt, Human
uccugccucgccggacccugagc

SEQ ID NO: 157375 - RNA, 26 nt, Human
uccuggcuucaagcaauccuccaucu

SEQ ID NO: 157376 - RNA, 18 nt, Human
uccugggcucaagugauc

SEQ ID NO: 157377 - RNA, 19 nt, Human
uccugggcucaagugaucc

SEQ ID NO: 157378 - RNA, 22 nt, Human
ucgcccaggcuggagugcagug

SEQ ID NO: 157379 - RNA, 24 nt, Human
ucgcucuuucgcccaggcuggagu

SEQ ID NO: 157380 - RNA, 28 nt, Human
ucuccagggaaugcagccccagcccuuu

SEQ ID NO: 157381 - RNA, 21 nt, Human
ucuccugacucagccucccca

SEQ ID NO: 157382 - RNA, 18 nt, Human
ucucugccucugccgcca

SEQ ID NO: 157383 - RNA, 20 nt, Human
ucucugccucugccgccaca

SEQ ID NO: 157384 - RNA, 22 nt, Human
ucucuguguccucuccucuucu

SEQ ID NO: 157385 - RNA, 18 nt, Human
ucuguugcccaggcugga

SEQ ID NO: 157386 - RNA, 24 nt, Human
ucuguugcccaggcuggagugcag

SEQ ID NO: 157387 - RNA, 24 nt, Human
ucuuaaagugcugggauuacaggc

SEQ ID NO: 157388 - RNA, 24 nt, Human
ucuucuguguuucacgcguccugg

SEQ ID NO: 157389 - RNA, 20 nt, Human
ucuugaacuccuggccucag

SEQ ID NO: 157390 - RNA, 24 nt, Human
ucuugaguggcugggacuauaggc

SEQ ID NO: 157391 - RNA, 22 nt, Human
ucuugcucuguugcccaggcug

SEQ ID NO: 157392 - RNA, 23 nt, Human
ucuugcucuguugcccaggcugg

SEQ ID NO: 157393 - RNA, 24 nt, Human
ucuugcucuguugcccaggcugga

SEQ ID NO: 157394 - RNA, 19 nt, Human
ucuuucgcccaggcuggag

SEQ ID NO: 157395 - RNA, 24 nt, Human
ucuuucgcccaggcuggagugcag

SEQ ID NO: 157396 - RNA, 20 nt, Human
ucuuuuuuuuggagacagag

SEQ ID NO: 157397 - RNA, 19 nt, Human
ugaaaagaaggaucagccu

SEQ ID NO: 157398 - RNA, 22 nt, Human
ugaagugggggaagggacccug

SEQ ID NO: 157399 - RNA, 20 nt, Human
ugacaugaaaugcccagaac

SEQ ID NO: 157400 - RNA, 19 nt, Human
ugacauugacagaaaguga

SEQ ID NO: 157401 - RNA, 25 nt, Human
ugacauugacagaaagugaaaagaa

SEQ ID NO: 157402 - RNA, 24 nt, Human
ugaccgcaaccuccgccucccagg

SEQ ID NO: 157403 - RNA, 20 nt, Human
ugacucagccuccccaguag

SEQ ID NO: 157404 - RNA, 21 nt, Human
ugacucagccuccccaguagc

SEQ ID NO: 157405 - RNA, 24 nt, Human
ugacucagccuccccaguagcugg

SEQ ID NO: 157406 - RNA, 22 nt, Human
ugacucccacccacacaugcuc

SEQ ID NO: 157407 - RNA, 19 nt, Human
ugagauuauaggcgugagc

SEQ ID NO: 157408 - RNA, 21 nt, Human
ugagauuauaggcgugagcca

SEQ ID NO: 157409 - RNA, 22 nt, Human
ugagauuauaggcgugagccac

SEQ ID NO: 157410 - RNA, 22 nt, Human
ugagauuauaggcgugagccac

SEQ ID NO: 157411 - RNA, 24 nt, Human
ugagauuauaggcgugagccacug

SEQ ID NO: 157412 - RNA, 22 nt, Human
ugagccgagaucacgccacugc

SEQ ID NO: 157413 - RNA, 20 nt, Human
ugaggcaggagaaucauuug

SEQ ID NO: 157414 - RNA, 24 nt, Human
ugaggcaggagaaucauuugaacc

SEQ ID NO: 157415 - RNA, 25 nt, Human
ugaggcaggagaaucauuugaaccc

SEQ ID NO: 157416 - RNA, 21 nt, Human
ugaggggaugagguugcggug

SEQ ID NO: 157417 - RNA, 24 nt, Human
ugaggggaugagguugcggugggu

SEQ ID NO: 157418 - RNA, 24 nt, Human
ugaucugcccaccucggccuucca

SEQ ID NO: 157419 - RNA, 19 nt, Human
ugcacacacacaaaaagga

SEQ ID NO: 157420 - RNA, 19 nt, Human
ugcacaguaucgugaaugu

SEQ ID NO: 157421 - RNA, 18 nt, Human
ugcccaggcuggagugca

SEQ ID NO: 157422 - RNA, 21 nt, Human
ugcccaggcuggagugcagug

SEQ ID NO: 157423 - RNA, 21 nt, Human
ugcccaggcuggagugcagug

SEQ ID NO: 157424 - RNA, 22 nt, Human
ugcccaggcuggagugcagugg

SEQ ID NO: 157425 - RNA, 24 nt, Human
ugcccaggcuggucccaaacuccu

SEQ ID NO: 157426 - RNA, 21 nt, Human
ugccccugcccccgcagaccc

SEQ ID NO: 157427 - RNA, 23 nt, Human
ugccucagucuccugaguagcug

SEQ ID NO: 157428 - RNA, 24 nt, Human
ugccucagucuccugaguagcugg

SEQ ID NO: 157429 - RNA, 24 nt, Human
ugccucccagguucaagcgauccu

SEQ ID NO: 157430 - RNA, 26 nt, Human
ugccucgccggacccugagccccagc

SEQ ID NO: 157431 - RNA, 21 nt, Human
ugcgccggacccgcgugcaac

SEQ ID NO: 157432 - RNA, 22 nt, Human
ugcucaggcugguguugaacuc

SEQ ID NO: 157433 - RNA, 24 nt, Human
ugcucaggcugguguugaacuccu

SEQ ID NO: 157434 - RNA, 24 nt, Human
ugcugggauuacaggcgugagcca

SEQ ID NO: 157435 - RNA, 19 nt, Human
uggaguccaguggcgcaau

SEQ ID NO: 157436 - RNA, 24 nt, Human
uggaguccaguggcgcaaucucgg

SEQ ID NO: 157437 - RNA, 19 nt, Human
uggagugcaguggcaccau

SEQ ID NO: 157438 - RNA, 23 nt, Human
uggagugcaguggcaccaucuca

SEQ ID NO: 157439 - RNA, 18 nt, Human
uggagugcagugguacaa

SEQ ID NO: 157440 - RNA, 19 nt, Human
uggagugcagugguacaau

SEQ ID NO: 157441 - RNA, 21 nt, Human
uggagugcagugguacaauca

SEQ ID NO: 157442 - RNA, 22 nt, Human
uggcagggcugguucccucugg

SEQ ID NO: 157443 - RNA, 24 nt, Human
uggccaacauggugaaacuccguc

SEQ ID NO: 157444 - RNA, 22 nt, Human
uggccgucacuuuucgucuuuu

SEQ ID NO: 157445 - RNA, 20 nt, Human
uggccucagaugaucugccc

SEQ ID NO: 157446 - RNA, 19 nt, Human
uggccucaggcuuccugcc

SEQ ID NO: 157447 - RNA, 21 nt, Human
uggccucaggcuuccugccuc

SEQ ID NO: 157448 - RNA, 21 nt, Human
uggcugugcuuggcaucgugg

SEQ ID NO: 157449 - RNA, 21 nt, Human
uggcuguuggcugugcuuggc

SEQ ID NO: 157450 - RNA, 20 nt, Human
uggcuucaagcaauccucca

SEQ ID NO: 157451 - RNA, 24 nt, Human
uggcuucaagcaauccuccaucuu

SEQ ID NO: 157452 - RNA, 21 nt, Human
ugggacuauaggcgcaugcca

SEQ ID NO: 157453 - RNA, 22 nt, Human
ugggacuauaggcgcaugccac

SEQ ID NO: 157454 - RNA, 19 nt, Human
ugggaggcugaggcaggag

SEQ ID NO: 157455 - RNA, 24 nt, Human
ugggaggcugaggcaggagaauca

SEQ ID NO: 157456 - RNA, 24 nt, Human
ugggaucccccuauguugcccagg

SEQ ID NO: 157457 - RNA, 22 nt, Human
ugggauuacaggcgccagccac

SEQ ID NO: 157458 - RNA, 24 nt, Human
ugggauuacaggcgccagccacca

SEQ ID NO: 157459 - RNA, 18 nt, Human
ugggauuacaggcgugag

SEQ ID NO: 157460 - RNA, 19 nt, Human
ugggauuacaggcgugagc

SEQ ID NO: 157461 - RNA, 22 nt, Human
ugggauuacaggcgugagccac

SEQ ID NO: 157462 - RNA, 23 nt, Human
ugggauuacaggcgugagccacc

SEQ ID NO: 157463 - RNA, 24 nt, Human
ugggauuacaggcgugagccacca

SEQ ID NO: 157464 - RNA, 23 nt, Human
ugggauugcaggugugagccacc

SEQ ID NO: 157465 - RNA, 24 nt, Human
ugggauugcaggugugagccacca

SEQ ID NO: 157466 - RNA, 21 nt, Human
ugggcaggaacuugcagugag

SEQ ID NO: 157467 - RNA, 18 nt, Human
ugggcgcaauggguugag

SEQ ID NO: 157468 - RNA, 19 nt, Human
ugggcucaagugauccauc

SEQ ID NO: 157469 - RNA, 18 nt, Human
ugggcuguggccucaggc

SEQ ID NO: 157470 - RNA, 21 nt, Human
uggggagcagaguugggggug

SEQ ID NO: 157471 - RNA, 23 nt, Human
uggggugcccucagccuccuggg

SEQ ID NO: 157472 - RNA, 24 nt, Human
ugggguuuuaccauguugcucagg

SEQ ID NO: 157473 - RNA, 24 nt, Human
ugguacaaucauagcucacugcaa

SEQ ID NO: 157474 - RNA, 24 nt, Human
ugguagagauaggauuucaccaug

SEQ ID NO: 157475 - RNA, 24 nt, Human
ugguagagaugggguuuuaccaug

SEQ ID NO: 157476 - RNA, 22 nt, Human
uggugggcgccuguuaucccag

SEQ ID NO: 157477 - RNA, 25 nt, Human
ugguggggacugggcgcaauggguc

SEQ ID NO: 157478 - RNA, 24 nt, Human
uguagagaugggaucccccuaugu

SEQ ID NO: 157479 - RNA, 20 nt, Human
ugugucucuguguccucucc

SEQ ID NO: 157480 - RNA, 21 nt, Human
uguugaacuccugggcucaag

SEQ ID NO: 157481 - RNA, 20 nt, Human
uguuucagauuccugggcug

SEQ ID NO: 157482 - RNA, 24 nt, Human
uuaaagugcugggauuacaggcgu

SEQ ID NO: 157483 - RNA, 24 nt, Human
uuagcagggugcgguggugggcgc

SEQ ID NO: 157484 - RNA, 23 nt, Human
uucaagcaauccuccaucuuggc

SEQ ID NO: 157485 - RNA, 24 nt, Human
uucaagcgauccuucugccucagu

SEQ ID NO: 157486 - RNA, 23 nt, Human
uucaagcgauucuccugacucag

SEQ ID NO: 157487 - RNA, 24 nt, Human
uucaagcgauucuccugacucagc

SEQ ID NO: 157488 - RNA, 18 nt, Human
uucccagugggauggaag

SEQ ID NO: 157489 - RNA, 23 nt, Human
uuccugccucgccggacccugag

SEQ ID NO: 157490 - RNA, 22 nt, Human
uucucugugugucucugugucc

SEQ ID NO: 157491 - RNA, 20 nt, Human
uugcagugagccgagaucac

SEQ ID NO: 157492 - RNA, 21 nt, Human
uugcagugagccgagaucacg

SEQ ID NO: 157493 - RNA, 25 nt, Human
uugggaggcugaggcaggagaauca

SEQ ID NO: 157494 - RNA, 24 nt, Human
uugguagagauaggauuucaccau

SEQ ID NO: 157495 - RNA, 24 nt, Human
uugguagagaugggguuuuaccau

SEQ ID NO: 157496 - RNA, 18 nt, Human
uuucacagaguacaugau

SEQ ID NO: 157497 - RNA, 21 nt, Human
uuucaccauguuagccaggcu

SEQ ID NO: 157498 - RNA, 23 nt, Human
uuuuaccauguugcucaggcugg

SEQ ID NO: 157499 - RNA, 20 nt, Human
uuuuguauuuuugguagaga

SEQ ID NO: 157500 - RNA, 24 nt, Human
uuuuugguagagauaggauuucac

SEQ ID NO: 157501 - RNA, 21 nt, Human
uuuuugguagagaugggguuu

SEQ ID NO: 157502 - RNA, 24 nt, Human
uuuuugguagagaugggguuuuac

SEQ ID NO: 157503 - RNA, 20 nt, Human
uuuuuguauuuuugguagag

SEQ ID NO: 157504 - RNA, 20 nt, Human
uuuuuguauuuuugguagag

SEQ ID NO: 157505 - RNA, 26 nt, Human
aaaaaaaaaaaaaaaagcuuuucaaa

SEQ ID NO: 157506 - RNA, 23 nt, Human
aaaaaaaaaaagcuuuucaaaag

SEQ ID NO: 157507 - RNA, 22 nt, Human
aaaagcuuuucaaaaguccacc

SEQ ID NO: 157508 - RNA, 22 nt, Human
aaaccccaucucuacuaaaaaa

SEQ ID NO: 157509 - RNA, 18 nt, Human
aacacauuaauacaaagu

SEQ ID NO: 157510 - RNA, 21 nt, Human
aacagagcaagacuccgucuc

SEQ ID NO: 157511 - RNA, 24 nt, Human
aacagagcaagacuccgucucaaa

SEQ ID NO: 157512 - RNA, 20 nt, Human
aagauggugaaaccccaucu

SEQ ID NO: 157513 - RNA, 24 nt, Human
aaggcgcccugggccggccagagg

SEQ ID NO: 157514 - RNA, 20 nt, Human
aaggugccaugguguuaaaa

SEQ ID NO: 157515 - RNA, 23 nt, Human
aauacuagcacuuugggaggcca

SEQ ID NO: 157516 - RNA, 20 nt, Human
aauuagcuuggugugguagu

SEQ ID NO: 157517 - RNA, 18 nt, Human
aauugcuugaacccgaga

SEQ ID NO: 157518 - RNA, 24 nt, Human
acaaugucaaccauagaagcuuua

SEQ ID NO: 157519 - RNA, 24 nt, Human
acagagcaagacuccgucucaaaa

SEQ ID NO: 157520 - RNA, 25 nt, Human
accccaucucuacuaaaaaauacaa

SEQ ID NO: 157521 - RNA, 28 nt, Human
acuccgucucaaaaaaaaaaaaaaaaaa

SEQ ID NO: 157522 - RNA, 18 nt, Human
acugcacuccagccuggg

SEQ ID NO: 157523 - RNA, 18 nt, Human
acugcacuccagccuggg

SEQ ID NO: 157524 - RNA, 19 nt, Human
acugcacuccagccugggc

SEQ ID NO: 157525 - RNA, 21 nt, Human
acugcacuccagccugggcaa

SEQ ID NO: 157526 - RNA, 22 nt, Human
acugcacuccagccugggcaac

SEQ ID NO: 157527 - RNA, 24 nt, Human
acugcacuccagccugggcaacag

SEQ ID NO: 157528 - RNA, 24 nt, Human
acugcacuccagccugggcaacag

SEQ ID NO: 157529 - RNA, 24 nt, Human
agacggagggugcagugagccgag

SEQ ID NO: 157530 - RNA, 24 nt, Human
agcacuuugggaggccaagguggg

SEQ ID NO: 157531 - RNA, 24 nt, Human
agccuggccaagauggugaaaccc

SEQ ID NO: 157532 - RNA, 24 nt, Human
agccugggcaacagagcaagacuc

SEQ ID NO: 157533 - RNA, 23 nt, Human
aggcagacaauugcuugaacccg

SEQ ID NO: 157534 - RNA, 18 nt, Human
aggccaagguggguggau

SEQ ID NO: 157535 - RNA, 23 nt, Human
aggcugaggcagacaauugcuug

SEQ ID NO: 157536 - RNA, 20 nt, Human
auagaacaauauuaccuaca

SEQ ID NO: 157537 - RNA, 18 nt, Human
aucaacugaggucaggaa

SEQ ID NO: 157538 - RNA, 24 nt, Human
aucgugcuacugcacuccagccug

SEQ ID NO: 157539 - RNA, 24 nt, Human
caaaaggugccaugguguuaaaaa

SEQ ID NO: 157540 - RNA, 22 nt, Human
caaccauagaagcuuuaaguac

SEQ ID NO: 157541 - RNA, 21 nt, Human
caagacuccgucucaaaaaaa

SEQ ID NO: 157542 - RNA, 24 nt, Human
caagguggguggaucaacugaggu

SEQ ID NO: 157543 - RNA, 26 nt, Human
caagguggguggaucaacugagguca

SEQ ID NO: 157544 - RNA, 23 nt, Human
caccuguaaucccagcuacucgg

SEQ ID NO: 157545 - RNA, 24 nt, Human
caccuguaaucccagcuacucggg

SEQ ID NO: 157546 - RNA, 24 nt, Human
cagcuacucgggaggcugaggcag

SEQ ID NO: 157547 - RNA, 18 nt, Human
caggucauaucaagaguu

SEQ ID NO: 157548 - RNA, 22 nt, Human
cauuuucccauuuguuuuugcu

SEQ ID NO: 157549 - RNA, 27 nt, Human
ccaauuuccuuccauuuuacuuuccua

SEQ ID NO: 157550 - RNA, 24 nt, Human
ccccauauagaaaaccuuuuuaaa

SEQ ID NO: 157551 - RNA, 20 nt, Human
ccuagaaaugcacccaauuu

SEQ ID NO: 157552 - RNA, 20 nt, Human
ccucaaaagcuuuucggcug

SEQ ID NO: 157553 - RNA, 24 nt, Human
ccuggccaagauggugaaacccca

SEQ ID NO: 157554 - RNA, 22 nt, Human
ccugggcaacagagcaagacuc

SEQ ID NO: 157555 - RNA, 21 nt, Human
ccuguaaucccagcuacucgg

SEQ ID NO: 157556 - RNA, 23 nt, Human
cuaaugcugaugucaaaaccaga

SEQ ID NO: 157557 - RNA, 19 nt, Human
cuacuaaaaaauacaaaaa

SEQ ID NO: 157558 - RNA, 20 nt, Human
cuacugcacuccagccuggg

SEQ ID NO: 157559 - RNA, 21 nt, Human
cuacugcacuccagccugggc

SEQ ID NO: 157560 - RNA, 24 nt, Human
cuacugcacuccagccugggcaac

SEQ ID NO: 157561 - RNA, 18 nt, Human
cucaaaaaaaaaaaaaaa

SEQ ID NO: 157562 - RNA, 23 nt, Human
cucaaaaaaaaaaaaaaaaaaaa

SEQ ID NO: 157563 - RNA, 19 nt, Human
cuccgucucaaaaaaaaaa

SEQ ID NO: 157564 - RNA, 21 nt, Human
cucuacuaaaaaauacaaaaa

SEQ ID NO: 157565 - RNA, 19 nt, Human
cugaaggcgcccugggccg

SEQ ID NO: 157566 - RNA, 19 nt, Human
cuggggagguugggcugaa

SEQ ID NO: 157567 - RNA, 21 nt, Human
cuguaaucccagcuacucggg

SEQ ID NO: 157568 - RNA, 21 nt, Human
gaacccgagagacggagggug

SEQ ID NO: 157569 - RNA, 23 nt, Human
gagaucgugcuacugcacuccag

SEQ ID NO: 157570 - RNA, 18 nt, Human
gaucaacugaggucagga

SEQ ID NO: 157571 - RNA, 24 nt, Human
gaucaacugaggucaggaauucaa

SEQ ID NO: 157572 - RNA, 24 nt, Human
gcacuccagccugggcaacagagc

SEQ ID NO: 157573 - RNA, 20 nt, Human
gcacuuugggaggccaaggu

SEQ ID NO: 157574 - RNA, 24 nt, Human
gccaagauggugaaaccccaucuc

SEQ ID NO: 157575 - RNA, 18 nt, Human
gcgcaccuguaaucccag

SEQ ID NO: 157576 - RNA, 22 nt, Human
gcuacugcacuccagccugggc

SEQ ID NO: 157577 - RNA, 24 nt, Human
gcuacugcacuccagccugggcaa

SEQ ID NO: 157578 - RNA, 24 nt, Human
ggagggugcagugagccgagaucg

SEQ ID NO: 157579 - RNA, 23 nt, Human
ggcauggugguucacgcccauaa

SEQ ID NO: 157580 - RNA, 20 nt, Human
ggccaagauggugaaacccc

SEQ ID NO: 157581 - RNA, 22 nt, Human
gggcuggggagguugggcugaa

SEQ ID NO: 157582 - RNA, 24 nt, Human
gguagugcgcaccuguaaucccag

SEQ ID NO: 157583 - RNA, 24 nt, Human
gucagccccucaaaagcuuuucgg

SEQ ID NO: 157584 - RNA, 22 nt, Human
gugcagugagccgagaucgugc

SEQ ID NO: 157585 - RNA, 22 nt, Human
guggaucaacugaggucaggaa

SEQ ID NO: 157586 - RNA, 23 nt, Human
uaaaaaauacaaaaauuagcuug

SEQ ID NO: 157587 - RNA, 21 nt, Human
uacugcacuccagccugggca

SEQ ID NO: 157588 - RNA, 22 nt, Human
uacugcacuccagccugggcaa

SEQ ID NO: 157589 - RNA, 23 nt, Human
uacugcacuccagccugggcaac

SEQ ID NO: 157590 - RNA, 24 nt, Human
uacugcacuccagccugggcaaca

SEQ ID NO: 157591 - RNA, 19 nt, Human
uagaacaauauuaccuaca

SEQ ID NO: 157592 - RNA, 22 nt, Human
uagacauauguuagaaaagucc

SEQ ID NO: 157593 - RNA, 24 nt, Human
uagcacuuugggaggccaaggugg

SEQ ID NO: 157594 - RNA, 19 nt, Human
uagcauuugcaguagcucc

SEQ ID NO: 157595 - RNA, 20 nt, Human
uaggaaggugcccagaauag

SEQ ID NO: 157596 - RNA, 19 nt, Human
uaguuuguauaguagucuu

SEQ ID NO: 157597 - RNA, 25 nt, Human
uauaaaaauauaguuagcucucaaa

SEQ ID NO: 157598 - RNA, 27 nt, Human
uauucuauccucuuaaaaguucucggu

SEQ ID NO: 157599 - RNA, 23 nt, Human
ucaaaaaaaaaaaaaaaaaaaaa

SEQ ID NO: 157600 - RNA, 24 nt, Human
ucaagaguuuuuugaacuccaggg

SEQ ID NO: 157601 - RNA, 18 nt, Human
ucagccccucaaaagcuu

SEQ ID NO: 157602 - RNA, 23 nt, Human
uccgucucaaaaaaaaaaaaaaa

SEQ ID NO: 157603 - RNA, 18 nt, Human
ucggcugggcaugguggu

SEQ ID NO: 157604 - RNA, 22 nt, Human
ucgggaggcugaggcagacaau

SEQ ID NO: 157605 - RNA, 23 nt, Human
ucgugcuacugcacuccagccug

SEQ ID NO: 157606 - RNA, 22 nt, Human
ucucuacuaaaaaauacaaaaa

SEQ ID NO: 157607 - RNA, 19 nt, Human
ugaaaccccaucucuacua

SEQ ID NO: 157608 - RNA, 23 nt, Human
ugacuaaugcugaugucaaaacc

SEQ ID NO: 157609 - RNA, 22 nt, Human
ugagccgagaucgugcuacugc

SEQ ID NO: 157610 - RNA, 23 nt, Human
ugaggcagacaauugcuugaacc

SEQ ID NO: 157611 - RNA, 23 nt, Human
ugaggcagacaauugcuugaacc

SEQ ID NO: 157612 - RNA, 24 nt, Human
ugaggcagacaauugcuugaaccc

SEQ ID NO: 157613 - RNA, 21 nt, Human
ugcaguagcuccaacagugcu

SEQ ID NO: 157614 - RNA, 23 nt, Human
ugcaguagcuccaacagugcuuc

SEQ ID NO: 157615 - RNA, 23 nt, Human
ugccaugguguuaaaaauuaaaa

SEQ ID NO: 157616 - RNA, 24 nt, Human
ugcuacugcacuccagccugggca

SEQ ID NO: 157617 - RNA, 24 nt, Human
uggaucaacugaggucaggaauuc

SEQ ID NO: 157618 - RNA, 23 nt, Human
ugggaggccaagguggguggauc

SEQ ID NO: 157619 - RNA, 24 nt, Human
ugggaggccaagguggguggauca

SEQ ID NO: 157620 - RNA, 24 nt, Human
uggguggaucaacugaggucagga

SEQ ID NO: 157621 - RNA, 24 nt, Human
ugguagugcgcaccuguaauccca

SEQ ID NO: 157622 - RNA, 20 nt, Human
uggugugguagugcgcaccu

SEQ ID NO: 157623 - RNA, 23 nt, Human
uggugugguagugcgcaccugua

SEQ ID NO: 157624 - RNA, 19 nt, Human
uuaaaaguucucggucaca

SEQ ID NO: 157625 - RNA, 20 nt, Human
uuagcuuggugugguagugc

SEQ ID NO: 157626 - RNA, 20 nt, Human
uuagcuuggugugguagugc

SEQ ID NO: 157627 - RNA, 24 nt, Human
uugcuugaacccgagagacggagg

SEQ ID NO: 157628 - RNA, 21 nt, Human
uuuaaugccacuuaagucagu

SEQ ID NO: 157629 - RNA, 20 nt, Human
uuuccauguauucuauccuc

SEQ ID NO: 157630 - RNA, 24 nt, Human
aaaagaaagagaaauaguggaaaa

SEQ ID NO: 157631 - RNA, 24 nt, Human
aaagaaagagaaauaguggaaaac

SEQ ID NO: 157632 - RNA, 23 nt, Human
aacauuuaacacagcguaaaaua

SEQ ID NO: 157633 - RNA, 22 nt, Human
aagaaagagaaauaguggaaaa

SEQ ID NO: 157634 - RNA, 18 nt, Human
accacacuccgggcuguc

SEQ ID NO: 157635 - RNA, 19 nt, Human
accccaggaccugggcagc

SEQ ID NO: 157636 - RNA, 22 nt, Human
agaaauaguggaaaacuguuaa

SEQ ID NO: 157637 - RNA, 20 nt, Human
cacuaauagaaaagaaagag

SEQ ID NO: 157638 - RNA, 19 nt, Human
cacuccgggcugucccagc

SEQ ID NO: 157639 - RNA, 20 nt, Human
cagcguaaaauacauugccc

SEQ ID NO: 157640 - RNA, 19 nt, Human
caggaccugggcagcgcuu

SEQ ID NO: 157641 - RNA, 22 nt, Human
ccccaggaccugggcagcgcuu

SEQ ID NO: 157642 - RNA, 18 nt, Human
cucccgcuggcugccacc

SEQ ID NO: 157643 - RNA, 21 nt, Human
cuuaaagagucucuuccaggg

SEQ ID NO: 157644 - RNA, 18 nt, Human
gagcugcuaaccacacuc

SEQ ID NO: 157645 - RNA, 21 nt, Human
gaggucuuaaagagucucuuc

SEQ ID NO: 157646 - RNA, 19 nt, Human
gagucucuuccagggguuu

SEQ ID NO: 157647 - RNA, 20 nt, Human
ggcagcgcuugccgagcugc

SEQ ID NO: 157648 - RNA, 20 nt, Human
gggcagcgcuugccgagcug

SEQ ID NO: 157649 - RNA, 24 nt, Human
uaacacagcguaaaauacauugcc

SEQ ID NO: 157650 - RNA, 22 nt, Human
uaaccacacuccgggcuguccc

SEQ ID NO: 157651 - RNA, 26 nt, Human
ugccaccaccccaggaccugggcagc

SEQ ID NO: 157652 - RNA, 19 nt, Human
ugccgagcugcuaaccaca

SEQ ID NO: 157653 - RNA, 20 nt, Human
uugccgagcugcuaaccacc

SEQ ID NO: 157654 - RNA, 18 nt, Human
aauggauaagaaccagaa

SEQ ID NO: 157655 - RNA, 22 nt, Human
acauuugggggagaguuugggg

SEQ ID NO: 157656 - RNA, 18 nt, Human
acugcagaagaauauaug

SEQ ID NO: 157657 - RNA, 19 nt, Human
acuuggugugugugugcuc

SEQ ID NO: 157658 - RNA, 21 nt, Human
aggcagagcagcagccugagg

SEQ ID NO: 157659 - RNA, 22 nt, Human
agugagagcuaaacaaccgccu

SEQ ID NO: 157660 - RNA, 23 nt, Human
auaauggauaagaaccagaaaag

SEQ ID NO: 157661 - RNA, 21 nt, Human
auccaugugugugcauaucug

SEQ ID NO: 157662 - RNA, 23 nt, Human
auccgugugugugcauaucucug

SEQ ID NO: 157663 - RNA, 24 nt, Human
aucuguguguguacaucggugugu

SEQ ID NO: 157664 - RNA, 23 nt, Human
augugcgugcauccauguguaua

SEQ ID NO: 157665 - RNA, 21 nt, Human
auguguauaucugugugugca

SEQ ID NO: 157666 - RNA, 18 nt, Human
caccucucccucccuccc

SEQ ID NO: 157667 - RNA, 18 nt, Human
cagagcagcagccugagg

SEQ ID NO: 157668 - RNA, 20 nt, Human
cagcagaucacgugcaggug

SEQ ID NO: 157669 - RNA, 18 nt, Human
cagcccggcacccagcga

SEQ ID NO: 157670 - RNA, 18 nt, Human
cauaucucugugugugug

SEQ ID NO: 157671 - RNA, 24 nt, Human
caugugcgugcauccauguguaua

SEQ ID NO: 157672 - RNA, 18 nt, Human
ccccaccucucccucccu

SEQ ID NO: 157673 - RNA, 25 nt, Human
cccuccccaccucucccucccuccc

SEQ ID NO: 157674 - RNA, 20 nt, Human
cccuccucuaccccauuaaa

SEQ ID NO: 157675 - RNA, 21 nt, Human
cccugccuguugacauucccc

SEQ ID NO: 157676 - RNA, 20 nt, Human
ccggcacccagcgaagggag

SEQ ID NO: 157677 - RNA, 21 nt, Human
ccgugugugugcauaucucug

SEQ ID NO: 157678 - RNA, 22 nt, Human
ccuuggcacuccccugccccuc

SEQ ID NO: 157679 - RNA, 21 nt, Human
cgcacuuggugugugugugcu

SEQ ID NO: 157680 - RNA, 19 nt, Human
cggcacccagcgaagggag

SEQ ID NO: 157681 - RNA, 21 nt, Human
cggugugugcauaucucugug

SEQ ID NO: 157682 - RNA, 23 nt, Human
cgguguguuugcguaucucugug

SEQ ID NO: 157683 - RNA, 23 nt, Human
cuaaacaaccgccuucagaggac

SEQ ID NO: 157684 - RNA, 20 nt, Human
cuccaggacaaccuuggcac

SEQ ID NO: 157685 - RNA, 20 nt, Human
cucuuugagucucucuccau

SEQ ID NO: 157686 - RNA, 21 nt, Human
cugaagggagguaaggaggcu

SEQ ID NO: 157687 - RNA, 25 nt, Human
cugaauugucugaagugaagaugau

SEQ ID NO: 157688 - RNA, 22 nt, Human
cugcagugcugccccugccugu

SEQ ID NO: 157689 - RNA, 23 nt, Human
cugucucugucucccuccccacc

SEQ ID NO: 157690 - RNA, 21 nt, Human
cugugugaccaucugugugug

SEQ ID NO: 157691 - RNA, 18 nt, Human
cugugugugcauaucucu

SEQ ID NO: 157692 - RNA, 21 nt, Human
cuuggcacuccccugccccuc

SEQ ID NO: 157693 - RNA, 23 nt, Human
gaagcugggaagcagguggggaa

SEQ ID NO: 157694 - RNA, 23 nt, Human
gaucacgugcagguggggcuugg

SEQ ID NO: 157695 - RNA, 21 nt, Human
gcauaucucugugugugugca

SEQ ID NO: 157696 - RNA, 21 nt, Human
gcucagcugggcugucugccu

SEQ ID NO: 157697 - RNA, 22 nt, Human
gguggcaggcaccacaggugug

SEQ ID NO: 157698 - RNA, 22 nt, Human
ggugugugugcaucugugugug

SEQ ID NO: 157699 - RNA, 24 nt, Human
ggugugugugcgcacuuggugugu

SEQ ID NO: 157700 - RNA, 21 nt, Human
gugcauccauguguauaucug

SEQ ID NO: 157701 - RNA, 25 nt, Human
gugugugcauaucucuaugugcgug

SEQ ID NO: 157702 - RNA, 24 nt, Human
gugugugcauaucucugugcaucc

SEQ ID NO: 157703 - RNA, 21 nt, Human
gugugugcauccgugugugug

SEQ ID NO: 157704 - RNA, 21 nt, Human
gugugugcaucugugugugca

SEQ ID NO: 157705 - RNA, 23 nt, Human
gugugugcauuggcgugugugug

SEQ ID NO: 157706 - RNA, 20 nt, Human
gugugugugcaucugugugu

SEQ ID NO: 157707 - RNA, 24 nt, Human
gugugugugugugcauccaugugu

SEQ ID NO: 157708 - RNA, 22 nt, Human
guuugggggcauucgccaccau

SEQ ID NO: 157709 - RNA, 21 nt, Human
uaaacaaccgccuucagagga

SEQ ID NO: 157710 - RNA, 24 nt, Human
uaucugugugugcaucugugugug

SEQ ID NO: 157711 - RNA, 25 nt, Human
ucagagucucucccucagucucucu

SEQ ID NO: 157712 - RNA, 22 nt, Human
uccagcgccugucugccucugc

SEQ ID NO: 157713 - RNA, 20 nt, Human
uccaucucugugucucuauu

SEQ ID NO: 157714 - RNA, 18 nt, Human
uccccaccucucccuccc

SEQ ID NO: 157715 - RNA, 22 nt, Human
uccccaccucucccucccuccc

SEQ ID NO: 157716 - RNA, 24 nt, Human
uccgugugugugcauaucucugug

SEQ ID NO: 157717 - RNA, 23 nt, Human
ucggugugugugcaucugugugu

SEQ ID NO: 157718 - RNA, 24 nt, Human
ucggugugugugcaucugugugug

SEQ ID NO: 157719 - RNA, 27 nt, Human
ucucucugucucugucucucucuguuu

SEQ ID NO: 157720 - RNA, 20 nt, Human
ucucugucucccuccccacc

SEQ ID NO: 157721 - RNA, 23 nt, Human
ucucugugucucuauuagucucu

SEQ ID NO: 157722 - RNA, 19 nt, Human
ucucuguuucugucucugu

SEQ ID NO: 157723 - RNA, 23 nt, Human
ucugccucugccucucaucuuuu

SEQ ID NO: 157724 - RNA, 25 nt, Human
ucugucucucucuguuucugucucu

SEQ ID NO: 157725 - RNA, 18 nt, Human
ucugucucugucucucuc

SEQ ID NO: 157726 - RNA, 21 nt, Human
ucugugugugcauccgugugu

SEQ ID NO: 157727 - RNA, 21 nt, Human
ucugugugugcaucugugugu

SEQ ID NO: 157728 - RNA, 21 nt, Human
ucugugugugcaucugugugu

SEQ ID NO: 157729 - RNA, 25 nt, Human
ucugugugugcgcacaucggugugu

SEQ ID NO: 157730 - RNA, 23 nt, Human
ucuguguguguacaucggugugu

SEQ ID NO: 157731 - RNA, 22 nt, Human
ucuguuucugucucugucuccc

SEQ ID NO: 157732 - RNA, 22 nt, Human
ugaagggagguaaggaggcuca

SEQ ID NO: 157733 - RNA, 21 nt, Human
ugcauaucucuaugugcgugu

SEQ ID NO: 157734 - RNA, 24 nt, Human
ugcauccauguguauaucugugug

SEQ ID NO: 157735 - RNA, 24 nt, Human
ugcccuccucuaccccauuaacug

SEQ ID NO: 157736 - RNA, 19 nt, Human
uggcacuccccugccccuc

SEQ ID NO: 157737 - RNA, 28 nt, Human
uggcgugugugugugugcauccaugugu

SEQ ID NO: 157738 - RNA, 20 nt, Human
uggugugugugugcucaucc

SEQ ID NO: 157739 - RNA, 21 nt, Human
uguccucagagucucucccuc

SEQ ID NO: 157740 - RNA, 24 nt, Human
ugugcauaucucugugugugugca

SEQ ID NO: 157741 - RNA, 19 nt, Human
uguguacaucggugugugu

SEQ ID NO: 157742 - RNA, 22 nt, Human
ugugugaccaucugugugugca

SEQ ID NO: 157743 - RNA, 19 nt, Human
ugugugcauaucucuaugu

SEQ ID NO: 157744 - RNA, 19 nt, Human
ugugugcauaucucugugc

SEQ ID NO: 157745 - RNA, 23 nt, Human
ugugugcauaucucugugcaucc

SEQ ID NO: 157746 - RNA, 19 nt, Human
ugugugcauaucucugugu

SEQ ID NO: 157747 - RNA, 21 nt, Human
ugugugcauaucucugugugu

SEQ ID NO: 157748 - RNA, 24 nt, Human
ugugugcauaucucugugugugug

SEQ ID NO: 157749 - RNA, 19 nt, Human
ugugugcauaucugugugu

SEQ ID NO: 157750 - RNA, 22 nt, Human
ugugugcauaucugugugugcg

SEQ ID NO: 157751 - RNA, 18 nt, Human
ugugugcauccaugugug

SEQ ID NO: 157752 - RNA, 19 nt, Human
ugugugcauccgugugugu

SEQ ID NO: 157753 - RNA, 20 nt, Human
ugugugcaucugugugugca

SEQ ID NO: 157754 - RNA, 20 nt, Human
ugugugcaucugugugugca

SEQ ID NO: 157755 - RNA, 20 nt, Human
ugugugcaucugugugugua

SEQ ID NO: 157756 - RNA, 19 nt, Human
ugugugcauuggcgugugu

SEQ ID NO: 157757 - RNA, 22 nt, Human
ugugugcauuggcgugugugug

SEQ ID NO: 157758 - RNA, 22 nt, Human
ugugugcgcacaucggugugug

SEQ ID NO: 157759 - RNA, 20 nt, Human
ugugugcgcacuuggugugu

SEQ ID NO: 157760 - RNA, 23 nt, Human
ugugugcgcacuuggugugugug

SEQ ID NO: 157761 - RNA, 26 nt, Human
ugugugcgugcauuggcaugugcgug

SEQ ID NO: 157762 - RNA, 22 nt, Human
ugugugcucauccaugugugug

SEQ ID NO: 157763 - RNA, 24 nt, Human
ugugugugcauaucugugugugcg

SEQ ID NO: 157764 - RNA, 22 nt, Human
ugugugugcauccauguguguu

SEQ ID NO: 157765 - RNA, 20 nt, Human
ugugugugcauccgugugug

SEQ ID NO: 157766 - RNA, 21 nt, Human
ugugugugcauccgugugugu

SEQ ID NO: 157767 - RNA, 19 nt, Human
ugugugugcaucugugugu

SEQ ID NO: 157768 - RNA, 20 nt, Human
ugugugugcaucugugugug

SEQ ID NO: 157769 - RNA, 21 nt, Human
ugugugugcaucugugugugc

SEQ ID NO: 157770 - RNA, 21 nt, Human
ugugugugcaucugugugugc

SEQ ID NO: 157771 - RNA, 21 nt, Human
ugugugugcaucugugugugu

SEQ ID NO: 157772 - RNA, 22 nt, Human
ugugugugcaucugugugugua

SEQ ID NO: 157773 - RNA, 23 nt, Human
ugugugugcgcacuuggugugug

SEQ ID NO: 157774 - RNA, 26 nt, Human
ugugugugcgcacuuggugugugugu

SEQ ID NO: 157775 - RNA, 22 nt, Human
uguguguguacaucggugugug

SEQ ID NO: 157776 - RNA, 23 nt, Human
uguguguguacaucggugugugu

SEQ ID NO: 157777 - RNA, 22 nt, Human
ugugugugugcauccaugugug

SEQ ID NO: 157778 - RNA, 21 nt, Human
ugugugugugcucauccaugu

SEQ ID NO: 157779 - RNA, 26 nt, Human
ugugugugugcucauccaugugugug

SEQ ID NO: 157780 - RNA, 18 nt, Human
ugugugugugugcaucca

SEQ ID NO: 157781 - RNA, 18 nt, Human
uguuucugucucugucuc

SEQ ID NO: 157782 - RNA, 19 nt, Human
uuaacugcagaagaauaua

SEQ ID NO: 157783 - RNA, 24 nt, Human
uuggugccaggacaguucgacgca

SEQ ID NO: 157784 - RNA, 26 nt, Human
aaauguucaacuggagaagcaaaagg

SEQ ID NO: 157785 - RNA, 20 nt, Human
acaacagaggaaguggugac

SEQ ID NO: 157786 - RNA, 26 nt, Human
agaagacauuguuauuuuauuucaaa

SEQ ID NO: 157787 - RNA, 21 nt, Human
agcacaaagguagaaggcaag

SEQ ID NO: 157788 - RNA, 22 nt, Human
aggaaaauaaaagagcuaguuc

SEQ ID NO: 157789 - RNA, 18 nt, Human
aggaagcagaaacagacu

SEQ ID NO: 157790 - RNA, 22 nt, Human
aggaagcagaaacagacuuuac

SEQ ID NO: 157791 - RNA, 21 nt, Human
agggauucuugaaccccaucu

SEQ ID NO: 157792 - RNA, 19 nt, Human
agguagaaggcaagccagg

SEQ ID NO: 157793 - RNA, 21 nt, Human
agugaaggggucaggcagaug

SEQ ID NO: 157794 - RNA, 19 nt, Human
aucaucauuuucuuucuug

SEQ ID NO: 157795 - RNA, 21 nt, Human
caaucuuauggggguggaggg

SEQ ID NO: 157796 - RNA, 24 nt, Human
caccaaagaaaugcaggacugaug

SEQ ID NO: 157797 - RNA, 25 nt, Human
caccaaagaaaugcaggacugauga

SEQ ID NO: 157798 - RNA, 20 nt, Human
cacccuccuggccccccacc

SEQ ID NO: 157799 - RNA, 21 nt, Human
caccugcaucauuuguggauu

SEQ ID NO: 157800 - RNA, 21 nt, Human
cagaaaauagguaagaguuaa

SEQ ID NO: 157801 - RNA, 18 nt, Human
cagaggaaguggugacuc

SEQ ID NO: 157802 - RNA, 22 nt, Human
cagcaggaaaauaaaagagcua

SEQ ID NO: 157803 - RNA, 23 nt, Human
cagcauagaaaaaaguagccauu

SEQ ID NO: 157804 - RNA, 21 nt, Human
caggagauucuguguagucau

SEQ ID NO: 157805 - RNA, 21 nt, Human
caggaggggaaaaaaguaaaa

SEQ ID NO: 157806 - RNA, 18 nt, Human
caggggacuuagggauuc

SEQ ID NO: 157807 - RNA, 22 nt, Human
ccaggaggggaaaaaaguaaaa

SEQ ID NO: 157808 - RNA, 23 nt, Human
cccccuuuacuaucaggagauuc

SEQ ID NO: 157809 - RNA, 18 nt, Human
cccuccuggccccccacc

SEQ ID NO: 157810 - RNA, 18 nt, Human
ccuccagcccccuuuacu

SEQ ID NO: 157811 - RNA, 20 nt, Human
ccuccuggccccccaccaaa

SEQ ID NO: 157812 - RNA, 18 nt, Human
cuccucacuucuuuuugc

SEQ ID NO: 157813 - RNA, 22 nt, Human
gaggagggagaggugacggcag

SEQ ID NO: 157814 - RNA, 21 nt, Human
gaggugacggcaguggcaggu

SEQ ID NO: 157815 - RNA, 18 nt, Human
gcuuuguuccaugcuuga

SEQ ID NO: 157816 - RNA, 20 nt, Human
ggcuauaaaccauuugcacc

SEQ ID NO: 157817 - RNA, 22 nt, Human
gggagcagcugcagaaaauagg

SEQ ID NO: 157818 - RNA, 18 nt, Human
guaaggaagcagaaacag

SEQ ID NO: 157819 - RNA, 22 nt, Human
gucaauguuuuauuuaacucau

SEQ ID NO: 157820 - RNA, 18 nt, Human
guggugauauggcagacu

SEQ ID NO: 157821 - RNA, 24 nt, Human
guuuguaucuccuaucucagauaa

SEQ ID NO: 157822 - RNA, 19 nt, Human
uaaaacaaaacaacuuauu

SEQ ID NO: 157823 - RNA, 22 nt, Human
uaaaacaaaacaacuuauucaa

SEQ ID NO: 157824 - RNA, 21 nt, Human
uacaacagaggaaguggugac

SEQ ID NO: 157825 - RNA, 20 nt, Human
uacuccagcauagaaaaaag

SEQ ID NO: 157826 - RNA, 18 nt, Human
uagaaaauacuccagcau

SEQ ID NO: 157827 - RNA, 26 nt, Human
uagaaaauacuccagcauagaaaaaa

SEQ ID NO: 157828 - RNA, 24 nt, Human
uagccucuaaacuuuaagaacuuc

SEQ ID NO: 157829 - RNA, 20 nt, Human
uauuucaaagcuuucaacaa

SEQ ID NO: 157830 - RNA, 18 nt, Human
ucacaaauuucaagaaga

SEQ ID NO: 157831 - RNA, 22 nt, Human
uccaaaugauuugccuuuugac

SEQ ID NO: 157832 - RNA, 21 nt, Human
uccaagauuguauugaucuga

SEQ ID NO: 157833 - RNA, 22 nt, Human
uccaagauuguauugaucugau

SEQ ID NO: 157834 - RNA, 21 nt, Human
uccaugaacauuugagaaaua

SEQ ID NO: 157835 - RNA, 21 nt, Human
uccuuuagaagccuaauguca

SEQ ID NO: 157836 - RNA, 22 nt, Human
ucuaaaauaucuuuagcuccca

SEQ ID NO: 157837 - RNA, 20 nt, Human
ucuccucacuucuuuuugcc

SEQ ID NO: 157838 - RNA, 23 nt, Human
ucucuccauuuugcagauugucc

SEQ ID NO: 157839 - RNA, 26 nt, Human
ugcacccuccuggccccccaccaaag

SEQ ID NO: 157840 - RNA, 21 nt, Human
ugcauccuccugacuuauuuu

SEQ ID NO: 157841 - RNA, 24 nt, Human
ugcauccuccugacuuauuuuuuu

SEQ ID NO: 157842 - RNA, 22 nt, Human
ugcuacaaauguucaacuggag

SEQ ID NO: 157843 - RNA, 24 nt, Human
uggagggcaagaagggggauccua

SEQ ID NO: 157844 - RNA, 21 nt, Human
ugggagcagcugcagaaaaua

SEQ ID NO: 157845 - RNA, 25 nt, Human
uggggguggagggcaagaaggggga

SEQ ID NO: 157846 - RNA, 24 nt, Human
uguauauagucaaugggaaaagaa

SEQ ID NO: 157847 - RNA, 23 nt, Human
uguguggugauauggcagacugg

SEQ ID NO: 157848 - RNA, 19 nt, Human
uucaccaguccaauuuucu

SEQ ID NO: 157849 - RNA, 22 nt, Human
uugcaaucuuuggaugcuuccu

SEQ ID NO: 157850 - RNA, 18 nt, Human
uugcaccugcaucauuug

SEQ ID NO: 157851 - RNA, 18 nt, Human
uuuagcucccaggagggg

SEQ ID NO: 157852 - RNA, 23 nt, Human
uuucaugcagguuucuccucacu

SEQ ID NO: 157853 - RNA, 23 nt, Human
uuuuugccuaguuauauuggaag

SEQ ID NO: 157854 - RNA, 24 nt, Human
aaaauccucacuaugaaacaaagg

SEQ ID NO: 157855 - RNA, 20 nt, Human
aaaauguguucucggggugc

SEQ ID NO: 157856 - RNA, 19 nt, Human
aauaaaauccucacuauga

SEQ ID NO: 157857 - RNA, 19 nt, Human
acaaaacgcagaagcggga

SEQ ID NO: 157858 - RNA, 26 nt, Human
acaggcaaagucaucugguuaacgug

SEQ ID NO: 157859 - RNA, 18 nt, Human
agaagacagccauguccu

SEQ ID NO: 157860 - RNA, 19 nt, Human
aggaaggagacgaaaggga

SEQ ID NO: 157861 - RNA, 25 nt, Human
aggaauaacaaaacgcagaagccgg

SEQ ID NO: 157862 - RNA, 23 nt, Human
aggcaggaggcugcguuaggugg

SEQ ID NO: 157863 - RNA, 19 nt, Human
aggcggaggcaggaggcug

SEQ ID NO: 157864 - RNA, 18 nt, Human
caaaacgcagaagcggga

SEQ ID NO: 157865 - RNA, 19 nt, Human
caggccugggcaaaaagaa

SEQ ID NO: 157866 - RNA, 21 nt, Human
ccaagcacuucccgacgcgcc

SEQ ID NO: 157867 - RNA, 23 nt, Human
ccagacgcaaacguggaugcaug

SEQ ID NO: 157868 - RNA, 22 nt, Human
cccgacgcgccgccgcagcugg

SEQ ID NO: 157869 - RNA, 24 nt, Human
cccgacgcgccgccgcagcuggcg

SEQ ID NO: 157870 - RNA, 26 nt, Human
ccucacuaugaaacaaaggcggaggc

SEQ ID NO: 157871 - RNA, 22 nt, Human
cgacgcgccgccgcagcuggcg

SEQ ID NO: 157872 - RNA, 18 nt, Human
cgccgugcaaaauaaaau

SEQ ID NO: 157873 - RNA, 23 nt, Human
cguggcuuuuuagaagacagcca

SEQ ID NO: 157874 - RNA, 19 nt, Human
cugauucuaucaaaaugug

SEQ ID NO: 157875 - RNA, 23 nt, Human
gaagacagccauguccucuacuc

SEQ ID NO: 157876 - RNA, 21 nt, Human
gaggaaggagacgaaagggau

SEQ ID NO: 157877 - RNA, 23 nt, Human
uauguuaagaagugaggggcagg

SEQ ID NO: 157878 - RNA, 21 nt, Human
uccuauggcggcaguaggaau

SEQ ID NO: 157879 - RNA, 23 nt, Human
ugcaaaaaguccaggccugggca

SEQ ID NO: 157880 - RNA, 25 nt, Human
ugcaaaauaaaauccucacuaugaa

SEQ ID NO: 157881 - RNA, 18 nt, Human
uggaagcagcggaggaag

SEQ ID NO: 157882 - RNA, 24 nt, Human
uggaagcagcggaggaaggagacg

SEQ ID NO: 157883 - RNA, 23 nt, Human
uggcggcaguaggaauaacaaaa

SEQ ID NO: 157884 - RNA, 21 nt, Human
ugggcaaaaagaagucacugg

SEQ ID NO: 157885 - RNA, 24 nt, Human
uuggccauuacaaagacacaggaa

SEQ ID NO: 157886 - RNA, 24 nt, Human
uuuagagggagggcgccgugcaaa

SEQ ID NO: 157887 - RNA, 19 nt, Human
uuuagggcugugguuacaa

SEQ ID NO: 157888 - RNA, 22 nt, Human
aacacgaaaccagaaaaggaca

SEQ ID NO: 157889 - RNA, 21 nt, Human
aacuuaguuggcugauuggaa

SEQ ID NO: 157890 - RNA, 21 nt, Human
aacuuuucccccaaacuuuuc

SEQ ID NO: 157891 - RNA, 23 nt, Human
acacacacgcauacacacacaca

SEQ ID NO: 157892 - RNA, 29 nt, Human
acacacgcauacacacacacacuauauag

SEQ ID NO: 157893 - RNA, 19 nt, Human
acauguauaacuguguaca

SEQ ID NO: 157894 - RNA, 25 nt, Human
agaagaucgggaagauggaaugcug

SEQ ID NO: 157895 - RNA, 21 nt, Human
agacaugauacuuauguccuc

SEQ ID NO: 157896 - RNA, 21 nt, Human
agagaaaaacugauuugggga

SEQ ID NO: 157897 - RNA, 24 nt, Human
agcaagucuccacuauggaagcaa

SEQ ID NO: 157898 - RNA, 23 nt, Human
aggaauaggguagaggaaaagga

SEQ ID NO: 157899 - RNA, 20 nt, Human
aggcaacuucaacuucuugc

SEQ ID NO: 157900 - RNA, 22 nt, Human
agggagagagggaguaagaaag

SEQ ID NO: 157901 - RNA, 22 nt, Human
auauguguguaugcgugugugu

SEQ ID NO: 157902 - RNA, 23 nt, Human
auuauauuccucuagugguucca

SEQ ID NO: 157903 - RNA, 23 nt, Human
auucuuccucaaagucucuacua

SEQ ID NO: 157904 - RNA, 19 nt, Human
auugaggaauaggguagag

SEQ ID NO: 157905 - RNA, 22 nt, Human
auuuuauauauauauuauauau

SEQ ID NO: 157906 - RNA, 22 nt, Human
caaaauguuccauggugaacac

SEQ ID NO: 157907 - RNA, 19 nt, Human
caacucucuagaagauuca

SEQ ID NO: 157908 - RNA, 22 nt, Human
caacucucuagaagauucaaga

SEQ ID NO: 157909 - RNA, 22 nt, Human
cacacacgcauacacacacaca

SEQ ID NO: 157910 - RNA, 27 nt, Human
cacacacgcauacacacacacacuaua

SEQ ID NO: 157911 - RNA, 22 nt, Human
cacgaaaccagaaaaggacaac

SEQ ID NO: 157912 - RNA, 19 nt, Human
cacugcugaagacacacug

SEQ ID NO: 157913 - RNA, 23 nt, Human
cagaaugaugcuccccaucucuc

SEQ ID NO: 157914 - RNA, 27 nt, Human
cagcaacucucuagaagauucaagaua

SEQ ID NO: 157915 - RNA, 23 nt, Human
cagguaaaauaugaaauucuccc

SEQ ID NO: 157916 - RNA, 25 nt, Human
cauacacacacacacuauauauuua

SEQ ID NO: 157917 - RNA, 26 nt, Human
caucucuccuuuaacgaccauggagg

SEQ ID NO: 157918 - RNA, 19 nt, Human
ccagaaaaggacaacuuag

SEQ ID NO: 157919 - RNA, 20 nt, Human
ccuccauaaccauacaagcu

SEQ ID NO: 157920 - RNA, 22 nt, Human
cucaaagucucuacuagcugua

SEQ ID NO: 157921 - RNA, 20 nt, Human
cugauggacagaguggagaa

SEQ ID NO: 157922 - RNA, 21 nt, Human
gaccauggaggguaaaaggga

SEQ ID NO: 157923 - RNA, 19 nt, Human
gaggaauaggguagaggaa

SEQ ID NO: 157924 - RNA, 18 nt, Human
gauugggauuuggaaaag

SEQ ID NO: 157925 - RNA, 25 nt, Human
gcauacacacacacacuauauauuu

SEQ ID NO: 157926 - RNA, 21 nt, Human
ggagggaaaauugagugaguu

SEQ ID NO: 157927 - RNA, 23 nt, Human
ggaguaagaaagagaaaaacuga

SEQ ID NO: 157928 - RNA, 18 nt, Human
ggggauugggauuuggaa

SEQ ID NO: 157929 - RNA, 20 nt, Human
guuagcauuauuauuauuau

SEQ ID NO: 157930 - RNA, 21 nt, Human
uaacaaaagaugggaaaguga

SEQ ID NO: 157931 - RNA, 21 nt, Human
uaacuuaacucucugaaagaa

SEQ ID NO: 157932 - RNA, 27 nt, Human
uacacacacgcauacacacacacacua

SEQ ID NO: 157933 - RNA, 21 nt, Human
uacagaacuaauaaacauuga

SEQ ID NO: 157934 - RNA, 18 nt, Human
uacuucaucccuauguuc

SEQ ID NO: 157935 - RNA, 19 nt, Human
uagccucucagcuacuccu

SEQ ID NO: 157936 - RNA, 23 nt, Human
uaguaucugauggacagagugga

SEQ ID NO: 157937 - RNA, 19 nt, Human
uauauguguguaugcgugu

SEQ ID NO: 157938 - RNA, 22 nt, Human
uauauguguguaugcgugugug

SEQ ID NO: 157939 - RNA, 25 nt, Human
uauauuuuauauauauauuauauau

SEQ ID NO: 157940 - RNA, 19 nt, Human
ucaacuucuugcuuggcuc

SEQ ID NO: 157941 - RNA, 21 nt, Human
uccccuguaaagagaaaaagc

SEQ ID NO: 157942 - RNA, 19 nt, Human
ucuccacuauggaagcaag

SEQ ID NO: 157943 - RNA, 23 nt, Human
ucucugaaagaaacuuuuccccc

SEQ ID NO: 157944 - RNA, 28 nt, Human
ugaaaagcaagucuccacuauggaagca

SEQ ID NO: 157945 - RNA, 18 nt, Human
ugaagacacacuguugaa

SEQ ID NO: 157946 - RNA, 24 nt, Human
ugaguuaguugccauaguggagaa

SEQ ID NO: 157947 - RNA, 19 nt, Human
ugauguuuugguuggagaa

SEQ ID NO: 157948 - RNA, 21 nt, Human
uggaaugacuuaugccuuuga

SEQ ID NO: 157949 - RNA, 19 nt, Human
ugggaaagugauuaguuag

SEQ ID NO: 157950 - RNA, 19 nt, Human
uggugaacacgaaaccaga

SEQ ID NO: 157951 - RNA, 26 nt, Human
ugucuacacacacgcauacacacaca

SEQ ID NO: 157952 - RNA, 18 nt, Human
uguguguaugcgugugug

SEQ ID NO: 157953 - RNA, 20 nt, Human
uuagaaagaguacaauaugu

SEQ ID NO: 157954 - RNA, 18 nt, Human
uuauugcuuccauuauau

SEQ ID NO: 157955 - RNA, 22 nt, Human
uucaggcaccuuacuucauccc

SEQ ID NO: 157956 - RNA, 21 nt, Human
uucccccaaacuuuucaggca

SEQ ID NO: 157957 - RNA, 21 nt, Human
uuggagaagcaaagaagaucg

SEQ ID NO: 157958 - RNA, 22 nt, Human
uuuaacgaccauggaggguaaa

SEQ ID NO: 157959 - RNA, 20 nt, Human
uuuaacuucacaauuuuguc

SEQ ID NO: 157960 - RNA, 21 nt, Human
uuugauagacauguauaacug

SEQ ID NO: 157961 - RNA, 19 nt, Human
uuugucaagggcugggccc

SEQ ID NO: 157962 - RNA, 28 nt, Human
aaacaguacaaaucacaagguccgucaa

SEQ ID NO: 157963 - RNA, 18 nt, Human
aacauuuuuuacauaagc

SEQ ID NO: 157964 - RNA, 25 nt, Human
aacauuuuuuacauaagcucaacau

SEQ ID NO: 157965 - RNA, 21 nt, Human
aagaauggccagggacggggu

SEQ ID NO: 157966 - RNA, 22 nt, Human
aagccuccccagaagggacagc

SEQ ID NO: 157967 - RNA, 22 nt, Human
acacagcccauccugccuggcc

SEQ ID NO: 157968 - RNA, 21 nt, Human
accacagaucccacagaccca

SEQ ID NO: 157969 - RNA, 22 nt, Human
accgcagcucccagcgcgcagc

SEQ ID NO: 157970 - RNA, 19 nt, Human
accucggagggcgagaagg

SEQ ID NO: 157971 - RNA, 20 nt, Human
accugcugaugcuccacaau

SEQ ID NO: 157972 - RNA, 18 nt, Human
acgggguggggcugccac

SEQ ID NO: 157973 - RNA, 24 nt, Human
agaaggaggcggcggggggcggag

SEQ ID NO: 157974 - RNA, 25 nt, Human
agaaggaggcggcggggggcggagc

SEQ ID NO: 157975 - RNA, 21 nt, Human
agaggggcugccccagggucu

SEQ ID NO: 157976 - RNA, 20 nt, Human
agcaaacaguacaaaucaca

SEQ ID NO: 157977 - RNA, 18 nt, Human
agcuggcagggccagagg

SEQ ID NO: 157978 - RNA, 22 nt, Human
aggaagaagugggucaccaagg

SEQ ID NO: 157979 - RNA, 19 nt, Human
aggacggagggggugggag

SEQ ID NO: 157980 - RNA, 18 nt, Human
aggaggcggcggggggcg

SEQ ID NO: 157981 - RNA, 21 nt, Human
aggauggagacaggaccgaga

SEQ ID NO: 157982 - RNA, 18 nt, Human
aggcaggggagggacggc

SEQ ID NO: 157983 - RNA, 19 nt, Human
aggcagggggaggugaggc

SEQ ID NO: 157984 - RNA, 25 nt, Human
aggcggcggggggcggagcgggggc

SEQ ID NO: 157985 - RNA, 23 nt, Human
agggacagcagggaggacaggga

SEQ ID NO: 157986 - RNA, 19 nt, Human
aguccugugggcugagcuc

SEQ ID NO: 157987 - RNA, 20 nt, Human
aucccuucagccugcugcug

SEQ ID NO: 157988 - RNA, 18 nt, Human
auuggccaaaugcuucuc

SEQ ID NO: 157989 - RNA, 22 nt, Human
caaaucuucuacuucuuauugc

SEQ ID NO: 157990 - RNA, 22 nt, Human
caagaaaagcugcgagguccua

SEQ ID NO: 157991 - RNA, 19 nt, Human
cacaauuggacagcaggac

SEQ ID NO: 157992 - RNA, 21 nt, Human
caccaagggccaccuggccac

SEQ ID NO: 157993 - RNA, 27 nt, Human
cagaaagacacgaacaggauggagaca

SEQ ID NO: 157994 - RNA, 19 nt, Human
cagcagcugcucgcccccc

SEQ ID NO: 157995 - RNA, 21 nt, Human
cagcagggcagcugugcccug

SEQ ID NO: 157996 - RNA, 18 nt, Human
cagccucccuuggggaga

SEQ ID NO: 157997 - RNA, 18 nt, Human
cagcgcgcagcccggcgu

SEQ ID NO: 157998 - RNA, 20 nt, Human
cagcucccagcgcgcagccc

SEQ ID NO: 157999 - RNA, 21 nt, Human
cagcucccagcgcgcagcccg

SEQ ID NO: 158000 - RNA, 20 nt, Human
cagcuccuaggcagcccaug

SEQ ID NO: 158001 - RNA, 19 nt, Human
cagcuggcagggccagagg

SEQ ID NO: 158002 - RNA, 18 nt, Human
cagcugggacuccugcca

SEQ ID NO: 158003 - RNA, 22 nt, Human
caggcagcuccuaggcagccca

SEQ ID NO: 158004 - RNA, 25 nt, Human
caggcagcuccuaggcagcccauga

SEQ ID NO: 158005 - RNA, 19 nt, Human
cagggacgcuccaggaaga

SEQ ID NO: 158006 - RNA, 22 nt, Human
cagggcccccucagcaccuucc

SEQ ID NO: 158007 - RNA, 20 nt, Human
caucacgcugucucuucuug

SEQ ID NO: 158008 - RNA, 25 nt, Human
caugaggcuaaggcacaagggugac

SEQ ID NO: 158009 - RNA, 22 nt, Human
ccaaaaacaggaggaaacaaca

SEQ ID NO: 158010 - RNA, 24 nt, Human
ccaaccuucuuaauggggucugaa

SEQ ID NO: 158011 - RNA, 21 nt, Human
ccaagggccaccuggccacca

SEQ ID NO: 158012 - RNA, 19 nt, Human
ccacagaucccacagaccc

SEQ ID NO: 158013 - RNA, 18 nt, Human
ccaccaaagccuccccag

SEQ ID NO: 158014 - RNA, 22 nt, Human
ccacugguggagaagccuccuc

SEQ ID NO: 158015 - RNA, 21 nt, Human
ccagggacgggguggggcugc

SEQ ID NO: 158016 - RNA, 18 nt, Human
ccccgcggcggacccagc

SEQ ID NO: 158017 - RNA, 18 nt, Human
cccggcgucugcuccucg

SEQ ID NO: 158018 - RNA, 20 nt, Human
ccgaaaacugcagaaagaca

SEQ ID NO: 158019 - RNA, 24 nt, Human
ccucagagccaccaaagccucccc

SEQ ID NO: 158020 - RNA, 22 nt, Human
ccugcucacuggcuucuccuuc

SEQ ID NO: 158021 - RNA, 19 nt, Human
ccuggagaugggguagggg

SEQ ID NO: 158022 - RNA, 21 nt, Human
ccuguggccacggccugaagc

SEQ ID NO: 158023 - RNA, 23 nt, Human
ccugugggcugagcucuaggcag

SEQ ID NO: 158024 - RNA, 27 nt, Human
cgcagcccggcgucugcuccucgugcc

SEQ ID NO: 158025 - RNA, 19 nt, Human
cgcccuggcccgcagcagc

SEQ ID NO: 158026 - RNA, 23 nt, Human
cgggaaggggccagggccgggcu

SEQ ID NO: 158027 - RNA, 24 nt, Human
cgggggccauggccggagaccgcc

SEQ ID NO: 158028 - RNA, 23 nt, Human
cgggguggaggccaagaauggcc

SEQ ID NO: 158029 - RNA, 21 nt, Human
cuaccaggggucaggagggcg

SEQ ID NO: 158030 - RNA, 19 nt, Human
cucagagccaccaaagccu

SEQ ID NO: 158031 - RNA, 24 nt, Human
cucucccacguaguacugcuccag

SEQ ID NO: 158032 - RNA, 21 nt, Human
cugcagaaagacacgaacagg

SEQ ID NO: 158033 - RNA, 19 nt, Human
cugcugccuaccgcccggc

SEQ ID NO: 158034 - RNA, 18 nt, Human
cugcugcuccccgcggag

SEQ ID NO: 158035 - RNA, 18 nt, Human
cugcugcugccuaccgcc

SEQ ID NO: 158036 - RNA, 20 nt, Human
cuuauugccgaaaacugcag

SEQ ID NO: 158037 - RNA, 21 nt, Human
cuucuaagccccuaagcgggc

SEQ ID NO: 158038 - RNA, 21 nt, Human
cuucuaagccccuaagcgggc

SEQ ID NO: 158039 - RNA, 18 nt, Human
gaaagacacgaacaggau

SEQ ID NO: 158040 - RNA, 25 nt, Human
gaaggaggcggcggggggcggagcg

SEQ ID NO: 158041 - RNA, 25 nt, Human
gaggcaggggagggacggcaagaaa

SEQ ID NO: 158042 - RNA, 21 nt, Human
gagggcaggacggagggggug

SEQ ID NO: 158043 - RNA, 19 nt, Human
gagggcgguccugccucag

SEQ ID NO: 158044 - RNA, 22 nt, Human
gcagcuggcagggccagagggg

SEQ ID NO: 158045 - RNA, 23 nt, Human
gcaguccugugggcugagcucua

SEQ ID NO: 158046 - RNA, 24 nt, Human
gccaagaauggccagggacggggu

SEQ ID NO: 158047 - RNA, 20 nt, Human
gccacauggggguggaggga

SEQ ID NO: 158048 - RNA, 24 nt, Human
gcccauccugccuggccaagccaa

SEQ ID NO: 158049 - RNA, 22 nt, Human
gcccccucagcaccuuccacua

SEQ ID NO: 158050 - RNA, 24 nt, Human
gcgcagcccggcgucugcuccucg

SEQ ID NO: 158051 - RNA, 21 nt, Human
gcugccacugguggagaagcc

SEQ ID NO: 158052 - RNA, 20 nt, Human
gcugugauucuggaggcagg

SEQ ID NO: 158053 - RNA, 21 nt, Human
ggagaagccuccucagccucc

SEQ ID NO: 158054 - RNA, 25 nt, Human
ggagcucucccacguaguacugcuc

SEQ ID NO: 158055 - RNA, 23 nt, Human
ggcaggaaccucaucugcggagg

SEQ ID NO: 158056 - RNA, 18 nt, Human
ggcccgcagcagcugcuc

SEQ ID NO: 158057 - RNA, 20 nt, Human
ggcggagcgggggccauggc

SEQ ID NO: 158058 - RNA, 21 nt, Human
ggcugcagagagugugagucu

SEQ ID NO: 158059 - RNA, 23 nt, Human
ggcugccacauggggguggaggg

SEQ ID NO: 158060 - RNA, 22 nt, Human
ggcugccacugguggagaagcc

SEQ ID NO: 158061 - RNA, 19 nt, Human
gggagaggacacggaagcc

SEQ ID NO: 158062 - RNA, 19 nt, Human
gggaggacagggaccacag

SEQ ID NO: 158063 - RNA, 23 nt, Human
gggauggagguccagacucaggg

SEQ ID NO: 158064 - RNA, 24 nt, Human
gggcaggacggagggggugggagu

SEQ ID NO: 158065 - RNA, 24 nt, Human
gggccagaggggcugccccagggu

SEQ ID NO: 158066 - RNA, 26 nt, Human
gggccagggccgggcugagggcagga

SEQ ID NO: 158067 - RNA, 20 nt, Human
gggccccgcggcggacccag

SEQ ID NO: 158068 - RNA, 21 nt, Human
ggggccauggccggagaccgc

SEQ ID NO: 158069 - RNA, 20 nt, Human
ggggcggagcgggggccaug

SEQ ID NO: 158070 - RNA, 21 nt, Human
gggucgggaaggggccagggc

SEQ ID NO: 158071 - RNA, 19 nt, Human
ggguggacugugggaggca

SEQ ID NO: 158072 - RNA, 19 nt, Human
ggugaggcacugagaggug

SEQ ID NO: 158073 - RNA, 22 nt, Human
guccugccucagggcccccuca

SEQ ID NO: 158074 - RNA, 20 nt, Human
gucucuucuugcgagagcuc

SEQ ID NO: 158075 - RNA, 24 nt, Human
gugcggcggcccguccaggucggc

SEQ ID NO: 158076 - RNA, 24 nt, Human
guggggcugccacugguggagaag

SEQ ID NO: 158077 - RNA, 19 nt, Human
uaaagcaagcagcugggac

SEQ ID NO: 158078 - RNA, 19 nt, Human
uaagaaaggaaccaaaaac

SEQ ID NO: 158079 - RNA, 22 nt, Human
uaagccccuaagcgggcagcaa

SEQ ID NO: 158080 - RNA, 19 nt, Human
uaccaggggucaggagggc

SEQ ID NO: 158081 - RNA, 18 nt, Human
ucacuggcuucuccuucu

SEQ ID NO: 158082 - RNA, 23 nt, Human
ucagggcccccucagcaccuucc

SEQ ID NO: 158083 - RNA, 21 nt, Human
uccaggaagaagugggucacc

SEQ ID NO: 158084 - RNA, 18 nt, Human
ucccaguuuccaguuucu

SEQ ID NO: 158085 - RNA, 22 nt, Human
ucccuucagccugcugcugccu

SEQ ID NO: 158086 - RNA, 18 nt, Human
ucccuuggggagaagggc

SEQ ID NO: 158087 - RNA, 22 nt, Human
uccggggagguggugagcgcca

SEQ ID NO: 158088 - RNA, 21 nt, Human
ucuggaggcaggggagggacg

SEQ ID NO: 158089 - RNA, 20 nt, Human
ucugggagcgcccgaguagg

SEQ ID NO: 158090 - RNA, 20 nt, Human
ucuugcuucagggauugggu

SEQ ID NO: 158091 - RNA, 21 nt, Human
ugaagcaguccugugggcuga

SEQ ID NO: 158092 - RNA, 18 nt, Human
ugaggcuaaggcacaagg

SEQ ID NO: 158093 - RNA, 21 nt, Human
ugagugaguuggaaaccugcu

SEQ ID NO: 158094 - RNA, 21 nt, Human
ugauucuggaggcaggggagg

SEQ ID NO: 158095 - RNA, 18 nt, Human
ugccacugguggagaagc

SEQ ID NO: 158096 - RNA, 19 nt, Human
ugcccugacuaggcugggc

SEQ ID NO: 158097 - RNA, 22 nt, Human
ugccucagggcccccucagcac

SEQ ID NO: 158098 - RNA, 27 nt, Human
ugccucagggcccccucagcaccuucc

SEQ ID NO: 158099 - RNA, 21 nt, Human
ugcggaggcugggaggcaggg

SEQ ID NO: 158100 - RNA, 21 nt, Human
ugcuguggcagcagggcagcu

SEQ ID NO: 158101 - RNA, 20 nt, Human
uggagaugggguagggguua

SEQ ID NO: 158102 - RNA, 18 nt, Human
uggcagggccagaggggc

SEQ ID NO: 158103 - RNA, 20 nt, Human
uggccagggacggggugggg

SEQ ID NO: 158104 - RNA, 18 nt, Human
uggcgggugggggucggg

SEQ ID NO: 158105 - RNA, 19 nt, Human
uggggcugccacuggugga

SEQ ID NO: 158106 - RNA, 18 nt, Human
ugggggucgggaaggggc

SEQ ID NO: 158107 - RNA, 22 nt, Human
ugggggucgggaaggggccagg

SEQ ID NO: 158108 - RNA, 19 nt, Human
ugggguagggguuaaugag

SEQ ID NO: 158109 - RNA, 22 nt, Human
uuaaauagcuccgcagcaaaca

SEQ ID NO: 158110 - RNA, 20 nt, Human
uuauuggccaaaugcuucuc

SEQ ID NO: 158111 - RNA, 22 nt, Human
uucauuuccccuugcggcugcu

SEQ ID NO: 158112 - RNA, 26 nt, Human
uuuacauaagcucaacauguaggauc

SEQ ID NO: 158113 - RNA, 22 nt, Human
uuuguccaccucagagccacca

SEQ ID NO: 158114 - RNA, 24 nt, Human
uuuugguuacgaggaggaaggggc

SEQ ID NO: 158115 - RNA, 18 nt, Human
uuuuuuuuuuuuuguuuc

SEQ ID NO: 158116 - RNA, 18 nt, Human
uuuuuuuuuuuuuuuuug

SEQ ID NO: 158117 - RNA, 18 nt, Human
uuuuuuuuuuuuuuuuug

SEQ ID NO: 158118 - RNA, 19 nt, Human
uuuuuuuuuuuuuuuuuug

SEQ ID NO: 158119 - RNA, 22 nt, Human
uuuuuuuuuuuuuuuuuuguuu

SEQ ID NO: 158120 - RNA, 19 nt, Human
aaaauaauaugaaaugcag

SEQ ID NO: 158121 - RNA, 19 nt, Human
guggcaauagagcucccuc

SEQ ID NO: 158122 - RNA, 24 nt, Human
uaaaauaauaugaaaugcagacuu

SEQ ID NO: 158123 - RNA, 18 nt, Human
uucacgacugaccugcgg

SEQ ID NO: 158124 - RNA, 23 nt, Human
aaaaagaaaacaaaacaaaaauu

SEQ ID NO: 158125 - RNA, 24 nt, Human
aaaaagaaaacaaaacaaaaauua

SEQ ID NO: 158126 - RNA, 21 nt, Human
aaaaagaagggggugguuaaa

SEQ ID NO: 158127 - RNA, 20 nt, Human
aaaaauuguacccccucucc

SEQ ID NO: 158128 - RNA, 20 nt, Human
aaaagaaaacaaaacaaaaa

SEQ ID NO: 158129 - RNA, 23 nt, Human
aaagaaaaaaaacaacuugagag

SEQ ID NO: 158130 - RNA, 24 nt, Human
aaagaaaacaaaacaaaaauuagc

SEQ ID NO: 158131 - RNA, 24 nt, Human
aacaacuugagaggcugaggcagg

SEQ ID NO: 158132 - RNA, 20 nt, Human
aaccaucacccccugaauaa

SEQ ID NO: 158133 - RNA, 22 nt, Human
aacccacaacaacaaaaaagaa

SEQ ID NO: 158134 - RNA, 27 nt, Human
aacccacaacaacaaaaaaggaaaguc

SEQ ID NO: 158135 - RNA, 21 nt, Human
aaggaaacuuuuugagcccug

SEQ ID NO: 158136 - RNA, 22 nt, Human
aaggaaacuuuuugagcccugg

SEQ ID NO: 158137 - RNA, 18 nt, Human
acuacauuccagccugag

SEQ ID NO: 158138 - RNA, 20 nt, Human
acuugauggggugaaauaaa

SEQ ID NO: 158139 - RNA, 19 nt, Human
agagcugagaggauaucua

SEQ ID NO: 158140 - RNA, 25 nt, Human
agauguuaaagacucauaugcagcc

SEQ ID NO: 158141 - RNA, 24 nt, Human
aggauugcuugaggccagggguuc

SEQ ID NO: 158142 - RNA, 24 nt, Human
aggcaggaagauugcaugagucca

SEQ ID NO: 158143 - RNA, 18 nt, Human
aggcaggaggauugcuug

SEQ ID NO: 158144 - RNA, 23 nt, Human
aggcaggaggauugcuugaggcc

SEQ ID NO: 158145 - RNA, 27 nt, Human
aggccagggguucaagaccagccuggg

SEQ ID NO: 158146 - RNA, 21 nt, Human
aggcugaggcaggaggauugc

SEQ ID NO: 158147 - RNA, 24 nt, Human
aggcugaggcaggaggauugcuug

SEQ ID NO: 158148 - RNA, 21 nt, Human
aggcugcaucagaaucaccag

SEQ ID NO: 158149 - RNA, 19 nt, Human
auagaucuucuguccaauu

SEQ ID NO: 158150 - RNA, 18 nt, Human
caagauguuaaagacuca

SEQ ID NO: 158151 - RNA, 21 nt, Human
cacgcaguauucagcuuucaa

SEQ ID NO: 158152 - RNA, 21 nt, Human
cacuacauuccagccugagug

SEQ ID NO: 158153 - RNA, 22 nt, Human
cacuacauuccagccugaguga

SEQ ID NO: 158154 - RNA, 19 nt, Human
cagaagccugaggcaggaa

SEQ ID NO: 158155 - RNA, 18 nt, Human
caggaguuugagguuaca

SEQ ID NO: 158156 - RNA, 23 nt, Human
cagugccagaaaauuauucacaa

SEQ ID NO: 158157 - RNA, 18 nt, Human
caucgcccccugccaacc

SEQ ID NO: 158158 - RNA, 23 nt, Human
cauuccagccugagugaaagagu

SEQ ID NO: 158159 - RNA, 20 nt, Human
ccacuacauuccagccugag

SEQ ID NO: 158160 - RNA, 20 nt, Human
ccacuacauuccagccugag

SEQ ID NO: 158161 - RNA, 21 nt, Human
ccacuacauuccagccugagu

SEQ ID NO: 158162 - RNA, 24 nt, Human
ccagaaaauuauucacaaccaguu

SEQ ID NO: 158163 - RNA, 23 nt, Human
cccucucucuacgaaaacagucu

SEQ ID NO: 158164 - RNA, 19 nt, Human
cccugccaacccuccaacu

SEQ ID NO: 158165 - RNA, 24 nt, Human
ccuagcuacucagaagccugaggc

SEQ ID NO: 158166 - RNA, 21 nt, Human
ccucuaggcagcuagagauuc

SEQ ID NO: 158167 - RNA, 24 nt, Human
cgcccccugccaacccuccaacuc

SEQ ID NO: 158168 - RNA, 19 nt, Human
cuaaaauacaauuauguga

SEQ ID NO: 158169 - RNA, 23 nt, Human
cuaugaucucuccacuacauucc

SEQ ID NO: 158170 - RNA, 21 nt, Human
cuguaaccaucacccccugaa

SEQ ID NO: 158171 - RNA, 19 nt, Human
cuugaggccagggguucaa

SEQ ID NO: 158172 - RNA, 24 nt, Human
gaaaaaacccacaacaacaaaaaa

SEQ ID NO: 158173 - RNA, 26 nt, Human
gaaaaaacccacaacaacaaaaaaga

SEQ ID NO: 158174 - RNA, 22 nt, Human
gagucagccucuaggcagcuag

SEQ ID NO: 158175 - RNA, 24 nt, Human
gauugcaugaguccaggaguuuga

SEQ ID NO: 158176 - RNA, 20 nt, Human
gccaacccuccaacucuucc

SEQ ID NO: 158177 - RNA, 23 nt, Human
ggauugcuugaggccagggguuc

SEQ ID NO: 158178 - RNA, 20 nt, Human
gguacaauauagaucuucug

SEQ ID NO: 158179 - RNA, 22 nt, Human
gucauauguauauaccacuuag

SEQ ID NO: 158180 - RNA, 19 nt, Human
guccaauuuguauuuugga

SEQ ID NO: 158181 - RNA, 26 nt, Human
uaaaaagaaaacaaaacaaaaauuag

SEQ ID NO: 158182 - RNA, 23 nt, Human
uaagacccucucucuacgaaaac

SEQ ID NO: 158183 - RNA, 23 nt, Human
uaaguaaauuaucaucgcccccu

SEQ ID NO: 158184 - RNA, 21 nt, Human
uaaguuuucuggcugagcaua

SEQ ID NO: 158185 - RNA, 18 nt, Human
uacaaaaauguaauacaa

SEQ ID NO: 158186 - RNA, 26 nt, Human
uacauuuuaauauauaugucauaugu

SEQ ID NO: 158187 - RNA, 24 nt, Human
uaccaauguuuauaaaaggaccaa

SEQ ID NO: 158188 - RNA, 22 nt, Human
uacgucaugugaaaauaugaau

SEQ ID NO: 158189 - RNA, 24 nt, Human
uauagcaagaccccaucucuaaaa

SEQ ID NO: 158190 - RNA, 27 nt, Human
uauagcaagaccccaucucuaaaaaaa

SEQ ID NO: 158191 - RNA, 24 nt, Human
uauaugucauauguauauaccacu

SEQ ID NO: 158192 - RNA, 19 nt, Human
ucagccaagcgugggaaug

SEQ ID NO: 158193 - RNA, 21 nt, Human
ucgcccccugccaacccucca

SEQ ID NO: 158194 - RNA, 18 nt, Human
ucucagaugauccugauu

SEQ ID NO: 158195 - RNA, 20 nt, Human
ucucuaaaaaaaauaaaaag

SEQ ID NO: 158196 - RNA, 27 nt, Human
ugaaaaaacccacaacaacaaaaaaga

SEQ ID NO: 158197 - RNA, 19 nt, Human
ugaaauaaauaguucuggu

SEQ ID NO: 158198 - RNA, 27 nt, Human
ugaauaaaaggaaacuuuuugagcccc

SEQ ID NO: 158199 - RNA, 23 nt, Human
ugagaggauaucuaucaaaauca

SEQ ID NO: 158200 - RNA, 22 nt, Human
ugagaggcugaggcaggaggau

SEQ ID NO: 158201 - RNA, 24 nt, Human
ugaggcaggaagauugcaugaguc

SEQ ID NO: 158202 - RNA, 24 nt, Human
ugaggcaggaggauugcuugaggc

SEQ ID NO: 158203 - RNA, 25 nt, Human
ugaggcaggaggauugcuugaggcc

SEQ ID NO: 158204 - RNA, 26 nt, Human
ugaggcaggaggauugcuugaggcca

SEQ ID NO: 158205 - RNA, 18 nt, Human
ugcaugaguccaggaguu

SEQ ID NO: 158206 - RNA, 22 nt, Human
ugggcaauauagcaagacccca

SEQ ID NO: 158207 - RNA, 18 nt, Human
uguaaccaucacccccug

SEQ ID NO: 158208 - RNA, 21 nt, Human
uguaaccaucacccccugaau

SEQ ID NO: 158209 - RNA, 20 nt, Human
uguauugggaaauaucugcc

SEQ ID NO: 158210 - RNA, 21 nt, Human
ugucaauucauauucacauac

SEQ ID NO: 158211 - RNA, 19 nt, Human
ugucuauuauucuacacuc

SEQ ID NO: 158212 - RNA, 21 nt, Human
ugugaaaaaacccacaacaac

SEQ ID NO: 158213 - RNA, 23 nt, Human
uguguuuaugugaaaaaacccac

SEQ ID NO: 158214 - RNA, 21 nt, Human
uuauaagugagaacacgcagu

SEQ ID NO: 158215 - RNA, 24 nt, Human
uuauaagugagaacacgcaguauu

SEQ ID NO: 158216 - RNA, 25 nt, Human
uugagaggcugaggcaggaggauug

SEQ ID NO: 158217 - RNA, 22 nt, Human
uugaggccagggguucaagacc

SEQ ID NO: 158218 - RNA, 23 nt, Human
uugcagcugcaaaugcuuaaaaa

SEQ ID NO: 158219 - RNA, 23 nt, Human
uugcuugaggccagggguucaag

SEQ ID NO: 158220 - RNA, 20 nt, Human
uuucucagaugauccugauu

SEQ ID NO: 158221 - RNA, 20 nt, Human
uuuucagccaagcgugggaa

SEQ ID NO: 158222 - RNA, 22 nt, Human
uuuuugagcccuggaaaauugg

SEQ ID NO: 158223 - RNA, 21 nt, Human
aaaaaaaaaaaaaaccacaua

SEQ ID NO: 158224 - RNA, 31 nt, Human
augagugcaguuaaaaaaaaaaaaaaaaaaa

SEQ ID NO: 158225 - RNA, 19 nt, Human
ccaugggaacuggaacugg

SEQ ID NO: 158226 - RNA, 20 nt, Human
ccaugggaacuggaacugga

SEQ ID NO: 158227 - RNA, 23 nt, Human
cuaugagugcaguuaaaaaaaaa

SEQ ID NO: 158228 - RNA, 25 nt, Human
cucagagcacccuaugagugcaguu

SEQ ID NO: 158229 - RNA, 21 nt, Human
cugaccccagaagaauucgug

SEQ ID NO: 158230 - RNA, 26 nt, Human
gugcaguuaaaaaaaaaaaaaaaaaa

SEQ ID NO: 158231 - RNA, 20 nt, Human
guggugcugagucgaggggu

SEQ ID NO: 158232 - RNA, 22 nt, Human
ucagagcacccuaugagugcag

SEQ ID NO: 158233 - RNA, 18 nt, Human
ugaccucagagcacccua

SEQ ID NO: 158234 - RNA, 24 nt, Human
ugagugcaguuaaaaaaaaaaaaa

SEQ ID NO: 158235 - RNA, 20 nt, Human
uuggcagaguaguagucagc

SEQ ID NO: 158236 - RNA, 23 nt, Human
aaacaacaauaucuuuuugaaca

SEQ ID NO: 158237 - RNA, 25 nt, Human
caauaucuuuuugaacaauauaucc

SEQ ID NO: 158238 - RNA, 20 nt, Human
uaaaucagggaaaacaacaa

SEQ ID NO: 158239 - RNA, 18 nt, Human
ucaaugcgaacuucaguc

SEQ ID NO: 158240 - RNA, 21 nt, Human
ucagggaaaacaacaauaucu

SEQ ID NO: 158241 - RNA, 19 nt, Human
ugaauaaaaucagcuuggg

SEQ ID NO: 158242 - RNA, 21 nt, Human
uuuugaacaauauaucccaca

SEQ ID NO: 158243 - RNA, 25 nt, Human
aaaaaaagaaagaaacaguauggag

SEQ ID NO: 158244 - RNA, 18 nt, Human
aauuaacuccuguccaaa

SEQ ID NO: 158245 - RNA, 18 nt, Human
acaguauggagauuugcu

SEQ ID NO: 158246 - RNA, 22 nt, Human
augaaaaaaaaaagaaagaaac

SEQ ID NO: 158247 - RNA, 23 nt, Human
gcuggcgugcagagaggggucug

SEQ ID NO: 158248 - RNA, 18 nt, Human
gggcgggcuggcgugcag

SEQ ID NO: 158249 - RNA, 21 nt, Human
ugaacacaguaaugaaaaaaa

SEQ ID NO: 158250 - RNA, 20 nt, Human
uguccaaagugaugauggaa

SEQ ID NO: 158251 - RNA, 23 nt, Human
cagccccuaagucaccccacuuc

SEQ ID NO: 158252 - RNA, 18 nt, Human
cccugggccgggccuggc

SEQ ID NO: 158253 - RNA, 21 nt, Human
cuuauaaacucucccaguugc

SEQ ID NO: 158254 - RNA, 21 nt, Human
uaaacucucccaguugcugag

SEQ ID NO: 158255 - RNA, 20 nt, Human
uagcucccugggccgggccu

SEQ ID NO: 158256 - RNA, 24 nt, Human
uaucccagcuuauaaacucuccca

SEQ ID NO: 158257 - RNA, 23 nt, Human
ugaggagaauggguggugcugag

SEQ ID NO: 158258 - RNA, 25 nt, Human
uguagcucccugggccgggccuggc

SEQ ID NO: 158259 - RNA, 28 nt, Human
uuauaaacucucccaguugcugaggcuc

SEQ ID NO: 158260 - RNA, 24 nt, Human
uuguagcucccugggccgggccug

SEQ ID NO: 158261 - RNA, 24 nt, Human
uuuuuuguccuuauaucaguuuua

SEQ ID NO: 158262 - RNA, 19 nt, Human
aaacacgaacgcuuccuuc

SEQ ID NO: 158263 - RNA, 19 nt, Human
aaagcaaacauucaaaacc

SEQ ID NO: 158264 - RNA, 21 nt, Human
aaauaaccccugaaaaaggau

SEQ ID NO: 158265 - RNA, 22 nt, Human
aacacuuaaagcaaacauucaa

SEQ ID NO: 158266 - RNA, 21 nt, Human
aacauagaaauagccaacacu

SEQ ID NO: 158267 - RNA, 19 nt, Human
aacuuuaaaaaaucccugg

SEQ ID NO: 158268 - RNA, 24 nt, Human
aagaaccccgaauggacaagucaa

SEQ ID NO: 158269 - RNA, 24 nt, Human
aagcaaacauucaaaaccccaagg

SEQ ID NO: 158270 - RNA, 23 nt, Human
accuuaugcuccaacagaaacca

SEQ ID NO: 158271 - RNA, 19 nt, Human
acugugccauuuccucuga

SEQ ID NO: 158272 - RNA, 19 nt, Human
agacagaagauuuaaaacc

SEQ ID NO: 158273 - RNA, 21 nt, Human
agcagacaucucagagauagc

SEQ ID NO: 158274 - RNA, 23 nt, Human
agguaacucuuucuugaaaugcu

SEQ ID NO: 158275 - RNA, 24 nt, Human
auagaaaucagguagcauuauaag

SEQ ID NO: 158276 - RNA, 21 nt, Human
auagccaacacuuaaagcaaa

SEQ ID NO: 158277 - RNA, 20 nt, Human
auauacucccuuaauagcuu

SEQ ID NO: 158278 - RNA, 22 nt, Human
caaaauuaacaacaugaaggcc

SEQ ID NO: 158279 - RNA, 24 nt, Human
cacauuuauaguauccccuuuaca

SEQ ID NO: 158280 - RNA, 21 nt, Human
cagacagcugcagaauuugca

SEQ ID NO: 158281 - RNA, 19 nt, Human
cagcugcagaauuugcagc

SEQ ID NO: 158282 - RNA, 20 nt, Human
caggagaagagauuguggaa

SEQ ID NO: 158283 - RNA, 23 nt, Human
ccagaggcuccuuaucugcaugg

SEQ ID NO: 158284 - RNA, 23 nt, Human
cccaggaaaugaacuuuccagau

SEQ ID NO: 158285 - RNA, 20 nt, Human
ccccgaauggacaagucaaa

SEQ ID NO: 158286 - RNA, 19 nt, Human
ccuaugagaagaaccccga

SEQ ID NO: 158287 - RNA, 21 nt, Human
cucacagaccccaaaacagcu

SEQ ID NO: 158288 - RNA, 23 nt, Human
cucccgcuuacuggaaaccuuau

SEQ ID NO: 158289 - RNA, 23 nt, Human
cugaaaaaggauggagucgggga

SEQ ID NO: 158290 - RNA, 20 nt, Human
cuggaaaccuuaugcuccaa

SEQ ID NO: 158291 - RNA, 23 nt, Human
cuuacuggaaaccuuaugcucca

SEQ ID NO: 158292 - RNA, 21 nt, Human
gaaucaggccuggagaaccga

SEQ ID NO: 158293 - RNA, 19 nt, Human
gccugugagaagggacagu

SEQ ID NO: 158294 - RNA, 21 nt, Human
guacucucacagaccccaaaa

SEQ ID NO: 158295 - RNA, 24 nt, Human
guauauacucccuuaauagcuuua

SEQ ID NO: 158296 - RNA, 18 nt, Human
guucugugaaugccugug

SEQ ID NO: 158297 - RNA, 22 nt, Human
uaaaaaaucccuggagaaguga

SEQ ID NO: 158298 - RNA, 21 nt, Human
uaaagcaaacauucaaaaccc

SEQ ID NO: 158299 - RNA, 22 nt, Human
uaaagcaaacauucaaaacccc

SEQ ID NO: 158300 - RNA, 28 nt, Human
uaaagcaaacauucaaaaccccaaggug

SEQ ID NO: 158301 - RNA, 19 nt, Human
uaaagugaacugcuguuaa

SEQ ID NO: 158302 - RNA, 19 nt, Human
uaacuuagcacauuuauag

SEQ ID NO: 158303 - RNA, 23 nt, Human
uaagaauacauauaugaaguuag

SEQ ID NO: 158304 - RNA, 28 nt, Human
uaccauaaacauggucugcaacaugagg

SEQ ID NO: 158305 - RNA, 21 nt, Human
uagaaaagcagggagacagaa

SEQ ID NO: 158306 - RNA, 21 nt, Human
uagcacauuuauaguaucccc

SEQ ID NO: 158307 - RNA, 23 nt, Human
uauuaccauaaacauggucugca

SEQ ID NO: 158308 - RNA, 23 nt, Human
uauucaaaauuaacaacaugaag

SEQ ID NO: 158309 - RNA, 22 nt, Human
uauuuugguuuccuucauuguu

SEQ ID NO: 158310 - RNA, 18 nt, Human
ucaauaaguacucaagua

SEQ ID NO: 158311 - RNA, 20 nt, Human
ucacuauagaaucuaaggca

SEQ ID NO: 158312 - RNA, 24 nt, Human
ucagucaaauguggcaaagacuca

SEQ ID NO: 158313 - RNA, 20 nt, Human
uccccuuuacaauuuuuaag

SEQ ID NO: 158314 - RNA, 26 nt, Human
ucccucuagugcacuguacucuuuag

SEQ ID NO: 158315 - RNA, 24 nt, Human
ucucacagaccccaaaacagcugc

SEQ ID NO: 158316 - RNA, 26 nt, Human
ucugcaacaugaggugacuguaaggc

SEQ ID NO: 158317 - RNA, 19 nt, Human
ugagaagaaccccgaaugg

SEQ ID NO: 158318 - RNA, 20 nt, Human
ugagaagaaccccgaaugga

SEQ ID NO: 158319 - RNA, 18 nt, Human
ugagaagggacaguagca

SEQ ID NO: 158320 - RNA, 21 nt, Human
uggagaaccgaguccaagagc

SEQ ID NO: 158321 - RNA, 19 nt, Human
ugguucagugaagauaaag

SEQ ID NO: 158322 - RNA, 18 nt, Human
ugguuuccuucauuguuu

SEQ ID NO: 158323 - RNA, 25 nt, Human
uguucuguuuccucuagcauuccua

SEQ ID NO: 158324 - RNA, 20 nt, Human
uuaaagcaaacauucaaaac

SEQ ID NO: 158325 - RNA, 24 nt, Human
uuauaguauccccuuuacaauuuu

SEQ ID NO: 158326 - RNA, 25 nt, Human
uuauuuuuuggggaaaaaggcaagu

SEQ ID NO: 158327 - RNA, 21 nt, Human
uugugagauucuccagccagg

SEQ ID NO: 158328 - RNA, 22 nt, Human
uuugcagcaaguagcagacauc

SEQ ID NO: 158329 - RNA, 25 nt, Human
uuuuggaaauuuuguuuugguuuau

SEQ ID NO: 158330 - RNA, 19 nt, Human
uuuuuuggggaaaaaggca

SEQ ID NO: 158331 - RNA, 23 nt, Human
aaaaaauaaauauauaaagaaga

SEQ ID NO: 158332 - RNA, 21 nt, Human
aaaaagcccccaaauaaccaa

SEQ ID NO: 158333 - RNA, 19 nt, Human
aaagcccccaaauaaccaa

SEQ ID NO: 158334 - RNA, 18 nt, Human
aacaaugacaucaaaacc

SEQ ID NO: 158335 - RNA, 21 nt, Human
aaggugcuuuuuaaauaagcu

SEQ ID NO: 158336 - RNA, 18 nt, Human
aaguccugauuugagcac

SEQ ID NO: 158337 - RNA, 20 nt, Human
aauaaugauuaucuagacua

SEQ ID NO: 158338 - RNA, 26 nt, Human
acaagacaauaauuacacagcaacaa

SEQ ID NO: 158339 - RNA, 22 nt, Human
acagcaacaaaucuuuuguuca

SEQ ID NO: 158340 - RNA, 18 nt, Human
acauccaaacuuuuaaaa

SEQ ID NO: 158341 - RNA, 26 nt, Human
acugacucacacacauccauacacgc

SEQ ID NO: 158342 - RNA, 21 nt, Human
agacaauaauuacacagcaac

SEQ ID NO: 158343 - RNA, 24 nt, Human
aguagaauuaacagacuucagcga

SEQ ID NO: 158344 - RNA, 24 nt, Human
aguguacaaagguuaugggagaaa

SEQ ID NO: 158345 - RNA, 20 nt, Human
aucuagacuaaaaggagacu

SEQ ID NO: 158346 - RNA, 20 nt, Human
auucuuccauuuaaguuugg

SEQ ID NO: 158347 - RNA, 20 nt, Human
caaaaaguagaauuaacaga

SEQ ID NO: 158348 - RNA, 19 nt, Human
caaacuaugaaaaacacua

SEQ ID NO: 158349 - RNA, 23 nt, Human
cacacacauccauacacgcauca

SEQ ID NO: 158350 - RNA, 28 nt, Human
cacacacauccauacacgcaucagugca

SEQ ID NO: 158351 - RNA, 19 nt, Human
caggaccagcagcuucuga

SEQ ID NO: 158352 - RNA, 21 nt, Human
ccacugacucacacacaucca

SEQ ID NO: 158353 - RNA, 22 nt, Human
cccucucuugcuauuuuguuuc

SEQ ID NO: 158354 - RNA, 19 nt, Human
ccuucccaacaacgaauuc

SEQ ID NO: 158355 - RNA, 19 nt, Human
cuaauuuuaaaaugaaaua

SEQ ID NO: 158356 - RNA, 19 nt, Human
cuagagaccaauuaucaac

SEQ ID NO: 158357 - RNA, 22 nt, Human
cucacacacauccauacacgca

SEQ ID NO: 158358 - RNA, 21 nt, Human
cucacuguagcaaacugaugc

SEQ ID NO: 158359 - RNA, 24 nt, Human
cuugcagcuugagacaugcauuuc

SEQ ID NO: 158360 - RNA, 21 nt, Human
gaagagacagacacaaguuug

SEQ ID NO: 158361 - RNA, 25 nt, Human
gagaaucuuccucgaucaagaggcu

SEQ ID NO: 158362 - RNA, 19 nt, Human
ggagaaaggauaaggugcu

SEQ ID NO: 158363 - RNA, 23 nt, Human
uaaaaaagcccccaaauaaccaa

SEQ ID NO: 158364 - RNA, 24 nt, Human
uaaauacaguaaguaaaaaagccc

SEQ ID NO: 158365 - RNA, 18 nt, Human
uaacuucaacaaugacau

SEQ ID NO: 158366 - RNA, 20 nt, Human
uaagcuaccacugacucaca

SEQ ID NO: 158367 - RNA, 18 nt, Human
uaagguggugugacacag

SEQ ID NO: 158368 - RNA, 20 nt, Human
uaauccagauauaacaacag

SEQ ID NO: 158369 - RNA, 21 nt, Human
uacacagcaacaaaucuuuug

SEQ ID NO: 158370 - RNA, 24 nt, Human
uacacagcaacaaaucuuuuguuc

SEQ ID NO: 158371 - RNA, 23 nt, Human
uacauauagucaacgaaauauuc

SEQ ID NO: 158372 - RNA, 20 nt, Human
uagagaccaauuaucaacug

SEQ ID NO: 158373 - RNA, 23 nt, Human
uaugaaaaacacuaauuuuaaaa

SEQ ID NO: 158374 - RNA, 22 nt, Human
ucacacaagcaagguuucugaa

SEQ ID NO: 158375 - RNA, 19 nt, Human
ucagugcaaacuaugaaaa

SEQ ID NO: 158376 - RNA, 21 nt, Human
uccucgaucaagaggcuaagg

SEQ ID NO: 158377 - RNA, 22 nt, Human
ucucaugugucuuagugagaau

SEQ ID NO: 158378 - RNA, 19 nt, Human
ugaaagaagagacagacac

SEQ ID NO: 158379 - RNA, 22 nt, Human
ugaaauaaugauuaucuagacu

SEQ ID NO: 158380 - RNA, 22 nt, Human
ugaacagaagacuucauugaac

SEQ ID NO: 158381 - RNA, 23 nt, Human
ugaacauuauacagaacauauaa

SEQ ID NO: 158382 - RNA, 24 nt, Human
ugagaaugcuaucaucaaauacau

SEQ ID NO: 158383 - RNA, 24 nt, Human
ugcauacaagacaauaauuacaca

SEQ ID NO: 158384 - RNA, 19 nt, Human
ugggagaaaggauaaggug

SEQ ID NO: 158385 - RNA, 18 nt, Human
uggguauuuuccuaguuu

SEQ ID NO: 158386 - RNA, 26 nt, Human
ugugacacaggaccagcagcuucuga

SEQ ID NO: 158387 - RNA, 20 nt, Human
uguuacagcuguuuccccag

SEQ ID NO: 158388 - RNA, 23 nt, Human
uuacaaauaacuucaacaaugac

SEQ ID NO: 158389 - RNA, 24 nt, Human
uucaugcaucaccaaccaaacuuc

SEQ ID NO: 158390 - RNA, 24 nt, Human
uucucauacugacaaguacaguca

SEQ ID NO: 158391 - RNA, 23 nt, Human
uucucaugugucuuagugagaau

SEQ ID NO: 158392 - RNA, 24 nt, Human
uucugaggguggcaaauguuacag

SEQ ID NO: 158393 - RNA, 21 nt, Human
uuuaaaaucacugcuucccca

SEQ ID NO: 158394 - RNA, 24 nt, Human
uuuccuaguuucaacagaugaaca

SEQ ID NO: 158395 - RNA, 25 nt, Human
aaacaaccagggaaggaauaaaagc

SEQ ID NO: 158396 - RNA, 20 nt, Human
aaacacaaaaucuaaacaau

SEQ ID NO: 158397 - RNA, 21 nt, Human
aaacaggaaaaaaugauaaca

SEQ ID NO: 158398 - RNA, 25 nt, Human
aaacagguauaaaaaugugagauca

SEQ ID NO: 158399 - RNA, 27 nt, Human
aaacagguauaaaaaugugagaucaaa

SEQ ID NO: 158400 - RNA, 20 nt, Human
aaagaaaccacacucccaag

SEQ ID NO: 158401 - RNA, 21 nt, Human
aaagaaaccacacucccaagg

SEQ ID NO: 158402 - RNA, 20 nt, Human
aaauccaaaacaccacacaa

SEQ ID NO: 158403 - RNA, 18 nt, Human
aaaugugagaucaaaauc

SEQ ID NO: 158404 - RNA, 21 nt, Human
aaauucuagagguugaaaacc

SEQ ID NO: 158405 - RNA, 25 nt, Human
aacacaaaaucuaaacaauucugca

SEQ ID NO: 158406 - RNA, 19 nt, Human
aacacacacacacacauau

SEQ ID NO: 158407 - RNA, 23 nt, Human
aacagguauaaaaaugugagauc

SEQ ID NO: 158408 - RNA, 24 nt, Human
aagaacaaacaaagcuuuucauca

SEQ ID NO: 158409 - RNA, 22 nt, Human
aagaaugagaauacucacauac

SEQ ID NO: 158410 - RNA, 23 nt, Human
aagcaaaaugaaaggcuuucuga

SEQ ID NO: 158411 - RNA, 19 nt, Human
aauaacuuuugguuuuguu

SEQ ID NO: 158412 - RNA, 23 nt, Human
aauaauagaagcagcaguaagaa

SEQ ID NO: 158413 - RNA, 19 nt, Human
aaugcaaacuacugaucaa

SEQ ID NO: 158414 - RNA, 22 nt, Human
acaaacaaagcuuuucaucaag

SEQ ID NO: 158415 - RNA, 21 nt, Human
acaacauaagcaacacacaca

SEQ ID NO: 158416 - RNA, 23 nt, Human
acacacacacacacauauauagg

SEQ ID NO: 158417 - RNA, 22 nt, Human
acacacacacacauauauauau

SEQ ID NO: 158418 - RNA, 24 nt, Human
acacacacauauauauaugcauau

SEQ ID NO: 158419 - RNA, 21 nt, Human
acacagcuaaagggaaauaac

SEQ ID NO: 158420 - RNA, 19 nt, Human
acagcuaaagggaaauaac

SEQ ID NO: 158421 - RNA, 26 nt, Human
acauaacuucagggaaaagggaacgc

SEQ ID NO: 158422 - RNA, 24 nt, Human
accacacucccaaguuacugcaca

SEQ ID NO: 158423 - RNA, 21 nt, Human
acccggacagccggcggaggc

SEQ ID NO: 158424 - RNA, 24 nt, Human
acucggaaagcucgcaaaaaggaa

SEQ ID NO: 158425 - RNA, 25 nt, Human
agaaaaaaagaauaaauacaaauau

SEQ ID NO: 158426 - RNA, 19 nt, Human
agaaaaagccgcagcggcg

SEQ ID NO: 158427 - RNA, 21 nt, Human
agaaacaugauucuccuuaac

SEQ ID NO: 158428 - RNA, 18 nt, Human
agaauuagcagcacccaa

SEQ ID NO: 158429 - RNA, 24 nt, Human
agagaaaaaaagaauaaauacaaa

SEQ ID NO: 158430 - RNA, 26 nt, Human
agccuuauugugcugaagaaggcaau

SEQ ID NO: 158431 - RNA, 21 nt, Human
agcgcugggacgaggaggagc

SEQ ID NO: 158432 - RNA, 22 nt, Human
agcuuuugggaguugggggcag

SEQ ID NO: 158433 - RNA, 21 nt, Human
aggcaauaauagaagcagccg

SEQ ID NO: 158434 - RNA, 24 nt, Human
aggcauuggaagcugcaaauuucc

SEQ ID NO: 158435 - RNA, 21 nt, Human
aggcgggacucagcgcgagcc

SEQ ID NO: 158436 - RNA, 21 nt, Human
agggauaaacaaccagggaag

SEQ ID NO: 158437 - RNA, 20 nt, Human
aggggcgggcggagcggggg

SEQ ID NO: 158438 - RNA, 19 nt, Human
aguugggggcagauugggg

SEQ ID NO: 158439 - RNA, 24 nt, Human
auaaaguacgccuucaacugagaa

SEQ ID NO: 158440 - RNA, 31 nt, Human
auaagcaacacacacacacacauauauauag

SEQ ID NO: 158441 - RNA, 23 nt, Human
auacacauaacuucagggaaaac

SEQ ID NO: 158442 - RNA, 27 nt, Human
auacauguacauuuuaaaaucaauccc

SEQ ID NO: 158443 - RNA, 21 nt, Human
caaaaaggaaccgcgugcccg

SEQ ID NO: 158444 - RNA, 21 nt, Human
caaagaauuagcagcacccaa

SEQ ID NO: 158445 - RNA, 24 nt, Human
caaguguuugacuuagaaauguac

SEQ ID NO: 158446 - RNA, 22 nt, Human
cacacacacacacauauauaua

SEQ ID NO: 158447 - RNA, 22 nt, Human
cacacacacauauauauaugca

SEQ ID NO: 158448 - RNA, 22 nt, Human
cacauauauauaugcauauaua

SEQ ID NO: 158449 - RNA, 20 nt, Human
cacccggacagccggcggag

SEQ ID NO: 158450 - RNA, 22 nt, Human
cacccggacagccggcggaggc

SEQ ID NO: 158451 - RNA, 21 nt, Human
cacuguaauuauucacaacau

SEQ ID NO: 158452 - RNA, 19 nt, Human
cagccggccggcgccuggc

SEQ ID NO: 158453 - RNA, 19 nt, Human
caguuucuaagcucuuccc

SEQ ID NO: 158454 - RNA, 18 nt, Human
cauaaauauuuuagagca

SEQ ID NO: 158455 - RNA, 18 nt, Human
cauauauauaaaaaauga

SEQ ID NO: 158456 - RNA, 21 nt, Human
ccaguuucuaagcucuuccca

SEQ ID NO: 158457 - RNA, 21 nt, Human
cccaccgcgucuucgcagccg

SEQ ID NO: 158458 - RNA, 18 nt, Human
ccggcgccuggcacucgg

SEQ ID NO: 158459 - RNA, 23 nt, Human
ccucuuuuucucuuaagaagaac

SEQ ID NO: 158460 - RNA, 24 nt, Human
cgcagccggccggcgccuggcacu

SEQ ID NO: 158461 - RNA, 19 nt, Human
cgcccggaggggcgggcgg

SEQ ID NO: 158462 - RNA, 22 nt, Human
cgcgcgcgcacccggacagccg

SEQ ID NO: 158463 - RNA, 21 nt, Human
cggaaagcucgcaaaaaggaa

SEQ ID NO: 158464 - RNA, 22 nt, Human
cggagcgggggcgcgcgguggu

SEQ ID NO: 158465 - RNA, 18 nt, Human
cuagaacuaugcaaaacu

SEQ ID NO: 158466 - RNA, 22 nt, Human
cucacacauuuaaaaucaccau

SEQ ID NO: 158467 - RNA, 21 nt, Human
cucuuggucucagcuuuucag

SEQ ID NO: 158468 - RNA, 18 nt, Human
cugugacuuuuugaauca

SEQ ID NO: 158469 - RNA, 21 nt, Human
cuuuaucuguucucaucuugu

SEQ ID NO: 158470 - RNA, 24 nt, Human
gaaaaaaagaauaaauacaaauau

SEQ ID NO: 158471 - RNA, 18 nt, Human
gaaaaccaccaggcuacc

SEQ ID NO: 158472 - RNA, 20 nt, Human
gagaaaaagccgcagcggcg

SEQ ID NO: 158473 - RNA, 18 nt, Human
gaggaggagcgcgcggcg

SEQ ID NO: 158474 - RNA, 20 nt, Human
gcaaagaauaacaguauuaa

SEQ ID NO: 158475 - RNA, 18 nt, Human
gcacccggacagccggcg

SEQ ID NO: 158476 - RNA, 18 nt, Human
gcacucggaaagcucgca

SEQ ID NO: 158477 - RNA, 22 nt, Human
gcagcaguaagaauagcaguac

SEQ ID NO: 158478 - RNA, 23 nt, Human
gcccacaucuguacaaaacaaca

SEQ ID NO: 158479 - RNA, 19 nt, Human
gccggcggaggcgggacuc

SEQ ID NO: 158480 - RNA, 21 nt, Human
gcgccuggcacucggaaagcu

SEQ ID NO: 158481 - RNA, 27 nt, Human
gcuuuugggaguugggggcagauucuc

SEQ ID NO: 158482 - RNA, 21 nt, Human
ggaaaggcuucuaaaauggug

SEQ ID NO: 158483 - RNA, 19 nt, Human
ggccggcgccuggcacucg

SEQ ID NO: 158484 - RNA, 20 nt, Human
ggccggcgccuggcacucgg

SEQ ID NO: 158485 - RNA, 18 nt, Human
gggcgggcggagcggggg

SEQ ID NO: 158486 - RNA, 21 nt, Human
guauuucugaaauaucacaca

SEQ ID NO: 158487 - RNA, 19 nt, Human
guuuucuuuuuacucuauc

SEQ ID NO: 158488 - RNA, 21 nt, Human
uaaaaaugugagaucaaaauc

SEQ ID NO: 158489 - RNA, 24 nt, Human
uaaaauauuucucuccaaauccaa

SEQ ID NO: 158490 - RNA, 20 nt, Human
uaaaaucagcaacagcaaac

SEQ ID NO: 158491 - RNA, 18 nt, Human
uaaagcccugcagcacuu

SEQ ID NO: 158492 - RNA, 21 nt, Human
uaacugugacuuuuugaauca

SEQ ID NO: 158493 - RNA, 21 nt, Human
uaacugugagcaauuuaaaca

SEQ ID NO: 158494 - RNA, 24 nt, Human
uaacuuuucaauuucagcugcacu

SEQ ID NO: 158495 - RNA, 19 nt, Human
uaagaaaaagugcaaagaa

SEQ ID NO: 158496 - RNA, 18 nt, Human
uaagaagaacacgaauau

SEQ ID NO: 158497 - RNA, 25 nt, Human
uaagaagaacacgaauaucuucugu

SEQ ID NO: 158498 - RNA, 26 nt, Human
uaagaagaacacgaauaucuucugug

SEQ ID NO: 158499 - RNA, 22 nt, Human
uaagagaaaauguuugccuguu

SEQ ID NO: 158500 - RNA, 20 nt, Human
uaagcaacacacacacacac

SEQ ID NO: 158501 - RNA, 23 nt, Human
uacaaaacaacauaagcaacaca

SEQ ID NO: 158502 - RNA, 21 nt, Human
uacaaauaucaaggaggcagg

SEQ ID NO: 158503 - RNA, 26 nt, Human
uacauguacauuuuaaaaucaauccc

SEQ ID NO: 158504 - RNA, 20 nt, Human
uaccuuagaaacauuuguca

SEQ ID NO: 158505 - RNA, 19 nt, Human
uagcagcacccaaccuuaa

SEQ ID NO: 158506 - RNA, 23 nt, Human
uagcuuuugggaguugggggcag

SEQ ID NO: 158507 - RNA, 21 nt, Human
uaggcaagacuuacuaaucag

SEQ ID NO: 158508 - RNA, 23 nt, Human
uauaggcaagacuuacuaaucag

SEQ ID NO: 158509 - RNA, 20 nt, Human
uauauauaugcauauauaua

SEQ ID NO: 158510 - RNA, 18 nt, Human
uaucaaagauaaauucag

SEQ ID NO: 158511 - RNA, 19 nt, Human
uauggaaagauuuguuuac

SEQ ID NO: 158512 - RNA, 21 nt, Human
uauuuuaggcacuguaauuau

SEQ ID NO: 158513 - RNA, 25 nt, Human
ucaaaguuucaaaaaaagcagcuca

SEQ ID NO: 158514 - RNA, 24 nt, Human
uccucuuuuucucuuaagaagaac

SEQ ID NO: 158515 - RNA, 22 nt, Human
ucgcaaaaaggaaccgcgugcc

SEQ ID NO: 158516 - RNA, 20 nt, Human
ucuagcuuuugggaguuggg

SEQ ID NO: 158517 - RNA, 18 nt, Human
ucuccaaauccaaaacac

SEQ ID NO: 158518 - RNA, 21 nt, Human
ucucuccaaauccaaaacacc

SEQ ID NO: 158519 - RNA, 18 nt, Human
ucugcccuucucccaaau

SEQ ID NO: 158520 - RNA, 19 nt, Human
ucuuguuauucuuuggcuu

SEQ ID NO: 158521 - RNA, 24 nt, Human
ugaaauaucacacaauuauaccuc

SEQ ID NO: 158522 - RNA, 22 nt, Human
ugaaaugcaaacuacugaucaa

SEQ ID NO: 158523 - RNA, 23 nt, Human
ugaagaaggcaauaauagaagca

SEQ ID NO: 158524 - RNA, 19 nt, Human
ugaauaaacacagaaaggc

SEQ ID NO: 158525 - RNA, 20 nt, Human
ugaauaaacacagaaaggca

SEQ ID NO: 158526 - RNA, 18 nt, Human
ugagaucaaaaucuuuag

SEQ ID NO: 158527 - RNA, 18 nt, Human
ugauaauaaugguauuuc

SEQ ID NO: 158528 - RNA, 25 nt, Human
ugaucaagaauaaaaucagcaacag

SEQ ID NO: 158529 - RNA, 21 nt, Human
uggaauuaaagcaaaagucac

SEQ ID NO: 158530 - RNA, 24 nt, Human
uggcacucggaaagcucgcaaaaa

SEQ ID NO: 158531 - RNA, 18 nt, Human
ugggaguugggggcagau

SEQ ID NO: 158532 - RNA, 21 nt, Human
uggucucagcuuuucaguuug

SEQ ID NO: 158533 - RNA, 24 nt, Human
uggugcuuauuucuuguuauucuu

SEQ ID NO: 158534 - RNA, 21 nt, Human
uguauguaauaacugugagca

SEQ ID NO: 158535 - RNA, 21 nt, Human
ugugcaaggguucuaauucca

SEQ ID NO: 158536 - RNA, 24 nt, Human
uguggcagagccagccgaaucccg

SEQ ID NO: 158537 - RNA, 20 nt, Human
uguuuacauaaacauguaua

SEQ ID NO: 158538 - RNA, 19 nt, Human
uuaaagcaaaaugaaaggc

SEQ ID NO: 158539 - RNA, 18 nt, Human
uuacauaaacauguauau

SEQ ID NO: 158540 - RNA, 20 nt, Human
uuacauaaacauguauauuu

SEQ ID NO: 158541 - RNA, 22 nt, Human
uuagauggaaaaucaaggggua

SEQ ID NO: 158542 - RNA, 24 nt, Human
uucaaaaagaaaccacacucccaa

SEQ ID NO: 158543 - RNA, 18 nt, Human
uucccaaacaggaaaaaa

SEQ ID NO: 158544 - RNA, 23 nt, Human
uucuaagagaaaauguuugccug

SEQ ID NO: 158545 - RNA, 21 nt, Human
uucuagagguugaaaaccacc

SEQ ID NO: 158546 - RNA, 24 nt, Human
uucucuccaaauccaaaacaccac

SEQ ID NO: 158547 - RNA, 19 nt, Human
uugauaauaaugguauuuc

SEQ ID NO: 158548 - RNA, 20 nt, Human
uuuaaagcccugcagcacuu

SEQ ID NO: 158549 - RNA, 21 nt, Human
uuuaacuucccaaaacucauc

SEQ ID NO: 158550 - RNA, 21 nt, Human
aaacaaagaagaaggcacaga

SEQ ID NO: 158551 - RNA, 19 nt, Human
aaacaaauguaagaauagu

SEQ ID NO: 158552 - RNA, 19 nt, Human
aaagaagaaggcacagagg

SEQ ID NO: 158553 - RNA, 19 nt, Human
aacaaaagcuauggcuuua

SEQ ID NO: 158554 - RNA, 23 nt, Human
aacagguuaaaaaaaaauaggag

SEQ ID NO: 158555 - RNA, 23 nt, Human
aacuccuucccccacagcuucca

SEQ ID NO: 158556 - RNA, 22 nt, Human
acaaaacaaagaagaaggcaca

SEQ ID NO: 158557 - RNA, 24 nt, Human
acaaaacaaagaagaaggcacaga

SEQ ID NO: 158558 - RNA, 25 nt, Human
acaaaacaaagaagaaggcacagag

SEQ ID NO: 158559 - RNA, 19 nt, Human
acaagcagugcacaguggg

SEQ ID NO: 158560 - RNA, 21 nt, Human
acaagcagugcacagugggcc

SEQ ID NO: 158561 - RNA, 24 nt, Human
acgagucccuguccuucuucccuc

SEQ ID NO: 158562 - RNA, 25 nt, Human
agaagaaggcacagagggucccuuu

SEQ ID NO: 158563 - RNA, 22 nt, Human
agacaggauugauuuauuuggg

SEQ ID NO: 158564 - RNA, 19 nt, Human
agauaugauugacaugagu

SEQ ID NO: 158565 - RNA, 18 nt, Human
aggagguuuuuauucagu

SEQ ID NO: 158566 - RNA, 22 nt, Human
aggauugauuuauuugggaacu

SEQ ID NO: 158567 - RNA, 18 nt, Human
agugguuuguggaguggc

SEQ ID NO: 158568 - RNA, 21 nt, Human
auagauaugauugacaugagu

SEQ ID NO: 158569 - RNA, 22 nt, Human
aucuuuguucccaguucaggag

SEQ ID NO: 158570 - RNA, 23 nt, Human
caaaacaaagaagaaggcacaga

SEQ ID NO: 158571 - RNA, 18 nt, Human
caaacuguagggaacaga

SEQ ID NO: 158572 - RNA, 20 nt, Human
cacaaaacaaagaagaaggc

SEQ ID NO: 158573 - RNA, 21 nt, Human
cacaaaacaaagaagaaggca

SEQ ID NO: 158574 - RNA, 22 nt, Human
cacaaaacaaagaagaaggcac

SEQ ID NO: 158575 - RNA, 24 nt, Human
cacaaaacaaagaagaaggcacag

SEQ ID NO: 158576 - RNA, 20 nt, Human
cacacgagucccuguccuuc

SEQ ID NO: 158577 - RNA, 19 nt, Human
cagcaggaaauucagaccc

SEQ ID NO: 158578 - RNA, 22 nt, Human
caggcagaaggccggcccagag

SEQ ID NO: 158579 - RNA, 21 nt, Human
ccagcucagcagcaaacugua

SEQ ID NO: 158580 - RNA, 18 nt, Human
ccccaguucugcccugcu

SEQ ID NO: 158581 - RNA, 18 nt, Human
cccugcucugagcugucc

SEQ ID NO: 158582 - RNA, 24 nt, Human
cgcucgugguuccuccagagacag

SEQ ID NO: 158583 - RNA, 18 nt, Human
cggcucugaguucuuccu

SEQ ID NO: 158584 - RNA, 18 nt, Human
cucuaauccaaggguggg

SEQ ID NO: 158585 - RNA, 21 nt, Human
cugaagccuuaauauuagcaa

SEQ ID NO: 158586 - RNA, 21 nt, Human
cuuuguucccaguucaggagg

SEQ ID NO: 158587 - RNA, 21 nt, Human
ggaaaucaugaggaaggaccg

SEQ ID NO: 158588 - RNA, 21 nt, Human
gggggcuucccggcucugagu

SEQ ID NO: 158589 - RNA, 22 nt, Human
guccccaguucugcccugcucu

SEQ ID NO: 158590 - RNA, 24 nt, Human
uaaaaguagcccugaagccuuaau

SEQ ID NO: 158591 - RNA, 22 nt, Human
uagagaguuuaggaaauguuug

SEQ ID NO: 158592 - RNA, 24 nt, Human
uaggcuaaaacuaaaauuuuagug

SEQ ID NO: 158593 - RNA, 28 nt, Human
ucacagaaaauaagccuguuguccggac

SEQ ID NO: 158594 - RNA, 24 nt, Human
ucaggagguuuuuauucagugcuu

SEQ ID NO: 158595 - RNA, 19 nt, Human
uccaagggugggggagauc

SEQ ID NO: 158596 - RNA, 20 nt, Human
uccaugcaggcagaaggccg

SEQ ID NO: 158597 - RNA, 22 nt, Human
uccccaguucugcccugcucug

SEQ ID NO: 158598 - RNA, 22 nt, Human
ucccuguccuucuucccucgcu

SEQ ID NO: 158599 - RNA, 21 nt, Human
ucgaagaugggaaagacagga

SEQ ID NO: 158600 - RNA, 24 nt, Human
ucucaauauaaaacaaaagcuaug

SEQ ID NO: 158601 - RNA, 21 nt, Human
ugggggcuucccggcucugag

SEQ ID NO: 158602 - RNA, 26 nt, Human
uuaauacucccaagucagauaucuaa

SEQ ID NO: 158603 - RNA, 20 nt, Human
uuccuacuguaaauaaugcu

SEQ ID NO: 158604 - RNA, 26 nt, Human
uuccuacuguaaauaauggacaucgg

SEQ ID NO: 158605 - RNA, 21 nt, Human
uuccugccacacgagucccug

SEQ ID NO: 158606 - RNA, 24 nt, Human
uucuaacgugcucggggacuucac

SEQ ID NO: 158607 - RNA, 22 nt, Human
uucuucccucgcucgugguucc

SEQ ID NO: 158608 - RNA, 23 nt, Human
agcugugucauuuugacucauua

SEQ ID NO: 158609 - RNA, 18 nt, Human
caaacucuacccagaagc

SEQ ID NO: 158610 - RNA, 21 nt, Human
cagaggaagaagcgaucagca

SEQ ID NO: 158611 - RNA, 27 nt, Human
caggaaaaggcucagucauaaaaucag

SEQ ID NO: 158612 - RNA, 21 nt, Human
ccucuugggacaggaaaaggc

SEQ ID NO: 158613 - RNA, 21 nt, Human
cgacacagaggaagaagcgau

SEQ ID NO: 158614 - RNA, 21 nt, Human
cuauaauauugcuagacaguu

SEQ ID NO: 158615 - RNA, 23 nt, Human
gagaggacaaacucuacccagaa

SEQ ID NO: 158616 - RNA, 23 nt, Human
gcaugguggucagcagcggggca

SEQ ID NO: 158617 - RNA, 22 nt, Human
ggaagaagcgaucagcauggug

SEQ ID NO: 158618 - RNA, 21 nt, Human
uacccagaagccccccgacac

SEQ ID NO: 158619 - RNA, 27 nt, Human
uccaccacaauaucauuuuuauaauaa

SEQ ID NO: 158620 - RNA, 21 nt, Human
ucuugggacaggaaaaggcuc

SEQ ID NO: 158621 - RNA, 24 nt, Human
ucuugggacaggaaaaggcucagu

SEQ ID NO: 158622 - RNA, 22 nt, Human
ugagaaaaugucuugauuuuua

SEQ ID NO: 158623 - RNA, 18 nt, Human
ugcuuauucauuuucagc

SEQ ID NO: 158624 - RNA, 18 nt, Human
uuagugguacaaguucuu

SEQ ID NO: 158625 - RNA, 22 nt, Human
uuuucagcugugucauuuugac

SEQ ID NO: 158626 - RNA, 22 nt, Human
aaaucccaguucuccaccucuc

SEQ ID NO: 158627 - RNA, 19 nt, Human
aaccaaaguccaggcugug

SEQ ID NO: 158628 - RNA, 24 nt, Human
acaaaacaguaagaaacuguagaa

SEQ ID NO: 158629 - RNA, 23 nt, Human
accacagcaccccgccugacccu

SEQ ID NO: 158630 - RNA, 20 nt, Human
acccccaccccagccaugcc

SEQ ID NO: 158631 - RNA, 30 nt, Human
acccccaccccagccaugccucuccccacu

SEQ ID NO: 158632 - RNA, 19 nt, Human
accuuccuggagagaacca

SEQ ID NO: 158633 - RNA, 19 nt, Human
acugcaggggcagcagaac

SEQ ID NO: 158634 - RNA, 19 nt, Human
agaacgccacagugguuga

SEQ ID NO: 158635 - RNA, 23 nt, Human
agaagcagguggucuguggcuca

SEQ ID NO: 158636 - RNA, 18 nt, Human
agcggccggggcugcggc

SEQ ID NO: 158637 - RNA, 18 nt, Human
agugaggaagaaauggaa

SEQ ID NO: 158638 - RNA, 20 nt, Human
caaaacauccuuucugccaa

SEQ ID NO: 158639 - RNA, 26 nt, Human
caaccaggucuccccacccccacccc

SEQ ID NO: 158640 - RNA, 22 nt, Human
caaggaaaugggacaaaacauc

SEQ ID NO: 158641 - RNA, 20 nt, Human
caaggauuccacccccgaac

SEQ ID NO: 158642 - RNA, 22 nt, Human
cacaaggaagauuuagagagug

SEQ ID NO: 158643 - RNA, 24 nt, Human
cacacaggggccaagagcuggacc

SEQ ID NO: 158644 - RNA, 21 nt, Human
cacagcaccccgccugacccu

SEQ ID NO: 158645 - RNA, 18 nt, Human
caccacagcaccccgccu

SEQ ID NO: 158646 - RNA, 18 nt, Human
caccagcgcaaagcagcg

SEQ ID NO: 158647 - RNA, 21 nt, Human
caccagcgcaaagcagcggcc

SEQ ID NO: 158648 - RNA, 24 nt, Human
cacugccccuacuuagcagucuca

SEQ ID NO: 158649 - RNA, 21 nt, Human
caggacccauaauccucacaa

SEQ ID NO: 158650 - RNA, 25 nt, Human
ccacagcaccccgccugacccuagu

SEQ ID NO: 158651 - RNA, 21 nt, Human
ccaccacagcaccccgccuga

SEQ ID NO: 158652 - RNA, 21 nt, Human
ccacccccaccccagccaugc

SEQ ID NO: 158653 - RNA, 20 nt, Human
ccaguucuccaccucucugc

SEQ ID NO: 158654 - RNA, 24 nt, Human
cccaaggauuccacccccgaaccu

SEQ ID NO: 158655 - RNA, 22 nt, Human
cccaccacagcaccccgccuga

SEQ ID NO: 158656 - RNA, 23 nt, Human
ccccaccccagccaugccucucc

SEQ ID NO: 158657 - RNA, 20 nt, Human
ccccagccaugccucucccc

SEQ ID NO: 158658 - RNA, 22 nt, Human
cccggcccuccgugcgcccucu

SEQ ID NO: 158659 - RNA, 20 nt, Human
ccucuccccaccacagcacc

SEQ ID NO: 158660 - RNA, 21 nt, Human
ccugggccucugagcuggucu

SEQ ID NO: 158661 - RNA, 21 nt, Human
cgccgcuugcccagcggccca

SEQ ID NO: 158662 - RNA, 19 nt, Human
cuccccacccccaccccag

SEQ ID NO: 158663 - RNA, 21 nt, Human
cucggcucgcuggcccuggcc

SEQ ID NO: 158664 - RNA, 18 nt, Human
cucugagcuggucuccuc

SEQ ID NO: 158665 - RNA, 18 nt, Human
cugcacagauuccuucug

SEQ ID NO: 158666 - RNA, 18 nt, Human
cuggucuccuccgcugug

SEQ ID NO: 158667 - RNA, 24 nt, Human
cuguggcucacucagccuggcuuc

SEQ ID NO: 158668 - RNA, 23 nt, Human
cuugcucagugucauagugagga

SEQ ID NO: 158669 - RNA, 24 nt, Human
gaccacggccaaccaggucucccc

SEQ ID NO: 158670 - RNA, 19 nt, Human
gacugcuuuuuaaagauac

SEQ ID NO: 158671 - RNA, 22 nt, Human
gccaugccucuccccaccacag

SEQ ID NO: 158672 - RNA, 18 nt, Human
gcccggccuggugcggga

SEQ ID NO: 158673 - RNA, 22 nt, Human
gccucuccccaccacagcaccc

SEQ ID NO: 158674 - RNA, 19 nt, Human
gccugugguccaccagcgc

SEQ ID NO: 158675 - RNA, 22 nt, Human
gcuaccuuccuggagagaacca

SEQ ID NO: 158676 - RNA, 20 nt, Human
gcugggcuaccuuccuggag

SEQ ID NO: 158677 - RNA, 18 nt, Human
gcuguguagaugccugug

SEQ ID NO: 158678 - RNA, 20 nt, Human
ggcccaaggauuccaccccc

SEQ ID NO: 158679 - RNA, 20 nt, Human
guccaggcuguguagaugcc

SEQ ID NO: 158680 - RNA, 21 nt, Human
uaaagauacgagaucccgcug

SEQ ID NO: 158681 - RNA, 19 nt, Human
ucaaaucccaguucuccac

SEQ ID NO: 158682 - RNA, 22 nt, Human
uccccaccacagcaccccgccu

SEQ ID NO: 158683 - RNA, 20 nt, Human
uccccacccccaccccagcc

SEQ ID NO: 158684 - RNA, 23 nt, Human
uccugggccucugagcuggucuc

SEQ ID NO: 158685 - RNA, 21 nt, Human
ucgcuggcccuggccaggucu

SEQ ID NO: 158686 - RNA, 22 nt, Human
ucugugcuggacacgguuccaa

SEQ ID NO: 158687 - RNA, 19 nt, Human
ugcagggcccaagcccggc

SEQ ID NO: 158688 - RNA, 21 nt, Human
uggagacaagaucuugcucag

SEQ ID NO: 158689 - RNA, 23 nt, Human
ugggacaaaacauccuuucugcc

SEQ ID NO: 158690 - RNA, 22 nt, Human
ugggccucugagcuggucuccu

SEQ ID NO: 158691 - RNA, 19 nt, Human
uguccucggcucgcuggcc

SEQ ID NO: 158692 - RNA, 23 nt, Human
uucaaaucccaguucuccaccuc

SEQ ID NO: 158693 - RNA, 18 nt, Human
uucacagugcugggcuac

SEQ ID NO: 158694 - RNA, 21 nt, Human
uuccuggagagaaccaaaguc

SEQ ID NO: 158695 - RNA, 25 nt, Human
uuccugggccucugagcuggucucc

SEQ ID NO: 158696 - RNA, 21 nt, Human
uugauacaaaacaguaagaaa

SEQ ID NO: 158697 - RNA, 24 nt, Human
uugcucagugucauagugaggaag

SEQ ID NO: 158698 - RNA, 21 nt, Human
agagcacccggcacggcugcg

SEQ ID NO: 158699 - RNA, 22 nt, Human
ccagucacaggguugaaagggg

SEQ ID NO: 158700 - RNA, 18 nt, Human
gagcacccggcacggcug

SEQ ID NO: 158701 - RNA, 23 nt, Human
aacugguuuaacugcacacucca

SEQ ID NO: 158702 - RNA, 18 nt, Human
ccuccucccccccccccc

SEQ ID NO: 158703 - RNA, 18 nt, Human
ccuguuucuucucuuuuu

SEQ ID NO: 158704 - RNA, 22 nt, Human
cuaaagauucucgccauauugg

SEQ ID NO: 158705 - RNA, 25 nt, Human
cuuuuuuuuuuuuuuuuuugacuuu

SEQ ID NO: 158706 - RNA, 19 nt, Human
ucccccccccccccccccc

SEQ ID NO: 158707 - RNA, 23 nt, Human
uccuuuucuucucuuucaauuga

SEQ ID NO: 158708 - RNA, 18 nt, Human
ucuuuuuuuuuuuuuuuu

SEQ ID NO: 158709 - RNA, 25 nt, Human
ucuuuuuuuuuuuuuuuuuugacuu

SEQ ID NO: 158710 - RNA, 29 nt, Human
uguuucuucucuuuuuuuuuuuuuuuuuu

SEQ ID NO: 158711 - RNA, 23 nt, Human
uucuccuuuucuucucuuucaaa

SEQ ID NO: 158712 - RNA, 18 nt, Human
uuuuuuuuuuuuuuuuug

SEQ ID NO: 158713 - RNA, 30 nt, Human
uuuuuuuuuuuuuuuuugacuuucuccuuu

SEQ ID NO: 158714 - RNA, 20 nt, Human
aaccucaauguacacauguc

SEQ ID NO: 158715 - RNA, 22 nt, Human
aacgaggcccucauaggccccu

SEQ ID NO: 158716 - RNA, 19 nt, Human
aagcaguuuaaagaucuua

SEQ ID NO: 158717 - RNA, 23 nt, Human
aaguaccacaugaccaaacacaa

SEQ ID NO: 158718 - RNA, 18 nt, Human
acauugucaucgucgucc

SEQ ID NO: 158719 - RNA, 18 nt, Human
accugggccaccgagccc

SEQ ID NO: 158720 - RNA, 18 nt, Human
acgcugagugacucgggg

SEQ ID NO: 158721 - RNA, 25 nt, Human
acucacuggacucuccccucucaga

SEQ ID NO: 158722 - RNA, 21 nt, Human
agcccgaacccaccugaggac

SEQ ID NO: 158723 - RNA, 19 nt, Human
agugcaggcagcgggcauc

SEQ ID NO: 158724 - RNA, 19 nt, Human
auccugaaaugcacacagc

SEQ ID NO: 158725 - RNA, 25 nt, Human
caaguaccacaugaccaaacacagu

SEQ ID NO: 158726 - RNA, 21 nt, Human
caaguagccuuccucugcucu

SEQ ID NO: 158727 - RNA, 24 nt, Human
cacagacccaggacaaggcccuuu

SEQ ID NO: 158728 - RNA, 19 nt, Human
cacauugucaucgucgucc

SEQ ID NO: 158729 - RNA, 19 nt, Human
cacccgcugacacagaccc

SEQ ID NO: 158730 - RNA, 19 nt, Human
caccugggccaccgagccc

SEQ ID NO: 158731 - RNA, 22 nt, Human
cagagggccaggcggugaagcc

SEQ ID NO: 158732 - RNA, 20 nt, Human
caucaggggccuggacucac

SEQ ID NO: 158733 - RNA, 22 nt, Human
caucccucaaguaccacaugac

SEQ ID NO: 158734 - RNA, 20 nt, Human
cauccugaaaugcacacagc

SEQ ID NO: 158735 - RNA, 22 nt, Human
cauugucaucgucguccccccg

SEQ ID NO: 158736 - RNA, 19 nt, Human
ccaccaccugggccaccga

SEQ ID NO: 158737 - RNA, 19 nt, Human
cccccaggugugaggucug

SEQ ID NO: 158738 - RNA, 21 nt, Human
ccccgggagguuggagcauca

SEQ ID NO: 158739 - RNA, 18 nt, Human
ccccuugcuugggcccac

SEQ ID NO: 158740 - RNA, 20 nt, Human
cccuuggugcuggaggcggg

SEQ ID NO: 158741 - RNA, 26 nt, Human
ccucauaggccccuugcuugggccca

SEQ ID NO: 158742 - RNA, 24 nt, Human
ccucuagcagccuggacuccgcag

SEQ ID NO: 158743 - RNA, 18 nt, Human
ccucucagaggugcggaa

SEQ ID NO: 158744 - RNA, 20 nt, Human
cggaaccaccaccugggcca

SEQ ID NO: 158745 - RNA, 24 nt, Human
cggcgguuugagaaggcccacaac

SEQ ID NO: 158746 - RNA, 19 nt, Human
cucaaguagccuuccucug

SEQ ID NO: 158747 - RNA, 22 nt, Human
cucacuggacucuccccucuca

SEQ ID NO: 158748 - RNA, 18 nt, Human
cugagacugagcuggacu

SEQ ID NO: 158749 - RNA, 20 nt, Human
cugugaccaguguggccggc

SEQ ID NO: 158750 - RNA, 23 nt, Human
cuguggccucgcaccuucuuauc

SEQ ID NO: 158751 - RNA, 21 nt, Human
cuuggcgccuacagccccggc

SEQ ID NO: 158752 - RNA, 21 nt, Human
gacggcagugaggaugagcac

SEQ ID NO: 158753 - RNA, 19 nt, Human
gacucacuggacucucccc

SEQ ID NO: 158754 - RNA, 18 nt, Human
gaggcccucauaggcccc

SEQ ID NO: 158755 - RNA, 22 nt, Human
gagguuggagcaucaggggccu

SEQ ID NO: 158756 - RNA, 19 nt, Human
gcaguaagugugagucagg

SEQ ID NO: 158757 - RNA, 20 nt, Human
gcccugccccuggaggcgga

SEQ ID NO: 158758 - RNA, 23 nt, Human
ggccaggcggugaagcccgaacc

SEQ ID NO: 158759 - RNA, 18 nt, Human
ggccuuggcgccuacagc

SEQ ID NO: 158760 - RNA, 21 nt, Human
ggcuggugugcaguggcaggu

SEQ ID NO: 158761 - RNA, 18 nt, Human
ggugcugcccgcccuugg

SEQ ID NO: 158762 - RNA, 18 nt, Human
guccauggugcacccgcu

SEQ ID NO: 158763 - RNA, 20 nt, Human
gucuguggguuccagugcag

SEQ ID NO: 158764 - RNA, 24 nt, Human
uaaggaaauagcuuucugagguuu

SEQ ID NO: 158765 - RNA, 18 nt, Human
uaccacaugaccaaacac

SEQ ID NO: 158766 - RNA, 23 nt, Human
uaccacaugaccaaacacaaggc

SEQ ID NO: 158767 - RNA, 22 nt, Human
uagcagccuggacuccgcagug

SEQ ID NO: 158768 - RNA, 18 nt, Human
uagcuuucugagguuucu

SEQ ID NO: 158769 - RNA, 23 nt, Human
ucauaggccccuugcuugggccc

SEQ ID NO: 158770 - RNA, 18 nt, Human
ucccagggcuguggccuc

SEQ ID NO: 158771 - RNA, 26 nt, Human
ucccagggcuguggccucgcaccuuc

SEQ ID NO: 158772 - RNA, 18 nt, Human
ucccccaggugugagguc

SEQ ID NO: 158773 - RNA, 26 nt, Human
ucccucaaguaccacaugaccaaaca

SEQ ID NO: 158774 - RNA, 18 nt, Human
ucgcaccuucuuaucugc

SEQ ID NO: 158775 - RNA, 21 nt, Human
ucugugaccacagagggccag

SEQ ID NO: 158776 - RNA, 24 nt, Human
ugacgaauguggacaaaccuucaa

SEQ ID NO: 158777 - RNA, 18 nt, Human
ugacucggggccggacag

SEQ ID NO: 158778 - RNA, 19 nt, Human
ugccucugucccccaggug

SEQ ID NO: 158779 - RNA, 22 nt, Human
ugcggaacuauaucugugacga

SEQ ID NO: 158780 - RNA, 24 nt, Human
uggacaaaccuucaagcagcggaa

SEQ ID NO: 158781 - RNA, 22 nt, Human
uggguuccagugcaggcagcgg

SEQ ID NO: 158782 - RNA, 18 nt, Human
ugucccccaggugugagg

SEQ ID NO: 158783 - RNA, 18 nt, Human
ugugaccacagagggcca

SEQ ID NO: 158784 - RNA, 23 nt, Human
uuccuuuccccacuaaagcaguc

SEQ ID NO: 158785 - RNA, 23 nt, Human
uuuaaggaaauagcuuucugagg

SEQ ID NO: 158786 - RNA, 23 nt, Human
uuuuagugcaacaagagcuccau

SEQ ID NO: 158787 - RNA, 19 nt, Human
uuuuuuuuuuuuuaaggaa

SEQ ID NO: 158788 - RNA, 25 nt, Human
uuuuuuuuuuuuuuuuuuuuuaagg

SEQ ID NO: 158789 - RNA, 21 nt, Human
aaaaauagacaacaaauuaca

SEQ ID NO: 158790 - RNA, 18 nt, Human
aaaagcaagucuugacuc

SEQ ID NO: 158791 - RNA, 24 nt, Human
aaagugcugggaucacagguguga

SEQ ID NO: 158792 - RNA, 18 nt, Human
aaccuguucucccaccca

SEQ ID NO: 158793 - RNA, 24 nt, Human
aagcaugcagcuccuuuuucaacc

SEQ ID NO: 158794 - RNA, 24 nt, Human
aaguaaucccccugccuuggccuc

SEQ ID NO: 158795 - RNA, 26 nt, Human
aagugcugggaucacaggugugagcc

SEQ ID NO: 158796 - RNA, 18 nt, Human
aauagcugggauuacaga

SEQ ID NO: 158797 - RNA, 18 nt, Human
acagcaagacaguguggc

SEQ ID NO: 158798 - RNA, 20 nt, Human
accaaaauacuuuaccagca

SEQ ID NO: 158799 - RNA, 22 nt, Human
accccgauaauuuuuguauuuu

SEQ ID NO: 158800 - RNA, 19 nt, Human
acgccgcguccccgcccag

SEQ ID NO: 158801 - RNA, 22 nt, Human
agaacaggagagaggcccucaa

SEQ ID NO: 158802 - RNA, 23 nt, Human
agaaggaaggaaggggcaugggc

SEQ ID NO: 158803 - RNA, 20 nt, Human
agaaugucccugaaaggaaa

SEQ ID NO: 158804 - RNA, 19 nt, Human
agaggacucggcagcugug

SEQ ID NO: 158805 - RNA, 20 nt, Human
agaggcccucaacuccagug

SEQ ID NO: 158806 - RNA, 20 nt, Human
agcaagacaguguggcuuua

SEQ ID NO: 158807 - RNA, 18 nt, Human
agccucuugaauagcugg

SEQ ID NO: 158808 - RNA, 22 nt, Human
agcgagggcacuuacuccacaa

SEQ ID NO: 158809 - RNA, 24 nt, Human
aggaaccccuggcugcccagaaag

SEQ ID NO: 158810 - RNA, 20 nt, Human
aggccuggcaggggaggagg

SEQ ID NO: 158811 - RNA, 25 nt, Human
aggcuggagugcagugucaugaucu

SEQ ID NO: 158812 - RNA, 18 nt, Human
aggggaggaggaagaggc

SEQ ID NO: 158813 - RNA, 19 nt, Human
aggggcaugggcagaggcc

SEQ ID NO: 158814 - RNA, 23 nt, Human
aggguauugccauguuagccagg

SEQ ID NO: 158815 - RNA, 24 nt, Human
agugcagugucaugaucucggcuc

SEQ ID NO: 158816 - RNA, 20 nt, Human
aguggaaagagugugccgga

SEQ ID NO: 158817 - RNA, 20 nt, Human
agugugccggaggcccgggc

SEQ ID NO: 158818 - RNA, 23 nt, Human
auaauuuuuguauuuuuaguaga

SEQ ID NO: 158819 - RNA, 19 nt, Human
auacaauuccagaaugucc

SEQ ID NO: 158820 - RNA, 24 nt, Human
aucgaaggcaacaagagggggagg

SEQ ID NO: 158821 - RNA, 22 nt, Human
augccucagccucuugaauagc

SEQ ID NO: 158822 - RNA, 21 nt, Human
augucccugaaaggaaaaagc

SEQ ID NO: 158823 - RNA, 19 nt, Human
auuacagaugcaugccauu

SEQ ID NO: 158824 - RNA, 24 nt, Human
auuuuuguauuuuuaguagagaua

SEQ ID NO: 158825 - RNA, 20 nt, Human
caaaacggagccaagacuca

SEQ ID NO: 158826 - RNA, 23 nt, Human
caaaacggagccaagacucagac

SEQ ID NO: 158827 - RNA, 20 nt, Human
caaaauacuuuaccagcaca

SEQ ID NO: 158828 - RNA, 23 nt, Human
caaagggccacaugaagccagca

SEQ ID NO: 158829 - RNA, 28 nt, Human
caaagggccacaugaagccagcaggcac

SEQ ID NO: 158830 - RNA, 24 nt, Human
caaagugcugggaucacaggugug

SEQ ID NO: 158831 - RNA, 19 nt, Human
caacaagagggggaggugg

SEQ ID NO: 158832 - RNA, 23 nt, Human
caacucccaccucccggguucaa

SEQ ID NO: 158833 - RNA, 20 nt, Human
caaguucuggcuuaaaguca

SEQ ID NO: 158834 - RNA, 21 nt, Human
cacacauuaaaucgggugguc

SEQ ID NO: 158835 - RNA, 24 nt, Human
cacaggaccacaggacagggugga

SEQ ID NO: 158836 - RNA, 24 nt, Human
cacaggugugagccacugcaccca

SEQ ID NO: 158837 - RNA, 19 nt, Human
caccaccggcaaggccgcc

SEQ ID NO: 158838 - RNA, 21 nt, Human
caccaggaguaccgaaggcuc

SEQ ID NO: 158839 - RNA, 19 nt, Human
caccgcccgggaucugugg

SEQ ID NO: 158840 - RNA, 24 nt, Human
caccucccggguucaagagauccu

SEQ ID NO: 158841 - RNA, 22 nt, Human
caccucugaagaccuuggucca

SEQ ID NO: 158842 - RNA, 21 nt, Human
cacuacaacucccaccucccg

SEQ ID NO: 158843 - RNA, 24 nt, Human
cagaaagcaccaccggcaaggccg

SEQ ID NO: 158844 - RNA, 22 nt, Human
cagaauagacacaaaagaaugu

SEQ ID NO: 158845 - RNA, 19 nt, Human
cagaaugucccugaaagga

SEQ ID NO: 158846 - RNA, 26 nt, Human
cagacuaauacacacaaaucaaaaug

SEQ ID NO: 158847 - RNA, 23 nt, Human
cagaugcaugccauugcaccccg

SEQ ID NO: 158848 - RNA, 26 nt, Human
cagcaggcacuucagugccacguccc

SEQ ID NO: 158849 - RNA, 18 nt, Human
cagcucauucucacagcc

SEQ ID NO: 158850 - RNA, 19 nt, Human
cagcuuccauggcccagcc

SEQ ID NO: 158851 - RNA, 19 nt, Human
caggaaccccuggcugccc

SEQ ID NO: 158852 - RNA, 24 nt, Human
caggaggccuggucccaguggccc

SEQ ID NO: 158853 - RNA, 18 nt, Human
caggccccgccaacgccg

SEQ ID NO: 158854 - RNA, 22 nt, Human
caggcuuugccgaaaucgaagg

SEQ ID NO: 158855 - RNA, 24 nt, Human
cagucuggaacuccugggcugaag

SEQ ID NO: 158856 - RNA, 21 nt, Human
caguggagccgcgcgcgcgca

SEQ ID NO: 158857 - RNA, 20 nt, Human
cauguuagccaggcagucug

SEQ ID NO: 158858 - RNA, 21 nt, Human
ccaaagugcugggaucacagg

SEQ ID NO: 158859 - RNA, 24 nt, Human
ccaaagugcugggaucacaggugu

SEQ ID NO: 158860 - RNA, 23 nt, Human
ccaacgccgucaaggcccccucg

SEQ ID NO: 158861 - RNA, 20 nt, Human
ccacacggccugcgugccuu

SEQ ID NO: 158862 - RNA, 25 nt, Human
ccaccgcccgggaucuguggcuuga

SEQ ID NO: 158863 - RNA, 18 nt, Human
ccacugcacccagccagg

SEQ ID NO: 158864 - RNA, 18 nt, Human
ccacugcacccagccagg

SEQ ID NO: 158865 - RNA, 19 nt, Human
ccacugcacccagccaggc

SEQ ID NO: 158866 - RNA, 18 nt, Human
ccaggcuaggaagaaguc

SEQ ID NO: 158867 - RNA, 22 nt, Human
ccaggcuuugccgaaaucgaag

SEQ ID NO: 158868 - RNA, 24 nt, Human
ccagucccaggagaaggaaggaag

SEQ ID NO: 158869 - RNA, 20 nt, Human
ccauacagcaagacagugug

SEQ ID NO: 158870 - RNA, 19 nt, Human
ccauguuagccaggcaguc

SEQ ID NO: 158871 - RNA, 19 nt, Human
cccaggcuggagugcagug

SEQ ID NO: 158872 - RNA, 21 nt, Human
ccccaacaccucugacgaagc

SEQ ID NO: 158873 - RNA, 24 nt, Human
ccccagagggacaguccucccacc

SEQ ID NO: 158874 - RNA, 22 nt, Human
cccccucggccacgccgcgucc

SEQ ID NO: 158875 - RNA, 26 nt, Human
cccccugccuuggccucccaaagugc

SEQ ID NO: 158876 - RNA, 20 nt, Human
ccccugugcccaggccccgc

SEQ ID NO: 158877 - RNA, 19 nt, Human
cccggguucaagagauccu

SEQ ID NO: 158878 - RNA, 25 nt, Human
cccucggccacgccgcguccccgcc

SEQ ID NO: 158879 - RNA, 21 nt, Human
cccugcggcugccccugugcc

SEQ ID NO: 158880 - RNA, 20 nt, Human
cccugugcccaggccccgcc

SEQ ID NO: 158881 - RNA, 23 nt, Human
ccgccaacgccgucaaggccccc

SEQ ID NO: 158882 - RNA, 20 nt, Human
ccgcgcgcgcgcacacgugg

SEQ ID NO: 158883 - RNA, 19 nt, Human
ccuagcuucaccaguccca

SEQ ID NO: 158884 - RNA, 26 nt, Human
ccucaugccucagccucuugaauagc

SEQ ID NO: 158885 - RNA, 20 nt, Human
ccugggcugaaguaaucccc

SEQ ID NO: 158886 - RNA, 20 nt, Human
ccuguccuguggcccuggcc

SEQ ID NO: 158887 - RNA, 21 nt, Human
cgccaacgccgucaaggcccc

SEQ ID NO: 158888 - RNA, 19 nt, Human
cgccgcguccccgcccagc

SEQ ID NO: 158889 - RNA, 24 nt, Human
cgcgcgcgcgcacacgugucagca

SEQ ID NO: 158890 - RNA, 24 nt, Human
cgcucuguugcccaggcuggagug

SEQ ID NO: 158891 - RNA, 18 nt, Human
cggcaaggccgccuccac

SEQ ID NO: 158892 - RNA, 20 nt, Human
cggcaaggccgccuccaccg

SEQ ID NO: 158893 - RNA, 24 nt, Human
cgggcaccaggaguaccgaaggcu

SEQ ID NO: 158894 - RNA, 21 nt, Human
cgggcuugggugugcugucug

SEQ ID NO: 158895 - RNA, 24 nt, Human
cuacaacucccaccucccggguuc

SEQ ID NO: 158896 - RNA, 21 nt, Human
cucacagcccagcgagggcac

SEQ ID NO: 158897 - RNA, 24 nt, Human
cucacuacaacucccaccucccgg

SEQ ID NO: 158898 - RNA, 21 nt, Human
cuccuaaaaagagucuaaaaa

SEQ ID NO: 158899 - RNA, 24 nt, Human
cuccugggcugaaguaaucccccu

SEQ ID NO: 158900 - RNA, 24 nt, Human
cucgcucuguugcccaggcuggag

SEQ ID NO: 158901 - RNA, 23 nt, Human
cucuugaauagcugggauuacag

SEQ ID NO: 158902 - RNA, 20 nt, Human
cugacggucuggccgggcgg

SEQ ID NO: 158903 - RNA, 20 nt, Human
cugcagaugggccgagguca

SEQ ID NO: 158904 - RNA, 19 nt, Human
cugcccaggcuuugccgaa

SEQ ID NO: 158905 - RNA, 23 nt, Human
cugccuuggccucccaaagugcu

SEQ ID NO: 158906 - RNA, 21 nt, Human
cugcggcugccccugugccca

SEQ ID NO: 158907 - RNA, 24 nt, Human
cuggagugcagugucaugaucucg

SEQ ID NO: 158908 - RNA, 18 nt, Human
cugucuuggagguggagg

SEQ ID NO: 158909 - RNA, 25 nt, Human
gaacuaacuaacugaauuaauccug

SEQ ID NO: 158910 - RNA, 19 nt, Human
gaaggcaacaagaggggga

SEQ ID NO: 158911 - RNA, 26 nt, Human
gaauagcugggauuacagaugcaugc

SEQ ID NO: 158912 - RNA, 21 nt, Human
gagaggacucggcagcuguga

SEQ ID NO: 158913 - RNA, 24 nt, Human
gagauccucaugccucagccucuu

SEQ ID NO: 158914 - RNA, 19 nt, Human
gagggaauggccgaggggu

SEQ ID NO: 158915 - RNA, 18 nt, Human
gagggaccuggcucugca

SEQ ID NO: 158916 - RNA, 21 nt, Human
gaguuuuuuuggaauuuuccc

SEQ ID NO: 158917 - RNA, 18 nt, Human
gaucacaggugugagcca

SEQ ID NO: 158918 - RNA, 22 nt, Human
gaucacaggugugagccacugc

SEQ ID NO: 158919 - RNA, 23 nt, Human
gaucacaggugugagccacugca

SEQ ID NO: 158920 - RNA, 20 nt, Human
gauggcagcugccaccaaaa

SEQ ID NO: 158921 - RNA, 18 nt, Human
gauuacagaugcaugcca

SEQ ID NO: 158922 - RNA, 23 nt, Human
gauuacagaugcaugccauugca

SEQ ID NO: 158923 - RNA, 18 nt, Human
gcagucuggaacuccugg

SEQ ID NO: 158924 - RNA, 22 nt, Human
gcaguggcggaaaggaagccac

SEQ ID NO: 158925 - RNA, 20 nt, Human
gccacugcacccagccaggc

SEQ ID NO: 158926 - RNA, 21 nt, Human
gcccaggcuggagugcagugu

SEQ ID NO: 158927 - RNA, 22 nt, Human
gccuuggccucccaaagugcug

SEQ ID NO: 158928 - RNA, 19 nt, Human
gcggcugccccugugccca

SEQ ID NO: 158929 - RNA, 25 nt, Human
gcucuguugcccaggcuggagugca

SEQ ID NO: 158930 - RNA, 19 nt, Human
ggacaguccucccacccag

SEQ ID NO: 158931 - RNA, 22 nt, Human
ggagacacaagggaagccugag

SEQ ID NO: 158932 - RNA, 24 nt, Human
ggagacacaagggaagccugaggg

SEQ ID NO: 158933 - RNA, 25 nt, Human
ggagucccuccacaacaggaggccu

SEQ ID NO: 158934 - RNA, 20 nt, Human
ggcucccccagcuccccacc

SEQ ID NO: 158935 - RNA, 18 nt, Human
gggaagccugagggaccc

SEQ ID NO: 158936 - RNA, 20 nt, Human
gggagcugcuucagcaguuu

SEQ ID NO: 158937 - RNA, 18 nt, Human
gggaucuguggcuugaaa

SEQ ID NO: 158938 - RNA, 19 nt, Human
gggcagaggccuggcaggg

SEQ ID NO: 158939 - RNA, 21 nt, Human
gggcagaggccuggcagggga

SEQ ID NO: 158940 - RNA, 23 nt, Human
gguccaguuccuuccaggguggc

SEQ ID NO: 158941 - RNA, 22 nt, Human
ggugaugucccuucacagcagc

SEQ ID NO: 158942 - RNA, 19 nt, Human
guggagggaauggccgagg

SEQ ID NO: 158943 - RNA, 19 nt, Human
guuuguuauaugaaggcaa

SEQ ID NO: 158944 - RNA, 22 nt, Human
uaaaaagagucuaaaaagagcu

SEQ ID NO: 158945 - RNA, 24 nt, Human
uaauuuuuguauuuuuaguagaga

SEQ ID NO: 158946 - RNA, 21 nt, Human
uacacacaaaucaaaauggac

SEQ ID NO: 158947 - RNA, 22 nt, Human
uaccaaaauaaggaauuucccu

SEQ ID NO: 158948 - RNA, 20 nt, Human
uaccuucgccugccggcucc

SEQ ID NO: 158949 - RNA, 20 nt, Human
uagaaugaaaaaauagacaa

SEQ ID NO: 158950 - RNA, 22 nt, Human
uagagauaggguauugccaugu

SEQ ID NO: 158951 - RNA, 24 nt, Human
uaguagagauaggguauugccaug

SEQ ID NO: 158952 - RNA, 22 nt, Human
uaucaaaaacuaaacuaucagg

SEQ ID NO: 158953 - RNA, 22 nt, Human
uaucaggaauuuccaauuccca

SEQ ID NO: 158954 - RNA, 18 nt, Human
ucaaaauggacaaaagca

SEQ ID NO: 158955 - RNA, 21 nt, Human
ucaaccccaacaccucugacg

SEQ ID NO: 158956 - RNA, 24 nt, Human
ucacuacaacucccaccucccggg

SEQ ID NO: 158957 - RNA, 21 nt, Human
ucagugccacguccccagagg

SEQ ID NO: 158958 - RNA, 19 nt, Human
ucaguggaucuauuagcau

SEQ ID NO: 158959 - RNA, 19 nt, Human
uccacaaaugcguggccac

SEQ ID NO: 158960 - RNA, 23 nt, Human
uccaggcuaggaagaagucuucc

SEQ ID NO: 158961 - RNA, 25 nt, Human
uccagggagacacaagggaaggaag

SEQ ID NO: 158962 - RNA, 23 nt, Human
ucccaaagugcugggaucacagg

SEQ ID NO: 158963 - RNA, 22 nt, Human
ucccccagcuccccaccuuuga

SEQ ID NO: 158964 - RNA, 19 nt, Human
ucccccugccuuggccucc

SEQ ID NO: 158965 - RNA, 18 nt, Human
ucccggguucaagagauc

SEQ ID NO: 158966 - RNA, 24 nt, Human
ucccgguggcaccugcccaggcuu

SEQ ID NO: 158967 - RNA, 23 nt, Human
ucccugaaaggaaaaagcacccu

SEQ ID NO: 158968 - RNA, 19 nt, Human
ucccugcggcugccccugu

SEQ ID NO: 158969 - RNA, 20 nt, Human
ucccugcugccaccaugucc

SEQ ID NO: 158970 - RNA, 24 nt, Human
ucgcucuguugcccaggcuggagu

SEQ ID NO: 158971 - RNA, 20 nt, Human
ucggaugccauuccuucccg

SEQ ID NO: 158972 - RNA, 21 nt, Human
ucuaaauucuuuaaugguuca

SEQ ID NO: 158973 - RNA, 18 nt, Human
ucucagaagaaaggcuca

SEQ ID NO: 158974 - RNA, 19 nt, Human
ucucgcucuguugcccagg

SEQ ID NO: 158975 - RNA, 23 nt, Human
ucucgcucuguugcccaggcugg

SEQ ID NO: 158976 - RNA, 24 nt, Human
ucucgcucuguugcccaggcugga

SEQ ID NO: 158977 - RNA, 26 nt, Human
ucucgcucuguugcccaggcuggagu

SEQ ID NO: 158978 - RNA, 24 nt, Human
ucugacugcagcauuucucagaag

SEQ ID NO: 158979 - RNA, 21 nt, Human
ucuggaacuccugggcugaag

SEQ ID NO: 158980 - RNA, 18 nt, Human
ucuguugcccaggcugga

SEQ ID NO: 158981 - RNA, 24 nt, Human
ucuguugcccaggcuggagugcag

SEQ ID NO: 158982 - RNA, 18 nt, Human
ucuugaauagcugggauu

SEQ ID NO: 158983 - RNA, 22 nt, Human
ugaaaaaauagacaacaaauua

SEQ ID NO: 158984 - RNA, 22 nt, Human
ugaaggaacugggagauucugc

SEQ ID NO: 158985 - RNA, 19 nt, Human
ugacugagucugggcugag

SEQ ID NO: 158986 - RNA, 24 nt, Human
ugagcacgaagcauguuauaugaa

SEQ ID NO: 158987 - RNA, 22 nt, Human
ugaugucccuucacagcagccu

SEQ ID NO: 158988 - RNA, 21 nt, Human
ugccauguuagccaggcaguc

SEQ ID NO: 158989 - RNA, 30 nt, Human
ugccauguuagccaggcagucuggaacucc

SEQ ID NO: 158990 - RNA, 24 nt, Human
ugccauugcaccccgauaauuuuu

SEQ ID NO: 158991 - RNA, 18 nt, Human
ugcccaggccccgccaac

SEQ ID NO: 158992 - RNA, 18 nt, Human
ugcccaggcuggagugca

SEQ ID NO: 158993 - RNA, 21 nt, Human
ugcccaggcuggagugcagug

SEQ ID NO: 158994 - RNA, 21 nt, Human
ugcccaggcuuugccgaaauc

SEQ ID NO: 158995 - RNA, 23 nt, Human
ugccggaggcccgggcuugggug

SEQ ID NO: 158996 - RNA, 22 nt, Human
ugccucagccucuugaauagcu

SEQ ID NO: 158997 - RNA, 24 nt, Human
ugccucagccucuugaauagcugg

SEQ ID NO: 158998 - RNA, 24 nt, Human
ugcugggaucacaggugugagcca

SEQ ID NO: 158999 - RNA, 19 nt, Human
ugcuucagcaguuugggca

SEQ ID NO: 159000 - RNA, 20 nt, Human
uggaaaaagcgaaaagguga

SEQ ID NO: 159001 - RNA, 22 nt, Human
uggaaaaagcgaaaaggugaug

SEQ ID NO: 159002 - RNA, 20 nt, Human
uggaaagagugugccggagg

SEQ ID NO: 159003 - RNA, 19 nt, Human
uggagugcagugucaugau

SEQ ID NO: 159004 - RNA, 24 nt, Human
uggagugcagugucaugaucucgg

SEQ ID NO: 159005 - RNA, 20 nt, Human
uggcaggggaggaggaagag

SEQ ID NO: 159006 - RNA, 19 nt, Human
uggcggaaaggaagccacc

SEQ ID NO: 159007 - RNA, 19 nt, Human
ugggaucacaggugugagc

SEQ ID NO: 159008 - RNA, 21 nt, Human
ugggaucacaggugugagcca

SEQ ID NO: 159009 - RNA, 22 nt, Human
ugggaucacaggugugagccac

SEQ ID NO: 159010 - RNA, 22 nt, Human
ugggaucacaggugugagccac

SEQ ID NO: 159011 - RNA, 24 nt, Human
ugggaucacaggugugagccacug

SEQ ID NO: 159012 - RNA, 21 nt, Human
ugggauuacagaugcaugcca

SEQ ID NO: 159013 - RNA, 21 nt, Human
ugggauuacagaugcaugcca

SEQ ID NO: 159014 - RNA, 22 nt, Human
ugggauuacagaugcaugccau

SEQ ID NO: 159015 - RNA, 24 nt, Human
ugggauuacagaugcaugccauug

SEQ ID NO: 159016 - RNA, 21 nt, Human
ugguccucgcgggagcugcuu

SEQ ID NO: 159017 - RNA, 23 nt, Human
ugguucaugaccaaauucuuggu

SEQ ID NO: 159018 - RNA, 23 nt, Human
uguauuuuuggcucucucugagg

SEQ ID NO: 159019 - RNA, 24 nt, Human
ugucaugaucucggcucacuacaa

SEQ ID NO: 159020 - RNA, 22 nt, Human
ugucugcuccuguggccuguca

SEQ ID NO: 159021 - RNA, 23 nt, Human
ugugcccaggccccgccaacgcc

SEQ ID NO: 159022 - RNA, 24 nt, Human
ugugccggaggcccgggcuugggu

SEQ ID NO: 159023 - RNA, 19 nt, Human
uuaaagucagaacaggaga

SEQ ID NO: 159024 - RNA, 19 nt, Human
uuaauccugccuucuaaug

SEQ ID NO: 159025 - RNA, 24 nt, Human
uuaguagagauaggguauugccau

SEQ ID NO: 159026 - RNA, 20 nt, Human
uuagugaacaugucugacug

SEQ ID NO: 159027 - RNA, 23 nt, Human
uuagugaacaugucugacugagu

SEQ ID NO: 159028 - RNA, 21 nt, Human
uucaaccccaacaccucugac

SEQ ID NO: 159029 - RNA, 21 nt, Human
uuccagaucuucaguggaucu

SEQ ID NO: 159030 - RNA, 21 nt, Human
uuccaggcuaggaagaagucu

SEQ ID NO: 159031 - RNA, 21 nt, Human
uuccauggcccagccacaagu

SEQ ID NO: 159032 - RNA, 19 nt, Human
uuccuggaauuuuccagau

SEQ ID NO: 159033 - RNA, 23 nt, Human
uugccauguuagccaggcagucu

SEQ ID NO: 159034 - RNA, 24 nt, Human
uugcccaggcuggagugcaguguc

SEQ ID NO: 159035 - RNA, 25 nt, Human
uuggaauuuucccgcggucgcccgg

SEQ ID NO: 159036 - RNA, 18 nt, Human
uuggccucccaaagugcu

SEQ ID NO: 159037 - RNA, 25 nt, Human
uuggcuuuuugaguuuuuuuggaau

SEQ ID NO: 159038 - RNA, 24 nt, Human
uuggguaaaaacuagaaaccuguu

SEQ ID NO: 159039 - RNA, 18 nt, Human
uuuagcaaauacagagug

SEQ ID NO: 159040 - RNA, 25 nt, Human
uuugcucauaccucaaaacggagcc

SEQ ID NO: 159041 - RNA, 21 nt, Human
uuuuuaguagagauaggguau

SEQ ID NO: 159042 - RNA, 20 nt, Human
uuuuuguauuuuuaguagag

SEQ ID NO: 159043 - RNA, 24 nt, Human
aaaagugcuaggauuacaagcaug

SEQ ID NO: 159044 - RNA, 22 nt, Human
aaagcaucuguaccacaaaaaa

SEQ ID NO: 159045 - RNA, 18 nt, Human
aaagugcuaggauuacaa

SEQ ID NO: 159046 - RNA, 24 nt, Human
aaagugcuaggauuacaagcauga

SEQ ID NO: 159047 - RNA, 24 nt, Human
aaagugcugggauuacagguguga

SEQ ID NO: 159048 - RNA, 20 nt, Human
aaaugccacaacucgagaua

SEQ ID NO: 159049 - RNA, 26 nt, Human
aagugcuaggauuacaagcaugagcc

SEQ ID NO: 159050 - RNA, 18 nt, Human
aagugcugggauuacagg

SEQ ID NO: 159051 - RNA, 19 nt, Human
aagugcugggauuacaggu

SEQ ID NO: 159052 - RNA, 26 nt, Human
aagugcugggauuacaggugugagcc

SEQ ID NO: 159053 - RNA, 23 nt, Human
acaggcacgugccaccacaccca

SEQ ID NO: 159054 - RNA, 18 nt, Human
accuugugaucugcccac

SEQ ID NO: 159055 - RNA, 24 nt, Human
acuauguuggccaggcuggucuug

SEQ ID NO: 159056 - RNA, 20 nt, Human
agauaacaggcacgugccac

SEQ ID NO: 159057 - RNA, 23 nt, Human
augggguuucacuauguuggcca

SEQ ID NO: 159058 - RNA, 24 nt, Human
augggguuucacuauguuggccag

SEQ ID NO: 159059 - RNA, 24 nt, Human
caaagugcugggauuacaggugug

SEQ ID NO: 159060 - RNA, 22 nt, Human
caccaaaugcuuucacauuucu

SEQ ID NO: 159061 - RNA, 24 nt, Human
caccacacccagcuaauuuuugua

SEQ ID NO: 159062 - RNA, 21 nt, Human
cacuauguuggccaggcuggu

SEQ ID NO: 159063 - RNA, 24 nt, Human
cacuauguuggccaggcuggucuu

SEQ ID NO: 159064 - RNA, 24 nt, Human
cagaaaauugucaacucuauaaca

SEQ ID NO: 159065 - RNA, 24 nt, Human
caguagagaugggguuucacuaug

SEQ ID NO: 159066 - RNA, 20 nt, Human
ccaaagugcugggauuacag

SEQ ID NO: 159067 - RNA, 21 nt, Human
ccaaagugcugggauuacagg

SEQ ID NO: 159068 - RNA, 21 nt, Human
ccaaagugcugggauuacagg

SEQ ID NO: 159069 - RNA, 24 nt, Human
ccaaagugcugggauuacaggugu

SEQ ID NO: 159070 - RNA, 18 nt, Human
ccacaucggccucccaaa

SEQ ID NO: 159071 - RNA, 20 nt, Human
ccaccacacccagcuaauuu

SEQ ID NO: 159072 - RNA, 18 nt, Human
cccggacucaagcaaucc

SEQ ID NO: 159073 - RNA, 22 nt, Human
ccucaaaaagugcuaggauuac

SEQ ID NO: 159074 - RNA, 24 nt, Human
cgaaagcaucuguaccacaaaaaa

SEQ ID NO: 159075 - RNA, 23 nt, Human
cuaauuuuuguauuuucaguaga

SEQ ID NO: 159076 - RNA, 24 nt, Human
cucaagcaauccuccuaccuuggc

SEQ ID NO: 159077 - RNA, 24 nt, Human
cucauucuucucaacacucagaaa

SEQ ID NO: 159078 - RNA, 22 nt, Human
cuccugaccuugugaucugccc

SEQ ID NO: 159079 - RNA, 23 nt, Human
cuucugggucccaaaaauuauau

SEQ ID NO: 159080 - RNA, 21 nt, Human
cuuggccucaaaaagugcuag

SEQ ID NO: 159081 - RNA, 22 nt, Human
gaccuugugaucugcccacauc

SEQ ID NO: 159082 - RNA, 24 nt, Human
gagaugggguuucacuauguuggc

SEQ ID NO: 159083 - RNA, 18 nt, Human
gauuacaagcaugagcca

SEQ ID NO: 159084 - RNA, 22 nt, Human
gauuacaagcaugagccacugc

SEQ ID NO: 159085 - RNA, 22 nt, Human
gauuacaagcaugagccacugc

SEQ ID NO: 159086 - RNA, 18 nt, Human
gauuacaggugugagcca

SEQ ID NO: 159087 - RNA, 22 nt, Human
gauuacaggugugagccaccgc

SEQ ID NO: 159088 - RNA, 23 nt, Human
gauuacaggugugagccaccgca

SEQ ID NO: 159089 - RNA, 22 nt, Human
ggauuacaagcaugagccacug

SEQ ID NO: 159090 - RNA, 24 nt, Human
ggcuggucuugaacuccugaccuu

SEQ ID NO: 159091 - RNA, 22 nt, Human
gggguuucacuauguuggccag

SEQ ID NO: 159092 - RNA, 20 nt, Human
ggucuugaacuccugaccuu

SEQ ID NO: 159093 - RNA, 18 nt, Human
gugucguuguuucuucug

SEQ ID NO: 159094 - RNA, 18 nt, Human
uaacaggcacgugccacc

SEQ ID NO: 159095 - RNA, 24 nt, Human
uaauuuuuguauuuucaguagaga

SEQ ID NO: 159096 - RNA, 24 nt, Human
uacaggugugagccaccgcaccca

SEQ ID NO: 159097 - RNA, 22 nt, Human
uaccuuggccucaaaaagugcu

SEQ ID NO: 159098 - RNA, 18 nt, Human
uacuucgaugacuucucc

SEQ ID NO: 159099 - RNA, 22 nt, Human
uagagaugggguuucacuaugu

SEQ ID NO: 159100 - RNA, 22 nt, Human
uaggauuacaagcaugagccac

SEQ ID NO: 159101 - RNA, 22 nt, Human
uaggauuacaagcaugagccac

SEQ ID NO: 159102 - RNA, 24 nt, Human
uaggauuacaagcaugagccacug

SEQ ID NO: 159103 - RNA, 26 nt, Human
uaggauuacaagcaugagccacugcg

SEQ ID NO: 159104 - RNA, 30 nt, Human
uaggauuacaagcaugagccacugcgccaa

SEQ ID NO: 159105 - RNA, 21 nt, Human
uauaacaaaugccacaacucg

SEQ ID NO: 159106 - RNA, 24 nt, Human
uauguuggccaggcuggucuugaa

SEQ ID NO: 159107 - RNA, 24 nt, Human
uauguugugcagcuuugccuugag

SEQ ID NO: 159108 - RNA, 26 nt, Human
uauuuuuguauguuucaaauguguuu

SEQ ID NO: 159109 - RNA, 24 nt, Human
ucaagcaauccuccuaccuuggcc

SEQ ID NO: 159110 - RNA, 22 nt, Human
ucacuauguuggccaggcuggu

SEQ ID NO: 159111 - RNA, 18 nt, Human
ucaguagagaugggguuu

SEQ ID NO: 159112 - RNA, 21 nt, Human
ucaguagagaugggguuucac

SEQ ID NO: 159113 - RNA, 24 nt, Human
ucaguagagaugggguuucacuau

SEQ ID NO: 159114 - RNA, 23 nt, Human
ucccaaagugcugggauuacagg

SEQ ID NO: 159115 - RNA, 24 nt, Human
ucccaaguagcugagauaacaggc

SEQ ID NO: 159116 - RNA, 18 nt, Human
ucggccucccaaagugcu

SEQ ID NO: 159117 - RNA, 23 nt, Human
ucuauuuuuauuucaguucucua

SEQ ID NO: 159118 - RNA, 23 nt, Human
ucucuaagguggcagcuucugac

SEQ ID NO: 159119 - RNA, 18 nt, Human
ucuguaccacaaaaaagc

SEQ ID NO: 159120 - RNA, 19 nt, Human
ucuugaacuccugaccuug

SEQ ID NO: 159121 - RNA, 18 nt, Human
ugacucugugcuuuggcu

SEQ ID NO: 159122 - RNA, 24 nt, Human
ugagauaacaggcacgugccacca

SEQ ID NO: 159123 - RNA, 24 nt, Human
ugagcucccggacucaagcaaucc

SEQ ID NO: 159124 - RNA, 25 nt, Human
ugagcucccggacucaagcaauccu

SEQ ID NO: 159125 - RNA, 23 nt, Human
ugccacaacucgagauacucagg

SEQ ID NO: 159126 - RNA, 21 nt, Human
ugcccacaucggccucccaaa

SEQ ID NO: 159127 - RNA, 20 nt, Human
ugccuugagcucccggacuc

SEQ ID NO: 159128 - RNA, 24 nt, Human
ugcuaggauuacaagcaugagcca

SEQ ID NO: 159129 - RNA, 24 nt, Human
ugcugggauuacaggugugagcca

SEQ ID NO: 159130 - RNA, 24 nt, Human
uggccaggcuggucuugaacuccu

SEQ ID NO: 159131 - RNA, 18 nt, Human
ugggauuacaggugugag

SEQ ID NO: 159132 - RNA, 19 nt, Human
ugggauuacaggugugagc

SEQ ID NO: 159133 - RNA, 21 nt, Human
ugggauuacaggugugagcca

SEQ ID NO: 159134 - RNA, 22 nt, Human
ugggauuacaggugugagccac

SEQ ID NO: 159135 - RNA, 23 nt, Human
ugggauuacaggugugagccacc

SEQ ID NO: 159136 - RNA, 24 nt, Human
ugggauuacaggugugagccaccg

SEQ ID NO: 159137 - RNA, 24 nt, Human
ugggguuucacuauguuggccagg

SEQ ID NO: 159138 - RNA, 22 nt, Human
uuaacucauucuucucaacacu

SEQ ID NO: 159139 - RNA, 20 nt, Human
uucgaugacuucucccuucu

SEQ ID NO: 159140 - RNA, 18 nt, Human
uucucccuucuaaaaugg

SEQ ID NO: 159141 - RNA, 25 nt, Human
uuggccucaaaaagugcuaggauua

SEQ ID NO: 159142 - RNA, 21 nt, Human
uugugucguuguuucuucugg

SEQ ID NO: 159143 - RNA, 23 nt, Human
uuucacuauguuggccaggcugu

SEQ ID NO: 159144 - RNA, 24 nt, Human
uuuucaguagagaugggguuucac

SEQ ID NO: 159145 - RNA, 20 nt, Human
uuuuuguauuuucaguagag

SEQ ID NO: 159146 - RNA, 23 nt, Human
uuuuuguauuuucaguagagaug

SEQ ID NO: 159147 - RNA, 23 nt, Human
aaaaacaaaagaaaugaaaaaga

SEQ ID NO: 159148 - RNA, 24 nt, Human
aaaaacaaaagaaaugaaaaagaa

SEQ ID NO: 159149 - RNA, 25 nt, Human
aaaaacacagaaggucauaauauac

SEQ ID NO: 159150 - RNA, 19 nt, Human
aaaaagaaaauauagcuga

SEQ ID NO: 159151 - RNA, 20 nt, Human
aaacaaaaacacagaagguc

SEQ ID NO: 159152 - RNA, 24 nt, Human
aagaucacuugagcucaggaguuc

SEQ ID NO: 159153 - RNA, 22 nt, Human
aaggcaggaagaucacuugagc

SEQ ID NO: 159154 - RNA, 22 nt, Human
aagucagaaacaaaaacacaga

SEQ ID NO: 159155 - RNA, 21 nt, Human
acagagcaauaccuucucuca

SEQ ID NO: 159156 - RNA, 24 nt, Human
acagagcaauaccuucucucaaaa

SEQ ID NO: 159157 - RNA, 24 nt, Human
acugcacuccagccuggaugacag

SEQ ID NO: 159158 - RNA, 26 nt, Human
acugcacuccagccuggaugacagag

SEQ ID NO: 159159 - RNA, 23 nt, Human
agacaagguggugaagaaagaaa

SEQ ID NO: 159160 - RNA, 19 nt, Human
agaggguggucccuuggug

SEQ ID NO: 159161 - RNA, 18 nt, Human
agagguuacagugagcca

SEQ ID NO: 159162 - RNA, 19 nt, Human
agcucaggaguucaagacc

SEQ ID NO: 159163 - RNA, 24 nt, Human
aggaguucaagaccagcccugacc

SEQ ID NO: 159164 - RNA, 19 nt, Human
aggcagagguuacagugag

SEQ ID NO: 159165 - RNA, 27 nt, Human
aggcagagguuacagugagccaugauc

SEQ ID NO: 159166 - RNA, 18 nt, Human
aggcaggaagaucacuug

SEQ ID NO: 159167 - RNA, 19 nt, Human
aggcaggaagaucacuuga

SEQ ID NO: 159168 - RNA, 21 nt, Human
aggcucagccuuuauccucag

SEQ ID NO: 159169 - RNA, 24 nt, Human
aucgcaucacugcacuccagccug

SEQ ID NO: 159170 - RNA, 24 nt, Human
caaaaacaaaagaaaugaaaaaga

SEQ ID NO: 159171 - RNA, 25 nt, Human
cacaccuguaaaucucaacacuuug

SEQ ID NO: 159172 - RNA, 24 nt, Human
caccuguaaaucucaacacuuugg

SEQ ID NO: 159173 - RNA, 25 nt, Human
caccuguaaaucucaacacuuuggg

SEQ ID NO: 159174 - RNA, 18 nt, Human
cacugcacuccagccugg

SEQ ID NO: 159175 - RNA, 19 nt, Human
cacugcacuccagccugga

SEQ ID NO: 159176 - RNA, 19 nt, Human
cacugcacuccagccugga

SEQ ID NO: 159177 - RNA, 20 nt, Human
cacugcacuccagccuggau

SEQ ID NO: 159178 - RNA, 22 nt, Human
cacugcacuccagccuggauga

SEQ ID NO: 159179 - RNA, 23 nt, Human
cacugcacuccagccuggaugac

SEQ ID NO: 159180 - RNA, 24 nt, Human
cacugcacuccagccuggaugaca

SEQ ID NO: 159181 - RNA, 22 nt, Human
cagaccuccuggagcaucccau

SEQ ID NO: 159182 - RNA, 20 nt, Human
caucugagcccacugguacc

SEQ ID NO: 159183 - RNA, 21 nt, Human
cauguagucccagcuacuugg

SEQ ID NO: 159184 - RNA, 23 nt, Human
cccuuagcccaggagccucccug

SEQ ID NO: 159185 - RNA, 19 nt, Human
ccgcccgaagccgcagccg

SEQ ID NO: 159186 - RNA, 19 nt, Human
ccucccugcuggcugggaa

SEQ ID NO: 159187 - RNA, 25 nt, Human
ccugggaggcagagguuacagugag

SEQ ID NO: 159188 - RNA, 19 nt, Human
ccuguuacaagcucuccuc

SEQ ID NO: 159189 - RNA, 21 nt, Human
cgcaucacugcacuccagccu

SEQ ID NO: 159190 - RNA, 19 nt, Human
cggaaaguuugucccugca

SEQ ID NO: 159191 - RNA, 27 nt, Human
cgucccugacgcggcgguggcgggcca

SEQ ID NO: 159192 - RNA, 23 nt, Human
cuacugagcccuaucggaaaguu

SEQ ID NO: 159193 - RNA, 22 nt, Human
cucagaggcugaggggaacgga

SEQ ID NO: 159194 - RNA, 21 nt, Human
gaaaaagaaaauauagcugaa

SEQ ID NO: 159195 - RNA, 18 nt, Human
gacaagguggugaagaaa

SEQ ID NO: 159196 - RNA, 18 nt, Human
gacgcggcgguggcgggc

SEQ ID NO: 159197 - RNA, 20 nt, Human
gacgcggcgguggcgggcca

SEQ ID NO: 159198 - RNA, 23 nt, Human
gaucacuugagcucaggaguuca

SEQ ID NO: 159199 - RNA, 24 nt, Human
gaucacuugagcucaggaguucaa

SEQ ID NO: 159200 - RNA, 24 nt, Human
gcacuccagccuggaugacagagc

SEQ ID NO: 159201 - RNA, 20 nt, Human
gcaucacugcacuccagccu

SEQ ID NO: 159202 - RNA, 22 nt, Human
gcccaggagccucccugcuggc

SEQ ID NO: 159203 - RNA, 20 nt, Human
gcccaggagccucccugcuu

SEQ ID NO: 159204 - RNA, 20 nt, Human
gccuguuacaagcucuccuc

SEQ ID NO: 159205 - RNA, 21 nt, Human
ggagaaacccggccgcccgaa

SEQ ID NO: 159206 - RNA, 27 nt, Human
ggagaaacccggccgcccgaagccgca

SEQ ID NO: 159207 - RNA, 23 nt, Human
ggaggaucgagccugggaggcag

SEQ ID NO: 159208 - RNA, 21 nt, Human
ggaggcagagguuacagugag

SEQ ID NO: 159209 - RNA, 20 nt, Human
ggccgcccgaagccgcagcc

SEQ ID NO: 159210 - RNA, 21 nt, Human
ggccuggugugguggcucaca

SEQ ID NO: 159211 - RNA, 23 nt, Human
ggcgguggcgggccagcuccagc

SEQ ID NO: 159212 - RNA, 23 nt, Human
ggugugguggcucacaccuguaa

SEQ ID NO: 159213 - RNA, 18 nt, Human
gugugguggcucacaccu

SEQ ID NO: 159214 - RNA, 20 nt, Human
uaccccagaccuccuggagc

SEQ ID NO: 159215 - RNA, 18 nt, Human
uaccuucucucaaaaaca

SEQ ID NO: 159216 - RNA, 22 nt, Human
uagcugggcauagugucaugug

SEQ ID NO: 159217 - RNA, 21 nt, Human
uauccucaggcuagggcucaa

SEQ ID NO: 159218 - RNA, 19 nt, Human
ucacugcacuccagccugg

SEQ ID NO: 159219 - RNA, 21 nt, Human
ucacugcacuccagccuggau

SEQ ID NO: 159220 - RNA, 24 nt, Human
ucacugcacuccagccuggaugac

SEQ ID NO: 159221 - RNA, 23 nt, Human
ucacuugagcucaggaguucaag

SEQ ID NO: 159222 - RNA, 18 nt, Human
uccagccuggaugacaga

SEQ ID NO: 159223 - RNA, 18 nt, Human
uccuggagcaucccaugc

SEQ ID NO: 159224 - RNA, 23 nt, Human
ucgcaucacugcacuccagccug

SEQ ID NO: 159225 - RNA, 21 nt, Human
ucucucaaaaacaaaagaaau

SEQ ID NO: 159226 - RNA, 18 nt, Human
ugacagagcaauaccuuc

SEQ ID NO: 159227 - RNA, 21 nt, Human
ugagcccacugguaccccaga

SEQ ID NO: 159228 - RNA, 23 nt, Human
ugcauguagucccagcuacuugg

SEQ ID NO: 159229 - RNA, 24 nt, Human
ugcauguagucccagcuacuuggg

SEQ ID NO: 159230 - RNA, 20 nt, Human
uggagcaucccaugcccacu

SEQ ID NO: 159231 - RNA, 22 nt, Human
uggcgggccagcuccagcgccu

SEQ ID NO: 159232 - RNA, 18 nt, Human
ugggaggcugacauggga

SEQ ID NO: 159233 - RNA, 19 nt, Human
ugggaggcugacaugggag

SEQ ID NO: 159234 - RNA, 23 nt, Human
ugggaggcugacaugggaggauc

SEQ ID NO: 159235 - RNA, 20 nt, Human
uguagucccagcuacuuggg

SEQ ID NO: 159236 - RNA, 21 nt, Human
ugugguggcucacaccuguaa

SEQ ID NO: 159237 - RNA, 24 nt, Human
uuagcugggcauagugucaugugc

SEQ ID NO: 159238 - RNA, 22 nt, Human
uucaagucagaaacaaaaacac

SEQ ID NO: 159239 - RNA, 24 nt, Human
uugggaggcugacaugggaggauc

SEQ ID NO: 159240 - RNA, 18 nt, Human
aaaaaaaaaaaaguuuga

SEQ ID NO: 159241 - RNA, 21 nt, Human
aaaggcauauauuuguauuua

SEQ ID NO: 159242 - RNA, 24 nt, Human
aacacaacuagguuccuacacaca

SEQ ID NO: 159243 - RNA, 23 nt, Human
aacuauucaaaauuagcaucuaa

SEQ ID NO: 159244 - RNA, 18 nt, Human
aagaaaacucuucacuac

SEQ ID NO: 159245 - RNA, 23 nt, Human
aaggcggacggaucacaagguca

SEQ ID NO: 159246 - RNA, 24 nt, Human
acagagcgagacuccaucucaaaa

SEQ ID NO: 159247 - RNA, 24 nt, Human
accccgucucuacuaaaaauacaa

SEQ ID NO: 159248 - RNA, 18 nt, Human
accuaguuaacggcagaa

SEQ ID NO: 159249 - RNA, 19 nt, Human
acugcacuccagacugggu

SEQ ID NO: 159250 - RNA, 24 nt, Human
acugcacuccagacugggugacag

SEQ ID NO: 159251 - RNA, 26 nt, Human
acugcacuccagacugggugacagag

SEQ ID NO: 159252 - RNA, 19 nt, Human
agaaacaaacuuucugaac

SEQ ID NO: 159253 - RNA, 24 nt, Human
agacugggugacagagcgagacuc

SEQ ID NO: 159254 - RNA, 20 nt, Human
agagguugcacugagcagug

SEQ ID NO: 159255 - RNA, 24 nt, Human
agauaggccaacagcuuuucaaac

SEQ ID NO: 159256 - RNA, 20 nt, Human
agcauggugaaaccccgucu

SEQ ID NO: 159257 - RNA, 22 nt, Human
agccuggccagcauggugaaac

SEQ ID NO: 159258 - RNA, 24 nt, Human
agccuggccagcauggugaaaccc

SEQ ID NO: 159259 - RNA, 22 nt, Human
aggaaucagaccacaaggaaaa

SEQ ID NO: 159260 - RNA, 19 nt, Human
aggcagagguugcacugag

SEQ ID NO: 159261 - RNA, 21 nt, Human
aggccaaggcggacggaucac

SEQ ID NO: 159262 - RNA, 23 nt, Human
aggccaaggcggacggaucacaa

SEQ ID NO: 159263 - RNA, 24 nt, Human
aggcgcgguggcucacgccuguaa

SEQ ID NO: 159264 - RNA, 24 nt, Human
aggcggacggaucacaaggucagg

SEQ ID NO: 159265 - RNA, 21 nt, Human
aggcugagucagaauugcuug

SEQ ID NO: 159266 - RNA, 24 nt, Human
aucacaccacugcacuccagacug

SEQ ID NO: 159267 - RNA, 22 nt, Human
aucccagcacuuugggaggcca

SEQ ID NO: 159268 - RNA, 26 nt, Human
caaggcggacggaucacaaggucagg

SEQ ID NO: 159269 - RNA, 23 nt, Human
cacacaaaacaaauauucuaaac

SEQ ID NO: 159270 - RNA, 21 nt, Human
caccuguaaucccagcuacuu

SEQ ID NO: 159271 - RNA, 23 nt, Human
caccuguaaucccagcuacuugg

SEQ ID NO: 159272 - RNA, 24 nt, Human
caccuguaaucccagcuacuuggg

SEQ ID NO: 159273 - RNA, 24 nt, Human
cacgccuguaaucccagcacuuug

SEQ ID NO: 159274 - RNA, 23 nt, Human
cacuaucagcuguggaacaccca

SEQ ID NO: 159275 - RNA, 22 nt, Human
cacucaagauuuaucuagaaaa

SEQ ID NO: 159276 - RNA, 23 nt, Human
cacuccagacugggugacagagc

SEQ ID NO: 159277 - RNA, 24 nt, Human
cacuccagacugggugacagagcg

SEQ ID NO: 159278 - RNA, 19 nt, Human
cacugcacuccagacuggg

SEQ ID NO: 159279 - RNA, 23 nt, Human
cacugcacuccagacugggugac

SEQ ID NO: 159280 - RNA, 24 nt, Human
cacugcacuccagacugggugaca

SEQ ID NO: 159281 - RNA, 24 nt, Human
cacugcacuccagacugggugaca

SEQ ID NO: 159282 - RNA, 21 nt, Human
cacugccaggaauaaagaaaa

SEQ ID NO: 159283 - RNA, 24 nt, Human
cagaccacaaggaaaaagaaauug

SEQ ID NO: 159284 - RNA, 24 nt, Human
cagcacuuugggaggccaaggcgg

SEQ ID NO: 159285 - RNA, 18 nt, Human
cauggugaaaccccgucu

SEQ ID NO: 159286 - RNA, 19 nt, Human
cauggugaaaccccgucuc

SEQ ID NO: 159287 - RNA, 21 nt, Human
cauggugaaaccccgucucua

SEQ ID NO: 159288 - RNA, 20 nt, Human
ccaagggaaaaauaaggaaa

SEQ ID NO: 159289 - RNA, 23 nt, Human
ccacagggcagccaccaagggaa

SEQ ID NO: 159290 - RNA, 20 nt, Human
ccacugcacuccagacuggg

SEQ ID NO: 159291 - RNA, 20 nt, Human
ccacugcacuccagacuggg

SEQ ID NO: 159292 - RNA, 21 nt, Human
ccacugcacuccagacugggu

SEQ ID NO: 159293 - RNA, 24 nt, Human
ccacugcacuccagacugggugac

SEQ ID NO: 159294 - RNA, 18 nt, Human
ccauacuaaaagaaaaag

SEQ ID NO: 159295 - RNA, 21 nt, Human
ccauacuaaaagaaaaagggu

SEQ ID NO: 159296 - RNA, 23 nt, Human
ccuggccagcauggugaaacccc

SEQ ID NO: 159297 - RNA, 24 nt, Human
ccuggccagcauggugaaaccccg

SEQ ID NO: 159298 - RNA, 25 nt, Human
ccugggaggcagagguugcacugag

SEQ ID NO: 159299 - RNA, 21 nt, Human
ccuguaaucccagcuacuugg

SEQ ID NO: 159300 - RNA, 23 nt, Human
cgagacuccaucucaaaaaaaaa

SEQ ID NO: 159301 - RNA, 24 nt, Human
cgccuguaaucccagcacuuuggg

SEQ ID NO: 159302 - RNA, 19 nt, Human
cuaaagcuaaagcuaacau

SEQ ID NO: 159303 - RNA, 21 nt, Human
cuacacacaaaacaaauauuc

SEQ ID NO: 159304 - RNA, 22 nt, Human
cucacgccuguaaucccagcac

SEQ ID NO: 159305 - RNA, 24 nt, Human
cucacgccuguaaucccagcacuu

SEQ ID NO: 159306 - RNA, 19 nt, Human
cuccaucucaaaaaaaaaa

SEQ ID NO: 159307 - RNA, 19 nt, Human
cugcaccuguaaucccagc

SEQ ID NO: 159308 - RNA, 21 nt, Human
cugggugacagagcgagacuc

SEQ ID NO: 159309 - RNA, 21 nt, Human
cuguaaucccagcuacuuggg

SEQ ID NO: 159310 - RNA, 20 nt, Human
gaaaaauaaaccauacuaaa

SEQ ID NO: 159311 - RNA, 25 nt, Human
gacagaaaaccuagaaaaauaaacc

SEQ ID NO: 159312 - RNA, 23 nt, Human
gacggaucacaaggucagguguu

SEQ ID NO: 159313 - RNA, 18 nt, Human
gauaaauguaaucuacaa

SEQ ID NO: 159314 - RNA, 24 nt, Human
gcacuccagacugggugacagagc

SEQ ID NO: 159315 - RNA, 24 nt, Human
gcagaagcugcacuaaaaccugga

SEQ ID NO: 159316 - RNA, 20 nt, Human
gcagugaucacaccacugca

SEQ ID NO: 159317 - RNA, 18 nt, Human
gcaugguggccugcaccu

SEQ ID NO: 159318 - RNA, 24 nt, Human
gccaccaagggaaaaauaaggaaa

SEQ ID NO: 159319 - RNA, 24 nt, Human
gccagcauggugaaaccccgucuc

SEQ ID NO: 159320 - RNA, 22 nt, Human
gcuaauuccauggcuuuaagug

SEQ ID NO: 159321 - RNA, 20 nt, Human
ggaacacccagguaaacuaa

SEQ ID NO: 159322 - RNA, 23 nt, Human
ggcaugguggccugcaccuguaa

SEQ ID NO: 159323 - RNA, 24 nt, Human
gguggccugcaccuguaaucccag

SEQ ID NO: 159324 - RNA, 23 nt, Human
gguggcucacgccuguaauccca

SEQ ID NO: 159325 - RNA, 24 nt, Human
gguggcucacgccuguaaucccag

SEQ ID NO: 159326 - RNA, 19 nt, Human
guagaacucuucacugggu

SEQ ID NO: 159327 - RNA, 18 nt, Human
guuuuggccaggcgcggu

SEQ ID NO: 159328 - RNA, 24 nt, Human
uaaaaaugaauaaauugcccuuga

SEQ ID NO: 159329 - RNA, 21 nt, Human
uaaaauaauuauacuuuggac

SEQ ID NO: 159330 - RNA, 22 nt, Human
uacacacaaaacaaauauucua

SEQ ID NO: 159331 - RNA, 21 nt, Human
uacuagguuaacaaggccaaa

SEQ ID NO: 159332 - RNA, 24 nt, Human
uagaaaaauaaaccauacuaaaag

SEQ ID NO: 159333 - RNA, 22 nt, Human
uagguuaacaaggccaaacucc

SEQ ID NO: 159334 - RNA, 24 nt, Human
uauaacuguuuaauaaacuauuca

SEQ ID NO: 159335 - RNA, 23 nt, Human
uauccagaaaauccgugacacua

SEQ ID NO: 159336 - RNA, 24 nt, Human
uauuuguauuuacugugcuuuaaa

SEQ ID NO: 159337 - RNA, 18 nt, Human
ucacaaacuguuauuuuc

SEQ ID NO: 159338 - RNA, 24 nt, Human
ucacaaggucagguguuugagacc

SEQ ID NO: 159339 - RNA, 23 nt, Human
ucacaccacugcacuccagacug

SEQ ID NO: 159340 - RNA, 24 nt, Human
uccagacugggugacagagcgaga

SEQ ID NO: 159341 - RNA, 18 nt, Human
ucuaaagcuaaagcuaac

SEQ ID NO: 159342 - RNA, 19 nt, Human
ucuauccagaaaauccgug

SEQ ID NO: 159343 - RNA, 22 nt, Human
ucuccaaaaaaauccucuuacc

SEQ ID NO: 159344 - RNA, 22 nt, Human
ucucuacuaaaaauacaaaaaa

SEQ ID NO: 159345 - RNA, 18 nt, Human
ucuuuuaucaucaagcau

SEQ ID NO: 159346 - RNA, 24 nt, Human
ugacacugccaggaauaaagaaaa

SEQ ID NO: 159347 - RNA, 23 nt, Human
ugagaccagccuggccagcaugg

SEQ ID NO: 159348 - RNA, 24 nt, Human
ugagaccagccuggccagcauggu

SEQ ID NO: 159349 - RNA, 24 nt, Human
ugccaggaauaaagaaaacucuuc

SEQ ID NO: 159350 - RNA, 21 nt, Human
uggaacacccagguaaacuaa

SEQ ID NO: 159351 - RNA, 24 nt, Human
uggccagcauggugaaaccccguc

SEQ ID NO: 159352 - RNA, 24 nt, Human
uggccaggcgcgguggcucacgcc

SEQ ID NO: 159353 - RNA, 22 nt, Human
uggccugcaccuguaaucccag

SEQ ID NO: 159354 - RNA, 22 nt, Human
uggcucacgccuguaaucccag

SEQ ID NO: 159355 - RNA, 24 nt, Human
uggcucacgccuguaaucccagca

SEQ ID NO: 159356 - RNA, 20 nt, Human
ugggaggcagagguugcacu

SEQ ID NO: 159357 - RNA, 24 nt, Human
ugggaggccaaggcggacggauca

SEQ ID NO: 159358 - RNA, 21 nt, Human
ugggaggcugagucagaauug

SEQ ID NO: 159359 - RNA, 21 nt, Human
uggguuguuucuuaaaaaaaa

SEQ ID NO: 159360 - RNA, 23 nt, Human
uggugagaacauuguaauuuuca

SEQ ID NO: 159361 - RNA, 24 nt, Human
ugguggccugcaccuguaauccca

SEQ ID NO: 159362 - RNA, 22 nt, Human
uguuauuuucuaaagcuaaagc

SEQ ID NO: 159363 - RNA, 23 nt, Human
uuaaagggacauacuauguggug

SEQ ID NO: 159364 - RNA, 18 nt, Human
uuacaauuuuauuguaaa

SEQ ID NO: 159365 - RNA, 25 nt, Human
uuagaauacuagguuaacaaggcca

SEQ ID NO: 159366 - RNA, 22 nt, Human
uuagccgggcaugguggccugc

SEQ ID NO: 159367 - RNA, 23 nt, Human
uugcuugauccugggaggcagag

SEQ ID NO: 159368 - RNA, 24 nt, Human
uugcuugauccugggaggcagagg

SEQ ID NO: 159369 - RNA, 20 nt, Human
uugggaggcugagucagaau

SEQ ID NO: 159370 - RNA, 22 nt, Human
uuugcagaaaaugagaaacaaa

SEQ ID NO: 159371 - RNA, 24 nt, Human
uuuggccaggcgcgguggcucacg

SEQ ID NO: 159372 - RNA, 24 nt, Human
uuuuguaaacuauauauucuauau

SEQ ID NO: 159373 - RNA, 21 nt, Human
aaacaggaaaaaaggugccuc

SEQ ID NO: 159374 - RNA, 22 nt, Human
aaacgagucagcaaccccaaac

SEQ ID NO: 159375 - RNA, 19 nt, Human
aaacucggggaggaaacga

SEQ ID NO: 159376 - RNA, 24 nt, Human
acaguccguggcucggcccuuccu

SEQ ID NO: 159377 - RNA, 28 nt, Human
agaaacaggaaaaaaggugccgguaccc

SEQ ID NO: 159378 - RNA, 21 nt, Human
agaccagaagcggacuuagga

SEQ ID NO: 159379 - RNA, 22 nt, Human
agaccagaagcggacuuaggaa

SEQ ID NO: 159380 - RNA, 27 nt, Human
agcuggccugcccaagcucccaacccc

SEQ ID NO: 159381 - RNA, 19 nt, Human
aggaauggucacauuccua

SEQ ID NO: 159382 - RNA, 24 nt, Human
caacagaaaaggagaaacaggaaa

SEQ ID NO: 159383 - RNA, 20 nt, Human
caaccccagcggggaggggc

SEQ ID NO: 159384 - RNA, 20 nt, Human
cacagccucgagaaagggug

SEQ ID NO: 159385 - RNA, 19 nt, Human
caccccgccgagcuccccu

SEQ ID NO: 159386 - RNA, 25 nt, Human
cagagagacagcccacuggggaccc

SEQ ID NO: 159387 - RNA, 21 nt, Human
cagagauuguuuccuccaaaa

SEQ ID NO: 159388 - RNA, 23 nt, Human
cagcaaccccaaacaggcuuagg

SEQ ID NO: 159389 - RNA, 23 nt, Human
cagcccacuggggacccagcuca

SEQ ID NO: 159390 - RNA, 20 nt, Human
ccacacccccagguccuccc

SEQ ID NO: 159391 - RNA, 22 nt, Human
cccaagcucccaaccccagcgg

SEQ ID NO: 159392 - RNA, 19 nt, Human
cccaauccacccgcccagg

SEQ ID NO: 159393 - RNA, 27 nt, Human
ccccgccgagcuccccugcuucucucg

SEQ ID NO: 159394 - RNA, 22 nt, Human
ccccugcuucucucgggguccc

SEQ ID NO: 159395 - RNA, 21 nt, Human
ccguggcucggcccuuccucg

SEQ ID NO: 159396 - RNA, 25 nt, Human
ccucgagaaagggugggcgggagcg

SEQ ID NO: 159397 - RNA, 24 nt, Human
ccugcccaagcucccaaccccagc

SEQ ID NO: 159398 - RNA, 22 nt, Human
cgaggcugggcccggagaccag

SEQ ID NO: 159399 - RNA, 24 nt, Human
cgccgggcucucaaccucgccucu

SEQ ID NO: 159400 - RNA, 22 nt, Human
cucaaccucgccucugguuggc

SEQ ID NO: 159401 - RNA, 25 nt, Human
cucccaaccccagcggggaggggcc

SEQ ID NO: 159402 - RNA, 18 nt, Human
cucgcugccacaccccca

SEQ ID NO: 159403 - RNA, 20 nt, Human
cucggggucccaauccaccc

SEQ ID NO: 159404 - RNA, 23 nt, Human
gaaaaggagaaacaggaaaaaag

SEQ ID NO: 159405 - RNA, 20 nt, Human
gaguuucggccccacagucc

SEQ ID NO: 159406 - RNA, 24 nt, Human
gcccuccccacagagagacagccc

SEQ ID NO: 159407 - RNA, 18 nt, Human
gcuggccugcccaagcuc

SEQ ID NO: 159408 - RNA, 20 nt, Human
ggaagggugaagcuggccug

SEQ ID NO: 159409 - RNA, 19 nt, Human
ggacagaugggacgcucuc

SEQ ID NO: 159410 - RNA, 21 nt, Human
ggcaaauuucacaggccuacc

SEQ ID NO: 159411 - RNA, 22 nt, Human
ggugguggcagagauuguuucc

SEQ ID NO: 159412 - RNA, 20 nt, Human
guaguaacuagggcaaauuu

SEQ ID NO: 159413 - RNA, 19 nt, Human
guccaggaauuauauagga

SEQ ID NO: 159414 - RNA, 24 nt, Human
gucccaauccacccgcccaggcuu

SEQ ID NO: 159415 - RNA, 23 nt, Human
guccguggcucggcccuuccucg

SEQ ID NO: 159416 - RNA, 21 nt, Human
uaacuagggcaaauuucacag

SEQ ID NO: 159417 - RNA, 18 nt, Human
uaggaagggugaagcugg

SEQ ID NO: 159418 - RNA, 19 nt, Human
uaugaaauuuuacucgaca

SEQ ID NO: 159419 - RNA, 20 nt, Human
ucaaugacuuggugguggca

SEQ ID NO: 159420 - RNA, 19 nt, Human
ucccgcgggaaacucgggg

SEQ ID NO: 159421 - RNA, 19 nt, Human
uccguggcucggcccuucc

SEQ ID NO: 159422 - RNA, 25 nt, Human
uccuccaaaacgagaaugguaguaa

SEQ ID NO: 159423 - RNA, 20 nt, Human
ucgccucugguuggccgggu

SEQ ID NO: 159424 - RNA, 19 nt, Human
ucgcggaggccacagccuc

SEQ ID NO: 159425 - RNA, 19 nt, Human
ucggccccacaguccgugg

SEQ ID NO: 159426 - RNA, 23 nt, Human
ugaagcagaaagcccuccccaca

SEQ ID NO: 159427 - RNA, 18 nt, Human
ugaagcuggccugcccaa

SEQ ID NO: 159428 - RNA, 27 nt, Human
ugauggugaagcagaaagcccuccccu

SEQ ID NO: 159429 - RNA, 20 nt, Human
ugccacacccccagguccuc

SEQ ID NO: 159430 - RNA, 18 nt, Human
uggccgggucugcgaagc

SEQ ID NO: 159431 - RNA, 23 nt, Human
uggccgggucugcgaagcucugg

SEQ ID NO: 159432 - RNA, 21 nt, Human
uggggacccagcucaagcucu

SEQ ID NO: 159433 - RNA, 23 nt, Human
ugguaguaacuagggcaaauuuc

SEQ ID NO: 159434 - RNA, 21 nt, Human
uuccaggacagaugggacgcu

SEQ ID NO: 159435 - RNA, 27 nt, Human
uuggugguggcagagauuguuuccucc

SEQ ID NO: 159436 - RNA, 22 nt, Human
aaaaccguugaaaaggaccaag

SEQ ID NO: 159437 - RNA, 22 nt, Human
aaagcaaaaugcaugacucccu

SEQ ID NO: 159438 - RNA, 20 nt, Human
cacuguguccaaagcaaaau

SEQ ID NO: 159439 - RNA, 18 nt, Human
cagaguaccagaaaaugu

SEQ ID NO: 159440 - RNA, 19 nt, Human
cagaguaccagaaaaugua

SEQ ID NO: 159441 - RNA, 19 nt, Human
gaaaaccguugaaaaggac

SEQ ID NO: 159442 - RNA, 20 nt, Human
gaacuucugaguccucaucu

SEQ ID NO: 159443 - RNA, 21 nt, Human
uaguuggaagcugaagccagg

SEQ ID NO: 159444 - RNA, 20 nt, Human
ucacuggaucugugaaaacc

SEQ ID NO: 159445 - RNA, 21 nt, Human
ucccuuuucucuucuuucaca

SEQ ID NO: 159446 - RNA, 24 nt, Human
ucccuuuucucuucuuucacagag

SEQ ID NO: 159447 - RNA, 23 nt, Human
ugaaaaccguugaaaaggaccaa

SEQ ID NO: 159448 - RNA, 18 nt, Human
ugaaaaggaccaagucug

SEQ ID NO: 159449 - RNA, 19 nt, Human
ugaacuucugacuuuauua

SEQ ID NO: 159450 - RNA, 22 nt, Human
uguaguuggaagcugaagccag

SEQ ID NO: 159451 - RNA, 24 nt, Human
uucacagaguaccagaaaauguaa

SEQ ID NO: 159452 - RNA, 22 nt, Human
aaaacaaacacagacaaacacc

SEQ ID NO: 159453 - RNA, 19 nt, Human
aaacaaacacagacaaaca

SEQ ID NO: 159454 - RNA, 25 nt, Human
aaacaaacacagacaaacaccaaac

SEQ ID NO: 159455 - RNA, 18 nt, Human
aaacacagacaaacacca

SEQ ID NO: 159456 - RNA, 23 nt, Human
aaacaccaaacauggaguuggug

SEQ ID NO: 159457 - RNA, 23 nt, Human
aaauccaagcacagaaagaccaa

SEQ ID NO: 159458 - RNA, 23 nt, Human
aacaaacacagacaaacaccaaa

SEQ ID NO: 159459 - RNA, 22 nt, Human
aacauggaguuggugcccggcg

SEQ ID NO: 159460 - RNA, 18 nt, Human
acagacaaacaccaaaca

SEQ ID NO: 159461 - RNA, 22 nt, Human
agacaaacaccaaacauggagu

SEQ ID NO: 159462 - RNA, 23 nt, Human
agacaaacaccaaacauggaguu

SEQ ID NO: 159463 - RNA, 22 nt, Human
aggggcccagcuccucggggac

SEQ ID NO: 159464 - RNA, 18 nt, Human
caaacacagacaaacacc

SEQ ID NO: 159465 - RNA, 23 nt, Human
cacagaaagaccaagcgcagacc

SEQ ID NO: 159466 - RNA, 23 nt, Human
cacagaaagaccaagcgcagacc

SEQ ID NO: 159467 - RNA, 25 nt, Human
cacagaaagaccaagcgcagacccc

SEQ ID NO: 159468 - RNA, 26 nt, Human
cacagaaagaccaagcgcagacccca

SEQ ID NO: 159469 - RNA, 19 nt, Human
cagcgggcugagccaaugc

SEQ ID NO: 159470 - RNA, 19 nt, Human
caggguggacaggccuggg

SEQ ID NO: 159471 - RNA, 19 nt, Human
caguggcacugggccggac

SEQ ID NO: 159472 - RNA, 21 nt, Human
cccaccggcaggacccuucaa

SEQ ID NO: 159473 - RNA, 22 nt, Human
cccacgggcgcacgaggcccag

SEQ ID NO: 159474 - RNA, 18 nt, Human
cccacggguggcugugcg

SEQ ID NO: 159475 - RNA, 22 nt, Human
ccccccacucagcgggcugagc

SEQ ID NO: 159476 - RNA, 24 nt, Human
ccgcagccagcaggcuuggguggc

SEQ ID NO: 159477 - RNA, 18 nt, Human
ccggcgccgggcauaagg

SEQ ID NO: 159478 - RNA, 19 nt, Human
cggcggagagggaggccgg

SEQ ID NO: 159479 - RNA, 24 nt, Human
cggcucuucacagaccaggagucu

SEQ ID NO: 159480 - RNA, 24 nt, Human
cgggcggcggugcgggcggcggag

SEQ ID NO: 159481 - RNA, 19 nt, Human
cgguggcaggcgggggcac

SEQ ID NO: 159482 - RNA, 24 nt, Human
cugacaguuacaguaaauuucaaa

SEQ ID NO: 159483 - RNA, 21 nt, Human
cuggccgagagggggccgcag

SEQ ID NO: 159484 - RNA, 19 nt, Human
cugguguccccgaggugcc

SEQ ID NO: 159485 - RNA, 24 nt, Human
gagcagcauuuuuaccaaauuggu

SEQ ID NO: 159486 - RNA, 21 nt, Human
gagucuccaagucggcagcuc

SEQ ID NO: 159487 - RNA, 24 nt, Human
gcaaauccaagcacagaaagacca

SEQ ID NO: 159488 - RNA, 19 nt, Human
gcacagaaagaccaagcgc

SEQ ID NO: 159489 - RNA, 22 nt, Human
gcacagaaagaccaagcgcaga

SEQ ID NO: 159490 - RNA, 19 nt, Human
gcccagcuccucggggacu

SEQ ID NO: 159491 - RNA, 21 nt, Human
gccgcagccagcaggcuuggg

SEQ ID NO: 159492 - RNA, 22 nt, Human
gccgcuggguguggccgggccc

SEQ ID NO: 159493 - RNA, 21 nt, Human
gcggugcgggcggcggagagc

SEQ ID NO: 159494 - RNA, 21 nt, Human
ggacuggcccacgacccccca

SEQ ID NO: 159495 - RNA, 25 nt, Human
ggagagggaggccggggccgcugcc

SEQ ID NO: 159496 - RNA, 20 nt, Human
ggcagcaccccacggguggc

SEQ ID NO: 159497 - RNA, 26 nt, Human
ggcccagcuccucggggacuggggcc

SEQ ID NO: 159498 - RNA, 21 nt, Human
ggcugugcggggggccgcugg

SEQ ID NO: 159499 - RNA, 20 nt, Human
gggcggcggugcgggcggcg

SEQ ID NO: 159500 - RNA, 21 nt, Human
gggcggcggugcgggcggcgg

SEQ ID NO: 159501 - RNA, 18 nt, Human
ggggacuggcccacgacc

SEQ ID NO: 159502 - RNA, 19 nt, Human
ggggugggguggggugggg

SEQ ID NO: 159503 - RNA, 18 nt, Human
gggugggguggggugggg

SEQ ID NO: 159504 - RNA, 18 nt, Human
gggugggguggggugggg

SEQ ID NO: 159505 - RNA, 18 nt, Human
gugcggggggccgcuggg

SEQ ID NO: 159506 - RNA, 24 nt, Human
guggggaugguggagugaccuccg

SEQ ID NO: 159507 - RNA, 27 nt, Human
uaaauuucaaaauccaagcagcaauuu

SEQ ID NO: 159508 - RNA, 22 nt, Human
uaagggcagcaccccacgggug

SEQ ID NO: 159509 - RNA, 21 nt, Human
uagcagccucggggggcagug

SEQ ID NO: 159510 - RNA, 19 nt, Human
ucccguugcauggcggggg

SEQ ID NO: 159511 - RNA, 22 nt, Human
ucuccaagucggcagcucuggu

SEQ ID NO: 159512 - RNA, 18 nt, Human
ucuucacagaccaggagu

SEQ ID NO: 159513 - RNA, 25 nt, Human
ucuugaaaaacaaacacagacaaac

SEQ ID NO: 159514 - RNA, 21 nt, Human
ugaaaaacaaacacagacaaa

SEQ ID NO: 159515 - RNA, 26 nt, Human
ugaaaaacaaacacagacaaacacca

SEQ ID NO: 159516 - RNA, 23 nt, Human
ugaaacgggguccagacguguac

SEQ ID NO: 159517 - RNA, 28 nt, Human
uggccgggcccugugugccccguacucg

SEQ ID NO: 159518 - RNA, 19 nt, Human
uggcggggguggggugggg

SEQ ID NO: 159519 - RNA, 23 nt, Human
uggcugugcggggggccgcuggg

SEQ ID NO: 159520 - RNA, 24 nt, Human
ugggaggcugagagcagcauuuuu

SEQ ID NO: 159521 - RNA, 18 nt, Human
uggugcccggcgccgggc

SEQ ID NO: 159522 - RNA, 22 nt, Human
ugugcaggggcccagcuccucg

SEQ ID NO: 159523 - RNA, 21 nt, Human
uguggccgggcccugugugcc

SEQ ID NO: 159524 - RNA, 19 nt, Human
uugugggaggcugagagca

SEQ ID NO: 159525 - RNA, 20 nt, Human
aaaaaaaagagacaggaaaa

SEQ ID NO: 159526 - RNA, 24 nt, Human
aaaagacguugggaaauggcacag

SEQ ID NO: 159527 - RNA, 20 nt, Human
aaacaaaugcacaaaauauc

SEQ ID NO: 159528 - RNA, 22 nt, Human
aaacaaaugcacaaaauaucuu

SEQ ID NO: 159529 - RNA, 23 nt, Human
aaacagguaugcagaaggucccc

SEQ ID NO: 159530 - RNA, 22 nt, Human
acuacacugaaauguacuaaca

SEQ ID NO: 159531 - RNA, 18 nt, Human
agacagaaugaaacccug

SEQ ID NO: 159532 - RNA, 19 nt, Human
agacagaaugaaacccugg

SEQ ID NO: 159533 - RNA, 18 nt, Human
aguggaaaaagacagaau

SEQ ID NO: 159534 - RNA, 18 nt, Human
auaguaaaaaaaaaaaaa

SEQ ID NO: 159535 - RNA, 19 nt, Human
auggugguuuugguucuaa

SEQ ID NO: 159536 - RNA, 19 nt, Human
auguacagcuagaaaugaa

SEQ ID NO: 159537 - RNA, 22 nt, Human
caaaauaucuuggaaaucuagu

SEQ ID NO: 159538 - RNA, 27 nt, Human
caaagaacagcgcggauuacucacauc

SEQ ID NO: 159539 - RNA, 21 nt, Human
cacuuuggggggaguugagag

SEQ ID NO: 159540 - RNA, 21 nt, Human
cagccaugcccauucggcuca

SEQ ID NO: 159541 - RNA, 18 nt, Human
cagcgcgcccccgagcag

SEQ ID NO: 159542 - RNA, 22 nt, Human
caugcccauucggcucaccaaa

SEQ ID NO: 159543 - RNA, 18 nt, Human
caugcugacaacacagga

SEQ ID NO: 159544 - RNA, 20 nt, Human
ccaaaaaaagcuuggaagca

SEQ ID NO: 159545 - RNA, 19 nt, Human
cccaaaagacguugggaaa

SEQ ID NO: 159546 - RNA, 20 nt, Human
cccaaaagacguugggaaau

SEQ ID NO: 159547 - RNA, 18 nt, Human
cccccgagcagggacggg

SEQ ID NO: 159548 - RNA, 18 nt, Human
ccccgcgcccggccgccc

SEQ ID NO: 159549 - RNA, 26 nt, Human
cccgccgucucagcgcgcccccgagc

SEQ ID NO: 159550 - RNA, 18 nt, Human
cccgcgcccucuccccgc

SEQ ID NO: 159551 - RNA, 20 nt, Human
cccugguuauaguaaaaaaa

SEQ ID NO: 159552 - RNA, 22 nt, Human
ccgaaguggcgacggcgcucuc

SEQ ID NO: 159553 - RNA, 19 nt, Human
ccucuagguucacuaaagu

SEQ ID NO: 159554 - RNA, 21 nt, Human
cgaugacaguaguugggacac

SEQ ID NO: 159555 - RNA, 20 nt, Human
cggauuacucacaucaccuc

SEQ ID NO: 159556 - RNA, 23 nt, Human
cuaaauacagcaacccauguaag

SEQ ID NO: 159557 - RNA, 26 nt, Human
cucacccgccgucucagcgcgccccc

SEQ ID NO: 159558 - RNA, 24 nt, Human
cuccuucauccuauguacagcuag

SEQ ID NO: 159559 - RNA, 18 nt, Human
cugccgcacgagccgcuc

SEQ ID NO: 159560 - RNA, 19 nt, Human
cuuuggggggaguugagag

SEQ ID NO: 159561 - RNA, 22 nt, Human
gaagcacugcugcaaagaacag

SEQ ID NO: 159562 - RNA, 21 nt, Human
gacaguaguugggacacugga

SEQ ID NO: 159563 - RNA, 20 nt, Human
ggaaucgcaaaguuggcccg

SEQ ID NO: 159564 - RNA, 22 nt, Human
gggacgggccugccggggccuc

SEQ ID NO: 159565 - RNA, 22 nt, Human
gguuauaguaaaaaaaaaaaaa

SEQ ID NO: 159566 - RNA, 20 nt, Human
uaaaaaaaaaaaaaucaggg

SEQ ID NO: 159567 - RNA, 23 nt, Human
uaaaucccaaaagacguugggaa

SEQ ID NO: 159568 - RNA, 22 nt, Human
uaacacagacagauguaaaucc

SEQ ID NO: 159569 - RNA, 23 nt, Human
uaacacagacagauguaaauccc

SEQ ID NO: 159570 - RNA, 22 nt, Human
uaagaaagacuggcuaauggua

SEQ ID NO: 159571 - RNA, 22 nt, Human
uacaagaccauugcaucacaaa

SEQ ID NO: 159572 - RNA, 24 nt, Human
uacacugaaauguacuaacaaaau

SEQ ID NO: 159573 - RNA, 23 nt, Human
uacagacacuauaaaaacugugu

SEQ ID NO: 159574 - RNA, 22 nt, Human
uacagcaacccauguaagacau

SEQ ID NO: 159575 - RNA, 21 nt, Human
uauaaaaacugugucauggug

SEQ ID NO: 159576 - RNA, 23 nt, Human
ucacacuucaguggaaaaagaca

SEQ ID NO: 159577 - RNA, 19 nt, Human
ucaguggaaaaagacagaa

SEQ ID NO: 159578 - RNA, 20 nt, Human
ucaguggaaaaagacagaaa

SEQ ID NO: 159579 - RNA, 18 nt, Human
uccccgcgcccggccgcc

SEQ ID NO: 159580 - RNA, 21 nt, Human
uccccgcgcccggccgcccag

SEQ ID NO: 159581 - RNA, 22 nt, Human
ucccgcgcccucuccccgcgcc

SEQ ID NO: 159582 - RNA, 24 nt, Human
ucuaaauacagcaacccauguaag

SEQ ID NO: 159583 - RNA, 21 nt, Human
ugaaacaaaugcacaaaauau

SEQ ID NO: 159584 - RNA, 25 nt, Human
ugacaguaguugggacacuggaaau

SEQ ID NO: 159585 - RNA, 24 nt, Human
uggaaaaagacagaaugaaacccu

SEQ ID NO: 159586 - RNA, 19 nt, Human
uggaagcacugcugcaaag

SEQ ID NO: 159587 - RNA, 21 nt, Human
uggaagcacugcugcaaagaa

SEQ ID NO: 159588 - RNA, 23 nt, Human
uggaagcacugcugcaaagaaca

SEQ ID NO: 159589 - RNA, 19 nt, Human
uggcccgaaguggcgacgg

SEQ ID NO: 159590 - RNA, 19 nt, Human
uggcgacggcgcucucgug

SEQ ID NO: 159591 - RNA, 22 nt, Human
uuaaaacuaugaaaaaucaaau

SEQ ID NO: 159592 - RNA, 22 nt, Human
uuauaguaaaaaaaaaaaaauc

SEQ ID NO: 159593 - RNA, 24 nt, Human
uugguucuaaacagguaugcagaa

SEQ ID NO: 159594 - RNA, 25 nt, Human
uuuacaaaaaaaagagacaggaaaa

SEQ ID NO: 159595 - RNA, 21 nt, Human
aaccugccugccuccaaaaug

SEQ ID NO: 159596 - RNA, 18 nt, Human
aaggcuccacugcucuuc

SEQ ID NO: 159597 - RNA, 20 nt, Human
acaacacauaugaaaaggca

SEQ ID NO: 159598 - RNA, 23 nt, Human
acacagccacaaaccacucacac

SEQ ID NO: 159599 - RNA, 18 nt, Human
accugccugccuccaaaa

SEQ ID NO: 159600 - RNA, 19 nt, Human
accugccugccuccaaaau

SEQ ID NO: 159601 - RNA, 23 nt, Human
acgcagcccucuagagcuccucu

SEQ ID NO: 159602 - RNA, 26 nt, Human
acuuuauuguuaaaaaaaaaaaugac

SEQ ID NO: 159603 - RNA, 22 nt, Human
agacaggaagaaauaagccaag

SEQ ID NO: 159604 - RNA, 26 nt, Human
agacaggaagaaauaagccaagucca

SEQ ID NO: 159605 - RNA, 20 nt, Human
agcagcccugugggcaaggc

SEQ ID NO: 159606 - RNA, 27 nt, Human
agcgggaccucuggggcccgaggccug

SEQ ID NO: 159607 - RNA, 20 nt, Human
aggcaggggcagaggggacu

SEQ ID NO: 159608 - RNA, 21 nt, Human
aggcccugacuggcagccagu

SEQ ID NO: 159609 - RNA, 19 nt, Human
aggguugagucgcugcagg

SEQ ID NO: 159610 - RNA, 24 nt, Human
aggucaccaaaggccacagaggcu

SEQ ID NO: 159611 - RNA, 24 nt, Human
aucaccauuuucuccccggugcaa

SEQ ID NO: 159612 - RNA, 21 nt, Human
caacacauaugaaaaggcagu

SEQ ID NO: 159613 - RNA, 25 nt, Human
cacaaaccacucacacaaauuggcu

SEQ ID NO: 159614 - RNA, 22 nt, Human
cacacacacagccacaaaccac

SEQ ID NO: 159615 - RNA, 18 nt, Human
cacacacagccacaaacc

SEQ ID NO: 159616 - RNA, 24 nt, Human
cacagccacaaaccacucacacaa

SEQ ID NO: 159617 - RNA, 19 nt, Human
cacagugccugacguggag

SEQ ID NO: 159618 - RNA, 26 nt, Human
cacucaacucacccccuacgagacag

SEQ ID NO: 159619 - RNA, 24 nt, Human
cacugcgguccagcucccugcuuc

SEQ ID NO: 159620 - RNA, 21 nt, Human
caggagucaauuguuccuggu

SEQ ID NO: 159621 - RNA, 21 nt, Human
caggcuuugccccggggacug

SEQ ID NO: 159622 - RNA, 21 nt, Human
caguggaccagagggagggac

SEQ ID NO: 159623 - RNA, 20 nt, Human
caugggcacccacaugugua

SEQ ID NO: 159624 - RNA, 18 nt, Human
cauguguagacaugugcc

SEQ ID NO: 159625 - RNA, 25 nt, Human
ccaaccggcccuaaauaggaguuca

SEQ ID NO: 159626 - RNA, 21 nt, Human
ccacaaaccacucacacaaau

SEQ ID NO: 159627 - RNA, 22 nt, Human
ccacauugacccuccaugcaua

SEQ ID NO: 159628 - RNA, 21 nt, Human
ccagccacacucaacucaccc

SEQ ID NO: 159629 - RNA, 23 nt, Human
cccccuacgagacaggaagaaau

SEQ ID NO: 159630 - RNA, 22 nt, Human
cccgccugccuugcucugggaa

SEQ ID NO: 159631 - RNA, 20 nt, Human
cccuccaucaccauuuucuc

SEQ ID NO: 159632 - RNA, 24 nt, Human
ccuccaucaccauuuucuccccgg

SEQ ID NO: 159633 - RNA, 18 nt, Human
cgagacaggaagaaauaa

SEQ ID NO: 159634 - RNA, 22 nt, Human
cgagacaggaagaaauaagcca

SEQ ID NO: 159635 - RNA, 27 nt, Human
cgagacaggaagaaauaagccaagucc

SEQ ID NO: 159636 - RNA, 23 nt, Human
cggcagaucagggagcccuccuc

SEQ ID NO: 159637 - RNA, 25 nt, Human
cuacauacacucuacacauguguac

SEQ ID NO: 159638 - RNA, 18 nt, Human
cucacagucacacacaca

SEQ ID NO: 159639 - RNA, 27 nt, Human
cucacagucacacacacagccacaaac

SEQ ID NO: 159640 - RNA, 20 nt, Human
cuccacugcucuuccuuuug

SEQ ID NO: 159641 - RNA, 28 nt, Human
cuccaucaccauuuucuccccggugcaa

SEQ ID NO: 159642 - RNA, 23 nt, Human
cucccagccacacucaacucacc

SEQ ID NO: 159643 - RNA, 19 nt, Human
cucggaguccuuguugccc

SEQ ID NO: 159644 - RNA, 26 nt, Human
cucucccagccacacucaacucaccc

SEQ ID NO: 159645 - RNA, 20 nt, Human
cucuguacggcccgcguagu

SEQ ID NO: 159646 - RNA, 21 nt, Human
cugcaguggagaggaggcaau

SEQ ID NO: 159647 - RNA, 22 nt, Human
cugguggugcuccucggagucc

SEQ ID NO: 159648 - RNA, 18 nt, Human
cuugacaaagacacagug

SEQ ID NO: 159649 - RNA, 18 nt, Human
gacaacagccugggcuga

SEQ ID NO: 159650 - RNA, 18 nt, Human
gaguccuuguugcccucc

SEQ ID NO: 159651 - RNA, 21 nt, Human
gcaccaaccugccugccucca

SEQ ID NO: 159652 - RNA, 22 nt, Human
gcagccaguggugugacucuga

SEQ ID NO: 159653 - RNA, 21 nt, Human
gcaguggagaggaggcaaugg

SEQ ID NO: 159654 - RNA, 21 nt, Human
ggacacugcgguccagcuccc

SEQ ID NO: 159655 - RNA, 21 nt, Human
ggacugggugggagggagugg

SEQ ID NO: 159656 - RNA, 26 nt, Human
ggagggacugggugggagggaguggg

SEQ ID NO: 159657 - RNA, 19 nt, Human
ggcaaggcuccacugcucu

SEQ ID NO: 159658 - RNA, 21 nt, Human
ggcagguguccagccuggaca

SEQ ID NO: 159659 - RNA, 23 nt, Human
gggugggagggaguggugagguc

SEQ ID NO: 159660 - RNA, 18 nt, Human
gucaggcaccaaccugcc

SEQ ID NO: 159661 - RNA, 18 nt, Human
gugggcccguuccucugc

SEQ ID NO: 159662 - RNA, 20 nt, Human
guguaggcugaggagcggga

SEQ ID NO: 159663 - RNA, 20 nt, Human
guugcccuccaucaccauuu

SEQ ID NO: 159664 - RNA, 24 nt, Human
uacgagacaggaagaaauaagcca

SEQ ID NO: 159665 - RNA, 20 nt, Human
uacuugaugggcaggcgucu

SEQ ID NO: 159666 - RNA, 20 nt, Human
uaggaguucagacuuccuug

SEQ ID NO: 159667 - RNA, 24 nt, Human
ucaaaaagugccuaagaauuuuua

SEQ ID NO: 159668 - RNA, 19 nt, Human
uccagggucacugcucuag

SEQ ID NO: 159669 - RNA, 18 nt, Human
uccaugaggucugaauuc

SEQ ID NO: 159670 - RNA, 24 nt, Human
uccaugggcacccacauguguaga

SEQ ID NO: 159671 - RNA, 21 nt, Human
ucccagccacacucaacucac

SEQ ID NO: 159672 - RNA, 18 nt, Human
uccucagcuucccuccac

SEQ ID NO: 159673 - RNA, 22 nt, Human
uccuuuggccaaaagugccugg

SEQ ID NO: 159674 - RNA, 22 nt, Human
ucuagaaaugccccucuccugg

SEQ ID NO: 159675 - RNA, 21 nt, Human
ucucccagccacacucaacuc

SEQ ID NO: 159676 - RNA, 23 nt, Human
ucugaggugggcccguuccucug

SEQ ID NO: 159677 - RNA, 22 nt, Human
ugaagaauuaguuccuuccuuc

SEQ ID NO: 159678 - RNA, 21 nt, Human
ugaggcaggggcagaggggac

SEQ ID NO: 159679 - RNA, 23 nt, Human
ugccugggaaacuugggaugaag

SEQ ID NO: 159680 - RNA, 27 nt, Human
ugcucuuccuuuugacuucugucucca

SEQ ID NO: 159681 - RNA, 20 nt, Human
ugcuuccaaccggcccuaaa

SEQ ID NO: 159682 - RNA, 24 nt, Human
uggaagagcacauuucaagggaca

SEQ ID NO: 159683 - RNA, 20 nt, Human
uggagaggaggcaauggcag

SEQ ID NO: 159684 - RNA, 23 nt, Human
uggagcagacacuugacaaagac

SEQ ID NO: 159685 - RNA, 19 nt, Human
uggcaggcccugacuggca

SEQ ID NO: 159686 - RNA, 23 nt, Human
uggcaggcccugacuggcagcca

SEQ ID NO: 159687 - RNA, 20 nt, Human
uggcagguguccagccugga

SEQ ID NO: 159688 - RNA, 19 nt, Human
ugggaugaagaacccagag

SEQ ID NO: 159689 - RNA, 23 nt, Human
ugguccccaccacuccuggcuac

SEQ ID NO: 159690 - RNA, 18 nt, Human
ugguuuuccagggucacu

SEQ ID NO: 159691 - RNA, 20 nt, Human
uguagacuccuggcaggccc

SEQ ID NO: 159692 - RNA, 22 nt, Human
ugugcccgcuccccugcugcuc

SEQ ID NO: 159693 - RNA, 23 nt, Human
uguguacacacguacuauccaug

SEQ ID NO: 159694 - RNA, 21 nt, Human
uucagagcuguguagacuccu

SEQ ID NO: 159695 - RNA, 26 nt, Human
uuccagggucacugcucuagaaaugc

SEQ ID NO: 159696 - RNA, 19 nt, Human
uuuaacaaagaagguucag

SEQ ID NO: 159697 - RNA, 19 nt, Human
uuucaagggacaacagccu

SEQ ID NO: 159698 - RNA, 21 nt, Human
aaguggcuuuuuuauuagaga

SEQ ID NO: 159699 - RNA, 23 nt, Human
aaguggcuuuuuuauuagagaag

SEQ ID NO: 159700 - RNA, 19 nt, Human
agaaagaggaagaagcgag

SEQ ID NO: 159701 - RNA, 19 nt, Human
agaggaagaagcgagggcg

SEQ ID NO: 159702 - RNA, 21 nt, Human
ccgcgaagauggagucgagaa

SEQ ID NO: 159703 - RNA, 19 nt, Human
gaagauggagucgagaaag

SEQ ID NO: 159704 - RNA, 18 nt, Human
uuuuuuuuuuuuuuuuug

SEQ ID NO: 159705 - RNA, 19 nt, Human
aaacaccgaaaauacaucg

SEQ ID NO: 159706 - RNA, 22 nt, Human
aaagagccuggcuaguggggac

SEQ ID NO: 159707 - RNA, 23 nt, Human
acaacacaaugggguaaaugcuc

SEQ ID NO: 159708 - RNA, 26 nt, Human
acagcucaaagggugggcagaggcca

SEQ ID NO: 159709 - RNA, 25 nt, Human
acaugcuaaagccacaagaaggcaa

SEQ ID NO: 159710 - RNA, 19 nt, Human
accacagucacuggcagca

SEQ ID NO: 159711 - RNA, 19 nt, Human
agacacaaucccugcccuc

SEQ ID NO: 159712 - RNA, 21 nt, Human
agacaguggcaagggccgugg

SEQ ID NO: 159713 - RNA, 21 nt, Human
aggagaauggcagucugcagg

SEQ ID NO: 159714 - RNA, 19 nt, Human
aggcuccugggcugcaucu

SEQ ID NO: 159715 - RNA, 22 nt, Human
augagcaagguuuucaaccaaa

SEQ ID NO: 159716 - RNA, 19 nt, Human
cacaacacaaugggguaaa

SEQ ID NO: 159717 - RNA, 21 nt, Human
cagacacaaucccugcccuca

SEQ ID NO: 159718 - RNA, 21 nt, Human
cagcauggcacaugcuaaagc

SEQ ID NO: 159719 - RNA, 22 nt, Human
cagccacaacacaaugggguaa

SEQ ID NO: 159720 - RNA, 18 nt, Human
ccguggggaaaagggcuc

SEQ ID NO: 159721 - RNA, 24 nt, Human
ccuaacauuaaaaaagucugaggg

SEQ ID NO: 159722 - RNA, 19 nt, Human
ccucaaagagccuggcuag

SEQ ID NO: 159723 - RNA, 23 nt, Human
ccucccaugccauuccaaggagg

SEQ ID NO: 159724 - RNA, 19 nt, Human
cucaaagggugggcagagg

SEQ ID NO: 159725 - RNA, 22 nt, Human
cucaggcuaacugcacugagga

SEQ ID NO: 159726 - RNA, 21 nt, Human
cugcucagcgcaaggugugga

SEQ ID NO: 159727 - RNA, 22 nt, Human
cuggcagcaaugauuuggccuu

SEQ ID NO: 159728 - RNA, 21 nt, Human
cuggcucagcuugauacaugu

SEQ ID NO: 159729 - RNA, 24 nt, Human
cugggcucauuuuuuaaacaccga

SEQ ID NO: 159730 - RNA, 19 nt, Human
gaaaagacaaccauggaag

SEQ ID NO: 159731 - RNA, 23 nt, Human
gaggcaccuggggccaggggagc

SEQ ID NO: 159732 - RNA, 20 nt, Human
gaggcuggugcaaaccuggc

SEQ ID NO: 159733 - RNA, 22 nt, Human
gcacaugcuaaagccacaagaa

SEQ ID NO: 159734 - RNA, 18 nt, Human
gcagucugcagggggaca

SEQ ID NO: 159735 - RNA, 25 nt, Human
gcuucaucugcugggaaaagacaac

SEQ ID NO: 159736 - RNA, 18 nt, Human
gggaaaagacaaccaugg

SEQ ID NO: 159737 - RNA, 21 nt, Human
gggagacucgaggcuggugca

SEQ ID NO: 159738 - RNA, 20 nt, Human
ggggccaggggagcucaggc

SEQ ID NO: 159739 - RNA, 21 nt, Human
ggguauaaacaaguacagacc

SEQ ID NO: 159740 - RNA, 23 nt, Human
uaaaaaaugagcaagguuuucaa

SEQ ID NO: 159741 - RNA, 18 nt, Human
uaaacaaguacagaccac

SEQ ID NO: 159742 - RNA, 26 nt, Human
uaaccagacacaaucccugcccucaa

SEQ ID NO: 159743 - RNA, 25 nt, Human
ucacuggcagcaaugauuuggccug

SEQ ID NO: 159744 - RNA, 19 nt, Human
ucagagaggcuccugggcu

SEQ ID NO: 159745 - RNA, 18 nt, Human
ucaggccaggccucccau

SEQ ID NO: 159746 - RNA, 21 nt, Human
ucugauggaggcaccuggggc

SEQ ID NO: 159747 - RNA, 24 nt, Human
ugagcugggguggggcagguacag

SEQ ID NO: 159748 - RNA, 19 nt, Human
ugauggaggcaccuggggc

SEQ ID NO: 159749 - RNA, 19 nt, Human
ugcugggaaaagacaacca

SEQ ID NO: 159750 - RNA, 19 nt, Human
uggcacaaucacagcugcu

SEQ ID NO: 159751 - RNA, 21 nt, Human
uggcacaaucacagcugcuca

SEQ ID NO: 159752 - RNA, 19 nt, Human
uggcacaugcuaaagccac

SEQ ID NO: 159753 - RNA, 19 nt, Human
uggcagcaaugauuuggcc

SEQ ID NO: 159754 - RNA, 23 nt, Human
uggcagcaaugauuuggccugga

SEQ ID NO: 159755 - RNA, 18 nt, Human
ugggaaaagacaaccaug

SEQ ID NO: 159756 - RNA, 19 nt, Human
ugggaaaagacaaccaugg

SEQ ID NO: 159757 - RNA, 21 nt, Human
ugggcagaggccagaucaggc

SEQ ID NO: 159758 - RNA, 21 nt, Human
ugggguggggcagguacagcu

SEQ ID NO: 159759 - RNA, 22 nt, Human
ugggguggggcagguacagcuc

SEQ ID NO: 159760 - RNA, 19 nt, Human
uucagggaagggcaagccu

SEQ ID NO: 159761 - RNA, 20 nt, Human
uucaucuggcucagcuugau

SEQ ID NO: 159762 - RNA, 20 nt, Human
uuuacugagcuccuucuuca

SEQ ID NO: 159763 - RNA, 20 nt, Human
acauguacuacuuuauaguu

SEQ ID NO: 159764 - RNA, 29 nt, Human
acccgcagguggcccgugcuggcaccacg

SEQ ID NO: 159765 - RNA, 22 nt, Human
acguuuggggacgggucaucca

SEQ ID NO: 159766 - RNA, 23 nt, Human
caagcuuccacuuggugccuaca

SEQ ID NO: 159767 - RNA, 18 nt, Human
cacccagccucacccaca

SEQ ID NO: 159768 - RNA, 22 nt, Human
cacccagccucacccacagggc

SEQ ID NO: 159769 - RNA, 24 nt, Human
cacccagccucacccacagggcac

SEQ ID NO: 159770 - RNA, 19 nt, Human
cagcccaggacgguccccu

SEQ ID NO: 159771 - RNA, 18 nt, Human
caggacgguccccucucc

SEQ ID NO: 159772 - RNA, 25 nt, Human
ccacaauagugacccagucccuccc

SEQ ID NO: 159773 - RNA, 20 nt, Human
ccagaggaguccaagagccc

SEQ ID NO: 159774 - RNA, 21 nt, Human
cccgcagguggcccgugcugg

SEQ ID NO: 159775 - RNA, 21 nt, Human
ccucaggucaucacccagccu

SEQ ID NO: 159776 - RNA, 24 nt, Human
ccuccugcggggcagaggaggggu

SEQ ID NO: 159777 - RNA, 22 nt, Human
ccugcggggcagaggagggguc

SEQ ID NO: 159778 - RNA, 22 nt, Human
ccuguaagacccgcggggcacu

SEQ ID NO: 159779 - RNA, 22 nt, Human
cgcaccaccugccguggaacuu

SEQ ID NO: 159780 - RNA, 19 nt, Human
cgccacggccguggcccac

SEQ ID NO: 159781 - RNA, 20 nt, Human
cuggcugcgccacacccgca

SEQ ID NO: 159782 - RNA, 22 nt, Human
gcagugugagcccuggcugcgc

SEQ ID NO: 159783 - RNA, 23 nt, Human
gccagcccaggacgguccccucu

SEQ ID NO: 159784 - RNA, 18 nt, Human
gcgccacacccgcaggug

SEQ ID NO: 159785 - RNA, 24 nt, Human
gcggggcagaggagggguccagaa

SEQ ID NO: 159786 - RNA, 22 nt, Human
gggcagaggagggguccggggg

SEQ ID NO: 159787 - RNA, 20 nt, Human
gguccagaagccacaggagu

SEQ ID NO: 159788 - RNA, 19 nt, Human
guccagaagccacaggagu

SEQ ID NO: 159789 - RNA, 18 nt, Human
gugucucugguccucagg

SEQ ID NO: 159790 - RNA, 21 nt, Human
ucaacguuuggggacggguca

SEQ ID NO: 159791 - RNA, 23 nt, Human
uccaagagccccaacauggucgc

SEQ ID NO: 159792 - RNA, 20 nt, Human
uccucaggucaucacccagc

SEQ ID NO: 159793 - RNA, 22 nt, Human
ucuccuguaagacccgcggggc

SEQ ID NO: 159794 - RNA, 20 nt, Human
ugcaagcuuccacuuggugc

SEQ ID NO: 159795 - RNA, 25 nt, Human
ugccguggaacuuccuccugcgggg

SEQ ID NO: 159796 - RNA, 21 nt, Human
uuaaaaaagaaaagaaguuaa

SEQ ID NO: 159797 - RNA, 25 nt, Human
uuuuauauaauguacauguacuacu

SEQ ID NO: 159798 - RNA, 20 nt, Human
uuuuuuuuuuuaaagggacc

SEQ ID NO: 159799 - RNA, 20 nt, Human
aaaaagcaaacuagcuacuc

SEQ ID NO: 159800 - RNA, 24 nt, Human
aaaauacucaaaaugaacaagaca

SEQ ID NO: 159801 - RNA, 24 nt, Human
aacacugggcuaaaauggagagga

SEQ ID NO: 159802 - RNA, 23 nt, Human
aagcucgcgggcgggacccccgg

SEQ ID NO: 159803 - RNA, 23 nt, Human
acugaaggccuugaaaauucacc

SEQ ID NO: 159804 - RNA, 18 nt, Human
agcgucggaggcuccagc

SEQ ID NO: 159805 - RNA, 20 nt, Human
agcuacucccaggguucccc

SEQ ID NO: 159806 - RNA, 24 nt, Human
aggagacuggguuugggaagacag

SEQ ID NO: 159807 - RNA, 21 nt, Human
aguaacacagugagagaagga

SEQ ID NO: 159808 - RNA, 24 nt, Human
aguaacacagugagagaaggagug

SEQ ID NO: 159809 - RNA, 19 nt, Human
agucaggaagucggggcug

SEQ ID NO: 159810 - RNA, 22 nt, Human
cacagugagagaaggaguggaa

SEQ ID NO: 159811 - RNA, 20 nt, Human
caccaacaaucuucuaucag

SEQ ID NO: 159812 - RNA, 25 nt, Human
cacugggcuaaaauggagaggagac

SEQ ID NO: 159813 - RNA, 21 nt, Human
caggguuccccgccagcuccc

SEQ ID NO: 159814 - RNA, 18 nt, Human
cagugcucggcgcuggga

SEQ ID NO: 159815 - RNA, 22 nt, Human
ccaauuggguaaaaauucuaaa

SEQ ID NO: 159816 - RNA, 24 nt, Human
ccaggguuccccgccagcucccgg

SEQ ID NO: 159817 - RNA, 23 nt, Human
cccccggaggagcucgggcacgu

SEQ ID NO: 159818 - RNA, 23 nt, Human
cccgccagcucccgggucuuugc

SEQ ID NO: 159819 - RNA, 18 nt, Human
cccuucgauccugcugug

SEQ ID NO: 159820 - RNA, 22 nt, Human
ccgcgcucggcugcgagcgccc

SEQ ID NO: 159821 - RNA, 19 nt, Human
ccgggucuuugcaaagcag

SEQ ID NO: 159822 - RNA, 18 nt, Human
ccucucuucuccuguccc

SEQ ID NO: 159823 - RNA, 21 nt, Human
cucaaaaugaacaagacagaa

SEQ ID NO: 159824 - RNA, 18 nt, Human
cuccugucccuuggugcc

SEQ ID NO: 159825 - RNA, 25 nt, Human
cucggcgcugggaggagagcccuuc

SEQ ID NO: 159826 - RNA, 19 nt, Human
cucugggcccucggggcuc

SEQ ID NO: 159827 - RNA, 20 nt, Human
cuuagcccucuucaguaauc

SEQ ID NO: 159828 - RNA, 20 nt, Human
cuucauuuucuaaguauguu

SEQ ID NO: 159829 - RNA, 20 nt, Human
gaacauagacucagaccccc

SEQ ID NO: 159830 - RNA, 20 nt, Human
gccuugaaaauucaccaaca

SEQ ID NO: 159831 - RNA, 19 nt, Human
gcgaggaggagaugcgaag

SEQ ID NO: 159832 - RNA, 19 nt, Human
gcgcaagcaccugguuuug

SEQ ID NO: 159833 - RNA, 22 nt, Human
gcgucugccagggcccagugcu

SEQ ID NO: 159834 - RNA, 21 nt, Human
gcuaaaauggagaggagacug

SEQ ID NO: 159835 - RNA, 26 nt, Human
ggagaccucugcauuccaauccaauu

SEQ ID NO: 159836 - RNA, 20 nt, Human
gggcgggacccccggaggag

SEQ ID NO: 159837 - RNA, 21 nt, Human
uaaaaauacucaaaaugaaca

SEQ ID NO: 159838 - RNA, 18 nt, Human
uagcaugugucugaaggc

SEQ ID NO: 159839 - RNA, 19 nt, Human
ucagauuacagcgcucacc

SEQ ID NO: 159840 - RNA, 19 nt, Human
uccccgccagcucccgggu

SEQ ID NO: 159841 - RNA, 21 nt, Human
ucucuaaaaacccuucgaucc

SEQ ID NO: 159842 - RNA, 20 nt, Human
ucuguuauuuccucucuucu

SEQ ID NO: 159843 - RNA, 21 nt, Human
ucuucggggaaacguucagca

SEQ ID NO: 159844 - RNA, 23 nt, Human
ugaacaagacagaauuaaaccgu

SEQ ID NO: 159845 - RNA, 18 nt, Human
ugaacauagacucagacc

SEQ ID NO: 159846 - RNA, 23 nt, Human
ugaagaagugacagcaagcuguu

SEQ ID NO: 159847 - RNA, 20 nt, Human
ugccagggcccagugcucgg

SEQ ID NO: 159848 - RNA, 20 nt, Human
uggaagaggugaagaaguga

SEQ ID NO: 159849 - RNA, 20 nt, Human
ugggaagacagaacauagca

SEQ ID NO: 159850 - RNA, 21 nt, Human
ugggcccucggggcucgcggg

SEQ ID NO: 159851 - RNA, 19 nt, Human
ugguugaaaauaccaggca

SEQ ID NO: 159852 - RNA, 18 nt, Human
ugucauaggaacuggggg

SEQ ID NO: 159853 - RNA, 21 nt, Human
uguuaaacaaugcaaaugggg

SEQ ID NO: 159854 - RNA, 24 nt, Human
uguuuacauagccuucucugugua

SEQ ID NO: 159855 - RNA, 24 nt, Human
uucaccaacaaucuucuaucaggg

SEQ ID NO: 159856 - RNA, 25 nt, Human
uucaccaacaaucuucuaucagggg

SEQ ID NO: 159857 - RNA, 20 nt, Human
uuuaugguugaaaauaccag

SEQ ID NO: 159858 - RNA, 21 nt, Human
uuuccucucuucuccuguccc

SEQ ID NO: 159859 - RNA, 20 nt, Human
uuuuuuuuuuuuuuuucucu

SEQ ID NO: 159860 - RNA, 24 nt, Human
aaauuaaugaaguauuggaacuga

SEQ ID NO: 159861 - RNA, 18 nt, Human
aagugguuguuuugaacu

SEQ ID NO: 159862 - RNA, 18 nt, Human
agggcauuauuauucuag

SEQ ID NO: 159863 - RNA, 25 nt, Human
aguauacacacacuuaauuuacaug

SEQ ID NO: 159864 - RNA, 23 nt, Human
caaacccucacauuaagggcauu

SEQ ID NO: 159865 - RNA, 23 nt, Human
caagucuuuggucuuaauaagca

SEQ ID NO: 159866 - RNA, 23 nt, Human
cagcauaaauggccaacccccaa

SEQ ID NO: 159867 - RNA, 28 nt, Human
caguauacacacacuuaauuuacaugua

SEQ ID NO: 159868 - RNA, 23 nt, Human
cauucccguacguuugcuggaag

SEQ ID NO: 159869 - RNA, 28 nt, Human
ccccuuguugacaggaaugaccgagggu

SEQ ID NO: 159870 - RNA, 23 nt, Human
cccgccgccucuugccgcgcccg

SEQ ID NO: 159871 - RNA, 21 nt, Human
ccgccgccucuugccgcgccc

SEQ ID NO: 159872 - RNA, 19 nt, Human
ccgcugcgcccugaagcgc

SEQ ID NO: 159873 - RNA, 23 nt, Human
cgcccggggcucggucugcggcc

SEQ ID NO: 159874 - RNA, 18 nt, Human
cgccggggucccgcuauc

SEQ ID NO: 159875 - RNA, 19 nt, Human
cggggcucggucugcggcc

SEQ ID NO: 159876 - RNA, 20 nt, Human
cuaggguagucaccuguacc

SEQ ID NO: 159877 - RNA, 20 nt, Human
cugaagcgcaccgcgccgcc

SEQ ID NO: 159878 - RNA, 21 nt, Human
cugcggccgccgcugcgcccu

SEQ ID NO: 159879 - RNA, 21 nt, Human
cuggccacugaggcuguuucc

SEQ ID NO: 159880 - RNA, 22 nt, Human
cuggugauccucuggccacuga

SEQ ID NO: 159881 - RNA, 21 nt, Human
gcgcccggggcucggucugcg

SEQ ID NO: 159882 - RNA, 23 nt, Human
gcugugaugaaggaugcacuggu

SEQ ID NO: 159883 - RNA, 21 nt, Human
ggcucggucugcggccgccgc

SEQ ID NO: 159884 - RNA, 28 nt, Human
uaaauggacaaccuaguacuguaaugac

SEQ ID NO: 159885 - RNA, 21 nt, Human
uaacugagauaagcuacugaa

SEQ ID NO: 159886 - RNA, 22 nt, Human
uacacacaugagaagccugaga

SEQ ID NO: 159887 - RNA, 19 nt, Human
uacauuuaacaagucuuug

SEQ ID NO: 159888 - RNA, 19 nt, Human
uacugaacuaacuuugguu

SEQ ID NO: 159889 - RNA, 23 nt, Human
uagcacgauuacaguauacacac

SEQ ID NO: 159890 - RNA, 18 nt, Human
uaugaugauucugauugg

SEQ ID NO: 159891 - RNA, 25 nt, Human
ucuuuggucuuaauaagcaccauuu

SEQ ID NO: 159892 - RNA, 18 nt, Human
ugaaagcacauucccgua

SEQ ID NO: 159893 - RNA, 19 nt, Human
ugaagcgcaccgcgccgcc

SEQ ID NO: 159894 - RNA, 20 nt, Human
ugaagcgcaccgcgccgccu

SEQ ID NO: 159895 - RNA, 24 nt, Human
ugagaagccugagaaagugguugu

SEQ ID NO: 159896 - RNA, 20 nt, Human
ugauaugaugauucugauug

SEQ ID NO: 159897 - RNA, 23 nt, Human
ugauaugaugauucugauugggg

SEQ ID NO: 159898 - RNA, 23 nt, Human
uggccaacccccaauggaaauac

SEQ ID NO: 159899 - RNA, 20 nt, Human
uguacauauuacagugcauu

SEQ ID NO: 159900 - RNA, 20 nt, Human
uguauacauuuaacaagucu

SEQ ID NO: 159901 - RNA, 18 nt, Human
uuaauuauuuggucucug

SEQ ID NO: 159902 - RNA, 24 nt, Human
uucuaaguuguguacauauuacag

SEQ ID NO: 159903 - RNA, 21 nt, Human
uucuaguuuauaaauguuuca

SEQ ID NO: 159904 - RNA, 21 nt, Human
uugcaaaaaauagaguagucc

SEQ ID NO: 159905 - RNA, 23 nt, Human
aaaaaaaaauggguuuaaaacaa

SEQ ID NO: 159906 - RNA, 18 nt, Human
aagacagcacgaaacacc

SEQ ID NO: 159907 - RNA, 23 nt, Human
aauccugaaauaacuugaacaua

SEQ ID NO: 159908 - RNA, 26 nt, Human
aauggguuuaaaacaacaacaacaac

SEQ ID NO: 159909 - RNA, 19 nt, Human
acagcacgaaacaccacag

SEQ ID NO: 159910 - RNA, 22 nt, Human
acaguauuaaugaaaauucuaa

SEQ ID NO: 159911 - RNA, 18 nt, Human
accaggagccugcaugug

SEQ ID NO: 159912 - RNA, 21 nt, Human
acgaaacaccacagaaugcca

SEQ ID NO: 159913 - RNA, 28 nt, Human
agcaaaauacccaaaguguuacagacug

SEQ ID NO: 159914 - RNA, 31 nt, Human
aggcauaugguguauaacuacaguauuaauu

SEQ ID NO: 159915 - RNA, 22 nt, Human
auacaguacgguuuggccugca

SEQ ID NO: 159916 - RNA, 19 nt, Human
caaaucuuuggccauacca

SEQ ID NO: 159917 - RNA, 24 nt, Human
caaaucuuuggccauaccagaguc

SEQ ID NO: 159918 - RNA, 23 nt, Human
caccucuaaaaaaaauagcucaa

SEQ ID NO: 159919 - RNA, 22 nt, Human
cagcacgaaacaccacagaaug

SEQ ID NO: 159920 - RNA, 22 nt, Human
cagcgcacccuggguaagaauu

SEQ ID NO: 159921 - RNA, 22 nt, Human
cauaccagagucuaaauuaucc

SEQ ID NO: 159922 - RNA, 24 nt, Human
ccaaaguguuacagacugcuaaca

SEQ ID NO: 159923 - RNA, 19 nt, Human
ccagagucuaaauuauccc

SEQ ID NO: 159924 - RNA, 18 nt, Human
ccucuuuaaaauuagucc

SEQ ID NO: 159925 - RNA, 19 nt, Human
cgaaacaccacagaaugcc

SEQ ID NO: 159926 - RNA, 23 nt, Human
cuaagacagggaggaaagaaaca

SEQ ID NO: 159927 - RNA, 27 nt, Human
cugcccgauucagcucuguguggcuuu

SEQ ID NO: 159928 - RNA, 20 nt, Human
gaaacaccacagaaugccag

SEQ ID NO: 159929 - RNA, 25 nt, Human
gcaauccugaaauaacuugaacaua

SEQ ID NO: 159930 - RNA, 22 nt, Human
gcaccucuaaaaaaaauagcuc

SEQ ID NO: 159931 - RNA, 20 nt, Human
gcucuuaauagcacauccug

SEQ ID NO: 159932 - RNA, 18 nt, Human
ggccauaccagagucuaa

SEQ ID NO: 159933 - RNA, 30 nt, Human
gucacaaaugagcugcuuuggcuucgaucu

SEQ ID NO: 159934 - RNA, 18 nt, Human
guuucuuuuaauauauuu

SEQ ID NO: 159935 - RNA, 21 nt, Human
uaaaacaacaacaacaacaua

SEQ ID NO: 159936 - RNA, 21 nt, Human
uaacaggaaaaaaaaaaaaaa

SEQ ID NO: 159937 - RNA, 19 nt, Human
uaagacagcacgaaacacc

SEQ ID NO: 159938 - RNA, 25 nt, Human
uagcaacuauagcaaaauacccaaa

SEQ ID NO: 159939 - RNA, 18 nt, Human
uaugagaaggaaauacag

SEQ ID NO: 159940 - RNA, 19 nt, Human
ucagcucuguguggcuuuc

SEQ ID NO: 159941 - RNA, 19 nt, Human
uccauauauuacugcauua

SEQ ID NO: 159942 - RNA, 21 nt, Human
ucuuuuuaaaugacuaaagca

SEQ ID NO: 159943 - RNA, 21 nt, Human
ugaaauaacuugaacauaaua

SEQ ID NO: 159944 - RNA, 18 nt, Human
ugaaauguugucacaaau

SEQ ID NO: 159945 - RNA, 21 nt, Human
ugacuaaagcaaacuaaacau

SEQ ID NO: 159946 - RNA, 23 nt, Human
ugacuggcagaaaaccaaaggaa

SEQ ID NO: 159947 - RNA, 18 nt, Human
ugagaaggaaauacagua

SEQ ID NO: 159948 - RNA, 21 nt, Human
ugagaaggaaauacaguacgg

SEQ ID NO: 159949 - RNA, 22 nt, Human
ugauaugaaauguugucacaaa

SEQ ID NO: 159950 - RNA, 23 nt, Human
ugcccgauucagcucuguguggc

SEQ ID NO: 159951 - RNA, 18 nt, Human
ugcuaacaggaaaaaaaa

SEQ ID NO: 159952 - RNA, 23 nt, Human
ugcuaacaggaaaaaaaaaaaaa

SEQ ID NO: 159953 - RNA, 23 nt, Human
ugcuaacaggaaaaaaaaaaaaa

SEQ ID NO: 159954 - RNA, 21 nt, Human
uguggcuuucuuuaaaaucga

SEQ ID NO: 159955 - RNA, 19 nt, Human
uuaaaacaacaacaacaac

SEQ ID NO: 159956 - RNA, 23 nt, Human
uuaagacagcacgaaacaccaca

SEQ ID NO: 159957 - RNA, 24 nt, Human
uuacuaaucuuuggucagcacagg

SEQ ID NO: 159958 - RNA, 18 nt, Human
uucauuguacaaacaucu

SEQ ID NO: 159959 - RNA, 18 nt, Human
uugcacauauggcaaucc

SEQ ID NO: 159960 - RNA, 24 nt, Human
uuggucacugguccaggaaacagg

SEQ ID NO: 159961 - RNA, 18 nt, Human
uuuaaaaugaaguuauau

SEQ ID NO: 159962 - RNA, 22 nt, Human
aagcggcaggugcggggcugca

SEQ ID NO: 159963 - RNA, 23 nt, Human
acagcauuugguuagggagugcc

SEQ ID NO: 159964 - RNA, 24 nt, Human
agacaaaagguccagguagaggca

SEQ ID NO: 159965 - RNA, 20 nt, Human
agcauuugaugguggaaaua

SEQ ID NO: 159966 - RNA, 21 nt, Human
auccacucaaaauauaucuua

SEQ ID NO: 159967 - RNA, 24 nt, Human
cgcagcgcucguggugcaacuggg

SEQ ID NO: 159968 - RNA, 20 nt, Human
cggagcugcaggugcgggcg

SEQ ID NO: 159969 - RNA, 27 nt, Human
cgggcggcaagagagggcaguaggcac

SEQ ID NO: 159970 - RNA, 19 nt, Human
cggggcugcaggugcaagc

SEQ ID NO: 159971 - RNA, 19 nt, Human
cggggcugcaggugcgggc

SEQ ID NO: 159972 - RNA, 21 nt, Human
cguggugcaacugggccaggc

SEQ ID NO: 159973 - RNA, 19 nt, Human
cugcaggugcaagcggcag

SEQ ID NO: 159974 - RNA, 24 nt, Human
cuggccgcaggugcggagcugcag

SEQ ID NO: 159975 - RNA, 20 nt, Human
gagcugcaggugcgggcggc

SEQ ID NO: 159976 - RNA, 20 nt, Human
gcaggugcgggccgcgggac

SEQ ID NO: 159977 - RNA, 20 nt, Human
gcggggcugcaggugcaagc

SEQ ID NO: 159978 - RNA, 22 nt, Human
ggaccuggcgggaggacugaca

SEQ ID NO: 159979 - RNA, 23 nt, Human
ggcggcaggugcgggccgcggga

SEQ ID NO: 159980 - RNA, 21 nt, Human
ggggcugcaggugcgggcggc

SEQ ID NO: 159981 - RNA, 19 nt, Human
gguacugcugugugagaca

SEQ ID NO: 159982 - RNA, 22 nt, Human
uaacaccaguggcauuauggag

SEQ ID NO: 159983 - RNA, 23 nt, Human
ugcaggugcgggcggcaagagag

SEQ ID NO: 159984 - RNA, 21 nt, Human
ugcgggcggcaggugcgggcc

SEQ ID NO: 159985 - RNA, 26 nt, Human
uugaugguggaaauagucaugcuuuu

SEQ ID NO: 159986 - RNA, 23 nt, Human
uuuuuuuuuuuuuuuuuuuaagg

SEQ ID NO: 159987 - RNA, 20 nt, Human
aaaacaaacagaagagggca

SEQ ID NO: 159988 - RNA, 23 nt, Human
auagaaucgccuguggcuuccaa

SEQ ID NO: 159989 - RNA, 18 nt, Human
ucauagcuaccaucucug

SEQ ID NO: 159990 - RNA, 18 nt, Human
ucucccggcaggaaaccu

SEQ ID NO: 159991 - RNA, 18 nt, Human
uucaaauccuuuucuccc

SEQ ID NO: 159992 - RNA, 22 nt, Human
uuugcauacucauagcuaccau

SEQ ID NO: 159993 - RNA, 18 nt, Human
uuuguuguugcucuucug

SEQ ID NO: 159994 - RNA, 20 nt, Human
uuuuuuuuuuuuuuuuccac

SEQ ID NO: 159995 - RNA, 21 nt, Human
uuuuuuuuuuuuuuuuccaca

SEQ ID NO: 159996 - RNA, 21 nt, Human
aaaaaacaaacauaaaaacca

SEQ ID NO: 159997 - RNA, 21 nt, Human
aaaaaacaaacauaaaaacca

SEQ ID NO: 159998 - RNA, 25 nt, Human
aaaaaacaaacauaaaaaccaaaac

SEQ ID NO: 159999 - RNA, 23 nt, Human
aaaacaaacauaaaaaccaaaac

SEQ ID NO: 160000 - RNA, 25 nt, Human
aaaacaaacauaaaaaccaaaaccc

SEQ ID NO: 160001 - RNA, 23 nt, Human
aaaacccaaaagaaaccauuggc

SEQ ID NO: 160002 - RNA, 24 nt, Human
aaaagacaacaaaauaaaacaaag

SEQ ID NO: 160003 - RNA, 18 nt, Human
aaaaugccacccccuacc

SEQ ID NO: 160004 - RNA, 24 nt, Human
aaacaaacauaaaaaccaaaaccc

SEQ ID NO: 160005 - RNA, 19 nt, Human
aaacaccccaaacugagag

SEQ ID NO: 160006 - RNA, 18 nt, Human
aaaccaaaacccaaaaga

SEQ ID NO: 160007 - RNA, 21 nt, Human
aaaccaaaacccaaaagaaac

SEQ ID NO: 160008 - RNA, 23 nt, Human
aaaccaaaacccaaaagaaacca

SEQ ID NO: 160009 - RNA, 21 nt, Human
aaagaaaccacuccagggcug

SEQ ID NO: 160010 - RNA, 20 nt, Human
aaagaaaccauuggcuugga

SEQ ID NO: 160011 - RNA, 27 nt, Human
aacauaaaaaccaaaacccaaaagaaa

SEQ ID NO: 160012 - RNA, 21 nt, Human
aacauaagugacuuuaggagu

SEQ ID NO: 160013 - RNA, 20 nt, Human
aacccaaaagaaaccauugg

SEQ ID NO: 160014 - RNA, 25 nt, Human
aaccccaaaaaacaaacauaaaaac

SEQ ID NO: 160015 - RNA, 21 nt, Human
aagaaaaggaaaacccagcaa

SEQ ID NO: 160016 - RNA, 21 nt, Human
aagacacauggaaaagggcag

SEQ ID NO: 160017 - RNA, 21 nt, Human
aaggagauggugccugucuca

SEQ ID NO: 160018 - RNA, 19 nt, Human
aaggggucucuccaccucc

SEQ ID NO: 160019 - RNA, 19 nt, Human
acacacacagaggcacgug

SEQ ID NO: 160020 - RNA, 23 nt, Human
acacacacagaggcacgugcaca

SEQ ID NO: 160021 - RNA, 24 nt, Human
acacacuuaaaaauauugacccaa

SEQ ID NO: 160022 - RNA, 20 nt, Human
acccagcaagggcauggucc

SEQ ID NO: 160023 - RNA, 24 nt, Human
accccaaaaaacaaacauaaaaac

SEQ ID NO: 160024 - RNA, 23 nt, Human
acccucaccucuaaaaaccauua

SEQ ID NO: 160025 - RNA, 21 nt, Human
acuggacaccacaagaaccug

SEQ ID NO: 160026 - RNA, 21 nt, Human
agaaaccacuccagggcugcc

SEQ ID NO: 160027 - RNA, 21 nt, Human
agaaugaagacacauggaaaa

SEQ ID NO: 160028 - RNA, 23 nt, Human
agacaacaaaauaaaacaaagua

SEQ ID NO: 160029 - RNA, 22 nt, Human
agacacauggaaaagggcaguc

SEQ ID NO: 160030 - RNA, 21 nt, Human
agagagagggggaacaaggga

SEQ ID NO: 160031 - RNA, 19 nt, Human
agaggaaaggagggagagc

SEQ ID NO: 160032 - RNA, 20 nt, Human
aggaagaggaaagccugaga

SEQ ID NO: 160033 - RNA, 22 nt, Human
aggaagagggccagaaagggac

SEQ ID NO: 160034 - RNA, 24 nt, Human
aggagcaggcagauaagccuggug

SEQ ID NO: 160035 - RNA, 19 nt, Human
aggagccuggcugggaggc

SEQ ID NO: 160036 - RNA, 21 nt, Human
aggcagaaugaagacacaugg

SEQ ID NO: 160037 - RNA, 21 nt, Human
aggcagggguucugguccugc

SEQ ID NO: 160038 - RNA, 18 nt, Human
aggccugggcucaggggg

SEQ ID NO: 160039 - RNA, 19 nt, Human
aggcucuccucggugggga

SEQ ID NO: 160040 - RNA, 22 nt, Human
agggcagucagugggaggcaac

SEQ ID NO: 160041 - RNA, 20 nt, Human
agggccagaaagggacaggg

SEQ ID NO: 160042 - RNA, 21 nt, Human
agggcgguggagcgggagaca

SEQ ID NO: 160043 - RNA, 18 nt, Human
agggcucaagggacagga

SEQ ID NO: 160044 - RNA, 23 nt, Human
aggggucucuccaccuccccuuu

SEQ ID NO: 160045 - RNA, 21 nt, Human
aggguucuuuacagagaaguu

SEQ ID NO: 160046 - RNA, 24 nt, Human
augaagacacauggaaaagggcag

SEQ ID NO: 160047 - RNA, 23 nt, Human
augcauguuuuuccaaaccccaa

SEQ ID NO: 160048 - RNA, 18 nt, Human
auggaagugggcagaggg

SEQ ID NO: 160049 - RNA, 23 nt, Human
auggggaggaggggcacagggcc

SEQ ID NO: 160050 - RNA, 25 nt, Human
caaaaaacaaacauaaaaaccaaaa

SEQ ID NO: 160051 - RNA, 20 nt, Human
caaaccccaaaaaacaaaca

SEQ ID NO: 160052 - RNA, 20 nt, Human
caaagucagaggcacucucc

SEQ ID NO: 160053 - RNA, 20 nt, Human
caacaaaauaaaacaaagua

SEQ ID NO: 160054 - RNA, 23 nt, Human
caacccucaccucuaaaaaccau

SEQ ID NO: 160055 - RNA, 24 nt, Human
caacccucaccucuaaaaaccauu

SEQ ID NO: 160056 - RNA, 25 nt, Human
cacagucccaaagaaaaggaaaacc

SEQ ID NO: 160057 - RNA, 20 nt, Human
cacccucucugccccaccuc

SEQ ID NO: 160058 - RNA, 21 nt, Human
cacuccagggcugccuuccuc

SEQ ID NO: 160059 - RNA, 18 nt, Human
cacugcuggggaccaugg

SEQ ID NO: 160060 - RNA, 19 nt, Human
cacuggggcuagacacagg

SEQ ID NO: 160061 - RNA, 18 nt, Human
cagaaccaggcacugcug

SEQ ID NO: 160062 - RNA, 18 nt, Human
cagcagauuggaagaaac

SEQ ID NO: 160063 - RNA, 22 nt, Human
caggacccccugacugcccuga

SEQ ID NO: 160064 - RNA, 27 nt, Human
cagugggaggcaaaagagagaggggga

SEQ ID NO: 160065 - RNA, 21 nt, Human
caugcuccccucccucccucc

SEQ ID NO: 160066 - RNA, 23 nt, Human
cauggaccaacccucaccucuaa

SEQ ID NO: 160067 - RNA, 22 nt, Human
cauguuuuuccaaaccccaaaa

SEQ ID NO: 160068 - RNA, 20 nt, Human
cauuggcuuggaaauuucug

SEQ ID NO: 160069 - RNA, 23 nt, Human
ccagggucaaaacuggccuaggg

SEQ ID NO: 160070 - RNA, 27 nt, Human
cccaaaaaacaaacauaaaaaccaaaa

SEQ ID NO: 160071 - RNA, 20 nt, Human
cccagguuccucuguccccc

SEQ ID NO: 160072 - RNA, 22 nt, Human
ccccaaaaaacaaacauaaaaa

SEQ ID NO: 160073 - RNA, 22 nt, Human
ccccaaacugagagcccggccu

SEQ ID NO: 160074 - RNA, 19 nt, Human
ccccucccucccucccucc

SEQ ID NO: 160075 - RNA, 20 nt, Human
cccucucugccccaccugua

SEQ ID NO: 160076 - RNA, 20 nt, Human
ccgccuccagcuugggggag

SEQ ID NO: 160077 - RNA, 20 nt, Human
ccucugaagagcuucaaccc

SEQ ID NO: 160078 - RNA, 25 nt, Human
ccugcagucugagggcaggcucucc

SEQ ID NO: 160079 - RNA, 18 nt, Human
ccuggugccugggcucca

SEQ ID NO: 160080 - RNA, 18 nt, Human
cgacagcacagccugugc

SEQ ID NO: 160081 - RNA, 22 nt, Human
cgcgcagaauacacucagccac

SEQ ID NO: 160082 - RNA, 22 nt, Human
cgcuggccucagagcccgugca

SEQ ID NO: 160083 - RNA, 20 nt, Human
cggggcgggguggggggaag

SEQ ID NO: 160084 - RNA, 18 nt, Human
cgggguggggggaagagg

SEQ ID NO: 160085 - RNA, 25 nt, Human
cucaacaaagggcgguggagcggga

SEQ ID NO: 160086 - RNA, 18 nt, Human
cucaagggacaggagagc

SEQ ID NO: 160087 - RNA, 20 nt, Human
cuccagggcugccuuccucu

SEQ ID NO: 160088 - RNA, 22 nt, Human
cuccccucccucccucccucca

SEQ ID NO: 160089 - RNA, 24 nt, Human
cuccucugaagagcuucaaccccc

SEQ ID NO: 160090 - RNA, 22 nt, Human
cugcuggggaccauggaugggg

SEQ ID NO: 160091 - RNA, 18 nt, Human
cuggggcugcuggccccu

SEQ ID NO: 160092 - RNA, 20 nt, Human
cuucaggaagaggaaagccc

SEQ ID NO: 160093 - RNA, 21 nt, Human
gaaacaaacaaaaugccaccc

SEQ ID NO: 160094 - RNA, 18 nt, Human
gaagggcucaagggacag

SEQ ID NO: 160095 - RNA, 18 nt, Human
gagagcacaguuaaggac

SEQ ID NO: 160096 - RNA, 27 nt, Human
gaggacgugcauccugggaaagccuuc

SEQ ID NO: 160097 - RNA, 24 nt, Human
gaggagccuggcugggaggcaggu

SEQ ID NO: 160098 - RNA, 18 nt, Human
gagggagaggagcaggca

SEQ ID NO: 160099 - RNA, 22 nt, Human
gagggggaacaaggagauggug

SEQ ID NO: 160100 - RNA, 25 nt, Human
gcacugcuggggaccauggaugggg

SEQ ID NO: 160101 - RNA, 18 nt, Human
gcagaaugaagacacaug

SEQ ID NO: 160102 - RNA, 23 nt, Human
gcgggguggggggaagagguugu

SEQ ID NO: 160103 - RNA, 20 nt, Human
gcucaagggagaggaaagga

SEQ ID NO: 160104 - RNA, 24 nt, Human
gcuccccucccucccucccuccac

SEQ ID NO: 160105 - RNA, 21 nt, Human
gcuccucugaagagcuucaac

SEQ ID NO: 160106 - RNA, 18 nt, Human
gcugcccuagagagagga

SEQ ID NO: 160107 - RNA, 26 nt, Human
ggaaagccuucuucaggcagaaugaa

SEQ ID NO: 160108 - RNA, 18 nt, Human
ggaggcaaaagagagagg

SEQ ID NO: 160109 - RNA, 18 nt, Human
ggcugcugcuacugagca

SEQ ID NO: 160110 - RNA, 22 nt, Human
gggacaggagagcagagaggga

SEQ ID NO: 160111 - RNA, 20 nt, Human
gggaggcaaaagagagaggg

SEQ ID NO: 160112 - RNA, 22 nt, Human
gggcagaaccaagcucaaggga

SEQ ID NO: 160113 - RNA, 22 nt, Human
gggcgggguggggggaagaggu

SEQ ID NO: 160114 - RNA, 18 nt, Human
gggcucaagggacaggag

SEQ ID NO: 160115 - RNA, 22 nt, Human
ggggaacaaggagauggugccu

SEQ ID NO: 160116 - RNA, 22 nt, Human
ggggcuagacacaggccugggc

SEQ ID NO: 160117 - RNA, 20 nt, Human
ggguagcaacgaaauggguc

SEQ ID NO: 160118 - RNA, 25 nt, Human
guccucugccgccuccagcuugggg

SEQ ID NO: 160119 - RNA, 18 nt, Human
gugaacaagcacgagugc

SEQ ID NO: 160120 - RNA, 23 nt, Human
uaaaaagacaacaaaauaaaaca

SEQ ID NO: 160121 - RNA, 22 nt, Human
uaaaccagaggccuggaggagc

SEQ ID NO: 160122 - RNA, 22 nt, Human
uaagagcagauuguaggacaug

SEQ ID NO: 160123 - RNA, 18 nt, Human
uaccaggauccaguuucu

SEQ ID NO: 160124 - RNA, 21 nt, Human
uagcaacgaaauggguguguc

SEQ ID NO: 160125 - RNA, 18 nt, Human
uauuggggccuggagacc

SEQ ID NO: 160126 - RNA, 27 nt, Human
ucacacacuuaaaaauauugacccaaa

SEQ ID NO: 160127 - RNA, 22 nt, Human
ucacagucccaaagaaaaggaa

SEQ ID NO: 160128 - RNA, 24 nt, Human
ucaccaagugauuuuauauuauau

SEQ ID NO: 160129 - RNA, 18 nt, Human
ucagaaccaggcacugcu

SEQ ID NO: 160130 - RNA, 26 nt, Human
ucagugggaggcaaaagagagagggg

SEQ ID NO: 160131 - RNA, 23 nt, Human
uccaaaccccaaaaaacaaacau

SEQ ID NO: 160132 - RNA, 18 nt, Human
uccaccacccucucugcc

SEQ ID NO: 160133 - RNA, 22 nt, Human
ucccaaagaaaaggaaaaccca

SEQ ID NO: 160134 - RNA, 19 nt, Human
ucccaaagucagaggcacu

SEQ ID NO: 160135 - RNA, 19 nt, Human
uccccagguuccucugucc

SEQ ID NO: 160136 - RNA, 21 nt, Human
ucccugggguagacaguucca

SEQ ID NO: 160137 - RNA, 22 nt, Human
uccucuuccuccuuaggaacca

SEQ ID NO: 160138 - RNA, 19 nt, Human
uccugcgcaagccgggaga

SEQ ID NO: 160139 - RNA, 21 nt, Human
uccugggaaagccuucuucag

SEQ ID NO: 160140 - RNA, 18 nt, Human
uccuggggcugcuggccc

SEQ ID NO: 160141 - RNA, 24 nt, Human
uccuuugugguuuuucgccccggu

SEQ ID NO: 160142 - RNA, 24 nt, Human
ucgacagcacagccugugcuuucc

SEQ ID NO: 160143 - RNA, 18 nt, Human
ucggcacgggucugggac

SEQ ID NO: 160144 - RNA, 22 nt, Human
ucuaaaaaccauuuccccucac

SEQ ID NO: 160145 - RNA, 22 nt, Human
ucucccggcacaaucccugcuc

SEQ ID NO: 160146 - RNA, 21 nt, Human
ugaaaguucagugagccacug

SEQ ID NO: 160147 - RNA, 23 nt, Human
ugaacaagcacgagugcugggca

SEQ ID NO: 160148 - RNA, 18 nt, Human
ugagggcaggcucuccug

SEQ ID NO: 160149 - RNA, 25 nt, Human
ugcucaauacccaggguucuuuaca

SEQ ID NO: 160150 - RNA, 25 nt, Human
ugcugccuuuucugggcucccuuuu

SEQ ID NO: 160151 - RNA, 21 nt, Human
ugcuggggaccauggaugggg

SEQ ID NO: 160152 - RNA, 18 nt, Human
uggaagaaacaaacaaaa

SEQ ID NO: 160153 - RNA, 20 nt, Human
uggacaccacaagaaccugg

SEQ ID NO: 160154 - RNA, 21 nt, Human
uggacaccacaagaaccuggc

SEQ ID NO: 160155 - RNA, 21 nt, Human
uggaggcagggguucuggucc

SEQ ID NO: 160156 - RNA, 22 nt, Human
uggauggggaggaggggcacag

SEQ ID NO: 160157 - RNA, 19 nt, Human
uggccuagguggcaaagag

SEQ ID NO: 160158 - RNA, 20 nt, Human
uggcuucuaagcaggacccc

SEQ ID NO: 160159 - RNA, 21 nt, Human
uggcuucuaagcaggaccccc

SEQ ID NO: 160160 - RNA, 21 nt, Human
ugggacuccuggggcugcugg

SEQ ID NO: 160161 - RNA, 19 nt, Human
uggggaggaggggcacagg

SEQ ID NO: 160162 - RNA, 23 nt, Human
uggggaggaggggcacagggccc

SEQ ID NO: 160163 - RNA, 21 nt, Human
uggggagucaggggaagaucg

SEQ ID NO: 160164 - RNA, 21 nt, Human
uggggcucaacaaagggcggu

SEQ ID NO: 160165 - RNA, 20 nt, Human
uggggcugcuggccccuccu

SEQ ID NO: 160166 - RNA, 25 nt, Human
uguagaggaagggcucaagggacag

SEQ ID NO: 160167 - RNA, 23 nt, Human
ugucucagaauccacuuggguag

SEQ ID NO: 160168 - RNA, 21 nt, Human
ugugacgcuggccucagagcc

SEQ ID NO: 160169 - RNA, 20 nt, Human
uuacagagggggagcagagu

SEQ ID NO: 160170 - RNA, 20 nt, Human
uucagcagauuggaagaaac

SEQ ID NO: 160171 - RNA, 21 nt, Human
uuccauggcugcaggcagagg

SEQ ID NO: 160172 - RNA, 22 nt, Human
uuccucaaaguuucaaccccag

SEQ ID NO: 160173 - RNA, 23 nt, Human
uuccucuuccuccuuaggaacca

SEQ ID NO: 160174 - RNA, 22 nt, Human
uuccuuaggagggagaggagca

SEQ ID NO: 160175 - RNA, 25 nt, Human
uugacccaaaagaaauuccgaccuu

SEQ ID NO: 160176 - RNA, 28 nt, Human
uuuauaaaaagacaacaaaauaaaacaa

SEQ ID NO: 160177 - RNA, 18 nt, Human
uuuccacaggagcaacca

SEQ ID NO: 160178 - RNA, 20 nt, Human
uuucugggcucccuuuucug

SEQ ID NO: 160179 - RNA, 22 nt, Human
aaaagguaccaacacuuacuga

SEQ ID NO: 160180 - RNA, 20 nt, Human
aacacuuacugaucugaguu

SEQ ID NO: 160181 - RNA, 26 nt, Human
aagacccugcuccacccagggcacuc

SEQ ID NO: 160182 - RNA, 19 nt, Human
acagcccgaagucacacgg

SEQ ID NO: 160183 - RNA, 19 nt, Human
accagaguaacugcaaucc

SEQ ID NO: 160184 - RNA, 21 nt, Human
acugcaauccauacagaaguc

SEQ ID NO: 160185 - RNA, 18 nt, Human
agacccugcuccacccag

SEQ ID NO: 160186 - RNA, 22 nt, Human
agccgcgagcgagcccacagcc

SEQ ID NO: 160187 - RNA, 23 nt, Human
agcugcuuuuguuuuuggucccu

SEQ ID NO: 160188 - RNA, 21 nt, Human
agcuugaaaaaaaaucacauc

SEQ ID NO: 160189 - RNA, 18 nt, Human
augagucuaaaagguacc

SEQ ID NO: 160190 - RNA, 20 nt, Human
augagucuaaaagguaccaa

SEQ ID NO: 160191 - RNA, 21 nt, Human
auggaaaccuauuaacaugcc

SEQ ID NO: 160192 - RNA, 21 nt, Human
cacacggcgccggcgacgccc

SEQ ID NO: 160193 - RNA, 20 nt, Human
cacagcagaauaaaggugaa

SEQ ID NO: 160194 - RNA, 21 nt, Human
caccagagcuucuacuuucca

SEQ ID NO: 160195 - RNA, 18 nt, Human
caccagaguaacugcaau

SEQ ID NO: 160196 - RNA, 20 nt, Human
cccacagcccgaagucacac

SEQ ID NO: 160197 - RNA, 19 nt, Human
ccccuugggcccaggcagc

SEQ ID NO: 160198 - RNA, 19 nt, Human
ccucuuuucuuuggugucu

SEQ ID NO: 160199 - RNA, 18 nt, Human
ccuguaaaugccuuuccc

SEQ ID NO: 160200 - RNA, 23 nt, Human
ccuuaguucuuucucuuuaaggu

SEQ ID NO: 160201 - RNA, 19 nt, Human
gcaguacagucacuuugau

SEQ ID NO: 160202 - RNA, 19 nt, Human
guuucuggcaugguccuag

SEQ ID NO: 160203 - RNA, 21 nt, Human
uaaaaauguguuaugugcugu

SEQ ID NO: 160204 - RNA, 19 nt, Human
uaauuagcuuuuuuccuuu

SEQ ID NO: 160205 - RNA, 20 nt, Human
uagaguccucuuuucuuugg

SEQ ID NO: 160206 - RNA, 24 nt, Human
ucaaaauaagcuugaaaaaaaauc

SEQ ID NO: 160207 - RNA, 22 nt, Human
ucuuucucuuuaagguuccccc

SEQ ID NO: 160208 - RNA, 23 nt, Human
ugacagaaacaaaaaggugaaga

SEQ ID NO: 160209 - RNA, 23 nt, Human
ugaguagcuaugguguaaccuga

SEQ ID NO: 160210 - RNA, 21 nt, Human
ugccuuccacauaagucucua

SEQ ID NO: 160211 - RNA, 20 nt, Human
ugcuuuuguuuuuggucccu

SEQ ID NO: 160212 - RNA, 23 nt, Human
uggagaaucaacagauuggguga

SEQ ID NO: 160213 - RNA, 18 nt, Human
uggcuuaaguaucaggua

SEQ ID NO: 160214 - RNA, 25 nt, Human
uucaaaauaagcuugaaaaaaaauc

SEQ ID NO: 160215 - RNA, 21 nt, Human
uugcaguacagucacuuugau

SEQ ID NO: 160216 - RNA, 24 nt, Human
uuucuggcaugguccuagcugcau

SEQ ID NO: 160217 - RNA, 22 nt, Human
uuuuuuuuuuuuuuuuuuaaag

SEQ ID NO: 160218 - RNA, 21 nt, Human
aaaaacaacaacuugacuagc

SEQ ID NO: 160219 - RNA, 25 nt, Human
aaacaaguggaauuuucugaccaaa

SEQ ID NO: 160220 - RNA, 19 nt, Human
aaaccaaggagaacuagua

SEQ ID NO: 160221 - RNA, 23 nt, Human
aaaguuguucaaggaaaaacaac

SEQ ID NO: 160222 - RNA, 20 nt, Human
aaaguuuuccaguucacuga

SEQ ID NO: 160223 - RNA, 24 nt, Human
aacaaucuuuacauauacugacug

SEQ ID NO: 160224 - RNA, 20 nt, Human
aacauauacuuuacaguaua

SEQ ID NO: 160225 - RNA, 22 nt, Human
aaccaaauuaacaaucacaaaa

SEQ ID NO: 160226 - RNA, 21 nt, Human
aaggaaacaaguggaauuuuc

SEQ ID NO: 160227 - RNA, 20 nt, Human
aauucaauuuguacaaaaag

SEQ ID NO: 160228 - RNA, 26 nt, Human
acaaaauaguagaauuauaucagaac

SEQ ID NO: 160229 - RNA, 20 nt, Human
acuaaaauuuacuggaaacu

SEQ ID NO: 160230 - RNA, 20 nt, Human
agacuaccucagcgagcggc

SEQ ID NO: 160231 - RNA, 19 nt, Human
agcagauuacagagcaaac

SEQ ID NO: 160232 - RNA, 22 nt, Human
agcagauuacagagcaaaccua

SEQ ID NO: 160233 - RNA, 23 nt, Human
augauuaugaacuuaaauauguc

SEQ ID NO: 160234 - RNA, 19 nt, Human
caaaaaguaaauuuccaaa

SEQ ID NO: 160235 - RNA, 24 nt, Human
caaagcuaaacacugccucccuuc

SEQ ID NO: 160236 - RNA, 25 nt, Human
caagugccacauacauaauaacaua

SEQ ID NO: 160237 - RNA, 19 nt, Human
cacaccaccccgugcuccc

SEQ ID NO: 160238 - RNA, 22 nt, Human
caccaccccgugcuccggggac

SEQ ID NO: 160239 - RNA, 23 nt, Human
caccuuuugcuuuauucuuaaga

SEQ ID NO: 160240 - RNA, 24 nt, Human
cagacauuuuucuauuaaaguuuu

SEQ ID NO: 160241 - RNA, 20 nt, Human
cagauuacagagcaaaccua

SEQ ID NO: 160242 - RNA, 18 nt, Human
cagccgcggccccccgcg

SEQ ID NO: 160243 - RNA, 19 nt, Human
caguauaaacaaauuaagu

SEQ ID NO: 160244 - RNA, 22 nt, Human
cauacagugccucaagugccac

SEQ ID NO: 160245 - RNA, 23 nt, Human
caugggucuuccgauaaacaauc

SEQ ID NO: 160246 - RNA, 24 nt, Human
cauuaguaacuuuuuauucucaaa

SEQ ID NO: 160247 - RNA, 21 nt, Human
cauuugagaacauucauccaa

SEQ ID NO: 160248 - RNA, 18 nt, Human
cauuuuauagacucuaca

SEQ ID NO: 160249 - RNA, 26 nt, Human
ccacauuaaaaaaaauucggagauau

SEQ ID NO: 160250 - RNA, 19 nt, Human
cccccacacaccaccccgu

SEQ ID NO: 160251 - RNA, 20 nt, Human
cccccgcuucgcgcucccgc

SEQ ID NO: 160252 - RNA, 20 nt, Human
ccgcagccgcggccccccgc

SEQ ID NO: 160253 - RNA, 26 nt, Human
ccggggacggcggcggcugcaggucc

SEQ ID NO: 160254 - RNA, 20 nt, Human
ccuggccccccgcuucgcgc

SEQ ID NO: 160255 - RNA, 21 nt, Human
ccuucuguuccauuuauuguc

SEQ ID NO: 160256 - RNA, 20 nt, Human
ccuuuuuucuucucauaugu

SEQ ID NO: 160257 - RNA, 20 nt, Human
cgcgagagacuaccucagcg

SEQ ID NO: 160258 - RNA, 21 nt, Human
cucuacaaugcauggauuacu

SEQ ID NO: 160259 - RNA, 22 nt, Human
cugaagacccuaaaaugucaag

SEQ ID NO: 160260 - RNA, 21 nt, Human
cugccgggggcggcuuccccc

SEQ ID NO: 160261 - RNA, 18 nt, Human
gacggcggcggcugcagg

SEQ ID NO: 160262 - RNA, 25 nt, Human
gagcaaaccuaaaaguuuauacaaa

SEQ ID NO: 160263 - RNA, 24 nt, Human
gcagauuacagagcaaaccuaaaa

SEQ ID NO: 160264 - RNA, 18 nt, Human
gcagccgcggccccccgc

SEQ ID NO: 160265 - RNA, 19 nt, Human
gcagccgcggccccccgcg

SEQ ID NO: 160266 - RNA, 21 nt, Human
gcggccccccgcgcuccgccc

SEQ ID NO: 160267 - RNA, 23 nt, Human
gcucccuuuaugauuuuuaaaaa

SEQ ID NO: 160268 - RNA, 19 nt, Human
ggccccccgcuucgcgcuc

SEQ ID NO: 160269 - RNA, 21 nt, Human
ggcgccccuggccccccgcuu

SEQ ID NO: 160270 - RNA, 18 nt, Human
uaaaaccaaggagaacua

SEQ ID NO: 160271 - RNA, 26 nt, Human
uaaacaaagauaaaaccaaucaacgg

SEQ ID NO: 160272 - RNA, 25 nt, Human
uaaaugcauagagaauauaacauuu

SEQ ID NO: 160273 - RNA, 23 nt, Human
uaacagguguauguguaacugaa

SEQ ID NO: 160274 - RNA, 25 nt, Human
uaacagguguauguguaacugaaga

SEQ ID NO: 160275 - RNA, 24 nt, Human
uaauaacauaucacaaaagaaugu

SEQ ID NO: 160276 - RNA, 19 nt, Human
uaauugcuguuaauuuucg

SEQ ID NO: 160277 - RNA, 19 nt, Human
uaauuugaucuuggcucug

SEQ ID NO: 160278 - RNA, 18 nt, Human
uacaauggugcucccuuu

SEQ ID NO: 160279 - RNA, 22 nt, Human
uacuuuaaagcuaguuuaaaca

SEQ ID NO: 160280 - RNA, 19 nt, Human
uauaacauuucagaaaacc

SEQ ID NO: 160281 - RNA, 22 nt, Human
uauauucauuuuucucacaaaa

SEQ ID NO: 160282 - RNA, 18 nt, Human
ucccgcgcugucuguguu

SEQ ID NO: 160283 - RNA, 21 nt, Human
uccgaaccacauuaaaaaaaa

SEQ ID NO: 160284 - RNA, 23 nt, Human
ucuaucagucuucuaaguguucu

SEQ ID NO: 160285 - RNA, 19 nt, Human
ugaagacccuaaaauguca

SEQ ID NO: 160286 - RNA, 25 nt, Human
ugagaacauucauccaaucuuuucc

SEQ ID NO: 160287 - RNA, 18 nt, Human
ugaggcgccccuggcccc

SEQ ID NO: 160288 - RNA, 18 nt, Human
ugcauggauuacuuuuau

SEQ ID NO: 160289 - RNA, 23 nt, Human
ugcccagaaucaaaguuuauauc

SEQ ID NO: 160290 - RNA, 25 nt, Human
uggaaagcaaaaauuauguagaaaa

SEQ ID NO: 160291 - RNA, 21 nt, Human
uuaaacaaagauaaaaccaag

SEQ ID NO: 160292 - RNA, 21 nt, Human
uuaaguacuaugcauuuugcu

SEQ ID NO: 160293 - RNA, 19 nt, Human
uuacacuaaggaaacaagu

SEQ ID NO: 160294 - RNA, 24 nt, Human
uuauguagaaaaucaccuuuugcu

SEQ ID NO: 160295 - RNA, 19 nt, Human
uucaaggaaaaacaacaac

SEQ ID NO: 160296 - RNA, 22 nt, Human
uucacugagcaauauuuacuga

SEQ ID NO: 160297 - RNA, 19 nt, Human
uucgcgcucccgcagccgc

SEQ ID NO: 160298 - RNA, 23 nt, Human
uuuaaaaguagaucuaagacugu

SEQ ID NO: 160299 - RNA, 21 nt, Human
uuucgaaucuagauaagccuu

SEQ ID NO: 160300 - RNA, 23 nt, Human
uuuuucuucucauauguugcugu

SEQ ID NO: 160301 - RNA, 23 nt, Human
uuuuuuuuuugcauuaguaacuu

SEQ ID NO: 160302 - RNA, 18 nt, Human
uuuuuuuuuuuuuuuuug

SEQ ID NO: 160303 - RNA, 26 nt, Human
uuuuuuuuuuuuuuuuuuugcauuag

SEQ ID NO: 160304 - RNA, 18 nt, Human
aaaacccaaaaccaaucc

SEQ ID NO: 160305 - RNA, 25 nt, Human
aaacaaaacccaaaaccaaucccaa

SEQ ID NO: 160306 - RNA, 25 nt, Human
aaaccaaucccaaaauuaaacccca

SEQ ID NO: 160307 - RNA, 23 nt, Human
aacaacuaaaaacaaaacccaaa

SEQ ID NO: 160308 - RNA, 23 nt, Human
aaccaaucccaaaauuaaacccc

SEQ ID NO: 160309 - RNA, 18 nt, Human
aacccaaaaccaauccca

SEQ ID NO: 160310 - RNA, 22 nt, Human
aacccaaaaccaaucccaaaau

SEQ ID NO: 160311 - RNA, 23 nt, Human
aacuaaaaacaaaacccaaaacc

SEQ ID NO: 160312 - RNA, 25 nt, Human
aacuaaaaacaaaacccaaaaccaa

SEQ ID NO: 160313 - RNA, 26 nt, Human
aacuaaaaacaaaacccaaaaccaau

SEQ ID NO: 160314 - RNA, 18 nt, Human
aauuaugaagcuucaaaa

SEQ ID NO: 160315 - RNA, 25 nt, Human
acaacuaaaaacaaaacccaaaacc

SEQ ID NO: 160316 - RNA, 22 nt, Human
aggcagcgcgagaaggccuggg

SEQ ID NO: 160317 - RNA, 18 nt, Human
agguguaaaaaauuaacu

SEQ ID NO: 160318 - RNA, 25 nt, Human
auuuaauggacaauuucauauuuuu

SEQ ID NO: 160319 - RNA, 25 nt, Human
caaaaccaaucccaaaauuaaaccc

SEQ ID NO: 160320 - RNA, 19 nt, Human
caaaaggucagguguccuc

SEQ ID NO: 160321 - RNA, 24 nt, Human
caaccgccgcaagcccggccuagc

SEQ ID NO: 160322 - RNA, 23 nt, Human
caacuaaaaacaaaacccaaaac

SEQ ID NO: 160323 - RNA, 18 nt, Human
caccagcgaccaggcagc

SEQ ID NO: 160324 - RNA, 22 nt, Human
cagcgcgagaaggccugggugc

SEQ ID NO: 160325 - RNA, 23 nt, Human
ccaaaauuaaaccccaacaaagc

SEQ ID NO: 160326 - RNA, 24 nt, Human
ccaaucccaaaauuaaaccccaac

SEQ ID NO: 160327 - RNA, 22 nt, Human
ccacaccuggcuagaaaaacua

SEQ ID NO: 160328 - RNA, 18 nt, Human
ccagagaaauaaccaaac

SEQ ID NO: 160329 - RNA, 21 nt, Human
cccaacaaagcacauuaauuu

SEQ ID NO: 160330 - RNA, 23 nt, Human
ccgccgcaagcccggccuagcgc

SEQ ID NO: 160331 - RNA, 19 nt, Human
cgaccaggcagcgcgagaa

SEQ ID NO: 160332 - RNA, 20 nt, Human
cgacccggaaggaagacgcg

SEQ ID NO: 160333 - RNA, 18 nt, Human
cgcggaggccgcgaggag

SEQ ID NO: 160334 - RNA, 20 nt, Human
cgggagaggcgcgcgccgcg

SEQ ID NO: 160335 - RNA, 22 nt, Human
gaacuuugcaugcugacuucag

SEQ ID NO: 160336 - RNA, 24 nt, Human
gccgcaagcccggccuagcgcgac

SEQ ID NO: 160337 - RNA, 21 nt, Human
gcuucaccagcgaccaggcag

SEQ ID NO: 160338 - RNA, 22 nt, Human
uaaaccccaacaaagcacauuu

SEQ ID NO: 160339 - RNA, 23 nt, Human
uaaccaaacagcuggaaaagcau

SEQ ID NO: 160340 - RNA, 21 nt, Human
uaagguaaaaauaauauccac

SEQ ID NO: 160341 - RNA, 20 nt, Human
uaaguuagcaugauuccaug

SEQ ID NO: 160342 - RNA, 24 nt, Human
uaccauuaaaacaacuaaaaacaa

SEQ ID NO: 160343 - RNA, 25 nt, Human
uacccugaacuuugcaugcugacuu

SEQ ID NO: 160344 - RNA, 19 nt, Human
uccagagaaauaaccaaac

SEQ ID NO: 160345 - RNA, 21 nt, Human
uccagguacccugaacuuugc

SEQ ID NO: 160346 - RNA, 22 nt, Human
ucucauucuccaacuagcucug

SEQ ID NO: 160347 - RNA, 19 nt, Human
ugaagagaagugcuugcag

SEQ ID NO: 160348 - RNA, 21 nt, Human
ugauuuaauggacaauuucau

SEQ ID NO: 160349 - RNA, 19 nt, Human
ugggaaaugcaaaaguugg

SEQ ID NO: 160350 - RNA, 19 nt, Human
ugggaaaugcaaaaguugg

SEQ ID NO: 160351 - RNA, 23 nt, Human
uuaaaacaacuaaaaacaaaacc

SEQ ID NO: 160352 - RNA, 22 nt, Human
uucccagauagaauggucacag

SEQ ID NO: 160353 - RNA, 21 nt, Human
uugccaggucacaggcuuaau

SEQ ID NO: 160354 - RNA, 20 nt, Human
uuuguacauaccaaacaaaa

SEQ ID NO: 160355 - RNA, 25 nt, Human
aaaaagaaaauucagcucaauaaaa

SEQ ID NO: 160356 - RNA, 20 nt, Human
aaaaguauaauuugcaagag

SEQ ID NO: 160357 - RNA, 19 nt, Human
aaagaaccuuaaauguggg

SEQ ID NO: 160358 - RNA, 22 nt, Human
aaaggaaauauuacggaaaaga

SEQ ID NO: 160359 - RNA, 19 nt, Human
aaauuaagauuucugaagu

SEQ ID NO: 160360 - RNA, 21 nt, Human
aaccuuaaauguggguuuguu

SEQ ID NO: 160361 - RNA, 20 nt, Human
aagcaucucggagaguuuau

SEQ ID NO: 160362 - RNA, 21 nt, Human
aaggaaacaaauaucgauugg

SEQ ID NO: 160363 - RNA, 25 nt, Human
aauaaaggaaauauuacggaaaaga

SEQ ID NO: 160364 - RNA, 21 nt, Human
acaaaguaucccuaaaggaaa

SEQ ID NO: 160365 - RNA, 20 nt, Human
acauuauaaauggucuggcu

SEQ ID NO: 160366 - RNA, 23 nt, Human
accagcugcuucauccgccagug

SEQ ID NO: 160367 - RNA, 22 nt, Human
accuaaucccuuucuaaaccaa

SEQ ID NO: 160368 - RNA, 19 nt, Human
acugccucagccuccgccu

SEQ ID NO: 160369 - RNA, 22 nt, Human
agaaucauugaaauaaaggaaa

SEQ ID NO: 160370 - RNA, 19 nt, Human
agacaaagaucagaaguca

SEQ ID NO: 160371 - RNA, 21 nt, Human
aggcggcgcgcccccuugcgc

SEQ ID NO: 160372 - RNA, 18 nt, Human
agggacaguggugagaac

SEQ ID NO: 160373 - RNA, 24 nt, Human
auaaaggaaauauuacggaaaaga

SEQ ID NO: 160374 - RNA, 21 nt, Human
caaaccaauaauguauucauu

SEQ ID NO: 160375 - RNA, 18 nt, Human
caaagaucagaagucaag

SEQ ID NO: 160376 - RNA, 22 nt, Human
caaagugcaauaaagcaaaacg

SEQ ID NO: 160377 - RNA, 23 nt, Human
cacccucgccgcggggcagaggc

SEQ ID NO: 160378 - RNA, 21 nt, Human
cacccuuuugaaaagaccuaa

SEQ ID NO: 160379 - RNA, 22 nt, Human
cacugagcuaacacucagaagc

SEQ ID NO: 160380 - RNA, 18 nt, Human
cacugccucagccuccgc

SEQ ID NO: 160381 - RNA, 24 nt, Human
cauggcaccaauagacuggcucaa

SEQ ID NO: 160382 - RNA, 22 nt, Human
cauuacaauucacugguaaauu

SEQ ID NO: 160383 - RNA, 22 nt, Human
cauucuuacuguaagaauccag

SEQ ID NO: 160384 - RNA, 22 nt, Human
ccagucaacaguaguaggcuuu

SEQ ID NO: 160385 - RNA, 19 nt, Human
cccccuugcgcaugcgccc

SEQ ID NO: 160386 - RNA, 19 nt, Human
cccucgccgcggggcagag

SEQ ID NO: 160387 - RNA, 21 nt, Human
cccucgccgcggggcagaggc

SEQ ID NO: 160388 - RNA, 24 nt, Human
ccucagcagccgcggccgccgccu

SEQ ID NO: 160389 - RNA, 23 nt, Human
cgccgccucuccauagacacccu

SEQ ID NO: 160390 - RNA, 21 nt, Human
cgcggggcagaggcggcgcgc

SEQ ID NO: 160391 - RNA, 27 nt, Human
cucagccuccgccucagcagccgcggc

SEQ ID NO: 160392 - RNA, 25 nt, Human
cugcucaugcauuuugaacuccuuc

SEQ ID NO: 160393 - RNA, 21 nt, Human
cuucauccgccaguguggggc

SEQ ID NO: 160394 - RNA, 19 nt, Human
cuucuucaggaaagggcgc

SEQ ID NO: 160395 - RNA, 21 nt, Human
cuuguaaaagccuccaaucuc

SEQ ID NO: 160396 - RNA, 24 nt, Human
cuuuccuagcucacugagcuaaca

SEQ ID NO: 160397 - RNA, 25 nt, Human
gaaccaaucaccuccauggacuuua

SEQ ID NO: 160398 - RNA, 18 nt, Human
gagaaucauugaaauaaa

SEQ ID NO: 160399 - RNA, 18 nt, Human
gagccccaccagcugcuu

SEQ ID NO: 160400 - RNA, 18 nt, Human
gcagaggcggcgcgcccc

SEQ ID NO: 160401 - RNA, 24 nt, Human
gcucaauaaaauucaguaucuguc

SEQ ID NO: 160402 - RNA, 19 nt, Human
gcugcuucauccgccagug

SEQ ID NO: 160403 - RNA, 27 nt, Human
ggaaaagagauuaguuuccaaaaaugu

SEQ ID NO: 160404 - RNA, 18 nt, Human
ggaaacaaauaucgauug

SEQ ID NO: 160405 - RNA, 19 nt, Human
ggcagaggcggcgcgcccc

SEQ ID NO: 160406 - RNA, 21 nt, Human
gggacaguggugagaacaaag

SEQ ID NO: 160407 - RNA, 22 nt, Human
uaagucuucagacauguguguc

SEQ ID NO: 160408 - RNA, 21 nt, Human
uaauaaguucaugggaggucc

SEQ ID NO: 160409 - RNA, 20 nt, Human
uacuuuaaaugacauggcau

SEQ ID NO: 160410 - RNA, 21 nt, Human
uacuuuaaaugacauggcauu

SEQ ID NO: 160411 - RNA, 21 nt, Human
uagagccccaccagcugcuuc

SEQ ID NO: 160412 - RNA, 23 nt, Human
uagggacaguggugagaacaaag

SEQ ID NO: 160413 - RNA, 27 nt, Human
ucaacaguaguaggcuuaacauucuuc

SEQ ID NO: 160414 - RNA, 21 nt, Human
ucacugagcuaacacucagaa

SEQ ID NO: 160415 - RNA, 26 nt, Human
ucagcagccgcggccgccgccucucc

SEQ ID NO: 160416 - RNA, 21 nt, Human
ucagucccuuuucaaagaggc

SEQ ID NO: 160417 - RNA, 22 nt, Human
uccacuucuucaggaaagggcg

SEQ ID NO: 160418 - RNA, 20 nt, Human
ucuaaaccaaaaguauaauu

SEQ ID NO: 160419 - RNA, 21 nt, Human
ucugcaaagcuugguacagug

SEQ ID NO: 160420 - RNA, 22 nt, Human
ucuguaucaauaggaggaacau

SEQ ID NO: 160421 - RNA, 23 nt, Human
ugaaauaaaggaaauauuacgga

SEQ ID NO: 160422 - RNA, 25 nt, Human
ugaaguagacaaagaucagaaguca

SEQ ID NO: 160423 - RNA, 23 nt, Human
ugacauagggacaguggugagaa

SEQ ID NO: 160424 - RNA, 19 nt, Human
ugagaacaaaguaucccua

SEQ ID NO: 160425 - RNA, 22 nt, Human
ugagcuaacacucagaagccaa

SEQ ID NO: 160426 - RNA, 25 nt, Human
ugccauaaaccuuccauuuguaaaa

SEQ ID NO: 160427 - RNA, 21 nt, Human
ugccucagccuccgccucagc

SEQ ID NO: 160428 - RNA, 24 nt, Human
ugccucagccuccgccucagcagc

SEQ ID NO: 160429 - RNA, 23 nt, Human
ugcuaugaguaaagugcaugaaa

SEQ ID NO: 160430 - RNA, 18 nt, Human
uggcaggccuccacucuc

SEQ ID NO: 160431 - RNA, 20 nt, Human
ugggagguccaaagacaaag

SEQ ID NO: 160432 - RNA, 19 nt, Human
uggguggcaggccuccacu

SEQ ID NO: 160433 - RNA, 24 nt, Human
uguaaagagaaccaaucaccucca

SEQ ID NO: 160434 - RNA, 24 nt, Human
uguaaagagaaccaaucaccucca

SEQ ID NO: 160435 - RNA, 23 nt, Human
uguuuugcauaauuuaacuguuc

SEQ ID NO: 160436 - RNA, 18 nt, Human
uuaaaacucaaaauuauc

SEQ ID NO: 160437 - RNA, 18 nt, Human
uuaacauucuucaguccc

SEQ ID NO: 160438 - RNA, 22 nt, Human
uuugaacuccuugaaaguagca

SEQ ID NO: 160439 - RNA, 20 nt, Human
aaaacaacaacaacaaacaa

SEQ ID NO: 160440 - RNA, 23 nt, Human
aaacaacaacaacaaacaaugag

SEQ ID NO: 160441 - RNA, 18 nt, Human
aaagaaauaaauagauga

SEQ ID NO: 160442 - RNA, 22 nt, Human
aaauagaugagaagaggucaaa

SEQ ID NO: 160443 - RNA, 20 nt, Human
aaaugcaaucugaaugacaa

SEQ ID NO: 160444 - RNA, 23 nt, Human
aacagaauuuaaacaccuggaag

SEQ ID NO: 160445 - RNA, 22 nt, Human
aaccuccaucauagauucccac

SEQ ID NO: 160446 - RNA, 21 nt, Human
aaccuccugggcagacaccac

SEQ ID NO: 160447 - RNA, 22 nt, Human
aagcgccuugcucaaggaacag

SEQ ID NO: 160448 - RNA, 24 nt, Human
aagcuccggggccgaccuccggcc

SEQ ID NO: 160449 - RNA, 26 nt, Human
acaaacuuaaccccaauaggcuucau

SEQ ID NO: 160450 - RNA, 26 nt, Human
acagaaucaguucuccuggaagaggu

SEQ ID NO: 160451 - RNA, 19 nt, Human
acugccuacaaaugaccug

SEQ ID NO: 160452 - RNA, 20 nt, Human
agaaaagaagaaacuggcaa

SEQ ID NO: 160453 - RNA, 20 nt, Human
agaaaagaagaaacuggcaa

SEQ ID NO: 160454 - RNA, 19 nt, Human
agagaggaggucuggagag

SEQ ID NO: 160455 - RNA, 23 nt, Human
agagcugggggaggacugcaugu

SEQ ID NO: 160456 - RNA, 22 nt, Human
agaggcucaccgcgccgccgcc

SEQ ID NO: 160457 - RNA, 20 nt, Human
agcuguuugcuguaaugaau

SEQ ID NO: 160458 - RNA, 24 nt, Human
agcuguuuugaguggguugggcuc

SEQ ID NO: 160459 - RNA, 18 nt, Human
aggaggucuggagagcac

SEQ ID NO: 160460 - RNA, 19 nt, Human
agggaaagggcggccuugg

SEQ ID NO: 160461 - RNA, 21 nt, Human
agggagggaggguguggccuu

SEQ ID NO: 160462 - RNA, 20 nt, Human
aggguguggccuuggggggg

SEQ ID NO: 160463 - RNA, 23 nt, Human
caaacuuaaccccaauaggcuuc

SEQ ID NO: 160464 - RNA, 18 nt, Human
caaagaaccgaggcaucu

SEQ ID NO: 160465 - RNA, 19 nt, Human
caaaugaccugaccaaaau

SEQ ID NO: 160466 - RNA, 25 nt, Human
caagugaauuucgugaaaaccagca

SEQ ID NO: 160467 - RNA, 22 nt, Human
cacacuaaccucuccauccccc

SEQ ID NO: 160468 - RNA, 23 nt, Human
cacagcccgcgccccggggccgc

SEQ ID NO: 160469 - RNA, 22 nt, Human
caccgcgccgccgccgccgggu

SEQ ID NO: 160470 - RNA, 18 nt, Human
cacuagauccuggccuag

SEQ ID NO: 160471 - RNA, 20 nt, Human
cagagacgacagcauccagc

SEQ ID NO: 160472 - RNA, 21 nt, Human
caggagccuacaguaggagug

SEQ ID NO: 160473 - RNA, 20 nt, Human
caggccccugggcuccgcgg

SEQ ID NO: 160474 - RNA, 19 nt, Human
cagggccaaggauuaggga

SEQ ID NO: 160475 - RNA, 23 nt, Human
cagggccaaggauuagggacaau

SEQ ID NO: 160476 - RNA, 23 nt, Human
caucauagauucccaccccaagg

SEQ ID NO: 160477 - RNA, 18 nt, Human
ccaggcggggccgggcac

SEQ ID NO: 160478 - RNA, 25 nt, Human
ccaguaaccuccaucauagauuccc

SEQ ID NO: 160479 - RNA, 21 nt, Human
ccauccgcccgccccgauccc

SEQ ID NO: 160480 - RNA, 22 nt, Human
cccagggccaaggauuagggac

SEQ ID NO: 160481 - RNA, 18 nt, Human
ccccaguaaccuccaucc

SEQ ID NO: 160482 - RNA, 20 nt, Human
cccccaagcuccggggccga

SEQ ID NO: 160483 - RNA, 19 nt, Human
cccccauggcacagagccu

SEQ ID NO: 160484 - RNA, 18 nt, Human
ccccccaagcuccggggc

SEQ ID NO: 160485 - RNA, 22 nt, Human
ccccggggccgcccagaggcuc

SEQ ID NO: 160486 - RNA, 20 nt, Human
cccgauccccuccggugggc

SEQ ID NO: 160487 - RNA, 21 nt, Human
cccgcacuccagugggagggg

SEQ ID NO: 160488 - RNA, 25 nt, Human
cccgcgccccggggccgcccagagg

SEQ ID NO: 160489 - RNA, 18 nt, Human
cccugggcuccgcggcuc

SEQ ID NO: 160490 - RNA, 20 nt, Human
ccgccggguccccauccgcc

SEQ ID NO: 160491 - RNA, 21 nt, Human
ccgccggguccccauccgccc

SEQ ID NO: 160492 - RNA, 21 nt, Human
ccgcgccccggggccgcccag

SEQ ID NO: 160493 - RNA, 24 nt, Human
ccgcgccgccgccgccgggucccc

SEQ ID NO: 160494 - RNA, 22 nt, Human
ccuacaaaugaccugaccaagg

SEQ ID NO: 160495 - RNA, 23 nt, Human
ccucuguugcccaugagaaauga

SEQ ID NO: 160496 - RNA, 25 nt, Human
ccugaaacuucaaauagggucacaa

SEQ ID NO: 160497 - RNA, 18 nt, Human
cgacagcauccagccugg

SEQ ID NO: 160498 - RNA, 24 nt, Human
cgagggaaagggcggccuuggggg

SEQ ID NO: 160499 - RNA, 23 nt, Human
cgccccgauccccuccggugggc

SEQ ID NO: 160500 - RNA, 21 nt, Human
cgccgccgccgccgggucccc

SEQ ID NO: 160501 - RNA, 20 nt, Human
cgcgccccggggccgcccag

SEQ ID NO: 160502 - RNA, 22 nt, Human
cggccuggagagguccccgcac

SEQ ID NO: 160503 - RNA, 21 nt, Human
cggggagggcgcggcggccac

SEQ ID NO: 160504 - RNA, 21 nt, Human
cggggccgcccagaggcucac

SEQ ID NO: 160505 - RNA, 21 nt, Human
cguggaacugugggggugggg

SEQ ID NO: 160506 - RNA, 23 nt, Human
cuccagugggagggggugcugcg

SEQ ID NO: 160507 - RNA, 22 nt, Human
cuccaucauagauucccacccc

SEQ ID NO: 160508 - RNA, 25 nt, Human
cuccuucggcugccccugcgcgccc

SEQ ID NO: 160509 - RNA, 20 nt, Human
cugaaaucacauccauccac

SEQ ID NO: 160510 - RNA, 24 nt, Human
cugaaaucacauccauccacagaa

SEQ ID NO: 160511 - RNA, 25 nt, Human
cugccuacaaaugaccugaccaaaa

SEQ ID NO: 160512 - RNA, 25 nt, Human
cugcucauucucagaguauuaaacc

SEQ ID NO: 160513 - RNA, 22 nt, Human
cugcugagcuguuuccccaguu

SEQ ID NO: 160514 - RNA, 25 nt, Human
gaaauaaauagaugagaagagguca

SEQ ID NO: 160515 - RNA, 23 nt, Human
gaaauucucccacugaaacacag

SEQ ID NO: 160516 - RNA, 20 nt, Human
gacacccaaauccugaaacu

SEQ ID NO: 160517 - RNA, 20 nt, Human
gagaagagaaacugccuaca

SEQ ID NO: 160518 - RNA, 19 nt, Human
gaggccaugauguuugaaa

SEQ ID NO: 160519 - RNA, 23 nt, Human
gauaaugggcauuuugagaagaa

SEQ ID NO: 160520 - RNA, 26 nt, Human
gauaauuugaaguuucauccauuuaa

SEQ ID NO: 160521 - RNA, 23 nt, Human
gaugaacaggagacugggagaaa

SEQ ID NO: 160522 - RNA, 18 nt, Human
gcauguccuuccccagcu

SEQ ID NO: 160523 - RNA, 20 nt, Human
gcccagaggcucaccgcgcc

SEQ ID NO: 160524 - RNA, 20 nt, Human
gccccggggccgcccagagg

SEQ ID NO: 160525 - RNA, 24 nt, Human
gcccgccgucucccgggacacucc

SEQ ID NO: 160526 - RNA, 19 nt, Human
gccucuguugcccaugaga

SEQ ID NO: 160527 - RNA, 21 nt, Human
gccuugggggccugagcggag

SEQ ID NO: 160528 - RNA, 19 nt, Human
gcgcagcgccgcgcacagc

SEQ ID NO: 160529 - RNA, 20 nt, Human
gcggguccccggagcgagug

SEQ ID NO: 160530 - RNA, 19 nt, Human
gcugcagcacuuacaaucc

SEQ ID NO: 160531 - RNA, 18 nt, Human
gcuggugccucgcuagga

SEQ ID NO: 160532 - RNA, 23 nt, Human
ggagagguccccgcacuccagug

SEQ ID NO: 160533 - RNA, 23 nt, Human
ggggggggggcguggaacugugg

SEQ ID NO: 160534 - RNA, 22 nt, Human
gggugugggauugaagagagug

SEQ ID NO: 160535 - RNA, 21 nt, Human
gugaagugcuuuggccaaggu

SEQ ID NO: 160536 - RNA, 20 nt, Human
guggaaaacacgcagacaga

SEQ ID NO: 160537 - RNA, 18 nt, Human
uaaaaaggccugaaaagu

SEQ ID NO: 160538 - RNA, 20 nt, Human
uaaaugauucauuuccccca

SEQ ID NO: 160539 - RNA, 22 nt, Human
uaaaugauucauuucccccaac

SEQ ID NO: 160540 - RNA, 22 nt, Human
uaacaaagguggggcuuggcua

SEQ ID NO: 160541 - RNA, 22 nt, Human
uacagagacgacagcauccagc

SEQ ID NO: 160542 - RNA, 21 nt, Human
uacuccuauuugaaaacacug

SEQ ID NO: 160543 - RNA, 18 nt, Human
uagcuaaaugauucauuu

SEQ ID NO: 160544 - RNA, 21 nt, Human
uaggacagaugugccugaugc

SEQ ID NO: 160545 - RNA, 25 nt, Human
uaugccaaggugcuucuguguaugg

SEQ ID NO: 160546 - RNA, 19 nt, Human
ucacaagucacagagcuga

SEQ ID NO: 160547 - RNA, 21 nt, Human
ucagaaaaacuuuugaggaca

SEQ ID NO: 160548 - RNA, 21 nt, Human
ucaugcccgccgucucccggg

SEQ ID NO: 160549 - RNA, 21 nt, Human
ucauugacagagcugggggag

SEQ ID NO: 160550 - RNA, 25 nt, Human
uccaaaaaucugcugagcuguuucc

SEQ ID NO: 160551 - RNA, 21 nt, Human
uccccaguaaccuccaucaua

SEQ ID NO: 160552 - RNA, 19 nt, Human
uccccggggagggcgcggc

SEQ ID NO: 160553 - RNA, 19 nt, Human
ucccggaagaaagagcugu

SEQ ID NO: 160554 - RNA, 19 nt, Human
ucccugcucauucucagag

SEQ ID NO: 160555 - RNA, 19 nt, Human
ucuccaaaaaucugcugag

SEQ ID NO: 160556 - RNA, 19 nt, Human
ucucuggaucucccugcuc

SEQ ID NO: 160557 - RNA, 20 nt, Human
ucugcugagcuguuucccca

SEQ ID NO: 160558 - RNA, 21 nt, Human
ucugggaaagggccauguguu

SEQ ID NO: 160559 - RNA, 23 nt, Human
ugaaaacacugaguaaaagcaac

SEQ ID NO: 160560 - RNA, 19 nt, Human
ugaaagaaaccuccugggc

SEQ ID NO: 160561 - RNA, 26 nt, Human
ugaaagaaaccuccugggcagacacc

SEQ ID NO: 160562 - RNA, 20 nt, Human
ugaaaucacauccauccaca

SEQ ID NO: 160563 - RNA, 18 nt, Human
ugacaaagaaccgaggca

SEQ ID NO: 160564 - RNA, 21 nt, Human
ugacaaagaaccgaggcaucu

SEQ ID NO: 160565 - RNA, 21 nt, Human
ugacaagaauguccaugggug

SEQ ID NO: 160566 - RNA, 23 nt, Human
ugaguaaaagcaacugauggggg

SEQ ID NO: 160567 - RNA, 20 nt, Human
ugaugcaugccaggugugca

SEQ ID NO: 160568 - RNA, 22 nt, Human
ugauucugaugauggauccucg

SEQ ID NO: 160569 - RNA, 21 nt, Human
ugcacaaucuccugaaaucac

SEQ ID NO: 160570 - RNA, 21 nt, Human
ugcauguccuuccccagcugu

SEQ ID NO: 160571 - RNA, 20 nt, Human
uggaagaggucgaugccugg

SEQ ID NO: 160572 - RNA, 22 nt, Human
uggaggggggaaugcagaaagu

SEQ ID NO: 160573 - RNA, 19 nt, Human
uggcaaaagaggaugugag

SEQ ID NO: 160574 - RNA, 21 nt, Human
uggcaagacgguaugugcugg

SEQ ID NO: 160575 - RNA, 20 nt, Human
ugggagaaaagaagaaacug

SEQ ID NO: 160576 - RNA, 21 nt, Human
ugggagaaaagaagaaacugg

SEQ ID NO: 160577 - RNA, 21 nt, Human
ugggagggggugcugcguccc

SEQ ID NO: 160578 - RNA, 19 nt, Human
ugggcauuuugagaagaaa

SEQ ID NO: 160579 - RNA, 24 nt, Human
uggggggaucugggcuuugcugug

SEQ ID NO: 160580 - RNA, 20 nt, Human
uggggguggggccugugugc

SEQ ID NO: 160581 - RNA, 18 nt, Human
ugucaagggugucuaagu

SEQ ID NO: 160582 - RNA, 22 nt, Human
ugucucugccagcuguaggaca

SEQ ID NO: 160583 - RNA, 21 nt, Human
ugugaggaggugggagaggaa

SEQ ID NO: 160584 - RNA, 22 nt, Human
ugugauuaggugugcuggugcc

SEQ ID NO: 160585 - RNA, 24 nt, Human
ugugugcgagggaaagggcggccu

SEQ ID NO: 160586 - RNA, 19 nt, Human
uguuuugagugggugucgg

SEQ ID NO: 160587 - RNA, 21 nt, Human
uuagaauuaaaaaacaacaac

SEQ ID NO: 160588 - RNA, 26 nt, Human
uuagaauuaaaaaacaacaacaacaa

SEQ ID NO: 160589 - RNA, 23 nt, Human
uucaacuucuuucaugguuuuaa

SEQ ID NO: 160590 - RNA, 19 nt, Human
uuccaagggucugguuggu

SEQ ID NO: 160591 - RNA, 24 nt, Human
uugaaaacacugaguaaaagcaac

SEQ ID NO: 160592 - RNA, 24 nt, Human
uugcagccaaaggacauacaggac

SEQ ID NO: 160593 - RNA, 21 nt, Human
uuggaagacaguuuaggugau

SEQ ID NO: 160594 - RNA, 19 nt, Human
uugggggccugagcggagg

SEQ ID NO: 160595 - RNA, 19 nt, Human
uuggucuccaaaaaucugc

SEQ ID NO: 160596 - RNA, 20 nt, Human
aaaagguuucugggagugca

SEQ ID NO: 160597 - RNA, 18 nt, Human
aaacaaauggagcuccag

SEQ ID NO: 160598 - RNA, 22 nt, Human
aaacaaauggagcuccagaaau

SEQ ID NO: 160599 - RNA, 22 nt, Human
aacacucgagaucagcacccca

SEQ ID NO: 160600 - RNA, 20 nt, Human
aaggccaaccuugucacaga

SEQ ID NO: 160601 - RNA, 21 nt, Human
accccgagagcuggaggcggg

SEQ ID NO: 160602 - RNA, 18 nt, Human
acucgagaucagcacccc

SEQ ID NO: 160603 - RNA, 18 nt, Human
agaacagcaucagaaaac

SEQ ID NO: 160604 - RNA, 24 nt, Human
agagccccgccacaguggccgccc

SEQ ID NO: 160605 - RNA, 19 nt, Human
agguuucugggagugcaac

SEQ ID NO: 160606 - RNA, 22 nt, Human
auagagcgcccgccccucuccu

SEQ ID NO: 160607 - RNA, 20 nt, Human
caaggccaaccuugucacag

SEQ ID NO: 160608 - RNA, 19 nt, Human
cacaaucagaaaauaacac

SEQ ID NO: 160609 - RNA, 21 nt, Human
cagcaucagaaaacaaacuuc

SEQ ID NO: 160610 - RNA, 24 nt, Human
cauaccaccccuaggggggaagcc

SEQ ID NO: 160611 - RNA, 19 nt, Human
ccccaaacggcgacgaccc

SEQ ID NO: 160612 - RNA, 18 nt, Human
ccccgagagcuggaggcg

SEQ ID NO: 160613 - RNA, 20 nt, Human
cccgccccucuccugagggc

SEQ ID NO: 160614 - RNA, 20 nt, Human
cccggacuggcgacuaccgg

SEQ ID NO: 160615 - RNA, 19 nt, Human
ccgaggggccuggacccgg

SEQ ID NO: 160616 - RNA, 20 nt, Human
ccggagcugagggguagcug

SEQ ID NO: 160617 - RNA, 21 nt, Human
cgccacaguggccgcccugcc

SEQ ID NO: 160618 - RNA, 21 nt, Human
cgccccaaacggcgacgaccc

SEQ ID NO: 160619 - RNA, 19 nt, Human
cggggacggcggcggggcc

SEQ ID NO: 160620 - RNA, 22 nt, Human
cucaacaccacaaucagaaaau

SEQ ID NO: 160621 - RNA, 23 nt, Human
cuccuagagccgaccccgagagc

SEQ ID NO: 160622 - RNA, 21 nt, Human
cugguaagaacagcaucagaa

SEQ ID NO: 160623 - RNA, 23 nt, Human
gaaacggggaaagagccccgcca

SEQ ID NO: 160624 - RNA, 21 nt, Human
gacaucuguaguuuagaaaca

SEQ ID NO: 160625 - RNA, 19 nt, Human
gagccgaccccgagagcug

SEQ ID NO: 160626 - RNA, 21 nt, Human
gaguugacaucuguaguuuag

SEQ ID NO: 160627 - RNA, 23 nt, Human
gcagcucccgccccaaacggcga

SEQ ID NO: 160628 - RNA, 23 nt, Human
gcgaaacggggaaagagccccgc

SEQ ID NO: 160629 - RNA, 22 nt, Human
gggaaagagccccgccacagug

SEQ ID NO: 160630 - RNA, 19 nt, Human
uaccggagcugagggguag

SEQ ID NO: 160631 - RNA, 18 nt, Human
ucgagaucagcaccccaa

SEQ ID NO: 160632 - RNA, 22 nt, Human
ugagggcgccuccuagagccga

SEQ ID NO: 160633 - RNA, 24 nt, Human
uuuagaaacaaaaacaaauggagc

SEQ ID NO: 160634 - RNA, 20 nt, Human
aaaaacacacacaaaccaca

SEQ ID NO: 160635 - RNA, 24 nt, Human
aaaaacuaaaaaagcaaagccaac

SEQ ID NO: 160636 - RNA, 25 nt, Human
aaaaacuaaaaaagcaaagccaacu

SEQ ID NO: 160637 - RNA, 20 nt, Human
aaaaagcaaagccaacucaa

SEQ ID NO: 160638 - RNA, 23 nt, Human
aaaacuaaaaaagcaaagccaac

SEQ ID NO: 160639 - RNA, 24 nt, Human
aaaauccauucauucauucagaau

SEQ ID NO: 160640 - RNA, 19 nt, Human
aaacacacacaaaccacac

SEQ ID NO: 160641 - RNA, 23 nt, Human
aaagcaauauaaauuagaggcca

SEQ ID NO: 160642 - RNA, 20 nt, Human
aaaggccaucaucucccaag

SEQ ID NO: 160643 - RNA, 23 nt, Human
aaauccauucauucauucagaau

SEQ ID NO: 160644 - RNA, 20 nt, Human
aaccaauuccagcuucauaa

SEQ ID NO: 160645 - RNA, 25 nt, Human
aacuaaaaaagcaaagccaacucaa

SEQ ID NO: 160646 - RNA, 24 nt, Human
aagcaauauaaauuagaggccaag

SEQ ID NO: 160647 - RNA, 18 nt, Human
aagcacauuccacaguac

SEQ ID NO: 160648 - RNA, 21 nt, Human
aagcuaaggucuccuucucaa

SEQ ID NO: 160649 - RNA, 23 nt, Human
acacacacacugauccccacacc

SEQ ID NO: 160650 - RNA, 20 nt, Human
acaguuaauaaaagaaagag

SEQ ID NO: 160651 - RNA, 21 nt, Human
acauccaccuuaugaauggag

SEQ ID NO: 160652 - RNA, 19 nt, Human
acccugaaacgggugaaag

SEQ ID NO: 160653 - RNA, 26 nt, Human
acugauccccacaccguucucaaugc

SEQ ID NO: 160654 - RNA, 21 nt, Human
acuucagagcacccaccccuc

SEQ ID NO: 160655 - RNA, 21 nt, Human
acuuuauuaagaguauuggcu

SEQ ID NO: 160656 - RNA, 21 nt, Human
agaaaaagaauaagaacaaaa

SEQ ID NO: 160657 - RNA, 23 nt, Human
agaaaaagaauaagaacaaaaaa

SEQ ID NO: 160658 - RNA, 21 nt, Human
agaaaacccugaaacggguga

SEQ ID NO: 160659 - RNA, 24 nt, Human
agaaaggaaguauaaucccaaaaa

SEQ ID NO: 160660 - RNA, 27 nt, Human
agaaaggaaguauaaucccaaaaauau

SEQ ID NO: 160661 - RNA, 22 nt, Human
agagcccaggggccuucccuuu

SEQ ID NO: 160662 - RNA, 23 nt, Human
agaguuaggcugcuuugcaucua

SEQ ID NO: 160663 - RNA, 22 nt, Human
agcacagggggcccugacucca

SEQ ID NO: 160664 - RNA, 21 nt, Human
agccaaaugaauacuauggga

SEQ ID NO: 160665 - RNA, 20 nt, Human
agcuaaggucuccuucucaa

SEQ ID NO: 160666 - RNA, 21 nt, Human
aggcgggcagaggcggaggcg

SEQ ID NO: 160667 - RNA, 21 nt, Human
aggcgggcagaggcggaggcg

SEQ ID NO: 160668 - RNA, 21 nt, Human
aggcgggcagaggcggaggcg

SEQ ID NO: 160669 - RNA, 19 nt, Human
agguguuuggcacccaaaa

SEQ ID NO: 160670 - RNA, 18 nt, Human
agguuuacuuuauaggag

SEQ ID NO: 160671 - RNA, 19 nt, Human
agugucucaagcacagggg

SEQ ID NO: 160672 - RNA, 24 nt, Human
auaaaaacacuguaugaauacugc

SEQ ID NO: 160673 - RNA, 22 nt, Human
aucccaaaaauauuacuaaaac

SEQ ID NO: 160674 - RNA, 22 nt, Human
augcaaaaacaacaaaaaaucc

SEQ ID NO: 160675 - RNA, 23 nt, Human
augcaaaaacaacaaaaaaucca

SEQ ID NO: 160676 - RNA, 19 nt, Human
auucaaagguugucugcau

SEQ ID NO: 160677 - RNA, 24 nt, Human
caaaaacauaaauuaauuuaguaa

SEQ ID NO: 160678 - RNA, 19 nt, Human
caaaaggagaaugcuaacu

SEQ ID NO: 160679 - RNA, 22 nt, Human
caaagcaauauaaauuagaggc

SEQ ID NO: 160680 - RNA, 24 nt, Human
caaagcaauauaaauuagaggcca

SEQ ID NO: 160681 - RNA, 26 nt, Human
caaaggacaaaucagagcccaggggc

SEQ ID NO: 160682 - RNA, 21 nt, Human
caaaggccaucaucucccaag

SEQ ID NO: 160683 - RNA, 18 nt, Human
caaagugcaaagcaauau

SEQ ID NO: 160684 - RNA, 19 nt, Human
caacaacaaaauaaaaaca

SEQ ID NO: 160685 - RNA, 22 nt, Human
caagacuagaaaacccugaaac

SEQ ID NO: 160686 - RNA, 20 nt, Human
cacacaaaccacacacacgc

SEQ ID NO: 160687 - RNA, 23 nt, Human
cacacaaaccacacacacgcaau

SEQ ID NO: 160688 - RNA, 27 nt, Human
cacacacgcaaugacaacaacaaaauu

SEQ ID NO: 160689 - RNA, 25 nt, Human
cacacgcaaugacaacaacaaaauu

SEQ ID NO: 160690 - RNA, 22 nt, Human
cacagcagcagcugacaccaga

SEQ ID NO: 160691 - RNA, 20 nt, Human
caccguucucaaugcaaagg

SEQ ID NO: 160692 - RNA, 25 nt, Human
cacuccacuucagagcacccacccc

SEQ ID NO: 160693 - RNA, 19 nt, Human
cagagcccaggggccuucc

SEQ ID NO: 160694 - RNA, 21 nt, Human
cagcagcagcugacaccagag

SEQ ID NO: 160695 - RNA, 24 nt, Human
cagcagcgaacggcccgggcggag

SEQ ID NO: 160696 - RNA, 24 nt, Human
cagcagcgaacggcccgggcggag

SEQ ID NO: 160697 - RNA, 24 nt, Human
cagcagcgaacggcccgggcggag

SEQ ID NO: 160698 - RNA, 25 nt, Human
caggaugcaugaauuccagagccaa

SEQ ID NO: 160699 - RNA, 20 nt, Human
caugcaaaaacaacaaaaaa

SEQ ID NO: 160700 - RNA, 22 nt, Human
caugcaaaaacaacaaaaaauc

SEQ ID NO: 160701 - RNA, 25 nt, Human
caugcaaaaacaacaaaaaauccau

SEQ ID NO: 160702 - RNA, 23 nt, Human
ccacaguacaaagcugucaugaa

SEQ ID NO: 160703 - RNA, 20 nt, Human
ccagaguauggcugggaauu

SEQ ID NO: 160704 - RNA, 19 nt, Human
cccaaaaauauuacuaaaa

SEQ ID NO: 160705 - RNA, 19 nt, Human
cccaccccucagcaugggc

SEQ ID NO: 160706 - RNA, 22 nt, Human
cccacucuagcugccagcccgc

SEQ ID NO: 160707 - RNA, 22 nt, Human
cccacucuagcugccagcccgc

SEQ ID NO: 160708 - RNA, 19 nt, Human
cccauggcuaagugcgaac

SEQ ID NO: 160709 - RNA, 21 nt, Human
cccccucccuucccccugggc

SEQ ID NO: 160710 - RNA, 18 nt, Human
ccccgccucgcucucccc

SEQ ID NO: 160711 - RNA, 18 nt, Human
ccccgccucgcucucccc

SEQ ID NO: 160712 - RNA, 18 nt, Human
ccccgccucgcucucccc

SEQ ID NO: 160713 - RNA, 20 nt, Human
ccccgccucgcucuccccgc

SEQ ID NO: 160714 - RNA, 20 nt, Human
ccccgccucgcucuccccgc

SEQ ID NO: 160715 - RNA, 20 nt, Human
ccccgccucgcucuccccgc

SEQ ID NO: 160716 - RNA, 23 nt, Human
ccccgcgcagcagcgaacggccc

SEQ ID NO: 160717 - RNA, 23 nt, Human
ccccgcgcagcagcgaacggccc

SEQ ID NO: 160718 - RNA, 23 nt, Human
ccccgcgcagcagcgaacggccc

SEQ ID NO: 160719 - RNA, 21 nt, Human
ccccucagcaugggccucuga

SEQ ID NO: 160720 - RNA, 19 nt, Human
ccccugcccccucccuucc

SEQ ID NO: 160721 - RNA, 20 nt, Human
ccccugcccccucccuuccc

SEQ ID NO: 160722 - RNA, 19 nt, Human
ccccugggcuuuccuaacc

SEQ ID NO: 160723 - RNA, 20 nt, Human
cccucagcaugggccucuga

SEQ ID NO: 160724 - RNA, 21 nt, Human
cccuggacauucuggguaggu

SEQ ID NO: 160725 - RNA, 18 nt, Human
cccugggcuuuccuaacc

SEQ ID NO: 160726 - RNA, 18 nt, Human
ccgcccgggccgccggca

SEQ ID NO: 160727 - RNA, 18 nt, Human
ccgcccgggccgccggca

SEQ ID NO: 160728 - RNA, 23 nt, Human
ccgccggcagcuccgcccucccc

SEQ ID NO: 160729 - RNA, 23 nt, Human
ccggcggccccgccucgcucucc

SEQ ID NO: 160730 - RNA, 23 nt, Human
ccggcggccccgccucgcucucc

SEQ ID NO: 160731 - RNA, 20 nt, Human
ccucugaaccagccugaccu

SEQ ID NO: 160732 - RNA, 22 nt, Human
ccugcaggcuccaacacaccag

SEQ ID NO: 160733 - RNA, 28 nt, Human
ccugcaggcuccaacacaccagcaggcc

SEQ ID NO: 160734 - RNA, 23 nt, Human
ccugcuggggccacagcagcagc

SEQ ID NO: 160735 - RNA, 20 nt, Human
cgccucgcucuccccgcgca

SEQ ID NO: 160736 - RNA, 20 nt, Human
cgccucgcucuccccgcgca

SEQ ID NO: 160737 - RNA, 20 nt, Human
cgccucgcucuccccgcgca

SEQ ID NO: 160738 - RNA, 22 nt, Human
cggcccgggcggaggaggcgac

SEQ ID NO: 160739 - RNA, 22 nt, Human
cggcccgggcggaggaggcgac

SEQ ID NO: 160740 - RNA, 22 nt, Human
cggcccgggcggaggaggcgac

SEQ ID NO: 160741 - RNA, 24 nt, Human
cggcccgggcggaggaggcgacgg

SEQ ID NO: 160742 - RNA, 24 nt, Human
cggcccgggcggaggaggcgacgg

SEQ ID NO: 160743 - RNA, 24 nt, Human
cggcccgggcggaggaggcgacgg

SEQ ID NO: 160744 - RNA, 22 nt, Human
cggcggccccgccucgcucucc

SEQ ID NO: 160745 - RNA, 21 nt, Human
cuccccugcccccucccuucc

SEQ ID NO: 160746 - RNA, 21 nt, Human
cucugaaccagccugaccugc

SEQ ID NO: 160747 - RNA, 18 nt, Human
cuggacauucuggguagg

SEQ ID NO: 160748 - RNA, 20 nt, Human
cuucagagcacccaccccuc

SEQ ID NO: 160749 - RNA, 19 nt, Human
cuugagcccagcccauggc

SEQ ID NO: 160750 - RNA, 20 nt, Human
cuugagcccagcccauggcc

SEQ ID NO: 160751 - RNA, 29 nt, Human
gaaaaacuaaaaaagcaaagccaacucag

SEQ ID NO: 160752 - RNA, 27 nt, Human
gagaaaaagaauaagaacaaaaaaugu

SEQ ID NO: 160753 - RNA, 18 nt, Human
gagcccaggggccuuccc

SEQ ID NO: 160754 - RNA, 23 nt, Human
gagcccaggggccuucccuuuag

SEQ ID NO: 160755 - RNA, 23 nt, Human
gagccggaaucagaggugagaaa

SEQ ID NO: 160756 - RNA, 22 nt, Human
gaguuaggcugcuuugcaucua

SEQ ID NO: 160757 - RNA, 26 nt, Human
gccccggcggccccgccucgcucucc

SEQ ID NO: 160758 - RNA, 26 nt, Human
gccccggcggccccgccucgcucucc

SEQ ID NO: 160759 - RNA, 26 nt, Human
gccccggcggccccgccucgcucucc

SEQ ID NO: 160760 - RNA, 18 nt, Human
gccuccuccccugccccc

SEQ ID NO: 160761 - RNA, 18 nt, Human
gccucgcucuccccgcgc

SEQ ID NO: 160762 - RNA, 21 nt, Human
gccucgcucuccccgcgcagc

SEQ ID NO: 160763 - RNA, 21 nt, Human
gccucgcucuccccgcgcagc

SEQ ID NO: 160764 - RNA, 21 nt, Human
gccucgcucuccccgcgcagc

SEQ ID NO: 160765 - RNA, 24 nt, Human
gcggaggcgggcagaggcggaggc

SEQ ID NO: 160766 - RNA, 24 nt, Human
gcggaggcgggcagaggcggaggc

SEQ ID NO: 160767 - RNA, 20 nt, Human
gcggccccgccucgcucucc

SEQ ID NO: 160768 - RNA, 18 nt, Human
gcgggcagaggcggaggc

SEQ ID NO: 160769 - RNA, 18 nt, Human
ggacaaaucagagcccag

SEQ ID NO: 160770 - RNA, 22 nt, Human
ggaggcgggcagaggcggaggc

SEQ ID NO: 160771 - RNA, 22 nt, Human
ggaggcgggcagaggcggaggc

SEQ ID NO: 160772 - RNA, 22 nt, Human
ggaggcgggcagaggcggaggc

SEQ ID NO: 160773 - RNA, 22 nt, Human
ggaugccaacguccuuuccaug

SEQ ID NO: 160774 - RNA, 19 nt, Human
ggcgacggcggaggcgggc

SEQ ID NO: 160775 - RNA, 19 nt, Human
ggcgacggcggaggcgggc

SEQ ID NO: 160776 - RNA, 19 nt, Human
ggcgacggcggaggcgggc

SEQ ID NO: 160777 - RNA, 21 nt, Human
ggcggccccgccucgcucucc

SEQ ID NO: 160778 - RNA, 21 nt, Human
ggcggccccgccucgcucucc

SEQ ID NO: 160779 - RNA, 20 nt, Human
gggaaggaaacgggcuucug

SEQ ID NO: 160780 - RNA, 19 nt, Human
gggcagaggcggaggcggc

SEQ ID NO: 160781 - RNA, 19 nt, Human
gggcagaggcggaggcggc

SEQ ID NO: 160782 - RNA, 19 nt, Human
gggcagaggcggaggcggc

SEQ ID NO: 160783 - RNA, 18 nt, Human
gggccucugaaccagccu

SEQ ID NO: 160784 - RNA, 19 nt, Human
gggcggaggaggcgacggc

SEQ ID NO: 160785 - RNA, 19 nt, Human
gggcggaggaggcgacggc

SEQ ID NO: 160786 - RNA, 19 nt, Human
gggcggaggaggcgacggc

SEQ ID NO: 160787 - RNA, 26 nt, Human
guacauuauaucuacaugcgaauaca

SEQ ID NO: 160788 - RNA, 20 nt, Human
gucuccuucucaaaggagag

SEQ ID NO: 160789 - RNA, 24 nt, Human
uaaaacaagauucucauuaaaaac

SEQ ID NO: 160790 - RNA, 23 nt, Human
uaaaagaaagagcuauauuaccu

SEQ ID NO: 160791 - RNA, 21 nt, Human
uaaaauguuauugacauuccu

SEQ ID NO: 160792 - RNA, 21 nt, Human
uaagcacauuccacaguacaa

SEQ ID NO: 160793 - RNA, 24 nt, Human
uacccauacucgauuuauugacau

SEQ ID NO: 160794 - RNA, 21 nt, Human
uacugcaggaaggguucuagg

SEQ ID NO: 160795 - RNA, 18 nt, Human
uagaaaacccugaaacgg

SEQ ID NO: 160796 - RNA, 18 nt, Human
uagcaaaauaaaguccag

SEQ ID NO: 160797 - RNA, 22 nt, Human
uagccaguaguucaagacuaga

SEQ ID NO: 160798 - RNA, 21 nt, Human
uagcugaaguaacaauugcau

SEQ ID NO: 160799 - RNA, 19 nt, Human
uaggaugaaaaguggucaa

SEQ ID NO: 160800 - RNA, 24 nt, Human
uagguguuuggcacccaaaauuuc

SEQ ID NO: 160801 - RNA, 20 nt, Human
uagugucucaagcacagggg

SEQ ID NO: 160802 - RNA, 21 nt, Human
uauguacauuauaucuacaug

SEQ ID NO: 160803 - RNA, 23 nt, Human
uauguacauuauaucuacaugcg

SEQ ID NO: 160804 - RNA, 31 nt, Human
uccagagccaagacagcccgucaacagggcc

SEQ ID NO: 160805 - RNA, 20 nt, Human
uccagaguauggcugggaau

SEQ ID NO: 160806 - RNA, 18 nt, Human
uccccugcccccucccuu

SEQ ID NO: 160807 - RNA, 21 nt, Human
ucccuuaggcauuugguagcc

SEQ ID NO: 160808 - RNA, 20 nt, Human
uccuccccugcccccucccu

SEQ ID NO: 160809 - RNA, 19 nt, Human
ucuacaugcgaauacagua

SEQ ID NO: 160810 - RNA, 18 nt, Human
ucuccuucucaaaggaga

SEQ ID NO: 160811 - RNA, 21 nt, Human
ucugcauauucaaaggccauc

SEQ ID NO: 160812 - RNA, 24 nt, Human
ucuuaauaucaaaccaaagugcaa

SEQ ID NO: 160813 - RNA, 18 nt, Human
ugaaaaguggucaaagcu

SEQ ID NO: 160814 - RNA, 19 nt, Human
ugaaagcccuggacauucu

SEQ ID NO: 160815 - RNA, 21 nt, Human
ugaaccagccugaccugcccu

SEQ ID NO: 160816 - RNA, 22 nt, Human
ugaaccagccugaccugcccug

SEQ ID NO: 160817 - RNA, 21 nt, Human
ugaacgaacucccuuaggcau

SEQ ID NO: 160818 - RNA, 24 nt, Human
ugaagaguuaggcugcuuugcauc

SEQ ID NO: 160819 - RNA, 19 nt, Human
ugacagcgaagccaaauga

SEQ ID NO: 160820 - RNA, 21 nt, Human
ugagguuaaacuguuauguac

SEQ ID NO: 160821 - RNA, 19 nt, Human
ugccuccuccccugccccc

SEQ ID NO: 160822 - RNA, 23 nt, Human
uggaaacaauggcgaagggcaaa

SEQ ID NO: 160823 - RNA, 18 nt, Human
uggcacccaaaauuucac

SEQ ID NO: 160824 - RNA, 20 nt, Human
uggggccacagcagcagcug

SEQ ID NO: 160825 - RNA, 19 nt, Human
ugguagauaauauaacuga

SEQ ID NO: 160826 - RNA, 20 nt, Human
ugguuagcaaaauaaagucc

SEQ ID NO: 160827 - RNA, 22 nt, Human
ugugaacgaacucccuuaggca

SEQ ID NO: 160828 - RNA, 22 nt, Human
uuaaaagaaaaacuaaaaaagc

SEQ ID NO: 160829 - RNA, 22 nt, Human
uuauguacauuauaucuacaug

SEQ ID NO: 160830 - RNA, 22 nt, Human
uucacuccacuucagagcaccc

SEQ ID NO: 160831 - RNA, 23 nt, Human
uucacuccacuucagagcaccca

SEQ ID NO: 160832 - RNA, 23 nt, Human
uucagagcacccaccccucagca

SEQ ID NO: 160833 - RNA, 19 nt, Human
uucuggguagguguuuggc

SEQ ID NO: 160834 - RNA, 21 nt, Human
uuggcaaacauaauuaauuac

SEQ ID NO: 160835 - RNA, 20 nt, Human
uuuaaaauguuauugacauu

SEQ ID NO: 160836 - RNA, 18 nt, Human
aaaagaacaggcuagcag

SEQ ID NO: 160837 - RNA, 21 nt, Human
aaaaugacuuuuuguugcaga

SEQ ID NO: 160838 - RNA, 21 nt, Human
aauaaugagagagaacggaga

SEQ ID NO: 160839 - RNA, 18 nt, Human
aaugagagagaacggaga

SEQ ID NO: 160840 - RNA, 20 nt, Human
acuaucagaagaugcaaagg

SEQ ID NO: 160841 - RNA, 20 nt, Human
agaaaauaaagaaauaauug

SEQ ID NO: 160842 - RNA, 28 nt, Human
agggaauaaugagagagaaccgguaccc

SEQ ID NO: 160843 - RNA, 24 nt, Human
augagacagcagacgccucucuug

SEQ ID NO: 160844 - RNA, 20 nt, Human
caagccaacauccugcacca

SEQ ID NO: 160845 - RNA, 26 nt, Human
caaucuguugccccaagccaacaucc

SEQ ID NO: 160846 - RNA, 19 nt, Human
cagcuugacugagaagaac

SEQ ID NO: 160847 - RNA, 21 nt, Human
cagcuugacugagaagaacuc

SEQ ID NO: 160848 - RNA, 21 nt, Human
cagggggaagggcagggagua

SEQ ID NO: 160849 - RNA, 18 nt, Human
caguuaugguuugucauc

SEQ ID NO: 160850 - RNA, 18 nt, Human
ccccaagccaacauccug

SEQ ID NO: 160851 - RNA, 19 nt, Human
ccccaagccaacauccugc

SEQ ID NO: 160852 - RNA, 20 nt, Human
cccucagucaaaagugaagc

SEQ ID NO: 160853 - RNA, 21 nt, Human
ccugguuugauuuagaaaguc

SEQ ID NO: 160854 - RNA, 22 nt, Human
cucgagggaauaaugagagaga

SEQ ID NO: 160855 - RNA, 21 nt, Human
cugcccaaugaccacuggaga

SEQ ID NO: 160856 - RNA, 21 nt, Human
cuguaggucuuuucaaucuuu

SEQ ID NO: 160857 - RNA, 25 nt, Human
cuuuuuguugcagaugcucucuaau

SEQ ID NO: 160858 - RNA, 24 nt, Human
gacuuuuuguugcagaugcucucu

SEQ ID NO: 160859 - RNA, 18 nt, Human
gagaagauuauuggagga

SEQ ID NO: 160860 - RNA, 22 nt, Human
gcaaagcugcccucagucaaaa

SEQ ID NO: 160861 - RNA, 21 nt, Human
gcagggaguauaucgucuaca

SEQ ID NO: 160862 - RNA, 19 nt, Human
gcccaaugaccacuggaga

SEQ ID NO: 160863 - RNA, 24 nt, Human
uagaaagucaaccaguacuuguuu

SEQ ID NO: 160864 - RNA, 22 nt, Human
ucagaagaugcaaagguuuuca

SEQ ID NO: 160865 - RNA, 28 nt, Human
ucuuuucuuuuuuucuuuuugcaggggg

SEQ ID NO: 160866 - RNA, 24 nt, Human
ugagaagaacucgagggaauaaug

SEQ ID NO: 160867 - RNA, 25 nt, Human
ugagagagaacggagaagauuauug

SEQ ID NO: 160868 - RNA, 26 nt, Human
ugagagagaacggagaagauuauugg

SEQ ID NO: 160869 - RNA, 23 nt, Human
uguaggucuuuucaaucuguugc

SEQ ID NO: 160870 - RNA, 21 nt, Human
uguugccccaagccaacaucc

SEQ ID NO: 160871 - RNA, 19 nt, Human
uguuucagcauuaacacug

SEQ ID NO: 160872 - RNA, 19 nt, Human
uucagcauuaacacugccc

SEQ ID NO: 160873 - RNA, 24 nt, Human
uucuucuuuuccuucuuagucugu

SEQ ID NO: 160874 - RNA, 23 nt, Human
uugauauuauugcaguuccuuuc

SEQ ID NO: 160875 - RNA, 18 nt, Human
uuuguugcagaugcucuc

SEQ ID NO: 160876 - RNA, 23 nt, Human
uuuucuuuuugcagggggaaggg

SEQ ID NO: 160877 - RNA, 22 nt, Human
aaacaggauauaaaaaaucaga

SEQ ID NO: 160878 - RNA, 23 nt, Human
aaacaggauauaaaaaaucagaa

SEQ ID NO: 160879 - RNA, 22 nt, Human
aaacugaguuagcccuucuguu

SEQ ID NO: 160880 - RNA, 18 nt, Human
aaagagaagaacaaugaa

SEQ ID NO: 160881 - RNA, 24 nt, Human
aaagagcaagacucuaucccggaa

SEQ ID NO: 160882 - RNA, 20 nt, Human
aaauaccuaaucacaucucu

SEQ ID NO: 160883 - RNA, 27 nt, Human
aacaaugaaggaagaaaagggagggcc

SEQ ID NO: 160884 - RNA, 19 nt, Human
aacacagugaaaccccauc

SEQ ID NO: 160885 - RNA, 20 nt, Human
aacacagugaaaccccaucu

SEQ ID NO: 160886 - RNA, 20 nt, Human
aacacagugaaaccccaucu

SEQ ID NO: 160887 - RNA, 21 nt, Human
aacacagugaaaccccaucuc

SEQ ID NO: 160888 - RNA, 21 nt, Human
aacacagugaaaccccaucuc

SEQ ID NO: 160889 - RNA, 24 nt, Human
aacagagugagacucugucucaaa

SEQ ID NO: 160890 - RNA, 19 nt, Human
aacauggugaaacccuguc

SEQ ID NO: 160891 - RNA, 20 nt, Human
aacauggugaaacccugucu

SEQ ID NO: 160892 - RNA, 23 nt, Human
aacccugucuggagaacucuagc

SEQ ID NO: 160893 - RNA, 23 nt, Human
aagguggguggaucaccugaggu

SEQ ID NO: 160894 - RNA, 25 nt, Human
aagguggguggaucaccugagguca

SEQ ID NO: 160895 - RNA, 25 nt, Human
aaucacuugaacccaagagguucaa

SEQ ID NO: 160896 - RNA, 18 nt, Human
aauugcuugaaccuggga

SEQ ID NO: 160897 - RNA, 23 nt, Human
aauugcuugaaccugggaggcga

SEQ ID NO: 160898 - RNA, 23 nt, Human
acagagccagacucugucucaaa

SEQ ID NO: 160899 - RNA, 24 nt, Human
acagagccagacucugucucaaaa

SEQ ID NO: 160900 - RNA, 21 nt, Human
acagagugagacucugucuca

SEQ ID NO: 160901 - RNA, 23 nt, Human
acagagugagacucugucucaaa

SEQ ID NO: 160902 - RNA, 19 nt, Human
acaggcucacgccaccacg

SEQ ID NO: 160903 - RNA, 22 nt, Human
acaggcucacgccaccacgccc

SEQ ID NO: 160904 - RNA, 24 nt, Human
acccaggcuggagugcaauggcgu

SEQ ID NO: 160905 - RNA, 24 nt, Human
acccaggcuggagugcaauggcgu

SEQ ID NO: 160906 - RNA, 24 nt, Human
accccaucucuacuaaaaauacaa

SEQ ID NO: 160907 - RNA, 22 nt, Human
acccugucuggagaacucuagc

SEQ ID NO: 160908 - RNA, 24 nt, Human
accugaggucaggaguucgagacc

SEQ ID NO: 160909 - RNA, 22 nt, Human
acgccaccacgcccggccaggc

SEQ ID NO: 160910 - RNA, 24 nt, Human
acugcacuccagccugggugacag

SEQ ID NO: 160911 - RNA, 26 nt, Human
acugcacuccagccugggugacagag

SEQ ID NO: 160912 - RNA, 26 nt, Human
acugcacuccagccuuggcgaaagag

SEQ ID NO: 160913 - RNA, 19 nt, Human
acugcacuccagccuuggg

SEQ ID NO: 160914 - RNA, 24 nt, Human
acugcacuucagccugggugacag

SEQ ID NO: 160915 - RNA, 26 nt, Human
acugcacuucagccugggugacagag

SEQ ID NO: 160916 - RNA, 18 nt, Human
agagcaagacucuauccc

SEQ ID NO: 160917 - RNA, 18 nt, Human
agagccagacucugucuc

SEQ ID NO: 160918 - RNA, 21 nt, Human
agagguucaaugagccgagau

SEQ ID NO: 160919 - RNA, 23 nt, Human
agagguucaaugagccgagauug

SEQ ID NO: 160920 - RNA, 24 nt, Human
agcacuuugggaggccaagguggg

SEQ ID NO: 160921 - RNA, 24 nt, Human
agcacuuugggaggccgaggcagg

SEQ ID NO: 160922 - RNA, 24 nt, Human
agccuggccaacacagugaaaccc

SEQ ID NO: 160923 - RNA, 22 nt, Human
agccuggccaacauggugaaac

SEQ ID NO: 160924 - RNA, 24 nt, Human
agccuggccaacauggugaaaccc

SEQ ID NO: 160925 - RNA, 24 nt, Human
agccugggugacagagccagacuc

SEQ ID NO: 160926 - RNA, 23 nt, Human
agcugggugcagugguaugugcc

SEQ ID NO: 160927 - RNA, 20 nt, Human
aggaaguaugaggacagagc

SEQ ID NO: 160928 - RNA, 22 nt, Human
aggcaggagaauugcuugaacc

SEQ ID NO: 160929 - RNA, 24 nt, Human
aggcaggagaauugcuugaaccug

SEQ ID NO: 160930 - RNA, 18 nt, Human
aggcagguggaucaccug

SEQ ID NO: 160931 - RNA, 21 nt, Human
aggcagguggaucaccugagg

SEQ ID NO: 160932 - RNA, 22 nt, Human
aggcagguggaucaccugaggu

SEQ ID NO: 160933 - RNA, 21 nt, Human
aggccaagguggguggaucac

SEQ ID NO: 160934 - RNA, 21 nt, Human
aggccgaggcagguggaucac

SEQ ID NO: 160935 - RNA, 19 nt, Human
aggcgaagguugcagugag

SEQ ID NO: 160936 - RNA, 24 nt, Human
aggcgaagguugcagugagucgag

SEQ ID NO: 160937 - RNA, 24 nt, Human
aggcgcgguggcucacgccuguaa

SEQ ID NO: 160938 - RNA, 24 nt, Human
aggcgugguggcucaugccuauaa

SEQ ID NO: 160939 - RNA, 24 nt, Human
agugauucuccugccucagccucc

SEQ ID NO: 160940 - RNA, 23 nt, Human
agugcaauggcgugaucuuggcu

SEQ ID NO: 160941 - RNA, 23 nt, Human
agugcaauggcgugaucuuggcu

SEQ ID NO: 160942 - RNA, 24 nt, Human
agugcaauggcgugaucuuggcuc

SEQ ID NO: 160943 - RNA, 24 nt, Human
agugcaauggcgugaucuuggcuc

SEQ ID NO: 160944 - RNA, 24 nt, Human
agugguaugugccuguaauuccag

SEQ ID NO: 160945 - RNA, 24 nt, Human
aucaccugaggucaggaguucgag

SEQ ID NO: 160946 - RNA, 21 nt, Human
aucaccugaggucgggaguuc

SEQ ID NO: 160947 - RNA, 25 nt, Human
aucgugccacugcacuccagccuug

SEQ ID NO: 160948 - RNA, 23 nt, Human
augaaacaaacugaguuagcccu

SEQ ID NO: 160949 - RNA, 19 nt, Human
augccuauaaucucagcac

SEQ ID NO: 160950 - RNA, 20 nt, Human
augugccuguaauuccagcu

SEQ ID NO: 160951 - RNA, 24 nt, Human
auugcuccacugcacuccagccug

SEQ ID NO: 160952 - RNA, 24 nt, Human
auugcuccacugcacuucagccug

SEQ ID NO: 160953 - RNA, 21 nt, Human
caacauggugaaacccugucu

SEQ ID NO: 160954 - RNA, 22 nt, Human
caacauggugaaacccugucug

SEQ ID NO: 160955 - RNA, 24 nt, Human
caagguggguggaucaccugaggu

SEQ ID NO: 160956 - RNA, 26 nt, Human
caagguggguggaucaccugagguca

SEQ ID NO: 160957 - RNA, 22 nt, Human
caagugauucuccugccucagc

SEQ ID NO: 160958 - RNA, 23 nt, Human
cacaucuauugccucacaacaaa

SEQ ID NO: 160959 - RNA, 23 nt, Human
caccugaggucaggaguucgaga

SEQ ID NO: 160960 - RNA, 19 nt, Human
cacgccaccacgcccggcc

SEQ ID NO: 160961 - RNA, 24 nt, Human
cacgccuguaaucccagcacuuug

SEQ ID NO: 160962 - RNA, 27 nt, Human
cacggccucagccccguugccgguucc

SEQ ID NO: 160963 - RNA, 22 nt, Human
cacuccagccugggugacagag

SEQ ID NO: 160964 - RNA, 23 nt, Human
cacuccagccugggugacagagc

SEQ ID NO: 160965 - RNA, 23 nt, Human
cacuccagccuuggcgaaagagc

SEQ ID NO: 160966 - RNA, 23 nt, Human
cacugcaacagcugccuccuggg

SEQ ID NO: 160967 - RNA, 23 nt, Human
cacugcaacagcugccuccuggg

SEQ ID NO: 160968 - RNA, 19 nt, Human
cacugcacuccagccuggg

SEQ ID NO: 160969 - RNA, 21 nt, Human
cacugcacuccagccugggug

SEQ ID NO: 160970 - RNA, 22 nt, Human
cacugcacuccagccuggguga

SEQ ID NO: 160971 - RNA, 23 nt, Human
cacugcacuccagccugggugac

SEQ ID NO: 160972 - RNA, 24 nt, Human
cacugcacuccagccugggugaca

SEQ ID NO: 160973 - RNA, 25 nt, Human
cacugcacuccagccugggugacag

SEQ ID NO: 160974 - RNA, 19 nt, Human
cacugcacuccagccuugg

SEQ ID NO: 160975 - RNA, 20 nt, Human
cacugcacuccagccuuggc

SEQ ID NO: 160976 - RNA, 21 nt, Human
cacugcacuccagccuuggcg

SEQ ID NO: 160977 - RNA, 22 nt, Human
cacugcacuccagccuuggcga

SEQ ID NO: 160978 - RNA, 27 nt, Human
cacugcacuccagccuuggcgaaagag

SEQ ID NO: 160979 - RNA, 19 nt, Human
cacugcacuucagccuggg

SEQ ID NO: 160980 - RNA, 19 nt, Human
cacugcacuucagccuggg

SEQ ID NO: 160981 - RNA, 19 nt, Human
cacugcacuucagccuggg

SEQ ID NO: 160982 - RNA, 21 nt, Human
cacugcacuucagccugggug

SEQ ID NO: 160983 - RNA, 22 nt, Human
cacugcacuucagccuggguga

SEQ ID NO: 160984 - RNA, 23 nt, Human
cacugcacuucagccugggugac

SEQ ID NO: 160985 - RNA, 24 nt, Human
cacugcacuucagccugggugaca

SEQ ID NO: 160986 - RNA, 24 nt, Human
cacugcacuucagccugggugaca

SEQ ID NO: 160987 - RNA, 25 nt, Human
cacugcacuucagccugggugacag

SEQ ID NO: 160988 - RNA, 22 nt, Human
cacuucagccugggugacagag

SEQ ID NO: 160989 - RNA, 23 nt, Human
cacuucagccugggugacagagc

SEQ ID NO: 160990 - RNA, 21 nt, Human
cagcacuuugggaggccaagg

SEQ ID NO: 160991 - RNA, 24 nt, Human
cagcacuuugggaggccaaggugg

SEQ ID NO: 160992 - RNA, 24 nt, Human
cagcacuuugggaggccgaggcag

SEQ ID NO: 160993 - RNA, 26 nt, Human
cagcacuuugggaggccgaggcaggu

SEQ ID NO: 160994 - RNA, 20 nt, Human
cagccuccugaguagcuggg

SEQ ID NO: 160995 - RNA, 24 nt, Human
cagguggaucaccugaggucggga

SEQ ID NO: 160996 - RNA, 20 nt, Human
caugccuauaaucucagcac

SEQ ID NO: 160997 - RNA, 24 nt, Human
caugccuauaaucucagcacuuug

SEQ ID NO: 160998 - RNA, 18 nt, Human
ccacugcacuccagccug

SEQ ID NO: 160999 - RNA, 20 nt, Human
ccacugcacuccagccuggg

SEQ ID NO: 161000 - RNA, 20 nt, Human
ccacugcacuccagccuggg

SEQ ID NO: 161001 - RNA, 21 nt, Human
ccacugcacuccagccugggu

SEQ ID NO: 161002 - RNA, 23 nt, Human
ccacugcacuccagccuggguga

SEQ ID NO: 161003 - RNA, 24 nt, Human
ccacugcacuccagccugggugac

SEQ ID NO: 161004 - RNA, 20 nt, Human
ccacugcacuccagccuugg

SEQ ID NO: 161005 - RNA, 20 nt, Human
ccacugcacuccagccuugg

SEQ ID NO: 161006 - RNA, 21 nt, Human
ccacugcacuccagccuuggc

SEQ ID NO: 161007 - RNA, 18 nt, Human
ccacugcacuucagccug

SEQ ID NO: 161008 - RNA, 20 nt, Human
ccacugcacuucagccuggg

SEQ ID NO: 161009 - RNA, 20 nt, Human
ccacugcacuucagccuggg

SEQ ID NO: 161010 - RNA, 20 nt, Human
ccacugcacuucagccuggg

SEQ ID NO: 161011 - RNA, 20 nt, Human
ccacugcacuucagccuggg

SEQ ID NO: 161012 - RNA, 21 nt, Human
ccacugcacuucagccugggu

SEQ ID NO: 161013 - RNA, 24 nt, Human
ccacugcacuucagccugggugac

SEQ ID NO: 161014 - RNA, 20 nt, Human
ccuauaaucucagcacuuug

SEQ ID NO: 161015 - RNA, 22 nt, Human
ccuauaaucucagcacuuuggg

SEQ ID NO: 161016 - RNA, 24 nt, Human
ccuccuggguucaagugauucucc

SEQ ID NO: 161017 - RNA, 24 nt, Human
ccuccuggguucaagugauucucc

SEQ ID NO: 161018 - RNA, 22 nt, Human
ccugaggucaggaguucgagac

SEQ ID NO: 161019 - RNA, 22 nt, Human
ccugaggucgggaguucgagac

SEQ ID NO: 161020 - RNA, 24 nt, Human
ccugaguagcugggacgacaggcu

SEQ ID NO: 161021 - RNA, 23 nt, Human
ccugccucagccuccugaguagc

SEQ ID NO: 161022 - RNA, 24 nt, Human
ccugccucagccuccugaguagcu

SEQ ID NO: 161023 - RNA, 24 nt, Human
ccuggccaacacagugaaacccca

SEQ ID NO: 161024 - RNA, 22 nt, Human
ccuggccaacauggugaaaccc

SEQ ID NO: 161025 - RNA, 24 nt, Human
ccuggccaacauggugaaacccug

SEQ ID NO: 161026 - RNA, 22 nt, Human
ccugggugacagagccagacuc

SEQ ID NO: 161027 - RNA, 23 nt, Human
ccuggguucaagugauucuccuc

SEQ ID NO: 161028 - RNA, 23 nt, Human
ccuggguucaagugauucuccuc

SEQ ID NO: 161029 - RNA, 23 nt, Human
ccuggguucaagugauucuccug

SEQ ID NO: 161030 - RNA, 23 nt, Human
ccuggguucaagugauucuccug

SEQ ID NO: 161031 - RNA, 18 nt, Human
ccuguaauuccagcuacu

SEQ ID NO: 161032 - RNA, 19 nt, Human
ccuguaauuccagcuacuu

SEQ ID NO: 161033 - RNA, 21 nt, Human
ccuguaauuccagcuacuugg

SEQ ID NO: 161034 - RNA, 22 nt, Human
ccuguaauuccagcuacuuggg

SEQ ID NO: 161035 - RNA, 24 nt, Human
cgagaccagccuggccaacacagu

SEQ ID NO: 161036 - RNA, 24 nt, Human
cgagaccagccuggccaacauggu

SEQ ID NO: 161037 - RNA, 24 nt, Human
cgagaucgugccacugcacuccag

SEQ ID NO: 161038 - RNA, 20 nt, Human
cgaggcagguggaucaccug

SEQ ID NO: 161039 - RNA, 23 nt, Human
cgccuguaaucccagcacuuugg

SEQ ID NO: 161040 - RNA, 24 nt, Human
cgccuguaaucccagcacuuuggg

SEQ ID NO: 161041 - RNA, 24 nt, Human
cggccucagccccguugccgguuc

SEQ ID NO: 161042 - RNA, 24 nt, Human
cguucugucacccaggcuggagug

SEQ ID NO: 161043 - RNA, 24 nt, Human
cguucugucacccaggcuggagug

SEQ ID NO: 161044 - RNA, 19 nt, Human
cuaaauaccuaaucacauc

SEQ ID NO: 161045 - RNA, 22 nt, Human
cucacgccuguaaucccagcac

SEQ ID NO: 161046 - RNA, 24 nt, Human
cucacgccuguaaucccagcacuu

SEQ ID NO: 161047 - RNA, 23 nt, Human
cucacugcaacagcugccuccug

SEQ ID NO: 161048 - RNA, 23 nt, Human
cucacugcaacagcugccuccug

SEQ ID NO: 161049 - RNA, 24 nt, Human
cucacugcaacagcugccuccugg

SEQ ID NO: 161050 - RNA, 24 nt, Human
cucacugcaacagcugccuccugg

SEQ ID NO: 161051 - RNA, 24 nt, Human
cucagccuccugaguagcugggac

SEQ ID NO: 161052 - RNA, 24 nt, Human
cucaugccuauaaucucagcacuu

SEQ ID NO: 161053 - RNA, 23 nt, Human
cuccacugcacuccagccugggu

SEQ ID NO: 161054 - RNA, 23 nt, Human
cuccacugcacuucagccugggu

SEQ ID NO: 161055 - RNA, 20 nt, Human
cuccuggguucaagugauuc

SEQ ID NO: 161056 - RNA, 20 nt, Human
cuccuggguucaagugauuc

SEQ ID NO: 161057 - RNA, 21 nt, Human
cuccuggguucaagugauucu

SEQ ID NO: 161058 - RNA, 21 nt, Human
cuccuggguucaagugauucu

SEQ ID NO: 161059 - RNA, 24 nt, Human
cucguucugucacccaggcuggag

SEQ ID NO: 161060 - RNA, 24 nt, Human
cucguucugucacccaggcuggag

SEQ ID NO: 161061 - RNA, 19 nt, Human
cucucuucacuucacucuc

SEQ ID NO: 161062 - RNA, 20 nt, Human
cucucuucacuucacucuca

SEQ ID NO: 161063 - RNA, 19 nt, Human
cucugucucaaaaaaaaaa

SEQ ID NO: 161064 - RNA, 20 nt, Human
cugcaacagcugccuccugg

SEQ ID NO: 161065 - RNA, 20 nt, Human
cugcaacagcugccuccugg

SEQ ID NO: 161066 - RNA, 23 nt, Human
cugcaacagcugccuccuggguu

SEQ ID NO: 161067 - RNA, 23 nt, Human
cugcaacagcugccuccuggguu

SEQ ID NO: 161068 - RNA, 23 nt, Human
cugccuccuggguucaagugauu

SEQ ID NO: 161069 - RNA, 23 nt, Human
cuggccaacacagugaaacccca

SEQ ID NO: 161070 - RNA, 24 nt, Human
cuggccaacauggugaaacccugu

SEQ ID NO: 161071 - RNA, 21 nt, Human
cuuggcgaaagagcaagacuc

SEQ ID NO: 161072 - RNA, 19 nt, Human
cuuggcucacugcaacagc

SEQ ID NO: 161073 - RNA, 19 nt, Human
cuuggcucacugcaacagc

SEQ ID NO: 161074 - RNA, 19 nt, Human
gaagccuuucucucuccac

SEQ ID NO: 161075 - RNA, 23 nt, Human
gaagguugcagugagucgagauc

SEQ ID NO: 161076 - RNA, 24 nt, Human
gaagguugcagugagucgagaucg

SEQ ID NO: 161077 - RNA, 19 nt, Human
gaaucacuugaacccaaga

SEQ ID NO: 161078 - RNA, 24 nt, Human
gacagagccagacucugucucaaa

SEQ ID NO: 161079 - RNA, 23 nt, Human
gagaauugcuugaaccugggagg

SEQ ID NO: 161080 - RNA, 23 nt, Human
gagaucgugccacugcacuccag

SEQ ID NO: 161081 - RNA, 23 nt, Human
gagauugcuccacugcacuccag

SEQ ID NO: 161082 - RNA, 23 nt, Human
gagauugcuccacugcacuucag

SEQ ID NO: 161083 - RNA, 24 nt, Human
gagcugaggcaggagaauugcuug

SEQ ID NO: 161084 - RNA, 23 nt, Human
gaggcagguggaucaccugaggu

SEQ ID NO: 161085 - RNA, 21 nt, Human
gaucaccugaggucaggaguu

SEQ ID NO: 161086 - RNA, 24 nt, Human
gaucaccugaggucaggaguucga

SEQ ID NO: 161087 - RNA, 24 nt, Human
gaucaccugaggucgggaguucga

SEQ ID NO: 161088 - RNA, 24 nt, Human
gcaacagagugagacucugucuca

SEQ ID NO: 161089 - RNA, 22 nt, Human
gcacaagaaucacuugaaccca

SEQ ID NO: 161090 - RNA, 24 nt, Human
gcacuccagccugggugacagagc

SEQ ID NO: 161091 - RNA, 24 nt, Human
gcacuucagccugggugacagagc

SEQ ID NO: 161092 - RNA, 20 nt, Human
gcacuuugggaggccaaggu

SEQ ID NO: 161093 - RNA, 19 nt, Human
gcaggaugacagauauucu

SEQ ID NO: 161094 - RNA, 22 nt, Human
gccaacauggugaaacccuguc

SEQ ID NO: 161095 - RNA, 20 nt, Human
gccuguaauuccagcuacuu

SEQ ID NO: 161096 - RNA, 21 nt, Human
gcucacugcaacagcugccuc

SEQ ID NO: 161097 - RNA, 21 nt, Human
gcucacugcaacagcugccuc

SEQ ID NO: 161098 - RNA, 19 nt, Human
gcuggagugcaauggcgug

SEQ ID NO: 161099 - RNA, 19 nt, Human
gcuggagugcaauggcgug

SEQ ID NO: 161100 - RNA, 22 nt, Human
ggaucaccugaggucaggaguu

SEQ ID NO: 161101 - RNA, 21 nt, Human
ggccaggcgcgguggcucacg

SEQ ID NO: 161102 - RNA, 21 nt, Human
ggccaggcgugguggcucaug

SEQ ID NO: 161103 - RNA, 21 nt, Human
ggcucacgccuguaaucccag

SEQ ID NO: 161104 - RNA, 21 nt, Human
ggcucaugccuauaaucucag

SEQ ID NO: 161105 - RNA, 22 nt, Human
ggcuggagugcaauggcgugau

SEQ ID NO: 161106 - RNA, 22 nt, Human
ggcuggagugcaauggcgugau

SEQ ID NO: 161107 - RNA, 24 nt, Human
gggugcagugguaugugccuguaa

SEQ ID NO: 161108 - RNA, 23 nt, Human
ggugcagugguaugugccuguaa

SEQ ID NO: 161109 - RNA, 23 nt, Human
gguggcucacgccuguaauccca

SEQ ID NO: 161110 - RNA, 24 nt, Human
gguggcucacgccuguaaucccag

SEQ ID NO: 161111 - RNA, 24 nt, Human
gguggcucaugccuauaaucucag

SEQ ID NO: 161112 - RNA, 20 nt, Human
gucucaaaaaaaaaaaaaag

SEQ ID NO: 161113 - RNA, 24 nt, Human
gucucguucugucacccaggcugg

SEQ ID NO: 161114 - RNA, 23 nt, Human
gugauucuccugccucagccucc

SEQ ID NO: 161115 - RNA, 20 nt, Human
guuccagguugcucuugggu

SEQ ID NO: 161116 - RNA, 24 nt, Human
guugcagugagucgagaucgugcc

SEQ ID NO: 161117 - RNA, 19 nt, Human
uaaaaaaagagaagaacaa

SEQ ID NO: 161118 - RNA, 22 nt, Human
uaaaauaaauaaaaaaagagaa

SEQ ID NO: 161119 - RNA, 24 nt, Human
uaaacaggauauaaaaaaucagaa

SEQ ID NO: 161120 - RNA, 22 nt, Human
uacaacaccagaacaaggugga

SEQ ID NO: 161121 - RNA, 18 nt, Human
uagcaggaugacagauau

SEQ ID NO: 161122 - RNA, 21 nt, Human
uagcaggaugacagauauucu

SEQ ID NO: 161123 - RNA, 22 nt, Human
uagcaggaugacagauauucuu

SEQ ID NO: 161124 - RNA, 25 nt, Human
uagugagcuuuucucucuugugucc

SEQ ID NO: 161125 - RNA, 18 nt, Human
uaugaggacagagccccu

SEQ ID NO: 161126 - RNA, 18 nt, Human
ucaaaaaaaaaaaaaagu

SEQ ID NO: 161127 - RNA, 24 nt, Human
ucaagcuucuuagugagcuuuucu

SEQ ID NO: 161128 - RNA, 19 nt, Human
ucaagugauucuccugccu

SEQ ID NO: 161129 - RNA, 22 nt, Human
ucacaucucuacaacaccagaa

SEQ ID NO: 161130 - RNA, 18 nt, Human
ucacccaggcuggagugc

SEQ ID NO: 161131 - RNA, 18 nt, Human
ucacccaggcuggagugc

SEQ ID NO: 161132 - RNA, 20 nt, Human
ucaccugaggucaggaguuc

SEQ ID NO: 161133 - RNA, 24 nt, Human
ucacugcaacagcugccuccuggg

SEQ ID NO: 161134 - RNA, 24 nt, Human
ucacugcaacagcugccuccuggg

SEQ ID NO: 161135 - RNA, 23 nt, Human
ucagccuccugaguagcugggac

SEQ ID NO: 161136 - RNA, 26 nt, Human
uccacaguccuggcuccucucugccu

SEQ ID NO: 161137 - RNA, 24 nt, Human
uccacugcacuccagccuggguga

SEQ ID NO: 161138 - RNA, 24 nt, Human
uccacugcacuucagccuggguga

SEQ ID NO: 161139 - RNA, 22 nt, Human
uccacuguccuggagugagagc

SEQ ID NO: 161140 - RNA, 24 nt, Human
uccagccugggugacagagccaga

SEQ ID NO: 161141 - RNA, 24 nt, Human
uccugaguagcugggacgacaggc

SEQ ID NO: 161142 - RNA, 21 nt, Human
uccuggguucaagugauucuc

SEQ ID NO: 161143 - RNA, 21 nt, Human
uccuggguucaagugauucuc

SEQ ID NO: 161144 - RNA, 24 nt, Human
uccuggguucaagugauucuccug

SEQ ID NO: 161145 - RNA, 24 nt, Human
uccuggguucaagugauucuccug

SEQ ID NO: 161146 - RNA, 23 nt, Human
ucgugccacugcacuccagccuu

SEQ ID NO: 161147 - RNA, 22 nt, Human
ucguucugucacccaggcugga

SEQ ID NO: 161148 - RNA, 22 nt, Human
ucguucugucacccaggcugga

SEQ ID NO: 161149 - RNA, 24 nt, Human
ucguucugucacccaggcuggagu

SEQ ID NO: 161150 - RNA, 24 nt, Human
ucguucugucacccaggcuggagu

SEQ ID NO: 161151 - RNA, 24 nt, Human
ucuccugccucagccuccugagua

SEQ ID NO: 161152 - RNA, 19 nt, Human
ucucguucugucacccagg

SEQ ID NO: 161153 - RNA, 19 nt, Human
ucucguucugucacccagg

SEQ ID NO: 161154 - RNA, 23 nt, Human
ucucguucugucacccaggcugg

SEQ ID NO: 161155 - RNA, 23 nt, Human
ucucguucugucacccaggcugg

SEQ ID NO: 161156 - RNA, 24 nt, Human
ucucguucugucacccaggcugga

SEQ ID NO: 161157 - RNA, 24 nt, Human
ucucguucugucacccaggcugga

SEQ ID NO: 161158 - RNA, 21 nt, Human
ucucuacuaaaaauacaaaaa

SEQ ID NO: 161159 - RNA, 23 nt, Human
ucucuacuaaaaauacaaaaauu

SEQ ID NO: 161160 - RNA, 19 nt, Human
ucucucuccacuguccugg

SEQ ID NO: 161161 - RNA, 24 nt, Human
ucuggccaggcgugguggcucaug

SEQ ID NO: 161162 - RNA, 24 nt, Human
ucugucacccaggcuggagugcaa

SEQ ID NO: 161163 - RNA, 24 nt, Human
ucugucacccaggcuggagugcaa

SEQ ID NO: 161164 - RNA, 22 nt, Human
ucugucucaaaaaaaaaaaaaa

SEQ ID NO: 161165 - RNA, 24 nt, Human
ucugucucaaaaaaaaaaaaaagg

SEQ ID NO: 161166 - RNA, 23 nt, Human
ucuuacgacaauaagcuccgcag

SEQ ID NO: 161167 - RNA, 28 nt, Human
ucuugagguggagucucguuccaccagg

SEQ ID NO: 161168 - RNA, 28 nt, Human
ucuugagguggagucucguuccaccagg

SEQ ID NO: 161169 - RNA, 19 nt, Human
ugaaaccccaucucuacua

SEQ ID NO: 161170 - RNA, 24 nt, Human
ugaaccugggaggcgaagguugca

SEQ ID NO: 161171 - RNA, 23 nt, Human
ugaaggaagaaauuaaacaggau

SEQ ID NO: 161172 - RNA, 22 nt, Human
ugagccgagauugcuccacugc

SEQ ID NO: 161173 - RNA, 20 nt, Human
ugaggacagagccccucguc

SEQ ID NO: 161174 - RNA, 30 nt, Human
ugaggacagagccccucgucagggaauuuu

SEQ ID NO: 161175 - RNA, 20 nt, Human
ugaggcacaagaaucacuug

SEQ ID NO: 161176 - RNA, 24 nt, Human
ugaggcacaagaaucacuugaacc

SEQ ID NO: 161177 - RNA, 24 nt, Human
ugaggcaggagaauugcuugaacc

SEQ ID NO: 161178 - RNA, 25 nt, Human
ugaggcaggagaauugcuugaaccu

SEQ ID NO: 161179 - RNA, 22 nt, Human
ugagguggagucucguucuguc

SEQ ID NO: 161180 - RNA, 22 nt, Human
ugagguggagucucguucuguc

SEQ ID NO: 161181 - RNA, 22 nt, Human
ugagucgagaucgugccacugc

SEQ ID NO: 161182 - RNA, 20 nt, Human
ugauucuccugccucagccu

SEQ ID NO: 161183 - RNA, 23 nt, Human
ugccuauaaucucagcacuuugg

SEQ ID NO: 161184 - RNA, 24 nt, Human
ugccuauaaucucagcacuuuggg

SEQ ID NO: 161185 - RNA, 24 nt, Human
ugccucagccuccugaguagcugg

SEQ ID NO: 161186 - RNA, 22 nt, Human
ugccuccuggguucaagugauu

SEQ ID NO: 161187 - RNA, 23 nt, Human
ugccuguaauuccagcuacuugg

SEQ ID NO: 161188 - RNA, 24 nt, Human
ugccuguaauuccagcuacuuggg

SEQ ID NO: 161189 - RNA, 19 nt, Human
ugccuucaccuccaggugu

SEQ ID NO: 161190 - RNA, 19 nt, Human
ugcuccacugcacuccagc

SEQ ID NO: 161191 - RNA, 19 nt, Human
uggagugcaauggcgugau

SEQ ID NO: 161192 - RNA, 19 nt, Human
uggagugcaauggcgugau

SEQ ID NO: 161193 - RNA, 23 nt, Human
uggagugcaauggcgugaucuug

SEQ ID NO: 161194 - RNA, 23 nt, Human
uggagugcaauggcgugaucuug

SEQ ID NO: 161195 - RNA, 24 nt, Human
uggagugcaauggcgugaucuugg

SEQ ID NO: 161196 - RNA, 24 nt, Human
uggagugcaauggcgugaucuugg

SEQ ID NO: 161197 - RNA, 24 nt, Human
uggaucaccugaggucaggaguuc

SEQ ID NO: 161198 - RNA, 26 nt, Human
uggaucaccugaggucaggaguucga

SEQ ID NO: 161199 - RNA, 27 nt, Human
uggaucaccugaggucaggaguucgag

SEQ ID NO: 161200 - RNA, 24 nt, Human
uggaucaccugaggucgggaguuc

SEQ ID NO: 161201 - RNA, 24 nt, Human
uggccaacauggugaaacccuguc

SEQ ID NO: 161202 - RNA, 24 nt, Human
uggccaggcgcgguggcucacgcc

SEQ ID NO: 161203 - RNA, 24 nt, Human
uggccaggcgugguggcucaugcc

SEQ ID NO: 161204 - RNA, 26 nt, Human
uggcgugaucuuggcucacugcaaca

SEQ ID NO: 161205 - RNA, 26 nt, Human
uggcgugaucuuggcucacugcaaca

SEQ ID NO: 161206 - RNA, 22 nt, Human
uggcucacgccuguaaucccag

SEQ ID NO: 161207 - RNA, 24 nt, Human
uggcucacgccuguaaucccagca

SEQ ID NO: 161208 - RNA, 21 nt, Human
uggcucaugccuauaaucuca

SEQ ID NO: 161209 - RNA, 22 nt, Human
uggcucaugccuauaaucucag

SEQ ID NO: 161210 - RNA, 24 nt, Human
uggcucaugccuauaaucucagca

SEQ ID NO: 161211 - RNA, 24 nt, Human
uggcuccucucugccuucaccucc

SEQ ID NO: 161212 - RNA, 23 nt, Human
ugggaggccaagguggguggauc

SEQ ID NO: 161213 - RNA, 24 nt, Human
ugggaggccaagguggguggauca

SEQ ID NO: 161214 - RNA, 24 nt, Human
ugggaggccgaggcagguggauca

SEQ ID NO: 161215 - RNA, 24 nt, Human
ugggaggcgaagguugcagugagu

SEQ ID NO: 161216 - RNA, 26 nt, Human
ugggaggcugaggcacaagaaucacu

SEQ ID NO: 161217 - RNA, 27 nt, Human
ugggaggcugaggcacaagaaucacuu

SEQ ID NO: 161218 - RNA, 21 nt, Human
ugggcaacagagugagacucu

SEQ ID NO: 161219 - RNA, 18 nt, Human
ugggugcagugguaugug

SEQ ID NO: 161220 - RNA, 24 nt, Human
uggguggaucaccugaggucagga

SEQ ID NO: 161221 - RNA, 23 nt, Human
uggguucaagugauucuccugcc

SEQ ID NO: 161222 - RNA, 24 nt, Human
uggguucaagugauucuccugccu

SEQ ID NO: 161223 - RNA, 22 nt, Human
uggguucaagugauucuccugg

SEQ ID NO: 161224 - RNA, 21 nt, Human
ugguaugugccuguaauucca

SEQ ID NO: 161225 - RNA, 22 nt, Human
ugguaugugccuguaauuccag

SEQ ID NO: 161226 - RNA, 24 nt, Human
ugguaugugccuguaauuccagcu

SEQ ID NO: 161227 - RNA, 24 nt, Human
ugguggcucaugccuauaaucuca

SEQ ID NO: 161228 - RNA, 20 nt, Human
ugucacccaggcuggagugc

SEQ ID NO: 161229 - RNA, 20 nt, Human
ugucacccaggcuggagugc

SEQ ID NO: 161230 - RNA, 22 nt, Human
ugucuggagaacucuagcgagg

SEQ ID NO: 161231 - RNA, 24 nt, Human
ugugccuguaauuccagcuacuug

SEQ ID NO: 161232 - RNA, 19 nt, Human
ugugugcagccuggccagg

SEQ ID NO: 161233 - RNA, 23 nt, Human
uuagcaggaugacagauauucuu

SEQ ID NO: 161234 - RNA, 18 nt, Human
uuagcugggugcaguggu

SEQ ID NO: 161235 - RNA, 20 nt, Human
uuagugagcuuuucucucuu

SEQ ID NO: 161236 - RNA, 18 nt, Human
uuaguuccagguugcucu

SEQ ID NO: 161237 - RNA, 25 nt, Human
uucaaguagcuuugucggacuccac

SEQ ID NO: 161238 - RNA, 21 nt, Human
uucaagugauucuccugccuc

SEQ ID NO: 161239 - RNA, 23 nt, Human
uucaagugauucuccugccucag

SEQ ID NO: 161240 - RNA, 24 nt, Human
uucaagugauucuccugccucagc

SEQ ID NO: 161241 - RNA, 22 nt, Human
uucacuaaauaccuaaucacau

SEQ ID NO: 161242 - RNA, 21 nt, Human
uucacuucacucucagugcac

SEQ ID NO: 161243 - RNA, 24 nt, Human
uucagccugggugacagagccaga

SEQ ID NO: 161244 - RNA, 19 nt, Human
uucuccugggaggcgaagg

SEQ ID NO: 161245 - RNA, 24 nt, Human
uucuuacgacaauaagcuccgcag

SEQ ID NO: 161246 - RNA, 24 nt, Human
uugaaccugggaggcgaagguugc

SEQ ID NO: 161247 - RNA, 18 nt, Human
uugcagugagucgagauc

SEQ ID NO: 161248 - RNA, 21 nt, Human
uugcagugagucgagaucgug

SEQ ID NO: 161249 - RNA, 22 nt, Human
uugcagugagucgagaucgugc

SEQ ID NO: 161250 - RNA, 23 nt, Human
uugcuccacugcacuucagccug

SEQ ID NO: 161251 - RNA, 18 nt, Human
uugcuugaaccugggagg

SEQ ID NO: 161252 - RNA, 24 nt, Human
uugcuugaaccugggaggcgaagg

SEQ ID NO: 161253 - RNA, 25 nt, Human
uugggaggccgaggcagguggauca

SEQ ID NO: 161254 - RNA, 25 nt, Human
uugggaggcugaggcacaagaauca

SEQ ID NO: 161255 - RNA, 24 nt, Human
uuugccucucuucacuucacucuc

SEQ ID NO: 161256 - RNA, 25 nt, Human
uuuuuuuuucuugagguggagucuc

SEQ ID NO: 161257 - RNA, 25 nt, Human
uuuuuuuuucuugagguggagucuc

SEQ ID NO: 161258 - RNA, 21 nt, Human
uuuuuuuuuuuuuucuugagg

SEQ ID NO: 161259 - RNA, 21 nt, Human
uuuuuuuuuuuuuucuugagg

SEQ ID NO: 161260 - RNA, 19 nt, Human
aacaucucuuuuacaaaug

SEQ ID NO: 161261 - RNA, 18 nt, Human
ccacuuaaccaguuucac

SEQ ID NO: 161262 - RNA, 20 nt, Human
gaagcauuucuauaaauccu

SEQ ID NO: 161263 - RNA, 19 nt, Human
ucaaauauaggcccaugcu

SEQ ID NO: 161264 - RNA, 22 nt, Human
ucagaagcauucuguuacaugg

SEQ ID NO: 161265 - RNA, 18 nt, Human
ugaacaucucuuuuacaa

SEQ ID NO: 161266 - RNA, 19 nt, Human
ugaagcauuucuauaaauc

SEQ ID NO: 161267 - RNA, 19 nt, Human
ugcuggagagaucuaaggc

SEQ ID NO: 161268 - RNA, 19 nt, Human
uggaaaaaaacuaauguug

SEQ ID NO: 161269 - RNA, 23 nt, Human
uggaaaaaaacuaauguugcaaa

SEQ ID NO: 161270 - RNA, 19 nt, Human
uggaggaugcuggagacuc

SEQ ID NO: 161271 - RNA, 20 nt, Human
uugcugaugcuggaaaaaaa

SEQ ID NO: 161272 - RNA, 24 nt, Human
uuuuuuuuuuuuuuuuuuacucag

SEQ ID NO: 161273 - RNA, 21 nt, Human
agaagaagggugggacaagag

SEQ ID NO: 161274 - RNA, 22 nt, Human
agaagaagggugggacaagaga

SEQ ID NO: 161275 - RNA, 20 nt, Human
agaagggugggacaagagag

SEQ ID NO: 161276 - RNA, 24 nt, Human
agacuagaauauaaauauccguaa

SEQ ID NO: 161277 - RNA, 22 nt, Human
agcuggaguugggaauggggaa

SEQ ID NO: 161278 - RNA, 23 nt, Human
cagaagccaaagaagaauaugac

SEQ ID NO: 161279 - RNA, 18 nt, Human
ccaaagaagaauaugacc

SEQ ID NO: 161280 - RNA, 24 nt, Human
ccaugagggcuggaagaaccagaa

SEQ ID NO: 161281 - RNA, 23 nt, Human
gcaggcauaugugaugccaacca

SEQ ID NO: 161282 - RNA, 21 nt, Human
ggaauggggaagagaagaagg

SEQ ID NO: 161283 - RNA, 19 nt, Human
gggaauggggaagagaaga

SEQ ID NO: 161284 - RNA, 20 nt, Human
gggaauggggaagagaagaa

SEQ ID NO: 161285 - RNA, 23 nt, Human
uagggccagcugguguuaauggc

SEQ ID NO: 161286 - RNA, 21 nt, Human
ugagcauuagucuuuaacagg

SEQ ID NO: 161287 - RNA, 25 nt, Human
uggcaugcaggcauaugugaugcca

SEQ ID NO: 161288 - RNA, 21 nt, Human
uuaauggcaugcaggcauaug

SEQ ID NO: 161289 - RNA, 24 nt, Human
agcacucacucccugacaacgcag

SEQ ID NO: 161290 - RNA, 18 nt, Human
aggcaggggccauagagg

SEQ ID NO: 161291 - RNA, 20 nt, Human
cacugccccauuuuauugau

SEQ ID NO: 161292 - RNA, 19 nt, Human
cagaaaaugucacagggac

SEQ ID NO: 161293 - RNA, 21 nt, Human
cagguccuggggugcugagga

SEQ ID NO: 161294 - RNA, 23 nt, Human
ccgaugauggagcacucacuccc

SEQ ID NO: 161295 - RNA, 20 nt, Human
ccuggggugcugaggagaug

SEQ ID NO: 161296 - RNA, 24 nt, Human
ccuggggugcugaggagauggggc

SEQ ID NO: 161297 - RNA, 23 nt, Human
cgaugauggagcacucacucccu

SEQ ID NO: 161298 - RNA, 19 nt, Human
cucccugacaacgcagucc

SEQ ID NO: 161299 - RNA, 20 nt, Human
cuugcucugggccuggcugu

SEQ ID NO: 161300 - RNA, 18 nt, Human
gaccagagcgauuggcag

SEQ ID NO: 161301 - RNA, 21 nt, Human
gcuguugggggcacucccauc

SEQ ID NO: 161302 - RNA, 18 nt, Human
gcuguugggguguacucc

SEQ ID NO: 161303 - RNA, 19 nt, Human
ggaggccaucacugcccca

SEQ ID NO: 161304 - RNA, 20 nt, Human
ggaggccaucacugccccau

SEQ ID NO: 161305 - RNA, 24 nt, Human
ggcacucccaucuggagagggugc

SEQ ID NO: 161306 - RNA, 18 nt, Human
ggcugcaucuggagaggg

SEQ ID NO: 161307 - RNA, 21 nt, Human
gggccauagaggagcgggaga

SEQ ID NO: 161308 - RNA, 21 nt, Human
gggccauagaggagcgggaga

SEQ ID NO: 161309 - RNA, 24 nt, Human
ggggcacucccaucuggagagggu

SEQ ID NO: 161310 - RNA, 19 nt, Human
gggugcugaggagaugggg

SEQ ID NO: 161311 - RNA, 22 nt, Human
ggugcugaggagauggggcugc

SEQ ID NO: 161312 - RNA, 24 nt, Human
ggugcuguugggguguacuccugg

SEQ ID NO: 161313 - RNA, 23 nt, Human
gugcuguugggguguacuccugg

SEQ ID NO: 161314 - RNA, 21 nt, Human
guuuggagccugugucugucc

SEQ ID NO: 161315 - RNA, 21 nt, Human
uacuccugggaaggcaggggc

SEQ ID NO: 161316 - RNA, 22 nt, Human
ucagguccuggggugcugagga

SEQ ID NO: 161317 - RNA, 26 nt, Human
uccugggaaggcaggggccauagagg

SEQ ID NO: 161318 - RNA, 25 nt, Human
uccuggggugcugaggagauggggc

SEQ ID NO: 161319 - RNA, 19 nt, Human
ucuggagagggugcuguug

SEQ ID NO: 161320 - RNA, 19 nt, Human
ucuggagagggugcuguug

SEQ ID NO: 161321 - RNA, 19 nt, Human
ucuggagagggugcuguug

SEQ ID NO: 161322 - RNA, 19 nt, Human
ucuggagagggugcuguug

SEQ ID NO: 161323 - RNA, 19 nt, Human
ucuggagagggugcuguug

SEQ ID NO: 161324 - RNA, 24 nt, Human
uguugggggcacucccaucuggag

SEQ ID NO: 161325 - RNA, 19 nt, Human
uguugggguguacuccugg

SEQ ID NO: 161326 - RNA, 25 nt, Human
uguugggguguacucucaucuggag

SEQ ID NO: 161327 - RNA, 25 nt, Human
uguugggguguacucucaucuggag

SEQ ID NO: 161328 - RNA, 25 nt, Human
uguugggguguacucucaucuggag

SEQ ID NO: 161329 - RNA, 22 nt, Human
uuggagccugugucuguccucc

SEQ ID NO: 161330 - RNA, 18 nt, Human
uuuuuuuuuuugggaggc

SEQ ID NO: 161331 - RNA, 20 nt, Human
uuuuuuuuuuuugggaggcc

SEQ ID NO: 161332 - RNA, 26 nt, Human
uuuuuuuuuuuuuuuuuuuuuuuggg

SEQ ID NO: 161333 - RNA, 23 nt, Human
aaaaaaaaaaagauguuaaagga

SEQ ID NO: 161334 - RNA, 22 nt, Human
aaacccugucucuacuaaaaaa

SEQ ID NO: 161335 - RNA, 18 nt, Human
aaagaagauguuaaagag

SEQ ID NO: 161336 - RNA, 20 nt, Human
aacauugcgaaacccugucu

SEQ ID NO: 161337 - RNA, 21 nt, Human
aacauugcgaaacccugucuc

SEQ ID NO: 161338 - RNA, 24 nt, Human
aaccuguaacauaagcguuucuca

SEQ ID NO: 161339 - RNA, 19 nt, Human
aagaguccuucucuuuugg

SEQ ID NO: 161340 - RNA, 25 nt, Human
aauuacauaauuguuuuuugggggu

SEQ ID NO: 161341 - RNA, 24 nt, Human
aauucucuucucaaaucccaaggc

SEQ ID NO: 161342 - RNA, 22 nt, Human
acagauugagacucugucaaaa

SEQ ID NO: 161343 - RNA, 19 nt, Human
acagugguuugacuaauug

SEQ ID NO: 161344 - RNA, 19 nt, Human
acauaauuguuuuuugggg

SEQ ID NO: 161345 - RNA, 19 nt, Human
accacugcacuccagccug

SEQ ID NO: 161346 - RNA, 21 nt, Human
accagauccucaccucucuaa

SEQ ID NO: 161347 - RNA, 18 nt, Human
acccugucucuacuaaaa

SEQ ID NO: 161348 - RNA, 22 nt, Human
accucucuaauucucuucucaa

SEQ ID NO: 161349 - RNA, 24 nt, Human
acugcacuccagccuggguaacag

SEQ ID NO: 161350 - RNA, 18 nt, Human
agaguccuucucuuuugg

SEQ ID NO: 161351 - RNA, 24 nt, Human
agcacuuugggaggccgaggcggg

SEQ ID NO: 161352 - RNA, 24 nt, Human
agccuggguaacagauugagacuc

SEQ ID NO: 161353 - RNA, 23 nt, Human
agcuggguaugauggcacaugcc

SEQ ID NO: 161354 - RNA, 21 nt, Human
aggaaagaagauguuaaagag

SEQ ID NO: 161355 - RNA, 22 nt, Human
aggcaaguauuuauugggaaaa

SEQ ID NO: 161356 - RNA, 22 nt, Human
aggcagaaaccagcaguaggga

SEQ ID NO: 161357 - RNA, 22 nt, Human
aggcaugagaaucgcuuaaacc

SEQ ID NO: 161358 - RNA, 24 nt, Human
aggcaugagaaucgcuuaaaccug

SEQ ID NO: 161359 - RNA, 18 nt, Human
aggccgaggcgggcagau

SEQ ID NO: 161360 - RNA, 25 nt, Human
aggccgaggcgggcagaucgcuaga

SEQ ID NO: 161361 - RNA, 21 nt, Human
aggcgggcagaucgcuagagg

SEQ ID NO: 161362 - RNA, 26 nt, Human
aggcgggcagaucgcuagaggccaga

SEQ ID NO: 161363 - RNA, 21 nt, Human
aggcggguuugcagugagcca

SEQ ID NO: 161364 - RNA, 23 nt, Human
aggcggguuugcagugagccaag

SEQ ID NO: 161365 - RNA, 22 nt, Human
aggugguuuuguuugcucagga

SEQ ID NO: 161366 - RNA, 24 nt, Human
auagcaccacugcacuccagccug

SEQ ID NO: 161367 - RNA, 19 nt, Human
aucccuucgucuuccccaa

SEQ ID NO: 161368 - RNA, 18 nt, Human
augaccccgugaaguuuu

SEQ ID NO: 161369 - RNA, 23 nt, Human
auggcacaugccucuaaucccag

SEQ ID NO: 161370 - RNA, 20 nt, Human
auuauagaaaaauaaaauag

SEQ ID NO: 161371 - RNA, 26 nt, Human
caaaucccaaggcaaaacaauggaga

SEQ ID NO: 161372 - RNA, 24 nt, Human
caacauugcgaaacccugucucua

SEQ ID NO: 161373 - RNA, 27 nt, Human
cacaggcaaguauuuauugggaaaaug

SEQ ID NO: 161374 - RNA, 26 nt, Human
caccacugcacuccagccuggguaac

SEQ ID NO: 161375 - RNA, 19 nt, Human
cacugcacuccagccuggg

SEQ ID NO: 161376 - RNA, 21 nt, Human
cacugcacuccagccugggua

SEQ ID NO: 161377 - RNA, 22 nt, Human
cacugcacuccagccuggguaa

SEQ ID NO: 161378 - RNA, 23 nt, Human
cacugcacuccagccuggguaac

SEQ ID NO: 161379 - RNA, 24 nt, Human
cacugcacuccagccuggguaaca

SEQ ID NO: 161380 - RNA, 23 nt, Human
cacuuuuaauuuguuguuagagg

SEQ ID NO: 161381 - RNA, 24 nt, Human
cagaucgcuagaggccagaaguuc

SEQ ID NO: 161382 - RNA, 24 nt, Human
cagcacuuugggaggccgaggcgg

SEQ ID NO: 161383 - RNA, 19 nt, Human
caggaaauaccagauccuc

SEQ ID NO: 161384 - RNA, 23 nt, Human
cauauagacuuacaugauugcuc

SEQ ID NO: 161385 - RNA, 23 nt, Human
caugccucuaaucccagcuacug

SEQ ID NO: 161386 - RNA, 20 nt, Human
ccacugcacuccagccuggg

SEQ ID NO: 161387 - RNA, 20 nt, Human
ccacugcacuccagccuggg

SEQ ID NO: 161388 - RNA, 20 nt, Human
ccacugcacuccagccuggg

SEQ ID NO: 161389 - RNA, 21 nt, Human
ccacugcacuccagccugggu

SEQ ID NO: 161390 - RNA, 22 nt, Human
ccacugcacuccagccugggua

SEQ ID NO: 161391 - RNA, 24 nt, Human
ccacugcacuccagccuggguaac

SEQ ID NO: 161392 - RNA, 18 nt, Human
ccucuaaucccagcuacu

SEQ ID NO: 161393 - RNA, 21 nt, Human
ccucuaaucccagcuacuggg

SEQ ID NO: 161394 - RNA, 22 nt, Human
ccuggccaacauugcgaaaccc

SEQ ID NO: 161395 - RNA, 21 nt, Human
cgagaucggccuggccaacau

SEQ ID NO: 161396 - RNA, 26 nt, Human
cgaggcgggcagaucgcuagaggcca

SEQ ID NO: 161397 - RNA, 24 nt, Human
cgggcagaucgcuagaggccagaa

SEQ ID NO: 161398 - RNA, 19 nt, Human
cucagcauggagaaggcag

SEQ ID NO: 161399 - RNA, 18 nt, Human
cucuacuaaaaaaaaaaa

SEQ ID NO: 161400 - RNA, 20 nt, Human
cucuacuaaaaaaaaaaaau

SEQ ID NO: 161401 - RNA, 19 nt, Human
cucugucaaaaaaaaaaaa

SEQ ID NO: 161402 - RNA, 24 nt, Human
cugggaggcugaggcaugagaauc

SEQ ID NO: 161403 - RNA, 18 nt, Human
cuuaaaccugggaggcgg

SEQ ID NO: 161404 - RNA, 22 nt, Human
cuuucaggacagggagcuuugg

SEQ ID NO: 161405 - RNA, 19 nt, Human
gaaacccugucucuacuaa

SEQ ID NO: 161406 - RNA, 24 nt, Human
gaugcuggucaucccagcacuuug

SEQ ID NO: 161407 - RNA, 24 nt, Human
gccaacauugcgaaacccugucuc

SEQ ID NO: 161408 - RNA, 23 nt, Human
gccuggccaacauugcgaaaccc

SEQ ID NO: 161409 - RNA, 19 nt, Human
gcuggucaucccagcacuu

SEQ ID NO: 161410 - RNA, 19 nt, Human
gcuuaaaccugggaggcgg

SEQ ID NO: 161411 - RNA, 24 nt, Human
guagguaucuucuuagaaaguccc

SEQ ID NO: 161412 - RNA, 18 nt, Human
guaucuucuuagaaaguc

SEQ ID NO: 161413 - RNA, 19 nt, Human
gugauuuuguucucagcau

SEQ ID NO: 161414 - RNA, 19 nt, Human
uaacauaagcguuucucau

SEQ ID NO: 161415 - RNA, 25 nt, Human
uaccagauccucaccucucuaauuc

SEQ ID NO: 161416 - RNA, 22 nt, Human
uagaaagucccuagucaccuaa

SEQ ID NO: 161417 - RNA, 21 nt, Human
uagaugacucuggaagagucc

SEQ ID NO: 161418 - RNA, 20 nt, Human
uagcaccacugcacuccagc

SEQ ID NO: 161419 - RNA, 18 nt, Human
uagguaucuucuuagaaa

SEQ ID NO: 161420 - RNA, 24 nt, Human
ucaggacagggagcuuugggacuc

SEQ ID NO: 161421 - RNA, 21 nt, Human
uccccaaggggaauuuagucc

SEQ ID NO: 161422 - RNA, 21 nt, Human
ucccuagucaccuaauuauau

SEQ ID NO: 161423 - RNA, 24 nt, Human
ucuaauucucuucucaaaucccaa

SEQ ID NO: 161424 - RNA, 20 nt, Human
ucucuacuaaaaaaaaaaaa

SEQ ID NO: 161425 - RNA, 20 nt, Human
ucugguaauugggcucuuug

SEQ ID NO: 161426 - RNA, 26 nt, Human
ucugucaaaaaaaaaaaagauguuaa

SEQ ID NO: 161427 - RNA, 24 nt, Human
ucuuagaaagucccuagucaccua

SEQ ID NO: 161428 - RNA, 25 nt, Human
ucuuagaaagucccuagucaccuaa

SEQ ID NO: 161429 - RNA, 21 nt, Human
ucuucuggagcuuccgacugc

SEQ ID NO: 161430 - RNA, 21 nt, Human
ugagaguaugaccacauggca

SEQ ID NO: 161431 - RNA, 19 nt, Human
ugagccaagauagcaccac

SEQ ID NO: 161432 - RNA, 24 nt, Human
ugaggcaugagaaucgcuuaaacc

SEQ ID NO: 161433 - RNA, 18 nt, Human
uggaacagaagauucuug

SEQ ID NO: 161434 - RNA, 21 nt, Human
uggaacagaagauucuugaug

SEQ ID NO: 161435 - RNA, 21 nt, Human
uggaagcaaaauaaaggcaau

SEQ ID NO: 161436 - RNA, 24 nt, Human
uggccaacauugcgaaacccuguc

SEQ ID NO: 161437 - RNA, 22 nt, Human
uggcuguguggauguggaacag

SEQ ID NO: 161438 - RNA, 20 nt, Human
ugggaggccgaggcgggcag

SEQ ID NO: 161439 - RNA, 23 nt, Human
ugggaggccgaggcgggcagauc

SEQ ID NO: 161440 - RNA, 24 nt, Human
ugggaggccgaggcgggcagaucg

SEQ ID NO: 161441 - RNA, 23 nt, Human
ugggaggcggguuugcagugagc

SEQ ID NO: 161442 - RNA, 18 nt, Human
ugggaggcugaggcauga

SEQ ID NO: 161443 - RNA, 23 nt, Human
ugggaggcugaggcaugagaauc

SEQ ID NO: 161444 - RNA, 19 nt, Human
ugggcucuuuguucuucug

SEQ ID NO: 161445 - RNA, 19 nt, Human
uguauuggcuguguggaug

SEQ ID NO: 161446 - RNA, 19 nt, Human
ugucaaaaaaaaaaaagau

SEQ ID NO: 161447 - RNA, 21 nt, Human
uguggaacagaagauucuuga

SEQ ID NO: 161448 - RNA, 18 nt, Human
uuaaagaggcuggacauu

SEQ ID NO: 161449 - RNA, 18 nt, Human
uuagcuggguaugauggc

SEQ ID NO: 161450 - RNA, 22 nt, Human
uuccaguggcaaaaugucacag

SEQ ID NO: 161451 - RNA, 22 nt, Human
uugcagugagccaagauagcac

SEQ ID NO: 161452 - RNA, 24 nt, Human
uugggaggccgaggcgggcagauc

SEQ ID NO: 161453 - RNA, 19 nt, Human
uuguucuucuggagcuucc

SEQ ID NO: 161454 - RNA, 21 nt, Human
uuucaggacagggagcuuugg

SEQ ID NO: 161455 - RNA, 24 nt, Human
aaccuguaacauaagcauuuccca

SEQ ID NO: 161456 - RNA, 20 nt, Human
aagaagagcugaagacagca

SEQ ID NO: 161457 - RNA, 24 nt, Human
acagugguuugauuaauuggauug

SEQ ID NO: 161458 - RNA, 26 nt, Human
caaaucccaaugcaagacaauggaga

SEQ ID NO: 161459 - RNA, 19 nt, Human
caauaaaucacccagaaac

SEQ ID NO: 161460 - RNA, 20 nt, Human
caauaaaucacccagaaaca

SEQ ID NO: 161461 - RNA, 23 nt, Human
cauauagauuuagaugauuguuc

SEQ ID NO: 161462 - RNA, 22 nt, Human
ccagagcacagcagucacagcc

SEQ ID NO: 161463 - RNA, 21 nt, Human
cgcccagagcacagcagucac

SEQ ID NO: 161464 - RNA, 23 nt, Human
cuguuaauaacagugguuugauu

SEQ ID NO: 161465 - RNA, 19 nt, Human
gagcugaagacagcaggug

SEQ ID NO: 161466 - RNA, 19 nt, Human
gauuguucucaacgguaac

SEQ ID NO: 161467 - RNA, 24 nt, Human
uaccagaucuucccucucugauuu

SEQ ID NO: 161468 - RNA, 18 nt, Human
ucaauaaaucacccagaa

SEQ ID NO: 161469 - RNA, 24 nt, Human
ucccucucugauuuucuucucaaa

SEQ ID NO: 161470 - RNA, 21 nt, Human
ucccuggagcgagcuggcgcc

SEQ ID NO: 161471 - RNA, 19 nt, Human
ucccuggagcgagcugggg

SEQ ID NO: 161472 - RNA, 22 nt, Human
ucuucucaaaucccaaugcaag

SEQ ID NO: 161473 - RNA, 19 nt, Human
uggauuggcuguguggaug

SEQ ID NO: 161474 - RNA, 23 nt, Human
ugucaagaagagcugaagacagc

SEQ ID NO: 161475 - RNA, 21 nt, Human
uguggaacggaagagccuuga

SEQ ID NO: 161476 - RNA, 19 nt, Human
uuaucuguuaauaacagug

SEQ ID NO: 161477 - RNA, 22 nt, Human
uucaggacagggagcuucagga

SEQ ID NO: 161478 - RNA, 23 nt, Human
uuggaacucgagcaucucccugu

SEQ ID NO: 161479 - RNA, 25 nt, Human
uuuauagaaaaauaaagaaaauaaa

SEQ ID NO: 161480 - RNA, 20 nt, Human
aggccugaggaugauagggu

SEQ ID NO: 161481 - RNA, 20 nt, Human
agggaucuggcucugaguuc

SEQ ID NO: 161482 - RNA, 18 nt, Human
augauaggguugcaaauc

SEQ ID NO: 161483 - RNA, 21 nt, Human
cacccccggccguaaugggca

SEQ ID NO: 161484 - RNA, 23 nt, Human
ccaaggaaaagucgagaguugga

SEQ ID NO: 161485 - RNA, 26 nt, Human
cguaaugggcacucugcguugauacc

SEQ ID NO: 161486 - RNA, 21 nt, Human
gagaguuggauaagggaucug

SEQ ID NO: 161487 - RNA, 22 nt, Human
gcucugaguucuauguuuccug

SEQ ID NO: 161488 - RNA, 21 nt, Human
uacugcucuuauuacccccau

SEQ ID NO: 161489 - RNA, 21 nt, Human
uagagaggccugaggaugaua

SEQ ID NO: 161490 - RNA, 18 nt, Human
ucuauguuuccugcugcu

SEQ ID NO: 161491 - RNA, 23 nt, Human
uggcucugaguucuauguuuccu

SEQ ID NO: 161492 - RNA, 19 nt, Human
uguagagaggccugaggau

SEQ ID NO: 161493 - RNA, 18 nt, Human
ugugagggaacgguuggg

SEQ ID NO: 161494 - RNA, 22 nt, Human
uugaagaucaugggcuuuuccc

SEQ ID NO: 161495 - RNA, 22 nt, Human
uuuguguagcucugaaacuuca

SEQ ID NO: 161496 - RNA, 20 nt, Human
uuuugcugugagggaacggu

SEQ ID NO: 161497 - RNA, 26 nt, Human
uuuuuuuuuuuuuuuugcugugaggg

SEQ ID NO: 161498 - RNA, 18 nt, Human
uuuuuuuuuuuuuuuuug

SEQ ID NO: 161499 - RNA, 20 nt, Human
uuuuuuuuuuuuuuuuugcu

SEQ ID NO: 161500 - RNA, 24 nt, Human
uuuuuuuuuuuuuuuuugcuguga

SEQ ID NO: 161501 - RNA, 24 nt, Human
accaggacgccgaggaggggcuuc

SEQ ID NO: 161502 - RNA, 19 nt, Human
cacagcaugaaaggggccu

SEQ ID NO: 161503 - RNA, 21 nt, Human
cacggccgggaccaggacgcc

SEQ ID NO: 161504 - RNA, 20 nt, Human
cccggcccgccccuuccucc

SEQ ID NO: 161505 - RNA, 21 nt, Human
cccggcccgccccuuccuccc

SEQ ID NO: 161506 - RNA, 19 nt, Human
cgacccccggcccgccccu

SEQ ID NO: 161507 - RNA, 21 nt, Human
cgaccuggggcgggagggggc

SEQ ID NO: 161508 - RNA, 19 nt, Human
cggccgggaccaggacgcc

SEQ ID NO: 161509 - RNA, 24 nt, Human
cggccgggaccaggacgccgagga

SEQ ID NO: 161510 - RNA, 21 nt, Human
cuaggcccagaaccccuucug

SEQ ID NO: 161511 - RNA, 20 nt, Human
cuccucccgacccccggccc

SEQ ID NO: 161512 - RNA, 20 nt, Human
gaccuggggcgggagggggc

SEQ ID NO: 161513 - RNA, 23 nt, Human
gacgaccuggggcgggagggggc

SEQ ID NO: 161514 - RNA, 19 nt, Human
ggaccaggacgccgaggag

SEQ ID NO: 161515 - RNA, 18 nt, Human
ggaggcucagagaugcca

SEQ ID NO: 161516 - RNA, 21 nt, Human
ggcccagaaccccuucuggag

SEQ ID NO: 161517 - RNA, 26 nt, Human
ucccgacccccggcccgccccuuccu

SEQ ID NO: 161518 - RNA, 23 nt, Human
uguauuaggaggggaaacugagg

SEQ ID NO: 161519 - RNA, 25 nt, Human
aaaaaaaaaucuugaaaacugcaaa

SEQ ID NO: 161520 - RNA, 23 nt, Human
aaaaacuagauacucuagucucc

SEQ ID NO: 161521 - RNA, 18 nt, Human
aaaaacuggggagggaca

SEQ ID NO: 161522 - RNA, 20 nt, Human
aaacagcauccuagcugacu

SEQ ID NO: 161523 - RNA, 24 nt, Human
aaacugcugguauuacagguguga

SEQ ID NO: 161524 - RNA, 22 nt, Human
aaagaaaucagcugucccacca

SEQ ID NO: 161525 - RNA, 21 nt, Human
aaaguagcacuaacauaccag

SEQ ID NO: 161526 - RNA, 20 nt, Human
aacuguuaaaauacauaaga

SEQ ID NO: 161527 - RNA, 22 nt, Human
aagaaaaguauuucagcagcca

SEQ ID NO: 161528 - RNA, 22 nt, Human
aagagacgggguuucacuaugu

SEQ ID NO: 161529 - RNA, 21 nt, Human
aagcaaaugguccucaucaag

SEQ ID NO: 161530 - RNA, 21 nt, Human
aagcucauuccaaauguguuu

SEQ ID NO: 161531 - RNA, 19 nt, Human
aaguccaggggagagcagg

SEQ ID NO: 161532 - RNA, 18 nt, Human
aagucugaguucuugccc

SEQ ID NO: 161533 - RNA, 24 nt, Human
aagugauccaccugccuuagcuuc

SEQ ID NO: 161534 - RNA, 19 nt, Human
aagugccaucagaggucag

SEQ ID NO: 161535 - RNA, 19 nt, Human
aaguggcaaugggaugcau

SEQ ID NO: 161536 - RNA, 22 nt, Human
aauucagucaugcaaucuuuug

SEQ ID NO: 161537 - RNA, 24 nt, Human
aauuugagggcagaaaguagaaau

SEQ ID NO: 161538 - RNA, 19 nt, Human
acauucaugggugccuaac

SEQ ID NO: 161539 - RNA, 18 nt, Human
acgggguuucacuauguu

SEQ ID NO: 161540 - RNA, 23 nt, Human
acgggguuucacuauguuggcca

SEQ ID NO: 161541 - RNA, 24 nt, Human
acgggguuucacuauguuggccag

SEQ ID NO: 161542 - RNA, 24 nt, Human
acuauguuggccaggcuggucucg

SEQ ID NO: 161543 - RNA, 21 nt, Human
acuccacagaacccaacuguu

SEQ ID NO: 161544 - RNA, 21 nt, Human
acucuaugggcugauuuucua

SEQ ID NO: 161545 - RNA, 21 nt, Human
acugaaguuuuuccaugcauu

SEQ ID NO: 161546 - RNA, 19 nt, Human
acugagcacaagcaaaugg

SEQ ID NO: 161547 - RNA, 23 nt, Human
acuguguugugaugcgaaacaga

SEQ ID NO: 161548 - RNA, 25 nt, Human
agaaaagaaacauggaacuagaaaa

SEQ ID NO: 161549 - RNA, 23 nt, Human
agaaauucucuugacuggucagu

SEQ ID NO: 161550 - RNA, 21 nt, Human
agaaauuugagggcagaaagu

SEQ ID NO: 161551 - RNA, 19 nt, Human
agaagagacgggguuucac

SEQ ID NO: 161552 - RNA, 20 nt, Human
agaaggaggcaaacugguaa

SEQ ID NO: 161553 - RNA, 22 nt, Human
agaaucagagguaagccuggcc

SEQ ID NO: 161554 - RNA, 22 nt, Human
agacaacugcuuaaccaagaaa

SEQ ID NO: 161555 - RNA, 21 nt, Human
agacugaaaaacuggggaggg

SEQ ID NO: 161556 - RNA, 19 nt, Human
agagaggacugggugacua

SEQ ID NO: 161557 - RNA, 22 nt, Human
agcuccagaaaguaguccuaaa

SEQ ID NO: 161558 - RNA, 19 nt, Human
agcugucccaccaagcagc

SEQ ID NO: 161559 - RNA, 20 nt, Human
agcugucccaccaagcagcu

SEQ ID NO: 161560 - RNA, 19 nt, Human
aggaaggaaagagccucau

SEQ ID NO: 161561 - RNA, 22 nt, Human
aggagcuuguuaaugggucccu

SEQ ID NO: 161562 - RNA, 24 nt, Human
aggcugaagugcaaugccgcgauc

SEQ ID NO: 161563 - RNA, 22 nt, Human
agggacacaaacuuuacaaacu

SEQ ID NO: 161564 - RNA, 29 nt, Human
agggcagaaaguagaaaugaggggacccc

SEQ ID NO: 161565 - RNA, 24 nt, Human
agguacugaagauggauauaccua

SEQ ID NO: 161566 - RNA, 24 nt, Human
aguacaaucuauucuuaacuaccu

SEQ ID NO: 161567 - RNA, 18 nt, Human
agucacggcagucuuggg

SEQ ID NO: 161568 - RNA, 24 nt, Human
agugauucuccugccucagccucc

SEQ ID NO: 161569 - RNA, 24 nt, Human
agugcaaugccgcgaucuuggcuc

SEQ ID NO: 161570 - RNA, 23 nt, Human
aguuuugugaaaucauggccucu

SEQ ID NO: 161571 - RNA, 23 nt, Human
auacugagcacaagcaaaugguc

SEQ ID NO: 161572 - RNA, 20 nt, Human
auaucacuuuguuuagaaau

SEQ ID NO: 161573 - RNA, 25 nt, Human
auguguuuuccagauuuagcucugg

SEQ ID NO: 161574 - RNA, 22 nt, Human
auuacaggugugagccacugca

SEQ ID NO: 161575 - RNA, 23 nt, Human
caaacugcugguauuacaggugu

SEQ ID NO: 161576 - RNA, 21 nt, Human
caaagggugggggaggguucc

SEQ ID NO: 161577 - RNA, 20 nt, Human
caaauaagcucucaccuucc

SEQ ID NO: 161578 - RNA, 22 nt, Human
caagugauccaccugccuuagc

SEQ ID NO: 161579 - RNA, 20 nt, Human
caagugauucuccugccuca

SEQ ID NO: 161580 - RNA, 22 nt, Human
caagugauucuccugccucagc

SEQ ID NO: 161581 - RNA, 27 nt, Human
caauuccacauaagauuaguugaaaaa

SEQ ID NO: 161582 - RNA, 24 nt, Human
cacaggaccuauacaaaaggacau

SEQ ID NO: 161583 - RNA, 22 nt, Human
caccaccaugcccagcuaauuu

SEQ ID NO: 161584 - RNA, 23 nt, Human
cacccaaaagaagcagggauuuc

SEQ ID NO: 161585 - RNA, 21 nt, Human
cacuauguuggccaggcuggu

SEQ ID NO: 161586 - RNA, 24 nt, Human
cacuauguuggccaggcuggucuc

SEQ ID NO: 161587 - RNA, 18 nt, Human
cacuccacagaacccaac

SEQ ID NO: 161588 - RNA, 22 nt, Human
cagaaacacccugagacuuagc

SEQ ID NO: 161589 - RNA, 22 nt, Human
cagaagacuguugguuaucauu

SEQ ID NO: 161590 - RNA, 23 nt, Human
cagacugaaaaacuggggaggga

SEQ ID NO: 161591 - RNA, 24 nt, Human
cagagucuugcucuaucgcccagg

SEQ ID NO: 161592 - RNA, 18 nt, Human
cagcuuaaaauggcauca

SEQ ID NO: 161593 - RNA, 18 nt, Human
caucuaggaaaggcuaga

SEQ ID NO: 161594 - RNA, 19 nt, Human
caucuugagcuuagagaau

SEQ ID NO: 161595 - RNA, 20 nt, Human
cauggaacuagaaaauugca

SEQ ID NO: 161596 - RNA, 24 nt, Human
cauuuaggauuuaaaaaacuguuc

SEQ ID NO: 161597 - RNA, 21 nt, Human
ccaaaagagaaauucucccau

SEQ ID NO: 161598 - RNA, 23 nt, Human
ccaccugccuuagcuucucaaac

SEQ ID NO: 161599 - RNA, 21 nt, Human
ccacugcacccaaaagaagca

SEQ ID NO: 161600 - RNA, 21 nt, Human
cccacaugauuaagcugaaau

SEQ ID NO: 161601 - RNA, 21 nt, Human
cccggguucaagugauucucc

SEQ ID NO: 161602 - RNA, 23 nt, Human
cccggguucaagugauucuccug

SEQ ID NO: 161603 - RNA, 23 nt, Human
cccuuaggaaggaaagagccuca

SEQ ID NO: 161604 - RNA, 24 nt, Human
cccuugggaaauagaaugguaaag

SEQ ID NO: 161605 - RNA, 23 nt, Human
ccugccucagccuccuguguagc

SEQ ID NO: 161606 - RNA, 18 nt, Human
ccuggccucaagugaucc

SEQ ID NO: 161607 - RNA, 21 nt, Human
ccuggccucaagugauccacc

SEQ ID NO: 161608 - RNA, 23 nt, Human
ccuggccucaagugauccaccug

SEQ ID NO: 161609 - RNA, 23 nt, Human
ccuggccucaagugauccaccug

SEQ ID NO: 161610 - RNA, 24 nt, Human
cgaaaaagucuaccagcccauucc

SEQ ID NO: 161611 - RNA, 24 nt, Human
cgggguuucacuauguuggccagg

SEQ ID NO: 161612 - RNA, 23 nt, Human
cgugcaccaccaugcccagcuaa

SEQ ID NO: 161613 - RNA, 23 nt, Human
cuaacagacugucugagaauaaa

SEQ ID NO: 161614 - RNA, 23 nt, Human
cucaagugauccaccugccuuag

SEQ ID NO: 161615 - RNA, 24 nt, Human
cucacugcagacucugcuucccgg

SEQ ID NO: 161616 - RNA, 24 nt, Human
cucagacuccacaaucuuaaaagu

SEQ ID NO: 161617 - RNA, 24 nt, Human
cucagccuccuguguagcugggac

SEQ ID NO: 161618 - RNA, 23 nt, Human
cucuaucgcccaggcugaagugc

SEQ ID NO: 161619 - RNA, 23 nt, Human
cucugauacaaauaagcucucac

SEQ ID NO: 161620 - RNA, 23 nt, Human
cugaagauggauauaccuaaccc

SEQ ID NO: 161621 - RNA, 22 nt, Human
cugaugugaagcagcuuaaaau

SEQ ID NO: 161622 - RNA, 23 nt, Human
cugcaaagugacuccaguuacau

SEQ ID NO: 161623 - RNA, 23 nt, Human
cugccucagccuccuguguagcu

SEQ ID NO: 161624 - RNA, 18 nt, Human
cuggacacuccacagaac

SEQ ID NO: 161625 - RNA, 22 nt, Human
cugguauuacaggugugagcca

SEQ ID NO: 161626 - RNA, 18 nt, Human
cuguaccugaagauaaaa

SEQ ID NO: 161627 - RNA, 19 nt, Human
cuguaccugaagauaaaac

SEQ ID NO: 161628 - RNA, 22 nt, Human
cuuaaaauggcaucaugcaccc

SEQ ID NO: 161629 - RNA, 22 nt, Human
cuucaggaaggggagagacuuc

SEQ ID NO: 161630 - RNA, 22 nt, Human
cuuccaguucaaacauuacuuc

SEQ ID NO: 161631 - RNA, 21 nt, Human
cuucccggguucaagugauuc

SEQ ID NO: 161632 - RNA, 21 nt, Human
gaaauucucccauuucaaccu

SEQ ID NO: 161633 - RNA, 19 nt, Human
gaagaggagaagaaacagg

SEQ ID NO: 161634 - RNA, 23 nt, Human
gaagaggaguggguuauucuuuu

SEQ ID NO: 161635 - RNA, 23 nt, Human
gacaaguaauaagcucugauaca

SEQ ID NO: 161636 - RNA, 24 nt, Human
gacuauaggcgugcaccaccaugc

SEQ ID NO: 161637 - RNA, 19 nt, Human
gagaaggcauuuuccagau

SEQ ID NO: 161638 - RNA, 24 nt, Human
gagacgggguuucacuauguuggc

SEQ ID NO: 161639 - RNA, 21 nt, Human
gagagaaggcauuuuccagau

SEQ ID NO: 161640 - RNA, 22 nt, Human
gagcagguaccaaaucuaguga

SEQ ID NO: 161641 - RNA, 18 nt, Human
gagccacugcacccaaaa

SEQ ID NO: 161642 - RNA, 21 nt, Human
gcaaaugguccucaucaagau

SEQ ID NO: 161643 - RNA, 24 nt, Human
gcccagcuaauuuuuuuguauuuu

SEQ ID NO: 161644 - RNA, 23 nt, Human
gcuggucucgaacuccuggccuc

SEQ ID NO: 161645 - RNA, 25 nt, Human
gcuucccggguucaagugauucucc

SEQ ID NO: 161646 - RNA, 24 nt, Human
ggacuauaggcgugcaccaccaug

SEQ ID NO: 161647 - RNA, 24 nt, Human
ggccucaagugauccaccugccuu

SEQ ID NO: 161648 - RNA, 24 nt, Human
ggcuggucucgaacuccuggccuc

SEQ ID NO: 161649 - RNA, 20 nt, Human
gggcccccaccauaaauccc

SEQ ID NO: 161650 - RNA, 23 nt, Human
gggguuucacuauguuggccagg

SEQ ID NO: 161651 - RNA, 22 nt, Human
ggguucaagugauucuccugcc

SEQ ID NO: 161652 - RNA, 23 nt, Human
ggguucaagugauucuccugccu

SEQ ID NO: 161653 - RNA, 18 nt, Human
guacuugguaaaguagaa

SEQ ID NO: 161654 - RNA, 18 nt, Human
guagcugggacuauaggc

SEQ ID NO: 161655 - RNA, 18 nt, Human
guagcugggacuauaggc

SEQ ID NO: 161656 - RNA, 24 nt, Human
gucacucaaagucugaucacuuga

SEQ ID NO: 161657 - RNA, 24 nt, Human
gugauccaccugccuuagcuucuc

SEQ ID NO: 161658 - RNA, 24 nt, Human
gugauucuccugccucagccuccu

SEQ ID NO: 161659 - RNA, 21 nt, Human
gugcugcucacuugguugucu

SEQ ID NO: 161660 - RNA, 24 nt, Human
guguaugcauuucuaaauacugag

SEQ ID NO: 161661 - RNA, 19 nt, Human
gugugguacuugguaaagu

SEQ ID NO: 161662 - RNA, 18 nt, Human
uaaaaccacacaguaaac

SEQ ID NO: 161663 - RNA, 19 nt, Human
uaaaagaaguagguauuug

SEQ ID NO: 161664 - RNA, 18 nt, Human
uaaaauggcaucaugcac

SEQ ID NO: 161665 - RNA, 23 nt, Human
uaaacagcauccuagcugacuca

SEQ ID NO: 161666 - RNA, 24 nt, Human
uaaaugcccagaagaggagugggu

SEQ ID NO: 161667 - RNA, 25 nt, Human
uaaauucagaaaauauaaaauguac

SEQ ID NO: 161668 - RNA, 24 nt, Human
uaacaaacauaugaacuauucccc

SEQ ID NO: 161669 - RNA, 20 nt, Human
uaaccuagcauuguaugugg

SEQ ID NO: 161670 - RNA, 28 nt, Human
uaagauuaguugaaaaaugaaccugaua

SEQ ID NO: 161671 - RNA, 21 nt, Human
uaagcggcagaaacacccuga

SEQ ID NO: 161672 - RNA, 21 nt, Human
uacaaacucuaugaucugagg

SEQ ID NO: 161673 - RNA, 19 nt, Human
uacaggugugagccacugc

SEQ ID NO: 161674 - RNA, 24 nt, Human
uacaggugugagccacugcaccca

SEQ ID NO: 161675 - RNA, 22 nt, Human
uaccacaaacuaucuguaccug

SEQ ID NO: 161676 - RNA, 21 nt, Human
uaccagcccauucccucagac

SEQ ID NO: 161677 - RNA, 25 nt, Human
uacccaauguauaaauuccugcuua

SEQ ID NO: 161678 - RNA, 23 nt, Human
uaccuaacccaaggucucuggac

SEQ ID NO: 161679 - RNA, 22 nt, Human
uaccugaagauaaaaccacaca

SEQ ID NO: 161680 - RNA, 24 nt, Human
uagaagagacgggguuucacuaug

SEQ ID NO: 161681 - RNA, 23 nt, Human
uagaaggugccaggggguauucu

SEQ ID NO: 161682 - RNA, 20 nt, Human
uagaaggugggaauguggca

SEQ ID NO: 161683 - RNA, 21 nt, Human
uaggacagaagacuguugguu

SEQ ID NO: 161684 - RNA, 23 nt, Human
uaucaaagguuuucauguugcuu

SEQ ID NO: 161685 - RNA, 19 nt, Human
uauguuggccaggcugguc

SEQ ID NO: 161686 - RNA, 24 nt, Human
uauguuggccaggcuggucucgaa

SEQ ID NO: 161687 - RNA, 22 nt, Human
uauuacaggugugagccacugc

SEQ ID NO: 161688 - RNA, 19 nt, Human
uauuagaagaggagaagaa

SEQ ID NO: 161689 - RNA, 21 nt, Human
uauugugccuacauuuuccuu

SEQ ID NO: 161690 - RNA, 24 nt, Human
ucaaacugcugguauuacaggugu

SEQ ID NO: 161691 - RNA, 26 nt, Human
ucaacagacugaaaaacuggggaggg

SEQ ID NO: 161692 - RNA, 20 nt, Human
ucaagugauauaagagagag

SEQ ID NO: 161693 - RNA, 21 nt, Human
ucaagugauccaccugccuua

SEQ ID NO: 161694 - RNA, 19 nt, Human
ucaagugauucuccugccu

SEQ ID NO: 161695 - RNA, 22 nt, Human
ucacuauguuggccaggcuggu

SEQ ID NO: 161696 - RNA, 24 nt, Human
ucacugcagacucugcuucccggg

SEQ ID NO: 161697 - RNA, 22 nt, Human
ucagaaggcuguaaaauccugu

SEQ ID NO: 161698 - RNA, 24 nt, Human
ucagaugacucuuucugugucuuc

SEQ ID NO: 161699 - RNA, 18 nt, Human
ucaggaaggggagagacu

SEQ ID NO: 161700 - RNA, 20 nt, Human
ucaggaaggggagagacuuc

SEQ ID NO: 161701 - RNA, 19 nt, Human
ucccaccaagcagcuacuc

SEQ ID NO: 161702 - RNA, 18 nt, Human
uccccaaguuagggugga

SEQ ID NO: 161703 - RNA, 20 nt, Human
ucccccuaaaaacccuuaga

SEQ ID NO: 161704 - RNA, 21 nt, Human
ucccggguucaagugauucuc

SEQ ID NO: 161705 - RNA, 24 nt, Human
ucccggguucaagugauucuccug

SEQ ID NO: 161706 - RNA, 18 nt, Human
ucccuugggaaauagaau

SEQ ID NO: 161707 - RNA, 20 nt, Human
uccuuuaagcacaggaccua

SEQ ID NO: 161708 - RNA, 18 nt, Human
ucgcccaggcugaagugc

SEQ ID NO: 161709 - RNA, 24 nt, Human
ucucaaacugcugguauuacaggu

SEQ ID NO: 161710 - RNA, 24 nt, Human
ucuccacuguaaccuagcauugua

SEQ ID NO: 161711 - RNA, 20 nt, Human
ucucccauuucaaccuacua

SEQ ID NO: 161712 - RNA, 26 nt, Human
ucuccugccucagccuccuguguagc

SEQ ID NO: 161713 - RNA, 21 nt, Human
ucucgaacuccuggccucaag

SEQ ID NO: 161714 - RNA, 28 nt, Human
ucuguaccugaagauaaaaccggggucc

SEQ ID NO: 161715 - RNA, 23 nt, Human
ucuguauuagguuggguuagaag

SEQ ID NO: 161716 - RNA, 22 nt, Human
ucuuaaaugucuccagaaacca

SEQ ID NO: 161717 - RNA, 21 nt, Human
ucuugaguacuuacuuaaucc

SEQ ID NO: 161718 - RNA, 19 nt, Human
ucuugcucuaucgcccagg

SEQ ID NO: 161719 - RNA, 23 nt, Human
ucuugcucuaucgcccaggcuga

SEQ ID NO: 161720 - RNA, 24 nt, Human
ucuugcucuaucgcccaggcugaa

SEQ ID NO: 161721 - RNA, 22 nt, Human
ucuuugguucccacuuauguuu

SEQ ID NO: 161722 - RNA, 20 nt, Human
ugaaagaaaagugauccaau

SEQ ID NO: 161723 - RNA, 22 nt, Human
ugaaagaaaagugauccaauga

SEQ ID NO: 161724 - RNA, 23 nt, Human
ugaagauggauauaccuaaccca

SEQ ID NO: 161725 - RNA, 19 nt, Human
ugaagugcaaugccgcgau

SEQ ID NO: 161726 - RNA, 24 nt, Human
ugaagugcaaugccgcgaucuugg

SEQ ID NO: 161727 - RNA, 27 nt, Human
ugaaugaaucaucagaaggcuguaaaa

SEQ ID NO: 161728 - RNA, 22 nt, Human
ugagacagagucuugcucuauc

SEQ ID NO: 161729 - RNA, 20 nt, Human
ugagagaauuacaucagaug

SEQ ID NO: 161730 - RNA, 18 nt, Human
ugagauagaaacagaaau

SEQ ID NO: 161731 - RNA, 23 nt, Human
ugagguagggugaauaguuguca

SEQ ID NO: 161732 - RNA, 18 nt, Human
ugaguaaaggaauauguu

SEQ ID NO: 161733 - RNA, 20 nt, Human
ugaguaaaggaauauguucu

SEQ ID NO: 161734 - RNA, 21 nt, Human
ugaguuuugugaaaucauggc

SEQ ID NO: 161735 - RNA, 23 nt, Human
ugauacaaauaagcucucaccuu

SEQ ID NO: 161736 - RNA, 25 nt, Human
ugauauaagagagagaugggguaaa

SEQ ID NO: 161737 - RNA, 21 nt, Human
ugaugcgaaacagacauugga

SEQ ID NO: 161738 - RNA, 20 nt, Human
ugauucuccugccucagccu

SEQ ID NO: 161739 - RNA, 22 nt, Human
ugcaaugccgcgaucuuggcuc

SEQ ID NO: 161740 - RNA, 23 nt, Human
ugccaggggguauucuaggguag

SEQ ID NO: 161741 - RNA, 22 nt, Human
ugccuaguugagauagaaacag

SEQ ID NO: 161742 - RNA, 24 nt, Human
ugccucagccuccuguguagcugg

SEQ ID NO: 161743 - RNA, 23 nt, Human
ugccucucaggaugucucuggag

SEQ ID NO: 161744 - RNA, 19 nt, Human
ugcucccugcuuagagagg

SEQ ID NO: 161745 - RNA, 24 nt, Human
ugcucuaucgcccaggcugaagug

SEQ ID NO: 161746 - RNA, 22 nt, Human
ugcugcucacuugguugucuuu

SEQ ID NO: 161747 - RNA, 19 nt, Human
ugcuuauaauuauauagga

SEQ ID NO: 161748 - RNA, 24 nt, Human
uggaagacaaggaggaaagaggga

SEQ ID NO: 161749 - RNA, 20 nt, Human
uggcaaagaaugggaguccc

SEQ ID NO: 161750 - RNA, 24 nt, Human
uggccaggcuggucucgaacuccu

SEQ ID NO: 161751 - RNA, 24 nt, Human
uggccucaagugauccaccugccu

SEQ ID NO: 161752 - RNA, 21 nt, Human
ugggacuauaggcgugcacca

SEQ ID NO: 161753 - RNA, 24 nt, Human
ugggacuauaggcgugcaccacca

SEQ ID NO: 161754 - RNA, 25 nt, Human
ugggacuauaggcgugcaccaccau

SEQ ID NO: 161755 - RNA, 19 nt, Human
uggguuagaaggugccagg

SEQ ID NO: 161756 - RNA, 19 nt, Human
ugguauuacaggugugagc

SEQ ID NO: 161757 - RNA, 21 nt, Human
ugguauuacaggugugagcca

SEQ ID NO: 161758 - RNA, 22 nt, Human
ugguauuacaggugugagccac

SEQ ID NO: 161759 - RNA, 24 nt, Human
ugguauuacaggugugagccacug

SEQ ID NO: 161760 - RNA, 19 nt, Human
uguagcugggacuauaggc

SEQ ID NO: 161761 - RNA, 24 nt, Human
uguagggaagaauauagaaccugu

SEQ ID NO: 161762 - RNA, 25 nt, Human
ugucucauucaucuuggcuucucca

SEQ ID NO: 161763 - RNA, 18 nt, Human
ugugaaaccagaagacaa

SEQ ID NO: 161764 - RNA, 19 nt, Human
ugugagccacugcacccaa

SEQ ID NO: 161765 - RNA, 22 nt, Human
ugugagccacugcacccaaaag

SEQ ID NO: 161766 - RNA, 22 nt, Human
uguggcacuuucuugacuaggu

SEQ ID NO: 161767 - RNA, 22 nt, Human
ugugucaauugggccaagaugu

SEQ ID NO: 161768 - RNA, 20 nt, Human
ugugucuucaaacuugucac

SEQ ID NO: 161769 - RNA, 19 nt, Human
uuagaaauucauauauaug

SEQ ID NO: 161770 - RNA, 24 nt, Human
uuagaagagacgggguuucacuau

SEQ ID NO: 161771 - RNA, 21 nt, Human
uuaguugaaaaaugaaccuga

SEQ ID NO: 161772 - RNA, 21 nt, Human
uucaagugauucuccugccuc

SEQ ID NO: 161773 - RNA, 23 nt, Human
uucaagugauucuccugccucag

SEQ ID NO: 161774 - RNA, 24 nt, Human
uucaagugauucuccugccucagc

SEQ ID NO: 161775 - RNA, 21 nt, Human
uucaggaaggggagagacuuc

SEQ ID NO: 161776 - RNA, 23 nt, Human
uucaucuuuuuggauuuggaaag

SEQ ID NO: 161777 - RNA, 19 nt, Human
uuccuagacaaagagaaaa

SEQ ID NO: 161778 - RNA, 20 nt, Human
uuccuuagcuuugccuggug

SEQ ID NO: 161779 - RNA, 18 nt, Human
uuccuuauauucucuuuc

SEQ ID NO: 161780 - RNA, 21 nt, Human
uuccuuuuuuuuuuuucugag

SEQ ID NO: 161781 - RNA, 18 nt, Human
uugcugggauuuuucuug

SEQ ID NO: 161782 - RNA, 20 nt, Human
uuggauuuggaaaggaagau

SEQ ID NO: 161783 - RNA, 24 nt, Human
uugggagugcacagauuauaaauu

SEQ ID NO: 161784 - RNA, 20 nt, Human
uuggguuuuagccucagcug

SEQ ID NO: 161785 - RNA, 19 nt, Human
uugugccuacauuuuccuu

SEQ ID NO: 161786 - RNA, 23 nt, Human
uuguucagaucauucuuuucugu

SEQ ID NO: 161787 - RNA, 24 nt, Human
uuucacuauguuggccaggcuggu

SEQ ID NO: 161788 - RNA, 18 nt, Human
uuuccagauuuagcucug

SEQ ID NO: 161789 - RNA, 24 nt, Human
uuuccaugcauuaaagcuauuaca

SEQ ID NO: 161790 - RNA, 23 nt, Human
uuucuucccucuccaaaucaugg

SEQ ID NO: 161791 - RNA, 27 nt, Human
uuugcugacaaucuuaaaugucuccaa

SEQ ID NO: 161792 - RNA, 19 nt, Human
uuugugaaaucauggccuc

SEQ ID NO: 161793 - RNA, 21 nt, Human
uuuuguauuuuuagaagagac

SEQ ID NO: 161794 - RNA, 24 nt, Human
uuuuuagaagagacgggguuucac

SEQ ID NO: 161795 - RNA, 21 nt, Human
uuuuuuguauuuuuagaagag

SEQ ID NO: 161796 - RNA, 20 nt, Human
uuuuuuuuucugagacagag

SEQ ID NO: 161797 - RNA, 20 nt, Human
acagggcagaggaaaccagc

SEQ ID NO: 161798 - RNA, 24 nt, Human
auucucccucuggugagguugugg

SEQ ID NO: 161799 - RNA, 21 nt, Human
cucucuggccuuugacucuga

SEQ ID NO: 161800 - RNA, 21 nt, Human
cugagcugggggcaaaggggc

SEQ ID NO: 161801 - RNA, 21 nt, Human
cuuguggguguggccucccca

SEQ ID NO: 161802 - RNA, 26 nt, Human
gcauguggcggcuugacugagcuggg

SEQ ID NO: 161803 - RNA, 23 nt, Human
gccuuugacucugaagagucccc

SEQ ID NO: 161804 - RNA, 19 nt, Human
gcuggggaaauggggugac

SEQ ID NO: 161805 - RNA, 19 nt, Human
gcugggggcaaaggggcag

SEQ ID NO: 161806 - RNA, 22 nt, Human
guggcggcuugacugagcuggg

SEQ ID NO: 161807 - RNA, 22 nt, Human
uccacgacgcagcgcuuguggg

SEQ ID NO: 161808 - RNA, 20 nt, Human
ucccaaaguaaacauauuua

SEQ ID NO: 161809 - RNA, 20 nt, Human
ucugaagagucccccagcuc

SEQ ID NO: 161810 - RNA, 19 nt, Human
ugagcugggggcaaagggg

SEQ ID NO: 161811 - RNA, 20 nt, Human
ugagcugggggcaaaggggc

SEQ ID NO: 161812 - RNA, 18 nt, Human
ugggagugugucuggcug

SEQ ID NO: 161813 - RNA, 20 nt, Human
aaacaucacagcacaauuuc

SEQ ID NO: 161814 - RNA, 20 nt, Human
aacccuaccccccaaccaac

SEQ ID NO: 161815 - RNA, 22 nt, Human
aaccguagggccaagcucccaa

SEQ ID NO: 161816 - RNA, 18 nt, Human
aaccucucccagccuccc

SEQ ID NO: 161817 - RNA, 24 nt, Human
aaccuguucuccucacaagacucc

SEQ ID NO: 161818 - RNA, 24 nt, Human
aaccuguucuccucacaagacucc

SEQ ID NO: 161819 - RNA, 26 nt, Human
aaccuguucuccucacaagacuccac

SEQ ID NO: 161820 - RNA, 26 nt, Human
aaccuguucuccucacaagacuccac

SEQ ID NO: 161821 - RNA, 26 nt, Human
aaccuguucuccucacaagacuccag

SEQ ID NO: 161822 - RNA, 26 nt, Human
aaccuguucuccucacaagacuccag

SEQ ID NO: 161823 - RNA, 20 nt, Human
aagaagcagggccauaggcg

SEQ ID NO: 161824 - RNA, 21 nt, Human
aagccaggggacaggagccgg

SEQ ID NO: 161825 - RNA, 18 nt, Human
aagccccaagccacacag

SEQ ID NO: 161826 - RNA, 18 nt, Human
aagccccaagccacacag

SEQ ID NO: 161827 - RNA, 20 nt, Human
aagcucccaaacccuacccc

SEQ ID NO: 161828 - RNA, 22 nt, Human
aagcucccaaacccuacccccc

SEQ ID NO: 161829 - RNA, 22 nt, Human
aagcucccaaacccuacccccc

SEQ ID NO: 161830 - RNA, 24 nt, Human
aagcucccaaacccuaccccccaa

SEQ ID NO: 161831 - RNA, 24 nt, Human
aagcucccaaacccuaccccccaa

SEQ ID NO: 161832 - RNA, 21 nt, Human
aagggcagccacaagccgugg

SEQ ID NO: 161833 - RNA, 23 nt, Human
acaagccccaagccacacagcag

SEQ ID NO: 161834 - RNA, 23 nt, Human
acaagccccaagccacacagcag

SEQ ID NO: 161835 - RNA, 20 nt, Human
acccaccggucaucuccccc

SEQ ID NO: 161836 - RNA, 20 nt, Human
acccaccggucaucuccccc

SEQ ID NO: 161837 - RNA, 19 nt, Human
acccuaccccccaaccaac

SEQ ID NO: 161838 - RNA, 19 nt, Human
acccuaccccccaaccaac

SEQ ID NO: 161839 - RNA, 19 nt, Human
accucucccagccuccccc

SEQ ID NO: 161840 - RNA, 19 nt, Human
accucucccagccuccccc

SEQ ID NO: 161841 - RNA, 24 nt, Human
acuuagcaaacugguaguuguccu

SEQ ID NO: 161842 - RNA, 24 nt, Human
acuuagcaaacugguaguuguccu

SEQ ID NO: 161843 - RNA, 23 nt, Human
agccaagggcagccacaagccgu

SEQ ID NO: 161844 - RNA, 21 nt, Human
aggaaacgggcaagcaaccau

SEQ ID NO: 161845 - RNA, 20 nt, Human
aggaagaagcagggccauaa

SEQ ID NO: 161846 - RNA, 18 nt, Human
aggagccgggggggccag

SEQ ID NO: 161847 - RNA, 18 nt, Human
aggagccgggggggccag

SEQ ID NO: 161848 - RNA, 20 nt, Human
aggaugaaggaggaaauggg

SEQ ID NO: 161849 - RNA, 20 nt, Human
aggaugaaggaggaaauggg

SEQ ID NO: 161850 - RNA, 23 nt, Human
aggcaacaagccccaagccacac

SEQ ID NO: 161851 - RNA, 27 nt, Human
aggcaacaagccccaagccacacagca

SEQ ID NO: 161852 - RNA, 27 nt, Human
aggcaacaagccccaagccacacagca

SEQ ID NO: 161853 - RNA, 18 nt, Human
aggggacaggagccgggg

SEQ ID NO: 161854 - RNA, 18 nt, Human
aggggacaggagccgggg

SEQ ID NO: 161855 - RNA, 23 nt, Human
auccacccuccgcuggaaaaccu

SEQ ID NO: 161856 - RNA, 24 nt, Human
caaaccguagggccaagcucccaa

SEQ ID NO: 161857 - RNA, 24 nt, Human
caaaccguagggccaagcucccaa

SEQ ID NO: 161858 - RNA, 22 nt, Human
caaccucucccagccuccccca

SEQ ID NO: 161859 - RNA, 22 nt, Human
caaccucucccagccuccccca

SEQ ID NO: 161860 - RNA, 25 nt, Human
caagccccaagccacacagcaggag

SEQ ID NO: 161861 - RNA, 25 nt, Human
caagccccaagccacacagcaggag

SEQ ID NO: 161862 - RNA, 22 nt, Human
caagcucccaaacccuaccccc

SEQ ID NO: 161863 - RNA, 22 nt, Human
caagcucccaaacccuaccccc

SEQ ID NO: 161864 - RNA, 23 nt, Human
caagcucccaaacccuacccccc

SEQ ID NO: 161865 - RNA, 23 nt, Human
caagcucccaaacccuacccccc

SEQ ID NO: 161866 - RNA, 24 nt, Human
cacccccaccuucagcuccugggc

SEQ ID NO: 161867 - RNA, 27 nt, Human
caccuucagcuccugggcacccggccu

SEQ ID NO: 161868 - RNA, 21 nt, Human
cacgaaggcccccaggaccag

SEQ ID NO: 161869 - RNA, 21 nt, Human
cacgaaggcccccaggaccag

SEQ ID NO: 161870 - RNA, 22 nt, Human
cacuuccuugaauaauuagggg

SEQ ID NO: 161871 - RNA, 22 nt, Human
cagcacgggggaccgcucucca

SEQ ID NO: 161872 - RNA, 22 nt, Human
cagcacgggggaccgcucucca

SEQ ID NO: 161873 - RNA, 18 nt, Human
cagcauuuguaguuggca

SEQ ID NO: 161874 - RNA, 21 nt, Human
cagcccccuccguccgugucc

SEQ ID NO: 161875 - RNA, 21 nt, Human
cagcuccugggcacccggccu

SEQ ID NO: 161876 - RNA, 25 nt, Human
cagcuccugggcacccggccuucug

SEQ ID NO: 161877 - RNA, 22 nt, Human
caggagcccugggcagggcaca

SEQ ID NO: 161878 - RNA, 19 nt, Human
caggagccgggggggccag

SEQ ID NO: 161879 - RNA, 18 nt, Human
caguaggagggaggccug

SEQ ID NO: 161880 - RNA, 19 nt, Human
caguaggagggaggccugg

SEQ ID NO: 161881 - RNA, 20 nt, Human
ccaaccucucccagccuccc

SEQ ID NO: 161882 - RNA, 21 nt, Human
ccaaccucucccagccucccc

SEQ ID NO: 161883 - RNA, 22 nt, Human
ccaaccucucccagccuccccc

SEQ ID NO: 161884 - RNA, 23 nt, Human
ccaccaggugugcagccuggccu

SEQ ID NO: 161885 - RNA, 22 nt, Human
ccagccaagggcagccacaagc

SEQ ID NO: 161886 - RNA, 23 nt, Human
ccagccaagggcagccacaagcc

SEQ ID NO: 161887 - RNA, 23 nt, Human
ccagccagaacucccccagccga

SEQ ID NO: 161888 - RNA, 23 nt, Human
ccagccagaacucccccagccga

SEQ ID NO: 161889 - RNA, 25 nt, Human
ccauccacccuccgcuggaaaaccu

SEQ ID NO: 161890 - RNA, 22 nt, Human
cccaaccucucccagccucccc

SEQ ID NO: 161891 - RNA, 22 nt, Human
cccaaccucucccagccucccc

SEQ ID NO: 161892 - RNA, 19 nt, Human
cccaagccacacagcagga

SEQ ID NO: 161893 - RNA, 19 nt, Human
cccaagccacacagcagga

SEQ ID NO: 161894 - RNA, 19 nt, Human
cccacacucacgguccagc

SEQ ID NO: 161895 - RNA, 19 nt, Human
ccccaaaggccuggacuuu

SEQ ID NO: 161896 - RNA, 19 nt, Human
ccccaaaggccuggacuuu

SEQ ID NO: 161897 - RNA, 23 nt, Human
ccccaaaggccuggacuuuuacc

SEQ ID NO: 161898 - RNA, 23 nt, Human
ccccaaaggccuggacuuuuacc

SEQ ID NO: 161899 - RNA, 26 nt, Human
ccccaaaggccuggacuuuuaccucg

SEQ ID NO: 161900 - RNA, 27 nt, Human
ccccaaaggccuggacuuuuaccucgu

SEQ ID NO: 161901 - RNA, 19 nt, Human
ccccacacucacgguccag

SEQ ID NO: 161902 - RNA, 18 nt, Human
ccccagccgacugccgaa

SEQ ID NO: 161903 - RNA, 18 nt, Human
ccccagccgacugccgaa

SEQ ID NO: 161904 - RNA, 21 nt, Human
cccccagccgacugccgaagc

SEQ ID NO: 161905 - RNA, 21 nt, Human
cccccagccgacugccgaagc

SEQ ID NO: 161906 - RNA, 23 nt, Human
cccccagccgacugccgaagccc

SEQ ID NO: 161907 - RNA, 23 nt, Human
cccccagccgacugccgaagccc

SEQ ID NO: 161908 - RNA, 21 nt, Human
ccccugagguagcgaccauuc

SEQ ID NO: 161909 - RNA, 18 nt, Human
cccugaggccggccuggg

SEQ ID NO: 161910 - RNA, 18 nt, Human
cccugaggccggccuggg

SEQ ID NO: 161911 - RNA, 22 nt, Human
cccuggacuuccagccaagggc

SEQ ID NO: 161912 - RNA, 18 nt, Human
cccugggcagggcacagg

SEQ ID NO: 161913 - RNA, 20 nt, Human
ccgcagccaguuggccugga

SEQ ID NO: 161914 - RNA, 20 nt, Human
ccgcagccaguuggccuggc

SEQ ID NO: 161915 - RNA, 21 nt, Human
ccucucccagccucccccaaa

SEQ ID NO: 161916 - RNA, 21 nt, Human
ccucucccagccucccccaaa

SEQ ID NO: 161917 - RNA, 24 nt, Human
cggcagucgggcagguagauggug

SEQ ID NO: 161918 - RNA, 25 nt, Human
cucccaaacccuaccccccaaccaa

SEQ ID NO: 161919 - RNA, 25 nt, Human
cucccaaacccuaccccccaaccaa

SEQ ID NO: 161920 - RNA, 26 nt, Human
cucccaaacccuaccccccaaccaac

SEQ ID NO: 161921 - RNA, 26 nt, Human
cucccaaacccuaccccccaaccaac

SEQ ID NO: 161922 - RNA, 23 nt, Human
cucccaccucccagugucacccc

SEQ ID NO: 161923 - RNA, 26 nt, Human
cucccaggcugaccgccucugcccag

SEQ ID NO: 161924 - RNA, 23 nt, Human
cucccagugucacccccaccuuc

SEQ ID NO: 161925 - RNA, 18 nt, Human
cucccccagccgacugcc

SEQ ID NO: 161926 - RNA, 18 nt, Human
cucccccagccgacugcc

SEQ ID NO: 161927 - RNA, 24 nt, Human
cuggacaauauuugucacuuccuu

SEQ ID NO: 161928 - RNA, 20 nt, Human
cuggacuuuuacccaccggu

SEQ ID NO: 161929 - RNA, 20 nt, Human
cuggacuuuuacccaccggu

SEQ ID NO: 161930 - RNA, 22 nt, Human
cuguaugaacagagcgggacuc

SEQ ID NO: 161931 - RNA, 22 nt, Human
gaagccaggggacaggagccgg

SEQ ID NO: 161932 - RNA, 18 nt, Human
gaaggaggaaaugggggc

SEQ ID NO: 161933 - RNA, 18 nt, Human
gaaggaggaaaugggggc

SEQ ID NO: 161934 - RNA, 18 nt, Human
gaaggcccccaggaccag

SEQ ID NO: 161935 - RNA, 18 nt, Human
gaaggcccccaggaccag

SEQ ID NO: 161936 - RNA, 21 nt, Human
gacaggagcccugggcagggc

SEQ ID NO: 161937 - RNA, 20 nt, Human
gacuuccagccaagggcagc

SEQ ID NO: 161938 - RNA, 20 nt, Human
gagcacagucaggggccggc

SEQ ID NO: 161939 - RNA, 21 nt, Human
gcaacaagccccaagccacac

SEQ ID NO: 161940 - RNA, 18 nt, Human
gcagccuggccuccggga

SEQ ID NO: 161941 - RNA, 23 nt, Human
gccaagcucccaaacccuacccc

SEQ ID NO: 161942 - RNA, 19 nt, Human
gcccccuccguccgugucc

SEQ ID NO: 161943 - RNA, 18 nt, Human
gccgcagccaguuggccu

SEQ ID NO: 161944 - RNA, 20 nt, Human
gcuggaaaaccuguggagaa

SEQ ID NO: 161945 - RNA, 21 nt, Human
ggacaaggaaacgggcaagca

SEQ ID NO: 161946 - RNA, 21 nt, Human
ggacucccaggcugaccgccu

SEQ ID NO: 161947 - RNA, 24 nt, Human
ggaggaaaugggggcucagagagg

SEQ ID NO: 161948 - RNA, 24 nt, Human
ggaggaaaugggggcucagagagg

SEQ ID NO: 161949 - RNA, 25 nt, Human
ggaggaaaugggggcucagagaggg

SEQ ID NO: 161950 - RNA, 25 nt, Human
ggaggaaaugggggcucagagaggg

SEQ ID NO: 161951 - RNA, 22 nt, Human
ggaggaagaagcagggccauag

SEQ ID NO: 161952 - RNA, 20 nt, Human
ggcagagaucacaggugggg

SEQ ID NO: 161953 - RNA, 20 nt, Human
ggcagagaucacaggugggg

SEQ ID NO: 161954 - RNA, 19 nt, Human
ggcaguaggagggaggccu

SEQ ID NO: 161955 - RNA, 18 nt, Human
ggccuccgggacucccag

SEQ ID NO: 161956 - RNA, 19 nt, Human
ggccugggcuaggcagguc

SEQ ID NO: 161957 - RNA, 20 nt, Human
gggacaggagccgggggggc

SEQ ID NO: 161958 - RNA, 20 nt, Human
gggacaggagccgggggggc

SEQ ID NO: 161959 - RNA, 21 nt, Human
gggcagcauuuguaguuggca

SEQ ID NO: 161960 - RNA, 23 nt, Human
gggcagccacaagccgugggagg

SEQ ID NO: 161961 - RNA, 19 nt, Human
guaguuguccucaaagucc

SEQ ID NO: 161962 - RNA, 19 nt, Human
guaguuguccucaaagucc

SEQ ID NO: 161963 - RNA, 21 nt, Human
guaugacccuggacuuccagc

SEQ ID NO: 161964 - RNA, 20 nt, Human
guauguaaguugucuggaca

SEQ ID NO: 161965 - RNA, 18 nt, Human
gugcagccuggccuccgg

SEQ ID NO: 161966 - RNA, 18 nt, Human
gugggaggaguguggggg

SEQ ID NO: 161967 - RNA, 25 nt, Human
guuaagaucauuguccuggucuuug

SEQ ID NO: 161968 - RNA, 19 nt, Human
uacccaccggucaucuccc

SEQ ID NO: 161969 - RNA, 19 nt, Human
uacccaccggucaucuccc

SEQ ID NO: 161970 - RNA, 23 nt, Human
uaggagggaggccugggaggaag

SEQ ID NO: 161971 - RNA, 22 nt, Human
uauaaauagaaaaaaaaauugc

SEQ ID NO: 161972 - RNA, 22 nt, Human
uaugaacagagcgggacucuga

SEQ ID NO: 161973 - RNA, 27 nt, Human
ucauuguccuggucuuugguggagaag

SEQ ID NO: 161974 - RNA, 21 nt, Human
uccacgaaggcccccaggacc

SEQ ID NO: 161975 - RNA, 21 nt, Human
uccacgaaggcccccaggacc

SEQ ID NO: 161976 - RNA, 27 nt, Human
ucccaaacccuaccccccaaccaacua

SEQ ID NO: 161977 - RNA, 27 nt, Human
ucccaaacccuaccccccaaccaacua

SEQ ID NO: 161978 - RNA, 19 nt, Human
ucccagugucacccccacc

SEQ ID NO: 161979 - RNA, 22 nt, Human
ucccagugucacccccaccuuc

SEQ ID NO: 161980 - RNA, 20 nt, Human
uccccgaccaggagaauaga

SEQ ID NO: 161981 - RNA, 20 nt, Human
ucccgguagaaguccacaga

SEQ ID NO: 161982 - RNA, 20 nt, Human
ucccgguagaaguccacaga

SEQ ID NO: 161983 - RNA, 18 nt, Human
ucccugggcggucagggc

SEQ ID NO: 161984 - RNA, 18 nt, Human
ucccugggcggucagggc

SEQ ID NO: 161985 - RNA, 24 nt, Human
uccgcuggaaaaccuguggagaag

SEQ ID NO: 161986 - RNA, 23 nt, Human
uccucaaaguccaccaggucuac

SEQ ID NO: 161987 - RNA, 23 nt, Human
uccucaaaguccaccaggucuac

SEQ ID NO: 161988 - RNA, 22 nt, Human
uccuugcagguacgcgggccug

SEQ ID NO: 161989 - RNA, 24 nt, Human
uccuugcagguacgcgggccuggg

SEQ ID NO: 161990 - RNA, 22 nt, Human
ucucugacuguccccgaccagg

SEQ ID NO: 161991 - RNA, 18 nt, Human
ugaaggaggaaauggggg

SEQ ID NO: 161992 - RNA, 18 nt, Human
ugaaggaggaaauggggg

SEQ ID NO: 161993 - RNA, 22 nt, Human
ugaaggaggaaaugggggcuca

SEQ ID NO: 161994 - RNA, 22 nt, Human
ugaaggaggaaaugggggcuca

SEQ ID NO: 161995 - RNA, 18 nt, Human
ugcaggacaggagcccug

SEQ ID NO: 161996 - RNA, 22 nt, Human
ugcaggacaggagcccugggca

SEQ ID NO: 161997 - RNA, 19 nt, Human
ugccaugagucccccugag

SEQ ID NO: 161998 - RNA, 24 nt, Human
ugccaugagucccccugagguagc

SEQ ID NO: 161999 - RNA, 21 nt, Human
ugcccucggucuagcaggucc

SEQ ID NO: 162000 - RNA, 18 nt, Human
uggcagagaucacaggug

SEQ ID NO: 162001 - RNA, 18 nt, Human
uggcagagaucacaggug

SEQ ID NO: 162002 - RNA, 18 nt, Human
uggcagagaucacaggug

SEQ ID NO: 162003 - RNA, 18 nt, Human
uggcagagaucacaggug

SEQ ID NO: 162004 - RNA, 18 nt, Human
uggccgcagccaguuggc

SEQ ID NO: 162005 - RNA, 19 nt, Human
uggccgcagccaguuggcc

SEQ ID NO: 162006 - RNA, 21 nt, Human
ugggaggaagaagcagggcca

SEQ ID NO: 162007 - RNA, 23 nt, Human
ugggggcucagagaggggaggca

SEQ ID NO: 162008 - RNA, 23 nt, Human
ugggggcucagagaggggaggca

SEQ ID NO: 162009 - RNA, 18 nt, Human
ugucacagagcacaguca

SEQ ID NO: 162010 - RNA, 21 nt, Human
ugucacagagcacagucaggg

SEQ ID NO: 162011 - RNA, 22 nt, Human
uguuaagaucauuguccugguc

SEQ ID NO: 162012 - RNA, 19 nt, Human
uuccccagccagaacuccc

SEQ ID NO: 162013 - RNA, 19 nt, Human
uuccccagccagaacuccc

SEQ ID NO: 162014 - RNA, 18 nt, Human
uucuccucacaagacucc

SEQ ID NO: 162015 - RNA, 19 nt, Human
uucuccucacaagacucca

SEQ ID NO: 162016 - RNA, 18 nt, Human
uuguacguggcccagucc

SEQ ID NO: 162017 - RNA, 18 nt, Human
uuguacguggcccagucc

SEQ ID NO: 162018 - RNA, 20 nt, Human
uuuccgguguuaagaucauu

SEQ ID NO: 162019 - RNA, 25 nt, Human
uuuuacccaccggucaucuccccca

SEQ ID NO: 162020 - RNA, 25 nt, Human
uuuuacccaccggucaucuccccca

SEQ ID NO: 162021 - RNA, 23 nt, Human
aaagaaccaugcagaaaccaaag

SEQ ID NO: 162022 - RNA, 22 nt, Human
aagaaccaugcagaaaccaaag

SEQ ID NO: 162023 - RNA, 22 nt, Human
acuguuuugagauagaaggaaa

SEQ ID NO: 162024 - RNA, 18 nt, Human
agcagaggugguuggcaa

SEQ ID NO: 162025 - RNA, 22 nt, Human
agguggcugacgauccggaagc

SEQ ID NO: 162026 - RNA, 21 nt, Human
auaucacaggcacuugccuac

SEQ ID NO: 162027 - RNA, 19 nt, Human
caaagaaccaugcagaaac

SEQ ID NO: 162028 - RNA, 22 nt, Human
caaagaaccaugcagaaaccaa

SEQ ID NO: 162029 - RNA, 21 nt, Human
cagaggugguuggcaaaggca

SEQ ID NO: 162030 - RNA, 23 nt, Human
cagaggugguuggcaaaggcaag

SEQ ID NO: 162031 - RNA, 26 nt, Human
gagcuugcuuuuuugucucggguucc

SEQ ID NO: 162032 - RNA, 20 nt, Human
uacaggagagauaagggcac

SEQ ID NO: 162033 - RNA, 24 nt, Human
uacuguuuugagauagaaggaaau

SEQ ID NO: 162034 - RNA, 26 nt, Human
uagaaucccggucuuuucccccgagg

SEQ ID NO: 162035 - RNA, 22 nt, Human
ugcaaagaaccaugcagaaacc

SEQ ID NO: 162036 - RNA, 20 nt, Human
uggcugacgauccggaagcu

SEQ ID NO: 162037 - RNA, 20 nt, Human
uguggacaggcaagcagagg

SEQ ID NO: 162038 - RNA, 23 nt, Human
uguggacaggcaagcagaggugg

SEQ ID NO: 162039 - RNA, 24 nt, Human
uguggacaggcaagcagagguggu

SEQ ID NO: 162040 - RNA, 23 nt, Human
uucguaagcacuugcugaacugc

SEQ ID NO: 162041 - RNA, 22 nt, Human
uugcauggucuuugcagacuac

SEQ ID NO: 162042 - RNA, 19 nt, Human
uugggaaaguaaggacaaa

SEQ ID NO: 162043 - RNA, 21 nt, Human
uuuaaaaaccucucauuaccu

SEQ ID NO: 162044 - RNA, 25 nt, Human
uuuaaaaaccucucauuaccuucuu

SEQ ID NO: 162045 - RNA, 22 nt, Human
aaaacggugaaaucuugucucc

SEQ ID NO: 162046 - RNA, 23 nt, Human
aaacagaagagcacaauaugacc

SEQ ID NO: 162047 - RNA, 18 nt, Human
aagcacuuggacugaaug

SEQ ID NO: 162048 - RNA, 20 nt, Human
acagagugagacccugucuc

SEQ ID NO: 162049 - RNA, 27 nt, Human
acagagugagacccugucucaauuuaa

SEQ ID NO: 162050 - RNA, 18 nt, Human
acggugaaaucuugucuc

SEQ ID NO: 162051 - RNA, 21 nt, Human
agccugggcaaaacggugaaa

SEQ ID NO: 162052 - RNA, 20 nt, Human
aggaguuugagaccagccug

SEQ ID NO: 162053 - RNA, 19 nt, Human
aggcaggcguugcagugag

SEQ ID NO: 162054 - RNA, 24 nt, Human
aggcugaggugagagguuugcuug

SEQ ID NO: 162055 - RNA, 18 nt, Human
aggcuuggggucauggau

SEQ ID NO: 162056 - RNA, 24 nt, Human
auugcuugagcccaggaguuugag

SEQ ID NO: 162057 - RNA, 22 nt, Human
caaaacggugaaaucuugucuc

SEQ ID NO: 162058 - RNA, 24 nt, Human
caaaacggugaaaucuugucucua

SEQ ID NO: 162059 - RNA, 28 nt, Human
caaaauaaauagaaucauauuuuaggug

SEQ ID NO: 162060 - RNA, 24 nt, Human
caagauugugccacugcauuccag

SEQ ID NO: 162061 - RNA, 20 nt, Human
cacgauuucaaaaauuuugu

SEQ ID NO: 162062 - RNA, 19 nt, Human
cacugcauuccagauugag

SEQ ID NO: 162063 - RNA, 19 nt, Human
caggaucucugaagaacau

SEQ ID NO: 162064 - RNA, 23 nt, Human
cauuccagauugagugacagagu

SEQ ID NO: 162065 - RNA, 24 nt, Human
cauugcuugagcccaggaguuuga

SEQ ID NO: 162066 - RNA, 20 nt, Human
ccacugcauuccagauugag

SEQ ID NO: 162067 - RNA, 20 nt, Human
ccacugcauuccagauugag

SEQ ID NO: 162068 - RNA, 24 nt, Human
ccacugcauuccagauugagugac

SEQ ID NO: 162069 - RNA, 21 nt, Human
ccagaagagguauacuggaaa

SEQ ID NO: 162070 - RNA, 23 nt, Human
ccucuuguaaacagaagagcaca

SEQ ID NO: 162071 - RNA, 19 nt, Human
ccugggcaaaacggugaaa

SEQ ID NO: 162072 - RNA, 24 nt, Human
ccugggcaaaacggugaaaucuug

SEQ ID NO: 162073 - RNA, 24 nt, Human
ccuguagucccagcuacucagcag

SEQ ID NO: 162074 - RNA, 22 nt, Human
cucucugugaaguccugcagag

SEQ ID NO: 162075 - RNA, 24 nt, Human
cuucagggcugcgccaacuucacu

SEQ ID NO: 162076 - RNA, 19 nt, Human
cuuguaaacagaagagcac

SEQ ID NO: 162077 - RNA, 28 nt, Human
gaagaacauaucaggccugaggcuuggg

SEQ ID NO: 162078 - RNA, 18 nt, Human
gaggaccaggucagggau

SEQ ID NO: 162079 - RNA, 19 nt, Human
gaguucugugcugucuggg

SEQ ID NO: 162080 - RNA, 20 nt, Human
gaucucugaagaacauauca

SEQ ID NO: 162081 - RNA, 20 nt, Human
gcagagaaagcacuuggacu

SEQ ID NO: 162082 - RNA, 18 nt, Human
gcagugaggcaagauugu

SEQ ID NO: 162083 - RNA, 22 nt, Human
gcaugugccuguagucccagcu

SEQ ID NO: 162084 - RNA, 22 nt, Human
gccauggagaauggcauccaga

SEQ ID NO: 162085 - RNA, 22 nt, Human
gcccaggaguuugagaccagcc

SEQ ID NO: 162086 - RNA, 19 nt, Human
gcuugagccugagaggcag

SEQ ID NO: 162087 - RNA, 21 nt, Human
ggcaaaacggugaaaucuugu

SEQ ID NO: 162088 - RNA, 21 nt, Human
gguauacuggaaagcuaaugg

SEQ ID NO: 162089 - RNA, 20 nt, Human
guugcagugaggcaagauug

SEQ ID NO: 162090 - RNA, 21 nt, Human
uacauugcuugagcccaggag

SEQ ID NO: 162091 - RNA, 20 nt, Human
uacguaagacaaaaaauggc

SEQ ID NO: 162092 - RNA, 18 nt, Human
ucaaaauaaauagaauca

SEQ ID NO: 162093 - RNA, 21 nt, Human
ucauggaugguuuucaaagag

SEQ ID NO: 162094 - RNA, 19 nt, Human
uccagauugagugacagag

SEQ ID NO: 162095 - RNA, 24 nt, Human
uccagauugagugacagagugaga

SEQ ID NO: 162096 - RNA, 21 nt, Human
uccucuuguaaacagaagagc

SEQ ID NO: 162097 - RNA, 24 nt, Human
uccucuuguaaacagaagagcaca

SEQ ID NO: 162098 - RNA, 20 nt, Human
ucuaauuugguaacagugac

SEQ ID NO: 162099 - RNA, 19 nt, Human
ucugugcugucugggcaga

SEQ ID NO: 162100 - RNA, 21 nt, Human
ugaagaacauaucaggccuga

SEQ ID NO: 162101 - RNA, 22 nt, Human
ugacagagugagacccugucuc

SEQ ID NO: 162102 - RNA, 23 nt, Human
ugagcccaggaguuugagaccag

SEQ ID NO: 162103 - RNA, 24 nt, Human
ugagccugagaggcaggcguugca

SEQ ID NO: 162104 - RNA, 21 nt, Human
ugagugacagagugagacccu

SEQ ID NO: 162105 - RNA, 24 nt, Human
ugagugacagagugagacccuguc

SEQ ID NO: 162106 - RNA, 25 nt, Human
ugauaacaaagucccugucacuccc

SEQ ID NO: 162107 - RNA, 22 nt, Human
ugccccaggaucucugaagaac

SEQ ID NO: 162108 - RNA, 19 nt, Human
ugccuguagucccagcuac

SEQ ID NO: 162109 - RNA, 22 nt, Human
ugccuguagucccagcuacuca

SEQ ID NO: 162110 - RNA, 26 nt, Human
ugccuguagucccagcuacucagcag

SEQ ID NO: 162111 - RNA, 18 nt, Human
ugcuugagcccaggaguu

SEQ ID NO: 162112 - RNA, 21 nt, Human
uggagaauggcauccagaaga

SEQ ID NO: 162113 - RNA, 24 nt, Human
ugggcaaaacggugaaaucuuguc

SEQ ID NO: 162114 - RNA, 24 nt, Human
ugguggcaugugccuguaguccca

SEQ ID NO: 162115 - RNA, 22 nt, Human
ugugccacugcauuccagauug

SEQ ID NO: 162116 - RNA, 22 nt, Human
uucuccuagguaguuucuucag

SEQ ID NO: 162117 - RNA, 22 nt, Human
uugagcccaggaguuugagacc

SEQ ID NO: 162118 - RNA, 22 nt, Human
uugcagugaggcaagauugugc

SEQ ID NO: 162119 - RNA, 21 nt, Human
uugcuugagcccaggaguuug

SEQ ID NO: 162120 - RNA, 18 nt, Human
uugcuugagccugagagg

SEQ ID NO: 162121 - RNA, 22 nt, Human
uugcuugagccugagaggcagg

SEQ ID NO: 162122 - RNA, 22 nt, Human
acaaaaaagggaaacaaaauau

SEQ ID NO: 162123 - RNA, 22 nt, Human
accaaaagcccgacuuaucucc

SEQ ID NO: 162124 - RNA, 19 nt, Human
accuuuugcucagccucac

SEQ ID NO: 162125 - RNA, 23 nt, Human
acgugucuccacugugaaaauaa

SEQ ID NO: 162126 - RNA, 19 nt, Human
agaaaaaaaaauggugcag

SEQ ID NO: 162127 - RNA, 21 nt, Human
agaaguuggggcucaucuucc

SEQ ID NO: 162128 - RNA, 21 nt, Human
agaccauuucucucuccuccu

SEQ ID NO: 162129 - RNA, 18 nt, Human
agagauggaugaugugug

SEQ ID NO: 162130 - RNA, 19 nt, Human
aggcacaggggagauuugc

SEQ ID NO: 162131 - RNA, 22 nt, Human
agggcaggaagcugcuacucag

SEQ ID NO: 162132 - RNA, 20 nt, Human
caagaaggagggcaggaagc

SEQ ID NO: 162133 - RNA, 20 nt, Human
cacagugcuugcucagaggc

SEQ ID NO: 162134 - RNA, 23 nt, Human
cacuaccagccacacaaaaaagg

SEQ ID NO: 162135 - RNA, 23 nt, Human
cagaccuuuugcucagccucaca

SEQ ID NO: 162136 - RNA, 20 nt, Human
ccacacaaaaaagggaaaca

SEQ ID NO: 162137 - RNA, 19 nt, Human
cccuaggagcugagggccc

SEQ ID NO: 162138 - RNA, 22 nt, Human
cccuaggagcugagggcccucc

SEQ ID NO: 162139 - RNA, 25 nt, Human
cccuggcuagaccauuucucucucc

SEQ ID NO: 162140 - RNA, 19 nt, Human
ccgguagugauacauuuuu

SEQ ID NO: 162141 - RNA, 23 nt, Human
ccuggcuagaccauuucucucuc

SEQ ID NO: 162142 - RNA, 21 nt, Human
cgggcagaggguugggaaagu

SEQ ID NO: 162143 - RNA, 24 nt, Human
cuacucagaugagaccuuccuaaa

SEQ ID NO: 162144 - RNA, 21 nt, Human
cuagaccauuucucucuccuc

SEQ ID NO: 162145 - RNA, 21 nt, Human
cucagaggcugccugcucucu

SEQ ID NO: 162146 - RNA, 22 nt, Human
cuccucuauucgacagcccuag

SEQ ID NO: 162147 - RNA, 22 nt, Human
cuugccacgugucuccacugug

SEQ ID NO: 162148 - RNA, 20 nt, Human
gaaggagggcaggaagcugc

SEQ ID NO: 162149 - RNA, 21 nt, Human
gagaacagaaaaaaaaauggu

SEQ ID NO: 162150 - RNA, 25 nt, Human
gagaacagaaaaaaaaauggugcag

SEQ ID NO: 162151 - RNA, 20 nt, Human
gagagauggaugaugugugg

SEQ ID NO: 162152 - RNA, 23 nt, Human
gauugugcccuuguaacccuggc

SEQ ID NO: 162153 - RNA, 22 nt, Human
ggcuagaccauuucucucuccu

SEQ ID NO: 162154 - RNA, 19 nt, Human
ggggaacacacagaucagg

SEQ ID NO: 162155 - RNA, 26 nt, Human
uaugguagcaaggauacagcauauac

SEQ ID NO: 162156 - RNA, 24 nt, Human
ucagaggcugccugcucucuuccu

SEQ ID NO: 162157 - RNA, 23 nt, Human
uccuccucuauucgacagcccua

SEQ ID NO: 162158 - RNA, 21 nt, Human
ucucuagaaauaucaaguugu

SEQ ID NO: 162159 - RNA, 19 nt, Human
ucucucuccuccucuauuc

SEQ ID NO: 162160 - RNA, 19 nt, Human
ucuggagagauggaugaug

SEQ ID NO: 162161 - RNA, 18 nt, Human
ugcccuuguaacccuggc

SEQ ID NO: 162162 - RNA, 22 nt, Human
uggagcaaauuguuuauacaga

SEQ ID NO: 162163 - RNA, 25 nt, Human
uggugcaggcuguuuccugugggcc

SEQ ID NO: 162164 - RNA, 22 nt, Human
ugguuggagagaacagaaaaaa

SEQ ID NO: 162165 - RNA, 23 nt, Human
uugcucagaggcugccugcucuc

SEQ ID NO: 162166 - RNA, 27 nt, Human
uuggagcaaauuguuuauacagagaaa

SEQ ID NO: 162167 - RNA, 18 nt, Human
aggaaaaaaauaaagaga

SEQ ID NO: 162168 - RNA, 25 nt, Human
cacacagcguucuuuuagggauuaa

SEQ ID NO: 162169 - RNA, 21 nt, Human
cugggaugaggcacccuuucc

SEQ ID NO: 162170 - RNA, 19 nt, Human
cuuuccuuuuauguuuagg

SEQ ID NO: 162171 - RNA, 23 nt, Human
gaaaaaaauaaagagaacacaac

SEQ ID NO: 162172 - RNA, 20 nt, Human
uacuuuuaauuaucauucua

SEQ ID NO: 162173 - RNA, 19 nt, Human
uaggaaaaaaauaaagaga

SEQ ID NO: 162174 - RNA, 21 nt, Human
uccuuaaagaaaaaaaguaaa

SEQ ID NO: 162175 - RNA, 20 nt, Human
uggcacugaaugcucugcca

SEQ ID NO: 162176 - RNA, 22 nt, Human
aagaaugacaaaauucaguagu

SEQ ID NO: 162177 - RNA, 23 nt, Human
acuccaaagaggcgggggcggca

SEQ ID NO: 162178 - RNA, 25 nt, Human
agcaguuuacugagcaauuaaauau

SEQ ID NO: 162179 - RNA, 27 nt, Human
agucgcuaaacaaacauaagaaaaaaa

SEQ ID NO: 162180 - RNA, 21 nt, Human
auggcccuaaacaagccaggu

SEQ ID NO: 162181 - RNA, 23 nt, Human
caagaaugacaaaauucaguagu

SEQ ID NO: 162182 - RNA, 24 nt, Human
cacagguucuagcacagauuuucu

SEQ ID NO: 162183 - RNA, 25 nt, Human
cccgcggucgggaacugccggaagc

SEQ ID NO: 162184 - RNA, 18 nt, Human
cgcuaaacaaacauaaga

SEQ ID NO: 162185 - RNA, 20 nt, Human
cgggggcggcagcugcggcc

SEQ ID NO: 162186 - RNA, 21 nt, Human
gccgcggcgaggggcgcgggg

SEQ ID NO: 162187 - RNA, 22 nt, Human
ggccgcgagagacuccaaagag

SEQ ID NO: 162188 - RNA, 21 nt, Human
uauggcccuaaacaagccagg

SEQ ID NO: 162189 - RNA, 20 nt, Human
ucaguaguuaugcaagguga

SEQ ID NO: 162190 - RNA, 18 nt, Human
ucuagcacagauuuucua

SEQ ID NO: 162191 - RNA, 25 nt, Human
ucuguuauaggcagagauuuauaaa

SEQ ID NO: 162192 - RNA, 18 nt, Human
uuaaaauaguaaagcuag

SEQ ID NO: 162193 - RNA, 19 nt, Human
uucaagaaugacaaaauuc

SEQ ID NO: 162194 - RNA, 27 nt, Human
uuccuuaaccuaucuucuagguaaaca

SEQ ID NO: 162195 - RNA, 21 nt, Human
uuuaauauuugauugacauuu

SEQ ID NO: 162196 - RNA, 19 nt, Human
aagccagggccggccggga

SEQ ID NO: 162197 - RNA, 24 nt, Human
agacgcuggaagagcagccaagcc

SEQ ID NO: 162198 - RNA, 18 nt, Human
agagagauggguaagggg

SEQ ID NO: 162199 - RNA, 24 nt, Human
agcccuuccccucccaacacucau

SEQ ID NO: 162200 - RNA, 22 nt, Human
agcuguuuuauuuccagcaugu

SEQ ID NO: 162201 - RNA, 22 nt, Human
auuuccagcauguucccaaccu

SEQ ID NO: 162202 - RNA, 19 nt, Human
cagccaagccuccaagcca

SEQ ID NO: 162203 - RNA, 20 nt, Human
cagccaagccuccaagccag

SEQ ID NO: 162204 - RNA, 28 nt, Human
cauguucccaaccuggugacccuccaca

SEQ ID NO: 162205 - RNA, 21 nt, Human
ccacaccuccaccugucccua

SEQ ID NO: 162206 - RNA, 24 nt, Human
ccaggagggaggagagacgcugga

SEQ ID NO: 162207 - RNA, 21 nt, Human
cccacaccuccaccugucccu

SEQ ID NO: 162208 - RNA, 22 nt, Human
cccacaccuccaccugucccua

SEQ ID NO: 162209 - RNA, 23 nt, Human
ccuugcgcgcaagggcgaccuuc

SEQ ID NO: 162210 - RNA, 21 nt, Human
gacccagcccuuccccuccca

SEQ ID NO: 162211 - RNA, 24 nt, Human
gcaaagucccacucagacggaccc

SEQ ID NO: 162212 - RNA, 25 nt, Human
gcaaagucccacucagacggaccca

SEQ ID NO: 162213 - RNA, 22 nt, Human
gcgcgcaagggcgaccuucccc

SEQ ID NO: 162214 - RNA, 24 nt, Human
guucccaaccuggugacccuccac

SEQ ID NO: 162215 - RNA, 19 nt, Human
uagagagauggguaagggg

SEQ ID NO: 162216 - RNA, 18 nt, Human
ucagcagaggugcaaagu

SEQ ID NO: 162217 - RNA, 21 nt, Human
ucccaacacucaucccuuccc

SEQ ID NO: 162218 - RNA, 22 nt, Human
ucccaaccuggugacccuccac

SEQ ID NO: 162219 - RNA, 18 nt, Human
ucccacucagacggaccc

SEQ ID NO: 162220 - RNA, 23 nt, Human
ugggggccggggcuggggcuggg

SEQ ID NO: 162221 - RNA, 26 nt, Human
ugggggccggggcuggggcugggccg

SEQ ID NO: 162222 - RNA, 24 nt, Human
uugcgcgcaagggcgaccuucccc

SEQ ID NO: 162223 - RNA, 24 nt, Human
aaaccgcugacaccaccgcccaac

SEQ ID NO: 162224 - RNA, 19 nt, Human
aaggaacacaaggacccaa

SEQ ID NO: 162225 - RNA, 19 nt, Human
aaggaacacaaggacccaa

SEQ ID NO: 162226 - RNA, 19 nt, Human
aaggaacacaaggacccaa

SEQ ID NO: 162227 - RNA, 25 nt, Human
aaggacccaaggaaaggggagccag

SEQ ID NO: 162228 - RNA, 25 nt, Human
aaggacccaaggaaaggggagccag

SEQ ID NO: 162229 - RNA, 25 nt, Human
aaggacccaaggaaaggggagccag

SEQ ID NO: 162230 - RNA, 20 nt, Human
acaccaccgcccaacuauga

SEQ ID NO: 162231 - RNA, 22 nt, Human
acaccaccgcccaacuaugaac

SEQ ID NO: 162232 - RNA, 21 nt, Human
acagaagggaaucagcccagc

SEQ ID NO: 162233 - RNA, 18 nt, Human
accagggcuggaccaggc

SEQ ID NO: 162234 - RNA, 18 nt, Human
accccggcugcuccccgc

SEQ ID NO: 162235 - RNA, 23 nt, Human
accccggcugcuccccgccagcc

SEQ ID NO: 162236 - RNA, 22 nt, Human
accgacacgccgaacaugcgcc

SEQ ID NO: 162237 - RNA, 28 nt, Human
acgaacgccagcgaaaccgcugacacca

SEQ ID NO: 162238 - RNA, 22 nt, Human
acgguacagaguuaggcaugga

SEQ ID NO: 162239 - RNA, 22 nt, Human
acgguacagaguuaggcaugga

SEQ ID NO: 162240 - RNA, 24 nt, Human
acucuccccaaacugucccugcug

SEQ ID NO: 162241 - RNA, 18 nt, Human
acugagcaugguggggac

SEQ ID NO: 162242 - RNA, 18 nt, Human
acugagcaugguggggac

SEQ ID NO: 162243 - RNA, 22 nt, Human
agagccuacuuccccagccuuc

SEQ ID NO: 162244 - RNA, 22 nt, Human
agagccuacuuccccagccuuc

SEQ ID NO: 162245 - RNA, 22 nt, Human
agagccuacuuccccagccuuc

SEQ ID NO: 162246 - RNA, 21 nt, Human
agcagagaggguuucagccgg

SEQ ID NO: 162247 - RNA, 22 nt, Human
agccuacuuccccagccuuccc

SEQ ID NO: 162248 - RNA, 22 nt, Human
agccuacuuccccagccuuccc

SEQ ID NO: 162249 - RNA, 22 nt, Human
agccuacuuccccagccuuccc

SEQ ID NO: 162250 - RNA, 22 nt, Human
agcugggcccacccuccccaac

SEQ ID NO: 162251 - RNA, 23 nt, Human
aggcaggggaagcaguccugggu

SEQ ID NO: 162252 - RNA, 23 nt, Human
aggcugcggggccagcuggcgcc

SEQ ID NO: 162253 - RNA, 22 nt, Human
agucccccugcauggggcuggc

SEQ ID NO: 162254 - RNA, 22 nt, Human
agucccccugcauggggcuggc

SEQ ID NO: 162255 - RNA, 19 nt, Human
aguuaggcauggacccaga

SEQ ID NO: 162256 - RNA, 19 nt, Human
aguuaggcauggacccaga

SEQ ID NO: 162257 - RNA, 19 nt, Human
aguuaggcauggacccaga

SEQ ID NO: 162258 - RNA, 23 nt, Human
aucaagaaaagagaagacacccc

SEQ ID NO: 162259 - RNA, 19 nt, Human
caaggaacacaaggaccca

SEQ ID NO: 162260 - RNA, 19 nt, Human
caaggaacacaaggaccca

SEQ ID NO: 162261 - RNA, 19 nt, Human
caaggaacacaaggaccca

SEQ ID NO: 162262 - RNA, 22 nt, Human
caaggacccaaggaaaggggag

SEQ ID NO: 162263 - RNA, 22 nt, Human
caaggacccaaggaaaggggag

SEQ ID NO: 162264 - RNA, 22 nt, Human
caaggacccaaggaaaggggag

SEQ ID NO: 162265 - RNA, 21 nt, Human
cacagcuucagagaguccccc

SEQ ID NO: 162266 - RNA, 21 nt, Human
cacagcuucagagaguccccc

SEQ ID NO: 162267 - RNA, 22 nt, Human
caccaccgcccaacuaugaacu

SEQ ID NO: 162268 - RNA, 21 nt, Human
caccgcccaacuaugaacuca

SEQ ID NO: 162269 - RNA, 21 nt, Human
cacuggaagcucugacggccc

SEQ ID NO: 162270 - RNA, 21 nt, Human
cacuggaagcucugacggccc

SEQ ID NO: 162271 - RNA, 21 nt, Human
cagcccagccucucggacucu

SEQ ID NO: 162272 - RNA, 22 nt, Human
cagcccgcccagggguggugcg

SEQ ID NO: 162273 - RNA, 20 nt, Human
cagcgcgaccucuggagcua

SEQ ID NO: 162274 - RNA, 22 nt, Human
cagcgcgaccucuggagcuacu

SEQ ID NO: 162275 - RNA, 20 nt, Human
caggagagauggggucuggg

SEQ ID NO: 162276 - RNA, 20 nt, Human
caggagagauggggucuggg

SEQ ID NO: 162277 - RNA, 25 nt, Human
caggagagauggggucuggggagca

SEQ ID NO: 162278 - RNA, 25 nt, Human
caggagagauggggucuggggagca

SEQ ID NO: 162279 - RNA, 19 nt, Human
caggcugcggggccagcug

SEQ ID NO: 162280 - RNA, 25 nt, Human
cagggcacugccacaauggcuccuc

SEQ ID NO: 162281 - RNA, 25 nt, Human
cagggcacugccacaauggcuccuc

SEQ ID NO: 162282 - RNA, 19 nt, Human
caggggaagcaguccuggg

SEQ ID NO: 162283 - RNA, 27 nt, Human
caggggaccuccuggggaauccaugga

SEQ ID NO: 162284 - RNA, 27 nt, Human
caggggaccuccuggggaauccaugga

SEQ ID NO: 162285 - RNA, 21 nt, Human
cauacaggcagccugcacagc

SEQ ID NO: 162286 - RNA, 21 nt, Human
cauacaggcagccugcacagc

SEQ ID NO: 162287 - RNA, 20 nt, Human
caucaagaaaagagaagaca

SEQ ID NO: 162288 - RNA, 20 nt, Human
caucaagaaaagagaagaca

SEQ ID NO: 162289 - RNA, 22 nt, Human
caucaagaaaagagaagacacc

SEQ ID NO: 162290 - RNA, 22 nt, Human
caucaagaaaagagaagacacc

SEQ ID NO: 162291 - RNA, 24 nt, Human
caucaagaaaagagaagacacccc

SEQ ID NO: 162292 - RNA, 23 nt, Human
cauggacccagagccuacuuccc

SEQ ID NO: 162293 - RNA, 23 nt, Human
cauggacccagagccuacuuccc

SEQ ID NO: 162294 - RNA, 23 nt, Human
cauggacccagagccuacuuccc

SEQ ID NO: 162295 - RNA, 23 nt, Human
ccaacaccaauaaaugucacaag

SEQ ID NO: 162296 - RNA, 23 nt, Human
ccaacaccaauaaaugucacaag

SEQ ID NO: 162297 - RNA, 24 nt, Human
ccacaagacacuucugguacugaa

SEQ ID NO: 162298 - RNA, 24 nt, Human
ccacaagacacuucugguacugaa

SEQ ID NO: 162299 - RNA, 22 nt, Human
ccacgaacgccagcgaaaccgc

SEQ ID NO: 162300 - RNA, 19 nt, Human
ccauacaggcagccugcac

SEQ ID NO: 162301 - RNA, 19 nt, Human
ccauacaggcagccugcac

SEQ ID NO: 162302 - RNA, 23 nt, Human
ccccgccagccucugccggcccg

SEQ ID NO: 162303 - RNA, 21 nt, Human
ccccugcaccgccaaccccuc

SEQ ID NO: 162304 - RNA, 21 nt, Human
ccccugcaccgccaaccccuc

SEQ ID NO: 162305 - RNA, 23 nt, Human
cccgccagccucugccggcccgc

SEQ ID NO: 162306 - RNA, 20 nt, Human
cccugcaccgccaaccccuc

SEQ ID NO: 162307 - RNA, 20 nt, Human
cccugcaccgccaaccccuc

SEQ ID NO: 162308 - RNA, 25 nt, Human
cccugcugagcugggcccacccucc

SEQ ID NO: 162309 - RNA, 18 nt, Human
ccgcacagcccgcccagg

SEQ ID NO: 162310 - RNA, 22 nt, Human
ccgccagccucugccggcccgc

SEQ ID NO: 162311 - RNA, 19 nt, Human
ccgcccaacuaugaacuca

SEQ ID NO: 162312 - RNA, 22 nt, Human
ccgcugacaccaccgcccaacu

SEQ ID NO: 162313 - RNA, 19 nt, Human
ccgcuugagccgcaggcgg

SEQ ID NO: 162314 - RNA, 19 nt, Human
ccuacuuccccagccuucc

SEQ ID NO: 162315 - RNA, 24 nt, Human
ccuccucuguacuggccucugccu

SEQ ID NO: 162316 - RNA, 24 nt, Human
ccuccucuguacuggccucugccu

SEQ ID NO: 162317 - RNA, 24 nt, Human
ccuccuuugagcagggggaggggc

SEQ ID NO: 162318 - RNA, 24 nt, Human
ccuccuuugagcagggggaggggc

SEQ ID NO: 162319 - RNA, 25 nt, Human
ccucuggagcuacugcgccugcaag

SEQ ID NO: 162320 - RNA, 22 nt, Human
cgaaacacauggcacuugagca

SEQ ID NO: 162321 - RNA, 23 nt, Human
cgccagccucugccggcccgcac

SEQ ID NO: 162322 - RNA, 24 nt, Human
cgccagccucugccggcccgcacu

SEQ ID NO: 162323 - RNA, 18 nt, Human
cgccagcgaaaccgcuga

SEQ ID NO: 162324 - RNA, 22 nt, Human
cgccagcgaaaccgcugacacc

SEQ ID NO: 162325 - RNA, 27 nt, Human
cgccgcacaaauacggggcgggacagc

SEQ ID NO: 162326 - RNA, 20 nt, Human
cgccgcaggcugcggggcca

SEQ ID NO: 162327 - RNA, 18 nt, Human
cgcucugacaagaucugg

SEQ ID NO: 162328 - RNA, 18 nt, Human
cgcucugacaagaucugg

SEQ ID NO: 162329 - RNA, 20 nt, Human
cgcugacaccaccgcccaac

SEQ ID NO: 162330 - RNA, 20 nt, Human
cggccaacaccaauaaaugu

SEQ ID NO: 162331 - RNA, 23 nt, Human
cggccaacaccaauaaaugucac

SEQ ID NO: 162332 - RNA, 23 nt, Human
cggccaacaccaauaaaugucac

SEQ ID NO: 162333 - RNA, 21 nt, Human
cgggggaggcccacgaacgcc

SEQ ID NO: 162334 - RNA, 25 nt, Human
cguauaaacaauaaauugggcaaua

SEQ ID NO: 162335 - RNA, 25 nt, Human
cguauaaacaauaaauugggcaaua

SEQ ID NO: 162336 - RNA, 25 nt, Human
cguauaaacaauaaauugggcaaua

SEQ ID NO: 162337 - RNA, 25 nt, Human
cgucuggauccccgaaugguugcgu

SEQ ID NO: 162338 - RNA, 26 nt, Human
cucucggacucuccccaaacuguccc

SEQ ID NO: 162339 - RNA, 19 nt, Human
cucuguacuggccucugcc

SEQ ID NO: 162340 - RNA, 19 nt, Human
cucuguacuggccucugcc

SEQ ID NO: 162341 - RNA, 20 nt, Human
cugauuuugcuauaaagugu

SEQ ID NO: 162342 - RNA, 20 nt, Human
cugauuuugcuauaaagugu

SEQ ID NO: 162343 - RNA, 20 nt, Human
cugauuuugcuauaaagugu

SEQ ID NO: 162344 - RNA, 21 nt, Human
cugccggcccgcacucucagc

SEQ ID NO: 162345 - RNA, 22 nt, Human
cugucccugcugagcugggccc

SEQ ID NO: 162346 - RNA, 21 nt, Human
gaaacacauggcacuugagca

SEQ ID NO: 162347 - RNA, 26 nt, Human
gaacgccagcgaaaccgcugacacca

SEQ ID NO: 162348 - RNA, 26 nt, Human
gacccagagccuacuuccccagccuu

SEQ ID NO: 162349 - RNA, 26 nt, Human
gacccagagccuacuuccccagccuu

SEQ ID NO: 162350 - RNA, 26 nt, Human
gacccagagccuacuuccccagccuu

SEQ ID NO: 162351 - RNA, 21 nt, Human
gagagauggggucuggggagc

SEQ ID NO: 162352 - RNA, 21 nt, Human
gagagauggggucuggggagc

SEQ ID NO: 162353 - RNA, 22 nt, Human
gagcagagaggguuucagccgg

SEQ ID NO: 162354 - RNA, 21 nt, Human
gagcagggggaggggcagggg

SEQ ID NO: 162355 - RNA, 21 nt, Human
gagcagggggaggggcagggg

SEQ ID NO: 162356 - RNA, 18 nt, Human
gcaauaaauagacggugg

SEQ ID NO: 162357 - RNA, 18 nt, Human
gcaauaaauagacggugg

SEQ ID NO: 162358 - RNA, 18 nt, Human
gcaauaaauagacggugg

SEQ ID NO: 162359 - RNA, 23 nt, Human
gcaggcugcggggccagcuggcg

SEQ ID NO: 162360 - RNA, 24 nt, Human
gcaucaagaaaagagaagacaccc

SEQ ID NO: 162361 - RNA, 24 nt, Human
gcaucaagaaaagagaagacaccc

SEQ ID NO: 162362 - RNA, 22 nt, Human
gccagccucugccggcccgcac

SEQ ID NO: 162363 - RNA, 25 nt, Human
gccgcacaaauacggggcgggacag

SEQ ID NO: 162364 - RNA, 19 nt, Human
gccgcaggcugcggggcca

SEQ ID NO: 162365 - RNA, 21 nt, Human
gcgaaaccgcugacaccaccg

SEQ ID NO: 162366 - RNA, 19 nt, Human
gcgggacacggggcgggac

SEQ ID NO: 162367 - RNA, 27 nt, Human
gcugacaccaccgcccaacuaugaacu

SEQ ID NO: 162368 - RNA, 21 nt, Human
gcugcggggccagcuggcgcc

SEQ ID NO: 162369 - RNA, 20 nt, Human
ggcaggggaagcaguccugg

SEQ ID NO: 162370 - RNA, 18 nt, Human
ggccaacaccaauaaaug

SEQ ID NO: 162371 - RNA, 24 nt, Human
gggagggccugagccgcacagccc

SEQ ID NO: 162372 - RNA, 22 nt, Human
ggggcgggacacggggcgggac

SEQ ID NO: 162373 - RNA, 20 nt, Human
ggucuggggagcagcaagag

SEQ ID NO: 162374 - RNA, 20 nt, Human
ggucuggggagcagcaagag

SEQ ID NO: 162375 - RNA, 21 nt, Human
gguggacaaggaucggaggga

SEQ ID NO: 162376 - RNA, 21 nt, Human
gguggacaaggaucggaggga

SEQ ID NO: 162377 - RNA, 21 nt, Human
gguggacaaggaucggaggga

SEQ ID NO: 162378 - RNA, 23 nt, Human
gguggugcguguaaacgggcguc

SEQ ID NO: 162379 - RNA, 20 nt, Human
guccgggggaggcccacgaa

SEQ ID NO: 162380 - RNA, 22 nt, Human
uaaaacgguacagaguuaggca

SEQ ID NO: 162381 - RNA, 22 nt, Human
uaaaacgguacagaguuaggca

SEQ ID NO: 162382 - RNA, 22 nt, Human
uaaaacgguacagaguuaggca

SEQ ID NO: 162383 - RNA, 20 nt, Human
uacuucugagcagcuuggcu

SEQ ID NO: 162384 - RNA, 20 nt, Human
uacuucugagcagcuuggcu

SEQ ID NO: 162385 - RNA, 19 nt, Human
uaggcauggacccagagcc

SEQ ID NO: 162386 - RNA, 19 nt, Human
uaggcauggacccagagcc

SEQ ID NO: 162387 - RNA, 19 nt, Human
uaggcauggacccagagcc

SEQ ID NO: 162388 - RNA, 19 nt, Human
uauggagcagagaggguuu

SEQ ID NO: 162389 - RNA, 19 nt, Human
uauggagcagagaggguuu

SEQ ID NO: 162390 - RNA, 23 nt, Human
uauggagcagagaggguuucagc

SEQ ID NO: 162391 - RNA, 23 nt, Human
uauggagcagagaggguuucagc

SEQ ID NO: 162392 - RNA, 21 nt, Human
ucacagcgaaacacauggcac

SEQ ID NO: 162393 - RNA, 21 nt, Human
ucacagcgaaacacauggcac

SEQ ID NO: 162394 - RNA, 20 nt, Human
ucaggagagauggggucugg

SEQ ID NO: 162395 - RNA, 20 nt, Human
ucaggagagauggggucugg

SEQ ID NO: 162396 - RNA, 19 nt, Human
uccaggguuggacaggggc

SEQ ID NO: 162397 - RNA, 19 nt, Human
uccaggguuggacaggggc

SEQ ID NO: 162398 - RNA, 19 nt, Human
uccaggguuggacaggggc

SEQ ID NO: 162399 - RNA, 22 nt, Human
uccccaaccagggcuggaccag

SEQ ID NO: 162400 - RNA, 25 nt, Human
uccccauauacagugccucguacuu

SEQ ID NO: 162401 - RNA, 25 nt, Human
uccccauauacagugccucguacuu

SEQ ID NO: 162402 - RNA, 19 nt, Human
uccccccuggcggugaggg

SEQ ID NO: 162403 - RNA, 19 nt, Human
uccccccuggcggugaggg

SEQ ID NO: 162404 - RNA, 22 nt, Human
ucccugcugagcugggcccacc

SEQ ID NO: 162405 - RNA, 20 nt, Human
uccgcuugagccgcaggcgg

SEQ ID NO: 162406 - RNA, 21 nt, Human
ucugcgccgcaggcugcgggg

SEQ ID NO: 162407 - RNA, 23 nt, Human
ucuggauccccgaaugguugcgu

SEQ ID NO: 162408 - RNA, 23 nt, Human
ucuucaggagagauggggucugg

SEQ ID NO: 162409 - RNA, 23 nt, Human
ucuucaggagagauggggucugg

SEQ ID NO: 162410 - RNA, 21 nt, Human
ugagccgcacagcccgcccag

SEQ ID NO: 162411 - RNA, 21 nt, Human
ugagcugggcccacccucccc

SEQ ID NO: 162412 - RNA, 19 nt, Human
ugcaccgccaaccccuccu

SEQ ID NO: 162413 - RNA, 19 nt, Human
ugcaccgccaaccccuccu

SEQ ID NO: 162414 - RNA, 20 nt, Human
ugccggcccgcacucucagc

SEQ ID NO: 162415 - RNA, 27 nt, Human
ugccggcccgcacucucagcccagcgc

SEQ ID NO: 162416 - RNA, 20 nt, Human
ugccucguacuucugagcaa

SEQ ID NO: 162417 - RNA, 20 nt, Human
ugccucguacuucugagcaa

SEQ ID NO: 162418 - RNA, 21 nt, Human
ugcuauaaaguguuacugagg

SEQ ID NO: 162419 - RNA, 21 nt, Human
ugcuauaaaguguuacugagg

SEQ ID NO: 162420 - RNA, 21 nt, Human
ugcuauaaaguguuacugagg

SEQ ID NO: 162421 - RNA, 18 nt, Human
ugcuccccgccagccucu

SEQ ID NO: 162422 - RNA, 22 nt, Human
uggacaggggcaaggaacacaa

SEQ ID NO: 162423 - RNA, 22 nt, Human
uggacaggggcaaggaacacaa

SEQ ID NO: 162424 - RNA, 22 nt, Human
uggacaggggcaaggaacacaa

SEQ ID NO: 162425 - RNA, 20 nt, Human
ugggcacaaagcccauguag

SEQ ID NO: 162426 - RNA, 20 nt, Human
ugggcacaaagcccauguag

SEQ ID NO: 162427 - RNA, 21 nt, Human
ugggcaccccaggccuugccu

SEQ ID NO: 162428 - RNA, 21 nt, Human
ugggcaccccaggccuugccu

SEQ ID NO: 162429 - RNA, 21 nt, Human
uguaaacgggcgucuggaucc

SEQ ID NO: 162430 - RNA, 21 nt, Human
uuuuuugaggucacugaggga

SEQ ID NO: 162431 - RNA, 21 nt, Human
uuuuuugaggucacugaggga

SEQ ID NO: 162432 - RNA, 21 nt, Human
uuuuuugaggucacugaggga

SEQ ID NO: 162433 - RNA, 18 nt, Human
uuuuuuuuuuuugagguc

SEQ ID NO: 162434 - RNA, 18 nt, Human
uuuuuuuuuuuugagguc

SEQ ID NO: 162435 - RNA, 18 nt, Human
uuuuuuuuuuuugagguc

SEQ ID NO: 162436 - RNA, 18 nt, Human
uuuuuuuuuuuuuuuuug

SEQ ID NO: 162437 - RNA, 18 nt, Human
uuuuuuuuuuuuuuuuug

SEQ ID NO: 162438 - RNA, 18 nt, Human
uuuuuuuuuuuuuuuuug

SEQ ID NO: 162439 - RNA, 21 nt, Human
uuuuuuuuuuuuuuuuugagg

SEQ ID NO: 162440 - RNA, 21 nt, Human
uuuuuuuuuuuuuuuuugagg

SEQ ID NO: 162441 - RNA, 23 nt, Human
uuuuuuuuuuuuuuuuuuugagg

SEQ ID NO: 162442 - RNA, 23 nt, Human
uuuuuuuuuuuuuuuuuuugagg

SEQ ID NO: 162443 - RNA, 23 nt, Human
aaaccacacaauuuguacccaaa

SEQ ID NO: 162444 - RNA, 19 nt, Human
aaauaacacccucuccaca

SEQ ID NO: 162445 - RNA, 26 nt, Human
aaauaacacccucuccacaucggagg

SEQ ID NO: 162446 - RNA, 19 nt, Human
aagagcaccucugaaaucc

SEQ ID NO: 162447 - RNA, 20 nt, Human
aagauagagaagaugcugga

SEQ ID NO: 162448 - RNA, 20 nt, Human
aagaugcuggauggagaggc

SEQ ID NO: 162449 - RNA, 22 nt, Human
aagccaaaaucugugcuuaaau

SEQ ID NO: 162450 - RNA, 22 nt, Human
aaggucccgggaggagcuccag

SEQ ID NO: 162451 - RNA, 24 nt, Human
acaggcaaggacuaccacgaaaua

SEQ ID NO: 162452 - RNA, 25 nt, Human
agaaacacuuuucacucauaaaucc

SEQ ID NO: 162453 - RNA, 25 nt, Human
agagaagaugcuggauggagaggcu

SEQ ID NO: 162454 - RNA, 20 nt, Human
agaugaccaaugaauggugg

SEQ ID NO: 162455 - RNA, 19 nt, Human
aggaaagugagauucacag

SEQ ID NO: 162456 - RNA, 23 nt, Human
aggaaggaugacuuccuuccuug

SEQ ID NO: 162457 - RNA, 23 nt, Human
caaauaccaagaugaccaaugaa

SEQ ID NO: 162458 - RNA, 20 nt, Human
caaauuuuuagccucauuua

SEQ ID NO: 162459 - RNA, 19 nt, Human
caagcaaaguauuguugac

SEQ ID NO: 162460 - RNA, 21 nt, Human
caaggucccgggaggagcucc

SEQ ID NO: 162461 - RNA, 19 nt, Human
cacaaauaccaagaugacc

SEQ ID NO: 162462 - RNA, 20 nt, Human
caccacggacucccaccaag

SEQ ID NO: 162463 - RNA, 21 nt, Human
caccacggacucccaccaagg

SEQ ID NO: 162464 - RNA, 19 nt, Human
cacgagacuaaacagaucu

SEQ ID NO: 162465 - RNA, 18 nt, Human
cacugccagcccacagag

SEQ ID NO: 162466 - RNA, 24 nt, Human
cagcacaaauaccaagaugaccaa

SEQ ID NO: 162467 - RNA, 26 nt, Human
cagcacaaauaccaagaugaccaaug

SEQ ID NO: 162468 - RNA, 22 nt, Human
caucaagaguccaauccucaag

SEQ ID NO: 162469 - RNA, 22 nt, Human
ccaauccucaagaaaccacaca

SEQ ID NO: 162470 - RNA, 22 nt, Human
ccuagagagagaaaauacaaau

SEQ ID NO: 162471 - RNA, 20 nt, Human
ccucugaaauccauacuuga

SEQ ID NO: 162472 - RNA, 23 nt, Human
ccucugaaauccauacuugauuc

SEQ ID NO: 162473 - RNA, 23 nt, Human
ccugggcagccucggcccgaccc

SEQ ID NO: 162474 - RNA, 23 nt, Human
cgccacgggguccaccggcgggg

SEQ ID NO: 162475 - RNA, 22 nt, Human
cuaaauaacacccucuccacau

SEQ ID NO: 162476 - RNA, 28 nt, Human
cucaagaaaccacacaauuuguacccaa

SEQ ID NO: 162477 - RNA, 18 nt, Human
cuggauggagaggcuugc

SEQ ID NO: 162478 - RNA, 24 nt, Human
cuucacaugucccauuguaucacu

SEQ ID NO: 162479 - RNA, 23 nt, Human
cuuuccagcagcacugucccugg

SEQ ID NO: 162480 - RNA, 22 nt, Human
gaaagugagauucacagcacaa

SEQ ID NO: 162481 - RNA, 19 nt, Human
gaaggcauucaacuaagag

SEQ ID NO: 162482 - RNA, 18 nt, Human
gcauuaaaaauaucuaca

SEQ ID NO: 162483 - RNA, 19 nt, Human
gguaaccaaauugccuccc

SEQ ID NO: 162484 - RNA, 19 nt, Human
gguaucuggagguugggca

SEQ ID NO: 162485 - RNA, 22 nt, Human
uaaaaauagaaauccaucaaga

SEQ ID NO: 162486 - RNA, 19 nt, Human
uaaacagaucucauucaca

SEQ ID NO: 162487 - RNA, 20 nt, Human
uacaaaugcuuacuguauag

SEQ ID NO: 162488 - RNA, 20 nt, Human
uacauugaggaaagugagau

SEQ ID NO: 162489 - RNA, 24 nt, Human
uauaaaaauagaaauccaucaaga

SEQ ID NO: 162490 - RNA, 19 nt, Human
uaucuggagguugggcauu

SEQ ID NO: 162491 - RNA, 23 nt, Human
uauuacccuuggguguaugggga

SEQ ID NO: 162492 - RNA, 18 nt, Human
uccaaggugacaauggca

SEQ ID NO: 162493 - RNA, 21 nt, Human
ucccuguggcaccacggacuc

SEQ ID NO: 162494 - RNA, 18 nt, Human
ucuaagagcaccucugaa

SEQ ID NO: 162495 - RNA, 24 nt, Human
ucuguauucuucacaugucccauu

SEQ ID NO: 162496 - RNA, 22 nt, Human
ugacaauggcauuaaauggcau

SEQ ID NO: 162497 - RNA, 20 nt, Human
ugacuuccuuccuugaucuc

SEQ ID NO: 162498 - RNA, 21 nt, Human
ugaggaaagugagauucacag

SEQ ID NO: 162499 - RNA, 20 nt, Human
ugaucucuaaauaacacccu

SEQ ID NO: 162500 - RNA, 22 nt, Human
uggcaccacggacucccaccaa

SEQ ID NO: 162501 - RNA, 21 nt, Human
ugggagccccuucccuguggc

SEQ ID NO: 162502 - RNA, 18 nt, Human
ugggcaauaaagccaaaa

SEQ ID NO: 162503 - RNA, 22 nt, Human
uggguguauggggaaucuaaga

SEQ ID NO: 162504 - RNA, 23 nt, Human
uguacacguuuauuacccuuggg

SEQ ID NO: 162505 - RNA, 27 nt, Human
uuaaaaaacagcaacuauaugcacgaa

SEQ ID NO: 162506 - RNA, 22 nt, Human
uuuuucaaauucacuucaaaua

SEQ ID NO: 162507 - RNA, 22 nt, Human
aaaacaaaaacagcgcaugaaa

SEQ ID NO: 162508 - RNA, 18 nt, Human
aacuccaggggcuccagc

SEQ ID NO: 162509 - RNA, 23 nt, Human
aacuuguugcuaucuaucacuuu

SEQ ID NO: 162510 - RNA, 22 nt, Human
aagccuuagaauccucucucca

SEQ ID NO: 162511 - RNA, 19 nt, Human
aagcucgcucucccuucuc

SEQ ID NO: 162512 - RNA, 23 nt, Human
aaggagguauaauggggaaacac

SEQ ID NO: 162513 - RNA, 22 nt, Human
aagggacuagcacuacugaaaa

SEQ ID NO: 162514 - RNA, 24 nt, Human
aagggacuagcacuacugaaaagg

SEQ ID NO: 162515 - RNA, 20 nt, Human
acacagccaacuccaggggc

SEQ ID NO: 162516 - RNA, 26 nt, Human
accagguccccgcaggccccugcucc

SEQ ID NO: 162517 - RNA, 24 nt, Human
acccuggcguacccuucuccaccg

SEQ ID NO: 162518 - RNA, 24 nt, Human
acccuucuccaccgcuugucccca

SEQ ID NO: 162519 - RNA, 21 nt, Human
agaaaagcacagucuaggucc

SEQ ID NO: 162520 - RNA, 21 nt, Human
agacagaaaagcacagucuag

SEQ ID NO: 162521 - RNA, 26 nt, Human
agacagaaaagcacagucuaggucca

SEQ ID NO: 162522 - RNA, 20 nt, Human
aggcgguccuaagcucgcuc

SEQ ID NO: 162523 - RNA, 24 nt, Human
cacagacacagccaacuccagggg

SEQ ID NO: 162524 - RNA, 24 nt, Human
cacagucuagguccaccaucaccu

SEQ ID NO: 162525 - RNA, 19 nt, Human
caccagguccccgcaggcc

SEQ ID NO: 162526 - RNA, 18 nt, Human
cagccgccuuccaaagcc

SEQ ID NO: 162527 - RNA, 18 nt, Human
caucaccucccacuggcc

SEQ ID NO: 162528 - RNA, 20 nt, Human
caucuucucucagcaguucc

SEQ ID NO: 162529 - RNA, 22 nt, Human
ccaaagcccgcgcucccgucac

SEQ ID NO: 162530 - RNA, 22 nt, Human
ccacuggccaccaguuggccag

SEQ ID NO: 162531 - RNA, 23 nt, Human
ccagugucuuauuccaaagucuc

SEQ ID NO: 162532 - RNA, 19 nt, Human
cccacccaagacacagcca

SEQ ID NO: 162533 - RNA, 20 nt, Human
cccuuuuaucucccucucuc

SEQ ID NO: 162534 - RNA, 22 nt, Human
ccuuagaauccucucuccaccc

SEQ ID NO: 162535 - RNA, 20 nt, Human
ccuuugggacacgcggccuc

SEQ ID NO: 162536 - RNA, 20 nt, Human
cggcggguggccugacguuc

SEQ ID NO: 162537 - RNA, 21 nt, Human
cgguccuaagcucgcucuccc

SEQ ID NO: 162538 - RNA, 22 nt, Human
cuaaagcuugguucgggguugc

SEQ ID NO: 162539 - RNA, 22 nt, Human
cucagcuuagcggcggguggcc

SEQ ID NO: 162540 - RNA, 22 nt, Human
cuccagggagaacagagucucu

SEQ ID NO: 162541 - RNA, 21 nt, Human
cuccaggggcuccagcuuucu

SEQ ID NO: 162542 - RNA, 18 nt, Human
cucccucucucuucucca

SEQ ID NO: 162543 - RNA, 20 nt, Human
cucccucucucuucuccaaa

SEQ ID NO: 162544 - RNA, 21 nt, Human
cucccucucucuucuccaaaa

SEQ ID NO: 162545 - RNA, 19 nt, Human
cucuucuccaaaacuuguu

SEQ ID NO: 162546 - RNA, 19 nt, Human
cugaacaagacagaaaagc

SEQ ID NO: 162547 - RNA, 22 nt, Human
cugagaagugguuugagccuga

SEQ ID NO: 162548 - RNA, 20 nt, Human
cugauugccaggugaacauc

SEQ ID NO: 162549 - RNA, 22 nt, Human
cugcccacccaagacacagcca

SEQ ID NO: 162550 - RNA, 20 nt, Human
cuuagaauccucucuccacc

SEQ ID NO: 162551 - RNA, 22 nt, Human
cuuagaauccucucuccacccc

SEQ ID NO: 162552 - RNA, 23 nt, Human
cuuccaaagcccgcgcucccguc

SEQ ID NO: 162553 - RNA, 24 nt, Human
cuuguccccacuccacccacacca

SEQ ID NO: 162554 - RNA, 22 nt, Human
gcacuacugaaaagggucacgc

SEQ ID NO: 162555 - RNA, 24 nt, Human
guagugcaggcugcguccccucag

SEQ ID NO: 162556 - RNA, 25 nt, Human
uaaaacaaaaacagcgcaugaaaac

SEQ ID NO: 162557 - RNA, 24 nt, Human
uaacuuuaaaacaaaaacagcgca

SEQ ID NO: 162558 - RNA, 20 nt, Human
uaagcucgcucucccuucuc

SEQ ID NO: 162559 - RNA, 22 nt, Human
uacugaaaagggucacgcuaga

SEQ ID NO: 162560 - RNA, 18 nt, Human
uagaauccucucuccacc

SEQ ID NO: 162561 - RNA, 23 nt, Human
uagcaaguucgaguuucugccca

SEQ ID NO: 162562 - RNA, 22 nt, Human
uagcacuacugaaaagggucac

SEQ ID NO: 162563 - RNA, 20 nt, Human
uaguguccauuaaacugccu

SEQ ID NO: 162564 - RNA, 21 nt, Human
uaguguccauuaaacugccug

SEQ ID NO: 162565 - RNA, 24 nt, Human
ucacgcuagaaaagccuuagaauc

SEQ ID NO: 162566 - RNA, 26 nt, Human
ucagucacaaacacagacacagccaa

SEQ ID NO: 162567 - RNA, 21 nt, Human
uccacccacaccagguccccg

SEQ ID NO: 162568 - RNA, 19 nt, Human
ucccucucucuucuccaaa

SEQ ID NO: 162569 - RNA, 22 nt, Human
ucuacacccgaaaucgcaggac

SEQ ID NO: 162570 - RNA, 24 nt, Human
ucuaucacuuucauguaacaaugg

SEQ ID NO: 162571 - RNA, 22 nt, Human
ucucauggcaaccagucccucc

SEQ ID NO: 162572 - RNA, 21 nt, Human
ucucucucaaggugggucaag

SEQ ID NO: 162573 - RNA, 23 nt, Human
ucucucucaaggugggucaaggc

SEQ ID NO: 162574 - RNA, 23 nt, Human
ucuguggccuucuugccauuaag

SEQ ID NO: 162575 - RNA, 21 nt, Human
ugaaaagggucacgcuagaaa

SEQ ID NO: 162576 - RNA, 19 nt, Human
ugaacaagacagaaaagca

SEQ ID NO: 162577 - RNA, 20 nt, Human
ugaacaagacagaaaagcac

SEQ ID NO: 162578 - RNA, 19 nt, Human
ugaccugcucgccacgcac

SEQ ID NO: 162579 - RNA, 19 nt, Human
ugguucgggguugccccgg

SEQ ID NO: 162580 - RNA, 21 nt, Human
ugucucccccuuuuaucuccc

SEQ ID NO: 162581 - RNA, 19 nt, Human
ugucuuauuccaaagucuc

SEQ ID NO: 162582 - RNA, 18 nt, Human
uucugcccaucuucucuc

SEQ ID NO: 162583 - RNA, 21 nt, Human
uucuguacaucuuuugucucc

SEQ ID NO: 162584 - RNA, 21 nt, Human
uuguccccacuccacccacac

SEQ ID NO: 162585 - RNA, 24 nt, Human
uuuuuuuuuuuuuuuuuuacuuuu

SEQ ID NO: 162586 - RNA, 26 nt, Human
uuuuuuuuuuuuuuuuuuacuuuuag

SEQ ID NO: 162587 - RNA, 18 nt, Human
aaacaugagcucuucggg

SEQ ID NO: 162588 - RNA, 20 nt, Human
aaagaagauacuugagaaaa

SEQ ID NO: 162589 - RNA, 19 nt, Human
aagcguccuucaccaaaag

SEQ ID NO: 162590 - RNA, 22 nt, Human
acaaagaagauacuugagaaaa

SEQ ID NO: 162591 - RNA, 21 nt, Human
acacauuagggacaaagaaga

SEQ ID NO: 162592 - RNA, 18 nt, Human
acaguaggauagguaugc

SEQ ID NO: 162593 - RNA, 19 nt, Human
caaaagaauuuggugaaaa

SEQ ID NO: 162594 - RNA, 20 nt, Human
caagugagccuucuaaucag

SEQ ID NO: 162595 - RNA, 20 nt, Human
cuagaaugcguggagaaccc

SEQ ID NO: 162596 - RNA, 26 nt, Human
gacaaagaagauacuugagaaaacgu

SEQ ID NO: 162597 - RNA, 22 nt, Human
gccuucuaaucagcacauaucu

SEQ ID NO: 162598 - RNA, 21 nt, Human
ggccguuucugaagcguccuu

SEQ ID NO: 162599 - RNA, 19 nt, Human
gggagucuagaaugcgugg

SEQ ID NO: 162600 - RNA, 22 nt, Human
gggucugcucuucagugauggc

SEQ ID NO: 162601 - RNA, 24 nt, Human
uaaggcacugguuauccuccacac

SEQ ID NO: 162602 - RNA, 26 nt, Human
uagccaaaaaacaugagcucuucggg

SEQ ID NO: 162603 - RNA, 21 nt, Human
ucauaggucuagccaaaaaac

SEQ ID NO: 162604 - RNA, 21 nt, Human
ucuagaaugcguggagaaccc

SEQ ID NO: 162605 - RNA, 19 nt, Human
ucugaagcguccuucacca

SEQ ID NO: 162606 - RNA, 20 nt, Human
ugaagcguccuucaccaaaa

SEQ ID NO: 162607 - RNA, 20 nt, Human
ugagaaaacgugcagugaag

SEQ ID NO: 162608 - RNA, 20 nt, Human
ugagaaaacgugcagugaag

SEQ ID NO: 162609 - RNA, 19 nt, Human
uggugaaaaaugaguaaug

SEQ ID NO: 162610 - RNA, 22 nt, Human
acagagaggacacggcgcugca

SEQ ID NO: 162611 - RNA, 18 nt, Human
agaggccaccagcuugag

SEQ ID NO: 162612 - RNA, 19 nt, Human
aggaagcccuggcagcagc

SEQ ID NO: 162613 - RNA, 18 nt, Human
caccuaggccugcagagg

SEQ ID NO: 162614 - RNA, 24 nt, Human
cucaggcccggugcggaccccggc

SEQ ID NO: 162615 - RNA, 23 nt, Human
cuggcagcagcagggacacagag

SEQ ID NO: 162616 - RNA, 21 nt, Human
cuugagaagggggucccagcc

SEQ ID NO: 162617 - RNA, 22 nt, Human
gcccggaagaggaagcccuggc

SEQ ID NO: 162618 - RNA, 18 nt, Human
gggcagcugcuccuggga

SEQ ID NO: 162619 - RNA, 19 nt, Human
ugcccggaagaggaagccc

SEQ ID NO: 162620 - RNA, 21 nt, Human
aaggcguccuucacuagccac

SEQ ID NO: 162621 - RNA, 19 nt, Human
acuagccacucuacgugug

SEQ ID NO: 162622 - RNA, 21 nt, Human
acuggcuggcuuguaaggcuc

SEQ ID NO: 162623 - RNA, 23 nt, Human
acuggcuggcuuguaaggcucuu

SEQ ID NO: 162624 - RNA, 19 nt, Human
agcccaagccgagggucag

SEQ ID NO: 162625 - RNA, 20 nt, Human
agcugcagggacuggcuggc

SEQ ID NO: 162626 - RNA, 18 nt, Human
aggaggugaugcagcuca

SEQ ID NO: 162627 - RNA, 20 nt, Human
aggcaguguacaggguagag

SEQ ID NO: 162628 - RNA, 22 nt, Human
aggcaguguacaggguagagug

SEQ ID NO: 162629 - RNA, 22 nt, Human
aguaucuuuauaagugaguggc

SEQ ID NO: 162630 - RNA, 19 nt, Human
augcggcgcaccauacccc

SEQ ID NO: 162631 - RNA, 20 nt, Human
caagaagagucaaaaaggcg

SEQ ID NO: 162632 - RNA, 24 nt, Human
cccaggaugggucaguuuguggag

SEQ ID NO: 162633 - RNA, 20 nt, Human
ccccaucgccucccauguca

SEQ ID NO: 162634 - RNA, 23 nt, Human
ccccuacagaagacucuguguga

SEQ ID NO: 162635 - RNA, 18 nt, Human
cugcugaaaagauaagua

SEQ ID NO: 162636 - RNA, 21 nt, Human
ggagcugcagggacuggcugg

SEQ ID NO: 162637 - RNA, 24 nt, Human
uaagagaggcaucucuccauggua

SEQ ID NO: 162638 - RNA, 18 nt, Human
uagagugcagcccaagcc

SEQ ID NO: 162639 - RNA, 25 nt, Human
uagagugcagcccaagccgaggguc

SEQ ID NO: 162640 - RNA, 21 nt, Human
ucagcacauauauacugcuga

SEQ ID NO: 162641 - RNA, 22 nt, Human
ucuccaugguaugagacugcuc

SEQ ID NO: 162642 - RNA, 23 nt, Human
ucuguggagaacaaggcccagga

SEQ ID NO: 162643 - RNA, 26 nt, Human
ugaaaagauaaguaucuuuauaagug

SEQ ID NO: 162644 - RNA, 24 nt, Human
uggcugaagacauaagagaggcau

SEQ ID NO: 162645 - RNA, 18 nt, Human
ugggucaguuuguggagc

SEQ ID NO: 162646 - RNA, 19 nt, Human
ugucucuguccaucguccc

SEQ ID NO: 162647 - RNA, 20 nt, Human
ugucucuguccaucgucccc

SEQ ID NO: 162648 - RNA, 21 nt, Human
uuuguggagcugcagggacug

SEQ ID NO: 162649 - RNA, 24 nt, Human
aaaaaaaaacaaaacaaaacaaaa

SEQ ID NO: 162650 - RNA, 26 nt, Human
aaaaaaacaaaacaaaacaaaacaaa

SEQ ID NO: 162651 - RNA, 19 nt, Human
aaaaaaacacaucccccga

SEQ ID NO: 162652 - RNA, 24 nt, Human
aaaaaaacacaucccccgaggaua

SEQ ID NO: 162653 - RNA, 23 nt, Human
aaaaaacacaucccccgaggaua

SEQ ID NO: 162654 - RNA, 27 nt, Human
aaaacaaaacaaaacaaaaaaacacau

SEQ ID NO: 162655 - RNA, 26 nt, Human
aaaacauaucccccaccaugggccag

SEQ ID NO: 162656 - RNA, 27 nt, Human
aaacaaaacaaaaaaacacaucccccg

SEQ ID NO: 162657 - RNA, 19 nt, Human
aaacaaaacaaaacaaaaa

SEQ ID NO: 162658 - RNA, 23 nt, Human
aaacaaaacaaaacaaaaaaaca

SEQ ID NO: 162659 - RNA, 22 nt, Human
aaacaaaacaaaacaaaacaaa

SEQ ID NO: 162660 - RNA, 26 nt, Human
aaaguucuccucaggggacuguaaag

SEQ ID NO: 162661 - RNA, 19 nt, Human
aaaugccuaagacauccuu

SEQ ID NO: 162662 - RNA, 20 nt, Human
aacauggugaaacucccauc

SEQ ID NO: 162663 - RNA, 21 nt, Human
aacauggugaaacucccaucu

SEQ ID NO: 162664 - RNA, 22 nt, Human
aacauggugaaacucccaucuc

SEQ ID NO: 162665 - RNA, 23 nt, Human
aagaaagcuuaagauagacagac

SEQ ID NO: 162666 - RNA, 20 nt, Human
aagcaggagagggcaauuaa

SEQ ID NO: 162667 - RNA, 23 nt, Human
aaggcgggcaaaucaccagguca

SEQ ID NO: 162668 - RNA, 24 nt, Human
aauagcuugaaccugggaggugga

SEQ ID NO: 162669 - RNA, 21 nt, Human
aaucaccaggucaggaguucg

SEQ ID NO: 162670 - RNA, 24 nt, Human
aaucaccaggucaggaguucgaga

SEQ ID NO: 162671 - RNA, 20 nt, Human
aauuuaagaaaguucuccuc

SEQ ID NO: 162672 - RNA, 24 nt, Human
acaaaacaaaaaaacacauccccc

SEQ ID NO: 162673 - RNA, 23 nt, Human
acaaaacaaaacaaaaaaacaca

SEQ ID NO: 162674 - RNA, 22 nt, Human
acaaaacaaaacaaaacaaaaa

SEQ ID NO: 162675 - RNA, 18 nt, Human
acauaucacccccuucuc

SEQ ID NO: 162676 - RNA, 20 nt, Human
acauggugaaacucccaucu

SEQ ID NO: 162677 - RNA, 21 nt, Human
acauggugaaacucccaucuc

SEQ ID NO: 162678 - RNA, 23 nt, Human
acaugucggagguuacauggucu

SEQ ID NO: 162679 - RNA, 23 nt, Human
accuguagucccagcuacucagg

SEQ ID NO: 162680 - RNA, 21 nt, Human
acgaaaaugaaaguaauagcc

SEQ ID NO: 162681 - RNA, 22 nt, Human
acuucaucucaaaaaaaaacaa

SEQ ID NO: 162682 - RNA, 28 nt, Human
agaaaguucuccucaggggacuguaaag

SEQ ID NO: 162683 - RNA, 22 nt, Human
agccuggccaacauggugaaac

SEQ ID NO: 162684 - RNA, 24 nt, Human
agccuggccaacauggugaaacuc

SEQ ID NO: 162685 - RNA, 22 nt, Human
agccugggcgauagaaugaaac

SEQ ID NO: 162686 - RNA, 24 nt, Human
agccugggcgauagaaugaaacuu

SEQ ID NO: 162687 - RNA, 20 nt, Human
agcgcagcgcagcggagagc

SEQ ID NO: 162688 - RNA, 22 nt, Human
aggcaggagaauagcuugaacc

SEQ ID NO: 162689 - RNA, 24 nt, Human
aggcaggagaauagcuugaaccug

SEQ ID NO: 162690 - RNA, 24 nt, Human
aggcgggcaaaucaccaggucagg

SEQ ID NO: 162691 - RNA, 24 nt, Human
aggcugaggcaggagaauagcuug

SEQ ID NO: 162692 - RNA, 21 nt, Human
aggguuugguacuagcagcgg

SEQ ID NO: 162693 - RNA, 19 nt, Human
agguggagguugcagugag

SEQ ID NO: 162694 - RNA, 23 nt, Human
agguggagguugcagugagccaa

SEQ ID NO: 162695 - RNA, 24 nt, Human
agguguggugacucacgccuguaa

SEQ ID NO: 162696 - RNA, 21 nt, Human
aucaccaggucaggaguucga

SEQ ID NO: 162697 - RNA, 22 nt, Human
aucccagcacuuugggaggcca

SEQ ID NO: 162698 - RNA, 18 nt, Human
aucccggggcucagccgg

SEQ ID NO: 162699 - RNA, 22 nt, Human
aucccuuuucuugacuacuauu

SEQ ID NO: 162700 - RNA, 24 nt, Human
augggccagguguggugacucacg

SEQ ID NO: 162701 - RNA, 23 nt, Human
auugcacuccagccugggcgaua

SEQ ID NO: 162702 - RNA, 24 nt, Human
auugcacuccagccugggcgauag

SEQ ID NO: 162703 - RNA, 24 nt, Human
auugugccauugcacuccagccug

SEQ ID NO: 162704 - RNA, 24 nt, Human
caaaaaaaaacaaaacaaaacaaa

SEQ ID NO: 162705 - RNA, 23 nt, Human
caaaacaaaaaaacacauccccc

SEQ ID NO: 162706 - RNA, 23 nt, Human
caaaacaaaacaaaacaaaaaaa

SEQ ID NO: 162707 - RNA, 26 nt, Human
caaaauacaaaaauuagucgggcaug

SEQ ID NO: 162708 - RNA, 24 nt, Human
caaaauugugccauugcacuccag

SEQ ID NO: 162709 - RNA, 25 nt, Human
caacauggugaaacucccaucucua

SEQ ID NO: 162710 - RNA, 19 nt, Human
caauaacauagauucaucc

SEQ ID NO: 162711 - RNA, 21 nt, Human
caaugauuacuagcacuagaa

SEQ ID NO: 162712 - RNA, 19 nt, Human
cacaccuguagucccagcu

SEQ ID NO: 162713 - RNA, 23 nt, Human
cacaucccccgaggauagcgggg

SEQ ID NO: 162714 - RNA, 23 nt, Human
caccagcaagggggaggcaccaa

SEQ ID NO: 162715 - RNA, 23 nt, Human
cacccccuucucuuucuaguccc

SEQ ID NO: 162716 - RNA, 22 nt, Human
caccggcccugccccaucaugc

SEQ ID NO: 162717 - RNA, 24 nt, Human
caccuguagucccagcuacucagg

SEQ ID NO: 162718 - RNA, 24 nt, Human
cacgccuguaaucccagcacuuug

SEQ ID NO: 162719 - RNA, 22 nt, Human
cagcacuuugggaggccaaggc

SEQ ID NO: 162720 - RNA, 24 nt, Human
cagcacuuugggaggccaaggcgg

SEQ ID NO: 162721 - RNA, 19 nt, Human
cagccggacacccccaucc

SEQ ID NO: 162722 - RNA, 24 nt, Human
cagcuacucaggaggcugaggcag

SEQ ID NO: 162723 - RNA, 20 nt, Human
caggguagcccgcugugcuc

SEQ ID NO: 162724 - RNA, 26 nt, Human
caucucaaaaaaaaacaaaacaaaac

SEQ ID NO: 162725 - RNA, 19 nt, Human
cauugcacuccagccuggg

SEQ ID NO: 162726 - RNA, 21 nt, Human
cauugcacuccagccugggcg

SEQ ID NO: 162727 - RNA, 22 nt, Human
cauugcacuccagccugggcga

SEQ ID NO: 162728 - RNA, 24 nt, Human
cauugcacuccagccugggcgaua

SEQ ID NO: 162729 - RNA, 20 nt, Human
ccauugcacuccagccuggg

SEQ ID NO: 162730 - RNA, 21 nt, Human
ccauugcacuccagccugggc

SEQ ID NO: 162731 - RNA, 22 nt, Human
ccauugcacuccagccugggcg

SEQ ID NO: 162732 - RNA, 24 nt, Human
ccauugcacuccagccugggcgau

SEQ ID NO: 162733 - RNA, 25 nt, Human
cccaucucuacucaaaauacaaaaa

SEQ ID NO: 162734 - RNA, 18 nt, Human
cccccgaggauagcgggg

SEQ ID NO: 162735 - RNA, 21 nt, Human
cccccuucucuuucuaguccc

SEQ ID NO: 162736 - RNA, 20 nt, Human
ccccuucucuuucuaguccc

SEQ ID NO: 162737 - RNA, 18 nt, Human
cccgcgcgcuugcucgug

SEQ ID NO: 162738 - RNA, 18 nt, Human
ccggacacccccauccac

SEQ ID NO: 162739 - RNA, 19 nt, Human
ccggcccugccccaucaug

SEQ ID NO: 162740 - RNA, 22 nt, Human
ccugcagcgaggcugcuccaaa

SEQ ID NO: 162741 - RNA, 23 nt, Human
ccuggccaacauggugaaacucc

SEQ ID NO: 162742 - RNA, 25 nt, Human
ccuggccaacauggugaaacuccca

SEQ ID NO: 162743 - RNA, 21 nt, Human
ccugggagguggagguugcag

SEQ ID NO: 162744 - RNA, 24 nt, Human
ccugggcgauagaaugaaacuuca

SEQ ID NO: 162745 - RNA, 22 nt, Human
ccuguaaucccagcacuuuggg

SEQ ID NO: 162746 - RNA, 21 nt, Human
ccuguagucccagcuacucag

SEQ ID NO: 162747 - RNA, 24 nt, Human
cgagaccagccuggccaacauggu

SEQ ID NO: 162748 - RNA, 19 nt, Human
cggccggagcgcagcgcag

SEQ ID NO: 162749 - RNA, 20 nt, Human
cgggagcggccggagcgcag

SEQ ID NO: 162750 - RNA, 23 nt, Human
cuaacuuauaaacugaacuuuau

SEQ ID NO: 162751 - RNA, 22 nt, Human
cucacgccuguaaucccagcac

SEQ ID NO: 162752 - RNA, 24 nt, Human
cucacgccuguaaucccagcacuu

SEQ ID NO: 162753 - RNA, 23 nt, Human
cucagccggacacccccauccac

SEQ ID NO: 162754 - RNA, 22 nt, Human
cuccugacaccagcaaggggga

SEQ ID NO: 162755 - RNA, 18 nt, Human
gaaacucccaucucuacu

SEQ ID NO: 162756 - RNA, 19 nt, Human
gaaagcggcugccuucccc

SEQ ID NO: 162757 - RNA, 18 nt, Human
gagcgcagcgcagcgcag

SEQ ID NO: 162758 - RNA, 21 nt, Human
gagguugcagugagccaaaau

SEQ ID NO: 162759 - RNA, 23 nt, Human
gagguugcagugagccaaaauug

SEQ ID NO: 162760 - RNA, 22 nt, Human
gcagcgcagcgcagcggagagc

SEQ ID NO: 162761 - RNA, 22 nt, Human
gccauugcacuccagccugggc

SEQ ID NO: 162762 - RNA, 24 nt, Human
gccauugcacuccagccugggcga

SEQ ID NO: 162763 - RNA, 24 nt, Human
gcucagccggacacccccauccac

SEQ ID NO: 162764 - RNA, 19 nt, Human
gcuuaagauagacagaccc

SEQ ID NO: 162765 - RNA, 19 nt, Human
gcuugaaccugggaggugg

SEQ ID NO: 162766 - RNA, 20 nt, Human
gcuugaaccugggaggugga

SEQ ID NO: 162767 - RNA, 22 nt, Human
gcuugaaccugggagguggagg

SEQ ID NO: 162768 - RNA, 18 nt, Human
ggacacccccauccacgg

SEQ ID NO: 162769 - RNA, 20 nt, Human
ggagcgcagcgcagcgcagc

SEQ ID NO: 162770 - RNA, 22 nt, Human
ggagguugcagugagccaaaau

SEQ ID NO: 162771 - RNA, 24 nt, Human
ggagguugcagugagccaaaauug

SEQ ID NO: 162772 - RNA, 23 nt, Human
ggcaaaucaccaggucaggaguu

SEQ ID NO: 162773 - RNA, 22 nt, Human
ggcaugguggcgcacaccugua

SEQ ID NO: 162774 - RNA, 18 nt, Human
ggccggagcgcagcgcag

SEQ ID NO: 162775 - RNA, 18 nt, Human
gguccuggcggagggagg

SEQ ID NO: 162776 - RNA, 24 nt, Human
ggugacucacgccuguaaucccag

SEQ ID NO: 162777 - RNA, 24 nt, Human
gguggcgcacaccuguagucccag

SEQ ID NO: 162778 - RNA, 19 nt, Human
guaaagggacauauauaga

SEQ ID NO: 162779 - RNA, 22 nt, Human
uaaaccuauagacagaaaccag

SEQ ID NO: 162780 - RNA, 23 nt, Human
uaauagcccauaaaccuauagac

SEQ ID NO: 162781 - RNA, 27 nt, Human
uaauuuguguaacauaucacccccuuu

SEQ ID NO: 162782 - RNA, 22 nt, Human
uacagggcucucgacugaagca

SEQ ID NO: 162783 - RNA, 23 nt, Human
uacagggcucucgacugaagcag

SEQ ID NO: 162784 - RNA, 21 nt, Human
uacguacauacaggaaaaaac

SEQ ID NO: 162785 - RNA, 22 nt, Human
uacuaaaugccuaagacauccu

SEQ ID NO: 162786 - RNA, 23 nt, Human
uagacagaaaccagcacuauguc

SEQ ID NO: 162787 - RNA, 24 nt, Human
uagcuugaaccugggagguggagg

SEQ ID NO: 162788 - RNA, 24 nt, Human
uagucuuaagaguauaagcuguuu

SEQ ID NO: 162789 - RNA, 18 nt, Human
uaucugugcggguccugg

SEQ ID NO: 162790 - RNA, 24 nt, Human
ucaaaaaaaaacaaaacaaaacaa

SEQ ID NO: 162791 - RNA, 21 nt, Human
ucaaggagacaaggacuacag

SEQ ID NO: 162792 - RNA, 20 nt, Human
ucaccaggucaggaguucga

SEQ ID NO: 162793 - RNA, 24 nt, Human
ucaccaggucaggaguucgagacc

SEQ ID NO: 162794 - RNA, 20 nt, Human
ucaguucaguuuagaugcuu

SEQ ID NO: 162795 - RNA, 18 nt, Human
uccagccugggcgauaga

SEQ ID NO: 162796 - RNA, 18 nt, Human
ucccugugauggaaugac

SEQ ID NO: 162797 - RNA, 22 nt, Human
uccgcuggcaacacgaaaauga

SEQ ID NO: 162798 - RNA, 20 nt, Human
ucuaggaaaaccuucauucc

SEQ ID NO: 162799 - RNA, 21 nt, Human
ucucaaaaaaaaacaaaacaa

SEQ ID NO: 162800 - RNA, 25 nt, Human
ucucaaaaaaaaacaaaacaaaaca

SEQ ID NO: 162801 - RNA, 23 nt, Human
ucucgacugaagcaggagagggc

SEQ ID NO: 162802 - RNA, 22 nt, Human
ucuugacuacuauuaagacccu

SEQ ID NO: 162803 - RNA, 24 nt, Human
ugaaagcggcugccuuccccucuc

SEQ ID NO: 162804 - RNA, 24 nt, Human
ugaaccugggagguggagguugca

SEQ ID NO: 162805 - RNA, 21 nt, Human
ugacucacgccuguaauccca

SEQ ID NO: 162806 - RNA, 22 nt, Human
ugacucacgccuguaaucccag

SEQ ID NO: 162807 - RNA, 24 nt, Human
ugacucacgccuguaaucccagca

SEQ ID NO: 162808 - RNA, 24 nt, Human
ugaggcaggagaauagcuugaacc

SEQ ID NO: 162809 - RNA, 24 nt, Human
ugaggcaggagaauagcuugaacc

SEQ ID NO: 162810 - RNA, 18 nt, Human
ugcucagugaccuccugc

SEQ ID NO: 162811 - RNA, 18 nt, Human
ugcucagugaccuccugg

SEQ ID NO: 162812 - RNA, 20 nt, Human
uggccaacauggugaaacuc

SEQ ID NO: 162813 - RNA, 24 nt, Human
ugggaggccaaggcgggcaaauca

SEQ ID NO: 162814 - RNA, 18 nt, Human
ugggagguggagguugca

SEQ ID NO: 162815 - RNA, 29 nt, Human
ugggagguggagguugcagugacaacggu

SEQ ID NO: 162816 - RNA, 24 nt, Human
ugggagguggagguugcagugagc

SEQ ID NO: 162817 - RNA, 24 nt, Human
uggugacucacgccuguaauccca

SEQ ID NO: 162818 - RNA, 24 nt, Human
ugguggcgcacaccuguaguccca

SEQ ID NO: 162819 - RNA, 18 nt, Human
uuagucgggcaugguggc

SEQ ID NO: 162820 - RNA, 18 nt, Human
uuagucuuaagaguauaa

SEQ ID NO: 162821 - RNA, 18 nt, Human
uucaucucaaaaaaaaac

SEQ ID NO: 162822 - RNA, 24 nt, Human
uugaaccugggagguggagguugc

SEQ ID NO: 162823 - RNA, 22 nt, Human
uugcagugagccaaaauugugc

SEQ ID NO: 162824 - RNA, 23 nt, Human
uugugccauugcacuccagccug

SEQ ID NO: 162825 - RNA, 24 nt, Human
uuuuuaauuaaaugaagguuuuau

SEQ ID NO: 162826 - RNA, 22 nt, Human
uuuuuuuuuuuuuuuuucacau

SEQ ID NO: 162827 - RNA, 18 nt, Human
aaaaaaaaccuuacauaa

SEQ ID NO: 162828 - RNA, 22 nt, Human
aaauguuaaaacccacagagcu

SEQ ID NO: 162829 - RNA, 22 nt, Human
aacaacuuuuugcuuuccaaug

SEQ ID NO: 162830 - RNA, 20 nt, Human
aagagaaaaugacaaauaua

SEQ ID NO: 162831 - RNA, 20 nt, Human
aaggggccaugggaacacug

SEQ ID NO: 162832 - RNA, 24 nt, Human
aaucagaaggcaagaccaccagga

SEQ ID NO: 162833 - RNA, 22 nt, Human
acagacaaaggcccugccccca

SEQ ID NO: 162834 - RNA, 19 nt, Human
accaggauuaaagaugcaa

SEQ ID NO: 162835 - RNA, 22 nt, Human
agaaaaggauacaaauuaaaaa

SEQ ID NO: 162836 - RNA, 20 nt, Human
agaaggaaaugcaaggggcc

SEQ ID NO: 162837 - RNA, 19 nt, Human
agacaaaggcccugccccc

SEQ ID NO: 162838 - RNA, 23 nt, Human
agacaaaggcccugcccccaagg

SEQ ID NO: 162839 - RNA, 19 nt, Human
agacagacaaaggcccugc

SEQ ID NO: 162840 - RNA, 22 nt, Human
agcacaaaaacagaccaaaaaa

SEQ ID NO: 162841 - RNA, 19 nt, Human
aggaaaugcaaggggccau

SEQ ID NO: 162842 - RNA, 19 nt, Human
aggcauuugggaauacaga

SEQ ID NO: 162843 - RNA, 20 nt, Human
aggcauuugggaauacagag

SEQ ID NO: 162844 - RNA, 25 nt, Human
agguugcagagagaagcuucugucu

SEQ ID NO: 162845 - RNA, 22 nt, Human
augagacagacaaaggcccugc

SEQ ID NO: 162846 - RNA, 20 nt, Human
caaaaacagaccaaaaaagu

SEQ ID NO: 162847 - RNA, 20 nt, Human
cacuucucuagcaaagaaga

SEQ ID NO: 162848 - RNA, 21 nt, Human
cccccaaggaacuuacagucu

SEQ ID NO: 162849 - RNA, 19 nt, Human
gaagagaaguucucaaacc

SEQ ID NO: 162850 - RNA, 21 nt, Human
guaacagagaguuaagaagga

SEQ ID NO: 162851 - RNA, 22 nt, Human
uaacagagaguuaagaaggaaa

SEQ ID NO: 162852 - RNA, 24 nt, Human
uagaaagaaauugguuacuccuug

SEQ ID NO: 162853 - RNA, 23 nt, Human
uagaucaaauauugaccaaagua

SEQ ID NO: 162854 - RNA, 19 nt, Human
uagcacaaaaacagaccaa

SEQ ID NO: 162855 - RNA, 23 nt, Human
uagcaccuaggaauuuuuuaggu

SEQ ID NO: 162856 - RNA, 21 nt, Human
uaggaaagaauguuucucuug

SEQ ID NO: 162857 - RNA, 27 nt, Human
uaucuuuacaaaaauguuaaaacccac

SEQ ID NO: 162858 - RNA, 18 nt, Human
uccugauguacugaaugg

SEQ ID NO: 162859 - RNA, 22 nt, Human
ucgaacuaacgacuuacauuua

SEQ ID NO: 162860 - RNA, 24 nt, Human
ucgaacuaacgacuuacauuuaau

SEQ ID NO: 162861 - RNA, 21 nt, Human
ugggaauacagagaugagaca

SEQ ID NO: 162862 - RNA, 20 nt, Human
ugggauauuuuaauacauau

SEQ ID NO: 162863 - RNA, 23 nt, Human
ugguaugggaagagaaguucuca

SEQ ID NO: 162864 - RNA, 22 nt, Human
ugguuacuccuugggaaaaaaa

SEQ ID NO: 162865 - RNA, 24 nt, Human
uguacugaauggcccuugguauau

SEQ ID NO: 162866 - RNA, 22 nt, Human
uguacuguuaggcauuugggaa

SEQ ID NO: 162867 - RNA, 18 nt, Human
ugucacagaauauaguuu

SEQ ID NO: 162868 - RNA, 22 nt, Human
ugugcagaaauauuuaacuuag

SEQ ID NO: 162869 - RNA, 20 nt, Human
uucucuugccuuccuggauu

SEQ ID NO: 162870 - RNA, 22 nt, Human
uuguauuuucucuccacuucuc

SEQ ID NO: 162871 - RNA, 19 nt, Human
uuuaauaauaauuagcaug

SEQ ID NO: 162872 - RNA, 23 nt, Human
uuugggaauacagagaugagaca

SEQ ID NO: 162873 - RNA, 23 nt, Human
uuugggugguaugggaagagaag

SEQ ID NO: 162874 - RNA, 20 nt, Human
aagaaaacaaaagaaaauca

SEQ ID NO: 162875 - RNA, 24 nt, Human
aagaaaacaaaagaaaaucaugug

SEQ ID NO: 162876 - RNA, 27 nt, Human
acauacagaagagcaaaaaucuacgua

SEQ ID NO: 162877 - RNA, 23 nt, Human
agaaaugaagaaaacaaaagaaa

SEQ ID NO: 162878 - RNA, 24 nt, Human
auugcaacagagucugguuuaauu

SEQ ID NO: 162879 - RNA, 23 nt, Human
caaggauaaaagaccccucuucc

SEQ ID NO: 162880 - RNA, 23 nt, Human
ccuacgacaaggauaaaagaccc

SEQ ID NO: 162881 - RNA, 21 nt, Human
gaacaccaacucugucaaaac

SEQ ID NO: 162882 - RNA, 24 nt, Human
gagaaaugaagaaaacaaaagaaa

SEQ ID NO: 162883 - RNA, 19 nt, Human
gagcaagagaaaugaagaa

SEQ ID NO: 162884 - RNA, 23 nt, Human
ggugagcaagagaaaugaagaaa

SEQ ID NO: 162885 - RNA, 22 nt, Human
uaauaaaucuuuuuggaaguuu

SEQ ID NO: 162886 - RNA, 22 nt, Human
ugagcaagagaaaugaagaaaa

SEQ ID NO: 162887 - RNA, 21 nt, Human
uggacuuuuaaacaucaguuu

SEQ ID NO: 162888 - RNA, 20 nt, Human
uggugagcaagagaaaugaa

SEQ ID NO: 162889 - RNA, 28 nt, Human
uguacaaaaauguugucacauacagaag

SEQ ID NO: 162890 - RNA, 23 nt, Human
uucuuggugagcaagagaaauga

SEQ ID NO: 162891 - RNA, 24 nt, Human
uugaaaauucucgcaaucaacuag

SEQ ID NO: 162892 - RNA, 24 nt, Human
aaaaaaaaaaaaacacacaaaaaa

SEQ ID NO: 162893 - RNA, 23 nt, Human
aaaaaaaacacacaaaaaaacac

SEQ ID NO: 162894 - RNA, 21 nt, Human
aaaaacacaaaaaacugagua

SEQ ID NO: 162895 - RNA, 21 nt, Human
aaaaacacacaaaaaaacaca

SEQ ID NO: 162896 - RNA, 21 nt, Human
aaaaacccaagacccagcauu

SEQ ID NO: 162897 - RNA, 21 nt, Human
aaaacacacaaaaaaacacaa

SEQ ID NO: 162898 - RNA, 23 nt, Human
aaacacaaaaaacugaguauccc

SEQ ID NO: 162899 - RNA, 24 nt, Human
aaacacacaaaaaaacacaaaaaa

SEQ ID NO: 162900 - RNA, 21 nt, Human
aaagaugaauuaaaaaaccca

SEQ ID NO: 162901 - RNA, 22 nt, Human
aaggggcuagagcccccaauca

SEQ ID NO: 162902 - RNA, 25 nt, Human
acaaaaaaacacaaaaaacugagua

SEQ ID NO: 162903 - RNA, 18 nt, Human
acaaaaaacugaguaucc

SEQ ID NO: 162904 - RNA, 23 nt, Human
acuggguagccuuggggccgggu

SEQ ID NO: 162905 - RNA, 20 nt, Human
agaggaggggagggaagaga

SEQ ID NO: 162906 - RNA, 24 nt, Human
agaggggaggggagaggaggggag

SEQ ID NO: 162907 - RNA, 23 nt, Human
aggagaggggaggggagaggagg

SEQ ID NO: 162908 - RNA, 24 nt, Human
aggagaggggaggggagaggaggg

SEQ ID NO: 162909 - RNA, 20 nt, Human
aggaggcagggcugggucgg

SEQ ID NO: 162910 - RNA, 24 nt, Human
aggccgggggcggaggagagggga

SEQ ID NO: 162911 - RNA, 25 nt, Human
aggggagggaagagagaacggcggu

SEQ ID NO: 162912 - RNA, 19 nt, Human
aggggaggggagaggaggg

SEQ ID NO: 162913 - RNA, 25 nt, Human
caaaaaaacacaaaaaacugaguau

SEQ ID NO: 162914 - RNA, 24 nt, Human
caagcccccagcccgggcccgcgc

SEQ ID NO: 162915 - RNA, 20 nt, Human
caccguccuccccagcuuca

SEQ ID NO: 162916 - RNA, 20 nt, Human
cagcagccguggcagcggug

SEQ ID NO: 162917 - RNA, 23 nt, Human
cagcccgggcccgcgccagcagc

SEQ ID NO: 162918 - RNA, 19 nt, Human
cagcuccuggggcggaggc

SEQ ID NO: 162919 - RNA, 19 nt, Human
caggagaggucuaguugca

SEQ ID NO: 162920 - RNA, 27 nt, Human
ccaggcaucgccggccccggccccggc

SEQ ID NO: 162921 - RNA, 18 nt, Human
cccaagacccagcauucg

SEQ ID NO: 162922 - RNA, 19 nt, Human
cccaagacccagcauucgg

SEQ ID NO: 162923 - RNA, 22 nt, Human
cccagcccgggcccgcgccagc

SEQ ID NO: 162924 - RNA, 23 nt, Human
ccccaaucagacaugggcaacua

SEQ ID NO: 162925 - RNA, 20 nt, Human
ccccagcccgggcccgcgcc

SEQ ID NO: 162926 - RNA, 19 nt, Human
ccccagcuucagccugggu

SEQ ID NO: 162927 - RNA, 20 nt, Human
ccgcagccgaggccgggggc

SEQ ID NO: 162928 - RNA, 23 nt, Human
ccgcuggggagcgcugucuaugc

SEQ ID NO: 162929 - RNA, 19 nt, Human
ccucccgccgcagccgagg

SEQ ID NO: 162930 - RNA, 20 nt, Human
ccucccuggggacagggauu

SEQ ID NO: 162931 - RNA, 22 nt, Human
ccuguccugcccgcuggcccug

SEQ ID NO: 162932 - RNA, 24 nt, Human
cgccagcagccguggcagcggugg

SEQ ID NO: 162933 - RNA, 18 nt, Human
cgcccggcggagcagcgg

SEQ ID NO: 162934 - RNA, 26 nt, Human
cgccggccccggccccggccccgcgc

SEQ ID NO: 162935 - RNA, 24 nt, Human
cggcugcgguugggcgaggguuuc

SEQ ID NO: 162936 - RNA, 23 nt, Human
cgggcggaggaggcccggcgccc

SEQ ID NO: 162937 - RNA, 19 nt, Human
cggggccgggggccgcugg

SEQ ID NO: 162938 - RNA, 24 nt, Human
cguguccugcgcuugggcugcggg

SEQ ID NO: 162939 - RNA, 23 nt, Human
cuccaccguccuccccagcuuca

SEQ ID NO: 162940 - RNA, 18 nt, Human
cuccuggcugguugggaa

SEQ ID NO: 162941 - RNA, 21 nt, Human
cuggcugaggaggcagggcug

SEQ ID NO: 162942 - RNA, 19 nt, Human
cugggagggaaggggcuag

SEQ ID NO: 162943 - RNA, 25 nt, Human
cuggggcggaggcgcgggcggaggg

SEQ ID NO: 162944 - RNA, 20 nt, Human
cuuaaaaaaaaaaaaacaca

SEQ ID NO: 162945 - RNA, 25 nt, Human
cuuggcuccagcuccuggggcggag

SEQ ID NO: 162946 - RNA, 20 nt, Human
gaagagagaacggcgguggc

SEQ ID NO: 162947 - RNA, 20 nt, Human
gagaggcaggagaggucuag

SEQ ID NO: 162948 - RNA, 19 nt, Human
gagcuccccgcuuggcucc

SEQ ID NO: 162949 - RNA, 20 nt, Human
gaggggagggaagagagaac

SEQ ID NO: 162950 - RNA, 22 nt, Human
gaugcuccagccgcgggggcag

SEQ ID NO: 162951 - RNA, 20 nt, Human
gcagcagcagccgcggccac

SEQ ID NO: 162952 - RNA, 20 nt, Human
gcaggaucugugguagggua

SEQ ID NO: 162953 - RNA, 21 nt, Human
gccggccccggccccggcccc

SEQ ID NO: 162954 - RNA, 21 nt, Human
gccgggggcggaggagagggg

SEQ ID NO: 162955 - RNA, 19 nt, Human
gccuuggggccggguagag

SEQ ID NO: 162956 - RNA, 23 nt, Human
gcgcggggagugggcucgcgggg

SEQ ID NO: 162957 - RNA, 22 nt, Human
gcgcggggcccgagcuccccgc

SEQ ID NO: 162958 - RNA, 20 nt, Human
gcuccagccgcgggggcagg

SEQ ID NO: 162959 - RNA, 19 nt, Human
ggagaggggaggggagagg

SEQ ID NO: 162960 - RNA, 20 nt, Human
ggagaggggaggggagagga

SEQ ID NO: 162961 - RNA, 24 nt, Human
ggagaggggaggggagaggagggg

SEQ ID NO: 162962 - RNA, 22 nt, Human
ggagcgcugucuaugcggcugc

SEQ ID NO: 162963 - RNA, 24 nt, Human
ggaggcagggcugggucggggccc

SEQ ID NO: 162964 - RNA, 22 nt, Human
ggcaguagcagcagcagcagcc

SEQ ID NO: 162965 - RNA, 24 nt, Human
ggcccggcgcccggcggagcagcg

SEQ ID NO: 162966 - RNA, 24 nt, Human
ggccugggcgcggggcccgagcuc

SEQ ID NO: 162967 - RNA, 20 nt, Human
ggcgcgggcggaggaggccc

SEQ ID NO: 162968 - RNA, 21 nt, Human
gggccgggcuccaccguccuc

SEQ ID NO: 162969 - RNA, 21 nt, Human
gggccgggggccgcuggggag

SEQ ID NO: 162970 - RNA, 22 nt, Human
gggcggaggcgcgggcggagga

SEQ ID NO: 162971 - RNA, 23 nt, Human
gggcugggucggggccccagggu

SEQ ID NO: 162972 - RNA, 23 nt, Human
ggggaggggagaggaggggaggg

SEQ ID NO: 162973 - RNA, 24 nt, Human
ggggaggggagaggaggggaggga

SEQ ID NO: 162974 - RNA, 24 nt, Human
ggggaggggagaggaggggagggg

SEQ ID NO: 162975 - RNA, 21 nt, Human
ggggagugggcucgcggggcc

SEQ ID NO: 162976 - RNA, 23 nt, Human
gguauugagggaugagggagaaa

SEQ ID NO: 162977 - RNA, 22 nt, Human
guagcagcagcagcagccgcgg

SEQ ID NO: 162978 - RNA, 19 nt, Human
gucggauccaagugcgggg

SEQ ID NO: 162979 - RNA, 24 nt, Human
gugaaaagaugaauuaaaaaaccc

SEQ ID NO: 162980 - RNA, 25 nt, Human
uaaaaagcccacguuuuugugaaaa

SEQ ID NO: 162981 - RNA, 24 nt, Human
uaaagccugaaauaaacuguauuu

SEQ ID NO: 162982 - RNA, 18 nt, Human
uagcagcagcagcagccg

SEQ ID NO: 162983 - RNA, 19 nt, Human
uccaggucuccuaccucug

SEQ ID NO: 162984 - RNA, 21 nt, Human
ucccacccucccuggggacag

SEQ ID NO: 162985 - RNA, 18 nt, Human
uccccagcuucagccugg

SEQ ID NO: 162986 - RNA, 23 nt, Human
uccccagcuucagccugggucuc

SEQ ID NO: 162987 - RNA, 22 nt, Human
uccuccccagcuucagccuggg

SEQ ID NO: 162988 - RNA, 22 nt, Human
ucgccuucagccaguaguccca

SEQ ID NO: 162989 - RNA, 21 nt, Human
ucggauccaagugcggggucu

SEQ ID NO: 162990 - RNA, 24 nt, Human
ucuuaaaaaaaaaaaaacacacaa

SEQ ID NO: 162991 - RNA, 23 nt, Human
ugaaauaaacuguauuuuucuua

SEQ ID NO: 162992 - RNA, 18 nt, Human
ugagcugggagggaaggg

SEQ ID NO: 162993 - RNA, 23 nt, Human
ugagcugggagggaaggggcuag

SEQ ID NO: 162994 - RNA, 21 nt, Human
uggcaacggcucccacccucc

SEQ ID NO: 162995 - RNA, 18 nt, Human
uggcugaggaggcagggc

SEQ ID NO: 162996 - RNA, 20 nt, Human
uggcugaggaggcagggcug

SEQ ID NO: 162997 - RNA, 22 nt, Human
uggcugaggaggcagggcuggg

SEQ ID NO: 162998 - RNA, 19 nt, Human
ugggaagcguucuuccucc

SEQ ID NO: 162999 - RNA, 21 nt, Human
ugggaagcguucuuccucccg

SEQ ID NO: 163000 - RNA, 19 nt, Human
ugggagggaaggggcuaga

SEQ ID NO: 163001 - RNA, 24 nt, Human
uggggccggguagagcuguagcca

SEQ ID NO: 163002 - RNA, 22 nt, Human
uggggugggggcucccaguuug

SEQ ID NO: 163003 - RNA, 26 nt, Human
uggggugggggcucccaguuuguccc

SEQ ID NO: 163004 - RNA, 23 nt, Human
uguccugcgcuugggcugcgggg

SEQ ID NO: 163005 - RNA, 18 nt, Human
aaaaggcucugcaaagaa

SEQ ID NO: 163006 - RNA, 18 nt, Human
aaaaggcucugcaaagaa

SEQ ID NO: 163007 - RNA, 20 nt, Human
aaacauacagucucacagua

SEQ ID NO: 163008 - RNA, 20 nt, Human
aaacauacagucucacagua

SEQ ID NO: 163009 - RNA, 26 nt, Human
aaacuucucuggaguggucaacaccc

SEQ ID NO: 163010 - RNA, 26 nt, Human
aaacuucucuggaguggucaacaccc

SEQ ID NO: 163011 - RNA, 22 nt, Human
aaccacuucuagugcucuccac

SEQ ID NO: 163012 - RNA, 22 nt, Human
aaccacuucuagugcucuccac

SEQ ID NO: 163013 - RNA, 22 nt, Human
aacugcagaaacucugccccca

SEQ ID NO: 163014 - RNA, 22 nt, Human
aacugcagaaacucugccccca

SEQ ID NO: 163015 - RNA, 25 nt, Human
aaugguucuccuccagccuuuccag

SEQ ID NO: 163016 - RNA, 19 nt, Human
acaaauucaggcucugugg

SEQ ID NO: 163017 - RNA, 19 nt, Human
acaaauucaggcucugugg

SEQ ID NO: 163018 - RNA, 20 nt, Human
accccaaagccucugcuuac

SEQ ID NO: 163019 - RNA, 20 nt, Human
accccaaagccucugcuuac

SEQ ID NO: 163020 - RNA, 19 nt, Human
acucaguccccagauccac

SEQ ID NO: 163021 - RNA, 19 nt, Human
acucaguccccagauccac

SEQ ID NO: 163022 - RNA, 19 nt, Human
agagacuggcagggggaga

SEQ ID NO: 163023 - RNA, 20 nt, Human
agagggaaauagugugcagu

SEQ ID NO: 163024 - RNA, 20 nt, Human
agagggaaauagugugcagu

SEQ ID NO: 163025 - RNA, 23 nt, Human
aggcauaacuauugucagugcug

SEQ ID NO: 163026 - RNA, 23 nt, Human
aggcauaacuauugucagugcug

SEQ ID NO: 163027 - RNA, 21 nt, Human
auacaaguaaugguaauacaa

SEQ ID NO: 163028 - RNA, 21 nt, Human
auacaaguaaugguaauacaa

SEQ ID NO: 163029 - RNA, 18 nt, Human
auggaacugcagaaacuc

SEQ ID NO: 163030 - RNA, 18 nt, Human
auggaacugcagaaacuc

SEQ ID NO: 163031 - RNA, 20 nt, Human
auggaacugcagaaacucug

SEQ ID NO: 163032 - RNA, 20 nt, Human
auggaacugcagaaacucug

SEQ ID NO: 163033 - RNA, 22 nt, Human
auggaacugcagaaacucugcc

SEQ ID NO: 163034 - RNA, 22 nt, Human
auggaacugcagaaacucugcc

SEQ ID NO: 163035 - RNA, 19 nt, Human
auggagggacucagccugc

SEQ ID NO: 163036 - RNA, 22 nt, Human
caaaagggagccaugccagaug

SEQ ID NO: 163037 - RNA, 22 nt, Human
caaaagggagccaugccagaug

SEQ ID NO: 163038 - RNA, 22 nt, Human
caccugaagucacccagggcuc

SEQ ID NO: 163039 - RNA, 22 nt, Human
caccugaagucacccagggcuc

SEQ ID NO: 163040 - RNA, 26 nt, Human
cagaaacucugcccccaacccacuga

SEQ ID NO: 163041 - RNA, 26 nt, Human
cagaaacucugcccccaacccacuga

SEQ ID NO: 163042 - RNA, 18 nt, Human
cagcaccugcaccugggg

SEQ ID NO: 163043 - RNA, 20 nt, Human
cagcagcugcugcuuguggc

SEQ ID NO: 163044 - RNA, 20 nt, Human
cagcagcugcugcuuguggc

SEQ ID NO: 163045 - RNA, 19 nt, Human
caggggaagcagaauccac

SEQ ID NO: 163046 - RNA, 22 nt, Human
caggggccaagcacaaugugug

SEQ ID NO: 163047 - RNA, 22 nt, Human
caggggccaagcacaaugugug

SEQ ID NO: 163048 - RNA, 23 nt, Human
cauacagucucacaguaaauuuc

SEQ ID NO: 163049 - RNA, 23 nt, Human
cauacagucucacaguaaauuuc

SEQ ID NO: 163050 - RNA, 24 nt, Human
caugaggugugcauuuuuaagggu

SEQ ID NO: 163051 - RNA, 24 nt, Human
caugaggugugcauuuuuaagggu

SEQ ID NO: 163052 - RNA, 21 nt, Human
cauggagggacucagccugca

SEQ ID NO: 163053 - RNA, 21 nt, Human
cauggagggacucagccugca

SEQ ID NO: 163054 - RNA, 26 nt, Human
ccaaacccagacccagacuggcccuc

SEQ ID NO: 163055 - RNA, 26 nt, Human
ccaaacccagacccagacuggcccuc

SEQ ID NO: 163056 - RNA, 21 nt, Human
ccaccugaagucacccagggc

SEQ ID NO: 163057 - RNA, 21 nt, Human
ccaccugaagucacccagggc

SEQ ID NO: 163058 - RNA, 19 nt, Human
ccagggcucucugcugcug

SEQ ID NO: 163059 - RNA, 19 nt, Human
ccagggcucucugcugcug

SEQ ID NO: 163060 - RNA, 22 nt, Human
ccccaaagccucugcuuaccag

SEQ ID NO: 163061 - RNA, 22 nt, Human
ccccaaagccucugcuuaccag

SEQ ID NO: 163062 - RNA, 18 nt, Human
ccccagaugaucugcaag

SEQ ID NO: 163063 - RNA, 18 nt, Human
ccccagaugaucugcaag

SEQ ID NO: 163064 - RNA, 19 nt, Human
cccccaacccacugaauca

SEQ ID NO: 163065 - RNA, 19 nt, Human
cccccaacccacugaauca

SEQ ID NO: 163066 - RNA, 25 nt, Human
cccucuguucuaaacugugcagggg

SEQ ID NO: 163067 - RNA, 22 nt, Human
cccuuucuuucucugcacuccc

SEQ ID NO: 163068 - RNA, 22 nt, Human
cccuuucuuucucugcacuccc

SEQ ID NO: 163069 - RNA, 23 nt, Human
ccuccagccuuuccaggaacaaa

SEQ ID NO: 163070 - RNA, 18 nt, Human
ccucuguucuaaacugug

SEQ ID NO: 163071 - RNA, 18 nt, Human
ccucuguucuaaacugug

SEQ ID NO: 163072 - RNA, 21 nt, Human
ccucuguucuaaacugugcag

SEQ ID NO: 163073 - RNA, 23 nt, Human
ccucuguucuaaacugugcaggg

SEQ ID NO: 163074 - RNA, 24 nt, Human
ccucuguucuaaacugugcagggg

SEQ ID NO: 163075 - RNA, 21 nt, Human
ccugggaaaagcuguugguaa

SEQ ID NO: 163076 - RNA, 19 nt, Human
cucaugaggugugcauuuu

SEQ ID NO: 163077 - RNA, 19 nt, Human
cucaugaggugugcauuuu

SEQ ID NO: 163078 - RNA, 22 nt, Human
cuuacaaauucaggcucugugg

SEQ ID NO: 163079 - RNA, 23 nt, Human
cuuucuggccauagugaguccga

SEQ ID NO: 163080 - RNA, 19 nt, Human
cuuucuuuuuccuucuccu

SEQ ID NO: 163081 - RNA, 20 nt, Human
cuuucuuuuuccuucuccuu

SEQ ID NO: 163082 - RNA, 25 nt, Human
gaaucagaaucuccauucaaaccag

SEQ ID NO: 163083 - RNA, 25 nt, Human
gaaucagaaucuccauucaaaccag

SEQ ID NO: 163084 - RNA, 22 nt, Human
gcagggcacaggaaggacaaaa

SEQ ID NO: 163085 - RNA, 22 nt, Human
gcagggcacaggaaggacaaaa

SEQ ID NO: 163086 - RNA, 18 nt, Human
ggaaaacaaaaaucucau

SEQ ID NO: 163087 - RNA, 24 nt, Human
ggaagcagaauccacuuggugucu

SEQ ID NO: 163088 - RNA, 23 nt, Human
ggagaaacaagauugcuuucugg

SEQ ID NO: 163089 - RNA, 18 nt, Human
ggagggacucagccugca

SEQ ID NO: 163090 - RNA, 19 nt, Human
ggagggacucagccugcaa

SEQ ID NO: 163091 - RNA, 19 nt, Human
ggagggacucagccugcaa

SEQ ID NO: 163092 - RNA, 22 nt, Human
ggcacaggaaggacaaaaggga

SEQ ID NO: 163093 - RNA, 22 nt, Human
ggcacaggaaggacaaaaggga

SEQ ID NO: 163094 - RNA, 24 nt, Human
gguuuaacauuuuugaaguauguu

SEQ ID NO: 163095 - RNA, 20 nt, Human
gucagugcugccugaaugcu

SEQ ID NO: 163096 - RNA, 20 nt, Human
gucagugcugccugaaugcu

SEQ ID NO: 163097 - RNA, 19 nt, Human
gugcauuuuuaaggguuag

SEQ ID NO: 163098 - RNA, 20 nt, Human
gugcauuuuuaaggguuagu

SEQ ID NO: 163099 - RNA, 20 nt, Human
gugcauuuuuaaggguuagu

SEQ ID NO: 163100 - RNA, 22 nt, Human
uaaaugccucuguucugaaggg

SEQ ID NO: 163101 - RNA, 22 nt, Human
uaaaugccucuguucugaaggg

SEQ ID NO: 163102 - RNA, 21 nt, Human
uaccaggggccaagcacaaug

SEQ ID NO: 163103 - RNA, 21 nt, Human
uaccaggggccaagcacaaug

SEQ ID NO: 163104 - RNA, 20 nt, Human
ucaaguuuaagcaggaagug

SEQ ID NO: 163105 - RNA, 20 nt, Human
ucaaguuuaagcaggaagug

SEQ ID NO: 163106 - RNA, 19 nt, Human
ucagcaccugcaccugggg

SEQ ID NO: 163107 - RNA, 19 nt, Human
ucagcaccugcaccugggg

SEQ ID NO: 163108 - RNA, 21 nt, Human
ucagcagcugcugcuuguggc

SEQ ID NO: 163109 - RNA, 24 nt, Human
ucaguaucauauguuagagaugaa

SEQ ID NO: 163110 - RNA, 24 nt, Human
ucaguaucauauguuagagaugaa

SEQ ID NO: 163111 - RNA, 22 nt, Human
uccaaacccagacccagacugg

SEQ ID NO: 163112 - RNA, 22 nt, Human
uccaaacccagacccagacugg

SEQ ID NO: 163113 - RNA, 23 nt, Human
ucccaaggauuuauucugccuuc

SEQ ID NO: 163114 - RNA, 23 nt, Human
ucccaaggauuuauucugccuuc

SEQ ID NO: 163115 - RNA, 18 nt, Human
ucccacuuagccgacccc

SEQ ID NO: 163116 - RNA, 18 nt, Human
ucccacuuagccgacccc

SEQ ID NO: 163117 - RNA, 22 nt, Human
uccccagauccacaugaauuuc

SEQ ID NO: 163118 - RNA, 22 nt, Human
uccccagauccacaugaauuuc

SEQ ID NO: 163119 - RNA, 18 nt, Human
uccuaaccuggcaugaag

SEQ ID NO: 163120 - RNA, 18 nt, Human
uccuaaccuggcaugaag

SEQ ID NO: 163121 - RNA, 24 nt, Human
uccugggaaaagcuguugguaagg

SEQ ID NO: 163122 - RNA, 21 nt, Human
uccuucuaaguuacccaccaa

SEQ ID NO: 163123 - RNA, 21 nt, Human
uccuucuaaguuacccaccaa

SEQ ID NO: 163124 - RNA, 26 nt, Human
ucgcucagugcugucccaggggaagg

SEQ ID NO: 163125 - RNA, 19 nt, Human
ucucagaguagcccggcuc

SEQ ID NO: 163126 - RNA, 24 nt, Human
ucucugcacucccacacucagucc

SEQ ID NO: 163127 - RNA, 24 nt, Human
ucucugcacucccacacucagucc

SEQ ID NO: 163128 - RNA, 20 nt, Human
ucugccuuccugcggcuggg

SEQ ID NO: 163129 - RNA, 20 nt, Human
ucugccuuccugcggcuggg

SEQ ID NO: 163130 - RNA, 23 nt, Human
ucugccuuccugcggcugggccu

SEQ ID NO: 163131 - RNA, 23 nt, Human
ucugccuuccugcggcugggccu

SEQ ID NO: 163132 - RNA, 18 nt, Human
ucuucucugcaugcuucu

SEQ ID NO: 163133 - RNA, 19 nt, Human
ucuuuuuccuucuccuucu

SEQ ID NO: 163134 - RNA, 19 nt, Human
ucuuuuuccuucuccuucu

SEQ ID NO: 163135 - RNA, 19 nt, Human
ugaaucagaaucuccauuc

SEQ ID NO: 163136 - RNA, 19 nt, Human
ugaaucagaaucuccauuc

SEQ ID NO: 163137 - RNA, 19 nt, Human
ugaggucaggugagguucg

SEQ ID NO: 163138 - RNA, 19 nt, Human
ugaggucaggugagguucg

SEQ ID NO: 163139 - RNA, 20 nt, Human
ugaggucaggugagguucgg

SEQ ID NO: 163140 - RNA, 20 nt, Human
ugaggucaggugagguucgg

SEQ ID NO: 163141 - RNA, 19 nt, Human
ugcaagaggcaauuggaga

SEQ ID NO: 163142 - RNA, 19 nt, Human
ugcaagaggcaauuggaga

SEQ ID NO: 163143 - RNA, 19 nt, Human
uggaaaacaaaaaucucau

SEQ ID NO: 163144 - RNA, 19 nt, Human
uggaaaacaaaaaucucau

SEQ ID NO: 163145 - RNA, 21 nt, Human
uggagauccaaacccagaccc

SEQ ID NO: 163146 - RNA, 21 nt, Human
uggagauccaaacccagaccc

SEQ ID NO: 163147 - RNA, 19 nt, Human
uggagggacucagccugca

SEQ ID NO: 163148 - RNA, 19 nt, Human
uggagggacucagccugca

SEQ ID NO: 163149 - RNA, 23 nt, Human
uggagggacucagccugcaagag

SEQ ID NO: 163150 - RNA, 23 nt, Human
uggagggacucagccugcaagag

SEQ ID NO: 163151 - RNA, 18 nt, Human
ugggaaaagcuguuggua

SEQ ID NO: 163152 - RNA, 18 nt, Human
ugggaaaagcuguuggua

SEQ ID NO: 163153 - RNA, 18 nt, Human
ugggaaaagcuguuggua

SEQ ID NO: 163154 - RNA, 18 nt, Human
ugggaaaagcuguuggua

SEQ ID NO: 163155 - RNA, 19 nt, Human
ugggaaaagcuguugguaa

SEQ ID NO: 163156 - RNA, 20 nt, Human
ugggaaaagcuguugguaag

SEQ ID NO: 163157 - RNA, 20 nt, Human
ugggaaaagcuguugguaag

SEQ ID NO: 163158 - RNA, 21 nt, Human
ugggaaggucaaggcguggua

SEQ ID NO: 163159 - RNA, 21 nt, Human
ugggaaggucaaggcguggua

SEQ ID NO: 163160 - RNA, 22 nt, Human
ugggcuaggaccccaaagccuc

SEQ ID NO: 163161 - RNA, 22 nt, Human
ugggcuaggaccccaaagccuc

SEQ ID NO: 163162 - RNA, 20 nt, Human
ugucagugcugccugaaugc

SEQ ID NO: 163163 - RNA, 20 nt, Human
ugucagugcugccugaaugc

SEQ ID NO: 163164 - RNA, 20 nt, Human
ugugcagggguaaaaggcuc

SEQ ID NO: 163165 - RNA, 20 nt, Human
ugugcagggguaaaaggcuc

SEQ ID NO: 163166 - RNA, 23 nt, Human
uguuguaaugguucuccuccagg

SEQ ID NO: 163167 - RNA, 20 nt, Human
uuaaaggccuuuacauggca

SEQ ID NO: 163168 - RNA, 20 nt, Human
uuaaaggccuuuacauggca

SEQ ID NO: 163169 - RNA, 22 nt, Human
uuaacacucucaucaauuuuua

SEQ ID NO: 163170 - RNA, 22 nt, Human
uuaacacucucaucaauuuuua

SEQ ID NO: 163171 - RNA, 28 nt, Human
uuaacacucucaucaauuuuuauucaca

SEQ ID NO: 163172 - RNA, 28 nt, Human
uuaacacucucaucaauuuuuauucaca

SEQ ID NO: 163173 - RNA, 24 nt, Human
uuccauuuuaaaugccucuguucc

SEQ ID NO: 163174 - RNA, 24 nt, Human
uuccauuuuaaaugccucuguucc

SEQ ID NO: 163175 - RNA, 22 nt, Human
uuguaauagcacaguggaaaac

SEQ ID NO: 163176 - RNA, 22 nt, Human
uuguaauagcacaguggaaaac

SEQ ID NO: 163177 - RNA, 18 nt, Human
uuguaggccgagggcugu

SEQ ID NO: 163178 - RNA, 21 nt, Human
uuuaggaccaggacccugcuc

SEQ ID NO: 163179 - RNA, 21 nt, Human
uuuaggaccaggacccugcuc

SEQ ID NO: 163180 - RNA, 25 nt, Human
uuucccuuucuuucucugcacuccc

SEQ ID NO: 163181 - RNA, 21 nt, Human
uuuuuaaggguuaguugaggu

SEQ ID NO: 163182 - RNA, 21 nt, Human
uuuuuaaggguuaguugaggu

SEQ ID NO: 163183 - RNA, 22 nt, Human
uuuuuuuuuuuuaacacucuca

SEQ ID NO: 163184 - RNA, 22 nt, Human
uuuuuuuuuuuuaacacucuca

SEQ ID NO: 163185 - RNA, 23 nt, Human
aaaaaaaaaaaaaaaagaaagaa

SEQ ID NO: 163186 - RNA, 18 nt, Human
aaaaaaaaaaaaaaagaa

SEQ ID NO: 163187 - RNA, 23 nt, Human
aaaaaaaaaagaaagaaagaaga

SEQ ID NO: 163188 - RNA, 21 nt, Human
aaaaaaaagaaagaaagaaga

SEQ ID NO: 163189 - RNA, 21 nt, Human
aaacaaaugaauugcaaacug

SEQ ID NO: 163190 - RNA, 19 nt, Human
aaauaaaauacaaaaucaa

SEQ ID NO: 163191 - RNA, 19 nt, Human
aacaaauuagcuacuggcu

SEQ ID NO: 163192 - RNA, 18 nt, Human
aacaauacaugcuggaca

SEQ ID NO: 163193 - RNA, 19 nt, Human
aacuggacuuguaacagga

SEQ ID NO: 163194 - RNA, 22 nt, Human
aagaaagaaagaagaacuccgg

SEQ ID NO: 163195 - RNA, 23 nt, Human
aagaaagaaagaagaacuccgga

SEQ ID NO: 163196 - RNA, 21 nt, Human
aagaacuccggaaauaauauc

SEQ ID NO: 163197 - RNA, 19 nt, Human
aagaagaaauacagcuaga

SEQ ID NO: 163198 - RNA, 22 nt, Human
aagacaggguacaaagcuuucu

SEQ ID NO: 163199 - RNA, 21 nt, Human
aagcaaaaaaaucagaccaaa

SEQ ID NO: 163200 - RNA, 23 nt, Human
aauuacuaaaaaaaaaaaaaaaa

SEQ ID NO: 163201 - RNA, 19 nt, Human
acaaagcaaaaaaaucaga

SEQ ID NO: 163202 - RNA, 25 nt, Human
acaaagcaaaaaaaucagaccaaau

SEQ ID NO: 163203 - RNA, 22 nt, Human
acaaagcuuucuaaaacaugcu

SEQ ID NO: 163204 - RNA, 24 nt, Human
acaggaucauacauagagcaacaa

SEQ ID NO: 163205 - RNA, 24 nt, Human
acaggguacaaagcuuucuaaaac

SEQ ID NO: 163206 - RNA, 18 nt, Human
accuggugaaggauaugg

SEQ ID NO: 163207 - RNA, 19 nt, Human
agagggaagaaggggagag

SEQ ID NO: 163208 - RNA, 19 nt, Human
agccuucuacuaauaacaa

SEQ ID NO: 163209 - RNA, 20 nt, Human
aggaaauggguaaaugggaa

SEQ ID NO: 163210 - RNA, 24 nt, Human
agguuugaggugagggccuagagc

SEQ ID NO: 163211 - RNA, 18 nt, Human
aucuauuuauuccaaugc

SEQ ID NO: 163212 - RNA, 25 nt, Human
augguccacuauugaagaauaauga

SEQ ID NO: 163213 - RNA, 24 nt, Human
auuuauuuuuuccuuugcuuuuaa

SEQ ID NO: 163214 - RNA, 20 nt, Human
caaagcaaaaaaaucagacc

SEQ ID NO: 163215 - RNA, 24 nt, Human
cacaaagcaaaaaaaucagaccaa

SEQ ID NO: 163216 - RNA, 21 nt, Human
cacaccugagacauugcuuug

SEQ ID NO: 163217 - RNA, 19 nt, Human
caccuggacauggcacugg

SEQ ID NO: 163218 - RNA, 21 nt, Human
cauugcaacaagcaagcuuug

SEQ ID NO: 163219 - RNA, 20 nt, Human
cauugcuuuguggauacucu

SEQ ID NO: 163220 - RNA, 20 nt, Human
ccacaaagcaaaaaaaucag

SEQ ID NO: 163221 - RNA, 18 nt, Human
ccagggguauucuuuucc

SEQ ID NO: 163222 - RNA, 25 nt, Human
ccauauuauuucucuacacaccuug

SEQ ID NO: 163223 - RNA, 24 nt, Human
cccaaauaaaauacaaaaucaagc

SEQ ID NO: 163224 - RNA, 24 nt, Human
cggcaaccaauggcaagguuugag

SEQ ID NO: 163225 - RNA, 23 nt, Human
cuaaaaaaaaaaaaaaaagaaag

SEQ ID NO: 163226 - RNA, 22 nt, Human
cuaccacauugcaacaagcaag

SEQ ID NO: 163227 - RNA, 25 nt, Human
cuauguaugugccuucucuuacacu

SEQ ID NO: 163228 - RNA, 19 nt, Human
gaaauuccuucauuucauu

SEQ ID NO: 163229 - RNA, 18 nt, Human
gaaggaagggaaggggaa

SEQ ID NO: 163230 - RNA, 21 nt, Human
ggaaauguucaauuucauggg

SEQ ID NO: 163231 - RNA, 20 nt, Human
ggacaguagagauauaggag

SEQ ID NO: 163232 - RNA, 20 nt, Human
ggcaagguuugaggugaggg

SEQ ID NO: 163233 - RNA, 18 nt, Human
gggaaggaagggaagggg

SEQ ID NO: 163234 - RNA, 18 nt, Human
gggaugagagagggaaga

SEQ ID NO: 163235 - RNA, 23 nt, Human
gggccuagagcuucugcaaagug

SEQ ID NO: 163236 - RNA, 19 nt, Human
ggggaagggaugagagagg

SEQ ID NO: 163237 - RNA, 20 nt, Human
uaacaauacaguuuaguuua

SEQ ID NO: 163238 - RNA, 19 nt, Human
uaacagaaauaggauaccu

SEQ ID NO: 163239 - RNA, 24 nt, Human
uaacagaaauaggauaccugguga

SEQ ID NO: 163240 - RNA, 20 nt, Human
uacacugaguucuuuuuugc

SEQ ID NO: 163241 - RNA, 19 nt, Human
uaccacauugcaacaagca

SEQ ID NO: 163242 - RNA, 18 nt, Human
uagaaaauuuaaaugucu

SEQ ID NO: 163243 - RNA, 19 nt, Human
uagagcuucugcaaagugu

SEQ ID NO: 163244 - RNA, 18 nt, Human
uagauaacagaaauagga

SEQ ID NO: 163245 - RNA, 19 nt, Human
uagcugcuaauuccauauu

SEQ ID NO: 163246 - RNA, 22 nt, Human
ucauuaaggcuauucgaugcca

SEQ ID NO: 163247 - RNA, 21 nt, Human
uccacaaagcaaaaaaaucag

SEQ ID NO: 163248 - RNA, 24 nt, Human
uccacaaagcaaaaaaaucagacc

SEQ ID NO: 163249 - RNA, 25 nt, Human
ucuaggaaacaaaugaauugcaaac

SEQ ID NO: 163250 - RNA, 21 nt, Human
ucucaaagguguccacaaagc

SEQ ID NO: 163251 - RNA, 24 nt, Human
ucucuacacaccuugaacauuuag

SEQ ID NO: 163252 - RNA, 20 nt, Human
ucugcuaaccucuagauaac

SEQ ID NO: 163253 - RNA, 19 nt, Human
ucuguuuuguguuuuuuuu

SEQ ID NO: 163254 - RNA, 21 nt, Human
ugagggaaacuauauugaccu

SEQ ID NO: 163255 - RNA, 18 nt, Human
ugaugauaaaugguuccu

SEQ ID NO: 163256 - RNA, 21 nt, Human
ugccuacaugcauacaauuug

SEQ ID NO: 163257 - RNA, 21 nt, Human
ugcuaugucuucucauugaua

SEQ ID NO: 163258 - RNA, 21 nt, Human
uggaacaauacaugcuggaca

SEQ ID NO: 163259 - RNA, 21 nt, Human
uggaugucucuacaccacucc

SEQ ID NO: 163260 - RNA, 18 nt, Human
uggcaagguuugagguga

SEQ ID NO: 163261 - RNA, 23 nt, Human
uggcaagguuugaggugaggaaa

SEQ ID NO: 163262 - RNA, 20 nt, Human
uggcacuggcaaaagucacu

SEQ ID NO: 163263 - RNA, 25 nt, Human
ugggaaggaagggaaggggaaggga

SEQ ID NO: 163264 - RNA, 18 nt, Human
ugguucugguagugacag

SEQ ID NO: 163265 - RNA, 19 nt, Human
uguaacauuuauuucuucc

SEQ ID NO: 163266 - RNA, 18 nt, Human
ugugcuaaucuuugugca

SEQ ID NO: 163267 - RNA, 24 nt, Human
uguuuuuuuuucuuuaaauuugga

SEQ ID NO: 163268 - RNA, 18 nt, Human
uuauauuuuugccccagg

SEQ ID NO: 163269 - RNA, 24 nt, Human
uuccugccacaagacaggguacaa

SEQ ID NO: 163270 - RNA, 24 nt, Human
uugcguugacuaauuuccuaggac

SEQ ID NO: 163271 - RNA, 21 nt, Human
uuggaacaauacaugcuggac

SEQ ID NO: 163272 - RNA, 22 nt, Human
uuggaacaauacaugcuggaca

SEQ ID NO: 163273 - RNA, 21 nt, Human
uuggguggauuuacuggaagg

SEQ ID NO: 163274 - RNA, 22 nt, Human
uugguucugguagugacaggug

SEQ ID NO: 163275 - RNA, 26 nt, Human
uuucuuuccugccacaagacagggua

SEQ ID NO: 163276 - RNA, 21 nt, Human
uuugguuaaacaaauaucucu

SEQ ID NO: 163277 - RNA, 22 nt, Human
uuuugguuaaacaaauaucucu

SEQ ID NO: 163278 - RNA, 20 nt, Human
uuuuuuuuuuuuuuuuuugg

SEQ ID NO: 163279 - RNA, 18 nt, Human
aaaaaagaaagaaaaaca

SEQ ID NO: 163280 - RNA, 22 nt, Human
aaaaagucaauagaaccauuga

SEQ ID NO: 163281 - RNA, 21 nt, Human
aaagaaaaacaauuggucaaa

SEQ ID NO: 163282 - RNA, 23 nt, Human
aacaacacaaaagacaacaucac

SEQ ID NO: 163283 - RNA, 21 nt, Human
aacaauuaugaaugcacaaaa

SEQ ID NO: 163284 - RNA, 23 nt, Human
aagaaaacaacacaauucacaua

SEQ ID NO: 163285 - RNA, 24 nt, Human
aagaaaacaacacaauucacauaa

SEQ ID NO: 163286 - RNA, 18 nt, Human
aagaagccacaacaauag

SEQ ID NO: 163287 - RNA, 20 nt, Human
aagccaagaaaacaacacaa

SEQ ID NO: 163288 - RNA, 22 nt, Human
aagccaauucagauucaacccu

SEQ ID NO: 163289 - RNA, 20 nt, Human
aaguauaggugagaucauga

SEQ ID NO: 163290 - RNA, 22 nt, Human
aaguauaggugagaucaugaga

SEQ ID NO: 163291 - RNA, 18 nt, Human
aauuuuguuuuguuuugu

SEQ ID NO: 163292 - RNA, 26 nt, Human
acaaaagacaacaucacaguuccaca

SEQ ID NO: 163293 - RNA, 22 nt, Human
acaacacaaaagacaacaucac

SEQ ID NO: 163294 - RNA, 22 nt, Human
acacaauauucaugugccaaau

SEQ ID NO: 163295 - RNA, 19 nt, Human
accagaauaccacaaaucu

SEQ ID NO: 163296 - RNA, 23 nt, Human
acuugaccagaauaccacaaauc

SEQ ID NO: 163297 - RNA, 24 nt, Human
agaaaaacaauuggucaaaccaca

SEQ ID NO: 163298 - RNA, 19 nt, Human
aggaagacucauacauaua

SEQ ID NO: 163299 - RNA, 22 nt, Human
agguaagguucuguuacagagc

SEQ ID NO: 163300 - RNA, 21 nt, Human
aguucucuuuacugacugggg

SEQ ID NO: 163301 - RNA, 21 nt, Human
auacaacaacaaauauuaaac

SEQ ID NO: 163302 - RNA, 22 nt, Human
auggaaaccuagcuaagucuua

SEQ ID NO: 163303 - RNA, 23 nt, Human
auuguggucuuuuacauuuucuu

SEQ ID NO: 163304 - RNA, 21 nt, Human
caaaguacagcacaauaacuu

SEQ ID NO: 163305 - RNA, 22 nt, Human
caacacaaaagacaacaucaca

SEQ ID NO: 163306 - RNA, 25 nt, Human
caagaaaacaacacaauucacauaa

SEQ ID NO: 163307 - RNA, 18 nt, Human
caagaagccacaacaaua

SEQ ID NO: 163308 - RNA, 21 nt, Human
caagaagccacaacaauaguu

SEQ ID NO: 163309 - RNA, 19 nt, Human
caagccaagaaaacaacac

SEQ ID NO: 163310 - RNA, 21 nt, Human
caauaacuugaccagaauacc

SEQ ID NO: 163311 - RNA, 18 nt, Human
caauucagauucaacccu

SEQ ID NO: 163312 - RNA, 18 nt, Human
cacaggacagaaaacugc

SEQ ID NO: 163313 - RNA, 21 nt, Human
cagagcccuucuuuugcccuc

SEQ ID NO: 163314 - RNA, 22 nt, Human
caggacagaaaacugccuguac

SEQ ID NO: 163315 - RNA, 20 nt, Human
ccaagaacccaacuuucuuc

SEQ ID NO: 163316 - RNA, 22 nt, Human
ccagaauaccacaaaucuaaaa

SEQ ID NO: 163317 - RNA, 20 nt, Human
cccuucuuuugcccucacug

SEQ ID NO: 163318 - RNA, 26 nt, Human
cgcaaaaagucaauagaaccauugaa

SEQ ID NO: 163319 - RNA, 20 nt, Human
cuagcuaagucuuaaacacu

SEQ ID NO: 163320 - RNA, 18 nt, Human
cuaugccaaagaaaagag

SEQ ID NO: 163321 - RNA, 22 nt, Human
cuuaaacacuuuuccaguagca

SEQ ID NO: 163322 - RNA, 23 nt, Human
gaaguucucuuuacugacugggg

SEQ ID NO: 163323 - RNA, 21 nt, Human
gagguaagguucuguuacaga

SEQ ID NO: 163324 - RNA, 19 nt, Human
gcaacucuaugccaagaac

SEQ ID NO: 163325 - RNA, 20 nt, Human
gccuguacaugcuaugucca

SEQ ID NO: 163326 - RNA, 21 nt, Human
ggucuuuuacauuuucuuggu

SEQ ID NO: 163327 - RNA, 19 nt, Human
gugcugugaaauacuuuug

SEQ ID NO: 163328 - RNA, 22 nt, Human
uaacaauuccuuguacacaaua

SEQ ID NO: 163329 - RNA, 18 nt, Human
uaagaaggucuaauggca

SEQ ID NO: 163330 - RNA, 20 nt, Human
uacaacucaauuucuacgca

SEQ ID NO: 163331 - RNA, 19 nt, Human
uacacuugaggauaauuuu

SEQ ID NO: 163332 - RNA, 21 nt, Human
ucaagccaagaaaacaacaca

SEQ ID NO: 163333 - RNA, 23 nt, Human
ucagauucaacccugaauuuggu

SEQ ID NO: 163334 - RNA, 24 nt, Human
ucuaaaaaaaaaaaaagaaagaaa

SEQ ID NO: 163335 - RNA, 25 nt, Human
ucuacauuuggagcagaccgggguc

SEQ ID NO: 163336 - RNA, 18 nt, Human
ucucagauuuaguucacu

SEQ ID NO: 163337 - RNA, 26 nt, Human
ugaaauacuuuuggauuaucaucccc

SEQ ID NO: 163338 - RNA, 18 nt, Human
ugagggaaaaccagucuu

SEQ ID NO: 163339 - RNA, 22 nt, Human
ugcaacucuaugccaagaaccc

SEQ ID NO: 163340 - RNA, 18 nt, Human
uggcauucuuaugcacaa

SEQ ID NO: 163341 - RNA, 24 nt, Human
ugguugauuuggauuaagugacgc

SEQ ID NO: 163342 - RNA, 21 nt, Human
ugugaaucaagcguagauaga

SEQ ID NO: 163343 - RNA, 28 nt, Human
ugugcacaggacagaaaacugccuguac

SEQ ID NO: 163344 - RNA, 18 nt, Human
uguggucuuuuacauuuu

SEQ ID NO: 163345 - RNA, 24 nt, Human
uguggucuuuuacauuuucuuggu

SEQ ID NO: 163346 - RNA, 26 nt, Human
uguuuuguuuuguuuuguuuguuuuu

SEQ ID NO: 163347 - RNA, 22 nt, Human
uucacauaauuuuguuugcccc

SEQ ID NO: 163348 - RNA, 23 nt, Human
uucacuaaaaugcuuggcauucu

SEQ ID NO: 163349 - RNA, 21 nt, Human
uucagauucaacccugaauuu

SEQ ID NO: 163350 - RNA, 24 nt, Human
uuccaugcaacagauaugaagauc

SEQ ID NO: 163351 - RNA, 21 nt, Human
uuggagcagacacagagagag

SEQ ID NO: 163352 - RNA, 18 nt, Human
uuuguuuuguuuuguuug

SEQ ID NO: 163353 - RNA, 19 nt, Human
uuuguuuuguuuuguuuug

SEQ ID NO: 163354 - RNA, 18 nt, Human
uuuuguuuuguuuguuuu

SEQ ID NO: 163355 - RNA, 20 nt, Human
agcgccccgcgcggcuccuc

SEQ ID NO: 163356 - RNA, 31 nt, Human
caacaauaaaauccuuaucaccccucccccc

SEQ ID NO: 163357 - RNA, 18 nt, Human
cacugcuggccggccggc

SEQ ID NO: 163358 - RNA, 20 nt, Human
cagcgccccgcgcggcuccu

SEQ ID NO: 163359 - RNA, 26 nt, Human
cagcgccccgcgcggcuccucccgag

SEQ ID NO: 163360 - RNA, 18 nt, Human
cagucccuuugcgugagu

SEQ ID NO: 163361 - RNA, 18 nt, Human
cagucccuuugcgugagu

SEQ ID NO: 163362 - RNA, 23 nt, Human
caugucuccuccuccgcgucucu

SEQ ID NO: 163363 - RNA, 18 nt, Human
cccagccugcacaugucc

SEQ ID NO: 163364 - RNA, 18 nt, Human
ccccgcgcggcuccuccc

SEQ ID NO: 163365 - RNA, 22 nt, Human
ccccgcgcggcuccucccgagc

SEQ ID NO: 163366 - RNA, 19 nt, Human
cccuuugcgugagucuuuu

SEQ ID NO: 163367 - RNA, 19 nt, Human
cccuuugcgugagucuuuu

SEQ ID NO: 163368 - RNA, 18 nt, Human
ccgccgccgccgccgccg

SEQ ID NO: 163369 - RNA, 18 nt, Human
ccgccgccgccgccgccg

SEQ ID NO: 163370 - RNA, 22 nt, Human
ccgccgccgccgccgccgccgc

SEQ ID NO: 163371 - RNA, 24 nt, Human
ccgccgccgccgccgccgccgccg

SEQ ID NO: 163372 - RNA, 24 nt, Human
ccgccgccgccgccgccgccgccg

SEQ ID NO: 163373 - RNA, 23 nt, Human
ccgccgccgccgccgccgccgcu

SEQ ID NO: 163374 - RNA, 22 nt, Human
ccgccgccgccgccgccgcugc

SEQ ID NO: 163375 - RNA, 25 nt, Human
ccgccgccgccgccgccgcugcugc

SEQ ID NO: 163376 - RNA, 22 nt, Human
ccgccgccgccgccgcugcugc

SEQ ID NO: 163377 - RNA, 18 nt, Human
ccgccgcugcugcugcuc

SEQ ID NO: 163378 - RNA, 18 nt, Human
ccggcucaugucuccucc

SEQ ID NO: 163379 - RNA, 21 nt, Human
ccgugggaggcuggcugcccg

SEQ ID NO: 163380 - RNA, 24 nt, Human
ccuccgccgccgccgccgccgccg

SEQ ID NO: 163381 - RNA, 21 nt, Human
ccuccgggcuggcgcaggggc

SEQ ID NO: 163382 - RNA, 23 nt, Human
ccugcacauguccgcuccgcgcg

SEQ ID NO: 163383 - RNA, 21 nt, Human
ccuuaucaccccuccccccaa

SEQ ID NO: 163384 - RNA, 21 nt, Human
cgccuccgccgccgccgccgc

SEQ ID NO: 163385 - RNA, 19 nt, Human
cgcggccgggaccgggcgc

SEQ ID NO: 163386 - RNA, 22 nt, Human
cgcugcugcugcucccuccucg

SEQ ID NO: 163387 - RNA, 18 nt, Human
cggcuccuagcccagccu

SEQ ID NO: 163388 - RNA, 18 nt, Human
cgggagggaggcggcggc

SEQ ID NO: 163389 - RNA, 21 nt, Human
cuccgccgccgccgccgccgc

SEQ ID NO: 163390 - RNA, 22 nt, Human
cuccgcgcggccgggaccgggc

SEQ ID NO: 163391 - RNA, 24 nt, Human
cuccucgccggcugcugcugcugc

SEQ ID NO: 163392 - RNA, 22 nt, Human
cugcguggggccaggggucagc

SEQ ID NO: 163393 - RNA, 19 nt, Human
cugcucccuccucgccggc

SEQ ID NO: 163394 - RNA, 18 nt, Human
cugcugcucccuccucgc

SEQ ID NO: 163395 - RNA, 23 nt, Human
cugcugcucccuccucgccggcu

SEQ ID NO: 163396 - RNA, 24 nt, Human
cugcugcucccuccucgccgggac

SEQ ID NO: 163397 - RNA, 19 nt, Human
cugcugcugcucccuccuc

SEQ ID NO: 163398 - RNA, 18 nt, Human
cugugcaggaggcgccug

SEQ ID NO: 163399 - RNA, 23 nt, Human
cugugcaggaggcgccuggccgg

SEQ ID NO: 163400 - RNA, 20 nt, Human
cuuaucaccccuccccccaa

SEQ ID NO: 163401 - RNA, 20 nt, Human
gaccugaggggccgcggcgg

SEQ ID NO: 163402 - RNA, 18 nt, Human
gccgggaccgggcgccuc

SEQ ID NO: 163403 - RNA, 18 nt, Human
gcggccgggaccgggcgc

SEQ ID NO: 163404 - RNA, 18 nt, Human
gcggggcggcagccgcug

SEQ ID NO: 163405 - RNA, 20 nt, Human
gcugcguggggccagggguc

SEQ ID NO: 163406 - RNA, 21 nt, Human
ggccagggcgaccugagggcc

SEQ ID NO: 163407 - RNA, 19 nt, Human
gggcgcccgccggcucaug

SEQ ID NO: 163408 - RNA, 21 nt, Human
gggcugcggggcggcagccgc

SEQ ID NO: 163409 - RNA, 21 nt, Human
guuuuuuuuuuuuuuuccuuu

SEQ ID NO: 163410 - RNA, 24 nt, Human
uacaaaaauagagcuucuuccuua

SEQ ID NO: 163411 - RNA, 18 nt, Human
uagcccagccugcacaug

SEQ ID NO: 163412 - RNA, 20 nt, Human
uaucaccccuccccccaaga

SEQ ID NO: 163413 - RNA, 20 nt, Human
ucaccccuccccccaagagu

SEQ ID NO: 163414 - RNA, 24 nt, Human
ucagcgccccgcgcggcuccuccc

SEQ ID NO: 163415 - RNA, 24 nt, Human
ucaugucuccuccuccgcgucucu

SEQ ID NO: 163416 - RNA, 25 nt, Human
ucaugucuccuccuccgcgucucuc

SEQ ID NO: 163417 - RNA, 19 nt, Human
uccgccgccgccgccgccg

SEQ ID NO: 163418 - RNA, 18 nt, Human
uccggcccgggcgcggag

SEQ ID NO: 163419 - RNA, 26 nt, Human
uccuagcccagccugcacauguccgc

SEQ ID NO: 163420 - RNA, 22 nt, Human
uccuccgcgucucuccggccgu

SEQ ID NO: 163421 - RNA, 20 nt, Human
ugcggggcggcagccgcugu

SEQ ID NO: 163422 - RNA, 24 nt, Human
ugcugcugcugcagacucugcugc

SEQ ID NO: 163423 - RNA, 21 nt, Human
uggcgcaggggcugcggggcg

SEQ ID NO: 163424 - RNA, 22 nt, Human
uuucugggagugugaguguggc

SEQ ID NO: 163425 - RNA, 22 nt, Human
uuucugggagugugaguguggc

SEQ ID NO: 163426 - RNA, 21 nt, Human
uuuguuuuuuuuuuuuuuucc

SEQ ID NO: 163427 - RNA, 24 nt, Human
uuuguuuuuuuuuuuuuuuccuuu

SEQ ID NO: 163428 - RNA, 24 nt, Human
uuuguuuuuuuuuuuuuuuccuuu

SEQ ID NO: 163429 - RNA, 27 nt, Human
uuuuuuuuuguuuuuuuuuuuuuuucc

SEQ ID NO: 163430 - RNA, 22 nt, Human
uuuuuuuuuuuuuuuuguuuuu

SEQ ID NO: 163431 - RNA, 22 nt, Human
uuuuuuuuuuuuuuuuguuuuu

SEQ ID NO: 163432 - RNA, 25 nt, Human
aaaaaagaagaaacgagggagaaag

SEQ ID NO: 163433 - RNA, 19 nt, Human
aaaaaauauauucucaacc

SEQ ID NO: 163434 - RNA, 19 nt, Human
aaaaagagcugaccccaaa

SEQ ID NO: 163435 - RNA, 21 nt, Human
aaaaagcagccacaaaaauau

SEQ ID NO: 163436 - RNA, 18 nt, Human
aaaaauaaaaacaaaacc

SEQ ID NO: 163437 - RNA, 20 nt, Human
aaaaauguacagguagauaa

SEQ ID NO: 163438 - RNA, 24 nt, Human
aaaaauuucaauucaucuugaaau

SEQ ID NO: 163439 - RNA, 21 nt, Human
aaaagcuucuugaauuuacag

SEQ ID NO: 163440 - RNA, 24 nt, Human
aaaauagaaauaacaaauauaaac

SEQ ID NO: 163441 - RNA, 21 nt, Human
aaacaagaaaaauagaggcaa

SEQ ID NO: 163442 - RNA, 21 nt, Human
aaacagcauagaucaugagcu

SEQ ID NO: 163443 - RNA, 18 nt, Human
aaacaugcaauguacuuu

SEQ ID NO: 163444 - RNA, 24 nt, Human
aaagugcagggaauauaggcauga

SEQ ID NO: 163445 - RNA, 25 nt, Human
aaauaacaaauauaaacuccauuuc

SEQ ID NO: 163446 - RNA, 25 nt, Human
aacagaauaaagcacacuaucuuga

SEQ ID NO: 163447 - RNA, 20 nt, Human
aacccuaguuaacugggaaa

SEQ ID NO: 163448 - RNA, 21 nt, Human
aaccuuauaaaaugugaaaac

SEQ ID NO: 163449 - RNA, 22 nt, Human
aacgagggagaaaggauggaag

SEQ ID NO: 163450 - RNA, 22 nt, Human
aacucaacauaaaacaaaagau

SEQ ID NO: 163451 - RNA, 23 nt, Human
aagaaacaaaggaacugcagcca

SEQ ID NO: 163452 - RNA, 21 nt, Human
aagcaaaugcgugaaaaagau

SEQ ID NO: 163453 - RNA, 24 nt, Human
aagcgauccuccugcuuuggccuc

SEQ ID NO: 163454 - RNA, 27 nt, Human
aauauaaaagggagaauauacauuuua

SEQ ID NO: 163455 - RNA, 19 nt, Human
acagccuaauucucucaca

SEQ ID NO: 163456 - RNA, 19 nt, Human
accccaaaaauguacaggu

SEQ ID NO: 163457 - RNA, 18 nt, Human
acccccgacacccaccag

SEQ ID NO: 163458 - RNA, 19 nt, Human
acccccgacacccaccagc

SEQ ID NO: 163459 - RNA, 20 nt, Human
acccugaaagcagcuagaaa

SEQ ID NO: 163460 - RNA, 23 nt, Human
accucagccucccaaguaucuga

SEQ ID NO: 163461 - RNA, 20 nt, Human
acgggguuucaccagguugg

SEQ ID NO: 163462 - RNA, 21 nt, Human
acgggguuucaccagguuggu

SEQ ID NO: 163463 - RNA, 22 nt, Human
acuagagucagaggaaacacca

SEQ ID NO: 163464 - RNA, 25 nt, Human
acucuguugccuaggcuggacugca

SEQ ID NO: 163465 - RNA, 23 nt, Human
acugcaguggcacgauuauggcu

SEQ ID NO: 163466 - RNA, 19 nt, Human
acugguauaaaaucagaau

SEQ ID NO: 163467 - RNA, 26 nt, Human
acuuauauuuccugaagagaaaaggu

SEQ ID NO: 163468 - RNA, 19 nt, Human
acuuauuugcccauucaau

SEQ ID NO: 163469 - RNA, 22 nt, Human
acuuucuugcuuuauagcuaag

SEQ ID NO: 163470 - RNA, 23 nt, Human
agaaaaacacauuuccaagccaa

SEQ ID NO: 163471 - RNA, 18 nt, Human
agaaacagcauagaucau

SEQ ID NO: 163472 - RNA, 24 nt, Human
agaauguaucacguuaaccaaaca

SEQ ID NO: 163473 - RNA, 18 nt, Human
agacugguauaaaaucag

SEQ ID NO: 163474 - RNA, 21 nt, Human
agagacugguauaaaaucaga

SEQ ID NO: 163475 - RNA, 21 nt, Human
agcaagaaguuaaaaagagcu

SEQ ID NO: 163476 - RNA, 21 nt, Human
agcagucugcagguuugcaag

SEQ ID NO: 163477 - RNA, 21 nt, Human
agcugagccuuaucagagauc

SEQ ID NO: 163478 - RNA, 23 nt, Human
aggcagcuuuuuaaagggcuucu

SEQ ID NO: 163479 - RNA, 20 nt, Human
aggcagugcugauuuucagu

SEQ ID NO: 163480 - RNA, 20 nt, Human
aggcaugagccacugcaccc

SEQ ID NO: 163481 - RNA, 24 nt, Human
agggaauauaggcaugagccacug

SEQ ID NO: 163482 - RNA, 20 nt, Human
agucugaacauuucagaaau

SEQ ID NO: 163483 - RNA, 24 nt, Human
agugauuauauaauucuucacuuu

SEQ ID NO: 163484 - RNA, 25 nt, Human
auaaagcaaaugcgugaaaaagauc

SEQ ID NO: 163485 - RNA, 20 nt, Human
auauaaaagaugauuuugua

SEQ ID NO: 163486 - RNA, 24 nt, Human
aucaacccucccaccucagccucc

SEQ ID NO: 163487 - RNA, 23 nt, Human
auccugccacacaaauuugcauu

SEQ ID NO: 163488 - RNA, 19 nt, Human
aucuccacccccgacaccc

SEQ ID NO: 163489 - RNA, 18 nt, Human
augauacaguuucuaaaa

SEQ ID NO: 163490 - RNA, 19 nt, Human
auggcaauaaaaauccugc

SEQ ID NO: 163491 - RNA, 20 nt, Human
auguaauugaaaaauggcag

SEQ ID NO: 163492 - RNA, 23 nt, Human
auuuuuuguguuuuuuuguagag

SEQ ID NO: 163493 - RNA, 25 nt, Human
caaaaaaagaagaaacgagggagaa

SEQ ID NO: 163494 - RNA, 24 nt, Human
caaagugcagggaauauaggcaug

SEQ ID NO: 163495 - RNA, 18 nt, Human
caaauuucuaaaauauac

SEQ ID NO: 163496 - RNA, 18 nt, Human
caaccgcgggcagccguc

SEQ ID NO: 163497 - RNA, 26 nt, Human
caacucccaucaccagcagaguugcu

SEQ ID NO: 163498 - RNA, 23 nt, Human
caagaaacaaaggaacugcagcc

SEQ ID NO: 163499 - RNA, 22 nt, Human
caagcgauccuccugcuuuggc

SEQ ID NO: 163500 - RNA, 27 nt, Human
caagcgauccuccugcuuuggccuccc

SEQ ID NO: 163501 - RNA, 20 nt, Human
cacaacaacucaccuaccca

SEQ ID NO: 163502 - RNA, 20 nt, Human
cacagcacaugggaauugag

SEQ ID NO: 163503 - RNA, 23 nt, Human
cacccaccagccucccgcgcccc

SEQ ID NO: 163504 - RNA, 21 nt, Human
cacccccgacacccaccagcc

SEQ ID NO: 163505 - RNA, 22 nt, Human
cacccccgacacccaccagccu

SEQ ID NO: 163506 - RNA, 21 nt, Human
cacucuguugccuaggcugga

SEQ ID NO: 163507 - RNA, 22 nt, Human
cacugcaaccuugaccucucag

SEQ ID NO: 163508 - RNA, 21 nt, Human
cagaaauuaccucagagcuga

SEQ ID NO: 163509 - RNA, 19 nt, Human
cagaggaaacaccaggaaa

SEQ ID NO: 163510 - RNA, 20 nt, Human
cagcaaaaauaaaaacaaaa

SEQ ID NO: 163511 - RNA, 18 nt, Human
cagcacacaaauccugga

SEQ ID NO: 163512 - RNA, 21 nt, Human
cagccguccgcuaaucuggca

SEQ ID NO: 163513 - RNA, 21 nt, Human
cagccuaauucucucacacua

SEQ ID NO: 163514 - RNA, 21 nt, Human
cagccucaagugaucaacccu

SEQ ID NO: 163515 - RNA, 22 nt, Human
cagcuagaaaugaaaacugaca

SEQ ID NO: 163516 - RNA, 20 nt, Human
cagcucccccaaaaaaagag

SEQ ID NO: 163517 - RNA, 24 nt, Human
cagcuuuuuaaagggcuucuccua

SEQ ID NO: 163518 - RNA, 21 nt, Human
cauauagaaaauagaaugcaa

SEQ ID NO: 163519 - RNA, 22 nt, Human
caucacaaaauuagagaaagcc

SEQ ID NO: 163520 - RNA, 24 nt, Human
ccaaagugcagggaauauaggcau

SEQ ID NO: 163521 - RNA, 22 nt, Human
ccacaaggcaaagaauuuguau

SEQ ID NO: 163522 - RNA, 18 nt, Human
ccacugcacccggccuag

SEQ ID NO: 163523 - RNA, 19 nt, Human
ccacugcacccggccuaga

SEQ ID NO: 163524 - RNA, 20 nt, Human
ccacugcacccggccuagau

SEQ ID NO: 163525 - RNA, 24 nt, Human
ccagcucccccaaaaaaagaagaa

SEQ ID NO: 163526 - RNA, 18 nt, Human
ccccaaaaaaagaagaaa

SEQ ID NO: 163527 - RNA, 19 nt, Human
cccccaaaaaaagaagaaa

SEQ ID NO: 163528 - RNA, 23 nt, Human
cccccaguucuccucccuccugc

SEQ ID NO: 163529 - RNA, 20 nt, Human
cccccgacacccaccagccu

SEQ ID NO: 163530 - RNA, 28 nt, Human
cccccgacacccaccagccucccgcgcc

SEQ ID NO: 163531 - RNA, 21 nt, Human
ccccuggugcgcggcgagccc

SEQ ID NO: 163532 - RNA, 22 nt, Human
cccguugcaaccgcgggcagcc

SEQ ID NO: 163533 - RNA, 20 nt, Human
cccucccaccucagccuccc

SEQ ID NO: 163534 - RNA, 23 nt, Human
ccgccucccaagcugcagcgccc

SEQ ID NO: 163535 - RNA, 20 nt, Human
ccgccuggggagagccgccu

SEQ ID NO: 163536 - RNA, 20 nt, Human
ccgggccgcggcgucacauc

SEQ ID NO: 163537 - RNA, 19 nt, Human
ccuauguucuucaaaccua

SEQ ID NO: 163538 - RNA, 23 nt, Human
ccucccaccucagccucccaagu

SEQ ID NO: 163539 - RNA, 23 nt, Human
ccugcgcgccgcccccuacucgc

SEQ ID NO: 163540 - RNA, 20 nt, Human
ccugggcucaagcgauccuc

SEQ ID NO: 163541 - RNA, 23 nt, Human
ccugggcucaagcgauccuccug

SEQ ID NO: 163542 - RNA, 21 nt, Human
ccuuuugggaaaaagagcagc

SEQ ID NO: 163543 - RNA, 21 nt, Human
cgaauaaagcaaaugcgugaa

SEQ ID NO: 163544 - RNA, 21 nt, Human
cgccgggccgcggcgucacau

SEQ ID NO: 163545 - RNA, 21 nt, Human
cgccuaaagccauauucauuc

SEQ ID NO: 163546 - RNA, 21 nt, Human
cguccugaguauucggcaaca

SEQ ID NO: 163547 - RNA, 26 nt, Human
cguugcaaccgcgggcagccguccgc

SEQ ID NO: 163548 - RNA, 19 nt, Human
cuaaauaggauccccauaa

SEQ ID NO: 163549 - RNA, 21 nt, Human
cucacacuauccacuggugcc

SEQ ID NO: 163550 - RNA, 21 nt, Human
cucccaaguaucugagaccac

SEQ ID NO: 163551 - RNA, 23 nt, Human
cuccugggcucaagcgauccucc

SEQ ID NO: 163552 - RNA, 19 nt, Human
cucuuuuuuugagacaaag

SEQ ID NO: 163553 - RNA, 18 nt, Human
cugacaguagaggucuga

SEQ ID NO: 163554 - RNA, 22 nt, Human
gaaaaagcagccacaaaaauau

SEQ ID NO: 163555 - RNA, 18 nt, Human
gaaaacacaaacuaauca

SEQ ID NO: 163556 - RNA, 22 nt, Human
gaauauaggcaugagccacugc

SEQ ID NO: 163557 - RNA, 23 nt, Human
gaauauaggcaugagccacugca

SEQ ID NO: 163558 - RNA, 22 nt, Human
gaauugauuaaauucacauuua

SEQ ID NO: 163559 - RNA, 20 nt, Human
gagacgggguuucaccaggu

SEQ ID NO: 163560 - RNA, 24 nt, Human
gagacgggguuucaccagguuggu

SEQ ID NO: 163561 - RNA, 20 nt, Human
gcaaccuugaccucucagcc

SEQ ID NO: 163562 - RNA, 22 nt, Human
gcagccuuacccaaucuauauu

SEQ ID NO: 163563 - RNA, 20 nt, Human
gccuaggcuggacugcagug

SEQ ID NO: 163564 - RNA, 21 nt, Human
gcucacugcaaccuugaccuc

SEQ ID NO: 163565 - RNA, 23 nt, Human
ggaaaaaacaagagcauauccag

SEQ ID NO: 163566 - RNA, 22 nt, Human
ggaauauaggcaugagccacug

SEQ ID NO: 163567 - RNA, 24 nt, Human
ggcaacagcacacaaauccuggag

SEQ ID NO: 163568 - RNA, 18 nt, Human
ggcagugcugauuuucag

SEQ ID NO: 163569 - RNA, 21 nt, Human
ggcuuaaaaauguugaggaaa

SEQ ID NO: 163570 - RNA, 21 nt, Human
gggaauauaggcaugagccac

SEQ ID NO: 163571 - RNA, 19 nt, Human
gggcucaagcgauccuccu

SEQ ID NO: 163572 - RNA, 23 nt, Human
guagagacgggguuucaccaggu

SEQ ID NO: 163573 - RNA, 27 nt, Human
uaaaaaauauauucucaaccacuuuga

SEQ ID NO: 163574 - RNA, 20 nt, Human
uaaaaagagcugaccccaaa

SEQ ID NO: 163575 - RNA, 22 nt, Human
uaaaaagagcugaccccaaaaa

SEQ ID NO: 163576 - RNA, 25 nt, Human
uaaaaagagcugaccccaaaaaugu

SEQ ID NO: 163577 - RNA, 21 nt, Human
uaaaaauccugccacacaaau

SEQ ID NO: 163578 - RNA, 23 nt, Human
uaaaacagcaaauguuauuucag

SEQ ID NO: 163579 - RNA, 25 nt, Human
uaaagcaaaugcgugaaaaagauca

SEQ ID NO: 163580 - RNA, 20 nt, Human
uaaagcacacuaucuugauu

SEQ ID NO: 163581 - RNA, 21 nt, Human
uaaagcacacuaucuugauua

SEQ ID NO: 163582 - RNA, 25 nt, Human
uaagaagaaaaaaacugccguuggc

SEQ ID NO: 163583 - RNA, 21 nt, Human
uaccucagagcugauauaauu

SEQ ID NO: 163584 - RNA, 23 nt, Human
uaccuuuugggaaaaagagcagc

SEQ ID NO: 163585 - RNA, 23 nt, Human
uacuccagaauccuucuuaaagu

SEQ ID NO: 163586 - RNA, 19 nt, Human
uagaaaaagcagccacaaa

SEQ ID NO: 163587 - RNA, 23 nt, Human
uagaaaaagcagccacaaaaaua

SEQ ID NO: 163588 - RNA, 23 nt, Human
uagaaauaacaaauauaaacucc

SEQ ID NO: 163589 - RNA, 19 nt, Human
uagcagcauaauuucuaau

SEQ ID NO: 163590 - RNA, 18 nt, Human
uagcagcaucuguaagau

SEQ ID NO: 163591 - RNA, 20 nt, Human
uaguagaaauaauaucauua

SEQ ID NO: 163592 - RNA, 20 nt, Human
uaguggugugaaugcugaaa

SEQ ID NO: 163593 - RNA, 23 nt, Human
uauucauucaccauaaauuuuug

SEQ ID NO: 163594 - RNA, 19 nt, Human
uauugggcaaaaagcaguc

SEQ ID NO: 163595 - RNA, 18 nt, Human
ucacaaaauuagagaaag

SEQ ID NO: 163596 - RNA, 21 nt, Human
ucacaacaacucaccuaccca

SEQ ID NO: 163597 - RNA, 24 nt, Human
ucaccagguuggucuugaacuccu

SEQ ID NO: 163598 - RNA, 25 nt, Human
ucacuacccccauccggugcuucca

SEQ ID NO: 163599 - RNA, 19 nt, Human
ucacugcaaccuugaccuc

SEQ ID NO: 163600 - RNA, 23 nt, Human
ucacugcaaccuugaccucucag

SEQ ID NO: 163601 - RNA, 22 nt, Human
ucagagccugaagaagauauug

SEQ ID NO: 163602 - RNA, 20 nt, Human
ucaucugccgccuaaagcca

SEQ ID NO: 163603 - RNA, 18 nt, Human
uccacaaggcaaagaauu

SEQ ID NO: 163604 - RNA, 19 nt, Human
uccacccccgacacccacc

SEQ ID NO: 163605 - RNA, 20 nt, Human
uccacccccgacacccacca

SEQ ID NO: 163606 - RNA, 26 nt, Human
uccacccccgacacccaccagccucc

SEQ ID NO: 163607 - RNA, 22 nt, Human
uccaugaagaaauuuuguuucu

SEQ ID NO: 163608 - RNA, 24 nt, Human
ucccaaagugcagggaauauaggc

SEQ ID NO: 163609 - RNA, 21 nt, Human
uccugggcucaagcgauccuc

SEQ ID NO: 163610 - RNA, 22 nt, Human
uccugggcucaagcgauccucc

SEQ ID NO: 163611 - RNA, 24 nt, Human
uccugggcucaagcgauccuccug

SEQ ID NO: 163612 - RNA, 22 nt, Human
uccuuaaacuauuggaucaaau

SEQ ID NO: 163613 - RNA, 19 nt, Human
ucuaugguaagacagucua

SEQ ID NO: 163614 - RNA, 23 nt, Human
ucucacucuguugccuaggcugg

SEQ ID NO: 163615 - RNA, 24 nt, Human
ucucacucuguugccuaggcugga

SEQ ID NO: 163616 - RNA, 19 nt, Human
ucucuagccaaucuugguu

SEQ ID NO: 163617 - RNA, 24 nt, Human
ucugaaaaggagaagcuuuggaua

SEQ ID NO: 163618 - RNA, 24 nt, Human
ucuguugccuaggcuggacugcag

SEQ ID NO: 163619 - RNA, 19 nt, Human
ucuugaacuccugggcuca

SEQ ID NO: 163620 - RNA, 23 nt, Human
ucuugaacuccugggcucaagcg

SEQ ID NO: 163621 - RNA, 21 nt, Human
ucuuuuaugcuuucaguuguu

SEQ ID NO: 163622 - RNA, 19 nt, Human
ugaaaauacaacucccauc

SEQ ID NO: 163623 - RNA, 19 nt, Human
ugaaagcagcuagaaauga

SEQ ID NO: 163624 - RNA, 22 nt, Human
ugaaauaaauauaauaaaguca

SEQ ID NO: 163625 - RNA, 25 nt, Human
ugaacuccugggcucaagcgauccu

SEQ ID NO: 163626 - RNA, 21 nt, Human
ugaagaaaaacacauuuccaa

SEQ ID NO: 163627 - RNA, 22 nt, Human
ugaagagacugguauaaaauca

SEQ ID NO: 163628 - RNA, 20 nt, Human
ugaauaaaaauggacauuuu

SEQ ID NO: 163629 - RNA, 23 nt, Human
ugaauugauuuuuuucaugugaa

SEQ ID NO: 163630 - RNA, 21 nt, Human
ugacaaacaagaaaaauagag

SEQ ID NO: 163631 - RNA, 22 nt, Human
ugacaauugugaagcuuuccag

SEQ ID NO: 163632 - RNA, 24 nt, Human
ugaccuggcgaagacugaaaauac

SEQ ID NO: 163633 - RNA, 23 nt, Human
ugagaaauaauccccuaacacaa

SEQ ID NO: 163634 - RNA, 22 nt, Human
ugagacaaagucucacucuguu

SEQ ID NO: 163635 - RNA, 21 nt, Human
ugagaccacauguacacgcca

SEQ ID NO: 163636 - RNA, 24 nt, Human
ugagaccacauguacacgccacca

SEQ ID NO: 163637 - RNA, 23 nt, Human
ugaugaaauuuauauuuucuacu

SEQ ID NO: 163638 - RNA, 22 nt, Human
ugauuagugguacuaagagcua

SEQ ID NO: 163639 - RNA, 23 nt, Human
ugcaguggcacgauuauggcuca

SEQ ID NO: 163640 - RNA, 19 nt, Human
ugccuaggcuggacugcag

SEQ ID NO: 163641 - RNA, 21 nt, Human
ugccuaggcuggacugcagug

SEQ ID NO: 163642 - RNA, 20 nt, Human
ugccugaaaauucauaaaac

SEQ ID NO: 163643 - RNA, 30 nt, Human
ugccugaaaauucauaaaacccugaaagcc

SEQ ID NO: 163644 - RNA, 24 nt, Human
uggacugcaguggcacgauuaugg

SEQ ID NO: 163645 - RNA, 22 nt, Human
uggauggaucucaaugaccugg

SEQ ID NO: 163646 - RNA, 18 nt, Human
uggcacgauuauggcuca

SEQ ID NO: 163647 - RNA, 18 nt, Human
uggcucacugcaaccuug

SEQ ID NO: 163648 - RNA, 24 nt, Human
uggcucacugcaaccuugaccucu

SEQ ID NO: 163649 - RNA, 22 nt, Human
ugggcaaaaagcagucugcagg

SEQ ID NO: 163650 - RNA, 24 nt, Human
ugggcucaagcgauccuccugcuu

SEQ ID NO: 163651 - RNA, 22 nt, Human
uggugccacgugagagcagagc

SEQ ID NO: 163652 - RNA, 23 nt, Human
ugguguguaucuuuuauauuuuu

SEQ ID NO: 163653 - RNA, 24 nt, Human
uguaauugaaaaauggcagaugaa

SEQ ID NO: 163654 - RNA, 20 nt, Human
uguacagguagauaagccuc

SEQ ID NO: 163655 - RNA, 22 nt, Human
uguaucaugacaaaucaaugua

SEQ ID NO: 163656 - RNA, 20 nt, Human
ugucacaacaacucaccuac

SEQ ID NO: 163657 - RNA, 23 nt, Human
ugucacaacaacucaccuaccca

SEQ ID NO: 163658 - RNA, 21 nt, Human
ugugaaaucuacauaugugug

SEQ ID NO: 163659 - RNA, 20 nt, Human
ugugaagcuuuccagcaaag

SEQ ID NO: 163660 - RNA, 18 nt, Human
uuaaacugaucaaaacua

SEQ ID NO: 163661 - RNA, 21 nt, Human
uuacugggacaaugguuacau

SEQ ID NO: 163662 - RNA, 22 nt, Human
uuagagaaagcccaguuagagg

SEQ ID NO: 163663 - RNA, 22 nt, Human
uuagcagcauaauuucuaauau

SEQ ID NO: 163664 - RNA, 18 nt, Human
uuaggguaauguuuugag

SEQ ID NO: 163665 - RNA, 22 nt, Human
uucaaaagcuucuugaauuuac

SEQ ID NO: 163666 - RNA, 24 nt, Human
uucagcauuucaaaagcuucuuga

SEQ ID NO: 163667 - RNA, 20 nt, Human
uucaucuugaaauccuuggg

SEQ ID NO: 163668 - RNA, 18 nt, Human
uuccugaagagaaaaggu

SEQ ID NO: 163669 - RNA, 19 nt, Human
uugaaaaauggcagaugaa

SEQ ID NO: 163670 - RNA, 24 nt, Human
uugaccuuuugcuuaguuuaugcu

SEQ ID NO: 163671 - RNA, 19 nt, Human
uugcuaggcugcugcugua

SEQ ID NO: 163672 - RNA, 29 nt, Human
uuggggaagaaauauccaucuugaggaaa

SEQ ID NO: 163673 - RNA, 21 nt, Human
uuguaagggaagucagcaugu

SEQ ID NO: 163674 - RNA, 23 nt, Human
uuguagagacgggguuucaccag

SEQ ID NO: 163675 - RNA, 24 nt, Human
uuuaaaaaaaaaaaaagugcuugu

SEQ ID NO: 163676 - RNA, 21 nt, Human
uuucaccagguuggucuugaa

SEQ ID NO: 163677 - RNA, 23 nt, Human
uuucugugacuuccucuucuuug

SEQ ID NO: 163678 - RNA, 23 nt, Human
uuucuuuacugggacaaugguua

SEQ ID NO: 163679 - RNA, 24 nt, Human
uuugcaaggcuuccucucuccugc

SEQ ID NO: 163680 - RNA, 22 nt, Human
uuugggaaaaagagcagcaaga

SEQ ID NO: 163681 - RNA, 18 nt, Human
uuuguagagacgggguuu

SEQ ID NO: 163682 - RNA, 23 nt, Human
uuuguagagacgggguuucacca

SEQ ID NO: 163683 - RNA, 18 nt, Human
uuuugcagccuuacccaa

SEQ ID NO: 163684 - RNA, 24 nt, Human
uuuuuguguuuuuuuguagagacg

SEQ ID NO: 163685 - RNA, 24 nt, Human
uuuuuuguagagacgggguuucac

SEQ ID NO: 163686 - RNA, 23 nt, Human
uuuuuuuguagagacgggguuuc

SEQ ID NO: 163687 - RNA, 18 nt, Human
aaggcccgguuacuccuc

SEQ ID NO: 163688 - RNA, 20 nt, Human
agauccggaacacaaaagac

SEQ ID NO: 163689 - RNA, 21 nt, Human
caaaacgagcgcaaaaaguua

SEQ ID NO: 163690 - RNA, 21 nt, Human
cccccaguaaagaguguugug

SEQ ID NO: 163691 - RNA, 21 nt, Human
cggaacacaaaagaccccccc

SEQ ID NO: 163692 - RNA, 22 nt, Human
gggauggagguggauagagaaa

SEQ ID NO: 163693 - RNA, 20 nt, Human
ggugggauggagguggauag

SEQ ID NO: 163694 - RNA, 20 nt, Human
uagcaaaacgagcgcaaaaa

SEQ ID NO: 163695 - RNA, 26 nt, Human
uaugaugggaacuaugacaagaaaga

SEQ ID NO: 163696 - RNA, 18 nt, Human
ugggauggagguggauag

SEQ ID NO: 163697 - RNA, 21 nt, Human
ugggauggagguggauagaga

SEQ ID NO: 163698 - RNA, 20 nt, Human
ugguaaggacuaauccaaug

SEQ ID NO: 163699 - RNA, 28 nt, Human
aaaaggacacgauuuuucaguccacaga

SEQ ID NO: 163700 - RNA, 21 nt, Human
aaaccagagauggggccaaaa

SEQ ID NO: 163701 - RNA, 18 nt, Human
aaagagagggaggaaaau

SEQ ID NO: 163702 - RNA, 27 nt, Human
aacaggaaaugaaaacagaagggaccc

SEQ ID NO: 163703 - RNA, 19 nt, Human
aacauuucucucauaacca

SEQ ID NO: 163704 - RNA, 22 nt, Human
aacccagagcagucccagucuc

SEQ ID NO: 163705 - RNA, 20 nt, Human
aaccccaugacuugggccuc

SEQ ID NO: 163706 - RNA, 24 nt, Human
aagugauaaagaggagaggcacaa

SEQ ID NO: 163707 - RNA, 23 nt, Human
acaaagaggauaagcuaacagaa

SEQ ID NO: 163708 - RNA, 23 nt, Human
acagacaagagccugaccaugug

SEQ ID NO: 163709 - RNA, 25 nt, Human
acaggaaaugaaaacagaaauauua

SEQ ID NO: 163710 - RNA, 19 nt, Human
accccaugacuugggccuc

SEQ ID NO: 163711 - RNA, 18 nt, Human
acuccugucgggacucuc

SEQ ID NO: 163712 - RNA, 19 nt, Human
agaaaaccuaacccagagc

SEQ ID NO: 163713 - RNA, 24 nt, Human
agaaaaccuaacccagagcagucc

SEQ ID NO: 163714 - RNA, 18 nt, Human
agacuggauucccuccuu

SEQ ID NO: 163715 - RNA, 21 nt, Human
agagaccccuucucucuaccu

SEQ ID NO: 163716 - RNA, 23 nt, Human
agagaccccuucucucuaccuuc

SEQ ID NO: 163717 - RNA, 22 nt, Human
agagggagacagcgagacagaa

SEQ ID NO: 163718 - RNA, 21 nt, Human
augaacugcuugggaacagag

SEQ ID NO: 163719 - RNA, 20 nt, Human
caacaggaaaugaaaacaga

SEQ ID NO: 163720 - RNA, 21 nt, Human
caaguuuucaccagccuacca

SEQ ID NO: 163721 - RNA, 23 nt, Human
cacagaaaaccuaacccagagca

SEQ ID NO: 163722 - RNA, 22 nt, Human
caccaagaauuuccaaggggau

SEQ ID NO: 163723 - RNA, 22 nt, Human
cagaguggggccauucugggcc

SEQ ID NO: 163724 - RNA, 21 nt, Human
cagucucucaaagcccccuuc

SEQ ID NO: 163725 - RNA, 19 nt, Human
cagugagaaaaaaaaaagu

SEQ ID NO: 163726 - RNA, 21 nt, Human
ccacagaaaaccuaacccaga

SEQ ID NO: 163727 - RNA, 24 nt, Human
ccacagaaaaccuaacccagagcu

SEQ ID NO: 163728 - RNA, 22 nt, Human
ccauucugggcccucuggcugu

SEQ ID NO: 163729 - RNA, 23 nt, Human
cccagagaagcagcaaauuccau

SEQ ID NO: 163730 - RNA, 24 nt, Human
cccaggccuuacuggccuuuuccu

SEQ ID NO: 163731 - RNA, 18 nt, Human
ccccugucaccuuuccca

SEQ ID NO: 163732 - RNA, 21 nt, Human
cccugucaccuuucccauccu

SEQ ID NO: 163733 - RNA, 24 nt, Human
ccgcaguaaugggguaaggcuuca

SEQ ID NO: 163734 - RNA, 19 nt, Human
ccuaacccagagcaguccc

SEQ ID NO: 163735 - RNA, 18 nt, Human
ccuaccaccagucuuuug

SEQ ID NO: 163736 - RNA, 21 nt, Human
ccuuacuggccuuuuccuucu

SEQ ID NO: 163737 - RNA, 18 nt, Human
cguuugcugagggauggg

SEQ ID NO: 163738 - RNA, 19 nt, Human
cucaaccuggaaguagagc

SEQ ID NO: 163739 - RNA, 20 nt, Human
cucaaggaagaacgaaggcu

SEQ ID NO: 163740 - RNA, 21 nt, Human
cugcacagagggagacagcga

SEQ ID NO: 163741 - RNA, 22 nt, Human
gaagagccacugcugcugcaga

SEQ ID NO: 163742 - RNA, 19 nt, Human
gcaguggagaagcuucugg

SEQ ID NO: 163743 - RNA, 18 nt, Human
ggaagaacgaaggcuuga

SEQ ID NO: 163744 - RNA, 26 nt, Human
gggaacagaguggggccgggaucccu

SEQ ID NO: 163745 - RNA, 18 nt, Human
gggcaucuaacauaaaug

SEQ ID NO: 163746 - RNA, 20 nt, Human
ggugcugagauugaaaccug

SEQ ID NO: 163747 - RNA, 23 nt, Human
gucaaguuuucaccagccuacca

SEQ ID NO: 163748 - RNA, 22 nt, Human
gucaccuuucccauccucggaa

SEQ ID NO: 163749 - RNA, 22 nt, Human
guccacagaaaaccuaacccag

SEQ ID NO: 163750 - RNA, 23 nt, Human
guggggccauucugggcccucug

SEQ ID NO: 163751 - RNA, 18 nt, Human
guucagaauggauuccua

SEQ ID NO: 163752 - RNA, 18 nt, Human
uaaaagcuauuuauuccu

SEQ ID NO: 163753 - RNA, 22 nt, Human
uaaccaaaaagaauagaucaaa

SEQ ID NO: 163754 - RNA, 24 nt, Human
uaagcuaacagaagcugagauaaa

SEQ ID NO: 163755 - RNA, 25 nt, Human
uagaaggauaggcaaacuuccaaau

SEQ ID NO: 163756 - RNA, 23 nt, Human
uagagaaaaggacacgauuuuuc

SEQ ID NO: 163757 - RNA, 25 nt, Human
uagaucaauuaaaaucauugagucu

SEQ ID NO: 163758 - RNA, 22 nt, Human
uaggagaguuuuaacuaaucga

SEQ ID NO: 163759 - RNA, 18 nt, Human
uauaagguuaguauguga

SEQ ID NO: 163760 - RNA, 19 nt, Human
uauggagugaggaaggcgg

SEQ ID NO: 163761 - RNA, 21 nt, Human
uauggagugaggaaggcggug

SEQ ID NO: 163762 - RNA, 23 nt, Human
ucaguccacagaaaaccuaaccc

SEQ ID NO: 163763 - RNA, 19 nt, Human
uccacagaaaaccuaaccc

SEQ ID NO: 163764 - RNA, 22 nt, Human
uccacagaaaaccuaacccaga

SEQ ID NO: 163765 - RNA, 22 nt, Human
uccauacaugccccugucaccu

SEQ ID NO: 163766 - RNA, 21 nt, Human
ucccauaauccuuuuuauucu

SEQ ID NO: 163767 - RNA, 27 nt, Human
ucccuugcaaguagcuggugugaggau

SEQ ID NO: 163768 - RNA, 19 nt, Human
ucuaguuuaccuguugggg

SEQ ID NO: 163769 - RNA, 21 nt, Human
ucucuggauuucccuaauguu

SEQ ID NO: 163770 - RNA, 23 nt, Human
ucuggauuucccuaauguucccc

SEQ ID NO: 163771 - RNA, 25 nt, Human
ugaaaagcaaauucuagcagggcag

SEQ ID NO: 163772 - RNA, 23 nt, Human
ugaaaccugacacuccugucggu

SEQ ID NO: 163773 - RNA, 18 nt, Human
ugacugggaagaagcugu

SEQ ID NO: 163774 - RNA, 22 nt, Human
ugaggaaggcggugaaacccca

SEQ ID NO: 163775 - RNA, 19 nt, Human
ugcugcagagcccuagaga

SEQ ID NO: 163776 - RNA, 20 nt, Human
uggaagggaccccagagaag

SEQ ID NO: 163777 - RNA, 24 nt, Human
uggggccauucugggcccucuggc

SEQ ID NO: 163778 - RNA, 22 nt, Human
uguggaagggaccccagagaag

SEQ ID NO: 163779 - RNA, 21 nt, Human
uuacuggccuuuuccuucucc

SEQ ID NO: 163780 - RNA, 20 nt, Human
uuaguaugugauggcaguga

SEQ ID NO: 163781 - RNA, 24 nt, Human
uuccaaggggauugagacccagau

SEQ ID NO: 163782 - RNA, 27 nt, Human
uucugggaucuccgauuuccucuuccc

SEQ ID NO: 163783 - RNA, 20 nt, Human
uuuccaccaaaauccuuuug

SEQ ID NO: 163784 - RNA, 25 nt, Human
uuugggaucuuucacugaggagccu

SEQ ID NO: 163785 - RNA, 26 nt, Human
uuuuuuuuuuuuuuuuuuaugcuuaa

SEQ ID NO: 163786 - RNA, 30 nt, Human
aaaaaacacacccgcagaacuauaaauaaa

SEQ ID NO: 163787 - RNA, 24 nt, Human
agaaagugcaccaaggugacccuc

SEQ ID NO: 163788 - RNA, 26 nt, Human
agcuggggggcagagcugcgccugug

SEQ ID NO: 163789 - RNA, 19 nt, Human
aggcaaggguccucuggag

SEQ ID NO: 163790 - RNA, 21 nt, Human
aggcaaggguccucuggaggg

SEQ ID NO: 163791 - RNA, 23 nt, Human
aggcggucagugcgcccgggaag

SEQ ID NO: 163792 - RNA, 24 nt, Human
aggcggucagugcgcccgggaagc

SEQ ID NO: 163793 - RNA, 22 nt, Human
aggugcgggaggcaagcgacgg

SEQ ID NO: 163794 - RNA, 22 nt, Human
auccgaagaaagugcaccaagg

SEQ ID NO: 163795 - RNA, 21 nt, Human
cauggagcggcgagccgggcg

SEQ ID NO: 163796 - RNA, 23 nt, Human
ccaggcccgcccgaggccgaggc

SEQ ID NO: 163797 - RNA, 22 nt, Human
cccagaaaauuaaaaaacacac

SEQ ID NO: 163798 - RNA, 24 nt, Human
ccccagaaaauuaaaaaacacacc

SEQ ID NO: 163799 - RNA, 18 nt, Human
cccccgggcgccgggcuc

SEQ ID NO: 163800 - RNA, 20 nt, Human
cccccgggcgccgggcucua

SEQ ID NO: 163801 - RNA, 21 nt, Human
cccccgggcgccgggcucuac

SEQ ID NO: 163802 - RNA, 22 nt, Human
ccccgggcgccgggcucuaccc

SEQ ID NO: 163803 - RNA, 21 nt, Human
cccugagcgccaggcccgccc

SEQ ID NO: 163804 - RNA, 19 nt, Human
ccgaagaaagugcaccaag

SEQ ID NO: 163805 - RNA, 19 nt, Human
ccgaagaaagugcaccaag

SEQ ID NO: 163806 - RNA, 22 nt, Human
ccucgcacugcccucccagggg

SEQ ID NO: 163807 - RNA, 20 nt, Human
cgcccgaggccgaggccgcc

SEQ ID NO: 163808 - RNA, 21 nt, Human
cggcccgagggcgugcgucgg

SEQ ID NO: 163809 - RNA, 19 nt, Human
cggcugcauggagcggcga

SEQ ID NO: 163810 - RNA, 18 nt, Human
cugcgccuguggcguccc

SEQ ID NO: 163811 - RNA, 18 nt, Human
gaggcaagcgacggggcc

SEQ ID NO: 163812 - RNA, 21 nt, Human
gaggcaaggguccucuggagg

SEQ ID NO: 163813 - RNA, 19 nt, Human
gcaaggguccucuggaggg

SEQ ID NO: 163814 - RNA, 25 nt, Human
gcaccagaaaagucagaguugguuu

SEQ ID NO: 163815 - RNA, 18 nt, Human
ggaaagcgcgcggcugga

SEQ ID NO: 163816 - RNA, 18 nt, Human
ggaagcuggggggcagag

SEQ ID NO: 163817 - RNA, 22 nt, Human
ggccgaccucgggcgggagugc

SEQ ID NO: 163818 - RNA, 18 nt, Human
gggaagcuggggggcaga

SEQ ID NO: 163819 - RNA, 22 nt, Human
gggcgccgggcucuaccccggc

SEQ ID NO: 163820 - RNA, 23 nt, Human
gggcgggagugcgcaaccgagga

SEQ ID NO: 163821 - RNA, 18 nt, Human
ggggcuucccgaggcuga

SEQ ID NO: 163822 - RNA, 20 nt, Human
gugcgggaggcaagcgacgg

SEQ ID NO: 163823 - RNA, 18 nt, Human
uaaaaaacacacccgcag

SEQ ID NO: 163824 - RNA, 21 nt, Human
uaaaaaacacacccgcagaac

SEQ ID NO: 163825 - RNA, 25 nt, Human
uaaaaaacacacccgcagaacuaua

SEQ ID NO: 163826 - RNA, 23 nt, Human
uaucuuacaccuacucuugcauu

SEQ ID NO: 163827 - RNA, 21 nt, Human
ucccaggggcuucccgaggcu

SEQ ID NO: 163828 - RNA, 18 nt, Human
ucccugagcgccaggccc

SEQ ID NO: 163829 - RNA, 19 nt, Human
ucccugagcgccaggcccg

SEQ ID NO: 163830 - RNA, 22 nt, Human
ugaggcaaggguccucuggagg

SEQ ID NO: 163831 - RNA, 24 nt, Human
ugcauggagcggcgagccgggcgg

SEQ ID NO: 163832 - RNA, 18 nt, Human
ugguuuuuuguuuugucu

SEQ ID NO: 163833 - RNA, 21 nt, Human
uuaaaaaacacacccgcagaa

SEQ ID NO: 163834 - RNA, 27 nt, Human
uuaaaaaacacacccgcagaacuauaa

SEQ ID NO: 163835 - RNA, 20 nt, Human
uuugucuuuuuuucccccca

SEQ ID NO: 163836 - RNA, 22 nt, Human
aaaaggcuuuaugucuugcuga

SEQ ID NO: 163837 - RNA, 22 nt, Human
aaaaggcuuuaugucuugcuga

SEQ ID NO: 163838 - RNA, 19 nt, Human
aaaauaacagaaauaaaag

SEQ ID NO: 163839 - RNA, 19 nt, Human
aaaauaacagaaauaaaag

SEQ ID NO: 163840 - RNA, 22 nt, Human
aaaccaaacaccacauauucuc

SEQ ID NO: 163841 - RNA, 22 nt, Human
aaaccaaacaccacauauucuc

SEQ ID NO: 163842 - RNA, 22 nt, Human
aaaccaucauucucagcaaacu

SEQ ID NO: 163843 - RNA, 22 nt, Human
aaaccaucauucucagcaaacu

SEQ ID NO: 163844 - RNA, 21 nt, Human
aaagaaccaagaaaauuaaua

SEQ ID NO: 163845 - RNA, 21 nt, Human
aaagaaccaagaaaauuaaua

SEQ ID NO: 163846 - RNA, 19 nt, Human
aaauaaaaacaauaaaaaa

SEQ ID NO: 163847 - RNA, 21 nt, Human
aacaaaugacgugacuucaau

SEQ ID NO: 163848 - RNA, 21 nt, Human
aacaaaugacgugacuucaau

SEQ ID NO: 163849 - RNA, 25 nt, Human
aacaaauucccaaauuaaguuaccu

SEQ ID NO: 163850 - RNA, 25 nt, Human
aacaaauucccaaauuaaguuaccu

SEQ ID NO: 163851 - RNA, 19 nt, Human
aacauggugaaaccccguc

SEQ ID NO: 163852 - RNA, 19 nt, Human
aacauggugaaaccccguc

SEQ ID NO: 163853 - RNA, 20 nt, Human
aacauggugaaaccccgucu

SEQ ID NO: 163854 - RNA, 20 nt, Human
aacauggugaaaccccgucu

SEQ ID NO: 163855 - RNA, 21 nt, Human
aacauggugaaaccccgucuc

SEQ ID NO: 163856 - RNA, 21 nt, Human
aacauggugaaaccccgucuc

SEQ ID NO: 163857 - RNA, 19 nt, Human
aaccaaacaccacauauuc

SEQ ID NO: 163858 - RNA, 19 nt, Human
aaggaccaaaaaccaaaca

SEQ ID NO: 163859 - RNA, 23 nt, Human
aaggaccaaaaaccaaacaccac

SEQ ID NO: 163860 - RNA, 23 nt, Human
aaggaccaaaaaccaaacaccac

SEQ ID NO: 163861 - RNA, 26 nt, Human
aaggaccaaaaaccaaacaccacaua

SEQ ID NO: 163862 - RNA, 18 nt, Human
aauaacagaaauaaaagc

SEQ ID NO: 163863 - RNA, 18 nt, Human
aauaacagaaauaaaagc

SEQ ID NO: 163864 - RNA, 18 nt, Human
acaaauccaagcugagcc

SEQ ID NO: 163865 - RNA, 18 nt, Human
acaaauccaagcugagcc

SEQ ID NO: 163866 - RNA, 23 nt, Human
acagagcaagacucugucucaaa

SEQ ID NO: 163867 - RNA, 24 nt, Human
acagagcaagacucugucucaaaa

SEQ ID NO: 163868 - RNA, 24 nt, Human
acagagcaagacucugucucaaaa

SEQ ID NO: 163869 - RNA, 21 nt, Human
acagugcacaauacuuaacaa

SEQ ID NO: 163870 - RNA, 21 nt, Human
acagugcacaauacuuaacaa

SEQ ID NO: 163871 - RNA, 24 nt, Human
acaucauuguaccuguaaucccag

SEQ ID NO: 163872 - RNA, 24 nt, Human
acaucauuguaccuguaaucccag

SEQ ID NO: 163873 - RNA, 19 nt, Human
acaucuauucacuggaaug

SEQ ID NO: 163874 - RNA, 24 nt, Human
accaacauggugaaaccccgucuc

SEQ ID NO: 163875 - RNA, 24 nt, Human
accaacauggugaaaccccgucuc

SEQ ID NO: 163876 - RNA, 24 nt, Human
accccgucucuacuaaaaauacaa

SEQ ID NO: 163877 - RNA, 24 nt, Human
accccgucucuacuaaaaauacaa

SEQ ID NO: 163878 - RNA, 19 nt, Human
accucuaaauccuuuuccu

SEQ ID NO: 163879 - RNA, 18 nt, Human
accuguaaucccagcacu

SEQ ID NO: 163880 - RNA, 19 nt, Human
accuguaaucccagcacuu

SEQ ID NO: 163881 - RNA, 19 nt, Human
accuguaaucccagcacuu

SEQ ID NO: 163882 - RNA, 20 nt, Human
acuacaucuuauugaaaauu

SEQ ID NO: 163883 - RNA, 20 nt, Human
acuacaucuuauugaaaauu

SEQ ID NO: 163884 - RNA, 23 nt, Human
acugcacuccagccuggugacag

SEQ ID NO: 163885 - RNA, 23 nt, Human
acugcacuccagccuggugacag

SEQ ID NO: 163886 - RNA, 25 nt, Human
acugcacuccagccuggugacagag

SEQ ID NO: 163887 - RNA, 25 nt, Human
acugcacuccagccuggugacagag

SEQ ID NO: 163888 - RNA, 18 nt, Human
acuguaaaaauuaugcca

SEQ ID NO: 163889 - RNA, 18 nt, Human
acuguaaaaauuaugcca

SEQ ID NO: 163890 - RNA, 25 nt, Human
agaaacaauucucugcaacuguaaa

SEQ ID NO: 163891 - RNA, 25 nt, Human
agaaacaauucucugcaacuguaaa

SEQ ID NO: 163892 - RNA, 23 nt, Human
agaaggaagugaagagaggggac

SEQ ID NO: 163893 - RNA, 23 nt, Human
agaaggaagugaagagaggggac

SEQ ID NO: 163894 - RNA, 18 nt, Human
agagcaagacucugucuc

SEQ ID NO: 163895 - RNA, 20 nt, Human
agaugaacauaaccauaacc

SEQ ID NO: 163896 - RNA, 20 nt, Human
agaugaacauaaccauaacc

SEQ ID NO: 163897 - RNA, 19 nt, Human
agcaagaacccucuuagaa

SEQ ID NO: 163898 - RNA, 19 nt, Human
agcaagaacccucuuagaa

SEQ ID NO: 163899 - RNA, 25 nt, Human
agcacuuuggggaggccgagguggg

SEQ ID NO: 163900 - RNA, 25 nt, Human
agcacuuuggggaggccgagguggg

SEQ ID NO: 163901 - RNA, 21 nt, Human
agccuggugacagagcaagac

SEQ ID NO: 163902 - RNA, 21 nt, Human
agccuggugacagagcaagac

SEQ ID NO: 163903 - RNA, 23 nt, Human
agccuggugacagagcaagacuc

SEQ ID NO: 163904 - RNA, 23 nt, Human
agccuggugacagagcaagacuc

SEQ ID NO: 163905 - RNA, 21 nt, Human
agcgaaacuugagucuguauu

SEQ ID NO: 163906 - RNA, 21 nt, Human
agcuacauaagcaagaacccu

SEQ ID NO: 163907 - RNA, 21 nt, Human
agcuacauaagcaagaacccu

SEQ ID NO: 163908 - RNA, 19 nt, Human
aggcaggagaaucccuuaa

SEQ ID NO: 163909 - RNA, 19 nt, Human
aggcaggagaaucccuuaa

SEQ ID NO: 163910 - RNA, 21 nt, Human
aggccgaggugggcagaucau

SEQ ID NO: 163911 - RNA, 21 nt, Human
aggccgaggugggcagaucau

SEQ ID NO: 163912 - RNA, 19 nt, Human
aggcugaggcaggagaauc

SEQ ID NO: 163913 - RNA, 19 nt, Human
aggcugaggcaggagaauc

SEQ ID NO: 163914 - RNA, 18 nt, Human
agggacauggaugaagcu

SEQ ID NO: 163915 - RNA, 18 nt, Human
agggacauggaugaagcu

SEQ ID NO: 163916 - RNA, 24 nt, Human
agggaguuggagguugcagugagc

SEQ ID NO: 163917 - RNA, 24 nt, Human
aggugggcagaucaugaggucagg

SEQ ID NO: 163918 - RNA, 24 nt, Human
aggugggcagaucaugaggucagg

SEQ ID NO: 163919 - RNA, 23 nt, Human
agucuguaaucccagcuacuugg

SEQ ID NO: 163920 - RNA, 24 nt, Human
agucuguaaucccagcuacuuggg

SEQ ID NO: 163921 - RNA, 24 nt, Human
agucuguaaucccagcuacuuggg

SEQ ID NO: 163922 - RNA, 18 nt, Human
agugcaucuuguagggcu

SEQ ID NO: 163923 - RNA, 24 nt, Human
aguuggagguugcagugagccgag

SEQ ID NO: 163924 - RNA, 24 nt, Human
aguuggagguugcagugagccgag

SEQ ID NO: 163925 - RNA, 24 nt, Human
aucaugccacugcacuccagccug

SEQ ID NO: 163926 - RNA, 24 nt, Human
aucaugccacugcacuccagccug

SEQ ID NO: 163927 - RNA, 22 nt, Human
augccacugcacuccagccugg

SEQ ID NO: 163928 - RNA, 22 nt, Human
augccacugcacuccagccugg

SEQ ID NO: 163929 - RNA, 20 nt, Human
augccagaaugcaaguuuuu

SEQ ID NO: 163930 - RNA, 20 nt, Human
augccagaaugcaaguuuuu

SEQ ID NO: 163931 - RNA, 23 nt, Human
caaaauagacuccuaaauauuaa

SEQ ID NO: 163932 - RNA, 23 nt, Human
caaaauagacuccuaaauauuaa

SEQ ID NO: 163933 - RNA, 24 nt, Human
caacauggugaaaccccgucucua

SEQ ID NO: 163934 - RNA, 24 nt, Human
caacauggugaaaccccgucucua

SEQ ID NO: 163935 - RNA, 22 nt, Human
caauagcaaagacuuggaacca

SEQ ID NO: 163936 - RNA, 22 nt, Human
caauagcaaagacuuggaacca

SEQ ID NO: 163937 - RNA, 20 nt, Human
caccacauauucucacucau

SEQ ID NO: 163938 - RNA, 20 nt, Human
caccacauauucucacucau

SEQ ID NO: 163939 - RNA, 21 nt, Human
caccacauauucucacucaua

SEQ ID NO: 163940 - RNA, 21 nt, Human
caccacauauucucacucaua

SEQ ID NO: 163941 - RNA, 22 nt, Human
cacuccagccuggugacagagc

SEQ ID NO: 163942 - RNA, 22 nt, Human
cacuccagccuggugacagagc

SEQ ID NO: 163943 - RNA, 18 nt, Human
cacugcacuccagccugg

SEQ ID NO: 163944 - RNA, 18 nt, Human
cacugcacuccagccugg

SEQ ID NO: 163945 - RNA, 18 nt, Human
cacugcacuccagccugg

SEQ ID NO: 163946 - RNA, 20 nt, Human
cacugcacuccagccuggug

SEQ ID NO: 163947 - RNA, 22 nt, Human
cacugcacuccagccuggugac

SEQ ID NO: 163948 - RNA, 22 nt, Human
cacugcacuccagccuggugac

SEQ ID NO: 163949 - RNA, 23 nt, Human
cacugcacuccagccuggugaca

SEQ ID NO: 163950 - RNA, 23 nt, Human
cacugcacuccagccuggugaca

SEQ ID NO: 163951 - RNA, 24 nt, Human
cacugcacuccagccuggugacag

SEQ ID NO: 163952 - RNA, 24 nt, Human
cacugcacuccagccuggugacag

SEQ ID NO: 163953 - RNA, 25 nt, Human
cagcacuuuggggaggccgaggugg

SEQ ID NO: 163954 - RNA, 25 nt, Human
cagcacuuuggggaggccgaggugg

SEQ ID NO: 163955 - RNA, 22 nt, Human
cagcagucaguauuuagguuga

SEQ ID NO: 163956 - RNA, 22 nt, Human
cagcagucaguauuuagguuga

SEQ ID NO: 163957 - RNA, 19 nt, Human
cagcauaaaaugauugcuu

SEQ ID NO: 163958 - RNA, 24 nt, Human
cagcuacuugggaggcugaggcag

SEQ ID NO: 163959 - RNA, 24 nt, Human
cagcuacuugggaggcugaggcag

SEQ ID NO: 163960 - RNA, 22 nt, Human
ccaaacaccacauauucucacu

SEQ ID NO: 163961 - RNA, 22 nt, Human
ccaaacaccacauauucucacu

SEQ ID NO: 163962 - RNA, 19 nt, Human
ccacugcacuccagccugg

SEQ ID NO: 163963 - RNA, 19 nt, Human
ccacugcacuccagccugg

SEQ ID NO: 163964 - RNA, 19 nt, Human
ccacugcacuccagccugg

SEQ ID NO: 163965 - RNA, 19 nt, Human
ccacugcacuccagccugg

SEQ ID NO: 163966 - RNA, 19 nt, Human
ccacugcacuccagccugg

SEQ ID NO: 163967 - RNA, 20 nt, Human
ccacugcacuccagccuggu

SEQ ID NO: 163968 - RNA, 20 nt, Human
ccacugcacuccagccuggu

SEQ ID NO: 163969 - RNA, 23 nt, Human
ccacugcacuccagccuggugac

SEQ ID NO: 163970 - RNA, 23 nt, Human
ccacugcacuccagccuggugac

SEQ ID NO: 163971 - RNA, 22 nt, Human
ccagcagucaguauuuagguug

SEQ ID NO: 163972 - RNA, 22 nt, Human
ccagcagucaguauuuagguug

SEQ ID NO: 163973 - RNA, 19 nt, Human
ccggggccugcuguggggu

SEQ ID NO: 163974 - RNA, 19 nt, Human
ccggggccugcuguggggu

SEQ ID NO: 163975 - RNA, 22 nt, Human
ccugaccaacauggugaaaccc

SEQ ID NO: 163976 - RNA, 22 nt, Human
ccugaccaacauggugaaaccc

SEQ ID NO: 163977 - RNA, 23 nt, Human
ccugaccaacauggugaaacccc

SEQ ID NO: 163978 - RNA, 23 nt, Human
ccugaccaacauggugaaacccc

SEQ ID NO: 163979 - RNA, 24 nt, Human
ccugaccaacauggugaaaccccg

SEQ ID NO: 163980 - RNA, 24 nt, Human
ccugaccaacauggugaaaccccg

SEQ ID NO: 163981 - RNA, 22 nt, Human
ccugcugugggguggguggaga

SEQ ID NO: 163982 - RNA, 22 nt, Human
ccugcugugggguggguggaga

SEQ ID NO: 163983 - RNA, 21 nt, Human
ccuggugacagagcaagacuc

SEQ ID NO: 163984 - RNA, 21 nt, Human
ccuggugacagagcaagacuc

SEQ ID NO: 163985 - RNA, 24 nt, Human
cgaggugggcagaucaugagguca

SEQ ID NO: 163986 - RNA, 24 nt, Human
cgaggugggcagaucaugagguca

SEQ ID NO: 163987 - RNA, 18 nt, Human
cucuaaauccuuuuccuu

SEQ ID NO: 163988 - RNA, 18 nt, Human
cucuaaauccuuuuccuu

SEQ ID NO: 163989 - RNA, 19 nt, Human
cucugucucaaaaaaaaaa

SEQ ID NO: 163990 - RNA, 19 nt, Human
cucugucucaaaaaaaaaa

SEQ ID NO: 163991 - RNA, 18 nt, Human
cugaagcuguguccagua

SEQ ID NO: 163992 - RNA, 18 nt, Human
cugaagcuguguccagua

SEQ ID NO: 163993 - RNA, 20 nt, Human
cugcaauacuacuuuuuuua

SEQ ID NO: 163994 - RNA, 20 nt, Human
cugcaauacuacuuuuuuua

SEQ ID NO: 163995 - RNA, 19 nt, Human
cugcaucaaaauauucuuu

SEQ ID NO: 163996 - RNA, 19 nt, Human
cugcaucaaaauauucuuu

SEQ ID NO: 163997 - RNA, 21 nt, Human
cuguaaucccagcuacuuggg

SEQ ID NO: 163998 - RNA, 21 nt, Human
cuguaaucccagcuacuuggg

SEQ ID NO: 163999 - RNA, 21 nt, Human
cuuguucccuuuucuccccug

SEQ ID NO: 164000 - RNA, 21 nt, Human
cuuguucccuuuucuccccug

SEQ ID NO: 164001 - RNA, 23 nt, Human
gaaaauaugcucaaugcagaggg

SEQ ID NO: 164002 - RNA, 23 nt, Human
gaaaauaugcucaaugcagaggg

SEQ ID NO: 164003 - RNA, 18 nt, Human
gaacugaaggagugugcu

SEQ ID NO: 164004 - RNA, 24 nt, Human
gacagagcaagacucugucucaaa

SEQ ID NO: 164005 - RNA, 23 nt, Human
gagaccauccugaccaacauggu

SEQ ID NO: 164006 - RNA, 23 nt, Human
gagaucaugccacugcacuccag

SEQ ID NO: 164007 - RNA, 23 nt, Human
gagaucaugccacugcacuccag

SEQ ID NO: 164008 - RNA, 23 nt, Human
gaggugggcagaucaugagguca

SEQ ID NO: 164009 - RNA, 22 nt, Human
gagguugcagugagccgagauc

SEQ ID NO: 164010 - RNA, 22 nt, Human
gagguugcagugagccgagauc

SEQ ID NO: 164011 - RNA, 21 nt, Human
gaguuggagguugcagugagc

SEQ ID NO: 164012 - RNA, 18 nt, Human
gaugacagguuggugggu

SEQ ID NO: 164013 - RNA, 18 nt, Human
gaugacagguuggugggu

SEQ ID NO: 164014 - RNA, 23 nt, Human
gcacuccagccuggugacagagc

SEQ ID NO: 164015 - RNA, 23 nt, Human
gcacuccagccuggugacagagc

SEQ ID NO: 164016 - RNA, 20 nt, Human
gccgagaucaugccacugca

SEQ ID NO: 164017 - RNA, 20 nt, Human
gccgagaucaugccacugca

SEQ ID NO: 164018 - RNA, 21 nt, Human
gcggcugcgugccucuggcuc

SEQ ID NO: 164019 - RNA, 22 nt, Human
gcggcugcgugccucuggcucu

SEQ ID NO: 164020 - RNA, 18 nt, Human
gcgugccucuggcucugc

SEQ ID NO: 164021 - RNA, 28 nt, Human
gcugaagcuguguccaguaauuuuucuu

SEQ ID NO: 164022 - RNA, 28 nt, Human
gcugaagcuguguccaguaauuuuucuu

SEQ ID NO: 164023 - RNA, 19 nt, Human
gcugugggguggguggaga

SEQ ID NO: 164024 - RNA, 19 nt, Human
gcugugggguggguggaga

SEQ ID NO: 164025 - RNA, 18 nt, Human
ggaagagaaggggagagg

SEQ ID NO: 164026 - RNA, 18 nt, Human
ggagguugcagugagccg

SEQ ID NO: 164027 - RNA, 20 nt, Human
ggagguugcagugagccgag

SEQ ID NO: 164028 - RNA, 20 nt, Human
ggagguugcagugagccgag

SEQ ID NO: 164029 - RNA, 22 nt, Human
ggagguugcagugagccgagau

SEQ ID NO: 164030 - RNA, 22 nt, Human
ggagguugcagugagccgagau

SEQ ID NO: 164031 - RNA, 23 nt, Human
ggagguugcagugagccgagauc

SEQ ID NO: 164032 - RNA, 23 nt, Human
ggagguugcagugagccgagauc

SEQ ID NO: 164033 - RNA, 24 nt, Human
ggagguugcagugagccgagauca

SEQ ID NO: 164034 - RNA, 24 nt, Human
ggagguugcagugagccgagauca

SEQ ID NO: 164035 - RNA, 18 nt, Human
ggaguuggagguugcagu

SEQ ID NO: 164036 - RNA, 18 nt, Human
ggaguuggagguugcagu

SEQ ID NO: 164037 - RNA, 22 nt, Human
ggaguuggagguugcagugagc

SEQ ID NO: 164038 - RNA, 22 nt, Human
ggaguuggagguugcagugagc

SEQ ID NO: 164039 - RNA, 23 nt, Human
ggaucagcaucuuguuccuccgg

SEQ ID NO: 164040 - RNA, 23 nt, Human
ggaucagcaucuuguuccuccgg

SEQ ID NO: 164041 - RNA, 20 nt, Human
ggcagaucaugaggucagga

SEQ ID NO: 164042 - RNA, 20 nt, Human
ggcagaucaugaggucagga

SEQ ID NO: 164043 - RNA, 25 nt, Human
ggccaguaaagacaaguguaauugu

SEQ ID NO: 164044 - RNA, 25 nt, Human
ggccaguaaagacaaguguaauugu

SEQ ID NO: 164045 - RNA, 20 nt, Human
ggcugcgugccucuggcucu

SEQ ID NO: 164046 - RNA, 19 nt, Human
gggaggccgaggugggcag

SEQ ID NO: 164047 - RNA, 19 nt, Human
gggaggccgaggugggcag

SEQ ID NO: 164048 - RNA, 23 nt, Human
gggaggccgaggugggcagauca

SEQ ID NO: 164049 - RNA, 23 nt, Human
gggaggccgaggugggcagauca

SEQ ID NO: 164050 - RNA, 18 nt, Human
gggagggauagcauuagg

SEQ ID NO: 164051 - RNA, 18 nt, Human
gggagggauagcauuagg

SEQ ID NO: 164052 - RNA, 24 nt, Human
ggggaacaucacauaccggggccu

SEQ ID NO: 164053 - RNA, 24 nt, Human
ggggaacaucacauaccggggccu

SEQ ID NO: 164054 - RNA, 20 nt, Human
ggggaagagaaggggagagg

SEQ ID NO: 164055 - RNA, 24 nt, Human
gguggcaugagucuguaaucccag

SEQ ID NO: 164056 - RNA, 24 nt, Human
gguggcaugagucuguaaucccag

SEQ ID NO: 164057 - RNA, 23 nt, Human
ggugggcagaucaugaggucagg

SEQ ID NO: 164058 - RNA, 23 nt, Human
ggugggcagaucaugaggucagg

SEQ ID NO: 164059 - RNA, 19 nt, Human
guauuuuuccgaggugcag

SEQ ID NO: 164060 - RNA, 19 nt, Human
gugcagcacaccagcaugg

SEQ ID NO: 164061 - RNA, 19 nt, Human
gugcagcacaccagcaugg

SEQ ID NO: 164062 - RNA, 21 nt, Human
guguaaguauagcugaagcug

SEQ ID NO: 164063 - RNA, 21 nt, Human
guguaaguauagcugaagcug

SEQ ID NO: 164064 - RNA, 24 nt, Human
guugcagugagccgagaucaugcc

SEQ ID NO: 164065 - RNA, 24 nt, Human
guugcagugagccgagaucaugcc

SEQ ID NO: 164066 - RNA, 24 nt, Human
uaaaaauaacagaaauaaaagccu

SEQ ID NO: 164067 - RNA, 24 nt, Human
uaaaaauaacagaaauaaaagccu

SEQ ID NO: 164068 - RNA, 22 nt, Human
uaaaaugauuaccugagaauaa

SEQ ID NO: 164069 - RNA, 21 nt, Human
uaaaauguaaaacuaaacaua

SEQ ID NO: 164070 - RNA, 21 nt, Human
uaaaauguaaaacuaaacaua

SEQ ID NO: 164071 - RNA, 19 nt, Human
uaaaggagguguagaauuc

SEQ ID NO: 164072 - RNA, 19 nt, Human
uaaaggagguguagaauuc

SEQ ID NO: 164073 - RNA, 20 nt, Human
uaacagaaauaaaagccuua

SEQ ID NO: 164074 - RNA, 19 nt, Human
uaacuucugucaguauccc

SEQ ID NO: 164075 - RNA, 19 nt, Human
uaacuucugucaguauccc

SEQ ID NO: 164076 - RNA, 24 nt, Human
uaagaaaacaaacaaaaaaaaaca

SEQ ID NO: 164077 - RNA, 24 nt, Human
uaagaaaacaaacaaaaaaaaaca

SEQ ID NO: 164078 - RNA, 22 nt, Human
uaagcaagaacccucuuagaaa

SEQ ID NO: 164079 - RNA, 22 nt, Human
uaagcaagaacccucuuagaaa

SEQ ID NO: 164080 - RNA, 23 nt, Human
uaauugauaaaacugacauguua

SEQ ID NO: 164081 - RNA, 23 nt, Human
uaauugauaaaacugacauguua

SEQ ID NO: 164082 - RNA, 23 nt, Human
uacaaaguucuaaauaucccuca

SEQ ID NO: 164083 - RNA, 23 nt, Human
uacaaaguucuaaauaucccuca

SEQ ID NO: 164084 - RNA, 24 nt, Human
uacacacaaauccaagcugagcca

SEQ ID NO: 164085 - RNA, 19 nt, Human
uaccggggccugcuguggg

SEQ ID NO: 164086 - RNA, 19 nt, Human
uaccggggccugcuguggg

SEQ ID NO: 164087 - RNA, 21 nt, Human
uaccggggccugcuguggggu

SEQ ID NO: 164088 - RNA, 21 nt, Human
uaccggggccugcuguggggu

SEQ ID NO: 164089 - RNA, 23 nt, Human
uaccuguaaucccagcacuuugg

SEQ ID NO: 164090 - RNA, 24 nt, Human
uaccuguaaucccagcacuuuggg

SEQ ID NO: 164091 - RNA, 24 nt, Human
uaccuguaaucccagcacuuuggg

SEQ ID NO: 164092 - RNA, 23 nt, Human
uagaaauaaaaacaauaaaaaag

SEQ ID NO: 164093 - RNA, 21 nt, Human
uagccccugugcggcugcgug

SEQ ID NO: 164094 - RNA, 19 nt, Human
uagccuuuagcuaugccuu

SEQ ID NO: 164095 - RNA, 19 nt, Human
uagccuuuagcuaugccuu

SEQ ID NO: 164096 - RNA, 19 nt, Human
uagcuggcgugguggcaug

SEQ ID NO: 164097 - RNA, 19 nt, Human
uagcuggcgugguggcaug

SEQ ID NO: 164098 - RNA, 21 nt, Human
uaguagcuauccuacuuucac

SEQ ID NO: 164099 - RNA, 21 nt, Human
uaguagcuauccuacuuucac

SEQ ID NO: 164100 - RNA, 22 nt, Human
uagugccauaguucguuuuguu

SEQ ID NO: 164101 - RNA, 22 nt, Human
uagugccauaguucguuuuguu

SEQ ID NO: 164102 - RNA, 21 nt, Human
uaguuugcuuuaagaaaaaaa

SEQ ID NO: 164103 - RNA, 21 nt, Human
uaguuugcuuuaagaaaaaaa

SEQ ID NO: 164104 - RNA, 23 nt, Human
uauauacacaaacuuggaaauaa

SEQ ID NO: 164105 - RNA, 23 nt, Human
uauauacacaaacuuggaaauaa

SEQ ID NO: 164106 - RNA, 24 nt, Human
uauauacacaaacuuggaaauaac

SEQ ID NO: 164107 - RNA, 24 nt, Human
uauauacacaaacuuggaaauaac

SEQ ID NO: 164108 - RNA, 26 nt, Human
ucaaaaaaaaaaaaaaaaucauuuug

SEQ ID NO: 164109 - RNA, 26 nt, Human
ucaaaaaaaaaaaaaaaaucauuuug

SEQ ID NO: 164110 - RNA, 24 nt, Human
ucaagaaugagggcaagggggaga

SEQ ID NO: 164111 - RNA, 24 nt, Human
ucaagaaugagggcaagggggaga

SEQ ID NO: 164112 - RNA, 22 nt, Human
ucaagaggccaggauugagacc

SEQ ID NO: 164113 - RNA, 22 nt, Human
ucaagaggccaggauugagacc

SEQ ID NO: 164114 - RNA, 19 nt, Human
ucaagcauaaagcaaaagg

SEQ ID NO: 164115 - RNA, 19 nt, Human
ucaagcauaaagcaaaagg

SEQ ID NO: 164116 - RNA, 25 nt, Human
ucacacugaaacaaauggugggaac

SEQ ID NO: 164117 - RNA, 22 nt, Human
ucagcaucuuguucccuuuucu

SEQ ID NO: 164118 - RNA, 22 nt, Human
ucagcaucuuguucccuuuucu

SEQ ID NO: 164119 - RNA, 25 nt, Human
ucagucacacugaaacaaaugacgu

SEQ ID NO: 164120 - RNA, 25 nt, Human
ucagucacauugaaacaaaugacgu

SEQ ID NO: 164121 - RNA, 23 nt, Human
ucaugccacugcacuccagccug

SEQ ID NO: 164122 - RNA, 23 nt, Human
ucaugccacugcacuccagccug

SEQ ID NO: 164123 - RNA, 22 nt, Human
ucccuguggaucuauacagugg

SEQ ID NO: 164124 - RNA, 22 nt, Human
ucccuguggaucuauacagugg

SEQ ID NO: 164125 - RNA, 23 nt, Human
ucucuacuaaaaauacaaaaauu

SEQ ID NO: 164126 - RNA, 23 nt, Human
ucucuacuaaaaauacaaaaauu

SEQ ID NO: 164127 - RNA, 23 nt, Human
ucugcaacuguaaaaauuaugcc

SEQ ID NO: 164128 - RNA, 23 nt, Human
ucugcaacuguaaaaauuaugcc

SEQ ID NO: 164129 - RNA, 21 nt, Human
ucuguaaucccagcuacuugg

SEQ ID NO: 164130 - RNA, 21 nt, Human
ucuguaaucccagcuacuugg

SEQ ID NO: 164131 - RNA, 22 nt, Human
ucuguagccccugugcggcugc

SEQ ID NO: 164132 - RNA, 23 nt, Human
ucugucucaaaaaaaaaaaaaaa

SEQ ID NO: 164133 - RNA, 23 nt, Human
ucugucucaaaaaaaaaaaaaaa

SEQ ID NO: 164134 - RNA, 20 nt, Human
ucuuuuauucagggccacaa

SEQ ID NO: 164135 - RNA, 26 nt, Human
ugaaacaaaugacgugacuucaauac

SEQ ID NO: 164136 - RNA, 28 nt, Human
ugaagacaccuauagaaacuggagaccc

SEQ ID NO: 164137 - RNA, 28 nt, Human
ugaagacaccuauagaaacuggagaccc

SEQ ID NO: 164138 - RNA, 24 nt, Human
ugaccaacauggugaaaccccguc

SEQ ID NO: 164139 - RNA, 24 nt, Human
ugaccaacauggugaaaccccguc

SEQ ID NO: 164140 - RNA, 24 nt, Human
ugagaccauccugaccaacauggu

SEQ ID NO: 164141 - RNA, 22 nt, Human
ugagccgagaucaugccacugc

SEQ ID NO: 164142 - RNA, 22 nt, Human
ugagccgagaucaugccacugc

SEQ ID NO: 164143 - RNA, 24 nt, Human
ugaggcaggagaaucccuuaaacc

SEQ ID NO: 164144 - RNA, 24 nt, Human
ugaggcaggagaaucccuuaaacc

SEQ ID NO: 164145 - RNA, 25 nt, Human
ugaggcaggagaaucccuuaaacca

SEQ ID NO: 164146 - RNA, 24 nt, Human
ugagucuguaaucccagcuacuug

SEQ ID NO: 164147 - RNA, 24 nt, Human
ugagucuguaaucccagcuacuug

SEQ ID NO: 164148 - RNA, 19 nt, Human
ugagucuguauuucacuga

SEQ ID NO: 164149 - RNA, 23 nt, Human
ugauucugggcucuguagccccu

SEQ ID NO: 164150 - RNA, 19 nt, Human
ugcaaggaccaaaaaccaa

SEQ ID NO: 164151 - RNA, 19 nt, Human
ugcaaggaccaaaaaccaa

SEQ ID NO: 164152 - RNA, 20 nt, Human
ugcaaggaccaaaaaccaaa

SEQ ID NO: 164153 - RNA, 26 nt, Human
ugccucaccugacuccacucagguug

SEQ ID NO: 164154 - RNA, 26 nt, Human
ugccucaccugacuccacucagguug

SEQ ID NO: 164155 - RNA, 22 nt, Human
ugccucuggcucugcccgccuc

SEQ ID NO: 164156 - RNA, 23 nt, Human
ugccucuggcucugcccgccucg

SEQ ID NO: 164157 - RNA, 24 nt, Human
ugcugggguuuaacccgggggcuc

SEQ ID NO: 164158 - RNA, 19 nt, Human
ugcuugaaucuuggcagaa

SEQ ID NO: 164159 - RNA, 20 nt, Human
uggaauacuaugcagccaua

SEQ ID NO: 164160 - RNA, 20 nt, Human
uggaauacuaugcagccaua

SEQ ID NO: 164161 - RNA, 20 nt, Human
uggauuaagaaaauguggcc

SEQ ID NO: 164162 - RNA, 20 nt, Human
uggauuaagaaaauguggcc

SEQ ID NO: 164163 - RNA, 18 nt, Human
uggcuagaaauaaaaaca

SEQ ID NO: 164164 - RNA, 18 nt, Human
uggcuagaaauaaaaaca

SEQ ID NO: 164165 - RNA, 18 nt, Human
ugggaggcugaggcagga

SEQ ID NO: 164166 - RNA, 18 nt, Human
ugggaggcugaggcagga

SEQ ID NO: 164167 - RNA, 19 nt, Human
ugggaggcugaggcaggag

SEQ ID NO: 164168 - RNA, 19 nt, Human
ugggaggcugaggcaggag

SEQ ID NO: 164169 - RNA, 22 nt, Human
ugggcagaucaugaggucagga

SEQ ID NO: 164170 - RNA, 19 nt, Human
ugggcucuguagccccugu

SEQ ID NO: 164171 - RNA, 20 nt, Human
ugggcucuguagccccugug

SEQ ID NO: 164172 - RNA, 18 nt, Human
uggguagagauaugcugg

SEQ ID NO: 164173 - RNA, 24 nt, Human
ugguggcaugagucuguaauccca

SEQ ID NO: 164174 - RNA, 24 nt, Human
ugguggcaugagucuguaauccca

SEQ ID NO: 164175 - RNA, 24 nt, Human
uguaccuguaaucccagcacuuug

SEQ ID NO: 164176 - RNA, 24 nt, Human
uguaccuguaaucccagcacuuug

SEQ ID NO: 164177 - RNA, 21 nt, Human
ugugugcaugugugacagaca

SEQ ID NO: 164178 - RNA, 21 nt, Human
ugugugcaugugugacagaca

SEQ ID NO: 164179 - RNA, 22 nt, Human
uguuauauauauguguguacua

SEQ ID NO: 164180 - RNA, 22 nt, Human
uguuauauauauguguguacua

SEQ ID NO: 164181 - RNA, 21 nt, Human
uuagccuauacaacuuaugca

SEQ ID NO: 164182 - RNA, 21 nt, Human
uuagccuauacaacuuaugca

SEQ ID NO: 164183 - RNA, 19 nt, Human
uuaggagauauaccuaaug

SEQ ID NO: 164184 - RNA, 19 nt, Human
uuaggagauauaccuaaug

SEQ ID NO: 164185 - RNA, 23 nt, Human
uucaacacaacaaauucccaaau

SEQ ID NO: 164186 - RNA, 23 nt, Human
uucaacacaacaaauucccaaau

SEQ ID NO: 164187 - RNA, 21 nt, Human
uucauaaacagcauaaaauga

SEQ ID NO: 164188 - RNA, 21 nt, Human
uucauaaacagcauaaaauga

SEQ ID NO: 164189 - RNA, 20 nt, Human
uucuuagauguaaagaugcc

SEQ ID NO: 164190 - RNA, 20 nt, Human
uucuuagauguaaagaugcc

SEQ ID NO: 164191 - RNA, 30 nt, Human
uugauagggcuagguggcuuuuucuuuucc

SEQ ID NO: 164192 - RNA, 21 nt, Human
uugcaaggaccaaaaaccaaa

SEQ ID NO: 164193 - RNA, 18 nt, Human
uugcagugagccgagauc

SEQ ID NO: 164194 - RNA, 18 nt, Human
uugcagugagccgagauc

SEQ ID NO: 164195 - RNA, 19 nt, Human
uugcagugagccgagauca

SEQ ID NO: 164196 - RNA, 20 nt, Human
uugcagugagccgagaucau

SEQ ID NO: 164197 - RNA, 20 nt, Human
uugcagugagccgagaucau

SEQ ID NO: 164198 - RNA, 21 nt, Human
uugcagugagccgagaucaug

SEQ ID NO: 164199 - RNA, 20 nt, Human
uugcucccuguggaucuaua

SEQ ID NO: 164200 - RNA, 20 nt, Human
uugcucccuguggaucuaua

SEQ ID NO: 164201 - RNA, 26 nt, Human
uuggaucagcaucuuguuccuccggg

SEQ ID NO: 164202 - RNA, 26 nt, Human
uuggaucagcaucuuguuccuccggg

SEQ ID NO: 164203 - RNA, 22 nt, Human
uuuagccuauacaacuuaugca

SEQ ID NO: 164204 - RNA, 22 nt, Human
uuuagccuauacaacuuaugca

SEQ ID NO: 164205 - RNA, 21 nt, Human
uuuauaauauauacacaaacu

SEQ ID NO: 164206 - RNA, 21 nt, Human
uuuauaauauauacacaaacu

SEQ ID NO: 164207 - RNA, 22 nt, Human
uuuccauauuacaaaugagcua

SEQ ID NO: 164208 - RNA, 22 nt, Human
uuuccauauuacaaaugagcua

SEQ ID NO: 164209 - RNA, 21 nt, Human
uuuggggaggccgaggugggc

SEQ ID NO: 164210 - RNA, 21 nt, Human
uuuggggaggccgaggugggc

SEQ ID NO: 164211 - RNA, 19 nt, Human
uuuuuccgaggugcagaaa

SEQ ID NO: 164212 - RNA, 24 nt, Human
cuguaagccuucuuuugugggucc

SEQ ID NO: 164213 - RNA, 25 nt, Human
uucuucgcuggugcaaaauuucaau

SEQ ID NO: 164214 - RNA, 22 nt, Human
aaaaaacaaaaacaugccaaag

SEQ ID NO: 164215 - RNA, 23 nt, Human
aaaaaacaaaaacaugccaaaga

SEQ ID NO: 164216 - RNA, 25 nt, Human
aaaaaacaaaaacaugccaaagacc

SEQ ID NO: 164217 - RNA, 21 nt, Human
aaaacaauaaaguucaaaaac

SEQ ID NO: 164218 - RNA, 25 nt, Human
aaacaaaaggugaauaggagggacc

SEQ ID NO: 164219 - RNA, 23 nt, Human
aaacaaacauaaaugcacaaguc

SEQ ID NO: 164220 - RNA, 22 nt, Human
aaacauccuuuuagcaauaccc

SEQ ID NO: 164221 - RNA, 20 nt, Human
aacauaaugaaaaugaaucu

SEQ ID NO: 164222 - RNA, 20 nt, Human
aaccacaggaaaauuaaaug

SEQ ID NO: 164223 - RNA, 19 nt, Human
aagaaagaaaacaguccac

SEQ ID NO: 164224 - RNA, 28 nt, Human
aagaaagaaaacaguccacuuaaagaaa

SEQ ID NO: 164225 - RNA, 21 nt, Human
aagccauauucccaaauauga

SEQ ID NO: 164226 - RNA, 18 nt, Human
aaguccuccucugcccuc

SEQ ID NO: 164227 - RNA, 23 nt, Human
aauacccuuuccacuugagcagc

SEQ ID NO: 164228 - RNA, 22 nt, Human
acaaaacaauaaaguucaaaaa

SEQ ID NO: 164229 - RNA, 22 nt, Human
acaaccaguuuuacaauuuuuu

SEQ ID NO: 164230 - RNA, 19 nt, Human
acauaaaugcacaagucca

SEQ ID NO: 164231 - RNA, 24 nt, Human
acuaaaaaauaaaaggaaagaaaa

SEQ ID NO: 164232 - RNA, 18 nt, Human
acuacaguuacugaagcc

SEQ ID NO: 164233 - RNA, 22 nt, Human
agcuguauaucuacccagcugc

SEQ ID NO: 164234 - RNA, 22 nt, Human
aggaaagaaaauuuugagaaga

SEQ ID NO: 164235 - RNA, 18 nt, Human
aggcagaaggauuuucuc

SEQ ID NO: 164236 - RNA, 18 nt, Human
aggugaauaggaaucaga

SEQ ID NO: 164237 - RNA, 23 nt, Human
aguaagagggauggaggccccuu

SEQ ID NO: 164238 - RNA, 23 nt, Human
agucagaaaagggagggaaacuu

SEQ ID NO: 164239 - RNA, 24 nt, Human
auaaaguucaaaaacaacuuaaaa

SEQ ID NO: 164240 - RNA, 19 nt, Human
auagcagccauuuuauaag

SEQ ID NO: 164241 - RNA, 21 nt, Human
augcucacaagacuacaguua

SEQ ID NO: 164242 - RNA, 20 nt, Human
auuaguuuuaguguguauuu

SEQ ID NO: 164243 - RNA, 21 nt, Human
caaaaacaugccaaagaccau

SEQ ID NO: 164244 - RNA, 19 nt, Human
cagcugaaaaguucuccag

SEQ ID NO: 164245 - RNA, 22 nt, Human
cauaaaugcacaaguccagcuu

SEQ ID NO: 164246 - RNA, 24 nt, Human
ccaccuuuugaacagcagagauuu

SEQ ID NO: 164247 - RNA, 18 nt, Human
cugacaaauccugccaga

SEQ ID NO: 164248 - RNA, 19 nt, Human
cuguuugcuauuugacuuu

SEQ ID NO: 164249 - RNA, 22 nt, Human
cuuccaggauuugcuggcccaa

SEQ ID NO: 164250 - RNA, 23 nt, Human
cuugccguugagccagacaguuu

SEQ ID NO: 164251 - RNA, 21 nt, Human
gaacagcagagauuucuagag

SEQ ID NO: 164252 - RNA, 20 nt, Human
gaccucuuccuaucugugaa

SEQ ID NO: 164253 - RNA, 23 nt, Human
ggaaacauccuuuuagcaauacc

SEQ ID NO: 164254 - RNA, 18 nt, Human
ggacuugaaugacaaaua

SEQ ID NO: 164255 - RNA, 21 nt, Human
ggcaguucuuucuaguuuucu

SEQ ID NO: 164256 - RNA, 25 nt, Human
ggcugaccucaagccuucaugacau

SEQ ID NO: 164257 - RNA, 26 nt, Human
gugcugccaccuuuugaacagcagag

SEQ ID NO: 164258 - RNA, 21 nt, Human
gugucagucagaaaagggagg

SEQ ID NO: 164259 - RNA, 24 nt, Human
uaaaaaacaaaaacaugccaaaga

SEQ ID NO: 164260 - RNA, 26 nt, Human
uaaaacaaacauaaaugcacaagucc

SEQ ID NO: 164261 - RNA, 22 nt, Human
uaaaauuaaaagcauaugaaac

SEQ ID NO: 164262 - RNA, 23 nt, Human
uaaagugcuaccaagaucugcca

SEQ ID NO: 164263 - RNA, 22 nt, Human
uaacaucaugauuguacaacca

SEQ ID NO: 164264 - RNA, 24 nt, Human
uaacucucaucuauaaauguauua

SEQ ID NO: 164265 - RNA, 22 nt, Human
uaacugcaucuucuauuuuggg

SEQ ID NO: 164266 - RNA, 19 nt, Human
uaaguccuccucugcccuc

SEQ ID NO: 164267 - RNA, 22 nt, Human
uaaugcagugucuuaaaacaaa

SEQ ID NO: 164268 - RNA, 24 nt, Human
uacaagauuuuuggaaacauccuu

SEQ ID NO: 164269 - RNA, 22 nt, Human
uacaguauuaucaucaaucacu

SEQ ID NO: 164270 - RNA, 19 nt, Human
uacauaguuuuaaaauaug

SEQ ID NO: 164271 - RNA, 19 nt, Human
uagauugauuuaagaaaga

SEQ ID NO: 164272 - RNA, 24 nt, Human
uagcuagcaaaguccuugaaucag

SEQ ID NO: 164273 - RNA, 19 nt, Human
uaggucaaccacaggaaaa

SEQ ID NO: 164274 - RNA, 24 nt, Human
uaugaacagauagucugcuaggca

SEQ ID NO: 164275 - RNA, 18 nt, Human
ucaacagaaauaaaaaac

SEQ ID NO: 164276 - RNA, 24 nt, Human
ucaacaggcagaaggauuuucucu

SEQ ID NO: 164277 - RNA, 27 nt, Human
ucagaaaagggagggaaacuugccguu

SEQ ID NO: 164278 - RNA, 20 nt, Human
ucaggcucuuauuuuugucu

SEQ ID NO: 164279 - RNA, 23 nt, Human
ucaguaguuuuuccagccuuucu

SEQ ID NO: 164280 - RNA, 21 nt, Human
uccacuugagcagcauuagaa

SEQ ID NO: 164281 - RNA, 22 nt, Human
uccuccuuaaauaacucuguug

SEQ ID NO: 164282 - RNA, 23 nt, Human
ucuguaggcugaccucaagccuu

SEQ ID NO: 164283 - RNA, 23 nt, Human
ugaacagauagucugcuaggcac

SEQ ID NO: 164284 - RNA, 19 nt, Human
ugacuuauacuaccaggaa

SEQ ID NO: 164285 - RNA, 23 nt, Human
ugaggaagggcaguucuuucuag

SEQ ID NO: 164286 - RNA, 21 nt, Human
ugagucaaaucaucacaguaa

SEQ ID NO: 164287 - RNA, 19 nt, Human
ugccaaagaccauuagcua

SEQ ID NO: 164288 - RNA, 18 nt, Human
ugccaaugaaagacuuuu

SEQ ID NO: 164289 - RNA, 24 nt, Human
ugcuguaaccauaggaaaaaagca

SEQ ID NO: 164290 - RNA, 21 nt, Human
ugggaagaacauuauuaaaag

SEQ ID NO: 164291 - RNA, 24 nt, Human
uguaacuagagcaaauuuuauuuu

SEQ ID NO: 164292 - RNA, 18 nt, Human
ugugggaagaacauuauu

SEQ ID NO: 164293 - RNA, 22 nt, Human
uguugguuuugccuaauucagc

SEQ ID NO: 164294 - RNA, 22 nt, Human
uuacuaaaucugauuuuugugu

SEQ ID NO: 164295 - RNA, 22 nt, Human
uuaguuuuaguguguauuuucu

SEQ ID NO: 164296 - RNA, 18 nt, Human
uuaucuguaggcugaccu

SEQ ID NO: 164297 - RNA, 18 nt, Human
uuguguacaaauguaaag

SEQ ID NO: 164298 - RNA, 24 nt, Human
uuuaaaauaugauauuuucuaccc

SEQ ID NO: 164299 - RNA, 28 nt, Human
aaaaaaaaaaaaaaacagcaaaaaccca

SEQ ID NO: 164300 - RNA, 23 nt, Human
aaaaaaaaaaaaaacagcaaaaa

SEQ ID NO: 164301 - RNA, 24 nt, Human
aaaaaaaaaaaacagcaaaaaccc

SEQ ID NO: 164302 - RNA, 24 nt, Human
aaaaaaaaaaaacagcaaaaaccc

SEQ ID NO: 164303 - RNA, 25 nt, Human
aaaaaaaaaaaacagcaaaaaccca

SEQ ID NO: 164304 - RNA, 19 nt, Human
aaaaaaaacagcaaaaacc

SEQ ID NO: 164305 - RNA, 22 nt, Human
aaaaaaaacagcaaaaacccaa

SEQ ID NO: 164306 - RNA, 20 nt, Human
aaaaaaacagcaaaaaccca

SEQ ID NO: 164307 - RNA, 20 nt, Human
aaaaaacagcaaaaacccaa

SEQ ID NO: 164308 - RNA, 24 nt, Human
aaaaaacagcaaaaacccaacagc

SEQ ID NO: 164309 - RNA, 25 nt, Human
aaaaacccaacagcaaacaauauca

SEQ ID NO: 164310 - RNA, 20 nt, Human
aaacaauaucaacaaccgga

SEQ ID NO: 164311 - RNA, 25 nt, Human
aaacaauaucaacaaccggaaccca

SEQ ID NO: 164312 - RNA, 19 nt, Human
aaacagcaaaaacccaaca

SEQ ID NO: 164313 - RNA, 23 nt, Human
aacagcaaaaacccaacagcaaa

SEQ ID NO: 164314 - RNA, 19 nt, Human
acccagggcucccccagca

SEQ ID NO: 164315 - RNA, 21 nt, Human
accggaacccagggcuccccc

SEQ ID NO: 164316 - RNA, 22 nt, Human
accggaacccagggcuccccca

SEQ ID NO: 164317 - RNA, 22 nt, Human
agagcccggcgggucacgccgu

SEQ ID NO: 164318 - RNA, 19 nt, Human
agagggugcgggugcggga

SEQ ID NO: 164319 - RNA, 21 nt, Human
agcaaaaacccaacagcaaac

SEQ ID NO: 164320 - RNA, 23 nt, Human
caaacaauaucaacaaccggaac

SEQ ID NO: 164321 - RNA, 21 nt, Human
cagcaaaaacccaacagcaaa

SEQ ID NO: 164322 - RNA, 22 nt, Human
cagcaaaaacccaacagcaaac

SEQ ID NO: 164323 - RNA, 24 nt, Human
cagcaaaaacccaacagcaaacaa

SEQ ID NO: 164324 - RNA, 19 nt, Human
cagcgcacagcucaucuug

SEQ ID NO: 164325 - RNA, 22 nt, Human
cagggcucccccagcaccuccc

SEQ ID NO: 164326 - RNA, 19 nt, Human
cauuguggggagggccagg

SEQ ID NO: 164327 - RNA, 19 nt, Human
ccccagcaccuccccagcc

SEQ ID NO: 164328 - RNA, 23 nt, Human
cccccagcaccuccccagccugc

SEQ ID NO: 164329 - RNA, 20 nt, Human
ccccggggcaccgagagccc

SEQ ID NO: 164330 - RNA, 27 nt, Human
ccggcggcgaucacgacgcggcuccuu

SEQ ID NO: 164331 - RNA, 18 nt, Human
cgcggcuccgcggguccc

SEQ ID NO: 164332 - RNA, 25 nt, Human
cggcggcgaucacgacgcggcuccu

SEQ ID NO: 164333 - RNA, 18 nt, Human
cucccccagcaccucccc

SEQ ID NO: 164334 - RNA, 22 nt, Human
cucucugcggucuggcauugug

SEQ ID NO: 164335 - RNA, 22 nt, Human
cuggcauuguggggagggccag

SEQ ID NO: 164336 - RNA, 28 nt, Human
cuuuuguuuuaaaaaaaaaaaaaaaaaa

SEQ ID NO: 164337 - RNA, 18 nt, Human
gacgcgcugagcagggcg

SEQ ID NO: 164338 - RNA, 21 nt, Human
gagggugcgggugcgggaggc

SEQ ID NO: 164339 - RNA, 19 nt, Human
gcaaaaacccaacagcaaa

SEQ ID NO: 164340 - RNA, 24 nt, Human
gcaaacaauaucaacaaccggaac

SEQ ID NO: 164341 - RNA, 20 nt, Human
ggcgcgagcggagagggugc

SEQ ID NO: 164342 - RNA, 21 nt, Human
gggcgcgagcggagagggugc

SEQ ID NO: 164343 - RNA, 18 nt, Human
gucacgccgucccgcggg

SEQ ID NO: 164344 - RNA, 21 nt, Human
ucucugcggucuggcauugug

SEQ ID NO: 164345 - RNA, 18 nt, Human
ugcgggugcgggaggccg

SEQ ID NO: 164346 - RNA, 24 nt, Human
ugcggucuggcauuguggggaggg

SEQ ID NO: 164347 - RNA, 20 nt, Human
uggaacgucgugcucgccgc

SEQ ID NO: 164348 - RNA, 21 nt, Human
uggcauuguggggagggccag

SEQ ID NO: 164349 - RNA, 24 nt, Human
ugggugcccuacaggaugagccuc

SEQ ID NO: 164350 - RNA, 20 nt, Human
uuaaaaaaaaaaaaaaaaaa

SEQ ID NO: 164351 - RNA, 20 nt, Human
uuaaaaaaaaaaaaaaaaaa

SEQ ID NO: 164352 - RNA, 23 nt, Human
acacacacacacacacacacaca

SEQ ID NO: 164353 - RNA, 23 nt, Human
acacacacacacacacacacaca

SEQ ID NO: 164354 - RNA, 23 nt, Human
acacacacacacacacacacaca

SEQ ID NO: 164355 - RNA, 23 nt, Human
acacacacacacacacacacaca

SEQ ID NO: 164356 - RNA, 23 nt, Human
acacacacacacacacacacaua

SEQ ID NO: 164357 - RNA, 23 nt, Human
acacacacacacacacacauaca

SEQ ID NO: 164358 - RNA, 21 nt, Human
acacacacacacauacacaca

SEQ ID NO: 164359 - RNA, 22 nt, Human
acacacacacacauacacacac

SEQ ID NO: 164360 - RNA, 23 nt, Human
acacacauacacacacacacaca

SEQ ID NO: 164361 - RNA, 23 nt, Human
acauacacacacacacacacaca

SEQ ID NO: 164362 - RNA, 20 nt, Human
agccagaauccugauaaguc

SEQ ID NO: 164363 - RNA, 24 nt, Human
agggcucaagugaagaaauugucu

SEQ ID NO: 164364 - RNA, 21 nt, Human
auaaaucaagcaaguggcccu

SEQ ID NO: 164365 - RNA, 23 nt, Human
auacacacacacacacacacaca

SEQ ID NO: 164366 - RNA, 23 nt, Human
auacacacacacacacacacaca

SEQ ID NO: 164367 - RNA, 25 nt, Human
auccaacuccccucccuuacugcag

SEQ ID NO: 164368 - RNA, 22 nt, Human
caacccaggagauauuaggcga

SEQ ID NO: 164369 - RNA, 23 nt, Human
caaguggcccuaggcagcccucc

SEQ ID NO: 164370 - RNA, 20 nt, Human
cacacacacacacacacaca

SEQ ID NO: 164371 - RNA, 20 nt, Human
cacacacacacacacacaca

SEQ ID NO: 164372 - RNA, 20 nt, Human
cacacacacacacacacaca

SEQ ID NO: 164373 - RNA, 20 nt, Human
cacacacacacacacacaca

SEQ ID NO: 164374 - RNA, 20 nt, Human
cacacacacacacacacaca

SEQ ID NO: 164375 - RNA, 20 nt, Human
cacacacacacacacacaca

SEQ ID NO: 164376 - RNA, 22 nt, Human
cacacacacacacacacacaca

SEQ ID NO: 164377 - RNA, 22 nt, Human
cacacacacacacacacacaca

SEQ ID NO: 164378 - RNA, 26 nt, Human
cacacacacacacacacacacacaca

SEQ ID NO: 164379 - RNA, 26 nt, Human
cacacacacacacacacacacacaca

SEQ ID NO: 164380 - RNA, 26 nt, Human
cacacacacacacacacacacacaua

SEQ ID NO: 164381 - RNA, 25 nt, Human
cacacacacacacacacacacauac

SEQ ID NO: 164382 - RNA, 26 nt, Human
cacacacacacacacacacauacaca

SEQ ID NO: 164383 - RNA, 20 nt, Human
cacacacacacacacacaua

SEQ ID NO: 164384 - RNA, 26 nt, Human
cacacacacacacacacauacacaca

SEQ ID NO: 164385 - RNA, 19 nt, Human
cacacacacacacacauac

SEQ ID NO: 164386 - RNA, 23 nt, Human
cacccucgcgcaggccaccagcc

SEQ ID NO: 164387 - RNA, 20 nt, Human
cauuaugcaugcgacaaagu

SEQ ID NO: 164388 - RNA, 21 nt, Human
cccuuacugcaguugcagaga

SEQ ID NO: 164389 - RNA, 24 nt, Human
cgcuacacacauacacacacacag

SEQ ID NO: 164390 - RNA, 18 nt, Human
cucucgcuccgcccacau

SEQ ID NO: 164391 - RNA, 24 nt, Human
cucucuccucuucucucaugauaa

SEQ ID NO: 164392 - RNA, 23 nt, Human
cucucucuccucuucucucauga

SEQ ID NO: 164393 - RNA, 22 nt, Human
cuuuaaguucacugcgaugaua

SEQ ID NO: 164394 - RNA, 21 nt, Human
gaacaaaaucagcauauuccc

SEQ ID NO: 164395 - RNA, 23 nt, Human
gcuccgcccacaucucccgcuac

SEQ ID NO: 164396 - RNA, 18 nt, Human
uaagugcagaacaaaauc

SEQ ID NO: 164397 - RNA, 20 nt, Human
uacacacacacacacacaca

SEQ ID NO: 164398 - RNA, 25 nt, Human
uacacacacacacacacacacacac

SEQ ID NO: 164399 - RNA, 20 nt, Human
uacacacauacacacacaca

SEQ ID NO: 164400 - RNA, 25 nt, Human
uacacacauacacacacacacacag

SEQ ID NO: 164401 - RNA, 21 nt, Human
uaggaugaaguacaacugauc

SEQ ID NO: 164402 - RNA, 19 nt, Human
ucgcgcaggccaccagcca

SEQ ID NO: 164403 - RNA, 18 nt, Human
ucucucuccucuucucuc

SEQ ID NO: 164404 - RNA, 19 nt, Human
ugaaguacaacugaucaga

SEQ ID NO: 164405 - RNA, 20 nt, Human
uggaauuucuauaaauaaau

SEQ ID NO: 164406 - RNA, 21 nt, Human
uggcaacaguggagcugaugu

SEQ ID NO: 164407 - RNA, 19 nt, Human
ugucaacccaggagauauu

SEQ ID NO: 164408 - RNA, 23 nt, Human
uucccauccaagccuccaucaua

SEQ ID NO: 164409 - RNA, 20 nt, Human
uuuauagugguuacuuuuuu

SEQ ID NO: 164410 - RNA, 19 nt, Human
uuuuauuuuuuacuaagag

SEQ ID NO: 164411 - RNA, 22 nt, Human
uuuuggagcacaagaauaaaca

SEQ ID NO: 164412 - RNA, 19 nt, Human
aaaaaaaaaaaaaaaaaga

SEQ ID NO: 164413 - RNA, 25 nt, Human
aaaagacauguaaauauauacucag

SEQ ID NO: 164414 - RNA, 21 nt, Human
aaaccgacaggagaaagcuca

SEQ ID NO: 164415 - RNA, 21 nt, Human
aaaccgacaggagaaagcuca

SEQ ID NO: 164416 - RNA, 22 nt, Human
aaagccccagugacguugcucu

SEQ ID NO: 164417 - RNA, 20 nt, Human
aaagugcugggauuacaggc

SEQ ID NO: 164418 - RNA, 20 nt, Human
aaagugcugggauuacaggc

SEQ ID NO: 164419 - RNA, 22 nt, Human
aaagugcugggauuacaggcgu

SEQ ID NO: 164420 - RNA, 23 nt, Human
aaagugcugggauuacaggcgug

SEQ ID NO: 164421 - RNA, 24 nt, Human
aaagugcugggauuacaggcguga

SEQ ID NO: 164422 - RNA, 22 nt, Human
aaaguuccuccacaggcacacu

SEQ ID NO: 164423 - RNA, 22 nt, Human
aacacugcccccaaccuggccu

SEQ ID NO: 164424 - RNA, 22 nt, Human
aacacugcccccaaccuggccu

SEQ ID NO: 164425 - RNA, 21 nt, Human
aacccacucccuccaggacug

SEQ ID NO: 164426 - RNA, 20 nt, Human
aagagcuccgcggccggcgc

SEQ ID NO: 164427 - RNA, 20 nt, Human
aagagcuccgcggccggcgc

SEQ ID NO: 164428 - RNA, 19 nt, Human
aagugcugggauuacaggc

SEQ ID NO: 164429 - RNA, 19 nt, Human
aagugcugggauuacaggc

SEQ ID NO: 164430 - RNA, 24 nt, Human
aaguggacuucaaaaguccaaagc

SEQ ID NO: 164431 - RNA, 23 nt, Human
aauggagccggagcuggugcccc

SEQ ID NO: 164432 - RNA, 23 nt, Human
aauggagccggagcuggugcccc

SEQ ID NO: 164433 - RNA, 24 nt, Human
aauggagccggagcuggugccccc

SEQ ID NO: 164434 - RNA, 18 nt, Human
acaaguacagaacaagug

SEQ ID NO: 164435 - RNA, 20 nt, Human
accagagugcgaggggcuua

SEQ ID NO: 164436 - RNA, 20 nt, Human
accagagugcgaggggcuua

SEQ ID NO: 164437 - RNA, 18 nt, Human
accauguuggccgggcug

SEQ ID NO: 164438 - RNA, 24 nt, Human
acccaggcuggagugcaguggcgu

SEQ ID NO: 164439 - RNA, 20 nt, Human
accccaaagccccagugacg

SEQ ID NO: 164440 - RNA, 19 nt, Human
accuuguagccuccaauuc

SEQ ID NO: 164441 - RNA, 23 nt, Human
acgaggggucucggucccguccg

SEQ ID NO: 164442 - RNA, 22 nt, Human
acggacagguggugggcccagc

SEQ ID NO: 164443 - RNA, 22 nt, Human
acggacagguggugggcccagc

SEQ ID NO: 164444 - RNA, 24 nt, Human
acucacucugucacccaggcugga

SEQ ID NO: 164445 - RNA, 18 nt, Human
acucugguggguguagau

SEQ ID NO: 164446 - RNA, 18 nt, Human
acucugucacccaggcug

SEQ ID NO: 164447 - RNA, 24 nt, Human
acucugucacccaggcuggagugc

SEQ ID NO: 164448 - RNA, 25 nt, Human
acucugucacccaggcuggagugca

SEQ ID NO: 164449 - RNA, 22 nt, Human
acugucuuggcagccggcacug

SEQ ID NO: 164450 - RNA, 18 nt, Human
agaagggagggccaguau

SEQ ID NO: 164451 - RNA, 23 nt, Human
agaccaaaccgacaggagaaagc

SEQ ID NO: 164452 - RNA, 23 nt, Human
agaccaaaccgacaggagaaagc

SEQ ID NO: 164453 - RNA, 21 nt, Human
agaggagguggagggagaggu

SEQ ID NO: 164454 - RNA, 21 nt, Human
agaggagguggagggagaggu

SEQ ID NO: 164455 - RNA, 24 nt, Human
agaguccauuaugaugcuccaggu

SEQ ID NO: 164456 - RNA, 19 nt, Human
agcaaaaaauauaugaccu

SEQ ID NO: 164457 - RNA, 19 nt, Human
agcaaaaaauauaugaccu

SEQ ID NO: 164458 - RNA, 22 nt, Human
agcucccggcacacccggguuc

SEQ ID NO: 164459 - RNA, 22 nt, Human
agcuucugguuccuuccuguug

SEQ ID NO: 164460 - RNA, 19 nt, Human
aggaaaaaggaagaaaaug

SEQ ID NO: 164461 - RNA, 20 nt, Human
aggcagggguccaaaugccu

SEQ ID NO: 164462 - RNA, 23 nt, Human
aggcagugccuguggcagggagg

SEQ ID NO: 164463 - RNA, 25 nt, Human
aggcagugccuguggcagggagggg

SEQ ID NO: 164464 - RNA, 20 nt, Human
aggcggggcggggggagggc

SEQ ID NO: 164465 - RNA, 20 nt, Human
aggcggggcggggggagggc

SEQ ID NO: 164466 - RNA, 25 nt, Human
aggcuggagugcaguggcgugaucu

SEQ ID NO: 164467 - RNA, 21 nt, Human
aggggucucggucccguccgg

SEQ ID NO: 164468 - RNA, 18 nt, Human
aguagcugggacuacagg

SEQ ID NO: 164469 - RNA, 24 nt, Human
agucuggggagggcgugugggugg

SEQ ID NO: 164470 - RNA, 24 nt, Human
agucuggggagggcgugugggugg

SEQ ID NO: 164471 - RNA, 19 nt, Human
agugcaguggcgugaucuc

SEQ ID NO: 164472 - RNA, 21 nt, Human
agugcaguggcgugaucucag

SEQ ID NO: 164473 - RNA, 23 nt, Human
agugcaguggcgugaucucagcu

SEQ ID NO: 164474 - RNA, 24 nt, Human
agugcaguggcgugaucucagcuc

SEQ ID NO: 164475 - RNA, 19 nt, Human
agugcgaggggcuuauggg

SEQ ID NO: 164476 - RNA, 19 nt, Human
agugcgaggggcuuauggg

SEQ ID NO: 164477 - RNA, 18 nt, Human
agugcugggauuacaggc

SEQ ID NO: 164478 - RNA, 22 nt, Human
aguggccaaugaccuacagagc

SEQ ID NO: 164479 - RNA, 24 nt, Human
aguggcgugaucucagcucacugc

SEQ ID NO: 164480 - RNA, 18 nt, Human
aguggggugaaggcaggc

SEQ ID NO: 164481 - RNA, 23 nt, Human
auaaaacagcaaaaguagcaaaa

SEQ ID NO: 164482 - RNA, 23 nt, Human
auaaaacagcaaaaguagcaaaa

SEQ ID NO: 164483 - RNA, 18 nt, Human
auccggucaaauaaugcc

SEQ ID NO: 164484 - RNA, 25 nt, Human
aucugccucuuugcaccucucacca

SEQ ID NO: 164485 - RNA, 25 nt, Human
aucugccucuuugcaccucucacca

SEQ ID NO: 164486 - RNA, 18 nt, Human
auggggagccgcccagag

SEQ ID NO: 164487 - RNA, 22 nt, Human
augggguuucaccauguuggcc

SEQ ID NO: 164488 - RNA, 23 nt, Human
augggguuucaccauguuggccg

SEQ ID NO: 164489 - RNA, 24 nt, Human
augggguuucaccauguuggccgg

SEQ ID NO: 164490 - RNA, 21 nt, Human
auuaaaaaaaaaaaaaaaaaa

SEQ ID NO: 164491 - RNA, 24 nt, Human
auuuuuguauuuuuaguagagaug

SEQ ID NO: 164492 - RNA, 21 nt, Human
caaagagguaaacaacuuucc

SEQ ID NO: 164493 - RNA, 24 nt, Human
caaauaaugccucgggugccaucc

SEQ ID NO: 164494 - RNA, 21 nt, Human
caacacugcccccaaccuggc

SEQ ID NO: 164495 - RNA, 21 nt, Human
caacacugcccccaaccuggc

SEQ ID NO: 164496 - RNA, 24 nt, Human
caccagcagguggagaggaggugg

SEQ ID NO: 164497 - RNA, 24 nt, Human
caccagcagguggagaggaggugg

SEQ ID NO: 164498 - RNA, 21 nt, Human
caccauguuggccgggcuggu

SEQ ID NO: 164499 - RNA, 24 nt, Human
caccauguuggccgggcuggucuc

SEQ ID NO: 164500 - RNA, 24 nt, Human
cacccaggcuggagugcaguggcg

SEQ ID NO: 164501 - RNA, 23 nt, Human
caccuucaaucgaggcacgaagc

SEQ ID NO: 164502 - RNA, 23 nt, Human
caccuucaaucgaggcacgaagc

SEQ ID NO: 164503 - RNA, 24 nt, Human
cacuaugcacagcuaauuuuugua

SEQ ID NO: 164504 - RNA, 22 nt, Human
cacucugucacccaggcuggag

SEQ ID NO: 164505 - RNA, 23 nt, Human
cacucugucacccaggcuggagu

SEQ ID NO: 164506 - RNA, 24 nt, Human
cacucugucacccaggcuggagug

SEQ ID NO: 164507 - RNA, 23 nt, Human
cacugcaaccucugccuucuggg

SEQ ID NO: 164508 - RNA, 20 nt, Human
cacugcaugccagcaguccc

SEQ ID NO: 164509 - RNA, 18 nt, Human
cacugcccccaaccuggc

SEQ ID NO: 164510 - RNA, 25 nt, Human
cacugcccccaaccuggccuucgcc

SEQ ID NO: 164511 - RNA, 25 nt, Human
cacugcccccaaccuggccuucgcc

SEQ ID NO: 164512 - RNA, 21 nt, Human
cacuuuguguuuucuucauag

SEQ ID NO: 164513 - RNA, 21 nt, Human
cacuuuguguuuucuucauag

SEQ ID NO: 164514 - RNA, 18 nt, Human
cagaaagcucucacuugc

SEQ ID NO: 164515 - RNA, 19 nt, Human
cagaacacagggcuaagac

SEQ ID NO: 164516 - RNA, 19 nt, Human
cagaccaaaccgacaggag

SEQ ID NO: 164517 - RNA, 19 nt, Human
cagaccaaaccgacaggag

SEQ ID NO: 164518 - RNA, 21 nt, Human
cagagugaagaucucccacag

SEQ ID NO: 164519 - RNA, 18 nt, Human
cagcaaaaguagcaaaaa

SEQ ID NO: 164520 - RNA, 18 nt, Human
cagcaaaaguagcaaaaa

SEQ ID NO: 164521 - RNA, 20 nt, Human
cagcaaagcaaacuaguauc

SEQ ID NO: 164522 - RNA, 20 nt, Human
cagcaaagcaaacuaguauc

SEQ ID NO: 164523 - RNA, 20 nt, Human
cagccaccaggagcaucuua

SEQ ID NO: 164524 - RNA, 20 nt, Human
cagccaccaggagcaucuua

SEQ ID NO: 164525 - RNA, 20 nt, Human
cagccuccugaguagcuggg

SEQ ID NO: 164526 - RNA, 22 nt, Human
cagcggcggcgccucacuuucc

SEQ ID NO: 164527 - RNA, 22 nt, Human
cagcggcggcgccucacuuucc

SEQ ID NO: 164528 - RNA, 19 nt, Human
cagcuucugguuccuuccu

SEQ ID NO: 164529 - RNA, 18 nt, Human
caggaagcucucacuugc

SEQ ID NO: 164530 - RNA, 21 nt, Human
cagguuugaauucuuugccau

SEQ ID NO: 164531 - RNA, 23 nt, Human
cauaacggaccuuguagccucca

SEQ ID NO: 164532 - RNA, 20 nt, Human
caugccagcagucccgcauc

SEQ ID NO: 164533 - RNA, 21 nt, Human
ccacaucuccauggauacucc

SEQ ID NO: 164534 - RNA, 21 nt, Human
ccacaucuccauggauacucc

SEQ ID NO: 164535 - RNA, 23 nt, Human
ccaccuaucuggggcagagguug

SEQ ID NO: 164536 - RNA, 23 nt, Human
ccaccuaucuggggcagagguug

SEQ ID NO: 164537 - RNA, 24 nt, Human
cccaaagccccagugacguugcuc

SEQ ID NO: 164538 - RNA, 18 nt, Human
cccacaggagcaccccga

SEQ ID NO: 164539 - RNA, 22 nt, Human
cccacuggaagggcauuugaac

SEQ ID NO: 164540 - RNA, 21 nt, Human
cccagggccacaacacugccc

SEQ ID NO: 164541 - RNA, 21 nt, Human
cccccaaccuggccuucgccu

SEQ ID NO: 164542 - RNA, 21 nt, Human
cccccaaccuggccuucgccu

SEQ ID NO: 164543 - RNA, 24 nt, Human
cccccaguuuggggcugggcccca

SEQ ID NO: 164544 - RNA, 20 nt, Human
ccccccuccuccagaacgca

SEQ ID NO: 164545 - RNA, 20 nt, Human
ccccccuccuccagaacgca

SEQ ID NO: 164546 - RNA, 19 nt, Human
cccccuccuccagaacgca

SEQ ID NO: 164547 - RNA, 24 nt, Human
ccccgagcucggaccggagaaaag

SEQ ID NO: 164548 - RNA, 22 nt, Human
ccccggcgccgcggcgugcccg

SEQ ID NO: 164549 - RNA, 21 nt, Human
ccccgggcccgcggcgugccc

SEQ ID NO: 164550 - RNA, 19 nt, Human
cccgauggguaaaucucug

SEQ ID NO: 164551 - RNA, 20 nt, Human
cccgccgcccccgggcucug

SEQ ID NO: 164552 - RNA, 18 nt, Human
cccgcguccccggcuccg

SEQ ID NO: 164553 - RNA, 18 nt, Human
cccgcguccccggcuccg

SEQ ID NO: 164554 - RNA, 18 nt, Human
ccgccacccggggucucc

SEQ ID NO: 164555 - RNA, 18 nt, Human
ccgccacccggggucucc

SEQ ID NO: 164556 - RNA, 20 nt, Human
ccgccgcccccgggcucugu

SEQ ID NO: 164557 - RNA, 24 nt, Human
ccggcccgccgcccccgggcucug

SEQ ID NO: 164558 - RNA, 24 nt, Human
ccggcccgccgcccccgggcucug

SEQ ID NO: 164559 - RNA, 21 nt, Human
ccggcgccgcggcgugcccga

SEQ ID NO: 164560 - RNA, 18 nt, Human
ccuccagcccgggcggga

SEQ ID NO: 164561 - RNA, 18 nt, Human
ccuccagcccgggcggga

SEQ ID NO: 164562 - RNA, 19 nt, Human
ccuccaggacuggagcagg

SEQ ID NO: 164563 - RNA, 21 nt, Human
ccuccaggcagugccuguggc

SEQ ID NO: 164564 - RNA, 20 nt, Human
ccuccuuuucaaacugaccc

SEQ ID NO: 164565 - RNA, 20 nt, Human
ccuccuuuucaaacugaccc

SEQ ID NO: 164566 - RNA, 24 nt, Human
ccucugccuucuggguucaagcag

SEQ ID NO: 164567 - RNA, 22 nt, Human
ccugaccucaagugaucuaaag

SEQ ID NO: 164568 - RNA, 22 nt, Human
ccugaguagcugggacuacagg

SEQ ID NO: 164569 - RNA, 23 nt, Human
ccugaguagcugggacuacaggu

SEQ ID NO: 164570 - RNA, 24 nt, Human
ccugaguagcugggacuacaggug

SEQ ID NO: 164571 - RNA, 21 nt, Human
ccugcggaggcccccggcgcc

SEQ ID NO: 164572 - RNA, 20 nt, Human
ccugcggaggccccgggccc

SEQ ID NO: 164573 - RNA, 21 nt, Human
ccuuccuguugcgagauccac

SEQ ID NO: 164574 - RNA, 20 nt, Human
ccuugugccccccuccucca

SEQ ID NO: 164575 - RNA, 20 nt, Human
ccuugugccccccuccucca

SEQ ID NO: 164576 - RNA, 25 nt, Human
ccuuuuuuuucuuuuuuguuuuuaa

SEQ ID NO: 164577 - RNA, 25 nt, Human
ccuuuuuuuucuuuuuuguuuuuaa

SEQ ID NO: 164578 - RNA, 18 nt, Human
cgcagugugggguuuggg

SEQ ID NO: 164579 - RNA, 24 nt, Human
cgcccccgggcucuguucgggucc

SEQ ID NO: 164580 - RNA, 24 nt, Human
cgcccccgggcucuguucgggucc

SEQ ID NO: 164581 - RNA, 21 nt, Human
cgccguggcuugugcgagcgg

SEQ ID NO: 164582 - RNA, 21 nt, Human
cgccguggcuugugcgagcgg

SEQ ID NO: 164583 - RNA, 20 nt, Human
cgcggccggcgcucgacucc

SEQ ID NO: 164584 - RNA, 20 nt, Human
cgcggccggcgcucgacucc

SEQ ID NO: 164585 - RNA, 21 nt, Human
cggcgcgcucgcggccgggga

SEQ ID NO: 164586 - RNA, 21 nt, Human
cguacguaacucagaacacag

SEQ ID NO: 164587 - RNA, 24 nt, Human
cuaaagugcugggauuacaggcgu

SEQ ID NO: 164588 - RNA, 23 nt, Human
cucacucugucacccaggcugga

SEQ ID NO: 164589 - RNA, 24 nt, Human
cucacucugucacccaggcuggag

SEQ ID NO: 164590 - RNA, 19 nt, Human
cucacugcaaccucugccu

SEQ ID NO: 164591 - RNA, 24 nt, Human
cucagccuccugaguagcugggac

SEQ ID NO: 164592 - RNA, 24 nt, Human
cucauauggcuuagaauuuauaua

SEQ ID NO: 164593 - RNA, 20 nt, Human
cuccacaggcacaccggggu

SEQ ID NO: 164594 - RNA, 25 nt, Human
cuccacaggcacaccgggguauggg

SEQ ID NO: 164595 - RNA, 23 nt, Human
cuccacaucuccauggauacucc

SEQ ID NO: 164596 - RNA, 19 nt, Human
cucccacucccugcccucc

SEQ ID NO: 164597 - RNA, 21 nt, Human
cucccacucccugcccuccag

SEQ ID NO: 164598 - RNA, 24 nt, Human
cucccuacugcuguagcccugagg

SEQ ID NO: 164599 - RNA, 23 nt, Human
cuccggcccgccgcccccgggcu

SEQ ID NO: 164600 - RNA, 23 nt, Human
cuccggcccgccgcccccgggcu

SEQ ID NO: 164601 - RNA, 23 nt, Human
cucguuggugcaguuacugggcu

SEQ ID NO: 164602 - RNA, 25 nt, Human
cucugguuucgggcaaugaaaaggc

SEQ ID NO: 164603 - RNA, 20 nt, Human
cugcaaccucugccuucugg

SEQ ID NO: 164604 - RNA, 24 nt, Human
cugcaaccucugccuucuggguuc

SEQ ID NO: 164605 - RNA, 20 nt, Human
cugcaugcaauuucuuuucc

SEQ ID NO: 164606 - RNA, 20 nt, Human
cugcggaggcccccggcgcc

SEQ ID NO: 164607 - RNA, 20 nt, Human
cuggagcagggguugugagu

SEQ ID NO: 164608 - RNA, 24 nt, Human
cuggagugcaguggcgugaucuca

SEQ ID NO: 164609 - RNA, 19 nt, Human
cuggugccccggaggcggg

SEQ ID NO: 164610 - RNA, 22 nt, Human
cuucauagcuauauacagagcc

SEQ ID NO: 164611 - RNA, 22 nt, Human
cuucauagcuauauacagagcc

SEQ ID NO: 164612 - RNA, 23 nt, Human
cuugccucagccuccugaguagc

SEQ ID NO: 164613 - RNA, 24 nt, Human
cuugccucagccuccugaguagcu

SEQ ID NO: 164614 - RNA, 22 nt, Human
cuuuuuuuucuuuuuuguuuuu

SEQ ID NO: 164615 - RNA, 21 nt, Human
gaacaauggagccggagcugg

SEQ ID NO: 164616 - RNA, 21 nt, Human
gaacaauggagccggagcugg

SEQ ID NO: 164617 - RNA, 21 nt, Human
gaagcacugaccucccuacug

SEQ ID NO: 164618 - RNA, 21 nt, Human
gaagcacugaccucccuacug

SEQ ID NO: 164619 - RNA, 18 nt, Human
gaagggagggccaguaua

SEQ ID NO: 164620 - RNA, 20 nt, Human
gaagggcauuugaacuucac

SEQ ID NO: 164621 - RNA, 21 nt, Human
gaaggugggucucugugaggg

SEQ ID NO: 164622 - RNA, 19 nt, Human
gacuacaggugccaaccac

SEQ ID NO: 164623 - RNA, 21 nt, Human
gacuacaggugccaaccacua

SEQ ID NO: 164624 - RNA, 18 nt, Human
gagaugggguuucaccau

SEQ ID NO: 164625 - RNA, 24 nt, Human
gagaugggguuucaccauguuggc

SEQ ID NO: 164626 - RNA, 21 nt, Human
gagcaccccgaaagaccacac

SEQ ID NO: 164627 - RNA, 18 nt, Human
gagcaguuuuagcaccag

SEQ ID NO: 164628 - RNA, 22 nt, Human
gaggcggggcggggggagggcu

SEQ ID NO: 164629 - RNA, 21 nt, Human
gauuacaggcgugacgacugc

SEQ ID NO: 164630 - RNA, 24 nt, Human
gcaaugaaaaggcagggguccaaa

SEQ ID NO: 164631 - RNA, 20 nt, Human
gcaccagcagcaaagagaag

SEQ ID NO: 164632 - RNA, 28 nt, Human
gcauuugauuaaaaaaaaaaaaaaaaaa

SEQ ID NO: 164633 - RNA, 21 nt, Human
gccacaacacugcccccaacc

SEQ ID NO: 164634 - RNA, 23 nt, Human
gccacaacacugcccccaaccug

SEQ ID NO: 164635 - RNA, 21 nt, Human
gccauuggcaagcugggcugg

SEQ ID NO: 164636 - RNA, 27 nt, Human
gcccagagugaagaucuccuccuacgg

SEQ ID NO: 164637 - RNA, 23 nt, Human
gcccccgggcucuguucgggucc

SEQ ID NO: 164638 - RNA, 21 nt, Human
gcccgccgcccccgggcucug

SEQ ID NO: 164639 - RNA, 21 nt, Human
gcccgccgcccccgggcucug

SEQ ID NO: 164640 - RNA, 21 nt, Human
gccucgggugccauccacuuc

SEQ ID NO: 164641 - RNA, 22 nt, Human
gccuguucauuggcucccacuc

SEQ ID NO: 164642 - RNA, 22 nt, Human
gccuguucauuggcucccacuc

SEQ ID NO: 164643 - RNA, 22 nt, Human
gccuucuuucccuuuuacaagu

SEQ ID NO: 164644 - RNA, 21 nt, Human
gcgcucggugcucggcgccuu

SEQ ID NO: 164645 - RNA, 21 nt, Human
gcgcucggugcucggcgccuu

SEQ ID NO: 164646 - RNA, 18 nt, Human
gcggggcggggggagggc

SEQ ID NO: 164647 - RNA, 18 nt, Human
gcggggcggggggagggc

SEQ ID NO: 164648 - RNA, 20 nt, Human
gcuccagguggcauaacgga

SEQ ID NO: 164649 - RNA, 19 nt, Human
gcuggagugcaguggcgug

SEQ ID NO: 164650 - RNA, 23 nt, Human
gcuggucucaaacuccugaccuc

SEQ ID NO: 164651 - RNA, 20 nt, Human
gcuggugccccggaggcggg

SEQ ID NO: 164652 - RNA, 20 nt, Human
gcuggugccccggaggcggg

SEQ ID NO: 164653 - RNA, 20 nt, Human
ggacaaagagguaaacaacu

SEQ ID NO: 164654 - RNA, 18 nt, Human
ggacaagcaccugccacc

SEQ ID NO: 164655 - RNA, 21 nt, Human
ggacguggccgcccagcuccc

SEQ ID NO: 164656 - RNA, 23 nt, Human
ggaggcggggcggggggagggcu

SEQ ID NO: 164657 - RNA, 23 nt, Human
ggaggcggggcggggggagggcu

SEQ ID NO: 164658 - RNA, 23 nt, Human
ggaguacugguccaggggcaugg

SEQ ID NO: 164659 - RNA, 18 nt, Human
ggcaauuaccuucccugg

SEQ ID NO: 164660 - RNA, 18 nt, Human
ggcagggagggguguugg

SEQ ID NO: 164661 - RNA, 21 nt, Human
ggcauaacggaccuuguagcc

SEQ ID NO: 164662 - RNA, 22 nt, Human
ggccacaacacugcccccaacc

SEQ ID NO: 164663 - RNA, 22 nt, Human
ggcuggagugcaguggcgugau

SEQ ID NO: 164664 - RNA, 24 nt, Human
ggcuggucucaaacuccugaccuc

SEQ ID NO: 164665 - RNA, 24 nt, Human
gggagugagaggaaaaaggaagaa

SEQ ID NO: 164666 - RNA, 22 nt, Human
gggcugugggugaggguuacag

SEQ ID NO: 164667 - RNA, 20 nt, Human
ggggagggcguguggguggc

SEQ ID NO: 164668 - RNA, 20 nt, Human
ggggagggcguguggguggc

SEQ ID NO: 164669 - RNA, 20 nt, Human
gggguuucaccauguuggcc

SEQ ID NO: 164670 - RNA, 22 nt, Human
ggguuucaccauguuggccggg

SEQ ID NO: 164671 - RNA, 20 nt, Human
ggucaccuucaaucgaggca

SEQ ID NO: 164672 - RNA, 20 nt, Human
ggucaccuucaaucgaggca

SEQ ID NO: 164673 - RNA, 23 nt, Human
guagagaugggguuucaccaugu

SEQ ID NO: 164674 - RNA, 20 nt, Human
gugagaggaaaaaggaagaa

SEQ ID NO: 164675 - RNA, 22 nt, Human
gugucgggaaagcugggggagu

SEQ ID NO: 164676 - RNA, 27 nt, Human
uaaaaagacauguaaauauauacucag

SEQ ID NO: 164677 - RNA, 27 nt, Human
uaaaaagacauguaaauauauacucag

SEQ ID NO: 164678 - RNA, 24 nt, Human
uaaaacagcaaaaguagcaaaaaa

SEQ ID NO: 164679 - RNA, 24 nt, Human
uaaaacagcaaaaguagcaaaaaa

SEQ ID NO: 164680 - RNA, 24 nt, Human
uaaagugcugggauuacaggcgug

SEQ ID NO: 164681 - RNA, 21 nt, Human
uaauauauagcaacugaugcc

SEQ ID NO: 164682 - RNA, 24 nt, Human
uaauuuuuguauuuuuaguagaga

SEQ ID NO: 164683 - RNA, 19 nt, Human
uacaaguacagaacaagug

SEQ ID NO: 164684 - RNA, 20 nt, Human
uacagagcccccaguuuggg

SEQ ID NO: 164685 - RNA, 21 nt, Human
uacccgauggguaaaucucug

SEQ ID NO: 164686 - RNA, 21 nt, Human
uacugcuguagcccugaggac

SEQ ID NO: 164687 - RNA, 21 nt, Human
uacugcuguagcccugaggac

SEQ ID NO: 164688 - RNA, 22 nt, Human
uagagaugggguuucaccaugu

SEQ ID NO: 164689 - RNA, 21 nt, Human
uagcaaaaaauauaugaccuu

SEQ ID NO: 164690 - RNA, 21 nt, Human
uagcaaaaaauauaugaccuu

SEQ ID NO: 164691 - RNA, 22 nt, Human
uagcaccagcagcaaagagaag

SEQ ID NO: 164692 - RNA, 27 nt, Human
uagcugaccccaaagccccagugacgu

SEQ ID NO: 164693 - RNA, 24 nt, Human
uaguagagaugggguuucaccaug

SEQ ID NO: 164694 - RNA, 26 nt, Human
uaguagagaugggguuucaccauguu

SEQ ID NO: 164695 - RNA, 23 nt, Human
uauacagagcccccaguuugggg

SEQ ID NO: 164696 - RNA, 18 nt, Human
uauauagcaacugaugcc

SEQ ID NO: 164697 - RNA, 20 nt, Human
ucaaauggaauguucuauuu

SEQ ID NO: 164698 - RNA, 22 nt, Human
ucacccaggcuggagugcagug

SEQ ID NO: 164699 - RNA, 24 nt, Human
ucacccaggcuggagugcaguggc

SEQ ID NO: 164700 - RNA, 24 nt, Human
ucacucugucacccaggcuggagu

SEQ ID NO: 164701 - RNA, 24 nt, Human
ucacugcaaccucugccuucuggg

SEQ ID NO: 164702 - RNA, 23 nt, Human
ucagccuccugaguagcugggac

SEQ ID NO: 164703 - RNA, 24 nt, Human
uccaucgcccugcggaggccccgg

SEQ ID NO: 164704 - RNA, 19 nt, Human
ucccacaggagcaccccga

SEQ ID NO: 164705 - RNA, 18 nt, Human
ucccacucccugcccucc

SEQ ID NO: 164706 - RNA, 20 nt, Human
ucccacucccugcccuccag

SEQ ID NO: 164707 - RNA, 23 nt, Human
uccccggcuccggcccgccgccc

SEQ ID NO: 164708 - RNA, 23 nt, Human
uccccggcuccggcccgccgccc

SEQ ID NO: 164709 - RNA, 24 nt, Human
ucccuccaggacuggagcaggggu

SEQ ID NO: 164710 - RNA, 20 nt, Human
uccggacguggccgcccagc

SEQ ID NO: 164711 - RNA, 22 nt, Human
uccggacguggccgcccagcuc

SEQ ID NO: 164712 - RNA, 24 nt, Human
uccugaguagcugggacuacaggu

SEQ ID NO: 164713 - RNA, 19 nt, Human
uccugguuggaggucaagg

SEQ ID NO: 164714 - RNA, 18 nt, Human
ucggucccguccggacgu

SEQ ID NO: 164715 - RNA, 18 nt, Human
ucggugcucggcgccucc

SEQ ID NO: 164716 - RNA, 18 nt, Human
ucggugcucggcgccucc

SEQ ID NO: 164717 - RNA, 23 nt, Human
ucuaaagugcugggauuacaggc

SEQ ID NO: 164718 - RNA, 24 nt, Human
ucuaaagugcugggauuacaggcg

SEQ ID NO: 164719 - RNA, 28 nt, Human
ucucacucacucugucacccaggcugga

SEQ ID NO: 164720 - RNA, 19 nt, Human
ucuccagcagagcagggau

SEQ ID NO: 164721 - RNA, 19 nt, Human
ucucccacaggagcacccc

SEQ ID NO: 164722 - RNA, 27 nt, Human
ucugcaguuagagguuggucgguacuc

SEQ ID NO: 164723 - RNA, 27 nt, Human
ucugcaguuagagguuggucgguacuc

SEQ ID NO: 164724 - RNA, 19 nt, Human
ucuggggauguccaauaug

SEQ ID NO: 164725 - RNA, 24 nt, Human
ucugucacccaggcuggagugcag

SEQ ID NO: 164726 - RNA, 20 nt, Human
ucuguuucuuucuccucuga

SEQ ID NO: 164727 - RNA, 23 nt, Human
ucuucauagcuauauacagagcc

SEQ ID NO: 164728 - RNA, 19 nt, Human
ugaaaaggcagggguccaa

SEQ ID NO: 164729 - RNA, 20 nt, Human
ugacccuccuucagcagcuu

SEQ ID NO: 164730 - RNA, 24 nt, Human
ugaccuacagagcaguuuuagcac

SEQ ID NO: 164731 - RNA, 23 nt, Human
ugaccucaagugaucuaaagugc

SEQ ID NO: 164732 - RNA, 24 nt, Human
ugaccucaagugaucuaaagugcu

SEQ ID NO: 164733 - RNA, 24 nt, Human
ugagaggaaaaaggaagaaaaugc

SEQ ID NO: 164734 - RNA, 20 nt, Human
ugagcugaguggggugaagg

SEQ ID NO: 164735 - RNA, 20 nt, Human
ugagcugaguggggugaagg

SEQ ID NO: 164736 - RNA, 18 nt, Human
ugaguggagacaguggcc

SEQ ID NO: 164737 - RNA, 18 nt, Human
ugaguggggugaaggcag

SEQ ID NO: 164738 - RNA, 19 nt, Human
ugaguggggugaaggcagg

SEQ ID NO: 164739 - RNA, 19 nt, Human
ugaguggggugaaggcagg

SEQ ID NO: 164740 - RNA, 22 nt, Human
ugaguggggugaaggcaggcca

SEQ ID NO: 164741 - RNA, 22 nt, Human
ugaguggggugaaggcaggcca

SEQ ID NO: 164742 - RNA, 24 nt, Human
ugaguggggugaaggcaggccaca

SEQ ID NO: 164743 - RNA, 24 nt, Human
ugaguggggugaaggcaggccaca

SEQ ID NO: 164744 - RNA, 18 nt, Human
ugcaccccauuugccaga

SEQ ID NO: 164745 - RNA, 22 nt, Human
ugcaguggcgugaucucagcuc

SEQ ID NO: 164746 - RNA, 18 nt, Human
ugccaccagagugcgagg

SEQ ID NO: 164747 - RNA, 18 nt, Human
ugccaccagagugcgagg

SEQ ID NO: 164748 - RNA, 26 nt, Human
ugccagaaagaucguacguaacucag

SEQ ID NO: 164749 - RNA, 22 nt, Human
ugccucagccuccugaguagcu

SEQ ID NO: 164750 - RNA, 24 nt, Human
ugccucagccuccugaguagcugg

SEQ ID NO: 164751 - RNA, 18 nt, Human
ugccugguggcagggagg

SEQ ID NO: 164752 - RNA, 21 nt, Human
ugccugguggcagggaggggu

SEQ ID NO: 164753 - RNA, 19 nt, Human
ugcgaggggcuuaugggug

SEQ ID NO: 164754 - RNA, 19 nt, Human
ugcgaggggcuuaugggug

SEQ ID NO: 164755 - RNA, 20 nt, Human
ugcugggauuacaggcguga

SEQ ID NO: 164756 - RNA, 19 nt, Human
uggagaggagguggaggga

SEQ ID NO: 164757 - RNA, 19 nt, Human
uggagaggagguggaggga

SEQ ID NO: 164758 - RNA, 24 nt, Human
uggagaggagguggagggagaggu

SEQ ID NO: 164759 - RNA, 24 nt, Human
uggagaggagguggagggagaggu

SEQ ID NO: 164760 - RNA, 19 nt, Human
uggagggagaggugagcug

SEQ ID NO: 164761 - RNA, 19 nt, Human
uggagggagaggugagcug

SEQ ID NO: 164762 - RNA, 19 nt, Human
uggagucuggggagggcgu

SEQ ID NO: 164763 - RNA, 19 nt, Human
uggagucuggggagggcgu

SEQ ID NO: 164764 - RNA, 19 nt, Human
uggagugcaguggcgugau

SEQ ID NO: 164765 - RNA, 24 nt, Human
uggagugcaguggcgugaucucag

SEQ ID NO: 164766 - RNA, 19 nt, Human
uggcaagcugggcugggug

SEQ ID NO: 164767 - RNA, 21 nt, Human
uggcagcaaagaucugccucu

SEQ ID NO: 164768 - RNA, 24 nt, Human
uggccgggcuggucucaaacuccu

SEQ ID NO: 164769 - RNA, 25 nt, Human
uggcggggucgcaagagcuccgcgg

SEQ ID NO: 164770 - RNA, 25 nt, Human
uggcggggucgcaagagcuccgcgg

SEQ ID NO: 164771 - RNA, 24 nt, Human
uggcgugaucucagcucacugcaa

SEQ ID NO: 164772 - RNA, 22 nt, Human
uggcucccacucccugcccucc

SEQ ID NO: 164773 - RNA, 22 nt, Human
uggcucccacucccugcccucc

SEQ ID NO: 164774 - RNA, 22 nt, Human
ugggacagggcacaacacugcc

SEQ ID NO: 164775 - RNA, 22 nt, Human
ugggacuacaggugccaaccac

SEQ ID NO: 164776 - RNA, 22 nt, Human
ugggacuacaggugccaaccac

SEQ ID NO: 164777 - RNA, 22 nt, Human
ugggacuacaggugccaaccac

SEQ ID NO: 164778 - RNA, 24 nt, Human
ugggacuacaggugccaaccacua

SEQ ID NO: 164779 - RNA, 21 nt, Human
ugggaggggaugaaguggcug

SEQ ID NO: 164780 - RNA, 21 nt, Human
ugggaggggaugaaguggcug

SEQ ID NO: 164781 - RNA, 22 nt, Human
ugggaggggaugaaguggcugg

SEQ ID NO: 164782 - RNA, 22 nt, Human
ugggaggggaugaaguggcugg

SEQ ID NO: 164783 - RNA, 22 nt, Human
ugggaggggaugaaguggcugg

SEQ ID NO: 164784 - RNA, 25 nt, Human
ugggagugagaggaaaaaggaagaa

SEQ ID NO: 164785 - RNA, 18 nt, Human
ugggauuacaggcgugac

SEQ ID NO: 164786 - RNA, 19 nt, Human
ugggauuacaggcgugacg

SEQ ID NO: 164787 - RNA, 20 nt, Human
ugggauuacaggcgugacga

SEQ ID NO: 164788 - RNA, 21 nt, Human
ugggauuacaggcgugacgac

SEQ ID NO: 164789 - RNA, 23 nt, Human
ugggauuacaggcgugacgacug

SEQ ID NO: 164790 - RNA, 24 nt, Human
ugggguuucaccauguuggccggg

SEQ ID NO: 164791 - RNA, 23 nt, Human
ugggugaaggcaaaacagaccaa

SEQ ID NO: 164792 - RNA, 23 nt, Human
ugggugaaggcaaaacagaccaa

SEQ ID NO: 164793 - RNA, 19 nt, Human
ugggugaggguuacagcug

SEQ ID NO: 164794 - RNA, 19 nt, Human
ugggugaggguuacagcug

SEQ ID NO: 164795 - RNA, 18 nt, Human
ugguaggcagccggcucc

SEQ ID NO: 164796 - RNA, 18 nt, Human
ugguaggcagccggcucc

SEQ ID NO: 164797 - RNA, 20 nt, Human
ugguaggcagccggcuccug

SEQ ID NO: 164798 - RNA, 20 nt, Human
ugguaggcagccggcuccug

SEQ ID NO: 164799 - RNA, 25 nt, Human
ugguccaacaucugggaggggauga

SEQ ID NO: 164800 - RNA, 22 nt, Human
ugguggcagggagggguguugg

SEQ ID NO: 164801 - RNA, 19 nt, Human
uguagcccugaggacaagg

SEQ ID NO: 164802 - RNA, 21 nt, Human
uguauuuuuaguagagauggg

SEQ ID NO: 164803 - RNA, 18 nt, Human
ugucagagggcaccacag

SEQ ID NO: 164804 - RNA, 24 nt, Human
uguccaugcggugacccuccuuca

SEQ ID NO: 164805 - RNA, 21 nt, Human
ugugaguggagacaguggcca

SEQ ID NO: 164806 - RNA, 18 nt, Human
uguuuaacccacucccuc

SEQ ID NO: 164807 - RNA, 20 nt, Human
uuaaaaaaaaaaaaaaaaaa

SEQ ID NO: 164808 - RNA, 27 nt, Human
uuaaaaaaaaaaaaaaaaaaaaagaau

SEQ ID NO: 164809 - RNA, 28 nt, Human
uuaaaaaaaaaaaaaaaaaaaaagaauc

SEQ ID NO: 164810 - RNA, 22 nt, Human
uuagcaccagcagcaaagagaa

SEQ ID NO: 164811 - RNA, 18 nt, Human
uuaguagagaugggguuu

SEQ ID NO: 164812 - RNA, 22 nt, Human
uuaguagagaugggguuucacc

SEQ ID NO: 164813 - RNA, 24 nt, Human
uuaguagagaugggguuucaccau

SEQ ID NO: 164814 - RNA, 20 nt, Human
uuggcagccggcacugcaug

SEQ ID NO: 164815 - RNA, 33 nt, Human
uuggcagccggcacugcaugcaauuucuuuuuu

SEQ ID NO: 164816 - RNA, 26 nt, Human
uugguccaacaucugggaggggauga

SEQ ID NO: 164817 - RNA, 23 nt, Human
uuguauuuuuaguagagaugggg

SEQ ID NO: 164818 - RNA, 24 nt, Human
uuucaccauguuggccgggcuggu

SEQ ID NO: 164819 - RNA, 19 nt, Human
uuuccaucuuuucugggga

SEQ ID NO: 164820 - RNA, 25 nt, Human
uuucccagcuucugguuccuuccug

SEQ ID NO: 164821 - RNA, 18 nt, Human
uuuggggcugggccccag

SEQ ID NO: 164822 - RNA, 20 nt, Human
uuuuguauuuuuaguagaga

SEQ ID NO: 164823 - RNA, 24 nt, Human
uuuuuaguagagaugggguuucac

SEQ ID NO: 164824 - RNA, 27 nt, Human
uuuuucaaccagcgcagugugggguuu

SEQ ID NO: 164825 - RNA, 20 nt, Human
uuuuuguauuuuuaguagag

SEQ ID NO: 164826 - RNA, 22 nt, Human
uuuuuuucuuuuuuguuuuuaa

SEQ ID NO: 164827 - RNA, 21 nt, Human
uuuuuuuucuuuuuuguuuuu

SEQ ID NO: 164828 - RNA, 21 nt, Human
uuuuuuuucuuuuuuguuuuu

SEQ ID NO: 164829 - RNA, 26 nt, Human
uuuuuuuuuuuuaacgcagagucuca

SEQ ID NO: 164830 - RNA, 20 nt, Human
uuuuuuuuuuuuuuuuuaac

SEQ ID NO: 164831 - RNA, 24 nt, Human
aaagugcugggauuacaggcauga

SEQ ID NO: 164832 - RNA, 19 nt, Human
aacauuaauaucuguagaa

SEQ ID NO: 164833 - RNA, 19 nt, Human
aacauuaauaucuguagaa

SEQ ID NO: 164834 - RNA, 20 nt, Human
aaccuccgccuccccgguuc

SEQ ID NO: 164835 - RNA, 23 nt, Human
aagcagaaggccagcugccagag

SEQ ID NO: 164836 - RNA, 23 nt, Human
aagcagaaggccagcugccagag

SEQ ID NO: 164837 - RNA, 24 nt, Human
aagcugcggccucggggcccccgg

SEQ ID NO: 164838 - RNA, 23 nt, Human
aagggcccucaacauucaccuuu

SEQ ID NO: 164839 - RNA, 19 nt, Human
aagugcugggauuacaggc

SEQ ID NO: 164840 - RNA, 21 nt, Human
aagugcugggauuacaggcau

SEQ ID NO: 164841 - RNA, 26 nt, Human
aagugcugggauuacaggcaugagcc

SEQ ID NO: 164842 - RNA, 22 nt, Human
aaguuuucaacuguauaaaucu

SEQ ID NO: 164843 - RNA, 22 nt, Human
aaguuuucaacuguauaaaucu

SEQ ID NO: 164844 - RNA, 19 nt, Human
aauauagagaaccucaauc

SEQ ID NO: 164845 - RNA, 23 nt, Human
aaucgucugacagcagcauuuaa

SEQ ID NO: 164846 - RNA, 23 nt, Human
aaucgucugacagcagcauuuaa

SEQ ID NO: 164847 - RNA, 18 nt, Human
aaugaugcuucucuuuua

SEQ ID NO: 164848 - RNA, 18 nt, Human
acaggguuucaccauguu

SEQ ID NO: 164849 - RNA, 21 nt, Human
acaggguuucaccauguuggc

SEQ ID NO: 164850 - RNA, 23 nt, Human
acaggguuucaccauguuggcca

SEQ ID NO: 164851 - RNA, 24 nt, Human
acaggguuucaccauguuggccag

SEQ ID NO: 164852 - RNA, 18 nt, Human
acauaaaucuucuccaau

SEQ ID NO: 164853 - RNA, 18 nt, Human
accauguuggccaggcug

SEQ ID NO: 164854 - RNA, 26 nt, Human
acggagcugaaggacucuugccguag

SEQ ID NO: 164855 - RNA, 26 nt, Human
acguauccccaaaacuaucagcagaa

SEQ ID NO: 164856 - RNA, 26 nt, Human
acguauccccaaaacuaucagcagaa

SEQ ID NO: 164857 - RNA, 22 nt, Human
acuuuaguacagaaggaacaac

SEQ ID NO: 164858 - RNA, 18 nt, Human
agaaagcgacgagcccgg

SEQ ID NO: 164859 - RNA, 18 nt, Human
agaaagcgacgagcccgg

SEQ ID NO: 164860 - RNA, 18 nt, Human
agaaagcgacgagcccgg

SEQ ID NO: 164861 - RNA, 19 nt, Human
agaaagcgacgagcccggg

SEQ ID NO: 164862 - RNA, 19 nt, Human
agaaagcgacgagcccggg

SEQ ID NO: 164863 - RNA, 19 nt, Human
agaaagcgacgagcccggg

SEQ ID NO: 164864 - RNA, 19 nt, Human
agaaggaacaacggcgaua

SEQ ID NO: 164865 - RNA, 19 nt, Human
agaaggaacaacggcgaua

SEQ ID NO: 164866 - RNA, 22 nt, Human
agacaacaagcucugggaggca

SEQ ID NO: 164867 - RNA, 22 nt, Human
agacaacaagcucugggaggca

SEQ ID NO: 164868 - RNA, 19 nt, Human
agacaggcugcuugccggg

SEQ ID NO: 164869 - RNA, 21 nt, Human
agaggaagaaaggacucaggc

SEQ ID NO: 164870 - RNA, 21 nt, Human
agaggaagaaaggacucaggc

SEQ ID NO: 164871 - RNA, 19 nt, Human
agcagccaaagaccuaacu

SEQ ID NO: 164872 - RNA, 19 nt, Human
agcgacaucaccagucagc

SEQ ID NO: 164873 - RNA, 18 nt, Human
agcugaaggacucuugcc

SEQ ID NO: 164874 - RNA, 21 nt, Human
aggcucagagcgcgcaggcaa

SEQ ID NO: 164875 - RNA, 18 nt, Human
aguagcugggauuacagg

SEQ ID NO: 164876 - RNA, 19 nt, Human
aguagcugggauuacaggc

SEQ ID NO: 164877 - RNA, 18 nt, Human
agugcugggauuacaggc

SEQ ID NO: 164878 - RNA, 25 nt, Human
auacauccagcaccuauauacugca

SEQ ID NO: 164879 - RNA, 25 nt, Human
auacauccagcaccuauauacugca

SEQ ID NO: 164880 - RNA, 23 nt, Human
auauacaugguucccuuugcaca

SEQ ID NO: 164881 - RNA, 21 nt, Human
auccauuuaaaaucaauacaa

SEQ ID NO: 164882 - RNA, 24 nt, Human
auccccaaaacuaucagcagaaca

SEQ ID NO: 164883 - RNA, 19 nt, Human
auucaccuuuuuccagcca

SEQ ID NO: 164884 - RNA, 25 nt, Human
caaaacacaauacuuuaguacagaa

SEQ ID NO: 164885 - RNA, 25 nt, Human
caaaacacaauacuuuaguacagaa

SEQ ID NO: 164886 - RNA, 20 nt, Human
caaaacuucauuuuccccaa

SEQ ID NO: 164887 - RNA, 20 nt, Human
caaaacuucauuuuccccaa

SEQ ID NO: 164888 - RNA, 24 nt, Human
caaagugcugggauuacaggcaug

SEQ ID NO: 164889 - RNA, 20 nt, Human
caaggaaggcagaacgcacg

SEQ ID NO: 164890 - RNA, 20 nt, Human
caaggaaggcagaacgcacg

SEQ ID NO: 164891 - RNA, 22 nt, Human
caagugacucuccugccucagc

SEQ ID NO: 164892 - RNA, 21 nt, Human
caccauguuggccaggcuggu

SEQ ID NO: 164893 - RNA, 22 nt, Human
caccauguuggccaggcugguc

SEQ ID NO: 164894 - RNA, 27 nt, Human
caccauguuggccaggcuggucuggaa

SEQ ID NO: 164895 - RNA, 26 nt, Human
caccucugcucggugaaaauuaagaa

SEQ ID NO: 164896 - RNA, 26 nt, Human
caccucugcucggugaaaauuaagaa

SEQ ID NO: 164897 - RNA, 18 nt, Human
caccuugaguccuacugg

SEQ ID NO: 164898 - RNA, 18 nt, Human
caccuugaguccuacugg

SEQ ID NO: 164899 - RNA, 20 nt, Human
caccuuuuuccagccagcca

SEQ ID NO: 164900 - RNA, 20 nt, Human
cagaaaccuucuucuccucc

SEQ ID NO: 164901 - RNA, 20 nt, Human
cagaaaccuucuucuccucc

SEQ ID NO: 164902 - RNA, 20 nt, Human
cagaaggaacaacggcgaua

SEQ ID NO: 164903 - RNA, 21 nt, Human
cagaguaaucucagcuuccaa

SEQ ID NO: 164904 - RNA, 19 nt, Human
cagccagaacgcacggcag

SEQ ID NO: 164905 - RNA, 19 nt, Human
cagccagaacgcacggcag

SEQ ID NO: 164906 - RNA, 18 nt, Human
cagccagccacaggcuca

SEQ ID NO: 164907 - RNA, 24 nt, Human
caggguuucaccauguuggccagg

SEQ ID NO: 164908 - RNA, 26 nt, Human
caucuggcccagcaggcccagacugu

SEQ ID NO: 164909 - RNA, 19 nt, Human
cauggggucuggagaaaaa

SEQ ID NO: 164910 - RNA, 21 nt, Human
caugguucccuuugcacagag

SEQ ID NO: 164911 - RNA, 24 nt, Human
cauguuggccaggcuggucuggaa

SEQ ID NO: 164912 - RNA, 18 nt, Human
cauuucaacuaaggucug

SEQ ID NO: 164913 - RNA, 18 nt, Human
cauuucaacuaaggucug

SEQ ID NO: 164914 - RNA, 19 nt, Human
cauuuuagaacauuggcua

SEQ ID NO: 164915 - RNA, 23 nt, Human
ccaaagugcugggauuacaggca

SEQ ID NO: 164916 - RNA, 24 nt, Human
ccaaagugcugggauuacaggcau

SEQ ID NO: 164917 - RNA, 27 nt, Human
ccaccucugcucggugaaaauuaagaa

SEQ ID NO: 164918 - RNA, 18 nt, Human
ccagaaaccuucuucucc

SEQ ID NO: 164919 - RNA, 24 nt, Human
ccagaaaccuucuucuccuccugg

SEQ ID NO: 164920 - RNA, 24 nt, Human
ccagaaaccuucuucuccuccugg

SEQ ID NO: 164921 - RNA, 21 nt, Human
ccagccagccacaggcucagu

SEQ ID NO: 164922 - RNA, 21 nt, Human
ccagcccggagagcagucgcc

SEQ ID NO: 164923 - RNA, 18 nt, Human
ccauuuaaaaucaauaca

SEQ ID NO: 164924 - RNA, 18 nt, Human
ccauuuaaaaucaauaca

SEQ ID NO: 164925 - RNA, 24 nt, Human
cccaaagugcugggauuacaggca

SEQ ID NO: 164926 - RNA, 20 nt, Human
cccagacuguauccauccaa

SEQ ID NO: 164927 - RNA, 26 nt, Human
cccagcguccucaaaaguuacauucc

SEQ ID NO: 164928 - RNA, 24 nt, Human
ccccgcggcgcccgagcuuugugg

SEQ ID NO: 164929 - RNA, 23 nt, Human
ccccgguucaagugacucuccug

SEQ ID NO: 164930 - RNA, 27 nt, Human
ccccugaggucuccccaacaaccaucc

SEQ ID NO: 164931 - RNA, 21 nt, Human
cccgagcuuuguggcggccgc

SEQ ID NO: 164932 - RNA, 26 nt, Human
cccgccagcccggagagcagucgccg

SEQ ID NO: 164933 - RNA, 24 nt, Human
cccggaguagcugggauuacaggc

SEQ ID NO: 164934 - RNA, 21 nt, Human
cccucggaacaucuggcccag

SEQ ID NO: 164935 - RNA, 18 nt, Human
cccugaggucuccccaac

SEQ ID NO: 164936 - RNA, 20 nt, Human
ccgcgcgcgcucccucgccc

SEQ ID NO: 164937 - RNA, 21 nt, Human
ccggagagcagucgccgcgcc

SEQ ID NO: 164938 - RNA, 19 nt, Human
ccggaguagcugggauuac

SEQ ID NO: 164939 - RNA, 23 nt, Human
ccggaguagcugggauuacaggc

SEQ ID NO: 164940 - RNA, 24 nt, Human
ccggaguagcugggauuacaggcg

SEQ ID NO: 164941 - RNA, 21 nt, Human
ccgggccagguacgccgcaug

SEQ ID NO: 164942 - RNA, 20 nt, Human
ccgggcuucagcgcguaccc

SEQ ID NO: 164943 - RNA, 20 nt, Human
ccgggcuucagcgcguaccc

SEQ ID NO: 164944 - RNA, 20 nt, Human
ccucggauuuggggaacgag

SEQ ID NO: 164945 - RNA, 20 nt, Human
ccucggauuuggggaacgag

SEQ ID NO: 164946 - RNA, 24 nt, Human
ccugccucagccucccggaguagc

SEQ ID NO: 164947 - RNA, 25 nt, Human
ccugccucagccucccggaguagcu

SEQ ID NO: 164948 - RNA, 21 nt, Human
ccuugggucuucgccggcgcc

SEQ ID NO: 164949 - RNA, 21 nt, Human
ccuugggucuucgccggcgcc

SEQ ID NO: 164950 - RNA, 21 nt, Human
ccuugggucuucgccggcgcc

SEQ ID NO: 164951 - RNA, 22 nt, Human
cgacaucaccagucagcagcca

SEQ ID NO: 164952 - RNA, 23 nt, Human
cgagaggaagaaaggacucaggc

SEQ ID NO: 164953 - RNA, 23 nt, Human
cgagaggaagaaaggacucaggc

SEQ ID NO: 164954 - RNA, 19 nt, Human
cgagagguuggcugagguc

SEQ ID NO: 164955 - RNA, 23 nt, Human
cgcgaccuguguuguccccgcgc

SEQ ID NO: 164956 - RNA, 23 nt, Human
cgcgaccuguguuguccccgcgc

SEQ ID NO: 164957 - RNA, 21 nt, Human
cgcgaguugcgaaggcucaga

SEQ ID NO: 164958 - RNA, 19 nt, Human
cgcgcaggcaagcugcggc

SEQ ID NO: 164959 - RNA, 19 nt, Human
cgcgcgcgcucccucgccc

SEQ ID NO: 164960 - RNA, 19 nt, Human
cgggcauggacuacgcgca

SEQ ID NO: 164961 - RNA, 25 nt, Human
cguauccccaaaacuaucagcagaa

SEQ ID NO: 164962 - RNA, 21 nt, Human
cguccacuuuacacagaugac

SEQ ID NO: 164963 - RNA, 19 nt, Human
cucacuguaaccuccgccu

SEQ ID NO: 164964 - RNA, 25 nt, Human
cucacuguaaccuccgccuccccgg

SEQ ID NO: 164965 - RNA, 20 nt, Human
cuccagaaaccuucuucucc

SEQ ID NO: 164966 - RNA, 20 nt, Human
cuccagaaaccuucuucucc

SEQ ID NO: 164967 - RNA, 19 nt, Human
cuccccgguucaagugacu

SEQ ID NO: 164968 - RNA, 19 nt, Human
cuccugaagaacaagaacu

SEQ ID NO: 164969 - RNA, 24 nt, Human
cuccugaccucaugauccgccugc

SEQ ID NO: 164970 - RNA, 23 nt, Human
cuccugccucagccucccggagu

SEQ ID NO: 164971 - RNA, 21 nt, Human
cucgcucugucgccaaggcug

SEQ ID NO: 164972 - RNA, 19 nt, Human
cucggggcccccggggcuc

SEQ ID NO: 164973 - RNA, 26 nt, Human
cucuccugccucagccucccggagua

SEQ ID NO: 164974 - RNA, 24 nt, Human
cugaagaacaagaacuucuugugu

SEQ ID NO: 164975 - RNA, 24 nt, Human
cugccucagccucccggaguagcu

SEQ ID NO: 164976 - RNA, 23 nt, Human
cugccucggccucccaaagugcu

SEQ ID NO: 164977 - RNA, 22 nt, Human
cugcggaggagcgccaugacgc

SEQ ID NO: 164978 - RNA, 24 nt, Human
cuggaaugcaauggcaugaucucg

SEQ ID NO: 164979 - RNA, 22 nt, Human
cuguguuguccccggccccgcg

SEQ ID NO: 164980 - RNA, 22 nt, Human
cuguguuguccccggccccgcg

SEQ ID NO: 164981 - RNA, 24 nt, Human
cuuaaaaagauggacguaucccca

SEQ ID NO: 164982 - RNA, 24 nt, Human
cuuaaaaagauggacguaucccca

SEQ ID NO: 164983 - RNA, 20 nt, Human
cuuagagcuugugucuaaaa

SEQ ID NO: 164984 - RNA, 24 nt, Human
cuuguggcaguccacugcuccaga

SEQ ID NO: 164985 - RNA, 24 nt, Human
cuuguggcaguccacugcuccaga

SEQ ID NO: 164986 - RNA, 19 nt, Human
gaaugaguucuuuuaauau

SEQ ID NO: 164987 - RNA, 19 nt, Human
gaaugaguucuuuuaauau

SEQ ID NO: 164988 - RNA, 20 nt, Human
gaaugcaauggcaugaucuc

SEQ ID NO: 164989 - RNA, 22 nt, Human
gaccucaugauccgccugccuc

SEQ ID NO: 164990 - RNA, 22 nt, Human
gaccucaugauccgccugccuc

SEQ ID NO: 164991 - RNA, 24 nt, Human
gaccucaugauccgccugccucgg

SEQ ID NO: 164992 - RNA, 22 nt, Human
gagaggaagaaaggacucaggc

SEQ ID NO: 164993 - RNA, 18 nt, Human
gagcaacuccaaacgcaa

SEQ ID NO: 164994 - RNA, 18 nt, Human
gagcaacuccaaacgcaa

SEQ ID NO: 164995 - RNA, 18 nt, Human
gagcaacuccaaacgcaa

SEQ ID NO: 164996 - RNA, 18 nt, Human
gagcugaaggacucuugc

SEQ ID NO: 164997 - RNA, 20 nt, Human
gaggucuaagaacaaucguc

SEQ ID NO: 164998 - RNA, 25 nt, Human
gaguagcugggauuacaggcgcaca

SEQ ID NO: 164999 - RNA, 18 nt, Human
gauuacaggcaugagcca

SEQ ID NO: 165000 - RNA, 19 nt, Human
gauuacaggcaugagccac

SEQ ID NO: 165001 - RNA, 22 nt, Human
gauuacaggcaugagccacugc

SEQ ID NO: 165002 - RNA, 22 nt, Human
gauuacaggcaugagccacugc

SEQ ID NO: 165003 - RNA, 20 nt, Human
gcacaucuguacccuuuuca

SEQ ID NO: 165004 - RNA, 21 nt, Human
gccgggccagguacgccgcau

SEQ ID NO: 165005 - RNA, 22 nt, Human
gcgaccuguguuguccccgcgc

SEQ ID NO: 165006 - RNA, 22 nt, Human
gcgaccuguguuguccccgcgc

SEQ ID NO: 165007 - RNA, 23 nt, Human
gcgccgggccagguacgccgcau

SEQ ID NO: 165008 - RNA, 31 nt, Human
gcuacagcacaucuguacccuuuucaccugg

SEQ ID NO: 165009 - RNA, 19 nt, Human
gcuggaaugcaauggcaug

SEQ ID NO: 165010 - RNA, 23 nt, Human
gcuggucuggaacuccugaccuc

SEQ ID NO: 165011 - RNA, 21 nt, Human
ggaagaaaggacucaggcuug

SEQ ID NO: 165012 - RNA, 21 nt, Human
ggagaaagcgacgagcccggg

SEQ ID NO: 165013 - RNA, 21 nt, Human
ggagaaagcgacgagcccggg

SEQ ID NO: 165014 - RNA, 21 nt, Human
ggagaaagcgacgagcccggg

SEQ ID NO: 165015 - RNA, 22 nt, Human
ggauuacaggcaugagccacug

SEQ ID NO: 165016 - RNA, 24 nt, Human
ggcuggucuggaacuccugaccuc

SEQ ID NO: 165017 - RNA, 21 nt, Human
gggaacgagaggaagaaagga

SEQ ID NO: 165018 - RNA, 21 nt, Human
gggaacgagaggaagaaagga

SEQ ID NO: 165019 - RNA, 24 nt, Human
ggguguuuccaaagcaaaacacaa

SEQ ID NO: 165020 - RNA, 24 nt, Human
ggguguuuccaaagcaaaacacaa

SEQ ID NO: 165021 - RNA, 22 nt, Human
ggguuucaccauguuggccagg

SEQ ID NO: 165022 - RNA, 18 nt, Human
guagcugggauuacaggc

SEQ ID NO: 165023 - RNA, 24 nt, Human
gugacucuccugccucagccuccc

SEQ ID NO: 165024 - RNA, 20 nt, Human
gugagagggguuacauggug

SEQ ID NO: 165025 - RNA, 21 nt, Human
guggcaguccacugcuccaga

SEQ ID NO: 165026 - RNA, 21 nt, Human
guggcaguccacugcuccaga

SEQ ID NO: 165027 - RNA, 19 nt, Human
guguuucaauuuucuauga

SEQ ID NO: 165028 - RNA, 19 nt, Human
guguuucaauuuucuauga

SEQ ID NO: 165029 - RNA, 22 nt, Human
guguuuccaaagcaaaacacaa

SEQ ID NO: 165030 - RNA, 22 nt, Human
guguuuccaaagcaaaacacaa

SEQ ID NO: 165031 - RNA, 25 nt, Human
uaaaaucaauacaaaaaauaacucc

SEQ ID NO: 165032 - RNA, 25 nt, Human
uaaaaucaauacaaaaaauaacucc

SEQ ID NO: 165033 - RNA, 26 nt, Human
uaaacacaaauaaaucaaaacuucau

SEQ ID NO: 165034 - RNA, 26 nt, Human
uaaacacaaauaaaucaaaacuucau

SEQ ID NO: 165035 - RNA, 24 nt, Human
uaaaucaaaacuucauuuucccca

SEQ ID NO: 165036 - RNA, 24 nt, Human
uaaaucaaaacuucauuuucccca

SEQ ID NO: 165037 - RNA, 21 nt, Human
uaaccuccgccuccccgguuc

SEQ ID NO: 165038 - RNA, 24 nt, Human
uaagaucaguguaaucugcauuca

SEQ ID NO: 165039 - RNA, 24 nt, Human
uaagaucaguguaaucugcauuca

SEQ ID NO: 165040 - RNA, 24 nt, Human
uaauuuuuuguaucuuuaguagag

SEQ ID NO: 165041 - RNA, 25 nt, Human
uaauuuuuuguaucuuuaguagaga

SEQ ID NO: 165042 - RNA, 21 nt, Human
uacaaguggagacaacaagcu

SEQ ID NO: 165043 - RNA, 20 nt, Human
uacagcacaucuguacccuu

SEQ ID NO: 165044 - RNA, 22 nt, Human
uacaggcaugagccacugcgcc

SEQ ID NO: 165045 - RNA, 22 nt, Human
uacaguugcccuguuggggaaa

SEQ ID NO: 165046 - RNA, 23 nt, Human
uacauacauccagcaccuauaua

SEQ ID NO: 165047 - RNA, 23 nt, Human
uacauacauccagcaccuauaua

SEQ ID NO: 165048 - RNA, 21 nt, Human
uacgggcauggacuacgcgca

SEQ ID NO: 165049 - RNA, 21 nt, Human
uacgggcauggacuacgcgca

SEQ ID NO: 165050 - RNA, 21 nt, Human
uacgggcauggacuacgcgca

SEQ ID NO: 165051 - RNA, 21 nt, Human
uacgggcauggacuacgcgca

SEQ ID NO: 165052 - RNA, 24 nt, Human
uacugguccacagccagaacgcac

SEQ ID NO: 165053 - RNA, 24 nt, Human
uacugguccacagccagaacgcac

SEQ ID NO: 165054 - RNA, 22 nt, Human
uacugguccacagccaguacgc

SEQ ID NO: 165055 - RNA, 23 nt, Human
uacuuuaguacagaaggaacaac

SEQ ID NO: 165056 - RNA, 23 nt, Human
uacuuuaguacagaaggaacaac

SEQ ID NO: 165057 - RNA, 22 nt, Human
uagagacaggguuucaccaugu

SEQ ID NO: 165058 - RNA, 19 nt, Human
uagaugccaggaacagaca

SEQ ID NO: 165059 - RNA, 26 nt, Human
uagcaaauagcuauuaaaaaaagaga

SEQ ID NO: 165060 - RNA, 26 nt, Human
uagcaaauagcuauuaaaaaaagaga

SEQ ID NO: 165061 - RNA, 23 nt, Human
uaggaggucuaagaacaaucguc

SEQ ID NO: 165062 - RNA, 23 nt, Human
uaggaggucuaagaacaaucguc

SEQ ID NO: 165063 - RNA, 24 nt, Human
uaguagagacaggguuucaccaug

SEQ ID NO: 165064 - RNA, 25 nt, Human
uaguagagacaggguuucaccaugu

SEQ ID NO: 165065 - RNA, 26 nt, Human
uaguagagacaggguuucaccauguu

SEQ ID NO: 165066 - RNA, 23 nt, Human
uauacaaguggagacaacaagcu

SEQ ID NO: 165067 - RNA, 23 nt, Human
uauacaaguggagacaacaagcu

SEQ ID NO: 165068 - RNA, 25 nt, Human
uauccccaaaacuaucagcagaaca

SEQ ID NO: 165069 - RNA, 25 nt, Human
uauccccaaaacuaucagcagaaca

SEQ ID NO: 165070 - RNA, 18 nt, Human
uaugcugauuacuuuucc

SEQ ID NO: 165071 - RNA, 20 nt, Human
uaugcugauuacuuuuccaa

SEQ ID NO: 165072 - RNA, 21 nt, Human
uauuuuuccaccucugcucgg

SEQ ID NO: 165073 - RNA, 21 nt, Human
uauuuuuccaccucugcucgg

SEQ ID NO: 165074 - RNA, 19 nt, Human
ucacuguaaccuccgccuc

SEQ ID NO: 165075 - RNA, 24 nt, Human
ucacuguaaccuccgccuccccgg

SEQ ID NO: 165076 - RNA, 25 nt, Human
ucacuguaaccuccgccuccccggu

SEQ ID NO: 165077 - RNA, 26 nt, Human
ucacuguaaccuccgccuccccgguu

SEQ ID NO: 165078 - RNA, 27 nt, Human
ucacuguaaccuccgccuccccgguuc

SEQ ID NO: 165079 - RNA, 19 nt, Human
ucaucuccugaagaacaag

SEQ ID NO: 165080 - RNA, 20 nt, Human
uccaaagcaaaacacaauac

SEQ ID NO: 165081 - RNA, 22 nt, Human
uccaaguauuccugaaagaagg

SEQ ID NO: 165082 - RNA, 21 nt, Human
uccacagccagaacgcacggc

SEQ ID NO: 165083 - RNA, 21 nt, Human
uccacagccagaacgcacggc

SEQ ID NO: 165084 - RNA, 22 nt, Human
uccauauauacaaguggagaca

SEQ ID NO: 165085 - RNA, 22 nt, Human
uccauauauacaaguggagaca

SEQ ID NO: 165086 - RNA, 24 nt, Human
ucccaaagugcugggauuacaggc

SEQ ID NO: 165087 - RNA, 24 nt, Human
uccccaaaacuaucagcagaacaa

SEQ ID NO: 165088 - RNA, 24 nt, Human
uccccaaaacuaucagcagaacaa

SEQ ID NO: 165089 - RNA, 23 nt, Human
uccccagcguccucaaaaguuac

SEQ ID NO: 165090 - RNA, 23 nt, Human
uccccgguccucuuccauaucuc

SEQ ID NO: 165091 - RNA, 23 nt, Human
uccccgguccucuuccauaucuc

SEQ ID NO: 165092 - RNA, 23 nt, Human
uccccgguccucuuccauaucuc

SEQ ID NO: 165093 - RNA, 23 nt, Human
uccccgguccucuuccauaucuc

SEQ ID NO: 165094 - RNA, 19 nt, Human
uccccgguucaagugacuc

SEQ ID NO: 165095 - RNA, 24 nt, Human
uccccgguucaagugacucuccug

SEQ ID NO: 165096 - RNA, 18 nt, Human
uccccugaggucucccca

SEQ ID NO: 165097 - RNA, 23 nt, Human
uccccugaggucuccccaacaac

SEQ ID NO: 165098 - RNA, 20 nt, Human
uccuuaugagcauuuuagaa

SEQ ID NO: 165099 - RNA, 18 nt, Human
ucggccucccaaagugcu

SEQ ID NO: 165100 - RNA, 19 nt, Human
ucuccugaagaacaagaac

SEQ ID NO: 165101 - RNA, 24 nt, Human
ucucgcucugucgccaaggcugga

SEQ ID NO: 165102 - RNA, 18 nt, Human
ucugauccauauauacaa

SEQ ID NO: 165103 - RNA, 18 nt, Human
ucugauccauauauacaa

SEQ ID NO: 165104 - RNA, 20 nt, Human
ucugauccauauauacaagu

SEQ ID NO: 165105 - RNA, 19 nt, Human
ucuggagaaaaaacagaau

SEQ ID NO: 165106 - RNA, 21 nt, Human
ucugugacggagcugaaggac

SEQ ID NO: 165107 - RNA, 24 nt, Human
ucuuuaguagagacaggguuucac

SEQ ID NO: 165108 - RNA, 18 nt, Human
ucuuuuuuuuuuuuuuuu

SEQ ID NO: 165109 - RNA, 18 nt, Human
ugaaacaccuuccuauga

SEQ ID NO: 165110 - RNA, 18 nt, Human
ugaaacaccuuccuauga

SEQ ID NO: 165111 - RNA, 19 nt, Human
ugaccaacuuuucccaguu

SEQ ID NO: 165112 - RNA, 21 nt, Human
ugagacagggucuucaauguu

SEQ ID NO: 165113 - RNA, 19 nt, Human
ugagagggguuacauggug

SEQ ID NO: 165114 - RNA, 19 nt, Human
ugagagggguuacauggug

SEQ ID NO: 165115 - RNA, 18 nt, Human
ugaggcuggaucuuuugg

SEQ ID NO: 165116 - RNA, 18 nt, Human
ugaggcuggaucuuuugg

SEQ ID NO: 165117 - RNA, 18 nt, Human
ugaguggguguuuccaaa

SEQ ID NO: 165118 - RNA, 18 nt, Human
ugaguggguguuuccaaa

SEQ ID NO: 165119 - RNA, 21 nt, Human
ugauggaagugaagggcccuc

SEQ ID NO: 165120 - RNA, 19 nt, Human
ugcacaccaaaaugaaaca

SEQ ID NO: 165121 - RNA, 19 nt, Human
ugcacaccaaaaugaaaca

SEQ ID NO: 165122 - RNA, 20 nt, Human
ugccagaauuagaugaaagc

SEQ ID NO: 165123 - RNA, 20 nt, Human
ugccagaauuagaugaaagc

SEQ ID NO: 165124 - RNA, 20 nt, Human
ugccucagccucccggagua

SEQ ID NO: 165125 - RNA, 25 nt, Human
ugccucagccucccggaguagcugg

SEQ ID NO: 165126 - RNA, 21 nt, Human
ugccucggccucccaaagugc

SEQ ID NO: 165127 - RNA, 24 nt, Human
ugccucggccucccaaagugcugg

SEQ ID NO: 165128 - RNA, 23 nt, Human
ugccuucagccugcggugggcuc

SEQ ID NO: 165129 - RNA, 23 nt, Human
ugccuucagccugcggugggcuc

SEQ ID NO: 165130 - RNA, 22 nt, Human
ugccuucagcugcggugggcuc

SEQ ID NO: 165131 - RNA, 22 nt, Human
ugccuucagcugcggugggcuc

SEQ ID NO: 165132 - RNA, 19 nt, Human
uggaaugcaauggcaugau

SEQ ID NO: 165133 - RNA, 24 nt, Human
uggaaugcaauggcaugaucucgg

SEQ ID NO: 165134 - RNA, 18 nt, Human
uggagaguacucugugac

SEQ ID NO: 165135 - RNA, 24 nt, Human
uggcaugaucucggcucacuguaa

SEQ ID NO: 165136 - RNA, 24 nt, Human
uggccaggcuggucuggaacuccu

SEQ ID NO: 165137 - RNA, 25 nt, Human
ugggaggcauggucucccugcucag

SEQ ID NO: 165138 - RNA, 25 nt, Human
ugggaggcauggucucccugcucag

SEQ ID NO: 165139 - RNA, 26 nt, Human
ugggaggcauggucucccugcucagu

SEQ ID NO: 165140 - RNA, 26 nt, Human
ugggaggcauggucucccugcucagu

SEQ ID NO: 165141 - RNA, 18 nt, Human
ugggauuacaggcaugag

SEQ ID NO: 165142 - RNA, 19 nt, Human
ugggauuacaggcaugagc

SEQ ID NO: 165143 - RNA, 21 nt, Human
ugggauuacaggcaugagcca

SEQ ID NO: 165144 - RNA, 22 nt, Human
ugggauuacaggcaugagccac

SEQ ID NO: 165145 - RNA, 22 nt, Human
ugggauuacaggcaugagccac

SEQ ID NO: 165146 - RNA, 23 nt, Human
ugggauuacaggcaugagccacu

SEQ ID NO: 165147 - RNA, 24 nt, Human
ugggauuacaggcaugagccacug

SEQ ID NO: 165148 - RNA, 24 nt, Human
ugggauuacaggcaugagccacug

SEQ ID NO: 165149 - RNA, 21 nt, Human
ugggauuacaggcgcacacca

SEQ ID NO: 165150 - RNA, 19 nt, Human
ugggauuacaggcgcacca

SEQ ID NO: 165151 - RNA, 26 nt, Human
uggggaacgagaggaagaaaggacuc

SEQ ID NO: 165152 - RNA, 26 nt, Human
uggggaacgagaggaagaaaggacuc

SEQ ID NO: 165153 - RNA, 18 nt, Human
uggggcauuuaggagguc

SEQ ID NO: 165154 - RNA, 18 nt, Human
uggggcauuuaggagguc

SEQ ID NO: 165155 - RNA, 19 nt, Human
ugguggcuuguggcagucc

SEQ ID NO: 165156 - RNA, 19 nt, Human
ugguggcuuguggcagucc

SEQ ID NO: 165157 - RNA, 23 nt, Human
uguaaucugcauucaucuugcac

SEQ ID NO: 165158 - RNA, 23 nt, Human
uguaaucugcauucaucuugcac

SEQ ID NO: 165159 - RNA, 21 nt, Human
uguccccgcgccccggcuggg

SEQ ID NO: 165160 - RNA, 20 nt, Human
ugucugauguagguaugagg

SEQ ID NO: 165161 - RNA, 20 nt, Human
ugucugauguagguaugagg

SEQ ID NO: 165162 - RNA, 22 nt, Human
uguggcaguccacugcuccaga

SEQ ID NO: 165163 - RNA, 26 nt, Human
uguucgagagguuggcugaggucccg

SEQ ID NO: 165164 - RNA, 22 nt, Human
uguuggggaaaugaugcuucuc

SEQ ID NO: 165165 - RNA, 19 nt, Human
uuaaaaaaagagagaccaa

SEQ ID NO: 165166 - RNA, 19 nt, Human
uuaaaaaaagagagaccaa

SEQ ID NO: 165167 - RNA, 27 nt, Human
uuaaacacaaauaaaucaaaacuucau

SEQ ID NO: 165168 - RNA, 24 nt, Human
uuacauacauccagcaccuauaua

SEQ ID NO: 165169 - RNA, 24 nt, Human
uuacauacauccagcaccuauaua

SEQ ID NO: 165170 - RNA, 24 nt, Human
uuagagcuugugucuaaaggguaa

SEQ ID NO: 165171 - RNA, 24 nt, Human
uuaguagagacaggguuucaccau

SEQ ID NO: 165172 - RNA, 23 nt, Human
uucaagugacucuccugccucag

SEQ ID NO: 165173 - RNA, 24 nt, Human
uucaagugacucuccugccucagc

SEQ ID NO: 165174 - RNA, 18 nt, Human
uucccugaaagcaaaagu

SEQ ID NO: 165175 - RNA, 21 nt, Human
uucugcuaucauuucaacuaa

SEQ ID NO: 165176 - RNA, 21 nt, Human
uucugcuaucauuucaacuaa

SEQ ID NO: 165177 - RNA, 26 nt, Human
uucuuuuuuuuuuuuuuuuuuugaga

SEQ ID NO: 165178 - RNA, 20 nt, Human
uugaauggcaacgcuccucc

SEQ ID NO: 165179 - RNA, 20 nt, Human
uugaauggcaacgcuccucc

SEQ ID NO: 165180 - RNA, 20 nt, Human
uugaauggcaacgcuccucc

SEQ ID NO: 165181 - RNA, 21 nt, Human
uugagacagggucuucaaugu

SEQ ID NO: 165182 - RNA, 23 nt, Human
uugccgggccgcccucggaacau

SEQ ID NO: 165183 - RNA, 26 nt, Human
uuuaaaaucaauacaaaaaauaacuc

SEQ ID NO: 165184 - RNA, 26 nt, Human
uuuaaaaucaauacaaaaaauaacuc

SEQ ID NO: 165185 - RNA, 24 nt, Human
uuuaaacacaaauaaaucaaaacu

SEQ ID NO: 165186 - RNA, 24 nt, Human
uuuaaacacaaauaaaucaaaacu

SEQ ID NO: 165187 - RNA, 27 nt, Human
uuuauucuuuucuuuucuuuuuuuuuu

SEQ ID NO: 165188 - RNA, 24 nt, Human
uuucaccauguuggccaggcuggu

SEQ ID NO: 165189 - RNA, 27 nt, Human
uuucuuuuuuuuuuuuuuuuuuugggg

SEQ ID NO: 165190 - RNA, 22 nt, Human
uuuuguaucuuuaguagagaca

SEQ ID NO: 165191 - RNA, 21 nt, Human
uuuuuguaucuuuaguagaga

SEQ ID NO: 165192 - RNA, 24 nt, Human
uuuuuuguaucuuuaguagagaca

SEQ ID NO: 165193 - RNA, 23 nt, Human
uuuuuuuuuugagacagggucuu

SEQ ID NO: 165194 - RNA, 20 nt, Human
uuuuuuuuuuugagacaggg

SEQ ID NO: 165195 - RNA, 23 nt, Human
uuuuuuuuuuuugagacaggguc

SEQ ID NO: 165196 - RNA, 25 nt, Human
uuuuuuuuuuuuuuugagacagggg

SEQ ID NO: 165197 - RNA, 20 nt, Human
aaagcccugguccucugcuu

SEQ ID NO: 165198 - RNA, 21 nt, Human
aacaagagugccaggggccca

SEQ ID NO: 165199 - RNA, 22 nt, Human
aacaagagugccaggggcccau

SEQ ID NO: 165200 - RNA, 21 nt, Human
aacaguacagaacgaaccaac

SEQ ID NO: 165201 - RNA, 22 nt, Human
aaccuuuugcauaaaagguaaa

SEQ ID NO: 165202 - RNA, 22 nt, Human
aagcuuugaaagguagcagucc

SEQ ID NO: 165203 - RNA, 20 nt, Human
aauaacaucggaaccugcac

SEQ ID NO: 165204 - RNA, 23 nt, Human
acacacacacacgcacacacaca

SEQ ID NO: 165205 - RNA, 23 nt, Human
acacacacgcacacacacacaca

SEQ ID NO: 165206 - RNA, 23 nt, Human
acacacacgcacacacacacaca

SEQ ID NO: 165207 - RNA, 24 nt, Human
acacgcacacacacacacacagac

SEQ ID NO: 165208 - RNA, 33 nt, Human
acacgcggaugugcacacacacacacacacggu

SEQ ID NO: 165209 - RNA, 20 nt, Human
acaguacagaacgaaccaac

SEQ ID NO: 165210 - RNA, 24 nt, Human
accgucucccugccugggacacac

SEQ ID NO: 165211 - RNA, 25 nt, Human
acgaaccaacugaauuccccacucg

SEQ ID NO: 165212 - RNA, 19 nt, Human
acgcacacacacacacaca

SEQ ID NO: 165213 - RNA, 20 nt, Human
agaaguguuaagucuacaac

SEQ ID NO: 165214 - RNA, 18 nt, Human
agaccccuggggccuccc

SEQ ID NO: 165215 - RNA, 21 nt, Human
agacucagggcccaguaacag

SEQ ID NO: 165216 - RNA, 20 nt, Human
aggcaagaugcgcacgcaca

SEQ ID NO: 165217 - RNA, 19 nt, Human
aggcaagcaagggacagcu

SEQ ID NO: 165218 - RNA, 25 nt, Human
aggcaagcaagggacagcugcccag

SEQ ID NO: 165219 - RNA, 18 nt, Human
auauauaccauauacaca

SEQ ID NO: 165220 - RNA, 19 nt, Human
auguuauauauauauaugu

SEQ ID NO: 165221 - RNA, 18 nt, Human
auucacggcuucccucca

SEQ ID NO: 165222 - RNA, 22 nt, Human
caaaaaauaaaucuccuaaaga

SEQ ID NO: 165223 - RNA, 26 nt, Human
cacacacacacacacacgcacacaca

SEQ ID NO: 165224 - RNA, 21 nt, Human
cacacacacacacacagacca

SEQ ID NO: 165225 - RNA, 26 nt, Human
cacacacacacacacgcacacacaca

SEQ ID NO: 165226 - RNA, 24 nt, Human
cacacacacacacgcacacacaca

SEQ ID NO: 165227 - RNA, 20 nt, Human
cacacacagaccaaagcucu

SEQ ID NO: 165228 - RNA, 25 nt, Human
cacacagaccaaagcucuguguagc

SEQ ID NO: 165229 - RNA, 19 nt, Human
caccagcagcagggagggc

SEQ ID NO: 165230 - RNA, 19 nt, Human
caccagcagcagggagggc

SEQ ID NO: 165231 - RNA, 24 nt, Human
cacugggccccaagaagagaccac

SEQ ID NO: 165232 - RNA, 18 nt, Human
cagccuuuuccucuuccc

SEQ ID NO: 165233 - RNA, 19 nt, Human
caguaacaguacagaacga

SEQ ID NO: 165234 - RNA, 22 nt, Human
cauggcccugcaggcaagcaag

SEQ ID NO: 165235 - RNA, 25 nt, Human
ccaacuauuaacaaccuuuuaggcu

SEQ ID NO: 165236 - RNA, 21 nt, Human
ccaccaugcacugggccccaa

SEQ ID NO: 165237 - RNA, 20 nt, Human
ccaguaacaguacagaacga

SEQ ID NO: 165238 - RNA, 18 nt, Human
ccauguggccagcuaaau

SEQ ID NO: 165239 - RNA, 19 nt, Human
cccagggccaugccugccu

SEQ ID NO: 165240 - RNA, 21 nt, Human
cccagggccaugccugccucc

SEQ ID NO: 165241 - RNA, 21 nt, Human
cccaguaacaguacagaacga

SEQ ID NO: 165242 - RNA, 18 nt, Human
ccccacgccccgcccagg

SEQ ID NO: 165243 - RNA, 20 nt, Human
ccccagaacaaaggccccuc

SEQ ID NO: 165244 - RNA, 21 nt, Human
cccccagaacaaaggccccuc

SEQ ID NO: 165245 - RNA, 20 nt, Human
ccccccagaacaaaggcccc

SEQ ID NO: 165246 - RNA, 24 nt, Human
ccccucccuggaaaccgucucccu

SEQ ID NO: 165247 - RNA, 19 nt, Human
ccccuggggccucccucca

SEQ ID NO: 165248 - RNA, 28 nt, Human
ccccuggggccucccuccacgccccccc

SEQ ID NO: 165249 - RNA, 19 nt, Human
cccguggugcaaaggcaga

SEQ ID NO: 165250 - RNA, 21 nt, Human
cccguggugcaaaggcagagg

SEQ ID NO: 165251 - RNA, 19 nt, Human
cccuggggccucccuccac

SEQ ID NO: 165252 - RNA, 26 nt, Human
ccucuggccaccaugcacugggcccc

SEQ ID NO: 165253 - RNA, 30 nt, Human
cgcggaugugcacacacacacacacacgca

SEQ ID NO: 165254 - RNA, 21 nt, Human
cguugcacagcagcggggaca

SEQ ID NO: 165255 - RNA, 23 nt, Human
cguuguaccagccuuuuccucuu

SEQ ID NO: 165256 - RNA, 23 nt, Human
cucccugccccacggggucccac

SEQ ID NO: 165257 - RNA, 21 nt, Human
cuccuaaagaaaaauccuaua

SEQ ID NO: 165258 - RNA, 18 nt, Human
cuccugaaaaaggacaaa

SEQ ID NO: 165259 - RNA, 18 nt, Human
cugcaggcaagcaaggga

SEQ ID NO: 165260 - RNA, 20 nt, Human
cugguccucugcuugcaugg

SEQ ID NO: 165261 - RNA, 19 nt, Human
gaaccaacugaauucacgg

SEQ ID NO: 165262 - RNA, 25 nt, Human
gaagaauuuguaugaaaauaccagc

SEQ ID NO: 165263 - RNA, 21 nt, Human
gaauucacggcuucccuccaa

SEQ ID NO: 165264 - RNA, 26 nt, Human
gaugcgcacgcacacaggcacacgcg

SEQ ID NO: 165265 - RNA, 24 nt, Human
gcacacaggcacacgcggaugugc

SEQ ID NO: 165266 - RNA, 23 nt, Human
gcacgcacacaggcacacgcgga

SEQ ID NO: 165267 - RNA, 24 nt, Human
gcacugggccccaagaagagacca

SEQ ID NO: 165268 - RNA, 20 nt, Human
gcagcagggagggcugcuag

SEQ ID NO: 165269 - RNA, 18 nt, Human
gcccagacucagggccca

SEQ ID NO: 165270 - RNA, 23 nt, Human
gcccccagggucgcaggccuccg

SEQ ID NO: 165271 - RNA, 18 nt, Human
gcccccccacgccccgcc

SEQ ID NO: 165272 - RNA, 21 nt, Human
gcccccccacgccccgcccag

SEQ ID NO: 165273 - RNA, 19 nt, Human
gcuucccugcaggcucagc

SEQ ID NO: 165274 - RNA, 18 nt, Human
gggaagugggaaagccug

SEQ ID NO: 165275 - RNA, 23 nt, Human
gggacagcugcccagacucaggg

SEQ ID NO: 165276 - RNA, 24 nt, Human
ggugggaagugggaaagccuggag

SEQ ID NO: 165277 - RNA, 22 nt, Human
uaaaacaaaacugcggugccag

SEQ ID NO: 165278 - RNA, 19 nt, Human
uaacaccccaggcacaagg

SEQ ID NO: 165279 - RNA, 22 nt, Human
uacacagcaucuauuuauagaa

SEQ ID NO: 165280 - RNA, 22 nt, Human
uacccguaauuucagucucuga

SEQ ID NO: 165281 - RNA, 24 nt, Human
uagcuuuacaaauauacaggucca

SEQ ID NO: 165282 - RNA, 19 nt, Human
uauauagauauauauaaac

SEQ ID NO: 165283 - RNA, 19 nt, Human
uauauauaccauauacaca

SEQ ID NO: 165284 - RNA, 31 nt, Human
uauauauauauauguauauauaccauaauau

SEQ ID NO: 165285 - RNA, 18 nt, Human
uauauauauguauauaua

SEQ ID NO: 165286 - RNA, 23 nt, Human
uauauguauauauaccauauaca

SEQ ID NO: 165287 - RNA, 23 nt, Human
ucaccuccaacuauuaacaaccu

SEQ ID NO: 165288 - RNA, 23 nt, Human
ucacuggaaucaccuccaacuau

SEQ ID NO: 165289 - RNA, 19 nt, Human
uccacgcccccccacgccc

SEQ ID NO: 165290 - RNA, 22 nt, Human
uccagcuccggggcaggcugga

SEQ ID NO: 165291 - RNA, 24 nt, Human
uccauauauguuauauauauauau

SEQ ID NO: 165292 - RNA, 18 nt, Human
ucccuccacgccccccca

SEQ ID NO: 165293 - RNA, 21 nt, Human
ucccuggaaaccgucucccug

SEQ ID NO: 165294 - RNA, 23 nt, Human
uccugaaaaaggacaaagcaaau

SEQ ID NO: 165295 - RNA, 23 nt, Human
ucgcuggguuaacaaaaucgcac

SEQ ID NO: 165296 - RNA, 25 nt, Human
ucggugcugcagcaccagucaggag

SEQ ID NO: 165297 - RNA, 23 nt, Human
ucugcacuggguccccccagaac

SEQ ID NO: 165298 - RNA, 27 nt, Human
ugaaaaaggacaaagcaaauaaaauaa

SEQ ID NO: 165299 - RNA, 25 nt, Human
ugcacacacacacacacacgcacac

SEQ ID NO: 165300 - RNA, 23 nt, Human
ugccagaaaaagcccugguccuc

SEQ ID NO: 165301 - RNA, 24 nt, Human
ugccaggggcccauaaauagcuuu

SEQ ID NO: 165302 - RNA, 24 nt, Human
uggccaccaugcacugggccccaa

SEQ ID NO: 165303 - RNA, 18 nt, Human
ugggaaagccuggaggug

SEQ ID NO: 165304 - RNA, 21 nt, Human
ugggaacaagagugccagggg

SEQ ID NO: 165305 - RNA, 23 nt, Human
ugggaggggccgagcgcacccug

SEQ ID NO: 165306 - RNA, 22 nt, Human
uggggcuucccugcaggcucag

SEQ ID NO: 165307 - RNA, 19 nt, Human
ugucgggcccagcucccug

SEQ ID NO: 165308 - RNA, 25 nt, Human
ugugcacacacacacacacacgcac

SEQ ID NO: 165309 - RNA, 23 nt, Human
uguuauauauauauauguauaua

SEQ ID NO: 165310 - RNA, 18 nt, Human
uguuggggaccaguggcc

SEQ ID NO: 165311 - RNA, 19 nt, Human
uucacuggaaucaccucca

SEQ ID NO: 165312 - RNA, 21 nt, Human
uucuuggccgucccucuaucg

SEQ ID NO: 165313 - RNA, 21 nt, Human
uugggugacaccucuggccac

SEQ ID NO: 165314 - RNA, 23 nt, Human
uuuuuuuuuuuuuuuuuuucagg

SEQ ID NO: 165315 - RNA, 20 nt, Human
aaacccgggauggggacuaa

SEQ ID NO: 165316 - RNA, 24 nt, Human
acagcaacucugggccaggggccc

SEQ ID NO: 165317 - RNA, 20 nt, Human
accagccuaugugccugcac

SEQ ID NO: 165318 - RNA, 28 nt, Human
acugccuuccuggcuccuccccugucag

SEQ ID NO: 165319 - RNA, 19 nt, Human
agcagcagcagggggaggu

SEQ ID NO: 165320 - RNA, 23 nt, Human
aggacacaggcacggcagcucca

SEQ ID NO: 165321 - RNA, 20 nt, Human
aggcucagccaaacccggga

SEQ ID NO: 165322 - RNA, 18 nt, Human
agggacccaagcuggacu

SEQ ID NO: 165323 - RNA, 22 nt, Human
aggggguucagaggcccagaac

SEQ ID NO: 165324 - RNA, 21 nt, Human
caccagccuaugugccugcac

SEQ ID NO: 165325 - RNA, 19 nt, Human
cagcagcagcagggggagg

SEQ ID NO: 165326 - RNA, 20 nt, Human
cagcagcagcagggggaggu

SEQ ID NO: 165327 - RNA, 21 nt, Human
cagcagcagggggaggugugg

SEQ ID NO: 165328 - RNA, 24 nt, Human
cagcucucagggacccaagcugga

SEQ ID NO: 165329 - RNA, 20 nt, Human
caggacacaggcacggcagc

SEQ ID NO: 165330 - RNA, 22 nt, Human
ccaaacccgggauggggacuaa

SEQ ID NO: 165331 - RNA, 22 nt, Human
ccagaaccuccugcugguauug

SEQ ID NO: 165332 - RNA, 21 nt, Human
ccagcuucucugggcucaggg

SEQ ID NO: 165333 - RNA, 28 nt, Human
cccgucaagacgcuggggcagcagcagc

SEQ ID NO: 165334 - RNA, 18 nt, Human
ccgccgccucacucccag

SEQ ID NO: 165335 - RNA, 24 nt, Human
ccgccgccucacucccagcuccag

SEQ ID NO: 165336 - RNA, 19 nt, Human
ccuccugcugguauuggga

SEQ ID NO: 165337 - RNA, 26 nt, Human
ccugacauuugggccaucaggacaca

SEQ ID NO: 165338 - RNA, 18 nt, Human
ccugcacagccuugagcc

SEQ ID NO: 165339 - RNA, 18 nt, Human
cgccgccucacucccagc

SEQ ID NO: 165340 - RNA, 21 nt, Human
cgccucacucccagcuccagc

SEQ ID NO: 165341 - RNA, 24 nt, Human
cgucaagacgcuggggcagcagca

SEQ ID NO: 165342 - RNA, 18 nt, Human
cuccugcugguauuggga

SEQ ID NO: 165343 - RNA, 23 nt, Human
cuccuguuuucggcaggcuucca

SEQ ID NO: 165344 - RNA, 23 nt, Human
cugagccccaaggcccaaggcca

SEQ ID NO: 165345 - RNA, 20 nt, Human
cuguggcugagccccaaggc

SEQ ID NO: 165346 - RNA, 21 nt, Human
gagcagaacccugacauuugg

SEQ ID NO: 165347 - RNA, 22 nt, Human
gcagcagcagcagggggaggug

SEQ ID NO: 165348 - RNA, 19 nt, Human
gccccaaggcccaaggcca

SEQ ID NO: 165349 - RNA, 21 nt, Human
gccccaaggcccaaggccacc

SEQ ID NO: 165350 - RNA, 21 nt, Human
gccgcgaccccugcacgcggc

SEQ ID NO: 165351 - RNA, 20 nt, Human
gccucacucccagcuccagc

SEQ ID NO: 165352 - RNA, 21 nt, Human
gcuccuccgccgccucacucc

SEQ ID NO: 165353 - RNA, 24 nt, Human
ggcccuuggacacggcacagcaac

SEQ ID NO: 165354 - RNA, 19 nt, Human
ggcuguggcugagccccaa

SEQ ID NO: 165355 - RNA, 20 nt, Human
ggggagguguggggaaaggg

SEQ ID NO: 165356 - RNA, 21 nt, Human
gucaagacgcuggggcagcag

SEQ ID NO: 165357 - RNA, 21 nt, Human
gucaggcuguggcugagcccc

SEQ ID NO: 165358 - RNA, 25 nt, Human
uaaaacgccauuugcuccuguuuuc

SEQ ID NO: 165359 - RNA, 22 nt, Human
uagcagcucuccagccaggcuc

SEQ ID NO: 165360 - RNA, 19 nt, Human
uagcauagcagcucuccag

SEQ ID NO: 165361 - RNA, 19 nt, Human
uaucaaggucgagcacugu

SEQ ID NO: 165362 - RNA, 20 nt, Human
uaucaaggucgagcacugug

SEQ ID NO: 165363 - RNA, 20 nt, Human
uccaagaagccgagcagaaa

SEQ ID NO: 165364 - RNA, 20 nt, Human
ucgagcacugugucaggcug

SEQ ID NO: 165365 - RNA, 25 nt, Human
ucucagggacccaagcuggacuucc

SEQ ID NO: 165366 - RNA, 26 nt, Human
ucucagggacccaagcuggacuuccc

SEQ ID NO: 165367 - RNA, 20 nt, Human
ugguauugggaggcaggagg

SEQ ID NO: 165368 - RNA, 25 nt, Human
ugugccugcacagccuucucgucga

SEQ ID NO: 165369 - RNA, 23 nt, Human
uguggggaaaggggguucagagg

SEQ ID NO: 165370 - RNA, 24 nt, Human
uguggggaaaggggguucagaggc

SEQ ID NO: 165371 - RNA, 26 nt, Human
uguggggaaaggggguucagaggcca

SEQ ID NO: 165372 - RNA, 19 nt, Human
ugugucaggcuguggcuga

SEQ ID NO: 165373 - RNA, 18 nt, Human
uuagcauagcagcucucc

SEQ ID NO: 165374 - RNA, 22 nt, Human
aaauaccaaggccccuucucug

SEQ ID NO: 165375 - RNA, 18 nt, Human
acagcauaucugcacgug

SEQ ID NO: 165376 - RNA, 18 nt, Human
acagcauaucugcgugug

SEQ ID NO: 165377 - RNA, 18 nt, Human
acagcaugucugcgugug

SEQ ID NO: 165378 - RNA, 18 nt, Human
acccaaggcagguggcaa

SEQ ID NO: 165379 - RNA, 20 nt, Human
acgcgugugugugugugugu

SEQ ID NO: 165380 - RNA, 21 nt, Human
agcacgugugcgcgcaugugu

SEQ ID NO: 165381 - RNA, 18 nt, Human
aggcaauaucugcacgug

SEQ ID NO: 165382 - RNA, 28 nt, Human
aggcagguggcaaaaauagccgccaagg

SEQ ID NO: 165383 - RNA, 19 nt, Human
aggcggggauggaggcggg

SEQ ID NO: 165384 - RNA, 19 nt, Human
caaaaauagccgccaaggc

SEQ ID NO: 165385 - RNA, 21 nt, Human
caaaaauagccgccaaggcca

SEQ ID NO: 165386 - RNA, 20 nt, Human
cagaggcggggauggaggcg

SEQ ID NO: 165387 - RNA, 21 nt, Human
cagcacaucugcgcaugggug

SEQ ID NO: 165388 - RNA, 20 nt, Human
cagcaguaggggacuccugg

SEQ ID NO: 165389 - RNA, 23 nt, Human
cagcaguaggggacuccugggac

SEQ ID NO: 165390 - RNA, 21 nt, Human
cagcauaucugcacgugugug

SEQ ID NO: 165391 - RNA, 21 nt, Human
cagcauaucugcaugugugcg

SEQ ID NO: 165392 - RNA, 19 nt, Human
cagcauaucugcgccugug

SEQ ID NO: 165393 - RNA, 19 nt, Human
cagcauaucugcgugcgug

SEQ ID NO: 165394 - RNA, 21 nt, Human
cagcauaucugcgugcgugug

SEQ ID NO: 165395 - RNA, 23 nt, Human
cagcauaucugugcacaugugug

SEQ ID NO: 165396 - RNA, 23 nt, Human
cagcauaucugugcacgugugug

SEQ ID NO: 165397 - RNA, 21 nt, Human
cagcaugucugcgugugugug

SEQ ID NO: 165398 - RNA, 21 nt, Human
cagcuccguccuccauccucc

SEQ ID NO: 165399 - RNA, 23 nt, Human
caggcaauaucugcacgugugug

SEQ ID NO: 165400 - RNA, 24 nt, Human
caggcagcauaucugugcacgugu

SEQ ID NO: 165401 - RNA, 19 nt, Human
caggggacagaggcgggga

SEQ ID NO: 165402 - RNA, 22 nt, Human
cauauccgugugugugugugug

SEQ ID NO: 165403 - RNA, 22 nt, Human
caugucucugugcgugugcgug

SEQ ID NO: 165404 - RNA, 20 nt, Human
ccaggcagcauaucugcacc

SEQ ID NO: 165405 - RNA, 20 nt, Human
ccaggcagcauaucugcgcc

SEQ ID NO: 165406 - RNA, 18 nt, Human
ccccaaccccagcccaca

SEQ ID NO: 165407 - RNA, 21 nt, Human
cccccaaccccagcccacagc

SEQ ID NO: 165408 - RNA, 24 nt, Human
ccucaucaacuaugagccucacgg

SEQ ID NO: 165409 - RNA, 19 nt, Human
ccucgccauggguccccug

SEQ ID NO: 165410 - RNA, 25 nt, Human
cggauaccauaucugcacgugugug

SEQ ID NO: 165411 - RNA, 23 nt, Human
cggcauaucugugcaugugcgug

SEQ ID NO: 165412 - RNA, 20 nt, Human
cggggacagaggcgggcaga

SEQ ID NO: 165413 - RNA, 18 nt, Human
cggggauggaggcgggga

SEQ ID NO: 165414 - RNA, 27 nt, Human
cgugugcgcgcaugugugugcauacau

SEQ ID NO: 165415 - RNA, 20 nt, Human
cucacggcacacguacugca

SEQ ID NO: 165416 - RNA, 21 nt, Human
cugcaugugugugccuguccu

SEQ ID NO: 165417 - RNA, 22 nt, Human
cugugcgugugcgugcauuugg

SEQ ID NO: 165418 - RNA, 21 nt, Human
cuguguguguguguccagggg

SEQ ID NO: 165419 - RNA, 30 nt, Human
gacagaggcgggcagaguugggggagugaa

SEQ ID NO: 165420 - RNA, 24 nt, Human
gagagaccacagucccugcaaccc

SEQ ID NO: 165421 - RNA, 18 nt, Human
gcacgugugcgcgcaugu

SEQ ID NO: 165422 - RNA, 21 nt, Human
gcagcauuaucugugugucca

SEQ ID NO: 165423 - RNA, 24 nt, Human
gcagcuuaucugugugcccaggcg

SEQ ID NO: 165424 - RNA, 19 nt, Human
gcauaucugcaugugugug

SEQ ID NO: 165425 - RNA, 25 nt, Human
gcaugugcgugugugcguacgugug

SEQ ID NO: 165426 - RNA, 22 nt, Human
gccaggggacagaggcggggau

SEQ ID NO: 165427 - RNA, 20 nt, Human
gcccccaaccccagcccaca

SEQ ID NO: 165428 - RNA, 22 nt, Human
gcugugcccccaaccccagccc

SEQ ID NO: 165429 - RNA, 23 nt, Human
gggacugaggcggggacagaggc

SEQ ID NO: 165430 - RNA, 20 nt, Human
ggggguggugucuggccugg

SEQ ID NO: 165431 - RNA, 21 nt, Human
ggggugggggguggugucugg

SEQ ID NO: 165432 - RNA, 22 nt, Human
gucccgggccccaggagagacc

SEQ ID NO: 165433 - RNA, 24 nt, Human
gucucugugcgugugcgugcauuu

SEQ ID NO: 165434 - RNA, 23 nt, Human
gucuguguguguguguccagggg

SEQ ID NO: 165435 - RNA, 21 nt, Human
gugcacgcgugugugugugug

SEQ ID NO: 165436 - RNA, 25 nt, Human
gugugugcauacaugcauccaggua

SEQ ID NO: 165437 - RNA, 27 nt, Human
uaaaauuacagagaucuggggccacca

SEQ ID NO: 165438 - RNA, 20 nt, Human
uaaauauaaauaccaaggcc

SEQ ID NO: 165439 - RNA, 26 nt, Human
uagugugugugucugugugugugugu

SEQ ID NO: 165440 - RNA, 19 nt, Human
uauccgugugugugugugu

SEQ ID NO: 165441 - RNA, 24 nt, Human
uaucugcaugugugcgugcgugug

SEQ ID NO: 165442 - RNA, 25 nt, Human
ucccgggccccaggagagaccacag

SEQ ID NO: 165443 - RNA, 22 nt, Human
ucccugcaacccagucuuccuu

SEQ ID NO: 165444 - RNA, 22 nt, Human
uccuccucgccauggguccccu

SEQ ID NO: 165445 - RNA, 21 nt, Human
ucucugugcgugugcgugcau

SEQ ID NO: 165446 - RNA, 18 nt, Human
ucugcacgugugugagug

SEQ ID NO: 165447 - RNA, 26 nt, Human
ucugcgcaugggugugcguguguaug

SEQ ID NO: 165448 - RNA, 30 nt, Human
ugcauacaugcauccagguagugugugugg

SEQ ID NO: 165449 - RNA, 18 nt, Human
ugcaugugugugccuguc

SEQ ID NO: 165450 - RNA, 23 nt, Human
ugcccccaaccccagcccacagc

SEQ ID NO: 165451 - RNA, 23 nt, Human
ugcgugugcgugcauuugggcag

SEQ ID NO: 165452 - RNA, 22 nt, Human
uggggugggggguggugucugg

SEQ ID NO: 165453 - RNA, 18 nt, Human
ugucuguguguguguguc

SEQ ID NO: 165454 - RNA, 22 nt, Human
ugugcacauguguguguccagg

SEQ ID NO: 165455 - RNA, 18 nt, Human
ugugcacgcgugugugug

SEQ ID NO: 165456 - RNA, 21 nt, Human
ugugcacgcgugugugugugu

SEQ ID NO: 165457 - RNA, 22 nt, Human
ugugcaugugcgugugugcgua

SEQ ID NO: 165458 - RNA, 19 nt, Human
ugugcgcgcaugugugugc

SEQ ID NO: 165459 - RNA, 20 nt, Human
ugugcgcgcaugugugugca

SEQ ID NO: 165460 - RNA, 22 nt, Human
ugugcgcgcaugugugugcaua

SEQ ID NO: 165461 - RNA, 19 nt, Human
ugugcgugugcgugcauuu

SEQ ID NO: 165462 - RNA, 23 nt, Human
uguguauguucaggcagcauguc

SEQ ID NO: 165463 - RNA, 21 nt, Human
ugugucagggggagaaugcag

SEQ ID NO: 165464 - RNA, 33 nt, Human
ugugugcauacaugcauccagguaguguguggu

SEQ ID NO: 165465 - RNA, 18 nt, Human
ugugugcgugcgugugua

SEQ ID NO: 165466 - RNA, 19 nt, Human
ugugugugcauacaugcau

SEQ ID NO: 165467 - RNA, 18 nt, Human
ugugugugucugugugug

SEQ ID NO: 165468 - RNA, 21 nt, Human
ugugugugucugugugugugu

SEQ ID NO: 165469 - RNA, 21 nt, Human
ugugugugucugugugugugu

SEQ ID NO: 165470 - RNA, 22 nt, Human
ugugugugucugugugugugug

SEQ ID NO: 165471 - RNA, 18 nt, Human
uuggggcugcugugcccc

SEQ ID NO: 165472 - RNA, 21 nt, Human
uuguauguucuggcaugucuc

SEQ ID NO: 165473 - RNA, 18 nt, Human
uuuuuuuuuuuuggaggg

SEQ ID NO: 165474 - RNA, 19 nt, Human
uuuuuuuuuuuuuuggagg

SEQ ID NO: 165475 - RNA, 18 nt, Human
uuuuuuuuuuuuuuuuug

SEQ ID NO: 165476 - RNA, 24 nt, Human
uuuuuuuuuuuuuuuuuuggaggg

SEQ ID NO: 165477 - RNA, 19 nt, Human
aauacaguccuaaaugagu

SEQ ID NO: 165478 - RNA, 25 nt, Human
agcauaaaacuguuauggaguuuuc

SEQ ID NO: 165479 - RNA, 24 nt, Human
aguaaaucucuuuugaaacggucu

SEQ ID NO: 165480 - RNA, 21 nt, Human
aguaagagaaaaagggaagaa

SEQ ID NO: 165481 - RNA, 24 nt, Human
agugcccggagcuccgagccuugu

SEQ ID NO: 165482 - RNA, 21 nt, Human
cucuguucagauaaaguccuu

SEQ ID NO: 165483 - RNA, 22 nt, Human
cugaaacuuugugggucaauag

SEQ ID NO: 165484 - RNA, 20 nt, Human
gcccggagcuccgagccuug

SEQ ID NO: 165485 - RNA, 31 nt, Human
uaaaacuguuauggaguuuucaacauggggg

SEQ ID NO: 165486 - RNA, 18 nt, Human
uaagagaaaaagggaaga

SEQ ID NO: 165487 - RNA, 26 nt, Human
uugaaaucaauaaauauaguaagaga

SEQ ID NO: 165488 - RNA, 19 nt, Human
aaaagcacuacucacaaca

SEQ ID NO: 165489 - RNA, 18 nt, Human
aaacgaaagcccaacagc

SEQ ID NO: 165490 - RNA, 23 nt, Human
aaacgaaagcccaacagcagcaa

SEQ ID NO: 165491 - RNA, 22 nt, Human
aaaucacuuuaaacaaagcuga

SEQ ID NO: 165492 - RNA, 21 nt, Human
acauuaaguaacaaaggcaag

SEQ ID NO: 165493 - RNA, 26 nt, Human
agcugaauugcagaaacgaaagccca

SEQ ID NO: 165494 - RNA, 20 nt, Human
aguaacaaaggcaagugaga

SEQ ID NO: 165495 - RNA, 24 nt, Human
aguaacaaaggcaagugagaagaa

SEQ ID NO: 165496 - RNA, 23 nt, Human
agucagaagugagucagagaccc

SEQ ID NO: 165497 - RNA, 25 nt, Human
cgaaagcccaacagcagcuggagac

SEQ ID NO: 165498 - RNA, 18 nt, Human
gaaaagcacuacucacaa

SEQ ID NO: 165499 - RNA, 27 nt, Human
gcugaauugcagaaacgaaagcccagu

SEQ ID NO: 165500 - RNA, 24 nt, Human
uaaacaaagcugaauugcagaaac

SEQ ID NO: 165501 - RNA, 19 nt, Human
ugaaaaaacuaaagucaga

SEQ ID NO: 165502 - RNA, 24 nt, Human
ugaaaaaacuaaagucagaaguga

SEQ ID NO: 165503 - RNA, 24 nt, Human
ugaauugcagaaacgaaagcccaa

SEQ ID NO: 165504 - RNA, 19 nt, Human
ugagaagaaugaaaagcac

SEQ ID NO: 165505 - RNA, 21 nt, Human
ugagaagaaugaaaagcacua

SEQ ID NO: 165506 - RNA, 21 nt, Human
uggugaauauugcauaucugc

SEQ ID NO: 165507 - RNA, 21 nt, Human
uuaucaugauugcgcauggau

SEQ ID NO: 165508 - RNA, 22 nt, Human
uugaaaaaacuaaagucagaag

SEQ ID NO: 165509 - RNA, 21 nt, Human
gauaacgaauaccuggaggaa

SEQ ID NO: 165510 - RNA, 24 nt, Human
uacagugcugcucacccagcaggg

SEQ ID NO: 165511 - RNA, 19 nt, Human
uaccuggaggaaugaacag

SEQ ID NO: 165512 - RNA, 21 nt, Human
ugaaaaauaugaaacaaggca

SEQ ID NO: 165513 - RNA, 22 nt, Human
uuuagcuaugaaaaauaugaaa

SEQ ID NO: 165514 - RNA, 19 nt, Human
aacagcucuggggauuggc

SEQ ID NO: 165515 - RNA, 24 nt, Human
aacuucucccucaaaccugggccc

SEQ ID NO: 165516 - RNA, 24 nt, Human
aaggaccccugccaggugcaccag

SEQ ID NO: 165517 - RNA, 18 nt, Human
aaguggaaaaggaagaaa

SEQ ID NO: 165518 - RNA, 21 nt, Human
aaguggaaaaggaagaaauag

SEQ ID NO: 165519 - RNA, 19 nt, Human
acucaaggaccccugccag

SEQ ID NO: 165520 - RNA, 23 nt, Human
agugauaggagagaagugaggga

SEQ ID NO: 165521 - RNA, 25 nt, Human
augcacaugcucauacgcucauaca

SEQ ID NO: 165522 - RNA, 19 nt, Human
augccucacucaaggaccc

SEQ ID NO: 165523 - RNA, 23 nt, Human
caaguagguugcccuagguggug

SEQ ID NO: 165524 - RNA, 20 nt, Human
caauaaaucaacacauacac

SEQ ID NO: 165525 - RNA, 26 nt, Human
cacacacgcgcaugcacaugcucaua

SEQ ID NO: 165526 - RNA, 19 nt, Human
caccuggacuagagugaga

SEQ ID NO: 165527 - RNA, 24 nt, Human
cagaccccaguccuggaccacugc

SEQ ID NO: 165528 - RNA, 18 nt, Human
ccacugcauccacccagc

SEQ ID NO: 165529 - RNA, 19 nt, Human
ccacugcauccacccagca

SEQ ID NO: 165530 - RNA, 19 nt, Human
ccacugcauccacccagca

SEQ ID NO: 165531 - RNA, 26 nt, Human
ccugugcacacacgcgcaugcacagu

SEQ ID NO: 165532 - RNA, 22 nt, Human
ccugugcacacacgcgcauggu

SEQ ID NO: 165533 - RNA, 19 nt, Human
cuaaguggaaaaggaagaa

SEQ ID NO: 165534 - RNA, 24 nt, Human
cugggccuccuuuugccccaucug

SEQ ID NO: 165535 - RNA, 24 nt, Human
cugugcacacacgcgcaugcacau

SEQ ID NO: 165536 - RNA, 18 nt, Human
gaaaaggaagaaauagug

SEQ ID NO: 165537 - RNA, 25 nt, Human
gaagugcucugcaaacuucucccuc

SEQ ID NO: 165538 - RNA, 21 nt, Human
gagaauagaggguagaaggga

SEQ ID NO: 165539 - RNA, 21 nt, Human
gcaaggacugguggccaccgc

SEQ ID NO: 165540 - RNA, 19 nt, Human
gggccagagcggaugagag

SEQ ID NO: 165541 - RNA, 22 nt, Human
gggcuuuggaagaacagcucug

SEQ ID NO: 165542 - RNA, 21 nt, Human
guaaaacaaguagguugcccu

SEQ ID NO: 165543 - RNA, 25 nt, Human
uaaaacaaguagguugcccuaggug

SEQ ID NO: 165544 - RNA, 24 nt, Human
uacagaauggggcaugccucacuc

SEQ ID NO: 165545 - RNA, 20 nt, Human
uacgcucauacaggcacgug

SEQ ID NO: 165546 - RNA, 21 nt, Human
uaggaaagcagugauaggaga

SEQ ID NO: 165547 - RNA, 21 nt, Human
ucagagcagccacguccucgg

SEQ ID NO: 165548 - RNA, 24 nt, Human
ucauacaggcacguggccuuuccc

SEQ ID NO: 165549 - RNA, 21 nt, Human
ucccucaaaccugggcccaga

SEQ ID NO: 165550 - RNA, 23 nt, Human
ucccucuugggccuagauugggg

SEQ ID NO: 165551 - RNA, 24 nt, Human
uccucggugaugcuaggacucuau

SEQ ID NO: 165552 - RNA, 24 nt, Human
ucugcaaacuucucccucaaaccu

SEQ ID NO: 165553 - RNA, 19 nt, Human
ugagaaagggcuacaggca

SEQ ID NO: 165554 - RNA, 20 nt, Human
ugcucugcaaacuucucccu

SEQ ID NO: 165555 - RNA, 22 nt, Human
ugcucugcaaacuucucccuca

SEQ ID NO: 165556 - RNA, 21 nt, Human
uggaccacugcauccacccag

SEQ ID NO: 165557 - RNA, 20 nt, Human
uggccuuucccucuugggcc

SEQ ID NO: 165558 - RNA, 20 nt, Human
ugggaagugcucugcaaacu

SEQ ID NO: 165559 - RNA, 20 nt, Human
ugggguucuaagccagccug

SEQ ID NO: 165560 - RNA, 21 nt, Human
acuuauccguuuuuaagaaau

SEQ ID NO: 165561 - RNA, 24 nt, Human
uuaaguucaauagcaguuuccuuu

SEQ ID NO: 165562 - RNA, 20 nt, Human
aaaaguccugugaccggaca

SEQ ID NO: 165563 - RNA, 23 nt, Human
aaacugguuggcaauagcucuuu

SEQ ID NO: 165564 - RNA, 21 nt, Human
aagaaacugcauuuucaugcu

SEQ ID NO: 165565 - RNA, 22 nt, Human
aaggagacagggggaaaccuca

SEQ ID NO: 165566 - RNA, 18 nt, Human
aauaaggagacaggggga

SEQ ID NO: 165567 - RNA, 21 nt, Human
aggauguugacagcugggaau

SEQ ID NO: 165568 - RNA, 22 nt, Human
aggcagagggagggagcgcggg

SEQ ID NO: 165569 - RNA, 24 nt, Human
aggcagagggagggagcgcggggc

SEQ ID NO: 165570 - RNA, 19 nt, Human
auaccuucuuucucuuucu

SEQ ID NO: 165571 - RNA, 23 nt, Human
caauagcucuuuugcuggaauuc

SEQ ID NO: 165572 - RNA, 23 nt, Human
cagagggcaaaaaguccugugac

SEQ ID NO: 165573 - RNA, 28 nt, Human
caguggauuucucuucuuuccugagcuu

SEQ ID NO: 165574 - RNA, 24 nt, Human
ccgccugagggacccgggaacaga

SEQ ID NO: 165575 - RNA, 22 nt, Human
ccucuuggggagaggcgggggg

SEQ ID NO: 165576 - RNA, 23 nt, Human
ccugugaccggacagagcagagc

SEQ ID NO: 165577 - RNA, 21 nt, Human
ccuucuuucucuuucucuccc

SEQ ID NO: 165578 - RNA, 22 nt, Human
cucacaguugaagucuuucaga

SEQ ID NO: 165579 - RNA, 25 nt, Human
cucuuucucucccuuccaccgucug

SEQ ID NO: 165580 - RNA, 24 nt, Human
cugggaaugaaaggcagagggagg

SEQ ID NO: 165581 - RNA, 21 nt, Human
cugguuggcaauagcucuuuu

SEQ ID NO: 165582 - RNA, 22 nt, Human
cuuucucuuucucucccuucca

SEQ ID NO: 165583 - RNA, 18 nt, Human
gacccgggaacagagggc

SEQ ID NO: 165584 - RNA, 20 nt, Human
gaguuggagugaccgaggug

SEQ ID NO: 165585 - RNA, 21 nt, Human
gauaccuucuuucucuuucuc

SEQ ID NO: 165586 - RNA, 19 nt, Human
ggaaugaaaggcagaggga

SEQ ID NO: 165587 - RNA, 23 nt, Human
ggcggucuucaaacugguuggca

SEQ ID NO: 165588 - RNA, 24 nt, Human
gggaaugaaaggcagagggaggga

SEQ ID NO: 165589 - RNA, 21 nt, Human
gggggaaaccucaaaucugcc

SEQ ID NO: 165590 - RNA, 20 nt, Human
ggucuaagcaggcagguauu

SEQ ID NO: 165591 - RNA, 23 nt, Human
uacagacuguucucaguggauuu

SEQ ID NO: 165592 - RNA, 19 nt, Human
uaccuucuuucucuuucuc

SEQ ID NO: 165593 - RNA, 23 nt, Human
uacggaccuuuacagacuguucu

SEQ ID NO: 165594 - RNA, 22 nt, Human
ucaaagcuuccaggauguugac

SEQ ID NO: 165595 - RNA, 18 nt, Human
ucaguggauuucucuucu

SEQ ID NO: 165596 - RNA, 22 nt, Human
ucaguuccucuuggggagaggc

SEQ ID NO: 165597 - RNA, 23 nt, Human
ucaguuccucuuggggagaggcg

SEQ ID NO: 165598 - RNA, 18 nt, Human
uccaggauguugacagcu

SEQ ID NO: 165599 - RNA, 19 nt, Human
ucuuucucuuucucucccc

SEQ ID NO: 165600 - RNA, 21 nt, Human
ugaaaggcagagggagggagc

SEQ ID NO: 165601 - RNA, 24 nt, Human
ugacagcugggaaugaaaggcaga

SEQ ID NO: 165602 - RNA, 19 nt, Human
ugcacagagcuuuuauaga

SEQ ID NO: 165603 - RNA, 19 nt, Human
ugcuggaauucaggaucug

SEQ ID NO: 165604 - RNA, 22 nt, Human
uggcaggaugcacagagcuuuu

SEQ ID NO: 165605 - RNA, 20 nt, Human
uggggagaggcgggggggcg

SEQ ID NO: 165606 - RNA, 21 nt, Human
uggggagaggcgggggggcgg

SEQ ID NO: 165607 - RNA, 19 nt, Human
ugggggaucacugguugaa

SEQ ID NO: 165608 - RNA, 23 nt, Human
uucaaacugguuggcaauagcuc

SEQ ID NO: 165609 - RNA, 22 nt, Human
uuccugagcuucaaagcuucca

SEQ ID NO: 165610 - RNA, 18 nt, Human
uucuuucucuuucucucc

SEQ ID NO: 165611 - RNA, 21 nt, Human
uugaagaauacaggaugguga

SEQ ID NO: 165612 - RNA, 21 nt, Human
uuucucuucuuuccugagcuu

SEQ ID NO: 165613 - RNA, 23 nt, Human
uuuuuuuuuugcagcagagaagg

SEQ ID NO: 165614 - RNA, 26 nt, Human
aaaaacaauaaaaaggaccgguaccc

SEQ ID NO: 165615 - RNA, 19 nt, Human
aagaacagaaggaagggcc

SEQ ID NO: 165616 - RNA, 26 nt, Human
acaaaagaacagaaggaagggcagag

SEQ ID NO: 165617 - RNA, 22 nt, Human
acaacagaagggacuuugcagu

SEQ ID NO: 165618 - RNA, 20 nt, Human
acagaauguagaaaugaggc

SEQ ID NO: 165619 - RNA, 18 nt, Human
acuacuacguuacaaggg

SEQ ID NO: 165620 - RNA, 21 nt, Human
aggacagcaggguuaguuuug

SEQ ID NO: 165621 - RNA, 25 nt, Human
aggcaugagaggcaucucagugggg

SEQ ID NO: 165622 - RNA, 21 nt, Human
aggccgaggcgcggcgguggc

SEQ ID NO: 165623 - RNA, 19 nt, Human
auaugcugcuuuauuucug

SEQ ID NO: 165624 - RNA, 18 nt, Human
augcaugucaguaggguu

SEQ ID NO: 165625 - RNA, 22 nt, Human
caaaagaacagaaggaagggca

SEQ ID NO: 165626 - RNA, 20 nt, Human
caagggauucaacuagucac

SEQ ID NO: 165627 - RNA, 23 nt, Human
caagggauucaacuagucacugu

SEQ ID NO: 165628 - RNA, 19 nt, Human
caccgaggccgaggcgcgg

SEQ ID NO: 165629 - RNA, 22 nt, Human
cacugugugcccuuauuugagu

SEQ ID NO: 165630 - RNA, 19 nt, Human
cagaagagggugagcagug

SEQ ID NO: 165631 - RNA, 21 nt, Human
cagcuaaguucaaauguuaau

SEQ ID NO: 165632 - RNA, 21 nt, Human
caggacaggagccccugucag

SEQ ID NO: 165633 - RNA, 21 nt, Human
ccgaggccgaggccggggucc

SEQ ID NO: 165634 - RNA, 19 nt, Human
ccgcugccugcaccgaggc

SEQ ID NO: 165635 - RNA, 22 nt, Human
cgcggcgguggcggcggcggcu

SEQ ID NO: 165636 - RNA, 18 nt, Human
cgcucagaaaacaugcca

SEQ ID NO: 165637 - RNA, 21 nt, Human
cggggaaaccaaacguuagua

SEQ ID NO: 165638 - RNA, 18 nt, Human
cuaaaugcuaauaugauc

SEQ ID NO: 165639 - RNA, 19 nt, Human
cuacacuucccaaaucacc

SEQ ID NO: 165640 - RNA, 26 nt, Human
cucagaaaacaugccacacggggaaa

SEQ ID NO: 165641 - RNA, 20 nt, Human
cugcauuucagguaagcggu

SEQ ID NO: 165642 - RNA, 20 nt, Human
cuuacaucacuaaguggcua

SEQ ID NO: 165643 - RNA, 19 nt, Human
gaaagcacaaaagaacaga

SEQ ID NO: 165644 - RNA, 18 nt, Human
gaagggcagaguucugau

SEQ ID NO: 165645 - RNA, 18 nt, Human
gaggcgcggcgguggcgg

SEQ ID NO: 165646 - RNA, 24 nt, Human
gaggcgcggcgguggcggcggcgg

SEQ ID NO: 165647 - RNA, 20 nt, Human
gcgguggcggcggcggcugc

SEQ ID NO: 165648 - RNA, 23 nt, Human
ggcgcggcgguggcggcggcgac

SEQ ID NO: 165649 - RNA, 18 nt, Human
ggcgguggcggcggcggc

SEQ ID NO: 165650 - RNA, 19 nt, Human
ggggcuaaaauauuuucau

SEQ ID NO: 165651 - RNA, 22 nt, Human
guuaguuuuguuaagcuuccag

SEQ ID NO: 165652 - RNA, 18 nt, Human
uaaguaggugauccugca

SEQ ID NO: 165653 - RNA, 20 nt, Human
uaaguaggugauccugcauu

SEQ ID NO: 165654 - RNA, 22 nt, Human
ucagaaaacaugccacacgggg

SEQ ID NO: 165655 - RNA, 21 nt, Human
ucagcuucucuaaccacuccu

SEQ ID NO: 165656 - RNA, 22 nt, Human
ucccagcugaggcaugagaggc

SEQ ID NO: 165657 - RNA, 22 nt, Human
ucggcggcggcggccgcugccu

SEQ ID NO: 165658 - RNA, 25 nt, Human
ucgugugucuacacgguggguccca

SEQ ID NO: 165659 - RNA, 24 nt, Human
ucucggcggcggcggccgcugccu

SEQ ID NO: 165660 - RNA, 18 nt, Human
ucuugcaugucguguguc

SEQ ID NO: 165661 - RNA, 19 nt, Human
ugacagaauguagaaauga

SEQ ID NO: 165662 - RNA, 22 nt, Human
ugacgauguuccucugaaacag

SEQ ID NO: 165663 - RNA, 25 nt, Human
ugaggcaugagaggcaucucagugg

SEQ ID NO: 165664 - RNA, 18 nt, Human
ugaguuggagcagccgcu

SEQ ID NO: 165665 - RNA, 21 nt, Human
ugaguuggagcagccgcugca

SEQ ID NO: 165666 - RNA, 23 nt, Human
ugcaaguuuccaaacccauaaac

SEQ ID NO: 165667 - RNA, 19 nt, Human
ugcucaacucccccucuag

SEQ ID NO: 165668 - RNA, 22 nt, Human
uggcagauaggauguauucggc

SEQ ID NO: 165669 - RNA, 22 nt, Human
uggcggcggcggcugcggacug

SEQ ID NO: 165670 - RNA, 19 nt, Human
ugggagaaaagacggaagg

SEQ ID NO: 165671 - RNA, 22 nt, Human
ugggagaaaagacggaaggaga

SEQ ID NO: 165672 - RNA, 21 nt, Human
ugggucccagcugaggcauga

SEQ ID NO: 165673 - RNA, 19 nt, Human
ugguugaaaacaacuucca

SEQ ID NO: 165674 - RNA, 19 nt, Human
uguauugucauuacauguu

SEQ ID NO: 165675 - RNA, 18 nt, Human
uguuaagcuuccagaagu

SEQ ID NO: 165676 - RNA, 23 nt, Human
uuaacacauggacaaagagcaga

SEQ ID NO: 165677 - RNA, 22 nt, Human
uuaguacggggaaaggucaguu

SEQ ID NO: 165678 - RNA, 18 nt, Human
uuccaaggugcugcgugg

SEQ ID NO: 165679 - RNA, 19 nt, Human
uugcugcaggguugcuuuu

SEQ ID NO: 165680 - RNA, 18 nt, Human
uuucucaggucuuucuac

SEQ ID NO: 165681 - RNA, 18 nt, Human
uuugcaguccucauuaac

SEQ ID NO: 165682 - RNA, 23 nt, Human
aaagcacuaaaggguuuaagcaa

SEQ ID NO: 165683 - RNA, 24 nt, Human
aaccuguagucccagcuacuuggg

SEQ ID NO: 165684 - RNA, 23 nt, Human
acaaagcacuaaaggguuuaagc

SEQ ID NO: 165685 - RNA, 24 nt, Human
acaaagcgagacuccgucccaaag

SEQ ID NO: 165686 - RNA, 19 nt, Human
accuguagucccagcuacu

SEQ ID NO: 165687 - RNA, 23 nt, Human
accuguagucccagcuacuuggg

SEQ ID NO: 165688 - RNA, 18 nt, Human
acugcacuccagccuggg

SEQ ID NO: 165689 - RNA, 23 nt, Human
acugcacuccagccugggcgaca

SEQ ID NO: 165690 - RNA, 18 nt, Human
agagcuugcagugagcug

SEQ ID NO: 165691 - RNA, 24 nt, Human
agagcuugcagugagcugagaucg

SEQ ID NO: 165692 - RNA, 24 nt, Human
agccugggcgacaaagcgagacuc

SEQ ID NO: 165693 - RNA, 19 nt, Human
aggcuggggcaggagaaug

SEQ ID NO: 165694 - RNA, 20 nt, Human
agguagagcuugcagugagc

SEQ ID NO: 165695 - RNA, 24 nt, Human
agguagagcuugcagugagcugag

SEQ ID NO: 165696 - RNA, 18 nt, Human
aguuuucagccacagucu

SEQ ID NO: 165697 - RNA, 22 nt, Human
auaaaaaucugugugugagauc

SEQ ID NO: 165698 - RNA, 24 nt, Human
aucgugccacugcacuccagccug

SEQ ID NO: 165699 - RNA, 24 nt, Human
caaaaauuucaaaccaucuuccca

SEQ ID NO: 165700 - RNA, 18 nt, Human
caaagcgagacuccgucc

SEQ ID NO: 165701 - RNA, 20 nt, Human
caacgggagguuacagagcu

SEQ ID NO: 165702 - RNA, 19 nt, Human
cacugcacuccagccuggg

SEQ ID NO: 165703 - RNA, 20 nt, Human
cacugcacuccagccugggc

SEQ ID NO: 165704 - RNA, 22 nt, Human
cacugcacuccagccugggcga

SEQ ID NO: 165705 - RNA, 23 nt, Human
cacugcacuccagccugggcgac

SEQ ID NO: 165706 - RNA, 24 nt, Human
cacugcacuccagccugggcgaca

SEQ ID NO: 165707 - RNA, 24 nt, Human
cagcuacuugggaggcuggggcag

SEQ ID NO: 165708 - RNA, 25 nt, Human
cagcucccgcccucgagaaaccccc

SEQ ID NO: 165709 - RNA, 25 nt, Human
ccacagucuccccaacuccggcucu

SEQ ID NO: 165710 - RNA, 20 nt, Human
ccacugcacuccagccuggg

SEQ ID NO: 165711 - RNA, 20 nt, Human
ccacugcacuccagccuggg

SEQ ID NO: 165712 - RNA, 21 nt, Human
ccacugcacuccagccugggc

SEQ ID NO: 165713 - RNA, 21 nt, Human
ccacugcacuccagccugggc

SEQ ID NO: 165714 - RNA, 24 nt, Human
ccacugcacuccagccugggcgac

SEQ ID NO: 165715 - RNA, 21 nt, Human
ccuguagucccagcuacuugg

SEQ ID NO: 165716 - RNA, 20 nt, Human
ccuugggucucgcaccggau

SEQ ID NO: 165717 - RNA, 24 nt, Human
cgagacuccgucccaaagucaaaa

SEQ ID NO: 165718 - RNA, 25 nt, Human
cgauuacaaaaauuucaaaccaucu

SEQ ID NO: 165719 - RNA, 18 nt, Human
cggcucugcuccccucuc

SEQ ID NO: 165720 - RNA, 20 nt, Human
cucgcuggcaccgggcgugg

SEQ ID NO: 165721 - RNA, 19 nt, Human
cugcuccccucuccuuggg

SEQ ID NO: 165722 - RNA, 28 nt, Human
cugguggcuaagccccucggccucccuc

SEQ ID NO: 165723 - RNA, 24 nt, Human
cuugcagugagcugagaucgugcc

SEQ ID NO: 165724 - RNA, 24 nt, Human
cuugguuuagacuugacgcaacgg

SEQ ID NO: 165725 - RNA, 23 nt, Human
gacuccuggcuuuucagcaaccu

SEQ ID NO: 165726 - RNA, 20 nt, Human
gagaaagaaaacauaaaaaa

SEQ ID NO: 165727 - RNA, 23 nt, Human
gagaucgugccacugcacuccag

SEQ ID NO: 165728 - RNA, 18 nt, Human
gaggcuggggcaggagaa

SEQ ID NO: 165729 - RNA, 22 nt, Human
gccacugcacuccagccugggc

SEQ ID NO: 165730 - RNA, 24 nt, Human
gccacugcacuccagccugggcga

SEQ ID NO: 165731 - RNA, 21 nt, Human
gccgugcccccgccccgggcu

SEQ ID NO: 165732 - RNA, 23 nt, Human
gcggcggucccggcccguacccu

SEQ ID NO: 165733 - RNA, 20 nt, Human
gcugagaucgugccacugca

SEQ ID NO: 165734 - RNA, 22 nt, Human
gcuggggcaggagaauggcgug

SEQ ID NO: 165735 - RNA, 23 nt, Human
ggacugaacuaucacaaagcacu

SEQ ID NO: 165736 - RNA, 19 nt, Human
ggcgcgggcggcugguggg

SEQ ID NO: 165737 - RNA, 19 nt, Human
ggcguggggcgcggggggc

SEQ ID NO: 165738 - RNA, 21 nt, Human
gggcguggggcgcggggggcg

SEQ ID NO: 165739 - RNA, 24 nt, Human
ggucauuaccuuauugaguuuaga

SEQ ID NO: 165740 - RNA, 22 nt, Human
gguuggagguacucacggcacc

SEQ ID NO: 165741 - RNA, 21 nt, Human
guggagcgcugcgcagcuccc

SEQ ID NO: 165742 - RNA, 22 nt, Human
guggagcgcugcgcagcucccg

SEQ ID NO: 165743 - RNA, 24 nt, Human
uaaaggcaucauucaaaaggauuu

SEQ ID NO: 165744 - RNA, 30 nt, Human
uacaaaaauuucaaaccaucuucccaccuu

SEQ ID NO: 165745 - RNA, 24 nt, Human
uccagccugggcgacaaagcgaga

SEQ ID NO: 165746 - RNA, 23 nt, Human
ucgugccacugcacuccagccug

SEQ ID NO: 165747 - RNA, 22 nt, Human
ucucgcaccggauucggccccc

SEQ ID NO: 165748 - RNA, 19 nt, Human
ugagaucacaagcagcaac

SEQ ID NO: 165749 - RNA, 22 nt, Human
ugagaucacaagcagcaacuuc

SEQ ID NO: 165750 - RNA, 22 nt, Human
ugagcugagaucgugccacugc

SEQ ID NO: 165751 - RNA, 24 nt, Human
ugcacgccucggcucgcuggcacc

SEQ ID NO: 165752 - RNA, 23 nt, Human
ugccagccuagucuccaggaaga

SEQ ID NO: 165753 - RNA, 21 nt, Human
ugccugggugagaaagaaaac

SEQ ID NO: 165754 - RNA, 19 nt, Human
uggaagaaaccagaaggca

SEQ ID NO: 165755 - RNA, 19 nt, Human
uggcgugaaccaagaggua

SEQ ID NO: 165756 - RNA, 18 nt, Human
ugggaggcuggggcagga

SEQ ID NO: 165757 - RNA, 21 nt, Human
ugggcgacaaagcgagacucc

SEQ ID NO: 165758 - RNA, 23 nt, Human
uggggcaggagaauggcgugaac

SEQ ID NO: 165759 - RNA, 24 nt, Human
uggggcaggagaauggcgugaacc

SEQ ID NO: 165760 - RNA, 19 nt, Human
ugugagaucacaagcagca

SEQ ID NO: 165761 - RNA, 18 nt, Human
uguggcuggaagaaacca

SEQ ID NO: 165762 - RNA, 24 nt, Human
ugugugugagaucacaagcagcaa

SEQ ID NO: 165763 - RNA, 24 nt, Human
uucaaaccaucuucccaccuaggg

SEQ ID NO: 165764 - RNA, 18 nt, Human
uugcagugagcugagauc

SEQ ID NO: 165765 - RNA, 22 nt, Human
uugcagugagcugagaucgugc

SEQ ID NO: 165766 - RNA, 24 nt, Human
uugggugugccuuacucgauuaca

SEQ ID NO: 165767 - RNA, 24 nt, Human
uuuagacuugacgcaacgggaggu

SEQ ID NO: 165768 - RNA, 26 nt, Human
uuuagacuugacgcaacgggagguua

SEQ ID NO: 165769 - RNA, 23 nt, Human
uuucucuuucccugggacugaac

SEQ ID NO: 165770 - RNA, 18 nt, Human
uuuuuuuuucuguucuga

SEQ ID NO: 165771 - RNA, 22 nt, Human
uuuuuuuuuuuuuuuuucuguu

SEQ ID NO: 165772 - RNA, 23 nt, Human
uuuuuuuuuuuuuuuuuucuggg

SEQ ID NO: 165773 - RNA, 21 nt, Human
acacacacacauacacacaca

SEQ ID NO: 165774 - RNA, 25 nt, Human
acacacacacauacacacacacuca

SEQ ID NO: 165775 - RNA, 25 nt, Human
acacacaugcacaugcauaugcaug

SEQ ID NO: 165776 - RNA, 24 nt, Human
acauacacacacacucacaugcag

SEQ ID NO: 165777 - RNA, 31 nt, Human
acaugcacaugcauaugcaugcacacacaca

SEQ ID NO: 165778 - RNA, 25 nt, Human
auacacacacacucacaugcauaca

SEQ ID NO: 165779 - RNA, 24 nt, Human
auacacacacacucacaugcauag

SEQ ID NO: 165780 - RNA, 24 nt, Human
auaugcaugcacacacacacauac

SEQ ID NO: 165781 - RNA, 24 nt, Human
auaugcaugcacacacacacauag

SEQ ID NO: 165782 - RNA, 26 nt, Human
augcacaugcauaugcaugcacacag

SEQ ID NO: 165783 - RNA, 24 nt, Human
auucugcucugggcccuccucacu

SEQ ID NO: 165784 - RNA, 30 nt, Human
caaggagcucacacacaugcacaugcauag

SEQ ID NO: 165785 - RNA, 21 nt, Human
cacacacaugcacaugcauau

SEQ ID NO: 165786 - RNA, 30 nt, Human
cacacauacacacacacucacaugcauaca

SEQ ID NO: 165787 - RNA, 29 nt, Human
cacucacaugcauacacacacggcuaaua

SEQ ID NO: 165788 - RNA, 21 nt, Human
cacucugucaucuccugcacu

SEQ ID NO: 165789 - RNA, 23 nt, Human
cagaauucugcucugggcccucc

SEQ ID NO: 165790 - RNA, 25 nt, Human
caugcacacacacacauacacacac

SEQ ID NO: 165791 - RNA, 23 nt, Human
ccagauagauuuccgggauacag

SEQ ID NO: 165792 - RNA, 21 nt, Human
ccugggcacagaguucugggg

SEQ ID NO: 165793 - RNA, 22 nt, Human
cucacucugucaucuccugcac

SEQ ID NO: 165794 - RNA, 19 nt, Human
cuccugggcacagaguucu

SEQ ID NO: 165795 - RNA, 28 nt, Human
gcacacacacacauacacacacacucac

SEQ ID NO: 165796 - RNA, 20 nt, Human
gccagaauucugcucugggc

SEQ ID NO: 165797 - RNA, 24 nt, Human
gcuaauacugcucaaggcauggcu

SEQ ID NO: 165798 - RNA, 24 nt, Human
ggcuaauacugcucaaggcauggc

SEQ ID NO: 165799 - RNA, 21 nt, Human
gucaucuccugcacugcaguc

SEQ ID NO: 165800 - RNA, 20 nt, Human
guccagauagauuuccggga

SEQ ID NO: 165801 - RNA, 23 nt, Human
uacacacacacucacaugcauac

SEQ ID NO: 165802 - RNA, 22 nt, Human
uagauuuccgggauacagcacc

SEQ ID NO: 165803 - RNA, 23 nt, Human
uagauuuccgggauacagcaccu

SEQ ID NO: 165804 - RNA, 23 nt, Human
ucacacacaugcacaugcauaug

SEQ ID NO: 165805 - RNA, 24 nt, Human
ugcaugcacacacacacauacaca

SEQ ID NO: 165806 - RNA, 23 nt, Human
uggcuccugggcacagaguucug

SEQ ID NO: 165807 - RNA, 30 nt, Human
aaaaaacaaaaacaaaacuaaacaaaaggg

SEQ ID NO: 165808 - RNA, 25 nt, Human
aaaaacagugacagcaaccgguacc

SEQ ID NO: 165809 - RNA, 19 nt, Human
aaaaauaaucagaaggugg

SEQ ID NO: 165810 - RNA, 23 nt, Human
aaaacaaaaacaaaacuaaacaa

SEQ ID NO: 165811 - RNA, 19 nt, Human
aaaggauuacauggguccc

SEQ ID NO: 165812 - RNA, 27 nt, Human
aacuuuuuugcacaaccuucauggaag

SEQ ID NO: 165813 - RNA, 22 nt, Human
aagcagcaugcuguuaaaaaug

SEQ ID NO: 165814 - RNA, 19 nt, Human
aauggaagguuggucugga

SEQ ID NO: 165815 - RNA, 20 nt, Human
acacagaaaaccaaauaauc

SEQ ID NO: 165816 - RNA, 23 nt, Human
accaaaaaacaaaaacaaaacua

SEQ ID NO: 165817 - RNA, 24 nt, Human
accaaaaaacaaaaacaaaacuaa

SEQ ID NO: 165818 - RNA, 24 nt, Human
agaaagucaguacugaucauacga

SEQ ID NO: 165819 - RNA, 20 nt, Human
agaaggaaaguuugaaaccu

SEQ ID NO: 165820 - RNA, 20 nt, Human
agcaaaggacucagagacua

SEQ ID NO: 165821 - RNA, 21 nt, Human
agcacaccuuucucauucacc

SEQ ID NO: 165822 - RNA, 22 nt, Human
cacaccuuucucauucaccaaa

SEQ ID NO: 165823 - RNA, 23 nt, Human
cacaccuuucucauucaccaaaa

SEQ ID NO: 165824 - RNA, 19 nt, Human
caccaaaaaacaaaaacaa

SEQ ID NO: 165825 - RNA, 21 nt, Human
caccaaaaaacaaaaacaaaa

SEQ ID NO: 165826 - RNA, 22 nt, Human
caccaaaaaacaaaaacaaaac

SEQ ID NO: 165827 - RNA, 29 nt, Human
caccaaaaaacaaaaacaaaacuaaacaa

SEQ ID NO: 165828 - RNA, 18 nt, Human
caccaaugcuuacagcua

SEQ ID NO: 165829 - RNA, 21 nt, Human
caccugggaaaaaaacaguga

SEQ ID NO: 165830 - RNA, 24 nt, Human
cagcaugcuguuaaaaaugacagg

SEQ ID NO: 165831 - RNA, 22 nt, Human
cagcuagagaaaauuguuucaa

SEQ ID NO: 165832 - RNA, 22 nt, Human
cagugacagcaacuuggcaaag

SEQ ID NO: 165833 - RNA, 22 nt, Human
caucaaugaaccagggacuccu

SEQ ID NO: 165834 - RNA, 20 nt, Human
cauggguccccuccucucca

SEQ ID NO: 165835 - RNA, 18 nt, Human
ccaacucuggauugaaac

SEQ ID NO: 165836 - RNA, 19 nt, Human
ccugggaaaaaaacaguga

SEQ ID NO: 165837 - RNA, 19 nt, Human
cucuccaauguaugccgca

SEQ ID NO: 165838 - RNA, 25 nt, Human
gaagacauccaucaaugaaccaggg

SEQ ID NO: 165839 - RNA, 18 nt, Human
ggaaaguuugaaaccuca

SEQ ID NO: 165840 - RNA, 23 nt, Human
ggaagguuggucuggauucacug

SEQ ID NO: 165841 - RNA, 18 nt, Human
ggguggggagagagagau

SEQ ID NO: 165842 - RNA, 22 nt, Human
gugaauggaagguuggucugga

SEQ ID NO: 165843 - RNA, 20 nt, Human
guggugcuguguaaaaugga

SEQ ID NO: 165844 - RNA, 20 nt, Human
uaagcaguugacaucaggca

SEQ ID NO: 165845 - RNA, 25 nt, Human
uacauggguccccuccucuccauuc

SEQ ID NO: 165846 - RNA, 23 nt, Human
uaccugaaauuagaaagcacucu

SEQ ID NO: 165847 - RNA, 22 nt, Human
uacgcuuuuuuugcacaaucuu

SEQ ID NO: 165848 - RNA, 18 nt, Human
uagcuggugugaauggaa

SEQ ID NO: 165849 - RNA, 21 nt, Human
uaugacaccugccauuccaug

SEQ ID NO: 165850 - RNA, 20 nt, Human
ucaaaacuucacacagaaaa

SEQ ID NO: 165851 - RNA, 21 nt, Human
ucagaagguggacaugucuuc

SEQ ID NO: 165852 - RNA, 24 nt, Human
ucagagacuacaguuuuccucauc

SEQ ID NO: 165853 - RNA, 23 nt, Human
ucagucauaugacaccugccauu

SEQ ID NO: 165854 - RNA, 26 nt, Human
ucucauucaccaaaaaacaaaaacaa

SEQ ID NO: 165855 - RNA, 26 nt, Human
ugaaaaaaaucaaaauguucuccaaa

SEQ ID NO: 165856 - RNA, 20 nt, Human
ugcauaaaaaagaaucagaa

SEQ ID NO: 165857 - RNA, 18 nt, Human
ugcuuacagcuacagaaa

SEQ ID NO: 165858 - RNA, 19 nt, Human
uggugcuguguaaaaugga

SEQ ID NO: 165859 - RNA, 20 nt, Human
uguggugcuguguaaaaugg

SEQ ID NO: 165860 - RNA, 20 nt, Human
uucacaagaguugcgauuag

SEQ ID NO: 165861 - RNA, 25 nt, Human
uugaauaaugguguuuauuuucuuu

SEQ ID NO: 165862 - RNA, 22 nt, Human
uuuuuuuuuuuuuuuuuggcuu

SEQ ID NO: 165863 - RNA, 20 nt, Human
uuuuuuuuuuuuuuuuuugg

SEQ ID NO: 165864 - RNA, 21 nt, Human
cagcucccccgcaaccccucc

SEQ ID NO: 165865 - RNA, 23 nt, Human
caucaucaucaucaucaucaucu

SEQ ID NO: 165866 - RNA, 22 nt, Human
ccagcucccccgcaaccccucc

SEQ ID NO: 165867 - RNA, 24 nt, Human
ccaucaucaucaucaucaucaucu

SEQ ID NO: 165868 - RNA, 22 nt, Human
cccccgcaaccccuccggaccu

SEQ ID NO: 165869 - RNA, 20 nt, Human
ccgcgcugugcacgcgcugc

SEQ ID NO: 165870 - RNA, 20 nt, Human
ccuccggaccuggagccgcc

SEQ ID NO: 165871 - RNA, 21 nt, Human
ccugcaggcgccucucggugg

SEQ ID NO: 165872 - RNA, 24 nt, Human
ccugcaggcgccucucggugggcu

SEQ ID NO: 165873 - RNA, 19 nt, Human
ccuggagccgccuccgccc

SEQ ID NO: 165874 - RNA, 20 nt, Human
cucccccgcaaccccuccgg

SEQ ID NO: 165875 - RNA, 21 nt, Human
cucccccgcaaccccuccgga

SEQ ID NO: 165876 - RNA, 22 nt, Human
ucaucaucaucaucaucaucuc

SEQ ID NO: 165877 - RNA, 19 nt, Human
ugugcacgcgcugcgcgcg

SEQ ID NO: 165878 - RNA, 22 nt, Human
uuuccagcucccccgcaacccc

SEQ ID NO: 165879 - RNA, 21 nt, Human
aaacauuuuaaggaagugguu

SEQ ID NO: 165880 - RNA, 20 nt, Human
aaccuccuuccccccgccuc

SEQ ID NO: 165881 - RNA, 20 nt, Human
aagugguuuagggauggaag

SEQ ID NO: 165882 - RNA, 22 nt, Human
accuccuuccccccgccuccca

SEQ ID NO: 165883 - RNA, 20 nt, Human
agaaagagaaaguuugggga

SEQ ID NO: 165884 - RNA, 26 nt, Human
agcuaacuacagcccagucuggccuc

SEQ ID NO: 165885 - RNA, 23 nt, Human
aggagccagucaggauuggggag

SEQ ID NO: 165886 - RNA, 18 nt, Human
aggggcugggagugggga

SEQ ID NO: 165887 - RNA, 19 nt, Human
aggggcugggaguggggau

SEQ ID NO: 165888 - RNA, 18 nt, Human
aggucagucccaccgcca

SEQ ID NO: 165889 - RNA, 19 nt, Human
auggaagagaaacacggua

SEQ ID NO: 165890 - RNA, 23 nt, Human
caaccccaggcuccacaggcccc

SEQ ID NO: 165891 - RNA, 19 nt, Human
caccccucagccccaaauc

SEQ ID NO: 165892 - RNA, 20 nt, Human
cagagcucugcccucccucc

SEQ ID NO: 165893 - RNA, 19 nt, Human
cagcccagggucagcucag

SEQ ID NO: 165894 - RNA, 18 nt, Human
cagggucagcucagccuc

SEQ ID NO: 165895 - RNA, 25 nt, Human
cagugggccucugugucucaggccu

SEQ ID NO: 165896 - RNA, 20 nt, Human
ccaaccccaggcuccacagg

SEQ ID NO: 165897 - RNA, 21 nt, Human
ccacccaugcagcuucccuca

SEQ ID NO: 165898 - RNA, 20 nt, Human
ccaggagccuuccccuuccc

SEQ ID NO: 165899 - RNA, 18 nt, Human
ccagucuggccuccagca

SEQ ID NO: 165900 - RNA, 22 nt, Human
ccagucuggccuccagcagccc

SEQ ID NO: 165901 - RNA, 20 nt, Human
cccaccccucagccccaaau

SEQ ID NO: 165902 - RNA, 23 nt, Human
cccaccgccacugucccccucgc

SEQ ID NO: 165903 - RNA, 25 nt, Human
ccccaaauccaagauuucauagccc

SEQ ID NO: 165904 - RNA, 18 nt, Human
ccccaggcuccacaggcc

SEQ ID NO: 165905 - RNA, 21 nt, Human
ccccccgccucccagaacugg

SEQ ID NO: 165906 - RNA, 25 nt, Human
ccccucagccccaaauccaagauuu

SEQ ID NO: 165907 - RNA, 20 nt, Human
ccccucgcagugggccucug

SEQ ID NO: 165908 - RNA, 22 nt, Human
cccucccaccccucagccccaa

SEQ ID NO: 165909 - RNA, 18 nt, Human
cccucccucccaccccuc

SEQ ID NO: 165910 - RNA, 20 nt, Human
ccgccggcagugagggcgag

SEQ ID NO: 165911 - RNA, 21 nt, Human
ccggcagugagggcgagcgag

SEQ ID NO: 165912 - RNA, 24 nt, Human
ccuauccaaccccaggcuccacag

SEQ ID NO: 165913 - RNA, 19 nt, Human
ccuggccaggcucccugcc

SEQ ID NO: 165914 - RNA, 23 nt, Human
cuccaggagccuuccccuucccu

SEQ ID NO: 165915 - RNA, 23 nt, Human
cucccucccaccccucagcccca

SEQ ID NO: 165916 - RNA, 23 nt, Human
cucugcccucccucccaccccuc

SEQ ID NO: 165917 - RNA, 20 nt, Human
cugcccucccucccaccccu

SEQ ID NO: 165918 - RNA, 22 nt, Human
gaugacaagaaguacaaagaaa

SEQ ID NO: 165919 - RNA, 24 nt, Human
gaugacaagaaguacaaagaaaga

SEQ ID NO: 165920 - RNA, 25 nt, Human
gccaccaaccuccuuccccccgccu

SEQ ID NO: 165921 - RNA, 20 nt, Human
gcccagggucagcucagccu

SEQ ID NO: 165922 - RNA, 22 nt, Human
gccuccacuggaggcgagggag

SEQ ID NO: 165923 - RNA, 21 nt, Human
gcucugcccucccucccaccc

SEQ ID NO: 165924 - RNA, 25 nt, Human
ggaaagccuucuuuagggaugaaaa

SEQ ID NO: 165925 - RNA, 20 nt, Human
ggagggcaaagggcauggga

SEQ ID NO: 165926 - RNA, 24 nt, Human
ggauuuucaucuagggugguggga

SEQ ID NO: 165927 - RNA, 20 nt, Human
ggcgagggaggagggcaaag

SEQ ID NO: 165928 - RNA, 21 nt, Human
gggaguggggaugacaagaag

SEQ ID NO: 165929 - RNA, 22 nt, Human
gggucagcucagccuccacugg

SEQ ID NO: 165930 - RNA, 20 nt, Human
gguggugggaacaccagaga

SEQ ID NO: 165931 - RNA, 24 nt, Human
gugggaacaccagagaugucuccu

SEQ ID NO: 165932 - RNA, 20 nt, Human
uacagcccagucuggccucc

SEQ ID NO: 165933 - RNA, 23 nt, Human
uagccuuugagugugcagagcuc

SEQ ID NO: 165934 - RNA, 18 nt, Human
uaggguggugggaacacc

SEQ ID NO: 165935 - RNA, 20 nt, Human
uauccaaccccaggcuccac

SEQ ID NO: 165936 - RNA, 20 nt, Human
ucaggccuggccaggcuccc

SEQ ID NO: 165937 - RNA, 20 nt, Human
uccacaggccccaaauuggc

SEQ ID NO: 165938 - RNA, 21 nt, Human
uccacaggccccaaauuggcu

SEQ ID NO: 165939 - RNA, 18 nt, Human
ucccaccccucagcccca

SEQ ID NO: 165940 - RNA, 20 nt, Human
ucccaccccucagccccaaa

SEQ ID NO: 165941 - RNA, 23 nt, Human
ucccaccgccacugucccccucg

SEQ ID NO: 165942 - RNA, 19 nt, Human
uccccuucccuaggagcca

SEQ ID NO: 165943 - RNA, 19 nt, Human
ugaaaagcuaacuacagcc

SEQ ID NO: 165944 - RNA, 24 nt, Human
ugacaagaaguacaaagaaagaga

SEQ ID NO: 165945 - RNA, 27 nt, Human
ugccuggaguugggaccgccggcaaca

SEQ ID NO: 165946 - RNA, 20 nt, Human
uggcuccuggaccucauccc

SEQ ID NO: 165947 - RNA, 19 nt, Human
ugggaacaccagagauguu

SEQ ID NO: 165948 - RNA, 18 nt, Human
uggggaggaaggcagagg

SEQ ID NO: 165949 - RNA, 23 nt, Human
uggggaggaaggcagaggggucc

SEQ ID NO: 165950 - RNA, 24 nt, Human
uggggaugacaagaaguacaaaga

SEQ ID NO: 165951 - RNA, 21 nt, Human
uuagggaaagccuucuuuagg

SEQ ID NO: 165952 - RNA, 20 nt, Human
uuccccuucccuaggagcca

SEQ ID NO: 165953 - RNA, 26 nt, Human
uucuaugguuccuuagggaaagccgg

SEQ ID NO: 165954 - RNA, 22 nt, Human
uuucauagcccuaacacccacc

SEQ ID NO: 165955 - RNA, 24 nt, Human
uuuuaaggaagugguuuagggaug

SEQ ID NO: 165956 - RNA, 23 nt, Human
aaaaaaaaaaaggccacaaagaa

SEQ ID NO: 165957 - RNA, 18 nt, Human
aaaaaacaggagaugcug

SEQ ID NO: 165958 - RNA, 20 nt, Human
aaaacaggagaugcugaagc

SEQ ID NO: 165959 - RNA, 21 nt, Human
aaacagaggugucggaagcaa

SEQ ID NO: 165960 - RNA, 19 nt, Human
aaccacaggaugaaaaaaa

SEQ ID NO: 165961 - RNA, 22 nt, Human
aagaacuaaaauguuggcacua

SEQ ID NO: 165962 - RNA, 23 nt, Human
aagaaugcagggggaaaaauagc

SEQ ID NO: 165963 - RNA, 25 nt, Human
aaggcucuccccauccccaccucag

SEQ ID NO: 165964 - RNA, 21 nt, Human
aauacagaaagaaugcagggg

SEQ ID NO: 165965 - RNA, 24 nt, Human
acaaacagcaccuucaauugaaac

SEQ ID NO: 165966 - RNA, 21 nt, Human
acaggacagcaaaggggugag

SEQ ID NO: 165967 - RNA, 25 nt, Human
accacaggaugaaaaaaaaaaaaga

SEQ ID NO: 165968 - RNA, 22 nt, Human
accccaaaaugaaaacaaaaua

SEQ ID NO: 165969 - RNA, 21 nt, Human
agaaaaacauuuaaacagcug

SEQ ID NO: 165970 - RNA, 20 nt, Human
agaugcugaagcugcgauga

SEQ ID NO: 165971 - RNA, 20 nt, Human
agcgggcgggcggcgcgacc

SEQ ID NO: 165972 - RNA, 18 nt, Human
aggaaacagaggugucgg

SEQ ID NO: 165973 - RNA, 19 nt, Human
aggaagugguggagcuugg

SEQ ID NO: 165974 - RNA, 21 nt, Human
aggcucuccccauccccaccu

SEQ ID NO: 165975 - RNA, 22 nt, Human
agggugggugggaaugguggag

SEQ ID NO: 165976 - RNA, 22 nt, Human
aggguuuaaggggagggugggu

SEQ ID NO: 165977 - RNA, 18 nt, Human
aggucccugcuggcccag

SEQ ID NO: 165978 - RNA, 18 nt, Human
aggugucggaagcaaagc

SEQ ID NO: 165979 - RNA, 21 nt, Human
aggugucggaagcaaagcuga

SEQ ID NO: 165980 - RNA, 21 nt, Human
auaaaauauucuugcaaaccc

SEQ ID NO: 165981 - RNA, 23 nt, Human
auaacacugaaaggauacucaau

SEQ ID NO: 165982 - RNA, 23 nt, Human
auagaaaaacauuuaaacagcug

SEQ ID NO: 165983 - RNA, 20 nt, Human
auccaaaagacugaaacuga

SEQ ID NO: 165984 - RNA, 23 nt, Human
augaaaacaaaauaaaaugaaua

SEQ ID NO: 165985 - RNA, 21 nt, Human
caaaccccccccccaacacca

SEQ ID NO: 165986 - RNA, 24 nt, Human
caaaccccccccccaacaccaauu

SEQ ID NO: 165987 - RNA, 22 nt, Human
caauaauaaaacuugagacuca

SEQ ID NO: 165988 - RNA, 19 nt, Human
cacaggacagcaaaggggu

SEQ ID NO: 165989 - RNA, 20 nt, Human
cagcugccaucuccaugaga

SEQ ID NO: 165990 - RNA, 20 nt, Human
cagugaagggcccuucagua

SEQ ID NO: 165991 - RNA, 21 nt, Human
cauccccaccucaguuuuagg

SEQ ID NO: 165992 - RNA, 24 nt, Human
caucuccaugaguugaacugggaa

SEQ ID NO: 165993 - RNA, 26 nt, Human
ccaauuccuauucuaauguuaaccua

SEQ ID NO: 165994 - RNA, 21 nt, Human
ccacaggaugaaaaaaaaaaa

SEQ ID NO: 165995 - RNA, 22 nt, Human
ccagaucccuccauggcagauc

SEQ ID NO: 165996 - RNA, 20 nt, Human
ccccccaacaccaauuccua

SEQ ID NO: 165997 - RNA, 19 nt, Human
cccccccccaacaccaauu

SEQ ID NO: 165998 - RNA, 21 nt, Human
cggcggcggacgcugagcggg

SEQ ID NO: 165999 - RNA, 18 nt, Human
cucuccccauccccaccu

SEQ ID NO: 166000 - RNA, 20 nt, Human
cucuccccauccccaccuca

SEQ ID NO: 166001 - RNA, 22 nt, Human
cugaaaguccauuagaaaaacc

SEQ ID NO: 166002 - RNA, 18 nt, Human
cuuaagagaacauucaag

SEQ ID NO: 166003 - RNA, 18 nt, Human
cuuggaaaguuaugagau

SEQ ID NO: 166004 - RNA, 24 nt, Human
gaaaaaaaaaaaaggccacaaaga

SEQ ID NO: 166005 - RNA, 23 nt, Human
gagaucagcagagggagccaagc

SEQ ID NO: 166006 - RNA, 18 nt, Human
gagaugcugaagcugcga

SEQ ID NO: 166007 - RNA, 19 nt, Human
gagauuacaaaauuccuga

SEQ ID NO: 166008 - RNA, 19 nt, Human
gcagauccaagaacaggga

SEQ ID NO: 166009 - RNA, 21 nt, Human
gcauacacuaauaacacugaa

SEQ ID NO: 166010 - RNA, 19 nt, Human
gccuugugguguuuuuugu

SEQ ID NO: 166011 - RNA, 18 nt, Human
gcgacgggcggcguggac

SEQ ID NO: 166012 - RNA, 22 nt, Human
ggaacaucaggaaaagcuccau

SEQ ID NO: 166013 - RNA, 22 nt, Human
ggacagcaaaggggugagaagg

SEQ ID NO: 166014 - RNA, 20 nt, Human
ggagcuaagggaggaggcca

SEQ ID NO: 166015 - RNA, 23 nt, Human
gggcgggcggcgcgacgggcggc

SEQ ID NO: 166016 - RNA, 22 nt, Human
ggggaaaaauagccuuguggug

SEQ ID NO: 166017 - RNA, 20 nt, Human
gggugggaaugguggaggca

SEQ ID NO: 166018 - RNA, 24 nt, Human
ggugagaaggggcugagggaggaa

SEQ ID NO: 166019 - RNA, 23 nt, Human
gugaagggcccuucaguauucca

SEQ ID NO: 166020 - RNA, 19 nt, Human
gugcugggggaagggugca

SEQ ID NO: 166021 - RNA, 24 nt, Human
uaacacugaaaggauacucaauac

SEQ ID NO: 166022 - RNA, 20 nt, Human
uaagagaacauucaaggauu

SEQ ID NO: 166023 - RNA, 19 nt, Human
uagguaaacacacauacga

SEQ ID NO: 166024 - RNA, 23 nt, Human
uauggcuuugcagcgcagcagca

SEQ ID NO: 166025 - RNA, 22 nt, Human
ucagaggucccugcuggcccag

SEQ ID NO: 166026 - RNA, 23 nt, Human
ucaguccucaacagcgccucaaa

SEQ ID NO: 166027 - RNA, 19 nt, Human
ucauccaaaaaauuaaaau

SEQ ID NO: 166028 - RNA, 19 nt, Human
uccacggcucugccuagua

SEQ ID NO: 166029 - RNA, 20 nt, Human
ucuugcaaacccccccccca

SEQ ID NO: 166030 - RNA, 23 nt, Human
ugaaaaaaaaaaaaggccacaaa

SEQ ID NO: 166031 - RNA, 22 nt, Human
ugaaacugucaauuaaaguucu

SEQ ID NO: 166032 - RNA, 22 nt, Human
ugagaaaagccggcauaaagca

SEQ ID NO: 166033 - RNA, 23 nt, Human
ugagaaaagccggcauaaagcac

SEQ ID NO: 166034 - RNA, 25 nt, Human
ugagaaaagccggcauaaagcacuu

SEQ ID NO: 166035 - RNA, 21 nt, Human
ugagaaggggcugagggagga

SEQ ID NO: 166036 - RNA, 19 nt, Human
ugagggaggaaaagccagg

SEQ ID NO: 166037 - RNA, 24 nt, Human
ugcaaaccccccccccaacaccaa

SEQ ID NO: 166038 - RNA, 21 nt, Human
uggaacaucaggaaaagcucc

SEQ ID NO: 166039 - RNA, 20 nt, Human
uggcacuacaaauuuggccu

SEQ ID NO: 166040 - RNA, 20 nt, Human
uggcugggcuuucacugggu

SEQ ID NO: 166041 - RNA, 22 nt, Human
uggcugggcuuucacugggugu

SEQ ID NO: 166042 - RNA, 20 nt, Human
ugggaggagcaaaggcagug

SEQ ID NO: 166043 - RNA, 18 nt, Human
ugguggaggcaaaggcuc

SEQ ID NO: 166044 - RNA, 19 nt, Human
ugugguguuuuuuguucuc

SEQ ID NO: 166045 - RNA, 22 nt, Human
uuaaggggagggugggugggaa

SEQ ID NO: 166046 - RNA, 24 nt, Human
uuaauacuugaccauguacuuaau

SEQ ID NO: 166047 - RNA, 26 nt, Human
uuaauuuaacccaaagacaucucuca

SEQ ID NO: 166048 - RNA, 21 nt, Human
uuagaaaaaccacaggaugau

SEQ ID NO: 166049 - RNA, 22 nt, Human
uuccacggcucugccuaguacc

SEQ ID NO: 166050 - RNA, 22 nt, Human
uuccugaaaguccauuagaaaa

SEQ ID NO: 166051 - RNA, 27 nt, Human
uugcaaaccccccccccaacaccaauu

SEQ ID NO: 166052 - RNA, 21 nt, Human
uuuaaggggaggguggguggg

SEQ ID NO: 166053 - RNA, 22 nt, Human
uuuuuuuuuuuugagaaaagcc

SEQ ID NO: 166054 - RNA, 20 nt, Human
uuuuuuuuuuuuuuuuuugg

SEQ ID NO: 166055 - RNA, 20 nt, Human
aaaaugcacaaccugaaaug

SEQ ID NO: 166056 - RNA, 20 nt, Human
aaaaugcacaaccugaaaug

SEQ ID NO: 166057 - RNA, 23 nt, Human
aacaagagaucuguguucuguca

SEQ ID NO: 166058 - RNA, 23 nt, Human
aacaagagaucuguguucuguca

SEQ ID NO: 166059 - RNA, 21 nt, Human
aagcaagaauucgcaugaaca

SEQ ID NO: 166060 - RNA, 21 nt, Human
aagcaagaauucgcaugaaca

SEQ ID NO: 166061 - RNA, 22 nt, Human
aaucugcaaccgaaguuuccuc

SEQ ID NO: 166062 - RNA, 22 nt, Human
aaucugcaaccgaaguuuccuc

SEQ ID NO: 166063 - RNA, 19 nt, Human
accugaaaugcuucaaucu

SEQ ID NO: 166064 - RNA, 19 nt, Human
accugaaaugcuucaaucu

SEQ ID NO: 166065 - RNA, 19 nt, Human
accuugaguuccuuccugc

SEQ ID NO: 166066 - RNA, 19 nt, Human
accuugaguuccuuccugc

SEQ ID NO: 166067 - RNA, 29 nt, Human
agagagaaagugacagcaaaggggacccc

SEQ ID NO: 166068 - RNA, 29 nt, Human
agagagaaagugacagcaaaggggacccc

SEQ ID NO: 166069 - RNA, 24 nt, Human
agcagcagccaucuccagccaccu

SEQ ID NO: 166070 - RNA, 19 nt, Human
agcagccaucuccagccac

SEQ ID NO: 166071 - RNA, 24 nt, Human
agcuaacagaauuuauaagagaga

SEQ ID NO: 166072 - RNA, 20 nt, Human
aggagggugagcagcagcca

SEQ ID NO: 166073 - RNA, 20 nt, Human
aggagggugagcagcagcca

SEQ ID NO: 166074 - RNA, 23 nt, Human
aggcuaggagggugagcagcagc

SEQ ID NO: 166075 - RNA, 23 nt, Human
aggcuaggagggugagcagcagc

SEQ ID NO: 166076 - RNA, 19 nt, Human
agggaugacaccggggugg

SEQ ID NO: 166077 - RNA, 25 nt, Human
cacacugaucaagagccccaaaagc

SEQ ID NO: 166078 - RNA, 25 nt, Human
cacacugaucaagagccccaaaagc

SEQ ID NO: 166079 - RNA, 19 nt, Human
caggagccgucccaguggc

SEQ ID NO: 166080 - RNA, 19 nt, Human
caggagccgucccaguggc

SEQ ID NO: 166081 - RNA, 23 nt, Human
caggagccgucccaguggcagag

SEQ ID NO: 166082 - RNA, 23 nt, Human
caggagccgucccaguggcagag

SEQ ID NO: 166083 - RNA, 20 nt, Human
ccagccccgccgucgcuccg

SEQ ID NO: 166084 - RNA, 19 nt, Human
ccccaaaagcaggagccgu

SEQ ID NO: 166085 - RNA, 21 nt, Human
ccccaaaagcaggagccgucc

SEQ ID NO: 166086 - RNA, 21 nt, Human
ccccaaaagcaggagccgucc

SEQ ID NO: 166087 - RNA, 22 nt, Human
ccugcugcugcccgaccccggc

SEQ ID NO: 166088 - RNA, 26 nt, Human
ccuucacucuaaguugagcagcucca

SEQ ID NO: 166089 - RNA, 24 nt, Human
cgaacacauacagagcaacuugga

SEQ ID NO: 166090 - RNA, 24 nt, Human
cgaacacauacagagcaacuugga

SEQ ID NO: 166091 - RNA, 23 nt, Human
cggccccagccccgccgucgcuc

SEQ ID NO: 166092 - RNA, 19 nt, Human
cuccggccccagccccgcc

SEQ ID NO: 166093 - RNA, 20 nt, Human
cuccggccccagccccgccu

SEQ ID NO: 166094 - RNA, 26 nt, Human
cucggcuccggccccagccccgccgu

SEQ ID NO: 166095 - RNA, 18 nt, Human
cugcugcugcccgacccc

SEQ ID NO: 166096 - RNA, 19 nt, Human
gaacacauacagagcaacu

SEQ ID NO: 166097 - RNA, 19 nt, Human
gaacacauacagagcaacu

SEQ ID NO: 166098 - RNA, 19 nt, Human
gccccagccccgccgucgc

SEQ ID NO: 166099 - RNA, 31 nt, Human
gcccgaccccggcucggcuccggccccagcc

SEQ ID NO: 166100 - RNA, 23 nt, Human
gcuaacagaauuuauaagagaga

SEQ ID NO: 166101 - RNA, 22 nt, Human
gcuccacgucaaagaugagggu

SEQ ID NO: 166102 - RNA, 20 nt, Human
gcugcccgaccccggcucgg

SEQ ID NO: 166103 - RNA, 21 nt, Human
ggcagagagaauggaugaugc

SEQ ID NO: 166104 - RNA, 24 nt, Human
uacaugcaucacacaaaaugcaca

SEQ ID NO: 166105 - RNA, 24 nt, Human
uacaugcaucacacaaaaugcaca

SEQ ID NO: 166106 - RNA, 24 nt, Human
uagcacacugaucaagagccccaa

SEQ ID NO: 166107 - RNA, 24 nt, Human
uagcacacugaucaagagccccaa

SEQ ID NO: 166108 - RNA, 25 nt, Human
ucaaucugcaaccgaaguuuccuca

SEQ ID NO: 166109 - RNA, 25 nt, Human
ucaaucugcaaccgaaguuuccuca

SEQ ID NO: 166110 - RNA, 18 nt, Human
ucaggaaaggcuacuaca

SEQ ID NO: 166111 - RNA, 18 nt, Human
ucaggaaaggcuacuaca

SEQ ID NO: 166112 - RNA, 19 nt, Human
ucccacaggccccgccucu

SEQ ID NO: 166113 - RNA, 22 nt, Human
ucgcccucugccccaagcucau

SEQ ID NO: 166114 - RNA, 21 nt, Human
ucggcuccggccccagccccg

SEQ ID NO: 166115 - RNA, 24 nt, Human
ucuccagccaccaccuugaguucc

SEQ ID NO: 166116 - RNA, 18 nt, Human
ucugucaucaggaaaggc

SEQ ID NO: 166117 - RNA, 18 nt, Human
ucugucaucaggaaaggc

SEQ ID NO: 166118 - RNA, 19 nt, Human
ucugucaucaggaaaggcu

SEQ ID NO: 166119 - RNA, 21 nt, Human
ucugucaucaggaaaggcuac

SEQ ID NO: 166120 - RNA, 25 nt, Human
ugacaccgggguggcccguggcucc

SEQ ID NO: 166121 - RNA, 21 nt, Human
ugagguuagcacacugaucaa

SEQ ID NO: 166122 - RNA, 21 nt, Human
ugagguuagcacacugaucaa

SEQ ID NO: 166123 - RNA, 18 nt, Human
ugcccgaccccggcucgg

SEQ ID NO: 166124 - RNA, 22 nt, Human
uggcucaagucccucuguguac

SEQ ID NO: 166125 - RNA, 22 nt, Human
uggcucaagucccucuguguac

SEQ ID NO: 166126 - RNA, 22 nt, Human
ugggagggaugacaccggggug

SEQ ID NO: 166127 - RNA, 23 nt, Human
ugggcagagagaauggaugaugc

SEQ ID NO: 166128 - RNA, 19 nt, Human
uggggggucccugcugcug

SEQ ID NO: 166129 - RNA, 22 nt, Human
uucacucuaaguugagcagcuc

SEQ ID NO: 166130 - RNA, 21 nt, Human
uuuuuuuuuuuuuuugucaag

SEQ ID NO: 166131 - RNA, 21 nt, Human
uuuuuuuuuuuuuuugucaag

SEQ ID NO: 166132 - RNA, 18 nt, Human
uuuuuuuuuuuuuuuuug

SEQ ID NO: 166133 - RNA, 18 nt, Human
uuuuuuuuuuuuuuuuug

SEQ ID NO: 166134 - RNA, 19 nt, Human
uuuuuuuuuuuuuuuuugu

SEQ ID NO: 166135 - RNA, 19 nt, Human
uuuuuuuuuuuuuuuuugu

SEQ ID NO: 166136 - RNA, 19 nt, Human
aaacccgcggccacacgcc

SEQ ID NO: 166137 - RNA, 25 nt, Human
aaacccgcggccacacgcccgcugg

SEQ ID NO: 166138 - RNA, 23 nt, Human
accgugcgaaacccgcggccaca

SEQ ID NO: 166139 - RNA, 18 nt, Human
aggccacagcagccaggg

SEQ ID NO: 166140 - RNA, 22 nt, Human
agguggugggguaugcuggagc

SEQ ID NO: 166141 - RNA, 23 nt, Human
agguggugggguaugcuggagcu

SEQ ID NO: 166142 - RNA, 23 nt, Human
cacaaacacacaggcuuacuccu

SEQ ID NO: 166143 - RNA, 21 nt, Human
cacacaggcuuacuccuuggg

SEQ ID NO: 166144 - RNA, 18 nt, Human
cacgcccgcuggcacggg

SEQ ID NO: 166145 - RNA, 19 nt, Human
cacgggucuuucccgagcc

SEQ ID NO: 166146 - RNA, 23 nt, Human
cagcagccagggacccgccccuu

SEQ ID NO: 166147 - RNA, 22 nt, Human
cagcggggggagggggucaggg

SEQ ID NO: 166148 - RNA, 21 nt, Human
caggggaggccacagcagcca

SEQ ID NO: 166149 - RNA, 19 nt, Human
caguccagugagaaggggg

SEQ ID NO: 166150 - RNA, 21 nt, Human
ccacagcagccagggacccgc

SEQ ID NO: 166151 - RNA, 28 nt, Human
ccacgccgcccucccuuauuggaccgug

SEQ ID NO: 166152 - RNA, 23 nt, Human
ccccgcccccgcgacgccgcugc

SEQ ID NO: 166153 - RNA, 23 nt, Human
ccccggagucaaccccgguggug

SEQ ID NO: 166154 - RNA, 18 nt, Human
cccgcgacgccgcugccc

SEQ ID NO: 166155 - RNA, 22 nt, Human
cccgcgacgccgcugcccugcg

SEQ ID NO: 166156 - RNA, 19 nt, Human
cccugccccuccccagucu

SEQ ID NO: 166157 - RNA, 23 nt, Human
ccgcccccgcgacgccgcugccc

SEQ ID NO: 166158 - RNA, 24 nt, Human
ccgcccccgcgacgccgcugcccu

SEQ ID NO: 166159 - RNA, 23 nt, Human
ccgcgcccccggagucaaccccg

SEQ ID NO: 166160 - RNA, 20 nt, Human
ccgugcgaaacccgcggcca

SEQ ID NO: 166161 - RNA, 21 nt, Human
ccgugcgaaacccgcggccac

SEQ ID NO: 166162 - RNA, 20 nt, Human
ccucccuuauuggaccgugc

SEQ ID NO: 166163 - RNA, 21 nt, Human
cgaaacccgcggccacacgcc

SEQ ID NO: 166164 - RNA, 23 nt, Human
cgcggccacacgcccgcuggcac

SEQ ID NO: 166165 - RNA, 20 nt, Human
cgcuggcacgggucuuuccc

SEQ ID NO: 166166 - RNA, 19 nt, Human
cucucagggcccacaaaca

SEQ ID NO: 166167 - RNA, 20 nt, Human
cucugcgcaggcgcguccuc

SEQ ID NO: 166168 - RNA, 18 nt, Human
ggaaaggagaagguggug

SEQ ID NO: 166169 - RNA, 22 nt, Human
ggagaagguggugggguaugcu

SEQ ID NO: 166170 - RNA, 18 nt, Human
ggagcugaggucucugag

SEQ ID NO: 166171 - RNA, 19 nt, Human
ggccgaggaccccagcagc

SEQ ID NO: 166172 - RNA, 18 nt, Human
gggcuuggccgaggaccc

SEQ ID NO: 166173 - RNA, 19 nt, Human
ggggagggggucaggggag

SEQ ID NO: 166174 - RNA, 21 nt, Human
gguggugggguaugcuggagc

SEQ ID NO: 166175 - RNA, 18 nt, Human
gugcugccgccucugcgc

SEQ ID NO: 166176 - RNA, 23 nt, Human
guuuuuuuuuuggaacagucugg

SEQ ID NO: 166177 - RNA, 18 nt, Human
ugagaagggggcuuggcc

SEQ ID NO: 166178 - RNA, 18 nt, Human
ugcgaaacccgcggccac

SEQ ID NO: 166179 - RNA, 18 nt, Human
uggaacagucuggucccu

SEQ ID NO: 166180 - RNA, 24 nt, Human
ugggguaugcuggagcugaggucu

SEQ ID NO: 166181 - RNA, 22 nt, Human
uguuuuuguuuuuuguuuuuuu

SEQ ID NO: 166182 - RNA, 22 nt, Human
uguuuuuuguuuuuuuuuugga

SEQ ID NO: 166183 - RNA, 19 nt, Human
uuggaacagucuggucccu

SEQ ID NO: 166184 - RNA, 19 nt, Human
uuguuuguuuuuguuuuuu

SEQ ID NO: 166185 - RNA, 19 nt, Human
uuguuuguuuuuguuuuuu

SEQ ID NO: 166186 - RNA, 30 nt, Human
uuguuuguuuuuguuuuuuguuuuuuuuuu

SEQ ID NO: 166187 - RNA, 22 nt, Human
uuguuuuuuuuuuggaacaguc

SEQ ID NO: 166188 - RNA, 19 nt, Human
uuuuguuuguuuuuguuuu

SEQ ID NO: 166189 - RNA, 22 nt, Human
uuuuuguuuguuuuuguuuuuu

SEQ ID NO: 166190 - RNA, 26 nt, Human
aaaaaaacaagaaacugccuuaaaaa

SEQ ID NO: 166191 - RNA, 25 nt, Human
acagaaaacagcaccugugaaaaca

SEQ ID NO: 166192 - RNA, 20 nt, Human
cacggaaaacagaaaacagc

SEQ ID NO: 166193 - RNA, 23 nt, Human
cagcaccugugaaaacacguuuc

SEQ ID NO: 166194 - RNA, 19 nt, Human
caguagcugcgcuuucccc

SEQ ID NO: 166195 - RNA, 18 nt, Human
cauuccagccccugcucc

SEQ ID NO: 166196 - RNA, 29 nt, Human
ccaaugauggagaaccacagcucucuccu

SEQ ID NO: 166197 - RNA, 21 nt, Human
ccacggcugcgcugggagcuc

SEQ ID NO: 166198 - RNA, 21 nt, Human
cccaaugauggagaaccacag

SEQ ID NO: 166199 - RNA, 24 nt, Human
ccgucuaaaaaaacaagaaacugc

SEQ ID NO: 166200 - RNA, 24 nt, Human
ccuacaaaauacacaaagcaaucu

SEQ ID NO: 166201 - RNA, 20 nt, Human
ccuggugcgccccgcugccc

SEQ ID NO: 166202 - RNA, 19 nt, Human
cuccccucguugguaggug

SEQ ID NO: 166203 - RNA, 22 nt, Human
cugggacugggagggaagccaa

SEQ ID NO: 166204 - RNA, 18 nt, Human
gaacacggaaaacagaaa

SEQ ID NO: 166205 - RNA, 25 nt, Human
gcugcgcugggagcucccuuccacu

SEQ ID NO: 166206 - RNA, 22 nt, Human
ggaaaacagaaaacagcaccug

SEQ ID NO: 166207 - RNA, 18 nt, Human
ggaagcagggcugggacu

SEQ ID NO: 166208 - RNA, 18 nt, Human
ggacauuccagccccugc

SEQ ID NO: 166209 - RNA, 19 nt, Human
uaaaaaaacaagaaacugc

SEQ ID NO: 166210 - RNA, 24 nt, Human
ucccuguggcgugagccuucggcc

SEQ ID NO: 166211 - RNA, 21 nt, Human
ucuaaaaaaacaagaaacugc

SEQ ID NO: 166212 - RNA, 21 nt, Human
ucuguuacgaacacggaaaac

SEQ ID NO: 166213 - RNA, 20 nt, Human
ugaaaacacguuucagccgc

SEQ ID NO: 166214 - RNA, 20 nt, Human
ugacucagggacauucgcag

SEQ ID NO: 166215 - RNA, 18 nt, Human
ugagccuucggccuggug

SEQ ID NO: 166216 - RNA, 23 nt, Human
ugagccuucggccuggugcgccc

SEQ ID NO: 166217 - RNA, 18 nt, Human
ugggagggaagccaagga

SEQ ID NO: 166218 - RNA, 19 nt, Human
ugucaguagcugcgcuuuu

SEQ ID NO: 166219 - RNA, 23 nt, Human
uugucaguagcugcgcuuucccc

SEQ ID NO: 166220 - RNA, 24 nt, Human
aaagugcugggauuacaggcguga

SEQ ID NO: 166221 - RNA, 24 nt, Human
aaauagagacggggucuuggcaug

SEQ ID NO: 166222 - RNA, 23 nt, Human
aagcaaccccugcagccaagggu

SEQ ID NO: 166223 - RNA, 18 nt, Human
aagcaacugaggcacaga

SEQ ID NO: 166224 - RNA, 25 nt, Human
aagcgauccucccaccucggccucc

SEQ ID NO: 166225 - RNA, 27 nt, Human
aagcgauccucccaccucggccuccca

SEQ ID NO: 166226 - RNA, 23 nt, Human
aagguaaaugaauccaaauucuc

SEQ ID NO: 166227 - RNA, 19 nt, Human
aagugcugggauuacaggc

SEQ ID NO: 166228 - RNA, 19 nt, Human
aagugcugggauuacaggc

SEQ ID NO: 166229 - RNA, 26 nt, Human
aagugcugggauuacaggcgugagcc

SEQ ID NO: 166230 - RNA, 22 nt, Human
acagagcuucuccacauccaga

SEQ ID NO: 166231 - RNA, 20 nt, Human
acccccgaaaaacaaaggcu

SEQ ID NO: 166232 - RNA, 21 nt, Human
acgcccccccaggcccaccug

SEQ ID NO: 166233 - RNA, 21 nt, Human
acucugagaguuuacuugucu

SEQ ID NO: 166234 - RNA, 19 nt, Human
acuugucucuccagucccc

SEQ ID NO: 166235 - RNA, 27 nt, Human
agacagacccccgaaaaacaaaggcga

SEQ ID NO: 166236 - RNA, 19 nt, Human
agacccccgaaaaacaaag

SEQ ID NO: 166237 - RNA, 21 nt, Human
agagaaguccaaaggcucaag

SEQ ID NO: 166238 - RNA, 21 nt, Human
agcaacugaggcacagagaga

SEQ ID NO: 166239 - RNA, 18 nt, Human
agcauuuccuccucugca

SEQ ID NO: 166240 - RNA, 24 nt, Human
caaaacaagguaaaugaauccaaa

SEQ ID NO: 166241 - RNA, 23 nt, Human
caaaacucugccccugcccuaga

SEQ ID NO: 166242 - RNA, 24 nt, Human
caaagugcugggauuacaggcgug

SEQ ID NO: 166243 - RNA, 27 nt, Human
caagcgauccucccaccucggccuccc

SEQ ID NO: 166244 - RNA, 25 nt, Human
cacagagagacugcgacgccccccc

SEQ ID NO: 166245 - RNA, 20 nt, Human
cacagugggccaccaggagc

SEQ ID NO: 166246 - RNA, 24 nt, Human
caccucggccucccaaagugcugg

SEQ ID NO: 166247 - RNA, 21 nt, Human
cacgcauauccacggcuccca

SEQ ID NO: 166248 - RNA, 25 nt, Human
cagacagacccccgaaaaacaaagg

SEQ ID NO: 166249 - RNA, 21 nt, Human
cagacccccgaaaaacaaagg

SEQ ID NO: 166250 - RNA, 25 nt, Human
cagacuccugggcucaagcgauccu

SEQ ID NO: 166251 - RNA, 21 nt, Human
cagcacccgguucucgaccac

SEQ ID NO: 166252 - RNA, 24 nt, Human
cagccuucucucaugcucuccuua

SEQ ID NO: 166253 - RNA, 18 nt, Human
caguuaagaguagcaugc

SEQ ID NO: 166254 - RNA, 19 nt, Human
cauguugccgaggcugguc

SEQ ID NO: 166255 - RNA, 22 nt, Human
ccaaagugcugggauuacaggc

SEQ ID NO: 166256 - RNA, 22 nt, Human
ccaaagugcugggauuacaggc

SEQ ID NO: 166257 - RNA, 24 nt, Human
ccaaagugcugggauuacaggcgu

SEQ ID NO: 166258 - RNA, 27 nt, Human
ccacaaaacaagguaaaugaauccaaa

SEQ ID NO: 166259 - RNA, 19 nt, Human
ccagcacccgguucucgac

SEQ ID NO: 166260 - RNA, 20 nt, Human
ccagcccagcugagcugcgc

SEQ ID NO: 166261 - RNA, 24 nt, Human
ccaggauguccccacgcauaucca

SEQ ID NO: 166262 - RNA, 21 nt, Human
cccauccucguccuggugcuc

SEQ ID NO: 166263 - RNA, 20 nt, Human
cccccaggcccaccuggcuc

SEQ ID NO: 166264 - RNA, 22 nt, Human
cccccaggcccaccuggcuccg

SEQ ID NO: 166265 - RNA, 21 nt, Human
ccccccaggcccaccuggcuc

SEQ ID NO: 166266 - RNA, 21 nt, Human
cccccgaaaaacaaaggcgag

SEQ ID NO: 166267 - RNA, 22 nt, Human
ccccgcgcccggcccagcaccc

SEQ ID NO: 166268 - RNA, 18 nt, Human
ccgcugccgccgccgccg

SEQ ID NO: 166269 - RNA, 23 nt, Human
ccuccaugacugagaugacccag

SEQ ID NO: 166270 - RNA, 26 nt, Human
ccucccaccucggccucccaaagugc

SEQ ID NO: 166271 - RNA, 18 nt, Human
ccuccucugcaagacuga

SEQ ID NO: 166272 - RNA, 19 nt, Human
ccucguccuggugcucucc

SEQ ID NO: 166273 - RNA, 20 nt, Human
ccugggcucaagcgauccuc

SEQ ID NO: 166274 - RNA, 21 nt, Human
ccuucucucaugcucuccuua

SEQ ID NO: 166275 - RNA, 18 nt, Human
cgacaucccuccaccccu

SEQ ID NO: 166276 - RNA, 18 nt, Human
cgcauauccacggcuccc

SEQ ID NO: 166277 - RNA, 26 nt, Human
cgccagucuggcuccagagccugcac

SEQ ID NO: 166278 - RNA, 24 nt, Human
cgcccgggcagccacagugggcca

SEQ ID NO: 166279 - RNA, 21 nt, Human
cgcgacaucccuccaccccuc

SEQ ID NO: 166280 - RNA, 21 nt, Human
cgcucccgcugccgccgccgc

SEQ ID NO: 166281 - RNA, 22 nt, Human
cggcgugacauccccgucuccc

SEQ ID NO: 166282 - RNA, 21 nt, Human
cguccuggugcucuccuccug

SEQ ID NO: 166283 - RNA, 24 nt, Human
cucaagagaguagauggcuaugga

SEQ ID NO: 166284 - RNA, 24 nt, Human
cucaagcgauccucccaccucggc

SEQ ID NO: 166285 - RNA, 26 nt, Human
cuccacauccagacagacccccgaaa

SEQ ID NO: 166286 - RNA, 25 nt, Human
cuccugggcucaagcgauccuccca

SEQ ID NO: 166287 - RNA, 22 nt, Human
cuucuccacauccagacagacc

SEQ ID NO: 166288 - RNA, 21 nt, Human
gagacugcgacgcccccccag

SEQ ID NO: 166289 - RNA, 18 nt, Human
gauuacaggcgugagccc

SEQ ID NO: 166290 - RNA, 21 nt, Human
gauuacaggcgugagcccccg

SEQ ID NO: 166291 - RNA, 24 nt, Human
gcaguccaaaagaaggggaggugg

SEQ ID NO: 166292 - RNA, 26 nt, Human
gcaguccaaaagaaggggaggugguc

SEQ ID NO: 166293 - RNA, 22 nt, Human
gcauccuggaagcaacugaggc

SEQ ID NO: 166294 - RNA, 24 nt, Human
gccaaugccagccuucucucaugc

SEQ ID NO: 166295 - RNA, 21 nt, Human
gccacagugggccaccaggag

SEQ ID NO: 166296 - RNA, 18 nt, Human
gccucagucccugcaccu

SEQ ID NO: 166297 - RNA, 24 nt, Human
gcgcucccgcugccgccgccgccg

SEQ ID NO: 166298 - RNA, 18 nt, Human
ggacggcgugacaucccc

SEQ ID NO: 166299 - RNA, 19 nt, Human
ggcggaagcaaccccugca

SEQ ID NO: 166300 - RNA, 18 nt, Human
gggccuccggggcauccu

SEQ ID NO: 166301 - RNA, 22 nt, Human
gggcugugcugggcccugcggg

SEQ ID NO: 166302 - RNA, 18 nt, Human
ggggucuuggcauguugc

SEQ ID NO: 166303 - RNA, 24 nt, Human
ggucuuggcauguugccgaggcug

SEQ ID NO: 166304 - RNA, 18 nt, Human
uagaauuucuuucuuggu

SEQ ID NO: 166305 - RNA, 25 nt, Human
uaggcugggggaguuccaggagggc

SEQ ID NO: 166306 - RNA, 23 nt, Human
ucaggccuuggguucacuggguc

SEQ ID NO: 166307 - RNA, 18 nt, Human
uccaccccucaccgcuca

SEQ ID NO: 166308 - RNA, 22 nt, Human
uccaccccucaccgcucacaca

SEQ ID NO: 166309 - RNA, 21 nt, Human
uccaggagggcaguuccagcc

SEQ ID NO: 166310 - RNA, 24 nt, Human
ucccaaagugcugggauuacaggc

SEQ ID NO: 166311 - RNA, 18 nt, Human
ucccgcugccgccgccgc

SEQ ID NO: 166312 - RNA, 22 nt, Human
ucccgcugccgccgccgccgcc

SEQ ID NO: 166313 - RNA, 21 nt, Human
ucccuccaccccucaccgcuc

SEQ ID NO: 166314 - RNA, 22 nt, Human
ucccuccaccccucaccgcuca

SEQ ID NO: 166315 - RNA, 21 nt, Human
uccugggcucaagcgauccuc

SEQ ID NO: 166316 - RNA, 22 nt, Human
uccugggcucaagcgauccucc

SEQ ID NO: 166317 - RNA, 18 nt, Human
uccuuagaauuucuuucu

SEQ ID NO: 166318 - RNA, 21 nt, Human
ucgcaguccaaaagaagggga

SEQ ID NO: 166319 - RNA, 18 nt, Human
ucggccucccaaagugcu

SEQ ID NO: 166320 - RNA, 19 nt, Human
ucguccuggugcucuccuc

SEQ ID NO: 166321 - RNA, 23 nt, Human
ucucagacuccugggcucaagcg

SEQ ID NO: 166322 - RNA, 22 nt, Human
ucuccgcgacaucccuccaccc

SEQ ID NO: 166323 - RNA, 24 nt, Human
ucucuucaggccuuggguucacug

SEQ ID NO: 166324 - RNA, 21 nt, Human
ucuggggcugugcugggcccu

SEQ ID NO: 166325 - RNA, 19 nt, Human
ucuucaggccuuggguuca

SEQ ID NO: 166326 - RNA, 20 nt, Human
ugacccaggauguccccacg

SEQ ID NO: 166327 - RNA, 20 nt, Human
ugacugagaugacccaggau

SEQ ID NO: 166328 - RNA, 22 nt, Human
ugagcccccgcgcccggcccag

SEQ ID NO: 166329 - RNA, 26 nt, Human
ugccccugcccuagagcgcagggcuc

SEQ ID NO: 166330 - RNA, 24 nt, Human
ugccgccgccgccgccaucuugga

SEQ ID NO: 166331 - RNA, 20 nt, Human
ugcugggauuacaggcguga

SEQ ID NO: 166332 - RNA, 20 nt, Human
uggagagaaguccaaaggcu

SEQ ID NO: 166333 - RNA, 24 nt, Human
uggcauguugccgaggcuggucuc

SEQ ID NO: 166334 - RNA, 18 nt, Human
ugggauuacaggcgugag

SEQ ID NO: 166335 - RNA, 19 nt, Human
ugggauuacaggcgugagc

SEQ ID NO: 166336 - RNA, 20 nt, Human
ugggauuacaggcgugagcc

SEQ ID NO: 166337 - RNA, 23 nt, Human
ugggauuacaggcgugagccccc

SEQ ID NO: 166338 - RNA, 24 nt, Human
ugggauuacaggcgugagcccccg

SEQ ID NO: 166339 - RNA, 23 nt, Human
ugggcaugaccauuugauaaauc

SEQ ID NO: 166340 - RNA, 22 nt, Human
uggggcugugcugggcccugcg

SEQ ID NO: 166341 - RNA, 20 nt, Human
ugguagucagaggggacagu

SEQ ID NO: 166342 - RNA, 20 nt, Human
uuacaggcgugagcccccgc

SEQ ID NO: 166343 - RNA, 22 nt, Human
uucccauccucguccuggugcu

SEQ ID NO: 166344 - RNA, 22 nt, Human
aaaaauaagcuaccaccaaacu

SEQ ID NO: 166345 - RNA, 20 nt, Human
aaaauaagcuaccaccaaac

SEQ ID NO: 166346 - RNA, 21 nt, Human
aaacagauugacaggaaaaga

SEQ ID NO: 166347 - RNA, 22 nt, Human
aaacagauugacaggaaaagau

SEQ ID NO: 166348 - RNA, 18 nt, Human
aacuugcuucauucuucu

SEQ ID NO: 166349 - RNA, 19 nt, Human
aagcagacucagaucgccu

SEQ ID NO: 166350 - RNA, 23 nt, Human
aaggauaauagagaaagaugugc

SEQ ID NO: 166351 - RNA, 18 nt, Human
aagugaacuugcuucauu

SEQ ID NO: 166352 - RNA, 25 nt, Human
acccagaaucuccuaaaauacucca

SEQ ID NO: 166353 - RNA, 25 nt, Human
acccccagugucuacugucucugac

SEQ ID NO: 166354 - RNA, 22 nt, Human
agaauuccaauagaaggauaau

SEQ ID NO: 166355 - RNA, 21 nt, Human
agcugucucgugccugcucgu

SEQ ID NO: 166356 - RNA, 21 nt, Human
agcugucucgugccugcucgu

SEQ ID NO: 166357 - RNA, 24 nt, Human
auccuugucuucguccagugcugg

SEQ ID NO: 166358 - RNA, 19 nt, Human
augauuuuuugaauacaga

SEQ ID NO: 166359 - RNA, 23 nt, Human
caaacuaaugaaauacuauagca

SEQ ID NO: 166360 - RNA, 25 nt, Human
caccauaaucauaaucugcacuacc

SEQ ID NO: 166361 - RNA, 21 nt, Human
caccugguagaggaaagaccc

SEQ ID NO: 166362 - RNA, 22 nt, Human
cacuucuggauccugacugccc

SEQ ID NO: 166363 - RNA, 19 nt, Human
cagacucagaucgccucuc

SEQ ID NO: 166364 - RNA, 22 nt, Human
cagauugacaggaaaagauaac

SEQ ID NO: 166365 - RNA, 19 nt, Human
cagugcugguccugguccg

SEQ ID NO: 166366 - RNA, 19 nt, Human
caugucuccaaacuaaacc

SEQ ID NO: 166367 - RNA, 19 nt, Human
ccaaacuaaaccugauuga

SEQ ID NO: 166368 - RNA, 20 nt, Human
ccacauaaaccuggguccuu

SEQ ID NO: 166369 - RNA, 19 nt, Human
ccagaccuucccccugacc

SEQ ID NO: 166370 - RNA, 21 nt, Human
ccagcuaguuuucuaaaguua

SEQ ID NO: 166371 - RNA, 18 nt, Human
cccagaaucuccuaaaau

SEQ ID NO: 166372 - RNA, 25 nt, Human
cccagaaucuccuaaaauacucccu

SEQ ID NO: 166373 - RNA, 19 nt, Human
cccccagugucuacugucu

SEQ ID NO: 166374 - RNA, 19 nt, Human
cccugaaaguauuaugaag

SEQ ID NO: 166375 - RNA, 18 nt, Human
cccugaacguccagaccu

SEQ ID NO: 166376 - RNA, 18 nt, Human
cccugagugccuggagcc

SEQ ID NO: 166377 - RNA, 21 nt, Human
cccuggcgccugcuucuccug

SEQ ID NO: 166378 - RNA, 20 nt, Human
cccugucuuccuccucuccu

SEQ ID NO: 166379 - RNA, 22 nt, Human
ccgcccaugggcagacucagac

SEQ ID NO: 166380 - RNA, 20 nt, Human
ccuccaguacugggcccagc

SEQ ID NO: 166381 - RNA, 18 nt, Human
cuacugucucugacugca

SEQ ID NO: 166382 - RNA, 23 nt, Human
cuccuggaccccgcugauucacc

SEQ ID NO: 166383 - RNA, 21 nt, Human
cugacuguuccucauuacgug

SEQ ID NO: 166384 - RNA, 19 nt, Human
cugugacugacuaaauccc

SEQ ID NO: 166385 - RNA, 22 nt, Human
cuugucuucguccagugcuggu

SEQ ID NO: 166386 - RNA, 18 nt, Human
gaaaacaacaggauugga

SEQ ID NO: 166387 - RNA, 25 nt, Human
gccuggagccgucuccugacuguuc

SEQ ID NO: 166388 - RNA, 19 nt, Human
ggagugucuaaaacuuaaa

SEQ ID NO: 166389 - RNA, 23 nt, Human
gucuggagccaucucuugacugc

SEQ ID NO: 166390 - RNA, 25 nt, Human
gucuggagccaucucuugacugcuc

SEQ ID NO: 166391 - RNA, 22 nt, Human
guggcugugaugggacccugag

SEQ ID NO: 166392 - RNA, 22 nt, Human
guggcugugaugggacccugag

SEQ ID NO: 166393 - RNA, 18 nt, Human
uaaaaauaagcuaccacc

SEQ ID NO: 166394 - RNA, 22 nt, Human
uaaaauacuccagcuaguuuuc

SEQ ID NO: 166395 - RNA, 20 nt, Human
uaaagugaccauguuccuua

SEQ ID NO: 166396 - RNA, 28 nt, Human
uacugggcccagcccguccaugggcaac

SEQ ID NO: 166397 - RNA, 24 nt, Human
uauuaugaaguuucuugauugaaa

SEQ ID NO: 166398 - RNA, 20 nt, Human
uccaccagaggaagucucug

SEQ ID NO: 166399 - RNA, 22 nt, Human
uccacgaaugguguccugaccc

SEQ ID NO: 166400 - RNA, 22 nt, Human
uccacgaaugguguccugaccc

SEQ ID NO: 166401 - RNA, 20 nt, Human
uccauggccugacacugacu

SEQ ID NO: 166402 - RNA, 19 nt, Human
uccaugggcagacucagac

SEQ ID NO: 166403 - RNA, 23 nt, Human
ucccucacuaucacuggccugac

SEQ ID NO: 166404 - RNA, 18 nt, Human
ucccugggauguggugug

SEQ ID NO: 166405 - RNA, 18 nt, Human
ucccugggauguggugug

SEQ ID NO: 166406 - RNA, 20 nt, Human
ucccugggaugugguguggc

SEQ ID NO: 166407 - RNA, 20 nt, Human
ucccugggaugugguguggc

SEQ ID NO: 166408 - RNA, 24 nt, Human
ucguccagugcugguccugguccg

SEQ ID NO: 166409 - RNA, 19 nt, Human
ucuccaugauauugauuuc

SEQ ID NO: 166410 - RNA, 18 nt, Human
ucuccuaaaauacuccag

SEQ ID NO: 166411 - RNA, 20 nt, Human
ucuccuggacuugaucuugc

SEQ ID NO: 166412 - RNA, 20 nt, Human
ucuggagcugucugcugacu

SEQ ID NO: 166413 - RNA, 24 nt, Human
ugaaaguauuaugaaguuucuuga

SEQ ID NO: 166414 - RNA, 18 nt, Human
ugaaugucccucacuauc

SEQ ID NO: 166415 - RNA, 20 nt, Human
ugacaggaaaagauaacuuc

SEQ ID NO: 166416 - RNA, 24 nt, Human
ugacgcgacccugagugccuggag

SEQ ID NO: 166417 - RNA, 25 nt, Human
ugacgcgacccugagugccuggagc

SEQ ID NO: 166418 - RNA, 22 nt, Human
ugacuaccacuggacccccagu

SEQ ID NO: 166419 - RNA, 23 nt, Human
ugagugcucaccugguagaggaa

SEQ ID NO: 166420 - RNA, 27 nt, Human
ugauauagccacuuugguauacagaac

SEQ ID NO: 166421 - RNA, 24 nt, Human
ugccuggagccgucuccugacugu

SEQ ID NO: 166422 - RNA, 23 nt, Human
ugcugauggggcccagccugucc

SEQ ID NO: 166423 - RNA, 18 nt, Human
uggaucccuggcgccugc

SEQ ID NO: 166424 - RNA, 26 nt, Human
uggaucccuggcgccugcuucuccug

SEQ ID NO: 166425 - RNA, 28 nt, Human
uggccggacugugagugucccguacucg

SEQ ID NO: 166426 - RNA, 24 nt, Human
uggcuaacacuggaucccuggcgc

SEQ ID NO: 166427 - RNA, 22 nt, Human
uguaacuaacacuuccgugcug

SEQ ID NO: 166428 - RNA, 20 nt, Human
uguccaccagaggaagucuc

SEQ ID NO: 166429 - RNA, 18 nt, Human
uguccagaccuaucuacc

SEQ ID NO: 166430 - RNA, 18 nt, Human
uguccagaccuaucuacc

SEQ ID NO: 166431 - RNA, 21 nt, Human
uguccagaccuaucuaccgau

SEQ ID NO: 166432 - RNA, 19 nt, Human
uguccauggccugacacug

SEQ ID NO: 166433 - RNA, 22 nt, Human
ugucuccaaacuaaaccugauu

SEQ ID NO: 166434 - RNA, 25 nt, Human
ugucugacucuucugaaugucccuc

SEQ ID NO: 166435 - RNA, 21 nt, Human
ugucuggagcggucugcagag

SEQ ID NO: 166436 - RNA, 23 nt, Human
uguuuuauauuuuuggcuccuuc

SEQ ID NO: 166437 - RNA, 19 nt, Human
uuccuccaguacugggccc

SEQ ID NO: 166438 - RNA, 19 nt, Human
uucguccagugcugguccu

SEQ ID NO: 166439 - RNA, 23 nt, Human
uugcuucauucuucuauucuugg

SEQ ID NO: 166440 - RNA, 22 nt, Human
uugggacgcugagugccuggag

SEQ ID NO: 166441 - RNA, 22 nt, Human
uugggacgcugagugccuggag

SEQ ID NO: 166442 - RNA, 26 nt, Human
uugguggcucugcugauggggcccag

SEQ ID NO: 166443 - RNA, 22 nt, Human
uuuaaacagauugacaggaaaa

SEQ ID NO: 166444 - RNA, 23 nt, Human
aagucugcagccgagccccccaa

SEQ ID NO: 166445 - RNA, 23 nt, Human
acaagugauucacccgucuuggc

SEQ ID NO: 166446 - RNA, 24 nt, Human
accacguuggcuaggcuggucuug

SEQ ID NO: 166447 - RNA, 25 nt, Human
acccgucuuggccucucaaagugcu

SEQ ID NO: 166448 - RNA, 19 nt, Human
agcccggcgcggccucccu

SEQ ID NO: 166449 - RNA, 20 nt, Human
augagguuucaccacguugg

SEQ ID NO: 166450 - RNA, 21 nt, Human
caccacguuggcuaggcuggu

SEQ ID NO: 166451 - RNA, 23 nt, Human
caccacguuggcuaggcuggucu

SEQ ID NO: 166452 - RNA, 24 nt, Human
caccacguuggcuaggcuggucuu

SEQ ID NO: 166453 - RNA, 23 nt, Human
cacccgucuuggccucucaaagu

SEQ ID NO: 166454 - RNA, 24 nt, Human
cacccgucuuggccucucaaagug

SEQ ID NO: 166455 - RNA, 21 nt, Human
cagccccuucggauuagcccg

SEQ ID NO: 166456 - RNA, 23 nt, Human
cagccccuucggauuagcccggc

SEQ ID NO: 166457 - RNA, 24 nt, Human
cagccgagccccccaauauuccaa

SEQ ID NO: 166458 - RNA, 19 nt, Human
cagccugaccucgcagccc

SEQ ID NO: 166459 - RNA, 23 nt, Human
ccccaauauuccacacauugacc

SEQ ID NO: 166460 - RNA, 24 nt, Human
cccuggcgcccugggcccucccug

SEQ ID NO: 166461 - RNA, 19 nt, Human
ccugacaagugauucaccc

SEQ ID NO: 166462 - RNA, 19 nt, Human
cgcccugggcccucccugc

SEQ ID NO: 166463 - RNA, 22 nt, Human
cguuggcuaggcuggucuugaa

SEQ ID NO: 166464 - RNA, 18 nt, Human
cucucucucucucucucu

SEQ ID NO: 166465 - RNA, 18 nt, Human
cucucucucucucucucu

SEQ ID NO: 166466 - RNA, 18 nt, Human
cucucucucucucucucu

SEQ ID NO: 166467 - RNA, 18 nt, Human
cucucucucucucucucu

SEQ ID NO: 166468 - RNA, 18 nt, Human
cucucucucucucucucu

SEQ ID NO: 166469 - RNA, 18 nt, Human
cucucucucucucucucu

SEQ ID NO: 166470 - RNA, 18 nt, Human
cucucucucucucucucu

SEQ ID NO: 166471 - RNA, 18 nt, Human
cucucucucucucucucu

SEQ ID NO: 166472 - RNA, 21 nt, Human
cuggcgcccugggcccucccu

SEQ ID NO: 166473 - RNA, 22 nt, Human
gaaagagacaguuaaccggaug

SEQ ID NO: 166474 - RNA, 23 nt, Human
gagcgcccugcccucacuccccu

SEQ ID NO: 166475 - RNA, 19 nt, Human
gagguuucaccacguuggc

SEQ ID NO: 166476 - RNA, 25 nt, Human
gcccugggcccucccugcgugcccc

SEQ ID NO: 166477 - RNA, 18 nt, Human
ggcuggucuugaacuccu

SEQ ID NO: 166478 - RNA, 24 nt, Human
uacagccugaccucgcagccccuu

SEQ ID NO: 166479 - RNA, 21 nt, Human
uagcggagcgaaagagacagu

SEQ ID NO: 166480 - RNA, 24 nt, Human
uaguagagaugagguuucaccacg

SEQ ID NO: 166481 - RNA, 26 nt, Human
uaguagagaugagguuucaccacguu

SEQ ID NO: 166482 - RNA, 19 nt, Human
uaucucucucucucucucu

SEQ ID NO: 166483 - RNA, 18 nt, Human
ucuugaacuccugacaag

SEQ ID NO: 166484 - RNA, 21 nt, Human
ugacaagugauucacccgucu

SEQ ID NO: 166485 - RNA, 24 nt, Human
ugagguuucaccacguuggcuagg

SEQ ID NO: 166486 - RNA, 18 nt, Human
uggccucucaaagugcug

SEQ ID NO: 166487 - RNA, 24 nt, Human
uggcuaggcuggucuugaacuccu

SEQ ID NO: 166488 - RNA, 18 nt, Human
uuaguagagaugagguuu

SEQ ID NO: 166489 - RNA, 22 nt, Human
uuaguagagaugagguuucacc

SEQ ID NO: 166490 - RNA, 24 nt, Human
uuaguagagaugagguuucaccac

SEQ ID NO: 166491 - RNA, 25 nt, Human
uuaguagagaugagguuucaccacg

SEQ ID NO: 166492 - RNA, 24 nt, Human
uucacuuugcgaaucggggaggaa

SEQ ID NO: 166493 - RNA, 21 nt, Human
uuucaccacguuggcuaggcu

SEQ ID NO: 166494 - RNA, 24 nt, Human
uuuuuaguagagaugagguuucac

SEQ ID NO: 166495 - RNA, 21 nt, Human
uuuuucagcuaauuuugggaa

SEQ ID NO: 166496 - RNA, 23 nt, Human
aggcuacuggggacuguggcacu

SEQ ID NO: 166497 - RNA, 19 nt, Human
cacgugcacucacacugug

SEQ ID NO: 166498 - RNA, 19 nt, Human
cacuggacguggcuggagc

SEQ ID NO: 166499 - RNA, 21 nt, Human
ccccuuccucuuccucaccaa

SEQ ID NO: 166500 - RNA, 22 nt, Human
ccccuuccucuuccucaccaag

SEQ ID NO: 166501 - RNA, 22 nt, Human
ccucuuccucaccaagccuggg

SEQ ID NO: 166502 - RNA, 19 nt, Human
uagcggaagagugaggggg

SEQ ID NO: 166503 - RNA, 20 nt, Human
uaucccuagcggaagaguga

SEQ ID NO: 166504 - RNA, 23 nt, Human
ucgcugccgggccgcgccgggcu

SEQ ID NO: 166505 - RNA, 23 nt, Human
uggcacuggacguggcuggagca

SEQ ID NO: 166506 - RNA, 22 nt, Human
uggugcugcuugaggcuacugg

SEQ ID NO: 166507 - RNA, 22 nt, Human
uggugucaccugaguacauucu

SEQ ID NO: 166508 - RNA, 20 nt, Human
uuccucuuccucaccaagcc

SEQ ID NO: 166509 - RNA, 18 nt, Human
aagaagacaagcagcgcc

SEQ ID NO: 166510 - RNA, 23 nt, Human
aagaagacaagcagcgccaccaa

SEQ ID NO: 166511 - RNA, 22 nt, Human
aagagggcggggcugcuugggu

SEQ ID NO: 166512 - RNA, 24 nt, Human
aauggcucccucugcccaagugaa

SEQ ID NO: 166513 - RNA, 25 nt, Human
acaagcagcgccaccaaauggccga

SEQ ID NO: 166514 - RNA, 20 nt, Human
agacaagcagcgccaccaaa

SEQ ID NO: 166515 - RNA, 20 nt, Human
agcggcuggcuggggaggca

SEQ ID NO: 166516 - RNA, 20 nt, Human
aggcgcgagaagccgggggg

SEQ ID NO: 166517 - RNA, 20 nt, Human
caaauggcucccucugccca

SEQ ID NO: 166518 - RNA, 20 nt, Human
cacggcacagggcaggggca

SEQ ID NO: 166519 - RNA, 24 nt, Human
cagcgccaccaaauggcucccucu

SEQ ID NO: 166520 - RNA, 18 nt, Human
cagcugcagugacaggcg

SEQ ID NO: 166521 - RNA, 22 nt, Human
ccaccaaauggcucccucugcc

SEQ ID NO: 166522 - RNA, 23 nt, Human
ccaccaaauggcucccucugccc

SEQ ID NO: 166523 - RNA, 23 nt, Human
ccccaucccucaccccucccaga

SEQ ID NO: 166524 - RNA, 24 nt, Human
ccccaucccucaccccucccagaa

SEQ ID NO: 166525 - RNA, 21 nt, Human
cccucaccccucccagaacca

SEQ ID NO: 166526 - RNA, 21 nt, Human
cccucugcccaagugaaagcc

SEQ ID NO: 166527 - RNA, 26 nt, Human
cccucugcccaagugaaagccgagag

SEQ ID NO: 166528 - RNA, 22 nt, Human
ccgggggggcggugcugcagcc

SEQ ID NO: 166529 - RNA, 21 nt, Human
ccucaccccucccagaaccaa

SEQ ID NO: 166530 - RNA, 22 nt, Human
ccucaccccucccagaaccaaa

SEQ ID NO: 166531 - RNA, 24 nt, Human
ccucccagaaccaaagaagacaag

SEQ ID NO: 166532 - RNA, 23 nt, Human
cgcgagaagccgggggggcggug

SEQ ID NO: 166533 - RNA, 19 nt, Human
cugggccgggguugagggg

SEQ ID NO: 166534 - RNA, 18 nt, Human
gaagacaagcagcgccac

SEQ ID NO: 166535 - RNA, 21 nt, Human
gagcgcagcacggcacagggc

SEQ ID NO: 166536 - RNA, 22 nt, Human
gaggcaggugagcgcagcacgg

SEQ ID NO: 166537 - RNA, 19 nt, Human
gaggggaagagggcggggc

SEQ ID NO: 166538 - RNA, 20 nt, Human
gcagcugcagugacaggcgg

SEQ ID NO: 166539 - RNA, 24 nt, Human
gccaccaaauggcucccucugccc

SEQ ID NO: 166540 - RNA, 19 nt, Human
gcggugcugcagccucggc

SEQ ID NO: 166541 - RNA, 22 nt, Human
gggcagcugcagugacaggcgg

SEQ ID NO: 166542 - RNA, 21 nt, Human
gggcggugcugcagccucggc

SEQ ID NO: 166543 - RNA, 20 nt, Human
ucaccccucccagaaccaaa

SEQ ID NO: 166544 - RNA, 24 nt, Human
ucccucaccccucccagaaccaaa

SEQ ID NO: 166545 - RNA, 21 nt, Human
ucccucugcccaagugaaagc

SEQ ID NO: 166546 - RNA, 24 nt, Human
ugaccgaugaccgcgggguggcgc

SEQ ID NO: 166547 - RNA, 21 nt, Human
ugagcgcagcacggcacaggg

SEQ ID NO: 166548 - RNA, 22 nt, Human
ugaggcgcgagaagccgggggg

SEQ ID NO: 166549 - RNA, 19 nt, Human
aaaguugaaaaccuccagc

SEQ ID NO: 166550 - RNA, 22 nt, Human
aacccccuucaagacaaggcac

SEQ ID NO: 166551 - RNA, 19 nt, Human
agacaaggcacaaacuauu

SEQ ID NO: 166552 - RNA, 24 nt, Human
agggaccugggagccgggcagggg

SEQ ID NO: 166553 - RNA, 19 nt, Human
aggggugggaccucacugu

SEQ ID NO: 166554 - RNA, 28 nt, Human
aggugggguggagugggaucaucagaag

SEQ ID NO: 166555 - RNA, 22 nt, Human
augggaccgcuggaguuggcaa

SEQ ID NO: 166556 - RNA, 19 nt, Human
caacccccuucaagacaag

SEQ ID NO: 166557 - RNA, 21 nt, Human
caagacaaggcacaaacuauu

SEQ ID NO: 166558 - RNA, 24 nt, Human
caagacaaggcacaaacuauuugg

SEQ ID NO: 166559 - RNA, 20 nt, Human
cagggaccugggagccgggc

SEQ ID NO: 166560 - RNA, 21 nt, Human
ccccuucaagacaaggcacaa

SEQ ID NO: 166561 - RNA, 18 nt, Human
cccgcguuccccacccug

SEQ ID NO: 166562 - RNA, 24 nt, Human
ccucacugucaauggacaugcuca

SEQ ID NO: 166563 - RNA, 20 nt, Human
ccuccagcccaucccucagu

SEQ ID NO: 166564 - RNA, 18 nt, Human
ccugggagcuggccccgc

SEQ ID NO: 166565 - RNA, 18 nt, Human
cggcagcccggcuggggu

SEQ ID NO: 166566 - RNA, 25 nt, Human
cucccgcguuccccacccugccgca

SEQ ID NO: 166567 - RNA, 19 nt, Human
cuuacagcaauuuauuugg

SEQ ID NO: 166568 - RNA, 22 nt, Human
gaccagcuuuccugggagcugg

SEQ ID NO: 166569 - RNA, 19 nt, Human
gaggcugggcaucugugag

SEQ ID NO: 166570 - RNA, 19 nt, Human
gcaaggggagcaacccccu

SEQ ID NO: 166571 - RNA, 21 nt, Human
gcucaaacagucugauuuaau

SEQ ID NO: 166572 - RNA, 26 nt, Human
ggcaaggggagcaacccccuucaaga

SEQ ID NO: 166573 - RNA, 20 nt, Human
gggacgcgggcggcagcccg

SEQ ID NO: 166574 - RNA, 19 nt, Human
ggggucucgggaagggcgg

SEQ ID NO: 166575 - RNA, 23 nt, Human
guuacaugcaacaggaggaucau

SEQ ID NO: 166576 - RNA, 22 nt, Human
guugaaaaccuccagcccaucc

SEQ ID NO: 166577 - RNA, 26 nt, Human
ucaauggacaugcucagggaggccag

SEQ ID NO: 166578 - RNA, 18 nt, Human
ucccucagucuuggucag

SEQ ID NO: 166579 - RNA, 23 nt, Human
ugaggugggguggagugggauca

SEQ ID NO: 166580 - RNA, 18 nt, Human
ugagguuggcaaggggag

SEQ ID NO: 166581 - RNA, 18 nt, Human
uggagugggaucaucaga

SEQ ID NO: 166582 - RNA, 20 nt, Human
uggcaaggagagaugagggg

SEQ ID NO: 166583 - RNA, 21 nt, Human
ugggaucaucagaaggcugac

SEQ ID NO: 166584 - RNA, 22 nt, Human
ugggguggagugggaucaucag

SEQ ID NO: 166585 - RNA, 28 nt, Human
ugggguggagugggaucaucagaaggcu

SEQ ID NO: 166586 - RNA, 23 nt, Human
uugaaaaccuccagcccaucccu

SEQ ID NO: 166587 - RNA, 24 nt, Human
uuggcaaggggagcaacccccuuc

SEQ ID NO: 166588 - RNA, 20 nt, Human
aaaaagacagacaaaggaaa

SEQ ID NO: 166589 - RNA, 19 nt, Human
aaaaagacagacaaaggag

SEQ ID NO: 166590 - RNA, 22 nt, Human
aaagaaaaagacagacaaagga

SEQ ID NO: 166591 - RNA, 21 nt, Human
aagaaaaagacagacaaagga

SEQ ID NO: 166592 - RNA, 23 nt, Human
aagacacgcagggagaugagaca

SEQ ID NO: 166593 - RNA, 19 nt, Human
aagacagacaaaggaaaag

SEQ ID NO: 166594 - RNA, 21 nt, Human
acagacaaaggaaaagacacg

SEQ ID NO: 166595 - RNA, 21 nt, Human
acagagaacuucaaggcacca

SEQ ID NO: 166596 - RNA, 19 nt, Human
acgcagcacuucugguccc

SEQ ID NO: 166597 - RNA, 20 nt, Human
agaagggacaggcagugggg

SEQ ID NO: 166598 - RNA, 24 nt, Human
agacagccagagauggccugaaca

SEQ ID NO: 166599 - RNA, 18 nt, Human
agaccuagaggggcagca

SEQ ID NO: 166600 - RNA, 18 nt, Human
agaggaagaggaggaggu

SEQ ID NO: 166601 - RNA, 25 nt, Human
agaggaagaggaggagguggacagg

SEQ ID NO: 166602 - RNA, 19 nt, Human
agaggaggagguggacaga

SEQ ID NO: 166603 - RNA, 25 nt, Human
agaggaggagguggacagacaggag

SEQ ID NO: 166604 - RNA, 21 nt, Human
agcagcagggccaccccccac

SEQ ID NO: 166605 - RNA, 22 nt, Human
agcagcagggccaccccccaca

SEQ ID NO: 166606 - RNA, 23 nt, Human
agcagcagggccaccccccacag

SEQ ID NO: 166607 - RNA, 23 nt, Human
agcaggugaggcugugggcuucc

SEQ ID NO: 166608 - RNA, 18 nt, Human
aggaagcugcuguagaca

SEQ ID NO: 166609 - RNA, 19 nt, Human
aggaagcugcuguagacag

SEQ ID NO: 166610 - RNA, 25 nt, Human
aggacagugucucugggcccugcag

SEQ ID NO: 166611 - RNA, 22 nt, Human
aggaggagguggacagacagga

SEQ ID NO: 166612 - RNA, 24 nt, Human
aggcuggggcagggccaggguggg

SEQ ID NO: 166613 - RNA, 22 nt, Human
agggagaugagacacaaaccug

SEQ ID NO: 166614 - RNA, 18 nt, Human
aguggcagugaaaguggg

SEQ ID NO: 166615 - RNA, 21 nt, Human
auggcacaagggcucuggggu

SEQ ID NO: 166616 - RNA, 22 nt, Human
caacagcccccugaaaccacca

SEQ ID NO: 166617 - RNA, 20 nt, Human
caacauccaagccccagacc

SEQ ID NO: 166618 - RNA, 22 nt, Human
caaggcaccaggauucugagga

SEQ ID NO: 166619 - RNA, 22 nt, Human
caccaccaggcccaggcccagc

SEQ ID NO: 166620 - RNA, 24 nt, Human
caccaggauucugaggagcagcag

SEQ ID NO: 166621 - RNA, 18 nt, Human
cagagaacuucaaggcac

SEQ ID NO: 166622 - RNA, 18 nt, Human
cagcagcaggugaggcug

SEQ ID NO: 166623 - RNA, 25 nt, Human
cagcaggugaggcugugggcuuccu

SEQ ID NO: 166624 - RNA, 23 nt, Human
cagcauccacaugcaggaagagc

SEQ ID NO: 166625 - RNA, 24 nt, Human
cagcccuagcaggaagaaggucua

SEQ ID NO: 166626 - RNA, 22 nt, Human
caggguaugagcgcuggcuggg

SEQ ID NO: 166627 - RNA, 21 nt, Human
cagugcaacauccaagcccca

SEQ ID NO: 166628 - RNA, 21 nt, Human
ccagaagggcccaacacccag

SEQ ID NO: 166629 - RNA, 24 nt, Human
ccagaccagacaugcagcauccac

SEQ ID NO: 166630 - RNA, 21 nt, Human
ccaggcccagccgccaaacac

SEQ ID NO: 166631 - RNA, 19 nt, Human
cccagaccagacaugcagc

SEQ ID NO: 166632 - RNA, 21 nt, Human
ccccugaaaccaccagcgccu

SEQ ID NO: 166633 - RNA, 23 nt, Human
ccccugaaaccaccagcgccucg

SEQ ID NO: 166634 - RNA, 19 nt, Human
ccuccuaaggcaguaggaa

SEQ ID NO: 166635 - RNA, 21 nt, Human
ccuuguccaccagaagggccc

SEQ ID NO: 166636 - RNA, 24 nt, Human
cucagaaaacuuagcagaguuggg

SEQ ID NO: 166637 - RNA, 18 nt, Human
cucaucucagaaaacuua

SEQ ID NO: 166638 - RNA, 21 nt, Human
cugcaggucauggcugcccag

SEQ ID NO: 166639 - RNA, 19 nt, Human
cugccuccauuggagcaag

SEQ ID NO: 166640 - RNA, 19 nt, Human
cuggagggagggccgggug

SEQ ID NO: 166641 - RNA, 20 nt, Human
cugugggauuaaaacgggug

SEQ ID NO: 166642 - RNA, 20 nt, Human
cuuccccauggcuggaaccc

SEQ ID NO: 166643 - RNA, 19 nt, Human
gaaccacaacagcccccug

SEQ ID NO: 166644 - RNA, 24 nt, Human
gaagacagccagagauggccugaa

SEQ ID NO: 166645 - RNA, 21 nt, Human
gaccaaaccgcaccgccccag

SEQ ID NO: 166646 - RNA, 24 nt, Human
gagcagcagggccaccccccacag

SEQ ID NO: 166647 - RNA, 23 nt, Human
gagggccggguggcugcugaaga

SEQ ID NO: 166648 - RNA, 21 nt, Human
gccaccccccacagagaguga

SEQ ID NO: 166649 - RNA, 18 nt, Human
gccccagaccagacaugc

SEQ ID NO: 166650 - RNA, 21 nt, Human
ggacagaugcacagagaacuu

SEQ ID NO: 166651 - RNA, 18 nt, Human
ggagcaaggagacagagg

SEQ ID NO: 166652 - RNA, 19 nt, Human
ggcagggccagggugggga

SEQ ID NO: 166653 - RNA, 24 nt, Human
ggcccaggcccagccgccaaacac

SEQ ID NO: 166654 - RNA, 23 nt, Human
ggcuggaaccccaucacucuggc

SEQ ID NO: 166655 - RNA, 20 nt, Human
ggcuggggcagggccagggu

SEQ ID NO: 166656 - RNA, 23 nt, Human
gggaaagaaaaagacagacaaag

SEQ ID NO: 166657 - RNA, 21 nt, Human
gggaggauggacagaugcaca

SEQ ID NO: 166658 - RNA, 19 nt, Human
gggagggccggguggcugc

SEQ ID NO: 166659 - RNA, 23 nt, Human
gggcagcagcaggugaggcugug

SEQ ID NO: 166660 - RNA, 23 nt, Human
gggcagcagcaggugaggcugug

SEQ ID NO: 166661 - RNA, 19 nt, Human
gggcagggccagggugggg

SEQ ID NO: 166662 - RNA, 20 nt, Human
gggcagggccagggugggga

SEQ ID NO: 166663 - RNA, 20 nt, Human
gggcaggguuuagggcuggg

SEQ ID NO: 166664 - RNA, 22 nt, Human
gggcaggguuuagggcugggaa

SEQ ID NO: 166665 - RNA, 21 nt, Human
gggccaggguggggagcuggg

SEQ ID NO: 166666 - RNA, 26 nt, Human
gggcuagacccucaucucagaaaacu

SEQ ID NO: 166667 - RNA, 21 nt, Human
ggggucuggccaggcuacagc

SEQ ID NO: 166668 - RNA, 24 nt, Human
gguccugggcucuucugggagagc

SEQ ID NO: 166669 - RNA, 18 nt, Human
gguggacagacaggagag

SEQ ID NO: 166670 - RNA, 18 nt, Human
guagacaggaggccuugc

SEQ ID NO: 166671 - RNA, 19 nt, Human
guggcagugaaaguggggu

SEQ ID NO: 166672 - RNA, 22 nt, Human
uacccagaaccccugcccaugc

SEQ ID NO: 166673 - RNA, 25 nt, Human
uacccagaaccccugcccaugcuga

SEQ ID NO: 166674 - RNA, 22 nt, Human
uagcagaguugggaccaaaccg

SEQ ID NO: 166675 - RNA, 26 nt, Human
uccccauggcuggaaccccaucacuc

SEQ ID NO: 166676 - RNA, 18 nt, Human
ucgagauaaggcaccaga

SEQ ID NO: 166677 - RNA, 20 nt, Human
ucggaaccacaacagccccc

SEQ ID NO: 166678 - RNA, 20 nt, Human
ucuacacacuuuucuguccc

SEQ ID NO: 166679 - RNA, 24 nt, Human
ucuacacacuuuucuguccccaac

SEQ ID NO: 166680 - RNA, 23 nt, Human
ucuucagcuuaaucuacaugaug

SEQ ID NO: 166681 - RNA, 22 nt, Human
ugaggcugugggcuuccugggg

SEQ ID NO: 166682 - RNA, 29 nt, Human
ugaggcugugggcuuccuggggcaggguu

SEQ ID NO: 166683 - RNA, 18 nt, Human
ugcccagaccuagagggg

SEQ ID NO: 166684 - RNA, 22 nt, Human
ugcccaugaagaggccuucccu

SEQ ID NO: 166685 - RNA, 20 nt, Human
ugcuggagggagggccgggu

SEQ ID NO: 166686 - RNA, 22 nt, Human
ugcuggagggagggccgggugg

SEQ ID NO: 166687 - RNA, 25 nt, Human
ugcuggagggagggccggguggcug

SEQ ID NO: 166688 - RNA, 23 nt, Human
ugcuggagggagggccggguggg

SEQ ID NO: 166689 - RNA, 21 nt, Human
uggacauucacagcaccccug

SEQ ID NO: 166690 - RNA, 21 nt, Human
uggagcaaggagacagaggau

SEQ ID NO: 166691 - RNA, 22 nt, Human
uggcacaagggcucuggggucu

SEQ ID NO: 166692 - RNA, 18 nt, Human
uggccaggaagaaagaug

SEQ ID NO: 166693 - RNA, 24 nt, Human
uggccaggaagaaagauggcacaa

SEQ ID NO: 166694 - RNA, 21 nt, Human
uggccagggccauagggagga

SEQ ID NO: 166695 - RNA, 21 nt, Human
uggcuggaaccccaucacucu

SEQ ID NO: 166696 - RNA, 20 nt, Human
ugggguaaaggagaggaaga

SEQ ID NO: 166697 - RNA, 20 nt, Human
uggguccugggcucuucugc

SEQ ID NO: 166698 - RNA, 22 nt, Human
uggguccugggcucuucugccu

SEQ ID NO: 166699 - RNA, 22 nt, Human
uuauagucggaaccacaacagc

SEQ ID NO: 166700 - RNA, 22 nt, Human
uuccccauggcuggaaccccau

SEQ ID NO: 166701 - RNA, 22 nt, Human
aaaaaaaaaaaacccaacccag

SEQ ID NO: 166702 - RNA, 22 nt, Human
aaaaaaaaaaacccaacccagc

SEQ ID NO: 166703 - RNA, 18 nt, Human
aaaaacccaacccagccc

SEQ ID NO: 166704 - RNA, 20 nt, Human
aaaacccaacccagcccugc

SEQ ID NO: 166705 - RNA, 22 nt, Human
aagaucuuuucuucccucucuc

SEQ ID NO: 166706 - RNA, 22 nt, Human
acccauggaauuucucuuccuu

SEQ ID NO: 166707 - RNA, 19 nt, Human
accuccuucgucgcugccg

SEQ ID NO: 166708 - RNA, 23 nt, Human
agagccggcugcuucucccuggc

SEQ ID NO: 166709 - RNA, 20 nt, Human
caaaaucgucagcccucccc

SEQ ID NO: 166710 - RNA, 26 nt, Human
cagggcaaaagaucuuuucuucccuc

SEQ ID NO: 166711 - RNA, 23 nt, Human
ccaacccagcccugccugcaaua

SEQ ID NO: 166712 - RNA, 21 nt, Human
ccacgccagggcagcuggggc

SEQ ID NO: 166713 - RNA, 21 nt, Human
ccagggcaaaagaucuuuucu

SEQ ID NO: 166714 - RNA, 25 nt, Human
ccaguucaggggggaaaaaaaaaaa

SEQ ID NO: 166715 - RNA, 18 nt, Human
cccaacccagcccugccu

SEQ ID NO: 166716 - RNA, 23 nt, Human
cccaacccagcccugccugcaau

SEQ ID NO: 166717 - RNA, 23 nt, Human
ccgcccaagacccucuggguuug

SEQ ID NO: 166718 - RNA, 22 nt, Human
ccggaggccccugccaaaguca

SEQ ID NO: 166719 - RNA, 19 nt, Human
ccucagcccuggggugacu

SEQ ID NO: 166720 - RNA, 26 nt, Human
ccuccuucgucgcugccgcccaagac

SEQ ID NO: 166721 - RNA, 22 nt, Human
ccucuggguuugacugggguca

SEQ ID NO: 166722 - RNA, 20 nt, Human
cucccuggcgguuccuuugu

SEQ ID NO: 166723 - RNA, 23 nt, Human
cuucucccuggcgguuccuuugu

SEQ ID NO: 166724 - RNA, 23 nt, Human
gaggcugugggccacaaucagca

SEQ ID NO: 166725 - RNA, 20 nt, Human
gccggcugcuucucccuggc

SEQ ID NO: 166726 - RNA, 20 nt, Human
gcgguuccuuugugauggcc

SEQ ID NO: 166727 - RNA, 21 nt, Human
ggggcagcccgggugggcggg

SEQ ID NO: 166728 - RNA, 23 nt, Human
ggggcagcccgggugggcgggca

SEQ ID NO: 166729 - RNA, 27 nt, Human
ggggcugaggcggggcagcccgggugg

SEQ ID NO: 166730 - RNA, 21 nt, Human
ggugccucgguauccuggucu

SEQ ID NO: 166731 - RNA, 21 nt, Human
gucuucaacaaugucgaauuc

SEQ ID NO: 166732 - RNA, 23 nt, Human
uaguccuucccuccccaacuggc

SEQ ID NO: 166733 - RNA, 22 nt, Human
uauccuggucuccuggcguuca

SEQ ID NO: 166734 - RNA, 23 nt, Human
uaugucuucaacaaugucgaauu

SEQ ID NO: 166735 - RNA, 26 nt, Human
uauuuuuaguccuucccuccccaacu

SEQ ID NO: 166736 - RNA, 31 nt, Human
uccuucgucgcugccgcccaagacccucugg

SEQ ID NO: 166737 - RNA, 24 nt, Human
ucuauucuuuuaaaaaaaauuguc

SEQ ID NO: 166738 - RNA, 18 nt, Human
ucuggguuugacuggggu

SEQ ID NO: 166739 - RNA, 20 nt, Human
ucuuuucuucccucucuccu

SEQ ID NO: 166740 - RNA, 21 nt, Human
ugaauaccuccuucgucgcug

SEQ ID NO: 166741 - RNA, 24 nt, Human
ugacuggggucacugguccggagg

SEQ ID NO: 166742 - RNA, 19 nt, Human
ugauggccuugaacagagc

SEQ ID NO: 166743 - RNA, 22 nt, Human
ugcagcaggcugggcaaagcca

SEQ ID NO: 166744 - RNA, 22 nt, Human
ugcggaggaaagucacccaugg

SEQ ID NO: 166745 - RNA, 19 nt, Human
uuaguccuucccuccccaa

SEQ ID NO: 166746 - RNA, 18 nt, Human
uucaggggggaaaaaaaa

SEQ ID NO: 166747 - RNA, 21 nt, Human
uucaggggggaaaaaaaaaaa

SEQ ID NO: 166748 - RNA, 22 nt, Human
uucaggggggaaaaaaaaaaaa

SEQ ID NO: 166749 - RNA, 24 nt, Human
uucaggggggaaaaaaaaaaaacc

SEQ ID NO: 166750 - RNA, 22 nt, Human
uuccuugcucucuuggauugca

SEQ ID NO: 166751 - RNA, 19 nt, Human
uucugcggaggaaagucac

SEQ ID NO: 166752 - RNA, 28 nt, Human
aaaaaaaaaaauaaacagcaaaaucaaa

SEQ ID NO: 166753 - RNA, 21 nt, Human
aaaaaagcaacagccaaaacc

SEQ ID NO: 166754 - RNA, 25 nt, Human
aaaacaaaggugucauaaacaacua

SEQ ID NO: 166755 - RNA, 27 nt, Human
aaacagaaaccagaagcaaagggaccc

SEQ ID NO: 166756 - RNA, 18 nt, Human
aaaugauucuucugccuc

SEQ ID NO: 166757 - RNA, 19 nt, Human
aagcauccauucccugugg

SEQ ID NO: 166758 - RNA, 24 nt, Human
acagagcgcugggauuacagacgu

SEQ ID NO: 166759 - RNA, 19 nt, Human
acaucacagauuccaucac

SEQ ID NO: 166760 - RNA, 18 nt, Human
acauuccagggacaccuu

SEQ ID NO: 166761 - RNA, 18 nt, Human
acgugaacuaucaugcug

SEQ ID NO: 166762 - RNA, 25 nt, Human
agaaaaaaaaaaauaaacagcaaaa

SEQ ID NO: 166763 - RNA, 26 nt, Human
agacaccaaugggaauuaaccccuuu

SEQ ID NO: 166764 - RNA, 19 nt, Human
agaccaagaacaagaccaa

SEQ ID NO: 166765 - RNA, 22 nt, Human
agagagagagcuaguaagauga

SEQ ID NO: 166766 - RNA, 24 nt, Human
agagcgcugggauuacagacguga

SEQ ID NO: 166767 - RNA, 25 nt, Human
agcaaaagggacccugucagaccau

SEQ ID NO: 166768 - RNA, 24 nt, Human
agcagccagaaaucccacuggggg

SEQ ID NO: 166769 - RNA, 20 nt, Human
agcgcugggauuacagacgu

SEQ ID NO: 166770 - RNA, 22 nt, Human
agcgcugggauuacagacguga

SEQ ID NO: 166771 - RNA, 23 nt, Human
agcuaauuaacacauccaauacg

SEQ ID NO: 166772 - RNA, 22 nt, Human
agcugcgauggccucugcagcc

SEQ ID NO: 166773 - RNA, 19 nt, Human
aggaaaauuugugcuuauu

SEQ ID NO: 166774 - RNA, 22 nt, Human
aggaagaggcaagauucauuua

SEQ ID NO: 166775 - RNA, 20 nt, Human
aggaagugugccaccaugcc

SEQ ID NO: 166776 - RNA, 27 nt, Human
aggaggaagugugccaccaugccuggc

SEQ ID NO: 166777 - RNA, 23 nt, Human
aggcaagguuugacaagaccaag

SEQ ID NO: 166778 - RNA, 22 nt, Human
agggacccugucagaccaucuu

SEQ ID NO: 166779 - RNA, 27 nt, Human
agguuugacaagaccaagaacaagacc

SEQ ID NO: 166780 - RNA, 20 nt, Human
agugguccuccugcuucagc

SEQ ID NO: 166781 - RNA, 22 nt, Human
aucacugugucuucuagccacu

SEQ ID NO: 166782 - RNA, 18 nt, Human
aucauccuugccgcccug

SEQ ID NO: 166783 - RNA, 19 nt, Human
aucccauuauauaguacac

SEQ ID NO: 166784 - RNA, 24 nt, Human
augaagauguuguccucccuggug

SEQ ID NO: 166785 - RNA, 22 nt, Human
augaauggaauagaaaacagga

SEQ ID NO: 166786 - RNA, 20 nt, Human
augguagauaaaugaaugga

SEQ ID NO: 166787 - RNA, 18 nt, Human
caaagacaccaaugggaa

SEQ ID NO: 166788 - RNA, 21 nt, Human
caaagcagaauccccagggac

SEQ ID NO: 166789 - RNA, 23 nt, Human
caaauauacauucccaugacuaa

SEQ ID NO: 166790 - RNA, 18 nt, Human
caacagccaaaacccucu

SEQ ID NO: 166791 - RNA, 21 nt, Human
caagaccaagaacaagaccaa

SEQ ID NO: 166792 - RNA, 21 nt, Human
caagaccaagaacuguuuugu

SEQ ID NO: 166793 - RNA, 22 nt, Human
caagcagguauuaacaacuacc

SEQ ID NO: 166794 - RNA, 25 nt, Human
caagguacuguauaguguagaguga

SEQ ID NO: 166795 - RNA, 25 nt, Human
cacacuaaacagaaaccagaagccg

SEQ ID NO: 166796 - RNA, 19 nt, Human
cagaauuauuagcagugaa

SEQ ID NO: 166797 - RNA, 25 nt, Human
cagacuggucccugaagaugacuga

SEQ ID NO: 166798 - RNA, 24 nt, Human
cagagcgcugggauuacagacgug

SEQ ID NO: 166799 - RNA, 18 nt, Human
caggaucaaagucagucc

SEQ ID NO: 166800 - RNA, 24 nt, Human
caggaucuugcucuguugcuuagg

SEQ ID NO: 166801 - RNA, 21 nt, Human
cagguagaaaacaaaaaacua

SEQ ID NO: 166802 - RNA, 20 nt, Human
cauaugguucaaacaauaac

SEQ ID NO: 166803 - RNA, 22 nt, Human
caucagacuggucccugaagau

SEQ ID NO: 166804 - RNA, 18 nt, Human
caugaagauguuguccuc

SEQ ID NO: 166805 - RNA, 20 nt, Human
caugucauugucuugauuuu

SEQ ID NO: 166806 - RNA, 19 nt, Human
cauuguacaacccuguaca

SEQ ID NO: 166807 - RNA, 21 nt, Human
cauuuaucaaauguaaucugc

SEQ ID NO: 166808 - RNA, 18 nt, Human
ccggaccuggagguauag

SEQ ID NO: 166809 - RNA, 22 nt, Human
ccggagaucaagugaagcaucc

SEQ ID NO: 166810 - RNA, 26 nt, Human
ccuccugcuucagccucccgacaggc

SEQ ID NO: 166811 - RNA, 18 nt, Human
ccuggugcaggugaggcu

SEQ ID NO: 166812 - RNA, 21 nt, Human
ccuugcuuugugcucuucugg

SEQ ID NO: 166813 - RNA, 20 nt, Human
ccuuuuuuuuuuuuugagac

SEQ ID NO: 166814 - RNA, 21 nt, Human
cgacacacacuuggcaaugcc

SEQ ID NO: 166815 - RNA, 27 nt, Human
cgagugguccuccugcuucagccuccc

SEQ ID NO: 166816 - RNA, 20 nt, Human
cgcugggauuacagacguga

SEQ ID NO: 166817 - RNA, 23 nt, Human
cuaaaaaugccaaucaaagcaga

SEQ ID NO: 166818 - RNA, 20 nt, Human
cuacgcccugcucugccagg

SEQ ID NO: 166819 - RNA, 23 nt, Human
cucccgacaggcugggacuacag

SEQ ID NO: 166820 - RNA, 19 nt, Human
cucguucuuuuugccuugg

SEQ ID NO: 166821 - RNA, 20 nt, Human
cugacuuguuuuucaugggu

SEQ ID NO: 166822 - RNA, 23 nt, Human
cugcuucagccucccgacaggcu

SEQ ID NO: 166823 - RNA, 18 nt, Human
cuggugcaggugaggcug

SEQ ID NO: 166824 - RNA, 19 nt, Human
cuggugggugugcagguag

SEQ ID NO: 166825 - RNA, 18 nt, Human
cuuagcagucuuugccau

SEQ ID NO: 166826 - RNA, 21 nt, Human
cuugcucuguugcuuaggcug

SEQ ID NO: 166827 - RNA, 18 nt, Human
cuugcugugucgcccggg

SEQ ID NO: 166828 - RNA, 19 nt, Human
cuugcugugucgcccgggc

SEQ ID NO: 166829 - RNA, 22 nt, Human
cuugcugugucgcccgggcugg

SEQ ID NO: 166830 - RNA, 20 nt, Human
cuugcuuugugcucuucugg

SEQ ID NO: 166831 - RNA, 19 nt, Human
cuuuaaaaaaagcaacagc

SEQ ID NO: 166832 - RNA, 22 nt, Human
cuuuaaaaaaagcaacagccaa

SEQ ID NO: 166833 - RNA, 21 nt, Human
gaauaacagaaauaaaaaccc

SEQ ID NO: 166834 - RNA, 24 nt, Human
gaauaacagaaauaaaaagggagc

SEQ ID NO: 166835 - RNA, 19 nt, Human
gaguaucuuuuuuccauuu

SEQ ID NO: 166836 - RNA, 24 nt, Human
gauuacagacgugaacuaucaugc

SEQ ID NO: 166837 - RNA, 18 nt, Human
gcagaauccccagggaca

SEQ ID NO: 166838 - RNA, 19 nt, Human
gcagugggcugcuaaugca

SEQ ID NO: 166839 - RNA, 21 nt, Human
gccaaaguagaggaacaucca

SEQ ID NO: 166840 - RNA, 19 nt, Human
gcugacauaacagaaccac

SEQ ID NO: 166841 - RNA, 19 nt, Human
gcuggagugcagcggcaca

SEQ ID NO: 166842 - RNA, 19 nt, Human
gcuggucuggaacuccugg

SEQ ID NO: 166843 - RNA, 20 nt, Human
ggaauuaaccccuucacuuu

SEQ ID NO: 166844 - RNA, 22 nt, Human
ggaucuugcugugucgcccggg

SEQ ID NO: 166845 - RNA, 19 nt, Human
ggccaggcagcaucaagcu

SEQ ID NO: 166846 - RNA, 18 nt, Human
gggaaaaagaaaaagaaa

SEQ ID NO: 166847 - RNA, 18 nt, Human
guaaaauguaaugucucc

SEQ ID NO: 166848 - RNA, 19 nt, Human
guaaaauguaaugucuccu

SEQ ID NO: 166849 - RNA, 18 nt, Human
guagauaaaugaauggaa

SEQ ID NO: 166850 - RNA, 22 nt, Human
guagauaaaugaauggaauaga

SEQ ID NO: 166851 - RNA, 18 nt, Human
gucacguacuuuuuguuu

SEQ ID NO: 166852 - RNA, 21 nt, Human
gugaagcauccauucccugug

SEQ ID NO: 166853 - RNA, 24 nt, Human
gugguccuccugcuucagccuccc

SEQ ID NO: 166854 - RNA, 25 nt, Human
guggugggaaaaagaaaaagaaaaa

SEQ ID NO: 166855 - RNA, 23 nt, Human
gugugcaaugugacauuuugaua

SEQ ID NO: 166856 - RNA, 19 nt, Human
guguguguguguguguaca

SEQ ID NO: 166857 - RNA, 21 nt, Human
gugugugugugugugugugug

SEQ ID NO: 166858 - RNA, 23 nt, Human
uaaaaaaagcaacagccaaaacc

SEQ ID NO: 166859 - RNA, 20 nt, Human
uaaaaacccucaaaagucaa

SEQ ID NO: 166860 - RNA, 27 nt, Human
uaaaaacccucaaaagucaaaguacca

SEQ ID NO: 166861 - RNA, 20 nt, Human
uaaaaagcaaagaguuacaa

SEQ ID NO: 166862 - RNA, 24 nt, Human
uaaaaagcaaagaguuacaaaacu

SEQ ID NO: 166863 - RNA, 21 nt, Human
uaaaagauauuacuucaagcu

SEQ ID NO: 166864 - RNA, 18 nt, Human
uaaacagaaaccagaagc

SEQ ID NO: 166865 - RNA, 19 nt, Human
uaaacagaaaccagaagca

SEQ ID NO: 166866 - RNA, 19 nt, Human
uaaaugauucuucugccuc

SEQ ID NO: 166867 - RNA, 21 nt, Human
uaaaugauucuucugccucga

SEQ ID NO: 166868 - RNA, 20 nt, Human
uaacagaaauaaaaacccuc

SEQ ID NO: 166869 - RNA, 24 nt, Human
uaacagaaauaaaaacccucaaaa

SEQ ID NO: 166870 - RNA, 23 nt, Human
uaacauaagauugauuagcccuc

SEQ ID NO: 166871 - RNA, 25 nt, Human
uaaccucagggagaaugucuaauau

SEQ ID NO: 166872 - RNA, 24 nt, Human
uaagaauauaaucuucucucucuc

SEQ ID NO: 166873 - RNA, 22 nt, Human
uaagcaaagacaccaaugggaa

SEQ ID NO: 166874 - RNA, 26 nt, Human
uaagccccaaauaauucugugaaccc

SEQ ID NO: 166875 - RNA, 24 nt, Human
uaaguucccagucagaaagccaac

SEQ ID NO: 166876 - RNA, 19 nt, Human
uaauauuagcuacuucauu

SEQ ID NO: 166877 - RNA, 22 nt, Human
uaaucaaacauaucuccccaaa

SEQ ID NO: 166878 - RNA, 23 nt, Human
uacauaaaugagaaugaguauuu

SEQ ID NO: 166879 - RNA, 25 nt, Human
uaccauaaauauaaagaugaaagca

SEQ ID NO: 166880 - RNA, 19 nt, Human
uacgcccugcucugccagg

SEQ ID NO: 166881 - RNA, 26 nt, Human
uagaaaacaaaaaacuauaguaaaaa

SEQ ID NO: 166882 - RNA, 18 nt, Human
uagaaaacaggaagaggc

SEQ ID NO: 166883 - RNA, 18 nt, Human
uagaaaacaggaagaggc

SEQ ID NO: 166884 - RNA, 21 nt, Human
uagaaaacaggaagaggcaag

SEQ ID NO: 166885 - RNA, 21 nt, Human
uagaaaagauagcacuuuuuu

SEQ ID NO: 166886 - RNA, 22 nt, Human
uagaauauaucucuguugaaug

SEQ ID NO: 166887 - RNA, 19 nt, Human
uagaggaacauccacgaug

SEQ ID NO: 166888 - RNA, 24 nt, Human
uagcagugaaaauuaguacucauu

SEQ ID NO: 166889 - RNA, 22 nt, Human
uaggggaaaaagccuucacucu

SEQ ID NO: 166890 - RNA, 24 nt, Human
uaguagguaugggaucuugcugug

SEQ ID NO: 166891 - RNA, 22 nt, Human
uaucaaaaauaauuccauucaa

SEQ ID NO: 166892 - RNA, 23 nt, Human
uaucaaaaauaauuccauucaau

SEQ ID NO: 166893 - RNA, 20 nt, Human
uaucaugcugguuccauuuu

SEQ ID NO: 166894 - RNA, 22 nt, Human
uauguguuuucugaagguguug

SEQ ID NO: 166895 - RNA, 21 nt, Human
uauuacuucaagcuauuucaa

SEQ ID NO: 166896 - RNA, 22 nt, Human
uauuauuccucuuacccugaug

SEQ ID NO: 166897 - RNA, 21 nt, Human
uauucuagaauauaucucugu

SEQ ID NO: 166898 - RNA, 27 nt, Human
uauucugagggacaagggagauuaaaa

SEQ ID NO: 166899 - RNA, 23 nt, Human
ucaaaaguggaacaggaucaaag

SEQ ID NO: 166900 - RNA, 18 nt, Human
ucaaagcagaauccccag

SEQ ID NO: 166901 - RNA, 19 nt, Human
ucacugcagccuuggacuc

SEQ ID NO: 166902 - RNA, 23 nt, Human
ucacugcagccuuggacucuugg

SEQ ID NO: 166903 - RNA, 23 nt, Human
ucacugcagccuuggacucuugg

SEQ ID NO: 166904 - RNA, 24 nt, Human
ucacugcagccuuggacucuuggg

SEQ ID NO: 166905 - RNA, 18 nt, Human
ucagccucccgacaggcu

SEQ ID NO: 166906 - RNA, 24 nt, Human
uccacagugacaagcauuccccau

SEQ ID NO: 166907 - RNA, 19 nt, Human
uccauucaauauaauucuu

SEQ ID NO: 166908 - RNA, 24 nt, Human
uccuccugcuucagccucccgaca

SEQ ID NO: 166909 - RNA, 21 nt, Human
ucucugacuuguuuuucaugg

SEQ ID NO: 166910 - RNA, 19 nt, Human
ucugcuuugcuuucccaug

SEQ ID NO: 166911 - RNA, 22 nt, Human
ucuggaacuccugggcuaaaug

SEQ ID NO: 166912 - RNA, 22 nt, Human
ucuguugcuuaggcuggagugc

SEQ ID NO: 166913 - RNA, 24 nt, Human
ucuguugcuuaggcuggagugcag

SEQ ID NO: 166914 - RNA, 22 nt, Human
ucuucuagccacugugauaugc

SEQ ID NO: 166915 - RNA, 20 nt, Human
ucuugcucuguugcuuaggc

SEQ ID NO: 166916 - RNA, 23 nt, Human
ucuugcucuguugcuuaggcugg

SEQ ID NO: 166917 - RNA, 24 nt, Human
ucuugcucuguugcuuaggcugga

SEQ ID NO: 166918 - RNA, 19 nt, Human
ucuugcugugucgcccggg

SEQ ID NO: 166919 - RNA, 30 nt, Human
ucuugcugugucgcccgggcuggucuggaa

SEQ ID NO: 166920 - RNA, 24 nt, Human
ucuugggcucgagugguccuccug

SEQ ID NO: 166921 - RNA, 20 nt, Human
ugacaagaccaagaacaaga

SEQ ID NO: 166922 - RNA, 24 nt, Human
ugacuaaaaaugccaaucaaagca

SEQ ID NO: 166923 - RNA, 22 nt, Human
ugagacaggaucuugcucuguu

SEQ ID NO: 166924 - RNA, 20 nt, Human
ugagagagagagagcuagua

SEQ ID NO: 166925 - RNA, 20 nt, Human
ugaggaaacaagauacuuuu

SEQ ID NO: 166926 - RNA, 18 nt, Human
ugaggguggcccagaguc

SEQ ID NO: 166927 - RNA, 26 nt, Human
ugaucaccuucacagacucuuuuccc

SEQ ID NO: 166928 - RNA, 19 nt, Human
ugcagaccucauuuuucaa

SEQ ID NO: 166929 - RNA, 19 nt, Human
ugcagaccucauuuuucaa

SEQ ID NO: 166930 - RNA, 18 nt, Human
ugccuguugcaauggccu

SEQ ID NO: 166931 - RNA, 19 nt, Human
ugccuucuuagcauucaua

SEQ ID NO: 166932 - RNA, 19 nt, Human
ugcuuaggcuggagugcag

SEQ ID NO: 166933 - RNA, 20 nt, Human
ugcuuaggcuggagugcagc

SEQ ID NO: 166934 - RNA, 24 nt, Human
ugcuucagccucccgacaggcugg

SEQ ID NO: 166935 - RNA, 25 nt, Human
ugcuucagccucccgacaggcuggg

SEQ ID NO: 166936 - RNA, 19 nt, Human
ugcuuucuauccuggugca

SEQ ID NO: 166937 - RNA, 20 nt, Human
uggaaaccagguauugcuuu

SEQ ID NO: 166938 - RNA, 19 nt, Human
uggaacuccugggcuaaau

SEQ ID NO: 166939 - RNA, 18 nt, Human
uggaagacaagaauuugc

SEQ ID NO: 166940 - RNA, 19 nt, Human
uggaauagaaaacaggaag

SEQ ID NO: 166941 - RNA, 21 nt, Human
uggaauagaaaacaggaagag

SEQ ID NO: 166942 - RNA, 24 nt, Human
uggaauagaaaacaggaagaggca

SEQ ID NO: 166943 - RNA, 19 nt, Human
uggaaugguaagucaugag

SEQ ID NO: 166944 - RNA, 25 nt, Human
uggacucuugggcucgagugguccu

SEQ ID NO: 166945 - RNA, 21 nt, Human
uggagugcagcggcacaguua

SEQ ID NO: 166946 - RNA, 24 nt, Human
uggagugcagcggcacaguuaugg

SEQ ID NO: 166947 - RNA, 20 nt, Human
uggaugggguucuguugaag

SEQ ID NO: 166948 - RNA, 19 nt, Human
uggccagcuuugauguguc

SEQ ID NO: 166949 - RNA, 22 nt, Human
uggcccaaagugguuucagcag

SEQ ID NO: 166950 - RNA, 23 nt, Human
uggccuguacucgcaaccuugac

SEQ ID NO: 166951 - RNA, 28 nt, Human
ugggacuacaggaggaagugugccacca

SEQ ID NO: 166952 - RNA, 24 nt, Human
ugggaucuugcugugucgcccggg

SEQ ID NO: 166953 - RNA, 19 nt, Human
ugggauuacagacgugaac

SEQ ID NO: 166954 - RNA, 19 nt, Human
ugggauuacagacgugaac

SEQ ID NO: 166955 - RNA, 21 nt, Human
ugggauuacagacgugaacua

SEQ ID NO: 166956 - RNA, 23 nt, Human
ugggauuacagacgugaacuauc

SEQ ID NO: 166957 - RNA, 24 nt, Human
ugggauuacagacgugaacuauca

SEQ ID NO: 166958 - RNA, 25 nt, Human
ugggauuacagacgugaacuaucaa

SEQ ID NO: 166959 - RNA, 27 nt, Human
ugggauuacagacgugaacuaucaugc

SEQ ID NO: 166960 - RNA, 20 nt, Human
ugggcucgagugguccuccu

SEQ ID NO: 166961 - RNA, 20 nt, Human
ugguccuccugcuucagccu

SEQ ID NO: 166962 - RNA, 25 nt, Human
uguacucgcaaccuugacucuugac

SEQ ID NO: 166963 - RNA, 18 nt, Human
ugucgcccgggcuggucu

SEQ ID NO: 166964 - RNA, 19 nt, Human
ugucgcccgggcuggucug

SEQ ID NO: 166965 - RNA, 21 nt, Human
ugugacauuuugauaugugua

SEQ ID NO: 166966 - RNA, 23 nt, Human
ugugugaguaucuuuuuuccauu

SEQ ID NO: 166967 - RNA, 21 nt, Human
uguguguguguacaagcaugu

SEQ ID NO: 166968 - RNA, 18 nt, Human
ugugugugugugugugug

SEQ ID NO: 166969 - RNA, 18 nt, Human
ugugugugugugugugug

SEQ ID NO: 166970 - RNA, 18 nt, Human
ugugugugugugugugug

SEQ ID NO: 166971 - RNA, 21 nt, Human
ugugugugugugugugugugu

SEQ ID NO: 166972 - RNA, 21 nt, Human
ugugugugugugugugugugu

SEQ ID NO: 166973 - RNA, 24 nt, Human
uguuugugugugugugugugugug

SEQ ID NO: 166974 - RNA, 24 nt, Human
uuaaagcuaauuaacacauccaau

SEQ ID NO: 166975 - RNA, 22 nt, Human
uucagccucccgacaggcuggg

SEQ ID NO: 166976 - RNA, 20 nt, Human
uuccuuuuuuuuuuuuugag

SEQ ID NO: 166977 - RNA, 19 nt, Human
uucugugaaccccauaaga

SEQ ID NO: 166978 - RNA, 20 nt, Human
uucuuccuuuuuuuuuuuuu

SEQ ID NO: 166979 - RNA, 22 nt, Human
uucuugauucugucaggccggg

SEQ ID NO: 166980 - RNA, 23 nt, Human
uucuugcagaccucauuuuucaa

SEQ ID NO: 166981 - RNA, 22 nt, Human
uugaaauagaaaagauagcacu

SEQ ID NO: 166982 - RNA, 20 nt, Human
uugacauagccucagugaau

SEQ ID NO: 166983 - RNA, 22 nt, Human
uugagacaggaucuugcucugu

SEQ ID NO: 166984 - RNA, 25 nt, Human
uuggacucuugggcucgaguggucc

SEQ ID NO: 166985 - RNA, 22 nt, Human
uuggccuguacucgcaaccuug

SEQ ID NO: 166986 - RNA, 23 nt, Human
uuggggcacuguuuucugcuuug

SEQ ID NO: 166987 - RNA, 21 nt, Human
uugucucaaaaguaucuagaa

SEQ ID NO: 166988 - RNA, 21 nt, Human
uuuaaaauaagacuuuacuga

SEQ ID NO: 166989 - RNA, 22 nt, Human
uuucuugcagaccucauuuuuc

SEQ ID NO: 166990 - RNA, 22 nt, Human
uuugauguguccuuacagaauu

SEQ ID NO: 166991 - RNA, 18 nt, Human
uuugcugagagagagaga

SEQ ID NO: 166992 - RNA, 23 nt, Human
uuugugcuuauuaguauuuuuau

SEQ ID NO: 166993 - RNA, 23 nt, Human
uuuguuuuuaaccucagggagaa

SEQ ID NO: 166994 - RNA, 22 nt, Human
uuuuuuuuuuugagacaggauc

SEQ ID NO: 166995 - RNA, 20 nt, Human
uuuuuuuuuuugagacaggg

SEQ ID NO: 166996 - RNA, 24 nt, Human
uuuuuuuuuuuugagacaggaucu

SEQ ID NO: 166997 - RNA, 20 nt, Human
aaaacccaaaacacaagucu

SEQ ID NO: 166998 - RNA, 24 nt, Human
aaauucacuuucacagucaacaag

SEQ ID NO: 166999 - RNA, 22 nt, Human
aaggaucucauaugaaugcagu

SEQ ID NO: 167000 - RNA, 21 nt, Human
aauuacuaaaaaauacuaaaa

SEQ ID NO: 167001 - RNA, 22 nt, Human
acacaagucugcugugaguccu

SEQ ID NO: 167002 - RNA, 22 nt, Human
agguuuaaaaaacccaaaacac

SEQ ID NO: 167003 - RNA, 19 nt, Human
caguagaacaggguuccua

SEQ ID NO: 167004 - RNA, 25 nt, Human
ccacacaaagcccacggcagcugca

SEQ ID NO: 167005 - RNA, 25 nt, Human
ccccgucucccaagcucugcgucca

SEQ ID NO: 167006 - RNA, 18 nt, Human
ccugugcuuauacuacaa

SEQ ID NO: 167007 - RNA, 20 nt, Human
cugcaggcugagcuuguccu

SEQ ID NO: 167008 - RNA, 24 nt, Human
gaaaaagcaauccuauauacacug

SEQ ID NO: 167009 - RNA, 18 nt, Human
gcuuccguuacuucagaa

SEQ ID NO: 167010 - RNA, 21 nt, Human
uaaaaaacccaaaacacaagu

SEQ ID NO: 167011 - RNA, 22 nt, Human
uaauagcccucccccgucuccc

SEQ ID NO: 167012 - RNA, 24 nt, Human
uaauagcccucccccgucucccaa

SEQ ID NO: 167013 - RNA, 23 nt, Human
uauggcaaauguacaguacauug

SEQ ID NO: 167014 - RNA, 20 nt, Human
ucagcaguguugaggucuuu

SEQ ID NO: 167015 - RNA, 20 nt, Human
ucagucucuuuuuccagugu

SEQ ID NO: 167016 - RNA, 24 nt, Human
ucauaugaaugcaguccugauugu

SEQ ID NO: 167017 - RNA, 22 nt, Human
ugaaaaauggccugugcuuaua

SEQ ID NO: 167018 - RNA, 18 nt, Human
ugcaaggaaaauacagua

SEQ ID NO: 167019 - RNA, 24 nt, Human
ugcaaggaaaauacaguacaaauu

SEQ ID NO: 167020 - RNA, 19 nt, Human
uggaguaauagcccucccc

SEQ ID NO: 167021 - RNA, 23 nt, Human
uggaguaauagcccucccccguc

SEQ ID NO: 167022 - RNA, 18 nt, Human
uggcaaauguacaguaca

SEQ ID NO: 167023 - RNA, 18 nt, Human
uuauacuacaaggaucuc

SEQ ID NO: 167024 - RNA, 20 nt, Human
uucacagucaacaagucauc

SEQ ID NO: 167025 - RNA, 22 nt, Human
uucacagucaacaagucaucuu

SEQ ID NO: 167026 - RNA, 20 nt, Human
uuuucagucucuuuuuccag

SEQ ID NO: 167027 - RNA, 23 nt, Human
aaaaaaaucacaaaaagcagcug

SEQ ID NO: 167028 - RNA, 19 nt, Human
aaaaagcagcuggcuccca

SEQ ID NO: 167029 - RNA, 22 nt, Human
aaaacacacauacacccacacc

SEQ ID NO: 167030 - RNA, 21 nt, Human
aaaauagaaugugacauuuuc

SEQ ID NO: 167031 - RNA, 19 nt, Human
aaacagaauaauaccaaga

SEQ ID NO: 167032 - RNA, 19 nt, Human
aaacagagccagcuuagcg

SEQ ID NO: 167033 - RNA, 19 nt, Human
aaacagagccagcuuagcg

SEQ ID NO: 167034 - RNA, 19 nt, Human
aaagaugcacuccuccuuu

SEQ ID NO: 167035 - RNA, 24 nt, Human
aaaggaagcauacucuucucccca

SEQ ID NO: 167036 - RNA, 24 nt, Human
aaaguuuuucuuaauuuuucucug

SEQ ID NO: 167037 - RNA, 19 nt, Human
aacaugccacgaaugagaa

SEQ ID NO: 167038 - RNA, 18 nt, Human
aacugugcaaaacagaau

SEQ ID NO: 167039 - RNA, 20 nt, Human
aagcacuuuguaacuagcuc

SEQ ID NO: 167040 - RNA, 22 nt, Human
aagcauacucuucuccccaaga

SEQ ID NO: 167041 - RNA, 24 nt, Human
aagcauacucuucuccccaagaag

SEQ ID NO: 167042 - RNA, 21 nt, Human
aauagcaucaaacagagccag

SEQ ID NO: 167043 - RNA, 21 nt, Human
aauagcaucaaacagagccag

SEQ ID NO: 167044 - RNA, 20 nt, Human
aauugguuugguugguauag

SEQ ID NO: 167045 - RNA, 21 nt, Human
acaaaagccgcugccaggagc

SEQ ID NO: 167046 - RNA, 23 nt, Human
acacacacacacacacacacaca

SEQ ID NO: 167047 - RNA, 23 nt, Human
acacacacacacacacacacaca

SEQ ID NO: 167048 - RNA, 23 nt, Human
acacacacacacacacacacaca

SEQ ID NO: 167049 - RNA, 23 nt, Human
acacacacacacacacacacaca

SEQ ID NO: 167050 - RNA, 25 nt, Human
acacacauacacccacacccacaca

SEQ ID NO: 167051 - RNA, 24 nt, Human
acagaacauaaaagcaguugccaa

SEQ ID NO: 167052 - RNA, 22 nt, Human
acagagagccuuuaaacaagga

SEQ ID NO: 167053 - RNA, 21 nt, Human
acccacacacacacacacaca

SEQ ID NO: 167054 - RNA, 19 nt, Human
acccacacccacacacaca

SEQ ID NO: 167055 - RNA, 26 nt, Human
acuagaggagccaaaaguaugggcuc

SEQ ID NO: 167056 - RNA, 26 nt, Human
acuauuaaaaaaaucacaaaaagcag

SEQ ID NO: 167057 - RNA, 19 nt, Human
agacacagacuugcacaug

SEQ ID NO: 167058 - RNA, 23 nt, Human
agaggcauacauucuucgguuac

SEQ ID NO: 167059 - RNA, 24 nt, Human
agccccgucccccuccgugcccac

SEQ ID NO: 167060 - RNA, 21 nt, Human
agccgccgccgcugccgggga

SEQ ID NO: 167061 - RNA, 21 nt, Human
aggaaacaaggcacggguccc

SEQ ID NO: 167062 - RNA, 24 nt, Human
aggaccaaaccaugucugucuuau

SEQ ID NO: 167063 - RNA, 19 nt, Human
aggagccaaaaguaugggc

SEQ ID NO: 167064 - RNA, 22 nt, Human
aggagccaaaaguaugggcuca

SEQ ID NO: 167065 - RNA, 23 nt, Human
aggcaaaacuagccaauauccau

SEQ ID NO: 167066 - RNA, 22 nt, Human
aggcaaguuucaaagcaguuga

SEQ ID NO: 167067 - RNA, 18 nt, Human
aggcccgcuggccgcugc

SEQ ID NO: 167068 - RNA, 25 nt, Human
auacacccacacccacacacacaca

SEQ ID NO: 167069 - RNA, 23 nt, Human
auacauagacccuaacuugcaua

SEQ ID NO: 167070 - RNA, 24 nt, Human
aucaagacaugaacagcuaagguu

SEQ ID NO: 167071 - RNA, 21 nt, Human
auccaaggcccacuugaucuu

SEQ ID NO: 167072 - RNA, 21 nt, Human
auccaaggcccacuugaucuu

SEQ ID NO: 167073 - RNA, 22 nt, Human
auugcugagccccgucccccuc

SEQ ID NO: 167074 - RNA, 23 nt, Human
auuugcauuuucauggacaggaa

SEQ ID NO: 167075 - RNA, 21 nt, Human
caaaaagcagcuggcucccau

SEQ ID NO: 167076 - RNA, 24 nt, Human
caaaccugaguuugaaggagcuga

SEQ ID NO: 167077 - RNA, 27 nt, Human
cacaaaacacacauacacccacaccca

SEQ ID NO: 167078 - RNA, 20 nt, Human
cacacacacacacacacaca

SEQ ID NO: 167079 - RNA, 20 nt, Human
cacacacacacacacacaca

SEQ ID NO: 167080 - RNA, 20 nt, Human
cacacacacacacacacaca

SEQ ID NO: 167081 - RNA, 20 nt, Human
cacacacacacacacacaca

SEQ ID NO: 167082 - RNA, 20 nt, Human
cacacacacacacacacaca

SEQ ID NO: 167083 - RNA, 20 nt, Human
cacacacacacacacacaca

SEQ ID NO: 167084 - RNA, 20 nt, Human
cacacacacacacacacaca

SEQ ID NO: 167085 - RNA, 20 nt, Human
cacacacacacacacacaca

SEQ ID NO: 167086 - RNA, 20 nt, Human
cacacacacacacacacaca

SEQ ID NO: 167087 - RNA, 20 nt, Human
cacacacacacacacacaca

SEQ ID NO: 167088 - RNA, 22 nt, Human
cacacacacacacacacacaca

SEQ ID NO: 167089 - RNA, 22 nt, Human
cacacacacacacacacacaca

SEQ ID NO: 167090 - RNA, 22 nt, Human
cacacacacacacacacacaca

SEQ ID NO: 167091 - RNA, 22 nt, Human
cacacacacacacacacacaca

SEQ ID NO: 167092 - RNA, 22 nt, Human
cacacacacacacacacacaca

SEQ ID NO: 167093 - RNA, 22 nt, Human
cacacacacacacacacacaca

SEQ ID NO: 167094 - RNA, 18 nt, Human
cacacauacacccacacc

SEQ ID NO: 167095 - RNA, 21 nt, Human
cacacauacacccacacccac

SEQ ID NO: 167096 - RNA, 24 nt, Human
cacauaagaacagaggcauacauu

SEQ ID NO: 167097 - RNA, 25 nt, Human
cacaugguuucagccccauuccacc

SEQ ID NO: 167098 - RNA, 24 nt, Human
cacccacacccacacacacacaca

SEQ ID NO: 167099 - RNA, 22 nt, Human
cagacauucaggcugaaaugaa

SEQ ID NO: 167100 - RNA, 23 nt, Human
cagaccccaggcaaguuucaaag

SEQ ID NO: 167101 - RNA, 18 nt, Human
caggagacaaccacuucc

SEQ ID NO: 167102 - RNA, 20 nt, Human
caggagacaaccacuucccc

SEQ ID NO: 167103 - RNA, 22 nt, Human
caggagccaguaggcucacuag

SEQ ID NO: 167104 - RNA, 22 nt, Human
caucgcuguccaucugcuccug

SEQ ID NO: 167105 - RNA, 18 nt, Human
cauugggugaucagugca

SEQ ID NO: 167106 - RNA, 26 nt, Human
cauuggguuuaggaaggauuucucua

SEQ ID NO: 167107 - RNA, 26 nt, Human
ccacaaaagccgcugccaggagccuc

SEQ ID NO: 167108 - RNA, 21 nt, Human
ccacacacacacacacacaca

SEQ ID NO: 167109 - RNA, 19 nt, Human
ccagcuaaugcucuuccac

SEQ ID NO: 167110 - RNA, 20 nt, Human
cccaagaagcagcaauccac

SEQ ID NO: 167111 - RNA, 24 nt, Human
cccacacacacacacacacacaca

SEQ ID NO: 167112 - RNA, 20 nt, Human
cccacacccacacacacaca

SEQ ID NO: 167113 - RNA, 19 nt, Human
cccaggcaaguuucaaagc

SEQ ID NO: 167114 - RNA, 24 nt, Human
cccaucaugcucagaccccaggca

SEQ ID NO: 167115 - RNA, 21 nt, Human
ccccaagaagcagcaauccac

SEQ ID NO: 167116 - RNA, 18 nt, Human
ccccgcgcccugagcgcc

SEQ ID NO: 167117 - RNA, 20 nt, Human
ccccgcgcccugagcgcccg

SEQ ID NO: 167118 - RNA, 21 nt, Human
ccccggagcccgcuccgagcc

SEQ ID NO: 167119 - RNA, 21 nt, Human
ccccgucccccuccgugccca

SEQ ID NO: 167120 - RNA, 21 nt, Human
cccgagccccggagcccgcuc

SEQ ID NO: 167121 - RNA, 24 nt, Human
cccugagcgcccgucucgcggcuc

SEQ ID NO: 167122 - RNA, 21 nt, Human
cccuuuccuacccugucuccc

SEQ ID NO: 167123 - RNA, 25 nt, Human
ccgcuccgagccgccgccgcugccg

SEQ ID NO: 167124 - RNA, 18 nt, Human
ccucaaucaaacuggucc

SEQ ID NO: 167125 - RNA, 19 nt, Human
ccuccgugcccacauggug

SEQ ID NO: 167126 - RNA, 21 nt, Human
ccuucucccgguuucucuuuu

SEQ ID NO: 167127 - RNA, 20 nt, Human
cgaaaaccccauacaaucag

SEQ ID NO: 167128 - RNA, 22 nt, Human
cgucccccuccgugcccacaug

SEQ ID NO: 167129 - RNA, 23 nt, Human
cuaggaaacaaggcacggguccc

SEQ ID NO: 167130 - RNA, 24 nt, Human
cucagaccccaggcaaguuucaaa

SEQ ID NO: 167131 - RNA, 26 nt, Human
cucauuaacuaauauccugaguccca

SEQ ID NO: 167132 - RNA, 18 nt, Human
cucccagaauccagaaaa

SEQ ID NO: 167133 - RNA, 19 nt, Human
cucccccggccaacgaccc

SEQ ID NO: 167134 - RNA, 18 nt, Human
cuccucaaucaaacuggu

SEQ ID NO: 167135 - RNA, 18 nt, Human
cucucguucgccgccgcc

SEQ ID NO: 167136 - RNA, 19 nt, Human
cucuuccacauccuuucag

SEQ ID NO: 167137 - RNA, 19 nt, Human
cugccaggagccaguaggc

SEQ ID NO: 167138 - RNA, 20 nt, Human
cugccggggaggagccgaga

SEQ ID NO: 167139 - RNA, 22 nt, Human
cugcuccuggcugggcccucaa

SEQ ID NO: 167140 - RNA, 27 nt, Human
cugguccugcgugcccugagguggcgg

SEQ ID NO: 167141 - RNA, 19 nt, Human
cuguagcauauauucuugg

SEQ ID NO: 167142 - RNA, 19 nt, Human
cuuucacaacuaacugugc

SEQ ID NO: 167143 - RNA, 21 nt, Human
cuuuuugcuuuuuuuccuuuu

SEQ ID NO: 167144 - RNA, 20 nt, Human
gaaggagacagaacauaaaa

SEQ ID NO: 167145 - RNA, 21 nt, Human
gaaggagacagaacauaaaag

SEQ ID NO: 167146 - RNA, 22 nt, Human
gaaugagaauggacauagaacc

SEQ ID NO: 167147 - RNA, 20 nt, Human
gacccugaagaguaggcgca

SEQ ID NO: 167148 - RNA, 22 nt, Human
gagcccgcuccgagccgccgcc

SEQ ID NO: 167149 - RNA, 21 nt, Human
gcacaaaacacacauacaccc

SEQ ID NO: 167150 - RNA, 19 nt, Human
gcagcuccucaaucaaacu

SEQ ID NO: 167151 - RNA, 22 nt, Human
gccccggagcccgcuccgagcc

SEQ ID NO: 167152 - RNA, 20 nt, Human
gcccugagcgcccgucucgc

SEQ ID NO: 167153 - RNA, 19 nt, Human
gcccuuuccuacccugucu

SEQ ID NO: 167154 - RNA, 19 nt, Human
gcuccagccaggagacaac

SEQ ID NO: 167155 - RNA, 19 nt, Human
ggagaaaacucuccucagg

SEQ ID NO: 167156 - RNA, 19 nt, Human
ggagacagaacauaaaagc

SEQ ID NO: 167157 - RNA, 19 nt, Human
ggcugcagggcuggcccag

SEQ ID NO: 167158 - RNA, 20 nt, Human
gggaagccacugaaauggca

SEQ ID NO: 167159 - RNA, 27 nt, Human
gggaagccacugaaauggcauugcuga

SEQ ID NO: 167160 - RNA, 19 nt, Human
gggaggagccgagaggagu

SEQ ID NO: 167161 - RNA, 20 nt, Human
gggaggagccgagaggagug

SEQ ID NO: 167162 - RNA, 18 nt, Human
ggggguuggagcagggaa

SEQ ID NO: 167163 - RNA, 21 nt, Human
ggguacgugaugcauugggug

SEQ ID NO: 167164 - RNA, 22 nt, Human
ggucagagcugggaagccacug

SEQ ID NO: 167165 - RNA, 23 nt, Human
guuacaccacugucggccaaaga

SEQ ID NO: 167166 - RNA, 25 nt, Human
uaaaaaaaucacaaaaagcagcugg

SEQ ID NO: 167167 - RNA, 18 nt, Human
uaaaagcaguugccaagu

SEQ ID NO: 167168 - RNA, 19 nt, Human
uaaaaggaagcauacucuu

SEQ ID NO: 167169 - RNA, 18 nt, Human
uaaaggcaaaacuagcca

SEQ ID NO: 167170 - RNA, 26 nt, Human
uaaauacauagacccuaacuugcaua

SEQ ID NO: 167171 - RNA, 19 nt, Human
uaaauuacauaccaccuuu

SEQ ID NO: 167172 - RNA, 22 nt, Human
uaacgggcuuguugcccugggu

SEQ ID NO: 167173 - RNA, 25 nt, Human
uaacucuggcuaaguuuucagugca

SEQ ID NO: 167174 - RNA, 22 nt, Human
uaacugugcaaaacagaauaaa

SEQ ID NO: 167175 - RNA, 19 nt, Human
uacaaucagcuaaacuaac

SEQ ID NO: 167176 - RNA, 27 nt, Human
uacacaugugcuucuagaaauaaggcu

SEQ ID NO: 167177 - RNA, 21 nt, Human
uacccugucucccuauuccca

SEQ ID NO: 167178 - RNA, 19 nt, Human
uaccuugcauaaauuacau

SEQ ID NO: 167179 - RNA, 18 nt, Human
uagaaugugacauuuuca

SEQ ID NO: 167180 - RNA, 23 nt, Human
uagcaucaaacagagccagcuua

SEQ ID NO: 167181 - RNA, 23 nt, Human
uagcaucaaacagagccagcuua

SEQ ID NO: 167182 - RNA, 23 nt, Human
uaggaaaaaaaagagcuuuuucu

SEQ ID NO: 167183 - RNA, 20 nt, Human
uagucaaaaaaaaaaagcac

SEQ ID NO: 167184 - RNA, 20 nt, Human
uauagagacggggucuuccc

SEQ ID NO: 167185 - RNA, 22 nt, Human
uauaggaccaaaccaugucugu

SEQ ID NO: 167186 - RNA, 20 nt, Human
uauggagaaaacucuccuca

SEQ ID NO: 167187 - RNA, 24 nt, Human
ucaugccuucucccgguuucucuu

SEQ ID NO: 167188 - RNA, 20 nt, Human
uccagaaaauguccccucau

SEQ ID NO: 167189 - RNA, 21 nt, Human
uccagccaggagacaaccacu

SEQ ID NO: 167190 - RNA, 21 nt, Human
uccauugaaaauauuuagcaa

SEQ ID NO: 167191 - RNA, 30 nt, Human
ucccagaauccagaaaauguccccucaucu

SEQ ID NO: 167192 - RNA, 23 nt, Human
uccccauuaaaugaaaaggaaac

SEQ ID NO: 167193 - RNA, 20 nt, Human
ucccccggccaacgacccgg

SEQ ID NO: 167194 - RNA, 18 nt, Human
ucgccgccgccggccccg

SEQ ID NO: 167195 - RNA, 25 nt, Human
ucuacauuaagacuccagauggaac

SEQ ID NO: 167196 - RNA, 21 nt, Human
ucucuucuggcucuagccugc

SEQ ID NO: 167197 - RNA, 26 nt, Human
ucugcuccuggcugggcccucaaaug

SEQ ID NO: 167198 - RNA, 25 nt, Human
ucuuggacugacaagacacagacuu

SEQ ID NO: 167199 - RNA, 18 nt, Human
ugaaauagguaaaacaaa

SEQ ID NO: 167200 - RNA, 19 nt, Human
ugaaaucaagacaugaaca

SEQ ID NO: 167201 - RNA, 23 nt, Human
ugaaaucaagacaugaacagcua

SEQ ID NO: 167202 - RNA, 19 nt, Human
ugagaauggacauagaacc

SEQ ID NO: 167203 - RNA, 22 nt, Human
ugaggucuucuuuuuucugagu

SEQ ID NO: 167204 - RNA, 20 nt, Human
ugauuggaauauuaucaguu

SEQ ID NO: 167205 - RNA, 21 nt, Human
ugcaaaacagaauaauaccaa

SEQ ID NO: 167206 - RNA, 21 nt, Human
ugcaaaacagaauaauaccuu

SEQ ID NO: 167207 - RNA, 24 nt, Human
ugcacaaaacacacauacacccac

SEQ ID NO: 167208 - RNA, 19 nt, Human
ugcucaggccagccaguga

SEQ ID NO: 167209 - RNA, 21 nt, Human
ugcuuaauaaaggcaaaacua

SEQ ID NO: 167210 - RNA, 19 nt, Human
uggaaaaaaaaaaaaaaaa

SEQ ID NO: 167211 - RNA, 18 nt, Human
uggagaaaacucuccuca

SEQ ID NO: 167212 - RNA, 23 nt, Human
uggagaaaacucuccucaggacu

SEQ ID NO: 167213 - RNA, 24 nt, Human
uggagaaauaccuugcauaaauua

SEQ ID NO: 167214 - RNA, 19 nt, Human
uggcggggguuggagcagg

SEQ ID NO: 167215 - RNA, 24 nt, Human
uggcuagugagucuuccacaaaag

SEQ ID NO: 167216 - RNA, 21 nt, Human
uggcugcagaaggugcagaca

SEQ ID NO: 167217 - RNA, 19 nt, Human
ugguauacaaaauacauuc

SEQ ID NO: 167218 - RNA, 23 nt, Human
ugguauagagacggggucuuccc

SEQ ID NO: 167219 - RNA, 23 nt, Human
ugugaaauagguaaaacaaacaa

SEQ ID NO: 167220 - RNA, 18 nt, Human
uguguaaagaagaggaac

SEQ ID NO: 167221 - RNA, 19 nt, Human
uguuuugggucccaacugu

SEQ ID NO: 167222 - RNA, 21 nt, Human
uguuuugggucccaacugugu

SEQ ID NO: 167223 - RNA, 23 nt, Human
uuaacaucucggugucacuucuu

SEQ ID NO: 167224 - RNA, 23 nt, Human
uuagacccugaagaguaggcgca

SEQ ID NO: 167225 - RNA, 18 nt, Human
uuagagcucagguucuac

SEQ ID NO: 167226 - RNA, 20 nt, Human
uuagucaaaaaaaaaaagca

SEQ ID NO: 167227 - RNA, 20 nt, Human
uuccacguacauuaucucag

SEQ ID NO: 167228 - RNA, 22 nt, Human
uucuucacuugucacuauuucu

SEQ ID NO: 167229 - RNA, 23 nt, Human
uucuuucacaacuaacugugcaa

SEQ ID NO: 167230 - RNA, 18 nt, Human
uugaccuuauugaccuuu

SEQ ID NO: 167231 - RNA, 21 nt, Human
uuucauucuucucagcuuucu

SEQ ID NO: 167232 - RNA, 21 nt, Human
uuucuacauuaagacuccaga

SEQ ID NO: 167233 - RNA, 25 nt, Human
uuucucccuugcuuuuugcuuuuuu

SEQ ID NO: 167234 - RNA, 21 nt, Human
uuuucuugccucccagaaucc

SEQ ID NO: 167235 - RNA, 23 nt, Human
agagaaaagucuggugaagcagc

SEQ ID NO: 167236 - RNA, 19 nt, Human
caaaagucccuuugaaaac

SEQ ID NO: 167237 - RNA, 19 nt, Human
cccacccauaaaauauauc

SEQ ID NO: 167238 - RNA, 23 nt, Human
cccccagggcgccggcccagccc

SEQ ID NO: 167239 - RNA, 21 nt, Human
cggagcccggggucccccagg

SEQ ID NO: 167240 - RNA, 22 nt, Human
cuguaguagaaauuuuauuccc

SEQ ID NO: 167241 - RNA, 23 nt, Human
ggauagguggagggaugaagucc

SEQ ID NO: 167242 - RNA, 22 nt, Human
uaaaguucauuaucagcuccuc

SEQ ID NO: 167243 - RNA, 23 nt, Human
uacuguacuucagguacacaauu

SEQ ID NO: 167244 - RNA, 18 nt, Human
ucacucaagccggccuga

SEQ ID NO: 167245 - RNA, 20 nt, Human
ucccuuugaaaacaagaguu

SEQ ID NO: 167246 - RNA, 18 nt, Human
ugaaaacaagaguaaacg

SEQ ID NO: 167247 - RNA, 20 nt, Human
uuagugaugaaauuaaucuu

SEQ ID NO: 167248 - RNA, 25 nt, Human
aaaaugcugacguaugcugccuucu

SEQ ID NO: 167249 - RNA, 20 nt, Human
aaggaauaaucggcgggcac

SEQ ID NO: 167250 - RNA, 26 nt, Human
ccuuguccacuuucaugcuccucuug

SEQ ID NO: 167251 - RNA, 19 nt, Human
cggaggccuaaccccuccc

SEQ ID NO: 167252 - RNA, 19 nt, Human
cugguuccucuuugaaguu

SEQ ID NO: 167253 - RNA, 21 nt, Human
gaaaaugcugacguaugcugc

SEQ ID NO: 167254 - RNA, 21 nt, Human
gaaggcaccuguuacucagca

SEQ ID NO: 167255 - RNA, 20 nt, Human
gaccuagaaggcaagaggug

SEQ ID NO: 167256 - RNA, 20 nt, Human
gaggcuggauauuauccagg

SEQ ID NO: 167257 - RNA, 18 nt, Human
gccuucucucucucugcu

SEQ ID NO: 167258 - RNA, 24 nt, Human
ggcaagaggugagcccucugucac

SEQ ID NO: 167259 - RNA, 21 nt, Human
gugcagagaagaaaaugcuga

SEQ ID NO: 167260 - RNA, 24 nt, Human
uaagugcagagaagaaaaugcuga

SEQ ID NO: 167261 - RNA, 22 nt, Human
uaccaaggaauaaucggcgggc

SEQ ID NO: 167262 - RNA, 24 nt, Human
uauuaccaaggaauaaucggcggg

SEQ ID NO: 167263 - RNA, 22 nt, Human
uccggaggccuaaccccucccu

SEQ ID NO: 167264 - RNA, 23 nt, Human
ucuuugaucuuucuuauaagugc

SEQ ID NO: 167265 - RNA, 23 nt, Human
ugagaagugaccuagaaggcaag

SEQ ID NO: 167266 - RNA, 19 nt, Human
ugagggcucuuuggucaag

SEQ ID NO: 167267 - RNA, 21 nt, Human
ugcuucaguggucacacuccu

SEQ ID NO: 167268 - RNA, 23 nt, Human
ugugggaggcuggauauuaucca

SEQ ID NO: 167269 - RNA, 21 nt, Human
uuuggucaagcaguaacgccc

SEQ ID NO: 167270 - RNA, 18 nt, Human
uuuguaguagauagcagu

SEQ ID NO: 167271 - RNA, 20 nt, Human
aaaacaaaaagauuaugcaa

SEQ ID NO: 167272 - RNA, 24 nt, Human
aaaacacccagcucauacaaaacc

SEQ ID NO: 167273 - RNA, 21 nt, Human
aaaaguaauggaaaaaaacac

SEQ ID NO: 167274 - RNA, 26 nt, Human
aaaaguaauggaaaaaaacacccagc

SEQ ID NO: 167275 - RNA, 23 nt, Human
aaaauguggacuggaacaggaug

SEQ ID NO: 167276 - RNA, 21 nt, Human
aaacuaaaaaguaagagacca

SEQ ID NO: 167277 - RNA, 23 nt, Human
aaccaucacaaugcauuacgagc

SEQ ID NO: 167278 - RNA, 24 nt, Human
aacuaaaaaguaagagaccauacu

SEQ ID NO: 167279 - RNA, 19 nt, Human
aagaagaaacaugagcaga

SEQ ID NO: 167280 - RNA, 20 nt, Human
aagaagaaacaugagcagaa

SEQ ID NO: 167281 - RNA, 18 nt, Human
acaaaacaauagaaaaaa

SEQ ID NO: 167282 - RNA, 23 nt, Human
agacaugaaacugauacaaacaa

SEQ ID NO: 167283 - RNA, 22 nt, Human
cacaacagugaauuguaguuaa

SEQ ID NO: 167284 - RNA, 20 nt, Human
cacccagcucauacaaaacc

SEQ ID NO: 167285 - RNA, 19 nt, Human
cagcucauacaaaaccauc

SEQ ID NO: 167286 - RNA, 21 nt, Human
cagcugaauuuugugaaaguc

SEQ ID NO: 167287 - RNA, 20 nt, Human
cauccuagaaaaauugaaau

SEQ ID NO: 167288 - RNA, 19 nt, Human
cauuuuauuuucauauaaa

SEQ ID NO: 167289 - RNA, 25 nt, Human
ccuagaaaaauugaaauagaaacac

SEQ ID NO: 167290 - RNA, 18 nt, Human
cgcucugaaaaguugggg

SEQ ID NO: 167291 - RNA, 21 nt, Human
cuacaaaacaauagaaaaaaa

SEQ ID NO: 167292 - RNA, 18 nt, Human
gaaaacaaaaagauuaug

SEQ ID NO: 167293 - RNA, 18 nt, Human
gaacaggaugcaaaagac

SEQ ID NO: 167294 - RNA, 24 nt, Human
gacugaaggggacaggaagacuac

SEQ ID NO: 167295 - RNA, 26 nt, Human
gagcaacccaagaguugggaaagcac

SEQ ID NO: 167296 - RNA, 19 nt, Human
ggaggacugguugucagua

SEQ ID NO: 167297 - RNA, 22 nt, Human
uacaaaacaauagaaaaaaaac

SEQ ID NO: 167298 - RNA, 19 nt, Human
uacaaaaccaucacaaugc

SEQ ID NO: 167299 - RNA, 26 nt, Human
uagaaaacaaaaagauuaugcaagag

SEQ ID NO: 167300 - RNA, 19 nt, Human
uagugcagauacugccucu

SEQ ID NO: 167301 - RNA, 24 nt, Human
uauaauaccauaaacuuuuacaaa

SEQ ID NO: 167302 - RNA, 21 nt, Human
uauacacacuggagggacuga

SEQ ID NO: 167303 - RNA, 24 nt, Human
uauccacaacuauaacuugcaacg

SEQ ID NO: 167304 - RNA, 18 nt, Human
ucaagaagaaacaugagc

SEQ ID NO: 167305 - RNA, 23 nt, Human
uccacaacuauaacuugcaacga

SEQ ID NO: 167306 - RNA, 22 nt, Human
ucccacucucaggucagcugaa

SEQ ID NO: 167307 - RNA, 19 nt, Human
ugaaaaguuggggauuagu

SEQ ID NO: 167308 - RNA, 21 nt, Human
ugaaaauguggacuggaacag

SEQ ID NO: 167309 - RNA, 18 nt, Human
ugaaauagaaacacuaaa

SEQ ID NO: 167310 - RNA, 25 nt, Human
ugaaauagaaacacuaaauacagua

SEQ ID NO: 167311 - RNA, 26 nt, Human
ugaaauagaaacacuaaauacaguau

SEQ ID NO: 167312 - RNA, 22 nt, Human
ugagaauuagugcagauacugc

SEQ ID NO: 167313 - RNA, 24 nt, Human
ugauacaaacaauucacuagaaau

SEQ ID NO: 167314 - RNA, 23 nt, Human
ugauguggaggacugguugucag

SEQ ID NO: 167315 - RNA, 22 nt, Human
uggaaaaaaacacccagcucau

SEQ ID NO: 167316 - RNA, 25 nt, Human
uggaacaggaugcaaaagacucgcu

SEQ ID NO: 167317 - RNA, 23 nt, Human
ugggaaagcacugauuauaaacg

SEQ ID NO: 167318 - RNA, 23 nt, Human
ugucuaaaugcugugauguggag

SEQ ID NO: 167319 - RNA, 24 nt, Human
uuacgagcugacccaagucauuau

SEQ ID NO: 167320 - RNA, 20 nt, Human
uugcacuuaaacuacaaacu

SEQ ID NO: 167321 - RNA, 25 nt, Human
aaccccuucuccuccagcuccucca

SEQ ID NO: 167322 - RNA, 25 nt, Human
aagcagcauuugggggaaggggcgg

SEQ ID NO: 167323 - RNA, 19 nt, Human
aaggggcgggcgaugcugc

SEQ ID NO: 167324 - RNA, 23 nt, Human
aaguuacaggccaggcuccugcu

SEQ ID NO: 167325 - RNA, 23 nt, Human
acuccugggcccaauucugaguc

SEQ ID NO: 167326 - RNA, 20 nt, Human
agccggcucugcugcaggug

SEQ ID NO: 167327 - RNA, 19 nt, Human
aggcggcggcggcggcggc

SEQ ID NO: 167328 - RNA, 24 nt, Human
aggcggcggcggcggcggcggcgg

SEQ ID NO: 167329 - RNA, 23 nt, Human
aggcgggccacagcggaggaggg

SEQ ID NO: 167330 - RNA, 21 nt, Human
agggagaggcggggccugugg

SEQ ID NO: 167331 - RNA, 18 nt, Human
caccagcccguuugaggc

SEQ ID NO: 167332 - RNA, 24 nt, Human
caccuucagcuccagggccgaggg

SEQ ID NO: 167333 - RNA, 18 nt, Human
cagcaucccccggccccc

SEQ ID NO: 167334 - RNA, 21 nt, Human
ccaccuuccuugagccucagc

SEQ ID NO: 167335 - RNA, 21 nt, Human
cccacaccccugcagaaucca

SEQ ID NO: 167336 - RNA, 22 nt, Human
ccccacaccccugcagaaucca

SEQ ID NO: 167337 - RNA, 20 nt, Human
ccccgcagaauacggauuaa

SEQ ID NO: 167338 - RNA, 23 nt, Human
cccgcagaauacggauuaacccc

SEQ ID NO: 167339 - RNA, 22 nt, Human
cccggaggugguggcgguggcg

SEQ ID NO: 167340 - RNA, 20 nt, Human
ccuccagcuccuccaccuuc

SEQ ID NO: 167341 - RNA, 23 nt, Human
ccucggggcuggggcuugcgggg

SEQ ID NO: 167342 - RNA, 18 nt, Human
ccugcggggaggggaggc

SEQ ID NO: 167343 - RNA, 24 nt, Human
cgagggccgcgucggggcagcggg

SEQ ID NO: 167344 - RNA, 19 nt, Human
cggcggcgguggcgcugcu

SEQ ID NO: 167345 - RNA, 18 nt, Human
cgggaggcggcggcggcg

SEQ ID NO: 167346 - RNA, 22 nt, Human
cggggcuggggcuugcgggggc

SEQ ID NO: 167347 - RNA, 20 nt, Human
cggucgauucgcugaagcgc

SEQ ID NO: 167348 - RNA, 28 nt, Human
cuauuuggagggggcuuuagggugggug

SEQ ID NO: 167349 - RNA, 25 nt, Human
cuccagcuccuccaccuucagcucc

SEQ ID NO: 167350 - RNA, 18 nt, Human
cuccgggagccggcucug

SEQ ID NO: 167351 - RNA, 19 nt, Human
cuccuccaccuucagcucc

SEQ ID NO: 167352 - RNA, 21 nt, Human
cuccuccaccuucagcuccag

SEQ ID NO: 167353 - RNA, 18 nt, Human
cugcaagcagcauuuggg

SEQ ID NO: 167354 - RNA, 21 nt, Human
cuggggcuugcgggggcgagg

SEQ ID NO: 167355 - RNA, 23 nt, Human
gaggaccuccgggaggcggcggc

SEQ ID NO: 167356 - RNA, 22 nt, Human
gaggugguggcgguggcggggg

SEQ ID NO: 167357 - RNA, 18 nt, Human
gcggcgcaggcgggggcu

SEQ ID NO: 167358 - RNA, 21 nt, Human
gcggcggcggaggcaccggcc

SEQ ID NO: 167359 - RNA, 18 nt, Human
gcggcggcggcggcggag

SEQ ID NO: 167360 - RNA, 21 nt, Human
gcggcggcggcggcggaggca

SEQ ID NO: 167361 - RNA, 24 nt, Human
gcggcggcggcggcggcggcggcg

SEQ ID NO: 167362 - RNA, 22 nt, Human
gcgggcgaugcugcccucugug

SEQ ID NO: 167363 - RNA, 19 nt, Human
gcgggggugggggcggcag

SEQ ID NO: 167364 - RNA, 20 nt, Human
gcuccgggcugccagggaga

SEQ ID NO: 167365 - RNA, 19 nt, Human
gcugcuccgggagccggcu

SEQ ID NO: 167366 - RNA, 21 nt, Human
ggagcaucaccgccgcucgga

SEQ ID NO: 167367 - RNA, 22 nt, Human
ggcacccccggagucggagcau

SEQ ID NO: 167368 - RNA, 22 nt, Human
ggcagcggcggcgcaggcgggg

SEQ ID NO: 167369 - RNA, 22 nt, Human
ggcggcggcggcggcggcggag

SEQ ID NO: 167370 - RNA, 23 nt, Human
ggcggcggcggcggcggcggcgg

SEQ ID NO: 167371 - RNA, 20 nt, Human
ggcggucgauucgcugaagc

SEQ ID NO: 167372 - RNA, 21 nt, Human
ggcgguggcgcugcuccggga

SEQ ID NO: 167373 - RNA, 24 nt, Human
gggaggcggcggcggcggcggcgg

SEQ ID NO: 167374 - RNA, 25 nt, Human
gggcagcggcggcgcaggcgggggc

SEQ ID NO: 167375 - RNA, 27 nt, Human
gggcagugggggcggcggcgguggcga

SEQ ID NO: 167376 - RNA, 18 nt, Human
gggcggcggcgguggcgc

SEQ ID NO: 167377 - RNA, 20 nt, Human
gggcuggggcuugcgggggc

SEQ ID NO: 167378 - RNA, 19 nt, Human
ggggaaggggcgggcgaug

SEQ ID NO: 167379 - RNA, 20 nt, Human
ggggaggggaggccgggcag

SEQ ID NO: 167380 - RNA, 18 nt, Human
ggggcggcggcgguggcg

SEQ ID NO: 167381 - RNA, 20 nt, Human
ggggcuggggcuugcggggg

SEQ ID NO: 167382 - RNA, 24 nt, Human
gggugggugcugcaagcagcauuu

SEQ ID NO: 167383 - RNA, 21 nt, Human
guggcgggggugggggcggca

SEQ ID NO: 167384 - RNA, 22 nt, Human
guugccacagcgacggggagga

SEQ ID NO: 167385 - RNA, 22 nt, Human
uaaccccuucuccuccagcucc

SEQ ID NO: 167386 - RNA, 20 nt, Human
uauggcuauuuggagggggc

SEQ ID NO: 167387 - RNA, 23 nt, Human
ucagugcccggaggugguggcgg

SEQ ID NO: 167388 - RNA, 18 nt, Human
uccaccuucagcuccagg

SEQ ID NO: 167389 - RNA, 23 nt, Human
uccaccuucagcuccagggccga

SEQ ID NO: 167390 - RNA, 21 nt, Human
uccuagggcaucaggaggacc

SEQ ID NO: 167391 - RNA, 18 nt, Human
uccuccagcuccuccacc

SEQ ID NO: 167392 - RNA, 22 nt, Human
uccucggggcuggggcuugcgg

SEQ ID NO: 167393 - RNA, 23 nt, Human
ucggggcuggggcuugcgggggc

SEQ ID NO: 167394 - RNA, 21 nt, Human
ucucaggcucugggggacgcc

SEQ ID NO: 167395 - RNA, 18 nt, Human
ucugcugcaggugcgaga

SEQ ID NO: 167396 - RNA, 21 nt, Human
ugcccggaggugguggcggug

SEQ ID NO: 167397 - RNA, 21 nt, Human
ugcccggccagccgagcugag

SEQ ID NO: 167398 - RNA, 18 nt, Human
ugcuccgggagccggcuc

SEQ ID NO: 167399 - RNA, 20 nt, Human
uggcgggggugggggcggcc

SEQ ID NO: 167400 - RNA, 18 nt, Human
uggcgguggcgggggugg

SEQ ID NO: 167401 - RNA, 18 nt, Human
ugggcugggggagccggu

SEQ ID NO: 167402 - RNA, 18 nt, Human
ugggggcggcggcggugg

SEQ ID NO: 167403 - RNA, 23 nt, Human
ugggggcggcggcgguggcgcug

SEQ ID NO: 167404 - RNA, 18 nt, Human
uuccuugagccucagccu

SEQ ID NO: 167405 - RNA, 22 nt, Human
uuuuuuuuucuuuugcaaacau

SEQ ID NO: 167406 - RNA, 22 nt, Human
aacaaccuucaaaugcacagaa

SEQ ID NO: 167407 - RNA, 24 nt, Human
aaccuguaacuuuccaacaaccuu

SEQ ID NO: 167408 - RNA, 18 nt, Human
aaugaaucaguaugagcc

SEQ ID NO: 167409 - RNA, 21 nt, Human
acaaccuucaaaugcacagaa

SEQ ID NO: 167410 - RNA, 21 nt, Human
aucaauuuuuagguuuauuuu

SEQ ID NO: 167411 - RNA, 22 nt, Human
augagccagugcuggcuugggu

SEQ ID NO: 167412 - RNA, 22 nt, Human
caaaaugaaucaguaugagcca

SEQ ID NO: 167413 - RNA, 26 nt, Human
cacaacacaaucauuugugaaguaag

SEQ ID NO: 167414 - RNA, 19 nt, Human
cauuucagcacaacacaau

SEQ ID NO: 167415 - RNA, 21 nt, Human
cauuucagcacaacacaauca

SEQ ID NO: 167416 - RNA, 21 nt, Human
ccagccagggaagcgagaggg

SEQ ID NO: 167417 - RNA, 22 nt, Human
cccuggggccagccagggaagc

SEQ ID NO: 167418 - RNA, 24 nt, Human
cucagagugcugucaagaacagcu

SEQ ID NO: 167419 - RNA, 19 nt, Human
cucuagcauuagaagugga

SEQ ID NO: 167420 - RNA, 21 nt, Human
ggagcugggagaggcucagga

SEQ ID NO: 167421 - RNA, 24 nt, Human
ggccagccagggaagcgagagggu

SEQ ID NO: 167422 - RNA, 23 nt, Human
ggcucagagugcugucaagaaca

SEQ ID NO: 167423 - RNA, 22 nt, Human
gggguuuuaguugagaucugug

SEQ ID NO: 167424 - RNA, 18 nt, Human
guagcccuggggccagcc

SEQ ID NO: 167425 - RNA, 19 nt, Human
guggagcugggagaggcuc

SEQ ID NO: 167426 - RNA, 27 nt, Human
guuuauaacugugaaggcaauauugcu

SEQ ID NO: 167427 - RNA, 18 nt, Human
uaaaaugaaccuguaacu

SEQ ID NO: 167428 - RNA, 22 nt, Human
uaagggguuuuaguugagaucu

SEQ ID NO: 167429 - RNA, 18 nt, Human
uaccagugguagcccugg

SEQ ID NO: 167430 - RNA, 22 nt, Human
uaccagugguagcccuggggcc

SEQ ID NO: 167431 - RNA, 22 nt, Human
uauaacugugaaggcaauauug

SEQ ID NO: 167432 - RNA, 25 nt, Human
ucaggaauaccagugguagcccuga

SEQ ID NO: 167433 - RNA, 24 nt, Human
ucaguaugagccagugcuggcuug

SEQ ID NO: 167434 - RNA, 18 nt, Human
uggagcugggagaggcuc

SEQ ID NO: 167435 - RNA, 18 nt, Human
ugggaaagagguaugaug

SEQ ID NO: 167436 - RNA, 19 nt, Human
ugggagaggcucaggaaua

SEQ ID NO: 167437 - RNA, 20 nt, Human
ugugaaaauaguuuauaugg

SEQ ID NO: 167438 - RNA, 19 nt, Human
ugugcaucuuccauuuagg

SEQ ID NO: 167439 - RNA, 27 nt, Human
aaaaggccacaacaacagcagugggca

SEQ ID NO: 167440 - RNA, 21 nt, Human
aacaacagcaagaaggcccag

SEQ ID NO: 167441 - RNA, 20 nt, Human
aagauaauaaagcccaaagc

SEQ ID NO: 167442 - RNA, 24 nt, Human
acagaaaagaaacugagaaauuag

SEQ ID NO: 167443 - RNA, 24 nt, Human
accauugaaguuggcaaaaaaagg

SEQ ID NO: 167444 - RNA, 18 nt, Human
agauaauaaagcccaaag

SEQ ID NO: 167445 - RNA, 20 nt, Human
agcuccuuuguuuuugccuu

SEQ ID NO: 167446 - RNA, 20 nt, Human
aggcccaggauuuucaacag

SEQ ID NO: 167447 - RNA, 24 nt, Human
aggcccaggauuuucaacagaaaa

SEQ ID NO: 167448 - RNA, 21 nt, Human
agggcccgagucuugaguggc

SEQ ID NO: 167449 - RNA, 21 nt, Human
auaaagcccaaagcauuaugc

SEQ ID NO: 167450 - RNA, 24 nt, Human
auuagaugaauccuucagggcccg

SEQ ID NO: 167451 - RNA, 22 nt, Human
caagauaauaaagcccaaagca

SEQ ID NO: 167452 - RNA, 22 nt, Human
ccauugcccaggcccaaccagg

SEQ ID NO: 167453 - RNA, 19 nt, Human
cccauugcccaggcccaac

SEQ ID NO: 167454 - RNA, 23 nt, Human
cccauugcccaggcccaaccagg

SEQ ID NO: 167455 - RNA, 24 nt, Human
gacuaggaccauugaaguuggcaa

SEQ ID NO: 167456 - RNA, 20 nt, Human
gcaaaaaaaggccacaacaa

SEQ ID NO: 167457 - RNA, 25 nt, Human
gcaaaaaaaggccacaacaacagca

SEQ ID NO: 167458 - RNA, 23 nt, Human
uaaagcccaaagcauuaugcuga

SEQ ID NO: 167459 - RNA, 21 nt, Human
ucuuuguuucugggugaagau

SEQ ID NO: 167460 - RNA, 21 nt, Human
ugaauccuucagggcccgagu

SEQ ID NO: 167461 - RNA, 19 nt, Human
ugacaagauaauaaagccc

SEQ ID NO: 167462 - RNA, 21 nt, Human
ugacaagauaauaaagcccaa

SEQ ID NO: 167463 - RNA, 18 nt, Human
ugcccaggcccaaccagg

SEQ ID NO: 167464 - RNA, 19 nt, Human
ugggugaagauggcauuuc

SEQ ID NO: 167465 - RNA, 24 nt, Human
uucaguauucuuuguuucugggug

SEQ ID NO: 167466 - RNA, 19 nt, Human
uucuggcuccuucccauug

SEQ ID NO: 167467 - RNA, 22 nt, Human
uugaaguuggcaaaaaaaggcc

SEQ ID NO: 167468 - RNA, 20 nt, Human
uugacagaauaguuuucucc

SEQ ID NO: 167469 - RNA, 27 nt, Human
uuucuggcuccuucccauuggggccgc

SEQ ID NO: 167470 - RNA, 21 nt, Human
uuugacagaauaguuuucucc

SEQ ID NO: 167471 - RNA, 23 nt, Human
aaguggcuauuucagagccuaga

SEQ ID NO: 167472 - RNA, 25 nt, Human
acugcaaaagaugcugaauagaaaa

SEQ ID NO: 167473 - RNA, 22 nt, Human
acuuucagaaauccuagagaaa

SEQ ID NO: 167474 - RNA, 22 nt, Human
caaaagaugcugaauagaaaag

SEQ ID NO: 167475 - RNA, 25 nt, Human
ccuacccguucuuugucuucuuuuc

SEQ ID NO: 167476 - RNA, 22 nt, Human
gguauugucaguaacuuucaga

SEQ ID NO: 167477 - RNA, 19 nt, Human
gugugucuacguccugucc

SEQ ID NO: 167478 - RNA, 21 nt, Human
uacagaguacugcaaaagaug

SEQ ID NO: 167479 - RNA, 23 nt, Human
ucagagccuagaaauaacacugu

SEQ ID NO: 167480 - RNA, 22 nt, Human
uggguauugucaguaacuuuca

SEQ ID NO: 167481 - RNA, 23 nt, Human
uuaaaguggcuauuucagagccu

SEQ ID NO: 167482 - RNA, 20 nt, Human
uuuaauuuuccuacccguuc

SEQ ID NO: 167483 - RNA, 22 nt, Human
uuucagaaauccuagagaaaau

SEQ ID NO: 167484 - RNA, 23 nt, Human
aaacaaagaagaagauaauacaa

SEQ ID NO: 167485 - RNA, 23 nt, Human
aaauggccuccaccaauaagaau

SEQ ID NO: 167486 - RNA, 24 nt, Human
aagaagauaauacaauaauucaga

SEQ ID NO: 167487 - RNA, 22 nt, Human
agauaggagaugacugggccug

SEQ ID NO: 167488 - RNA, 18 nt, Human
aggccuggggcuggcaga

SEQ ID NO: 167489 - RNA, 23 nt, Human
aggguggcaagaaagaggguacu

SEQ ID NO: 167490 - RNA, 21 nt, Human
caaagaagaagauaauacaau

SEQ ID NO: 167491 - RNA, 23 nt, Human
cagaaacaaauggccuccaccaa

SEQ ID NO: 167492 - RNA, 20 nt, Human
ccuuugaguugaggaguagg

SEQ ID NO: 167493 - RNA, 20 nt, Human
gcaagaaagaggguacugaa

SEQ ID NO: 167494 - RNA, 19 nt, Human
gcucuguguuuuccuuuga

SEQ ID NO: 167495 - RNA, 20 nt, Human
ggccuggggcuggcagaucu

SEQ ID NO: 167496 - RNA, 21 nt, Human
gguacugaaaacaaagaagaa

SEQ ID NO: 167497 - RNA, 25 nt, Human
uaagaauacuugaauuuccaggcca

SEQ ID NO: 167498 - RNA, 20 nt, Human
uacuugaauuuccaggccac

SEQ ID NO: 167499 - RNA, 25 nt, Human
uagcauagagcagauucuuugacuu

SEQ ID NO: 167500 - RNA, 22 nt, Human
uagcaugacuugguguaacccu

SEQ ID NO: 167501 - RNA, 23 nt, Human
uaugauggagagcagaggaggga

SEQ ID NO: 167502 - RNA, 23 nt, Human
uccaccaauaagaauacuugaau

SEQ ID NO: 167503 - RNA, 24 nt, Human
ugaaaacaaagaagaagauaauac

SEQ ID NO: 167504 - RNA, 19 nt, Human
ugaguugaggaguaggagg

SEQ ID NO: 167505 - RNA, 18 nt, Human
ugcucuaucucuugguua

SEQ ID NO: 167506 - RNA, 24 nt, Human
ugcucuguguuuuccuuugaguug

SEQ ID NO: 167507 - RNA, 19 nt, Human
uggcaagaaagaggguacu

SEQ ID NO: 167508 - RNA, 20 nt, Human
uggcaagaaagaggguacug

SEQ ID NO: 167509 - RNA, 24 nt, Human
uggcaagaaagaggguacugaaaa

SEQ ID NO: 167510 - RNA, 24 nt, Human
aaagacauacaaagaugacuaaaa

SEQ ID NO: 167511 - RNA, 24 nt, Human
aagagugacggaucaugaguggaa

SEQ ID NO: 167512 - RNA, 23 nt, Human
accacaugucaagaacucugcua

SEQ ID NO: 167513 - RNA, 21 nt, Human
accauguuucaaguacacuag

SEQ ID NO: 167514 - RNA, 25 nt, Human
caacaaacauuuauuaagcaccuac

SEQ ID NO: 167515 - RNA, 19 nt, Human
caagaacucugcuaaagac

SEQ ID NO: 167516 - RNA, 18 nt, Human
cccaaugaaaaacagggc

SEQ ID NO: 167517 - RNA, 20 nt, Human
gacuuacucucccuaccaua

SEQ ID NO: 167518 - RNA, 21 nt, Human
gcgcucaacagauccuucagc

SEQ ID NO: 167519 - RNA, 21 nt, Human
gugaaacaaaaugucuuaagc

SEQ ID NO: 167520 - RNA, 18 nt, Human
uaagcgauuuuauaccga

SEQ ID NO: 167521 - RNA, 23 nt, Human
uaagcuucccaaugaaaaacagg

SEQ ID NO: 167522 - RNA, 19 nt, Human
uaaggaaaagggcuaaaaa

SEQ ID NO: 167523 - RNA, 21 nt, Human
uacaaauggaaaacagguuuc

SEQ ID NO: 167524 - RNA, 20 nt, Human
uaccauaaaauuugauaaac

SEQ ID NO: 167525 - RNA, 22 nt, Human
uauuucucuuaucucucaggaa

SEQ ID NO: 167526 - RNA, 18 nt, Human
ucaaucucgucagauucu

SEQ ID NO: 167527 - RNA, 18 nt, Human
ucccaaugaaaaacaggg

SEQ ID NO: 167528 - RNA, 20 nt, Human
ucgccuguccgccuuuccuu

SEQ ID NO: 167529 - RNA, 22 nt, Human
ucucucaggaaacauauuuagu

SEQ ID NO: 167530 - RNA, 23 nt, Human
ugaaaaaaaacuaaaauugagcu

SEQ ID NO: 167531 - RNA, 19 nt, Human
ugaauagcaagugaaacaa

SEQ ID NO: 167532 - RNA, 22 nt, Human
ugaguugaaaguaauuucuuua

SEQ ID NO: 167533 - RNA, 24 nt, Human
uggaguaagcgauuuuauaccgau

SEQ ID NO: 167534 - RNA, 21 nt, Human
aaacagauuaaccacauccuc

SEQ ID NO: 167535 - RNA, 18 nt, Human
aaagagcuacccagcugc

SEQ ID NO: 167536 - RNA, 22 nt, Human
aaagcaaaagccaccuucacua

SEQ ID NO: 167537 - RNA, 27 nt, Human
aaccaaaccaucaagcccuggaacgcc

SEQ ID NO: 167538 - RNA, 19 nt, Human
aaccauguggccgcuaccu

SEQ ID NO: 167539 - RNA, 20 nt, Human
aacugcacgaccagcccagc

SEQ ID NO: 167540 - RNA, 22 nt, Human
aacuguguuucucauacuuuaa

SEQ ID NO: 167541 - RNA, 22 nt, Human
aagaauuaagugcuccccagcc

SEQ ID NO: 167542 - RNA, 23 nt, Human
aagcaacaaaugggagcccagag

SEQ ID NO: 167543 - RNA, 23 nt, Human
aagccaccuucacuaaugaggau

SEQ ID NO: 167544 - RNA, 21 nt, Human
accuugcccaaagggcaggug

SEQ ID NO: 167545 - RNA, 19 nt, Human
acucaugcuuuuccuguaa

SEQ ID NO: 167546 - RNA, 19 nt, Human
acuugggcuaacucuccuc

SEQ ID NO: 167547 - RNA, 22 nt, Human
agagggagagcugucaagugcu

SEQ ID NO: 167548 - RNA, 19 nt, Human
agcaaguccagggcugccu

SEQ ID NO: 167549 - RNA, 24 nt, Human
agccaaaccaaaccaucaagccaa

SEQ ID NO: 167550 - RNA, 21 nt, Human
agggaugugauggcaucuggg

SEQ ID NO: 167551 - RNA, 18 nt, Human
auaaagcaaaagccaccu

SEQ ID NO: 167552 - RNA, 23 nt, Human
auaaagcaaaagccaccuucacu

SEQ ID NO: 167553 - RNA, 21 nt, Human
auagaaucuuccugcuuggau

SEQ ID NO: 167554 - RNA, 22 nt, Human
auagaaucuuccugcuuggaua

SEQ ID NO: 167555 - RNA, 21 nt, Human
augaccucagaucauugggaa

SEQ ID NO: 167556 - RNA, 19 nt, Human
auggccuuaggacaaacca

SEQ ID NO: 167557 - RNA, 20 nt, Human
caaaccaaaccaucaagcca

SEQ ID NO: 167558 - RNA, 19 nt, Human
caaaccaucaagccaaaug

SEQ ID NO: 167559 - RNA, 24 nt, Human
caaacuauaaagcaaaagccaccu

SEQ ID NO: 167560 - RNA, 18 nt, Human
caaagagcuacccagcug

SEQ ID NO: 167561 - RNA, 19 nt, Human
cagaagaggcagcugggca

SEQ ID NO: 167562 - RNA, 19 nt, Human
cagagggugcccguggacu

SEQ ID NO: 167563 - RNA, 19 nt, Human
cagcacagagggagagcug

SEQ ID NO: 167564 - RNA, 18 nt, Human
cagggggcagccuugccc

SEQ ID NO: 167565 - RNA, 21 nt, Human
cagggggcagccuugccccuc

SEQ ID NO: 167566 - RNA, 19 nt, Human
caggugaaacagauuaacc

SEQ ID NO: 167567 - RNA, 20 nt, Human
cagguggguuaagccccagg

SEQ ID NO: 167568 - RNA, 21 nt, Human
cagguggguuaagccccaggc

SEQ ID NO: 167569 - RNA, 26 nt, Human
cauaagccaaaccaaaccaucaagau

SEQ ID NO: 167570 - RNA, 24 nt, Human
cauguggccgcuaccuuuguggau

SEQ ID NO: 167571 - RNA, 18 nt, Human
ccaaaccaucaagccaaa

SEQ ID NO: 167572 - RNA, 22 nt, Human
ccaggcaacauuaccuuuugaa

SEQ ID NO: 167573 - RNA, 21 nt, Human
ccaucuaccaccacuucuguc

SEQ ID NO: 167574 - RNA, 25 nt, Human
cccccccuaaccccaccuacaggaa

SEQ ID NO: 167575 - RNA, 19 nt, Human
ccccccuaaccccaccuac

SEQ ID NO: 167576 - RNA, 19 nt, Human
ccccucuucccuucucagg

SEQ ID NO: 167577 - RNA, 18 nt, Human
ccccugacugcccagaug

SEQ ID NO: 167578 - RNA, 20 nt, Human
cccuggggcagggggcagcc

SEQ ID NO: 167579 - RNA, 27 nt, Human
ccuggccugggcuucacggaccccagc

SEQ ID NO: 167580 - RNA, 21 nt, Human
ccuuggggucuccugacucug

SEQ ID NO: 167581 - RNA, 23 nt, Human
cuccaacaguccuugccccugac

SEQ ID NO: 167582 - RNA, 19 nt, Human
cugcucacagacagccagg

SEQ ID NO: 167583 - RNA, 24 nt, Human
cuggugaccuccaaucugguggcu

SEQ ID NO: 167584 - RNA, 24 nt, Human
cugucccugaucgcccccccuaac

SEQ ID NO: 167585 - RNA, 22 nt, Human
cuugccccugacugcccagaug

SEQ ID NO: 167586 - RNA, 21 nt, Human
gaaaguggagugggugaagug

SEQ ID NO: 167587 - RNA, 23 nt, Human
gagggugcccguggacuucuguc

SEQ ID NO: 167588 - RNA, 19 nt, Human
gauuaaccacauccuccuu

SEQ ID NO: 167589 - RNA, 22 nt, Human
gcagaugcucacaugccuuggg

SEQ ID NO: 167590 - RNA, 24 nt, Human
gcagggggcagccuugccccucac

SEQ ID NO: 167591 - RNA, 19 nt, Human
gccaagaacguaguccaaa

SEQ ID NO: 167592 - RNA, 19 nt, Human
gccugggcuucacggaccc

SEQ ID NO: 167593 - RNA, 21 nt, Human
gccugggcuucacggacccca

SEQ ID NO: 167594 - RNA, 18 nt, Human
gccuuuccucuucugaag

SEQ ID NO: 167595 - RNA, 19 nt, Human
ggcaagagguauauuuuga

SEQ ID NO: 167596 - RNA, 19 nt, Human
gggagagcugucaagugcu

SEQ ID NO: 167597 - RNA, 24 nt, Human
gggcagguggguuaagccccaggc

SEQ ID NO: 167598 - RNA, 21 nt, Human
gguguguuuggcccauugcag

SEQ ID NO: 167599 - RNA, 18 nt, Human
guauagaagugacuccug

SEQ ID NO: 167600 - RNA, 18 nt, Human
gucagguuagccaccacu

SEQ ID NO: 167601 - RNA, 19 nt, Human
gucccugaucgcccccccu

SEQ ID NO: 167602 - RNA, 23 nt, Human
uaaaaacccagguaggaugcugu

SEQ ID NO: 167603 - RNA, 22 nt, Human
uagcucagagaugugaaagcag

SEQ ID NO: 167604 - RNA, 20 nt, Human
uaggacaaaccaggugaaac

SEQ ID NO: 167605 - RNA, 19 nt, Human
uauacuauugcccaugcca

SEQ ID NO: 167606 - RNA, 19 nt, Human
uauauacuauugcccaugc

SEQ ID NO: 167607 - RNA, 18 nt, Human
ucaagccaaaugccacgg

SEQ ID NO: 167608 - RNA, 24 nt, Human
uccaaagauccccucuucccuucu

SEQ ID NO: 167609 - RNA, 22 nt, Human
uccagggauccuuccaucuacc

SEQ ID NO: 167610 - RNA, 22 nt, Human
uccaggggugagguuagggagg

SEQ ID NO: 167611 - RNA, 25 nt, Human
uccauaagccaaaccaaaccaucaa

SEQ ID NO: 167612 - RNA, 20 nt, Human
uccaucuaccaccacuucug

SEQ ID NO: 167613 - RNA, 23 nt, Human
ucccagaucuuccauaagccaaa

SEQ ID NO: 167614 - RNA, 24 nt, Human
ucccagaucuuccauaagccaaac

SEQ ID NO: 167615 - RNA, 24 nt, Human
ucccugaucgcccccccuaacccc

SEQ ID NO: 167616 - RNA, 24 nt, Human
ucccuggaaaagagugagcuucug

SEQ ID NO: 167617 - RNA, 19 nt, Human
uccuccaacaguccuugcc

SEQ ID NO: 167618 - RNA, 19 nt, Human
ucugaagucuuauccaccu

SEQ ID NO: 167619 - RNA, 21 nt, Human
ucugaagucuuauccaccuuc

SEQ ID NO: 167620 - RNA, 20 nt, Human
ucugucccuggaaaagagug

SEQ ID NO: 167621 - RNA, 18 nt, Human
ugaaacagauuaaccaca

SEQ ID NO: 167622 - RNA, 24 nt, Human
ugacuccugguguccuuucacccu

SEQ ID NO: 167623 - RNA, 18 nt, Human
ugaggauauagcucagag

SEQ ID NO: 167624 - RNA, 23 nt, Human
ugaugguaagcaaagucuggccu

SEQ ID NO: 167625 - RNA, 19 nt, Human
ugccccugacugcccagau

SEQ ID NO: 167626 - RNA, 21 nt, Human
ugccuggccugggcuucacgg

SEQ ID NO: 167627 - RNA, 19 nt, Human
ugccuuggggucuccugac

SEQ ID NO: 167628 - RNA, 23 nt, Human
ugcuggugaccuccaaucuggug

SEQ ID NO: 167629 - RNA, 18 nt, Human
uggcugccuggccugggc

SEQ ID NO: 167630 - RNA, 21 nt, Human
uggcugucuccucccacauca

SEQ ID NO: 167631 - RNA, 22 nt, Human
ugggaagaacuuaagagccgug

SEQ ID NO: 167632 - RNA, 20 nt, Human
ugggagcccagaguaacugc

SEQ ID NO: 167633 - RNA, 22 nt, Human
ugguguccuuucacccucagac

SEQ ID NO: 167634 - RNA, 20 nt, Human
ugucccugaucgcccccccu

SEQ ID NO: 167635 - RNA, 21 nt, Human
ugucuccucccacaucagguc

SEQ ID NO: 167636 - RNA, 25 nt, Human
uugccccugacugcccagauggcuu

SEQ ID NO: 167637 - RNA, 22 nt, Human
uugcugggcagaugcucacaug

SEQ ID NO: 167638 - RNA, 21 nt, Human
aaaaaaaaaagacucaaaaaa

SEQ ID NO: 167639 - RNA, 22 nt, Human
aaaaaaaagacucaaaaaacaa

SEQ ID NO: 167640 - RNA, 23 nt, Human
aaaaaaagacucaaaaaacaaaa

SEQ ID NO: 167641 - RNA, 23 nt, Human
aaaaaacaaaaccaaaccccaac

SEQ ID NO: 167642 - RNA, 19 nt, Human
aaaagacucaaaaaacaaa

SEQ ID NO: 167643 - RNA, 21 nt, Human
aaaagcaaucauuuguaagga

SEQ ID NO: 167644 - RNA, 23 nt, Human
aaacaaaaacaaaaacaaguccu

SEQ ID NO: 167645 - RNA, 24 nt, Human
aaacaaaaacaaaaacaaguccua

SEQ ID NO: 167646 - RNA, 22 nt, Human
aaacagcuuacagaugaugugu

SEQ ID NO: 167647 - RNA, 23 nt, Human
aaacauuuaaccugcuuccaaug

SEQ ID NO: 167648 - RNA, 19 nt, Human
aaacucacaaaauacaucg

SEQ ID NO: 167649 - RNA, 22 nt, Human
aaacugacacaggacaugaaau

SEQ ID NO: 167650 - RNA, 20 nt, Human
aaacugagaauguacuggug

SEQ ID NO: 167651 - RNA, 23 nt, Human
aaagaaacaaacucacaaaauac

SEQ ID NO: 167652 - RNA, 18 nt, Human
aacaaaacaaaaacaaaa

SEQ ID NO: 167653 - RNA, 23 nt, Human
aaccccaacacuucaaaaaacaa

SEQ ID NO: 167654 - RNA, 22 nt, Human
aacuuaucuucccugaacucug

SEQ ID NO: 167655 - RNA, 25 nt, Human
acaaaacaaaaacaaaaacaagucc

SEQ ID NO: 167656 - RNA, 18 nt, Human
acaaaagaaaaaaagaaa

SEQ ID NO: 167657 - RNA, 22 nt, Human
accaaaaaauaaaaaauucuua

SEQ ID NO: 167658 - RNA, 22 nt, Human
acccaaugcaggaaaauggucc

SEQ ID NO: 167659 - RNA, 19 nt, Human
aggcuaacuuccuaugacg

SEQ ID NO: 167660 - RNA, 22 nt, Human
auacauucccagaauaaauaac

SEQ ID NO: 167661 - RNA, 19 nt, Human
auccuacuaacuuucgacc

SEQ ID NO: 167662 - RNA, 24 nt, Human
augguacacuguggaaaaguacca

SEQ ID NO: 167663 - RNA, 20 nt, Human
caaaacauaaacugacacag

SEQ ID NO: 167664 - RNA, 21 nt, Human
caaaauuaaaaaaaaaagcuc

SEQ ID NO: 167665 - RNA, 26 nt, Human
caaaccccaacacuucaaaaaacaaa

SEQ ID NO: 167666 - RNA, 24 nt, Human
caaagaaacaaacucacaaaauac

SEQ ID NO: 167667 - RNA, 23 nt, Human
caacaaaacaaaaacaaaaacaa

SEQ ID NO: 167668 - RNA, 25 nt, Human
caacacuucaaaaaacaaaagaaaa

SEQ ID NO: 167669 - RNA, 24 nt, Human
caacaucaauuuagcagaggaaga

SEQ ID NO: 167670 - RNA, 23 nt, Human
cacaaaacuuggggcagacaaaa

SEQ ID NO: 167671 - RNA, 22 nt, Human
cagaugaagauaguucuuucuu

SEQ ID NO: 167672 - RNA, 24 nt, Human
cagauucagugguaccccuacuag

SEQ ID NO: 167673 - RNA, 21 nt, Human
cagcccugcuagcgccgggag

SEQ ID NO: 167674 - RNA, 23 nt, Human
cagcccugcuagcgccgggagcc

SEQ ID NO: 167675 - RNA, 28 nt, Human
cagugcaacaaaacaaaaacaaaaacaa

SEQ ID NO: 167676 - RNA, 18 nt, Human
cauacauggaaaugaccu

SEQ ID NO: 167677 - RNA, 25 nt, Human
ccaaugguaacaguuacauuuugua

SEQ ID NO: 167678 - RNA, 18 nt, Human
cccccgagaggugggcug

SEQ ID NO: 167679 - RNA, 18 nt, Human
ccgccgccgccgccgccg

SEQ ID NO: 167680 - RNA, 18 nt, Human
ccgccgccgccgccgccg

SEQ ID NO: 167681 - RNA, 18 nt, Human
ccgccgccgccgccgccg

SEQ ID NO: 167682 - RNA, 18 nt, Human
ccgccgccgccgccgccg

SEQ ID NO: 167683 - RNA, 18 nt, Human
ccgccgccgccgccgccg

SEQ ID NO: 167684 - RNA, 18 nt, Human
ccgccgccgccgccgccg

SEQ ID NO: 167685 - RNA, 18 nt, Human
ccgccgccgccgccgccg

SEQ ID NO: 167686 - RNA, 18 nt, Human
ccgccgccgccgccgccg

SEQ ID NO: 167687 - RNA, 18 nt, Human
ccgccgccgccgccgccg

SEQ ID NO: 167688 - RNA, 23 nt, Human
ccgccgccgccgccgccgccgcc

SEQ ID NO: 167689 - RNA, 23 nt, Human
ccgccgccgccgccgccgccgcc

SEQ ID NO: 167690 - RNA, 24 nt, Human
ccgccgccgccgccgccgccgccg

SEQ ID NO: 167691 - RNA, 24 nt, Human
ccgccgccgccgccgccgccgccg

SEQ ID NO: 167692 - RNA, 24 nt, Human
ccgccgccgccgccgccgccgccg

SEQ ID NO: 167693 - RNA, 24 nt, Human
ccgccgccgccgccgccgccgccg

SEQ ID NO: 167694 - RNA, 24 nt, Human
ccgccgccgccgccgccgccgccg

SEQ ID NO: 167695 - RNA, 24 nt, Human
ccgccgccgccgccgccgccgccg

SEQ ID NO: 167696 - RNA, 24 nt, Human
ccgccgccgccgccgccgccgccg

SEQ ID NO: 167697 - RNA, 24 nt, Human
ccgccgccgccgccgccgccgccu

SEQ ID NO: 167698 - RNA, 24 nt, Human
ccgccgccgccgccgccgccgccu

SEQ ID NO: 167699 - RNA, 27 nt, Human
ccgccgccgccgccgccuccgccgccg

SEQ ID NO: 167700 - RNA, 27 nt, Human
ccgccgccgccgccgccuccgccgccg

SEQ ID NO: 167701 - RNA, 18 nt, Human
ccgccgccgccgccgcgc

SEQ ID NO: 167702 - RNA, 19 nt, Human
ccgccgccgccgccgcgcu

SEQ ID NO: 167703 - RNA, 18 nt, Human
ccgccgccgccgccuccg

SEQ ID NO: 167704 - RNA, 18 nt, Human
ccgccgccgccgccuccg

SEQ ID NO: 167705 - RNA, 18 nt, Human
ccgccgccgccgcgcugc

SEQ ID NO: 167706 - RNA, 20 nt, Human
ccgccgccgccuccgccgcc

SEQ ID NO: 167707 - RNA, 20 nt, Human
ccgccgccgccuccgccgcc

SEQ ID NO: 167708 - RNA, 21 nt, Human
ccgccgccgccuccgccgccg

SEQ ID NO: 167709 - RNA, 21 nt, Human
ccgccgccgccuccgccgccg

SEQ ID NO: 167710 - RNA, 23 nt, Human
ccgccgccgccuccgccgccgcc

SEQ ID NO: 167711 - RNA, 23 nt, Human
ccgccgccgccuccgccgccgcc

SEQ ID NO: 167712 - RNA, 24 nt, Human
ccgccgccuccgccgccgccgccg

SEQ ID NO: 167713 - RNA, 24 nt, Human
ccgccgccuccgccgccgccgccg

SEQ ID NO: 167714 - RNA, 21 nt, Human
ccgccgcgcugccgcacgccc

SEQ ID NO: 167715 - RNA, 24 nt, Human
ccgccgcgcugccgcacgcccccu

SEQ ID NO: 167716 - RNA, 24 nt, Human
ccgccuccgccgccgccgccgccg

SEQ ID NO: 167717 - RNA, 24 nt, Human
ccgccuccgccgccgccgccgccg

SEQ ID NO: 167718 - RNA, 19 nt, Human
ccgcgcugccgcacgcccc

SEQ ID NO: 167719 - RNA, 21 nt, Human
ccuccgucaccgccgccgccc

SEQ ID NO: 167720 - RNA, 20 nt, Human
cgagauugaaaacagaaguc

SEQ ID NO: 167721 - RNA, 23 nt, Human
cgccgccgccgccgccgccuccg

SEQ ID NO: 167722 - RNA, 23 nt, Human
cgccgccgccgccgccgccuccg

SEQ ID NO: 167723 - RNA, 25 nt, Human
cgccgccgccgccgccgcgcugccg

SEQ ID NO: 167724 - RNA, 18 nt, Human
cgccgccgccgcgcugcc

SEQ ID NO: 167725 - RNA, 21 nt, Human
cgccuccgccgccgccgccgc

SEQ ID NO: 167726 - RNA, 21 nt, Human
cgccuccgccgccgccgccgc

SEQ ID NO: 167727 - RNA, 25 nt, Human
cuauaaccaaacaaaugucaacaua

SEQ ID NO: 167728 - RNA, 22 nt, Human
cucaaaaaacaaaaccaaaccc

SEQ ID NO: 167729 - RNA, 21 nt, Human
cuccgccgccgccgccgccgc

SEQ ID NO: 167730 - RNA, 21 nt, Human
cuccgccgccgccgccgccgc

SEQ ID NO: 167731 - RNA, 24 nt, Human
cuucaaaaaacaaaagaaaaaaag

SEQ ID NO: 167732 - RNA, 25 nt, Human
gaaaaauuacacaucucucucaaua

SEQ ID NO: 167733 - RNA, 22 nt, Human
gaaaaauuucacaaaacuuggg

SEQ ID NO: 167734 - RNA, 22 nt, Human
gccgccgccgccgccgccgccg

SEQ ID NO: 167735 - RNA, 19 nt, Human
gcugcgggcgcucgaggcc

SEQ ID NO: 167736 - RNA, 22 nt, Human
ggaaauauaacuucagaauuau

SEQ ID NO: 167737 - RNA, 30 nt, Human
uaaaaaaaaaagacucaaaaaacaaaaccu

SEQ ID NO: 167738 - RNA, 23 nt, Human
uaaaaagagacuagugcauauuu

SEQ ID NO: 167739 - RNA, 22 nt, Human
uaaaagcaaucauuuguaagga

SEQ ID NO: 167740 - RNA, 19 nt, Human
uaaaagcaauguuucaaaa

SEQ ID NO: 167741 - RNA, 20 nt, Human
uaaacugacacaggacauga

SEQ ID NO: 167742 - RNA, 25 nt, Human
uaaauuucacuuaaaaaaaaaagac

SEQ ID NO: 167743 - RNA, 20 nt, Human
uaacaaagaauaucacugcu

SEQ ID NO: 167744 - RNA, 19 nt, Human
uaaccaaacaaaugucaag

SEQ ID NO: 167745 - RNA, 18 nt, Human
uaaggaaaaaaauaugga

SEQ ID NO: 167746 - RNA, 21 nt, Human
uacaaggucauucuaccuugg

SEQ ID NO: 167747 - RNA, 26 nt, Human
uacagaaaaauuacacaucucucuca

SEQ ID NO: 167748 - RNA, 23 nt, Human
uaccugccaagauauaaaaaagg

SEQ ID NO: 167749 - RNA, 18 nt, Human
uacuauuugucuuuggcc

SEQ ID NO: 167750 - RNA, 20 nt, Human
uacugccuaaccugauguuu

SEQ ID NO: 167751 - RNA, 18 nt, Human
uagaccauauauuucaaa

SEQ ID NO: 167752 - RNA, 24 nt, Human
uaugaaugaacuccaacuccauuu

SEQ ID NO: 167753 - RNA, 23 nt, Human
uauggccaauaccaaaaaauaaa

SEQ ID NO: 167754 - RNA, 20 nt, Human
uauuaugcauacauggaaau

SEQ ID NO: 167755 - RNA, 18 nt, Human
ucacacacauuucagggu

SEQ ID NO: 167756 - RNA, 25 nt, Human
ucaccgccgccgcccgcgcucgccg

SEQ ID NO: 167757 - RNA, 24 nt, Human
ucaugugcaguuuguugccauuuu

SEQ ID NO: 167758 - RNA, 24 nt, Human
uccaaaauaagcuugaaauuaaaa

SEQ ID NO: 167759 - RNA, 25 nt, Human
uccaauucugcuuaaacauuagacc

SEQ ID NO: 167760 - RNA, 20 nt, Human
ucuccaaaauaagcuugaaa

SEQ ID NO: 167761 - RNA, 27 nt, Human
ugaaaaacauacacguuuagcacacaa

SEQ ID NO: 167762 - RNA, 22 nt, Human
ugaaauuaaaauaugaaaaauu

SEQ ID NO: 167763 - RNA, 27 nt, Human
ugaaauuuccaaugguaacaguuacau

SEQ ID NO: 167764 - RNA, 22 nt, Human
ugaaugaucacccaaugcagga

SEQ ID NO: 167765 - RNA, 19 nt, Human
ugacacaggacaugaaaug

SEQ ID NO: 167766 - RNA, 21 nt, Human
ugacacaggacaugaaaugac

SEQ ID NO: 167767 - RNA, 25 nt, Human
ugaugugugcaagguaccaauuucu

SEQ ID NO: 167768 - RNA, 24 nt, Human
ugcaaaucugaaaauuguugcuua

SEQ ID NO: 167769 - RNA, 23 nt, Human
ugcaacaaaacaaaaacaaaaac

SEQ ID NO: 167770 - RNA, 18 nt, Human
ugcuagcgccgggagccc

SEQ ID NO: 167771 - RNA, 21 nt, Human
uggaccaaaacauaaacugac

SEQ ID NO: 167772 - RNA, 24 nt, Human
uggcaauacuuuuuaaaagacuuu

SEQ ID NO: 167773 - RNA, 19 nt, Human
uggggcagacaaaauuaaa

SEQ ID NO: 167774 - RNA, 19 nt, Human
uggggcagacaaaauuaaa

SEQ ID NO: 167775 - RNA, 21 nt, Human
uggugaaugaucacccaaugc

SEQ ID NO: 167776 - RNA, 21 nt, Human
uguaaggaaaaaaauauggaa

SEQ ID NO: 167777 - RNA, 25 nt, Human
ugugcaaaucugaaaauuguugcuu

SEQ ID NO: 167778 - RNA, 23 nt, Human
ugugcaagguaccaauuucuguu

SEQ ID NO: 167779 - RNA, 20 nt, Human
uuagacaaaguaccuguacu

SEQ ID NO: 167780 - RNA, 23 nt, Human
uuccaacuuaucuucccugaacu

SEQ ID NO: 167781 - RNA, 23 nt, Human
uucccagaauaaauaacuagaaa

SEQ ID NO: 167782 - RNA, 24 nt, Human
uuuggccuaacaaaguuuucuaau

SEQ ID NO: 167783 - RNA, 22 nt, Human
aaaaagaaaguagaaaacagaa

SEQ ID NO: 167784 - RNA, 20 nt, Human
aaaaagcaguucaguguccc

SEQ ID NO: 167785 - RNA, 19 nt, Human
aaaaaggcaucccgaccuu

SEQ ID NO: 167786 - RNA, 21 nt, Human
aaaagaaaaaaaaugacuaag

SEQ ID NO: 167787 - RNA, 26 nt, Human
aaaagaaaaacacaguaaauucugga

SEQ ID NO: 167788 - RNA, 19 nt, Human
aaaaucccaugaaggacag

SEQ ID NO: 167789 - RNA, 21 nt, Human
aaacuccaacuucaaccuccg

SEQ ID NO: 167790 - RNA, 20 nt, Human
aaaggacagcuuugcacaca

SEQ ID NO: 167791 - RNA, 23 nt, Human
aaagugcuggguucagcugcagg

SEQ ID NO: 167792 - RNA, 24 nt, Human
aacaaaaaacuuagauucccuaau

SEQ ID NO: 167793 - RNA, 25 nt, Human
aacaaaacacauuuuuagccaaugg

SEQ ID NO: 167794 - RNA, 21 nt, Human
aacaacaacaauaacaacaac

SEQ ID NO: 167795 - RNA, 18 nt, Human
aacacaaacuugucaaac

SEQ ID NO: 167796 - RNA, 20 nt, Human
aaccaaaaagguaaagcauc

SEQ ID NO: 167797 - RNA, 19 nt, Human
aaccaggugcuuucuauuc

SEQ ID NO: 167798 - RNA, 22 nt, Human
aacuagaacuacaagucuuuca

SEQ ID NO: 167799 - RNA, 21 nt, Human
aacugcagaagaugcacagga

SEQ ID NO: 167800 - RNA, 19 nt, Human
aacuuacaagucaagccag

SEQ ID NO: 167801 - RNA, 26 nt, Human
aagaaaaggugguucagaagggaccc

SEQ ID NO: 167802 - RNA, 18 nt, Human
aagaagcauaaaaacaaa

SEQ ID NO: 167803 - RNA, 18 nt, Human
aagaccacuuguugcauu

SEQ ID NO: 167804 - RNA, 19 nt, Human
aagagaaaaaagaaaguag

SEQ ID NO: 167805 - RNA, 21 nt, Human
aagagaaaaaagaaaguagaa

SEQ ID NO: 167806 - RNA, 18 nt, Human
aagcaaaagccagagcca

SEQ ID NO: 167807 - RNA, 21 nt, Human
aagcaaaagccagagccagag

SEQ ID NO: 167808 - RNA, 26 nt, Human
aagcauaaaaacaaacauaaccaaag

SEQ ID NO: 167809 - RNA, 18 nt, Human
aagcggcggcaguggcac

SEQ ID NO: 167810 - RNA, 21 nt, Human
aagcggcggcaguggcacugg

SEQ ID NO: 167811 - RNA, 21 nt, Human
aagggccagaaagagcgagua

SEQ ID NO: 167812 - RNA, 25 nt, Human
aaguagaaaacagaaaaccuauaag

SEQ ID NO: 167813 - RNA, 26 nt, Human
aaguagauauaacaagucacugaaac

SEQ ID NO: 167814 - RNA, 22 nt, Human
aauacaaagccaagccaacauc

SEQ ID NO: 167815 - RNA, 18 nt, Human
aaucaugaaacugaaaga

SEQ ID NO: 167816 - RNA, 22 nt, Human
aauccuaccuaccaaacucaga

SEQ ID NO: 167817 - RNA, 19 nt, Human
aaucucuucuuugcaggau

SEQ ID NO: 167818 - RNA, 23 nt, Human
aauggugcaaaccaggugcuuuc

SEQ ID NO: 167819 - RNA, 22 nt, Human
acaaaaagaugguggaaucuga

SEQ ID NO: 167820 - RNA, 20 nt, Human
acaauaauauggacuuuaau

SEQ ID NO: 167821 - RNA, 22 nt, Human
acaaugaaaauucucaccugaa

SEQ ID NO: 167822 - RNA, 18 nt, Human
acaauuuaauggccaccu

SEQ ID NO: 167823 - RNA, 21 nt, Human
acacacacacacacacacaca

SEQ ID NO: 167824 - RNA, 31 nt, Human
acacacacacacacacacacugacgaugugg

SEQ ID NO: 167825 - RNA, 31 nt, Human
acacacacacacacacacugacgauguguag

SEQ ID NO: 167826 - RNA, 27 nt, Human
acacacacacgcacgugcgugcgcgca

SEQ ID NO: 167827 - RNA, 23 nt, Human
acagagccuuuuucaucacaaag

SEQ ID NO: 167828 - RNA, 21 nt, Human
acagcaacaauccuuaaucau

SEQ ID NO: 167829 - RNA, 21 nt, Human
acagggcuugagcaucugggg

SEQ ID NO: 167830 - RNA, 31 nt, Human
acaugcagggacacacacacgcacgugcgug

SEQ ID NO: 167831 - RNA, 24 nt, Human
accaccagaaaagaaaagaaacca

SEQ ID NO: 167832 - RNA, 21 nt, Human
acccuggucuguacaggaaau

SEQ ID NO: 167833 - RNA, 21 nt, Human
acuaaguaauaaaacguacac

SEQ ID NO: 167834 - RNA, 23 nt, Human
acuaccaccaccagaaaagaaaa

SEQ ID NO: 167835 - RNA, 25 nt, Human
acugcagcauccugucaggggccug

SEQ ID NO: 167836 - RNA, 25 nt, Human
agaaaaaagaaaguagaaaacagaa

SEQ ID NO: 167837 - RNA, 19 nt, Human
agaaaagaaaagaaaccaa

SEQ ID NO: 167838 - RNA, 21 nt, Human
agaaagaacacuagcaggaaa

SEQ ID NO: 167839 - RNA, 20 nt, Human
agaacaaagcaccaacaaaa

SEQ ID NO: 167840 - RNA, 24 nt, Human
agaauauaucacucaucuaaccaa

SEQ ID NO: 167841 - RNA, 23 nt, Human
agagagacaaguaacaacaacca

SEQ ID NO: 167842 - RNA, 18 nt, Human
agagagagggggagagag

SEQ ID NO: 167843 - RNA, 19 nt, Human
agagggaaggaggaaagaa

SEQ ID NO: 167844 - RNA, 21 nt, Human
agauacaaaccucuuauuaac

SEQ ID NO: 167845 - RNA, 20 nt, Human
agauacaaccacuaccacca

SEQ ID NO: 167846 - RNA, 28 nt, Human
agauaucuuugggaaagauaugcuagaa

SEQ ID NO: 167847 - RNA, 18 nt, Human
agaugccacuucuguugu

SEQ ID NO: 167848 - RNA, 18 nt, Human
agcaggaaagcaaaagcc

SEQ ID NO: 167849 - RNA, 22 nt, Human
agcggccaggcggcggcggcgg

SEQ ID NO: 167850 - RNA, 23 nt, Human
agcggcggcggcggcggcggcgg

SEQ ID NO: 167851 - RNA, 18 nt, Human
agcggcggcgggggcggc

SEQ ID NO: 167852 - RNA, 19 nt, Human
aggaaauuggaacuuacug

SEQ ID NO: 167853 - RNA, 21 nt, Human
aggcaaaagacagaagggccc

SEQ ID NO: 167854 - RNA, 21 nt, Human
aggcagaggugugaauuccuu

SEQ ID NO: 167855 - RNA, 19 nt, Human
aggcaggcgagcuugagcu

SEQ ID NO: 167856 - RNA, 22 nt, Human
aggccaggcacgggccccaggg

SEQ ID NO: 167857 - RNA, 22 nt, Human
aggcggcggcggcgggcgggcg

SEQ ID NO: 167858 - RNA, 23 nt, Human
agggcccaaugaacauggagcau

SEQ ID NO: 167859 - RNA, 22 nt, Human
agggugaguuugugugugugug

SEQ ID NO: 167860 - RNA, 19 nt, Human
agugguggcccuaccuggg

SEQ ID NO: 167861 - RNA, 19 nt, Human
aguugauugaaaaauccug

SEQ ID NO: 167862 - RNA, 20 nt, Human
auaaaaacaaacauaaccaa

SEQ ID NO: 167863 - RNA, 21 nt, Human
auaaagagacaacuugaguca

SEQ ID NO: 167864 - RNA, 18 nt, Human
auaagagagaaaauguga

SEQ ID NO: 167865 - RNA, 23 nt, Human
auaaucaaguggugauccagagc

SEQ ID NO: 167866 - RNA, 24 nt, Human
auacaaaucacagagccaacaaaa

SEQ ID NO: 167867 - RNA, 25 nt, Human
auacaaccacuaccaccaccagaaa

SEQ ID NO: 167868 - RNA, 18 nt, Human
auagccaggcacucuacc

SEQ ID NO: 167869 - RNA, 22 nt, Human
auccaguggcguguugaagcau

SEQ ID NO: 167870 - RNA, 19 nt, Human
aucuccaucccuuaguccc

SEQ ID NO: 167871 - RNA, 28 nt, Human
augaaacagaauccaaauuagauaucuu

SEQ ID NO: 167872 - RNA, 20 nt, Human
augaaacugaaagaugucuu

SEQ ID NO: 167873 - RNA, 18 nt, Human
augaaggacagcaagcua

SEQ ID NO: 167874 - RNA, 23 nt, Human
augauaaagagacaacuugaguc

SEQ ID NO: 167875 - RNA, 29 nt, Human
augcagggacacacacacgcacgugcggu

SEQ ID NO: 167876 - RNA, 24 nt, Human
augguuuugaauuaggggaugcac

SEQ ID NO: 167877 - RNA, 22 nt, Human
augugugugugugugagugugu

SEQ ID NO: 167878 - RNA, 22 nt, Human
auguuuguacacagaguuacug

SEQ ID NO: 167879 - RNA, 19 nt, Human
caaaaagaauugcagaggc

SEQ ID NO: 167880 - RNA, 20 nt, Human
caaaaagaauugcagaggca

SEQ ID NO: 167881 - RNA, 21 nt, Human
caaacacacacgcuauagacc

SEQ ID NO: 167882 - RNA, 22 nt, Human
caaacuauucccagcugaaagc

SEQ ID NO: 167883 - RNA, 20 nt, Human
caaagcaccaacaaaacgcu

SEQ ID NO: 167884 - RNA, 23 nt, Human
caaagcaccaacaaaacgcuugu

SEQ ID NO: 167885 - RNA, 25 nt, Human
caaagcaccaacaaaacuggagacc

SEQ ID NO: 167886 - RNA, 22 nt, Human
caaagccaagccaacaucauaa

SEQ ID NO: 167887 - RNA, 20 nt, Human
caacaaaacgcuugugcgcc

SEQ ID NO: 167888 - RNA, 24 nt, Human
caacaacaauaacaacaacgauga

SEQ ID NO: 167889 - RNA, 22 nt, Human
caacacuacagcaaacaaucuu

SEQ ID NO: 167890 - RNA, 26 nt, Human
caacauguuacagcuaaauucuaccc

SEQ ID NO: 167891 - RNA, 22 nt, Human
caacucagcucauguucuccag

SEQ ID NO: 167892 - RNA, 22 nt, Human
caacuucaaccuccgggaugca

SEQ ID NO: 167893 - RNA, 20 nt, Human
caaguaacaacaaccaucac

SEQ ID NO: 167894 - RNA, 24 nt, Human
caagugcuucccauucuuuguuuu

SEQ ID NO: 167895 - RNA, 19 nt, Human
caauaauuuuuccccacag

SEQ ID NO: 167896 - RNA, 24 nt, Human
caauaggaacaaacuauucccagc

SEQ ID NO: 167897 - RNA, 23 nt, Human
cacaaccagugagaaaugucucc

SEQ ID NO: 167898 - RNA, 20 nt, Human
cacacacacacacacacaca

SEQ ID NO: 167899 - RNA, 20 nt, Human
cacacacacacacacacaca

SEQ ID NO: 167900 - RNA, 26 nt, Human
cacacacacacugacgauguguacuc

SEQ ID NO: 167901 - RNA, 22 nt, Human
cacacaggcagauauaguuuua

SEQ ID NO: 167902 - RNA, 26 nt, Human
cacaccacugguugcaugcuaggcug

SEQ ID NO: 167903 - RNA, 21 nt, Human
cacacgcacgugcgugcgcgc

SEQ ID NO: 167904 - RNA, 24 nt, Human
cacaugucucauaucccucccaca

SEQ ID NO: 167905 - RNA, 23 nt, Human
caccaaccuuggguguucagagu

SEQ ID NO: 167906 - RNA, 20 nt, Human
caccaccagaaaagaaaaga

SEQ ID NO: 167907 - RNA, 21 nt, Human
caccagaaaagaaaagaaacc

SEQ ID NO: 167908 - RNA, 18 nt, Human
caccagcaacugcuggca

SEQ ID NO: 167909 - RNA, 23 nt, Human
caccccugacaacucucaggggu

SEQ ID NO: 167910 - RNA, 21 nt, Human
cacuacagcaaacaaucuuca

SEQ ID NO: 167911 - RNA, 20 nt, Human
cacugagggcucaacucagc

SEQ ID NO: 167912 - RNA, 21 nt, Human
cacuucccccuucccuccuca

SEQ ID NO: 167913 - RNA, 20 nt, Human
cagaaagagcgaguaagaca

SEQ ID NO: 167914 - RNA, 19 nt, Human
cagaauaucuccaucccuu

SEQ ID NO: 167915 - RNA, 22 nt, Human
cagaauaucuccaucccuuagu

SEQ ID NO: 167916 - RNA, 22 nt, Human
cagagccuuuuucaucacaaag

SEQ ID NO: 167917 - RNA, 20 nt, Human
cagcacaccacugguugcau

SEQ ID NO: 167918 - RNA, 18 nt, Human
cagcagcagcgggcgcug

SEQ ID NO: 167919 - RNA, 18 nt, Human
cagcagcgggcgcuggag

SEQ ID NO: 167920 - RNA, 21 nt, Human
cagccggggcggcagcggcgg

SEQ ID NO: 167921 - RNA, 25 nt, Human
cagcggcggcgggggcggccggggc

SEQ ID NO: 167922 - RNA, 19 nt, Human
cagcggcugcacaggcggc

SEQ ID NO: 167923 - RNA, 21 nt, Human
cagcucaagucuggcuguuuu

SEQ ID NO: 167924 - RNA, 19 nt, Human
cagcuuggagcaagucaac

SEQ ID NO: 167925 - RNA, 19 nt, Human
caggaccaggagaaugaau

SEQ ID NO: 167926 - RNA, 22 nt, Human
caggggccuggacguaggcuuu

SEQ ID NO: 167927 - RNA, 21 nt, Human
cagugaccaucagugcgcugg

SEQ ID NO: 167928 - RNA, 22 nt, Human
caguuuacccuggucuguacag

SEQ ID NO: 167929 - RNA, 20 nt, Human
cauaaacacugcagaaccac

SEQ ID NO: 167930 - RNA, 24 nt, Human
cauaaagcucaaccacagugggag

SEQ ID NO: 167931 - RNA, 19 nt, Human
cauaucccucccacaaacu

SEQ ID NO: 167932 - RNA, 22 nt, Human
caucaagaucuagaggcacgau

SEQ ID NO: 167933 - RNA, 19 nt, Human
caucucuuuccaaccaugu

SEQ ID NO: 167934 - RNA, 24 nt, Human
caucuggggugcauuugacuaccc

SEQ ID NO: 167935 - RNA, 22 nt, Human
cauguucuccagcugagguggc

SEQ ID NO: 167936 - RNA, 22 nt, Human
ccaaacaaaggaaagggaaaca

SEQ ID NO: 167937 - RNA, 22 nt, Human
ccaaacuguucuucaaaaggac

SEQ ID NO: 167938 - RNA, 21 nt, Human
ccaaccucaaacuccaacuuc

SEQ ID NO: 167939 - RNA, 18 nt, Human
ccacacaggcagauauag

SEQ ID NO: 167940 - RNA, 22 nt, Human
ccacagauacaaccacuaccac

SEQ ID NO: 167941 - RNA, 28 nt, Human
ccaccagaaaagaaaagaaaccaaucuc

SEQ ID NO: 167942 - RNA, 20 nt, Human
ccagaaaagaaaagaaacca

SEQ ID NO: 167943 - RNA, 21 nt, Human
ccagaaagagcgaguaagaca

SEQ ID NO: 167944 - RNA, 19 nt, Human
ccagagagagagagagaca

SEQ ID NO: 167945 - RNA, 21 nt, Human
ccaggaagaagagaaagguua

SEQ ID NO: 167946 - RNA, 22 nt, Human
ccaggcagaagacaccccugac

SEQ ID NO: 167947 - RNA, 22 nt, Human
ccauccacaugucucauauccc

SEQ ID NO: 167948 - RNA, 21 nt, Human
ccaugaaaggauagaccccca

SEQ ID NO: 167949 - RNA, 21 nt, Human
ccauggaaauuggcaaauggu

SEQ ID NO: 167950 - RNA, 21 nt, Human
cccacacacaaagcauaugau

SEQ ID NO: 167951 - RNA, 21 nt, Human
ccccacagaauuaaauuuggg

SEQ ID NO: 167952 - RNA, 22 nt, Human
ccccagugaguggaguuccacc

SEQ ID NO: 167953 - RNA, 21 nt, Human
cccccuucccuccucaaaguc

SEQ ID NO: 167954 - RNA, 23 nt, Human
ccccuaacccaaugugagcacaa

SEQ ID NO: 167955 - RNA, 18 nt, Human
cccggcucuccagcccuc

SEQ ID NO: 167956 - RNA, 19 nt, Human
cccucccgcccagcuaaaa

SEQ ID NO: 167957 - RNA, 22 nt, Human
ccuacuacaauuuccucuugga

SEQ ID NO: 167958 - RNA, 23 nt, Human
ccucaaacuccaacuucaaccuc

SEQ ID NO: 167959 - RNA, 22 nt, Human
ccucccacaaacugguauacug

SEQ ID NO: 167960 - RNA, 23 nt, Human
ccuccgaauaugacagcuggcuu

SEQ ID NO: 167961 - RNA, 26 nt, Human
ccugcaaccacuccacuugcuccaga

SEQ ID NO: 167962 - RNA, 19 nt, Human
cgacccgacgcugcggcgg

SEQ ID NO: 167963 - RNA, 20 nt, Human
cgcacacacacacacacaca

SEQ ID NO: 167964 - RNA, 25 nt, Human
cgcgcacacacacacacacacacac

SEQ ID NO: 167965 - RNA, 19 nt, Human
cgcggcgcggcagccgggg

SEQ ID NO: 167966 - RNA, 24 nt, Human
cggcagcagcagcgggcgcuggag

SEQ ID NO: 167967 - RNA, 23 nt, Human
cggcagcggcggcgggggcggcc

SEQ ID NO: 167968 - RNA, 22 nt, Human
cggcccccggcucuccagcccu

SEQ ID NO: 167969 - RNA, 21 nt, Human
cggccggggcagaggcagcgg

SEQ ID NO: 167970 - RNA, 19 nt, Human
cggcgcggcagccggggcg

SEQ ID NO: 167971 - RNA, 18 nt, Human
cggcgcggcgcggcagcc

SEQ ID NO: 167972 - RNA, 19 nt, Human
cggcggcagcggcggcggg

SEQ ID NO: 167973 - RNA, 20 nt, Human
cggcggcaguggcacugggc

SEQ ID NO: 167974 - RNA, 18 nt, Human
cggcggcgggcgggcgcc

SEQ ID NO: 167975 - RNA, 21 nt, Human
cggcggcgggggcggccgggg

SEQ ID NO: 167976 - RNA, 22 nt, Human
cuacgacacgcaucaccauuua

SEQ ID NO: 167977 - RNA, 22 nt, Human
cucaagggauaggaagguaauu

SEQ ID NO: 167978 - RNA, 23 nt, Human
cucaagggauaggaagguaauuc

SEQ ID NO: 167979 - RNA, 25 nt, Human
cucagaaaagauucuuucagguuuc

SEQ ID NO: 167980 - RNA, 20 nt, Human
cuccagcccucccgcccagc

SEQ ID NO: 167981 - RNA, 24 nt, Human
cucucugugguuggagcuugggug

SEQ ID NO: 167982 - RNA, 21 nt, Human
cugaagauguuuguaauugcc

SEQ ID NO: 167983 - RNA, 28 nt, Human
cugaucccaaagaggaugucugagcaug

SEQ ID NO: 167984 - RNA, 21 nt, Human
cugcagcauccugucaggggc

SEQ ID NO: 167985 - RNA, 20 nt, Human
cugccucaacauucuaaugu

SEQ ID NO: 167986 - RNA, 23 nt, Human
cuguaaacauaaagcucaaccac

SEQ ID NO: 167987 - RNA, 21 nt, Human
cuuaccaacuguguaaauguu

SEQ ID NO: 167988 - RNA, 21 nt, Human
cuugucaaacucucugugguu

SEQ ID NO: 167989 - RNA, 22 nt, Human
cuuuuuaaaaaaucaaucguga

SEQ ID NO: 167990 - RNA, 20 nt, Human
gaacaaagcaccaacaaaac

SEQ ID NO: 167991 - RNA, 28 nt, Human
gaacaaguacaauucagaaaggguuucc

SEQ ID NO: 167992 - RNA, 22 nt, Human
gaaccacaacagggcuugagca

SEQ ID NO: 167993 - RNA, 22 nt, Human
gaagaagagaaagguuauagag

SEQ ID NO: 167994 - RNA, 22 nt, Human
gaagcggcggcaguggcacugg

SEQ ID NO: 167995 - RNA, 20 nt, Human
gacaccaaccuuggguguuc

SEQ ID NO: 167996 - RNA, 21 nt, Human
gagaauuacugaguuuccacg

SEQ ID NO: 167997 - RNA, 23 nt, Human
gagccaaacaaaggaaagggaaa

SEQ ID NO: 167998 - RNA, 25 nt, Human
gaggcaaaagacagaagggccagaa

SEQ ID NO: 167999 - RNA, 21 nt, Human
gaggcagcggcgcggcgcggc

SEQ ID NO: 168000 - RNA, 19 nt, Human
gauauggaaggagaugaug

SEQ ID NO: 168001 - RNA, 19 nt, Human
gaucucucacugccaucca

SEQ ID NO: 168002 - RNA, 18 nt, Human
gauguguacucuuugugc

SEQ ID NO: 168003 - RNA, 25 nt, Human
gcaaaaaggggcaagaacugcaauc

SEQ ID NO: 168004 - RNA, 24 nt, Human
gcacacacacacacacacacacac

SEQ ID NO: 168005 - RNA, 28 nt, Human
gcacacacacacacacacacacacugac

SEQ ID NO: 168006 - RNA, 22 nt, Human
gcagcggcggcggcggcggcuu

SEQ ID NO: 168007 - RNA, 18 nt, Human
gcagcggcugcacaggcg

SEQ ID NO: 168008 - RNA, 27 nt, Human
gcaggaaagcaaaagccagagccagag

SEQ ID NO: 168009 - RNA, 20 nt, Human
gcaguggcacugggcgggca

SEQ ID NO: 168010 - RNA, 21 nt, Human
gcccgcgcacccagcgacccg

SEQ ID NO: 168011 - RNA, 22 nt, Human
gcccgcgcacccagcgacccga

SEQ ID NO: 168012 - RNA, 20 nt, Human
gcgcacccagcgacccgacg

SEQ ID NO: 168013 - RNA, 20 nt, Human
gcgccacacauuugaaaugc

SEQ ID NO: 168014 - RNA, 18 nt, Human
gcgcggcgcggcagccgg

SEQ ID NO: 168015 - RNA, 23 nt, Human
gcggcagcggcggcggcggcggc

SEQ ID NO: 168016 - RNA, 23 nt, Human
gcggcagcggcggcggcggcggc

SEQ ID NO: 168017 - RNA, 21 nt, Human
gcggccaggcggcggcggcga

SEQ ID NO: 168018 - RNA, 23 nt, Human
gcggcggcagcggcugcacaggc

SEQ ID NO: 168019 - RNA, 24 nt, Human
gcggcggcggcggcggcagcggcu

SEQ ID NO: 168020 - RNA, 20 nt, Human
gcggcggcggcggcggcggc

SEQ ID NO: 168021 - RNA, 20 nt, Human
gcggcggcggcggcggcggc

SEQ ID NO: 168022 - RNA, 20 nt, Human
gcggcggcggcggcggcggc

SEQ ID NO: 168023 - RNA, 20 nt, Human
gcggcggcggcggcggcggc

SEQ ID NO: 168024 - RNA, 20 nt, Human
gcggcggcggcggcggcggc

SEQ ID NO: 168025 - RNA, 20 nt, Human
gcggcggcggcggcggcggc

SEQ ID NO: 168026 - RNA, 20 nt, Human
gcggcggcggcggcggcggc

SEQ ID NO: 168027 - RNA, 23 nt, Human
gcggcggcggcggcggcggcagc

SEQ ID NO: 168028 - RNA, 23 nt, Human
gcggcggcggcggcggcggcggc

SEQ ID NO: 168029 - RNA, 23 nt, Human
gcggcggcggcggcggcggcggc

SEQ ID NO: 168030 - RNA, 23 nt, Human
gcggcggcggcggcggcggcggc

SEQ ID NO: 168031 - RNA, 23 nt, Human
gcggcggcggcggcggcggcggc

SEQ ID NO: 168032 - RNA, 23 nt, Human
gcggcggcggcggcggcggcggc

SEQ ID NO: 168033 - RNA, 23 nt, Human
gcggcggcggcggcggcggcggc

SEQ ID NO: 168034 - RNA, 24 nt, Human
gcggcggcggcggcggcggcggca

SEQ ID NO: 168035 - RNA, 24 nt, Human
gcggcggcggcggcggcggcggcg

SEQ ID NO: 168036 - RNA, 24 nt, Human
gcggcggcggcggcggcggcggcg

SEQ ID NO: 168037 - RNA, 22 nt, Human
gcggcgggggcggccggggcag

SEQ ID NO: 168038 - RNA, 19 nt, Human
gcgggccggcggcggcagc

SEQ ID NO: 168039 - RNA, 23 nt, Human
ggaagaagagaaagguuauagag

SEQ ID NO: 168040 - RNA, 23 nt, Human
ggagaacaaugaguuccccaaua

SEQ ID NO: 168041 - RNA, 21 nt, Human
ggagagagagagagaggggga

SEQ ID NO: 168042 - RNA, 22 nt, Human
ggagcuuccuuuuacucugccc

SEQ ID NO: 168043 - RNA, 20 nt, Human
ggaguugaaaaacacugaug

SEQ ID NO: 168044 - RNA, 19 nt, Human
ggaucuaaaaagcaguuca

SEQ ID NO: 168045 - RNA, 20 nt, Human
ggaugcauaaguguuguugc

SEQ ID NO: 168046 - RNA, 20 nt, Human
ggcaaauggugcaaaccagg

SEQ ID NO: 168047 - RNA, 22 nt, Human
ggcagcggcggcgggggcggcc

SEQ ID NO: 168048 - RNA, 25 nt, Human
ggccagaaagagcgaguaagacaug

SEQ ID NO: 168049 - RNA, 23 nt, Human
ggcggcggcggcggcagcggcug

SEQ ID NO: 168050 - RNA, 23 nt, Human
ggcggcggcggcggcggcggcgg

SEQ ID NO: 168051 - RNA, 23 nt, Human
ggcggcggcggcggcggcggcgg

SEQ ID NO: 168052 - RNA, 23 nt, Human
ggcggcggcggcggcggcggcgg

SEQ ID NO: 168053 - RNA, 23 nt, Human
ggcggcggcggcggcggcggcgg

SEQ ID NO: 168054 - RNA, 23 nt, Human
ggcggcggcggcggcggcggcgg

SEQ ID NO: 168055 - RNA, 23 nt, Human
ggcggcggcggcggcggcggcgg

SEQ ID NO: 168056 - RNA, 23 nt, Human
ggcggcggcggcggcggcggcgg

SEQ ID NO: 168057 - RNA, 23 nt, Human
ggcggcggcggcggcggcggcgg

SEQ ID NO: 168058 - RNA, 20 nt, Human
ggcggcggcggcgggcgggc

SEQ ID NO: 168059 - RNA, 18 nt, Human
ggcggcggcgggcgggcg

SEQ ID NO: 168060 - RNA, 19 nt, Human
gggaaagcuaaaaucccau

SEQ ID NO: 168061 - RNA, 19 nt, Human
gggcggcagcggcggcggc

SEQ ID NO: 168062 - RNA, 28 nt, Human
ggggauggucccuugugucuaaguucuc

SEQ ID NO: 168063 - RNA, 22 nt, Human
ggggcggcagcggcggcggcgg

SEQ ID NO: 168064 - RNA, 24 nt, Human
gggggauggucccuugugucuaag

SEQ ID NO: 168065 - RNA, 19 nt, Human
gguagagguagagugaugg

SEQ ID NO: 168066 - RNA, 20 nt, Human
guaaagcaucugaaauuccc

SEQ ID NO: 168067 - RNA, 21 nt, Human
guaaccagggccuccuggaac

SEQ ID NO: 168068 - RNA, 22 nt, Human
gucacugaaacuagaacuacaa

SEQ ID NO: 168069 - RNA, 18 nt, Human
gugcucagagucccugug

SEQ ID NO: 168070 - RNA, 21 nt, Human
gugcugaauugacccauucau

SEQ ID NO: 168071 - RNA, 24 nt, Human
gugggauacacaaaaguuugacag

SEQ ID NO: 168072 - RNA, 19 nt, Human
guguaugugugugugugug

SEQ ID NO: 168073 - RNA, 21 nt, Human
gugugugagugugugugugug

SEQ ID NO: 168074 - RNA, 21 nt, Human
gugugugugugagugugugug

SEQ ID NO: 168075 - RNA, 20 nt, Human
guucccguaaauacuuuauc

SEQ ID NO: 168076 - RNA, 21 nt, Human
guuugggggauggucccuugu

SEQ ID NO: 168077 - RNA, 22 nt, Human
uaaaaacaaacauaaccaaaga

SEQ ID NO: 168078 - RNA, 20 nt, Human
uaaaacuacuaguauuuucc

SEQ ID NO: 168079 - RNA, 23 nt, Human
uaaaagaaaaacacaguaaauuc

SEQ ID NO: 168080 - RNA, 20 nt, Human
uaaaaguuacaaauagcauu

SEQ ID NO: 168081 - RNA, 23 nt, Human
uaaaccuaaaaagucuugacuga

SEQ ID NO: 168082 - RNA, 23 nt, Human
uaacaaaaaacuuagauucccua

SEQ ID NO: 168083 - RNA, 24 nt, Human
uaacaacaacgaugaagaauuuag

SEQ ID NO: 168084 - RNA, 22 nt, Human
uaacaagucacugaaacuagaa

SEQ ID NO: 168085 - RNA, 24 nt, Human
uaacacaaacuugucaaacucucu

SEQ ID NO: 168086 - RNA, 23 nt, Human
uaaccaaagagaacguuccccag

SEQ ID NO: 168087 - RNA, 18 nt, Human
uaaguagaaucauccagg

SEQ ID NO: 168088 - RNA, 23 nt, Human
uacaaaaagaauugcagaggcaa

SEQ ID NO: 168089 - RNA, 18 nt, Human
uacaaaucacagagccaa

SEQ ID NO: 168090 - RNA, 19 nt, Human
uacaacaucuaaccagugg

SEQ ID NO: 168091 - RNA, 19 nt, Human
uacaaccacuaccaccacc

SEQ ID NO: 168092 - RNA, 20 nt, Human
uacaauuuaaaaauccugcc

SEQ ID NO: 168093 - RNA, 26 nt, Human
uacagagacaucuuguuggucagucg

SEQ ID NO: 168094 - RNA, 27 nt, Human
uacagagacaucuuguuggucagucgg

SEQ ID NO: 168095 - RNA, 19 nt, Human
uaccaacuguguaaauguu

SEQ ID NO: 168096 - RNA, 22 nt, Human
uaccaugaaaggauagaccccc

SEQ ID NO: 168097 - RNA, 22 nt, Human
uaccugggucaaguugcagggc

SEQ ID NO: 168098 - RNA, 21 nt, Human
uaccugugagauauggaagga

SEQ ID NO: 168099 - RNA, 24 nt, Human
uacuguccagggucuccuuccucc

SEQ ID NO: 168100 - RNA, 18 nt, Human
uacuugggagggagcaua

SEQ ID NO: 168101 - RNA, 18 nt, Human
uagaaaacagaaaaccua

SEQ ID NO: 168102 - RNA, 23 nt, Human
uagaacuacaagucuuucaucca

SEQ ID NO: 168103 - RNA, 20 nt, Human
uagacccccagucccugcua

SEQ ID NO: 168104 - RNA, 23 nt, Human
uagcagcuaaucugcuuuuucca

SEQ ID NO: 168105 - RNA, 27 nt, Human
uagcaucuuuuuaagaguagcauugcu

SEQ ID NO: 168106 - RNA, 23 nt, Human
uagcuuaaaaucaucuaaagugg

SEQ ID NO: 168107 - RNA, 22 nt, Human
uaggaagaaaacuguauaucau

SEQ ID NO: 168108 - RNA, 20 nt, Human
uaggcuuccuucacuucccc

SEQ ID NO: 168109 - RNA, 18 nt, Human
uagguagugauaccuuga

SEQ ID NO: 168110 - RNA, 29 nt, Human
uauaaaacuacuaguauuuucccaaugaa

SEQ ID NO: 168111 - RNA, 19 nt, Human
uauaacacugucucaucug

SEQ ID NO: 168112 - RNA, 21 nt, Human
uaucaaagacaacacuacagc

SEQ ID NO: 168113 - RNA, 22 nt, Human
uaucaaagacaacacuacagca

SEQ ID NO: 168114 - RNA, 25 nt, Human
uaucuuuuuaaaaaaucaaucguga

SEQ ID NO: 168115 - RNA, 20 nt, Human
uaugacaaaaccacuaaaaa

SEQ ID NO: 168116 - RNA, 23 nt, Human
uaugacaaaaccacuaaaaaucc

SEQ ID NO: 168117 - RNA, 23 nt, Human
uaugcuuguuucucugggaaacu

SEQ ID NO: 168118 - RNA, 23 nt, Human
uaugugugugugugugagugugu

SEQ ID NO: 168119 - RNA, 23 nt, Human
uaugugugugugugugagugugu

SEQ ID NO: 168120 - RNA, 23 nt, Human
uaugugugugugugugagugugu

SEQ ID NO: 168121 - RNA, 20 nt, Human
uauuuaaugaaagccucauu

SEQ ID NO: 168122 - RNA, 22 nt, Human
ucaaagacaacacuacagcaaa

SEQ ID NO: 168123 - RNA, 25 nt, Human
ucaaugauaacaacccccccaucga

SEQ ID NO: 168124 - RNA, 18 nt, Human
ucacauaaaagaaaaaca

SEQ ID NO: 168125 - RNA, 20 nt, Human
ucacuggcaaaagaguuuga

SEQ ID NO: 168126 - RNA, 20 nt, Human
ucagacaguuauaugacaaa

SEQ ID NO: 168127 - RNA, 23 nt, Human
ucagagacacuuucguagccaca

SEQ ID NO: 168128 - RNA, 25 nt, Human
ucagcuauucuccugcuuaaaaccu

SEQ ID NO: 168129 - RNA, 23 nt, Human
ucagcucaggagggcuucauucu

SEQ ID NO: 168130 - RNA, 20 nt, Human
ucagguuucauuugugagug

SEQ ID NO: 168131 - RNA, 23 nt, Human
uccaucccuuagucccucaaaua

SEQ ID NO: 168132 - RNA, 22 nt, Human
uccaucuuuccagauacaaacc

SEQ ID NO: 168133 - RNA, 20 nt, Human
uccaugaggcaauaugcuug

SEQ ID NO: 168134 - RNA, 19 nt, Human
ucccauagauuugagcaaa

SEQ ID NO: 168135 - RNA, 22 nt, Human
uccccagugaguggaguuccac

SEQ ID NO: 168136 - RNA, 23 nt, Human
ucccuccucaaagucugauacaa

SEQ ID NO: 168137 - RNA, 24 nt, Human
ucccugcuaucgugccagcuacaa

SEQ ID NO: 168138 - RNA, 18 nt, Human
uccgggaugcaaauuugc

SEQ ID NO: 168139 - RNA, 20 nt, Human
uccuaagcugcuuuauaaau

SEQ ID NO: 168140 - RNA, 23 nt, Human
uccucuacuuacuugggagggag

SEQ ID NO: 168141 - RNA, 22 nt, Human
ucgauugucagauuuggucacu

SEQ ID NO: 168142 - RNA, 19 nt, Human
ucggcggcccccggcucuc

SEQ ID NO: 168143 - RNA, 23 nt, Human
ucuacaggcuggcuaacaacaug

SEQ ID NO: 168144 - RNA, 21 nt, Human
ucuacuccuaaauccaugaug

SEQ ID NO: 168145 - RNA, 23 nt, Human
ucuagguagugauaccuugacuu

SEQ ID NO: 168146 - RNA, 18 nt, Human
ucuaguuucuggaugugg

SEQ ID NO: 168147 - RNA, 19 nt, Human
ucucagcgagcugguuguu

SEQ ID NO: 168148 - RNA, 20 nt, Human
ucucagucaauuuaccuacu

SEQ ID NO: 168149 - RNA, 20 nt, Human
ucuccaauuuugcuuacugu

SEQ ID NO: 168150 - RNA, 22 nt, Human
ucuccaauuuugcuuacugucc

SEQ ID NO: 168151 - RNA, 20 nt, Human
ucugaggaggaggauggaaa

SEQ ID NO: 168152 - RNA, 20 nt, Human
ucugauuagucuccugccag

SEQ ID NO: 168153 - RNA, 21 nt, Human
ucugcaaugagcaugaauguu

SEQ ID NO: 168154 - RNA, 23 nt, Human
ucugcaaugagcaugaauguugg

SEQ ID NO: 168155 - RNA, 23 nt, Human
ucugggcaacacggcauuaacuu

SEQ ID NO: 168156 - RNA, 19 nt, Human
ucugguguggugacggggg

SEQ ID NO: 168157 - RNA, 18 nt, Human
ucuguacaggaaauugga

SEQ ID NO: 168158 - RNA, 23 nt, Human
ucuuucagguuucauuugugagu

SEQ ID NO: 168159 - RNA, 25 nt, Human
ugaaacagcaaagcuccaaucucuu

SEQ ID NO: 168160 - RNA, 18 nt, Human
ugaaaggauagaccccca

SEQ ID NO: 168161 - RNA, 18 nt, Human
ugacaccaaccuugggug

SEQ ID NO: 168162 - RNA, 20 nt, Human
ugaccuacuacaauuuccuc

SEQ ID NO: 168163 - RNA, 19 nt, Human
ugacgauguguacucuuug

SEQ ID NO: 168164 - RNA, 19 nt, Human
ugagaacaaagcaccaaca

SEQ ID NO: 168165 - RNA, 24 nt, Human
ugagaacaaagcaccaacaaaacg

SEQ ID NO: 168166 - RNA, 27 nt, Human
ugagacuguaaacauaaagcucaacca

SEQ ID NO: 168167 - RNA, 22 nt, Human
ugagagugcagagucaucaccu

SEQ ID NO: 168168 - RNA, 19 nt, Human
ugagauggaaucaaucuca

SEQ ID NO: 168169 - RNA, 22 nt, Human
ugaggcuucacccucacaacuc

SEQ ID NO: 168170 - RNA, 19 nt, Human
ugagguggccuccaucuuc

SEQ ID NO: 168171 - RNA, 23 nt, Human
ugagugcccauuuuaccugugag

SEQ ID NO: 168172 - RNA, 18 nt, Human
ugauacaaaucacagagc

SEQ ID NO: 168173 - RNA, 23 nt, Human
ugcaaaggaggcagaggugugaa

SEQ ID NO: 168174 - RNA, 18 nt, Human
ugcacaccuacgacacgc

SEQ ID NO: 168175 - RNA, 21 nt, Human
ugcagaagaugcacaggacca

SEQ ID NO: 168176 - RNA, 21 nt, Human
ugcauuucucaggagccuguc

SEQ ID NO: 168177 - RNA, 20 nt, Human
ugccacaaugguccagcgac

SEQ ID NO: 168178 - RNA, 18 nt, Human
ugcccaggcuugcaagag

SEQ ID NO: 168179 - RNA, 22 nt, Human
ugccugcaaccacuccacuugc

SEQ ID NO: 168180 - RNA, 25 nt, Human
ugcgcgcacacacacacacacacac

SEQ ID NO: 168181 - RNA, 23 nt, Human
ugcuaaaagaaaaaaaaugacua

SEQ ID NO: 168182 - RNA, 20 nt, Human
uggaaaacaacaaaaccaca

SEQ ID NO: 168183 - RNA, 24 nt, Human
uggaaaacaacaaaaccacauuaa

SEQ ID NO: 168184 - RNA, 18 nt, Human
uggaaagagaauuaauac

SEQ ID NO: 168185 - RNA, 20 nt, Human
uggaaagagaauuaauacuu

SEQ ID NO: 168186 - RNA, 18 nt, Human
uggacacuuuccagaccu

SEQ ID NO: 168187 - RNA, 24 nt, Human
uggaugugggauuucaagaagaau

SEQ ID NO: 168188 - RNA, 18 nt, Human
ugggaaagauaugcuaga

SEQ ID NO: 168189 - RNA, 22 nt, Human
ugggagggagcauaggccaggc

SEQ ID NO: 168190 - RNA, 19 nt, Human
ugggcaaaaggggagaauu

SEQ ID NO: 168191 - RNA, 24 nt, Human
uggggcauucuucaggaggcuucc

SEQ ID NO: 168192 - RNA, 19 nt, Human
uggggugcccuuggggaaa

SEQ ID NO: 168193 - RNA, 20 nt, Human
uggguagugugggcuuaaaa

SEQ ID NO: 168194 - RNA, 25 nt, Human
ugggucuuuucauuuccuuacaugg

SEQ ID NO: 168195 - RNA, 19 nt, Human
uggugacgggggugcucag

SEQ ID NO: 168196 - RNA, 19 nt, Human
ugguuacagaaacaucuga

SEQ ID NO: 168197 - RNA, 18 nt, Human
ugguucagaagacuaauu

SEQ ID NO: 168198 - RNA, 23 nt, Human
ugguuggagcuugggugacaagu

SEQ ID NO: 168199 - RNA, 23 nt, Human
uguaaacauaaagcucaaccaca

SEQ ID NO: 168200 - RNA, 18 nt, Human
ugucuaguuucuggaugu

SEQ ID NO: 168201 - RNA, 24 nt, Human
ugucuccaaauuaggugaaugguu

SEQ ID NO: 168202 - RNA, 22 nt, Human
ugucugguguggugacgggggu

SEQ ID NO: 168203 - RNA, 19 nt, Human
ugucuguguguguccacau

SEQ ID NO: 168204 - RNA, 18 nt, Human
ugugaaagggcccaauga

SEQ ID NO: 168205 - RNA, 19 nt, Human
ugugaaggugggagaauua

SEQ ID NO: 168206 - RNA, 22 nt, Human
ugugaaggugggagaauuacug

SEQ ID NO: 168207 - RNA, 23 nt, Human
ugugaguguguguguguguguaa

SEQ ID NO: 168208 - RNA, 19 nt, Human
ugugcugcagacuuggcac

SEQ ID NO: 168209 - RNA, 25 nt, Human
uguggugacgggggugcucagaguc

SEQ ID NO: 168210 - RNA, 22 nt, Human
ugugguuuagguugaacuuaca

SEQ ID NO: 168211 - RNA, 22 nt, Human
uguguaagggugaguuugugug

SEQ ID NO: 168212 - RNA, 22 nt, Human
uguguccacaugaacacauaua

SEQ ID NO: 168213 - RNA, 21 nt, Human
ugugugagugugugugugugu

SEQ ID NO: 168214 - RNA, 22 nt, Human
ugugugagugugugugugugug

SEQ ID NO: 168215 - RNA, 21 nt, Human
ugugugugugagugugugugu

SEQ ID NO: 168216 - RNA, 21 nt, Human
ugugugugugagugugugugu

SEQ ID NO: 168217 - RNA, 21 nt, Human
ugugugugugagugugugugu

SEQ ID NO: 168218 - RNA, 20 nt, Human
ugugugugugugagugugug

SEQ ID NO: 168219 - RNA, 25 nt, Human
ugugugugugugagugugugugugu

SEQ ID NO: 168220 - RNA, 21 nt, Human
ugugugugugugucugugugu

SEQ ID NO: 168221 - RNA, 21 nt, Human
ugugugugugugucugugugu

SEQ ID NO: 168222 - RNA, 22 nt, Human
ugugugugugugucugugugug

SEQ ID NO: 168223 - RNA, 20 nt, Human
uguugagaaguaugugaggc

SEQ ID NO: 168224 - RNA, 33 nt, Human
uguugcacaugcagggacacacacacgcacggu

SEQ ID NO: 168225 - RNA, 21 nt, Human
uguuggaaaacaacaaaacca

SEQ ID NO: 168226 - RNA, 21 nt, Human
uguuuggaugcauaaguguug

SEQ ID NO: 168227 - RNA, 26 nt, Human
uuaaacucaaagaugaccagagcaca

SEQ ID NO: 168228 - RNA, 21 nt, Human
uuaccaacuguguaaauguug

SEQ ID NO: 168229 - RNA, 22 nt, Human
uuauacacauaaagcacaugaa

SEQ ID NO: 168230 - RNA, 21 nt, Human
uuauauacuuuaguuuaugcc

SEQ ID NO: 168231 - RNA, 20 nt, Human
uuaucaaagacaacacuacc

SEQ ID NO: 168232 - RNA, 18 nt, Human
uucaaaguaauccuaccu

SEQ ID NO: 168233 - RNA, 22 nt, Human
uucauaaacacugcagaaccac

SEQ ID NO: 168234 - RNA, 22 nt, Human
uuccaaccucaaacuccaacuu

SEQ ID NO: 168235 - RNA, 19 nt, Human
uucuauucucagcgagcug

SEQ ID NO: 168236 - RNA, 18 nt, Human
uucucggcggcccccggc

SEQ ID NO: 168237 - RNA, 24 nt, Human
uucuucaggaggcuucccacagcu

SEQ ID NO: 168238 - RNA, 21 nt, Human
uuggaguacaacuuccacagc

SEQ ID NO: 168239 - RNA, 23 nt, Human
uuggagucuacuaacacuaaaga

SEQ ID NO: 168240 - RNA, 23 nt, Human
uuggaugcauaaguguuguugcu

SEQ ID NO: 168241 - RNA, 25 nt, Human
uugguagcuuaaaaucaucuaaagu

SEQ ID NO: 168242 - RNA, 25 nt, Human
uuguugcauuucucaggagccuguc

SEQ ID NO: 168243 - RNA, 21 nt, Human
uuguugcugagacuguaaaca

SEQ ID NO: 168244 - RNA, 21 nt, Human
uuuacaacauguugggauuau

SEQ ID NO: 168245 - RNA, 20 nt, Human
uuuauacacauaaagcacau

SEQ ID NO: 168246 - RNA, 20 nt, Human
uuucaaaguaauccuaccua

SEQ ID NO: 168247 - RNA, 26 nt, Human
uuucaagaagggaaagcuaaaauccc

SEQ ID NO: 168248 - RNA, 23 nt, Human
uuugugugugugugucugugugu

SEQ ID NO: 168249 - RNA, 24 nt, Human
uuuuaccagcacaccacugguugc

SEQ ID NO: 168250 - RNA, 21 nt, Human
uuuuccaaccucaaacuccaa

SEQ ID NO: 168251 - RNA, 20 nt, Human
uuuuuugaagagguuuuuuu

SEQ ID NO: 168252 - RNA, 18 nt, Human
aaaaaagaaaccaucaga

SEQ ID NO: 168253 - RNA, 22 nt, Human
aaaaucccuucuaaugccuccc

SEQ ID NO: 168254 - RNA, 21 nt, Human
aaaaucccuucuaaugccuuu

SEQ ID NO: 168255 - RNA, 22 nt, Human
aaacaaauauaguaaaugcuau

SEQ ID NO: 168256 - RNA, 21 nt, Human
aaagcugggaaaaaaagaaac

SEQ ID NO: 168257 - RNA, 22 nt, Human
aagaaagaaagaagaacucuaa

SEQ ID NO: 168258 - RNA, 23 nt, Human
aagaaagaaagaagaacucuaag

SEQ ID NO: 168259 - RNA, 19 nt, Human
aagcuuuggcacauacagu

SEQ ID NO: 168260 - RNA, 19 nt, Human
aauaacagguaagagaaag

SEQ ID NO: 168261 - RNA, 20 nt, Human
acaggcaaugugcagcccuc

SEQ ID NO: 168262 - RNA, 21 nt, Human
acaguaguaaagcuuuggcac

SEQ ID NO: 168263 - RNA, 23 nt, Human
agaagggaugcagaggaccagag

SEQ ID NO: 168264 - RNA, 21 nt, Human
agaguuguuggcucaaaagcu

SEQ ID NO: 168265 - RNA, 19 nt, Human
agcaaagggcuuaagaaag

SEQ ID NO: 168266 - RNA, 18 nt, Human
agcugggaaaaaaagaaa

SEQ ID NO: 168267 - RNA, 21 nt, Human
aggguggggaaggggacgggu

SEQ ID NO: 168268 - RNA, 22 nt, Human
aucauuuggaaaaagugaguac

SEQ ID NO: 168269 - RNA, 18 nt, Human
aucccuucuaaugccucc

SEQ ID NO: 168270 - RNA, 20 nt, Human
ccccucuucccgcucgcgcc

SEQ ID NO: 168271 - RNA, 19 nt, Human
ccccugugcagcacagccg

SEQ ID NO: 168272 - RNA, 21 nt, Human
ccgcucgcgccugggguuccc

SEQ ID NO: 168273 - RNA, 22 nt, Human
ccucccccugugcagcacagcc

SEQ ID NO: 168274 - RNA, 19 nt, Human
ccucccggggguugucgcc

SEQ ID NO: 168275 - RNA, 22 nt, Human
ccugggguucccucuccucccc

SEQ ID NO: 168276 - RNA, 18 nt, Human
ccugugcagcacagccgg

SEQ ID NO: 168277 - RNA, 24 nt, Human
cuccucccccugugcagcacagcc

SEQ ID NO: 168278 - RNA, 25 nt, Human
cugcauaugcuuuccuauugauccc

SEQ ID NO: 168279 - RNA, 18 nt, Human
gaaggugggggccagagg

SEQ ID NO: 168280 - RNA, 24 nt, Human
gagcaaagggcuuaagaaagaaaa

SEQ ID NO: 168281 - RNA, 19 nt, Human
gcacagccggcgcgggcgu

SEQ ID NO: 168282 - RNA, 24 nt, Human
gcagaacaggcaaugugcagcccu

SEQ ID NO: 168283 - RNA, 19 nt, Human
gcucgcgccugggguuccc

SEQ ID NO: 168284 - RNA, 19 nt, Human
ggaaaaaucccuucuaaug

SEQ ID NO: 168285 - RNA, 19 nt, Human
ggaaggggacggguggagg

SEQ ID NO: 168286 - RNA, 21 nt, Human
ggguggagggacagaagggau

SEQ ID NO: 168287 - RNA, 22 nt, Human
guccccucuucccgcucgcgcc

SEQ ID NO: 168288 - RNA, 19 nt, Human
gugggggccagaggguggg

SEQ ID NO: 168289 - RNA, 23 nt, Human
uaagugaaagcagaaguguuugg

SEQ ID NO: 168290 - RNA, 19 nt, Human
uaguaaaugcuauaggaau

SEQ ID NO: 168291 - RNA, 25 nt, Human
uauaaaaaauaaucacccaccauaa

SEQ ID NO: 168292 - RNA, 24 nt, Human
uauaccaaauuccucuuaucaacu

SEQ ID NO: 168293 - RNA, 20 nt, Human
uauaggaauaguuaaucaga

SEQ ID NO: 168294 - RNA, 22 nt, Human
uccagagcaaagggcuuaagaa

SEQ ID NO: 168295 - RNA, 19 nt, Human
ucccggggguugucgccuc

SEQ ID NO: 168296 - RNA, 23 nt, Human
uccguauaaaaauacugggaaaa

SEQ ID NO: 168297 - RNA, 21 nt, Human
uccuauugaucccaaaccaaa

SEQ ID NO: 168298 - RNA, 19 nt, Human
uccucccccugugcagcac

SEQ ID NO: 168299 - RNA, 21 nt, Human
ucuaagcugggucugcuaaca

SEQ ID NO: 168300 - RNA, 28 nt, Human
ucuaaugccucccgggggucgaggacuc

SEQ ID NO: 168301 - RNA, 18 nt, Human
ucugcuaacaucacucca

SEQ ID NO: 168302 - RNA, 23 nt, Human
ugaguugagcugaagcuggagaa

SEQ ID NO: 168303 - RNA, 19 nt, Human
ugcuuggagaagcugugag

SEQ ID NO: 168304 - RNA, 19 nt, Human
uggaaaaagugaguacugu

SEQ ID NO: 168305 - RNA, 18 nt, Human
uucccucuccucccccug

SEQ ID NO: 168306 - RNA, 18 nt, Human
uugauaaauaacagguaa

SEQ ID NO: 168307 - RNA, 24 nt, Human
uugaucccaaaccaaaucuuagaa

SEQ ID NO: 168308 - RNA, 21 nt, Human
uuguggcugcagguccccucu

SEQ ID NO: 168309 - RNA, 23 nt, Human
uuuuuuuuuuuuuuuuuuuucag

SEQ ID NO: 168310 - RNA, 21 nt, Human
aaaaauaggucccuaaccccc

SEQ ID NO: 168311 - RNA, 20 nt, Human
aaccagacaccuuggaaggu

SEQ ID NO: 168312 - RNA, 20 nt, Human
aauaaauucucccuccccuc

SEQ ID NO: 168313 - RNA, 23 nt, Human
acguccugcgcccgccgcugucu

SEQ ID NO: 168314 - RNA, 29 nt, Human
agaggugauucaccgccccccaccccccu

SEQ ID NO: 168315 - RNA, 20 nt, Human
agccagaggcagggcaacca

SEQ ID NO: 168316 - RNA, 22 nt, Human
caccuuggaagguuccccugaa

SEQ ID NO: 168317 - RNA, 23 nt, Human
cagcgugaggcucccuuucuguu

SEQ ID NO: 168318 - RNA, 19 nt, Human
cagggcaaccagacaccuu

SEQ ID NO: 168319 - RNA, 21 nt, Human
ccaaaauaaauaucuccuccc

SEQ ID NO: 168320 - RNA, 19 nt, Human
ccagccccuaguguuaaaa

SEQ ID NO: 168321 - RNA, 23 nt, Human
cccccaagucagccuggccccca

SEQ ID NO: 168322 - RNA, 19 nt, Human
ccccuccaaacucucccca

SEQ ID NO: 168323 - RNA, 21 nt, Human
ccccugaacccugggcccagg

SEQ ID NO: 168324 - RNA, 21 nt, Human
cccgugguggaauuucaggac

SEQ ID NO: 168325 - RNA, 25 nt, Human
cccuccccuccaaacucuccccaaa

SEQ ID NO: 168326 - RNA, 27 nt, Human
cccugaacccugggcccaggccucaga

SEQ ID NO: 168327 - RNA, 20 nt, Human
ccgccgcugucugcgcccgg

SEQ ID NO: 168328 - RNA, 24 nt, Human
ccgugguggaauuucaggacaucu

SEQ ID NO: 168329 - RNA, 24 nt, Human
ccuaaggaaggagggcaccccccu

SEQ ID NO: 168330 - RNA, 24 nt, Human
ccuccaaacucuccccaaaauaaa

SEQ ID NO: 168331 - RNA, 23 nt, Human
ccuuucuguucuggagccagagg

SEQ ID NO: 168332 - RNA, 23 nt, Human
cuccccuccaaacucuccccaaa

SEQ ID NO: 168333 - RNA, 22 nt, Human
cugggcccaggccucagaggug

SEQ ID NO: 168334 - RNA, 20 nt, Human
cuguucuggagccagaggca

SEQ ID NO: 168335 - RNA, 22 nt, Human
gcaccccccuccccugugcaaa

SEQ ID NO: 168336 - RNA, 24 nt, Human
gggcaccccccuccccugugcaaa

SEQ ID NO: 168337 - RNA, 18 nt, Human
ggggaguugggggggucu

SEQ ID NO: 168338 - RNA, 23 nt, Human
uaaaaauaggucccuaacccccc

SEQ ID NO: 168339 - RNA, 21 nt, Human
uaaccccccagggugaccccc

SEQ ID NO: 168340 - RNA, 26 nt, Human
uagaauggaugaaugaaugaugagug

SEQ ID NO: 168341 - RNA, 19 nt, Human
uaggucccuaaccccccag

SEQ ID NO: 168342 - RNA, 23 nt, Human
uccccgcuuuggggaguuggggg

SEQ ID NO: 168343 - RNA, 25 nt, Human
uccugcgcccgccgcugucugcgcc

SEQ ID NO: 168344 - RNA, 20 nt, Human
ugaacccugggcccaggccu

SEQ ID NO: 168345 - RNA, 22 nt, Human
ugaaugaaugaugagugggcca

SEQ ID NO: 168346 - RNA, 20 nt, Human
ugagugaguggggccuagug

SEQ ID NO: 168347 - RNA, 21 nt, Human
uggaggagcuuggcucccgcc

SEQ ID NO: 168348 - RNA, 23 nt, Human
ugggaggcagagacuggcucuag

SEQ ID NO: 168349 - RNA, 18 nt, Human
ugucaagucugcccccca

SEQ ID NO: 168350 - RNA, 19 nt, Human
ugugugagccagcgugagg

SEQ ID NO: 168351 - RNA, 28 nt, Human
uuaauaaauucucccuccccuccaaacu

SEQ ID NO: 168352 - RNA, 21 nt, Human
uuuuuuuuuuuuuuuuuaaag

SEQ ID NO: 168353 - RNA, 22 nt, Human
acauccauuacauacaagugac

SEQ ID NO: 168354 - RNA, 22 nt, Human
acauuacuuagagcuagucuga

SEQ ID NO: 168355 - RNA, 23 nt, Human
acuuuuucuuccuccucccaucc

SEQ ID NO: 168356 - RNA, 18 nt, Human
agcagcagcacccaagga

SEQ ID NO: 168357 - RNA, 21 nt, Human
agugauagcaagauaauguga

SEQ ID NO: 168358 - RNA, 19 nt, Human
auggaacgacuguauuccc

SEQ ID NO: 168359 - RNA, 20 nt, Human
caaacuucggcuaccucaca

SEQ ID NO: 168360 - RNA, 18 nt, Human
caccacaggcaaagggaa

SEQ ID NO: 168361 - RNA, 19 nt, Human
cagcagcacccaaggagca

SEQ ID NO: 168362 - RNA, 25 nt, Human
cauacaagugaccugcaguuauuac

SEQ ID NO: 168363 - RNA, 25 nt, Human
cccugcuuacugaaccaaacuucuu

SEQ ID NO: 168364 - RNA, 19 nt, Human
ccugcaguuauuacugcua

SEQ ID NO: 168365 - RNA, 21 nt, Human
cugaaccaaacuucggcuacc

SEQ ID NO: 168366 - RNA, 22 nt, Human
cuuuuucuuccuccucccaucc

SEQ ID NO: 168367 - RNA, 22 nt, Human
gaaucacauuacuuagagcuag

SEQ ID NO: 168368 - RNA, 22 nt, Human
gacuuuuucuuccuccucccau

SEQ ID NO: 168369 - RNA, 21 nt, Human
ggacuuuuucuuccuccuccc

SEQ ID NO: 168370 - RNA, 22 nt, Human
gugagugugcagaccagcucug

SEQ ID NO: 168371 - RNA, 21 nt, Human
gugcagaccagcucugaugga

SEQ ID NO: 168372 - RNA, 20 nt, Human
guucuuuuggcauuaguuga

SEQ ID NO: 168373 - RNA, 20 nt, Human
uacaccacaggcaaagggaa

SEQ ID NO: 168374 - RNA, 24 nt, Human
uauuacaaaaccguucuuuuggca

SEQ ID NO: 168375 - RNA, 21 nt, Human
uauuacugcuacaaaucuuga

SEQ ID NO: 168376 - RNA, 23 nt, Human
ugggacuuuuucuuccuccuccc

SEQ ID NO: 168377 - RNA, 19 nt, Human
uuagauuauauguugauaa

SEQ ID NO: 168378 - RNA, 20 nt, Human
uuuucuuccuccucccaucc

SEQ ID NO: 168379 - RNA, 21 nt, Human
aaagagcugccgggacccagg

SEQ ID NO: 168380 - RNA, 21 nt, Human
aaaguaccaagagaaccacag

SEQ ID NO: 168381 - RNA, 26 nt, Human
aagcaaaagggaauuagaggggaccc

SEQ ID NO: 168382 - RNA, 18 nt, Human
aagcagacuuauuccacc

SEQ ID NO: 168383 - RNA, 22 nt, Human
accccacgcugccaccaccagc

SEQ ID NO: 168384 - RNA, 25 nt, Human
acuccacugacugagaaagggcuca

SEQ ID NO: 168385 - RNA, 26 nt, Human
agaaaagacaacacagucuuggagga

SEQ ID NO: 168386 - RNA, 21 nt, Human
agaaaguaccaagagaaccag

SEQ ID NO: 168387 - RNA, 21 nt, Human
agaagggccucggccugcagg

SEQ ID NO: 168388 - RNA, 21 nt, Human
agcaaauggccagguuuuucu

SEQ ID NO: 168389 - RNA, 20 nt, Human
aggcagaggcaccuccuggu

SEQ ID NO: 168390 - RNA, 18 nt, Human
aggcaggugggcacugga

SEQ ID NO: 168391 - RNA, 19 nt, Human
aggucuaagucaccacacc

SEQ ID NO: 168392 - RNA, 20 nt, Human
augcaaggcucaguucucca

SEQ ID NO: 168393 - RNA, 21 nt, Human
caaagcaaaagggaauuagag

SEQ ID NO: 168394 - RNA, 22 nt, Human
caaagcaaaagggaauuagagg

SEQ ID NO: 168395 - RNA, 18 nt, Human
caaagcccagccuuggca

SEQ ID NO: 168396 - RNA, 22 nt, Human
caagaaaguaccaagagaacca

SEQ ID NO: 168397 - RNA, 20 nt, Human
caagagaaccacagcuccac

SEQ ID NO: 168398 - RNA, 24 nt, Human
caccacaccuggggcugaagcaag

SEQ ID NO: 168399 - RNA, 18 nt, Human
cacgcugccaccaccagc

SEQ ID NO: 168400 - RNA, 22 nt, Human
ccacugaggcuaaggcuugugu

SEQ ID NO: 168401 - RNA, 20 nt, Human
cccaaagcccagccuuggca

SEQ ID NO: 168402 - RNA, 22 nt, Human
cccaacuugauacuccacugac

SEQ ID NO: 168403 - RNA, 20 nt, Human
ccccacgcugccaccaccag

SEQ ID NO: 168404 - RNA, 18 nt, Human
ccuccagcucuuuucccu

SEQ ID NO: 168405 - RNA, 19 nt, Human
ccuuaguagcagccagugu

SEQ ID NO: 168406 - RNA, 23 nt, Human
cgagaggcagaggcaccuccugg

SEQ ID NO: 168407 - RNA, 19 nt, Human
cggccugcaggcacugccu

SEQ ID NO: 168408 - RNA, 22 nt, Human
cguccuggcuggagagcuggug

SEQ ID NO: 168409 - RNA, 18 nt, Human
cuccacugaggcuaaggc

SEQ ID NO: 168410 - RNA, 19 nt, Human
cugcuuccuccuggcaugc

SEQ ID NO: 168411 - RNA, 18 nt, Human
cuggaugccguaauacuc

SEQ ID NO: 168412 - RNA, 21 nt, Human
cuuggugggacccaaagccca

SEQ ID NO: 168413 - RNA, 22 nt, Human
cuuggugggacccaaagcccag

SEQ ID NO: 168414 - RNA, 24 nt, Human
gaaaagacaacacagucuuggagg

SEQ ID NO: 168415 - RNA, 22 nt, Human
gaagcaagucuugccugugcac

SEQ ID NO: 168416 - RNA, 19 nt, Human
gaauuuuuaaaaccagcca

SEQ ID NO: 168417 - RNA, 20 nt, Human
gagaacucaucuugguggga

SEQ ID NO: 168418 - RNA, 21 nt, Human
gaggagggacugcuuccuccu

SEQ ID NO: 168419 - RNA, 20 nt, Human
gaggcaggugggcacuggag

SEQ ID NO: 168420 - RNA, 20 nt, Human
gaucuuucucuccccaccuc

SEQ ID NO: 168421 - RNA, 22 nt, Human
gcaaagcaaaagggaauuagag

SEQ ID NO: 168422 - RNA, 23 nt, Human
gcaaagcaaaagggaauuagagg

SEQ ID NO: 168423 - RNA, 24 nt, Human
gcaaagcaaaagggaauuagaggc

SEQ ID NO: 168424 - RNA, 23 nt, Human
gcacgcugggcggcaccccacgc

SEQ ID NO: 168425 - RNA, 22 nt, Human
gcacuggagggcuguuuccucu

SEQ ID NO: 168426 - RNA, 22 nt, Human
ggagaucuuucucuccccaccu

SEQ ID NO: 168427 - RNA, 21 nt, Human
gggcuuggagucugguggaag

SEQ ID NO: 168428 - RNA, 18 nt, Human
gucagcaguggcucugga

SEQ ID NO: 168429 - RNA, 21 nt, Human
uaaguuaaggugaaagacuua

SEQ ID NO: 168430 - RNA, 21 nt, Human
uaccaagagaaccacagcucc

SEQ ID NO: 168431 - RNA, 22 nt, Human
uacucuuggugagaaaagacaa

SEQ ID NO: 168432 - RNA, 23 nt, Human
uacucuuggugagaaaagacaac

SEQ ID NO: 168433 - RNA, 21 nt, Human
uagcacagaaugcaguaugua

SEQ ID NO: 168434 - RNA, 21 nt, Human
uagggaggagugaggcaggug

SEQ ID NO: 168435 - RNA, 23 nt, Human
ucaugcugcaucucugagcuccu

SEQ ID NO: 168436 - RNA, 18 nt, Human
uccuaggucuaagucacc

SEQ ID NO: 168437 - RNA, 22 nt, Human
uccucuggcacaguugaacuag

SEQ ID NO: 168438 - RNA, 24 nt, Human
ucgagaggcagaggcaccuccugg

SEQ ID NO: 168439 - RNA, 22 nt, Human
ucuaagucaccacaccuggggc

SEQ ID NO: 168440 - RNA, 21 nt, Human
ucuagcacuugauuuuauucc

SEQ ID NO: 168441 - RNA, 20 nt, Human
ucucugugugaucguccugg

SEQ ID NO: 168442 - RNA, 18 nt, Human
ucugagcuccugucugcc

SEQ ID NO: 168443 - RNA, 23 nt, Human
ucugugugaucguccuggcugga

SEQ ID NO: 168444 - RNA, 22 nt, Human
ugacaagaaaguaccaagagaa

SEQ ID NO: 168445 - RNA, 24 nt, Human
ugagaaagggcucaaugugcagca

SEQ ID NO: 168446 - RNA, 24 nt, Human
ugagcuccugucugcccgcagccc

SEQ ID NO: 168447 - RNA, 24 nt, Human
ugaggagggacugcuuccuccugg

SEQ ID NO: 168448 - RNA, 25 nt, Human
ugaggagggacugcuuccuccuggc

SEQ ID NO: 168449 - RNA, 21 nt, Human
ugaggccaucagaggggguuu

SEQ ID NO: 168450 - RNA, 24 nt, Human
ugaggccaucagaggggguuuuca

SEQ ID NO: 168451 - RNA, 27 nt, Human
ugaggcuaaggcuugugucauguacca

SEQ ID NO: 168452 - RNA, 23 nt, Human
ugauagauuuuugguuugacagg

SEQ ID NO: 168453 - RNA, 25 nt, Human
ugcacuguucaccaaccacaccacg

SEQ ID NO: 168454 - RNA, 23 nt, Human
ugcaucucugagcuccugucugc

SEQ ID NO: 168455 - RNA, 21 nt, Human
uggaaagaauuuuuaaaacca

SEQ ID NO: 168456 - RNA, 18 nt, Human
uggaggagagugggcuug

SEQ ID NO: 168457 - RNA, 19 nt, Human
uggcaugaagcagacuuau

SEQ ID NO: 168458 - RNA, 20 nt, Human
uggcuggagagcuggugagg

SEQ ID NO: 168459 - RNA, 23 nt, Human
uguggaaagaauuuuuaaaacca

SEQ ID NO: 168460 - RNA, 26 nt, Human
uucccuuacaaaugaccagggugcaa

SEQ ID NO: 168461 - RNA, 20 nt, Human
uuccugugagccuagagugg

SEQ ID NO: 168462 - RNA, 21 nt, Human
uuuuuuuuuuuuuuuuuuugg

SEQ ID NO: 168463 - RNA, 24 nt, Human
acaagaaaaaaauugccaucuuca

SEQ ID NO: 168464 - RNA, 24 nt, Human
agacagagcugcaucagcgaaaga

SEQ ID NO: 168465 - RNA, 24 nt, Human
agguuuaaaaauugagacagagcu

SEQ ID NO: 168466 - RNA, 24 nt, Human
caaaugacuuuaauauaaaguuuu

SEQ ID NO: 168467 - RNA, 20 nt, Human
caaaugcaaagccuagugac

SEQ ID NO: 168468 - RNA, 21 nt, Human
cagccauaaugaauuaucucc

SEQ ID NO: 168469 - RNA, 20 nt, Human
cauauacaugcauaguaaca

SEQ ID NO: 168470 - RNA, 21 nt, Human
cuauacaagaaaaaaauugcc

SEQ ID NO: 168471 - RNA, 25 nt, Human
cuuauuuuuuuuucuggacugguua

SEQ ID NO: 168472 - RNA, 21 nt, Human
gaagcuauuucuaaaaugcuu

SEQ ID NO: 168473 - RNA, 19 nt, Human
gcuacuauacagugcaaac

SEQ ID NO: 168474 - RNA, 18 nt, Human
uaaagugcaaacagagcc

SEQ ID NO: 168475 - RNA, 24 nt, Human
uaaauagaucuuauauaugaauuu

SEQ ID NO: 168476 - RNA, 20 nt, Human
uaacauaaccacagcuauga

SEQ ID NO: 168477 - RNA, 24 nt, Human
uaacauacagguucaggauuaaga

SEQ ID NO: 168478 - RNA, 22 nt, Human
uaacauuacaaaugacuuuaau

SEQ ID NO: 168479 - RNA, 24 nt, Human
uaaugaauuaucuccugauugccc

SEQ ID NO: 168480 - RNA, 19 nt, Human
uacuauacagugcaaacca

SEQ ID NO: 168481 - RNA, 23 nt, Human
uauacaagaaaaaaauugccauc

SEQ ID NO: 168482 - RNA, 21 nt, Human
uccauccauauacaugcauag

SEQ ID NO: 168483 - RNA, 19 nt, Human
ugagacagagcugcaucag

SEQ ID NO: 168484 - RNA, 25 nt, Human
ugcaaacagagccugauuauccaag

SEQ ID NO: 168485 - RNA, 19 nt, Human
uggcaccaauaauacacuu

SEQ ID NO: 168486 - RNA, 21 nt, Human
uguauuuagaacaucuuugca

SEQ ID NO: 168487 - RNA, 22 nt, Human
uuaaauagaucuuauauaugaa

SEQ ID NO: 168488 - RNA, 24 nt, Human
uuuagacugugccuuucaaaagau

SEQ ID NO: 168489 - RNA, 19 nt, Human
agccggccucccgggaccc

SEQ ID NO: 168490 - RNA, 18 nt, Human
aggagaaggaaauccggc

SEQ ID NO: 168491 - RNA, 19 nt, Human
cagcaguguuucuagagug

SEQ ID NO: 168492 - RNA, 22 nt, Human
ccaaccaccacggcgggguaaa

SEQ ID NO: 168493 - RNA, 23 nt, Human
ccaggagaaggaaauccggcccc

SEQ ID NO: 168494 - RNA, 21 nt, Human
cucccgggacccgcgccugug

SEQ ID NO: 168495 - RNA, 18 nt, Human
cucucucaaucucacuaa

SEQ ID NO: 168496 - RNA, 19 nt, Human
gcgcccuccaaccaccacg

SEQ ID NO: 168497 - RNA, 18 nt, Human
uacugcgcgcccuccaac

SEQ ID NO: 168498 - RNA, 19 nt, Human
ucuagagugcacugaacca

SEQ ID NO: 168499 - RNA, 18 nt, Human
ugugcugcugcucuacug

SEQ ID NO: 168500 - RNA, 24 nt, Human
aagaaagagcuguggucaguggca

SEQ ID NO: 168501 - RNA, 19 nt, Human
accccagcccucacuccac

SEQ ID NO: 168502 - RNA, 23 nt, Human
agacaggcagggagugggaaugg

SEQ ID NO: 168503 - RNA, 21 nt, Human
agagaagcaaacuaucuugag

SEQ ID NO: 168504 - RNA, 19 nt, Human
agagcuguggucaguggca

SEQ ID NO: 168505 - RNA, 21 nt, Human
agcccaggaguggagccuggg

SEQ ID NO: 168506 - RNA, 19 nt, Human
aggcagggagugggaaugg

SEQ ID NO: 168507 - RNA, 23 nt, Human
agggagugggaauggagcccagg

SEQ ID NO: 168508 - RNA, 21 nt, Human
auggagcccaggaguggagcc

SEQ ID NO: 168509 - RNA, 22 nt, Human
auggagcccaggaguggagccu

SEQ ID NO: 168510 - RNA, 23 nt, Human
auggagcccaggaguggagccug

SEQ ID NO: 168511 - RNA, 19 nt, Human
cagcacagaugagggccau

SEQ ID NO: 168512 - RNA, 23 nt, Human
cccagcccucacuccaccuucuc

SEQ ID NO: 168513 - RNA, 22 nt, Human
ccccagcccucacuccaccuuc

SEQ ID NO: 168514 - RNA, 23 nt, Human
cccgaccccagcccucacuccac

SEQ ID NO: 168515 - RNA, 20 nt, Human
cccugaagaaagagcugugg

SEQ ID NO: 168516 - RNA, 20 nt, Human
cccuugccuuauuccagggg

SEQ ID NO: 168517 - RNA, 20 nt, Human
ccucacuccaccuucuccuu

SEQ ID NO: 168518 - RNA, 21 nt, Human
ccucacuccaccuucuccuug

SEQ ID NO: 168519 - RNA, 25 nt, Human
ccucacuccaccuucuccuuggccu

SEQ ID NO: 168520 - RNA, 18 nt, Human
ccugggagaggagguggc

SEQ ID NO: 168521 - RNA, 22 nt, Human
cgucuggcucaggcuucugcuc

SEQ ID NO: 168522 - RNA, 22 nt, Human
cgucuggcucaggcuucugcuc

SEQ ID NO: 168523 - RNA, 18 nt, Human
cucugcucuacacucccc

SEQ ID NO: 168524 - RNA, 18 nt, Human
cucugcucuacacucccc

SEQ ID NO: 168525 - RNA, 20 nt, Human
cuguacucucagggaauacc

SEQ ID NO: 168526 - RNA, 20 nt, Human
gaaggccacucagcaguuaa

SEQ ID NO: 168527 - RNA, 18 nt, Human
gacagcugugguuuagug

SEQ ID NO: 168528 - RNA, 18 nt, Human
gaccacccaaguucaggc

SEQ ID NO: 168529 - RNA, 19 nt, Human
gaccauggagcaggaacca

SEQ ID NO: 168530 - RNA, 19 nt, Human
gaccccagcccucacucca

SEQ ID NO: 168531 - RNA, 24 nt, Human
ggagacaggcagggagugggaaug

SEQ ID NO: 168532 - RNA, 25 nt, Human
ggagcccaggaguggagccugggau

SEQ ID NO: 168533 - RNA, 24 nt, Human
ggagcuguggggcugaacagggca

SEQ ID NO: 168534 - RNA, 22 nt, Human
ucagcacagaugagggccaugc

SEQ ID NO: 168535 - RNA, 23 nt, Human
ucaguuccugcgggaacaaaccc

SEQ ID NO: 168536 - RNA, 18 nt, Human
ucaguuccugggagagga

SEQ ID NO: 168537 - RNA, 20 nt, Human
ucccgaccccagcccucacu

SEQ ID NO: 168538 - RNA, 20 nt, Human
ucccugggagaggagguggc

SEQ ID NO: 168539 - RNA, 21 nt, Human
ucuguacucucagggaauacc

SEQ ID NO: 168540 - RNA, 22 nt, Human
ucugucccugggagaggaggug

SEQ ID NO: 168541 - RNA, 29 nt, Human
uggagcccaggaguggagccugggauugg

SEQ ID NO: 168542 - RNA, 26 nt, Human
ugggaauggagcccaggaguggagcc

SEQ ID NO: 168543 - RNA, 21 nt, Human
ugggagcuguggggcugaaca

SEQ ID NO: 168544 - RNA, 19 nt, Human
ugggauugggcgaaggcca

SEQ ID NO: 168545 - RNA, 22 nt, Human
ugggugcggccaacacacagug

SEQ ID NO: 168546 - RNA, 23 nt, Human
ugucagaggcccgaccauggagc

SEQ ID NO: 168547 - RNA, 24 nt, Human
ugucagaggcccgaccauggagca

SEQ ID NO: 168548 - RNA, 22 nt, Human
ugucccgaccccagcccucacu

SEQ ID NO: 168549 - RNA, 22 nt, Human
ugugguuuaguggccuaggaga

SEQ ID NO: 168550 - RNA, 22 nt, Human
uucaaccugucccgaccccagc

SEQ ID NO: 168551 - RNA, 19 nt, Human
uuggguucaguuccuggga

SEQ ID NO: 168552 - RNA, 19 nt, Human
uuuccagguaucagaaggu

SEQ ID NO: 168553 - RNA, 18 nt, Human
uuuggccuuugcccccug

SEQ ID NO: 168554 - RNA, 21 nt, Human
aaccuccguugcugcugggag

SEQ ID NO: 168555 - RNA, 20 nt, Human
accauggagcagcaacagac

SEQ ID NO: 168556 - RNA, 23 nt, Human
accuccguugcugcugggagcau

SEQ ID NO: 168557 - RNA, 18 nt, Human
agacugggugacagaggg

SEQ ID NO: 168558 - RNA, 20 nt, Human
agccugguuauccaagcuga

SEQ ID NO: 168559 - RNA, 22 nt, Human
aggcaauagauccaggccccua

SEQ ID NO: 168560 - RNA, 19 nt, Human
caggccccuaggcuguccc

SEQ ID NO: 168561 - RNA, 20 nt, Human
caggcggagcugaaccuccg

SEQ ID NO: 168562 - RNA, 23 nt, Human
cccuaggcuguccccacagccuc

SEQ ID NO: 168563 - RNA, 25 nt, Human
cuaaguaggcaauagauccaggccc

SEQ ID NO: 168564 - RNA, 24 nt, Human
cuguccccacagccucugucuucg

SEQ ID NO: 168565 - RNA, 25 nt, Human
cugucccugcaggcggagcugaacc

SEQ ID NO: 168566 - RNA, 18 nt, Human
gagcagcaacagacuggg

SEQ ID NO: 168567 - RNA, 23 nt, Human
gagcugaaccuccguugcugcug

SEQ ID NO: 168568 - RNA, 19 nt, Human
gagggcagguagucuggga

SEQ ID NO: 168569 - RNA, 20 nt, Human
gcugaaccuccguugcugcu

SEQ ID NO: 168570 - RNA, 25 nt, Human
gcugaaccuccguugcugcugggac

SEQ ID NO: 168571 - RNA, 18 nt, Human
ggagcugagcugagccca

SEQ ID NO: 168572 - RNA, 21 nt, Human
gggagcugagcugagcccagc

SEQ ID NO: 168573 - RNA, 23 nt, Human
guaggcaauagauccaggccccu

SEQ ID NO: 168574 - RNA, 19 nt, Human
ucuaaguaggcaauagauc

SEQ ID NO: 168575 - RNA, 22 nt, Human
ucucuaaguaggcaauagaucc

SEQ ID NO: 168576 - RNA, 23 nt, Human
uuagaaaacagucuguuuauuag

SEQ ID NO: 168577 - RNA, 22 nt, Human
aaaaaaaaaaauggaaccgguc

SEQ ID NO: 168578 - RNA, 22 nt, Human
accuuucaucaugcucuuaaca

SEQ ID NO: 168579 - RNA, 26 nt, Human
agccgcgcuaacggccaacggccgca

SEQ ID NO: 168580 - RNA, 24 nt, Human
caccaauagagagcagacauucca

SEQ ID NO: 168581 - RNA, 19 nt, Human
caggguacgcuccgcgcgc

SEQ ID NO: 168582 - RNA, 20 nt, Human
ccgaagccgcgcuaacggcc

SEQ ID NO: 168583 - RNA, 21 nt, Human
cuguaaugaaacugaguguag

SEQ ID NO: 168584 - RNA, 18 nt, Human
uaaaaaauaucugcagug

SEQ ID NO: 168585 - RNA, 20 nt, Human
uaaaucuuccacacaugggc

SEQ ID NO: 168586 - RNA, 24 nt, Human
uaguaaaaugaaaauuacuuuuaa

SEQ ID NO: 168587 - RNA, 24 nt, Human
ucauggguuccuucccuguaauga

SEQ ID NO: 168588 - RNA, 20 nt, Human
uccaagacaaccgccgaagc

SEQ ID NO: 168589 - RNA, 21 nt, Human
uccaagacaaccgccgaagcc

SEQ ID NO: 168590 - RNA, 21 nt, Human
uccgcgcgcgggcuacgcggc

SEQ ID NO: 168591 - RNA, 23 nt, Human
uccgcgcgcgggcuacgcggccg

SEQ ID NO: 168592 - RNA, 18 nt, Human
uccucuguccuuguuaau

SEQ ID NO: 168593 - RNA, 21 nt, Human
uggguuccuucccuguaauga

SEQ ID NO: 168594 - RNA, 22 nt, Human
uugacaccuuucaucaugcucu

SEQ ID NO: 168595 - RNA, 24 nt, Human
aagagaaaagagacacagacccag

SEQ ID NO: 168596 - RNA, 22 nt, Human
aaguccuugaggcccacagccu

SEQ ID NO: 168597 - RNA, 18 nt, Human
acacagacccaggccugg

SEQ ID NO: 168598 - RNA, 20 nt, Human
agaaaagagacacagaccca

SEQ ID NO: 168599 - RNA, 24 nt, Human
agaacacacuauugccaggaacac

SEQ ID NO: 168600 - RNA, 24 nt, Human
agacacagacccaggccuggcuca

SEQ ID NO: 168601 - RNA, 23 nt, Human
aggggccgaggggcggagacagg

SEQ ID NO: 168602 - RNA, 23 nt, Human
aggugggcgcugugaagcagagc

SEQ ID NO: 168603 - RNA, 22 nt, Human
auaaaauaaaaauauaaauauc

SEQ ID NO: 168604 - RNA, 21 nt, Human
auaagguccucccuaggucua

SEQ ID NO: 168605 - RNA, 19 nt, Human
cacacuauugccaggaaca

SEQ ID NO: 168606 - RNA, 19 nt, Human
caccagcucgggcaguggc

SEQ ID NO: 168607 - RNA, 24 nt, Human
cagaccaccucaacaaugcaugau

SEQ ID NO: 168608 - RNA, 20 nt, Human
cagacccaggccuggcucaa

SEQ ID NO: 168609 - RNA, 21 nt, Human
caguugcucgcugcagaugcg

SEQ ID NO: 168610 - RNA, 19 nt, Human
cauuacaaugaacauugau

SEQ ID NO: 168611 - RNA, 18 nt, Human
ccgcggccgccggcucag

SEQ ID NO: 168612 - RNA, 19 nt, Human
ccggcugccuccccuuccc

SEQ ID NO: 168613 - RNA, 23 nt, Human
cggcugccuccccuucccugccc

SEQ ID NO: 168614 - RNA, 20 nt, Human
cucaagguagaaaaaaauaa

SEQ ID NO: 168615 - RNA, 22 nt, Human
cucaagguagaaaaaaauaaaa

SEQ ID NO: 168616 - RNA, 25 nt, Human
cucaagguagaaaaaaauaaaauaa

SEQ ID NO: 168617 - RNA, 24 nt, Human
cucccuaggucuacaggaacccuc

SEQ ID NO: 168618 - RNA, 18 nt, Human
cugugaagcagagcuggg

SEQ ID NO: 168619 - RNA, 23 nt, Human
gagcacggucacugcucguucgc

SEQ ID NO: 168620 - RNA, 19 nt, Human
gaguccacacauggaugcu

SEQ ID NO: 168621 - RNA, 22 nt, Human
gcaccagguuaauuccaauaau

SEQ ID NO: 168622 - RNA, 19 nt, Human
ggagaaagagaaaagagac

SEQ ID NO: 168623 - RNA, 18 nt, Human
gggccgaggggcggagac

SEQ ID NO: 168624 - RNA, 18 nt, Human
gggugccggcugccuccc

SEQ ID NO: 168625 - RNA, 23 nt, Human
uaaaaauauaaauaucugagaau

SEQ ID NO: 168626 - RNA, 27 nt, Human
uaaaauaaaaauauaaauaucugagaa

SEQ ID NO: 168627 - RNA, 25 nt, Human
uacacacuccaugcguuuugcuaca

SEQ ID NO: 168628 - RNA, 25 nt, Human
ucaaaagaccucaagguagaaaaaa

SEQ ID NO: 168629 - RNA, 28 nt, Human
ucagaacacacuauugccaggaacacag

SEQ ID NO: 168630 - RNA, 21 nt, Human
ucaguugcucgcugcagaugc

SEQ ID NO: 168631 - RNA, 18 nt, Human
uccaauaaugaacccaau

SEQ ID NO: 168632 - RNA, 25 nt, Human
ucgcugcgccgcggccgccggcuca

SEQ ID NO: 168633 - RNA, 18 nt, Human
ucuccggaagagguaagg

SEQ ID NO: 168634 - RNA, 21 nt, Human
ucuuggaacaauaagcaaaca

SEQ ID NO: 168635 - RNA, 20 nt, Human
ugaagaaaaacuacaguaca

SEQ ID NO: 168636 - RNA, 23 nt, Human
ugaagcagagcuggguaggagca

SEQ ID NO: 168637 - RNA, 21 nt, Human
uggaugcuuucaaguccuuga

SEQ ID NO: 168638 - RNA, 26 nt, Human
uggcacuugugggugccggcugccuc

SEQ ID NO: 168639 - RNA, 19 nt, Human
ugggcgcugugaagcagag

SEQ ID NO: 168640 - RNA, 25 nt, Human
ugucagaacauucagaccaccucaa

SEQ ID NO: 168641 - RNA, 28 nt, Human
uuccaauaaugaacccaauaggguaccc

SEQ ID NO: 168642 - RNA, 18 nt, Human
uucgcugcgccgcggccg

SEQ ID NO: 168643 - RNA, 22 nt, Human
uugaagaaaaacuacaguacau

SEQ ID NO: 168644 - RNA, 22 nt, Human
uugauguugaagaaaaacuaca

SEQ ID NO: 168645 - RNA, 22 nt, Human
uugugggugccggcugccuccc

SEQ ID NO: 168646 - RNA, 20 nt, Human
uuucauggaaaacuguuaau

SEQ ID NO: 168647 - RNA, 24 nt, Human
aaaaaaaagauuaaugaaauuuca

SEQ ID NO: 168648 - RNA, 25 nt, Human
aaaaaaaagauuaaugaaauuucau

SEQ ID NO: 168649 - RNA, 22 nt, Human
aaaaaauaaaaucucauguccc

SEQ ID NO: 168650 - RNA, 21 nt, Human
aaacacaaggaauccuccugu

SEQ ID NO: 168651 - RNA, 19 nt, Human
aaagaagaccaaaaaaagu

SEQ ID NO: 168652 - RNA, 25 nt, Human
aaccaggaaagggauaaauagcuaa

SEQ ID NO: 168653 - RNA, 22 nt, Human
aagaaucuuuccaaaaacuuuc

SEQ ID NO: 168654 - RNA, 25 nt, Human
aagauuaaugaaauuucauaacccc

SEQ ID NO: 168655 - RNA, 19 nt, Human
aagcucggggaaggagcaa

SEQ ID NO: 168656 - RNA, 24 nt, Human
aauaaagaagaccaaaaaaaguaa

SEQ ID NO: 168657 - RNA, 23 nt, Human
aaucucauguccccaacgaaccc

SEQ ID NO: 168658 - RNA, 23 nt, Human
aaucuggccaacucauuucacag

SEQ ID NO: 168659 - RNA, 18 nt, Human
aaugaagaaauaucugga

SEQ ID NO: 168660 - RNA, 22 nt, Human
acacacacacauccauauauaa

SEQ ID NO: 168661 - RNA, 23 nt, Human
acagaaacaagaggcaggacaaa

SEQ ID NO: 168662 - RNA, 20 nt, Human
acagccuaccucccaccccc

SEQ ID NO: 168663 - RNA, 20 nt, Human
acaguauaaaucacuccagc

SEQ ID NO: 168664 - RNA, 23 nt, Human
accccaaaaaaagggugggugug

SEQ ID NO: 168665 - RNA, 21 nt, Human
acccccaagaagaaccacaac

SEQ ID NO: 168666 - RNA, 19 nt, Human
acccccgucccuucauccu

SEQ ID NO: 168667 - RNA, 26 nt, Human
acccgccccccuccccacccaucccc

SEQ ID NO: 168668 - RNA, 23 nt, Human
accuaggccgaggcugcagaagc

SEQ ID NO: 168669 - RNA, 21 nt, Human
acgcugaggucgccgggaagc

SEQ ID NO: 168670 - RNA, 24 nt, Human
acggucuccuccacgcguccggcg

SEQ ID NO: 168671 - RNA, 20 nt, Human
agaaaagacagagggagagg

SEQ ID NO: 168672 - RNA, 26 nt, Human
agaaaaugaagaaauaucuggaagaa

SEQ ID NO: 168673 - RNA, 25 nt, Human
agaaaggagacaagugaaaacgguc

SEQ ID NO: 168674 - RNA, 22 nt, Human
agaaguuggcguccuaggcugg

SEQ ID NO: 168675 - RNA, 21 nt, Human
agacaagugaaaacggucaga

SEQ ID NO: 168676 - RNA, 22 nt, Human
agcccgagacaggcugagccag

SEQ ID NO: 168677 - RNA, 21 nt, Human
agcugcaccccacaaucuggc

SEQ ID NO: 168678 - RNA, 25 nt, Human
aggaggccagaaauuccaaucagag

SEQ ID NO: 168679 - RNA, 24 nt, Human
aggaugccgcuguaccucuugaaa

SEQ ID NO: 168680 - RNA, 18 nt, Human
agggaugggcggacucgg

SEQ ID NO: 168681 - RNA, 19 nt, Human
aggggaggaagaaggggga

SEQ ID NO: 168682 - RNA, 18 nt, Human
agggugggugugggagac

SEQ ID NO: 168683 - RNA, 23 nt, Human
aguaauaaagaagaccaaaaaaa

SEQ ID NO: 168684 - RNA, 25 nt, Human
aguccaaaaauauuggggguuuggg

SEQ ID NO: 168685 - RNA, 22 nt, Human
caaaauacaaaaagagaaccac

SEQ ID NO: 168686 - RNA, 24 nt, Human
cacacacacacauccauauauaau

SEQ ID NO: 168687 - RNA, 26 nt, Human
cacacacacacauccauauauaauau

SEQ ID NO: 168688 - RNA, 21 nt, Human
cacacacccacuuugucucuu

SEQ ID NO: 168689 - RNA, 21 nt, Human
cacacucucacacucgcaccc

SEQ ID NO: 168690 - RNA, 21 nt, Human
cacagccccucacugccuucc

SEQ ID NO: 168691 - RNA, 29 nt, Human
cacagccuaccucccacccccgucccuuu

SEQ ID NO: 168692 - RNA, 21 nt, Human
cacaggcggaggagaaaagac

SEQ ID NO: 168693 - RNA, 18 nt, Human
caccauggaaauguggga

SEQ ID NO: 168694 - RNA, 18 nt, Human
caccccacaaucuggcca

SEQ ID NO: 168695 - RNA, 20 nt, Human
caccccacagccuaccuccc

SEQ ID NO: 168696 - RNA, 21 nt, Human
cacccccuguccccaaaguca

SEQ ID NO: 168697 - RNA, 23 nt, Human
cacccccuguccccaaagucacc

SEQ ID NO: 168698 - RNA, 25 nt, Human
cacccccuguccccaaagucaccag

SEQ ID NO: 168699 - RNA, 20 nt, Human
cacccgccccccuccccacc

SEQ ID NO: 168700 - RNA, 24 nt, Human
cacgcacacacacacauccauaua

SEQ ID NO: 168701 - RNA, 18 nt, Human
cagcuggagcauuggcag

SEQ ID NO: 168702 - RNA, 22 nt, Human
cagcuggggguguccauccccu

SEQ ID NO: 168703 - RNA, 21 nt, Human
caggacaaaacacaaggaauc

SEQ ID NO: 168704 - RNA, 18 nt, Human
cauccccuucccaccccc

SEQ ID NO: 168705 - RNA, 20 nt, Human
ccaaggcuauggccggguug

SEQ ID NO: 168706 - RNA, 18 nt, Human
ccagcccaccccacagcc

SEQ ID NO: 168707 - RNA, 20 nt, Human
ccagcccaccccacagccua

SEQ ID NO: 168708 - RNA, 20 nt, Human
ccauggucagggaugggcgg

SEQ ID NO: 168709 - RNA, 28 nt, Human
cccaagaagaaccacaacaaucaaguuu

SEQ ID NO: 168710 - RNA, 22 nt, Human
cccacaaucuggccaacucauu

SEQ ID NO: 168711 - RNA, 21 nt, Human
cccauccccagagcuuggguu

SEQ ID NO: 168712 - RNA, 23 nt, Human
ccccacccagcugcaccccacaa

SEQ ID NO: 168713 - RNA, 25 nt, Human
ccccagagcuuggguugacgucaga

SEQ ID NO: 168714 - RNA, 22 nt, Human
ccccccagaggugugcugcccc

SEQ ID NO: 168715 - RNA, 19 nt, Human
ccccccuccccacccaucc

SEQ ID NO: 168716 - RNA, 18 nt, Human
ccccgucccuucauccuc

SEQ ID NO: 168717 - RNA, 20 nt, Human
ccccuccccacccauccccc

SEQ ID NO: 168718 - RNA, 19 nt, Human
ccccuucccacccccuguc

SEQ ID NO: 168719 - RNA, 19 nt, Human
cccgagacaggcugagcca

SEQ ID NO: 168720 - RNA, 20 nt, Human
cccucagucucacucacaaa

SEQ ID NO: 168721 - RNA, 18 nt, Human
cccuccccacccaucccc

SEQ ID NO: 168722 - RNA, 21 nt, Human
cccugggcacaggggggcccc

SEQ ID NO: 168723 - RNA, 19 nt, Human
ccgagacaggcugagccag

SEQ ID NO: 168724 - RNA, 25 nt, Human
ccggggcacagaaacaagaggcagg

SEQ ID NO: 168725 - RNA, 21 nt, Human
ccguggccguagcucugaguc

SEQ ID NO: 168726 - RNA, 22 nt, Human
ccuaggccgaggcugcagaagc

SEQ ID NO: 168727 - RNA, 18 nt, Human
ccucacacaggacugccc

SEQ ID NO: 168728 - RNA, 19 nt, Human
ccuccuccucuuccaaguc

SEQ ID NO: 168729 - RNA, 18 nt, Human
ccuccuucuccuccuccu

SEQ ID NO: 168730 - RNA, 20 nt, Human
ccuccuucuccuccuccucc

SEQ ID NO: 168731 - RNA, 24 nt, Human
ccugaaaucagagcggcccaacga

SEQ ID NO: 168732 - RNA, 21 nt, Human
ccugcugccugaaaucagagc

SEQ ID NO: 168733 - RNA, 18 nt, Human
ccuggagaggaugugagg

SEQ ID NO: 168734 - RNA, 23 nt, Human
ccugugaccacgcugaggucgcc

SEQ ID NO: 168735 - RNA, 25 nt, Human
cgaaggugggcgucacccgcccccc

SEQ ID NO: 168736 - RNA, 20 nt, Human
cgaauucccuuuaagggggg

SEQ ID NO: 168737 - RNA, 18 nt, Human
cgccccccuccccaccca

SEQ ID NO: 168738 - RNA, 23 nt, Human
cgcgcacgcacacacacacaucc

SEQ ID NO: 168739 - RNA, 24 nt, Human
cgcgcacgcacacacacacaucca

SEQ ID NO: 168740 - RNA, 26 nt, Human
cgcucacacacucacgcgcacgcaca

SEQ ID NO: 168741 - RNA, 24 nt, Human
cggaggagaaaagacagagggaga

SEQ ID NO: 168742 - RNA, 20 nt, Human
cggcaucacagcagccccug

SEQ ID NO: 168743 - RNA, 22 nt, Human
cgucagagagccaacagucagg

SEQ ID NO: 168744 - RNA, 23 nt, Human
cuccaaaagaaaaugaagaaaua

SEQ ID NO: 168745 - RNA, 22 nt, Human
cuccguaggacccaggggcgag

SEQ ID NO: 168746 - RNA, 20 nt, Human
cuccuccuccuccuccucuu

SEQ ID NO: 168747 - RNA, 19 nt, Human
cuccuccuccuccucuucc

SEQ ID NO: 168748 - RNA, 22 nt, Human
cuccuccuucuccuccuccucc

SEQ ID NO: 168749 - RNA, 21 nt, Human
cugaggguccugaggagagag

SEQ ID NO: 168750 - RNA, 19 nt, Human
cugggcaccccaaaaaaag

SEQ ID NO: 168751 - RNA, 19 nt, Human
cuuccccucucucuccucc

SEQ ID NO: 168752 - RNA, 19 nt, Human
cuucuccuccuccuccucc

SEQ ID NO: 168753 - RNA, 21 nt, Human
cuuugucucuuccccucucuc

SEQ ID NO: 168754 - RNA, 29 nt, Human
gaaacaagaggcaggacaaaagggacccc

SEQ ID NO: 168755 - RNA, 21 nt, Human
gaacccagagucagacgacag

SEQ ID NO: 168756 - RNA, 20 nt, Human
gaagaaucuuuccaaaaacu

SEQ ID NO: 168757 - RNA, 19 nt, Human
gaaucagcuucagcuacgg

SEQ ID NO: 168758 - RNA, 24 nt, Human
gacaaaacacaaggaauccuccug

SEQ ID NO: 168759 - RNA, 18 nt, Human
gagagagagagaggccac

SEQ ID NO: 168760 - RNA, 22 nt, Human
gagccaaaaccauggucaggga

SEQ ID NO: 168761 - RNA, 22 nt, Human
gaggaugugaggggccaagggg

SEQ ID NO: 168762 - RNA, 19 nt, Human
gaggcaggacaaaacacaa

SEQ ID NO: 168763 - RNA, 20 nt, Human
gaugcaaaauacaaaaagag

SEQ ID NO: 168764 - RNA, 26 nt, Human
gcaggacaaaacacaaggaauccucc

SEQ ID NO: 168765 - RNA, 19 nt, Human
gccaaggggugggagaagu

SEQ ID NO: 168766 - RNA, 19 nt, Human
gcccagaguaaagaggauc

SEQ ID NO: 168767 - RNA, 19 nt, Human
gccccccuccccacccauc

SEQ ID NO: 168768 - RNA, 21 nt, Human
gccccccuccccacccauccc

SEQ ID NO: 168769 - RNA, 24 nt, Human
gcgcacgcacacacacacauccau

SEQ ID NO: 168770 - RNA, 22 nt, Human
ggaaaccaaccugggcacccca

SEQ ID NO: 168771 - RNA, 25 nt, Human
ggaagaagggggauggacggaaggg

SEQ ID NO: 168772 - RNA, 19 nt, Human
ggaccuuaaagaaaaaggc

SEQ ID NO: 168773 - RNA, 18 nt, Human
ggacggcaucacagcagc

SEQ ID NO: 168774 - RNA, 21 nt, Human
ggagacaagugaaaacgguca

SEQ ID NO: 168775 - RNA, 21 nt, Human
ggagagccaaaaccaugguca

SEQ ID NO: 168776 - RNA, 24 nt, Human
ggagaggaugugaggggccaaggg

SEQ ID NO: 168777 - RNA, 21 nt, Human
ggaggagccagggaggccaca

SEQ ID NO: 168778 - RNA, 24 nt, Human
ggcacagaaacaagaggcaggaca

SEQ ID NO: 168779 - RNA, 20 nt, Human
ggcgagggagggguugcucc

SEQ ID NO: 168780 - RNA, 21 nt, Human
ggcggggugggagagccaaaa

SEQ ID NO: 168781 - RNA, 18 nt, Human
ggcgugguccaccccccg

SEQ ID NO: 168782 - RNA, 18 nt, Human
gggaguaauaaagaagac

SEQ ID NO: 168783 - RNA, 19 nt, Human
gggaugggcggacucgggc

SEQ ID NO: 168784 - RNA, 23 nt, Human
gggccaacgugaccuaggccgag

SEQ ID NO: 168785 - RNA, 19 nt, Human
gggccgagacgaucagaaa

SEQ ID NO: 168786 - RNA, 26 nt, Human
ggggaaaccaaccugggcaccccaaa

SEQ ID NO: 168787 - RNA, 24 nt, Human
ggggcugauuucgggguggggagc

SEQ ID NO: 168788 - RNA, 24 nt, Human
ggggggcucacuucugcccagagu

SEQ ID NO: 168789 - RNA, 23 nt, Human
ggugggugugggagacauugggu

SEQ ID NO: 168790 - RNA, 21 nt, Human
guacagcaugggguagggggg

SEQ ID NO: 168791 - RNA, 23 nt, Human
guccccaacgaacccagagucag

SEQ ID NO: 168792 - RNA, 23 nt, Human
guccugaggagagagagagaggc

SEQ ID NO: 168793 - RNA, 18 nt, Human
gucgccgggaagccaagg

SEQ ID NO: 168794 - RNA, 18 nt, Human
gugcugccccacccagcu

SEQ ID NO: 168795 - RNA, 21 nt, Human
gugggcgucacccgccccccu

SEQ ID NO: 168796 - RNA, 18 nt, Human
guucugucacccccuuga

SEQ ID NO: 168797 - RNA, 20 nt, Human
uaaaaaauauaaauuugccu

SEQ ID NO: 168798 - RNA, 18 nt, Human
uacagcaugggguagggg

SEQ ID NO: 168799 - RNA, 21 nt, Human
uagaagcaguuuccaauucaa

SEQ ID NO: 168800 - RNA, 23 nt, Human
uaggaggccagaaauuccaauca

SEQ ID NO: 168801 - RNA, 19 nt, Human
ucacacaggacugcccgaa

SEQ ID NO: 168802 - RNA, 26 nt, Human
ucacacucucacacucgcacccagaa

SEQ ID NO: 168803 - RNA, 22 nt, Human
ucacagccccucacugccuucc

SEQ ID NO: 168804 - RNA, 28 nt, Human
ucacgcgcacgcacacacacacauccau

SEQ ID NO: 168805 - RNA, 24 nt, Human
ucacucacaaaaaauaaaaucuca

SEQ ID NO: 168806 - RNA, 23 nt, Human
ucauaaagaaauccucaugagau

SEQ ID NO: 168807 - RNA, 24 nt, Human
uccaagucucucucccccaugugu

SEQ ID NO: 168808 - RNA, 23 nt, Human
uccacgcguccggcgggucccac

SEQ ID NO: 168809 - RNA, 20 nt, Human
ucccacccccgucccuucau

SEQ ID NO: 168810 - RNA, 18 nt, Human
ucccacccccugucccca

SEQ ID NO: 168811 - RNA, 20 nt, Human
ucccacccccuguccccaaa

SEQ ID NO: 168812 - RNA, 19 nt, Human
uccccaacgaacccagagu

SEQ ID NO: 168813 - RNA, 21 nt, Human
uccccagagcuuggguugacg

SEQ ID NO: 168814 - RNA, 24 nt, Human
ucccugggcacaggggggccccug

SEQ ID NO: 168815 - RNA, 23 nt, Human
uccuccaaaagaaaaugaagaaa

SEQ ID NO: 168816 - RNA, 22 nt, Human
uccuccuccuccuccucuucca

SEQ ID NO: 168817 - RNA, 22 nt, Human
ucggggauucauugaauugugg

SEQ ID NO: 168818 - RNA, 19 nt, Human
ucuccccggaaaaaaaaaa

SEQ ID NO: 168819 - RNA, 23 nt, Human
ucuccuccuccuccuccucuucc

SEQ ID NO: 168820 - RNA, 22 nt, Human
ucucuggagaggacuccagccc

SEQ ID NO: 168821 - RNA, 19 nt, Human
ucuggaagaaucuuuccaa

SEQ ID NO: 168822 - RNA, 18 nt, Human
ugaaauuucauaaccccc

SEQ ID NO: 168823 - RNA, 18 nt, Human
ugaagaaauaucuggaag

SEQ ID NO: 168824 - RNA, 19 nt, Human
ugaccacgcugaggucgcc

SEQ ID NO: 168825 - RNA, 22 nt, Human
ugaggagagagagagaggccac

SEQ ID NO: 168826 - RNA, 23 nt, Human
ugaggagagagagagaggccacg

SEQ ID NO: 168827 - RNA, 18 nt, Human
ugaggggccaaggggugg

SEQ ID NO: 168828 - RNA, 21 nt, Human
ugcugccccacccagcugcac

SEQ ID NO: 168829 - RNA, 21 nt, Human
uggcaggagcaagcccugcuc

SEQ ID NO: 168830 - RNA, 20 nt, Human
uggcagggggcagggucuug

SEQ ID NO: 168831 - RNA, 18 nt, Human
uggcgcaguggccgcaga

SEQ ID NO: 168832 - RNA, 18 nt, Human
ugggagggaguggcuaga

SEQ ID NO: 168833 - RNA, 19 nt, Human
ugggagggaguggcuagac

SEQ ID NO: 168834 - RNA, 22 nt, Human
ugggagggaguggcuagacagu

SEQ ID NO: 168835 - RNA, 24 nt, Human
ugggaguccccggugagcugagcg

SEQ ID NO: 168836 - RNA, 24 nt, Human
ugggaucaauaagcuaaggucggg

SEQ ID NO: 168837 - RNA, 19 nt, Human
ugggcaccccaaaaaaagg

SEQ ID NO: 168838 - RNA, 19 nt, Human
uggggaaguaaggugcaag

SEQ ID NO: 168839 - RNA, 25 nt, Human
uggggaaguaaggugcaaguccccu

SEQ ID NO: 168840 - RNA, 18 nt, Human
uggggggaugagauuauu

SEQ ID NO: 168841 - RNA, 24 nt, Human
uggggguaccaaagccucagcucu

SEQ ID NO: 168842 - RNA, 18 nt, Human
ugucucuuccccucucuc

SEQ ID NO: 168843 - RNA, 21 nt, Human
ugugaggggccaagggguggg

SEQ ID NO: 168844 - RNA, 22 nt, Human
uucauaacccccaagaagaacc

SEQ ID NO: 168845 - RNA, 24 nt, Human
uuccgcgugucccugccguggccg

SEQ ID NO: 168846 - RNA, 19 nt, Human
uuccuuguugagccucucu

SEQ ID NO: 168847 - RNA, 20 nt, Human
uuccuuguugagccucucug

SEQ ID NO: 168848 - RNA, 19 nt, Human
uucucgguucugucacccc

SEQ ID NO: 168849 - RNA, 21 nt, Human
agcuggaccggugggggaagg

SEQ ID NO: 168850 - RNA, 19 nt, Human
aggguggcaucugcaggga

SEQ ID NO: 168851 - RNA, 19 nt, Human
cggggcuggcggcucugcg

SEQ ID NO: 168852 - RNA, 18 nt, Human
gggcuggcggcucugcgg

SEQ ID NO: 168853 - RNA, 20 nt, Human
uggcaucugcagggaguagg

SEQ ID NO: 168854 - RNA, 22 nt, Human
uggcuaggguggcaucugcagg

SEQ ID NO: 168855 - RNA, 22 nt, Human
ugggggaaggggaggagacauu

SEQ ID NO: 168856 - RNA, 22 nt, Human
uguccaggccagcuggaccggu

SEQ ID NO: 168857 - RNA, 22 nt, Human
aaaacaccgaaccaccaagacg

SEQ ID NO: 168858 - RNA, 20 nt, Human
aaacaccgaaccaccaagac

SEQ ID NO: 168859 - RNA, 21 nt, Human
aacaaaacaccgaaccaccaa

SEQ ID NO: 168860 - RNA, 22 nt, Human
aaccaccaagacgagaaaagga

SEQ ID NO: 168861 - RNA, 26 nt, Human
aaguguaaaaaucuuacauuuagaau

SEQ ID NO: 168862 - RNA, 18 nt, Human
acaaaacaccgaaccacc

SEQ ID NO: 168863 - RNA, 18 nt, Human
acaccgaaccaccaagac

SEQ ID NO: 168864 - RNA, 23 nt, Human
acaguuuuguccgagaauucgca

SEQ ID NO: 168865 - RNA, 21 nt, Human
accaccaagacgagaaaagga

SEQ ID NO: 168866 - RNA, 23 nt, Human
acgcugggggcgcugcgacugcg

SEQ ID NO: 168867 - RNA, 23 nt, Human
acuuuauaacuccugcgccgccg

SEQ ID NO: 168868 - RNA, 20 nt, Human
agacgagaaaaggagccggg

SEQ ID NO: 168869 - RNA, 18 nt, Human
aggaggggguggcggggc

SEQ ID NO: 168870 - RNA, 18 nt, Human
caaaacaccgaaccacca

SEQ ID NO: 168871 - RNA, 23 nt, Human
caaaacaccgaaccaccaagacg

SEQ ID NO: 168872 - RNA, 18 nt, Human
caagacgagaaaaggagc

SEQ ID NO: 168873 - RNA, 19 nt, Human
caccagacaaguguccuca

SEQ ID NO: 168874 - RNA, 19 nt, Human
cacccucuuccucccuacc

SEQ ID NO: 168875 - RNA, 22 nt, Human
cacccucuuccucccuacccca

SEQ ID NO: 168876 - RNA, 22 nt, Human
cagcccgggucccgggcggcag

SEQ ID NO: 168877 - RNA, 22 nt, Human
cccaggucggggguuggggggc

SEQ ID NO: 168878 - RNA, 19 nt, Human
cccgcagagccaaaaggcg

SEQ ID NO: 168879 - RNA, 23 nt, Human
cccgcagagccaaaaggcgcgcc

SEQ ID NO: 168880 - RNA, 20 nt, Human
cccugggcuccgcucggccc

SEQ ID NO: 168881 - RNA, 18 nt, Human
ccgaaccaccaagacgag

SEQ ID NO: 168882 - RNA, 22 nt, Human
ccucccuaccccaggucggggg

SEQ ID NO: 168883 - RNA, 19 nt, Human
ccucuuccucccuacccca

SEQ ID NO: 168884 - RNA, 21 nt, Human
ccuucuccucucggagcagcu

SEQ ID NO: 168885 - RNA, 18 nt, Human
cgaacaaaacaccgaacc

SEQ ID NO: 168886 - RNA, 25 nt, Human
cgaacaaaacaccgaaccaccaaga

SEQ ID NO: 168887 - RNA, 19 nt, Human
cgaccaggaacgugcggga

SEQ ID NO: 168888 - RNA, 22 nt, Human
cgcaguaaguacaaaaaaaucc

SEQ ID NO: 168889 - RNA, 22 nt, Human
cgccuggaccugagaaucucua

SEQ ID NO: 168890 - RNA, 23 nt, Human
cgggcgggcgaaucagaacgcca

SEQ ID NO: 168891 - RNA, 24 nt, Human
cggggcugccggguggcggcgacg

SEQ ID NO: 168892 - RNA, 22 nt, Human
cgucaagggagccucuagugcc

SEQ ID NO: 168893 - RNA, 19 nt, Human
cucaaauaaaaaagaauug

SEQ ID NO: 168894 - RNA, 21 nt, Human
cuuuauaacuccugcgccgcc

SEQ ID NO: 168895 - RNA, 21 nt, Human
gaaaaggagccgggauuccua

SEQ ID NO: 168896 - RNA, 24 nt, Human
gagccucuagugccuggacagggc

SEQ ID NO: 168897 - RNA, 18 nt, Human
gaggacuugaccuucucc

SEQ ID NO: 168898 - RNA, 19 nt, Human
gaggaggggguggcggggc

SEQ ID NO: 168899 - RNA, 18 nt, Human
gcagcggcgaaaaugggc

SEQ ID NO: 168900 - RNA, 24 nt, Human
gcccgggucccgggcggcaggccc

SEQ ID NO: 168901 - RNA, 19 nt, Human
gcggcggcggcggggcggc

SEQ ID NO: 168902 - RNA, 21 nt, Human
gcugccggagcugcgccgggg

SEQ ID NO: 168903 - RNA, 24 nt, Human
ggacagggcggacucccuuccccg

SEQ ID NO: 168904 - RNA, 21 nt, Human
ggcggcaggcccggccggggg

SEQ ID NO: 168905 - RNA, 24 nt, Human
gggacgggugagagucuaagaaca

SEQ ID NO: 168906 - RNA, 18 nt, Human
gucagcugaggagggggu

SEQ ID NO: 168907 - RNA, 21 nt, Human
uaaccauuuuuccuuuucaug

SEQ ID NO: 168908 - RNA, 21 nt, Human
ucccugggcuccgcucggccc

SEQ ID NO: 168909 - RNA, 22 nt, Human
ucccugggcuccgcucggcccg

SEQ ID NO: 168910 - RNA, 21 nt, Human
uccuuuucaugaaaaaguaca

SEQ ID NO: 168911 - RNA, 21 nt, Human
ucuccucucggagcagcuuuu

SEQ ID NO: 168912 - RNA, 27 nt, Human
ucucuacaccucaaaaaggcuuaguug

SEQ ID NO: 168913 - RNA, 21 nt, Human
ugaaaaaguguaaaaaucuua

SEQ ID NO: 168914 - RNA, 19 nt, Human
ugaggaggggguggcgggg

SEQ ID NO: 168915 - RNA, 20 nt, Human
ugaggaggggguggcggggc

SEQ ID NO: 168916 - RNA, 21 nt, Human
ugaggaggggguggcggggcc

SEQ ID NO: 168917 - RNA, 21 nt, Human
ugccggagcugcgccggggcu

SEQ ID NO: 168918 - RNA, 24 nt, Human
ugccggguggcggcggagucuccc

SEQ ID NO: 168919 - RNA, 22 nt, Human
uggcgcggcggcggcggggcgg

SEQ ID NO: 168920 - RNA, 25 nt, Human
uguaaacauguuaaccauuuuuccu

SEQ ID NO: 168921 - RNA, 22 nt, Human
uguauuauucuuuugaccauua

SEQ ID NO: 168922 - RNA, 20 nt, Human
uguguaaacauguuaaccau

SEQ ID NO: 168923 - RNA, 18 nt, Human
uuguauuauucuuuugac

SEQ ID NO: 168924 - RNA, 19 nt, Human
uuuauaacuccugcgccgc

SEQ ID NO: 168925 - RNA, 21 nt, Human
aaaaaaacgaagcccccaccc

SEQ ID NO: 168926 - RNA, 20 nt, Human
aaacgaagcccccacccccc

SEQ ID NO: 168927 - RNA, 18 nt, Human
aaagacccccugcuucac

SEQ ID NO: 168928 - RNA, 25 nt, Human
aaaugaggcuaguaacaccuaccuc

SEQ ID NO: 168929 - RNA, 21 nt, Human
aacaagcagcuucaacacaga

SEQ ID NO: 168930 - RNA, 20 nt, Human
aacagaguuggguugcaacc

SEQ ID NO: 168931 - RNA, 24 nt, Human
aacagcaaaaaaaaaaaaaaaaaa

SEQ ID NO: 168932 - RNA, 19 nt, Human
aacguuggggaagaaguga

SEQ ID NO: 168933 - RNA, 21 nt, Human
aacuguaaagaaucuuggccu

SEQ ID NO: 168934 - RNA, 20 nt, Human
aaggcggcgcccgggccacc

SEQ ID NO: 168935 - RNA, 21 nt, Human
aauccaacucucccauuccac

SEQ ID NO: 168936 - RNA, 20 nt, Human
aauccgcuuaauuucucccu

SEQ ID NO: 168937 - RNA, 21 nt, Human
aauccugccuucacuacuuac

SEQ ID NO: 168938 - RNA, 21 nt, Human
acccugugcucccugaagccg

SEQ ID NO: 168939 - RNA, 28 nt, Human
accucuuucucccccggccucccuccag

SEQ ID NO: 168940 - RNA, 20 nt, Human
accugggcgggccucagccc

SEQ ID NO: 168941 - RNA, 25 nt, Human
acgccgggacccacgccgccccagc

SEQ ID NO: 168942 - RNA, 18 nt, Human
acggaaggagcugaggcu

SEQ ID NO: 168943 - RNA, 28 nt, Human
agaaagaacucacccaggcuccugcaaa

SEQ ID NO: 168944 - RNA, 19 nt, Human
agagcugcgggcuagggcg

SEQ ID NO: 168945 - RNA, 25 nt, Human
agaggaaacgaacuuccuuggagaa

SEQ ID NO: 168946 - RNA, 19 nt, Human
agaggggaaaggcagaaag

SEQ ID NO: 168947 - RNA, 20 nt, Human
agccagggaaguggcggcgg

SEQ ID NO: 168948 - RNA, 22 nt, Human
aggcggcaggaccuccuccgcc

SEQ ID NO: 168949 - RNA, 21 nt, Human
aggcuucagaggaaacgaacu

SEQ ID NO: 168950 - RNA, 22 nt, Human
agggacccggcgggaacaaacc

SEQ ID NO: 168951 - RNA, 24 nt, Human
agggcggagcucccugggcggggu

SEQ ID NO: 168952 - RNA, 23 nt, Human
agugguugguggugggggauugu

SEQ ID NO: 168953 - RNA, 22 nt, Human
auggaaggcaggucugacuacu

SEQ ID NO: 168954 - RNA, 18 nt, Human
auggagcuacagaggccc

SEQ ID NO: 168955 - RNA, 21 nt, Human
caaguguugccuucaucucuc

SEQ ID NO: 168956 - RNA, 27 nt, Human
caccaaguguugccuucaucucucaaa

SEQ ID NO: 168957 - RNA, 18 nt, Human
cacccccucagugaaccc

SEQ ID NO: 168958 - RNA, 24 nt, Human
cacccccucagugaacccugaccu

SEQ ID NO: 168959 - RNA, 25 nt, Human
cacccgagcccgcacgcuuccagcc

SEQ ID NO: 168960 - RNA, 25 nt, Human
caccgggccgaagcgcagugggagc

SEQ ID NO: 168961 - RNA, 22 nt, Human
caccucuccguucagcuccgcc

SEQ ID NO: 168962 - RNA, 22 nt, Human
cacucgggcgccagccgcagcc

SEQ ID NO: 168963 - RNA, 19 nt, Human
cagaaaaaaauggaaggca

SEQ ID NO: 168964 - RNA, 20 nt, Human
cagaaacaagcagcuucaac

SEQ ID NO: 168965 - RNA, 25 nt, Human
cagaauccucaaaauagaguucuuc

SEQ ID NO: 168966 - RNA, 25 nt, Human
cagaauccucaaaauagaguucuuc

SEQ ID NO: 168967 - RNA, 18 nt, Human
cagaggcccaggauaggg

SEQ ID NO: 168968 - RNA, 21 nt, Human
cagccuugggccugggagagg

SEQ ID NO: 168969 - RNA, 20 nt, Human
caggauagggagaaagaacu

SEQ ID NO: 168970 - RNA, 23 nt, Human
caggcuccugggguuccaauccu

SEQ ID NO: 168971 - RNA, 23 nt, Human
cagggaaaaaaacgaagccccca

SEQ ID NO: 168972 - RNA, 19 nt, Human
cauaguaguuaagagcagc

SEQ ID NO: 168973 - RNA, 20 nt, Human
ccaauccugccuucacuacu

SEQ ID NO: 168974 - RNA, 24 nt, Human
ccaccccucuccgcgcggagaggc

SEQ ID NO: 168975 - RNA, 19 nt, Human
ccaggauagggagaaagaa

SEQ ID NO: 168976 - RNA, 22 nt, Human
cccagcgcggcccgccggcgcc

SEQ ID NO: 168977 - RNA, 19 nt, Human
ccccaaggcggcgcccggg

SEQ ID NO: 168978 - RNA, 22 nt, Human
ccccaagguaagggcagaaaaa

SEQ ID NO: 168979 - RNA, 18 nt, Human
ccccacccguccucuccc

SEQ ID NO: 168980 - RNA, 21 nt, Human
cccccaccuuccuggcuccca

SEQ ID NO: 168981 - RNA, 19 nt, Human
cccccuggcggcccagcuc

SEQ ID NO: 168982 - RNA, 21 nt, Human
ccccucagugaacccugaccu

SEQ ID NO: 168983 - RNA, 22 nt, Human
ccccucuccgcgcggagaggcc

SEQ ID NO: 168984 - RNA, 20 nt, Human
ccccugcuucaccucucccc

SEQ ID NO: 168985 - RNA, 21 nt, Human
cccgacacccccucagugaac

SEQ ID NO: 168986 - RNA, 22 nt, Human
cccgcagccuugggccugggag

SEQ ID NO: 168987 - RNA, 18 nt, Human
cccgccaccccucuccgc

SEQ ID NO: 168988 - RNA, 18 nt, Human
cccucgggguggcagugg

SEQ ID NO: 168989 - RNA, 21 nt, Human
cccucugggaccucugaccaa

SEQ ID NO: 168990 - RNA, 19 nt, Human
cccugcccgacacccccuc

SEQ ID NO: 168991 - RNA, 18 nt, Human
cccuggauguuaaggcuc

SEQ ID NO: 168992 - RNA, 22 nt, Human
ccgcagcgcccccuggcggccc

SEQ ID NO: 168993 - RNA, 23 nt, Human
ccgccgccgccgccacucuccgg

SEQ ID NO: 168994 - RNA, 18 nt, Human
ccgcgcugccucuggggc

SEQ ID NO: 168995 - RNA, 19 nt, Human
ccgcugagggacccggcgg

SEQ ID NO: 168996 - RNA, 18 nt, Human
ccgcugccgccgccgccg

SEQ ID NO: 168997 - RNA, 19 nt, Human
ccggcccugggccugcugc

SEQ ID NO: 168998 - RNA, 20 nt, Human
ccggcccugggccugcugcg

SEQ ID NO: 168999 - RNA, 19 nt, Human
ccggggagugggauccagg

SEQ ID NO: 169000 - RNA, 23 nt, Human
ccuccaaucuacgggauagccug

SEQ ID NO: 169001 - RNA, 24 nt, Human
ccuccgcugucgggcccgccaccc

SEQ ID NO: 169002 - RNA, 19 nt, Human
ccugaccuccaccaagugu

SEQ ID NO: 169003 - RNA, 20 nt, Human
ccuggcggcccagcucggcc

SEQ ID NO: 169004 - RNA, 19 nt, Human
ccugggcgggccucagccc

SEQ ID NO: 169005 - RNA, 21 nt, Human
ccugggguuccaauccugccu

SEQ ID NO: 169006 - RNA, 24 nt, Human
ccugggguuccaauccugccuuca

SEQ ID NO: 169007 - RNA, 22 nt, Human
ccuuaccugggcgggccucagc

SEQ ID NO: 169008 - RNA, 19 nt, Human
cgagaggcgcagaggcagg

SEQ ID NO: 169009 - RNA, 20 nt, Human
cgccgccgcuccugcacccu

SEQ ID NO: 169010 - RNA, 22 nt, Human
cggagccucaguuuccuggucu

SEQ ID NO: 169011 - RNA, 21 nt, Human
cggcagcggcucgggcucggc

SEQ ID NO: 169012 - RNA, 19 nt, Human
cggcgcccucuccucccuc

SEQ ID NO: 169013 - RNA, 21 nt, Human
cgggaacaaaccgccgccgcg

SEQ ID NO: 169014 - RNA, 22 nt, Human
cgggccucagccccuagucccc

SEQ ID NO: 169015 - RNA, 19 nt, Human
cggggagggggcgggggac

SEQ ID NO: 169016 - RNA, 19 nt, Human
cucccccggccucccucca

SEQ ID NO: 169017 - RNA, 22 nt, Human
cucccuccccucucccuggccc

SEQ ID NO: 169018 - RNA, 20 nt, Human
cuccugcaaagaaauagaac

SEQ ID NO: 169019 - RNA, 19 nt, Human
cucuccggcuccgcuccgg

SEQ ID NO: 169020 - RNA, 22 nt, Human
cucugugacuaucucacucucc

SEQ ID NO: 169021 - RNA, 23 nt, Human
cuggacaccccccaccuuccugg

SEQ ID NO: 169022 - RNA, 24 nt, Human
cugguuuaggcuucagaggaaacg

SEQ ID NO: 169023 - RNA, 21 nt, Human
cuguggccgcguucccggggc

SEQ ID NO: 169024 - RNA, 19 nt, Human
cuguucaugggucugggaa

SEQ ID NO: 169025 - RNA, 20 nt, Human
cuugucuucgccgccgcucc

SEQ ID NO: 169026 - RNA, 18 nt, Human
gaacugagcggaugccug

SEQ ID NO: 169027 - RNA, 23 nt, Human
gacuuccccgcuucggagccuca

SEQ ID NO: 169028 - RNA, 20 nt, Human
gagcugggacccgccgcugg

SEQ ID NO: 169029 - RNA, 23 nt, Human
gaggcaggcagggaggggugucc

SEQ ID NO: 169030 - RNA, 23 nt, Human
gagggacccggcgggaacaaacc

SEQ ID NO: 169031 - RNA, 20 nt, Human
gauagagcccgcuuaguccc

SEQ ID NO: 169032 - RNA, 20 nt, Human
gcagaggcagggaaaaaaac

SEQ ID NO: 169033 - RNA, 24 nt, Human
gcccccgccacuaccccgggaauc

SEQ ID NO: 169034 - RNA, 19 nt, Human
gcccugagcgauagagccc

SEQ ID NO: 169035 - RNA, 19 nt, Human
gccgcugccgccgccgccg

SEQ ID NO: 169036 - RNA, 23 nt, Human
gccucccuccaggacccagaaac

SEQ ID NO: 169037 - RNA, 21 nt, Human
gccugggcccccucugggacc

SEQ ID NO: 169038 - RNA, 21 nt, Human
gcggggagggggcgggggacu

SEQ ID NO: 169039 - RNA, 22 nt, Human
gcgugccggcccaaggucugga

SEQ ID NO: 169040 - RNA, 18 nt, Human
gcuaaagcucgggcgugc

SEQ ID NO: 169041 - RNA, 19 nt, Human
gcuccugcacccugugcuc

SEQ ID NO: 169042 - RNA, 24 nt, Human
gcugccucuggggcgagugcguuu

SEQ ID NO: 169043 - RNA, 25 nt, Human
ggcacgacccgccggcggcccccgg

SEQ ID NO: 169044 - RNA, 20 nt, Human
ggcagcggcucgggcucggc

SEQ ID NO: 169045 - RNA, 21 nt, Human
ggcccugugccuuguuucucg

SEQ ID NO: 169046 - RNA, 20 nt, Human
ggccugggagaggugagauu

SEQ ID NO: 169047 - RNA, 24 nt, Human
ggcgggcccuugucuucgccgccg

SEQ ID NO: 169048 - RNA, 20 nt, Human
ggcucggccgcgcugccucu

SEQ ID NO: 169049 - RNA, 18 nt, Human
gggagaggcugaggagug

SEQ ID NO: 169050 - RNA, 20 nt, Human
gggagggggcgggggacuga

SEQ ID NO: 169051 - RNA, 21 nt, Human
gggcggggagggggcggggga

SEQ ID NO: 169052 - RNA, 22 nt, Human
gggcuagggcggagcucccugg

SEQ ID NO: 169053 - RNA, 18 nt, Human
ggggaagaagugagaggg

SEQ ID NO: 169054 - RNA, 21 nt, Human
ggggagggggcgggggacuga

SEQ ID NO: 169055 - RNA, 25 nt, Human
gggggacugaggcaggcagggaggg

SEQ ID NO: 169056 - RNA, 25 nt, Human
gucaccuugggcaagguucuuugcg

SEQ ID NO: 169057 - RNA, 19 nt, Human
gucgggcccgccaccccuc

SEQ ID NO: 169058 - RNA, 21 nt, Human
gucucaacguuggggaagaag

SEQ ID NO: 169059 - RNA, 19 nt, Human
guggaaacggcauuugucu

SEQ ID NO: 169060 - RNA, 20 nt, Human
uacagaggcccaggauaggg

SEQ ID NO: 169061 - RNA, 21 nt, Human
uagccccgggccugucgcccu

SEQ ID NO: 169062 - RNA, 24 nt, Human
uaggcuucagaggaaacgaacuuc

SEQ ID NO: 169063 - RNA, 22 nt, Human
uauuagaccucuuucucccccg

SEQ ID NO: 169064 - RNA, 21 nt, Human
ucaaaagucuugugcaacuaa

SEQ ID NO: 169065 - RNA, 19 nt, Human
ucacucuccgugagucucu

SEQ ID NO: 169066 - RNA, 18 nt, Human
ucagccccuaguccccuc

SEQ ID NO: 169067 - RNA, 20 nt, Human
ucaggcuccugggguuccaa

SEQ ID NO: 169068 - RNA, 22 nt, Human
uccacagauggagcuacagagg

SEQ ID NO: 169069 - RNA, 24 nt, Human
uccacagauggagcuacagaggcc

SEQ ID NO: 169070 - RNA, 21 nt, Human
uccccacccguccucucccca

SEQ ID NO: 169071 - RNA, 22 nt, Human
uccccacccguccucuccccaa

SEQ ID NO: 169072 - RNA, 23 nt, Human
uccccgagaggcgcagaggcagg

SEQ ID NO: 169073 - RNA, 22 nt, Human
ucccuccaggacccagaaacaa

SEQ ID NO: 169074 - RNA, 19 nt, Human
ucccuggccccaguugccc

SEQ ID NO: 169075 - RNA, 18 nt, Human
ucccugggcggggugggg

SEQ ID NO: 169076 - RNA, 26 nt, Human
uccgagcugggacccgccgcuggggc

SEQ ID NO: 169077 - RNA, 19 nt, Human
uccgcccccugcccgacac

SEQ ID NO: 169078 - RNA, 18 nt, Human
uccggggagugggaucca

SEQ ID NO: 169079 - RNA, 19 nt, Human
uccuggcucccaggguucu

SEQ ID NO: 169080 - RNA, 22 nt, Human
ucggccgcgcucaccuuccagg

SEQ ID NO: 169081 - RNA, 19 nt, Human
ucucucaaaagucuugugc

SEQ ID NO: 169082 - RNA, 19 nt, Human
ucucugugacuaucucacu

SEQ ID NO: 169083 - RNA, 23 nt, Human
ucuggggcacggaaggggagaug

SEQ ID NO: 169084 - RNA, 23 nt, Human
ucugucaccuugggcaagguucu

SEQ ID NO: 169085 - RNA, 19 nt, Human
ugagaggaagucgccuggg

SEQ ID NO: 169086 - RNA, 19 nt, Human
ugagaggggaaaggcagaa

SEQ ID NO: 169087 - RNA, 23 nt, Human
ugagucucuguggaaacggcauu

SEQ ID NO: 169088 - RNA, 18 nt, Human
ugccccgacagcgccgca

SEQ ID NO: 169089 - RNA, 19 nt, Human
ugccccgacagcgccgcac

SEQ ID NO: 169090 - RNA, 24 nt, Human
ugcccgacacccccucagugaacc

SEQ ID NO: 169091 - RNA, 19 nt, Human
ugcccugaggacuggacac

SEQ ID NO: 169092 - RNA, 21 nt, Human
ugccuguucuccgacccucug

SEQ ID NO: 169093 - RNA, 21 nt, Human
ugccuuguuucucgcuagccg

SEQ ID NO: 169094 - RNA, 20 nt, Human
ugccuuuguaaaaaugaggc

SEQ ID NO: 169095 - RNA, 21 nt, Human
ugcggcggcgcccucuccucc

SEQ ID NO: 169096 - RNA, 18 nt, Human
uggacaccccccaccuuc

SEQ ID NO: 169097 - RNA, 23 nt, Human
uggagaacagcaaaaaaaaaaaa

SEQ ID NO: 169098 - RNA, 19 nt, Human
uggcccugugccuuguuuc

SEQ ID NO: 169099 - RNA, 23 nt, Human
uggcucccaggguucugggcccc

SEQ ID NO: 169100 - RNA, 22 nt, Human
ugggaccgcaggaacucccggg

SEQ ID NO: 169101 - RNA, 22 nt, Human
ugggagaggugagauugcggcg

SEQ ID NO: 169102 - RNA, 21 nt, Human
ugggagcgcgaggcugagacg

SEQ ID NO: 169103 - RNA, 20 nt, Human
ugggccugggagaggugagg

SEQ ID NO: 169104 - RNA, 21 nt, Human
uuaauccaacucucccauucc

SEQ ID NO: 169105 - RNA, 21 nt, Human
uuacccuaucugucaccuugg

SEQ ID NO: 169106 - RNA, 18 nt, Human
uucacagaauccucaaaa

SEQ ID NO: 169107 - RNA, 21 nt, Human
uucauaaauagacucccugag

SEQ ID NO: 169108 - RNA, 20 nt, Human
uucccggggcgcgggccggu

SEQ ID NO: 169109 - RNA, 20 nt, Human
uuccuggcucccaggguucu

SEQ ID NO: 169110 - RNA, 24 nt, Human
uucugggccccaccgacaggcggc

SEQ ID NO: 169111 - RNA, 19 nt, Human
uugggcccauuucagccuc

SEQ ID NO: 169112 - RNA, 20 nt, Human
uugggcccauuucagccucu

SEQ ID NO: 169113 - RNA, 24 nt, Human
uuucacagaauccucaaaauagag

SEQ ID NO: 169114 - RNA, 22 nt, Human
uuugcgcuuuguuucugccuuu

SEQ ID NO: 169115 - RNA, 22 nt, Human
aaaauaaaaauuaccaaugguu

SEQ ID NO: 169116 - RNA, 21 nt, Human
aagcucacuuuacugacugcc

SEQ ID NO: 169117 - RNA, 23 nt, Human
aagggucccuugcgcgcuggugc

SEQ ID NO: 169118 - RNA, 24 nt, Human
acaaucuucuuuuucacaccccag

SEQ ID NO: 169119 - RNA, 25 nt, Human
acagccaugaaauuaccagcacguc

SEQ ID NO: 169120 - RNA, 19 nt, Human
acagcggcuaggcuuuggg

SEQ ID NO: 169121 - RNA, 23 nt, Human
agacagggaaaaccagcccaggu

SEQ ID NO: 169122 - RNA, 18 nt, Human
agagcccuccccagcuac

SEQ ID NO: 169123 - RNA, 24 nt, Human
agagcccuccccagcuacugaaag

SEQ ID NO: 169124 - RNA, 21 nt, Human
agauuuuuauuaaaacagucc

SEQ ID NO: 169125 - RNA, 21 nt, Human
agccaugaaauuaccagcacg

SEQ ID NO: 169126 - RNA, 24 nt, Human
aggcgaggcgggggcagcgagguc

SEQ ID NO: 169127 - RNA, 22 nt, Human
aggcgggggcagcgaggucggg

SEQ ID NO: 169128 - RNA, 19 nt, Human
auggagccucugaaauauu

SEQ ID NO: 169129 - RNA, 26 nt, Human
auggagccucugaaauauuuaaugcu

SEQ ID NO: 169130 - RNA, 24 nt, Human
caaaugaacgaauguacuucucuc

SEQ ID NO: 169131 - RNA, 20 nt, Human
cacaauuuggauccuggucu

SEQ ID NO: 169132 - RNA, 20 nt, Human
cacccccgggcucuggaucc

SEQ ID NO: 169133 - RNA, 21 nt, Human
cacccccgggcucuggauccc

SEQ ID NO: 169134 - RNA, 19 nt, Human
cacgcgcuggaggcucagc

SEQ ID NO: 169135 - RNA, 24 nt, Human
cagaaagaggcugaguuucucuug

SEQ ID NO: 169136 - RNA, 24 nt, Human
cagaggcccuggguggcccaccau

SEQ ID NO: 169137 - RNA, 18 nt, Human
cagauugcggggaacgug

SEQ ID NO: 169138 - RNA, 22 nt, Human
cagcccaggucaaccagagcag

SEQ ID NO: 169139 - RNA, 19 nt, Human
cagcggcuaggcuuugggu

SEQ ID NO: 169140 - RNA, 24 nt, Human
ccaaugguuuucauacaaucuucu

SEQ ID NO: 169141 - RNA, 26 nt, Human
ccaauuuaaaaaagaagaaaagccua

SEQ ID NO: 169142 - RNA, 21 nt, Human
cccaguugaguccucucucca

SEQ ID NO: 169143 - RNA, 22 nt, Human
ccccauuuggacugaaccaagu

SEQ ID NO: 169144 - RNA, 21 nt, Human
cccccgggcucuggauccccg

SEQ ID NO: 169145 - RNA, 22 nt, Human
cccccgggcucuggauccccgc

SEQ ID NO: 169146 - RNA, 18 nt, Human
cccgggcucuggaucccc

SEQ ID NO: 169147 - RNA, 22 nt, Human
cccugugccaguccaagggcuc

SEQ ID NO: 169148 - RNA, 19 nt, Human
cccuugcgcgcuggugccg

SEQ ID NO: 169149 - RNA, 18 nt, Human
ccgccaaggacccucccc

SEQ ID NO: 169150 - RNA, 21 nt, Human
ccguuugagggcuucgcucca

SEQ ID NO: 169151 - RNA, 22 nt, Human
ccuccucacuuuaagaagaaag

SEQ ID NO: 169152 - RNA, 19 nt, Human
ccucgccccaccuccuccc

SEQ ID NO: 169153 - RNA, 19 nt, Human
ccucgccccaccuccuccc

SEQ ID NO: 169154 - RNA, 21 nt, Human
ccucgccccaccuccucccgu

SEQ ID NO: 169155 - RNA, 23 nt, Human
ccucuguggccugcucggucuuu

SEQ ID NO: 169156 - RNA, 25 nt, Human
cgagagcccagcggcccaggcuggc

SEQ ID NO: 169157 - RNA, 21 nt, Human
cgaggcgggggcagcgagguc

SEQ ID NO: 169158 - RNA, 22 nt, Human
cgagggucccugugccagucca

SEQ ID NO: 169159 - RNA, 22 nt, Human
cgccaaggacccuccccgauag

SEQ ID NO: 169160 - RNA, 21 nt, Human
cgccccaccuccucccguuua

SEQ ID NO: 169161 - RNA, 18 nt, Human
cgcucggcccuucugcgg

SEQ ID NO: 169162 - RNA, 18 nt, Human
cgggcccaggcggggcga

SEQ ID NO: 169163 - RNA, 25 nt, Human
cgggcgucccgcacccccgggcucu

SEQ ID NO: 169164 - RNA, 19 nt, Human
cgggggccgcccaugcccu

SEQ ID NO: 169165 - RNA, 23 nt, Human
cuaaagcucacuuuacugacugc

SEQ ID NO: 169166 - RNA, 21 nt, Human
cucaagggaaagggggagagu

SEQ ID NO: 169167 - RNA, 25 nt, Human
cucaagggaaagggggagaguuauu

SEQ ID NO: 169168 - RNA, 21 nt, Human
cucucugccuuauaauggaaa

SEQ ID NO: 169169 - RNA, 18 nt, Human
cugaaaguuuuugcucca

SEQ ID NO: 169170 - RNA, 18 nt, Human
cuggauccccgcggcugu

SEQ ID NO: 169171 - RNA, 22 nt, Human
cuuaagcaagauacaaaaugaa

SEQ ID NO: 169172 - RNA, 20 nt, Human
gaaauauuuaaugcugaaag

SEQ ID NO: 169173 - RNA, 26 nt, Human
gaagagcccuccccagcuacugaaag

SEQ ID NO: 169174 - RNA, 23 nt, Human
gacggcucagcccgcguggugcu

SEQ ID NO: 169175 - RNA, 22 nt, Human
gaggcgggcagcggcgguggcc

SEQ ID NO: 169176 - RNA, 23 nt, Human
gcagagauuucuccaauuuaaaa

SEQ ID NO: 169177 - RNA, 22 nt, Human
gccccgagagcccagcggccca

SEQ ID NO: 169178 - RNA, 18 nt, Human
gcgcgggcccaggcgggg

SEQ ID NO: 169179 - RNA, 19 nt, Human
gcgggcagcggcgguggcc

SEQ ID NO: 169180 - RNA, 18 nt, Human
gcgggcccaggcggggcg

SEQ ID NO: 169181 - RNA, 18 nt, Human
gcgggcgucccgcacccc

SEQ ID NO: 169182 - RNA, 18 nt, Human
gcgguggccucgugaccg

SEQ ID NO: 169183 - RNA, 18 nt, Human
gcucgggagugacccgcu

SEQ ID NO: 169184 - RNA, 18 nt, Human
gcugcagcuggucugugg

SEQ ID NO: 169185 - RNA, 20 nt, Human
gcugcagcuggucuguggug

SEQ ID NO: 169186 - RNA, 22 nt, Human
ggauagaguccugcagcccucu

SEQ ID NO: 169187 - RNA, 20 nt, Human
ggcagagaggcgaggcgggg

SEQ ID NO: 169188 - RNA, 19 nt, Human
ggcagcggcgguggccucg

SEQ ID NO: 169189 - RNA, 26 nt, Human
gggaaaaccagcccaggucaaccaga

SEQ ID NO: 169190 - RNA, 22 nt, Human
gggcagagaggcgaggcggggg

SEQ ID NO: 169191 - RNA, 21 nt, Human
gggcagcggcgguggccucgu

SEQ ID NO: 169192 - RNA, 22 nt, Human
gggcccugaaugauaacccggg

SEQ ID NO: 169193 - RNA, 19 nt, Human
gggcgggccuggcgucccc

SEQ ID NO: 169194 - RNA, 19 nt, Human
gggcgggggcgggccuggc

SEQ ID NO: 169195 - RNA, 20 nt, Human
gggcucgaaggccagagcga

SEQ ID NO: 169196 - RNA, 19 nt, Human
ggggauggaagagcccucc

SEQ ID NO: 169197 - RNA, 19 nt, Human
ggguggcccaccauugcug

SEQ ID NO: 169198 - RNA, 21 nt, Human
ggucuguggugcccgcuaguu

SEQ ID NO: 169199 - RNA, 22 nt, Human
gguguagcagggggugcugggg

SEQ ID NO: 169200 - RNA, 18 nt, Human
uaaaaaagaagaaaagcc

SEQ ID NO: 169201 - RNA, 24 nt, Human
uaaaaaggcccgaguuccggcagc

SEQ ID NO: 169202 - RNA, 19 nt, Human
uaaaacaguccaucugaac

SEQ ID NO: 169203 - RNA, 26 nt, Human
uaaaauuacauauguggcuugcacca

SEQ ID NO: 169204 - RNA, 23 nt, Human
uaaaggcacuagaggacgaaccg

SEQ ID NO: 169205 - RNA, 22 nt, Human
uaccaaugguuuucauacaauc

SEQ ID NO: 169206 - RNA, 21 nt, Human
uaccagaaagcaucccguuuu

SEQ ID NO: 169207 - RNA, 18 nt, Human
uagaguccugcagcccuc

SEQ ID NO: 169208 - RNA, 23 nt, Human
uauacagaaagaggcugaguuuc

SEQ ID NO: 169209 - RNA, 19 nt, Human
uaucugaaagcugugaaug

SEQ ID NO: 169210 - RNA, 18 nt, Human
uccaagggcucuggcugc

SEQ ID NO: 169211 - RNA, 19 nt, Human
uccaagggcucuggcugcc

SEQ ID NO: 169212 - RNA, 21 nt, Human
uccaauuuaaaaaagaagaaa

SEQ ID NO: 169213 - RNA, 22 nt, Human
uccaauuuaaaaaagaagaaaa

SEQ ID NO: 169214 - RNA, 20 nt, Human
ucccaaaaauaaaaaauaaa

SEQ ID NO: 169215 - RNA, 22 nt, Human
ucccaaaaauaaaaaauaaaaa

SEQ ID NO: 169216 - RNA, 23 nt, Human
uccccggaacggacgcucggccc

SEQ ID NO: 169217 - RNA, 21 nt, Human
ucccuagaacagcggcuaggc

SEQ ID NO: 169218 - RNA, 18 nt, Human
ucccuggguugggguggc

SEQ ID NO: 169219 - RNA, 20 nt, Human
ucggggggcgggggcgggcc

SEQ ID NO: 169220 - RNA, 22 nt, Human
ucucaagggaaagggggagagu

SEQ ID NO: 169221 - RNA, 21 nt, Human
ucuccacggcgugggucucca

SEQ ID NO: 169222 - RNA, 18 nt, Human
ugaaacugauuccccaca

SEQ ID NO: 169223 - RNA, 19 nt, Human
ugaaauuaccagcacgucc

SEQ ID NO: 169224 - RNA, 20 nt, Human
ugacaagaaacaguggacaa

SEQ ID NO: 169225 - RNA, 24 nt, Human
ugacugggcaguaacagccaugaa

SEQ ID NO: 169226 - RNA, 20 nt, Human
ugcccuaacuuaauuuuucu

SEQ ID NO: 169227 - RNA, 20 nt, Human
ugccuagguugugcgcgcag

SEQ ID NO: 169228 - RNA, 18 nt, Human
ugcucaaaaguucaauaa

SEQ ID NO: 169229 - RNA, 20 nt, Human
ugcuggggauggaagagccc

SEQ ID NO: 169230 - RNA, 19 nt, Human
uggauccuggucucuggug

SEQ ID NO: 169231 - RNA, 22 nt, Human
uggauccuggucucugguguug

SEQ ID NO: 169232 - RNA, 24 nt, Human
ugggggagacugaagguucaggug

SEQ ID NO: 169233 - RNA, 19 nt, Human
ugucggggggcgggggcgg

SEQ ID NO: 169234 - RNA, 21 nt, Human
ugucggggggcgggggcgggc

SEQ ID NO: 169235 - RNA, 23 nt, Human
uucaacucggagcuaggucucaa

SEQ ID NO: 169236 - RNA, 23 nt, Human
uucauacaaucuucuuuuucaca

SEQ ID NO: 169237 - RNA, 20 nt, Human
uucgcuccaucgaggguccc

SEQ ID NO: 169238 - RNA, 22 nt, Human
uucucagauugcggggaacgug

SEQ ID NO: 169239 - RNA, 18 nt, Human
uuggauccuggucucugg

SEQ ID NO: 169240 - RNA, 19 nt, Human
uuucacaccccagcccuuc

SEQ ID NO: 169241 - RNA, 21 nt, Human
uuucuuuugcaaauuuguccu

SEQ ID NO: 169242 - RNA, 21 nt, Human
uuuuccguucccuagaacagc

SEQ ID NO: 169243 - RNA, 21 nt, Human
accugggguauggacucacug

SEQ ID NO: 169244 - RNA, 20 nt, Human
aggagcccuggugcugccug

SEQ ID NO: 169245 - RNA, 26 nt, Human
agggagaagaaaugagaggcuggcag

SEQ ID NO: 169246 - RNA, 21 nt, Human
agguggggggcaaacuugugg

SEQ ID NO: 169247 - RNA, 22 nt, Human
augaacccaggagucugaccca

SEQ ID NO: 169248 - RNA, 21 nt, Human
caccgccgggggagagggcuc

SEQ ID NO: 169249 - RNA, 20 nt, Human
cacggccccccccccaacca

SEQ ID NO: 169250 - RNA, 19 nt, Human
caggaagaagcugagggca

SEQ ID NO: 169251 - RNA, 23 nt, Human
caggaguuugaguccaggaggcc

SEQ ID NO: 169252 - RNA, 21 nt, Human
caggguggggggcagagaugg

SEQ ID NO: 169253 - RNA, 22 nt, Human
caugaacccaggagucugaccc

SEQ ID NO: 169254 - RNA, 24 nt, Human
ccagcgccuccccucuaauuuccu

SEQ ID NO: 169255 - RNA, 21 nt, Human
ccagggaugggggacggagaa

SEQ ID NO: 169256 - RNA, 23 nt, Human
ccagggaugggggacggagaagg

SEQ ID NO: 169257 - RNA, 22 nt, Human
cccagcccccuuacucuguuca

SEQ ID NO: 169258 - RNA, 24 nt, Human
cccaggaagaagcugagggcagac

SEQ ID NO: 169259 - RNA, 20 nt, Human
cccgcgcggcuccgggaccg

SEQ ID NO: 169260 - RNA, 22 nt, Human
cccgcgcggcuccgggaccgca

SEQ ID NO: 169261 - RNA, 20 nt, Human
cgccccucccuuucugccuu

SEQ ID NO: 169262 - RNA, 20 nt, Human
cgccgcagguccggggcacc

SEQ ID NO: 169263 - RNA, 18 nt, Human
cggccccccccccaacca

SEQ ID NO: 169264 - RNA, 18 nt, Human
cggccccccccccaacca

SEQ ID NO: 169265 - RNA, 19 nt, Human
cggcgccgcagguccgggg

SEQ ID NO: 169266 - RNA, 21 nt, Human
cgggaccgcaggggccgccga

SEQ ID NO: 169267 - RNA, 21 nt, Human
cggggcacaggucgcacaggu

SEQ ID NO: 169268 - RNA, 20 nt, Human
cgggggagagggcucaggcc

SEQ ID NO: 169269 - RNA, 21 nt, Human
cuccaagaaguguccucaggg

SEQ ID NO: 169270 - RNA, 20 nt, Human
cucuguucacgguacccucc

SEQ ID NO: 169271 - RNA, 24 nt, Human
cucuguucacgguacccuccucca

SEQ ID NO: 169272 - RNA, 22 nt, Human
cugcccgcgcggcuccgggacc

SEQ ID NO: 169273 - RNA, 22 nt, Human
cuuuauauggacacggcccccc

SEQ ID NO: 169274 - RNA, 19 nt, Human
gagugucggaaaaacauga

SEQ ID NO: 169275 - RNA, 19 nt, Human
gcaggggccgccgacccgc

SEQ ID NO: 169276 - RNA, 21 nt, Human
gccccccccccaaccaccgcc

SEQ ID NO: 169277 - RNA, 23 nt, Human
gcgcggcuccgggaccgcagggg

SEQ ID NO: 169278 - RNA, 23 nt, Human
ggaagaagcugagggcagacagg

SEQ ID NO: 169279 - RNA, 18 nt, Human
ggacacggcccccccccc

SEQ ID NO: 169280 - RNA, 18 nt, Human
ggagcccuggugcugccu

SEQ ID NO: 169281 - RNA, 19 nt, Human
ggagcccuggugcugccug

SEQ ID NO: 169282 - RNA, 25 nt, Human
ggcagacagguaaguggaggugggg

SEQ ID NO: 169283 - RNA, 22 nt, Human
gggaaaaugaagggacgcuagc

SEQ ID NO: 169284 - RNA, 21 nt, Human
gggaugggggacggagaagga

SEQ ID NO: 169285 - RNA, 25 nt, Human
gggcacaggucgcacaggugccugc

SEQ ID NO: 169286 - RNA, 20 nt, Human
gggggcucucucccaggaag

SEQ ID NO: 169287 - RNA, 25 nt, Human
uaaguggagguggggggcaaacuug

SEQ ID NO: 169288 - RNA, 20 nt, Human
uccaaaggcuuggaacucac

SEQ ID NO: 169289 - RNA, 20 nt, Human
uccaagccaggguggggggc

SEQ ID NO: 169290 - RNA, 25 nt, Human
uccaggaggccacgacgagaggcgc

SEQ ID NO: 169291 - RNA, 18 nt, Human
ucccagcccccuuacucu

SEQ ID NO: 169292 - RNA, 22 nt, Human
uccccucuaauuuccucuccca

SEQ ID NO: 169293 - RNA, 19 nt, Human
ucuaauuuccucucccagc

SEQ ID NO: 169294 - RNA, 26 nt, Human
ucuaauuuccucucccagcccccuua

SEQ ID NO: 169295 - RNA, 19 nt, Human
ucucccagcccccuuacuc

SEQ ID NO: 169296 - RNA, 20 nt, Human
ucucccagcccccuuacuca

SEQ ID NO: 169297 - RNA, 22 nt, Human
ucugccuuuggaucaguuuuuu

SEQ ID NO: 169298 - RNA, 21 nt, Human
ugaaaggggggcucucuccca

SEQ ID NO: 169299 - RNA, 22 nt, Human
ugaacccaggagucugacccag

SEQ ID NO: 169300 - RNA, 19 nt, Human
ugaagggacgcuagcaagu

SEQ ID NO: 169301 - RNA, 22 nt, Human
ugccugucugaaaucuccaaga

SEQ ID NO: 169302 - RNA, 19 nt, Human
ugcuccaagccaggguggg

SEQ ID NO: 169303 - RNA, 18 nt, Human
uggagguggggggcaaac

SEQ ID NO: 169304 - RNA, 20 nt, Human
uggagguggggggcaaacuu

SEQ ID NO: 169305 - RNA, 24 nt, Human
uggcuuccaaaggcuuggaacuca

SEQ ID NO: 169306 - RNA, 22 nt, Human
ugggaaaaugaagggacgcuag

SEQ ID NO: 169307 - RNA, 25 nt, Human
ugggguggggggcgccgcaaagcug

SEQ ID NO: 169308 - RNA, 18 nt, Human
uguccucagggcgugaag

SEQ ID NO: 169309 - RNA, 21 nt, Human
ugucugaaaucuccaagaagu

SEQ ID NO: 169310 - RNA, 21 nt, Human
uuccaaaggcuuggaacucac

SEQ ID NO: 169311 - RNA, 25 nt, Human
uucuuucuuuuuaauuaaaccagcu

SEQ ID NO: 169312 - RNA, 20 nt, Human
uuuuccagaaaaaaguuucu

SEQ ID NO: 169313 - RNA, 21 nt, Human
uuuuuuuuuuuuuuuuccaga

SEQ ID NO: 169314 - RNA, 24 nt, Human
uuuuuuuuuuuuuuuuuuuuccag

SEQ ID NO: 169315 - RNA, 20 nt, Human
aaaacuuuuauuuaccgaug

SEQ ID NO: 169316 - RNA, 24 nt, Human
aaaauacccacugaaaaagucuaa

SEQ ID NO: 169317 - RNA, 23 nt, Human
aaaauuuucccccacuucugcca

SEQ ID NO: 169318 - RNA, 19 nt, Human
aaacaggagccuugcuaua

SEQ ID NO: 169319 - RNA, 21 nt, Human
aagacaaaacauaacagaaga

SEQ ID NO: 169320 - RNA, 23 nt, Human
aaggaagaggaggaacauggaag

SEQ ID NO: 169321 - RNA, 21 nt, Human
aauacaaaaaaaaaaaaagga

SEQ ID NO: 169322 - RNA, 21 nt, Human
acaaaacauaacagaagaggc

SEQ ID NO: 169323 - RNA, 21 nt, Human
acacggcaaauauugccaaca

SEQ ID NO: 169324 - RNA, 24 nt, Human
acacggcaaauauugccaacaaag

SEQ ID NO: 169325 - RNA, 18 nt, Human
agacaaaacauaacagaa

SEQ ID NO: 169326 - RNA, 25 nt, Human
agagguggaacccuuuucuucugcc

SEQ ID NO: 169327 - RNA, 21 nt, Human
aggaaaaaauacacaaaaggc

SEQ ID NO: 169328 - RNA, 22 nt, Human
aggaaaaaauacacaaaaggca

SEQ ID NO: 169329 - RNA, 19 nt, Human
aggaacauggaaggggacc

SEQ ID NO: 169330 - RNA, 21 nt, Human
aggaggaacauggaaggggac

SEQ ID NO: 169331 - RNA, 25 nt, Human
aguuuuuaaaagugccuuaaccuuu

SEQ ID NO: 169332 - RNA, 22 nt, Human
auuuuuguucuuuuuuuaggaa

SEQ ID NO: 169333 - RNA, 23 nt, Human
caaaaggcaaaacauccucaaau

SEQ ID NO: 169334 - RNA, 21 nt, Human
cacagcaccgucucaggcggg

SEQ ID NO: 169335 - RNA, 24 nt, Human
cacggcaaauauugccaacaaagu

SEQ ID NO: 169336 - RNA, 22 nt, Human
cagaaaaauacccacugaaaaa

SEQ ID NO: 169337 - RNA, 19 nt, Human
cagaagaggcugaagcgaa

SEQ ID NO: 169338 - RNA, 24 nt, Human
cagccaaaauacaaaaaaaaaaaa

SEQ ID NO: 169339 - RNA, 26 nt, Human
caggaucaaaaacuuuuauuuaccga

SEQ ID NO: 169340 - RNA, 24 nt, Human
cauaacagaagaggcugaagcgaa

SEQ ID NO: 169341 - RNA, 19 nt, Human
cauuggccggaaggagggg

SEQ ID NO: 169342 - RNA, 24 nt, Human
ccaacaaaguuacaccauuaauac

SEQ ID NO: 169343 - RNA, 22 nt, Human
ccaagacauucuuucaaaaaaa

SEQ ID NO: 169344 - RNA, 23 nt, Human
ccacuucugccauuggccggaag

SEQ ID NO: 169345 - RNA, 25 nt, Human
cccccgccgccgccgccgccgccgg

SEQ ID NO: 169346 - RNA, 19 nt, Human
ccccgccgccgccgccgcc

SEQ ID NO: 169347 - RNA, 18 nt, Human
ccccugcacagcaccguc

SEQ ID NO: 169348 - RNA, 26 nt, Human
cccgcaauccugaauccgcgcgguca

SEQ ID NO: 169349 - RNA, 18 nt, Human
ccgccgccgccgccgccg

SEQ ID NO: 169350 - RNA, 25 nt, Human
ccgccgccgccgccgccgccgccgg

SEQ ID NO: 169351 - RNA, 22 nt, Human
ccgccgccgccgccgccgccgu

SEQ ID NO: 169352 - RNA, 23 nt, Human
ccgccgccgccgccgccgugcgg

SEQ ID NO: 169353 - RNA, 18 nt, Human
ccgccgccgccgccgugc

SEQ ID NO: 169354 - RNA, 22 nt, Human
ccgccgugcgguggcugcugcu

SEQ ID NO: 169355 - RNA, 18 nt, Human
ccgcgccgccucccccgc

SEQ ID NO: 169356 - RNA, 21 nt, Human
ccugcaaaagacggcucuaaa

SEQ ID NO: 169357 - RNA, 26 nt, Human
ccuugccaaaaacuccgguuggggag

SEQ ID NO: 169358 - RNA, 21 nt, Human
cgagaagaaagcaguuucuug

SEQ ID NO: 169359 - RNA, 18 nt, Human
cgccgaagacaucgggug

SEQ ID NO: 169360 - RNA, 26 nt, Human
cgccgccucccccgccgccgccgccg

SEQ ID NO: 169361 - RNA, 22 nt, Human
cgcucccugcaaaagacggcuc

SEQ ID NO: 169362 - RNA, 23 nt, Human
cgguuauaccucgagaagaaagc

SEQ ID NO: 169363 - RNA, 21 nt, Human
cucccccgccgccgccgccgc

SEQ ID NO: 169364 - RNA, 20 nt, Human
cuccuugccaaaaacuccgg

SEQ ID NO: 169365 - RNA, 23 nt, Human
cugaaaaagucuaaauaaaauuc

SEQ ID NO: 169366 - RNA, 20 nt, Human
cuucauauuauauauauauu

SEQ ID NO: 169367 - RNA, 18 nt, Human
cuucugccauuggccgga

SEQ ID NO: 169368 - RNA, 19 nt, Human
gacuccuugccaaaaacuc

SEQ ID NO: 169369 - RNA, 24 nt, Human
gagggagugaggaaggaggugcca

SEQ ID NO: 169370 - RNA, 18 nt, Human
ggaggaacauggaagggg

SEQ ID NO: 169371 - RNA, 18 nt, Human
ggaggagccuacgcggug

SEQ ID NO: 169372 - RNA, 19 nt, Human
ggaggcggacgcccggacg

SEQ ID NO: 169373 - RNA, 25 nt, Human
ggagguggggagggagaucgggagg

SEQ ID NO: 169374 - RNA, 27 nt, Human
ggagguggggagggagaucgggaggga

SEQ ID NO: 169375 - RNA, 18 nt, Human
ggcuuccgaaaugcaagu

SEQ ID NO: 169376 - RNA, 23 nt, Human
gggagacagaaaaauacccacug

SEQ ID NO: 169377 - RNA, 24 nt, Human
gggagacagaaaaauacccacuga

SEQ ID NO: 169378 - RNA, 19 nt, Human
guccagggucccugugacc

SEQ ID NO: 169379 - RNA, 20 nt, Human
gugugggugcggggcuuucc

SEQ ID NO: 169380 - RNA, 18 nt, Human
guucgcacaaagauccac

SEQ ID NO: 169381 - RNA, 23 nt, Human
uaaaauucaagacaaaacauaac

SEQ ID NO: 169382 - RNA, 18 nt, Human
uacaaaaaaaaaaaaagg

SEQ ID NO: 169383 - RNA, 25 nt, Human
uacaccauuaauacugauaaacgga

SEQ ID NO: 169384 - RNA, 22 nt, Human
uacaguagagguugggagacag

SEQ ID NO: 169385 - RNA, 19 nt, Human
uagcagccaaaauacaaaa

SEQ ID NO: 169386 - RNA, 24 nt, Human
ucaaauacgugucacaaaugcugc

SEQ ID NO: 169387 - RNA, 26 nt, Human
ucaccgggccguccuagucccugcgu

SEQ ID NO: 169388 - RNA, 23 nt, Human
ucccccgccgccgccgccgccgc

SEQ ID NO: 169389 - RNA, 20 nt, Human
uccgcgcggucaccgggccg

SEQ ID NO: 169390 - RNA, 21 nt, Human
ucguucucggaccagaaaguu

SEQ ID NO: 169391 - RNA, 23 nt, Human
ucuaaaaauuuucccccacuucu

SEQ ID NO: 169392 - RNA, 21 nt, Human
ucuugugccgguccagggucc

SEQ ID NO: 169393 - RNA, 22 nt, Human
ugaaaaagucuaaauaaaauuc

SEQ ID NO: 169394 - RNA, 19 nt, Human
ugaagcgaaggaagaggag

SEQ ID NO: 169395 - RNA, 23 nt, Human
ugaagcgaaggaagaggaggaac

SEQ ID NO: 169396 - RNA, 20 nt, Human
ugaggaaggaggugccaacc

SEQ ID NO: 169397 - RNA, 24 nt, Human
ugaggaaggaggugccaaccgcag

SEQ ID NO: 169398 - RNA, 22 nt, Human
ugagggagugaggaaggaggug

SEQ ID NO: 169399 - RNA, 24 nt, Human
ugcuauaguuuuuaaaagugccuu

SEQ ID NO: 169400 - RNA, 18 nt, Human
uggaacccuuuucuucug

SEQ ID NO: 169401 - RNA, 18 nt, Human
uggaaggggacggaggcg

SEQ ID NO: 169402 - RNA, 21 nt, Human
uggauaucuaaaaaaaauucu

SEQ ID NO: 169403 - RNA, 19 nt, Human
uggggagggagaucgggag

SEQ ID NO: 169404 - RNA, 21 nt, Human
uggggagggagaucgggaggg

SEQ ID NO: 169405 - RNA, 19 nt, Human
ugucacaaaugcugcacuc

SEQ ID NO: 169406 - RNA, 18 nt, Human
uucauauuauauauauau

SEQ ID NO: 169407 - RNA, 22 nt, Human
uucuaaaaauuuucccccacuu

SEQ ID NO: 169408 - RNA, 18 nt, Human
uugauuauuagggaaaga

SEQ ID NO: 169409 - RNA, 18 nt, Human
uugccaaaaacuccgguu

SEQ ID NO: 169410 - RNA, 22 nt, Human
uuggccggaaggagggggaccu

SEQ ID NO: 169411 - RNA, 18 nt, Human
uuuacaauggauaucuaa

SEQ ID NO: 169412 - RNA, 21 nt, Human
uuuaggaaaaaauacacaaaa

SEQ ID NO: 169413 - RNA, 20 nt, Human
aacagugaccaacgcgaucc

SEQ ID NO: 169414 - RNA, 25 nt, Human
aagaggcuuucuugaaaucuugugc

SEQ ID NO: 169415 - RNA, 19 nt, Human
acaagaagaggcuuucuug

SEQ ID NO: 169416 - RNA, 21 nt, Human
acaauacugaaaaccacuuuc

SEQ ID NO: 169417 - RNA, 19 nt, Human
acacaaguuuucuuagaca

SEQ ID NO: 169418 - RNA, 20 nt, Human
agcggccaucgcuuggccuc

SEQ ID NO: 169419 - RNA, 24 nt, Human
auaagugcaaauauauccuccuuu

SEQ ID NO: 169420 - RNA, 22 nt, Human
auccuccuuuuaaaauacaagc

SEQ ID NO: 169421 - RNA, 26 nt, Human
caagaagaggcuuucuugaaaucuug

SEQ ID NO: 169422 - RNA, 18 nt, Human
cacacacacacacacaca

SEQ ID NO: 169423 - RNA, 27 nt, Human
cacacacacacacacacaacuugucug

SEQ ID NO: 169424 - RNA, 18 nt, Human
cagcaguaggcaaauaac

SEQ ID NO: 169425 - RNA, 19 nt, Human
cagcuaggcaacaagaaga

SEQ ID NO: 169426 - RNA, 19 nt, Human
cccagaagcccugcgagcg

SEQ ID NO: 169427 - RNA, 23 nt, Human
cccagaagcccugcgagcgcccu

SEQ ID NO: 169428 - RNA, 20 nt, Human
ccgcgagggcgggccccggg

SEQ ID NO: 169429 - RNA, 25 nt, Human
ccggagcggggucggcccagaagcc

SEQ ID NO: 169430 - RNA, 19 nt, Human
ccugcgagcgcccuagccc

SEQ ID NO: 169431 - RNA, 21 nt, Human
ccuuacgcauggcacaucuuc

SEQ ID NO: 169432 - RNA, 18 nt, Human
cuagcccgccgcccgggc

SEQ ID NO: 169433 - RNA, 20 nt, Human
cucugaggaggggagaggag

SEQ ID NO: 169434 - RNA, 19 nt, Human
cugaaggcaacgaagaucc

SEQ ID NO: 169435 - RNA, 21 nt, Human
gaaggcaacgaagaucccaca

SEQ ID NO: 169436 - RNA, 18 nt, Human
gacccgggagcgaggccg

SEQ ID NO: 169437 - RNA, 24 nt, Human
gcuaaguggcagguguguggcuua

SEQ ID NO: 169438 - RNA, 22 nt, Human
ggagcggggucggcccagaagc

SEQ ID NO: 169439 - RNA, 18 nt, Human
ggaggggagaggagagag

SEQ ID NO: 169440 - RNA, 22 nt, Human
uacugcuauccgcgugcaugug

SEQ ID NO: 169441 - RNA, 27 nt, Human
uagacacacacacacacacacaacuug

SEQ ID NO: 169442 - RNA, 22 nt, Human
ucccaccugagucugcccucuc

SEQ ID NO: 169443 - RNA, 24 nt, Human
uccuccuuuuaaaauacaagcaaa

SEQ ID NO: 169444 - RNA, 20 nt, Human
ucggcccagaagcccugcga

SEQ ID NO: 169445 - RNA, 19 nt, Human
ugaggaggggagaggagag

SEQ ID NO: 169446 - RNA, 18 nt, Human
uggugguagaaaacaacc

SEQ ID NO: 169447 - RNA, 21 nt, Human
ugucugcuuuuuucacacccu

SEQ ID NO: 169448 - RNA, 22 nt, Human
uucuuccagcaguaggcaaaua

SEQ ID NO: 169449 - RNA, 21 nt, Human
uucuuuggcaccuguauccaa

SEQ ID NO: 169450 - RNA, 21 nt, Human
uuucuugaaaucuugugcuua

SEQ ID NO: 169451 - RNA, 21 nt, Human
uuuggcaccuguauccaaaug

SEQ ID NO: 169452 - RNA, 31 nt, Human
uuuucuuagacacacacacacacacacagug

SEQ ID NO: 169453 - RNA, 18 nt, Human
aaacaacccuagagacug

SEQ ID NO: 169454 - RNA, 21 nt, Human
aaacaacccuagagacugaac

SEQ ID NO: 169455 - RNA, 30 nt, Human
aagaaaaaaaaacaguucuuuaaagaaaaa

SEQ ID NO: 169456 - RNA, 18 nt, Human
aagcagcaaccaccccuc

SEQ ID NO: 169457 - RNA, 24 nt, Human
aaguaaacaaaagaaaaaaaaaca

SEQ ID NO: 169458 - RNA, 22 nt, Human
aauuuuguccccuucugauuca

SEQ ID NO: 169459 - RNA, 20 nt, Human
acaacacaaacugaaggcaa

SEQ ID NO: 169460 - RNA, 19 nt, Human
acagcggcgcgcgggcggc

SEQ ID NO: 169461 - RNA, 18 nt, Human
acagucuggucccaggga

SEQ ID NO: 169462 - RNA, 24 nt, Human
acaucaaaauauacacaacacaaa

SEQ ID NO: 169463 - RNA, 22 nt, Human
accacauacaucaaaauauaca

SEQ ID NO: 169464 - RNA, 23 nt, Human
agacaacauuaacaaucacucaa

SEQ ID NO: 169465 - RNA, 22 nt, Human
agcaaaagcagcaaccaccccu

SEQ ID NO: 169466 - RNA, 21 nt, Human
aggcgcauuuucuagaaccca

SEQ ID NO: 169467 - RNA, 18 nt, Human
caagaaauuuuaagacaa

SEQ ID NO: 169468 - RNA, 18 nt, Human
cacaguaucacaaucaag

SEQ ID NO: 169469 - RNA, 23 nt, Human
cacuuacagucuggucccaggga

SEQ ID NO: 169470 - RNA, 23 nt, Human
cagcagcgcaguuggacgcaggc

SEQ ID NO: 169471 - RNA, 18 nt, Human
cauugcaccucgcugaca

SEQ ID NO: 169472 - RNA, 27 nt, Human
cauugcaccucgcugacacuccacacc

SEQ ID NO: 169473 - RNA, 18 nt, Human
ccgaacggggcgcggggg

SEQ ID NO: 169474 - RNA, 18 nt, Human
cggcgcgcgggcggcgcg

SEQ ID NO: 169475 - RNA, 18 nt, Human
cggcgcgggagcgggaca

SEQ ID NO: 169476 - RNA, 20 nt, Human
cggcggcggcggcgcgggag

SEQ ID NO: 169477 - RNA, 18 nt, Human
cgucggggggaaacggcg

SEQ ID NO: 169478 - RNA, 26 nt, Human
cuaaaaguaaacaaaagaaaaaaaaa

SEQ ID NO: 169479 - RNA, 19 nt, Human
cuacaauguauucucccca

SEQ ID NO: 169480 - RNA, 19 nt, Human
cucaggaauuaaaaaaaaa

SEQ ID NO: 169481 - RNA, 19 nt, Human
gaacaaacguacagaaaug

SEQ ID NO: 169482 - RNA, 20 nt, Human
gaacaaacguacagaaaugg

SEQ ID NO: 169483 - RNA, 21 nt, Human
gcggcagcggcggcacugagc

SEQ ID NO: 169484 - RNA, 21 nt, Human
gcggcgcgggagcgggacagc

SEQ ID NO: 169485 - RNA, 18 nt, Human
ggaaacggcggcggcggc

SEQ ID NO: 169486 - RNA, 18 nt, Human
ggaaacggcggcggcggc

SEQ ID NO: 169487 - RNA, 22 nt, Human
ggccaaaauaauuucuugggca

SEQ ID NO: 169488 - RNA, 21 nt, Human
gggacagcggcgcgcgggccg

SEQ ID NO: 169489 - RNA, 20 nt, Human
gggcgcgggggggcggcggg

SEQ ID NO: 169490 - RNA, 19 nt, Human
gggcggcagcggcggcacu

SEQ ID NO: 169491 - RNA, 20 nt, Human
gggggaaacggcggcggcgg

SEQ ID NO: 169492 - RNA, 24 nt, Human
gggggcggcgggcggcagcggcgg

SEQ ID NO: 169493 - RNA, 21 nt, Human
guaaacaaaagaaaaaaaaac

SEQ ID NO: 169494 - RNA, 24 nt, Human
uaaaagugaccuguuagugaccac

SEQ ID NO: 169495 - RNA, 21 nt, Human
uaaagaaaaggagaaaacaau

SEQ ID NO: 169496 - RNA, 18 nt, Human
uacacaacacaaacugaa

SEQ ID NO: 169497 - RNA, 19 nt, Human
uagcaaaagcagcaaccac

SEQ ID NO: 169498 - RNA, 19 nt, Human
uccccacauugcaccucgc

SEQ ID NO: 169499 - RNA, 19 nt, Human
ugccgaacggggcgcgggg

SEQ ID NO: 169500 - RNA, 25 nt, Human
ugggcaccuuuacuacgaaugcuuu

SEQ ID NO: 169501 - RNA, 19 nt, Human
uguagcaaaagcagcaacc

SEQ ID NO: 169502 - RNA, 23 nt, Human
uuguuagaauaauaaacaacccu

SEQ ID NO: 169503 - RNA, 18 nt, Human
uuuaaauacaaauuacag

SEQ ID NO: 169504 - RNA, 24 nt, Human
aaaaaaaaggaagcgcuuauccaa

SEQ ID NO: 169505 - RNA, 20 nt, Human
aaacagaagccuuaaccagu

SEQ ID NO: 169506 - RNA, 18 nt, Human
aaacugggcuuuacaaga

SEQ ID NO: 169507 - RNA, 20 nt, Human
aacauccaccucuccugggc

SEQ ID NO: 169508 - RNA, 23 nt, Human
aaccaauucuccauccuggccuc

SEQ ID NO: 169509 - RNA, 24 nt, Human
aagaaaacaaacaacacuucccag

SEQ ID NO: 169510 - RNA, 23 nt, Human
aagaaaauaagaaaacaaacaac

SEQ ID NO: 169511 - RNA, 24 nt, Human
aagcagaauaaggacuuggaccag

SEQ ID NO: 169512 - RNA, 18 nt, Human
aaugcugucucuccaugg

SEQ ID NO: 169513 - RNA, 20 nt, Human
accuggauuugacucuuagc

SEQ ID NO: 169514 - RNA, 23 nt, Human
acugcuuuucucucuggcauguc

SEQ ID NO: 169515 - RNA, 18 nt, Human
acugguccaugacaugca

SEQ ID NO: 169516 - RNA, 21 nt, Human
acugguccaugacaugcacac

SEQ ID NO: 169517 - RNA, 20 nt, Human
agacccccugugaggguggg

SEQ ID NO: 169518 - RNA, 23 nt, Human
agcaccugccacuguuagugcug

SEQ ID NO: 169519 - RNA, 19 nt, Human
agggccaccagggcugagu

SEQ ID NO: 169520 - RNA, 21 nt, Human
caaaaacaaggagaaauccca

SEQ ID NO: 169521 - RNA, 21 nt, Human
caaaaggagugucugcaggua

SEQ ID NO: 169522 - RNA, 22 nt, Human
cacacaggaaacugggcuuuac

SEQ ID NO: 169523 - RNA, 18 nt, Human
cacaccacuccucucacu

SEQ ID NO: 169524 - RNA, 21 nt, Human
cagaauaaggacuuggaccag

SEQ ID NO: 169525 - RNA, 22 nt, Human
cagacaaacauccaccucuccu

SEQ ID NO: 169526 - RNA, 24 nt, Human
cagcaccugccacuguuagugcug

SEQ ID NO: 169527 - RNA, 23 nt, Human
ccaauucuccauccuggccucca

SEQ ID NO: 169528 - RNA, 20 nt, Human
ccaccguggggcuggcaugg

SEQ ID NO: 169529 - RNA, 20 nt, Human
cccaagagaucacacagaga

SEQ ID NO: 169530 - RNA, 24 nt, Human
cuccugggcuaaaaaaaaggaagc

SEQ ID NO: 169531 - RNA, 21 nt, Human
cucucuggcauguccaccugg

SEQ ID NO: 169532 - RNA, 23 nt, Human
cugcuuuucucucuggcaugucc

SEQ ID NO: 169533 - RNA, 22 nt, Human
cuggggugggaggauuuagggg

SEQ ID NO: 169534 - RNA, 25 nt, Human
gaaaacaaacaacacuucccaggua

SEQ ID NO: 169535 - RNA, 24 nt, Human
gaaaauaagaaaacaaacaacacu

SEQ ID NO: 169536 - RNA, 24 nt, Human
gcccaaggccccucccuugaggcc

SEQ ID NO: 169537 - RNA, 24 nt, Human
gcuauauuugccauagcaagcuuu

SEQ ID NO: 169538 - RNA, 20 nt, Human
ggaaauguuacuuaaccucc

SEQ ID NO: 169539 - RNA, 22 nt, Human
ggagaaaucccaagagaucaca

SEQ ID NO: 169540 - RNA, 20 nt, Human
ggagccaccugccuggcacc

SEQ ID NO: 169541 - RNA, 21 nt, Human
gggaugcaucgcacaugucag

SEQ ID NO: 169542 - RNA, 19 nt, Human
gggcugggcuggccggagc

SEQ ID NO: 169543 - RNA, 18 nt, Human
gguggauuccucggaggc

SEQ ID NO: 169544 - RNA, 22 nt, Human
gucugugugugggccuaugugu

SEQ ID NO: 169545 - RNA, 23 nt, Human
uagcaagcuuuucacacugaccu

SEQ ID NO: 169546 - RNA, 22 nt, Human
ucaagguuucuggagggcuggg

SEQ ID NO: 169547 - RNA, 21 nt, Human
uccaccucuccugggcuaaaa

SEQ ID NO: 169548 - RNA, 19 nt, Human
ucccuggaucugcucaagg

SEQ ID NO: 169549 - RNA, 21 nt, Human
ucccuggaucugcucaagguu

SEQ ID NO: 169550 - RNA, 25 nt, Human
ucccuggaucugcucaagguuucug

SEQ ID NO: 169551 - RNA, 26 nt, Human
uccgcagucauggaccaccguggggc

SEQ ID NO: 169552 - RNA, 20 nt, Human
uccugcacuaaggccacugg

SEQ ID NO: 169553 - RNA, 24 nt, Human
ucggaggcuccugcuuaugucugg

SEQ ID NO: 169554 - RNA, 23 nt, Human
ucucuggcauguccaccuggcuc

SEQ ID NO: 169555 - RNA, 22 nt, Human
ucucuuggaagauucagccauc

SEQ ID NO: 169556 - RNA, 22 nt, Human
ucugcucaagguuucuggaggg

SEQ ID NO: 169557 - RNA, 21 nt, Human
ucugugugugggccuaugugu

SEQ ID NO: 169558 - RNA, 21 nt, Human
ugagccucaguuccucaucug

SEQ ID NO: 169559 - RNA, 23 nt, Human
ugcaaaguuggugagucugugug

SEQ ID NO: 169560 - RNA, 23 nt, Human
ugccacuguuagugcugcucuuc

SEQ ID NO: 169561 - RNA, 18 nt, Human
ugccuggcaccugcaccc

SEQ ID NO: 169562 - RNA, 19 nt, Human
uggcauguccaccuggcuc

SEQ ID NO: 169563 - RNA, 19 nt, Human
uggcuacucaaccaauucu

SEQ ID NO: 169564 - RNA, 25 nt, Human
ugggcuuuacaagauuuuacagaug

SEQ ID NO: 169565 - RNA, 19 nt, Human
uggggugggaggauuuagg

SEQ ID NO: 169566 - RNA, 28 nt, Human
uggggugguuugugaaccuuacggggug

SEQ ID NO: 169567 - RNA, 20 nt, Human
ugucugggcaguuccgcagu

SEQ ID NO: 169568 - RNA, 19 nt, Human
uuccucaucuguucaaugg

SEQ ID NO: 169569 - RNA, 20 nt, Human
uugaggccauuguuuucuca

SEQ ID NO: 169570 - RNA, 19 nt, Human
uugagugguagcaaaagga

SEQ ID NO: 169571 - RNA, 23 nt, Human
uuucucagacaaacauccaccuc

SEQ ID NO: 169572 - RNA, 19 nt, Human
uuucuggagggcuggggag

SEQ ID NO: 169573 - RNA, 22 nt, Human
aaaaaaaaauagaaaagaccug

SEQ ID NO: 169574 - RNA, 18 nt, Human
aaaaaaacuaccagaggc

SEQ ID NO: 169575 - RNA, 21 nt, Human
aaacaaaaaaaaauagaaaag

SEQ ID NO: 169576 - RNA, 24 nt, Human
aaacagguaguacaaacaaaaguu

SEQ ID NO: 169577 - RNA, 18 nt, Human
aaaccacucaagucccau

SEQ ID NO: 169578 - RNA, 21 nt, Human
aaacuaccagaggccacauaa

SEQ ID NO: 169579 - RNA, 25 nt, Human
aacaagagcaaagaauuaugagggg

SEQ ID NO: 169580 - RNA, 23 nt, Human
aaccacucaagucccauuuuuaa

SEQ ID NO: 169581 - RNA, 21 nt, Human
aagaaagacaccaagccauuu

SEQ ID NO: 169582 - RNA, 28 nt, Human
aagaacacaagaggaacagugcugugca

SEQ ID NO: 169583 - RNA, 20 nt, Human
aagagggggagaacgcagca

SEQ ID NO: 169584 - RNA, 24 nt, Human
aagcagaugaaauuucuuuaaaau

SEQ ID NO: 169585 - RNA, 23 nt, Human
aagucccaacaauaacaucaaaa

SEQ ID NO: 169586 - RNA, 21 nt, Human
aauggagauucaguucuuugu

SEQ ID NO: 169587 - RNA, 20 nt, Human
acaaagcaaucauguacaau

SEQ ID NO: 169588 - RNA, 22 nt, Human
acaggaaaaaaacuaccagagg

SEQ ID NO: 169589 - RNA, 18 nt, Human
accagggccugaaacguu

SEQ ID NO: 169590 - RNA, 18 nt, Human
acccccgccccuccccca

SEQ ID NO: 169591 - RNA, 22 nt, Human
accuccaccuggacugaaacaa

SEQ ID NO: 169592 - RNA, 26 nt, Human
agaaaaaccaaaaacacacacaaaua

SEQ ID NO: 169593 - RNA, 19 nt, Human
agaaaacagguaguacaaa

SEQ ID NO: 169594 - RNA, 20 nt, Human
agaaaacagguaguacaaac

SEQ ID NO: 169595 - RNA, 20 nt, Human
agaccuguacaaagcuggca

SEQ ID NO: 169596 - RNA, 19 nt, Human
agagguauaauuacccaga

SEQ ID NO: 169597 - RNA, 20 nt, Human
agaggucucuagagaagacu

SEQ ID NO: 169598 - RNA, 22 nt, Human
agcggacggaaacugggaggaa

SEQ ID NO: 169599 - RNA, 19 nt, Human
aggaacacuuguguucuug

SEQ ID NO: 169600 - RNA, 26 nt, Human
aggcagaacuacaaaaccaaccucca

SEQ ID NO: 169601 - RNA, 18 nt, Human
agggggcgcgaagggacg

SEQ ID NO: 169602 - RNA, 21 nt, Human
auaggacacaaagccaauuaa

SEQ ID NO: 169603 - RNA, 19 nt, Human
aucaaaaucccucguuuga

SEQ ID NO: 169604 - RNA, 19 nt, Human
aucccucguuugacaaagg

SEQ ID NO: 169605 - RNA, 23 nt, Human
augcaauuaacauacaagacaaa

SEQ ID NO: 169606 - RNA, 24 nt, Human
auggagaugcagaauggagauuca

SEQ ID NO: 169607 - RNA, 21 nt, Human
auggcacaguccuuaucuaca

SEQ ID NO: 169608 - RNA, 23 nt, Human
caaaaaaaaauagaaaagaccug

SEQ ID NO: 169609 - RNA, 27 nt, Human
caaaauggugaaguggaucaaaauccc

SEQ ID NO: 169610 - RNA, 21 nt, Human
caaagcaagugugaugugggc

SEQ ID NO: 169611 - RNA, 21 nt, Human
caaccuccaccuggacugaaa

SEQ ID NO: 169612 - RNA, 21 nt, Human
caagacaaagcaagugugaug

SEQ ID NO: 169613 - RNA, 22 nt, Human
caagaggaacagugcugugcac

SEQ ID NO: 169614 - RNA, 20 nt, Human
caauuauagcaaagauuguu

SEQ ID NO: 169615 - RNA, 27 nt, Human
cacacacaaauacaaucuguaucuacu

SEQ ID NO: 169616 - RNA, 21 nt, Human
caccuggacugaaacaagagc

SEQ ID NO: 169617 - RNA, 23 nt, Human
cagaacuacaaaaccaaccucca

SEQ ID NO: 169618 - RNA, 24 nt, Human
cagaacuuaacuucgcggggccau

SEQ ID NO: 169619 - RNA, 26 nt, Human
caugugaauucuguggcaacgugaac

SEQ ID NO: 169620 - RNA, 19 nt, Human
ccaagagggggagaacgca

SEQ ID NO: 169621 - RNA, 19 nt, Human
ccaagccaaugaagaugca

SEQ ID NO: 169622 - RNA, 20 nt, Human
ccaaggcuguucaauggaga

SEQ ID NO: 169623 - RNA, 22 nt, Human
ccacacugccaggcugugccca

SEQ ID NO: 169624 - RNA, 20 nt, Human
cccaccucaaggagaggcca

SEQ ID NO: 169625 - RNA, 19 nt, Human
cccccagccgcaggagagc

SEQ ID NO: 169626 - RNA, 20 nt, Human
cccccgccccucccccagcc

SEQ ID NO: 169627 - RNA, 22 nt, Human
cccuccuuccacuuaaacuucc

SEQ ID NO: 169628 - RNA, 24 nt, Human
ccgggccggggcagagccugcgcc

SEQ ID NO: 169629 - RNA, 25 nt, Human
ccugcacacauugggcaaacauccu

SEQ ID NO: 169630 - RNA, 20 nt, Human
cgaaaggaaaaaaaggaggg

SEQ ID NO: 169631 - RNA, 19 nt, Human
cgcacggacuggacggccg

SEQ ID NO: 169632 - RNA, 23 nt, Human
cgcuugcucuccccagcggcgcg

SEQ ID NO: 169633 - RNA, 20 nt, Human
cggcgcgcccgcugcgcugc

SEQ ID NO: 169634 - RNA, 20 nt, Human
cuaaaaccagaaaagaaacu

SEQ ID NO: 169635 - RNA, 24 nt, Human
cuaaaaccagaaaagaaacuucuc

SEQ ID NO: 169636 - RNA, 19 nt, Human
cuaaauaggacacaaagcc

SEQ ID NO: 169637 - RNA, 23 nt, Human
cugcacacauugggcaaacaucc

SEQ ID NO: 169638 - RNA, 21 nt, Human
cuuccacuuaaacuuccacag

SEQ ID NO: 169639 - RNA, 25 nt, Human
gaaaaaccaaaaacacacacaaaua

SEQ ID NO: 169640 - RNA, 24 nt, Human
gaacaaaugggggcucugagguuc

SEQ ID NO: 169641 - RNA, 18 nt, Human
gacuugaaaauacugaug

SEQ ID NO: 169642 - RNA, 18 nt, Human
gagccugcgccgcgcucc

SEQ ID NO: 169643 - RNA, 23 nt, Human
gaguaucggaacaagaacgugga

SEQ ID NO: 169644 - RNA, 24 nt, Human
gcagaaaacagguaguacaaacaa

SEQ ID NO: 169645 - RNA, 18 nt, Human
gcgcccgcugcgcugcug

SEQ ID NO: 169646 - RNA, 18 nt, Human
gcgcuccagcugacaggg

SEQ ID NO: 169647 - RNA, 22 nt, Human
gcggcgcgcccgcugcgcugcu

SEQ ID NO: 169648 - RNA, 19 nt, Human
gcuccagcugacagggccg

SEQ ID NO: 169649 - RNA, 18 nt, Human
ggaaacugggaggaaggc

SEQ ID NO: 169650 - RNA, 23 nt, Human
ggaaggacggacggacgccgcgg

SEQ ID NO: 169651 - RNA, 19 nt, Human
ggaggaaggcgcggcggag

SEQ ID NO: 169652 - RNA, 21 nt, Human
ggcaugacuacguccugaugg

SEQ ID NO: 169653 - RNA, 19 nt, Human
ggccagagccgccgggccg

SEQ ID NO: 169654 - RNA, 19 nt, Human
gggagggggcgcgaaggga

SEQ ID NO: 169655 - RNA, 19 nt, Human
gggcagagccugcgccgcg

SEQ ID NO: 169656 - RNA, 23 nt, Human
gggcagagccugcgccgcgcucc

SEQ ID NO: 169657 - RNA, 18 nt, Human
gggcggacggggaggggg

SEQ ID NO: 169658 - RNA, 22 nt, Human
gggcucugagguuccuuguauu

SEQ ID NO: 169659 - RNA, 23 nt, Human
gucagaaacaucacuaaguagca

SEQ ID NO: 169660 - RNA, 24 nt, Human
guccaaggcuguucaauggagaug

SEQ ID NO: 169661 - RNA, 18 nt, Human
uaaaaccagaaaagaaac

SEQ ID NO: 169662 - RNA, 18 nt, Human
uaaaaccagcuaugucuu

SEQ ID NO: 169663 - RNA, 22 nt, Human
uaaacaaaaaaaaauagaaaag

SEQ ID NO: 169664 - RNA, 23 nt, Human
uaaacaaaaaaaaauagaaaaga

SEQ ID NO: 169665 - RNA, 19 nt, Human
uaaauaggacacaaagcca

SEQ ID NO: 169666 - RNA, 20 nt, Human
uaaauucccuccuuccacuu

SEQ ID NO: 169667 - RNA, 25 nt, Human
uaacaaaauaaacaaaaaaaaauag

SEQ ID NO: 169668 - RNA, 27 nt, Human
uaacuuaucaagacaugaggccaaugg

SEQ ID NO: 169669 - RNA, 21 nt, Human
uaagaaacgcaaaguguccau

SEQ ID NO: 169670 - RNA, 18 nt, Human
uaagauuagucagaaaca

SEQ ID NO: 169671 - RNA, 25 nt, Human
uaagucccaacaauaacaucaaaaa

SEQ ID NO: 169672 - RNA, 24 nt, Human
uacaaaaccaaccuccaccuggac

SEQ ID NO: 169673 - RNA, 24 nt, Human
uacaaaaccaaccuccaccuggac

SEQ ID NO: 169674 - RNA, 24 nt, Human
uacaaaacuugaaagcacaccagg

SEQ ID NO: 169675 - RNA, 24 nt, Human
uacaggaaaaaugucuuugcugcc

SEQ ID NO: 169676 - RNA, 18 nt, Human
uacaggcuaaagaaauuu

SEQ ID NO: 169677 - RNA, 25 nt, Human
uaccagaggccacauaauguuugcu

SEQ ID NO: 169678 - RNA, 21 nt, Human
uacuccaugaaguaguaagau

SEQ ID NO: 169679 - RNA, 18 nt, Human
uagaauacaaaaugaaaa

SEQ ID NO: 169680 - RNA, 21 nt, Human
uagagugguggcuguucaaug

SEQ ID NO: 169681 - RNA, 25 nt, Human
uagagugguggcuguucaaugaauc

SEQ ID NO: 169682 - RNA, 27 nt, Human
uagagugguggcuguucaaugaaucuu

SEQ ID NO: 169683 - RNA, 19 nt, Human
uaggaaauaccaagccaau

SEQ ID NO: 169684 - RNA, 19 nt, Human
uaguuauaaauuaagaacu

SEQ ID NO: 169685 - RNA, 25 nt, Human
uaucuacugcuuauauacaaaacuu

SEQ ID NO: 169686 - RNA, 19 nt, Human
ucagagagcuaccaaggau

SEQ ID NO: 169687 - RNA, 19 nt, Human
ucaguuccgcagaaaacag

SEQ ID NO: 169688 - RNA, 19 nt, Human
ucauuuagacuuugucagu

SEQ ID NO: 169689 - RNA, 23 nt, Human
uccaaaaguuuaacaaguccauu

SEQ ID NO: 169690 - RNA, 23 nt, Human
uccacaugacuugaaaauacuga

SEQ ID NO: 169691 - RNA, 19 nt, Human
uccacaugacuugaaaauu

SEQ ID NO: 169692 - RNA, 24 nt, Human
uccgccgcacggacuggacggccg

SEQ ID NO: 169693 - RNA, 21 nt, Human
ucuacaaacauuaugaggccu

SEQ ID NO: 169694 - RNA, 19 nt, Human
ucuacaaaccacucaaguc

SEQ ID NO: 169695 - RNA, 23 nt, Human
ucuauaauacaauaugcuuuuaa

SEQ ID NO: 169696 - RNA, 23 nt, Human
ucugaaaaucuuuucugcaauua

SEQ ID NO: 169697 - RNA, 25 nt, Human
ugaaacaagagcaaagaagggaggc

SEQ ID NO: 169698 - RNA, 21 nt, Human
ugaaacaagagcaaagaauua

SEQ ID NO: 169699 - RNA, 23 nt, Human
ugaaagcacaccaggaucugaaa

SEQ ID NO: 169700 - RNA, 27 nt, Human
ugaaauuuccaauggcacaguccuuau

SEQ ID NO: 169701 - RNA, 18 nt, Human
ugaaguggaucaaaaucc

SEQ ID NO: 169702 - RNA, 22 nt, Human
ugaaguggaucaaaaucccucg

SEQ ID NO: 169703 - RNA, 21 nt, Human
ugaaugcugccccaaauaccu

SEQ ID NO: 169704 - RNA, 18 nt, Human
ugacccccgccccucccc

SEQ ID NO: 169705 - RNA, 21 nt, Human
ugaguuuggcacuucauugua

SEQ ID NO: 169706 - RNA, 25 nt, Human
ugaucuacaaacauuaugaggccuc

SEQ ID NO: 169707 - RNA, 23 nt, Human
ugccuuucccuggacuucacugu

SEQ ID NO: 169708 - RNA, 21 nt, Human
ugcucauuuagacuuugucag

SEQ ID NO: 169709 - RNA, 24 nt, Human
ugcugccccaaauaccugugguuc

SEQ ID NO: 169710 - RNA, 21 nt, Human
uggaagcgcgagcccagaacu

SEQ ID NO: 169711 - RNA, 18 nt, Human
uggcacgggaggaaagug

SEQ ID NO: 169712 - RNA, 22 nt, Human
uggcacgggaggaaagugacag

SEQ ID NO: 169713 - RNA, 22 nt, Human
uggccacacugccaggcugugc

SEQ ID NO: 169714 - RNA, 19 nt, Human
ugggggcucugagguuccu

SEQ ID NO: 169715 - RNA, 23 nt, Human
uguucgcauaaaccacaauacau

SEQ ID NO: 169716 - RNA, 18 nt, Human
uuacugcucacugggaua

SEQ ID NO: 169717 - RNA, 24 nt, Human
uuagguugcuacaggcuaaagaaa

SEQ ID NO: 169718 - RNA, 22 nt, Human
uucccaaacuaaaaccagaaaa

SEQ ID NO: 169719 - RNA, 19 nt, Human
uucuuugugauccgucagu

SEQ ID NO: 169720 - RNA, 19 nt, Human
uuuaaccaagaaaacuaaa

SEQ ID NO: 169721 - RNA, 24 nt, Human
uuuaauaacaguacaaaccagaga

SEQ ID NO: 169722 - RNA, 19 nt, Human
uuuuccaaaaguuuaacaa

SEQ ID NO: 169723 - RNA, 20 nt, Human
aaaaaagccagcacagaaaa

SEQ ID NO: 169724 - RNA, 22 nt, Human
aaaaagaagggaaaacucagaa

SEQ ID NO: 169725 - RNA, 20 nt, Human
aaaaauuaggaagauucaaa

SEQ ID NO: 169726 - RNA, 18 nt, Human
agaaaacaguauaaaaag

SEQ ID NO: 169727 - RNA, 19 nt, Human
agaaaacaguauaaaaaga

SEQ ID NO: 169728 - RNA, 20 nt, Human
aguuuguuaaagagaugaaa

SEQ ID NO: 169729 - RNA, 21 nt, Human
auuugucaaauauucaugguu

SEQ ID NO: 169730 - RNA, 18 nt, Human
caaaaaagccagcacaga

SEQ ID NO: 169731 - RNA, 26 nt, Human
cagaaaacaguauaaaaagaagggaa

SEQ ID NO: 169732 - RNA, 19 nt, Human
cagcacagaaaacaguaua

SEQ ID NO: 169733 - RNA, 22 nt, Human
ccagcacagaaaacaguauaaa

SEQ ID NO: 169734 - RNA, 22 nt, Human
ggaaaacucagaagcuagcuca

SEQ ID NO: 169735 - RNA, 20 nt, Human
gguacugaaucccaaagggc

SEQ ID NO: 169736 - RNA, 21 nt, Human
uaggaagauucaaaaaagcca

SEQ ID NO: 169737 - RNA, 22 nt, Human
uaggaagauucaaaaaagccag

SEQ ID NO: 169738 - RNA, 25 nt, Human
uucccgguuucaacuucauaggagu

SEQ ID NO: 169739 - RNA, 22 nt, Human
aaaaagacauccucucccggcc

SEQ ID NO: 169740 - RNA, 24 nt, Human
aaacaaaaggcaccuaguauguaa

SEQ ID NO: 169741 - RNA, 23 nt, Human
aaagacauccucucccggccucc

SEQ ID NO: 169742 - RNA, 21 nt, Human
aacggccaggccacugcaaca

SEQ ID NO: 169743 - RNA, 18 nt, Human
aagaggaaggagagacca

SEQ ID NO: 169744 - RNA, 23 nt, Human
aagccaaaaacaaaaggcaccua

SEQ ID NO: 169745 - RNA, 21 nt, Human
aagcccuggccccuaggccag

SEQ ID NO: 169746 - RNA, 22 nt, Human
aagcucccaccuccaaccccgg

SEQ ID NO: 169747 - RNA, 22 nt, Human
aaucuaccacccagcacauggg

SEQ ID NO: 169748 - RNA, 21 nt, Human
acaauaagcugggccugagcc

SEQ ID NO: 169749 - RNA, 22 nt, Human
acaccacccaccaggugcaggc

SEQ ID NO: 169750 - RNA, 23 nt, Human
acagagccuuaaaaaagacaucc

SEQ ID NO: 169751 - RNA, 18 nt, Human
acagugagagacccgggg

SEQ ID NO: 169752 - RNA, 26 nt, Human
accauggcgguccugccgcugcagcc

SEQ ID NO: 169753 - RNA, 22 nt, Human
acccagcacauggcaagaccca

SEQ ID NO: 169754 - RNA, 21 nt, Human
accccgggccuuggcuacugg

SEQ ID NO: 169755 - RNA, 21 nt, Human
accgcuggugcucccccucca

SEQ ID NO: 169756 - RNA, 22 nt, Human
agaaccaggaaagccaaaaaca

SEQ ID NO: 169757 - RNA, 22 nt, Human
agacagaaccaggaaagccaaa

SEQ ID NO: 169758 - RNA, 19 nt, Human
agacaggcugaacggccag

SEQ ID NO: 169759 - RNA, 21 nt, Human
agacaggcugaacggccaggc

SEQ ID NO: 169760 - RNA, 26 nt, Human
agaccaaggcacagagccuuaaaaaa

SEQ ID NO: 169761 - RNA, 21 nt, Human
agacguggaaggccaugagug

SEQ ID NO: 169762 - RNA, 21 nt, Human
agcacagugaaggcagggaca

SEQ ID NO: 169763 - RNA, 18 nt, Human
agcauugaagagcaagac

SEQ ID NO: 169764 - RNA, 18 nt, Human
agccaggaggcaggcggg

SEQ ID NO: 169765 - RNA, 21 nt, Human
agccaggaggcaggcggggug

SEQ ID NO: 169766 - RNA, 19 nt, Human
agcucccaccuccaacccc

SEQ ID NO: 169767 - RNA, 19 nt, Human
aggaaagccaaaaacaaaa

SEQ ID NO: 169768 - RNA, 19 nt, Human
aggaagacguggaaggcca

SEQ ID NO: 169769 - RNA, 24 nt, Human
aggaggcccuuugggggacuaggu

SEQ ID NO: 169770 - RNA, 21 nt, Human
aggcaggcgggguguuggggg

SEQ ID NO: 169771 - RNA, 20 nt, Human
aggcaugugaaaugcagcug

SEQ ID NO: 169772 - RNA, 20 nt, Human
aggcccagggucagcggcgg

SEQ ID NO: 169773 - RNA, 23 nt, Human
aggcccucucccuucccagaagg

SEQ ID NO: 169774 - RNA, 22 nt, Human
aggcggcguuggaccgcugguc

SEQ ID NO: 169775 - RNA, 22 nt, Human
aggcggcguuggaccgcuggug

SEQ ID NO: 169776 - RNA, 24 nt, Human
aggcggcguuggaccgcuggugcu

SEQ ID NO: 169777 - RNA, 19 nt, Human
aggcugccagugacuagca

SEQ ID NO: 169778 - RNA, 24 nt, Human
agggagcuggcacugcaggugugg

SEQ ID NO: 169779 - RNA, 23 nt, Human
aggggcagcugccacaggagccc

SEQ ID NO: 169780 - RNA, 19 nt, Human
aucggacacagguauagag

SEQ ID NO: 169781 - RNA, 21 nt, Human
caaacuggcagggcugcagca

SEQ ID NO: 169782 - RNA, 24 nt, Human
cacccucugucccgcaguguccca

SEQ ID NO: 169783 - RNA, 19 nt, Human
caccugcguccggcccggc

SEQ ID NO: 169784 - RNA, 21 nt, Human
cacugccagguccaccuucuc

SEQ ID NO: 169785 - RNA, 21 nt, Human
cagaaccaggaaagccaaaaa

SEQ ID NO: 169786 - RNA, 23 nt, Human
cagcagcuucagcagggccgccg

SEQ ID NO: 169787 - RNA, 18 nt, Human
cagccacccucugucccg

SEQ ID NO: 169788 - RNA, 19 nt, Human
cagccagcagugggccagc

SEQ ID NO: 169789 - RNA, 21 nt, Human
cagcgcacgcaggccugcgcg

SEQ ID NO: 169790 - RNA, 23 nt, Human
cagcggcggccccccuuccucga

SEQ ID NO: 169791 - RNA, 19 nt, Human
cagcugcaaggccaaggcg

SEQ ID NO: 169792 - RNA, 24 nt, Human
caggacaccacccaccaggugcag

SEQ ID NO: 169793 - RNA, 18 nt, Human
caggaggcaggcggggug

SEQ ID NO: 169794 - RNA, 21 nt, Human
cagugcgggcuccagcagcuu

SEQ ID NO: 169795 - RNA, 18 nt, Human
ccaaccccgggccuuggc

SEQ ID NO: 169796 - RNA, 27 nt, Human
ccaagagaggagacuccgcacaccaca

SEQ ID NO: 169797 - RNA, 23 nt, Human
ccacccagcacauggcaagaccc

SEQ ID NO: 169798 - RNA, 18 nt, Human
ccaccgcucggcaucucg

SEQ ID NO: 169799 - RNA, 23 nt, Human
ccaccuccaccacugccaggucc

SEQ ID NO: 169800 - RNA, 24 nt, Human
ccacuccguguuccgaagcccgag

SEQ ID NO: 169801 - RNA, 22 nt, Human
ccacugcaacagugagagaccc

SEQ ID NO: 169802 - RNA, 23 nt, Human
ccaggcagaggcccucucccuuc

SEQ ID NO: 169803 - RNA, 22 nt, Human
ccaggcagcgcacacaauaagc

SEQ ID NO: 169804 - RNA, 22 nt, Human
ccagucuagacagaaccaggaa

SEQ ID NO: 169805 - RNA, 28 nt, Human
cccaccuccaccacugccaaccccuagg

SEQ ID NO: 169806 - RNA, 19 nt, Human
cccacugugagccacaggg

SEQ ID NO: 169807 - RNA, 24 nt, Human
ccccgguagcauugaagagcaaga

SEQ ID NO: 169808 - RNA, 24 nt, Human
ccccucugcuaucucagccaagag

SEQ ID NO: 169809 - RNA, 24 nt, Human
cccgcagugucccaggcagaggcc

SEQ ID NO: 169810 - RNA, 25 nt, Human
cccgcgccgcagcaccugcguccgg

SEQ ID NO: 169811 - RNA, 18 nt, Human
ccgcgccgcagcaccugc

SEQ ID NO: 169812 - RNA, 22 nt, Human
ccuaggccagucuagacagaac

SEQ ID NO: 169813 - RNA, 18 nt, Human
ccuccaaccccgggccuu

SEQ ID NO: 169814 - RNA, 20 nt, Human
ccucugucccgcaguguccc

SEQ ID NO: 169815 - RNA, 24 nt, Human
ccucugucccgcagugucccaggc

SEQ ID NO: 169816 - RNA, 18 nt, Human
ccugcgcgcugcuggcgg

SEQ ID NO: 169817 - RNA, 25 nt, Human
ccuggccccuaggccagucuagaca

SEQ ID NO: 169818 - RNA, 19 nt, Human
cgccuggcggaaccagcgc

SEQ ID NO: 169819 - RNA, 20 nt, Human
cggcccugcagcgccuggcg

SEQ ID NO: 169820 - RNA, 21 nt, Human
cuccaaccccgggccuuggcc

SEQ ID NO: 169821 - RNA, 21 nt, Human
cuccagcagcuucaggacacc

SEQ ID NO: 169822 - RNA, 22 nt, Human
cucccaccuccaaccccgggcc

SEQ ID NO: 169823 - RNA, 23 nt, Human
cucccaucccaaagcccuggccc

SEQ ID NO: 169824 - RNA, 25 nt, Human
cucccggccucccaucccaaagccc

SEQ ID NO: 169825 - RNA, 20 nt, Human
cucugggcugggggcacucc

SEQ ID NO: 169826 - RNA, 20 nt, Human
cugcguugccuguggaugac

SEQ ID NO: 169827 - RNA, 20 nt, Human
cuggaacacaggugccaggg

SEQ ID NO: 169828 - RNA, 21 nt, Human
cuggcacugcagguguggggu

SEQ ID NO: 169829 - RNA, 18 nt, Human
cuggccccuaggccaguc

SEQ ID NO: 169830 - RNA, 25 nt, Human
gaagagcaagacucgaaccucgggg

SEQ ID NO: 169831 - RNA, 20 nt, Human
gacccagggccuggccaggc

SEQ ID NO: 169832 - RNA, 21 nt, Human
gacccggggagccccucugcu

SEQ ID NO: 169833 - RNA, 19 nt, Human
gacuagcacauggauggca

SEQ ID NO: 169834 - RNA, 19 nt, Human
gaggcugguguggucgaug

SEQ ID NO: 169835 - RNA, 25 nt, Human
gaggggcccgcgccgcagcaccugc

SEQ ID NO: 169836 - RNA, 19 nt, Human
gcagcaccugcguccggcc

SEQ ID NO: 169837 - RNA, 18 nt, Human
gcagcagcuucagcaggg

SEQ ID NO: 169838 - RNA, 19 nt, Human
gcagcuucaggacaccacc

SEQ ID NO: 169839 - RNA, 22 nt, Human
gcagugucccaggcagaggccc

SEQ ID NO: 169840 - RNA, 19 nt, Human
gccagucuagacagaaccg

SEQ ID NO: 169841 - RNA, 19 nt, Human
gcccgagccgcauguggga

SEQ ID NO: 169842 - RNA, 23 nt, Human
gcccugcagcgccuggcggaacc

SEQ ID NO: 169843 - RNA, 23 nt, Human
gcccuuugggggacuagguggcu

SEQ ID NO: 169844 - RNA, 24 nt, Human
gccgcagcaccugcguccggcccg

SEQ ID NO: 169845 - RNA, 23 nt, Human
gccucccaucccaaagcccuggc

SEQ ID NO: 169846 - RNA, 22 nt, Human
gcggacccaccgggcucugggc

SEQ ID NO: 169847 - RNA, 22 nt, Human
gcucccaccuccaaccccgggc

SEQ ID NO: 169848 - RNA, 28 nt, Human
gcuggaacacaggugccaggggcagucu

SEQ ID NO: 169849 - RNA, 18 nt, Human
gcuggcacugcaggugug

SEQ ID NO: 169850 - RNA, 19 nt, Human
gcuucaggacaccacccac

SEQ ID NO: 169851 - RNA, 24 nt, Human
ggacaugagaucugcugggcucgg

SEQ ID NO: 169852 - RNA, 23 nt, Human
ggcacagagccuuaaaaaagaca

SEQ ID NO: 169853 - RNA, 22 nt, Human
gggaagcucccaccuccaaccc

SEQ ID NO: 169854 - RNA, 18 nt, Human
gggccaccgcucggcauc

SEQ ID NO: 169855 - RNA, 21 nt, Human
gggguguugggggagacaggc

SEQ ID NO: 169856 - RNA, 20 nt, Human
ggguguugggggagacaggc

SEQ ID NO: 169857 - RNA, 18 nt, Human
ggucccucagcacugcca

SEQ ID NO: 169858 - RNA, 19 nt, Human
guccaggugguuccagugc

SEQ ID NO: 169859 - RNA, 20 nt, Human
guccaggugguuccagugcu

SEQ ID NO: 169860 - RNA, 18 nt, Human
gugaggaggcccuuuggg

SEQ ID NO: 169861 - RNA, 21 nt, Human
gugcagucauaagccccgcca

SEQ ID NO: 169862 - RNA, 23 nt, Human
gugugggguggguggggcgccag

SEQ ID NO: 169863 - RNA, 19 nt, Human
uaaagaugcccccuuucug

SEQ ID NO: 169864 - RNA, 21 nt, Human
uaagcugggccugagccagga

SEQ ID NO: 169865 - RNA, 19 nt, Human
ucagccaagaggaaggaga

SEQ ID NO: 169866 - RNA, 18 nt, Human
uccagcagcuucaggaca

SEQ ID NO: 169867 - RNA, 18 nt, Human
ucccaaagcccuggcccc

SEQ ID NO: 169868 - RNA, 26 nt, Human
ucccaaagcccuggccccuaggccag

SEQ ID NO: 169869 - RNA, 23 nt, Human
uccccagcaccauggcgguccug

SEQ ID NO: 169870 - RNA, 20 nt, Human
uccgggcuggccugcucuuc

SEQ ID NO: 169871 - RNA, 22 nt, Human
ucucccggccucccaucccaaa

SEQ ID NO: 169872 - RNA, 20 nt, Human
ucucgcggcccugcagcgcc

SEQ ID NO: 169873 - RNA, 22 nt, Human
ucucggccuuggcugauccauu

SEQ ID NO: 169874 - RNA, 23 nt, Human
ucucggccuuggcugauccauug

SEQ ID NO: 169875 - RNA, 25 nt, Human
ucugucccgcagugucccaggcaga

SEQ ID NO: 169876 - RNA, 23 nt, Human
ugcagcgccuggcggaaccagcg

SEQ ID NO: 169877 - RNA, 19 nt, Human
ugcagcugaagacgaggga

SEQ ID NO: 169878 - RNA, 25 nt, Human
ugcagucauaagccccgccaaugcc

SEQ ID NO: 169879 - RNA, 22 nt, Human
ugccaggggcagcugccacagg

SEQ ID NO: 169880 - RNA, 19 nt, Human
ugccuuuggcuccccagca

SEQ ID NO: 169881 - RNA, 22 nt, Human
ugcgcgcugcuggcggugugcg

SEQ ID NO: 169882 - RNA, 18 nt, Human
uggcacugcagguguggg

SEQ ID NO: 169883 - RNA, 24 nt, Human
uggcacugcagguguggggugggu

SEQ ID NO: 169884 - RNA, 18 nt, Human
uggccccuaggccagucu

SEQ ID NO: 169885 - RNA, 19 nt, Human
uggcggaaccagcgcacgc

SEQ ID NO: 169886 - RNA, 18 nt, Human
ugucacugugaaguucug

SEQ ID NO: 169887 - RNA, 23 nt, Human
ugucccaggcagaggcccucucc

SEQ ID NO: 169888 - RNA, 22 nt, Human
ugugaaaugcagcugaagacga

SEQ ID NO: 169889 - RNA, 22 nt, Human
uguuggucugcguugccugugg

SEQ ID NO: 169890 - RNA, 21 nt, Human
uucauggggagaacgcaggca

SEQ ID NO: 169891 - RNA, 23 nt, Human
uucguccaggugguuccagugcu

SEQ ID NO: 169892 - RNA, 23 nt, Human
uuggaggaagacguggaaggcca

SEQ ID NO: 169893 - RNA, 18 nt, Human
auucuccccaaaucaggg

SEQ ID NO: 169894 - RNA, 22 nt, Human
cucaaggugagacgaagcugga

SEQ ID NO: 169895 - RNA, 21 nt, Human
cuguuuauucuccccaaauca

SEQ ID NO: 169896 - RNA, 21 nt, Human
gucuugcucuggguaguucua

SEQ ID NO: 169897 - RNA, 19 nt, Human
ucaggggacacaaaggcuu

SEQ ID NO: 169898 - RNA, 21 nt, Human
ucaggggacacaaaggcuuuu

SEQ ID NO: 169899 - RNA, 23 nt, Human
ucaggggacacaaaggcuuuuuu

SEQ ID NO: 169900 - RNA, 19 nt, Human
uccuaaaauaagcaggaaa

SEQ ID NO: 169901 - RNA, 19 nt, Human
uggagcugggagcucgaaa

SEQ ID NO: 169902 - RNA, 26 nt, Human
aaaaagaaacagaaaacucuuagcaa

SEQ ID NO: 169903 - RNA, 21 nt, Human
aaaacucuuagcaaacuaaaa

SEQ ID NO: 169904 - RNA, 19 nt, Human
aaacagaaucagaggaauu

SEQ ID NO: 169905 - RNA, 26 nt, Human
aaacaguugauugucucauccuccca

SEQ ID NO: 169906 - RNA, 25 nt, Human
aaacauaaacacagaaauucuaacc

SEQ ID NO: 169907 - RNA, 22 nt, Human
aaauccccacuggucuuucucu

SEQ ID NO: 169908 - RNA, 19 nt, Human
aagaaaaagaaacagaaaa

SEQ ID NO: 169909 - RNA, 19 nt, Human
aagaagaagaauaauauga

SEQ ID NO: 169910 - RNA, 19 nt, Human
aagcucaauuggccaccgc

SEQ ID NO: 169911 - RNA, 21 nt, Human
aauuccuuuucagagaccauu

SEQ ID NO: 169912 - RNA, 18 nt, Human
agaaaacagaaucagagg

SEQ ID NO: 169913 - RNA, 24 nt, Human
agaaaacagaaucagaggaauuac

SEQ ID NO: 169914 - RNA, 22 nt, Human
agaacucaaaauaucccugacc

SEQ ID NO: 169915 - RNA, 24 nt, Human
agaacucaaaauaucccugacccc

SEQ ID NO: 169916 - RNA, 21 nt, Human
agcaaggauaguagaaaaagu

SEQ ID NO: 169917 - RNA, 22 nt, Human
aggaauguuugcgccaacuuug

SEQ ID NO: 169918 - RNA, 29 nt, Human
aggcagaagucaaaaaacaaaagggaccc

SEQ ID NO: 169919 - RNA, 24 nt, Human
auaggcagaagucaaaaaacaaaa

SEQ ID NO: 169920 - RNA, 22 nt, Human
auugucucauccucccaaaccu

SEQ ID NO: 169921 - RNA, 21 nt, Human
cagagccaucucuaucucuac

SEQ ID NO: 169922 - RNA, 23 nt, Human
cauuauuuauaaugauuuacaua

SEQ ID NO: 169923 - RNA, 21 nt, Human
cccaaaccugccacucuucca

SEQ ID NO: 169924 - RNA, 21 nt, Human
cccguagacauuucaaaccua

SEQ ID NO: 169925 - RNA, 18 nt, Human
ccucccaaaccugccacu

SEQ ID NO: 169926 - RNA, 18 nt, Human
ccucccaaaccugccacu

SEQ ID NO: 169927 - RNA, 24 nt, Human
cucaaaauaucccugaccccaucc

SEQ ID NO: 169928 - RNA, 19 nt, Human
gccagagccaucucuaucu

SEQ ID NO: 169929 - RNA, 20 nt, Human
gucaaaaaacaaaaaauaac

SEQ ID NO: 169930 - RNA, 20 nt, Human
uaaaacuuccaaacuagaac

SEQ ID NO: 169931 - RNA, 21 nt, Human
uaaauguacacacaacacacu

SEQ ID NO: 169932 - RNA, 24 nt, Human
uaacaccagaaaacagaaucagag

SEQ ID NO: 169933 - RNA, 21 nt, Human
uaacguggcucaaccaaacag

SEQ ID NO: 169934 - RNA, 23 nt, Human
uaauaaagauauaacaccagaaa

SEQ ID NO: 169935 - RNA, 20 nt, Human
uagcaaggauaguagaaaaa

SEQ ID NO: 169936 - RNA, 19 nt, Human
uagccccaaaucagggaca

SEQ ID NO: 169937 - RNA, 22 nt, Human
uaggaugaacagaacucaaaau

SEQ ID NO: 169938 - RNA, 27 nt, Human
uauaacaccagaaaacagaaucagagg

SEQ ID NO: 169939 - RNA, 19 nt, Human
ucaaaaaacaaaaaauaac

SEQ ID NO: 169940 - RNA, 19 nt, Human
ucaaaccuaacguggcuca

SEQ ID NO: 169941 - RNA, 25 nt, Human
ucaaaccuaacguggcucaaccaaa

SEQ ID NO: 169942 - RNA, 20 nt, Human
ucaccacaaucccauccaag

SEQ ID NO: 169943 - RNA, 21 nt, Human
ucaccacaaucccauccaagu

SEQ ID NO: 169944 - RNA, 20 nt, Human
uccuuaaaucacguuuuucc

SEQ ID NO: 169945 - RNA, 22 nt, Human
ucuuucucuucuuguauuuccc

SEQ ID NO: 169946 - RNA, 18 nt, Human
ugacucaaggguagauga

SEQ ID NO: 169947 - RNA, 23 nt, Human
ugaggaugcuuaugaccucaagg

SEQ ID NO: 169948 - RNA, 23 nt, Human
ugcauuugaagcucaauuggcca

SEQ ID NO: 169949 - RNA, 24 nt, Human
uguaagaaaaagaaacagaaaacu

SEQ ID NO: 169950 - RNA, 18 nt, Human
uguacacacaacacacuu

SEQ ID NO: 169951 - RNA, 21 nt, Human
uugaaugccucaauaugacuc

SEQ ID NO: 169952 - RNA, 23 nt, Human
uugcauuugaagcucaauuggcc

SEQ ID NO: 169953 - RNA, 19 nt, Human
uugccagcagcaccuggug

SEQ ID NO: 169954 - RNA, 19 nt, Human
uuggaucgcuuccuucucc

SEQ ID NO: 169955 - RNA, 24 nt, Human
uuuaguagccugacugucuauuuc

SEQ ID NO: 169956 - RNA, 20 nt, Human
ccacaccaccagcuuagauc

SEQ ID NO: 169957 - RNA, 21 nt, Human
cccacaccaccagcuuagauc

SEQ ID NO: 169958 - RNA, 19 nt, Human
guggagcaacucaggcucu

SEQ ID NO: 169959 - RNA, 19 nt, Human
uggauuccuguggagcaac

SEQ ID NO: 169960 - RNA, 28 nt, Human
aacagaguauuuugaccacugaaaaaag

SEQ ID NO: 169961 - RNA, 23 nt, Human
aacauggugucuagacauggcua

SEQ ID NO: 169962 - RNA, 21 nt, Human
acagaguauuuugaccacuga

SEQ ID NO: 169963 - RNA, 22 nt, Human
accacugaaaacaucccagaac

SEQ ID NO: 169964 - RNA, 21 nt, Human
acuaaaguacaaaagccucag

SEQ ID NO: 169965 - RNA, 23 nt, Human
agaaggccagugagggugguccc

SEQ ID NO: 169966 - RNA, 18 nt, Human
agcgaucugaauaaaccu

SEQ ID NO: 169967 - RNA, 24 nt, Human
aggauccuaauccauguucuccac

SEQ ID NO: 169968 - RNA, 22 nt, Human
aguacaaaagccucagaaaaaa

SEQ ID NO: 169969 - RNA, 27 nt, Human
aucccagaacccugcugcagaaggcca

SEQ ID NO: 169970 - RNA, 21 nt, Human
caaaaauuauucugauacaac

SEQ ID NO: 169971 - RNA, 19 nt, Human
caacuaggucauucuucca

SEQ ID NO: 169972 - RNA, 20 nt, Human
cagaguauuuugaccacuga

SEQ ID NO: 169973 - RNA, 22 nt, Human
cagcaccuccaugacaguauuu

SEQ ID NO: 169974 - RNA, 22 nt, Human
cagcugccgccgccagcaccgg

SEQ ID NO: 169975 - RNA, 26 nt, Human
ccacugaaaacaucccagaacccugc

SEQ ID NO: 169976 - RNA, 22 nt, Human
cgaccugaggcuucuuggcugu

SEQ ID NO: 169977 - RNA, 21 nt, Human
cgccgccagcaccgguaccgc

SEQ ID NO: 169978 - RNA, 24 nt, Human
cuaggauccuaauccauguucucc

SEQ ID NO: 169979 - RNA, 21 nt, Human
cucagaaaaaacgugaugggc

SEQ ID NO: 169980 - RNA, 21 nt, Human
cugaaaacaucccagaacccu

SEQ ID NO: 169981 - RNA, 19 nt, Human
cugaggcuucuuggcugug

SEQ ID NO: 169982 - RNA, 23 nt, Human
cugcugcuguccacagaccagug

SEQ ID NO: 169983 - RNA, 23 nt, Human
cugugcaucugcucagccgaggc

SEQ ID NO: 169984 - RNA, 20 nt, Human
cugugucuuuacagucuagg

SEQ ID NO: 169985 - RNA, 20 nt, Human
cuucuuggcugugcugaguu

SEQ ID NO: 169986 - RNA, 24 nt, Human
cuucuuggcugugcugaguuugcu

SEQ ID NO: 169987 - RNA, 22 nt, Human
cuugcaaacauuucugcugcug

SEQ ID NO: 169988 - RNA, 23 nt, Human
gaaaacaucccagaacccugcug

SEQ ID NO: 169989 - RNA, 18 nt, Human
gaaggccagugagggugg

SEQ ID NO: 169990 - RNA, 21 nt, Human
gguauuacuauuguuucacug

SEQ ID NO: 169991 - RNA, 20 nt, Human
uaaaguacaaaagccucaga

SEQ ID NO: 169992 - RNA, 26 nt, Human
uaacaaagucaaacuuucucaccaug

SEQ ID NO: 169993 - RNA, 26 nt, Human
uauuucuguuuucugagcccuugcuc

SEQ ID NO: 169994 - RNA, 21 nt, Human
ucagaaaaaacgugaugggca

SEQ ID NO: 169995 - RNA, 22 nt, Human
ucagcaaguacuuaugaugagu

SEQ ID NO: 169996 - RNA, 19 nt, Human
uccacagaccagugagguc

SEQ ID NO: 169997 - RNA, 24 nt, Human
uccaucagcaaguacuuaugauga

SEQ ID NO: 169998 - RNA, 22 nt, Human
ucccagaacccugcugcagaag

SEQ ID NO: 169999 - RNA, 24 nt, Human
uccccaaaaugaauggcuugauuu

SEQ ID NO: 170000 - RNA, 20 nt, Human
uccuaauccauguucuccac

SEQ ID NO: 170001 - RNA, 22 nt, Human
ugaggucuugggauagguggca

SEQ ID NO: 170002 - RNA, 18 nt, Human
ugaugucauuuauuggca

SEQ ID NO: 170003 - RNA, 20 nt, Human
ugcccugagguucgcgcggc

SEQ ID NO: 170004 - RNA, 22 nt, Human
ugccgccgccagcaccgguacc

SEQ ID NO: 170005 - RNA, 18 nt, Human
uggaagcauuuacuaaag

SEQ ID NO: 170006 - RNA, 22 nt, Human
ugguucaaaccaacuuuuaaua

SEQ ID NO: 170007 - RNA, 22 nt, Human
uuaguggaagcauuuacuaaag

SEQ ID NO: 170008 - RNA, 18 nt, Human
uuucugcugcuguccaca

SEQ ID NO: 170009 - RNA, 20 nt, Human
aaaaaggaaagcacagaaaa

SEQ ID NO: 170010 - RNA, 23 nt, Human
aaaaggaaagcacagaaaacagg

SEQ ID NO: 170011 - RNA, 19 nt, Human
aagaaaagacuccggggug

SEQ ID NO: 170012 - RNA, 19 nt, Human
aagaaagagacucaagaga

SEQ ID NO: 170013 - RNA, 19 nt, Human
aagaacucucccuacacgu

SEQ ID NO: 170014 - RNA, 21 nt, Human
aagagaaagaaaagacuccgg

SEQ ID NO: 170015 - RNA, 23 nt, Human
aagcucucccaggaaccccacag

SEQ ID NO: 170016 - RNA, 21 nt, Human
aaguagcugccauaguucucc

SEQ ID NO: 170017 - RNA, 24 nt, Human
aagucauuuacaaguccacauuca

SEQ ID NO: 170018 - RNA, 31 nt, Human
agaacucucccuacacgucccucucugccuu

SEQ ID NO: 170019 - RNA, 19 nt, Human
agacacaaaagaagggcug

SEQ ID NO: 170020 - RNA, 21 nt, Human
agagcagaaaaacguccaggg

SEQ ID NO: 170021 - RNA, 24 nt, Human
agcacagaaaacaggaaagaacuc

SEQ ID NO: 170022 - RNA, 21 nt, Human
agccagcggcuucuucucugg

SEQ ID NO: 170023 - RNA, 24 nt, Human
aggaaagcacagaaaacaggaaag

SEQ ID NO: 170024 - RNA, 22 nt, Human
aggaggaaauaaauugugaggg

SEQ ID NO: 170025 - RNA, 22 nt, Human
agggccagaagagagcagaaaa

SEQ ID NO: 170026 - RNA, 18 nt, Human
caaaguggucgcucccag

SEQ ID NO: 170027 - RNA, 19 nt, Human
caagccacccaccaccaaa

SEQ ID NO: 170028 - RNA, 26 nt, Human
caauccaagcucacgacgcccccaag

SEQ ID NO: 170029 - RNA, 24 nt, Human
cacauucaaauccaaaucucccac

SEQ ID NO: 170030 - RNA, 22 nt, Human
ccacagcaaaccgugaccuuga

SEQ ID NO: 170031 - RNA, 21 nt, Human
ccaccagaaaauaagaaaaug

SEQ ID NO: 170032 - RNA, 21 nt, Human
ccagggucucucaugcauucc

SEQ ID NO: 170033 - RNA, 23 nt, Human
cccaccugcaaaauucuucaccu

SEQ ID NO: 170034 - RNA, 22 nt, Human
cccacgcgccuccccgcagcca

SEQ ID NO: 170035 - RNA, 23 nt, Human
ccccacagcaaaccgugaccuug

SEQ ID NO: 170036 - RNA, 18 nt, Human
ccccacgcgccuccccgc

SEQ ID NO: 170037 - RNA, 24 nt, Human
ccccacgcgccuccccgcagccaa

SEQ ID NO: 170038 - RNA, 23 nt, Human
ccuacacgucccucucugccugu

SEQ ID NO: 170039 - RNA, 23 nt, Human
ccuaccccugagcccuccuuaaa

SEQ ID NO: 170040 - RNA, 22 nt, Human
cgccgaggccgaggcccauggc

SEQ ID NO: 170041 - RNA, 25 nt, Human
cggagcugcgggcgaagccggagca

SEQ ID NO: 170042 - RNA, 18 nt, Human
cggccuccacuuccuccu

SEQ ID NO: 170043 - RNA, 23 nt, Human
cggggugaguaagcucucccagg

SEQ ID NO: 170044 - RNA, 23 nt, Human
cguccagggucucucaugcauuc

SEQ ID NO: 170045 - RNA, 20 nt, Human
cuaccccugagcccuccuua

SEQ ID NO: 170046 - RNA, 21 nt, Human
cuaccccugagcccuccuuaa

SEQ ID NO: 170047 - RNA, 20 nt, Human
cuuacuaagcuccuccacca

SEQ ID NO: 170048 - RNA, 20 nt, Human
cuucaccucucuccaguccc

SEQ ID NO: 170049 - RNA, 19 nt, Human
gaaagcacagaaaacagga

SEQ ID NO: 170050 - RNA, 18 nt, Human
gacaagaaagagacucaa

SEQ ID NO: 170051 - RNA, 20 nt, Human
gagagucacauuuuaaaacc

SEQ ID NO: 170052 - RNA, 22 nt, Human
gagcugugcgggcuucgcuggg

SEQ ID NO: 170053 - RNA, 19 nt, Human
gagucacauuuuaaaaccg

SEQ ID NO: 170054 - RNA, 21 nt, Human
gauuccuaccccugagcccuc

SEQ ID NO: 170055 - RNA, 23 nt, Human
gcacagaaaacaggaaagaacuc

SEQ ID NO: 170056 - RNA, 27 nt, Human
gccaagccacccaccaccaaacuuuua

SEQ ID NO: 170057 - RNA, 22 nt, Human
gcccauggcuccauggagggcc

SEQ ID NO: 170058 - RNA, 19 nt, Human
gccuccacuuccuccucca

SEQ ID NO: 170059 - RNA, 19 nt, Human
ggaaagaacucucccuaca

SEQ ID NO: 170060 - RNA, 19 nt, Human
ggagggccagaagagagca

SEQ ID NO: 170061 - RNA, 23 nt, Human
ggccaugaguggccuuccgggag

SEQ ID NO: 170062 - RNA, 24 nt, Human
gguggcaccuuacaaaagcgccgu

SEQ ID NO: 170063 - RNA, 20 nt, Human
gucuacgcagcggccuccac

SEQ ID NO: 170064 - RNA, 23 nt, Human
uaaaaccgguuucagacacaaaa

SEQ ID NO: 170065 - RNA, 23 nt, Human
uaagcucucccaggaaccccaca

SEQ ID NO: 170066 - RNA, 27 nt, Human
uaccccugagcccuccuuaaacaaucc

SEQ ID NO: 170067 - RNA, 20 nt, Human
uaccuuaaaguuugggggug

SEQ ID NO: 170068 - RNA, 21 nt, Human
uauaaaucaggaccaccacaa

SEQ ID NO: 170069 - RNA, 20 nt, Human
ucaaauccaaaucucccacc

SEQ ID NO: 170070 - RNA, 18 nt, Human
ucaccucucuccaguccc

SEQ ID NO: 170071 - RNA, 23 nt, Human
ucauacagccagcggcuucuucu

SEQ ID NO: 170072 - RNA, 20 nt, Human
uccaccagaaaauaagaaaa

SEQ ID NO: 170073 - RNA, 20 nt, Human
uccccacgcgccuccccgca

SEQ ID NO: 170074 - RNA, 22 nt, Human
ucgccgcggcugguaacuucuc

SEQ ID NO: 170075 - RNA, 19 nt, Human
ucucaugccccacggaagc

SEQ ID NO: 170076 - RNA, 23 nt, Human
ugagcccuccuuaaacaauccaa

SEQ ID NO: 170077 - RNA, 20 nt, Human
ugagggugaggagccgccga

SEQ ID NO: 170078 - RNA, 21 nt, Human
ugccuguuuguguccucggga

SEQ ID NO: 170079 - RNA, 19 nt, Human
uggcaccuuacaaaagcgc

SEQ ID NO: 170080 - RNA, 19 nt, Human
uggcacgggaggaggaaau

SEQ ID NO: 170081 - RNA, 20 nt, Human
uggcacgggaggaggaaaua

SEQ ID NO: 170082 - RNA, 24 nt, Human
ugggagagucacauuuuaaaaccg

SEQ ID NO: 170083 - RNA, 24 nt, Human
ugugagggugaggagccgccgagg

SEQ ID NO: 170084 - RNA, 22 nt, Human
uucaaguauuguuauaaagcca

SEQ ID NO: 170085 - RNA, 22 nt, Human
uuccgggaguccuguaaaaagg

SEQ ID NO: 170086 - RNA, 20 nt, Human
uucucccaguuuaucccagg

SEQ ID NO: 170087 - RNA, 18 nt, Human
uucucugggagagucaca

SEQ ID NO: 170088 - RNA, 20 nt, Human
uuggagcaagagaaagaaaa

SEQ ID NO: 170089 - RNA, 19 nt, Human
uuggaguucacaucuccca

SEQ ID NO: 170090 - RNA, 28 nt, Human
uuucuccgacggccucgccgcggcuggu

SEQ ID NO: 170091 - RNA, 21 nt, Human
aaaaaacacaccucagcugca

SEQ ID NO: 170092 - RNA, 23 nt, Human
aaaaaacacaccucagcugcaua

SEQ ID NO: 170093 - RNA, 18 nt, Human
aacaacaacaaaaaacac

SEQ ID NO: 170094 - RNA, 25 nt, Human
aacaacaacaacaaaaaacacaccu

SEQ ID NO: 170095 - RNA, 20 nt, Human
aacaacaacaacaacaaaaa

SEQ ID NO: 170096 - RNA, 23 nt, Human
aagcaggaauaaaaaaaagggac

SEQ ID NO: 170097 - RNA, 22 nt, Human
aagcaggaauaaaaaaaauaaa

SEQ ID NO: 170098 - RNA, 25 nt, Human
aagcaggaauaaaaaaaauaaacaa

SEQ ID NO: 170099 - RNA, 25 nt, Human
acaacaaaaaacacaccucagcugc

SEQ ID NO: 170100 - RNA, 19 nt, Human
acaacaacaacaacaaaaa

SEQ ID NO: 170101 - RNA, 20 nt, Human
acauagcccaaguguccuca

SEQ ID NO: 170102 - RNA, 22 nt, Human
auaaacaacaacaacaacaaaa

SEQ ID NO: 170103 - RNA, 18 nt, Human
caaaaaacacaccucagc

SEQ ID NO: 170104 - RNA, 22 nt, Human
caaaaaacacaccucagcugca

SEQ ID NO: 170105 - RNA, 24 nt, Human
caacaaaaaacacaccucagcugc

SEQ ID NO: 170106 - RNA, 19 nt, Human
caacaacaaaaaacacacc

SEQ ID NO: 170107 - RNA, 22 nt, Human
caacaacaacaaaaaacacacc

SEQ ID NO: 170108 - RNA, 23 nt, Human
caacaacaacaaaaaacacaccu

SEQ ID NO: 170109 - RNA, 27 nt, Human
caacaacaacaacaaaaaacacaccuc

SEQ ID NO: 170110 - RNA, 22 nt, Human
ccauagaaauuaaaaaucagaa

SEQ ID NO: 170111 - RNA, 20 nt, Human
cuucuuauuauuuugcuuuu

SEQ ID NO: 170112 - RNA, 21 nt, Human
guaggaggcaacacauuguuu

SEQ ID NO: 170113 - RNA, 21 nt, Human
uaaacaacaacaacaacaaaa

SEQ ID NO: 170114 - RNA, 22 nt, Human
uagcccaaguguccucaaaagc

SEQ ID NO: 170115 - RNA, 18 nt, Human
ugaagcuggggucuuggc

SEQ ID NO: 170116 - RNA, 22 nt, Human
ugcuuuuuuaaagguuguuaua

SEQ ID NO: 170117 - RNA, 21 nt, Human
uguacagagcugugacacaua

SEQ ID NO: 170118 - RNA, 25 nt, Human
uguuuguacagagcugugacacaua

SEQ ID NO: 170119 - RNA, 24 nt, Human
uuuuuuuuuucccuccuggaauuu

SEQ ID NO: 170120 - RNA, 20 nt, Human
uuuuuuuuuuuucccucccc

SEQ ID NO: 170121 - RNA, 20 nt, Human
aaagaacagaccauagcacc

SEQ ID NO: 170122 - RNA, 18 nt, Human
aaauuuauuuacacucac

SEQ ID NO: 170123 - RNA, 18 nt, Human
aagaggaaguaaaucuaa

SEQ ID NO: 170124 - RNA, 21 nt, Human
aaucacuucccaaaggcccac

SEQ ID NO: 170125 - RNA, 19 nt, Human
acacaauuauagcuaaacu

SEQ ID NO: 170126 - RNA, 22 nt, Human
acaucccaccaucccccaaccc

SEQ ID NO: 170127 - RNA, 23 nt, Human
accuuggggauuaggauuucaac

SEQ ID NO: 170128 - RNA, 24 nt, Human
acugucucaucuccuugcaucccu

SEQ ID NO: 170129 - RNA, 19 nt, Human
agaaauuccugaucuagac

SEQ ID NO: 170130 - RNA, 19 nt, Human
aggaagagaaaauaaagaa

SEQ ID NO: 170131 - RNA, 19 nt, Human
aguacuuaugcauaugugc

SEQ ID NO: 170132 - RNA, 24 nt, Human
aucccaccaucccccaacccccca

SEQ ID NO: 170133 - RNA, 25 nt, Human
aucccaccaucccccaaccccccaa

SEQ ID NO: 170134 - RNA, 18 nt, Human
auuggggugguuaaguga

SEQ ID NO: 170135 - RNA, 22 nt, Human
caaaacacugggacaacuugua

SEQ ID NO: 170136 - RNA, 19 nt, Human
caaaauugcccccaguuga

SEQ ID NO: 170137 - RNA, 26 nt, Human
caacacugauuuucuucaacaugaaa

SEQ ID NO: 170138 - RNA, 23 nt, Human
cacaucccaccaucccccaaccc

SEQ ID NO: 170139 - RNA, 19 nt, Human
cagagcccaacaccuaggg

SEQ ID NO: 170140 - RNA, 24 nt, Human
caguacaacugacauuuugggcca

SEQ ID NO: 170141 - RNA, 18 nt, Human
cauagcaccagcuaaaga

SEQ ID NO: 170142 - RNA, 19 nt, Human
caucccaccaucccccaac

SEQ ID NO: 170143 - RNA, 19 nt, Human
ccaccaucccccaaccccc

SEQ ID NO: 170144 - RNA, 20 nt, Human
ccuaggguuucauuaggcug

SEQ ID NO: 170145 - RNA, 24 nt, Human
ccuaggguuucauuaggcuggggu

SEQ ID NO: 170146 - RNA, 22 nt, Human
cuaaagaacagaccauagcacc

SEQ ID NO: 170147 - RNA, 19 nt, Human
cucucuggggccuuuuuaa

SEQ ID NO: 170148 - RNA, 22 nt, Human
cucucuggggccuuuuuaaaua

SEQ ID NO: 170149 - RNA, 27 nt, Human
cucuuuaaaucacaacauucuggucgg

SEQ ID NO: 170150 - RNA, 21 nt, Human
gcaaaauugcccccaguugag

SEQ ID NO: 170151 - RNA, 22 nt, Human
ggggccuuuuuaaauaagggca

SEQ ID NO: 170152 - RNA, 23 nt, Human
gggugguuaagugagaucaugga

SEQ ID NO: 170153 - RNA, 18 nt, Human
ggugguuaagugagauca

SEQ ID NO: 170154 - RNA, 20 nt, Human
guucuggaggcuggaaguuc

SEQ ID NO: 170155 - RNA, 22 nt, Human
uaaagaacagaccauagcacca

SEQ ID NO: 170156 - RNA, 18 nt, Human
uaacaaaacacugggaca

SEQ ID NO: 170157 - RNA, 22 nt, Human
uaagaauagcugaaugaggcug

SEQ ID NO: 170158 - RNA, 21 nt, Human
uacacucaccuaacuacauua

SEQ ID NO: 170159 - RNA, 18 nt, Human
uagaagggacaaaguccc

SEQ ID NO: 170160 - RNA, 20 nt, Human
uagaagggacaaagucccau

SEQ ID NO: 170161 - RNA, 18 nt, Human
uagcuaaacucuaauucu

SEQ ID NO: 170162 - RNA, 20 nt, Human
ucagauuagaaaagaggaag

SEQ ID NO: 170163 - RNA, 18 nt, Human
uccuaaucaugagggcuc

SEQ ID NO: 170164 - RNA, 20 nt, Human
uccugaucuaaucacuuccc

SEQ ID NO: 170165 - RNA, 19 nt, Human
ugaggcuggaaagagauaa

SEQ ID NO: 170166 - RNA, 18 nt, Human
ugaucuaaucacuuccca

SEQ ID NO: 170167 - RNA, 20 nt, Human
ugcccugugcauuauaggau

SEQ ID NO: 170168 - RNA, 21 nt, Human
uguccucuggggggcaaaauu

SEQ ID NO: 170169 - RNA, 21 nt, Human
uuagcggcaccccuggcuucu

SEQ ID NO: 170170 - RNA, 23 nt, Human
uuccugaucuagacagcagaauu

SEQ ID NO: 170171 - RNA, 20 nt, Human
acccgccuccgucuucaccc

SEQ ID NO: 170172 - RNA, 18 nt, Human
agaaaaaaacacagaaag

SEQ ID NO: 170173 - RNA, 22 nt, Human
agaaaaaaacacagaaagauaa

SEQ ID NO: 170174 - RNA, 19 nt, Human
aggcagaaacaaaaauccc

SEQ ID NO: 170175 - RNA, 21 nt, Human
cagaaagauaaggcagaaaca

SEQ ID NO: 170176 - RNA, 19 nt, Human
cgcggagaggcugaggccg

SEQ ID NO: 170177 - RNA, 21 nt, Human
gaaauaaacacucccugacag

SEQ ID NO: 170178 - RNA, 19 nt, Human
gcagcacaggggcgcggag

SEQ ID NO: 170179 - RNA, 21 nt, Human
gcgcggaggaacagaagcgga

SEQ ID NO: 170180 - RNA, 25 nt, Human
gcggaggaacagaagcggacgcgaa

SEQ ID NO: 170181 - RNA, 23 nt, Human
gugagucggggcagcacaggggc

SEQ ID NO: 170182 - RNA, 21 nt, Human
uaaggcagaaacaaaaauccc

SEQ ID NO: 170183 - RNA, 19 nt, Human
uggcucagaguuccacuuc

SEQ ID NO: 170184 - RNA, 19 nt, Human
uggcucagaguuccacuuc

SEQ ID NO: 170185 - RNA, 22 nt, Human
uggcucagaguuccacuuccgg

SEQ ID NO: 170186 - RNA, 27 nt, Human
aaaaagacuucguuuucucaacagcug

SEQ ID NO: 170187 - RNA, 21 nt, Human
aagucuaggccacagcaaucu

SEQ ID NO: 170188 - RNA, 22 nt, Human
aauaaaaaguuagcaagaggaa

SEQ ID NO: 170189 - RNA, 24 nt, Human
acaauaaauggaaauguaaguauc

SEQ ID NO: 170190 - RNA, 20 nt, Human
acuucggagaguaugcaaag

SEQ ID NO: 170191 - RNA, 21 nt, Human
agagaaaaaaaaaucucaaag

SEQ ID NO: 170192 - RNA, 22 nt, Human
agagauuaaaacuaauguauau

SEQ ID NO: 170193 - RNA, 18 nt, Human
agaguaugcaaagucccg

SEQ ID NO: 170194 - RNA, 19 nt, Human
aggagcugggcagcugcuc

SEQ ID NO: 170195 - RNA, 24 nt, Human
aggcaacuuugaagucagcaccaa

SEQ ID NO: 170196 - RNA, 22 nt, Human
aguaaacaggaaaaugcuacaa

SEQ ID NO: 170197 - RNA, 24 nt, Human
aguuacaggauauuuuaaaagaga

SEQ ID NO: 170198 - RNA, 22 nt, Human
auacugaaguacagaaaaauuc

SEQ ID NO: 170199 - RNA, 19 nt, Human
caaaacugagcaggagcug

SEQ ID NO: 170200 - RNA, 24 nt, Human
caaauuccuucauaauaacagccu

SEQ ID NO: 170201 - RNA, 23 nt, Human
caauauuaagagauuaaaacuaa

SEQ ID NO: 170202 - RNA, 21 nt, Human
cacagcaaucuacuguucucc

SEQ ID NO: 170203 - RNA, 22 nt, Human
cagcaaagcaaucaaauuccuu

SEQ ID NO: 170204 - RNA, 23 nt, Human
cauacugaaguacagaaaaauuc

SEQ ID NO: 170205 - RNA, 19 nt, Human
cauccguuuugcaaccuga

SEQ ID NO: 170206 - RNA, 19 nt, Human
cccacaacaaaaauaaaau

SEQ ID NO: 170207 - RNA, 18 nt, Human
ccugcugugcagcaaagc

SEQ ID NO: 170208 - RNA, 20 nt, Human
ccuggagagacuuaccggcu

SEQ ID NO: 170209 - RNA, 22 nt, Human
ccuggagagacuuaccggcuug

SEQ ID NO: 170210 - RNA, 21 nt, Human
cugcaucauuuuuuuaugcau

SEQ ID NO: 170211 - RNA, 23 nt, Human
gaagucuaggccacagcaaucua

SEQ ID NO: 170212 - RNA, 21 nt, Human
gcuugcuuucuguggcuggag

SEQ ID NO: 170213 - RNA, 24 nt, Human
guugauucucuugaucgacauuuc

SEQ ID NO: 170214 - RNA, 23 nt, Human
uaccccgaggcaaaacugagcag

SEQ ID NO: 170215 - RNA, 21 nt, Human
uaccuggagagacuuaccggc

SEQ ID NO: 170216 - RNA, 24 nt, Human
uaggccaaaggguacuucuuuuuc

SEQ ID NO: 170217 - RNA, 24 nt, Human
uaugcauagaaaaaaaugugcaau

SEQ ID NO: 170218 - RNA, 24 nt, Human
uauuuuaaaagagaaaaaaaaauc

SEQ ID NO: 170219 - RNA, 21 nt, Human
ucagcaccaacucaccauacu

SEQ ID NO: 170220 - RNA, 22 nt, Human
ucauuuuuuuaugcauagaaaa

SEQ ID NO: 170221 - RNA, 19 nt, Human
uccaccuuaucuuccuuca

SEQ ID NO: 170222 - RNA, 22 nt, Human
uccaucauuuccuucugcaaaa

SEQ ID NO: 170223 - RNA, 25 nt, Human
uccaucauuuccuucugcaaaauga

SEQ ID NO: 170224 - RNA, 22 nt, Human
uccuucugcaaaaugaaaaaga

SEQ ID NO: 170225 - RNA, 20 nt, Human
ucuaggccacagcaaucuac

SEQ ID NO: 170226 - RNA, 28 nt, Human
ucuguggcuggaggugcuaccccgaggc

SEQ ID NO: 170227 - RNA, 22 nt, Human
ugaauaaccacucuaaucagua

SEQ ID NO: 170228 - RNA, 19 nt, Human
ugagcaggagcugggcagc

SEQ ID NO: 170229 - RNA, 23 nt, Human
ugagcaggagcugggcagcugcu

SEQ ID NO: 170230 - RNA, 21 nt, Human
ugaggaaauuauauaucaccu

SEQ ID NO: 170231 - RNA, 24 nt, Human
ugcaaccugauucucaauauuagu

SEQ ID NO: 170232 - RNA, 26 nt, Human
ugccuugguggggagaagaggagcag

SEQ ID NO: 170233 - RNA, 19 nt, Human
ugcuacaacagucacugag

SEQ ID NO: 170234 - RNA, 23 nt, Human
uggggagaagaggagcagggcuu

SEQ ID NO: 170235 - RNA, 20 nt, Human
ugguggggagaagaggagca

SEQ ID NO: 170236 - RNA, 23 nt, Human
uguaaguaucucuuaaaaagaaa

SEQ ID NO: 170237 - RNA, 23 nt, Human
uuaaaaagaaaaauaacuugguu

SEQ ID NO: 170238 - RNA, 25 nt, Human
uuaccaggcagugaggaaauuauau

SEQ ID NO: 170239 - RNA, 22 nt, Human
uucuguggcuggaggugcuacc

SEQ ID NO: 170240 - RNA, 24 nt, Human
uucuuaucugcuuaagaaucccac

SEQ ID NO: 170241 - RNA, 21 nt, Human
uuuaaaagagaaaaaaaaauc

SEQ ID NO: 170242 - RNA, 24 nt, Human
uuuuccuaaacuauuuugauaccu

SEQ ID NO: 170243 - RNA, 26 nt, Human
uuuuggaauggauuauuugaauuugu

SEQ ID NO: 170244 - RNA, 19 nt, Human
uuuuuuuuuuuuguaggcc

SEQ ID NO: 170245 - RNA, 21 nt, Human
uuuuuuuuuuuuuuuuguagg

SEQ ID NO: 170246 - RNA, 19 nt, Human
aaacagaaguaauaaucag

SEQ ID NO: 170247 - RNA, 20 nt, Human
aaagagaaacagaaguaaua

SEQ ID NO: 170248 - RNA, 22 nt, Human
aagagagaagcagaaaccaaaa

SEQ ID NO: 170249 - RNA, 26 nt, Human
aguaaacaauagaauaugaugugcaa

SEQ ID NO: 170250 - RNA, 18 nt, Human
aguggacacaaggaucug

SEQ ID NO: 170251 - RNA, 21 nt, Human
caaaagaacaguuuuucucau

SEQ ID NO: 170252 - RNA, 19 nt, Human
cagcaaugcaaguaagucu

SEQ ID NO: 170253 - RNA, 19 nt, Human
caguggacgccaaaaggcc

SEQ ID NO: 170254 - RNA, 22 nt, Human
cccccaaaccauuacaaagggg

SEQ ID NO: 170255 - RNA, 18 nt, Human
ccucccccggcaaucacc

SEQ ID NO: 170256 - RNA, 21 nt, Human
cuaguccagcaaugcaaguaa

SEQ ID NO: 170257 - RNA, 21 nt, Human
gcagaaaccaaaagagaaaca

SEQ ID NO: 170258 - RNA, 22 nt, Human
uaauaaucaguuaucacaugau

SEQ ID NO: 170259 - RNA, 21 nt, Human
uagugaaauagaaaacucaca

SEQ ID NO: 170260 - RNA, 22 nt, Human
uauaguaaacaauagaauauga

SEQ ID NO: 170261 - RNA, 19 nt, Human
ucccccggcaaucaccgcu

SEQ ID NO: 170262 - RNA, 19 nt, Human
uccuuugcuaguccagcaa

SEQ ID NO: 170263 - RNA, 19 nt, Human
ucuccgccucccccgcugc

SEQ ID NO: 170264 - RNA, 21 nt, Human
ugcaauagugcaauuuuccuu

SEQ ID NO: 170265 - RNA, 21 nt, Human
ugcagccgcgcaguggacgcc

SEQ ID NO: 170266 - RNA, 23 nt, Human
aacggacucagcuggccugggcc

SEQ ID NO: 170267 - RNA, 21 nt, Human
acccccaccggccugggcgga

SEQ ID NO: 170268 - RNA, 18 nt, Human
accccggcgcggaaaacg

SEQ ID NO: 170269 - RNA, 25 nt, Human
agacaaaaaaaaguguaagaauugg

SEQ ID NO: 170270 - RNA, 21 nt, Human
agggaggcgggacagggcugg

SEQ ID NO: 170271 - RNA, 19 nt, Human
auccauggcaacccccagg

SEQ ID NO: 170272 - RNA, 19 nt, Human
cagggcaggcagcggggcc

SEQ ID NO: 170273 - RNA, 19 nt, Human
cccccuuuccucaaguggg

SEQ ID NO: 170274 - RNA, 19 nt, Human
ccugggcggaugaggcugu

SEQ ID NO: 170275 - RNA, 24 nt, Human
ccuggucucugaggucccaggaac

SEQ ID NO: 170276 - RNA, 21 nt, Human
cgggaaagacaaaaaaaagug

SEQ ID NO: 170277 - RNA, 24 nt, Human
cgggaaagacaaaaaaaaguguaa

SEQ ID NO: 170278 - RNA, 22 nt, Human
gaggggcgccaccccggcgcgg

SEQ ID NO: 170279 - RNA, 21 nt, Human
gcccggcguuaggacgguugg

SEQ ID NO: 170280 - RNA, 23 nt, Human
ggaaaacggacucagcuggccug

SEQ ID NO: 170281 - RNA, 22 nt, Human
ggcagcggggccgcgggaaaga

SEQ ID NO: 170282 - RNA, 18 nt, Human
ggccugggcggaugaggc

SEQ ID NO: 170283 - RNA, 25 nt, Human
gggccgcgggaaagacaaaaaaaag

SEQ ID NO: 170284 - RNA, 19 nt, Human
uaggacgguuggaggggcg

SEQ ID NO: 170285 - RNA, 21 nt, Human
uccauggcaacccccagcucc

SEQ ID NO: 170286 - RNA, 21 nt, Human
ucugaggucccaggaacacuc

SEQ ID NO: 170287 - RNA, 26 nt, Human
ugacagggaggcgggacagggcucca

SEQ ID NO: 170288 - RNA, 19 nt, Human
ugagccuggucucugaggu

SEQ ID NO: 170289 - RNA, 21 nt, Human
ugcugggggcugcaccugagc

SEQ ID NO: 170290 - RNA, 18 nt, Human
uggagcagggcaggcagc

SEQ ID NO: 170291 - RNA, 23 nt, Human
uggguccccauccauggcaaccc

SEQ ID NO: 170292 - RNA, 21 nt, Human
uggguucaugaggcccccuuu

SEQ ID NO: 170293 - RNA, 18 nt, Human
ugguggcugcaggucuuu

SEQ ID NO: 170294 - RNA, 21 nt, Human
aacacagugagaccaaugucu

SEQ ID NO: 170295 - RNA, 22 nt, Human
aacacagugagaccaaugucuc

SEQ ID NO: 170296 - RNA, 19 nt, Human
accagucugggcaacacag

SEQ ID NO: 170297 - RNA, 24 nt, Human
acugcacuccagccugggugacag

SEQ ID NO: 170298 - RNA, 26 nt, Human
acugcacuccagccugggugacagag

SEQ ID NO: 170299 - RNA, 19 nt, Human
agagccgugauugcgccac

SEQ ID NO: 170300 - RNA, 24 nt, Human
agccugggugacagagcaagacuu

SEQ ID NO: 170301 - RNA, 19 nt, Human
aggucgaggcugcagagag

SEQ ID NO: 170302 - RNA, 22 nt, Human
agucugggcaacacagugagac

SEQ ID NO: 170303 - RNA, 24 nt, Human
auugcgccacugcacuccagccug

SEQ ID NO: 170304 - RNA, 18 nt, Human
caacacagugagaccaau

SEQ ID NO: 170305 - RNA, 22 nt, Human
cacuccagccugggugacagag

SEQ ID NO: 170306 - RNA, 23 nt, Human
cacuccagccugggugacagagc

SEQ ID NO: 170307 - RNA, 19 nt, Human
cacugcacuccagccuggg

SEQ ID NO: 170308 - RNA, 21 nt, Human
cacugcacuccagccugggug

SEQ ID NO: 170309 - RNA, 22 nt, Human
cacugcacuccagccuggguga

SEQ ID NO: 170310 - RNA, 23 nt, Human
cacugcacuccagccugggugac

SEQ ID NO: 170311 - RNA, 24 nt, Human
cacugcacuccagccugggugaca

SEQ ID NO: 170312 - RNA, 24 nt, Human
cacugcacuccagccugggugaca

SEQ ID NO: 170313 - RNA, 18 nt, Human
cagcacuucgggaggcag

SEQ ID NO: 170314 - RNA, 18 nt, Human
ccacugcacuccagccug

SEQ ID NO: 170315 - RNA, 20 nt, Human
ccacugcacuccagccuggg

SEQ ID NO: 170316 - RNA, 20 nt, Human
ccacugcacuccagccuggg

SEQ ID NO: 170317 - RNA, 20 nt, Human
ccacugcacuccagccuggg

SEQ ID NO: 170318 - RNA, 20 nt, Human
ccacugcacuccagccuggg

SEQ ID NO: 170319 - RNA, 21 nt, Human
ccacugcacuccagccugggu

SEQ ID NO: 170320 - RNA, 21 nt, Human
ccacugcacuccagccugggu

SEQ ID NO: 170321 - RNA, 24 nt, Human
ccacugcacuccagccugggugac

SEQ ID NO: 170322 - RNA, 21 nt, Human
ccugggugacagagcaagacu

SEQ ID NO: 170323 - RNA, 26 nt, Human
cgccacugcacuccagccugggugac

SEQ ID NO: 170324 - RNA, 24 nt, Human
cgugauugcgccacugcacuccag

SEQ ID NO: 170325 - RNA, 20 nt, Human
cuguaauacagcacuucggg

SEQ ID NO: 170326 - RNA, 19 nt, Human
gcaacacagugagaccaau

SEQ ID NO: 170327 - RNA, 24 nt, Human
gcacuccagccugggugacagagc

SEQ ID NO: 170328 - RNA, 19 nt, Human
gccacugcacuccagccug

SEQ ID NO: 170329 - RNA, 24 nt, Human
gccacugcacuccagccuggguga

SEQ ID NO: 170330 - RNA, 18 nt, Human
ggaggucgaggcugcaga

SEQ ID NO: 170331 - RNA, 24 nt, Human
uaccuguagucccaucuacucagg

SEQ ID NO: 170332 - RNA, 24 nt, Human
uccagccugggugacagagcaaga

SEQ ID NO: 170333 - RNA, 28 nt, Human
ucccuucaaccuaggaguucaaggaacu

SEQ ID NO: 170334 - RNA, 22 nt, Human
ucuguaauacagcacuucggga

SEQ ID NO: 170335 - RNA, 22 nt, Human
uucaaccuaggaguucaagacc

SEQ ID NO: 170336 - RNA, 22 nt, Human
aaauguguagaagcacugucag

SEQ ID NO: 170337 - RNA, 21 nt, Human
accuuaaagguaugccaggaa

SEQ ID NO: 170338 - RNA, 20 nt, Human
cagagaaaaaccuccacaga

SEQ ID NO: 170339 - RNA, 21 nt, Human
cagagaaaaaccuccacagau

SEQ ID NO: 170340 - RNA, 22 nt, Human
cagcuuccuaauguaucacaug

SEQ ID NO: 170341 - RNA, 21 nt, Human
cauggaauuaauaguuccuga

SEQ ID NO: 170342 - RNA, 19 nt, Human
gcagagaaaaaccuccaca

SEQ ID NO: 170343 - RNA, 21 nt, Human
gcagagaaaaaccuccacaga

SEQ ID NO: 170344 - RNA, 23 nt, Human
uagaagcacugucagcuccuugu

SEQ ID NO: 170345 - RNA, 26 nt, Human
uagaagcacugucagcuccuugugac

SEQ ID NO: 170346 - RNA, 28 nt, Human
uucuuuaauuauuauuguuguuacuaau

SEQ ID NO: 170347 - RNA, 20 nt, Human
aagauauaggaaagcuguag

SEQ ID NO: 170348 - RNA, 22 nt, Human
aauagaagauauaggaaagcug

SEQ ID NO: 170349 - RNA, 21 nt, Human
aaucuaugaagucaaaaacug

SEQ ID NO: 170350 - RNA, 23 nt, Human
acugcagaaaguucugaagaauc

SEQ ID NO: 170351 - RNA, 18 nt, Human
agaauagaagauauagga

SEQ ID NO: 170352 - RNA, 19 nt, Human
ccgaaauggcuagaugggg

SEQ ID NO: 170353 - RNA, 21 nt, Human
ccucggugucuuccgaaaugg

SEQ ID NO: 170354 - RNA, 19 nt, Human
cgaaauggcuagauggggg

SEQ ID NO: 170355 - RNA, 19 nt, Human
cuaugaagucaaaaacugc

SEQ ID NO: 170356 - RNA, 21 nt, Human
cuuccgaaauggcuagauggg

SEQ ID NO: 170357 - RNA, 22 nt, Human
cuugcagugagaugcuuuuuuu

SEQ ID NO: 170358 - RNA, 26 nt, Human
uaaagcauaaucuaugaagucaaaaa

SEQ ID NO: 170359 - RNA, 22 nt, Human
uagaauagaagauauaggaaag

SEQ ID NO: 170360 - RNA, 21 nt, Human
ucaguguauguuuucaaagcc

SEQ ID NO: 170361 - RNA, 27 nt, Human
ucuuccuccucuuccucggugucuucc

SEQ ID NO: 170362 - RNA, 24 nt, Human
ucuuccucggugucuuccgaaaug

SEQ ID NO: 170363 - RNA, 20 nt, Human
ugacuugcagugagaugcuu

SEQ ID NO: 170364 - RNA, 23 nt, Human
ugcaauaaguuaaaaaaaauuuu

SEQ ID NO: 170365 - RNA, 24 nt, Human
uuauagagaguuuaccacucuaga

SEQ ID NO: 170366 - RNA, 21 nt, Human
uuuuuguuuuuggcaucugcu

SEQ ID NO: 170367 - RNA, 22 nt, Human
uuuuuuuuuuuugcacaaaggc

SEQ ID NO: 170368 - RNA, 22 nt, Human
uuuuuuuuuuuugcacaaaggc

SEQ ID NO: 170369 - RNA, 18 nt, Human
uuuuuuuuuuuuuuuuug

SEQ ID NO: 170370 - RNA, 18 nt, Human
uuuuuuuuuuuuuuuuug

SEQ ID NO: 170371 - RNA, 23 nt, Human
uuuuuuuuuuuuuuuuugcacaa

SEQ ID NO: 170372 - RNA, 23 nt, Human
uuuuuuuuuuuuuuuuugcacaa

SEQ ID NO: 170373 - RNA, 21 nt, Human
aaaaacaaauuaauguuugga

SEQ ID NO: 170374 - RNA, 23 nt, Human
aaaacuacacacacagagaaagc

SEQ ID NO: 170375 - RNA, 18 nt, Human
aaaaucacaggaaccuau

SEQ ID NO: 170376 - RNA, 21 nt, Human
aaacaugaaaugcaaauauga

SEQ ID NO: 170377 - RNA, 23 nt, Human
aaaccucuccuccggggacaccc

SEQ ID NO: 170378 - RNA, 18 nt, Human
aagaagagacagggccaa

SEQ ID NO: 170379 - RNA, 21 nt, Human
aagagguucagauuugggucu

SEQ ID NO: 170380 - RNA, 25 nt, Human
aagcaaauacuggugauuuggcgac

SEQ ID NO: 170381 - RNA, 19 nt, Human
aagcacuccuagaaaugaa

SEQ ID NO: 170382 - RNA, 20 nt, Human
aagcccuaugcuuuuagagg

SEQ ID NO: 170383 - RNA, 19 nt, Human
aagcugcagaacucaagag

SEQ ID NO: 170384 - RNA, 22 nt, Human
aagcugcagaacucaagaggaa

SEQ ID NO: 170385 - RNA, 20 nt, Human
aaggcacccuugcuccucug

SEQ ID NO: 170386 - RNA, 18 nt, Human
aagggcugguaaaaccuu

SEQ ID NO: 170387 - RNA, 19 nt, Human
aaguaucugcaucauuugg

SEQ ID NO: 170388 - RNA, 21 nt, Human
aaguaucugcaucauuugggu

SEQ ID NO: 170389 - RNA, 21 nt, Human
aaucaggaguuacaaaaacaa

SEQ ID NO: 170390 - RNA, 19 nt, Human
aaucuggucaucuuguuuu

SEQ ID NO: 170391 - RNA, 19 nt, Human
acaaaacuacacacacaga

SEQ ID NO: 170392 - RNA, 24 nt, Human
acacagagaaagcccaaggaagcc

SEQ ID NO: 170393 - RNA, 22 nt, Human
acacuggguuaacuagcaguau

SEQ ID NO: 170394 - RNA, 21 nt, Human
acagaagcugcagaacucaag

SEQ ID NO: 170395 - RNA, 21 nt, Human
acccugcuaaguucucucugg

SEQ ID NO: 170396 - RNA, 18 nt, Human
acccugcuuuccaaaaac

SEQ ID NO: 170397 - RNA, 26 nt, Human
acggcggcagcgagcuguaagcggag

SEQ ID NO: 170398 - RNA, 23 nt, Human
acugauuugccucaacuucucag

SEQ ID NO: 170399 - RNA, 19 nt, Human
acuuucuuuuauccucauc

SEQ ID NO: 170400 - RNA, 19 nt, Human
agaagaaggaaaaaucaca

SEQ ID NO: 170401 - RNA, 23 nt, Human
agacacuggucugugccuccuca

SEQ ID NO: 170402 - RNA, 19 nt, Human
agaggcaguuauugggacc

SEQ ID NO: 170403 - RNA, 22 nt, Human
agcaaauacuggugauuuggcg

SEQ ID NO: 170404 - RNA, 23 nt, Human
agcagacacuuguguauacugaa

SEQ ID NO: 170405 - RNA, 23 nt, Human
aggaagaaucaggaguuacaaaa

SEQ ID NO: 170406 - RNA, 19 nt, Human
agggcugaaggaaccaaac

SEQ ID NO: 170407 - RNA, 26 nt, Human
aucuccauuuucuucccccuguugaa

SEQ ID NO: 170408 - RNA, 22 nt, Human
augaaaugcaaauaugaagaca

SEQ ID NO: 170409 - RNA, 27 nt, Human
caacuugccaaaaaaaaaggccaaugg

SEQ ID NO: 170410 - RNA, 20 nt, Human
caaugaucagaaccacagaa

SEQ ID NO: 170411 - RNA, 23 nt, Human
cacacacagagaaagcccaagga

SEQ ID NO: 170412 - RNA, 23 nt, Human
caccaggaagaaccccaaacucc

SEQ ID NO: 170413 - RNA, 22 nt, Human
cacgugggcuuguuagcaggca

SEQ ID NO: 170414 - RNA, 23 nt, Human
cagaaccacagaauuuauaacuu

SEQ ID NO: 170415 - RNA, 21 nt, Human
cagagaaagcccaaggaagcc

SEQ ID NO: 170416 - RNA, 24 nt, Human
cagagaaagcccaaggaagccugc

SEQ ID NO: 170417 - RNA, 19 nt, Human
cagggccaacucacccucc

SEQ ID NO: 170418 - RNA, 23 nt, Human
caguuauugggaccaagagaugc

SEQ ID NO: 170419 - RNA, 23 nt, Human
cauucagacugguccacgugggc

SEQ ID NO: 170420 - RNA, 19 nt, Human
ccagaaaaaagaagagaca

SEQ ID NO: 170421 - RNA, 19 nt, Human
cccauaguguccaagggcu

SEQ ID NO: 170422 - RNA, 26 nt, Human
cccccuguugaaucugaaagguuuuc

SEQ ID NO: 170423 - RNA, 19 nt, Human
ccccugcaccaggaagaac

SEQ ID NO: 170424 - RNA, 20 nt, Human
cccugcaccaggaagaaccc

SEQ ID NO: 170425 - RNA, 18 nt, Human
ccucagaucaugugauuc

SEQ ID NO: 170426 - RNA, 21 nt, Human
ccuccagccccagagcaccau

SEQ ID NO: 170427 - RNA, 23 nt, Human
ccucuccguggagcuucccaaac

SEQ ID NO: 170428 - RNA, 18 nt, Human
ccugcuaaguucucucug

SEQ ID NO: 170429 - RNA, 21 nt, Human
ccuuccuagccagccaccuuc

SEQ ID NO: 170430 - RNA, 20 nt, Human
cggcauagacgacagcugcc

SEQ ID NO: 170431 - RNA, 19 nt, Human
cucuuucccacucucuucc

SEQ ID NO: 170432 - RNA, 24 nt, Human
cugauggucuuuaaucugcuuucu

SEQ ID NO: 170433 - RNA, 19 nt, Human
cugcaggcuaagcccuaug

SEQ ID NO: 170434 - RNA, 20 nt, Human
cugcauuucagacugaacaa

SEQ ID NO: 170435 - RNA, 21 nt, Human
cugcauuucagacugaacaag

SEQ ID NO: 170436 - RNA, 23 nt, Human
gaaaugcaaauaugaagacagag

SEQ ID NO: 170437 - RNA, 23 nt, Human
gaaccaaaccuaguuuaauccug

SEQ ID NO: 170438 - RNA, 19 nt, Human
gaagaauaaagucaacuug

SEQ ID NO: 170439 - RNA, 18 nt, Human
gacacugugguuucuugc

SEQ ID NO: 170440 - RNA, 18 nt, Human
gacagaguggggugguuc

SEQ ID NO: 170441 - RNA, 23 nt, Human
gaccaaugaucagaaccacagaa

SEQ ID NO: 170442 - RNA, 19 nt, Human
gcaucuaguauguggcagg

SEQ ID NO: 170443 - RNA, 19 nt, Human
gcugggauccagacacugg

SEQ ID NO: 170444 - RNA, 20 nt, Human
ggaggucugucaugcugacg

SEQ ID NO: 170445 - RNA, 20 nt, Human
ggauacauaaaagcuugaaa

SEQ ID NO: 170446 - RNA, 22 nt, Human
ggcgcggggcaggacggcggca

SEQ ID NO: 170447 - RNA, 19 nt, Human
gggcugaaggaaccaaacc

SEQ ID NO: 170448 - RNA, 20 nt, Human
ggugggacuacugaaaaaua

SEQ ID NO: 170449 - RNA, 18 nt, Human
gucaacuugccaaaaaaa

SEQ ID NO: 170450 - RNA, 22 nt, Human
gucaacuugccaaaaaaaaagu

SEQ ID NO: 170451 - RNA, 24 nt, Human
uaaauacaaauacaaguucacaaa

SEQ ID NO: 170452 - RNA, 22 nt, Human
uaacagaugcuauaguguuuac

SEQ ID NO: 170453 - RNA, 18 nt, Human
uaaggcacccuugcuccu

SEQ ID NO: 170454 - RNA, 22 nt, Human
uaaucacagaagucgaaagaca

SEQ ID NO: 170455 - RNA, 22 nt, Human
uacaaccuaaauaauuuccuuc

SEQ ID NO: 170456 - RNA, 24 nt, Human
uacugauuugccucaacuucucag

SEQ ID NO: 170457 - RNA, 18 nt, Human
uagaaggaauucuauuuu

SEQ ID NO: 170458 - RNA, 22 nt, Human
uagccuccagccccagagcacc

SEQ ID NO: 170459 - RNA, 18 nt, Human
uaguggacugcuggaagc

SEQ ID NO: 170460 - RNA, 21 nt, Human
uauggaagacuccccagacua

SEQ ID NO: 170461 - RNA, 19 nt, Human
uccaagggcugguaaaacc

SEQ ID NO: 170462 - RNA, 23 nt, Human
uccuuacuagccuccagccccag

SEQ ID NO: 170463 - RNA, 23 nt, Human
uccuuuauugcaaaacaaauaaa

SEQ ID NO: 170464 - RNA, 19 nt, Human
ucugcaaaugagaucuuau

SEQ ID NO: 170465 - RNA, 20 nt, Human
ucugcuuucugcaaaugaga

SEQ ID NO: 170466 - RNA, 19 nt, Human
ugaagacagaguggggugg

SEQ ID NO: 170467 - RNA, 22 nt, Human
ugaagagacacugugguuucuu

SEQ ID NO: 170468 - RNA, 20 nt, Human
ugaaucugaaacuuucuuuu

SEQ ID NO: 170469 - RNA, 25 nt, Human
ugacggcaauggaaagaggcuggaa

SEQ ID NO: 170470 - RNA, 26 nt, Human
ugagaacaagaaaaacuagaaggaau

SEQ ID NO: 170471 - RNA, 18 nt, Human
ugcaaaacaaauaaacaa

SEQ ID NO: 170472 - RNA, 23 nt, Human
ugcaaaacaaauaaacaaaauaa

SEQ ID NO: 170473 - RNA, 21 nt, Human
ugccucaacuucucagaauaa

SEQ ID NO: 170474 - RNA, 22 nt, Human
uggcaucgugugcacucccugc

SEQ ID NO: 170475 - RNA, 18 nt, Human
ugggacuacugaaaaaua

SEQ ID NO: 170476 - RNA, 23 nt, Human
ugggacuacugaaaaauaauuac

SEQ ID NO: 170477 - RNA, 24 nt, Human
ugggcugcaucuaguauguggcag

SEQ ID NO: 170478 - RNA, 25 nt, Human
uggucugguccaggucuccuggggg

SEQ ID NO: 170479 - RNA, 24 nt, Human
ugguucucuuucccacucucuucc

SEQ ID NO: 170480 - RNA, 18 nt, Human
uguuuagauuguuucuug

SEQ ID NO: 170481 - RNA, 20 nt, Human
uuaaacaugaaaugcaaaua

SEQ ID NO: 170482 - RNA, 21 nt, Human
uuacaaaagcuuaauaccuag

SEQ ID NO: 170483 - RNA, 23 nt, Human
uuacccaugaggacuccauauca

SEQ ID NO: 170484 - RNA, 22 nt, Human
uucacaaacacauaugcaacag

SEQ ID NO: 170485 - RNA, 22 nt, Human
uucucagaauaaauaaaaacaa

SEQ ID NO: 170486 - RNA, 23 nt, Human
uugaagaguuuuuagaugggaug

SEQ ID NO: 170487 - RNA, 18 nt, Human
uugcccuccucccauagu

SEQ ID NO: 170488 - RNA, 21 nt, Human
uugcucuugggaguucaaugu

SEQ ID NO: 170489 - RNA, 19 nt, Human
uugggucuguuccucuuuc

SEQ ID NO: 170490 - RNA, 19 nt, Human
uuuacaguuucucuuaaag

SEQ ID NO: 170491 - RNA, 25 nt, Human
uuucucuuaaagcacuccuagaaau

SEQ ID NO: 170492 - RNA, 19 nt, Human
uuuuuuuuuuuuucacuuu

SEQ ID NO: 170493 - RNA, 26 nt, Human
uuuuuuuuuuuuuuuuucacuuuaau

SEQ ID NO: 170494 - RNA, 26 nt, Human
aaaaaaaaaaaaaaaggcuucuuuga

SEQ ID NO: 170495 - RNA, 24 nt, Human
aagcacagcccgugucaggagcac

SEQ ID NO: 170496 - RNA, 18 nt, Human
aagcuccccacacuccuc

SEQ ID NO: 170497 - RNA, 21 nt, Human
aagcuccccacacuccucacc

SEQ ID NO: 170498 - RNA, 20 nt, Human
aaggcuucuuugagucuuuu

SEQ ID NO: 170499 - RNA, 20 nt, Human
aagggccuggcuugcugggc

SEQ ID NO: 170500 - RNA, 18 nt, Human
acagugcccugcucugag

SEQ ID NO: 170501 - RNA, 19 nt, Human
acuagacccuccguacaca

SEQ ID NO: 170502 - RNA, 23 nt, Human
agcacagcccgugucaggagcac

SEQ ID NO: 170503 - RNA, 28 nt, Human
aggagcccugggugugaaccccacugug

SEQ ID NO: 170504 - RNA, 18 nt, Human
agggggcacacugggcau

SEQ ID NO: 170505 - RNA, 19 nt, Human
caagaccagcaccuggcug

SEQ ID NO: 170506 - RNA, 18 nt, Human
caagcuccccacacuccu

SEQ ID NO: 170507 - RNA, 21 nt, Human
cacagcccgugucaggagcac

SEQ ID NO: 170508 - RNA, 25 nt, Human
cacaggacgcaaaggggcacacaga

SEQ ID NO: 170509 - RNA, 24 nt, Human
cacagguaaggcacugccuggggg

SEQ ID NO: 170510 - RNA, 23 nt, Human
cacccagacuagaggcuuggggc

SEQ ID NO: 170511 - RNA, 23 nt, Human
cacuccucaccccagaccgggga

SEQ ID NO: 170512 - RNA, 22 nt, Human
cagauggaggggagggugagcc

SEQ ID NO: 170513 - RNA, 21 nt, Human
cagcagcaggggagacgcugg

SEQ ID NO: 170514 - RNA, 23 nt, Human
cagggccccaggguggggugggc

SEQ ID NO: 170515 - RNA, 22 nt, Human
cauccuagagaagggcccuaaa

SEQ ID NO: 170516 - RNA, 22 nt, Human
ccacacgcacucagacuagacc

SEQ ID NO: 170517 - RNA, 21 nt, Human
ccaccagccggcccccaggcc

SEQ ID NO: 170518 - RNA, 19 nt, Human
ccagacuagaggcuugggg

SEQ ID NO: 170519 - RNA, 22 nt, Human
ccagcagagaaugcccagcccu

SEQ ID NO: 170520 - RNA, 23 nt, Human
cccacacgcacucagacuagacc

SEQ ID NO: 170521 - RNA, 24 nt, Human
cccacacgcacucagacuagaccc

SEQ ID NO: 170522 - RNA, 22 nt, Human
cccaccagccggcccccaggcc

SEQ ID NO: 170523 - RNA, 25 nt, Human
cccacccaccagccggcccccaggc

SEQ ID NO: 170524 - RNA, 21 nt, Human
cccagacuagaggcuuggggc

SEQ ID NO: 170525 - RNA, 18 nt, Human
cccauagcuggucugagg

SEQ ID NO: 170526 - RNA, 19 nt, Human
cccauagcuggucugaggc

SEQ ID NO: 170527 - RNA, 21 nt, Human
cccgugguccccgccagagcu

SEQ ID NO: 170528 - RNA, 23 nt, Human
cccuccauacacacccaggcuag

SEQ ID NO: 170529 - RNA, 23 nt, Human
cccuccauacacacccaggcuag

SEQ ID NO: 170530 - RNA, 24 nt, Human
cccuccauacucacccaggcuaga

SEQ ID NO: 170531 - RNA, 24 nt, Human
cccuccauacucacccaggcuaga

SEQ ID NO: 170532 - RNA, 24 nt, Human
cccuccauacucacccaggcuaga

SEQ ID NO: 170533 - RNA, 24 nt, Human
cccuccauacucacccaggcuaga

SEQ ID NO: 170534 - RNA, 24 nt, Human
cccuccguacucacccaggcuaga

SEQ ID NO: 170535 - RNA, 24 nt, Human
cccuccguacucacccaggcuaga

SEQ ID NO: 170536 - RNA, 22 nt, Human
cccugcucugagcugccgcugg

SEQ ID NO: 170537 - RNA, 18 nt, Human
ccgcuggcugcuccacgu

SEQ ID NO: 170538 - RNA, 19 nt, Human
ccucaugaacugacgugga

SEQ ID NO: 170539 - RNA, 23 nt, Human
ccuccauacacacccaggcuaga

SEQ ID NO: 170540 - RNA, 23 nt, Human
ccuccauacacacccaggcuaga

SEQ ID NO: 170541 - RNA, 23 nt, Human
ccuccauacacacccaggcuaga

SEQ ID NO: 170542 - RNA, 19 nt, Human
ccuccauacucacccaggc

SEQ ID NO: 170543 - RNA, 19 nt, Human
ccuccauacucacccaggc

SEQ ID NO: 170544 - RNA, 19 nt, Human
ccuccauacucacccaggc

SEQ ID NO: 170545 - RNA, 19 nt, Human
ccuccauacucacccaggc

SEQ ID NO: 170546 - RNA, 23 nt, Human
ccuccguacacacccagacuaga

SEQ ID NO: 170547 - RNA, 23 nt, Human
ccuccguacacacccaggcuaga

SEQ ID NO: 170548 - RNA, 23 nt, Human
ccuccguacacacccaggcuaga

SEQ ID NO: 170549 - RNA, 22 nt, Human
ccuucuuggccuucaugaaggg

SEQ ID NO: 170550 - RNA, 20 nt, Human
cggaugucacacaugcgugg

SEQ ID NO: 170551 - RNA, 22 nt, Human
cggcccccaggccucccuuccu

SEQ ID NO: 170552 - RNA, 24 nt, Human
cgugggagaacuggcccaagacca

SEQ ID NO: 170553 - RNA, 19 nt, Human
cguguuguccucuccccau

SEQ ID NO: 170554 - RNA, 22 nt, Human
cuagacccuccauacacaccca

SEQ ID NO: 170555 - RNA, 22 nt, Human
cuagacccuccauacacaccca

SEQ ID NO: 170556 - RNA, 22 nt, Human
cuagacccuccauacucaccca

SEQ ID NO: 170557 - RNA, 22 nt, Human
cuagacccuccauacucaccca

SEQ ID NO: 170558 - RNA, 22 nt, Human
cuagacccuccauacucaccca

SEQ ID NO: 170559 - RNA, 22 nt, Human
cuagacccuccauacucaccca

SEQ ID NO: 170560 - RNA, 22 nt, Human
cuagacccuccguacacaccca

SEQ ID NO: 170561 - RNA, 22 nt, Human
cuagacccuccguacacaccca

SEQ ID NO: 170562 - RNA, 22 nt, Human
cuagacccuccguacacaccca

SEQ ID NO: 170563 - RNA, 22 nt, Human
cuagacccuccguacucaccca

SEQ ID NO: 170564 - RNA, 22 nt, Human
cuagacccuccguacucaccca

SEQ ID NO: 170565 - RNA, 22 nt, Human
cuagauccuccauacacaccca

SEQ ID NO: 170566 - RNA, 22 nt, Human
cuccauacacacccaggcuaga

SEQ ID NO: 170567 - RNA, 22 nt, Human
cuccauacacacccaggcuaga

SEQ ID NO: 170568 - RNA, 22 nt, Human
cuccauacacacccaggcuaga

SEQ ID NO: 170569 - RNA, 20 nt, Human
cuccccggcaauaggucuua

SEQ ID NO: 170570 - RNA, 22 nt, Human
cuccguacacacccagacuaga

SEQ ID NO: 170571 - RNA, 22 nt, Human
cuccguacacacccaggcuaga

SEQ ID NO: 170572 - RNA, 22 nt, Human
cuccguacacacccaggcuaga

SEQ ID NO: 170573 - RNA, 22 nt, Human
cuccguacucacccaggcuaga

SEQ ID NO: 170574 - RNA, 24 nt, Human
cucuccguacucacccaggcuaga

SEQ ID NO: 170575 - RNA, 23 nt, Human
cuggggcauccuagagaagggcc

SEQ ID NO: 170576 - RNA, 21 nt, Human
cuggugucgccagccccggcu

SEQ ID NO: 170577 - RNA, 18 nt, Human
gaagcuggaguucuuggg

SEQ ID NO: 170578 - RNA, 19 nt, Human
gaagcuggaguucuugggc

SEQ ID NO: 170579 - RNA, 22 nt, Human
gacacagugcccugcucugagc

SEQ ID NO: 170580 - RNA, 23 nt, Human
gacagcagcaggggagacgcugg

SEQ ID NO: 170581 - RNA, 18 nt, Human
gaccagcaccuggcugga

SEQ ID NO: 170582 - RNA, 23 nt, Human
gagcacaggccgugcccuuuccc

SEQ ID NO: 170583 - RNA, 21 nt, Human
gagcaucaacgcagauggagg

SEQ ID NO: 170584 - RNA, 19 nt, Human
gagcugccgcuggcugcuc

SEQ ID NO: 170585 - RNA, 22 nt, Human
gaggcuggaggaggaugcccaa

SEQ ID NO: 170586 - RNA, 20 nt, Human
gauggggggccucgggcacc

SEQ ID NO: 170587 - RNA, 18 nt, Human
gcagggccccaggguggg

SEQ ID NO: 170588 - RNA, 25 nt, Human
gcagggccccaggguggggugggcu

SEQ ID NO: 170589 - RNA, 22 nt, Human
gccggcccccaggccucccuuc

SEQ ID NO: 170590 - RNA, 18 nt, Human
gccucccuuccucagucc

SEQ ID NO: 170591 - RNA, 18 nt, Human
gccuggcugaggcuccug

SEQ ID NO: 170592 - RNA, 18 nt, Human
ggauccccaagugguccg

SEQ ID NO: 170593 - RNA, 19 nt, Human
ggcaauaaauaacagggga

SEQ ID NO: 170594 - RNA, 23 nt, Human
ggcacuuuucugggcaccacagg

SEQ ID NO: 170595 - RNA, 21 nt, Human
ggcugccuggcugaggcuccu

SEQ ID NO: 170596 - RNA, 22 nt, Human
ggcuggugucgccagccccggc

SEQ ID NO: 170597 - RNA, 21 nt, Human
gggcuggggcauccuagagaa

SEQ ID NO: 170598 - RNA, 20 nt, Human
gggggaccaaggagcccugg

SEQ ID NO: 170599 - RNA, 23 nt, Human
gggucugcaggccuggccggggc

SEQ ID NO: 170600 - RNA, 24 nt, Human
gggucugcaggccuggccggggca

SEQ ID NO: 170601 - RNA, 24 nt, Human
gggugguucuguggccaagcacag

SEQ ID NO: 170602 - RNA, 22 nt, Human
gguaaggcacugccugggggcu

SEQ ID NO: 170603 - RNA, 18 nt, Human
gguucugggauccccaag

SEQ ID NO: 170604 - RNA, 24 nt, Human
gugggcugccuggcugaggcuccu

SEQ ID NO: 170605 - RNA, 21 nt, Human
uaaaucaggcgcucagugucc

SEQ ID NO: 170606 - RNA, 18 nt, Human
uaaggucacaguguucug

SEQ ID NO: 170607 - RNA, 25 nt, Human
uaaggucacaguguucugagguccc

SEQ ID NO: 170608 - RNA, 18 nt, Human
uacacacccaggcuagac

SEQ ID NO: 170609 - RNA, 18 nt, Human
uacacacccaggcuagac

SEQ ID NO: 170610 - RNA, 18 nt, Human
uacacacccaggcuagac

SEQ ID NO: 170611 - RNA, 18 nt, Human
uacacacccaggcuagac

SEQ ID NO: 170612 - RNA, 25 nt, Human
uaucccacccaccagccggccccca

SEQ ID NO: 170613 - RNA, 20 nt, Human
ucaguguccggaacgcaggu

SEQ ID NO: 170614 - RNA, 24 nt, Human
uccauacacacccaggcuagaccc

SEQ ID NO: 170615 - RNA, 24 nt, Human
uccauacacacccaggcuagaccc

SEQ ID NO: 170616 - RNA, 24 nt, Human
uccauacacacccaggcuagacuc

SEQ ID NO: 170617 - RNA, 24 nt, Human
uccauacucacccaggcuagaccc

SEQ ID NO: 170618 - RNA, 24 nt, Human
uccauacucacccaggcuagaccc

SEQ ID NO: 170619 - RNA, 24 nt, Human
uccauacucacccaggcuagaccc

SEQ ID NO: 170620 - RNA, 18 nt, Human
ucccagggggcacacugg

SEQ ID NO: 170621 - RNA, 23 nt, Human
uccccggcaauaggucuuagggu

SEQ ID NO: 170622 - RNA, 21 nt, Human
uccgccggacacagugcccug

SEQ ID NO: 170623 - RNA, 24 nt, Human
uccguacucacccaggcuagaccc

SEQ ID NO: 170624 - RNA, 24 nt, Human
uccguacucacccaggcuagaccc

SEQ ID NO: 170625 - RNA, 24 nt, Human
uccguacucacccaggcuagaccc

SEQ ID NO: 170626 - RNA, 23 nt, Human
uccuccauacacacccaggcuag

SEQ ID NO: 170627 - RNA, 23 nt, Human
uccuccguguuguccucucccca

SEQ ID NO: 170628 - RNA, 33 nt, Human
ucuguggccaagcacagcccgugucaggagccg

SEQ ID NO: 170629 - RNA, 21 nt, Human
ugaagggccuggcuugcuggg

SEQ ID NO: 170630 - RNA, 19 nt, Human
ugacguggacagcagcagg

SEQ ID NO: 170631 - RNA, 24 nt, Human
ugagcaucaacgcagauggagggg

SEQ ID NO: 170632 - RNA, 21 nt, Human
ugauggggggccucgggcacc

SEQ ID NO: 170633 - RNA, 19 nt, Human
ugcaggccuggccggggca

SEQ ID NO: 170634 - RNA, 21 nt, Human
ugcccaagcuccccacacucc

SEQ ID NO: 170635 - RNA, 19 nt, Human
ugccuggcugaggcuccug

SEQ ID NO: 170636 - RNA, 23 nt, Human
ugccugggggcuggaggaggcug

SEQ ID NO: 170637 - RNA, 19 nt, Human
uggaggaggcuggaggagg

SEQ ID NO: 170638 - RNA, 25 nt, Human
uggaggaggcuggaggaggaugccc

SEQ ID NO: 170639 - RNA, 24 nt, Human
uggaguucuugggcuggcagggaa

SEQ ID NO: 170640 - RNA, 21 nt, Human
uggccaagcacagcccguguc

SEQ ID NO: 170641 - RNA, 21 nt, Human
uggcccaagaccagcaccugg

SEQ ID NO: 170642 - RNA, 23 nt, Human
uggccggggcagguuguggggga

SEQ ID NO: 170643 - RNA, 24 nt, Human
uggcuccgccggacacagugcccu

SEQ ID NO: 170644 - RNA, 22 nt, Human
ugggggcuggaggaggcuggag

SEQ ID NO: 170645 - RNA, 18 nt, Human
uggggugggcugccuggc

SEQ ID NO: 170646 - RNA, 21 nt, Human
uggugggugaggcaggucugg

SEQ ID NO: 170647 - RNA, 21 nt, Human
ugucaggagcacaggccgugc

SEQ ID NO: 170648 - RNA, 24 nt, Human
ugugggggaccaaggagcccuggg

SEQ ID NO: 170649 - RNA, 23 nt, Human
uuagacucugcuguggcaauaaa

SEQ ID NO: 170650 - RNA, 22 nt, Human
uucacaggacgcaaaggggcac

SEQ ID NO: 170651 - RNA, 23 nt, Human
uucaugaagggccuggcuugcug

SEQ ID NO: 170652 - RNA, 20 nt, Human
uuccuuggugaggcagggcc

SEQ ID NO: 170653 - RNA, 24 nt, Human
aaggagaggcggcggcggcggcgg

SEQ ID NO: 170654 - RNA, 27 nt, Human
acaacaccuggguaccaaauuucuuua

SEQ ID NO: 170655 - RNA, 19 nt, Human
accaaauuucuuuauuuga

SEQ ID NO: 170656 - RNA, 19 nt, Human
agacugaaccauuggaaac

SEQ ID NO: 170657 - RNA, 26 nt, Human
aggagaggcggcggcggcggcgguga

SEQ ID NO: 170658 - RNA, 23 nt, Human
aggcggcggcggcggcgguggcu

SEQ ID NO: 170659 - RNA, 23 nt, Human
aucccaagaccucaaagacaaca

SEQ ID NO: 170660 - RNA, 31 nt, Human
cccacggcuauggggaaauuagcccgaggcc

SEQ ID NO: 170661 - RNA, 18 nt, Human
cggcggcgggggccuugg

SEQ ID NO: 170662 - RNA, 18 nt, Human
cuggagcggcggcggggg

SEQ ID NO: 170663 - RNA, 22 nt, Human
cuggagcggcggcgggggccuu

SEQ ID NO: 170664 - RNA, 22 nt, Human
cuguugaagcaggaaaccccga

SEQ ID NO: 170665 - RNA, 21 nt, Human
cuuggugaccagggaagucac

SEQ ID NO: 170666 - RNA, 20 nt, Human
gcggcggcggcggcgguggc

SEQ ID NO: 170667 - RNA, 23 nt, Human
gcggcggcggcggcgguggcuuu

SEQ ID NO: 170668 - RNA, 20 nt, Human
gcggcggcggcgguggcugc

SEQ ID NO: 170669 - RNA, 22 nt, Human
gcggcggcggcgguggcugcgc

SEQ ID NO: 170670 - RNA, 21 nt, Human
gcggcgggggccuuggggcag

SEQ ID NO: 170671 - RNA, 20 nt, Human
gcuggcuaugggcggccggc

SEQ ID NO: 170672 - RNA, 18 nt, Human
ggccggccggggugggga

SEQ ID NO: 170673 - RNA, 24 nt, Human
ggcggcggcggcggcgguggcugg

SEQ ID NO: 170674 - RNA, 19 nt, Human
ggggaaauuagcccgaggc

SEQ ID NO: 170675 - RNA, 19 nt, Human
ggugaccagggaagucacc

SEQ ID NO: 170676 - RNA, 21 nt, Human
uaaauacaaauacucguuucu

SEQ ID NO: 170677 - RNA, 21 nt, Human
uaacucagacucuggauucag

SEQ ID NO: 170678 - RNA, 20 nt, Human
uacaaaucaaagaacuuaag

SEQ ID NO: 170679 - RNA, 24 nt, Human
uacaacuuauagaaaagguaaagg

SEQ ID NO: 170680 - RNA, 24 nt, Human
uauacugcccaaacuaaugaguuu

SEQ ID NO: 170681 - RNA, 25 nt, Human
uggagcggcggcgggggccuugggg

SEQ ID NO: 170682 - RNA, 21 nt, Human
uugaagcaggaaaccccgacg

SEQ ID NO: 170683 - RNA, 21 nt, Human
uuggugaccagggaagucacc

SEQ ID NO: 170684 - RNA, 18 nt, Human
aagauaaaacugaagaga

SEQ ID NO: 170685 - RNA, 18 nt, Human
ccuuuauugcuuugagaa

SEQ ID NO: 170686 - RNA, 18 nt, Human
cgagggcagcagcugagg

SEQ ID NO: 170687 - RNA, 18 nt, Human
cgccccgccuaguggccu

SEQ ID NO: 170688 - RNA, 19 nt, Human
cuuugagaaccagauaacu

SEQ ID NO: 170689 - RNA, 22 nt, Human
gcagcagcugaggugacaagaa

SEQ ID NO: 170690 - RNA, 18 nt, Human
gggaagggaccccguggc

SEQ ID NO: 170691 - RNA, 18 nt, Human
ucggugcgguagcgaggg

SEQ ID NO: 170692 - RNA, 23 nt, Human
ugaaagauaaaacugaagagaac

SEQ ID NO: 170693 - RNA, 22 nt, Human
ugaaagggcaacaugcacgccc

SEQ ID NO: 170694 - RNA, 19 nt, Human
ugacaagaauggcggauag

SEQ ID NO: 170695 - RNA, 27 nt, Human
ugcgguagcgagggcagcagcugaggg

SEQ ID NO: 170696 - RNA, 22 nt, Human
uuuuauggacaccuuuauugcu

SEQ ID NO: 170697 - RNA, 24 nt, Human
aaggagcuaaccacaaaaacggug

SEQ ID NO: 170698 - RNA, 21 nt, Human
agagaguccccggaucuguuc

SEQ ID NO: 170699 - RNA, 20 nt, Human
agauggccgagaagaugguc

SEQ ID NO: 170700 - RNA, 21 nt, Human
aggcuggaagagaguccccgg

SEQ ID NO: 170701 - RNA, 25 nt, Human
caagaaggagcuaaccacaaaaacg

SEQ ID NO: 170702 - RNA, 21 nt, Human
caagagacagacccgcgggac

SEQ ID NO: 170703 - RNA, 31 nt, Human
caggucccagaagcaggagauggccgagaag

SEQ ID NO: 170704 - RNA, 21 nt, Human
uccaaacacuguugaagcaag

SEQ ID NO: 170705 - RNA, 20 nt, Human
ucccagaagcaggagauggc

SEQ ID NO: 170706 - RNA, 20 nt, Human
ucgcugggcucagaaggcuc

SEQ ID NO: 170707 - RNA, 18 nt, Human
ugaagcaagagacagacc

SEQ ID NO: 170708 - RNA, 19 nt, Human
ugcuggcaggucccagaag

SEQ ID NO: 170709 - RNA, 21 nt, Human
ugguuggcaagaaggagcuaa

SEQ ID NO: 170710 - RNA, 20 nt, Human
uuggcuggagggagaggcuu

SEQ ID NO: 170711 - RNA, 19 nt, Human
uuuuuuuuuuuuuuuugca

SEQ ID NO: 170712 - RNA, 18 nt, Human
uuuuuuuuuuuuuuuuug

SEQ ID NO: 170713 - RNA, 21 nt, Human
uuuuuuuuuuuuuuuuugcau

SEQ ID NO: 170714 - RNA, 24 nt, Human
aaaaaccaaagcagacccacugcc

SEQ ID NO: 170715 - RNA, 20 nt, Human
aaaucagcucaaaucucccg

SEQ ID NO: 170716 - RNA, 24 nt, Human
aauuacauuuauguucuugggagc

SEQ ID NO: 170717 - RNA, 21 nt, Human
accauuaugaaaauggcacaa

SEQ ID NO: 170718 - RNA, 19 nt, Human
agagaaagagagagagaga

SEQ ID NO: 170719 - RNA, 19 nt, Human
agagagagagagaaagaga

SEQ ID NO: 170720 - RNA, 22 nt, Human
agcaaaaaccaaagcagaccca

SEQ ID NO: 170721 - RNA, 21 nt, Human
agcaaucccccagccucagcc

SEQ ID NO: 170722 - RNA, 19 nt, Human
agcuuaaaaggagcuaaug

SEQ ID NO: 170723 - RNA, 24 nt, Human
caccagaaagacagaaguuaaucc

SEQ ID NO: 170724 - RNA, 25 nt, Human
caccagaaagacagaaguuaauccc

SEQ ID NO: 170725 - RNA, 24 nt, Human
caccucuuucucuugauaacuuuc

SEQ ID NO: 170726 - RNA, 24 nt, Human
cagcaaaaaccaaagcagacccac

SEQ ID NO: 170727 - RNA, 24 nt, Human
cagccacacuaagaacuggaaauc

SEQ ID NO: 170728 - RNA, 18 nt, Human
cagccucagccuucuaaa

SEQ ID NO: 170729 - RNA, 18 nt, Human
cagcucaaaucucccagg

SEQ ID NO: 170730 - RNA, 21 nt, Human
cagcucaaaucucccaggaac

SEQ ID NO: 170731 - RNA, 23 nt, Human
cauacgucuucccuaauuguucc

SEQ ID NO: 170732 - RNA, 19 nt, Human
caucuccaaaaucagcuca

SEQ ID NO: 170733 - RNA, 21 nt, Human
ccacuuguccugcuccaucuc

SEQ ID NO: 170734 - RNA, 21 nt, Human
ccagacacugauauaaauuuc

SEQ ID NO: 170735 - RNA, 24 nt, Human
ccccagccucagccuucuaaagcc

SEQ ID NO: 170736 - RNA, 24 nt, Human
cccccagccucagccuucuaaagc

SEQ ID NO: 170737 - RNA, 19 nt, Human
cccgcgccugcagcgcgcc

SEQ ID NO: 170738 - RNA, 20 nt, Human
cggcggauuccuucugaucc

SEQ ID NO: 170739 - RNA, 20 nt, Human
gagagagaaagagagagaga

SEQ ID NO: 170740 - RNA, 18 nt, Human
gagagagagagaaagaga

SEQ ID NO: 170741 - RNA, 19 nt, Human
gcuauguugcccagguugg

SEQ ID NO: 170742 - RNA, 20 nt, Human
gcuauguugcccagguuggu

SEQ ID NO: 170743 - RNA, 24 nt, Human
ggggguguugcuauguugcccagg

SEQ ID NO: 170744 - RNA, 24 nt, Human
gguuggucuugaacuccugacuuc

SEQ ID NO: 170745 - RNA, 23 nt, Human
uaaaaggagcuaaugaccauuau

SEQ ID NO: 170746 - RNA, 24 nt, Human
uauguugcccagguuggucuugaa

SEQ ID NO: 170747 - RNA, 21 nt, Human
uauuguucaccagaaagacag

SEQ ID NO: 170748 - RNA, 23 nt, Human
ucauuuuuguagacauggggggu

SEQ ID NO: 170749 - RNA, 21 nt, Human
uccagcaaaaaccaaagcaga

SEQ ID NO: 170750 - RNA, 22 nt, Human
uccagcaaaaaccaaagcagac

SEQ ID NO: 170751 - RNA, 26 nt, Human
uccagcaaaaaccaaagcagacccac

SEQ ID NO: 170752 - RNA, 23 nt, Human
ucccuaauuguuccgggaacuuu

SEQ ID NO: 170753 - RNA, 18 nt, Human
ucuguuuuucuccauccu

SEQ ID NO: 170754 - RNA, 21 nt, Human
ucuugaacuccugacuucaag

SEQ ID NO: 170755 - RNA, 24 nt, Human
ugaacuccugacuucaagcaaucc

SEQ ID NO: 170756 - RNA, 21 nt, Human
ugaccauuaugaaaauggcac

SEQ ID NO: 170757 - RNA, 19 nt, Human
ugacuucaagcaauccccc

SEQ ID NO: 170758 - RNA, 20 nt, Human
ugacuucaagcaauccccca

SEQ ID NO: 170759 - RNA, 24 nt, Human
ugacuucaagcaaucccccagccu

SEQ ID NO: 170760 - RNA, 24 nt, Human
ugcccagguuggucuugaacuccu

SEQ ID NO: 170761 - RNA, 22 nt, Human
ugcuauguugcccagguugguc

SEQ ID NO: 170762 - RNA, 23 nt, Human
ugggagcccagacacugauauaa

SEQ ID NO: 170763 - RNA, 20 nt, Human
uggguuuacaggcaugagug

SEQ ID NO: 170764 - RNA, 24 nt, Human
uggguuuacaggcaugaguggccu

SEQ ID NO: 170765 - RNA, 20 nt, Human
ugguuaaaaagagagagaga

SEQ ID NO: 170766 - RNA, 22 nt, Human
ugguuugcuuuuugguuuuuca

SEQ ID NO: 170767 - RNA, 19 nt, Human
uguccugcuccaucuccaa

SEQ ID NO: 170768 - RNA, 20 nt, Human
uguccugcuccaucuccaaa

SEQ ID NO: 170769 - RNA, 23 nt, Human
uguugcuauguugcccagguugg

SEQ ID NO: 170770 - RNA, 21 nt, Human
uuaaaaggagcuaaugaccau

SEQ ID NO: 170771 - RNA, 21 nt, Human
uuaaacagccacacuaagaac

SEQ ID NO: 170772 - RNA, 21 nt, Human
uuccuucugauccuucccaca

SEQ ID NO: 170773 - RNA, 18 nt, Human
uugcccagguuggucuug

SEQ ID NO: 170774 - RNA, 21 nt, Human
uugcuauguugcccagguugg

SEQ ID NO: 170775 - RNA, 18 nt, Human
uuuucuuuugguuugcuu

SEQ ID NO: 170776 - RNA, 22 nt, Human
uuuuugguuuuucauuuuugua

SEQ ID NO: 170777 - RNA, 23 nt, Human
aaaaagcuguuccagaaccuggg

SEQ ID NO: 170778 - RNA, 20 nt, Human
aagcaagcaacgaaguucca

SEQ ID NO: 170779 - RNA, 25 nt, Human
acaggacaaaaagcuguuccagaac

SEQ ID NO: 170780 - RNA, 21 nt, Human
aguuccaacaccgcugagcac

SEQ ID NO: 170781 - RNA, 18 nt, Human
caaaauaacgaggguaac

SEQ ID NO: 170782 - RNA, 25 nt, Human
caaaauaacgaggguaaccgguacc

SEQ ID NO: 170783 - RNA, 23 nt, Human
caacaccgcugagcaccgacgcc

SEQ ID NO: 170784 - RNA, 22 nt, Human
cacuuuuaaugggaaccagagg

SEQ ID NO: 170785 - RNA, 22 nt, Human
cgcacaggcaagcaagcaacga

SEQ ID NO: 170786 - RNA, 24 nt, Human
cgcgcacaggcaagcaagcaacga

SEQ ID NO: 170787 - RNA, 26 nt, Human
cgcgcacaggcaagcaagcaacgaag

SEQ ID NO: 170788 - RNA, 24 nt, Human
uacaaaauaacgaggguaacacug

SEQ ID NO: 170789 - RNA, 21 nt, Human
uacaauuacauaguccgacac

SEQ ID NO: 170790 - RNA, 21 nt, Human
uaguccgacacaaaaaaaacc

SEQ ID NO: 170791 - RNA, 21 nt, Human
uccaacaccgcugagcaccga

SEQ ID NO: 170792 - RNA, 22 nt, Human
uccagaaccuggggagccaggc

SEQ ID NO: 170793 - RNA, 18 nt, Human
uccgcgcacgcgcgcaca

SEQ ID NO: 170794 - RNA, 24 nt, Human
aaaagucaccucuauauagaaauc

SEQ ID NO: 170795 - RNA, 18 nt, Human
aaagggaagugaaggaaa

SEQ ID NO: 170796 - RNA, 22 nt, Human
aacuacuggcaccagccuuagg

SEQ ID NO: 170797 - RNA, 21 nt, Human
aagccacaccuugauugagcc

SEQ ID NO: 170798 - RNA, 19 nt, Human
aaggaaccagguaacgggc

SEQ ID NO: 170799 - RNA, 22 nt, Human
aagggguggggguuacuguaag

SEQ ID NO: 170800 - RNA, 23 nt, Human
aagggguggggguuacuguaagg

SEQ ID NO: 170801 - RNA, 24 nt, Human
acagagcuugcacaguacuuaaaa

SEQ ID NO: 170802 - RNA, 19 nt, Human
accuugauugagccuggga

SEQ ID NO: 170803 - RNA, 18 nt, Human
agacucugccacgacauc

SEQ ID NO: 170804 - RNA, 24 nt, Human
agcccccacccaguccccacuccu

SEQ ID NO: 170805 - RNA, 21 nt, Human
aggcacaagcauccgcagccu

SEQ ID NO: 170806 - RNA, 21 nt, Human
aggggccauccuccccaagcc

SEQ ID NO: 170807 - RNA, 25 nt, Human
agugaaggaaaggaaguuccuacuu

SEQ ID NO: 170808 - RNA, 25 nt, Human
auccuccccaagccauuucccacau

SEQ ID NO: 170809 - RNA, 18 nt, Human
caacuccucaacuggggg

SEQ ID NO: 170810 - RNA, 20 nt, Human
cacacaaaccaacacccaac

SEQ ID NO: 170811 - RNA, 23 nt, Human
cacaggaggaaucgagguagcaa

SEQ ID NO: 170812 - RNA, 21 nt, Human
caccucuuguccacacacaaa

SEQ ID NO: 170813 - RNA, 25 nt, Human
cacugcccccagccucuguccaaca

SEQ ID NO: 170814 - RNA, 23 nt, Human
cagagcuugcacaguacuuaaaa

SEQ ID NO: 170815 - RNA, 27 nt, Human
cagccuguccugaccccagccugcacu

SEQ ID NO: 170816 - RNA, 20 nt, Human
caggaggaaucgagguagca

SEQ ID NO: 170817 - RNA, 20 nt, Human
cagucuuccuaagcuagggg

SEQ ID NO: 170818 - RNA, 19 nt, Human
ccacuccuaucaauagcca

SEQ ID NO: 170819 - RNA, 20 nt, Human
cccacuccuaucaauagcca

SEQ ID NO: 170820 - RNA, 21 nt, Human
cccaggcaaacuuggaagaaa

SEQ ID NO: 170821 - RNA, 23 nt, Human
ccccagccgcugaucgcaggugc

SEQ ID NO: 170822 - RNA, 23 nt, Human
ccgcagccuguccugaccccagc

SEQ ID NO: 170823 - RNA, 21 nt, Human
ccgccgccgccuuccgcaggc

SEQ ID NO: 170824 - RNA, 23 nt, Human
ccgccgccgccuuccgcaggcuc

SEQ ID NO: 170825 - RNA, 21 nt, Human
ccucccaauuggaggggugga

SEQ ID NO: 170826 - RNA, 27 nt, Human
ccugaccccagccugcacucucucaac

SEQ ID NO: 170827 - RNA, 18 nt, Human
ccuugauugagccuggga

SEQ ID NO: 170828 - RNA, 19 nt, Human
cgcacuaccauaaccugcc

SEQ ID NO: 170829 - RNA, 20 nt, Human
cgcaggugccgccgccgccg

SEQ ID NO: 170830 - RNA, 20 nt, Human
cgccgccgccuuccgcaggc

SEQ ID NO: 170831 - RNA, 20 nt, Human
cuccccaagccauuucccac

SEQ ID NO: 170832 - RNA, 21 nt, Human
cugaaggcgggaacaaauggc

SEQ ID NO: 170833 - RNA, 21 nt, Human
cugcuaugcugcuugcagggg

SEQ ID NO: 170834 - RNA, 19 nt, Human
cuucaccacccaccaacca

SEQ ID NO: 170835 - RNA, 21 nt, Human
cuucaccacccaccaaccacc

SEQ ID NO: 170836 - RNA, 23 nt, Human
cuuccuaagcuaggggccauccu

SEQ ID NO: 170837 - RNA, 18 nt, Human
cuucugucugccaccucc

SEQ ID NO: 170838 - RNA, 20 nt, Human
cuugggagaguggggugcua

SEQ ID NO: 170839 - RNA, 23 nt, Human
gaacaaauaacacaacagucuuc

SEQ ID NO: 170840 - RNA, 24 nt, Human
gaacaaauaacacaacagucuucc

SEQ ID NO: 170841 - RNA, 24 nt, Human
gaagcccccacccaguccccacuc

SEQ ID NO: 170842 - RNA, 19 nt, Human
gagaagcccccacccaguc

SEQ ID NO: 170843 - RNA, 20 nt, Human
gagaagcccccacccagucc

SEQ ID NO: 170844 - RNA, 18 nt, Human
gcacuaccauaaccugcc

SEQ ID NO: 170845 - RNA, 19 nt, Human
gcagaccaggcaaggaacc

SEQ ID NO: 170846 - RNA, 20 nt, Human
gccgccgccgccgccuuccg

SEQ ID NO: 170847 - RNA, 21 nt, Human
gcuggcacugcccccagccuc

SEQ ID NO: 170848 - RNA, 23 nt, Human
gggaguuucuugccggggcaggg

SEQ ID NO: 170849 - RNA, 18 nt, Human
ggggguucgggguugggg

SEQ ID NO: 170850 - RNA, 20 nt, Human
ggggguucgggguugggggg

SEQ ID NO: 170851 - RNA, 19 nt, Human
gggguucgggguugggggg

SEQ ID NO: 170852 - RNA, 20 nt, Human
ggguguugucccuuaccaca

SEQ ID NO: 170853 - RNA, 25 nt, Human
gguggaggauuuggugcaaagccag

SEQ ID NO: 170854 - RNA, 18 nt, Human
guagagggagaagccccc

SEQ ID NO: 170855 - RNA, 21 nt, Human
uaacuccccauaggcacaagc

SEQ ID NO: 170856 - RNA, 22 nt, Human
uaagcuaggggccauccucccc

SEQ ID NO: 170857 - RNA, 21 nt, Human
uacaaaccuucacauuauaag

SEQ ID NO: 170858 - RNA, 23 nt, Human
uagagggagaagcccccacccag

SEQ ID NO: 170859 - RNA, 23 nt, Human
uaggcacaagcauccgcagccug

SEQ ID NO: 170860 - RNA, 23 nt, Human
uaggccccaggcaaacuuggaag

SEQ ID NO: 170861 - RNA, 21 nt, Human
uagugcuuucccuugacugau

SEQ ID NO: 170862 - RNA, 26 nt, Human
ucaccacccaccaaccaccucuuguc

SEQ ID NO: 170863 - RNA, 24 nt, Human
ucaggguuguggccccagccuggg

SEQ ID NO: 170864 - RNA, 22 nt, Human
ucauggacuauuuacaaaccuu

SEQ ID NO: 170865 - RNA, 20 nt, Human
uccacacacaaaccaacacc

SEQ ID NO: 170866 - RNA, 21 nt, Human
uccacacacaaaccaacaccc

SEQ ID NO: 170867 - RNA, 25 nt, Human
uccgcagccuguccugaccccagcc

SEQ ID NO: 170868 - RNA, 21 nt, Human
uccuuucuuucccuacccagg

SEQ ID NO: 170869 - RNA, 20 nt, Human
uccuuuuaugguuuuucccu

SEQ ID NO: 170870 - RNA, 22 nt, Human
ugaacaaauaacacaacagucu

SEQ ID NO: 170871 - RNA, 21 nt, Human
ugaaggcgggaacaaauggca

SEQ ID NO: 170872 - RNA, 20 nt, Human
ugccacgacaucaucaugga

SEQ ID NO: 170873 - RNA, 19 nt, Human
ugccccagccgcugaucgc

SEQ ID NO: 170874 - RNA, 19 nt, Human
ugcuucugucugccaccuc

SEQ ID NO: 170875 - RNA, 21 nt, Human
uggaagaaagcagaccaggca

SEQ ID NO: 170876 - RNA, 20 nt, Human
uggcaccagccuuagggugu

SEQ ID NO: 170877 - RNA, 21 nt, Human
uggcuugggagaguggggugc

SEQ ID NO: 170878 - RNA, 21 nt, Human
ugguaggcuacucauaacuac

SEQ ID NO: 170879 - RNA, 21 nt, Human
uguauacagugcccacagccu

SEQ ID NO: 170880 - RNA, 22 nt, Human
ugucuccacggaaacgcggccu

SEQ ID NO: 170881 - RNA, 25 nt, Human
uucaccacccaccaaccaccucuug

SEQ ID NO: 170882 - RNA, 21 nt, Human
uucaggguuguggccccagcc

SEQ ID NO: 170883 - RNA, 23 nt, Human
uucccacauuauagaagcacaga

SEQ ID NO: 170884 - RNA, 21 nt, Human
uugcaguagggggaucagccc

SEQ ID NO: 170885 - RNA, 18 nt, Human
aagcugccccccaggggc

SEQ ID NO: 170886 - RNA, 22 nt, Human
aguguaggggucagcuuggcug

SEQ ID NO: 170887 - RNA, 19 nt, Human
aguuccuugcccuggaugg

SEQ ID NO: 170888 - RNA, 19 nt, Human
cacaggauccagguucagc

SEQ ID NO: 170889 - RNA, 23 nt, Human
cagaccacaguggcucuccuccu

SEQ ID NO: 170890 - RNA, 21 nt, Human
cagguucagcugagucaggcu

SEQ ID NO: 170891 - RNA, 24 nt, Human
ccuggccccacugguacccaggaa

SEQ ID NO: 170892 - RNA, 19 nt, Human
cuaugcacaggauccaggu

SEQ ID NO: 170893 - RNA, 21 nt, Human
cucugagccagagccaccucc

SEQ ID NO: 170894 - RNA, 21 nt, Human
ggcucagugccaggcuggagg

SEQ ID NO: 170895 - RNA, 19 nt, Human
ggcugggagccaaggucac

SEQ ID NO: 170896 - RNA, 20 nt, Human
gggcugagguauggucagug

SEQ ID NO: 170897 - RNA, 23 nt, Human
gggucagcuuggcugggccaggg

SEQ ID NO: 170898 - RNA, 20 nt, Human
uaaagcugccccccaggggc

SEQ ID NO: 170899 - RNA, 22 nt, Human
ucagaccacaguggcucuccuc

SEQ ID NO: 170900 - RNA, 19 nt, Human
ucagugccaggcuggaggu

SEQ ID NO: 170901 - RNA, 26 nt, Human
ugaggcuuguagacugucggggcagu

SEQ ID NO: 170902 - RNA, 30 nt, Human
ugcccagguuaaagcugccccccaggggcc

SEQ ID NO: 170903 - RNA, 23 nt, Human
uggccccacugguacccaggaaa

SEQ ID NO: 170904 - RNA, 23 nt, Human
uucagaccacaguggcucuccuc

SEQ ID NO: 170905 - RNA, 25 nt, Human
uugaaccagaaagacaguuccuugc

SEQ ID NO: 170906 - RNA, 25 nt, Human
aaaaaaaaaaaaaaaaacuaaaaag

SEQ ID NO: 170907 - RNA, 23 nt, Human
aaaaaaaaaacuaaaaagauucu

SEQ ID NO: 170908 - RNA, 18 nt, Human
aaaaagauucuucaccuu

SEQ ID NO: 170909 - RNA, 20 nt, Human
aaacacagaaggggacuugg

SEQ ID NO: 170910 - RNA, 22 nt, Human
aaacagaucccagacccucagc

SEQ ID NO: 170911 - RNA, 20 nt, Human
aaacagcaaggggcuccuga

SEQ ID NO: 170912 - RNA, 23 nt, Human
aaagucuuugaggggcugugggg

SEQ ID NO: 170913 - RNA, 18 nt, Human
aacaagucucccucuaga

SEQ ID NO: 170914 - RNA, 21 nt, Human
aacaccacaagcuucuccaga

SEQ ID NO: 170915 - RNA, 19 nt, Human
aacacgaugaaaccccguc

SEQ ID NO: 170916 - RNA, 20 nt, Human
aacacgaugaaaccccgucu

SEQ ID NO: 170917 - RNA, 21 nt, Human
aacacgaugaaaccccgucuc

SEQ ID NO: 170918 - RNA, 20 nt, Human
aacauggugaaacccugucu

SEQ ID NO: 170919 - RNA, 21 nt, Human
aacauggugaaacccugucuc

SEQ ID NO: 170920 - RNA, 23 nt, Human
aagacagguggaugacaagguca

SEQ ID NO: 170921 - RNA, 23 nt, Human
aagaucacgccacugcacuccag

SEQ ID NO: 170922 - RNA, 23 nt, Human
aagccuacaggcauggggucugg

SEQ ID NO: 170923 - RNA, 23 nt, Human
aagucucccucuagaaucacucc

SEQ ID NO: 170924 - RNA, 22 nt, Human
acaaggucaggagaucgagacc

SEQ ID NO: 170925 - RNA, 21 nt, Human
acagagcaagacgcuggccaa

SEQ ID NO: 170926 - RNA, 20 nt, Human
acagagcaagacuccgucuc

SEQ ID NO: 170927 - RNA, 22 nt, Human
acagagcaagacuccgucucaa

SEQ ID NO: 170928 - RNA, 25 nt, Human
acagagcgagacccugucuccaaaa

SEQ ID NO: 170929 - RNA, 21 nt, Human
accaacuaccccagcuuuucc

SEQ ID NO: 170930 - RNA, 26 nt, Human
accaacuaccccagcuuuuccagaga

SEQ ID NO: 170931 - RNA, 21 nt, Human
acccagcauucugggaggcca

SEQ ID NO: 170932 - RNA, 24 nt, Human
accccgucucuacuaaaaauacaa

SEQ ID NO: 170933 - RNA, 30 nt, Human
acccugucuccaaaaaaaaaaaaaaaaaaa

SEQ ID NO: 170934 - RNA, 24 nt, Human
acccugucucuacuaaaaauacaa

SEQ ID NO: 170935 - RNA, 24 nt, Human
acgccacugcacuccagccugggc

SEQ ID NO: 170936 - RNA, 24 nt, Human
acgccacugcacuccagccugggc

SEQ ID NO: 170937 - RNA, 24 nt, Human
acugcacuccagccugggcaacag

SEQ ID NO: 170938 - RNA, 24 nt, Human
acugcacuccagccugggcaacag

SEQ ID NO: 170939 - RNA, 18 nt, Human
acugcacucuggccuggg

SEQ ID NO: 170940 - RNA, 24 nt, Human
acugcacucuggccugggcuacag

SEQ ID NO: 170941 - RNA, 22 nt, Human
agaaucgcuugaacacaggagg

SEQ ID NO: 170942 - RNA, 21 nt, Human
agacaaagaccaacuuccuuc

SEQ ID NO: 170943 - RNA, 18 nt, Human
agacaggagaaucgcuug

SEQ ID NO: 170944 - RNA, 24 nt, Human
agacagguggaugacaaggucagg

SEQ ID NO: 170945 - RNA, 19 nt, Human
agagcugacuauguuuaag

SEQ ID NO: 170946 - RNA, 18 nt, Human
agagcuugcagugagcug

SEQ ID NO: 170947 - RNA, 24 nt, Human
agagcuugcagugagcugagaucg

SEQ ID NO: 170948 - RNA, 25 nt, Human
agaucucgacaaccccguccaccuu

SEQ ID NO: 170949 - RNA, 24 nt, Human
agcacugugggaggccgagguggg

SEQ ID NO: 170950 - RNA, 24 nt, Human
agcauucugggaggccaagguggg

SEQ ID NO: 170951 - RNA, 24 nt, Human
agccugggcaauaucacaagaccu

SEQ ID NO: 170952 - RNA, 25 nt, Human
agcuuuaaaaaaaagugucccugga

SEQ ID NO: 170953 - RNA, 19 nt, Human
aggaggcugaggcagaaug

SEQ ID NO: 170954 - RNA, 21 nt, Human
aggcagaauggcaugaacccg

SEQ ID NO: 170955 - RNA, 22 nt, Human
aggcagaauggcaugaacccgg

SEQ ID NO: 170956 - RNA, 20 nt, Human
aggcagagcuugcagugagc

SEQ ID NO: 170957 - RNA, 24 nt, Human
aggcagagcuugcagugagcugag

SEQ ID NO: 170958 - RNA, 24 nt, Human
aggcaugguggcucacgccgguaa

SEQ ID NO: 170959 - RNA, 21 nt, Human
aggccgaggugggcagaucac

SEQ ID NO: 170960 - RNA, 19 nt, Human
aggcggaaguugcagugag

SEQ ID NO: 170961 - RNA, 24 nt, Human
aggcggaaguugcagugagccaag

SEQ ID NO: 170962 - RNA, 24 nt, Human
aggcugagacaggagaaucgcuug

SEQ ID NO: 170963 - RNA, 21 nt, Human
aggggcuguggggcuuguugg

SEQ ID NO: 170964 - RNA, 24 nt, Human
agguggaugacaaggucaggagau

SEQ ID NO: 170965 - RNA, 24 nt, Human
aggugggcagaucacgaggucagg

SEQ ID NO: 170966 - RNA, 24 nt, Human
aguggcucaugccaguaaucccag

SEQ ID NO: 170967 - RNA, 20 nt, Human
auaccugcacacuuccagaa

SEQ ID NO: 170968 - RNA, 24 nt, Human
aucacgccacugcacuccagccug

SEQ ID NO: 170969 - RNA, 22 nt, Human
aucccagcacuuugggaggcca

SEQ ID NO: 170970 - RNA, 24 nt, Human
aucgcgccacugcacucuggccug

SEQ ID NO: 170971 - RNA, 22 nt, Human
auggccugugccuguaguccca

SEQ ID NO: 170972 - RNA, 23 nt, Human
caaagccagauguagugguucug

SEQ ID NO: 170973 - RNA, 22 nt, Human
caacagagcgagacccugucuc

SEQ ID NO: 170974 - RNA, 24 nt, Human
caacauggugaaacccugucucua

SEQ ID NO: 170975 - RNA, 19 nt, Human
caaccugaacucacaccca

SEQ ID NO: 170976 - RNA, 21 nt, Human
caacuaccccagcuuuuccag

SEQ ID NO: 170977 - RNA, 24 nt, Human
caauaucacaagaccucgucucua

SEQ ID NO: 170978 - RNA, 19 nt, Human
caccugcagacaaagacca

SEQ ID NO: 170979 - RNA, 22 nt, Human
cacgccgguaaucccagcacug

SEQ ID NO: 170980 - RNA, 18 nt, Human
cacuccagaaacacagaa

SEQ ID NO: 170981 - RNA, 24 nt, Human
cacuccagccugggcaacagagcg

SEQ ID NO: 170982 - RNA, 18 nt, Human
cacugcacuccagccugg

SEQ ID NO: 170983 - RNA, 19 nt, Human
cacugcacuccagccuggg

SEQ ID NO: 170984 - RNA, 21 nt, Human
cacugcacuccagccugggca

SEQ ID NO: 170985 - RNA, 23 nt, Human
cacugcacuccagccugggcaac

SEQ ID NO: 170986 - RNA, 24 nt, Human
cacugcacuccagccugggcaaca

SEQ ID NO: 170987 - RNA, 18 nt, Human
cacugcacucuggccugg

SEQ ID NO: 170988 - RNA, 19 nt, Human
cacugcacucuggccuggg

SEQ ID NO: 170989 - RNA, 20 nt, Human
cacugcacucuggccugggc

SEQ ID NO: 170990 - RNA, 23 nt, Human
cacuguggcuucuagaacugccu

SEQ ID NO: 170991 - RNA, 22 nt, Human
cagaaaacagaucccagacccu

SEQ ID NO: 170992 - RNA, 19 nt, Human
cagaccugcccaaagccag

SEQ ID NO: 170993 - RNA, 18 nt, Human
cagagcaagacgcuggcc

SEQ ID NO: 170994 - RNA, 24 nt, Human
cagcacugugggaggccgaggugg

SEQ ID NO: 170995 - RNA, 20 nt, Human
cagcacuuugggaggccaag

SEQ ID NO: 170996 - RNA, 24 nt, Human
cagcacuuugggaggccaagacag

SEQ ID NO: 170997 - RNA, 24 nt, Human
cagcauucugggaggccaaggugg

SEQ ID NO: 170998 - RNA, 24 nt, Human
cagcuacucaggaggcugaggcag

SEQ ID NO: 170999 - RNA, 22 nt, Human
cagguggaugacaaggucagga

SEQ ID NO: 171000 - RNA, 21 nt, Human
caugaacccgggaggcagagc

SEQ ID NO: 171001 - RNA, 24 nt, Human
caugccaguaaucccagcacuuug

SEQ ID NO: 171002 - RNA, 23 nt, Human
cauuuuggcagugaucccucacc

SEQ ID NO: 171003 - RNA, 20 nt, Human
ccacugcacuccagccuggg

SEQ ID NO: 171004 - RNA, 21 nt, Human
ccacugcacuccagccugggc

SEQ ID NO: 171005 - RNA, 23 nt, Human
ccacugcacuccagccugggcaa

SEQ ID NO: 171006 - RNA, 24 nt, Human
ccacugcacuccagccugggcaac

SEQ ID NO: 171007 - RNA, 20 nt, Human
ccacugcacucuggccuggg

SEQ ID NO: 171008 - RNA, 21 nt, Human
ccacugcacucuggccugggc

SEQ ID NO: 171009 - RNA, 21 nt, Human
ccacugcacucuggccugggc

SEQ ID NO: 171010 - RNA, 24 nt, Human
ccacugcacucuggccugggcuac

SEQ ID NO: 171011 - RNA, 26 nt, Human
ccagaaaacagaucccagacccucag

SEQ ID NO: 171012 - RNA, 22 nt, Human
ccagaaacgucccccuucucuc

SEQ ID NO: 171013 - RNA, 21 nt, Human
ccaggcauaauggccugugcc

SEQ ID NO: 171014 - RNA, 22 nt, Human
ccaguaaucccagcacuuuggg

SEQ ID NO: 171015 - RNA, 22 nt, Human
ccccuucucuccaacucuccca

SEQ ID NO: 171016 - RNA, 22 nt, Human
cccggccaacauggugaaaccc

SEQ ID NO: 171017 - RNA, 22 nt, Human
cccggccaacauggugaaaccc

SEQ ID NO: 171018 - RNA, 24 nt, Human
cccggccaacauggugaaacccug

SEQ ID NO: 171019 - RNA, 19 nt, Human
cccuggaucccuggaaagu

SEQ ID NO: 171020 - RNA, 27 nt, Human
cccuggaucccuggaaaguucugcucc

SEQ ID NO: 171021 - RNA, 24 nt, Human
ccgggccaggcaugguggcucacg

SEQ ID NO: 171022 - RNA, 24 nt, Human
ccgggcugggcacaguggcucaug

SEQ ID NO: 171023 - RNA, 24 nt, Human
ccuccugcucucucacccguggca

SEQ ID NO: 171024 - RNA, 22 nt, Human
ccugggcuacagagcaagacuc

SEQ ID NO: 171025 - RNA, 21 nt, Human
ccugggggcagccaucuggaa

SEQ ID NO: 171026 - RNA, 22 nt, Human
ccugguuaacacgaugaaaccc

SEQ ID NO: 171027 - RNA, 23 nt, Human
ccugguuaacacgaugaaacccc

SEQ ID NO: 171028 - RNA, 24 nt, Human
ccugguuaacacgaugaaaccccg

SEQ ID NO: 171029 - RNA, 21 nt, Human
ccuguagucccagcuacucag

SEQ ID NO: 171030 - RNA, 22 nt, Human
ccuguagucccaucuacucagg

SEQ ID NO: 171031 - RNA, 25 nt, Human
ccugucugcucaaaacaaacaaaaa

SEQ ID NO: 171032 - RNA, 22 nt, Human
ccuuggccagaccucgugcucc

SEQ ID NO: 171033 - RNA, 22 nt, Human
cgacaaccccguccaccuuggc

SEQ ID NO: 171034 - RNA, 24 nt, Human
cgagaccaucccggccaacauggu

SEQ ID NO: 171035 - RNA, 19 nt, Human
cgagaccauccugguuaac

SEQ ID NO: 171036 - RNA, 24 nt, Human
cgaggugggcagaucacgagguca

SEQ ID NO: 171037 - RNA, 24 nt, Human
cgccacugcacuccagccugggca

SEQ ID NO: 171038 - RNA, 24 nt, Human
cgccgguaaucccagcacuguggg

SEQ ID NO: 171039 - RNA, 24 nt, Human
cgccuguagucccagcuacucagg

SEQ ID NO: 171040 - RNA, 24 nt, Human
cggccaacauggugaaacccuguc

SEQ ID NO: 171041 - RNA, 21 nt, Human
cuagaaucacuccagaaacac

SEQ ID NO: 171042 - RNA, 23 nt, Human
cucacgccgguaaucccagcacu

SEQ ID NO: 171043 - RNA, 24 nt, Human
cucaugccaguaaucccagcacuu

SEQ ID NO: 171044 - RNA, 22 nt, Human
cuccagaagaugccaggccucu

SEQ ID NO: 171045 - RNA, 19 nt, Human
cugaagccacguacugcug

SEQ ID NO: 171046 - RNA, 24 nt, Human
cugaggcuggguccagggucugcc

SEQ ID NO: 171047 - RNA, 19 nt, Human
cugcucaaaacaaacaaaa

SEQ ID NO: 171048 - RNA, 20 nt, Human
cugcuugagcccaggaguug

SEQ ID NO: 171049 - RNA, 25 nt, Human
cuucaggaacaccacaagcuucucc

SEQ ID NO: 171050 - RNA, 25 nt, Human
cuucuagaacugccugccagccauc

SEQ ID NO: 171051 - RNA, 19 nt, Human
cuugcagugagcugagauc

SEQ ID NO: 171052 - RNA, 21 nt, Human
cuugcagugagcugagaucgc

SEQ ID NO: 171053 - RNA, 20 nt, Human
gaacccgggaggcagagcuu

SEQ ID NO: 171054 - RNA, 18 nt, Human
gaaguugcagugagccaa

SEQ ID NO: 171055 - RNA, 19 nt, Human
gaaguugcagugagccaag

SEQ ID NO: 171056 - RNA, 24 nt, Human
gacugcuugagcccaggaguugaa

SEQ ID NO: 171057 - RNA, 20 nt, Human
gagaucgcgccacugcacuc

SEQ ID NO: 171058 - RNA, 22 nt, Human
gagcugcuugcagguggcagau

SEQ ID NO: 171059 - RNA, 22 nt, Human
gaggcagagcuugcagugagcu

SEQ ID NO: 171060 - RNA, 18 nt, Human
gaugacaaggucaggaga

SEQ ID NO: 171061 - RNA, 24 nt, Human
gcacuccagccugggcaacagagc

SEQ ID NO: 171062 - RNA, 24 nt, Human
gccaacauggugaaacccugucuc

SEQ ID NO: 171063 - RNA, 20 nt, Human
gccaagaucacgccacugca

SEQ ID NO: 171064 - RNA, 22 nt, Human
gccacugcacuccagccugggc

SEQ ID NO: 171065 - RNA, 24 nt, Human
gccacugcacuccagccugggcaa

SEQ ID NO: 171066 - RNA, 20 nt, Human
gccacugcacucuggccugg

SEQ ID NO: 171067 - RNA, 18 nt, Human
gccugggcuacagagcaa

SEQ ID NO: 171068 - RNA, 23 nt, Human
gccugggcuacagagcaagacuc

SEQ ID NO: 171069 - RNA, 21 nt, Human
gcuacaauuagguugcacauu

SEQ ID NO: 171070 - RNA, 22 nt, Human
gcucugcucaccaacuacccca

SEQ ID NO: 171071 - RNA, 24 nt, Human
gcucugcucaccaacuaccccagc

SEQ ID NO: 171072 - RNA, 20 nt, Human
gcugagaucgcgccacugca

SEQ ID NO: 171073 - RNA, 20 nt, Human
gcugaguugggaacaguacu

SEQ ID NO: 171074 - RNA, 20 nt, Human
ggaaguugcagugagccaag

SEQ ID NO: 171075 - RNA, 24 nt, Human
ggaaguugcagugagccaagauca

SEQ ID NO: 171076 - RNA, 23 nt, Human
ggcacaguggcucaugccaguaa

SEQ ID NO: 171077 - RNA, 21 nt, Human
ggcagaucacgaggucaggag

SEQ ID NO: 171078 - RNA, 21 nt, Human
ggcagccaucuggaaguacug

SEQ ID NO: 171079 - RNA, 20 nt, Human
ggccgagcugcuugcaggug

SEQ ID NO: 171080 - RNA, 18 nt, Human
ggcgugguggcgggcgcc

SEQ ID NO: 171081 - RNA, 22 nt, Human
ggcgugguggcgggcgccugua

SEQ ID NO: 171082 - RNA, 21 nt, Human
ggcucacgccgguaaucccag

SEQ ID NO: 171083 - RNA, 21 nt, Human
ggcugggaagagcaggugggc

SEQ ID NO: 171084 - RNA, 23 nt, Human
ggcugggcacaguggcucaugcc

SEQ ID NO: 171085 - RNA, 19 nt, Human
gggacagacagugguuagc

SEQ ID NO: 171086 - RNA, 21 nt, Human
gggcacaguggcucaugccag

SEQ ID NO: 171087 - RNA, 19 nt, Human
gggcacccauuugcuucag

SEQ ID NO: 171088 - RNA, 20 nt, Human
gggucugccuaccuuuagau

SEQ ID NO: 171089 - RNA, 18 nt, Human
gggucuggaugaguagac

SEQ ID NO: 171090 - RNA, 24 nt, Human
gguggcgggcgccuguagucccag

SEQ ID NO: 171091 - RNA, 24 nt, Human
gguggcucacgccgguaaucccag

SEQ ID NO: 171092 - RNA, 23 nt, Human
gguguguuuauaccugcacacuu

SEQ ID NO: 171093 - RNA, 18 nt, Human
gucuuugaggggcugugg

SEQ ID NO: 171094 - RNA, 21 nt, Human
gugaaacccugucucuacuaa

SEQ ID NO: 171095 - RNA, 23 nt, Human
gugagaggcaaccugaacucaca

SEQ ID NO: 171096 - RNA, 23 nt, Human
guggccggagcgcaccccguggc

SEQ ID NO: 171097 - RNA, 24 nt, Human
guggcucaugccaguaaucccagc

SEQ ID NO: 171098 - RNA, 21 nt, Human
uaaaaauacaaaaauuagcca

SEQ ID NO: 171099 - RNA, 25 nt, Human
uaaacccagcauucugggaggccaa

SEQ ID NO: 171100 - RNA, 22 nt, Human
uaacacgaugaaaccccgucuc

SEQ ID NO: 171101 - RNA, 24 nt, Human
uaacacgaugaaaccccgucucua

SEQ ID NO: 171102 - RNA, 24 nt, Human
uacaaaaauuagccaggcauaaug

SEQ ID NO: 171103 - RNA, 23 nt, Human
uacagagcaagacuccgucucaa

SEQ ID NO: 171104 - RNA, 21 nt, Human
uaccccagcuuuuccagagac

SEQ ID NO: 171105 - RNA, 23 nt, Human
uacuucagaaagucucccuggcu

SEQ ID NO: 171106 - RNA, 19 nt, Human
uagaauauucagacaguuc

SEQ ID NO: 171107 - RNA, 18 nt, Human
ucacgaggucaggagauc

SEQ ID NO: 171108 - RNA, 24 nt, Human
ucacgaggucaggagaucgagacc

SEQ ID NO: 171109 - RNA, 23 nt, Human
ucacgccacugcacuccagccug

SEQ ID NO: 171110 - RNA, 20 nt, Human
uccaaaaaacagcaaggggc

SEQ ID NO: 171111 - RNA, 23 nt, Human
uccagccugggcaacagagcgag

SEQ ID NO: 171112 - RNA, 24 nt, Human
uccagccugggcaacagagcgaga

SEQ ID NO: 171113 - RNA, 23 nt, Human
uccuguccauaagggcccugcag

SEQ ID NO: 171114 - RNA, 22 nt, Human
ucuagaaucacuccagaaacac

SEQ ID NO: 171115 - RNA, 20 nt, Human
ucuccaaaaaaaaaaaaaaa

SEQ ID NO: 171116 - RNA, 21 nt, Human
ucucuacuaaaaauacaaaaa

SEQ ID NO: 171117 - RNA, 22 nt, Human
ucucuacuaaaaauacaaaaaa

SEQ ID NO: 171118 - RNA, 18 nt, Human
ucuuuggaggacccaggg

SEQ ID NO: 171119 - RNA, 24 nt, Human
ugacaaggucaggagaucgagacc

SEQ ID NO: 171120 - RNA, 20 nt, Human
ugagacaggagaaucgcuug

SEQ ID NO: 171121 - RNA, 23 nt, Human
ugagacaggagaaucgcuugaac

SEQ ID NO: 171122 - RNA, 23 nt, Human
ugagcccaggaguugaagaacag

SEQ ID NO: 171123 - RNA, 22 nt, Human
ugagcugagaucgcgccacugc

SEQ ID NO: 171124 - RNA, 22 nt, Human
ugaggcagaauggcaugaaccc

SEQ ID NO: 171125 - RNA, 23 nt, Human
ugaggcuggguccagggucugcc

SEQ ID NO: 171126 - RNA, 18 nt, Human
ugaguagacaggggaugu

SEQ ID NO: 171127 - RNA, 20 nt, Human
ugccuggaucugaggcuggg

SEQ ID NO: 171128 - RNA, 24 nt, Human
ugccuguagucccaucuacucagg

SEQ ID NO: 171129 - RNA, 19 nt, Human
uggaacauucauuagaugc

SEQ ID NO: 171130 - RNA, 23 nt, Human
uggcagcugaguugggaacagua

SEQ ID NO: 171131 - RNA, 24 nt, Human
uggcccggugugcuggcucacauc

SEQ ID NO: 171132 - RNA, 22 nt, Human
uggcucacgccgguaaucccag

SEQ ID NO: 171133 - RNA, 24 nt, Human
uggcucacgccgguaaucccagca

SEQ ID NO: 171134 - RNA, 22 nt, Human
uggcucaugccaguaaucccag

SEQ ID NO: 171135 - RNA, 24 nt, Human
uggcucaugccaguaaucccagca

SEQ ID NO: 171136 - RNA, 18 nt, Human
uggcuucuagaacugccu

SEQ ID NO: 171137 - RNA, 19 nt, Human
ugggaggccaaggugggag

SEQ ID NO: 171138 - RNA, 19 nt, Human
ugggaggccgaggugggca

SEQ ID NO: 171139 - RNA, 20 nt, Human
ugggaggccgaggugggcag

SEQ ID NO: 171140 - RNA, 24 nt, Human
ugggaggccgaggugggcagauca

SEQ ID NO: 171141 - RNA, 24 nt, Human
ugggcaacagagcgagacccuguc

SEQ ID NO: 171142 - RNA, 26 nt, Human
ugggcaauaucacaagaccucgucuc

SEQ ID NO: 171143 - RNA, 22 nt, Human
ugggcagaucacgaggucagga

SEQ ID NO: 171144 - RNA, 19 nt, Human
uggggcuuguuggacagag

SEQ ID NO: 171145 - RNA, 24 nt, Human
ugguggcgggcgccuguaguccca

SEQ ID NO: 171146 - RNA, 24 nt, Human
ugguggcucacgccgguaauccca

SEQ ID NO: 171147 - RNA, 19 nt, Human
ugugggaggccgagguggg

SEQ ID NO: 171148 - RNA, 18 nt, Human
uuagccgggcgugguggc

SEQ ID NO: 171149 - RNA, 24 nt, Human
uuagccgggcgugguggcgggcgc

SEQ ID NO: 171150 - RNA, 22 nt, Human
uuaguuaucuggauuuccagaa

SEQ ID NO: 171151 - RNA, 19 nt, Human
uucuucaccuuaguuaucu

SEQ ID NO: 171152 - RNA, 20 nt, Human
uugcagugagccaagaucac

SEQ ID NO: 171153 - RNA, 18 nt, Human
uugcagugagcugagauc

SEQ ID NO: 171154 - RNA, 19 nt, Human
uugcagugagcugagaucg

SEQ ID NO: 171155 - RNA, 22 nt, Human
uugcagugagcugagaucgcgc

SEQ ID NO: 171156 - RNA, 22 nt, Human
uuggacagagucccgcucugcu

SEQ ID NO: 171157 - RNA, 24 nt, Human
uuucuucuuucacccuccaaaaaa

SEQ ID NO: 171158 - RNA, 19 nt, Human
aaacaggugauuggugggg

SEQ ID NO: 171159 - RNA, 19 nt, Human
aaagugcuggaauuacagg

SEQ ID NO: 171160 - RNA, 24 nt, Human
aaagugcuggaauuacaggcguga

SEQ ID NO: 171161 - RNA, 22 nt, Human
aacaacaucacaaacaaaucag

SEQ ID NO: 171162 - RNA, 19 nt, Human
aacacaggcccucagggac

SEQ ID NO: 171163 - RNA, 22 nt, Human
aacuggucuaagccuugcagug

SEQ ID NO: 171164 - RNA, 26 nt, Human
aagugcuggaauuacaggcgugagcc

SEQ ID NO: 171165 - RNA, 18 nt, Human
aauuacaggcgugagcca

SEQ ID NO: 171166 - RNA, 22 nt, Human
aauuacaggcgugagccacagc

SEQ ID NO: 171167 - RNA, 24 nt, Human
acaacaucacaaacaaaucagcca

SEQ ID NO: 171168 - RNA, 22 nt, Human
acaccaagguucuggaaagaga

SEQ ID NO: 171169 - RNA, 19 nt, Human
acagcagcaauuucccuca

SEQ ID NO: 171170 - RNA, 18 nt, Human
accuucaggaggguagau

SEQ ID NO: 171171 - RNA, 18 nt, Human
agacacgucaucauuuuu

SEQ ID NO: 171172 - RNA, 19 nt, Human
agagugaggagacacguca

SEQ ID NO: 171173 - RNA, 18 nt, Human
agcaggugaggccccagg

SEQ ID NO: 171174 - RNA, 23 nt, Human
agcaggugagguccccaacaggc

SEQ ID NO: 171175 - RNA, 19 nt, Human
agcaggugagguccccagc

SEQ ID NO: 171176 - RNA, 22 nt, Human
agcccaggcaccaugccggccu

SEQ ID NO: 171177 - RNA, 19 nt, Human
agcgccuguccacccuugg

SEQ ID NO: 171178 - RNA, 21 nt, Human
aggucccuagcaggcaagucu

SEQ ID NO: 171179 - RNA, 24 nt, Human
auuucccucaaccccagaauauuu

SEQ ID NO: 171180 - RNA, 27 nt, Human
caaaacacaggcccucagggacagccg

SEQ ID NO: 171181 - RNA, 24 nt, Human
caaagugcuggaauuacaggcgug

SEQ ID NO: 171182 - RNA, 23 nt, Human
caagcuaagccaucgauaucccc

SEQ ID NO: 171183 - RNA, 21 nt, Human
cacaggcccucagggacagcc

SEQ ID NO: 171184 - RNA, 24 nt, Human
caccaggaggccauggcagguuuc

SEQ ID NO: 171185 - RNA, 19 nt, Human
cacuguauggguugcgaau

SEQ ID NO: 171186 - RNA, 21 nt, Human
cagccucuccuaggagacaau

SEQ ID NO: 171187 - RNA, 21 nt, Human
cagcgagcaguggaugaggac

SEQ ID NO: 171188 - RNA, 19 nt, Human
caggaggguagauuggggg

SEQ ID NO: 171189 - RNA, 21 nt, Human
cagguaaaguccccgaccgcc

SEQ ID NO: 171190 - RNA, 19 nt, Human
caggugauuggugggggcg

SEQ ID NO: 171191 - RNA, 26 nt, Human
caucacaaacaaaucagccagaacca

SEQ ID NO: 171192 - RNA, 22 nt, Human
ccaaagugcuggaauuacaggc

SEQ ID NO: 171193 - RNA, 24 nt, Human
ccaaagugcuggaauuacaggcgu

SEQ ID NO: 171194 - RNA, 20 nt, Human
ccaagaccuaaguucacacc

SEQ ID NO: 171195 - RNA, 18 nt, Human
ccaagcuaagccaucgau

SEQ ID NO: 171196 - RNA, 18 nt, Human
cccagguaagagagaggg

SEQ ID NO: 171197 - RNA, 18 nt, Human
ccccagggcccagggccc

SEQ ID NO: 171198 - RNA, 21 nt, Human
ccccagggcccagggcccucc

SEQ ID NO: 171199 - RNA, 19 nt, Human
ccccucacaggcggcuaac

SEQ ID NO: 171200 - RNA, 25 nt, Human
ccccugaggugagaaccugggguga

SEQ ID NO: 171201 - RNA, 26 nt, Human
ccccugaggugagaaccuggggugag

SEQ ID NO: 171202 - RNA, 21 nt, Human
cccuccagggugaggucccca

SEQ ID NO: 171203 - RNA, 22 nt, Human
ccggcagcccaggcaccaugcc

SEQ ID NO: 171204 - RNA, 18 nt, Human
ccuccagcagccaagguc

SEQ ID NO: 171205 - RNA, 19 nt, Human
ccugagugugacgaaaagg

SEQ ID NO: 171206 - RNA, 18 nt, Human
ccuugggcucuggggccu

SEQ ID NO: 171207 - RNA, 21 nt, Human
cucaaaacacaggcccucagg

SEQ ID NO: 171208 - RNA, 24 nt, Human
cucaaucaauccuccuaccucagc

SEQ ID NO: 171209 - RNA, 19 nt, Human
cuccagcagccaagguccc

SEQ ID NO: 171210 - RNA, 19 nt, Human
cucuuggccucaaucaauc

SEQ ID NO: 171211 - RNA, 21 nt, Human
cuggcagccgugaagcccagc

SEQ ID NO: 171212 - RNA, 18 nt, Human
gaagcccagcgugugagg

SEQ ID NO: 171213 - RNA, 23 nt, Human
gaauguuccagaaguccucauuu

SEQ ID NO: 171214 - RNA, 25 nt, Human
gagcaggucccagcagguaaagucc

SEQ ID NO: 171215 - RNA, 23 nt, Human
gccccaggcagaugagguucccg

SEQ ID NO: 171216 - RNA, 22 nt, Human
ggagaggcuccuggcagccgug

SEQ ID NO: 171217 - RNA, 22 nt, Human
ggaggggagaggcuccuggcag

SEQ ID NO: 171218 - RNA, 20 nt, Human
ggcucuggggccucaggcac

SEQ ID NO: 171219 - RNA, 18 nt, Human
gguaagagagaggguugg

SEQ ID NO: 171220 - RNA, 18 nt, Human
ggucccagcagguaaagu

SEQ ID NO: 171221 - RNA, 18 nt, Human
ggugcagccuccagcagc

SEQ ID NO: 171222 - RNA, 20 nt, Human
guccccgaccgccgacaucc

SEQ ID NO: 171223 - RNA, 24 nt, Human
guccccgaccgccgacauccucag

SEQ ID NO: 171224 - RNA, 21 nt, Human
gucccuagcaggcaagucuuc

SEQ ID NO: 171225 - RNA, 20 nt, Human
uaaaguccccgaccgccgac

SEQ ID NO: 171226 - RNA, 21 nt, Human
uaacaacaucacaaacaaauc

SEQ ID NO: 171227 - RNA, 22 nt, Human
uaacccaugggaccaaccccuc

SEQ ID NO: 171228 - RNA, 21 nt, Human
uaaccccugaggugagaaccu

SEQ ID NO: 171229 - RNA, 22 nt, Human
uacaggcgugagccacagcgcc

SEQ ID NO: 171230 - RNA, 22 nt, Human
uacaggcgugagccacagcgcc

SEQ ID NO: 171231 - RNA, 23 nt, Human
uacaggcgugagccacagcgccu

SEQ ID NO: 171232 - RNA, 24 nt, Human
uaccucagccucccaaagugcugg

SEQ ID NO: 171233 - RNA, 20 nt, Human
uagagacguggucuugcuau

SEQ ID NO: 171234 - RNA, 18 nt, Human
uauaaguggugguccugg

SEQ ID NO: 171235 - RNA, 23 nt, Human
uauauugaccaggcuggucuuua

SEQ ID NO: 171236 - RNA, 23 nt, Human
ucaaaacacaggcccucagggac

SEQ ID NO: 171237 - RNA, 25 nt, Human
ucaaucaauccuccuaccucagccu

SEQ ID NO: 171238 - RNA, 19 nt, Human
ucacaggcggcuaacaaca

SEQ ID NO: 171239 - RNA, 24 nt, Human
ucagcccugauauauggcagccuc

SEQ ID NO: 171240 - RNA, 18 nt, Human
ucagccucccaaagugcu

SEQ ID NO: 171241 - RNA, 24 nt, Human
ucccaaagugcuggaauuacaggc

SEQ ID NO: 171242 - RNA, 22 nt, Human
uccccaacaggcgaggucccca

SEQ ID NO: 171243 - RNA, 22 nt, Human
uccccagcaggcgaggucccua

SEQ ID NO: 171244 - RNA, 22 nt, Human
uccccagcaggugaggucccca

SEQ ID NO: 171245 - RNA, 22 nt, Human
uccccagcaggugaggucccca

SEQ ID NO: 171246 - RNA, 21 nt, Human
ucccucaaccccagaauauuu

SEQ ID NO: 171247 - RNA, 27 nt, Human
uccuccuaccucagccucccaaagugc

SEQ ID NO: 171248 - RNA, 23 nt, Human
ucuugcuauauugaccaggcugg

SEQ ID NO: 171249 - RNA, 24 nt, Human
ucuugcuauauugaccaggcuggu

SEQ ID NO: 171250 - RNA, 23 nt, Human
ugaacucugagcucuuaaccccu

SEQ ID NO: 171251 - RNA, 20 nt, Human
ugacauggugguugccugcu

SEQ ID NO: 171252 - RNA, 22 nt, Human
ugacauggugguugccugcuuu

SEQ ID NO: 171253 - RNA, 24 nt, Human
ugaccaggcuggucuuuaacucuu

SEQ ID NO: 171254 - RNA, 21 nt, Human
ugacuaauuacugcuuugcac

SEQ ID NO: 171255 - RNA, 23 nt, Human
ugagcucuuaacccaugggacca

SEQ ID NO: 171256 - RNA, 18 nt, Human
ugaggugagaaccugggg

SEQ ID NO: 171257 - RNA, 18 nt, Human
ugagugugacgaaaaggg

SEQ ID NO: 171258 - RNA, 20 nt, Human
ugcgaauuauaucccgauga

SEQ ID NO: 171259 - RNA, 24 nt, Human
ugcuauauugaccaggcuggucuu

SEQ ID NO: 171260 - RNA, 25 nt, Human
ugcuggaauuacaggcgugagccac

SEQ ID NO: 171261 - RNA, 19 nt, Human
uggaaaccgugccgugaug

SEQ ID NO: 171262 - RNA, 25 nt, Human
uggaaagagacucaaaacacaggcc

SEQ ID NO: 171263 - RNA, 21 nt, Human
uggaauguuccagaaguccuc

SEQ ID NO: 171264 - RNA, 18 nt, Human
uggaauuacaggcgugag

SEQ ID NO: 171265 - RNA, 19 nt, Human
uggaauuacaggcgugagc

SEQ ID NO: 171266 - RNA, 21 nt, Human
uggaauuacaggcgugagcca

SEQ ID NO: 171267 - RNA, 22 nt, Human
uggaauuacaggcgugagccac

SEQ ID NO: 171268 - RNA, 24 nt, Human
uggaauuacaggcgugagccacag

SEQ ID NO: 171269 - RNA, 26 nt, Human
uggaauuacaggcgugagccacagcg

SEQ ID NO: 171270 - RNA, 18 nt, Human
uggcaaggucucugggag

SEQ ID NO: 171271 - RNA, 19 nt, Human
uggcaaggucucugggagc

SEQ ID NO: 171272 - RNA, 21 nt, Human
uggcaaggucucugggagcag

SEQ ID NO: 171273 - RNA, 19 nt, Human
uggcagguuuccuggggcg

SEQ ID NO: 171274 - RNA, 23 nt, Human
ugggaggggaaguugaacuuuga

SEQ ID NO: 171275 - RNA, 24 nt, Human
ugggggaaacaggugauugguggg

SEQ ID NO: 171276 - RNA, 21 nt, Human
uggugguccugggcuugaacu

SEQ ID NO: 171277 - RNA, 22 nt, Human
uggugguccugggcuugaacuu

SEQ ID NO: 171278 - RNA, 25 nt, Human
ugucugaacucugagcucuuaaccc

SEQ ID NO: 171279 - RNA, 18 nt, Human
ugugacgaaaagggaucc

SEQ ID NO: 171280 - RNA, 20 nt, Human
uguggcaaggucucugggag

SEQ ID NO: 171281 - RNA, 24 nt, Human
uuuacagucgaucccaccuguacc

SEQ ID NO: 171282 - RNA, 24 nt, Human
aaaccgggcccccaucucugugcu

SEQ ID NO: 171283 - RNA, 20 nt, Human
aacccccuccuucaccccua

SEQ ID NO: 171284 - RNA, 24 nt, Human
aagaagucagcggccccucuugga

SEQ ID NO: 171285 - RNA, 25 nt, Human
aagcugacaacuuggccuccccugg

SEQ ID NO: 171286 - RNA, 24 nt, Human
agaaaaacauaaagacagaagaaa

SEQ ID NO: 171287 - RNA, 22 nt, Human
agauuuggaagcugcacgggcc

SEQ ID NO: 171288 - RNA, 24 nt, Human
aggcccgguucaucccugggaagg

SEQ ID NO: 171289 - RNA, 21 nt, Human
aggcugugaggaauccaaaca

SEQ ID NO: 171290 - RNA, 21 nt, Human
auacugaacuccccuaaguca

SEQ ID NO: 171291 - RNA, 21 nt, Human
caacaaggcuccuucuacaac

SEQ ID NO: 171292 - RNA, 19 nt, Human
cacaguccuuccacucucc

SEQ ID NO: 171293 - RNA, 22 nt, Human
caccugcagccacaguccuucc

SEQ ID NO: 171294 - RNA, 23 nt, Human
caccuugguccagaaaaacguga

SEQ ID NO: 171295 - RNA, 18 nt, Human
caccuuucucaggagcca

SEQ ID NO: 171296 - RNA, 20 nt, Human
caccuuucucaggagccaag

SEQ ID NO: 171297 - RNA, 20 nt, Human
cagcugccgcgcaggagcag

SEQ ID NO: 171298 - RNA, 22 nt, Human
cagucaaggagaugcacaguag

SEQ ID NO: 171299 - RNA, 24 nt, Human
ccaccaacaaggcuccuucuacaa

SEQ ID NO: 171300 - RNA, 20 nt, Human
ccacucuccaccaacaaggc

SEQ ID NO: 171301 - RNA, 24 nt, Human
ccagaaaaacgugaaucgggaaca

SEQ ID NO: 171302 - RNA, 21 nt, Human
cccccuccuucaccccuaaac

SEQ ID NO: 171303 - RNA, 20 nt, Human
ccccuaaacaaugaugccca

SEQ ID NO: 171304 - RNA, 21 nt, Human
ccccucuuggacugcccuccu

SEQ ID NO: 171305 - RNA, 18 nt, Human
ccccugggucgcuuccag

SEQ ID NO: 171306 - RNA, 22 nt, Human
cccucuuggacugcccuccuca

SEQ ID NO: 171307 - RNA, 25 nt, Human
ccgcuaagcuauuucauuucugcac

SEQ ID NO: 171308 - RNA, 22 nt, Human
ccucaccuuucucaggagccaa

SEQ ID NO: 171309 - RNA, 18 nt, Human
ccucgcucacuguggccc

SEQ ID NO: 171310 - RNA, 22 nt, Human
ccucugcgcgcgcccaccgccc

SEQ ID NO: 171311 - RNA, 19 nt, Human
ccugcagccacaguccuuc

SEQ ID NO: 171312 - RNA, 22 nt, Human
cuacucuugauucucucucaac

SEQ ID NO: 171313 - RNA, 21 nt, Human
cuauggcuuccuucucuucug

SEQ ID NO: 171314 - RNA, 20 nt, Human
cucaccuuucucaggagcca

SEQ ID NO: 171315 - RNA, 18 nt, Human
cuccccugggucgcuucc

SEQ ID NO: 171316 - RNA, 18 nt, Human
cucucucaacugauccgg

SEQ ID NO: 171317 - RNA, 19 nt, Human
cugcgcgcgcccaccgccc

SEQ ID NO: 171318 - RNA, 18 nt, Human
cuugauucucucucaacu

SEQ ID NO: 171319 - RNA, 20 nt, Human
cuuggacugcccuccucacc

SEQ ID NO: 171320 - RNA, 20 nt, Human
gagauuuggaagcugcacgg

SEQ ID NO: 171321 - RNA, 18 nt, Human
gaggaagaacccccuccu

SEQ ID NO: 171322 - RNA, 22 nt, Human
ggccccucuuggacugcccucc

SEQ ID NO: 171323 - RNA, 21 nt, Human
ggccuccccugggucgcuucc

SEQ ID NO: 171324 - RNA, 21 nt, Human
gggaacaguuguguaugagau

SEQ ID NO: 171325 - RNA, 23 nt, Human
gggaagagggaaaaagguugcuu

SEQ ID NO: 171326 - RNA, 21 nt, Human
gugaaagaagucagcggcccc

SEQ ID NO: 171327 - RNA, 18 nt, Human
guuauagaaaaacauaaa

SEQ ID NO: 171328 - RNA, 23 nt, Human
uaaagcagcugccgcgcaggagc

SEQ ID NO: 171329 - RNA, 18 nt, Human
uacugaacuccccuaagu

SEQ ID NO: 171330 - RNA, 24 nt, Human
uagaaaaacauaaagacagaagaa

SEQ ID NO: 171331 - RNA, 28 nt, Human
uauguaaagugagguacacgcauguagu

SEQ ID NO: 171332 - RNA, 18 nt, Human
ucaaaaagcugacaacuu

SEQ ID NO: 171333 - RNA, 27 nt, Human
ucagcggccccucuuggacugcccucc

SEQ ID NO: 171334 - RNA, 21 nt, Human
ucaggagccaaggcugugagg

SEQ ID NO: 171335 - RNA, 20 nt, Human
ucaucuuaaguuuccuccaa

SEQ ID NO: 171336 - RNA, 23 nt, Human
uccagagggaaggcccgguucau

SEQ ID NO: 171337 - RNA, 19 nt, Human
ucucaggagccaaggcugu

SEQ ID NO: 171338 - RNA, 21 nt, Human
ucuuggacugcccuccucacc

SEQ ID NO: 171339 - RNA, 18 nt, Human
ugaaagaagucagcggcc

SEQ ID NO: 171340 - RNA, 22 nt, Human
ugaaauaaauaauuguguggaa

SEQ ID NO: 171341 - RNA, 20 nt, Human
ugaagaacuuacucccauga

SEQ ID NO: 171342 - RNA, 21 nt, Human
ugaaucgggaacaguugugua

SEQ ID NO: 171343 - RNA, 21 nt, Human
ugagauuuggaagcugcacgg

SEQ ID NO: 171344 - RNA, 21 nt, Human
ugaggaauccaaacaacaaag

SEQ ID NO: 171345 - RNA, 25 nt, Human
ugaugcggcagucaaggagaugcac

SEQ ID NO: 171346 - RNA, 22 nt, Human
ugcacgggccacaaauauggcc

SEQ ID NO: 171347 - RNA, 21 nt, Human
ugccagcacuccugcaggacu

SEQ ID NO: 171348 - RNA, 25 nt, Human
ugcccuccucaccuuucucaggagc

SEQ ID NO: 171349 - RNA, 22 nt, Human
ugcggcagucaaggagaugcac

SEQ ID NO: 171350 - RNA, 23 nt, Human
uggaaaccgggcccccaucucug

SEQ ID NO: 171351 - RNA, 23 nt, Human
uggaagugacacuauggcuuccu

SEQ ID NO: 171352 - RNA, 26 nt, Human
ugugaaagaagucagcggccccucuu

SEQ ID NO: 171353 - RNA, 25 nt, Human
ugugcaaaaaauauggaaaccgggc

SEQ ID NO: 171354 - RNA, 26 nt, Human
ugugcaaaaaauauggaaaccgggcc

SEQ ID NO: 171355 - RNA, 19 nt, Human
uguggaagugacacuaugg

SEQ ID NO: 171356 - RNA, 23 nt, Human
uucaccuugguccagaaaaacgu

SEQ ID NO: 171357 - RNA, 23 nt, Human
uuccuucucuucugucuguaaac

SEQ ID NO: 171358 - RNA, 20 nt, Human
uugcuucugcuuuauuuuca

SEQ ID NO: 171359 - RNA, 24 nt, Human
uugcuucugcuuuauuuucacauu

SEQ ID NO: 171360 - RNA, 24 nt, Human
uuggaagcugcacgggccacaaau

SEQ ID NO: 171361 - RNA, 19 nt, Human
uuggacugcccuccucacc

SEQ ID NO: 171362 - RNA, 21 nt, Human
uuuaaaaaauccagguuauag

SEQ ID NO: 171363 - RNA, 28 nt, Human
aacaacagcaauaaaaccacaagcaaac

SEQ ID NO: 171364 - RNA, 23 nt, Human
aacagcaauaaaaccacaagcaa

SEQ ID NO: 171365 - RNA, 25 nt, Human
aaccacaagcaaaccagccugcacc

SEQ ID NO: 171366 - RNA, 19 nt, Human
aagcaagguccccaguagg

SEQ ID NO: 171367 - RNA, 23 nt, Human
acaauggaauaucacucagcuau

SEQ ID NO: 171368 - RNA, 24 nt, Human
acaccgagugucccccagccaugu

SEQ ID NO: 171369 - RNA, 23 nt, Human
acagcaauaaaaccacaagcaaa

SEQ ID NO: 171370 - RNA, 18 nt, Human
agcaggugaggccccagg

SEQ ID NO: 171371 - RNA, 19 nt, Human
agcauuaucuguuugcacc

SEQ ID NO: 171372 - RNA, 20 nt, Human
agccgaggccccaggcagcc

SEQ ID NO: 171373 - RNA, 21 nt, Human
aggcaccauccccagccccag

SEQ ID NO: 171374 - RNA, 19 nt, Human
aggcagccgaggccccagg

SEQ ID NO: 171375 - RNA, 19 nt, Human
aggcagccgaggccccagg

SEQ ID NO: 171376 - RNA, 19 nt, Human
aggcagccgaggccccagg

SEQ ID NO: 171377 - RNA, 19 nt, Human
aggcagccgaggccccagg

SEQ ID NO: 171378 - RNA, 22 nt, Human
aggcagccgaggccccaggcag

SEQ ID NO: 171379 - RNA, 22 nt, Human
aggcagccgaggccccagguag

SEQ ID NO: 171380 - RNA, 19 nt, Human
aggcaggugagaccccagg

SEQ ID NO: 171381 - RNA, 19 nt, Human
aggcuccuggcagugaagc

SEQ ID NO: 171382 - RNA, 19 nt, Human
agguaagucacaugccugg

SEQ ID NO: 171383 - RNA, 23 nt, Human
augcauuugugacacccauccgc

SEQ ID NO: 171384 - RNA, 22 nt, Human
caaagacuccagcaggugaggc

SEQ ID NO: 171385 - RNA, 18 nt, Human
caacagcaauaaaaccac

SEQ ID NO: 171386 - RNA, 25 nt, Human
caacagcaauaaaaccacaagcaaa

SEQ ID NO: 171387 - RNA, 22 nt, Human
caagcaaaccagccugcaccau

SEQ ID NO: 171388 - RNA, 20 nt, Human
caauaaaaccacaagcaaac

SEQ ID NO: 171389 - RNA, 19 nt, Human
cacauacccuucgcccucc

SEQ ID NO: 171390 - RNA, 22 nt, Human
caccaaagacuccagcagguga

SEQ ID NO: 171391 - RNA, 18 nt, Human
cacccguucucagggccc

SEQ ID NO: 171392 - RNA, 27 nt, Human
cagcaauaaaaccacaagaccuucggg

SEQ ID NO: 171393 - RNA, 22 nt, Human
cagcaauaaaaccacaagcaaa

SEQ ID NO: 171394 - RNA, 25 nt, Human
cagcaauaaaaccacaagcaaacca

SEQ ID NO: 171395 - RNA, 19 nt, Human
cagccuccagaaagcaagg

SEQ ID NO: 171396 - RNA, 18 nt, Human
cagggccucaagggcacc

SEQ ID NO: 171397 - RNA, 23 nt, Human
cagguaagucacaugccuggcca

SEQ ID NO: 171398 - RNA, 19 nt, Human
caguaggcaccauccccag

SEQ ID NO: 171399 - RNA, 22 nt, Human
caugugcacaccacugcugaug

SEQ ID NO: 171400 - RNA, 21 nt, Human
ccacaagcaaaccagccugca

SEQ ID NO: 171401 - RNA, 23 nt, Human
ccagcagguaaaguccccaacag

SEQ ID NO: 171402 - RNA, 24 nt, Human
ccagcagguaaaguccccaacagc

SEQ ID NO: 171403 - RNA, 23 nt, Human
cccauccgcuggcgcucacaccg

SEQ ID NO: 171404 - RNA, 18 nt, Human
ccccaggcagccgaggcc

SEQ ID NO: 171405 - RNA, 18 nt, Human
ccccaggcagccgaggcc

SEQ ID NO: 171406 - RNA, 19 nt, Human
ccccaggcagccgaggccc

SEQ ID NO: 171407 - RNA, 19 nt, Human
ccccaggcagccgaggccc

SEQ ID NO: 171408 - RNA, 19 nt, Human
ccccaggcagccgaggccc

SEQ ID NO: 171409 - RNA, 19 nt, Human
ccccaggcagccgaggccc

SEQ ID NO: 171410 - RNA, 21 nt, Human
cccccagccaugugcacacca

SEQ ID NO: 171411 - RNA, 19 nt, Human
cccugcacaccuugggcaa

SEQ ID NO: 171412 - RNA, 23 nt, Human
cccuucgcccuccuccuuagggg

SEQ ID NO: 171413 - RNA, 19 nt, Human
ccuccuccuuaggggaccc

SEQ ID NO: 171414 - RNA, 20 nt, Human
ccuggcagugaagcccggca

SEQ ID NO: 171415 - RNA, 19 nt, Human
ccuggccaccaaagacucc

SEQ ID NO: 171416 - RNA, 21 nt, Human
ccuugggcaacacauccagcu

SEQ ID NO: 171417 - RNA, 22 nt, Human
ccuugggcaacacauccagcuc

SEQ ID NO: 171418 - RNA, 25 nt, Human
cgcccgggggcagggccucaagggc

SEQ ID NO: 171419 - RNA, 21 nt, Human
cucccuugggcccugugccuc

SEQ ID NO: 171420 - RNA, 18 nt, Human
cugaccugcccugcacac

SEQ ID NO: 171421 - RNA, 21 nt, Human
cuggccaccaaagacuccagc

SEQ ID NO: 171422 - RNA, 26 nt, Human
cuggccaccaaagacuccccuuccgg

SEQ ID NO: 171423 - RNA, 25 nt, Human
gagauccucaguaggugcagccucc

SEQ ID NO: 171424 - RNA, 25 nt, Human
gagcaggucccagcagguaaagucc

SEQ ID NO: 171425 - RNA, 24 nt, Human
gcacaccuugggcaacacauccag

SEQ ID NO: 171426 - RNA, 24 nt, Human
gggcgagguggcucaugucuguaa

SEQ ID NO: 171427 - RNA, 20 nt, Human
ggucccagcagguaaagucc

SEQ ID NO: 171428 - RNA, 19 nt, Human
gguggcucaugucuguaau

SEQ ID NO: 171429 - RNA, 22 nt, Human
uaaaaccacaagcaaaccagcc

SEQ ID NO: 171430 - RNA, 24 nt, Human
uaacaacagcaauaaaaccacaag

SEQ ID NO: 171431 - RNA, 25 nt, Human
uaucacucagcuaugaaaaggcugg

SEQ ID NO: 171432 - RNA, 22 nt, Human
uccccagcaggggaggcuccug

SEQ ID NO: 171433 - RNA, 19 nt, Human
uccucaguaggugcagccu

SEQ ID NO: 171434 - RNA, 19 nt, Human
ucucagggcccagugccuc

SEQ ID NO: 171435 - RNA, 22 nt, Human
ugaaaucccagguaagucacau

SEQ ID NO: 171436 - RNA, 27 nt, Human
ugaggccccaggcaggugagaccccag

SEQ ID NO: 171437 - RNA, 23 nt, Human
ugcacaccuugggcaacacaucc

SEQ ID NO: 171438 - RNA, 22 nt, Human
ugcccugcacaccuugggcaac

SEQ ID NO: 171439 - RNA, 23 nt, Human
ugccuggccaccaaagacuccag

SEQ ID NO: 171440 - RNA, 19 nt, Human
ugcugauggucacacacau

SEQ ID NO: 171441 - RNA, 23 nt, Human
uggaauaucacucagcuaugaaa

SEQ ID NO: 171442 - RNA, 18 nt, Human
uggcaaggucucugggag

SEQ ID NO: 171443 - RNA, 19 nt, Human
uggcaaggucucugggagc

SEQ ID NO: 171444 - RNA, 21 nt, Human
uggcaaggucucugggagcag

SEQ ID NO: 171445 - RNA, 18 nt, Human
uggcucaugucuguaauc

SEQ ID NO: 171446 - RNA, 24 nt, Human
ugggcgagguggcucaugucugua

SEQ ID NO: 171447 - RNA, 20 nt, Human
uguggcaaggucucugggag

SEQ ID NO: 171448 - RNA, 18 nt, Human
uugggcaacacauccagc

SEQ ID NO: 171449 - RNA, 22 nt, Human
aaacccggcccuuuccaaccac

SEQ ID NO: 171450 - RNA, 19 nt, Human
aaaccggugggcaagucag

SEQ ID NO: 171451 - RNA, 23 nt, Human
aaagccacuuccuuuccccaccc

SEQ ID NO: 171452 - RNA, 24 nt, Human
aaagugcugggauuacagguguga

SEQ ID NO: 171453 - RNA, 22 nt, Human
aacaacaucacaaacaaaucag

SEQ ID NO: 171454 - RNA, 19 nt, Human
aagcagaaguccagggagc

SEQ ID NO: 171455 - RNA, 24 nt, Human
aagccccucugugugccucaaagc

SEQ ID NO: 171456 - RNA, 19 nt, Human
aaguagcugggacugcagg

SEQ ID NO: 171457 - RNA, 19 nt, Human
aaguagcugggacugcagg

SEQ ID NO: 171458 - RNA, 22 nt, Human
aaguagcugggacugcaggagc

SEQ ID NO: 171459 - RNA, 23 nt, Human
aaguagcugggacugcaggagcc

SEQ ID NO: 171460 - RNA, 18 nt, Human
aagugcugggauuacagg

SEQ ID NO: 171461 - RNA, 19 nt, Human
aagugcugggauuacaggu

SEQ ID NO: 171462 - RNA, 26 nt, Human
aagugcugggauuacaggugugagcc

SEQ ID NO: 171463 - RNA, 21 nt, Human
aaguguacccggagcugaaac

SEQ ID NO: 171464 - RNA, 24 nt, Human
acaacaucacaaacaaaucagcca

SEQ ID NO: 171465 - RNA, 24 nt, Human
accuuccgccuuuccuucccacca

SEQ ID NO: 171466 - RNA, 24 nt, Human
accuugugauccgccugccucggc

SEQ ID NO: 171467 - RNA, 19 nt, Human
acggguuucaccauauugg

SEQ ID NO: 171468 - RNA, 23 nt, Human
acggguuucaccauauuggccag

SEQ ID NO: 171469 - RNA, 19 nt, Human
acuuccuuuccccacccac

SEQ ID NO: 171470 - RNA, 18 nt, Human
agaaggaaggaggaagug

SEQ ID NO: 171471 - RNA, 25 nt, Human
agaaggaaggaggaaguguacccgg

SEQ ID NO: 171472 - RNA, 20 nt, Human
agccaccgcacccggccuca

SEQ ID NO: 171473 - RNA, 21 nt, Human
agcugggacugcaggagccug

SEQ ID NO: 171474 - RNA, 23 nt, Human
aggagccugagaccacgccccac

SEQ ID NO: 171475 - RNA, 18 nt, Human
aggcaggugaagcuucag

SEQ ID NO: 171476 - RNA, 18 nt, Human
aggcaggugaguccucag

SEQ ID NO: 171477 - RNA, 23 nt, Human
agggauuuggagacucagucaug

SEQ ID NO: 171478 - RNA, 21 nt, Human
agggcauuccaguuacaagga

SEQ ID NO: 171479 - RNA, 19 nt, Human
agguaggugaauccccagg

SEQ ID NO: 171480 - RNA, 22 nt, Human
agguucacaccauucuccugcc

SEQ ID NO: 171481 - RNA, 20 nt, Human
agugaaaaggcugaccugaa

SEQ ID NO: 171482 - RNA, 23 nt, Human
agugcaauggcgcgaucuuggcu

SEQ ID NO: 171483 - RNA, 24 nt, Human
agugcaauggcgcgaucuuggcuc

SEQ ID NO: 171484 - RNA, 21 nt, Human
aucguggggcuccccuaaucc

SEQ ID NO: 171485 - RNA, 24 nt, Human
augggugccaguucccagggccca

SEQ ID NO: 171486 - RNA, 21 nt, Human
auucuccugccucagccuccc

SEQ ID NO: 171487 - RNA, 24 nt, Human
caaagugcugggauuacaggugug

SEQ ID NO: 171488 - RNA, 19 nt, Human
caaccaccacaccugucau

SEQ ID NO: 171489 - RNA, 24 nt, Human
caaccaccacaccugucaucaggu

SEQ ID NO: 171490 - RNA, 23 nt, Human
caaggaacaaccuucgcaaaggc

SEQ ID NO: 171491 - RNA, 24 nt, Human
caaggcaauagggagccaugugag

SEQ ID NO: 171492 - RNA, 22 nt, Human
cacaccauucuccugccucagc

SEQ ID NO: 171493 - RNA, 18 nt, Human
caccaaggcaauagggag

SEQ ID NO: 171494 - RNA, 18 nt, Human
caccauauuggccaggau

SEQ ID NO: 171495 - RNA, 22 nt, Human
caccauauuggccaggaugguc

SEQ ID NO: 171496 - RNA, 24 nt, Human
caccauauuggccaggauggucuc

SEQ ID NO: 171497 - RNA, 21 nt, Human
caccgaagacuccagcaggug

SEQ ID NO: 171498 - RNA, 22 nt, Human
caccgaagacuccagcagguga

SEQ ID NO: 171499 - RNA, 18 nt, Human
cacuaagugccaggccaa

SEQ ID NO: 171500 - RNA, 20 nt, Human
cagcagaaaugcaggcaugg

SEQ ID NO: 171501 - RNA, 18 nt, Human
cagcccaggccccacacc

SEQ ID NO: 171502 - RNA, 21 nt, Human
cagcccaggccccacaccagc

SEQ ID NO: 171503 - RNA, 20 nt, Human
cagccgagguccccaguagg

SEQ ID NO: 171504 - RNA, 21 nt, Human
caggugaagcugcaacaggug

SEQ ID NO: 171505 - RNA, 20 nt, Human
caggugaccgucccaggcag

SEQ ID NO: 171506 - RNA, 26 nt, Human
caucacaaacaaaucagccagaacca

SEQ ID NO: 171507 - RNA, 22 nt, Human
caugaaccuuggaagggaacuu

SEQ ID NO: 171508 - RNA, 20 nt, Human
ccaaagugcugggauuacag

SEQ ID NO: 171509 - RNA, 21 nt, Human
ccaaagugcugggauuacagg

SEQ ID NO: 171510 - RNA, 21 nt, Human
ccaaagugcugggauuacagg

SEQ ID NO: 171511 - RNA, 24 nt, Human
ccaaagugcugggauuacaggugu

SEQ ID NO: 171512 - RNA, 23 nt, Human
ccacaccacgcagcagaaggaag

SEQ ID NO: 171513 - RNA, 23 nt, Human
ccagcagguaaaguccccaacag

SEQ ID NO: 171514 - RNA, 24 nt, Human
ccagcagguaaaguccccaacagc

SEQ ID NO: 171515 - RNA, 21 nt, Human
ccaggaaagugaggacccagg

SEQ ID NO: 171516 - RNA, 19 nt, Human
ccagggguuccuugggagg

SEQ ID NO: 171517 - RNA, 20 nt, Human
ccagguaggugaauccccaa

SEQ ID NO: 171518 - RNA, 23 nt, Human
cccaaguagcugggacugcagga

SEQ ID NO: 171519 - RNA, 25 nt, Human
ccccacccacuccugcagggcaggg

SEQ ID NO: 171520 - RNA, 19 nt, Human
ccccaggaaaaugagguuc

SEQ ID NO: 171521 - RNA, 19 nt, Human
ccccaggaaagugaggacc

SEQ ID NO: 171522 - RNA, 19 nt, Human
ccccaguaggcaaaguccc

SEQ ID NO: 171523 - RNA, 18 nt, Human
ccccucacaggcggcuaa

SEQ ID NO: 171524 - RNA, 22 nt, Human
cccggagcugaaacccggcccu

SEQ ID NO: 171525 - RNA, 18 nt, Human
cccuagagcugagaggcc

SEQ ID NO: 171526 - RNA, 21 nt, Human
cccucugugugccucaaagcc

SEQ ID NO: 171527 - RNA, 23 nt, Human
ccucaaagccacuuccuuucccc

SEQ ID NO: 171528 - RNA, 24 nt, Human
ccucacagguucacaccauucucc

SEQ ID NO: 171529 - RNA, 18 nt, Human
ccugaaccaccgguuccc

SEQ ID NO: 171530 - RNA, 23 nt, Human
ccugccucagccucccaaguagc

SEQ ID NO: 171531 - RNA, 19 nt, Human
ccuggccaccgaagacucc

SEQ ID NO: 171532 - RNA, 23 nt, Human
ccugucaucaggugacccagggc

SEQ ID NO: 171533 - RNA, 24 nt, Human
cgcacccggccucaucauugguuu

SEQ ID NO: 171534 - RNA, 23 nt, Human
cggguuucaccauauuggccagg

SEQ ID NO: 171535 - RNA, 26 nt, Human
cucaaagccacuuccuuuccccaccc

SEQ ID NO: 171536 - RNA, 24 nt, Human
cucagccucccaaguagcugggac

SEQ ID NO: 171537 - RNA, 24 nt, Human
cuccugaccuugugauccgccugc

SEQ ID NO: 171538 - RNA, 18 nt, Human
cuccuggaagccagcaug

SEQ ID NO: 171539 - RNA, 20 nt, Human
cucugucguccagguuggag

SEQ ID NO: 171540 - RNA, 20 nt, Human
cugcaggagccugagaccac

SEQ ID NO: 171541 - RNA, 23 nt, Human
cugccucagccucccaaguagcu

SEQ ID NO: 171542 - RNA, 23 nt, Human
cugccucggccucccaaagugcu

SEQ ID NO: 171543 - RNA, 23 nt, Human
cugggccacggucagccauaggg

SEQ ID NO: 171544 - RNA, 26 nt, Human
cugggggggccagugugcagagggcc

SEQ ID NO: 171545 - RNA, 22 nt, Human
cugggucuucaccacuggagag

SEQ ID NO: 171546 - RNA, 19 nt, Human
cuuuccaaccaccacaccu

SEQ ID NO: 171547 - RNA, 21 nt, Human
cuuuccaaccaccacaccugu

SEQ ID NO: 171548 - RNA, 21 nt, Human
gaaggucucugggagcagguc

SEQ ID NO: 171549 - RNA, 20 nt, Human
gacaccagggguuccuuggg

SEQ ID NO: 171550 - RNA, 19 nt, Human
gacaccuucugggagaugc

SEQ ID NO: 171551 - RNA, 22 nt, Human
gaccuugugauccgccugccuc

SEQ ID NO: 171552 - RNA, 24 nt, Human
gaccuugugauccgccugccucgg

SEQ ID NO: 171553 - RNA, 18 nt, Human
gagaggaggcagagcugu

SEQ ID NO: 171554 - RNA, 25 nt, Human
gagcaggucccagcagguaaagucc

SEQ ID NO: 171555 - RNA, 18 nt, Human
gaggcagagcuguugcag

SEQ ID NO: 171556 - RNA, 18 nt, Human
gauuacaggugugagcca

SEQ ID NO: 171557 - RNA, 22 nt, Human
gauuacaggugugagccaccgc

SEQ ID NO: 171558 - RNA, 23 nt, Human
gauuacaggugugagccaccgca

SEQ ID NO: 171559 - RNA, 19 nt, Human
gcaaagcagaaguccaggg

SEQ ID NO: 171560 - RNA, 22 nt, Human
gcaagcuccaccucacagguuc

SEQ ID NO: 171561 - RNA, 21 nt, Human
gccagugugcagagggcccua

SEQ ID NO: 171562 - RNA, 21 nt, Human
gcuccccuaauccccguugca

SEQ ID NO: 171563 - RNA, 26 nt, Human
gcuucaaugcgauguggcuuugagua

SEQ ID NO: 171564 - RNA, 22 nt, Human
ggaacugcaggaggagucucag

SEQ ID NO: 171565 - RNA, 18 nt, Human
ggacguggaagaggccac

SEQ ID NO: 171566 - RNA, 19 nt, Human
ggagaggaggcagagcugu

SEQ ID NO: 171567 - RNA, 22 nt, Human
ggagaugcuagagggacucggg

SEQ ID NO: 171568 - RNA, 23 nt, Human
ggagaugcuagagggacucgggg

SEQ ID NO: 171569 - RNA, 22 nt, Human
gggcauccuguccuggagcccg

SEQ ID NO: 171570 - RNA, 21 nt, Human
gggggccagugugcagagggc

SEQ ID NO: 171571 - RNA, 22 nt, Human
ggguuccacagggacaccaggg

SEQ ID NO: 171572 - RNA, 18 nt, Human
ggucccagcagguaaagu

SEQ ID NO: 171573 - RNA, 19 nt, Human
ggucucgaucuccugaccu

SEQ ID NO: 171574 - RNA, 20 nt, Human
ggucucgaucuccugaccuu

SEQ ID NO: 171575 - RNA, 24 nt, Human
gguuucaccauauuggccaggaug

SEQ ID NO: 171576 - RNA, 18 nt, Human
gucguccagguuggagug

SEQ ID NO: 171577 - RNA, 20 nt, Human
gucucugccgcuccuggaca

SEQ ID NO: 171578 - RNA, 22 nt, Human
guugcagaggcugggccacggu

SEQ ID NO: 171579 - RNA, 21 nt, Human
uaacaacaucacaaacaaauc

SEQ ID NO: 171580 - RNA, 19 nt, Human
uaacagcuggauucugagg

SEQ ID NO: 171581 - RNA, 27 nt, Human
uaagggacauaccuggccaccgaagac

SEQ ID NO: 171582 - RNA, 25 nt, Human
uaauuuuuguauuuuuuaauagaga

SEQ ID NO: 171583 - RNA, 24 nt, Human
uacaaagugaaaaggcugaccuga

SEQ ID NO: 171584 - RNA, 23 nt, Human
uacaggugugagccaccgcaccc

SEQ ID NO: 171585 - RNA, 21 nt, Human
uacccggagcugaaacccggc

SEQ ID NO: 171586 - RNA, 23 nt, Human
uaccuggccaccgaagacuccag

SEQ ID NO: 171587 - RNA, 18 nt, Human
uagcaggugagauucagu

SEQ ID NO: 171588 - RNA, 18 nt, Human
uagcugggacugcaggag

SEQ ID NO: 171589 - RNA, 21 nt, Human
ucacaccauucuccugccuca

SEQ ID NO: 171590 - RNA, 20 nt, Human
ucacaggcggcuaacaacau

SEQ ID NO: 171591 - RNA, 21 nt, Human
ucacagguucacaccauucuc

SEQ ID NO: 171592 - RNA, 24 nt, Human
ucacagguucacaccauucuccug

SEQ ID NO: 171593 - RNA, 24 nt, Human
ucaccauauuggccaggauggucu

SEQ ID NO: 171594 - RNA, 19 nt, Human
ucacugcaagcuccaccuc

SEQ ID NO: 171595 - RNA, 24 nt, Human
ucacugcaagcuccaccucacagg

SEQ ID NO: 171596 - RNA, 18 nt, Human
ucagccucccaaguagcu

SEQ ID NO: 171597 - RNA, 20 nt, Human
ucagccucccaaguagcugg

SEQ ID NO: 171598 - RNA, 21 nt, Human
uccaaccaccacaccugucau

SEQ ID NO: 171599 - RNA, 22 nt, Human
uccaccucacagguucacacca

SEQ ID NO: 171600 - RNA, 23 nt, Human
ucccaaagugcugggauuacagg

SEQ ID NO: 171601 - RNA, 20 nt, Human
ucccaaguagcugggacugc

SEQ ID NO: 171602 - RNA, 22 nt, Human
ucccaccagaucccaccuucuc

SEQ ID NO: 171603 - RNA, 19 nt, Human
ucccagggcccagugccuc

SEQ ID NO: 171604 - RNA, 22 nt, Human
uccccaacagccgaggucccca

SEQ ID NO: 171605 - RNA, 18 nt, Human
uccccagcaggccaggcu

SEQ ID NO: 171606 - RNA, 22 nt, Human
uccccagcaggugaggcuccua

SEQ ID NO: 171607 - RNA, 21 nt, Human
uccccaggagacauccccagc

SEQ ID NO: 171608 - RNA, 22 nt, Human
uccccaguaggcaaagucccca

SEQ ID NO: 171609 - RNA, 28 nt, Human
uccccaguaggcaaaguccccaggagac

SEQ ID NO: 171610 - RNA, 19 nt, Human
uccuuagguagaugaggcc

SEQ ID NO: 171611 - RNA, 18 nt, Human
ucggccucccaaagugcu

SEQ ID NO: 171612 - RNA, 18 nt, Human
ucguccagguuggagugc

SEQ ID NO: 171613 - RNA, 26 nt, Human
ucuccugccucagccucccaaguagc

SEQ ID NO: 171614 - RNA, 24 nt, Human
ucugucguccagguuggagugcaa

SEQ ID NO: 171615 - RNA, 21 nt, Human
ucuucugguaggcugggcaca

SEQ ID NO: 171616 - RNA, 23 nt, Human
ucuugcucugucguccagguugg

SEQ ID NO: 171617 - RNA, 24 nt, Human
ucuugcucugucguccagguugga

SEQ ID NO: 171618 - RNA, 19 nt, Human
ugaaaaggcugaccugaac

SEQ ID NO: 171619 - RNA, 22 nt, Human
ugaccugaaccaccgguuccca

SEQ ID NO: 171620 - RNA, 20 nt, Human
ugaccuugccccaccugugg

SEQ ID NO: 171621 - RNA, 20 nt, Human
ugacggcagcagaaaugcag

SEQ ID NO: 171622 - RNA, 22 nt, Human
ugagauggagucuugcucuguc

SEQ ID NO: 171623 - RNA, 21 nt, Human
ugaggaagugagcagaauuuc

SEQ ID NO: 171624 - RNA, 19 nt, Human
ugaggacguggaagaggcc

SEQ ID NO: 171625 - RNA, 20 nt, Human
ugaggccccaggaaaaugag

SEQ ID NO: 171626 - RNA, 22 nt, Human
ugaggccccaggaaagugagga

SEQ ID NO: 171627 - RNA, 23 nt, Human
ugaguacaaagugaaaaggcuga

SEQ ID NO: 171628 - RNA, 20 nt, Human
ugauuaucucucugcacccc

SEQ ID NO: 171629 - RNA, 21 nt, Human
ugcagagggcccuagagcuga

SEQ ID NO: 171630 - RNA, 25 nt, Human
ugcagccuuuugaauaaaaaaaggg

SEQ ID NO: 171631 - RNA, 19 nt, Human
ugcagggcagugcaaagca

SEQ ID NO: 171632 - RNA, 24 nt, Human
ugccucagccucccaaguagcugg

SEQ ID NO: 171633 - RNA, 21 nt, Human
ugccucggccucccaaagugc

SEQ ID NO: 171634 - RNA, 24 nt, Human
ugccucggccucccaaagugcugg

SEQ ID NO: 171635 - RNA, 24 nt, Human
ugcugggauuacaggugugagcca

SEQ ID NO: 171636 - RNA, 24 nt, Human
uggaagaggccacaccacgcagca

SEQ ID NO: 171637 - RNA, 21 nt, Human
uggaaggucucugggagcagg

SEQ ID NO: 171638 - RNA, 23 nt, Human
uggagucuugcucugucguccag

SEQ ID NO: 171639 - RNA, 23 nt, Human
uggagugcaauggcgcgaucuug

SEQ ID NO: 171640 - RNA, 24 nt, Human
uggagugcaauggcgcgaucuugg

SEQ ID NO: 171641 - RNA, 24 nt, Human
uggccaggauggucucgaucuccu

SEQ ID NO: 171642 - RNA, 19 nt, Human
uggcucacugcaagcucca

SEQ ID NO: 171643 - RNA, 21 nt, Human
ugggagaugcuagagggacuc

SEQ ID NO: 171644 - RNA, 18 nt, Human
ugggaggugggaaugagg

SEQ ID NO: 171645 - RNA, 18 nt, Human
ugggauuacaggugugag

SEQ ID NO: 171646 - RNA, 19 nt, Human
ugggauuacaggugugagc

SEQ ID NO: 171647 - RNA, 21 nt, Human
ugggauuacaggugugagcca

SEQ ID NO: 171648 - RNA, 22 nt, Human
ugggauuacaggugugagccac

SEQ ID NO: 171649 - RNA, 23 nt, Human
ugggauuacaggugugagccacc

SEQ ID NO: 171650 - RNA, 24 nt, Human
ugggauuacaggugugagccaccg

SEQ ID NO: 171651 - RNA, 25 nt, Human
ugggccacggucagccauagggugu

SEQ ID NO: 171652 - RNA, 18 nt, Human
uguggaaggucucuggga

SEQ ID NO: 171653 - RNA, 23 nt, Human
uuaauagagacggguuucaccau

SEQ ID NO: 171654 - RNA, 27 nt, Human
uuauuuuauuuuuuugagauggagucu

SEQ ID NO: 171655 - RNA, 22 nt, Human
uucaagcagagggguuaccaug

SEQ ID NO: 171656 - RNA, 18 nt, Human
uucccagggcccagugcc

SEQ ID NO: 171657 - RNA, 23 nt, Human
uuccugagcacuaagugccaggc

SEQ ID NO: 171658 - RNA, 20 nt, Human
uuccuugggaggugggaaug

SEQ ID NO: 171659 - RNA, 19 nt, Human
uugaggaacugcaggagga

SEQ ID NO: 171660 - RNA, 19 nt, Human
uuucaccauauuggccagg

SEQ ID NO: 171661 - RNA, 20 nt, Human
uuucaccauauuggccagga

SEQ ID NO: 171662 - RNA, 23 nt, Human
uuuuuaauagagacggguuucac

SEQ ID NO: 171663 - RNA, 24 nt, Human
uuuuugagauggagucuugcucug

SEQ ID NO: 171664 - RNA, 21 nt, Human
uuuuuguauuuuuuaauagag

SEQ ID NO: 171665 - RNA, 24 nt, Human
uuuuuguauuuuuuaauagagacg

SEQ ID NO: 171666 - RNA, 24 nt, Human
aacuauggacguggcagggacccg

SEQ ID NO: 171667 - RNA, 21 nt, Human
aagggcccugccuuucacccu

SEQ ID NO: 171668 - RNA, 21 nt, Human
acacccaccucccccggccag

SEQ ID NO: 171669 - RNA, 20 nt, Human
acccacacccaccucccccg

SEQ ID NO: 171670 - RNA, 21 nt, Human
acccagcccuuccacccacac

SEQ ID NO: 171671 - RNA, 22 nt, Human
acccagcccuuccacccacacc

SEQ ID NO: 171672 - RNA, 20 nt, Human
accccugcuuccugaccucu

SEQ ID NO: 171673 - RNA, 23 nt, Human
agcaggcacccguuaccucccuc

SEQ ID NO: 171674 - RNA, 21 nt, Human
aucacagcuacgcccuagcuc

SEQ ID NO: 171675 - RNA, 25 nt, Human
caagagacccgagauucucaaauca

SEQ ID NO: 171676 - RNA, 24 nt, Human
cacccaagauuuguucaggguggg

SEQ ID NO: 171677 - RNA, 21 nt, Human
caccccugcuuccugaccucu

SEQ ID NO: 171678 - RNA, 24 nt, Human
cacccguuaccucccucccacucu

SEQ ID NO: 171679 - RNA, 23 nt, Human
cacugcucagacguuuauugucc

SEQ ID NO: 171680 - RNA, 27 nt, Human
cagcaggcacccguuaccucccuccca

SEQ ID NO: 171681 - RNA, 19 nt, Human
cagccccaagggcccugcc

SEQ ID NO: 171682 - RNA, 18 nt, Human
cagccuuuccccucccgu

SEQ ID NO: 171683 - RNA, 25 nt, Human
cagugcccaccugcaccccccaccc

SEQ ID NO: 171684 - RNA, 19 nt, Human
ccaccccugcuuccugacc

SEQ ID NO: 171685 - RNA, 21 nt, Human
cccacacccaccucccccggc

SEQ ID NO: 171686 - RNA, 18 nt, Human
ccccaagggcccugccuu

SEQ ID NO: 171687 - RNA, 23 nt, Human
ccccaagggcccugccuuucacc

SEQ ID NO: 171688 - RNA, 19 nt, Human
cccccagccccaagggccc

SEQ ID NO: 171689 - RNA, 22 nt, Human
ccccccagccccaagggcccug

SEQ ID NO: 171690 - RNA, 19 nt, Human
ccccugcuuccugaccucu

SEQ ID NO: 171691 - RNA, 19 nt, Human
cccucccucccugagccca

SEQ ID NO: 171692 - RNA, 21 nt, Human
cccugccuuucacccucuucc

SEQ ID NO: 171693 - RNA, 21 nt, Human
ccuagcucagccccgccugga

SEQ ID NO: 171694 - RNA, 21 nt, Human
ccucccucccacucucaccuc

SEQ ID NO: 171695 - RNA, 18 nt, Human
ccugcaccccccaccccu

SEQ ID NO: 171696 - RNA, 19 nt, Human
ccugcuuccugaccucugu

SEQ ID NO: 171697 - RNA, 22 nt, Human
cggcagccgccagaggugcccc

SEQ ID NO: 171698 - RNA, 21 nt, Human
cggggucccagguuuggcccc

SEQ ID NO: 171699 - RNA, 23 nt, Human
cgguaagggccggaugccuggug

SEQ ID NO: 171700 - RNA, 24 nt, Human
cguggcagggacccgugccugugu

SEQ ID NO: 171701 - RNA, 21 nt, Human
cuccugggccccgccccagcc

SEQ ID NO: 171702 - RNA, 21 nt, Human
cuccugggccccgccccagcc

SEQ ID NO: 171703 - RNA, 20 nt, Human
cucggggaccacagggccuc

SEQ ID NO: 171704 - RNA, 18 nt, Human
cucugugcccagccuccc

SEQ ID NO: 171705 - RNA, 22 nt, Human
cugaaaucacagcuacgcccua

SEQ ID NO: 171706 - RNA, 18 nt, Human
cugcaccccccaccccug

SEQ ID NO: 171707 - RNA, 23 nt, Human
cugcaccccccaccccugcuucc

SEQ ID NO: 171708 - RNA, 21 nt, Human
cuucaggcuggggugcccccc

SEQ ID NO: 171709 - RNA, 21 nt, Human
gaaaucacagcuacgcccuag

SEQ ID NO: 171710 - RNA, 22 nt, Human
gcccccacaaacuucaggcugg

SEQ ID NO: 171711 - RNA, 18 nt, Human
gccccgccccagccuaca

SEQ ID NO: 171712 - RNA, 22 nt, Human
gcccugccuuucacccucuucc

SEQ ID NO: 171713 - RNA, 23 nt, Human
gcccugccuuucacccucuucca

SEQ ID NO: 171714 - RNA, 21 nt, Human
gcuccagugcccaccugcacc

SEQ ID NO: 171715 - RNA, 21 nt, Human
uaccucccucccacucucacc

SEQ ID NO: 171716 - RNA, 20 nt, Human
ucagaacuauggacguggca

SEQ ID NO: 171717 - RNA, 22 nt, Human
ucagacguuuauuguccaccgc

SEQ ID NO: 171718 - RNA, 20 nt, Human
ucaggguggggaggguccuc

SEQ ID NO: 171719 - RNA, 21 nt, Human
ucagucagccaagagacccga

SEQ ID NO: 171720 - RNA, 19 nt, Human
ucccguuagcccgcugcuu

SEQ ID NO: 171721 - RNA, 21 nt, Human
ucgacacccagcccuuccacc

SEQ ID NO: 171722 - RNA, 22 nt, Human
ucuuccagccaggccuucaccc

SEQ ID NO: 171723 - RNA, 21 nt, Human
ugaaaucacagcuacgcccua

SEQ ID NO: 171724 - RNA, 20 nt, Human
ugaccucugugcccagccuc

SEQ ID NO: 171725 - RNA, 22 nt, Human
ugaccucugugcccagccuccc

SEQ ID NO: 171726 - RNA, 19 nt, Human
ugcuccagugcccaccugc

SEQ ID NO: 171727 - RNA, 23 nt, Human
uuccugaccucugugcccagccu

SEQ ID NO: 171728 - RNA, 20 nt, Human
aaaaaaaaaaaaacagacaa

SEQ ID NO: 171729 - RNA, 18 nt, Human
aaaaaaaaccaaacgucc

SEQ ID NO: 171730 - RNA, 20 nt, Human
aaaaaaacagacaaccuuau

SEQ ID NO: 171731 - RNA, 24 nt, Human
aaaaaacaaaaacaaaaacaaaaa

SEQ ID NO: 171732 - RNA, 20 nt, Human
aaaaacaaaaaaaaaccaaa

SEQ ID NO: 171733 - RNA, 25 nt, Human
aaaacaaaaacaaaaaaaaaccaaa

SEQ ID NO: 171734 - RNA, 22 nt, Human
aaaacaaaaacaaaaacaaaaa

SEQ ID NO: 171735 - RNA, 28 nt, Human
aaaacaaaaacaaaaacaaaaaaaaacc

SEQ ID NO: 171736 - RNA, 23 nt, Human
aaacaaaaacaaaaaaaaaccaa

SEQ ID NO: 171737 - RNA, 24 nt, Human
aaacaaaaacaaaaaaaaaccaaa

SEQ ID NO: 171738 - RNA, 24 nt, Human
aaacaaaaacaaaaacaaaaaaaa

SEQ ID NO: 171739 - RNA, 22 nt, Human
acaaaaacaaaaaaaaaccaaa

SEQ ID NO: 171740 - RNA, 26 nt, Human
aggaaaaaacaaaaacaaaaacaaaa

SEQ ID NO: 171741 - RNA, 28 nt, Human
auaaaggaaaaaacaaaaacaaaaacaa

SEQ ID NO: 171742 - RNA, 24 nt, Human
auuuaaaaaaaaaaaaacagacaa

SEQ ID NO: 171743 - RNA, 20 nt, Human
caaagagaauguccagaaac

SEQ ID NO: 171744 - RNA, 21 nt, Human
caaaguagaaaacaaccuguu

SEQ ID NO: 171745 - RNA, 26 nt, Human
caaccuuauaaaggaaaaaacaaaaa

SEQ ID NO: 171746 - RNA, 21 nt, Human
cagcugcucuuggugcugaga

SEQ ID NO: 171747 - RNA, 21 nt, Human
cagcugcucuuggugcugaga

SEQ ID NO: 171748 - RNA, 24 nt, Human
cauuguuuuacaaaauuuucuaau

SEQ ID NO: 171749 - RNA, 18 nt, Human
cugaaucuguugacugga

SEQ ID NO: 171750 - RNA, 25 nt, Human
ggaaaaaacaaaaacaaaaacaaaa

SEQ ID NO: 171751 - RNA, 19 nt, Human
uagaaaacaaccuguuugc

SEQ ID NO: 171752 - RNA, 22 nt, Human
ucaaagagaauguccagaaaca

SEQ ID NO: 171753 - RNA, 19 nt, Human
ucaauaguucacacagguc

SEQ ID NO: 171754 - RNA, 23 nt, Human
ucaguggucacaauaccaccauc

SEQ ID NO: 171755 - RNA, 20 nt, Human
ucucacacaaaaugucugug

SEQ ID NO: 171756 - RNA, 20 nt, Human
ugaaaggggcaaaguagaaa

SEQ ID NO: 171757 - RNA, 22 nt, Human
uucugaaucuguugacuggagu

SEQ ID NO: 171758 - RNA, 20 nt, Human
uucuuccacauaaggcugau

SEQ ID NO: 171759 - RNA, 21 nt, Human
uuuaaaaaaaaaaaaacagac

SEQ ID NO: 171760 - RNA, 23 nt, Human
uuuaaaaaaaaaaaaacagacaa

SEQ ID NO: 171761 - RNA, 26 nt, Human
uuuaaaaaaaaaaaaacagacaaccu

SEQ ID NO: 171762 - RNA, 23 nt, Human
uuuuacaaaauuuucuaauggag

SEQ ID NO: 171763 - RNA, 24 nt, Human
aaacagcugaucaguguggaaaca

SEQ ID NO: 171764 - RNA, 25 nt, Human
aaacagguaaaaaaaauagaucaaa

SEQ ID NO: 171765 - RNA, 24 nt, Human
aacaaauuggauauuuaaaaauac

SEQ ID NO: 171766 - RNA, 18 nt, Human
aauuuuauuuaggcucuc

SEQ ID NO: 171767 - RNA, 24 nt, Human
augauaaugaagaauaaauuacuc

SEQ ID NO: 171768 - RNA, 21 nt, Human
caaaaugggauauaaaaguca

SEQ ID NO: 171769 - RNA, 23 nt, Human
caauaaucaaaccacaagcuuac

SEQ ID NO: 171770 - RNA, 25 nt, Human
cagugcacauaauuagguauauaca

SEQ ID NO: 171771 - RNA, 19 nt, Human
caucaaaauauuuaucaag

SEQ ID NO: 171772 - RNA, 18 nt, Human
cauucaucuucggaguca

SEQ ID NO: 171773 - RNA, 23 nt, Human
cauuguaauacuuagugaaaauu

SEQ ID NO: 171774 - RNA, 25 nt, Human
ccaaaaugggauauaaaagucaucu

SEQ ID NO: 171775 - RNA, 20 nt, Human
cccuagagagggugauaaaa

SEQ ID NO: 171776 - RNA, 24 nt, Human
cuccaccaaaauauacacguuacc

SEQ ID NO: 171777 - RNA, 25 nt, Human
gaaaauaaaugagaagucuaauagc

SEQ ID NO: 171778 - RNA, 21 nt, Human
gagugucaucaguagcagaaa

SEQ ID NO: 171779 - RNA, 18 nt, Human
gcugagcuuuuaaaaauc

SEQ ID NO: 171780 - RNA, 21 nt, Human
gguaaaauaagaccauuuuaa

SEQ ID NO: 171781 - RNA, 20 nt, Human
gucauaugugcuauguauga

SEQ ID NO: 171782 - RNA, 20 nt, Human
uaaacagcugaucagugugg

SEQ ID NO: 171783 - RNA, 27 nt, Human
uaauuaaacauuguucauaaaugacac

SEQ ID NO: 171784 - RNA, 20 nt, Human
uagauuuucuaaaguauuau

SEQ ID NO: 171785 - RNA, 23 nt, Human
uagcuucccgaauagaacaguuc

SEQ ID NO: 171786 - RNA, 20 nt, Human
uaguacuucuaaaguagaac

SEQ ID NO: 171787 - RNA, 22 nt, Human
uauaaauauauuuauagguauc

SEQ ID NO: 171788 - RNA, 23 nt, Human
uauccauaugguaaaauaagacc

SEQ ID NO: 171789 - RNA, 18 nt, Human
uaugugcuauguaugaau

SEQ ID NO: 171790 - RNA, 19 nt, Human
uauuaucaaauccuugagu

SEQ ID NO: 171791 - RNA, 20 nt, Human
ucacaaaugugauaaacagg

SEQ ID NO: 171792 - RNA, 22 nt, Human
ucacuccaugaauaauuucacc

SEQ ID NO: 171793 - RNA, 21 nt, Human
uccaacaaaugugcauugaga

SEQ ID NO: 171794 - RNA, 20 nt, Human
uccauaugguaaaauaagac

SEQ ID NO: 171795 - RNA, 33 nt, Human
ucuaaaguagaacugucacuuccuugaaacaac

SEQ ID NO: 171796 - RNA, 22 nt, Human
ucuucuuauccucaauacuugg

SEQ ID NO: 171797 - RNA, 22 nt, Human
ugauaaacagguaaaaaaaaua

SEQ ID NO: 171798 - RNA, 18 nt, Human
ugcaagugaugaaaaauu

SEQ ID NO: 171799 - RNA, 23 nt, Human
ugcacauaauuagguauauacag

SEQ ID NO: 171800 - RNA, 18 nt, Human
ugcauugagaucuuacug

SEQ ID NO: 171801 - RNA, 20 nt, Human
uguuuuauuaugacaaugag

SEQ ID NO: 171802 - RNA, 18 nt, Human
uuacccuagagaggguga

SEQ ID NO: 171803 - RNA, 18 nt, Human
uuaggcucucuuaaauga

SEQ ID NO: 171804 - RNA, 20 nt, Human
uucccaaauagauuaaacag

SEQ ID NO: 171805 - RNA, 19 nt, Human
uugaaacaaucauuuuucu

SEQ ID NO: 171806 - RNA, 18 nt, Human
uuuuauuaugacaaugag

SEQ ID NO: 171807 - RNA, 22 nt, Human
aaagagagagagagagagagac

SEQ ID NO: 171808 - RNA, 19 nt, Human
aaagucacacuuuuuaauu

SEQ ID NO: 171809 - RNA, 18 nt, Human
aagcuucuagauuuuacc

SEQ ID NO: 171810 - RNA, 23 nt, Human
acuuuuuaauuuuuucauuugcu

SEQ ID NO: 171811 - RNA, 24 nt, Human
agacagagagacagagagacagag

SEQ ID NO: 171812 - RNA, 24 nt, Human
agacagagagacagagagacagag

SEQ ID NO: 171813 - RNA, 24 nt, Human
agacagagagacagagagacagag

SEQ ID NO: 171814 - RNA, 27 nt, Human
agacagagagacagagagaggggaccc

SEQ ID NO: 171815 - RNA, 23 nt, Human
agagacagagagacagagagaga

SEQ ID NO: 171816 - RNA, 20 nt, Human
agagagagagacagagagac

SEQ ID NO: 171817 - RNA, 20 nt, Human
agcagcagagugaguccuga

SEQ ID NO: 171818 - RNA, 21 nt, Human
agcuggucuuuuuuuuccuuu

SEQ ID NO: 171819 - RNA, 20 nt, Human
aggggcccggagcggccggg

SEQ ID NO: 171820 - RNA, 23 nt, Human
auccuguucuuuacuuuguucac

SEQ ID NO: 171821 - RNA, 24 nt, Human
auuacagcaguauaagcaaaauug

SEQ ID NO: 171822 - RNA, 21 nt, Human
caaaagcaacucucuucaaaa

SEQ ID NO: 171823 - RNA, 19 nt, Human
caaguagaugcuaaaaugg

SEQ ID NO: 171824 - RNA, 22 nt, Human
cacaacacagggcugucaguga

SEQ ID NO: 171825 - RNA, 26 nt, Human
cagagagacagagagacagagagaga

SEQ ID NO: 171826 - RNA, 19 nt, Human
cauuuuauuucaaaagcaa

SEQ ID NO: 171827 - RNA, 22 nt, Human
ccaggggcccggagcggccggg

SEQ ID NO: 171828 - RNA, 19 nt, Human
ccggagcggccgggcgggg

SEQ ID NO: 171829 - RNA, 22 nt, Human
cucccgucccccucguagcuuu

SEQ ID NO: 171830 - RNA, 21 nt, Human
cucucuaccacaaagccuaga

SEQ ID NO: 171831 - RNA, 24 nt, Human
cuggaaaauaucucuuuacuuccc

SEQ ID NO: 171832 - RNA, 26 nt, Human
cuuuuuuuuuuuuuuuacaaaaauau

SEQ ID NO: 171833 - RNA, 19 nt, Human
gaaaaacaaguagaugcua

SEQ ID NO: 171834 - RNA, 23 nt, Human
gagcacaacacagggcugucagu

SEQ ID NO: 171835 - RNA, 23 nt, Human
gagcggccgggcgggggccgccg

SEQ ID NO: 171836 - RNA, 21 nt, Human
gccgggcaaggcgcgcagggc

SEQ ID NO: 171837 - RNA, 21 nt, Human
gcuggucuuuuuuuuccuuuu

SEQ ID NO: 171838 - RNA, 19 nt, Human
ggccaaaaauuggguccca

SEQ ID NO: 171839 - RNA, 20 nt, Human
ggcccggagcggccgggcgg

SEQ ID NO: 171840 - RNA, 24 nt, Human
ggcccggagcggccgggcgggggc

SEQ ID NO: 171841 - RNA, 24 nt, Human
gggaaaaacaaguagaugcuaaaa

SEQ ID NO: 171842 - RNA, 21 nt, Human
guccugagcacaacacagggc

SEQ ID NO: 171843 - RNA, 19 nt, Human
uacacaaagaaagaaagag

SEQ ID NO: 171844 - RNA, 24 nt, Human
uaucucuuuacuucccauugcacu

SEQ ID NO: 171845 - RNA, 22 nt, Human
ucaaaagcaacucucuucaaaa

SEQ ID NO: 171846 - RNA, 18 nt, Human
ucagccuuuccuaaaagc

SEQ ID NO: 171847 - RNA, 19 nt, Human
ucagccuuuccuaaaagcu

SEQ ID NO: 171848 - RNA, 18 nt, Human
ucaucaugguuauugaag

SEQ ID NO: 171849 - RNA, 19 nt, Human
ucccauugcacugcccucu

SEQ ID NO: 171850 - RNA, 21 nt, Human
ucucauaccuucaccucucua

SEQ ID NO: 171851 - RNA, 24 nt, Human
ucucccgucccccucguagcuuua

SEQ ID NO: 171852 - RNA, 24 nt, Human
ugccagaaaguacauuucuggacc

SEQ ID NO: 171853 - RNA, 23 nt, Human
ugggauaggugaacuucagguca

SEQ ID NO: 171854 - RNA, 22 nt, Human
uguucuuuacuuuguucacacg

SEQ ID NO: 171855 - RNA, 19 nt, Human
uguuuuuuuauggaagguu

SEQ ID NO: 171856 - RNA, 20 nt, Human
uuacagcaguauaagcaaaa

SEQ ID NO: 171857 - RNA, 30 nt, Human
uugcacugcccucucccgucccccucguag

SEQ ID NO: 171858 - RNA, 23 nt, Human
aaagaacuguaaacuaggaacuu

SEQ ID NO: 171859 - RNA, 23 nt, Human
aggaucccuccccuuuuugaauu

SEQ ID NO: 171860 - RNA, 21 nt, Human
aucccuccccuuuuugaauuc

SEQ ID NO: 171861 - RNA, 20 nt, Human
caaauggaggaacugaaagu

SEQ ID NO: 171862 - RNA, 25 nt, Human
caggaucccuccccuuuuugaauuc

SEQ ID NO: 171863 - RNA, 24 nt, Human
gcacuauuguaaauguaauguaaa

SEQ ID NO: 171864 - RNA, 25 nt, Human
ggaggaacugaaagugcgauguaaa

SEQ ID NO: 171865 - RNA, 23 nt, Human
ugaauuccaaauggaggaacuga

SEQ ID NO: 171866 - RNA, 22 nt, Human
uggaggaacugaaagugcgaug

SEQ ID NO: 171867 - RNA, 19 nt, Human
uggcgauccauauucuauc

SEQ ID NO: 171868 - RNA, 19 nt, Human
aagcugcugugccaccccc

SEQ ID NO: 171869 - RNA, 27 nt, Human
acagugaaaaauaaauacgccuucuca

SEQ ID NO: 171870 - RNA, 19 nt, Human
accccugguucuacuccaa

SEQ ID NO: 171871 - RNA, 24 nt, Human
acccuguuacacaccccuccacua

SEQ ID NO: 171872 - RNA, 21 nt, Human
acuauccccgucuuccacagu

SEQ ID NO: 171873 - RNA, 24 nt, Human
acuccaaaaccuuccccgugccuc

SEQ ID NO: 171874 - RNA, 24 nt, Human
agaaaugggggguacaggaugggg

SEQ ID NO: 171875 - RNA, 23 nt, Human
agacaagguugguccccucccca

SEQ ID NO: 171876 - RNA, 22 nt, Human
agcaagcgagauggagaaggga

SEQ ID NO: 171877 - RNA, 25 nt, Human
agccggagggggagccgcggggggc

SEQ ID NO: 171878 - RNA, 18 nt, Human
agggaggggugcagguug

SEQ ID NO: 171879 - RNA, 21 nt, Human
caaaaccuuccccgugccucc

SEQ ID NO: 171880 - RNA, 21 nt, Human
caaaaccuuccccgugccucc

SEQ ID NO: 171881 - RNA, 22 nt, Human
cacaccccuccacuagcuccug

SEQ ID NO: 171882 - RNA, 20 nt, Human
caccccccuucauacacacc

SEQ ID NO: 171883 - RNA, 19 nt, Human
caggcccccggcgucuccc

SEQ ID NO: 171884 - RNA, 18 nt, Human
ccaccccccuccccccua

SEQ ID NO: 171885 - RNA, 25 nt, Human
ccaccccccuccccccuagauaaga

SEQ ID NO: 171886 - RNA, 22 nt, Human
ccagacaagguugguccccucc

SEQ ID NO: 171887 - RNA, 24 nt, Human
cccccuagauaagagcagcuccag

SEQ ID NO: 171888 - RNA, 26 nt, Human
cccccuagauaagagcagcuccagcg

SEQ ID NO: 171889 - RNA, 23 nt, Human
cccccuagauaagagcagcuccc

SEQ ID NO: 171890 - RNA, 26 nt, Human
cccccuccccccuagauaagagcugg

SEQ ID NO: 171891 - RNA, 18 nt, Human
ccccggaggaggagccgg

SEQ ID NO: 171892 - RNA, 20 nt, Human
ccccguccgccgccgccgcc

SEQ ID NO: 171893 - RNA, 20 nt, Human
ccccguccgccgccgccgcc

SEQ ID NO: 171894 - RNA, 23 nt, Human
ccccguccgccgccgccgccuug

SEQ ID NO: 171895 - RNA, 20 nt, Human
ccccuuacccuggggguagg

SEQ ID NO: 171896 - RNA, 24 nt, Human
cccguccgccgccgccgccuuggu

SEQ ID NO: 171897 - RNA, 23 nt, Human
cccuccccagggggaccuuguca

SEQ ID NO: 171898 - RNA, 22 nt, Human
ccggaggaggagccggaggggg

SEQ ID NO: 171899 - RNA, 20 nt, Human
ccggagggggagccgcgggg

SEQ ID NO: 171900 - RNA, 22 nt, Human
cggggccgggccgcuccccguc

SEQ ID NO: 171901 - RNA, 19 nt, Human
cggucaaaucugggugggu

SEQ ID NO: 171902 - RNA, 23 nt, Human
cuagcuccuggagguuggggggu

SEQ ID NO: 171903 - RNA, 21 nt, Human
cuccaaaaccuuccccgugcc

SEQ ID NO: 171904 - RNA, 25 nt, Human
cuccccagggggaccuugucacccc

SEQ ID NO: 171905 - RNA, 27 nt, Human
cuguuacacaccccuccacuagcuccu

SEQ ID NO: 171906 - RNA, 25 nt, Human
gagaauggggguguucagagagaga

SEQ ID NO: 171907 - RNA, 19 nt, Human
gagccgggccggccccacg

SEQ ID NO: 171908 - RNA, 19 nt, Human
gagggaggggguaugaccc

SEQ ID NO: 171909 - RNA, 18 nt, Human
gaugggaggagggauagc

SEQ ID NO: 171910 - RNA, 19 nt, Human
gcagcagcagucugagugc

SEQ ID NO: 171911 - RNA, 21 nt, Human
gccaccccccuccccccuaga

SEQ ID NO: 171912 - RNA, 22 nt, Human
gccccacggcggcccugccaca

SEQ ID NO: 171913 - RNA, 19 nt, Human
gccgccaccgccuccgacu

SEQ ID NO: 171914 - RNA, 19 nt, Human
gccggggccgggccgcucc

SEQ ID NO: 171915 - RNA, 19 nt, Human
gccugugagggccauggug

SEQ ID NO: 171916 - RNA, 18 nt, Human
gccuucucauccaccaga

SEQ ID NO: 171917 - RNA, 21 nt, Human
ggcgccgccaccgccuccgac

SEQ ID NO: 171918 - RNA, 19 nt, Human
gggaaggagagaggcuccc

SEQ ID NO: 171919 - RNA, 18 nt, Human
gggccggggccgggccgc

SEQ ID NO: 171920 - RNA, 21 nt, Human
ggguacaggaugggaggaggg

SEQ ID NO: 171921 - RNA, 24 nt, Human
ggguaggguggacaagagggaggg

SEQ ID NO: 171922 - RNA, 18 nt, Human
ggucaaaucugggugggu

SEQ ID NO: 171923 - RNA, 19 nt, Human
uaaaggcacauccagucug

SEQ ID NO: 171924 - RNA, 18 nt, Human
uagaggauaaaggcacau

SEQ ID NO: 171925 - RNA, 19 nt, Human
ucagagagagauuggggca

SEQ ID NO: 171926 - RNA, 24 nt, Human
uccaaaaccuuccccgugccuccc

SEQ ID NO: 171927 - RNA, 28 nt, Human
uccaaaaccuuccccgugccucccaccc

SEQ ID NO: 171928 - RNA, 20 nt, Human
uccccagggggaccuuguca

SEQ ID NO: 171929 - RNA, 19 nt, Human
uccccggaggaggagccgg

SEQ ID NO: 171930 - RNA, 22 nt, Human
uccccguccgccgccgccgccu

SEQ ID NO: 171931 - RNA, 21 nt, Human
uccccgugccucccacccacu

SEQ ID NO: 171932 - RNA, 27 nt, Human
ucucuuacuauccccgucuuccacagu

SEQ ID NO: 171933 - RNA, 23 nt, Human
ugagugcgggccgggccaggccc

SEQ ID NO: 171934 - RNA, 21 nt, Human
ugauggggaaggagagaggcu

SEQ ID NO: 171935 - RNA, 22 nt, Human
ugccaccccccuccccccuaga

SEQ ID NO: 171936 - RNA, 21 nt, Human
ugccucccacccacuuaucuc

SEQ ID NO: 171937 - RNA, 19 nt, Human
uggagaagggaggggugca

SEQ ID NO: 171938 - RNA, 21 nt, Human
uggagaauggggguguucaga

SEQ ID NO: 171939 - RNA, 19 nt, Human
ugggggguacaggauggga

SEQ ID NO: 171940 - RNA, 24 nt, Human
ugggggguacaggaugggaggagg

SEQ ID NO: 171941 - RNA, 21 nt, Human
uggggguaggguggacaagag

SEQ ID NO: 171942 - RNA, 19 nt, Human
ugggucgaggagcaccccc

SEQ ID NO: 171943 - RNA, 21 nt, Human
uguacagugaaaaauaaauac

SEQ ID NO: 171944 - RNA, 22 nt, Human
ugugccaccccccuccccccua

SEQ ID NO: 171945 - RNA, 26 nt, Human
uucauacacaccccugguucuacucc

SEQ ID NO: 171946 - RNA, 18 nt, Human
uuuuuuuuuuuuuuuuug

SEQ ID NO: 171947 - RNA, 23 nt, Human
uuuuuuuuuuuuuuuuugccauu

SEQ ID NO: 171948 - RNA, 27 nt, Human
uuuuuuuuuuuuuuuuuugccauuugg

SEQ ID NO: 171949 - RNA, 22 nt, Human
aagcugccggggugaggcccag

SEQ ID NO: 171950 - RNA, 24 nt, Human
aaggggcggcggagggggcggugg

SEQ ID NO: 171951 - RNA, 20 nt, Human
aggccaccaugcaacagccu

SEQ ID NO: 171952 - RNA, 24 nt, Human
agggggcggugggcgcgcaggugg

SEQ ID NO: 171953 - RNA, 20 nt, Human
ccccugcugaaagaaggccc

SEQ ID NO: 171954 - RNA, 21 nt, Human
cccugcugaaagaaggccccc

SEQ ID NO: 171955 - RNA, 22 nt, Human
cugcgggggcagggcuggggaa

SEQ ID NO: 171956 - RNA, 22 nt, Human
ggcggcggagggggcggugggc

SEQ ID NO: 171957 - RNA, 24 nt, Human
gggagucugcgggggcagggcugg

SEQ ID NO: 171958 - RNA, 20 nt, Human
gggcagggcuggggaagggg

SEQ ID NO: 171959 - RNA, 19 nt, Human
gggcggcggagggggcggu

SEQ ID NO: 171960 - RNA, 18 nt, Human
ggggaaggggcggcggag

SEQ ID NO: 171961 - RNA, 21 nt, Human
gugggagaugucaggugccag

SEQ ID NO: 171962 - RNA, 23 nt, Human
ucugcgggggcagggcuggggaa

SEQ ID NO: 171963 - RNA, 18 nt, Human
ugcugaaagaaggccccc

SEQ ID NO: 171964 - RNA, 25 nt, Human
uggcggcagggggagucugcggggg

SEQ ID NO: 171965 - RNA, 19 nt, Human
aaaggucuaaagcccaggg

SEQ ID NO: 171966 - RNA, 19 nt, Human
aagcaugagguggcacgag

SEQ ID NO: 171967 - RNA, 20 nt, Human
aagcaugagguggcacgagg

SEQ ID NO: 171968 - RNA, 26 nt, Human
agcccagggaagaaggggaggcgcca

SEQ ID NO: 171969 - RNA, 20 nt, Human
aggcaggcguuggcgaugcc

SEQ ID NO: 171970 - RNA, 25 nt, Human
aggcaggcguuggcgaugccaccug

SEQ ID NO: 171971 - RNA, 19 nt, Human
aggcguuggcgaugccacc

SEQ ID NO: 171972 - RNA, 18 nt, Human
aggugcugcuugccuggg

SEQ ID NO: 171973 - RNA, 26 nt, Human
agguggcacgaggcaggcguuggcga

SEQ ID NO: 171974 - RNA, 21 nt, Human
agucuggagcuuccuucagcc

SEQ ID NO: 171975 - RNA, 18 nt, Human
augccaccugggggucac

SEQ ID NO: 171976 - RNA, 18 nt, Human
caaaggucuaaagcccag

SEQ ID NO: 171977 - RNA, 18 nt, Human
ccaggagugcaggagagc

SEQ ID NO: 171978 - RNA, 19 nt, Human
cgcuggcagugacggggac

SEQ ID NO: 171979 - RNA, 21 nt, Human
cuuggcuucccagcuggcccc

SEQ ID NO: 171980 - RNA, 22 nt, Human
gacggggacaaaggucuaaagc

SEQ ID NO: 171981 - RNA, 25 nt, Human
gagcagggaggugcugcuugccugg

SEQ ID NO: 171982 - RNA, 18 nt, Human
gcuggcagugacggggac

SEQ ID NO: 171983 - RNA, 22 nt, Human
ggaagaaggggaggcgccagag

SEQ ID NO: 171984 - RNA, 22 nt, Human
ggacaaaggucuaaagcccagg

SEQ ID NO: 171985 - RNA, 24 nt, Human
ggggacaaaggucuaaagcccagg

SEQ ID NO: 171986 - RNA, 22 nt, Human
gugcugcuugccuggggccugg

SEQ ID NO: 171987 - RNA, 18 nt, Human
uccccaggugaaugggcu

SEQ ID NO: 171988 - RNA, 19 nt, Human
uccccaggugaaugggcug

SEQ ID NO: 171989 - RNA, 25 nt, Human
ugcaguggguggcaccgccgaggcu

SEQ ID NO: 171990 - RNA, 23 nt, Human
uggcagugacggggacaaagguc

SEQ ID NO: 171991 - RNA, 19 nt, Human
uggcuucccagcuggcccc

SEQ ID NO: 171992 - RNA, 18 nt, Human
uggguggcaccgccgagg

SEQ ID NO: 171993 - RNA, 21 nt, Human
aaacaaguagccacaaagacc

SEQ ID NO: 171994 - RNA, 25 nt, Human
aaacaaguagccacaaagaccacag

SEQ ID NO: 171995 - RNA, 22 nt, Human
aaagaccacaguuagcaaacac

SEQ ID NO: 171996 - RNA, 18 nt, Human
aacacaauaccauccaca

SEQ ID NO: 171997 - RNA, 22 nt, Human
aacacacacagucacacacaca

SEQ ID NO: 171998 - RNA, 23 nt, Human
aacccaccucgcucaccgcucug

SEQ ID NO: 171999 - RNA, 20 nt, Human
aaccuucccaggucccaaga

SEQ ID NO: 172000 - RNA, 18 nt, Human
aagagaccuucagacugg

SEQ ID NO: 172001 - RNA, 25 nt, Human
aagcagccuccuaggagcagaaggu

SEQ ID NO: 172002 - RNA, 26 nt, Human
aaguagccacaaagaccacaguuagc

SEQ ID NO: 172003 - RNA, 23 nt, Human
aauaccauccacaaacaaguagc

SEQ ID NO: 172004 - RNA, 21 nt, Human
acaaacaaguagccacaaaga

SEQ ID NO: 172005 - RNA, 21 nt, Human
acacaauaccauccacaaaca

SEQ ID NO: 172006 - RNA, 23 nt, Human
acacacacacacacacacacaca

SEQ ID NO: 172007 - RNA, 23 nt, Human
accacaguuagcaaacacacaca

SEQ ID NO: 172008 - RNA, 24 nt, Human
agaggacaggaggggcgggaucug

SEQ ID NO: 172009 - RNA, 21 nt, Human
agaguagaagcccugggccug

SEQ ID NO: 172010 - RNA, 18 nt, Human
agcagaaggugauggagg

SEQ ID NO: 172011 - RNA, 19 nt, Human
aggaggggcgggaucuggg

SEQ ID NO: 172012 - RNA, 20 nt, Human
aggaggggcgggaucugggu

SEQ ID NO: 172013 - RNA, 19 nt, Human
aggcagagaagcaaaggcc

SEQ ID NO: 172014 - RNA, 21 nt, Human
aggcugcaguggggaggcaag

SEQ ID NO: 172015 - RNA, 23 nt, Human
aggcugcaguggggaggcaagug

SEQ ID NO: 172016 - RNA, 22 nt, Human
aggggacguaggcagagaagca

SEQ ID NO: 172017 - RNA, 21 nt, Human
aguagaagcccugggccugga

SEQ ID NO: 172018 - RNA, 18 nt, Human
augcaggggacacauucc

SEQ ID NO: 172019 - RNA, 18 nt, Human
auggagggccacgggggc

SEQ ID NO: 172020 - RNA, 22 nt, Human
caacggaacaggaguccuucaa

SEQ ID NO: 172021 - RNA, 19 nt, Human
caagcagccuccuaggagc

SEQ ID NO: 172022 - RNA, 25 nt, Human
cacaaacaaguagccacaaagacca

SEQ ID NO: 172023 - RNA, 18 nt, Human
cacaaguucuuggcuucu

SEQ ID NO: 172024 - RNA, 22 nt, Human
cacaauaccauccacaaacaag

SEQ ID NO: 172025 - RNA, 20 nt, Human
cacacacacacacacacaca

SEQ ID NO: 172026 - RNA, 20 nt, Human
cacacacacacacacacaca

SEQ ID NO: 172027 - RNA, 20 nt, Human
cacacacacacacacacaca

SEQ ID NO: 172028 - RNA, 22 nt, Human
cacacacacacacacacacaca

SEQ ID NO: 172029 - RNA, 26 nt, Human
cacacacacacacacacacacacaca

SEQ ID NO: 172030 - RNA, 29 nt, Human
cacacacacacacacacacacacaucacg

SEQ ID NO: 172031 - RNA, 22 nt, Human
cacacacacacacacaucacgg

SEQ ID NO: 172032 - RNA, 22 nt, Human
cacacacagucacacacacaca

SEQ ID NO: 172033 - RNA, 31 nt, Human
cacagucacacacacacacacacacacacag

SEQ ID NO: 172034 - RNA, 21 nt, Human
cacgauacagagaacagcaau

SEQ ID NO: 172035 - RNA, 18 nt, Human
cacugcccgugcucuuac

SEQ ID NO: 172036 - RNA, 25 nt, Human
cacugcccgugcucuuacccuacgc

SEQ ID NO: 172037 - RNA, 19 nt, Human
cagaagcagggaagguugg

SEQ ID NO: 172038 - RNA, 22 nt, Human
cagccgguccccuccgagacuc

SEQ ID NO: 172039 - RNA, 20 nt, Human
caggaccgcaggcugcagug

SEQ ID NO: 172040 - RNA, 22 nt, Human
caggaggacccgccgagucccg

SEQ ID NO: 172041 - RNA, 22 nt, Human
caggucccaagacgacugaaga

SEQ ID NO: 172042 - RNA, 20 nt, Human
cauccacaaacaaguagcca

SEQ ID NO: 172043 - RNA, 19 nt, Human
ccaagggcugcacggagcc

SEQ ID NO: 172044 - RNA, 23 nt, Human
ccacaaagaccacaguuagcaaa

SEQ ID NO: 172045 - RNA, 19 nt, Human
ccaccgacaggcagagcaa

SEQ ID NO: 172046 - RNA, 21 nt, Human
ccaccgacaggcagagcaaag

SEQ ID NO: 172047 - RNA, 22 nt, Human
ccagagacccaauugcagggac

SEQ ID NO: 172048 - RNA, 23 nt, Human
ccagagcccauggaguuauugcu

SEQ ID NO: 172049 - RNA, 21 nt, Human
ccagaggcuuccaccugaugg

SEQ ID NO: 172050 - RNA, 26 nt, Human
ccauccacaaacaaguagccacaaag

SEQ ID NO: 172051 - RNA, 18 nt, Human
cccuccgagacucccagg

SEQ ID NO: 172052 - RNA, 19 nt, Human
ccuaaaucaggggaggggg

SEQ ID NO: 172053 - RNA, 21 nt, Human
ccuccgagacucccaggagga

SEQ ID NO: 172054 - RNA, 30 nt, Human
ccuccuaggagcagaaggugauggagggcu

SEQ ID NO: 172055 - RNA, 23 nt, Human
ccucugcucucccuccauccauc

SEQ ID NO: 172056 - RNA, 23 nt, Human
ccugacgucaaacgcugggcuca

SEQ ID NO: 172057 - RNA, 20 nt, Human
ccugcugagucuccaaccca

SEQ ID NO: 172058 - RNA, 23 nt, Human
cgggaacacagaggacaggaggg

SEQ ID NO: 172059 - RNA, 19 nt, Human
cuaggaaacaaaggauauu

SEQ ID NO: 172060 - RNA, 21 nt, Human
cuauugccugccagagaccca

SEQ ID NO: 172061 - RNA, 18 nt, Human
cucccuccauccaucccg

SEQ ID NO: 172062 - RNA, 21 nt, Human
cugcaucuggaugagcugggc

SEQ ID NO: 172063 - RNA, 20 nt, Human
gaagguuggaagggguaggg

SEQ ID NO: 172064 - RNA, 19 nt, Human
gacacauuccccaggggca

SEQ ID NO: 172065 - RNA, 20 nt, Human
gacaggaggggcgggaucug

SEQ ID NO: 172066 - RNA, 22 nt, Human
gagaacagcaaugggucacagc

SEQ ID NO: 172067 - RNA, 27 nt, Human
gaguccuucaacuauugccugccagag

SEQ ID NO: 172068 - RNA, 18 nt, Human
gaugacaaagugcugcaa

SEQ ID NO: 172069 - RNA, 21 nt, Human
gcagagcaaaggaugcgggag

SEQ ID NO: 172070 - RNA, 26 nt, Human
gccacaaagaccacaguuagcaaaca

SEQ ID NO: 172071 - RNA, 21 nt, Human
gcccugggccuggaauccccg

SEQ ID NO: 172072 - RNA, 21 nt, Human
gccuggaauccccgggcgcuc

SEQ ID NO: 172073 - RNA, 20 nt, Human
ggaaacaaaggauauuuuau

SEQ ID NO: 172074 - RNA, 19 nt, Human
ggaacacagaggacaggag

SEQ ID NO: 172075 - RNA, 20 nt, Human
ggaggggcgggaucuggguu

SEQ ID NO: 172076 - RNA, 21 nt, Human
ggaguccuucaacuauugccu

SEQ ID NO: 172077 - RNA, 18 nt, Human
ggccauguggcucagccc

SEQ ID NO: 172078 - RNA, 19 nt, Human
ggcucaccagcuccuugcu

SEQ ID NO: 172079 - RNA, 25 nt, Human
gucacacacacacacacacacacag

SEQ ID NO: 172080 - RNA, 23 nt, Human
uacagagaacagcaaugggucac

SEQ ID NO: 172081 - RNA, 23 nt, Human
uaggagcagaaggugauggaggg

SEQ ID NO: 172082 - RNA, 19 nt, Human
uaugaccuucaaccucuca

SEQ ID NO: 172083 - RNA, 26 nt, Human
uauuccuuuuuucuguuguuguugag

SEQ ID NO: 172084 - RNA, 21 nt, Human
ucacacacacacacacacaca

SEQ ID NO: 172085 - RNA, 18 nt, Human
ucagguggaggaauggug

SEQ ID NO: 172086 - RNA, 24 nt, Human
uccacaaacaaguagccacaaaga

SEQ ID NO: 172087 - RNA, 26 nt, Human
uccacaaacaaguagccacaaagacc

SEQ ID NO: 172088 - RNA, 20 nt, Human
ucccaagacgacugaagacc

SEQ ID NO: 172089 - RNA, 25 nt, Human
ucccaagggcugcacggagccugcu

SEQ ID NO: 172090 - RNA, 24 nt, Human
ucccaggucccaagacgacugaag

SEQ ID NO: 172091 - RNA, 18 nt, Human
ucccuaaaucaggggagg

SEQ ID NO: 172092 - RNA, 18 nt, Human
uccuggggaaagggcugu

SEQ ID NO: 172093 - RNA, 20 nt, Human
ucuccaguugcuaagagacc

SEQ ID NO: 172094 - RNA, 19 nt, Human
ucucgggcaacaagcagcc

SEQ ID NO: 172095 - RNA, 26 nt, Human
ucugugaaggggcggggcagaugggg

SEQ ID NO: 172096 - RNA, 18 nt, Human
ugaaaggaguccaugaag

SEQ ID NO: 172097 - RNA, 25 nt, Human
ugaaaggaguccaugaagaaugaug

SEQ ID NO: 172098 - RNA, 21 nt, Human
ugaaggggcggggcagauggg

SEQ ID NO: 172099 - RNA, 18 nt, Human
ugcccgugcucuuacccu

SEQ ID NO: 172100 - RNA, 22 nt, Human
ugcccgugcucuuacccuacgg

SEQ ID NO: 172101 - RNA, 19 nt, Human
uggaagggguaggguccca

SEQ ID NO: 172102 - RNA, 28 nt, Human
uggaauccccgggcgcucuccccgaggg

SEQ ID NO: 172103 - RNA, 18 nt, Human
uggcucagccccugccug

SEQ ID NO: 172104 - RNA, 20 nt, Human
uggcuucuccuggggaaagg

SEQ ID NO: 172105 - RNA, 23 nt, Human
ugggaagaaauuaaccacggaag

SEQ ID NO: 172106 - RNA, 25 nt, Human
ugguguuagaggggauagggugggg

SEQ ID NO: 172107 - RNA, 19 nt, Human
uuagaggggauaggguggg

SEQ ID NO: 172108 - RNA, 20 nt, Human
uuagcaaacacacacaguca

SEQ ID NO: 172109 - RNA, 22 nt, Human
uucaaccucucacuguucccaa

SEQ ID NO: 172110 - RNA, 22 nt, Human
uucaacuauugccugccagaga

SEQ ID NO: 172111 - RNA, 22 nt, Human
uucuuggcuucuccuggggaaa

SEQ ID NO: 172112 - RNA, 22 nt, Human
caccgccuccacccgguccuca

SEQ ID NO: 172113 - RNA, 23 nt, Human
caggagcuggaggccugaggccc

SEQ ID NO: 172114 - RNA, 22 nt, Human
ccacccgguccucaggcucccg

SEQ ID NO: 172115 - RNA, 23 nt, Human
ccaccgccuccacccgguccuca

SEQ ID NO: 172116 - RNA, 18 nt, Human
ccccaccgccuccacccg

SEQ ID NO: 172117 - RNA, 23 nt, Human
ccccaccgccuccacccgguccu

SEQ ID NO: 172118 - RNA, 21 nt, Human
cugaggggccagggggacgga

SEQ ID NO: 172119 - RNA, 24 nt, Human
cuggggugcagacgggcucuuugg

SEQ ID NO: 172120 - RNA, 19 nt, Human
cugggucuggggugcagac

SEQ ID NO: 172121 - RNA, 19 nt, Human
gaugcugggggugcugggc

SEQ ID NO: 172122 - RNA, 18 nt, Human
gccuuggggugggugggg

SEQ ID NO: 172123 - RNA, 20 nt, Human
gcgaaggcgcgcugcagcag

SEQ ID NO: 172124 - RNA, 20 nt, Human
gcuccagccuuggggugggu

SEQ ID NO: 172125 - RNA, 18 nt, Human
gcugggggugcugggccg

SEQ ID NO: 172126 - RNA, 18 nt, Human
gggggccauacacgggga

SEQ ID NO: 172127 - RNA, 21 nt, Human
ggguccccaccgccuccaccc

SEQ ID NO: 172128 - RNA, 24 nt, Human
gugcagcggcuccagccuuggggu

SEQ ID NO: 172129 - RNA, 19 nt, Human
ucaagacauggacacugag

SEQ ID NO: 172130 - RNA, 19 nt, Human
uccagccuuggggugggug

SEQ ID NO: 172131 - RNA, 19 nt, Human
ucccaggagcuggaggccu

SEQ ID NO: 172132 - RNA, 19 nt, Human
ucggcagcggaguuuccuc

SEQ ID NO: 172133 - RNA, 23 nt, Human
uggacucccggaucccaggagcu

SEQ ID NO: 172134 - RNA, 23 nt, Human
uggaggccugaggcccugggucu

SEQ ID NO: 172135 - RNA, 18 nt, Human
ugggguggguggggcggc

SEQ ID NO: 172136 - RNA, 22 nt, Human
ugggguggguggggcggcucau

SEQ ID NO: 172137 - RNA, 21 nt, Human
uggguggggcggcucauuccg

SEQ ID NO: 172138 - RNA, 22 nt, Human
aaaagacuuugaaggaagagga

SEQ ID NO: 172139 - RNA, 19 nt, Human
aagcgggaagggagaaaag

SEQ ID NO: 172140 - RNA, 18 nt, Human
aaggaagagauauaaaga

SEQ ID NO: 172141 - RNA, 18 nt, Human
aaggcaccaagagaccag

SEQ ID NO: 172142 - RNA, 22 nt, Human
acaaagcagggagccugaagag

SEQ ID NO: 172143 - RNA, 23 nt, Human
acaaagcagggagccugaagagc

SEQ ID NO: 172144 - RNA, 19 nt, Human
acucaaaggcaaagggagg

SEQ ID NO: 172145 - RNA, 23 nt, Human
acuuugaaggaagaggaaaaaag

SEQ ID NO: 172146 - RNA, 23 nt, Human
agaaaagaugaggaggaaaagga

SEQ ID NO: 172147 - RNA, 20 nt, Human
agaaggaaaaagacuuugaa

SEQ ID NO: 172148 - RNA, 19 nt, Human
agaggaaaaaagcgggaag

SEQ ID NO: 172149 - RNA, 21 nt, Human
agcauaggaaggagagaagga

SEQ ID NO: 172150 - RNA, 26 nt, Human
aggaaaaagacuuugaaggaagagga

SEQ ID NO: 172151 - RNA, 23 nt, Human
aggaagagauauaaagacugagg

SEQ ID NO: 172152 - RNA, 24 nt, Human
aggaagagauauaaagacugaggg

SEQ ID NO: 172153 - RNA, 22 nt, Human
aggaaggagagaaggaaaaaga

SEQ ID NO: 172154 - RNA, 26 nt, Human
aggcaccaagagaccaggauggaacu

SEQ ID NO: 172155 - RNA, 18 nt, Human
agugcaaggucagaagga

SEQ ID NO: 172156 - RNA, 21 nt, Human
caaggucagaaggaaaggcac

SEQ ID NO: 172157 - RNA, 24 nt, Human
caggaacaguccuggggaagccag

SEQ ID NO: 172158 - RNA, 20 nt, Human
cauacucacccugugcagac

SEQ ID NO: 172159 - RNA, 20 nt, Human
cccugugcagacaguucccc

SEQ ID NO: 172160 - RNA, 20 nt, Human
ccuggggaagccagggcagc

SEQ ID NO: 172161 - RNA, 19 nt, Human
cgggaagggagaaaagaug

SEQ ID NO: 172162 - RNA, 21 nt, Human
gaaaggcaccaagagaccagu

SEQ ID NO: 172163 - RNA, 21 nt, Human
gaacaguccuggggaagccag

SEQ ID NO: 172164 - RNA, 21 nt, Human
gaagaggaaaaaagcgggaag

SEQ ID NO: 172165 - RNA, 18 nt, Human
gaaggaagaggaaaaaag

SEQ ID NO: 172166 - RNA, 24 nt, Human
gaaggaagaggaaaaaagcgggaa

SEQ ID NO: 172167 - RNA, 22 nt, Human
gacaaagcagggagccugaaga

SEQ ID NO: 172168 - RNA, 24 nt, Human
gacagagaggaaggucggguggga

SEQ ID NO: 172169 - RNA, 20 nt, Human
gacugaggggcaaacagcag

SEQ ID NO: 172170 - RNA, 18 nt, Human
gagaaaagaugaggagga

SEQ ID NO: 172171 - RNA, 22 nt, Human
gagggacacaagagggagcuag

SEQ ID NO: 172172 - RNA, 18 nt, Human
gaggggaggacagagagg

SEQ ID NO: 172173 - RNA, 19 nt, Human
gcaggaacaguccugggga

SEQ ID NO: 172174 - RNA, 18 nt, Human
gcaggugggaggggagga

SEQ ID NO: 172175 - RNA, 20 nt, Human
gccuggccccauacucaccc

SEQ ID NO: 172176 - RNA, 24 nt, Human
ggaagaggaaaaaagcgggaaggg

SEQ ID NO: 172177 - RNA, 21 nt, Human
ggacaaagcagggagccugaa

SEQ ID NO: 172178 - RNA, 23 nt, Human
ggacaaagcagggagccugaaga

SEQ ID NO: 172179 - RNA, 20 nt, Human
ggcaaacagcaggggaaaug

SEQ ID NO: 172180 - RNA, 25 nt, Human
ggcaaagggagggacacaagaggga

SEQ ID NO: 172181 - RNA, 22 nt, Human
gggagaacaaggucucugcagg

SEQ ID NO: 172182 - RNA, 19 nt, Human
gggagggacacaagaggga

SEQ ID NO: 172183 - RNA, 18 nt, Human
gggcaggugggaggggag

SEQ ID NO: 172184 - RNA, 18 nt, Human
uagggauaagggacucug

SEQ ID NO: 172185 - RNA, 19 nt, Human
ugaaggaagaggaaaaaag

SEQ ID NO: 172186 - RNA, 20 nt, Human
ugaaggaagaggaaaaaagc

SEQ ID NO: 172187 - RNA, 18 nt, Human
ugcaggagucagaugcag

SEQ ID NO: 172188 - RNA, 19 nt, Human
ugggaggggaggacagaga

SEQ ID NO: 172189 - RNA, 18 nt, Human
aaauguugaaaguguaca

SEQ ID NO: 172190 - RNA, 24 nt, Human
aacccauaucuucagucucuucca

SEQ ID NO: 172191 - RNA, 21 nt, Human
aagcaaacaucaacuccuuaa

SEQ ID NO: 172192 - RNA, 22 nt, Human
aaucucaguaaccacaucuuuc

SEQ ID NO: 172193 - RNA, 18 nt, Human
acacauuucuguaaaucc

SEQ ID NO: 172194 - RNA, 19 nt, Human
acacuagagaaugaaauga

SEQ ID NO: 172195 - RNA, 22 nt, Human
acagaauaaauguauaccaaau

SEQ ID NO: 172196 - RNA, 20 nt, Human
acaguuaaaaauccagcuuc

SEQ ID NO: 172197 - RNA, 24 nt, Human
accauaaaauguaaaauaguucag

SEQ ID NO: 172198 - RNA, 23 nt, Human
acccggguggcuagggcgcgccg

SEQ ID NO: 172199 - RNA, 19 nt, Human
acuaaggugggagaaggga

SEQ ID NO: 172200 - RNA, 20 nt, Human
agacacuagagaaugaaaug

SEQ ID NO: 172201 - RNA, 24 nt, Human
agacacuagagaaugaaaugagcu

SEQ ID NO: 172202 - RNA, 23 nt, Human
agagccccuaccucaagccagga

SEQ ID NO: 172203 - RNA, 23 nt, Human
agaugucaggauuggcacgaacu

SEQ ID NO: 172204 - RNA, 22 nt, Human
agccgccgccgccgcggaaacu

SEQ ID NO: 172205 - RNA, 21 nt, Human
agcgcagcccuagucgcaccc

SEQ ID NO: 172206 - RNA, 20 nt, Human
aggaaagaaagggaggggac

SEQ ID NO: 172207 - RNA, 24 nt, Human
aggaaguccaugacacugaaauau

SEQ ID NO: 172208 - RNA, 22 nt, Human
aggagggggagggggcaaaagg

SEQ ID NO: 172209 - RNA, 19 nt, Human
agggagaggcgcgcgagga

SEQ ID NO: 172210 - RNA, 24 nt, Human
agggaggggacagaaggaggggga

SEQ ID NO: 172211 - RNA, 18 nt, Human
aggggacagaaggagggg

SEQ ID NO: 172212 - RNA, 21 nt, Human
agggggagggggcaaaaggga

SEQ ID NO: 172213 - RNA, 18 nt, Human
agggggcaaaaggaggag

SEQ ID NO: 172214 - RNA, 21 nt, Human
agggggcaaaaggaggaggcg

SEQ ID NO: 172215 - RNA, 18 nt, Human
auaccaaauucaaagacc

SEQ ID NO: 172216 - RNA, 21 nt, Human
auaccaaauucaaagaccaau

SEQ ID NO: 172217 - RNA, 24 nt, Human
auagugaacagaauaaauguauac

SEQ ID NO: 172218 - RNA, 18 nt, Human
aucauaaaagcgaacagu

SEQ ID NO: 172219 - RNA, 20 nt, Human
augaaaugagcucaccccuc

SEQ ID NO: 172220 - RNA, 23 nt, Human
auuauuuucaggcacaaaaucca

SEQ ID NO: 172221 - RNA, 19 nt, Human
auuucuguaaauccaaaag

SEQ ID NO: 172222 - RNA, 23 nt, Human
caaagcuucaugcuucuucccaa

SEQ ID NO: 172223 - RNA, 18 nt, Human
caacccacacaaagcuuc

SEQ ID NO: 172224 - RNA, 21 nt, Human
cacccuguaaccaacuaaggu

SEQ ID NO: 172225 - RNA, 25 nt, Human
cagacauagauaaauuuagguccua

SEQ ID NO: 172226 - RNA, 19 nt, Human
cagccgccgccgccgcgga

SEQ ID NO: 172227 - RNA, 23 nt, Human
cagcgcagcccuagucgcacccc

SEQ ID NO: 172228 - RNA, 23 nt, Human
cagcgcagcccuagucgcacccc

SEQ ID NO: 172229 - RNA, 19 nt, Human
cagcgggcucggcuccccc

SEQ ID NO: 172230 - RNA, 24 nt, Human
cagcucaagcucuauuauuuucag

SEQ ID NO: 172231 - RNA, 18 nt, Human
caggauuggcacgaacuc

SEQ ID NO: 172232 - RNA, 18 nt, Human
caguaaccacaucuuucc

SEQ ID NO: 172233 - RNA, 24 nt, Human
caugacacugaaauauccuucaag

SEQ ID NO: 172234 - RNA, 19 nt, Human
ccacacccgugggccccca

SEQ ID NO: 172235 - RNA, 23 nt, Human
ccacacccgugggcccccaugaa

SEQ ID NO: 172236 - RNA, 24 nt, Human
ccacacccgugggcccccaugaag

SEQ ID NO: 172237 - RNA, 21 nt, Human
ccagcgggcucggcucccccc

SEQ ID NO: 172238 - RNA, 18 nt, Human
ccaggcauccguaugcaa

SEQ ID NO: 172239 - RNA, 21 nt, Human
cccagccgucccgagcacccg

SEQ ID NO: 172240 - RNA, 18 nt, Human
cccccugcggccagggag

SEQ ID NO: 172241 - RNA, 20 nt, Human
cccccugcggccagggagac

SEQ ID NO: 172242 - RNA, 18 nt, Human
ccccggccgaggccuggg

SEQ ID NO: 172243 - RNA, 22 nt, Human
ccccgucaauuauuccaccuuc

SEQ ID NO: 172244 - RNA, 24 nt, Human
ccccgucaauuauuccaccuucuu

SEQ ID NO: 172245 - RNA, 21 nt, Human
cccgugggcccccaugaaguu

SEQ ID NO: 172246 - RNA, 26 nt, Human
cccuggcagcgcagcccuagucgcac

SEQ ID NO: 172247 - RNA, 20 nt, Human
ccgccgccgccgccugacca

SEQ ID NO: 172248 - RNA, 18 nt, Human
ccgcuccgcuggggcugc

SEQ ID NO: 172249 - RNA, 20 nt, Human
ccgcuuucggcccgcucccc

SEQ ID NO: 172250 - RNA, 20 nt, Human
ccggggucgugucccgccuu

SEQ ID NO: 172251 - RNA, 18 nt, Human
ccuccgccuccuucuccg

SEQ ID NO: 172252 - RNA, 20 nt, Human
ccuucaaguuuucaauuucu

SEQ ID NO: 172253 - RNA, 21 nt, Human
cgcccacacccgugggccccc

SEQ ID NO: 172254 - RNA, 22 nt, Human
cgcccacacccgugggccccca

SEQ ID NO: 172255 - RNA, 21 nt, Human
cgccccggccgaggccugggc

SEQ ID NO: 172256 - RNA, 24 nt, Human
cggcggcggcucccccugcggcca

SEQ ID NO: 172257 - RNA, 19 nt, Human
cggcuccccccugcgccuc

SEQ ID NO: 172258 - RNA, 20 nt, Human
cggcuccccccugcgccucc

SEQ ID NO: 172259 - RNA, 18 nt, Human
cgggcggcggggagaacc

SEQ ID NO: 172260 - RNA, 19 nt, Human
cuccuguucugcguaccgc

SEQ ID NO: 172261 - RNA, 22 nt, Human
cucggcuccccccugcgccucc

SEQ ID NO: 172262 - RNA, 24 nt, Human
cugcgccccggccgaggccuggga

SEQ ID NO: 172263 - RNA, 23 nt, Human
cuuccaacccacacaaagcuuca

SEQ ID NO: 172264 - RNA, 21 nt, Human
gaaagggaggggacagaagga

SEQ ID NO: 172265 - RNA, 20 nt, Human
gaaggagggggagggggcaa

SEQ ID NO: 172266 - RNA, 20 nt, Human
gaccugcacacauuuucccu

SEQ ID NO: 172267 - RNA, 20 nt, Human
gaggggacagaaggaggggg

SEQ ID NO: 172268 - RNA, 18 nt, Human
gagggggcaaaaggagga

SEQ ID NO: 172269 - RNA, 24 nt, Human
gcacggccggcggcggcucccccu

SEQ ID NO: 172270 - RNA, 22 nt, Human
gcagcccagcgggcucggcucc

SEQ ID NO: 172271 - RNA, 22 nt, Human
gcggggagaacccggguggcua

SEQ ID NO: 172272 - RNA, 22 nt, Human
gcgguugcacaccaguuuuagc

SEQ ID NO: 172273 - RNA, 24 nt, Human
ggaggggacagaaggagggggagg

SEQ ID NO: 172274 - RNA, 22 nt, Human
ggcuauuuacaaucauaaaagc

SEQ ID NO: 172275 - RNA, 18 nt, Human
gggcaaaaggaggaggcg

SEQ ID NO: 172276 - RNA, 21 nt, Human
gggcaugggcugagccccggg

SEQ ID NO: 172277 - RNA, 23 nt, Human
ggggacagaaggagggggagggg

SEQ ID NO: 172278 - RNA, 19 nt, Human
ggggagggggcaaaaggag

SEQ ID NO: 172279 - RNA, 22 nt, Human
gguggcuagggcgcgccggggu

SEQ ID NO: 172280 - RNA, 22 nt, Human
uaaaguuuaaaacaauacaauc

SEQ ID NO: 172281 - RNA, 18 nt, Human
uaaccaacuaagguggga

SEQ ID NO: 172282 - RNA, 22 nt, Human
uaagagccccuaccucaagcca

SEQ ID NO: 172283 - RNA, 21 nt, Human
uaauguaugggggcccuccuc

SEQ ID NO: 172284 - RNA, 27 nt, Human
uaauuaaaaacuuuugaaaaagaaaaa

SEQ ID NO: 172285 - RNA, 19 nt, Human
uaccgcagccgccgccgcc

SEQ ID NO: 172286 - RNA, 22 nt, Human
uaguucagacagcucaagcucu

SEQ ID NO: 172287 - RNA, 18 nt, Human
ucaagccaggaaagaaag

SEQ ID NO: 172288 - RNA, 18 nt, Human
ucaauuucuguuuacguu

SEQ ID NO: 172289 - RNA, 19 nt, Human
ucacagagaacuaaaguga

SEQ ID NO: 172290 - RNA, 27 nt, Human
ucaccccucaaaaauuagacuucaaaa

SEQ ID NO: 172291 - RNA, 23 nt, Human
ucacccuguaaccaacuaaggug

SEQ ID NO: 172292 - RNA, 21 nt, Human
ucccggcuggcggcgccgcgc

SEQ ID NO: 172293 - RNA, 21 nt, Human
ucgcugcgccccggccgaggc

SEQ ID NO: 172294 - RNA, 25 nt, Human
ucucuuggcgccgcuccgcuggggc

SEQ ID NO: 172295 - RNA, 20 nt, Human
ucuucagucucuuccaaccc

SEQ ID NO: 172296 - RNA, 23 nt, Human
ucuucagucucuuccaacccaca

SEQ ID NO: 172297 - RNA, 20 nt, Human
ugagacaccauaaaauguaa

SEQ ID NO: 172298 - RNA, 24 nt, Human
ugauuaaaaauaagaaaauagcac

SEQ ID NO: 172299 - RNA, 20 nt, Human
ugcgauucaugaagcgcggg

SEQ ID NO: 172300 - RNA, 19 nt, Human
uggaggaaaguucuggaca

SEQ ID NO: 172301 - RNA, 18 nt, Human
uggcagucgggcccucgu

SEQ ID NO: 172302 - RNA, 18 nt, Human
uggcauugguuaucucac

SEQ ID NO: 172303 - RNA, 21 nt, Human
uggccaaacccauaccagguu

SEQ ID NO: 172304 - RNA, 21 nt, Human
uggcccucggcucgcuggcuc

SEQ ID NO: 172305 - RNA, 24 nt, Human
ugggauuggcuaugagacaccaua

SEQ ID NO: 172306 - RNA, 22 nt, Human
uguccuuuugccucagggacgg

SEQ ID NO: 172307 - RNA, 19 nt, Human
uguggaguucuguaccuua

SEQ ID NO: 172308 - RNA, 21 nt, Human
uucaggcacaaaauccauaua

SEQ ID NO: 172309 - RNA, 23 nt, Human
uuuucaauuucuguuuacguuuu

SEQ ID NO: 172310 - RNA, 21 nt, Human
aaaaaaaaaaaaagaagaaga

SEQ ID NO: 172311 - RNA, 22 nt, Human
aaaaaaaaaaaaagaagaagaa

SEQ ID NO: 172312 - RNA, 21 nt, Human
aaaaaaaaaagaagaagaaga

SEQ ID NO: 172313 - RNA, 19 nt, Human
aaaaaaaagaagaagaaga

SEQ ID NO: 172314 - RNA, 18 nt, Human
aaaaaagaagaagaagaa

SEQ ID NO: 172315 - RNA, 25 nt, Human
aaaaagccacaaaauguagcacuga

SEQ ID NO: 172316 - RNA, 22 nt, Human
aaaacccuuuaaguacauuuuu

SEQ ID NO: 172317 - RNA, 21 nt, Human
aaacacaaccaagaaaagcac

SEQ ID NO: 172318 - RNA, 23 nt, Human
aaacacaaccaagaaaagcacca

SEQ ID NO: 172319 - RNA, 19 nt, Human
aaaccaaaacaaaacaaaa

SEQ ID NO: 172320 - RNA, 20 nt, Human
aaaccaaaacaaaacaaaaa

SEQ ID NO: 172321 - RNA, 31 nt, Human
aaagaaaaacacaaccaagaaaagcaccacu

SEQ ID NO: 172322 - RNA, 22 nt, Human
aaccaaaacaaaacaaaacccu

SEQ ID NO: 172323 - RNA, 20 nt, Human
aaccaagaaaagcaccacau

SEQ ID NO: 172324 - RNA, 21 nt, Human
aaccuagugcuuccugaucug

SEQ ID NO: 172325 - RNA, 24 nt, Human
aagaaagaaaaacacaaccaagaa

SEQ ID NO: 172326 - RNA, 26 nt, Human
aagaaagaaaaacacaaccaagaaaa

SEQ ID NO: 172327 - RNA, 21 nt, Human
aagaagaagaagaaagaaaaa

SEQ ID NO: 172328 - RNA, 21 nt, Human
aagcaacuccaaauccacugg

SEQ ID NO: 172329 - RNA, 21 nt, Human
aaggguuucugagggcugggc

SEQ ID NO: 172330 - RNA, 21 nt, Human
aaugauccuucucccucuucc

SEQ ID NO: 172331 - RNA, 19 nt, Human
accaaaacaaaacaaaacc

SEQ ID NO: 172332 - RNA, 26 nt, Human
agaagaaagaaaaacacaaccaagaa

SEQ ID NO: 172333 - RNA, 20 nt, Human
agcagcaaaguuugcaaaca

SEQ ID NO: 172334 - RNA, 22 nt, Human
agcucgcggcgcccccacagcc

SEQ ID NO: 172335 - RNA, 19 nt, Human
aggagcuucccuucgcugg

SEQ ID NO: 172336 - RNA, 24 nt, Human
aggccggagucuauuuuaagcaac

SEQ ID NO: 172337 - RNA, 18 nt, Human
agguggcgcgucuggagc

SEQ ID NO: 172338 - RNA, 22 nt, Human
aguggagcaugaaaaauaucau

SEQ ID NO: 172339 - RNA, 21 nt, Human
auaaaaaaaaaaaaagaagaa

SEQ ID NO: 172340 - RNA, 18 nt, Human
auccacuggggugugagg

SEQ ID NO: 172341 - RNA, 22 nt, Human
auuaguuacacaagaggcuacu

SEQ ID NO: 172342 - RNA, 22 nt, Human
caaaacaaaacaaaacccuuua

SEQ ID NO: 172343 - RNA, 23 nt, Human
caaaacaaaacaaaacccuuuaa

SEQ ID NO: 172344 - RNA, 22 nt, Human
caaaacaaaacccuuuaaguac

SEQ ID NO: 172345 - RNA, 19 nt, Human
caacucacggccgcggcaa

SEQ ID NO: 172346 - RNA, 22 nt, Human
caagaaaagcaccacaucuuag

SEQ ID NO: 172347 - RNA, 21 nt, Human
cacagcauccugaauuucagg

SEQ ID NO: 172348 - RNA, 22 nt, Human
caccccugcucgggcccccgcc

SEQ ID NO: 172349 - RNA, 18 nt, Human
caccgaggccggcccagc

SEQ ID NO: 172350 - RNA, 18 nt, Human
cagcgcccccggcucggc

SEQ ID NO: 172351 - RNA, 23 nt, Human
cagcgcccccggcucggcucucc

SEQ ID NO: 172352 - RNA, 19 nt, Human
ccacuggggugugaggcgg

SEQ ID NO: 172353 - RNA, 24 nt, Human
cccacagcccgggcggcuccuccc

SEQ ID NO: 172354 - RNA, 21 nt, Human
ccccacagcccgggcggcucc

SEQ ID NO: 172355 - RNA, 23 nt, Human
ccccggagcucccggcgcagcgg

SEQ ID NO: 172356 - RNA, 24 nt, Human
ccccuccuuuccacaaaucagucc

SEQ ID NO: 172357 - RNA, 24 nt, Human
cccucagcgccgccgcucccgggc

SEQ ID NO: 172358 - RNA, 18 nt, Human
cccucuuccccccuccuu

SEQ ID NO: 172359 - RNA, 19 nt, Human
cccugcgccggccucggcc

SEQ ID NO: 172360 - RNA, 22 nt, Human
cccugcgccggccucggccggg

SEQ ID NO: 172361 - RNA, 22 nt, Human
ccgcgccccucagcgccgccgc

SEQ ID NO: 172362 - RNA, 24 nt, Human
ccgcggcaaacuucggccucuucu

SEQ ID NO: 172363 - RNA, 21 nt, Human
ccgcggcggagagcagcaaag

SEQ ID NO: 172364 - RNA, 19 nt, Human
ccugggggugggcccuggg

SEQ ID NO: 172365 - RNA, 22 nt, Human
ccugugcccuucccuccagccc

SEQ ID NO: 172366 - RNA, 19 nt, Human
cgaggccggcccagcucgc

SEQ ID NO: 172367 - RNA, 26 nt, Human
cgccccugugcccuucccuccagccc

SEQ ID NO: 172368 - RNA, 23 nt, Human
cgccggccucggccgggaccagc

SEQ ID NO: 172369 - RNA, 18 nt, Human
cgcggcgcccccacagcc

SEQ ID NO: 172370 - RNA, 24 nt, Human
cgggccccggguccugucuuuccu

SEQ ID NO: 172371 - RNA, 26 nt, Human
cuccgcgccccucagcgccgccgcuc

SEQ ID NO: 172372 - RNA, 22 nt, Human
cugaaggguuucugagggcugg

SEQ ID NO: 172373 - RNA, 19 nt, Human
cuggccccggcucuccacc

SEQ ID NO: 172374 - RNA, 24 nt, Human
cuuuaccacaaauuaguuacacaa

SEQ ID NO: 172375 - RNA, 26 nt, Human
gaaaaacacaaccaagaaaagcacca

SEQ ID NO: 172376 - RNA, 22 nt, Human
gaagaaagaaaaacacaaccaa

SEQ ID NO: 172377 - RNA, 24 nt, Human
gaagaagaagaaagaaaaacacaa

SEQ ID NO: 172378 - RNA, 18 nt, Human
gaggcgggccccgggucc

SEQ ID NO: 172379 - RNA, 22 nt, Human
gcccagcacuguggccuuccug

SEQ ID NO: 172380 - RNA, 22 nt, Human
gcccggcguccgccgaguuggg

SEQ ID NO: 172381 - RNA, 21 nt, Human
gcggcgcgggcacaccgaggc

SEQ ID NO: 172382 - RNA, 18 nt, Human
ggaggagcuucccuucgc

SEQ ID NO: 172383 - RNA, 22 nt, Human
ggcacgggcugcugcuggcccc

SEQ ID NO: 172384 - RNA, 23 nt, Human
ggcgcgucuggagcgggcuggcg

SEQ ID NO: 172385 - RNA, 21 nt, Human
ggcugggccucuuaguucuuu

SEQ ID NO: 172386 - RNA, 22 nt, Human
ggcuugguuuccauuaaaaagc

SEQ ID NO: 172387 - RNA, 18 nt, Human
gggauggcucauuuguua

SEQ ID NO: 172388 - RNA, 20 nt, Human
gggcugcugcuggccccggc

SEQ ID NO: 172389 - RNA, 20 nt, Human
ggugggcccuggggauggcu

SEQ ID NO: 172390 - RNA, 19 nt, Human
gugaagagaauacacuaga

SEQ ID NO: 172391 - RNA, 21 nt, Human
guuuguggaaaucauuuguuu

SEQ ID NO: 172392 - RNA, 23 nt, Human
uaaaaaaaaaaaaagaagaagaa

SEQ ID NO: 172393 - RNA, 22 nt, Human
uagcacugaaggguuucugagg

SEQ ID NO: 172394 - RNA, 21 nt, Human
uagcagcaaacuaaagaacau

SEQ ID NO: 172395 - RNA, 28 nt, Human
uauaaaaaaaaaaaaagaagaagaagaa

SEQ ID NO: 172396 - RNA, 22 nt, Human
ucaaggaaagagaaaaaaaugu

SEQ ID NO: 172397 - RNA, 20 nt, Human
ucacuggaggagcuucccuu

SEQ ID NO: 172398 - RNA, 21 nt, Human
ucaguccaaacgucuauaaca

SEQ ID NO: 172399 - RNA, 20 nt, Human
uccacaaaucaguccaaacg

SEQ ID NO: 172400 - RNA, 27 nt, Human
uccacuggggugugaggcgggccccgg

SEQ ID NO: 172401 - RNA, 21 nt, Human
ucccucuuccccccuccuuuc

SEQ ID NO: 172402 - RNA, 22 nt, Human
ucccucuuccccccuccuuucc

SEQ ID NO: 172403 - RNA, 21 nt, Human
uccugaauuucaggguaaaca

SEQ ID NO: 172404 - RNA, 19 nt, Human
uccuggcacugugaagaga

SEQ ID NO: 172405 - RNA, 20 nt, Human
ucgcggcgcccccacagccc

SEQ ID NO: 172406 - RNA, 29 nt, Human
ucucuuuugcuuuuauaaaaaaaaaaaaa

SEQ ID NO: 172407 - RNA, 20 nt, Human
ugaaugauccuucucccucu

SEQ ID NO: 172408 - RNA, 19 nt, Human
ugaauuucaggguaaacac

SEQ ID NO: 172409 - RNA, 23 nt, Human
ugaggcgggccccggguccuguc

SEQ ID NO: 172410 - RNA, 23 nt, Human
ugauccuucucccucuucccccc

SEQ ID NO: 172411 - RNA, 21 nt, Human
ugcaaacaauaccgggaagcg

SEQ ID NO: 172412 - RNA, 22 nt, Human
uggaaaaccaaaacaaaacaaa

SEQ ID NO: 172413 - RNA, 21 nt, Human
uggccccggcucuccaccccu

SEQ ID NO: 172414 - RNA, 21 nt, Human
uggcccgagcgcugcgcacag

SEQ ID NO: 172415 - RNA, 19 nt, Human
uggcucauuuguuaaccca

SEQ ID NO: 172416 - RNA, 18 nt, Human
ugggggugggcccugggg

SEQ ID NO: 172417 - RNA, 20 nt, Human
uggguagcaaagccaacuca

SEQ ID NO: 172418 - RNA, 25 nt, Human
uggguagcaaagccaacucaaauac

SEQ ID NO: 172419 - RNA, 23 nt, Human
uuaaaaagccacaaaauguagca

SEQ ID NO: 172420 - RNA, 18 nt, Human
uuccugggggugggcccu

SEQ ID NO: 172421 - RNA, 22 nt, Human
uucugagggcugggccucuuag

SEQ ID NO: 172422 - RNA, 22 nt, Human
uugaauuugcaaagcaguuauc

SEQ ID NO: 172423 - RNA, 20 nt, Human
uugaguucacaaaugugagg

SEQ ID NO: 172424 - RNA, 22 nt, Human
uuugaaugauccuucucccucu

SEQ ID NO: 172425 - RNA, 23 nt, Human
aaaaagcaaccuaaaagugaaau

SEQ ID NO: 172426 - RNA, 20 nt, Human
aaccuaaaagugaaaugguu

SEQ ID NO: 172427 - RNA, 24 nt, Human
aagcaaccuaaaagugaaaugguu

SEQ ID NO: 172428 - RNA, 25 nt, Human
aagcaaccuaaaagugaaaugguuu

SEQ ID NO: 172429 - RNA, 18 nt, Human
acccggagacugcgcuuc

SEQ ID NO: 172430 - RNA, 23 nt, Human
ccccccccgcccccgcccccaac

SEQ ID NO: 172431 - RNA, 24 nt, Human
cccccccgcccccgcccccaaccc

SEQ ID NO: 172432 - RNA, 21 nt, Human
ccccccgcccccgcccccaac

SEQ ID NO: 172433 - RNA, 22 nt, Human
cccccgcccccgcccccaaccc

SEQ ID NO: 172434 - RNA, 20 nt, Human
ccccgccgccuccucgcugc

SEQ ID NO: 172435 - RNA, 25 nt, Human
ccccgccgccuccucgcugcggcug

SEQ ID NO: 172436 - RNA, 18 nt, Human
ccgcccccgcccccaacc

SEQ ID NO: 172437 - RNA, 21 nt, Human
ccgccgccuccucgcugcggc

SEQ ID NO: 172438 - RNA, 21 nt, Human
ccggcuccuuggcgccccccc

SEQ ID NO: 172439 - RNA, 18 nt, Human
ccuuggcgccccccccgc

SEQ ID NO: 172440 - RNA, 25 nt, Human
cgccccccccgcccccgcccccaac

SEQ ID NO: 172441 - RNA, 18 nt, Human
cggcuccuuggcgccccc

SEQ ID NO: 172442 - RNA, 21 nt, Human
cggcugccgccucccgcgccu

SEQ ID NO: 172443 - RNA, 18 nt, Human
cuccucgcugcggcugcc

SEQ ID NO: 172444 - RNA, 26 nt, Human
cugcggcugccgccucccgcgccucu

SEQ ID NO: 172445 - RNA, 19 nt, Human
gcccccaacccggagacug

SEQ ID NO: 172446 - RNA, 22 nt, Human
gcccccaacccggagacugcgc

SEQ ID NO: 172447 - RNA, 22 nt, Human
ggcgccccccccgcccccgccc

SEQ ID NO: 172448 - RNA, 21 nt, Human
ggcugccgccucccgcgccuc

SEQ ID NO: 172449 - RNA, 19 nt, Human
ucgcugcggcugccgccuc

SEQ ID NO: 172450 - RNA, 20 nt, Human
ucgcugcggcugccgccucc

SEQ ID NO: 172451 - RNA, 22 nt, Human
ucgcugcggcugccgccucccg

SEQ ID NO: 172452 - RNA, 23 nt, Human
ucgcugcggcugccgccucccgc

SEQ ID NO: 172453 - RNA, 23 nt, Human
ucuuccccgccgccuccucgcug

SEQ ID NO: 172454 - RNA, 21 nt, Human
aaaacacaguucuuuuuucac

SEQ ID NO: 172455 - RNA, 23 nt, Human
aaacaagaaugauccagaaucug

SEQ ID NO: 172456 - RNA, 24 nt, Human
aaacaagaaugauccagaaucuga

SEQ ID NO: 172457 - RNA, 19 nt, Human
aaacagcacaagauuucca

SEQ ID NO: 172458 - RNA, 23 nt, Human
aaaggcaaagaauaaaaucugcu

SEQ ID NO: 172459 - RNA, 19 nt, Human
aacaagaaugauccagaau

SEQ ID NO: 172460 - RNA, 18 nt, Human
aacagcacaauuauaggg

SEQ ID NO: 172461 - RNA, 21 nt, Human
aagagaaccuuucauagacua

SEQ ID NO: 172462 - RNA, 22 nt, Human
aagcauguuccagcauuuuucu

SEQ ID NO: 172463 - RNA, 20 nt, Human
aauuaucucuucauaaccua

SEQ ID NO: 172464 - RNA, 23 nt, Human
acaaaaguuauaaaaacagcaca

SEQ ID NO: 172465 - RNA, 21 nt, Human
acaagauuuccaccuuagaca

SEQ ID NO: 172466 - RNA, 22 nt, Human
acacaaucuguacuugacugaa

SEQ ID NO: 172467 - RNA, 21 nt, Human
acagcacaauuauaggggaaa

SEQ ID NO: 172468 - RNA, 19 nt, Human
accacauucccaaaccaca

SEQ ID NO: 172469 - RNA, 22 nt, Human
agaaaugcuauccucagacccc

SEQ ID NO: 172470 - RNA, 25 nt, Human
agagaaccuuucauagacuaaucaa

SEQ ID NO: 172471 - RNA, 21 nt, Human
agcauguuccagcauuuuucu

SEQ ID NO: 172472 - RNA, 24 nt, Human
agcuaccagaauguuaucucacaa

SEQ ID NO: 172473 - RNA, 18 nt, Human
aguggaaauaaaacuaca

SEQ ID NO: 172474 - RNA, 25 nt, Human
aguuauaaaaacacagccagaaaaa

SEQ ID NO: 172475 - RNA, 19 nt, Human
aucaucuugucucuucuuu

SEQ ID NO: 172476 - RNA, 19 nt, Human
caagugauucuuaucugca

SEQ ID NO: 172477 - RNA, 19 nt, Human
cagacaaauaauuaucucu

SEQ ID NO: 172478 - RNA, 18 nt, Human
caggguugaggacccuug

SEQ ID NO: 172479 - RNA, 25 nt, Human
caucuugucucuucuuuucauuuua

SEQ ID NO: 172480 - RNA, 22 nt, Human
caugccuccacaaagcaaauuu

SEQ ID NO: 172481 - RNA, 24 nt, Human
caugccuccacaaagcaaauuuug

SEQ ID NO: 172482 - RNA, 20 nt, Human
cccaagugauucuuaucugc

SEQ ID NO: 172483 - RNA, 21 nt, Human
ccuacaguuuaaaaacacagu

SEQ ID NO: 172484 - RNA, 23 nt, Human
ccucagaccccggcgccuggcuc

SEQ ID NO: 172485 - RNA, 19 nt, Human
ccuggcuccaagggguggg

SEQ ID NO: 172486 - RNA, 23 nt, Human
ccuggcuccaagggguggggggg

SEQ ID NO: 172487 - RNA, 24 nt, Human
cgccuggcuccaaggggugggggg

SEQ ID NO: 172488 - RNA, 22 nt, Human
cggccgcgcgucccucagguac

SEQ ID NO: 172489 - RNA, 18 nt, Human
cucacuguagaaaaauac

SEQ ID NO: 172490 - RNA, 21 nt, Human
cucagaccccggcgccuggcc

SEQ ID NO: 172491 - RNA, 23 nt, Human
cuccauaagucaggucuugagaa

SEQ ID NO: 172492 - RNA, 22 nt, Human
cuuacuguuaaauucuucaaaa

SEQ ID NO: 172493 - RNA, 25 nt, Human
cuugucucuucuuuucaaggacggc

SEQ ID NO: 172494 - RNA, 21 nt, Human
gcugcaccgccugccgcgggc

SEQ ID NO: 172495 - RNA, 19 nt, Human
ggccaacauaucaaguuga

SEQ ID NO: 172496 - RNA, 19 nt, Human
gggggggcugcaccgccug

SEQ ID NO: 172497 - RNA, 21 nt, Human
guuccagcauuuuucuuucuc

SEQ ID NO: 172498 - RNA, 21 nt, Human
guuuguuagcuuggucucaca

SEQ ID NO: 172499 - RNA, 18 nt, Human
uaaaaacacagccagaaa

SEQ ID NO: 172500 - RNA, 21 nt, Human
uaaaacuacaaaguccuacug

SEQ ID NO: 172501 - RNA, 24 nt, Human
uaagagaaccuuucauagacuaau

SEQ ID NO: 172502 - RNA, 23 nt, Human
uaaguuauaaaaacacagccaga

SEQ ID NO: 172503 - RNA, 24 nt, Human
uaauucugaaauuguuuuauuaac

SEQ ID NO: 172504 - RNA, 18 nt, Human
uacaacaaugaauacaga

SEQ ID NO: 172505 - RNA, 22 nt, Human
uacaacaaugaauacagagaaa

SEQ ID NO: 172506 - RNA, 28 nt, Human
uacuaagacuaaucaugcuucauuuagc

SEQ ID NO: 172507 - RNA, 19 nt, Human
uacucaaaucaaucaccac

SEQ ID NO: 172508 - RNA, 21 nt, Human
uagccuacuggcuauugggca

SEQ ID NO: 172509 - RNA, 18 nt, Human
uagcuacaacaauuuuca

SEQ ID NO: 172510 - RNA, 18 nt, Human
uaggagaagagcuauuuc

SEQ ID NO: 172511 - RNA, 23 nt, Human
uaggcaucugaaguaacccaagu

SEQ ID NO: 172512 - RNA, 20 nt, Human
uauaguauaugaaaguucac

SEQ ID NO: 172513 - RNA, 23 nt, Human
uccacugcuaauccaaacccuga

SEQ ID NO: 172514 - RNA, 19 nt, Human
uccagaaucugaaaauaag

SEQ ID NO: 172515 - RNA, 20 nt, Human
ugaaagcauguuaacuguga

SEQ ID NO: 172516 - RNA, 23 nt, Human
ugaugcaauauaaaaaagcaauc

SEQ ID NO: 172517 - RNA, 18 nt, Human
ugccuugauguuccaagu

SEQ ID NO: 172518 - RNA, 23 nt, Human
ugcuaauccaaacccugaauauc

SEQ ID NO: 172519 - RNA, 24 nt, Human
uggaaauaaaacuacaaaguccua

SEQ ID NO: 172520 - RNA, 24 nt, Human
uggcaagaucacaucucacuguag

SEQ ID NO: 172521 - RNA, 18 nt, Human
uuacaaaaguuauaaaaa

SEQ ID NO: 172522 - RNA, 25 nt, Human
uucuuaucugcagucaggguugagg

SEQ ID NO: 172523 - RNA, 21 nt, Human
uuuaauucugaaauuguuuua

SEQ ID NO: 172524 - RNA, 21 nt, Human
uuuccaccuuagacaagacaa

SEQ ID NO: 172525 - RNA, 20 nt, Human
uuuuuuuuuuuuaagaaagc

SEQ ID NO: 172526 - RNA, 19 nt, Human
uuuuuuuuuuuuuuuuuaa

SEQ ID NO: 172527 - RNA, 21 nt, Human
agcagcggcagcggcuggggc

SEQ ID NO: 172528 - RNA, 22 nt, Human
agccagcagccagcgcugcgca

SEQ ID NO: 172529 - RNA, 21 nt, Human
agccggcgccggccgcguccg

SEQ ID NO: 172530 - RNA, 21 nt, Human
ccacaagccggcgccggccgc

SEQ ID NO: 172531 - RNA, 20 nt, Human
cccacaagccggcgccggcc

SEQ ID NO: 172532 - RNA, 21 nt, Human
cccgggccgaggccgagggac

SEQ ID NO: 172533 - RNA, 19 nt, Human
ccggcgccggccgcguccg

SEQ ID NO: 172534 - RNA, 21 nt, Human
ccggcgccggccgcguccguu

SEQ ID NO: 172535 - RNA, 20 nt, Human
cgaggccagccagcagccag

SEQ ID NO: 172536 - RNA, 24 nt, Human
cgucccgggccgaggccgagggac

SEQ ID NO: 172537 - RNA, 20 nt, Human
gaggccagccagcagccagc

SEQ ID NO: 172538 - RNA, 21 nt, Human
gaugcggcgacgagggggcag

SEQ ID NO: 172539 - RNA, 19 nt, Human
gcagcggcuggggcugcuc

SEQ ID NO: 172540 - RNA, 23 nt, Human
gcgagcccacaagccggcgccgg

SEQ ID NO: 172541 - RNA, 18 nt, Human
gcggcgacgagggggcag

SEQ ID NO: 172542 - RNA, 22 nt, Human
ggccgaggccgagggacaggcu

SEQ ID NO: 172543 - RNA, 21 nt, Human
ggcgccggcugcccgcgcugc

SEQ ID NO: 172544 - RNA, 26 nt, Human
gggccgaggccgagggacaggcugcg

SEQ ID NO: 172545 - RNA, 23 nt, Human
guagcagcggcagcggcuggggc

SEQ ID NO: 172546 - RNA, 18 nt, Human
ucuccagcagcugcgcgc

SEQ ID NO: 172547 - RNA, 19 nt, Human
ugcggcgacgagggggcag

SEQ ID NO: 172548 - RNA, 19 nt, Human
uugcacgggggcgccggcu

SEQ ID NO: 172549 - RNA, 20 nt, Human
aaaacgccccccuccccuca

SEQ ID NO: 172550 - RNA, 19 nt, Human
aaacaaaacgccccccucc

SEQ ID NO: 172551 - RNA, 26 nt, Human
aaacaaaacgccccccuccccucagc

SEQ ID NO: 172552 - RNA, 20 nt, Human
aaacgccccccuccccucag

SEQ ID NO: 172553 - RNA, 23 nt, Human
aaccuguugguugcuuuuuccuu

SEQ ID NO: 172554 - RNA, 19 nt, Human
aagaaacgcaaaauagaau

SEQ ID NO: 172555 - RNA, 24 nt, Human
accaugaagguaaacggaagugac

SEQ ID NO: 172556 - RNA, 26 nt, Human
auagaauacacgugagcugggccccc

SEQ ID NO: 172557 - RNA, 24 nt, Human
caaacaaaacgccccccuccccuc

SEQ ID NO: 172558 - RNA, 25 nt, Human
caaacaaaacgccccccuccccuca

SEQ ID NO: 172559 - RNA, 25 nt, Human
caacagcaccaugaagguaaacgga

SEQ ID NO: 172560 - RNA, 23 nt, Human
cagcccgcgagggacgcacacag

SEQ ID NO: 172561 - RNA, 19 nt, Human
ccaaacaaaacgccccccu

SEQ ID NO: 172562 - RNA, 26 nt, Human
ccaaagauaaacugcuucgggaaggc

SEQ ID NO: 172563 - RNA, 21 nt, Human
ccccucccuccccucgccucc

SEQ ID NO: 172564 - RNA, 21 nt, Human
ccccucgccuccagcagcccg

SEQ ID NO: 172565 - RNA, 18 nt, Human
ccccucuucccucucucc

SEQ ID NO: 172566 - RNA, 23 nt, Human
cccgccgagaagagcagacaguc

SEQ ID NO: 172567 - RNA, 22 nt, Human
ccgggccggggcuucucccucc

SEQ ID NO: 172568 - RNA, 18 nt, Human
ccuccgcuggcagcgcuc

SEQ ID NO: 172569 - RNA, 24 nt, Human
cgcccccucccuccccucgccucc

SEQ ID NO: 172570 - RNA, 23 nt, Human
cgccccucuucccucucuccaag

SEQ ID NO: 172571 - RNA, 23 nt, Human
cgcugccuccgcuggcagcgcuc

SEQ ID NO: 172572 - RNA, 21 nt, Human
cgcuggcagcgcuccgcuccu

SEQ ID NO: 172573 - RNA, 20 nt, Human
cgugagcugggccccuugga

SEQ ID NO: 172574 - RNA, 21 nt, Human
cuccucgccggauagggcugg

SEQ ID NO: 172575 - RNA, 24 nt, Human
cucgaaaacgccccucuucccucu

SEQ ID NO: 172576 - RNA, 22 nt, Human
cugccuccgcuggcagcgcucc

SEQ ID NO: 172577 - RNA, 22 nt, Human
gaauccgggccggggcuucucc

SEQ ID NO: 172578 - RNA, 22 nt, Human
gagaagaccugggacagguucu

SEQ ID NO: 172579 - RNA, 23 nt, Human
gaggaauccgggccggggcuucu

SEQ ID NO: 172580 - RNA, 18 nt, Human
gagucccucggcggcagc

SEQ ID NO: 172581 - RNA, 31 nt, Human
gcaaaauagaauacacgugagcugggccccu

SEQ ID NO: 172582 - RNA, 18 nt, Human
ggaaaggacucuccacgg

SEQ ID NO: 172583 - RNA, 22 nt, Human
ggagagacgguuagggcucgga

SEQ ID NO: 172584 - RNA, 25 nt, Human
uccagggaaaggacucuccacggau

SEQ ID NO: 172585 - RNA, 24 nt, Human
ucccuccccucgccuccagcagcc

SEQ ID NO: 172586 - RNA, 20 nt, Human
uggcagcgcuccgcuccucg

SEQ ID NO: 172587 - RNA, 25 nt, Human
aacccaccguuccccccagggaccu

SEQ ID NO: 172588 - RNA, 18 nt, Human
aagugcuaaaauaucaca

SEQ ID NO: 172589 - RNA, 19 nt, Human
aauauacaaaagacuaaca

SEQ ID NO: 172590 - RNA, 22 nt, Human
agggaccugagacggcuccggg

SEQ ID NO: 172591 - RNA, 18 nt, Human
augauaaaaauacuugaa

SEQ ID NO: 172592 - RNA, 23 nt, Human
caaaagaagaacguaacagugau

SEQ ID NO: 172593 - RNA, 28 nt, Human
caaagugcuaaaauaucacaauagcaug

SEQ ID NO: 172594 - RNA, 19 nt, Human
cacuuggccuaauauacaa

SEQ ID NO: 172595 - RNA, 18 nt, Human
cagaagauccccauccaa

SEQ ID NO: 172596 - RNA, 26 nt, Human
cagggaccugagacggcuccgggguu

SEQ ID NO: 172597 - RNA, 18 nt, Human
caguguaaaagcuaccaa

SEQ ID NO: 172598 - RNA, 23 nt, Human
cccccagggaccugagacggcuc

SEQ ID NO: 172599 - RNA, 19 nt, Human
ccuaaaacgagacuauaaa

SEQ ID NO: 172600 - RNA, 20 nt, Human
cuaacucuguccucccacac

SEQ ID NO: 172601 - RNA, 18 nt, Human
cugagacggcuccggggu

SEQ ID NO: 172602 - RNA, 21 nt, Human
ggaccugagacggcuccgggg

SEQ ID NO: 172603 - RNA, 18 nt, Human
ggccgcugucccuucccg

SEQ ID NO: 172604 - RNA, 24 nt, Human
ggucaugaaacauuaaaaaaggga

SEQ ID NO: 172605 - RNA, 22 nt, Human
gucuaacccaccguucccccca

SEQ ID NO: 172606 - RNA, 19 nt, Human
uaaaauguucaaauuccuc

SEQ ID NO: 172607 - RNA, 23 nt, Human
uaauauacaaaagacuaacauuu

SEQ ID NO: 172608 - RNA, 21 nt, Human
uauauuguugucauuaaccuu

SEQ ID NO: 172609 - RNA, 22 nt, Human
uauauuguugucauuaaccuuu

SEQ ID NO: 172610 - RNA, 21 nt, Human
ugaaucacucuuugcauccuc

SEQ ID NO: 172611 - RNA, 22 nt, Human
ugcaaaagaagaacguaacagu

SEQ ID NO: 172612 - RNA, 20 nt, Human
ugcagaaggaucagugagca

SEQ ID NO: 172613 - RNA, 22 nt, Human
uguaacacaaauuugcuucuga

SEQ ID NO: 172614 - RNA, 19 nt, Human
uguauaaaaagauacaagg

SEQ ID NO: 172615 - RNA, 21 nt, Human
uucauaaauagaaaaggaaga

SEQ ID NO: 172616 - RNA, 21 nt, Human
uuuccugaaaaugaguccugg

SEQ ID NO: 172617 - RNA, 19 nt, Human
aaaaauaccuacuccacgu

SEQ ID NO: 172618 - RNA, 24 nt, Human
aaaagaugccaaaaccuguguugg

SEQ ID NO: 172619 - RNA, 21 nt, Human
aaacagauugauggaaccaag

SEQ ID NO: 172620 - RNA, 19 nt, Human
aaagaacuucucacuucca

SEQ ID NO: 172621 - RNA, 22 nt, Human
aaagccaacaaaacaaaaaucc

SEQ ID NO: 172622 - RNA, 20 nt, Human
aaaggauccaaaugggagaa

SEQ ID NO: 172623 - RNA, 20 nt, Human
aacaaagacaaggggaaaag

SEQ ID NO: 172624 - RNA, 23 nt, Human
aaccaaauuaacaaccaacggga

SEQ ID NO: 172625 - RNA, 24 nt, Human
aacuucucacuuccaggucacuuc

SEQ ID NO: 172626 - RNA, 24 nt, Human
aagccaacaaaacaaaaauccaaa

SEQ ID NO: 172627 - RNA, 31 nt, Human
acaaaaauccaaaguaaaaauguauaaauag

SEQ ID NO: 172628 - RNA, 20 nt, Human
accaaauaaaacacccgucu

SEQ ID NO: 172629 - RNA, 18 nt, Human
accacacagagacagggu

SEQ ID NO: 172630 - RNA, 18 nt, Human
accgcuuuccacccaggu

SEQ ID NO: 172631 - RNA, 18 nt, Human
agacagggucagcauaug

SEQ ID NO: 172632 - RNA, 19 nt, Human
agcaaaaauaccuacucca

SEQ ID NO: 172633 - RNA, 21 nt, Human
aggacaaaauggcucuuugcu

SEQ ID NO: 172634 - RNA, 23 nt, Human
agggcuggggugggaaagguggg

SEQ ID NO: 172635 - RNA, 19 nt, Human
agggggcaggggaggagag

SEQ ID NO: 172636 - RNA, 20 nt, Human
aucaccccucgccccaaauc

SEQ ID NO: 172637 - RNA, 19 nt, Human
caaaccgcuuuccacccag

SEQ ID NO: 172638 - RNA, 21 nt, Human
caaagacaaggggaaaaaugc

SEQ ID NO: 172639 - RNA, 22 nt, Human
caaagacaaggggaaaaaugca

SEQ ID NO: 172640 - RNA, 24 nt, Human
caaagcagccaccgcagacagggc

SEQ ID NO: 172641 - RNA, 18 nt, Human
caacaaagcagccaccgc

SEQ ID NO: 172642 - RNA, 26 nt, Human
caaccaaauuaacaaccaacgggaaa

SEQ ID NO: 172643 - RNA, 21 nt, Human
cacagagacagggucagcaua

SEQ ID NO: 172644 - RNA, 23 nt, Human
caccccucgccccaaaucugcaa

SEQ ID NO: 172645 - RNA, 19 nt, Human
caccgcaggaggcccuccc

SEQ ID NO: 172646 - RNA, 19 nt, Human
cagaaaaugaaaaaguagc

SEQ ID NO: 172647 - RNA, 19 nt, Human
cagaaacaggcccccaccc

SEQ ID NO: 172648 - RNA, 22 nt, Human
cagaaacaggcccccacccagc

SEQ ID NO: 172649 - RNA, 24 nt, Human
cagcacaaaagaugccaaaaccug

SEQ ID NO: 172650 - RNA, 19 nt, Human
cagcggugcucucagccug

SEQ ID NO: 172651 - RNA, 24 nt, Human
caguacgggaggaaaaacaggcgg

SEQ ID NO: 172652 - RNA, 21 nt, Human
caucaucuuccugcaagucuu

SEQ ID NO: 172653 - RNA, 21 nt, Human
cccagugaaaagagauuaugg

SEQ ID NO: 172654 - RNA, 19 nt, Human
ccccaaaucugcaaagaac

SEQ ID NO: 172655 - RNA, 22 nt, Human
cccgucuuucugccuccugccu

SEQ ID NO: 172656 - RNA, 22 nt, Human
cccugcagcagggggaucgcuc

SEQ ID NO: 172657 - RNA, 21 nt, Human
ccggggccucacaggggucug

SEQ ID NO: 172658 - RNA, 18 nt, Human
ccugaaagcaguacggga

SEQ ID NO: 172659 - RNA, 21 nt, Human
ccuuuauuaugaggcugaaga

SEQ ID NO: 172660 - RNA, 21 nt, Human
cgccccaaaucugcaaagaac

SEQ ID NO: 172661 - RNA, 19 nt, Human
cgcccugcagcagggggau

SEQ ID NO: 172662 - RNA, 19 nt, Human
cucacaguccccguucagc

SEQ ID NO: 172663 - RNA, 21 nt, Human
cucccaacccaaccacacaga

SEQ ID NO: 172664 - RNA, 21 nt, Human
cuccucuugcaagagggcugg

SEQ ID NO: 172665 - RNA, 21 nt, Human
cuccucuugcaagagggcugg

SEQ ID NO: 172666 - RNA, 18 nt, Human
cucuuacaacaaagacaa

SEQ ID NO: 172667 - RNA, 19 nt, Human
cugccuccugccuucccca

SEQ ID NO: 172668 - RNA, 23 nt, Human
cuuccugcaagucuuugccugaa

SEQ ID NO: 172669 - RNA, 19 nt, Human
gaaaaaguaaaugaaggga

SEQ ID NO: 172670 - RNA, 18 nt, Human
gaccuuuaaagccaacaa

SEQ ID NO: 172671 - RNA, 18 nt, Human
gaggaaaaacaggcggga

SEQ ID NO: 172672 - RNA, 22 nt, Human
gaucgccucccaacccaaccac

SEQ ID NO: 172673 - RNA, 18 nt, Human
gcagcagggggaucgcuc

SEQ ID NO: 172674 - RNA, 25 nt, Human
ggaaaaacaggcgggagggggcagg

SEQ ID NO: 172675 - RNA, 18 nt, Human
ggaaagguggggaggggc

SEQ ID NO: 172676 - RNA, 21 nt, Human
ggccucacaggggucuggaca

SEQ ID NO: 172677 - RNA, 18 nt, Human
gggaaagguggggagggg

SEQ ID NO: 172678 - RNA, 23 nt, Human
gggaggaaaaacaggcgggaggg

SEQ ID NO: 172679 - RNA, 27 nt, Human
gggagggggcaggggaggagagaccgu

SEQ ID NO: 172680 - RNA, 22 nt, Human
gggcuggggugggaaagguggg

SEQ ID NO: 172681 - RNA, 20 nt, Human
ggggugggaaagguggggag

SEQ ID NO: 172682 - RNA, 22 nt, Human
ggggugggaaagguggggaggg

SEQ ID NO: 172683 - RNA, 24 nt, Human
gguagaccuuuaaagccaacaaaa

SEQ ID NO: 172684 - RNA, 19 nt, Human
guuggaguuuuaaaaaucu

SEQ ID NO: 172685 - RNA, 20 nt, Human
uaaaaacuguucugagaaac

SEQ ID NO: 172686 - RNA, 24 nt, Human
uaaaaacuguucugagaaacagga

SEQ ID NO: 172687 - RNA, 27 nt, Human
uaaaaagcaguuccacucaagugaaca

SEQ ID NO: 172688 - RNA, 18 nt, Human
uaaaacagacaacaaaac

SEQ ID NO: 172689 - RNA, 26 nt, Human
uaaagugggguagaccuuuaaagcca

SEQ ID NO: 172690 - RNA, 18 nt, Human
uaacuuguacacuuuaca

SEQ ID NO: 172691 - RNA, 21 nt, Human
uacaacaaagacaaggggaaa

SEQ ID NO: 172692 - RNA, 23 nt, Human
uacaacaaagacaaggggaaaaa

SEQ ID NO: 172693 - RNA, 21 nt, Human
uacagaaaaaaaguacaugau

SEQ ID NO: 172694 - RNA, 24 nt, Human
uacagaaacaggcccccacccagc

SEQ ID NO: 172695 - RNA, 24 nt, Human
uaccucaaaggauccaaaugggag

SEQ ID NO: 172696 - RNA, 26 nt, Human
uagcaggcaggccucccaagacuucc

SEQ ID NO: 172697 - RNA, 20 nt, Human
ucaaaggauccaaaugggag

SEQ ID NO: 172698 - RNA, 25 nt, Human
ucacuuccaggucacuucucaguaa

SEQ ID NO: 172699 - RNA, 25 nt, Human
ucacuucuuuucaggguauuagacc

SEQ ID NO: 172700 - RNA, 18 nt, Human
ucagccucggagccggga

SEQ ID NO: 172701 - RNA, 22 nt, Human
ucauccaaaccgcuuuccaccc

SEQ ID NO: 172702 - RNA, 24 nt, Human
uccaguuuggccccagugaaaaga

SEQ ID NO: 172703 - RNA, 20 nt, Human
ucccaacccaaccacacaga

SEQ ID NO: 172704 - RNA, 19 nt, Human
ucccggggccucacagggg

SEQ ID NO: 172705 - RNA, 21 nt, Human
ucugccuccugccuucccccc

SEQ ID NO: 172706 - RNA, 19 nt, Human
ucugcuaagcuuuacccca

SEQ ID NO: 172707 - RNA, 29 nt, Human
ucuuccagcacauuucaaagaacuccagg

SEQ ID NO: 172708 - RNA, 18 nt, Human
ugaagggagagauuuccc

SEQ ID NO: 172709 - RNA, 28 nt, Human
ugacaagcacaccgcaggaaggguuucc

SEQ ID NO: 172710 - RNA, 23 nt, Human
ugagaaacaggauaguguugcaa

SEQ ID NO: 172711 - RNA, 18 nt, Human
ugaggagugcgacgaggc

SEQ ID NO: 172712 - RNA, 25 nt, Human
uggaaccaagaaaacaggacaaaau

SEQ ID NO: 172713 - RNA, 21 nt, Human
ugggaaagguggggaggggcc

SEQ ID NO: 172714 - RNA, 21 nt, Human
uggggugggaaagguggggag

SEQ ID NO: 172715 - RNA, 18 nt, Human
ugugacagcacacugcuc

SEQ ID NO: 172716 - RNA, 22 nt, Human
uuaaaaacuguucugagaaaca

SEQ ID NO: 172717 - RNA, 19 nt, Human
uuaaaagauacagcacaaa

SEQ ID NO: 172718 - RNA, 24 nt, Human
uuaaagccaacaaaacaaaaaucc

SEQ ID NO: 172719 - RNA, 24 nt, Human
uuacaaaaaugggagauuuacaaa

SEQ ID NO: 172720 - RNA, 19 nt, Human
uuacagaaacaggccccca

SEQ ID NO: 172721 - RNA, 23 nt, Human
uuaggcacaagcuggcccguacc

SEQ ID NO: 172722 - RNA, 21 nt, Human
uucaaaccuuccucuucguuc

SEQ ID NO: 172723 - RNA, 24 nt, Human
uugaaguuuaccuucuuuuaauga

SEQ ID NO: 172724 - RNA, 23 nt, Human
uuuaaagccaacaaaacaaaaau

SEQ ID NO: 172725 - RNA, 20 nt, Human
uuuaacauagucuguuggaa

SEQ ID NO: 172726 - RNA, 21 nt, Human
uuucccggggccucacagggg

SEQ ID NO: 172727 - RNA, 18 nt, Human
uuugaaguuuaccuucuu

SEQ ID NO: 172728 - RNA, 18 nt, Human
aaaauguccauuuucccc

SEQ ID NO: 172729 - RNA, 23 nt, Human
aaacgccgcagaguccacccucc

SEQ ID NO: 172730 - RNA, 24 nt, Human
aaagagcucccaugaaaaacaccg

SEQ ID NO: 172731 - RNA, 21 nt, Human
aagcacuuuaaaggugacagc

SEQ ID NO: 172732 - RNA, 20 nt, Human
aauguccauuuuccccaugc

SEQ ID NO: 172733 - RNA, 20 nt, Human
acagggguaagccucuaaac

SEQ ID NO: 172734 - RNA, 25 nt, Human
accccuccugggcgcccccuccccu

SEQ ID NO: 172735 - RNA, 19 nt, Human
accucagcccaucaagugu

SEQ ID NO: 172736 - RNA, 20 nt, Human
accucagcccaucaaguguc

SEQ ID NO: 172737 - RNA, 23 nt, Human
acuaaagugagaguuguuaucca

SEQ ID NO: 172738 - RNA, 18 nt, Human
agaguuguuauccauggg

SEQ ID NO: 172739 - RNA, 19 nt, Human
agccagaaaauguccauuu

SEQ ID NO: 172740 - RNA, 22 nt, Human
aggcgggggagagggcaauggu

SEQ ID NO: 172741 - RNA, 23 nt, Human
agggagaaaaagagguucuccca

SEQ ID NO: 172742 - RNA, 21 nt, Human
aggguaagucaggggugggag

SEQ ID NO: 172743 - RNA, 24 nt, Human
caccccuccuccaggguaagucag

SEQ ID NO: 172744 - RNA, 19 nt, Human
caccccuccugggcgcccc

SEQ ID NO: 172745 - RNA, 22 nt, Human
cacuugggucuccucgcccccc

SEQ ID NO: 172746 - RNA, 23 nt, Human
cagaaaauguccauuuuccccau

SEQ ID NO: 172747 - RNA, 22 nt, Human
cagaaugacaagccagaaaaug

SEQ ID NO: 172748 - RNA, 24 nt, Human
ccaccccuccugggcgcccccucc

SEQ ID NO: 172749 - RNA, 20 nt, Human
ccagaaaauguccauuuucc

SEQ ID NO: 172750 - RNA, 20 nt, Human
ccccccuccccaccccuccc

SEQ ID NO: 172751 - RNA, 24 nt, Human
ccccccuccccaccccuccugggc

SEQ ID NO: 172752 - RNA, 26 nt, Human
ccccuccccaccccuccugggcgccc

SEQ ID NO: 172753 - RNA, 23 nt, Human
ccuccccaccccuccugggcgcc

SEQ ID NO: 172754 - RNA, 20 nt, Human
ccuccucagccaacagaaau

SEQ ID NO: 172755 - RNA, 31 nt, Human
ccuccuccaggguaagucaggggugggaguu

SEQ ID NO: 172756 - RNA, 19 nt, Human
ccucgccccccuccccacc

SEQ ID NO: 172757 - RNA, 23 nt, Human
ccucgccccccuccccaccccuc

SEQ ID NO: 172758 - RNA, 26 nt, Human
ccucgccccccuccccaccccuccug

SEQ ID NO: 172759 - RNA, 20 nt, Human
ccugggcgcccccuccccuc

SEQ ID NO: 172760 - RNA, 22 nt, Human
cucagcccaucaagugucccuu

SEQ ID NO: 172761 - RNA, 20 nt, Human
cugcacuugggucuccucgc

SEQ ID NO: 172762 - RNA, 23 nt, Human
cugggucugggaggcuucaaugc

SEQ ID NO: 172763 - RNA, 22 nt, Human
cuggucauuaagaauacccaaa

SEQ ID NO: 172764 - RNA, 25 nt, Human
gaaaagagcucccaugaaaaacacc

SEQ ID NO: 172765 - RNA, 24 nt, Human
gaggaaaaggggcugggucuggga

SEQ ID NO: 172766 - RNA, 18 nt, Human
gaggcuucaaugccaggu

SEQ ID NO: 172767 - RNA, 23 nt, Human
gcaaacccagccaagugcagcca

SEQ ID NO: 172768 - RNA, 19 nt, Human
gccccccuccccaccccuc

SEQ ID NO: 172769 - RNA, 20 nt, Human
gcgggaggagcuccccgcac

SEQ ID NO: 172770 - RNA, 18 nt, Human
gcugggucugggaggcuu

SEQ ID NO: 172771 - RNA, 20 nt, Human
ggaaacgccgcagaguccac

SEQ ID NO: 172772 - RNA, 19 nt, Human
ggaggaaaaggggcugggu

SEQ ID NO: 172773 - RNA, 19 nt, Human
gggagggcuccaaaucucg

SEQ ID NO: 172774 - RNA, 20 nt, Human
gggcugggucugggaggcuu

SEQ ID NO: 172775 - RNA, 24 nt, Human
ggucuccucgccccccuccccacc

SEQ ID NO: 172776 - RNA, 20 nt, Human
ggugggaguuuacguaggaa

SEQ ID NO: 172777 - RNA, 23 nt, Human
guccauuuuccccaugcguccuu

SEQ ID NO: 172778 - RNA, 23 nt, Human
uaagaaacccguauuuacguggg

SEQ ID NO: 172779 - RNA, 25 nt, Human
uaagaaacccguauuuacguggggu

SEQ ID NO: 172780 - RNA, 19 nt, Human
uaagaauacccaaaccgug

SEQ ID NO: 172781 - RNA, 22 nt, Human
uaauggauaccauuaagaguuc

SEQ ID NO: 172782 - RNA, 22 nt, Human
uacccaaaccgugcaaucccau

SEQ ID NO: 172783 - RNA, 22 nt, Human
ucaauggaggaaaaggggcugg

SEQ ID NO: 172784 - RNA, 23 nt, Human
ucaauuuugauuucaguucaaca

SEQ ID NO: 172785 - RNA, 22 nt, Human
uccauggaucagaaaagagcuc

SEQ ID NO: 172786 - RNA, 21 nt, Human
ucccaucagguggcggucacc

SEQ ID NO: 172787 - RNA, 20 nt, Human
ucgccccccuccccaccccu

SEQ ID NO: 172788 - RNA, 22 nt, Human
ucgccccccuccccaccccucc

SEQ ID NO: 172789 - RNA, 18 nt, Human
ucuccucgccccccuccc

SEQ ID NO: 172790 - RNA, 24 nt, Human
ugaaggggugggaaccucagccca

SEQ ID NO: 172791 - RNA, 24 nt, Human
ugccuggucauuaagaauacccaa

SEQ ID NO: 172792 - RNA, 19 nt, Human
ugccuugcagaaguuccau

SEQ ID NO: 172793 - RNA, 23 nt, Human
ugcuaauagcaaucaacacugug

SEQ ID NO: 172794 - RNA, 23 nt, Human
uggauauauacauauuuuacacu

SEQ ID NO: 172795 - RNA, 18 nt, Human
uggcgggaggagcucccc

SEQ ID NO: 172796 - RNA, 18 nt, Human
uggcgggaggagcucccc

SEQ ID NO: 172797 - RNA, 21 nt, Human
uguacacacuauaucuuugga

SEQ ID NO: 172798 - RNA, 20 nt, Human
ugugaaggggugggaaccuc

SEQ ID NO: 172799 - RNA, 24 nt, Human
uuacugccuugcagaaguuccauu

SEQ ID NO: 172800 - RNA, 20 nt, Human
uucaggguuuugaaaccuuu

SEQ ID NO: 172801 - RNA, 25 nt, Human
aaaaaaaaaaaaaaaaaaggcaaag

SEQ ID NO: 172802 - RNA, 25 nt, Human
aaaaaaaaaaaaaaaggcaaaguuc

SEQ ID NO: 172803 - RNA, 25 nt, Human
aaaaaaaaaaaaggcaaaguucuag

SEQ ID NO: 172804 - RNA, 21 nt, Human
aaaaaaaaggcaaaguucuag

SEQ ID NO: 172805 - RNA, 21 nt, Human
aagaaggaagaagagguucug

SEQ ID NO: 172806 - RNA, 21 nt, Human
aagcaaucuucagcccggagc

SEQ ID NO: 172807 - RNA, 22 nt, Human
aaggaagaagagguucugggag

SEQ ID NO: 172808 - RNA, 22 nt, Human
accuuggaggagagaagagaag

SEQ ID NO: 172809 - RNA, 21 nt, Human
acugcacucuagccuggacaa

SEQ ID NO: 172810 - RNA, 25 nt, Human
acugcacucuagccuggacaauaua

SEQ ID NO: 172811 - RNA, 23 nt, Human
agaagcaaucuucagcccggagc

SEQ ID NO: 172812 - RNA, 21 nt, Human
agaaggaagaagagguucugg

SEQ ID NO: 172813 - RNA, 24 nt, Human
agaaggaagaagagguucugggaa

SEQ ID NO: 172814 - RNA, 18 nt, Human
agacaggaggaucacuug

SEQ ID NO: 172815 - RNA, 23 nt, Human
agagaagcaaucuucagcccgga

SEQ ID NO: 172816 - RNA, 19 nt, Human
agccuggacaauauaguga

SEQ ID NO: 172817 - RNA, 23 nt, Human
agccuggacaauauagugagaac

SEQ ID NO: 172818 - RNA, 24 nt, Human
aggaguuggaggcugcaguguacu

SEQ ID NO: 172819 - RNA, 21 nt, Human
aggaucacuugaggcuaggag

SEQ ID NO: 172820 - RNA, 24 nt, Human
agguugagacaggaggaucacuug

SEQ ID NO: 172821 - RNA, 24 nt, Human
auauagugagaacccaucucaaaa

SEQ ID NO: 172822 - RNA, 20 nt, Human
aucacuugaggcuaggaguu

SEQ ID NO: 172823 - RNA, 18 nt, Human
cacugcacucuagccugg

SEQ ID NO: 172824 - RNA, 19 nt, Human
cacugcacucuagccugga

SEQ ID NO: 172825 - RNA, 21 nt, Human
cacugcacucuagccuggaca

SEQ ID NO: 172826 - RNA, 24 nt, Human
cacugcacucuagccuggacaaua

SEQ ID NO: 172827 - RNA, 19 nt, Human
ccacugcacucuagccugg

SEQ ID NO: 172828 - RNA, 19 nt, Human
ccacugcacucuagccugg

SEQ ID NO: 172829 - RNA, 20 nt, Human
ccacugcacucuagccugga

SEQ ID NO: 172830 - RNA, 20 nt, Human
ccacugcacucuagccugga

SEQ ID NO: 172831 - RNA, 21 nt, Human
ccacugcacucuagccuggac

SEQ ID NO: 172832 - RNA, 25 nt, Human
ccacugcacucuagccuggacaaua

SEQ ID NO: 172833 - RNA, 25 nt, Human
ccaucucaaaaaaaaaaaaaaaaaa

SEQ ID NO: 172834 - RNA, 19 nt, Human
cggcgcaugcuuguaaucc

SEQ ID NO: 172835 - RNA, 19 nt, Human
cuaggaguuggaggcugca

SEQ ID NO: 172836 - RNA, 18 nt, Human
cucaaaaaaaaaaaaaaa

SEQ ID NO: 172837 - RNA, 18 nt, Human
cucaaaaaaaaaaaaaaa

SEQ ID NO: 172838 - RNA, 23 nt, Human
cucaaaaaaaaaaaaaaaaaaaa

SEQ ID NO: 172839 - RNA, 23 nt, Human
gaaggaagaagagguucugggag

SEQ ID NO: 172840 - RNA, 24 nt, Human
gaauagccacugcacucuagccug

SEQ ID NO: 172841 - RNA, 21 nt, Human
gagaagagaagcaaucuucag

SEQ ID NO: 172842 - RNA, 22 nt, Human
gaggaucacuugaggcuaggag

SEQ ID NO: 172843 - RNA, 18 nt, Human
gaucacuugaggcuagga

SEQ ID NO: 172844 - RNA, 23 nt, Human
gaucacuugaggcuaggaguugg

SEQ ID NO: 172845 - RNA, 24 nt, Human
gaucacuugaggcuaggaguugga

SEQ ID NO: 172846 - RNA, 20 nt, Human
gccacugcacucuagccugg

SEQ ID NO: 172847 - RNA, 20 nt, Human
gccuggacaauauagugaga

SEQ ID NO: 172848 - RNA, 22 nt, Human
gcgcgggcuccgucacuagacc

SEQ ID NO: 172849 - RNA, 23 nt, Human
gcuaggaguuggaggcugcagug

SEQ ID NO: 172850 - RNA, 18 nt, Human
ggaguuggaggcugcagu

SEQ ID NO: 172851 - RNA, 21 nt, Human
ggcgcaugcuuguaauccuac

SEQ ID NO: 172852 - RNA, 19 nt, Human
uauagugagaacccaucuc

SEQ ID NO: 172853 - RNA, 23 nt, Human
uauagugagaacccaucucaaaa

SEQ ID NO: 172854 - RNA, 22 nt, Human
ucaaaaaaaaaaaaaaaaaaaa

SEQ ID NO: 172855 - RNA, 23 nt, Human
ucaaaaaaaaaaaaaaaaaaaaa

SEQ ID NO: 172856 - RNA, 19 nt, Human
ucacuagaccuuggaggag

SEQ ID NO: 172857 - RNA, 21 nt, Human
ucggcgcaugcuuguaauccu

SEQ ID NO: 172858 - RNA, 24 nt, Human
ucuagccuggacaauauagugaga

SEQ ID NO: 172859 - RNA, 18 nt, Human
ucucaaaaaaaaaaaaaa

SEQ ID NO: 172860 - RNA, 28 nt, Human
ucugugaauagccacugcacucuagccu

SEQ ID NO: 172861 - RNA, 20 nt, Human
ugagacaggaggaucacuug

SEQ ID NO: 172862 - RNA, 23 nt, Human
ugagacaggaggaucacuugagg

SEQ ID NO: 172863 - RNA, 24 nt, Human
ugagacaggaggaucacuugaggc

SEQ ID NO: 172864 - RNA, 25 nt, Human
ugagacaggaggaucacuugaggcu

SEQ ID NO: 172865 - RNA, 22 nt, Human
ugcugauagaugggcacagcag

SEQ ID NO: 172866 - RNA, 19 nt, Human
ugggagguugagacaggag

SEQ ID NO: 172867 - RNA, 24 nt, Human
ugggagguugagacaggaggauca

SEQ ID NO: 172868 - RNA, 20 nt, Human
aacgcgaggugccgccuccu

SEQ ID NO: 172869 - RNA, 25 nt, Human
aagaacagcaaagugggagggccgg

SEQ ID NO: 172870 - RNA, 23 nt, Human
acacugcggaagggcagcuggac

SEQ ID NO: 172871 - RNA, 20 nt, Human
acauaaagucccucgacuua

SEQ ID NO: 172872 - RNA, 18 nt, Human
accgcccaaaaaccuccc

SEQ ID NO: 172873 - RNA, 22 nt, Human
agaaagccucaaaaacauaaag

SEQ ID NO: 172874 - RNA, 20 nt, Human
agaacagcaaagugggaggg

SEQ ID NO: 172875 - RNA, 19 nt, Human
aggacaaggccaggcagcc

SEQ ID NO: 172876 - RNA, 26 nt, Human
aggcagccuggccacacugcggaagg

SEQ ID NO: 172877 - RNA, 24 nt, Human
auaccgcccaaaaaccuccccaaa

SEQ ID NO: 172878 - RNA, 24 nt, Human
aucucagcuaucccucacguuuca

SEQ ID NO: 172879 - RNA, 24 nt, Human
caauaccgcccaaaaaccucccca

SEQ ID NO: 172880 - RNA, 18 nt, Human
cagaaagccucaaaaaca

SEQ ID NO: 172881 - RNA, 22 nt, Human
ccaaaaaccuccccaaauuccu

SEQ ID NO: 172882 - RNA, 18 nt, Human
ccaggcagccuggccaca

SEQ ID NO: 172883 - RNA, 22 nt, Human
ccauggcaacagaaagccucaa

SEQ ID NO: 172884 - RNA, 24 nt, Human
ccauggcaacagaaagccucaaaa

SEQ ID NO: 172885 - RNA, 23 nt, Human
cccaaaaaccuccccaaauuccu

SEQ ID NO: 172886 - RNA, 24 nt, Human
cccccucguccucaauaccgccca

SEQ ID NO: 172887 - RNA, 24 nt, Human
cccgcccccgacgccauuuagacg

SEQ ID NO: 172888 - RNA, 20 nt, Human
ccgcccaaaaaccuccccaa

SEQ ID NO: 172889 - RNA, 25 nt, Human
ccgcccaaaaaccuccccaaauucc

SEQ ID NO: 172890 - RNA, 21 nt, Human
ccucaaacgcaggcgggccuc

SEQ ID NO: 172891 - RNA, 27 nt, Human
ccucaauaccgcccaaaaaccucccca

SEQ ID NO: 172892 - RNA, 22 nt, Human
ccucuagcaaggcuaugggggc

SEQ ID NO: 172893 - RNA, 19 nt, Human
cgaaaaaauaccgaccucu

SEQ ID NO: 172894 - RNA, 20 nt, Human
cgggacgaggccaggccuag

SEQ ID NO: 172895 - RNA, 22 nt, Human
cguuucagggccggcggcggcc

SEQ ID NO: 172896 - RNA, 24 nt, Human
cuaacggacccccucguccucaau

SEQ ID NO: 172897 - RNA, 20 nt, Human
cuagcuggcgaacaacacaa

SEQ ID NO: 172898 - RNA, 23 nt, Human
cucaaaaacauaaagucccucga

SEQ ID NO: 172899 - RNA, 20 nt, Human
cucaauaccgcccaaaaacc

SEQ ID NO: 172900 - RNA, 23 nt, Human
cugcugccucgaaagcucggcag

SEQ ID NO: 172901 - RNA, 26 nt, Human
gcaacagaaagccucaaaaacauaaa

SEQ ID NO: 172902 - RNA, 20 nt, Human
gcagacaggccucaagcgca

SEQ ID NO: 172903 - RNA, 18 nt, Human
gcccaaaaaccuccccaa

SEQ ID NO: 172904 - RNA, 24 nt, Human
gcccaaaaaccuccccaaauuccu

SEQ ID NO: 172905 - RNA, 23 nt, Human
ggcaacagaaagccucaaaaaca

SEQ ID NO: 172906 - RNA, 19 nt, Human
uaaagaacagcaaaguggg

SEQ ID NO: 172907 - RNA, 19 nt, Human
uaaauccugcugccucgaa

SEQ ID NO: 172908 - RNA, 25 nt, Human
uaaaucgaaaaaauaccgaccucua

SEQ ID NO: 172909 - RNA, 24 nt, Human
uaacaggcaaauuuaaaucgaaaa

SEQ ID NO: 172910 - RNA, 22 nt, Human
uagcucaggagaaacacauuuu

SEQ ID NO: 172911 - RNA, 22 nt, Human
uagcuggcgaacaacacaaaug

SEQ ID NO: 172912 - RNA, 22 nt, Human
uaugcugacuaacggacccccu

SEQ ID NO: 172913 - RNA, 22 nt, Human
ucaccauggcaacagaaagccu

SEQ ID NO: 172914 - RNA, 21 nt, Human
ucaggcaguaaaguaaagaac

SEQ ID NO: 172915 - RNA, 24 nt, Human
ucaggcaguaaaguaaagaacagc

SEQ ID NO: 172916 - RNA, 18 nt, Human
ucccggaggucccgcccc

SEQ ID NO: 172917 - RNA, 18 nt, Human
uccucaauaccgcccaaa

SEQ ID NO: 172918 - RNA, 25 nt, Human
ucguccucaauaccgcccaaaaacc

SEQ ID NO: 172919 - RNA, 23 nt, Human
ugacuaacggacccccucguccu

SEQ ID NO: 172920 - RNA, 19 nt, Human
uucccgcuccaggauucua

SEQ ID NO: 172921 - RNA, 23 nt, Human
aaaaaaagaaaaaaaaagaaaag

SEQ ID NO: 172922 - RNA, 22 nt, Human
aaaaaagaaaagcaggcaagga

SEQ ID NO: 172923 - RNA, 21 nt, Human
aaaaacaggcaaggagggccg

SEQ ID NO: 172924 - RNA, 21 nt, Human
aaaagaaaagcaggcaaggag

SEQ ID NO: 172925 - RNA, 21 nt, Human
aaaagcaccaccagagucgcc

SEQ ID NO: 172926 - RNA, 21 nt, Human
aaagcaccaccagagucgccc

SEQ ID NO: 172927 - RNA, 23 nt, Human
aaauauaguaauuaacaagacuu

SEQ ID NO: 172928 - RNA, 20 nt, Human
aacauagugagacccugucu

SEQ ID NO: 172929 - RNA, 20 nt, Human
aacaugaugaaaucccaucu

SEQ ID NO: 172930 - RNA, 21 nt, Human
aacaugaugaaaucccaucuc

SEQ ID NO: 172931 - RNA, 24 nt, Human
aaccaggaggaagagguugcagug

SEQ ID NO: 172932 - RNA, 19 nt, Human
aacccaacuucuagcaaca

SEQ ID NO: 172933 - RNA, 21 nt, Human
aagaaaaaaaaagaaaagcag

SEQ ID NO: 172934 - RNA, 22 nt, Human
acaacccaacuucuagcaacag

SEQ ID NO: 172935 - RNA, 20 nt, Human
acaguaaaaaaaauacuaga

SEQ ID NO: 172936 - RNA, 24 nt, Human
acauagugagacccugucucaaaa

SEQ ID NO: 172937 - RNA, 21 nt, Human
accucaggaagaugucagcag

SEQ ID NO: 172938 - RNA, 18 nt, Human
acuccacuccagccuggg

SEQ ID NO: 172939 - RNA, 24 nt, Human
acuccacuccagccugggugauag

SEQ ID NO: 172940 - RNA, 18 nt, Human
acuccagccugggugaua

SEQ ID NO: 172941 - RNA, 24 nt, Human
acuugaggucaggaguucgagacc

SEQ ID NO: 172942 - RNA, 21 nt, Human
agaaucgcuugaaccaggagg

SEQ ID NO: 172943 - RNA, 24 nt, Human
agagguugcagugagccaagaucg

SEQ ID NO: 172944 - RNA, 19 nt, Human
agagucgcccucuagccuu

SEQ ID NO: 172945 - RNA, 20 nt, Human
agccaggcgacccuccaauu

SEQ ID NO: 172946 - RNA, 23 nt, Human
agccuggcaugguggugcacgcc

SEQ ID NO: 172947 - RNA, 24 nt, Human
agccuggccaacaugaugaaaucc

SEQ ID NO: 172948 - RNA, 22 nt, Human
agccugggcaacauagugagac

SEQ ID NO: 172949 - RNA, 24 nt, Human
agccugggcaacauagugagaccc

SEQ ID NO: 172950 - RNA, 24 nt, Human
agccugggcaacauagugagaccc

SEQ ID NO: 172951 - RNA, 21 nt, Human
agccugggugauaggugcgcc

SEQ ID NO: 172952 - RNA, 24 nt, Human
aggaagagguugcagugagccaag

SEQ ID NO: 172953 - RNA, 23 nt, Human
aggaauucaagagcagccugggc

SEQ ID NO: 172954 - RNA, 18 nt, Human
aggcaaggaggaguuggc

SEQ ID NO: 172955 - RNA, 18 nt, Human
aggcaaggagggcccggu

SEQ ID NO: 172956 - RNA, 18 nt, Human
aggcagguggaucacuug

SEQ ID NO: 172957 - RNA, 22 nt, Human
aggcagguggaucacuugaggu

SEQ ID NO: 172958 - RNA, 26 nt, Human
aggcagguggaucacuugaggucagg

SEQ ID NO: 172959 - RNA, 19 nt, Human
aggcuucagcuuuuuuugg

SEQ ID NO: 172960 - RNA, 22 nt, Human
agguggaucacuugaggucagg

SEQ ID NO: 172961 - RNA, 18 nt, Human
agguggguggggcagaaa

SEQ ID NO: 172962 - RNA, 22 nt, Human
auaguaguccuccucaaucccu

SEQ ID NO: 172963 - RNA, 24 nt, Human
aucgugccacuccacuccagccug

SEQ ID NO: 172964 - RNA, 19 nt, Human
augccuguaauccuagcac

SEQ ID NO: 172965 - RNA, 26 nt, Human
caaaaaaaaaaaaaaagagagaaaaa

SEQ ID NO: 172966 - RNA, 23 nt, Human
caaaaugggcuggcagaagacca

SEQ ID NO: 172967 - RNA, 21 nt, Human
caacauagugagacccugucu

SEQ ID NO: 172968 - RNA, 22 nt, Human
caacauagugagacccugucuc

SEQ ID NO: 172969 - RNA, 24 nt, Human
caacaugaugaaaucccaucucuu

SEQ ID NO: 172970 - RNA, 24 nt, Human
caaggcagguggaucacuugaggu

SEQ ID NO: 172971 - RNA, 26 nt, Human
caaggcagguggaucacuugagguca

SEQ ID NO: 172972 - RNA, 18 nt, Human
cacagguagaaaauucuc

SEQ ID NO: 172973 - RNA, 18 nt, Human
caccgaagacuccacauc

SEQ ID NO: 172974 - RNA, 23 nt, Human
caccucuggccucaaaaugggcu

SEQ ID NO: 172975 - RNA, 22 nt, Human
cacuccacuccagccuggguga

SEQ ID NO: 172976 - RNA, 20 nt, Human
cacuccagccugggugauag

SEQ ID NO: 172977 - RNA, 22 nt, Human
cacuccagccugggugauaggu

SEQ ID NO: 172978 - RNA, 23 nt, Human
cacuccagccugggugauaggug

SEQ ID NO: 172979 - RNA, 23 nt, Human
cacuugaggucaggaguucgaga

SEQ ID NO: 172980 - RNA, 20 nt, Human
cagccugggcaacauaguga

SEQ ID NO: 172981 - RNA, 22 nt, Human
caggggaaaauccagaacaacc

SEQ ID NO: 172982 - RNA, 24 nt, Human
cagguggaucacuugaggucagga

SEQ ID NO: 172983 - RNA, 20 nt, Human
caugccuguaauccuagcac

SEQ ID NO: 172984 - RNA, 18 nt, Human
caugggaauaagccaggc

SEQ ID NO: 172985 - RNA, 20 nt, Human
ccacuccacuccagccuggg

SEQ ID NO: 172986 - RNA, 20 nt, Human
ccacuccacuccagccuggg

SEQ ID NO: 172987 - RNA, 21 nt, Human
ccacuccacuccagccugggu

SEQ ID NO: 172988 - RNA, 21 nt, Human
ccacuccacuccagccugggu

SEQ ID NO: 172989 - RNA, 23 nt, Human
ccacuccacuccagccuggguga

SEQ ID NO: 172990 - RNA, 24 nt, Human
ccacuccacuccagccugggugau

SEQ ID NO: 172991 - RNA, 18 nt, Human
ccagccugggcuugugag

SEQ ID NO: 172992 - RNA, 20 nt, Human
ccaguggaagaaucuggaaa

SEQ ID NO: 172993 - RNA, 24 nt, Human
ccauucaaagauaaaaugggcugu

SEQ ID NO: 172994 - RNA, 19 nt, Human
cccugucucaaaaaaaaaa

SEQ ID NO: 172995 - RNA, 22 nt, Human
ccgucucaaaaaaagaaaaaaa

SEQ ID NO: 172996 - RNA, 23 nt, Human
ccgucucaaaaaaagaaaaaaaa

SEQ ID NO: 172997 - RNA, 24 nt, Human
ccuggccaacaugaugaaauccca

SEQ ID NO: 172998 - RNA, 22 nt, Human
ccugggcaacauagugagaccc

SEQ ID NO: 172999 - RNA, 19 nt, Human
ccuguaauccuagcaccuu

SEQ ID NO: 173000 - RNA, 20 nt, Human
ccuguaauccuagcaccuug

SEQ ID NO: 173001 - RNA, 23 nt, Human
ccugucucaaaaaaaaaaaaaaa

SEQ ID NO: 173002 - RNA, 21 nt, Human
cgagaccagccuggccaacau

SEQ ID NO: 173003 - RNA, 22 nt, Human
cgugccacuccacuccagccug

SEQ ID NO: 173004 - RNA, 19 nt, Human
cuagcaccuugggaggcca

SEQ ID NO: 173005 - RNA, 24 nt, Human
cucaaaaaaaaaaaaaaagagaga

SEQ ID NO: 173006 - RNA, 18 nt, Human
cucaaaaaaagaaaaaaa

SEQ ID NO: 173007 - RNA, 25 nt, Human
cucaugccuguaauccuagcaccuu

SEQ ID NO: 173008 - RNA, 18 nt, Human
cuucaaauaguaguccuc

SEQ ID NO: 173009 - RNA, 19 nt, Human
gaaacauacaaaagcacca

SEQ ID NO: 173010 - RNA, 21 nt, Human
gagaagauguugacuuuuccu

SEQ ID NO: 173011 - RNA, 18 nt, Human
gagcugacagcaccucug

SEQ ID NO: 173012 - RNA, 18 nt, Human
gagguugcagugagccaa

SEQ ID NO: 173013 - RNA, 22 nt, Human
gagucacacaugggaauaagcc

SEQ ID NO: 173014 - RNA, 21 nt, Human
gaucacuugaggucaggaguu

SEQ ID NO: 173015 - RNA, 24 nt, Human
gaucacuugaggucaggaguucga

SEQ ID NO: 173016 - RNA, 21 nt, Human
gcacaguaaaaaaaauacuag

SEQ ID NO: 173017 - RNA, 24 nt, Human
gccaacaugaugaaaucccaucuc

SEQ ID NO: 173018 - RNA, 19 nt, Human
gccacuccacuccagccug

SEQ ID NO: 173019 - RNA, 24 nt, Human
gccacuccacuccagccuggguga

SEQ ID NO: 173020 - RNA, 19 nt, Human
gcccggugcgguggcucau

SEQ ID NO: 173021 - RNA, 22 nt, Human
ggaggaagagguugcagugagc

SEQ ID NO: 173022 - RNA, 23 nt, Human
ggagggcccggugcgguggcuca

SEQ ID NO: 173023 - RNA, 18 nt, Human
ggcaugguggugcacgcc

SEQ ID NO: 173024 - RNA, 21 nt, Human
gggcuguuccagugggaguga

SEQ ID NO: 173025 - RNA, 22 nt, Human
gggguagguggguggggcagaa

SEQ ID NO: 173026 - RNA, 23 nt, Human
ggugcgguggcucaugccuguaa

SEQ ID NO: 173027 - RNA, 21 nt, Human
gguggcucaugccuguaaucc

SEQ ID NO: 173028 - RNA, 24 nt, Human
gguggcucaugccuguaauccuag

SEQ ID NO: 173029 - RNA, 21 nt, Human
ggugggaggacugcuugagcc

SEQ ID NO: 173030 - RNA, 21 nt, Human
gucucaaaaaaaaaaaaaaag

SEQ ID NO: 173031 - RNA, 19 nt, Human
uaaaaaaaauacuagaagc

SEQ ID NO: 173032 - RNA, 24 nt, Human
uaaaaaaaauacuagaagcagaau

SEQ ID NO: 173033 - RNA, 22 nt, Human
uaaaaauauaaaaauuagccug

SEQ ID NO: 173034 - RNA, 22 nt, Human
uaacaagacuuuauucuuaaau

SEQ ID NO: 173035 - RNA, 24 nt, Human
uaaggaggaugauguaaugugaua

SEQ ID NO: 173036 - RNA, 21 nt, Human
uaccagugcccauugcuucaa

SEQ ID NO: 173037 - RNA, 22 nt, Human
uaccagugcccauugcuucaaa

SEQ ID NO: 173038 - RNA, 19 nt, Human
uacuaaaaacuccuccuua

SEQ ID NO: 173039 - RNA, 20 nt, Human
uagaagcagaauuaccccac

SEQ ID NO: 173040 - RNA, 22 nt, Human
uagaagcagaauuaccccacua

SEQ ID NO: 173041 - RNA, 23 nt, Human
uagcaaaaacaaggacuuucaaa

SEQ ID NO: 173042 - RNA, 25 nt, Human
uagcaaaaacaaggacuuucaaaua

SEQ ID NO: 173043 - RNA, 21 nt, Human
uagcaccuugggaggccaagg

SEQ ID NO: 173044 - RNA, 24 nt, Human
uagcaccuugggaggccaaggcag

SEQ ID NO: 173045 - RNA, 20 nt, Human
uagcuggacauaguggcuug

SEQ ID NO: 173046 - RNA, 22 nt, Human
uagcuuuucaaaaacauuaccc

SEQ ID NO: 173047 - RNA, 23 nt, Human
uagggugggaggacugcuugagc

SEQ ID NO: 173048 - RNA, 23 nt, Human
uaguagcaaaaacaaggacuuuc

SEQ ID NO: 173049 - RNA, 19 nt, Human
ucaaaaaaaaaaaaaaaga

SEQ ID NO: 173050 - RNA, 19 nt, Human
ucaagagcagccugggcaa

SEQ ID NO: 173051 - RNA, 22 nt, Human
ucacugcagccauucagaaauc

SEQ ID NO: 173052 - RNA, 20 nt, Human
ucacuugaggucaggaguuc

SEQ ID NO: 173053 - RNA, 20 nt, Human
uccaaggaaauacgaugaac

SEQ ID NO: 173054 - RNA, 18 nt, Human
uccagccugggugauagg

SEQ ID NO: 173055 - RNA, 24 nt, Human
ucugugcugagggcaggcuggagu

SEQ ID NO: 173056 - RNA, 18 nt, Human
ugaaaaacaggcaaggaa

SEQ ID NO: 173057 - RNA, 24 nt, Human
ugaaaaacaggcaaggagggcccg

SEQ ID NO: 173058 - RNA, 20 nt, Human
ugaaacauacaaaagcacca

SEQ ID NO: 173059 - RNA, 22 nt, Human
ugaaacauacaaaagcaccacc

SEQ ID NO: 173060 - RNA, 20 nt, Human
ugaccuagugcaauaucugg

SEQ ID NO: 173061 - RNA, 24 nt, Human
ugagacaugagaaucgcuugaacc

SEQ ID NO: 173062 - RNA, 19 nt, Human
ugagagaggaauccuggcc

SEQ ID NO: 173063 - RNA, 19 nt, Human
ugagccaagaucgugccac

SEQ ID NO: 173064 - RNA, 18 nt, Human
ugauacgccacauacuaa

SEQ ID NO: 173065 - RNA, 21 nt, Human
ugcagccauucagaaauccaa

SEQ ID NO: 173066 - RNA, 22 nt, Human
ugccauccgugauuuaauucca

SEQ ID NO: 173067 - RNA, 23 nt, Human
ugccuguaauccuagcaccuugg

SEQ ID NO: 173068 - RNA, 23 nt, Human
ugccuguaauccuagcaccuugg

SEQ ID NO: 173069 - RNA, 24 nt, Human
ugccuguaauccuagcaccuuggg

SEQ ID NO: 173070 - RNA, 24 nt, Human
ugcuccaaauaccagugcccauug

SEQ ID NO: 173071 - RNA, 24 nt, Human
uggaucacuugaggucaggaguuc

SEQ ID NO: 173072 - RNA, 27 nt, Human
uggaucacuugaggucaggaguucgag

SEQ ID NO: 173073 - RNA, 19 nt, Human
uggcucaugccuguaaucc

SEQ ID NO: 173074 - RNA, 24 nt, Human
uggcucaugccuguaauccuagca

SEQ ID NO: 173075 - RNA, 21 nt, Human
uggcuugcaccuguaugccag

SEQ ID NO: 173076 - RNA, 24 nt, Human
ugggaggccaaggcagguggauca

SEQ ID NO: 173077 - RNA, 24 nt, Human
ugggcaacauagugagacccuguc

SEQ ID NO: 173078 - RNA, 18 nt, Human
uggugcacgccgguaguc

SEQ ID NO: 173079 - RNA, 20 nt, Human
uguaaaagaggaccaccuga

SEQ ID NO: 173080 - RNA, 21 nt, Human
ugucauuuugcccaagauuuc

SEQ ID NO: 173081 - RNA, 24 nt, Human
uuagccuggcaugguggugcacgc

SEQ ID NO: 173082 - RNA, 24 nt, Human
uucaaauaguaguccuccucaauc

SEQ ID NO: 173083 - RNA, 21 nt, Human
uucaaguagagagaggaggac

SEQ ID NO: 173084 - RNA, 21 nt, Human
uucauuagcuuuucaaaaaca

SEQ ID NO: 173085 - RNA, 23 nt, Human
uugaaacauacaaaagcaccacc

SEQ ID NO: 173086 - RNA, 22 nt, Human
uugcagugagccaagaucgugc

SEQ ID NO: 173087 - RNA, 21 nt, Human
uuuuuugggggguaggugggu

SEQ ID NO: 173088 - RNA, 27 nt, Human
acccgcugccgcugcucuggggagccc

SEQ ID NO: 173089 - RNA, 24 nt, Human
acgaaugggcgcccuccuccuucc

SEQ ID NO: 173090 - RNA, 18 nt, Human
acgccuccucugggcugu

SEQ ID NO: 173091 - RNA, 19 nt, Human
acucagcuccugggcucag

SEQ ID NO: 173092 - RNA, 23 nt, Human
agauguugcuggugacaaggaau

SEQ ID NO: 173093 - RNA, 22 nt, Human
agauucucucacgugggugcuc

SEQ ID NO: 173094 - RNA, 18 nt, Human
agcagagaggcugccuac

SEQ ID NO: 173095 - RNA, 19 nt, Human
aggcagauucucucacgug

SEQ ID NO: 173096 - RNA, 19 nt, Human
aguagcagcagcgaggggc

SEQ ID NO: 173097 - RNA, 21 nt, Human
cagagaggcugccuacgggug

SEQ ID NO: 173098 - RNA, 23 nt, Human
cagagaggcugccuacggguggc

SEQ ID NO: 173099 - RNA, 19 nt, Human
cagagcccggggccaggaa

SEQ ID NO: 173100 - RNA, 19 nt, Human
cagagcccggggccaggaa

SEQ ID NO: 173101 - RNA, 22 nt, Human
caggggacauccagggggcucg

SEQ ID NO: 173102 - RNA, 22 nt, Human
caggguggccagagcccggggc

SEQ ID NO: 173103 - RNA, 23 nt, Human
ccagggggcucgagauguugcug

SEQ ID NO: 173104 - RNA, 23 nt, Human
cccacccuggccccacucaggag

SEQ ID NO: 173105 - RNA, 20 nt, Human
ccccuugucccucccuccca

SEQ ID NO: 173106 - RNA, 25 nt, Human
cccgcauccccaucgccggcccggc

SEQ ID NO: 173107 - RNA, 23 nt, Human
cccgcugccgcugcucugcaucc

SEQ ID NO: 173108 - RNA, 21 nt, Human
cccuccuccuuccuucuguug

SEQ ID NO: 173109 - RNA, 20 nt, Human
ccgaaguuacgaccguuucc

SEQ ID NO: 173110 - RNA, 19 nt, Human
ccgcauccccaucgccggc

SEQ ID NO: 173111 - RNA, 19 nt, Human
ccggcagcguggccacgcc

SEQ ID NO: 173112 - RNA, 25 nt, Human
ccggcagcguggccacgccuccucu

SEQ ID NO: 173113 - RNA, 21 nt, Human
ccggcccgccggcugccuggc

SEQ ID NO: 173114 - RNA, 21 nt, Human
ccuccgcgcucgcagccccga

SEQ ID NO: 173115 - RNA, 25 nt, Human
ccucgugcgggcggggcggggcgag

SEQ ID NO: 173116 - RNA, 19 nt, Human
ccuuccuucuguugggcug

SEQ ID NO: 173117 - RNA, 21 nt, Human
ccuuccuucuguugggcugga

SEQ ID NO: 173118 - RNA, 22 nt, Human
ccuuccuucuguugggcuggag

SEQ ID NO: 173119 - RNA, 21 nt, Human
cgacucggggucgggcggcgg

SEQ ID NO: 173120 - RNA, 21 nt, Human
cgcguagugcucccgcauccc

SEQ ID NO: 173121 - RNA, 20 nt, Human
cgcuggaggccggcccgccg

SEQ ID NO: 173122 - RNA, 22 nt, Human
cgcuucgucgucgucgcccucc

SEQ ID NO: 173123 - RNA, 20 nt, Human
cggcgggaaggaggguggcc

SEQ ID NO: 173124 - RNA, 19 nt, Human
cggcugccugccauacccg

SEQ ID NO: 173125 - RNA, 21 nt, Human
cggcugccugccauacccgcu

SEQ ID NO: 173126 - RNA, 18 nt, Human
cgggaaggaggguggccg

SEQ ID NO: 173127 - RNA, 23 nt, Human
cgggaaggaggguggccguggcg

SEQ ID NO: 173128 - RNA, 21 nt, Human
cggggcggggccucggccacc

SEQ ID NO: 173129 - RNA, 18 nt, Human
cgugcgggcggggcgggg

SEQ ID NO: 173130 - RNA, 18 nt, Human
cucccucccacccuggcc

SEQ ID NO: 173131 - RNA, 21 nt, Human
cucgcggagggcuccacuucc

SEQ ID NO: 173132 - RNA, 19 nt, Human
cuuccuucuguugggcugg

SEQ ID NO: 173133 - RNA, 21 nt, Human
gagguugggaggggucccagc

SEQ ID NO: 173134 - RNA, 20 nt, Human
gcccuccgcgcucgcagccc

SEQ ID NO: 173135 - RNA, 19 nt, Human
gccuacggguggcacgggg

SEQ ID NO: 173136 - RNA, 27 nt, Human
gccucgcgcgcucgcggagggcuccac

SEQ ID NO: 173137 - RNA, 18 nt, Human
gccugggcugagcggacc

SEQ ID NO: 173138 - RNA, 25 nt, Human
gccugggcugagcggaccggggguc

SEQ ID NO: 173139 - RNA, 18 nt, Human
gcgcccuccuccuuccuu

SEQ ID NO: 173140 - RNA, 19 nt, Human
gcgcgcgcaucccaggcca

SEQ ID NO: 173141 - RNA, 20 nt, Human
gcucgccccuuuccuccccc

SEQ ID NO: 173142 - RNA, 21 nt, Human
ggaguccucccgacucggggu

SEQ ID NO: 173143 - RNA, 18 nt, Human
ggcaccugcgcuggaggc

SEQ ID NO: 173144 - RNA, 19 nt, Human
ggcgggggcgggcgccugg

SEQ ID NO: 173145 - RNA, 19 nt, Human
gggaaggaggguggccgug

SEQ ID NO: 173146 - RNA, 20 nt, Human
gggaaggaggguggccgugg

SEQ ID NO: 173147 - RNA, 20 nt, Human
gggacaggggacauccaggg

SEQ ID NO: 173148 - RNA, 23 nt, Human
gggacaggggacauccagggaag

SEQ ID NO: 173149 - RNA, 23 nt, Human
gggacaggggacauccagggggc

SEQ ID NO: 173150 - RNA, 26 nt, Human
gggacaggggacauccagggggcucc

SEQ ID NO: 173151 - RNA, 20 nt, Human
gggcaaggccacaggcagau

SEQ ID NO: 173152 - RNA, 20 nt, Human
gggcggcgggaaggagggug

SEQ ID NO: 173153 - RNA, 20 nt, Human
gggcggggcggggcgagggc

SEQ ID NO: 173154 - RNA, 23 nt, Human
gggcgggggcgggcgccugggcu

SEQ ID NO: 173155 - RNA, 21 nt, Human
gggcucggguaguagcagcag

SEQ ID NO: 173156 - RNA, 22 nt, Human
ggguggaggugggugcccaggg

SEQ ID NO: 173157 - RNA, 21 nt, Human
gguggaggugggugcccaggg

SEQ ID NO: 173158 - RNA, 19 nt, Human
gguggccagagcccggggc

SEQ ID NO: 173159 - RNA, 23 nt, Human
guaguagcagcagcgaggggcgg

SEQ ID NO: 173160 - RNA, 19 nt, Human
uagcagcagcgaggggcgg

SEQ ID NO: 173161 - RNA, 21 nt, Human
ucaauggucccggaguccucc

SEQ ID NO: 173162 - RNA, 21 nt, Human
ucacgugggugcucgccccuu

SEQ ID NO: 173163 - RNA, 22 nt, Human
ucccccuugucccucccuccca

SEQ ID NO: 173164 - RNA, 20 nt, Human
ucccgcauccccaucgccgg

SEQ ID NO: 173165 - RNA, 20 nt, Human
ucccggaguccucccgacuc

SEQ ID NO: 173166 - RNA, 20 nt, Human
ucccggaguccucccgacuc

SEQ ID NO: 173167 - RNA, 24 nt, Human
ucgccccuuuccucccccuugucc

SEQ ID NO: 173168 - RNA, 18 nt, Human
ucgcccuccgcgcucgca

SEQ ID NO: 173169 - RNA, 23 nt, Human
ucgcggagggcuccacuuccgcc

SEQ ID NO: 173170 - RNA, 19 nt, Human
ucucgggcaccugcgcugg

SEQ ID NO: 173171 - RNA, 22 nt, Human
ucuuauagcagagaggcugccu

SEQ ID NO: 173172 - RNA, 19 nt, Human
ugacaaggaaugucaagug

SEQ ID NO: 173173 - RNA, 21 nt, Human
ugaggcuggcgggcaaggcca

SEQ ID NO: 173174 - RNA, 18 nt, Human
ugcagcuccgcguagugc

SEQ ID NO: 173175 - RNA, 21 nt, Human
ugccccggcggccucgcgcgc

SEQ ID NO: 173176 - RNA, 19 nt, Human
ugccuacggguggcacggg

SEQ ID NO: 173177 - RNA, 18 nt, Human
ugcggggcggggccucgg

SEQ ID NO: 173178 - RNA, 22 nt, Human
uggcagggcauugagguuggga

SEQ ID NO: 173179 - RNA, 27 nt, Human
uggcggggguggaggugggucgacucc

SEQ ID NO: 173180 - RNA, 21 nt, Human
uggcggggguggaggugggug

SEQ ID NO: 173181 - RNA, 18 nt, Human
uguugggcuggagugagu

SEQ ID NO: 173182 - RNA, 18 nt, Human
uuuuuuuuuuuuuuuuug

SEQ ID NO: 173183 - RNA, 21 nt, Human
uuuuuuuuuuuuuuuuuggcu

SEQ ID NO: 173184 - RNA, 22 nt, Human
uuuuuuuuuuuuuuuuuuuggc

SEQ ID NO: 173185 - RNA, 21 nt, Human
aaaagaagaaggguacaggag

SEQ ID NO: 173186 - RNA, 22 nt, Human
aagaggcggcgggcucguggca

SEQ ID NO: 173187 - RNA, 22 nt, Human
accacaguuccugcuugccgcu

SEQ ID NO: 173188 - RNA, 21 nt, Human
acccagccucccaggcucccu

SEQ ID NO: 173189 - RNA, 22 nt, Human
accugcucagccccgugggucc

SEQ ID NO: 173190 - RNA, 21 nt, Human
agaaguuuccuguuugucuga

SEQ ID NO: 173191 - RNA, 19 nt, Human
agagcaggcccuaccagcc

SEQ ID NO: 173192 - RNA, 20 nt, Human
agccucugaccacaguuccu

SEQ ID NO: 173193 - RNA, 21 nt, Human
agcucgugggcgggaaggugc

SEQ ID NO: 173194 - RNA, 24 nt, Human
aggaaaagaagaaggguacaggag

SEQ ID NO: 173195 - RNA, 30 nt, Human
aggcggcgggcggcgaagaggcggcgggcu

SEQ ID NO: 173196 - RNA, 22 nt, Human
agggauagccucacuucaggug

SEQ ID NO: 173197 - RNA, 22 nt, Human
agggcuagccaggcaggccccu

SEQ ID NO: 173198 - RNA, 24 nt, Human
auagagcauaggaucagggagcug

SEQ ID NO: 173199 - RNA, 19 nt, Human
caagggucauuagugcccu

SEQ ID NO: 173200 - RNA, 21 nt, Human
cacccgggugacagaaaaggc

SEQ ID NO: 173201 - RNA, 20 nt, Human
cagggccccggcaacaugcc

SEQ ID NO: 173202 - RNA, 18 nt, Human
caggggccgcaagcagag

SEQ ID NO: 173203 - RNA, 21 nt, Human
ccagccaagacgcacagccuc

SEQ ID NO: 173204 - RNA, 21 nt, Human
cccuuuauagccgccuucugg

SEQ ID NO: 173205 - RNA, 19 nt, Human
ccgcccagggccccggcaa

SEQ ID NO: 173206 - RNA, 20 nt, Human
ccgccuucuggacaaucauu

SEQ ID NO: 173207 - RNA, 18 nt, Human
ccuaggaaaagaagaagg

SEQ ID NO: 173208 - RNA, 21 nt, Human
ccuccacccagccucccaggc

SEQ ID NO: 173209 - RNA, 19 nt, Human
ccugugggacguuggcagg

SEQ ID NO: 173210 - RNA, 20 nt, Human
cgcacgcggagcgggcgacc

SEQ ID NO: 173211 - RNA, 20 nt, Human
cggaggccccgcgcuucugg

SEQ ID NO: 173212 - RNA, 19 nt, Human
cggcaacaugccccggcuu

SEQ ID NO: 173213 - RNA, 21 nt, Human
cuaccagccaagacgcacagc

SEQ ID NO: 173214 - RNA, 21 nt, Human
cuccacccagccucccaggcu

SEQ ID NO: 173215 - RNA, 24 nt, Human
cuccacccagccucccaggcuccc

SEQ ID NO: 173216 - RNA, 21 nt, Human
cucccaggcucccuuuauagc

SEQ ID NO: 173217 - RNA, 19 nt, Human
cucccuccuccacccagcc

SEQ ID NO: 173218 - RNA, 18 nt, Human
cuccuccacccagccucc

SEQ ID NO: 173219 - RNA, 21 nt, Human
cugcucccuccuccacccagc

SEQ ID NO: 173220 - RNA, 19 nt, Human
cuggcagccagaggcucag

SEQ ID NO: 173221 - RNA, 23 nt, Human
cuggcagccagaggcucagccug

SEQ ID NO: 173222 - RNA, 21 nt, Human
cugguaggggagggccaggcg

SEQ ID NO: 173223 - RNA, 23 nt, Human
cuuaggacccagcagaagucaag

SEQ ID NO: 173224 - RNA, 22 nt, Human
gacagggccuaggaaaagaaga

SEQ ID NO: 173225 - RNA, 21 nt, Human
gaggagaggcggcgggcggcg

SEQ ID NO: 173226 - RNA, 22 nt, Human
gcagagcgugcagggggaaggc

SEQ ID NO: 173227 - RNA, 18 nt, Human
gcagccagaggcucagcc

SEQ ID NO: 173228 - RNA, 23 nt, Human
gcaggaaauaggagcuaacggag

SEQ ID NO: 173229 - RNA, 27 nt, Human
gcggcgggcggcgaagaggcggcgggc

SEQ ID NO: 173230 - RNA, 18 nt, Human
ggagaggaggagaggcgg

SEQ ID NO: 173231 - RNA, 23 nt, Human
ggcgggcggcgaagaggcggcgg

SEQ ID NO: 173232 - RNA, 20 nt, Human
gggaaccacgggggccgggg

SEQ ID NO: 173233 - RNA, 18 nt, Human
gggccaggcggcgggcgg

SEQ ID NO: 173234 - RNA, 18 nt, Human
gggccgggggugcaggag

SEQ ID NO: 173235 - RNA, 21 nt, Human
gggcgggagaggaggagaggc

SEQ ID NO: 173236 - RNA, 24 nt, Human
ggggaugggguaggaugcgggcag

SEQ ID NO: 173237 - RNA, 18 nt, Human
gggggccgggggugcagg

SEQ ID NO: 173238 - RNA, 22 nt, Human
ggugacagaaaaggcgcagaaa

SEQ ID NO: 173239 - RNA, 19 nt, Human
gugcagggggaaggccacc

SEQ ID NO: 173240 - RNA, 23 nt, Human
guguccugugggacguuggcagg

SEQ ID NO: 173241 - RNA, 25 nt, Human
guuuuuucugcucccuccuccaccc

SEQ ID NO: 173242 - RNA, 19 nt, Human
uagaaaagagcaggcccua

SEQ ID NO: 173243 - RNA, 19 nt, Human
uagagcauaggaucaggga

SEQ ID NO: 173244 - RNA, 21 nt, Human
uagccacugauaacuuccagc

SEQ ID NO: 173245 - RNA, 24 nt, Human
uagccacugauaacuuccagcgcc

SEQ ID NO: 173246 - RNA, 23 nt, Human
uaggacccagcagaagucaaggg

SEQ ID NO: 173247 - RNA, 23 nt, Human
uaggaucagggagcugggaccuc

SEQ ID NO: 173248 - RNA, 23 nt, Human
uauaacaagucaccuuuucuucc

SEQ ID NO: 173249 - RNA, 25 nt, Human
uauaacaagucaccuuuucuuccca

SEQ ID NO: 173250 - RNA, 19 nt, Human
ucaagggucauuagugccc

SEQ ID NO: 173251 - RNA, 21 nt, Human
ucagguggggaugggguagga

SEQ ID NO: 173252 - RNA, 20 nt, Human
uccacccagccucccaggcu

SEQ ID NO: 173253 - RNA, 22 nt, Human
ucccuggagucugagguauugg

SEQ ID NO: 173254 - RNA, 26 nt, Human
ucccuuuauagccgccuucuggacaa

SEQ ID NO: 173255 - RNA, 23 nt, Human
uccuccacccagccucccaggcu

SEQ ID NO: 173256 - RNA, 21 nt, Human
ucucacaguucccagaucugc

SEQ ID NO: 173257 - RNA, 18 nt, Human
ucugcucccuccuccacc

SEQ ID NO: 173258 - RNA, 24 nt, Human
ugacagaaaaggcgcagaaauggg

SEQ ID NO: 173259 - RNA, 21 nt, Human
ugagaaugauggccuccucuc

SEQ ID NO: 173260 - RNA, 22 nt, Human
ugagaaugauggccuccucucu

SEQ ID NO: 173261 - RNA, 23 nt, Human
ugcagggggaaggccaccguggg

SEQ ID NO: 173262 - RNA, 18 nt, Human
ugcggagaccacaggacu

SEQ ID NO: 173263 - RNA, 19 nt, Human
ugcggagaccacaggacug

SEQ ID NO: 173264 - RNA, 18 nt, Human
uggcaccugcucagcccc

SEQ ID NO: 173265 - RNA, 20 nt, Human
uggcagccagaggcucagcc

SEQ ID NO: 173266 - RNA, 18 nt, Human
ugggaaccacgggggccg

SEQ ID NO: 173267 - RNA, 24 nt, Human
ugggaccucacuagccacugauaa

SEQ ID NO: 173268 - RNA, 20 nt, Human
uggguccucacgcuacccag

SEQ ID NO: 173269 - RNA, 20 nt, Human
uggucagggacagcgccucc

SEQ ID NO: 173270 - RNA, 21 nt, Human
uguccugugggacguuggcag

SEQ ID NO: 173271 - RNA, 25 nt, Human
uguccugugggacguuggcaggggc

SEQ ID NO: 173272 - RNA, 22 nt, Human
uucagguggggaugggguagga

SEQ ID NO: 173273 - RNA, 23 nt, Human
uucccuggagucugagguauugg

SEQ ID NO: 173274 - RNA, 22 nt, Human
uuccuguuugucugaaggcagg

SEQ ID NO: 173275 - RNA, 23 nt, Human
uuuuucugcucccuccuccaccc

SEQ ID NO: 173276 - RNA, 22 nt, Human
uuuuuuuuuuuuuuuuuuucag

SEQ ID NO: 173277 - RNA, 26 nt, Human
aaagcuggcuccaggguuaggggcac

SEQ ID NO: 173278 - RNA, 18 nt, Human
accugggugaagagcugg

SEQ ID NO: 173279 - RNA, 24 nt, Human
agaaugugggcccggugggugggg

SEQ ID NO: 173280 - RNA, 20 nt, Human
agagcugggaugguuuugag

SEQ ID NO: 173281 - RNA, 27 nt, Human
agaggaagaggagaccugggugaagag

SEQ ID NO: 173282 - RNA, 19 nt, Human
agggaaugggguauuuuga

SEQ ID NO: 173283 - RNA, 21 nt, Human
augaaggagaacccggguggc

SEQ ID NO: 173284 - RNA, 18 nt, Human
caagccuccggcucugca

SEQ ID NO: 173285 - RNA, 18 nt, Human
cagaguaucucucucaug

SEQ ID NO: 173286 - RNA, 23 nt, Human
caugcuuuuucuugagcaggggc

SEQ ID NO: 173287 - RNA, 21 nt, Human
ccauguauauagccauuccca

SEQ ID NO: 173288 - RNA, 24 nt, Human
cucaggacaggggcuaggugagga

SEQ ID NO: 173289 - RNA, 20 nt, Human
cugaagcaguguagcucucc

SEQ ID NO: 173290 - RNA, 22 nt, Human
cugcagguguccucugaggccc

SEQ ID NO: 173291 - RNA, 21 nt, Human
cuguggcugggaaggaggggc

SEQ ID NO: 173292 - RNA, 24 nt, Human
gagacaaggugcgggggaguucug

SEQ ID NO: 173293 - RNA, 18 nt, Human
gcaagccuccggcucugc

SEQ ID NO: 173294 - RNA, 19 nt, Human
gccagcucaugcuuuuucu

SEQ ID NO: 173295 - RNA, 19 nt, Human
gcccgguggguggggcugg

SEQ ID NO: 173296 - RNA, 20 nt, Human
gcuccaggguuaggggcacc

SEQ ID NO: 173297 - RNA, 18 nt, Human
ggaccuggaagacggaga

SEQ ID NO: 173298 - RNA, 19 nt, Human
ggcccgguggguggggcug

SEQ ID NO: 173299 - RNA, 18 nt, Human
gggaguagauuucuccag

SEQ ID NO: 173300 - RNA, 20 nt, Human
gggcaggagaaggggccugg

SEQ ID NO: 173301 - RNA, 18 nt, Human
gggcuggggcaggagaag

SEQ ID NO: 173302 - RNA, 18 nt, Human
gggcuggggcaggagaag

SEQ ID NO: 173303 - RNA, 22 nt, Human
gggcuggggcuggggcaggaga

SEQ ID NO: 173304 - RNA, 18 nt, Human
ggggaugaaggagaaccc

SEQ ID NO: 173305 - RNA, 20 nt, Human
ggggcuggggcaggagaagg

SEQ ID NO: 173306 - RNA, 21 nt, Human
ggguggggcuggggcuggggc

SEQ ID NO: 173307 - RNA, 18 nt, Human
guggggcuggggcugggg

SEQ ID NO: 173308 - RNA, 20 nt, Human
uagccauucccacuucccaa

SEQ ID NO: 173309 - RNA, 23 nt, Human
uagcuguggcugggaaggagggg

SEQ ID NO: 173310 - RNA, 22 nt, Human
ucaccaaaugacugcuuggucc

SEQ ID NO: 173311 - RNA, 23 nt, Human
ucaccaaaugacugcuugguccc

SEQ ID NO: 173312 - RNA, 24 nt, Human
uccaccagaguaucucucucauga

SEQ ID NO: 173313 - RNA, 20 nt, Human
ucucucucaugaugguuucu

SEQ ID NO: 173314 - RNA, 19 nt, Human
ucugcaggugcgcccggga

SEQ ID NO: 173315 - RNA, 21 nt, Human
ugagggaaugggguauuuuga

SEQ ID NO: 173316 - RNA, 21 nt, Human
uggggcaggagaaggggccug

SEQ ID NO: 173317 - RNA, 23 nt, Human
uggggcuggggcaggagaagggg

SEQ ID NO: 173318 - RNA, 24 nt, Human
uguggauauguacaugugcauggu

SEQ ID NO: 173319 - RNA, 20 nt, Human
uguggcugggaaggaggggc

SEQ ID NO: 173320 - RNA, 21 nt, Human
uuauuugaacacaaaauacuu

SEQ ID NO: 173321 - RNA, 21 nt, Human
uucccacuucccauauucugu

SEQ ID NO: 173322 - RNA, 23 nt, Human
aacccccaggcccgcacacagcu

SEQ ID NO: 173323 - RNA, 21 nt, Human
aaccucagcuuucccaacuga

SEQ ID NO: 173324 - RNA, 23 nt, Human
acagagcagcccuccaggccccg

SEQ ID NO: 173325 - RNA, 23 nt, Human
acccgcggccccggcgacaaccu

SEQ ID NO: 173326 - RNA, 22 nt, Human
agccccggcccggcucaccucc

SEQ ID NO: 173327 - RNA, 23 nt, Human
agcccucugggcagccgggaagc

SEQ ID NO: 173328 - RNA, 22 nt, Human
agcucuccuagacacguugggg

SEQ ID NO: 173329 - RNA, 21 nt, Human
aggccggcgcgggcagccgac

SEQ ID NO: 173330 - RNA, 19 nt, Human
agugcccagcuccagguga

SEQ ID NO: 173331 - RNA, 23 nt, Human
caacccccaggcccgcacacagc

SEQ ID NO: 173332 - RNA, 18 nt, Human
caacgggcggacgaggag

SEQ ID NO: 173333 - RNA, 22 nt, Human
cacaggcucugcuucccugggg

SEQ ID NO: 173334 - RNA, 24 nt, Human
cacccccuucuccggugcugggaa

SEQ ID NO: 173335 - RNA, 24 nt, Human
caggcccagagccucccucgcuga

SEQ ID NO: 173336 - RNA, 28 nt, Human
caggugacacaugcaacccccugaaagg

SEQ ID NO: 173337 - RNA, 22 nt, Human
caggugcauaccccacaccucc

SEQ ID NO: 173338 - RNA, 25 nt, Human
cauccccgaccuccacccgcggccc

SEQ ID NO: 173339 - RNA, 21 nt, Human
caugcaacccccaggcccgca

SEQ ID NO: 173340 - RNA, 19 nt, Human
ccacaccuccaccugagca

SEQ ID NO: 173341 - RNA, 26 nt, Human
ccagagccucccucgcugaacaacgg

SEQ ID NO: 173342 - RNA, 19 nt, Human
cccacaccuccaccugagc

SEQ ID NO: 173343 - RNA, 21 nt, Human
ccccacaccuccaccugagca

SEQ ID NO: 173344 - RNA, 22 nt, Human
ccccacaccuccaccugagcac

SEQ ID NO: 173345 - RNA, 23 nt, Human
ccccaccgacccggcccgcgcuc

SEQ ID NO: 173346 - RNA, 19 nt, Human
cccccaggcccgcacacag

SEQ ID NO: 173347 - RNA, 22 nt, Human
ccccgcagccccggcccggcuc

SEQ ID NO: 173348 - RNA, 25 nt, Human
cccgaccuccacccgcggccccggc

SEQ ID NO: 173349 - RNA, 25 nt, Human
cccgcacacagcugcugcccgcaca

SEQ ID NO: 173350 - RNA, 22 nt, Human
cccgcuccgugccucaguuucc

SEQ ID NO: 173351 - RNA, 24 nt, Human
ccgcagccccggcccggcucaccu

SEQ ID NO: 173352 - RNA, 25 nt, Human
ccgcggccccggcgacaaccucagc

SEQ ID NO: 173353 - RNA, 24 nt, Human
ccggcaacaggugaggagggcaaa

SEQ ID NO: 173354 - RNA, 18 nt, Human
ccggcccggcucaccucc

SEQ ID NO: 173355 - RNA, 24 nt, Human
ccuaccugcugccucauccccgac

SEQ ID NO: 173356 - RNA, 22 nt, Human
ccucagcuuucccaacugagag

SEQ ID NO: 173357 - RNA, 25 nt, Human
cgacaaccucagcuuucccaacuga

SEQ ID NO: 173358 - RNA, 20 nt, Human
cgaccuccacccgcggcccc

SEQ ID NO: 173359 - RNA, 24 nt, Human
cgcgcacgcgcgcccuggccgccc

SEQ ID NO: 173360 - RNA, 22 nt, Human
cggcgacaaccucagcuuuccc

SEQ ID NO: 173361 - RNA, 22 nt, Human
cucagggaagccccgcagcccc

SEQ ID NO: 173362 - RNA, 24 nt, Human
cuccacccgcggccccggcgacaa

SEQ ID NO: 173363 - RNA, 21 nt, Human
cuccaccugagcacccccuuc

SEQ ID NO: 173364 - RNA, 24 nt, Human
cuccggggucgugcccgggggcgc

SEQ ID NO: 173365 - RNA, 18 nt, Human
cugaacaacgggcggacg

SEQ ID NO: 173366 - RNA, 18 nt, Human
cugagcacccccuucucc

SEQ ID NO: 173367 - RNA, 19 nt, Human
cugugaauuuuccugaguu

SEQ ID NO: 173368 - RNA, 24 nt, Human
gacaaccucagcuuucccaacuga

SEQ ID NO: 173369 - RNA, 28 nt, Human
gcagccccggcccggcucaccuccgcgc

SEQ ID NO: 173370 - RNA, 18 nt, Human
gcccagagccucccucgc

SEQ ID NO: 173371 - RNA, 23 nt, Human
gcccgggggcgcgcagaggcggg

SEQ ID NO: 173372 - RNA, 19 nt, Human
gccggcaacaggugaggag

SEQ ID NO: 173373 - RNA, 20 nt, Human
gccucauccccgaccuccac

SEQ ID NO: 173374 - RNA, 20 nt, Human
ggaccggcaggcauccagcc

SEQ ID NO: 173375 - RNA, 20 nt, Human
ggcccagagccucccucgcu

SEQ ID NO: 173376 - RNA, 23 nt, Human
gggaacagauggagggggguggc

SEQ ID NO: 173377 - RNA, 21 nt, Human
ggggaccggcaggcauccagc

SEQ ID NO: 173378 - RNA, 23 nt, Human
gugccucaguuuccccgucagcu

SEQ ID NO: 173379 - RNA, 22 nt, Human
guuggagauggccuggacagcu

SEQ ID NO: 173380 - RNA, 22 nt, Human
uaacacagagcagcccuccagg

SEQ ID NO: 173381 - RNA, 24 nt, Human
uaccccacaccuccaccugagcac

SEQ ID NO: 173382 - RNA, 22 nt, Human
ucaccuccgcgcacgcgcgccc

SEQ ID NO: 173383 - RNA, 21 nt, Human
ucacuguccuaccugcugccu

SEQ ID NO: 173384 - RNA, 21 nt, Human
ucccucgcugaacaacgggcu

SEQ ID NO: 173385 - RNA, 18 nt, Human
ucccuggggaaccagccu

SEQ ID NO: 173386 - RNA, 23 nt, Human
ucccuggggaaccagccucccuc

SEQ ID NO: 173387 - RNA, 23 nt, Human
uccgcgcacgcgcgcccuggccg

SEQ ID NO: 173388 - RNA, 22 nt, Human
uccugaguucccaggcuugcuc

SEQ ID NO: 173389 - RNA, 18 nt, Human
ucuggagagacuaacaca

SEQ ID NO: 173390 - RNA, 22 nt, Human
ugcaacccccaggcccgcacac

SEQ ID NO: 173391 - RNA, 22 nt, Human
ugcauaccccacaccuccaccu

SEQ ID NO: 173392 - RNA, 23 nt, Human
uggagggggguggcuaauacuac

SEQ ID NO: 173393 - RNA, 21 nt, Human
uggcuaauacuacccgcaugc

SEQ ID NO: 173394 - RNA, 18 nt, Human
ugggaacagauggagggg

SEQ ID NO: 173395 - RNA, 21 nt, Human
uuccaaaugccccuuuuauua

SEQ ID NO: 173396 - RNA, 21 nt, Human
uucccaggcuugcucggggac

SEQ ID NO: 173397 - RNA, 18 nt, Human
uugcucggggaccggcag

SEQ ID NO: 173398 - RNA, 19 nt, Human
uuuagaaucucccaagucc

SEQ ID NO: 173399 - RNA, 28 nt, Human
uuuagaaucucccaaguccugugaauuu

SEQ ID NO: 173400 - RNA, 18 nt, Human
uuuccugaguucccaggc

SEQ ID NO: 173401 - RNA, 22 nt, Human
aaacaggaaugaaaaaggggac

SEQ ID NO: 173402 - RNA, 20 nt, Human
aaaccagcguuucuuccagg

SEQ ID NO: 173403 - RNA, 21 nt, Human
aaaggccuuuuuuucccaaga

SEQ ID NO: 173404 - RNA, 25 nt, Human
aacaaauacacaacacaugccacca

SEQ ID NO: 173405 - RNA, 24 nt, Human
aacacacuccugucccacccaccg

SEQ ID NO: 173406 - RNA, 21 nt, Human
aacaugcucacauguuuaugg

SEQ ID NO: 173407 - RNA, 22 nt, Human
aacaugcucacauguuuauggg

SEQ ID NO: 173408 - RNA, 23 nt, Human
aacaugcucacauguuuauggga

SEQ ID NO: 173409 - RNA, 22 nt, Human
aaccacuaaagucaagcuagga

SEQ ID NO: 173410 - RNA, 18 nt, Human
aagaaguuacagaggagg

SEQ ID NO: 173411 - RNA, 22 nt, Human
aagacacaaguagccaacaaau

SEQ ID NO: 173412 - RNA, 20 nt, Human
aagcuaggaggggacugggg

SEQ ID NO: 173413 - RNA, 19 nt, Human
aaguacuuccucugcccuc

SEQ ID NO: 173414 - RNA, 24 nt, Human
aauccaccuucccugaucccccac

SEQ ID NO: 173415 - RNA, 26 nt, Human
acaccacacucccucccauauucccc

SEQ ID NO: 173416 - RNA, 25 nt, Human
acagaauaaauuaauaacuuaagug

SEQ ID NO: 173417 - RNA, 21 nt, Human
acagcccaugggcacaagcug

SEQ ID NO: 173418 - RNA, 19 nt, Human
acaugacagccuggaucuc

SEQ ID NO: 173419 - RNA, 18 nt, Human
accaaaggucuaauuccc

SEQ ID NO: 173420 - RNA, 22 nt, Human
accacagcaaaaacaugaccca

SEQ ID NO: 173421 - RNA, 22 nt, Human
accccaaucccccagaaagaag

SEQ ID NO: 173422 - RNA, 22 nt, Human
accccagaaacuggagacagca

SEQ ID NO: 173423 - RNA, 25 nt, Human
accccauuguggucccagguccuaa

SEQ ID NO: 173424 - RNA, 19 nt, Human
acucccucccauauucccc

SEQ ID NO: 173425 - RNA, 21 nt, Human
acucccucccauauuccccac

SEQ ID NO: 173426 - RNA, 19 nt, Human
agaaaaacaggaaugaaaa

SEQ ID NO: 173427 - RNA, 20 nt, Human
agaaacuggagacagcagcc

SEQ ID NO: 173428 - RNA, 23 nt, Human
agaauaaauuaauaacuuaagug

SEQ ID NO: 173429 - RNA, 22 nt, Human
agacaggcagaucaaggacuua

SEQ ID NO: 173430 - RNA, 22 nt, Human
agagaggagguggaugggagga

SEQ ID NO: 173431 - RNA, 18 nt, Human
agaggggagaggggagau

SEQ ID NO: 173432 - RNA, 24 nt, Human
agaggggagaggggagaugggaag

SEQ ID NO: 173433 - RNA, 26 nt, Human
agaggggagaggggagaugggaaggg

SEQ ID NO: 173434 - RNA, 20 nt, Human
agaggggagaugggaagggc

SEQ ID NO: 173435 - RNA, 20 nt, Human
agagguggacuuugacccau

SEQ ID NO: 173436 - RNA, 23 nt, Human
agaguagagaggagguggauggg

SEQ ID NO: 173437 - RNA, 22 nt, Human
agagugaaccagcacccugcca

SEQ ID NO: 173438 - RNA, 21 nt, Human
agaucaaggacuuaaggagac

SEQ ID NO: 173439 - RNA, 24 nt, Human
agcccuucccuccaaacaucuggu

SEQ ID NO: 173440 - RNA, 21 nt, Human
agcuaccaccacugcuuccau

SEQ ID NO: 173441 - RNA, 22 nt, Human
aggaaacacugggccggcacca

SEQ ID NO: 173442 - RNA, 22 nt, Human
aggagguggaugggaggaagaa

SEQ ID NO: 173443 - RNA, 19 nt, Human
aggcacucccuuuuccuag

SEQ ID NO: 173444 - RNA, 24 nt, Human
aggcccagauggggaaggaagaac

SEQ ID NO: 173445 - RNA, 21 nt, Human
aggcuccuuggagagccccag

SEQ ID NO: 173446 - RNA, 19 nt, Human
agguccacucacaucaugg

SEQ ID NO: 173447 - RNA, 22 nt, Human
agguggggcuggcgggggccuc

SEQ ID NO: 173448 - RNA, 20 nt, Human
auacgccacagcccaugggc

SEQ ID NO: 173449 - RNA, 24 nt, Human
augcugccuccugggcucugcggu

SEQ ID NO: 173450 - RNA, 20 nt, Human
augcuuuuuggaaguagcuc

SEQ ID NO: 173451 - RNA, 23 nt, Human
auggggcauacuuuguuaacuuc

SEQ ID NO: 173452 - RNA, 19 nt, Human
augguaacaagacaagaac

SEQ ID NO: 173453 - RNA, 19 nt, Human
augugucaccacagcaaaa

SEQ ID NO: 173454 - RNA, 21 nt, Human
caaaaggucaauuucaccucu

SEQ ID NO: 173455 - RNA, 18 nt, Human
caaaggccuuuuuuuccc

SEQ ID NO: 173456 - RNA, 26 nt, Human
caacaaauacacaacacaugccacca

SEQ ID NO: 173457 - RNA, 19 nt, Human
caagacaagaacucaagac

SEQ ID NO: 173458 - RNA, 21 nt, Human
caagacacaaguagccaacaa

SEQ ID NO: 173459 - RNA, 21 nt, Human
caagacacaaguagccaacag

SEQ ID NO: 173460 - RNA, 26 nt, Human
caagauggcuccuggaaugcuaggga

SEQ ID NO: 173461 - RNA, 18 nt, Human
caagcuaggaggggacug

SEQ ID NO: 173462 - RNA, 19 nt, Human
caaggacuuaaggagacac

SEQ ID NO: 173463 - RNA, 18 nt, Human
caagguggggcuggcggg

SEQ ID NO: 173464 - RNA, 18 nt, Human
cacacuccugucccaccc

SEQ ID NO: 173465 - RNA, 20 nt, Human
cacagcaaaaacaugaccca

SEQ ID NO: 173466 - RNA, 20 nt, Human
caccacagcaaaaacaugac

SEQ ID NO: 173467 - RNA, 20 nt, Human
caccacccgagcuccaagcc

SEQ ID NO: 173468 - RNA, 24 nt, Human
caccauaaaucacaugacagccug

SEQ ID NO: 173469 - RNA, 24 nt, Human
caccaugcacaccacucuugcacg

SEQ ID NO: 173470 - RNA, 19 nt, Human
caccccaaucccccagaaa

SEQ ID NO: 173471 - RNA, 21 nt, Human
caccccaaucccccagaaaga

SEQ ID NO: 173472 - RNA, 20 nt, Human
cacccugcacccccaaggau

SEQ ID NO: 173473 - RNA, 19 nt, Human
cacccugccaacucugccc

SEQ ID NO: 173474 - RNA, 18 nt, Human
cacucagaacaugcucac

SEQ ID NO: 173475 - RNA, 25 nt, Human
cacucccucccauauuccccacccc

SEQ ID NO: 173476 - RNA, 21 nt, Human
cacuccgcaggauaaaccagc

SEQ ID NO: 173477 - RNA, 18 nt, Human
cacugcacugcucacugc

SEQ ID NO: 173478 - RNA, 21 nt, Human
cagaaagacgaccccccacgg

SEQ ID NO: 173479 - RNA, 22 nt, Human
cagaacaugcucacauguuuau

SEQ ID NO: 173480 - RNA, 20 nt, Human
cagaggagggagucuccccu

SEQ ID NO: 173481 - RNA, 23 nt, Human
cagcgcagcuaauccaaccuccc

SEQ ID NO: 173482 - RNA, 22 nt, Human
cauacgccacagcccaugggcu

SEQ ID NO: 173483 - RNA, 23 nt, Human
cauccccuucuaaggccuaccuc

SEQ ID NO: 173484 - RNA, 21 nt, Human
caugccaccauaaaucacaug

SEQ ID NO: 173485 - RNA, 20 nt, Human
caugugucaccacagcaaaa

SEQ ID NO: 173486 - RNA, 22 nt, Human
ccaaaggucuaauucccucacu

SEQ ID NO: 173487 - RNA, 21 nt, Human
ccaaccucccauuccacagac

SEQ ID NO: 173488 - RNA, 19 nt, Human
ccaccacccgagcuccaag

SEQ ID NO: 173489 - RNA, 22 nt, Human
ccacucacaucauggcacacuc

SEQ ID NO: 173490 - RNA, 23 nt, Human
ccacuugaacacacuccuguccc

SEQ ID NO: 173491 - RNA, 19 nt, Human
ccagauggggaaggaagaa

SEQ ID NO: 173492 - RNA, 23 nt, Human
ccagcccuucccuccaaacaucu

SEQ ID NO: 173493 - RNA, 24 nt, Human
ccagcguuucuuccaggccuuuuc

SEQ ID NO: 173494 - RNA, 24 nt, Human
ccagguccuaaacagcagggcuaa

SEQ ID NO: 173495 - RNA, 18 nt, Human
ccauauuccccaccccuu

SEQ ID NO: 173496 - RNA, 22 nt, Human
ccaugcacaccacucuugcacg

SEQ ID NO: 173497 - RNA, 19 nt, Human
ccauuaauaaauacuccuu

SEQ ID NO: 173498 - RNA, 23 nt, Human
ccauuaauaaauacuccuugagu

SEQ ID NO: 173499 - RNA, 22 nt, Human
cccaacucccaggcccuuugga

SEQ ID NO: 173500 - RNA, 18 nt, Human
cccacaguguccuuguca

SEQ ID NO: 173501 - RNA, 20 nt, Human
cccacaguguccuugucauc

SEQ ID NO: 173502 - RNA, 24 nt, Human
cccacccaccggauaaauauguua

SEQ ID NO: 173503 - RNA, 21 nt, Human
cccagaaagacgaccccccac

SEQ ID NO: 173504 - RNA, 21 nt, Human
cccagcccuucccuccaaaca

SEQ ID NO: 173505 - RNA, 22 nt, Human
cccaggguuccccucagucccu

SEQ ID NO: 173506 - RNA, 18 nt, Human
cccauauuccccaccccu

SEQ ID NO: 173507 - RNA, 23 nt, Human
cccaugcuccaguaacuucagaa

SEQ ID NO: 173508 - RNA, 21 nt, Human
cccaugggcacaagcugucag

SEQ ID NO: 173509 - RNA, 19 nt, Human
ccccaaucccccagaaaga

SEQ ID NO: 173510 - RNA, 20 nt, Human
ccccacuugcuacauggccu

SEQ ID NO: 173511 - RNA, 24 nt, Human
ccccagaaacuggagacagcagcc

SEQ ID NO: 173512 - RNA, 19 nt, Human
ccccaugggagaaggggcc

SEQ ID NO: 173513 - RNA, 18 nt, Human
cccccauccacaccacac

SEQ ID NO: 173514 - RNA, 20 nt, Human
ccccugcacugcccugugcc

SEQ ID NO: 173515 - RNA, 19 nt, Human
cccuacacuugcacccgag

SEQ ID NO: 173516 - RNA, 20 nt, Human
cccucaagaccacugcugag

SEQ ID NO: 173517 - RNA, 21 nt, Human
cccugcauuuuaugaaggccc

SEQ ID NO: 173518 - RNA, 26 nt, Human
cccugcuccuugcugcucuagguugg

SEQ ID NO: 173519 - RNA, 21 nt, Human
ccuaaacagcagggcuagucc

SEQ ID NO: 173520 - RNA, 24 nt, Human
ccucaagaccacugcugagccucc

SEQ ID NO: 173521 - RNA, 20 nt, Human
ccuccacuggacccaagccc

SEQ ID NO: 173522 - RNA, 19 nt, Human
ccucucauccuuccaucuc

SEQ ID NO: 173523 - RNA, 21 nt, Human
ccucucauccuuccaucucua

SEQ ID NO: 173524 - RNA, 22 nt, Human
ccucuccuuccuucuuccucca

SEQ ID NO: 173525 - RNA, 21 nt, Human
ccugcaagcuccaagccugua

SEQ ID NO: 173526 - RNA, 22 nt, Human
ccugugagccagagcuuugcuu

SEQ ID NO: 173527 - RNA, 20 nt, Human
ccuuccaucucuaccccuac

SEQ ID NO: 173528 - RNA, 21 nt, Human
cgagcuccaagcccugcuccu

SEQ ID NO: 173529 - RNA, 20 nt, Human
cgcagcuaauccaaccuccc

SEQ ID NO: 173530 - RNA, 24 nt, Human
cggcagguaccccauugugguccc

SEQ ID NO: 173531 - RNA, 20 nt, Human
cuaauccaaccucccauucc

SEQ ID NO: 173532 - RNA, 22 nt, Human
cuaccaccacugcuuccauuca

SEQ ID NO: 173533 - RNA, 19 nt, Human
cuagcccauuuucucuucc

SEQ ID NO: 173534 - RNA, 24 nt, Human
cuaggaacgguccucaugucacac

SEQ ID NO: 173535 - RNA, 22 nt, Human
cuagucccagaaagacgacccc

SEQ ID NO: 173536 - RNA, 20 nt, Human
cucagcgcagcuaauccaac

SEQ ID NO: 173537 - RNA, 22 nt, Human
cucaugucacaccaccaugcac

SEQ ID NO: 173538 - RNA, 19 nt, Human
cuccacccugcacccccaa

SEQ ID NO: 173539 - RNA, 19 nt, Human
cuccacuggacccaagccc

SEQ ID NO: 173540 - RNA, 25 nt, Human
cucccaggcccuuuggauguauuuc

SEQ ID NO: 173541 - RNA, 21 nt, Human
cuccuuggagagccccaggca

SEQ ID NO: 173542 - RNA, 24 nt, Human
cucuccuuccuucuuccuccacug

SEQ ID NO: 173543 - RNA, 23 nt, Human
cucugcaccccacagcagcuguc

SEQ ID NO: 173544 - RNA, 19 nt, Human
cucuggaaaugggauaggg

SEQ ID NO: 173545 - RNA, 18 nt, Human
cucuugcacgugucccuc

SEQ ID NO: 173546 - RNA, 29 nt, Human
cugaaaggggaaugggggcagaggacagu

SEQ ID NO: 173547 - RNA, 19 nt, Human
cugcaagcuccaagccugu

SEQ ID NO: 173548 - RNA, 22 nt, Human
cugcaucacccccauccacacc

SEQ ID NO: 173549 - RNA, 19 nt, Human
cugguccuugacucccugg

SEQ ID NO: 173550 - RNA, 20 nt, Human
cuuccaucucuaccccuaca

SEQ ID NO: 173551 - RNA, 24 nt, Human
cuucuaaggccuaccucaggcacu

SEQ ID NO: 173552 - RNA, 18 nt, Human
cuucugccucugcacccc

SEQ ID NO: 173553 - RNA, 18 nt, Human
cuugucuucugggacuga

SEQ ID NO: 173554 - RNA, 18 nt, Human
cuuuccguaggcucagcc

SEQ ID NO: 173555 - RNA, 23 nt, Human
cuuucugcuccacccugcacccc

SEQ ID NO: 173556 - RNA, 20 nt, Human
cuuugucucaguuacuccuc

SEQ ID NO: 173557 - RNA, 19 nt, Human
gaaaccacuaaagucaagc

SEQ ID NO: 173558 - RNA, 18 nt, Human
gaaugggggcagaggaca

SEQ ID NO: 173559 - RNA, 22 nt, Human
gacugggcuuccacuagcccau

SEQ ID NO: 173560 - RNA, 18 nt, Human
gagcaacagagggcggau

SEQ ID NO: 173561 - RNA, 21 nt, Human
gagccccagcccuucccucca

SEQ ID NO: 173562 - RNA, 22 nt, Human
gagccccagcccuucccuccaa

SEQ ID NO: 173563 - RNA, 22 nt, Human
gaggagaggugcagcucuugaa

SEQ ID NO: 173564 - RNA, 21 nt, Human
gauguauuuccccacuugcua

SEQ ID NO: 173565 - RNA, 20 nt, Human
gcacugcucacugcaaagaa

SEQ ID NO: 173566 - RNA, 20 nt, Human
gccggcaccaggccagacuc

SEQ ID NO: 173567 - RNA, 19 nt, Human
gcuccaagccuguaccaug

SEQ ID NO: 173568 - RNA, 20 nt, Human
gcugaaggaugcuuuuugga

SEQ ID NO: 173569 - RNA, 18 nt, Human
gcugagccuccgucucca

SEQ ID NO: 173570 - RNA, 18 nt, Human
gcugccuccugggcucug

SEQ ID NO: 173571 - RNA, 23 nt, Human
gcuggaaggaagccuccugggag

SEQ ID NO: 173572 - RNA, 21 nt, Human
ggaacgguccucaugucacac

SEQ ID NO: 173573 - RNA, 22 nt, Human
ggagaaggggccagagggagga

SEQ ID NO: 173574 - RNA, 18 nt, Human
ggagaugggaagggccag

SEQ ID NO: 173575 - RNA, 18 nt, Human
ggagcugaaaggggaaug

SEQ ID NO: 173576 - RNA, 23 nt, Human
ggaggagaggugcagcucuugaa

SEQ ID NO: 173577 - RNA, 23 nt, Human
ggagggaagauagcugagggcug

SEQ ID NO: 173578 - RNA, 18 nt, Human
ggccugugugaagcagug

SEQ ID NO: 173579 - RNA, 22 nt, Human
ggccuuucaaaccuggggagga

SEQ ID NO: 173580 - RNA, 18 nt, Human
ggcuggaaggaagccucc

SEQ ID NO: 173581 - RNA, 18 nt, Human
ggcuggaaggaagccucc

SEQ ID NO: 173582 - RNA, 18 nt, Human
gggauaggggugcugggc

SEQ ID NO: 173583 - RNA, 21 nt, Human
gggcaccccccaacucccagg

SEQ ID NO: 173584 - RNA, 18 nt, Human
gggggccucugaggggac

SEQ ID NO: 173585 - RNA, 27 nt, Human
gggggcuggaaggaagccuccugggag

SEQ ID NO: 173586 - RNA, 22 nt, Human
gguguggaaucuggcucagagc

SEQ ID NO: 173587 - RNA, 18 nt, Human
uaaaaacauucagauccc

SEQ ID NO: 173588 - RNA, 21 nt, Human
uaaaaacauucagauccccca

SEQ ID NO: 173589 - RNA, 23 nt, Human
uaaacagcagggcuagucccaga

SEQ ID NO: 173590 - RNA, 18 nt, Human
uaaaggacaggaagaggc

SEQ ID NO: 173591 - RNA, 25 nt, Human
uaacaagacaagaacucaagacugg

SEQ ID NO: 173592 - RNA, 23 nt, Human
uaagguggguggaggcauggcca

SEQ ID NO: 173593 - RNA, 23 nt, Human
uaauccaaccucccauuccacag

SEQ ID NO: 173594 - RNA, 27 nt, Human
uacacaacacaugccaccauaaaucac

SEQ ID NO: 173595 - RNA, 22 nt, Human
uaccaaaggucuaauucccuca

SEQ ID NO: 173596 - RNA, 20 nt, Human
uaugcugcuuucaagguggg

SEQ ID NO: 173597 - RNA, 19 nt, Human
ucagggagaaggucugauu

SEQ ID NO: 173598 - RNA, 18 nt, Human
ucaguccucuccaggccc

SEQ ID NO: 173599 - RNA, 22 nt, Human
uccaccacccgagcuccaagcc

SEQ ID NO: 173600 - RNA, 21 nt, Human
uccacccugcacccccaagga

SEQ ID NO: 173601 - RNA, 19 nt, Human
uccaccuucccugaucccc

SEQ ID NO: 173602 - RNA, 25 nt, Human
uccacugcacugcucacugcaaaga

SEQ ID NO: 173603 - RNA, 23 nt, Human
uccagaguucuggggacccagac

SEQ ID NO: 173604 - RNA, 19 nt, Human
uccagccagguccacucac

SEQ ID NO: 173605 - RNA, 18 nt, Human
uccgucuccaccaucucc

SEQ ID NO: 173606 - RNA, 21 nt, Human
uccuaacuaagguggguggag

SEQ ID NO: 173607 - RNA, 23 nt, Human
uccugccauggccucagccucaa

SEQ ID NO: 173608 - RNA, 21 nt, Human
uccugggcucugcgguggccc

SEQ ID NO: 173609 - RNA, 21 nt, Human
uccuugacucccuggguuggu

SEQ ID NO: 173610 - RNA, 26 nt, Human
uccuugacucccuggguuggugagac

SEQ ID NO: 173611 - RNA, 28 nt, Human
uccuugcugcucuagguugggguggaac

SEQ ID NO: 173612 - RNA, 23 nt, Human
uccuuggagagccccaggcaggg

SEQ ID NO: 173613 - RNA, 20 nt, Human
uccuuuuguccuucaucuuc

SEQ ID NO: 173614 - RNA, 21 nt, Human
ucgccccaggguagaaugaaa

SEQ ID NO: 173615 - RNA, 21 nt, Human
ucuccaccacccgagcuccaa

SEQ ID NO: 173616 - RNA, 18 nt, Human
ucuccuuccuucuuccuc

SEQ ID NO: 173617 - RNA, 24 nt, Human
ucugcaccccacagcagcuguccu

SEQ ID NO: 173618 - RNA, 18 nt, Human
ucugcccaguguagcuac

SEQ ID NO: 173619 - RNA, 18 nt, Human
ucuggagaugcugccucc

SEQ ID NO: 173620 - RNA, 20 nt, Human
ugaaaauuuagucaagaaca

SEQ ID NO: 173621 - RNA, 25 nt, Human
ugaaauaauucuagauuucaagaca

SEQ ID NO: 173622 - RNA, 19 nt, Human
ugacaccaaccucccuaag

SEQ ID NO: 173623 - RNA, 21 nt, Human
ugacagccuggaucucuuggg

SEQ ID NO: 173624 - RNA, 20 nt, Human
ugacccauggauaggccaaa

SEQ ID NO: 173625 - RNA, 21 nt, Human
ugacuccuuuguuggaggagg

SEQ ID NO: 173626 - RNA, 22 nt, Human
ugacuuaaccuugcagaagugg

SEQ ID NO: 173627 - RNA, 21 nt, Human
ugagacuugucuucugggacu

SEQ ID NO: 173628 - RNA, 19 nt, Human
ugagcaccagcuguggaug

SEQ ID NO: 173629 - RNA, 19 nt, Human
ugagcugagcccaugcucc

SEQ ID NO: 173630 - RNA, 19 nt, Human
ugaucaggcccucaccucc

SEQ ID NO: 173631 - RNA, 19 nt, Human
ugauugauucuuguguccu

SEQ ID NO: 173632 - RNA, 22 nt, Human
ugauuugaaaauuaaaugucaa

SEQ ID NO: 173633 - RNA, 27 nt, Human
ugcaaagaaacucacuucccgacccca

SEQ ID NO: 173634 - RNA, 21 nt, Human
ugcacugcucacugcaaagaa

SEQ ID NO: 173635 - RNA, 18 nt, Human
ugcccgacuuccacugca

SEQ ID NO: 173636 - RNA, 22 nt, Human
ugcccugcuuucuccuuguccu

SEQ ID NO: 173637 - RNA, 22 nt, Human
ugcucaaaggccuuuuuuuccc

SEQ ID NO: 173638 - RNA, 21 nt, Human
ugcuccacccugcacccccaa

SEQ ID NO: 173639 - RNA, 22 nt, Human
ugcugccuccugggcucugcgg

SEQ ID NO: 173640 - RNA, 18 nt, Human
ugcugcucuagguuggcc

SEQ ID NO: 173641 - RNA, 24 nt, Human
ugcuucucuccugccaagaaaaac

SEQ ID NO: 173642 - RNA, 21 nt, Human
uggaagugggugaagaaggcu

SEQ ID NO: 173643 - RNA, 20 nt, Human
uggaggguggggauaugcua

SEQ ID NO: 173644 - RNA, 21 nt, Human
uggaggguggggauaugcuag

SEQ ID NO: 173645 - RNA, 24 nt, Human
uggaugggaggaagaacgggagag

SEQ ID NO: 173646 - RNA, 18 nt, Human
uggcagaguagagaggag

SEQ ID NO: 173647 - RNA, 20 nt, Human
uggcaggaagucauuguuug

SEQ ID NO: 173648 - RNA, 21 nt, Human
uggcaggaagucauuguuugg

SEQ ID NO: 173649 - RNA, 22 nt, Human
uggccaucaguuuucccuuccu

SEQ ID NO: 173650 - RNA, 21 nt, Human
uggcuccuggaaugcuaggga

SEQ ID NO: 173651 - RNA, 22 nt, Human
uggcugcugcggguacagggaa

SEQ ID NO: 173652 - RNA, 18 nt, Human
uggcuggacccauaugcu

SEQ ID NO: 173653 - RNA, 24 nt, Human
ugggagcugaaaggggaauggggg

SEQ ID NO: 173654 - RNA, 18 nt, Human
ugggcaccccccaacucc

SEQ ID NO: 173655 - RNA, 27 nt, Human
ugggcagaggaggugccuugaucaggc

SEQ ID NO: 173656 - RNA, 24 nt, Human
uggggaggagaguccaagauggag

SEQ ID NO: 173657 - RNA, 25 nt, Human
uggggaggagaguccaagauggcuc

SEQ ID NO: 173658 - RNA, 23 nt, Human
uggggcuggcgggggccucugag

SEQ ID NO: 173659 - RNA, 20 nt, Human
uggggugcauuucuagugga

SEQ ID NO: 173660 - RNA, 23 nt, Human
uggguuggugagacuugucuucu

SEQ ID NO: 173661 - RNA, 19 nt, Human
ugguaguuuggggccugug

SEQ ID NO: 173662 - RNA, 24 nt, Human
uguccuguugcuucugaaacucuu

SEQ ID NO: 173663 - RNA, 23 nt, Human
ugugaagcagugcugagugggaa

SEQ ID NO: 173664 - RNA, 19 nt, Human
uuagagaauggcuaggcca

SEQ ID NO: 173665 - RNA, 21 nt, Human
uucaagacacaaguagccaac

SEQ ID NO: 173666 - RNA, 23 nt, Human
uucacuuauuggaacaccaaggc

SEQ ID NO: 173667 - RNA, 21 nt, Human
uucagaaugguugugcuuuug

SEQ ID NO: 173668 - RNA, 23 nt, Human
uucagggcugggcagagugaacc

SEQ ID NO: 173669 - RNA, 26 nt, Human
uuccacugcacugcucacugcaaaga

SEQ ID NO: 173670 - RNA, 22 nt, Human
uucgccccaggguagaaugaaa

SEQ ID NO: 173671 - RNA, 20 nt, Human
uugacccauggauaggccaa

SEQ ID NO: 173672 - RNA, 22 nt, Human
uugacuccuuuguuggaggagg

SEQ ID NO: 173673 - RNA, 20 nt, Human
uugcugcucuagguuggccc

SEQ ID NO: 173674 - RNA, 23 nt, Human
uuuaccauguguuccugccccau

SEQ ID NO: 173675 - RNA, 28 nt, Human
uuuguuaacuucuacauuggaaaccacc

SEQ ID NO: 173676 - RNA, 22 nt, Human
aaaagauccaaauucacaagag

SEQ ID NO: 173677 - RNA, 20 nt, Human
aaacauuuuaagaaagacuu

SEQ ID NO: 173678 - RNA, 26 nt, Human
aagcagcagagaggggaaacaguuau

SEQ ID NO: 173679 - RNA, 22 nt, Human
aagccagacuguuuccuagaga

SEQ ID NO: 173680 - RNA, 24 nt, Human
aaggaucagucccacuccggaauc

SEQ ID NO: 173681 - RNA, 21 nt, Human
acuccagggccggcugaagaa

SEQ ID NO: 173682 - RNA, 22 nt, Human
agacuguacagccuagaaauaa

SEQ ID NO: 173683 - RNA, 22 nt, Human
agcaacaucuaaagcagcagag

SEQ ID NO: 173684 - RNA, 20 nt, Human
agcgucucuccggguaagac

SEQ ID NO: 173685 - RNA, 20 nt, Human
agggcuacacauuaauacug

SEQ ID NO: 173686 - RNA, 24 nt, Human
cacaaugaaccugccuucacacug

SEQ ID NO: 173687 - RNA, 22 nt, Human
cagcagagaggggaaacaguua

SEQ ID NO: 173688 - RNA, 23 nt, Human
ccacgugcagcgucucuccgggu

SEQ ID NO: 173689 - RNA, 24 nt, Human
ccagggccggcugaagaacggcag

SEQ ID NO: 173690 - RNA, 21 nt, Human
cccugucgcccccgcccgcac

SEQ ID NO: 173691 - RNA, 24 nt, Human
cccugucgcccccgcccgcacucc

SEQ ID NO: 173692 - RNA, 24 nt, Human
ccuucacacugcagacauugugga

SEQ ID NO: 173693 - RNA, 22 nt, Human
cggcccugucgcccccgcccgc

SEQ ID NO: 173694 - RNA, 19 nt, Human
cuucacacugcagacauug

SEQ ID NO: 173695 - RNA, 19 nt, Human
gaacggcagcggcgagggc

SEQ ID NO: 173696 - RNA, 22 nt, Human
gcccugucgcccccgcccgcac

SEQ ID NO: 173697 - RNA, 20 nt, Human
gcccugucgcccccgcccgg

SEQ ID NO: 173698 - RNA, 22 nt, Human
guagggcuacacauuaauacug

SEQ ID NO: 173699 - RNA, 23 nt, Human
uaaagcagcagagaggggaaaca

SEQ ID NO: 173700 - RNA, 22 nt, Human
uaagaaagacuuuggagucuca

SEQ ID NO: 173701 - RNA, 21 nt, Human
uacagccuagaaauaaaagaa

SEQ ID NO: 173702 - RNA, 23 nt, Human
ucaaaaauaguuaagccagacug

SEQ ID NO: 173703 - RNA, 24 nt, Human
ucagucccacuccggaaucggccc

SEQ ID NO: 173704 - RNA, 22 nt, Human
ucucuccggguaagaccugcag

SEQ ID NO: 173705 - RNA, 24 nt, Human
uucaaauucaguaauaaagguaag

SEQ ID NO: 173706 - RNA, 24 nt, Human
uuuggagucucagaauguccuggg

SEQ ID NO: 173707 - RNA, 26 nt, Human
uuuggagucucagaauguccuggggc

SEQ ID NO: 173708 - RNA, 24 nt, Human
aaaaaaaaaaaacuauuuacagaa

SEQ ID NO: 173709 - RNA, 21 nt, Human
aaaaaaagaaaaagugaacag

SEQ ID NO: 173710 - RNA, 20 nt, Human
aaaaaagcacagauuuugca

SEQ ID NO: 173711 - RNA, 21 nt, Human
aaaaagauauuuaauugcaaa

SEQ ID NO: 173712 - RNA, 21 nt, Human
aaaacacugaaaaauaaagca

SEQ ID NO: 173713 - RNA, 25 nt, Human
aaacaguucauaaagcaauaaaaca

SEQ ID NO: 173714 - RNA, 22 nt, Human
aaagggguuuuguuuuuguuuu

SEQ ID NO: 173715 - RNA, 19 nt, Human
aaaucuucucuucauacag

SEQ ID NO: 173716 - RNA, 22 nt, Human
aagaaaaagggguuugaaguaa

SEQ ID NO: 173717 - RNA, 19 nt, Human
aagaaaaagugaacagucu

SEQ ID NO: 173718 - RNA, 19 nt, Human
aagcgcuucagcugcacag

SEQ ID NO: 173719 - RNA, 24 nt, Human
acacaacuuaaagcuguacaaaga

SEQ ID NO: 173720 - RNA, 23 nt, Human
aggagguggugcggggacccgag

SEQ ID NO: 173721 - RNA, 20 nt, Human
aggcagcaggagguggugcg

SEQ ID NO: 173722 - RNA, 23 nt, Human
aggcagcaggagguggugcgggg

SEQ ID NO: 173723 - RNA, 19 nt, Human
agggcgcuauuuuccgaaa

SEQ ID NO: 173724 - RNA, 27 nt, Human
auaaaacaugcagaauauguacaaaca

SEQ ID NO: 173725 - RNA, 22 nt, Human
caaaaagaauucacaaaaacag

SEQ ID NO: 173726 - RNA, 23 nt, Human
caaaaagaauucacaaaaacagu

SEQ ID NO: 173727 - RNA, 25 nt, Human
caaaauagaaaaguaggccagagua

SEQ ID NO: 173728 - RNA, 18 nt, Human
cacugaaaaauaaagcaa

SEQ ID NO: 173729 - RNA, 18 nt, Human
cagcugccagcuuacuuc

SEQ ID NO: 173730 - RNA, 21 nt, Human
cccgaggcgccucguacccgg

SEQ ID NO: 173731 - RNA, 24 nt, Human
cccgcuacacacaaagcgcuucag

SEQ ID NO: 173732 - RNA, 21 nt, Human
cgaggcgccucguacccggcc

SEQ ID NO: 173733 - RNA, 23 nt, Human
cuggaaaagcuucgggagcggcg

SEQ ID NO: 173734 - RNA, 19 nt, Human
gaacagucugccaguguuu

SEQ ID NO: 173735 - RNA, 22 nt, Human
gacacugagcuuucaaaaggaa

SEQ ID NO: 173736 - RNA, 20 nt, Human
gagcaagucauagcacagac

SEQ ID NO: 173737 - RNA, 22 nt, Human
guacaaacagaaauuuuuaaaa

SEQ ID NO: 173738 - RNA, 21 nt, Human
uaaaauauuucagaaacccau

SEQ ID NO: 173739 - RNA, 19 nt, Human
uaaccaacaacgaucaccc

SEQ ID NO: 173740 - RNA, 23 nt, Human
uaaccuagagggauuucaggguu

SEQ ID NO: 173741 - RNA, 19 nt, Human
uacauguaaaucuacuugg

SEQ ID NO: 173742 - RNA, 20 nt, Human
uaccaaaaaaaaaaaaagaa

SEQ ID NO: 173743 - RNA, 22 nt, Human
uauacaguauagauaaccuaga

SEQ ID NO: 173744 - RNA, 21 nt, Human
uaucuuguaggcugcuccuuc

SEQ ID NO: 173745 - RNA, 22 nt, Human
ucaaaaagaauucacaaaaaca

SEQ ID NO: 173746 - RNA, 23 nt, Human
ucagagaaucugacacaacuuaa

SEQ ID NO: 173747 - RNA, 26 nt, Human
ucaguccaccauaauuauuacacaac

SEQ ID NO: 173748 - RNA, 21 nt, Human
ucauuuggaacuguaaaaaaa

SEQ ID NO: 173749 - RNA, 20 nt, Human
uccauacauuguggaauuca

SEQ ID NO: 173750 - RNA, 20 nt, Human
ucccauggcuguaccuuugu

SEQ ID NO: 173751 - RNA, 22 nt, Human
uccguaagaaucguuuccuggg

SEQ ID NO: 173752 - RNA, 20 nt, Human
ugaaaaauaaagcaagaaaa

SEQ ID NO: 173753 - RNA, 24 nt, Human
ugcagaauuggcaaauucaaguua

SEQ ID NO: 173754 - RNA, 23 nt, Human
ugcauuggguuuuccaaaaacau

SEQ ID NO: 173755 - RNA, 23 nt, Human
uggaacuguaaaaaaaaaaaaac

SEQ ID NO: 173756 - RNA, 18 nt, Human
uggaucucuucaacaauc

SEQ ID NO: 173757 - RNA, 18 nt, Human
uggccuaaccaacaacga

SEQ ID NO: 173758 - RNA, 23 nt, Human
ugggagaaaucuucucuucauac

SEQ ID NO: 173759 - RNA, 20 nt, Human
ugguuuuggaucucuucaac

SEQ ID NO: 173760 - RNA, 23 nt, Human
uguacuaaaaucaaaaagaauuc

SEQ ID NO: 173761 - RNA, 18 nt, Human
uguccauacauuguggaa

SEQ ID NO: 173762 - RNA, 19 nt, Human
uguccauacauuguggaau

SEQ ID NO: 173763 - RNA, 26 nt, Human
uguggaauucaacaauauugugauga

SEQ ID NO: 173764 - RNA, 22 nt, Human
uuaucuuguaggcugcuccuuc

SEQ ID NO: 173765 - RNA, 23 nt, Human
uucaggguuaaacaguucauaaa

SEQ ID NO: 173766 - RNA, 22 nt, Human
uucaucauuucugugggagaaa

SEQ ID NO: 173767 - RNA, 24 nt, Human
uucaucauuucugugggagaaaua

SEQ ID NO: 173768 - RNA, 24 nt, Human
uucgggagcggcgacgggaaggca

SEQ ID NO: 173769 - RNA, 23 nt, Human
uugaaauuauaaaacaugcagaa

SEQ ID NO: 173770 - RNA, 23 nt, Human
uuggaacuguaaaaaaaaaaaaa

SEQ ID NO: 173771 - RNA, 21 nt, Human
uuggaucucuucaacaaucuu

SEQ ID NO: 173772 - RNA, 26 nt, Human
uuuaccaaaaaaaaaaaaagaaaaaa

SEQ ID NO: 173773 - RNA, 18 nt, Human
uuuguuuuuguuuuuuuc

SEQ ID NO: 173774 - RNA, 18 nt, Human
aggaaacuuucaaauucu

SEQ ID NO: 173775 - RNA, 21 nt, Human
aggcaauaaaggcagauggga

SEQ ID NO: 173776 - RNA, 24 nt, Human
ccaaauuugcuucccaauauccaa

SEQ ID NO: 173777 - RNA, 26 nt, Human
ccaaauuugcuucccaauauccaauc

SEQ ID NO: 173778 - RNA, 21 nt, Human
ccagagcagaggggcguccuc

SEQ ID NO: 173779 - RNA, 19 nt, Human
ccagugcagaggaacugaa

SEQ ID NO: 173780 - RNA, 23 nt, Human
cguugagaacauaaauaaauucc

SEQ ID NO: 173781 - RNA, 19 nt, Human
cugaagauuucacacccaa

SEQ ID NO: 173782 - RNA, 23 nt, Human
cugaagauuucacacccaaauuu

SEQ ID NO: 173783 - RNA, 23 nt, Human
cuggagcagcuaaggcccccucu

SEQ ID NO: 173784 - RNA, 24 nt, Human
gaaucguggagagacuggagccag

SEQ ID NO: 173785 - RNA, 23 nt, Human
gagaaucguggagagacuggagc

SEQ ID NO: 173786 - RNA, 18 nt, Human
gcagaggggcguccucgc

SEQ ID NO: 173787 - RNA, 23 nt, Human
gccagagcagaggggcguccucg

SEQ ID NO: 173788 - RNA, 18 nt, Human
gcgaguccgaguccgggc

SEQ ID NO: 173789 - RNA, 24 nt, Human
gcguccucgcucugccucucacuc

SEQ ID NO: 173790 - RNA, 19 nt, Human
ggagagacuggagccagcg

SEQ ID NO: 173791 - RNA, 21 nt, Human
uaaauaaauucccagugcaga

SEQ ID NO: 173792 - RNA, 23 nt, Human
uaugaaaauaaggaaacuuucaa

SEQ ID NO: 173793 - RNA, 24 nt, Human
uccucgcucugccucucacucacu

SEQ ID NO: 173794 - RNA, 20 nt, Human
uggaggcaacuguuugucua

SEQ ID NO: 173795 - RNA, 23 nt, Human
uuggaggcaacuguuugucuaug

SEQ ID NO: 173796 - RNA, 19 nt, Human
aaaaaggcaauggcuguuu

SEQ ID NO: 173797 - RNA, 23 nt, Human
aaauaccccuacuuaagagcuaa

SEQ ID NO: 173798 - RNA, 23 nt, Human
acuucaaaggauucaucuaggaa

SEQ ID NO: 173799 - RNA, 23 nt, Human
agagagagaccgagacugcagca

SEQ ID NO: 173800 - RNA, 18 nt, Human
aggauccccauuuucauc

SEQ ID NO: 173801 - RNA, 23 nt, Human
auggagugcuuucugucugcagu

SEQ ID NO: 173802 - RNA, 22 nt, Human
caacaguagaaaauaccccuac

SEQ ID NO: 173803 - RNA, 20 nt, Human
caagagagcguggagcgaug

SEQ ID NO: 173804 - RNA, 20 nt, Human
cagacuguacauagcaaaac

SEQ ID NO: 173805 - RNA, 21 nt, Human
cauuuucaucucauuuggaag

SEQ ID NO: 173806 - RNA, 21 nt, Human
cgcucugaaacggcaagcaga

SEQ ID NO: 173807 - RNA, 24 nt, Human
cgguguuuucuucuuuugcccuuu

SEQ ID NO: 173808 - RNA, 24 nt, Human
cuaggaaugacaauguuaucuucc

SEQ ID NO: 173809 - RNA, 21 nt, Human
cuauauacauacuguacaugg

SEQ ID NO: 173810 - RNA, 22 nt, Human
gagauaggaaacuugggagaga

SEQ ID NO: 173811 - RNA, 20 nt, Human
uaaaccaaaaggguccacaa

SEQ ID NO: 173812 - RNA, 18 nt, Human
uacauguuggaucacaaa

SEQ ID NO: 173813 - RNA, 24 nt, Human
uagaaaauaccccuacuuaagagc

SEQ ID NO: 173814 - RNA, 27 nt, Human
uauguacauggcuauagauacuauaua

SEQ ID NO: 173815 - RNA, 19 nt, Human
ucaaaggauucaucuagga

SEQ ID NO: 173816 - RNA, 21 nt, Human
ucauuuggaagaauaggaaau

SEQ ID NO: 173817 - RNA, 19 nt, Human
ucuuuugcccugaucuuga

SEQ ID NO: 173818 - RNA, 23 nt, Human
ugaacagagcugaugucagauac

SEQ ID NO: 173819 - RNA, 23 nt, Human
ugacgagauaggaaacuugggag

SEQ ID NO: 173820 - RNA, 25 nt, Human
ugcagcagccaagagagcguggagc

SEQ ID NO: 173821 - RNA, 19 nt, Human
uggaagaauaggaaauuaa

SEQ ID NO: 173822 - RNA, 23 nt, Human
uggaagccggagaggagcgcuaa

SEQ ID NO: 173823 - RNA, 20 nt, Human
uggagcgaugggcuggugga

SEQ ID NO: 173824 - RNA, 23 nt, Human
uggcuauagauacuauauagagu

SEQ ID NO: 173825 - RNA, 22 nt, Human
uguaccaagcuuccaauuacau

SEQ ID NO: 173826 - RNA, 22 nt, Human
aaacuuggagagaccgagcucu

SEQ ID NO: 173827 - RNA, 21 nt, Human
ugagcggaaaggagagaagga

SEQ ID NO: 173828 - RNA, 22 nt, Human
ugagcggaaaggagagaaggau

SEQ ID NO: 173829 - RNA, 24 nt, Human
ugggugccuggaugcuucacgggg

SEQ ID NO: 173830 - RNA, 23 nt, Human
aacacuugaagcaguuaaaaaua

SEQ ID NO: 173831 - RNA, 24 nt, Human
aacaugcaaaaauuuccugaaaga

SEQ ID NO: 173832 - RNA, 20 nt, Human
aagaucaugcaguacuuucc

SEQ ID NO: 173833 - RNA, 23 nt, Human
auuuauucacugggaaaauuugu

SEQ ID NO: 173834 - RNA, 19 nt, Human
ccgccaccaccaccgacuu

SEQ ID NO: 173835 - RNA, 21 nt, Human
ccgccaccaccaccgacuugg

SEQ ID NO: 173836 - RNA, 23 nt, Human
cuaauaaucauggagaguuuccu

SEQ ID NO: 173837 - RNA, 19 nt, Human
uaaauguccaaguuuccuc

SEQ ID NO: 173838 - RNA, 19 nt, Human
uacauauagaaacaucaag

SEQ ID NO: 173839 - RNA, 23 nt, Human
uauucacugggaaaauuuguaug

SEQ ID NO: 173840 - RNA, 21 nt, Human
ucguauccuguuuuuccagaa

SEQ ID NO: 173841 - RNA, 24 nt, Human
ugucuuggaguuugggaguguggc

SEQ ID NO: 173842 - RNA, 22 nt, Human
uucagaacaguaagaauuauca

SEQ ID NO: 173843 - RNA, 23 nt, Human
acagaaaacaagaacuuauagaa

SEQ ID NO: 173844 - RNA, 20 nt, Human
agaaaacauaggaaacagaa

SEQ ID NO: 173845 - RNA, 18 nt, Human
agucauauuuuucagcaa

SEQ ID NO: 173846 - RNA, 21 nt, Human
auaggaaacagaaaacaagaa

SEQ ID NO: 173847 - RNA, 21 nt, Human
cccacacaugcuuacagaagc

SEQ ID NO: 173848 - RNA, 18 nt, Human
cugaacaauggaagacaa

SEQ ID NO: 173849 - RNA, 20 nt, Human
guuacagauuuccaauuuga

SEQ ID NO: 173850 - RNA, 21 nt, Human
guuacagauuuccaauuugau

SEQ ID NO: 173851 - RNA, 22 nt, Human
uauuuuucagcaaucuucaacu

SEQ ID NO: 173852 - RNA, 20 nt, Human
ucagcaaucuucaacuuucu

SEQ ID NO: 173853 - RNA, 21 nt, Human
ugaggaguaggauuauugcuu

SEQ ID NO: 173854 - RNA, 23 nt, Human
uuaaaaauacugaacaauggaag

SEQ ID NO: 173855 - RNA, 21 nt, Human
uuucuuuuuuuuuugccuuga

SEQ ID NO: 173856 - RNA, 25 nt, Human
aaagacugcuaaagaucuaccuguc

SEQ ID NO: 173857 - RNA, 23 nt, Human
aacugauaugcaagaccuaaaac

SEQ ID NO: 173858 - RNA, 26 nt, Human
aaguaaacauggugcaguaauaaaac

SEQ ID NO: 173859 - RNA, 22 nt, Human
aaucagugaaauccagggaaac

SEQ ID NO: 173860 - RNA, 24 nt, Human
aauuuuuuuuuuguuuugucuuuu

SEQ ID NO: 173861 - RNA, 19 nt, Human
accuggaccacgguagacu

SEQ ID NO: 173862 - RNA, 23 nt, Human
agaggaaaguagucuaaauggaa

SEQ ID NO: 173863 - RNA, 23 nt, Human
agcaguaucgcuguuggggacug

SEQ ID NO: 173864 - RNA, 20 nt, Human
aggaaaguagucuaaaugga

SEQ ID NO: 173865 - RNA, 24 nt, Human
agguccucuuuucauuuucccuaa

SEQ ID NO: 173866 - RNA, 22 nt, Human
cagggaaacuagaaaagacugc

SEQ ID NO: 173867 - RNA, 21 nt, Human
ccugucuaacuucucucuuug

SEQ ID NO: 173868 - RNA, 19 nt, Human
cggacagcaagguccucuu

SEQ ID NO: 173869 - RNA, 18 nt, Human
cuaaagaucuaccugucu

SEQ ID NO: 173870 - RNA, 19 nt, Human
cuagaaaagacugcuaaag

SEQ ID NO: 173871 - RNA, 22 nt, Human
gaaaagacugcuaaagaucuac

SEQ ID NO: 173872 - RNA, 20 nt, Human
gggaaacuagaaaagacugc

SEQ ID NO: 173873 - RNA, 20 nt, Human
guccucuuuucauuuucccu

SEQ ID NO: 173874 - RNA, 22 nt, Human
uaaaacugauaugcaagaccua

SEQ ID NO: 173875 - RNA, 23 nt, Human
uaaaagaauugucuuuucugcga

SEQ ID NO: 173876 - RNA, 23 nt, Human
uaaccuggaccacgguagacugg

SEQ ID NO: 173877 - RNA, 19 nt, Human
uaccaggaagcagugcagg

SEQ ID NO: 173878 - RNA, 18 nt, Human
uaccucgagaaacagcag

SEQ ID NO: 173879 - RNA, 18 nt, Human
ucaaggaaugcaacuuag

SEQ ID NO: 173880 - RNA, 24 nt, Human
ucccuaaaaaauaaaucagugaaa

SEQ ID NO: 173881 - RNA, 24 nt, Human
ugauaugcaagaccuaaaaccaau

SEQ ID NO: 173882 - RNA, 23 nt, Human
ugcaagaccuaaaaccaauugga

SEQ ID NO: 173883 - RNA, 19 nt, Human
ugcaggcggacagcaaggu

SEQ ID NO: 173884 - RNA, 20 nt, Human
uggcugaaucucuuaccucu

SEQ ID NO: 173885 - RNA, 20 nt, Human
uguuuugucuuuuugaagua

SEQ ID NO: 173886 - RNA, 21 nt, Human
aacuuagucugcccagugcag

SEQ ID NO: 173887 - RNA, 19 nt, Human
acaucaaaggggaagcgcg

SEQ ID NO: 173888 - RNA, 21 nt, Human
aguuuuugauggaauugaggg

SEQ ID NO: 173889 - RNA, 25 nt, Human
ccaaaacaucaaaggggaagcgcgg

SEQ ID NO: 173890 - RNA, 18 nt, Human
ccucuucuucccuucccc

SEQ ID NO: 173891 - RNA, 18 nt, Human
ccuugcuuccagugggag

SEQ ID NO: 173892 - RNA, 18 nt, Human
ccuugcuuccagugggag

SEQ ID NO: 173893 - RNA, 23 nt, Human
cgcauggccacggcguaccaaaa

SEQ ID NO: 173894 - RNA, 20 nt, Human
gaggcacuguguucucccgc

SEQ ID NO: 173895 - RNA, 23 nt, Human
gaggcgcauggccacggcguacc

SEQ ID NO: 173896 - RNA, 18 nt, Human
uaccaaaacaucaaaggg

SEQ ID NO: 173897 - RNA, 19 nt, Human
uaccaaaacaucaaagggg

SEQ ID NO: 173898 - RNA, 21 nt, Human
uaccaaaacaucaaaggggaa

SEQ ID NO: 173899 - RNA, 19 nt, Human
uacuugcguuuuaacugga

SEQ ID NO: 173900 - RNA, 19 nt, Human
uaugaaauggaccacagga

SEQ ID NO: 173901 - RNA, 19 nt, Human
uaugaaauggaccacagga

SEQ ID NO: 173902 - RNA, 22 nt, Human
uauucauuacuuagcagaagca

SEQ ID NO: 173903 - RNA, 18 nt, Human
ucccgcggucucugcgcc

SEQ ID NO: 173904 - RNA, 21 nt, Human
ucccgcggucucugcgccacc

SEQ ID NO: 173905 - RNA, 22 nt, Human
ucugcgccaccucguccucuuc

SEQ ID NO: 173906 - RNA, 23 nt, Human
ugaaauggaccacaggauaggcc

SEQ ID NO: 173907 - RNA, 23 nt, Human
ugaaauggaccacaggauaggcc

SEQ ID NO: 173908 - RNA, 24 nt, Human
ugaaauggaccacaggauaggcca

SEQ ID NO: 173909 - RNA, 24 nt, Human
ugaaauggaccacaggauaggcca

SEQ ID NO: 173910 - RNA, 21 nt, Human
ugcgccaccucguccucuucu

SEQ ID NO: 173911 - RNA, 21 nt, Human
uggccacggcguaccaaaaca

SEQ ID NO: 173912 - RNA, 22 nt, Human
ugguaugaaauggaccacagga

SEQ ID NO: 173913 - RNA, 22 nt, Human
ugguaugaaauggaccacagga

SEQ ID NO: 173914 - RNA, 23 nt, Human
uuaguuuuugauggaauugaggg

SEQ ID NO: 173915 - RNA, 20 nt, Human
uucauuacuuagcagaagca

SEQ ID NO: 173916 - RNA, 25 nt, Human
uuuuugauggaauugaggguuucac

SEQ ID NO: 173917 - RNA, 20 nt, Human
aaacuugacaggcagaguaa

SEQ ID NO: 173918 - RNA, 22 nt, Human
augugugugucugcuugugugu

SEQ ID NO: 173919 - RNA, 23 nt, Human
cagaguaauauuucacucagugu

SEQ ID NO: 173920 - RNA, 21 nt, Human
ccccgccgccgucgcgacccg

SEQ ID NO: 173921 - RNA, 23 nt, Human
cccgcagccggggcugcuccugc

SEQ ID NO: 173922 - RNA, 18 nt, Human
ccgccgccgccgccgccg

SEQ ID NO: 173923 - RNA, 18 nt, Human
ccgccgccgccgccgcgc

SEQ ID NO: 173924 - RNA, 26 nt, Human
ccgccgccgccgccgcgcuggcccgg

SEQ ID NO: 173925 - RNA, 21 nt, Human
ccgcuguccccccuacucucc

SEQ ID NO: 173926 - RNA, 20 nt, Human
ccggagcggaggagggcgga

SEQ ID NO: 173927 - RNA, 22 nt, Human
ccggagcggaggagggcggagg

SEQ ID NO: 173928 - RNA, 20 nt, Human
cgccccgccgccgucgcgac

SEQ ID NO: 173929 - RNA, 20 nt, Human
cgccgccgccgccgccgcgc

SEQ ID NO: 173930 - RNA, 21 nt, Human
cgggggagggggcgccccgcc

SEQ ID NO: 173931 - RNA, 19 nt, Human
cguauguauauaugugugu

SEQ ID NO: 173932 - RNA, 22 nt, Human
gauccgcuguccccccuacucu

SEQ ID NO: 173933 - RNA, 22 nt, Human
gcguauguauauaugugugugu

SEQ ID NO: 173934 - RNA, 22 nt, Human
gcugccgccgccgccgccgccg

SEQ ID NO: 173935 - RNA, 22 nt, Human
gcugcugccgccgccgccgccg

SEQ ID NO: 173936 - RNA, 21 nt, Human
ggaggagggcggagggggagg

SEQ ID NO: 173937 - RNA, 20 nt, Human
ggcccggagcggaggagggc

SEQ ID NO: 173938 - RNA, 22 nt, Human
ggcccggagcggaggagggccg

SEQ ID NO: 173939 - RNA, 21 nt, Human
gggcugcuccugcugcugccg

SEQ ID NO: 173940 - RNA, 18 nt, Human
guauguauauaugugugu

SEQ ID NO: 173941 - RNA, 21 nt, Human
gugugucugcuugugugucug

SEQ ID NO: 173942 - RNA, 22 nt, Human
uauacaauugcguauguauaua

SEQ ID NO: 173943 - RNA, 25 nt, Human
uauacaauugcguauguauauaugu

SEQ ID NO: 173944 - RNA, 22 nt, Human
uauauacaauugcguauguaua

SEQ ID NO: 173945 - RNA, 23 nt, Human
uauaugugugugucugcuugugu

SEQ ID NO: 173946 - RNA, 19 nt, Human
uauguauauaugugugugu

SEQ ID NO: 173947 - RNA, 21 nt, Human
uccugcugcugccgccgccgc

SEQ ID NO: 173948 - RNA, 21 nt, Human
ugcguauguauauaugugugu

SEQ ID NO: 173949 - RNA, 21 nt, Human
ugcguauguauauaugugugu

SEQ ID NO: 173950 - RNA, 21 nt, Human
ugcuccugcugcugccgccgc

SEQ ID NO: 173951 - RNA, 23 nt, Human
uggcccggagcggaggagggcgg

SEQ ID NO: 173952 - RNA, 18 nt, Human
ugugucuguguguguaca

SEQ ID NO: 173953 - RNA, 22 nt, Human
ugugucuguguguguacaggua

SEQ ID NO: 173954 - RNA, 19 nt, Human
uguguguacagguauaaaa

SEQ ID NO: 173955 - RNA, 20 nt, Human
ugugugugucugcuugugug

SEQ ID NO: 173956 - RNA, 22 nt, Human
ugugugugucugcuuguguguc

SEQ ID NO: 173957 - RNA, 23 nt, Human
uucacauauauauacaauugcgu

SEQ ID NO: 173958 - RNA, 21 nt, Human
aaaauagauacccauuggaug

SEQ ID NO: 173959 - RNA, 25 nt, Human
aaaccaagaccuagauuuuaaaaga

SEQ ID NO: 173960 - RNA, 23 nt, Human
aaauaggcucucuugcugccccc

SEQ ID NO: 173961 - RNA, 19 nt, Human
aaauguuaaaggccaucug

SEQ ID NO: 173962 - RNA, 24 nt, Human
aagaaaaaaucaacaaaaccaaga

SEQ ID NO: 173963 - RNA, 25 nt, Human
aagaaaaagaagaagauuaguaaga

SEQ ID NO: 173964 - RNA, 19 nt, Human
aaggugacagugggcucuu

SEQ ID NO: 173965 - RNA, 19 nt, Human
aaggugacagugggcucuu

SEQ ID NO: 173966 - RNA, 18 nt, Human
aaguuuucaacacaaaac

SEQ ID NO: 173967 - RNA, 21 nt, Human
aauuucuuuaaaaccuugcug

SEQ ID NO: 173968 - RNA, 20 nt, Human
acaaaaauagauacccauug

SEQ ID NO: 173969 - RNA, 24 nt, Human
acacaaaaauagauacccauugga

SEQ ID NO: 173970 - RNA, 24 nt, Human
acacugagcaucacggaugcuccu

SEQ ID NO: 173971 - RNA, 21 nt, Human
acccacagacagccauccagg

SEQ ID NO: 173972 - RNA, 21 nt, Human
accccacccuauccacccccc

SEQ ID NO: 173973 - RNA, 21 nt, Human
accccacccuauccacccccc

SEQ ID NO: 173974 - RNA, 23 nt, Human
accccacccuauccaccccccaa

SEQ ID NO: 173975 - RNA, 23 nt, Human
accccacccuauccaccccccaa

SEQ ID NO: 173976 - RNA, 18 nt, Human
acccuauccaccccccaa

SEQ ID NO: 173977 - RNA, 18 nt, Human
acccuauccaccccccaa

SEQ ID NO: 173978 - RNA, 19 nt, Human
accuccuggggaacuggag

SEQ ID NO: 173979 - RNA, 24 nt, Human
acuacagccaggagagauuugauc

SEQ ID NO: 173980 - RNA, 24 nt, Human
acuacagccaggagagauuugauc

SEQ ID NO: 173981 - RNA, 25 nt, Human
agaaaaagaagaagauuaguaagaa

SEQ ID NO: 173982 - RNA, 19 nt, Human
agaagaagauuaguaagaa

SEQ ID NO: 173983 - RNA, 19 nt, Human
agaaggugacagugggcuc

SEQ ID NO: 173984 - RNA, 19 nt, Human
agaaggugacagugggcuc

SEQ ID NO: 173985 - RNA, 25 nt, Human
agacaacaucacgggaagaggcuuc

SEQ ID NO: 173986 - RNA, 25 nt, Human
agacaacaucacgggaagaggcuuc

SEQ ID NO: 173987 - RNA, 22 nt, Human
agaccccacccuauccaccccc

SEQ ID NO: 173988 - RNA, 22 nt, Human
agaccccacccuauccaccccc

SEQ ID NO: 173989 - RNA, 24 nt, Human
agacgaaagauggagccagcaagg

SEQ ID NO: 173990 - RNA, 21 nt, Human
agagaaagggguagcagggag

SEQ ID NO: 173991 - RNA, 19 nt, Human
agagagaggaccaaggcug

SEQ ID NO: 173992 - RNA, 19 nt, Human
agagagaggaccaaggcug

SEQ ID NO: 173993 - RNA, 22 nt, Human
agaggaccaaggcuguugacgg

SEQ ID NO: 173994 - RNA, 20 nt, Human
agaggcuggggcugggggcc

SEQ ID NO: 173995 - RNA, 20 nt, Human
agaggcuggggcugggggcc

SEQ ID NO: 173996 - RNA, 26 nt, Human
agaugucacaaggcuaucaugaagcu

SEQ ID NO: 173997 - RNA, 26 nt, Human
agaugucacaaggcuaucaugaagcu

SEQ ID NO: 173998 - RNA, 23 nt, Human
agcaaagacaaacccucugcaag

SEQ ID NO: 173999 - RNA, 20 nt, Human
agccaagaaaaagaagaaga

SEQ ID NO: 174000 - RNA, 24 nt, Human
agccaagaaaaagaagaagauuag

SEQ ID NO: 174001 - RNA, 18 nt, Human
agccagagcggccucucc

SEQ ID NO: 174002 - RNA, 19 nt, Human
aggaagucaccaaggccua

SEQ ID NO: 174003 - RNA, 19 nt, Human
aggaagucaccaaggccua

SEQ ID NO: 174004 - RNA, 18 nt, Human
aggagagggagaugucac

SEQ ID NO: 174005 - RNA, 18 nt, Human
aggaggacuggaagaacu

SEQ ID NO: 174006 - RNA, 25 nt, Human
aggaguccuccacccacagacagcc

SEQ ID NO: 174007 - RNA, 18 nt, Human
aggccagaacugggccga

SEQ ID NO: 174008 - RNA, 20 nt, Human
aggccagaacugggccgaaa

SEQ ID NO: 174009 - RNA, 19 nt, Human
aggcuaaagagcagccuuu

SEQ ID NO: 174010 - RNA, 19 nt, Human
aggcucucuugcugccccc

SEQ ID NO: 174011 - RNA, 24 nt, Human
agucacaggggucaaagagaagga

SEQ ID NO: 174012 - RNA, 30 nt, Human
agucgcuccugcugcugcugcugcuuuccc

SEQ ID NO: 174013 - RNA, 23 nt, Human
agugaccacagugggcuucucuc

SEQ ID NO: 174014 - RNA, 24 nt, Human
aguuuguggucauaauuacucagg

SEQ ID NO: 174015 - RNA, 26 nt, Human
auggagccagcaaggagagggagaug

SEQ ID NO: 174016 - RNA, 21 nt, Human
auggggcaggaaaaacucuag

SEQ ID NO: 174017 - RNA, 19 nt, Human
auuucuuuaaaaccuugcu

SEQ ID NO: 174018 - RNA, 22 nt, Human
caaaaaguagauggagacccca

SEQ ID NO: 174019 - RNA, 22 nt, Human
caaaaaguagauggagacccca

SEQ ID NO: 174020 - RNA, 23 nt, Human
caaaaauagauacccauuggaug

SEQ ID NO: 174021 - RNA, 25 nt, Human
caaaaauagauacccauuggaugaa

SEQ ID NO: 174022 - RNA, 26 nt, Human
caaaccaaaacaaguuuucaacacaa

SEQ ID NO: 174023 - RNA, 26 nt, Human
caacucugcucccagucucagucuca

SEQ ID NO: 174024 - RNA, 19 nt, Human
caauggcgaguaaugccug

SEQ ID NO: 174025 - RNA, 19 nt, Human
caauggcgaguaaugccug

SEQ ID NO: 174026 - RNA, 20 nt, Human
cacaacuugucaaaagugcu

SEQ ID NO: 174027 - RNA, 20 nt, Human
cacaacuugucaaaagugcu

SEQ ID NO: 174028 - RNA, 18 nt, Human
cacacacaaaaauagaua

SEQ ID NO: 174029 - RNA, 19 nt, Human
cacacacaaaaauagauac

SEQ ID NO: 174030 - RNA, 22 nt, Human
cacagccaugcaccacagccaa

SEQ ID NO: 174031 - RNA, 24 nt, Human
caccaaccaggagugaggagcagg

SEQ ID NO: 174032 - RNA, 18 nt, Human
caccucaggcccagaaau

SEQ ID NO: 174033 - RNA, 22 nt, Human
cacugagcaucacggaugcucc

SEQ ID NO: 174034 - RNA, 20 nt, Human
cacuggguuacuacagccag

SEQ ID NO: 174035 - RNA, 20 nt, Human
cacuggguuacuacagccag

SEQ ID NO: 174036 - RNA, 18 nt, Human
cagaagagaaucauggug

SEQ ID NO: 174037 - RNA, 18 nt, Human
cagaagagaaucauggug

SEQ ID NO: 174038 - RNA, 18 nt, Human
cagagcggccucucccag

SEQ ID NO: 174039 - RNA, 18 nt, Human
cagcaaagacaaacccuc

SEQ ID NO: 174040 - RNA, 20 nt, Human
cagcaaagacaaacccucug

SEQ ID NO: 174041 - RNA, 24 nt, Human
cagcagcagagagagaggaaugcu

SEQ ID NO: 174042 - RNA, 20 nt, Human
cagccauccaggaacuggcu

SEQ ID NO: 174043 - RNA, 23 nt, Human
caggaaaggcaggaguccuccac

SEQ ID NO: 174044 - RNA, 23 nt, Human
cagggcugagaggaaaagccaga

SEQ ID NO: 174045 - RNA, 24 nt, Human
caggggaaggggaugaagggaagg

SEQ ID NO: 174046 - RNA, 22 nt, Human
cagugggcuucucuccaaugcc

SEQ ID NO: 174047 - RNA, 22 nt, Human
caugcaccacagccaagaaaaa

SEQ ID NO: 174048 - RNA, 18 nt, Human
ccacagacagccauccag

SEQ ID NO: 174049 - RNA, 26 nt, Human
ccacccacagacagccauccaggaac

SEQ ID NO: 174050 - RNA, 21 nt, Human
ccacccuauccaccccccaac

SEQ ID NO: 174051 - RNA, 21 nt, Human
ccacccuauccaccccccaac

SEQ ID NO: 174052 - RNA, 22 nt, Human
ccacccuauccaccccccaaca

SEQ ID NO: 174053 - RNA, 22 nt, Human
ccacccuauccaccccccaaca

SEQ ID NO: 174054 - RNA, 23 nt, Human
ccagaggcuggggcugggguacc

SEQ ID NO: 174055 - RNA, 23 nt, Human
ccagaggcuggggcugggguacc

SEQ ID NO: 174056 - RNA, 19 nt, Human
cccacccuauccacccccc

SEQ ID NO: 174057 - RNA, 19 nt, Human
cccacccuauccacccccc

SEQ ID NO: 174058 - RNA, 21 nt, Human
cccacccuauccaccccccaa

SEQ ID NO: 174059 - RNA, 21 nt, Human
cccacccuauccaccccccaa

SEQ ID NO: 174060 - RNA, 22 nt, Human
cccaggaagucaccaaggccua

SEQ ID NO: 174061 - RNA, 22 nt, Human
cccaggaagucaccaaggccua

SEQ ID NO: 174062 - RNA, 20 nt, Human
ccccacccuauccacccccc

SEQ ID NO: 174063 - RNA, 20 nt, Human
ccccacccuauccacccccc

SEQ ID NO: 174064 - RNA, 23 nt, Human
ccccacccuauccaccccccaac

SEQ ID NO: 174065 - RNA, 23 nt, Human
ccccacccuauccaccccccaac

SEQ ID NO: 174066 - RNA, 24 nt, Human
ccccacccuauccaccccccaaca

SEQ ID NO: 174067 - RNA, 24 nt, Human
ccccacccuauccaccccccaaca

SEQ ID NO: 174068 - RNA, 21 nt, Human
ccccagcuagugccucuuggg

SEQ ID NO: 174069 - RNA, 23 nt, Human
ccccaggaagucaccaaggccua

SEQ ID NO: 174070 - RNA, 23 nt, Human
ccccaggaagucaccaaggccua

SEQ ID NO: 174071 - RNA, 24 nt, Human
ccccaggaagucaccaaggccuag

SEQ ID NO: 174072 - RNA, 24 nt, Human
ccccaggaagucaccaaggccuag

SEQ ID NO: 174073 - RNA, 21 nt, Human
cccugagcuccacagccaugc

SEQ ID NO: 174074 - RNA, 22 nt, Human
ccucaggcccagaaauugagcu

SEQ ID NO: 174075 - RNA, 22 nt, Human
ccucaggcccagaaauugagcu

SEQ ID NO: 174076 - RNA, 18 nt, Human
ccuccuguuauacugcug

SEQ ID NO: 174077 - RNA, 21 nt, Human
ccucugcaagcuucuguuugg

SEQ ID NO: 174078 - RNA, 20 nt, Human
ccucuugggacagaagcaaa

SEQ ID NO: 174079 - RNA, 25 nt, Human
ccucuugggacagaagcaaaccaaa

SEQ ID NO: 174080 - RNA, 25 nt, Human
ccucuuuuaugaucacucuuuuauu

SEQ ID NO: 174081 - RNA, 25 nt, Human
ccuggucagggcuaggggaagucac

SEQ ID NO: 174082 - RNA, 20 nt, Human
ccuugcugcucuuuggggac

SEQ ID NO: 174083 - RNA, 18 nt, Human
cgaaagcacuacaaaggc

SEQ ID NO: 174084 - RNA, 19 nt, Human
cggagaccggcgcgaccac

SEQ ID NO: 174085 - RNA, 22 nt, Human
cggagaucucaacagugaccac

SEQ ID NO: 174086 - RNA, 22 nt, Human
cggagaucucaacagugaccac

SEQ ID NO: 174087 - RNA, 23 nt, Human
cuacagccaggagagauuugauc

SEQ ID NO: 174088 - RNA, 22 nt, Human
cucaggguuuucaucuccuaag

SEQ ID NO: 174089 - RNA, 23 nt, Human
cucaggguuuucaucuccuaagg

SEQ ID NO: 174090 - RNA, 23 nt, Human
cucaggguuuucaucuccuaagg

SEQ ID NO: 174091 - RNA, 22 nt, Human
cuccaaucagacacaacuuguc

SEQ ID NO: 174092 - RNA, 22 nt, Human
cuccaaucagacacaacuuguc

SEQ ID NO: 174093 - RNA, 23 nt, Human
cuccacagccaugcaccacagcc

SEQ ID NO: 174094 - RNA, 23 nt, Human
cucugcucccagucucagucuca

SEQ ID NO: 174095 - RNA, 21 nt, Human
cugcaagcuucuguuugggga

SEQ ID NO: 174096 - RNA, 20 nt, Human
cugcagagaaagggguagca

SEQ ID NO: 174097 - RNA, 21 nt, Human
cugggucagggcuaggggaag

SEQ ID NO: 174098 - RNA, 24 nt, Human
cuucucuguauacauguucucgac

SEQ ID NO: 174099 - RNA, 22 nt, Human
cuugaagaagagggagguggcc

SEQ ID NO: 174100 - RNA, 18 nt, Human
gaaaaacucuagucgcuc

SEQ ID NO: 174101 - RNA, 18 nt, Human
gaaagcacuacaaaggca

SEQ ID NO: 174102 - RNA, 18 nt, Human
gaaagcacugcaaaggca

SEQ ID NO: 174103 - RNA, 26 nt, Human
gaaaggcaggaguccuccacccacaa

SEQ ID NO: 174104 - RNA, 19 nt, Human
gaacacugagcaucacgga

SEQ ID NO: 174105 - RNA, 22 nt, Human
gaagggaaggaggcuaaagagc

SEQ ID NO: 174106 - RNA, 24 nt, Human
gaccccacccuauccaccccccaa

SEQ ID NO: 174107 - RNA, 24 nt, Human
gaccccacccuauccaccccccaa

SEQ ID NO: 174108 - RNA, 23 nt, Human
gagagagaacugagaacauaaua

SEQ ID NO: 174109 - RNA, 21 nt, Human
gagcaccucaggcccagaaau

SEQ ID NO: 174110 - RNA, 21 nt, Human
gagcaccucaggcccagaaau

SEQ ID NO: 174111 - RNA, 24 nt, Human
gaggcuaaagagcagccuuugugg

SEQ ID NO: 174112 - RNA, 22 nt, Human
gaggucgcggcucacgcucugg

SEQ ID NO: 174113 - RNA, 20 nt, Human
gauagagagaggaccaaggc

SEQ ID NO: 174114 - RNA, 20 nt, Human
gauagagagaggaccaaggc

SEQ ID NO: 174115 - RNA, 21 nt, Human
gaucucuuccuccuguuauac

SEQ ID NO: 174116 - RNA, 23 nt, Human
gcaaagacaaacccucugcaagc

SEQ ID NO: 174117 - RNA, 21 nt, Human
gcaaagccgaguuuccuuagu

SEQ ID NO: 174118 - RNA, 21 nt, Human
gcaaagccgaguuuccuuagu

SEQ ID NO: 174119 - RNA, 20 nt, Human
gcccagaaauugagcuaaag

SEQ ID NO: 174120 - RNA, 20 nt, Human
gcccagaaauugagcuaaag

SEQ ID NO: 174121 - RNA, 23 nt, Human
gcccagaaauugagcuaaagaga

SEQ ID NO: 174122 - RNA, 23 nt, Human
gcccagaaauugagcuaaagaga

SEQ ID NO: 174123 - RNA, 21 nt, Human
gccuuggccucuagucagccu

SEQ ID NO: 174124 - RNA, 20 nt, Human
gcgcgaccaccugcgcggag

SEQ ID NO: 174125 - RNA, 26 nt, Human
gcuccugcugcugcugcugcuuuccc

SEQ ID NO: 174126 - RNA, 24 nt, Human
ggagagagaacugagaacauaaua

SEQ ID NO: 174127 - RNA, 21 nt, Human
ggagaucucaacagugaccac

SEQ ID NO: 174128 - RNA, 20 nt, Human
ggaggcagugacaaaggggg

SEQ ID NO: 174129 - RNA, 21 nt, Human
ggaggcagugacaaagggggc

SEQ ID NO: 174130 - RNA, 23 nt, Human
ggaguccacccugagcuccacag

SEQ ID NO: 174131 - RNA, 21 nt, Human
ggagugaggagcaggcagagg

SEQ ID NO: 174132 - RNA, 24 nt, Human
ggcaauagugggcuucuggaaaaa

SEQ ID NO: 174133 - RNA, 22 nt, Human
ggccuagugccugggucagggc

SEQ ID NO: 174134 - RNA, 23 nt, Human
ggcuaaagagcagccuuuguggg

SEQ ID NO: 174135 - RNA, 20 nt, Human
ggcucucuugcugccccccc

SEQ ID NO: 174136 - RNA, 19 nt, Human
gggaauauuuugcgguuuu

SEQ ID NO: 174137 - RNA, 20 nt, Human
gggacagaagcaaaccaaaa

SEQ ID NO: 174138 - RNA, 21 nt, Human
gggaggcagugacaaaggggg

SEQ ID NO: 174139 - RNA, 20 nt, Human
gggcaggggaaggggaugaa

SEQ ID NO: 174140 - RNA, 18 nt, Human
gggccagggcugagagga

SEQ ID NO: 174141 - RNA, 19 nt, Human
ggggaaggggaugaaggga

SEQ ID NO: 174142 - RNA, 19 nt, Human
gggucagggcuaggggaag

SEQ ID NO: 174143 - RNA, 21 nt, Human
gguuacuacagccaggagaga

SEQ ID NO: 174144 - RNA, 21 nt, Human
gguuacuacagccaggagaga

SEQ ID NO: 174145 - RNA, 20 nt, Human
guccuugauuuggcuuucuu

SEQ ID NO: 174146 - RNA, 18 nt, Human
gucugaggucccucgacc

SEQ ID NO: 174147 - RNA, 18 nt, Human
gucugaggucccucgacc

SEQ ID NO: 174148 - RNA, 22 nt, Human
gugacagaagagaaucauggug

SEQ ID NO: 174149 - RNA, 22 nt, Human
gugacagaagagaaucauggug

SEQ ID NO: 174150 - RNA, 22 nt, Human
gugcugccuuugcugggaggca

SEQ ID NO: 174151 - RNA, 20 nt, Human
guuuguggucauaauuacuc

SEQ ID NO: 174152 - RNA, 20 nt, Human
guuuguggucauaauuacuc

SEQ ID NO: 174153 - RNA, 25 nt, Human
uaagaaaaaaucaacaaaaccaaga

SEQ ID NO: 174154 - RNA, 24 nt, Human
uaauugaauuaaacaaaaauguua

SEQ ID NO: 174155 - RNA, 23 nt, Human
uacacgugaaaugaagagggcca

SEQ ID NO: 174156 - RNA, 30 nt, Human
uagcccuaucauguggucuagaaggugacu

SEQ ID NO: 174157 - RNA, 30 nt, Human; identical to SEQ ID NO: 174156

SEQ ID NO: 174158 - RNA, 21 nt, Human
uaggcucucuugcugcccccc

SEQ ID NO: 174159 - RNA, 21 nt, Human
uagugcagacgaaagauggag

SEQ ID NO: 174160 - RNA, 21 nt, Human
uaucaugaagcuccaaucaga

SEQ ID NO: 174161 - RNA, 21 nt, Human
uaucaugaagcuccaaucaga

SEQ ID NO: 174162 - RNA, 28 nt, Human
ucaacagugaccacagugggcuucucuc

SEQ ID NO: 174163 - RNA, 22 nt, Human
ucacacacaaaaauagauaccc

SEQ ID NO: 174164 - RNA, 24 nt, Human
ucacggaugcuccuugaagaagag

SEQ ID NO: 174165 - RNA, 21 nt, Human
ucacugggaaaguuacagaaa

SEQ ID NO: 174166 - RNA, 21 nt, Human
ucagacacaacuugucaaaag

SEQ ID NO: 174167 - RNA, 21 nt, Human
ucagacacaacuugucaaaag

SEQ ID NO: 174168 - RNA, 21 nt, Human
ucaggauaguguucaggaugc

SEQ ID NO: 174169 - RNA, 21 nt, Human
ucaggauaguguucaggaugc

SEQ ID NO: 174170 - RNA, 23 nt, Human
ucaggauaguguucaggaugcga

SEQ ID NO: 174171 - RNA, 23 nt, Human
ucaggauaguguucaggaugcga

SEQ ID NO: 174172 - RNA, 22 nt, Human
ucaggcccagaaauugagcuaa

SEQ ID NO: 174173 - RNA, 22 nt, Human
ucaggcccagaaauugagcuaa

SEQ ID NO: 174174 - RNA, 21 nt, Human
uccacuggguuacuacagcca

SEQ ID NO: 174175 - RNA, 21 nt, Human
uccacuggguuacuacagcca

SEQ ID NO: 174176 - RNA, 22 nt, Human
uccacuggguuacuacagccag

SEQ ID NO: 174177 - RNA, 21 nt, Human
ucccucgacccuagaacauuc

SEQ ID NO: 174178 - RNA, 23 nt, Human
ucccuuggcaaggggcuuggacc

SEQ ID NO: 174179 - RNA, 25 nt, Human
ucccuuggcaaggggcuuggacccc

SEQ ID NO: 174180 - RNA, 23 nt, Human
uccuccacccacagacagccauc

SEQ ID NO: 174181 - RNA, 20 nt, Human
uccuccuguuauacugcugc

SEQ ID NO: 174182 - RNA, 19 nt, Human
uccugcugcugcugcugcu

SEQ ID NO: 174183 - RNA, 21 nt, Human
ucuagaaggugacagugggcu

SEQ ID NO: 174184 - RNA, 21 nt, Human
ucuagaaggugacagugggcu

SEQ ID NO: 174185 - RNA, 23 nt, Human
ucugagcaccucaggcccagaaa

SEQ ID NO: 174186 - RNA, 23 nt, Human
ucugagcaccucaggcccagaaa

SEQ ID NO: 174187 - RNA, 24 nt, Human
ucugcagagaaagggguagcaggg

SEQ ID NO: 174188 - RNA, 19 nt, Human
ucuuuacaccgcugugguc

SEQ ID NO: 174189 - RNA, 30 nt, Human
ucuuuacaccgcuguggucauuuuuugacu

SEQ ID NO: 174190 - RNA, 21 nt, Human
ugaagcuccaaucagacacaa

SEQ ID NO: 174191 - RNA, 21 nt, Human
ugaagcuccaaucagacacaa

SEQ ID NO: 174192 - RNA, 22 nt, Human
ugacuuuguuuccucagagagg

SEQ ID NO: 174193 - RNA, 22 nt, Human
ugacuuuguuuccucagagagg

SEQ ID NO: 174194 - RNA, 22 nt, Human
ugagcaccucaggcccagaaau

SEQ ID NO: 174195 - RNA, 19 nt, Human
ugagcacuucucuguauac

SEQ ID NO: 174196 - RNA, 20 nt, Human
ugagcgcuggccgcguuugc

SEQ ID NO: 174197 - RNA, 24 nt, Human
ugagguccugcucacauucggguc

SEQ ID NO: 174198 - RNA, 23 nt, Human
ugcagagaaagggguagcaggga

SEQ ID NO: 174199 - RNA, 19 nt, Human
ugccagguauaggcaagca

SEQ ID NO: 174200 - RNA, 18 nt, Human
ugcgagaggcuucuggca

SEQ ID NO: 174201 - RNA, 18 nt, Human
ugcgagaggcuucuggca

SEQ ID NO: 174202 - RNA, 20 nt, Human
ugcugccccccccucuuccu

SEQ ID NO: 174203 - RNA, 24 nt, Human
uggcaaggggcuuggaccuccugg

SEQ ID NO: 174204 - RNA, 25 nt, Human
uggcaaggggcuuggaccuccuggg

SEQ ID NO: 174205 - RNA, 18 nt, Human
uggcugugguuuugaaca

SEQ ID NO: 174206 - RNA, 19 nt, Human
ugggacagaagcaaaccaa

SEQ ID NO: 174207 - RNA, 23 nt, Human
ugggccagguaggggagaggggc

SEQ ID NO: 174208 - RNA, 19 nt, Human
ugguuuugaacacugagca

SEQ ID NO: 174209 - RNA, 18 nt, Human
ugucuagcccuaucaugu

SEQ ID NO: 174210 - RNA, 18 nt, Human
ugucuagcccuaucaugu

SEQ ID NO: 174211 - RNA, 20 nt, Human
uguggucauaauuacucagg

SEQ ID NO: 174212 - RNA, 18 nt, Human
uguuagaaguccggauag

SEQ ID NO: 174213 - RNA, 19 nt, Human
uuacauauuuccccauuuc

SEQ ID NO: 174214 - RNA, 19 nt, Human
uuacauauuuccccauuuc

SEQ ID NO: 174215 - RNA, 27 nt, Human
uuaugaucacucuuuuauuuaagaaaa

SEQ ID NO: 174216 - RNA, 20 nt, Human
uuauuuacauauuuccccau

SEQ ID NO: 174217 - RNA, 20 nt, Human
uuauuuacauauuuccccau

SEQ ID NO: 174218 - RNA, 26 nt, Human
uuccagaggcuggggcugggguaccc

SEQ ID NO: 174219 - RNA, 24 nt, Human
uuccagugagauccacaggguacc

SEQ ID NO: 174220 - RNA, 24 nt, Human
uuccagugagauccacaggguacc

SEQ ID NO: 174221 - RNA, 23 nt, Human
uucucuguauacauguucucgac

SEQ ID NO: 174222 - RNA, 26 nt, Human
uucugagguccugcucacauucgggu

SEQ ID NO: 174223 - RNA, 22 nt, Human
uucuuggccccaggaagucacc

SEQ ID NO: 174224 - RNA, 22 nt, Human
uucuuggccccaggaagucacc

SEQ ID NO: 174225 - RNA, 21 nt, Human
uugaagaagagggagguggcc

SEQ ID NO: 174226 - RNA, 21 nt, Human
uugaauuaaacaaaaauguua

SEQ ID NO: 174227 - RNA, 20 nt, Human
uugcugccccccccucuucc

SEQ ID NO: 174228 - RNA, 24 nt, Human
uuggcuuucuuuacaccgcugugg

SEQ ID NO: 174229 - RNA, 26 nt, Human
uuuaugaucacucuuuuaaccccuag

SEQ ID NO: 174230 - RNA, 28 nt, Human
uuucaacacaaaaccuaguuaaauugug

SEQ ID NO: 174231 - RNA, 19 nt, Human
uuugaaauggucugcugag

SEQ ID NO: 174232 - RNA, 22 nt, Human
uuugaaauggucugcugagaag

SEQ ID NO: 174233 - RNA, 21 nt, Human
uuugaacacugagcaucacgg

SEQ ID NO: 174234 - RNA, 19 nt, Human
uuuuuugacaacucaucag

SEQ ID NO: 174235 - RNA, 18 nt, Human
uuuuuuuuuuucuuuuug

SEQ ID NO: 174236 - RNA, 22 nt, Human
uuuuuuuuuuucuuuuugcuuu

SEQ ID NO: 174237 - RNA, 24 nt, Human
aaccauaucaguaaaacccauacc

SEQ ID NO: 174238 - RNA, 21 nt, Human
caaaaacgcuugcagauacca

SEQ ID NO: 174239 - RNA, 20 nt, Human
cagauaccaucaaagcguca

SEQ ID NO: 174240 - RNA, 22 nt, Human
cgcuuuuuuuuuuuuuuuccuu

SEQ ID NO: 174241 - RNA, 18 nt, Human
cuuuuuuuuuuuuuuucc

SEQ ID NO: 174242 - RNA, 23 nt, Human
gcaaaaacgcuugcagauaccau

SEQ ID NO: 174243 - RNA, 19 nt, Human
gcagaagaaucccuccccu

SEQ ID NO: 174244 - RNA, 19 nt, Human
gcuccccccaccugccucu

SEQ ID NO: 174245 - RNA, 19 nt, Human
gcuuuuuuuuuuuuuuucc

SEQ ID NO: 174246 - RNA, 18 nt, Human
uaagaucagcaaaaacgc

SEQ ID NO: 174247 - RNA, 20 nt, Human
ucugaugguggcucccccca

SEQ ID NO: 174248 - RNA, 18 nt, Human
uggcuccccccaccugcc

SEQ ID NO: 174249 - RNA, 26 nt, Human
uugaugaucugaugguggcucccccc

SEQ ID NO: 174250 - RNA, 23 nt, Human
uugguugcagaagaaucccuccc

SEQ ID NO: 174251 - RNA, 22 nt, Human
uuguauuauucuuaugcuugau

SEQ ID NO: 174252 - RNA, 25 nt, Human
ccuuccuugcuacucccgauugguc

SEQ ID NO: 174253 - RNA, 18 nt, Human
guguaccaaaugcucuuc

SEQ ID NO: 174254 - RNA, 20 nt, Human
ucaaguguguaccaaaugcu

SEQ ID NO: 174255 - RNA, 20 nt, Human
aaccagaaacaaaaacuaga

SEQ ID NO: 174256 - RNA, 25 nt, Human
aaccagaaacaaaaacuagaaaaug

SEQ ID NO: 174257 - RNA, 20 nt, Human
aaccuguggcucuagggagu

SEQ ID NO: 174258 - RNA, 22 nt, Human
aagccaaguuuacuuaagcuaa

SEQ ID NO: 174259 - RNA, 20 nt, Human
aaguauaaugggaaaaggaa

SEQ ID NO: 174260 - RNA, 18 nt, Human
acuuguagcaccauugga

SEQ ID NO: 174261 - RNA, 19 nt, Human
agaaaguucaguacucagg

SEQ ID NO: 174262 - RNA, 24 nt, Human
agaccagcuggaaggaucagggau

SEQ ID NO: 174263 - RNA, 19 nt, Human
agagcagaccagcuggaag

SEQ ID NO: 174264 - RNA, 22 nt, Human
agcaaagccaaguuuacuuaag

SEQ ID NO: 174265 - RNA, 21 nt, Human
agccaccgaauaaacagcccu

SEQ ID NO: 174266 - RNA, 18 nt, Human
aggaaagguaaagccgug

SEQ ID NO: 174267 - RNA, 20 nt, Human
aggaauggacugauguuucu

SEQ ID NO: 174268 - RNA, 22 nt, Human
aggacuuauuggaaauugggga

SEQ ID NO: 174269 - RNA, 20 nt, Human
aggcagcuagaaaauggacu

SEQ ID NO: 174270 - RNA, 20 nt, Human
auauuaagacuucuagaaca

SEQ ID NO: 174271 - RNA, 18 nt, Human
augugggugcacacuugg

SEQ ID NO: 174272 - RNA, 18 nt, Human
auuggcucauacaaccac

SEQ ID NO: 174273 - RNA, 21 nt, Human
auuucacaguucacaucuuua

SEQ ID NO: 174274 - RNA, 21 nt, Human
caaagccaaguuuacuuaagc

SEQ ID NO: 174275 - RNA, 22 nt, Human
caaggggcugaaguaggaauca

SEQ ID NO: 174276 - RNA, 22 nt, Human
cacaccaaggggcugaaguagg

SEQ ID NO: 174277 - RNA, 22 nt, Human
caccagcacucccacccauucc

SEQ ID NO: 174278 - RNA, 23 nt, Human
cagcgacucucugagucaaccca

SEQ ID NO: 174279 - RNA, 19 nt, Human
caugcaagaaauuuaacau

SEQ ID NO: 174280 - RNA, 22 nt, Human
cauuuccauccaugcaugggaa

SEQ ID NO: 174281 - RNA, 22 nt, Human
ccaauggucuccuucccauucu

SEQ ID NO: 174282 - RNA, 18 nt, Human
ccaccgaauaaacagccc

SEQ ID NO: 174283 - RNA, 22 nt, Human
ccacugggagaguguugcucag

SEQ ID NO: 174284 - RNA, 20 nt, Human
ccagcacucccacccauucc

SEQ ID NO: 174285 - RNA, 18 nt, Human
ccaugcaugggaaaaggg

SEQ ID NO: 174286 - RNA, 18 nt, Human
cccaguacuuuuaguacc

SEQ ID NO: 174287 - RNA, 22 nt, Human
cccauauuaagacuucuagaac

SEQ ID NO: 174288 - RNA, 18 nt, Human
ccguuagaaauauuuugu

SEQ ID NO: 174289 - RNA, 21 nt, Human
ccucauccucagcccuguccc

SEQ ID NO: 174290 - RNA, 23 nt, Human
cgaauaaacagcccugaguacau

SEQ ID NO: 174291 - RNA, 19 nt, Human
cuaagccacuuguuccugg

SEQ ID NO: 174292 - RNA, 21 nt, Human
cuagaacaaguuacaaaaaaa

SEQ ID NO: 174293 - RNA, 21 nt, Human
cuagaacaaguuacaaaaaaa

SEQ ID NO: 174294 - RNA, 23 nt, Human
cucauacaaccacauuucaucuc

SEQ ID NO: 174295 - RNA, 19 nt, Human
cucccuaaauaggcaacaa

SEQ ID NO: 174296 - RNA, 26 nt, Human
cugacacuugaggguuacccaauuga

SEQ ID NO: 174297 - RNA, 23 nt, Human
cugaggcugaacuggaagccucc

SEQ ID NO: 174298 - RNA, 18 nt, Human
cuggaagccuuuacccug

SEQ ID NO: 174299 - RNA, 18 nt, Human
cuggguccccaggguucu

SEQ ID NO: 174300 - RNA, 21 nt, Human
cuuccauuuccauccaugcau

SEQ ID NO: 174301 - RNA, 27 nt, Human
cuucuacacagcuuagaacaaugguug

SEQ ID NO: 174302 - RNA, 25 nt, Human
gaaaauguuacucccuaaauaggcc

SEQ ID NO: 174303 - RNA, 22 nt, Human
gaacaaguuacaaaaaaaucuu

SEQ ID NO: 174304 - RNA, 26 nt, Human
gaacaaguuacaaaaaaaucuuccau

SEQ ID NO: 174305 - RNA, 22 nt, Human
gaagaccuauggcaugcaagaa

SEQ ID NO: 174306 - RNA, 19 nt, Human
gaauaaacagcccugagua

SEQ ID NO: 174307 - RNA, 24 nt, Human
gaauccauuguaucuuagaaccga

SEQ ID NO: 174308 - RNA, 21 nt, Human
gaaugcuccucuuggaaugau

SEQ ID NO: 174309 - RNA, 23 nt, Human
gaccagcuggaaggaucagggau

SEQ ID NO: 174310 - RNA, 24 nt, Human
gaugaaugcuccucuuggaaugau

SEQ ID NO: 174311 - RNA, 26 nt, Human
gcaaaccagggagccaccgaauaaac

SEQ ID NO: 174312 - RNA, 26 nt, Human
gcacucccacccauucccguuagaaa

SEQ ID NO: 174313 - RNA, 22 nt, Human
ggaaaaggaaugagaaccugug

SEQ ID NO: 174314 - RNA, 18 nt, Human
ggaaauuggggauaauuc

SEQ ID NO: 174315 - RNA, 20 nt, Human
ggacucaauucugcaagccu

SEQ ID NO: 174316 - RNA, 19 nt, Human
ggaucugccacugggagag

SEQ ID NO: 174317 - RNA, 20 nt, Human
ggguccccaggguucuccuc

SEQ ID NO: 174318 - RNA, 25 nt, Human
guggcucuagggaguuacagaaggg

SEQ ID NO: 174319 - RNA, 27 nt, Human
uaaaaaaucacaaauaugauuggcuca

SEQ ID NO: 174320 - RNA, 20 nt, Human
uaaaauaacugaggcugaac

SEQ ID NO: 174321 - RNA, 23 nt, Human
uaacugaggcugaacuggaagcc

SEQ ID NO: 174322 - RNA, 22 nt, Human
uaagccacuuguuccuggguca

SEQ ID NO: 174323 - RNA, 20 nt, Human
uaagcuaagccacuuguucc

SEQ ID NO: 174324 - RNA, 23 nt, Human
uaccccaucacuaugugaauaaa

SEQ ID NO: 174325 - RNA, 23 nt, Human
uacccuggcacacucaaaaauca

SEQ ID NO: 174326 - RNA, 24 nt, Human
uagaacaggaagcuaagaaauuaa

SEQ ID NO: 174327 - RNA, 20 nt, Human
uagcaccauuggaugugggu

SEQ ID NO: 174328 - RNA, 24 nt, Human
ucacaccaaggggcugaaguagga

SEQ ID NO: 174329 - RNA, 19 nt, Human
uccuucaggccuacaggca

SEQ ID NO: 174330 - RNA, 18 nt, Human
ucuucuggguccccaggg

SEQ ID NO: 174331 - RNA, 21 nt, Human
ugaauugacauaagcccauau

SEQ ID NO: 174332 - RNA, 21 nt, Human
ugacagcgacucucugaguca

SEQ ID NO: 174333 - RNA, 20 nt, Human
ugacauaagcccauauuuca

SEQ ID NO: 174334 - RNA, 27 nt, Human
ugcaagccuucauggcaacagcccaua

SEQ ID NO: 174335 - RNA, 19 nt, Human
uggaaggaucagggaucug

SEQ ID NO: 174336 - RNA, 21 nt, Human
uggagcuucauucuuugagca

SEQ ID NO: 174337 - RNA, 23 nt, Human
uggccuaaaauaccauuuacauc

SEQ ID NO: 174338 - RNA, 24 nt, Human
uggcuggauuuggagagggcagcu

SEQ ID NO: 174339 - RNA, 20 nt, Human
uguaucuuagaaccgaggga

SEQ ID NO: 174340 - RNA, 20 nt, Human
uguguauaauaauaaaauga

SEQ ID NO: 174341 - RNA, 25 nt, Human
uucauuauuuaaaaacucaucuugg

SEQ ID NO: 174342 - RNA, 21 nt, Human
uuuuaaccagaaacaaaaacu

SEQ ID NO: 174343 - RNA, 19 nt, Human
uuuuuuuuuuuuuuggugg

SEQ ID NO: 174344 - RNA, 23 nt, Human
uuuuuuuuuuuuuuuuugguggg

SEQ ID NO: 174345 - RNA, 20 nt, Human
uuuuuuuuuuuuuuuuuugg

SEQ ID NO: 174346 - RNA, 21 nt, Human
acagcacagugcucccgcugu

SEQ ID NO: 174347 - RNA, 22 nt, Human
acccaaaagaaacugaaaggag

SEQ ID NO: 174348 - RNA, 23 nt, Human
agggaaaaacaaacccaaaagaa

SEQ ID NO: 174349 - RNA, 21 nt, Human
caaaagaaacugaaaggagca

SEQ ID NO: 174350 - RNA, 22 nt, Human
cagcacagugcucccgcuguuc

SEQ ID NO: 174351 - RNA, 22 nt, Human
gagcacagcacagugcucccgc

SEQ ID NO: 174352 - RNA, 19 nt, Human
ggaaaaacaaacccaaaag

SEQ ID NO: 174353 - RNA, 27 nt, Human
ggaaaaacaaacccaaaagaaacugaa

SEQ ID NO: 174354 - RNA, 20 nt, Human
gggaaaaacaaacccaaaag

SEQ ID NO: 174355 - RNA, 20 nt, Human
acagccaacauggguuucca

SEQ ID NO: 174356 - RNA, 19 nt, Human
agcaccuaauauaaugcug

SEQ ID NO: 174357 - RNA, 20 nt, Human
aggugcaugugaauuucaug

SEQ ID NO: 174358 - RNA, 18 nt, Human
caagggucuaacgggugg

SEQ ID NO: 174359 - RNA, 21 nt, Human
cagcaccuaauauaaugcugg

SEQ ID NO: 174360 - RNA, 22 nt, Human
caugcaaauggccuguaggugc

SEQ ID NO: 174361 - RNA, 18 nt, Human
ccuguaggugcuuccaag

SEQ ID NO: 174362 - RNA, 23 nt, Human
cgcuacagugucguauuuccugc

SEQ ID NO: 174363 - RNA, 24 nt, Human
cggguggaacuaaaugugcccaca

SEQ ID NO: 174364 - RNA, 25 nt, Human
cuuccaaguucacguagccugaaca

SEQ ID NO: 174365 - RNA, 21 nt, Human
cuugaggaaaauaaauuauuc

SEQ ID NO: 174366 - RNA, 21 nt, Human
gcuuccaaguucacguagccu

SEQ ID NO: 174367 - RNA, 20 nt, Human
ggauuuuuuuuuaaccauau

SEQ ID NO: 174368 - RNA, 24 nt, Human
ggguggaacuaaaugugcccacaa

SEQ ID NO: 174369 - RNA, 24 nt, Human
uaagugucucgucaauguagcuuu

SEQ ID NO: 174370 - RNA, 20 nt, Human
uaauagguuauaaacugaag

SEQ ID NO: 174371 - RNA, 18 nt, Human
ugccauggaaaugugaaa

SEQ ID NO: 174372 - RNA, 19 nt, Human
uggaaagcugcagaaggga

SEQ ID NO: 174373 - RNA, 18 nt, Human
uggccuguaggugcuucc

SEQ ID NO: 174374 - RNA, 19 nt, Human
agagcaaauccccccugcc

SEQ ID NO: 174375 - RNA, 21 nt, Human
agagcaaauccccccugccuu

SEQ ID NO: 174376 - RNA, 22 nt, Human
agcaaauccccccugccuugcc

SEQ ID NO: 174377 - RNA, 23 nt, Human
caacaaguccgucugucaaugac

SEQ ID NO: 174378 - RNA, 19 nt, Human
cccccugccuugcccucac

SEQ ID NO: 174379 - RNA, 24 nt, Human
ccuguggcagagcaaauccccccu

SEQ ID NO: 174380 - RNA, 23 nt, Human
gguccaguagcugcugcauuguu

SEQ ID NO: 174381 - RNA, 18 nt, Human
ucagggugguccaguagc

SEQ ID NO: 174382 - RNA, 21 nt, Human
ucugugaggcaaaaagcugcu

SEQ ID NO: 174383 - RNA, 19 nt, Human
ugacuggccagccccccuc

SEQ ID NO: 174384 - RNA, 18 nt, Human
ugaggggcguguggucaa

SEQ ID NO: 174385 - RNA, 24 nt, Human
ugcccucuucuaggaacagccuug

SEQ ID NO: 174386 - RNA, 21 nt, Human
ugcucagggugguccaguagc

SEQ ID NO: 174387 - RNA, 20 nt, Human
ugcuuuccaguagccugugg

SEQ ID NO: 174388 - RNA, 18 nt, Human
aaagucccucccguuccu

SEQ ID NO: 174389 - RNA, 20 nt, Human
aagaagagucuggaguccug

SEQ ID NO: 174390 - RNA, 22 nt, Human
aagaggaaggggugcagcccgg

SEQ ID NO: 174391 - RNA, 21 nt, Human
aagcaacugagacuguacaga

SEQ ID NO: 174392 - RNA, 21 nt, Human
aaggcugcagaagcaccccca

SEQ ID NO: 174393 - RNA, 25 nt, Human
aagguacaaaauugccuauagaaag

SEQ ID NO: 174394 - RNA, 21 nt, Human
aagucagcuucggaaugccga

SEQ ID NO: 174395 - RNA, 19 nt, Human
acaaaacaggagaaaagag

SEQ ID NO: 174396 - RNA, 23 nt, Human
acaaagccccaucugucuuggcc

SEQ ID NO: 174397 - RNA, 25 nt, Human
acagccaagccaggcccaggagccu

SEQ ID NO: 174398 - RNA, 26 nt, Human
agcaacugagacuguacagagaaaga

SEQ ID NO: 174399 - RNA, 23 nt, Human
aggaaggggugcagcccggggac

SEQ ID NO: 174400 - RNA, 18 nt, Human
aggcccaggagccucugg

SEQ ID NO: 174401 - RNA, 24 nt, Human
agucuggaguccugcucuuugugu

SEQ ID NO: 174402 - RNA, 19 nt, Human
caaaacaggagaaaagagu

SEQ ID NO: 174403 - RNA, 22 nt, Human
caaggaaccacccucccagggc

SEQ ID NO: 174404 - RNA, 20 nt, Human
cacagguaggggacagccaa

SEQ ID NO: 174405 - RNA, 19 nt, Human
caggagccucugggcagag

SEQ ID NO: 174406 - RNA, 22 nt, Human
caggaggcucuagccaaagucc

SEQ ID NO: 174407 - RNA, 20 nt, Human
caucaggggcagcccucugc

SEQ ID NO: 174408 - RNA, 30 nt, Human
cauuucuccacaaagguacaaaauugccua

SEQ ID NO: 174409 - RNA, 22 nt, Human
ccaggccucaagcacguggguc

SEQ ID NO: 174410 - RNA, 18 nt, Human
cccaaggaaccacccucc

SEQ ID NO: 174411 - RNA, 24 nt, Human
cccaucugucuuggcccagcugcc

SEQ ID NO: 174412 - RNA, 19 nt, Human
ccccccgaggugagaugga

SEQ ID NO: 174413 - RNA, 24 nt, Human
ccucugggcagagagaagaugggg

SEQ ID NO: 174414 - RNA, 22 nt, Human
cguuccugggcaucccucuccc

SEQ ID NO: 174415 - RNA, 19 nt, Human
cuagccaaagucccucccg

SEQ ID NO: 174416 - RNA, 23 nt, Human
cugcccccucaagcugugggucu

SEQ ID NO: 174417 - RNA, 22 nt, Human
cugugggucuuugaacgagccu

SEQ ID NO: 174418 - RNA, 21 nt, Human
gagcccaggcugcugagauga

SEQ ID NO: 174419 - RNA, 18 nt, Human
gcacccccagggccacaa

SEQ ID NO: 174420 - RNA, 21 nt, Human
gcagagagaagauggggaggc

SEQ ID NO: 174421 - RNA, 21 nt, Human
gcagcagaggugacccuagga

SEQ ID NO: 174422 - RNA, 20 nt, Human
gccaagccaggcccaggagc

SEQ ID NO: 174423 - RNA, 19 nt, Human
gcccagcugccaggccuca

SEQ ID NO: 174424 - RNA, 21 nt, Human
gccuucucuuccuuguccucu

SEQ ID NO: 174425 - RNA, 25 nt, Human
gcugggccugcucagucauugccag

SEQ ID NO: 174426 - RNA, 24 nt, Human
gcuggggucacucccacauugagg

SEQ ID NO: 174427 - RNA, 19 nt, Human
gcuucucuuuugguaaaaa

SEQ ID NO: 174428 - RNA, 20 nt, Human
ggacacagguaggggacagc

SEQ ID NO: 174429 - RNA, 21 nt, Human
ggaggcaggaggcucuagccc

SEQ ID NO: 174430 - RNA, 18 nt, Human
ggcccagacugcuucucu

SEQ ID NO: 174431 - RNA, 23 nt, Human
ggcugcugagaugaggcguuccu

SEQ ID NO: 174432 - RNA, 20 nt, Human
ggggacacagguaggggaca

SEQ ID NO: 174433 - RNA, 18 nt, Human
ggggaggcaggaggcucu

SEQ ID NO: 174434 - RNA, 19 nt, Human
guccucuggggcugggccu

SEQ ID NO: 174435 - RNA, 21 nt, Human
gugacccuaggagguaagggc

SEQ ID NO: 174436 - RNA, 22 nt, Human
guuccugggcaucccucuccca

SEQ ID NO: 174437 - RNA, 23 nt, Human
uaagggcaacuuuuucaaggcug

SEQ ID NO: 174438 - RNA, 19 nt, Human
uccugcucuuuguguuuug

SEQ ID NO: 174439 - RNA, 23 nt, Human
ucuuugaacgagccuggugggaa

SEQ ID NO: 174440 - RNA, 22 nt, Human
ugagauggaguggccuccuuca

SEQ ID NO: 174441 - RNA, 23 nt, Human
ugagauggaguggccuccuucag

SEQ ID NO: 174442 - RNA, 19 nt, Human
ugaggcguuccugggcauc

SEQ ID NO: 174443 - RNA, 18 nt, Human
ugcagggcaggggaccau

SEQ ID NO: 174444 - RNA, 19 nt, Human
ugccaggccccaucagggg

SEQ ID NO: 174445 - RNA, 18 nt, Human
ugcccaggaggcacaaga

SEQ ID NO: 174446 - RNA, 18 nt, Human
ugccgagcccaggcugcu

SEQ ID NO: 174447 - RNA, 23 nt, Human
uggagcugcagggcaggggacca

SEQ ID NO: 174448 - RNA, 19 nt, Human
uggaguccugcucuuugug

SEQ ID NO: 174449 - RNA, 20 nt, Human
uggaguggccuccuucagcc

SEQ ID NO: 174450 - RNA, 22 nt, Human
uggccuccuucagcccuugccc

SEQ ID NO: 174451 - RNA, 20 nt, Human
uggcuggggucacucccaca

SEQ ID NO: 174452 - RNA, 23 nt, Human
uggcuggggucacucccacauug

SEQ ID NO: 174453 - RNA, 22 nt, Human
ugggaacagagcuaaucagcug

SEQ ID NO: 174454 - RNA, 24 nt, Human
ugggaacagagcuaaucagcuggg

SEQ ID NO: 174455 - RNA, 25 nt, Human
ugggcaucccucucccaaauguccu

SEQ ID NO: 174456 - RNA, 18 nt, Human
uggggaggcaggaggcuc

SEQ ID NO: 174457 - RNA, 21 nt, Human
ugggucuuugaacgagccugg

SEQ ID NO: 174458 - RNA, 22 nt, Human
uguggucagcuugagacaugga

SEQ ID NO: 174459 - RNA, 20 nt, Human
uuccuuggagauguuccuca

SEQ ID NO: 174460 - RNA, 21 nt, Human
uuccuuguccucuggggcugg

SEQ ID NO: 174461 - RNA, 21 nt, Human
uuccuuguccucuggggcugg

SEQ ID NO: 174462 - RNA, 19 nt, Human
uugccaggccccaucaggg

SEQ ID NO: 174463 - RNA, 21 nt, Human
uuggcccagcugccaggccuc

SEQ ID NO: 174464 - RNA, 25 nt, Human
uuuacaaaacaggagaaaagaguga

SEQ ID NO: 174465 - RNA, 20 nt, Human
uuuccuggcagggcaucugg

SEQ ID NO: 174466 - RNA, 20 nt, Human
aaaaagaacacuauuuccug

SEQ ID NO: 174467 - RNA, 20 nt, Human
aaaaggcauucccauaaacu

SEQ ID NO: 174468 - RNA, 20 nt, Human
aaacaguugugagccugguc

SEQ ID NO: 174469 - RNA, 23 nt, Human
aacacgcuuuuuuuuuuuccuuu

SEQ ID NO: 174470 - RNA, 22 nt, Human
aacagcauuucccuuggccccu

SEQ ID NO: 174471 - RNA, 18 nt, Human
aacaggauacuaaugggg

SEQ ID NO: 174472 - RNA, 21 nt, Human
aagacccuuggaaaccaugug

SEQ ID NO: 174473 - RNA, 20 nt, Human
aagacgccucuuuaacaugg

SEQ ID NO: 174474 - RNA, 20 nt, Human
acaggagaucuaguuauuau

SEQ ID NO: 174475 - RNA, 23 nt, Human
accuccagcugcuuccucguucu

SEQ ID NO: 174476 - RNA, 21 nt, Human
acuacuacaaaauuacaggag

SEQ ID NO: 174477 - RNA, 20 nt, Human
acucccgccuuuccucugca

SEQ ID NO: 174478 - RNA, 22 nt, Human
acucccgccuuuccucugcacc

SEQ ID NO: 174479 - RNA, 20 nt, Human
acuguccagaguccucgacu

SEQ ID NO: 174480 - RNA, 18 nt, Human
agaacaaacaagcuuuaa

SEQ ID NO: 174481 - RNA, 20 nt, Human
agccuggucacuuuaucuga

SEQ ID NO: 174482 - RNA, 18 nt, Human
aggcaggcugucggguga

SEQ ID NO: 174483 - RNA, 25 nt, Human
aggcggggaccggaucggcggggaa

SEQ ID NO: 174484 - RNA, 19 nt, Human
aggcgggggcagagugggg

SEQ ID NO: 174485 - RNA, 23 nt, Human
auauauacucuguuccuaaugug

SEQ ID NO: 174486 - RNA, 23 nt, Human
caaaacgcacagugugaauuucc

SEQ ID NO: 174487 - RNA, 21 nt, Human
caacuuuuuaaaaagaacacu

SEQ ID NO: 174488 - RNA, 21 nt, Human
caaucauugaaaucaugacac

SEQ ID NO: 174489 - RNA, 24 nt, Human
cacauagucuccccucccaccacc

SEQ ID NO: 174490 - RNA, 19 nt, Human
caucacuucagguggagaa

SEQ ID NO: 174491 - RNA, 24 nt, Human
ccacacucacuauacauguauaua

SEQ ID NO: 174492 - RNA, 28 nt, Human
ccucugcacagcgcccagcgauccgcuc

SEQ ID NO: 174493 - RNA, 23 nt, Human
ccuguaacaaugacucugcuacu

SEQ ID NO: 174494 - RNA, 18 nt, Human
cgagccgggcacucccgc

SEQ ID NO: 174495 - RNA, 19 nt, Human
cggaaggaaaaaaaaaagg

SEQ ID NO: 174496 - RNA, 22 nt, Human
cguugcucgcgggggcagcuag

SEQ ID NO: 174497 - RNA, 19 nt, Human
cucaccaacagcauuuccc

SEQ ID NO: 174498 - RNA, 21 nt, Human
cucggcucggcccugacaggc

SEQ ID NO: 174499 - RNA, 24 nt, Human
cucuaauauaaauacaaaucucac

SEQ ID NO: 174500 - RNA, 24 nt, Human
cugcccggcgucaccuccagcugc

SEQ ID NO: 174501 - RNA, 23 nt, Human
cuguacauauauacucuguuccu

SEQ ID NO: 174502 - RNA, 21 nt, Human
gagaucuucagaaggucuucg

SEQ ID NO: 174503 - RNA, 21 nt, Human
gagggugugacuugucauuug

SEQ ID NO: 174504 - RNA, 20 nt, Human
gccagacagagagcguaaga

SEQ ID NO: 174505 - RNA, 25 nt, Human
gccucuacuguccagaguccucgac

SEQ ID NO: 174506 - RNA, 19 nt, Human
gccuguguguuucagcaac

SEQ ID NO: 174507 - RNA, 20 nt, Human
ggcagaguggggaggcgggg

SEQ ID NO: 174508 - RNA, 19 nt, Human
ggcgggggcagagugggga

SEQ ID NO: 174509 - RNA, 21 nt, Human
gggcagaguggggaggcgggg

SEQ ID NO: 174510 - RNA, 21 nt, Human
gggggcagcuagucggcggag

SEQ ID NO: 174511 - RNA, 20 nt, Human
gguaggcgggggcagagugg

SEQ ID NO: 174512 - RNA, 23 nt, Human
guccagaguccucgacugguccg

SEQ ID NO: 174513 - RNA, 24 nt, Human
uaaaauacagccauaguacaccug

SEQ ID NO: 174514 - RNA, 20 nt, Human
uaacuagaacaaacaagcuu

SEQ ID NO: 174515 - RNA, 22 nt, Human
uaacuagaacaaacaagcuuua

SEQ ID NO: 174516 - RNA, 20 nt, Human
uaagauacauuacaaauggg

SEQ ID NO: 174517 - RNA, 21 nt, Human
uaaguaagguuuuaacaauau

SEQ ID NO: 174518 - RNA, 23 nt, Human
uaaugugcaacuuuuuaaaaaga

SEQ ID NO: 174519 - RNA, 21 nt, Human
uacaaaugggaagaaaauaca

SEQ ID NO: 174520 - RNA, 22 nt, Human
uagaacaaacaagcuuuaagua

SEQ ID NO: 174521 - RNA, 24 nt, Human
uagaaguauuuuauuuccaaaaag

SEQ ID NO: 174522 - RNA, 18 nt, Human
uagucggcggagcggcgg

SEQ ID NO: 174523 - RNA, 20 nt, Human
uauuauguuuucccucaaug

SEQ ID NO: 174524 - RNA, 24 nt, Human
ucacaaucaugcuuugguucugcu

SEQ ID NO: 174525 - RNA, 18 nt, Human
uccgggguaggcgggggc

SEQ ID NO: 174526 - RNA, 21 nt, Human
ucgguaacugcugaagguaaa

SEQ ID NO: 174527 - RNA, 23 nt, Human
ucggucgucccggggccucuacu

SEQ ID NO: 174528 - RNA, 18 nt, Human
ucucgcacgcgagcgcca

SEQ ID NO: 174529 - RNA, 28 nt, Human
ucucuuacagacaguaaaaugcuuaaau

SEQ ID NO: 174530 - RNA, 20 nt, Human
ucuggagugccagagggaaa

SEQ ID NO: 174531 - RNA, 18 nt, Human
ugaauauaaauaagcaaa

SEQ ID NO: 174532 - RNA, 22 nt, Human
ugacucugcuacuauuuucccc

SEQ ID NO: 174533 - RNA, 22 nt, Human
ugagaacaccagacguacagcc

SEQ ID NO: 174534 - RNA, 23 nt, Human
ugagaacaccagacguacagcca

SEQ ID NO: 174535 - RNA, 19 nt, Human
ugagaggagggaaaagaua

SEQ ID NO: 174536 - RNA, 21 nt, Human
ugaucuauuacuaagccacac

SEQ ID NO: 174537 - RNA, 19 nt, Human
ugcaguuaccaucaccucu

SEQ ID NO: 174538 - RNA, 19 nt, Human
ugcgacagcgagccgggca

SEQ ID NO: 174539 - RNA, 19 nt, Human
ugcuaacuagaacaaacaa

SEQ ID NO: 174540 - RNA, 19 nt, Human
uggagaaacgcugacagug

SEQ ID NO: 174541 - RNA, 24 nt, Human
uggcagcauguuuagcuccucggu

SEQ ID NO: 174542 - RNA, 24 nt, Human
uggccccuaggacauggcguuuug

SEQ ID NO: 174543 - RNA, 20 nt, Human
ugugagccuggucacuuuau

SEQ ID NO: 174544 - RNA, 21 nt, Human
uucccuucuucaaaaacaguu

SEQ ID NO: 174545 - RNA, 22 nt, Human
uuccuugggaggccccuggaaa

SEQ ID NO: 174546 - RNA, 24 nt, Human
uugaaaaacaguuuuccuggaguu

SEQ ID NO: 174547 - RNA, 23 nt, Human
uuuaggaggaagacccuuggaaa

SEQ ID NO: 174548 - RNA, 20 nt, Human
acuccagugaccagcagagc

SEQ ID NO: 174549 - RNA, 24 nt, Human
agaacagaagagcacgugcaaaug

SEQ ID NO: 174550 - RNA, 21 nt, Human
aggucgccagcgagugcgagc

SEQ ID NO: 174551 - RNA, 18 nt, Human
agugcgagcugcgggcgg

SEQ ID NO: 174552 - RNA, 21 nt, Human
cacaguguuugcauuuagcau

SEQ ID NO: 174553 - RNA, 23 nt, Human
cagaagagcacgugcaaaugaua

SEQ ID NO: 174554 - RNA, 19 nt, Human
cagcagagccaacaccuac

SEQ ID NO: 174555 - RNA, 18 nt, Human
caguagggggcuuagcug

SEQ ID NO: 174556 - RNA, 22 nt, Human
cccugcgcgcgcgugcgugccg

SEQ ID NO: 174557 - RNA, 22 nt, Human
cuccagugaccagcagagccaa

SEQ ID NO: 174558 - RNA, 23 nt, Human
cucggcuuggcccugcgccgguu

SEQ ID NO: 174559 - RNA, 19 nt, Human
cuuuguccauauucugaag

SEQ ID NO: 174560 - RNA, 21 nt, Human
gagccaacaccuacgauuuug

SEQ ID NO: 174561 - RNA, 20 nt, Human
gagugcgagcugcgggcggc

SEQ ID NO: 174562 - RNA, 25 nt, Human
gcggcugccucggcuuggcccugcg

SEQ ID NO: 174563 - RNA, 20 nt, Human
uacacaguguuugcauuuag

SEQ ID NO: 174564 - RNA, 23 nt, Human
uauauuugguaggaagaacaggu

SEQ ID NO: 174565 - RNA, 19 nt, Human
ugguaggaagaacagguug

SEQ ID NO: 174566 - RNA, 18 nt, Human
uguggcgggaggagggca

SEQ ID NO: 174567 - RNA, 19 nt, Human
uucuuuguccauauucuga

SEQ ID NO: 174568 - RNA, 21 nt, Human
uuggcagcuggugacacucca

SEQ ID NO: 174569 - RNA, 21 nt, Human
aaaauccgagccagagagccc

SEQ ID NO: 174570 - RNA, 23 nt, Human
aaggaccaaccaaguuucaacca

SEQ ID NO: 174571 - RNA, 26 nt, Human
agagagcccaaaaccuucccacagag

SEQ ID NO: 174572 - RNA, 24 nt, Human
agagcaacuucagccccagcuccc

SEQ ID NO: 174573 - RNA, 18 nt, Human
caaaaccuucccacagag

SEQ ID NO: 174574 - RNA, 18 nt, Human
caaaauccgagccagaga

SEQ ID NO: 174575 - RNA, 30 nt, Human
caagucccaaaguguggucuugucgagggg

SEQ ID NO: 174576 - RNA, 19 nt, Human
cacccccgaguggacaguc

SEQ ID NO: 174577 - RNA, 18 nt, Human
cacuccacccccgagugg

SEQ ID NO: 174578 - RNA, 19 nt, Human
cacucccuucuccucucuc

SEQ ID NO: 174579 - RNA, 19 nt, Human
ccacaguggaugcggcucc

SEQ ID NO: 174580 - RNA, 19 nt, Human
ccccagcucccaaguccca

SEQ ID NO: 174581 - RNA, 22 nt, Human
cccccgaguggacagucuggac

SEQ ID NO: 174582 - RNA, 18 nt, Human
cccccgaugguccucgug

SEQ ID NO: 174583 - RNA, 22 nt, Human
cgagggugcagacaaggaccaa

SEQ ID NO: 174584 - RNA, 19 nt, Human
cgaguggacagucuggacc

SEQ ID NO: 174585 - RNA, 21 nt, Human
cggccccucacucccuucucc

SEQ ID NO: 174586 - RNA, 19 nt, Human
cucccuucuccucucucuc

SEQ ID NO: 174587 - RNA, 22 nt, Human
cuucagccccagcucccaaguc

SEQ ID NO: 174588 - RNA, 18 nt, Human
gaaauaaaaauauagaua

SEQ ID NO: 174589 - RNA, 19 nt, Human
gcagcggccccucacuccc

SEQ ID NO: 174590 - RNA, 23 nt, Human
gcccucauaguagaaauaaaaau

SEQ ID NO: 174591 - RNA, 21 nt, Human
gcucagcuccagucucaagga

SEQ ID NO: 174592 - RNA, 21 nt, Human
ggcagcggccccucacucccu

SEQ ID NO: 174593 - RNA, 18 nt, Human
ggggggguugugcugggg

SEQ ID NO: 174594 - RNA, 22 nt, Human
guacagagcaacuucagcccca

SEQ ID NO: 174595 - RNA, 21 nt, Human
uaacaaaauagauugucucuu

SEQ ID NO: 174596 - RNA, 19 nt, Human
ucacucccuucuccucucu

SEQ ID NO: 174597 - RNA, 22 nt, Human
uccgagccagagagcccaaaac

SEQ ID NO: 174598 - RNA, 23 nt, Human
uccgagccagagagcccaaaacc

SEQ ID NO: 174599 - RNA, 22 nt, Human
ucucacuccacccccgagugga

SEQ ID NO: 174600 - RNA, 23 nt, Human
ucuccaacgaccugcccccgaug

SEQ ID NO: 174601 - RNA, 20 nt, Human
ucuccucucucucuuucucu

SEQ ID NO: 174602 - RNA, 21 nt, Human
ucuccucucucucuuucucuu

SEQ ID NO: 174603 - RNA, 23 nt, Human
ucucucguaugcagacgcucagc

SEQ ID NO: 174604 - RNA, 27 nt, Human
ucuucagucuccaacgaccugcccccg

SEQ ID NO: 174605 - RNA, 26 nt, Human
ugcaaguaacaaaauagauugucucu

SEQ ID NO: 174606 - RNA, 19 nt, Human
ugcugggggggaggggguu

SEQ ID NO: 174607 - RNA, 22 nt, Human
ugcugggggggaggggguucaa

SEQ ID NO: 174608 - RNA, 19 nt, Human
ugcuucccaucucgcucuc

SEQ ID NO: 174609 - RNA, 19 nt, Human
ugggggggaggggguucaa

SEQ ID NO: 174610 - RNA, 19 nt, Human
ugugcugggggggaggggg

SEQ ID NO: 174611 - RNA, 24 nt, Human
uguuuuggggggguugugcugggg

SEQ ID NO: 174612 - RNA, 20 nt, Human
uugaggcuuuagaaauuuau

SEQ ID NO: 174613 - RNA, 26 nt, Human
uuuguuuguuggcagcaacucaacag

SEQ ID NO: 174614 - RNA, 23 nt, Human
aaacgaagcauugcccggauccg

SEQ ID NO: 174615 - RNA, 20 nt, Human
acgccugcccggccagucug

SEQ ID NO: 174616 - RNA, 22 nt, Human
aggcugcugagucacgccugcc

SEQ ID NO: 174617 - RNA, 21 nt, Human
caacagcagcauccuuuagaa

SEQ ID NO: 174618 - RNA, 18 nt, Human
caaguccagggcgccgcu

SEQ ID NO: 174619 - RNA, 22 nt, Human
cacagagccagccgcgcucuag

SEQ ID NO: 174620 - RNA, 24 nt, Human
cagagcucagcacggcgcacccac

SEQ ID NO: 174621 - RNA, 19 nt, Human
cagcggcagucgguuaagu

SEQ ID NO: 174622 - RNA, 21 nt, Human
ccagagcucagcacggcgcac

SEQ ID NO: 174623 - RNA, 23 nt, Human
ccagucuguccuuccuggcccug

SEQ ID NO: 174624 - RNA, 24 nt, Human
ccccccccgccugccagucuccac

SEQ ID NO: 174625 - RNA, 25 nt, Human
cccugccgccaccgggccccuccuc

SEQ ID NO: 174626 - RNA, 25 nt, Human
cccugccgccaccgggccccuccuc

SEQ ID NO: 174627 - RNA, 22 nt, Human
ccuagccuaggccuuccugggc

SEQ ID NO: 174628 - RNA, 22 nt, Human
ccucgcucuccaggcgcccccc

SEQ ID NO: 174629 - RNA, 25 nt, Human
ccucgcucuccaggcgccccccccg

SEQ ID NO: 174630 - RNA, 24 nt, Human
cuagccuaggccuuccugggcgaa

SEQ ID NO: 174631 - RNA, 21 nt, Human
cuccucgggaggccgcgccuc

SEQ ID NO: 174632 - RNA, 18 nt, Human
cucgcucuccaggcgccc

SEQ ID NO: 174633 - RNA, 18 nt, Human
cugaaacuguaccaaguc

SEQ ID NO: 174634 - RNA, 19 nt, Human
cugaaacuguaccaagucc

SEQ ID NO: 174635 - RNA, 18 nt, Human
cugacagccagagcucag

SEQ ID NO: 174636 - RNA, 18 nt, Human
gccccggggcgucaccac

SEQ ID NO: 174637 - RNA, 26 nt, Human
gcccggccagucuguccuuccuggag

SEQ ID NO: 174638 - RNA, 20 nt, Human
gcugcugagucacgccugcc

SEQ ID NO: 174639 - RNA, 21 nt, Human
ggaccagccuggcccugccgc

SEQ ID NO: 174640 - RNA, 18 nt, Human
ggggcgucaccacgucga

SEQ ID NO: 174641 - RNA, 21 nt, Human
uagaaaacgaagcauugcccg

SEQ ID NO: 174642 - RNA, 18 nt, Human
uccuagccuaggccuucc

SEQ ID NO: 174643 - RNA, 22 nt, Human
uccucgggaggccgcgccuccu

SEQ ID NO: 174644 - RNA, 24 nt, Human
uccugggcgagcagccgcuccaga

SEQ ID NO: 174645 - RNA, 19 nt, Human
uccuuccuggcccugaggc

SEQ ID NO: 174646 - RNA, 22 nt, Human
ucuccaggcgccccccccgccu

SEQ ID NO: 174647 - RNA, 27 nt, Human
ucuccaggcgccccccccgccugccag

SEQ ID NO: 174648 - RNA, 18 nt, Human
ugacagccagagcucagc

SEQ ID NO: 174649 - RNA, 21 nt, Human
ugacagccagagcucagcacg

SEQ ID NO: 174650 - RNA, 23 nt, Human
ugcagaguccucagcucggacca

SEQ ID NO: 174651 - RNA, 19 nt, Human
ugccagucuccacgccgca

SEQ ID NO: 174652 - RNA, 18 nt, Human
ugccgagcgcaggcugcu

SEQ ID NO: 174653 - RNA, 19 nt, Human
ugcgaucaaccagcagcua

SEQ ID NO: 174654 - RNA, 23 nt, Human
ugcgaucaaccagcagcuaguua

SEQ ID NO: 174655 - RNA, 24 nt, Human
ugggcgagcagccgcuccagacac

SEQ ID NO: 174656 - RNA, 28 nt, Human
uucaacagcagcauccuuuagaaaacga

SEQ ID NO: 174657 - RNA, 19 nt, Human
uuuuuuuuuuuuuuuguuu

SEQ ID NO: 174658 - RNA, 19 nt, Human
aacacaggagcagccugaa

SEQ ID NO: 174659 - RNA, 23 nt, Human
auggucaaauuuccaacacagga

SEQ ID NO: 174660 - RNA, 25 nt, Human
caaauuuccaacacaggagcagccu

SEQ ID NO: 174661 - RNA, 21 nt, Human
caacacaggagcagccugaac

SEQ ID NO: 174662 - RNA, 22 nt, Human
caacacaggagcagccugaacc

SEQ ID NO: 174663 - RNA, 25 nt, Human
cacaacuucagccccugggaggacu

SEQ ID NO: 174664 - RNA, 19 nt, Human
ccccugggaggacuggcug

SEQ ID NO: 174665 - RNA, 18 nt, Human
cgacugcacacucucaca

SEQ ID NO: 174666 - RNA, 20 nt, Human
gcuguaaagcuuuauuggga

SEQ ID NO: 174667 - RNA, 21 nt, Human
uuuuuuuuuuugcagaaggcu

SEQ ID NO: 174668 - RNA, 21 nt, Human
uuuuuuuuuuuuuuuuugcag

SEQ ID NO: 174669 - RNA, 20 nt, Human
uuuuuuuuuuuuuuuuuugg

SEQ ID NO: 174670 - RNA, 23 nt, Human
agagaauuuucaaauuuucaguc

SEQ ID NO: 174671 - RNA, 18 nt, Human
ucaaauuuucagucacau

SEQ ID NO: 174672 - RNA, 19 nt, Human
ugaagggaagagaaguggc

SEQ ID NO: 174673 - RNA, 22 nt, Human
ugacaucagccauguguguagc

SEQ ID NO: 174674 - RNA, 18 nt, Human
uggcgaagaaugaaggga

SEQ ID NO: 174675 - RNA, 22 nt, Human
ugugacaucagccaugugugua

SEQ ID NO: 174676 - RNA, 27 nt, Human
aaagaauccagaccucagggacccgag

SEQ ID NO: 174677 - RNA, 22 nt, Human
aagaauccagaccucagggacc

SEQ ID NO: 174678 - RNA, 20 nt, Human
acucucacucacacuucaac

SEQ ID NO: 174679 - RNA, 22 nt, Human
cacugaccacacaacccuccgg

SEQ ID NO: 174680 - RNA, 24 nt, Human
ccacacaacccuccggaagccugc

SEQ ID NO: 174681 - RNA, 23 nt, Human
ccggaagccugcugguuccucuu

SEQ ID NO: 174682 - RNA, 18 nt, Human
ccuccggaagccugcugg

SEQ ID NO: 174683 - RNA, 25 nt, Human
ccuugcccuguccuaugcuccuucc

SEQ ID NO: 174684 - RNA, 18 nt, Human
cggagaaagaauccagac

SEQ ID NO: 174685 - RNA, 25 nt, Human
cucacacuucaacucccaguuggau

SEQ ID NO: 174686 - RNA, 21 nt, Human
cucccaguuggaucugccugu

SEQ ID NO: 174687 - RNA, 21 nt, Human
cucgugccuuaagggcugugg

SEQ ID NO: 174688 - RNA, 19 nt, Human
cugcaaaacuuuauugaga

SEQ ID NO: 174689 - RNA, 19 nt, Human
cugcaaaacuuuauugaga

SEQ ID NO: 174690 - RNA, 23 nt, Human
cuuaagggcuguggugccccucc

SEQ ID NO: 174691 - RNA, 20 nt, Human
gagucgccggcucacagcuc

SEQ ID NO: 174692 - RNA, 22 nt, Human
ggugccccuccuuaucccgccu

SEQ ID NO: 174693 - RNA, 20 nt, Human
gugagguucccucgugccuu

SEQ ID NO: 174694 - RNA, 23 nt, Human
guugcucuucaccugcuucuggc

SEQ ID NO: 174695 - RNA, 21 nt, Human
guuuguguguguccgccgugu

SEQ ID NO: 174696 - RNA, 18 nt, Human
ucaguagcggagaaagaa

SEQ ID NO: 174697 - RNA, 20 nt, Human
ugagucacugaccacacaac

SEQ ID NO: 174698 - RNA, 21 nt, Human
ugggacuggcugugugguucu

SEQ ID NO: 174699 - RNA, 21 nt, Human
ugggcuccugggacuggcugu

SEQ ID NO: 174700 - RNA, 19 nt, Human
uguguuuguguguguccgc

SEQ ID NO: 174701 - RNA, 18 nt, Human
uugcucuucaccugcuuc

SEQ ID NO: 174702 - RNA, 18 nt, Human
uuuguguguguccgccgu

SEQ ID NO: 174703 - RNA, 21 nt, Human
aaaaaggaaacaacaaucaga

SEQ ID NO: 174704 - RNA, 21 nt, Human
acccaggucccacgacggcuc

SEQ ID NO: 174705 - RNA, 21 nt, Human
caaacaccagggcccaugagc

SEQ ID NO: 174706 - RNA, 24 nt, Human
caccaaauaaaucacagacgugac

SEQ ID NO: 174707 - RNA, 18 nt, Human
cagcguggcccaccacgu

SEQ ID NO: 174708 - RNA, 21 nt, Human
ccacgcccgaaacaccaaaua

SEQ ID NO: 174709 - RNA, 23 nt, Human
ccacgggguccucacggugggga

SEQ ID NO: 174710 - RNA, 18 nt, Human
cccaccacgugccggggc

SEQ ID NO: 174711 - RNA, 25 nt, Human
gaggagcaugaaucagcuguuccuu

SEQ ID NO: 174712 - RNA, 19 nt, Human
gccacaccugcugucgccc

SEQ ID NO: 174713 - RNA, 19 nt, Human
gcggugcaaacaccagggc

SEQ ID NO: 174714 - RNA, 20 nt, Human
ggacccaggucccacgacgg

SEQ ID NO: 174715 - RNA, 21 nt, Human
ggagcaugaaucagcuguucc

SEQ ID NO: 174716 - RNA, 24 nt, Human
ggggcucggagccccacccuggcc

SEQ ID NO: 174717 - RNA, 20 nt, Human
gucccacgacggcucccaac

SEQ ID NO: 174718 - RNA, 20 nt, Human
guggagcugugugcgcagcc

SEQ ID NO: 174719 - RNA, 22 nt, Human
ucgggaggagaaaaaggaaaca

SEQ ID NO: 174720 - RNA, 22 nt, Human
ugaaucagcuguuccuucggga

SEQ ID NO: 174721 - RNA, 22 nt, Human
uggaaugcuuucucuucaugug

SEQ ID NO: 174722 - RNA, 21 nt, Human
uggccacaccugcugucgccc

SEQ ID NO: 174723 - RNA, 23 nt, Human
ugggcgggcggugacccggggcu

SEQ ID NO: 174724 - RNA, 18 nt, Human
ugucgcccacgggguccu

SEQ ID NO: 174725 - RNA, 23 nt, Human
uucaugugccuggaacgcugggc

SEQ ID NO: 174726 - RNA, 23 nt, Human
aaugauaacaacacaacaucaag

SEQ ID NO: 174727 - RNA, 27 nt, Human
acucaaaauaauuaccaaaaaaaaaaa

SEQ ID NO: 174728 - RNA, 19 nt, Human
caacaucaaggcaaagaga

SEQ ID NO: 174729 - RNA, 21 nt, Human
cacaacaucaaggcaaagaga

SEQ ID NO: 174730 - RNA, 24 nt, Human
cacacagacaaacaugcccaggag

SEQ ID NO: 174731 - RNA, 20 nt, Human
caccgcauggcgcggccggc

SEQ ID NO: 174732 - RNA, 19 nt, Human
caucaaggcaaagagaaca

SEQ ID NO: 174733 - RNA, 20 nt, Human
ccgccgccaccgccgccgcu

SEQ ID NO: 174734 - RNA, 21 nt, Human
ccgccgccaccgccgccgcug

SEQ ID NO: 174735 - RNA, 22 nt, Human
ccgccgccaccgccgccgcugc

SEQ ID NO: 174736 - RNA, 25 nt, Human
ccgggucccuccacguguccgccgc

SEQ ID NO: 174737 - RNA, 19 nt, Human
ccuccacguguccgccgcc

SEQ ID NO: 174738 - RNA, 23 nt, Human
cgggugggcucuggcggccuggg

SEQ ID NO: 174739 - RNA, 30 nt, Human
cucaaaauaauuaccaaaaaaaaaaaaucc

SEQ ID NO: 174740 - RNA, 19 nt, Human
gagcugcggcugcgcccgg

SEQ ID NO: 174741 - RNA, 22 nt, Human
gcacacagacaaacaugcccag

SEQ ID NO: 174742 - RNA, 24 nt, Human
gcccggguucggagcgucgggguc

SEQ ID NO: 174743 - RNA, 20 nt, Human
gccgccgccaccgccgccgc

SEQ ID NO: 174744 - RNA, 26 nt, Human
gggcagaaggcgcgggccgggucccu

SEQ ID NO: 174745 - RNA, 25 nt, Human
gggucccuccacguguccgccgccc

SEQ ID NO: 174746 - RNA, 24 nt, Human
guccgggugcgguggcgggucugg

SEQ ID NO: 174747 - RNA, 24 nt, Human
uaacaacacaacaucaaggcaaag

SEQ ID NO: 174748 - RNA, 18 nt, Human
uacagcacacagacaaac

SEQ ID NO: 174749 - RNA, 19 nt, Human
uacagcacacagacaaaca

SEQ ID NO: 174750 - RNA, 18 nt, Human
ugcgguggcgggucuggc

SEQ ID NO: 174751 - RNA, 19 nt, Human
ugcgguggcgggucugggc

SEQ ID NO: 174752 - RNA, 25 nt, Human
uuaaaugauaacaacacaacaucaa

SEQ ID NO: 174753 - RNA, 20 nt, Human
aaaacuuggaaucaaaaaaa

SEQ ID NO: 174754 - RNA, 21 nt, Human
aaacaagaauuggcucugaac

SEQ ID NO: 174755 - RNA, 26 nt, Human
aaacaagaauuggcucugaaccaaaa

SEQ ID NO: 174756 - RNA, 28 nt, Human
aaaccaaaaagaagggaagaaaauccag

SEQ ID NO: 174757 - RNA, 19 nt, Human
aagaaaccauucauaagaa

SEQ ID NO: 174758 - RNA, 21 nt, Human
aagcauaacagguugaagugg

SEQ ID NO: 174759 - RNA, 28 nt, Human
acagcacagugagaugaggcugaggaaa

SEQ ID NO: 174760 - RNA, 23 nt, Human
acgauagauacgggcaggaggcc

SEQ ID NO: 174761 - RNA, 18 nt, Human
acuccggcgcccagggag

SEQ ID NO: 174762 - RNA, 22 nt, Human
acuccggcgcccagggaggcgg

SEQ ID NO: 174763 - RNA, 20 nt, Human
agaaacugguggggaggaaa

SEQ ID NO: 174764 - RNA, 20 nt, Human
agaaauaagaaggaacaaac

SEQ ID NO: 174765 - RNA, 21 nt, Human
agaagggaagaaaauccagag

SEQ ID NO: 174766 - RNA, 21 nt, Human
agagaaccuucuggggugaug

SEQ ID NO: 174767 - RNA, 20 nt, Human
aggaggccgcugaugcugac

SEQ ID NO: 174768 - RNA, 21 nt, Human
aggcugaggaaacgacuacaa

SEQ ID NO: 174769 - RNA, 20 nt, Human
agugaugaucaaguuacugc

SEQ ID NO: 174770 - RNA, 24 nt, Human
auaaaaucuuccacaggguaaauu

SEQ ID NO: 174771 - RNA, 25 nt, Human
auaaaaucuuccacaggguaaauua

SEQ ID NO: 174772 - RNA, 23 nt, Human
aucaauggcugccaacaauuggg

SEQ ID NO: 174773 - RNA, 19 nt, Human
aucaucccacucaucauau

SEQ ID NO: 174774 - RNA, 19 nt, Human
aucuauuaccgcagaaaua

SEQ ID NO: 174775 - RNA, 21 nt, Human
augaagagagcuaccucagug

SEQ ID NO: 174776 - RNA, 19 nt, Human
augaauaacugauuugcua

SEQ ID NO: 174777 - RNA, 21 nt, Human
auuucucuccccuuuuacucu

SEQ ID NO: 174778 - RNA, 19 nt, Human
caaaaccaaaaagaaggga

SEQ ID NO: 174779 - RNA, 20 nt, Human
caaaacuucacuguagcuaa

SEQ ID NO: 174780 - RNA, 22 nt, Human
caaagaaaacuaaccuauagug

SEQ ID NO: 174781 - RNA, 21 nt, Human
caagagaaccuucugggguga

SEQ ID NO: 174782 - RNA, 19 nt, Human
caccuggaaaaacguucac

SEQ ID NO: 174783 - RNA, 22 nt, Human
caccuggaaaaacguucacaga

SEQ ID NO: 174784 - RNA, 24 nt, Human
caggguaaauuaaaaauaaauuuc

SEQ ID NO: 174785 - RNA, 23 nt, Human
cagugagaugaggcugaggaaac

SEQ ID NO: 174786 - RNA, 24 nt, Human
caucaucuugugaugaagacacug

SEQ ID NO: 174787 - RNA, 23 nt, Human
ccacucaucauauccugcauuuc

SEQ ID NO: 174788 - RNA, 26 nt, Human
ccacugaaucacacaacauggaccaa

SEQ ID NO: 174789 - RNA, 24 nt, Human
ccgccgccugcuggcuucucuucc

SEQ ID NO: 174790 - RNA, 19 nt, Human
ccuacaugaauaacugauu

SEQ ID NO: 174791 - RNA, 20 nt, Human
cgcucggcguugccaggaag

SEQ ID NO: 174792 - RNA, 20 nt, Human
cguugccaggaagccgagag

SEQ ID NO: 174793 - RNA, 19 nt, Human
cuaccauggcucuucccca

SEQ ID NO: 174794 - RNA, 23 nt, Human
cucuccccuuuuacucuucauua

SEQ ID NO: 174795 - RNA, 18 nt, Human
cugaagcuugacuggagu

SEQ ID NO: 174796 - RNA, 24 nt, Human
cugaugcugacgccgccgccgccu

SEQ ID NO: 174797 - RNA, 20 nt, Human
cugcuggcuucucuuccggc

SEQ ID NO: 174798 - RNA, 22 nt, Human
cuucagaaauaagaaggaacaa

SEQ ID NO: 174799 - RNA, 25 nt, Human
gaccaaucucaaaucauuaugcuga

SEQ ID NO: 174800 - RNA, 18 nt, Human
gcugacgccgccgccgcc

SEQ ID NO: 174801 - RNA, 20 nt, Human
ggcgggucccgucgccgcca

SEQ ID NO: 174802 - RNA, 22 nt, Human
ggggugauggaaauauucugaa

SEQ ID NO: 174803 - RNA, 23 nt, Human
uaaaaaaauacuuuuuagagcau

SEQ ID NO: 174804 - RNA, 20 nt, Human
uaaaucauacaacaugauga

SEQ ID NO: 174805 - RNA, 26 nt, Human
uaagaauacacaguacaugacgccgc

SEQ ID NO: 174806 - RNA, 25 nt, Human
uacaacagcauuggcuauaucaggu

SEQ ID NO: 174807 - RNA, 23 nt, Human
uacaagaccaaaacuuggaauca

SEQ ID NO: 174808 - RNA, 20 nt, Human
uaccucaguguuagcagcaa

SEQ ID NO: 174809 - RNA, 19 nt, Human
uauagugguuacaagacca

SEQ ID NO: 174810 - RNA, 26 nt, Human
uaucaauuuaucaaaacucacugaau

SEQ ID NO: 174811 - RNA, 23 nt, Human
uaucagguuuucuuccuucuucc

SEQ ID NO: 174812 - RNA, 21 nt, Human
uauucugaagcuugacuggag

SEQ ID NO: 174813 - RNA, 23 nt, Human
ucagugaugaucaaguuacugcc

SEQ ID NO: 174814 - RNA, 24 nt, Human
uccacacauaaggagagaaaagca

SEQ ID NO: 174815 - RNA, 22 nt, Human
uccuuccacacauaaggagaga

SEQ ID NO: 174816 - RNA, 21 nt, Human
ucucuccccuuuuacucuuca

SEQ ID NO: 174817 - RNA, 20 nt, Human
ucugaaccaaaaccaaaaag

SEQ ID NO: 174818 - RNA, 24 nt, Human
ugaaacaagaauuggcucugaacc

SEQ ID NO: 174819 - RNA, 24 nt, Human
ugaaaggaacugacugagcaggua

SEQ ID NO: 174820 - RNA, 24 nt, Human
ugaaccaaaaccaaaaagaaggga

SEQ ID NO: 174821 - RNA, 24 nt, Human
ugaauaacugauuugcuacauaga

SEQ ID NO: 174822 - RNA, 19 nt, Human
ugaaucacacaacauggac

SEQ ID NO: 174823 - RNA, 19 nt, Human
ugacgccgccgccgccugc

SEQ ID NO: 174824 - RNA, 21 nt, Human
ugagcagguauacaagagaac

SEQ ID NO: 174825 - RNA, 26 nt, Human
ugagugguccuaccauggcucuuccc

SEQ ID NO: 174826 - RNA, 28 nt, Human
ugcaaauaacccaauuaaucugcuaaua

SEQ ID NO: 174827 - RNA, 23 nt, Human
uggaaaaacguucacagagaguu

SEQ ID NO: 174828 - RNA, 18 nt, Human
uggaaagaaaccauucau

SEQ ID NO: 174829 - RNA, 22 nt, Human
uggaaagaaaccauucauaaga

SEQ ID NO: 174830 - RNA, 23 nt, Human
uggaaagaaaccauucauaagaa

SEQ ID NO: 174831 - RNA, 18 nt, Human
uggaacaaagaaaacuaa

SEQ ID NO: 174832 - RNA, 22 nt, Human
uggaacaaagaaaacuaaccua

SEQ ID NO: 174833 - RNA, 23 nt, Human
uggacacacggucagcaugcaua

SEQ ID NO: 174834 - RNA, 18 nt, Human
uggcucugaaccaaaacc

SEQ ID NO: 174835 - RNA, 22 nt, Human
uggggugauggaaauauucuga

SEQ ID NO: 174836 - RNA, 23 nt, Human
ugugugggucacaugacuccggc

SEQ ID NO: 174837 - RNA, 26 nt, Human
uguuaccagugcacaugugaggacag

SEQ ID NO: 174838 - RNA, 18 nt, Human
uguuuguuuuaaaaaaua

SEQ ID NO: 174839 - RNA, 18 nt, Human
uuagucucaaaagccuca

SEQ ID NO: 174840 - RNA, 20 nt, Human
uuagucucaaaagccucaua

SEQ ID NO: 174841 - RNA, 21 nt, Human
uucaccaguuuuccccuugga

SEQ ID NO: 174842 - RNA, 23 nt, Human
uucauaagaauacacaguacaug

SEQ ID NO: 174843 - RNA, 19 nt, Human
uucgaggucuguacuacuc

SEQ ID NO: 174844 - RNA, 20 nt, Human
uugcaaauaagaugaagaga

SEQ ID NO: 174845 - RNA, 21 nt, Human
uuguaguaucagaaacuggug

SEQ ID NO: 174846 - RNA, 18 nt, Human
uugugugggucacaugac

SEQ ID NO: 174847 - RNA, 23 nt, Human
uuuuaaaaucaucccacucauca

SEQ ID NO: 174848 - RNA, 22 nt, Human
aggcagcugcugcuuuuccugg

SEQ ID NO: 174849 - RNA, 23 nt, Human
aggcagcugcugcuuuuccuggu

SEQ ID NO: 174850 - RNA, 19 nt, Human
cagcagcuccagggcccug

SEQ ID NO: 174851 - RNA, 19 nt, Human
ccccagcagcuccagggcc

SEQ ID NO: 174852 - RNA, 19 nt, Human
cuccagggcccugaguucc

SEQ ID NO: 174853 - RNA, 22 nt, Human
cuggucaguggagcccuuggcc

SEQ ID NO: 174854 - RNA, 25 nt, Human
cuucuuuguccaaggugacugagga

SEQ ID NO: 174855 - RNA, 19 nt, Human
cuuggaguuggaaaagaug

SEQ ID NO: 174856 - RNA, 19 nt, Human
cuuggcuuggccccagcag

SEQ ID NO: 174857 - RNA, 19 nt, Human
gcuaagcgggcccagcugg

SEQ ID NO: 174858 - RNA, 22 nt, Human
ggugggcuaagcgggcccagcu

SEQ ID NO: 174859 - RNA, 26 nt, Human
gguuugagguaggggaggccuuggcu

SEQ ID NO: 174860 - RNA, 24 nt, Human
guggagcccuuggccucaugccug

SEQ ID NO: 174861 - RNA, 20 nt, Human
uccugguccuugguagggga

SEQ ID NO: 174862 - RNA, 22 nt, Human
ugaugaacucuuggacccugug

SEQ ID NO: 174863 - RNA, 20 nt, Human
ugccuggugggcuaagcggg

SEQ ID NO: 174864 - RNA, 21 nt, Human
uggaaaagauggaaucugagg

SEQ ID NO: 174865 - RNA, 24 nt, Human
uggagagcaggcagcugcugcuuu

SEQ ID NO: 174866 - RNA, 23 nt, Human
uggagcccuuggccucaugccug

SEQ ID NO: 174867 - RNA, 24 nt, Human
uggagcccuuggccucaugccugg

SEQ ID NO: 174868 - RNA, 20 nt, Human
uggccccagcagcuccaggg

SEQ ID NO: 174869 - RNA, 24 nt, Human
uuccugccagaggcuggagagcag

SEQ ID NO: 174870 - RNA, 22 nt, Human
uuugagguaggggaggccuugg

SEQ ID NO: 174871 - RNA, 21 nt, Human
aaggaggcaggcccagccuga

SEQ ID NO: 174872 - RNA, 19 nt, Human
accaaccaccagcccucac

SEQ ID NO: 174873 - RNA, 26 nt, Human
accaccagcccucaccccagccccag

SEQ ID NO: 174874 - RNA, 21 nt, Human
accagcccucaccccagcccc

SEQ ID NO: 174875 - RNA, 20 nt, Human
acccaaagauuugcaccgug

SEQ ID NO: 174876 - RNA, 23 nt, Human
accccagccccggggcaaagccg

SEQ ID NO: 174877 - RNA, 19 nt, Human
acccuugaacccccuuacc

SEQ ID NO: 174878 - RNA, 21 nt, Human
agcccucaccccagccccaga

SEQ ID NO: 174879 - RNA, 22 nt, Human
aggaagaggggugccuaaucua

SEQ ID NO: 174880 - RNA, 23 nt, Human
aggaagagugaggaacuagaggc

SEQ ID NO: 174881 - RNA, 22 nt, Human
aggacaguguuuccaccuuagg

SEQ ID NO: 174882 - RNA, 19 nt, Human
aggaccaugacccuugaac

SEQ ID NO: 174883 - RNA, 24 nt, Human
aggcagcggcaaaauuucgguccg

SEQ ID NO: 174884 - RNA, 21 nt, Human
caaccaccagcccucacccca

SEQ ID NO: 174885 - RNA, 23 nt, Human
caaccaccagcccucaccccagc

SEQ ID NO: 174886 - RNA, 26 nt, Human
caccccagccccagagccacaaguuc

SEQ ID NO: 174887 - RNA, 19 nt, Human
cacccccucggucccaagg

SEQ ID NO: 174888 - RNA, 21 nt, Human
cagccugacagucagaaaucc

SEQ ID NO: 174889 - RNA, 18 nt, Human
cagcgcggcucagcuccc

SEQ ID NO: 174890 - RNA, 19 nt, Human
cagcgcggggagggcucug

SEQ ID NO: 174891 - RNA, 20 nt, Human
cagcgcggggagggcucugg

SEQ ID NO: 174892 - RNA, 20 nt, Human
caugaagugagucuaggugu

SEQ ID NO: 174893 - RNA, 20 nt, Human
cauuaaggaagaggggugcc

SEQ ID NO: 174894 - RNA, 21 nt, Human
ccaaccaccagcccucacccc

SEQ ID NO: 174895 - RNA, 18 nt, Human
ccaccaggccucugggca

SEQ ID NO: 174896 - RNA, 24 nt, Human
ccagccccagagccacaaguucuc

SEQ ID NO: 174897 - RNA, 24 nt, Human
ccagccccggggcaaagccgggga

SEQ ID NO: 174898 - RNA, 23 nt, Human
cccacagcauugcagagacacaa

SEQ ID NO: 174899 - RNA, 23 nt, Human
ccccagagccacaaguucucucu

SEQ ID NO: 174900 - RNA, 19 nt, Human
cccccauuuccugccccau

SEQ ID NO: 174901 - RNA, 25 nt, Human
ccccccauuuccugccccaugagaa

SEQ ID NO: 174902 - RNA, 19 nt, Human
ccgccgcccggcucuucgc

SEQ ID NO: 174903 - RNA, 19 nt, Human
cggcaaaauuucgguccgg

SEQ ID NO: 174904 - RNA, 20 nt, Human
cuccaggagcucacugaccc

SEQ ID NO: 174905 - RNA, 18 nt, Human
cucccggcucguugcggc

SEQ ID NO: 174906 - RNA, 20 nt, Human
cucccggcucguugcggcug

SEQ ID NO: 174907 - RNA, 20 nt, Human
cucugggcacuggaaaaagg

SEQ ID NO: 174908 - RNA, 21 nt, Human
cucuucuccaggagcucacug

SEQ ID NO: 174909 - RNA, 20 nt, Human
cugaagaugcagaugagggg

SEQ ID NO: 174910 - RNA, 21 nt, Human
cugcccgggggcgguuggcgg

SEQ ID NO: 174911 - RNA, 23 nt, Human
cuggagcgcgcccgaucccuccc

SEQ ID NO: 174912 - RNA, 24 nt, Human
cuggugccccuucuuuugugccca

SEQ ID NO: 174913 - RNA, 19 nt, Human
cuguugcaccccagccccg

SEQ ID NO: 174914 - RNA, 23 nt, Human
cuguugcaccccagccccggggc

SEQ ID NO: 174915 - RNA, 23 nt, Human
gaggcaggcccagccucccaagg

SEQ ID NO: 174916 - RNA, 20 nt, Human
gccacaaguucucucugugg

SEQ ID NO: 174917 - RNA, 18 nt, Human
gccccgggccugaggguc

SEQ ID NO: 174918 - RNA, 20 nt, Human
gcccgggggcgguuggcggg

SEQ ID NO: 174919 - RNA, 25 nt, Human
gcccucaccccagccccagagccac

SEQ ID NO: 174920 - RNA, 18 nt, Human
gcgcggggagggcucugg

SEQ ID NO: 174921 - RNA, 19 nt, Human
gcggggcgcgaggaccaag

SEQ ID NO: 174922 - RNA, 19 nt, Human
gcgguggugguucuggccg

SEQ ID NO: 174923 - RNA, 18 nt, Human
ggaggcaggcccagccug

SEQ ID NO: 174924 - RNA, 21 nt, Human
ggagggcucuggccgccgccc

SEQ ID NO: 174925 - RNA, 18 nt, Human
gggcaucagguucugaaa

SEQ ID NO: 174926 - RNA, 19 nt, Human
gggcugugccgggcucucg

SEQ ID NO: 174927 - RNA, 24 nt, Human
gggguuuguuggaaauuccuggca

SEQ ID NO: 174928 - RNA, 19 nt, Human
ggguccucauggggcuggg

SEQ ID NO: 174929 - RNA, 21 nt, Human
guggagugcaggagggcccug

SEQ ID NO: 174930 - RNA, 23 nt, Human
guggggguggggcuggagcaggu

SEQ ID NO: 174931 - RNA, 20 nt, Human
ucauguggagugcaggaggg

SEQ ID NO: 174932 - RNA, 19 nt, Human
uccccacccccucgguccc

SEQ ID NO: 174933 - RNA, 21 nt, Human
ucccuggcuccgcgucccacu

SEQ ID NO: 174934 - RNA, 22 nt, Human
ucuccaggagcucacugacccu

SEQ ID NO: 174935 - RNA, 22 nt, Human
ugaacccccuuaccuaacguaa

SEQ ID NO: 174936 - RNA, 23 nt, Human
ugaccucaucauguggagugcag

SEQ ID NO: 174937 - RNA, 20 nt, Human
ugagagcuuuggaauccaug

SEQ ID NO: 174938 - RNA, 18 nt, Human
ugagaggacaguguuucc

SEQ ID NO: 174939 - RNA, 19 nt, Human
ugaggaacuagaggcucag

SEQ ID NO: 174940 - RNA, 22 nt, Human
ugaggguccucauggggcuggg

SEQ ID NO: 174941 - RNA, 19 nt, Human
ugcaccccagccccggggc

SEQ ID NO: 174942 - RNA, 18 nt, Human
uggaacucccggggcuuu

SEQ ID NO: 174943 - RNA, 24 nt, Human
uggcagcgcggggagggcucuggc

SEQ ID NO: 174944 - RNA, 24 nt, Human
ugggauuauguguuggggaacuuc

SEQ ID NO: 174945 - RNA, 19 nt, Human
ugggggacccuccugccuc

SEQ ID NO: 174946 - RNA, 18 nt, Human
uggggguggggcuggagc

SEQ ID NO: 174947 - RNA, 23 nt, Human
ugguucuggccguuuccugcccg

SEQ ID NO: 174948 - RNA, 21 nt, Human
ugucuccucucuucuccagga

SEQ ID NO: 174949 - RNA, 18 nt, Human
uguggagugcaggagggc

SEQ ID NO: 174950 - RNA, 23 nt, Human
ugugggggacccuccugccucug

SEQ ID NO: 174951 - RNA, 18 nt, Human
ugugugaugaggaccaug

SEQ ID NO: 174952 - RNA, 24 nt, Human
uguugcaccccagccccggggcaa

SEQ ID NO: 174953 - RNA, 24 nt, Human
uucaccaaccaccagcccucaccc

SEQ ID NO: 174954 - RNA, 25 nt, Human
uucaccaaccaccagcccucacccc

SEQ ID NO: 174955 - RNA, 18 nt, Human
uuccugcccgggggcggu

SEQ ID NO: 174956 - RNA, 24 nt, Human
uuucaccaaccaccagcccucacc

SEQ ID NO: 174957 - RNA, 26 nt, Human
uuuuguggagcgcggcgcgguggugg

SEQ ID NO: 174958 - RNA, 19 nt, Human
acuggccugcaggccccgc

SEQ ID NO: 174959 - RNA, 18 nt, Human
agcucugcacagcugcuc

SEQ ID NO: 174960 - RNA, 18 nt, Human
caccgggcacagagccgu

SEQ ID NO: 174961 - RNA, 18 nt, Human
cagccccgucggcgcggg

SEQ ID NO: 174962 - RNA, 20 nt, Human
cagcugcuccggcacagccc

SEQ ID NO: 174963 - RNA, 18 nt, Human
caggccccgcacccucac

SEQ ID NO: 174964 - RNA, 23 nt, Human
ccccgcacccucaccgugugcug

SEQ ID NO: 174965 - RNA, 26 nt, Human
cccgcacccucaccgugugcuguccu

SEQ ID NO: 174966 - RNA, 19 nt, Human
cgcgccugcagcucugcac

SEQ ID NO: 174967 - RNA, 21 nt, Human
cucugcacagcugcuccggca

SEQ ID NO: 174968 - RNA, 18 nt, Human
cugcacagcugcuccggc

SEQ ID NO: 174969 - RNA, 21 nt, Human
cuggccugcaggccccgcacc

SEQ ID NO: 174970 - RNA, 21 nt, Human
gcaccgggcacagagccgugg

SEQ ID NO: 174971 - RNA, 18 nt, Human
gcgccugcagcucugcac

SEQ ID NO: 174972 - RNA, 21 nt, Human
gcgcgccugcagcucugcaca

SEQ ID NO: 174973 - RNA, 23 nt, Human
ucaccgugugcuguccugggggu

SEQ ID NO: 174974 - RNA, 19 nt, Human
ugcacagcugcuccggccg

SEQ ID NO: 174975 - RNA, 19 nt, Human
uggcaccgggcacagagcc

SEQ ID NO: 174976 - RNA, 22 nt, Human
uggccugcaggccccgcacccu

SEQ ID NO: 174977 - RNA, 18 nt, Human
aaacagaaggaagauuaa

SEQ ID NO: 174978 - RNA, 24 nt, Human
uaagugcccuaaguaguuucucuc

SEQ ID NO: 174979 - RNA, 21 nt, Human
aacauagcuacaaugauaaga

SEQ ID NO: 174980 - RNA, 24 nt, Human
aacauagcuacaaugauaagaagc

SEQ ID NO: 174981 - RNA, 18 nt, Human
aagaagcuacacgccucc

SEQ ID NO: 174982 - RNA, 22 nt, Human
accaauguacgccauacacaua

SEQ ID NO: 174983 - RNA, 24 nt, Human
ccagcgagccgaccuagcgagcgu

SEQ ID NO: 174984 - RNA, 22 nt, Human
ccccagccaccucgggcaccug

SEQ ID NO: 174985 - RNA, 24 nt, Human
ccuguugucaggaccuccugaggc

SEQ ID NO: 174986 - RNA, 19 nt, Human
cgcggagccccggccagcg

SEQ ID NO: 174987 - RNA, 24 nt, Human
cucccuaagauguauaaaggcaaa

SEQ ID NO: 174988 - RNA, 19 nt, Human
cuuggcaaaauaaacugag

SEQ ID NO: 174989 - RNA, 22 nt, Human
gacucaaucguguauucagugg

SEQ ID NO: 174990 - RNA, 23 nt, Human
gcgucugcaggugcugucugucu

SEQ ID NO: 174991 - RNA, 21 nt, Human
ggaaauuccuuguggacaaag

SEQ ID NO: 174992 - RNA, 20 nt, Human
ggagauucuaggccuggccu

SEQ ID NO: 174993 - RNA, 23 nt, Human
ggcacuugcagggccaacuggag

SEQ ID NO: 174994 - RNA, 22 nt, Human
ggcgaggaggagggccaagcac

SEQ ID NO: 174995 - RNA, 24 nt, Human
ggcgugagacggcaggguccugag

SEQ ID NO: 174996 - RNA, 24 nt, Human
uaaacugagacuggucucagauau

SEQ ID NO: 174997 - RNA, 25 nt, Human
uaacauagcuacaaugauaagaagc

SEQ ID NO: 174998 - RNA, 21 nt, Human
uauuugggguucacaaaggcg

SEQ ID NO: 174999 - RNA, 24 nt, Human
ucacugggccagacucaaucgugu

SEQ ID NO: 175000 - RNA, 22 nt, Human
ucaguggaaggcugacugaacc

SEQ ID NO: 175001 - RNA, 22 nt, Human
uccccagccaccucgggcaccu

SEQ ID NO: 175002 - RNA, 18 nt, Human
ucccucuggggcuccccu

SEQ ID NO: 175003 - RNA, 25 nt, Human
ucccucuggggcuccccugagacaa

SEQ ID NO: 175004 - RNA, 26 nt, Human
uccuuguggacaaaggacagacggaa

SEQ ID NO: 175005 - RNA, 22 nt, Human
ucucccuaagauguauaaaggc

SEQ ID NO: 175006 - RNA, 22 nt, Human
ucugcaggugcugucugucugg

SEQ ID NO: 175007 - RNA, 23 nt, Human
ugauaagaagcuacacgccuccc

SEQ ID NO: 175008 - RNA, 21 nt, Human
ugccccguucccuuacuguuu

SEQ ID NO: 175009 - RNA, 18 nt, Human
uggaaggcugacugaacc

SEQ ID NO: 175010 - RNA, 18 nt, Human
uuccuccaggcacuugca

SEQ ID NO: 175011 - RNA, 24 nt, Human
aaaaaaaaucagaggacaauaaaa

SEQ ID NO: 175012 - RNA, 18 nt, Human
aaaaaaagcagcagauaa

SEQ ID NO: 175013 - RNA, 22 nt, Human
aaaagaaaugcaagccuauuaa

SEQ ID NO: 175014 - RNA, 23 nt, Human
aaaagcauccaugacuaucacag

SEQ ID NO: 175015 - RNA, 22 nt, Human
aaaaugccaauuaaacauuuuc

SEQ ID NO: 175016 - RNA, 22 nt, Human
aaacaaaaaaaacuguagagag

SEQ ID NO: 175017 - RNA, 22 nt, Human
aaacaaauguggaacaguagca

SEQ ID NO: 175018 - RNA, 23 nt, Human
aaacaacagaacugaagauuuau

SEQ ID NO: 175019 - RNA, 23 nt, Human
aaauaauuuauugauuagacauc

SEQ ID NO: 175020 - RNA, 21 nt, Human
aacagcccacaaaccaaacaa

SEQ ID NO: 175021 - RNA, 19 nt, Human
aacauucuuaggcacaaga

SEQ ID NO: 175022 - RNA, 24 nt, Human
aacuuggcaaauaucauuagcgag

SEQ ID NO: 175023 - RNA, 19 nt, Human
aagcuaugcuggaguacaa

SEQ ID NO: 175024 - RNA, 18 nt, Human
acaaaaccuuaaaucaca

SEQ ID NO: 175025 - RNA, 24 nt, Human
accaaacaaaaaaaacuguagaga

SEQ ID NO: 175026 - RNA, 21 nt, Human
accccaaggaaaauaaaagca

SEQ ID NO: 175027 - RNA, 23 nt, Human
agaggacaauaaaacugauuuag

SEQ ID NO: 175028 - RNA, 23 nt, Human
agaucagacauuguuaaauuucc

SEQ ID NO: 175029 - RNA, 21 nt, Human
agcccacaaaccaaacaaaaa

SEQ ID NO: 175030 - RNA, 18 nt, Human
aggaaggcugguucacag

SEQ ID NO: 175031 - RNA, 20 nt, Human
aucacagaugaaaacaaaau

SEQ ID NO: 175032 - RNA, 19 nt, Human
augaaagaaaauauaugca

SEQ ID NO: 175033 - RNA, 18 nt, Human
augcuggaguacaaaaac

SEQ ID NO: 175034 - RNA, 21 nt, Human
augcuggaguacaaaaaccug

SEQ ID NO: 175035 - RNA, 22 nt, Human
caaaaaaaacuguagagagaaa

SEQ ID NO: 175036 - RNA, 18 nt, Human
caaauuuccuggggacau

SEQ ID NO: 175037 - RNA, 19 nt, Human
cacguucagcagaaacuac

SEQ ID NO: 175038 - RNA, 21 nt, Human
cacuuuuccuuuuuugcuacu

SEQ ID NO: 175039 - RNA, 22 nt, Human
cagcccacaaaccaaacaaaaa

SEQ ID NO: 175040 - RNA, 23 nt, Human
cauagaagguacaguucuccaga

SEQ ID NO: 175041 - RNA, 18 nt, Human
cccacaaaccaaacaaaa

SEQ ID NO: 175042 - RNA, 21 nt, Human
cccacaaaccaaacaaaaaaa

SEQ ID NO: 175043 - RNA, 18 nt, Human
ccuggggacaugguuuau

SEQ ID NO: 175044 - RNA, 19 nt, Human
cgaugcgacuuuuggaaac

SEQ ID NO: 175045 - RNA, 20 nt, Human
cucauggaaaaggaaaaaaa

SEQ ID NO: 175046 - RNA, 20 nt, Human
cucccauuuaaaacaaaacc

SEQ ID NO: 175047 - RNA, 22 nt, Human
cuguagagagaaauuaaaacua

SEQ ID NO: 175048 - RNA, 19 nt, Human
cugugaaaacaaaugugga

SEQ ID NO: 175049 - RNA, 21 nt, Human
cuuguaaacaucagugugcac

SEQ ID NO: 175050 - RNA, 23 nt, Human
gaaaagaauuccauuaaauauaa

SEQ ID NO: 175051 - RNA, 20 nt, Human
gagaaagacucuuucaaucu

SEQ ID NO: 175052 - RNA, 25 nt, Human
gagaaagacucuuucaaucuuguaa

SEQ ID NO: 175053 - RNA, 21 nt, Human
gccaguugacccaagagcaac

SEQ ID NO: 175054 - RNA, 27 nt, Human
gcuggaguacaaaaaccugaaauucug

SEQ ID NO: 175055 - RNA, 21 nt, Human
ggaggaaagcacuuuuccuuu

SEQ ID NO: 175056 - RNA, 23 nt, Human
gugcaagcaaaccauagaaggua

SEQ ID NO: 175057 - RNA, 20 nt, Human
uaaaaaaagcagcagauaaa

SEQ ID NO: 175058 - RNA, 18 nt, Human
uaaaacaaaaccuuaaau

SEQ ID NO: 175059 - RNA, 29 nt, Human
uaaucaggaaaaaaaaucuuggaaaucuc

SEQ ID NO: 175060 - RNA, 20 nt, Human
uaauugacaacuuuucaauu

SEQ ID NO: 175061 - RNA, 20 nt, Human
uauuuuguauuuucaaagua

SEQ ID NO: 175062 - RNA, 23 nt, Human
uauuuuguauuuucaaaguauuu

SEQ ID NO: 175063 - RNA, 24 nt, Human
uccuuuuuugcuacuuaagaaugu

SEQ ID NO: 175064 - RNA, 21 nt, Human
ucuaaucaggaaaaaaaaucu

SEQ ID NO: 175065 - RNA, 20 nt, Human
ucuccagaaagcauauuuug

SEQ ID NO: 175066 - RNA, 23 nt, Human
ucuccagaaagcauauuuuguua

SEQ ID NO: 175067 - RNA, 19 nt, Human
ucugagcaugaaaauaauu

SEQ ID NO: 175068 - RNA, 19 nt, Human
ugaaaacaaauguggaaca

SEQ ID NO: 175069 - RNA, 24 nt, Human
ugaaagaaaauauaugcauuuuug

SEQ ID NO: 175070 - RNA, 19 nt, Human
ugacagcacguucagcaga

SEQ ID NO: 175071 - RNA, 23 nt, Human
ugacccaagagcaacugaaacau

SEQ ID NO: 175072 - RNA, 21 nt, Human
ugcacauguaaaucuguaagc

SEQ ID NO: 175073 - RNA, 25 nt, Human
ugcauuuuugccaacagacugcucu

SEQ ID NO: 175074 - RNA, 23 nt, Human
uggaaucauaaacaacagaacca

SEQ ID NO: 175075 - RNA, 20 nt, Human
uggaguacaaaaaccugaaa

SEQ ID NO: 175076 - RNA, 20 nt, Human
ugucucaguauucuuuacca

SEQ ID NO: 175077 - RNA, 19 nt, Human
ugugaaaacaaauguggaa

SEQ ID NO: 175078 - RNA, 20 nt, Human
ugugugcacauguaaaucug

SEQ ID NO: 175079 - RNA, 18 nt, Human
ugugugugugugcacaug

SEQ ID NO: 175080 - RNA, 20 nt, Human
ugugugugugugcacaugua

SEQ ID NO: 175081 - RNA, 27 nt, Human
uuaaaaaaugccaauuaaacauuuuca

SEQ ID NO: 175082 - RNA, 23 nt, Human
uuaucuccaaauacccaaauaau

SEQ ID NO: 175083 - RNA, 23 nt, Human
uuccaacagcccacaaaccaaac

SEQ ID NO: 175084 - RNA, 22 nt, Human
uuccaguucuuuuauuuuucua

SEQ ID NO: 175085 - RNA, 24 nt, Human
uuggaaucaguuauuuuuccccac

SEQ ID NO: 175086 - RNA, 21 nt, Human
uuugugugugugugcacaugu

SEQ ID NO: 175087 - RNA, 24 nt, Human
uuuucagcucaauuucagcacccc

SEQ ID NO: 175088 - RNA, 24 nt, Human
aaacauaaucaauaaugcgaucac

SEQ ID NO: 175089 - RNA, 18 nt, Human
aaccugggugcugggggc

SEQ ID NO: 175090 - RNA, 22 nt, Human
aagggcucuuaggaaagaauuc

SEQ ID NO: 175091 - RNA, 22 nt, Human
aaggggcaaaggauucgucaga

SEQ ID NO: 175092 - RNA, 24 nt, Human
aaguaucuucucuuuauuuaaguu

SEQ ID NO: 175093 - RNA, 19 nt, Human
aagugauaucugucaaaau

SEQ ID NO: 175094 - RNA, 24 nt, Human
aauacuagcgugugacagcugccu

SEQ ID NO: 175095 - RNA, 18 nt, Human
acaagggucuggguagac

SEQ ID NO: 175096 - RNA, 20 nt, Human
acagaaacuaacgcaaccgc

SEQ ID NO: 175097 - RNA, 18 nt, Human
acagcugccuggcaucau

SEQ ID NO: 175098 - RNA, 23 nt, Human
accauacgugauuucgaagggau

SEQ ID NO: 175099 - RNA, 24 nt, Human
accgagaggagggggagggcaguu

SEQ ID NO: 175100 - RNA, 25 nt, Human
agaaaagaaauuuaauguaaaaaga

SEQ ID NO: 175101 - RNA, 23 nt, Human
agacacacaguggcccuuucaua

SEQ ID NO: 175102 - RNA, 22 nt, Human
agagaccuauagggcagccucc

SEQ ID NO: 175103 - RNA, 19 nt, Human
agaguucuccucgcucccc

SEQ ID NO: 175104 - RNA, 19 nt, Human
agaugacgaugaucuacag

SEQ ID NO: 175105 - RNA, 21 nt, Human
agccaauacuagcgugugaca

SEQ ID NO: 175106 - RNA, 21 nt, Human
aggaagacacuugcgaaugga

SEQ ID NO: 175107 - RNA, 21 nt, Human
aggaagaggggcgcuccggcc

SEQ ID NO: 175108 - RNA, 19 nt, Human
agggggaggggagucuggc

SEQ ID NO: 175109 - RNA, 24 nt, Human
agggggcagcgguauugcuggcuc

SEQ ID NO: 175110 - RNA, 22 nt, Human
agggggcccggcuggcugcacc

SEQ ID NO: 175111 - RNA, 23 nt, Human
agguauuguuugguucugacccu

SEQ ID NO: 175112 - RNA, 24 nt, Human
aguccccacacccaccccacccag

SEQ ID NO: 175113 - RNA, 20 nt, Human
aguggcaggggugaggagga

SEQ ID NO: 175114 - RNA, 22 nt, Human
aguugcuucuaccacuccccag

SEQ ID NO: 175115 - RNA, 20 nt, Human
auccaaggccgccgcugucc

SEQ ID NO: 175116 - RNA, 20 nt, Human
auccauuucccuccuuacag

SEQ ID NO: 175117 - RNA, 22 nt, Human
caaaggaccccuccccggccca

SEQ ID NO: 175118 - RNA, 21 nt, Human
cacaagggucuggguagacac

SEQ ID NO: 175119 - RNA, 23 nt, Human
cacacccugcucuggccugcacu

SEQ ID NO: 175120 - RNA, 22 nt, Human
caccaggacagacucuggccag

SEQ ID NO: 175121 - RNA, 21 nt, Human
cacccaccccacccagccuuc

SEQ ID NO: 175122 - RNA, 19 nt, Human
cacccagccuucacacacc

SEQ ID NO: 175123 - RNA, 20 nt, Human
cacccagccuucacacaccg

SEQ ID NO: 175124 - RNA, 19 nt, Human
caccccacccagccuucac

SEQ ID NO: 175125 - RNA, 24 nt, Human
caccccacccagccuucacacacc

SEQ ID NO: 175126 - RNA, 19 nt, Human
cagaucacaaugaagccaa

SEQ ID NO: 175127 - RNA, 21 nt, Human
cagcaaagagcgguaucuaga

SEQ ID NO: 175128 - RNA, 21 nt, Human
cagcacagagaagacaacuaa

SEQ ID NO: 175129 - RNA, 19 nt, Human
caggacugugagccaggcc

SEQ ID NO: 175130 - RNA, 19 nt, Human
cagguggcuccuaauccaa

SEQ ID NO: 175131 - RNA, 20 nt, Human
caguagcaccaacuggcugg

SEQ ID NO: 175132 - RNA, 25 nt, Human
cauaaaauggacaaaguacuagcuc

SEQ ID NO: 175133 - RNA, 19 nt, Human
ccaaucccaguccccacac

SEQ ID NO: 175134 - RNA, 21 nt, Human
ccaaucccaguccccacaccc

SEQ ID NO: 175135 - RNA, 23 nt, Human
cccacacccaccccacccagccu

SEQ ID NO: 175136 - RNA, 26 nt, Human
cccacacccaccccacccagccuuca

SEQ ID NO: 175137 - RNA, 24 nt, Human
cccaccccacccagccuucacaca

SEQ ID NO: 175138 - RNA, 19 nt, Human
cccaccgugaaagacagaa

SEQ ID NO: 175139 - RNA, 21 nt, Human
cccaccgugaaagacagaagc

SEQ ID NO: 175140 - RNA, 21 nt, Human
ccccaaagcccccugaagcag

SEQ ID NO: 175141 - RNA, 20 nt, Human
ccccaaucccaguccccaca

SEQ ID NO: 175142 - RNA, 22 nt, Human
ccccacccagccuucacacacc

SEQ ID NO: 175143 - RNA, 25 nt, Human
ccccauaccgggcucuggccccuuc

SEQ ID NO: 175144 - RNA, 26 nt, Human
cccuguccucagcucgcacgcauccg

SEQ ID NO: 175145 - RNA, 19 nt, Human
ccgcaaaggaccccucccc

SEQ ID NO: 175146 - RNA, 20 nt, Human
ccggggccgaggccgguggu

SEQ ID NO: 175147 - RNA, 20 nt, Human
ccugcucuugacgcccggac

SEQ ID NO: 175148 - RNA, 21 nt, Human
cgagaggagggggagggcagu

SEQ ID NO: 175149 - RNA, 19 nt, Human
cgcacacccugcucuggcc

SEQ ID NO: 175150 - RNA, 28 nt, Human
cggagagagaccuauagggcagccucca

SEQ ID NO: 175151 - RNA, 19 nt, Human
cggccuggggaagggggcc

SEQ ID NO: 175152 - RNA, 21 nt, Human
cuaauucuuuccccaaagccc

SEQ ID NO: 175153 - RNA, 23 nt, Human
cucaccgcaaaggaccccucccc

SEQ ID NO: 175154 - RNA, 25 nt, Human
cuccccggcccaccccugcucuuga

SEQ ID NO: 175155 - RNA, 23 nt, Human
cucgcuccccuggggcaugugug

SEQ ID NO: 175156 - RNA, 18 nt, Human
cucucaggcugacgccca

SEQ ID NO: 175157 - RNA, 27 nt, Human
cucuggccugcacuccacagcucgcac

SEQ ID NO: 175158 - RNA, 20 nt, Human
cucuuaggaaagaauucuga

SEQ ID NO: 175159 - RNA, 20 nt, Human
cugcgggcggggcaggacuc

SEQ ID NO: 175160 - RNA, 19 nt, Human
cugcuggccauuaauucug

SEQ ID NO: 175161 - RNA, 20 nt, Human
cuggccauuaauucugaagg

SEQ ID NO: 175162 - RNA, 22 nt, Human
cugugugugcggcgcuggagaa

SEQ ID NO: 175163 - RNA, 19 nt, Human
gaaccugggugcugggggc

SEQ ID NO: 175164 - RNA, 23 nt, Human
gaagacacuugcgaauggaggag

SEQ ID NO: 175165 - RNA, 21 nt, Human
gaagccccccagcuggccaca

SEQ ID NO: 175166 - RNA, 22 nt, Human
gaaggaagaggggcgcuccggc

SEQ ID NO: 175167 - RNA, 24 nt, Human
gacagacucuggccagcaaagagc

SEQ ID NO: 175168 - RNA, 18 nt, Human
gagccagauucauccauu

SEQ ID NO: 175169 - RNA, 19 nt, Human
gaguggaggaggaagcagg

SEQ ID NO: 175170 - RNA, 18 nt, Human
gauucauccauuucccuc

SEQ ID NO: 175171 - RNA, 23 nt, Human
gcaaaacauacucacagauacca

SEQ ID NO: 175172 - RNA, 22 nt, Human
gcacagucguccgugccuugcc

SEQ ID NO: 175173 - RNA, 23 nt, Human
gcaccggcacacucccagguggc

SEQ ID NO: 175174 - RNA, 21 nt, Human
gcagccuccagccaggcuucc

SEQ ID NO: 175175 - RNA, 20 nt, Human
gcccaggaagacacuugcga

SEQ ID NO: 175176 - RNA, 18 nt, Human
gcccauucacacacaucu

SEQ ID NO: 175177 - RNA, 21 nt, Human
gcgcuccggccuggggaaggg

SEQ ID NO: 175178 - RNA, 19 nt, Human
gcgggguaaaggugaaggg

SEQ ID NO: 175179 - RNA, 21 nt, Human
ggaagacacacaguggcccuu

SEQ ID NO: 175180 - RNA, 20 nt, Human
ggaagcugcgaacggcuuug

SEQ ID NO: 175181 - RNA, 21 nt, Human
ggagggagcugcgggcggggc

SEQ ID NO: 175182 - RNA, 18 nt, Human
ggcagccuccagccaggc

SEQ ID NO: 175183 - RNA, 22 nt, Human
ggccaggaguggaggaggaagc

SEQ ID NO: 175184 - RNA, 20 nt, Human
ggccuggggaagggggcccg

SEQ ID NO: 175185 - RNA, 25 nt, Human
gggaggaagacacacaguggcccuu

SEQ ID NO: 175186 - RNA, 19 nt, Human
gggcccggcuggcugcacc

SEQ ID NO: 175187 - RNA, 25 nt, Human
gggccgaggccgguggucuggagga

SEQ ID NO: 175188 - RNA, 20 nt, Human
ggggcuacgcacacccugcu

SEQ ID NO: 175189 - RNA, 24 nt, Human
gggugugggagggagcugcgggcg

SEQ ID NO: 175190 - RNA, 20 nt, Human
ggucugacagaagaaccugg

SEQ ID NO: 175191 - RNA, 22 nt, Human
ggugugggagggagcugcgggc

SEQ ID NO: 175192 - RNA, 23 nt, Human
gucaaaauaaguaaccgucuccc

SEQ ID NO: 175193 - RNA, 21 nt, Human
gucuggguagacacgugggau

SEQ ID NO: 175194 - RNA, 19 nt, Human
guuuuaaaaacaggagugg

SEQ ID NO: 175195 - RNA, 21 nt, Human
uaaaauggacaaaguacuagc

SEQ ID NO: 175196 - RNA, 20 nt, Human
uaaacauagcucaccgcaaa

SEQ ID NO: 175197 - RNA, 21 nt, Human
uaagaaacauaaucaauaaug

SEQ ID NO: 175198 - RNA, 26 nt, Human
uaaugcgaucaccagacuccacccaa

SEQ ID NO: 175199 - RNA, 23 nt, Human
uacgcacacccugcucuggccug

SEQ ID NO: 175200 - RNA, 19 nt, Human
uagaagccaggcaccucuc

SEQ ID NO: 175201 - RNA, 18 nt, Human
uagcagcucgcaggucac

SEQ ID NO: 175202 - RNA, 21 nt, Human
ucaauguaaacauagcucacc

SEQ ID NO: 175203 - RNA, 22 nt, Human
ucagaccaugauggaauacuga

SEQ ID NO: 175204 - RNA, 20 nt, Human
ucccagguggcuccuaaucc

SEQ ID NO: 175205 - RNA, 22 nt, Human
ucccaguccccacacccacccc

SEQ ID NO: 175206 - RNA, 22 nt, Human
uccccacacccaccccacccag

SEQ ID NO: 175207 - RNA, 18 nt, Human
ucccccaggccagcaggu

SEQ ID NO: 175208 - RNA, 21 nt, Human
uccuacagugcaacauguggg

SEQ ID NO: 175209 - RNA, 18 nt, Human
ucgcugggugucacucag

SEQ ID NO: 175210 - RNA, 24 nt, Human
ucugaaggcccagcgugcagggcu

SEQ ID NO: 175211 - RNA, 21 nt, Human
ucugaguuuuaaaaacaggag

SEQ ID NO: 175212 - RNA, 22 nt, Human
ucugcacagucguccgugccuu

SEQ ID NO: 175213 - RNA, 26 nt, Human
ucugugguuuaacaggaccccaaggc

SEQ ID NO: 175214 - RNA, 19 nt, Human
ugaaaauggagauuucaag

SEQ ID NO: 175215 - RNA, 19 nt, Human
ugacgcccaacagggaugc

SEQ ID NO: 175216 - RNA, 23 nt, Human
ugauuucgaagggauugaaaaug

SEQ ID NO: 175217 - RNA, 19 nt, Human
ugcaggagacaggacggca

SEQ ID NO: 175218 - RNA, 24 nt, Human
uggcacacugugucaauguaaaca

SEQ ID NO: 175219 - RNA, 21 nt, Human
uggcaccggcacacucccagg

SEQ ID NO: 175220 - RNA, 18 nt, Human
uggcaggggaggcggaga

SEQ ID NO: 175221 - RNA, 18 nt, Human
uggcaggggugaggagga

SEQ ID NO: 175222 - RNA, 22 nt, Human
uggcccaggaagacacuugcga

SEQ ID NO: 175223 - RNA, 19 nt, Human
uggcuccuaauccaaggcc

SEQ ID NO: 175224 - RNA, 22 nt, Human
uggcugcaccgagaggaggggg

SEQ ID NO: 175225 - RNA, 18 nt, Human
ugggugcugggggcuacg

SEQ ID NO: 175226 - RNA, 19 nt, Human
uguaaaaagacccaaagug

SEQ ID NO: 175227 - RNA, 25 nt, Human
uguaaaaagacccaaagugauaucu

SEQ ID NO: 175228 - RNA, 19 nt, Human
uguaaacauagcucaccgc

SEQ ID NO: 175229 - RNA, 23 nt, Human
ugucacucaguugcggaccggca

SEQ ID NO: 175230 - RNA, 20 nt, Human
ugucucccgcccugaauccu

SEQ ID NO: 175231 - RNA, 26 nt, Human
ugugacagcugccuggcaucauuggu

SEQ ID NO: 175232 - RNA, 22 nt, Human
uucaaggaugguuuccauucau

SEQ ID NO: 175233 - RNA, 20 nt, Human
uucacagauacgcacagcac

SEQ ID NO: 175234 - RNA, 20 nt, Human
uucauacaagacacagggag

SEQ ID NO: 175235 - RNA, 19 nt, Human
uucauccauuucccuccuu

SEQ ID NO: 175236 - RNA, 23 nt, Human
uucucagcuccccccgagcgccc

SEQ ID NO: 175237 - RNA, 18 nt, Human
uucuugccgcugaugugu

SEQ ID NO: 175238 - RNA, 18 nt, Human
uuucaaggaugguuucca

SEQ ID NO: 175239 - RNA, 18 nt, Human
uuucaaggaugguuucca

SEQ ID NO: 175240 - RNA, 22 nt, Human
aaaauacucuucuccuuauuca

SEQ ID NO: 175241 - RNA, 21 nt, Human
aaaauucauuuucccccaccu

SEQ ID NO: 175242 - RNA, 21 nt, Human
aaaccaaacgcaaaaaaaagu

SEQ ID NO: 175243 - RNA, 23 nt, Human
aaagugcugggauuagaagcuga

SEQ ID NO: 175244 - RNA, 21 nt, Human
aagaaaaaaaauacuagaaga

SEQ ID NO: 175245 - RNA, 23 nt, Human
aagaauccauuacaaagucaaaa

SEQ ID NO: 175246 - RNA, 20 nt, Human
aaggaaaaggacaccuuuuc

SEQ ID NO: 175247 - RNA, 23 nt, Human
aaggaaaaggacaccuuuucaac

SEQ ID NO: 175248 - RNA, 24 nt, Human
aagugcugggauuagaagcugagc

SEQ ID NO: 175249 - RNA, 25 nt, Human
aagugcugggauuagaagcugagcc

SEQ ID NO: 175250 - RNA, 19 nt, Human
aaguggaguguauuacaga

SEQ ID NO: 175251 - RNA, 23 nt, Human
aauacuagaagaaaggaaaagga

SEQ ID NO: 175252 - RNA, 19 nt, Human
aaucauagcucacuguagc

SEQ ID NO: 175253 - RNA, 20 nt, Human
acaagaauacaggagaucua

SEQ ID NO: 175254 - RNA, 19 nt, Human
acuacagaugcgugccacc

SEQ ID NO: 175255 - RNA, 20 nt, Human
agaaaaaaaauacuagaaga

SEQ ID NO: 175256 - RNA, 25 nt, Human
agaaaaaaaauacuagaagaaagga

SEQ ID NO: 175257 - RNA, 21 nt, Human
agaaaaaugcacuuggaauaa

SEQ ID NO: 175258 - RNA, 22 nt, Human
agaagcugagccaccaugucca

SEQ ID NO: 175259 - RNA, 22 nt, Human
agacaaguaaaccaaacgcaaa

SEQ ID NO: 175260 - RNA, 24 nt, Human
agacugaagugcagugguguaauc

SEQ ID NO: 175261 - RNA, 23 nt, Human
agccucgaucucccaagcucaag

SEQ ID NO: 175262 - RNA, 23 nt, Human
aguauaugcucuuuuucguacag

SEQ ID NO: 175263 - RNA, 21 nt, Human
agugcagugguguaaucauag

SEQ ID NO: 175264 - RNA, 23 nt, Human
agugcagugguguaaucauagcu

SEQ ID NO: 175265 - RNA, 24 nt, Human
agugcagugguguaaucauagcuc

SEQ ID NO: 175266 - RNA, 23 nt, Human
agugcugggauuagaagcugagc

SEQ ID NO: 175267 - RNA, 22 nt, Human
aguuaaaaaaauacaguaacaa

SEQ ID NO: 175268 - RNA, 24 nt, Human
auagcucacuguagccucgaucuc

SEQ ID NO: 175269 - RNA, 24 nt, Human
auagucuuugguauuacuaguuau

SEQ ID NO: 175270 - RNA, 25 nt, Human
auguaggcuuuuuuuuuuuuuugaa

SEQ ID NO: 175271 - RNA, 24 nt, Human
auuuugcuauguugcccaggcugg

SEQ ID NO: 175272 - RNA, 20 nt, Human
caaaaaaaaguucaccugca

SEQ ID NO: 175273 - RNA, 18 nt, Human
caaaacacacaaacauca

SEQ ID NO: 175274 - RNA, 21 nt, Human
caaagugcugggauuagaagc

SEQ ID NO: 175275 - RNA, 23 nt, Human
caaagugcugggauuagaagcug

SEQ ID NO: 175276 - RNA, 19 nt, Human
caaaugauccucccaccuu

SEQ ID NO: 175277 - RNA, 22 nt, Human
caagaaauuuaaguguuaaaaa

SEQ ID NO: 175278 - RNA, 20 nt, Human
cacacaguaucauuacuuaa

SEQ ID NO: 175279 - RNA, 18 nt, Human
caccauguccagcucaga

SEQ ID NO: 175280 - RNA, 24 nt, Human
cacuuggaauaaguuacauuuagc

SEQ ID NO: 175281 - RNA, 25 nt, Human
cagaauuucuguaguagugcuacau

SEQ ID NO: 175282 - RNA, 22 nt, Human
ccaaagugcugggauuagaagc

SEQ ID NO: 175283 - RNA, 23 nt, Human
ccaaagugcugggauuagaagcu

SEQ ID NO: 175284 - RNA, 19 nt, Human
ccaagcucaagcaaugcuu

SEQ ID NO: 175285 - RNA, 20 nt, Human
ccaccacaccuagguaauuu

SEQ ID NO: 175286 - RNA, 18 nt, Human
ccagccacgcggaccugu

SEQ ID NO: 175287 - RNA, 22 nt, Human
ccucccaccuuugccuaccaaa

SEQ ID NO: 175288 - RNA, 26 nt, Human
cucaaaugauccucccaccuuugccu

SEQ ID NO: 175289 - RNA, 21 nt, Human
cuuccccagccacgcggaccu

SEQ ID NO: 175290 - RNA, 23 nt, Human
gaaaaggacaccuuuucaacaga

SEQ ID NO: 175291 - RNA, 24 nt, Human
gaacuccugagcucaaaugauccu

SEQ ID NO: 175292 - RNA, 19 nt, Human
gcuauguugcccaggcugg

SEQ ID NO: 175293 - RNA, 20 nt, Human
gcuauguugcccaggcuggu

SEQ ID NO: 175294 - RNA, 23 nt, Human
gcuggucuggaacuccugagcuc

SEQ ID NO: 175295 - RNA, 20 nt, Human
ggcuuuuuuuuuuuuuugaa

SEQ ID NO: 175296 - RNA, 21 nt, Human
guauuacagacuaaaaaaugu

SEQ ID NO: 175297 - RNA, 20 nt, Human
uaacagcagugugaaaacgg

SEQ ID NO: 175298 - RNA, 24 nt, Human
uaagaaaaaugcacuuggaauaag

SEQ ID NO: 175299 - RNA, 22 nt, Human
uaagaaaagucauuuaaggaag

SEQ ID NO: 175300 - RNA, 21 nt, Human
uaaggaacuuuaucagaaauu

SEQ ID NO: 175301 - RNA, 20 nt, Human
uaagugcuucaaguggagug

SEQ ID NO: 175302 - RNA, 22 nt, Human
uacagaugcgugccaccacacc

SEQ ID NO: 175303 - RNA, 23 nt, Human
uacaguaacaaaucuuucuuccu

SEQ ID NO: 175304 - RNA, 24 nt, Human
uacaguaacaaaucuuucuuccua

SEQ ID NO: 175305 - RNA, 22 nt, Human
uagagaugagauuuugcuaugu

SEQ ID NO: 175306 - RNA, 24 nt, Human
uagcucacuguagccucgaucucc

SEQ ID NO: 175307 - RNA, 18 nt, Human
uauaaauaagaaaaaugc

SEQ ID NO: 175308 - RNA, 25 nt, Human
uauccccccaaaaaacuaggggaaa

SEQ ID NO: 175309 - RNA, 19 nt, Human
uauguugcccaggcugguc

SEQ ID NO: 175310 - RNA, 22 nt, Human
uauguugcccaggcuggucugg

SEQ ID NO: 175311 - RNA, 23 nt, Human
uauguugcccaggcuggucugga

SEQ ID NO: 175312 - RNA, 24 nt, Human
uauguugcccaggcuggucuggaa

SEQ ID NO: 175313 - RNA, 24 nt, Human
ucacuguagccucgaucucccaag

SEQ ID NO: 175314 - RNA, 21 nt, Human
uccccagccacgcggaccugu

SEQ ID NO: 175315 - RNA, 19 nt, Human
ucuggaacuccugagcuca

SEQ ID NO: 175316 - RNA, 24 nt, Human
ucuugcucagucacacagacugaa

SEQ ID NO: 175317 - RNA, 24 nt, Human
ugaaaagaauccauuacaaaguca

SEQ ID NO: 175318 - RNA, 21 nt, Human
ugaaacagaaacuugcagaau

SEQ ID NO: 175319 - RNA, 19 nt, Human
ugacgaaaaacaaaaaaaa

SEQ ID NO: 175320 - RNA, 19 nt, Human
ugacgaaaaacaaaaaaaa

SEQ ID NO: 175321 - RNA, 21 nt, Human
ugacgaaaaacaaaaaaaaaa

SEQ ID NO: 175322 - RNA, 24 nt, Human
ugagauuuugcuauguugcccagg

SEQ ID NO: 175323 - RNA, 22 nt, Human
ugcagugguguaaucauagcuc

SEQ ID NO: 175324 - RNA, 20 nt, Human
ugccaagaaauuuaaguguu

SEQ ID NO: 175325 - RNA, 24 nt, Human
ugcccaggcuggucuggaacuccu

SEQ ID NO: 175326 - RNA, 28 nt, Human
ugcccaggcuggucuggaacuccugagc

SEQ ID NO: 175327 - RNA, 21 nt, Human
ugccucaccuuccuguauagc

SEQ ID NO: 175328 - RNA, 24 nt, Human
ugccucaccuuccuguauagcugg

SEQ ID NO: 175329 - RNA, 22 nt, Human
ugcuauguugcccaggcugguc

SEQ ID NO: 175330 - RNA, 27 nt, Human
ugcuauguugcccaggcuggucuggaa

SEQ ID NO: 175331 - RNA, 21 nt, Human
uggaacuacagaugcgugcca

SEQ ID NO: 175332 - RNA, 24 nt, Human
uggaacuacagaugcgugccacca

SEQ ID NO: 175333 - RNA, 22 nt, Human
uggaguguauuacagacuaaaa

SEQ ID NO: 175334 - RNA, 21 nt, Human
ugggauuagaagcugagccac

SEQ ID NO: 175335 - RNA, 23 nt, Human
ugggauuagaagcugagccacca

SEQ ID NO: 175336 - RNA, 18 nt, Human
ugguaagaaaaaaaauac

SEQ ID NO: 175337 - RNA, 24 nt, Human
ugguaagaaaaaaaauacuagaag

SEQ ID NO: 175338 - RNA, 23 nt, Human
ugguguaaucauagcucacugua

SEQ ID NO: 175339 - RNA, 24 nt, Human
ugguguaaucauagcucacuguag

SEQ ID NO: 175340 - RNA, 22 nt, Human
uguacaaaacacacaaacauca

SEQ ID NO: 175341 - RNA, 24 nt, Human
uguagagaugagauuuugcuaugu

SEQ ID NO: 175342 - RNA, 24 nt, Human
ugugugaauguagcuauauauaua

SEQ ID NO: 175343 - RNA, 24 nt, Human
uuacaaacaaacaaugagaagaua

SEQ ID NO: 175344 - RNA, 18 nt, Human
uuacagauuuuacccaaa

SEQ ID NO: 175345 - RNA, 23 nt, Human
uucaacagauaguaauuuauaaa

SEQ ID NO: 175346 - RNA, 23 nt, Human
uuccuguauagcuggaacuacag

SEQ ID NO: 175347 - RNA, 20 nt, Human
uucuggaucuguaaaagcuc

SEQ ID NO: 175348 - RNA, 24 nt, Human
uugcauaauuuucaaaaacuacag

SEQ ID NO: 175349 - RNA, 24 nt, Human
uuguagagaugagauuuugcuaug

SEQ ID NO: 175350 - RNA, 23 nt, Human
uugugaagcuuccccagccacgc

SEQ ID NO: 175351 - RNA, 22 nt, Human
uuuacccaaaagaggaauaagc

SEQ ID NO: 175352 - RNA, 21 nt, Human
uuuauuguguuuuccacauag

SEQ ID NO: 175353 - RNA, 25 nt, Human
uuucauuuuuuaauuuuuacuuuuu

SEQ ID NO: 175354 - RNA, 23 nt, Human
uuugguaagaaaaaaaauacuag

SEQ ID NO: 175355 - RNA, 24 nt, Human
uuuguagagaugagauuuugcuau

SEQ ID NO: 175356 - RNA, 21 nt, Human
uuuuaaacuaauaaauucugg

SEQ ID NO: 175357 - RNA, 19 nt, Human
uuuugcuauguugcccagg

SEQ ID NO: 175358 - RNA, 22 nt, Human
uuuugcuauguugcccaggcug

SEQ ID NO: 175359 - RNA, 23 nt, Human
uuuugcuauguugcccaggcugg

SEQ ID NO: 175360 - RNA, 27 nt, Human
uuuugcuauguugcccaggcuggucug

SEQ ID NO: 175361 - RNA, 23 nt, Human
uuuuuguagagaugagauuuugc

SEQ ID NO: 175362 - RNA, 22 nt, Human
uuuuuuuuuuuugaaagagucu

SEQ ID NO: 175363 - RNA, 21 nt, Human
aaaaauaaaaaucaaacugcc

SEQ ID NO: 175364 - RNA, 19 nt, Human
aaaguaguuucacguuugu

SEQ ID NO: 175365 - RNA, 19 nt, Human
aaagugcuggaauuacagg

SEQ ID NO: 175366 - RNA, 24 nt, Human
aaagugcuggaauuacaggcauga

SEQ ID NO: 175367 - RNA, 20 nt, Human
aaauguguagaaaugcauag

SEQ ID NO: 175368 - RNA, 21 nt, Human
aacaaaaaagauguaaacauc

SEQ ID NO: 175369 - RNA, 19 nt, Human
aaccccugaguguaauccc

SEQ ID NO: 175370 - RNA, 19 nt, Human
aacuuccaacccuuauggg

SEQ ID NO: 175371 - RNA, 25 nt, Human
aagcgauucucuugccucagccucc

SEQ ID NO: 175372 - RNA, 18 nt, Human
aagggauaacaauaacaa

SEQ ID NO: 175373 - RNA, 19 nt, Human
aaguagcugggauuacagg

SEQ ID NO: 175374 - RNA, 24 nt, Human
aaguagcugggauuacagguaugc

SEQ ID NO: 175375 - RNA, 26 nt, Human
aagugcuggaauuacaggcaugagcc

SEQ ID NO: 175376 - RNA, 22 nt, Human
aauuacaggcaugagccaccgc

SEQ ID NO: 175377 - RNA, 21 nt, Human
aauugccuucugaaagcccau

SEQ ID NO: 175378 - RNA, 23 nt, Human
aauuuauagguuauauuucccuc

SEQ ID NO: 175379 - RNA, 24 nt, Human
acaaagcaaggauaugggaauuau

SEQ ID NO: 175380 - RNA, 21 nt, Human
accaaguuagagaagagcuag

SEQ ID NO: 175381 - RNA, 24 nt, Human
acccagguuggagugcaauggcau

SEQ ID NO: 175382 - RNA, 22 nt, Human
acccuuaugggacagccuuggg

SEQ ID NO: 175383 - RNA, 22 nt, Human
accuaaaaaacaagcaacccag

SEQ ID NO: 175384 - RNA, 19 nt, Human
accuuggcuaauaaccugu

SEQ ID NO: 175385 - RNA, 23 nt, Human
acucugccucccaaagugcuggg

SEQ ID NO: 175386 - RNA, 26 nt, Human
acucugucacccagguuggagugcaa

SEQ ID NO: 175387 - RNA, 18 nt, Human
agaaaaccacaggaccca

SEQ ID NO: 175388 - RNA, 21 nt, Human
agagaaagcaauuguuaagug

SEQ ID NO: 175389 - RNA, 19 nt, Human
agauguaaacaucuacaaa

SEQ ID NO: 175390 - RNA, 20 nt, Human
agcuuucucccgcuccaggc

SEQ ID NO: 175391 - RNA, 18 nt, Human
aggcacaaauuaccaaca

SEQ ID NO: 175392 - RNA, 19 nt, Human
aggcacaaauuaccaacau

SEQ ID NO: 175393 - RNA, 24 nt, Human
aggcacuaaauguguugaaauuca

SEQ ID NO: 175394 - RNA, 25 nt, Human
aggugauccucccaacucugccucc

SEQ ID NO: 175395 - RNA, 19 nt, Human
aggugugaaaaggagaaac

SEQ ID NO: 175396 - RNA, 24 nt, Human
agguugcuaugaggugucugggau

SEQ ID NO: 175397 - RNA, 18 nt, Human
aguaaaucccaaauguca

SEQ ID NO: 175398 - RNA, 26 nt, Human
aguagcaaaauacaaauugacaauuc

SEQ ID NO: 175399 - RNA, 20 nt, Human
agugaugaagacaacgguac

SEQ ID NO: 175400 - RNA, 26 nt, Human
agugaugaagacaacgguacaaugga

SEQ ID NO: 175401 - RNA, 21 nt, Human
aguggauuucuuuaauugccu

SEQ ID NO: 175402 - RNA, 24 nt, Human
auacaguguaucaaaaucugcaua

SEQ ID NO: 175403 - RNA, 22 nt, Human
aucaucacaguuguuuuuuuuu

SEQ ID NO: 175404 - RNA, 24 nt, Human
auccucccaacucugccucccaaa

SEQ ID NO: 175405 - RNA, 24 nt, Human
aucuuuaaaacacaacaaaaaaga

SEQ ID NO: 175406 - RNA, 21 nt, Human
augggaaugcucaaauugugc

SEQ ID NO: 175407 - RNA, 25 nt, Human
auuuacaugcacaguucauugccac

SEQ ID NO: 175408 - RNA, 23 nt, Human
auuucccucuuaaauuaaaaaac

SEQ ID NO: 175409 - RNA, 24 nt, Human
auuuuuguauuuuuaguagagaca

SEQ ID NO: 175410 - RNA, 24 nt, Human
caaagugcuggaauuacaggcaug

SEQ ID NO: 175411 - RNA, 19 nt, Human
caacaugcuuuaacucugu

SEQ ID NO: 175412 - RNA, 19 nt, Human
caacuuacaaagcaaggau

SEQ ID NO: 175413 - RNA, 22 nt, Human
caagcgauucucuugccucagc

SEQ ID NO: 175414 - RNA, 22 nt, Human
caaguuagagaagagcuagggc

SEQ ID NO: 175415 - RNA, 19 nt, Human
caauggauccuuuuuuuuu

SEQ ID NO: 175416 - RNA, 21 nt, Human
cacaggacccaaguuucaccc

SEQ ID NO: 175417 - RNA, 21 nt, Human
cacaguuuaucaauguccuuc

SEQ ID NO: 175418 - RNA, 19 nt, Human
caccaacgacuaaagagaa

SEQ ID NO: 175419 - RNA, 24 nt, Human
caccaugcccagcuaauuuuugua

SEQ ID NO: 175420 - RNA, 19 nt, Human
caccuaaaaaacaagcaac

SEQ ID NO: 175421 - RNA, 24 nt, Human
caccuaaaaaacaagcaacccaga

SEQ ID NO: 175422 - RNA, 26 nt, Human
caccuaaaaaacaagcaacccagaau

SEQ ID NO: 175423 - RNA, 24 nt, Human
cacucugucacccagguuggagug

SEQ ID NO: 175424 - RNA, 21 nt, Human
cacugcaaccucugccuccug

SEQ ID NO: 175425 - RNA, 23 nt, Human
cacugcaaccucugccuccuggg

SEQ ID NO: 175426 - RNA, 22 nt, Human
cagaaccuggguugcuuguucc

SEQ ID NO: 175427 - RNA, 18 nt, Human
cagcagaaccuggguugc

SEQ ID NO: 175428 - RNA, 21 nt, Human
cagcagaaccuggguugcuug

SEQ ID NO: 175429 - RNA, 22 nt, Human
cagcugcuggguugagcuggag

SEQ ID NO: 175430 - RNA, 22 nt, Human
caguucauugccaccuuucuua

SEQ ID NO: 175431 - RNA, 21 nt, Human
cauuaacaugaaaaugucuuu

SEQ ID NO: 175432 - RNA, 24 nt, Human
ccaaacagacaauccaaguuaagg

SEQ ID NO: 175433 - RNA, 25 nt, Human
ccaaacagacaauccaaguuaaggc

SEQ ID NO: 175434 - RNA, 19 nt, Human
ccaaagugcuggaauuaca

SEQ ID NO: 175435 - RNA, 24 nt, Human
ccaaagugcuggaauuacaggcau

SEQ ID NO: 175436 - RNA, 21 nt, Human
ccaaguagcugggauuacagg

SEQ ID NO: 175437 - RNA, 24 nt, Human
ccaaguagcugggauuacagguau

SEQ ID NO: 175438 - RNA, 19 nt, Human
ccaggccagagagaaagca

SEQ ID NO: 175439 - RNA, 21 nt, Human
cccaaaugucaguggacaauu

SEQ ID NO: 175440 - RNA, 23 nt, Human
cccaaguagcugggauuacaggu

SEQ ID NO: 175441 - RNA, 24 nt, Human
cccaaguagcugggauuacaggua

SEQ ID NO: 175442 - RNA, 22 nt, Human
cccuagagaugaaaguuaaaau

SEQ ID NO: 175443 - RNA, 24 nt, Human
ccuccuggguucaagcgauucucu

SEQ ID NO: 175444 - RNA, 19 nt, Human
ccucugccuccuggguuca

SEQ ID NO: 175445 - RNA, 21 nt, Human
ccuggguucaagcgauucucu

SEQ ID NO: 175446 - RNA, 19 nt, Human
ccuucaagcuugcagcaga

SEQ ID NO: 175447 - RNA, 23 nt, Human
cuaacaccaacgacuaaagagaa

SEQ ID NO: 175448 - RNA, 19 nt, Human
cucaaaccccugacaucag

SEQ ID NO: 175449 - RNA, 24 nt, Human
cucacucugucacccagguuggag

SEQ ID NO: 175450 - RNA, 24 nt, Human
cucacugcaaccucugccuccugg

SEQ ID NO: 175451 - RNA, 24 nt, Human
cucagccucccaaguagcugggau

SEQ ID NO: 175452 - RNA, 18 nt, Human
cuccaggcuccuucaagc

SEQ ID NO: 175453 - RNA, 21 nt, Human
cuccuggguucaagcgauucu

SEQ ID NO: 175454 - RNA, 20 nt, Human
cuccuuucuguagcucccuu

SEQ ID NO: 175455 - RNA, 25 nt, Human
cucuuuaaguucacuuggagcugga

SEQ ID NO: 175456 - RNA, 19 nt, Human
cugcaaccucugccuccug

SEQ ID NO: 175457 - RNA, 23 nt, Human
cugcaaccucugccuccuggguu

SEQ ID NO: 175458 - RNA, 24 nt, Human
cugcaaccucugccuccuggguuc

SEQ ID NO: 175459 - RNA, 20 nt, Human
cuggguugcuuguuccaccu

SEQ ID NO: 175460 - RNA, 20 nt, Human
cugguacuucuaacaccaac

SEQ ID NO: 175461 - RNA, 19 nt, Human
cugucacccagguuggagu

SEQ ID NO: 175462 - RNA, 27 nt, Human
cuuccacuuacaaucagaaaaccacag

SEQ ID NO: 175463 - RNA, 18 nt, Human
cuugaaauauauacugag

SEQ ID NO: 175464 - RNA, 24 nt, Human
cuugccucagccucccaaguagcu

SEQ ID NO: 175465 - RNA, 24 nt, Human
gaacaccuuuguuaaugggaaugc

SEQ ID NO: 175466 - RNA, 22 nt, Human
gaauuacaggcaugagccaccg

SEQ ID NO: 175467 - RNA, 18 nt, Human
gauuacagguaugcgcca

SEQ ID NO: 175468 - RNA, 24 nt, Human
gauuacagguaugcgccaccaugc

SEQ ID NO: 175469 - RNA, 21 nt, Human
gauucucuugccucagccucc

SEQ ID NO: 175470 - RNA, 20 nt, Human
gcaauguugaccaggcuggu

SEQ ID NO: 175471 - RNA, 22 nt, Human
gcccagcuaauuuuuguauuuu

SEQ ID NO: 175472 - RNA, 20 nt, Human
gccucagccucccaaguagc

SEQ ID NO: 175473 - RNA, 24 nt, Human
gcgauucucuugccucagccuccc

SEQ ID NO: 175474 - RNA, 20 nt, Human
gcuacacaacuuccaacccu

SEQ ID NO: 175475 - RNA, 19 nt, Human
gcuugcagcagaaccuggg

SEQ ID NO: 175476 - RNA, 23 nt, Human
ggagaaaaguaaaucccaaaugu

SEQ ID NO: 175477 - RNA, 21 nt, Human
ggagaguuucucaacugugaa

SEQ ID NO: 175478 - RNA, 18 nt, Human
ggauguuccauaugguca

SEQ ID NO: 175479 - RNA, 24 nt, Human
ggauuacagguaugcgccaccaug

SEQ ID NO: 175480 - RNA, 18 nt, Human
gggcacugggaaugccag

SEQ ID NO: 175481 - RNA, 24 nt, Human
gguuauaaucuacucaacauggaa

SEQ ID NO: 175482 - RNA, 22 nt, Human
guaaaaagcagucuuguaaaca

SEQ ID NO: 175483 - RNA, 23 nt, Human
guaaucccaaagaagacaacaug

SEQ ID NO: 175484 - RNA, 20 nt, Human
gugugcaagaccugcuucca

SEQ ID NO: 175485 - RNA, 22 nt, Human
uaaaaaacaaacuuccucuggc

SEQ ID NO: 175486 - RNA, 18 nt, Human
uaaaaaacaagcaaccca

SEQ ID NO: 175487 - RNA, 22 nt, Human
uaaaaagaaauuaagaaacacu

SEQ ID NO: 175488 - RNA, 22 nt, Human
uaaccaaguuagagaagagcua

SEQ ID NO: 175489 - RNA, 22 nt, Human
uaaucccaaagaagacaacaug

SEQ ID NO: 175490 - RNA, 24 nt, Human
uaauuuuuguauuuuuaguagaga

SEQ ID NO: 175491 - RNA, 22 nt, Human
uacaaucagaaaaccacaggac

SEQ ID NO: 175492 - RNA, 23 nt, Human
uacaggcaugagccaccgcgccc

SEQ ID NO: 175493 - RNA, 24 nt, Human
uacagguaugcgccaccaugccca

SEQ ID NO: 175494 - RNA, 19 nt, Human
uacuccaaccuuuuuucaa

SEQ ID NO: 175495 - RNA, 22 nt, Human
uagagacaagguuuugcaaugu

SEQ ID NO: 175496 - RNA, 23 nt, Human
uagggcagggggaauagagguag

SEQ ID NO: 175497 - RNA, 24 nt, Human
uaguagagacaagguuuugcaaug

SEQ ID NO: 175498 - RNA, 20 nt, Human
uagugauauuaccaacuuac

SEQ ID NO: 175499 - RNA, 23 nt, Human
uauauagaaucauauucauagag

SEQ ID NO: 175500 - RNA, 19 nt, Human
ucaacauggaaaauggagc

SEQ ID NO: 175501 - RNA, 19 nt, Human
ucaagcgauucucuugccu

SEQ ID NO: 175502 - RNA, 18 nt, Human
ucacccagguuggagugc

SEQ ID NO: 175503 - RNA, 21 nt, Human
ucacucuuggcuucaccaggu

SEQ ID NO: 175504 - RNA, 24 nt, Human
ucacugcaaccucugccuccuggg

SEQ ID NO: 175505 - RNA, 25 nt, Human
ucacugcaaccucugccuccugggu

SEQ ID NO: 175506 - RNA, 27 nt, Human
ucacugcaaccucugccuccuggguuc

SEQ ID NO: 175507 - RNA, 18 nt, Human
ucagccucccaaguagcu

SEQ ID NO: 175508 - RNA, 20 nt, Human
ucagccucccaaguagcugg

SEQ ID NO: 175509 - RNA, 23 nt, Human
uccaaguuaaggccauuugaaga

SEQ ID NO: 175510 - RNA, 19 nt, Human
ucccaaagaagacaacaug

SEQ ID NO: 175511 - RNA, 24 nt, Human
ucccaaagugcuggaauuacaggc

SEQ ID NO: 175512 - RNA, 19 nt, Human
ucccaaauuuaagagcuaa

SEQ ID NO: 175513 - RNA, 23 nt, Human
ucccaaguagcugggauuacagg

SEQ ID NO: 175514 - RNA, 20 nt, Human
ucccgcuccaggcuccuuca

SEQ ID NO: 175515 - RNA, 21 nt, Human
uccuggguucaagcgauucuc

SEQ ID NO: 175516 - RNA, 24 nt, Human
uccuggguucaagcgauucucuug

SEQ ID NO: 175517 - RNA, 25 nt, Human
ucuacaaaguuuaagguaaaaagca

SEQ ID NO: 175518 - RNA, 23 nt, Human
ucucacucugucacccagguugg

SEQ ID NO: 175519 - RNA, 24 nt, Human
ucucacucugucacccagguugga

SEQ ID NO: 175520 - RNA, 18 nt, Human
ucucuacaaugguggaaa

SEQ ID NO: 175521 - RNA, 19 nt, Human
ucucugcaauccuaaaccu

SEQ ID NO: 175522 - RNA, 24 nt, Human
ucugucacccagguuggagugcaa

SEQ ID NO: 175523 - RNA, 26 nt, Human
ucuugccucagccucccaaguagcug

SEQ ID NO: 175524 - RNA, 19 nt, Human
ugaaagaggcacuaaaugu

SEQ ID NO: 175525 - RNA, 19 nt, Human
ugacaaguccaucauuacc

SEQ ID NO: 175526 - RNA, 24 nt, Human
ugacaucaggugauccucccaacu

SEQ ID NO: 175527 - RNA, 22 nt, Human
ugacugugaaggaaggccaccu

SEQ ID NO: 175528 - RNA, 22 nt, Human
ugagauggagucucacucuguc

SEQ ID NO: 175529 - RNA, 19 nt, Human
ugauggccaaaauucucuu

SEQ ID NO: 175530 - RNA, 18 nt, Human
ugcaauguugaccaggcu

SEQ ID NO: 175531 - RNA, 24 nt, Human
ugcaauguugaccaggcuggucuc

SEQ ID NO: 175532 - RNA, 22 nt, Human
ugccagagaauguccaggccag

SEQ ID NO: 175533 - RNA, 24 nt, Human
ugccucagccucccaaguagcugg

SEQ ID NO: 175534 - RNA, 28 nt, Human
ugcuacacaacuuccaacccuuauggga

SEQ ID NO: 175535 - RNA, 27 nt, Human
ugcuaugaggugucugggaugagcuga

SEQ ID NO: 175536 - RNA, 21 nt, Human
ugcugccagagaauguccagg

SEQ ID NO: 175537 - RNA, 19 nt, Human
uggaagaaacaaauuuaua

SEQ ID NO: 175538 - RNA, 18 nt, Human
uggaauuacaggcaugag

SEQ ID NO: 175539 - RNA, 21 nt, Human
uggaauuacaggcaugagcca

SEQ ID NO: 175540 - RNA, 22 nt, Human
uggaauuacaggcaugagccac

SEQ ID NO: 175541 - RNA, 23 nt, Human
uggaauuacaggcaugagccacc

SEQ ID NO: 175542 - RNA, 24 nt, Human
uggaauuacaggcaugagccaccg

SEQ ID NO: 175543 - RNA, 24 nt, Human
uggaauuacaggcaugagccaccg

SEQ ID NO: 175544 - RNA, 18 nt, Human
uggagaauugggccaaag

SEQ ID NO: 175545 - RNA, 19 nt, Human
uggagugcaauggcaugau

SEQ ID NO: 175546 - RNA, 24 nt, Human
uggagugcaauggcaugaucucag

SEQ ID NO: 175547 - RNA, 21 nt, Human
uggauuucuuuaauugccuuc

SEQ ID NO: 175548 - RNA, 21 nt, Human
uggcagcagcuucugauguuu

SEQ ID NO: 175549 - RNA, 24 nt, Human
uggcaugaucucagcucacugcaa

SEQ ID NO: 175550 - RNA, 20 nt, Human
uggccaaacagacaauccaa

SEQ ID NO: 175551 - RNA, 18 nt, Human
ugggauuacagguaugcg

SEQ ID NO: 175552 - RNA, 21 nt, Human
ugggauuacagguaugcgcca

SEQ ID NO: 175553 - RNA, 22 nt, Human
ugggauuacagguaugcgccac

SEQ ID NO: 175554 - RNA, 24 nt, Human
ugggauuacagguaugcgccacca

SEQ ID NO: 175555 - RNA, 20 nt, Human
uggguucaagcgauucucuu

SEQ ID NO: 175556 - RNA, 23 nt, Human
uggguucaagcgauucucuugcc

SEQ ID NO: 175557 - RNA, 23 nt, Human
uggguugagcuggagaauugggc

SEQ ID NO: 175558 - RNA, 23 nt, Human
uguggcagugcuucaaaaagaug

SEQ ID NO: 175559 - RNA, 23 nt, Human
uguuuuuguuugguagguuuucu

SEQ ID NO: 175560 - RNA, 21 nt, Human
uuaaacaucccuagagaugaa

SEQ ID NO: 175561 - RNA, 18 nt, Human
uuacaaucagaaaaccac

SEQ ID NO: 175562 - RNA, 24 nt, Human
uuaguagagacaagguuuugcaau

SEQ ID NO: 175563 - RNA, 18 nt, Human
uucaaacugaucaggagg

SEQ ID NO: 175564 - RNA, 23 nt, Human
uucaagcgauucucuugccucag

SEQ ID NO: 175565 - RNA, 24 nt, Human
uucacguuuguuaauaaacuguau

SEQ ID NO: 175566 - RNA, 20 nt, Human
uucucaacugugaacaccuu

SEQ ID NO: 175567 - RNA, 19 nt, Human
uugaagcuuuucagcugcu

SEQ ID NO: 175568 - RNA, 26 nt, Human
uugaucacagaucaguagcaaaauac

SEQ ID NO: 175569 - RNA, 19 nt, Human
uugcaauguugaccaggcu

SEQ ID NO: 175570 - RNA, 23 nt, Human
uugccaaaugcaacaggucaugu

SEQ ID NO: 175571 - RNA, 24 nt, Human
uuggagugcaauggcaugaucuca

SEQ ID NO: 175572 - RNA, 20 nt, Human
uugggaaaaaaauaaugauu

SEQ ID NO: 175573 - RNA, 20 nt, Human
uuucaaaaaagcagcaugac

SEQ ID NO: 175574 - RNA, 26 nt, Human
uuucuacagaaacauacaguguauca

SEQ ID NO: 175575 - RNA, 20 nt, Human
uuugcaaacacacaaguaau

SEQ ID NO: 175576 - RNA, 18 nt, Human
uuuggagcuauacagagu

SEQ ID NO: 175577 - RNA, 24 nt, Human
uuuuuaguagagacaagguuuugc

SEQ ID NO: 175578 - RNA, 20 nt, Human
uuuuuguauuuuuaguagag

SEQ ID NO: 175579 - RNA, 26 nt, Human
uuuuuuuuuuuugagauggagucuca

SEQ ID NO: 175580 - RNA, 22 nt, Human
uuuuuuuuuuuuuugagaugga

SEQ ID NO: 175581 - RNA, 27 nt, Human
uuuuuuuuuuuuuuuuuuuuuuugggg

SEQ ID NO: 175582 - RNA, 19 nt, Human
aaagacccuucucuccgcc

SEQ ID NO: 175583 - RNA, 25 nt, Human
aaccucgcugauuuuuuuucaucuc

SEQ ID NO: 175584 - RNA, 24 nt, Human
aauggugaugguuuuaaccccaaa

SEQ ID NO: 175585 - RNA, 22 nt, Human
agagcacugggguccccugccc

SEQ ID NO: 175586 - RNA, 21 nt, Human
agcggcggggcgcgcggggag

SEQ ID NO: 175587 - RNA, 20 nt, Human
aggcgccggggguggccagg

SEQ ID NO: 175588 - RNA, 19 nt, Human
auagaaauuauuaucuaca

SEQ ID NO: 175589 - RNA, 22 nt, Human
auggaaacucaaccauaaggau

SEQ ID NO: 175590 - RNA, 19 nt, Human
caaagcacggagagugcga

SEQ ID NO: 175591 - RNA, 23 nt, Human
caacagugccuacuacugcaucc

SEQ ID NO: 175592 - RNA, 18 nt, Human
cacaauauuacuucucuu

SEQ ID NO: 175593 - RNA, 19 nt, Human
cagcagugcacugugcggc

SEQ ID NO: 175594 - RNA, 20 nt, Human
cagcgccaccuccccagugg

SEQ ID NO: 175595 - RNA, 26 nt, Human
cagugggcuggcgccucccccccugg

SEQ ID NO: 175596 - RNA, 18 nt, Human
ccccgcacugcccagcgc

SEQ ID NO: 175597 - RNA, 22 nt, Human
ccccgcgcaucccgcgcgccca

SEQ ID NO: 175598 - RNA, 22 nt, Human
ccccgcgcaucccgcgcgccca

SEQ ID NO: 175599 - RNA, 23 nt, Human
cccgcgcaucccgcgcgcccaau

SEQ ID NO: 175600 - RNA, 26 nt, Human
cccgcgcgcccagcgccaccucccca

SEQ ID NO: 175601 - RNA, 19 nt, Human
ccgacuguaucucauaaug

SEQ ID NO: 175602 - RNA, 20 nt, Human
ccgcgcagguggaaagaccc

SEQ ID NO: 175603 - RNA, 18 nt, Human
cgacuguaucucauaaug

SEQ ID NO: 175604 - RNA, 22 nt, Human
cgacuguaucucauaaugacug

SEQ ID NO: 175605 - RNA, 19 nt, Human
cgagcggcggggcgcgcgg

SEQ ID NO: 175606 - RNA, 23 nt, Human
cgccuccgacucccucccggcuu

SEQ ID NO: 175607 - RNA, 18 nt, Human
cgcgcagguggaaagacc

SEQ ID NO: 175608 - RNA, 21 nt, Human
cgcgcccagcgccaccucccc

SEQ ID NO: 175609 - RNA, 22 nt, Human
cuauaaagccaguuucacagga

SEQ ID NO: 175610 - RNA, 18 nt, Human
cucccucccggcuuuucc

SEQ ID NO: 175611 - RNA, 18 nt, Human
cuccugcagagaaggcuc

SEQ ID NO: 175612 - RNA, 23 nt, Human
cugcaccuguugcucggagccgc

SEQ ID NO: 175613 - RNA, 19 nt, Human
cugcgcgaccacggagccu

SEQ ID NO: 175614 - RNA, 19 nt, Human
cugucccggcgagcggcgg

SEQ ID NO: 175615 - RNA, 19 nt, Human
cuuccuggugguggauaga

SEQ ID NO: 175616 - RNA, 24 nt, Human
cuuccuggugguggauagagucga

SEQ ID NO: 175617 - RNA, 19 nt, Human
cuuuauguacaggcaugac

SEQ ID NO: 175618 - RNA, 18 nt, Human
cuuugcgccgcgaccuuc

SEQ ID NO: 175619 - RNA, 23 nt, Human
gacaggcuuccaaagcucugugc

SEQ ID NO: 175620 - RNA, 20 nt, Human
gagcuucccccgaggcgcga

SEQ ID NO: 175621 - RNA, 24 nt, Human
gauagcaggcgccggggguggcca

SEQ ID NO: 175622 - RNA, 18 nt, Human
gcagagaaggcuccccgc

SEQ ID NO: 175623 - RNA, 23 nt, Human
gcccggagcuggaccuucucggg

SEQ ID NO: 175624 - RNA, 19 nt, Human
ggauagagucgggugccag

SEQ ID NO: 175625 - RNA, 18 nt, Human
ggcgccggggguggccag

SEQ ID NO: 175626 - RNA, 23 nt, Human
gggagggagggcgggauagcagg

SEQ ID NO: 175627 - RNA, 23 nt, Human
gggcgcgcggggagggagggcgg

SEQ ID NO: 175628 - RNA, 21 nt, Human
gguggguucgggagcccggag

SEQ ID NO: 175629 - RNA, 24 nt, Human
gguucgggagcccggagcuggacc

SEQ ID NO: 175630 - RNA, 21 nt, Human
guggaaagacccuucucuccg

SEQ ID NO: 175631 - RNA, 24 nt, Human
uaaagcucaaauuuuuuuucuaaa

SEQ ID NO: 175632 - RNA, 19 nt, Human
uaagacaguggucucugac

SEQ ID NO: 175633 - RNA, 23 nt, Human
uagacugcaaauauuccugacca

SEQ ID NO: 175634 - RNA, 24 nt, Human
uagacugcaaauauuccugaccau

SEQ ID NO: 175635 - RNA, 24 nt, Human
uaguucacaauauuacuucucuua

SEQ ID NO: 175636 - RNA, 28 nt, Human
ucaaaaacuuauuugcaucuuccacugu

SEQ ID NO: 175637 - RNA, 18 nt, Human
ucccgcgcgcccagcgcc

SEQ ID NO: 175638 - RNA, 19 nt, Human
ucccgcgcgcccagcgcca

SEQ ID NO: 175639 - RNA, 21 nt, Human
ucgccggcgguuuucccuggc

SEQ ID NO: 175640 - RNA, 18 nt, Human
ucuauaaagccaguuuca

SEQ ID NO: 175641 - RNA, 21 nt, Human
ucuccgccuuaccgcuccaga

SEQ ID NO: 175642 - RNA, 19 nt, Human
ucucugcugcaacugagag

SEQ ID NO: 175643 - RNA, 20 nt, Human
ucuuuuguuucugaaacaua

SEQ ID NO: 175644 - RNA, 21 nt, Human
ugagguaaaccgacuguaucu

SEQ ID NO: 175645 - RNA, 21 nt, Human
uggccaaaaaauucaucauug

SEQ ID NO: 175646 - RNA, 27 nt, Human
uggccaaaaaauucaucauuguguguc

SEQ ID NO: 175647 - RNA, 20 nt, Human
uguaaacacacaucaauaua

SEQ ID NO: 175648 - RNA, 21 nt, Human
ugucccggcgagcggcggggc

SEQ ID NO: 175649 - RNA, 19 nt, Human
ugucugaagaggaauaaaa

SEQ ID NO: 175650 - RNA, 18 nt, Human
ugugcggcuccugcagag

SEQ ID NO: 175651 - RNA, 23 nt, Human
uucagaaagccuucuuuccacuu

SEQ ID NO: 175652 - RNA, 24 nt, Human
aaaacaaaaaaggauucaaggccc

SEQ ID NO: 175653 - RNA, 22 nt, Human
acaaaaaaggauucaaggcccu

SEQ ID NO: 175654 - RNA, 23 nt, Human
gaaaacaaaaaaggauucaaggc

SEQ ID NO: 175655 - RNA, 21 nt, Human
ucagcaagacuguugaaaaca

SEQ ID NO: 175656 - RNA, 22 nt, Human
ugaaaacaaaaaaggauucaag

SEQ ID NO: 175657 - RNA, 22 nt, Human
acagcugggaucagcccagggc

SEQ ID NO: 175658 - RNA, 24 nt, Human
agcccaggcuggucuugaacuccu

SEQ ID NO: 175659 - RNA, 21 nt, Human
aggcacggaggagggcauggg

SEQ ID NO: 175660 - RNA, 24 nt, Human
cagcccugggcuggugggaccccu

SEQ ID NO: 175661 - RNA, 21 nt, Human
cccagcgccggcguuuacuuc

SEQ ID NO: 175662 - RNA, 23 nt, Human
ccccucacagagaagccgggaaa

SEQ ID NO: 175663 - RNA, 18 nt, Human
cccugcaggggcuugugg

SEQ ID NO: 175664 - RNA, 19 nt, Human
cccugggcuggugggaccc

SEQ ID NO: 175665 - RNA, 19 nt, Human
ccgcucccugcaggggcuu

SEQ ID NO: 175666 - RNA, 21 nt, Human
ccugcagugggcagcagugac

SEQ ID NO: 175667 - RNA, 19 nt, Human
ccuggacucccggccagga

SEQ ID NO: 175668 - RNA, 24 nt, Human
cgcgcgccgcccgggcccgcuccc

SEQ ID NO: 175669 - RNA, 23 nt, Human
cggcgacccgaccucgaucgcgc

SEQ ID NO: 175670 - RNA, 19 nt, Human
cugcaggggcuugugggcc

SEQ ID NO: 175671 - RNA, 22 nt, Human
cuucaccucagggacccugcag

SEQ ID NO: 175672 - RNA, 23 nt, Human
gacccucacagagaagcugggaa

SEQ ID NO: 175673 - RNA, 18 nt, Human
gaggucuugcucuguagc

SEQ ID NO: 175674 - RNA, 20 nt, Human
gaucagcccugggcuggugg

SEQ ID NO: 175675 - RNA, 19 nt, Human
gcccgcucccugcaggggc

SEQ ID NO: 175676 - RNA, 19 nt, Human
gcccugggcuggugggacc

SEQ ID NO: 175677 - RNA, 24 nt, Human
gcucuguagcccaggcuggucuug

SEQ ID NO: 175678 - RNA, 22 nt, Human
ggcauggguguggccgggccga

SEQ ID NO: 175679 - RNA, 19 nt, Human
ggccgggccgggguggggg

SEQ ID NO: 175680 - RNA, 18 nt, Human
ggcuggucuugaacuccu

SEQ ID NO: 175681 - RNA, 18 nt, Human
gggcauggguguggccgg

SEQ ID NO: 175682 - RNA, 18 nt, Human
gggcauggguguggccgg

SEQ ID NO: 175683 - RNA, 19 nt, Human
uaggaaagaugaggucuug

SEQ ID NO: 175684 - RNA, 19 nt, Human
ucccugcaggggcuugugg

SEQ ID NO: 175685 - RNA, 20 nt, Human
ucccugcaggggcuuguggg

SEQ ID NO: 175686 - RNA, 25 nt, Human
ucgcgcgccgcccgggcccgcuccc

SEQ ID NO: 175687 - RNA, 24 nt, Human
ucuguagcccaggcuggucuugaa

SEQ ID NO: 175688 - RNA, 18 nt, Human
ucuugcucuguagcccag

SEQ ID NO: 175689 - RNA, 19 nt, Human
ucuugcucuguagcccagg

SEQ ID NO: 175690 - RNA, 23 nt, Human
ucuugcucuguagcccaggcugg

SEQ ID NO: 175691 - RNA, 24 nt, Human
ucuugcucuguagcccaggcuggu

SEQ ID NO: 175692 - RNA, 22 nt, Human
ugcagugggcagcagugacccc

SEQ ID NO: 175693 - RNA, 19 nt, Human
ugcucuguagcccaggcug

SEQ ID NO: 175694 - RNA, 20 nt, Human
ugcucuguagcccaggcugg

SEQ ID NO: 175695 - RNA, 24 nt, Human
ugcuggugacacacagcugggauc

SEQ ID NO: 175696 - RNA, 21 nt, Human
uggccgggccggggugggggc

SEQ ID NO: 175697 - RNA, 19 nt, Human
ugggaccccucacagagaa

SEQ ID NO: 175698 - RNA, 24 nt, Human
ugggcagcagugacccucacagag

SEQ ID NO: 175699 - RNA, 20 nt, Human
uggguguggccgggccgggg

SEQ ID NO: 175700 - RNA, 20 nt, Human
uguauuuuuuuuuuuuagga

SEQ ID NO: 175701 - RNA, 24 nt, Human
uuaggaaagaugaggucuugcucu

SEQ ID NO: 175702 - RNA, 24 nt, Human
uuuuuuuuuuuuuuuuuuucacug

SEQ ID NO: 175703 - RNA, 21 nt, Human
aaacaagagcuaaagcucaag

SEQ ID NO: 175704 - RNA, 20 nt, Human
aaacaguaguaaacaagacu

SEQ ID NO: 175705 - RNA, 22 nt, Human
aaaccaaaggauaccuuuauac

SEQ ID NO: 175706 - RNA, 19 nt, Human
aaagcucaaguuuguaagc

SEQ ID NO: 175707 - RNA, 24 nt, Human
aaaucuuccuuucuuugcagaggc

SEQ ID NO: 175708 - RNA, 22 nt, Human
aacacaaaccugcaugaaauga

SEQ ID NO: 175709 - RNA, 24 nt, Human
aagaaaaaaaaucacaggucaccc

SEQ ID NO: 175710 - RNA, 21 nt, Human
aaucacaggucacccuuuuuu

SEQ ID NO: 175711 - RNA, 24 nt, Human
aaugccaagguacuguucuguaca

SEQ ID NO: 175712 - RNA, 20 nt, Human
acacaccugguaaaagugcc

SEQ ID NO: 175713 - RNA, 27 nt, Human
acagcagucagacaugaguucccuuca

SEQ ID NO: 175714 - RNA, 20 nt, Human
acuacgaaaaugugcagaca

SEQ ID NO: 175715 - RNA, 22 nt, Human
acucaacacucucuagaacccc

SEQ ID NO: 175716 - RNA, 25 nt, Human
acucaacacucucuagaaccccaua

SEQ ID NO: 175717 - RNA, 21 nt, Human
acuggcauacaguccaaucua

SEQ ID NO: 175718 - RNA, 22 nt, Human
acugguacacaaaacaauucug

SEQ ID NO: 175719 - RNA, 19 nt, Human
acuguucuguacaggacau

SEQ ID NO: 175720 - RNA, 20 nt, Human
acuuagaaaaugguuuugcu

SEQ ID NO: 175721 - RNA, 23 nt, Human
acuucaacacaauauuuuaauau

SEQ ID NO: 175722 - RNA, 23 nt, Human
agcggcccgaguccugcgcgcgc

SEQ ID NO: 175723 - RNA, 23 nt, Human
aggaaguuucuagaagaaauucc

SEQ ID NO: 175724 - RNA, 23 nt, Human
agugcaguggaaaagcagucuug

SEQ ID NO: 175725 - RNA, 22 nt, Human
auaacaguuuggcacuuagcag

SEQ ID NO: 175726 - RNA, 23 nt, Human
auguuuggauauguugauuugca

SEQ ID NO: 175727 - RNA, 21 nt, Human
caaacccuaaacaguaguaaa

SEQ ID NO: 175728 - RNA, 22 nt, Human
caaagaguuaccauaccaaagc

SEQ ID NO: 175729 - RNA, 21 nt, Human
cacaaaccugcaugaaaugag

SEQ ID NO: 175730 - RNA, 18 nt, Human
cacucaacacucucuaga

SEQ ID NO: 175731 - RNA, 19 nt, Human
cacucucuagaaccccaua

SEQ ID NO: 175732 - RNA, 21 nt, Human
cagaagcuggagcccccggga

SEQ ID NO: 175733 - RNA, 22 nt, Human
cagcugacugguacacaaaaca

SEQ ID NO: 175734 - RNA, 24 nt, Human
cauauaagauaaaaaccuuacacc

SEQ ID NO: 175735 - RNA, 20 nt, Human
cauuaucuaauuucugcagu

SEQ ID NO: 175736 - RNA, 19 nt, Human
cauuguacugacuuccagc

SEQ ID NO: 175737 - RNA, 25 nt, Human
ccaacaucuacagccacauuuaacu

SEQ ID NO: 175738 - RNA, 24 nt, Human
ccacacucaacacucucuagaacc

SEQ ID NO: 175739 - RNA, 21 nt, Human
ccaccaaagaguuaccauacc

SEQ ID NO: 175740 - RNA, 22 nt, Human
ccccauaggcacagcaucuuuc

SEQ ID NO: 175741 - RNA, 22 nt, Human
cccgacaccguccggccggacc

SEQ ID NO: 175742 - RNA, 18 nt, Human
ccucgagcggcccgaguc

SEQ ID NO: 175743 - RNA, 21 nt, Human
cggcuccacagguacuacccc

SEQ ID NO: 175744 - RNA, 19 nt, Human
cuaaaacucucacuaguga

SEQ ID NO: 175745 - RNA, 21 nt, Human
cuaaagcucaaguuuguaagc

SEQ ID NO: 175746 - RNA, 24 nt, Human
cuauccugagccaccaauuccaac

SEQ ID NO: 175747 - RNA, 21 nt, Human
cucaacacucucuagaacccu

SEQ ID NO: 175748 - RNA, 25 nt, Human
cucccgacaccguccggccggaccc

SEQ ID NO: 175749 - RNA, 21 nt, Human
cucuugggucaggaucucgca

SEQ ID NO: 175750 - RNA, 23 nt, Human
cugcgcgcgcgcccgcccggccc

SEQ ID NO: 175751 - RNA, 19 nt, Human
gaaaggagggaaggaggaa

SEQ ID NO: 175752 - RNA, 20 nt, Human
gagacuaacuggcauacagu

SEQ ID NO: 175753 - RNA, 24 nt, Human
gagcagaagcuggagcccccggga

SEQ ID NO: 175754 - RNA, 26 nt, Human
gagccaccaauuccaacacacaccug

SEQ ID NO: 175755 - RNA, 18 nt, Human
gagcggcccgaguccugc

SEQ ID NO: 175756 - RNA, 25 nt, Human
gagcuauguuauggugcucuugggu

SEQ ID NO: 175757 - RNA, 18 nt, Human
ggcgcccgcuccucugcc

SEQ ID NO: 175758 - RNA, 21 nt, Human
ggcuccacagguacuacccca

SEQ ID NO: 175759 - RNA, 23 nt, Human
guacuguucuguacaggacauuu

SEQ ID NO: 175760 - RNA, 25 nt, Human
gucuuggcauguuuggauauguuga

SEQ ID NO: 175761 - RNA, 21 nt, Human
uaaaacacaaaccugcaugaa

SEQ ID NO: 175762 - RNA, 23 nt, Human
uaacauuuuaggcacaaaccuua

SEQ ID NO: 175763 - RNA, 24 nt, Human
uaagaaaaaaaaucacaggucacc

SEQ ID NO: 175764 - RNA, 20 nt, Human
uaagacaaguuuucaaaccc

SEQ ID NO: 175765 - RNA, 22 nt, Human
uaagaccuauccugagccacca

SEQ ID NO: 175766 - RNA, 26 nt, Human
uaagugauguuuuucauaugcauguu

SEQ ID NO: 175767 - RNA, 22 nt, Human
uaaguggaauguuaaaacacaa

SEQ ID NO: 175768 - RNA, 23 nt, Human
uacaggacauuucaccaaagcaa

SEQ ID NO: 175769 - RNA, 24 nt, Human
uacaggacauuucaccaaagcaaa

SEQ ID NO: 175770 - RNA, 19 nt, Human
uaccauaccaaagcccagc

SEQ ID NO: 175771 - RNA, 18 nt, Human
uacguauuugaauacagc

SEQ ID NO: 175772 - RNA, 24 nt, Human
uacuaggaauaaauggagacuaac

SEQ ID NO: 175773 - RNA, 18 nt, Human
uaggaaaggagggaagga

SEQ ID NO: 175774 - RNA, 21 nt, Human
uaggaauaaauggagacuaac

SEQ ID NO: 175775 - RNA, 20 nt, Human
uaguuugcuuucauuaaaaa

SEQ ID NO: 175776 - RNA, 23 nt, Human
uaguuugcuuucauuaaaaagau

SEQ ID NO: 175777 - RNA, 22 nt, Human
uauuacaaagacuagauucuua

SEQ ID NO: 175778 - RNA, 18 nt, Human
uauuuuacaugauagcaa

SEQ ID NO: 175779 - RNA, 24 nt, Human
ucaacaguuacguguucucccaaa

SEQ ID NO: 175780 - RNA, 19 nt, Human
ucacaugagggcugcaacc

SEQ ID NO: 175781 - RNA, 24 nt, Human
ucaguuacuguuuuaauguucccc

SEQ ID NO: 175782 - RNA, 20 nt, Human
uccacagguacuaccccaga

SEQ ID NO: 175783 - RNA, 20 nt, Human
ucccccaaugagaagugggg

SEQ ID NO: 175784 - RNA, 24 nt, Human
uccgcgcucugagcagaagcugga

SEQ ID NO: 175785 - RNA, 28 nt, Human
uccucugccgacggguccggcucccgac

SEQ ID NO: 175786 - RNA, 20 nt, Human
ucuaaaacuaauaucuaguu

SEQ ID NO: 175787 - RNA, 22 nt, Human
ucuaagucaacacagaagcgag

SEQ ID NO: 175788 - RNA, 19 nt, Human
ucuaccagccaaacuuuac

SEQ ID NO: 175789 - RNA, 18 nt, Human
ucuagaaccccauaggca

SEQ ID NO: 175790 - RNA, 22 nt, Human
ucuaguuguaaaaagaaaaauc

SEQ ID NO: 175791 - RNA, 24 nt, Human
ucuccgcgcucugagcagaagcug

SEQ ID NO: 175792 - RNA, 22 nt, Human
ucugcaguuauagagucaauga

SEQ ID NO: 175793 - RNA, 19 nt, Human
ucuggcuaaaauggagagu

SEQ ID NO: 175794 - RNA, 22 nt, Human
ugaaauuaaaaaaaaaaaacac

SEQ ID NO: 175795 - RNA, 25 nt, Human
ugaacugaaauuaaaaaaaaaaaac

SEQ ID NO: 175796 - RNA, 19 nt, Human
ugagaagugggguaaagug

SEQ ID NO: 175797 - RNA, 18 nt, Human
ugagcagaagcuggagcc

SEQ ID NO: 175798 - RNA, 20 nt, Human
ugagcagaagcuggagcccc

SEQ ID NO: 175799 - RNA, 18 nt, Human
ugaguucccuucagggaa

SEQ ID NO: 175800 - RNA, 21 nt, Human
ugauagcaauucccacucccu

SEQ ID NO: 175801 - RNA, 23 nt, Human
ugggguaaaguggguugagguga

SEQ ID NO: 175802 - RNA, 18 nt, Human
uguacaggacauuucacc

SEQ ID NO: 175803 - RNA, 19 nt, Human
uguuauggugcucuugggu

SEQ ID NO: 175804 - RNA, 25 nt, Human
uuaccauaccaaagcccagcacaga

SEQ ID NO: 175805 - RNA, 22 nt, Human
uucuguacaggacauuucacca

SEQ ID NO: 175806 - RNA, 20 nt, Human
uuuauaaaaucuccuacuca

SEQ ID NO: 175807 - RNA, 22 nt, Human
uuuguaagcaucauaaaaccac

SEQ ID NO: 175808 - RNA, 24 nt, Human
aaaaugauugaaucaucauuacca

SEQ ID NO: 175809 - RNA, 19 nt, Human
acaacaccaagaaacaaaa

SEQ ID NO: 175810 - RNA, 23 nt, Human
acagugcaagaauuucccaaaaa

SEQ ID NO: 175811 - RNA, 22 nt, Human
accaaaaacuugccauaacaac

SEQ ID NO: 175812 - RNA, 22 nt, Human
agaaagagggcuaguggguggg

SEQ ID NO: 175813 - RNA, 23 nt, Human
agacucacagacgugagcaggac

SEQ ID NO: 175814 - RNA, 22 nt, Human
agagaaagagggcuagugggug

SEQ ID NO: 175815 - RNA, 22 nt, Human
aggagaggggaggguggggaug

SEQ ID NO: 175816 - RNA, 23 nt, Human
cacacacuuggaacagagagaga

SEQ ID NO: 175817 - RNA, 24 nt, Human
caccaagaaacaaaaaauguuuaa

SEQ ID NO: 175818 - RNA, 22 nt, Human
cagaguggagcugagaagaggg

SEQ ID NO: 175819 - RNA, 19 nt, Human
caggcucaggagaggggag

SEQ ID NO: 175820 - RNA, 19 nt, Human
ccacacgcaccagaucaaa

SEQ ID NO: 175821 - RNA, 21 nt, Human
ccagaucaaauaacuuggaua

SEQ ID NO: 175822 - RNA, 23 nt, Human
cccccccucuccaccucuuuucc

SEQ ID NO: 175823 - RNA, 22 nt, Human
ccccccucuccaccucuuuucu

SEQ ID NO: 175824 - RNA, 23 nt, Human
cccucuccaccucuuuucuggaa

SEQ ID NO: 175825 - RNA, 18 nt, Human
ccuugccuucuuccugcc

SEQ ID NO: 175826 - RNA, 26 nt, Human
ccuugccuucuuccugccuucucucc

SEQ ID NO: 175827 - RNA, 22 nt, Human
cucuccuuuccuucucucucuu

SEQ ID NO: 175828 - RNA, 21 nt, Human
cucucucuuucuuauuccccc

SEQ ID NO: 175829 - RNA, 23 nt, Human
cuuuuuuuuuuuuuuuuuaaaug

SEQ ID NO: 175830 - RNA, 21 nt, Human
uaacaacaccaagaaacaaaa

SEQ ID NO: 175831 - RNA, 23 nt, Human
ucuuuccugcuuuuuuuuuuuuu

SEQ ID NO: 175832 - RNA, 18 nt, Human
ugacuugggaucuuuccu

SEQ ID NO: 175833 - RNA, 23 nt, Human
ugauugaaucaucauuaccaaaa

SEQ ID NO: 175834 - RNA, 23 nt, Human
ugccauaacaacaccaagaaaca

SEQ ID NO: 175835 - RNA, 19 nt, Human
uggaacagagagagagaga

SEQ ID NO: 175836 - RNA, 21 nt, Human
ugggaaaggacagacucacag

SEQ ID NO: 175837 - RNA, 27 nt, Human
ugggaucuuuccugcuuuuuuuuuuuu

SEQ ID NO: 175838 - RNA, 22 nt, Human
uugccacacagagagaaagagg

SEQ ID NO: 175839 - RNA, 21 nt, Human
uugccuucuuccugccuucuc

SEQ ID NO: 175840 - RNA, 25 nt, Human
uuucuuauucccccccucuccaccu

SEQ ID NO: 175841 - RNA, 26 nt, Human
uuugacuugggaucuuuccugcuuuu

SEQ ID NO: 175842 - RNA, 21 nt, Human
aggccccuccccucuucaagg

SEQ ID NO: 175843 - RNA, 18 nt, Human
caaggggucuacauggca

SEQ ID NO: 175844 - RNA, 18 nt, Human
ccagcagugagggucucu

SEQ ID NO: 175845 - RNA, 22 nt, Human
cccagcagugagggucucucuc

SEQ ID NO: 175846 - RNA, 22 nt, Human
cggcucccuaggccccuccccu

SEQ ID NO: 175847 - RNA, 25 nt, Human
cggcugacugucgaacaggaggagc

SEQ ID NO: 175848 - RNA, 18 nt, Human
gaggaggggagauucagu

SEQ ID NO: 175849 - RNA, 20 nt, Human
gcggcucccuaggccccucc

SEQ ID NO: 175850 - RNA, 19 nt, Human
ggagauucagugugguggg

SEQ ID NO: 175851 - RNA, 21 nt, Human
gucgaacaggaggagcagaga

SEQ ID NO: 175852 - RNA, 18 nt, Human
ucccuaggccccuccccu

SEQ ID NO: 175853 - RNA, 22 nt, Human
ucuuccucuugugcucuugcug

SEQ ID NO: 175854 - RNA, 21 nt, Human
ucuugcuggggcugguggucc

SEQ ID NO: 175855 - RNA, 21 nt, Human
ugagcgauguggcucggcugg

SEQ ID NO: 175856 - RNA, 20 nt, Human
uugugcucuugcuggggcug

SEQ ID NO: 175857 - RNA, 18 nt, Human
aaaccagcggggccugcc

SEQ ID NO: 175858 - RNA, 24 nt, Human
aaagaguuggucccgaggccuggg

SEQ ID NO: 175859 - RNA, 22 nt, Human
aaauguucccacuauaccaaau

SEQ ID NO: 175860 - RNA, 22 nt, Human
aacaugagagugccaggaaggg

SEQ ID NO: 175861 - RNA, 20 nt, Human
aacauuauucucggcugucc

SEQ ID NO: 175862 - RNA, 21 nt, Human
aacggggauaaaauauagagc

SEQ ID NO: 175863 - RNA, 26 nt, Human
aaggagaaaauagcagggucacgauc

SEQ ID NO: 175864 - RNA, 21 nt, Human
aagggagagggcaaguccaga

SEQ ID NO: 175865 - RNA, 19 nt, Human
aaugcaagagcacagagag

SEQ ID NO: 175866 - RNA, 20 nt, Human
acaaggcuuggauucaaauc

SEQ ID NO: 175867 - RNA, 26 nt, Human
accaccagggccuagcccuggcucug

SEQ ID NO: 175868 - RNA, 24 nt, Human
accagacccugcuggagccgccgu

SEQ ID NO: 175869 - RNA, 19 nt, Human
accagacugggagauucuu

SEQ ID NO: 175870 - RNA, 22 nt, Human
accccuuaaccagacccugcug

SEQ ID NO: 175871 - RNA, 22 nt, Human
accucaggcccuaagcacacug

SEQ ID NO: 175872 - RNA, 21 nt, Human
acucaccgcaccaaaccagcg

SEQ ID NO: 175873 - RNA, 18 nt, Human
agacugugggccaagcaa

SEQ ID NO: 175874 - RNA, 20 nt, Human
agagaacaggagaacccaca

SEQ ID NO: 175875 - RNA, 23 nt, Human
agagcgccugcagcugccugccu

SEQ ID NO: 175876 - RNA, 19 nt, Human
agaggaaaagggaaugaga

SEQ ID NO: 175877 - RNA, 20 nt, Human
agagggcaaguccagagcag

SEQ ID NO: 175878 - RNA, 18 nt, Human
agaucaggcccuggagac

SEQ ID NO: 175879 - RNA, 21 nt, Human
agcaggugugcacagcacagg

SEQ ID NO: 175880 - RNA, 20 nt, Human
agcuggggcccuggaaggag

SEQ ID NO: 175881 - RNA, 19 nt, Human
aggaaaagggaaugagaga

SEQ ID NO: 175882 - RNA, 23 nt, Human
aggaaaagggaaugagagaaugc

SEQ ID NO: 175883 - RNA, 24 nt, Human
aggaggagagcgccugcagcugcc

SEQ ID NO: 175884 - RNA, 21 nt, Human
aggagggaaacaggcagagaa

SEQ ID NO: 175885 - RNA, 21 nt, Human
agggaaacaggcagagaagga

SEQ ID NO: 175886 - RNA, 23 nt, Human
caaacuccaggcucugcuccaua

SEQ ID NO: 175887 - RNA, 19 nt, Human
caaagaguuggucccgagg

SEQ ID NO: 175888 - RNA, 29 nt, Human
caaagcaaauguucccacuauaccaaauu

SEQ ID NO: 175889 - RNA, 21 nt, Human
caacccccaaucucaccccag

SEQ ID NO: 175890 - RNA, 21 nt, Human
caacuucuggcuuccacagcu

SEQ ID NO: 175891 - RNA, 23 nt, Human
cacaccuuggccuccaggccuaa

SEQ ID NO: 175892 - RNA, 21 nt, Human
caccaaaccagcggggccugc

SEQ ID NO: 175893 - RNA, 19 nt, Human
caccucaggcccuaagcac

SEQ ID NO: 175894 - RNA, 22 nt, Human
cacugcguggcggccacguggc

SEQ ID NO: 175895 - RNA, 18 nt, Human
cacugugugaccuugagu

SEQ ID NO: 175896 - RNA, 27 nt, Human
cagaaggaugaagguuugaaucucacu

SEQ ID NO: 175897 - RNA, 23 nt, Human
cagacacaaggcuuggauucaaa

SEQ ID NO: 175898 - RNA, 18 nt, Human
cagcacaggaugcuucca

SEQ ID NO: 175899 - RNA, 22 nt, Human
cagcauuaucuugugaugugau

SEQ ID NO: 175900 - RNA, 18 nt, Human
cagcugccugccugggag

SEQ ID NO: 175901 - RNA, 20 nt, Human
caggagacggaaugguccag

SEQ ID NO: 175902 - RNA, 24 nt, Human
caucacucugguccaacccccaau

SEQ ID NO: 175903 - RNA, 20 nt, Human
ccaaaccagcggggccugcc

SEQ ID NO: 175904 - RNA, 18 nt, Human
ccaagcugggugcaaaac

SEQ ID NO: 175905 - RNA, 22 nt, Human
ccacaaguuucauucucuuccu

SEQ ID NO: 175906 - RNA, 23 nt, Human
ccacagcuggacccaaagugcag

SEQ ID NO: 175907 - RNA, 21 nt, Human
ccagcacguccauucuuccca

SEQ ID NO: 175908 - RNA, 21 nt, Human
ccagugcccagagcagggugu

SEQ ID NO: 175909 - RNA, 20 nt, Human
cccacaccaggguggaaagg

SEQ ID NO: 175910 - RNA, 19 nt, Human
cccacaccuuggccuccag

SEQ ID NO: 175911 - RNA, 21 nt, Human
cccacaccuuggccuccaggc

SEQ ID NO: 175912 - RNA, 24 nt, Human
cccuuaaccagacccugcuggagc

SEQ ID NO: 175913 - RNA, 19 nt, Human
ccgagcucuggagcccugg

SEQ ID NO: 175914 - RNA, 19 nt, Human
ccgagcucuggagcccugg

SEQ ID NO: 175915 - RNA, 22 nt, Human
ccgcaccaaaccagcggggccu

SEQ ID NO: 175916 - RNA, 18 nt, Human
ccgguccuaagcuuuuca

SEQ ID NO: 175917 - RNA, 20 nt, Human
ccuagcccuggcucugccca

SEQ ID NO: 175918 - RNA, 25 nt, Human
ccuagcccuggcucugcccauugac

SEQ ID NO: 175919 - RNA, 23 nt, Human
ccucccucacccugcacagccgg

SEQ ID NO: 175920 - RNA, 22 nt, Human
ccugcagcugccugccugggag

SEQ ID NO: 175921 - RNA, 18 nt, Human
ccugggcugaggccuggg

SEQ ID NO: 175922 - RNA, 21 nt, Human
ccuugagucaguccucacucu

SEQ ID NO: 175923 - RNA, 19 nt, Human
ccuuggccuccaggccuaa

SEQ ID NO: 175924 - RNA, 20 nt, Human
cgauggagaaguggggcugg

SEQ ID NO: 175925 - RNA, 21 nt, Human
cggaaugguccagugcugggc

SEQ ID NO: 175926 - RNA, 21 nt, Human
cguccauucuucccagacagc

SEQ ID NO: 175927 - RNA, 24 nt, Human
cgugcaguagcacccgugggugug

SEQ ID NO: 175928 - RNA, 21 nt, Human
cuaacaauaccagauccgaga

SEQ ID NO: 175929 - RNA, 22 nt, Human
cuauguggggccacuuccuguc

SEQ ID NO: 175930 - RNA, 23 nt, Human
cucagaagacgugacaaacaguc

SEQ ID NO: 175931 - RNA, 20 nt, Human
cuccacacaccaccagggcc

SEQ ID NO: 175932 - RNA, 21 nt, Human
cuccuggcucagcagccaagg

SEQ ID NO: 175933 - RNA, 20 nt, Human
cucuguaccucaggcucccc

SEQ ID NO: 175934 - RNA, 18 nt, Human
cuggcucagcagccaagg

SEQ ID NO: 175935 - RNA, 23 nt, Human
cugggugaggcuuuuuaccuguu

SEQ ID NO: 175936 - RNA, 18 nt, Human
cugugggccaagcacagg

SEQ ID NO: 175937 - RNA, 23 nt, Human
cuuccgguccuaagcuuuucauu

SEQ ID NO: 175938 - RNA, 23 nt, Human
gaaccagauaucuaagguuuuag

SEQ ID NO: 175939 - RNA, 21 nt, Human
gaagggaggagggaaacaggc

SEQ ID NO: 175940 - RNA, 20 nt, Human
gacugggucugccugggugc

SEQ ID NO: 175941 - RNA, 22 nt, Human
gagcagcacuggggucagggua

SEQ ID NO: 175942 - RNA, 24 nt, Human
gagcaggugugcacagcacaggau

SEQ ID NO: 175943 - RNA, 21 nt, Human
gcacacugcguggcggccacg

SEQ ID NO: 175944 - RNA, 18 nt, Human
gcacucucuccuaccaga

SEQ ID NO: 175945 - RNA, 23 nt, Human
gccugggcugaggccugggcccu

SEQ ID NO: 175946 - RNA, 18 nt, Human
ggaaaggaagggaggagg

SEQ ID NO: 175947 - RNA, 23 nt, Human
ggaaugguccagugcugggcugg

SEQ ID NO: 175948 - RNA, 21 nt, Human
ggaugggggucaucuggguga

SEQ ID NO: 175949 - RNA, 22 nt, Human
ggcccugggaagugacagcagc

SEQ ID NO: 175950 - RNA, 21 nt, Human
ggccugggcugaggccugggc

SEQ ID NO: 175951 - RNA, 23 nt, Human
ggcggccacguggcucugcagca

SEQ ID NO: 175952 - RNA, 18 nt, Human
gggaaacaggcagagaag

SEQ ID NO: 175953 - RNA, 18 nt, Human
gggagagaggagagagca

SEQ ID NO: 175954 - RNA, 19 nt, Human
gggaugggggucaucuggg

SEQ ID NO: 175955 - RNA, 21 nt, Human
ggggucaucugggugaggcuu

SEQ ID NO: 175956 - RNA, 19 nt, Human
gucacgaucagaauccagu

SEQ ID NO: 175957 - RNA, 22 nt, Human
guccaacccccaaucucacccc

SEQ ID NO: 175958 - RNA, 19 nt, Human
gugcuccacacaccaccag

SEQ ID NO: 175959 - RNA, 18 nt, Human
guggcucugcagcacucc

SEQ ID NO: 175960 - RNA, 21 nt, Human
guuggucccgaggccugggcu

SEQ ID NO: 175961 - RNA, 24 nt, Human
uaagaugaugaagacagcaaaaca

SEQ ID NO: 175962 - RNA, 19 nt, Human
uaagguuuuagcuccuggc

SEQ ID NO: 175963 - RNA, 21 nt, Human
uaccucaggcucccccacuga

SEQ ID NO: 175964 - RNA, 18 nt, Human
ucagaagacgugacaaac

SEQ ID NO: 175965 - RNA, 19 nt, Human
ucagaauccaguucaucug

SEQ ID NO: 175966 - RNA, 21 nt, Human
ucagagagacugaaagucauu

SEQ ID NO: 175967 - RNA, 22 nt, Human
ucaggcccuggagacagaagga

SEQ ID NO: 175968 - RNA, 26 nt, Human
ucagugaagauuuguugaucugacag

SEQ ID NO: 175969 - RNA, 22 nt, Human
uccacacaccaccagggcccuu

SEQ ID NO: 175970 - RNA, 19 nt, Human
uccauagucucaaacucca

SEQ ID NO: 175971 - RNA, 19 nt, Human
ucccagcauucccagugcc

SEQ ID NO: 175972 - RNA, 20 nt, Human
ucccugaaaccgcccaacuu

SEQ ID NO: 175973 - RNA, 22 nt, Human
ucccuuaacuuccucugggccu

SEQ ID NO: 175974 - RNA, 23 nt, Human
uccuaagccucaguuuccccauc

SEQ ID NO: 175975 - RNA, 22 nt, Human
uccucacucuucucuguaccuc

SEQ ID NO: 175976 - RNA, 18 nt, Human
uccucuguaaaauggggu

SEQ ID NO: 175977 - RNA, 26 nt, Human
ucgcacauuacugagcccacaucaug

SEQ ID NO: 175978 - RNA, 23 nt, Human
ucucagacaaauccuccuggcuu

SEQ ID NO: 175979 - RNA, 19 nt, Human
ucucgcacauuacugagcc

SEQ ID NO: 175980 - RNA, 19 nt, Human
ucuuuuuucccccagaggu

SEQ ID NO: 175981 - RNA, 18 nt, Human
ugaagacagcaaaacaag

SEQ ID NO: 175982 - RNA, 18 nt, Human
ugaccuugagucaguccu

SEQ ID NO: 175983 - RNA, 20 nt, Human
ugagagaaugcaagagcaca

SEQ ID NO: 175984 - RNA, 22 nt, Human
ugagagaggacaucacucuggu

SEQ ID NO: 175985 - RNA, 26 nt, Human
ugagucaguccucacucuucucugua

SEQ ID NO: 175986 - RNA, 18 nt, Human
ugauagcugagagaggac

SEQ ID NO: 175987 - RNA, 24 nt, Human
ugcaaaacagaaccagauaucuaa

SEQ ID NO: 175988 - RNA, 21 nt, Human
ugcaagagcacagagagaaca

SEQ ID NO: 175989 - RNA, 21 nt, Human
ugccaagcugggugcaaaaca

SEQ ID NO: 175990 - RNA, 19 nt, Human
ugcccagagcagggugugg

SEQ ID NO: 175991 - RNA, 20 nt, Human
uggaaaggaagggaggaggg

SEQ ID NO: 175992 - RNA, 22 nt, Human
uggaaaggaagggaggagggaa

SEQ ID NO: 175993 - RNA, 20 nt, Human
uggcuuccacagcuggaccc

SEQ ID NO: 175994 - RNA, 22 nt, Human
uggggcccuggaaggagauuuu

SEQ ID NO: 175995 - RNA, 23 nt, Human
uggggcugcgauggagaaguggg

SEQ ID NO: 175996 - RNA, 23 nt, Human
ugguaaagaucaggcccuggaga

SEQ ID NO: 175997 - RNA, 18 nt, Human
ugguaugagggauggggg

SEQ ID NO: 175998 - RNA, 24 nt, Human
uguccugggcuguaauuuggagac

SEQ ID NO: 175999 - RNA, 20 nt, Human
uucagagagacugaaaguca

SEQ ID NO: 176000 - RNA, 18 nt, Human
uucuucccagacagcuca

SEQ ID NO: 176001 - RNA, 20 nt, Human
uuggcccucccucacccugc

SEQ ID NO: 176002 - RNA, 27 nt, Human
uuuagcuccuggcucagcagccaaggu

SEQ ID NO: 176003 - RNA, 22 nt, Human
aagcggcgcgcgccgccggcuc

SEQ ID NO: 176004 - RNA, 22 nt, Human
acaaaacccggaaggaccccgc

SEQ ID NO: 176005 - RNA, 20 nt, Human
acacacgagaaccuucaaag

SEQ ID NO: 176006 - RNA, 20 nt, Human
agcaggguggauguucaggg

SEQ ID NO: 176007 - RNA, 24 nt, Human
agugcgucaagccaccccagcagg

SEQ ID NO: 176008 - RNA, 24 nt, Human
caaaacccggaaggaccccgccga

SEQ ID NO: 176009 - RNA, 23 nt, Human
caccgcgugacgcggcgccgggu

SEQ ID NO: 176010 - RNA, 19 nt, Human
cagcacuggacgcggagag

SEQ ID NO: 176011 - RNA, 26 nt, Human
cagcagcagcagcagagcggcgcgag

SEQ ID NO: 176012 - RNA, 23 nt, Human
cgacacaaaacccggaaggaccc

SEQ ID NO: 176013 - RNA, 22 nt, Human
cgagcgaacagauuugcacaga

SEQ ID NO: 176014 - RNA, 18 nt, Human
cgccgcguaaacgacgcg

SEQ ID NO: 176015 - RNA, 23 nt, Human
cggcggaggaggagcgagggucg

SEQ ID NO: 176016 - RNA, 20 nt, Human
gaagugcgucaagccacccc

SEQ ID NO: 176017 - RNA, 19 nt, Human
gaccugcaggccgagacac

SEQ ID NO: 176018 - RNA, 22 nt, Human
gagcgaacagauuugcacagaa

SEQ ID NO: 176019 - RNA, 19 nt, Human
gaguaguuuuuuuuuuuuu

SEQ ID NO: 176020 - RNA, 24 nt, Human
gcagcagcagagcggcgcgagcac

SEQ ID NO: 176021 - RNA, 20 nt, Human
gccugcggcccugggcuguc

SEQ ID NO: 176022 - RNA, 18 nt, Human
gcggcggcgggcaaggag

SEQ ID NO: 176023 - RNA, 21 nt, Human
gcguaaacgacgcggcgcgcg

SEQ ID NO: 176024 - RNA, 18 nt, Human
gggaggcggcggcgggca

SEQ ID NO: 176025 - RNA, 23 nt, Human
gggcggcagcagcagcagcagag

SEQ ID NO: 176026 - RNA, 21 nt, Human
guggauguucagggacacagc

SEQ ID NO: 176027 - RNA, 21 nt, Human
guggcgacggaagcggcgcgc

SEQ ID NO: 176028 - RNA, 21 nt, Human
ucgacacaaaacccggaagga

SEQ ID NO: 176029 - RNA, 24 nt, Human
ucuuuuguaaaguggacauaagag

SEQ ID NO: 176030 - RNA, 27 nt, Human
ugagccugcggcccugggcuguccagg

SEQ ID NO: 176031 - RNA, 23 nt, Human
uggacauaagaguaguuuuuuuu

SEQ ID NO: 176032 - RNA, 19 nt, Human
uggauguucagggacacag

SEQ ID NO: 176033 - RNA, 22 nt, Human
uggauguucagggacacagcuc

SEQ ID NO: 176034 - RNA, 18 nt, Human
ugggaguaaucacaaugc

SEQ ID NO: 176035 - RNA, 25 nt, Human
uuguggggguaaaaucaggcagcca

SEQ ID NO: 176036 - RNA, 24 nt, Human
agggcugaaguggggugggaggug

SEQ ID NO: 176037 - RNA, 19 nt, Human
agguggcuaggcucugaag

SEQ ID NO: 176038 - RNA, 23 nt, Human
aucaguuuuucaggggacagggc

SEQ ID NO: 176039 - RNA, 22 nt, Human
caggggacagggcugaaguggg

SEQ ID NO: 176040 - RNA, 20 nt, Human
ccuggugccucucaggucuc

SEQ ID NO: 176041 - RNA, 25 nt, Human
ugggagguguguggugccaaccacg

SEQ ID NO: 176042 - RNA, 18 nt, Human
uggggugggagguggcua

SEQ ID NO: 176043 - RNA, 20 nt, Human
uggggugggagguggcuagg

SEQ ID NO: 176044 - RNA, 21 nt, Human
uggggugggagguggcuaggc

SEQ ID NO: 176045 - RNA, 22 nt, Human
uggggugggagguggcuaggcu

SEQ ID NO: 176046 - RNA, 25 nt, Human
uggggugggagguggcuaggcucuu

SEQ ID NO: 176047 - RNA, 22 nt, Human
aaaaaaacaaacaucauaaaga

SEQ ID NO: 176048 - RNA, 23 nt, Human
aaaaaaacaaacaucauaaagag

SEQ ID NO: 176049 - RNA, 18 nt, Human
aaaaaugacaaaaaaaca

SEQ ID NO: 176050 - RNA, 21 nt, Human
aaacaaacaucauaaagagac

SEQ ID NO: 176051 - RNA, 21 nt, Human
acaaaaaaacaaacaucauaa

SEQ ID NO: 176052 - RNA, 24 nt, Human
acaaaguacagcaacugguaacaa

SEQ ID NO: 176053 - RNA, 26 nt, Human
acaaaguacagcaacugguaacaaac

SEQ ID NO: 176054 - RNA, 25 nt, Human
acccgagagcccuccgcucggcccc

SEQ ID NO: 176055 - RNA, 19 nt, Human
accgcgcggcgcggcgggu

SEQ ID NO: 176056 - RNA, 21 nt, Human
acgcggagccgguggaaaagu

SEQ ID NO: 176057 - RNA, 22 nt, Human
acuggcacuuuuuuuugccccc

SEQ ID NO: 176058 - RNA, 21 nt, Human
agagcccuccgcucggccccc

SEQ ID NO: 176059 - RNA, 25 nt, Human
agaucagcauuuuuggacccuuaau

SEQ ID NO: 176060 - RNA, 19 nt, Human
agccaacggcggggggcgc

SEQ ID NO: 176061 - RNA, 19 nt, Human
agccacaggugcccggcgc

SEQ ID NO: 176062 - RNA, 18 nt, Human
aucccuucuaucuguccc

SEQ ID NO: 176063 - RNA, 21 nt, Human
augaaauuaaggucaagggcu

SEQ ID NO: 176064 - RNA, 18 nt, Human
augacaaaaaaacaaaca

SEQ ID NO: 176065 - RNA, 18 nt, Human
caaaaaaaauacacaaau

SEQ ID NO: 176066 - RNA, 21 nt, Human
caaaaaugacaaaaaaacaaa

SEQ ID NO: 176067 - RNA, 20 nt, Human
caaauugcuaaggccccacu

SEQ ID NO: 176068 - RNA, 23 nt, Human
caccauggcaaccccuuagaucc

SEQ ID NO: 176069 - RNA, 20 nt, Human
cacccgagagcccuccgcuc

SEQ ID NO: 176070 - RNA, 20 nt, Human
cagaagguccccuuucgcuc

SEQ ID NO: 176071 - RNA, 19 nt, Human
cagcggcggccgccgggag

SEQ ID NO: 176072 - RNA, 19 nt, Human
caugcuugcuuccucccgg

SEQ ID NO: 176073 - RNA, 20 nt, Human
ccacaugcuugcuuccuccc

SEQ ID NO: 176074 - RNA, 21 nt, Human
ccacuggucagcaccuucccu

SEQ ID NO: 176075 - RNA, 24 nt, Human
cccacaugcuugcuuccucccgga

SEQ ID NO: 176076 - RNA, 22 nt, Human
ccccaaccaucccuucuaucug

SEQ ID NO: 176077 - RNA, 22 nt, Human
cccgcagccaacggcggggggc

SEQ ID NO: 176078 - RNA, 19 nt, Human
cccgcucucccacccgaga

SEQ ID NO: 176079 - RNA, 22 nt, Human
ccgcagccaacggcggggggcg

SEQ ID NO: 176080 - RNA, 23 nt, Human
ccgccgggagaggaggggaaagg

SEQ ID NO: 176081 - RNA, 19 nt, Human
ccgcugguggcagaagguc

SEQ ID NO: 176082 - RNA, 25 nt, Human
ccgcugguggcagaagguccccuuu

SEQ ID NO: 176083 - RNA, 23 nt, Human
ccggugguggcgggagaggcucu

SEQ ID NO: 176084 - RNA, 18 nt, Human
ccuccuucccaacccuuc

SEQ ID NO: 176085 - RNA, 21 nt, Human
ccucuaaggcaaucgccaccc

SEQ ID NO: 176086 - RNA, 19 nt, Human
cgagcacgggagugggacg

SEQ ID NO: 176087 - RNA, 22 nt, Human
cgggggggugcgggccgcgggg

SEQ ID NO: 176088 - RNA, 22 nt, Human
cucacugucgccccgggggggu

SEQ ID NO: 176089 - RNA, 22 nt, Human
cugaacacugcagcuagcuuuc

SEQ ID NO: 176090 - RNA, 21 nt, Human
cugaagcauacaauuuauaaa

SEQ ID NO: 176091 - RNA, 22 nt, Human
cuggacggcagacgaguuggga

SEQ ID NO: 176092 - RNA, 19 nt, Human
cuggcugcgguggcuuccu

SEQ ID NO: 176093 - RNA, 24 nt, Human
cuucauaaauccaugcgcgccgcu

SEQ ID NO: 176094 - RNA, 24 nt, Human
cuuccuggaaaugaacagcugucg

SEQ ID NO: 176095 - RNA, 23 nt, Human
cuucuaucugucccaagccacag

SEQ ID NO: 176096 - RNA, 22 nt, Human
cuugcuuccucccggacguccu

SEQ ID NO: 176097 - RNA, 18 nt, Human
gaggcgagcacgggagug

SEQ ID NO: 176098 - RNA, 22 nt, Human
gccggcuguccccgugccggcu

SEQ ID NO: 176099 - RNA, 18 nt, Human
gccgggagaggaggggaa

SEQ ID NO: 176100 - RNA, 20 nt, Human
gcggcgggugcauuuugcuc

SEQ ID NO: 176101 - RNA, 21 nt, Human
ggacgcggagccgguggaaaa

SEQ ID NO: 176102 - RNA, 19 nt, Human
ggcaauauacauucuccgc

SEQ ID NO: 176103 - RNA, 20 nt, Human
ggcacuuuuuuuugcccccu

SEQ ID NO: 176104 - RNA, 20 nt, Human
gggagcggcggacgcggagc

SEQ ID NO: 176105 - RNA, 19 nt, Human
gggaguuucuggagcuugg

SEQ ID NO: 176106 - RNA, 24 nt, Human
guggaaaaguuuguccaaguccug

SEQ ID NO: 176107 - RNA, 23 nt, Human
uaaaacaaauaaccaaaaaaaau

SEQ ID NO: 176108 - RNA, 23 nt, Human
uaaagaacaaaaaugacaaaaaa

SEQ ID NO: 176109 - RNA, 23 nt, Human
uaaagagacuuucauacauggca

SEQ ID NO: 176110 - RNA, 21 nt, Human
uaaggcaguuuggaaaugcau

SEQ ID NO: 176111 - RNA, 19 nt, Human
uacuguucugucccccaca

SEQ ID NO: 176112 - RNA, 22 nt, Human
uagcaacccugauaggagcaga

SEQ ID NO: 176113 - RNA, 20 nt, Human
uauccaaaaccaauuuaggg

SEQ ID NO: 176114 - RNA, 18 nt, Human
uauccucacuggccacaa

SEQ ID NO: 176115 - RNA, 22 nt, Human
ucaacaccauggcaaccccuua

SEQ ID NO: 176116 - RNA, 21 nt, Human
uccaagaagucaagcuccgga

SEQ ID NO: 176117 - RNA, 18 nt, Human
uccaugcgcgccgcuggc

SEQ ID NO: 176118 - RNA, 18 nt, Human
uccaugcgcgccgcuggc

SEQ ID NO: 176119 - RNA, 19 nt, Human
uccaugcgcgccgcuggcu

SEQ ID NO: 176120 - RNA, 20 nt, Human
uccaugcgcgccgcuggcug

SEQ ID NO: 176121 - RNA, 21 nt, Human
uccaugcgcgccgcuggcuga

SEQ ID NO: 176122 - RNA, 19 nt, Human
ucccaagccacaggugccc

SEQ ID NO: 176123 - RNA, 24 nt, Human
uccccaaccaucccuucuaucugu

SEQ ID NO: 176124 - RNA, 20 nt, Human
ucccgcucucccacccgaga

SEQ ID NO: 176125 - RNA, 19 nt, Human
ucgaggcgagcacgggagu

SEQ ID NO: 176126 - RNA, 23 nt, Human
ucggcccccggugguggcgggag

SEQ ID NO: 176127 - RNA, 24 nt, Human
ucucccgcagccaacggcgggggg

SEQ ID NO: 176128 - RNA, 28 nt, Human
ugacaaaaaaacaaacaucauaaagaga

SEQ ID NO: 176129 - RNA, 22 nt, Human
ugcaaauauaauuccuccuucc

SEQ ID NO: 176130 - RNA, 21 nt, Human
ugcccggcgcggggucgaggc

SEQ ID NO: 176131 - RNA, 22 nt, Human
ugcggccggcuguccccgugcc

SEQ ID NO: 176132 - RNA, 22 nt, Human
uggaugugaguuuaaaacuuuu

SEQ ID NO: 176133 - RNA, 25 nt, Human
uggaugugaguuuaaaacuuuuaau

SEQ ID NO: 176134 - RNA, 20 nt, Human
uggcaaccccuuagaucagc

SEQ ID NO: 176135 - RNA, 19 nt, Human
ugugcuaagagaucagagu

SEQ ID NO: 176136 - RNA, 23 nt, Human
uuaaggcaguuuggaaaugcauu

SEQ ID NO: 176137 - RNA, 22 nt, Human
uuaauccuaagaaaugugcuaa

SEQ ID NO: 176138 - RNA, 25 nt, Human
uucuauauacaaaguacagcaacug

SEQ ID NO: 176139 - RNA, 20 nt, Human
uucucuugaaaauaagaauu

SEQ ID NO: 176140 - RNA, 20 nt, Human
uugcauuguucaacaccaug

SEQ ID NO: 176141 - RNA, 20 nt, Human
uugcuuccucccggacgucc

SEQ ID NO: 176142 - RNA, 23 nt, Human
uuggaaaugcauuuguacauuuc

SEQ ID NO: 176143 - RNA, 18 nt, Human
aaccaucaccagcaaggc

SEQ ID NO: 176144 - RNA, 19 nt, Human
aaccucacugccucacccc

SEQ ID NO: 176145 - RNA, 21 nt, Human
aaccucacugccucaccccac

SEQ ID NO: 176146 - RNA, 22 nt, Human
aacugcaggaccuaacagccuc

SEQ ID NO: 176147 - RNA, 27 nt, Human
aagucccggcccccuggagaaucccac

SEQ ID NO: 176148 - RNA, 20 nt, Human
acacaggcuggacgugcggc

SEQ ID NO: 176149 - RNA, 27 nt, Human
acagacccagauggucacuguccugga

SEQ ID NO: 176150 - RNA, 22 nt, Human
acgcuggcugcacccacccagc

SEQ ID NO: 176151 - RNA, 18 nt, Human
acuuaugcauagagaaaa

SEQ ID NO: 176152 - RNA, 21 nt, Human
agacaggcagcacagcgcggc

SEQ ID NO: 176153 - RNA, 23 nt, Human
agaggaagagggggcaggaaagc

SEQ ID NO: 176154 - RNA, 18 nt, Human
agcugggguggggggcuu

SEQ ID NO: 176155 - RNA, 26 nt, Human
aggaaagcugggguggggggcuucug

SEQ ID NO: 176156 - RNA, 23 nt, Human
aggaagagggggcaggaaagcuu

SEQ ID NO: 176157 - RNA, 18 nt, Human
aggcagugggcagacugg

SEQ ID NO: 176158 - RNA, 18 nt, Human
aggccagguccugcuggc

SEQ ID NO: 176159 - RNA, 22 nt, Human
aggcccagcggcgacuccggga

SEQ ID NO: 176160 - RNA, 21 nt, Human
aggcugccugcccguucccgc

SEQ ID NO: 176161 - RNA, 23 nt, Human
aggcugguucucugggcuguggc

SEQ ID NO: 176162 - RNA, 23 nt, Human
aggcuuuguggggaggcugggcc

SEQ ID NO: 176163 - RNA, 22 nt, Human
aggugccgccgacuguggucgg

SEQ ID NO: 176164 - RNA, 21 nt, Human
auugccccaacccccagguga

SEQ ID NO: 176165 - RNA, 24 nt, Human
cacagacccagauggucacugucc

SEQ ID NO: 176166 - RNA, 20 nt, Human
cacccagcccucaacagagc

SEQ ID NO: 176167 - RNA, 19 nt, Human
cacccagggaagggagcga

SEQ ID NO: 176168 - RNA, 22 nt, Human
cacccagggaagggagcgacag

SEQ ID NO: 176169 - RNA, 19 nt, Human
caccuacaagcucaccuuc

SEQ ID NO: 176170 - RNA, 21 nt, Human
cacuuuauaaguuuuuaaaca

SEQ ID NO: 176171 - RNA, 19 nt, Human
cagcucucugggccuaacc

SEQ ID NO: 176172 - RNA, 19 nt, Human
caggcaccuacaagcucac

SEQ ID NO: 176173 - RNA, 19 nt, Human
caggccagguccugcuggc

SEQ ID NO: 176174 - RNA, 20 nt, Human
caggugguucuccuccacag

SEQ ID NO: 176175 - RNA, 18 nt, Human
ccacccagcccucaacag

SEQ ID NO: 176176 - RNA, 23 nt, Human
ccagaaguuccacgugccccugg

SEQ ID NO: 176177 - RNA, 23 nt, Human
ccagacccucagucugggcugcu

SEQ ID NO: 176178 - RNA, 20 nt, Human
ccagauggucacuguccugg

SEQ ID NO: 176179 - RNA, 24 nt, Human
cccacacuggagccgccgcagaag

SEQ ID NO: 176180 - RNA, 21 nt, Human
cccacauguggaggugagagc

SEQ ID NO: 176181 - RNA, 22 nt, Human
cccagcggcgacuccgggaccc

SEQ ID NO: 176182 - RNA, 20 nt, Human
ccccacacuggagccgccgc

SEQ ID NO: 176183 - RNA, 19 nt, Human
cccccggaagccacgccgu

SEQ ID NO: 176184 - RNA, 23 nt, Human
ccccugguccuacaucaccuacc

SEQ ID NO: 176185 - RNA, 19 nt, Human
ccuacaagcucaccuucga

SEQ ID NO: 176186 - RNA, 21 nt, Human
ccugacuuacugggcuguggc

SEQ ID NO: 176187 - RNA, 20 nt, Human
ccugcaggugguucuccucc

SEQ ID NO: 176188 - RNA, 18 nt, Human
cgaguguuccuaggcugg

SEQ ID NO: 176189 - RNA, 19 nt, Human
cggcaaccgcugggcgaug

SEQ ID NO: 176190 - RNA, 24 nt, Human
cucacuugcuuugagcucccaaaa

SEQ ID NO: 176191 - RNA, 25 nt, Human
cucuacgaggacacacccgucacuc

SEQ ID NO: 176192 - RNA, 19 nt, Human
cugcaggugguucuccucc

SEQ ID NO: 176193 - RNA, 18 nt, Human
cugcugaauucucucagg

SEQ ID NO: 176194 - RNA, 18 nt, Human
cuggcagcgggaggcugc

SEQ ID NO: 176195 - RNA, 20 nt, Human
cugguccugggcgguggcag

SEQ ID NO: 176196 - RNA, 18 nt, Human
cuguggucggaggugaga

SEQ ID NO: 176197 - RNA, 19 nt, Human
gaaaagcuuucauuugcug

SEQ ID NO: 176198 - RNA, 21 nt, Human
gagagccccagugggcuggag

SEQ ID NO: 176199 - RNA, 21 nt, Human
gagcauuggcucaccacuucc

SEQ ID NO: 176200 - RNA, 21 nt, Human
gagccaacuccagcucucugg

SEQ ID NO: 176201 - RNA, 21 nt, Human
gaggugagaccagggaguagg

SEQ ID NO: 176202 - RNA, 23 nt, Human
gagugucccucuggugcggaagg

SEQ ID NO: 176203 - RNA, 22 nt, Human
gauggcaagaacaugugaaaag

SEQ ID NO: 176204 - RNA, 18 nt, Human
gcccucaacagagcgggc

SEQ ID NO: 176205 - RNA, 23 nt, Human
gcugggccaagggugauucaucc

SEQ ID NO: 176206 - RNA, 18 nt, Human
ggaaagcuucuacccaca

SEQ ID NO: 176207 - RNA, 18 nt, Human
ggcacucugagaaggugc

SEQ ID NO: 176208 - RNA, 19 nt, Human
ggcuucugguccccaucuc

SEQ ID NO: 176209 - RNA, 26 nt, Human
gggcagcugugacucaggugucaaug

SEQ ID NO: 176210 - RNA, 24 nt, Human
gggcagugucugaggcccacuggg

SEQ ID NO: 176211 - RNA, 25 nt, Human
ggggugucaucccgaguguuccuag

SEQ ID NO: 176212 - RNA, 18 nt, Human
gucccuagacugcucugg

SEQ ID NO: 176213 - RNA, 22 nt, Human
gugggacaacaguggcgcgaag

SEQ ID NO: 176214 - RNA, 22 nt, Human
gugggcuggagggggcugaggc

SEQ ID NO: 176215 - RNA, 23 nt, Human
gugggcuggagggggcugaggcu

SEQ ID NO: 176216 - RNA, 21 nt, Human
uaaccucacugccucacccca

SEQ ID NO: 176217 - RNA, 26 nt, Human
uaaccucacugccucaccccacacug

SEQ ID NO: 176218 - RNA, 19 nt, Human
uaggccuggacacaggcug

SEQ ID NO: 176219 - RNA, 19 nt, Human
uaggcugguucucugggcu

SEQ ID NO: 176220 - RNA, 21 nt, Human
uaggugguuugcugcuauccc

SEQ ID NO: 176221 - RNA, 24 nt, Human
uagugccagcaccugcaaagcugu

SEQ ID NO: 176222 - RNA, 21 nt, Human
ucacugccucaccccacacug

SEQ ID NO: 176223 - RNA, 18 nt, Human
ucaggcuuuguggggagg

SEQ ID NO: 176224 - RNA, 21 nt, Human
uccacgugccccugguccuac

SEQ ID NO: 176225 - RNA, 21 nt, Human
ucccuuuuugcuucucugugu

SEQ ID NO: 176226 - RNA, 18 nt, Human
uccuuggugugauaaggg

SEQ ID NO: 176227 - RNA, 18 nt, Human
ucuccuggccucuccauc

SEQ ID NO: 176228 - RNA, 20 nt, Human
ucucugggccuaaccucacu

SEQ ID NO: 176229 - RNA, 24 nt, Human
ucucugggccuaaccucacugccu

SEQ ID NO: 176230 - RNA, 20 nt, Human
ucuugcucaugggauaaauu

SEQ ID NO: 176231 - RNA, 21 nt, Human
ugagaaggugccgccgacugu

SEQ ID NO: 176232 - RNA, 23 nt, Human
ugagaccagggaguaggccugga

SEQ ID NO: 176233 - RNA, 21 nt, Human
ugcacccacccagcccucaac

SEQ ID NO: 176234 - RNA, 21 nt, Human
ugcaggugguucuccuccaca

SEQ ID NO: 176235 - RNA, 18 nt, Human
ugccgccgacuguggucg

SEQ ID NO: 176236 - RNA, 18 nt, Human
uggacacaggcuggacgu

SEQ ID NO: 176237 - RNA, 20 nt, Human
uggcuucuguggaguguccc

SEQ ID NO: 176238 - RNA, 20 nt, Human
ugggagacuuuuucccuuuu

SEQ ID NO: 176239 - RNA, 23 nt, Human
ugggaugcagacccaggaaagcu

SEQ ID NO: 176240 - RNA, 21 nt, Human
ugggcuggagggggcugaggc

SEQ ID NO: 176241 - RNA, 21 nt, Human
ugggugaggguccugcaggug

SEQ ID NO: 176242 - RNA, 21 nt, Human
uggucggaggugagaccaggg

SEQ ID NO: 176243 - RNA, 22 nt, Human
uguuggggccagauaggugguu

SEQ ID NO: 176244 - RNA, 28 nt, Human
uguuuuaaccaucaccagcaaggcccag

SEQ ID NO: 176245 - RNA, 19 nt, Human
uucaucugagccaacucca

SEQ ID NO: 176246 - RNA, 18 nt, Human
uuucccggcaaccgcugg

SEQ ID NO: 176247 - RNA, 24 nt, Human
uuugagcucccaaaagaaaggugu

SEQ ID NO: 176248 - RNA, 25 nt, Human
aaaaaaaaaaaaaaaagcauaaaaa

SEQ ID NO: 176249 - RNA, 22 nt, Human
aaaaaaaagcauaaaaaucuug

SEQ ID NO: 176250 - RNA, 22 nt, Human
aaaaugcuuugaaauaacauga

SEQ ID NO: 176251 - RNA, 19 nt, Human
aaacuucuaaaaguacccc

SEQ ID NO: 176252 - RNA, 22 nt, Human
aagcaggcacuuucuguugacu

SEQ ID NO: 176253 - RNA, 23 nt, Human
aauugcuuuuuauacagacucgu

SEQ ID NO: 176254 - RNA, 19 nt, Human
acacuaaucaucauuuugu

SEQ ID NO: 176255 - RNA, 25 nt, Human
agagauauacuuuaaggcagccuuc

SEQ ID NO: 176256 - RNA, 22 nt, Human
agauauacuuuaaggcagccuu

SEQ ID NO: 176257 - RNA, 18 nt, Human
agugcuacucuuugaaca

SEQ ID NO: 176258 - RNA, 28 nt, Human
aucauuuuguaaaaaaaaaaaaaaaaaa

SEQ ID NO: 176259 - RNA, 22 nt, Human
auuacacuagaucauucuaaac

SEQ ID NO: 176260 - RNA, 21 nt, Human
auugguauaaaacagcccugu

SEQ ID NO: 176261 - RNA, 22 nt, Human
cacauuaucacacuaaucauca

SEQ ID NO: 176262 - RNA, 23 nt, Human
cacuagaucauucuaaacacagc

SEQ ID NO: 176263 - RNA, 21 nt, Human
cagcacauuaucacacuaauc

SEQ ID NO: 176264 - RNA, 23 nt, Human
cauagauaagagauauacuuuaa

SEQ ID NO: 176265 - RNA, 18 nt, Human
cuaaacacagccaugugc

SEQ ID NO: 176266 - RNA, 19 nt, Human
cuaaacacagccaugugcu

SEQ ID NO: 176267 - RNA, 22 nt, Human
gaacuaaacugacuauacugga

SEQ ID NO: 176268 - RNA, 25 nt, Human
guaaagcaggcacuuucuguugacu

SEQ ID NO: 176269 - RNA, 27 nt, Human
guacugaaaacuucuaaaaguacccca

SEQ ID NO: 176270 - RNA, 21 nt, Human
guauaaaacagcccuguccca

SEQ ID NO: 176271 - RNA, 25 nt, Human
uaaaaaaaaaaaaaaaaaaaagcau

SEQ ID NO: 176272 - RNA, 21 nt, Human
uaaaacagcccugucccaggu

SEQ ID NO: 176273 - RNA, 22 nt, Human
uaaaacagcccugucccaggua

SEQ ID NO: 176274 - RNA, 19 nt, Human
uaacaugaaaucaaugaac

SEQ ID NO: 176275 - RNA, 20 nt, Human
uaagagauauacuuuaaggc

SEQ ID NO: 176276 - RNA, 19 nt, Human
uaccccagauauuugguca

SEQ ID NO: 176277 - RNA, 20 nt, Human
uagcaaaauaggauuaacua

SEQ ID NO: 176278 - RNA, 21 nt, Human
ucugucuaucuuucuccaaaa

SEQ ID NO: 176279 - RNA, 21 nt, Human
ucuugcaauuauaaaaauguc

SEQ ID NO: 176280 - RNA, 21 nt, Human
ugaugacauuuuucugucuuc

SEQ ID NO: 176281 - RNA, 18 nt, Human
ugcuuugaaauaacauga

SEQ ID NO: 176282 - RNA, 25 nt, Human
uguaaaaaaaaaaaaaaaaaaaagc

SEQ ID NO: 176283 - RNA, 28 nt, Human
uguaaagcaggcacuuucuguugacuua

SEQ ID NO: 176284 - RNA, 18 nt, Human
ugucccagguauacaagg

SEQ ID NO: 176285 - RNA, 22 nt, Human
ugucuaucuuucuccaaaacag

SEQ ID NO: 176286 - RNA, 22 nt, Human
uucugucuaucuuucuccaaaa

SEQ ID NO: 176287 - RNA, 20 nt, Human
aacaucacagcauuugcagu

SEQ ID NO: 176288 - RNA, 23 nt, Human
aagaaauucauggucaacagcug

SEQ ID NO: 176289 - RNA, 21 nt, Human
acaaguaauacuuuauaauga

SEQ ID NO: 176290 - RNA, 22 nt, Human
acagcauuugcaguaaguccau

SEQ ID NO: 176291 - RNA, 19 nt, Human
acuacauuuauugaauacu

SEQ ID NO: 176292 - RNA, 20 nt, Human
aggaugggggcagguaagaa

SEQ ID NO: 176293 - RNA, 21 nt, Human
augaaguuccucuaagaaaca

SEQ ID NO: 176294 - RNA, 21 nt, Human
caaauuccuauugcuaagaaa

SEQ ID NO: 176295 - RNA, 28 nt, Human
caguaaguccauuucuccagugaagccc

SEQ ID NO: 176296 - RNA, 22 nt, Human
cccaccuuauuuucaguuuagc

SEQ ID NO: 176297 - RNA, 18 nt, Human
ccucagagaccgcgcucc

SEQ ID NO: 176298 - RNA, 23 nt, Human
cuggcggggucgccgcuccccuc

SEQ ID NO: 176299 - RNA, 21 nt, Human
gaagaagccgccgccgccagg

SEQ ID NO: 176300 - RNA, 22 nt, Human
gcuggcggggucgccgcucccc

SEQ ID NO: 176301 - RNA, 24 nt, Human
uaaaauaccuauauagcauccauu

SEQ ID NO: 176302 - RNA, 21 nt, Human
uaaacauuuuuaaaaacugug

SEQ ID NO: 176303 - RNA, 24 nt, Human
uaauaagcuauacauauacuacaa

SEQ ID NO: 176304 - RNA, 22 nt, Human
uacaaguaauacuuuauaauga

SEQ ID NO: 176305 - RNA, 22 nt, Human
ucacagcauuugcaguaagucc

SEQ ID NO: 176306 - RNA, 19 nt, Human
uccucuaagaaacaucacu

SEQ ID NO: 176307 - RNA, 24 nt, Human
ugcuaagaaauucauggucaacag

SEQ ID NO: 176308 - RNA, 21 nt, Human
uguaaacuacauuuauugaau

SEQ ID NO: 176309 - RNA, 22 nt, Human
uugaauacuuacuggacacauc

SEQ ID NO: 176310 - RNA, 21 nt, Human
uuuguacaaguaauacuuuau

SEQ ID NO: 176311 - RNA, 19 nt, Human
uuuuuuuuuuuuaggaucu

SEQ ID NO: 176312 - RNA, 23 nt, Human
uuuuuuuuuuuuuuuuuuuuagg

SEQ ID NO: 176313 - RNA, 19 nt, Human
aaaaauaaagaaggagggc

SEQ ID NO: 176314 - RNA, 20 nt, Human
aaacaccaaggaacaguccu

SEQ ID NO: 176315 - RNA, 20 nt, Human
aaagaaggagggcugcaaag

SEQ ID NO: 176316 - RNA, 24 nt, Human
aaagagcugggauuacaggcguga

SEQ ID NO: 176317 - RNA, 23 nt, Human
aaagaucgacgaaugagauccaa

SEQ ID NO: 176318 - RNA, 18 nt, Human
aaagaugccagacucaaa

SEQ ID NO: 176319 - RNA, 22 nt, Human
aaagggaggagguacaugcagu

SEQ ID NO: 176320 - RNA, 18 nt, Human
aaaugagaaagggaggag

SEQ ID NO: 176321 - RNA, 22 nt, Human
aacaccacacgcaaucuccaaa

SEQ ID NO: 176322 - RNA, 24 nt, Human
aacagcuugugggcacagcuggca

SEQ ID NO: 176323 - RNA, 24 nt, Human
aaccaacuuggaacaccauuuggc

SEQ ID NO: 176324 - RNA, 24 nt, Human
aaccuugauuucaaccagaaacgg

SEQ ID NO: 176325 - RNA, 18 nt, Human
aacugggugugguccugu

SEQ ID NO: 176326 - RNA, 19 nt, Human
aagaagacagagccaucug

SEQ ID NO: 176327 - RNA, 18 nt, Human
aagaagcagaguaguacg

SEQ ID NO: 176328 - RNA, 21 nt, Human
aagacagagccaucuggggga

SEQ ID NO: 176329 - RNA, 21 nt, Human
aagacccugggccaagaacuu

SEQ ID NO: 176330 - RNA, 21 nt, Human
aagagcugggauuacaggcgu

SEQ ID NO: 176331 - RNA, 18 nt, Human
aagaugccagacucaaaa

SEQ ID NO: 176332 - RNA, 25 nt, Human
aagcaaacagagaaauuucugaaau

SEQ ID NO: 176333 - RNA, 24 nt, Human
aagcaccaagacauaaaacaaaac

SEQ ID NO: 176334 - RNA, 18 nt, Human
aagcagcugggggaagga

SEQ ID NO: 176335 - RNA, 18 nt, Human
aagcaugugacagugacc

SEQ ID NO: 176336 - RNA, 22 nt, Human
aagcccuggagacaagggagcc

SEQ ID NO: 176337 - RNA, 19 nt, Human
aagccugggucccagaagg

SEQ ID NO: 176338 - RNA, 18 nt, Human
aaggaccacaaaguucca

SEQ ID NO: 176339 - RNA, 23 nt, Human
aaggagggcugcaaaggauucug

SEQ ID NO: 176340 - RNA, 19 nt, Human
aauugcuucuucaccucca

SEQ ID NO: 176341 - RNA, 24 nt, Human
acaaagcaauuaccacuagcaccc

SEQ ID NO: 176342 - RNA, 20 nt, Human
acacgcacacaucaugaaug

SEQ ID NO: 176343 - RNA, 21 nt, Human
acagggccauuauaguguccu

SEQ ID NO: 176344 - RNA, 22 nt, Human
acauuccacugcaaucccacua

SEQ ID NO: 176345 - RNA, 18 nt, Human
accacaaaguuccagccu

SEQ ID NO: 176346 - RNA, 20 nt, Human
accacacgcacacaucauga

SEQ ID NO: 176347 - RNA, 21 nt, Human
acccaaaguggucaaugggaa

SEQ ID NO: 176348 - RNA, 21 nt, Human
acccacgugcccugaccuuac

SEQ ID NO: 176349 - RNA, 23 nt, Human
acccagcagaguccuggcagccu

SEQ ID NO: 176350 - RNA, 23 nt, Human
accccuacaaaacucggcaagga

SEQ ID NO: 176351 - RNA, 20 nt, Human
accccugguuggugaauucg

SEQ ID NO: 176352 - RNA, 22 nt, Human
accucaccccacccccagagac

SEQ ID NO: 176353 - RNA, 20 nt, Human
accuccaggaaagccucaac

SEQ ID NO: 176354 - RNA, 23 nt, Human
accucggccucccaaagagcugg

SEQ ID NO: 176355 - RNA, 18 nt, Human
acgggguuucaccauguu

SEQ ID NO: 176356 - RNA, 19 nt, Human
acgggguuucaccauguua

SEQ ID NO: 176357 - RNA, 20 nt, Human
acgggguuucaccauguuag

SEQ ID NO: 176358 - RNA, 24 nt, Human
acgggguuucaccauguuagccag

SEQ ID NO: 176359 - RNA, 18 nt, Human
acguaguuccauccugac

SEQ ID NO: 176360 - RNA, 18 nt, Human
acuaccaaaaacccacca

SEQ ID NO: 176361 - RNA, 21 nt, Human
acuagcacccauuuuucauaa

SEQ ID NO: 176362 - RNA, 23 nt, Human
acucagccuggucuggccuuaac

SEQ ID NO: 176363 - RNA, 20 nt, Human
acugcaaucccacuaaaguu

SEQ ID NO: 176364 - RNA, 24 nt, Human
acugccucagccugccgaauaguu

SEQ ID NO: 176365 - RNA, 20 nt, Human
agaaaacagaucaaacaagc

SEQ ID NO: 176366 - RNA, 21 nt, Human
agaaaacagaucaaacaagca

SEQ ID NO: 176367 - RNA, 21 nt, Human
agaaagaaaggaaguacguga

SEQ ID NO: 176368 - RNA, 22 nt, Human
agaaaggaaguacgugaagggg

SEQ ID NO: 176369 - RNA, 22 nt, Human
agaaaggaaguacgugaagggg

SEQ ID NO: 176370 - RNA, 23 nt, Human
agaaaggaaguacgugaaggggg

SEQ ID NO: 176371 - RNA, 18 nt, Human
agaaagggaggagguaca

SEQ ID NO: 176372 - RNA, 21 nt, Human
agaaggagggcugcaaaggau

SEQ ID NO: 176373 - RNA, 21 nt, Human
agacaccucccaggaagcccu

SEQ ID NO: 176374 - RNA, 21 nt, Human
agacacucgcuuuagcagcca

SEQ ID NO: 176375 - RNA, 18 nt, Human
agacagagccaucugggg

SEQ ID NO: 176376 - RNA, 24 nt, Human
agacagagccaucugggggauggc

SEQ ID NO: 176377 - RNA, 22 nt, Human
agacauaaaacaaaacaacaac

SEQ ID NO: 176378 - RNA, 22 nt, Human
agaccagacuuuuccagggauu

SEQ ID NO: 176379 - RNA, 24 nt, Human
agacucaaaaggcgacaucagugg

SEQ ID NO: 176380 - RNA, 23 nt, Human
agacuuuuccagggauuggaaga

SEQ ID NO: 176381 - RNA, 18 nt, Human
agagaaggaggugagggg

SEQ ID NO: 176382 - RNA, 19 nt, Human
agagaaggaggugagggga

SEQ ID NO: 176383 - RNA, 23 nt, Human
agagcccucccuacccugauccu

SEQ ID NO: 176384 - RNA, 24 nt, Human
agagcugggauuacaggcgugagc

SEQ ID NO: 176385 - RNA, 22 nt, Human
agagggcaggagaagggaauuu

SEQ ID NO: 176386 - RNA, 19 nt, Human
agauguggacucccagaau

SEQ ID NO: 176387 - RNA, 22 nt, Human
agcagagacgggguuucaccau

SEQ ID NO: 176388 - RNA, 18 nt, Human
agcaggaccccccgaagc

SEQ ID NO: 176389 - RNA, 19 nt, Human
agcccagccccccucccca

SEQ ID NO: 176390 - RNA, 21 nt, Human
agccuguggugggcggcccgg

SEQ ID NO: 176391 - RNA, 22 nt, Human
agcuaaguccucaccuaagcac

SEQ ID NO: 176392 - RNA, 23 nt, Human
agcugaucuguaccccacuuaac

SEQ ID NO: 176393 - RNA, 20 nt, Human
agcugccuggaacccacgac

SEQ ID NO: 176394 - RNA, 19 nt, Human
aggaagcagcaagcuggaa

SEQ ID NO: 176395 - RNA, 18 nt, Human
aggaaguacgugaagggg

SEQ ID NO: 176396 - RNA, 18 nt, Human
aggagagagggugggggg

SEQ ID NO: 176397 - RNA, 20 nt, Human
aggaggagccuggggaacug

SEQ ID NO: 176398 - RNA, 19 nt, Human
aggaggccgcagagcaggg

SEQ ID NO: 176399 - RNA, 20 nt, Human
aggcagccagaggguggaag

SEQ ID NO: 176400 - RNA, 19 nt, Human
aggccaggcugugugauca

SEQ ID NO: 176401 - RNA, 18 nt, Human
agggaggagguacaugca

SEQ ID NO: 176402 - RNA, 18 nt, Human
agggcacaagcaugugac

SEQ ID NO: 176403 - RNA, 19 nt, Human
agggcugugggucugucuu

SEQ ID NO: 176404 - RNA, 21 nt, Human
agguaguuccauccugaccuc

SEQ ID NO: 176405 - RNA, 20 nt, Human
aggugguggcgaugggccuu

SEQ ID NO: 176406 - RNA, 22 nt, Human
agucacacucagaccagacuuu

SEQ ID NO: 176407 - RNA, 20 nt, Human
agugacagaaaacuguacaa

SEQ ID NO: 176408 - RNA, 24 nt, Human
agugacagaaaacuguacaaggga

SEQ ID NO: 176409 - RNA, 20 nt, Human
agugcaguggcccgaucuug

SEQ ID NO: 176410 - RNA, 24 nt, Human
agugcaguggcccgaucuugguuc

SEQ ID NO: 176411 - RNA, 20 nt, Human
auaaaacaaaacaacaaccc

SEQ ID NO: 176412 - RNA, 19 nt, Human
auagggguucuggacuguu

SEQ ID NO: 176413 - RNA, 20 nt, Human
aucauaccucaauaaaccug

SEQ ID NO: 176414 - RNA, 22 nt, Human
aucccauggacagauccuacca

SEQ ID NO: 176415 - RNA, 21 nt, Human
augaagcaacagauccaggaa

SEQ ID NO: 176416 - RNA, 23 nt, Human
augggacaaaggaggccgcagag

SEQ ID NO: 176417 - RNA, 21 nt, Human
augggccccauggugggagcc

SEQ ID NO: 176418 - RNA, 22 nt, Human
auguccagaaggagcgggaagc

SEQ ID NO: 176419 - RNA, 22 nt, Human
auucugauccugacaccuggcu

SEQ ID NO: 176420 - RNA, 20 nt, Human
caaaaacccaccacgcgcca

SEQ ID NO: 176421 - RNA, 24 nt, Human
caaagagcugggauuacaggcgug

SEQ ID NO: 176422 - RNA, 23 nt, Human
caagacauaaaacaaaacaacaa

SEQ ID NO: 176423 - RNA, 21 nt, Human
caagcuggaaguggucgugca

SEQ ID NO: 176424 - RNA, 18 nt, Human
caaggaccgugugacacu

SEQ ID NO: 176425 - RNA, 21 nt, Human
caauucucauucaaugaaaga

SEQ ID NO: 176426 - RNA, 21 nt, Human
cacacagcugccuggaaccca

SEQ ID NO: 176427 - RNA, 19 nt, Human
cacacaucaugaaugacuc

SEQ ID NO: 176428 - RNA, 20 nt, Human
cacagcaaccaacuuggaac

SEQ ID NO: 176429 - RNA, 23 nt, Human
caccaagacauaaaacaaaacaa

SEQ ID NO: 176430 - RNA, 26 nt, Human
caccaagacauaaaacaaaacaacaa

SEQ ID NO: 176431 - RNA, 19 nt, Human
caccacgcgccaaaaggcg

SEQ ID NO: 176432 - RNA, 24 nt, Human
caccagugacagaaaacuguacaa

SEQ ID NO: 176433 - RNA, 18 nt, Human
caccauguaccaccaucc

SEQ ID NO: 176434 - RNA, 22 nt, Human
caccauguuagccaggaugguc

SEQ ID NO: 176435 - RNA, 24 nt, Human
caccauguuagccaggauggucuc

SEQ ID NO: 176436 - RNA, 21 nt, Human
caccccacccccagagacacc

SEQ ID NO: 176437 - RNA, 23 nt, Human
caccccacccccagagacaccuc

SEQ ID NO: 176438 - RNA, 22 nt, Human
caccccaccccgagagagcacc

SEQ ID NO: 176439 - RNA, 25 nt, Human
caccuucuacccaugauucugaucc

SEQ ID NO: 176440 - RNA, 23 nt, Human
cacuuugaauaaacccagcuaag

SEQ ID NO: 176441 - RNA, 19 nt, Human
cagaaucucagggccgcca

SEQ ID NO: 176442 - RNA, 24 nt, Human
cagacacagcaugaacacguguac

SEQ ID NO: 176443 - RNA, 22 nt, Human
cagagacgggguuucaccaugu

SEQ ID NO: 176444 - RNA, 21 nt, Human
cagagcagggccaguccugug

SEQ ID NO: 176445 - RNA, 20 nt, Human
cagauggcgccugaucucau

SEQ ID NO: 176446 - RNA, 25 nt, Human
cagcaaccaacuuggaacaccauuu

SEQ ID NO: 176447 - RNA, 22 nt, Human
cagcaugccuggcuugucuuga

SEQ ID NO: 176448 - RNA, 24 nt, Human
cagcaugccuggcuugucuugagc

SEQ ID NO: 176449 - RNA, 21 nt, Human
cagcucucuccccucuccuca

SEQ ID NO: 176450 - RNA, 21 nt, Human
cagcuuaguggaguguuuacc

SEQ ID NO: 176451 - RNA, 19 nt, Human
caggccccagcuugcuggc

SEQ ID NO: 176452 - RNA, 18 nt, Human
caggcuacgugggggggc

SEQ ID NO: 176453 - RNA, 21 nt, Human
cagggcaccguggcggacagg

SEQ ID NO: 176454 - RNA, 19 nt, Human
cagggcucuggaaugucca

SEQ ID NO: 176455 - RNA, 19 nt, Human
cagggggguggugcggggg

SEQ ID NO: 176456 - RNA, 18 nt, Human
cagguugcagcagacgug

SEQ ID NO: 176457 - RNA, 19 nt, Human
caucucucucaccaggacu

SEQ ID NO: 176458 - RNA, 19 nt, Human
caugacccaaccccagauc

SEQ ID NO: 176459 - RNA, 24 nt, Human
caugacccaaccccagaucuggac

SEQ ID NO: 176460 - RNA, 23 nt, Human
caugacccaaccccagaucuggg

SEQ ID NO: 176461 - RNA, 23 nt, Human
cauuauaguguccucagauuaga

SEQ ID NO: 176462 - RNA, 20 nt, Human
cauuccacugcaaucccacu

SEQ ID NO: 176463 - RNA, 22 nt, Human
ccaaagagcugggauuacaggc

SEQ ID NO: 176464 - RNA, 23 nt, Human
ccaaagagcugggauuacaggcg

SEQ ID NO: 176465 - RNA, 24 nt, Human
ccaaagagcugggauuacaggcgu

SEQ ID NO: 176466 - RNA, 19 nt, Human
ccaaccucaccccaccccc

SEQ ID NO: 176467 - RNA, 23 nt, Human
ccaacgcccaauacauagccaag

SEQ ID NO: 176468 - RNA, 19 nt, Human
ccagaaggagcgggaagca

SEQ ID NO: 176469 - RNA, 28 nt, Human
ccagccccccuccccagcaggacccccc

SEQ ID NO: 176470 - RNA, 20 nt, Human
ccagggauuggaagauggag

SEQ ID NO: 176471 - RNA, 21 nt, Human
ccagugcccaccagugacaga

SEQ ID NO: 176472 - RNA, 18 nt, Human
ccauggacagauccuacc

SEQ ID NO: 176473 - RNA, 23 nt, Human
cccaaagagcugggauuacaggc

SEQ ID NO: 176474 - RNA, 23 nt, Human
cccaagcuggagugcaguggccc

SEQ ID NO: 176475 - RNA, 23 nt, Human
cccaagucacacucagaccagac

SEQ ID NO: 176476 - RNA, 23 nt, Human
cccacgugcccugaccuuacauu

SEQ ID NO: 176477 - RNA, 23 nt, Human
cccagccccccuccccagcagga

SEQ ID NO: 176478 - RNA, 23 nt, Human
cccagguucaagcgauucuacug

SEQ ID NO: 176479 - RNA, 18 nt, Human
ccccaaccucaccccacc

SEQ ID NO: 176480 - RNA, 19 nt, Human
ccccaaccucaccccaccc

SEQ ID NO: 176481 - RNA, 18 nt, Human
ccccagcaggaccccccg

SEQ ID NO: 176482 - RNA, 18 nt, Human
ccccccuccccagcagga

SEQ ID NO: 176483 - RNA, 20 nt, Human
ccccgaggaagcagcugggg

SEQ ID NO: 176484 - RNA, 21 nt, Human
ccccgggggcucaggcuuccu

SEQ ID NO: 176485 - RNA, 23 nt, Human
ccccucgcucaugcuucucccgg

SEQ ID NO: 176486 - RNA, 22 nt, Human
cccgcccacuuugaauaaaccc

SEQ ID NO: 176487 - RNA, 24 nt, Human
cccucccuacccugauccuccaaa

SEQ ID NO: 176488 - RNA, 21 nt, Human
cccugaggguggaggcgcugg

SEQ ID NO: 176489 - RNA, 21 nt, Human
ccgaauaguugggacuacagg

SEQ ID NO: 176490 - RNA, 24 nt, Human
ccgccucccagguucaagcgauuc

SEQ ID NO: 176491 - RNA, 18 nt, Human
ccgucccuuccccuccca

SEQ ID NO: 176492 - RNA, 19 nt, Human
ccuacccugauccuccaaa

SEQ ID NO: 176493 - RNA, 18 nt, Human
ccucaccccacccccaga

SEQ ID NO: 176494 - RNA, 20 nt, Human
ccucaccccacccccagaga

SEQ ID NO: 176495 - RNA, 19 nt, Human
ccucagagacaagggcagg

SEQ ID NO: 176496 - RNA, 21 nt, Human
ccucagauuagaucuuagcac

SEQ ID NO: 176497 - RNA, 22 nt, Human
ccucaggggucacacucagccu

SEQ ID NO: 176498 - RNA, 23 nt, Human
ccucauucuuaacagcucauaaa

SEQ ID NO: 176499 - RNA, 23 nt, Human
ccuccaaaaauggacuggcccaa

SEQ ID NO: 176500 - RNA, 19 nt, Human
ccuccaaagcccuggagac

SEQ ID NO: 176501 - RNA, 22 nt, Human
ccucccagguucaagcgauucu

SEQ ID NO: 176502 - RNA, 22 nt, Human
ccuccccggcaaauuucaaccc

SEQ ID NO: 176503 - RNA, 24 nt, Human
ccuccuaaaaccccuggugaugaa

SEQ ID NO: 176504 - RNA, 26 nt, Human
ccuccugacagccaugccccagcauu

SEQ ID NO: 176505 - RNA, 19 nt, Human
ccucugagacgagcugguu

SEQ ID NO: 176506 - RNA, 24 nt, Human
ccugaacaccacacgcaaucucca

SEQ ID NO: 176507 - RNA, 21 nt, Human
ccugaagccuuuggacgagcu

SEQ ID NO: 176508 - RNA, 22 nt, Human
ccugaccccacgcuguucccac

SEQ ID NO: 176509 - RNA, 18 nt, Human
ccugagggggagacaaga

SEQ ID NO: 176510 - RNA, 20 nt, Human
ccugcagcuggaaguaaaau

SEQ ID NO: 176511 - RNA, 19 nt, Human
ccuggcagccucuucggcu

SEQ ID NO: 176512 - RNA, 23 nt, Human
ccuggcccuaaucuucaccuggc

SEQ ID NO: 176513 - RNA, 23 nt, Human
ccugggccaagaacuuccagggc

SEQ ID NO: 176514 - RNA, 24 nt, Human
ccuucaaaauuuaaacucuuuaaa

SEQ ID NO: 176515 - RNA, 21 nt, Human
ccuuugugcugaccuuuuugg

SEQ ID NO: 176516 - RNA, 23 nt, Human
cgaaagcaauucucauucaauga

SEQ ID NO: 176517 - RNA, 23 nt, Human
cgaaugagauccaaacggucauu

SEQ ID NO: 176518 - RNA, 23 nt, Human
cgaggaagcagcugggggaagga

SEQ ID NO: 176519 - RNA, 19 nt, Human
cggcaaauuucaacccagc

SEQ ID NO: 176520 - RNA, 18 nt, Human
cgggagagugggggccag

SEQ ID NO: 176521 - RNA, 22 nt, Human
cgugagccaccgugcccgaccc

SEQ ID NO: 176522 - RNA, 25 nt, Human
cgugagccaccgugcccgacccuua

SEQ ID NO: 176523 - RNA, 20 nt, Human
cuaaagccgugagcaaacgc

SEQ ID NO: 176524 - RNA, 22 nt, Human
cuaaagccgugagcaaacgcua

SEQ ID NO: 176525 - RNA, 24 nt, Human
cuaaaguuucccucaaacaccaag

SEQ ID NO: 176526 - RNA, 19 nt, Human
cuaagcaccaagacauaaa

SEQ ID NO: 176527 - RNA, 20 nt, Human
cuaauuuuuuguauuuuuag

SEQ ID NO: 176528 - RNA, 23 nt, Human
cuaccaaaaacccaccacgcgcc

SEQ ID NO: 176529 - RNA, 21 nt, Human
cucaaacaccaaggaacaguc

SEQ ID NO: 176530 - RNA, 22 nt, Human
cucaagaauagcccagacccgc

SEQ ID NO: 176531 - RNA, 22 nt, Human
cucaccccacccccagagacac

SEQ ID NO: 176532 - RNA, 23 nt, Human
cucacucuaucccagggaugaac

SEQ ID NO: 176533 - RNA, 20 nt, Human
cucaugcuucucccggcccc

SEQ ID NO: 176534 - RNA, 20 nt, Human
cucaugcuucucccggcccc

SEQ ID NO: 176535 - RNA, 19 nt, Human
cuccaaaaauggacuggcc

SEQ ID NO: 176536 - RNA, 19 nt, Human
cuccaaaggccaucgcccc

SEQ ID NO: 176537 - RNA, 24 nt, Human
cuccagcugcgacaaggacuccau

SEQ ID NO: 176538 - RNA, 22 nt, Human
cucccagaaugcaaugggaaaa

SEQ ID NO: 176539 - RNA, 25 nt, Human
cuccuaaaaccccuggugaugaaca

SEQ ID NO: 176540 - RNA, 22 nt, Human
cuccugaccucgugaucugccc

SEQ ID NO: 176541 - RNA, 21 nt, Human
cuccugagggggagacaagag

SEQ ID NO: 176542 - RNA, 22 nt, Human
cugacagccaugccccagcauu

SEQ ID NO: 176543 - RNA, 24 nt, Human
cugaccccacgcuguucccacgcu

SEQ ID NO: 176544 - RNA, 23 nt, Human
cugagacgagcugguuuguuucc

SEQ ID NO: 176545 - RNA, 24 nt, Human
cugauccuccaaagcccuggagac

SEQ ID NO: 176546 - RNA, 23 nt, Human
cugccaccauguaccaccaucca

SEQ ID NO: 176547 - RNA, 21 nt, Human
cuggccucugagacgagcugg

SEQ ID NO: 176548 - RNA, 21 nt, Human
cugggccagggcaagcagggg

SEQ ID NO: 176549 - RNA, 18 nt, Human
cugucacccaagcuggag

SEQ ID NO: 176550 - RNA, 19 nt, Human
cuguugacucuagcccugg

SEQ ID NO: 176551 - RNA, 23 nt, Human
cuucaccuccaggaaagccucaa

SEQ ID NO: 176552 - RNA, 19 nt, Human
cuucccugacgacagggcc

SEQ ID NO: 176553 - RNA, 19 nt, Human
cuugaggccccgggggcuc

SEQ ID NO: 176554 - RNA, 22 nt, Human
cuuugaauguuuggaaaucauc

SEQ ID NO: 176555 - RNA, 20 nt, Human
gaaagcuucccaagucacac

SEQ ID NO: 176556 - RNA, 21 nt, Human
gaagacccugggccaagaacu

SEQ ID NO: 176557 - RNA, 23 nt, Human
gaagcaacagauccaggaaagca

SEQ ID NO: 176558 - RNA, 24 nt, Human
gaauaguugggacuacaggugugc

SEQ ID NO: 176559 - RNA, 24 nt, Human
gacaaccuaguguggccacaagag

SEQ ID NO: 176560 - RNA, 23 nt, Human
gacaagggagccagcuggaggaa

SEQ ID NO: 176561 - RNA, 22 nt, Human
gaccucgugaucugcccaccuc

SEQ ID NO: 176562 - RNA, 22 nt, Human
gaccucgugaucugcccaccuc

SEQ ID NO: 176563 - RNA, 24 nt, Human
gaccucgugaucugcccaccucgg

SEQ ID NO: 176564 - RNA, 18 nt, Human
gagaaggaggugagggga

SEQ ID NO: 176565 - RNA, 21 nt, Human
gagaaggaggugaggggauga

SEQ ID NO: 176566 - RNA, 24 nt, Human
gagacgggguuucaccauguuagc

SEQ ID NO: 176567 - RNA, 18 nt, Human
gagagucugcuaugccug

SEQ ID NO: 176568 - RNA, 20 nt, Human
gagcagaucugcuggcugag

SEQ ID NO: 176569 - RNA, 21 nt, Human
gagccuguggugggcggcccg

SEQ ID NO: 176570 - RNA, 22 nt, Human
gaggaagcagcugggggaagga

SEQ ID NO: 176571 - RNA, 22 nt, Human
gaggggaugaggggggaaagag

SEQ ID NO: 176572 - RNA, 18 nt, Human
gauuacaggcgugagcca

SEQ ID NO: 176573 - RNA, 21 nt, Human
gauuacaggcgugagccaccg

SEQ ID NO: 176574 - RNA, 24 nt, Human
gauuacaggcgugagccaccgugc

SEQ ID NO: 176575 - RNA, 22 nt, Human
gcaaucuccgccucccagguuc

SEQ ID NO: 176576 - RNA, 23 nt, Human
gcaccaagacauaaaacaaaaca

SEQ ID NO: 176577 - RNA, 26 nt, Human
gcaccuucuacccaugauucugaucc

SEQ ID NO: 176578 - RNA, 23 nt, Human
gcacuaccaaaaacccaccacgc

SEQ ID NO: 176579 - RNA, 18 nt, Human
gcagcuggaaguaaaauc

SEQ ID NO: 176580 - RNA, 22 nt, Human
gcagggcucuggaauguccaga

SEQ ID NO: 176581 - RNA, 18 nt, Human
gccaacagggugcugagu

SEQ ID NO: 176582 - RNA, 20 nt, Human
gccaagccuuccuccuaaaa

SEQ ID NO: 176583 - RNA, 21 nt, Human
gccaagccuuccuccuaaaac

SEQ ID NO: 176584 - RNA, 18 nt, Human
gcccagccccccucccca

SEQ ID NO: 176585 - RNA, 20 nt, Human
gccccgggggcucaggcuuc

SEQ ID NO: 176586 - RNA, 24 nt, Human
gccgcagagcagggccaguccugu

SEQ ID NO: 176587 - RNA, 19 nt, Human
gccucccaaagagcuggga

SEQ ID NO: 176588 - RNA, 23 nt, Human
gccuggaacccacgacucccgag

SEQ ID NO: 176589 - RNA, 24 nt, Human
gccugggucccagaagggagcaga

SEQ ID NO: 176590 - RNA, 19 nt, Human
gccuggucuggccuuaacu

SEQ ID NO: 176591 - RNA, 18 nt, Human
gcuaaguuggggccccug

SEQ ID NO: 176592 - RNA, 19 nt, Human
gcuccuggggaguagacuc

SEQ ID NO: 176593 - RNA, 25 nt, Human
gcucugucacccaagcuggagugca

SEQ ID NO: 176594 - RNA, 25 nt, Human
gcuggagugcaguggcccgaucuug

SEQ ID NO: 176595 - RNA, 22 nt, Human
gcuggcagggugggggcagggg

SEQ ID NO: 176596 - RNA, 24 nt, Human
ggaaagaaaccccugguuggugaa

SEQ ID NO: 176597 - RNA, 18 nt, Human
ggagagagggaaaggagg

SEQ ID NO: 176598 - RNA, 22 nt, Human
ggagugcuggcgggagacacgg

SEQ ID NO: 176599 - RNA, 18 nt, Human
ggaugaggggggaaagag

SEQ ID NO: 176600 - RNA, 20 nt, Human
ggccaaacagcagcacugaa

SEQ ID NO: 176601 - RNA, 18 nt, Human
ggccaagaacuuccaggg

SEQ ID NO: 176602 - RNA, 18 nt, Human
ggcccaggguggucccac

SEQ ID NO: 176603 - RNA, 19 nt, Human
ggccgcagagcagggccag

SEQ ID NO: 176604 - RNA, 19 nt, Human
ggccugggaauauggggga

SEQ ID NO: 176605 - RNA, 21 nt, Human
gggaagggcuggcaggguggg

SEQ ID NO: 176606 - RNA, 23 nt, Human
gggaauaugggggagcccccagc

SEQ ID NO: 176607 - RNA, 20 nt, Human
gggagaaaguaaugagcugg

SEQ ID NO: 176608 - RNA, 18 nt, Human
gggaugaggggggaaaga

SEQ ID NO: 176609 - RNA, 22 nt, Human
gggcacagcuggcauuuggagg

SEQ ID NO: 176610 - RNA, 18 nt, Human
gggcaccguggcggacag

SEQ ID NO: 176611 - RNA, 19 nt, Human
gggcaggggccuccccgag

SEQ ID NO: 176612 - RNA, 22 nt, Human
gggcaggggccuccccgaggaa

SEQ ID NO: 176613 - RNA, 24 nt, Human
gggcuggcagggugggggcagggg

SEQ ID NO: 176614 - RNA, 25 nt, Human
gggguaaagagaaggaggugagggg

SEQ ID NO: 176615 - RNA, 23 nt, Human
gggguuucaccauguuagccagg

SEQ ID NO: 176616 - RNA, 27 nt, Human
ggguggaggcagguagaaggggccggg

SEQ ID NO: 176617 - RNA, 21 nt, Human
ggguucuggacuguugacucu

SEQ ID NO: 176618 - RNA, 22 nt, Human
ggguuucaccauguuagccagg

SEQ ID NO: 176619 - RNA, 21 nt, Human
gguagaaggggcugacuuguu

SEQ ID NO: 176620 - RNA, 18 nt, Human
gguagagaaagggagaaa

SEQ ID NO: 176621 - RNA, 21 nt, Human
gguagggaaagaaaccccugg

SEQ ID NO: 176622 - RNA, 19 nt, Human
gguccuaggagaaacuacc

SEQ ID NO: 176623 - RNA, 20 nt, Human
ggucucgaucuccugaccuc

SEQ ID NO: 176624 - RNA, 24 nt, Human
gguuucaccauguuagccaggaug

SEQ ID NO: 176625 - RNA, 23 nt, Human
guagggauggcaaggauuauggg

SEQ ID NO: 176626 - RNA, 21 nt, Human
gucacacucagccuggucugg

SEQ ID NO: 176627 - RNA, 24 nt, Human
gugaucugcccaccucggccuccc

SEQ ID NO: 176628 - RNA, 21 nt, Human
gugcacggaggucccgacagg

SEQ ID NO: 176629 - RNA, 24 nt, Human
guggggugcagguacaggccaggc

SEQ ID NO: 176630 - RNA, 21 nt, Human
guggguuacagccuccacugg

SEQ ID NO: 176631 - RNA, 19 nt, Human
uaaaacaaaacaacaaccc

SEQ ID NO: 176632 - RNA, 22 nt, Human
uaaaacaaaacaacaacccgga

SEQ ID NO: 176633 - RNA, 24 nt, Human
uaaaacaaaacaacaacccggaua

SEQ ID NO: 176634 - RNA, 24 nt, Human
uaaaacaaaacaacaacccggaua

SEQ ID NO: 176635 - RNA, 21 nt, Human
uaaacacuccuugucaagacu

SEQ ID NO: 176636 - RNA, 20 nt, Human
uaaagaaggagggcugcaaa

SEQ ID NO: 176637 - RNA, 18 nt, Human
uaaagccgugagcaaacg

SEQ ID NO: 176638 - RNA, 23 nt, Human
uaaaguuucccucaaacaccaag

SEQ ID NO: 176639 - RNA, 22 nt, Human
uaagacgauguccaggcuacgu

SEQ ID NO: 176640 - RNA, 23 nt, Human
uaaggucucccacucugcauccu

SEQ ID NO: 176641 - RNA, 21 nt, Human
uaaguccucaccuaagcacca

SEQ ID NO: 176642 - RNA, 21 nt, Human
uaaugagcugggccaaacagc

SEQ ID NO: 176643 - RNA, 24 nt, Human
uaauuuuuuguauuuuuagcagag

SEQ ID NO: 176644 - RNA, 25 nt, Human
uaauuuuuuguauuuuuagcagaga

SEQ ID NO: 176645 - RNA, 25 nt, Human
uacaaaacucggcaaggaccacaaa

SEQ ID NO: 176646 - RNA, 19 nt, Human
uacagaaaacagaucaaac

SEQ ID NO: 176647 - RNA, 23 nt, Human
uacaggcgugagccaccgugccc

SEQ ID NO: 176648 - RNA, 21 nt, Human
uacaggguacaucauuggaaa

SEQ ID NO: 176649 - RNA, 20 nt, Human
uacaggugugcaccaccaca

SEQ ID NO: 176650 - RNA, 22 nt, Human
uaccaaaaacccaccacgcgcc

SEQ ID NO: 176651 - RNA, 25 nt, Human
uaccacggcaucucucucaccagga

SEQ ID NO: 176652 - RNA, 19 nt, Human
uaccuugaggccccggggg

SEQ ID NO: 176653 - RNA, 18 nt, Human
uagaucuuagcacaaugg

SEQ ID NO: 176654 - RNA, 22 nt, Human
uagcacguugacugaaagacca

SEQ ID NO: 176655 - RNA, 24 nt, Human
uagcagagacgggguuucaccaug

SEQ ID NO: 176656 - RNA, 26 nt, Human
uagcagagacgggguuucaccauguu

SEQ ID NO: 176657 - RNA, 18 nt, Human
uagcagagcacugccucc

SEQ ID NO: 176658 - RNA, 22 nt, Human
uagggauggcaaggauuauggg

SEQ ID NO: 176659 - RNA, 19 nt, Human
uaugggacaaaggaggccg

SEQ ID NO: 176660 - RNA, 24 nt, Human
uauuuccaaaagggacuuuggcuc

SEQ ID NO: 176661 - RNA, 24 nt, Human
ucaccauguuagccaggauggucu

SEQ ID NO: 176662 - RNA, 19 nt, Human
ucacugcaaucuccgccuc

SEQ ID NO: 176663 - RNA, 24 nt, Human
ucacugcaaucuccgccucccagg

SEQ ID NO: 176664 - RNA, 25 nt, Human
ucacugcaaucuccgccucccaggu

SEQ ID NO: 176665 - RNA, 19 nt, Human
ucacugguuacccuugagc

SEQ ID NO: 176666 - RNA, 20 nt, Human
ucagcaugccuggcuugucu

SEQ ID NO: 176667 - RNA, 24 nt, Human
uccaaagcccuggagacaagggag

SEQ ID NO: 176668 - RNA, 24 nt, Human
uccauccugaccucuccaggcaug

SEQ ID NO: 176669 - RNA, 19 nt, Human
ucccaaagagcugggauua

SEQ ID NO: 176670 - RNA, 23 nt, Human
ucccaaagagcugggauuacagg

SEQ ID NO: 176671 - RNA, 24 nt, Human
ucccaaagagcugggauuacaggc

SEQ ID NO: 176672 - RNA, 23 nt, Human
ucccaccgcagaaauucuccuug

SEQ ID NO: 176673 - RNA, 23 nt, Human
ucccagggaugaacagaggacuc

SEQ ID NO: 176674 - RNA, 19 nt, Human
ucccagguucaagcgauuc

SEQ ID NO: 176675 - RNA, 24 nt, Human
ucccagguucaagcgauucuacug

SEQ ID NO: 176676 - RNA, 23 nt, Human
ucccagucaccccaccccgagag

SEQ ID NO: 176677 - RNA, 19 nt, Human
uccccgaggaagcagcugg

SEQ ID NO: 176678 - RNA, 21 nt, Human
uccccgaggaagcagcugggg

SEQ ID NO: 176679 - RNA, 24 nt, Human
ucccgacuagaaucugccccucgc

SEQ ID NO: 176680 - RNA, 23 nt, Human
ucccugaggguggaggcgcuggg

SEQ ID NO: 176681 - RNA, 18 nt, Human
ucccuggauucuuucugc

SEQ ID NO: 176682 - RNA, 19 nt, Human
uccgucccuuccccuccca

SEQ ID NO: 176683 - RNA, 18 nt, Human
uccuccaaagcccuggag

SEQ ID NO: 176684 - RNA, 23 nt, Human
uccuccaaagcccuggagacaag

SEQ ID NO: 176685 - RNA, 22 nt, Human
ucggcaaggaccacaaaguucc

SEQ ID NO: 176686 - RNA, 25 nt, Human
ucuccaaaggccaucgccccaaccu

SEQ ID NO: 176687 - RNA, 18 nt, Human
ucuccaaagugcagucuu

SEQ ID NO: 176688 - RNA, 20 nt, Human
ucucucaccaggacuugagg

SEQ ID NO: 176689 - RNA, 21 nt, Human
ucucugguucgcauagagagg

SEQ ID NO: 176690 - RNA, 21 nt, Human
ucuggaauguccagaaggagc

SEQ ID NO: 176691 - RNA, 24 nt, Human
ucugggccagggcaagccgggguc

SEQ ID NO: 176692 - RNA, 24 nt, Human
ucugucacccaagcuggagugcag

SEQ ID NO: 176693 - RNA, 24 nt, Human
ucuugcucugucacccaagcugga

SEQ ID NO: 176694 - RNA, 20 nt, Human
ugaacaagacacagcuuagu

SEQ ID NO: 176695 - RNA, 20 nt, Human
ugaaugaauaacagagggaa

SEQ ID NO: 176696 - RNA, 24 nt, Human
ugaaugaaugcagauuaaucagaa

SEQ ID NO: 176697 - RNA, 21 nt, Human
ugacccaaccccagaucugga

SEQ ID NO: 176698 - RNA, 21 nt, Human
ugaccccacgcuguucccacg

SEQ ID NO: 176699 - RNA, 21 nt, Human
ugagaaagccagauguggacu

SEQ ID NO: 176700 - RNA, 23 nt, Human
ugagaaagccagauguggacucc

SEQ ID NO: 176701 - RNA, 18 nt, Human
ugagaaagggaggaggua

SEQ ID NO: 176702 - RNA, 18 nt, Human
ugagacugggaagggcug

SEQ ID NO: 176703 - RNA, 22 nt, Human
ugagauggagucuugcucuguc

SEQ ID NO: 176704 - RNA, 19 nt, Human
ugagcacccauccgucccu

SEQ ID NO: 176705 - RNA, 21 nt, Human
ugagggggagacaagaguccu

SEQ ID NO: 176706 - RNA, 18 nt, Human
ugaguggagguagaaagg

SEQ ID NO: 176707 - RNA, 22 nt, Human
ugaguggagguagaaaggaggc

SEQ ID NO: 176708 - RNA, 22 nt, Human
ugaguugugcuuguugaauucu

SEQ ID NO: 176709 - RNA, 24 nt, Human
ugaguugugcuuguugaauucugc

SEQ ID NO: 176710 - RNA, 24 nt, Human
ugaucugcccaccucggccuccca

SEQ ID NO: 176711 - RNA, 23 nt, Human
ugcaaucuccgccucccagguuc

SEQ ID NO: 176712 - RNA, 25 nt, Human
ugcacuaccaaaaacccaccacgcg

SEQ ID NO: 176713 - RNA, 19 nt, Human
ugcaucagucuccugggug

SEQ ID NO: 176714 - RNA, 23 nt, Human
ugcccaccagugacagaaaacug

SEQ ID NO: 176715 - RNA, 23 nt, Human
ugccgaauaguugggacuacagg

SEQ ID NO: 176716 - RNA, 24 nt, Human
ugccgaauaguugggacuacaggu

SEQ ID NO: 176717 - RNA, 20 nt, Human
ugccgaaugacguaguucca

SEQ ID NO: 176718 - RNA, 24 nt, Human
ugccucagccugccgaauaguugg

SEQ ID NO: 176719 - RNA, 21 nt, Human
ugccuguccagugcccaccag

SEQ ID NO: 176720 - RNA, 24 nt, Human
ugcucugucacccaagcuggagug

SEQ ID NO: 176721 - RNA, 18 nt, Human
ugcuggaagggaagcgcc

SEQ ID NO: 176722 - RNA, 23 nt, Human
uggaacaccauuuggcuuaagga

SEQ ID NO: 176723 - RNA, 19 nt, Human
uggaagggaagcgccccca

SEQ ID NO: 176724 - RNA, 20 nt, Human
uggacuggcccaaacugggc

SEQ ID NO: 176725 - RNA, 18 nt, Human
uggagacaagggagccag

SEQ ID NO: 176726 - RNA, 24 nt, Human
uggagaggguacaauguucuuauu

SEQ ID NO: 176727 - RNA, 22 nt, Human
uggaggcagguagaaggggcug

SEQ ID NO: 176728 - RNA, 19 nt, Human
uggagucuugcucugucac

SEQ ID NO: 176729 - RNA, 19 nt, Human
uggagugcaguggcccgau

SEQ ID NO: 176730 - RNA, 23 nt, Human
uggagugcaguggcccgaucuug

SEQ ID NO: 176731 - RNA, 24 nt, Human
uggagugcaguggcccgaucuugg

SEQ ID NO: 176732 - RNA, 21 nt, Human
uggauucuuucugcacuacca

SEQ ID NO: 176733 - RNA, 20 nt, Human
uggauuuccagggcaugggc

SEQ ID NO: 176734 - RNA, 22 nt, Human
uggauuuccagggcaugggcuc

SEQ ID NO: 176735 - RNA, 22 nt, Human
uggcaccuucuacccaugauuc

SEQ ID NO: 176736 - RNA, 18 nt, Human
uggcagggugggggcagg

SEQ ID NO: 176737 - RNA, 21 nt, Human
uggcccaggagagaggguggg

SEQ ID NO: 176738 - RNA, 23 nt, Human
ugggaaaaaaauaaagaaggagg

SEQ ID NO: 176739 - RNA, 19 nt, Human
ugggaagggcuggcagggu

SEQ ID NO: 176740 - RNA, 20 nt, Human
ugggaagggcuggcagggug

SEQ ID NO: 176741 - RNA, 21 nt, Human
ugggacuacaggugugcacca

SEQ ID NO: 176742 - RNA, 24 nt, Human
ugggacuacaggugugcaccacca

SEQ ID NO: 176743 - RNA, 20 nt, Human
ugggagcccagccccccucc

SEQ ID NO: 176744 - RNA, 22 nt, Human
ugggaucaggguuucaacagug

SEQ ID NO: 176745 - RNA, 21 nt, Human
ugggauuacaggcgugagcca

SEQ ID NO: 176746 - RNA, 22 nt, Human
ugggauuacaggcgugagccac

SEQ ID NO: 176747 - RNA, 23 nt, Human
ugggauuacaggcgugagccacc

SEQ ID NO: 176748 - RNA, 23 nt, Human
ugggauuacaggcgugagccacc

SEQ ID NO: 176749 - RNA, 24 nt, Human
ugggauuacaggcgugagccaccg

SEQ ID NO: 176750 - RNA, 23 nt, Human
ugggccccauggugggagcccag

SEQ ID NO: 176751 - RNA, 18 nt, Human
ugggggaaggauggauug

SEQ ID NO: 176752 - RNA, 24 nt, Human
ugggggccagggcagcccaaaggu

SEQ ID NO: 176753 - RNA, 28 nt, Human
uggguccacacagcugccuggaacccac

SEQ ID NO: 176754 - RNA, 18 nt, Human
ugggugcggcugugagcu

SEQ ID NO: 176755 - RNA, 24 nt, Human
uggguggaggcagguagaaggggc

SEQ ID NO: 176756 - RNA, 18 nt, Human
uggucaaugggaaagaug

SEQ ID NO: 176757 - RNA, 22 nt, Human
ugguggagaauguguuugcugu

SEQ ID NO: 176758 - RNA, 23 nt, Human
ugguggagaauguguuugcugug

SEQ ID NO: 176759 - RNA, 22 nt, Human
ugguggcgaugggccuuguagg

SEQ ID NO: 176760 - RNA, 24 nt, Human
ugguugcaauguuucaagaacaag

SEQ ID NO: 176761 - RNA, 20 nt, Human
uguaauggaaaagucaauga

SEQ ID NO: 176762 - RNA, 21 nt, Human
uguauuuuuagcagagacggg

SEQ ID NO: 176763 - RNA, 25 nt, Human
ugucacagcaaccaacuuggaacac

SEQ ID NO: 176764 - RNA, 18 nt, Human
uguccagaaggagcggga

SEQ ID NO: 176765 - RNA, 19 nt, Human
uguccaggcuacguggggg

SEQ ID NO: 176766 - RNA, 20 nt, Human
ugugaagggguugcuuccgg

SEQ ID NO: 176767 - RNA, 20 nt, Human
ugugcaucagucuccugggu

SEQ ID NO: 176768 - RNA, 18 nt, Human
uguggugggcggcccggg

SEQ ID NO: 176769 - RNA, 26 nt, Human
uguuagaaaauuccacuuucauaggg

SEQ ID NO: 176770 - RNA, 23 nt, Human
uguugcugucuaccuuccaucca

SEQ ID NO: 176771 - RNA, 19 nt, Human
uuaacugggugugguccug

SEQ ID NO: 176772 - RNA, 19 nt, Human
uuaacugggugugguccug

SEQ ID NO: 176773 - RNA, 20 nt, Human
uuaacugggugugguccugu

SEQ ID NO: 176774 - RNA, 24 nt, Human
uuagcagagacgggguuucaccau

SEQ ID NO: 176775 - RNA, 20 nt, Human
uucaaagccuccaacgcccc

SEQ ID NO: 176776 - RNA, 23 nt, Human
uucaacaguguuacuuauaaauu

SEQ ID NO: 176777 - RNA, 23 nt, Human
uucaagcgauucuacugccucag

SEQ ID NO: 176778 - RNA, 22 nt, Human
uuccagggauuggaagauggag

SEQ ID NO: 176779 - RNA, 21 nt, Human
uucccugaggguggaggcgcu

SEQ ID NO: 176780 - RNA, 18 nt, Human
uucugcauccauccacuc

SEQ ID NO: 176781 - RNA, 23 nt, Human
uuguauuuuuagcagagacgggg

SEQ ID NO: 176782 - RNA, 19 nt, Human
uuucaccauguuagccagg

SEQ ID NO: 176783 - RNA, 20 nt, Human
uuucaccauguuagccagga

SEQ ID NO: 176784 - RNA, 24 nt, Human
uuucugcacuaccaaaaacccacc

SEQ ID NO: 176785 - RNA, 23 nt, Human
uuuguuuccaucccugaagccuu

SEQ ID NO: 176786 - RNA, 24 nt, Human
uuuuuagcagagacgggguuucac

SEQ ID NO: 176787 - RNA, 24 nt, Human
uuuuugagauggagucuugcucug

SEQ ID NO: 176788 - RNA, 21 nt, Human
uuuuuguauuuuuagcagaga

SEQ ID NO: 176789 - RNA, 24 nt, Human
uuuuuuguauuuuuagcagagacg

SEQ ID NO: 176790 - RNA, 20 nt, Human
aaaacucacggcacagcccc

SEQ ID NO: 176791 - RNA, 23 nt, Human
aaaauaacagccccagaucuccc

SEQ ID NO: 176792 - RNA, 20 nt, Human
aaacacauaaugaaagaaac

SEQ ID NO: 176793 - RNA, 21 nt, Human
aaacucacggcacagccccaa

SEQ ID NO: 176794 - RNA, 22 nt, Human
aacucaguucccaucagacaca

SEQ ID NO: 176795 - RNA, 22 nt, Human
aaugaaagaaacauauauuuua

SEQ ID NO: 176796 - RNA, 23 nt, Human
aauggaaaucuuuauuuuuaaac

SEQ ID NO: 176797 - RNA, 23 nt, Human
aauucuuucucaagagccaaaaa

SEQ ID NO: 176798 - RNA, 18 nt, Human
aggaagagaagacagugg

SEQ ID NO: 176799 - RNA, 24 nt, Human
aguaauaggaauauucaaaaaugu

SEQ ID NO: 176800 - RNA, 20 nt, Human
auagaagacaacugcucaca

SEQ ID NO: 176801 - RNA, 24 nt, Human
augucccuucaucuucucucuucc

SEQ ID NO: 176802 - RNA, 24 nt, Human
caauucauaagaauucuuucucaa

SEQ ID NO: 176803 - RNA, 22 nt, Human
cacagccccaaggaugucccuu

SEQ ID NO: 176804 - RNA, 24 nt, Human
cagccccagaucucccucuuuaaa

SEQ ID NO: 176805 - RNA, 21 nt, Human
cccagaucucccucuuuaaau

SEQ ID NO: 176806 - RNA, 18 nt, Human
ccccagaucucccucuuu

SEQ ID NO: 176807 - RNA, 23 nt, Human
cccuaagccgcacaaggggaccc

SEQ ID NO: 176808 - RNA, 20 nt, Human
cccuucaucuucucucuucc

SEQ ID NO: 176809 - RNA, 23 nt, Human
ccgcacaaggggacccgccuccu

SEQ ID NO: 176810 - RNA, 23 nt, Human
ccucuguggcaguggcuuuuccu

SEQ ID NO: 176811 - RNA, 21 nt, Human
ccugucaccuaugccagcaaa

SEQ ID NO: 176812 - RNA, 21 nt, Human
cgagagcacgacucgguggag

SEQ ID NO: 176813 - RNA, 19 nt, Human
cuuccaacccaagcugcuc

SEQ ID NO: 176814 - RNA, 24 nt, Human
gaaaauauauaaauuaucgcccua

SEQ ID NO: 176815 - RNA, 21 nt, Human
gaggaagagaagacaguggcc

SEQ ID NO: 176816 - RNA, 18 nt, Human
gaggugccaccugcugga

SEQ ID NO: 176817 - RNA, 20 nt, Human
gaggugccaccugcuggagc

SEQ ID NO: 176818 - RNA, 21 nt, Human
gcaaaacucacggcacagccc

SEQ ID NO: 176819 - RNA, 20 nt, Human
guauuuuguauuuuugguga

SEQ ID NO: 176820 - RNA, 27 nt, Human
uaaaaauaacagccccagaucucccuc

SEQ ID NO: 176821 - RNA, 23 nt, Human
uauaaaaacugcaauuugaaacc

SEQ ID NO: 176822 - RNA, 23 nt, Human
uaugccagcaaaacucacggcac

SEQ ID NO: 176823 - RNA, 21 nt, Human
uauuuuguauuuuuggugacc

SEQ ID NO: 176824 - RNA, 25 nt, Human
ucacuuagaaaacuucuuugggauc

SEQ ID NO: 176825 - RNA, 20 nt, Human
ucuggcgcgcggguuggggc

SEQ ID NO: 176826 - RNA, 23 nt, Human
ugcaucaaagcauauuuauuuaa

SEQ ID NO: 176827 - RNA, 21 nt, Human
uggaggaggaagagaagacag

SEQ ID NO: 176828 - RNA, 21 nt, Human
uggccugcagcgauguaugca

SEQ ID NO: 176829 - RNA, 26 nt, Human
ugggagacuuguuccgcacuagguga

SEQ ID NO: 176830 - RNA, 21 nt, Human
ugggaucauagaagacaacug

SEQ ID NO: 176831 - RNA, 24 nt, Human
ugucccuucaucuucucucuucca

SEQ ID NO: 176832 - RNA, 21 nt, Human
uucacaaaggccaacaacuca

SEQ ID NO: 176833 - RNA, 27 nt, Human
uucaggcuguuuuaaaaaagaaaaauc

SEQ ID NO: 176834 - RNA, 23 nt, Human
uuccgcacuaggugacagcuguu

SEQ ID NO: 176835 - RNA, 24 nt, Human
uucgcugcgcacgcgcacaggacc

SEQ ID NO: 176836 - RNA, 21 nt, Human
uuuguauuuuuggugaccaaa

SEQ ID NO: 176837 - RNA, 21 nt, Human
uuuuuggugaccaaacucugg

SEQ ID NO: 176838 - RNA, 20 nt, Human
caccccuccucuggaggcca

SEQ ID NO: 176839 - RNA, 23 nt, Human
ccucuggaggccaugcucugugc

SEQ ID NO: 176840 - RNA, 22 nt, Human
gagaaggacaccaccccuccuc

SEQ ID NO: 176841 - RNA, 18 nt, Human
gcggaggguucggccgcc

SEQ ID NO: 176842 - RNA, 21 nt, Human
gcggaggguucggccgccuug

SEQ ID NO: 176843 - RNA, 21 nt, Human
gcuggugguugcggaggguuc

SEQ ID NO: 176844 - RNA, 18 nt, Human
ucccaggggguguccugc

SEQ ID NO: 176845 - RNA, 22 nt, Human
ucccaggggguguccuggcucc

SEQ ID NO: 176846 - RNA, 20 nt, Human
ugccuggggcccagagacuu

SEQ ID NO: 176847 - RNA, 23 nt, Human
uggggauuaaccugggcuggugg

SEQ ID NO: 176848 - RNA, 23 nt, Human
aagcaggcaccagcucacccucc

SEQ ID NO: 176849 - RNA, 19 nt, Human
aagccagaggagaagaggg

SEQ ID NO: 176850 - RNA, 19 nt, Human
aaguggacccgccaauccc

SEQ ID NO: 176851 - RNA, 19 nt, Human
accaccaagucuccaaguc

SEQ ID NO: 176852 - RNA, 21 nt, Human
accccaaaagaguuuaaaaau

SEQ ID NO: 176853 - RNA, 19 nt, Human
agccucucagcggugggga

SEQ ID NO: 176854 - RNA, 20 nt, Human
aggcaggaguggugucggcu

SEQ ID NO: 176855 - RNA, 18 nt, Human
agggcuccuguggcuacg

SEQ ID NO: 176856 - RNA, 21 nt, Human
aguucggcuauuucagagagg

SEQ ID NO: 176857 - RNA, 18 nt, Human
auccuccggccgcccugg

SEQ ID NO: 176858 - RNA, 21 nt, Human
caacuggaccccaaaagaguu

SEQ ID NO: 176859 - RNA, 23 nt, Human
caaucccgaggaagaaccggagg

SEQ ID NO: 176860 - RNA, 20 nt, Human
cacagcagcuucggccucaa

SEQ ID NO: 176861 - RNA, 18 nt, Human
caccaagucuccaagucc

SEQ ID NO: 176862 - RNA, 23 nt, Human
cagaccaccaagucuccaagucc

SEQ ID NO: 176863 - RNA, 25 nt, Human
cagcagcuucggccucaaagccaag

SEQ ID NO: 176864 - RNA, 19 nt, Human
cagccguggggaggggagg

SEQ ID NO: 176865 - RNA, 20 nt, Human
cagcucagaccaccaagucu

SEQ ID NO: 176866 - RNA, 21 nt, Human
caggagagggggugcugggcc

SEQ ID NO: 176867 - RNA, 26 nt, Human
caggcugagguccccacaaaucugcc

SEQ ID NO: 176868 - RNA, 25 nt, Human
caggguaggagcuggggguagagug

SEQ ID NO: 176869 - RNA, 24 nt, Human
ccaaucccgaggaagaaccggagg

SEQ ID NO: 176870 - RNA, 19 nt, Human
cccagcccuggccugggaa

SEQ ID NO: 176871 - RNA, 22 nt, Human
ccccagagcccuggcaagugga

SEQ ID NO: 176872 - RNA, 18 nt, Human
ccccucggcauccuccgg

SEQ ID NO: 176873 - RNA, 18 nt, Human
ccgcccggcuccggcccc

SEQ ID NO: 176874 - RNA, 24 nt, Human
ccgcccggcuccggccccucggca

SEQ ID NO: 176875 - RNA, 21 nt, Human
ccggccccucggcauccuccg

SEQ ID NO: 176876 - RNA, 25 nt, Human
ccucgcgcucgggcccgcccggcuc

SEQ ID NO: 176877 - RNA, 18 nt, Human
ccucugagagugaaggag

SEQ ID NO: 176878 - RNA, 21 nt, Human
ccuggccguggccacucuggc

SEQ ID NO: 176879 - RNA, 21 nt, Human
ccugggcagcggucaggugcg

SEQ ID NO: 176880 - RNA, 22 nt, Human
ccugugacccagcccuggccug

SEQ ID NO: 176881 - RNA, 22 nt, Human
cgaggaagaaccggaggacuug

SEQ ID NO: 176882 - RNA, 22 nt, Human
cgcucaguaaggggacacaguc

SEQ ID NO: 176883 - RNA, 19 nt, Human
cgggagccccgagggcgac

SEQ ID NO: 176884 - RNA, 23 nt, Human
cucccuggccguggccacucugg

SEQ ID NO: 176885 - RNA, 19 nt, Human
cucggccucugagagugaa

SEQ ID NO: 176886 - RNA, 20 nt, Human
cucuggcuuuggcucagccc

SEQ ID NO: 176887 - RNA, 20 nt, Human
cuggcaggcugcugggcgcc

SEQ ID NO: 176888 - RNA, 25 nt, Human
cugucccguccccuccuuuucucua

SEQ ID NO: 176889 - RNA, 24 nt, Human
cugugacccagcccuggccuggga

SEQ ID NO: 176890 - RNA, 23 nt, Human
gacggcaacggccacacgcagcc

SEQ ID NO: 176891 - RNA, 20 nt, Human
gacucggccucugagaguga

SEQ ID NO: 176892 - RNA, 18 nt, Human
gaggggagggacucggcc

SEQ ID NO: 176893 - RNA, 24 nt, Human
gaggggguugaaggguuagcagaa

SEQ ID NO: 176894 - RNA, 21 nt, Human
gaucugggagacguuuccccu

SEQ ID NO: 176895 - RNA, 23 nt, Human
gcacguccggaggcuggcggggc

SEQ ID NO: 176896 - RNA, 18 nt, Human
gcagcggucaggugcgga

SEQ ID NO: 176897 - RNA, 22 nt, Human
gccucaaagccaagggagcgau

SEQ ID NO: 176898 - RNA, 22 nt, Human
gcgcgggcggcucagggucugg

SEQ ID NO: 176899 - RNA, 18 nt, Human
gcugcugggcgcccucca

SEQ ID NO: 176900 - RNA, 19 nt, Human
gcuggcggggcuuacaggg

SEQ ID NO: 176901 - RNA, 21 nt, Human
ggaagaaccggaggacuuggg

SEQ ID NO: 176902 - RNA, 19 nt, Human
ggagaagagggugcaggcu

SEQ ID NO: 176903 - RNA, 21 nt, Human
ggccgagccgggcaggcagga

SEQ ID NO: 176904 - RNA, 25 nt, Human
ggccguggccacucuggcuuuggcu

SEQ ID NO: 176905 - RNA, 18 nt, Human
gggaacauucacaguaac

SEQ ID NO: 176906 - RNA, 18 nt, Human
gggccgagccgggcaggc

SEQ ID NO: 176907 - RNA, 22 nt, Human
gggccgagccgggcaggcagga

SEQ ID NO: 176908 - RNA, 21 nt, Human
ggugucggcuucgggaaaugc

SEQ ID NO: 176909 - RNA, 18 nt, Human
guagagugcgccucgcgc

SEQ ID NO: 176910 - RNA, 21 nt, Human
guccccacaaaucugccccca

SEQ ID NO: 176911 - RNA, 20 nt, Human
guccccuccuuuucucuaca

SEQ ID NO: 176912 - RNA, 20 nt, Human
guccggaggcuggcggggcu

SEQ ID NO: 176913 - RNA, 20 nt, Human
guccuuguuguucuccaaac

SEQ ID NO: 176914 - RNA, 22 nt, Human
gucugucccguccccuccuuuu

SEQ ID NO: 176915 - RNA, 19 nt, Human
guggacccgccaaucccga

SEQ ID NO: 176916 - RNA, 21 nt, Human
guggacccgccaaucccgagg

SEQ ID NO: 176917 - RNA, 20 nt, Human
guggccacucuggcuuuggc

SEQ ID NO: 176918 - RNA, 23 nt, Human
uaggaggcgaggggguugaaggg

SEQ ID NO: 176919 - RNA, 21 nt, Human
ucaaagcaggcaccagcucac

SEQ ID NO: 176920 - RNA, 21 nt, Human
ucagggucugggugcagacgg

SEQ ID NO: 176921 - RNA, 24 nt, Human
ucccaaaaagaauugcaaagcucc

SEQ ID NO: 176922 - RNA, 19 nt, Human
uccccacaaaucugccccc

SEQ ID NO: 176923 - RNA, 21 nt, Human
uccggccccucggcauccucc

SEQ ID NO: 176924 - RNA, 24 nt, Human
uccuguggcuacguacaaucaacu

SEQ ID NO: 176925 - RNA, 18 nt, Human
ucggccucaaagccaagg

SEQ ID NO: 176926 - RNA, 21 nt, Human
ugacccagcccuggccuggga

SEQ ID NO: 176927 - RNA, 23 nt, Human
uggcaaguggacccgccaauccc

SEQ ID NO: 176928 - RNA, 25 nt, Human
uggcaggcugcugggcgcccuccuc

SEQ ID NO: 176929 - RNA, 18 nt, Human
uggccacucuggcuuugg

SEQ ID NO: 176930 - RNA, 19 nt, Human
uggccacucuggcuuuggc

SEQ ID NO: 176931 - RNA, 21 nt, Human
uggccacucuggcuuuggcuc

SEQ ID NO: 176932 - RNA, 19 nt, Human
ugggcgcccuccaggagag

SEQ ID NO: 176933 - RNA, 20 nt, Human
uggggaggggagggacucgg

SEQ ID NO: 176934 - RNA, 21 nt, Human
ugggugcagacggcaacggcc

SEQ ID NO: 176935 - RNA, 20 nt, Human
uuccugugacccagcccugg

SEQ ID NO: 176936 - RNA, 21 nt, Human
uuuggcucagcccagccugga

SEQ ID NO: 176937 - RNA, 21 nt, Human
aaaaggcucucugaaacccuc

SEQ ID NO: 176938 - RNA, 19 nt, Human
aaacaaacgaaagaaagca

SEQ ID NO: 176939 - RNA, 21 nt, Human
aaacgaaagaaagcaguucuu

SEQ ID NO: 176940 - RNA, 21 nt, Human
aagaaagcaguucuuaagacu

SEQ ID NO: 176941 - RNA, 19 nt, Human
agacaccacagugagcucc

SEQ ID NO: 176942 - RNA, 24 nt, Human
agaugcaauaaagucauuguacag

SEQ ID NO: 176943 - RNA, 19 nt, Human
caagucgaaagggacugca

SEQ ID NO: 176944 - RNA, 19 nt, Human
cagcuuugaacaaaugauu

SEQ ID NO: 176945 - RNA, 18 nt, Human
cauguaggccuagaaaaa

SEQ ID NO: 176946 - RNA, 21 nt, Human
ccugggaggucggggggcucc

SEQ ID NO: 176947 - RNA, 21 nt, Human
ccuucaaaaacauauauccau

SEQ ID NO: 176948 - RNA, 19 nt, Human
cgucgcgcccucucgccgg

SEQ ID NO: 176949 - RNA, 21 nt, Human
cucucgccgggcccggaaccc

SEQ ID NO: 176950 - RNA, 23 nt, Human
cuuuuuuuuauuuucuuuuaaug

SEQ ID NO: 176951 - RNA, 24 nt, Human
gaaacaaacaaacgaaagaaagca

SEQ ID NO: 176952 - RNA, 21 nt, Human
gaaacccucaauggcaacugg

SEQ ID NO: 176953 - RNA, 18 nt, Human
gcggggagggaagggcgg

SEQ ID NO: 176954 - RNA, 23 nt, Human
gggagggaagggcgguccgccug

SEQ ID NO: 176955 - RNA, 19 nt, Human
gggcccggaacccgcgcgg

SEQ ID NO: 176956 - RNA, 19 nt, Human
ggggaugggaaggcuggga

SEQ ID NO: 176957 - RNA, 21 nt, Human
ggggggaugggaaggcuggga

SEQ ID NO: 176958 - RNA, 20 nt, Human
gucgcgcccucucgccgggc

SEQ ID NO: 176959 - RNA, 23 nt, Human
uauacaacaguucggucuguaua

SEQ ID NO: 176960 - RNA, 19 nt, Human
ucagugguuggaacacaga

SEQ ID NO: 176961 - RNA, 28 nt, Human
ucagugguuggaacacagaccggggucc

SEQ ID NO: 176962 - RNA, 21 nt, Human
uccaucgcguuuaggcuucau

SEQ ID NO: 176963 - RNA, 19 nt, Human
ucggucuguauaauaugau

SEQ ID NO: 176964 - RNA, 22 nt, Human
ucgucgcgcccucucgccgggc

SEQ ID NO: 176965 - RNA, 25 nt, Human
ugaaacaaacaaacgaaagaaagca

SEQ ID NO: 176966 - RNA, 18 nt, Human
ugaaaggaaacaaaacug

SEQ ID NO: 176967 - RNA, 21 nt, Human
ugaaaggaaacaaaacuggca

SEQ ID NO: 176968 - RNA, 18 nt, Human
ugaaugauuugcuuucgg

SEQ ID NO: 176969 - RNA, 19 nt, Human
ugaauuauacauacaaaca

SEQ ID NO: 176970 - RNA, 21 nt, Human
ugagagagaaggaaaauauug

SEQ ID NO: 176971 - RNA, 21 nt, Human
uggggggaugggaaggcuggg

SEQ ID NO: 176972 - RNA, 22 nt, Human
uuauacauacaaacaacaauua

SEQ ID NO: 176973 - RNA, 23 nt, Human
uuccuuaaacuucuuggcauccu

SEQ ID NO: 176974 - RNA, 23 nt, Human
uugaaacaaacaaacgaaagaaa

SEQ ID NO: 176975 - RNA, 21 nt, Human
uuuguccauuugaauaucaga

SEQ ID NO: 176976 - RNA, 22 nt, Human
uuuuuuuuucuuuucucuuuuu

SEQ ID NO: 176977 - RNA, 20 nt, Human
aaacacaaugcaaaacccac

SEQ ID NO: 176978 - RNA, 23 nt, Human
aacgauaauaugcgugggaggaa

SEQ ID NO: 176979 - RNA, 20 nt, Human
aagaagucuccaacucacag

SEQ ID NO: 176980 - RNA, 21 nt, Human
aaggacaucuugggaaagaag

SEQ ID NO: 176981 - RNA, 24 nt, Human
accaacucgcuuaaaaauauauac

SEQ ID NO: 176982 - RNA, 19 nt, Human
agaaaacgacggcaacaac

SEQ ID NO: 176983 - RNA, 20 nt, Human
agaaguugccagcugcauuu

SEQ ID NO: 176984 - RNA, 23 nt, Human
caagucccagguccgugcaggaa

SEQ ID NO: 176985 - RNA, 24 nt, Human
caagucccagguccgugcaggaau

SEQ ID NO: 176986 - RNA, 20 nt, Human
caccugggggagaaguugcc

SEQ ID NO: 176987 - RNA, 23 nt, Human
cacgcggggagagaaaacgacgg

SEQ ID NO: 176988 - RNA, 18 nt, Human
cagggcccggcccuccgc

SEQ ID NO: 176989 - RNA, 25 nt, Human
ccaacacccgcuuccccuaaccaga

SEQ ID NO: 176990 - RNA, 20 nt, Human
ccagggccuccuucuuugcu

SEQ ID NO: 176991 - RNA, 27 nt, Human
ccagggccuccuucuuugcuauccucc

SEQ ID NO: 176992 - RNA, 20 nt, Human
ccccugggagcccagggccu

SEQ ID NO: 176993 - RNA, 25 nt, Human
cccugggagcccagggccuccuucu

SEQ ID NO: 176994 - RNA, 23 nt, Human
ccuucuuugcuauccuccaaguc

SEQ ID NO: 176995 - RNA, 18 nt, Human
cggggagagaaaacgacg

SEQ ID NO: 176996 - RNA, 19 nt, Human
cuggagcaggggucccagg

SEQ ID NO: 176997 - RNA, 19 nt, Human
cuguagcuccccaggaagu

SEQ ID NO: 176998 - RNA, 21 nt, Human
gaaaaaaccaacucgcuuaaa

SEQ ID NO: 176999 - RNA, 23 nt, Human
gagcaaaggccggcagcaggggg

SEQ ID NO: 177000 - RNA, 19 nt, Human
gagcaggggucccagggcc

SEQ ID NO: 177001 - RNA, 25 nt, Human
gagccacgcggggagagaaaacgac

SEQ ID NO: 177002 - RNA, 18 nt, Human
gcauuuugaugaggcugc

SEQ ID NO: 177003 - RNA, 22 nt, Human
gccacaguggggaacgcagggg

SEQ ID NO: 177004 - RNA, 19 nt, Human
gccuguccccaggggcccg

SEQ ID NO: 177005 - RNA, 18 nt, Human
ggagucagauuugguauu

SEQ ID NO: 177006 - RNA, 20 nt, Human
ggcaagggccuguccccagg

SEQ ID NO: 177007 - RNA, 26 nt, Human
ggcaagggccuguccccaggggcccg

SEQ ID NO: 177008 - RNA, 22 nt, Human
gggaacgcaggggacaaggaca

SEQ ID NO: 177009 - RNA, 25 nt, Human
gggaaggcaccugggggagaaguug

SEQ ID NO: 177010 - RNA, 24 nt, Human
gggacaaggacaucuugggaaaga

SEQ ID NO: 177011 - RNA, 22 nt, Human
ggggaaaaaaccaacucgcuua

SEQ ID NO: 177012 - RNA, 23 nt, Human
ggggucccagggcccggcccucc

SEQ ID NO: 177013 - RNA, 22 nt, Human
uaagugccccuguagcucccca

SEQ ID NO: 177014 - RNA, 19 nt, Human
uauacguauuaaauccagc

SEQ ID NO: 177015 - RNA, 24 nt, Human
ucaaaaaucaaaggggaaaaaacc

SEQ ID NO: 177016 - RNA, 21 nt, Human
ucagauccuucggugcuagaa

SEQ ID NO: 177017 - RNA, 18 nt, Human
uccaacacccgcuucccc

SEQ ID NO: 177018 - RNA, 22 nt, Human
uccaacacccgcuuccccuaac

SEQ ID NO: 177019 - RNA, 18 nt, Human
ucccagggcccggcccuc

SEQ ID NO: 177020 - RNA, 20 nt, Human
ucccucgcaggucaaggagc

SEQ ID NO: 177021 - RNA, 21 nt, Human
ucgcaggucaaggagccacgc

SEQ ID NO: 177022 - RNA, 20 nt, Human
ugagaaaauccaacacccgc

SEQ ID NO: 177023 - RNA, 25 nt, Human
ugcaaaacccacggucuaggccaca

SEQ ID NO: 177024 - RNA, 18 nt, Human
ugcaggaauuugaggagg

SEQ ID NO: 177025 - RNA, 22 nt, Human
ugccccuguagcuccccaggaa

SEQ ID NO: 177026 - RNA, 21 nt, Human
ugggcucccuccagucccauc

SEQ ID NO: 177027 - RNA, 19 nt, Human
uuugaggagggaagaggga

SEQ ID NO: 177028 - RNA, 24 nt, Human
aacaucucuuucaaaauaaaggca

SEQ ID NO: 177029 - RNA, 24 nt, Human
aacucuggugaaauagguuuccau

SEQ ID NO: 177030 - RNA, 22 nt, Human
accccaggcgccgaagguccgu

SEQ ID NO: 177031 - RNA, 18 nt, Human
acuggcccuucccuucca

SEQ ID NO: 177032 - RNA, 19 nt, Human
agaaacgucagucacagug

SEQ ID NO: 177033 - RNA, 27 nt, Human
agaagaagcacaugauuuuggacaaaa

SEQ ID NO: 177034 - RNA, 22 nt, Human
agcuuggcgccgcggcuggacc

SEQ ID NO: 177035 - RNA, 25 nt, Human
aggcgccgaagguccguggggagcc

SEQ ID NO: 177036 - RNA, 18 nt, Human
aucuucucucacucuuuc

SEQ ID NO: 177037 - RNA, 23 nt, Human
caaauggccucaagugaucuucu

SEQ ID NO: 177038 - RNA, 21 nt, Human
caaugcagucuugcaaacuga

SEQ ID NO: 177039 - RNA, 18 nt, Human
cagcagcaaguccuccca

SEQ ID NO: 177040 - RNA, 19 nt, Human
cagcgcagucgccacuguc

SEQ ID NO: 177041 - RNA, 22 nt, Human
caggcaaggcccagguccuagu

SEQ ID NO: 177042 - RNA, 23 nt, Human
cauagcaggcaaggcccaggucc

SEQ ID NO: 177043 - RNA, 20 nt, Human
cccagcucgacagguugccc

SEQ ID NO: 177044 - RNA, 22 nt, Human
cccccggggcccgcgaccccag

SEQ ID NO: 177045 - RNA, 18 nt, Human
ccccgcucuccgccccgg

SEQ ID NO: 177046 - RNA, 20 nt, Human
ccccgcucuccgccccggga

SEQ ID NO: 177047 - RNA, 21 nt, Human
ccgccgccuccgugucgagcu

SEQ ID NO: 177048 - RNA, 23 nt, Human
ccgcgaccccaggcgccgaaggu

SEQ ID NO: 177049 - RNA, 21 nt, Human
ccucaugaaccgacucagccu

SEQ ID NO: 177050 - RNA, 23 nt, Human
ccucccagcucgacagguugccc

SEQ ID NO: 177051 - RNA, 20 nt, Human
ccuggcuucuggaaguggag

SEQ ID NO: 177052 - RNA, 18 nt, Human
cgagcugaggcgucccgc

SEQ ID NO: 177053 - RNA, 23 nt, Human
cgaggaagagaugggggaaggcg

SEQ ID NO: 177054 - RNA, 23 nt, Human
cgccggggccccgcucuccgccc

SEQ ID NO: 177055 - RNA, 21 nt, Human
cgcggcggagcccucccugcc

SEQ ID NO: 177056 - RNA, 22 nt, Human
cgcucuccgccccgggagcagg

SEQ ID NO: 177057 - RNA, 19 nt, Human
cggcugcucgggugcgaag

SEQ ID NO: 177058 - RNA, 21 nt, Human
cgggagcaggaggaggacgag

SEQ ID NO: 177059 - RNA, 22 nt, Human
cuagaguauuuacaaaugcuau

SEQ ID NO: 177060 - RNA, 22 nt, Human
cucaagugaucuucuccaugaa

SEQ ID NO: 177061 - RNA, 19 nt, Human
cugcaacgcaaauugcacu

SEQ ID NO: 177062 - RNA, 19 nt, Human
cuggcccuucccuuccauc

SEQ ID NO: 177063 - RNA, 22 nt, Human
cuuggcgccgcggcuggaccac

SEQ ID NO: 177064 - RNA, 18 nt, Human
gaaauauaaaaugggaug

SEQ ID NO: 177065 - RNA, 18 nt, Human
gaaccgacucagccucca

SEQ ID NO: 177066 - RNA, 18 nt, Human
gaccucaugaaccgacuc

SEQ ID NO: 177067 - RNA, 22 nt, Human
gaccucaugaaccgacucagcc

SEQ ID NO: 177068 - RNA, 18 nt, Human
gagcagcagcgagcgggc

SEQ ID NO: 177069 - RNA, 23 nt, Human
gagcagcagcgagcgggccgggg

SEQ ID NO: 177070 - RNA, 19 nt, Human
gccccgaagggaugcgaag

SEQ ID NO: 177071 - RNA, 21 nt, Human
gcgagcgggccggggguccgg

SEQ ID NO: 177072 - RNA, 18 nt, Human
gcugcucgggugcgaagg

SEQ ID NO: 177073 - RNA, 18 nt, Human
ggagcccucccugccucc

SEQ ID NO: 177074 - RNA, 19 nt, Human
ggagcccucccugccuccu

SEQ ID NO: 177075 - RNA, 20 nt, Human
ggcaaggcccagguccuagu

SEQ ID NO: 177076 - RNA, 23 nt, Human
gguccggccgccgccuccguguc

SEQ ID NO: 177077 - RNA, 24 nt, Human
uaagagaccucaugaaccgacuca

SEQ ID NO: 177078 - RNA, 22 nt, Human
uaaguuaaaauguuuacauuca

SEQ ID NO: 177079 - RNA, 22 nt, Human
uaccuagaguauuuacaaaugc

SEQ ID NO: 177080 - RNA, 22 nt, Human
uagcaggcaaggcccagguccu

SEQ ID NO: 177081 - RNA, 22 nt, Human
uaggacaucccauucaaaaaaa

SEQ ID NO: 177082 - RNA, 25 nt, Human
ucagugaacagcagcaaguccuccc

SEQ ID NO: 177083 - RNA, 19 nt, Human
uccacaguaaaauaaaggg

SEQ ID NO: 177084 - RNA, 21 nt, Human
uccacaguaaaauaaaggggg

SEQ ID NO: 177085 - RNA, 22 nt, Human
ucccgcaguugcuggcgccgcc

SEQ ID NO: 177086 - RNA, 21 nt, Human
ucccugccuccuggcggcgug

SEQ ID NO: 177087 - RNA, 18 nt, Human
uccucccagcucgacagg

SEQ ID NO: 177088 - RNA, 20 nt, Human
uccuggcuucuggaagugga

SEQ ID NO: 177089 - RNA, 18 nt, Human
ucucuuucaaaauaaagg

SEQ ID NO: 177090 - RNA, 22 nt, Human
ugaacagcagcaaguccuccca

SEQ ID NO: 177091 - RNA, 21 nt, Human
ugagagaagauuuguucuuga

SEQ ID NO: 177092 - RNA, 20 nt, Human
ugcaaaugauuuaacacuga

SEQ ID NO: 177093 - RNA, 21 nt, Human
ugcacuggcccuucccuucca

SEQ ID NO: 177094 - RNA, 25 nt, Human
ugcgaaggggcucagcuuggcgccg

SEQ ID NO: 177095 - RNA, 23 nt, Human
ugcugcaacgcaaauugcacuuu

SEQ ID NO: 177096 - RNA, 20 nt, Human
uggaaaagguaugaagaaau

SEQ ID NO: 177097 - RNA, 26 nt, Human
uggaacaaccaaaauugaucagaaga

SEQ ID NO: 177098 - RNA, 19 nt, Human
uggccucaagugaucuucu

SEQ ID NO: 177099 - RNA, 19 nt, Human
uggggagccccgaagggau

SEQ ID NO: 177100 - RNA, 21 nt, Human
uguauacauggaagaaaaaua

SEQ ID NO: 177101 - RNA, 21 nt, Human
ugucuggaccgcugcacaaaa

SEQ ID NO: 177102 - RNA, 19 nt, Human
uuuacagauaccuagagua

SEQ ID NO: 177103 - RNA, 21 nt, Human
uuugauaagagaccucaugaa

SEQ ID NO: 177104 - RNA, 22 nt, Human
uuuuuuuuuuuuuuuuuuacag

SEQ ID NO: 177105 - RNA, 18 nt, Human
aaaaauuacccaaauucc

SEQ ID NO: 177106 - RNA, 21 nt, Human
aaagaaaauuaaaaacagagg

SEQ ID NO: 177107 - RNA, 19 nt, Human
aaaguaauagaagcaaacc

SEQ ID NO: 177108 - RNA, 21 nt, Human
aacauucauggaaaauucacu

SEQ ID NO: 177109 - RNA, 21 nt, Human
aagaaaaguaauagaagcaaa

SEQ ID NO: 177110 - RNA, 25 nt, Human
accugguucuacuuaggaucugugu

SEQ ID NO: 177111 - RNA, 22 nt, Human
agaaaaagagacaauuaccugg

SEQ ID NO: 177112 - RNA, 27 nt, Human
aguaauagaagcaaaccaggcuuacga

SEQ ID NO: 177113 - RNA, 23 nt, Human
aguagcauauaucacaauguuga

SEQ ID NO: 177114 - RNA, 24 nt, Human
auuacccaaauuccuuauuagaaa

SEQ ID NO: 177115 - RNA, 19 nt, Human
auuccuguaaauuuuugga

SEQ ID NO: 177116 - RNA, 22 nt, Human
cacauacaguaucaacacuaaa

SEQ ID NO: 177117 - RNA, 23 nt, Human
caggugacuaauuuuuucuuggu

SEQ ID NO: 177118 - RNA, 22 nt, Human
cccuaagcuucuuagguguauc

SEQ ID NO: 177119 - RNA, 21 nt, Human
ccgcgucgcucgugccgaauu

SEQ ID NO: 177120 - RNA, 22 nt, Human
cgaccccuguuaaggagaugau

SEQ ID NO: 177121 - RNA, 19 nt, Human
cgcccuggcccggcugguc

SEQ ID NO: 177122 - RNA, 18 nt, Human
cggaauguuccuggccuc

SEQ ID NO: 177123 - RNA, 26 nt, Human
cuccuuuagaaaaaaagagauaaucu

SEQ ID NO: 177124 - RNA, 18 nt, Human
cugauagcgaaauccaau

SEQ ID NO: 177125 - RNA, 20 nt, Human
gaccaacauuucaagcugcc

SEQ ID NO: 177126 - RNA, 21 nt, Human
gcaaaccaggcuuacgacccc

SEQ ID NO: 177127 - RNA, 20 nt, Human
uacacauacaguaucaacac

SEQ ID NO: 177128 - RNA, 20 nt, Human
uacacuaaacauuccuguaa

SEQ ID NO: 177129 - RNA, 22 nt, Human
uagaaaaaaagagauaaucuga

SEQ ID NO: 177130 - RNA, 20 nt, Human
uagaaaaagagacaauuacc

SEQ ID NO: 177131 - RNA, 21 nt, Human
uaucacaauguugagaugaga

SEQ ID NO: 177132 - RNA, 19 nt, Human
ucuauagaagaggaaaaaa

SEQ ID NO: 177133 - RNA, 23 nt, Human
ugaaaugagguaagauguauaug

SEQ ID NO: 177134 - RNA, 22 nt, Human
ugauagcgaaauccaauuacac

SEQ ID NO: 177135 - RNA, 21 nt, Human
ugauucuauuuuggaucugug

SEQ ID NO: 177136 - RNA, 24 nt, Human
uggaaagaaaauuaaaaacagagg

SEQ ID NO: 177137 - RNA, 25 nt, Human
uguaaacaaaucuuagaugaccaaa

SEQ ID NO: 177138 - RNA, 22 nt, Human
uuaaagcaggagaaugaaccuu

SEQ ID NO: 177139 - RNA, 22 nt, Human
uuaaagcaggagaaugaaccuu

SEQ ID NO: 177140 - RNA, 18 nt, Human
uuauacuugaagccaaau

SEQ ID NO: 177141 - RNA, 20 nt, Human
uuggaucuguguacauucua

SEQ ID NO: 177142 - RNA, 18 nt, Human
acacugcugcuccacggg

SEQ ID NO: 177143 - RNA, 21 nt, Human
acauaagcaugggggcugggg

SEQ ID NO: 177144 - RNA, 19 nt, Human
acccgcugcugcuuuaagg

SEQ ID NO: 177145 - RNA, 22 nt, Human
acuggcccugcugugcccucuu

SEQ ID NO: 177146 - RNA, 19 nt, Human
agcugccauuuuuccuggc

SEQ ID NO: 177147 - RNA, 20 nt, Human
agcugccauuuuuccuggcu

SEQ ID NO: 177148 - RNA, 18 nt, Human
aggauccacuaaacaaaa

SEQ ID NO: 177149 - RNA, 24 nt, Human
agugccuccuugaguaucugcucc

SEQ ID NO: 177150 - RNA, 19 nt, Human
auccacuaaacaaaaacaa

SEQ ID NO: 177151 - RNA, 23 nt, Human
auccacuaaacaaaaacaaggau

SEQ ID NO: 177152 - RNA, 24 nt, Human
cagcacacagcgcauguucacaua

SEQ ID NO: 177153 - RNA, 21 nt, Human
cagugagcucacccuaggccu

SEQ ID NO: 177154 - RNA, 20 nt, Human
ccauuuuuccuggcuggugc

SEQ ID NO: 177155 - RNA, 22 nt, Human
cccaaaccauugccccugggcu

SEQ ID NO: 177156 - RNA, 18 nt, Human
ccuggcuggugccauagg

SEQ ID NO: 177157 - RNA, 18 nt, Human
cuagucucuucuuuuccu

SEQ ID NO: 177158 - RNA, 21 nt, Human
cuccaggaaagacaaacaguc

SEQ ID NO: 177159 - RNA, 18 nt, Human
cucuucuuuuccuuaccc

SEQ ID NO: 177160 - RNA, 19 nt, Human
cugaaggauagaggaucca

SEQ ID NO: 177161 - RNA, 23 nt, Human
cugaucuuguguuuguacggaca

SEQ ID NO: 177162 - RNA, 22 nt, Human
cuggggcuuacugaucuuuuuc

SEQ ID NO: 177163 - RNA, 26 nt, Human
cuuacccucagcccugauccgguucc

SEQ ID NO: 177164 - RNA, 23 nt, Human
cuuuaagagcugccauuuuuccu

SEQ ID NO: 177165 - RNA, 22 nt, Human
gacucugucccuuuaaugccca

SEQ ID NO: 177166 - RNA, 21 nt, Human
ggggccuccagccccuggcac

SEQ ID NO: 177167 - RNA, 21 nt, Human
ggggcuggggggacacugggg

SEQ ID NO: 177168 - RNA, 21 nt, Human
gucauuagaugaagagaagac

SEQ ID NO: 177169 - RNA, 25 nt, Human
uacccucagcccugaucuuguguuu

SEQ ID NO: 177170 - RNA, 22 nt, Human
ucacauaagcaugggggcuggg

SEQ ID NO: 177171 - RNA, 20 nt, Human
uccacgggcccaguucugca

SEQ ID NO: 177172 - RNA, 21 nt, Human
uccacuaaacaaaaacaagga

SEQ ID NO: 177173 - RNA, 18 nt, Human
ucugucccuuuaaugccc

SEQ ID NO: 177174 - RNA, 21 nt, Human
ugcccaggcugagcccagugc

SEQ ID NO: 177175 - RNA, 22 nt, Human
ugggggcuggggggacacuggg

SEQ ID NO: 177176 - RNA, 18 nt, Human
aaaaauaccacaaauaaa

SEQ ID NO: 177177 - RNA, 22 nt, Human
aaaguaugcagcuuuaugccaa

SEQ ID NO: 177178 - RNA, 27 nt, Human
aaggcacugucacaaucaguccaacug

SEQ ID NO: 177179 - RNA, 24 nt, Human
accaccccucacccaugaucucag

SEQ ID NO: 177180 - RNA, 21 nt, Human
acuuguaauuuguuccuccuc

SEQ ID NO: 177181 - RNA, 22 nt, Human
agaaaaacugcuugagaaacau

SEQ ID NO: 177182 - RNA, 19 nt, Human
agaauucaacguggacccc

SEQ ID NO: 177183 - RNA, 21 nt, Human
auuguggggcagacaauuguu

SEQ ID NO: 177184 - RNA, 22 nt, Human
caacaugcaccaccccucaccc

SEQ ID NO: 177185 - RNA, 19 nt, Human
caagcuauauacagcagcu

SEQ ID NO: 177186 - RNA, 20 nt, Human
caccccucacccaugaucuc

SEQ ID NO: 177187 - RNA, 20 nt, Human
cagcagcuuaaaaccucagu

SEQ ID NO: 177188 - RNA, 25 nt, Human
cucagaaacuacucagaaaaacugc

SEQ ID NO: 177189 - RNA, 22 nt, Human
cuucuggaggguggggagaagu

SEQ ID NO: 177190 - RNA, 24 nt, Human
gcuuaaaaccucaguguuucuuuu

SEQ ID NO: 177191 - RNA, 24 nt, Human
guuauagaaaaauaccacaaauaa

SEQ ID NO: 177192 - RNA, 23 nt, Human
uaaaucucaacaugcaccacccc

SEQ ID NO: 177193 - RNA, 23 nt, Human
uaacagucacaaaauuggcauac

SEQ ID NO: 177194 - RNA, 18 nt, Human
uacgacaaauacuuguca

SEQ ID NO: 177195 - RNA, 27 nt, Human
uagaaaaauaccacaaauaaaaauuag

SEQ ID NO: 177196 - RNA, 19 nt, Human
uauacuggacaacacgggg

SEQ ID NO: 177197 - RNA, 20 nt, Human
ucaaaaucacauaugauaca

SEQ ID NO: 177198 - RNA, 23 nt, Human
ucagaaaaacugcuugagaaaca

SEQ ID NO: 177199 - RNA, 24 nt, Human
ucucacaagcuauauacagcagcu

SEQ ID NO: 177200 - RNA, 18 nt, Human
ucuggaggguggggagaa

SEQ ID NO: 177201 - RNA, 25 nt, Human
ucugugauuauaaaacagauuuguu

SEQ ID NO: 177202 - RNA, 25 nt, Human
ugagaaaaucauucacauguaaaag

SEQ ID NO: 177203 - RNA, 23 nt, Human
ugaguuaaaacauuuucaguuau

SEQ ID NO: 177204 - RNA, 19 nt, Human
uggaggguggggagaagug

SEQ ID NO: 177205 - RNA, 22 nt, Human
uuaaagaaaagagguuucucac

SEQ ID NO: 177206 - RNA, 21 nt, Human
uuaaaucucaacaugcaccac

SEQ ID NO: 177207 - RNA, 22 nt, Human
uuaaaucucaacaugcaccacc

SEQ ID NO: 177208 - RNA, 23 nt, Human
uuagugcuauucaagguguucau

SEQ ID NO: 177209 - RNA, 22 nt, Human
uugucuaaaaaucugugauuau

SEQ ID NO: 177210 - RNA, 19 nt, Human
aaaaagaaacaaagaaaca

SEQ ID NO: 177211 - RNA, 21 nt, Human
aaaacacaaaaugagacacgg

SEQ ID NO: 177212 - RNA, 23 nt, Human
aaaauaaaacacaaaaugagaca

SEQ ID NO: 177213 - RNA, 18 nt, Human
aagaaaacaaaacacaaa

SEQ ID NO: 177214 - RNA, 20 nt, Human
aaucauacaugacaaaugau

SEQ ID NO: 177215 - RNA, 21 nt, Human
aauuagccaggaaagcaaaau

SEQ ID NO: 177216 - RNA, 25 nt, Human
acaauuugaaaaaaagaaacaaaga

SEQ ID NO: 177217 - RNA, 27 nt, Human
acacaauuugaaaaaaagaaacaaaga

SEQ ID NO: 177218 - RNA, 18 nt, Human
acagugauaacaagaaaa

SEQ ID NO: 177219 - RNA, 20 nt, Human
agaaaacaaaacacaaaucu

SEQ ID NO: 177220 - RNA, 18 nt, Human
agaaagacugagauacug

SEQ ID NO: 177221 - RNA, 21 nt, Human
agccaccaaauauccaucuua

SEQ ID NO: 177222 - RNA, 21 nt, Human
agugauaacaagaaaacaaaa

SEQ ID NO: 177223 - RNA, 27 nt, Human
caaaacacaaaucugcaucugguggag

SEQ ID NO: 177224 - RNA, 19 nt, Human
caaaagcuuuuuauugauu

SEQ ID NO: 177225 - RNA, 26 nt, Human
cacaaaauaaaacacaaaaugagaca

SEQ ID NO: 177226 - RNA, 21 nt, Human
cacaaaaugagacacggauga

SEQ ID NO: 177227 - RNA, 21 nt, Human
ccauuugagaauccuagcugc

SEQ ID NO: 177228 - RNA, 21 nt, Human
cggaugaguucauacguaaug

SEQ ID NO: 177229 - RNA, 19 nt, Human
cgggcgcuggagcucuagc

SEQ ID NO: 177230 - RNA, 18 nt, Human
gaaaaaaagaaacaaaga

SEQ ID NO: 177231 - RNA, 20 nt, Human
gaaaaaaagaaacaaagaaa

SEQ ID NO: 177232 - RNA, 27 nt, Human
gaacaaauagagccaccaaauauccau

SEQ ID NO: 177233 - RNA, 22 nt, Human
gagaucacaaaauaaaacacaa

SEQ ID NO: 177234 - RNA, 22 nt, Human
ggucgaguggggccugagcggg

SEQ ID NO: 177235 - RNA, 23 nt, Human
gugauaacaagaaaacaaaacac

SEQ ID NO: 177236 - RNA, 19 nt, Human
uaauggcuuuuauauuacc

SEQ ID NO: 177237 - RNA, 22 nt, Human
uacauguuauaagcugugugac

SEQ ID NO: 177238 - RNA, 23 nt, Human
ucagaaagacugagauacuggca

SEQ ID NO: 177239 - RNA, 18 nt, Human
ucagaacaaauagagcca

SEQ ID NO: 177240 - RNA, 25 nt, Human
ucagaacaaauagagccaccaaaua

SEQ ID NO: 177241 - RNA, 21 nt, Human
uccuagcugcuaagaugacuu

SEQ ID NO: 177242 - RNA, 19 nt, Human
ucuccuaucuacuuaaaua

SEQ ID NO: 177243 - RNA, 24 nt, Human
ugaaaaaaagaaacaaagaaacaa

SEQ ID NO: 177244 - RNA, 19 nt, Human
ugaaaugcuacaauuacca

SEQ ID NO: 177245 - RNA, 22 nt, Human
ugaaaugcuacaauuaccauuu

SEQ ID NO: 177246 - RNA, 18 nt, Human
ugaguucauacguaaugg

SEQ ID NO: 177247 - RNA, 22 nt, Human
aaagugcagagugguugggcuu

SEQ ID NO: 177248 - RNA, 20 nt, Human
aagccuggugggaagcacug

SEQ ID NO: 177249 - RNA, 20 nt, Human
accccggaggcgucuccgag

SEQ ID NO: 177250 - RNA, 21 nt, Human
accugucagcggauccaaaau

SEQ ID NO: 177251 - RNA, 21 nt, Human
agaaggagccuguuuccugga

SEQ ID NO: 177252 - RNA, 22 nt, Human
agaggaagaacuggaggaggug

SEQ ID NO: 177253 - RNA, 22 nt, Human
agcagaugggagaagagaagga

SEQ ID NO: 177254 - RNA, 22 nt, Human
agcuggggcuaucaacauucuc

SEQ ID NO: 177255 - RNA, 19 nt, Human
aggaaagccuggugggaag

SEQ ID NO: 177256 - RNA, 22 nt, Human
aggaauggagcgcagaggagga

SEQ ID NO: 177257 - RNA, 27 nt, Human
aggcagaggcugcagaugacagcugag

SEQ ID NO: 177258 - RNA, 20 nt, Human
aggcugcagaugacagcuga

SEQ ID NO: 177259 - RNA, 23 nt, Human
agguggcccagggcuaaugggag

SEQ ID NO: 177260 - RNA, 20 nt, Human
aguaaaagaggaagaacugg

SEQ ID NO: 177261 - RNA, 18 nt, Human
agucaacucuccaaacug

SEQ ID NO: 177262 - RNA, 19 nt, Human
augccuccccagagcugcc

SEQ ID NO: 177263 - RNA, 23 nt, Human
cacugcagggccggcacacggau

SEQ ID NO: 177264 - RNA, 25 nt, Human
cagcaacagcagcucugacuuggcc

SEQ ID NO: 177265 - RNA, 21 nt, Human
cagucaacucuccaaacugac

SEQ ID NO: 177266 - RNA, 19 nt, Human
cccagagcugccgggcugg

SEQ ID NO: 177267 - RNA, 23 nt, Human
cccauccaaguggcagcaacagc

SEQ ID NO: 177268 - RNA, 19 nt, Human
ccccaccugccuacccucc

SEQ ID NO: 177269 - RNA, 21 nt, Human
ccuggugggaagcacuggucc

SEQ ID NO: 177270 - RNA, 21 nt, Human
cggcacacggaugccucccca

SEQ ID NO: 177271 - RNA, 22 nt, Human
cgggacgggcaguagagccggg

SEQ ID NO: 177272 - RNA, 20 nt, Human
cgggcaguagagccggguac

SEQ ID NO: 177273 - RNA, 21 nt, Human
gacugcacaguccgccaggau

SEQ ID NO: 177274 - RNA, 21 nt, Human
gaggaagaacuggaggaggug

SEQ ID NO: 177275 - RNA, 22 nt, Human
gaggaggaaaaaggucccacag

SEQ ID NO: 177276 - RNA, 21 nt, Human
gccagucaacucuccaaacug

SEQ ID NO: 177277 - RNA, 23 nt, Human
gcccccaccugccuacccuccau

SEQ ID NO: 177278 - RNA, 19 nt, Human
gcuggaggcagaggcugca

SEQ ID NO: 177279 - RNA, 18 nt, Human
ggacagccagaagugggg

SEQ ID NO: 177280 - RNA, 20 nt, Human
ggaggagguggcccagggcu

SEQ ID NO: 177281 - RNA, 24 nt, Human
guucacucucaggcugaaccccca

SEQ ID NO: 177282 - RNA, 19 nt, Human
uaaaaaguccacuguuguu

SEQ ID NO: 177283 - RNA, 18 nt, Human
uagagccggguaccuucc

SEQ ID NO: 177284 - RNA, 24 nt, Human
uccaaguggcagcaacagcagcuc

SEQ ID NO: 177285 - RNA, 21 nt, Human
uccccauccaaguggcagcaa

SEQ ID NO: 177286 - RNA, 23 nt, Human
ucccccacccagcccccaccugc

SEQ ID NO: 177287 - RNA, 22 nt, Human
ucuccaaacugaccaacuaauu

SEQ ID NO: 177288 - RNA, 23 nt, Human
ucuccgagcagcucucccggcuc

SEQ ID NO: 177289 - RNA, 22 nt, Human
ugaagagcuuguggcccgcagg

SEQ ID NO: 177290 - RNA, 22 nt, Human
uggcagcaacagcagcucugac

SEQ ID NO: 177291 - RNA, 20 nt, Human
ugggagaagagaaggagcug

SEQ ID NO: 177292 - RNA, 19 nt, Human
ugggagugggaaacaaagu

SEQ ID NO: 177293 - RNA, 19 nt, Human
ugggcagucccccacccag

SEQ ID NO: 177294 - RNA, 24 nt, Human
uggggucaaggaaagccugguggc

SEQ ID NO: 177295 - RNA, 22 nt, Human
uuaguaaaagaggaagaacugg

SEQ ID NO: 177296 - RNA, 19 nt, Human
uucacucucaggcugaacc

SEQ ID NO: 177297 - RNA, 23 nt, Human
uugaggcugaagucaggguggga

SEQ ID NO: 177298 - RNA, 23 nt, Human
aaacaugauuuugaucauuguac

SEQ ID NO: 177299 - RNA, 22 nt, Human
aaacucggaaagauuucaagua

SEQ ID NO: 177300 - RNA, 22 nt, Human
aaaucaucagugaggauuauac

SEQ ID NO: 177301 - RNA, 22 nt, Human
acacagcaucuuuuaaagucca

SEQ ID NO: 177302 - RNA, 27 nt, Human
acacagcaucuuuuaaagucgaaacuc

SEQ ID NO: 177303 - RNA, 20 nt, Human
acagucuuuuuuuuuuuuuu

SEQ ID NO: 177304 - RNA, 19 nt, Human
agacaaagucuacauauac

SEQ ID NO: 177305 - RNA, 19 nt, Human
agacuuggccagaccaaug

SEQ ID NO: 177306 - RNA, 23 nt, Human
augaguguuaagaauuagaaaag

SEQ ID NO: 177307 - RNA, 22 nt, Human
cacauaagacaaagucuacaua

SEQ ID NO: 177308 - RNA, 24 nt, Human
cacucaauuccuacuccugcccau

SEQ ID NO: 177309 - RNA, 21 nt, Human
caguuuaguuacacagcaucu

SEQ ID NO: 177310 - RNA, 23 nt, Human
cccaagacuuuuaccuaagacuc

SEQ ID NO: 177311 - RNA, 18 nt, Human
ccucuggagaacauaaag

SEQ ID NO: 177312 - RNA, 21 nt, Human
cuacauauacuagguaaacac

SEQ ID NO: 177313 - RNA, 19 nt, Human
cuguucccuugucuguucu

SEQ ID NO: 177314 - RNA, 22 nt, Human
cuuggccagaccaaugcccaaa

SEQ ID NO: 177315 - RNA, 22 nt, Human
gaaguuauaaucuggaugaacu

SEQ ID NO: 177316 - RNA, 19 nt, Human
gggucaaaaaugucaaaaa

SEQ ID NO: 177317 - RNA, 19 nt, Human
guugcacaauuuacagucu

SEQ ID NO: 177318 - RNA, 19 nt, Human
uaagaagcuagggugguug

SEQ ID NO: 177319 - RNA, 23 nt, Human
uaaguaauugaauuauuucaguu

SEQ ID NO: 177320 - RNA, 21 nt, Human
uacauugucuucacuaagaag

SEQ ID NO: 177321 - RNA, 23 nt, Human
uacauugucuucacuaagaagcu

SEQ ID NO: 177322 - RNA, 23 nt, Human
ucaaaaaugucaaaaaaaauccc

SEQ ID NO: 177323 - RNA, 19 nt, Human
ucaauuccuacuccugccc

SEQ ID NO: 177324 - RNA, 21 nt, Human
uccaccuuccucuggagaaca

SEQ ID NO: 177325 - RNA, 26 nt, Human
uccuaggacuuuugacacauaagaca

SEQ ID NO: 177326 - RNA, 19 nt, Human
uccugagugguaccagcuu

SEQ ID NO: 177327 - RNA, 23 nt, Human
ucuaaagugucccauugaaguua

SEQ ID NO: 177328 - RNA, 21 nt, Human
ucuacauauacuagguaaaca

SEQ ID NO: 177329 - RNA, 23 nt, Human
ucuacauauacuagguaaacaca

SEQ ID NO: 177330 - RNA, 21 nt, Human
ugaauuauuucaguuuaguua

SEQ ID NO: 177331 - RNA, 25 nt, Human
ugacacauaagacaaagucuacaua

SEQ ID NO: 177332 - RNA, 21 nt, Human
ugcccaaauauuucccaagac

SEQ ID NO: 177333 - RNA, 25 nt, Human
uggaagaauaaacuucuccugagug

SEQ ID NO: 177334 - RNA, 22 nt, Human
uggcauuaugugaauuuguuua

SEQ ID NO: 177335 - RNA, 23 nt, Human
ugggacauuguagacuuggccag

SEQ ID NO: 177336 - RNA, 18 nt, Human
ugggucaaaaaugucaaa

SEQ ID NO: 177337 - RNA, 25 nt, Human
uuacagucuuuuuuuuuuuuuuaag

SEQ ID NO: 177338 - RNA, 24 nt, Human
uuaguuacacagcaucuuuuaaag

SEQ ID NO: 177339 - RNA, 21 nt, Human
uugggacauuguagacuuggc

SEQ ID NO: 177340 - RNA, 24 nt, Human
uuuagcuugaaaucaucagugagg

SEQ ID NO: 177341 - RNA, 23 nt, Human
uuuguuuaauccagugucaauug

SEQ ID NO: 177342 - RNA, 25 nt, Human
agaaaguauccuaguugucuuccca

SEQ ID NO: 177343 - RNA, 18 nt, Human
agagagucuugcagcacc

SEQ ID NO: 177344 - RNA, 20 nt, Human
ccccuggguggcuccaacuc

SEQ ID NO: 177345 - RNA, 21 nt, Human
gcaaaucaucauacuugucau

SEQ ID NO: 177346 - RNA, 20 nt, Human
ucccagaagcucagugguuu

SEQ ID NO: 177347 - RNA, 18 nt, Human
uccccuggguggcuccaa

SEQ ID NO: 177348 - RNA, 24 nt, Human
aaaaagcacaggcgcaggugcaag

SEQ ID NO: 177349 - RNA, 20 nt, Human
aaaauaacuuuuccaaaagc

SEQ ID NO: 177350 - RNA, 18 nt, Human
aaacaccaccaacuacaa

SEQ ID NO: 177351 - RNA, 21 nt, Human
aagaacauagaaaacccuuaa

SEQ ID NO: 177352 - RNA, 22 nt, Human
aauaaaaacacacagaaaggga

SEQ ID NO: 177353 - RNA, 19 nt, Human
acaaaaaauaaaaaaggaa

SEQ ID NO: 177354 - RNA, 21 nt, Human
acaaagaaaauuuaaaagucu

SEQ ID NO: 177355 - RNA, 24 nt, Human
agaagacaauaaaacauauuuaag

SEQ ID NO: 177356 - RNA, 24 nt, Human
agagcaggaugccauuuuagguga

SEQ ID NO: 177357 - RNA, 20 nt, Human
agcaggaugccauuuuaggu

SEQ ID NO: 177358 - RNA, 18 nt, Human
agccaacccucaaacacc

SEQ ID NO: 177359 - RNA, 22 nt, Human
aucauacaauauuuuaugacaa

SEQ ID NO: 177360 - RNA, 25 nt, Human
caaaaaauaaaaaaggaaaaaacaa

SEQ ID NO: 177361 - RNA, 18 nt, Human
cagcugcaggugaggcug

SEQ ID NO: 177362 - RNA, 26 nt, Human
cagugucucuucagguuuaaaauucu

SEQ ID NO: 177363 - RNA, 26 nt, Human
ccaaaagcaguaauaccucaaauuaa

SEQ ID NO: 177364 - RNA, 20 nt, Human
ccaguucacuucuuccaaac

SEQ ID NO: 177365 - RNA, 18 nt, Human
cccucaaacaccaccaac

SEQ ID NO: 177366 - RNA, 23 nt, Human
cuaaaauuaaggcuaagcauuau

SEQ ID NO: 177367 - RNA, 20 nt, Human
ggagauaauuuucuucuuca

SEQ ID NO: 177368 - RNA, 23 nt, Human
uaaaauaaaaacacacagaaagg

SEQ ID NO: 177369 - RNA, 25 nt, Human
uaaaauaaaaacacacagaaaggga

SEQ ID NO: 177370 - RNA, 21 nt, Human
uaaaauaacuuuuccaaaagc

SEQ ID NO: 177371 - RNA, 22 nt, Human
uaaguuucuuuucucugauuau

SEQ ID NO: 177372 - RNA, 19 nt, Human
uacagauugaacuagggag

SEQ ID NO: 177373 - RNA, 18 nt, Human
uagagaagacaauaaaac

SEQ ID NO: 177374 - RNA, 20 nt, Human
ucauacaauauuuuaugaca

SEQ ID NO: 177375 - RNA, 21 nt, Human
ucuaaaauuaaggcuaagccg

SEQ ID NO: 177376 - RNA, 18 nt, Human
ucuagccaacccucaaac

SEQ ID NO: 177377 - RNA, 18 nt, Human
ucugauuauuugaucaag

SEQ ID NO: 177378 - RNA, 18 nt, Human
ucuguagucuuauuucac

SEQ ID NO: 177379 - RNA, 25 nt, Human
ucuucacagacaaagaucuuuaagu

SEQ ID NO: 177380 - RNA, 21 nt, Human
ugaucaaggaacaaacuauau

SEQ ID NO: 177381 - RNA, 21 nt, Human
ugcacauauuuauaaaauaac

SEQ ID NO: 177382 - RNA, 24 nt, Human
uggcacaaaauccaggcuuucauu

SEQ ID NO: 177383 - RNA, 20 nt, Human
uggcuucuuauacaaucuau

SEQ ID NO: 177384 - RNA, 20 nt, Human
uucacagacaaagaucuuua

SEQ ID NO: 177385 - RNA, 22 nt, Human
uuccaaacaaaagaauucacag

SEQ ID NO: 177386 - RNA, 20 nt, Human
uugaauguugacauaucauc

SEQ ID NO: 177387 - RNA, 19 nt, Human
uuugaucaaggaacaaacu

SEQ ID NO: 177388 - RNA, 20 nt, Human
agaugggagggagggagggc

SEQ ID NO: 177389 - RNA, 20 nt, Human
agaugggagggagggagggc

SEQ ID NO: 177390 - RNA, 18 nt, Human
auccaugguuaaaagugg

SEQ ID NO: 177391 - RNA, 18 nt, Human
auccaugguuaaaagugg

SEQ ID NO: 177392 - RNA, 18 nt, Human
aucugaacgacuucagaa

SEQ ID NO: 177393 - RNA, 20 nt, Human
cacucuccucucaagagaag

SEQ ID NO: 177394 - RNA, 20 nt, Human
cacucuccucucaagagaag

SEQ ID NO: 177395 - RNA, 22 nt, Human
cagcauaaggcacuacccccag

SEQ ID NO: 177396 - RNA, 22 nt, Human
cagcauaaggcacuacccccag

SEQ ID NO: 177397 - RNA, 20 nt, Human
ccagaugggagggagggagg

SEQ ID NO: 177398 - RNA, 20 nt, Human
ccagaugggagggagggagg

SEQ ID NO: 177399 - RNA, 22 nt, Human
ccagcauaaggcacuaccccca

SEQ ID NO: 177400 - RNA, 22 nt, Human
ccagcauaaggcacuaccccca

SEQ ID NO: 177401 - RNA, 18 nt, Human
cucacucugcuccaacac

SEQ ID NO: 177402 - RNA, 18 nt, Human
cucacucugcuccaacac

SEQ ID NO: 177403 - RNA, 18 nt, Human
cucacuucccacuccauc

SEQ ID NO: 177404 - RNA, 25 nt, Human
cuccagaaaggggcuugagaguuuc

SEQ ID NO: 177405 - RNA, 19 nt, Human
cuuuauuuuccucucccuc

SEQ ID NO: 177406 - RNA, 19 nt, Human
cuuuauuuuccucucccuc

SEQ ID NO: 177407 - RNA, 25 nt, Human
gacuucagaagggaaauuuugauau

SEQ ID NO: 177408 - RNA, 21 nt, Human
gcggagcaacgacggcgaccg

SEQ ID NO: 177409 - RNA, 25 nt, Human
uccaugguuaaaaguggauugagac

SEQ ID NO: 177410 - RNA, 25 nt, Human
uccaugguuaaaaguggauugagac

SEQ ID NO: 177411 - RNA, 19 nt, Human
ucugcuccaacacccagca

SEQ ID NO: 177412 - RNA, 21 nt, Human
ucugcuccaacacccagcaua

SEQ ID NO: 177413 - RNA, 21 nt, Human
uggagucugcucucauccaug

SEQ ID NO: 177414 - RNA, 21 nt, Human
uggagucugcucucauccaug

SEQ ID NO: 177415 - RNA, 22 nt, Human
uucccacuccauccgccaccuc

SEQ ID NO: 177416 - RNA, 23 nt, Human
uuuuuuuuuucagaugugcaggu

SEQ ID NO: 177417 - RNA, 23 nt, Human
uuuuuuuuuucagaugugcaggu

SEQ ID NO: 177418 - RNA, 21 nt, Human
uuuuuuuuuuuuuuuuuucag

SEQ ID NO: 177419 - RNA, 21 nt, Human
uuuuuuuuuuuuuuuuuucag

SEQ ID NO: 177420 - RNA, 27 nt, Human
aaauaagaagaaaauaacagaaucuag

SEQ ID NO: 177421 - RNA, 24 nt, Human
aagaagcuugaaaauuuuauuuaa

SEQ ID NO: 177422 - RNA, 22 nt, Human
aagacaaagguuucaggaagaa

SEQ ID NO: 177423 - RNA, 29 nt, Human
acuucauccaaaauaagaagaaaauaacu

SEQ ID NO: 177424 - RNA, 26 nt, Human
agcaauguggccucagaauacaccuc

SEQ ID NO: 177425 - RNA, 19 nt, Human
caaacaucccacguggcua

SEQ ID NO: 177426 - RNA, 20 nt, Human
cagaauacaccucuuaaauu

SEQ ID NO: 177427 - RNA, 23 nt, Human
cagaucggaauaauuuacauuua

SEQ ID NO: 177428 - RNA, 24 nt, Human
cucuuaaauuuacaggacuuaaca

SEQ ID NO: 177429 - RNA, 19 nt, Human
cuuugauacauugaaagcu

SEQ ID NO: 177430 - RNA, 23 nt, Human
gagcaagcccucuuugggaacuu

SEQ ID NO: 177431 - RNA, 20 nt, Human
gcuguagaacagagcaggug

SEQ ID NO: 177432 - RNA, 22 nt, Human
ggaacuuuugaugugcucugug

SEQ ID NO: 177433 - RNA, 20 nt, Human
uaagaagaaaauaacagaau

SEQ ID NO: 177434 - RNA, 24 nt, Human
uauuauuauaaugcagauauguca

SEQ ID NO: 177435 - RNA, 24 nt, Human
uccaaaauaagaagaaaauaacag

SEQ ID NO: 177436 - RNA, 25 nt, Human
uccaaaauaagaagaaaauaacaga

SEQ ID NO: 177437 - RNA, 20 nt, Human
ucucuuuccaauuucaccac

SEQ ID NO: 177438 - RNA, 25 nt, Human
ugugaagaugaucuugaauagugau

SEQ ID NO: 177439 - RNA, 25 nt, Human
uuagcaauauuuugauaaaacuuuu

SEQ ID NO: 177440 - RNA, 20 nt, Human
uuggcuacacaacacuaaaa

SEQ ID NO: 177441 - RNA, 24 nt, Human
uuggcuacacaacacuaaaagaaa

SEQ ID NO: 177442 - RNA, 24 nt, Human
uuuacauuuacaaauuauaucaua

SEQ ID NO: 177443 - RNA, 21 nt, Human
uuuagcaauauuuugauaaaa

SEQ ID NO: 177444 - RNA, 21 nt, Human
uuuaucgcuaaauguaaacag

SEQ ID NO: 177445 - RNA, 25 nt, Human
uuucaaacaucccacguggcuagca

SEQ ID NO: 177446 - RNA, 19 nt, Human
uuuccaauuucaccacugu

SEQ ID NO: 177447 - RNA, 21 nt, Human
uuuggcuacacaacacuaaaa

SEQ ID NO: 177448 - RNA, 21 nt, Human
uuuguaauuuuuggcuacaca

SEQ ID NO: 177449 - RNA, 26 nt, Human
aagcugccccuuugagccucagggcc

SEQ ID NO: 177450 - RNA, 26 nt, Human
aaggcaggugcagggagaggaggccc

SEQ ID NO: 177451 - RNA, 23 nt, Human
acagccacacugggggugggggg

SEQ ID NO: 177452 - RNA, 24 nt, Human
acgcaguucacggcacagccccca

SEQ ID NO: 177453 - RNA, 22 nt, Human
aggcaggugcagggagaggagg

SEQ ID NO: 177454 - RNA, 18 nt, Human
caaugcaguccuggugug

SEQ ID NO: 177455 - RNA, 19 nt, Human
cacagcccccacucccgcc

SEQ ID NO: 177456 - RNA, 21 nt, Human
cacgcaguucacggcacagcc

SEQ ID NO: 177457 - RNA, 20 nt, Human
cagcccccacucccgcccug

SEQ ID NO: 177458 - RNA, 22 nt, Human
ccaaucucgcagacagccacac

SEQ ID NO: 177459 - RNA, 23 nt, Human
cccccacucccgcccuggacucc

SEQ ID NO: 177460 - RNA, 18 nt, Human
cccccagccucagcuggc

SEQ ID NO: 177461 - RNA, 21 nt, Human
cccccagccucagcugggcgu

SEQ ID NO: 177462 - RNA, 19 nt, Human
ccccgcccccagccucagc

SEQ ID NO: 177463 - RNA, 23 nt, Human
cccgcccccagccucagcugggc

SEQ ID NO: 177464 - RNA, 24 nt, Human
ccgcccuggacuccucugcucacc

SEQ ID NO: 177465 - RNA, 24 nt, Human
ccucagggcccgcgcggcgcugcu

SEQ ID NO: 177466 - RNA, 21 nt, Human
ccucccacaucuggcaggggc

SEQ ID NO: 177467 - RNA, 21 nt, Human
ccucugggcagcuagcugccu

SEQ ID NO: 177468 - RNA, 24 nt, Human
ccucugggugccagaguccagccc

SEQ ID NO: 177469 - RNA, 24 nt, Human
ccugaagcugccccuuugagccuc

SEQ ID NO: 177470 - RNA, 24 nt, Human
ccuggccagugggguguccucccc

SEQ ID NO: 177471 - RNA, 25 nt, Human
ccuggccagugggguguccuccccu

SEQ ID NO: 177472 - RNA, 18 nt, Human
cgcagacagccacacugg

SEQ ID NO: 177473 - RNA, 21 nt, Human
cucccccgcccccagccucag

SEQ ID NO: 177474 - RNA, 20 nt, Human
cucugcaccagggacaaggc

SEQ ID NO: 177475 - RNA, 23 nt, Human
cucugggcagcuagcugccuccc

SEQ ID NO: 177476 - RNA, 19 nt, Human
gcagcuagcugccucccac

SEQ ID NO: 177477 - RNA, 23 nt, Human
gcaggugcagggagaggaggccc

SEQ ID NO: 177478 - RNA, 21 nt, Human
gcccuggacuccucugcucac

SEQ ID NO: 177479 - RNA, 18 nt, Human
ggcacagcccccacuccc

SEQ ID NO: 177480 - RNA, 22 nt, Human
ggcacagcccccacucccgccc

SEQ ID NO: 177481 - RNA, 19 nt, Human
gggcccgcgcggcgcugcu

SEQ ID NO: 177482 - RNA, 18 nt, Human
gggcguccuggccagugg

SEQ ID NO: 177483 - RNA, 20 nt, Human
uccaugcacaugggacgugc

SEQ ID NO: 177484 - RNA, 22 nt, Human
uccaugcacaugggacgugccg

SEQ ID NO: 177485 - RNA, 19 nt, Human
uccccgccguccucugggc

SEQ ID NO: 177486 - RNA, 19 nt, Human
ucucgcagacagccacacu

SEQ ID NO: 177487 - RNA, 23 nt, Human
ucucgcagacagccacacugggg

SEQ ID NO: 177488 - RNA, 21 nt, Human
ugccagaguccagcccuagcu

SEQ ID NO: 177489 - RNA, 21 nt, Human
uggcagagcagcagagccugg

SEQ ID NO: 177490 - RNA, 19 nt, Human
uggggcaaugcaguccugg

SEQ ID NO: 177491 - RNA, 21 nt, Human
uggggcguccuggccaguggg

SEQ ID NO: 177492 - RNA, 18 nt, Human
ugggggugggggguaggu

SEQ ID NO: 177493 - RNA, 20 nt, Human
ugguguguguguacgcuccu

SEQ ID NO: 177494 - RNA, 23 nt, Human
uuggcucccccgcccccagccuc

SEQ ID NO: 177495 - RNA, 18 nt, Human
aaaaaaaagaagaagaag

SEQ ID NO: 177496 - RNA, 19 nt, Human
aaaaaaacccaauaccucu

SEQ ID NO: 177497 - RNA, 21 nt, Human
aaaaaaacccaauaccucugc

SEQ ID NO: 177498 - RNA, 19 nt, Human
aaaaaacaaaaaaacccaa

SEQ ID NO: 177499 - RNA, 22 nt, Human
aaaaaacaaaaaaacccaauac

SEQ ID NO: 177500 - RNA, 18 nt, Human
aaaaaagaagaagaagaa

SEQ ID NO: 177501 - RNA, 22 nt, Human
aaaaacaaaaaaacccaauacc

SEQ ID NO: 177502 - RNA, 20 nt, Human
aaaaggcaaaaguaucuaca

SEQ ID NO: 177503 - RNA, 21 nt, Human
aaacaagaccggacagacaga

SEQ ID NO: 177504 - RNA, 24 nt, Human
aaacaagaccggacagacagacaa

SEQ ID NO: 177505 - RNA, 23 nt, Human
aaacagaaguagagaggagggac

SEQ ID NO: 177506 - RNA, 21 nt, Human
aaacaugaccaaagugaaguc

SEQ ID NO: 177507 - RNA, 22 nt, Human
aaaccgggaccagaagcuucca

SEQ ID NO: 177508 - RNA, 22 nt, Human
aacauuacgacugcuaaaaaua

SEQ ID NO: 177509 - RNA, 25 nt, Human
aacccaauaccucugccaucuugcc

SEQ ID NO: 177510 - RNA, 21 nt, Human
aagaagaaaguagaggcucaa

SEQ ID NO: 177511 - RNA, 24 nt, Human
aagacccacauagaccacaaagga

SEQ ID NO: 177512 - RNA, 23 nt, Human
aagccaaccaucacuguacuuaa

SEQ ID NO: 177513 - RNA, 19 nt, Human
aaggaccccggggcgcuuc

SEQ ID NO: 177514 - RNA, 20 nt, Human
aaugaggacaagacccacau

SEQ ID NO: 177515 - RNA, 22 nt, Human
acaaaaaaacccaauaccucug

SEQ ID NO: 177516 - RNA, 18 nt, Human
acaaaggaaacucaauaa

SEQ ID NO: 177517 - RNA, 23 nt, Human
acaagacccacauagaccacaaa

SEQ ID NO: 177518 - RNA, 22 nt, Human
accgcacuaaauauuuuagcac

SEQ ID NO: 177519 - RNA, 22 nt, Human
acuaaagacuagaguaaaacag

SEQ ID NO: 177520 - RNA, 23 nt, Human
agaagaagaagaaacauuuugag

SEQ ID NO: 177521 - RNA, 22 nt, Human
agacauuccaccaccuucccuu

SEQ ID NO: 177522 - RNA, 21 nt, Human
caaaaacauagacauuccacc

SEQ ID NO: 177523 - RNA, 22 nt, Human
caaaaacauagacauuccacca

SEQ ID NO: 177524 - RNA, 20 nt, Human
caacgcacacacacugaaug

SEQ ID NO: 177525 - RNA, 21 nt, Human
caagaccggacagacagacaa

SEQ ID NO: 177526 - RNA, 22 nt, Human
caauaccucugccaucuugccc

SEQ ID NO: 177527 - RNA, 22 nt, Human
caauagaagguagaaaugugcc

SEQ ID NO: 177528 - RNA, 24 nt, Human
caaugggcuguggccggagucacc

SEQ ID NO: 177529 - RNA, 21 nt, Human
cacaaaggaaacucaauaaac

SEQ ID NO: 177530 - RNA, 23 nt, Human
cacaguaaaaucaaaaacauaga

SEQ ID NO: 177531 - RNA, 19 nt, Human
cacuaugucaaccaaauac

SEQ ID NO: 177532 - RNA, 24 nt, Human
cacuguacuuaaacuccagaaaga

SEQ ID NO: 177533 - RNA, 24 nt, Human
cagagcaauaccgcacuaaauauu

SEQ ID NO: 177534 - RNA, 19 nt, Human
cagccgcugccguucggga

SEQ ID NO: 177535 - RNA, 22 nt, Human
cauuccaccaccuucccuuggu

SEQ ID NO: 177536 - RNA, 22 nt, Human
cauucugugcucguucaggugc

SEQ ID NO: 177537 - RNA, 22 nt, Human
ccaaccaucacuguacuuaaac

SEQ ID NO: 177538 - RNA, 24 nt, Human
ccagaaagaaaaagcuaggaaaca

SEQ ID NO: 177539 - RNA, 22 nt, Human
ccaggauuaaaauaccuauacc

SEQ ID NO: 177540 - RNA, 23 nt, Human
cccaauaccucugccaucuugcc

SEQ ID NO: 177541 - RNA, 22 nt, Human
cccgccgcagccgcugccguuc

SEQ ID NO: 177542 - RNA, 18 nt, Human
ccgccgcagccgcugccg

SEQ ID NO: 177543 - RNA, 22 nt, Human
cgagaauacacucguaaacaac

SEQ ID NO: 177544 - RNA, 18 nt, Human
cgcuuugguuaaaacguu

SEQ ID NO: 177545 - RNA, 19 nt, Human
cgggaaggaccccggggcg

SEQ ID NO: 177546 - RNA, 21 nt, Human
cgggaccagaagcuuccagug

SEQ ID NO: 177547 - RNA, 24 nt, Human
cuaauguuuauacugggcuagauu

SEQ ID NO: 177548 - RNA, 18 nt, Human
cuaauucuucucccuucc

SEQ ID NO: 177549 - RNA, 23 nt, Human
cuaggaaacagaaguagagagga

SEQ ID NO: 177550 - RNA, 19 nt, Human
gaaaaaaacaaaaaaaccc

SEQ ID NO: 177551 - RNA, 23 nt, Human
gaaaaaaacaaaaaaacccaaua

SEQ ID NO: 177552 - RNA, 20 nt, Human
gcacuaaauauuuuagcacu

SEQ ID NO: 177553 - RNA, 18 nt, Human
gcuagauuuaaaaaggua

SEQ ID NO: 177554 - RNA, 23 nt, Human
ggacaagacccacauagaccaca

SEQ ID NO: 177555 - RNA, 18 nt, Human
ggccggagucaccugagg

SEQ ID NO: 177556 - RNA, 19 nt, Human
uaaaaaaaagaagaagaag

SEQ ID NO: 177557 - RNA, 19 nt, Human
uaaaauaccuauaccaucu

SEQ ID NO: 177558 - RNA, 22 nt, Human
uaaaauaccuauaccaucuaua

SEQ ID NO: 177559 - RNA, 19 nt, Human
uaaaaucaaaaacauagac

SEQ ID NO: 177560 - RNA, 28 nt, Human
uaaaaucaaaaacauagacauuccacca

SEQ ID NO: 177561 - RNA, 23 nt, Human
uaaaccuauaaaguuaaaacuga

SEQ ID NO: 177562 - RNA, 24 nt, Human
uaaacuccagaaagaaaaagcuag

SEQ ID NO: 177563 - RNA, 19 nt, Human
uaagaacacuucuaggaaa

SEQ ID NO: 177564 - RNA, 27 nt, Human
uaagacaacagccuguggauacauuag

SEQ ID NO: 177565 - RNA, 27 nt, Human
uaagauuaaaaaaaagaagaagaagaa

SEQ ID NO: 177566 - RNA, 25 nt, Human
uaauaaacaugaccaaagugaaguc

SEQ ID NO: 177567 - RNA, 24 nt, Human
uaauguuuauacugggcuagauuu

SEQ ID NO: 177568 - RNA, 20 nt, Human
uacaaugaggacaagaccca

SEQ ID NO: 177569 - RNA, 25 nt, Human
uacacuaauucuucucccuucccag

SEQ ID NO: 177570 - RNA, 22 nt, Human
uacuaaagacuagaguaaaaca

SEQ ID NO: 177571 - RNA, 24 nt, Human
uacuauuugaaaaaaauacacuaa

SEQ ID NO: 177572 - RNA, 19 nt, Human
uacucaagccaaccaucac

SEQ ID NO: 177573 - RNA, 22 nt, Human
uagaguaaaacagacaaaguca

SEQ ID NO: 177574 - RNA, 18 nt, Human
uaggaaauguuagaacaa

SEQ ID NO: 177575 - RNA, 23 nt, Human
uaugcuuaugaggcaaauuacug

SEQ ID NO: 177576 - RNA, 23 nt, Human
uauugaaauacaucaaauucuua

SEQ ID NO: 177577 - RNA, 23 nt, Human
ucaaaaacauagacauuccacca

SEQ ID NO: 177578 - RNA, 20 nt, Human
ucacacuuguuuuuacuuua

SEQ ID NO: 177579 - RNA, 20 nt, Human
ucacuguacuuaaacuccaa

SEQ ID NO: 177580 - RNA, 25 nt, Human
ucuucucccuucccaggccccucug

SEQ ID NO: 177581 - RNA, 23 nt, Human
ucuugccccaucauaacccaaaa

SEQ ID NO: 177582 - RNA, 21 nt, Human
ugaaaaugaugggcacucuca

SEQ ID NO: 177583 - RNA, 21 nt, Human
ugaagagcacuaugucaacca

SEQ ID NO: 177584 - RNA, 22 nt, Human
ugaagagcacuaugucaaccaa

SEQ ID NO: 177585 - RNA, 19 nt, Human
ugaccaaagugaagucugu

SEQ ID NO: 177586 - RNA, 20 nt, Human
uggaaaaaaacaaaaaaacc

SEQ ID NO: 177587 - RNA, 20 nt, Human
uggaauguacaaacaagacc

SEQ ID NO: 177588 - RNA, 25 nt, Human
uggaauguacaaacaagaccggaca

SEQ ID NO: 177589 - RNA, 20 nt, Human
uggcaagaagaaaguagagg

SEQ ID NO: 177590 - RNA, 22 nt, Human
uggcaagaagaaaguagaggcu

SEQ ID NO: 177591 - RNA, 25 nt, Human
ugugcacauacuuacacuauuagca

SEQ ID NO: 177592 - RNA, 23 nt, Human
uuaaaaaucccccaaauggacuc

SEQ ID NO: 177593 - RNA, 23 nt, Human
uuaacucacaguaaaaucaaaaa

SEQ ID NO: 177594 - RNA, 21 nt, Human
uuugacuuccuagaaauaauu

SEQ ID NO: 177595 - RNA, 22 nt, Human
uuuuagcacuuucggcacuaca

SEQ ID NO: 177596 - RNA, 19 nt, Human
uuuuuuuuuuuuuuuuuaa

SEQ ID NO: 177597 - RNA, 22 nt, Human
aaugcugcuugggguuucuucc

SEQ ID NO: 177598 - RNA, 22 nt, Human
aaugcugcuugggguuucuucc

SEQ ID NO: 177599 - RNA, 18 nt, Human
accccucagccuucccca

SEQ ID NO: 177600 - RNA, 28 nt, Human
accuccuccauggagcccccucccauug

SEQ ID NO: 177601 - RNA, 28 nt, Human
accuccuccauggagcccccucccauug

SEQ ID NO: 177602 - RNA, 20 nt, Human
agcaacucccuucugggaaa

SEQ ID NO: 177603 - RNA, 19 nt, Human
agccccuggccugcccuuu

SEQ ID NO: 177604 - RNA, 19 nt, Human
agccugggugcuguggggc

SEQ ID NO: 177605 - RNA, 24 nt, Human
agcugccugaggcuggcagcccag

SEQ ID NO: 177606 - RNA, 24 nt, Human
aggcaagaaaauggccaggacugg

SEQ ID NO: 177607 - RNA, 24 nt, Human
aggcaagaaaauggccaggacugg

SEQ ID NO: 177608 - RNA, 21 nt, Human
aggcagggccauugcugggcg

SEQ ID NO: 177609 - RNA, 20 nt, Human
aggcugcaggugacuguguc

SEQ ID NO: 177610 - RNA, 21 nt, Human
aggcugcaggugacugugucu

SEQ ID NO: 177611 - RNA, 18 nt, Human
aggcuucuccgccgcagg

SEQ ID NO: 177612 - RNA, 19 nt, Human
aggcuucugaaguggaaau

SEQ ID NO: 177613 - RNA, 23 nt, Human
agguucagucacaguuuccuccu

SEQ ID NO: 177614 - RNA, 18 nt, Human
cacaucugccagccaagg

SEQ ID NO: 177615 - RNA, 24 nt, Human
cacugagccuggauguucuccagg

SEQ ID NO: 177616 - RNA, 19 nt, Human
cagcagccagcguggggag

SEQ ID NO: 177617 - RNA, 23 nt, Human
cagcagccagcguggggagcugg

SEQ ID NO: 177618 - RNA, 19 nt, Human
cagcguggggagcugggac

SEQ ID NO: 177619 - RNA, 24 nt, Human
caggaugaguucccagggaaguga

SEQ ID NO: 177620 - RNA, 23 nt, Human
cauggagcccccucccauugcuc

SEQ ID NO: 177621 - RNA, 23 nt, Human
cauggagcccccucccauugcuc

SEQ ID NO: 177622 - RNA, 19 nt, Human
ccagggaagugaggccaca

SEQ ID NO: 177623 - RNA, 19 nt, Human
ccaucccagaaucacaagc

SEQ ID NO: 177624 - RNA, 19 nt, Human
ccaucccagaaucacaagc

SEQ ID NO: 177625 - RNA, 22 nt, Human
ccauugcucccugggccucuug

SEQ ID NO: 177626 - RNA, 22 nt, Human
ccauugcucccugggccucuug

SEQ ID NO: 177627 - RNA, 23 nt, Human
ccauugcugggcgcuuggguggc

SEQ ID NO: 177628 - RNA, 22 nt, Human
ccccaguaggcuucugaagugg

SEQ ID NO: 177629 - RNA, 23 nt, Human
cccccucccauugcucccugggc

SEQ ID NO: 177630 - RNA, 23 nt, Human
cccccucccauugcucccugggc

SEQ ID NO: 177631 - RNA, 25 nt, Human
ccccuuggggcagaggcuugggggc

SEQ ID NO: 177632 - RNA, 25 nt, Human
ccccuuggggcagaggcuugggggc

SEQ ID NO: 177633 - RNA, 19 nt, Human
cccugggccucuugagccu

SEQ ID NO: 177634 - RNA, 19 nt, Human
cccugggccucuugagccu

SEQ ID NO: 177635 - RNA, 25 nt, Human
cccugggucccugggagaauguggu

SEQ ID NO: 177636 - RNA, 22 nt, Human
cccuucuggacccuuccucacu

SEQ ID NO: 177637 - RNA, 28 nt, Human
cccuuugugggccccuuggggcagaggc

SEQ ID NO: 177638 - RNA, 28 nt, Human
cccuuugugggccccuuggggcagaggc

SEQ ID NO: 177639 - RNA, 21 nt, Human
ccgcacccccguuagggcccu

SEQ ID NO: 177640 - RNA, 27 nt, Human
ccuccauggagcccccucccauugcuc

SEQ ID NO: 177641 - RNA, 27 nt, Human
ccuccauggagcccccucccauugcuc

SEQ ID NO: 177642 - RNA, 21 nt, Human
ccucccauugcucccugggcc

SEQ ID NO: 177643 - RNA, 21 nt, Human
ccucccauugcucccugggcc

SEQ ID NO: 177644 - RNA, 25 nt, Human
ccuccugccccgccaggcugcgagc

SEQ ID NO: 177645 - RNA, 18 nt, Human
ccuccuuuucauuguucu

SEQ ID NO: 177646 - RNA, 22 nt, Human
ccugaggcuggcagcccagggc

SEQ ID NO: 177647 - RNA, 21 nt, Human
ccuggcugcccuuuuggccca

SEQ ID NO: 177648 - RNA, 20 nt, Human
ccugggugcuguggggcugu

SEQ ID NO: 177649 - RNA, 22 nt, Human
ccuguggcagcaacggcugcuu

SEQ ID NO: 177650 - RNA, 21 nt, Human
cgcucuguuccccagcgguaa

SEQ ID NO: 177651 - RNA, 22 nt, Human
cguuagggcccuggggcugucc

SEQ ID NO: 177652 - RNA, 24 nt, Human
cucacugagccuggauguucucca

SEQ ID NO: 177653 - RNA, 18 nt, Human
cuccccuuugugggcccc

SEQ ID NO: 177654 - RNA, 18 nt, Human
cuccccuuugugggcccc

SEQ ID NO: 177655 - RNA, 18 nt, Human
cuccgaggggcuaagagg

SEQ ID NO: 177656 - RNA, 24 nt, Human
cucuccgaggggcuaagagguaga

SEQ ID NO: 177657 - RNA, 23 nt, Human
cugccgcacccccguuagggccc

SEQ ID NO: 177658 - RNA, 21 nt, Human
cugcuccagccagguguggag

SEQ ID NO: 177659 - RNA, 20 nt, Human
cugcuccugccgcacccccg

SEQ ID NO: 177660 - RNA, 22 nt, Human
cugggagaaugugguucuccuc

SEQ ID NO: 177661 - RNA, 18 nt, Human
cugggugaugagcagccc

SEQ ID NO: 177662 - RNA, 18 nt, Human
cugggugaugagcagccc

SEQ ID NO: 177663 - RNA, 18 nt, Human
cuggucaagcuguuggag

SEQ ID NO: 177664 - RNA, 19 nt, Human
cuucccagagccugggccc

SEQ ID NO: 177665 - RNA, 21 nt, Human
gagaaagguggggggcuucca

SEQ ID NO: 177666 - RNA, 18 nt, Human
gagagaaaaggucucugg

SEQ ID NO: 177667 - RNA, 18 nt, Human
gagagaaaaggucucugg

SEQ ID NO: 177668 - RNA, 19 nt, Human
gagaugcuccugccugcug

SEQ ID NO: 177669 - RNA, 21 nt, Human
gagcaacucccuucugggaaa

SEQ ID NO: 177670 - RNA, 22 nt, Human
gagccagcgcuaugggagcuga

SEQ ID NO: 177671 - RNA, 22 nt, Human
gagccagcgcuaugggagcuga

SEQ ID NO: 177672 - RNA, 25 nt, Human
gagcugccugaggcuggcagcccag

SEQ ID NO: 177673 - RNA, 21 nt, Human
gaggccacagcaggauccaga

SEQ ID NO: 177674 - RNA, 21 nt, Human
gaggcuugggggcucugucuc

SEQ ID NO: 177675 - RNA, 21 nt, Human
gaggcuugggggcucugucuc

SEQ ID NO: 177676 - RNA, 24 nt, Human
gagguucagucacaguuuccuccu

SEQ ID NO: 177677 - RNA, 18 nt, Human
gcaagcauucccuucugg

SEQ ID NO: 177678 - RNA, 20 nt, Human
gcaugucauaugaugggguu

SEQ ID NO: 177679 - RNA, 21 nt, Human
gccgcacccccguuagggccc

SEQ ID NO: 177680 - RNA, 22 nt, Human
gccgcacccccguuagggcccu

SEQ ID NO: 177681 - RNA, 18 nt, Human
gccuccugccccgccagg

SEQ ID NO: 177682 - RNA, 19 nt, Human
gcucuguuccccagcggua

SEQ ID NO: 177683 - RNA, 19 nt, Human
ggagcccccucccauugcu

SEQ ID NO: 177684 - RNA, 19 nt, Human
ggagcccccucccauugcu

SEQ ID NO: 177685 - RNA, 23 nt, Human
ggagcugggaccccucagccuuc

SEQ ID NO: 177686 - RNA, 21 nt, Human
ggcaugucauaugaugggguu

SEQ ID NO: 177687 - RNA, 21 nt, Human
ggcaugucauaugaugggguu

SEQ ID NO: 177688 - RNA, 21 nt, Human
ggccuagcacaugcuguagcc

SEQ ID NO: 177689 - RNA, 24 nt, Human
ggcuaagagguagaugcuuuggga

SEQ ID NO: 177690 - RNA, 22 nt, Human
gggcaccccuucccagagccug

SEQ ID NO: 177691 - RNA, 20 nt, Human
ggggcuuccagagucucugu

SEQ ID NO: 177692 - RNA, 22 nt, Human
ggguccugacaaggccaggccu

SEQ ID NO: 177693 - RNA, 24 nt, Human
gugggccccuuggggcagaggcuu

SEQ ID NO: 177694 - RNA, 26 nt, Human
guuaacacaucugccagccaaggggc

SEQ ID NO: 177695 - RNA, 22 nt, Human
uagaugcuuugggaggcagaga

SEQ ID NO: 177696 - RNA, 22 nt, Human
uaugaugggguugucccuuggg

SEQ ID NO: 177697 - RNA, 22 nt, Human
uaugaugggguugucccuuggg

SEQ ID NO: 177698 - RNA, 20 nt, Human
ucagccuuccccaguaggcu

SEQ ID NO: 177699 - RNA, 21 nt, Human
ucaggcaagaaaauggccagg

SEQ ID NO: 177700 - RNA, 21 nt, Human
ucaggcaagaaaauggccagg

SEQ ID NO: 177701 - RNA, 21 nt, Human
ucagugggaaauguccucucc

SEQ ID NO: 177702 - RNA, 18 nt, Human
uccauggagcccccuccc

SEQ ID NO: 177703 - RNA, 18 nt, Human
uccauggagcccccuccc

SEQ ID NO: 177704 - RNA, 22 nt, Human
ucccagaaucacaagccacuca

SEQ ID NO: 177705 - RNA, 22 nt, Human
ucccagaaucacaagccacuca

SEQ ID NO: 177706 - RNA, 18 nt, Human
ucccagggaagugaggcc

SEQ ID NO: 177707 - RNA, 23 nt, Human
uccccacacaggaugaguuccca

SEQ ID NO: 177708 - RNA, 20 nt, Human
uccccagcgguauggcaggc

SEQ ID NO: 177709 - RNA, 18 nt, Human
uccccuuugugggccccu

SEQ ID NO: 177710 - RNA, 18 nt, Human
uccccuuugugggccccu

SEQ ID NO: 177711 - RNA, 20 nt, Human
ucccugcgcuugcggccacu

SEQ ID NO: 177712 - RNA, 24 nt, Human
ucccugcgcuugcggccacugcuc

SEQ ID NO: 177713 - RNA, 20 nt, Human
ucccugggagaaugugguuc

SEQ ID NO: 177714 - RNA, 20 nt, Human
ucccugggccucuugagccu

SEQ ID NO: 177715 - RNA, 20 nt, Human
ucccugggccucuugagccu

SEQ ID NO: 177716 - RNA, 20 nt, Human
uccugccugcugaggccuag

SEQ ID NO: 177717 - RNA, 23 nt, Human
uccugguuguguugagcuguggg

SEQ ID NO: 177718 - RNA, 22 nt, Human
ucggcauuuccugcuccagcca

SEQ ID NO: 177719 - RNA, 20 nt, Human
ucucccuucugugaccuggg

SEQ ID NO: 177720 - RNA, 20 nt, Human
ucuccucgggcugguuuggg

SEQ ID NO: 177721 - RNA, 18 nt, Human
ugagcagccccuggccug

SEQ ID NO: 177722 - RNA, 21 nt, Human
ugagccuggauguucuccagg

SEQ ID NO: 177723 - RNA, 21 nt, Human
ugaggccuagcacaugcugua

SEQ ID NO: 177724 - RNA, 19 nt, Human
ugccugaggcuggcagccc

SEQ ID NO: 177725 - RNA, 19 nt, Human
uggagagcugccugaggcu

SEQ ID NO: 177726 - RNA, 20 nt, Human
uggagagcugccugaggcug

SEQ ID NO: 177727 - RNA, 22 nt, Human
uggagccugggugcuguggggc

SEQ ID NO: 177728 - RNA, 20 nt, Human
uggcagagucaaggcugucu

SEQ ID NO: 177729 - RNA, 20 nt, Human
uggcaggcggccuggguccu

SEQ ID NO: 177730 - RNA, 20 nt, Human
uggcccaggucuaggucugg

SEQ ID NO: 177731 - RNA, 19 nt, Human
uggccugcccuuuuggccc

SEQ ID NO: 177732 - RNA, 25 nt, Human
uggccugcccuuuuggcccaggucu

SEQ ID NO: 177733 - RNA, 19 nt, Human
ugggaaauugauuccagcg

SEQ ID NO: 177734 - RNA, 18 nt, Human
uggggcagaggcuugggg

SEQ ID NO: 177735 - RNA, 18 nt, Human
uggggcagaggcuugggg

SEQ ID NO: 177736 - RNA, 19 nt, Human
uggggcagaggcuuggggg

SEQ ID NO: 177737 - RNA, 20 nt, Human
uggggcagaggcuugggggc

SEQ ID NO: 177738 - RNA, 28 nt, Human
uggggugugcugaaugcugaccacuggg

SEQ ID NO: 177739 - RNA, 28 nt, Human
uggggugugcugaaugcugaccacuggg

SEQ ID NO: 177740 - RNA, 22 nt, Human
ugucugggccuggcuccuugug

SEQ ID NO: 177741 - RNA, 18 nt, Human
uucauuguucuccaacga

SEQ ID NO: 177742 - RNA, 20 nt, Human
uugcugggcgcuuggguggc

SEQ ID NO: 177743 - RNA, 24 nt, Human
uuggggcagaggcuugggggcucu

SEQ ID NO: 177744 - RNA, 24 nt, Human
uuggggcagaggcuugggggcucu

SEQ ID NO: 177745 - RNA, 26 nt, Human
uugugggccccuuggggcagaggcuu

SEQ ID NO: 177746 - RNA, 26 nt, Human
uugugggccccuuggggcagaggcuu

SEQ ID NO: 177747 - RNA, 20 nt, Human
uuucauuguucuccaacgag

SEQ ID NO: 177748 - RNA, 23 nt, Human
uuugaguaauuaggcugcaggug

SEQ ID NO: 177749 - RNA, 24 nt, Human
aagugggcaggguugggccccuuu

SEQ ID NO: 177750 - RNA, 25 nt, Human
agcaagaacucucccccaaagugga

SEQ ID NO: 177751 - RNA, 18 nt, Human
cacacaaaccccucuggu

SEQ ID NO: 177752 - RNA, 21 nt, Human
cacuguuccuccugccucuuc

SEQ ID NO: 177753 - RNA, 25 nt, Human
caggguugggccccuuucacccacc

SEQ ID NO: 177754 - RNA, 18 nt, Human
cccuugggcgggcugggc

SEQ ID NO: 177755 - RNA, 25 nt, Human
ccuccugccucuucagccacacaaa

SEQ ID NO: 177756 - RNA, 24 nt, Human
cucccacauguucugcuggcacaa

SEQ ID NO: 177757 - RNA, 19 nt, Human
cuggaaacggggcuucuuc

SEQ ID NO: 177758 - RNA, 20 nt, Human
cuguuccuccugccucuuca

SEQ ID NO: 177759 - RNA, 29 nt, Human
ggcugggcugaagugggcaggguugggcc

SEQ ID NO: 177760 - RNA, 24 nt, Human
gggcaggguugggccccuuucacc

SEQ ID NO: 177761 - RNA, 21 nt, Human
guccccuugggcgggcugggc

SEQ ID NO: 177762 - RNA, 24 nt, Human
uacacuguuccuccugccucuuca

SEQ ID NO: 177763 - RNA, 28 nt, Human
uacccugggcugcggaugcccuggaaac

SEQ ID NO: 177764 - RNA, 24 nt, Human
ucgagagcaagaacucucccccaa

SEQ ID NO: 177765 - RNA, 22 nt, Human
ugaagugggcaggguugggccc

SEQ ID NO: 177766 - RNA, 24 nt, Human
uggaaacggggcuucuuccuccca

SEQ ID NO: 177767 - RNA, 22 nt, Human
ugggccccuuucacccacccag

SEQ ID NO: 177768 - RNA, 19 nt, Human
aaaagaaacaucauagaua

SEQ ID NO: 177769 - RNA, 20 nt, Human
aaaagaaacaucauagauaa

SEQ ID NO: 177770 - RNA, 23 nt, Human
aacaaaggaaaugacaaaggaaa

SEQ ID NO: 177771 - RNA, 28 nt, Human
aaugacaaaggaaaauuaacgagagaaa

SEQ ID NO: 177772 - RNA, 23 nt, Human
agaaaacaguacaguucuaucau

SEQ ID NO: 177773 - RNA, 20 nt, Human
aggaaaugacaaaggaaaag

SEQ ID NO: 177774 - RNA, 19 nt, Human
aggugcuagaaacccaaga

SEQ ID NO: 177775 - RNA, 20 nt, Human
aggugcuagaaacccaagau

SEQ ID NO: 177776 - RNA, 23 nt, Human
aguaagaauuuaaaaauguacaa

SEQ ID NO: 177777 - RNA, 19 nt, Human
caagauuacccuugaagca

SEQ ID NO: 177778 - RNA, 24 nt, Human
caauuaccaguacauuuacaaaac

SEQ ID NO: 177779 - RNA, 21 nt, Human
cacuggcccagaaaacaguac

SEQ ID NO: 177780 - RNA, 21 nt, Human
caggucccagguagucuuuaa

SEQ ID NO: 177781 - RNA, 18 nt, Human
cccaagauuacccuugaa

SEQ ID NO: 177782 - RNA, 20 nt, Human
cuccuccuccuccuccuccu

SEQ ID NO: 177783 - RNA, 20 nt, Human
cuccuccuccuccuccuccu

SEQ ID NO: 177784 - RNA, 20 nt, Human
cuccuccuccuccuccuccu

SEQ ID NO: 177785 - RNA, 21 nt, Human
cugacggcggucgcccgcuuc

SEQ ID NO: 177786 - RNA, 18 nt, Human
guacuguagccaguucgu

SEQ ID NO: 177787 - RNA, 23 nt, Human
uaaaagaacaaaaauuuacagua

SEQ ID NO: 177788 - RNA, 22 nt, Human
uagauaaggugcuagaaaccca

SEQ ID NO: 177789 - RNA, 21 nt, Human
uauguacauguacacuguaua

SEQ ID NO: 177790 - RNA, 24 nt, Human
uauuccaauugcaaaagaaacauc

SEQ ID NO: 177791 - RNA, 21 nt, Human
uccagaguaagaauuuaaaaa

SEQ ID NO: 177792 - RNA, 19 nt, Human
ucuggcucacuggcccaga

SEQ ID NO: 177793 - RNA, 21 nt, Human
ucuggcucacuggcccagaaa

SEQ ID NO: 177794 - RNA, 22 nt, Human
ugcaaaagaaacaucauagaua

SEQ ID NO: 177795 - RNA, 24 nt, Human
uggcucacuggcccagaaaacagu

SEQ ID NO: 177796 - RNA, 22 nt, Human
uuaauguagacaacaaaggaaa

SEQ ID NO: 177797 - RNA, 22 nt, Human
uucuggcucacuggcccagaaa

SEQ ID NO: 177798 - RNA, 19 nt, Human
uuggggcaaggugaccaag

SEQ ID NO: 177799 - RNA, 20 nt, Human
uuuuuuuucagaguucaaug

SEQ ID NO: 177800 - RNA, 22 nt, Human
uuuuuuuuuuuuuuuuuuucag

SEQ ID NO: 177801 - RNA, 19 nt, Human
aaaggaaaaauauauugca

SEQ ID NO: 177802 - RNA, 21 nt, Human
acaacauacugucaaauauga

SEQ ID NO: 177803 - RNA, 22 nt, Human
agccuggucugcgcucgggccc

SEQ ID NO: 177804 - RNA, 21 nt, Human
aggaaauuacagguaaguuau

SEQ ID NO: 177805 - RNA, 24 nt, Human
aggacgcggugcccgaggcccgag

SEQ ID NO: 177806 - RNA, 20 nt, Human
aggcccgagagagacccgag

SEQ ID NO: 177807 - RNA, 22 nt, Human
auuguaauuaaauugcuugguu

SEQ ID NO: 177808 - RNA, 22 nt, Human
caagauaaguauuuaaaacuug

SEQ ID NO: 177809 - RNA, 19 nt, Human
caccgguggcugcggcucc

SEQ ID NO: 177810 - RNA, 19 nt, Human
ccggcgccgcgcggcugga

SEQ ID NO: 177811 - RNA, 22 nt, Human
ccggcuccggcuacugcggccg

SEQ ID NO: 177812 - RNA, 24 nt, Human
ccggcuccggcuacugcggccgca

SEQ ID NO: 177813 - RNA, 18 nt, Human
cgggcccgagggaggccg

SEQ ID NO: 177814 - RNA, 19 nt, Human
cuggucugcgcucgggccc

SEQ ID NO: 177815 - RNA, 22 nt, Human
gacaggaaaaauaucuucuucc

SEQ ID NO: 177816 - RNA, 23 nt, Human
gcggcggcgggaaaggaaggcac

SEQ ID NO: 177817 - RNA, 20 nt, Human
gcgggaaaggaaggcaccgg

SEQ ID NO: 177818 - RNA, 19 nt, Human
gcugcgggcgggcgggcag

SEQ ID NO: 177819 - RNA, 23 nt, Human
ggcgggcgggcaggcaggcggcc

SEQ ID NO: 177820 - RNA, 18 nt, Human
ggcugcgggcgggcgggc

SEQ ID NO: 177821 - RNA, 19 nt, Human
gggcaggcaggcggccgcc

SEQ ID NO: 177822 - RNA, 19 nt, Human
gggcugcgggcgggcgggc

SEQ ID NO: 177823 - RNA, 18 nt, Human
ggggcugcgggcgggcgg

SEQ ID NO: 177824 - RNA, 21 nt, Human
gucugcgcucgggcccgaggg

SEQ ID NO: 177825 - RNA, 19 nt, Human
uaaggaaagcaauacagag

SEQ ID NO: 177826 - RNA, 23 nt, Human
uagaaaacaauaguuuaaggaaa

SEQ ID NO: 177827 - RNA, 22 nt, Human
uauaauaagaguuaagaagcaa

SEQ ID NO: 177828 - RNA, 20 nt, Human
uauacauuacccugauaccu

SEQ ID NO: 177829 - RNA, 27 nt, Human
uaucuaacaacaaauuuucuugauuua

SEQ ID NO: 177830 - RNA, 26 nt, Human
ucaaugacaggaaaaauaucuucuuc

SEQ ID NO: 177831 - RNA, 19 nt, Human
ugacaggaaaaauaucuuc

SEQ ID NO: 177832 - RNA, 23 nt, Human
ugccucaaugacaccauuuacag

SEQ ID NO: 177833 - RNA, 24 nt, Human
uuuaacaauuguaauuaaauugcu

SEQ ID NO: 177834 - RNA, 23 nt, Human
aaaaaaggacaggugcgccaggu

SEQ ID NO: 177835 - RNA, 19 nt, Human
aaaaggacaggugcgccag

SEQ ID NO: 177836 - RNA, 22 nt, Human
aaaaugcugugugaaauuuccc

SEQ ID NO: 177837 - RNA, 26 nt, Human
aaacaaucaaaauuacuuccugaagc

SEQ ID NO: 177838 - RNA, 19 nt, Human
agagacucacacuuuccuc

SEQ ID NO: 177839 - RNA, 18 nt, Human
aucaaaauuacuuccuga

SEQ ID NO: 177840 - RNA, 24 nt, Human
caacugaacuuuaccauugcuaga

SEQ ID NO: 177841 - RNA, 23 nt, Human
ccagaauccuugacuucuacucc

SEQ ID NO: 177842 - RNA, 27 nt, Human
ccugcaugcacacugcuauuauguccc

SEQ ID NO: 177843 - RNA, 21 nt, Human
cucccaacucaauaagagauc

SEQ ID NO: 177844 - RNA, 23 nt, Human
cuccugcuaauaagcuaagugaa

SEQ ID NO: 177845 - RNA, 26 nt, Human
cugcaugcacacugcuauuauguccc

SEQ ID NO: 177846 - RNA, 22 nt, Human
uaagcuaagugaacuuagguca

SEQ ID NO: 177847 - RNA, 23 nt, Human
uacaaugguaauccauuaaauac

SEQ ID NO: 177848 - RNA, 22 nt, Human
uacuaucuguguuucuuugcac

SEQ ID NO: 177849 - RNA, 19 nt, Human
uacucagaauuuuuacuac

SEQ ID NO: 177850 - RNA, 19 nt, Human
uagaauaagaaccagaauc

SEQ ID NO: 177851 - RNA, 21 nt, Human
uagaauaagaaccagaauccu

SEQ ID NO: 177852 - RNA, 21 nt, Human
ucccugccuccugccugcaug

SEQ ID NO: 177853 - RNA, 22 nt, Human
ucugaaaaauagaagaaaaaag

SEQ ID NO: 177854 - RNA, 24 nt, Human
ucugaaaccuaaucagaaaaaaaa

SEQ ID NO: 177855 - RNA, 19 nt, Human
ugaaaagguuaggaaacua

SEQ ID NO: 177856 - RNA, 25 nt, Human
ugccugcaugcacacugcuauuaug

SEQ ID NO: 177857 - RNA, 20 nt, Human
uggcagccucuagggaugug

SEQ ID NO: 177858 - RNA, 20 nt, Human
ugggaaaaguccuagaauag

SEQ ID NO: 177859 - RNA, 18 nt, Human
uguaaaaauuucuuccug

SEQ ID NO: 177860 - RNA, 21 nt, Human
uguuaggcugucucuguuaug

SEQ ID NO: 177861 - RNA, 19 nt, Human
uuccugaagcuauuuuggc

SEQ ID NO: 177862 - RNA, 21 nt, Human
uuggcagccucuagggaugug

SEQ ID NO: 177863 - RNA, 23 nt, Human
uuguagccaguuucaaaaugcug

SEQ ID NO: 177864 - RNA, 18 nt, Human
uuuuuuuuuuuaagcaaa

SEQ ID NO: 177865 - RNA, 19 nt, Human
aaacagcuccugggcugcc

SEQ ID NO: 177866 - RNA, 24 nt, Human
aaaccagagcucaagcacaggaga

SEQ ID NO: 177867 - RNA, 22 nt, Human
aauuuucaguuguguguggguu

SEQ ID NO: 177868 - RNA, 24 nt, Human
acaggaaaaggugagagauggagg

SEQ ID NO: 177869 - RNA, 22 nt, Human
agagauggaggaggcaauuuuc

SEQ ID NO: 177870 - RNA, 24 nt, Human
agcacaggagaagaggaacccaca

SEQ ID NO: 177871 - RNA, 24 nt, Human
agcuucauguuuaauggguggaga

SEQ ID NO: 177872 - RNA, 20 nt, Human
aucuuccaagcuccccauug

SEQ ID NO: 177873 - RNA, 22 nt, Human
auguauuuucaaaaaugaaaac

SEQ ID NO: 177874 - RNA, 21 nt, Human
caaacagcuccugggcugcca

SEQ ID NO: 177875 - RNA, 19 nt, Human
caaaccuauaccccucccc

SEQ ID NO: 177876 - RNA, 19 nt, Human
caauauugaaaagccaagc

SEQ ID NO: 177877 - RNA, 21 nt, Human
cacaauauugaaaagccaagc

SEQ ID NO: 177878 - RNA, 21 nt, Human
cagcuccugggcugccauuug

SEQ ID NO: 177879 - RNA, 23 nt, Human
cagcuccugggcugccauuugcu

SEQ ID NO: 177880 - RNA, 19 nt, Human
caggaaaaggugagagaug

SEQ ID NO: 177881 - RNA, 19 nt, Human
cauuuucaucugacagggg

SEQ ID NO: 177882 - RNA, 18 nt, Human
cccacagucugacccugc

SEQ ID NO: 177883 - RNA, 21 nt, Human
cccacagucugacccugcuau

SEQ ID NO: 177884 - RNA, 18 nt, Human
cccacucgggauauagga

SEQ ID NO: 177885 - RNA, 18 nt, Human
cccuccccagacuuggga

SEQ ID NO: 177886 - RNA, 25 nt, Human
ccuauaccccuccccagacuuggga

SEQ ID NO: 177887 - RNA, 21 nt, Human
cucacaauauugaaaagccaa

SEQ ID NO: 177888 - RNA, 22 nt, Human
cucuuucaaacagccuuucaaa

SEQ ID NO: 177889 - RNA, 23 nt, Human
cuuuauuaaacauuccucuuuca

SEQ ID NO: 177890 - RNA, 19 nt, Human
gaacccacagucugacccu

SEQ ID NO: 177891 - RNA, 23 nt, Human
gcagagauccaccgucugugccc

SEQ ID NO: 177892 - RNA, 21 nt, Human
gcuucauguuuaaugggugga

SEQ ID NO: 177893 - RNA, 25 nt, Human
ggguggagauuuuuaaaaaucuguu

SEQ ID NO: 177894 - RNA, 20 nt, Human
ggguuugauuuaaggcuuug

SEQ ID NO: 177895 - RNA, 21 nt, Human
gguuugauuuaaggcuuuggc

SEQ ID NO: 177896 - RNA, 21 nt, Human
guggagcggcaaugcugcugc

SEQ ID NO: 177897 - RNA, 21 nt, Human
uaaacuggacaaacagcuccu

SEQ ID NO: 177898 - RNA, 23 nt, Human
uaaacuggacaaacagcuccugg

SEQ ID NO: 177899 - RNA, 20 nt, Human
uaggaaaaagguugguagcg

SEQ ID NO: 177900 - RNA, 23 nt, Human
ucaaaccuauaccccuccccaga

SEQ ID NO: 177901 - RNA, 18 nt, Human
uccccagacuugggaacu

SEQ ID NO: 177902 - RNA, 24 nt, Human
ucuuccaagcuccccauuggaaca

SEQ ID NO: 177903 - RNA, 20 nt, Human
ugcuaaacuggacaaacagc

SEQ ID NO: 177904 - RNA, 20 nt, Human
ugcugaggcgcaugcgugug

SEQ ID NO: 177905 - RNA, 22 nt, Human
uucaaaaaugaaaacauugagc

SEQ ID NO: 177906 - RNA, 25 nt, Human
uucagaccucacaauauugaaaagc

SEQ ID NO: 177907 - RNA, 18 nt, Human
uugguagcgccagcucuc

SEQ ID NO: 177908 - RNA, 18 nt, Human
acgccgggcccccuccgg

SEQ ID NO: 177909 - RNA, 20 nt, Human
ccccuccggcuccggaagcu

SEQ ID NO: 177910 - RNA, 18 nt, Human
ccccugcgggugagguag

SEQ ID NO: 177911 - RNA, 23 nt, Human
ccuccggcuccggaagcuggacg

SEQ ID NO: 177912 - RNA, 27 nt, Human
gccgggcccccuccggcuccggaagcu

SEQ ID NO: 177913 - RNA, 24 nt, Human
ggagggauaggguuuggggaggga

SEQ ID NO: 177914 - RNA, 21 nt, Human
gggauaggguuuggggaggga

SEQ ID NO: 177915 - RNA, 21 nt, Human
ggggcuggguacgccgggccc

SEQ ID NO: 177916 - RNA, 18 nt, Human
guuuggggagggaacagg

SEQ ID NO: 177917 - RNA, 20 nt, Human
uacgccgggcccccuccggc

SEQ ID NO: 177918 - RNA, 20 nt, Human
uacgccgggcccccuccggc

SEQ ID NO: 177919 - RNA, 20 nt, Human
ucccuccuucccccugcggg

SEQ ID NO: 177920 - RNA, 18 nt, Human
uccggcuccggaagcugg

SEQ ID NO: 177921 - RNA, 18 nt, Human
ugagguaggagggauagg

SEQ ID NO: 177922 - RNA, 22 nt, Human
uggacgcucaccucggcucccc

SEQ ID NO: 177923 - RNA, 22 nt, Human
aaccccugaagccaucacucaa

SEQ ID NO: 177924 - RNA, 19 nt, Human
aagcucuuggggaccaggc

SEQ ID NO: 177925 - RNA, 18 nt, Human
acagaacagugcuggaca

SEQ ID NO: 177926 - RNA, 23 nt, Human
acagagcugcacgcuugggggug

SEQ ID NO: 177927 - RNA, 20 nt, Human
acagugcuggacaaggcaug

SEQ ID NO: 177928 - RNA, 18 nt, Human
accacggcugggcaaggu

SEQ ID NO: 177929 - RNA, 21 nt, Human
agaacagugcuggacaaggca

SEQ ID NO: 177930 - RNA, 20 nt, Human
agaauccgagguggagacau

SEQ ID NO: 177931 - RNA, 22 nt, Human
agaauccgagguggagacauuc

SEQ ID NO: 177932 - RNA, 19 nt, Human
agggcugcggcccaaagau

SEQ ID NO: 177933 - RNA, 20 nt, Human
caaccccugaagccaucacu

SEQ ID NO: 177934 - RNA, 24 nt, Human
cacacacagugaaggcugggacag

SEQ ID NO: 177935 - RNA, 20 nt, Human
cagagaaauaaaaagcuuua

SEQ ID NO: 177936 - RNA, 18 nt, Human
caggaauccaagccucca

SEQ ID NO: 177937 - RNA, 24 nt, Human
caggaauccaagccuccaaagcuc

SEQ ID NO: 177938 - RNA, 21 nt, Human
caguuugggcugaacuuccaa

SEQ ID NO: 177939 - RNA, 21 nt, Human
caucacucaagcuaaaaugag

SEQ ID NO: 177940 - RNA, 21 nt, Human
cauggcccccuucaguuuggg

SEQ ID NO: 177941 - RNA, 18 nt, Human
ccaagccuccaaagcucu

SEQ ID NO: 177942 - RNA, 20 nt, Human
ccaccacggcugggcaaggu

SEQ ID NO: 177943 - RNA, 23 nt, Human
ccccaacccaggagaccucucac

SEQ ID NO: 177944 - RNA, 21 nt, Human
ccucucacacacagugaaggc

SEQ ID NO: 177945 - RNA, 19 nt, Human
ccugggggccaccacggcu

SEQ ID NO: 177946 - RNA, 23 nt, Human
cuggacaaggcauggcccccuuc

SEQ ID NO: 177947 - RNA, 19 nt, Human
gaaugguccccauaccccc

SEQ ID NO: 177948 - RNA, 24 nt, Human
gaaugguccccauaccccccaccc

SEQ ID NO: 177949 - RNA, 22 nt, Human
gagcaguucugguccucaggga

SEQ ID NO: 177950 - RNA, 21 nt, Human
gaggacccuuggcuggagugu

SEQ ID NO: 177951 - RNA, 20 nt, Human
gccaucacucaagcuaaaau

SEQ ID NO: 177952 - RNA, 19 nt, Human
ggaccaggccugggggcca

SEQ ID NO: 177953 - RNA, 18 nt, Human
ggccucccccgcagcgga

SEQ ID NO: 177954 - RNA, 19 nt, Human
ggccucccccgcagcggag

SEQ ID NO: 177955 - RNA, 19 nt, Human
ggcugaacuuccaaccccu

SEQ ID NO: 177956 - RNA, 21 nt, Human
gguggagacauuccaggucag

SEQ ID NO: 177957 - RNA, 20 nt, Human
uaaaaugagcaguucugguc

SEQ ID NO: 177958 - RNA, 21 nt, Human
uaaaaugagcaguucuggucc

SEQ ID NO: 177959 - RNA, 21 nt, Human
ucacucaagcuaaaaugagca

SEQ ID NO: 177960 - RNA, 24 nt, Human
ucagggcugcggcccaaagauggg

SEQ ID NO: 177961 - RNA, 18 nt, Human
uccagaaagagcugcagg

SEQ ID NO: 177962 - RNA, 20 nt, Human
uccccauaccccccaccccu

SEQ ID NO: 177963 - RNA, 22 nt, Human
ugaaggcugggacagagcugca

SEQ ID NO: 177964 - RNA, 21 nt, Human
ugaaugguccccauacccccc

SEQ ID NO: 177965 - RNA, 22 nt, Human
ugaaugguccccauacccccca

SEQ ID NO: 177966 - RNA, 20 nt, Human
ugacagaacagugcuggaca

SEQ ID NO: 177967 - RNA, 19 nt, Human
ugccagggaaugaaugguc

SEQ ID NO: 177968 - RNA, 24 nt, Human
ugccugaagguccagaaagagcug

SEQ ID NO: 177969 - RNA, 18 nt, Human
uggagugucucaagcuga

SEQ ID NO: 177970 - RNA, 19 nt, Human
ugggacagagcugcacgcu

SEQ ID NO: 177971 - RNA, 22 nt, Human
ugggacagagcugcacgcuugg

SEQ ID NO: 177972 - RNA, 22 nt, Human
ugggcugaacuuccaaccccug

SEQ ID NO: 177973 - RNA, 23 nt, Human
ugggggagacugacagaacagug

SEQ ID NO: 177974 - RNA, 19 nt, Human
aaaguaaggaaagucugaa

SEQ ID NO: 177975 - RNA, 20 nt, Human
acacuacacaguacaguauu

SEQ ID NO: 177976 - RNA, 23 nt, Human
accagaaaaauggucacauuuaa

SEQ ID NO: 177977 - RNA, 19 nt, Human
agaugaacauuuaaugcua

SEQ ID NO: 177978 - RNA, 24 nt, Human
cacaguacaguauuagagcagaau

SEQ ID NO: 177979 - RNA, 21 nt, Human
cacauuuaaaauucucaaaau

SEQ ID NO: 177980 - RNA, 19 nt, Human
caggugacauccugccccc

SEQ ID NO: 177981 - RNA, 19 nt, Human
cauccugccccauucugag

SEQ ID NO: 177982 - RNA, 26 nt, Human
cauccugccccauucugagcacuuca

SEQ ID NO: 177983 - RNA, 24 nt, Human
cauuuugcuaagucccugagcacu

SEQ ID NO: 177984 - RNA, 24 nt, Human
ccucaaggcuaccuuuacuccucc

SEQ ID NO: 177985 - RNA, 20 nt, Human
cuuuaugcaucggccucuuc

SEQ ID NO: 177986 - RNA, 22 nt, Human
gauuuucccuccgucguggccu

SEQ ID NO: 177987 - RNA, 18 nt, Human
gccucuuccccagccacc

SEQ ID NO: 177988 - RNA, 23 nt, Human
gccucuuccccagccacccuggu

SEQ ID NO: 177989 - RNA, 24 nt, Human
ggccucuuccccagccacccuggu

SEQ ID NO: 177990 - RNA, 20 nt, Human
gugaagggcagucuucuaug

SEQ ID NO: 177991 - RNA, 24 nt, Human
guggccuugaagguugucaguuug

SEQ ID NO: 177992 - RNA, 26 nt, Human
guuuuguguauccuucuucuuguuca

SEQ ID NO: 177993 - RNA, 24 nt, Human
uaaauuauuuacaaaaaucauuua

SEQ ID NO: 177994 - RNA, 21 nt, Human
uaacugugcucugcagaaacc

SEQ ID NO: 177995 - RNA, 25 nt, Human
uagagcagaauauaaauuauuuaca

SEQ ID NO: 177996 - RNA, 20 nt, Human
uccacaaugccuugcuaccu

SEQ ID NO: 177997 - RNA, 22 nt, Human
uccacaaugccuugcuaccugc

SEQ ID NO: 177998 - RNA, 22 nt, Human
ucccugagcacuuugaacaggc

SEQ ID NO: 177999 - RNA, 21 nt, Human
uccucccacuauuaacucuag

SEQ ID NO: 178000 - RNA, 21 nt, Human
ucuacuagagucccugcccca

SEQ ID NO: 178001 - RNA, 19 nt, Human
ugauuccaggugacauccu

SEQ ID NO: 178002 - RNA, 18 nt, Human
ugcucuggccucaaggcu

SEQ ID NO: 178003 - RNA, 19 nt, Human
uuccaggugacauccugcc

SEQ ID NO: 178004 - RNA, 23 nt, Human
uucucugacaagaagaucuacua

SEQ ID NO: 178005 - RNA, 23 nt, Human
uugaagguugucaguuugcauuu

SEQ ID NO: 178006 - RNA, 27 nt, Human
uugaagguugucaguuugcauuuaauc

SEQ ID NO: 178007 - RNA, 19 nt, Human
uuguguauccuucuucuug

SEQ ID NO: 178008 - RNA, 21 nt, Human
uuuccacaaugccuugcuacc

SEQ ID NO: 178009 - RNA, 19 nt, Human
aacaggcuccucuucccag

SEQ ID NO: 178010 - RNA, 21 nt, Human
acaaaaacaggcuccucuucc

SEQ ID NO: 178011 - RNA, 24 nt, Human
acagccagaucccgccucucucaa

SEQ ID NO: 178012 - RNA, 22 nt, Human
agcaagacuaaaauuggccaaa

SEQ ID NO: 178013 - RNA, 22 nt, Human
agguguuauaaaagauuccuuc

SEQ ID NO: 178014 - RNA, 23 nt, Human
auaaaagaaagccucauccaucc

SEQ ID NO: 178015 - RNA, 18 nt, Human
auuuugcaacauacucca

SEQ ID NO: 178016 - RNA, 19 nt, Human
caagacuaaaauuggccaa

SEQ ID NO: 178017 - RNA, 24 nt, Human
caaggauccacagccuggccucuc

SEQ ID NO: 178018 - RNA, 18 nt, Human
cacaagugacaucucaaa

SEQ ID NO: 178019 - RNA, 22 nt, Human
cacagccuggccucucagcucu

SEQ ID NO: 178020 - RNA, 23 nt, Human
caccccacuguuuuucaaaacaa

SEQ ID NO: 178021 - RNA, 18 nt, Human
cagcaagacuaaaauugg

SEQ ID NO: 178022 - RNA, 19 nt, Human
caggaaacgugacacaagu

SEQ ID NO: 178023 - RNA, 21 nt, Human
caucaagaaacagcaagacua

SEQ ID NO: 178024 - RNA, 24 nt, Human
caucaagaaacagcaagacuaaaa

SEQ ID NO: 178025 - RNA, 19 nt, Human
caugccacccccgcccccu

SEQ ID NO: 178026 - RNA, 22 nt, Human
cccaccccacuguuuuucaaaa

SEQ ID NO: 178027 - RNA, 20 nt, Human
cccacgggauagaaaauagc

SEQ ID NO: 178028 - RNA, 24 nt, Human
cccacuguuuuucaaaacaagagc

SEQ ID NO: 178029 - RNA, 18 nt, Human
cccgagaguccagcugcu

SEQ ID NO: 178030 - RNA, 21 nt, Human
cccguggcagguugcugaagc

SEQ ID NO: 178031 - RNA, 20 nt, Human
cccuccucccucugccuccc

SEQ ID NO: 178032 - RNA, 18 nt, Human
cucauccaucccagcucc

SEQ ID NO: 178033 - RNA, 23 nt, Human
cugaagcuauaaacgugguccug

SEQ ID NO: 178034 - RNA, 18 nt, Human
cuggccucucagcucuuc

SEQ ID NO: 178035 - RNA, 26 nt, Human
cuguaagucuuuuuuccaaacucacu

SEQ ID NO: 178036 - RNA, 19 nt, Human
cuuccugcuaguccccuag

SEQ ID NO: 178037 - RNA, 20 nt, Human
gccucauccaucccagcucc

SEQ ID NO: 178038 - RNA, 22 nt, Human
gcucuggcaggcgugccgcuuc

SEQ ID NO: 178039 - RNA, 24 nt, Human
ggccccaccccacuguuuuucaaa

SEQ ID NO: 178040 - RNA, 23 nt, Human
gguuaacauuacgaaggcaaaag

SEQ ID NO: 178041 - RNA, 18 nt, Human
guagccagguccugaagc

SEQ ID NO: 178042 - RNA, 22 nt, Human
uaaacuaauauagaggugagca

SEQ ID NO: 178043 - RNA, 19 nt, Human
uacagccagaucccgccuc

SEQ ID NO: 178044 - RNA, 18 nt, Human
uacguagccagguccuga

SEQ ID NO: 178045 - RNA, 19 nt, Human
uacugccauucagggaaug

SEQ ID NO: 178046 - RNA, 18 nt, Human
uagaaaauagcuucuguu

SEQ ID NO: 178047 - RNA, 20 nt, Human
ucaagagaccgucaaaaucu

SEQ ID NO: 178048 - RNA, 21 nt, Human
ucaucccgagaguccagcugc

SEQ ID NO: 178049 - RNA, 21 nt, Human
uccaaacucacucguuucucu

SEQ ID NO: 178050 - RNA, 21 nt, Human
ucccuccucccucugccuccc

SEQ ID NO: 178051 - RNA, 24 nt, Human
ucucuuguuguucguggcaaggau

SEQ ID NO: 178052 - RNA, 18 nt, Human
ugaaagccagaguugaag

SEQ ID NO: 178053 - RNA, 23 nt, Human
ugaagcccagccuucccuccucc

SEQ ID NO: 178054 - RNA, 22 nt, Human
ugaagugaugagcucuggcagg

SEQ ID NO: 178055 - RNA, 19 nt, Human
ugagcaucaagaaacagca

SEQ ID NO: 178056 - RNA, 22 nt, Human
ugagcgcagugaaagccagagu

SEQ ID NO: 178057 - RNA, 20 nt, Human
uggcaggcgugccgcuuccu

SEQ ID NO: 178058 - RNA, 18 nt, Human
uggccucucagcucuucc

SEQ ID NO: 178059 - RNA, 22 nt, Human
ugucugguugagcacaguggug

SEQ ID NO: 178060 - RNA, 18 nt, Human
uucccaugccacccccgc

SEQ ID NO: 178061 - RNA, 24 nt, Human
uuucaucccgagaguccagcugcu

SEQ ID NO: 178062 - RNA, 19 nt, Human
uuuuuggccccaccccacu

SEQ ID NO: 178063 - RNA, 19 nt, Human
aacaguuucaggcuccucu

SEQ ID NO: 178064 - RNA, 21 nt, Human
aaggaaguucucuuuccauca

SEQ ID NO: 178065 - RNA, 21 nt, Human
caaaugugaacaaccaugucc

SEQ ID NO: 178066 - RNA, 24 nt, Human
cacaauccuuuaguagcuucucuc

SEQ ID NO: 178067 - RNA, 26 nt, Human
cagaauggaaaagcuaccagcaggca

SEQ ID NO: 178068 - RNA, 20 nt, Human
cagcaaaugugaacaaccau

SEQ ID NO: 178069 - RNA, 24 nt, Human
cagcagguggcuccaucacucucc

SEQ ID NO: 178070 - RNA, 21 nt, Human
cagcauucacccaggcagcaa

SEQ ID NO: 178071 - RNA, 21 nt, Human
caggcuccucuuuaauaucug

SEQ ID NO: 178072 - RNA, 20 nt, Human
ccagagaaaucaugcagaaa

SEQ ID NO: 178073 - RNA, 22 nt, Human
ccagagaaaucaugcagaaaca

SEQ ID NO: 178074 - RNA, 19 nt, Human
cccacacugucccagcaag

SEQ ID NO: 178075 - RNA, 18 nt, Human
ccccugaucuucuaaccc

SEQ ID NO: 178076 - RNA, 22 nt, Human
cccuccuucacucucccuauca

SEQ ID NO: 178077 - RNA, 18 nt, Human
ccuaaaggaugccacgaa

SEQ ID NO: 178078 - RNA, 23 nt, Human
ccuccuucacucucccuaucaca

SEQ ID NO: 178079 - RNA, 19 nt, Human
ccuuuaguagcuucucucc

SEQ ID NO: 178080 - RNA, 20 nt, Human
gaagguggaggaggacacaa

SEQ ID NO: 178081 - RNA, 21 nt, Human
gcccuggucucccacccacac

SEQ ID NO: 178082 - RNA, 22 nt, Human
ggagacagguggagaccgagca

SEQ ID NO: 178083 - RNA, 20 nt, Human
gggcagcagguggcuccauc

SEQ ID NO: 178084 - RNA, 19 nt, Human
guaagacagcaagcccaga

SEQ ID NO: 178085 - RNA, 21 nt, Human
gugaagacuggcgguguuccg

SEQ ID NO: 178086 - RNA, 18 nt, Human
uaggggugagagaacaag

SEQ ID NO: 178087 - RNA, 20 nt, Human
uaguagcuucucuccugcuu

SEQ ID NO: 178088 - RNA, 21 nt, Human
ucaugcagaaacauucucaag

SEQ ID NO: 178089 - RNA, 25 nt, Human
uccaagugaagacuggcgguguucc

SEQ ID NO: 178090 - RNA, 19 nt, Human
uccacagaauggaaaagcu

SEQ ID NO: 178091 - RNA, 22 nt, Human
uccacagaauggaaaagcuacc

SEQ ID NO: 178092 - RNA, 18 nt, Human
ucccacccacacuguccc

SEQ ID NO: 178093 - RNA, 21 nt, Human
ucucagguaagacagcaagcc

SEQ ID NO: 178094 - RNA, 24 nt, Human
ucuccugcuuagggaugaucucuu

SEQ ID NO: 178095 - RNA, 20 nt, Human
ugaaaucaagugcucuacca

SEQ ID NO: 178096 - RNA, 18 nt, Human
ugagagaacaagcagcau

SEQ ID NO: 178097 - RNA, 25 nt, Human
ugcucuaccacauaucccuccuuca

SEQ ID NO: 178098 - RNA, 21 nt, Human
uggcgguguuccguggcagca

SEQ ID NO: 178099 - RNA, 27 nt, Human
uuaacaguacagaaggaaguucucuuu

SEQ ID NO: 178100 - RNA, 22 nt, Human
uuaguagcuucucuccugcuua

SEQ ID NO: 178101 - RNA, 21 nt, Human
uuagugagaaaguuaguggag

SEQ ID NO: 178102 - RNA, 21 nt, Human
uuccaucaaaguucuccucca

SEQ ID NO: 178103 - RNA, 19 nt, Human
uuguacaugcucuugcccc

SEQ ID NO: 178104 - RNA, 20 nt, Human
agcaaggagacaccugagaa

SEQ ID NO: 178105 - RNA, 20 nt, Human
agccagaguggcaugagugu

SEQ ID NO: 178106 - RNA, 18 nt, Human
aggcggcaguggagcccg

SEQ ID NO: 178107 - RNA, 22 nt, Human
ccggcucccgccucucgcccug

SEQ ID NO: 178108 - RNA, 18 nt, Human
cgguuagcgacaccugcc

SEQ ID NO: 178109 - RNA, 22 nt, Human
gagaggcggcaguggagcccgg

SEQ ID NO: 178110 - RNA, 19 nt, Human
gagcucggagaggcggcag

SEQ ID NO: 178111 - RNA, 22 nt, Human
gagugucuuggcuccccuccuc

SEQ ID NO: 178112 - RNA, 18 nt, Human
gcggcaguggagcccggg

SEQ ID NO: 178113 - RNA, 18 nt, Human
gcggcaguggagcccggg

SEQ ID NO: 178114 - RNA, 24 nt, Human
ggagaggcggcaguggagcccggg

SEQ ID NO: 178115 - RNA, 20 nt, Human
ggcaguggagcccggguccu

SEQ ID NO: 178116 - RNA, 24 nt, Human
ucuuggcuccccuccucucccucc

SEQ ID NO: 178117 - RNA, 19 nt, Human
ugacagcaaggagacaccu

SEQ ID NO: 178118 - RNA, 23 nt, Human
ugagguccgcgucacaagagcuc

SEQ ID NO: 178119 - RNA, 21 nt, Human
uggcuccccuccucucccucc

SEQ ID NO: 178120 - RNA, 21 nt, Human
ugguauccaaggggcuggggg

SEQ ID NO: 178121 - RNA, 25 nt, Human
uuuuuuuuuuuuuuuuuuguuuuuu

SEQ ID NO: 178122 - RNA, 27 nt, Human
uuuuuuuuuuuuuuuuuuuuuuugggg

SEQ ID NO: 178123 - RNA, 19 nt, Human
aaaaccucuucacuuccag

SEQ ID NO: 178124 - RNA, 19 nt, Human
aagcaacaaaaccucuuca

SEQ ID NO: 178125 - RNA, 24 nt, Human
aaucauaggauauugugaaaaaga

SEQ ID NO: 178126 - RNA, 24 nt, Human
agcaaaugcaguguaucgcaaaau

SEQ ID NO: 178127 - RNA, 20 nt, Human
cacuguacaagcaacaaaac

SEQ ID NO: 178128 - RNA, 19 nt, Human
caguaguuuuuuuuucccc

SEQ ID NO: 178129 - RNA, 25 nt, Human
cucuucacuuccaguuauuuccaau

SEQ ID NO: 178130 - RNA, 21 nt, Human
cugacacuguacaagcaacaa

SEQ ID NO: 178131 - RNA, 23 nt, Human
cugacacuguacaagcaacaaaa

SEQ ID NO: 178132 - RNA, 22 nt, Human
gugaaaaagacgcauauuauau

SEQ ID NO: 178133 - RNA, 19 nt, Human
uaaaaauagcaccagcaaa

SEQ ID NO: 178134 - RNA, 24 nt, Human
uaacaguaguuuuuuuuuccccau

SEQ ID NO: 178135 - RNA, 30 nt, Human
uagcaccagcaaaugcaguguaucgcaaaa

SEQ ID NO: 178136 - RNA, 19 nt, Human
uaguuuuuuuuuccccauc

SEQ ID NO: 178137 - RNA, 21 nt, Human
ucgguaauacuaaaaguuucu

SEQ ID NO: 178138 - RNA, 24 nt, Human
ucuauccaccacuaauuuaagaca

SEQ ID NO: 178139 - RNA, 23 nt, Human
ucuuucauuagcaguguuaacag

SEQ ID NO: 178140 - RNA, 20 nt, Human
ugacacuguacaagcaacaa

SEQ ID NO: 178141 - RNA, 24 nt, Human
uuaaagggcauuuucuuucauuag

SEQ ID NO: 178142 - RNA, 22 nt, Human
uuaagacaacucugcuggcuug

SEQ ID NO: 178143 - RNA, 28 nt, Human
uuagcaguguuaacaguaguuuuuuuuu

SEQ ID NO: 178144 - RNA, 18 nt, Human
agcgcagcgcgggucugc

SEQ ID NO: 178145 - RNA, 20 nt, Human
cgaggagggcgcacgcggcg

SEQ ID NO: 178146 - RNA, 23 nt, Human
cucugcagcugcgggcggcugcc

SEQ ID NO: 178147 - RNA, 22 nt, Human
ggagcgcagcgcgggucugcug

SEQ ID NO: 178148 - RNA, 19 nt, Human
uaacuagacacagaaaggg

SEQ ID NO: 178149 - RNA, 27 nt, Human
uccuucgaacuauuugucaagugaaua

SEQ ID NO: 178150 - RNA, 19 nt, Human
aacccucccaggcuuuccu

SEQ ID NO: 178151 - RNA, 21 nt, Human
aagccaugccccuccaacugg

SEQ ID NO: 178152 - RNA, 22 nt, Human
acccucccaggcuuuccuguug

SEQ ID NO: 178153 - RNA, 19 nt, Human
acuauggauuauuuuuccc

SEQ ID NO: 178154 - RNA, 20 nt, Human
caacccucccaggcuuuccu

SEQ ID NO: 178155 - RNA, 18 nt, Human
caaggguuuuggagcgag

SEQ ID NO: 178156 - RNA, 23 nt, Human
caccuccuugcaucccaacaacc

SEQ ID NO: 178157 - RNA, 19 nt, Human
caggcucccuuuccuccuc

SEQ ID NO: 178158 - RNA, 23 nt, Human
caucccaacaacccucccaggcu

SEQ ID NO: 178159 - RNA, 18 nt, Human
cauuuccuuagccuuccc

SEQ ID NO: 178160 - RNA, 23 nt, Human
ccaacaacccucccaggcuuucc

SEQ ID NO: 178161 - RNA, 19 nt, Human
ccagcacccacucucaccc

SEQ ID NO: 178162 - RNA, 20 nt, Human
cccaacaacccucccaggcu

SEQ ID NO: 178163 - RNA, 20 nt, Human
cccccugucuccuuuucauc

SEQ ID NO: 178164 - RNA, 24 nt, Human
ccucuacuccccaaggguuuugga

SEQ ID NO: 178165 - RNA, 18 nt, Human
ccugccuccccagccccg

SEQ ID NO: 178166 - RNA, 19 nt, Human
cgggcacggggaggagcug

SEQ ID NO: 178167 - RNA, 21 nt, Human
cucccaggcuuuccuguugug

SEQ ID NO: 178168 - RNA, 18 nt, Human
cuccuucccucuacuccc

SEQ ID NO: 178169 - RNA, 26 nt, Human
cuccuuuucaucaccuccuugcaucc

SEQ ID NO: 178170 - RNA, 19 nt, Human
cucugaaggaaccguccug

SEQ ID NO: 178171 - RNA, 23 nt, Human
cuggcucacugcuguuguuuucu

SEQ ID NO: 178172 - RNA, 21 nt, Human
gaccugcccgccugugcuccu

SEQ ID NO: 178173 - RNA, 18 nt, Human
gccaugccccuccaacug

SEQ ID NO: 178174 - RNA, 21 nt, Human
ggagcugggaaggagcgggcc

SEQ ID NO: 178175 - RNA, 20 nt, Human
gggagggagagcaggcuccc

SEQ ID NO: 178176 - RNA, 18 nt, Human
ggguguggggagggagag

SEQ ID NO: 178177 - RNA, 18 nt, Human
guggagccccuuuggccu

SEQ ID NO: 178178 - RNA, 23 nt, Human
guguaugcuuuggguggggugug

SEQ ID NO: 178179 - RNA, 19 nt, Human
uaacuuccaucagucucug

SEQ ID NO: 178180 - RNA, 20 nt, Human
ucccaacaacccucccaggc

SEQ ID NO: 178181 - RNA, 21 nt, Human
ucccccugucuccuuuucauc

SEQ ID NO: 178182 - RNA, 22 nt, Human
uccucuggcucacugcuguugu

SEQ ID NO: 178183 - RNA, 22 nt, Human
ucucacccgcugccgggcugga

SEQ ID NO: 178184 - RNA, 22 nt, Human
ugcccgccugugcuccucuggc

SEQ ID NO: 178185 - RNA, 28 nt, Human
ugcccgccugugcuccucuggcucacug

SEQ ID NO: 178186 - RNA, 24 nt, Human
ugcuguuugcucugaaggaaccgu

SEQ ID NO: 178187 - RNA, 27 nt, Human
ugggaaggagcgggccggcaucucccu

SEQ ID NO: 178188 - RNA, 19 nt, Human
uggggagggagagcaggcu

SEQ ID NO: 178189 - RNA, 18 nt, Human
ugggguguggggagggag

SEQ ID NO: 178190 - RNA, 21 nt, Human
ugggugggguguggggaggga

SEQ ID NO: 178191 - RNA, 19 nt, Human
uguaugcuuuggguggggu

SEQ ID NO: 178192 - RNA, 23 nt, Human
uucccccugucuccuuuucauca

SEQ ID NO: 178193 - RNA, 22 nt, Human
uuggagcgagcuggccuccucc

SEQ ID NO: 178194 - RNA, 19 nt, Human
uugugcccaggggcaugca

SEQ ID NO: 178195 - RNA, 21 nt, Human
cacuccuucuauucccauuuc

SEQ ID NO: 178196 - RNA, 24 nt, Human
ccuucuauucccauuucugacauc

SEQ ID NO: 178197 - RNA, 23 nt, Human
cuccuucuauucccauuucugac

SEQ ID NO: 178198 - RNA, 21 nt, Human
uaaaagauuuacccuaagaac

SEQ ID NO: 178199 - RNA, 21 nt, Human
uaagaacacuccuucuauucc

SEQ ID NO: 178200 - RNA, 21 nt, Human
ugacauuucgaucuaaguggu

SEQ ID NO: 178201 - RNA, 20 nt, Human
aaaggaguggacuuucaaaa

SEQ ID NO: 178202 - RNA, 18 nt, Human
aaccgcccccuuucuccu

SEQ ID NO: 178203 - RNA, 19 nt, Human
aagacagagggccagugcu

SEQ ID NO: 178204 - RNA, 20 nt, Human
aagagaacagcggcagcagc

SEQ ID NO: 178205 - RNA, 24 nt, Human
agcggcagcagcaaaggugccucu

SEQ ID NO: 178206 - RNA, 21 nt, Human
aggaagacagagggccagugc

SEQ ID NO: 178207 - RNA, 20 nt, Human
aggcacaaaugugauuugag

SEQ ID NO: 178208 - RNA, 18 nt, Human
aggugaggagaaauggug

SEQ ID NO: 178209 - RNA, 21 nt, Human
agucucaucggaaagcacugu

SEQ ID NO: 178210 - RNA, 27 nt, Human
caaaagcagcggcagcagcuggagacc

SEQ ID NO: 178211 - RNA, 18 nt, Human
cacagcuuccugaccccu

SEQ ID NO: 178212 - RNA, 23 nt, Human
cacccaagcuguguagaugcucc

SEQ ID NO: 178213 - RNA, 24 nt, Human
cacuccucaacucuauccaagccc

SEQ ID NO: 178214 - RNA, 24 nt, Human
cagcagcaguagcagcagaaggaa

SEQ ID NO: 178215 - RNA, 22 nt, Human
cagcaguagcagcagaaggaaa

SEQ ID NO: 178216 - RNA, 26 nt, Human
cagcaguagcagcagaaggaaaggcu

SEQ ID NO: 178217 - RNA, 21 nt, Human
caggaaggggcucuugggaug

SEQ ID NO: 178218 - RNA, 21 nt, Human
caguggcaccuguggcucucc

SEQ ID NO: 178219 - RNA, 20 nt, Human
caucagcagacgggcagcaa

SEQ ID NO: 178220 - RNA, 22 nt, Human
caugaaaggaguggacuuucaa

SEQ ID NO: 178221 - RNA, 20 nt, Human
ccaggagugcaggaaggggc

SEQ ID NO: 178222 - RNA, 20 nt, Human
ccaggcacaaaugugauuug

SEQ ID NO: 178223 - RNA, 21 nt, Human
ccagucccauaguggaaaugc

SEQ ID NO: 178224 - RNA, 23 nt, Human
ccucugugauuccaggagugcag

SEQ ID NO: 178225 - RNA, 19 nt, Human
cggcagcagcaaaggugcc

SEQ ID NO: 178226 - RNA, 28 nt, Human
cggcagcagcaguagcagcagaaggaaa

SEQ ID NO: 178227 - RNA, 19 nt, Human
cucacacuccucaacucua

SEQ ID NO: 178228 - RNA, 24 nt, Human
cuccugagaggugcuuaggagagu

SEQ ID NO: 178229 - RNA, 21 nt, Human
cucuauccaagcccucuccuc

SEQ ID NO: 178230 - RNA, 20 nt, Human
cucuccucuucucucccacu

SEQ ID NO: 178231 - RNA, 21 nt, Human
cugaaugacaccaaagagaac

SEQ ID NO: 178232 - RNA, 18 nt, Human
cugaccccucugugauuc

SEQ ID NO: 178233 - RNA, 19 nt, Human
cugaccccucugugauucc

SEQ ID NO: 178234 - RNA, 20 nt, Human
cugcacaacugacugagggc

SEQ ID NO: 178235 - RNA, 20 nt, Human
cuguguagaugcuccugccu

SEQ ID NO: 178236 - RNA, 24 nt, Human
cuuauuggaauccccuuucaccca

SEQ ID NO: 178237 - RNA, 18 nt, Human
gaaaaaccaugaaaggag

SEQ ID NO: 178238 - RNA, 19 nt, Human
gagaacagcggcagcagcc

SEQ ID NO: 178239 - RNA, 27 nt, Human
gcagcggcagcagcaguagcagcagaa

SEQ ID NO: 178240 - RNA, 19 nt, Human
gcucuugggaugugccacc

SEQ ID NO: 178241 - RNA, 24 nt, Human
ggagaaauggugggcugagucuca

SEQ ID NO: 178242 - RNA, 23 nt, Human
ggcagcaauccucagccagggga

SEQ ID NO: 178243 - RNA, 24 nt, Human
gggcucuugggaugugccacccag

SEQ ID NO: 178244 - RNA, 18 nt, Human
uaaaagggggccuuuagc

SEQ ID NO: 178245 - RNA, 22 nt, Human
uagcagcagaaggaaaggcuuu

SEQ ID NO: 178246 - RNA, 19 nt, Human
uagcccaagucacacucag

SEQ ID NO: 178247 - RNA, 20 nt, Human
uccagaggcugagaaggccc

SEQ ID NO: 178248 - RNA, 21 nt, Human
ucccagggacaggaagucacc

SEQ ID NO: 178249 - RNA, 23 nt, Human
ucccauucagagucugucucccu

SEQ ID NO: 178250 - RNA, 19 nt, Human
ugagacucuugaagucugc

SEQ ID NO: 178251 - RNA, 21 nt, Human
ugaggaggcaguggcaccugu

SEQ ID NO: 178252 - RNA, 22 nt, Human
ugauuugaggaggcaguggcac

SEQ ID NO: 178253 - RNA, 23 nt, Human
uggaaaugcucucguauccagac

SEQ ID NO: 178254 - RNA, 21 nt, Human
uggccagccgcugaaugacac

SEQ ID NO: 178255 - RNA, 20 nt, Human
ugggaugugccacccaggaa

SEQ ID NO: 178256 - RNA, 22 nt, Human
uguguguuuguauccaguccca

SEQ ID NO: 178257 - RNA, 24 nt, Human
uuccugaccccucugugauuccag

SEQ ID NO: 178258 - RNA, 18 nt, Human
uuuggcaggaaaaaccau

SEQ ID NO: 178259 - RNA, 18 nt, Human
aaaacaauauuguauaca

SEQ ID NO: 178260 - RNA, 21 nt, Human
aagaaaagagaaacuuacuau

SEQ ID NO: 178261 - RNA, 22 nt, Human
aagcaaaauuuuaaugcaugua

SEQ ID NO: 178262 - RNA, 18 nt, Human
acugcaguguugcaaagg

SEQ ID NO: 178263 - RNA, 22 nt, Human
acuguagcauacucuaggccua

SEQ ID NO: 178264 - RNA, 21 nt, Human
agcucaaaaacucuggaaauc

SEQ ID NO: 178265 - RNA, 22 nt, Human
aggaaaaugccccugaagaaaa

SEQ ID NO: 178266 - RNA, 20 nt, Human
auccauuccucauuuggagg

SEQ ID NO: 178267 - RNA, 20 nt, Human
augaacgcuuaauauaaauc

SEQ ID NO: 178268 - RNA, 18 nt, Human
auuuaaucugcuaauuug

SEQ ID NO: 178269 - RNA, 22 nt, Human
caaccucuagaaaaaugauucu

SEQ ID NO: 178270 - RNA, 23 nt, Human
cacuuuauacagccaucaugaau

SEQ ID NO: 178271 - RNA, 20 nt, Human
cauaaaaacugcaguguugc

SEQ ID NO: 178272 - RNA, 22 nt, Human
ccuucuagcucaaaaacucugg

SEQ ID NO: 178273 - RNA, 19 nt, Human
gacugccuuuuaagauaau

SEQ ID NO: 178274 - RNA, 22 nt, Human
gagaaacuuacuauuuuacuga

SEQ ID NO: 178275 - RNA, 22 nt, Human
gagauuuaaacacaaugacagu

SEQ ID NO: 178276 - RNA, 21 nt, Human
gcugcaccaucccuauuuuug

SEQ ID NO: 178277 - RNA, 23 nt, Human
uaaaaaaggagacacuuauuuac

SEQ ID NO: 178278 - RNA, 18 nt, Human
uaccaaguauacuaccau

SEQ ID NO: 178279 - RNA, 18 nt, Human
uacuuuucuuuugcuuuu

SEQ ID NO: 178280 - RNA, 22 nt, Human
uagcucaaaaacucuggaaauc

SEQ ID NO: 178281 - RNA, 22 nt, Human
uauaccaaaguaaauaaaaaag

SEQ ID NO: 178282 - RNA, 22 nt, Human
ucaaggagaaucgcuuucauuu

SEQ ID NO: 178283 - RNA, 24 nt, Human
ucacagcuucaaaauuguugaggg

SEQ ID NO: 178284 - RNA, 21 nt, Human
ugaaauguccuuaguguaaaa

SEQ ID NO: 178285 - RNA, 23 nt, Human
ugacaguaaaccauugaaauuuc

SEQ ID NO: 178286 - RNA, 22 nt, Human
ugacugccuuuuaagauaaugc

SEQ ID NO: 178287 - RNA, 23 nt, Human
ugagagacaacuugccacaccag

SEQ ID NO: 178288 - RNA, 19 nt, Human
ugauuguaauauaaccauc

SEQ ID NO: 178289 - RNA, 21 nt, Human
uggaugguuaaaugccaacca

SEQ ID NO: 178290 - RNA, 20 nt, Human
uguaagaaauaauuucauuu

SEQ ID NO: 178291 - RNA, 19 nt, Human
uguaauauaaccaucuaau

SEQ ID NO: 178292 - RNA, 24 nt, Human
uguuuuuuaugugauaaaccuggu

SEQ ID NO: 178293 - RNA, 23 nt, Human
uuaaagaaaauccauuccucauu

SEQ ID NO: 178294 - RNA, 20 nt, Human
uuaguuuacauacuguagcu

SEQ ID NO: 178295 - RNA, 18 nt, Human
uucuccaaguaugcuaca

SEQ ID NO: 178296 - RNA, 21 nt, Human
aaacagcaaaucaaccuccaa

SEQ ID NO: 178297 - RNA, 22 nt, Human
aaaucaaccuccaacggggcca

SEQ ID NO: 178298 - RNA, 18 nt, Human
aacacaaagacaagaaac

SEQ ID NO: 178299 - RNA, 18 nt, Human
aagggcugggaggggcug

SEQ ID NO: 178300 - RNA, 20 nt, Human
aagggcugggaggggcuggg

SEQ ID NO: 178301 - RNA, 23 nt, Human
acaaagacaagaaacaaaacagc

SEQ ID NO: 178302 - RNA, 22 nt, Human
acagaacacaaagacaagaaac

SEQ ID NO: 178303 - RNA, 19 nt, Human
acagagcagaagaauuagg

SEQ ID NO: 178304 - RNA, 20 nt, Human
acagagcagaagaauuaggg

SEQ ID NO: 178305 - RNA, 18 nt, Human
agaacacaaagacaagaa

SEQ ID NO: 178306 - RNA, 19 nt, Human
agacaagaaacaaaacagc

SEQ ID NO: 178307 - RNA, 21 nt, Human
agaggaugcuauccaaccccc

SEQ ID NO: 178308 - RNA, 20 nt, Human
agaguuggugggggggaggu

SEQ ID NO: 178309 - RNA, 22 nt, Human
agcagaagaauuaggggugggg

SEQ ID NO: 178310 - RNA, 22 nt, Human
agcccucgaggagaacagacac

SEQ ID NO: 178311 - RNA, 24 nt, Human
agcggugggggcagaagucaccuu

SEQ ID NO: 178312 - RNA, 21 nt, Human
aggagaacagacacaggcugg

SEQ ID NO: 178313 - RNA, 21 nt, Human
aggauaaggaagggccaagaa

SEQ ID NO: 178314 - RNA, 24 nt, Human
aggauaaggaagggccaagaaaga

SEQ ID NO: 178315 - RNA, 20 nt, Human
aggccacuacagugggggua

SEQ ID NO: 178316 - RNA, 24 nt, Human
caaaacagcaaaucaaccuccaac

SEQ ID NO: 178317 - RNA, 22 nt, Human
caagaaacaaaacagcaaauca

SEQ ID NO: 178318 - RNA, 26 nt, Human
caaguaccacagaacacaaagacaag

SEQ ID NO: 178319 - RNA, 24 nt, Human
caccgcagcagucgccgccgccac

SEQ ID NO: 178320 - RNA, 23 nt, Human
cagaaagggugggucaaaguuaa

SEQ ID NO: 178321 - RNA, 19 nt, Human
cagaacacaaagacaagaa

SEQ ID NO: 178322 - RNA, 20 nt, Human
cagaacacaaagacaagaaa

SEQ ID NO: 178323 - RNA, 20 nt, Human
cagacacaggcuggggcagc

SEQ ID NO: 178324 - RNA, 20 nt, Human
cagcaaaucaaccuccaacg

SEQ ID NO: 178325 - RNA, 18 nt, Human
caugcccaagccuucccc

SEQ ID NO: 178326 - RNA, 27 nt, Human
ccacagaacacaaagacaagaaacaaa

SEQ ID NO: 178327 - RNA, 19 nt, Human
ccacuacaguggggguaag

SEQ ID NO: 178328 - RNA, 23 nt, Human
ccagcgcccgcucggcuccuccu

SEQ ID NO: 178329 - RNA, 19 nt, Human
ccgccgccaccgccgccgc

SEQ ID NO: 178330 - RNA, 21 nt, Human
ccgccgccaccgccgccgccg

SEQ ID NO: 178331 - RNA, 18 nt, Human
ccuccacgucuucccaaa

SEQ ID NO: 178332 - RNA, 24 nt, Human
cgcucggcuccuccuccuccuuca

SEQ ID NO: 178333 - RNA, 27 nt, Human
cuacaguggggguaagagcgguggggg

SEQ ID NO: 178334 - RNA, 24 nt, Human
cuauccaaccccccaucucccaag

SEQ ID NO: 178335 - RNA, 18 nt, Human
cuuccccacucccccagg

SEQ ID NO: 178336 - RNA, 23 nt, Human
cuuugugcugggagggccccuuc

SEQ ID NO: 178337 - RNA, 24 nt, Human
gaaacaaaacagcaaaucaaccuc

SEQ ID NO: 178338 - RNA, 21 nt, Human
gaggugggggcaucuccaaag

SEQ ID NO: 178339 - RNA, 22 nt, Human
gcagggcacacugggguuuggg

SEQ ID NO: 178340 - RNA, 25 nt, Human
gcucacucgacagcccucaggccac

SEQ ID NO: 178341 - RNA, 19 nt, Human
ggaaggggacacauucacu

SEQ ID NO: 178342 - RNA, 19 nt, Human
ggcagcaggggcugggggc

SEQ ID NO: 178343 - RNA, 20 nt, Human
ggcagcaggggcugggggcg

SEQ ID NO: 178344 - RNA, 21 nt, Human
ggcuccuccuccuccuucacc

SEQ ID NO: 178345 - RNA, 20 nt, Human
gggaagcagaggaugcugga

SEQ ID NO: 178346 - RNA, 21 nt, Human
gggaagcagaggaugcuggag

SEQ ID NO: 178347 - RNA, 20 nt, Human
ggggcagcaggggcuggggg

SEQ ID NO: 178348 - RNA, 25 nt, Human
ggggcagggcacacugggguuuggg

SEQ ID NO: 178349 - RNA, 18 nt, Human
ggguaagagcgguggggg

SEQ ID NO: 178350 - RNA, 22 nt, Human
gggugaugggaacguggugggg

SEQ ID NO: 178351 - RNA, 21 nt, Human
ggucaggccucggugccagcg

SEQ ID NO: 178352 - RNA, 23 nt, Human
guggugggggaagcagaggaugc

SEQ ID NO: 178353 - RNA, 22 nt, Human
uaagagcggugggggcagaagu

SEQ ID NO: 178354 - RNA, 29 nt, Human
uaccacagaacacaaagacaagaaacaaa

SEQ ID NO: 178355 - RNA, 20 nt, Human
uagaauaaauuaggggggag

SEQ ID NO: 178356 - RNA, 25 nt, Human
uauccaaccccccaucucccaagcc

SEQ ID NO: 178357 - RNA, 21 nt, Human
ucccccaggcugggcaagggc

SEQ ID NO: 178358 - RNA, 19 nt, Human
uccuaggauaaggaagggc

SEQ ID NO: 178359 - RNA, 22 nt, Human
uccuccacgucuucccaaacag

SEQ ID NO: 178360 - RNA, 24 nt, Human
ucgccgccgccaccgccgccgccg

SEQ ID NO: 178361 - RNA, 19 nt, Human
ucucuccaacacgcgagag

SEQ ID NO: 178362 - RNA, 20 nt, Human
ugcugggagggccccuucuc

SEQ ID NO: 178363 - RNA, 23 nt, Human
ugggagguuuuguuuucugugaa

SEQ ID NO: 178364 - RNA, 20 nt, Human
uggggcagcaggggcugggg

SEQ ID NO: 178365 - RNA, 18 nt, Human
uggggguaagagcggugg

SEQ ID NO: 178366 - RNA, 24 nt, Human
uggggguaagagcggugggggcag

SEQ ID NO: 178367 - RNA, 20 nt, Human
ugggugaugggaacguggug

SEQ ID NO: 178368 - RNA, 27 nt, Human
ugugcugggagggccccuucucuccaa

SEQ ID NO: 178369 - RNA, 24 nt, Human
uucccaccuccuucugcuuggcuc

SEQ ID NO: 178370 - RNA, 21 nt, Human
uuccuccacgucuucccaaac

SEQ ID NO: 178371 - RNA, 23 nt, Human
uuuauugggagguuuuguuuucu

SEQ ID NO: 178372 - RNA, 26 nt, Human
uuuauugggagguuuuguuuucugug

SEQ ID NO: 178373 - RNA, 23 nt, Human
aaaaaaaagccaguuugguuaaa

SEQ ID NO: 178374 - RNA, 20 nt, Human
aaacuuccggaugcuguccc

SEQ ID NO: 178375 - RNA, 23 nt, Human
aacauuugacauaauacaaaaua

SEQ ID NO: 178376 - RNA, 23 nt, Human
aagagaaagagaggaaaauggag

SEQ ID NO: 178377 - RNA, 19 nt, Human
aauagccacuccaugaaac

SEQ ID NO: 178378 - RNA, 21 nt, Human
aaucauuuggagccauuuuga

SEQ ID NO: 178379 - RNA, 18 nt, Human
acaggcuuucuccaaaug

SEQ ID NO: 178380 - RNA, 23 nt, Human
acgaggcugggaggcgcucuugg

SEQ ID NO: 178381 - RNA, 22 nt, Human
agcuggcgacaaggcgagaccg

SEQ ID NO: 178382 - RNA, 18 nt, Human
aggcgcggacgcaggacc

SEQ ID NO: 178383 - RNA, 19 nt, Human
aggcugggaggcgcucuug

SEQ ID NO: 178384 - RNA, 20 nt, Human
cacagcgcucuucauucucu

SEQ ID NO: 178385 - RNA, 18 nt, Human
cacgccugagauacaaaa

SEQ ID NO: 178386 - RNA, 18 nt, Human
caguacagaaaucauuug

SEQ ID NO: 178387 - RNA, 21 nt, Human
cauuuucauuacaaaagcagg

SEQ ID NO: 178388 - RNA, 24 nt, Human
ccagaauuuggcuuuauuuugcag

SEQ ID NO: 178389 - RNA, 24 nt, Human
ccauuuugagacagaaguagaggc

SEQ ID NO: 178390 - RNA, 25 nt, Human
cgcuuccucuccccuucucucucaa

SEQ ID NO: 178391 - RNA, 22 nt, Human
cuagaaaaaaaaaaaagccagu

SEQ ID NO: 178392 - RNA, 22 nt, Human
cuucacuagaaaaaaaaaaaag

SEQ ID NO: 178393 - RNA, 25 nt, Human
gaagaagccacgccugagauacaaa

SEQ ID NO: 178394 - RNA, 21 nt, Human
gaaggggaguauuuacuggca

SEQ ID NO: 178395 - RNA, 20 nt, Human
gacccgagcaaggaaaaggc

SEQ ID NO: 178396 - RNA, 19 nt, Human
gcaggcgcggacgcaggac

SEQ ID NO: 178397 - RNA, 21 nt, Human
gcaguacagaaaucauuugga

SEQ ID NO: 178398 - RNA, 23 nt, Human
ggacgcaggacccgagcaaggaa

SEQ ID NO: 178399 - RNA, 18 nt, Human
uaaauugaacagaaugug

SEQ ID NO: 178400 - RNA, 25 nt, Human
uaacuucacuagaaaaaaaaaaaag

SEQ ID NO: 178401 - RNA, 22 nt, Human
uacugcauugcagcuuggucca

SEQ ID NO: 178402 - RNA, 26 nt, Human
uagaaaaaaaaaaaagccaguuuggu

SEQ ID NO: 178403 - RNA, 20 nt, Human
uauguucgcuuccucucccc

SEQ ID NO: 178404 - RNA, 25 nt, Human
uauugauuucauuauaugcauuauu

SEQ ID NO: 178405 - RNA, 26 nt, Human
ucaacuuuauuagguuaaaacaccac

SEQ ID NO: 178406 - RNA, 23 nt, Human
ucacuagaaaaaaaaaaaagcca

SEQ ID NO: 178407 - RNA, 24 nt, Human
ucauuacaaaagcaggccuuacaa

SEQ ID NO: 178408 - RNA, 20 nt, Human
uccaaaugacucccuauguc

SEQ ID NO: 178409 - RNA, 24 nt, Human
uccugaaccucaagaggacagaug

SEQ ID NO: 178410 - RNA, 19 nt, Human
ucugugucgguaucccaau

SEQ ID NO: 178411 - RNA, 21 nt, Human
ucuugggcgcgaaggaaaggg

SEQ ID NO: 178412 - RNA, 22 nt, Human
uggcacagcgcucuucauucuc

SEQ ID NO: 178413 - RNA, 22 nt, Human
uguggcuaugcuauuugggccc

SEQ ID NO: 178414 - RNA, 24 nt, Human
uucgcuuccucuccccuucucucu

SEQ ID NO: 178415 - RNA, 19 nt, Human
uugagacagaaguagaggc

SEQ ID NO: 178416 - RNA, 21 nt, Human
uugagacagaaguagaggcuc

SEQ ID NO: 178417 - RNA, 20 nt, Human
uuuagaaucuccugaaccuu

SEQ ID NO: 178418 - RNA, 21 nt, Human
uuuaugcccacauaaaccaaa

SEQ ID NO: 178419 - RNA, 22 nt, Human
uuuaugcccacauaaaccaaac

SEQ ID NO: 178420 - RNA, 25 nt, Human
uuuauguucgcuuccucuccccuuc

SEQ ID NO: 178421 - RNA, 18 nt, Human
aauggccuucaacaaggg

SEQ ID NO: 178422 - RNA, 20 nt, Human
acauacaagggucaaccaaa

SEQ ID NO: 178423 - RNA, 18 nt, Human
augugaacaccaaacaca

SEQ ID NO: 178424 - RNA, 21 nt, Human
cagggguucucuucucaacuu

SEQ ID NO: 178425 - RNA, 26 nt, Human
cauaaauaugcuuuaucaaauguuaa

SEQ ID NO: 178426 - RNA, 20 nt, Human
cauacaagggucaaccaaag

SEQ ID NO: 178427 - RNA, 18 nt, Human
ccaaaauagaagaaacac

SEQ ID NO: 178428 - RNA, 19 nt, Human
ccacucucucccuucuccg

SEQ ID NO: 178429 - RNA, 21 nt, Human
cccacaaggcuaauacgcuag

SEQ ID NO: 178430 - RNA, 19 nt, Human
cucauugacagcuuucuua

SEQ ID NO: 178431 - RNA, 18 nt, Human
cugagcgcacguuccagg

SEQ ID NO: 178432 - RNA, 18 nt, Human
gaacaccaaacacauccu

SEQ ID NO: 178433 - RNA, 21 nt, Human
gauucguagaaaguuuucccu

SEQ ID NO: 178434 - RNA, 22 nt, Human
ggaaaccacaucuaacuuaagu

SEQ ID NO: 178435 - RNA, 22 nt, Human
gugaacaccaaacacauccucu

SEQ ID NO: 178436 - RNA, 22 nt, Human
uaagacauauagguaaaaacuu

SEQ ID NO: 178437 - RNA, 30 nt, Human
uagaaaguuuucccuccuuugaagaaacuc

SEQ ID NO: 178438 - RNA, 23 nt, Human
uauccaaaauagaagaaacacau

SEQ ID NO: 178439 - RNA, 19 nt, Human
ucaaagucacauaucagaa

SEQ ID NO: 178440 - RNA, 18 nt, Human
ucagacuucugauuauac

SEQ ID NO: 178441 - RNA, 22 nt, Human
uccaaaauagaagaaacacaug

SEQ ID NO: 178442 - RNA, 26 nt, Human
uccaaaauagaagaaacacaugugaa

SEQ ID NO: 178443 - RNA, 21 nt, Human
ucccacucucucccuucuccg

SEQ ID NO: 178444 - RNA, 20 nt, Human
ucccagugcugagcgcacgu

SEQ ID NO: 178445 - RNA, 20 nt, Human
uccgcgcugggauacccggg

SEQ ID NO: 178446 - RNA, 19 nt, Human
ucgaaaguucugcgggcug

SEQ ID NO: 178447 - RNA, 21 nt, Human
ucucgggccgucccccuuacu

SEQ ID NO: 178448 - RNA, 19 nt, Human
ucugggugacccuggguuc

SEQ ID NO: 178449 - RNA, 21 nt, Human
ugaaaaagauagaaaauggua

SEQ ID NO: 178450 - RNA, 19 nt, Human
ugaacaccaaacacauccu

SEQ ID NO: 178451 - RNA, 23 nt, Human
ugacuaaauagaaucugauucaa

SEQ ID NO: 178452 - RNA, 21 nt, Human
ugggaaaaauuuuuaaugaug

SEQ ID NO: 178453 - RNA, 19 nt, Human
ugugaacaccaaacacauc

SEQ ID NO: 178454 - RNA, 21 nt, Human
uucagacuucugauuauacau

SEQ ID NO: 178455 - RNA, 19 nt, Human
uugcuaagccuuuguuucc

SEQ ID NO: 178456 - RNA, 25 nt, Human
uuggccucaaagucacauaucagaa

SEQ ID NO: 178457 - RNA, 21 nt, Human
uuuccuggaaauaaauacuga

SEQ ID NO: 178458 - RNA, 21 nt, Human
uuugcuaagccuuuguuucca

SEQ ID NO: 178459 - RNA, 22 nt, Human
uuuguaagcuuuacuucccuac

SEQ ID NO: 178460 - RNA, 21 nt, Human
aaaaacaucuagggaccagag

SEQ ID NO: 178461 - RNA, 18 nt, Human
aaagagccuauguccaca

SEQ ID NO: 178462 - RNA, 21 nt, Human
aacuacaagccgucagagaca

SEQ ID NO: 178463 - RNA, 21 nt, Human
aagguaucaauaguccuaaaa

SEQ ID NO: 178464 - RNA, 24 nt, Human
aaucaucaccccucggccucuaga

SEQ ID NO: 178465 - RNA, 23 nt, Human
acaagccgucagagacaagagaa

SEQ ID NO: 178466 - RNA, 19 nt, Human
acccccuccucuucucuuc

SEQ ID NO: 178467 - RNA, 21 nt, Human
accccucggccucuagaacag

SEQ ID NO: 178468 - RNA, 22 nt, Human
acccuuucggugugucccacca

SEQ ID NO: 178469 - RNA, 18 nt, Human
accuauggccaaagagcc

SEQ ID NO: 178470 - RNA, 19 nt, Human
acugaagggaaaacacaca

SEQ ID NO: 178471 - RNA, 19 nt, Human
agagacccuuucggugugu

SEQ ID NO: 178472 - RNA, 18 nt, Human
aggaaggguccagcugca

SEQ ID NO: 178473 - RNA, 21 nt, Human
aggagaccacaauugagucua

SEQ ID NO: 178474 - RNA, 18 nt, Human
aggagagucaacaugaug

SEQ ID NO: 178475 - RNA, 21 nt, Human
aguccuaaaaugcagcaacuc

SEQ ID NO: 178476 - RNA, 19 nt, Human
auggccaaagagccuaugu

SEQ ID NO: 178477 - RNA, 23 nt, Human
augugaagccagagacccuuucg

SEQ ID NO: 178478 - RNA, 23 nt, Human
auucccguugguaauuucagcuu

SEQ ID NO: 178479 - RNA, 21 nt, Human
auuuccaaccuaaaauucuga

SEQ ID NO: 178480 - RNA, 20 nt, Human
caaaacagcuagauaccagc

SEQ ID NO: 178481 - RNA, 21 nt, Human
caaacaagcaugacacacuuc

SEQ ID NO: 178482 - RNA, 23 nt, Human
caagggaaggaaggguccagcug

SEQ ID NO: 178483 - RNA, 23 nt, Human
caauuaucaccacuaugccaucc

SEQ ID NO: 178484 - RNA, 21 nt, Human
cacagccgaccgcucguagcc

SEQ ID NO: 178485 - RNA, 22 nt, Human
caccaagggaaggaagggucca

SEQ ID NO: 178486 - RNA, 19 nt, Human
caccuauggccaaagagcc

SEQ ID NO: 178487 - RNA, 27 nt, Human
cagaaguuucuccucuuugggugaaac

SEQ ID NO: 178488 - RNA, 24 nt, Human
cagggugaugagaaaaugugaagc

SEQ ID NO: 178489 - RNA, 22 nt, Human
cauccccaacaccuauggccaa

SEQ ID NO: 178490 - RNA, 20 nt, Human
ccaaaacagcuagauaccag

SEQ ID NO: 178491 - RNA, 21 nt, Human
cccaacaccuauggccaaaga

SEQ ID NO: 178492 - RNA, 25 nt, Human
cccauaacuacaagccgucagagac

SEQ ID NO: 178493 - RNA, 24 nt, Human
ccccaacaccuauggccaaagagc

SEQ ID NO: 178494 - RNA, 23 nt, Human
ccccagauacuauuaaguccuuu

SEQ ID NO: 178495 - RNA, 23 nt, Human
ccccucggccucuagaacagcuc

SEQ ID NO: 178496 - RNA, 23 nt, Human
ccgucagagacaagagaagcugc

SEQ ID NO: 178497 - RNA, 23 nt, Human
ccuauggccaaagagccuauguc

SEQ ID NO: 178498 - RNA, 23 nt, Human
ccuccaaaacagcuagauaccag

SEQ ID NO: 178499 - RNA, 19 nt, Human
cgaggagaccaauguaaug

SEQ ID NO: 178500 - RNA, 18 nt, Human
cggagcugguggcacaga

SEQ ID NO: 178501 - RNA, 18 nt, Human
cggccucuagaacagcuc

SEQ ID NO: 178502 - RNA, 18 nt, Human
cgggcccacgcggacaag

SEQ ID NO: 178503 - RNA, 23 nt, Human
cuaaaaugcagcaacuccaucuc

SEQ ID NO: 178504 - RNA, 22 nt, Human
cuccucuucucuucagaaaggg

SEQ ID NO: 178505 - RNA, 19 nt, Human
cuccugccccauaacuaca

SEQ ID NO: 178506 - RNA, 21 nt, Human
cugcagcgggcgcaguaccag

SEQ ID NO: 178507 - RNA, 19 nt, Human
cugguggcacagagguugu

SEQ ID NO: 178508 - RNA, 18 nt, Human
gaacagcuccagauucga

SEQ ID NO: 178509 - RNA, 18 nt, Human
gaagacggagguccgcgc

SEQ ID NO: 178510 - RNA, 21 nt, Human
gagacaagagaagcugccaca

SEQ ID NO: 178511 - RNA, 25 nt, Human
gagguccgcgcggcgaagccaaaga

SEQ ID NO: 178512 - RNA, 21 nt, Human
gauugagugagaucccauugc

SEQ ID NO: 178513 - RNA, 23 nt, Human
gauuuugcccuucugaugaggca

SEQ ID NO: 178514 - RNA, 18 nt, Human
gcaguuucuucaaggugu

SEQ ID NO: 178515 - RNA, 21 nt, Human
gcauucccguugguaauuuca

SEQ ID NO: 178516 - RNA, 19 nt, Human
gccucuagaacagcuccag

SEQ ID NO: 178517 - RNA, 21 nt, Human
gugaagccagagacccuuucg

SEQ ID NO: 178518 - RNA, 25 nt, Human
guuuuugucucuacaucccauauuu

SEQ ID NO: 178519 - RNA, 27 nt, Human
uaaaaaaagguaucaauaguccuaaaa

SEQ ID NO: 178520 - RNA, 19 nt, Human
uaaaacugaagggaaaaca

SEQ ID NO: 178521 - RNA, 21 nt, Human
uaacugcagaggugaaagaug

SEQ ID NO: 178522 - RNA, 24 nt, Human
uaaguccuuuacucgaggagacca

SEQ ID NO: 178523 - RNA, 22 nt, Human
uaauagcuguuugucauccucu

SEQ ID NO: 178524 - RNA, 20 nt, Human
uagaacagcuccagauucga

SEQ ID NO: 178525 - RNA, 21 nt, Human
uagagaugaccaacacucugc

SEQ ID NO: 178526 - RNA, 23 nt, Human
uaucuuuggcuuuaaucugauuc

SEQ ID NO: 178527 - RNA, 18 nt, Human
ucaaaaucaucaccccuc

SEQ ID NO: 178528 - RNA, 21 nt, Human
ucagauccaccguugucuaug

SEQ ID NO: 178529 - RNA, 18 nt, Human
ucaucaccccucggccuc

SEQ ID NO: 178530 - RNA, 22 nt, Human
uccaucucaaacaagcaugaca

SEQ ID NO: 178531 - RNA, 30 nt, Human
uccccaacaccuauggccaaagagccuauu

SEQ ID NO: 178532 - RNA, 23 nt, Human
uccucuugguuuauagauaaaca

SEQ ID NO: 178533 - RNA, 23 nt, Human
ucuccaaagaguaucuuuggcuu

SEQ ID NO: 178534 - RNA, 24 nt, Human
ucuccuaugacucgaaacgggggu

SEQ ID NO: 178535 - RNA, 21 nt, Human
ucugaaguuuccucuugguuu

SEQ ID NO: 178536 - RNA, 24 nt, Human
ucugacaggagagucaacaugaug

SEQ ID NO: 178537 - RNA, 22 nt, Human
ucuuuggcuuuaaucugauucu

SEQ ID NO: 178538 - RNA, 23 nt, Human
ucuuuuggauuacugcaaaaaca

SEQ ID NO: 178539 - RNA, 22 nt, Human
ugaaucacuucuucuaaagcuu

SEQ ID NO: 178540 - RNA, 21 nt, Human
ugagaaaaugugaagccagag

SEQ ID NO: 178541 - RNA, 22 nt, Human
ugagaucccauugcaacaguuc

SEQ ID NO: 178542 - RNA, 21 nt, Human
ugcauguucugucacaacugu

SEQ ID NO: 178543 - RNA, 24 nt, Human
uggcuaaguagcaaccuuuuguua

SEQ ID NO: 178544 - RNA, 22 nt, Human
uuccaguggcuaaguagcaacc

SEQ ID NO: 178545 - RNA, 26 nt, Human
uucucuucagaaagggcaauuucaaa

SEQ ID NO: 178546 - RNA, 18 nt, Human
uugcaacaguucaccucc

SEQ ID NO: 178547 - RNA, 18 nt, Human
uugguaauuucagcuucu

SEQ ID NO: 178548 - RNA, 24 nt, Human
uuuauaauuaaauaguauuuaggg

SEQ ID NO: 178549 - RNA, 19 nt, Human
uuuguuauaaaacugaagg

SEQ ID NO: 178550 - RNA, 19 nt, Human
aaagucaugcccugccccc

SEQ ID NO: 178551 - RNA, 21 nt, Human
aaccaaaagacaaaacaagcc

SEQ ID NO: 178552 - RNA, 23 nt, Human
aaccaaaagacaaaacaagccuc

SEQ ID NO: 178553 - RNA, 21 nt, Human
aagaggccuuuagaaauggga

SEQ ID NO: 178554 - RNA, 23 nt, Human
aagaggccuuuagaaaugggaca

SEQ ID NO: 178555 - RNA, 22 nt, Human
aagcagcagucccaggggcuca

SEQ ID NO: 178556 - RNA, 19 nt, Human
aaggcagcagcagugcccu

SEQ ID NO: 178557 - RNA, 22 nt, Human
aagugcaacuggucacccacaa

SEQ ID NO: 178558 - RNA, 24 nt, Human
aagugcaacuggucacccacaacc

SEQ ID NO: 178559 - RNA, 18 nt, Human
aagugcugagaaucaagc

SEQ ID NO: 178560 - RNA, 24 nt, Human
aauugccuccuccuccaucucuac

SEQ ID NO: 178561 - RNA, 18 nt, Human
acacagcaaggaagaggc

SEQ ID NO: 178562 - RNA, 20 nt, Human
acacaggaggcugagguggg

SEQ ID NO: 178563 - RNA, 20 nt, Human
accaaaagacaaaacaagcc

SEQ ID NO: 178564 - RNA, 25 nt, Human
accucaucccucuccacguacacaa

SEQ ID NO: 178565 - RNA, 23 nt, Human
agacguguggcaguggcuuacug

SEQ ID NO: 178566 - RNA, 24 nt, Human
agaggagggaggggagcagcuggg

SEQ ID NO: 178567 - RNA, 21 nt, Human
agaggcuggggcggccuggua

SEQ ID NO: 178568 - RNA, 19 nt, Human
agcagcugggguggugggg

SEQ ID NO: 178569 - RNA, 20 nt, Human
agcagcugggguggugggga

SEQ ID NO: 178570 - RNA, 19 nt, Human
agccccccucuaucccucc

SEQ ID NO: 178571 - RNA, 24 nt, Human
agcuacacaggaggcugagguggg

SEQ ID NO: 178572 - RNA, 19 nt, Human
agcugggggccaggcagcc

SEQ ID NO: 178573 - RNA, 21 nt, Human
aggagggaggggagcagcugg

SEQ ID NO: 178574 - RNA, 21 nt, Human
aggcugagguggguagacugc

SEQ ID NO: 178575 - RNA, 22 nt, Human
aggcugcaggaauaugagccag

SEQ ID NO: 178576 - RNA, 19 nt, Human
agggaggggagcagcuggg

SEQ ID NO: 178577 - RNA, 23 nt, Human
aguuucuuguuaguuggaguugc

SEQ ID NO: 178578 - RNA, 19 nt, Human
aguuuuccuccagcagccu

SEQ ID NO: 178579 - RNA, 22 nt, Human
aucccaauugccuccuccucca

SEQ ID NO: 178580 - RNA, 23 nt, Human
auccccuuucucuccuguuucag

SEQ ID NO: 178581 - RNA, 27 nt, Human
aucccucuccacguacacaacagaucc

SEQ ID NO: 178582 - RNA, 20 nt, Human
aucugggcaggugacugccc

SEQ ID NO: 178583 - RNA, 23 nt, Human
augggacaaagucaugcccugcc

SEQ ID NO: 178584 - RNA, 24 nt, Human
auuagcagcagcagcagcagcagg

SEQ ID NO: 178585 - RNA, 20 nt, Human
auugccuccuccuccaucuc

SEQ ID NO: 178586 - RNA, 23 nt, Human
caacuggucacccacaaccccua

SEQ ID NO: 178587 - RNA, 20 nt, Human
caagccucuggccagggcua

SEQ ID NO: 178588 - RNA, 23 nt, Human
caagccucuggccagggcuaccu

SEQ ID NO: 178589 - RNA, 20 nt, Human
caagcucccaccugcccaca

SEQ ID NO: 178590 - RNA, 18 nt, Human
cacaggaggcugaggugg

SEQ ID NO: 178591 - RNA, 19 nt, Human
cacaggaggcugagguggg

SEQ ID NO: 178592 - RNA, 22 nt, Human
cacggggcaguccuccugggcu

SEQ ID NO: 178593 - RNA, 22 nt, Human
cacuaugggguggagaggguca

SEQ ID NO: 178594 - RNA, 21 nt, Human
cagaucccccaagugcugaga

SEQ ID NO: 178595 - RNA, 28 nt, Human
cagcagcagcagcagcagguggcaggaa

SEQ ID NO: 178596 - RNA, 19 nt, Human
cagcagugcccugaagauu

SEQ ID NO: 178597 - RNA, 22 nt, Human
cagcagugcccugaagauuagc

SEQ ID NO: 178598 - RNA, 24 nt, Human
cagcuacacaggaggcugaggugg

SEQ ID NO: 178599 - RNA, 20 nt, Human
cauaaaaaccaaaagacaaa

SEQ ID NO: 178600 - RNA, 22 nt, Human
caucccucuccacguacacaac

SEQ ID NO: 178601 - RNA, 21 nt, Human
caucucuaccagcguccccuc

SEQ ID NO: 178602 - RNA, 19 nt, Human
ccaaaagacaaaacaagcc

SEQ ID NO: 178603 - RNA, 23 nt, Human
ccaaucuauaaucccagcuacac

SEQ ID NO: 178604 - RNA, 21 nt, Human
ccagcagaggcggagcaacua

SEQ ID NO: 178605 - RNA, 24 nt, Human
cccacagcugggggccaggcagcc

SEQ ID NO: 178606 - RNA, 22 nt, Human
ccccaagugcugagaaucaagc

SEQ ID NO: 178607 - RNA, 21 nt, Human
ccccagguggcaggacguccc

SEQ ID NO: 178608 - RNA, 19 nt, Human
ccccauggauacauccccu

SEQ ID NO: 178609 - RNA, 18 nt, Human
ccccccgcccuccucccc

SEQ ID NO: 178610 - RNA, 19 nt, Human
ccccuucucuccuuccucc

SEQ ID NO: 178611 - RNA, 22 nt, Human
ccccuucucuccuuccuccuca

SEQ ID NO: 178612 - RNA, 19 nt, Human
ccccuuucucuccuguuuc

SEQ ID NO: 178613 - RNA, 20 nt, Human
cccgcccuccuccccuucuc

SEQ ID NO: 178614 - RNA, 18 nt, Human
cccuccuccccuucucuc

SEQ ID NO: 178615 - RNA, 19 nt, Human
cccugagcacccggccucc

SEQ ID NO: 178616 - RNA, 22 nt, Human
ccgcccuccuccccuucucucc

SEQ ID NO: 178617 - RNA, 25 nt, Human
ccuccuccccuucucuccuuccucc

SEQ ID NO: 178618 - RNA, 24 nt, Human
ccucuccacguacacaacagaucc

SEQ ID NO: 178619 - RNA, 24 nt, Human
ccucucuguacccacagcuggggg

SEQ ID NO: 178620 - RNA, 23 nt, Human
ccugcccacagcgugcccacaga

SEQ ID NO: 178621 - RNA, 23 nt, Human
cuagaauacuggguacauuuugu

SEQ ID NO: 178622 - RNA, 25 nt, Human
cuccaaucuauaaucccagcuacac

SEQ ID NO: 178623 - RNA, 18 nt, Human
cucccagucccaucucug

SEQ ID NO: 178624 - RNA, 19 nt, Human
cuccugggcuugaccucuc

SEQ ID NO: 178625 - RNA, 20 nt, Human
cucuaccagcguccccucca

SEQ ID NO: 178626 - RNA, 21 nt, Human
cucugggcacagaucccacca

SEQ ID NO: 178627 - RNA, 23 nt, Human
cugcuugagcccaggaguucaag

SEQ ID NO: 178628 - RNA, 24 nt, Human
cugcuugagcccaggaguucaagg

SEQ ID NO: 178629 - RNA, 19 nt, Human
cuuagacugaucaggguca

SEQ ID NO: 178630 - RNA, 19 nt, Human
gacagaggagggaggggag

SEQ ID NO: 178631 - RNA, 18 nt, Human
gacuaaaggcagcagcag

SEQ ID NO: 178632 - RNA, 21 nt, Human
gagaggagaacccugaagugg

SEQ ID NO: 178633 - RNA, 25 nt, Human
gagcagcuggggugguggggagcuc

SEQ ID NO: 178634 - RNA, 22 nt, Human
gaggagggaggggagcagcugg

SEQ ID NO: 178635 - RNA, 25 nt, Human
gaggcugagguggguagacugcuug

SEQ ID NO: 178636 - RNA, 18 nt, Human
gcaccucaucccucucca

SEQ ID NO: 178637 - RNA, 21 nt, Human
gcacugggguggacgugucag

SEQ ID NO: 178638 - RNA, 20 nt, Human
gcagaggcggagcaacuauc

SEQ ID NO: 178639 - RNA, 20 nt, Human
gcagcagcagugcccugaag

SEQ ID NO: 178640 - RNA, 24 nt, Human
gcagucccaggggcucagaggcug

SEQ ID NO: 178641 - RNA, 20 nt, Human
gcaguccuccugggcuugac

SEQ ID NO: 178642 - RNA, 19 nt, Human
gcccacagcgugcccacag

SEQ ID NO: 178643 - RNA, 22 nt, Human
gcccaggaguucaaggucagcc

SEQ ID NO: 178644 - RNA, 24 nt, Human
gcccuugggggugaguuucuugac

SEQ ID NO: 178645 - RNA, 22 nt, Human
gcucagaggcuggggcggccug

SEQ ID NO: 178646 - RNA, 21 nt, Human
gcugcuggccaugccccucca

SEQ ID NO: 178647 - RNA, 21 nt, Human
ggacaaagucaugcccugccc

SEQ ID NO: 178648 - RNA, 20 nt, Human
ggagaacaacccucugagcu

SEQ ID NO: 178649 - RNA, 21 nt, Human
ggagaacaacccucugagcug

SEQ ID NO: 178650 - RNA, 19 nt, Human
ggagcagcugggguggugg

SEQ ID NO: 178651 - RNA, 18 nt, Human
ggagggaggggagcagcu

SEQ ID NO: 178652 - RNA, 25 nt, Human
gggaaaggacaccaagucuugggga

SEQ ID NO: 178653 - RNA, 21 nt, Human
gggagcagcuggggugguggg

SEQ ID NO: 178654 - RNA, 20 nt, Human
gggaggggagcagcuggggu

SEQ ID NO: 178655 - RNA, 23 nt, Human
gggcacagaucccaccagucugc

SEQ ID NO: 178656 - RNA, 21 nt, Human
gggcagcaagcugaccuaggg

SEQ ID NO: 178657 - RNA, 25 nt, Human
gggcaguccuccugggcuugaccuc

SEQ ID NO: 178658 - RNA, 20 nt, Human
gggcucagaggcuggggcgg

SEQ ID NO: 178659 - RNA, 18 nt, Human
ggggagcagcuggggugg

SEQ ID NO: 178660 - RNA, 18 nt, Human
ggguagacugcuugagcc

SEQ ID NO: 178661 - RNA, 27 nt, Human
gggugguggggagcucaggucgaaguc

SEQ ID NO: 178662 - RNA, 22 nt, Human
gggugguggggagcucaggucu

SEQ ID NO: 178663 - RNA, 24 nt, Human
gguagacugcuugagcccaggagu

SEQ ID NO: 178664 - RNA, 24 nt, Human
gguggcuccaaucuauaaucccag

SEQ ID NO: 178665 - RNA, 21 nt, Human
guccccuccagucugcacggg

SEQ ID NO: 178666 - RNA, 29 nt, Human
gugcccacagauggcaucccuggauggcc

SEQ ID NO: 178667 - RNA, 18 nt, Human
gugccccccgcccuccuc

SEQ ID NO: 178668 - RNA, 23 nt, Human
gugggugcacugggguggacgug

SEQ ID NO: 178669 - RNA, 18 nt, Human
gugggugccgucuggcag

SEQ ID NO: 178670 - RNA, 21 nt, Human
uaacaacaggaaucagggaug

SEQ ID NO: 178671 - RNA, 24 nt, Human
uagcagcagcagcagcagcaggug

SEQ ID NO: 178672 - RNA, 18 nt, Human
uaggugccccccgcccuc

SEQ ID NO: 178673 - RNA, 27 nt, Human
ucacuuugcucgugccucaguuuuaca

SEQ ID NO: 178674 - RNA, 23 nt, Human
uccaaucuauaaucccagcuaca

SEQ ID NO: 178675 - RNA, 23 nt, Human
uccacguacacaacagauccccc

SEQ ID NO: 178676 - RNA, 21 nt, Human
uccauaacaacaggaaucagg

SEQ ID NO: 178677 - RNA, 21 nt, Human
ucccaccucauaaaaaccaaa

SEQ ID NO: 178678 - RNA, 23 nt, Human
ucccagcaccucaucccucucca

SEQ ID NO: 178679 - RNA, 19 nt, Human
ucccaggggcucagaggcu

SEQ ID NO: 178680 - RNA, 21 nt, Human
uccccuucucuccuuccuccu

SEQ ID NO: 178681 - RNA, 19 nt, Human
ucccuggauggcagcucag

SEQ ID NO: 178682 - RNA, 24 nt, Human
ucccuggauggcagcucaggugga

SEQ ID NO: 178683 - RNA, 23 nt, Human
uccuccagcagccugaggaaacu

SEQ ID NO: 178684 - RNA, 19 nt, Human
uccuuaauucccacaaucc

SEQ ID NO: 178685 - RNA, 19 nt, Human
uccuucugggaucugggca

SEQ ID NO: 178686 - RNA, 19 nt, Human
ucuccuuccuccucauucu

SEQ ID NO: 178687 - RNA, 21 nt, Human
ucucuaccagcguccccucca

SEQ ID NO: 178688 - RNA, 23 nt, Human
ugagcccaggaguucaaggucag

SEQ ID NO: 178689 - RNA, 18 nt, Human
ugagcugggcaugguggc

SEQ ID NO: 178690 - RNA, 21 nt, Human
ugccaucccaauugccuccuc

SEQ ID NO: 178691 - RNA, 23 nt, Human
ugcccacagcgugcccacagaug

SEQ ID NO: 178692 - RNA, 22 nt, Human
ugcccugaagauuagcagcagc

SEQ ID NO: 178693 - RNA, 22 nt, Human
uggcaacaguuuccauaacaac

SEQ ID NO: 178694 - RNA, 21 nt, Human
uggccagggcuaccuugucug

SEQ ID NO: 178695 - RNA, 27 nt, Human
uggccaugccccuccagacugcccuug

SEQ ID NO: 178696 - RNA, 21 nt, Human
ugggcaggugacugccccagg

SEQ ID NO: 178697 - RNA, 21 nt, Human
uggggugguggggagcucagg

SEQ ID NO: 178698 - RNA, 21 nt, Human
uggguacauuuugugugugag

SEQ ID NO: 178699 - RNA, 22 nt, Human
ugggugggugccgucuggcagg

SEQ ID NO: 178700 - RNA, 19 nt, Human
uguaguaggugccccccgc

SEQ ID NO: 178701 - RNA, 19 nt, Human
ugucuguggggccuucccu

SEQ ID NO: 178702 - RNA, 25 nt, Human
uguggcaguggcuuacugggguuaa

SEQ ID NO: 178703 - RNA, 19 nt, Human
uguggggccuucccuuucc

SEQ ID NO: 178704 - RNA, 22 nt, Human
uuagggaaaagcagccggucac

SEQ ID NO: 178705 - RNA, 18 nt, Human
uucaagaggaugagucac

SEQ ID NO: 178706 - RNA, 21 nt, Human
uuccuccucauucuaacgcaa

SEQ ID NO: 178707 - RNA, 21 nt, Human
uugagcccaggaguucaaggu

SEQ ID NO: 178708 - RNA, 24 nt, Human
uuguaugccuagugccaucccucc

SEQ ID NO: 178709 - RNA, 28 nt, Human
uuuuacaauuguaaaauagggcacuacc

SEQ ID NO: 178710 - RNA, 18 nt, Human
aacaaaggcgcccaaagc

SEQ ID NO: 178711 - RNA, 19 nt, Human
acaggcaguguccugggga

SEQ ID NO: 178712 - RNA, 18 nt, Human
cuggggaccacccaacug

SEQ ID NO: 178713 - RNA, 22 nt, Human
ucccaugagcucuggcugacca

SEQ ID NO: 178714 - RNA, 25 nt, Human
uccccacaggcaguguccuggggac

SEQ ID NO: 178715 - RNA, 21 nt, Human
uccgaacaaaggcgcccaaag

SEQ ID NO: 178716 - RNA, 20 nt, Human
ugcacuuuaaugagugcccu

SEQ ID NO: 178717 - RNA, 18 nt, Human
ugcccugccccuauccaa

SEQ ID NO: 178718 - RNA, 23 nt, Human
uguccuggggaccacccaacuga

SEQ ID NO: 178719 - RNA, 18 nt, Human
aaauauuagcauuugucc

SEQ ID NO: 178720 - RNA, 21 nt, Human
aagaagggggaaggaagaaac

SEQ ID NO: 178721 - RNA, 24 nt, Human
acagagccuuccuucccacaugcc

SEQ ID NO: 178722 - RNA, 24 nt, Human
accucaucaaagugaaaauaccac

SEQ ID NO: 178723 - RNA, 25 nt, Human
accucauuucuucuggcagcuccag

SEQ ID NO: 178724 - RNA, 24 nt, Human
acuuuauuaacuuaaaacaucacu

SEQ ID NO: 178725 - RNA, 18 nt, Human
agaaaucuuuaaaauauc

SEQ ID NO: 178726 - RNA, 25 nt, Human
agaaaucuuuaaaauaucagcuuaa

SEQ ID NO: 178727 - RNA, 19 nt, Human
agaaaugauuccuccaaga

SEQ ID NO: 178728 - RNA, 22 nt, Human
agagggcccuggcggcgcgucc

SEQ ID NO: 178729 - RNA, 20 nt, Human
agcagagugguggcaagcag

SEQ ID NO: 178730 - RNA, 18 nt, Human
agcccccggcggagaggg

SEQ ID NO: 178731 - RNA, 22 nt, Human
aggagaccuugacacccaaucc

SEQ ID NO: 178732 - RNA, 22 nt, Human
aggcaagcagggagcagagugg

SEQ ID NO: 178733 - RNA, 24 nt, Human
agggaguggaggcaagcagggagc

SEQ ID NO: 178734 - RNA, 24 nt, Human
agggggaaggaagaaaccugaagg

SEQ ID NO: 178735 - RNA, 22 nt, Human
agucagggguugugacuucagu

SEQ ID NO: 178736 - RNA, 21 nt, Human
augaaugacaucuuguccaca

SEQ ID NO: 178737 - RNA, 19 nt, Human
auggugccugguacuuggu

SEQ ID NO: 178738 - RNA, 23 nt, Human
caaaagaaaggagucaacagacc

SEQ ID NO: 178739 - RNA, 25 nt, Human
caaccucaucaaagugaaaauacca

SEQ ID NO: 178740 - RNA, 22 nt, Human
caagaagggggaaggaagaaac

SEQ ID NO: 178741 - RNA, 30 nt, Human
cacccaaaagaaaggagucaacagaccccc

SEQ ID NO: 178742 - RNA, 22 nt, Human
cagaauucccuccaagaguaag

SEQ ID NO: 178743 - RNA, 23 nt, Human
cagagugguggcaagcagggagg

SEQ ID NO: 178744 - RNA, 18 nt, Human
cagcacccaaaagaaagg

SEQ ID NO: 178745 - RNA, 25 nt, Human
cagcccuacugaagggaggaccucu

SEQ ID NO: 178746 - RNA, 18 nt, Human
cauugcuugugcuuuuac

SEQ ID NO: 178747 - RNA, 26 nt, Human
ccaaaagaaaggagucaacagacccc

SEQ ID NO: 178748 - RNA, 24 nt, Human
ccaaaagaaaggagucaacagacu

SEQ ID NO: 178749 - RNA, 23 nt, Human
ccaagagucccuggagccgcugu

SEQ ID NO: 178750 - RNA, 23 nt, Human
ccagaaggaaaaaaauaaaaguu

SEQ ID NO: 178751 - RNA, 21 nt, Human
cccaauaccuaacauggugcc

SEQ ID NO: 178752 - RNA, 25 nt, Human
cccacggucacuccgagggcuugcu

SEQ ID NO: 178753 - RNA, 20 nt, Human
cccacugcgccccaagaguc

SEQ ID NO: 178754 - RNA, 25 nt, Human
ccgagcccccggcggagagggcccc

SEQ ID NO: 178755 - RNA, 29 nt, Human
ccgagcccccggcggagagggcccuggcg

SEQ ID NO: 178756 - RNA, 20 nt, Human
ccuccaagaguaagaacaga

SEQ ID NO: 178757 - RNA, 25 nt, Human
ccuccaagaguaagaacagacccag

SEQ ID NO: 178758 - RNA, 20 nt, Human
ccucuaauccccucucauua

SEQ ID NO: 178759 - RNA, 19 nt, Human
ccuggagccgcugucaccc

SEQ ID NO: 178760 - RNA, 19 nt, Human
cgaagccuagggagucacu

SEQ ID NO: 178761 - RNA, 22 nt, Human
cucagccccagcccggaggaga

SEQ ID NO: 178762 - RNA, 30 nt, Human
cucagccccagcccggaggagaccuugacc

SEQ ID NO: 178763 - RNA, 23 nt, Human
cuccagugaugagguuuucacag

SEQ ID NO: 178764 - RNA, 25 nt, Human
cuccagugaugagguuuucacagcc

SEQ ID NO: 178765 - RNA, 20 nt, Human
cucuaugguacacauggagg

SEQ ID NO: 178766 - RNA, 24 nt, Human
cugagugaaugaaugacaucuugu

SEQ ID NO: 178767 - RNA, 20 nt, Human
cugcgccccaagagucccug

SEQ ID NO: 178768 - RNA, 18 nt, Human
cugguacuugguagccgg

SEQ ID NO: 178769 - RNA, 23 nt, Human
cuuccacacaaauaucuggggua

SEQ ID NO: 178770 - RNA, 20 nt, Human
cuucugcuucuucuuggggg

SEQ ID NO: 178771 - RNA, 21 nt, Human
gagcagagugguggcaagcag

SEQ ID NO: 178772 - RNA, 23 nt, Human
gagccuauuuguguccgaagccu

SEQ ID NO: 178773 - RNA, 22 nt, Human
gaggagcagucagggguuguga

SEQ ID NO: 178774 - RNA, 27 nt, Human
gcucagccccagcccggaggagaccuu

SEQ ID NO: 178775 - RNA, 22 nt, Human
ggaaaugggaaggacugugggg

SEQ ID NO: 178776 - RNA, 18 nt, Human
gguacuugguagccggug

SEQ ID NO: 178777 - RNA, 24 nt, Human
guaggucaagaagggggaaggaag

SEQ ID NO: 178778 - RNA, 23 nt, Human
uaacacucacucuucuuucuaga

SEQ ID NO: 178779 - RNA, 20 nt, Human
uaccaaccucaucaaaguga

SEQ ID NO: 178780 - RNA, 28 nt, Human
uaccaaccucaucaaagugaaaauacca

SEQ ID NO: 178781 - RNA, 25 nt, Human
uaccucauuucuucuggcagcucca

SEQ ID NO: 178782 - RNA, 20 nt, Human
uagccucgauggugcaucuc

SEQ ID NO: 178783 - RNA, 22 nt, Human
uagcucagaaaucuuuaaaaua

SEQ ID NO: 178784 - RNA, 23 nt, Human
ucagaauucccuccaagaguaag

SEQ ID NO: 178785 - RNA, 20 nt, Human
uccaagaguaagaacagacc

SEQ ID NO: 178786 - RNA, 19 nt, Human
uccccacugcgccccaaga

SEQ ID NO: 178787 - RNA, 21 nt, Human
ucccuggagccgcugucaccc

SEQ ID NO: 178788 - RNA, 22 nt, Human
uccgaagccuagggagucacuu

SEQ ID NO: 178789 - RNA, 25 nt, Human
uccuccucuuccacacaaauaucug

SEQ ID NO: 178790 - RNA, 23 nt, Human
ucugcagacuggaccuggggucu

SEQ ID NO: 178791 - RNA, 20 nt, Human
ucuuguccacaggcauugcu

SEQ ID NO: 178792 - RNA, 24 nt, Human
ugaaaauaccaccuuuccccccuc

SEQ ID NO: 178793 - RNA, 27 nt, Human
ugaagacagagccuuccuucccacaug

SEQ ID NO: 178794 - RNA, 22 nt, Human
ugacuucagucucucuucccca

SEQ ID NO: 178795 - RNA, 19 nt, Human
uggggucuggaaagucaga

SEQ ID NO: 178796 - RNA, 18 nt, Human
uguagcugcugcuugcag

SEQ ID NO: 178797 - RNA, 24 nt, Human
uguuuacaccugauaaaauccaaa

SEQ ID NO: 178798 - RNA, 22 nt, Human
uuaacacucacucuucuuucua

SEQ ID NO: 178799 - RNA, 25 nt, Human
uuagcuuuugaggagcagucagggg

SEQ ID NO: 178800 - RNA, 21 nt, Human
uuccuccaagauuuauaggca

SEQ ID NO: 178801 - RNA, 22 nt, Human
uugcugagugaaugaaugacau

SEQ ID NO: 178802 - RNA, 19 nt, Human
uuuaaaauaucagcuuaac

SEQ ID NO: 178803 - RNA, 22 nt, Human
acaugugggauguccacuucuc

SEQ ID NO: 178804 - RNA, 23 nt, Human
agaaguuggagaaguggagggau

SEQ ID NO: 178805 - RNA, 18 nt, Human
agagucgcccacuugaaa

SEQ ID NO: 178806 - RNA, 21 nt, Human
aggaaagaaaaggagaaagga

SEQ ID NO: 178807 - RNA, 24 nt, Human
aggagaaaggaguccagagggcca

SEQ ID NO: 178808 - RNA, 24 nt, Human
aggagcaagccuggacacagagca

SEQ ID NO: 178809 - RNA, 19 nt, Human
aggaggggcuccacggaug

SEQ ID NO: 178810 - RNA, 24 nt, Human
auugugcacgcuuuuaaauagaga

SEQ ID NO: 178811 - RNA, 18 nt, Human
caagcuguuuuacuaugg

SEQ ID NO: 178812 - RNA, 27 nt, Human
caaugauucccuucuccucuggcgacu

SEQ ID NO: 178813 - RNA, 20 nt, Human
cacagagcauggguagcuag

SEQ ID NO: 178814 - RNA, 18 nt, Human
cacuuggguagaaggcac

SEQ ID NO: 178815 - RNA, 22 nt, Human
ccgugggcuccuccgugggcuc

SEQ ID NO: 178816 - RNA, 22 nt, Human
ccguucggacgcuggggcuccu

SEQ ID NO: 178817 - RNA, 25 nt, Human
ccuggacacagagcauggguagcua

SEQ ID NO: 178818 - RNA, 19 nt, Human
cgagaagaaaauguugaag

SEQ ID NO: 178819 - RNA, 21 nt, Human
cggcuacagaaagccacauac

SEQ ID NO: 178820 - RNA, 22 nt, Human
cucgagggggucugcccguucg

SEQ ID NO: 178821 - RNA, 18 nt, Human
gaaggcacguggaagcug

SEQ ID NO: 178822 - RNA, 20 nt, Human
gagaaguggagggauguggg

SEQ ID NO: 178823 - RNA, 21 nt, Human
gagcacgcagaacauguggga

SEQ ID NO: 178824 - RNA, 21 nt, Human
gagccgugaucagauuaaaca

SEQ ID NO: 178825 - RNA, 18 nt, Human
gcuccuccgugggcuccg

SEQ ID NO: 178826 - RNA, 24 nt, Human
ggacgcuggggcuccuccgugggc

SEQ ID NO: 178827 - RNA, 20 nt, Human
ggaguccagagggccaaugc

SEQ ID NO: 178828 - RNA, 20 nt, Human
ggcuccuccgugggcuccgu

SEQ ID NO: 178829 - RNA, 19 nt, Human
uaaaacuaacucuaguguu

SEQ ID NO: 178830 - RNA, 20 nt, Human
uaaaagguucacaguuacuc

SEQ ID NO: 178831 - RNA, 23 nt, Human
uaccacggcuacagaaagccaca

SEQ ID NO: 178832 - RNA, 20 nt, Human
uaggaugaacaguuuggccg

SEQ ID NO: 178833 - RNA, 18 nt, Human
ucaggacacagagaaaca

SEQ ID NO: 178834 - RNA, 26 nt, Human
ucugcuguaagcaaaagcacuugggu

SEQ ID NO: 178835 - RNA, 22 nt, Human
ugcugccagggcuuaaaaagag

SEQ ID NO: 178836 - RNA, 22 nt, Human
uggaaucagaugaaagguggug

SEQ ID NO: 178837 - RNA, 21 nt, Human
uggacuuauaggaggcauagg

SEQ ID NO: 178838 - RNA, 18 nt, Human
uggagaaguggagggaug

SEQ ID NO: 178839 - RNA, 21 nt, Human
uggaugcaggaggggcuccac

SEQ ID NO: 178840 - RNA, 24 nt, Human
aaaaagcuuggcaucaauguaggc

SEQ ID NO: 178841 - RNA, 21 nt, Human
aaaugcuaguacauauauaaa

SEQ ID NO: 178842 - RNA, 20 nt, Human
aagaggaaacuccgggucug

SEQ ID NO: 178843 - RNA, 18 nt, Human
aaggugaacaucaguacc

SEQ ID NO: 178844 - RNA, 22 nt, Human
aaguuacaaacugucccuuuaa

SEQ ID NO: 178845 - RNA, 23 nt, Human
acagcccaaguuacaaacugucc

SEQ ID NO: 178846 - RNA, 21 nt, Human
agcucgaagggccgaguuggg

SEQ ID NO: 178847 - RNA, 19 nt, Human
agguuuuucacagaagccc

SEQ ID NO: 178848 - RNA, 19 nt, Human
auacagcauaucccaaagc

SEQ ID NO: 178849 - RNA, 24 nt, Human
caaacugucccuuuaaaauacagc

SEQ ID NO: 178850 - RNA, 25 nt, Human
caaagcccacucuugguaagaaucu

SEQ ID NO: 178851 - RNA, 21 nt, Human
cagcugcggcgaggagccagu

SEQ ID NO: 178852 - RNA, 20 nt, Human
caggacgauuuccgagcaga

SEQ ID NO: 178853 - RNA, 20 nt, Human
caucaucaucaucgaaaaca

SEQ ID NO: 178854 - RNA, 23 nt, Human
caucaucgaaaacacagccccag

SEQ ID NO: 178855 - RNA, 24 nt, Human
ccaaaguucagcuccauccaguga

SEQ ID NO: 178856 - RNA, 19 nt, Human
ccaaccuggacucaaccga

SEQ ID NO: 178857 - RNA, 27 nt, Human
ccaccgccgccggcgacucagcuccgg

SEQ ID NO: 178858 - RNA, 27 nt, Human
cccaaguuacaaacugucccuuuaaaa

SEQ ID NO: 178859 - RNA, 18 nt, Human
cccccaaaaaaaucccga

SEQ ID NO: 178860 - RNA, 22 nt, Human
ccccccaaaaaaaucccgagcc

SEQ ID NO: 178861 - RNA, 20 nt, Human
ccccgaaggaucacaagaag

SEQ ID NO: 178862 - RNA, 18 nt, Human
ccccuccuucccuuuccg

SEQ ID NO: 178863 - RNA, 22 nt, Human
ccccuccuucccuuuccgggcu

SEQ ID NO: 178864 - RNA, 18 nt, Human
cccgcccccccaaaaaaa

SEQ ID NO: 178865 - RNA, 23 nt, Human
cgacccaaccuggacucaaccga

SEQ ID NO: 178866 - RNA, 23 nt, Human
cuaggaaaagaaaaaaaagaaaa

SEQ ID NO: 178867 - RNA, 26 nt, Human
cuccuaaacuggaauuucagcuauac

SEQ ID NO: 178868 - RNA, 18 nt, Human
cuugccgagggagcucag

SEQ ID NO: 178869 - RNA, 21 nt, Human
gaaaaaaaaaaaauguuccag

SEQ ID NO: 178870 - RNA, 28 nt, Human
gagaacaggaaacagauaaccgguaccc

SEQ ID NO: 178871 - RNA, 18 nt, Human
gcccaaaguucagcucca

SEQ ID NO: 178872 - RNA, 22 nt, Human
gcuaggaaaagaaaaaaaagaa

SEQ ID NO: 178873 - RNA, 21 nt, Human
ggaagcggcgcggagaauggc

SEQ ID NO: 178874 - RNA, 18 nt, Human
ggaggcgguuccgcuuuu

SEQ ID NO: 178875 - RNA, 19 nt, Human
ggccagaaguaaaacuguu

SEQ ID NO: 178876 - RNA, 26 nt, Human
ggcgggaggcgguuccgcuuuuaggg

SEQ ID NO: 178877 - RNA, 24 nt, Human
guaagaaucuucuuuguggcaaaa

SEQ ID NO: 178878 - RNA, 24 nt, Human
guuuuuucuuuuguacaagagugc

SEQ ID NO: 178879 - RNA, 23 nt, Human
uaagaaucuucuuuguggcaaaa

SEQ ID NO: 178880 - RNA, 25 nt, Human
uacaguacauaaacaucagcgugga

SEQ ID NO: 178881 - RNA, 19 nt, Human
uaggaaaagaaaaaaaaga

SEQ ID NO: 178882 - RNA, 18 nt, Human
uaggaaaggccagaagua

SEQ ID NO: 178883 - RNA, 20 nt, Human
uaucccaaagccuucugagu

SEQ ID NO: 178884 - RNA, 25 nt, Human
ucacagaagccccgaaggaucacaa

SEQ ID NO: 178885 - RNA, 28 nt, Human
ucagggcaaugguguccccgcccccucc

SEQ ID NO: 178886 - RNA, 20 nt, Human
ucauuaaaggagauauggga

SEQ ID NO: 178887 - RNA, 20 nt, Human
uccccgcccccccaaaaaaa

SEQ ID NO: 178888 - RNA, 18 nt, Human
uccccgcccccuccuucc

SEQ ID NO: 178889 - RNA, 24 nt, Human
uccccgcccccuccuucccuuucc

SEQ ID NO: 178890 - RNA, 22 nt, Human
uccccggacagcugugcugcuc

SEQ ID NO: 178891 - RNA, 19 nt, Human
ugaacaucaguaccagcug

SEQ ID NO: 178892 - RNA, 22 nt, Human
ugcgcuaggaaaagaaaaaaaa

SEQ ID NO: 178893 - RNA, 21 nt, Human
uggaagcggcgcggagaaugg

SEQ ID NO: 178894 - RNA, 25 nt, Human
uuaaaauacagcauaucccaaagcc

SEQ ID NO: 178895 - RNA, 25 nt, Human
uugaauggaacuguuucucaacuga

SEQ ID NO: 178896 - RNA, 23 nt, Human
uugcuuuacagcccaaguuacaa

SEQ ID NO: 178897 - RNA, 23 nt, Human
uuggaagcggcgcggagaauggc

SEQ ID NO: 178898 - RNA, 27 nt, Human
aaaaccaucuccauccuugaggcacuc

SEQ ID NO: 178899 - RNA, 19 nt, Human
aaaccugggaggagacagg

SEQ ID NO: 178900 - RNA, 24 nt, Human
aaagagaaaggggaaaggaggagg

SEQ ID NO: 178901 - RNA, 22 nt, Human
aacaacaacaauaauaauagcc

SEQ ID NO: 178902 - RNA, 22 nt, Human
aaccugggaggagacagguuca

SEQ ID NO: 178903 - RNA, 24 nt, Human
aagaaaggggaaaccacacaauau

SEQ ID NO: 178904 - RNA, 24 nt, Human
aauaauaguaguaacaacaacaau

SEQ ID NO: 178905 - RNA, 18 nt, Human
aaucagccccaaauccaa

SEQ ID NO: 178906 - RNA, 21 nt, Human
acaaaaacuucuccagagaag

SEQ ID NO: 178907 - RNA, 21 nt, Human
accagcugcagacccaccagc

SEQ ID NO: 178908 - RNA, 21 nt, Human
acccacgagaaagcaaagaag

SEQ ID NO: 178909 - RNA, 18 nt, Human
acccccuccaccgccauc

SEQ ID NO: 178910 - RNA, 24 nt, Human
agaaaccugggaggagacagguuu

SEQ ID NO: 178911 - RNA, 18 nt, Human
agaaagaagcuggugccc

SEQ ID NO: 178912 - RNA, 23 nt, Human
agaagacagcaggaaagcuugag

SEQ ID NO: 178913 - RNA, 26 nt, Human
agaagacagcaggaaagcuugagggc

SEQ ID NO: 178914 - RNA, 19 nt, Human
agacccaccagccccaccc

SEQ ID NO: 178915 - RNA, 24 nt, Human
agagagaaaaacaccaggagaaag

SEQ ID NO: 178916 - RNA, 19 nt, Human
agagucccuuccgcugcag

SEQ ID NO: 178917 - RNA, 21 nt, Human
agcaaagaagccaacaaagga

SEQ ID NO: 178918 - RNA, 21 nt, Human
agcacggugcgaacccccucc

SEQ ID NO: 178919 - RNA, 20 nt, Human
agcaggaaagcuugagggcc

SEQ ID NO: 178920 - RNA, 19 nt, Human
agcagugguaaucagcccc

SEQ ID NO: 178921 - RNA, 22 nt, Human
agccaagcagugguaaucagcc

SEQ ID NO: 178922 - RNA, 18 nt, Human
agcgacaaggugggaaaa

SEQ ID NO: 178923 - RNA, 25 nt, Human
aggaaagaaaggggaaaccacacaa

SEQ ID NO: 178924 - RNA, 18 nt, Human
aggaaagagaaaggggaa

SEQ ID NO: 178925 - RNA, 23 nt, Human
aggaggaggagggagaagacagc

SEQ ID NO: 178926 - RNA, 18 nt, Human
aggagggagaagacagca

SEQ ID NO: 178927 - RNA, 18 nt, Human
aggcacagcccagagucc

SEQ ID NO: 178928 - RNA, 24 nt, Human
aggccugccaaaggacccacgaga

SEQ ID NO: 178929 - RNA, 18 nt, Human
aggcucuuguccggucuc

SEQ ID NO: 178930 - RNA, 19 nt, Human
agugaagggcauuucuaga

SEQ ID NO: 178931 - RNA, 18 nt, Human
auguguauauacauauau

SEQ ID NO: 178932 - RNA, 22 nt, Human
auuauagacaacaguauuaaaa

SEQ ID NO: 178933 - RNA, 20 nt, Human
caacaauaauaauagccaag

SEQ ID NO: 178934 - RNA, 18 nt, Human
cacacaauauauguauau

SEQ ID NO: 178935 - RNA, 19 nt, Human
caccagagcccagccaggc

SEQ ID NO: 178936 - RNA, 22 nt, Human
cacuccgugcuacagucagggg

SEQ ID NO: 178937 - RNA, 22 nt, Human
cagcaggaaagcuugagggccc

SEQ ID NO: 178938 - RNA, 24 nt, Human
cagcaggaaagcuugagggcccac

SEQ ID NO: 178939 - RNA, 22 nt, Human
caggagcccccaccagagccca

SEQ ID NO: 178940 - RNA, 20 nt, Human
caggcacagcccagaguccc

SEQ ID NO: 178941 - RNA, 18 nt, Human
caggcucuuguccggucu

SEQ ID NO: 178942 - RNA, 20 nt, Human
cagugguaaucagccccaaa

SEQ ID NO: 178943 - RNA, 24 nt, Human
caucuccauccuugaagccaaagg

SEQ ID NO: 178944 - RNA, 21 nt, Human
ccacaccagcugcagacccac

SEQ ID NO: 178945 - RNA, 22 nt, Human
ccaccagccccacccgagggca

SEQ ID NO: 178946 - RNA, 22 nt, Human
ccagagaagaaaccugggagga

SEQ ID NO: 178947 - RNA, 22 nt, Human
ccagccagccucaggcacagcc

SEQ ID NO: 178948 - RNA, 21 nt, Human
ccagccaggcugacuggggca

SEQ ID NO: 178949 - RNA, 19 nt, Human
ccagcugcagacccaccag

SEQ ID NO: 178950 - RNA, 23 nt, Human
ccccaacacuccgugcuacaguc

SEQ ID NO: 178951 - RNA, 23 nt, Human
ccccagccccaacacuccgugcu

SEQ ID NO: 178952 - RNA, 18 nt, Human
cccccagccccaacacuc

SEQ ID NO: 178953 - RNA, 19 nt, Human
ccccgcugccccgcugacc

SEQ ID NO: 178954 - RNA, 18 nt, Human
ccccucccucuccccaaa

SEQ ID NO: 178955 - RNA, 23 nt, Human
ccggcaccagaguuuccccugcc

SEQ ID NO: 178956 - RNA, 22 nt, Human
ccucauggccagccccgcugcc

SEQ ID NO: 178957 - RNA, 23 nt, Human
ccucauggccagccccgcugccc

SEQ ID NO: 178958 - RNA, 23 nt, Human
ccuccuggagcuggcccccagcc

SEQ ID NO: 178959 - RNA, 22 nt, Human
ccucgccacaagggcucuccca

SEQ ID NO: 178960 - RNA, 21 nt, Human
ccucuggcuggaggggguggg

SEQ ID NO: 178961 - RNA, 19 nt, Human
cgaacccccuccaccgcca

SEQ ID NO: 178962 - RNA, 20 nt, Human
cgaacccccuccaccgccau

SEQ ID NO: 178963 - RNA, 23 nt, Human
cgaacccccuccaccgccauccg

SEQ ID NO: 178964 - RNA, 19 nt, Human
cgagaaagcaaagaagcca

SEQ ID NO: 178965 - RNA, 24 nt, Human
cgagaaagcaaagaagccaacaaa

SEQ ID NO: 178966 - RNA, 18 nt, Human
cgagggcagagagggagg

SEQ ID NO: 178967 - RNA, 23 nt, Human
cgauucucgccucuggcuggagg

SEQ ID NO: 178968 - RNA, 24 nt, Human
cggcaccagaguuuccccugccag

SEQ ID NO: 178969 - RNA, 18 nt, Human
cucccuuggguaaaaaaa

SEQ ID NO: 178970 - RNA, 20 nt, Human
cucucaagcccuccuggagc

SEQ ID NO: 178971 - RNA, 22 nt, Human
cucugcuucagaaggguccaga

SEQ ID NO: 178972 - RNA, 21 nt, Human
cugccagcccccagcgggucc

SEQ ID NO: 178973 - RNA, 24 nt, Human
cugccaggggaccccugggccagc

SEQ ID NO: 178974 - RNA, 21 nt, Human
cugccccgcugaccgaugccc

SEQ ID NO: 178975 - RNA, 21 nt, Human
cugccccgcugaccgaugccc

SEQ ID NO: 178976 - RNA, 19 nt, Human
cugcugccucucgacgccc

SEQ ID NO: 178977 - RNA, 20 nt, Human
cugcugccucucgacgcccc

SEQ ID NO: 178978 - RNA, 19 nt, Human
gaaagagaaaggggaaagg

SEQ ID NO: 178979 - RNA, 22 nt, Human
gaagacagcaggaaagcuugag

SEQ ID NO: 178980 - RNA, 20 nt, Human
gagaaagcaaagaagccaac

SEQ ID NO: 178981 - RNA, 21 nt, Human
gagggcaaaaccaucuccauc

SEQ ID NO: 178982 - RNA, 20 nt, Human
gaugaagaucccgaguccug

SEQ ID NO: 178983 - RNA, 25 nt, Human
gcaaaaccaucuccauccuugaagc

SEQ ID NO: 178984 - RNA, 19 nt, Human
gcacagcccagagucccuu

SEQ ID NO: 178985 - RNA, 21 nt, Human
gcaccagaguuuccccugcca

SEQ ID NO: 178986 - RNA, 18 nt, Human
gcccagagucccuuccgc

SEQ ID NO: 178987 - RNA, 18 nt, Human
gcugccccgcugaccgau

SEQ ID NO: 178988 - RNA, 18 nt, Human
ggaaaggaggaggaggga

SEQ ID NO: 178989 - RNA, 23 nt, Human
ggaggagacagguucagcgacaa

SEQ ID NO: 178990 - RNA, 19 nt, Human
ggaucaggagcccccaccg

SEQ ID NO: 178991 - RNA, 24 nt, Human
ggcaaaaccaucuccauccuugaa

SEQ ID NO: 178992 - RNA, 18 nt, Human
ggcuggaggggguggggu

SEQ ID NO: 178993 - RNA, 19 nt, Human
gggaaaggaggaggaggga

SEQ ID NO: 178994 - RNA, 21 nt, Human
gggcagccuggggaagcagcu

SEQ ID NO: 178995 - RNA, 21 nt, Human
gggguggggugagaggcgggc

SEQ ID NO: 178996 - RNA, 22 nt, Human
ggguccccagagugggcagccu

SEQ ID NO: 178997 - RNA, 23 nt, Human
gucuaggaaaugaggaaagagaa

SEQ ID NO: 178998 - RNA, 22 nt, Human
gugcugcagacacacacccggc

SEQ ID NO: 178999 - RNA, 20 nt, Human
gugugugugugucugugugu

SEQ ID NO: 179000 - RNA, 25 nt, Human
uaacaacaacaauaauaauagccaa

SEQ ID NO: 179001 - RNA, 22 nt, Human
uacaaaaacuucuccagagaag

SEQ ID NO: 179002 - RNA, 20 nt, Human
uauauggauguguauauaca

SEQ ID NO: 179003 - RNA, 20 nt, Human
uauauggauguguauauaca

SEQ ID NO: 179004 - RNA, 22 nt, Human
uauauguauauggauguguaua

SEQ ID NO: 179005 - RNA, 24 nt, Human
uauauguauauggauguguauaua

SEQ ID NO: 179006 - RNA, 26 nt, Human
uauauguauauggauguguauauaca

SEQ ID NO: 179007 - RNA, 23 nt, Human
uauguacauacaguugacguacg

SEQ ID NO: 179008 - RNA, 22 nt, Human
uauguauauggauguguauaua

SEQ ID NO: 179009 - RNA, 22 nt, Human
uauguuaggagaggagccccgg

SEQ ID NO: 179010 - RNA, 18 nt, Human
uccagagaagaaaccugg

SEQ ID NO: 179011 - RNA, 25 nt, Human
uccagagagaaaaacaccaggagaa

SEQ ID NO: 179012 - RNA, 22 nt, Human
ucccagcuaguccacccgauga

SEQ ID NO: 179013 - RNA, 18 nt, Human
uccccaaagggaggccug

SEQ ID NO: 179014 - RNA, 22 nt, Human
uccccagagugggcagccuggg

SEQ ID NO: 179015 - RNA, 20 nt, Human
ucccgaguccugcgauucuc

SEQ ID NO: 179016 - RNA, 21 nt, Human
uccggucucugcuucagaagg

SEQ ID NO: 179017 - RNA, 22 nt, Human
ucgccacaagggcucucccagg

SEQ ID NO: 179018 - RNA, 21 nt, Human
ucuccccucccucuccccaaa

SEQ ID NO: 179019 - RNA, 20 nt, Human
ucucgacgccccccuugccc

SEQ ID NO: 179020 - RNA, 21 nt, Human
ucucuccccucccucucccca

SEQ ID NO: 179021 - RNA, 22 nt, Human
ucucuccccucccucuccccaa

SEQ ID NO: 179022 - RNA, 18 nt, Human
ugccaggggaccccuggg

SEQ ID NO: 179023 - RNA, 24 nt, Human
ugccucgccacaagggcucuccca

SEQ ID NO: 179024 - RNA, 21 nt, Human
ugcgaacccccuccaccgcca

SEQ ID NO: 179025 - RNA, 21 nt, Human
uggacccucauggccagcccc

SEQ ID NO: 179026 - RNA, 19 nt, Human
uggaugcggaucaggagcc

SEQ ID NO: 179027 - RNA, 19 nt, Human
ugggaggagacagguucag

SEQ ID NO: 179028 - RNA, 22 nt, Human
ugggaggagacagguucagcga

SEQ ID NO: 179029 - RNA, 24 nt, Human
ugggcagccuggggaagcagcugu

SEQ ID NO: 179030 - RNA, 19 nt, Human
ugggccagcucucaggcug

SEQ ID NO: 179031 - RNA, 23 nt, Human
ugggguauuauuuccauaguuuu

SEQ ID NO: 179032 - RNA, 21 nt, Human
uggucucuccccucccucucc

SEQ ID NO: 179033 - RNA, 22 nt, Human
uguauauggauguguauauaca

SEQ ID NO: 179034 - RNA, 23 nt, Human
uguauauggauguguauauacau

SEQ ID NO: 179035 - RNA, 19 nt, Human
ugucuuucucccuugggua

SEQ ID NO: 179036 - RNA, 18 nt, Human
uguguauauacauauaug

SEQ ID NO: 179037 - RNA, 19 nt, Human
ugugugugucugugugugu

SEQ ID NO: 179038 - RNA, 18 nt, Human
uguugcuuaaaaaaagga

SEQ ID NO: 179039 - RNA, 23 nt, Human
uguugcuuaaaaaaaggaaagaa

SEQ ID NO: 179040 - RNA, 20 nt, Human
uucaaaaauauucugacucg

SEQ ID NO: 179041 - RNA, 20 nt, Human
uuccccugccaggggacccc

SEQ ID NO: 179042 - RNA, 24 nt, Human
uuguccugcccccagccagccuca

SEQ ID NO: 179043 - RNA, 18 nt, Human
aagcagagucaaaccaca

SEQ ID NO: 179044 - RNA, 18 nt, Human
acacagccccucccucuc

SEQ ID NO: 179045 - RNA, 18 nt, Human
accacacaccagagugca

SEQ ID NO: 179046 - RNA, 25 nt, Human
accagagugcaaauagcugggggug

SEQ ID NO: 179047 - RNA, 22 nt, Human
acccuugagcccccacaguccc

SEQ ID NO: 179048 - RNA, 22 nt, Human
agaaaagcagagucaaaccaca

SEQ ID NO: 179049 - RNA, 20 nt, Human
agacacccauaggaggcccc

SEQ ID NO: 179050 - RNA, 18 nt, Human
aggccaaugaaugaagga

SEQ ID NO: 179051 - RNA, 23 nt, Human
agggggaagagucacuugaggcc

SEQ ID NO: 179052 - RNA, 21 nt, Human
agugaccggucccucugcccc

SEQ ID NO: 179053 - RNA, 21 nt, Human
augaaggagacacaccgagaa

SEQ ID NO: 179054 - RNA, 22 nt, Human
caaguucuuccaaggcuacacu

SEQ ID NO: 179055 - RNA, 19 nt, Human
cacaaacccaggcccagcc

SEQ ID NO: 179056 - RNA, 22 nt, Human
cacaaacccaggcccagccucc

SEQ ID NO: 179057 - RNA, 23 nt, Human
cacaaacccaggcccagccuccu

SEQ ID NO: 179058 - RNA, 23 nt, Human
caccagagugcaaauagcugggg

SEQ ID NO: 179059 - RNA, 18 nt, Human
cacggacagauggaugga

SEQ ID NO: 179060 - RNA, 25 nt, Human
cacuggguuccuauggaggaggccu

SEQ ID NO: 179061 - RNA, 21 nt, Human
cagcaggggcggggccggagc

SEQ ID NO: 179062 - RNA, 22 nt, Human
cagccccucccucuccaggucc

SEQ ID NO: 179063 - RNA, 18 nt, Human
caugacccaaguucuucc

SEQ ID NO: 179064 - RNA, 19 nt, Human
caugggccucuggcauuac

SEQ ID NO: 179065 - RNA, 20 nt, Human
cauuacccuugagcccccac

SEQ ID NO: 179066 - RNA, 23 nt, Human
ccagagugcaaauagcugggggu

SEQ ID NO: 179067 - RNA, 19 nt, Human
ccaggucccggugauggag

SEQ ID NO: 179068 - RNA, 21 nt, Human
cccagccuggcccccugaggc

SEQ ID NO: 179069 - RNA, 25 nt, Human
cccaugacccaaguucuuccaaggc

SEQ ID NO: 179070 - RNA, 25 nt, Human
ccccaacagcugugcuuccucccca

SEQ ID NO: 179071 - RNA, 20 nt, Human
ccccacagccccucgcuggg

SEQ ID NO: 179072 - RNA, 22 nt, Human
ccccacagucccucagggggcc

SEQ ID NO: 179073 - RNA, 23 nt, Human
ccccacagucccucagggggccc

SEQ ID NO: 179074 - RNA, 18 nt, Human
ccccagcugggguugggg

SEQ ID NO: 179075 - RNA, 22 nt, Human
ccccccagucacuggguuccua

SEQ ID NO: 179076 - RNA, 20 nt, Human
ccccucccucuccagguccc

SEQ ID NO: 179077 - RNA, 19 nt, Human
cccucugccccuuccucuc

SEQ ID NO: 179078 - RNA, 20 nt, Human
ccggagcaggagggggaaga

SEQ ID NO: 179079 - RNA, 18 nt, Human
ccucccucuccagguccc

SEQ ID NO: 179080 - RNA, 23 nt, Human
ccucugccccuuccucuccccag

SEQ ID NO: 179081 - RNA, 22 nt, Human
ccugagguccuggcccuucccc

SEQ ID NO: 179082 - RNA, 22 nt, Human
cggaagaaaagcagagucaaac

SEQ ID NO: 179083 - RNA, 20 nt, Human
cucacacacugaccccacuu

SEQ ID NO: 179084 - RNA, 21 nt, Human
cuccagcauggcccccgaguu

SEQ ID NO: 179085 - RNA, 23 nt, Human
cugaggcugugaccacagggcca

SEQ ID NO: 179086 - RNA, 24 nt, Human
cuuccaaggcuacacagccccucc

SEQ ID NO: 179087 - RNA, 20 nt, Human
cuucccauaaggcauaagag

SEQ ID NO: 179088 - RNA, 24 nt, Human
cuugagcccccacagucccucagg

SEQ ID NO: 179089 - RNA, 19 nt, Human
gaaggagacacaccgagaa

SEQ ID NO: 179090 - RNA, 19 nt, Human
gaccacagggccaauccgg

SEQ ID NO: 179091 - RNA, 20 nt, Human
gcaaagggaaacccccagga

SEQ ID NO: 179092 - RNA, 21 nt, Human
gccaggugagguucccccagc

SEQ ID NO: 179093 - RNA, 18 nt, Human
gccuacaggggugugggg

SEQ ID NO: 179094 - RNA, 20 nt, Human
gcuccagcauggcccccgag

SEQ ID NO: 179095 - RNA, 19 nt, Human
ggacagacguaagacaccc

SEQ ID NO: 179096 - RNA, 19 nt, Human
ggagaagcaccaggccugg

SEQ ID NO: 179097 - RNA, 18 nt, Human
ggauggacagacguaaga

SEQ ID NO: 179098 - RNA, 24 nt, Human
ggccaugggcaacaaagggugucc

SEQ ID NO: 179099 - RNA, 22 nt, Human
ggcccaauggcaaagggaaacc

SEQ ID NO: 179100 - RNA, 22 nt, Human
ggcugggccuucccauaaggcc

SEQ ID NO: 179101 - RNA, 19 nt, Human
gggccggagcaggaggggg

SEQ ID NO: 179102 - RNA, 21 nt, Human
gggccucuggcauuacccuug

SEQ ID NO: 179103 - RNA, 21 nt, Human
gggcugggccugagguccugg

SEQ ID NO: 179104 - RNA, 19 nt, Human
ggggcugggccugaggucc

SEQ ID NO: 179105 - RNA, 20 nt, Human
gguccccagcuccagcaugg

SEQ ID NO: 179106 - RNA, 22 nt, Human
gguuggggcugggccugagguc

SEQ ID NO: 179107 - RNA, 24 nt, Human
gucaccccccagucacuggguucc

SEQ ID NO: 179108 - RNA, 20 nt, Human
gucccucugccccuuccucu

SEQ ID NO: 179109 - RNA, 20 nt, Human
guguaggcgucaccccccag

SEQ ID NO: 179110 - RNA, 22 nt, Human
uaaggcauaagagacagguggg

SEQ ID NO: 179111 - RNA, 18 nt, Human
uacccuugagcccccaca

SEQ ID NO: 179112 - RNA, 22 nt, Human
uacccuugagcccccacagucc

SEQ ID NO: 179113 - RNA, 20 nt, Human
uauggaggaggccuaagcug

SEQ ID NO: 179114 - RNA, 21 nt, Human
ucaaaccacacaccagagugc

SEQ ID NO: 179115 - RNA, 23 nt, Human
ucaaaccacacaccagagugcaa

SEQ ID NO: 179116 - RNA, 22 nt, Human
ucacuggguuccuauggaggag

SEQ ID NO: 179117 - RNA, 23 nt, Human
ucacuggguuccuauggaggagg

SEQ ID NO: 179118 - RNA, 20 nt, Human
uccaggucccggugauggag

SEQ ID NO: 179119 - RNA, 24 nt, Human
uccaggucccggugauggagaccc

SEQ ID NO: 179120 - RNA, 19 nt, Human
uccuuggccaccaaugccu

SEQ ID NO: 179121 - RNA, 22 nt, Human
ucgcuggggccaugggccucug

SEQ ID NO: 179122 - RNA, 19 nt, Human
ucugccccuuccucucccc

SEQ ID NO: 179123 - RNA, 20 nt, Human
ucugccccuuccucucccca

SEQ ID NO: 179124 - RNA, 23 nt, Human
ugccccuuccucuccccagcccc

SEQ ID NO: 179125 - RNA, 21 nt, Human
uggauggacagacguaagaca

SEQ ID NO: 179126 - RNA, 20 nt, Human
uggauggacagacguaagag

SEQ ID NO: 179127 - RNA, 20 nt, Human
uggggcugggccugaggucc

SEQ ID NO: 179128 - RNA, 20 nt, Human
ugggguuggggcugggccug

SEQ ID NO: 179129 - RNA, 20 nt, Human
uuuggcucagcaggggcggg

SEQ ID NO: 179130 - RNA, 19 nt, Human
aaaugauucacuuuugacu

SEQ ID NO: 179131 - RNA, 19 nt, Human
aacauggucugugccaccu

SEQ ID NO: 179132 - RNA, 18 nt, Human
aagacagcgaggggcagg

SEQ ID NO: 179133 - RNA, 19 nt, Human
aagacagcgaggggcaggg

SEQ ID NO: 179134 - RNA, 23 nt, Human
aagcauggaauugcaacagggcu

SEQ ID NO: 179135 - RNA, 19 nt, Human
aagccuggcaaggggcagg

SEQ ID NO: 179136 - RNA, 18 nt, Human
agaaaugcccagggcccc

SEQ ID NO: 179137 - RNA, 21 nt, Human
agacccccaccccccaccccc

SEQ ID NO: 179138 - RNA, 23 nt, Human
agagacccccaccccccaccccc

SEQ ID NO: 179139 - RNA, 19 nt, Human
agaggcagggcuggggacu

SEQ ID NO: 179140 - RNA, 18 nt, Human
agccauuugccacgaagc

SEQ ID NO: 179141 - RNA, 27 nt, Human
agcgaggggcagggaagggauaugacc

SEQ ID NO: 179142 - RNA, 23 nt, Human
aggcaccuuccugggccaccucc

SEQ ID NO: 179143 - RNA, 20 nt, Human
agggaggaaccagggaacag

SEQ ID NO: 179144 - RNA, 18 nt, Human
agguagucaguaggaugg

SEQ ID NO: 179145 - RNA, 27 nt, Human
aucaccuccagacccaacaucucgcug

SEQ ID NO: 179146 - RNA, 22 nt, Human
aucucaucaccuccagacccaa

SEQ ID NO: 179147 - RNA, 19 nt, Human
augaagcagugaaaccugc

SEQ ID NO: 179148 - RNA, 22 nt, Human
augaagcagugaaaccugcuug

SEQ ID NO: 179149 - RNA, 27 nt, Human
auggcagcaggagcugguuggcggggg

SEQ ID NO: 179150 - RNA, 20 nt, Human
auugcaacagggcugcagcc

SEQ ID NO: 179151 - RNA, 19 nt, Human
caaaacaagggcagcagag

SEQ ID NO: 179152 - RNA, 20 nt, Human
caaaacaagggcagcagagc

SEQ ID NO: 179153 - RNA, 20 nt, Human
caacagggcugcagccccuu

SEQ ID NO: 179154 - RNA, 21 nt, Human
caagcacacaacucaucacuc

SEQ ID NO: 179155 - RNA, 21 nt, Human
caagcuggcgggggccaagca

SEQ ID NO: 179156 - RNA, 19 nt, Human
caccccccaccccaguggc

SEQ ID NO: 179157 - RNA, 19 nt, Human
caccccccaccccccaccc

SEQ ID NO: 179158 - RNA, 22 nt, Human
caccuacgccaagccugggggu

SEQ ID NO: 179159 - RNA, 21 nt, Human
cacuccgcaccccugacagca

SEQ ID NO: 179160 - RNA, 22 nt, Human
cacuccgcaccccugacagcau

SEQ ID NO: 179161 - RNA, 22 nt, Human
cacuccguggccauuccaggac

SEQ ID NO: 179162 - RNA, 23 nt, Human
cacugaccucaacaguaacgagu

SEQ ID NO: 179163 - RNA, 22 nt, Human
cagcaaaacaagggcagcagag

SEQ ID NO: 179164 - RNA, 22 nt, Human
cagcagcaguuugguucucagc

SEQ ID NO: 179165 - RNA, 18 nt, Human
cagcagcuagaguggcug

SEQ ID NO: 179166 - RNA, 19 nt, Human
cagcaggagcugguuggcg

SEQ ID NO: 179167 - RNA, 18 nt, Human
caggagcugguuggcggg

SEQ ID NO: 179168 - RNA, 24 nt, Human
cagggcugcagcagccagucucug

SEQ ID NO: 179169 - RNA, 21 nt, Human
cagggcugcagccccuugggc

SEQ ID NO: 179170 - RNA, 22 nt, Human
ccacaccacaugccaucuggug

SEQ ID NO: 179171 - RNA, 18 nt, Human
ccacaucaaagcuacaag

SEQ ID NO: 179172 - RNA, 22 nt, Human
ccacaucaaagcuacaagcacu

SEQ ID NO: 179173 - RNA, 18 nt, Human
ccaccccccaccccccac

SEQ ID NO: 179174 - RNA, 25 nt, Human
ccaccuuccuuuccccagagauguc

SEQ ID NO: 179175 - RNA, 18 nt, Human
cccaacaucucgcugaca

SEQ ID NO: 179176 - RNA, 21 nt, Human
cccaguggcuucagugaaugc

SEQ ID NO: 179177 - RNA, 23 nt, Human
cccauaguaaggaauaaggaagc

SEQ ID NO: 179178 - RNA, 24 nt, Human
ccccaguggcuucagugaaugcca

SEQ ID NO: 179179 - RNA, 18 nt, Human
cccccaccccccacccca

SEQ ID NO: 179180 - RNA, 23 nt, Human
cccccaccccccaccccaguggc

SEQ ID NO: 179181 - RNA, 24 nt, Human
cccccaccccccaccccccacccc

SEQ ID NO: 179182 - RNA, 20 nt, Human
ccccccaccccccaccccag

SEQ ID NO: 179183 - RNA, 19 nt, Human
ccccuugggccgugcaucu

SEQ ID NO: 179184 - RNA, 22 nt, Human
cccugacagcauauggccacuu

SEQ ID NO: 179185 - RNA, 22 nt, Human
ccucaguagcuggggaacaguu

SEQ ID NO: 179186 - RNA, 22 nt, Human
ccugaggccuccuguguccagc

SEQ ID NO: 179187 - RNA, 18 nt, Human
ccuggcuucaagguggag

SEQ ID NO: 179188 - RNA, 24 nt, Human
ccuuauucugggccaggcaccuuc

SEQ ID NO: 179189 - RNA, 25 nt, Human
cgggaccagagcccuccucgucuca

SEQ ID NO: 179190 - RNA, 21 nt, Human
cugaccucaacaguaacgagu

SEQ ID NO: 179191 - RNA, 18 nt, Human
cugcagcagccagucucu

SEQ ID NO: 179192 - RNA, 19 nt, Human
cugggcagcacauuaggac

SEQ ID NO: 179193 - RNA, 21 nt, Human
cuuguucaccugggcuccgca

SEQ ID NO: 179194 - RNA, 22 nt, Human
cuuguucaccugggcuccgcaa

SEQ ID NO: 179195 - RNA, 21 nt, Human
cuuuagagacccccacccccc

SEQ ID NO: 179196 - RNA, 22 nt, Human
gacaagcuggcgggggccaagc

SEQ ID NO: 179197 - RNA, 20 nt, Human
gacccaacaucucgcugaca

SEQ ID NO: 179198 - RNA, 19 nt, Human
gacccccaccccccacccc

SEQ ID NO: 179199 - RNA, 20 nt, Human
gacccccaccccccaccccc

SEQ ID NO: 179200 - RNA, 23 nt, Human
gacccccaccccccaccccccac

SEQ ID NO: 179201 - RNA, 21 nt, Human
gagaaggggaaauacuggcuc

SEQ ID NO: 179202 - RNA, 20 nt, Human
gcaaaacaagggcagcagag

SEQ ID NO: 179203 - RNA, 24 nt, Human
gcagcaggagcugguuggcggggg

SEQ ID NO: 179204 - RNA, 20 nt, Human
gcagccugccuggcuucaag

SEQ ID NO: 179205 - RNA, 20 nt, Human
gcagcuagaguggcugggac

SEQ ID NO: 179206 - RNA, 26 nt, Human
gccaccuuccuuuccccagagauguc

SEQ ID NO: 179207 - RNA, 19 nt, Human
gccagggacaagcacacaa

SEQ ID NO: 179208 - RNA, 18 nt, Human
gcugguuggcgggggaag

SEQ ID NO: 179209 - RNA, 24 nt, Human
gcuucagugaaugccaguagaagg

SEQ ID NO: 179210 - RNA, 23 nt, Human
gcuuguucaccugggcuccgcaa

SEQ ID NO: 179211 - RNA, 22 nt, Human
ggaagccuggcaaggggcaggg

SEQ ID NO: 179212 - RNA, 23 nt, Human
ggacaagcuggcgggggccaagc

SEQ ID NO: 179213 - RNA, 18 nt, Human
ggacacagccugccacug

SEQ ID NO: 179214 - RNA, 21 nt, Human
ggaguacaugucccaggauca

SEQ ID NO: 179215 - RNA, 26 nt, Human
ggauggcagcaggagcugguuggcgg

SEQ ID NO: 179216 - RNA, 21 nt, Human
ggccaaauuccauguccugcc

SEQ ID NO: 179217 - RNA, 18 nt, Human
ggcugcagccccuugggc

SEQ ID NO: 179218 - RNA, 18 nt, Human
gggaggaaccagggaaca

SEQ ID NO: 179219 - RNA, 18 nt, Human
gggaggccaaagcaguag

SEQ ID NO: 179220 - RNA, 23 nt, Human
gggcagccugccuggcuucaagg

SEQ ID NO: 179221 - RNA, 23 nt, Human
uaacaugcagcaaaacaagggca

SEQ ID NO: 179222 - RNA, 24 nt, Human
uaauuccacagacauucccagggc

SEQ ID NO: 179223 - RNA, 23 nt, Human
uagagacccccaccccccacccc

SEQ ID NO: 179224 - RNA, 25 nt, Human
uagagacccccaccccccacccccc

SEQ ID NO: 179225 - RNA, 19 nt, Human
uagaguggcgguagauucc

SEQ ID NO: 179226 - RNA, 27 nt, Human
uagauuccaaggggaggauagcaguuu

SEQ ID NO: 179227 - RNA, 24 nt, Human
ucaaauaacuguaaugucuagagc

SEQ ID NO: 179228 - RNA, 25 nt, Human
ucaacaguaacgaguaacacucaaa

SEQ ID NO: 179229 - RNA, 21 nt, Human
ucacauccagcagcuagagug

SEQ ID NO: 179230 - RNA, 19 nt, Human
ucagcagaaaugcccaggg

SEQ ID NO: 179231 - RNA, 19 nt, Human
ucccagaaagcugaguacc

SEQ ID NO: 179232 - RNA, 21 nt, Human
ucccagaaagcugaguaccuc

SEQ ID NO: 179233 - RNA, 21 nt, Human
uccccagagauguccgauugc

SEQ ID NO: 179234 - RNA, 19 nt, Human
ucucagggcagccugccug

SEQ ID NO: 179235 - RNA, 21 nt, Human
ucucagggcagccugccuggc

SEQ ID NO: 179236 - RNA, 25 nt, Human
ucucagggcagccugccuggcucca

SEQ ID NO: 179237 - RNA, 23 nt, Human
ucucagggcagccugccuggcuu

SEQ ID NO: 179238 - RNA, 19 nt, Human
ucucuggaaagcucuugga

SEQ ID NO: 179239 - RNA, 25 nt, Human
ucuuuagagacccccaccccccacc

SEQ ID NO: 179240 - RNA, 18 nt, Human
ugacagcauauggccacu

SEQ ID NO: 179241 - RNA, 20 nt, Human
ugacagugccccucaguagc

SEQ ID NO: 179242 - RNA, 19 nt, Human
ugagaggagagggaggcca

SEQ ID NO: 179243 - RNA, 19 nt, Human
ugaggauguggcucuugug

SEQ ID NO: 179244 - RNA, 20 nt, Human
ugaggccuccuguguccagc

SEQ ID NO: 179245 - RNA, 20 nt, Human
ugagguuucugggcagcaca

SEQ ID NO: 179246 - RNA, 23 nt, Human
ugcagcaaaacaagggcagcaga

SEQ ID NO: 179247 - RNA, 21 nt, Human
ugcccagggccccuguuccac

SEQ ID NO: 179248 - RNA, 21 nt, Human
ugcugagcuuguucaccuggg

SEQ ID NO: 179249 - RNA, 19 nt, Human
uggagaucacagcguccuc

SEQ ID NO: 179250 - RNA, 19 nt, Human
uggcucuuguggggaauga

SEQ ID NO: 179251 - RNA, 18 nt, Human
uggcugggacaagcuggc

SEQ ID NO: 179252 - RNA, 20 nt, Human
uggcugggacaagcuggcgg

SEQ ID NO: 179253 - RNA, 24 nt, Human
ugggcuccgcaagcuucccccgug

SEQ ID NO: 179254 - RNA, 19 nt, Human
uggggauggcagcaggagc

SEQ ID NO: 179255 - RNA, 22 nt, Human
uggggauggcagcaggagcugg

SEQ ID NO: 179256 - RNA, 20 nt, Human
uggucugugccaccuuccuu

SEQ ID NO: 179257 - RNA, 18 nt, Human
uguccagccacaggugcc

SEQ ID NO: 179258 - RNA, 21 nt, Human
ugucuagagcauaacacaaag

SEQ ID NO: 179259 - RNA, 20 nt, Human
ugugaggauguggcucuugu

SEQ ID NO: 179260 - RNA, 23 nt, Human
uguggcucuuguggggaaugaaa

SEQ ID NO: 179261 - RNA, 18 nt, Human
uuccaaggggaggauagc

SEQ ID NO: 179262 - RNA, 20 nt, Human
uuccacaucaaagcuacaag

SEQ ID NO: 179263 - RNA, 25 nt, Human
uuuagagacccccaccccccacccc

SEQ ID NO: 179264 - RNA, 21 nt, Human
uuugugauccugaggccuccu

SEQ ID NO: 179265 - RNA, 20 nt, Human
uuuuccuuccuaucccuagu

SEQ ID NO: 179266 - RNA, 24 nt, Human
aaaaugcugggauuacaggcguga

SEQ ID NO: 179267 - RNA, 26 nt, Human
aaaugcugggauuacaggcgugagcc

SEQ ID NO: 179268 - RNA, 20 nt, Human
aaccuccaccuccugggccc

SEQ ID NO: 179269 - RNA, 26 nt, Human
aaccuuauccuaggaggacaguuuca

SEQ ID NO: 179270 - RNA, 24 nt, Human
aagccacuuuaaaccuuauccuag

SEQ ID NO: 179271 - RNA, 24 nt, Human
aagcgauucucaugccucagccuc

SEQ ID NO: 179272 - RNA, 20 nt, Human
aagggguuuugccauguugg

SEQ ID NO: 179273 - RNA, 24 nt, Human
aagggguuuugccauguuggccag

SEQ ID NO: 179274 - RNA, 18 nt, Human
acaggcacccaccaccac

SEQ ID NO: 179275 - RNA, 20 nt, Human
acccagcccccaaaaagcca

SEQ ID NO: 179276 - RNA, 23 nt, Human
accucagccucccaaaaugcugg

SEQ ID NO: 179277 - RNA, 24 nt, Human
agcgauucucaugccucagccucc

SEQ ID NO: 179278 - RNA, 24 nt, Human
aggagugcaguggcucgaucucgg

SEQ ID NO: 179279 - RNA, 20 nt, Human
aggcaggugggucacccucg

SEQ ID NO: 179280 - RNA, 24 nt, Human
agggguuuugccauguuggccagg

SEQ ID NO: 179281 - RNA, 20 nt, Human
agugcaguggcucgaucucg

SEQ ID NO: 179282 - RNA, 24 nt, Human
agugcaguggcucgaucucggcuc

SEQ ID NO: 179283 - RNA, 24 nt, Human
caaaaugcugggauuacaggcgug

SEQ ID NO: 179284 - RNA, 20 nt, Human
caaaccaucaguccauucgu

SEQ ID NO: 179285 - RNA, 23 nt, Human
caaccuccaccuccugggcccaa

SEQ ID NO: 179286 - RNA, 24 nt, Human
caaccuccaccuccugggcccaag

SEQ ID NO: 179287 - RNA, 24 nt, Human
caccacgucuggcuaauuuuugua

SEQ ID NO: 179288 - RNA, 22 nt, Human
cacggcacccagcccccaaaaa

SEQ ID NO: 179289 - RNA, 21 nt, Human
cacugcaaccuccaccuccug

SEQ ID NO: 179290 - RNA, 23 nt, Human
cacugcaaccuccaccuccuggg

SEQ ID NO: 179291 - RNA, 19 nt, Human
cagccuccuggguaguugg

SEQ ID NO: 179292 - RNA, 21 nt, Human
caggcacccaccaccacgucu

SEQ ID NO: 179293 - RNA, 20 nt, Human
cauagcaaacacuugggaac

SEQ ID NO: 179294 - RNA, 21 nt, Human
cauagcaaacacuugggaaca

SEQ ID NO: 179295 - RNA, 24 nt, Human
caugccucagccuccuggguaguu

SEQ ID NO: 179296 - RNA, 24 nt, Human
cauguuggccaggcuggucucgaa

SEQ ID NO: 179297 - RNA, 22 nt, Human
ccaaaaugcugggauuacaggc

SEQ ID NO: 179298 - RNA, 22 nt, Human
ccaaaaugcugggauuacaggc

SEQ ID NO: 179299 - RNA, 24 nt, Human
ccaaaaugcugggauuacaggcgu

SEQ ID NO: 179300 - RNA, 24 nt, Human
ccaccuccugggcccaagcgauuc

SEQ ID NO: 179301 - RNA, 19 nt, Human
ccauguuggccaggcuggu

SEQ ID NO: 179302 - RNA, 23 nt, Human
ccauguuggccaggcuggucucg

SEQ ID NO: 179303 - RNA, 26 nt, Human
ccccaaaaaaaaaaaaaaaacuuuug

SEQ ID NO: 179304 - RNA, 22 nt, Human
ccccaaaaagccacuuuaaacc

SEQ ID NO: 179305 - RNA, 21 nt, Human
cccccaaaaaaaaaaaaaaaa

SEQ ID NO: 179306 - RNA, 23 nt, Human
cccccaaaaagccacuuuaaacc

SEQ ID NO: 179307 - RNA, 21 nt, Human
ccccccaaaaaaaaaaaaaaa

SEQ ID NO: 179308 - RNA, 18 nt, Human
ccccgcccccccaaaaaa

SEQ ID NO: 179309 - RNA, 19 nt, Human
cccgcccccccaaaaaaaa

SEQ ID NO: 179310 - RNA, 26 nt, Human
cccgcccccccaaaaaaaaaaaaaaa

SEQ ID NO: 179311 - RNA, 18 nt, Human
ccuggccucaagugaucu

SEQ ID NO: 179312 - RNA, 24 nt, Human
ccuggccucaagugaucugcccac

SEQ ID NO: 179313 - RNA, 20 nt, Human
ccugggcccaagcgauucuc

SEQ ID NO: 179314 - RNA, 22 nt, Human
ccuggguaguuggauuacaggc

SEQ ID NO: 179315 - RNA, 24 nt, Human
cucaagugaucugcccaccucagc

SEQ ID NO: 179316 - RNA, 24 nt, Human
cucacugcaaccuccaccuccugg

SEQ ID NO: 179317 - RNA, 27 nt, Human
cucacugcaaccuccaccuccugggcc

SEQ ID NO: 179318 - RNA, 21 nt, Human
cuccugggcccaagcgauucu

SEQ ID NO: 179319 - RNA, 18 nt, Human
cucuguugcccaggagug

SEQ ID NO: 179320 - RNA, 18 nt, Human
cugcaaccuccaccuccu

SEQ ID NO: 179321 - RNA, 23 nt, Human
cugcaaccuccaccuccugggcc

SEQ ID NO: 179322 - RNA, 21 nt, Human
cugcucacgcgguguguugca

SEQ ID NO: 179323 - RNA, 24 nt, Human
gaaccccgcccccccaaaaaaaaa

SEQ ID NO: 179324 - RNA, 19 nt, Human
gaagggguuuugccauguu

SEQ ID NO: 179325 - RNA, 22 nt, Human
gagaauuuuuuucaaauaaaug

SEQ ID NO: 179326 - RNA, 18 nt, Human
gauuacaggcgugagcca

SEQ ID NO: 179327 - RNA, 23 nt, Human
gauuacaggcgugagccacggca

SEQ ID NO: 179328 - RNA, 20 nt, Human
gcaaccuccaccuccugggc

SEQ ID NO: 179329 - RNA, 22 nt, Human
gcacccagcccccaaaaagcca

SEQ ID NO: 179330 - RNA, 20 nt, Human
gccauguuggccaggcuggu

SEQ ID NO: 179331 - RNA, 22 nt, Human
gccauguuggccaggcuggucu

SEQ ID NO: 179332 - RNA, 23 nt, Human
gcgauucucaugccucagccucc

SEQ ID NO: 179333 - RNA, 23 nt, Human
gcuggucucgaacuccuggccuc

SEQ ID NO: 179334 - RNA, 19 nt, Human
ggaguuaaaaacagcuuua

SEQ ID NO: 179335 - RNA, 19 nt, Human
ggauuacaggcacccacca

SEQ ID NO: 179336 - RNA, 22 nt, Human
ggauuacaggcacccaccacca

SEQ ID NO: 179337 - RNA, 24 nt, Human
ggccucaagugaucugcccaccuc

SEQ ID NO: 179338 - RNA, 24 nt, Human
ggcuggucucgaacuccuggccuc

SEQ ID NO: 179339 - RNA, 22 nt, Human
gggguuuugccauguuggccag

SEQ ID NO: 179340 - RNA, 23 nt, Human
gggguuuugccauguuggccagg

SEQ ID NO: 179341 - RNA, 23 nt, Human
guagagaagggguuuugccaugu

SEQ ID NO: 179342 - RNA, 22 nt, Human
gucugugacuggcugcuucuac

SEQ ID NO: 179343 - RNA, 24 nt, Human
gugaucugcccaccucagccuccc

SEQ ID NO: 179344 - RNA, 18 nt, Human
uaaugcagguaacacugc

SEQ ID NO: 179345 - RNA, 23 nt, Human
uaauguaauaaugcagguaacac

SEQ ID NO: 179346 - RNA, 24 nt, Human
uaauuuuuguauuuuuaguagaga

SEQ ID NO: 179347 - RNA, 24 nt, Human
uacaggcgugagccacggcaccca

SEQ ID NO: 179348 - RNA, 22 nt, Human
uagagaagggguuuugccaugu

SEQ ID NO: 179349 - RNA, 24 nt, Human
uaguagagaagggguuuugccaug

SEQ ID NO: 179350 - RNA, 21 nt, Human
uauuucagauuaucagugauu

SEQ ID NO: 179351 - RNA, 24 nt, Human
ucaaauaaauguccauugcauaga

SEQ ID NO: 179352 - RNA, 23 nt, Human
ucacugcaaccuccaccuccugg

SEQ ID NO: 179353 - RNA, 24 nt, Human
ucacugcaaccuccaccuccuggg

SEQ ID NO: 179354 - RNA, 25 nt, Human
ucacugcaaccuccaccuccugggc

SEQ ID NO: 179355 - RNA, 27 nt, Human
ucacugcaaccuccaccuccugggccc

SEQ ID NO: 179356 - RNA, 18 nt, Human
ucagccucccaaaaugcu

SEQ ID NO: 179357 - RNA, 21 nt, Human
ucagccuccuggguaguugga

SEQ ID NO: 179358 - RNA, 24 nt, Human
ucccaaaaugcugggauuacaggc

SEQ ID NO: 179359 - RNA, 21 nt, Human
uccccaagagccacuuuauuu

SEQ ID NO: 179360 - RNA, 21 nt, Human
uccugggcccaagcgauucuc

SEQ ID NO: 179361 - RNA, 23 nt, Human
uccuggguaguuggauuacaggc

SEQ ID NO: 179362 - RNA, 24 nt, Human
uccuggguaguuggauuacaggca

SEQ ID NO: 179363 - RNA, 21 nt, Human
ucucgaacuccuggccucaag

SEQ ID NO: 179364 - RNA, 18 nt, Human
ucugaaaauuacaagugg

SEQ ID NO: 179365 - RNA, 22 nt, Human
ucugcacccaacaucuggcccc

SEQ ID NO: 179366 - RNA, 21 nt, Human
ucugcccaccucagccuccca

SEQ ID NO: 179367 - RNA, 24 nt, Human
ucugcccaccucagccucccaaaa

SEQ ID NO: 179368 - RNA, 19 nt, Human
ucuguugcccaggagugca

SEQ ID NO: 179369 - RNA, 19 nt, Human
ucuugcucuguugcccagg

SEQ ID NO: 179370 - RNA, 20 nt, Human
ucuugcucuguugcccagga

SEQ ID NO: 179371 - RNA, 21 nt, Human
ucuugcucuguugcccaggag

SEQ ID NO: 179372 - RNA, 22 nt, Human
ugagacgaagucuugcucuguu

SEQ ID NO: 179373 - RNA, 24 nt, Human
ugaucugcccaccucagccuccca

SEQ ID NO: 179374 - RNA, 22 nt, Human
ugcaguggcucgaucucggcuc

SEQ ID NO: 179375 - RNA, 24 nt, Human
ugccauguuggccaggcuggucuc

SEQ ID NO: 179376 - RNA, 27 nt, Human
ugccauguuggccaggcuggucucgaa

SEQ ID NO: 179377 - RNA, 20 nt, Human
ugccucagccuccuggguag

SEQ ID NO: 179378 - RNA, 20 nt, Human
ugccucagccuccuggguag

SEQ ID NO: 179379 - RNA, 22 nt, Human
ugcggaggaggcagguggguca

SEQ ID NO: 179380 - RNA, 23 nt, Human
ugcgucuaaccucuuccuggccu

SEQ ID NO: 179381 - RNA, 18 nt, Human
ugcucuguugcccaggag

SEQ ID NO: 179382 - RNA, 24 nt, Human
ugcugggauuacaggcgugagcca

SEQ ID NO: 179383 - RNA, 21 nt, Human
ugcuucuacaucugcacccaa

SEQ ID NO: 179384 - RNA, 24 nt, Human
ugcuuuauuuccuugguuccucua

SEQ ID NO: 179385 - RNA, 19 nt, Human
uggauuacaggcacccacc

SEQ ID NO: 179386 - RNA, 23 nt, Human
uggauuacaggcacccaccacca

SEQ ID NO: 179387 - RNA, 23 nt, Human
uggcagggugcaggaccuuaagu

SEQ ID NO: 179388 - RNA, 24 nt, Human
uggccaggcuggucucgaacuccu

SEQ ID NO: 179389 - RNA, 18 nt, Human
uggccucaagugaucugc

SEQ ID NO: 179390 - RNA, 18 nt, Human
ugggauuacaggcgugag

SEQ ID NO: 179391 - RNA, 19 nt, Human
ugggauuacaggcgugagc

SEQ ID NO: 179392 - RNA, 21 nt, Human
ugggauuacaggcgugagcca

SEQ ID NO: 179393 - RNA, 22 nt, Human
ugggauuacaggcgugagccac

SEQ ID NO: 179394 - RNA, 22 nt, Human
ugggauuacaggcgugagccac

SEQ ID NO: 179395 - RNA, 23 nt, Human
ugggauuacaggcgugagccacg

SEQ ID NO: 179396 - RNA, 24 nt, Human
ugggauuacaggcgugagccacgg

SEQ ID NO: 179397 - RNA, 26 nt, Human
ugggauuacaggcgugagccacggca

SEQ ID NO: 179398 - RNA, 27 nt, Human
ugggauuacaggcgugagccacggcac

SEQ ID NO: 179399 - RNA, 18 nt, Human
ugguacauuaaauugcuu

SEQ ID NO: 179400 - RNA, 18 nt, Human
ugugacuggcugcuucua

SEQ ID NO: 179401 - RNA, 22 nt, Human
uuaaaaacagcuuuagaacccc

SEQ ID NO: 179402 - RNA, 18 nt, Human
uuaguagagaagggguuu

SEQ ID NO: 179403 - RNA, 22 nt, Human
uuaguagagaagggguuuugcc

SEQ ID NO: 179404 - RNA, 24 nt, Human
uuaguagagaagggguuuugccau

SEQ ID NO: 179405 - RNA, 19 nt, Human
uuggauuacaggcacccac

SEQ ID NO: 179406 - RNA, 19 nt, Human
uuuaauuaagaaaacaugu

SEQ ID NO: 179407 - RNA, 23 nt, Human
uuuugccauguuggccaggcugg

SEQ ID NO: 179408 - RNA, 24 nt, Human
uuuuuaguagagaagggguuuugc

SEQ ID NO: 179409 - RNA, 20 nt, Human
uuuuuguauuuuuaguagag

SEQ ID NO: 179410 - RNA, 30 nt, Human
uuuuuuuuuuuuuuuuuuuauacuuuuaaa

SEQ ID NO: 179411 - RNA, 24 nt, Human
acauaacuguggcugcuuuugauu

SEQ ID NO: 179412 - RNA, 22 nt, Human
agacaaaaaaaagauuaacuaa

SEQ ID NO: 179413 - RNA, 29 nt, Human
aggcuaaaagacaaaaaaaaggggacccc

SEQ ID NO: 179414 - RNA, 18 nt, Human
auuaguuggugcaagaaa

SEQ ID NO: 179415 - RNA, 20 nt, Human
caaaucagaccuacauaacu

SEQ ID NO: 179416 - RNA, 19 nt, Human
cacagaacucuccgcccuc

SEQ ID NO: 179417 - RNA, 20 nt, Human
cacagaacucuccgcccucc

SEQ ID NO: 179418 - RNA, 26 nt, Human
cccgaugccuacaugaauccuuccca

SEQ ID NO: 179419 - RNA, 18 nt, Human
ccgcccuccucagccgcc

SEQ ID NO: 179420 - RNA, 22 nt, Human
cggaauaaacacaacauugaug

SEQ ID NO: 179421 - RNA, 25 nt, Human
cuaaaauaagcuaugagguccaauc

SEQ ID NO: 179422 - RNA, 22 nt, Human
cucuccgcccuccucagccgcc

SEQ ID NO: 179423 - RNA, 20 nt, Human
gaccuacauaacuguggcug

SEQ ID NO: 179424 - RNA, 20 nt, Human
ggcuaaaagacaaaaaaaag

SEQ ID NO: 179425 - RNA, 19 nt, Human
uaaaauaagcuaugagguc

SEQ ID NO: 179426 - RNA, 19 nt, Human
uaguaggauagaguuggug

SEQ ID NO: 179427 - RNA, 21 nt, Human
uaugacauucaaaucagaccu

SEQ ID NO: 179428 - RNA, 23 nt, Human
ucacuugcaccaccccuacucac

SEQ ID NO: 179429 - RNA, 19 nt, Human
ugagguccaaucaagaaug

SEQ ID NO: 179430 - RNA, 21 nt, Human
ugcaccaccccuacucaccua

SEQ ID NO: 179431 - RNA, 18 nt, Human
ugccuggaagcaagucuu

SEQ ID NO: 179432 - RNA, 18 nt, Human
ugcgccaucccggucaca

SEQ ID NO: 179433 - RNA, 26 nt, Human
uguacagaggggcuucuaaccucaag

SEQ ID NO: 179434 - RNA, 21 nt, Human
uuauaauguggacuuaggcuc

SEQ ID NO: 179435 - RNA, 22 nt, Human
uucaccacagaacucuccgccc

SEQ ID NO: 179436 - RNA, 19 nt, Human
uucccgaugccuacaugaa

SEQ ID NO: 179437 - RNA, 20 nt, Human
uugcaccaccccuacucacc

SEQ ID NO: 179438 - RNA, 26 nt, Human
uuuugauuaucuguacagaggggcuu

SEQ ID NO: 179439 - RNA, 19 nt, Human
uuuuuuuuuuugccuggaa

SEQ ID NO: 179440 - RNA, 21 nt, Human
uuuuuuuuuuuuuugccugga

SEQ ID NO: 179441 - RNA, 22 nt, Human
uuuuuuuuuuuuuuuugccugg

SEQ ID NO: 179442 - RNA, 18 nt, Human
uuuuuuuuuuuuuuuuug

SEQ ID NO: 179443 - RNA, 21 nt, Human
uuuuuuuuuuuuuuuuugccu

SEQ ID NO: 179444 - RNA, 24 nt, Human
uuuuuuuuuuuuuuuuuugccugg

SEQ ID NO: 179445 - RNA, 24 nt, Human
aauaugcagcaucugaggccuggg

SEQ ID NO: 179446 - RNA, 18 nt, Human
acagaaucuucuucaggg

SEQ ID NO: 179447 - RNA, 18 nt, Human
acagaaucuucuucaggg

SEQ ID NO: 179448 - RNA, 18 nt, Human
acagaaucuucuucaggg

SEQ ID NO: 179449 - RNA, 22 nt, Human
acccuucaccaggccugacagc

SEQ ID NO: 179450 - RNA, 20 nt, Human
agaaagcagcuagagggcuc

SEQ ID NO: 179451 - RNA, 20 nt, Human
agcagcagacaggggcccca

SEQ ID NO: 179452 - RNA, 20 nt, Human
agccuuguccuccuggagca

SEQ ID NO: 179453 - RNA, 20 nt, Human
agcucagagagggugagcgg

SEQ ID NO: 179454 - RNA, 21 nt, Human
aggacccgagcugguguucca

SEQ ID NO: 179455 - RNA, 21 nt, Human
aggaggccaccugagccuggc

SEQ ID NO: 179456 - RNA, 22 nt, Human
aggccaggaggccaccugagcc

SEQ ID NO: 179457 - RNA, 24 nt, Human
aggccaggaggccaccugagccug

SEQ ID NO: 179458 - RNA, 18 nt, Human
aguaucuugucccuggau

SEQ ID NO: 179459 - RNA, 20 nt, Human
cacacagcacuggggcacag

SEQ ID NO: 179460 - RNA, 18 nt, Human
cacacccuucaccaggcc

SEQ ID NO: 179461 - RNA, 21 nt, Human
cacuugccuugcugaggccug

SEQ ID NO: 179462 - RNA, 19 nt, Human
cagaacaggcccugccucc

SEQ ID NO: 179463 - RNA, 22 nt, Human
cagacaggggccccaagccuug

SEQ ID NO: 179464 - RNA, 22 nt, Human
cagcagcagacaggggccccaa

SEQ ID NO: 179465 - RNA, 18 nt, Human
ccagcagcagacaggggc

SEQ ID NO: 179466 - RNA, 24 nt, Human
ccagcagcagacaggggccccaag

SEQ ID NO: 179467 - RNA, 24 nt, Human
ccagcagcagacgggggccccaag

SEQ ID NO: 179468 - RNA, 24 nt, Human
ccagcagcagacgggggccccaag

SEQ ID NO: 179469 - RNA, 18 nt, Human
ccccgggucccagcuggg

SEQ ID NO: 179470 - RNA, 27 nt, Human
cccuucaccaggccugacagcgcuccu

SEQ ID NO: 179471 - RNA, 18 nt, Human
ccgggucaggguuaaggg

SEQ ID NO: 179472 - RNA, 24 nt, Human
ccucacuugccuugcugaggccug

SEQ ID NO: 179473 - RNA, 18 nt, Human
ccugaaggucaagggagg

SEQ ID NO: 179474 - RNA, 18 nt, Human
ccugaaggucaagggagg

SEQ ID NO: 179475 - RNA, 22 nt, Human
ccugguccuggugaguaucuug

SEQ ID NO: 179476 - RNA, 19 nt, Human
cucacacucugcugaagcc

SEQ ID NO: 179477 - RNA, 19 nt, Human
cucacacucugcugaagcc

SEQ ID NO: 179478 - RNA, 19 nt, Human
cucacacucugcugaagcc

SEQ ID NO: 179479 - RNA, 19 nt, Human
cucuagcugguuucucugu

SEQ ID NO: 179480 - RNA, 19 nt, Human
cugcucucacuucugggcu

SEQ ID NO: 179481 - RNA, 21 nt, Human
cuggggcacagccaacugcuc

SEQ ID NO: 179482 - RNA, 20 nt, Human
cuucagggacucucugauca

SEQ ID NO: 179483 - RNA, 20 nt, Human
cuucagggacucucugauca

SEQ ID NO: 179484 - RNA, 20 nt, Human
cuucagggacucucugauca

SEQ ID NO: 179485 - RNA, 22 nt, Human
cuucucguucuccugaagguca

SEQ ID NO: 179486 - RNA, 22 nt, Human
cuucucguucuccugaagguca

SEQ ID NO: 179487 - RNA, 19 nt, Human
gaaagacaggaggauuugg

SEQ ID NO: 179488 - RNA, 19 nt, Human
gaaagacaggaggauuugg

SEQ ID NO: 179489 - RNA, 19 nt, Human
gaaagacaggaggauuugg

SEQ ID NO: 179490 - RNA, 18 nt, Human
gaggccuggggacagugg

SEQ ID NO: 179491 - RNA, 19 nt, Human
gaguaucuugucccuggau

SEQ ID NO: 179492 - RNA, 21 nt, Human
gccacagaaucuucuucaggg

SEQ ID NO: 179493 - RNA, 21 nt, Human
gccucuagcugguuucucugu

SEQ ID NO: 179494 - RNA, 18 nt, Human
gccuuguccuccuggagc

SEQ ID NO: 179495 - RNA, 18 nt, Human
gggacagugggggcccag

SEQ ID NO: 179496 - RNA, 18 nt, Human
gggacagugggggcccag

SEQ ID NO: 179497 - RNA, 24 nt, Human
uaaccggggucucccucacacucu

SEQ ID NO: 179498 - RNA, 24 nt, Human
uaaccggggucucccucacacucu

SEQ ID NO: 179499 - RNA, 24 nt, Human
uaaccggggucucccucacacucu

SEQ ID NO: 179500 - RNA, 23 nt, Human
uagccacagaaucuucuucaggg

SEQ ID NO: 179501 - RNA, 23 nt, Human
uagccacagaaucuucuucaggg

SEQ ID NO: 179502 - RNA, 20 nt, Human
uagcugguuucucugucucc

SEQ ID NO: 179503 - RNA, 20 nt, Human
uagcugguuucucugucucc

SEQ ID NO: 179504 - RNA, 19 nt, Human
uagcugguuucucugucuu

SEQ ID NO: 179505 - RNA, 19 nt, Human
uagcugguuucucugucuu

SEQ ID NO: 179506 - RNA, 21 nt, Human
ucagccuuguccuccuggagc

SEQ ID NO: 179507 - RNA, 19 nt, Human
uccaaagagccucaggagc

SEQ ID NO: 179508 - RNA, 19 nt, Human
uccaccagcucagagaggg

SEQ ID NO: 179509 - RNA, 19 nt, Human
uccagccuggaugacggca

SEQ ID NO: 179510 - RNA, 19 nt, Human
uccagccuggaugacggca

SEQ ID NO: 179511 - RNA, 19 nt, Human
uccagccuggaugacggca

SEQ ID NO: 179512 - RNA, 20 nt, Human
ucccucugucucuagcuggu

SEQ ID NO: 179513 - RNA, 22 nt, Human
ucuccaguugaacucugcugug

SEQ ID NO: 179514 - RNA, 22 nt, Human
ucuccaguugaacucugcugug

SEQ ID NO: 179515 - RNA, 18 nt, Human
ucucccucacacucugcu

SEQ ID NO: 179516 - RNA, 18 nt, Human
ucucccucacacucugcu

SEQ ID NO: 179517 - RNA, 18 nt, Human
ucucccucacacucugcu

SEQ ID NO: 179518 - RNA, 22 nt, Human
ugaggaaauaaccggggucucc

SEQ ID NO: 179519 - RNA, 22 nt, Human
ugaggaaauaaccggggucucc

SEQ ID NO: 179520 - RNA, 22 nt, Human
ugaggaaauaaccggggucucc

SEQ ID NO: 179521 - RNA, 19 nt, Human
ugcccuucagucuuccaga

SEQ ID NO: 179522 - RNA, 19 nt, Human
ugccugggguguuggccac

SEQ ID NO: 179523 - RNA, 19 nt, Human
ugccugggguguuggccac

SEQ ID NO: 179524 - RNA, 19 nt, Human
ugccugggguguuggccac

SEQ ID NO: 179525 - RNA, 25 nt, Human
ugccuugcugcccuucagucuucca

SEQ ID NO: 179526 - RNA, 21 nt, Human
ugcugcccuucagucuuccag

SEQ ID NO: 179527 - RNA, 22 nt, Human
uggauugcuugucagccuuguc

SEQ ID NO: 179528 - RNA, 22 nt, Human
ugucagccuuguccuccuggag

SEQ ID NO: 179529 - RNA, 18 nt, Human
uuccuggagguccaaaga

SEQ ID NO: 179530 - RNA, 26 nt, Human
uuccugguccuggugaguaucuuguc

SEQ ID NO: 179531 - RNA, 21 nt, Human
uugccacuccgacaccccggg

SEQ ID NO: 179532 - RNA, 19 nt, Human
uuuugggcugcacccgcag

SEQ ID NO: 179533 - RNA, 20 nt, Human
aacuucuucuucauggcucu

SEQ ID NO: 179534 - RNA, 18 nt, Human
acagaaucuucuucagag

SEQ ID NO: 179535 - RNA, 26 nt, Human
acagaggccgacaaugaccagcacca

SEQ ID NO: 179536 - RNA, 22 nt, Human
acccuucaccaggccugacagc

SEQ ID NO: 179537 - RNA, 18 nt, Human
accucagcuuuucugcug

SEQ ID NO: 179538 - RNA, 20 nt, Human
agaaagcagcuagagggcuc

SEQ ID NO: 179539 - RNA, 20 nt, Human
agaacaccucacacaagaca

SEQ ID NO: 179540 - RNA, 18 nt, Human
agaacaggcccugccucc

SEQ ID NO: 179541 - RNA, 22 nt, Human
agccagagacagaggccgacaa

SEQ ID NO: 179542 - RNA, 21 nt, Human
aggaagaggccaaccccgaug

SEQ ID NO: 179543 - RNA, 24 nt, Human
aggaggauuugguggaaacagcug

SEQ ID NO: 179544 - RNA, 19 nt, Human
aggccgagggcagccagag

SEQ ID NO: 179545 - RNA, 18 nt, Human
agggaggccaccuggagc

SEQ ID NO: 179546 - RNA, 23 nt, Human
agggcagccgcccaugccgcugg

SEQ ID NO: 179547 - RNA, 22 nt, Human
agguccucagcugucacaaugc

SEQ ID NO: 179548 - RNA, 18 nt, Human
aguaucuugucccuggau

SEQ ID NO: 179549 - RNA, 18 nt, Human
cacacccuucaccaggcc

SEQ ID NO: 179550 - RNA, 26 nt, Human
caccacuaacuucuucuucauggcuc

SEQ ID NO: 179551 - RNA, 20 nt, Human
caccaggaccacggccagcg

SEQ ID NO: 179552 - RNA, 19 nt, Human
cacggccagcaggcccagc

SEQ ID NO: 179553 - RNA, 21 nt, Human
cagaacaccucacacaagaca

SEQ ID NO: 179554 - RNA, 19 nt, Human
cagcaccaggaccacggcc

SEQ ID NO: 179555 - RNA, 18 nt, Human
cagccagagacagaggcc

SEQ ID NO: 179556 - RNA, 24 nt, Human
caggcaccgccaccgacagcccuc

SEQ ID NO: 179557 - RNA, 22 nt, Human
caggggaagcccgucccccaau

SEQ ID NO: 179558 - RNA, 22 nt, Human
cagggucagucucucccccucc

SEQ ID NO: 179559 - RNA, 21 nt, Human
caguccgcuuguuuuccagga

SEQ ID NO: 179560 - RNA, 24 nt, Human
ccaacaccccgggucccagccggg

SEQ ID NO: 179561 - RNA, 21 nt, Human
ccagcaccaggaccacggcca

SEQ ID NO: 179562 - RNA, 24 nt, Human
ccagcagcagacgggggccccaag

SEQ ID NO: 179563 - RNA, 22 nt, Human
cccaaaguccucuuccucaucc

SEQ ID NO: 179564 - RNA, 23 nt, Human
cccaggcaccgccaccgacagcc

SEQ ID NO: 179565 - RNA, 21 nt, Human
cccaugccgcuggugugccag

SEQ ID NO: 179566 - RNA, 22 nt, Human
ccccaaaguccucuuccucauc

SEQ ID NO: 179567 - RNA, 18 nt, Human
ccccgggucccagccggg

SEQ ID NO: 179568 - RNA, 23 nt, Human
cccgcagugugucccucccaauc

SEQ ID NO: 179569 - RNA, 18 nt, Human
cccgggucccagccggga

SEQ ID NO: 179570 - RNA, 20 nt, Human
cccugccuccucccugcccu

SEQ ID NO: 179571 - RNA, 23 nt, Human
ccgcagugugucccucccaaucu

SEQ ID NO: 179572 - RNA, 18 nt, Human
ccgggucaggguuaaggg

SEQ ID NO: 179573 - RNA, 18 nt, Human
ccguuguagaaggccugg

SEQ ID NO: 179574 - RNA, 25 nt, Human
ccuucaccaggccugacagcgcucc

SEQ ID NO: 179575 - RNA, 23 nt, Human
cgagggcagccagagacagaggc

SEQ ID NO: 179576 - RNA, 21 nt, Human
cgccaagcccuugcccacagg

SEQ ID NO: 179577 - RNA, 20 nt, Human
cggccauggcagcccuggug

SEQ ID NO: 179578 - RNA, 19 nt, Human
cucacacucugcugaagcc

SEQ ID NO: 179579 - RNA, 18 nt, Human
cuccaacaccccgggucc

SEQ ID NO: 179580 - RNA, 23 nt, Human
cuccaacaccccgggucccagcc

SEQ ID NO: 179581 - RNA, 19 nt, Human
cuccaagcacugcuuggca

SEQ ID NO: 179582 - RNA, 22 nt, Human
cugcugcccuucagucuuccag

SEQ ID NO: 179583 - RNA, 18 nt, Human
cuuggcauccgcggccau

SEQ ID NO: 179584 - RNA, 19 nt, Human
gaaagacaggaggauuugg

SEQ ID NO: 179585 - RNA, 21 nt, Human
gaagcaccuuucuaucccggc

SEQ ID NO: 179586 - RNA, 24 nt, Human
gaagcaccuuucuaucccggccga

SEQ ID NO: 179587 - RNA, 22 nt, Human
gaccucagcuuuucugcuguug

SEQ ID NO: 179588 - RNA, 18 nt, Human
gagacagaggccgacaau

SEQ ID NO: 179589 - RNA, 19 nt, Human
gaguaucuugucccuggau

SEQ ID NO: 179590 - RNA, 19 nt, Human
gauggugaggaagaggcca

SEQ ID NO: 179591 - RNA, 18 nt, Human
gcaccgccaccgacagcc

SEQ ID NO: 179592 - RNA, 22 nt, Human
gcagaacaccucacacaagaca

SEQ ID NO: 179593 - RNA, 20 nt, Human
gccaaccccgaugcccaugc

SEQ ID NO: 179594 - RNA, 19 nt, Human
gccacuccaacaccccggg

SEQ ID NO: 179595 - RNA, 18 nt, Human
gcugcucgaugacagucc

SEQ ID NO: 179596 - RNA, 18 nt, Human
gcuggaugcugggcugga

SEQ ID NO: 179597 - RNA, 19 nt, Human
gcuggcaaaggccagccug

SEQ ID NO: 179598 - RNA, 18 nt, Human
ggaagaggcgagcccagg

SEQ ID NO: 179599 - RNA, 20 nt, Human
ggaggccaccuggagccugg

SEQ ID NO: 179600 - RNA, 19 nt, Human
ggcaccgccaccgacagcc

SEQ ID NO: 179601 - RNA, 21 nt, Human
ggcagcccugguguacacaug

SEQ ID NO: 179602 - RNA, 20 nt, Human
ggccugggcacccucgaugg

SEQ ID NO: 179603 - RNA, 20 nt, Human
gucacaaugcccccucagcc

SEQ ID NO: 179604 - RNA, 24 nt, Human
uaaccggggucucccucacacucu

SEQ ID NO: 179605 - RNA, 23 nt, Human
uagccacagaaucuucuucagag

SEQ ID NO: 179606 - RNA, 21 nt, Human
ucagccuugucugccuggagc

SEQ ID NO: 179607 - RNA, 23 nt, Human
ucagccuugucugccuggagcaa

SEQ ID NO: 179608 - RNA, 20 nt, Human
ucagcugucacaaugccccc

SEQ ID NO: 179609 - RNA, 21 nt, Human
ucagcugucacaaugcccccu

SEQ ID NO: 179610 - RNA, 19 nt, Human
uccaaagagccucaggagc

SEQ ID NO: 179611 - RNA, 19 nt, Human
uccacugcagagccaccgu

SEQ ID NO: 179612 - RNA, 19 nt, Human
uccagccuggaugacggca

SEQ ID NO: 179613 - RNA, 22 nt, Human
uccaggacugccgccaagcccu

SEQ ID NO: 179614 - RNA, 19 nt, Human
uccccaggcaccgccaccg

SEQ ID NO: 179615 - RNA, 20 nt, Human
ucccccaaaguccucuuccu

SEQ ID NO: 179616 - RNA, 25 nt, Human
uccgcggccauggcagcccuggugu

SEQ ID NO: 179617 - RNA, 22 nt, Human
uccuuggaggccgagggcagcc

SEQ ID NO: 179618 - RNA, 18 nt, Human
ucucccucacacucugcu

SEQ ID NO: 179619 - RNA, 22 nt, Human
ugaacaugcuggcaaaggccag

SEQ ID NO: 179620 - RNA, 22 nt, Human
ugaggaaauaaccggggucucc

SEQ ID NO: 179621 - RNA, 21 nt, Human
ugaggaagaggccaaccccga

SEQ ID NO: 179622 - RNA, 21 nt, Human
ugcccacagggaagcccuggc

SEQ ID NO: 179623 - RNA, 19 nt, Human
ugccugggguguuggccac

SEQ ID NO: 179624 - RNA, 21 nt, Human
ugcugcugcccuucagucuuc

SEQ ID NO: 179625 - RNA, 22 nt, Human
uggauugcuugucagccuuguc

SEQ ID NO: 179626 - RNA, 23 nt, Human
uggcaaaggccagccugggggcc

SEQ ID NO: 179627 - RNA, 20 nt, Human
ugucacaaugcccccucagc

SEQ ID NO: 179628 - RNA, 23 nt, Human
ugucagguuccuuggaggccgag

SEQ ID NO: 179629 - RNA, 19 nt, Human
ugugggcauucaugagccc

SEQ ID NO: 179630 - RNA, 19 nt, Human
uucacaaucugggccauga

SEQ ID NO: 179631 - RNA, 18 nt, Human
uuccuggagguccaaaga

SEQ ID NO: 179632 - RNA, 19 nt, Human
uuccuuggaggccgagggc

SEQ ID NO: 179633 - RNA, 22 nt, Human
uuccuuggaggccgagggcagc

SEQ ID NO: 179634 - RNA, 24 nt, Human
uuccuuggaggccgagggcagcca

SEQ ID NO: 179635 - RNA, 21 nt, Human
uugccacuccaacaccccggg

SEQ ID NO: 179636 - RNA, 19 nt, Human
aagccacagcugcccucca

SEQ ID NO: 179637 - RNA, 21 nt, Human
acccugagugguucggggagu

SEQ ID NO: 179638 - RNA, 20 nt, Human
agcuagaagccacagcugcc

SEQ ID NO: 179639 - RNA, 18 nt, Human
aggaaugucucgaccuug

SEQ ID NO: 179640 - RNA, 20 nt, Human
aggacccugagugguucggg

SEQ ID NO: 179641 - RNA, 22 nt, Human
aggagaggcacuggggaggggu

SEQ ID NO: 179642 - RNA, 23 nt, Human
cacaggacccugagugguucggg

SEQ ID NO: 179643 - RNA, 26 nt, Human
cacccgggcagcuagaagccacagcu

SEQ ID NO: 179644 - RNA, 23 nt, Human
cagggccaggagaggcacugggg

SEQ ID NO: 179645 - RNA, 23 nt, Human
cagggccaggagaggcacugggg

SEQ ID NO: 179646 - RNA, 24 nt, Human
ccaggagaggcacuggggaggggu

SEQ ID NO: 179647 - RNA, 20 nt, Human
cggcacugcacgaugcgcaa

SEQ ID NO: 179648 - RNA, 20 nt, Human
cuccacagagcggcacugca

SEQ ID NO: 179649 - RNA, 19 nt, Human
cugaagcaguagagcagcc

SEQ ID NO: 179650 - RNA, 20 nt, Human
cugaagcaguagagcagccc

SEQ ID NO: 179651 - RNA, 18 nt, Human
gagaggcacuggggaggg

SEQ ID NO: 179652 - RNA, 18 nt, Human
gagaggcacuggggaggg

SEQ ID NO: 179653 - RNA, 18 nt, Human
gcacgaugcgcaggaaug

SEQ ID NO: 179654 - RNA, 19 nt, Human
ggagaggcacuggggaggg

SEQ ID NO: 179655 - RNA, 23 nt, Human
gggcacuggaguggcaacuucca

SEQ ID NO: 179656 - RNA, 23 nt, Human
gggcacuggaguggcaacuucca

SEQ ID NO: 179657 - RNA, 18 nt, Human
ggggaggggucacaggga

SEQ ID NO: 179658 - RNA, 18 nt, Human
ggggaggggucacaggga

SEQ ID NO: 179659 - RNA, 20 nt, Human
uccacagagcggcacugcac

SEQ ID NO: 179660 - RNA, 19 nt, Human
uccagggccaggagaggca

SEQ ID NO: 179661 - RNA, 19 nt, Human
uccagggccaggagaggca

SEQ ID NO: 179662 - RNA, 19 nt, Human
aagccacagcugcccucca

SEQ ID NO: 179663 - RNA, 21 nt, Human
acccugagugguucggggagu

SEQ ID NO: 179664 - RNA, 20 nt, Human
agcuagaagccacagcugcc

SEQ ID NO: 179665 - RNA, 18 nt, Human
aggaaugucucgaccuug

SEQ ID NO: 179666 - RNA, 22 nt, Human
aggagaggcacuggggaggggu

SEQ ID NO: 179667 - RNA, 22 nt, Human
aggagaggcacuggggaggggu

SEQ ID NO: 179668 - RNA, 23 nt, Human
cacaggacccugagugguucggg

SEQ ID NO: 179669 - RNA, 26 nt, Human
cacccgggcagcuagaagccacagcu

SEQ ID NO: 179670 - RNA, 24 nt, Human
ccaggagaggcacuggggaggggu

SEQ ID NO: 179671 - RNA, 20 nt, Human
cggcacugcacgaugcgcaa

SEQ ID NO: 179672 - RNA, 20 nt, Human
cuccacagagcggcacugca

SEQ ID NO: 179673 - RNA, 20 nt, Human
cugaagcaguagagcagccc

SEQ ID NO: 179674 - RNA, 18 nt, Human
gagaggcacuggggaggg

SEQ ID NO: 179675 - RNA, 18 nt, Human
gcacgaugcgcaggaaug

SEQ ID NO: 179676 - RNA, 19 nt, Human
ggagaggcacuggggaggg

SEQ ID NO: 179677 - RNA, 18 nt, Human
ggggaggggucacaggga

SEQ ID NO: 179678 - RNA, 18 nt, Human
ggggaggggucacaggga

SEQ ID NO: 179679 - RNA, 20 nt, Human
uccacagagcggcacugcac

SEQ ID NO: 179680 - RNA, 24 nt, Human
ugagcagugcgucaucguugugcg

SEQ ID NO: 179681 - RNA, 24 nt, Human
aaacguuauugccccagucaauuc

SEQ ID NO: 179682 - RNA, 22 nt, Human
aacaacaacaacaaaaaugaag

SEQ ID NO: 179683 - RNA, 21 nt, Human
aacaacaacaacaacaacaaa

SEQ ID NO: 179684 - RNA, 19 nt, Human
aacauggugaaaccccguc

SEQ ID NO: 179685 - RNA, 20 nt, Human
aacauggugaaaccccgucu

SEQ ID NO: 179686 - RNA, 21 nt, Human
aacauggugaaaccccgucuc

SEQ ID NO: 179687 - RNA, 18 nt, Human
aacauuuugggaaaaggc

SEQ ID NO: 179688 - RNA, 20 nt, Human
aaccauagcagcaaaguagc

SEQ ID NO: 179689 - RNA, 20 nt, Human
aagacaaucacugcuacuaa

SEQ ID NO: 179690 - RNA, 23 nt, Human
acaacaacaacaacaaaaaugaa

SEQ ID NO: 179691 - RNA, 21 nt, Human
acaacaacaacaacaacaaaa

SEQ ID NO: 179692 - RNA, 22 nt, Human
acaacaacaacaacaacaaaaa

SEQ ID NO: 179693 - RNA, 21 nt, Human
acaccuguaaucccagcacuu

SEQ ID NO: 179694 - RNA, 22 nt, Human
acagagcgagacucugucucaa

SEQ ID NO: 179695 - RNA, 25 nt, Human
accaaaguaccaaaaugacauucug

SEQ ID NO: 179696 - RNA, 21 nt, Human
accccauccugucacuccccc

SEQ ID NO: 179697 - RNA, 22 nt, Human
accccauccugucacuccccca

SEQ ID NO: 179698 - RNA, 23 nt, Human
accccauccugucacucccccaa

SEQ ID NO: 179699 - RNA, 23 nt, Human
accccgucucugcuaaaauacaa

SEQ ID NO: 179700 - RNA, 23 nt, Human
accgcacucuagccuggcgacag

SEQ ID NO: 179701 - RNA, 25 nt, Human
accgcacucuagccuggcgacagag

SEQ ID NO: 179702 - RNA, 22 nt, Human
accuccgagcuucgccucugau

SEQ ID NO: 179703 - RNA, 22 nt, Human
accuuauucccuuccuggauaa

SEQ ID NO: 179704 - RNA, 21 nt, Human
agaaagaaaguuucuuuuagc

SEQ ID NO: 179705 - RNA, 25 nt, Human
agcaaaguagcagaaaaucuaucaa

SEQ ID NO: 179706 - RNA, 24 nt, Human
agcacuuugggaggccgagucggg

SEQ ID NO: 179707 - RNA, 23 nt, Human
agccuggcaugguggugcgugcc

SEQ ID NO: 179708 - RNA, 21 nt, Human
agccuggcgacagagcgagac

SEQ ID NO: 179709 - RNA, 23 nt, Human
agccuggcgacagagcgagacuc

SEQ ID NO: 179710 - RNA, 22 nt, Human
aggcacgggaaucgccugaacc

SEQ ID NO: 179711 - RNA, 22 nt, Human
aggcacgggaaucgccugaacc

SEQ ID NO: 179712 - RNA, 24 nt, Human
aggcacgggaaucgccugaaccug

SEQ ID NO: 179713 - RNA, 21 nt, Human
aggccgagucggguggaucac

SEQ ID NO: 179714 - RNA, 24 nt, Human
agguggagauugcagugagucaag

SEQ ID NO: 179715 - RNA, 27 nt, Human
agguugcuucuuuuucuucugaaugcu

SEQ ID NO: 179716 - RNA, 19 nt, Human
aguaaaaaaugaugaaacu

SEQ ID NO: 179717 - RNA, 19 nt, Human
aguaucaaaaauuaacacc

SEQ ID NO: 179718 - RNA, 24 nt, Human
agucggguggaucacgaggucagg

SEQ ID NO: 179719 - RNA, 22 nt, Human
auacguagcucuugggaaacca

SEQ ID NO: 179720 - RNA, 21 nt, Human
auccuggccaacauggugaaa

SEQ ID NO: 179721 - RNA, 24 nt, Human
aucgcgccaccgcacucuagccug

SEQ ID NO: 179722 - RNA, 28 nt, Human
auuaaaaacauagccauucaaugcuuag

SEQ ID NO: 179723 - RNA, 26 nt, Human
caaaaugacauucugagacugauuga

SEQ ID NO: 179724 - RNA, 23 nt, Human
caaaaugauuucuaaauuacuga

SEQ ID NO: 179725 - RNA, 23 nt, Human
caaacgcuuuaaaguuuucuaaa

SEQ ID NO: 179726 - RNA, 22 nt, Human
caacaaaaaauuagccugugcu

SEQ ID NO: 179727 - RNA, 22 nt, Human
caacaacaaaaaugaaugaugu

SEQ ID NO: 179728 - RNA, 18 nt, Human
caacaacaacaacaacaa

SEQ ID NO: 179729 - RNA, 21 nt, Human
caacaacaacaacaacaaaaa

SEQ ID NO: 179730 - RNA, 23 nt, Human
caacauggugaaaccccgucucu

SEQ ID NO: 179731 - RNA, 23 nt, Human
cacacagcuuugaauugaauuag

SEQ ID NO: 179732 - RNA, 20 nt, Human
caccaaaguaccaaaaugac

SEQ ID NO: 179733 - RNA, 23 nt, Human
caccgcacucuagccuggcgaca

SEQ ID NO: 179734 - RNA, 19 nt, Human
caccuguaaucccagcacu

SEQ ID NO: 179735 - RNA, 24 nt, Human
caccuguaaucccagcacuuuggg

SEQ ID NO: 179736 - RNA, 22 nt, Human
cacgcacuaaaaaacucacucc

SEQ ID NO: 179737 - RNA, 22 nt, Human
cacucuagccuggcgacagagc

SEQ ID NO: 179738 - RNA, 23 nt, Human
cacucuagccuggcgacagagcg

SEQ ID NO: 179739 - RNA, 24 nt, Human
cagcacuuugggaggccgagucgg

SEQ ID NO: 179740 - RNA, 26 nt, Human
cagcacuuugggaggccgagucgggu

SEQ ID NO: 179741 - RNA, 21 nt, Human
ccaaaguaccaaaaugacauu

SEQ ID NO: 179742 - RNA, 19 nt, Human
ccaccgcacucuagccugg

SEQ ID NO: 179743 - RNA, 19 nt, Human
ccaccgcacucuagccugg

SEQ ID NO: 179744 - RNA, 20 nt, Human
ccaccgcacucuagccuggc

SEQ ID NO: 179745 - RNA, 23 nt, Human
ccaccgcacucuagccuggcgac

SEQ ID NO: 179746 - RNA, 21 nt, Human
cccaaugcucucaagaaugau

SEQ ID NO: 179747 - RNA, 28 nt, Human
cccacaauauuaagacaaucacugcuac

SEQ ID NO: 179748 - RNA, 24 nt, Human
cccauccugucacucccccaaaaa

SEQ ID NO: 179749 - RNA, 23 nt, Human
ccccauccugucacucccccaaa

SEQ ID NO: 179750 - RNA, 22 nt, Human
ccuggccaacauggugaaaccc

SEQ ID NO: 179751 - RNA, 23 nt, Human
ccuggccaacauggugaaacccc

SEQ ID NO: 179752 - RNA, 24 nt, Human
ccuggccaacauggugaaaccccg

SEQ ID NO: 179753 - RNA, 21 nt, Human
ccuggcgacagagcgagacuc

SEQ ID NO: 179754 - RNA, 19 nt, Human
ccuguagucccagcuacuc

SEQ ID NO: 179755 - RNA, 21 nt, Human
ccuguagucccagcuacucag

SEQ ID NO: 179756 - RNA, 23 nt, Human
ccugucacucccccaaaaaaggu

SEQ ID NO: 179757 - RNA, 24 nt, Human
cgagaccauccuggccaacauggu

SEQ ID NO: 179758 - RNA, 24 nt, Human
cgagucggguggaucacgagguca

SEQ ID NO: 179759 - RNA, 19 nt, Human
cguagcucuugggaaacca

SEQ ID NO: 179760 - RNA, 21 nt, Human
cuauacauuaaaaacauagcc

SEQ ID NO: 179761 - RNA, 18 nt, Human
cucaccucuaguuuuuag

SEQ ID NO: 179762 - RNA, 24 nt, Human
cugagacugauugagguauuuagc

SEQ ID NO: 179763 - RNA, 20 nt, Human
cugugggagguggagauugc

SEQ ID NO: 179764 - RNA, 22 nt, Human
cuuacaccuguaaucccagcac

SEQ ID NO: 179765 - RNA, 23 nt, Human
gaaacaaaaacuuauuucuugaa

SEQ ID NO: 179766 - RNA, 23 nt, Human
gagauugcagugagucaagaucg

SEQ ID NO: 179767 - RNA, 24 nt, Human
gaucuuaucucucaccaucugcac

SEQ ID NO: 179768 - RNA, 22 nt, Human
gcaaaguagcagaaaaucuauc

SEQ ID NO: 179769 - RNA, 23 nt, Human
gcacucuagccuggcgacagagc

SEQ ID NO: 179770 - RNA, 24 nt, Human
gccaacauggugaaaccccgucuc

SEQ ID NO: 179771 - RNA, 24 nt, Human
gcgacagagcgagacucugucuca

SEQ ID NO: 179772 - RNA, 20 nt, Human
gcgugccuguagucccagcu

SEQ ID NO: 179773 - RNA, 28 nt, Human
gcuaaaauacaaaaaaauuagccugguc

SEQ ID NO: 179774 - RNA, 19 nt, Human
ggaccuccgagcuucgccu

SEQ ID NO: 179775 - RNA, 23 nt, Human
ggagauugcagugagucaagauc

SEQ ID NO: 179776 - RNA, 24 nt, Human
ggagauugcagugagucaagaucg

SEQ ID NO: 179777 - RNA, 18 nt, Human
ggaggcugaggcacggga

SEQ ID NO: 179778 - RNA, 23 nt, Human
ggcacgguggcuuacaccuguaa

SEQ ID NO: 179779 - RNA, 23 nt, Human
gggagguggagauugcagugagu

SEQ ID NO: 179780 - RNA, 21 nt, Human
gguggaucacgaggucaggag

SEQ ID NO: 179781 - RNA, 23 nt, Human
gguggcuuacaccuguaauccca

SEQ ID NO: 179782 - RNA, 24 nt, Human
gguggcuuacaccuguaaucccag

SEQ ID NO: 179783 - RNA, 18 nt, Human
gucuggggagguauaaaa

SEQ ID NO: 179784 - RNA, 21 nt, Human
gugaaaccccgucucugcuaa

SEQ ID NO: 179785 - RNA, 18 nt, Human
guggugcgugccuguagu

SEQ ID NO: 179786 - RNA, 20 nt, Human
uaaaagggcuuuguaaaaaa

SEQ ID NO: 179787 - RNA, 23 nt, Human
uaaaauacaaaaaaauuagccug

SEQ ID NO: 179788 - RNA, 22 nt, Human
uaaaauagccaugcuugaaguc

SEQ ID NO: 179789 - RNA, 21 nt, Human
uaagaaacaacaaaaaauuag

SEQ ID NO: 179790 - RNA, 21 nt, Human
uaagacaaucacugcuacuaa

SEQ ID NO: 179791 - RNA, 22 nt, Human
uaagacaaucacugcuacuaaa

SEQ ID NO: 179792 - RNA, 22 nt, Human
uaagcuuuuuuaaaaaaugaga

SEQ ID NO: 179793 - RNA, 22 nt, Human
uaaguugaucugugcaaacgcu

SEQ ID NO: 179794 - RNA, 22 nt, Human
uaauuuucaguuaucugugggg

SEQ ID NO: 179795 - RNA, 24 nt, Human
uacaccuguaaucccagcacuuug

SEQ ID NO: 179796 - RNA, 18 nt, Human
uagcagcaaaguagcaga

SEQ ID NO: 179797 - RNA, 27 nt, Human
uagcagcaaaguagcagaaaauccuaa

SEQ ID NO: 179798 - RNA, 23 nt, Human
uagccugugcuaugguuugcauu

SEQ ID NO: 179799 - RNA, 25 nt, Human
uauagaaauguugucaggcuguugu

SEQ ID NO: 179800 - RNA, 18 nt, Human
uaucugauuaagcauucu

SEQ ID NO: 179801 - RNA, 21 nt, Human
uauucuucacugagaugagau

SEQ ID NO: 179802 - RNA, 20 nt, Human
uauuuuugccuucuugcuuc

SEQ ID NO: 179803 - RNA, 19 nt, Human
ucaacaacaacaacaacaa

SEQ ID NO: 179804 - RNA, 24 nt, Human
ucaacaacaacaacaacaacaaaa

SEQ ID NO: 179805 - RNA, 22 nt, Human
ucaacauuuugggaaaaggcau

SEQ ID NO: 179806 - RNA, 25 nt, Human
ucacgaggucaggagacucgagacc

SEQ ID NO: 179807 - RNA, 18 nt, Human
uccugaaccgcaaaagcc

SEQ ID NO: 179808 - RNA, 19 nt, Human
uccugaaccgcaaaagcca

SEQ ID NO: 179809 - RNA, 19 nt, Human
ucuaaauuacugagguugc

SEQ ID NO: 179810 - RNA, 22 nt, Human
ucuagccuggcgacagagcgag

SEQ ID NO: 179811 - RNA, 23 nt, Human
ucuagccuggcgacagagcgaga

SEQ ID NO: 179812 - RNA, 23 nt, Human
ucucugcuaaaauacaaaaaaau

SEQ ID NO: 179813 - RNA, 19 nt, Human
ucuguggggacugaaaacc

SEQ ID NO: 179814 - RNA, 21 nt, Human
ugaaccgcaaaagccaccuga

SEQ ID NO: 179815 - RNA, 21 nt, Human
ugagguugcuucuuuuucuuc

SEQ ID NO: 179816 - RNA, 21 nt, Human
ugaguaugugucugguuauag

SEQ ID NO: 179817 - RNA, 22 nt, Human
ugagucaagaucgcgccaccgc

SEQ ID NO: 179818 - RNA, 23 nt, Human
ugagucaagaucgcgccaccgca

SEQ ID NO: 179819 - RNA, 20 nt, Human
ugauaacagaagcacauuau

SEQ ID NO: 179820 - RNA, 20 nt, Human
ugauuaagcauucuucuuau

SEQ ID NO: 179821 - RNA, 22 nt, Human
ugcauuggccaaaacauuaaac

SEQ ID NO: 179822 - RNA, 24 nt, Human
ugccuguagucccagcuacucagg

SEQ ID NO: 179823 - RNA, 24 nt, Human
uggccaacauggugaaaccccguc

SEQ ID NO: 179824 - RNA, 21 nt, Human
uggcuuacaccuguaauccca

SEQ ID NO: 179825 - RNA, 22 nt, Human
uggcuuacaccuguaaucccag

SEQ ID NO: 179826 - RNA, 24 nt, Human
uggcuuacaccuguaaucccagca

SEQ ID NO: 179827 - RNA, 24 nt, Human
ugggaggccgagucggguggauca

SEQ ID NO: 179828 - RNA, 29 nt, Human
ugggagguggagauugcagugacaacggu

SEQ ID NO: 179829 - RNA, 24 nt, Human
ugggagguggagauugcagugagu

SEQ ID NO: 179830 - RNA, 18 nt, Human
uggugcgugccuguaguc

SEQ ID NO: 179831 - RNA, 24 nt, Human
ugguggugcgugccuguaguccca

SEQ ID NO: 179832 - RNA, 25 nt, Human
ugugaaacaaaaacuuauuucuuga

SEQ ID NO: 179833 - RNA, 26 nt, Human
ugugaaauaguaagauagucuuccaa

SEQ ID NO: 179834 - RNA, 19 nt, Human
ugugaacagauuccgcugc

SEQ ID NO: 179835 - RNA, 18 nt, Human
uguuuuggcuuaaacguu

SEQ ID NO: 179836 - RNA, 20 nt, Human
uuagccuggcaugguggugc

SEQ ID NO: 179837 - RNA, 23 nt, Human
uuaucuguggggacugaaaaccu

SEQ ID NO: 179838 - RNA, 20 nt, Human
uuccuaaaaaaggucugcga

SEQ ID NO: 179839 - RNA, 22 nt, Human
uugcagugagucaagaucgcgc

SEQ ID NO: 179840 - RNA, 22 nt, Human
uuuggugaagaaagguuuucuu

SEQ ID NO: 179841 - RNA, 23 nt, Human
acacagagggaccacagaaguca

SEQ ID NO: 179842 - RNA, 19 nt, Human
acagggaccucaaaagaga

SEQ ID NO: 179843 - RNA, 24 nt, Human
acccgugguagcugcccaaauuca

SEQ ID NO: 179844 - RNA, 21 nt, Human
agacagggaggaagggcugca

SEQ ID NO: 179845 - RNA, 19 nt, Human
agagguagacauacaggga

SEQ ID NO: 179846 - RNA, 18 nt, Human
agcauggcagacccgugg

SEQ ID NO: 179847 - RNA, 22 nt, Human
agggaccucaaaagagagucag

SEQ ID NO: 179848 - RNA, 20 nt, Human
aguguggacuccaguggcgu

SEQ ID NO: 179849 - RNA, 18 nt, Human
auggcagacccgugguag

SEQ ID NO: 179850 - RNA, 23 nt, Human
caccagccucaguaagccuuggc

SEQ ID NO: 179851 - RNA, 22 nt, Human
cagaagucagagguagacauac

SEQ ID NO: 179852 - RNA, 20 nt, Human
cagccucaguaagccuuggc

SEQ ID NO: 179853 - RNA, 22 nt, Human
caguggcucccuccaccagccu

SEQ ID NO: 179854 - RNA, 21 nt, Human
ccccaggccccaguaagaggc

SEQ ID NO: 179855 - RNA, 20 nt, Human
ccccuugcuccuccagagca

SEQ ID NO: 179856 - RNA, 24 nt, Human
ccuugggcuagagccccaggcccc

SEQ ID NO: 179857 - RNA, 24 nt, Human
gaccacagaagucagagguagaca

SEQ ID NO: 179858 - RNA, 18 nt, Human
gagguagacauacaggga

SEQ ID NO: 179859 - RNA, 20 nt, Human
gagguagacauacagggacc

SEQ ID NO: 179860 - RNA, 22 nt, Human
gcagacccgugguagcugccca

SEQ ID NO: 179861 - RNA, 24 nt, Human
gugagcccagcaguggcucccucc

SEQ ID NO: 179862 - RNA, 19 nt, Human
uccaccagccucaguaagc

SEQ ID NO: 179863 - RNA, 21 nt, Human
uccagagcauggcagacccgu

SEQ ID NO: 179864 - RNA, 26 nt, Human
ugcagagacagggaggaagggcugca

SEQ ID NO: 179865 - RNA, 18 nt, Human
uggcccccuugcuccucc

SEQ ID NO: 179866 - RNA, 22 nt, Human
uuggcuccucugagccuugggc

SEQ ID NO: 179867 - RNA, 23 nt, Human
agauguugagacuccagugaacu

SEQ ID NO: 179868 - RNA, 24 nt, Human
agugguucuccauguuuuuaccag

SEQ ID NO: 179869 - RNA, 28 nt, Human
cacagccacggcucccacugccagcacc

SEQ ID NO: 179870 - RNA, 20 nt, Human
cagccacggcucccacugcc

SEQ ID NO: 179871 - RNA, 19 nt, Human
cccacugccagcaccagcc

SEQ ID NO: 179872 - RNA, 23 nt, Human
gauagaagcugaacccaccucuu

SEQ ID NO: 179873 - RNA, 23 nt, Human
uacauagugguucuccauguuuu

SEQ ID NO: 179874 - RNA, 18 nt, Human
uccaccuuguuccucaga

SEQ ID NO: 179875 - RNA, 20 nt, Human
uucuacauagugguucucca

SEQ ID NO: 179876 - RNA, 25 nt, Human
uucuacauagugguucuccauguuu

SEQ ID NO: 179877 - RNA, 18 nt, Human
aaucgaguccugagcugg

SEQ ID NO: 179878 - RNA, 21 nt, Human
cagaaucgaguccugagcugg

SEQ ID NO: 179879 - RNA, 18 nt, Human
gagcagacuuccuuucca

SEQ ID NO: 179880 - RNA, 20 nt, Human
ggugcuaagugaagggcaga

SEQ ID NO: 179881 - RNA, 23 nt, Human
uaggggucuccuuccccugauuu

SEQ ID NO: 179882 - RNA, 21 nt, Human
ucaguagucauuuuaauaaau

SEQ ID NO: 179883 - RNA, 21 nt, Human
uccccugauuucuggaccuuc

SEQ ID NO: 179884 - RNA, 18 nt, Human
ucuggaccuucugagccu

SEQ ID NO: 179885 - RNA, 21 nt, Human
ugaagggcagaaucgaguccu

SEQ ID NO: 179886 - RNA, 19 nt, Human
ugagcagacuuccuuucca

SEQ ID NO: 179887 - RNA, 24 nt, Human
uggggcugaggcaggugcuaagug

SEQ ID NO: 179888 - RNA, 19 nt, Human
uucuggaccuucugagccu

SEQ ID NO: 179889 - RNA, 20 nt, Human
uuucuggaccuucugagccu

SEQ ID NO: 179890 - RNA, 20 nt, Human
aaccuguuggcucugacuua

SEQ ID NO: 179891 - RNA, 27 nt, Human
aaucccaacuugggugccccugcccac

SEQ ID NO: 179892 - RNA, 25 nt, Human
acccuaggcccccuucucgcuuccc

SEQ ID NO: 179893 - RNA, 21 nt, Human
acucaauaaauccaugcuaac

SEQ ID NO: 179894 - RNA, 23 nt, Human
acucaauaaauccaugcuaacug

SEQ ID NO: 179895 - RNA, 22 nt, Human
acucaguugucaucuccagaag

SEQ ID NO: 179896 - RNA, 20 nt, Human
auccuguucuccagcucucc

SEQ ID NO: 179897 - RNA, 21 nt, Human
caccugaaaugaaaucccaac

SEQ ID NO: 179898 - RNA, 24 nt, Human
caccugaaaugaaaucccaacuug

SEQ ID NO: 179899 - RNA, 24 nt, Human
cacuccuaagaaucuccaaugcac

SEQ ID NO: 179900 - RNA, 20 nt, Human
cagggaccuuuuuucuguuu

SEQ ID NO: 179901 - RNA, 23 nt, Human
cauuccauagcguguguggaacu

SEQ ID NO: 179902 - RNA, 22 nt, Human
ccacccuaggcccccuucucgc

SEQ ID NO: 179903 - RNA, 23 nt, Human
ccacuucucugucucuccccaac

SEQ ID NO: 179904 - RNA, 20 nt, Human
cccaagagacacuccuaaga

SEQ ID NO: 179905 - RNA, 22 nt, Human
ccccaaagugaucucuuucacc

SEQ ID NO: 179906 - RNA, 25 nt, Human
ccccacucaguugucaucuccagaa

SEQ ID NO: 179907 - RNA, 29 nt, Human
cccccaagagacacuccuaagaaucucca

SEQ ID NO: 179908 - RNA, 19 nt, Human
cccuaggcccccuucucgc

SEQ ID NO: 179909 - RNA, 24 nt, Human
cccugcccacuucucugucucucc

SEQ ID NO: 179910 - RNA, 20 nt, Human
ccugcagccccugccaccgc

SEQ ID NO: 179911 - RNA, 19 nt, Human
ccuggucacuugcuccugc

SEQ ID NO: 179912 - RNA, 18 nt, Human
ccuguucuccagcucucc

SEQ ID NO: 179913 - RNA, 18 nt, Human
cgccucccagaccacccu

SEQ ID NO: 179914 - RNA, 20 nt, Human
cuccguacugggccuggcac

SEQ ID NO: 179915 - RNA, 21 nt, Human
cuccuuggagacgccucccag

SEQ ID NO: 179916 - RNA, 21 nt, Human
cucuuucaccucuuucgggga

SEQ ID NO: 179917 - RNA, 19 nt, Human
cuguuuccuucaccauuuc

SEQ ID NO: 179918 - RNA, 20 nt, Human
gcagggaccuuuuuucuguu

SEQ ID NO: 179919 - RNA, 24 nt, Human
ggccuguccccaguccugcuccug

SEQ ID NO: 179920 - RNA, 26 nt, Human
uaaaaaauaaaauauuacccccaaga

SEQ ID NO: 179921 - RNA, 23 nt, Human
uaaauccaugcuaacugaacaga

SEQ ID NO: 179922 - RNA, 18 nt, Human
ucccagaccacccuaggc

SEQ ID NO: 179923 - RNA, 21 nt, Human
ucccagaccacccuaggcccc

SEQ ID NO: 179924 - RNA, 19 nt, Human
uccccaaccuguuggcucu

SEQ ID NO: 179925 - RNA, 18 nt, Human
ucugucucuccccaaccu

SEQ ID NO: 179926 - RNA, 24 nt, Human
ugaaaugaaaucccaacuugggug

SEQ ID NO: 179927 - RNA, 19 nt, Human
ugagcgccuuccugcccaa

SEQ ID NO: 179928 - RNA, 23 nt, Human
ugaucucuuucaccucuuucggg

SEQ ID NO: 179929 - RNA, 21 nt, Human
ugcaggggcgaucaggccugu

SEQ ID NO: 179930 - RNA, 18 nt, Human
ugcuccugcagccccugc

SEQ ID NO: 179931 - RNA, 19 nt, Human
ugcuccugcagccccugcc

SEQ ID NO: 179932 - RNA, 21 nt, Human
uguucacggucuguuuucccc

SEQ ID NO: 179933 - RNA, 19 nt, Human
uguuuuguguucacggucu

SEQ ID NO: 179934 - RNA, 22 nt, Human
uuaauucuacuccagccaaggc

SEQ ID NO: 179935 - RNA, 18 nt, Human
uucggggauggcuuaagu

SEQ ID NO: 179936 - RNA, 22 nt, Human
uuggagacgccucccagaccac

SEQ ID NO: 179937 - RNA, 24 nt, Human
uugggugccccugcccacuucucu

SEQ ID NO: 179938 - RNA, 21 nt, Human
aaaaauccaugagaaagguuc

SEQ ID NO: 179939 - RNA, 18 nt, Human
aaaacccaagaauaccag

SEQ ID NO: 179940 - RNA, 25 nt, Human
aaaagaccuaagauguucaggaagu

SEQ ID NO: 179941 - RNA, 22 nt, Human
aaaaggcauuuggagaaacugg

SEQ ID NO: 179942 - RNA, 18 nt, Human
aaagaacacucuccagaa

SEQ ID NO: 179943 - RNA, 18 nt, Human
aaguugcuggucacucca

SEQ ID NO: 179944 - RNA, 23 nt, Human
aauuaguaauuuucauuguacaa

SEQ ID NO: 179945 - RNA, 23 nt, Human
acccaucuaccccauacaccccc

SEQ ID NO: 179946 - RNA, 23 nt, Human
agaaaaaggaaauucauuucagu

SEQ ID NO: 179947 - RNA, 19 nt, Human
agaacacucuccagaacac

SEQ ID NO: 179948 - RNA, 24 nt, Human
agaauacaaguucugaauuacugu

SEQ ID NO: 179949 - RNA, 18 nt, Human
aggaaaacccaagaauac

SEQ ID NO: 179950 - RNA, 21 nt, Human
aggaaguauuuauuccuggcc

SEQ ID NO: 179951 - RNA, 21 nt, Human
agggaaaaacauuuuaggaga

SEQ ID NO: 179952 - RNA, 19 nt, Human
agugauugaacuccuugga

SEQ ID NO: 179953 - RNA, 22 nt, Human
aguggaaucuugaugcuuucaa

SEQ ID NO: 179954 - RNA, 21 nt, Human
auccucugucuuuuucuuguu

SEQ ID NO: 179955 - RNA, 21 nt, Human
augaaaaggcaaguucaggca

SEQ ID NO: 179956 - RNA, 21 nt, Human
auuccuggccagaauuauuuc

SEQ ID NO: 179957 - RNA, 22 nt, Human
auuccuggccagaauuauuuca

SEQ ID NO: 179958 - RNA, 25 nt, Human
caaaugcauggaaaaucuuauucug

SEQ ID NO: 179959 - RNA, 22 nt, Human
caacaugcaccucucuuauccc

SEQ ID NO: 179960 - RNA, 24 nt, Human
caacaugcaccucucuuauccccu

SEQ ID NO: 179961 - RNA, 19 nt, Human
caccauauuggcccacacc

SEQ ID NO: 179962 - RNA, 23 nt, Human
cacccaucuaccccauacaccuc

SEQ ID NO: 179963 - RNA, 21 nt, Human
caccuggugcacuuucuacag

SEQ ID NO: 179964 - RNA, 21 nt, Human
cagaauuauuucaguuucuug

SEQ ID NO: 179965 - RNA, 21 nt, Human
cauaugugcauuauuuucaaa

SEQ ID NO: 179966 - RNA, 27 nt, Human
caucccaacugucuuaaaaauguuuac

SEQ ID NO: 179967 - RNA, 24 nt, Human
caugcaagaagaaaagugucauac

SEQ ID NO: 179968 - RNA, 20 nt, Human
ccaauacaugacaaacaaaa

SEQ ID NO: 179969 - RNA, 21 nt, Human
ccagaacacaugaucugaugg

SEQ ID NO: 179970 - RNA, 19 nt, Human
cccauacacccccagugaa

SEQ ID NO: 179971 - RNA, 23 nt, Human
cccaucuaccccauacaccccca

SEQ ID NO: 179972 - RNA, 19 nt, Human
ccccagugaaccuagguau

SEQ ID NO: 179973 - RNA, 24 nt, Human
ccccauacacccccagugaaccua

SEQ ID NO: 179974 - RNA, 18 nt, Human
ccccucccucuccaccca

SEQ ID NO: 179975 - RNA, 26 nt, Human
ccugacuuuagcucaaaaaaaaaaaa

SEQ ID NO: 179976 - RNA, 19 nt, Human
cuaaugucuuuguguuuuc

SEQ ID NO: 179977 - RNA, 23 nt, Human
cuacagcaccuuuuuucuucucc

SEQ ID NO: 179978 - RNA, 23 nt, Human
cuccaaaagacugcuaaacucau

SEQ ID NO: 179979 - RNA, 22 nt, Human
cuuucaaccucucuugcauucc

SEQ ID NO: 179980 - RNA, 18 nt, Human
gaacacaugaucugaugg

SEQ ID NO: 179981 - RNA, 20 nt, Human
gaaguaaaaugaaaaggcaa

SEQ ID NO: 179982 - RNA, 20 nt, Human
gaauccucuuucaaccucuc

SEQ ID NO: 179983 - RNA, 23 nt, Human
gaugguaaugauauugugcaagg

SEQ ID NO: 179984 - RNA, 18 nt, Human
gcauuuggagaaacuggu

SEQ ID NO: 179985 - RNA, 20 nt, Human
gcuauauccuaaaaaaagga

SEQ ID NO: 179986 - RNA, 23 nt, Human
gcugcuguuugguacuuuccuca

SEQ ID NO: 179987 - RNA, 24 nt, Human
ggaaaaacauuuuaggagaaaaaa

SEQ ID NO: 179988 - RNA, 23 nt, Human
gggcaccacucuuuugcuuaaaa

SEQ ID NO: 179989 - RNA, 25 nt, Human
uaaaaugaaaaggcaaguucaggca

SEQ ID NO: 179990 - RNA, 21 nt, Human
uaauaguccacucuaagcauu

SEQ ID NO: 179991 - RNA, 22 nt, Human
uaauuuucauuguacaaaacug

SEQ ID NO: 179992 - RNA, 25 nt, Human
uacagcaccuuuuuucuucuccaca

SEQ ID NO: 179993 - RNA, 18 nt, Human
uaccaagaauaaaaaaag

SEQ ID NO: 179994 - RNA, 22 nt, Human
uaccccauacacccccagugaa

SEQ ID NO: 179995 - RNA, 20 nt, Human
uaucuauguaucaccuaaug

SEQ ID NO: 179996 - RNA, 21 nt, Human
uauguagcugacaugcaugca

SEQ ID NO: 179997 - RNA, 25 nt, Human
ucacauacacagaaccauugcuacg

SEQ ID NO: 179998 - RNA, 20 nt, Human
ucagaaaaaggaaauucauu

SEQ ID NO: 179999 - RNA, 18 nt, Human
uccacaauugaguggaau

SEQ ID NO: 180000 - RNA, 19 nt, Human
uccaugagaaagguucaaa

SEQ ID NO: 180001 - RNA, 23 nt, Human
uccccucccucuccacccaucua

SEQ ID NO: 180002 - RNA, 21 nt, Human
uccuaaaaaaaggagagaaaa

SEQ ID NO: 180003 - RNA, 22 nt, Human
ucucuuauccccucccucucca

SEQ ID NO: 180004 - RNA, 23 nt, Human
ucuugaugcuuucaagccuguau

SEQ ID NO: 180005 - RNA, 27 nt, Human
ugaaaaggcaaguucaggcacucagac

SEQ ID NO: 180006 - RNA, 18 nt, Human
ugaaagaaaagugcugau

SEQ ID NO: 180007 - RNA, 19 nt, Human
ugaaugugaguaguagcug

SEQ ID NO: 180008 - RNA, 22 nt, Human
ugacaaacaaaacaaacucuuc

SEQ ID NO: 180009 - RNA, 25 nt, Human
ugagaaagguucaaauuugaacacc

SEQ ID NO: 180010 - RNA, 21 nt, Human
ugcaaaauucauuuaggcaca

SEQ ID NO: 180011 - RNA, 19 nt, Human
uggaauguuuuagcaggga

SEQ ID NO: 180012 - RNA, 23 nt, Human
uggaauguuuuagcagggacuua

SEQ ID NO: 180013 - RNA, 18 nt, Human
uguguuuucuaagccuca

SEQ ID NO: 180014 - RNA, 23 nt, Human
uguugaaaagaccuaagauguuc

SEQ ID NO: 180015 - RNA, 19 nt, Human
uuaaauaccaacaugcacc

SEQ ID NO: 180016 - RNA, 22 nt, Human
uuaacaaaaccaguauccauaa

SEQ ID NO: 180017 - RNA, 22 nt, Human
uuaacaccuggugcacuuucua

SEQ ID NO: 180018 - RNA, 24 nt, Human
uuaaguaggaaaacccaagaauac

SEQ ID NO: 180019 - RNA, 28 nt, Human
uuaauaguccacucuaagcauuuuuucu

SEQ ID NO: 180020 - RNA, 25 nt, Human
uuacugcuauauccuaaaaaaagga

SEQ ID NO: 180021 - RNA, 19 nt, Human
uuagccacaauuaccaccc

SEQ ID NO: 180022 - RNA, 21 nt, Human
uucaccaaucuucugugauga

SEQ ID NO: 180023 - RNA, 21 nt, Human
uuggagaaacugguagauguc

SEQ ID NO: 180024 - RNA, 23 nt, Human
uuggcccacaccacaaaaaucca

SEQ ID NO: 180025 - RNA, 23 nt, Human
uuguauguguacuacugaauccu

SEQ ID NO: 180026 - RNA, 22 nt, Human
uuucaccaaucuucugugauga

SEQ ID NO: 180027 - RNA, 21 nt, Human
uuucagaaaaaggaaauucau

SEQ ID NO: 180028 - RNA, 24 nt, Human
uuucagaaaaaggaaauucauuuc

SEQ ID NO: 180029 - RNA, 22 nt, Human
uuuggagaaacugguagauguc

SEQ ID NO: 180030 - RNA, 18 nt, Human
uuugugaguuuauacugu

SEQ ID NO: 180031 - RNA, 21 nt, Human
uuuugcuuaaaaguagugaag

SEQ ID NO: 180032 - RNA, 23 nt, Human
aaaaggccagagggcccccagua

SEQ ID NO: 180033 - RNA, 19 nt, Human
aacaguagaacuaggaagg

SEQ ID NO: 180034 - RNA, 22 nt, Human
acuucucaggaccccucuguug

SEQ ID NO: 180035 - RNA, 21 nt, Human
agguggagguggggacgaugg

SEQ ID NO: 180036 - RNA, 22 nt, Human
caaaaggccagagggcccccag

SEQ ID NO: 180037 - RNA, 19 nt, Human
caagcaccugcuuccccag

SEQ ID NO: 180038 - RNA, 18 nt, Human
caccaggaaggccucagg

SEQ ID NO: 180039 - RNA, 19 nt, Human
caccugcuuccccagccca

SEQ ID NO: 180040 - RNA, 28 nt, Human
cauggccagcaagcaccugcuuccccag

SEQ ID NO: 180041 - RNA, 21 nt, Human
ccaaauccggcacaagcucug

SEQ ID NO: 180042 - RNA, 18 nt, Human
ccaggagggggcaggggg

SEQ ID NO: 180043 - RNA, 21 nt, Human
ccccagcccagucaucucugc

SEQ ID NO: 180044 - RNA, 25 nt, Human
cccccaguacccuuggccaagagcu

SEQ ID NO: 180045 - RNA, 21 nt, Human
ccuccgucgccugccugccgg

SEQ ID NO: 180046 - RNA, 24 nt, Human
cuccauggccagcaagcaccugcu

SEQ ID NO: 180047 - RNA, 22 nt, Human
cugugaggagaggguuugagga

SEQ ID NO: 180048 - RNA, 20 nt, Human
cugugcgaucaaggcugacc

SEQ ID NO: 180049 - RNA, 23 nt, Human
gaaggccucagguguucaagaac

SEQ ID NO: 180050 - RNA, 20 nt, Human
ggagaggaagccguagugcc

SEQ ID NO: 180051 - RNA, 21 nt, Human
ggcggcccagguggagguggg

SEQ ID NO: 180052 - RNA, 19 nt, Human
uccaggagggggcaggggg

SEQ ID NO: 180053 - RNA, 22 nt, Human
uccccagcccagucaucucugc

SEQ ID NO: 180054 - RNA, 22 nt, Human
uccccagcccagucaucucugg

SEQ ID NO: 180055 - RNA, 18 nt, Human
uccccuugacagggccaa

SEQ ID NO: 180056 - RNA, 19 nt, Human
ugacagggccaaauccggc

SEQ ID NO: 180057 - RNA, 23 nt, Human
ugagguugggguaaguuggcucu

SEQ ID NO: 180058 - RNA, 23 nt, Human
ugcaaaaggccagagggccccca

SEQ ID NO: 180059 - RNA, 18 nt, Human
ugccgggcggcccaggug

SEQ ID NO: 180060 - RNA, 18 nt, Human
ugugaggagaggguuuga

SEQ ID NO: 180061 - RNA, 22 nt, Human
ugugaggagaggguuugaggac

SEQ ID NO: 180062 - RNA, 20 nt, Human
uguugggugacauaagccac

SEQ ID NO: 180063 - RNA, 18 nt, Human
aagagcacauauaaugca

SEQ ID NO: 180064 - RNA, 24 nt, Human
aaggagcugcagggugacagaugu

SEQ ID NO: 180065 - RNA, 21 nt, Human
acaguugaccggguggggaca

SEQ ID NO: 180066 - RNA, 23 nt, Human
acucccuagcagggcugacaccu

SEQ ID NO: 180067 - RNA, 18 nt, Human
acuugcucggugaccagg

SEQ ID NO: 180068 - RNA, 20 nt, Human
agaaggaaagguugcaacau

SEQ ID NO: 180069 - RNA, 19 nt, Human
agacaacagauucaagagc

SEQ ID NO: 180070 - RNA, 20 nt, Human
agacaacagauucaagagca

SEQ ID NO: 180071 - RNA, 21 nt, Human
agacuccauugggcaccucag

SEQ ID NO: 180072 - RNA, 23 nt, Human
agagcacauauaaugcaaguucc

SEQ ID NO: 180073 - RNA, 24 nt, Human
agagggaggagaagccaagggcaa

SEQ ID NO: 180074 - RNA, 19 nt, Human
agcauaaagacaaugaaga

SEQ ID NO: 180075 - RNA, 24 nt, Human
aggagaagccaagggcaacccaag

SEQ ID NO: 180076 - RNA, 21 nt, Human
aggcuucuggccauaacgaac

SEQ ID NO: 180077 - RNA, 18 nt, Human
agggaacagaugccaaaa

SEQ ID NO: 180078 - RNA, 18 nt, Human
agggaacagaugccaaaa

SEQ ID NO: 180079 - RNA, 26 nt, Human
agggagggugaucaggucaaggaggu

SEQ ID NO: 180080 - RNA, 21 nt, Human
aggguggggagggaacugcag

SEQ ID NO: 180081 - RNA, 27 nt, Human
agugagaaagcaucaguucagaaggga

SEQ ID NO: 180082 - RNA, 19 nt, Human
auacuggguagaggguggg

SEQ ID NO: 180083 - RNA, 25 nt, Human
aucccuuccaggccagcuuuugcca

SEQ ID NO: 180084 - RNA, 27 nt, Human
auucuaucccucuggcuaucccuucca

SEQ ID NO: 180085 - RNA, 23 nt, Human
caacagauucaagagcacauaua

SEQ ID NO: 180086 - RNA, 22 nt, Human
caaggccaucucaccacuacuc

SEQ ID NO: 180087 - RNA, 21 nt, Human
caagggagaaagggaagggau

SEQ ID NO: 180088 - RNA, 21 nt, Human
cacagccagggaacagaugcc

SEQ ID NO: 180089 - RNA, 21 nt, Human
cacagccagggaacagaugcc

SEQ ID NO: 180090 - RNA, 23 nt, Human
cacggucgagugcuuguguacuu

SEQ ID NO: 180091 - RNA, 23 nt, Human
cagaagggacacgucuucuacug

SEQ ID NO: 180092 - RNA, 22 nt, Human
cagagcccugguuauaguuucu

SEQ ID NO: 180093 - RNA, 24 nt, Human
cagcacgagcauacggaauaugaa

SEQ ID NO: 180094 - RNA, 23 nt, Human
cagcauaaagacaaugaagacau

SEQ ID NO: 180095 - RNA, 23 nt, Human
cagccaggcuaaggaggagggac

SEQ ID NO: 180096 - RNA, 23 nt, Human
caggcacugauuaaagucggggg

SEQ ID NO: 180097 - RNA, 19 nt, Human
cagggugacagauguuggc

SEQ ID NO: 180098 - RNA, 25 nt, Human
cagugcagccacagccaaccccuug

SEQ ID NO: 180099 - RNA, 24 nt, Human
cagugcagccacagccagcauaaa

SEQ ID NO: 180100 - RNA, 26 nt, Human
cauucuaucccucuggcuaucccuuc

SEQ ID NO: 180101 - RNA, 21 nt, Human
ccaaggcauuuguaaagcuga

SEQ ID NO: 180102 - RNA, 25 nt, Human
ccaaucgcccaucuuggcacagcca

SEQ ID NO: 180103 - RNA, 19 nt, Human
ccacaaugaagcccaccuc

SEQ ID NO: 180104 - RNA, 21 nt, Human
ccacaaugaagcccaccucca

SEQ ID NO: 180105 - RNA, 25 nt, Human
cccacaaugaagcccaccuccaugg

SEQ ID NO: 180106 - RNA, 23 nt, Human
ccccccaggaagacucagcagcu

SEQ ID NO: 180107 - RNA, 19 nt, Human
cccuucuuucccucuaccc

SEQ ID NO: 180108 - RNA, 22 nt, Human
cccuucuuucccucuacccugu

SEQ ID NO: 180109 - RNA, 23 nt, Human
ccuccuuuguucccaccuggucc

SEQ ID NO: 180110 - RNA, 23 nt, Human
ccucucugagccuccuuuguucc

SEQ ID NO: 180111 - RNA, 25 nt, Human
ccuucagggaauggcugggugaaca

SEQ ID NO: 180112 - RNA, 20 nt, Human
cggucgagugcuuguguacu

SEQ ID NO: 180113 - RNA, 23 nt, Human
cuaccacggucgagugcuugugu

SEQ ID NO: 180114 - RNA, 20 nt, Human
cuaugcccacagaggggcca

SEQ ID NO: 180115 - RNA, 24 nt, Human
cucccuggacuuuccuuccguggg

SEQ ID NO: 180116 - RNA, 19 nt, Human
cuccugaccucguacuugc

SEQ ID NO: 180117 - RNA, 24 nt, Human
cugaguagagggaggagaagccaa

SEQ ID NO: 180118 - RNA, 23 nt, Human
cuucugcuucuuuuccuccuccc

SEQ ID NO: 180119 - RNA, 24 nt, Human
gaacuuagagaacgcauuugguag

SEQ ID NO: 180120 - RNA, 20 nt, Human
gacaacagauucaagagcaa

SEQ ID NO: 180121 - RNA, 20 nt, Human
gaggagggagggugaucagg

SEQ ID NO: 180122 - RNA, 21 nt, Human
gccaagggcaacccaaggcca

SEQ ID NO: 180123 - RNA, 19 nt, Human
gcggugaccuggugagacu

SEQ ID NO: 180124 - RNA, 26 nt, Human
ggggagggaacugcagucuggguggg

SEQ ID NO: 180125 - RNA, 18 nt, Human
ggguagaggguggggagg

SEQ ID NO: 180126 - RNA, 20 nt, Human
gucucccagugcuugcugcc

SEQ ID NO: 180127 - RNA, 18 nt, Human
guuuguguguacagugac

SEQ ID NO: 180128 - RNA, 18 nt, Human
uagaauuaaugagcaacg

SEQ ID NO: 180129 - RNA, 19 nt, Human
uaucccagagcccugguua

SEQ ID NO: 180130 - RNA, 22 nt, Human
ucaaaggagccaagcagugaug

SEQ ID NO: 180131 - RNA, 21 nt, Human
ucauucuaucccucuggcuau

SEQ ID NO: 180132 - RNA, 22 nt, Human
uccaggcacugauuaaagucgg

SEQ ID NO: 180133 - RNA, 20 nt, Human
uccauggagacaacagauuc

SEQ ID NO: 180134 - RNA, 20 nt, Human
uccccaggagucugcuccug

SEQ ID NO: 180135 - RNA, 20 nt, Human
ucccccagggccauucucca

SEQ ID NO: 180136 - RNA, 18 nt, Human
ucccucuggcuaucccuu

SEQ ID NO: 180137 - RNA, 18 nt, Human
ucccuggacuuuccuucc

SEQ ID NO: 180138 - RNA, 21 nt, Human
uccuuuguucccaccuggucc

SEQ ID NO: 180139 - RNA, 25 nt, Human
uccuuuguucccaccugguccugau

SEQ ID NO: 180140 - RNA, 23 nt, Human
ucuuccagcccaggugguagagu

SEQ ID NO: 180141 - RNA, 20 nt, Human
ucuuuccucucugagccucc

SEQ ID NO: 180142 - RNA, 18 nt, Human
ugaaaggcuucguauacu

SEQ ID NO: 180143 - RNA, 18 nt, Human
ugaagggauugaagaauu

SEQ ID NO: 180144 - RNA, 20 nt, Human
ugaccuggugagacuccauu

SEQ ID NO: 180145 - RNA, 24 nt, Human
ugacucccuagcagggcugacacc

SEQ ID NO: 180146 - RNA, 24 nt, Human
ugacucccuagcagggcugacacc

SEQ ID NO: 180147 - RNA, 22 nt, Human
ugagaaagcaucaguucagaag

SEQ ID NO: 180148 - RNA, 22 nt, Human
ugcccagcacgagcauacggaa

SEQ ID NO: 180149 - RNA, 22 nt, Human
ugcccagcacgagcauacggaa

SEQ ID NO: 180150 - RNA, 21 nt, Human
uggaggagggagggugaucag

SEQ ID NO: 180151 - RNA, 20 nt, Human
uggcugaugaucuggucagg

SEQ ID NO: 180152 - RNA, 21 nt, Human
uggcugaugaucuggucaggg

SEQ ID NO: 180153 - RNA, 18 nt, Human
uggggaaauuccacuggc

SEQ ID NO: 180154 - RNA, 21 nt, Human
uggguugucaccucucuuacu

SEQ ID NO: 180155 - RNA, 22 nt, Human
uggucaggguucgagagaggac

SEQ ID NO: 180156 - RNA, 18 nt, Human
uguaauccucugccuguc

SEQ ID NO: 180157 - RNA, 20 nt, Human
uguaauccucugccugucug

SEQ ID NO: 180158 - RNA, 20 nt, Human
uguguucucccaggagggac

SEQ ID NO: 180159 - RNA, 21 nt, Human
uuccagcccaggugguagagu

SEQ ID NO: 180160 - RNA, 27 nt, Human
uucccuucuuucccucuacccuguuuc

SEQ ID NO: 180161 - RNA, 22 nt, Human
uuccgugggcuucuucacacuc

SEQ ID NO: 180162 - RNA, 19 nt, Human
uuuguaaagcugaggcugc

SEQ ID NO: 180163 - RNA, 25 nt, Human
uuuuuuuuuuuuuuuuuuaacaagg

SEQ ID NO: 180164 - RNA, 25 nt, Human
accccagacaccuccuccuuuuccu

SEQ ID NO: 180165 - RNA, 25 nt, Human
accuccuccuuuuccuuguggccag

SEQ ID NO: 180166 - RNA, 19 nt, Human
agagggaagagggaagggu

SEQ ID NO: 180167 - RNA, 19 nt, Human
agcaccccugcccucugcu

SEQ ID NO: 180168 - RNA, 20 nt, Human
agcacuauuccuccuuuacu

SEQ ID NO: 180169 - RNA, 24 nt, Human
aggaaggccccgggaggaagggaa

SEQ ID NO: 180170 - RNA, 20 nt, Human
aggcagagagaggccuuggg

SEQ ID NO: 180171 - RNA, 20 nt, Human
agggugcaggcaacaagggc

SEQ ID NO: 180172 - RNA, 19 nt, Human
aucccaucucuuguaccca

SEQ ID NO: 180173 - RNA, 23 nt, Human
aucccuccucacugaugugacuc

SEQ ID NO: 180174 - RNA, 21 nt, Human
caacaagggcagcccacacuc

SEQ ID NO: 180175 - RNA, 25 nt, Human
caaccccugcuccaacuuaucugcc

SEQ ID NO: 180176 - RNA, 21 nt, Human
cacaccucccugucacugcca

SEQ ID NO: 180177 - RNA, 19 nt, Human
cacauguccacagcacccc

SEQ ID NO: 180178 - RNA, 20 nt, Human
cacccucccuucuccaccuc

SEQ ID NO: 180179 - RNA, 21 nt, Human
caccuggcugcugcugcccuu

SEQ ID NO: 180180 - RNA, 25 nt, Human
ccacagcaccccugcccucugcucc

SEQ ID NO: 180181 - RNA, 22 nt, Human
ccaccccuccagcuccucaaaa

SEQ ID NO: 180182 - RNA, 22 nt, Human
ccagagagagggagagggaaga

SEQ ID NO: 180183 - RNA, 24 nt, Human
cccaccccuccagcuccucaaaag

SEQ ID NO: 180184 - RNA, 20 nt, Human
ccccaccccuccagcuccuc

SEQ ID NO: 180185 - RNA, 19 nt, Human
ccccagacaccuccuccuu

SEQ ID NO: 180186 - RNA, 19 nt, Human
ccccugcccucugcuccuc

SEQ ID NO: 180187 - RNA, 24 nt, Human
ccccugcccucugcuccucuuacc

SEQ ID NO: 180188 - RNA, 18 nt, Human
cccucccuucuccaccca

SEQ ID NO: 180189 - RNA, 18 nt, Human
cccugcccucugcuccuc

SEQ ID NO: 180190 - RNA, 21 nt, Human
cccugcccucugcuccucuua

SEQ ID NO: 180191 - RNA, 23 nt, Human
cccuucuccacccacauguccac

SEQ ID NO: 180192 - RNA, 22 nt, Human
ccgggaggaagggaaguagcca

SEQ ID NO: 180193 - RNA, 25 nt, Human
ccucaaaaggaaggccccgggagga

SEQ ID NO: 180194 - RNA, 20 nt, Human
ccucauucacaccucccugu

SEQ ID NO: 180195 - RNA, 24 nt, Human
ccuggcugcugcugcccuuuccca

SEQ ID NO: 180196 - RNA, 19 nt, Human
cgcccagggcagggucggg

SEQ ID NO: 180197 - RNA, 19 nt, Human
cucccaguaaccuugagca

SEQ ID NO: 180198 - RNA, 24 nt, Human
cucccugucacugccacaccuggc

SEQ ID NO: 180199 - RNA, 23 nt, Human
cucccuucuccacccacaugucc

SEQ ID NO: 180200 - RNA, 19 nt, Human
cucuagcuccccaccccuc

SEQ ID NO: 180201 - RNA, 22 nt, Human
cugcuccaacuuaucugccugc

SEQ ID NO: 180202 - RNA, 18 nt, Human
cugcuucucucucccuaa

SEQ ID NO: 180203 - RNA, 22 nt, Human
gaagggaaguagccagggaagg

SEQ ID NO: 180204 - RNA, 24 nt, Human
gaagggaaguagccagggaaggaa

SEQ ID NO: 180205 - RNA, 18 nt, Human
gacaccuccuccuuuucc

SEQ ID NO: 180206 - RNA, 21 nt, Human
gagaaggaggggcucgcccag

SEQ ID NO: 180207 - RNA, 19 nt, Human
gccacaccuggcugcugcu

SEQ ID NO: 180208 - RNA, 21 nt, Human
ggaggaagggaaguagccagg

SEQ ID NO: 180209 - RNA, 22 nt, Human
gggaggaagggaaguagccagg

SEQ ID NO: 180210 - RNA, 27 nt, Human
gggucgggggugggaugggagguugcc

SEQ ID NO: 180211 - RNA, 22 nt, Human
uaacucccucaccccagacacc

SEQ ID NO: 180212 - RNA, 23 nt, Human
uagcuccccaccccuccagcucc

SEQ ID NO: 180213 - RNA, 23 nt, Human
uccacagcaccccugcccucugc

SEQ ID NO: 180214 - RNA, 18 nt, Human
uccccagcaggcagaggc

SEQ ID NO: 180215 - RNA, 22 nt, Human
uccccagcaggcagaggccugu

SEQ ID NO: 180216 - RNA, 18 nt, Human
ucccucaccccagacacc

SEQ ID NO: 180217 - RNA, 18 nt, Human
uccucaaaaggaaggccc

SEQ ID NO: 180218 - RNA, 19 nt, Human
ucgcccagggcagggucgg

SEQ ID NO: 180219 - RNA, 19 nt, Human
ucucccuaacucccucacc

SEQ ID NO: 180220 - RNA, 19 nt, Human
ucucuuguacccagugguc

SEQ ID NO: 180221 - RNA, 19 nt, Human
ucugccugcuucucucucc

SEQ ID NO: 180222 - RNA, 23 nt, Human
ucuuacccacaucccuccucacu

SEQ ID NO: 180223 - RNA, 19 nt, Human
ugacuccagaaacagggua

SEQ ID NO: 180224 - RNA, 24 nt, Human
ugcaggcaacaagggcagcccaca

SEQ ID NO: 180225 - RNA, 24 nt, Human
ugccucauucacaccucccuguca

SEQ ID NO: 180226 - RNA, 26 nt, Human
ugcuggccacccucccuucuccaccc

SEQ ID NO: 180227 - RNA, 22 nt, Human
uggccucuagcuccccaccccu

SEQ ID NO: 180228 - RNA, 23 nt, Human
uggcugcugcugcccuuucccag

SEQ ID NO: 180229 - RNA, 18 nt, Human
uuacccacaucccuccuc

SEQ ID NO: 180230 - RNA, 21 nt, Human
aaacaagagguggauucaagg

SEQ ID NO: 180231 - RNA, 23 nt, Human
aaauaaccagcucaaggucucac

SEQ ID NO: 180232 - RNA, 20 nt, Human
aacacuuuaugagcagaacc

SEQ ID NO: 180233 - RNA, 25 nt, Human
aacagagcuaguaugcuggaaggaa

SEQ ID NO: 180234 - RNA, 22 nt, Human
aagagguggauucaaggccagg

SEQ ID NO: 180235 - RNA, 22 nt, Human
accucauuuaaucucuuagaau

SEQ ID NO: 180236 - RNA, 23 nt, Human
accuccucuucccuucuccgcug

SEQ ID NO: 180237 - RNA, 19 nt, Human
acucacaacgacccucuga

SEQ ID NO: 180238 - RNA, 22 nt, Human
acucauuacugugaaauuuaga

SEQ ID NO: 180239 - RNA, 18 nt, Human
agauccagggaauaucua

SEQ ID NO: 180240 - RNA, 21 nt, Human
aggggagaccaguucaggugg

SEQ ID NO: 180241 - RNA, 23 nt, Human
aggucaagucacucacuuaaaac

SEQ ID NO: 180242 - RNA, 18 nt, Human
agugccccauaaaugcug

SEQ ID NO: 180243 - RNA, 21 nt, Human
aguucugacuuguucaauacu

SEQ ID NO: 180244 - RNA, 22 nt, Human
caagcugcagauaggaaacuga

SEQ ID NO: 180245 - RNA, 22 nt, Human
caaggucucacagcugcugggu

SEQ ID NO: 180246 - RNA, 20 nt, Human
caccuccucuucccuucucc

SEQ ID NO: 180247 - RNA, 22 nt, Human
cagagccugugcucuccaccac

SEQ ID NO: 180248 - RNA, 20 nt, Human
caggcaugaaguuaaacacu

SEQ ID NO: 180249 - RNA, 22 nt, Human
caggccuuaacucacacaucuu

SEQ ID NO: 180250 - RNA, 20 nt, Human
cccaagcugcagauaggaaa

SEQ ID NO: 180251 - RNA, 21 nt, Human
cccccagccacacuaguugcc

SEQ ID NO: 180252 - RNA, 18 nt, Human
ccccuggagcugacuugc

SEQ ID NO: 180253 - RNA, 19 nt, Human
ccucccaguccuggaguga

SEQ ID NO: 180254 - RNA, 23 nt, Human
ccuggggaagcccagccaccccc

SEQ ID NO: 180255 - RNA, 18 nt, Human
ccuugugguggaaagaug

SEQ ID NO: 180256 - RNA, 23 nt, Human
cuccugcccuagaccagauucuu

SEQ ID NO: 180257 - RNA, 20 nt, Human
cugaguucugacuuguucaa

SEQ ID NO: 180258 - RNA, 23 nt, Human
cugauaauaacaaucaccauuua

SEQ ID NO: 180259 - RNA, 22 nt, Human
cuggagcugacuugcaccucug

SEQ ID NO: 180260 - RNA, 23 nt, Human
gccugccuguccacgugugugug

SEQ ID NO: 180261 - RNA, 20 nt, Human
gcgccuggugggggccgugc

SEQ ID NO: 180262 - RNA, 20 nt, Human
gcucuccaccaccuccucuu

SEQ ID NO: 180263 - RNA, 24 nt, Human
gcugggccuggggaagccgugcac

SEQ ID NO: 180264 - RNA, 21 nt, Human
ggaaaaaccaucguaugaaug

SEQ ID NO: 180265 - RNA, 25 nt, Human
ggggagaccaguucagguggggggu

SEQ ID NO: 180266 - RNA, 21 nt, Human
gguaguuauuacagugcuccu

SEQ ID NO: 180267 - RNA, 21 nt, Human
gucaagucacucacuuaaaac

SEQ ID NO: 180268 - RNA, 21 nt, Human
gugcaugugagucccccugga

SEQ ID NO: 180269 - RNA, 23 nt, Human
guguggacgggugggucugccug

SEQ ID NO: 180270 - RNA, 26 nt, Human
uaaaacaagagguggauucaaggcca

SEQ ID NO: 180271 - RNA, 25 nt, Human
uaaccaaaggcaacagagcuaguau

SEQ ID NO: 180272 - RNA, 19 nt, Human
uaacucacacaucuuccuc

SEQ ID NO: 180273 - RNA, 23 nt, Human
uaaucucuuagaaugaccccaua

SEQ ID NO: 180274 - RNA, 25 nt, Human
uacucacaacgacccucugaguuca

SEQ ID NO: 180275 - RNA, 19 nt, Human
uagauccagggaauaucua

SEQ ID NO: 180276 - RNA, 24 nt, Human
uaguaugcuggaaggaagcaaaua

SEQ ID NO: 180277 - RNA, 18 nt, Human
uauaacuuaaccaaaggc

SEQ ID NO: 180278 - RNA, 19 nt, Human
uauuacagugcuccucacu

SEQ ID NO: 180279 - RNA, 21 nt, Human
uccagggaauaucuagagaaa

SEQ ID NO: 180280 - RNA, 19 nt, Human
ucccugcucccugugcugg

SEQ ID NO: 180281 - RNA, 25 nt, Human
ucguaugaaugaauaggugacuuua

SEQ ID NO: 180282 - RNA, 21 nt, Human
ugacucagaggguguggacgg

SEQ ID NO: 180283 - RNA, 18 nt, Human
ugagucccccuggagcug

SEQ ID NO: 180284 - RNA, 21 nt, Human
uggaaggaagcaaauaugcuu

SEQ ID NO: 180285 - RNA, 22 nt, Human
uggaaggaagcaaauaugcuuu

SEQ ID NO: 180286 - RNA, 19 nt, Human
ugggccuaugugcauguga

SEQ ID NO: 180287 - RNA, 19 nt, Human
uggguggugaagaggggag

SEQ ID NO: 180288 - RNA, 19 nt, Human
ugugcaugugagucccccu

SEQ ID NO: 180289 - RNA, 20 nt, Human
ugugcaugugagucccccug

SEQ ID NO: 180290 - RNA, 19 nt, Human
ugugguggaaagaugugcu

SEQ ID NO: 180291 - RNA, 21 nt, Human
uuggguaccagagccugugcu

SEQ ID NO: 180292 - RNA, 18 nt, Human
uuuauugaguguuuacuc

SEQ ID NO: 180293 - RNA, 22 nt, Human
acuacuccucagggcucuccug

SEQ ID NO: 180294 - RNA, 22 nt, Human
agcugcagagcagagggggaac

SEQ ID NO: 180295 - RNA, 22 nt, Human
ccccacucucagguugcaccua

SEQ ID NO: 180296 - RNA, 18 nt, Human
ccucagggcucuccuggc

SEQ ID NO: 180297 - RNA, 23 nt, Human
ccucauggcuuagcucccccacu

SEQ ID NO: 180298 - RNA, 25 nt, Human
cuagagccuccccauccaggcccaa

SEQ ID NO: 180299 - RNA, 19 nt, Human
cuccccauccaggcccaac

SEQ ID NO: 180300 - RNA, 20 nt, Human
cuccucagggcucuccuggc

SEQ ID NO: 180301 - RNA, 23 nt, Human
ggcuuagcucccccacucucagg

SEQ ID NO: 180302 - RNA, 18 nt, Human
gggaagguuuucggggaa

SEQ ID NO: 180303 - RNA, 18 nt, Human
uccucagggcucuccugg

SEQ ID NO: 180304 - RNA, 18 nt, Human
ugccccuaccucauggcu

SEQ ID NO: 180305 - RNA, 18 nt, Human
uggcuggaguugaggacu

SEQ ID NO: 180306 - RNA, 21 nt, Human
uggcuggaguugaggacuagg

SEQ ID NO: 180307 - RNA, 24 nt, Human
uggggcagguggcuggaguugagg

SEQ ID NO: 180308 - RNA, 22 nt, Human
aaaccagcuucaggucggccgg

SEQ ID NO: 180309 - RNA, 20 nt, Human
aauaaaaucaaagucuauga

SEQ ID NO: 180310 - RNA, 24 nt, Human
agcauucuuuuugcugcauuuucu

SEQ ID NO: 180311 - RNA, 24 nt, Human
cacccccaaagguagcuggcccaa

SEQ ID NO: 180312 - RNA, 18 nt, Human
ccaaugguaaggauccga

SEQ ID NO: 180313 - RNA, 27 nt, Human
ccaaugguaaggauccgaauucuuccu

SEQ ID NO: 180314 - RNA, 24 nt, Human
ccccaaagguagcuggcccaaccu

SEQ ID NO: 180315 - RNA, 23 nt, Human
ccggcgauugcggccgguuuccu

SEQ ID NO: 180316 - RNA, 18 nt, Human
cuauagcauucuuuuugc

SEQ ID NO: 180317 - RNA, 21 nt, Human
gggaauccaugaguugguagg

SEQ ID NO: 180318 - RNA, 18 nt, Human
uauggcaauggggggggu

SEQ ID NO: 180319 - RNA, 22 nt, Human
uaugucaugcagagacucaaau

SEQ ID NO: 180320 - RNA, 22 nt, Human
uccuggcccaaaaguguuugag

SEQ ID NO: 180321 - RNA, 23 nt, Human
ucuugggaauccaugaguuggua

SEQ ID NO: 180322 - RNA, 24 nt, Human
ugcagagacucaaauccuggccca

SEQ ID NO: 180323 - RNA, 22 nt, Human
uggaagauuccaaugguaagga

SEQ ID NO: 180324 - RNA, 22 nt, Human
uggauguuuaaaaaaaaaaaaa

SEQ ID NO: 180325 - RNA, 20 nt, Human
ugucaugcagagacucaaau

SEQ ID NO: 180326 - RNA, 24 nt, Human
uguggauguuuaaaaaaaaaaaaa

SEQ ID NO: 180327 - RNA, 25 nt, Human
uguggauguuuaaaaaaaaaaaaac

SEQ ID NO: 180328 - RNA, 23 nt, Human
uuuaaaaaaaaaaaaaccaccaa

SEQ ID NO: 180329 - RNA, 25 nt, Human
uuuuaagccacaggucuacuuggag

SEQ ID NO: 180330 - RNA, 18 nt, Human
ugggcuuuuaagauuaac

SEQ ID NO: 180331 - RNA, 18 nt, Human
aaagacacaggcuuucau

SEQ ID NO: 180332 - RNA, 18 nt, Human
agaaucccucaaagacac

SEQ ID NO: 180333 - RNA, 18 nt, Human
cacugcagggaugcaggg

SEQ ID NO: 180334 - RNA, 22 nt, Human
cagcccugcagauauguaugca

SEQ ID NO: 180335 - RNA, 23 nt, Human
ccagccucccggcucugcagucg

SEQ ID NO: 180336 - RNA, 23 nt, Human
cccucaaagacacaggcuuucau

SEQ ID NO: 180337 - RNA, 19 nt, Human
cggcgcccaggccggccgc

SEQ ID NO: 180338 - RNA, 25 nt, Human
cuuccaaaauaaaaaucacuaccac

SEQ ID NO: 180339 - RNA, 21 nt, Human
gcucugcagucggcgcccagg

SEQ ID NO: 180340 - RNA, 23 nt, Human
gcuuccauuccagcccugcagau

SEQ ID NO: 180341 - RNA, 20 nt, Human
gggcuuuggcacugcaggga

SEQ ID NO: 180342 - RNA, 22 nt, Human
uaaaaaucacuaccaccuuuaa

SEQ ID NO: 180343 - RNA, 19 nt, Human
uagaaucccucaaagacac

SEQ ID NO: 180344 - RNA, 19 nt, Human
ucugcagucggcgcccagg

SEQ ID NO: 180345 - RNA, 21 nt, Human
ugaaauguggcaugacaggga

SEQ ID NO: 180346 - RNA, 23 nt, Human
uucaggguagaaucccucaaaga

SEQ ID NO: 180347 - RNA, 26 nt, Human
aaaaaaaaaaaaccucacacagaaaa

SEQ ID NO: 180348 - RNA, 18 nt, Human
aaaaaaccucacacagaa

SEQ ID NO: 180349 - RNA, 22 nt, Human
aaaaagaggagaacacucagaa

SEQ ID NO: 180350 - RNA, 19 nt, Human
accguccccugccccggcc

SEQ ID NO: 180351 - RNA, 25 nt, Human
acgcaaaacacaaaauggcucccaa

SEQ ID NO: 180352 - RNA, 30 nt, Human
acgcaaaacacaaaauggcucccaauccag

SEQ ID NO: 180353 - RNA, 18 nt, Human
aggcaacuggcacaugug

SEQ ID NO: 180354 - RNA, 22 nt, Human
caaaauggcucccaauccaggc

SEQ ID NO: 180355 - RNA, 26 nt, Human
caaaauggcucccaauccaggcaaag

SEQ ID NO: 180356 - RNA, 18 nt, Human
cacauguggaagcagaau

SEQ ID NO: 180357 - RNA, 18 nt, Human
cagaaaaagaggagaaca

SEQ ID NO: 180358 - RNA, 20 nt, Human
ccaccguccccugccccggg

SEQ ID NO: 180359 - RNA, 21 nt, Human
cccacagauggcacaguccac

SEQ ID NO: 180360 - RNA, 27 nt, Human
cccccggguggcggcugcgcccggccu

SEQ ID NO: 180361 - RNA, 23 nt, Human
ccgcgcucuuggccccucuccug

SEQ ID NO: 180362 - RNA, 27 nt, Human
ccgucuuccaaccaucagcuucgacuc

SEQ ID NO: 180363 - RNA, 18 nt, Human
ccuggagccccuuucgcu

SEQ ID NO: 180364 - RNA, 24 nt, Human
ccuggccucggucccccggguggc

SEQ ID NO: 180365 - RNA, 20 nt, Human
ccuuuaaacuuagggacaga

SEQ ID NO: 180366 - RNA, 24 nt, Human
cgcucuuggccccucuccuggccu

SEQ ID NO: 180367 - RNA, 21 nt, Human
cuccuggccucggucccccgg

SEQ ID NO: 180368 - RNA, 18 nt, Human
gacagagauuacagagau

SEQ ID NO: 180369 - RNA, 20 nt, Human
ggcacauguggaagcagaau

SEQ ID NO: 180370 - RNA, 23 nt, Human
ggccaccguccccugccccggcc

SEQ ID NO: 180371 - RNA, 20 nt, Human
ggccuggagccccuuucgcu

SEQ ID NO: 180372 - RNA, 25 nt, Human
uaaaaaaaaaaaaaccucacacaga

SEQ ID NO: 180373 - RNA, 20 nt, Human
uacgcaaaacacaaaauggc

SEQ ID NO: 180374 - RNA, 18 nt, Human
uaugacaucugcaaacuu

SEQ ID NO: 180375 - RNA, 24 nt, Human
ucagccgcgcucuuggccccucuc

SEQ ID NO: 180376 - RNA, 22 nt, Human
ugcagauuaaaaaaaaaaaaac

SEQ ID NO: 180377 - RNA, 23 nt, Human
ugcagauuaaaaaaaaaaaaacc

SEQ ID NO: 180378 - RNA, 21 nt, Human
ugccacauuaaaaguuaaagu

SEQ ID NO: 180379 - RNA, 21 nt, Human
ugcccugggauuucccacaga

SEQ ID NO: 180380 - RNA, 24 nt, Human
ugcccugggauuucccacagaugg

SEQ ID NO: 180381 - RNA, 23 nt, Human
uggcggcugcgcccggccuggag

SEQ ID NO: 180382 - RNA, 26 nt, Human
uguaaacauuugcccugggauuuccc

SEQ ID NO: 180383 - RNA, 21 nt, Human
uuaaaaaaaaaaaaaccucac

SEQ ID NO: 180384 - RNA, 19 nt, Human
acagacuauacauagcccc

SEQ ID NO: 180385 - RNA, 24 nt, Human
acauagcccccagcccauaccucc

SEQ ID NO: 180386 - RNA, 20 nt, Human
aucaaauuucuccucaaaac

SEQ ID NO: 180387 - RNA, 19 nt, Human
augcaguuccuuuauuauc

SEQ ID NO: 180388 - RNA, 19 nt, Human
cagacuauacauagccccc

SEQ ID NO: 180389 - RNA, 19 nt, Human
caucuugugcaggggacug

SEQ ID NO: 180390 - RNA, 21 nt, Human
ccagcccauaccucccauccc

SEQ ID NO: 180391 - RNA, 23 nt, Human
ccccagcccauaccucccauccc

SEQ ID NO: 180392 - RNA, 21 nt, Human
cccccagcccauaccucccau

SEQ ID NO: 180393 - RNA, 20 nt, Human
cguauacagacuauacauag

SEQ ID NO: 180394 - RNA, 19 nt, Human
cucccaucccuggggcauc

SEQ ID NO: 180395 - RNA, 23 nt, Human
gaugcaguuccuuuauuaucagg

SEQ ID NO: 180396 - RNA, 22 nt, Human
uagcccccagcccauaccuccc

SEQ ID NO: 180397 - RNA, 21 nt, Human
uaggaaaugcgaucugugaug

SEQ ID NO: 180398 - RNA, 18 nt, Human
uauacagacuauacauag

SEQ ID NO: 180399 - RNA, 20 nt, Human
ugauggaugagauucccuac

SEQ ID NO: 180400 - RNA, 20 nt, Human
uuccuuuauuaucaggaaac

SEQ ID NO: 180401 - RNA, 18 nt, Human
aaaaagacaagacagcug

SEQ ID NO: 180402 - RNA, 20 nt, Human
aaaaagacaagacagcuggu

SEQ ID NO: 180403 - RNA, 19 nt, Human
aagaagccggaacagcgcg

SEQ ID NO: 180404 - RNA, 22 nt, Human
aagcaccaaaggcuggaaagca

SEQ ID NO: 180405 - RNA, 18 nt, Human
aaggagaggccuuuuuac

SEQ ID NO: 180406 - RNA, 23 nt, Human
accccagaccccucugcuggcuc

SEQ ID NO: 180407 - RNA, 21 nt, Human
agacagcuggaauccccaggc

SEQ ID NO: 180408 - RNA, 20 nt, Human
agccggaacagcgcgguccu

SEQ ID NO: 180409 - RNA, 21 nt, Human
aggaaggugggugagggcugg

SEQ ID NO: 180410 - RNA, 23 nt, Human
aggcaguggcugaggcagacguc

SEQ ID NO: 180411 - RNA, 21 nt, Human
aggugaaggcugggcuccuug

SEQ ID NO: 180412 - RNA, 26 nt, Human
auuguucugaggaauaauccaaaaga

SEQ ID NO: 180413 - RNA, 22 nt, Human
caagguauguuagagaccucaa

SEQ ID NO: 180414 - RNA, 21 nt, Human
caccaaaggcuggaaagcacu

SEQ ID NO: 180415 - RNA, 22 nt, Human
cagacgucuccaucucagccgc

SEQ ID NO: 180416 - RNA, 21 nt, Human
cagaguauccaguauagcauu

SEQ ID NO: 180417 - RNA, 20 nt, Human
cagccaccaccaaaggagag

SEQ ID NO: 180418 - RNA, 18 nt, Human
caguggcugaggcagacg

SEQ ID NO: 180419 - RNA, 21 nt, Human
caguggcugaggcagacgucu

SEQ ID NO: 180420 - RNA, 21 nt, Human
cauccagguauaaucugugcu

SEQ ID NO: 180421 - RNA, 19 nt, Human
ccaaaggcugaccccagac

SEQ ID NO: 180422 - RNA, 18 nt, Human
ccaaaggcuggaaagcac

SEQ ID NO: 180423 - RNA, 19 nt, Human
cccucugcuggcucagaau

SEQ ID NO: 180424 - RNA, 23 nt, Human
ccuccaggaucccacuuuuggcu

SEQ ID NO: 180425 - RNA, 22 nt, Human
ccuguaagcaccaaaggcugga

SEQ ID NO: 180426 - RNA, 18 nt, Human
ccuguccuauggagacuu

SEQ ID NO: 180427 - RNA, 25 nt, Human
cggccuccaggaucccacuuuuggc

SEQ ID NO: 180428 - RNA, 21 nt, Human
cggggaagccagcggccucca

SEQ ID NO: 180429 - RNA, 22 nt, Human
cucaagaguuaggcuucauaga

SEQ ID NO: 180430 - RNA, 19 nt, Human
cucugggcagcgaugaccc

SEQ ID NO: 180431 - RNA, 22 nt, Human
cuuucugcauauccuuugaaag

SEQ ID NO: 180432 - RNA, 23 nt, Human
gagggcuggaucagggguggugu

SEQ ID NO: 180433 - RNA, 28 nt, Human
gaucacagaugcggugccuugaacguuu

SEQ ID NO: 180434 - RNA, 19 nt, Human
gcucugggcagcgaugacc

SEQ ID NO: 180435 - RNA, 18 nt, Human
gcuggaauccccaggcuc

SEQ ID NO: 180436 - RNA, 21 nt, Human
gugggggaaggugaaggcugg

SEQ ID NO: 180437 - RNA, 18 nt, Human
uaaucugugcuuuuccuc

SEQ ID NO: 180438 - RNA, 23 nt, Human
uccaaaagaccagagaggaugcc

SEQ ID NO: 180439 - RNA, 23 nt, Human
ucugaagcggccauugcgcaaca

SEQ ID NO: 180440 - RNA, 20 nt, Human
ugcugcugccgcugcagcca

SEQ ID NO: 180441 - RNA, 20 nt, Human
uggaaaaagacaagacagcu

SEQ ID NO: 180442 - RNA, 21 nt, Human
uggaaaaagacaagacagcug

SEQ ID NO: 180443 - RNA, 19 nt, Human
uggaaagcacuguguaaau

SEQ ID NO: 180444 - RNA, 23 nt, Human
uggggugggggaaggugaaggcu

SEQ ID NO: 180445 - RNA, 25 nt, Human
ugguaggccacgggguugauggggu

SEQ ID NO: 180446 - RNA, 19 nt, Human
ugugucgguaaagcagcac

SEQ ID NO: 180447 - RNA, 23 nt, Human
uguuagagaccucaagaguuagg

SEQ ID NO: 180448 - RNA, 19 nt, Human
uuacccgggucggggaagc

SEQ ID NO: 180449 - RNA, 20 nt, Human
uuccuguccuauggagacuu

SEQ ID NO: 180450 - RNA, 30 nt, Human
uugaucacagaugcggugccuugaacguuu

SEQ ID NO: 180451 - RNA, 24 nt, Human
uuggcuucuugcuucucggaggca

SEQ ID NO: 180452 - RNA, 20 nt, Human
uuuuggcuucuugcuucucg

SEQ ID NO: 180453 - RNA, 23 nt, Human
aacuaaaaaaacagccaaaacaa

SEQ ID NO: 180454 - RNA, 20 nt, Human
acagaacuaaaaaaacagcc

SEQ ID NO: 180455 - RNA, 23 nt, Human
acuuuaggguuuuucagaguccu

SEQ ID NO: 180456 - RNA, 22 nt, Human
cagaacuaaaaaaacagccaaa

SEQ ID NO: 180457 - RNA, 18 nt, Human
cccuagaauacuuuaggg

SEQ ID NO: 180458 - RNA, 20 nt, Human
cguugguugcagucuuuuuu

SEQ ID NO: 180459 - RNA, 24 nt, Human
cugaaauggaagacaguuucuccc

SEQ ID NO: 180460 - RNA, 22 nt, Human
uaaaaaaacagccaaaacaaag

SEQ ID NO: 180461 - RNA, 23 nt, Human
uaaaaaaacagccaaaacaaagu

SEQ ID NO: 180462 - RNA, 22 nt, Human
uaacaauacugauucaaaacug

SEQ ID NO: 180463 - RNA, 24 nt, Human
uaacaauacugauucaaaacugaa

SEQ ID NO: 180464 - RNA, 22 nt, Human
uacagaacuaaaaaaacagcca

SEQ ID NO: 180465 - RNA, 23 nt, Human
uacugauucaaaacugaaaugga

SEQ ID NO: 180466 - RNA, 18 nt, Human
uccauaaaaggaauauaa

SEQ ID NO: 180467 - RNA, 23 nt, Human
ucucauuacuucagcucucuucg

SEQ ID NO: 180468 - RNA, 21 nt, Human
augcggugcugggcagugccc

SEQ ID NO: 180469 - RNA, 21 nt, Human
cagguaggaggccgagccccg

SEQ ID NO: 180470 - RNA, 19 nt, Human
cccaccgugggggacgggg

SEQ ID NO: 180471 - RNA, 20 nt, Human
cgagccccgagcccccgccc

SEQ ID NO: 180472 - RNA, 26 nt, Human
cgggguggaggguggguugggggcag

SEQ ID NO: 180473 - RNA, 18 nt, Human
ggcagguaggaggccgag

SEQ ID NO: 180474 - RNA, 21 nt, Human
gggacgggguggagggugggu

SEQ ID NO: 180475 - RNA, 23 nt, Human
gggggacgggguggagggugggu

SEQ ID NO: 180476 - RNA, 21 nt, Human
gguggaggguggguugggggc

SEQ ID NO: 180477 - RNA, 23 nt, Human
ucaaaaagaauuuauuccggaca

SEQ ID NO: 180478 - RNA, 18 nt, Human
uggaggguggguuggggg

SEQ ID NO: 180479 - RNA, 23 nt, Human
uuuuuuuuuuuuuuuuuuuucca

SEQ ID NO: 180480 - RNA, 24 nt, Human
uuuuuuuuuuuuuuuuuuuuuccu

SEQ ID NO: 180481 - RNA, 19 nt, Human
aaagcacucacauaaaucc

SEQ ID NO: 180482 - RNA, 24 nt, Human
aaaggaaacauaaagugcuucuag

SEQ ID NO: 180483 - RNA, 19 nt, Human
aacugcaguaucacagacg

SEQ ID NO: 180484 - RNA, 22 nt, Human
acaacuuugaggcacaaucuaa

SEQ ID NO: 180485 - RNA, 24 nt, Human
acggaggagucacccacacuacgc

SEQ ID NO: 180486 - RNA, 22 nt, Human
acucacauaaauccauuucacc

SEQ ID NO: 180487 - RNA, 25 nt, Human
agaagaaggcaaaugcagccucuga

SEQ ID NO: 180488 - RNA, 21 nt, Human
agacuucuaguguuuacuccc

SEQ ID NO: 180489 - RNA, 18 nt, Human
aggaacggaggagucacc

SEQ ID NO: 180490 - RNA, 18 nt, Human
aggaauugaaaccccaga

SEQ ID NO: 180491 - RNA, 27 nt, Human
aguuacacaacuauauucaaggacagc

SEQ ID NO: 180492 - RNA, 20 nt, Human
auaaauccauuucacccaaa

SEQ ID NO: 180493 - RNA, 18 nt, Human
auaucauuuccuuccucc

SEQ ID NO: 180494 - RNA, 23 nt, Human
aucaugaagaccuugggauaggg

SEQ ID NO: 180495 - RNA, 22 nt, Human
aucauuuccuuccuccuccccu

SEQ ID NO: 180496 - RNA, 26 nt, Human
auugaaaccccagaagauaacuacaa

SEQ ID NO: 180497 - RNA, 21 nt, Human
cacaaucuaaauacuaaaaau

SEQ ID NO: 180498 - RNA, 23 nt, Human
cacaauggucaaacucacugaag

SEQ ID NO: 180499 - RNA, 20 nt, Human
cacugcuugaaaaccagaau

SEQ ID NO: 180500 - RNA, 22 nt, Human
cacugcuugaaaaccagaauga

SEQ ID NO: 180501 - RNA, 20 nt, Human
cacuuuguacuuuacugaaa

SEQ ID NO: 180502 - RNA, 23 nt, Human
cagaagaaggcaaaugcagccuc

SEQ ID NO: 180503 - RNA, 25 nt, Human
cagaagauaacuacaacaaaaacau

SEQ ID NO: 180504 - RNA, 21 nt, Human
cagcccaagagccaagagcac

SEQ ID NO: 180505 - RNA, 22 nt, Human
caggugucccuagagcaguuuu

SEQ ID NO: 180506 - RNA, 18 nt, Human
caguuuuguacuaaagac

SEQ ID NO: 180507 - RNA, 27 nt, Human
cauuuccuuccuccuccccuuuccccu

SEQ ID NO: 180508 - RNA, 25 nt, Human
ccaaaggucuuccacuagagucuag

SEQ ID NO: 180509 - RNA, 21 nt, Human
ccaaggaacggaggagucacc

SEQ ID NO: 180510 - RNA, 20 nt, Human
ccacgguacuccagcccaag

SEQ ID NO: 180511 - RNA, 23 nt, Human
ccacgguacuccagcccaagagc

SEQ ID NO: 180512 - RNA, 24 nt, Human
ccauaucauuuccuuccuccuccc

SEQ ID NO: 180513 - RNA, 22 nt, Human
cccaaggaacggaggagucacc

SEQ ID NO: 180514 - RNA, 19 nt, Human
cccacacuacgccucggcc

SEQ ID NO: 180515 - RNA, 28 nt, Human
cccucaccacgguacuccagcccaagag

SEQ ID NO: 180516 - RNA, 20 nt, Human
ccucggcccugugccgccuu

SEQ ID NO: 180517 - RNA, 18 nt, Human
ccuuccuccuccccuuuc

SEQ ID NO: 180518 - RNA, 20 nt, Human
ccuugggauagggaagacuc

SEQ ID NO: 180519 - RNA, 20 nt, Human
cggggaagaccacugagcug

SEQ ID NO: 180520 - RNA, 18 nt, Human
cuauuuguuuaaagcacu

SEQ ID NO: 180521 - RNA, 22 nt, Human
cucggcccugugccgccuuaac

SEQ ID NO: 180522 - RNA, 22 nt, Human
cuucugaaaucucaaaggagaa

SEQ ID NO: 180523 - RNA, 18 nt, Human
gacgacgggacccaagga

SEQ ID NO: 180524 - RNA, 24 nt, Human
gcucucaagaguaccuacucuuuu

SEQ ID NO: 180525 - RNA, 20 nt, Human
ggaauugaaaccccagaaga

SEQ ID NO: 180526 - RNA, 18 nt, Human
ggacccaaggaacggagg

SEQ ID NO: 180527 - RNA, 23 nt, Human
guacuaaagacuucuaguguuua

SEQ ID NO: 180528 - RNA, 20 nt, Human
guauguaaauaucuugaauc

SEQ ID NO: 180529 - RNA, 20 nt, Human
uaaauauagucauccacaaa

SEQ ID NO: 180530 - RNA, 23 nt, Human
uaacuaaguuaucacugaacaua

SEQ ID NO: 180531 - RNA, 23 nt, Human
uacuccagcccaagagccaagag

SEQ ID NO: 180532 - RNA, 24 nt, Human
uccuuccuccuccccuuucccaaa

SEQ ID NO: 180533 - RNA, 20 nt, Human
ucuaaauacuaaaaaugauu

SEQ ID NO: 180534 - RNA, 21 nt, Human
ugaaaaggaacagcugaaaua

SEQ ID NO: 180535 - RNA, 25 nt, Human
ugaggcacaaucuaaauacuaaaaa

SEQ ID NO: 180536 - RNA, 24 nt, Human
ugaguugagcugauugaugcccuc

SEQ ID NO: 180537 - RNA, 20 nt, Human
ugcagccuagcccagugucu

SEQ ID NO: 180538 - RNA, 21 nt, Human
ugcaguaucacagacgacggg

SEQ ID NO: 180539 - RNA, 21 nt, Human
uggcauggccuuuccaaaggu

SEQ ID NO: 180540 - RNA, 26 nt, Human
uggcauggccuuuccaaaggucuucc

SEQ ID NO: 180541 - RNA, 21 nt, Human
uguguaggaaucaccaggugu

SEQ ID NO: 180542 - RNA, 24 nt, Human
uuaaauccauuaauaauccaugaa

SEQ ID NO: 180543 - RNA, 19 nt, Human
uuauaauaagaagaaaucc

SEQ ID NO: 180544 - RNA, 18 nt, Human
uucccaaauaaauaaggu

SEQ ID NO: 180545 - RNA, 22 nt, Human
uuccguugugaaaaaaguuguu

SEQ ID NO: 180546 - RNA, 23 nt, Human
uugaaaaccagaaugacugaaca

SEQ ID NO: 180547 - RNA, 22 nt, Human
uugaaaccccagaagauaacua

SEQ ID NO: 180548 - RNA, 27 nt, Human
uuuaaagcacucacauaaauccauuuc

SEQ ID NO: 180549 - RNA, 21 nt, Human
uuuaugagaaauauaaacauc

SEQ ID NO: 180550 - RNA, 23 nt, Human
uuuccuuccuccuccccuuuccc

SEQ ID NO: 180551 - RNA, 23 nt, Human
uuucucacaugacagcugggagu

SEQ ID NO: 180552 - RNA, 23 nt, Human
aaacagcuucccuuugagagaag

SEQ ID NO: 180553 - RNA, 21 nt, Human
aacagcugcuggcaguggccc

SEQ ID NO: 180554 - RNA, 20 nt, Human
aagagccacuuucagaacca

SEQ ID NO: 180555 - RNA, 22 nt, Human
aagcaacccagacacacaaaca

SEQ ID NO: 180556 - RNA, 23 nt, Human
aagcaacccagacacacaaacag

SEQ ID NO: 180557 - RNA, 20 nt, Human
aaggaccccagggagggcag

SEQ ID NO: 180558 - RNA, 22 nt, Human
acaaagccccucaaaaagaaac

SEQ ID NO: 180559 - RNA, 20 nt, Human
acagcaauaaagaaaaguga

SEQ ID NO: 180560 - RNA, 18 nt, Human
accccagggagggcaggc

SEQ ID NO: 180561 - RNA, 20 nt, Human
acccggccugcagcaaggac

SEQ ID NO: 180562 - RNA, 23 nt, Human
accuacagccauuuccagaaaca

SEQ ID NO: 180563 - RNA, 19 nt, Human
accuugaguuugagucugg

SEQ ID NO: 180564 - RNA, 20 nt, Human
acugcacucucccaaacaac

SEQ ID NO: 180565 - RNA, 23 nt, Human
agaaccaccuccucuugcaagcc

SEQ ID NO: 180566 - RNA, 21 nt, Human
agaggcaggcaccaaaacaac

SEQ ID NO: 180567 - RNA, 20 nt, Human
agccugccuccauggugcug

SEQ ID NO: 180568 - RNA, 18 nt, Human
aggaggcacugcccauuu

SEQ ID NO: 180569 - RNA, 26 nt, Human
aggauguaugugugugugugugugug

SEQ ID NO: 180570 - RNA, 21 nt, Human
aggcaggcaccaaaacaacuc

SEQ ID NO: 180571 - RNA, 23 nt, Human
agguaaucuacacccacagucug

SEQ ID NO: 180572 - RNA, 19 nt, Human
agucagaauugcccauugu

SEQ ID NO: 180573 - RNA, 19 nt, Human
agugggggaauuucaaagg

SEQ ID NO: 180574 - RNA, 19 nt, Human
auaaaguauuuccaaggag

SEQ ID NO: 180575 - RNA, 22 nt, Human
augugugugugugugugugugu

SEQ ID NO: 180576 - RNA, 23 nt, Human
auguguguguguguguguguguu

SEQ ID NO: 180577 - RNA, 21 nt, Human
auugugcacacagacuauuca

SEQ ID NO: 180578 - RNA, 20 nt, Human
caaaaagaaacugggcagug

SEQ ID NO: 180579 - RNA, 23 nt, Human
caaacaaagccccucaaaaagaa

SEQ ID NO: 180580 - RNA, 24 nt, Human
caaacaaagccccucaaaaagaaa

SEQ ID NO: 180581 - RNA, 20 nt, Human
caaacagcuucccuuugaga

SEQ ID NO: 180582 - RNA, 20 nt, Human
caaauaccuggaggagaagc

SEQ ID NO: 180583 - RNA, 20 nt, Human
caacccagacacacaaacag

SEQ ID NO: 180584 - RNA, 21 nt, Human
caagagacagcguguggucac

SEQ ID NO: 180585 - RNA, 23 nt, Human
caagugaugcaagcagaggaggc

SEQ ID NO: 180586 - RNA, 24 nt, Human
cacacaaacagcuucccuuugaga

SEQ ID NO: 180587 - RNA, 22 nt, Human
caccaaaacaacucaaauaccu

SEQ ID NO: 180588 - RNA, 22 nt, Human
cacccggccugcagcaaggacc

SEQ ID NO: 180589 - RNA, 18 nt, Human
caccgucucaaugcucau

SEQ ID NO: 180590 - RNA, 23 nt, Human
caccuacagccauuuccagaaac

SEQ ID NO: 180591 - RNA, 25 nt, Human
caccuacagccauuuccagaaacag

SEQ ID NO: 180592 - RNA, 20 nt, Human
caccuccucuugcaagcccu

SEQ ID NO: 180593 - RNA, 21 nt, Human
caggcaccaaaacaacucaaa

SEQ ID NO: 180594 - RNA, 19 nt, Human
cauuuaccugucugauggg

SEQ ID NO: 180595 - RNA, 21 nt, Human
ccaaacaacaucacuacaacc

SEQ ID NO: 180596 - RNA, 22 nt, Human
ccaaacaacaucacuacaacca

SEQ ID NO: 180597 - RNA, 24 nt, Human
ccaaacaacaucacuacaaccaug

SEQ ID NO: 180598 - RNA, 22 nt, Human
ccaaauucucaagagacagcgu

SEQ ID NO: 180599 - RNA, 19 nt, Human
ccagaaacagcugcuggca

SEQ ID NO: 180600 - RNA, 20 nt, Human
ccagaaacagcugcuggcag

SEQ ID NO: 180601 - RNA, 21 nt, Human
cccaaacaaagccccucaaaa

SEQ ID NO: 180602 - RNA, 19 nt, Human
cccucugcucuccccggag

SEQ ID NO: 180603 - RNA, 20 nt, Human
cccugauucucugggcaugg

SEQ ID NO: 180604 - RNA, 19 nt, Human
ccuacagccauuuccagaa

SEQ ID NO: 180605 - RNA, 23 nt, Human
ccucugggcuccuggaaguggca

SEQ ID NO: 180606 - RNA, 21 nt, Human
ccuggauuggccacccggccu

SEQ ID NO: 180607 - RNA, 24 nt, Human
ccugggagugucucucccaccugg

SEQ ID NO: 180608 - RNA, 26 nt, Human
cgucggaacccucugcucuccccgga

SEQ ID NO: 180609 - RNA, 23 nt, Human
cuacugcacucucccaaacaaca

SEQ ID NO: 180610 - RNA, 24 nt, Human
cucaacaccaccuacagccauuuc

SEQ ID NO: 180611 - RNA, 20 nt, Human
cucauaccccagggcugggu

SEQ ID NO: 180612 - RNA, 20 nt, Human
cucccaaacaacaucacuac

SEQ ID NO: 180613 - RNA, 22 nt, Human
cuccucauuuucacagcgaucg

SEQ ID NO: 180614 - RNA, 22 nt, Human
cugcccugauucucugggcaug

SEQ ID NO: 180615 - RNA, 20 nt, Human
gagaagacaggggagggugg

SEQ ID NO: 180616 - RNA, 22 nt, Human
gaugagggggcaagaugaggga

SEQ ID NO: 180617 - RNA, 19 nt, Human
gcaacccagacacacaaac

SEQ ID NO: 180618 - RNA, 24 nt, Human
ggaauccgucggaacccucugcuc

SEQ ID NO: 180619 - RNA, 25 nt, Human
ggagaagucagaauugcccauuguu

SEQ ID NO: 180620 - RNA, 22 nt, Human
ggcagguaaucuacacccacag

SEQ ID NO: 180621 - RNA, 18 nt, Human
ggguuuggggagggaaag

SEQ ID NO: 180622 - RNA, 21 nt, Human
gugggggaggcugcaggcagg

SEQ ID NO: 180623 - RNA, 23 nt, Human
gugucuggggaaagguuuugggg

SEQ ID NO: 180624 - RNA, 21 nt, Human
gugugugugugugugugugug

SEQ ID NO: 180625 - RNA, 21 nt, Human
gugugugugugugugugugug

SEQ ID NO: 180626 - RNA, 21 nt, Human
gugugugugugugugugugug

SEQ ID NO: 180627 - RNA, 19 nt, Human
uaagcaacccagacacaca

SEQ ID NO: 180628 - RNA, 19 nt, Human
uacaagcucccaagugggg

SEQ ID NO: 180629 - RNA, 21 nt, Human
uaccuggaggagaagcgagcc

SEQ ID NO: 180630 - RNA, 24 nt, Human
uaccugucugauggguuuggggag

SEQ ID NO: 180631 - RNA, 19 nt, Human
uacuacugcacucucccaa

SEQ ID NO: 180632 - RNA, 23 nt, Human
uacuacugcacucucccaaacaa

SEQ ID NO: 180633 - RNA, 18 nt, Human
uagguuuccccguccagu

SEQ ID NO: 180634 - RNA, 18 nt, Human
uaugugugugugugugug

SEQ ID NO: 180635 - RNA, 23 nt, Human
uaugugugugugugugugugugu

SEQ ID NO: 180636 - RNA, 22 nt, Human
ucaaaaagaaacugggcaguga

SEQ ID NO: 180637 - RNA, 20 nt, Human
ucacagauaaaguauuucca

SEQ ID NO: 180638 - RNA, 21 nt, Human
ucccaaacaacaucacuacaa

SEQ ID NO: 180639 - RNA, 23 nt, Human
ucccaccauuuaaaagggagaga

SEQ ID NO: 180640 - RNA, 19 nt, Human
uccccggagguccugacuc

SEQ ID NO: 180641 - RNA, 20 nt, Human
uccccgguggcaagccugcc

SEQ ID NO: 180642 - RNA, 24 nt, Human
uccucuugcaagccccaguuucac

SEQ ID NO: 180643 - RNA, 23 nt, Human
uccugacucccaagagcgagcuc

SEQ ID NO: 180644 - RNA, 21 nt, Human
ucggaacccucugcucucccc

SEQ ID NO: 180645 - RNA, 23 nt, Human
ucggaacccucugcucuccccgg

SEQ ID NO: 180646 - RNA, 20 nt, Human
ucucaacaccaccuacagcc

SEQ ID NO: 180647 - RNA, 20 nt, Human
ucucucuuggcccucugggc

SEQ ID NO: 180648 - RNA, 23 nt, Human
ucugggggaaccccaagggccug

SEQ ID NO: 180649 - RNA, 24 nt, Human
ucuguguuuggcugagguuagaag

SEQ ID NO: 180650 - RNA, 18 nt, Human
ugagagaagacaggggag

SEQ ID NO: 180651 - RNA, 21 nt, Human
ugagagaagacaggggagggu

SEQ ID NO: 180652 - RNA, 22 nt, Human
ugagagaagacaggggagggug

SEQ ID NO: 180653 - RNA, 18 nt, Human
ugagggaaauaagcaacc

SEQ ID NO: 180654 - RNA, 24 nt, Human
ugagggaaauaagcaacccagaca

SEQ ID NO: 180655 - RNA, 20 nt, Human
ugagggggcaagaugaggga

SEQ ID NO: 180656 - RNA, 22 nt, Human
ugauggggacuauugguuuccc

SEQ ID NO: 180657 - RNA, 18 nt, Human
ugauggguuuggggaggg

SEQ ID NO: 180658 - RNA, 18 nt, Human
ugauuugcggcucugucu

SEQ ID NO: 180659 - RNA, 19 nt, Human
ugcaagcagaggaggcucc

SEQ ID NO: 180660 - RNA, 24 nt, Human
ugcuccagaaacuucuuuugcagc

SEQ ID NO: 180661 - RNA, 24 nt, Human
uggcaagccugcccugauucucug

SEQ ID NO: 180662 - RNA, 21 nt, Human
uggcaguggcccaaacaaagc

SEQ ID NO: 180663 - RNA, 22 nt, Human
uggcccaaacaaagccccucaa

SEQ ID NO: 180664 - RNA, 19 nt, Human
ugggagaagucagaauugc

SEQ ID NO: 180665 - RNA, 24 nt, Human
uggguuuggggagggaaagcagga

SEQ ID NO: 180666 - RNA, 19 nt, Human
uggugaccccaagugaugc

SEQ ID NO: 180667 - RNA, 22 nt, Human
ugucugggggaaccccaagggc

SEQ ID NO: 180668 - RNA, 21 nt, Human
ugugcacacagacuauucaca

SEQ ID NO: 180669 - RNA, 18 nt, Human
ugugugugugucccuucc

SEQ ID NO: 180670 - RNA, 22 nt, Human
ugugugugugugucccuuccuu

SEQ ID NO: 180671 - RNA, 18 nt, Human
ugugugugugugugugug

SEQ ID NO: 180672 - RNA, 18 nt, Human
ugugugugugugugugug

SEQ ID NO: 180673 - RNA, 18 nt, Human
ugugugugugugugugug

SEQ ID NO: 180674 - RNA, 18 nt, Human
ugugugugugugugugug

SEQ ID NO: 180675 - RNA, 18 nt, Human
ugugugugugugugugug

SEQ ID NO: 180676 - RNA, 18 nt, Human
ugugugugugugugugug

SEQ ID NO: 180677 - RNA, 18 nt, Human
ugugugugugugugugug

SEQ ID NO: 180678 - RNA, 18 nt, Human
ugugugugugugugugug

SEQ ID NO: 180679 - RNA, 18 nt, Human
ugugugugugugugugug

SEQ ID NO: 180680 - RNA, 21 nt, Human
ugugugugugugugugugugu

SEQ ID NO: 180681 - RNA, 21 nt, Human
ugugugugugugugugugugu

SEQ ID NO: 180682 - RNA, 21 nt, Human
ugugugugugugugugugugu

SEQ ID NO: 180683 - RNA, 21 nt, Human
ugugugugugugugugugugu

SEQ ID NO: 180684 - RNA, 21 nt, Human
ugugugugugugugugugugu

SEQ ID NO: 180685 - RNA, 21 nt, Human
ugugugugugugugugugugu

SEQ ID NO: 180686 - RNA, 21 nt, Human
ugugugugugugugugugugu

SEQ ID NO: 180687 - RNA, 21 nt, Human
ugugugugugugugugugugu

SEQ ID NO: 180688 - RNA, 21 nt, Human
ugugugugugugugugugugu

SEQ ID NO: 180689 - RNA, 21 nt, Human
ugugugugugugugugugugu

SEQ ID NO: 180690 - RNA, 21 nt, Human
ugugugugugugugugugugu

SEQ ID NO: 180691 - RNA, 21 nt, Human
ugugugugugugugugugugu

SEQ ID NO: 180692 - RNA, 22 nt, Human
ugugugugugugugugugugug

SEQ ID NO: 180693 - RNA, 22 nt, Human
ugugugugugugugugugugug

SEQ ID NO: 180694 - RNA, 22 nt, Human
ugugugugugugugugugugug

SEQ ID NO: 180695 - RNA, 22 nt, Human
ugugugugugugugugugugug

SEQ ID NO: 180696 - RNA, 23 nt, Human
uuauuugugggggaggcugcagg

SEQ ID NO: 180697 - RNA, 21 nt, Human
uuccagaaacagcugcuggca

SEQ ID NO: 180698 - RNA, 24 nt, Human
uugaguuugagucugggguugauu

SEQ ID NO: 180699 - RNA, 18 nt, Human
uuggggcuuccucaccau

SEQ ID NO: 180700 - RNA, 22 nt, Human
uuuaaaauagacuuggcagcuc

SEQ ID NO: 180701 - RNA, 21 nt, Human
aaaaccagaaagcgcuauugc

SEQ ID NO: 180702 - RNA, 20 nt, Human
accacggagagcguccagac

SEQ ID NO: 180703 - RNA, 18 nt, Human
agggaggcggggaacagg

SEQ ID NO: 180704 - RNA, 21 nt, Human
auaauccagauguuaaaggga

SEQ ID NO: 180705 - RNA, 19 nt, Human
caaaaccagaaagcgcuau

SEQ ID NO: 180706 - RNA, 18 nt, Human
caccacggagagcgucca

SEQ ID NO: 180707 - RNA, 19 nt, Human
cagcggcggcugcgaggcg

SEQ ID NO: 180708 - RNA, 21 nt, Human
ccagcgugucuguugccuccc

SEQ ID NO: 180709 - RNA, 24 nt, Human
cccacguuccccucucccagccuc

SEQ ID NO: 180710 - RNA, 23 nt, Human
cuccagcgugucuguugccuccc

SEQ ID NO: 180711 - RNA, 23 nt, Human
cucccagccucccccaaccuuuc

SEQ ID NO: 180712 - RNA, 21 nt, Human
gcggggaacaggggcgcggag

SEQ ID NO: 180713 - RNA, 23 nt, Human
ggcgcggagggagagccccaggg

SEQ ID NO: 180714 - RNA, 20 nt, Human
ggggaacaggggcgcggagg

SEQ ID NO: 180715 - RNA, 23 nt, Human
guuccccucucccagccuccccc

SEQ ID NO: 180716 - RNA, 24 nt, Human
ucagcaccacggagagcguccaga

SEQ ID NO: 180717 - RNA, 20 nt, Human
ucucucagauuccugugcua

SEQ ID NO: 180718 - RNA, 19 nt, Human
aacccagaaagacaaagcc

SEQ ID NO: 180719 - RNA, 23 nt, Human
aggcaagaaggucccagggucug

SEQ ID NO: 180720 - RNA, 21 nt, Human
caagcacaacacugaggcaag

SEQ ID NO: 180721 - RNA, 28 nt, Human
cacaacacugaggcaagaaggucccagg

SEQ ID NO: 180722 - RNA, 25 nt, Human
cagaaagacaaagccucagaacuga

SEQ ID NO: 180723 - RNA, 21 nt, Human
ccagaaagacaaagccucaga

SEQ ID NO: 180724 - RNA, 19 nt, Human
ccagaaagaugcuaggaca

SEQ ID NO: 180725 - RNA, 24 nt, Human
ccccccucccucaaucuucuccuc

SEQ ID NO: 180726 - RNA, 25 nt, Human
ccucccucaaucuucuccucuguca

SEQ ID NO: 180727 - RNA, 20 nt, Human
ccuugaaaaucaaaaagaga

SEQ ID NO: 180728 - RNA, 20 nt, Human
gaaucccccagcugcuuuuc

SEQ ID NO: 180729 - RNA, 19 nt, Human
gcacaacacugaggcaaga

SEQ ID NO: 180730 - RNA, 21 nt, Human
uacaagcacaacacugaggca

SEQ ID NO: 180731 - RNA, 22 nt, Human
uacaagcacaacacugaggcaa

SEQ ID NO: 180732 - RNA, 23 nt, Human
uacaagcacaacacugaggcaag

SEQ ID NO: 180733 - RNA, 22 nt, Human
ucaguuaacccagaaagacaaa

SEQ ID NO: 180734 - RNA, 18 nt, Human
ucccccagcugcuuuucc

SEQ ID NO: 180735 - RNA, 22 nt, Human
ugagaaaaaagaaaaagugcca

SEQ ID NO: 180736 - RNA, 22 nt, Human
ugauuccagaaagaugcuagga

SEQ ID NO: 180737 - RNA, 19 nt, Human
ugggaccaucaguuaaccc

SEQ ID NO: 180738 - RNA, 20 nt, Human
uguccagauucaaucaaaau

SEQ ID NO: 180739 - RNA, 23 nt, Human
uuaacccagaaagacaaagccuc

SEQ ID NO: 180740 - RNA, 22 nt, Human
uuggcaggaaccuaguuuccuu

SEQ ID NO: 180741 - RNA, 20 nt, Human
aaaaugagugagaugaaaug

SEQ ID NO: 180742 - RNA, 18 nt, Human
aaaucaccuggaauuaau

SEQ ID NO: 180743 - RNA, 19 nt, Human
aagaagagcagcaacagcc

SEQ ID NO: 180744 - RNA, 21 nt, Human
acacaccuauggcagagacac

SEQ ID NO: 180745 - RNA, 24 nt, Human
accugcuccaagcgccgcccgccg

SEQ ID NO: 180746 - RNA, 18 nt, Human
agaaagacagaaugaaaa

SEQ ID NO: 180747 - RNA, 25 nt, Human
agacagaaugaaaauguacaaucua

SEQ ID NO: 180748 - RNA, 26 nt, Human
agacagaaugaaaauguacaaucuaa

SEQ ID NO: 180749 - RNA, 18 nt, Human
aggaaaacuuaauauucu

SEQ ID NO: 180750 - RNA, 21 nt, Human
aggaagaagagcagcaacagc

SEQ ID NO: 180751 - RNA, 18 nt, Human
aguggagagucacagugu

SEQ ID NO: 180752 - RNA, 23 nt, Human
augaaaauguacaaucuaacccc

SEQ ID NO: 180753 - RNA, 19 nt, Human
augaaaugucugaagugcc

SEQ ID NO: 180754 - RNA, 19 nt, Human
caaggcauggggaaccaga

SEQ ID NO: 180755 - RNA, 25 nt, Human
caccuucguuccuagagauacaaag

SEQ ID NO: 180756 - RNA, 19 nt, Human
cacgauccugaaaauaguc

SEQ ID NO: 180757 - RNA, 18 nt, Human
cagcauugagcagaagug

SEQ ID NO: 180758 - RNA, 23 nt, Human
ccacacgcacacauauacacaua

SEQ ID NO: 180759 - RNA, 23 nt, Human
cccgcaguaugcggaccccuucu

SEQ ID NO: 180760 - RNA, 25 nt, Human
cgcacacauauacacauacacaccu

SEQ ID NO: 180761 - RNA, 22 nt, Human
cucagcauugagcagaagugga

SEQ ID NO: 180762 - RNA, 22 nt, Human
cuucugaauugaccauuugcau

SEQ ID NO: 180763 - RNA, 19 nt, Human
gaaaaaacaaaucaccugg

SEQ ID NO: 180764 - RNA, 21 nt, Human
gaaaauguacaaucuaacccc

SEQ ID NO: 180765 - RNA, 19 nt, Human
gaaguggagagucacagug

SEQ ID NO: 180766 - RNA, 23 nt, Human
gaauguucguucuucccugacug

SEQ ID NO: 180767 - RNA, 19 nt, Human
gcuccagcagcaaaggaag

SEQ ID NO: 180768 - RNA, 19 nt, Human
ggcagagacacuuucuucu

SEQ ID NO: 180769 - RNA, 22 nt, Human
gugaaaaaacaaaucaccugga

SEQ ID NO: 180770 - RNA, 23 nt, Human
uaacuaauuauuuucccauuuug

SEQ ID NO: 180771 - RNA, 18 nt, Human
uaagaaaaguagauugug

SEQ ID NO: 180772 - RNA, 21 nt, Human
uaauaugaaauagaauccccu

SEQ ID NO: 180773 - RNA, 22 nt, Human
uacaaaaaugagugagaugaaa

SEQ ID NO: 180774 - RNA, 22 nt, Human
uacacaccuauggcagagacac

SEQ ID NO: 180775 - RNA, 27 nt, Human
uaccacacgcacacauauacacauaca

SEQ ID NO: 180776 - RNA, 24 nt, Human
uagaauccccuaauaaauauuuua

SEQ ID NO: 180777 - RNA, 19 nt, Human
uaggugcugggcaacaguu

SEQ ID NO: 180778 - RNA, 26 nt, Human
uauacacauacacaccuauggcagag

SEQ ID NO: 180779 - RNA, 22 nt, Human
uauacacauacacaccuauggu

SEQ ID NO: 180780 - RNA, 18 nt, Human
uauauaacauauaaacac

SEQ ID NO: 180781 - RNA, 22 nt, Human
uaugcggaccccuucucagcau

SEQ ID NO: 180782 - RNA, 19 nt, Human
uauuuuauauucauuaaaa

SEQ ID NO: 180783 - RNA, 18 nt, Human
uccaaggcauggggaacc

SEQ ID NO: 180784 - RNA, 25 nt, Human
uccaaggcauggggaaccagaaaga

SEQ ID NO: 180785 - RNA, 23 nt, Human
uccccgcaguaugcggaccccuu

SEQ ID NO: 180786 - RNA, 18 nt, Human
ucccguauuuccaccuuc

SEQ ID NO: 180787 - RNA, 21 nt, Human
ucugaagugccuaggugcugg

SEQ ID NO: 180788 - RNA, 21 nt, Human
ugaaaaaacaaaucaccugga

SEQ ID NO: 180789 - RNA, 18 nt, Human
ugaaauuacaaaaaugag

SEQ ID NO: 180790 - RNA, 20 nt, Human
ugaaauuacaaaaaugagug

SEQ ID NO: 180791 - RNA, 19 nt, Human
ugaagugccuaggugcugg

SEQ ID NO: 180792 - RNA, 20 nt, Human
ugaagugccuaggugcuggg

SEQ ID NO: 180793 - RNA, 22 nt, Human
ugcauagcuaaccaaaauacaa

SEQ ID NO: 180794 - RNA, 19 nt, Human
ugcuccaagcgccgcccgc

SEQ ID NO: 180795 - RNA, 26 nt, Human
uggaauuaauaugaaauagaaucccc

SEQ ID NO: 180796 - RNA, 24 nt, Human
ugggcaacaguucucuaaagcucc

SEQ ID NO: 180797 - RNA, 25 nt, Human
uguaacuaauuauuuucccauuuug

SEQ ID NO: 180798 - RNA, 23 nt, Human
uguauaccacacgcacacauaua

SEQ ID NO: 180799 - RNA, 28 nt, Human
uguauaccacacgcacacauauacacag

SEQ ID NO: 180800 - RNA, 19 nt, Human
uuauauguacaauccucca

SEQ ID NO: 180801 - RNA, 22 nt, Human
uucuucccugacugagacccag

SEQ ID NO: 180802 - RNA, 20 nt, Human
aaaaugcaauguugcuauga

SEQ ID NO: 180803 - RNA, 21 nt, Human
aaggaguaggucacaaugaaa

SEQ ID NO: 180804 - RNA, 18 nt, Human
acaaaguuuaaacaauau

SEQ ID NO: 180805 - RNA, 20 nt, Human
acaauauguaauacaaccuu

SEQ ID NO: 180806 - RNA, 20 nt, Human
acaaucaaauggcauccaaa

SEQ ID NO: 180807 - RNA, 22 nt, Human
acagauauuacaugaucaugcu

SEQ ID NO: 180808 - RNA, 21 nt, Human
aggcgccccugcccacaaucg

SEQ ID NO: 180809 - RNA, 20 nt, Human
auuugcaguuuacacuaacu

SEQ ID NO: 180810 - RNA, 21 nt, Human
ccacaguuuuauuacaaucaa

SEQ ID NO: 180811 - RNA, 20 nt, Human
cggaggcgccccugcccaca

SEQ ID NO: 180812 - RNA, 21 nt, Human
cggaggcgccccugcccacaa

SEQ ID NO: 180813 - RNA, 23 nt, Human
gcaguuuacacuaacugaagaga

SEQ ID NO: 180814 - RNA, 19 nt, Human
uaccauagcaggauucagc

SEQ ID NO: 180815 - RNA, 22 nt, Human
uaugcuuguccuucauuuguua

SEQ ID NO: 180816 - RNA, 23 nt, Human
uauguucacuauacauauauaca

SEQ ID NO: 180817 - RNA, 22 nt, Human
ucaaauggcauccaaaaugcaa

SEQ ID NO: 180818 - RNA, 19 nt, Human
ugaaaacuugaauuucaga

SEQ ID NO: 180819 - RNA, 18 nt, Human
ugcuaugaaaauucaaaa

SEQ ID NO: 180820 - RNA, 22 nt, Human
uggaauuuuauuuuguacaaau

SEQ ID NO: 180821 - RNA, 25 nt, Human
uguaauacaaccuuuuuaaaucugu

SEQ ID NO: 180822 - RNA, 24 nt, Human
ugugauaauaccaucuaaaauuuu

SEQ ID NO: 180823 - RNA, 22 nt, Human
uguugcuaugaaaauucaaaag

SEQ ID NO: 180824 - RNA, 23 nt, Human
uuggcauuuaugaaaggaguagg

SEQ ID NO: 180825 - RNA, 21 nt, Human
uuugaaauacuacauacauua

SEQ ID NO: 180826 - RNA, 18 nt, Human
aaaagcuguuugugcccc

SEQ ID NO: 180827 - RNA, 22 nt, Human
aaacauaguugaaaaacacugg

SEQ ID NO: 180828 - RNA, 22 nt, Human
aaagaacacauucaaaauacca

SEQ ID NO: 180829 - RNA, 23 nt, Human
aaagagcucauccagaagaaaac

SEQ ID NO: 180830 - RNA, 26 nt, Human
aaagagcucauccagaagaaaaccaa

SEQ ID NO: 180831 - RNA, 19 nt, Human
aaagaggacaauugagggu

SEQ ID NO: 180832 - RNA, 23 nt, Human
aagcuguuugugcccccaaauuc

SEQ ID NO: 180833 - RNA, 22 nt, Human
acaguaagaaacgcaugccaaa

SEQ ID NO: 180834 - RNA, 25 nt, Human
agaaagaacacauucaaaauaccac

SEQ ID NO: 180835 - RNA, 24 nt, Human
agagcucauccagaagaaaaccaa

SEQ ID NO: 180836 - RNA, 21 nt, Human
agaggacaauugagggucagu

SEQ ID NO: 180837 - RNA, 18 nt, Human
aguggagagaugcaugua

SEQ ID NO: 180838 - RNA, 20 nt, Human
auaacagaguguuccgcaug

SEQ ID NO: 180839 - RNA, 24 nt, Human
auucaaaauaccacugauuucaua

SEQ ID NO: 180840 - RNA, 27 nt, Human
caaagagcucauccagaagaaaaccaa

SEQ ID NO: 180841 - RNA, 19 nt, Human
cacaguguucaggauuauc

SEQ ID NO: 180842 - RNA, 23 nt, Human
cagaagaaaaccaagauggcccg

SEQ ID NO: 180843 - RNA, 18 nt, Human
cagcaaaaugauuuuagc

SEQ ID NO: 180844 - RNA, 21 nt, Human
cagcaaaaugauuuuagcuaa

SEQ ID NO: 180845 - RNA, 23 nt, Human
caguaagaaacgcaugccaaaga

SEQ ID NO: 180846 - RNA, 22 nt, Human
cauucaaaauaccacugauuuc

SEQ ID NO: 180847 - RNA, 24 nt, Human
cauucaaaauaccacugauuucau

SEQ ID NO: 180848 - RNA, 19 nt, Human
ccagaacuugucacagucu

SEQ ID NO: 180849 - RNA, 19 nt, Human
ccucugcacuugugccucu

SEQ ID NO: 180850 - RNA, 22 nt, Human
ccucugcacuugugccucugau

SEQ ID NO: 180851 - RNA, 22 nt, Human
cugagccaaaagaggaaaaaag

SEQ ID NO: 180852 - RNA, 21 nt, Human
cugcacuugugccucugaucc

SEQ ID NO: 180853 - RNA, 20 nt, Human
gaccacagccucugcacuug

SEQ ID NO: 180854 - RNA, 21 nt, Human
gagaacaguaagaaacgcaug

SEQ ID NO: 180855 - RNA, 20 nt, Human
gcccugugauuaagagcaag

SEQ ID NO: 180856 - RNA, 25 nt, Human
ggagcucuuucacagauacacucuu

SEQ ID NO: 180857 - RNA, 23 nt, Human
ggaggacaagguggagaacacug

SEQ ID NO: 180858 - RNA, 24 nt, Human
ggaggacaagguggagaacacugg

SEQ ID NO: 180859 - RNA, 24 nt, Human
gggcaguagcagauaaccaacugu

SEQ ID NO: 180860 - RNA, 19 nt, Human
ggguccugugaccuuucac

SEQ ID NO: 180861 - RNA, 24 nt, Human
guugguccacuuuuaaauacugag

SEQ ID NO: 180862 - RNA, 24 nt, Human
uacaaacuccauaaagucaagcag

SEQ ID NO: 180863 - RNA, 25 nt, Human
uacugagccaaaagaggaaaaaagc

SEQ ID NO: 180864 - RNA, 20 nt, Human
uagaacaggcaaacuucaug

SEQ ID NO: 180865 - RNA, 18 nt, Human
uagcagauaaccaacugu

SEQ ID NO: 180866 - RNA, 25 nt, Human
ucagagcagcgauuuucaagguggg

SEQ ID NO: 180867 - RNA, 18 nt, Human
ucaucauuugcaaugcca

SEQ ID NO: 180868 - RNA, 22 nt, Human
ucuagaacaggcaaacuucaug

SEQ ID NO: 180869 - RNA, 18 nt, Human
ucuuacaauucuagaaca

SEQ ID NO: 180870 - RNA, 23 nt, Human
ugaaaaacacuggcuuagaggua

SEQ ID NO: 180871 - RNA, 23 nt, Human
ugagauguguggaggacaaggug

SEQ ID NO: 180872 - RNA, 21 nt, Human
ugaggagggacgucagcaugg

SEQ ID NO: 180873 - RNA, 23 nt, Human
ugaggagggacgucagcaugggg

SEQ ID NO: 180874 - RNA, 18 nt, Human
uggcccggucaaccuucu

SEQ ID NO: 180875 - RNA, 19 nt, Human
ugggaugggauggggugga

SEQ ID NO: 180876 - RNA, 22 nt, Human
ugggaugggguggaguugagug

SEQ ID NO: 180877 - RNA, 23 nt, Human
ugggaugggguggaguugagugg

SEQ ID NO: 180878 - RNA, 23 nt, Human
uguaguuagaaagaacacauuca

SEQ ID NO: 180879 - RNA, 22 nt, Human
uguaguuagaaagaaccggggc

SEQ ID NO: 180880 - RNA, 22 nt, Human
uuaacaaucuuacaauucuaga

SEQ ID NO: 180881 - RNA, 22 nt, Human
uucauaauacaaacuccauaaa

SEQ ID NO: 180882 - RNA, 20 nt, Human
uucugaaaaccaaagagcuc

SEQ ID NO: 180883 - RNA, 24 nt, Human
uuucauaugauuucuccaauuggg

SEQ ID NO: 180884 - RNA, 20 nt, Human
aaaaaaaaaaaauuaggaaa

SEQ ID NO: 180885 - RNA, 19 nt, Human
aaacaaaacaaaagaaauu

SEQ ID NO: 180886 - RNA, 23 nt, Human
aaacagaaucaaaguggugccuc

SEQ ID NO: 180887 - RNA, 20 nt, Human
aaacaugaccauccaaaaca

SEQ ID NO: 180888 - RNA, 18 nt, Human
aacaaaagaaauuagcac

SEQ ID NO: 180889 - RNA, 18 nt, Human
aagaagacaaagauuauu

SEQ ID NO: 180890 - RNA, 23 nt, Human
acaaaacaaaagaaauuagcaca

SEQ ID NO: 180891 - RNA, 26 nt, Human
acaaaacaaaagaaauuagcacagag

SEQ ID NO: 180892 - RNA, 27 nt, Human
acaaaacaaaagaaauuagcacagaga

SEQ ID NO: 180893 - RNA, 19 nt, Human
acaaaagaaauuagcacag

SEQ ID NO: 180894 - RNA, 20 nt, Human
accgcaauuuauuguucauu

SEQ ID NO: 180895 - RNA, 18 nt, Human
acuccaaagaagacaaag

SEQ ID NO: 180896 - RNA, 22 nt, Human
acuccaaagaagacaaagauua

SEQ ID NO: 180897 - RNA, 19 nt, Human
agaaaaaacaugaccaucc

SEQ ID NO: 180898 - RNA, 18 nt, Human
agaaucaaaguggugccu

SEQ ID NO: 180899 - RNA, 20 nt, Human
augaccauccaaaacagaau

SEQ ID NO: 180900 - RNA, 24 nt, Human
caaugcauguauuuaaaacauccu

SEQ ID NO: 180901 - RNA, 24 nt, Human
caccaccugccaaaaaaaaaaaau

SEQ ID NO: 180902 - RNA, 23 nt, Human
cauccucaaacauuuaaaagaca

SEQ ID NO: 180903 - RNA, 21 nt, Human
caugaccauccaaaacagaau

SEQ ID NO: 180904 - RNA, 23 nt, Human
cgccucuggauucuuuuagguuu

SEQ ID NO: 180905 - RNA, 25 nt, Human
cucaguggugguaauaauagccuuu

SEQ ID NO: 180906 - RNA, 21 nt, Human
gccaaaaaaaaaaaauuagga

SEQ ID NO: 180907 - RNA, 23 nt, Human
gggaaacggaggagaaaaaacau

SEQ ID NO: 180908 - RNA, 23 nt, Human
uagcacagagauguuucaccaug

SEQ ID NO: 180909 - RNA, 25 nt, Human
uaggaaacaaaacaaaagaaauuag

SEQ ID NO: 180910 - RNA, 18 nt, Human
uagguuuccaccgcaauu

SEQ ID NO: 180911 - RNA, 21 nt, Human
ucaaacauuuaaaagacauua

SEQ ID NO: 180912 - RNA, 22 nt, Human
ucccaccaccugccaaaaaaaa

SEQ ID NO: 180913 - RNA, 20 nt, Human
ugccucagauguuuccaacu

SEQ ID NO: 180914 - RNA, 23 nt, Human
uguauuuaaaacauccucaaaca

SEQ ID NO: 180915 - RNA, 21 nt, Human
uguuacacaaguuuuugugug

SEQ ID NO: 180916 - RNA, 22 nt, Human
uuaggaaacaaaacaaaagaaa

SEQ ID NO: 180917 - RNA, 19 nt, Human
uuuaaaagacauuaucggg

SEQ ID NO: 180918 - RNA, 18 nt, Human
uuuuuuagguuuccaccg

SEQ ID NO: 180919 - RNA, 20 nt, Human
uuuuuuuuuuuuagguuucc

SEQ ID NO: 180920 - RNA, 23 nt, Human
uuuuuuuuuuuuuuuuuuuuagg

SEQ ID NO: 180921 - RNA, 23 nt, Human
aaaaaaaaaaacuucuuaaagag

SEQ ID NO: 180922 - RNA, 18 nt, Human
aaacuacagagcccacca

SEQ ID NO: 180923 - RNA, 18 nt, Human
aacagcaucaaaugguca

SEQ ID NO: 180924 - RNA, 20 nt, Human
aacagcuaauccagcucugc

SEQ ID NO: 180925 - RNA, 25 nt, Human
aagaaaacuccaguaacacugaaau

SEQ ID NO: 180926 - RNA, 23 nt, Human
aagcacauaugauacuaaagcca

SEQ ID NO: 180927 - RNA, 19 nt, Human
aagcaggaaucggcacaua

SEQ ID NO: 180928 - RNA, 20 nt, Human
aaggggauauagaaaaagga

SEQ ID NO: 180929 - RNA, 26 nt, Human
aagucuugaaaaucacacuauuugcu

SEQ ID NO: 180930 - RNA, 24 nt, Human
aauaaaucauggaagaccacacaa

SEQ ID NO: 180931 - RNA, 23 nt, Human
aauaucagaacuccucacuaaca

SEQ ID NO: 180932 - RNA, 20 nt, Human
acaacagcaucaaaugguca

SEQ ID NO: 180933 - RNA, 29 nt, Human
acaauagaaaaaucacaagaaaucuggaa

SEQ ID NO: 180934 - RNA, 25 nt, Human
acacagcuucagagaaggggaacgc

SEQ ID NO: 180935 - RNA, 22 nt, Human
acauaaaaacugcauaguaugc

SEQ ID NO: 180936 - RNA, 18 nt, Human
acccuguaauaucuuugg

SEQ ID NO: 180937 - RNA, 25 nt, Human
acucagcauccuccccauggaagcu

SEQ ID NO: 180938 - RNA, 21 nt, Human
acuccaguaacacugaaauga

SEQ ID NO: 180939 - RNA, 24 nt, Human
acugaaaugacaaauguaaaauau

SEQ ID NO: 180940 - RNA, 19 nt, Human
agaaaaagaaaaaaaaagg

SEQ ID NO: 180941 - RNA, 19 nt, Human
agaaaaaggaaaauuuuuc

SEQ ID NO: 180942 - RNA, 23 nt, Human
agaaaaaggaaaauuuuucaaaa

SEQ ID NO: 180943 - RNA, 19 nt, Human
agaaaacuccaguaacacu

SEQ ID NO: 180944 - RNA, 20 nt, Human
agaaguccauuugugugcau

SEQ ID NO: 180945 - RNA, 19 nt, Human
agacaaauggcaaaguucu

SEQ ID NO: 180946 - RNA, 22 nt, Human
agacuggaagugaaaaugaaag

SEQ ID NO: 180947 - RNA, 24 nt, Human
agccaacagcaaacagcccaagca

SEQ ID NO: 180948 - RNA, 22 nt, Human
auaaagcuuuaaauuaacauga

SEQ ID NO: 180949 - RNA, 22 nt, Human
auuaccaaagaugagaccagca

SEQ ID NO: 180950 - RNA, 19 nt, Human
caaauaaaucauggaagac

SEQ ID NO: 180951 - RNA, 21 nt, Human
caaauguaaaauauacaucac

SEQ ID NO: 180952 - RNA, 22 nt, Human
caagacaaagaauuauagguca

SEQ ID NO: 180953 - RNA, 24 nt, Human
cacacaaccguaagugcauauagu

SEQ ID NO: 180954 - RNA, 28 nt, Human
caccuggaggcugcuggaguaaggugcc

SEQ ID NO: 180955 - RNA, 21 nt, Human
cacuaccagauagaaauacac

SEQ ID NO: 180956 - RNA, 21 nt, Human
cacucagcauccuccccaugg

SEQ ID NO: 180957 - RNA, 23 nt, Human
cagaaauaggaggcauuuucuga

SEQ ID NO: 180958 - RNA, 22 nt, Human
cagaacuccucacuaacaugcc

SEQ ID NO: 180959 - RNA, 24 nt, Human
cagacaacagcaucaaauggucaa

SEQ ID NO: 180960 - RNA, 20 nt, Human
cagccaacagcaaacagccc

SEQ ID NO: 180961 - RNA, 18 nt, Human
caguggcaggagccacug

SEQ ID NO: 180962 - RNA, 27 nt, Human
caucaccauaaauugaaaauucacaaa

SEQ ID NO: 180963 - RNA, 21 nt, Human
ccccaaggaggacaaaucucu

SEQ ID NO: 180964 - RNA, 18 nt, Human
cccuagaagcuaaaaaaa

SEQ ID NO: 180965 - RNA, 22 nt, Human
ccucggggaacgcggucugugg

SEQ ID NO: 180966 - RNA, 21 nt, Human
ccugaauuaccaacccaagac

SEQ ID NO: 180967 - RNA, 20 nt, Human
ccugccagacagacaacagc

SEQ ID NO: 180968 - RNA, 18 nt, Human
cgccggguccgucagcgc

SEQ ID NO: 180969 - RNA, 26 nt, Human
cuaaagccaaaacaaaaagaucuuug

SEQ ID NO: 180970 - RNA, 19 nt, Human
cuacagagcccaccaagaa

SEQ ID NO: 180971 - RNA, 20 nt, Human
cucacucagcauccucccca

SEQ ID NO: 180972 - RNA, 23 nt, Human
cucuuuuuauuauagaaaagccu

SEQ ID NO: 180973 - RNA, 19 nt, Human
cugcugcugcugcugcugc

SEQ ID NO: 180974 - RNA, 19 nt, Human
cugcugcugcugcugcugc

SEQ ID NO: 180975 - RNA, 18 nt, Human
cuuucagaauaacuuugg

SEQ ID NO: 180976 - RNA, 19 nt, Human
cuuuccaaaugaauccuga

SEQ ID NO: 180977 - RNA, 28 nt, Human
gaaaaagcacauaugauacuaaagccaa

SEQ ID NO: 180978 - RNA, 24 nt, Human
gaaaagccucaaaaucauugguaa

SEQ ID NO: 180979 - RNA, 19 nt, Human
gaggaugcuccgggcgugg

SEQ ID NO: 180980 - RNA, 20 nt, Human
gauauagaaaaaggaaaauu

SEQ ID NO: 180981 - RNA, 19 nt, Human
gccaacagcaaacagccca

SEQ ID NO: 180982 - RNA, 19 nt, Human
gcucacucagcauccuccc

SEQ ID NO: 180983 - RNA, 20 nt, Human
gcugcaguugcacaucccuu

SEQ ID NO: 180984 - RNA, 21 nt, Human
ggaaacugcucacucagcauc

SEQ ID NO: 180985 - RNA, 22 nt, Human
ggaaugauccagugguccccca

SEQ ID NO: 180986 - RNA, 20 nt, Human
ggcagcuacuuggguguggu

SEQ ID NO: 180987 - RNA, 23 nt, Human
ggccgugguuucaccaaaggagg

SEQ ID NO: 180988 - RNA, 20 nt, Human
ggcucggacucccgcagcgg

SEQ ID NO: 180989 - RNA, 18 nt, Human
gggcagcagugggguaua

SEQ ID NO: 180990 - RNA, 20 nt, Human
gggcaguggcaggagccacu

SEQ ID NO: 180991 - RNA, 19 nt, Human
gggugcugcugcugcugcu

SEQ ID NO: 180992 - RNA, 23 nt, Human
guaaaaagcaacacuaccugauu

SEQ ID NO: 180993 - RNA, 18 nt, Human
gucaacagcuaauccagc

SEQ ID NO: 180994 - RNA, 19 nt, Human
gugcugcugcugcugcugc

SEQ ID NO: 180995 - RNA, 20 nt, Human
gugcugcugcugcugcugcu

SEQ ID NO: 180996 - RNA, 21 nt, Human
gugguuccggcucggacuccc

SEQ ID NO: 180997 - RNA, 20 nt, Human
uaaaauauacaucacuacca

SEQ ID NO: 180998 - RNA, 23 nt, Human
uaaacacagcuucagagaagucc

SEQ ID NO: 180999 - RNA, 19 nt, Human
uaaagccaaaacaaaaaga

SEQ ID NO: 181000 - RNA, 28 nt, Human
uaacacugaaaugacaaauguaaaauau

SEQ ID NO: 181001 - RNA, 28 nt, Human
uaacggcacauuuaauuaaacaacaaag

SEQ ID NO: 181002 - RNA, 18 nt, Human
uaacuccuagaaaauccu

SEQ ID NO: 181003 - RNA, 22 nt, Human
uaaggugccaucaggcauguaa

SEQ ID NO: 181004 - RNA, 21 nt, Human
uacauucacacauacguuuug

SEQ ID NO: 181005 - RNA, 21 nt, Human
uacuauggaaaacauaaaaac

SEQ ID NO: 181006 - RNA, 20 nt, Human
uagaaaaagaaaaaaaaagg

SEQ ID NO: 181007 - RNA, 23 nt, Human
uagaaaaaucacaagaaaucugg

SEQ ID NO: 181008 - RNA, 19 nt, Human
uagcacagucaacagcauu

SEQ ID NO: 181009 - RNA, 24 nt, Human
uauagcauauuaccaaagaugaga

SEQ ID NO: 181010 - RNA, 20 nt, Human
uauggaaaacauaaaaacug

SEQ ID NO: 181011 - RNA, 21 nt, Human
uauggaaaacauaaaaacugc

SEQ ID NO: 181012 - RNA, 23 nt, Human
uauuaccaaagaugagaccagca

SEQ ID NO: 181013 - RNA, 19 nt, Human
ucaugaagcuagggugaga

SEQ ID NO: 181014 - RNA, 22 nt, Human
uccacaauuaaauagguaagug

SEQ ID NO: 181015 - RNA, 22 nt, Human
uccauuugugugcaugugugug

SEQ ID NO: 181016 - RNA, 21 nt, Human
ucccaaagagaucagauuugu

SEQ ID NO: 181017 - RNA, 21 nt, Human
uccggcucggacucccgcagc

SEQ ID NO: 181018 - RNA, 23 nt, Human
uccucggggaacgcggucugugg

SEQ ID NO: 181019 - RNA, 24 nt, Human
uccugaauuaccaacccaagacaa

SEQ ID NO: 181020 - RNA, 18 nt, Human
ugaaaaaagaugaaaacu

SEQ ID NO: 181021 - RNA, 18 nt, Human
ugaaagcaccuggaggcu

SEQ ID NO: 181022 - RNA, 18 nt, Human
ugaaaugacaaauguaaa

SEQ ID NO: 181023 - RNA, 21 nt, Human
ugaauccugaauuaccaaccc

SEQ ID NO: 181024 - RNA, 18 nt, Human
ugcaugugugugugugcu

SEQ ID NO: 181025 - RNA, 25 nt, Human
ugccagaaauaggaggcauuuucug

SEQ ID NO: 181026 - RNA, 24 nt, Human
ugcgggugcugcugcugcugcugc

SEQ ID NO: 181027 - RNA, 20 nt, Human
ugcuccgggcgugggcggcc

SEQ ID NO: 181028 - RNA, 21 nt, Human
ugcugcugcugcugcugcugc

SEQ ID NO: 181029 - RNA, 21 nt, Human
ugcugcugcugcugcugcugc

SEQ ID NO: 181030 - RNA, 21 nt, Human
ugcugcugcugcugcugcugc

SEQ ID NO: 181031 - RNA, 21 nt, Human
ugcugcugcugcugcugcugc

SEQ ID NO: 181032 - RNA, 21 nt, Human
ugcugcugcugcugcugcugc

SEQ ID NO: 181033 - RNA, 21 nt, Human
ugcugcugcugcugcugcugc

SEQ ID NO: 181034 - RNA, 21 nt, Human
ugcugcugcugcugcugcugc

SEQ ID NO: 181035 - RNA, 18 nt, Human
ugcuucuaaaggcaaccu

SEQ ID NO: 181036 - RNA, 19 nt, Human
uggaaaacauaaaaacugc

SEQ ID NO: 181037 - RNA, 22 nt, Human
uggcaggagccacuggcuuaga

SEQ ID NO: 181038 - RNA, 23 nt, Human
ugggaacagcuucgggccuggug

SEQ ID NO: 181039 - RNA, 22 nt, Human
uggugcagcuaaggaacauugg

SEQ ID NO: 181040 - RNA, 20 nt, Human
ugucgggcagcaguggggua

SEQ ID NO: 181041 - RNA, 20 nt, Human
ugugcaugugugugugugcu

SEQ ID NO: 181042 - RNA, 19 nt, Human
ugugugcaugugugugugu

SEQ ID NO: 181043 - RNA, 19 nt, Human
ugugugcaugugugugugu

SEQ ID NO: 181044 - RNA, 20 nt, Human
ugugugcaugugugugugug

SEQ ID NO: 181045 - RNA, 24 nt, Human
uuauggagggagauuguuuuauuu

SEQ ID NO: 181046 - RNA, 20 nt, Human
uucaacugucuuguuucauu

SEQ ID NO: 181047 - RNA, 18 nt, Human
uucagagaaguccauuug

SEQ ID NO: 181048 - RNA, 22 nt, Human
uucauguacuugagcucauuuc

SEQ ID NO: 181049 - RNA, 24 nt, Human
uuugugugcaugugugugugugcu

SEQ ID NO: 181050 - RNA, 18 nt, Human
aaaaaaucguuauacaca

SEQ ID NO: 181051 - RNA, 20 nt, Human
aaaagaaaaauuagucaggg

SEQ ID NO: 181052 - RNA, 19 nt, Human
aaagaaaaauuagucaggg

SEQ ID NO: 181053 - RNA, 19 nt, Human
aacccgguggccccauccc

SEQ ID NO: 181054 - RNA, 19 nt, Human
acacagcacuuugccccuc

SEQ ID NO: 181055 - RNA, 24 nt, Human
acagacaagacaggcacccggagc

SEQ ID NO: 181056 - RNA, 23 nt, Human
acagcccccucccuaaauccacg

SEQ ID NO: 181057 - RNA, 21 nt, Human
acaucacagcccccucccuaa

SEQ ID NO: 181058 - RNA, 21 nt, Human
acccugccagcucccagcacc

SEQ ID NO: 181059 - RNA, 21 nt, Human
agaaaaaaauuuuaaaaaaga

SEQ ID NO: 181060 - RNA, 21 nt, Human
agaaacaggaacugacacagc

SEQ ID NO: 181061 - RNA, 18 nt, Human
agaggggcagagugugcc

SEQ ID NO: 181062 - RNA, 24 nt, Human
agcacuuugggaggcugagguagg

SEQ ID NO: 181063 - RNA, 19 nt, Human
agccugggcaacgcaguga

SEQ ID NO: 181064 - RNA, 21 nt, Human
aggaaagagcugagguuagca

SEQ ID NO: 181065 - RNA, 21 nt, Human
aggcaagaaaaaccgucaggg

SEQ ID NO: 181066 - RNA, 19 nt, Human
aggcacccggagcguuggc

SEQ ID NO: 181067 - RNA, 19 nt, Human
aggcugagguaggaggaug

SEQ ID NO: 181068 - RNA, 22 nt, Human
aggcugaggugagaggaucacu

SEQ ID NO: 181069 - RNA, 24 nt, Human
agggaagacuagcuggggagaggu

SEQ ID NO: 181070 - RNA, 22 nt, Human
agguaggaggauggauggcuug

SEQ ID NO: 181071 - RNA, 25 nt, Human
aggugggaaggaaagagcugagguu

SEQ ID NO: 181072 - RNA, 23 nt, Human
agucagggguggcagcaugugcc

SEQ ID NO: 181073 - RNA, 20 nt, Human
auccccggcucgagucccca

SEQ ID NO: 181074 - RNA, 18 nt, Human
caagaaaaaccgucaggg

SEQ ID NO: 181075 - RNA, 19 nt, Human
caagaaagaacauucccuc

SEQ ID NO: 181076 - RNA, 22 nt, Human
caagaaagaacauucccuccug

SEQ ID NO: 181077 - RNA, 19 nt, Human
caagacaggcacccggagc

SEQ ID NO: 181078 - RNA, 20 nt, Human
cacacagacaagacaggcac

SEQ ID NO: 181079 - RNA, 20 nt, Human
cacagcugccgcaaagaaug

SEQ ID NO: 181080 - RNA, 25 nt, Human
cacccggagcguuggcaucaacccg

SEQ ID NO: 181081 - RNA, 27 nt, Human
cacccuccaccaucugagaagccacac

SEQ ID NO: 181082 - RNA, 20 nt, Human
cacgcccaccccccagcaac

SEQ ID NO: 181083 - RNA, 21 nt, Human
cacgcugggaggcuggcuccc

SEQ ID NO: 181084 - RNA, 24 nt, Human
cacgcuuguaaucucagcacuuug

SEQ ID NO: 181085 - RNA, 25 nt, Human
cacuugugcacacacacacacacag

SEQ ID NO: 181086 - RNA, 25 nt, Human
cagcacccuccaccaucugagaagg

SEQ ID NO: 181087 - RNA, 24 nt, Human
cagcacuuugggaggcugagguag

SEQ ID NO: 181088 - RNA, 24 nt, Human
cagcacuuugggaggcugagguag

SEQ ID NO: 181089 - RNA, 24 nt, Human
cagcaugugccuguggucuuagcu

SEQ ID NO: 181090 - RNA, 22 nt, Human
cagcucccagcacccuccacca

SEQ ID NO: 181091 - RNA, 19 nt, Human
cagcugaagcaggcggcag

SEQ ID NO: 181092 - RNA, 21 nt, Human
caggaggcugagggcggacac

SEQ ID NO: 181093 - RNA, 20 nt, Human
caggaguuugaggcugcaga

SEQ ID NO: 181094 - RNA, 26 nt, Human
cagggcagccacguucaaccccuugg

SEQ ID NO: 181095 - RNA, 21 nt, Human
caucacagcccccucccuaaa

SEQ ID NO: 181096 - RNA, 27 nt, Human
ccacacagacaagacaggcacccggag

SEQ ID NO: 181097 - RNA, 23 nt, Human
cccagcaacccagcugaagcagg

SEQ ID NO: 181098 - RNA, 25 nt, Human
cccagcacccuccaccaucugagaa

SEQ ID NO: 181099 - RNA, 24 nt, Human
cccaggaguuugaggcugcagagu

SEQ ID NO: 181100 - RNA, 18 nt, Human
cccaucccuggcaaacac

SEQ ID NO: 181101 - RNA, 20 nt, Human
cccccggacagaggggcaga

SEQ ID NO: 181102 - RNA, 20 nt, Human
cccuaaauccacgcccaccc

SEQ ID NO: 181103 - RNA, 22 nt, Human
ccuaaauccacgcccacccccc

SEQ ID NO: 181104 - RNA, 20 nt, Human
ccugccagcucccagcaccc

SEQ ID NO: 181105 - RNA, 22 nt, Human
ccuguggucuuagcuacuuggg

SEQ ID NO: 181106 - RNA, 22 nt, Human
cgcagugagaaaaaaauuuuaa

SEQ ID NO: 181107 - RNA, 18 nt, Human
cgcccaccccccagcaac

SEQ ID NO: 181108 - RNA, 21 nt, Human
cgcccaccccccagcaaccca

SEQ ID NO: 181109 - RNA, 21 nt, Human
cgcccaccccccagcaacccc

SEQ ID NO: 181110 - RNA, 20 nt, Human
cggcucgaguccccaggagg

SEQ ID NO: 181111 - RNA, 24 nt, Human
cgggaggaggggacggggaagggg

SEQ ID NO: 181112 - RNA, 21 nt, Human
cucccagcacccuccaccauc

SEQ ID NO: 181113 - RNA, 18 nt, Human
cucccccacccccucucc

SEQ ID NO: 181114 - RNA, 22 nt, Human
gacggggaaggggaggcggccc

SEQ ID NO: 181115 - RNA, 22 nt, Human
gagaaaaaaauuuuaaaaaaga

SEQ ID NO: 181116 - RNA, 22 nt, Human
gaggaggggacggggaagggga

SEQ ID NO: 181117 - RNA, 19 nt, Human
gagguaggaggauggaugg

SEQ ID NO: 181118 - RNA, 24 nt, Human
gaucacuggagcccaggaguuuga

SEQ ID NO: 181119 - RNA, 25 nt, Human
gaucacuggagcccaggaguuugag

SEQ ID NO: 181120 - RNA, 21 nt, Human
gcacccuccaccaucugagaa

SEQ ID NO: 181121 - RNA, 23 nt, Human
ggaagaccccaguuucuuguuuu

SEQ ID NO: 181122 - RNA, 21 nt, Human
ggagaggaagaccccaguuuc

SEQ ID NO: 181123 - RNA, 23 nt, Human
ggaggcugaggugagaggaucac

SEQ ID NO: 181124 - RNA, 18 nt, Human
ggaguuugaggcugcaga

SEQ ID NO: 181125 - RNA, 19 nt, Human
ggcggacacccgacugucc

SEQ ID NO: 181126 - RNA, 24 nt, Human
gggaagaaacaggaacugacacag

SEQ ID NO: 181127 - RNA, 23 nt, Human
gggaaggaaagagcugagguuag

SEQ ID NO: 181128 - RNA, 25 nt, Human
gggcaacgcagugagaaaaaaauuu

SEQ ID NO: 181129 - RNA, 26 nt, Human
gggcacagcacgcugggaggcuggcc

SEQ ID NO: 181130 - RNA, 18 nt, Human
ggggacggggaaggggag

SEQ ID NO: 181131 - RNA, 25 nt, Human
ggggagagguucgggggagaggaag

SEQ ID NO: 181132 - RNA, 30 nt, Human
ggugacagggcagccacguucaagaaagaa

SEQ ID NO: 181133 - RNA, 24 nt, Human
ggugguucacgcuuguaaucucag

SEQ ID NO: 181134 - RNA, 19 nt, Human
uacaguacuaguuuugucu

SEQ ID NO: 181135 - RNA, 19 nt, Human
uacuaguuuugucuccgag

SEQ ID NO: 181136 - RNA, 23 nt, Human
uagucagggguggcagcaugugc

SEQ ID NO: 181137 - RNA, 21 nt, Human
ucacagcccccucccuaaauc

SEQ ID NO: 181138 - RNA, 23 nt, Human
ucacgcuuguaaucucagcacuu

SEQ ID NO: 181139 - RNA, 23 nt, Human
ucacuggagcccaggaguuugag

SEQ ID NO: 181140 - RNA, 26 nt, Human
ucacuggagcccaggaguuugaggcu

SEQ ID NO: 181141 - RNA, 24 nt, Human
ucagggguggcagcaugugccugu

SEQ ID NO: 181142 - RNA, 25 nt, Human
uccacgcccaccccccagcaaccca

SEQ ID NO: 181143 - RNA, 22 nt, Human
uccccaggaggcugagggcgga

SEQ ID NO: 181144 - RNA, 22 nt, Human
ucgggaggaggggacggggaag

SEQ ID NO: 181145 - RNA, 20 nt, Human
ugacacagcacuuugccccu

SEQ ID NO: 181146 - RNA, 21 nt, Human
ugacacagcacuuugccccuc

SEQ ID NO: 181147 - RNA, 25 nt, Human
ugacagggcagccacguucaagaaa

SEQ ID NO: 181148 - RNA, 21 nt, Human
ugacucaaauaacuuaggcaa

SEQ ID NO: 181149 - RNA, 19 nt, Human
ugagaagccacacagacaa

SEQ ID NO: 181150 - RNA, 20 nt, Human
ugagggcggacacccgacug

SEQ ID NO: 181151 - RNA, 19 nt, Human
ugagguaggaggauggaug

SEQ ID NO: 181152 - RNA, 21 nt, Human
ugagguaggaggauggauggc

SEQ ID NO: 181153 - RNA, 20 nt, Human
ugaggugagaggaucacugg

SEQ ID NO: 181154 - RNA, 24 nt, Human
ugaggugagaggaucacuggagcc

SEQ ID NO: 181155 - RNA, 21 nt, Human
ugagguuagcaaggggcuacg

SEQ ID NO: 181156 - RNA, 19 nt, Human
ugcugaggugacagggcag

SEQ ID NO: 181157 - RNA, 19 nt, Human
uggcaaacacaugcgcgug

SEQ ID NO: 181158 - RNA, 19 nt, Human
uggcagcaugugccugugg

SEQ ID NO: 181159 - RNA, 24 nt, Human
uggcagcaugugccuguggucuua

SEQ ID NO: 181160 - RNA, 21 nt, Human
uggcucccccacccccucucc

SEQ ID NO: 181161 - RNA, 21 nt, Human
ugggaaggaaagagcugaggu

SEQ ID NO: 181162 - RNA, 19 nt, Human
ugggaggcugagguaggag

SEQ ID NO: 181163 - RNA, 19 nt, Human
ugggaggcugagguaggag

SEQ ID NO: 181164 - RNA, 22 nt, Human
ugggaggcugagguaggaggau

SEQ ID NO: 181165 - RNA, 19 nt, Human
ugggaggcugaggugagag

SEQ ID NO: 181166 - RNA, 24 nt, Human
ugggaggcugaggugagaggauca

SEQ ID NO: 181167 - RNA, 19 nt, Human
uggggagagguucggggga

SEQ ID NO: 181168 - RNA, 21 nt, Human
ugucuggaaggacccugccag

SEQ ID NO: 181169 - RNA, 26 nt, Human
ugugcacacacacacacacaggucac

SEQ ID NO: 181170 - RNA, 19 nt, Human
ugugcacacacacacacag

SEQ ID NO: 181171 - RNA, 24 nt, Human
ugugccaggaaaugggaagaaaca

SEQ ID NO: 181172 - RNA, 27 nt, Human
ugugccaggaaaugggaagaaacagga

SEQ ID NO: 181173 - RNA, 22 nt, Human
uucaagaaagaacauucccucc

SEQ ID NO: 181174 - RNA, 25 nt, Human
uucgggaggaggggacggggaaggg

SEQ ID NO: 181175 - RNA, 22 nt, Human
uugagccaaagaguuugagacc

SEQ ID NO: 181176 - RNA, 18 nt, Human
uugggaggcugaggugag

SEQ ID NO: 181177 - RNA, 25 nt, Human
uugggaggcugaggugagaggauca

SEQ ID NO: 181178 - RNA, 23 nt, Human
uugugacucaaauaacuuaggca

SEQ ID NO: 181179 - RNA, 20 nt, Human
uuuguuugacagccuguugg

SEQ ID NO: 181180 - RNA, 24 nt, Human
cuugucaaaaaaaaaaaaaaaaaa

SEQ ID NO: 181181 - RNA, 21 nt, Human
ucaaaaaaaaaaaaaaaaaaa

SEQ ID NO: 181182 - RNA, 22 nt, Human
ugucaaaaaaaaaaaaaaaaaa

SEQ ID NO: 181183 - RNA, 25 nt, Human
ugucaaaaaaaaaaaaaaaaaaacu

SEQ ID NO: 181184 - RNA, 24 nt, Human
uuuuuuuuuuuuuuuuuuuuucag

SEQ ID NO: 181185 - RNA, 18 nt, Human
aaaaaaaaaaaaaaaagc

SEQ ID NO: 181186 - RNA, 22 nt, Human
aaaaaaaaaagcugacucuuac

SEQ ID NO: 181187 - RNA, 20 nt, Human
aaaaaaaaagcugacucuua

SEQ ID NO: 181188 - RNA, 24 nt, Human
aaaagagaacaauuaguuaacaug

SEQ ID NO: 181189 - RNA, 24 nt, Human
aaaaggcccuggccaaauaacucc

SEQ ID NO: 181190 - RNA, 25 nt, Human
aaaauaccaaaauggcucucuggug

SEQ ID NO: 181191 - RNA, 18 nt, Human
aaguuacaugugaagagg

SEQ ID NO: 181192 - RNA, 22 nt, Human
agaaguuacaugugaagaggau

SEQ ID NO: 181193 - RNA, 21 nt, Human
agcaacugacugcucuugacu

SEQ ID NO: 181194 - RNA, 25 nt, Human
agccacagagcaaggcugcacagcc

SEQ ID NO: 181195 - RNA, 25 nt, Human
agccagacuccaaacagggagccca

SEQ ID NO: 181196 - RNA, 21 nt, Human
agccagccagacuccaaacag

SEQ ID NO: 181197 - RNA, 18 nt, Human
aggaggcuuuuuauuuaa

SEQ ID NO: 181198 - RNA, 18 nt, Human
aggauagugaggaaguca

SEQ ID NO: 181199 - RNA, 21 nt, Human
augaaacacucaacccaagga

SEQ ID NO: 181200 - RNA, 24 nt, Human
augcaguuacaaaguaguuagaaa

SEQ ID NO: 181201 - RNA, 28 nt, Human
caaaauaccaaaauggcucucuggugua

SEQ ID NO: 181202 - RNA, 24 nt, Human
caaauucugacaguuuuaaugaaa

SEQ ID NO: 181203 - RNA, 24 nt, Human
cacaccuacuucuuaaauguguua

SEQ ID NO: 181204 - RNA, 24 nt, Human
cagcauguacuuauucuauucuaa

SEQ ID NO: 181205 - RNA, 24 nt, Human
ccaaauaacucccaaaugaaacac

SEQ ID NO: 181206 - RNA, 19 nt, Human
ccaaaugaaacacucaacc

SEQ ID NO: 181207 - RNA, 23 nt, Human
ccacagagcaaggcugcacagcc

SEQ ID NO: 181208 - RNA, 19 nt, Human
ccaccuucugaaaaggcca

SEQ ID NO: 181209 - RNA, 18 nt, Human
ccagaaaaaauaagcaag

SEQ ID NO: 181210 - RNA, 18 nt, Human
cugacucuuacacauaua

SEQ ID NO: 181211 - RNA, 22 nt, Human
cuguuccuccccagcacuagca

SEQ ID NO: 181212 - RNA, 18 nt, Human
cuugacuguuccucccca

SEQ ID NO: 181213 - RNA, 19 nt, Human
gcagaaugcaaagccucua

SEQ ID NO: 181214 - RNA, 24 nt, Human
ggccauuggcaaugcucagagcca

SEQ ID NO: 181215 - RNA, 22 nt, Human
guuaaaaaaaaaaaaaaaagcu

SEQ ID NO: 181216 - RNA, 22 nt, Human
uaaaaaaaaaaaaaaaagcuga

SEQ ID NO: 181217 - RNA, 23 nt, Human
uaaacagaaacagguuuuauauu

SEQ ID NO: 181218 - RNA, 25 nt, Human
uagaguuaaaaaaaaaaaaaaaagc

SEQ ID NO: 181219 - RNA, 18 nt, Human
ucauaaacagaaacaggu

SEQ ID NO: 181220 - RNA, 22 nt, Human
uccaccauuuugcagguaugaa

SEQ ID NO: 181221 - RNA, 22 nt, Human
ucccaaaugaaacacucaaccc

SEQ ID NO: 181222 - RNA, 28 nt, Human
ucugguguaggugauuucuucuucaaag

SEQ ID NO: 181223 - RNA, 21 nt, Human
ugaagaggauagugaggaagu

SEQ ID NO: 181224 - RNA, 22 nt, Human
ugacuuguugagaaugguaucc

SEQ ID NO: 181225 - RNA, 18 nt, Human
ugaguaggggccauuggc

SEQ ID NO: 181226 - RNA, 19 nt, Human
ugaguaggggccauuggca

SEQ ID NO: 181227 - RNA, 23 nt, Human
ugaguaggggccauuggcaaugc

SEQ ID NO: 181228 - RNA, 21 nt, Human
ugcaaagccucuaaaaggaga

SEQ ID NO: 181229 - RNA, 21 nt, Human
ugcagaaugcaaagccucuaa

SEQ ID NO: 181230 - RNA, 19 nt, Human
uggcaaugcucagagccag

SEQ ID NO: 181231 - RNA, 19 nt, Human
ugggaaaagccacagagca

SEQ ID NO: 181232 - RNA, 21 nt, Human
ugggaaaagccacagagcaag

SEQ ID NO: 181233 - RNA, 24 nt, Human
uguguugggaaaagccacagagca

SEQ ID NO: 181234 - RNA, 24 nt, Human
uguuaagugauuaaaggcaauuuu

SEQ ID NO: 181235 - RNA, 19 nt, Human
uuaaauguguuaaaguuac

SEQ ID NO: 181236 - RNA, 22 nt, Human
uuaaugagucaggagagaaagg

SEQ ID NO: 181237 - RNA, 18 nt, Human
uuacagcagcauguacuu

SEQ ID NO: 181238 - RNA, 22 nt, Human
uuacagugugucccagacucau

SEQ ID NO: 181239 - RNA, 21 nt, Human
uuagaaauuucugaagggugu

SEQ ID NO: 181240 - RNA, 24 nt, Human
uuagaguuaaaaaaaaaaaaaaaa

SEQ ID NO: 181241 - RNA, 18 nt, Human
uucacuguuugagucaag

SEQ ID NO: 181242 - RNA, 19 nt, Human
uucugaaggguguuagagu

SEQ ID NO: 181243 - RNA, 20 nt, Human
uugacuguuccuccccagca

SEQ ID NO: 181244 - RNA, 22 nt, Human
uugaggaccaugccaccuucug

SEQ ID NO: 181245 - RNA, 23 nt, Human
aaaaaaacgaccuugauauucca

SEQ ID NO: 181246 - RNA, 23 nt, Human
aaaauaaccccaauacccccucu

SEQ ID NO: 181247 - RNA, 20 nt, Human
aacacacauaauccacaaaa

SEQ ID NO: 181248 - RNA, 24 nt, Human
aaccacagcuggccugccacagcc

SEQ ID NO: 181249 - RNA, 22 nt, Human
aaccacuucccuugcucucuac

SEQ ID NO: 181250 - RNA, 22 nt, Human
aaccccaauacccccucuguca

SEQ ID NO: 181251 - RNA, 20 nt, Human
aacuugaccccucuauccca

SEQ ID NO: 181252 - RNA, 22 nt, Human
aagaaaaguuuccaccacgagg

SEQ ID NO: 181253 - RNA, 20 nt, Human
aagagcagagguaggagaca

SEQ ID NO: 181254 - RNA, 24 nt, Human
aagcaaacaagcaauucuguaaaa

SEQ ID NO: 181255 - RNA, 24 nt, Human
aagcaagauuaacugggcacaugg

SEQ ID NO: 181256 - RNA, 22 nt, Human
acaagcaagagaccaaagccau

SEQ ID NO: 181257 - RNA, 19 nt, Human
acauaauccacaaaaccau

SEQ ID NO: 181258 - RNA, 19 nt, Human
accaucuaagaaccacuuc

SEQ ID NO: 181259 - RNA, 21 nt, Human
acccaaaagggucuugagggc

SEQ ID NO: 181260 - RNA, 21 nt, Human
accccucuaucccagccaaac

SEQ ID NO: 181261 - RNA, 20 nt, Human
agaaaaccacagcuggccug

SEQ ID NO: 181262 - RNA, 24 nt, Human
agaaacccaaaagggucuugaggg

SEQ ID NO: 181263 - RNA, 24 nt, Human
agcaaaacacacauaauccacaaa

SEQ ID NO: 181264 - RNA, 23 nt, Human
aggagacaguugaagcaaacaag

SEQ ID NO: 181265 - RNA, 23 nt, Human
aggcagguugguggguuaagguc

SEQ ID NO: 181266 - RNA, 18 nt, Human
aguaagaaccuuuucuuc

SEQ ID NO: 181267 - RNA, 23 nt, Human
aguggcguucgcgccucuccucu

SEQ ID NO: 181268 - RNA, 23 nt, Human
caaaacacacauaauccacaaaa

SEQ ID NO: 181269 - RNA, 21 nt, Human
caacacaagaaccagaaaaug

SEQ ID NO: 181270 - RNA, 18 nt, Human
caagagcagagguaggag

SEQ ID NO: 181271 - RNA, 23 nt, Human
caagagcagagguaggagacagu

SEQ ID NO: 181272 - RNA, 22 nt, Human
cacccuccuccccacuaaugca

SEQ ID NO: 181273 - RNA, 18 nt, Human
caccggagcuuucuggga

SEQ ID NO: 181274 - RNA, 24 nt, Human
cacuaaaaagcuucagugauaggg

SEQ ID NO: 181275 - RNA, 22 nt, Human
cagaaaauaaccccaauacccc

SEQ ID NO: 181276 - RNA, 22 nt, Human
cagccaacucuuaucucuaaac

SEQ ID NO: 181277 - RNA, 21 nt, Human
cagugauagggaaaaaaagga

SEQ ID NO: 181278 - RNA, 20 nt, Human
ccaaacaaagaaagcaagau

SEQ ID NO: 181279 - RNA, 18 nt, Human
ccaacacaagaaccagaa

SEQ ID NO: 181280 - RNA, 21 nt, Human
ccaagccaggcuagucccaca

SEQ ID NO: 181281 - RNA, 22 nt, Human
ccacaagcaagagaccaaagcc

SEQ ID NO: 181282 - RNA, 23 nt, Human
ccacagcuggccugccacagcca

SEQ ID NO: 181283 - RNA, 21 nt, Human
ccagccaaacaaagaaagcaa

SEQ ID NO: 181284 - RNA, 23 nt, Human
ccaucuaagaaccacuucccuug

SEQ ID NO: 181285 - RNA, 26 nt, Human
cccaaccccuaccuucucuccuaauu

SEQ ID NO: 181286 - RNA, 23 nt, Human
cccacaagcaagagaccaaagcc

SEQ ID NO: 181287 - RNA, 19 nt, Human
ccccaauacccccucuguc

SEQ ID NO: 181288 - RNA, 19 nt, Human
ccccacccuccuccccacu

SEQ ID NO: 181289 - RNA, 19 nt, Human
ccccuaccuucucuccuaa

SEQ ID NO: 181290 - RNA, 19 nt, Human
ccgaagcagcuggagcgcg

SEQ ID NO: 181291 - RNA, 19 nt, Human
ccuccaagagcagagguug

SEQ ID NO: 181292 - RNA, 19 nt, Human
ccucuuucucagacucuag

SEQ ID NO: 181293 - RNA, 19 nt, Human
ccuggaagaagaguccccc

SEQ ID NO: 181294 - RNA, 21 nt, Human
cgaacaggcagguuggugggu

SEQ ID NO: 181295 - RNA, 25 nt, Human
cggcccgggggguguccgaacaggg

SEQ ID NO: 181296 - RNA, 20 nt, Human
cgucaggucuuccccuuuca

SEQ ID NO: 181297 - RNA, 21 nt, Human
cuaagaaccacuucccuugcu

SEQ ID NO: 181298 - RNA, 20 nt, Human
cuccuaauucccacuuuuaa

SEQ ID NO: 181299 - RNA, 28 nt, Human
cucgagaucucuccccggagggcucuuc

SEQ ID NO: 181300 - RNA, 23 nt, Human
cucgagaucucuccccggaguuc

SEQ ID NO: 181301 - RNA, 18 nt, Human
cugcaaacgugcucuguc

SEQ ID NO: 181302 - RNA, 19 nt, Human
cugccacagccaacacaag

SEQ ID NO: 181303 - RNA, 21 nt, Human
cugccacagccaacacaagaa

SEQ ID NO: 181304 - RNA, 23 nt, Human
cuucauaauuuucauucguugcu

SEQ ID NO: 181305 - RNA, 19 nt, Human
gaagguguucccagccaca

SEQ ID NO: 181306 - RNA, 18 nt, Human
gaccaagcaguaagaacc

SEQ ID NO: 181307 - RNA, 22 nt, Human
gagcuuucugggagagggcgau

SEQ ID NO: 181308 - RNA, 22 nt, Human
gauucccaaccccuaccuucuc

SEQ ID NO: 181309 - RNA, 26 nt, Human
gcaccggagcuuucugggagagggcg

SEQ ID NO: 181310 - RNA, 19 nt, Human
gccacggagaucaagugac

SEQ ID NO: 181311 - RNA, 21 nt, Human
gcccuguccccaucuccucca

SEQ ID NO: 181312 - RNA, 18 nt, Human
gcuagucccacaagcaag

SEQ ID NO: 181313 - RNA, 20 nt, Human
gcuggagcgcgacccggagg

SEQ ID NO: 181314 - RNA, 22 nt, Human
ggagaggaggccgcaguacugc

SEQ ID NO: 181315 - RNA, 19 nt, Human
gggacagacagcggccggc

SEQ ID NO: 181316 - RNA, 24 nt, Human
gggcaguuacacaguuuguuuaca

SEQ ID NO: 181317 - RNA, 21 nt, Human
gggcauuuagucccaagccag

SEQ ID NO: 181318 - RNA, 22 nt, Human
gggggguguccgaacaggcagg

SEQ ID NO: 181319 - RNA, 20 nt, Human
ggggguguccgaacaggcag

SEQ ID NO: 181320 - RNA, 21 nt, Human
guaagaaccuuuucuucuuuc

SEQ ID NO: 181321 - RNA, 19 nt, Human
guggcguucgcgccucucc

SEQ ID NO: 181322 - RNA, 19 nt, Human
guuaggagaggagaggagg

SEQ ID NO: 181323 - RNA, 24 nt, Human
uaacaugcucaaguugaacagcca

SEQ ID NO: 181324 - RNA, 23 nt, Human
uaacuuuuuaagaaaaguuucca

SEQ ID NO: 181325 - RNA, 19 nt, Human
uaagaaaaguuuccaccac

SEQ ID NO: 181326 - RNA, 21 nt, Human
uaaggucuuaaucuugacucg

SEQ ID NO: 181327 - RNA, 22 nt, Human
uacaaaauuacaaguguuuuga

SEQ ID NO: 181328 - RNA, 22 nt, Human
uacacaguuuguuuacaaugag

SEQ ID NO: 181329 - RNA, 18 nt, Human
uaggaggggcucaacagc

SEQ ID NO: 181330 - RNA, 21 nt, Human
ucagcagucuuaacaaagaca

SEQ ID NO: 181331 - RNA, 23 nt, Human
ucaguaacaugcucaaguugaac

SEQ ID NO: 181332 - RNA, 20 nt, Human
ucccaagccaggcuaguccc

SEQ ID NO: 181333 - RNA, 20 nt, Human
ucccagaucaccaucuaaga

SEQ ID NO: 181334 - RNA, 22 nt, Human
ucccagccacagaaagucaagc

SEQ ID NO: 181335 - RNA, 20 nt, Human
uccccacccuccuccccacu

SEQ ID NO: 181336 - RNA, 21 nt, Human
ucccuugcucucuacucaaaa

SEQ ID NO: 181337 - RNA, 26 nt, Human
ucuacucaaaaugagaugcuuuauuu

SEQ ID NO: 181338 - RNA, 19 nt, Human
ucuccagagggugggcagg

SEQ ID NO: 181339 - RNA, 18 nt, Human
ucuccccacccuccuccc

SEQ ID NO: 181340 - RNA, 19 nt, Human
ucuccccacccuccucccc

SEQ ID NO: 181341 - RNA, 20 nt, Human
ucuccccacccuccucccca

SEQ ID NO: 181342 - RNA, 19 nt, Human
ugacucgagaucucucccc

SEQ ID NO: 181343 - RNA, 26 nt, Human
ugaguuacaaucgggacaacugggag

SEQ ID NO: 181344 - RNA, 18 nt, Human
ugauagggaaaaaaagga

SEQ ID NO: 181345 - RNA, 23 nt, Human
ugauucccaaccccuaccuucuc

SEQ ID NO: 181346 - RNA, 20 nt, Human
uggaagaagagucccccuuc

SEQ ID NO: 181347 - RNA, 20 nt, Human
ugggagagggggaagaguug

SEQ ID NO: 181348 - RNA, 23 nt, Human
ugggcagggcagaaacccaaaag

SEQ ID NO: 181349 - RNA, 21 nt, Human
ugucuccccacccuccucccc

SEQ ID NO: 181350 - RNA, 23 nt, Human
uucagcuaccuggaagaagaguc

SEQ ID NO: 181351 - RNA, 21 nt, Human
uuuauuucuaauccgacuauu

SEQ ID NO: 181352 - RNA, 24 nt, Human
uuucagcuaccuggaagaagaguc

SEQ ID NO: 181353 - RNA, 19 nt, Human
uuuuauguuaggcugauuu

SEQ ID NO: 181354 - RNA, 23 nt, Human
uuuuuuuuuuuuuuuauguuagg

SEQ ID NO: 181355 - RNA, 22 nt, Human
aaaaaaaaaaagagugaaagag

SEQ ID NO: 181356 - RNA, 22 nt, Human
aaaaaaaagcgaaaaaucgaaa

SEQ ID NO: 181357 - RNA, 24 nt, Human
aaaaagcgaaaaaucgaaaucaag

SEQ ID NO: 181358 - RNA, 20 nt, Human
aaagcagcugcuggugaggc

SEQ ID NO: 181359 - RNA, 22 nt, Human
aaauacuuuugccccuucauug

SEQ ID NO: 181360 - RNA, 19 nt, Human
aacauggugaaaccccauc

SEQ ID NO: 181361 - RNA, 20 nt, Human
aacauggugaaaccccaucu

SEQ ID NO: 181362 - RNA, 20 nt, Human
aacauggugaaaccccaucu

SEQ ID NO: 181363 - RNA, 21 nt, Human
aacauggugaaaccccaucuc

SEQ ID NO: 181364 - RNA, 24 nt, Human
aagcagcugcuggugaggcucuuu

SEQ ID NO: 181365 - RNA, 24 nt, Human
aagccuggaagcaacauguuucuc

SEQ ID NO: 181366 - RNA, 25 nt, Human
aagcgaaaaaucgaaaucaagccug

SEQ ID NO: 181367 - RNA, 20 nt, Human
aauugcuugaacccaggagg

SEQ ID NO: 181368 - RNA, 24 nt, Human
aauugcuugaacccaggaggcgga

SEQ ID NO: 181369 - RNA, 23 nt, Human
acaaaaaaaaaaagagugaaaga

SEQ ID NO: 181370 - RNA, 20 nt, Human
acaaaacagaggaaaaggga

SEQ ID NO: 181371 - RNA, 24 nt, Human
acaaagugagauucugucucaaaa

SEQ ID NO: 181372 - RNA, 22 nt, Human
acagagcacuccuaauaucucc

SEQ ID NO: 181373 - RNA, 23 nt, Human
acagagcacuccuaauaucuccc

SEQ ID NO: 181374 - RNA, 24 nt, Human
acagaggaaaagggaccuuccuca

SEQ ID NO: 181375 - RNA, 18 nt, Human
acaggaguugucuuaaga

SEQ ID NO: 181376 - RNA, 24 nt, Human
acccaggaggcggagguugcagug

SEQ ID NO: 181377 - RNA, 18 nt, Human
accccaucucuacuaaaa

SEQ ID NO: 181378 - RNA, 23 nt, Human
accggacacuauggcuuuggccc

SEQ ID NO: 181379 - RNA, 28 nt, Human
accuuccucacaccgcuccauucugcug

SEQ ID NO: 181380 - RNA, 20 nt, Human
acucugucaccaggcuggag

SEQ ID NO: 181381 - RNA, 19 nt, Human
acugcacuccagccuggug

SEQ ID NO: 181382 - RNA, 20 nt, Human
agaaaggaaauaaaaauuag

SEQ ID NO: 181383 - RNA, 27 nt, Human
agaaaggaaauaaaaauuaggggaccc

SEQ ID NO: 181384 - RNA, 23 nt, Human
agaacucagggcugguguguguu

SEQ ID NO: 181385 - RNA, 22 nt, Human
agaauugcuugaacccaggagg

SEQ ID NO: 181386 - RNA, 22 nt, Human
agagagagagucauaaagauuc

SEQ ID NO: 181387 - RNA, 22 nt, Human
agaggaaaagggaccuuccuca

SEQ ID NO: 181388 - RNA, 22 nt, Human
agaggacaaggcaugcacgguc

SEQ ID NO: 181389 - RNA, 19 nt, Human
agauucuucagguccuaaa

SEQ ID NO: 181390 - RNA, 22 nt, Human
agccgggcgugguggcagggcc

SEQ ID NO: 181391 - RNA, 18 nt, Human
agccuggugacaaaguga

SEQ ID NO: 181392 - RNA, 23 nt, Human
agcuacuugggaggcugaggcag

SEQ ID NO: 181393 - RNA, 18 nt, Human
aggacuccaagacugagg

SEQ ID NO: 181394 - RNA, 23 nt, Human
aggcaggagaauugcuugaaccc

SEQ ID NO: 181395 - RNA, 24 nt, Human
aggcaggagaauugcuugaaccca

SEQ ID NO: 181396 - RNA, 24 nt, Human
aggcaugcacggucugagaucaga

SEQ ID NO: 181397 - RNA, 21 nt, Human
aggccaagguggacggaucac

SEQ ID NO: 181398 - RNA, 19 nt, Human
aggcggagguugcagugag

SEQ ID NO: 181399 - RNA, 24 nt, Human
aggcggagguugcagugaggugag

SEQ ID NO: 181400 - RNA, 21 nt, Human
aggcugaggcaggagaauugc

SEQ ID NO: 181401 - RNA, 24 nt, Human
aggcugaggcaggagaauugcuug

SEQ ID NO: 181402 - RNA, 24 nt, Human
agguggacggaucacgaggucaag

SEQ ID NO: 181403 - RNA, 23 nt, Human
agucacagaaguuaagggaggaa

SEQ ID NO: 181404 - RNA, 24 nt, Human
agugacaaaaaaaaaaagagugaa

SEQ ID NO: 181405 - RNA, 23 nt, Human
aguggcucaugccuguaauccag

SEQ ID NO: 181406 - RNA, 24 nt, Human
auaaagauucuucagguccuaaaa

SEQ ID NO: 181407 - RNA, 21 nt, Human
auccuggccaacauggugaaa

SEQ ID NO: 181408 - RNA, 23 nt, Human
aucuuuaaucaaaaaggaaaaau

SEQ ID NO: 181409 - RNA, 21 nt, Human
auggugccacaggaguugucu

SEQ ID NO: 181410 - RNA, 24 nt, Human
auugcaccacugcacuccagccug

SEQ ID NO: 181411 - RNA, 27 nt, Human
caacagagcacuccuaauaucuccccc

SEQ ID NO: 181412 - RNA, 24 nt, Human
caacauggugaaaccccaucucua

SEQ ID NO: 181413 - RNA, 26 nt, Human
caagguggacggaucacgaggucaag

SEQ ID NO: 181414 - RNA, 18 nt, Human
cacacacccuaccucucc

SEQ ID NO: 181415 - RNA, 25 nt, Human
caccacugcacuccagccuggugac

SEQ ID NO: 181416 - RNA, 22 nt, Human
cacccuaccucuccaggauaca

SEQ ID NO: 181417 - RNA, 26 nt, Human
cacccucucuuccuuggaccccugcu

SEQ ID NO: 181418 - RNA, 19 nt, Human
cacuauggcuuuggcccug

SEQ ID NO: 181419 - RNA, 21 nt, Human
cacuccagccuggugacaaag

SEQ ID NO: 181420 - RNA, 20 nt, Human
cacuccuaauaucuccccca

SEQ ID NO: 181421 - RNA, 18 nt, Human
cacugcacuccagccugg

SEQ ID NO: 181422 - RNA, 18 nt, Human
cacugcacuccagccugg

SEQ ID NO: 181423 - RNA, 22 nt, Human
cacugcacuccagccuggugac

SEQ ID NO: 181424 - RNA, 23 nt, Human
cacugcacuccagccuggugaca

SEQ ID NO: 181425 - RNA, 25 nt, Human
cacugcacuccagccuggugacaaa

SEQ ID NO: 181426 - RNA, 28 nt, Human
cagccuaaaauguaagugguacaaaaug

SEQ ID NO: 181427 - RNA, 24 nt, Human
cagcgcuuugcaaggccaaggugg

SEQ ID NO: 181428 - RNA, 18 nt, Human
cagugaggugagauugca

SEQ ID NO: 181429 - RNA, 19 nt, Human
cauaccucuccuagcacug

SEQ ID NO: 181430 - RNA, 23 nt, Human
caugccuguaauccagcgcuuug

SEQ ID NO: 181431 - RNA, 18 nt, Human
ccaagggauuccuccccc

SEQ ID NO: 181432 - RNA, 25 nt, Human
ccaagguggacggaucacgagguca

SEQ ID NO: 181433 - RNA, 23 nt, Human
ccacacacccuaccucuccagga

SEQ ID NO: 181434 - RNA, 19 nt, Human
ccacugcacuccagccugg

SEQ ID NO: 181435 - RNA, 19 nt, Human
ccacugcacuccagccugg

SEQ ID NO: 181436 - RNA, 19 nt, Human
ccacugcacuccagccugg

SEQ ID NO: 181437 - RNA, 23 nt, Human
ccacugcacuccagccuggugac

SEQ ID NO: 181438 - RNA, 24 nt, Human
ccacugcacuccagccuggugaca

SEQ ID NO: 181439 - RNA, 21 nt, Human
cccacacacccuaccucucca

SEQ ID NO: 181440 - RNA, 18 nt, Human
ccccaagggauuccuccc

SEQ ID NO: 181441 - RNA, 19 nt, Human
ccccaagggauuccucccc

SEQ ID NO: 181442 - RNA, 21 nt, Human
ccccacacacccuaccucucc

SEQ ID NO: 181443 - RNA, 21 nt, Human
cccccaagggauuccuccccc

SEQ ID NO: 181444 - RNA, 19 nt, Human
cccugggcuaucaagaacu

SEQ ID NO: 181445 - RNA, 18 nt, Human
ccgcuccauucugcugug

SEQ ID NO: 181446 - RNA, 22 nt, Human
ccuggccaacauggugaaaccc

SEQ ID NO: 181447 - RNA, 23 nt, Human
ccuggccaacauggugaaacccc

SEQ ID NO: 181448 - RNA, 24 nt, Human
ccuggccaacauggugaaacccca

SEQ ID NO: 181449 - RNA, 22 nt, Human
ccuguaguccaagcuacuuggg

SEQ ID NO: 181450 - RNA, 24 nt, Human
cgagaccauccuggccaacauggu

SEQ ID NO: 181451 - RNA, 22 nt, Human
cggcuggguguaguggcucaug

SEQ ID NO: 181452 - RNA, 18 nt, Human
cuaaaacacucugguucc

SEQ ID NO: 181453 - RNA, 25 nt, Human
cuaccucuccaggauacacugcacc

SEQ ID NO: 181454 - RNA, 22 nt, Human
cucaaaaaaaaaaaaaagcgaa

SEQ ID NO: 181455 - RNA, 25 nt, Human
cucaaaaaaaaaaaaaagcgaaaaa

SEQ ID NO: 181456 - RNA, 23 nt, Human
cucacucugucaccaggcuggag

SEQ ID NO: 181457 - RNA, 23 nt, Human
cucaugccuguaauccagcgcuu

SEQ ID NO: 181458 - RNA, 20 nt, Human
cuccaaaagcagcugcuggu

SEQ ID NO: 181459 - RNA, 24 nt, Human
cucccccacacacccuaccucucc

SEQ ID NO: 181460 - RNA, 18 nt, Human
cucugguucccauuccuu

SEQ ID NO: 181461 - RNA, 23 nt, Human
cuggccaacauggugaaacccca

SEQ ID NO: 181462 - RNA, 20 nt, Human
cuuggcaaacacaaaacaga

SEQ ID NO: 181463 - RNA, 20 nt, Human
cuuuuuuuuuugagacagag

SEQ ID NO: 181464 - RNA, 21 nt, Human
gaaauaaaaauuagucacaga

SEQ ID NO: 181465 - RNA, 18 nt, Human
gaacucagggcuggugug

SEQ ID NO: 181466 - RNA, 24 nt, Human
gacaaagugagauucugucucaaa

SEQ ID NO: 181467 - RNA, 21 nt, Human
gacacuauggcuuuggcccug

SEQ ID NO: 181468 - RNA, 24 nt, Human
gacagagucucacucugucaccag

SEQ ID NO: 181469 - RNA, 20 nt, Human
gacucacuguagaaagggga

SEQ ID NO: 181470 - RNA, 23 nt, Human
gagauugcaccacugcacuccag

SEQ ID NO: 181471 - RNA, 19 nt, Human
gaggcucuuuagagagaau

SEQ ID NO: 181472 - RNA, 21 nt, Human
gaggcucuuucccaucugccu

SEQ ID NO: 181473 - RNA, 23 nt, Human
gagguugcagugaggugagauug

SEQ ID NO: 181474 - RNA, 18 nt, Human
gcacggucugagaucaga

SEQ ID NO: 181475 - RNA, 22 nt, Human
gcagccuugugauccccacagc

SEQ ID NO: 181476 - RNA, 22 nt, Human
gcaggagaauugcuugaaccca

SEQ ID NO: 181477 - RNA, 24 nt, Human
gccaacauggugaaaccccaucuc

SEQ ID NO: 181478 - RNA, 23 nt, Human
gccacccucucuuccuuggaccc

SEQ ID NO: 181479 - RNA, 20 nt, Human
gcccugggcuaucaagaacu

SEQ ID NO: 181480 - RNA, 18 nt, Human
gcugcucauaccucuccu

SEQ ID NO: 181481 - RNA, 24 nt, Human
ggacacuauggcuuuggcccugug

SEQ ID NO: 181482 - RNA, 19 nt, Human
ggacggaucacgaggucaa

SEQ ID NO: 181483 - RNA, 18 nt, Human
ggagguugcagugaggug

SEQ ID NO: 181484 - RNA, 22 nt, Human
ggagguugcagugaggugagau

SEQ ID NO: 181485 - RNA, 24 nt, Human
ggagguugcagugaggugagauug

SEQ ID NO: 181486 - RNA, 24 nt, Human
ggccuguaguccaagcuacuuggg

SEQ ID NO: 181487 - RNA, 19 nt, Human
ggcuggguguaguggcuca

SEQ ID NO: 181488 - RNA, 21 nt, Human
ggcuggguguaguggcucaug

SEQ ID NO: 181489 - RNA, 23 nt, Human
ggcuggguguaguggcucaugcc

SEQ ID NO: 181490 - RNA, 22 nt, Human
gggacacaucacacugcacagc

SEQ ID NO: 181491 - RNA, 23 nt, Human
gguguaguggcucaugccuguaa

SEQ ID NO: 181492 - RNA, 19 nt, Human
guacaaaaugauuuucagu

SEQ ID NO: 181493 - RNA, 21 nt, Human
guccuugccacccuuaauuau

SEQ ID NO: 181494 - RNA, 20 nt, Human
gucucaaaaaaaaaaaaaag

SEQ ID NO: 181495 - RNA, 24 nt, Human
gugacaaagugagauucugucuca

SEQ ID NO: 181496 - RNA, 21 nt, Human
uaaaugccuuccaguauuggu

SEQ ID NO: 181497 - RNA, 21 nt, Human
uaacagggggccggaggagaa

SEQ ID NO: 181498 - RNA, 18 nt, Human
uagugacaaaaaaaaaaa

SEQ ID NO: 181499 - RNA, 22 nt, Human
uaguggcucaugccuguaaucc

SEQ ID NO: 181500 - RNA, 21 nt, Human
uaucucccccaagggauuccu

SEQ ID NO: 181501 - RNA, 23 nt, Human
ucaaaaaaaaaaaaaagcgaaaa

SEQ ID NO: 181502 - RNA, 18 nt, Human
ucaaaugagcccagaacu

SEQ ID NO: 181503 - RNA, 23 nt, Human
ucacaccgcuccauucugcugug

SEQ ID NO: 181504 - RNA, 24 nt, Human
ucacgaggucaagagaucgagacc

SEQ ID NO: 181505 - RNA, 23 nt, Human
ucagagguugugacguggccacc

SEQ ID NO: 181506 - RNA, 19 nt, Human
ucagcccagcagacgcccu

SEQ ID NO: 181507 - RNA, 22 nt, Human
uccagccuggugacaaagugag

SEQ ID NO: 181508 - RNA, 20 nt, Human
ucccccaagggauuccuccc

SEQ ID NO: 181509 - RNA, 21 nt, Human
uccuuggaccccugcuccaaa

SEQ ID NO: 181510 - RNA, 21 nt, Human
ucucacucugucaccaggcug

SEQ ID NO: 181511 - RNA, 23 nt, Human
ucucacucugucaccaggcugga

SEQ ID NO: 181512 - RNA, 21 nt, Human
ucucuacuaaaaauacacaaa

SEQ ID NO: 181513 - RNA, 22 nt, Human
ucugucucaaaaaaaaaaaaaa

SEQ ID NO: 181514 - RNA, 23 nt, Human
ucugucucaaaaaaaaaaaaaag

SEQ ID NO: 181515 - RNA, 19 nt, Human
ugaaaccccaucucuacua

SEQ ID NO: 181516 - RNA, 18 nt, Human
ugaaagagagagagucau

SEQ ID NO: 181517 - RNA, 20 nt, Human
ugacguggccacccaugagc

SEQ ID NO: 181518 - RNA, 18 nt, Human
ugagacagagucucacuc

SEQ ID NO: 181519 - RNA, 22 nt, Human
ugagacagagucucacucuguc

SEQ ID NO: 181520 - RNA, 22 nt, Human
ugagcccagaacucagggcugg

SEQ ID NO: 181521 - RNA, 24 nt, Human
ugaggcaggagaauugcuugaacc

SEQ ID NO: 181522 - RNA, 25 nt, Human
ugaggcaggagaauugcuugaaccc

SEQ ID NO: 181523 - RNA, 23 nt, Human
ugaggcaggcagccuugugaucc

SEQ ID NO: 181524 - RNA, 21 nt, Human
ugcaccacugcacuccagccu

SEQ ID NO: 181525 - RNA, 24 nt, Human
ugccacaggaguugucuuaagagg

SEQ ID NO: 181526 - RNA, 22 nt, Human
uggaccccugcuccaaaagcag

SEQ ID NO: 181527 - RNA, 24 nt, Human
uggcaaacacaaaacagaggaaaa

SEQ ID NO: 181528 - RNA, 24 nt, Human
uggccaacauggugaaaccccauc

SEQ ID NO: 181529 - RNA, 19 nt, Human
uggcucaugccuguaaucc

SEQ ID NO: 181530 - RNA, 22 nt, Human
uggcucaugccuguaauccagc

SEQ ID NO: 181531 - RNA, 23 nt, Human
uggcucaugccuguaauccagcg

SEQ ID NO: 181532 - RNA, 19 nt, Human
ugggaggcugaggcaggag

SEQ ID NO: 181533 - RNA, 22 nt, Human
ugggaggcugaggcaggagaau

SEQ ID NO: 181534 - RNA, 24 nt, Human
uuaaaggggggcagagagugggag

SEQ ID NO: 181535 - RNA, 18 nt, Human
uuagccgggcgugguggc

SEQ ID NO: 181536 - RNA, 20 nt, Human
uuagugacaaaaaaaaaaag

SEQ ID NO: 181537 - RNA, 24 nt, Human
uugaacccaggaggcggagguugc

SEQ ID NO: 181538 - RNA, 23 nt, Human
uugcaccacugcacuccagccug

SEQ ID NO: 181539 - RNA, 22 nt, Human
uugcagugaggugagauugcac

SEQ ID NO: 181540 - RNA, 25 nt, Human
uugccacccuuaauuauauuuccag

SEQ ID NO: 181541 - RNA, 24 nt, Human
uugcuugaacccaggaggcggagg

SEQ ID NO: 181542 - RNA, 24 nt, Human
uugggacacaucacacugcacagc

SEQ ID NO: 181543 - RNA, 23 nt, Human
uugggaggcugaggcaggagaau

SEQ ID NO: 181544 - RNA, 22 nt, Human
uuucccaucugccucauucacc

SEQ ID NO: 181545 - RNA, 21 nt, Human
aacgcaaagcgacccaaaccc

SEQ ID NO: 181546 - RNA, 23 nt, Human
agcggcagcaggggccgcagggg

SEQ ID NO: 181547 - RNA, 22 nt, Human
caaacgcaaagcgacccaaacc

SEQ ID NO: 181548 - RNA, 22 nt, Human
caccggagacucugcggggauu

SEQ ID NO: 181549 - RNA, 22 nt, Human
cagcgcagcggcagcaggggcc

SEQ ID NO: 181550 - RNA, 22 nt, Human
ccccauccccgcagcgcgucug

SEQ ID NO: 181551 - RNA, 20 nt, Human
ccccgcagcgcgucugcacc

SEQ ID NO: 181552 - RNA, 22 nt, Human
cggccgggacagcgcagcggca

SEQ ID NO: 181553 - RNA, 26 nt, Human
cggcggcagggcggagcgcggcagag

SEQ ID NO: 181554 - RNA, 25 nt, Human
cugcuacaaaccucggcggggcggc

SEQ ID NO: 181555 - RNA, 18 nt, Human
gccgggacagcgcagcgg

SEQ ID NO: 181556 - RNA, 20 nt, Human
gcggagcgcggcagagggca

SEQ ID NO: 181557 - RNA, 22 nt, Human
gcggcagcaggggccgcagggg

SEQ ID NO: 181558 - RNA, 19 nt, Human
ggccgggacagcgcagcgg

SEQ ID NO: 181559 - RNA, 20 nt, Human
ggcgugcggucggcggcagg

SEQ ID NO: 181560 - RNA, 19 nt, Human
ggggauuguagccggaggg

SEQ ID NO: 181561 - RNA, 19 nt, Human
ucccggcugcuacaaaccu

SEQ ID NO: 181562 - RNA, 22 nt, Human
ucggcggggcggccccgcucuu

SEQ ID NO: 181563 - RNA, 21 nt, Human
ucugcaccggagacucugcgg

SEQ ID NO: 181564 - RNA, 20 nt, Human
ugcggccgggacagcgcagc

SEQ ID NO: 181565 - RNA, 21 nt, Human
uucaaguaaagugaaugugau

SEQ ID NO: 181566 - RNA, 19 nt, Human
aggaauucaguccccagcc

SEQ ID NO: 181567 - RNA, 25 nt, Human
aggcguggggaccggggcuguaggg

SEQ ID NO: 181568 - RNA, 20 nt, Human
auuuaaagucuugguuguuc

SEQ ID NO: 181569 - RNA, 21 nt, Human
ccacaggccucuucuuuucuu

SEQ ID NO: 181570 - RNA, 22 nt, Human
cuagggguuccaaguccccagu

SEQ ID NO: 181571 - RNA, 22 nt, Human
ggccucuucuuuucuuaguucc

SEQ ID NO: 181572 - RNA, 22 nt, Human
gggaccggggcuguaggggggc

SEQ ID NO: 181573 - RNA, 22 nt, Human
uccccagucaccuugaggacuc

SEQ ID NO: 181574 - RNA, 22 nt, Human
ucuugguuguucagguccuagg

SEQ ID NO: 181575 - RNA, 20 nt, Human
ugcaguaggaggaagguuuc

SEQ ID NO: 181576 - RNA, 18 nt, Human
ugucuucuaggcgugggg

SEQ ID NO: 181577 - RNA, 19 nt, Human
uuccaaguccccagucacc

SEQ ID NO: 181578 - RNA, 18 nt, Human
aaaugggccaccuagagg

SEQ ID NO: 181579 - RNA, 20 nt, Human
aacaggugaagauggucaga

SEQ ID NO: 181580 - RNA, 18 nt, Human
accuagaggagcagugga

SEQ ID NO: 181581 - RNA, 28 nt, Human
agggaauaauggagagcaaccgguaccc

SEQ ID NO: 181582 - RNA, 22 nt, Human
cagacccuccaagguggggucc

SEQ ID NO: 181583 - RNA, 19 nt, Human
ccgccgccuccagccauuu

SEQ ID NO: 181584 - RNA, 19 nt, Human
ccuccagccauuugagccu

SEQ ID NO: 181585 - RNA, 21 nt, Human
ccuggaccugugccccucgga

SEQ ID NO: 181586 - RNA, 23 nt, Human
gagccuggaccugugccccucgg

SEQ ID NO: 181587 - RNA, 22 nt, Human
gcaggagccuggaccugugccc

SEQ ID NO: 181588 - RNA, 21 nt, Human
gcgugcccgccgccuccagcc

SEQ ID NO: 181589 - RNA, 19 nt, Human
ggcuuagaagggaauaaug

SEQ ID NO: 181590 - RNA, 19 nt, Human
uaaaugggccaccuagagg

SEQ ID NO: 181591 - RNA, 21 nt, Human
uaauggagagcaacauuucuc

SEQ ID NO: 181592 - RNA, 22 nt, Human
uacaacaaaccauaaaugggcc

SEQ ID NO: 181593 - RNA, 22 nt, Human
ucucugcggaacaggugaagau

SEQ ID NO: 181594 - RNA, 19 nt, Human
ugugcgugcccgccgccuc

SEQ ID NO: 181595 - RNA, 23 nt, Human
aaaaaagaaagaaaaacaaagaa

SEQ ID NO: 181596 - RNA, 19 nt, Human
aaagaaaaacaaagaaagg

SEQ ID NO: 181597 - RNA, 22 nt, Human
aaagaaagaaaaacaaagaaag

SEQ ID NO: 181598 - RNA, 19 nt, Human
aagaaagaaaaacaaagaa

SEQ ID NO: 181599 - RNA, 22 nt, Human
aagcagguuuggacgcuuccac

SEQ ID NO: 181600 - RNA, 22 nt, Human
agaaaaacaaagaaagggagag

SEQ ID NO: 181601 - RNA, 22 nt, Human
agaaagggagagagaaagagaa

SEQ ID NO: 181602 - RNA, 18 nt, Human
agaaggcaggcgggagag

SEQ ID NO: 181603 - RNA, 19 nt, Human
agacagaagagaggacaca

SEQ ID NO: 181604 - RNA, 19 nt, Human
agacgcugcuuugucccca

SEQ ID NO: 181605 - RNA, 19 nt, Human
agagaaagagaaaaagaga

SEQ ID NO: 181606 - RNA, 24 nt, Human
agagaaagagaaaaagagaaaggu

SEQ ID NO: 181607 - RNA, 20 nt, Human
aggagacagaagagaggaca

SEQ ID NO: 181608 - RNA, 20 nt, Human
cagcggcuccuggcugcggc

SEQ ID NO: 181609 - RNA, 22 nt, Human
cagcggcuccuggcugcggcgg

SEQ ID NO: 181610 - RNA, 22 nt, Human
ccccgaagccuccaggcagcag

SEQ ID NO: 181611 - RNA, 18 nt, Human
ccgaagccuccaggcagc

SEQ ID NO: 181612 - RNA, 23 nt, Human
cgaagccuccaggcagcaggaga

SEQ ID NO: 181613 - RNA, 20 nt, Human
cuggcugcggcggcggcgac

SEQ ID NO: 181614 - RNA, 23 nt, Human
gaacagacuuggggggagauggg

SEQ ID NO: 181615 - RNA, 19 nt, Human
gagaaagagaaaaagagaa

SEQ ID NO: 181616 - RNA, 24 nt, Human
gagcagccagaagcucugacggaa

SEQ ID NO: 181617 - RNA, 18 nt, Human
gcagcggcuccuggcugc

SEQ ID NO: 181618 - RNA, 18 nt, Human
gccccgaagccuccaggc

SEQ ID NO: 181619 - RNA, 22 nt, Human
gccccgaagccuccaggcagca

SEQ ID NO: 181620 - RNA, 20 nt, Human
gcgggagagccccgaagccu

SEQ ID NO: 181621 - RNA, 20 nt, Human
ggcgccugcgcggggcggcg

SEQ ID NO: 181622 - RNA, 18 nt, Human
ggcgggggcgccugcgcg

SEQ ID NO: 181623 - RNA, 18 nt, Human
uaaaaaagaaagaaaaac

SEQ ID NO: 181624 - RNA, 21 nt, Human
ucugggccccgagaaggcagg

SEQ ID NO: 181625 - RNA, 24 nt, Human
ucuucuuuuaaaaaagaaagaaaa

SEQ ID NO: 181626 - RNA, 19 nt, Human
ugcgcggggcggcgcgggg

SEQ ID NO: 181627 - RNA, 20 nt, Human
uggacgcuuccacucgagcc

SEQ ID NO: 181628 - RNA, 25 nt, Human
uggcccaaucggugccuugcgucug

SEQ ID NO: 181629 - RNA, 19 nt, Human
uggcugcggcggcggcgac

SEQ ID NO: 181630 - RNA, 18 nt, Human
ugggaaaagcagguuugg

SEQ ID NO: 181631 - RNA, 19 nt, Human
ccggaagggucggcgccgc

SEQ ID NO: 181632 - RNA, 24 nt, Human
cggcggugacggcgacaguacgag

SEQ ID NO: 181633 - RNA, 21 nt, Human
gggccggagccgcggcgguga

SEQ ID NO: 181634 - RNA, 21 nt, Human
ggugacggcgacaguacgaga

SEQ ID NO: 181635 - RNA, 21 nt, Human
gucggcgccgcgggcugaggu

SEQ ID NO: 181636 - RNA, 24 nt, Human
aaaaaaaaaucuccucccgcggca

SEQ ID NO: 181637 - RNA, 23 nt, Human
aaaaacacacaccccacaugccc

SEQ ID NO: 181638 - RNA, 22 nt, Human
aaaaagccaccuccccaaacac

SEQ ID NO: 181639 - RNA, 23 nt, Human
aaaacacacaccccacaugccca

SEQ ID NO: 181640 - RNA, 19 nt, Human
aaacacacaccccacaugc

SEQ ID NO: 181641 - RNA, 23 nt, Human
aaacacaguccccucguucccca

SEQ ID NO: 181642 - RNA, 24 nt, Human
aaacacaguccccucguuccccac

SEQ ID NO: 181643 - RNA, 21 nt, Human
aagaagcgggcaggagaaaga

SEQ ID NO: 181644 - RNA, 22 nt, Human
aagguaaaaacacacaccccac

SEQ ID NO: 181645 - RNA, 22 nt, Human
aaucuccucccgcggcagagcc

SEQ ID NO: 181646 - RNA, 19 nt, Human
acaaaacagaaacgccccc

SEQ ID NO: 181647 - RNA, 20 nt, Human
acaucacaaagcggaacaaa

SEQ ID NO: 181648 - RNA, 22 nt, Human
accacugccugggacucuccug

SEQ ID NO: 181649 - RNA, 23 nt, Human
accugagaauauucuguaaaagu

SEQ ID NO: 181650 - RNA, 24 nt, Human
acgucccucucucugccucucggg

SEQ ID NO: 181651 - RNA, 26 nt, Human
acuuagccccgcagcgccccggccgg

SEQ ID NO: 181652 - RNA, 24 nt, Human
agaaaaaagcgagccauaagucaa

SEQ ID NO: 181653 - RNA, 20 nt, Human
agagaagcccccguggcucc

SEQ ID NO: 181654 - RNA, 23 nt, Human
agagauguacauccccugauaac

SEQ ID NO: 181655 - RNA, 20 nt, Human
agccacagggggcugcggug

SEQ ID NO: 181656 - RNA, 20 nt, Human
agccagggcaggguggccgu

SEQ ID NO: 181657 - RNA, 25 nt, Human
agccaguguuggccccggaggcaca

SEQ ID NO: 181658 - RNA, 24 nt, Human
agcccggggacccuucccagccuc

SEQ ID NO: 181659 - RNA, 24 nt, Human
agcgagccauaagucaaggccaga

SEQ ID NO: 181660 - RNA, 22 nt, Human
aggcaccccugcccugggccug

SEQ ID NO: 181661 - RNA, 22 nt, Human
aggccuggaagcugcccaggcc

SEQ ID NO: 181662 - RNA, 20 nt, Human
aggcggggcgggccggcccg

SEQ ID NO: 181663 - RNA, 21 nt, Human
agggggcugcggugugggggc

SEQ ID NO: 181664 - RNA, 19 nt, Human
aguccccacccacccucgc

SEQ ID NO: 181665 - RNA, 20 nt, Human
aguccccucguuccccaccu

SEQ ID NO: 181666 - RNA, 23 nt, Human
auccaaguggccuuucucccagu

SEQ ID NO: 181667 - RNA, 22 nt, Human
aucccgucucccugggccuggg

SEQ ID NO: 181668 - RNA, 18 nt, Human
caaaacagaaacgccccc

SEQ ID NO: 181669 - RNA, 22 nt, Human
caaaacagaaacgcccccaucc

SEQ ID NO: 181670 - RNA, 22 nt, Human
caaagcggaacaaaacagaaac

SEQ ID NO: 181671 - RNA, 25 nt, Human
cacacaccccacaugccccccugag

SEQ ID NO: 181672 - RNA, 20 nt, Human
caccaagguaaaaacacaca

SEQ ID NO: 181673 - RNA, 25 nt, Human
caccaccuuccacgcgccccuggcc

SEQ ID NO: 181674 - RNA, 21 nt, Human
cacccacccucgcuguuucca

SEQ ID NO: 181675 - RNA, 25 nt, Human
caccccacaugcccacguggcccca

SEQ ID NO: 181676 - RNA, 19 nt, Human
cacccccucuucaggaguc

SEQ ID NO: 181677 - RNA, 20 nt, Human
cacccccucuucaggaguca

SEQ ID NO: 181678 - RNA, 21 nt, Human
caccuugugcaaucuaggccc

SEQ ID NO: 181679 - RNA, 19 nt, Human
cacgcgccccuggccaaag

SEQ ID NO: 181680 - RNA, 20 nt, Human
cacgugggcuccgguggggu

SEQ ID NO: 181681 - RNA, 20 nt, Human
cagcgccccggccugcgugc

SEQ ID NO: 181682 - RNA, 22 nt, Human
caggaucugcugccaccacugg

SEQ ID NO: 181683 - RNA, 18 nt, Human
caggccuggaagcugccc

SEQ ID NO: 181684 - RNA, 21 nt, Human
cagucaacagcagacgaaaga

SEQ ID NO: 181685 - RNA, 20 nt, Human
caugcccacguggccccaca

SEQ ID NO: 181686 - RNA, 25 nt, Human
ccacccacccucgcuguuuccaaau

SEQ ID NO: 181687 - RNA, 19 nt, Human
ccaccuccccaaacacagu

SEQ ID NO: 181688 - RNA, 21 nt, Human
ccaccuccccaaacacagucc

SEQ ID NO: 181689 - RNA, 21 nt, Human
ccagagucacugggggcacgg

SEQ ID NO: 181690 - RNA, 18 nt, Human
cccacacguggcaagggu

SEQ ID NO: 181691 - RNA, 24 nt, Human
cccacacguggcaagggugggggu

SEQ ID NO: 181692 - RNA, 22 nt, Human
cccacaugcccacguggcccca

SEQ ID NO: 181693 - RNA, 23 nt, Human
cccacccccucuucaggagucca

SEQ ID NO: 181694 - RNA, 20 nt, Human
cccagggugggcgaccgagg

SEQ ID NO: 181695 - RNA, 23 nt, Human
ccccaagcagccaguguuggccc

SEQ ID NO: 181696 - RNA, 24 nt, Human
ccccaagcagccaguguuggcccc

SEQ ID NO: 181697 - RNA, 25 nt, Human
ccccacacguggcaagggugggggu

SEQ ID NO: 181698 - RNA, 24 nt, Human
ccccacccacccucgcuguuucca

SEQ ID NO: 181699 - RNA, 24 nt, Human
cccccacccccucuucaggagucc

SEQ ID NO: 181700 - RNA, 18 nt, Human
ccccccggcccccggccc

SEQ ID NO: 181701 - RNA, 22 nt, Human
cccccggcccccggcccggccc

SEQ ID NO: 181702 - RNA, 22 nt, Human
ccccugauaacugugaaauaaa

SEQ ID NO: 181703 - RNA, 24 nt, Human
cccgcagcgccccggccugcgugc

SEQ ID NO: 181704 - RNA, 20 nt, Human
cccgcccggcagcgcaggcu

SEQ ID NO: 181705 - RNA, 24 nt, Human
cccgccgcggcccuccggccucgg

SEQ ID NO: 181706 - RNA, 18 nt, Human
cccggaaccacagggcgc

SEQ ID NO: 181707 - RNA, 21 nt, Human
cccggccaugagagagggccc

SEQ ID NO: 181708 - RNA, 18 nt, Human
cccggcccccggcccggc

SEQ ID NO: 181709 - RNA, 24 nt, Human
cccggcccccggcccggcccuggc

SEQ ID NO: 181710 - RNA, 23 nt, Human
cccggcccggcccuggccggagc

SEQ ID NO: 181711 - RNA, 25 nt, Human
cccgggggcggcgcucgggggcggg

SEQ ID NO: 181712 - RNA, 23 nt, Human
cccugcccugggccugcaacacc

SEQ ID NO: 181713 - RNA, 22 nt, Human
ccgagggagccccccacccccu

SEQ ID NO: 181714 - RNA, 23 nt, Human
ccgagggagccccccacccccuc

SEQ ID NO: 181715 - RNA, 19 nt, Human
ccgccgcccgccgcggccc

SEQ ID NO: 181716 - RNA, 18 nt, Human
ccgccgccgccccccggc

SEQ ID NO: 181717 - RNA, 19 nt, Human
ccgccgcggcccuccggcc

SEQ ID NO: 181718 - RNA, 20 nt, Human
ccgccgcggcccuccggccu

SEQ ID NO: 181719 - RNA, 23 nt, Human
ccgccgcggcccuccggccucgg

SEQ ID NO: 181720 - RNA, 21 nt, Human
ccgcggcccuccggccucggc

SEQ ID NO: 181721 - RNA, 18 nt, Human
ccggccucggccaccggc

SEQ ID NO: 181722 - RNA, 26 nt, Human
ccgugucuccaucccgucucccuggg

SEQ ID NO: 181723 - RNA, 21 nt, Human
ccuaauacuuagccccgcagc

SEQ ID NO: 181724 - RNA, 22 nt, Human
ccucccgcggcagagccccggc

SEQ ID NO: 181725 - RNA, 21 nt, Human
ccugcccugggccugcaacac

SEQ ID NO: 181726 - RNA, 23 nt, Human
ccuugccccugggugccacuggc

SEQ ID NO: 181727 - RNA, 23 nt, Human
cgagccauaagucaaggccagaa

SEQ ID NO: 181728 - RNA, 33 nt, Human
cggaacaaaacagaaacgcccccauccaaguug

SEQ ID NO: 181729 - RNA, 22 nt, Human
cggagggagagauguacauccc

SEQ ID NO: 181730 - RNA, 19 nt, Human
cggcccccggcccggcccu

SEQ ID NO: 181731 - RNA, 23 nt, Human
cggccgccugcccgccgccgccc

SEQ ID NO: 181732 - RNA, 19 nt, Human
cggggcgggccggcccggg

SEQ ID NO: 181733 - RNA, 18 nt, Human
cgggggcugcugccgccc

SEQ ID NO: 181734 - RNA, 23 nt, Human
cguggcuccagcccggggacccu

SEQ ID NO: 181735 - RNA, 21 nt, Human
cuaccucugcuuuuuuggggg

SEQ ID NO: 181736 - RNA, 22 nt, Human
cuccaucccgucucccugggcc

SEQ ID NO: 181737 - RNA, 21 nt, Human
cuccguggaaggaagguccug

SEQ ID NO: 181738 - RNA, 24 nt, Human
cucucggguacacaccugagaaua

SEQ ID NO: 181739 - RNA, 19 nt, Human
cugcgugcugggcgacucc

SEQ ID NO: 181740 - RNA, 19 nt, Human
cuggaagcugcccaggccg

SEQ ID NO: 181741 - RNA, 19 nt, Human
cugggucccguccgccagg

SEQ ID NO: 181742 - RNA, 27 nt, Human
cuuuuuuggggggcaggggaucaggca

SEQ ID NO: 181743 - RNA, 19 nt, Human
gaaaaagccaccuccccaa

SEQ ID NO: 181744 - RNA, 20 nt, Human
gaaaaagccaccuccccaaa

SEQ ID NO: 181745 - RNA, 23 nt, Human
gaaaaagccaccuccccaaacac

SEQ ID NO: 181746 - RNA, 21 nt, Human
gaacaaaacagaaacgccccc

SEQ ID NO: 181747 - RNA, 20 nt, Human
gacaaggccacgcacagagc

SEQ ID NO: 181748 - RNA, 19 nt, Human
gagccgggggacccagggc

SEQ ID NO: 181749 - RNA, 18 nt, Human
gaggcccagagucacugg

SEQ ID NO: 181750 - RNA, 25 nt, Human
gcagacgaaaaagccaccuccccaa

SEQ ID NO: 181751 - RNA, 21 nt, Human
gcaggguggccgugcagcccu

SEQ ID NO: 181752 - RNA, 21 nt, Human
gccaguguuggccccggaggc

SEQ ID NO: 181753 - RNA, 24 nt, Human
gccaugagagagggcccagggugu

SEQ ID NO: 181754 - RNA, 19 nt, Human
gccccuggccaaagugcga

SEQ ID NO: 181755 - RNA, 28 nt, Human
gcccggcccuggccggagccgccucggc

SEQ ID NO: 181756 - RNA, 19 nt, Human
gcccuggccggagccgccu

SEQ ID NO: 181757 - RNA, 19 nt, Human
gcccugggccugcaacacc

SEQ ID NO: 181758 - RNA, 21 nt, Human
gccgccugcccgccgccgccc

SEQ ID NO: 181759 - RNA, 18 nt, Human
gcgcugggcgucaauaac

SEQ ID NO: 181760 - RNA, 20 nt, Human
gcggcccccggggcuguggc

SEQ ID NO: 181761 - RNA, 24 nt, Human
gcggcggccgaggcggggcgggcc

SEQ ID NO: 181762 - RNA, 19 nt, Human
gcucuagccagggcagggu

SEQ ID NO: 181763 - RNA, 21 nt, Human
ggaaggccuaauacuuagccc

SEQ ID NO: 181764 - RNA, 22 nt, Human
ggcaggcaccccugcccugggc

SEQ ID NO: 181765 - RNA, 19 nt, Human
ggccggagccgccucggcc

SEQ ID NO: 181766 - RNA, 24 nt, Human
ggccgggggcugcugccgcccggg

SEQ ID NO: 181767 - RNA, 18 nt, Human
ggcgggccggcccggggc

SEQ ID NO: 181768 - RNA, 19 nt, Human
ggcggggccccaugcuggc

SEQ ID NO: 181769 - RNA, 22 nt, Human
ggcugcagggcggggccccaug

SEQ ID NO: 181770 - RNA, 19 nt, Human
gggcgucaauaacuuaaaa

SEQ ID NO: 181771 - RNA, 24 nt, Human
ggggcaggcaccccugcccugggc

SEQ ID NO: 181772 - RNA, 22 nt, Human
gggggcucugugaggcccagag

SEQ ID NO: 181773 - RNA, 21 nt, Human
ggguuggaaggacagccacag

SEQ ID NO: 181774 - RNA, 20 nt, Human
ggucguggccagccaggccu

SEQ ID NO: 181775 - RNA, 21 nt, Human
ggugcgcucuagccagggcag

SEQ ID NO: 181776 - RNA, 19 nt, Human
gucuccgagucuccacgcc

SEQ ID NO: 181777 - RNA, 18 nt, Human
gugaugaagaaaagaagc

SEQ ID NO: 181778 - RNA, 23 nt, Human
gugcuggcuucccgcuccccggg

SEQ ID NO: 181779 - RNA, 19 nt, Human
gugcugggcgacuccaccc

SEQ ID NO: 181780 - RNA, 23 nt, Human
guggccccacacguggcaagggu

SEQ ID NO: 181781 - RNA, 18 nt, Human
uaaaaaaggggaaaaacg

SEQ ID NO: 181782 - RNA, 23 nt, Human
uagccagggcaggguggccgugc

SEQ ID NO: 181783 - RNA, 19 nt, Human
ucaaggggccccgggaggc

SEQ ID NO: 181784 - RNA, 21 nt, Human
ucacaaagcggaacaaaacag

SEQ ID NO: 181785 - RNA, 22 nt, Human
ucaccgggggaccaucccucca

SEQ ID NO: 181786 - RNA, 18 nt, Human
ucacgagaaaucguuggc

SEQ ID NO: 181787 - RNA, 22 nt, Human
ucaggaguccagugggcaaagc

SEQ ID NO: 181788 - RNA, 18 nt, Human
uccacgccuuuugugaug

SEQ ID NO: 181789 - RNA, 22 nt, Human
ucccagccucugcagagggacg

SEQ ID NO: 181790 - RNA, 18 nt, Human
uccccaaacacagucccc

SEQ ID NO: 181791 - RNA, 24 nt, Human
uccccacccacccucgcuguuucc

SEQ ID NO: 181792 - RNA, 23 nt, Human
uccccgggggcggcgcucggggg

SEQ ID NO: 181793 - RNA, 21 nt, Human
ucccucucucugccucucggg

SEQ ID NO: 181794 - RNA, 22 nt, Human
ucccugggaaggccuaauacuu

SEQ ID NO: 181795 - RNA, 27 nt, Human
ucccugggaaggccuaauacuuagccc

SEQ ID NO: 181796 - RNA, 21 nt, Human
uccugccccgugucuccaucc

SEQ ID NO: 181797 - RNA, 24 nt, Human
uccuugccccugggugccacuggc

SEQ ID NO: 181798 - RNA, 18 nt, Human
ucuccgagucuccacgcc

SEQ ID NO: 181799 - RNA, 23 nt, Human
ucuccgagucuccacgccuuuug

SEQ ID NO: 181800 - RNA, 19 nt, Human
ucuguaaaaguccccaccc

SEQ ID NO: 181801 - RNA, 23 nt, Human
ugaaaaaaaaaaaaucuccuccc

SEQ ID NO: 181802 - RNA, 20 nt, Human
ugacaucacaaagcggaaca

SEQ ID NO: 181803 - RNA, 24 nt, Human
ugagaauauucuguaaaagucccc

SEQ ID NO: 181804 - RNA, 19 nt, Human
ugagagagggcccagggug

SEQ ID NO: 181805 - RNA, 20 nt, Human
ugaggcccagagucacuggg

SEQ ID NO: 181806 - RNA, 22 nt, Human
ugcccacguggccccacacgug

SEQ ID NO: 181807 - RNA, 18 nt, Human
ugcccugggccugcaaca

SEQ ID NO: 181808 - RNA, 18 nt, Human
ugccugccaccaccuucc

SEQ ID NO: 181809 - RNA, 23 nt, Human
ugcgaagcccggaaccacagggc

SEQ ID NO: 181810 - RNA, 20 nt, Human
ugcuggcuucccgcuccccg

SEQ ID NO: 181811 - RNA, 19 nt, Human
ugcuugggacaaggccacg

SEQ ID NO: 181812 - RNA, 20 nt, Human
uggcaaggguggggguuggc

SEQ ID NO: 181813 - RNA, 20 nt, Human
uggccggagccgccucggcc

SEQ ID NO: 181814 - RNA, 23 nt, Human
uggccgggggcugcugccgcccg

SEQ ID NO: 181815 - RNA, 21 nt, Human
uggcugcagggcggggcccca

SEQ ID NO: 181816 - RNA, 23 nt, Human
ugggacaaggccacgcacagagc

SEQ ID NO: 181817 - RNA, 21 nt, Human
ugggaugcuuggcacgccccc

SEQ ID NO: 181818 - RNA, 19 nt, Human
ugggggacauuggcacggg

SEQ ID NO: 181819 - RNA, 22 nt, Human
uggucggagaagguggucggca

SEQ ID NO: 181820 - RNA, 24 nt, Human
ugugaaauaaaaaccauuuguuaa

SEQ ID NO: 181821 - RNA, 25 nt, Human
ugugaggcccagagucacugggggc

SEQ ID NO: 181822 - RNA, 18 nt, Human
ugugaugaagaaaagaag

SEQ ID NO: 181823 - RNA, 20 nt, Human
uuccacgcgccccuggccaa

SEQ ID NO: 181824 - RNA, 21 nt, Human
uuugcaguggccgggggcugc

SEQ ID NO: 181825 - RNA, 23 nt, Human
aaauaaaacaaggaguuugcaaa

SEQ ID NO: 181826 - RNA, 25 nt, Human
aaauaucuuccaaguuccaucaccc

SEQ ID NO: 181827 - RNA, 21 nt, Human
aagacgggggccgacuugagc

SEQ ID NO: 181828 - RNA, 21 nt, Human
aagucaagaaaauaauuauaa

SEQ ID NO: 181829 - RNA, 24 nt, Human
aaucuuauagccaaaagucaagaa

SEQ ID NO: 181830 - RNA, 19 nt, Human
acccgaauccucggcccgg

SEQ ID NO: 181831 - RNA, 21 nt, Human
acccgaauccucggcccggcc

SEQ ID NO: 181832 - RNA, 22 nt, Human
acccgacggggcgacgcggccc

SEQ ID NO: 181833 - RNA, 24 nt, Human
agcucaguacccgacggggcgacg

SEQ ID NO: 181834 - RNA, 23 nt, Human
aguuccuggcaugggacuggcuc

SEQ ID NO: 181835 - RNA, 18 nt, Human
aucucuguccccacgauc

SEQ ID NO: 181836 - RNA, 22 nt, Human
ccccgggcacccgaauccucgg

SEQ ID NO: 181837 - RNA, 25 nt, Human
ccccgggcacccgaauccucggccc

SEQ ID NO: 181838 - RNA, 23 nt, Human
cgaauccucggcccggccgcuca

SEQ ID NO: 181839 - RNA, 21 nt, Human
cggccgcucacccggccagca

SEQ ID NO: 181840 - RNA, 22 nt, Human
cucaaauaucuuccaaguuccu

SEQ ID NO: 181841 - RNA, 23 nt, Human
cucggcccggccgcucacccggc

SEQ ID NO: 181842 - RNA, 21 nt, Human
cuggcucuggugaugucagaa

SEQ ID NO: 181843 - RNA, 21 nt, Human
gaaaacaccaaauucaaaaau

SEQ ID NO: 181844 - RNA, 21 nt, Human
gaagcacuugcaaauaaaaca

SEQ ID NO: 181845 - RNA, 21 nt, Human
gaauccucggcccggccgcuc

SEQ ID NO: 181846 - RNA, 26 nt, Human
gaucuacaugacauccuuaguuccuu

SEQ ID NO: 181847 - RNA, 18 nt, Human
gaugucagaagcacuugc

SEQ ID NO: 181848 - RNA, 18 nt, Human
gccccgggcacccgaauc

SEQ ID NO: 181849 - RNA, 21 nt, Human
ggcacagggguguggaaagaa

SEQ ID NO: 181850 - RNA, 18 nt, Human
gggcgacgcggccccggg

SEQ ID NO: 181851 - RNA, 21 nt, Human
uacacaaaaucuuauagccaa

SEQ ID NO: 181852 - RNA, 26 nt, Human
uacacaaaaucuuauagccaaaaguu

SEQ ID NO: 181853 - RNA, 20 nt, Human
uagaaaacaccaaauucaaa

SEQ ID NO: 181854 - RNA, 24 nt, Human
uagaaaacaccaaauucaaaaauu

SEQ ID NO: 181855 - RNA, 18 nt, Human
uauguugguaaacucaaa

SEQ ID NO: 181856 - RNA, 22 nt, Human
uauguugguaaacucaaauauc

SEQ ID NO: 181857 - RNA, 24 nt, Human
ucaguacccgacggggcgacgcgg

SEQ ID NO: 181858 - RNA, 20 nt, Human
uccaucacccaucucugucc

SEQ ID NO: 181859 - RNA, 25 nt, Human
ugaucuauaaacuaacaggcuccuu

SEQ ID NO: 181860 - RNA, 20 nt, Human
uggcaugggacuggcucugg

SEQ ID NO: 181861 - RNA, 18 nt, Human
ugggacuggcucugguga

SEQ ID NO: 181862 - RNA, 20 nt, Human
ugucagaagcacuugcaaau

SEQ ID NO: 181863 - RNA, 18 nt, Human
uguccccacgaucuacau

SEQ ID NO: 181864 - RNA, 23 nt, Human
uuccaaguuccaucacccaucuc

SEQ ID NO: 181865 - RNA, 23 nt, Human
uugggauguaaggacuuuuaaag

SEQ ID NO: 181866 - RNA, 22 nt, Human
uuugcaaaucacaucuucuguu

SEQ ID NO: 181867 - RNA, 21 nt, Human
aacccccagcccagccggccc

SEQ ID NO: 181868 - RNA, 24 nt, Human
acugagucaagcaagggcaggagu

SEQ ID NO: 181869 - RNA, 24 nt, Human
agauagaccagggacacuaggggu

SEQ ID NO: 181870 - RNA, 23 nt, Human
aggaagcccggcucggcgguggc

SEQ ID NO: 181871 - RNA, 21 nt, Human
aggacacgcugugagccaccg

SEQ ID NO: 181872 - RNA, 18 nt, Human
aggagguggggaggccag

SEQ ID NO: 181873 - RNA, 22 nt, Human
agggcggggcgguggcgggaaa

SEQ ID NO: 181874 - RNA, 23 nt, Human
agggugaggugggggccccaggg

SEQ ID NO: 181875 - RNA, 19 nt, Human
aggguggggacgggaggga

SEQ ID NO: 181876 - RNA, 23 nt, Human
agugacaguguuuuccagcgguc

SEQ ID NO: 181877 - RNA, 18 nt, Human
agugcugggaacagggug

SEQ ID NO: 181878 - RNA, 22 nt, Human
agugcugggaacagggugggga

SEQ ID NO: 181879 - RNA, 19 nt, Human
augcagcaugcccagcccc

SEQ ID NO: 181880 - RNA, 23 nt, Human
caacccccagcccagccggcccu

SEQ ID NO: 181881 - RNA, 23 nt, Human
caagggcaggaguacccuggggg

SEQ ID NO: 181882 - RNA, 19 nt, Human
cacccacagagggucccag

SEQ ID NO: 181883 - RNA, 18 nt, Human
caccucccacccgcccgc

SEQ ID NO: 181884 - RNA, 23 nt, Human
cagcagcgggccguccguccccc

SEQ ID NO: 181885 - RNA, 20 nt, Human
cagcaugcccagcccccagc

SEQ ID NO: 181886 - RNA, 22 nt, Human
cagccacucccaccucccaccc

SEQ ID NO: 181887 - RNA, 22 nt, Human
caggaguacccuggggggcggc

SEQ ID NO: 181888 - RNA, 21 nt, Human
cagggcuccccgcccaccucc

SEQ ID NO: 181889 - RNA, 20 nt, Human
cagguuccuggaaggcguuc

SEQ ID NO: 181890 - RNA, 20 nt, Human
caucgcccccgggccccugc

SEQ ID NO: 181891 - RNA, 23 nt, Human
ccacccacccaaguccucaaucc

SEQ ID NO: 181892 - RNA, 19 nt, Human
ccacgcccgaaggcgccug

SEQ ID NO: 181893 - RNA, 22 nt, Human
ccacucccaccucccacccgcc

SEQ ID NO: 181894 - RNA, 23 nt, Human
ccagaguccacgcccgaaggcgc

SEQ ID NO: 181895 - RNA, 31 nt, Human
ccagcccagccggcccuggagagggcuccgg

SEQ ID NO: 181896 - RNA, 22 nt, Human
ccagggcuccccgcccaccucc

SEQ ID NO: 181897 - RNA, 19 nt, Human
cccacccgcccgccggugc

SEQ ID NO: 181898 - RNA, 23 nt, Human
cccaccuccagaccugcucagac

SEQ ID NO: 181899 - RNA, 18 nt, Human
cccagcccagccggcccu

SEQ ID NO: 181900 - RNA, 19 nt, Human
cccagggaccuagacuucc

SEQ ID NO: 181901 - RNA, 22 nt, Human
ccccaccgcagacuggguccug

SEQ ID NO: 181902 - RNA, 23 nt, Human
cccccaccgcagacuggguccug

SEQ ID NO: 181903 - RNA, 22 nt, Human
cccccagcccagccggcccugg

SEQ ID NO: 181904 - RNA, 25 nt, Human
ccccgcccaccuccagaccugcuca

SEQ ID NO: 181905 - RNA, 21 nt, Human
ccccuaguccacagguuccug

SEQ ID NO: 181906 - RNA, 18 nt, Human
cccugcagaaggugaggg

SEQ ID NO: 181907 - RNA, 18 nt, Human
ccuggagagggcuccggg

SEQ ID NO: 181908 - RNA, 22 nt, Human
ccuugccugaaacacccaggaa

SEQ ID NO: 181909 - RNA, 21 nt, Human
cgcccggagauggggcuccug

SEQ ID NO: 181910 - RNA, 19 nt, Human
cgggugcgcagggaggcug

SEQ ID NO: 181911 - RNA, 20 nt, Human
cugccccagguggggccugg

SEQ ID NO: 181912 - RNA, 20 nt, Human
cuggaaggcguuccuucucc

SEQ ID NO: 181913 - RNA, 25 nt, Human
cuggaaggcguuccuucucccaaug

SEQ ID NO: 181914 - RNA, 18 nt, Human
gagaggcagagaagagag

SEQ ID NO: 181915 - RNA, 19 nt, Human
gagccaccgagcucugaaa

SEQ ID NO: 181916 - RNA, 18 nt, Human
gaggcugccuuuuccuug

SEQ ID NO: 181917 - RNA, 19 nt, Human
gagggcggggcgguggcgg

SEQ ID NO: 181918 - RNA, 19 nt, Human
gccccagguggggccuggg

SEQ ID NO: 181919 - RNA, 20 nt, Human
gcccccgggccccugcuggc

SEQ ID NO: 181920 - RNA, 18 nt, Human
gcccgaaggcgccugaag

SEQ ID NO: 181921 - RNA, 20 nt, Human
ggacacgcugugagccaccg

SEQ ID NO: 181922 - RNA, 24 nt, Human
ggacgggaggagguggggaggcca

SEQ ID NO: 181923 - RNA, 18 nt, Human
ggagagggugaggugggg

SEQ ID NO: 181924 - RNA, 18 nt, Human
ggagauggggcuccugag

SEQ ID NO: 181925 - RNA, 22 nt, Human
ggaggagguggggaggccaggg

SEQ ID NO: 181926 - RNA, 18 nt, Human
gggaacaggguggggacg

SEQ ID NO: 181927 - RNA, 23 nt, Human
gggaggagguggggaggccaggg

SEQ ID NO: 181928 - RNA, 22 nt, Human
gggcaggaguacccuggggggc

SEQ ID NO: 181929 - RNA, 24 nt, Human
gggggccccagggagggcggggcg

SEQ ID NO: 181930 - RNA, 23 nt, Human
gugccgccugccccagguggggc

SEQ ID NO: 181931 - RNA, 24 nt, Human
uaagaugcagcaugcccagccccc

SEQ ID NO: 181932 - RNA, 22 nt, Human
uacaaaagguuaagaugcagca

SEQ ID NO: 181933 - RNA, 25 nt, Human
uacccuggggggcggcuguccuggu

SEQ ID NO: 181934 - RNA, 24 nt, Human
uacuagccccaucccagggugugc

SEQ ID NO: 181935 - RNA, 18 nt, Human
uagagugcgccagagucc

SEQ ID NO: 181936 - RNA, 18 nt, Human
ucccagaacccugcccag

SEQ ID NO: 181937 - RNA, 19 nt, Human
ucccagaacccugcccagg

SEQ ID NO: 181938 - RNA, 18 nt, Human
ucccagggugugcgucac

SEQ ID NO: 181939 - RNA, 21 nt, Human
uccccugauuucuucaccuuu

SEQ ID NO: 181940 - RNA, 21 nt, Human
ucccugcagccacucccaccu

SEQ ID NO: 181941 - RNA, 28 nt, Human
uccgcaaaccggggcaggaccggggucc

SEQ ID NO: 181942 - RNA, 21 nt, Human
uccugagagaugcccacccac

SEQ ID NO: 181943 - RNA, 23 nt, Human
uccuugccugaaacacccaggaa

SEQ ID NO: 181944 - RNA, 20 nt, Human
ucgcccccgggccccugcug

SEQ ID NO: 181945 - RNA, 23 nt, Human
ucggcgguggcaaggcuugagug

SEQ ID NO: 181946 - RNA, 20 nt, Human
ugaaacacccaggaagcccg

SEQ ID NO: 181947 - RNA, 25 nt, Human
ugaaacacccaggaagcccggcucg

SEQ ID NO: 181948 - RNA, 21 nt, Human
ugaaacacccaggaagcccuu

SEQ ID NO: 181949 - RNA, 24 nt, Human
ugaggugggggccccagggagggc

SEQ ID NO: 181950 - RNA, 22 nt, Human
ugagugcugggaacaggguggg

SEQ ID NO: 181951 - RNA, 18 nt, Human
ugcaaagggaagucccug

SEQ ID NO: 181952 - RNA, 22 nt, Human
ugcccacccacccaaguccuca

SEQ ID NO: 181953 - RNA, 18 nt, Human
ugcccaggaggugacacg

SEQ ID NO: 181954 - RNA, 24 nt, Human
ugcuccuucccuuucaaaggaggg

SEQ ID NO: 181955 - RNA, 21 nt, Human
ugcugggaacaggguggggac

SEQ ID NO: 181956 - RNA, 23 nt, Human
ugggaacaggguggggacgggag

SEQ ID NO: 181957 - RNA, 21 nt, Human
uggggacgggaggaggugggg

SEQ ID NO: 181958 - RNA, 22 nt, Human
uuuccuugggggucacccccca

SEQ ID NO: 181959 - RNA, 26 nt, Human
aaaaaaacaaaacagaacaacuuugg

SEQ ID NO: 181960 - RNA, 22 nt, Human
aaaacagaacaacuuuggucaa

SEQ ID NO: 181961 - RNA, 25 nt, Human
aaacaaaacagaacaacuuugguca

SEQ ID NO: 181962 - RNA, 27 nt, Human
aaaccaaaucuaacguggaaucuaaug

SEQ ID NO: 181963 - RNA, 19 nt, Human
aaaguaggaaaaaucaaaa

SEQ ID NO: 181964 - RNA, 24 nt, Human
aacuuggaaacuacuuaccaguag

SEQ ID NO: 181965 - RNA, 23 nt, Human
acacacacacacacacacacaca

SEQ ID NO: 181966 - RNA, 23 nt, Human
acacacacacacacacacacaca

SEQ ID NO: 181967 - RNA, 23 nt, Human
acacacacacacacacacacaca

SEQ ID NO: 181968 - RNA, 23 nt, Human
acacacacacacacacacacaca

SEQ ID NO: 181969 - RNA, 23 nt, Human
acacacacacacacacacacaca

SEQ ID NO: 181970 - RNA, 23 nt, Human
acacacacacacacacacacaca

SEQ ID NO: 181971 - RNA, 23 nt, Human
acacacacacacacacacacaca

SEQ ID NO: 181972 - RNA, 32 nt, Human
acacacacacacacacacacacaaauauagug

SEQ ID NO: 181973 - RNA, 19 nt, Human
acauaaagaaucuaaacua

SEQ ID NO: 181974 - RNA, 23 nt, Human
acccuaaaauccuaaguugccac

SEQ ID NO: 181975 - RNA, 24 nt, Human
agacagcaacgggcggcuguuccu

SEQ ID NO: 181976 - RNA, 22 nt, Human
agagccugccgccgcucccucc

SEQ ID NO: 181977 - RNA, 22 nt, Human
agcgagagccugccgccgcucc

SEQ ID NO: 181978 - RNA, 23 nt, Human
agguauauuuauguuauuuccaa

SEQ ID NO: 181979 - RNA, 18 nt, Human
auaaagcuguuuaaaacu

SEQ ID NO: 181980 - RNA, 22 nt, Human
auaaucucaagcaaguggagaa

SEQ ID NO: 181981 - RNA, 25 nt, Human
aucaauauacuagagcccagcuuua

SEQ ID NO: 181982 - RNA, 20 nt, Human
aucaccuuugaggcaaugca

SEQ ID NO: 181983 - RNA, 19 nt, Human
aucagccaaauauuaaaau

SEQ ID NO: 181984 - RNA, 25 nt, Human
aucuuaagaacauuucaauaaaaca

SEQ ID NO: 181985 - RNA, 25 nt, Human
caaaacagaacaacuuuggucaagu

SEQ ID NO: 181986 - RNA, 21 nt, Human
caacccagugacaacacguaa

SEQ ID NO: 181987 - RNA, 26 nt, Human
cacacacacacacacaaauauacuuc

SEQ ID NO: 181988 - RNA, 18 nt, Human
cacacacacacacacaca

SEQ ID NO: 181989 - RNA, 20 nt, Human
cacacacacacacacacaca

SEQ ID NO: 181990 - RNA, 20 nt, Human
cacacacacacacacacaca

SEQ ID NO: 181991 - RNA, 20 nt, Human
cacacacacacacacacaca

SEQ ID NO: 181992 - RNA, 20 nt, Human
cacacacacacacacacaca

SEQ ID NO: 181993 - RNA, 20 nt, Human
cacacacacacacacacaca

SEQ ID NO: 181994 - RNA, 20 nt, Human
cacacacacacacacacaca

SEQ ID NO: 181995 - RNA, 20 nt, Human
cacacacacacacacacaca

SEQ ID NO: 181996 - RNA, 20 nt, Human
cacacacacacacacacaca

SEQ ID NO: 181997 - RNA, 20 nt, Human
cacacacacacacacacaca

SEQ ID NO: 181998 - RNA, 20 nt, Human
cacacacacacacacacaca

SEQ ID NO: 181999 - RNA, 20 nt, Human
cacacacacacacacacaca

SEQ ID NO: 182000 - RNA, 22 nt, Human
cacacacacacacacacacaca

SEQ ID NO: 182001 - RNA, 22 nt, Human
cacacacacacacacacacaca

SEQ ID NO: 182002 - RNA, 22 nt, Human
cacacacacacacacacacaca

SEQ ID NO: 182003 - RNA, 22 nt, Human
cacacacacacacacacacaca

SEQ ID NO: 182004 - RNA, 26 nt, Human
cacacacacacacacacacacacaaa

SEQ ID NO: 182005 - RNA, 26 nt, Human
cacacacacacacacacacacacaca

SEQ ID NO: 182006 - RNA, 26 nt, Human
cacacacacacacacacacacacaca

SEQ ID NO: 182007 - RNA, 26 nt, Human
cacacacacacacacacacacacaca

SEQ ID NO: 182008 - RNA, 26 nt, Human
cacacacacacacacacacacacaca

SEQ ID NO: 182009 - RNA, 26 nt, Human
cacacacacacacacacacacacaca

SEQ ID NO: 182010 - RNA, 26 nt, Human
cacacacacacacacacacacacaca

SEQ ID NO: 182011 - RNA, 23 nt, Human
cacauaaagaaucuaaacuaaca

SEQ ID NO: 182012 - RNA, 25 nt, Human
cacgaccaggcucugcuucccggcc

SEQ ID NO: 182013 - RNA, 20 nt, Human
cacuauuacucauuuucuaa

SEQ ID NO: 182014 - RNA, 18 nt, Human
cagaaaucaucaauauac

SEQ ID NO: 182015 - RNA, 24 nt, Human
cagaauaaaguucaggauuucauu

SEQ ID NO: 182016 - RNA, 20 nt, Human
cagcuuuaacacuguccuuc

SEQ ID NO: 182017 - RNA, 21 nt, Human
caguggccgcugcacucccgc

SEQ ID NO: 182018 - RNA, 21 nt, Human
cauuaaugauggucaccaaua

SEQ ID NO: 182019 - RNA, 21 nt, Human
ccaagcccagccgagcucggc

SEQ ID NO: 182020 - RNA, 23 nt, Human
ccacgccgcccccaccacuuccu

SEQ ID NO: 182021 - RNA, 25 nt, Human
ccaucugucacauuuaagaaagguc

SEQ ID NO: 182022 - RNA, 20 nt, Human
cccacaaaaaugcucuuagg

SEQ ID NO: 182023 - RNA, 20 nt, Human
cccaccacuuccuaagcgga

SEQ ID NO: 182024 - RNA, 21 nt, Human
cccccaagucccggguuuggg

SEQ ID NO: 182025 - RNA, 19 nt, Human
ccgccgcucccuccgcgcc

SEQ ID NO: 182026 - RNA, 26 nt, Human
ccgcgcccgagugcgggcuccaagca

SEQ ID NO: 182027 - RNA, 18 nt, Human
ccgcugcacucccgccgg

SEQ ID NO: 182028 - RNA, 19 nt, Human
ccgcugcacucccgccggu

SEQ ID NO: 182029 - RNA, 21 nt, Human
ccgcugcacucccgccggugg

SEQ ID NO: 182030 - RNA, 22 nt, Human
ccgcugcacucccgccgguggc

SEQ ID NO: 182031 - RNA, 24 nt, Human
ccucaagggaaauaaaagccucac

SEQ ID NO: 182032 - RNA, 20 nt, Human
ccuccaaaugaaacagauau

SEQ ID NO: 182033 - RNA, 24 nt, Human
ccuuauauuacauucuguguugcu

SEQ ID NO: 182034 - RNA, 23 nt, Human
cgaccaggcucugcuucccggcc

SEQ ID NO: 182035 - RNA, 21 nt, Human
cgcccccaccacuuccuaagc

SEQ ID NO: 182036 - RNA, 24 nt, Human
cgcccgagugcgggcuccaagcac

SEQ ID NO: 182037 - RNA, 23 nt, Human
cuagagcccagcuuuaacacugu

SEQ ID NO: 182038 - RNA, 19 nt, Human
cucagcgcccccaaguccc

SEQ ID NO: 182039 - RNA, 22 nt, Human
cugcaagacucuagucuacaga

SEQ ID NO: 182040 - RNA, 21 nt, Human
cugccgccgcucccuccgcgc

SEQ ID NO: 182041 - RNA, 23 nt, Human
cugccgccgcucccuccgcgccc

SEQ ID NO: 182042 - RNA, 28 nt, Human
gccacgccgcccccaccacuuccuaagc

SEQ ID NO: 182043 - RNA, 18 nt, Human
ggguggggagugcuguuu

SEQ ID NO: 182044 - RNA, 21 nt, Human
gggugggguggggagugcugu

SEQ ID NO: 182045 - RNA, 18 nt, Human
ggugccgaaagcgagagc

SEQ ID NO: 182046 - RNA, 20 nt, Human
uaaaaacuaaguguguacaa

SEQ ID NO: 182047 - RNA, 26 nt, Human
uaaaacacauaaaauuuaaagaacaa

SEQ ID NO: 182048 - RNA, 21 nt, Human
uaaaaccuaaaaauaaugucg

SEQ ID NO: 182049 - RNA, 25 nt, Human
uaaaauuaaugaaaacauaucuuuc

SEQ ID NO: 182050 - RNA, 25 nt, Human
uaaagaacaaaucauguuauuaaaa

SEQ ID NO: 182051 - RNA, 19 nt, Human
uaaagaaucuaaacuaaca

SEQ ID NO: 182052 - RNA, 19 nt, Human
uaagaugacaucaccuuug

SEQ ID NO: 182053 - RNA, 22 nt, Human
uacaaagaagaaaauccuccaa

SEQ ID NO: 182054 - RNA, 25 nt, Human
uacacacacacacacacacacacac

SEQ ID NO: 182055 - RNA, 25 nt, Human
uacacacacacacacacacacacag

SEQ ID NO: 182056 - RNA, 23 nt, Human
uacacacacacacacacacacag

SEQ ID NO: 182057 - RNA, 27 nt, Human
uacaggacaugaacauaaaggacauac

SEQ ID NO: 182058 - RNA, 21 nt, Human
uauacuagagcccagcuuuaa

SEQ ID NO: 182059 - RNA, 25 nt, Human
ucaaagauccuucuuguuaucuucc

SEQ ID NO: 182060 - RNA, 23 nt, Human
ucaguaucuagcugauacauaac

SEQ ID NO: 182061 - RNA, 23 nt, Human
ucaguuaaaaaaacaaaacagaa

SEQ ID NO: 182062 - RNA, 21 nt, Human
uccaagaugaguaaaaaaaug

SEQ ID NO: 182063 - RNA, 20 nt, Human
uccaagcacaggggaauccu

SEQ ID NO: 182064 - RNA, 22 nt, Human
ugaaaggcacauaaagaaucua

SEQ ID NO: 182065 - RNA, 18 nt, Human
ugagggugggguggggag

SEQ ID NO: 182066 - RNA, 23 nt, Human
ugagggugggguggggagugcug

SEQ ID NO: 182067 - RNA, 23 nt, Human
ugauaauuacauuugaaauuagu

SEQ ID NO: 182068 - RNA, 19 nt, Human
uggccgcgcugcagccucg

SEQ ID NO: 182069 - RNA, 19 nt, Human
ugggguggggagugcuguu

SEQ ID NO: 182070 - RNA, 24 nt, Human
uggguacaguggccgcugcacucc

SEQ ID NO: 182071 - RNA, 22 nt, Human
uguauacauacauuugcauagu

SEQ ID NO: 182072 - RNA, 22 nt, Human
uguauacauacauuugcauauu

SEQ ID NO: 182073 - RNA, 24 nt, Human
uuaaaaccuaaaaauaaugucggu

SEQ ID NO: 182074 - RNA, 21 nt, Human
uuaaauaguugauccaaaggc

SEQ ID NO: 182075 - RNA, 24 nt, Human
uuacacagaauaaaguucaggauu

SEQ ID NO: 182076 - RNA, 26 nt, Human
uuacuuucaguuaaaaaaacaaaaca

SEQ ID NO: 182077 - RNA, 20 nt, Human
uuccaagaugaguaaaaaaa

SEQ ID NO: 182078 - RNA, 19 nt, Human
uugaaaaugcauuuuacca

SEQ ID NO: 182079 - RNA, 23 nt, Human
uugaaauuaguuauauguauaaa

SEQ ID NO: 182080 - RNA, 23 nt, Human
uugaauuucauacacagcuucac

SEQ ID NO: 182081 - RNA, 18 nt, Human
uuuaaagaacaaaucaug

SEQ ID NO: 182082 - RNA, 20 nt, Human
uuuaaggaacuuugauaacu

SEQ ID NO: 182083 - RNA, 19 nt, Human
uuuaugguuacacacacac

SEQ ID NO: 182084 - RNA, 21 nt, Human
uuuuauuuucuuaaaguagga

SEQ ID NO: 182085 - RNA, 18 nt, Human
uuuuuuuuuuuuuuuuug

SEQ ID NO: 182086 - RNA, 30 nt, Human
aacaagacaaugguuaaaaaccagaacagg

SEQ ID NO: 182087 - RNA, 24 nt, Human
accagcaucucagacaagggccga

SEQ ID NO: 182088 - RNA, 24 nt, Human
acucagcaugugccccccuccccu

SEQ ID NO: 182089 - RNA, 22 nt, Human
agaacaaagagaggaaagagga

SEQ ID NO: 182090 - RNA, 20 nt, Human
agaacaagacaaugguuaaa

SEQ ID NO: 182091 - RNA, 23 nt, Human
agaacaagacaaugguuaaaaac

SEQ ID NO: 182092 - RNA, 18 nt, Human
agaacagaugcccagaag

SEQ ID NO: 182093 - RNA, 21 nt, Human
agacaagggcaggcuucaaac

SEQ ID NO: 182094 - RNA, 21 nt, Human
agacaaugguuaaaaaccaga

SEQ ID NO: 182095 - RNA, 24 nt, Human
aggaggcucccuguaaacauuugg

SEQ ID NO: 182096 - RNA, 22 nt, Human
aggggccccuccagacgcagcc

SEQ ID NO: 182097 - RNA, 22 nt, Human
caccaccagcccucugcgggaa

SEQ ID NO: 182098 - RNA, 23 nt, Human
caccagcccucugcgggaagcac

SEQ ID NO: 182099 - RNA, 18 nt, Human
caggcuucaaacagggag

SEQ ID NO: 182100 - RNA, 21 nt, Human
caggggccccuccagacgcag

SEQ ID NO: 182101 - RNA, 23 nt, Human
caucacagaacaagacaaugguu

SEQ ID NO: 182102 - RNA, 22 nt, Human
caucuuccucagggguuggggg

SEQ ID NO: 182103 - RNA, 23 nt, Human
ccacuccgcucccaccaccagcc

SEQ ID NO: 182104 - RNA, 22 nt, Human
ccccacacggcccacggcccgg

SEQ ID NO: 182105 - RNA, 18 nt, Human
ccccccuccccucaucac

SEQ ID NO: 182106 - RNA, 23 nt, Human
ccccgcccgacccacuccgcucc

SEQ ID NO: 182107 - RNA, 19 nt, Human
cccgacccacuccgcuccc

SEQ ID NO: 182108 - RNA, 21 nt, Human
cccggcucggccccgcccgac

SEQ ID NO: 182109 - RNA, 21 nt, Human
ccgccggcccggccgccgccc

SEQ ID NO: 182110 - RNA, 21 nt, Human
ccuacgucuggagcugagggg

SEQ ID NO: 182111 - RNA, 19 nt, Human
ccuguggcaaccccucccc

SEQ ID NO: 182112 - RNA, 18 nt, Human
cgacccacuccgcuccca

SEQ ID NO: 182113 - RNA, 22 nt, Human
cgcccgacccacuccgcuccca

SEQ ID NO: 182114 - RNA, 20 nt, Human
cucccaccaccagcccucug

SEQ ID NO: 182115 - RNA, 23 nt, Human
cuccccucaucacagaacaagac

SEQ ID NO: 182116 - RNA, 24 nt, Human
cuggggguccaggcuggagaagca

SEQ ID NO: 182117 - RNA, 25 nt, Human
gaacaagacaaugguuaaaaaccag

SEQ ID NO: 182118 - RNA, 21 nt, Human
gagaagcaggggccccuccag

SEQ ID NO: 182119 - RNA, 20 nt, Human
gaggggacagggggagcuga

SEQ ID NO: 182120 - RNA, 25 nt, Human
gccggcccggccgccgcccggcccc

SEQ ID NO: 182121 - RNA, 22 nt, Human
gcucccaccaccagcccucugc

SEQ ID NO: 182122 - RNA, 20 nt, Human
ggacugggcaggaggcuccc

SEQ ID NO: 182123 - RNA, 21 nt, Human
ggagaagcaggggccccucca

SEQ ID NO: 182124 - RNA, 19 nt, Human
ggcgggggaacaggcgggg

SEQ ID NO: 182125 - RNA, 23 nt, Human
ggcugguguugggcaaagcuggg

SEQ ID NO: 182126 - RNA, 22 nt, Human
gggacagggggagcugagaaca

SEQ ID NO: 182127 - RNA, 21 nt, Human
gggccccuccagacgcagccu

SEQ ID NO: 182128 - RNA, 23 nt, Human
ggggacagggggagcugagaaca

SEQ ID NO: 182129 - RNA, 21 nt, Human
ggggacugggcaggaggcucc

SEQ ID NO: 182130 - RNA, 24 nt, Human
ggguugggggacugggcaggaggc

SEQ ID NO: 182131 - RNA, 21 nt, Human
gugcuuuuuccuuuggggccu

SEQ ID NO: 182132 - RNA, 18 nt, Human
ucagcaugugccccccuc

SEQ ID NO: 182133 - RNA, 22 nt, Human
ucccaccaccagcccucugcgg

SEQ ID NO: 182134 - RNA, 18 nt, Human
ucucagacaagggcaggc

SEQ ID NO: 182135 - RNA, 20 nt, Human
ucucagacaagggcaggcuu

SEQ ID NO: 182136 - RNA, 22 nt, Human
ugaggggacagggggagcugag

SEQ ID NO: 182137 - RNA, 22 nt, Human
ugcccagaaggggguaccaugg

SEQ ID NO: 182138 - RNA, 23 nt, Human
uggcgucucacgcuucuugugcu

SEQ ID NO: 182139 - RNA, 18 nt, Human
ugggcaggaggcucccug

SEQ ID NO: 182140 - RNA, 18 nt, Human
ugggggacugggcaggag

SEQ ID NO: 182141 - RNA, 21 nt, Human
ugggggacugggcaggaggcu

SEQ ID NO: 182142 - RNA, 18 nt, Human
uggggguccaggcuggag

SEQ ID NO: 182143 - RNA, 18 nt, Human
ugguguugggcaaagcug

SEQ ID NO: 182144 - RNA, 21 nt, Human
ugugcuuuuuccuuuggggcc

SEQ ID NO: 182145 - RNA, 20 nt, Human
uguugggcaaagcugggggu

SEQ ID NO: 182146 - RNA, 22 nt, Human
uguugggcaaagcugggggucc

SEQ ID NO: 182147 - RNA, 24 nt, Human
uuaaaaaccagaacagaugcccag

SEQ ID NO: 182148 - RNA, 22 nt, Human
uugggggguacaaagucggcgg

SEQ ID NO: 182149 - RNA, 20 nt, Human
aaaaacuaccaacaaaggca

SEQ ID NO: 182150 - RNA, 25 nt, Human
aaaaagaaucacaaaaaaaguuaaa

SEQ ID NO: 182151 - RNA, 19 nt, Human
aaaaagauuggaccccaaa

SEQ ID NO: 182152 - RNA, 19 nt, Human
aaaaaugaaccacuggugg

SEQ ID NO: 182153 - RNA, 18 nt, Human
aaaagaacauacuggcua

SEQ ID NO: 182154 - RNA, 20 nt, Human
aaaaggaaacagaagacagu

SEQ ID NO: 182155 - RNA, 24 nt, Human
aaacaagaggcaccauguacaaaa

SEQ ID NO: 182156 - RNA, 18 nt, Human
aaacaagcaagaaucaaa

SEQ ID NO: 182157 - RNA, 24 nt, Human
aaacagaagacaguauuuccagaa

SEQ ID NO: 182158 - RNA, 20 nt, Human
aaagucccaaaaugcaacag

SEQ ID NO: 182159 - RNA, 23 nt, Human
aacccauucucagacaaaggcua

SEQ ID NO: 182160 - RNA, 20 nt, Human
aagaaggggggaaaaaaaga

SEQ ID NO: 182161 - RNA, 22 nt, Human
aagaaggggggaaaaaaagagu

SEQ ID NO: 182162 - RNA, 22 nt, Human
aagaggcaccauguacaaaacu

SEQ ID NO: 182163 - RNA, 18 nt, Human
aagaguuccuacuaaaga

SEQ ID NO: 182164 - RNA, 19 nt, Human
acaaacaagguuaaccuuc

SEQ ID NO: 182165 - RNA, 19 nt, Human
acagcaaaaggugucuggu

SEQ ID NO: 182166 - RNA, 24 nt, Human
acauucugcaaaggcaaaaggaaa

SEQ ID NO: 182167 - RNA, 23 nt, Human
accccaaaaggcacugcccaaac

SEQ ID NO: 182168 - RNA, 22 nt, Human
agacaaacaagcaagaaucaaa

SEQ ID NO: 182169 - RNA, 20 nt, Human
agcaaaaggugucuggucuc

SEQ ID NO: 182170 - RNA, 18 nt, Human
agcaaaccugggcucuuu

SEQ ID NO: 182171 - RNA, 22 nt, Human
agcuaugauuuuccaaaaagaa

SEQ ID NO: 182172 - RNA, 24 nt, Human
aggaaaagguauauucaaaaugag

SEQ ID NO: 182173 - RNA, 22 nt, Human
aggagcaaaccugggcucuuua

SEQ ID NO: 182174 - RNA, 18 nt, Human
aucaaguuuuucccacac

SEQ ID NO: 182175 - RNA, 23 nt, Human
augacaaaguggaaaaaaguccc

SEQ ID NO: 182176 - RNA, 18 nt, Human
augagacagcaaaaggug

SEQ ID NO: 182177 - RNA, 21 nt, Human
augcagauauaacauaaaacu

SEQ ID NO: 182178 - RNA, 20 nt, Human
auguacacaugacaaagugg

SEQ ID NO: 182179 - RNA, 25 nt, Human
caaaaagaaucacaaaaaaaguuaa

SEQ ID NO: 182180 - RNA, 25 nt, Human
caaaaugaguaacaacuaccaaccc

SEQ ID NO: 182181 - RNA, 23 nt, Human
caaaggcuaaagcacauucugca

SEQ ID NO: 182182 - RNA, 18 nt, Human
caaaguaaaagcaugcac

SEQ ID NO: 182183 - RNA, 18 nt, Human
caacagaaaaggccauga

SEQ ID NO: 182184 - RNA, 26 nt, Human
caagcaaaauguaaaucugcaaaaug

SEQ ID NO: 182185 - RNA, 19 nt, Human
cacaucaaaagaugaaaua

SEQ ID NO: 182186 - RNA, 24 nt, Human
caccacauuuacaaaguaaaagca

SEQ ID NO: 182187 - RNA, 23 nt, Human
cacuuuaguaguucuuccaauuc

SEQ ID NO: 182188 - RNA, 20 nt, Human
cagcaccucaacuucacauc

SEQ ID NO: 182189 - RNA, 21 nt, Human
caguaaaaacgauggcaaaca

SEQ ID NO: 182190 - RNA, 23 nt, Human
caguauagaaagacuacaguuga

SEQ ID NO: 182191 - RNA, 22 nt, Human
ccaaaaagauuggaccccaaaa

SEQ ID NO: 182192 - RNA, 21 nt, Human
ccaauccaaaaagauuggacc

SEQ ID NO: 182193 - RNA, 22 nt, Human
ccaauccaaaaagauuggaccc

SEQ ID NO: 182194 - RNA, 28 nt, Human
ccacacaagcaaaauguaaaucugcaaa

SEQ ID NO: 182195 - RNA, 21 nt, Human
ccacuggugguuuaagaaggg

SEQ ID NO: 182196 - RNA, 23 nt, Human
ccagaaaagacuaguuacaaaca

SEQ ID NO: 182197 - RNA, 23 nt, Human
cggcggcgggagaggggacacgg

SEQ ID NO: 182198 - RNA, 19 nt, Human
cgggagaggggacacgggc

SEQ ID NO: 182199 - RNA, 27 nt, Human
cuaaacccauucucagacaaaggcuaa

SEQ ID NO: 182200 - RNA, 19 nt, Human
cuagaaucuuauugcagaa

SEQ ID NO: 182201 - RNA, 20 nt, Human
cucaaaaugcauucucuuca

SEQ ID NO: 182202 - RNA, 22 nt, Human
cucagacaaaggcuaaagcaca

SEQ ID NO: 182203 - RNA, 20 nt, Human
cuucacaucuuccauaagca

SEQ ID NO: 182204 - RNA, 21 nt, Human
gaaaaaaagaguaagcuacau

SEQ ID NO: 182205 - RNA, 24 nt, Human
gaaucaaucgccaauugaagcuga

SEQ ID NO: 182206 - RNA, 21 nt, Human
gaguaacaacuaccaacccug

SEQ ID NO: 182207 - RNA, 18 nt, Human
gcugcugccauucccugg

SEQ ID NO: 182208 - RNA, 19 nt, Human
gcugcugccauucccuggu

SEQ ID NO: 182209 - RNA, 25 nt, Human
ggaaagaauuauaaguaauuaugga

SEQ ID NO: 182210 - RNA, 24 nt, Human
guuucucaacagaaaaggccauga

SEQ ID NO: 182211 - RNA, 22 nt, Human
uaaaaacuaccaacaaaggcac

SEQ ID NO: 182212 - RNA, 19 nt, Human
uaaacccauucucagacaa

SEQ ID NO: 182213 - RNA, 18 nt, Human
uaacagauuaaaaaugua

SEQ ID NO: 182214 - RNA, 20 nt, Human
uaacugagacaaacaagcaa

SEQ ID NO: 182215 - RNA, 24 nt, Human
uaagauucugcaugcugcugccau

SEQ ID NO: 182216 - RNA, 21 nt, Human
uacaaaauauugugcuaaaga

SEQ ID NO: 182217 - RNA, 24 nt, Human
uacaauaaggaaaagguauauuca

SEQ ID NO: 182218 - RNA, 23 nt, Human
uaccaacaaaggcacugaacugc

SEQ ID NO: 182219 - RNA, 19 nt, Human
uaccaagaguuaaaaacaa

SEQ ID NO: 182220 - RNA, 21 nt, Human
uagcagcaaagucacugguuc

SEQ ID NO: 182221 - RNA, 24 nt, Human
uaguaguucuuccaauuccaaugu

SEQ ID NO: 182222 - RNA, 21 nt, Human
uauagccccaguaaccggaaa

SEQ ID NO: 182223 - RNA, 18 nt, Human
uauuacaccaaaagacua

SEQ ID NO: 182224 - RNA, 20 nt, Human
ucaaaaugcauucucuucau

SEQ ID NO: 182225 - RNA, 18 nt, Human
ucacuaacauccaugcuu

SEQ ID NO: 182226 - RNA, 20 nt, Human
ucaugugcauaguuaagauu

SEQ ID NO: 182227 - RNA, 23 nt, Human
uccaaaaagauuggaccccaaaa

SEQ ID NO: 182228 - RNA, 25 nt, Human
uccaagaagcugacuuuaucauacu

SEQ ID NO: 182229 - RNA, 21 nt, Human
uccaaugucugacuuuagcau

SEQ ID NO: 182230 - RNA, 19 nt, Human
uccaauuccaaugucugac

SEQ ID NO: 182231 - RNA, 25 nt, Human
ugaaaaaaccuuaaaaaugaaccac

SEQ ID NO: 182232 - RNA, 24 nt, Human
ugaaauagaauccaauccaaaaag

SEQ ID NO: 182233 - RNA, 23 nt, Human
ugaaaugcucaaaaugcauucuc

SEQ ID NO: 182234 - RNA, 22 nt, Human
ugagacaaacaagcaagaauca

SEQ ID NO: 182235 - RNA, 27 nt, Human
ugagacaaacaagcaagaaucaaagug

SEQ ID NO: 182236 - RNA, 18 nt, Human
ugcaacaguuucagcaaa

SEQ ID NO: 182237 - RNA, 24 nt, Human
ugcacaaacaagguuaaccuucaa

SEQ ID NO: 182238 - RNA, 23 nt, Human
ugcucaaaaugcauucucuucau

SEQ ID NO: 182239 - RNA, 24 nt, Human
uggaccccaaaaggcacugcccaa

SEQ ID NO: 182240 - RNA, 23 nt, Human
ugggugugucuguauccaagaag

SEQ ID NO: 182241 - RNA, 21 nt, Human
uguauuuauagccccaguaac

SEQ ID NO: 182242 - RNA, 22 nt, Human
ugucuggucucaacacuccaca

SEQ ID NO: 182243 - RNA, 23 nt, Human
ugugcuaaagagugcuaagauuc

SEQ ID NO: 182244 - RNA, 20 nt, Human
uuaaaaguucccuaauacaa

SEQ ID NO: 182245 - RNA, 20 nt, Human
uuaguaguucuuccaauucc

SEQ ID NO: 182246 - RNA, 21 nt, Human
uucaaaaugaguaacaacuac

SEQ ID NO: 182247 - RNA, 22 nt, Human
uucaaaaugaguaacaacuacc

SEQ ID NO: 182248 - RNA, 25 nt, Human
uucccacaccuaaagaaaauuccau

SEQ ID NO: 182249 - RNA, 19 nt, Human
aaaaagcaauagagaguug

SEQ ID NO: 182250 - RNA, 25 nt, Human
aacagaagcuacacaaccaaaccug

SEQ ID NO: 182251 - RNA, 18 nt, Human
accaaaccugaggggaca

SEQ ID NO: 182252 - RNA, 23 nt, Human
accaaaccugaggggacagaggu

SEQ ID NO: 182253 - RNA, 30 nt, Human
accgcaaacucccaacuaaauggcuguaag

SEQ ID NO: 182254 - RNA, 23 nt, Human
acucugaaugugacuguaaaagg

SEQ ID NO: 182255 - RNA, 24 nt, Human
agggaccaucucucgucagccugc

SEQ ID NO: 182256 - RNA, 24 nt, Human
aggggacagagguagccagaggcu

SEQ ID NO: 182257 - RNA, 18 nt, Human
aucuaccaaguucuccuc

SEQ ID NO: 182258 - RNA, 21 nt, Human
caacaacaaagagaaucuaag

SEQ ID NO: 182259 - RNA, 19 nt, Human
caacagaagcuacacaacc

SEQ ID NO: 182260 - RNA, 19 nt, Human
caccgcaaacucccaacua

SEQ ID NO: 182261 - RNA, 18 nt, Human
cagaacgggacagacggc

SEQ ID NO: 182262 - RNA, 25 nt, Human
cagugucggcaaugagagucggugg

SEQ ID NO: 182263 - RNA, 20 nt, Human
cauggggcuggcagucaggc

SEQ ID NO: 182264 - RNA, 22 nt, Human
ccacccggagagauucugcugc

SEQ ID NO: 182265 - RNA, 23 nt, Human
cccaccgcaaacucccaacuaaa

SEQ ID NO: 182266 - RNA, 23 nt, Human
ccccugcccaccgcaaacuccca

SEQ ID NO: 182267 - RNA, 22 nt, Human
cccugcccaccgcaaacuccca

SEQ ID NO: 182268 - RNA, 23 nt, Human
cccugcccaccgcaaacucccaa

SEQ ID NO: 182269 - RNA, 26 nt, Human
cguuucuucucccucccccugccccc

SEQ ID NO: 182270 - RNA, 24 nt, Human
cuccccaucuaccaaguucuccuc

SEQ ID NO: 182271 - RNA, 24 nt, Human
cucuuuccugcugcugaaagagau

SEQ ID NO: 182272 - RNA, 19 nt, Human
cuggcagucaggcaguccg

SEQ ID NO: 182273 - RNA, 20 nt, Human
gacggcagcgagauggaacu

SEQ ID NO: 182274 - RNA, 18 nt, Human
uaagaaagaagacuaugc

SEQ ID NO: 182275 - RNA, 25 nt, Human
uaauugggcucccacccggagagau

SEQ ID NO: 182276 - RNA, 23 nt, Human
uagagaguuggagacgugugcgg

SEQ ID NO: 182277 - RNA, 22 nt, Human
ucauaaagggagaaucagagac

SEQ ID NO: 182278 - RNA, 21 nt, Human
uccgucgcaggguggcggcca

SEQ ID NO: 182279 - RNA, 21 nt, Human
uccugcgacggcuccucucuu

SEQ ID NO: 182280 - RNA, 19 nt, Human
ucgacuccaagucuugggc

SEQ ID NO: 182281 - RNA, 22 nt, Human
ugauaacguggaaaaaaaaacc

SEQ ID NO: 182282 - RNA, 25 nt, Human
ugcggcuccugcgacggcuccucuc

SEQ ID NO: 182283 - RNA, 20 nt, Human
uggaaaaaaaaaccaacugu

SEQ ID NO: 182284 - RNA, 18 nt, Human
uggcauggggcuggcagu

SEQ ID NO: 182285 - RNA, 19 nt, Human
uggcucagggcaugcacga

SEQ ID NO: 182286 - RNA, 24 nt, Human
uggcuguaaggaagacgcgcggag

SEQ ID NO: 182287 - RNA, 19 nt, Human
ugggaagggaccaucucuc

SEQ ID NO: 182288 - RNA, 21 nt, Human
ugggaugcugcgggaagccgu

SEQ ID NO: 182289 - RNA, 21 nt, Human
ugucggcaaugagagucggug

SEQ ID NO: 182290 - RNA, 21 nt, Human
uucaaaugccugaggccagca

SEQ ID NO: 182291 - RNA, 22 nt, Human
uuucuucucccucccccugccc

SEQ ID NO: 182292 - RNA, 25 nt, Human
aaaaaaaacacaacccguuucccaa

SEQ ID NO: 182293 - RNA, 25 nt, Human
aaaaaaacacaacccguuucccaaa

SEQ ID NO: 182294 - RNA, 22 nt, Human
aaaaaaccccuacaaaggcuau

SEQ ID NO: 182295 - RNA, 24 nt, Human
aaaugugaagacucaacuaaaacc

SEQ ID NO: 182296 - RNA, 22 nt, Human
aacacggcaaaggaaaaaaaac

SEQ ID NO: 182297 - RNA, 20 nt, Human
aacccguuucccaaagacua

SEQ ID NO: 182298 - RNA, 21 nt, Human
aaggaaccaaaaaaccccuac

SEQ ID NO: 182299 - RNA, 19 nt, Human
aaguaaaaacaaaaacuga

SEQ ID NO: 182300 - RNA, 22 nt, Human
aauggugaguuuuccuuuuuuu

SEQ ID NO: 182301 - RNA, 25 nt, Human
agcaggguuugcaguggccuguggc

SEQ ID NO: 182302 - RNA, 24 nt, Human
agccgggaccggaaauccaacacg

SEQ ID NO: 182303 - RNA, 24 nt, Human
aggauuggucaugaaaacggcggg

SEQ ID NO: 182304 - RNA, 18 nt, Human
aggcagcaggguuugcag

SEQ ID NO: 182305 - RNA, 18 nt, Human
aggcagggguggggaggg

SEQ ID NO: 182306 - RNA, 20 nt, Human
aggcagggguggggaggggc

SEQ ID NO: 182307 - RNA, 25 nt, Human
auccccacaugagagagcggacaca

SEQ ID NO: 182308 - RNA, 20 nt, Human
caaaaaaccccuacaaaggc

SEQ ID NO: 182309 - RNA, 25 nt, Human
caaaaaaccccuacaaaggcuaucc

SEQ ID NO: 182310 - RNA, 21 nt, Human
caacacggcaaaggaaaaaaa

SEQ ID NO: 182311 - RNA, 24 nt, Human
cacaacccguuucccaaagacuag

SEQ ID NO: 182312 - RNA, 24 nt, Human
cacacacgaagggaggugucagcc

SEQ ID NO: 182313 - RNA, 20 nt, Human
caccggagccccaggcggcg

SEQ ID NO: 182314 - RNA, 18 nt, Human
cagaugggcccugccccc

SEQ ID NO: 182315 - RNA, 19 nt, Human
cagcaaagauuaagucuua

SEQ ID NO: 182316 - RNA, 20 nt, Human
cagcacaaacauccccacau

SEQ ID NO: 182317 - RNA, 21 nt, Human
cagcaggguuugcaguggccu

SEQ ID NO: 182318 - RNA, 19 nt, Human
cagggcaccgaaacaaagg

SEQ ID NO: 182319 - RNA, 19 nt, Human
cagggcaccgaaacaaagg

SEQ ID NO: 182320 - RNA, 18 nt, Human
cagguggcgucuguggug

SEQ ID NO: 182321 - RNA, 22 nt, Human
cagugcaccgcaccggagcccc

SEQ ID NO: 182322 - RNA, 24 nt, Human
ccccccagcaggagcuccaggggc

SEQ ID NO: 182323 - RNA, 19 nt, Human
ccgcaccggagccccaggc

SEQ ID NO: 182324 - RNA, 19 nt, Human
ccugagcacacuccucgga

SEQ ID NO: 182325 - RNA, 24 nt, Human
cgggacaaaaguaaaaacaaaaac

SEQ ID NO: 182326 - RNA, 23 nt, Human
cuacuggccagugagagcugugc

SEQ ID NO: 182327 - RNA, 23 nt, Human
cucggcgggacaaaaguaaaaac

SEQ ID NO: 182328 - RNA, 20 nt, Human
cugaucuguggggugggggg

SEQ ID NO: 182329 - RNA, 21 nt, Human
cuguggugucugggcggccgg

SEQ ID NO: 182330 - RNA, 27 nt, Human
gaaaaaaaaaaaaaaggaaccaaaaaa

SEQ ID NO: 182331 - RNA, 22 nt, Human
gagccccaggcggcagaugggc

SEQ ID NO: 182332 - RNA, 23 nt, Human
gcaggcagcaggguuugcagugg

SEQ ID NO: 182333 - RNA, 18 nt, Human
gcagggguggggaggggc

SEQ ID NO: 182334 - RNA, 23 nt, Human
gccccaggcggcagaugggcccu

SEQ ID NO: 182335 - RNA, 23 nt, Human
gcgggacaaaaguaaaaacaaaa

SEQ ID NO: 182336 - RNA, 25 nt, Human
ggaaaaaaaacacaacccguuuccc

SEQ ID NO: 182337 - RNA, 21 nt, Human
ggaaaacugaucuguggggug

SEQ ID NO: 182338 - RNA, 21 nt, Human
ggaaauccaacacggcaaagg

SEQ ID NO: 182339 - RNA, 21 nt, Human
ggcagaugggcccugcccccc

SEQ ID NO: 182340 - RNA, 19 nt, Human
ggcggcagaugggcccugc

SEQ ID NO: 182341 - RNA, 23 nt, Human
ggggcgcacacacgaagggaggu

SEQ ID NO: 182342 - RNA, 23 nt, Human
gucuucuucagcaaagauuaagu

SEQ ID NO: 182343 - RNA, 21 nt, Human
guggcuuagggccgccaggug

SEQ ID NO: 182344 - RNA, 18 nt, Human
guguucuuuuuggcagcu

SEQ ID NO: 182345 - RNA, 19 nt, Human
uaagcuacaaagcacauga

SEQ ID NO: 182346 - RNA, 24 nt, Human
uacaaagcacaugagaaauguucu

SEQ ID NO: 182347 - RNA, 18 nt, Human
uaggaaaacugaucugug

SEQ ID NO: 182348 - RNA, 26 nt, Human
uaggaaaacugaucuguggggugggg

SEQ ID NO: 182349 - RNA, 23 nt, Human
ucaaaguagaaaugacauaggau

SEQ ID NO: 182350 - RNA, 23 nt, Human
uccaacacggcaaaggaaaaaaa

SEQ ID NO: 182351 - RNA, 18 nt, Human
ucuacagaaauacacagc

SEQ ID NO: 182352 - RNA, 19 nt, Human
ucuacagaaauacacagcc

SEQ ID NO: 182353 - RNA, 21 nt, Human
ucugugggguggggggcuggu

SEQ ID NO: 182354 - RNA, 18 nt, Human
ucuguggugucugggcgg

SEQ ID NO: 182355 - RNA, 18 nt, Human
ugaaaaaaaaaaaaaagg

SEQ ID NO: 182356 - RNA, 24 nt, Human
ugaaaaaaaaaaaaaaggaaccaa

SEQ ID NO: 182357 - RNA, 25 nt, Human
ugaaaaaaaaaaaaaaggaaccaaa

SEQ ID NO: 182358 - RNA, 23 nt, Human
ugcaguggccuguggccuucugg

SEQ ID NO: 182359 - RNA, 24 nt, Human
ugcuuuuucuauacgaaccuggag

SEQ ID NO: 182360 - RNA, 22 nt, Human
uggagugagcguguggcgggag

SEQ ID NO: 182361 - RNA, 22 nt, Human
ugggcggccggcaggcagcagg

SEQ ID NO: 182362 - RNA, 18 nt, Human
uggucaugaaaacggcgg

SEQ ID NO: 182363 - RNA, 23 nt, Human
uguggccuucuggaaagcccggc

SEQ ID NO: 182364 - RNA, 26 nt, Human
uguucuguuuuuccuuucaaauucua

SEQ ID NO: 182365 - RNA, 21 nt, Human
uguuuuuuuuuuccaucuugu

SEQ ID NO: 182366 - RNA, 24 nt, Human
uuaagcuacaaagcacaugagaaa

SEQ ID NO: 182367 - RNA, 23 nt, Human
uuguuuucuauggggcuggauuu

SEQ ID NO: 182368 - RNA, 23 nt, Human
uuugcaagaaaaagaaauaugga

SEQ ID NO: 182369 - RNA, 23 nt, Human
aaagagagagagacagaaagaaa

SEQ ID NO: 182370 - RNA, 24 nt, Human
aaagagagagagacagaaagaaac

SEQ ID NO: 182371 - RNA, 19 nt, Human
aagaaaaaaagggaaauca

SEQ ID NO: 182372 - RNA, 23 nt, Human
aagaaaaagagagagagacagaa

SEQ ID NO: 182373 - RNA, 19 nt, Human
aaugugcugggacuguacu

SEQ ID NO: 182374 - RNA, 18 nt, Human
acacacacccucccgccu

SEQ ID NO: 182375 - RNA, 18 nt, Human
agaaaagaaaaagagaga

SEQ ID NO: 182376 - RNA, 18 nt, Human
agaaagaaacaagucuua

SEQ ID NO: 182377 - RNA, 22 nt, Human
agcgggggaagaaaaaaaggga

SEQ ID NO: 182378 - RNA, 21 nt, Human
auagaaaagaaaaagagagag

SEQ ID NO: 182379 - RNA, 19 nt, Human
auuaugcaaauuguuuucc

SEQ ID NO: 182380 - RNA, 22 nt, Human
cacacccucccgccucgcuccc

SEQ ID NO: 182381 - RNA, 19 nt, Human
cacagaguccaggacggca

SEQ ID NO: 182382 - RNA, 19 nt, Human
caccagggaagggcagggc

SEQ ID NO: 182383 - RNA, 24 nt, Human
cagccgcgcacacacacccucccg

SEQ ID NO: 182384 - RNA, 19 nt, Human
ccaggccggggccaccagg

SEQ ID NO: 182385 - RNA, 18 nt, Human
cccccgccgcccggucgc

SEQ ID NO: 182386 - RNA, 24 nt, Human
ccccgccgcccggucgcgcguccg

SEQ ID NO: 182387 - RNA, 20 nt, Human
cccgccggcaccccugcuca

SEQ ID NO: 182388 - RNA, 18 nt, Human
cccgggcacagcgcgggg

SEQ ID NO: 182389 - RNA, 19 nt, Human
ccgccgagcccccgccgcc

SEQ ID NO: 182390 - RNA, 19 nt, Human
ccgccgagcccccgccgcc

SEQ ID NO: 182391 - RNA, 20 nt, Human
ccgccgagcccccgccgccc

SEQ ID NO: 182392 - RNA, 23 nt, Human
ccgccgagcccccgccgcccggu

SEQ ID NO: 182393 - RNA, 19 nt, Human
ccgcgcacacacacccucc

SEQ ID NO: 182394 - RNA, 24 nt, Human
ccgcgcacacacacccucccgccu

SEQ ID NO: 182395 - RNA, 20 nt, Human
cgccucgcucccuugaggca

SEQ ID NO: 182396 - RNA, 21 nt, Human
cgggcacagcgcgggggcggc

SEQ ID NO: 182397 - RNA, 22 nt, Human
cugcagcccgccggcaccccug

SEQ ID NO: 182398 - RNA, 22 nt, Human
cuuccaaagugccuccgcugca

SEQ ID NO: 182399 - RNA, 22 nt, Human
gaaaaagagagagagacagaaa

SEQ ID NO: 182400 - RNA, 19 nt, Human
gacacgcucacacagaguc

SEQ ID NO: 182401 - RNA, 19 nt, Human
gcacacacacccucccgcc

SEQ ID NO: 182402 - RNA, 18 nt, Human
gcagcccgccggcacccc

SEQ ID NO: 182403 - RNA, 21 nt, Human
gccucgcucccuugaggcagc

SEQ ID NO: 182404 - RNA, 23 nt, Human
gcucacagccgcgcacacacacc

SEQ ID NO: 182405 - RNA, 20 nt, Human
ggcacagcgcgggggcggcg

SEQ ID NO: 182406 - RNA, 20 nt, Human
gggcacagcgcgggggcggc

SEQ ID NO: 182407 - RNA, 18 nt, Human
gggcgcggugggagcgga

SEQ ID NO: 182408 - RNA, 23 nt, Human
uacacugagucacaagguuugcc

SEQ ID NO: 182409 - RNA, 22 nt, Human
uagagaggaaaugugcugggaa

SEQ ID NO: 182410 - RNA, 19 nt, Human
uagcccaccagggaagggc

SEQ ID NO: 182411 - RNA, 20 nt, Human
uagcccaccagggaagggca

SEQ ID NO: 182412 - RNA, 23 nt, Human
uagcgggggaagaaaaaaaggga

SEQ ID NO: 182413 - RNA, 24 nt, Human
uaucuucaauagcccaccagggaa

SEQ ID NO: 182414 - RNA, 18 nt, Human
uccaaagugccuccgcug

SEQ ID NO: 182415 - RNA, 19 nt, Human
uccaaagugccuccgcugc

SEQ ID NO: 182416 - RNA, 19 nt, Human
uccacagaaauacaguccc

SEQ ID NO: 182417 - RNA, 20 nt, Human
ucccgggcacagcgcggggg

SEQ ID NO: 182418 - RNA, 22 nt, Human
uccgcugcagcccgccggcacc

SEQ ID NO: 182419 - RNA, 21 nt, Human
ugagaauuuaaaauacacuga

SEQ ID NO: 182420 - RNA, 19 nt, Human
ugccuaaaaaaagauagag

SEQ ID NO: 182421 - RNA, 23 nt, Human
uggccgccgagcccccgccgccc

SEQ ID NO: 182422 - RNA, 19 nt, Human
aaacauguggaaguugacu

SEQ ID NO: 182423 - RNA, 19 nt, Human
aacaucuaagcaagcugaa

SEQ ID NO: 182424 - RNA, 19 nt, Human
aacaucuaagcaagcugaa

SEQ ID NO: 182425 - RNA, 19 nt, Human
aaguucugucuccucccgg

SEQ ID NO: 182426 - RNA, 18 nt, Human
aauuuuuauuuugauuuu

SEQ ID NO: 182427 - RNA, 18 nt, Human
aauuuuuauuuugauuuu

SEQ ID NO: 182428 - RNA, 20 nt, Human
acaaggagaaucuggacggc

SEQ ID NO: 182429 - RNA, 19 nt, Human
accauguuguagcugcugc

SEQ ID NO: 182430 - RNA, 18 nt, Human
acccuaugaggugagaag

SEQ ID NO: 182431 - RNA, 18 nt, Human
acccuaugaggugagaag

SEQ ID NO: 182432 - RNA, 24 nt, Human
acgaaggugcaugcgcugaaugau

SEQ ID NO: 182433 - RNA, 25 nt, Human
acuccuucauccucccacagagccu

SEQ ID NO: 182434 - RNA, 19 nt, Human
acuuucucagcgagcagau

SEQ ID NO: 182435 - RNA, 24 nt, Human
acuuuuguggccuuuuuuccuuuu

SEQ ID NO: 182436 - RNA, 24 nt, Human
acuuuuguggccuuuuuuccuuuu

SEQ ID NO: 182437 - RNA, 20 nt, Human
agcaagaagaagggaugggg

SEQ ID NO: 182438 - RNA, 18 nt, Human
agcaccuaccuuccugac

SEQ ID NO: 182439 - RNA, 21 nt, Human
agcaccugaauccaugaaaac

SEQ ID NO: 182440 - RNA, 24 nt, Human
agcuggcccggaggucccagccuc

SEQ ID NO: 182441 - RNA, 19 nt, Human
aggaucacagagauggugc

SEQ ID NO: 182442 - RNA, 19 nt, Human
agggaacuuuuguggccuu

SEQ ID NO: 182443 - RNA, 19 nt, Human
agggaacuuuuguggccuu

SEQ ID NO: 182444 - RNA, 21 nt, Human
agggaugggaaaaaaggggaa

SEQ ID NO: 182445 - RNA, 26 nt, Human
caccacgaagaugauggcagucaacu

SEQ ID NO: 182446 - RNA, 19 nt, Human
caccugaauccaugaaaac

SEQ ID NO: 182447 - RNA, 21 nt, Human
cacugccaucgcuguugcucc

SEQ ID NO: 182448 - RNA, 21 nt, Human
caggcacgcacuccuucaucc

SEQ ID NO: 182449 - RNA, 24 nt, Human
cccacagagccuuggcaugcucag

SEQ ID NO: 182450 - RNA, 20 nt, Human
ccgaagcacauuggcugcug

SEQ ID NO: 182451 - RNA, 19 nt, Human
ccgguccucuugccuggga

SEQ ID NO: 182452 - RNA, 18 nt, Human
ccuccugcaggcgguugg

SEQ ID NO: 182453 - RNA, 23 nt, Human
ccucucugagcaagaagaaggga

SEQ ID NO: 182454 - RNA, 23 nt, Human
ccuggaacuuggucucaaagauu

SEQ ID NO: 182455 - RNA, 19 nt, Human
ccuuccugaccacuuaaga

SEQ ID NO: 182456 - RNA, 26 nt, Human
cgagcaaauucuggaaaguaguccuc

SEQ ID NO: 182457 - RNA, 26 nt, Human
cgcuguugcuccuugcagccugcggg

SEQ ID NO: 182458 - RNA, 23 nt, Human
cggaggucccagccucaccuccu

SEQ ID NO: 182459 - RNA, 18 nt, Human
cucaccuccuugugagga

SEQ ID NO: 182460 - RNA, 19 nt, Human
cuccacggggggcaccagg

SEQ ID NO: 182461 - RNA, 18 nt, Human
cucccgggcuccucucgc

SEQ ID NO: 182462 - RNA, 18 nt, Human
cucuucgccgcccucucc

SEQ ID NO: 182463 - RNA, 24 nt, Human
cuugccucucugagcaagaagaag

SEQ ID NO: 182464 - RNA, 23 nt, Human
cuugcuuguugaggaacaggauc

SEQ ID NO: 182465 - RNA, 21 nt, Human
cuuggcccgggucacgcgugg

SEQ ID NO: 182466 - RNA, 20 nt, Human
gaaaaagggaagcaccuacu

SEQ ID NO: 182467 - RNA, 20 nt, Human
gaagggaugggaaaaaaggg

SEQ ID NO: 182468 - RNA, 21 nt, Human
gacagaggagacugaggcgag

SEQ ID NO: 182469 - RNA, 21 nt, Human
gagcaagaagaagggauggga

SEQ ID NO: 182470 - RNA, 20 nt, Human
gauccucagaaacucaucuc

SEQ ID NO: 182471 - RNA, 23 nt, Human
gcagagagcggcuccgaagcaca

SEQ ID NO: 182472 - RNA, 18 nt, Human
gccuuuuuuccuuuuucu

SEQ ID NO: 182473 - RNA, 18 nt, Human
gccuuuuuuccuuuuucu

SEQ ID NO: 182474 - RNA, 22 nt, Human
gcggcggcggcggcggcggggc

SEQ ID NO: 182475 - RNA, 19 nt, Human
gcggcggcggcggcggggc

SEQ ID NO: 182476 - RNA, 22 nt, Human
gcggcggcggcggggcgcggcc

SEQ ID NO: 182477 - RNA, 23 nt, Human
ggacacggcagcgaagcaggucc

SEQ ID NO: 182478 - RNA, 20 nt, Human
ggaugaccauguuguagcug

SEQ ID NO: 182479 - RNA, 19 nt, Human
ggcccggaggucccagccu

SEQ ID NO: 182480 - RNA, 18 nt, Human
ggcggcggcggcggcggc

SEQ ID NO: 182481 - RNA, 19 nt, Human
ggcggcggcggcggcggcg

SEQ ID NO: 182482 - RNA, 19 nt, Human
ggcggcggcggcggcggcg

SEQ ID NO: 182483 - RNA, 30 nt, Human
ggggcgcggccgggcugcggcggcggcggg

SEQ ID NO: 182484 - RNA, 19 nt, Human
ggguccucuucgccgcccu

SEQ ID NO: 182485 - RNA, 21 nt, Human
ggugagaagcuggcccggagg

SEQ ID NO: 182486 - RNA, 20 nt, Human
gugcaugcgcugaaugaugu

SEQ ID NO: 182487 - RNA, 19 nt, Human
guuccagaugcucuugaag

SEQ ID NO: 182488 - RNA, 18 nt, Human
uaagaacuuucuaaagcu

SEQ ID NO: 182489 - RNA, 24 nt, Human
uaagcaagcugaagggaaaagggg

SEQ ID NO: 182490 - RNA, 24 nt, Human
uaagcaagcugaagggaaaagggg

SEQ ID NO: 182491 - RNA, 20 nt, Human
uaaugcugcacaacacaaua

SEQ ID NO: 182492 - RNA, 21 nt, Human
uaaugcugcacaacacaauau

SEQ ID NO: 182493 - RNA, 24 nt, Human
uacaauuacguuucacuuuuaauu

SEQ ID NO: 182494 - RNA, 24 nt, Human
uacaauuacguuucacuuuuaauu

SEQ ID NO: 182495 - RNA, 18 nt, Human
uacuuggcccgggucacg

SEQ ID NO: 182496 - RNA, 25 nt, Human
uagauuccgcagccuaagacucgag

SEQ ID NO: 182497 - RNA, 23 nt, Human
ucacucgggggaagggaaagguu

SEQ ID NO: 182498 - RNA, 23 nt, Human
ucacucgggggaagggaaagguu

SEQ ID NO: 182499 - RNA, 24 nt, Human
ucacucgggggaagggaaagguug

SEQ ID NO: 182500 - RNA, 24 nt, Human
ucacucgggggaagggaaagguug

SEQ ID NO: 182501 - RNA, 25 nt, Human
uccgggcucgggaguagcauccucc

SEQ ID NO: 182502 - RNA, 24 nt, Human
uccucuucgccgcccucuccauua

SEQ ID NO: 182503 - RNA, 24 nt, Human
uccuuuuucuguaggccgccuuaa

SEQ ID NO: 182504 - RNA, 24 nt, Human
uccuuuuucuguaggccgccuuaa

SEQ ID NO: 182505 - RNA, 18 nt, Human
ucucaaagauuccagaag

SEQ ID NO: 182506 - RNA, 23 nt, Human
ucucaaagauuccagaagucagg

SEQ ID NO: 182507 - RNA, 21 nt, Human
ucuccacuggcagugcugauc

SEQ ID NO: 182508 - RNA, 19 nt, Human
ucuccagcaccugaaucca

SEQ ID NO: 182509 - RNA, 22 nt, Human
ucucgaaugaaguacuuggccc

SEQ ID NO: 182510 - RNA, 21 nt, Human
ucugcagagagcggcuccgaa

SEQ ID NO: 182511 - RNA, 20 nt, Human
ucugucuccucccgggcucc

SEQ ID NO: 182512 - RNA, 23 nt, Human
ucuuagauuccgcagccuaagac

SEQ ID NO: 182513 - RNA, 20 nt, Human
ugacgaaggugcaugcgcug

SEQ ID NO: 182514 - RNA, 19 nt, Human
ugaggugagaagcuggccc

SEQ ID NO: 182515 - RNA, 21 nt, Human
ugaggugagaagcuggcccgg

SEQ ID NO: 182516 - RNA, 22 nt, Human
ugagucuuagauuccgcagccu

SEQ ID NO: 182517 - RNA, 24 nt, Human
ugaucacgucgaucuuguccagga

SEQ ID NO: 182518 - RNA, 18 nt, Human
ugccaucgcuguugcucc

SEQ ID NO: 182519 - RNA, 23 nt, Human
uggcagugcugauccucagaaac

SEQ ID NO: 182520 - RNA, 24 nt, Human
uggcagugcugauccucagaaacu

SEQ ID NO: 182521 - RNA, 19 nt, Human
uggcaugcucauagaauuc

SEQ ID NO: 182522 - RNA, 20 nt, Human
uggcccggaggucccagccu

SEQ ID NO: 182523 - RNA, 22 nt, Human
ugggagaggacagaggagacug

SEQ ID NO: 182524 - RNA, 24 nt, Human
uggugcgcagccaucuguuguucc

SEQ ID NO: 182525 - RNA, 18 nt, Human
uggugggugauuaacugc

SEQ ID NO: 182526 - RNA, 18 nt, Human
uggugggugauuaacugc

SEQ ID NO: 182527 - RNA, 24 nt, Human
ugucacggcagucguugaacacac

SEQ ID NO: 182528 - RNA, 25 nt, Human
ugucacggcagucguugaacacacg

SEQ ID NO: 182529 - RNA, 22 nt, Human
uguggccuuuuuuccuuuuucu

SEQ ID NO: 182530 - RNA, 22 nt, Human
uguggccuuuuuuccuuuuucu

SEQ ID NO: 182531 - RNA, 23 nt, Human
uguugaggaacaggaucacagag

SEQ ID NO: 182532 - RNA, 25 nt, Human
uuaauuuuuauuuugauuuuuuuua

SEQ ID NO: 182533 - RNA, 20 nt, Human
uugauguccugcacuuuggu

SEQ ID NO: 182534 - RNA, 24 nt, Human
uugcuccuugcagccugcgggucc

SEQ ID NO: 182535 - RNA, 23 nt, Human
uuggaacaucuaagcaagcugaa

SEQ ID NO: 182536 - RNA, 21 nt, Human
uuggucucaaagauuccagaa

SEQ ID NO: 182537 - RNA, 26 nt, Human
uuuaauuuuuauuuugauuuuuuuua

SEQ ID NO: 182538 - RNA, 26 nt, Human
uuuaauuuuuauuuugauuuuuuuua

SEQ ID NO: 182539 - RNA, 23 nt, Human
uuuguggccuuuuuuccuuuuuc

SEQ ID NO: 182540 - RNA, 23 nt, Human
uuuguggccuuuuuuccuuuuuc

SEQ ID NO: 182541 - RNA, 24 nt, Human
uuuguggccuuuuuuccuuuuucu

SEQ ID NO: 182542 - RNA, 24 nt, Human
uuuguggccuuuuuuccuuuuucu

SEQ ID NO: 182543 - RNA, 27 nt, Human
uuuguuugcugcugcuguuuuauuuau

SEQ ID NO: 182544 - RNA, 23 nt, Human
uuuuaccagauucuccagcaccu

SEQ ID NO: 182545 - RNA, 23 nt, Human
uuuuguggccuuuuuuccuuuuu

SEQ ID NO: 182546 - RNA, 23 nt, Human
uuuuguggccuuuuuuccuuuuu

SEQ ID NO: 182547 - RNA, 19 nt, Human
agcaggugguucuucugga

SEQ ID NO: 182548 - RNA, 23 nt, Human
cagcagcaggcgaagggacagag

SEQ ID NO: 182549 - RNA, 20 nt, Human
cccgacugcagcacaggccc

SEQ ID NO: 182550 - RNA, 22 nt, Human
ccucccaggcacccuucuggcc

SEQ ID NO: 182551 - RNA, 22 nt, Human
cgaagggacagagugagcaggu

SEQ ID NO: 182552 - RNA, 18 nt, Human
cucccaggcacccuucug

SEQ ID NO: 182553 - RNA, 24 nt, Human
gagcaggugguucuucuggaugga

SEQ ID NO: 182554 - RNA, 21 nt, Human
gcaggcgaagggacagaguga

SEQ ID NO: 182555 - RNA, 19 nt, Human
gccccaggaggaccugcaa

SEQ ID NO: 182556 - RNA, 19 nt, Human
ggagugcaaauugugcccc

SEQ ID NO: 182557 - RNA, 21 nt, Human
ggauggaggggauccccagaa

SEQ ID NO: 182558 - RNA, 21 nt, Human
ggggagugcaaauugugcccc

SEQ ID NO: 182559 - RNA, 21 nt, Human
ucccaggcacccuucuggccc

SEQ ID NO: 182560 - RNA, 22 nt, Human
ucccaggcacccuucuggcccc

SEQ ID NO: 182561 - RNA, 25 nt, Human
uccccagaaccuggccucccaggca

SEQ ID NO: 182562 - RNA, 23 nt, Human
uccccgacugcagcacaggcccu

SEQ ID NO: 182563 - RNA, 18 nt, Human
uggccucccaggcacccu

SEQ ID NO: 182564 - RNA, 19 nt, Human
acuccaucuccaaagaaug

SEQ ID NO: 182565 - RNA, 22 nt, Human
caacuuggcuccccuaaaagcu

SEQ ID NO: 182566 - RNA, 22 nt, Human
caguuuuguauuaaguuggaaa

SEQ ID NO: 182567 - RNA, 20 nt, Human
ccaguacuggaaccugugcu

SEQ ID NO: 182568 - RNA, 21 nt, Human
ccaucuccaaagaauggauuc

SEQ ID NO: 182569 - RNA, 19 nt, Human
cgauggcaggugagagagc

SEQ ID NO: 182570 - RNA, 21 nt, Human
gagacucccuacuucaacugg

SEQ ID NO: 182571 - RNA, 24 nt, Human
guagggucuuguacucugccuaca

SEQ ID NO: 182572 - RNA, 19 nt, Human
ucuccaaagaauggauuca

SEQ ID NO: 182573 - RNA, 18 nt, Human
ugaaaagaacguaugaaa

SEQ ID NO: 182574 - RNA, 19 nt, Human
ugaaaagaacguaugaaau

SEQ ID NO: 182575 - RNA, 19 nt, Human
ugagauggaagagaaggaa

SEQ ID NO: 182576 - RNA, 20 nt, Human
ugcaauagcuaucccacuuu

SEQ ID NO: 182577 - RNA, 23 nt, Human
uggaaaaccaguacuggaaccug

SEQ ID NO: 182578 - RNA, 22 nt, Human
uggaagagaaggaaaaaaguug

SEQ ID NO: 182579 - RNA, 23 nt, Human
ugggauugaguaucccaacuugg

SEQ ID NO: 182580 - RNA, 19 nt, Human
uugaguaucccaacuuggc

SEQ ID NO: 182581 - RNA, 24 nt, Human
uuucaggccccuaauccucucucg

SEQ ID NO: 182582 - RNA, 31 nt, Human
aaaaaaaaaaaaaaaccaaaaaacaaaaaag

SEQ ID NO: 182583 - RNA, 23 nt, Human
aaaaaaaaccaaaaaacaaaaaa

SEQ ID NO: 182584 - RNA, 23 nt, Human
aaaaaaaccaaaaaacaaaaaac

SEQ ID NO: 182585 - RNA, 26 nt, Human
aaaaaacaaaaaaaaaugccagagaa

SEQ ID NO: 182586 - RNA, 26 nt, Human
aaaaaacaaaaaacaaaaaaaaaugc

SEQ ID NO: 182587 - RNA, 22 nt, Human
aaaaaagaccaccugaaaaaaa

SEQ ID NO: 182588 - RNA, 22 nt, Human
aaaacaaaaaaaaaugccagag

SEQ ID NO: 182589 - RNA, 23 nt, Human
aaaacaaaaaaaaaugccagaga

SEQ ID NO: 182590 - RNA, 29 nt, Human
aaacaaaaaacaaaaaaaaaugccagagg

SEQ ID NO: 182591 - RNA, 19 nt, Human
aaacaaagcagaaaacccc

SEQ ID NO: 182592 - RNA, 19 nt, Human
aaccaaaaaacaaaaaaca

SEQ ID NO: 182593 - RNA, 20 nt, Human
aaccaaaaaacaaaaaacaa

SEQ ID NO: 182594 - RNA, 21 nt, Human
aaccaaaaaacaaaaaacaaa

SEQ ID NO: 182595 - RNA, 26 nt, Human
aaccaaaaaacaaaaaacaaaaaaaa

SEQ ID NO: 182596 - RNA, 19 nt, Human
aagaauacucaacugcauu

SEQ ID NO: 182597 - RNA, 21 nt, Human
aagacacuuagcuauuguuca

SEQ ID NO: 182598 - RNA, 19 nt, Human
aagcuguuuuuuaaaaaga

SEQ ID NO: 182599 - RNA, 24 nt, Human
acaaaaaagaccaccugaaaaaaa

SEQ ID NO: 182600 - RNA, 23 nt, Human
acauucuuuaggcccccuguuuu

SEQ ID NO: 182601 - RNA, 24 nt, Human
acucagcaaagccacaaauaauuu

SEQ ID NO: 182602 - RNA, 18 nt, Human
acugcagaggcuuaugua

SEQ ID NO: 182603 - RNA, 22 nt, Human
agaaggaaaaccagguuuugau

SEQ ID NO: 182604 - RNA, 22 nt, Human
agacacaaaaaagaccaccuga

SEQ ID NO: 182605 - RNA, 18 nt, Human
agacacuuagcuauuguu

SEQ ID NO: 182606 - RNA, 21 nt, Human
agagacagaucguccagauaa

SEQ ID NO: 182607 - RNA, 22 nt, Human
agcaagccagacacaaaaaaga

SEQ ID NO: 182608 - RNA, 22 nt, Human
aggcagaggccaaggggugggg

SEQ ID NO: 182609 - RNA, 24 nt, Human
aggcagaggccaagggguggggga

SEQ ID NO: 182610 - RNA, 19 nt, Human
aggcaggcgccccgggccc

SEQ ID NO: 182611 - RNA, 23 nt, Human
aggccagagcucgggcagcgagc

SEQ ID NO: 182612 - RNA, 22 nt, Human
aggcgcggggcaugcugggacc

SEQ ID NO: 182613 - RNA, 19 nt, Human
agucuucaagagaccucga

SEQ ID NO: 182614 - RNA, 21 nt, Human
auaggcaggcgccccgggccc

SEQ ID NO: 182615 - RNA, 22 nt, Human
augugugugugugcaugugugu

SEQ ID NO: 182616 - RNA, 22 nt, Human
augugugugugugcaugugugu

SEQ ID NO: 182617 - RNA, 32 nt, Human
caaaaaaaaaaaaaaaaccaaaaaacaaaaaa

SEQ ID NO: 182618 - RNA, 26 nt, Human
caaaaaacaaaaaaaaaugccagaga

SEQ ID NO: 182619 - RNA, 20 nt, Human
caaagcagaaaaccccaccc

SEQ ID NO: 182620 - RNA, 18 nt, Human
caagccagacacaaaaaa

SEQ ID NO: 182621 - RNA, 24 nt, Human
cacaaaaaagaccaccugaaaaaa

SEQ ID NO: 182622 - RNA, 24 nt, Human
cacagacccugcacugguccuccc

SEQ ID NO: 182623 - RNA, 18 nt, Human
caccauaggcaggcgccc

SEQ ID NO: 182624 - RNA, 18 nt, Human
caccauuaacaagaggac

SEQ ID NO: 182625 - RNA, 23 nt, Human
cagaaaaccccaccauuaacaag

SEQ ID NO: 182626 - RNA, 22 nt, Human
cagaaugaaauggugcugagca

SEQ ID NO: 182627 - RNA, 22 nt, Human
cagcagggaaggugcacagacc

SEQ ID NO: 182628 - RNA, 21 nt, Human
cagcuacugcacagagagagg

SEQ ID NO: 182629 - RNA, 21 nt, Human
caggggcaccaccccuugcuc

SEQ ID NO: 182630 - RNA, 19 nt, Human
caggguauuuuauuuucuu

SEQ ID NO: 182631 - RNA, 18 nt, Human
cagggucccagcagggcc

SEQ ID NO: 182632 - RNA, 24 nt, Human
ccaaaaaaaaaaaaaaaaccaaaa

SEQ ID NO: 182633 - RNA, 21 nt, Human
ccagaaugaaauggugcugag

SEQ ID NO: 182634 - RNA, 21 nt, Human
cccaccauuaacaagaggagg

SEQ ID NO: 182635 - RNA, 23 nt, Human
ccccaccauuaacaagaggacac

SEQ ID NO: 182636 - RNA, 31 nt, Human
ccccuugcuccccuuccuucacucagcaaaa

SEQ ID NO: 182637 - RNA, 20 nt, Human
cccugcacugguccucccuc

SEQ ID NO: 182638 - RNA, 18 nt, Human
ccggcagugccucuccuc

SEQ ID NO: 182639 - RNA, 18 nt, Human
ccuaggccagagcucggg

SEQ ID NO: 182640 - RNA, 19 nt, Human
ccuccaggugacaggggug

SEQ ID NO: 182641 - RNA, 22 nt, Human
ccucccucaggccacaacgcug

SEQ ID NO: 182642 - RNA, 22 nt, Human
cggcuccuaaggucccaggucc

SEQ ID NO: 182643 - RNA, 22 nt, Human
cucagcaagccagacacaaaaa

SEQ ID NO: 182644 - RNA, 21 nt, Human
cuccggcagugccucuccucu

SEQ ID NO: 182645 - RNA, 23 nt, Human
cugaaaaaaaauauguuuugaaa

SEQ ID NO: 182646 - RNA, 20 nt, Human
cugguccucccucuugguca

SEQ ID NO: 182647 - RNA, 19 nt, Human
cugugauuccgcacacuga

SEQ ID NO: 182648 - RNA, 21 nt, Human
cuucacguccuuggcugugau

SEQ ID NO: 182649 - RNA, 20 nt, Human
cuuuaggcccccuguuuucu

SEQ ID NO: 182650 - RNA, 22 nt, Human
gaaaaaaaauauguuuugaaaa

SEQ ID NO: 182651 - RNA, 26 nt, Human
gaaacaccacgagauuuggccaaaaa

SEQ ID NO: 182652 - RNA, 21 nt, Human
gaggcagaggccaaggggugg

SEQ ID NO: 182653 - RNA, 23 nt, Human
gcagggccucccucaggccacaa

SEQ ID NO: 182654 - RNA, 19 nt, Human
gccaaaaaaaaaaaaaaaa

SEQ ID NO: 182655 - RNA, 20 nt, Human
gcccagaucagggucccagc

SEQ ID NO: 182656 - RNA, 18 nt, Human
gcccugggacaggaaggc

SEQ ID NO: 182657 - RNA, 20 nt, Human
gcccugggacaggaaggccc

SEQ ID NO: 182658 - RNA, 18 nt, Human
gcggggcaugcugggacc

SEQ ID NO: 182659 - RNA, 20 nt, Human
gcuccggcagugccucuccu

SEQ ID NO: 182660 - RNA, 21 nt, Human
gcugugauuccgcacacugac

SEQ ID NO: 182661 - RNA, 18 nt, Human
ggaaggugcacagacccu

SEQ ID NO: 182662 - RNA, 20 nt, Human
ggccaacucaggaaggcaaa

SEQ ID NO: 182663 - RNA, 24 nt, Human
ggggcaugcugggaccaggggcac

SEQ ID NO: 182664 - RNA, 18 nt, Human
ggggccaaggaggcagag

SEQ ID NO: 182665 - RNA, 20 nt, Human
ggugcacagacccugcacug

SEQ ID NO: 182666 - RNA, 19 nt, Human
guggguuucaccauaggca

SEQ ID NO: 182667 - RNA, 19 nt, Human
gugugugcaugugugugug

SEQ ID NO: 182668 - RNA, 23 nt, Human
uaaaaacaaagcagaaaacccca

SEQ ID NO: 182669 - RNA, 18 nt, Human
uaaaaagagcugugagug

SEQ ID NO: 182670 - RNA, 21 nt, Human
uaacaagaggacacugcagag

SEQ ID NO: 182671 - RNA, 22 nt, Human
uagaagaaaagcuggaauccca

SEQ ID NO: 182672 - RNA, 24 nt, Human
uagaggauuuugccaucuccagau

SEQ ID NO: 182673 - RNA, 21 nt, Human
ucaggcgcggggcaugcuggg

SEQ ID NO: 182674 - RNA, 22 nt, Human
ucccaggugaaagaaccuucuu

SEQ ID NO: 182675 - RNA, 23 nt, Human
uccccagcuucucuuucccccgu

SEQ ID NO: 182676 - RNA, 23 nt, Human
ugaaaaaaaauauguuuugaaaa

SEQ ID NO: 182677 - RNA, 24 nt, Human
ugacaccccguggguuucaccaua

SEQ ID NO: 182678 - RNA, 22 nt, Human
ugagcagcugugugcaggccag

SEQ ID NO: 182679 - RNA, 18 nt, Human
ugcauauuuugaagcugu

SEQ ID NO: 182680 - RNA, 22 nt, Human
ugcauuugaaauuuucuggauu

SEQ ID NO: 182681 - RNA, 18 nt, Human
ugccagagaaggaaaacc

SEQ ID NO: 182682 - RNA, 21 nt, Human
ugccucagcccugcugccuau

SEQ ID NO: 182683 - RNA, 25 nt, Human
uggccaaaaaaaaaaaaaaaaccaa

SEQ ID NO: 182684 - RNA, 20 nt, Human
uggcugugauuccgcacacu

SEQ ID NO: 182685 - RNA, 20 nt, Human
ugggaccaggggcaccaccc

SEQ ID NO: 182686 - RNA, 21 nt, Human
ugugauuccgcacacugaccu

SEQ ID NO: 182687 - RNA, 19 nt, Human
ugugugugugcaugugugu

SEQ ID NO: 182688 - RNA, 20 nt, Human
ugugugugugcaugugugug

SEQ ID NO: 182689 - RNA, 21 nt, Human
ugugugugugugcaugugugu

SEQ ID NO: 182690 - RNA, 22 nt, Human
ugugugugugugcaugugugug

SEQ ID NO: 182691 - RNA, 22 nt, Human
ugugugugugugcaugugugug

SEQ ID NO: 182692 - RNA, 22 nt, Human
uguuguauugguuuuugcugca

SEQ ID NO: 182693 - RNA, 19 nt, Human
uguuugcagaaaugugggg

SEQ ID NO: 182694 - RNA, 21 nt, Human
uugacuuucauccaaucccca

SEQ ID NO: 182695 - RNA, 23 nt, Human
uuggccaaaaaaaaaaaaaaaac

SEQ ID NO: 182696 - RNA, 21 nt, Human
uuuacacucagcaagccagac

SEQ ID NO: 182697 - RNA, 21 nt, Human
uuugccaucuccagaugugug

SEQ ID NO: 182698 - RNA, 25 nt, Human
aaaaaggaaauaugaaugcuuccaa

SEQ ID NO: 182699 - RNA, 26 nt, Human
aaaaaggaaauaugaaugcuuccaaa

SEQ ID NO: 182700 - RNA, 27 nt, Human
aaaaaggaaauaugaaugcuuccaaaa

SEQ ID NO: 182701 - RNA, 20 nt, Human
aaaacaaagacgauggcccc

SEQ ID NO: 182702 - RNA, 23 nt, Human
aaagaaaaagaacaccuaaggac

SEQ ID NO: 182703 - RNA, 23 nt, Human
aaagaacaccuaaggacugaguc

SEQ ID NO: 182704 - RNA, 18 nt, Human
aacaaagcccucagcaug

SEQ ID NO: 182705 - RNA, 20 nt, Human
aaccugcuuuccaaacgcug

SEQ ID NO: 182706 - RNA, 21 nt, Human
aagaaaaagaacaccuaagga

SEQ ID NO: 182707 - RNA, 25 nt, Human
aagaaaacaaagacgauggccccgg

SEQ ID NO: 182708 - RNA, 25 nt, Human
aagacaaaaaagaaaacaaagacga

SEQ ID NO: 182709 - RNA, 24 nt, Human
aauaaagaaaacagugacuuaucc

SEQ ID NO: 182710 - RNA, 24 nt, Human
aauacaaaagguggaaagggguaa

SEQ ID NO: 182711 - RNA, 21 nt, Human
aauauggcaaacaaucaaaau

SEQ ID NO: 182712 - RNA, 18 nt, Human
acaaaaaagaaaacaaag

SEQ ID NO: 182713 - RNA, 23 nt, Human
acaaaaaagaaaacaaagacgau

SEQ ID NO: 182714 - RNA, 23 nt, Human
acaaaacagggucacuggucuaa

SEQ ID NO: 182715 - RNA, 28 nt, Human
acagagcagcaacgagaaguggacagag

SEQ ID NO: 182716 - RNA, 22 nt, Human
acaucagagaggcugcccuaga

SEQ ID NO: 182717 - RNA, 23 nt, Human
agaaaacaggauggagaagccac

SEQ ID NO: 182718 - RNA, 24 nt, Human
agaagauagacaggaugggucagg

SEQ ID NO: 182719 - RNA, 24 nt, Human
agacaaaaaagaaaacaaagacga

SEQ ID NO: 182720 - RNA, 26 nt, Human
agacaaaaaagaaaacaaaggggacc

SEQ ID NO: 182721 - RNA, 22 nt, Human
agacagaaaauuaaaaaccagg

SEQ ID NO: 182722 - RNA, 23 nt, Human
agacagaaaauuaaaaaccaggg

SEQ ID NO: 182723 - RNA, 21 nt, Human
agacgauggccccggaaggaa

SEQ ID NO: 182724 - RNA, 21 nt, Human
agcacagagaucuuucucuca

SEQ ID NO: 182725 - RNA, 21 nt, Human
agcacaggacaggcaucucuc

SEQ ID NO: 182726 - RNA, 24 nt, Human
aggaggaacauggugcuggaucug

SEQ ID NO: 182727 - RNA, 20 nt, Human
aggaggaacauggugcuggg

SEQ ID NO: 182728 - RNA, 24 nt, Human
agugcggggggcggggcggggggu

SEQ ID NO: 182729 - RNA, 20 nt, Human
auacaaaagguggaaagggg

SEQ ID NO: 182730 - RNA, 22 nt, Human
aucccgcuacccaagcguguag

SEQ ID NO: 182731 - RNA, 18 nt, Human
augaaugcuuccaaaauc

SEQ ID NO: 182732 - RNA, 23 nt, Human
auggcuucugaacauguucuuuu

SEQ ID NO: 182733 - RNA, 20 nt, Human
caacaucagagaggcugccc

SEQ ID NO: 182734 - RNA, 24 nt, Human
caagacaaaaaagaaaacaaagac

SEQ ID NO: 182735 - RNA, 21 nt, Human
cacucgccgcccgcucccgcc

SEQ ID NO: 182736 - RNA, 27 nt, Human
cagagcagcaacgagaaguggacagag

SEQ ID NO: 182737 - RNA, 20 nt, Human
cagauccaggccuaccgcaa

SEQ ID NO: 182738 - RNA, 18 nt, Human
cauggcuucugaacaugu

SEQ ID NO: 182739 - RNA, 25 nt, Human
ccaacagcagucguuugcaacagaa

SEQ ID NO: 182740 - RNA, 22 nt, Human
ccacaaaacagggucacugguc

SEQ ID NO: 182741 - RNA, 19 nt, Human
ccacccaauauggcaaaca

SEQ ID NO: 182742 - RNA, 19 nt, Human
ccaggccuaccgcaagguc

SEQ ID NO: 182743 - RNA, 22 nt, Human
ccagggacugaauuuacaucau

SEQ ID NO: 182744 - RNA, 24 nt, Human
cccaagcguguagagccgcgcgcu

SEQ ID NO: 182745 - RNA, 21 nt, Human
cccacaccgccgccucggccg

SEQ ID NO: 182746 - RNA, 20 nt, Human
cccacagaaccugcuuucca

SEQ ID NO: 182747 - RNA, 22 nt, Human
cccacagaaccugcuuuccaaa

SEQ ID NO: 182748 - RNA, 24 nt, Human
cccacagaaccugcuuuccaaacg

SEQ ID NO: 182749 - RNA, 20 nt, Human
cccacucgccgcccgcuccc

SEQ ID NO: 182750 - RNA, 21 nt, Human
ccccgcaugugcuuggccccu

SEQ ID NO: 182751 - RNA, 22 nt, Human
ccccgcuccccacucgccgccc

SEQ ID NO: 182752 - RNA, 18 nt, Human
cccggccccgcuccccac

SEQ ID NO: 182753 - RNA, 21 nt, Human
cccuccccacccucagaaucc

SEQ ID NO: 182754 - RNA, 21 nt, Human
cccucccucucucucccuccc

SEQ ID NO: 182755 - RNA, 21 nt, Human
cccucccucucucucccuccc

SEQ ID NO: 182756 - RNA, 20 nt, Human
ccgcaaggucacagcacagu

SEQ ID NO: 182757 - RNA, 18 nt, Human
ccgccgccgccgccgccg

SEQ ID NO: 182758 - RNA, 20 nt, Human
ccgccgccgccgccgccgcc

SEQ ID NO: 182759 - RNA, 18 nt, Human
ccgccgccgccgccuccg

SEQ ID NO: 182760 - RNA, 21 nt, Human
ccgccgccgccuccguccgcc

SEQ ID NO: 182761 - RNA, 22 nt, Human
ccgccgccgccuccguccgccc

SEQ ID NO: 182762 - RNA, 23 nt, Human
ccgccgccgccuccguccgcccc

SEQ ID NO: 182763 - RNA, 19 nt, Human
ccgccgccucggccgccgc

SEQ ID NO: 182764 - RNA, 20 nt, Human
ccgccgccucggccgccgcu

SEQ ID NO: 182765 - RNA, 21 nt, Human
ccucagaauccaacagcaguc

SEQ ID NO: 182766 - RNA, 21 nt, Human
ccuccguccgccccucagacg

SEQ ID NO: 182767 - RNA, 20 nt, Human
ccuuuugaaguucugagggg

SEQ ID NO: 182768 - RNA, 18 nt, Human
cgccgcccgcucccgcuc

SEQ ID NO: 182769 - RNA, 23 nt, Human
cgccgccgccgccgccgccuccg

SEQ ID NO: 182770 - RNA, 18 nt, Human
cgcgcccacaccgccgcc

SEQ ID NO: 182771 - RNA, 21 nt, Human
cgcucccgccgccgccgccgc

SEQ ID NO: 182772 - RNA, 18 nt, Human
cggccugacgcgcccaca

SEQ ID NO: 182773 - RNA, 19 nt, Human
cggggggucccacagaacc

SEQ ID NO: 182774 - RNA, 23 nt, Human
cuccacucccggccccgcucccc

SEQ ID NO: 182775 - RNA, 23 nt, Human
cuccauggcauccacaugcuacu

SEQ ID NO: 182776 - RNA, 24 nt, Human
cucccgccgccgccgccgccgccu

SEQ ID NO: 182777 - RNA, 23 nt, Human
cugacgcgcccacaccgccgccu

SEQ ID NO: 182778 - RNA, 20 nt, Human
gagcagcaacgagaagugga

SEQ ID NO: 182779 - RNA, 18 nt, Human
gagccaccucagaugugg

SEQ ID NO: 182780 - RNA, 22 nt, Human
gagccgcgcgcuguacugcuuc

SEQ ID NO: 182781 - RNA, 21 nt, Human
gcucggcaggucgucgcgcuc

SEQ ID NO: 182782 - RNA, 24 nt, Human
ggacugaauuuacaucauugacaa

SEQ ID NO: 182783 - RNA, 18 nt, Human
ggagugcggggggcgggg

SEQ ID NO: 182784 - RNA, 21 nt, Human
gggcuucuggucuggucucca

SEQ ID NO: 182785 - RNA, 30 nt, Human
gggucaggaggaacauggugcuggaucugg

SEQ ID NO: 182786 - RNA, 24 nt, Human
guccccgcaugugcuuggccccau

SEQ ID NO: 182787 - RNA, 20 nt, Human
gugcagagagcucuacagag

SEQ ID NO: 182788 - RNA, 19 nt, Human
guuugugugcaacaaugau

SEQ ID NO: 182789 - RNA, 19 nt, Human
uaaaaaggaaauaugaaug

SEQ ID NO: 182790 - RNA, 20 nt, Human
uaaaauuaaauacaaaaggu

SEQ ID NO: 182791 - RNA, 22 nt, Human
uaaagaaaacagugacuuaucc

SEQ ID NO: 182792 - RNA, 21 nt, Human
uaaauuugucucagcgcccuc

SEQ ID NO: 182793 - RNA, 24 nt, Human
uaagaguaaacccacccaauaugg

SEQ ID NO: 182794 - RNA, 27 nt, Human
uacagaguuguuggacggaaagagaaa

SEQ ID NO: 182795 - RNA, 22 nt, Human
uagaauguugcagaaaacagga

SEQ ID NO: 182796 - RNA, 24 nt, Human
uaggagggcaggcucuucacuccc

SEQ ID NO: 182797 - RNA, 18 nt, Human
uaugccacguuugugugc

SEQ ID NO: 182798 - RNA, 20 nt, Human
ucaagacaaaaaagaaaaca

SEQ ID NO: 182799 - RNA, 19 nt, Human
uccccgcaugugcuuggcc

SEQ ID NO: 182800 - RNA, 21 nt, Human
ucccgccgccgccgccgccgc

SEQ ID NO: 182801 - RNA, 19 nt, Human
ucccgcuacccaagcgugu

SEQ ID NO: 182802 - RNA, 24 nt, Human
ucccgcucccgccgccgccgccgc

SEQ ID NO: 182803 - RNA, 22 nt, Human
ucccucucucucccuccccacc

SEQ ID NO: 182804 - RNA, 18 nt, Human
uccgcgggcgcugcgggc

SEQ ID NO: 182805 - RNA, 19 nt, Human
ucggccgccgcucggcagg

SEQ ID NO: 182806 - RNA, 23 nt, Human
ucucucccuccccacccucagaa

SEQ ID NO: 182807 - RNA, 20 nt, Human
ucugacaauuacacucaagu

SEQ ID NO: 182808 - RNA, 24 nt, Human
ucugagaucauuauuuucaaaaca

SEQ ID NO: 182809 - RNA, 18 nt, Human
ugaacacuggccuugaaa

SEQ ID NO: 182810 - RNA, 18 nt, Human
ugaaggaaaaaagaucuu

SEQ ID NO: 182811 - RNA, 19 nt, Human
ugaaggagugcggggggcg

SEQ ID NO: 182812 - RNA, 21 nt, Human
ugaaguucugaggggaggugu

SEQ ID NO: 182813 - RNA, 20 nt, Human
ugacaacaucagagaggcug

SEQ ID NO: 182814 - RNA, 25 nt, Human
ugacugaaauuuggacacgaugacc

SEQ ID NO: 182815 - RNA, 20 nt, Human
ugacuuaucccgcuacccaa

SEQ ID NO: 182816 - RNA, 22 nt, Human
ugagaagauagacaggaugggu

SEQ ID NO: 182817 - RNA, 24 nt, Human
ugagaagauagacaggauggguca

SEQ ID NO: 182818 - RNA, 24 nt, Human
ugagaucauuauuuucaaaacauu

SEQ ID NO: 182819 - RNA, 21 nt, Human
ugccacagagcagcaacgaga

SEQ ID NO: 182820 - RNA, 19 nt, Human
ugcccuagacucucugguu

SEQ ID NO: 182821 - RNA, 20 nt, Human
ugcggggggcggggcggggg

SEQ ID NO: 182822 - RNA, 21 nt, Human
uggaaaagugugucugucuga

SEQ ID NO: 182823 - RNA, 18 nt, Human
uggaaagggguaagggug

SEQ ID NO: 182824 - RNA, 21 nt, Human
uggacggaaagagaaagaagg

SEQ ID NO: 182825 - RNA, 19 nt, Human
ugggucaggaggaacaugg

SEQ ID NO: 182826 - RNA, 21 nt, Human
ugguaacgcguccaaguugga

SEQ ID NO: 182827 - RNA, 20 nt, Human
ugugaugggaaugagccacc

SEQ ID NO: 182828 - RNA, 20 nt, Human
uguugaacacaaaggaauac

SEQ ID NO: 182829 - RNA, 21 nt, Human
uguugcagaaaacaggaugga

SEQ ID NO: 182830 - RNA, 22 nt, Human
uguugcagaaaacaggauggag

SEQ ID NO: 182831 - RNA, 21 nt, Human
uucuaugccacguuugugugc

SEQ ID NO: 182832 - RNA, 24 nt, Human
uucucugaucacgcauuugagacc

SEQ ID NO: 182833 - RNA, 20 nt, Human
uugaaaacagagguuccucc

SEQ ID NO: 182834 - RNA, 20 nt, Human
uuggacggaaagagaaagaa

SEQ ID NO: 182835 - RNA, 19 nt, Human
uuugagcauuucuacagca

SEQ ID NO: 182836 - RNA, 20 nt, Human
uuugugugcaacaaugaucu

SEQ ID NO: 182837 - RNA, 24 nt, Human
uuuugaaguucugaggggaggugu

SEQ ID NO: 182838 - RNA, 20 nt, Human
uuuuuuuuuuuuaaagaaau

SEQ ID NO: 182839 - RNA, 30 nt, Human
aaaaagccagccccugggguuuccaccucu

SEQ ID NO: 182840 - RNA, 23 nt, Human
aaaaccaguuuuaaaaaagccag

SEQ ID NO: 182841 - RNA, 19 nt, Human
aaaauuaaaauaaaaccag

SEQ ID NO: 182842 - RNA, 22 nt, Human
aaaccaguuuuaaaaaagccag

SEQ ID NO: 182843 - RNA, 25 nt, Human
aaccaguuuuaaaaaagccagcccc

SEQ ID NO: 182844 - RNA, 22 nt, Human
accccagggcagcagaaggaug

SEQ ID NO: 182845 - RNA, 19 nt, Human
agaguuggaauuggcuccu

SEQ ID NO: 182846 - RNA, 31 nt, Human
agccccugggguuuccaccuccugccuccgg

SEQ ID NO: 182847 - RNA, 21 nt, Human
agcgcugccuccccagagcgg

SEQ ID NO: 182848 - RNA, 19 nt, Human
aggcggcggcggcggcggc

SEQ ID NO: 182849 - RNA, 24 nt, Human
aggcggcggcggcggcggcggcgg

SEQ ID NO: 182850 - RNA, 23 nt, Human
auggaaaaacugaaaauauaaua

SEQ ID NO: 182851 - RNA, 24 nt, Human
auuccauccccuucuuaucuccac

SEQ ID NO: 182852 - RNA, 19 nt, Human
cagcagaaggaugagggcc

SEQ ID NO: 182853 - RNA, 24 nt, Human
cagccccugggguuuccaccuccu

SEQ ID NO: 182854 - RNA, 20 nt, Human
cagcuccuggccgcuggccc

SEQ ID NO: 182855 - RNA, 23 nt, Human
cagggacccaaggccccguggcc

SEQ ID NO: 182856 - RNA, 25 nt, Human
ccagccccgcagcccuggccuguaa

SEQ ID NO: 182857 - RNA, 21 nt, Human
ccagggcagcagaaggaugag

SEQ ID NO: 182858 - RNA, 18 nt, Human
cccaaggccccguggccc

SEQ ID NO: 182859 - RNA, 24 nt, Human
ccccgccgccagcgcugccucccc

SEQ ID NO: 182860 - RNA, 19 nt, Human
ccccguggcccggggaagg

SEQ ID NO: 182861 - RNA, 22 nt, Human
cccguggcccggggaagggggc

SEQ ID NO: 182862 - RNA, 18 nt, Human
ccgaggccuguggcggug

SEQ ID NO: 182863 - RNA, 22 nt, Human
ccgcagcccuggccuguagugu

SEQ ID NO: 182864 - RNA, 24 nt, Human
ccgccgccagcgcugccuccccag

SEQ ID NO: 182865 - RNA, 23 nt, Human
ccuccugccuccggcccuccaga

SEQ ID NO: 182866 - RNA, 21 nt, Human
ccucuucccccauuccauccc

SEQ ID NO: 182867 - RNA, 24 nt, Human
ccugggguuuccaccuccugccuc

SEQ ID NO: 182868 - RNA, 21 nt, Human
cggcccuccagaggggugagg

SEQ ID NO: 182869 - RNA, 22 nt, Human
cgggaggaaccaaaccugggug

SEQ ID NO: 182870 - RNA, 19 nt, Human
cgggcggcgcugucuuccu

SEQ ID NO: 182871 - RNA, 23 nt, Human
cuccucuucccccauuccauccc

SEQ ID NO: 182872 - RNA, 18 nt, Human
cuggccuguagugugggc

SEQ ID NO: 182873 - RNA, 25 nt, Human
cuucccccauuccauccccuucuua

SEQ ID NO: 182874 - RNA, 20 nt, Human
gccagccccgcagcccuggc

SEQ ID NO: 182875 - RNA, 24 nt, Human
gccccgggaggaaccaaaccuggg

SEQ ID NO: 182876 - RNA, 21 nt, Human
gccgccagcgcugccucccca

SEQ ID NO: 182877 - RNA, 20 nt, Human
gcgcugccuccccagagcgg

SEQ ID NO: 182878 - RNA, 21 nt, Human
gcgcugccuccccagagcgga

SEQ ID NO: 182879 - RNA, 23 nt, Human
gcggcggaggcggcggcggcggc

SEQ ID NO: 182880 - RNA, 20 nt, Human
gcggcggcggcggcggcggc

SEQ ID NO: 182881 - RNA, 20 nt, Human
gcggcggcggcggcggcggc

SEQ ID NO: 182882 - RNA, 20 nt, Human
gcggcggcggcggcggcggc

SEQ ID NO: 182883 - RNA, 23 nt, Human
gcggcggcggcggcggcggcggc

SEQ ID NO: 182884 - RNA, 23 nt, Human
gcggcggcggcggcggcggcggc

SEQ ID NO: 182885 - RNA, 23 nt, Human
gcggcggcggcggcggcggcggc

SEQ ID NO: 182886 - RNA, 23 nt, Human
gcggcggcggcggcggcggcggc

SEQ ID NO: 182887 - RNA, 20 nt, Human
ggacgggggcugggggaggc

SEQ ID NO: 182888 - RNA, 23 nt, Human
ggaggcggcggcggcggcggcgg

SEQ ID NO: 182889 - RNA, 23 nt, Human
ggagggcagggacccaaggcccc

SEQ ID NO: 182890 - RNA, 24 nt, Human
ggcaggguugggggcggcuggggg

SEQ ID NO: 182891 - RNA, 21 nt, Human
ggccugggcccagugggggug

SEQ ID NO: 182892 - RNA, 23 nt, Human
ggcggcggcggcggcggcggcgg

SEQ ID NO: 182893 - RNA, 23 nt, Human
ggcggcggcggcggcggcggcgg

SEQ ID NO: 182894 - RNA, 23 nt, Human
ggcggcggcggcggcggcggcgg

SEQ ID NO: 182895 - RNA, 18 nt, Human
ggcugggggaggcagcuc

SEQ ID NO: 182896 - RNA, 25 nt, Human
gggcaggguugggggcggcuggggg

SEQ ID NO: 182897 - RNA, 22 nt, Human
gggugaggccccaaccccaggg

SEQ ID NO: 182898 - RNA, 21 nt, Human
guggcggugggacucugcggc

SEQ ID NO: 182899 - RNA, 21 nt, Human
uaaaaaagccagccccugggg

SEQ ID NO: 182900 - RNA, 24 nt, Human
uccacagugggggccccgggagga

SEQ ID NO: 182901 - RNA, 18 nt, Human
ucccccauuccauccccu

SEQ ID NO: 182902 - RNA, 19 nt, Human
uccccuucuuaucuccaca

SEQ ID NO: 182903 - RNA, 18 nt, Human
uccucaguggccccagcc

SEQ ID NO: 182904 - RNA, 21 nt, Human
uccuggccgcuggcccgaggc

SEQ ID NO: 182905 - RNA, 22 nt, Human
ugaggccccaaccccagggcag

SEQ ID NO: 182906 - RNA, 26 nt, Human
uggaaaaacugaaaauauaauaaaaa

SEQ ID NO: 182907 - RNA, 20 nt, Human
uggcccgaggccuguggcgg

SEQ ID NO: 182908 - RNA, 21 nt, Human
uggccugggcccagugggggu

SEQ ID NO: 182909 - RNA, 24 nt, Human
ugggagggcagggacccaaggccc

SEQ ID NO: 182910 - RNA, 22 nt, Human
ugggcagggccccuccuggccu

SEQ ID NO: 182911 - RNA, 25 nt, Human
ugggggccgcgggacgggggcuggg

SEQ ID NO: 182912 - RNA, 22 nt, Human
ugggggcggcugggggccgcgg

SEQ ID NO: 182913 - RNA, 21 nt, Human
ugggugggagggcagggaccc

SEQ ID NO: 182914 - RNA, 19 nt, Human
uguagugugggcaugggca

SEQ ID NO: 182915 - RNA, 23 nt, Human
uuuccaccuccugccuccggccc

SEQ ID NO: 182916 - RNA, 22 nt, Human
uuuuuuuuuuuuuuuuuuacag

SEQ ID NO: 182917 - RNA, 25 nt, Human
aagucugcugggccugcaaagggcu

SEQ ID NO: 182918 - RNA, 22 nt, Human
agagaaaaaaagguagaaaaag

SEQ ID NO: 182919 - RNA, 20 nt, Human
agagaaggauggacaggucu

SEQ ID NO: 182920 - RNA, 19 nt, Human
agccauagucacagggcca

SEQ ID NO: 182921 - RNA, 25 nt, Human
agcuggccuggccuggccuggcccc

SEQ ID NO: 182922 - RNA, 19 nt, Human
aggagcuggccuggccugg

SEQ ID NO: 182923 - RNA, 18 nt, Human
aggcaggagcugagauua

SEQ ID NO: 182924 - RNA, 18 nt, Human
agggagaggcugugagga

SEQ ID NO: 182925 - RNA, 21 nt, Human
agggagaggcugugaggacug

SEQ ID NO: 182926 - RNA, 19 nt, Human
agguaguggcucuggggga

SEQ ID NO: 182927 - RNA, 23 nt, Human
caaaccccaaccagcugccucug

SEQ ID NO: 182928 - RNA, 20 nt, Human
caccugaaugagaugggguc

SEQ ID NO: 182929 - RNA, 21 nt, Human
cagagccauagucacagggcc

SEQ ID NO: 182930 - RNA, 18 nt, Human
cagcuccgguuccuggga

SEQ ID NO: 182931 - RNA, 23 nt, Human
cagcugcgacgcccgcgcccgcc

SEQ ID NO: 182932 - RNA, 20 nt, Human
cagggggcugcugagugugu

SEQ ID NO: 182933 - RNA, 20 nt, Human
cagggugguggggaagaggg

SEQ ID NO: 182934 - RNA, 25 nt, Human
caggugucuuaggagagaaaaaaag

SEQ ID NO: 182935 - RNA, 23 nt, Human
ccaugcuccccacugcccucaaa

SEQ ID NO: 182936 - RNA, 23 nt, Human
ccccugugucccugaugcugccu

SEQ ID NO: 182937 - RNA, 20 nt, Human
cccgcgcccgcccgucaccu

SEQ ID NO: 182938 - RNA, 19 nt, Human
cccuauaccacccaggccu

SEQ ID NO: 182939 - RNA, 20 nt, Human
ccgcgcccgcccgucaccug

SEQ ID NO: 182940 - RNA, 18 nt, Human
ccuagggccuggggccuc

SEQ ID NO: 182941 - RNA, 21 nt, Human
ccugaugcugccucccaaagg

SEQ ID NO: 182942 - RNA, 18 nt, Human
ccugcaaagggcugggga

SEQ ID NO: 182943 - RNA, 24 nt, Human
cgucaccugcccaggcucugcugc

SEQ ID NO: 182944 - RNA, 21 nt, Human
cucagcugcgacgcccgcgcc

SEQ ID NO: 182945 - RNA, 19 nt, Human
cucuggcuggaccucggcc

SEQ ID NO: 182946 - RNA, 22 nt, Human
cugccucccaaaggcacagucc

SEQ ID NO: 182947 - RNA, 26 nt, Human
cuuaggagagaaaaaaagguagaaaa

SEQ ID NO: 182948 - RNA, 23 nt, Human
gaaagguacaggggacccacaga

SEQ ID NO: 182949 - RNA, 21 nt, Human
gacaaaccccaaccagcugcc

SEQ ID NO: 182950 - RNA, 18 nt, Human
gacuguggggagggaagg

SEQ ID NO: 182951 - RNA, 20 nt, Human
gagauggggucgggcagggg

SEQ ID NO: 182952 - RNA, 21 nt, Human
gccaaacgcccuauaccaccc

SEQ ID NO: 182953 - RNA, 21 nt, Human
gccauagucacagggccaaac

SEQ ID NO: 182954 - RNA, 21 nt, Human
gcccuauaccacccaggccug

SEQ ID NO: 182955 - RNA, 21 nt, Human
gcccucaaaggagaaagcuua

SEQ ID NO: 182956 - RNA, 18 nt, Human
gccucugggucugauccu

SEQ ID NO: 182957 - RNA, 22 nt, Human
gcugcugaguguguucacugcc

SEQ ID NO: 182958 - RNA, 21 nt, Human
ggaggaauccuagggccuggg

SEQ ID NO: 182959 - RNA, 21 nt, Human
ggagggaaggccaugggagga

SEQ ID NO: 182960 - RNA, 20 nt, Human
ggcacagucccaugcucccc

SEQ ID NO: 182961 - RNA, 19 nt, Human
ggcacccggaauauagaag

SEQ ID NO: 182962 - RNA, 19 nt, Human
ggcgggggguugggggggc

SEQ ID NO: 182963 - RNA, 18 nt, Human
gggagggaaggccauggg

SEQ ID NO: 182964 - RNA, 19 nt, Human
ggggaggaauccuagggcc

SEQ ID NO: 182965 - RNA, 22 nt, Human
ggugguggggaagaggguuugg

SEQ ID NO: 182966 - RNA, 21 nt, Human
gucaccugcccaggcucugcu

SEQ ID NO: 182967 - RNA, 24 nt, Human
guucacugccuuccacuucccuuc

SEQ ID NO: 182968 - RNA, 19 nt, Human
uagaagagaacaccugaau

SEQ ID NO: 182969 - RNA, 22 nt, Human
uagaagagaacaccugaauggu

SEQ ID NO: 182970 - RNA, 23 nt, Human
uauaccacccaggccuggacaaa

SEQ ID NO: 182971 - RNA, 23 nt, Human
uccacuucccuuucuccagccuc

SEQ ID NO: 182972 - RNA, 23 nt, Human
ucccaaaggcacagucccaugcu

SEQ ID NO: 182973 - RNA, 24 nt, Human
uccccacugcccucaaaggagaaa

SEQ ID NO: 182974 - RNA, 18 nt, Human
ucccugaugcugccuccc

SEQ ID NO: 182975 - RNA, 19 nt, Human
ucuggauaauccuucuucu

SEQ ID NO: 182976 - RNA, 24 nt, Human
ucuggcucuugggcucuggcugga

SEQ ID NO: 182977 - RNA, 22 nt, Human
ucuugggcucuggcuggaccuc

SEQ ID NO: 182978 - RNA, 18 nt, Human
ugagauggggucgggcag

SEQ ID NO: 182979 - RNA, 18 nt, Human
ugagauuagaaaggacug

SEQ ID NO: 182980 - RNA, 21 nt, Human
ugaugcugccucccaaaggca

SEQ ID NO: 182981 - RNA, 19 nt, Human
ugccagaggagcuggccug

SEQ ID NO: 182982 - RNA, 22 nt, Human
uggaccucggccggguuuccag

SEQ ID NO: 182983 - RNA, 24 nt, Human
uggccuggccuggccccgaccggc

SEQ ID NO: 182984 - RNA, 24 nt, Human
ugggagccuccuuacucccucagc

SEQ ID NO: 182985 - RNA, 18 nt, Human
ugggaggagauggggcag

SEQ ID NO: 182986 - RNA, 19 nt, Human
ugggaggagauggggcagu

SEQ ID NO: 182987 - RNA, 23 nt, Human
ugggaggagauggggcaguucuu

SEQ ID NO: 182988 - RNA, 20 nt, Human
uggggaagaggguuugguga

SEQ ID NO: 182989 - RNA, 19 nt, Human
ugggggaggaauccuaggg

SEQ ID NO: 182990 - RNA, 20 nt, Human
ugguggggaagaggguuugg

SEQ ID NO: 182991 - RNA, 22 nt, Human
uuagaaaggacugaucuggaua

SEQ ID NO: 182992 - RNA, 20 nt, Human
uucuucucgacaaaccccaa

SEQ ID NO: 182993 - RNA, 23 nt, Human
uucuuugccccugugucccugau

SEQ ID NO: 182994 - RNA, 18 nt, Human
aagcuuccagagucagca

SEQ ID NO: 182995 - RNA, 21 nt, Human
acaauaaaaacacauucuaaa

SEQ ID NO: 182996 - RNA, 26 nt, Human
acgcuuagugaccugugagccauggg

SEQ ID NO: 182997 - RNA, 20 nt, Human
cacaucgagaaauaucagac

SEQ ID NO: 182998 - RNA, 19 nt, Human
cagcacugggagccacaga

SEQ ID NO: 182999 - RNA, 19 nt, Human
cugggagccacagagcaga

SEQ ID NO: 183000 - RNA, 24 nt, Human
cuucuaucacagaccagucaccag

SEQ ID NO: 183001 - RNA, 23 nt, Human
gaaaaagauacuuuuacaauaaa

SEQ ID NO: 183002 - RNA, 21 nt, Human
gagagggaagcggagagcggg

SEQ ID NO: 183003 - RNA, 19 nt, Human
gcaauaaacucuaagcucc

SEQ ID NO: 183004 - RNA, 19 nt, Human
gcagugcugaaggcucaca

SEQ ID NO: 183005 - RNA, 21 nt, Human
gcuacacugcaauaaacucua

SEQ ID NO: 183006 - RNA, 21 nt, Human
uaaaaaguguuccaaaagaaa

SEQ ID NO: 183007 - RNA, 22 nt, Human
uaaaaucagcacuuccagagga

SEQ ID NO: 183008 - RNA, 21 nt, Human
uaaagcuuccagagucagcac

SEQ ID NO: 183009 - RNA, 18 nt, Human
uaacugcugaauucuacu

SEQ ID NO: 183010 - RNA, 19 nt, Human
ucagguauacaugagugca

SEQ ID NO: 183011 - RNA, 22 nt, Human
ugaccugugagccauggguugc

SEQ ID NO: 183012 - RNA, 21 nt, Human
uggaauauauuaacugcugaa

SEQ ID NO: 183013 - RNA, 23 nt, Human
uguauuuccagaggugacaguuu

SEQ ID NO: 183014 - RNA, 20 nt, Human
uguuccaaaagaaaaauacu

SEQ ID NO: 183015 - RNA, 21 nt, Human
uuccaaaagaaaaauacugua

SEQ ID NO: 183016 - RNA, 23 nt, Human
uuggaauuggaauuugcuucuau

SEQ ID NO: 183017 - RNA, 23 nt, Human
uuuaaaaaguguuccaaaagaaa

SEQ ID NO: 183018 - RNA, 24 nt, Human
uuuaaaaaguguuccaaaagaaaa

SEQ ID NO: 183019 - RNA, 20 nt, Human
uuuuuuuuuuuuuuuuugcu

SEQ ID NO: 183020 - RNA, 20 nt, Human
uuuuuuuuuuuuuuuuuugg

SEQ ID NO: 183021 - RNA, 19 nt, Human
aaaccuucauuuuccaaaa

SEQ ID NO: 183022 - RNA, 24 nt, Human
aaagugcugggauuacaggcguga

SEQ ID NO: 183023 - RNA, 18 nt, Human
aacauggugaaacccugu

SEQ ID NO: 183024 - RNA, 19 nt, Human
aacauggugaaacccuguc

SEQ ID NO: 183025 - RNA, 20 nt, Human
aacauggugaaacccugucc

SEQ ID NO: 183026 - RNA, 21 nt, Human
aacauuucucugccaaaguca

SEQ ID NO: 183027 - RNA, 19 nt, Human
aagugcugggauuacaggc

SEQ ID NO: 183028 - RNA, 19 nt, Human
aagugcugggauuacaggc

SEQ ID NO: 183029 - RNA, 26 nt, Human
aagugcugggauuacaggcgugagcc

SEQ ID NO: 183030 - RNA, 23 nt, Human
aaucaccgaacccggggggcaga

SEQ ID NO: 183031 - RNA, 21 nt, Human
acaccaaagaacagauguccu

SEQ ID NO: 183032 - RNA, 20 nt, Human
acaccuguaauccagcaccu

SEQ ID NO: 183033 - RNA, 18 nt, Human
accaaagaacagaugucc

SEQ ID NO: 183034 - RNA, 24 nt, Human
accugaggucaggaguucaagacc

SEQ ID NO: 183035 - RNA, 18 nt, Human
acgggguuucaccauguu

SEQ ID NO: 183036 - RNA, 18 nt, Human
acgggguuucaccauguu

SEQ ID NO: 183037 - RNA, 19 nt, Human
acgggguuucaccauguuu

SEQ ID NO: 183038 - RNA, 21 nt, Human
acgggguuucaccauguuuca

SEQ ID NO: 183039 - RNA, 18 nt, Human
acugcacuccagccuggg

SEQ ID NO: 183040 - RNA, 18 nt, Human
acugcacuccagccuggg

SEQ ID NO: 183041 - RNA, 21 nt, Human
agaaagaauagcaucuacaaa

SEQ ID NO: 183042 - RNA, 22 nt, Human
agaccaaaagugaaaacaggga

SEQ ID NO: 183043 - RNA, 26 nt, Human
agacucagaaacugagcagccaagcu

SEQ ID NO: 183044 - RNA, 20 nt, Human
agaggcgggcggaucaccug

SEQ ID NO: 183045 - RNA, 18 nt, Human
agagguugcauugagcca

SEQ ID NO: 183046 - RNA, 21 nt, Human
agagguugcauugagccacug

SEQ ID NO: 183047 - RNA, 23 nt, Human
agaguucuaagaaggcuuccucu

SEQ ID NO: 183048 - RNA, 18 nt, Human
agcagccaagcuuccuuc

SEQ ID NO: 183049 - RNA, 22 nt, Human
agccgggcguggugcaugugcc

SEQ ID NO: 183050 - RNA, 22 nt, Human
agccuggccaacauggugaaac

SEQ ID NO: 183051 - RNA, 24 nt, Human
agccuggccaacauggugaaaccc

SEQ ID NO: 183052 - RNA, 21 nt, Human
aggcagaggcgggcggaucac

SEQ ID NO: 183053 - RNA, 23 nt, Human
aggcaggagaaucaccgaacccg

SEQ ID NO: 183054 - RNA, 24 nt, Human
aggcaggagaaucaccgaacccgg

SEQ ID NO: 183055 - RNA, 22 nt, Human
aggcgggcggaucaccugaggu

SEQ ID NO: 183056 - RNA, 26 nt, Human
aggcgggcggaucaccugaggucagg

SEQ ID NO: 183057 - RNA, 23 nt, Human
aggcugaggcaggagaaucaccg

SEQ ID NO: 183058 - RNA, 24 nt, Human
aggugugauggcuuacaccuguaa

SEQ ID NO: 183059 - RNA, 22 nt, Human
aguaagaagacaucagaaagaa

SEQ ID NO: 183060 - RNA, 18 nt, Human
agugcugggauuacaggc

SEQ ID NO: 183061 - RNA, 20 nt, Human
auggcuuacaccuguaaucc

SEQ ID NO: 183062 - RNA, 30 nt, Human
auguuucaccauguuagccagggcggucuu

SEQ ID NO: 183063 - RNA, 24 nt, Human
auugagccacugcacuccagccug

SEQ ID NO: 183064 - RNA, 21 nt, Human
caaaaaaaaaucagccgggcg

SEQ ID NO: 183065 - RNA, 21 nt, Human
caaaauagaaaucugaaagau

SEQ ID NO: 183066 - RNA, 24 nt, Human
caaagugcugggauuacaggcgug

SEQ ID NO: 183067 - RNA, 25 nt, Human
caacauggugaaacccuguccacua

SEQ ID NO: 183068 - RNA, 24 nt, Human
caagaccagccuggccaacauggu

SEQ ID NO: 183069 - RNA, 24 nt, Human
caagaggcugaggcaggagaauca

SEQ ID NO: 183070 - RNA, 22 nt, Human
caccauguuagccagggcgguc

SEQ ID NO: 183071 - RNA, 24 nt, Human
caccauguuagccagggcggucuc

SEQ ID NO: 183072 - RNA, 21 nt, Human
caccccagacucagaaacuga

SEQ ID NO: 183073 - RNA, 23 nt, Human
caccugaggucaggaguucaaga

SEQ ID NO: 183074 - RNA, 18 nt, Human
caccuguaauccagcacc

SEQ ID NO: 183075 - RNA, 23 nt, Human
caccuguaauccagcaccuuggg

SEQ ID NO: 183076 - RNA, 26 nt, Human
caccuguaauccagcaccuugggagg

SEQ ID NO: 183077 - RNA, 20 nt, Human
caccuugggaggcagaggcu

SEQ ID NO: 183078 - RNA, 22 nt, Human
cacuccagccugggguucaugc

SEQ ID NO: 183079 - RNA, 18 nt, Human
cacugcacuccagccugg

SEQ ID NO: 183080 - RNA, 19 nt, Human
cacugcacuccagccuggg

SEQ ID NO: 183081 - RNA, 19 nt, Human
cacugcacuccagccuggg

SEQ ID NO: 183082 - RNA, 24 nt, Human
cacugcacuccagccugggguuca

SEQ ID NO: 183083 - RNA, 19 nt, Human
cagagcagauuucaccaug

SEQ ID NO: 183084 - RNA, 19 nt, Human
cagcaaggccugaaggucu

SEQ ID NO: 183085 - RNA, 24 nt, Human
cagcaccuugggaggcagaggcgg

SEQ ID NO: 183086 - RNA, 24 nt, Human
cagccacucaagaggcugaggcag

SEQ ID NO: 183087 - RNA, 24 nt, Human
caggcgugagccacugugcccggc

SEQ ID NO: 183088 - RNA, 22 nt, Human
caugccauucuccugccucagc

SEQ ID NO: 183089 - RNA, 18 nt, Human
cauugagccacugcacuc

SEQ ID NO: 183090 - RNA, 20 nt, Human
ccaaagugcugggauuacag

SEQ ID NO: 183091 - RNA, 22 nt, Human
ccaaagugcugggauuacaggc

SEQ ID NO: 183092 - RNA, 22 nt, Human
ccaaagugcugggauuacaggc

SEQ ID NO: 183093 - RNA, 24 nt, Human
ccaaagugcugggauuacaggcgu

SEQ ID NO: 183094 - RNA, 21 nt, Human
ccaagcuuccuucccaggaau

SEQ ID NO: 183095 - RNA, 20 nt, Human
ccacugcacuccagccuggg

SEQ ID NO: 183096 - RNA, 20 nt, Human
ccacugcacuccagccuggg

SEQ ID NO: 183097 - RNA, 21 nt, Human
ccacugcacuccagccugggg

SEQ ID NO: 183098 - RNA, 22 nt, Human
ccacugcacuccagccuggggu

SEQ ID NO: 183099 - RNA, 23 nt, Human
ccacugugcccggccuggaagga

SEQ ID NO: 183100 - RNA, 21 nt, Human
cccgccaccacacccagcuaa

SEQ ID NO: 183101 - RNA, 22 nt, Human
ccuggccaacauggugaaaccc

SEQ ID NO: 183102 - RNA, 24 nt, Human
ccuggccaacauggugaaacccug

SEQ ID NO: 183103 - RNA, 24 nt, Human
cgccucggccucccaaagugcugg

SEQ ID NO: 183104 - RNA, 24 nt, Human
cggaucaccugaggucaggaguuc

SEQ ID NO: 183105 - RNA, 27 nt, Human
cggaucaccugaggucaggaguucaag

SEQ ID NO: 183106 - RNA, 24 nt, Human
cgggcggaucaccugaggucagga

SEQ ID NO: 183107 - RNA, 23 nt, Human
cuaauuuuuuguauuuuuaguag

SEQ ID NO: 183108 - RNA, 23 nt, Human
cuccagccugggguucaugccau

SEQ ID NO: 183109 - RNA, 24 nt, Human
cuccugaccucgugauccgcccgc

SEQ ID NO: 183110 - RNA, 23 nt, Human
cugccucagccucccgaguagcu

SEQ ID NO: 183111 - RNA, 21 nt, Human
cuggacccgccaccacaccca

SEQ ID NO: 183112 - RNA, 24 nt, Human
cuggccaacauggugaaacccugu

SEQ ID NO: 183113 - RNA, 18 nt, Human
gaaagaauagcaucuaca

SEQ ID NO: 183114 - RNA, 22 nt, Human
gaccucgugauccgcccgccuc

SEQ ID NO: 183115 - RNA, 22 nt, Human
gaccucgugauccgcccgccuc

SEQ ID NO: 183116 - RNA, 24 nt, Human
gaccucgugauccgcccgccucgg

SEQ ID NO: 183117 - RNA, 20 nt, Human
gagacgggguuucaccaugu

SEQ ID NO: 183118 - RNA, 25 nt, Human
gaggcgggcggaucaccugagguca

SEQ ID NO: 183119 - RNA, 21 nt, Human
gaucaccugaggucaggaguu

SEQ ID NO: 183120 - RNA, 23 nt, Human
gaucaccugaggucaggaguuca

SEQ ID NO: 183121 - RNA, 24 nt, Human
gaucaccugaggucaggaguucaa

SEQ ID NO: 183122 - RNA, 18 nt, Human
gauuacaggcgugagcca

SEQ ID NO: 183123 - RNA, 21 nt, Human
gauuacaggcgugagccacug

SEQ ID NO: 183124 - RNA, 24 nt, Human
gauuacaggcgugagccacugugc

SEQ ID NO: 183125 - RNA, 21 nt, Human
gcagccaagcuuccuucccag

SEQ ID NO: 183126 - RNA, 22 nt, Human
gcauugagccacugcacuccag

SEQ ID NO: 183127 - RNA, 22 nt, Human
gccaacauggugaaacccuguc

SEQ ID NO: 183128 - RNA, 20 nt, Human
gccucagccucccgaguagc

SEQ ID NO: 183129 - RNA, 23 nt, Human
ggaucaccugaggucaggaguuc

SEQ ID NO: 183130 - RNA, 18 nt, Human
ggcagagguugcauugag

SEQ ID NO: 183131 - RNA, 21 nt, Human
ggcggaucaccugaggucagg

SEQ ID NO: 183132 - RNA, 23 nt, Human
ggcggucucgaucuccugaccuc

SEQ ID NO: 183133 - RNA, 24 nt, Human
gggccaggugugauggcuuacacc

SEQ ID NO: 183134 - RNA, 20 nt, Human
ggggaaaggugacucuggaa

SEQ ID NO: 183135 - RNA, 19 nt, Human
ggucauccuaaagacaaga

SEQ ID NO: 183136 - RNA, 20 nt, Human
guaauguugaguccuucagu

SEQ ID NO: 183137 - RNA, 23 nt, Human
guagagacgggguuucaccaugu

SEQ ID NO: 183138 - RNA, 24 nt, Human
gugauccgcccgccucggccuccc

SEQ ID NO: 183139 - RNA, 22 nt, Human
guuguagaaaccuucauuuucc

SEQ ID NO: 183140 - RNA, 31 nt, Human
guuuugagagguucuuaaaauagaguucccc

SEQ ID NO: 183141 - RNA, 22 nt, Human
uaaaaguacccauaaaaaccug

SEQ ID NO: 183142 - RNA, 24 nt, Human
uaaaaguacccauaaaaaccuguc

SEQ ID NO: 183143 - RNA, 21 nt, Human
uaaaauagaguuccagacgcc

SEQ ID NO: 183144 - RNA, 20 nt, Human
uaacccacuaggaaggauau

SEQ ID NO: 183145 - RNA, 24 nt, Human
uaauuuuuuguauuuuuaguagag

SEQ ID NO: 183146 - RNA, 25 nt, Human
uaauuuuuuguauuuuuaguagaga

SEQ ID NO: 183147 - RNA, 20 nt, Human
uacaaaaaaaaaucagccgg

SEQ ID NO: 183148 - RNA, 23 nt, Human
uacaccuguaauccagcaccuug

SEQ ID NO: 183149 - RNA, 23 nt, Human
uacaggcgugagccacugugccc

SEQ ID NO: 183150 - RNA, 23 nt, Human
uacaggcgugagccacugugccc

SEQ ID NO: 183151 - RNA, 19 nt, Human
uacccauaaaaaccuguca

SEQ ID NO: 183152 - RNA, 21 nt, Human
uagaaaccuucauuuuccaaa

SEQ ID NO: 183153 - RNA, 22 nt, Human
uagagacgggguuucaccaugu

SEQ ID NO: 183154 - RNA, 22 nt, Human
uagcuggacccgccaccacacc

SEQ ID NO: 183155 - RNA, 27 nt, Human
uagcuggacccgccaccacacccagcu

SEQ ID NO: 183156 - RNA, 18 nt, Human
uaggaguggggaaaggug

SEQ ID NO: 183157 - RNA, 24 nt, Human
uaguagagacgggguuucaccaug

SEQ ID NO: 183158 - RNA, 27 nt, Human
uaguagagacgggguuucaccauguuu

SEQ ID NO: 183159 - RNA, 19 nt, Human
ucaauaccauccuuucaaa

SEQ ID NO: 183160 - RNA, 23 nt, Human
ucaccugaggucaggaguucaag

SEQ ID NO: 183161 - RNA, 21 nt, Human
ucagaaagaauagcaucuaca

SEQ ID NO: 183162 - RNA, 18 nt, Human
ucagaacaguaacaaaaa

SEQ ID NO: 183163 - RNA, 21 nt, Human
ucagccucccgaguagcugga

SEQ ID NO: 183164 - RNA, 23 nt, Human
ucaggagcucuggagagaagguc

SEQ ID NO: 183165 - RNA, 24 nt, Human
ucagugguauuaauacauuaguaa

SEQ ID NO: 183166 - RNA, 20 nt, Human
ucauccuaaagacaagaacu

SEQ ID NO: 183167 - RNA, 19 nt, Human
uccaaaauagaaaucugaa

SEQ ID NO: 183168 - RNA, 24 nt, Human
uccagaacauuaucucaccccaga

SEQ ID NO: 183169 - RNA, 24 nt, Human
ucccaaagugcugggauuacaggc

SEQ ID NO: 183170 - RNA, 18 nt, Human
ucggccucccaaagugcu

SEQ ID NO: 183171 - RNA, 24 nt, Human
ucuccugccucagccucccgagua

SEQ ID NO: 183172 - RNA, 18 nt, Human
ugagcuaaaaugaccccu

SEQ ID NO: 183173 - RNA, 19 nt, Human
ugaggcaggagaaucaccg

SEQ ID NO: 183174 - RNA, 23 nt, Human
ugaggcaggagaaucaccgaacc

SEQ ID NO: 183175 - RNA, 24 nt, Human
ugaggcaggagaaucaccgaaccc

SEQ ID NO: 183176 - RNA, 24 nt, Human
ugccucagccucccgaguagcugg

SEQ ID NO: 183177 - RNA, 24 nt, Human
ugcugggauuacaggcgugagcca

SEQ ID NO: 183178 - RNA, 24 nt, Human
uggccaacauggugaaacccuguc

SEQ ID NO: 183179 - RNA, 19 nt, Human
uggcucagaacaguaacaa

SEQ ID NO: 183180 - RNA, 19 nt, Human
uggcuuacaccuguaaucc

SEQ ID NO: 183181 - RNA, 23 nt, Human
uggcuuacaccuguaauccagca

SEQ ID NO: 183182 - RNA, 18 nt, Human
ugggaggcagaggcgggc

SEQ ID NO: 183183 - RNA, 19 nt, Human
ugggaggcagaggcgggcg

SEQ ID NO: 183184 - RNA, 24 nt, Human
ugggaggcagaggcgggcggauca

SEQ ID NO: 183185 - RNA, 18 nt, Human
ugggauuacaggcgugag

SEQ ID NO: 183186 - RNA, 21 nt, Human
ugggauuacaggcgugagcca

SEQ ID NO: 183187 - RNA, 22 nt, Human
ugggauuacaggcgugagccac

SEQ ID NO: 183188 - RNA, 22 nt, Human
ugggauuacaggcgugagccac

SEQ ID NO: 183189 - RNA, 22 nt, Human
ugggauuacaggcgugagccac

SEQ ID NO: 183190 - RNA, 24 nt, Human
ugggauuacaggcgugagccacug

SEQ ID NO: 183191 - RNA, 26 nt, Human
ugggauuacaggcgugagccacugug

SEQ ID NO: 183192 - RNA, 19 nt, Human
uggggaaaggugacucugg

SEQ ID NO: 183193 - RNA, 22 nt, Human
uggugcaugugcccgcaauccc

SEQ ID NO: 183194 - RNA, 20 nt, Human
uguacagagcagauuucacc

SEQ ID NO: 183195 - RNA, 22 nt, Human
uguagcugcuuuggcacagaaa

SEQ ID NO: 183196 - RNA, 19 nt, Human
ugucugaacaauaaccagg

SEQ ID NO: 183197 - RNA, 21 nt, Human
ugugcccgcaaucccagccac

SEQ ID NO: 183198 - RNA, 23 nt, Human
uuacaccaaagaacagauguccu

SEQ ID NO: 183199 - RNA, 18 nt, Human
uuaguagagacgggguuu

SEQ ID NO: 183200 - RNA, 22 nt, Human
uuaguagagacgggguuucacc

SEQ ID NO: 183201 - RNA, 24 nt, Human
uuaguagagacgggguuucaccau

SEQ ID NO: 183202 - RNA, 18 nt, Human
uuauuugaacacugaaac

SEQ ID NO: 183203 - RNA, 19 nt, Human
uucaugccauucuccugcc

SEQ ID NO: 183204 - RNA, 26 nt, Human
uuggcacagaaaauuguggugucuac

SEQ ID NO: 183205 - RNA, 19 nt, Human
uugggaggcagaggcgggc

SEQ ID NO: 183206 - RNA, 23 nt, Human
uuguauuuuuaguagagacgggg

SEQ ID NO: 183207 - RNA, 22 nt, Human
uuucaccauguuagccagggcg

SEQ ID NO: 183208 - RNA, 20 nt, Human
uuuggcacagaaaauuguga

SEQ ID NO: 183209 - RNA, 19 nt, Human
uuuucacacuaacccacua

SEQ ID NO: 183210 - RNA, 24 nt, Human
uuuuuaguagagacgggguuucac

SEQ ID NO: 183211 - RNA, 21 nt, Human
uuuuuguauuuuuaguagaga

SEQ ID NO: 183212 - RNA, 24 nt, Human
uuuuuuguauuuuuaguagagacg

SEQ ID NO: 183213 - RNA, 21 nt, Human
acaucaaugucccaggagccc

SEQ ID NO: 183214 - RNA, 21 nt, Human
acuccauucccccaaaaacaa

SEQ ID NO: 183215 - RNA, 23 nt, Human
agaucuuuaaacaugcauagccu

SEQ ID NO: 183216 - RNA, 22 nt, Human
agcagaaaagaagugacaccaa

SEQ ID NO: 183217 - RNA, 21 nt, Human
agugguggcagacauacucaa

SEQ ID NO: 183218 - RNA, 20 nt, Human
auggaaugacuccauucccc

SEQ ID NO: 183219 - RNA, 24 nt, Human
auugcaauuucaauaucuucaacc

SEQ ID NO: 183220 - RNA, 21 nt, Human
cacuuuugcuuccccaucccu

SEQ ID NO: 183221 - RNA, 23 nt, Human
caggagcccggaggcucuucagg

SEQ ID NO: 183222 - RNA, 18 nt, Human
cauucccccaaaaacaag

SEQ ID NO: 183223 - RNA, 24 nt, Human
ccaccuagaguuaacaauggucac

SEQ ID NO: 183224 - RNA, 22 nt, Human
cccuccuccaggcaguucguca

SEQ ID NO: 183225 - RNA, 22 nt, Human
cugaacacuucacaguaucauc

SEQ ID NO: 183226 - RNA, 21 nt, Human
cuucaggccccucucaaagac

SEQ ID NO: 183227 - RNA, 23 nt, Human
gcauagccuagaguuuccagaau

SEQ ID NO: 183228 - RNA, 20 nt, Human
ggcucuucaggccccucuca

SEQ ID NO: 183229 - RNA, 22 nt, Human
gggauagcagaaaagaagugac

SEQ ID NO: 183230 - RNA, 21 nt, Human
gggcugggggauagcagaaaa

SEQ ID NO: 183231 - RNA, 23 nt, Human
ggggggcugggggauagcagaaa

SEQ ID NO: 183232 - RNA, 23 nt, Human
gucccaggagcccggaggcucuu

SEQ ID NO: 183233 - RNA, 19 nt, Human
uacaucaaugucccaggag

SEQ ID NO: 183234 - RNA, 19 nt, Human
uagcagaaaagaagugaca

SEQ ID NO: 183235 - RNA, 25 nt, Human
uagcagaaaagaagugacaccaaaa

SEQ ID NO: 183236 - RNA, 20 nt, Human
uauuccccuccuccaggcaa

SEQ ID NO: 183237 - RNA, 19 nt, Human
ucccccaaaaacaagauga

SEQ ID NO: 183238 - RNA, 23 nt, Human
ucccccaaaaacaagaugauugc

SEQ ID NO: 183239 - RNA, 19 nt, Human
ucccucugucucuccugcc

SEQ ID NO: 183240 - RNA, 23 nt, Human
ugacuccauucccccaaaaacaa

SEQ ID NO: 183241 - RNA, 26 nt, Human
uuaacaauggucacuuuugcuucccc

SEQ ID NO: 183242 - RNA, 19 nt, Human
uuccccuccuccaggcagu

SEQ ID NO: 183243 - RNA, 22 nt, Human
uuuuauauauuccccuccucca

SEQ ID NO: 183244 - RNA, 21 nt, Human
aagagggggucugaagaggac

SEQ ID NO: 183245 - RNA, 21 nt, Human
agacaacucagcggcgcgcgg

SEQ ID NO: 183246 - RNA, 23 nt, Human
agccgcgaagaacuaagaggggg

SEQ ID NO: 183247 - RNA, 23 nt, Human
aggcccggcggcggguaccagga

SEQ ID NO: 183248 - RNA, 27 nt, Human
agggagggaaggcagagcuuguggggg

SEQ ID NO: 183249 - RNA, 21 nt, Human
cacccucgguccgaugcgcgc

SEQ ID NO: 183250 - RNA, 21 nt, Human
cacuggaucauaaggaguggu

SEQ ID NO: 183251 - RNA, 20 nt, Human
cagcggcgcgcggcgggggc

SEQ ID NO: 183252 - RNA, 22 nt, Human
ccaggaggucucaguuuuccuc

SEQ ID NO: 183253 - RNA, 20 nt, Human
ccuugccagcccucuguucc

SEQ ID NO: 183254 - RNA, 21 nt, Human
cuaaguuuccgguucugugcu

SEQ ID NO: 183255 - RNA, 24 nt, Human
gccuugccagcccucuguuccagc

SEQ ID NO: 183256 - RNA, 18 nt, Human
gcgcgccuugccagcccu

SEQ ID NO: 183257 - RNA, 20 nt, Human
ggccgauucgugggucggug

SEQ ID NO: 183258 - RNA, 23 nt, Human
ggcuccgaacuuugucucuaagu

SEQ ID NO: 183259 - RNA, 18 nt, Human
ggugggucgugggccgug

SEQ ID NO: 183260 - RNA, 18 nt, Human
ucacuggaucauaaggag

SEQ ID NO: 183261 - RNA, 20 nt, Human
uccagcuccacacccggccc

SEQ ID NO: 183262 - RNA, 22 nt, Human
ucggugggucgugggccguggg

SEQ ID NO: 183263 - RNA, 24 nt, Human
ucucuugaauaucacuggaucaua

SEQ ID NO: 183264 - RNA, 19 nt, Human
ucugugcucagcggcucca

SEQ ID NO: 183265 - RNA, 21 nt, Human
ugaagaggaccagggagggaa

SEQ ID NO: 183266 - RNA, 24 nt, Human
ugggucggugggucgugggccgug

SEQ ID NO: 183267 - RNA, 23 nt, Human
aguaauaguaugcaugagaaaaa

SEQ ID NO: 183268 - RNA, 21 nt, Human
gaauuuguuuaauuuuuuuuc

SEQ ID NO: 183269 - RNA, 23 nt, Human
uaguaguaauaguaugcaugaga

SEQ ID NO: 183270 - RNA, 20 nt, Human
uuaguaguaauaguaugcau

SEQ ID NO: 183271 - RNA, 20 nt, Human
uuuuuuuuuuaccacacccc

SEQ ID NO: 183272 - RNA, 24 nt, Human
uuuuuuuuuuuuuuuaccacaccc

SEQ ID NO: 183273 - RNA, 22 nt, Human
aagugcuuccuaaggacugccc

SEQ ID NO: 183274 - RNA, 22 nt, Human
aaguucuccuagcucacucuuc

SEQ ID NO: 183275 - RNA, 27 nt, Human
aauaaugggagaaaagaagggagggcc

SEQ ID NO: 183276 - RNA, 18 nt, Human
acccagcagguggaggaa

SEQ ID NO: 183277 - RNA, 19 nt, Human
agaagagcacacucuccaa

SEQ ID NO: 183278 - RNA, 21 nt, Human
agacuugggcuuggcugaaga

SEQ ID NO: 183279 - RNA, 20 nt, Human
agagggaaaagacggagggg

SEQ ID NO: 183280 - RNA, 24 nt, Human
agagggacagacacucagggcagg

SEQ ID NO: 183281 - RNA, 18 nt, Human
agauaaagcagauggccc

SEQ ID NO: 183282 - RNA, 21 nt, Human
aggacccacccaacccuggcc

SEQ ID NO: 183283 - RNA, 23 nt, Human
aggaugagaguagagggaaaaga

SEQ ID NO: 183284 - RNA, 20 nt, Human
aggugggaguggggaauggg

SEQ ID NO: 183285 - RNA, 22 nt, Human
aggugggaguggggaauggguu

SEQ ID NO: 183286 - RNA, 24 nt, Human
caccccaccacccauggggccaac

SEQ ID NO: 183287 - RNA, 22 nt, Human
cagaagagcacacucuccaagu

SEQ ID NO: 183288 - RNA, 23 nt, Human
cagagacccagcagguggaggaa

SEQ ID NO: 183289 - RNA, 21 nt, Human
caggacccacccaacccuggc

SEQ ID NO: 183290 - RNA, 23 nt, Human
cauggggccaaccgcucggccag

SEQ ID NO: 183291 - RNA, 21 nt, Human
ccaagaugcuuuguguugccc

SEQ ID NO: 183292 - RNA, 25 nt, Human
cccaacccuggcccccagcccaaac

SEQ ID NO: 183293 - RNA, 25 nt, Human
cccaccacccauggggccaaccgcu

SEQ ID NO: 183294 - RNA, 24 nt, Human
ccccgcuucgccugcuuucuccuc

SEQ ID NO: 183295 - RNA, 20 nt, Human
cccuaaccuccuuaaccaag

SEQ ID NO: 183296 - RNA, 19 nt, Human
cccuagacagaccugaucc

SEQ ID NO: 183297 - RNA, 18 nt, Human
cccugggggucuaggaga

SEQ ID NO: 183298 - RNA, 22 nt, Human
ccggccccuaaccuccuuaacc

SEQ ID NO: 183299 - RNA, 22 nt, Human
ccuccugaggcaaguccuagac

SEQ ID NO: 183300 - RNA, 22 nt, Human
ccugcuuucuccuccuuccccc

SEQ ID NO: 183301 - RNA, 21 nt, Human
cuagaccggccccuaaccucc

SEQ ID NO: 183302 - RNA, 26 nt, Human
cugauccugccacagaagagcacacu

SEQ ID NO: 183303 - RNA, 21 nt, Human
cugugaugaagagaaggugac

SEQ ID NO: 183304 - RNA, 20 nt, Human
gaaggugggaguggggaaug

SEQ ID NO: 183305 - RNA, 21 nt, Human
gagacccagcagguggaggaa

SEQ ID NO: 183306 - RNA, 24 nt, Human
gagacccagcagguggaggaaaua

SEQ ID NO: 183307 - RNA, 24 nt, Human
gcccaaacuacucuggcguggaag

SEQ ID NO: 183308 - RNA, 19 nt, Human
ggagaaaagaguugaaggu

SEQ ID NO: 183309 - RNA, 21 nt, Human
ggagaaaagaguugaaggugg

SEQ ID NO: 183310 - RNA, 24 nt, Human
ggccagccacacuguccucagagu

SEQ ID NO: 183311 - RNA, 20 nt, Human
gggaguggggaauggguuca

SEQ ID NO: 183312 - RNA, 19 nt, Human
gggcuuggcugaagaggga

SEQ ID NO: 183313 - RNA, 23 nt, Human
guccuagaccggccccuaaccuc

SEQ ID NO: 183314 - RNA, 20 nt, Human
uaacuucacaaacucuuguu

SEQ ID NO: 183315 - RNA, 26 nt, Human
uagaccggccccuaaccuccuuaacc

SEQ ID NO: 183316 - RNA, 20 nt, Human
ucacaccccaccacccaugg

SEQ ID NO: 183317 - RNA, 21 nt, Human
ucacuggcucccugggggucu

SEQ ID NO: 183318 - RNA, 20 nt, Human
ucccaggugguguaagugcu

SEQ ID NO: 183319 - RNA, 22 nt, Human
ucccugggggucuaggagacuu

SEQ ID NO: 183320 - RNA, 22 nt, Human
uccuagaccggccccuaaccuc

SEQ ID NO: 183321 - RNA, 20 nt, Human
uccugccacagaagagcaca

SEQ ID NO: 183322 - RNA, 24 nt, Human
uccuggacucagguaaguaguguu

SEQ ID NO: 183323 - RNA, 19 nt, Human
ucuaggagacuugggcuug

SEQ ID NO: 183324 - RNA, 19 nt, Human
ugaggcuguccuuccuccu

SEQ ID NO: 183325 - RNA, 21 nt, Human
ugcccucuggggucuuggggu

SEQ ID NO: 183326 - RNA, 21 nt, Human
uggcugaagagggacagacac

SEQ ID NO: 183327 - RNA, 23 nt, Human
uggcugaagagggacagacacuc

SEQ ID NO: 183328 - RNA, 18 nt, Human
uggguucacaaugcauuu

SEQ ID NO: 183329 - RNA, 26 nt, Human
uguccuuccuccugaggcaaguccua

SEQ ID NO: 183330 - RNA, 24 nt, Human
ugugaugaagagaaggugacaguu

SEQ ID NO: 183331 - RNA, 20 nt, Human
uguucccagcaaggucagca

SEQ ID NO: 183332 - RNA, 24 nt, Human
uuucuccuccuucccuucccaccu

SEQ ID NO: 183333 - RNA, 18 nt, Human
aaaaaagaagggagaaga

SEQ ID NO: 183334 - RNA, 20 nt, Human
agaguccugggugccgaccu

SEQ ID NO: 183335 - RNA, 24 nt, Human
aggaaggaggcgcgcgugggagga

SEQ ID NO: 183336 - RNA, 24 nt, Human
aggcgagaggaugaugcggggugg

SEQ ID NO: 183337 - RNA, 22 nt, Human
agggcgccccggcggcgaggaa

SEQ ID NO: 183338 - RNA, 24 nt, Human
agggggcggcggagcggagggcgg

SEQ ID NO: 183339 - RNA, 24 nt, Human
agugcaaaagcgggcgagaaggga

SEQ ID NO: 183340 - RNA, 21 nt, Human
caaagauacugggagggaaga

SEQ ID NO: 183341 - RNA, 20 nt, Human
caccuggagggggcggcgga

SEQ ID NO: 183342 - RNA, 18 nt, Human
cagauguucuccgcaacc

SEQ ID NO: 183343 - RNA, 23 nt, Human
cagcgagggaagaaaagaguaau

SEQ ID NO: 183344 - RNA, 25 nt, Human
cagcuguuagccuggaacagccgcu

SEQ ID NO: 183345 - RNA, 21 nt, Human
caguggcaccgagagggcgcc

SEQ ID NO: 183346 - RNA, 20 nt, Human
caguucaucuggggaagggg

SEQ ID NO: 183347 - RNA, 24 nt, Human
ccagcgagggaagaaaagaguaau

SEQ ID NO: 183348 - RNA, 22 nt, Human
cccacagcuguuagccuggaac

SEQ ID NO: 183349 - RNA, 26 nt, Human
cccacagcuguuagccuggaacagcc

SEQ ID NO: 183350 - RNA, 26 nt, Human
ccccaggucaguccaaaagcaaagau

SEQ ID NO: 183351 - RNA, 20 nt, Human
cccccggggcagcccccgcc

SEQ ID NO: 183352 - RNA, 23 nt, Human
cccgggacccuagaggaggcggg

SEQ ID NO: 183353 - RNA, 25 nt, Human
cccgggcuugaccuuaguggaaagc

SEQ ID NO: 183354 - RNA, 24 nt, Human
cccuccaggagcgaggcgagagga

SEQ ID NO: 183355 - RNA, 19 nt, Human
cccucuggcccgagagccu

SEQ ID NO: 183356 - RNA, 21 nt, Human
cccucuggcccgagagccugu

SEQ ID NO: 183357 - RNA, 21 nt, Human
ccgcaaccuuccggaagugga

SEQ ID NO: 183358 - RNA, 19 nt, Human
ccgccgagcucccgccgcc

SEQ ID NO: 183359 - RNA, 20 nt, Human
ccgccgagcucccgccgccu

SEQ ID NO: 183360 - RNA, 24 nt, Human
ccucaacugacugccccccggggc

SEQ ID NO: 183361 - RNA, 23 nt, Human
ccuccgccgagcucccgccgccu

SEQ ID NO: 183362 - RNA, 18 nt, Human
cgagaagggaaacccaag

SEQ ID NO: 183363 - RNA, 21 nt, Human
cgagagggcgccccggcggcg

SEQ ID NO: 183364 - RNA, 18 nt, Human
cgaggaccggauguggcg

SEQ ID NO: 183365 - RNA, 24 nt, Human
cggggcuagcaggugacgucagcg

SEQ ID NO: 183366 - RNA, 25 nt, Human
cucaacugacugccccccggggcag

SEQ ID NO: 183367 - RNA, 22 nt, Human
cugaggcuauacuacaaagccc

SEQ ID NO: 183368 - RNA, 22 nt, Human
gacaaggacuuuuggggggagg

SEQ ID NO: 183369 - RNA, 20 nt, Human
gagagggcgccccggcggcg

SEQ ID NO: 183370 - RNA, 23 nt, Human
gagcugguugugguguuuuccag

SEQ ID NO: 183371 - RNA, 21 nt, Human
gcaaagauacugggagggaag

SEQ ID NO: 183372 - RNA, 20 nt, Human
gcccucuggcccgagagccu

SEQ ID NO: 183373 - RNA, 21 nt, Human
gcgagaagggaaacccaagcg

SEQ ID NO: 183374 - RNA, 20 nt, Human
gcggcgauggaaggcggacg

SEQ ID NO: 183375 - RNA, 24 nt, Human
gcggcggcgauggaaggcggacgg

SEQ ID NO: 183376 - RNA, 22 nt, Human
ggaacgaugauaaggagcaggu

SEQ ID NO: 183377 - RNA, 23 nt, Human
ggaaggaggcgcgcgugggagga

SEQ ID NO: 183378 - RNA, 18 nt, Human
ggaaggggcuacaaagca

SEQ ID NO: 183379 - RNA, 24 nt, Human
ggacaaggacuuuuggggggaggu

SEQ ID NO: 183380 - RNA, 19 nt, Human
ggagagggggcguggacac

SEQ ID NO: 183381 - RNA, 19 nt, Human
ggagggaagauggcgcugg

SEQ ID NO: 183382 - RNA, 19 nt, Human
ggcgagaagggaaacccaa

SEQ ID NO: 183383 - RNA, 25 nt, Human
gggcgagaagggaaacccaagcggg

SEQ ID NO: 183384 - RNA, 21 nt, Human
gggcgccccggcggcgaggaa

SEQ ID NO: 183385 - RNA, 19 nt, Human
uaagugcaaaagcgggcga

SEQ ID NO: 183386 - RNA, 25 nt, Human
uacagaucauaagugcaaaagcggg

SEQ ID NO: 183387 - RNA, 18 nt, Human
uacccccaggucagucca

SEQ ID NO: 183388 - RNA, 25 nt, Human
uaccuugcgcucccgggagaaccua

SEQ ID NO: 183389 - RNA, 24 nt, Human
ucaccuggagggggcggcggagcg

SEQ ID NO: 183390 - RNA, 21 nt, Human
ugagagccaguggcaccgaga

SEQ ID NO: 183391 - RNA, 23 nt, Human
ugagagccaguggcaccgagagg

SEQ ID NO: 183392 - RNA, 26 nt, Human
ugagagccaguggcaccgagagggcg

SEQ ID NO: 183393 - RNA, 20 nt, Human
ugagaguccugggugccgac

SEQ ID NO: 183394 - RNA, 19 nt, Human
ugaggagcugguuguggug

SEQ ID NO: 183395 - RNA, 20 nt, Human
ugccccccggggcagccccc

SEQ ID NO: 183396 - RNA, 19 nt, Human
ugcuggacuacaccggggg

SEQ ID NO: 183397 - RNA, 22 nt, Human
ugcuggacuacaccgggggcac

SEQ ID NO: 183398 - RNA, 18 nt, Human
uggagggggcggcggagc

SEQ ID NO: 183399 - RNA, 18 nt, Human
ugggagggaagauggcgc

SEQ ID NO: 183400 - RNA, 21 nt, Human
ugggagggaagauggcgcugg

SEQ ID NO: 183401 - RNA, 22 nt, Human
ugggguggcagaggggagauac

SEQ ID NO: 183402 - RNA, 20 nt, Human
aaauccacucucccuuccag

SEQ ID NO: 183403 - RNA, 21 nt, Human
acacccuguuuuaugggcagg

SEQ ID NO: 183404 - RNA, 23 nt, Human
aggacagcagagggagucagggg

SEQ ID NO: 183405 - RNA, 24 nt, Human
aggcaggggcuggguugcccagga

SEQ ID NO: 183406 - RNA, 18 nt, Human
aggcccgggagagagcag

SEQ ID NO: 183407 - RNA, 18 nt, Human
agucaggggagggagacu

SEQ ID NO: 183408 - RNA, 22 nt, Human
cacccuguuuuaugggcaggga

SEQ ID NO: 183409 - RNA, 19 nt, Human
caggggcuggguugcccag

SEQ ID NO: 183410 - RNA, 20 nt, Human
cagguccugcccuuuuugua

SEQ ID NO: 183411 - RNA, 18 nt, Human
cauggcugcaaggagcag

SEQ ID NO: 183412 - RNA, 20 nt, Human
ccagccaaauccacucuccc

SEQ ID NO: 183413 - RNA, 19 nt, Human
ccaggagcauggcugcaag

SEQ ID NO: 183414 - RNA, 18 nt, Human
cccagccaaauccacucu

SEQ ID NO: 183415 - RNA, 18 nt, Human
ccccgcacaauccuagac

SEQ ID NO: 183416 - RNA, 20 nt, Human
ccccugagaggggaggacag

SEQ ID NO: 183417 - RNA, 24 nt, Human
cccgaggaaacgcagauccaccga

SEQ ID NO: 183418 - RNA, 19 nt, Human
cccgggaucugaggacagg

SEQ ID NO: 183419 - RNA, 18 nt, Human
cgaggaaacgcagaucca

SEQ ID NO: 183420 - RNA, 19 nt, Human
gagcagggugcagggggca

SEQ ID NO: 183421 - RNA, 23 nt, Human
gagccugcagcuuaaucuuucuc

SEQ ID NO: 183422 - RNA, 21 nt, Human
gaggcaggggcuggguugccc

SEQ ID NO: 183423 - RNA, 18 nt, Human
gaucuuguucucucacca

SEQ ID NO: 183424 - RNA, 25 nt, Human
gaucuuguucucucaccagccccgc

SEQ ID NO: 183425 - RNA, 21 nt, Human
gcagagguugcugacguuccc

SEQ ID NO: 183426 - RNA, 22 nt, Human
ggacagcagagggagucagggg

SEQ ID NO: 183427 - RNA, 23 nt, Human
gggcagccgcugagaugccuuuc

SEQ ID NO: 183428 - RNA, 20 nt, Human
gggugcagggggcaggaagu

SEQ ID NO: 183429 - RNA, 22 nt, Human
uccacaggacaaggugagaggg

SEQ ID NO: 183430 - RNA, 20 nt, Human
ucccgggaucugaggacagg

SEQ ID NO: 183431 - RNA, 18 nt, Human
uggcugcaaggagcagga

SEQ ID NO: 183432 - RNA, 21 nt, Human
uggcugcaaggagcaggaggg

SEQ ID NO: 183433 - RNA, 22 nt, Human
uugacacuuuauuccccugaga

SEQ ID NO: 183434 - RNA, 18 nt, Human
uuguaugucaucuccccc

SEQ ID NO: 183435 - RNA, 18 nt, Human
uuuuaugggcagggagcc

SEQ ID NO: 183436 - RNA, 22 nt, Human
acugauugcuuccaaugaucau

SEQ ID NO: 183437 - RNA, 21 nt, Human
agauacaaacgccuuuuaacc

SEQ ID NO: 183438 - RNA, 19 nt, Human
cacacacauagugucagau

SEQ ID NO: 183439 - RNA, 20 nt, Human
cuagggcggcggcacccucu

SEQ ID NO: 183440 - RNA, 23 nt, Human
cucgaguuuuuuuuuuuuuuuuu

SEQ ID NO: 183441 - RNA, 20 nt, Human
gaguuuuuuuuuuuuuuuuu

SEQ ID NO: 183442 - RNA, 22 nt, Human
gaguuuuuuuuuuuuuuuuuuc

SEQ ID NO: 183443 - RNA, 19 nt, Human
gauugcuuccaaugaucau

SEQ ID NO: 183444 - RNA, 21 nt, Human
gccuagggcggcggcacccuc

SEQ ID NO: 183445 - RNA, 21 nt, Human
gcggcggcacccucugcagcc

SEQ ID NO: 183446 - RNA, 18 nt, Human
ggcggcggcacccucugc

SEQ ID NO: 183447 - RNA, 18 nt, Human
ggcggggucugggauucu

SEQ ID NO: 183448 - RNA, 19 nt, Human
guggugcuccugcuggggg

SEQ ID NO: 183449 - RNA, 19 nt, Human
gugguggggaagaguaaac

SEQ ID NO: 183450 - RNA, 20 nt, Human
uaaaacacacacauaguguc

SEQ ID NO: 183451 - RNA, 18 nt, Human
uaaacugauugcuuccaa

SEQ ID NO: 183452 - RNA, 22 nt, Human
ugcuuccaaugaucaucucuuc

SEQ ID NO: 183453 - RNA, 20 nt, Human
ugucucuuccuuuacuuccc

SEQ ID NO: 183454 - RNA, 22 nt, Human
uuuuuuuuuuuuuuucauguuu

SEQ ID NO: 183455 - RNA, 20 nt, Human
aaaaacagccaggaggaggc

SEQ ID NO: 183456 - RNA, 19 nt, Human
aaaaacggcuuccaccuuc

SEQ ID NO: 183457 - RNA, 21 nt, Human
aaacagccaggaggaggcagc

SEQ ID NO: 183458 - RNA, 19 nt, Human
aaacaggcacaaaaacagc

SEQ ID NO: 183459 - RNA, 20 nt, Human
aaacaggcacaaaaacagcc

SEQ ID NO: 183460 - RNA, 20 nt, Human
aaacaggcacaaaaacagcc

SEQ ID NO: 183461 - RNA, 23 nt, Human
aaacaggcacaaaaacagccagg

SEQ ID NO: 183462 - RNA, 24 nt, Human
aaacaggcacaaaaacagccagga

SEQ ID NO: 183463 - RNA, 25 nt, Human
aagacaaugaaaggaagccgguacc

SEQ ID NO: 183464 - RNA, 22 nt, Human
aauccacccccagguucuccua

SEQ ID NO: 183465 - RNA, 19 nt, Human
acaaaacacugguaccaaa

SEQ ID NO: 183466 - RNA, 28 nt, Human
acaaacauucucccuauagcuaaacucc

SEQ ID NO: 183467 - RNA, 19 nt, Human
agaaagaccugccuuuccc

SEQ ID NO: 183468 - RNA, 21 nt, Human
agacaaugaaaggaagccaga

SEQ ID NO: 183469 - RNA, 20 nt, Human
agagaaaagcugugaaagug

SEQ ID NO: 183470 - RNA, 23 nt, Human
agaggugguauccaauauacaua

SEQ ID NO: 183471 - RNA, 21 nt, Human
agcaggagagcgggacacuca

SEQ ID NO: 183472 - RNA, 27 nt, Human
aggaggaggcagcauccacuccaugaa

SEQ ID NO: 183473 - RNA, 22 nt, Human
aguauguaaaacagaggagcca

SEQ ID NO: 183474 - RNA, 24 nt, Human
agugaggccuuucacaaaaacaca

SEQ ID NO: 183475 - RNA, 21 nt, Human
aucacauuguaaacaaaucca

SEQ ID NO: 183476 - RNA, 21 nt, Human
caaacaggcacaaaaacagcc

SEQ ID NO: 183477 - RNA, 22 nt, Human
caaacaggcacaaaaacagcca

SEQ ID NO: 183478 - RNA, 21 nt, Human
caaacaggcacaaaaacagcu

SEQ ID NO: 183479 - RNA, 21 nt, Human
caauaaguucacccacuuauc

SEQ ID NO: 183480 - RNA, 19 nt, Human
cacauuguaaacaaaucca

SEQ ID NO: 183481 - RNA, 23 nt, Human
caccaugugaauuuaagcaggac

SEQ ID NO: 183482 - RNA, 22 nt, Human
cacccacccaaauccaccccca

SEQ ID NO: 183483 - RNA, 22 nt, Human
cacccccagguucuccuaguuc

SEQ ID NO: 183484 - RNA, 26 nt, Human
caccuucugccuuuuggugcuggaga

SEQ ID NO: 183485 - RNA, 19 nt, Human
cacugguaccaaacauagc

SEQ ID NO: 183486 - RNA, 26 nt, Human
cagaacaaaaaguuuaaaacucccaa

SEQ ID NO: 183487 - RNA, 21 nt, Human
cagcaguagcuucaaacaggc

SEQ ID NO: 183488 - RNA, 22 nt, Human
cagccucauggccaagaacaau

SEQ ID NO: 183489 - RNA, 18 nt, Human
caggcacaaaaacagcca

SEQ ID NO: 183490 - RNA, 22 nt, Human
caggccugugcaagaaggacuc

SEQ ID NO: 183491 - RNA, 22 nt, Human
cauuguaaacaaauccauugau

SEQ ID NO: 183492 - RNA, 21 nt, Human
ccacccaaauccacccccagg

SEQ ID NO: 183493 - RNA, 20 nt, Human
ccaggaggaggcagcaucca

SEQ ID NO: 183494 - RNA, 26 nt, Human
ccauggcugaagcagaaccggggucc

SEQ ID NO: 183495 - RNA, 24 nt, Human
cccacccacccaaauccaccccca

SEQ ID NO: 183496 - RNA, 18 nt, Human
ccccacccacccaaaucc

SEQ ID NO: 183497 - RNA, 21 nt, Human
cugcuuccuugcacuuauuuu

SEQ ID NO: 183498 - RNA, 25 nt, Human
gaacaaaaaguuuaaaacucccaac

SEQ ID NO: 183499 - RNA, 20 nt, Human
gaagccagagcaacagacca

SEQ ID NO: 183500 - RNA, 24 nt, Human
gaagccuccucuuuggccccaccc

SEQ ID NO: 183501 - RNA, 21 nt, Human
gaaggccuaagacaaugaaag

SEQ ID NO: 183502 - RNA, 23 nt, Human
gaaugacggcacaaucacauaga

SEQ ID NO: 183503 - RNA, 22 nt, Human
gaggaggcagcauccacuccau

SEQ ID NO: 183504 - RNA, 18 nt, Human
gagugugucauaugugug

SEQ ID NO: 183505 - RNA, 24 nt, Human
gaguugugacuaaacucacacuua

SEQ ID NO: 183506 - RNA, 21 nt, Human
gcucugggggaaaaacggcuu

SEQ ID NO: 183507 - RNA, 22 nt, Human
ggcacaaaaacagccaggagga

SEQ ID NO: 183508 - RNA, 20 nt, Human
ggcuuccaccuucugccuuu

SEQ ID NO: 183509 - RNA, 22 nt, Human
gggcucugggggaaaaacggcu

SEQ ID NO: 183510 - RNA, 24 nt, Human
guaaaacagaggagccacagugag

SEQ ID NO: 183511 - RNA, 21 nt, Human
uaaguuacaaacauucucccu

SEQ ID NO: 183512 - RNA, 23 nt, Human
uacuugacacuaggucccagcac

SEQ ID NO: 183513 - RNA, 18 nt, Human
uagaaaagcuaaagacaa

SEQ ID NO: 183514 - RNA, 18 nt, Human
uagcccuuaggccugggc

SEQ ID NO: 183515 - RNA, 19 nt, Human
ucaaccaaggggcaggccu

SEQ ID NO: 183516 - RNA, 23 nt, Human
uccaauauacauaagccccuaau

SEQ ID NO: 183517 - RNA, 19 nt, Human
ucccagccucauggccaag

SEQ ID NO: 183518 - RNA, 18 nt, Human
ucccugagggagagaaga

SEQ ID NO: 183519 - RNA, 18 nt, Human
ucccugagggagagaagu

SEQ ID NO: 183520 - RNA, 19 nt, Human
ucuuucccagaaauggagg

SEQ ID NO: 183521 - RNA, 22 nt, Human
ugaaaguggaagaaggaaggga

SEQ ID NO: 183522 - RNA, 22 nt, Human
ugacuaaacucacacuuaagcu

SEQ ID NO: 183523 - RNA, 21 nt, Human
uggaagaaggaagggaucguu

SEQ ID NO: 183524 - RNA, 21 nt, Human
uggccaagaacaauaaguuca

SEQ ID NO: 183525 - RNA, 20 nt, Human
uggcugggccccuugaggcu

SEQ ID NO: 183526 - RNA, 22 nt, Human
uguccagaccguccccuuggcu

SEQ ID NO: 183527 - RNA, 24 nt, Human
ugugaaccauggcugaagcagaac

SEQ ID NO: 183528 - RNA, 21 nt, Human
ugugucauaugugugaaccau

SEQ ID NO: 183529 - RNA, 22 nt, Human
uuagauauugagaguuugugcc

SEQ ID NO: 183530 - RNA, 23 nt, Human
uugcacuuguuacugaccaaaga

SEQ ID NO: 183531 - RNA, 23 nt, Human
uuuaaaacucccaaccuggguuu

SEQ ID NO: 183532 - RNA, 20 nt, Human
uuuccagaaagaccugccuu

SEQ ID NO: 183533 - RNA, 22 nt, Human
uuuccuggcacucaccuccuag

SEQ ID NO: 183534 - RNA, 26 nt, Human
uuuuuuuuuuuuuugaaaauacugga

SEQ ID NO: 183535 - RNA, 22 nt, Human
aaaaagcuagcaucuguaucac

SEQ ID NO: 183536 - RNA, 21 nt, Human
aaacuaaaagaccucuuuagu

SEQ ID NO: 183537 - RNA, 24 nt, Human
aaagaagaaaaacucgugcuagaa

SEQ ID NO: 183538 - RNA, 19 nt, Human
aaccccauaauucaucccu

SEQ ID NO: 183539 - RNA, 21 nt, Human
aagaaaaacucgugcuagaaa

SEQ ID NO: 183540 - RNA, 21 nt, Human
aagaggcuaaaaacuaaauca

SEQ ID NO: 183541 - RNA, 19 nt, Human
aagcucacauguucaggac

SEQ ID NO: 183542 - RNA, 24 nt, Human
acugaaacucagagacacuugcug

SEQ ID NO: 183543 - RNA, 18 nt, Human
agaggcuaaaaacuaaau

SEQ ID NO: 183544 - RNA, 25 nt, Human
aucauuuugccuuaacauuuccccu

SEQ ID NO: 183545 - RNA, 21 nt, Human
caaaaugaguacuuaagcuca

SEQ ID NO: 183546 - RNA, 19 nt, Human
caaagccuuuuaccuguuu

SEQ ID NO: 183547 - RNA, 22 nt, Human
caaucaaauuagauccagacaa

SEQ ID NO: 183548 - RNA, 21 nt, Human
caccuggauuuagcccuuggg

SEQ ID NO: 183549 - RNA, 24 nt, Human
cacuggggacaaaaugaguacuua

SEQ ID NO: 183550 - RNA, 24 nt, Human
cacuguucaaaguaguuaguccca

SEQ ID NO: 183551 - RNA, 22 nt, Human
ccagacaagguugaguauaaac

SEQ ID NO: 183552 - RNA, 19 nt, Human
ccuggaucucuguggcugg

SEQ ID NO: 183553 - RNA, 21 nt, Human
ccuguagacauacaauagcau

SEQ ID NO: 183554 - RNA, 21 nt, Human
ccuugggcugucaaaugcccu

SEQ ID NO: 183555 - RNA, 19 nt, Human
cuggcugaaccaucugugg

SEQ ID NO: 183556 - RNA, 18 nt, Human
cuggugauggcaaggaca

SEQ ID NO: 183557 - RNA, 19 nt, Human
cuugacauuacauggcuac

SEQ ID NO: 183558 - RNA, 22 nt, Human
gaaagaggcuaaaaacuaaauc

SEQ ID NO: 183559 - RNA, 26 nt, Human
gacuuuucuguuuuccuaucuuccuu

SEQ ID NO: 183560 - RNA, 20 nt, Human
gaguacugugacuuuucugu

SEQ ID NO: 183561 - RNA, 21 nt, Human
gauggcaaggacagugaagga

SEQ ID NO: 183562 - RNA, 18 nt, Human
ggaauuuuuccaggacau

SEQ ID NO: 183563 - RNA, 18 nt, Human
ggaguccccaaagccugg

SEQ ID NO: 183564 - RNA, 22 nt, Human
guccccaaagccuggaucucug

SEQ ID NO: 183565 - RNA, 22 nt, Human
guuaguaauggucauuccuucu

SEQ ID NO: 183566 - RNA, 23 nt, Human
uaaaucaaacacuggucgauaag

SEQ ID NO: 183567 - RNA, 22 nt, Human
uacaauagcaugcaaucuaaag

SEQ ID NO: 183568 - RNA, 24 nt, Human
uagcaucuguaucacuaacccugc

SEQ ID NO: 183569 - RNA, 21 nt, Human
uagcaugcaaucuaaagaaga

SEQ ID NO: 183570 - RNA, 22 nt, Human
ucaacacuguucaaaguaguua

SEQ ID NO: 183571 - RNA, 21 nt, Human
ucagagacacuugcuggcuug

SEQ ID NO: 183572 - RNA, 20 nt, Human
ucccagaccagaugccuucc

SEQ ID NO: 183573 - RNA, 20 nt, Human
ucucuguggcuggugauggc

SEQ ID NO: 183574 - RNA, 19 nt, Human
ucuguuuuccuaucuuccu

SEQ ID NO: 183575 - RNA, 20 nt, Human
ucuuucauuccugagauaga

SEQ ID NO: 183576 - RNA, 22 nt, Human
ugagauagagagaacugaguca

SEQ ID NO: 183577 - RNA, 20 nt, Human
ugaguauaaacuaaaagacc

SEQ ID NO: 183578 - RNA, 20 nt, Human
ugcaaucuaaagaagaaaaa

SEQ ID NO: 183579 - RNA, 21 nt, Human
ugcccuguagacauacaauag

SEQ ID NO: 183580 - RNA, 24 nt, Human
uggcaaggacagugaaggacagga

SEQ ID NO: 183581 - RNA, 19 nt, Human
uguaaggauuucugaaauu

SEQ ID NO: 183582 - RNA, 23 nt, Human
ugucaaaugcccuguagacauac

SEQ ID NO: 183583 - RNA, 26 nt, Human
uuaacauuuccccuguuguggauugg

SEQ ID NO: 183584 - RNA, 22 nt, Human
uuacugcuggcugaaccaucug

SEQ ID NO: 183585 - RNA, 19 nt, Human
uuagucccagaccagaugc

SEQ ID NO: 183586 - RNA, 24 nt, Human
uugaguacugugacuuuucuguuu

SEQ ID NO: 183587 - RNA, 23 nt, Human
uugccuagcauuacugcuggcug

SEQ ID NO: 183588 - RNA, 26 nt, Human
uuuaaaaauccucacauaaagcccuu

SEQ ID NO: 183589 - RNA, 24 nt, Human
uuuaguacuaaaauagucuauacu

SEQ ID NO: 183590 - RNA, 18 nt, Human
uuugaugggaaagaggcu

SEQ ID NO: 183591 - RNA, 21 nt, Human
cucaaggaagagcuguggaug

SEQ ID NO: 183592 - RNA, 20 nt, Human
gcucaaggaagagcugugga

SEQ ID NO: 183593 - RNA, 21 nt, Human
aaaaaacacuuucuaaaaacu

SEQ ID NO: 183594 - RNA, 22 nt, Human
aacaaaacaggauaaccauugg

SEQ ID NO: 183595 - RNA, 24 nt, Human
aacaacagauccaauuaaaaucca

SEQ ID NO: 183596 - RNA, 25 nt, Human
aagaaaaaugaaaacaacagaucca

SEQ ID NO: 183597 - RNA, 21 nt, Human
aaguggcuauuuugacuuaga

SEQ ID NO: 183598 - RNA, 21 nt, Human
acacaacaucauccagccccu

SEQ ID NO: 183599 - RNA, 19 nt, Human
aggaaagagauuuucucac

SEQ ID NO: 183600 - RNA, 18 nt, Human
agggccauaugccugaaa

SEQ ID NO: 183601 - RNA, 22 nt, Human
augauaaugaagaaaaaugaaa

SEQ ID NO: 183602 - RNA, 22 nt, Human
cacaacacucuuccuaagugaa

SEQ ID NO: 183603 - RNA, 22 nt, Human
caggacagagcuucaagccuug

SEQ ID NO: 183604 - RNA, 18 nt, Human
cagggccauaugccugaa

SEQ ID NO: 183605 - RNA, 19 nt, Human
ccucagcuucucuguguac

SEQ ID NO: 183606 - RNA, 24 nt, Human
cuaaaacagagcaggccaaacgca

SEQ ID NO: 183607 - RNA, 19 nt, Human
cucgaacacuggacaaaua

SEQ ID NO: 183608 - RNA, 18 nt, Human
cugcagcagccaaagcag

SEQ ID NO: 183609 - RNA, 19 nt, Human
cugcagcagccaaagcagg

SEQ ID NO: 183610 - RNA, 19 nt, Human
cuguguacuggcugucucc

SEQ ID NO: 183611 - RNA, 24 nt, Human
gaacacuggacaaauauauucacu

SEQ ID NO: 183612 - RNA, 21 nt, Human
gagcacucgaacacuggacaa

SEQ ID NO: 183613 - RNA, 19 nt, Human
gaucagggccauaugccug

SEQ ID NO: 183614 - RNA, 20 nt, Human
guguaacugcuguaagugca

SEQ ID NO: 183615 - RNA, 18 nt, Human
uaaauauuguaguugcug

SEQ ID NO: 183616 - RNA, 18 nt, Human
uaacacauucucaaaaca

SEQ ID NO: 183617 - RNA, 23 nt, Human
uaaccgaaucuaaaguccauguu

SEQ ID NO: 183618 - RNA, 19 nt, Human
uaacuguagcaccucagca

SEQ ID NO: 183619 - RNA, 25 nt, Human
uaacuucaaaaaacacuuucuaaaa

SEQ ID NO: 183620 - RNA, 18 nt, Human
uaaguggaccagcaacca

SEQ ID NO: 183621 - RNA, 18 nt, Human
uaaguucugacucaucua

SEQ ID NO: 183622 - RNA, 19 nt, Human
uacaucaaaacuaaguucu

SEQ ID NO: 183623 - RNA, 23 nt, Human
uaccugagcuccuuuuugacugu

SEQ ID NO: 183624 - RNA, 23 nt, Human
uagaaucaauccaacugacugca

SEQ ID NO: 183625 - RNA, 23 nt, Human
uaguugcuguuauuacacauuaa

SEQ ID NO: 183626 - RNA, 22 nt, Human
uaugccugaaaugaacaaaaca

SEQ ID NO: 183627 - RNA, 25 nt, Human
uaugucaaauuuugucccugagaua

SEQ ID NO: 183628 - RNA, 20 nt, Human
uauuguaguugcuguuauua

SEQ ID NO: 183629 - RNA, 21 nt, Human
uauuuacuauauacauuaucu

SEQ ID NO: 183630 - RNA, 21 nt, Human
uauuuugacuuagauggugca

SEQ ID NO: 183631 - RNA, 24 nt, Human
ucccaggacagagcuucaagccuu

SEQ ID NO: 183632 - RNA, 21 nt, Human
ucuaggagaauuacaaaaaaa

SEQ ID NO: 183633 - RNA, 21 nt, Human
ugaaaugaacaaaacaggaua

SEQ ID NO: 183634 - RNA, 21 nt, Human
ugaaaugaacaaaacaggaua

SEQ ID NO: 183635 - RNA, 19 nt, Human
ugagcagcuuagaccaguc

SEQ ID NO: 183636 - RNA, 20 nt, Human
ugagcagcuuagaccagucc

SEQ ID NO: 183637 - RNA, 23 nt, Human
uggaaagacauacaaauaugaaa

SEQ ID NO: 183638 - RNA, 27 nt, Human
uguaagugcauuuauauguguuuaugu

SEQ ID NO: 183639 - RNA, 23 nt, Human
uguacuggcugucuccugaaucu

SEQ ID NO: 183640 - RNA, 19 nt, Human
ugugaaagaucaaagguua

SEQ ID NO: 183641 - RNA, 22 nt, Human
uguugagcacucgaacacugga

SEQ ID NO: 183642 - RNA, 23 nt, Human
uuagaaucaauccaacugacugc

SEQ ID NO: 183643 - RNA, 18 nt, Human
uuauugguucauuuauua

SEQ ID NO: 183644 - RNA, 20 nt, Human
uucacaacacucuuccuaag

SEQ ID NO: 183645 - RNA, 18 nt, Human
uucccaggacagagcuuc

SEQ ID NO: 183646 - RNA, 18 nt, Human
uucuguccaacauacaga

SEQ ID NO: 183647 - RNA, 19 nt, Human
uucuuuuauagguuaucug

SEQ ID NO: 183648 - RNA, 19 nt, Human
uugaaauauuuauauccuc

SEQ ID NO: 183649 - RNA, 22 nt, Human
uuuauuauacuuguuuauucug

SEQ ID NO: 183650 - RNA, 22 nt, Human
aaaaaaaauacagugagaacaa

SEQ ID NO: 183651 - RNA, 25 nt, Human
aaaaaaauacagugagaacaaagac

SEQ ID NO: 183652 - RNA, 22 nt, Human
aaaaacaugaacagagcuuggg

SEQ ID NO: 183653 - RNA, 23 nt, Human
aaacaggacuuaaagccagccca

SEQ ID NO: 183654 - RNA, 20 nt, Human
aagagaccagagacagccac

SEQ ID NO: 183655 - RNA, 27 nt, Human
aagagaccagagacagccacuccugac

SEQ ID NO: 183656 - RNA, 21 nt, Human
aaggaagagaccagagacagc

SEQ ID NO: 183657 - RNA, 20 nt, Human
accacaagaggaauaaucaa

SEQ ID NO: 183658 - RNA, 20 nt, Human
acgggacggagggacgcaca

SEQ ID NO: 183659 - RNA, 20 nt, Human
agaaagaggcgugcagggau

SEQ ID NO: 183660 - RNA, 22 nt, Human
aggaauaaucaagaacuguggc

SEQ ID NO: 183661 - RNA, 25 nt, Human
auaaaaaaaauacagugagaacaaa

SEQ ID NO: 183662 - RNA, 20 nt, Human
aucacuucaucagaaagagg

SEQ ID NO: 183663 - RNA, 23 nt, Human
cacaaaaacaugaacagagcuug

SEQ ID NO: 183664 - RNA, 18 nt, Human
cagagcuugggugacaug

SEQ ID NO: 183665 - RNA, 19 nt, Human
caggcuccggggugacccc

SEQ ID NO: 183666 - RNA, 19 nt, Human
cagggauccaucugcagag

SEQ ID NO: 183667 - RNA, 19 nt, Human
ccaggauaaaaaaaauaca

SEQ ID NO: 183668 - RNA, 27 nt, Human
cccaggauaaaaaaaauacagugagaa

SEQ ID NO: 183669 - RNA, 19 nt, Human
ccccaggauaaaaaaaaua

SEQ ID NO: 183670 - RNA, 22 nt, Human
cuccggggugaccccgggacgg

SEQ ID NO: 183671 - RNA, 18 nt, Human
cugacacaugggcagagu

SEQ ID NO: 183672 - RNA, 21 nt, Human
cugacacaugggcagaguuuc

SEQ ID NO: 183673 - RNA, 24 nt, Human
gacuagcuacagacaccuacuaca

SEQ ID NO: 183674 - RNA, 20 nt, Human
gcuacagacaccuacuacaa

SEQ ID NO: 183675 - RNA, 20 nt, Human
ggacgcacagguagcugaag

SEQ ID NO: 183676 - RNA, 18 nt, Human
uaaagccagcccagaaac

SEQ ID NO: 183677 - RNA, 20 nt, Human
uaaagccagcccagaaacuc

SEQ ID NO: 183678 - RNA, 23 nt, Human
uaaaggaagagaccagagacagc

SEQ ID NO: 183679 - RNA, 22 nt, Human
uaacacauugcacgaggaaguc

SEQ ID NO: 183680 - RNA, 21 nt, Human
uagcugaagggcgagaggccg

SEQ ID NO: 183681 - RNA, 20 nt, Human
uaucuguguguuugugugug

SEQ ID NO: 183682 - RNA, 23 nt, Human
ucaagaacuguggccccaggaua

SEQ ID NO: 183683 - RNA, 21 nt, Human
ucagcuaaaggaagagaccag

SEQ ID NO: 183684 - RNA, 23 nt, Human
uccuuugacuuuaggucaagcuu

SEQ ID NO: 183685 - RNA, 18 nt, Human
ucuguguguuugugugug

SEQ ID NO: 183686 - RNA, 18 nt, Human
ugaaaugcuacacagguc

SEQ ID NO: 183687 - RNA, 22 nt, Human
ugaacagagcuugggugacaug

SEQ ID NO: 183688 - RNA, 19 nt, Human
ugaagugcucaaucugaaa

SEQ ID NO: 183689 - RNA, 22 nt, Human
ugagaacaaagaccucaggagu

SEQ ID NO: 183690 - RNA, 21 nt, Human
ugaugaacaucauaaaaaaug

SEQ ID NO: 183691 - RNA, 20 nt, Human
uggccccaggauaaaaaaaa

SEQ ID NO: 183692 - RNA, 19 nt, Human
uggguugcuuuuucaaaca

SEQ ID NO: 183693 - RNA, 23 nt, Human
uguuaguauuuuugauagugaag

SEQ ID NO: 183694 - RNA, 23 nt, Human
uuaaccacaagaggaauaaucaa

SEQ ID NO: 183695 - RNA, 21 nt, Human
uuccagguguggucuugaaga

SEQ ID NO: 183696 - RNA, 19 nt, Human
aaaaaaaaaauuccaggga

SEQ ID NO: 183697 - RNA, 23 nt, Human
aaaaaacacaaauuaagcacugc

SEQ ID NO: 183698 - RNA, 20 nt, Human
aaaacaagaaucacuagcca

SEQ ID NO: 183699 - RNA, 24 nt, Human
aaaacagaaagaaauacagcacac

SEQ ID NO: 183700 - RNA, 23 nt, Human
aaaagagaacagaguuagauaug

SEQ ID NO: 183701 - RNA, 19 nt, Human
aaacaaaacaaaacaaaaa

SEQ ID NO: 183702 - RNA, 25 nt, Human
aaacagaaagaaauacagcacacaa

SEQ ID NO: 183703 - RNA, 19 nt, Human
aaacagcugcacccaaagc

SEQ ID NO: 183704 - RNA, 26 nt, Human
aaaccagguauuaaaaaaacagaaag

SEQ ID NO: 183705 - RNA, 18 nt, Human
aaagaaauacagcacaca

SEQ ID NO: 183706 - RNA, 18 nt, Human
aaagauguaccucuuccc

SEQ ID NO: 183707 - RNA, 19 nt, Human
aaauggccuuuaaucaaag

SEQ ID NO: 183708 - RNA, 18 nt, Human
aacaaccaaaagagaaca

SEQ ID NO: 183709 - RNA, 23 nt, Human
aacguugggguguuuuauuuugg

SEQ ID NO: 183710 - RNA, 19 nt, Human
aagaguucacaaaccauca

SEQ ID NO: 183711 - RNA, 23 nt, Human
aagccaaaacaaaacaaaacaaa

SEQ ID NO: 183712 - RNA, 26 nt, Human
aagccaaaacaaaacaaaacaaaaaa

SEQ ID NO: 183713 - RNA, 19 nt, Human
aagcuauaaaauuuaagca

SEQ ID NO: 183714 - RNA, 22 nt, Human
aaguaauuccaaacuggaauaa

SEQ ID NO: 183715 - RNA, 24 nt, Human
aaugcuccacaaaaguaaaaagaa

SEQ ID NO: 183716 - RNA, 23 nt, Human
acaaaacaaaacaaaaaaccugu

SEQ ID NO: 183717 - RNA, 22 nt, Human
acacaaaaaacucaaacaaccc

SEQ ID NO: 183718 - RNA, 20 nt, Human
acacugcucccaagaacaau

SEQ ID NO: 183719 - RNA, 27 nt, Human
acagaaagaaauacagcacacaaaaaa

SEQ ID NO: 183720 - RNA, 26 nt, Human
accccaaaguaugaaugcuaaagagu

SEQ ID NO: 183721 - RNA, 22 nt, Human
acuaaacagcugcacccaaagc

SEQ ID NO: 183722 - RNA, 22 nt, Human
agaaacaaucugggucauucug

SEQ ID NO: 183723 - RNA, 23 nt, Human
agaaagaaauacagcacacaaaa

SEQ ID NO: 183724 - RNA, 25 nt, Human
agaaagaaauacagcacacaaaaaa

SEQ ID NO: 183725 - RNA, 21 nt, Human
agccaaaggcaauaagaaagu

SEQ ID NO: 183726 - RNA, 24 nt, Human
agcucauguaacuucagcauccac

SEQ ID NO: 183727 - RNA, 19 nt, Human
aguuaugaacaccuaugag

SEQ ID NO: 183728 - RNA, 23 nt, Human
aguuucugaacaaccaaaagaga

SEQ ID NO: 183729 - RNA, 23 nt, Human
augaagccaaaacaaaacaaaac

SEQ ID NO: 183730 - RNA, 21 nt, Human
caaaacaaaacaaaacaaaaa

SEQ ID NO: 183731 - RNA, 24 nt, Human
caaaacaaaacaaaacaaaaaacc

SEQ ID NO: 183732 - RNA, 21 nt, Human
caaaccaucagaccaauauca

SEQ ID NO: 183733 - RNA, 23 nt, Human
caaagcagaaacaaucuggguca

SEQ ID NO: 183734 - RNA, 21 nt, Human
caagaguucacaaaccaucag

SEQ ID NO: 183735 - RNA, 22 nt, Human
cacaaaaaacucaaacaaccca

SEQ ID NO: 183736 - RNA, 19 nt, Human
cacacaaaaaacucaaaca

SEQ ID NO: 183737 - RNA, 23 nt, Human
cacugcuuaagaaaaaaaaaaaa

SEQ ID NO: 183738 - RNA, 18 nt, Human
cagcaagaguucacaaac

SEQ ID NO: 183739 - RNA, 18 nt, Human
cagcugcacccaaagcag

SEQ ID NO: 183740 - RNA, 23 nt, Human
caguaggugccaauuugaguuua

SEQ ID NO: 183741 - RNA, 20 nt, Human
cauacaauaacaacauuaag

SEQ ID NO: 183742 - RNA, 18 nt, Human
cauguaacuucagcaucc

SEQ ID NO: 183743 - RNA, 25 nt, Human
ccaaaacaaaacaaaacaaaaaacc

SEQ ID NO: 183744 - RNA, 18 nt, Human
ccaauaucaauaagguaa

SEQ ID NO: 183745 - RNA, 19 nt, Human
cccaacccuagacuccaga

SEQ ID NO: 183746 - RNA, 21 nt, Human
cccaacccuagacuccagacc

SEQ ID NO: 183747 - RNA, 18 nt, Human
ccugaagaaaaaucucug

SEQ ID NO: 183748 - RNA, 24 nt, Human
cuaaacagcugcacccaaagcaga

SEQ ID NO: 183749 - RNA, 22 nt, Human
cuauaccacucucccuuccuga

SEQ ID NO: 183750 - RNA, 20 nt, Human
cuauguaaaguaacauacac

SEQ ID NO: 183751 - RNA, 19 nt, Human
cugaacgagaucaaacuga

SEQ ID NO: 183752 - RNA, 18 nt, Human
gaaaagcugacagagagc

SEQ ID NO: 183753 - RNA, 22 nt, Human
gaacuaaacagcugcacccaaa

SEQ ID NO: 183754 - RNA, 25 nt, Human
gacugucucuggcagugauuuccau

SEQ ID NO: 183755 - RNA, 19 nt, Human
gcuccacaaaaguaaaaag

SEQ ID NO: 183756 - RNA, 21 nt, Human
uaaagcuauaaaauuuaagca

SEQ ID NO: 183757 - RNA, 30 nt, Human
uaaaguaacauacacugcucccaagaaccg

SEQ ID NO: 183758 - RNA, 19 nt, Human
uaacaacauacaauaacaa

SEQ ID NO: 183759 - RNA, 20 nt, Human
uaacaacauacaauaacaac

SEQ ID NO: 183760 - RNA, 23 nt, Human
uaacauacacugcucccaagaac

SEQ ID NO: 183761 - RNA, 21 nt, Human
uacacugcucccaagaacaau

SEQ ID NO: 183762 - RNA, 22 nt, Human
uacacugcucccaagaacaaug

SEQ ID NO: 183763 - RNA, 23 nt, Human
uacagcacacaaaaaacucaaac

SEQ ID NO: 183764 - RNA, 21 nt, Human
uaccaaauaaagauacaagga

SEQ ID NO: 183765 - RNA, 21 nt, Human
uacucuaugaagccaaaacaa

SEQ ID NO: 183766 - RNA, 19 nt, Human
uagaggacacuguaacuac

SEQ ID NO: 183767 - RNA, 23 nt, Human
uauaaaauuuaagcaugggcaua

SEQ ID NO: 183768 - RNA, 22 nt, Human
uauaccacucucccuuccugaa

SEQ ID NO: 183769 - RNA, 18 nt, Human
uaugaagccaaaacaaaa

SEQ ID NO: 183770 - RNA, 22 nt, Human
uaugaagccaaaacaaaacaaa

SEQ ID NO: 183771 - RNA, 19 nt, Human
ucugaacuaaacagcugca

SEQ ID NO: 183772 - RNA, 21 nt, Human
ugaaaacaagaaucacuagcc

SEQ ID NO: 183773 - RNA, 22 nt, Human
ugaaaagcugacagagagccug

SEQ ID NO: 183774 - RNA, 21 nt, Human
ugaacaugaacacaugacagg

SEQ ID NO: 183775 - RNA, 24 nt, Human
ugaagccaaaacaaaacaaaacaa

SEQ ID NO: 183776 - RNA, 20 nt, Human
ugacaggaaccgcugcuaug

SEQ ID NO: 183777 - RNA, 24 nt, Human
ugagguguugaguuuuuaaguuuu

SEQ ID NO: 183778 - RNA, 23 nt, Human
ugcacccaaagcagaaacaaucu

SEQ ID NO: 183779 - RNA, 22 nt, Human
ugcccaacccuagacuccagac

SEQ ID NO: 183780 - RNA, 20 nt, Human
ugcuuaagaaaaaaaaaaaa

SEQ ID NO: 183781 - RNA, 24 nt, Human
ugcuuuuuaaaaguuuauuuuaca

SEQ ID NO: 183782 - RNA, 24 nt, Human
uguucuacguaucuugauacuuca

SEQ ID NO: 183783 - RNA, 21 nt, Human
uuaaaaaacacaaauuaagca

SEQ ID NO: 183784 - RNA, 24 nt, Human
uuaaauauuuaacauguagcucau

SEQ ID NO: 183785 - RNA, 23 nt, Human
uuagugccugcuuuuuaaaaguu

SEQ ID NO: 183786 - RNA, 19 nt, Human
uucaguaaggaaaaaaaga

SEQ ID NO: 183787 - RNA, 23 nt, Human
uuccauauuagugcaauguuacu

SEQ ID NO: 183788 - RNA, 22 nt, Human
uuuuuuuuuuuuuuuuuuacag

SEQ ID NO: 183789 - RNA, 21 nt, Human
aaacaacauaaaacucuuccc

SEQ ID NO: 183790 - RNA, 21 nt, Human
aaauguugaaguuucugaacc

SEQ ID NO: 183791 - RNA, 21 nt, Human
aacaaugagguacugccauuu

SEQ ID NO: 183792 - RNA, 23 nt, Human
aacugcuucuuaauggcagcaau

SEQ ID NO: 183793 - RNA, 20 nt, Human
aacuucccuuucucuuuccu

SEQ ID NO: 183794 - RNA, 21 nt, Human
aagaaaaaacuaucaccauuu

SEQ ID NO: 183795 - RNA, 22 nt, Human
aagcagccuguugcugauugcc

SEQ ID NO: 183796 - RNA, 18 nt, Human
aauuccauaauucuugcu

SEQ ID NO: 183797 - RNA, 23 nt, Human
acccuaaaaauaaauaggaaagg

SEQ ID NO: 183798 - RNA, 19 nt, Human
acccuguuguccuuuucuu

SEQ ID NO: 183799 - RNA, 22 nt, Human
accucaaaauguauugcacaag

SEQ ID NO: 183800 - RNA, 24 nt, Human
acuccuuuucagaagcagccuguu

SEQ ID NO: 183801 - RNA, 18 nt, Human
acuucccuuucucuuucc

SEQ ID NO: 183802 - RNA, 19 nt, Human
acuuucugacucaagccua

SEQ ID NO: 183803 - RNA, 18 nt, Human
agcuucuaauaaggcuuc

SEQ ID NO: 183804 - RNA, 18 nt, Human
auggcagcaauuuuuugu

SEQ ID NO: 183805 - RNA, 22 nt, Human
caaguguggacaguuuuccaag

SEQ ID NO: 183806 - RNA, 22 nt, Human
cagaaaaaauccacuaaguuuc

SEQ ID NO: 183807 - RNA, 19 nt, Human
caguaguguuuuuuccucu

SEQ ID NO: 183808 - RNA, 20 nt, Human
ccaaugccuuuaacuccucc

SEQ ID NO: 183809 - RNA, 21 nt, Human
cccaagagaaaacugaagaaa

SEQ ID NO: 183810 - RNA, 19 nt, Human
ccucuaggcuuuuguuacu

SEQ ID NO: 183811 - RNA, 23 nt, Human
ccucugaaaaauauaaguacaaa

SEQ ID NO: 183812 - RNA, 24 nt, Human
ccuuugauuuuaacucaagcugga

SEQ ID NO: 183813 - RNA, 18 nt, Human
cucagagugucaacuuua

SEQ ID NO: 183814 - RNA, 19 nt, Human
cuuuauuuaucuguuucuc

SEQ ID NO: 183815 - RNA, 23 nt, Human
gacaaugagaaauccuagaaaga

SEQ ID NO: 183816 - RNA, 24 nt, Human
gaggggcccugaaugacaacuuca

SEQ ID NO: 183817 - RNA, 22 nt, Human
gccuguugcugauugccuccuu

SEQ ID NO: 183818 - RNA, 24 nt, Human
gccuucaugcucuuaauuugauuu

SEQ ID NO: 183819 - RNA, 18 nt, Human
ggggcccugaaugacaac

SEQ ID NO: 183820 - RNA, 21 nt, Human
guccuuuucuucuccuaacuc

SEQ ID NO: 183821 - RNA, 20 nt, Human
guuguccuuuucuucuccua

SEQ ID NO: 183822 - RNA, 21 nt, Human
uaaaaauaaauaggaaaggua

SEQ ID NO: 183823 - RNA, 23 nt, Human
uaaacaacauaaaacucuuccca

SEQ ID NO: 183824 - RNA, 18 nt, Human
uaaaggcagucugcaacu

SEQ ID NO: 183825 - RNA, 21 nt, Human
uaauuuaucagaaaaaaucca

SEQ ID NO: 183826 - RNA, 18 nt, Human
uacaugaggggcccugaa

SEQ ID NO: 183827 - RNA, 21 nt, Human
uagugaugaaauggcugcuuc

SEQ ID NO: 183828 - RNA, 19 nt, Human
uaguguuuuuuccucugaa

SEQ ID NO: 183829 - RNA, 24 nt, Human
uauacuguucuucuuucucuucca

SEQ ID NO: 183830 - RNA, 25 nt, Human
uaucagaaaaaauccacuaaguuuc

SEQ ID NO: 183831 - RNA, 21 nt, Human
ucaaccucuagcuuuucaaga

SEQ ID NO: 183832 - RNA, 25 nt, Human
ucaagagcagaaauuuucucuuuac

SEQ ID NO: 183833 - RNA, 20 nt, Human
ucaccucaaaauguauugca

SEQ ID NO: 183834 - RNA, 23 nt, Human
ucacucaaauggcuuucuguacc

SEQ ID NO: 183835 - RNA, 21 nt, Human
uccaagcagcagucacccaau

SEQ ID NO: 183836 - RNA, 18 nt, Human
uccaaugccuuuaacucc

SEQ ID NO: 183837 - RNA, 23 nt, Human
uccacugacuuaaguuuuucuuc

SEQ ID NO: 183838 - RNA, 18 nt, Human
uccuuccuucuguaaggc

SEQ ID NO: 183839 - RNA, 18 nt, Human
ucugcuaauuuugcagcc

SEQ ID NO: 183840 - RNA, 21 nt, Human
ucuggaauucuucaucugugg

SEQ ID NO: 183841 - RNA, 21 nt, Human
ucuguaccuuuuuuauacugu

SEQ ID NO: 183842 - RNA, 25 nt, Human
ucuuaauuugauuuucuuuuucuuu

SEQ ID NO: 183843 - RNA, 22 nt, Human
ucuugcucuugucgucuuccau

SEQ ID NO: 183844 - RNA, 27 nt, Human
ucuuucuucuuaguuucaaguucagcu

SEQ ID NO: 183845 - RNA, 25 nt, Human
ugaaugacaacuucauucucaaaga

SEQ ID NO: 183846 - RNA, 26 nt, Human
ugaaugacaacuucauucucaaagag

SEQ ID NO: 183847 - RNA, 18 nt, Human
ugagguacugccauuugg

SEQ ID NO: 183848 - RNA, 24 nt, Human
ugaugaaauggcugcuucuuuuuc

SEQ ID NO: 183849 - RNA, 19 nt, Human
ugauuagcucauuuguuuu

SEQ ID NO: 183850 - RNA, 21 nt, Human
ugcauacaauacaguuaugua

SEQ ID NO: 183851 - RNA, 22 nt, Human
ugcuucuuuuucggauaggcug

SEQ ID NO: 183852 - RNA, 18 nt, Human
uggaauaaacuugguuuu

SEQ ID NO: 183853 - RNA, 19 nt, Human
uggaauucuucaucugugg

SEQ ID NO: 183854 - RNA, 18 nt, Human
uggucuuuuggcuacaug

SEQ ID NO: 183855 - RNA, 20 nt, Human
ugugaacuucccuuucucuu

SEQ ID NO: 183856 - RNA, 20 nt, Human
ugugcaagagaauucacaug

SEQ ID NO: 183857 - RNA, 19 nt, Human
ugugcaaguuuuaauuaac

SEQ ID NO: 183858 - RNA, 23 nt, Human
uguuacaagacuuucaauaucag

SEQ ID NO: 183859 - RNA, 22 nt, Human
uguuacuuuuuucaugugaaga

SEQ ID NO: 183860 - RNA, 23 nt, Human
uuacuaccuacuaauguugauua

SEQ ID NO: 183861 - RNA, 20 nt, Human
uuaguuguuuacuaagacug

SEQ ID NO: 183862 - RNA, 18 nt, Human
uucaaacucuggaauucu

SEQ ID NO: 183863 - RNA, 23 nt, Human
uucaacagaucaaccugaauaaa

SEQ ID NO: 183864 - RNA, 21 nt, Human
uucaagaugaagaucggagcc

SEQ ID NO: 183865 - RNA, 21 nt, Human
uucaauaucagccuucaugcu

SEQ ID NO: 183866 - RNA, 27 nt, Human
uucaauaucagccuucaugcucuuaau

SEQ ID NO: 183867 - RNA, 21 nt, Human
uucauggaauaaacuugguuu

SEQ ID NO: 183868 - RNA, 23 nt, Human
uucauggaauaaacuugguuuuc

SEQ ID NO: 183869 - RNA, 21 nt, Human
uuccauucacccuuuaaacaa

SEQ ID NO: 183870 - RNA, 20 nt, Human
uuccucugaaaaauauaagu

SEQ ID NO: 183871 - RNA, 24 nt, Human
uuccucugaaaaauauaaguacaa

SEQ ID NO: 183872 - RNA, 26 nt, Human
uucuccaucuugcucuugucgucuuc

SEQ ID NO: 183873 - RNA, 18 nt, Human
uucuucuuucucuuccau

SEQ ID NO: 183874 - RNA, 20 nt, Human
uugaaguuucugaaccaauu

SEQ ID NO: 183875 - RNA, 21 nt, Human
uugaugcuguguaaaucuuga

SEQ ID NO: 183876 - RNA, 25 nt, Human
uuucacacuuaaauucacauguucu

SEQ ID NO: 183877 - RNA, 22 nt, Human
uuucugaaccaauucuuugugu

SEQ ID NO: 183878 - RNA, 20 nt, Human
uuugagacuuuaacucuguu

SEQ ID NO: 183879 - RNA, 22 nt, Human
aauacaauuaguuucccugauu

SEQ ID NO: 183880 - RNA, 22 nt, Human
acaaccaaucacugcaacaacu

SEQ ID NO: 183881 - RNA, 21 nt, Human
auauauuaggaccacuaaacu

SEQ ID NO: 183882 - RNA, 21 nt, Human
caaccaaucacugcaacaacu

SEQ ID NO: 183883 - RNA, 19 nt, Human
cagaggugaacaaccccac

SEQ ID NO: 183884 - RNA, 20 nt, Human
cagaucccaagucuagaaag

SEQ ID NO: 183885 - RNA, 18 nt, Human
ccgccguccugggccgcg

SEQ ID NO: 183886 - RNA, 22 nt, Human
cuguacagaggugaacaacccc

SEQ ID NO: 183887 - RNA, 23 nt, Human
gaaaaagacaaccaaucacugca

SEQ ID NO: 183888 - RNA, 20 nt, Human
gaaauuggaagauuuaggua

SEQ ID NO: 183889 - RNA, 22 nt, Human
uaaaaagauuuacaccaaucaa

SEQ ID NO: 183890 - RNA, 21 nt, Human
uagaaaaagacaaccaaucac

SEQ ID NO: 183891 - RNA, 18 nt, Human
uauaaaaaaaaaacuuuu

SEQ ID NO: 183892 - RNA, 21 nt, Human
uauaaaaagauuuacaccaau

SEQ ID NO: 183893 - RNA, 25 nt, Human
uauaaaaagauuuacaccaaucaag

SEQ ID NO: 183894 - RNA, 19 nt, Human
ucagauaaagcagagcuga

SEQ ID NO: 183895 - RNA, 19 nt, Human
ucuagaaaaagacaaccaa

SEQ ID NO: 183896 - RNA, 21 nt, Human
ugaauuauaaaaaaaaaacuu

SEQ ID NO: 183897 - RNA, 22 nt, Human
ugcacuguucucagaaauuuua

SEQ ID NO: 183898 - RNA, 19 nt, Human
uuuuagaaacucuuaccau

SEQ ID NO: 183899 - RNA, 21 nt, Human
uuuuuuuuuuuucuuuuauuu

SEQ ID NO: 183900 - RNA, 24 nt, Human
uuuuuuuuuuuuuuuuuuucuuuu

SEQ ID NO: 183901 - RNA, 23 nt, Human
aaauauuagcauugauacccauu

SEQ ID NO: 183902 - RNA, 23 nt, Human
aacaggaaagaacaaaagggucu

SEQ ID NO: 183903 - RNA, 21 nt, Human
aaccccuuccuuccucaccuc

SEQ ID NO: 183904 - RNA, 21 nt, Human
aagagccagaaccuuugggug

SEQ ID NO: 183905 - RNA, 21 nt, Human
aagcuagaagacgaggccaga

SEQ ID NO: 183906 - RNA, 21 nt, Human
acacuggauuaugaccagacc

SEQ ID NO: 183907 - RNA, 19 nt, Human
acagauggggugggcugaa

SEQ ID NO: 183908 - RNA, 20 nt, Human
acccauuuuauccuccaacu

SEQ ID NO: 183909 - RNA, 21 nt, Human
agagcaggaccaagcacugga

SEQ ID NO: 183910 - RNA, 24 nt, Human
agauauccucccacaaggcccuuc

SEQ ID NO: 183911 - RNA, 18 nt, Human
agcagacauuccuugucc

SEQ ID NO: 183912 - RNA, 21 nt, Human
aggaguugccacuggggauac

SEQ ID NO: 183913 - RNA, 20 nt, Human
aggccaacacuggacagcaa

SEQ ID NO: 183914 - RNA, 24 nt, Human
aguacacugccucucucucccucc

SEQ ID NO: 183915 - RNA, 18 nt, Human
agugcagcccgggcugcc

SEQ ID NO: 183916 - RNA, 21 nt, Human
auuagcagugugggaacugag

SEQ ID NO: 183917 - RNA, 18 nt, Human
auucacuauuggggcugg

SEQ ID NO: 183918 - RNA, 23 nt, Human
caaaagauauccucccacaaggc

SEQ ID NO: 183919 - RNA, 21 nt, Human
caagcuagaagacgaggccag

SEQ ID NO: 183920 - RNA, 18 nt, Human
caaguacacugccucucu

SEQ ID NO: 183921 - RNA, 26 nt, Human
caaguacacugccucucucucccucc

SEQ ID NO: 183922 - RNA, 20 nt, Human
cacugccucucucucccucc

SEQ ID NO: 183923 - RNA, 23 nt, Human
cacugccucucucucccuccuga

SEQ ID NO: 183924 - RNA, 18 nt, Human
cagagaaagaaagaaacc

SEQ ID NO: 183925 - RNA, 22 nt, Human
caguagcaccgacucgcucucu

SEQ ID NO: 183926 - RNA, 19 nt, Human
cauagcagauuacagagaa

SEQ ID NO: 183927 - RNA, 19 nt, Human
cauguacaccagcauuaca

SEQ ID NO: 183928 - RNA, 24 nt, Human
ccaaaagauauccucccacaaggc

SEQ ID NO: 183929 - RNA, 18 nt, Human
ccagaacaguccuguggc

SEQ ID NO: 183930 - RNA, 18 nt, Human
ccagagcaggaccaagca

SEQ ID NO: 183931 - RNA, 24 nt, Human
ccagcauuacaaaugauccuguaa

SEQ ID NO: 183932 - RNA, 23 nt, Human
ccaguagcaccgacucgcucucu

SEQ ID NO: 183933 - RNA, 24 nt, Human
ccaguagcaccgacucgcucucuc

SEQ ID NO: 183934 - RNA, 20 nt, Human
cccaccaaagcagcaaggaa

SEQ ID NO: 183935 - RNA, 20 nt, Human
ccccccagagcagacauucc

SEQ ID NO: 183936 - RNA, 25 nt, Human
cccccucucaccacccacugaggcc

SEQ ID NO: 183937 - RNA, 20 nt, Human
ccccuacaacaggaaagaac

SEQ ID NO: 183938 - RNA, 24 nt, Human
ccccuacaacaggaaagaacaaaa

SEQ ID NO: 183939 - RNA, 19 nt, Human
ccccuuccuuccucaccuc

SEQ ID NO: 183940 - RNA, 19 nt, Human
cccgcugcgccuacccgga

SEQ ID NO: 183941 - RNA, 18 nt, Human
ccggcgccaguagcaccg

SEQ ID NO: 183942 - RNA, 21 nt, Human
ccggcgccaguagcaccgacu

SEQ ID NO: 183943 - RNA, 27 nt, Human
ccuaaccuagccuuaaccuccaaaggc

SEQ ID NO: 183944 - RNA, 22 nt, Human
ccucccuccaggagaugggggc

SEQ ID NO: 183945 - RNA, 18 nt, Human
cgccaguagcaccgacuc

SEQ ID NO: 183946 - RNA, 20 nt, Human
cggcacccagguccaguccc

SEQ ID NO: 183947 - RNA, 30 nt, Human
cucacuguuaugcacacguaucagcugcuu

SEQ ID NO: 183948 - RNA, 18 nt, Human
cugcauaccugacacagc

SEQ ID NO: 183949 - RNA, 19 nt, Human
cugcugccuccugggaagc

SEQ ID NO: 183950 - RNA, 26 nt, Human
cugcugccuccugggaagccccagug

SEQ ID NO: 183951 - RNA, 24 nt, Human
gaggccagagcagcuuucauagua

SEQ ID NO: 183952 - RNA, 20 nt, Human
gcaacuuugggucagacugc

SEQ ID NO: 183953 - RNA, 23 nt, Human
gcagauuacagagaaagaaagaa

SEQ ID NO: 183954 - RNA, 25 nt, Human
gcagauuacagagaaagaaagaaac

SEQ ID NO: 183955 - RNA, 23 nt, Human
ggacaaggacacaugacagagga

SEQ ID NO: 183956 - RNA, 24 nt, Human
ggacagcaaccccuuccuuccuca

SEQ ID NO: 183957 - RNA, 18 nt, Human
ggcagcggcuccgcucgg

SEQ ID NO: 183958 - RNA, 20 nt, Human
ggccaaaagauauccuccca

SEQ ID NO: 183959 - RNA, 20 nt, Human
ggcugagcugugcaggaaga

SEQ ID NO: 183960 - RNA, 19 nt, Human
gggccguccccagguggag

SEQ ID NO: 183961 - RNA, 20 nt, Human
gggcuccagggucccuuccc

SEQ ID NO: 183962 - RNA, 24 nt, Human
ggguccagucaacacagcagagga

SEQ ID NO: 183963 - RNA, 21 nt, Human
ggguuugcuuuaaaugaaggg

SEQ ID NO: 183964 - RNA, 23 nt, Human
gguggagugcagggccuaaccua

SEQ ID NO: 183965 - RNA, 20 nt, Human
gucccagggcuccagggucc

SEQ ID NO: 183966 - RNA, 18 nt, Human
uaacaggaguugccacug

SEQ ID NO: 183967 - RNA, 21 nt, Human
uaaccuagccuuaaccuccaa

SEQ ID NO: 183968 - RNA, 24 nt, Human
uaaccuccaaaggcaccuggggug

SEQ ID NO: 183969 - RNA, 20 nt, Human
uacacggccaaaagauaucc

SEQ ID NO: 183970 - RNA, 19 nt, Human
uacagauggggugggcuga

SEQ ID NO: 183971 - RNA, 21 nt, Human
uagaagacgaggccagagcag

SEQ ID NO: 183972 - RNA, 22 nt, Human
uagaauuuccaacgcaccuccc

SEQ ID NO: 183973 - RNA, 22 nt, Human
uagcaccgacucgcucucucgg

SEQ ID NO: 183974 - RNA, 23 nt, Human
uauccucccacaaggcccauggc

SEQ ID NO: 183975 - RNA, 21 nt, Human
uauucacuauuggggcugggu

SEQ ID NO: 183976 - RNA, 20 nt, Human
ucaaagcgaccaggccaaca

SEQ ID NO: 183977 - RNA, 21 nt, Human
ucccagggcuccagggucccu

SEQ ID NO: 183978 - RNA, 20 nt, Human
uccccuaauucccccuuggg

SEQ ID NO: 183979 - RNA, 20 nt, Human
uccccuacaacaggaaagaa

SEQ ID NO: 183980 - RNA, 26 nt, Human
ucccugaggaagaagaaauauugugg

SEQ ID NO: 183981 - RNA, 23 nt, Human
ucccugcauguacaccagcauua

SEQ ID NO: 183982 - RNA, 18 nt, Human
ucccuggaaauauuagca

SEQ ID NO: 183983 - RNA, 21 nt, Human
ucccuuccaguacagaugggg

SEQ ID NO: 183984 - RNA, 23 nt, Human
uccugcauuccagcagacuugac

SEQ ID NO: 183985 - RNA, 19 nt, Human
ugaggaagaagaaauauug

SEQ ID NO: 183986 - RNA, 19 nt, Human
ugaguucccugcauguaca

SEQ ID NO: 183987 - RNA, 22 nt, Human
ugaugaggggccguccccaggu

SEQ ID NO: 183988 - RNA, 23 nt, Human
ugccacuggggauacaggucugu

SEQ ID NO: 183989 - RNA, 19 nt, Human
uggacagcaaccccuuccu

SEQ ID NO: 183990 - RNA, 22 nt, Human
uggggagaacagcuuccucccc

SEQ ID NO: 183991 - RNA, 25 nt, Human
ugggguggggagaacagcuuccucc

SEQ ID NO: 183992 - RNA, 21 nt, Human
ugggguugggaaccgugcgug

SEQ ID NO: 183993 - RNA, 18 nt, Human
ugggucagacugccaggc

SEQ ID NO: 183994 - RNA, 19 nt, Human
ugucccaccaaagcagcaa

SEQ ID NO: 183995 - RNA, 22 nt, Human
ugugcaggaagaaucaaagcga

SEQ ID NO: 183996 - RNA, 22 nt, Human
uguuugggacuugaaagggggu

SEQ ID NO: 183997 - RNA, 21 nt, Human
uucacacuggauuaugaccag

SEQ ID NO: 183998 - RNA, 19 nt, Human
uuccuuccucaccucaucu

SEQ ID NO: 183999 - RNA, 27 nt, Human
uuugcuaauuugggacccucccuccaa

SEQ ID NO: 184000 - RNA, 18 nt, Human
aaaacacagcacagagaa

SEQ ID NO: 184001 - RNA, 21 nt, Human
accagggugugaaagcggugg

SEQ ID NO: 184002 - RNA, 18 nt, Human
agaccagggugugaaagc

SEQ ID NO: 184003 - RNA, 23 nt, Human
caagacagucaacuucucccucc

SEQ ID NO: 184004 - RNA, 24 nt, Human
cagcacagagaaacuguggcuuca

SEQ ID NO: 184005 - RNA, 21 nt, Human
cuaauuaucaagacagucaac

SEQ ID NO: 184006 - RNA, 18 nt, Human
guggcuucagcucaaccu

SEQ ID NO: 184007 - RNA, 27 nt, Human
ucaacuucucccuccgauguuuccuua

SEQ ID NO: 184008 - RNA, 19 nt, Human
ucuugcauucauccugcug

SEQ ID NO: 184009 - RNA, 19 nt, Human
ugaaagcgguggcugucaa

SEQ ID NO: 184010 - RNA, 23 nt, Human
ugucacagaguccaucacuguca

SEQ ID NO: 184011 - RNA, 18 nt, Human
uguguuagaaaacacagc

SEQ ID NO: 184012 - RNA, 19 nt, Human
aaacuagaggacuggcucu

SEQ ID NO: 184013 - RNA, 18 nt, Human
aggccacggcuccggcuc

SEQ ID NO: 184014 - RNA, 27 nt, Human
cacacacacacacacuugcaggcugug

SEQ ID NO: 184015 - RNA, 23 nt, Human
caccacgaaaagauguccuauca

SEQ ID NO: 184016 - RNA, 18 nt, Human
ccccccucucucuuucac

SEQ ID NO: 184017 - RNA, 18 nt, Human
cccccucucucuuucaca

SEQ ID NO: 184018 - RNA, 20 nt, Human
ccggcaggccacggcuccgg

SEQ ID NO: 184019 - RNA, 22 nt, Human
ccucccagaguucaagaacaaa

SEQ ID NO: 184020 - RNA, 19 nt, Human
ccucugggccccccucucu

SEQ ID NO: 184021 - RNA, 24 nt, Human
cggcccggcaggccacggcuccgg

SEQ ID NO: 184022 - RNA, 22 nt, Human
cggccucugggccccccucucu

SEQ ID NO: 184023 - RNA, 22 nt, Human
gcuguucagccacugagcgugg

SEQ ID NO: 184024 - RNA, 21 nt, Human
ggaaagcacuggugcacacca

SEQ ID NO: 184025 - RNA, 20 nt, Human
guggaaagcacuggugcaca

SEQ ID NO: 184026 - RNA, 20 nt, Human
ucugaaggugcagcaugagg

SEQ ID NO: 184027 - RNA, 18 nt, Human
ugcacaccacgaaaagau

SEQ ID NO: 184028 - RNA, 20 nt, Human
ugcuguucagccacugagcg

SEQ ID NO: 184029 - RNA, 20 nt, Human
ugggaaugcuguucagccac

SEQ ID NO: 184030 - RNA, 22 nt, Human
uucacacacacacacacuugca

SEQ ID NO: 184031 - RNA, 19 nt, Human
uugcaggcugugggaaugc

SEQ ID NO: 184032 - RNA, 26 nt, Human
uuuuuccaccucugcaauuuuuauuc

SEQ ID NO: 184033 - RNA, 22 nt, Human
uuuuuuuuuuuuuuuuccaccu

SEQ ID NO: 184034 - RNA, 18 nt, Human
uuuuuuuuuuuuuuuuug

SEQ ID NO: 184035 - RNA, 18 nt, Human
uuuuuuuuuuuuuuuuug

SEQ ID NO: 184036 - RNA, 18 nt, Human
aaugccgcagccgacacc

SEQ ID NO: 184037 - RNA, 21 nt, Human
accuccaaaggcucuaauccc

SEQ ID NO: 184038 - RNA, 19 nt, Human
acuuuggugguacuggacg

SEQ ID NO: 184039 - RNA, 22 nt, Human
agaaagagcagggagaccagac

SEQ ID NO: 184040 - RNA, 20 nt, Human
agaagcacguggccgccaca

SEQ ID NO: 184041 - RNA, 18 nt, Human
aggcagggaacacacaug

SEQ ID NO: 184042 - RNA, 18 nt, Human
auccuucuuaccacaguc

SEQ ID NO: 184043 - RNA, 22 nt, Human
augucaugauuaaauauccuuc

SEQ ID NO: 184044 - RNA, 21 nt, Human
auucacacuuuggcuccuuca

SEQ ID NO: 184045 - RNA, 23 nt, Human
cacaaccaugcagaaagagcagg

SEQ ID NO: 184046 - RNA, 18 nt, Human
cacacacaacacuccuuu

SEQ ID NO: 184047 - RNA, 24 nt, Human
cacuuuggcuccuucagacaacuu

SEQ ID NO: 184048 - RNA, 23 nt, Human
caugauuaaauauccuucuuacc

SEQ ID NO: 184049 - RNA, 23 nt, Human
cccacauucacacuuuggcuccu

SEQ ID NO: 184050 - RNA, 25 nt, Human
ccgacacccacauucacacuuuggc

SEQ ID NO: 184051 - RNA, 26 nt, Human
ccgacacccacauucacacuuuggcu

SEQ ID NO: 184052 - RNA, 25 nt, Human
ccuccaaaggcucuaaucccagucu

SEQ ID NO: 184053 - RNA, 18 nt, Human
cuccaaaggcucuaaucc

SEQ ID NO: 184054 - RNA, 26 nt, Human
gaaccaaagcuuaggacuagggacac

SEQ ID NO: 184055 - RNA, 23 nt, Human
guagaacacaauagaauggcuca

SEQ ID NO: 184056 - RNA, 23 nt, Human
guauguacauguagguuugugca

SEQ ID NO: 184057 - RNA, 21 nt, Human
gucacccuaaagaaccaaagc

SEQ ID NO: 184058 - RNA, 23 nt, Human
uaaagaaccaaagcuuaggacua

SEQ ID NO: 184059 - RNA, 25 nt, Human
uagaacacaauagaauggcucaaaa

SEQ ID NO: 184060 - RNA, 21 nt, Human
uaggugaaguagaacacaaua

SEQ ID NO: 184061 - RNA, 22 nt, Human
uauguacauguagguuugugca

SEQ ID NO: 184062 - RNA, 20 nt, Human
uauguacguguccgugcaug

SEQ ID NO: 184063 - RNA, 20 nt, Human
ucaugauuaaauauccuucu

SEQ ID NO: 184064 - RNA, 19 nt, Human
uccuucagacaacuugauc

SEQ ID NO: 184065 - RNA, 21 nt, Human
ucucaagggauguucucuuca

SEQ ID NO: 184066 - RNA, 21 nt, Human
ucucaagggauguucucuuca

SEQ ID NO: 184067 - RNA, 25 nt, Human
ucucaugaucaaaguacucuuuuau

SEQ ID NO: 184068 - RNA, 19 nt, Human
ugacagagaacuacuuugg

SEQ ID NO: 184069 - RNA, 23 nt, Human
ugccucaccagagcagcuuucag

SEQ ID NO: 184070 - RNA, 24 nt, Human
ugggacuagaauuuguacagagaa

SEQ ID NO: 184071 - RNA, 18 nt, Human
uguacagagucaaacacc

SEQ ID NO: 184072 - RNA, 19 nt, Human
aaaagaacggcaaugacaa

SEQ ID NO: 184073 - RNA, 22 nt, Human
aacuaggccuucucucaaagcc

SEQ ID NO: 184074 - RNA, 23 nt, Human
aacucuuugagaaaaguuggaga

SEQ ID NO: 184075 - RNA, 22 nt, Human
aaguuggagaaaaaaggaccgg

SEQ ID NO: 184076 - RNA, 23 nt, Human
acaccacauucaacaaagggagg

SEQ ID NO: 184077 - RNA, 22 nt, Human
agagaaaccaggccgcaauaag

SEQ ID NO: 184078 - RNA, 20 nt, Human
agagacaacaucccaacugg

SEQ ID NO: 184079 - RNA, 19 nt, Human
agagcagauggugguucuu

SEQ ID NO: 184080 - RNA, 22 nt, Human
agugggugaagccugaacccag

SEQ ID NO: 184081 - RNA, 20 nt, Human
caaagccuagaauauccucu

SEQ ID NO: 184082 - RNA, 22 nt, Human
caagcaguagaaugggaugaaa

SEQ ID NO: 184083 - RNA, 22 nt, Human
caauagcagaggcugaagacag

SEQ ID NO: 184084 - RNA, 20 nt, Human
cagagacaacaucccaacug

SEQ ID NO: 184085 - RNA, 20 nt, Human
cagugugagaugagaggcug

SEQ ID NO: 184086 - RNA, 24 nt, Human
cauuauuucccuugcuggaguggc

SEQ ID NO: 184087 - RNA, 20 nt, Human
ccacucaccaccauccaccc

SEQ ID NO: 184088 - RNA, 20 nt, Human
ccugaacccagcuagcagca

SEQ ID NO: 184089 - RNA, 23 nt, Human
cgagauaaaguacaguuuccuac

SEQ ID NO: 184090 - RNA, 25 nt, Human
cugcauuauuucccuugcuggagug

SEQ ID NO: 184091 - RNA, 21 nt, Human
gacaacaucccaacuggagaa

SEQ ID NO: 184092 - RNA, 21 nt, Human
gagaaaaaaggaccggggaga

SEQ ID NO: 184093 - RNA, 21 nt, Human
gagaguuugguuuaauauucc

SEQ ID NO: 184094 - RNA, 21 nt, Human
gauccacucaccaccauccac

SEQ ID NO: 184095 - RNA, 18 nt, Human
gggaggacagacacgagg

SEQ ID NO: 184096 - RNA, 18 nt, Human
guuguuccaagaugggag

SEQ ID NO: 184097 - RNA, 23 nt, Human
uaaaaaaucuuugcguguaagga

SEQ ID NO: 184098 - RNA, 23 nt, Human
uaaagcuucugaaauauugcaau

SEQ ID NO: 184099 - RNA, 23 nt, Human
uaccacccugcgccgcuggacuc

SEQ ID NO: 184100 - RNA, 20 nt, Human
uagaauauccucuuuccugg

SEQ ID NO: 184101 - RNA, 19 nt, Human
ucaauagcagaggcugaag

SEQ ID NO: 184102 - RNA, 19 nt, Human
uccaagaugggaggacaga

SEQ ID NO: 184103 - RNA, 26 nt, Human
uccuacucuccacuauucuuugcuga

SEQ ID NO: 184104 - RNA, 30 nt, Human
ucucucauugucugugugaagcucucaauu

SEQ ID NO: 184105 - RNA, 21 nt, Human
ucuuugagaaaaguuggagga

SEQ ID NO: 184106 - RNA, 23 nt, Human
ucuuugcugaaaagggugagggu

SEQ ID NO: 184107 - RNA, 22 nt, Human
ugaaaagggugaggguacagca

SEQ ID NO: 184108 - RNA, 20 nt, Human
ugagaaacauucaaaugcug

SEQ ID NO: 184109 - RNA, 23 nt, Human
ugaguguuacacacuguggcuga

SEQ ID NO: 184110 - RNA, 20 nt, Human
ugcuggaguggcagcagccu

SEQ ID NO: 184111 - RNA, 25 nt, Human
uggagaaaaaaggaccggggagagu

SEQ ID NO: 184112 - RNA, 18 nt, Human
uggcagcagccucauugg

SEQ ID NO: 184113 - RNA, 22 nt, Human
uggcagcagccucauugguuuu

SEQ ID NO: 184114 - RNA, 24 nt, Human
ugguuagagcagauggugguucuu

SEQ ID NO: 184115 - RNA, 22 nt, Human
ugucucuguuuccucgcaccag

SEQ ID NO: 184116 - RNA, 19 nt, Human
uuugagaaaaguuggagaa

SEQ ID NO: 184117 - RNA, 24 nt, Human
aaaggaacuaagaccccuccccua

SEQ ID NO: 184118 - RNA, 25 nt, Human
aacuagauuccaauaggagagccca

SEQ ID NO: 184119 - RNA, 18 nt, Human
agaaaaaggaacuaagac

SEQ ID NO: 184120 - RNA, 19 nt, Human
agguccccaaaccucccac

SEQ ID NO: 184121 - RNA, 20 nt, Human
caacccccaacuagauuccu

SEQ ID NO: 184122 - RNA, 20 nt, Human
cagaaagaccuccgaaggca

SEQ ID NO: 184123 - RNA, 22 nt, Human
cagggaaaaagaaaauaaaacc

SEQ ID NO: 184124 - RNA, 22 nt, Human
cagggaaaaagaaaauaaaacc

SEQ ID NO: 184125 - RNA, 24 nt, Human
ccacaggcucuucucucaaggucc

SEQ ID NO: 184126 - RNA, 30 nt, Human
ccccuaucacccuguguuccuuaccccucu

SEQ ID NO: 184127 - RNA, 20 nt, Human
cccuguguuccuuaccccuc

SEQ ID NO: 184128 - RNA, 21 nt, Human
ccgccaaguccaugucauuac

SEQ ID NO: 184129 - RNA, 20 nt, Human
cuaaacagggaaaaagaaaa

SEQ ID NO: 184130 - RNA, 20 nt, Human
cuaaacagggaaaaagaaaa

SEQ ID NO: 184131 - RNA, 23 nt, Human
cuagaaaaugcuaaacagggaaa

SEQ ID NO: 184132 - RNA, 23 nt, Human
cuagaaaaugcuaaacagggaaa

SEQ ID NO: 184133 - RNA, 21 nt, Human
cucaagguccccaaaccuccc

SEQ ID NO: 184134 - RNA, 19 nt, Human
cuccaacccccaacuagau

SEQ ID NO: 184135 - RNA, 25 nt, Human
cuguguuccuuaccccuccaacccc

SEQ ID NO: 184136 - RNA, 19 nt, Human
ggcucuucucucaaggucc

SEQ ID NO: 184137 - RNA, 24 nt, Human
uacagaaaaaggaacuaagacccc

SEQ ID NO: 184138 - RNA, 21 nt, Human
uaccccuucugcuuuggcugg

SEQ ID NO: 184139 - RNA, 24 nt, Human
ucucaagguccccaaaccucccac

SEQ ID NO: 184140 - RNA, 20 nt, Human
ucugcuuuggcugggacuga

SEQ ID NO: 184141 - RNA, 20 nt, Human
ucugugcauaaaugcaugug

SEQ ID NO: 184142 - RNA, 21 nt, Human
ugauacagaaaaaggaacuaa

SEQ ID NO: 184143 - RNA, 25 nt, Human
ugauacagaaaaaggaacuaagacc

SEQ ID NO: 184144 - RNA, 22 nt, Human
ugcagcaucgggagcuuugucu

SEQ ID NO: 184145 - RNA, 19 nt, Human
ugcauaaaugcauguggga

SEQ ID NO: 184146 - RNA, 24 nt, Human
ugucuuguccccccgccaagucca

SEQ ID NO: 184147 - RNA, 23 nt, Human
ugugaagacagggcuucugauac

SEQ ID NO: 184148 - RNA, 24 nt, Human
ugugggaaccaugcuguauucugc

SEQ ID NO: 184149 - RNA, 20 nt, Human
uugucuuguccccccgccaa

SEQ ID NO: 184150 - RNA, 22 nt, Human
uuuccagauuuucuucugugca

SEQ ID NO: 184151 - RNA, 21 nt, Human
agcaccagaguuuggaaggga

SEQ ID NO: 184152 - RNA, 22 nt, Human
agcgccgguucucuccucagga

SEQ ID NO: 184153 - RNA, 21 nt, Human
agggccccucgggcagggucc

SEQ ID NO: 184154 - RNA, 21 nt, Human
caggacgcaccgguucucucc

SEQ ID NO: 184155 - RNA, 23 nt, Human
cauugugccccaugguccuccca

SEQ ID NO: 184156 - RNA, 18 nt, Human
ccccaugguccucccaag

SEQ ID NO: 184157 - RNA, 20 nt, Human
ccccaugguccucccaagcc

SEQ ID NO: 184158 - RNA, 18 nt, Human
cccguguugcccagcgcc

SEQ ID NO: 184159 - RNA, 20 nt, Human
cccguguugcccagcgccgg

SEQ ID NO: 184160 - RNA, 21 nt, Human
cgcauugugccccaugguccu

SEQ ID NO: 184161 - RNA, 22 nt, Human
cugggccugcaggugggguggg

SEQ ID NO: 184162 - RNA, 24 nt, Human
cugggccugcaggugggguggguc

SEQ ID NO: 184163 - RNA, 19 nt, Human
gagggccccucgggcaggg

SEQ ID NO: 184164 - RNA, 21 nt, Human
gccccaugguccucccaagcc

SEQ ID NO: 184165 - RNA, 19 nt, Human
ggacgcaccgguucucucc

SEQ ID NO: 184166 - RNA, 21 nt, Human
ggcaggaguucugucccacgg

SEQ ID NO: 184167 - RNA, 20 nt, Human
gggccugcaggugggguggg

SEQ ID NO: 184168 - RNA, 18 nt, Human
ucccaagccuggaagugc

SEQ ID NO: 184169 - RNA, 22 nt, Human
ucccucgggguagggugggcag

SEQ ID NO: 184170 - RNA, 24 nt, Human
ucgaguuugcaggcccguguugcc

SEQ ID NO: 184171 - RNA, 18 nt, Human
uggaagggagacgcagca

SEQ ID NO: 184172 - RNA, 22 nt, Human
uggaagugcggguucgccuccc

SEQ ID NO: 184173 - RNA, 18 nt, Human
uggaccgcauugugcccc

SEQ ID NO: 184174 - RNA, 18 nt, Human
ugggcagcggaggaggcg

SEQ ID NO: 184175 - RNA, 23 nt, Human
uucgccucccucgggguagggug

SEQ ID NO: 184176 - RNA, 24 nt, Human
aaaaugcugggauuacaggcauga

SEQ ID NO: 184177 - RNA, 26 nt, Human
aaaugcugggauuacaggcaugagcc

SEQ ID NO: 184178 - RNA, 18 nt, Human
aagaacacaaacuucaag

SEQ ID NO: 184179 - RNA, 24 nt, Human
acggaguuucagcauuuuggccag

SEQ ID NO: 184180 - RNA, 19 nt, Human
acugcaaccuccacccccu

SEQ ID NO: 184181 - RNA, 20 nt, Human
agcaauucuccugccuuggc

SEQ ID NO: 184182 - RNA, 23 nt, Human
agcaauucuccugccuuggccuc

SEQ ID NO: 184183 - RNA, 24 nt, Human
aggugauccaccugccucagccuc

SEQ ID NO: 184184 - RNA, 22 nt, Human
aguagagacggaguuucagcau

SEQ ID NO: 184185 - RNA, 19 nt, Human
aguagcugggauuacaggc

SEQ ID NO: 184186 - RNA, 24 nt, Human
auuuuuguauuuuuaguagagacg

SEQ ID NO: 184187 - RNA, 24 nt, Human
caaaaugcugggauuacaggcaug

SEQ ID NO: 184188 - RNA, 24 nt, Human
caaccuccacccccugaguucgag

SEQ ID NO: 184189 - RNA, 24 nt, Human
caccaugccuggcuaauuuuugua

SEQ ID NO: 184190 - RNA, 23 nt, Human
caccugccucagccucccaaaau

SEQ ID NO: 184191 - RNA, 21 nt, Human
cacugcaaccuccacccccug

SEQ ID NO: 184192 - RNA, 24 nt, Human
cagagucuugcucuguugcccagg

SEQ ID NO: 184193 - RNA, 23 nt, Human
caggcgccugccaccaugccugg

SEQ ID NO: 184194 - RNA, 22 nt, Human
caggcugauuuugaacugcuga

SEQ ID NO: 184195 - RNA, 22 nt, Human
caggugauccaccugccucagc

SEQ ID NO: 184196 - RNA, 23 nt, Human
ccaaaaugcugggauuacaggca

SEQ ID NO: 184197 - RNA, 24 nt, Human
ccaaaaugcugggauuacaggcau

SEQ ID NO: 184198 - RNA, 19 nt, Human
ccacccccugaguucgagc

SEQ ID NO: 184199 - RNA, 26 nt, Human
ccaccugccucagccucccaaaaugc

SEQ ID NO: 184200 - RNA, 24 nt, Human
cccaaaaugcugggauuacaggca

SEQ ID NO: 184201 - RNA, 21 nt, Human
ccccaaagaaggugaaagcuc

SEQ ID NO: 184202 - RNA, 23 nt, Human
cccgaguagcugggauuacaggc

SEQ ID NO: 184203 - RNA, 24 nt, Human
cccgaguagcugggauuacaggcg

SEQ ID NO: 184204 - RNA, 24 nt, Human
cccugaguucgagcaauucuccug

SEQ ID NO: 184205 - RNA, 22 nt, Human
ccgaguagcugggauuacaggc

SEQ ID NO: 184206 - RNA, 26 nt, Human
ccuagccuggccuugauuccgguucc

SEQ ID NO: 184207 - RNA, 26 nt, Human
cucacugcaaccuccacccccugagu

SEQ ID NO: 184208 - RNA, 23 nt, Human
cucaggugauccaccugccucag

SEQ ID NO: 184209 - RNA, 20 nt, Human
cucuguugcccaggcuggag

SEQ ID NO: 184210 - RNA, 25 nt, Human
cucuguugcccaggcuggagugcaa

SEQ ID NO: 184211 - RNA, 20 nt, Human
cugaccucaggugauccacc

SEQ ID NO: 184212 - RNA, 23 nt, Human
cugcaaccuccacccccugaguu

SEQ ID NO: 184213 - RNA, 24 nt, Human
cugcaaccuccacccccugaguuc

SEQ ID NO: 184214 - RNA, 23 nt, Human
cugccucagccucccaaaaugcu

SEQ ID NO: 184215 - RNA, 24 nt, Human
cugccucagccucccaaaaugcug

SEQ ID NO: 184216 - RNA, 23 nt, Human
cugccuuggccucccgaguagcu

SEQ ID NO: 184217 - RNA, 24 nt, Human
cuuggccucccgaguagcugggau

SEQ ID NO: 184218 - RNA, 24 nt, Human
gaccucaggugauccaccugccuc

SEQ ID NO: 184219 - RNA, 19 nt, Human
gagagccccaaagaaggug

SEQ ID NO: 184220 - RNA, 24 nt, Human
gagggaagaacacaaacuucaagg

SEQ ID NO: 184221 - RNA, 26 nt, Human
gaguagcugggauuacaggcgccugc

SEQ ID NO: 184222 - RNA, 21 nt, Human
gagugcaauggcacaaucuca

SEQ ID NO: 184223 - RNA, 18 nt, Human
gauuacaggcaugagcca

SEQ ID NO: 184224 - RNA, 19 nt, Human
gauuacaggcaugagccac

SEQ ID NO: 184225 - RNA, 22 nt, Human
gauuacaggcaugagccacugc

SEQ ID NO: 184226 - RNA, 18 nt, Human
gauuacaggcgccugcca

SEQ ID NO: 184227 - RNA, 24 nt, Human
gauuacaggcgccugccaccaugc

SEQ ID NO: 184228 - RNA, 22 nt, Human
gcaaccuccacccccugaguuc

SEQ ID NO: 184229 - RNA, 19 nt, Human
gcccaggcuggagugcaau

SEQ ID NO: 184230 - RNA, 20 nt, Human
gccuuggccucccgaguagc

SEQ ID NO: 184231 - RNA, 23 nt, Human
gcugaccucaggugauccaccug

SEQ ID NO: 184232 - RNA, 19 nt, Human
gcuggagugcaauggcaca

SEQ ID NO: 184233 - RNA, 23 nt, Human
ggaguuucagcauuuuggccagg

SEQ ID NO: 184234 - RNA, 22 nt, Human
ggauuacaggcaugagccacug

SEQ ID NO: 184235 - RNA, 24 nt, Human
ggugauccaccugccucagccucc

SEQ ID NO: 184236 - RNA, 18 nt, Human
guagcugggauuacaggc

SEQ ID NO: 184237 - RNA, 18 nt, Human
gugauccaccugccucag

SEQ ID NO: 184238 - RNA, 24 nt, Human
gugauccaccugccucagccuccc

SEQ ID NO: 184239 - RNA, 21 nt, Human
gugcugaagggagccauugcc

SEQ ID NO: 184240 - RNA, 22 nt, Human
guggaaagcagaagugcugaag

SEQ ID NO: 184241 - RNA, 24 nt, Human
uaauuuuuguauuuuuaguagaga

SEQ ID NO: 184242 - RNA, 24 nt, Human
uacaggcaugagccacugcgccca

SEQ ID NO: 184243 - RNA, 21 nt, Human
uacgcagacuucccaugcagc

SEQ ID NO: 184244 - RNA, 19 nt, Human
uagccuggccuugauucug

SEQ ID NO: 184245 - RNA, 20 nt, Human
uaguagagacggaguuucag

SEQ ID NO: 184246 - RNA, 26 nt, Human
uaguagagacggaguuucagcauuuu

SEQ ID NO: 184247 - RNA, 18 nt, Human
ucacugcaaccuccaccc

SEQ ID NO: 184248 - RNA, 20 nt, Human
ucacugcaaccuccaccccc

SEQ ID NO: 184249 - RNA, 21 nt, Human
ucacugcaaccuccacccccu

SEQ ID NO: 184250 - RNA, 22 nt, Human
ucacugcaaccuccacccccug

SEQ ID NO: 184251 - RNA, 27 nt, Human
ucacugcaaccuccacccccugaguuc

SEQ ID NO: 184252 - RNA, 22 nt, Human
ucaggugauccaccugccucag

SEQ ID NO: 184253 - RNA, 24 nt, Human
uccaccugccucagccucccaaaa

SEQ ID NO: 184254 - RNA, 24 nt, Human
ucccaaaaugcugggauuacaggc

SEQ ID NO: 184255 - RNA, 23 nt, Human
ucccaugcagcuccgaugagaac

SEQ ID NO: 184256 - RNA, 24 nt, Human
ucccgaguagcugggauuacaggc

SEQ ID NO: 184257 - RNA, 19 nt, Human
uccuaaccuagccuggccu

SEQ ID NO: 184258 - RNA, 18 nt, Human
ucuguugcccaggcugga

SEQ ID NO: 184259 - RNA, 24 nt, Human
ucuguugcccaggcuggagugcaa

SEQ ID NO: 184260 - RNA, 22 nt, Human
ucuugcucuguugcccaggcug

SEQ ID NO: 184261 - RNA, 23 nt, Human
ucuugcucuguugcccaggcugg

SEQ ID NO: 184262 - RNA, 24 nt, Human
ucuugcucuguugcccaggcugga

SEQ ID NO: 184263 - RNA, 24 nt, Human
ugaccucaggugauccaccugccu

SEQ ID NO: 184264 - RNA, 18 nt, Human
ugagacagagucuugcuc

SEQ ID NO: 184265 - RNA, 22 nt, Human
ugagacagagucuugcucuguu

SEQ ID NO: 184266 - RNA, 18 nt, Human
ugcccaggcuggagugca

SEQ ID NO: 184267 - RNA, 21 nt, Human
ugcccaggcuggagugcaaug

SEQ ID NO: 184268 - RNA, 24 nt, Human
ugcccaggcuggagugcaauggca

SEQ ID NO: 184269 - RNA, 24 nt, Human
ugccucagccucccaaaaugcugg

SEQ ID NO: 184270 - RNA, 20 nt, Human
ugccuuggccucccgaguaa

SEQ ID NO: 184271 - RNA, 22 nt, Human
uggaaagcagaagugcugaagg

SEQ ID NO: 184272 - RNA, 19 nt, Human
uggagugcaauggcacaau

SEQ ID NO: 184273 - RNA, 24 nt, Human
uggcacaaucucaacucacugcaa

SEQ ID NO: 184274 - RNA, 24 nt, Human
uggccaggcugauuuugaacugcu

SEQ ID NO: 184275 - RNA, 18 nt, Human
ugggauuacaggcaugag

SEQ ID NO: 184276 - RNA, 19 nt, Human
ugggauuacaggcaugagc

SEQ ID NO: 184277 - RNA, 21 nt, Human
ugggauuacaggcaugagcca

SEQ ID NO: 184278 - RNA, 22 nt, Human
ugggauuacaggcaugagccac

SEQ ID NO: 184279 - RNA, 22 nt, Human
ugggauuacaggcaugagccac

SEQ ID NO: 184280 - RNA, 24 nt, Human
ugggauuacaggcaugagccacug

SEQ ID NO: 184281 - RNA, 26 nt, Human
ugggauuacaggcaugagccacugcg

SEQ ID NO: 184282 - RNA, 21 nt, Human
ugggauuacaggcgccugcca

SEQ ID NO: 184283 - RNA, 22 nt, Human
ugggauuacaggcgccugccac

SEQ ID NO: 184284 - RNA, 24 nt, Human
ugggauuacaggcgccugccacca

SEQ ID NO: 184285 - RNA, 25 nt, Human
ugggauuacaggcgccugccaccau

SEQ ID NO: 184286 - RNA, 21 nt, Human
uguauuuuuaguagagacgga

SEQ ID NO: 184287 - RNA, 20 nt, Human
uguugcccaggcuggagugc

SEQ ID NO: 184288 - RNA, 18 nt, Human
uuaguagagacggaguuu

SEQ ID NO: 184289 - RNA, 24 nt, Human
uuaguagagacggaguuucagcau

SEQ ID NO: 184290 - RNA, 28 nt, Human
uucccaugcagcuccgaugagaacacaa

SEQ ID NO: 184291 - RNA, 24 nt, Human
uugcucuguugcccaggcuggagu

SEQ ID NO: 184292 - RNA, 23 nt, Human
uuguauuuuuaguagagacggag

SEQ ID NO: 184293 - RNA, 19 nt, Human
uuuuuaguagagacggagu

SEQ ID NO: 184294 - RNA, 20 nt, Human
uuuuuguauuuuuaguagag

SEQ ID NO: 184295 - RNA, 24 nt, Human
aagcgauccuccugccuuggccuc

SEQ ID NO: 184296 - RNA, 24 nt, Human
aaguagagauggggucucacuaug

SEQ ID NO: 184297 - RNA, 24 nt, Human
acuauguugcccaggcuggucuug

SEQ ID NO: 184298 - RNA, 25 nt, Human
acuauguugcccaggcuggucuuga

SEQ ID NO: 184299 - RNA, 23 nt, Human
aguagagauggggucucacuaug

SEQ ID NO: 184300 - RNA, 18 nt, Human
auggggucucacuauguu

SEQ ID NO: 184301 - RNA, 19 nt, Human
auggggucucacuauguug

SEQ ID NO: 184302 - RNA, 24 nt, Human
auggggucucacuauguugcccag

SEQ ID NO: 184303 - RNA, 21 nt, Human
auguauacauaauuguacaua

SEQ ID NO: 184304 - RNA, 21 nt, Human
caagaaaugccuaaacgcuau

SEQ ID NO: 184305 - RNA, 22 nt, Human
caagcgauccuccugccuuggc

SEQ ID NO: 184306 - RNA, 27 nt, Human
caagcgauccuccugccuuggccuccc

SEQ ID NO: 184307 - RNA, 27 nt, Human
caagcgauccuccugccuuggccuccc

SEQ ID NO: 184308 - RNA, 24 nt, Human
cacagugcuaggauuacagacaug

SEQ ID NO: 184309 - RNA, 19 nt, Human
cacuauguugcccaggcug

SEQ ID NO: 184310 - RNA, 24 nt, Human
cacuauguugcccaggcuggucuu

SEQ ID NO: 184311 - RNA, 27 nt, Human
cacuauguugcccaggcuggucuugaa

SEQ ID NO: 184312 - RNA, 25 nt, Human
cagugcuaggauuacagacaugauc

SEQ ID NO: 184313 - RNA, 24 nt, Human
ccacagugcuaggauuacagacau

SEQ ID NO: 184314 - RNA, 20 nt, Human
ccacugcacuuggcccagug

SEQ ID NO: 184315 - RNA, 21 nt, Human
ccacugcacuuggcccagugg

SEQ ID NO: 184316 - RNA, 21 nt, Human
ccuccugccuuggccucccac

SEQ ID NO: 184317 - RNA, 24 nt, Human
ccugccuuggccucccacagugcu

SEQ ID NO: 184318 - RNA, 18 nt, Human
ccugggcucaagcgaucc

SEQ ID NO: 184319 - RNA, 23 nt, Human
ccugggcucaagcgauccuccug

SEQ ID NO: 184320 - RNA, 24 nt, Human
cucaagcgauccuccugccuuggc

SEQ ID NO: 184321 - RNA, 21 nt, Human
cucagcccuguccugagcucu

SEQ ID NO: 184322 - RNA, 23 nt, Human
cuccugggcucaagcgauccucc

SEQ ID NO: 184323 - RNA, 19 nt, Human
cuggucuugaacuccuggg

SEQ ID NO: 184324 - RNA, 20 nt, Human
gaaaugccuaaacgcuauaa

SEQ ID NO: 184325 - RNA, 23 nt, Human
gauuacagacaugauccacugca

SEQ ID NO: 184326 - RNA, 18 nt, Human
gcccuguccugagcucug

SEQ ID NO: 184327 - RNA, 24 nt, Human
gcuauaauaaauauagaacuuuac

SEQ ID NO: 184328 - RNA, 22 nt, Human
ggauuacagacaugauccacug

SEQ ID NO: 184329 - RNA, 18 nt, Human
ggcuggucuugaacuccu

SEQ ID NO: 184330 - RNA, 22 nt, Human
gggcucaagcgauccuccugcc

SEQ ID NO: 184331 - RNA, 22 nt, Human
gggucucacuauguugcccagg

SEQ ID NO: 184332 - RNA, 18 nt, Human
gugcauuaucuuauuuuu

SEQ ID NO: 184333 - RNA, 24 nt, Human
uaaguagagauggggucucacuau

SEQ ID NO: 184334 - RNA, 22 nt, Human
uagagauggggucucacuaugu

SEQ ID NO: 184335 - RNA, 21 nt, Human
uaggauuacagacaugaucca

SEQ ID NO: 184336 - RNA, 24 nt, Human
uaggauuacagacaugauccacug

SEQ ID NO: 184337 - RNA, 20 nt, Human
uauguugcccaggcuggucu

SEQ ID NO: 184338 - RNA, 23 nt, Human
uauguugcccaggcuggucuuga

SEQ ID NO: 184339 - RNA, 24 nt, Human
uauguugcccaggcuggucuugaa

SEQ ID NO: 184340 - RNA, 21 nt, Human
uccucagcccuguccugagcu

SEQ ID NO: 184341 - RNA, 21 nt, Human
uccugggcucaagcgauccuc

SEQ ID NO: 184342 - RNA, 22 nt, Human
uccugggcucaagcgauccucc

SEQ ID NO: 184343 - RNA, 24 nt, Human
uccugggcucaagcgauccuccug

SEQ ID NO: 184344 - RNA, 21 nt, Human
uccuucagaaaguaaauauga

SEQ ID NO: 184345 - RNA, 18 nt, Human
ucucacuauguugcccag

SEQ ID NO: 184346 - RNA, 19 nt, Human
ucucacuauguugcccagg

SEQ ID NO: 184347 - RNA, 23 nt, Human
ucucacuauguugcccaggcugg

SEQ ID NO: 184348 - RNA, 24 nt, Human
ucucacuauguugcccaggcuggu

SEQ ID NO: 184349 - RNA, 26 nt, Human
ucucacuauguugcccaggcuggucu

SEQ ID NO: 184350 - RNA, 27 nt, Human
ucucacuauguugcccaggcuggucuu

SEQ ID NO: 184351 - RNA, 23 nt, Human
ucuugaacuccugggcucaagcg

SEQ ID NO: 184352 - RNA, 25 nt, Human
ugaacuccugggcucaagcgauccu

SEQ ID NO: 184353 - RNA, 18 nt, Human
ugagagggguggagacgg

SEQ ID NO: 184354 - RNA, 20 nt, Human
ugagagggguggagacggug

SEQ ID NO: 184355 - RNA, 24 nt, Human
ugcccaggcuggucuugaacuccu

SEQ ID NO: 184356 - RNA, 28 nt, Human
ugcccaggcuggucuugaacuccugggc

SEQ ID NO: 184357 - RNA, 24 nt, Human
ugcuaggauuacagacaugaucca

SEQ ID NO: 184358 - RNA, 24 nt, Human
ugggcucaagcgauccuccugccu

SEQ ID NO: 184359 - RNA, 24 nt, Human
uggggucucacuauguugcccagg

SEQ ID NO: 184360 - RNA, 20 nt, Human
uguacauauuuauggggugg

SEQ ID NO: 184361 - RNA, 21 nt, Human
uguauacauaauuguacauau

SEQ ID NO: 184362 - RNA, 19 nt, Human
uuccucagcccuguccuga

SEQ ID NO: 184363 - RNA, 19 nt, Human
uuuuaaguagagauggggu

SEQ ID NO: 184364 - RNA, 23 nt, Human
aggccuggcuaacugucucugga

SEQ ID NO: 184365 - RNA, 21 nt, Human
agguccuggcugaggccuggg

SEQ ID NO: 184366 - RNA, 25 nt, Human
aggugcuccugucuggccugaaagg

SEQ ID NO: 184367 - RNA, 18 nt, Human
agugugcccagcccaggc

SEQ ID NO: 184368 - RNA, 18 nt, Human
cagguucugggggccugg

SEQ ID NO: 184369 - RNA, 26 nt, Human
cccagcccaggccuggcuaacugucu

SEQ ID NO: 184370 - RNA, 20 nt, Human
ccccuggcuggagccagguu

SEQ ID NO: 184371 - RNA, 18 nt, Human
ccucagggacuggccccc

SEQ ID NO: 184372 - RNA, 23 nt, Human
cuggagccagguucugggggccu

SEQ ID NO: 184373 - RNA, 19 nt, Human
cuggcugaggccugggugg

SEQ ID NO: 184374 - RNA, 19 nt, Human
cuggcugaggccugggugg

SEQ ID NO: 184375 - RNA, 19 nt, Human
cuucuccucugggaaacca

SEQ ID NO: 184376 - RNA, 22 nt, Human
gacaggcuggcucccuucucgg

SEQ ID NO: 184377 - RNA, 20 nt, Human
ggugacuagggaagguggag

SEQ ID NO: 184378 - RNA, 18 nt, Human
guggagugugcccagccc

SEQ ID NO: 184379 - RNA, 20 nt, Human
ucucgggucucagccuucuc

SEQ ID NO: 184380 - RNA, 22 nt, Human
ucugggcuucuggugguuuggg

SEQ ID NO: 184381 - RNA, 21 nt, Human
ugagggcggcugugaagccuu

SEQ ID NO: 184382 - RNA, 22 nt, Human
uggagugugcccagcccaggcc

SEQ ID NO: 184383 - RNA, 22 nt, Human
uggcuggagccagguucugggg

SEQ ID NO: 184384 - RNA, 23 nt, Human
uggcuggagccagguucuggggg

SEQ ID NO: 184385 - RNA, 19 nt, Human
ugggcuucuggugguuugg

SEQ ID NO: 184386 - RNA, 21 nt, Human
ugguggagucuggggaccugc

SEQ ID NO: 184387 - RNA, 19 nt, Human
ugguuugggcugaccaggc

SEQ ID NO: 184388 - RNA, 19 nt, Human
ugugaagccuuuggucagg

SEQ ID NO: 184389 - RNA, 27 nt, Human
uugguggagucuggggaccugccucag

SEQ ID NO: 184390 - RNA, 23 nt, Human
aacacacgucacccgcugacacu

SEQ ID NO: 184391 - RNA, 19 nt, Human
aacagcccuggaccccagc

SEQ ID NO: 184392 - RNA, 25 nt, Human
aagcagcacuaagcggccucccagg

SEQ ID NO: 184393 - RNA, 27 nt, Human
aagcagcacuaagcggccucccaguag

SEQ ID NO: 184394 - RNA, 26 nt, Human
aagcagcacuaagcggccucccagug

SEQ ID NO: 184395 - RNA, 19 nt, Human
aagccggcggcggcggcgg

SEQ ID NO: 184396 - RNA, 21 nt, Human
aaggacucaaaagaacacacg

SEQ ID NO: 184397 - RNA, 22 nt, Human
acaccacaccaccccuccccag

SEQ ID NO: 184398 - RNA, 19 nt, Human
accacaccaccccucccca

SEQ ID NO: 184399 - RNA, 20 nt, Human
accaggguccaaggugggcc

SEQ ID NO: 184400 - RNA, 20 nt, Human
accccaggccucuccaggcu

SEQ ID NO: 184401 - RNA, 22 nt, Human
acccuccaaguccuccuccccc

SEQ ID NO: 184402 - RNA, 19 nt, Human
acugcagggucugugggag

SEQ ID NO: 184403 - RNA, 20 nt, Human
acugcagggucugugggagg

SEQ ID NO: 184404 - RNA, 18 nt, Human
agacaacaaaagccggcg

SEQ ID NO: 184405 - RNA, 18 nt, Human
agccggcggcggcggcgg

SEQ ID NO: 184406 - RNA, 18 nt, Human
aggcagaaaggcaggcga

SEQ ID NO: 184407 - RNA, 25 nt, Human
aggcagccggaggugccccugagga

SEQ ID NO: 184408 - RNA, 21 nt, Human
aggcaggcgaggccaggccug

SEQ ID NO: 184409 - RNA, 18 nt, Human
aggccuggggcugggacc

SEQ ID NO: 184410 - RNA, 23 nt, Human
aggccuggggcugggaccucugc

SEQ ID NO: 184411 - RNA, 20 nt, Human
aggcggcggcggccgaggag

SEQ ID NO: 184412 - RNA, 20 nt, Human
aucaucucagaggcucugcc

SEQ ID NO: 184413 - RNA, 23 nt, Human
augaaaagcaaagcagcacuaag

SEQ ID NO: 184414 - RNA, 22 nt, Human
caaaauuaaaaggcagaaaggc

SEQ ID NO: 184415 - RNA, 21 nt, Human
caacaccacaccaccccuccc

SEQ ID NO: 184416 - RNA, 22 nt, Human
caaggccugcccugugagcccu

SEQ ID NO: 184417 - RNA, 21 nt, Human
caccacaccaccccuccccag

SEQ ID NO: 184418 - RNA, 24 nt, Human
caccacaccaccccuccccagggc

SEQ ID NO: 184419 - RNA, 21 nt, Human
caccaccccuccccagggcca

SEQ ID NO: 184420 - RNA, 22 nt, Human
cacccagacagcccgugcgggg

SEQ ID NO: 184421 - RNA, 19 nt, Human
caccccuccccagggccac

SEQ ID NO: 184422 - RNA, 21 nt, Human
caccccuccccagggccaccu

SEQ ID NO: 184423 - RNA, 20 nt, Human
cacccuggcacuggcagggu

SEQ ID NO: 184424 - RNA, 20 nt, Human
cacccuggcacuggcagggu

SEQ ID NO: 184425 - RNA, 21 nt, Human
cagacccuccaaguccuccuc

SEQ ID NO: 184426 - RNA, 19 nt, Human
cagagccaaggucccggcg

SEQ ID NO: 184427 - RNA, 20 nt, Human
cagagcccacgcugccuccc

SEQ ID NO: 184428 - RNA, 19 nt, Human
cagcaaggccugcccugug

SEQ ID NO: 184429 - RNA, 19 nt, Human
cagccaccagcaucccugu

SEQ ID NO: 184430 - RNA, 23 nt, Human
cagcggguugcuuugaggccucc

SEQ ID NO: 184431 - RNA, 23 nt, Human
caggacagcugcccccagacccu

SEQ ID NO: 184432 - RNA, 23 nt, Human
caggaggucaccaggguccaagg

SEQ ID NO: 184433 - RNA, 19 nt, Human
caggcgaggccaggccugg

SEQ ID NO: 184434 - RNA, 21 nt, Human
cagggccaccuggcagcuggg

SEQ ID NO: 184435 - RNA, 20 nt, Human
cagggcccugauggccucag

SEQ ID NO: 184436 - RNA, 18 nt, Human
caggguccaaggugggcc

SEQ ID NO: 184437 - RNA, 20 nt, Human
caguggugcugucucaggcg

SEQ ID NO: 184438 - RNA, 22 nt, Human
ccaacaccacaccaccccuccc

SEQ ID NO: 184439 - RNA, 23 nt, Human
ccaacagcccuggaccccagcaa

SEQ ID NO: 184440 - RNA, 18 nt, Human
ccagaggcggcggcggcc

SEQ ID NO: 184441 - RNA, 21 nt, Human
cccaacaccacaccaccccuc

SEQ ID NO: 184442 - RNA, 20 nt, Human
cccagcuuccccuccuccag

SEQ ID NO: 184443 - RNA, 22 nt, Human
cccccggccacccgcccgcgcc

SEQ ID NO: 184444 - RNA, 20 nt, Human
cccccugcaggaccccuucc

SEQ ID NO: 184445 - RNA, 19 nt, Human
ccccuucccaacaccacac

SEQ ID NO: 184446 - RNA, 24 nt, Human
ccccuucccaacaccacaccaccc

SEQ ID NO: 184447 - RNA, 19 nt, Human
cccucccugucccacccca

SEQ ID NO: 184448 - RNA, 21 nt, Human
cccucgggguccuccaacagc

SEQ ID NO: 184449 - RNA, 19 nt, Human
cccuggaccccagcaaggc

SEQ ID NO: 184450 - RNA, 23 nt, Human
cccuggaccccagcaaggccugc

SEQ ID NO: 184451 - RNA, 18 nt, Human
cccugggccuuugggccc

SEQ ID NO: 184452 - RNA, 22 nt, Human
ccgcccgcgccucucucggauc

SEQ ID NO: 184453 - RNA, 22 nt, Human
ccggcggcggcggcggcgcggg

SEQ ID NO: 184454 - RNA, 24 nt, Human
ccggcggcggcggcggcgcggggc

SEQ ID NO: 184455 - RNA, 21 nt, Human
ccucacugcagggucuguggg

SEQ ID NO: 184456 - RNA, 18 nt, Human
ccuccaaguccuccuccc

SEQ ID NO: 184457 - RNA, 19 nt, Human
ccuccaaguccuccucccc

SEQ ID NO: 184458 - RNA, 21 nt, Human
ccucccugucccaccccaggc

SEQ ID NO: 184459 - RNA, 22 nt, Human
ccugcagacgcuggggccccuc

SEQ ID NO: 184460 - RNA, 19 nt, Human
ccugcaggaccccuuccca

SEQ ID NO: 184461 - RNA, 18 nt, Human
ccugcgcugaggggaggg

SEQ ID NO: 184462 - RNA, 19 nt, Human
ccugcgcugaggggagggc

SEQ ID NO: 184463 - RNA, 20 nt, Human
ccuggggcugggaccucugc

SEQ ID NO: 184464 - RNA, 21 nt, Human
cgagguccgaacgcucgcucg

SEQ ID NO: 184465 - RNA, 24 nt, Human
cggaggugccccugaggucccuga

SEQ ID NO: 184466 - RNA, 24 nt, Human
cggcggcgcccccggccacccgcc

SEQ ID NO: 184467 - RNA, 21 nt, Human
cggcggcgcggggcgcgcggg

SEQ ID NO: 184468 - RNA, 23 nt, Human
cggcggcggcgcggggcgcgcgg

SEQ ID NO: 184469 - RNA, 24 nt, Human
cggcggcggcggcggcgcggggcg

SEQ ID NO: 184470 - RNA, 19 nt, Human
cgggguccuccaacagccc

SEQ ID NO: 184471 - RNA, 18 nt, Human
cggugcagggagcugggg

SEQ ID NO: 184472 - RNA, 21 nt, Human
cucaaaagaacacacgucacc

SEQ ID NO: 184473 - RNA, 22 nt, Human
cuccagcggguugcuuugaggc

SEQ ID NO: 184474 - RNA, 18 nt, Human
cucccccugcaggacccc

SEQ ID NO: 184475 - RNA, 19 nt, Human
cuccucccccugcaggacc

SEQ ID NO: 184476 - RNA, 21 nt, Human
cuccugaucccaaaacaucuu

SEQ ID NO: 184477 - RNA, 21 nt, Human
cugaucccaaaacaucuaaag

SEQ ID NO: 184478 - RNA, 22 nt, Human
cugcagccugcgcugaggggag

SEQ ID NO: 184479 - RNA, 18 nt, Human
cugcagggucugugggag

SEQ ID NO: 184480 - RNA, 24 nt, Human
cugcccccagacccuccaaguccu

SEQ ID NO: 184481 - RNA, 21 nt, Human
cugcggcggugcagggagcug

SEQ ID NO: 184482 - RNA, 18 nt, Human
cuggcugggucgggaagg

SEQ ID NO: 184483 - RNA, 26 nt, Human
gacaggaagugucaguaaauggaugc

SEQ ID NO: 184484 - RNA, 21 nt, Human
gaccccuucccaacaccacac

SEQ ID NO: 184485 - RNA, 19 nt, Human
gaccugaccagcaaccggg

SEQ ID NO: 184486 - RNA, 19 nt, Human
gacgcuggggccccucaag

SEQ ID NO: 184487 - RNA, 21 nt, Human
gaugcauguuuggaaaagccc

SEQ ID NO: 184488 - RNA, 23 nt, Human
gcaaagcagcacuaagcggccuc

SEQ ID NO: 184489 - RNA, 23 nt, Human
gcaggcgaggccaggccuggggc

SEQ ID NO: 184490 - RNA, 20 nt, Human
gcagggucugugggaggaca

SEQ ID NO: 184491 - RNA, 21 nt, Human
gcaucacugugccagaguccc

SEQ ID NO: 184492 - RNA, 21 nt, Human
gccaccagcaucccugugagc

SEQ ID NO: 184493 - RNA, 21 nt, Human
gcccugcagugcagcuggcug

SEQ ID NO: 184494 - RNA, 18 nt, Human
gccugccccugcucagag

SEQ ID NO: 184495 - RNA, 20 nt, Human
gcggagacaacaaaagccgg

SEQ ID NO: 184496 - RNA, 21 nt, Human
gcggcggcggccgaggaggcg

SEQ ID NO: 184497 - RNA, 18 nt, Human
gcggcggcggcggcgcgg

SEQ ID NO: 184498 - RNA, 21 nt, Human
gcggcggcggcggcgcggggc

SEQ ID NO: 184499 - RNA, 19 nt, Human
gcuccugaucccaaaacau

SEQ ID NO: 184500 - RNA, 19 nt, Human
gcucgcugugggcuccagc

SEQ ID NO: 184501 - RNA, 21 nt, Human
gcugcuguccuggcgcccggc

SEQ ID NO: 184502 - RNA, 24 nt, Human
gcuggggggagggcuaggcagccg

SEQ ID NO: 184503 - RNA, 22 nt, Human
ggaccccuucccaacaccacac

SEQ ID NO: 184504 - RNA, 19 nt, Human
ggaggugccccugaggucc

SEQ ID NO: 184505 - RNA, 19 nt, Human
ggagucccagugggaggag

SEQ ID NO: 184506 - RNA, 20 nt, Human
ggagugcugcuguccuggcg

SEQ ID NO: 184507 - RNA, 20 nt, Human
ggcagggcccugauggccuc

SEQ ID NO: 184508 - RNA, 18 nt, Human
ggccggcggcgcccccgg

SEQ ID NO: 184509 - RNA, 23 nt, Human
ggccuggggcagggcccugaugg

SEQ ID NO: 184510 - RNA, 18 nt, Human
ggcgcgcgcggcucgcgg

SEQ ID NO: 184511 - RNA, 19 nt, Human
ggcggcgcggggcgcgcgg

SEQ ID NO: 184512 - RNA, 20 nt, Human
ggcucugcugggagucccag

SEQ ID NO: 184513 - RNA, 21 nt, Human
ggcuggugggcucugcuggga

SEQ ID NO: 184514 - RNA, 19 nt, Human
gggccagggcuggcuggug

SEQ ID NO: 184515 - RNA, 21 nt, Human
gggccggcggcgcccccggcc

SEQ ID NO: 184516 - RNA, 18 nt, Human
ggggccgggcucugcagc

SEQ ID NO: 184517 - RNA, 20 nt, Human
ggugcagggagcugggggga

SEQ ID NO: 184518 - RNA, 21 nt, Human
gugcagcuggcugggucggga

SEQ ID NO: 184519 - RNA, 21 nt, Human
gugggaggaggcggggaggaa

SEQ ID NO: 184520 - RNA, 21 nt, Human
guucaggacagcugcccccag

SEQ ID NO: 184521 - RNA, 24 nt, Human
uauuaugggguggacuugccugug

SEQ ID NO: 184522 - RNA, 23 nt, Human
ucagaggcucugccagacccugg

SEQ ID NO: 184523 - RNA, 19 nt, Human
ucaggcgucacccugcaga

SEQ ID NO: 184524 - RNA, 23 nt, Human
ucaguccuuggccucugucccug

SEQ ID NO: 184525 - RNA, 23 nt, Human
uccacugugcgggacggugauga

SEQ ID NO: 184526 - RNA, 24 nt, Human
ucccaacaccacaccaccccuccc

SEQ ID NO: 184527 - RNA, 25 nt, Human
ucccaacaccacaccaccccucccc

SEQ ID NO: 184528 - RNA, 21 nt, Human
ucccaccccaggccucuccag

SEQ ID NO: 184529 - RNA, 24 nt, Human
ucccagcugaccugaggaccucau

SEQ ID NO: 184530 - RNA, 22 nt, Human
ucccugggccuuugggcccagc

SEQ ID NO: 184531 - RNA, 25 nt, Human
ucccugggccuuugggcccagcuuu

SEQ ID NO: 184532 - RNA, 22 nt, Human
ucccugugagcaggugacagcc

SEQ ID NO: 184533 - RNA, 22 nt, Human
uccucagacuccucagcagugg

SEQ ID NO: 184534 - RNA, 21 nt, Human
ucgcugugggcuccagcgggu

SEQ ID NO: 184535 - RNA, 18 nt, Human
ucggauccuggccggguc

SEQ ID NO: 184536 - RNA, 18 nt, Human
ucucagaggcucugccag

SEQ ID NO: 184537 - RNA, 21 nt, Human
ucucagaggcucugccagacc

SEQ ID NO: 184538 - RNA, 19 nt, Human
ucucuggaggcuggggggu

SEQ ID NO: 184539 - RNA, 23 nt, Human
ucugagcccugaccugugucacc

SEQ ID NO: 184540 - RNA, 18 nt, Human
ucugcagccugcgcugag

SEQ ID NO: 184541 - RNA, 21 nt, Human
ucugccagacccuggauggcg

SEQ ID NO: 184542 - RNA, 19 nt, Human
ugaaauacauggcuuuugg

SEQ ID NO: 184543 - RNA, 18 nt, Human
ugaggaugggagcaggcg

SEQ ID NO: 184544 - RNA, 18 nt, Human
ugagugacaggaggucaa

SEQ ID NO: 184545 - RNA, 21 nt, Human
ugaugaaaagcaaagcagcac

SEQ ID NO: 184546 - RNA, 20 nt, Human
ugccagacccuggauggcgg

SEQ ID NO: 184547 - RNA, 22 nt, Human
uggacuugccuguguugggggc

SEQ ID NO: 184548 - RNA, 21 nt, Human
uggcagcuggggcacaggagg

SEQ ID NO: 184549 - RNA, 21 nt, Human
uggcaggguuauuauggggug

SEQ ID NO: 184550 - RNA, 22 nt, Human
uggcugggucgggaagggaccu

SEQ ID NO: 184551 - RNA, 19 nt, Human
ugggaggagcgaacagcuc

SEQ ID NO: 184552 - RNA, 21 nt, Human
uggggaccugaccagcaaccg

SEQ ID NO: 184553 - RNA, 23 nt, Human
uggggccccucaagggcgcaggg

SEQ ID NO: 184554 - RNA, 23 nt, Human
uggugcugucucaggcgucaccc

SEQ ID NO: 184555 - RNA, 18 nt, Human
uguggaggaaggacacag

SEQ ID NO: 184556 - RNA, 19 nt, Human
uucccaacaccacaccacc

SEQ ID NO: 184557 - RNA, 26 nt, Human
uucccgugugcagugcggggucucac

SEQ ID NO: 184558 - RNA, 22 nt, Human
aagccuggcaguggcccugagg

SEQ ID NO: 184559 - RNA, 18 nt, Human
agaaagggagggagugag

SEQ ID NO: 184560 - RNA, 23 nt, Human
agaaagugguucccuuuaucgag

SEQ ID NO: 184561 - RNA, 21 nt, Human
agagagaacgauagaaaggga

SEQ ID NO: 184562 - RNA, 24 nt, Human
agccggagcgagagcagucccagg

SEQ ID NO: 184563 - RNA, 22 nt, Human
cacaugugcugggcaccaggca

SEQ ID NO: 184564 - RNA, 19 nt, Human
cagucccaggacucggcaa

SEQ ID NO: 184565 - RNA, 21 nt, Human
gauagaaagggagggagugag

SEQ ID NO: 184566 - RNA, 19 nt, Human
gccggagcgagagcagucc

SEQ ID NO: 184567 - RNA, 19 nt, Human
ggacucggcaagccuggca

SEQ ID NO: 184568 - RNA, 19 nt, Human
gguuuuuuuucuuucuuug

SEQ ID NO: 184569 - RNA, 22 nt, Human
uaccugggcgcugggcgagggc

SEQ ID NO: 184570 - RNA, 19 nt, Human
uaggagagcgcgggagagu

SEQ ID NO: 184571 - RNA, 25 nt, Human
uauacaggauaacaaaaaaaaaaaa

SEQ ID NO: 184572 - RNA, 18 nt, Human
uccaugcaaagagagaac

SEQ ID NO: 184573 - RNA, 19 nt, Human
ucccaggacucggcaagcc

SEQ ID NO: 184574 - RNA, 20 nt, Human
ugagagagaaagacauggua

SEQ ID NO: 184575 - RNA, 24 nt, Human
uggcacaacuugaugguuuuuuuu

SEQ ID NO: 184576 - RNA, 24 nt, Human
uguagggcagcacaugugcugggc

SEQ ID NO: 184577 - RNA, 21 nt, Human
uuuuuuuuuuuuuuuuuauuu

SEQ ID NO: 184578 - RNA, 18 nt, Human
aaaaaaaagaaaaucacc

SEQ ID NO: 184579 - RNA, 19 nt, Human
aaaaaaacaccccuaaacc

SEQ ID NO: 184580 - RNA, 21 nt, Human
aaaaaaacaccccuaaaccca

SEQ ID NO: 184581 - RNA, 22 nt, Human
aaaaaacaccccuaaacccaag

SEQ ID NO: 184582 - RNA, 23 nt, Human
aaaaagcaaagucacuaggaugg

SEQ ID NO: 184583 - RNA, 19 nt, Human
aaaacccacaaacgaaaug

SEQ ID NO: 184584 - RNA, 22 nt, Human
aaaaucacaaaugcacaacuaa

SEQ ID NO: 184585 - RNA, 23 nt, Human
aaacaaaaacugggaucccaaaa

SEQ ID NO: 184586 - RNA, 24 nt, Human
aacccacaaacgaaaugagaaaaa

SEQ ID NO: 184587 - RNA, 19 nt, Human
aacugggaucccaaaacaa

SEQ ID NO: 184588 - RNA, 22 nt, Human
aacuggugccuuuuaacuuuuu

SEQ ID NO: 184589 - RNA, 21 nt, Human
aagaaaaacaacacauacaaa

SEQ ID NO: 184590 - RNA, 22 nt, Human
aagaaaaacaacacauacaaaa

SEQ ID NO: 184591 - RNA, 19 nt, Human
aagaaaaagacucaaauga

SEQ ID NO: 184592 - RNA, 21 nt, Human
aagaaaaagacucaaaugaga

SEQ ID NO: 184593 - RNA, 18 nt, Human
aagaaacaaggcgagauc

SEQ ID NO: 184594 - RNA, 21 nt, Human
aagaaacaaggcgagaucaca

SEQ ID NO: 184595 - RNA, 23 nt, Human
aagcaggaagagacagaagggac

SEQ ID NO: 184596 - RNA, 22 nt, Human
aagucagcacuucuuaaaccag

SEQ ID NO: 184597 - RNA, 20 nt, Human
aagugugaacaugugauaac

SEQ ID NO: 184598 - RNA, 20 nt, Human
aauaacagggagaaauggaa

SEQ ID NO: 184599 - RNA, 19 nt, Human
acacaaacaaccucuuugu

SEQ ID NO: 184600 - RNA, 18 nt, Human
accccaccccauccccca

SEQ ID NO: 184601 - RNA, 24 nt, Human
accccaccccaucccccaagaaaa

SEQ ID NO: 184602 - RNA, 23 nt, Human
accccaucccccaagaaaaacaa

SEQ ID NO: 184603 - RNA, 28 nt, Human
accuuauacucucuuaaaacaaaaacug

SEQ ID NO: 184604 - RNA, 21 nt, Human
acucccaccccaccccauccc

SEQ ID NO: 184605 - RNA, 24 nt, Human
agaaaaaaacauacaaacaaauaa

SEQ ID NO: 184606 - RNA, 18 nt, Human
agacuucugggaacuccu

SEQ ID NO: 184607 - RNA, 23 nt, Human
agcucuaccuacucccaccccac

SEQ ID NO: 184608 - RNA, 18 nt, Human
aggaagagacagaauuuu

SEQ ID NO: 184609 - RNA, 20 nt, Human
aggcggaggagacgcggggc

SEQ ID NO: 184610 - RNA, 22 nt, Human
agggggcuagguaagaaaaaga

SEQ ID NO: 184611 - RNA, 20 nt, Human
agguaagaaaaagacucaaa

SEQ ID NO: 184612 - RNA, 20 nt, Human
auacaaaaaucuggacaccu

SEQ ID NO: 184613 - RNA, 21 nt, Human
auaguucuguaccuacacugu

SEQ ID NO: 184614 - RNA, 25 nt, Human
aucacaaaugcacaacuaacuauag

SEQ ID NO: 184615 - RNA, 21 nt, Human
auucucagcucuaccuacucc

SEQ ID NO: 184616 - RNA, 22 nt, Human
caacacauacaaaaaucuggaa

SEQ ID NO: 184617 - RNA, 24 nt, Human
caagaaaaacaacacauacaaaaa

SEQ ID NO: 184618 - RNA, 22 nt, Human
cacauaguaaaaacuguacauu

SEQ ID NO: 184619 - RNA, 26 nt, Human
caccaauaaaugaaguacacauaacc

SEQ ID NO: 184620 - RNA, 23 nt, Human
caccccaucccccaagaaaaaca

SEQ ID NO: 184621 - RNA, 24 nt, Human
caccccaucccccaagaaaaacaa

SEQ ID NO: 184622 - RNA, 18 nt, Human
cagaagccugcuugugcc

SEQ ID NO: 184623 - RNA, 22 nt, Human
cagacaaaaacuuugcccgaag

SEQ ID NO: 184624 - RNA, 25 nt, Human
cagacaaaaacuuugcccgaguguu

SEQ ID NO: 184625 - RNA, 23 nt, Human
cagggugggcuagcuaaccugcc

SEQ ID NO: 184626 - RNA, 23 nt, Human
caugcacagacaaaaacuuugcc

SEQ ID NO: 184627 - RNA, 21 nt, Human
cauggcaaguccuuuguuuua

SEQ ID NO: 184628 - RNA, 22 nt, Human
ccaaaacaaauggagauacaca

SEQ ID NO: 184629 - RNA, 24 nt, Human
ccaccccaucccccaagaaaaaca

SEQ ID NO: 184630 - RNA, 18 nt, Human
ccacguuuaacaugguuu

SEQ ID NO: 184631 - RNA, 27 nt, Human
cccaagaaaaacaacacauacaaaaau

SEQ ID NO: 184632 - RNA, 24 nt, Human
cccacaaacgaaaugagaaaaaaa

SEQ ID NO: 184633 - RNA, 26 nt, Human
cccaccccaccccaucccccaagaaa

SEQ ID NO: 184634 - RNA, 18 nt, Human
ccccaagaaaaacaacac

SEQ ID NO: 184635 - RNA, 21 nt, Human
ccccaauauuccauuuugacc

SEQ ID NO: 184636 - RNA, 23 nt, Human
ccccaccccaucccccaagaaaa

SEQ ID NO: 184637 - RNA, 21 nt, Human
cccugagcccaggcuguaccc

SEQ ID NO: 184638 - RNA, 24 nt, Human
cccugagcuaucaaguaauuaugu

SEQ ID NO: 184639 - RNA, 23 nt, Human
cccuuuuccucccaaaacugaau

SEQ ID NO: 184640 - RNA, 19 nt, Human
ccuaagugggcuccuuggc

SEQ ID NO: 184641 - RNA, 23 nt, Human
ccucgcgucaggcaacggucccc

SEQ ID NO: 184642 - RNA, 20 nt, Human
ccuuggcugauaucuuggau

SEQ ID NO: 184643 - RNA, 23 nt, Human
cgaaaugagaaaaaaacauacaa

SEQ ID NO: 184644 - RNA, 24 nt, Human
cgaguggagcuggagggagaagga

SEQ ID NO: 184645 - RNA, 22 nt, Human
cggcagcgggccgagggcuggg

SEQ ID NO: 184646 - RNA, 18 nt, Human
cuaccuacucccaccccc

SEQ ID NO: 184647 - RNA, 22 nt, Human
cucccaaaacugaaugagaaaa

SEQ ID NO: 184648 - RNA, 25 nt, Human
cucccaaaacugaaugagaaaacaa

SEQ ID NO: 184649 - RNA, 18 nt, Human
cuccccuaagugggcucc

SEQ ID NO: 184650 - RNA, 22 nt, Human
cuggagggagaaggaguuggag

SEQ ID NO: 184651 - RNA, 21 nt, Human
cuggcggagucggggacuagc

SEQ ID NO: 184652 - RNA, 21 nt, Human
cuuuguggguuuuagguucgg

SEQ ID NO: 184653 - RNA, 23 nt, Human
gaaaaaaaaacccacaaacgaaa

SEQ ID NO: 184654 - RNA, 25 nt, Human
gaaauacguacauguuacgugccaa

SEQ ID NO: 184655 - RNA, 19 nt, Human
gagggagaaggaguuggag

SEQ ID NO: 184656 - RNA, 20 nt, Human
gagggagaaggaguuggagu

SEQ ID NO: 184657 - RNA, 20 nt, Human
gagggagaaggaguuggagu

SEQ ID NO: 184658 - RNA, 23 nt, Human
gaguuggaguugguggaagaggc

SEQ ID NO: 184659 - RNA, 26 nt, Human
ggaagggauucccaaggcaguuguuc

SEQ ID NO: 184660 - RNA, 19 nt, Human
ggcgaaaaguagagcuggg

SEQ ID NO: 184661 - RNA, 19 nt, Human
gguaaggacacaaggaagg

SEQ ID NO: 184662 - RNA, 20 nt, Human
guuugaaaucucgaccacuc

SEQ ID NO: 184663 - RNA, 23 nt, Human
uaaaaaaaaacaccccuaaaccc

SEQ ID NO: 184664 - RNA, 22 nt, Human
uaaaaagcaaagucacuaggau

SEQ ID NO: 184665 - RNA, 22 nt, Human
uaaaaucacaaaugcacaacua

SEQ ID NO: 184666 - RNA, 26 nt, Human
uaaaugaaguacacauaaccuccuuc

SEQ ID NO: 184667 - RNA, 18 nt, Human
uaagaaaaagacucaaau

SEQ ID NO: 184668 - RNA, 19 nt, Human
uaagaaacaaggcgagauc

SEQ ID NO: 184669 - RNA, 18 nt, Human
uaauuuaaaaaaaagaaa

SEQ ID NO: 184670 - RNA, 20 nt, Human
uacaaacaaauaauagagug

SEQ ID NO: 184671 - RNA, 19 nt, Human
uacacaugcacagacaaaa

SEQ ID NO: 184672 - RNA, 24 nt, Human
uacacaugcacagacaaaaacuuu

SEQ ID NO: 184673 - RNA, 20 nt, Human
uaggaugguagaaaagugau

SEQ ID NO: 184674 - RNA, 19 nt, Human
ucccaccccaccccauccc

SEQ ID NO: 184675 - RNA, 21 nt, Human
ucccaccccaccccauccccc

SEQ ID NO: 184676 - RNA, 18 nt, Human
ucccuuuuccucccaaaa

SEQ ID NO: 184677 - RNA, 20 nt, Human
ucccuuuuccucccaaaacu

SEQ ID NO: 184678 - RNA, 23 nt, Human
ugaacaauaacacaaacaaccuc

SEQ ID NO: 184679 - RNA, 19 nt, Human
ugaaugagaaaacaaaguc

SEQ ID NO: 184680 - RNA, 21 nt, Human
ugauaaaaucacaaaugcaca

SEQ ID NO: 184681 - RNA, 22 nt, Human
ugauaaaaucacaaaugcacaa

SEQ ID NO: 184682 - RNA, 20 nt, Human
ugauaaauaaaaccugcuuc

SEQ ID NO: 184683 - RNA, 24 nt, Human
ugauaagagggggcuagguaagaa

SEQ ID NO: 184684 - RNA, 19 nt, Human
ugccaagaagggacccugg

SEQ ID NO: 184685 - RNA, 20 nt, Human
ugccaagaagggacccuggu

SEQ ID NO: 184686 - RNA, 19 nt, Human
uggaagaggcgagcaggcg

SEQ ID NO: 184687 - RNA, 19 nt, Human
uggcuagcucucagacagc

SEQ ID NO: 184688 - RNA, 19 nt, Human
uggcuagcucucagacagc

SEQ ID NO: 184689 - RNA, 19 nt, Human
ugguuugcuuguaagaaac

SEQ ID NO: 184690 - RNA, 19 nt, Human
uguaagaaacaaggcgaga

SEQ ID NO: 184691 - RNA, 24 nt, Human
uguccauucauuuaaaaagcaaag

SEQ ID NO: 184692 - RNA, 21 nt, Human
ugugaacaugaaaacuagcac

SEQ ID NO: 184693 - RNA, 21 nt, Human
uguuucaauauaaaaauagag

SEQ ID NO: 184694 - RNA, 25 nt, Human
uuacaacugaagauugaacaauaac

SEQ ID NO: 184695 - RNA, 19 nt, Human
uucucagcucuaccuacuc

SEQ ID NO: 184696 - RNA, 22 nt, Human
uucuggcuagcucucagacagc

SEQ ID NO: 184697 - RNA, 21 nt, Human
uuuaaaaaaaagaaaaucacc

SEQ ID NO: 184698 - RNA, 23 nt, Human
uuuacaacagcccccaauauucc

SEQ ID NO: 184699 - RNA, 18 nt, Human
aaagucacuucugugccc

SEQ ID NO: 184700 - RNA, 21 nt, Human
aaaugcuucucaagaaucuac

SEQ ID NO: 184701 - RNA, 23 nt, Human
aaaugcuucucaagaaucuaccc

SEQ ID NO: 184702 - RNA, 25 nt, Human
accccauaacuuauagacauucaga

SEQ ID NO: 184703 - RNA, 23 nt, Human
agauacacuaaauucuucuuauu

SEQ ID NO: 184704 - RNA, 22 nt, Human
aggaaggggcuuggaauugaua

SEQ ID NO: 184705 - RNA, 20 nt, Human
auagacauucagacauuucc

SEQ ID NO: 184706 - RNA, 22 nt, Human
caaaaauggaagagucucuuga

SEQ ID NO: 184707 - RNA, 22 nt, Human
caaagucacuucugugcccuuc

SEQ ID NO: 184708 - RNA, 22 nt, Human
caccaaauaguuaacagcuuua

SEQ ID NO: 184709 - RNA, 18 nt, Human
cagcuuuauuggagauau

SEQ ID NO: 184710 - RNA, 24 nt, Human
cuacuugccauuguauguuuugau

SEQ ID NO: 184711 - RNA, 28 nt, Human
cucaagaaucuaccccauaacuuauaga

SEQ ID NO: 184712 - RNA, 19 nt, Human
cucgcccugcgcgcccugg

SEQ ID NO: 184713 - RNA, 20 nt, Human
gaaaugcuucucaagaaucu

SEQ ID NO: 184714 - RNA, 25 nt, Human
ggucaaaauuaucaagguucuucag

SEQ ID NO: 184715 - RNA, 20 nt, Human
gugucauuuaaacguugagu

SEQ ID NO: 184716 - RNA, 30 nt, Human
uaacuuauagacauucagacauuuccuuuu

SEQ ID NO: 184717 - RNA, 19 nt, Human
ucaaagucacuucugugcc

SEQ ID NO: 184718 - RNA, 20 nt, Human
ucuacagcuugcaaaaaugg

SEQ ID NO: 184719 - RNA, 24 nt, Human
ugaaaugcuucucaagaaucuacc

SEQ ID NO: 184720 - RNA, 20 nt, Human
ugaaauuauaugaaaugcuu

SEQ ID NO: 184721 - RNA, 21 nt, Human
ugauaauaaaauuacagauac

SEQ ID NO: 184722 - RNA, 23 nt, Human
ugggagcagaggcacaauaccaa

SEQ ID NO: 184723 - RNA, 20 nt, Human
ugugucauuuaaacguugag

SEQ ID NO: 184724 - RNA, 22 nt, Human
uugaauauaauagaauacaaau

SEQ ID NO: 184725 - RNA, 19 nt, Human
uuguuacauugaaaaagga

SEQ ID NO: 184726 - RNA, 18 nt, Human
uuuucauugucuggcaaa

SEQ ID NO: 184727 - RNA, 23 nt, Human
uuuuuuuuuuuuuuuuccaccaa

SEQ ID NO: 184728 - RNA, 21 nt, Human
aaaaaaaaacccucacaacgu

SEQ ID NO: 184729 - RNA, 23 nt, Human
aaaaaaaacccucacaacgugag

SEQ ID NO: 184730 - RNA, 18 nt, Human
aaaacgaggaagagaagg

SEQ ID NO: 184731 - RNA, 19 nt, Human
aaacaagguccccacagau

SEQ ID NO: 184732 - RNA, 22 nt, Human
aaccccacggccggugcgcucu

SEQ ID NO: 184733 - RNA, 18 nt, Human
aagaggaagcaguucagu

SEQ ID NO: 184734 - RNA, 22 nt, Human
aaggaaaagaaguguuuaaaaa

SEQ ID NO: 184735 - RNA, 22 nt, Human
aagggcuggcugggaaggcugc

SEQ ID NO: 184736 - RNA, 25 nt, Human
acaagcgagagcgaguguguaugcg

SEQ ID NO: 184737 - RNA, 18 nt, Human
acaagguccccacagaua

SEQ ID NO: 184738 - RNA, 23 nt, Human
accuugccccucaagccgaaagc

SEQ ID NO: 184739 - RNA, 23 nt, Human
agaauaaacaagguccccacaga

SEQ ID NO: 184740 - RNA, 19 nt, Human
aggaaaauuauuuucuuuc

SEQ ID NO: 184741 - RNA, 19 nt, Human
aggaagagagaaauccugg

SEQ ID NO: 184742 - RNA, 24 nt, Human
aggaagcaguucagucuggcaccc

SEQ ID NO: 184743 - RNA, 21 nt, Human
aggcagcggcgcgcuccucgc

SEQ ID NO: 184744 - RNA, 24 nt, Human
aguaagaauucucucuagaauaaa

SEQ ID NO: 184745 - RNA, 19 nt, Human
caagccgaaagcccgccag

SEQ ID NO: 184746 - RNA, 22 nt, Human
cacggccggugcgcucuucacc

SEQ ID NO: 184747 - RNA, 20 nt, Human
cagcccucuggacugcgcuc

SEQ ID NO: 184748 - RNA, 19 nt, Human
cauaaaagcaaaugaaggu

SEQ ID NO: 184749 - RNA, 22 nt, Human
ccauggggguucagagcugcaa

SEQ ID NO: 184750 - RNA, 23 nt, Human
ccauucagauagcuaaaaugcag

SEQ ID NO: 184751 - RNA, 22 nt, Human
ccccacggccggugcgcucuuc

SEQ ID NO: 184752 - RNA, 19 nt, Human
cccccgggagggagaugga

SEQ ID NO: 184753 - RNA, 21 nt, Human
ccccucaagccgaaagcccgc

SEQ ID NO: 184754 - RNA, 22 nt, Human
ccucuagcccccagauggaaac

SEQ ID NO: 184755 - RNA, 18 nt, Human
ccuugccccucaagccga

SEQ ID NO: 184756 - RNA, 21 nt, Human
ccuugccccucaagccgaaag

SEQ ID NO: 184757 - RNA, 22 nt, Human
cgaguguguaugcgcgcgugug

SEQ ID NO: 184758 - RNA, 23 nt, Human
cgaguuccgagccgcagaauccu

SEQ ID NO: 184759 - RNA, 19 nt, Human
cgggagggagauggacaag

SEQ ID NO: 184760 - RNA, 24 nt, Human
cggugcgcucuucaccuugccccu

SEQ ID NO: 184761 - RNA, 20 nt, Human
cuccugaaauaggaagagag

SEQ ID NO: 184762 - RNA, 21 nt, Human
cugcugccuugcuccucuagc

SEQ ID NO: 184763 - RNA, 18 nt, Human
cugggaaggcugcugccu

SEQ ID NO: 184764 - RNA, 23 nt, Human
cuugcuccucuagcccccagaug

SEQ ID NO: 184765 - RNA, 18 nt, Human
gaagagaaggaaaagaag

SEQ ID NO: 184766 - RNA, 18 nt, Human
gagcgcugcgggcucggc

SEQ ID NO: 184767 - RNA, 20 nt, Human
gagcugcaauccgaguuccg

SEQ ID NO: 184768 - RNA, 19 nt, Human
gcagcggcgcgcuccucgc

SEQ ID NO: 184769 - RNA, 23 nt, Human
gcaguuucaucugaccaaaaacc

SEQ ID NO: 184770 - RNA, 20 nt, Human
gcgcgcgccggcucccccgg

SEQ ID NO: 184771 - RNA, 18 nt, Human
gcgcugcgggcucggcuc

SEQ ID NO: 184772 - RNA, 21 nt, Human
gcuaaaaugcaguuucaucug

SEQ ID NO: 184773 - RNA, 21 nt, Human
gcugggaaggcugcugccuug

SEQ ID NO: 184774 - RNA, 21 nt, Human
ggaaggcugcugccuugcucc

SEQ ID NO: 184775 - RNA, 23 nt, Human
gggcuggcugggaaggcugcugc

SEQ ID NO: 184776 - RNA, 20 nt, Human
ggggacgagcagcgcagccc

SEQ ID NO: 184777 - RNA, 18 nt, Human
gguucagagcugcaaucc

SEQ ID NO: 184778 - RNA, 26 nt, Human
uaagccagauggacgauggcaagcca

SEQ ID NO: 184779 - RNA, 26 nt, Human
uagaauaaacaagguccccacagaua

SEQ ID NO: 184780 - RNA, 21 nt, Human
ucaaaacgaggaagagaagga

SEQ ID NO: 184781 - RNA, 22 nt, Human
uccagcucgguaaaccccacgg

SEQ ID NO: 184782 - RNA, 25 nt, Human
uccccacagauagcugaaggaaaga

SEQ ID NO: 184783 - RNA, 22 nt, Human
ugaaauaggaagagagaaaucc

SEQ ID NO: 184784 - RNA, 18 nt, Human
ugaaggaaagaggaagca

SEQ ID NO: 184785 - RNA, 21 nt, Human
ugaaggaaagaggaagcaguu

SEQ ID NO: 184786 - RNA, 19 nt, Human
ugagcucgagguucuuggg

SEQ ID NO: 184787 - RNA, 19 nt, Human
ugcagcauaaaagcaaaug

SEQ ID NO: 184788 - RNA, 21 nt, Human
ugccuugcuccucuagccccc

SEQ ID NO: 184789 - RNA, 22 nt, Human
ugccuugcuccucuagccccca

SEQ ID NO: 184790 - RNA, 24 nt, Human
ugggaaaacaaaaagggaggcaga

SEQ ID NO: 184791 - RNA, 18 nt, Human
uggggaugugugugcgug

SEQ ID NO: 184792 - RNA, 20 nt, Human
uguaugcgcgcgugugucug

SEQ ID NO: 184793 - RNA, 19 nt, Human
ugugcggcaaaggugggag

SEQ ID NO: 184794 - RNA, 18 nt, Human
uguguaugcgcgcgugug

SEQ ID NO: 184795 - RNA, 22 nt, Human
uguuugcuuuuuuguugaaaau

SEQ ID NO: 184796 - RNA, 24 nt, Human
uucuuucuuccuuuuuuauuuuaa

SEQ ID NO: 184797 - RNA, 23 nt, Human
uuuaaaugagaaaaaaaaaaacc

SEQ ID NO: 184798 - RNA, 25 nt, Human
uuuuuauuuuaaaugagaaaaaaaa

SEQ ID NO: 184799 - RNA, 19 nt, Human
aaagaugagaagacucugc

SEQ ID NO: 184800 - RNA, 21 nt, Human
acuagguaccccaggcuucug

SEQ ID NO: 184801 - RNA, 20 nt, Human
aggcugccaguggcuugaca

SEQ ID NO: 184802 - RNA, 18 nt, Human
aggcuucugcuggucucc

SEQ ID NO: 184803 - RNA, 23 nt, Human
aucacccccgccaccaagcaggc

SEQ ID NO: 184804 - RNA, 18 nt, Human
aucuggagagggacaggg

SEQ ID NO: 184805 - RNA, 24 nt, Human
caguggcuugacaguucaggaucu

SEQ ID NO: 184806 - RNA, 22 nt, Human
cauacaucacccccgccaccaa

SEQ ID NO: 184807 - RNA, 21 nt, Human
ccaacccuucuccacauacau

SEQ ID NO: 184808 - RNA, 22 nt, Human
cccaggcuucugcuggucucca

SEQ ID NO: 184809 - RNA, 24 nt, Human
ccccauagccuccuguccuccagu

SEQ ID NO: 184810 - RNA, 18 nt, Human
cccugggaguccuggaga

SEQ ID NO: 184811 - RNA, 19 nt, Human
ccuccagugaaaagaugag

SEQ ID NO: 184812 - RNA, 23 nt, Human
ccuggccugggcccuggccccac

SEQ ID NO: 184813 - RNA, 21 nt, Human
cggccuggccugggcccuggc

SEQ ID NO: 184814 - RNA, 20 nt, Human
cuggccugggcccuggcccc

SEQ ID NO: 184815 - RNA, 20 nt, Human
gagaagacucugcucccugg

SEQ ID NO: 184816 - RNA, 21 nt, Human
ggagaaagccccacaucugga

SEQ ID NO: 184817 - RNA, 21 nt, Human
ggcaugaggcugccaguggcu

SEQ ID NO: 184818 - RNA, 20 nt, Human
uaccccaggcuucugcuggu

SEQ ID NO: 184819 - RNA, 24 nt, Human
uccuccagugaaaagaugagaaga

SEQ ID NO: 184820 - RNA, 21 nt, Human
ucuccaggugcguagcugggc

SEQ ID NO: 184821 - RNA, 23 nt, Human
ucuggagagggacagggcaacug

SEQ ID NO: 184822 - RNA, 20 nt, Human
ucuggcaaaugugguggcau

SEQ ID NO: 184823 - RNA, 26 nt, Human
uggagagggacagggcaacugcauuu

SEQ ID NO: 184824 - RNA, 25 nt, Human
uggcaaaugugguggcaugagaaga

SEQ ID NO: 184825 - RNA, 19 nt, Human
uuccaccccucccagagga

SEQ ID NO: 184826 - RNA, 21 nt, Human
uucuggcaaaugugguggcau

SEQ ID NO: 184827 - RNA, 28 nt, Human
aaacaaaaagagaaugugucacaucuaa

SEQ ID NO: 184828 - RNA, 19 nt, Human
aaacagaugcaaaacuaau

SEQ ID NO: 184829 - RNA, 25 nt, Human
aaacagaugcaaaacuaaugugcau

SEQ ID NO: 184830 - RNA, 24 nt, Human
aaagaaaaaaauauacuuaaaagc

SEQ ID NO: 184831 - RNA, 20 nt, Human
aaagcuggcaaauacaccaa

SEQ ID NO: 184832 - RNA, 22 nt, Human
aauggcaaauacaaauaaagua

SEQ ID NO: 184833 - RNA, 27 nt, Human
agaaaaagaaaaaaauauacuuaaaag

SEQ ID NO: 184834 - RNA, 23 nt, Human
caaaacagaugcaaaacuaaugu

SEQ ID NO: 184835 - RNA, 23 nt, Human
caaauacaccaacaccuuaaagu

SEQ ID NO: 184836 - RNA, 18 nt, Human
cacaaaacagaugcaaaa

SEQ ID NO: 184837 - RNA, 22 nt, Human
cagaaucagagccucggcccgg

SEQ ID NO: 184838 - RNA, 19 nt, Human
caggucacaaaacagaugc

SEQ ID NO: 184839 - RNA, 23 nt, Human
caggucacaaaacagaugcaaaa

SEQ ID NO: 184840 - RNA, 23 nt, Human
ccaggguggagucggccuccccc

SEQ ID NO: 184841 - RNA, 22 nt, Human
ccccagaaucagagccucggcc

SEQ ID NO: 184842 - RNA, 18 nt, Human
ccuccagccaggguggag

SEQ ID NO: 184843 - RNA, 19 nt, Human
gcaaauacaccaacaccuu

SEQ ID NO: 184844 - RNA, 21 nt, Human
ggaauaaacaaaaagagaaug

SEQ ID NO: 184845 - RNA, 22 nt, Human
uaaaguacagcaaauaaagcug

SEQ ID NO: 184846 - RNA, 25 nt, Human
uacagcaaauaaagcuggcaaauac

SEQ ID NO: 184847 - RNA, 23 nt, Human
ucacaaaacagaugcaaaacuaa

SEQ ID NO: 184848 - RNA, 21 nt, Human
ucagagccucggcccgggugc

SEQ ID NO: 184849 - RNA, 18 nt, Human
uccuccagccagggugga

SEQ ID NO: 184850 - RNA, 18 nt, Human
ucucugguuguuacaugg

SEQ ID NO: 184851 - RNA, 19 nt, Human
ugaauggcaaauacaaaua

SEQ ID NO: 184852 - RNA, 24 nt, Human
ugugcauugaaaaugagaaaaaga

SEQ ID NO: 184853 - RNA, 24 nt, Human
uuacauggugauuugucguuucua

SEQ ID NO: 184854 - RNA, 21 nt, Human
uucuauguuuguuggcugugg

SEQ ID NO: 184855 - RNA, 19 nt, Human
aagcccacaaccagagggu

SEQ ID NO: 184856 - RNA, 26 nt, Human
aagcccacaaccagagggugcucugg

SEQ ID NO: 184857 - RNA, 20 nt, Human
acuucagccaauucuaacac

SEQ ID NO: 184858 - RNA, 21 nt, Human
agacauggaggggcugggggu

SEQ ID NO: 184859 - RNA, 21 nt, Human
agagaaaggggagucacagag

SEQ ID NO: 184860 - RNA, 19 nt, Human
aggcgcgugggcgcgcggc

SEQ ID NO: 184861 - RNA, 20 nt, Human
agucacagaggaggcugcag

SEQ ID NO: 184862 - RNA, 21 nt, Human
caaaaacacuucagccaauuc

SEQ ID NO: 184863 - RNA, 24 nt, Human
caaaaacacuucagccaauucuaa

SEQ ID NO: 184864 - RNA, 25 nt, Human
ccaagcccacaaccagagggugcuc

SEQ ID NO: 184865 - RNA, 22 nt, Human
cgcgagccgaggaggaaggagc

SEQ ID NO: 184866 - RNA, 24 nt, Human
cgcgcagcaagcgaggcgcguggg

SEQ ID NO: 184867 - RNA, 21 nt, Human
gagaccagccuucccugcuaa

SEQ ID NO: 184868 - RNA, 19 nt, Human
ggacgagaagagaaagggg

SEQ ID NO: 184869 - RNA, 19 nt, Human
ggacuagaagguacacuga

SEQ ID NO: 184870 - RNA, 21 nt, Human
ggacuagaagguacacugagu

SEQ ID NO: 184871 - RNA, 23 nt, Human
ucagaaaagucagcugcacaaaa

SEQ ID NO: 184872 - RNA, 23 nt, Human
ugggggagaccagccuucccugg

SEQ ID NO: 184873 - RNA, 18 nt, Human
uggggguuaggcuggggg

SEQ ID NO: 184874 - RNA, 23 nt, Human
aaaauccaggugcagacccaccg

SEQ ID NO: 184875 - RNA, 20 nt, Human
accacagagggaccuuucca

SEQ ID NO: 184876 - RNA, 19 nt, Human
agcugcagcagcacuggga

SEQ ID NO: 184877 - RNA, 20 nt, Human
aggugggcagaguggggaaa

SEQ ID NO: 184878 - RNA, 24 nt, Human
caagugagaauauggaguguuugg

SEQ ID NO: 184879 - RNA, 19 nt, Human
cagcagcacugggacucca

SEQ ID NO: 184880 - RNA, 24 nt, Human
caguguguguuguuucccucuaug

SEQ ID NO: 184881 - RNA, 21 nt, Human
cauauauuuacuguaucagau

SEQ ID NO: 184882 - RNA, 21 nt, Human
ccaccgcuucucucuaagcag

SEQ ID NO: 184883 - RNA, 20 nt, Human
ccagaggguguggcuguuag

SEQ ID NO: 184884 - RNA, 24 nt, Human
ccuuccgcccucucauaggcccca

SEQ ID NO: 184885 - RNA, 18 nt, Human
cuccagcuccauccaugu

SEQ ID NO: 184886 - RNA, 19 nt, Human
cucccuccucccaccuucc

SEQ ID NO: 184887 - RNA, 23 nt, Human
cucccuccucccaccuuccgccc

SEQ ID NO: 184888 - RNA, 21 nt, Human
cugcagcagcacugggacucc

SEQ ID NO: 184889 - RNA, 19 nt, Human
gaucucucccuccucccac

SEQ ID NO: 184890 - RNA, 18 nt, Human
gaucuuguucuuucuuua

SEQ ID NO: 184891 - RNA, 22 nt, Human
gcucccacuuacaagugagaau

SEQ ID NO: 184892 - RNA, 18 nt, Human
gcugcagcagcacuggga

SEQ ID NO: 184893 - RNA, 19 nt, Human
gcuguuagugugucucucu

SEQ ID NO: 184894 - RNA, 22 nt, Human
ggaauuguguacagagacuguu

SEQ ID NO: 184895 - RNA, 22 nt, Human
gggagcgaggaaguaaacugug

SEQ ID NO: 184896 - RNA, 19 nt, Human
ggguacaugcgcaggaagu

SEQ ID NO: 184897 - RNA, 22 nt, Human
ggugggcagaguggggaaaugc

SEQ ID NO: 184898 - RNA, 20 nt, Human
gguguggcuguuaguguguc

SEQ ID NO: 184899 - RNA, 19 nt, Human
gucauggggguuuguuaca

SEQ ID NO: 184900 - RNA, 22 nt, Human
gucauggggguuuguuacacag

SEQ ID NO: 184901 - RNA, 23 nt, Human
uacacagauuauuucaucacccu

SEQ ID NO: 184902 - RNA, 19 nt, Human
uacuuugauuggcaugggc

SEQ ID NO: 184903 - RNA, 18 nt, Human
uagugugucucucuacuc

SEQ ID NO: 184904 - RNA, 21 nt, Human
uaugaaggauaauggccucca

SEQ ID NO: 184905 - RNA, 23 nt, Human
uaugaaggauaauggccuccagc

SEQ ID NO: 184906 - RNA, 19 nt, Human
ucaagaggaagaggaaaua

SEQ ID NO: 184907 - RNA, 24 nt, Human
ucagagcugcagcagcacugggga

SEQ ID NO: 184908 - RNA, 21 nt, Human
ucauaggccccaguguguguu

SEQ ID NO: 184909 - RNA, 20 nt, Human
ucccugcaaagggcaugauc

SEQ ID NO: 184910 - RNA, 21 nt, Human
ucucauaggccccagugugug

SEQ ID NO: 184911 - RNA, 22 nt, Human
ucucccuccucccaccuuccgc

SEQ ID NO: 184912 - RNA, 19 nt, Human
ucucuggugacgugggaau

SEQ ID NO: 184913 - RNA, 23 nt, Human
ugcagucauauauuuacuguauc

SEQ ID NO: 184914 - RNA, 18 nt, Human
ugcucagagcugcagcag

SEQ ID NO: 184915 - RNA, 18 nt, Human
uggaaagacauucaagag

SEQ ID NO: 184916 - RNA, 21 nt, Human
uggccuccagcuccauccaug

SEQ ID NO: 184917 - RNA, 24 nt, Human
ugggcagaguggggaaaugcagug

SEQ ID NO: 184918 - RNA, 18 nt, Human
uguggaaggagacaugag

SEQ ID NO: 184919 - RNA, 20 nt, Human
uguggaaggagacaugagua

SEQ ID NO: 184920 - RNA, 21 nt, Human
uguuacauacauaaaggugug

SEQ ID NO: 184921 - RNA, 24 nt, Human
uuacaagugagaauauggaguguu

SEQ ID NO: 184922 - RNA, 20 nt, Human
uucaucacccuaaguaucca

SEQ ID NO: 184923 - RNA, 26 nt, Human
uuccugaucucucccuccucccaccu

SEQ ID NO: 184924 - RNA, 23 nt, Human
uuuccugaucucucccuccuccc

SEQ ID NO: 184925 - RNA, 20 nt, Human
aaaacgccaccaucaagcug

SEQ ID NO: 184926 - RNA, 21 nt, Human
aaaagccaaaagugucaacau

SEQ ID NO: 184927 - RNA, 18 nt, Human
aaaaggaagcaaaaugaa

SEQ ID NO: 184928 - RNA, 22 nt, Human
aaaauacaaacucuaauaccag

SEQ ID NO: 184929 - RNA, 21 nt, Human
aaacuaguuaccgaaaucaaa

SEQ ID NO: 184930 - RNA, 18 nt, Human
aaagguaagccugguguc

SEQ ID NO: 184931 - RNA, 19 nt, Human
aaccagggccuacaguaau

SEQ ID NO: 184932 - RNA, 18 nt, Human
aagcaaaaugaaccccaa

SEQ ID NO: 184933 - RNA, 20 nt, Human
acaauguuaacaaagauaag

SEQ ID NO: 184934 - RNA, 26 nt, Human
acacaaauauaucacuacacuuucaa

SEQ ID NO: 184935 - RNA, 24 nt, Human
accacacuuuauaaaacacuacag

SEQ ID NO: 184936 - RNA, 27 nt, Human
agaaagaacaggaagaugccgguaccc

SEQ ID NO: 184937 - RNA, 22 nt, Human
auaaaacacuacagguaaacca

SEQ ID NO: 184938 - RNA, 30 nt, Human
auauuaauggaagccuuuucaaauauaucc

SEQ ID NO: 184939 - RNA, 19 nt, Human
auccauggcccgagguccu

SEQ ID NO: 184940 - RNA, 20 nt, Human
augccacagauaucccuagu

SEQ ID NO: 184941 - RNA, 23 nt, Human
auuuauuacauuuugcaagcacu

SEQ ID NO: 184942 - RNA, 24 nt, Human
caaaaugaaccccaaauuaauuaa

SEQ ID NO: 184943 - RNA, 25 nt, Human
caguagaauccauggcccgaggucc

SEQ ID NO: 184944 - RNA, 27 nt, Human
cauaaagaaaaggaagcaaaaugaacc

SEQ ID NO: 184945 - RNA, 22 nt, Human
cauggcccgagguccugcuuca

SEQ ID NO: 184946 - RNA, 25 nt, Human
ccaccuucauaaagguaauuaauuu

SEQ ID NO: 184947 - RNA, 20 nt, Human
ccccuaccuacuacaagaac

SEQ ID NO: 184948 - RNA, 26 nt, Human
gaagacacuuuacagcauucuuguag

SEQ ID NO: 184949 - RNA, 20 nt, Human
gaaugcauaaucaugccaca

SEQ ID NO: 184950 - RNA, 20 nt, Human
gggaaauaccuuuuaagaac

SEQ ID NO: 184951 - RNA, 19 nt, Human
gguuggauggcccuuaguu

SEQ ID NO: 184952 - RNA, 22 nt, Human
guacacaaguguauuuauuaca

SEQ ID NO: 184953 - RNA, 22 nt, Human
uaaaaacacaaauauaucacua

SEQ ID NO: 184954 - RNA, 24 nt, Human
uaaaaacacaaauauaucacuaca

SEQ ID NO: 184955 - RNA, 23 nt, Human
uaaaacacuacagguaaaccaac

SEQ ID NO: 184956 - RNA, 18 nt, Human
uaacaaagauaagaagca

SEQ ID NO: 184957 - RNA, 20 nt, Human
uaacaaagauaagaagcacu

SEQ ID NO: 184958 - RNA, 24 nt, Human
uaagaaauaaugcaaaagguguua

SEQ ID NO: 184959 - RNA, 22 nt, Human
uaaguugaaaagacaguuuuaa

SEQ ID NO: 184960 - RNA, 23 nt, Human
uaauaaaccaccuucauaaaggu

SEQ ID NO: 184961 - RNA, 21 nt, Human
uacaaacucuaauaccagaaa

SEQ ID NO: 184962 - RNA, 21 nt, Human
uacaaagcacucugugaaaau

SEQ ID NO: 184963 - RNA, 22 nt, Human
uacaauguuaacaaagauaaga

SEQ ID NO: 184964 - RNA, 20 nt, Human
uaccagaaauaaaagccaaa

SEQ ID NO: 184965 - RNA, 21 nt, Human
uaccagaaauaaaagccaaaa

SEQ ID NO: 184966 - RNA, 19 nt, Human
uaccuaguuuuauacacug

SEQ ID NO: 184967 - RNA, 19 nt, Human
uagaagacacuuuacagca

SEQ ID NO: 184968 - RNA, 19 nt, Human
uagauugaugaaaacauga

SEQ ID NO: 184969 - RNA, 19 nt, Human
uagauugaugaaaacauga

SEQ ID NO: 184970 - RNA, 21 nt, Human
uaggggccucugaccacacuu

SEQ ID NO: 184971 - RNA, 23 nt, Human
uaguaucuuugauuuuacagaac

SEQ ID NO: 184972 - RNA, 25 nt, Human
uaucacaaacuguuaagacacggaa

SEQ ID NO: 184973 - RNA, 24 nt, Human
uauguacaaaacagauuaauugua

SEQ ID NO: 184974 - RNA, 24 nt, Human
ucaaaaacgccaccaucaagcugu

SEQ ID NO: 184975 - RNA, 24 nt, Human
ucacaaacuguuaagacacggaac

SEQ ID NO: 184976 - RNA, 19 nt, Human
ugaaaacaugaaccagggc

SEQ ID NO: 184977 - RNA, 23 nt, Human
ugaaaauacaaacucuaauacca

SEQ ID NO: 184978 - RNA, 25 nt, Human
ugaaauaaaaacacaaauauaucac

SEQ ID NO: 184979 - RNA, 23 nt, Human
ugaaccagggccuacaguaauau

SEQ ID NO: 184980 - RNA, 22 nt, Human
ugcauucaaaugguagaaagaa

SEQ ID NO: 184981 - RNA, 21 nt, Human
ugcuacaaagcacucugugaa

SEQ ID NO: 184982 - RNA, 19 nt, Human
uggaagccuuuucaaauau

SEQ ID NO: 184983 - RNA, 20 nt, Human
uggaaggcugcaagcaaagc

SEQ ID NO: 184984 - RNA, 21 nt, Human
uggcacauuuauguacaaaac

SEQ ID NO: 184985 - RNA, 22 nt, Human
uggcacauuuauguacaaaaca

SEQ ID NO: 184986 - RNA, 19 nt, Human
ugggaagugguuaaaaauc

SEQ ID NO: 184987 - RNA, 18 nt, Human
uuaacaaagauaagaagc

SEQ ID NO: 184988 - RNA, 18 nt, Human
uuaguaucuuugauuuua

SEQ ID NO: 184989 - RNA, 19 nt, Human
uucaauagucuacaguagu

SEQ ID NO: 184990 - RNA, 26 nt, Human
uugaagguuaccuguaguuaaacuag

SEQ ID NO: 184991 - RNA, 18 nt, Human
aaaaugcuuuucccccug

SEQ ID NO: 184992 - RNA, 19 nt, Human
aaaauugcagaaaccuaga

SEQ ID NO: 184993 - RNA, 23 nt, Human
accauccaccaaaaaugcuuuuc

SEQ ID NO: 184994 - RNA, 23 nt, Human
auuaaaacgguucucuuccauuu

SEQ ID NO: 184995 - RNA, 20 nt, Human
caccaaaaaugcuuuucccc

SEQ ID NO: 184996 - RNA, 20 nt, Human
cagaaaauguaaguauucca

SEQ ID NO: 184997 - RNA, 25 nt, Human
cauuucaucuucagcacuuguuuuc

SEQ ID NO: 184998 - RNA, 25 nt, Human
ccccccaacacacacuuguuuuucc

SEQ ID NO: 184999 - RNA, 18 nt, Human
cccccuguuccccccaac

SEQ ID NO: 185000 - RNA, 21 nt, Human
cccuguuccccccaacacaca

SEQ ID NO: 185001 - RNA, 20 nt, Human
ccuccucuuccuuuucuuuu

SEQ ID NO: 185002 - RNA, 20 nt, Human
ccucuuccuuuucuuuugga

SEQ ID NO: 185003 - RNA, 18 nt, Human
ccuuuucuuuuggacucc

SEQ ID NO: 185004 - RNA, 25 nt, Human
cuauuuacaaauuacuguaacaaaa

SEQ ID NO: 185005 - RNA, 20 nt, Human
cuccgucucuuauuuacacc

SEQ ID NO: 185006 - RNA, 19 nt, Human
cucuuccauuucaucuuca

SEQ ID NO: 185007 - RNA, 22 nt, Human
cuuccuuuucuuuuggacuccc

SEQ ID NO: 185008 - RNA, 23 nt, Human
uaaauaacugaauccuuuucaaa

SEQ ID NO: 185009 - RNA, 25 nt, Human
uaugagaacauuauuuuaaaaagga

SEQ ID NO: 185010 - RNA, 18 nt, Human
uauuucaugcuacagagc

SEQ ID NO: 185011 - RNA, 22 nt, Human
ucagcacuuguuuucauuuuca

SEQ ID NO: 185012 - RNA, 22 nt, Human
ucaucuggcuuauuugaggguc

SEQ ID NO: 185013 - RNA, 25 nt, Human
ucuggagugucagugauauuucaug

SEQ ID NO: 185014 - RNA, 20 nt, Human
ucuuccuuuucuuuuggacu

SEQ ID NO: 185015 - RNA, 22 nt, Human
ucuuccuuuucuuuuggacucc

SEQ ID NO: 185016 - RNA, 26 nt, Human
ugaaccaugugaucauaaaaaaauug

SEQ ID NO: 185017 - RNA, 18 nt, Human
ugacaaaacaaaauccag

SEQ ID NO: 185018 - RNA, 18 nt, Human
ugacaaaacaaaauccag

SEQ ID NO: 185019 - RNA, 19 nt, Human
ugcuuuagucuggaguguc

SEQ ID NO: 185020 - RNA, 22 nt, Human
uggaaauagccaccagaucuca

SEQ ID NO: 185021 - RNA, 20 nt, Human
uggcuuauuugagggucauu

SEQ ID NO: 185022 - RNA, 24 nt, Human
uggcuuauuugagggucauuuggu

SEQ ID NO: 185023 - RNA, 27 nt, Human
uguuuuuccuccucuuccuuuucuuuu

SEQ ID NO: 185024 - RNA, 20 nt, Human
uuagaacauauuugcaaagu

SEQ ID NO: 185025 - RNA, 21 nt, Human
uucagcacuuguuuucauuuu

SEQ ID NO: 185026 - RNA, 20 nt, Human
uucccccuguuccccccaac

SEQ ID NO: 185027 - RNA, 20 nt, Human
uuucuuuuggacuccccucc

SEQ ID NO: 185028 - RNA, 23 nt, Human
uuuuucuucaaauuuucaucugg

SEQ ID NO: 185029 - RNA, 18 nt, Human
acucccuccccgucccca

SEQ ID NO: 185030 - RNA, 22 nt, Human
acugggaggccugggagccugu

SEQ ID NO: 185031 - RNA, 24 nt, Human
agccugaaauguguggccuguguc

SEQ ID NO: 185032 - RNA, 21 nt, Human
agcgggaaggaggcugggagc

SEQ ID NO: 185033 - RNA, 23 nt, Human
aggagagauccagaauccagagc

SEQ ID NO: 185034 - RNA, 22 nt, Human
aggcugggagccuagcgggaaa

SEQ ID NO: 185035 - RNA, 20 nt, Human
aggggacucagaguaccuug

SEQ ID NO: 185036 - RNA, 21 nt, Human
agggucuuucugcugagccuc

SEQ ID NO: 185037 - RNA, 18 nt, Human
aggugcacagcccagccc

SEQ ID NO: 185038 - RNA, 24 nt, Human
caaacaaauacaaaaaaggacauu

SEQ ID NO: 185039 - RNA, 19 nt, Human
cacagcccagcccuggccu

SEQ ID NO: 185040 - RNA, 21 nt, Human
cagaauccagagcugugcuga

SEQ ID NO: 185041 - RNA, 18 nt, Human
cagaguaccuugcgcugc

SEQ ID NO: 185042 - RNA, 23 nt, Human
caggagagauccagaauccagag

SEQ ID NO: 185043 - RNA, 22 nt, Human
caggggucugcggggcagcagg

SEQ ID NO: 185044 - RNA, 22 nt, Human
caugcuuguccaggacugggag

SEQ ID NO: 185045 - RNA, 23 nt, Human
cccagcccuggccugagcugagc

SEQ ID NO: 185046 - RNA, 18 nt, Human
ccccugcagagggguggc

SEQ ID NO: 185047 - RNA, 23 nt, Human
ccuaaacagucugcgcucggccu

SEQ ID NO: 185048 - RNA, 23 nt, Human
cgauggauccccuuugucaguuc

SEQ ID NO: 185049 - RNA, 24 nt, Human
cuggggagguggcuggggaaaggg

SEQ ID NO: 185050 - RNA, 21 nt, Human
cuugcuggggagguggcuggg

SEQ ID NO: 185051 - RNA, 19 nt, Human
cuuucugcugagccucgcc

SEQ ID NO: 185052 - RNA, 27 nt, Human
gaggcaggugcacagccccccaagggg

SEQ ID NO: 185053 - RNA, 22 nt, Human
gcacagcccagcccuggccuga

SEQ ID NO: 185054 - RNA, 18 nt, Human
gcagagggguggccgaug

SEQ ID NO: 185055 - RNA, 25 nt, Human
ggaaagaaaggccuccauuguucag

SEQ ID NO: 185056 - RNA, 20 nt, Human
ggaaggaggcugggagccua

SEQ ID NO: 185057 - RNA, 18 nt, Human
ggaggaagugggucuggg

SEQ ID NO: 185058 - RNA, 21 nt, Human
ggcaucugcugagauuucagg

SEQ ID NO: 185059 - RNA, 22 nt, Human
ggccugggagccugucaaagag

SEQ ID NO: 185060 - RNA, 24 nt, Human
gggaaagaaaggccuccauuguuc

SEQ ID NO: 185061 - RNA, 20 nt, Human
gggaaggaggcugggagccu

SEQ ID NO: 185062 - RNA, 18 nt, Human
ggggagguggcuggggaa

SEQ ID NO: 185063 - RNA, 19 nt, Human
gggucugggucagugggag

SEQ ID NO: 185064 - RNA, 24 nt, Human
gguccgggaggaagggacaggggu

SEQ ID NO: 185065 - RNA, 20 nt, Human
guagcgggaaggaggcuggg

SEQ ID NO: 185066 - RNA, 22 nt, Human
uccccaccaggacucccagguc

SEQ ID NO: 185067 - RNA, 24 nt, Human
ucccgugacugcacaugcuugucc

SEQ ID NO: 185068 - RNA, 20 nt, Human
uccgcuggcaaccagccuga

SEQ ID NO: 185069 - RNA, 21 nt, Human
ucucucccugccacagaugaa

SEQ ID NO: 185070 - RNA, 18 nt, Human
uggccugagcugagcucc

SEQ ID NO: 185071 - RNA, 21 nt, Human
uggccugugucucuucaacuc

SEQ ID NO: 185072 - RNA, 22 nt, Human
ugggcaucugcugagauuucag

SEQ ID NO: 185073 - RNA, 25 nt, Human
ugucaaagagcucuggggguugcag

SEQ ID NO: 185074 - RNA, 22 nt, Human
uucagguugcuugcuggggagg

SEQ ID NO: 185075 - RNA, 22 nt, Human
uucugggucauuugcagccugc

SEQ ID NO: 185076 - RNA, 22 nt, Human
uugcagccugccuucagggucu

SEQ ID NO: 185077 - RNA, 24 nt, Human
uuguccaggacugggaggccuggg

SEQ ID NO: 185078 - RNA, 18 nt, Human
aagagaaaagggacuuga

SEQ ID NO: 185079 - RNA, 20 nt, Human
aagagaaaagggacuugaua

SEQ ID NO: 185080 - RNA, 21 nt, Human
cacuuccacuucugucgaagg

SEQ ID NO: 185081 - RNA, 19 nt, Human
cagaauauccauugacgcc

SEQ ID NO: 185082 - RNA, 21 nt, Human
gagaaaagggacuugauagua

SEQ ID NO: 185083 - RNA, 22 nt, Human
uaaaauagcucuuucuggaaac

SEQ ID NO: 185084 - RNA, 18 nt, Human
uaaaaugaagauaaugaa

SEQ ID NO: 185085 - RNA, 23 nt, Human
uacagaauauccauugacgccag

SEQ ID NO: 185086 - RNA, 19 nt, Human
ugcuucuguuaaaauagcu

SEQ ID NO: 185087 - RNA, 20 nt, Human
ugggcugacuuuaauugcug

SEQ ID NO: 185088 - RNA, 21 nt, Human
uguccaucaaaagucugugug

SEQ ID NO: 185089 - RNA, 24 nt, Human
uuaaaaugaagauaaugaauuuau

SEQ ID NO: 185090 - RNA, 21 nt, Human
uucagcacuuccacuucuguc

SEQ ID NO: 185091 - RNA, 23 nt, Human
uuuauuuuuucaagagaaaaggg

SEQ ID NO: 185092 - RNA, 23 nt, Human
auaacaauugaaagaaugagaac

SEQ ID NO: 185093 - RNA, 22 nt, Human
caguaaacaaaugaaugcauuu

SEQ ID NO: 185094 - RNA, 22 nt, Human
cauaacaauugaaagaaugaga

SEQ ID NO: 185095 - RNA, 23 nt, Human
ucccuuggaaaguugagugaaaa

SEQ ID NO: 185096 - RNA, 21 nt, Human
uggaaaguugagugaaaacaa

SEQ ID NO: 185097 - RNA, 25 nt, Human
aggucccugccucuuucucaguguu

SEQ ID NO: 185098 - RNA, 27 nt, Human
caccuacuccccuuucccacgacccuc

SEQ ID NO: 185099 - RNA, 22 nt, Human
cacgacccucagccugcccccu

SEQ ID NO: 185100 - RNA, 24 nt, Human
cccccaccuacuccccuuucccac

SEQ ID NO: 185101 - RNA, 21 nt, Human
ccucagccugcccccuccucu

SEQ ID NO: 185102 - RNA, 23 nt, Human
ccugccucuuucucaguguuccc

SEQ ID NO: 185103 - RNA, 24 nt, Human
gcaaggcacagagguagucccuuu

SEQ ID NO: 185104 - RNA, 27 nt, Human
gcacagagguagucccuuuaggucccu

SEQ ID NO: 185105 - RNA, 18 nt, Human
gcccccuccucuagauuc

SEQ ID NO: 185106 - RNA, 20 nt, Human
uacuccccuuucccacgacc

SEQ ID NO: 185107 - RNA, 24 nt, Human
ucaguguucccccaccuacucccc

SEQ ID NO: 185108 - RNA, 21 nt, Human
ucccccaccuacuccccuuuc

SEQ ID NO: 185109 - RNA, 23 nt, Human
uuucucaguguucccccaccuac

SEQ ID NO: 185110 - RNA, 24 nt, Human
aaaaauuauaggagaaaccgguac

SEQ ID NO: 185111 - RNA, 20 nt, Human
aaauaucauuggaauagaaa

SEQ ID NO: 185112 - RNA, 19 nt, Human
aacaaaacagcaauaaaaa

SEQ ID NO: 185113 - RNA, 22 nt, Human
aauaaaaacucuacaguauacc

SEQ ID NO: 185114 - RNA, 26 nt, Human
aauuuuuuaaaaaucccugaauuugu

SEQ ID NO: 185115 - RNA, 27 nt, Human
acagcaauaaaaacucuacaguauacc

SEQ ID NO: 185116 - RNA, 24 nt, Human
agaaaccauaucuggaccugaaca

SEQ ID NO: 185117 - RNA, 22 nt, Human
agacucugggcugccgcagcuu

SEQ ID NO: 185118 - RNA, 25 nt, Human
agacucugggcugccgcagcuuuuu

SEQ ID NO: 185119 - RNA, 18 nt, Human
agagaaugugcugaugcc

SEQ ID NO: 185120 - RNA, 22 nt, Human
agccccuuucuggcugugcugu

SEQ ID NO: 185121 - RNA, 24 nt, Human
aggaggccugcuggcugcaggggu

SEQ ID NO: 185122 - RNA, 18 nt, Human
auccauuuuuuuuuuuuu

SEQ ID NO: 185123 - RNA, 20 nt, Human
aucucuacuccucccuccaa

SEQ ID NO: 185124 - RNA, 22 nt, Human
caaaaaaauaaaauaaaacuag

SEQ ID NO: 185125 - RNA, 24 nt, Human
caaaugccacuagccaccuggaua

SEQ ID NO: 185126 - RNA, 18 nt, Human
cacacuccuccagaaauc

SEQ ID NO: 185127 - RNA, 19 nt, Human
ccaauguuaaaaauuugac

SEQ ID NO: 185128 - RNA, 23 nt, Human
cccaaccuaauuaccaaauauca

SEQ ID NO: 185129 - RNA, 18 nt, Human
ccccuuucuggcugugcu

SEQ ID NO: 185130 - RNA, 18 nt, Human
cccuuuguuaacgacucc

SEQ ID NO: 185131 - RNA, 21 nt, Human
ccgguaggaaauauuuuccuc

SEQ ID NO: 185132 - RNA, 24 nt, Human
ccucccuccaaaaaggauuaauuc

SEQ ID NO: 185133 - RNA, 21 nt, Human
gaacaaaacagcaauaaaaac

SEQ ID NO: 185134 - RNA, 19 nt, Human
gacucugggcugccgcagc

SEQ ID NO: 185135 - RNA, 21 nt, Human
gagugugcuagaugagagaau

SEQ ID NO: 185136 - RNA, 26 nt, Human
gaguuuggcaauccaucuugguuguu

SEQ ID NO: 185137 - RNA, 24 nt, Human
gauaacgugacauuuuaagaaaaa

SEQ ID NO: 185138 - RNA, 24 nt, Human
ggaaagguuagcccagccuaaagu

SEQ ID NO: 185139 - RNA, 19 nt, Human
ggacuuuuuuuucaggagg

SEQ ID NO: 185140 - RNA, 18 nt, Human
ggcaauccaucuugguug

SEQ ID NO: 185141 - RNA, 20 nt, Human
uaaaguagcagacucugggc

SEQ ID NO: 185142 - RNA, 24 nt, Human
uaaaugugagcuuauuuacauuua

SEQ ID NO: 185143 - RNA, 22 nt, Human
uaaccaaugaguuuccuggagg

SEQ ID NO: 185144 - RNA, 18 nt, Human
uacaguauaccuucaaac

SEQ ID NO: 185145 - RNA, 18 nt, Human
uagaugagagaaugugcu

SEQ ID NO: 185146 - RNA, 25 nt, Human
uagcagcuuucuggcuuugaaguuu

SEQ ID NO: 185147 - RNA, 22 nt, Human
uauaggagaaaccauaucugga

SEQ ID NO: 185148 - RNA, 18 nt, Human
ucaggaggccugcuggcu

SEQ ID NO: 185149 - RNA, 22 nt, Human
uccagaaaucugucuuccccaa

SEQ ID NO: 185150 - RNA, 20 nt, Human
uccaggggcacaaauucagc

SEQ ID NO: 185151 - RNA, 22 nt, Human
uccuguuaauuuucuuuuucuu

SEQ ID NO: 185152 - RNA, 18 nt, Human
ucuacuccucccuccaaa

SEQ ID NO: 185153 - RNA, 28 nt, Human
ucucuauauuaucaaaugccacuagcca

SEQ ID NO: 185154 - RNA, 19 nt, Human
uggaauaaccaaugaguuu

SEQ ID NO: 185155 - RNA, 22 nt, Human
ugugcuaaaauaaacucaauga

SEQ ID NO: 185156 - RNA, 23 nt, Human
uuacugaacaaaacagcaauaaa

SEQ ID NO: 185157 - RNA, 22 nt, Human
uuagauuugaccuauaauuacu

SEQ ID NO: 185158 - RNA, 24 nt, Human
uucaccacucugacacuauggacc

SEQ ID NO: 185159 - RNA, 18 nt, Human
uugcuccugaccugggca

SEQ ID NO: 185160 - RNA, 22 nt, Human
uuucagguuauauaucucuacu

SEQ ID NO: 185161 - RNA, 25 nt, Human
uuugcuccugaccugggcacaaaug

SEQ ID NO: 185162 - RNA, 27 nt, Human
uuuuuauccauuuuuuuuuuuuuuuuu

SEQ ID NO: 185163 - RNA, 22 nt, Human
uuuuuuuucaauuugcuccuga

SEQ ID NO: 185164 - RNA, 19 nt, Human
uuuuuuuuuuuuacaggga

SEQ ID NO: 185165 - RNA, 21 nt, Human
uuuuuuuuuuuuuuuuacagg

SEQ ID NO: 185166 - RNA, 25 nt, Human
uuuuuuuuuuuuuuuuuuacagggg

SEQ ID NO: 185167 - RNA, 21 nt, Human
aagcagccccagggugaccag

SEQ ID NO: 185168 - RNA, 26 nt, Human
acaguggccucuccguguggcuuucc

SEQ ID NO: 185169 - RNA, 19 nt, Human
accagcaccuugcaucucc

SEQ ID NO: 185170 - RNA, 18 nt, Human
acccugcggggcgagcgc

SEQ ID NO: 185171 - RNA, 20 nt, Human
accgugggcacagaggacac

SEQ ID NO: 185172 - RNA, 25 nt, Human
agaaagaagcgugauucuccuugaa

SEQ ID NO: 185173 - RNA, 23 nt, Human
agcggcaggcaggguuggcgggg

SEQ ID NO: 185174 - RNA, 19 nt, Human
agcucccgagucacacccu

SEQ ID NO: 185175 - RNA, 24 nt, Human
aggagccagaagccacaucugacc

SEQ ID NO: 185176 - RNA, 18 nt, Human
aggcaggguuggcgggga

SEQ ID NO: 185177 - RNA, 25 nt, Human
aggcaggugcagcggcaggcagggu

SEQ ID NO: 185178 - RNA, 18 nt, Human
augacguggccgugccuu

SEQ ID NO: 185179 - RNA, 19 nt, Human
cacagaggacacaccgcga

SEQ ID NO: 185180 - RNA, 20 nt, Human
caccccggagcagacggcgg

SEQ ID NO: 185181 - RNA, 19 nt, Human
caccgcaguuguccccagc

SEQ ID NO: 185182 - RNA, 25 nt, Human
caccgcgacguccagcucagaccca

SEQ ID NO: 185183 - RNA, 21 nt, Human
cagacaggaaacuccccagga

SEQ ID NO: 185184 - RNA, 20 nt, Human
cagcaccuugcaucuccagc

SEQ ID NO: 185185 - RNA, 21 nt, Human
cagcaccuugcaucuccagcg

SEQ ID NO: 185186 - RNA, 19 nt, Human
cagcauguuuuccuucucc

SEQ ID NO: 185187 - RNA, 20 nt, Human
cagcauguuuuccuucuccu

SEQ ID NO: 185188 - RNA, 21 nt, Human
cagcgaaucucacuccuacuu

SEQ ID NO: 185189 - RNA, 18 nt, Human
cagcucagacccaccagc

SEQ ID NO: 185190 - RNA, 22 nt, Human
cagcucccgagucacacccugg

SEQ ID NO: 185191 - RNA, 20 nt, Human
caggaggagcaccuguggug

SEQ ID NO: 185192 - RNA, 22 nt, Human
caggcaccgccagccccggcuc

SEQ ID NO: 185193 - RNA, 24 nt, Human
caggccgaagggguccucaggcac

SEQ ID NO: 185194 - RNA, 24 nt, Human
caggugcagcggcaggcaggguug

SEQ ID NO: 185195 - RNA, 20 nt, Human
caguccacaugagugcaauu

SEQ ID NO: 185196 - RNA, 22 nt, Human
caguggccucuccguguggcuu

SEQ ID NO: 185197 - RNA, 18 nt, Human
caguucccccacgguggc

SEQ ID NO: 185198 - RNA, 27 nt, Human
ccagaagccacaucugaccgcaguuua

SEQ ID NO: 185199 - RNA, 22 nt, Human
ccagccucaucagcuuuucuua

SEQ ID NO: 185200 - RNA, 23 nt, Human
ccaggaggagcaccugugguggu

SEQ ID NO: 185201 - RNA, 19 nt, Human
ccaggcaagcgugacccuc

SEQ ID NO: 185202 - RNA, 24 nt, Human
ccaguccacaugagugcaauugcc

SEQ ID NO: 185203 - RNA, 22 nt, Human
ccauccuggaagauggaggacg

SEQ ID NO: 185204 - RNA, 19 nt, Human
cccacacggcagcucgcac

SEQ ID NO: 185205 - RNA, 23 nt, Human
ccccaccagggccgccucuccug

SEQ ID NO: 185206 - RNA, 21 nt, Human
ccccacgguggcagauuugcu

SEQ ID NO: 185207 - RNA, 20 nt, Human
ccccaugagggcagagcgag

SEQ ID NO: 185208 - RNA, 20 nt, Human
ccccgaggagccagaagcca

SEQ ID NO: 185209 - RNA, 21 nt, Human
cccuggcugggccuaugcggc

SEQ ID NO: 185210 - RNA, 22 nt, Human
ccucaugcggggcggccacuuc

SEQ ID NO: 185211 - RNA, 21 nt, Human
ccuggcacccgacuaacccac

SEQ ID NO: 185212 - RNA, 23 nt, Human
cgaaucucacuccuacuucuagg

SEQ ID NO: 185213 - RNA, 18 nt, Human
cgcugcugcuccucgugg

SEQ ID NO: 185214 - RNA, 20 nt, Human
cggagaauaaaccucccucc

SEQ ID NO: 185215 - RNA, 22 nt, Human
cguccagcucagacccaccagc

SEQ ID NO: 185216 - RNA, 21 nt, Human
cgugacccucgcgaggccccg

SEQ ID NO: 185217 - RNA, 23 nt, Human
cuccagcgucaguucccccacgg

SEQ ID NO: 185218 - RNA, 22 nt, Human
cugcugcuccucgugggccugg

SEQ ID NO: 185219 - RNA, 21 nt, Human
cuggcacccgacuaacccaca

SEQ ID NO: 185220 - RNA, 21 nt, Human
cuugaagugagccuggcauuu

SEQ ID NO: 185221 - RNA, 19 nt, Human
gaagauggaggacgcucag

SEQ ID NO: 185222 - RNA, 21 nt, Human
gagcagcauguuuuccuucuc

SEQ ID NO: 185223 - RNA, 25 nt, Human
gagcgcuuugggauuguagcaauuc

SEQ ID NO: 185224 - RNA, 24 nt, Human
gagcugggugacaggcuggucacc

SEQ ID NO: 185225 - RNA, 23 nt, Human
gaggagcugggugacaggcuggu

SEQ ID NO: 185226 - RNA, 22 nt, Human
gcaggcggagaauaaaccuccc

SEQ ID NO: 185227 - RNA, 23 nt, Human
gccucuuccccaccagggccgcc

SEQ ID NO: 185228 - RNA, 19 nt, Human
gcucagacccaccagcacc

SEQ ID NO: 185229 - RNA, 24 nt, Human
ggaggacgcucaggcgugcaccag

SEQ ID NO: 185230 - RNA, 21 nt, Human
ggaggcgagggcccuccgcgu

SEQ ID NO: 185231 - RNA, 18 nt, Human
ggggaggagcugggugac

SEQ ID NO: 185232 - RNA, 19 nt, Human
ggggaggagcugggugaca

SEQ ID NO: 185233 - RNA, 18 nt, Human
ggguccucaggcaccgcc

SEQ ID NO: 185234 - RNA, 23 nt, Human
ggguuggcggggaggagcugggu

SEQ ID NO: 185235 - RNA, 18 nt, Human
gucaccgcuggccuuugg

SEQ ID NO: 185236 - RNA, 24 nt, Human
gugcagcggcaggcaggguuggcg

SEQ ID NO: 185237 - RNA, 19 nt, Human
guuccuguguaacugaggc

SEQ ID NO: 185238 - RNA, 20 nt, Human
guuggcggggaggagcuggg

SEQ ID NO: 185239 - RNA, 20 nt, Human
uaacccacacggcagcucgc

SEQ ID NO: 185240 - RNA, 23 nt, Human
uaacugaggcgcuucacccacag

SEQ ID NO: 185241 - RNA, 22 nt, Human
uaagcagccccagggugaccag

SEQ ID NO: 185242 - RNA, 21 nt, Human
uagaaagaagcgugauucucc

SEQ ID NO: 185243 - RNA, 23 nt, Human
uagaaagaagcgugauucuccuu

SEQ ID NO: 185244 - RNA, 20 nt, Human
uagcucagaccgugggcaca

SEQ ID NO: 185245 - RNA, 25 nt, Human
uauuucauuguccuggcacccgacu

SEQ ID NO: 185246 - RNA, 22 nt, Human
ucaccagccucaucagcuuuuc

SEQ ID NO: 185247 - RNA, 19 nt, Human
ucaccgcaguuguccccag

SEQ ID NO: 185248 - RNA, 23 nt, Human
ucaccgcaguuguccccagcugu

SEQ ID NO: 185249 - RNA, 18 nt, Human
ucaccgcaguuguccccg

SEQ ID NO: 185250 - RNA, 21 nt, Human
uccagcgucaguucccccacg

SEQ ID NO: 185251 - RNA, 22 nt, Human
ucccuccccggacucucggggc

SEQ ID NO: 185252 - RNA, 21 nt, Human
uccgagugcgcccccuacugg

SEQ ID NO: 185253 - RNA, 19 nt, Human
uccguggaggcgagggccc

SEQ ID NO: 185254 - RNA, 21 nt, Human
uccucagaagggaacuucagc

SEQ ID NO: 185255 - RNA, 20 nt, Human
ucuccaggcggagggguggg

SEQ ID NO: 185256 - RNA, 18 nt, Human
ucugaccgcaguuuagag

SEQ ID NO: 185257 - RNA, 18 nt, Human
ugacaaaggcugaacguc

SEQ ID NO: 185258 - RNA, 19 nt, Human
ugacaaaggcugaacguca

SEQ ID NO: 185259 - RNA, 18 nt, Human
ugagggcagagcgaggcc

SEQ ID NO: 185260 - RNA, 19 nt, Human
ugagggcagagcgaggccc

SEQ ID NO: 185261 - RNA, 22 nt, Human
ugcagcggcaggcaggguuggc

SEQ ID NO: 185262 - RNA, 21 nt, Human
uggccuuuggacccugcgggg

SEQ ID NO: 185263 - RNA, 18 nt, Human
uggcggggaggagcuggg

SEQ ID NO: 185264 - RNA, 21 nt, Human
ugggaagaacagaugcuccuc

SEQ ID NO: 185265 - RNA, 23 nt, Human
uggguuggguuuguuaacugcag

SEQ ID NO: 185266 - RNA, 23 nt, Human
ugucaacaagcagugacugaacc

SEQ ID NO: 185267 - RNA, 22 nt, Human
uguguccacccaggugugugca

SEQ ID NO: 185268 - RNA, 18 nt, Human
ugugugaagagugcaagg

SEQ ID NO: 185269 - RNA, 19 nt, Human
uucaagauuugccgaaagg

SEQ ID NO: 185270 - RNA, 21 nt, Human
uuggacccugcggggcgagcg

SEQ ID NO: 185271 - RNA, 23 nt, Human
uuuuuacaucaucaccgcaguug

SEQ ID NO: 185272 - RNA, 18 nt, Human
aagcaaaugaaauaucac

SEQ ID NO: 185273 - RNA, 22 nt, Human
aauacaguggcaaauuauacaa

SEQ ID NO: 185274 - RNA, 20 nt, Human
ccccaagcuucccuagacac

SEQ ID NO: 185275 - RNA, 18 nt, Human
cuucaaagaauuaagagg

SEQ ID NO: 185276 - RNA, 23 nt, Human
guaaaaggagcagaaccccaagc

SEQ ID NO: 185277 - RNA, 27 nt, Human
uaaaaauguauuuugaaaagauuuuac

SEQ ID NO: 185278 - RNA, 19 nt, Human
uacaguuaagcaaaugaaa

SEQ ID NO: 185279 - RNA, 21 nt, Human
uagacacugagacucgucuug

SEQ ID NO: 185280 - RNA, 26 nt, Human
ucccuagacacugagacucgucuugg

SEQ ID NO: 185281 - RNA, 23 nt, Human
uugaaaagauuuuacauacagau

SEQ ID NO: 185282 - RNA, 24 nt, Human
uugguaauagucgcaaccuuucac

SEQ ID NO: 185283 - RNA, 25 nt, Human
uuuuuuuuuuuuuuuuuuuauuuuu

SEQ ID NO: 185284 - RNA, 28 nt, Human
aaacaggaaggaggugaguaaggucuag

SEQ ID NO: 185285 - RNA, 24 nt, Human
aaagcaacagagauaaguaagguc

SEQ ID NO: 185286 - RNA, 20 nt, Human
aacacagugagacccugucu

SEQ ID NO: 185287 - RNA, 21 nt, Human
aacacagugagacccugucuc

SEQ ID NO: 185288 - RNA, 21 nt, Human
aaggaggugaguaaggucuag

SEQ ID NO: 185289 - RNA, 19 nt, Human
aaggagguuauguauggag

SEQ ID NO: 185290 - RNA, 19 nt, Human
aauaaauacccuuucuucu

SEQ ID NO: 185291 - RNA, 18 nt, Human
aauuagccaggcauggug

SEQ ID NO: 185292 - RNA, 20 nt, Human
acccagcacagugcccuaca

SEQ ID NO: 185293 - RNA, 23 nt, Human
accuucuucccaaaccuucuggc

SEQ ID NO: 185294 - RNA, 22 nt, Human
acuacugcacuccagccugggc

SEQ ID NO: 185295 - RNA, 25 nt, Human
acuacugcacuccagccugggcaac

SEQ ID NO: 185296 - RNA, 18 nt, Human
acugcacuccagccuggg

SEQ ID NO: 185297 - RNA, 19 nt, Human
acugcacuccagccugggc

SEQ ID NO: 185298 - RNA, 20 nt, Human
acugcacuccagccugggca

SEQ ID NO: 185299 - RNA, 21 nt, Human
acugcacuccagccugggcaa

SEQ ID NO: 185300 - RNA, 22 nt, Human
acugcacuccagccugggcaac

SEQ ID NO: 185301 - RNA, 23 nt, Human
acugcacuccagccugggcaaca

SEQ ID NO: 185302 - RNA, 25 nt, Human
acugcacuccagccugggcaacaac

SEQ ID NO: 185303 - RNA, 21 nt, Human
agaaggagaugguuugcaggg

SEQ ID NO: 185304 - RNA, 19 nt, Human
agaccaggagagaagggac

SEQ ID NO: 185305 - RNA, 19 nt, Human
agagauaaguaaggucacc

SEQ ID NO: 185306 - RNA, 22 nt, Human
agcacuuugggaggccaaggca

SEQ ID NO: 185307 - RNA, 21 nt, Human
agccaggcaugguggcucaca

SEQ ID NO: 185308 - RNA, 24 nt, Human
agccugggaaacauagugagacuc

SEQ ID NO: 185309 - RNA, 22 nt, Human
agccugggcaacacagugagac

SEQ ID NO: 185310 - RNA, 24 nt, Human
agccugggcaacacagugagaccc

SEQ ID NO: 185311 - RNA, 19 nt, Human
aggaaggaggugaguaagg

SEQ ID NO: 185312 - RNA, 20 nt, Human
aggaaggaggugaguaaggu

SEQ ID NO: 185313 - RNA, 21 nt, Human
aggaaggaggugaguaagguc

SEQ ID NO: 185314 - RNA, 23 nt, Human
aggcaggaggaucucuugagccc

SEQ ID NO: 185315 - RNA, 24 nt, Human
aggcaggaggaucucuugagccca

SEQ ID NO: 185316 - RNA, 24 nt, Human
aggcaugguggcucacauuugugg

SEQ ID NO: 185317 - RNA, 18 nt, Human
agggaaaaguuggaggag

SEQ ID NO: 185318 - RNA, 19 nt, Human
agggaagagaugagguugg

SEQ ID NO: 185319 - RNA, 21 nt, Human
aggggcuuugcaaacauaaug

SEQ ID NO: 185320 - RNA, 18 nt, Human
aggucuagaucagaggua

SEQ ID NO: 185321 - RNA, 19 nt, Human
agguggaggcugcagugag

SEQ ID NO: 185322 - RNA, 22 nt, Human
agguggaggcugcagugagcca

SEQ ID NO: 185323 - RNA, 22 nt, Human
aucugagcacuuugggaggcca

SEQ ID NO: 185324 - RNA, 23 nt, Human
auggggcccccugagccccuucc

SEQ ID NO: 185325 - RNA, 22 nt, Human
caacacagugagacccugucuc

SEQ ID NO: 185326 - RNA, 18 nt, Human
caagaaauacaugagaaa

SEQ ID NO: 185327 - RNA, 23 nt, Human
caaucgccaaacugugaugggau

SEQ ID NO: 185328 - RNA, 23 nt, Human
cacaagaaauacaugagaaagug

SEQ ID NO: 185329 - RNA, 19 nt, Human
cacaccuucuucccaaacc

SEQ ID NO: 185330 - RNA, 21 nt, Human
cacagacuuuuauccacuugu

SEQ ID NO: 185331 - RNA, 24 nt, Human
cacaucucuaaucugagcacuuug

SEQ ID NO: 185332 - RNA, 24 nt, Human
caccaaccucacucuuccuaaguu

SEQ ID NO: 185333 - RNA, 23 nt, Human
caccagaccaggagagaagggac

SEQ ID NO: 185334 - RNA, 21 nt, Human
caccuucuucccaaaccuucu

SEQ ID NO: 185335 - RNA, 20 nt, Human
caggagguggaggcugcagu

SEQ ID NO: 185336 - RNA, 19 nt, Human
cauacaauuugcauacacc

SEQ ID NO: 185337 - RNA, 23 nt, Human
cauccucagucuugacuuggaga

SEQ ID NO: 185338 - RNA, 21 nt, Human
caucuccuccuucaggaggcc

SEQ ID NO: 185339 - RNA, 25 nt, Human
caucuccuccuucaggaggcccucc

SEQ ID NO: 185340 - RNA, 23 nt, Human
cauuuguggucccagcuacucgg

SEQ ID NO: 185341 - RNA, 24 nt, Human
cauuuguggucccagcuacucggg

SEQ ID NO: 185342 - RNA, 21 nt, Human
ccagcacagugcccuacauaa

SEQ ID NO: 185343 - RNA, 26 nt, Human
cccacaccuucuucccaaaccuucug

SEQ ID NO: 185344 - RNA, 19 nt, Human
cccagaaagcaacagagau

SEQ ID NO: 185345 - RNA, 23 nt, Human
ccccagaaagcaacagagauaag

SEQ ID NO: 185346 - RNA, 19 nt, Human
ccccagccccacccagcac

SEQ ID NO: 185347 - RNA, 21 nt, Human
ccccugagccccuuccuugga

SEQ ID NO: 185348 - RNA, 24 nt, Human
ccccugagccccuuccuuggaggc

SEQ ID NO: 185349 - RNA, 21 nt, Human
cccuccacaaucgccaaacug

SEQ ID NO: 185350 - RNA, 22 nt, Human
ccugggcaacacagugagaccc

SEQ ID NO: 185351 - RNA, 18 nt, Human
ccuggugggggcugaggg

SEQ ID NO: 185352 - RNA, 20 nt, Human
ccugugaaggcaaggccagg

SEQ ID NO: 185353 - RNA, 20 nt, Human
ccuucaggaggcccuccaca

SEQ ID NO: 185354 - RNA, 21 nt, Human
cgcugacugcagugccugcgc

SEQ ID NO: 185355 - RNA, 22 nt, Human
cggcuucuggggcgcuuccccu

SEQ ID NO: 185356 - RNA, 20 nt, Human
cuacugcacuccagccuggg

SEQ ID NO: 185357 - RNA, 21 nt, Human
cuacugcacuccagccugggc

SEQ ID NO: 185358 - RNA, 22 nt, Human
cugcagugagccacgacugcac

SEQ ID NO: 185359 - RNA, 20 nt, Human
cugcagugccugcgcgcggc

SEQ ID NO: 185360 - RNA, 18 nt, Human
cugcauuucuccuuccac

SEQ ID NO: 185361 - RNA, 19 nt, Human
cuggcccacgggggcugug

SEQ ID NO: 185362 - RNA, 21 nt, Human
cugggcugggcugggaagggc

SEQ ID NO: 185363 - RNA, 22 nt, Human
gaagguucuggaaaaggaggug

SEQ ID NO: 185364 - RNA, 20 nt, Human
gacacagcgcaguuagggag

SEQ ID NO: 185365 - RNA, 21 nt, Human
gacugugggaugagaggggaa

SEQ ID NO: 185366 - RNA, 23 nt, Human
gacuuuuauccacuuguuggaaa

SEQ ID NO: 185367 - RNA, 23 nt, Human
gagaaggagaugguuugcagggc

SEQ ID NO: 185368 - RNA, 19 nt, Human
gagaagggacugugggaug

SEQ ID NO: 185369 - RNA, 24 nt, Human
gagcacuuugggaggccaaggcag

SEQ ID NO: 185370 - RNA, 25 nt, Human
gagcacuuugggaggccaaggcagg

SEQ ID NO: 185371 - RNA, 19 nt, Human
gaggaucucuugagcccag

SEQ ID NO: 185372 - RNA, 21 nt, Human
gagguuauguauggagucagu

SEQ ID NO: 185373 - RNA, 18 nt, Human
gcaggggagggacuccag

SEQ ID NO: 185374 - RNA, 31 nt, Human
gccacgacugcacuacugcacuccagccugg

SEQ ID NO: 185375 - RNA, 24 nt, Human
gcccaggagguggaggcugcagug

SEQ ID NO: 185376 - RNA, 22 nt, Human
gcccaggaguucaagaucagcc

SEQ ID NO: 185377 - RNA, 20 nt, Human
gcgggggaauguucuagaag

SEQ ID NO: 185378 - RNA, 24 nt, Human
gcuggagagcccaggagguggagg

SEQ ID NO: 185379 - RNA, 22 nt, Human
ggaaaaguuggaggagggaugg

SEQ ID NO: 185380 - RNA, 22 nt, Human
ggagcgggaggccauggggccc

SEQ ID NO: 185381 - RNA, 22 nt, Human
ggaggcccuccacaaucgccaa

SEQ ID NO: 185382 - RNA, 18 nt, Human
ggaggcugcagugagcca

SEQ ID NO: 185383 - RNA, 18 nt, Human
ggaggcugcagugagcca

SEQ ID NO: 185384 - RNA, 21 nt, Human
ggcaggggagggacuccagac

SEQ ID NO: 185385 - RNA, 20 nt, Human
ggcugcagugagccacgacu

SEQ ID NO: 185386 - RNA, 18 nt, Human
gggaagggcagagcuuga

SEQ ID NO: 185387 - RNA, 21 nt, Human
gggaugagaggggaaaacugg

SEQ ID NO: 185388 - RNA, 21 nt, Human
ggggaacauggugggaugugg

SEQ ID NO: 185389 - RNA, 18 nt, Human
ggguaggcugggcugggc

SEQ ID NO: 185390 - RNA, 22 nt, Human
gucuggcacaggguggacaaag

SEQ ID NO: 185391 - RNA, 23 nt, Human
guggcucacauuuguggucccag

SEQ ID NO: 185392 - RNA, 24 nt, Human
guggcucacauuuguggucccagc

SEQ ID NO: 185393 - RNA, 21 nt, Human
gugggauguggucuacaggga

SEQ ID NO: 185394 - RNA, 20 nt, Human
gugggggcugagggauuggg

SEQ ID NO: 185395 - RNA, 23 nt, Human
gugucaacgagggaguauggggg

SEQ ID NO: 185396 - RNA, 23 nt, Human
guucuggaaaaggaggugucugg

SEQ ID NO: 185397 - RNA, 20 nt, Human
uacaccagaccaggagagaa

SEQ ID NO: 185398 - RNA, 20 nt, Human
uacugcacuccagccugggc

SEQ ID NO: 185399 - RNA, 22 nt, Human
uacugcacuccagccugggcaa

SEQ ID NO: 185400 - RNA, 23 nt, Human
uacugcacuccagccugggcaac

SEQ ID NO: 185401 - RNA, 24 nt, Human
uacugcacuccagccugggcaaca

SEQ ID NO: 185402 - RNA, 20 nt, Human
uacugcacuccagccugggg

SEQ ID NO: 185403 - RNA, 21 nt, Human
uagccauauugaaguaauaau

SEQ ID NO: 185404 - RNA, 23 nt, Human
uaggaccccagaaagcaacagag

SEQ ID NO: 185405 - RNA, 18 nt, Human
uauuugucuuuauuuucu

SEQ ID NO: 185406 - RNA, 24 nt, Human
uccagccugggcaacacagugaga

SEQ ID NO: 185407 - RNA, 22 nt, Human
ucccacaccuucuucccaaacc

SEQ ID NO: 185408 - RNA, 25 nt, Human
uccccagccccacccagcacagugc

SEQ ID NO: 185409 - RNA, 20 nt, Human
uccccggucuugacaacggc

SEQ ID NO: 185410 - RNA, 24 nt, Human
uccgggaguguuuauggaggagac

SEQ ID NO: 185411 - RNA, 24 nt, Human
ucgcugggcaauggugagaaggag

SEQ ID NO: 185412 - RNA, 22 nt, Human
ucuacagggaagagaugagguu

SEQ ID NO: 185413 - RNA, 23 nt, Human
ucucuugagcccaggaguucaag

SEQ ID NO: 185414 - RNA, 24 nt, Human
ucuggccagacauggcggcucaca

SEQ ID NO: 185415 - RNA, 24 nt, Human
ucuugagcccaggaguucaagauc

SEQ ID NO: 185416 - RNA, 21 nt, Human
ucuuguauucuuaugaauauu

SEQ ID NO: 185417 - RNA, 25 nt, Human
ugaagucaguucaccgcugacugca

SEQ ID NO: 185418 - RNA, 20 nt, Human
ugacacaaaaauuggucucc

SEQ ID NO: 185419 - RNA, 21 nt, Human
ugagagggaaaaguuggagga

SEQ ID NO: 185420 - RNA, 23 nt, Human
ugagagggaaaaguuggaggagg

SEQ ID NO: 185421 - RNA, 20 nt, Human
ugagaggggaaaacugggga

SEQ ID NO: 185422 - RNA, 18 nt, Human
ugagauaggacacagcgc

SEQ ID NO: 185423 - RNA, 19 nt, Human
ugagauuaauaaagagguu

SEQ ID NO: 185424 - RNA, 23 nt, Human
ugagcccaggaguucaagaucag

SEQ ID NO: 185425 - RNA, 18 nt, Human
ugagccccuuccuuggag

SEQ ID NO: 185426 - RNA, 20 nt, Human
ugagggauugggaugaaguc

SEQ ID NO: 185427 - RNA, 20 nt, Human
ugaguucugacauucucccu

SEQ ID NO: 185428 - RNA, 22 nt, Human
ugaugggaucugggagcacaaa

SEQ ID NO: 185429 - RNA, 23 nt, Human
ugauugcccuucacuugaguucu

SEQ ID NO: 185430 - RNA, 21 nt, Human
ugcacuacugcacuccagccu

SEQ ID NO: 185431 - RNA, 22 nt, Human
uggaaaccaaauguuugacuua

SEQ ID NO: 185432 - RNA, 21 nt, Human
uggaaaguucaggcaaugugg

SEQ ID NO: 185433 - RNA, 24 nt, Human
uggccagacauggcggcucacauc

SEQ ID NO: 185434 - RNA, 21 nt, Human
uggcucacauuugugguccca

SEQ ID NO: 185435 - RNA, 22 nt, Human
uggcucacauuuguggucccag

SEQ ID NO: 185436 - RNA, 24 nt, Human
uggcucacauuuguggucccagcu

SEQ ID NO: 185437 - RNA, 23 nt, Human
ugggaugaagucaguucaccgcu

SEQ ID NO: 185438 - RNA, 22 nt, Human
ugggaugagaggggaaaacugg

SEQ ID NO: 185439 - RNA, 24 nt, Human
ugggcaacacagugagacccuguc

SEQ ID NO: 185440 - RNA, 22 nt, Human
uggggacggaagggaaauuuca

SEQ ID NO: 185441 - RNA, 22 nt, Human
ugggggcugagggauugggaug

SEQ ID NO: 185442 - RNA, 24 nt, Human
ugggugggagugcuggcauuuccu

SEQ ID NO: 185443 - RNA, 21 nt, Human
uggugagaaggagaugguuug

SEQ ID NO: 185444 - RNA, 24 nt, Human
uggugagaaggagaugguuugcag

SEQ ID NO: 185445 - RNA, 24 nt, Human
ugguggcucacauuugugguccca

SEQ ID NO: 185446 - RNA, 24 nt, Human
ugguuugcagggcaauuaggaagu

SEQ ID NO: 185447 - RNA, 20 nt, Human
ugucccacaccuucuuccca

SEQ ID NO: 185448 - RNA, 20 nt, Human
uguggucccagcuacucggg

SEQ ID NO: 185449 - RNA, 20 nt, Human
uguuggaaaguucaggcaag

SEQ ID NO: 185450 - RNA, 22 nt, Human
uuaucuagaaacuuagaauugc

SEQ ID NO: 185451 - RNA, 21 nt, Human
uucaaggagguuauguaugga

SEQ ID NO: 185452 - RNA, 20 nt, Human
uugcccuucacuugaguucu

SEQ ID NO: 185453 - RNA, 20 nt, Human
uuggguaggcugggcugggc

SEQ ID NO: 185454 - RNA, 21 nt, Human
uuucuacaaaaaguacaaaaa

SEQ ID NO: 185455 - RNA, 24 nt, Human
uuucuucuugucccacaccuucuu

SEQ ID NO: 185456 - RNA, 22 nt, Human
uuugcaaacauaaugacucuau

SEQ ID NO: 185457 - RNA, 19 nt, Human
aaacaagcaaaaugcacca

SEQ ID NO: 185458 - RNA, 19 nt, Human
aaacaagcaaaaugcacca

SEQ ID NO: 185459 - RNA, 25 nt, Human
aaacugaacuccggggagacgcacc

SEQ ID NO: 185460 - RNA, 23 nt, Human
aaauacagacaauagaccaaagu

SEQ ID NO: 185461 - RNA, 18 nt, Human
aacacaggguggcucugc

SEQ ID NO: 185462 - RNA, 20 nt, Human
aacauaauaaacaagcaaaa

SEQ ID NO: 185463 - RNA, 20 nt, Human
aaugaagagggcaggcugga

SEQ ID NO: 185464 - RNA, 21 nt, Human
aaugaagagggcaggcuggaa

SEQ ID NO: 185465 - RNA, 21 nt, Human
acaagcaaaaugcaccacgug

SEQ ID NO: 185466 - RNA, 19 nt, Human
acacagcagucucugaccc

SEQ ID NO: 185467 - RNA, 20 nt, Human
acacagcagucucugacccc

SEQ ID NO: 185468 - RNA, 20 nt, Human
acagaggugggagagggagg

SEQ ID NO: 185469 - RNA, 25 nt, Human
acagcaaaaauauuuauugagugcc

SEQ ID NO: 185470 - RNA, 19 nt, Human
acaggcacaauccuaggca

SEQ ID NO: 185471 - RNA, 25 nt, Human
acauaauaaacaagcaaaaugcacc

SEQ ID NO: 185472 - RNA, 20 nt, Human
acuccacugcccuagagugg

SEQ ID NO: 185473 - RNA, 19 nt, Human
acuccuuccccccuccccc

SEQ ID NO: 185474 - RNA, 19 nt, Human
acuccuuccccccuccccc

SEQ ID NO: 185475 - RNA, 18 nt, Human
agaaaaaacacaggacca

SEQ ID NO: 185476 - RNA, 23 nt, Human
agaaaaaacacaggaccaagauc

SEQ ID NO: 185477 - RNA, 18 nt, Human
agagggcaggcuggaaca

SEQ ID NO: 185478 - RNA, 21 nt, Human
agccagaaugugcucagcugu

SEQ ID NO: 185479 - RNA, 19 nt, Human
agcccuggaggcagucagc

SEQ ID NO: 185480 - RNA, 18 nt, Human
aggcacaucaagguuuga

SEQ ID NO: 185481 - RNA, 18 nt, Human
aggcagcgggcagacaga

SEQ ID NO: 185482 - RNA, 18 nt, Human
aggcagcgggcagacaga

SEQ ID NO: 185483 - RNA, 20 nt, Human
agugcccagagggaucccac

SEQ ID NO: 185484 - RNA, 20 nt, Human
auaaaacuccuuccccccuc

SEQ ID NO: 185485 - RNA, 25 nt, Human
augaguaaagggggaagggaugggg

SEQ ID NO: 185486 - RNA, 18 nt, Human
augccuaggguuagagug

SEQ ID NO: 185487 - RNA, 18 nt, Human
auuucauccaccaagcaa

SEQ ID NO: 185488 - RNA, 24 nt, Human
auuucauccaccaagcaaaauuca

SEQ ID NO: 185489 - RNA, 23 nt, Human
caaaaugcaccacguguccaaug

SEQ ID NO: 185490 - RNA, 24 nt, Human
caaaauucauugacaccaacuuuu

SEQ ID NO: 185491 - RNA, 18 nt, Human
caccaggccgacagggag

SEQ ID NO: 185492 - RNA, 19 nt, Human
caccaggccgacagggagg

SEQ ID NO: 185493 - RNA, 20 nt, Human
cacccuggugauacuuucgc

SEQ ID NO: 185494 - RNA, 19 nt, Human
cacuguucccuuugcucag

SEQ ID NO: 185495 - RNA, 19 nt, Human
cacuuaacaagaccccuag

SEQ ID NO: 185496 - RNA, 18 nt, Human
cagaacaccaggccgaca

SEQ ID NO: 185497 - RNA, 19 nt, Human
cagacaauagaccaaaguc

SEQ ID NO: 185498 - RNA, 21 nt, Human
cagacaauagaccaaaguccc

SEQ ID NO: 185499 - RNA, 20 nt, Human
cagcuguaaagacuggcuaa

SEQ ID NO: 185500 - RNA, 21 nt, Human
caggcuggaacagugcuucuc

SEQ ID NO: 185501 - RNA, 23 nt, Human
caucaucugguaaaacugaacuc

SEQ ID NO: 185502 - RNA, 19 nt, Human
ccacagaacaccaggccga

SEQ ID NO: 185503 - RNA, 22 nt, Human
ccaggccuucagugacccuggc

SEQ ID NO: 185504 - RNA, 23 nt, Human
cccagagggaucccacagaacac

SEQ ID NO: 185505 - RNA, 19 nt, Human
ccccauguggccuggaggc

SEQ ID NO: 185506 - RNA, 18 nt, Human
cccugggcugcagagcuc

SEQ ID NO: 185507 - RNA, 23 nt, Human
ccggcaaauacagacaauagacc

SEQ ID NO: 185508 - RNA, 23 nt, Human
ccuguggucguuagcccugaaac

SEQ ID NO: 185509 - RNA, 18 nt, Human
ccuuuccucucucuucuc

SEQ ID NO: 185510 - RNA, 24 nt, Human
cgcuuuaaaaugcaggugccuggg

SEQ ID NO: 185511 - RNA, 18 nt, Human
cguggggcucugggcaca

SEQ ID NO: 185512 - RNA, 22 nt, Human
cuaugaguaaagggggaaggga

SEQ ID NO: 185513 - RNA, 21 nt, Human
cucaaaccuuuccucucucuu

SEQ ID NO: 185514 - RNA, 18 nt, Human
cucgccugugaaccugcc

SEQ ID NO: 185515 - RNA, 18 nt, Human
cuuucgcgugugagugcc

SEQ ID NO: 185516 - RNA, 19 nt, Human
gacaauagaccaaaguccc

SEQ ID NO: 185517 - RNA, 18 nt, Human
gaccacgccauccccugc

SEQ ID NO: 185518 - RNA, 23 nt, Human
gagcacaggauuccagcccugga

SEQ ID NO: 185519 - RNA, 21 nt, Human
gcaaauacagacaauagacca

SEQ ID NO: 185520 - RNA, 23 nt, Human
gcagaaaaaacacaggaccaaga

SEQ ID NO: 185521 - RNA, 21 nt, Human
gcagcgggcagacagaggugg

SEQ ID NO: 185522 - RNA, 20 nt, Human
ggaugggagggagcaggggc

SEQ ID NO: 185523 - RNA, 25 nt, Human
ggcacagagggagcacaggauucca

SEQ ID NO: 185524 - RNA, 23 nt, Human
ggcagacagaggugggagaggga

SEQ ID NO: 185525 - RNA, 18 nt, Human
ggccuccuggaucagacu

SEQ ID NO: 185526 - RNA, 20 nt, Human
ggcuucucggccugggagcu

SEQ ID NO: 185527 - RNA, 23 nt, Human
ggguuagagugcagacccugugg

SEQ ID NO: 185528 - RNA, 21 nt, Human
ggugcaguggaagugauaggu

SEQ ID NO: 185529 - RNA, 21 nt, Human
gguggaggaaugagacggggu

SEQ ID NO: 185530 - RNA, 21 nt, Human
gugcaguggaagugauagguc

SEQ ID NO: 185531 - RNA, 25 nt, Human
gugcucagcuguaaagacuggggcc

SEQ ID NO: 185532 - RNA, 21 nt, Human
uaaacaagcaaaaugcaccac

SEQ ID NO: 185533 - RNA, 21 nt, Human
uaacgaccgaagacuuuuagu

SEQ ID NO: 185534 - RNA, 21 nt, Human
uaagugcagacucucaguacc

SEQ ID NO: 185535 - RNA, 18 nt, Human
uagcugggcaccucacug

SEQ ID NO: 185536 - RNA, 21 nt, Human
uaugaguaaagggggaaggga

SEQ ID NO: 185537 - RNA, 25 nt, Human
ucacaagguagcaucuuaagucccu

SEQ ID NO: 185538 - RNA, 18 nt, Human
ucacuuaaccucccugag

SEQ ID NO: 185539 - RNA, 22 nt, Human
ucagcaccugcugugggccagg

SEQ ID NO: 185540 - RNA, 28 nt, Human
ucagcaccugcugugggccaggccuuca

SEQ ID NO: 185541 - RNA, 21 nt, Human
ucccacagaacaccaggccga

SEQ ID NO: 185542 - RNA, 19 nt, Human
uccgacuccacugcccuag

SEQ ID NO: 185543 - RNA, 20 nt, Human
uccgacuccacugcccuaga

SEQ ID NO: 185544 - RNA, 22 nt, Human
ugaagagggcaggcuggaacag

SEQ ID NO: 185545 - RNA, 19 nt, Human
ugagcaugugaugccuagg

SEQ ID NO: 185546 - RNA, 22 nt, Human
ugauaggucagaggugcaaguu

SEQ ID NO: 185547 - RNA, 25 nt, Human
ugcaggugccugggucccgccccuc

SEQ ID NO: 185548 - RNA, 24 nt, Human
ugcauacaggcacaauccuaggca

SEQ ID NO: 185549 - RNA, 18 nt, Human
ugcuguagucuuagaguu

SEQ ID NO: 185550 - RNA, 26 nt, Human
ugcuucugccuuggaagcacuuuggg

SEQ ID NO: 185551 - RNA, 22 nt, Human
uggaagcacuuugggcaguggu

SEQ ID NO: 185552 - RNA, 23 nt, Human
uggcuucucggccugggagcuuu

SEQ ID NO: 185553 - RNA, 22 nt, Human
ugggcacagagggagcacagga

SEQ ID NO: 185554 - RNA, 19 nt, Human
uggggcucugggcacagag

SEQ ID NO: 185555 - RNA, 22 nt, Human
uggggcucugggcacagaggga

SEQ ID NO: 185556 - RNA, 21 nt, Human
uuagcccugaaacugggcaag

SEQ ID NO: 185557 - RNA, 21 nt, Human
uucauucugauggagagaaaa

SEQ ID NO: 185558 - RNA, 21 nt, Human
uuccccccucccccaucaucu

SEQ ID NO: 185559 - RNA, 23 nt, Human
uucccuuugcucagcaccugcug

SEQ ID NO: 185560 - RNA, 19 nt, Human
uuccucucucuucuccaaa

SEQ ID NO: 185561 - RNA, 22 nt, Human
uugaucacugcggcaggagucc

SEQ ID NO: 185562 - RNA, 23 nt, Human
gaaauggccgggaaggcuccccc

SEQ ID NO: 185563 - RNA, 21 nt, Human
uccuggaugucuguggaccuc

SEQ ID NO: 185564 - RNA, 23 nt, Human
uccuggaugucuguggaccucug

SEQ ID NO: 185565 - RNA, 18 nt, Human
uggaccucugaccugccc

SEQ ID NO: 185566 - RNA, 20 nt, Human
uggagagacccuuggagcug

SEQ ID NO: 185567 - RNA, 20 nt, Human
uggcugcaucuuccuggaug

SEQ ID NO: 185568 - RNA, 20 nt, Human
aaacacccagacucuggcuc

SEQ ID NO: 185569 - RNA, 24 nt, Human
aagccacauuucccaacuuguguu

SEQ ID NO: 185570 - RNA, 18 nt, Human
aauccagcucacuaagaa

SEQ ID NO: 185571 - RNA, 25 nt, Human
aaugacugaaaacaaauguccagcu

SEQ ID NO: 185572 - RNA, 24 nt, Human
acaacaaagacuauuuacaaugca

SEQ ID NO: 185573 - RNA, 24 nt, Human
accggucucccugucccuggccuc

SEQ ID NO: 185574 - RNA, 20 nt, Human
acugcaaucuagcuggauuu

SEQ ID NO: 185575 - RNA, 19 nt, Human
agagccaacgauauuagga

SEQ ID NO: 185576 - RNA, 19 nt, Human
agccuuuuacuuuuuuucu

SEQ ID NO: 185577 - RNA, 22 nt, Human
aggcaccuguucuuugaaaaug

SEQ ID NO: 185578 - RNA, 22 nt, Human
aggucuaaagcccauagauggg

SEQ ID NO: 185579 - RNA, 24 nt, Human
aguuucgcccuucccgcugcucca

SEQ ID NO: 185580 - RNA, 18 nt, Human
auaaacauaaguacuucg

SEQ ID NO: 185581 - RNA, 21 nt, Human
auaaugacugaaaacaaaugu

SEQ ID NO: 185582 - RNA, 24 nt, Human
caaaacacugaguacaauauuggu

SEQ ID NO: 185583 - RNA, 27 nt, Human
cacccaguaauaggucuaaagcccaua

SEQ ID NO: 185584 - RNA, 24 nt, Human
cacuguaaauaaauccuucccaca

SEQ ID NO: 185585 - RNA, 19 nt, Human
cagaauaacuaauauggca

SEQ ID NO: 185586 - RNA, 19 nt, Human
cagauacuauuaaaccccc

SEQ ID NO: 185587 - RNA, 24 nt, Human
cagccccgcuccuccggcggcuca

SEQ ID NO: 185588 - RNA, 20 nt, Human
cagccggccugcgggcugga

SEQ ID NO: 185589 - RNA, 22 nt, Human
ccacaauuuaacagucugcuac

SEQ ID NO: 185590 - RNA, 18 nt, Human
ccagcuauuuuuuuaacc

SEQ ID NO: 185591 - RNA, 20 nt, Human
ccaugccggccacucgcccc

SEQ ID NO: 185592 - RNA, 19 nt, Human
ccccagcccccgccguggc

SEQ ID NO: 185593 - RNA, 23 nt, Human
cccccgccguggcucucgcacaa

SEQ ID NO: 185594 - RNA, 18 nt, Human
cccccgggcagccggccu

SEQ ID NO: 185595 - RNA, 27 nt, Human
ccccgccgcccccgggcagccggccug

SEQ ID NO: 185596 - RNA, 21 nt, Human
cccgcggcgcugcucgcuccg

SEQ ID NO: 185597 - RNA, 19 nt, Human
ccgcagcggcgcagggacg

SEQ ID NO: 185598 - RNA, 18 nt, Human
ccgccgcagcggcgcagg

SEQ ID NO: 185599 - RNA, 19 nt, Human
ccgcgcgggcucggccccu

SEQ ID NO: 185600 - RNA, 20 nt, Human
ccggcccggcgcagcggcgg

SEQ ID NO: 185601 - RNA, 21 nt, Human
ccggcgcagcggcgggggccu

SEQ ID NO: 185602 - RNA, 24 nt, Human
ccgggccggcccggcgcagcggcg

SEQ ID NO: 185603 - RNA, 21 nt, Human
ccucagauacuauuaaacccc

SEQ ID NO: 185604 - RNA, 22 nt, Human
ccucccgcgccggccucucccg

SEQ ID NO: 185605 - RNA, 23 nt, Human
ccucccgcgccggccucucccgc

SEQ ID NO: 185606 - RNA, 22 nt, Human
ccuccgaugucccccgccgccc

SEQ ID NO: 185607 - RNA, 19 nt, Human
ccugagauuaaggaugaaa

SEQ ID NO: 185608 - RNA, 25 nt, Human
ccugucccuggccucucaaugcagc

SEQ ID NO: 185609 - RNA, 19 nt, Human
cgacuaaacccacacagca

SEQ ID NO: 185610 - RNA, 23 nt, Human
cgccccagcccccgccguggcuc

SEQ ID NO: 185611 - RNA, 22 nt, Human
cggcgcagggacgcggcgcucc

SEQ ID NO: 185612 - RNA, 19 nt, Human
cggcggcucaggccagccg

SEQ ID NO: 185613 - RNA, 23 nt, Human
cggcgggggccgcgcucugccau

SEQ ID NO: 185614 - RNA, 26 nt, Human
cuacuacaccuaagauccuuuucaag

SEQ ID NO: 185615 - RNA, 24 nt, Human
cucacaguucuagcugggacaguc

SEQ ID NO: 185616 - RNA, 22 nt, Human
cucacuaagaaauaaacauaag

SEQ ID NO: 185617 - RNA, 20 nt, Human
cucgcuccgcugcccuccga

SEQ ID NO: 185618 - RNA, 25 nt, Human
cugcgggcuggagcgggggucucuu

SEQ ID NO: 185619 - RNA, 18 nt, Human
cugcucgcuccgcugccc

SEQ ID NO: 185620 - RNA, 19 nt, Human
cuggagcgggggucucuuc

SEQ ID NO: 185621 - RNA, 24 nt, Human
cuucagccaugccggccacucgcc

SEQ ID NO: 185622 - RNA, 21 nt, Human
cuuccucggcgguccgcgcgg

SEQ ID NO: 185623 - RNA, 22 nt, Human
cuucgugucauaauuacucccc

SEQ ID NO: 185624 - RNA, 19 nt, Human
gccaccaaaucccucagau

SEQ ID NO: 185625 - RNA, 22 nt, Human
gccggccacucgccccagcccc

SEQ ID NO: 185626 - RNA, 20 nt, Human
gcgccggccucucccgcggc

SEQ ID NO: 185627 - RNA, 19 nt, Human
gcgcugcucgcuccgcugc

SEQ ID NO: 185628 - RNA, 18 nt, Human
gcgguccgcgcgggcucg

SEQ ID NO: 185629 - RNA, 21 nt, Human
gcucgcuccgcugcccuccga

SEQ ID NO: 185630 - RNA, 20 nt, Human
ggaaauuuccauuuaauagc

SEQ ID NO: 185631 - RNA, 18 nt, Human
gggcuggagcgggggucu

SEQ ID NO: 185632 - RNA, 20 nt, Human
ggguucacucuauaaacacu

SEQ ID NO: 185633 - RNA, 21 nt, Human
guggcucucgcacaaacaccc

SEQ ID NO: 185634 - RNA, 20 nt, Human
guuguccugagauuaaggau

SEQ ID NO: 185635 - RNA, 22 nt, Human
uaaaaacaucuucagguuuuag

SEQ ID NO: 185636 - RNA, 24 nt, Human
uaaaauuagcaagauauuuucuuc

SEQ ID NO: 185637 - RNA, 22 nt, Human
uaaaccacaauuuaacagucug

SEQ ID NO: 185638 - RNA, 20 nt, Human
uacagaagugcuucccagau

SEQ ID NO: 185639 - RNA, 18 nt, Human
uaccauauagcacaaaga

SEQ ID NO: 185640 - RNA, 19 nt, Human
uauaaauugcuuaaacaaa

SEQ ID NO: 185641 - RNA, 24 nt, Human
uauggaucagaaaaaacuaacauu

SEQ ID NO: 185642 - RNA, 19 nt, Human
uauuaaacccccacauuag

SEQ ID NO: 185643 - RNA, 19 nt, Human
uauuaaacugcaaucuagc

SEQ ID NO: 185644 - RNA, 25 nt, Human
ucaaaaaacauauugaacaauuaua

SEQ ID NO: 185645 - RNA, 18 nt, Human
ucagcaguccgccgcagc

SEQ ID NO: 185646 - RNA, 23 nt, Human
uccaagcuauugcuaggugacau

SEQ ID NO: 185647 - RNA, 23 nt, Human
ucgcaccggucucccugucccug

SEQ ID NO: 185648 - RNA, 18 nt, Human
ucucaaugcagcggcucu

SEQ ID NO: 185649 - RNA, 21 nt, Human
ucucccgcggcgcugcucgcu

SEQ ID NO: 185650 - RNA, 21 nt, Human
ucucccugucccuggccucuc

SEQ ID NO: 185651 - RNA, 21 nt, Human
ugaacagaagccacauuuccc

SEQ ID NO: 185652 - RNA, 19 nt, Human
ugagauuaaggaugaaaca

SEQ ID NO: 185653 - RNA, 18 nt, Human
ugauuuugguugacgggg

SEQ ID NO: 185654 - RNA, 19 nt, Human
uggcucucgcacaaacacc

SEQ ID NO: 185655 - RNA, 20 nt, Human
uuaacacuuuuauauaucug

SEQ ID NO: 185656 - RNA, 22 nt, Human
uuagccaaaucgacuaaaccca

SEQ ID NO: 185657 - RNA, 23 nt, Human
uuauaacuuuaagacuccaccca

SEQ ID NO: 185658 - RNA, 18 nt, Human
uuauaugcacaguaugua

SEQ ID NO: 185659 - RNA, 18 nt, Human
uuauauugcucuacuaca

SEQ ID NO: 185660 - RNA, 18 nt, Human
uuuauacaaacuacauga

SEQ ID NO: 185661 - RNA, 21 nt, Human
uuuuuggcccugcaguaaguu

SEQ ID NO: 185662 - RNA, 23 nt, Human
cagcagccagguccagacagcaa

SEQ ID NO: 185663 - RNA, 19 nt, Human
gaucagcagccagguccag

SEQ ID NO: 185664 - RNA, 24 nt, Human
guugcuccuggggaucguuaagau

SEQ ID NO: 185665 - RNA, 21 nt, Human
aaaaaacagcauuggaaucgg

SEQ ID NO: 185666 - RNA, 25 nt, Human
aaaaaacagcauuggaaucggggac

SEQ ID NO: 185667 - RNA, 22 nt, Human
aaagcccagcccgggaguccgu

SEQ ID NO: 185668 - RNA, 22 nt, Human
aaggaggcccugggagaggagg

SEQ ID NO: 185669 - RNA, 23 nt, Human
aagucugcggcugacuggccugg

SEQ ID NO: 185670 - RNA, 24 nt, Human
aaucacuugaacccgggaggugga

SEQ ID NO: 185671 - RNA, 18 nt, Human
acaaaggcccagauggac

SEQ ID NO: 185672 - RNA, 18 nt, Human
acaccacugcacuccagc

SEQ ID NO: 185673 - RNA, 20 nt, Human
acaccacugcacuccagccu

SEQ ID NO: 185674 - RNA, 18 nt, Human
acaccaggcagcuccugg

SEQ ID NO: 185675 - RNA, 20 nt, Human
acagagcaacuggagccaca

SEQ ID NO: 185676 - RNA, 18 nt, Human
acagaggaugcagagugc

SEQ ID NO: 185677 - RNA, 21 nt, Human
acaggcagugugcgacgaggc

SEQ ID NO: 185678 - RNA, 24 nt, Human
acugcacuccagccugugugacag

SEQ ID NO: 185679 - RNA, 26 nt, Human
acugcacuccagccugugugacagag

SEQ ID NO: 185680 - RNA, 20 nt, Human
agcugcugcugugcuccugg

SEQ ID NO: 185681 - RNA, 18 nt, Human
aggagagugucaggcucu

SEQ ID NO: 185682 - RNA, 18 nt, Human
aggcaugagaaucacuug

SEQ ID NO: 185683 - RNA, 24 nt, Human
aggcaugagaaucacuugaacccg

SEQ ID NO: 185684 - RNA, 24 nt, Human
aggcugaggcaugagaaucacuug

SEQ ID NO: 185685 - RNA, 20 nt, Human
agggagggagggggccuggg

SEQ ID NO: 185686 - RNA, 23 nt, Human
agggagggagggggccugggcuc

SEQ ID NO: 185687 - RNA, 19 nt, Human
agguggagguuacgaugag

SEQ ID NO: 185688 - RNA, 24 nt, Human
agguggagguuacgaugagccaag

SEQ ID NO: 185689 - RNA, 24 nt, Human
aucacaccacugcacuccagccug

SEQ ID NO: 185690 - RNA, 19 nt, Human
caaacauuuacagcagaca

SEQ ID NO: 185691 - RNA, 21 nt, Human
cacaccacugcacuccagccu

SEQ ID NO: 185692 - RNA, 24 nt, Human
cacauuucugucccaggcaggggc

SEQ ID NO: 185693 - RNA, 27 nt, Human
caccacugcacuccagccugugugaca

SEQ ID NO: 185694 - RNA, 21 nt, Human
caccaggcagcuccuggaaac

SEQ ID NO: 185695 - RNA, 21 nt, Human
caccuguaaucccagcuacuc

SEQ ID NO: 185696 - RNA, 19 nt, Human
cacgcacgccucacauacc

SEQ ID NO: 185697 - RNA, 23 nt, Human
cacuccagccugugugacagagc

SEQ ID NO: 185698 - RNA, 24 nt, Human
cacuccagccugugugacagagcg

SEQ ID NO: 185699 - RNA, 19 nt, Human
cacugcacuccagccugug

SEQ ID NO: 185700 - RNA, 22 nt, Human
cacugcacuccagccuguguga

SEQ ID NO: 185701 - RNA, 24 nt, Human
cacugcacuccagccugugugaca

SEQ ID NO: 185702 - RNA, 23 nt, Human
cagacccucaagauccaaggccu

SEQ ID NO: 185703 - RNA, 19 nt, Human
cagcuccuggaaaccacuc

SEQ ID NO: 185704 - RNA, 21 nt, Human
cagcuccuggaaaccacuccc

SEQ ID NO: 185705 - RNA, 23 nt, Human
cauacaaaggcccagauggacag

SEQ ID NO: 185706 - RNA, 21 nt, Human
cauuucugucccaggcagggg

SEQ ID NO: 185707 - RNA, 18 nt, Human
ccaccuguaaucccagcu

SEQ ID NO: 185708 - RNA, 25 nt, Human
ccaccuguaaucccagcuacucggg

SEQ ID NO: 185709 - RNA, 18 nt, Human
ccacugcacuccagccug

SEQ ID NO: 185710 - RNA, 18 nt, Human
ccacugcacuccagccug

SEQ ID NO: 185711 - RNA, 19 nt, Human
ccacugcacuccagccugu

SEQ ID NO: 185712 - RNA, 21 nt, Human
ccacugcacuccagccugugu

SEQ ID NO: 185713 - RNA, 24 nt, Human
ccacugcacuccagccugugugac

SEQ ID NO: 185714 - RNA, 25 nt, Human
ccacugcacuccagccugugugaca

SEQ ID NO: 185715 - RNA, 20 nt, Human
ccagcccacgcaucgguacc

SEQ ID NO: 185716 - RNA, 21 nt, Human
ccagggaagauggagggagga

SEQ ID NO: 185717 - RNA, 21 nt, Human
ccagggcucuggcccugaagg

SEQ ID NO: 185718 - RNA, 24 nt, Human
ccaucucuccauggucguugggcu

SEQ ID NO: 185719 - RNA, 18 nt, Human
cccccagcaaugagggcu

SEQ ID NO: 185720 - RNA, 22 nt, Human
cccccagcugugaacgaaggag

SEQ ID NO: 185721 - RNA, 19 nt, Human
cccugggccccauucgccc

SEQ ID NO: 185722 - RNA, 19 nt, Human
cccugggccccauucgccc

SEQ ID NO: 185723 - RNA, 20 nt, Human
ccgagccuggcucaggggca

SEQ ID NO: 185724 - RNA, 22 nt, Human
ccgccagggcucuggcccugaa

SEQ ID NO: 185725 - RNA, 24 nt, Human
ccuacaacaggccagcaaucuacc

SEQ ID NO: 185726 - RNA, 23 nt, Human
ccucaagauccaaggccuggccc

SEQ ID NO: 185727 - RNA, 21 nt, Human
ccugggagaggaggagaaccc

SEQ ID NO: 185728 - RNA, 19 nt, Human
ccugggcucagagguaggc

SEQ ID NO: 185729 - RNA, 21 nt, Human
ccuguaaucccagcuacucgg

SEQ ID NO: 185730 - RNA, 21 nt, Human
cgagcugcugcugugcuccug

SEQ ID NO: 185731 - RNA, 20 nt, Human
cgaguaguccccaaggccaa

SEQ ID NO: 185732 - RNA, 21 nt, Human
cgccuggagcuauuugggggc

SEQ ID NO: 185733 - RNA, 24 nt, Human
cgggaggcugaggcaugagaauca

SEQ ID NO: 185734 - RNA, 29 nt, Human
cgggagguggagguuacgaugacaacggu

SEQ ID NO: 185735 - RNA, 24 nt, Human
cgggagguggagguuacgaugagc

SEQ ID NO: 185736 - RNA, 23 nt, Human
cguugggcuuuccaaagucugcg

SEQ ID NO: 185737 - RNA, 20 nt, Human
cuccagcuggguugggacag

SEQ ID NO: 185738 - RNA, 19 nt, Human
cuccuggaaaccacucccc

SEQ ID NO: 185739 - RNA, 19 nt, Human
cuggagcuauuugggggcu

SEQ ID NO: 185740 - RNA, 21 nt, Human
cuguaaucccagcuacucggg

SEQ ID NO: 185741 - RNA, 19 nt, Human
cuuaggagagugucaggcu

SEQ ID NO: 185742 - RNA, 21 nt, Human
cuugaacccgggagguggagg

SEQ ID NO: 185743 - RNA, 19 nt, Human
cuugauucucuucuacagu

SEQ ID NO: 185744 - RNA, 23 nt, Human
gaacauccuucccaucuucaagg

SEQ ID NO: 185745 - RNA, 20 nt, Human
gaagauggagggaggacugg

SEQ ID NO: 185746 - RNA, 23 nt, Human
gaagucaccaccuguaaucccag

SEQ ID NO: 185747 - RNA, 19 nt, Human
gacuggggggcugagggag

SEQ ID NO: 185748 - RNA, 23 nt, Human
gagaaucacuugaacccgggagg

SEQ ID NO: 185749 - RNA, 18 nt, Human
gagcugcugcugugcucc

SEQ ID NO: 185750 - RNA, 20 nt, Human
gaggaggucagucucagucc

SEQ ID NO: 185751 - RNA, 18 nt, Human
gaggcccugggagaggag

SEQ ID NO: 185752 - RNA, 24 nt, Human
gcacuccagccugugugacagagc

SEQ ID NO: 185753 - RNA, 21 nt, Human
gcaggggcacaggauuaagga

SEQ ID NO: 185754 - RNA, 20 nt, Human
gccaagaucacaccacugca

SEQ ID NO: 185755 - RNA, 21 nt, Human
gcccccagcaaugagggcugg

SEQ ID NO: 185756 - RNA, 19 nt, Human
gcuccaggaguucuugcuu

SEQ ID NO: 185757 - RNA, 22 nt, Human
ggaagucuuccaggauucccag

SEQ ID NO: 185758 - RNA, 23 nt, Human
ggacuggggggcugagggaggga

SEQ ID NO: 185759 - RNA, 19 nt, Human
ggagggaggacuggggggc

SEQ ID NO: 185760 - RNA, 20 nt, Human
ggccuggggcugggccuggc

SEQ ID NO: 185761 - RNA, 22 nt, Human
ggccuggggcugggccuggcuc

SEQ ID NO: 185762 - RNA, 21 nt, Human
ggcgagcugcugcugugcucc

SEQ ID NO: 185763 - RNA, 22 nt, Human
ggcggccgagggcgccuggagc

SEQ ID NO: 185764 - RNA, 21 nt, Human
gggagggagggggccugggcu

SEQ ID NO: 185765 - RNA, 19 nt, Human
ggggcugggccuggcucgg

SEQ ID NO: 185766 - RNA, 21 nt, Human
gggugccaccugagguuaaaa

SEQ ID NO: 185767 - RNA, 19 nt, Human
gucacucuuggaagucacc

SEQ ID NO: 185768 - RNA, 22 nt, Human
gucucaguccuuggaguggugg

SEQ ID NO: 185769 - RNA, 18 nt, Human
guugggacagaugugggg

SEQ ID NO: 185770 - RNA, 21 nt, Human
uaaaaagaacauccuucccau

SEQ ID NO: 185771 - RNA, 22 nt, Human
uaaggagagaccaggccuccag

SEQ ID NO: 185772 - RNA, 22 nt, Human
uacaacaggccagcaaucuacc

SEQ ID NO: 185773 - RNA, 23 nt, Human
uacaaugaacauguacuucuuuu

SEQ ID NO: 185774 - RNA, 19 nt, Human
uaccagacugaauguuggc

SEQ ID NO: 185775 - RNA, 21 nt, Human
uaccgagccuggcucaggggc

SEQ ID NO: 185776 - RNA, 22 nt, Human
uacgaugagccaagaucacacc

SEQ ID NO: 185777 - RNA, 23 nt, Human
uaggcagcauggcggcgcacuuc

SEQ ID NO: 185778 - RNA, 24 nt, Human
uaguccccaaggccaauucaaaag

SEQ ID NO: 185779 - RNA, 23 nt, Human
ucacaccacugcacuccagccug

SEQ ID NO: 185780 - RNA, 24 nt, Human
ucacuugaacccgggagguggagg

SEQ ID NO: 185781 - RNA, 21 nt, Human
ucagggugagcaagggcaaug

SEQ ID NO: 185782 - RNA, 21 nt, Human
ucaucugugucccuaccaccu

SEQ ID NO: 185783 - RNA, 23 nt, Human
uccagccugugugacagagcgag

SEQ ID NO: 185784 - RNA, 24 nt, Human
uccagccugugugacagagcgaga

SEQ ID NO: 185785 - RNA, 24 nt, Human
uccccaaggccaauucaaaagccc

SEQ ID NO: 185786 - RNA, 19 nt, Human
ucccgugggagcugaguga

SEQ ID NO: 185787 - RNA, 18 nt, Human
uccguccaccauggcaac

SEQ ID NO: 185788 - RNA, 18 nt, Human
uccuggaaaccacucccc

SEQ ID NO: 185789 - RNA, 25 nt, Human
ucgggaggcugaggcaugagaauca

SEQ ID NO: 185790 - RNA, 23 nt, Human
ucugcggcugacuggccuggggc

SEQ ID NO: 185791 - RNA, 19 nt, Human
ugacuggccuggggcuggg

SEQ ID NO: 185792 - RNA, 20 nt, Human
ugaggcaugagaaucacuug

SEQ ID NO: 185793 - RNA, 24 nt, Human
ugaggcaugagaaucacuugaacc

SEQ ID NO: 185794 - RNA, 18 nt, Human
ugagggagggagggggcc

SEQ ID NO: 185795 - RNA, 19 nt, Human
ugcccugggccccauucgc

SEQ ID NO: 185796 - RNA, 23 nt, Human
uggaaaccacuccccaaaaaaca

SEQ ID NO: 185797 - RNA, 23 nt, Human
uggcaggaggagugaccaggucg

SEQ ID NO: 185798 - RNA, 19 nt, Human
uggccuggggcugggccug

SEQ ID NO: 185799 - RNA, 21 nt, Human
uggccuggggcugggccuggc

SEQ ID NO: 185800 - RNA, 23 nt, Human
uggccuggggcugggccuggcuc

SEQ ID NO: 185801 - RNA, 21 nt, Human
uggcucgggggccacaggcag

SEQ ID NO: 185802 - RNA, 21 nt, Human
ugggagaggaggagaacccca

SEQ ID NO: 185803 - RNA, 26 nt, Human
ugggagaggaggagaaccccagggaa

SEQ ID NO: 185804 - RNA, 23 nt, Human
ugggauggaaaccagacgggacu

SEQ ID NO: 185805 - RNA, 23 nt, Human
ugggcggccgagggcgccuggag

SEQ ID NO: 185806 - RNA, 19 nt, Human
uguagcuccaggaguucuu

SEQ ID NO: 185807 - RNA, 18 nt, Human
uuaaggaugugccagacc

SEQ ID NO: 185808 - RNA, 20 nt, Human
uucugucccaggcaggggca

SEQ ID NO: 185809 - RNA, 24 nt, Human
uuuccaaauucucuacaaugaaca

SEQ ID NO: 185810 - RNA, 22 nt, Human
uuuuuuuuuuuuuuuugcuagg

SEQ ID NO: 185811 - RNA, 18 nt, Human
uuuuuuuuuuuuuuuuug

SEQ ID NO: 185812 - RNA, 20 nt, Human
uuuuuuuuuuuuuuuuugcu

SEQ ID NO: 185813 - RNA, 23 nt, Human
uuuuuuuuuuuuuuuuuugcuag

SEQ ID NO: 185814 - RNA, 25 nt, Human
aaaauaccaccaccaauaccaacca

SEQ ID NO: 185815 - RNA, 19 nt, Human
aacucccgugcccucucuc

SEQ ID NO: 185816 - RNA, 18 nt, Human
aauggcaagagcugcugg

SEQ ID NO: 185817 - RNA, 18 nt, Human
accaauaccaaccaacac

SEQ ID NO: 185818 - RNA, 19 nt, Human
accacaccacccucuggcc

SEQ ID NO: 185819 - RNA, 22 nt, Human
accccacccuucccaugcccaa

SEQ ID NO: 185820 - RNA, 23 nt, Human
accccagccucagcccuagccag

SEQ ID NO: 185821 - RNA, 25 nt, Human
acuaagcaaaagcugugugcagaga

SEQ ID NO: 185822 - RNA, 23 nt, Human
acuggccccagccccauaucccu

SEQ ID NO: 185823 - RNA, 20 nt, Human
agagaccccagccucagccc

SEQ ID NO: 185824 - RNA, 21 nt, Human
agagaccccagccucagcccu

SEQ ID NO: 185825 - RNA, 25 nt, Human
agcugaugcuucuccaaggcugcug

SEQ ID NO: 185826 - RNA, 24 nt, Human
agcugggaaaaggugaucccacaa

SEQ ID NO: 185827 - RNA, 20 nt, Human
aggaaacacuaagcaaaagc

SEQ ID NO: 185828 - RNA, 22 nt, Human
aggaaggcauuuaauggaucau

SEQ ID NO: 185829 - RNA, 22 nt, Human
aguccuuugugacccuuuucuc

SEQ ID NO: 185830 - RNA, 18 nt, Human
aguuucuagucccaguuc

SEQ ID NO: 185831 - RNA, 21 nt, Human
auggaaaccccacccuuccca

SEQ ID NO: 185832 - RNA, 27 nt, Human
caacacaguuccuacagucucaaucaa

SEQ ID NO: 185833 - RNA, 22 nt, Human
caagagcugcuggggaguagaa

SEQ ID NO: 185834 - RNA, 20 nt, Human
cacagccaaguccaaggcuu

SEQ ID NO: 185835 - RNA, 18 nt, Human
cacccucuggcccugccu

SEQ ID NO: 185836 - RNA, 22 nt, Human
cagccaagaccaacucccgugc

SEQ ID NO: 185837 - RNA, 28 nt, Human
cagcccuagccagcugggaaaaggugau

SEQ ID NO: 185838 - RNA, 20 nt, Human
cagcgacccugcugaucucu

SEQ ID NO: 185839 - RNA, 26 nt, Human
cagcugggaaaaggugaucccacagc

SEQ ID NO: 185840 - RNA, 21 nt, Human
caggaaacacuaagcaaaagc

SEQ ID NO: 185841 - RNA, 20 nt, Human
caggcccaucccccauccua

SEQ ID NO: 185842 - RNA, 22 nt, Human
cauaacuggccccagccccaua

SEQ ID NO: 185843 - RNA, 24 nt, Human
cauccuguuggcucuguuccugac

SEQ ID NO: 185844 - RNA, 21 nt, Human
cauuuccccuuuugaugcuca

SEQ ID NO: 185845 - RNA, 22 nt, Human
ccaaccaacacaguuccuacag

SEQ ID NO: 185846 - RNA, 23 nt, Human
ccaacucccgugcccucucucca

SEQ ID NO: 185847 - RNA, 20 nt, Human
ccaagaccaacucccgugcc

SEQ ID NO: 185848 - RNA, 22 nt, Human
ccaauaccaaccaacacaguuc

SEQ ID NO: 185849 - RNA, 25 nt, Human
ccacccucuggcccugccuugaucc

SEQ ID NO: 185850 - RNA, 22 nt, Human
ccaugaggagagagaucaggga

SEQ ID NO: 185851 - RNA, 22 nt, Human
cccucuggcccugccuugaucc

SEQ ID NO: 185852 - RNA, 26 nt, Human
ccggcucccaugugauagcuccucuc

SEQ ID NO: 185853 - RNA, 21 nt, Human
ccuccgaguguccagcggccc

SEQ ID NO: 185854 - RNA, 24 nt, Human
ccuccugucacaggcccauccccc

SEQ ID NO: 185855 - RNA, 21 nt, Human
ccuucccaugcccaaccuuaa

SEQ ID NO: 185856 - RNA, 21 nt, Human
cuacagucucaaucaaugaac

SEQ ID NO: 185857 - RNA, 21 nt, Human
cuaucccacucccaccagccc

SEQ ID NO: 185858 - RNA, 26 nt, Human
cugugugcagagaccccagccucagc

SEQ ID NO: 185859 - RNA, 21 nt, Human
gaccccagccucagcccuagc

SEQ ID NO: 185860 - RNA, 19 nt, Human
gacccuuuucucucgucac

SEQ ID NO: 185861 - RNA, 19 nt, Human
gagaccacaccacccucug

SEQ ID NO: 185862 - RNA, 19 nt, Human
gcccucucuccaacccagu

SEQ ID NO: 185863 - RNA, 24 nt, Human
guggucccagauggguguccuguc

SEQ ID NO: 185864 - RNA, 22 nt, Human
guucaaauagagaccacaccac

SEQ ID NO: 185865 - RNA, 29 nt, Human
uaagcaaaagcugugugcagagaccccaa

SEQ ID NO: 185866 - RNA, 24 nt, Human
uaccaaccaacacaguuccuacag

SEQ ID NO: 185867 - RNA, 22 nt, Human
uagaaggagcacaaaauuuagu

SEQ ID NO: 185868 - RNA, 20 nt, Human
uagcagucaaagaucacagc

SEQ ID NO: 185869 - RNA, 25 nt, Human
uaggauggacagguggucccagaug

SEQ ID NO: 185870 - RNA, 22 nt, Human
ucccaccagcccauuuccccuu

SEQ ID NO: 185871 - RNA, 18 nt, Human
ucccaugcccaaccuuaa

SEQ ID NO: 185872 - RNA, 23 nt, Human
ucccggcucccaugugauagcuc

SEQ ID NO: 185873 - RNA, 19 nt, Human
uccucagaauggcaagagc

SEQ ID NO: 185874 - RNA, 19 nt, Human
uccuguuggcucuguuccu

SEQ ID NO: 185875 - RNA, 19 nt, Human
ucgcugccaugaggagaga

SEQ ID NO: 185876 - RNA, 23 nt, Human
ucuccucagaauggcaagagcug

SEQ ID NO: 185877 - RNA, 23 nt, Human
ucucugggauagugccucaguuu

SEQ ID NO: 185878 - RNA, 25 nt, Human
ugaaaauaccaccaccaauaccaac

SEQ ID NO: 185879 - RNA, 27 nt, Human
ugaaucuucugaauuucaguuuccuca

SEQ ID NO: 185880 - RNA, 22 nt, Human
ugacccaggaaacacuaagcaa

SEQ ID NO: 185881 - RNA, 19 nt, Human
ugagcagucccggcuccca

SEQ ID NO: 185882 - RNA, 20 nt, Human
ugaggagagagaucagggag

SEQ ID NO: 185883 - RNA, 24 nt, Human
uggcaagagcugcugggggacguc

SEQ ID NO: 185884 - RNA, 19 nt, Human
ugggaaaaggugaucccac

SEQ ID NO: 185885 - RNA, 19 nt, Human
uucauccuguuggcucugu

SEQ ID NO: 185886 - RNA, 23 nt, Human
uucugggcauuacuaacucugug

SEQ ID NO: 185887 - RNA, 22 nt, Human
uugaaaauaccaccaccaauac

SEQ ID NO: 185888 - RNA, 22 nt, Human
uugaugcucagugagccaggaa

SEQ ID NO: 185889 - RNA, 25 nt, Human
uuuccugauuucuugucuccucaac

SEQ ID NO: 185890 - RNA, 25 nt, Human
uuuucucucgucaccgucucaccau

SEQ ID NO: 185891 - RNA, 23 nt, Human
acccccaugugugaauccaccaa

SEQ ID NO: 185892 - RNA, 18 nt, Human
agaagcagguggaggagu

SEQ ID NO: 185893 - RNA, 19 nt, Human
agaagcagguggaggaguu

SEQ ID NO: 185894 - RNA, 24 nt, Human
agauggcagaauggagccuaaagc

SEQ ID NO: 185895 - RNA, 20 nt, Human
agguccuggaggacccccau

SEQ ID NO: 185896 - RNA, 25 nt, Human
cagcaacucagccccugucggagau

SEQ ID NO: 185897 - RNA, 20 nt, Human
cagcagacacccuuucuccu

SEQ ID NO: 185898 - RNA, 22 nt, Human
cagcagacacccuuucuccucc

SEQ ID NO: 185899 - RNA, 27 nt, Human
cagcagacacccuuucuccuccuguuc

SEQ ID NO: 185900 - RNA, 23 nt, Human
cagcagggcaccugcugugaccu

SEQ ID NO: 185901 - RNA, 18 nt, Human
ccacaugccaguucuggg

SEQ ID NO: 185902 - RNA, 18 nt, Human
ccagauauccagcagggc

SEQ ID NO: 185903 - RNA, 21 nt, Human
ccagauauccagcagggcacc

SEQ ID NO: 185904 - RNA, 22 nt, Human
ccaggcccauggaggggugcaa

SEQ ID NO: 185905 - RNA, 20 nt, Human
ccccacggaaaccacccucc

SEQ ID NO: 185906 - RNA, 21 nt, Human
ccccacggaaaccacccuccu

SEQ ID NO: 185907 - RNA, 22 nt, Human
ccccacggaaaccacccuccuu

SEQ ID NO: 185908 - RNA, 19 nt, Human
ccccugccccagcccagcu

SEQ ID NO: 185909 - RNA, 20 nt, Human
ccugcccaucuuggccuggg

SEQ ID NO: 185910 - RNA, 22 nt, Human
ccugccccagcccagcuccagc

SEQ ID NO: 185911 - RNA, 26 nt, Human
ccugcgcugggauguagauggcagaa

SEQ ID NO: 185912 - RNA, 21 nt, Human
ccugcuguggcuguaacccag

SEQ ID NO: 185913 - RNA, 21 nt, Human
cgacgcccaggcugccauccu

SEQ ID NO: 185914 - RNA, 27 nt, Human
cgcccaggcugccauccucuugggggc

SEQ ID NO: 185915 - RNA, 20 nt, Human
cgugggccucaccaggcagc

SEQ ID NO: 185916 - RNA, 21 nt, Human
cucagcgaccaggaaguugug

SEQ ID NO: 185917 - RNA, 18 nt, Human
cuccagcaacucagcccc

SEQ ID NO: 185918 - RNA, 19 nt, Human
cucuugucccuugcuccuc

SEQ ID NO: 185919 - RNA, 23 nt, Human
cuguccucugcuccucuuguccc

SEQ ID NO: 185920 - RNA, 22 nt, Human
cugugaguuucacaaaccaccu

SEQ ID NO: 185921 - RNA, 20 nt, Human
cuuccugcuguggcuguaac

SEQ ID NO: 185922 - RNA, 20 nt, Human
gagcccuuagggcccucuuc

SEQ ID NO: 185923 - RNA, 23 nt, Human
gaggaguuucaguagcuuugucc

SEQ ID NO: 185924 - RNA, 21 nt, Human
gauguagauggcagaauggag

SEQ ID NO: 185925 - RNA, 20 nt, Human
gggcagcaaaaccuccagaa

SEQ ID NO: 185926 - RNA, 23 nt, Human
gggugcagaugggaaagcugagg

SEQ ID NO: 185927 - RNA, 21 nt, Human
gggugcagcugagguccugga

SEQ ID NO: 185928 - RNA, 21 nt, Human
gguccaguugucuucugggca

SEQ ID NO: 185929 - RNA, 18 nt, Human
gugcagcugagguccugg

SEQ ID NO: 185930 - RNA, 19 nt, Human
uaggccucagccccuucca

SEQ ID NO: 185931 - RNA, 21 nt, Human
ucaccaggcagcagacacccu

SEQ ID NO: 185932 - RNA, 19 nt, Human
ucaggcuucacccugcgcu

SEQ ID NO: 185933 - RNA, 21 nt, Human
uccacaugccaguucuggggc

SEQ ID NO: 185934 - RNA, 19 nt, Human
uccccugccccagcccagc

SEQ ID NO: 185935 - RNA, 22 nt, Human
uccccugccccagcccagcucc

SEQ ID NO: 185936 - RNA, 26 nt, Human
ucccuugcuccuccggccccucaccu

SEQ ID NO: 185937 - RNA, 19 nt, Human
uccgugggccucaccaggc

SEQ ID NO: 185938 - RNA, 18 nt, Human
ucuuggccuggggaccac

SEQ ID NO: 185939 - RNA, 22 nt, Human
ugagugucucuccagugguucu

SEQ ID NO: 185940 - RNA, 23 nt, Human
ugccccagcccagcuccagcaac

SEQ ID NO: 185941 - RNA, 21 nt, Human
ugcuguggcuguaacccagau

SEQ ID NO: 185942 - RNA, 18 nt, Human
uggagccuaaagcugcag

SEQ ID NO: 185943 - RNA, 21 nt, Human
uggaugagcccccacggaaac

SEQ ID NO: 185944 - RNA, 23 nt, Human
uggccuggggaccaccugugagu

SEQ ID NO: 185945 - RNA, 22 nt, Human
ugggcucucaggcuucacccug

SEQ ID NO: 185946 - RNA, 23 nt, Human
uuccugcuguggcuguaacccag

SEQ ID NO: 185947 - RNA, 22 nt, Human
uucuuugugacaccugcccauc

SEQ ID NO: 185948 - RNA, 18 nt, Human
aaaaagucuccucacccu

SEQ ID NO: 185949 - RNA, 24 nt, Human
aaaucaaucaaggaaaaaccccaa

SEQ ID NO: 185950 - RNA, 24 nt, Human
aaccccaaaaccaaaaaaaagucu

SEQ ID NO: 185951 - RNA, 21 nt, Human
aagcacaauccugauucccac

SEQ ID NO: 185952 - RNA, 20 nt, Human
aagcagagaugcaggaguuc

SEQ ID NO: 185953 - RNA, 24 nt, Human
aagcagcagugucuuccagaaaaa

SEQ ID NO: 185954 - RNA, 18 nt, Human
aagcauuucaacacagaa

SEQ ID NO: 185955 - RNA, 20 nt, Human
aagcauuucaacacagaacc

SEQ ID NO: 185956 - RNA, 19 nt, Human
aauauuuguaaucacuuuc

SEQ ID NO: 185957 - RNA, 21 nt, Human
aaucaaggaaaaaccccaaaa

SEQ ID NO: 185958 - RNA, 21 nt, Human
acaaacccuauaaaaaaaaau

SEQ ID NO: 185959 - RNA, 19 nt, Human
acacugcucacacacauac

SEQ ID NO: 185960 - RNA, 22 nt, Human
acauacauacacaaacccuaua

SEQ ID NO: 185961 - RNA, 21 nt, Human
accccaaaaccaaaaaaaagu

SEQ ID NO: 185962 - RNA, 23 nt, Human
augcaagcagagaugcaggaguu

SEQ ID NO: 185963 - RNA, 21 nt, Human
caaggaaaaaccccaaaacca

SEQ ID NO: 185964 - RNA, 24 nt, Human
caaggaaaaaccccaaaaccaaaa

SEQ ID NO: 185965 - RNA, 28 nt, Human
caaugaguuccaucuuccacaagagucc

SEQ ID NO: 185966 - RNA, 20 nt, Human
cacacacauacauacacaaa

SEQ ID NO: 185967 - RNA, 22 nt, Human
cacccuaaauugaggauuucua

SEQ ID NO: 185968 - RNA, 28 nt, Human
cauacauacacaaacccuauaaaaaaaa

SEQ ID NO: 185969 - RNA, 24 nt, Human
ccaaaaccaaaaaaaagucuccuc

SEQ ID NO: 185970 - RNA, 24 nt, Human
ccaaaaccaaaaaaaagucuccuc

SEQ ID NO: 185971 - RNA, 18 nt, Human
cccaaaaccaaaaaaaag

SEQ ID NO: 185972 - RNA, 19 nt, Human
cccacuaugaaaacaaaau

SEQ ID NO: 185973 - RNA, 21 nt, Human
cccacuaugaaaacaaaauca

SEQ ID NO: 185974 - RNA, 19 nt, Human
cgcccgcggaagagcccag

SEQ ID NO: 185975 - RNA, 22 nt, Human
gaaacaccuacaauucaaugua

SEQ ID NO: 185976 - RNA, 18 nt, Human
gagaaagagaauucaaug

SEQ ID NO: 185977 - RNA, 18 nt, Human
gcaggaguucuucaagca

SEQ ID NO: 185978 - RNA, 24 nt, Human
ggaaaaaccccaaaaccaaaaaaa

SEQ ID NO: 185979 - RNA, 24 nt, Human
ggaguucuucaagcauuucaacac

SEQ ID NO: 185980 - RNA, 18 nt, Human
uaaaagcagcagugucuu

SEQ ID NO: 185981 - RNA, 23 nt, Human
uaaagcacaauccugauucccac

SEQ ID NO: 185982 - RNA, 25 nt, Human
uaaagcacaauccugauucccacua

SEQ ID NO: 185983 - RNA, 21 nt, Human
uaacugcaggcucaauaaagc

SEQ ID NO: 185984 - RNA, 23 nt, Human
ucacacacauacauacacaaacc

SEQ ID NO: 185985 - RNA, 20 nt, Human
ucuggaaaauggacaaugag

SEQ ID NO: 185986 - RNA, 24 nt, Human
ugaaaacaaaaucaaucaaggaaa

SEQ ID NO: 185987 - RNA, 25 nt, Human
ugaaaacaaaaucaaucaaggaaaa

SEQ ID NO: 185988 - RNA, 21 nt, Human
ugaguuccaucuuccacaaga

SEQ ID NO: 185989 - RNA, 27 nt, Human
ugcucacacacauacauacacaaaccc

SEQ ID NO: 185990 - RNA, 30 nt, Human
uuuacacugcucacacacauacauacagug

SEQ ID NO: 185991 - RNA, 19 nt, Human
aaacagcccacaagcauca

SEQ ID NO: 185992 - RNA, 21 nt, Human
aacagagaagucuugucucuu

SEQ ID NO: 185993 - RNA, 23 nt, Human
acagaacgcugacaaacagccca

SEQ ID NO: 185994 - RNA, 20 nt, Human
agaacgcugacaaacagccc

SEQ ID NO: 185995 - RNA, 24 nt, Human
aucacagaacgcugacaaacagcc

SEQ ID NO: 185996 - RNA, 24 nt, Human
auuaauucaucaaugcuuuuaaag

SEQ ID NO: 185997 - RNA, 18 nt, Human
cacagaacgcugacaaac

SEQ ID NO: 185998 - RNA, 20 nt, Human
cacagaacgcugacaaacag

SEQ ID NO: 185999 - RNA, 18 nt, Human
caucgaauucgcuuuuac

SEQ ID NO: 186000 - RNA, 23 nt, Human
ccacaagcaucaacugaggcauu

SEQ ID NO: 186001 - RNA, 21 nt, Human
uacaaggcuuuguuugcacag

SEQ ID NO: 186002 - RNA, 24 nt, Human
uagaaaguaaacagagaagucuug

SEQ ID NO: 186003 - RNA, 20 nt, Human
ucuugucucuuuguaguuug

SEQ ID NO: 186004 - RNA, 19 nt, Human
ugacaaacagcccacaagc

SEQ ID NO: 186005 - RNA, 21 nt, Human
ugacaaacagcccacaagcau

SEQ ID NO: 186006 - RNA, 25 nt, Human
uggauguagaucaauuuuuacacag

SEQ ID NO: 186007 - RNA, 24 nt, Human
uuaaaauuccuuuccuuccauauu

SEQ ID NO: 186008 - RNA, 23 nt, Human
uuaguucuuagaaaguaaacaga

SEQ ID NO: 186009 - RNA, 19 nt, Human
uucauuaucacagaacgcu

SEQ ID NO: 186010 - RNA, 24 nt, Human
uucuuuguugucuaaaguucuaau

SEQ ID NO: 186011 - RNA, 21 nt, Human
uuuuaaaauuccuuuccuucc

SEQ ID NO: 186012 - RNA, 27 nt, Human
uuuuaaaauuccuuuccuuccauauuu

SEQ ID NO: 186013 - RNA, 24 nt, Human
uuuuuacacagauaucagcaguug

SEQ ID NO: 186014 - RNA, 22 nt, Human
aaaacuguuuacauaagauccu

SEQ ID NO: 186015 - RNA, 19 nt, Human
aaacuacaaagcaaaucaa

SEQ ID NO: 186016 - RNA, 18 nt, Human
aagaggcccaagacagau

SEQ ID NO: 186017 - RNA, 20 nt, Human
aagaugucaacaaacuacaa

SEQ ID NO: 186018 - RNA, 18 nt, Human
acuacaaagcaaaucaac

SEQ ID NO: 186019 - RNA, 22 nt, Human
agaugucaacaaacuacaaagc

SEQ ID NO: 186020 - RNA, 20 nt, Human
agcucacagaugagcaauau

SEQ ID NO: 186021 - RNA, 20 nt, Human
agcucgccugccgcucugga

SEQ ID NO: 186022 - RNA, 21 nt, Human
caagacagauaagccugccgg

SEQ ID NO: 186023 - RNA, 24 nt, Human
caagacagauaagccugccgggug

SEQ ID NO: 186024 - RNA, 30 nt, Human
cagcgcgccccuccuccaucucgcaguccu

SEQ ID NO: 186025 - RNA, 20 nt, Human
ccccagcucgccugccgcuc

SEQ ID NO: 186026 - RNA, 20 nt, Human
ccgcagcgcgccccuccucc

SEQ ID NO: 186027 - RNA, 22 nt, Human
ccggaccccagcucgccugccg

SEQ ID NO: 186028 - RNA, 19 nt, Human
cgcagcgcgccccuccucc

SEQ ID NO: 186029 - RNA, 25 nt, Human
cgccccuccuccaucucgcaguccg

SEQ ID NO: 186030 - RNA, 18 nt, Human
cuccaucucgcaguccgg

SEQ ID NO: 186031 - RNA, 18 nt, Human
gaugaugcaggacuagag

SEQ ID NO: 186032 - RNA, 22 nt, Human
uagaauaaaguccauuacuauc

SEQ ID NO: 186033 - RNA, 23 nt, Human
ucucgcaguccggaccccagcuc

SEQ ID NO: 186034 - RNA, 22 nt, Human
ugacaaaagaggcccaagacag

SEQ ID NO: 186035 - RNA, 23 nt, Human
ugagcaauaugugacaaaagagg

SEQ ID NO: 186036 - RNA, 19 nt, Human
ugugacaaaagaggcccaa

SEQ ID NO: 186037 - RNA, 19 nt, Human
aaaacaaaaacaaacaacg

SEQ ID NO: 186038 - RNA, 18 nt, Human
aaaagcaauuauaaaagc

SEQ ID NO: 186039 - RNA, 28 nt, Human
aaacaaaaacaaacaacgaaaauuacac

SEQ ID NO: 186040 - RNA, 25 nt, Human
aaacaacgaaaauuacacaagggcu

SEQ ID NO: 186041 - RNA, 18 nt, Human
aaagugcugggaucacaa

SEQ ID NO: 186042 - RNA, 20 nt, Human
aaauaaaaucugccaggcug

SEQ ID NO: 186043 - RNA, 23 nt, Human
aaaugagagacccagggaggucc

SEQ ID NO: 186044 - RNA, 18 nt, Human
aacaaaaacaaacaacga

SEQ ID NO: 186045 - RNA, 20 nt, Human
aacaaaaacaaacaacgaaa

SEQ ID NO: 186046 - RNA, 19 nt, Human
aacacaaugaaaccccguc

SEQ ID NO: 186047 - RNA, 20 nt, Human
aacacaaugaaaccccgucu

SEQ ID NO: 186048 - RNA, 20 nt, Human
aacauggcaaaacccugucu

SEQ ID NO: 186049 - RNA, 21 nt, Human
aacauggcaaaacccugucuc

SEQ ID NO: 186050 - RNA, 23 nt, Human
aagcacuuugggaggccgaggca

SEQ ID NO: 186051 - RNA, 24 nt, Human
aagcacuuugggaggccgaggcag

SEQ ID NO: 186052 - RNA, 25 nt, Human
aagcacuuugggaggccgaggcagg

SEQ ID NO: 186053 - RNA, 21 nt, Human
aagcccccgaccccuuagcac

SEQ ID NO: 186054 - RNA, 22 nt, Human
aagcccccgaccccuuagcacc

SEQ ID NO: 186055 - RNA, 24 nt, Human
aagcgcucuaaaccccaaaggaaa

SEQ ID NO: 186056 - RNA, 26 nt, Human
aagugcugggaucacaagcgcgagcc

SEQ ID NO: 186057 - RNA, 20 nt, Human
aaugauuuaaggucagagga

SEQ ID NO: 186058 - RNA, 24 nt, Human
aauugcuugaacccgggaggcaga

SEQ ID NO: 186059 - RNA, 23 nt, Human
acacagagugagacucugucuca

SEQ ID NO: 186060 - RNA, 21 nt, Human
acacaugcuccacuccaugca

SEQ ID NO: 186061 - RNA, 21 nt, Human
acaccuguaauccaagcacuu

SEQ ID NO: 186062 - RNA, 24 nt, Human
acagagugagacucugucucaaaa

SEQ ID NO: 186063 - RNA, 18 nt, Human
accacucuaucuuccuca

SEQ ID NO: 186064 - RNA, 24 nt, Human
accccgucuguacuaaaaauacaa

SEQ ID NO: 186065 - RNA, 25 nt, Human
accccuuagcacgaguuaauucuaa

SEQ ID NO: 186066 - RNA, 24 nt, Human
acccugucucuacuaaaaauacaa

SEQ ID NO: 186067 - RNA, 21 nt, Human
accuguaauccaagcacuuug

SEQ ID NO: 186068 - RNA, 24 nt, Human
acuccagccugggacacagaguga

SEQ ID NO: 186069 - RNA, 18 nt, Human
acucuggaggcugagacu

SEQ ID NO: 186070 - RNA, 18 nt, Human
acugcacuccagccuggg

SEQ ID NO: 186071 - RNA, 24 nt, Human
acugcacuccagccugggacacag

SEQ ID NO: 186072 - RNA, 24 nt, Human
acugugccacugcacuccagccug

SEQ ID NO: 186073 - RNA, 23 nt, Human
agaaaggagcuagaguuggccug

SEQ ID NO: 186074 - RNA, 23 nt, Human
agaaggucagagcagauuguuuu

SEQ ID NO: 186075 - RNA, 22 nt, Human
agaauucuugccuuuacucuuc

SEQ ID NO: 186076 - RNA, 22 nt, Human
agacuauaggcaugcgccacca

SEQ ID NO: 186077 - RNA, 18 nt, Human
agagagugaacaugcccc

SEQ ID NO: 186078 - RNA, 22 nt, Human
agagcagcccagggagucccca

SEQ ID NO: 186079 - RNA, 21 nt, Human
agagccucauucggccugaaa

SEQ ID NO: 186080 - RNA, 18 nt, Human
agaggacaaaacugaugu

SEQ ID NO: 186081 - RNA, 18 nt, Human
agagguugcagugagccg

SEQ ID NO: 186082 - RNA, 24 nt, Human
agagguugcagugagccgagacug

SEQ ID NO: 186083 - RNA, 19 nt, Human
agcacucacccagcugcug

SEQ ID NO: 186084 - RNA, 24 nt, Human
agcacuuugggaggccgaggcagg

SEQ ID NO: 186085 - RNA, 18 nt, Human
agcagcccagggaguccc

SEQ ID NO: 186086 - RNA, 24 nt, Human
agccaggaaaugagagacccaggg

SEQ ID NO: 186087 - RNA, 24 nt, Human
agccagggcaaggaaacagauccc

SEQ ID NO: 186088 - RNA, 20 nt, Human
agcccagggaguccccacaa

SEQ ID NO: 186089 - RNA, 21 nt, Human
agccgagacugugccacugca

SEQ ID NO: 186090 - RNA, 24 nt, Human
agccgggcguggugguggggcgcc

SEQ ID NO: 186091 - RNA, 18 nt, Human
agccuggccaacauggca

SEQ ID NO: 186092 - RNA, 24 nt, Human
agccuggccaacauggcaaaaccc

SEQ ID NO: 186093 - RNA, 24 nt, Human
agccugggacacagagugagacuc

SEQ ID NO: 186094 - RNA, 21 nt, Human
aggcagagguugcagugagcc

SEQ ID NO: 186095 - RNA, 24 nt, Human
aggcagagguugcagugagccgag

SEQ ID NO: 186096 - RNA, 24 nt, Human
aggcaggagaauugcuugaacccg

SEQ ID NO: 186097 - RNA, 18 nt, Human
aggcaggcggaucacaag

SEQ ID NO: 186098 - RNA, 23 nt, Human
aggcaggcggaucacaagucagg

SEQ ID NO: 186099 - RNA, 18 nt, Human
aggcaggcggaucaccug

SEQ ID NO: 186100 - RNA, 26 nt, Human
aggcaggcggaucaccugaggucagg

SEQ ID NO: 186101 - RNA, 21 nt, Human
aggccgaggcaggcggaucac

SEQ ID NO: 186102 - RNA, 23 nt, Human
aggccgaggcaggcggaucacaa

SEQ ID NO: 186103 - RNA, 18 nt, Human
aggcggaucacaagucag

SEQ ID NO: 186104 - RNA, 20 nt, Human
aggcggaucacaagucagga

SEQ ID NO: 186105 - RNA, 21 nt, Human
aggcugaggcaggagaauugc

SEQ ID NO: 186106 - RNA, 24 nt, Human
aggcugaggcaggagaauugcuug

SEQ ID NO: 186107 - RNA, 20 nt, Human
aggggcgggggaauucaggc

SEQ ID NO: 186108 - RNA, 20 nt, Human
aggugauccgccucagucuc

SEQ ID NO: 186109 - RNA, 21 nt, Human
aucaacuggaaccuccccaaa

SEQ ID NO: 186110 - RNA, 22 nt, Human
augacacaggggaggccgggca

SEQ ID NO: 186111 - RNA, 23 nt, Human
augcgccaccacaccaggcuaau

SEQ ID NO: 186112 - RNA, 24 nt, Human
caaagugcugggaucacaagcgcg

SEQ ID NO: 186113 - RNA, 24 nt, Human
caacauggcaaaacccugucucua

SEQ ID NO: 186114 - RNA, 24 nt, Human
caaggcaggcggaucaccugaggu

SEQ ID NO: 186115 - RNA, 26 nt, Human
caaggcaggcggaucaccugagguca

SEQ ID NO: 186116 - RNA, 23 nt, Human
caaucaacuggaaccuccccaaa

SEQ ID NO: 186117 - RNA, 24 nt, Human
cacaagcgcgagccaccaugccca

SEQ ID NO: 186118 - RNA, 24 nt, Human
cacagagugagacucugucucaaa

SEQ ID NO: 186119 - RNA, 19 nt, Human
cacaguauacugccugcca

SEQ ID NO: 186120 - RNA, 21 nt, Human
caccacuuugggaggccaagg

SEQ ID NO: 186121 - RNA, 24 nt, Human
caccacuuugggaggccaaggcag

SEQ ID NO: 186122 - RNA, 20 nt, Human
cacccccccaaaaaacuuua

SEQ ID NO: 186123 - RNA, 23 nt, Human
caccuguaauccaagcacuuugg

SEQ ID NO: 186124 - RNA, 24 nt, Human
caccuguaauccaagcacuuuggg

SEQ ID NO: 186125 - RNA, 23 nt, Human
cacuaaaaauuacacaguauacu

SEQ ID NO: 186126 - RNA, 22 nt, Human
cacuccagccugggacacagag

SEQ ID NO: 186127 - RNA, 23 nt, Human
cacuccagccugggacacagagu

SEQ ID NO: 186128 - RNA, 24 nt, Human
cacuccagccugggacacagagug

SEQ ID NO: 186129 - RNA, 18 nt, Human
cacugcacuccagccugg

SEQ ID NO: 186130 - RNA, 19 nt, Human
cacugcacuccagccuggg

SEQ ID NO: 186131 - RNA, 19 nt, Human
cacugcacuccagccuggg

SEQ ID NO: 186132 - RNA, 24 nt, Human
cacugcacuccagccugggacaca

SEQ ID NO: 186133 - RNA, 22 nt, Human
cagagcagauuguuuuguuguu

SEQ ID NO: 186134 - RNA, 23 nt, Human
cagaggaacaacuuaagcgcucu

SEQ ID NO: 186135 - RNA, 20 nt, Human
cagauaagaaaaugcagcca

SEQ ID NO: 186136 - RNA, 24 nt, Human
cagcuacucgggaggcugaggcag

SEQ ID NO: 186137 - RNA, 24 nt, Human
caggcggaucaccugaggucagga

SEQ ID NO: 186138 - RNA, 19 nt, Human
cagggcaggggcagccugu

SEQ ID NO: 186139 - RNA, 21 nt, Human
caggggaggccgggcacggug

SEQ ID NO: 186140 - RNA, 24 nt, Human
caguagagacgagguuucuccaug

SEQ ID NO: 186141 - RNA, 24 nt, Human
caugcgccaccacaccaggcuaau

SEQ ID NO: 186142 - RNA, 21 nt, Human
cauucaaacacauauacccau

SEQ ID NO: 186143 - RNA, 25 nt, Human
cauucaacaaacauuuacugagcac

SEQ ID NO: 186144 - RNA, 21 nt, Human
cauuuggacaaaauguacaga

SEQ ID NO: 186145 - RNA, 19 nt, Human
cauuugggaaacucaugug

SEQ ID NO: 186146 - RNA, 19 nt, Human
cauuugggaaacucaugug

SEQ ID NO: 186147 - RNA, 19 nt, Human
ccaaagugcugggaucaca

SEQ ID NO: 186148 - RNA, 23 nt, Human
ccacuccaugcacauucuguccu

SEQ ID NO: 186149 - RNA, 19 nt, Human
ccacugcacuccagccugg

SEQ ID NO: 186150 - RNA, 20 nt, Human
ccacugcacuccagccuggg

SEQ ID NO: 186151 - RNA, 20 nt, Human
ccacugcacuccagccuggg

SEQ ID NO: 186152 - RNA, 21 nt, Human
ccacugcacuccagccuggga

SEQ ID NO: 186153 - RNA, 22 nt, Human
ccacugcacuccagccugggac

SEQ ID NO: 186154 - RNA, 22 nt, Human
ccaggaaaugagagacccaggg

SEQ ID NO: 186155 - RNA, 19 nt, Human
ccaugucggucaggcuggu

SEQ ID NO: 186156 - RNA, 20 nt, Human
ccauucaaacacauauaccc

SEQ ID NO: 186157 - RNA, 23 nt, Human
cccccaaaaaacuuuacugucac

SEQ ID NO: 186158 - RNA, 22 nt, Human
cccgcagucccagcuacucugg

SEQ ID NO: 186159 - RNA, 23 nt, Human
cccgcagucccagcuacucugga

SEQ ID NO: 186160 - RNA, 23 nt, Human
cccggcuaacacaaugaaacccc

SEQ ID NO: 186161 - RNA, 24 nt, Human
cccggcuaacacaaugaaaccccg

SEQ ID NO: 186162 - RNA, 24 nt, Human
ccgccucagucucccaaagugcug

SEQ ID NO: 186163 - RNA, 23 nt, Human
ccucaggugauccgccucagucu

SEQ ID NO: 186164 - RNA, 19 nt, Human
ccucuaaucccagcuacuc

SEQ ID NO: 186165 - RNA, 18 nt, Human
ccugaccucaggugaucc

SEQ ID NO: 186166 - RNA, 22 nt, Human
ccugaggucaggagcucgagac

SEQ ID NO: 186167 - RNA, 22 nt, Human
ccuggccaacauggcaaaaccc

SEQ ID NO: 186168 - RNA, 24 nt, Human
ccuggccaacauggcaaaacccug

SEQ ID NO: 186169 - RNA, 24 nt, Human
ccuguaauccaagcacuuugggag

SEQ ID NO: 186170 - RNA, 21 nt, Human
cgagaccagccuggccaacau

SEQ ID NO: 186171 - RNA, 27 nt, Human
cgaggcaggcggaucacaagucaggag

SEQ ID NO: 186172 - RNA, 20 nt, Human
cgaguuaauucuaagucacc

SEQ ID NO: 186173 - RNA, 24 nt, Human
cgcccgcagucccagcuacucugg

SEQ ID NO: 186174 - RNA, 24 nt, Human
cgccucuaaucccagcuacucggg

SEQ ID NO: 186175 - RNA, 27 nt, Human
cggaucaccugaggucaggagcucgag

SEQ ID NO: 186176 - RNA, 24 nt, Human
cgggaggcagagguugcagugagc

SEQ ID NO: 186177 - RNA, 20 nt, Human
cggguccugugugugugggu

SEQ ID NO: 186178 - RNA, 24 nt, Human
cggucaggcuggucuagaacuccu

SEQ ID NO: 186179 - RNA, 23 nt, Human
cgugaaaggaugaaagcucuuaa

SEQ ID NO: 186180 - RNA, 21 nt, Human
cuaacugccccauagccccua

SEQ ID NO: 186181 - RNA, 19 nt, Human
cuagccccccucccaacac

SEQ ID NO: 186182 - RNA, 19 nt, Human
cucaaaacaaaaacaaaca

SEQ ID NO: 186183 - RNA, 22 nt, Human
cucacgccugugaucccaccac

SEQ ID NO: 186184 - RNA, 24 nt, Human
cucacgccugugaucccaccacuu

SEQ ID NO: 186185 - RNA, 23 nt, Human
cuggaggcugagacuauaggcau

SEQ ID NO: 186186 - RNA, 19 nt, Human
cuguuucgagggguccagg

SEQ ID NO: 186187 - RNA, 24 nt, Human
gaccccuuagcacgaguuaauucu

SEQ ID NO: 186188 - RNA, 26 nt, Human
gaccucaggugauccgccucagucuc

SEQ ID NO: 186189 - RNA, 23 nt, Human
gagaauugcuugaacccgggagg

SEQ ID NO: 186190 - RNA, 23 nt, Human
gagacgagguuucuccaugucgg

SEQ ID NO: 186191 - RNA, 23 nt, Human
gagacugugccacugcacuccag

SEQ ID NO: 186192 - RNA, 20 nt, Human
gaggcugagacuauaggcau

SEQ ID NO: 186193 - RNA, 23 nt, Human
gaucacaagucaggagaucaaga

SEQ ID NO: 186194 - RNA, 18 nt, Human
gaucaccugaggucagga

SEQ ID NO: 186195 - RNA, 24 nt, Human
gaucaccugaggucaggagcucga

SEQ ID NO: 186196 - RNA, 24 nt, Human
gcacuccagccugggacacagagu

SEQ ID NO: 186197 - RNA, 24 nt, Human
gccaacauggcaaaacccugucuc

SEQ ID NO: 186198 - RNA, 24 nt, Human
gccccauucaaacacauauaccca

SEQ ID NO: 186199 - RNA, 23 nt, Human
gccucagucucccaaagugcugg

SEQ ID NO: 186200 - RNA, 24 nt, Human
gccucagucucccaaagugcuggg

SEQ ID NO: 186201 - RNA, 20 nt, Human
gcgguggcuuacaccuguaa

SEQ ID NO: 186202 - RNA, 22 nt, Human
gcuccacuccaugcacauucug

SEQ ID NO: 186203 - RNA, 23 nt, Human
gcuggucuagaacuccugaccuc

SEQ ID NO: 186204 - RNA, 23 nt, Human
ggagcccgucucacaagccgccu

SEQ ID NO: 186205 - RNA, 24 nt, Human
ggaggccgggcacgguggcucacg

SEQ ID NO: 186206 - RNA, 18 nt, Human
ggaucaccugaggucagg

SEQ ID NO: 186207 - RNA, 24 nt, Human
ggcugggcggggugcgguggcuua

SEQ ID NO: 186208 - RNA, 24 nt, Human
ggcuggucuagaacuccugaccuc

SEQ ID NO: 186209 - RNA, 18 nt, Human
gggcacgguggcucacgc

SEQ ID NO: 186210 - RNA, 24 nt, Human
gggcacgguggcucacgccuguga

SEQ ID NO: 186211 - RNA, 19 nt, Human
gggugcgguggcuuacacc

SEQ ID NO: 186212 - RNA, 25 nt, Human
gguacacauuugggaaacucaugug

SEQ ID NO: 186213 - RNA, 23 nt, Human
gguggcucacgccugugauccca

SEQ ID NO: 186214 - RNA, 24 nt, Human
gguggcuuacaccuguaauccaag

SEQ ID NO: 186215 - RNA, 19 nt, Human
guccgggugcagagcagcc

SEQ ID NO: 186216 - RNA, 20 nt, Human
gugauccgccucagucuccc

SEQ ID NO: 186217 - RNA, 18 nt, Human
guuccuagccccccuccc

SEQ ID NO: 186218 - RNA, 24 nt, Human
guugcagugagccgagacugugcc

SEQ ID NO: 186219 - RNA, 26 nt, Human
uaaaaugacacaggggaggccgggca

SEQ ID NO: 186220 - RNA, 18 nt, Human
uaaaccccaaaggaaaug

SEQ ID NO: 186221 - RNA, 21 nt, Human
uaacuucucuguccccacccc

SEQ ID NO: 186222 - RNA, 22 nt, Human
uaacuucucuguccccaccccc

SEQ ID NO: 186223 - RNA, 24 nt, Human
uaagucaccacucuaucuuccuca

SEQ ID NO: 186224 - RNA, 24 nt, Human
uacaccuguaauccaagcacuuug

SEQ ID NO: 186225 - RNA, 20 nt, Human
uagaguccucuguuucgagg

SEQ ID NO: 186226 - RNA, 24 nt, Human
uagccggguguguuggcuggcgcc

SEQ ID NO: 186227 - RNA, 25 nt, Human
uaggaaaugcugcuaacugccccau

SEQ ID NO: 186228 - RNA, 21 nt, Human
ucaaaagcaauuauaaaagca

SEQ ID NO: 186229 - RNA, 26 nt, Human
ucaacaaacauuuacugagcaccugc

SEQ ID NO: 186230 - RNA, 19 nt, Human
ucaauagaucccaaucuaa

SEQ ID NO: 186231 - RNA, 23 nt, Human
ucaaucaacuggaaccuccccaa

SEQ ID NO: 186232 - RNA, 19 nt, Human
ucaccugaggucaggagcu

SEQ ID NO: 186233 - RNA, 24 nt, Human
ucaguagagacgagguuucuccau

SEQ ID NO: 186234 - RNA, 19 nt, Human
ucaucacccaggaugcggg

SEQ ID NO: 186235 - RNA, 23 nt, Human
uccagccugggacacagagugag

SEQ ID NO: 186236 - RNA, 24 nt, Human
uccagccugggacacagagugaga

SEQ ID NO: 186237 - RNA, 25 nt, Human
uccaugcacauucuguccccugcca

SEQ ID NO: 186238 - RNA, 18 nt, Human
ucccaaagugcugggauc

SEQ ID NO: 186239 - RNA, 26 nt, Human
ucccaacacacacaugcuccacucca

SEQ ID NO: 186240 - RNA, 21 nt, Human
ucccaaucuaaagagccucau

SEQ ID NO: 186241 - RNA, 18 nt, Human
ucccaccacuuugggagg

SEQ ID NO: 186242 - RNA, 21 nt, Human
uccccacccccccaaaaaacu

SEQ ID NO: 186243 - RNA, 23 nt, Human
uccccacccccccaaaaaacuuu

SEQ ID NO: 186244 - RNA, 18 nt, Human
uccccagguaacugaggg

SEQ ID NO: 186245 - RNA, 23 nt, Human
uccccagguaacugaggggcggg

SEQ ID NO: 186246 - RNA, 21 nt, Human
uccgugaaaggaugaaagcuc

SEQ ID NO: 186247 - RNA, 23 nt, Human
ucgggaggcugaggcaggagaau

SEQ ID NO: 186248 - RNA, 21 nt, Human
ucucuacuaaaaauacaaaaa

SEQ ID NO: 186249 - RNA, 24 nt, Human
ucuguacuaaaaauacaaaaaauu

SEQ ID NO: 186250 - RNA, 20 nt, Human
ucuugggcuaccaggaaguc

SEQ ID NO: 186251 - RNA, 19 nt, Human
ugaaagcucuuaacuucuc

SEQ ID NO: 186252 - RNA, 21 nt, Human
ugaccucaggugauccgccuc

SEQ ID NO: 186253 - RNA, 22 nt, Human
ugaccucaggugauccgccuca

SEQ ID NO: 186254 - RNA, 22 nt, Human
ugacugagcccgguuucuguuu

SEQ ID NO: 186255 - RNA, 24 nt, Human
ugagaaccauguucaccacuuugg

SEQ ID NO: 186256 - RNA, 20 nt, Human
ugagaaggaugcaguucaug

SEQ ID NO: 186257 - RNA, 21 nt, Human
ugagacuauaggcaugcgcca

SEQ ID NO: 186258 - RNA, 24 nt, Human
ugagacuauaggcaugcgccacca

SEQ ID NO: 186259 - RNA, 25 nt, Human
ugagauaaggaaugauuuaagguca

SEQ ID NO: 186260 - RNA, 22 nt, Human
ugagccgagacugugccacugc

SEQ ID NO: 186261 - RNA, 24 nt, Human
ugaggcaggagaauugcuugaacc

SEQ ID NO: 186262 - RNA, 25 nt, Human
ugaggcaggagaauugcuugaaccc

SEQ ID NO: 186263 - RNA, 18 nt, Human
ugcccaacccccagaagu

SEQ ID NO: 186264 - RNA, 26 nt, Human
ugcugggaucacaagcgcgagccacc

SEQ ID NO: 186265 - RNA, 23 nt, Human
ugcugguaagaauucuugccuuu

SEQ ID NO: 186266 - RNA, 21 nt, Human
uggaggcugagacuauaggca

SEQ ID NO: 186267 - RNA, 18 nt, Human
uggaugcugccacagcag

SEQ ID NO: 186268 - RNA, 18 nt, Human
uggcaagguucuuaagug

SEQ ID NO: 186269 - RNA, 24 nt, Human
uggccaacauggcaaaacccuguc

SEQ ID NO: 186270 - RNA, 24 nt, Human
uggcucacgccugugaucccacca

SEQ ID NO: 186271 - RNA, 19 nt, Human
uggcuuacaccuguaaucc

SEQ ID NO: 186272 - RNA, 20 nt, Human
uggcuuacaccuguaaucca

SEQ ID NO: 186273 - RNA, 21 nt, Human
ugggacacagagugagacucu

SEQ ID NO: 186274 - RNA, 24 nt, Human
ugggaggccaaggcaggcggauca

SEQ ID NO: 186275 - RNA, 20 nt, Human
ugggaggccgaggcaggcgg

SEQ ID NO: 186276 - RNA, 24 nt, Human
ugggaggccgaggcaggcggauca

SEQ ID NO: 186277 - RNA, 22 nt, Human
ugggaucacaagcgcgagccac

SEQ ID NO: 186278 - RNA, 24 nt, Human
ugggaucacaagcgcgagccacca

SEQ ID NO: 186279 - RNA, 23 nt, Human
uggucuagaacuccugaccucag

SEQ ID NO: 186280 - RNA, 18 nt, Human
uguguggguuggaugcug

SEQ ID NO: 186281 - RNA, 18 nt, Human
uuagccgggcgugguggu

SEQ ID NO: 186282 - RNA, 25 nt, Human
uuagccgggcguggugguggggcgc

SEQ ID NO: 186283 - RNA, 25 nt, Human
uuagccggguguguuggcuggcgcc

SEQ ID NO: 186284 - RNA, 19 nt, Human
uucaucacccaggaugcgg

SEQ ID NO: 186285 - RNA, 19 nt, Human
uugcagugagccgagacug

SEQ ID NO: 186286 - RNA, 22 nt, Human
uugcagugagccgagacugugc

SEQ ID NO: 186287 - RNA, 18 nt, Human
uugcuugaacccgggagg

SEQ ID NO: 186288 - RNA, 24 nt, Human
uugcuugaacccgggaggcagagg

SEQ ID NO: 186289 - RNA, 25 nt, Human
uugggaggccgaggcaggcggauca

SEQ ID NO: 186290 - RNA, 21 nt, Human
uuguagcuugagaaaggagcu

SEQ ID NO: 186291 - RNA, 20 nt, Human
uuguuguuguucuucuuggg

SEQ ID NO: 186292 - RNA, 20 nt, Human
uuugaagaaggucagagcag

SEQ ID NO: 186293 - RNA, 19 nt, Human
aaaaugcccacauguguua

SEQ ID NO: 186294 - RNA, 20 nt, Human
aggagacaguccugaauucu

SEQ ID NO: 186295 - RNA, 20 nt, Human
auucuccuauuaccuggcca

SEQ ID NO: 186296 - RNA, 22 nt, Human
caacucacccaaagagcagucc

SEQ ID NO: 186297 - RNA, 20 nt, Human
ccacauguguuauuucaccu

SEQ ID NO: 186298 - RNA, 20 nt, Human
gggcagucuagggcugaaac

SEQ ID NO: 186299 - RNA, 22 nt, Human
ugaguuucucagccuucaauuc

SEQ ID NO: 186300 - RNA, 18 nt, Human
ugggaggcuggggagaga

SEQ ID NO: 186301 - RNA, 19 nt, Human
ugggaggcuggggagagau

SEQ ID NO: 186302 - RNA, 21 nt, Human
ugggaggcuggggagagauug

SEQ ID NO: 186303 - RNA, 23 nt, Human
uucuuucuauaauggaagaaguu

SEQ ID NO: 186304 - RNA, 25 nt, Human
uuuuuuuuuuucuuuuuuuauuuuu

SEQ ID NO: 186305 - RNA, 25 nt, Human
uuuuuuuuuuuuuuuuuuucuuuuu

SEQ ID NO: 186306 - RNA, 23 nt, Human
aaaaaaauaaacuucacaaaaac

SEQ ID NO: 186307 - RNA, 27 nt, Human
aaaacaacagaaagcaaaccgguaccc

SEQ ID NO: 186308 - RNA, 22 nt, Human
aaaaccaaccaauaaacaaaac

SEQ ID NO: 186309 - RNA, 24 nt, Human
aaacaaaaauaauaacuuuuucua

SEQ ID NO: 186310 - RNA, 19 nt, Human
aaacaaaacaacagaaagc

SEQ ID NO: 186311 - RNA, 21 nt, Human
aaacaaaacaacagaaagcaa

SEQ ID NO: 186312 - RNA, 22 nt, Human
aaacaaaacaacagaaagcaaa

SEQ ID NO: 186313 - RNA, 20 nt, Human
aaaccaugugagaaaaaaag

SEQ ID NO: 186314 - RNA, 19 nt, Human
aaaggaaccguucccggug

SEQ ID NO: 186315 - RNA, 20 nt, Human
aaagugugauauuccaauaa

SEQ ID NO: 186316 - RNA, 21 nt, Human
aaauaaugcuuuuacagauaa

SEQ ID NO: 186317 - RNA, 26 nt, Human
aaauaccagaaaucauaauauaagcu

SEQ ID NO: 186318 - RNA, 26 nt, Human
aacaaaacaacagaaagcaaacaaaa

SEQ ID NO: 186319 - RNA, 22 nt, Human
aacaacagaaagcaaacaaaaa

SEQ ID NO: 186320 - RNA, 22 nt, Human
aaccaauaaacaaaacaacaga

SEQ ID NO: 186321 - RNA, 22 nt, Human
aaccauugaaacauuucauuga

SEQ ID NO: 186322 - RNA, 23 nt, Human
aaccauugaaacauuucauugau

SEQ ID NO: 186323 - RNA, 19 nt, Human
aagaaacuuagggcagugg

SEQ ID NO: 186324 - RNA, 20 nt, Human
aagaaacuuagggcaguggu

SEQ ID NO: 186325 - RNA, 23 nt, Human
aaguaaacucuaauuggaaccaa

SEQ ID NO: 186326 - RNA, 19 nt, Human
aaguucacacaucuguauc

SEQ ID NO: 186327 - RNA, 23 nt, Human
aaugaaacaaaaaauaaaaaucu

SEQ ID NO: 186328 - RNA, 18 nt, Human
acaaaaaccaaccaauaa

SEQ ID NO: 186329 - RNA, 26 nt, Human
acaaaacaacagaaagcaaacaaaaa

SEQ ID NO: 186330 - RNA, 19 nt, Human
acaacuucccaguucuccu

SEQ ID NO: 186331 - RNA, 22 nt, Human
accacagacaccacaaagccug

SEQ ID NO: 186332 - RNA, 26 nt, Human
acuuuauaccaaaucaacaaaaacca

SEQ ID NO: 186333 - RNA, 23 nt, Human
agaaugagacucacagacucuaa

SEQ ID NO: 186334 - RNA, 19 nt, Human
aguggauuacaguacuuua

SEQ ID NO: 186335 - RNA, 26 nt, Human
caaaaaccacauaauacaaccuucag

SEQ ID NO: 186336 - RNA, 24 nt, Human
caaaacaacagaaagcaaacaaaa

SEQ ID NO: 186337 - RNA, 22 nt, Human
caaaacaauaguaguaugaaaa

SEQ ID NO: 186338 - RNA, 20 nt, Human
caaccaauaaacaaaacaac

SEQ ID NO: 186339 - RNA, 18 nt, Human
caacuucccaguucuccu

SEQ ID NO: 186340 - RNA, 24 nt, Human
caauguaaaacgucugcuucuuuu

SEQ ID NO: 186341 - RNA, 21 nt, Human
cacaaaaaccaaccaauaaac

SEQ ID NO: 186342 - RNA, 21 nt, Human
cacaaagagaacugaucugau

SEQ ID NO: 186343 - RNA, 25 nt, Human
cacaaauugugcaggaugucauacu

SEQ ID NO: 186344 - RNA, 19 nt, Human
cacaaggcuaaagauuuac

SEQ ID NO: 186345 - RNA, 23 nt, Human
cacacaucuguaucuuaaagaau

SEQ ID NO: 186346 - RNA, 23 nt, Human
cacagacaccacaaagccugaca

SEQ ID NO: 186347 - RNA, 19 nt, Human
cagaaaguauaaacaagac

SEQ ID NO: 186348 - RNA, 23 nt, Human
cagccucagucaagucucaugau

SEQ ID NO: 186349 - RNA, 23 nt, Human
cagcugacuuaaaauauaaacau

SEQ ID NO: 186350 - RNA, 24 nt, Human
caguaagcccuaaccaguccaaac

SEQ ID NO: 186351 - RNA, 23 nt, Human
caucuguaucuuaaagaaugaga

SEQ ID NO: 186352 - RNA, 20 nt, Human
cauugaaacauuucauugau

SEQ ID NO: 186353 - RNA, 20 nt, Human
ccaaauccuuaaaacugcug

SEQ ID NO: 186354 - RNA, 21 nt, Human
ccaaauccuuaaaacugcuga

SEQ ID NO: 186355 - RNA, 19 nt, Human
ccaaccaauaaacaaaaca

SEQ ID NO: 186356 - RNA, 19 nt, Human
ccauacauuuuacugaaaa

SEQ ID NO: 186357 - RNA, 23 nt, Human
cccuugacagcugacuuaaaaua

SEQ ID NO: 186358 - RNA, 24 nt, Human
cugaaugugcagaaaguauaaaca

SEQ ID NO: 186359 - RNA, 18 nt, Human
gagaaaaaaaggaaaaag

SEQ ID NO: 186360 - RNA, 18 nt, Human
gagcauuuagcacugaua

SEQ ID NO: 186361 - RNA, 19 nt, Human
gaugauaccacagacaccc

SEQ ID NO: 186362 - RNA, 23 nt, Human
gcaacaacuucccaguucuccua

SEQ ID NO: 186363 - RNA, 23 nt, Human
gcuacaagaaucaaaaagcaaaa

SEQ ID NO: 186364 - RNA, 24 nt, Human
gggccacaauugcucagcagagaa

SEQ ID NO: 186365 - RNA, 21 nt, Human
gugccaaaaauguaaaacuua

SEQ ID NO: 186366 - RNA, 20 nt, Human
uaaacaaaacaacagaaagc

SEQ ID NO: 186367 - RNA, 26 nt, Human
uaagcaacaacuucccaguucuccua

SEQ ID NO: 186368 - RNA, 20 nt, Human
uaaggcuguggucuccccuu

SEQ ID NO: 186369 - RNA, 24 nt, Human
uacaagaaucaaaaagcaaaacca

SEQ ID NO: 186370 - RNA, 25 nt, Human
uacaagaaucaaaaagcaaaaccau

SEQ ID NO: 186371 - RNA, 23 nt, Human
uacaaggcgguuuuuaaagugug

SEQ ID NO: 186372 - RNA, 23 nt, Human
uaccaaaaaaaaaauaaacuuca

SEQ ID NO: 186373 - RNA, 26 nt, Human
uaccaaaaaaaaaauaaacuucacaa

SEQ ID NO: 186374 - RNA, 21 nt, Human
uaccaaaucaacaaaaaccac

SEQ ID NO: 186375 - RNA, 22 nt, Human
uaccacagacaccacaaagccu

SEQ ID NO: 186376 - RNA, 23 nt, Human
uaccacagacaccacaaagccug

SEQ ID NO: 186377 - RNA, 23 nt, Human
uagauaacccuuuaaggcaacau

SEQ ID NO: 186378 - RNA, 19 nt, Human
uagaugcaugaccaugacc

SEQ ID NO: 186379 - RNA, 19 nt, Human
uaggauuauaggugaacua

SEQ ID NO: 186380 - RNA, 21 nt, Human
uaggauuauaggugaacuauu

SEQ ID NO: 186381 - RNA, 23 nt, Human
uauaaacaagacugugccuucag

SEQ ID NO: 186382 - RNA, 19 nt, Human
uauaagaacaaggaaaaga

SEQ ID NO: 186383 - RNA, 21 nt, Human
uauaagaacaaggaaaagaua

SEQ ID NO: 186384 - RNA, 24 nt, Human
uauuaugucaguuuaucagcauua

SEQ ID NO: 186385 - RNA, 23 nt, Human
uauugauauucucuuuacagaag

SEQ ID NO: 186386 - RNA, 18 nt, Human
ucaagaaaauuaacaggc

SEQ ID NO: 186387 - RNA, 18 nt, Human
uccaauaauucauuggca

SEQ ID NO: 186388 - RNA, 19 nt, Human
uccccagaacuuacaaggc

SEQ ID NO: 186389 - RNA, 20 nt, Human
ucccuuggcuauuugcucca

SEQ ID NO: 186390 - RNA, 21 nt, Human
ucccuuggcuauuugcuccag

SEQ ID NO: 186391 - RNA, 20 nt, Human
uccgaagaguuuuguuugug

SEQ ID NO: 186392 - RNA, 21 nt, Human
uccucuuuucuuccacuuguu

SEQ ID NO: 186393 - RNA, 20 nt, Human
ucuaaaauaccagaaaucau

SEQ ID NO: 186394 - RNA, 21 nt, Human
ucuaugguacuaugcuccaaa

SEQ ID NO: 186395 - RNA, 24 nt, Human
ucucuaaauacuacuggcauuuaa

SEQ ID NO: 186396 - RNA, 19 nt, Human
ucugcagucaugcuuccuc

SEQ ID NO: 186397 - RNA, 25 nt, Human
ucuuacaaguuguauauuuagaacc

SEQ ID NO: 186398 - RNA, 21 nt, Human
ucuucaaacuucuaaaauuag

SEQ ID NO: 186399 - RNA, 22 nt, Human
ugaaaauauaauccacaaagag

SEQ ID NO: 186400 - RNA, 20 nt, Human
ugaacuauugcaaagacugc

SEQ ID NO: 186401 - RNA, 23 nt, Human
ugaauuggaaaaacuuuauacca

SEQ ID NO: 186402 - RNA, 19 nt, Human
ugaccaguuacugauuuga

SEQ ID NO: 186403 - RNA, 22 nt, Human
ugaucugcagucaugcuuccuc

SEQ ID NO: 186404 - RNA, 21 nt, Human
ugcaaaggaaccguucccggu

SEQ ID NO: 186405 - RNA, 24 nt, Human
ugcagaaaguauaaacaagacugg

SEQ ID NO: 186406 - RNA, 23 nt, Human
ugcauuauuagaacugcucaguu

SEQ ID NO: 186407 - RNA, 22 nt, Human
ugcccaaauccuuaaaacugcc

SEQ ID NO: 186408 - RNA, 24 nt, Human
ugcuuuuugcuuuauaauaaucug

SEQ ID NO: 186409 - RNA, 25 nt, Human
uggaauauaguagcuacaagaauca

SEQ ID NO: 186410 - RNA, 19 nt, Human
uggcagucagcaggaucac

SEQ ID NO: 186411 - RNA, 22 nt, Human
uggcagucagcaggaucacucu

SEQ ID NO: 186412 - RNA, 22 nt, Human
uggggagagagauugcuucugu

SEQ ID NO: 186413 - RNA, 19 nt, Human
uguaaggcuuuccagaaau

SEQ ID NO: 186414 - RNA, 26 nt, Human
uguuuuaaagucuucaaacuucuaaa

SEQ ID NO: 186415 - RNA, 18 nt, Human
uuacugauuugauuuccc

SEQ ID NO: 186416 - RNA, 20 nt, Human
uuagaugcaugaccaugacc

SEQ ID NO: 186417 - RNA, 21 nt, Human
uuagucuuugcaaaacaauag

SEQ ID NO: 186418 - RNA, 20 nt, Human
uuauuagaacugcucaguug

SEQ ID NO: 186419 - RNA, 24 nt, Human
uucacaaggcuaaagauuuacaga

SEQ ID NO: 186420 - RNA, 23 nt, Human
uucuuaauuacaaaccuuugcug

SEQ ID NO: 186421 - RNA, 20 nt, Human
uugaaacauuucauugauuu

SEQ ID NO: 186422 - RNA, 18 nt, Human
uugcuuuauaauaaucug

SEQ ID NO: 186423 - RNA, 21 nt, Human
uuuaaagucuucaaacuucua

SEQ ID NO: 186424 - RNA, 25 nt, Human
uuucuuauuuuaccauuuccgaaga

SEQ ID NO: 186425 - RNA, 28 nt, Human
aaaauaccaagguaaauaaauacaagca

SEQ ID NO: 186426 - RNA, 18 nt, Human
aaacaucuguagaccaug

SEQ ID NO: 186427 - RNA, 21 nt, Human
aaccccuggcugcaguuuucc

SEQ ID NO: 186428 - RNA, 27 nt, Human
aagaaagaaagaaauaaugaccucuag

SEQ ID NO: 186429 - RNA, 26 nt, Human
aagguaaauaaauacaagcaggguca

SEQ ID NO: 186430 - RNA, 21 nt, Human
acccaggauuucagaggucuu

SEQ ID NO: 186431 - RNA, 24 nt, Human
acccuaucacacacccaaacaggg

SEQ ID NO: 186432 - RNA, 23 nt, Human
agaaaauccuuuacccaggauuu

SEQ ID NO: 186433 - RNA, 23 nt, Human
agaaagaaauaaugaccucuagu

SEQ ID NO: 186434 - RNA, 18 nt, Human
agaaagccacauuuuacu

SEQ ID NO: 186435 - RNA, 24 nt, Human
agauggauaagagucuuccaagug

SEQ ID NO: 186436 - RNA, 19 nt, Human
agcuaggagguaaggccag

SEQ ID NO: 186437 - RNA, 23 nt, Human
agguaaauaaauacaagcagggu

SEQ ID NO: 186438 - RNA, 23 nt, Human
aguuacuaaaagaguagauacaa

SEQ ID NO: 186439 - RNA, 19 nt, Human
auccaacacuuucaauaga

SEQ ID NO: 186440 - RNA, 24 nt, Human
augaaacaaucucuccuuucagau

SEQ ID NO: 186441 - RNA, 24 nt, Human
caaaagaaaacaaaaagcccuuca

SEQ ID NO: 186442 - RNA, 25 nt, Human
caagaaaaaauaccaagguaaauaa

SEQ ID NO: 186443 - RNA, 20 nt, Human
cagagcuuaacuacuccuuu

SEQ ID NO: 186444 - RNA, 18 nt, Human
caucaauaaauagaaguu

SEQ ID NO: 186445 - RNA, 23 nt, Human
caucccuuucaaccccuggcugc

SEQ ID NO: 186446 - RNA, 21 nt, Human
cauggaccaagugaugacaac

SEQ ID NO: 186447 - RNA, 19 nt, Human
caugucugucucucaagaa

SEQ ID NO: 186448 - RNA, 19 nt, Human
ccagaaagguaggcaaguu

SEQ ID NO: 186449 - RNA, 21 nt, Human
cccuaucacacacccaaacag

SEQ ID NO: 186450 - RNA, 20 nt, Human
ccuuagucuuuuccaaaaug

SEQ ID NO: 186451 - RNA, 21 nt, Human
cuacggaagucucaucaauaa

SEQ ID NO: 186452 - RNA, 22 nt, Human
cuccuuagucuuuuccaaaaug

SEQ ID NO: 186453 - RNA, 23 nt, Human
gaaaauccuuuacccaggauuuc

SEQ ID NO: 186454 - RNA, 19 nt, Human
gaacccuaucacacaccca

SEQ ID NO: 186455 - RNA, 20 nt, Human
gaagauguagacucuuaucc

SEQ ID NO: 186456 - RNA, 18 nt, Human
gacagcauacagaggagg

SEQ ID NO: 186457 - RNA, 21 nt, Human
gacccacuucaguuccucaga

SEQ ID NO: 186458 - RNA, 20 nt, Human
gaggaggguggggcaggggg

SEQ ID NO: 186459 - RNA, 21 nt, Human
gaguagauacaaaggucagga

SEQ ID NO: 186460 - RNA, 23 nt, Human
gaguugggcguuuuuuuuuucuu

SEQ ID NO: 186461 - RNA, 19 nt, Human
gauaagagucuuccaagug

SEQ ID NO: 186462 - RNA, 24 nt, Human
ggccauggaagaaaacgugggcuu

SEQ ID NO: 186463 - RNA, 23 nt, Human
guauuaugggagauaccaagaaa

SEQ ID NO: 186464 - RNA, 19 nt, Human
guauuuuuucuagaagaug

SEQ ID NO: 186465 - RNA, 23 nt, Human
uaaaagaguagauacaaagguca

SEQ ID NO: 186466 - RNA, 18 nt, Human
uaacacagcauucucaca

SEQ ID NO: 186467 - RNA, 26 nt, Human
uaccaauaaacauauauacaaacaaa

SEQ ID NO: 186468 - RNA, 22 nt, Human
uauagcuaacuagaaaaggggg

SEQ ID NO: 186469 - RNA, 21 nt, Human
uauauacaaacaaaagaaaac

SEQ ID NO: 186470 - RNA, 21 nt, Human
ucaggaaguaauuacaaugca

SEQ ID NO: 186471 - RNA, 26 nt, Human
uccaacacuuucaauagauguguuga

SEQ ID NO: 186472 - RNA, 20 nt, Human
ucuucaagucugcauccccu

SEQ ID NO: 186473 - RNA, 25 nt, Human
ucuuccaaguguaccagggggaaau

SEQ ID NO: 186474 - RNA, 25 nt, Human
ucuugaaauuaaaaaaaaaaaaaag

SEQ ID NO: 186475 - RNA, 24 nt, Human
ugaaauuaaaaaaaaaaaaaagaa

SEQ ID NO: 186476 - RNA, 25 nt, Human
ugaauuguacacacuuaagguguaa

SEQ ID NO: 186477 - RNA, 23 nt, Human
ugacccacuucaguuccucagac

SEQ ID NO: 186478 - RNA, 19 nt, Human
ugagaacccuaucacacac

SEQ ID NO: 186479 - RNA, 23 nt, Human
ugagaacccuaucacacacccaa

SEQ ID NO: 186480 - RNA, 18 nt, Human
ugagaagguguuuggagg

SEQ ID NO: 186481 - RNA, 22 nt, Human
ugagaagguguuuggaggggag

SEQ ID NO: 186482 - RNA, 23 nt, Human
ugagaagguguuuggaggggagg

SEQ ID NO: 186483 - RNA, 21 nt, Human
ugaggaggguggggcaggggg

SEQ ID NO: 186484 - RNA, 25 nt, Human
ugcaagaaaaaauaccaagguaaau

SEQ ID NO: 186485 - RNA, 21 nt, Human
ugggcguuuuuuuuuucuuuc

SEQ ID NO: 186486 - RNA, 21 nt, Human
uggggcagggggauagggguu

SEQ ID NO: 186487 - RNA, 22 nt, Human
uggggcagggggauagggguuc

SEQ ID NO: 186488 - RNA, 18 nt, Human
uggguuugaggugauggu

SEQ ID NO: 186489 - RNA, 22 nt, Human
uuaacauccugcauuuauccaa

SEQ ID NO: 186490 - RNA, 21 nt, Human
uucaagagauggauaaguagc

SEQ ID NO: 186491 - RNA, 21 nt, Human
uucuccuuagucuuuuccaaa

SEQ ID NO: 186492 - RNA, 24 nt, Human
uucuccuuagucuuuuccaaaaug

SEQ ID NO: 186493 - RNA, 20 nt, Human
uuggguuugaggugauggug

SEQ ID NO: 186494 - RNA, 22 nt, Human
uuuaacauuuuuagcggaugca

SEQ ID NO: 186495 - RNA, 18 nt, Human
uuuccacauuaucuacgg

SEQ ID NO: 186496 - RNA, 20 nt, Human
uuucuagaagauguagacuc

SEQ ID NO: 186497 - RNA, 21 nt, Human
cuucaaguugaaacagguuuc

SEQ ID NO: 186498 - RNA, 23 nt, Human
uacggugucuucaaguugaaaca

SEQ ID NO: 186499 - RNA, 18 nt, Human
ugugguggcuggcugucc

SEQ ID NO: 186500 - RNA, 23 nt, Human
uuccugguuugauuucuuucauu

SEQ ID NO: 186501 - RNA, 19 nt, Human
accuaguauuuuggaguua

SEQ ID NO: 186502 - RNA, 19 nt, Human
aguuacaugcccaaacaua

SEQ ID NO: 186503 - RNA, 24 nt, Human
gaggaagaaaccaguacauucuug

SEQ ID NO: 186504 - RNA, 23 nt, Human
uaacuggcuuacagauucaucug

SEQ ID NO: 186505 - RNA, 23 nt, Human
ucaaaugcagacaacuuguugcu

SEQ ID NO: 186506 - RNA, 25 nt, Human
ucgucccauucuuuucacauacucu

SEQ ID NO: 186507 - RNA, 18 nt, Human
ugaccagugaucaaaugc

SEQ ID NO: 186508 - RNA, 24 nt, Human
uuuuuacaaucugaccagugauca

SEQ ID NO: 186509 - RNA, 18 nt, Human
aaaauaucccccacaccc

SEQ ID NO: 186510 - RNA, 27 nt, Human
aaaauaucccccacacccuccaaaagc

SEQ ID NO: 186511 - RNA, 23 nt, Human
aaaccaaaacaaaauauccccca

SEQ ID NO: 186512 - RNA, 19 nt, Human
aacagugguugaucacuuu

SEQ ID NO: 186513 - RNA, 21 nt, Human
aaccaaaacaaaauauccccc

SEQ ID NO: 186514 - RNA, 20 nt, Human
aaccugcagaaaaaccaaaa

SEQ ID NO: 186515 - RNA, 22 nt, Human
aagagccccauagaaggaacag

SEQ ID NO: 186516 - RNA, 18 nt, Human
aagcaacaagaaacccuc

SEQ ID NO: 186517 - RNA, 22 nt, Human
acaaaauaucccccacacccuc

SEQ ID NO: 186518 - RNA, 26 nt, Human
acaaaauaucccccacacccuccaaa

SEQ ID NO: 186519 - RNA, 19 nt, Human
acagucuucccagccacau

SEQ ID NO: 186520 - RNA, 18 nt, Human
acagugcagagaacaugg

SEQ ID NO: 186521 - RNA, 22 nt, Human
acccucaugugauccauuccau

SEQ ID NO: 186522 - RNA, 19 nt, Human
accuuggaaucccacccac

SEQ ID NO: 186523 - RNA, 18 nt, Human
agacauuagagcaagagc

SEQ ID NO: 186524 - RNA, 18 nt, Human
agaggauuuggagauaca

SEQ ID NO: 186525 - RNA, 18 nt, Human
agccgguggcaaaguccc

SEQ ID NO: 186526 - RNA, 24 nt, Human
agcggucaguccucccccggcccc

SEQ ID NO: 186527 - RNA, 23 nt, Human
aggauuuccaaauuuccuggcug

SEQ ID NO: 186528 - RNA, 22 nt, Human
agggacugcugccccaagccag

SEQ ID NO: 186529 - RNA, 21 nt, Human
aguaucugcagaaggacccac

SEQ ID NO: 186530 - RNA, 22 nt, Human
agugcagagaacaugggggcuu

SEQ ID NO: 186531 - RNA, 19 nt, Human
aguguaggaacagggcgag

SEQ ID NO: 186532 - RNA, 25 nt, Human
auggaaccugcagaaaaaccaaaac

SEQ ID NO: 186533 - RNA, 22 nt, Human
caaaagcaacaagaaacccuca

SEQ ID NO: 186534 - RNA, 22 nt, Human
caaaauaucccccacacccucc

SEQ ID NO: 186535 - RNA, 20 nt, Human
caaaguccccauuuguccuc

SEQ ID NO: 186536 - RNA, 22 nt, Human
caagaaacccucaugugaucca

SEQ ID NO: 186537 - RNA, 23 nt, Human
caagaggcuaccugggguccagc

SEQ ID NO: 186538 - RNA, 24 nt, Human
caagaggcuaccugggguccagca

SEQ ID NO: 186539 - RNA, 20 nt, Human
cacacccuccaaaagcaaca

SEQ ID NO: 186540 - RNA, 30 nt, Human
caccccacgauucaguugggccucaccuuu

SEQ ID NO: 186541 - RNA, 23 nt, Human
caccuuggaaucccacccacaac

SEQ ID NO: 186542 - RNA, 25 nt, Human
cacuucaucacccagagggccucuu

SEQ ID NO: 186543 - RNA, 18 nt, Human
cagaaaaaccaaaacaaa

SEQ ID NO: 186544 - RNA, 19 nt, Human
caguccucccccggccccc

SEQ ID NO: 186545 - RNA, 23 nt, Human
cauuuuucuuuaaagguuaaagg

SEQ ID NO: 186546 - RNA, 22 nt, Human
ccaaaacaaaauaucccccaca

SEQ ID NO: 186547 - RNA, 25 nt, Human
ccaacaccagucuggcccaccagcu

SEQ ID NO: 186548 - RNA, 19 nt, Human
ccacccacaaccuccuuaa

SEQ ID NO: 186549 - RNA, 24 nt, Human
ccagcuggccuucggcccgaguca

SEQ ID NO: 186550 - RNA, 21 nt, Human
ccagggucccuccaccucuac

SEQ ID NO: 186551 - RNA, 21 nt, Human
ccauagcaacggaaaggaccc

SEQ ID NO: 186552 - RNA, 19 nt, Human
cccacaaccuccuuaacuc

SEQ ID NO: 186553 - RNA, 24 nt, Human
ccccacacccuccaaaagcaacaa

SEQ ID NO: 186554 - RNA, 20 nt, Human
cccccacacccuccaaaagc

SEQ ID NO: 186555 - RNA, 22 nt, Human
ccccgcggccccgcagcgccga

SEQ ID NO: 186556 - RNA, 20 nt, Human
ccccugaagcccugcuaggu

SEQ ID NO: 186557 - RNA, 20 nt, Human
ccccuuggcuaggauuucca

SEQ ID NO: 186558 - RNA, 19 nt, Human
ccgcuccacgcacgcccgc

SEQ ID NO: 186559 - RNA, 21 nt, Human
ccggcccccaaacacuaaccu

SEQ ID NO: 186560 - RNA, 23 nt, Human
ccucaacgcaacggucaucucca

SEQ ID NO: 186561 - RNA, 21 nt, Human
ccuccaaccaacaccagucug

SEQ ID NO: 186562 - RNA, 21 nt, Human
cgaugcuagagguuaugcuuc

SEQ ID NO: 186563 - RNA, 22 nt, Human
cgcuccacgcacgcccgccugc

SEQ ID NO: 186564 - RNA, 18 nt, Human
cggaaaggacccgaggug

SEQ ID NO: 186565 - RNA, 20 nt, Human
cguggugccugccuuccaac

SEQ ID NO: 186566 - RNA, 19 nt, Human
cucccccggcccccaaaca

SEQ ID NO: 186567 - RNA, 21 nt, Human
cugccccaagccagaauauuu

SEQ ID NO: 186568 - RNA, 20 nt, Human
cuggagaccccauuggagcu

SEQ ID NO: 186569 - RNA, 24 nt, Human
cuggcccaccagcugguccccugg

SEQ ID NO: 186570 - RNA, 20 nt, Human
cuguguguguggcaggggag

SEQ ID NO: 186571 - RNA, 23 nt, Human
cuguguguguggcaggggagggg

SEQ ID NO: 186572 - RNA, 24 nt, Human
gaaccugcagaaaaaccaaaacaa

SEQ ID NO: 186573 - RNA, 24 nt, Human
gagaacaugggggcuuugaauggc

SEQ ID NO: 186574 - RNA, 19 nt, Human
gaguaucugcagaaggacc

SEQ ID NO: 186575 - RNA, 21 nt, Human
gaugaucaagggaagaaggga

SEQ ID NO: 186576 - RNA, 18 nt, Human
gcaacggucaucuccaag

SEQ ID NO: 186577 - RNA, 22 nt, Human
gcccccgcuccacgcacgcccg

SEQ ID NO: 186578 - RNA, 18 nt, Human
gcggucaguccucccccg

SEQ ID NO: 186579 - RNA, 22 nt, Human
ggaacagugguugaucacuuuc

SEQ ID NO: 186580 - RNA, 20 nt, Human
ggaaucccacccacaaccuu

SEQ ID NO: 186581 - RNA, 19 nt, Human
ggcccccaaacacuaaccu

SEQ ID NO: 186582 - RNA, 22 nt, Human
ggccucuucuuuggcacaugcc

SEQ ID NO: 186583 - RNA, 23 nt, Human
ggcugugaggcggccugguucgg

SEQ ID NO: 186584 - RNA, 18 nt, Human
gggaaggggcggggccug

SEQ ID NO: 186585 - RNA, 25 nt, Human
gggagccccccaccuccaaccaaca

SEQ ID NO: 186586 - RNA, 18 nt, Human
ggggagaggugauaagag

SEQ ID NO: 186587 - RNA, 20 nt, Human
guaucugcagaaggacccac

SEQ ID NO: 186588 - RNA, 18 nt, Human
gugcaaaccaccaggcaa

SEQ ID NO: 186589 - RNA, 20 nt, Human
guggcaggggaggggcgggc

SEQ ID NO: 186590 - RNA, 21 nt, Human
uaacaaaggaaugacuugcuc

SEQ ID NO: 186591 - RNA, 19 nt, Human
uacacgaaauccccuuggc

SEQ ID NO: 186592 - RNA, 24 nt, Human
uacacgaaauccccuuggcuagga

SEQ ID NO: 186593 - RNA, 24 nt, Human
uacccccagaggaugaaacagucu

SEQ ID NO: 186594 - RNA, 23 nt, Human
uagacauuagagcaagagcccca

SEQ ID NO: 186595 - RNA, 23 nt, Human
uaucccccacacccuccaaaagc

SEQ ID NO: 186596 - RNA, 24 nt, Human
ucaggacagauggaaaccaugaca

SEQ ID NO: 186597 - RNA, 24 nt, Human
ucaguccucccccggcccccaaac

SEQ ID NO: 186598 - RNA, 24 nt, Human
ucaguugggccucaccuuggaauc

SEQ ID NO: 186599 - RNA, 20 nt, Human
uccaaaagcaacaagaaacc

SEQ ID NO: 186600 - RNA, 22 nt, Human
uccaagaggcuaccuggggucc

SEQ ID NO: 186601 - RNA, 20 nt, Human
uccacgcacgcccgccugcg

SEQ ID NO: 186602 - RNA, 21 nt, Human
uccacgcacgcccgccugcgg

SEQ ID NO: 186603 - RNA, 22 nt, Human
ucccggaggggcuuucagcugg

SEQ ID NO: 186604 - RNA, 23 nt, Human
ucccggaggggcuuucagcugga

SEQ ID NO: 186605 - RNA, 19 nt, Human
uccucccccggcccccaaa

SEQ ID NO: 186606 - RNA, 22 nt, Human
ucucaccauagacauuagagca

SEQ ID NO: 186607 - RNA, 21 nt, Human
ucucugcauccuagugggaac

SEQ ID NO: 186608 - RNA, 18 nt, Human
ucuguucuacccccagag

SEQ ID NO: 186609 - RNA, 18 nt, Human
ugaaaugugcaaaccacc

SEQ ID NO: 186610 - RNA, 24 nt, Human
ugacagaaacaaugggcuuggaaa

SEQ ID NO: 186611 - RNA, 26 nt, Human
ugcagaaaaaccaaaacaaaauaucc

SEQ ID NO: 186612 - RNA, 19 nt, Human
ugcagaaggacccacccuc

SEQ ID NO: 186613 - RNA, 23 nt, Human
ugccagggucccuccaccucuac

SEQ ID NO: 186614 - RNA, 21 nt, Human
ugccguggugccugccuucca

SEQ ID NO: 186615 - RNA, 21 nt, Human
ugcggcgcggccgcggccccc

SEQ ID NO: 186616 - RNA, 23 nt, Human
ugcugccccaagccagaauauuu

SEQ ID NO: 186617 - RNA, 19 nt, Human
uggaaucccacccacaacc

SEQ ID NO: 186618 - RNA, 22 nt, Human
uggaaucccacccacaaccucc

SEQ ID NO: 186619 - RNA, 21 nt, Human
uggcaaaguccccauuugucc

SEQ ID NO: 186620 - RNA, 20 nt, Human
uggccaaacagugcagagaa

SEQ ID NO: 186621 - RNA, 18 nt, Human
uguguguggcaggggagg

SEQ ID NO: 186622 - RNA, 22 nt, Human
uguguguggcaggggaggggcg

SEQ ID NO: 186623 - RNA, 19 nt, Human
uguucuacccccagaggau

SEQ ID NO: 186624 - RNA, 22 nt, Human
uucauggaaccugcagaaaaac

SEQ ID NO: 186625 - RNA, 18 nt, Human
uucuuuggcacaugccag

SEQ ID NO: 186626 - RNA, 19 nt, Human
uuuccaaauuuccuggcug

SEQ ID NO: 186627 - RNA, 21 nt, Human
uuugaauggccgagauguucg

SEQ ID NO: 186628 - RNA, 24 nt, Human
uuuuuuuuuuuuugagaaauauca

SEQ ID NO: 186629 - RNA, 18 nt, Human
uuuuuuuuuuuuuuuuug

SEQ ID NO: 186630 - RNA, 23 nt, Human
aagucucuugagguugcaggaau

SEQ ID NO: 186631 - RNA, 19 nt, Human
aauccgcccgccucuccuc

SEQ ID NO: 186632 - RNA, 20 nt, Human
aggaaucuccagagaaacau

SEQ ID NO: 186633 - RNA, 23 nt, Human
aggagcaagauccaggccugagc

SEQ ID NO: 186634 - RNA, 20 nt, Human
agggggaggaggagccugga

SEQ ID NO: 186635 - RNA, 22 nt, Human
auccgcccgccucuccucgcca

SEQ ID NO: 186636 - RNA, 21 nt, Human
cacccuuguuccucacagagg

SEQ ID NO: 186637 - RNA, 24 nt, Human
cacucuucagggagguuccccacc

SEQ ID NO: 186638 - RNA, 21 nt, Human
cagccaccaccccgagaacac

SEQ ID NO: 186639 - RNA, 19 nt, Human
caugacacccacccaaaca

SEQ ID NO: 186640 - RNA, 18 nt, Human
ccaggcucugguuggguc

SEQ ID NO: 186641 - RNA, 21 nt, Human
ccaugacacccacccaaacac

SEQ ID NO: 186642 - RNA, 19 nt, Human
cccagccaccaccccgaga

SEQ ID NO: 186643 - RNA, 21 nt, Human
cccaugacacccacccaaaca

SEQ ID NO: 186644 - RNA, 21 nt, Human
cccuccccaaauccgcccgcc

SEQ ID NO: 186645 - RNA, 19 nt, Human
ccgccgaggugauccuggc

SEQ ID NO: 186646 - RNA, 20 nt, Human
ccuccaggcugagccgacuc

SEQ ID NO: 186647 - RNA, 18 nt, Human
cgccgaggugauccuggc

SEQ ID NO: 186648 - RNA, 19 nt, Human
cuccaggcugagccgacuc

SEQ ID NO: 186649 - RNA, 20 nt, Human
cugccagggggaggaggagc

SEQ ID NO: 186650 - RNA, 20 nt, Human
gcccgccucuccucgccacc

SEQ ID NO: 186651 - RNA, 18 nt, Human
ggaaucuccagagaaaca

SEQ ID NO: 186652 - RNA, 19 nt, Human
ggccagguccucagggccc

SEQ ID NO: 186653 - RNA, 20 nt, Human
uaaagcagaaauguauuuau

SEQ ID NO: 186654 - RNA, 18 nt, Human
uauuuggcuggaguguga

SEQ ID NO: 186655 - RNA, 23 nt, Human
uccagagaaacauaggcgcugcc

SEQ ID NO: 186656 - RNA, 18 nt, Human
uccccaaauccgcccgcc

SEQ ID NO: 186657 - RNA, 22 nt, Human
ucguaccugcccggugaccagg

SEQ ID NO: 186658 - RNA, 21 nt, Human
ucucuugagguugcaggaauu

SEQ ID NO: 186659 - RNA, 18 nt, Human
ugacacccacccaaacac

SEQ ID NO: 186660 - RNA, 21 nt, Human
ugauccuggcaggaggcuggg

SEQ ID NO: 186661 - RNA, 23 nt, Human
ugcccagccaccaccccgagaac

SEQ ID NO: 186662 - RNA, 24 nt, Human
ugcccggggccagguccucagggc

SEQ ID NO: 186663 - RNA, 19 nt, Human
uggcuggagugugaccgcc

SEQ ID NO: 186664 - RNA, 23 nt, Human
uggggacacccaugacacccagc

SEQ ID NO: 186665 - RNA, 21 nt, Human
uggguggggacacccaugaca

SEQ ID NO: 186666 - RNA, 24 nt, Human
uuuuuuuuuuuuuuuuuaauaaag

SEQ ID NO: 186667 - RNA, 21 nt, Human
aaauauacacccucaaagucu

SEQ ID NO: 186668 - RNA, 21 nt, Human
accaaagacaaauccaaucca

SEQ ID NO: 186669 - RNA, 18 nt, Human
agccagcagcccgccuug

SEQ ID NO: 186670 - RNA, 18 nt, Human
agccgccgccgccgcgcc

SEQ ID NO: 186671 - RNA, 24 nt, Human
caauccacccgcccggggccgccu

SEQ ID NO: 186672 - RNA, 24 nt, Human
cagccccaccagagcaggggcucc

SEQ ID NO: 186673 - RNA, 20 nt, Human
cagucggcggucagcaacgg

SEQ ID NO: 186674 - RNA, 19 nt, Human
ccacuguggacuuggaggc

SEQ ID NO: 186675 - RNA, 18 nt, Human
cccaagaguuucccccuc

SEQ ID NO: 186676 - RNA, 21 nt, Human
ccgccgccgccgcgccgccgc

SEQ ID NO: 186677 - RNA, 23 nt, Human
ccgccgccgccgcgccgccgcuu

SEQ ID NO: 186678 - RNA, 20 nt, Human
ccgccgccgcgccgccgcuu

SEQ ID NO: 186679 - RNA, 22 nt, Human
ccgccucggaaaacagaccuga

SEQ ID NO: 186680 - RNA, 21 nt, Human
ccgcgccgccgcuucuuccuc

SEQ ID NO: 186681 - RNA, 19 nt, Human
ccgcugcucgggcugccgc

SEQ ID NO: 186682 - RNA, 21 nt, Human
ccgcugcugccggagccgggg

SEQ ID NO: 186683 - RNA, 19 nt, Human
ccggcucccggggucuccc

SEQ ID NO: 186684 - RNA, 23 nt, Human
cgccgcugcugccggagccgggg

SEQ ID NO: 186685 - RNA, 22 nt, Human
cgccucggaaaacagaccugag

SEQ ID NO: 186686 - RNA, 24 nt, Human
cggcggggcugucagcgccugggg

SEQ ID NO: 186687 - RNA, 20 nt, Human
cggcucccggggucuccccu

SEQ ID NO: 186688 - RNA, 22 nt, Human
cuccccgcuaaaaugccuugga

SEQ ID NO: 186689 - RNA, 22 nt, Human
cugagacaguagagaaauuuac

SEQ ID NO: 186690 - RNA, 28 nt, Human
gaaaauauacacccucaaagucucacuu

SEQ ID NO: 186691 - RNA, 22 nt, Human
gccgccgcugcugccggagccg

SEQ ID NO: 186692 - RNA, 25 nt, Human
gggcugccgccgcugcugccggagc

SEQ ID NO: 186693 - RNA, 21 nt, Human
gggugcugccgcugcugcugc

SEQ ID NO: 186694 - RNA, 20 nt, Human
ucaccaaagacaaauccaau

SEQ ID NO: 186695 - RNA, 19 nt, Human
uccaauccacccgcccggg

SEQ ID NO: 186696 - RNA, 20 nt, Human
uccacuacuuccacuucuaa

SEQ ID NO: 186697 - RNA, 19 nt, Human
uccacuguggacuuggagg

SEQ ID NO: 186698 - RNA, 24 nt, Human
ucgacgggauggacggccuccuuc

SEQ ID NO: 186699 - RNA, 18 nt, Human
ucggcggucagcaacgga

SEQ ID NO: 186700 - RNA, 21 nt, Human
ucgggcugccgccgcugcugc

SEQ ID NO: 186701 - RNA, 24 nt, Human
ucuggaagucuugagucacauuuu

SEQ ID NO: 186702 - RNA, 23 nt, Human
ugagucacauuuuuuuuuuuuuu

SEQ ID NO: 186703 - RNA, 18 nt, Human
ugcugccgcugcugcugc

SEQ ID NO: 186704 - RNA, 18 nt, Human
uggaaauuucuuugagaa

SEQ ID NO: 186705 - RNA, 24 nt, Human
uguucaccaaagacaaauccaauc

SEQ ID NO: 186706 - RNA, 18 nt, Human
uugaggcucuggaagucu

SEQ ID NO: 186707 - RNA, 19 nt, Human
uuuuuuuuuugauaacccc

SEQ ID NO: 186708 - RNA, 21 nt, Human
acagagagcacgcaccccaca

SEQ ID NO: 186709 - RNA, 22 nt, Human
acagggcccuguaaucccaugc

SEQ ID NO: 186710 - RNA, 21 nt, Human
acagugcugaaggcucaggug

SEQ ID NO: 186711 - RNA, 22 nt, Human
accuuugucccagggauggccc

SEQ ID NO: 186712 - RNA, 18 nt, Human
acggaggacacuggggac

SEQ ID NO: 186713 - RNA, 19 nt, Human
agaagggacagcuuugggc

SEQ ID NO: 186714 - RNA, 22 nt, Human
agaggccgggguggcagcacag

SEQ ID NO: 186715 - RNA, 23 nt, Human
aggcagaggcagaccuaucuggg

SEQ ID NO: 186716 - RNA, 23 nt, Human
agggaccaggcugugggagcugg

SEQ ID NO: 186717 - RNA, 21 nt, Human
agggauggcccaggcccugcc

SEQ ID NO: 186718 - RNA, 20 nt, Human
agugcugaaggcucaggugu

SEQ ID NO: 186719 - RNA, 24 nt, Human
caaaacgaguaauaaaaauuggcu

SEQ ID NO: 186720 - RNA, 24 nt, Human
caacugcuggugggggccucgggc

SEQ ID NO: 186721 - RNA, 22 nt, Human
cacacagagagcacgcacccca

SEQ ID NO: 186722 - RNA, 21 nt, Human
cacagccucgcccuauccccu

SEQ ID NO: 186723 - RNA, 21 nt, Human
cacaggccuagggcauacaga

SEQ ID NO: 186724 - RNA, 23 nt, Human
caccccacaggcgcacacaggaa

SEQ ID NO: 186725 - RNA, 21 nt, Human
cacggagaagagcugaaggga

SEQ ID NO: 186726 - RNA, 18 nt, Human
cagacccagcgcugacaa

SEQ ID NO: 186727 - RNA, 19 nt, Human
cagagcccaguaucaggga

SEQ ID NO: 186728 - RNA, 24 nt, Human
cagcacagugcugaaggcucaggu

SEQ ID NO: 186729 - RNA, 20 nt, Human
cagccugagcccagggcagc

SEQ ID NO: 186730 - RNA, 19 nt, Human
caggacagagcccaguauc

SEQ ID NO: 186731 - RNA, 19 nt, Human
caggagccaaggcgggggc

SEQ ID NO: 186732 - RNA, 23 nt, Human
cagugcugaaggcucagguguga

SEQ ID NO: 186733 - RNA, 28 nt, Human
ccacggagaagagcugaagggacgcacc

SEQ ID NO: 186734 - RNA, 20 nt, Human
ccagacccagcgcugacaag

SEQ ID NO: 186735 - RNA, 22 nt, Human
ccagacccagcgcugacaagca

SEQ ID NO: 186736 - RNA, 23 nt, Human
ccagacccagcgcugacaagcac

SEQ ID NO: 186737 - RNA, 26 nt, Human
ccagacccagcgcugacaagcacuga

SEQ ID NO: 186738 - RNA, 24 nt, Human
ccagggcugggaccuggggcacag

SEQ ID NO: 186739 - RNA, 18 nt, Human
cccacccccuccuagggc

SEQ ID NO: 186740 - RNA, 24 nt, Human
ccccagacccagcgcugacaagca

SEQ ID NO: 186741 - RNA, 20 nt, Human
cccccaggagccaaggcggg

SEQ ID NO: 186742 - RNA, 19 nt, Human
cccgcucuccagccagggc

SEQ ID NO: 186743 - RNA, 18 nt, Human
cccuauccccuucaccca

SEQ ID NO: 186744 - RNA, 20 nt, Human
ccgcucuccagccagggcug

SEQ ID NO: 186745 - RNA, 25 nt, Human
ccuagggcugggcuugggcguuucu

SEQ ID NO: 186746 - RNA, 22 nt, Human
ccucgcccuauccccuucaccc

SEQ ID NO: 186747 - RNA, 22 nt, Human
ccucugccacgucccgcucucc

SEQ ID NO: 186748 - RNA, 18 nt, Human
ccuuugucccagggaugg

SEQ ID NO: 186749 - RNA, 20 nt, Human
cgccaggucugcggcgggaa

SEQ ID NO: 186750 - RNA, 20 nt, Human
cguacaaauacauaaauaca

SEQ ID NO: 186751 - RNA, 19 nt, Human
cuagggcugggcuugggcg

SEQ ID NO: 186752 - RNA, 19 nt, Human
cugcuaccgccaacugcug

SEQ ID NO: 186753 - RNA, 18 nt, Human
cugggcuugggcguuucu

SEQ ID NO: 186754 - RNA, 18 nt, Human
gacuugaguggacaaugg

SEQ ID NO: 186755 - RNA, 22 nt, Human
gagcuccacggagaagagcuga

SEQ ID NO: 186756 - RNA, 20 nt, Human
gaggguugaccagggaugcc

SEQ ID NO: 186757 - RNA, 21 nt, Human
gccccagacccagcgcugaca

SEQ ID NO: 186758 - RNA, 23 nt, Human
gcccuguaaucccaugcuacccu

SEQ ID NO: 186759 - RNA, 20 nt, Human
gccucgcccuauccccuuca

SEQ ID NO: 186760 - RNA, 23 nt, Human
gcuggaaggcagaggcagaccua

SEQ ID NO: 186761 - RNA, 19 nt, Human
gcugugggagcuggaaggc

SEQ ID NO: 186762 - RNA, 20 nt, Human
ggagcuggaaggcagaggca

SEQ ID NO: 186763 - RNA, 18 nt, Human
ggauggcccaggcccugc

SEQ ID NO: 186764 - RNA, 19 nt, Human
ggcugauggguaucacagg

SEQ ID NO: 186765 - RNA, 21 nt, Human
ggcuugggcguuucugaaaga

SEQ ID NO: 186766 - RNA, 22 nt, Human
gggcguuucugaaagagguguc

SEQ ID NO: 186767 - RNA, 21 nt, Human
uaagaaugcucuggucgcuau

SEQ ID NO: 186768 - RNA, 20 nt, Human
uacagaaagccccgagcucc

SEQ ID NO: 186769 - RNA, 21 nt, Human
uacagaaagccccgagcucca

SEQ ID NO: 186770 - RNA, 18 nt, Human
uacagaggccccagaccc

SEQ ID NO: 186771 - RNA, 20 nt, Human
uagcugcuaccgccaacugc

SEQ ID NO: 186772 - RNA, 21 nt, Human
uaucagggaccaggcuguggg

SEQ ID NO: 186773 - RNA, 23 nt, Human
ucacccacacagguacacacaga

SEQ ID NO: 186774 - RNA, 18 nt, Human
uccggaauguuugagggu

SEQ ID NO: 186775 - RNA, 21 nt, Human
uccuagggcugggcuugggcg

SEQ ID NO: 186776 - RNA, 23 nt, Human
ucgcccuauccccuucacccaca

SEQ ID NO: 186777 - RNA, 19 nt, Human
ucucuggccacuuuggcac

SEQ ID NO: 186778 - RNA, 21 nt, Human
ucugggaagggccagggcugg

SEQ ID NO: 186779 - RNA, 24 nt, Human
ucugggaagggccagggcugggac

SEQ ID NO: 186780 - RNA, 25 nt, Human
ucuguguuccccaggccacgacuug

SEQ ID NO: 186781 - RNA, 23 nt, Human
ugaggguugaccagggaugcccc

SEQ ID NO: 186782 - RNA, 26 nt, Human
uggaaggcagaggcagaccuaucugg

SEQ ID NO: 186783 - RNA, 20 nt, Human
uggacaauggggaagaucac

SEQ ID NO: 186784 - RNA, 18 nt, Human
uggcacaggccuagggca

SEQ ID NO: 186785 - RNA, 21 nt, Human
uggcagcacagugcugaaggc

SEQ ID NO: 186786 - RNA, 19 nt, Human
uggcaguggcuccucugcc

SEQ ID NO: 186787 - RNA, 21 nt, Human
uggcugcccccaggagccaag

SEQ ID NO: 186788 - RNA, 18 nt, Human
ugggaagggccagggcug

SEQ ID NO: 186789 - RNA, 18 nt, Human
ugggaccaggauggccac

SEQ ID NO: 186790 - RNA, 19 nt, Human
ugggaccaggauggccauc

SEQ ID NO: 186791 - RNA, 22 nt, Human
ugggccccagagguagcagccu

SEQ ID NO: 186792 - RNA, 22 nt, Human
ugugggagcuggaaggcagagg

SEQ ID NO: 186793 - RNA, 18 nt, Human
uuaaauauggaaaaaaca

SEQ ID NO: 186794 - RNA, 18 nt, Human
uuccccaggccacgacuu

SEQ ID NO: 186795 - RNA, 19 nt, Human
uuggcacaggccuagggca

SEQ ID NO: 186796 - RNA, 23 nt, Human
uuucugaaagaggugucugcagg

SEQ ID NO: 186797 - RNA, 22 nt, Human
uuuggcacaggccuagggcaua

SEQ ID NO: 186798 - RNA, 22 nt, Human
aaaaaaagauauaaacaaagaa

SEQ ID NO: 186799 - RNA, 19 nt, Human
aaagugcuggaauugcagg

SEQ ID NO: 186800 - RNA, 24 nt, Human
aaagugcuggaauugcaggcauga

SEQ ID NO: 186801 - RNA, 19 nt, Human
aaauagccaagagaccgag

SEQ ID NO: 186802 - RNA, 19 nt, Human
aaaugcucauuuucugggc

SEQ ID NO: 186803 - RNA, 22 nt, Human
aagaaagaaaaagaaaauaaaa

SEQ ID NO: 186804 - RNA, 26 nt, Human
aagugcuggaauugcaggcaugagcc

SEQ ID NO: 186805 - RNA, 23 nt, Human
aauugcaggcaugagccaccgca

SEQ ID NO: 186806 - RNA, 21 nt, Human
acaccgggcuaauuuuuguau

SEQ ID NO: 186807 - RNA, 24 nt, Human
accucaugauccaucugccuuggc

SEQ ID NO: 186808 - RNA, 25 nt, Human
acgggguuuacaacauguuggccag

SEQ ID NO: 186809 - RNA, 23 nt, Human
acucaacuaaauuuacagaaugc

SEQ ID NO: 186810 - RNA, 19 nt, Human
agccaccgcaccuggccug

SEQ ID NO: 186811 - RNA, 20 nt, Human
agcgaagaaagaugaaggga

SEQ ID NO: 186812 - RNA, 20 nt, Human
aggacuugaaauagccaaga

SEQ ID NO: 186813 - RNA, 20 nt, Human
aggcauuaguuuuuuaaaag

SEQ ID NO: 186814 - RNA, 26 nt, Human
agggaaaaaaagauauaaacaaagaa

SEQ ID NO: 186815 - RNA, 28 nt, Human
agggaaaaaaagauauaaacaaagaaaa

SEQ ID NO: 186816 - RNA, 19 nt, Human
aguauagaagcgaagaaag

SEQ ID NO: 186817 - RNA, 24 nt, Human
agugcaauguugcgaucuuggcuc

SEQ ID NO: 186818 - RNA, 24 nt, Human
auagccaagagaccgagcucccaa

SEQ ID NO: 186819 - RNA, 19 nt, Human
auccaucugccuuggccuc

SEQ ID NO: 186820 - RNA, 24 nt, Human
augauccaucugccuuggccuccc

SEQ ID NO: 186821 - RNA, 19 nt, Human
augguaaaaggcugaugcu

SEQ ID NO: 186822 - RNA, 24 nt, Human
auuuuuguauuuuuaguagagacg

SEQ ID NO: 186823 - RNA, 24 nt, Human
caaagugcuggaauugcaggcaug

SEQ ID NO: 186824 - RNA, 24 nt, Human
caacauguuggccaggcuagucuu

SEQ ID NO: 186825 - RNA, 19 nt, Human
caagagaagccauaagaug

SEQ ID NO: 186826 - RNA, 19 nt, Human
caaggacaagagaagccau

SEQ ID NO: 186827 - RNA, 22 nt, Human
caaguugaagcaauuuguacca

SEQ ID NO: 186828 - RNA, 24 nt, Human
caccacaccgggcuaauuuuugua

SEQ ID NO: 186829 - RNA, 22 nt, Human
caccgcaccuggccuguucaac

SEQ ID NO: 186830 - RNA, 21 nt, Human
cacuacaaccuccgccuccug

SEQ ID NO: 186831 - RNA, 20 nt, Human
caggcaugagccaccgcacc

SEQ ID NO: 186832 - RNA, 24 nt, Human
cauguuggccaggcuagucuugaa

SEQ ID NO: 186833 - RNA, 20 nt, Human
cauucaaaugugcacagcag

SEQ ID NO: 186834 - RNA, 19 nt, Human
ccaaagugcuggaauugca

SEQ ID NO: 186835 - RNA, 24 nt, Human
ccaaagugcuggaauugcaggcau

SEQ ID NO: 186836 - RNA, 23 nt, Human
cccggguaacugggauuauagau

SEQ ID NO: 186837 - RNA, 24 nt, Human
ccgauggcauaugguagugcaagg

SEQ ID NO: 186838 - RNA, 27 nt, Human
ccgccuccuggguucaagcaauucuuu

SEQ ID NO: 186839 - RNA, 24 nt, Human
ccucagugaaaacugagacuuuac

SEQ ID NO: 186840 - RNA, 19 nt, Human
ccuccgccuccuggguuca

SEQ ID NO: 186841 - RNA, 24 nt, Human
ccuccuggguucaagcaauucucc

SEQ ID NO: 186842 - RNA, 21 nt, Human
ccugaccucaugauccaucug

SEQ ID NO: 186843 - RNA, 23 nt, Human
ccuggguucaagcaauucuccug

SEQ ID NO: 186844 - RNA, 24 nt, Human
cgggguuuacaacauguuggccag

SEQ ID NO: 186845 - RNA, 18 nt, Human
cuaagcccauaggucucc

SEQ ID NO: 186846 - RNA, 21 nt, Human
cuaagcccauaggucuccuuc

SEQ ID NO: 186847 - RNA, 21 nt, Human
cuacaaccuccgccuccuggg

SEQ ID NO: 186848 - RNA, 23 nt, Human
cuacaaccuccgccuccuggguu

SEQ ID NO: 186849 - RNA, 24 nt, Human
cuacaaccuccgccuccuggguuc

SEQ ID NO: 186850 - RNA, 21 nt, Human
cuccuggguucaagcaauucu

SEQ ID NO: 186851 - RNA, 18 nt, Human
cucuguuccuaggacuuu

SEQ ID NO: 186852 - RNA, 23 nt, Human
cugccuuggccucccaaagugcu

SEQ ID NO: 186853 - RNA, 23 nt, Human
cugcugcacauuagaaucaccug

SEQ ID NO: 186854 - RNA, 24 nt, Human
cuugcucuugcugcccagccugga

SEQ ID NO: 186855 - RNA, 18 nt, Human
gaaagcacaagagggcug

SEQ ID NO: 186856 - RNA, 20 nt, Human
gaccucaugauccaucugcc

SEQ ID NO: 186857 - RNA, 21 nt, Human
gaccucaugauccaucugccu

SEQ ID NO: 186858 - RNA, 21 nt, Human
gaccucaugauccaucugccu

SEQ ID NO: 186859 - RNA, 24 nt, Human
gaccucaugauccaucugccuugg

SEQ ID NO: 186860 - RNA, 22 nt, Human
gaguggggaucagaaugucuau

SEQ ID NO: 186861 - RNA, 18 nt, Human
gcacagcagugccugcca

SEQ ID NO: 186862 - RNA, 19 nt, Human
gccuuggccucccaaagug

SEQ ID NO: 186863 - RNA, 22 nt, Human
gccuuggccucccaaagugcug

SEQ ID NO: 186864 - RNA, 19 nt, Human
gcgaagaaagaugaaggga

SEQ ID NO: 186865 - RNA, 23 nt, Human
gcuagucuugaaccccugaccuc

SEQ ID NO: 186866 - RNA, 18 nt, Human
gcucuugcugcccagccu

SEQ ID NO: 186867 - RNA, 22 nt, Human
gcuggagggcugcuggcugcuu

SEQ ID NO: 186868 - RNA, 26 nt, Human
ggaaaaaaagauauaaacaaagaaaa

SEQ ID NO: 186869 - RNA, 22 nt, Human
ggcuggagggcugcuggcugcu

SEQ ID NO: 186870 - RNA, 18 nt, Human
gggaaagcacaagagggc

SEQ ID NO: 186871 - RNA, 19 nt, Human
gggacauuugaaaaguugc

SEQ ID NO: 186872 - RNA, 24 nt, Human
gggguuuacaacauguuggccagg

SEQ ID NO: 186873 - RNA, 23 nt, Human
ggguuuacaacauguuggccagg

SEQ ID NO: 186874 - RNA, 20 nt, Human
guaaauuauuuccacaaaau

SEQ ID NO: 186875 - RNA, 24 nt, Human
guagagacgggguuuacaacaugu

SEQ ID NO: 186876 - RNA, 21 nt, Human
guuccuuuucccugcccucag

SEQ ID NO: 186877 - RNA, 21 nt, Human
uaaaagaucccuagaugauuc

SEQ ID NO: 186878 - RNA, 24 nt, Human
uaauuuuuguauuuuuaguagaga

SEQ ID NO: 186879 - RNA, 23 nt, Human
uacaacauguuggccaggcuagu

SEQ ID NO: 186880 - RNA, 20 nt, Human
uaccugggaguggggaucag

SEQ ID NO: 186881 - RNA, 25 nt, Human
uaguagagacgggguuuacaacaug

SEQ ID NO: 186882 - RNA, 28 nt, Human
ucaaaauaaaccugaguguuguccggac

SEQ ID NO: 186883 - RNA, 19 nt, Human
ucaagcaauucuccugccu

SEQ ID NO: 186884 - RNA, 22 nt, Human
ucaccuggggagcuucugaaau

SEQ ID NO: 186885 - RNA, 23 nt, Human
ucacuacaaccuccgccuccugg

SEQ ID NO: 186886 - RNA, 24 nt, Human
ucacuacaaccuccgccuccuggg

SEQ ID NO: 186887 - RNA, 27 nt, Human
ucacuacaaccuccgccuccuggguuc

SEQ ID NO: 186888 - RNA, 21 nt, Human
ucacugaaauugaaaauuauu

SEQ ID NO: 186889 - RNA, 20 nt, Human
ucagaaacauuuguuuccag

SEQ ID NO: 186890 - RNA, 21 nt, Human
ucaggacuugaaauagccaag

SEQ ID NO: 186891 - RNA, 22 nt, Human
ucaggacuugaaauagccaaga

SEQ ID NO: 186892 - RNA, 21 nt, Human
ucaguuuaucaaaauaaaccu

SEQ ID NO: 186893 - RNA, 23 nt, Human
ucaguuuaucaaaauaaaccuga

SEQ ID NO: 186894 - RNA, 22 nt, Human
uccacaaaauugcaaaagaaac

SEQ ID NO: 186895 - RNA, 24 nt, Human
ucccaaagugcuggaauugcaggc

SEQ ID NO: 186896 - RNA, 24 nt, Human
uccgccuccuggguucaagcaauu

SEQ ID NO: 186897 - RNA, 21 nt, Human
uccuggguucaagcaauucuc

SEQ ID NO: 186898 - RNA, 24 nt, Human
uccuggguucaagcaauucuccug

SEQ ID NO: 186899 - RNA, 18 nt, Human
ucucauaccugggagugg

SEQ ID NO: 186900 - RNA, 19 nt, Human
ugaagaaagaaaaagaaaa

SEQ ID NO: 186901 - RNA, 18 nt, Human
ugagauagagucuugcuc

SEQ ID NO: 186902 - RNA, 23 nt, Human
ugcaaaagaaacugucacugaaa

SEQ ID NO: 186903 - RNA, 22 nt, Human
ugcaauguugcgaucuuggcuc

SEQ ID NO: 186904 - RNA, 21 nt, Human
ugccucaggcucccggguaac

SEQ ID NO: 186905 - RNA, 24 nt, Human
ugccucaggcucccggguaacugg

SEQ ID NO: 186906 - RNA, 21 nt, Human
ugccugccaaacucugcugca

SEQ ID NO: 186907 - RNA, 18 nt, Human
uggaauugcaggcaugag

SEQ ID NO: 186908 - RNA, 21 nt, Human
uggaauugcaggcaugagcca

SEQ ID NO: 186909 - RNA, 23 nt, Human
uggaauugcaggcaugagccacc

SEQ ID NO: 186910 - RNA, 24 nt, Human
uggaauugcaggcaugagccaccg

SEQ ID NO: 186911 - RNA, 19 nt, Human
uggagugcaauguugcgau

SEQ ID NO: 186912 - RNA, 23 nt, Human
uggagugcaauguugcgaucuug

SEQ ID NO: 186913 - RNA, 24 nt, Human
uggagugcaauguugcgaucuugg

SEQ ID NO: 186914 - RNA, 24 nt, Human
uggccaggcuagucuugaaccccu

SEQ ID NO: 186915 - RNA, 21 nt, Human
ugggauuauagaugugcacca

SEQ ID NO: 186916 - RNA, 24 nt, Human
ugggauuauagaugugcaccacca

SEQ ID NO: 186917 - RNA, 19 nt, Human
ugggcacaccacaaaguuc

SEQ ID NO: 186918 - RNA, 21 nt, Human
uggguucaagcaauucuccug

SEQ ID NO: 186919 - RNA, 23 nt, Human
uggguucaagcaauucuccugcc

SEQ ID NO: 186920 - RNA, 24 nt, Human
uggguucaagcaauucuccugccu

SEQ ID NO: 186921 - RNA, 21 nt, Human
uguauuuuuaguagagacggg

SEQ ID NO: 186922 - RNA, 20 nt, Human
ugugcaaggacaagagaagc

SEQ ID NO: 186923 - RNA, 24 nt, Human
uguugcgaucuuggcucacuacaa

SEQ ID NO: 186924 - RNA, 18 nt, Human
uuaguagagacgggguuu

SEQ ID NO: 186925 - RNA, 25 nt, Human
uuaguagagacgggguuuacaacau

SEQ ID NO: 186926 - RNA, 21 nt, Human
uucaagcaauucuccugccuc

SEQ ID NO: 186927 - RNA, 25 nt, Human
uucaagcaauucuccugccucaggc

SEQ ID NO: 186928 - RNA, 24 nt, Human
uucgaggauuaugucagccgagac

SEQ ID NO: 186929 - RNA, 23 nt, Human
uucucauaccugggaguggggau

SEQ ID NO: 186930 - RNA, 21 nt, Human
uucuccugccucaggcucccg

SEQ ID NO: 186931 - RNA, 22 nt, Human
uucuccugccucaggcucccgg

SEQ ID NO: 186932 - RNA, 23 nt, Human
uuguauuuuuaguagagacgggg

SEQ ID NO: 186933 - RNA, 24 nt, Human
uuuguuuccagcuucaaaauccuu

SEQ ID NO: 186934 - RNA, 21 nt, Human
uuuuuaguagagacgggguuu

SEQ ID NO: 186935 - RNA, 21 nt, Human
uuuuuauaaguauagaagcga

SEQ ID NO: 186936 - RNA, 20 nt, Human
uuuuuguauuuuuaguagag

SEQ ID NO: 186937 - RNA, 19 nt, Human
aaagggcugaaggagcugg

SEQ ID NO: 186938 - RNA, 20 nt, Human
aagagagcacccucuucacc

SEQ ID NO: 186939 - RNA, 20 nt, Human
acccagaccaggcgggaagg

SEQ ID NO: 186940 - RNA, 20 nt, Human
accccccccaccccaccccg

SEQ ID NO: 186941 - RNA, 21 nt, Human
accccccccaccccaccccgc

SEQ ID NO: 186942 - RNA, 23 nt, Human
accccccccaccccaccccgcca

SEQ ID NO: 186943 - RNA, 21 nt, Human
acgccaggcaagagagcaccc

SEQ ID NO: 186944 - RNA, 20 nt, Human
aggagguggcaggaccagaa

SEQ ID NO: 186945 - RNA, 18 nt, Human
aggcagugggugaaggcg

SEQ ID NO: 186946 - RNA, 20 nt, Human
aggcagugggugaaggcggg

SEQ ID NO: 186947 - RNA, 21 nt, Human
aggcagugggugaaggcgggg

SEQ ID NO: 186948 - RNA, 21 nt, Human
aggcaucaagagcaaguacag

SEQ ID NO: 186949 - RNA, 23 nt, Human
caagagagcacccucuucaccgc

SEQ ID NO: 186950 - RNA, 18 nt, Human
caccccccccaccccacc

SEQ ID NO: 186951 - RNA, 18 nt, Human
caccccccccaccccacc

SEQ ID NO: 186952 - RNA, 19 nt, Human
caccccccccaccccaccc

SEQ ID NO: 186953 - RNA, 21 nt, Human
cacccgucugggaaacagcuc

SEQ ID NO: 186954 - RNA, 22 nt, Human
cagaaagggcugaaggagcugg

SEQ ID NO: 186955 - RNA, 26 nt, Human
cagaaagggcugaaggagcugggaca

SEQ ID NO: 186956 - RNA, 19 nt, Human
cagagccucccagggcucc

SEQ ID NO: 186957 - RNA, 21 nt, Human
caggagguggcaggaccagaa

SEQ ID NO: 186958 - RNA, 23 nt, Human
cccaccccgccaggcaucaagag

SEQ ID NO: 186959 - RNA, 25 nt, Human
cccagcaccccccccaccccacccc

SEQ ID NO: 186960 - RNA, 21 nt, Human
cccagcaccccccccaccccc

SEQ ID NO: 186961 - RNA, 22 nt, Human
cccagccuggccccagcugggg

SEQ ID NO: 186962 - RNA, 20 nt, Human
ccccaccccaccccgccagg

SEQ ID NO: 186963 - RNA, 23 nt, Human
ccccccaccccaccccgccaggc

SEQ ID NO: 186964 - RNA, 24 nt, Human
ccccccaccccaccccgccaggca

SEQ ID NO: 186965 - RNA, 18 nt, Human
cccccccaccccaccccg

SEQ ID NO: 186966 - RNA, 19 nt, Human
ccccccccaccccaccccg

SEQ ID NO: 186967 - RNA, 21 nt, Human
ccccccccaccccaccccgcc

SEQ ID NO: 186968 - RNA, 23 nt, Human
ccccccccaccccaccccgccag

SEQ ID NO: 186969 - RNA, 26 nt, Human
ccccccccaccccaccccgccaggca

SEQ ID NO: 186970 - RNA, 21 nt, Human
cccgccccacccgucugggaa

SEQ ID NO: 186971 - RNA, 26 nt, Human
cgccaggcaagagagcacccucuucu

SEQ ID NO: 186972 - RNA, 24 nt, Human
cgggaaggcagcucaggagguggc

SEQ ID NO: 186973 - RNA, 19 nt, Human
gaaagggcugaaggagcug

SEQ ID NO: 186974 - RNA, 22 nt, Human
gagaggcaggggcccagcaccc

SEQ ID NO: 186975 - RNA, 19 nt, Human
gcagggugggagggggcag

SEQ ID NO: 186976 - RNA, 19 nt, Human
gcccagcaccccccccacc

SEQ ID NO: 186977 - RNA, 24 nt, Human
gcuccagagccucccagggcuccu

SEQ ID NO: 186978 - RNA, 18 nt, Human
gcugaaggagcugggaca

SEQ ID NO: 186979 - RNA, 19 nt, Human
ggagggacagaaagggcug

SEQ ID NO: 186980 - RNA, 21 nt, Human
ggcuuagugggcaggguggga

SEQ ID NO: 186981 - RNA, 23 nt, Human
gggaaggcagcucaggagguggc

SEQ ID NO: 186982 - RNA, 18 nt, Human
gggcagggugggaggggg

SEQ ID NO: 186983 - RNA, 21 nt, Human
gggcagggugggagggggcag

SEQ ID NO: 186984 - RNA, 21 nt, Human
gggcccagcaccccccccacc

SEQ ID NO: 186985 - RNA, 19 nt, Human
ggggcccagcacccccccc

SEQ ID NO: 186986 - RNA, 22 nt, Human
uacccagaccaggcgggaaggc

SEQ ID NO: 186987 - RNA, 18 nt, Human
ucacugggagggacagaa

SEQ ID NO: 186988 - RNA, 22 nt, Human
uccagagccucccagggcuccc

SEQ ID NO: 186989 - RNA, 21 nt, Human
ugcagagaggcaggggcccag

SEQ ID NO: 186990 - RNA, 23 nt, Human
uggcaggaccagaagugggaaug

SEQ ID NO: 186991 - RNA, 19 nt, Human
ugggagggggcagccgugc

SEQ ID NO: 186992 - RNA, 23 nt, Human
uuagugggcagggugggaggggg

SEQ ID NO: 186993 - RNA, 24 nt, Human
aaaacccccccgagacagcagcac

SEQ ID NO: 186994 - RNA, 24 nt, Human
aaacacccucauagaugaaaaccc

SEQ ID NO: 186995 - RNA, 22 nt, Human
aagcagccgggguaggaggggc

SEQ ID NO: 186996 - RNA, 22 nt, Human
acccuuccaaggcugggccccu

SEQ ID NO: 186997 - RNA, 23 nt, Human
agccagcggagcgccccgaacaa

SEQ ID NO: 186998 - RNA, 26 nt, Human
ccaguuacccuuccaaggcugggccc

SEQ ID NO: 186999 - RNA, 18 nt, Human
ccccgaacaagcacugua

SEQ ID NO: 187000 - RNA, 22 nt, Human
ccccgagacagcagcacugcaa

SEQ ID NO: 187001 - RNA, 20 nt, Human
cccgaacaagcacuguaagg

SEQ ID NO: 187002 - RNA, 19 nt, Human
ccggaggcucggccccucc

SEQ ID NO: 187003 - RNA, 19 nt, Human
cgccccgaacaagcacugu

SEQ ID NO: 187004 - RNA, 21 nt, Human
cucauccggcccccgcccuac

SEQ ID NO: 187005 - RNA, 22 nt, Human
cucgccuuggucuggcagagac

SEQ ID NO: 187006 - RNA, 23 nt, Human
gaaaaggcuggagagugcgcccc

SEQ ID NO: 187007 - RNA, 20 nt, Human
gaccagcacccaucucgagg

SEQ ID NO: 187008 - RNA, 18 nt, Human
gagcgccccgaacaagca

SEQ ID NO: 187009 - RNA, 22 nt, Human
gcaggcgccuccuuuuaacugg

SEQ ID NO: 187010 - RNA, 21 nt, Human
gccugaggucccgccucaucc

SEQ ID NO: 187011 - RNA, 23 nt, Human
uaagaucaagguguuccucccuc

SEQ ID NO: 187012 - RNA, 20 nt, Human
uaagccggaaggagcagcag

SEQ ID NO: 187013 - RNA, 21 nt, Human
ucauagaugaaaaccccccuc

SEQ ID NO: 187014 - RNA, 22 nt, Human
uccaagaagccagcggagcgcc

SEQ ID NO: 187015 - RNA, 20 nt, Human
ucccgccucauccggccccc

SEQ ID NO: 187016 - RNA, 22 nt, Human
uggcccaggcaaccaggcggca

SEQ ID NO: 187017 - RNA, 19 nt, Human
uggucuggcagagacuggg

SEQ ID NO: 187018 - RNA, 18 nt, Human
uguccaagaagccagcgg

SEQ ID NO: 187019 - RNA, 21 nt, Human
aaugcugagguccagcagugu

SEQ ID NO: 187020 - RNA, 25 nt, Human
agaggaaaaggaaacaggcagaggg

SEQ ID NO: 187021 - RNA, 23 nt, Human
agagugagccccgcagagaggcc

SEQ ID NO: 187022 - RNA, 18 nt, Human
aggcaaggcucugcagug

SEQ ID NO: 187023 - RNA, 24 nt, Human
aggcagaggggaaaggcaaggcuc

SEQ ID NO: 187024 - RNA, 20 nt, Human
aucuguguguugagcaguuc

SEQ ID NO: 187025 - RNA, 19 nt, Human
cacgccucucagacaccac

SEQ ID NO: 187026 - RNA, 19 nt, Human
cagacaccacccaugaggg

SEQ ID NO: 187027 - RNA, 21 nt, Human
caggcagaggggaaaggcaag

SEQ ID NO: 187028 - RNA, 19 nt, Human
caggcccuucacgccucuc

SEQ ID NO: 187029 - RNA, 25 nt, Human
cccuuuauuggucucuucuagcaga

SEQ ID NO: 187030 - RNA, 25 nt, Human
cuagcagaguggcuccaggcccuuc

SEQ ID NO: 187031 - RNA, 23 nt, Human
cucuucuagcagaguggcuccag

SEQ ID NO: 187032 - RNA, 21 nt, Human
cugcauccuaaggcuccucag

SEQ ID NO: 187033 - RNA, 25 nt, Human
gaggggaaaggcaaggcucugcagu

SEQ ID NO: 187034 - RNA, 18 nt, Human
gcccagagcuuacccaag

SEQ ID NO: 187035 - RNA, 23 nt, Human
ggaaacaggcagaggggaaaggc

SEQ ID NO: 187036 - RNA, 24 nt, Human
ggacugauaucaagggaaugcuga

SEQ ID NO: 187037 - RNA, 19 nt, Human
ggcuccaggcccuucacgc

SEQ ID NO: 187038 - RNA, 20 nt, Human
ggcuccucaggacuggaugg

SEQ ID NO: 187039 - RNA, 24 nt, Human
ggugaagcgcagagugagccccgg

SEQ ID NO: 187040 - RNA, 21 nt, Human
gugaagcgcagagugagcccc

SEQ ID NO: 187041 - RNA, 24 nt, Human
uaggagaucuguguguugagcagu

SEQ ID NO: 187042 - RNA, 20 nt, Human
ucugcagugaaggggacuga

SEQ ID NO: 187043 - RNA, 21 nt, Human
ugaaggggacugauaucaagg

SEQ ID NO: 187044 - RNA, 25 nt, Human
uggaguaggagaucuguguguugag

SEQ ID NO: 187045 - RNA, 22 nt, Human
uggcuccaggcccuucacgccu

SEQ ID NO: 187046 - RNA, 25 nt, Human
ugugaaggcccagagcuuacccaag

SEQ ID NO: 187047 - RNA, 18 nt, Human
uuuuuuuuuuuuuugccg

SEQ ID NO: 187048 - RNA, 20 nt, Human
uuuuuuuuuuuuuuuugccg

SEQ ID NO: 187049 - RNA, 23 nt, Human
uuuuuuuuuuuuuuuuugccguu

SEQ ID NO: 187050 - RNA, 27 nt, Human
uuuuuuuuuuuuuuuuuuuuuuugggg

SEQ ID NO: 187051 - RNA, 24 nt, Human
aaacacccacauugcacccacacc

SEQ ID NO: 187052 - RNA, 21 nt, Human
aagacgccaccccugccaugg

SEQ ID NO: 187053 - RNA, 21 nt, Human
acacagaugguacacauuccc

SEQ ID NO: 187054 - RNA, 20 nt, Human
acacauucccagaaagacac

SEQ ID NO: 187055 - RNA, 19 nt, Human
acagaugguacacauuccc

SEQ ID NO: 187056 - RNA, 22 nt, Human
acaugccuggcaguacacagaa

SEQ ID NO: 187057 - RNA, 22 nt, Human
acggauuucuuccugaacaaag

SEQ ID NO: 187058 - RNA, 21 nt, Human
agacccagaaacuucugggga

SEQ ID NO: 187059 - RNA, 19 nt, Human
agcagaacaauuggaccua

SEQ ID NO: 187060 - RNA, 19 nt, Human
agcugcaggcacacagaug

SEQ ID NO: 187061 - RNA, 18 nt, Human
agcugguuuuuccuuugg

SEQ ID NO: 187062 - RNA, 19 nt, Human
aggagugggggguugggga

SEQ ID NO: 187063 - RNA, 23 nt, Human
agggagaacugugggguggggau

SEQ ID NO: 187064 - RNA, 18 nt, Human
agguggaagucagguccc

SEQ ID NO: 187065 - RNA, 23 nt, Human
aguggaccagugaggggugaggg

SEQ ID NO: 187066 - RNA, 25 nt, Human
augcacacacacacaaucacgcaua

SEQ ID NO: 187067 - RNA, 18 nt, Human
auugcacccacacccaca

SEQ ID NO: 187068 - RNA, 27 nt, Human
auugcacccacacccacaugccuggca

SEQ ID NO: 187069 - RNA, 21 nt, Human
cacccacacccacaugccugg

SEQ ID NO: 187070 - RNA, 24 nt, Human
cacccacacccacaugccuggcaa

SEQ ID NO: 187071 - RNA, 23 nt, Human
cagaaagacacauagguagacac

SEQ ID NO: 187072 - RNA, 20 nt, Human
cagaacaauuggaccuagag

SEQ ID NO: 187073 - RNA, 23 nt, Human
cagaacuguaugcauccauuugu

SEQ ID NO: 187074 - RNA, 21 nt, Human
cagcuccccaccuccccgucc

SEQ ID NO: 187075 - RNA, 18 nt, Human
caggcucaggggaggucc

SEQ ID NO: 187076 - RNA, 19 nt, Human
caggcucaggggagguccg

SEQ ID NO: 187077 - RNA, 21 nt, Human
caguacacagaacuguaugca

SEQ ID NO: 187078 - RNA, 24 nt, Human
caugcacacacacacaaucacgca

SEQ ID NO: 187079 - RNA, 21 nt, Human
cauuugugccaggcuggggcc

SEQ ID NO: 187080 - RNA, 23 nt, Human
ccacaagggcuuugggccccucc

SEQ ID NO: 187081 - RNA, 18 nt, Human
ccauuugugccaggcugg

SEQ ID NO: 187082 - RNA, 18 nt, Human
cccaugcacacacacaca

SEQ ID NO: 187083 - RNA, 24 nt, Human
cccgucccggggcgacagugacau

SEQ ID NO: 187084 - RNA, 20 nt, Human
ccgaaggagcagggguggca

SEQ ID NO: 187085 - RNA, 22 nt, Human
ccgcugccugaucccuggccac

SEQ ID NO: 187086 - RNA, 21 nt, Human
ccggggcgacagugacauaag

SEQ ID NO: 187087 - RNA, 18 nt, Human
ccugaaugcacuaagggc

SEQ ID NO: 187088 - RNA, 21 nt, Human
ccuucaggaaguaggaguggg

SEQ ID NO: 187089 - RNA, 21 nt, Human
ccuugguugaucucagggagg

SEQ ID NO: 187090 - RNA, 24 nt, Human
cgcauaccuguaggcaugugugua

SEQ ID NO: 187091 - RNA, 24 nt, Human
cggauuucuuccugaacaaagucc

SEQ ID NO: 187092 - RNA, 24 nt, Human
cggccaagccgagacccuugcagc

SEQ ID NO: 187093 - RNA, 21 nt, Human
cuacacagcugcaggcacaca

SEQ ID NO: 187094 - RNA, 19 nt, Human
cucaugaagacgccacccc

SEQ ID NO: 187095 - RNA, 24 nt, Human
cugcaggcacacagaugguacaca

SEQ ID NO: 187096 - RNA, 23 nt, Human
cuguacacccaugcacacacaca

SEQ ID NO: 187097 - RNA, 22 nt, Human
gaacaauuggaccuagagcugg

SEQ ID NO: 187098 - RNA, 20 nt, Human
gaagacgccaccccugccau

SEQ ID NO: 187099 - RNA, 22 nt, Human
gagcagggguggcaucccugcc

SEQ ID NO: 187100 - RNA, 21 nt, Human
gagcugguuuuuccuuugggu

SEQ ID NO: 187101 - RNA, 19 nt, Human
gcuggccccaagguugagg

SEQ ID NO: 187102 - RNA, 18 nt, Human
gcuuugggccccucccuc

SEQ ID NO: 187103 - RNA, 21 nt, Human
ggaccagugaggggugagggc

SEQ ID NO: 187104 - RNA, 18 nt, Human
ggagugggggguugggga

SEQ ID NO: 187105 - RNA, 22 nt, Human
ggcagagagguggaagucaggu

SEQ ID NO: 187106 - RNA, 18 nt, Human
ggccccucccucaugaag

SEQ ID NO: 187107 - RNA, 24 nt, Human
ggccuuagccugaaugcacuaagg

SEQ ID NO: 187108 - RNA, 18 nt, Human
ggcgacagugacauaagc

SEQ ID NO: 187109 - RNA, 20 nt, Human
gggggguuggggaguguggu

SEQ ID NO: 187110 - RNA, 22 nt, Human
guguaaacacccacauugcacc

SEQ ID NO: 187111 - RNA, 24 nt, Human
uaagcaaaucugggcagagaggug

SEQ ID NO: 187112 - RNA, 26 nt, Human
uacacccaugcacacacacacaauca

SEQ ID NO: 187113 - RNA, 26 nt, Human
uacacccaugcacacacacacaauca

SEQ ID NO: 187114 - RNA, 20 nt, Human
uaggaaaggggucugugaug

SEQ ID NO: 187115 - RNA, 20 nt, Human
uagugugguuggagacacgg

SEQ ID NO: 187116 - RNA, 18 nt, Human
uccccaccuccccguccc

SEQ ID NO: 187117 - RNA, 19 nt, Human
ucccuguggacgugggagg

SEQ ID NO: 187118 - RNA, 23 nt, Human
ucccuguggacgugggaggccgg

SEQ ID NO: 187119 - RNA, 18 nt, Human
uccgcggccaagccgaga

SEQ ID NO: 187120 - RNA, 19 nt, Human
uccuccgaaggagcagggg

SEQ ID NO: 187121 - RNA, 23 nt, Human
ucgccugagccgcugccugaucc

SEQ ID NO: 187122 - RNA, 18 nt, Human
ucucagggagaacugugg

SEQ ID NO: 187123 - RNA, 21 nt, Human
ugaagacgccaccccugccau

SEQ ID NO: 187124 - RNA, 21 nt, Human
ugaggggugagggcacguccu

SEQ ID NO: 187125 - RNA, 22 nt, Human
ugagguaucaguuagagcagaa

SEQ ID NO: 187126 - RNA, 20 nt, Human
ugagguguccggcgcucccu

SEQ ID NO: 187127 - RNA, 18 nt, Human
ugagugauaggaaagggg

SEQ ID NO: 187128 - RNA, 19 nt, Human
ugcccaggggccuuagccu

SEQ ID NO: 187129 - RNA, 19 nt, Human
ugccuggcaguacacagaa

SEQ ID NO: 187130 - RNA, 19 nt, Human
uggacgugggaggccgguc

SEQ ID NO: 187131 - RNA, 19 nt, Human
uggaggcagugggagaugc

SEQ ID NO: 187132 - RNA, 18 nt, Human
uggcuguacacccaugca

SEQ ID NO: 187133 - RNA, 25 nt, Human
ugggcagacggggugagucucaagc

SEQ ID NO: 187134 - RNA, 24 nt, Human
ugggcagagagguggaagucaggu

SEQ ID NO: 187135 - RNA, 22 nt, Human
uggggagugugguagacccaga

SEQ ID NO: 187136 - RNA, 24 nt, Human
ugugauggguagauagugugguug

SEQ ID NO: 187137 - RNA, 24 nt, Human
uguguaaacacccacauugcaccc

SEQ ID NO: 187138 - RNA, 23 nt, Human
uucaggaaguaggaguggggggu

SEQ ID NO: 187139 - RNA, 23 nt, Human
uugugccaggcuggggccuugag

SEQ ID NO: 187140 - RNA, 20 nt, Human
uuuuuuuuuuuuuuuugcug

SEQ ID NO: 187141 - RNA, 18 nt, Human
uuuuuuuuuuuuuuuuug

SEQ ID NO: 187142 - RNA, 20 nt, Human
uuuuuuuuuuuuuuuuugcu

SEQ ID NO: 187143 - RNA, 19 nt, Human
aagcccagcaggccauggg

SEQ ID NO: 187144 - RNA, 18 nt, Human
agcccagcaggccauggg

SEQ ID NO: 187145 - RNA, 22 nt, Human
cugggagccagcggcuccuccc

SEQ ID NO: 187146 - RNA, 22 nt, Human
gcaggccaugggaccuuccucc

SEQ ID NO: 187147 - RNA, 21 nt, Human
gggcgugggcaggggcucggg

SEQ ID NO: 187148 - RNA, 27 nt, Human
ucccacaagguagccaggggugggggc

SEQ ID NO: 187149 - RNA, 21 nt, Human
uggauuuucgggucugcccca

SEQ ID NO: 187150 - RNA, 19 nt, Human
uuuuuuuuuuuuuuucuaa

SEQ ID NO: 187151 - RNA, 23 nt, Human
aaaaacacaaauaaaaaaccuca

SEQ ID NO: 187152 - RNA, 21 nt, Human
aaaaacacauaaagacugaac

SEQ ID NO: 187153 - RNA, 19 nt, Human
aaaaacucgaaugccugac

SEQ ID NO: 187154 - RNA, 23 nt, Human
aaaacaaacaucaguugcaugga

SEQ ID NO: 187155 - RNA, 23 nt, Human
aaacaggaaacacucugaagcaa

SEQ ID NO: 187156 - RNA, 20 nt, Human
aaaccagucagauggcauca

SEQ ID NO: 187157 - RNA, 20 nt, Human
aaaggaaacuggaggcuacu

SEQ ID NO: 187158 - RNA, 24 nt, Human
aaagugcugggauuauaggcguga

SEQ ID NO: 187159 - RNA, 20 nt, Human
aacacauaaagacugaacac

SEQ ID NO: 187160 - RNA, 19 nt, Human
aacauggcaaaaccccauc

SEQ ID NO: 187161 - RNA, 21 nt, Human
aacauggcaaaaccccaucuc

SEQ ID NO: 187162 - RNA, 21 nt, Human
aacauggcaaaaccccaucuc

SEQ ID NO: 187163 - RNA, 21 nt, Human
aagauccagccucuuuucacc

SEQ ID NO: 187164 - RNA, 21 nt, Human
aagcagcagcacauugagaac

SEQ ID NO: 187165 - RNA, 20 nt, Human
aaggaggggagccuggcugg

SEQ ID NO: 187166 - RNA, 18 nt, Human
aaggggagaaaaaaaaug

SEQ ID NO: 187167 - RNA, 23 nt, Human
aaggggcuccuggggagcuugac

SEQ ID NO: 187168 - RNA, 21 nt, Human
aaguaaagagcacagcaacug

SEQ ID NO: 187169 - RNA, 23 nt, Human
aaguaggcauucuuugaaaaacu

SEQ ID NO: 187170 - RNA, 19 nt, Human
aagugcugggauuauaggc

SEQ ID NO: 187171 - RNA, 19 nt, Human
aagugcugggauuauaggc

SEQ ID NO: 187172 - RNA, 22 nt, Human
aagugggcagaucacuugaggu

SEQ ID NO: 187173 - RNA, 26 nt, Human
aagugggcagaucacuugaggucagg

SEQ ID NO: 187174 - RNA, 24 nt, Human
aaucacuugaacccgggaggcgga

SEQ ID NO: 187175 - RNA, 20 nt, Human
aaucuccgccucccgggcuc

SEQ ID NO: 187176 - RNA, 20 nt, Human
acaaacaaaaacacaaauaa

SEQ ID NO: 187177 - RNA, 24 nt, Human
acagagugagacuccaucucaaaa

SEQ ID NO: 187178 - RNA, 22 nt, Human
acaggagaaucacuugaacccg

SEQ ID NO: 187179 - RNA, 23 nt, Human
acaggcgcccgccaccacacccg

SEQ ID NO: 187180 - RNA, 23 nt, Human
accaagaaauacaccugagaaga

SEQ ID NO: 187181 - RNA, 24 nt, Human
accacagcaccaguguucagcagc

SEQ ID NO: 187182 - RNA, 18 nt, Human
accagagcucacagaaac

SEQ ID NO: 187183 - RNA, 19 nt, Human
acccaggcuggagugcagg

SEQ ID NO: 187184 - RNA, 24 nt, Human
accccaucucuacuaaaaacacaa

SEQ ID NO: 187185 - RNA, 24 nt, Human
accgcgccacugcacuccagccug

SEQ ID NO: 187186 - RNA, 20 nt, Human
accugauucucugccaacaa

SEQ ID NO: 187187 - RNA, 24 nt, Human
accuuaauaccccuaaaagauuca

SEQ ID NO: 187188 - RNA, 20 nt, Human
acggggcuucaccgucguag

SEQ ID NO: 187189 - RNA, 24 nt, Human
acggggcuucaccgucguagccag

SEQ ID NO: 187190 - RNA, 19 nt, Human
acuccagccugggccacag

SEQ ID NO: 187191 - RNA, 24 nt, Human
acuccagccugggccacagaguga

SEQ ID NO: 187192 - RNA, 18 nt, Human
acugcacuccagccuggg

SEQ ID NO: 187193 - RNA, 24 nt, Human
acugcacuccagccugggccacag

SEQ ID NO: 187194 - RNA, 18 nt, Human
acuuacagacgcacacaa

SEQ ID NO: 187195 - RNA, 24 nt, Human
acuugaggucaggaguucgagauc

SEQ ID NO: 187196 - RNA, 26 nt, Human
agaaaaaaaaugugucaugcaaagag

SEQ ID NO: 187197 - RNA, 27 nt, Human
agaaaaaaaaugugucaugcaaagagg

SEQ ID NO: 187198 - RNA, 18 nt, Human
agaaaaagaaguaaagag

SEQ ID NO: 187199 - RNA, 18 nt, Human
agacaggagaaucacuug

SEQ ID NO: 187200 - RNA, 24 nt, Human
agacaggagaaucacuugaacccg

SEQ ID NO: 187201 - RNA, 22 nt, Human
agaccgcgccacugcacuccag

SEQ ID NO: 187202 - RNA, 19 nt, Human
agacugaacaccacugaug

SEQ ID NO: 187203 - RNA, 19 nt, Human
agagguagggggcauggau

SEQ ID NO: 187204 - RNA, 21 nt, Human
agagguuccuagccugggagg

SEQ ID NO: 187205 - RNA, 20 nt, Human
agaucacuugaggucaggaa

SEQ ID NO: 187206 - RNA, 23 nt, Human
agaucacuugaggucaggaguuc

SEQ ID NO: 187207 - RNA, 24 nt, Human
agcacagcaacugacucaucucuu

SEQ ID NO: 187208 - RNA, 24 nt, Human
agcacuuuggggguccgaaguggg

SEQ ID NO: 187209 - RNA, 21 nt, Human
agccgggugugauggcucaug

SEQ ID NO: 187210 - RNA, 18 nt, Human
agccuccagaguagcugg

SEQ ID NO: 187211 - RNA, 24 nt, Human
agccugggccacagagugagacuc

SEQ ID NO: 187212 - RNA, 18 nt, Human
aggaaacuggaggcuacu

SEQ ID NO: 187213 - RNA, 23 nt, Human
aggaagagugagaggcugaccuu

SEQ ID NO: 187214 - RNA, 21 nt, Human
aggagaagggaaagcagcagc

SEQ ID NO: 187215 - RNA, 19 nt, Human
aggcaagggugggagcaga

SEQ ID NO: 187216 - RNA, 19 nt, Human
aggcacccccaaagcaagg

SEQ ID NO: 187217 - RNA, 24 nt, Human
aggcggagguugcagugagccaag

SEQ ID NO: 187218 - RNA, 20 nt, Human
aggcgugagccacugcaccc

SEQ ID NO: 187219 - RNA, 24 nt, Human
aggcugagacaggagaaucacuug

SEQ ID NO: 187220 - RNA, 22 nt, Human
agggauccugggccauggucuu

SEQ ID NO: 187221 - RNA, 21 nt, Human
agggggcauggauaggggaga

SEQ ID NO: 187222 - RNA, 21 nt, Human
agggggcuggccagugguggg

SEQ ID NO: 187223 - RNA, 22 nt, Human
agguagggggcauggauagggg

SEQ ID NO: 187224 - RNA, 20 nt, Human
aguaaccugaaggaagagug

SEQ ID NO: 187225 - RNA, 18 nt, Human
aguagcugggacuacagg

SEQ ID NO: 187226 - RNA, 19 nt, Human
aguagcugggacuacaggc

SEQ ID NO: 187227 - RNA, 21 nt, Human
agugacaccagagcucacaga

SEQ ID NO: 187228 - RNA, 20 nt, Human
agugcaggggcgcgaucuug

SEQ ID NO: 187229 - RNA, 24 nt, Human
agugcaggggcgcgaucuuggcuc

SEQ ID NO: 187230 - RNA, 21 nt, Human
aucacuugaggucaggaguuc

SEQ ID NO: 187231 - RNA, 24 nt, Human
augaucauggagaugagugacacc

SEQ ID NO: 187232 - RNA, 23 nt, Human
auggcucaugccugcagucccag

SEQ ID NO: 187233 - RNA, 24 nt, Human
caaacaaaaacacaaauaaaaaac

SEQ ID NO: 187234 - RNA, 24 nt, Human
caaauaaaaaaccucaucaaaugu

SEQ ID NO: 187235 - RNA, 27 nt, Human
caagggcaccgcacagccacagggaag

SEQ ID NO: 187236 - RNA, 19 nt, Human
cacaaaauuugaaaacuag

SEQ ID NO: 187237 - RNA, 21 nt, Human
cacacaaaauuugaaaacuag

SEQ ID NO: 187238 - RNA, 24 nt, Human
cacaccuggaaucccagcacuuug

SEQ ID NO: 187239 - RNA, 24 nt, Human
cacagagugagacuccaucucaaa

SEQ ID NO: 187240 - RNA, 18 nt, Human
caccaacaggacagcaga

SEQ ID NO: 187241 - RNA, 19 nt, Human
cacccuccaaccuuggguu

SEQ ID NO: 187242 - RNA, 24 nt, Human
caccgucguagccaggauggucuc

SEQ ID NO: 187243 - RNA, 20 nt, Human
caccugagaagaaagacaaa

SEQ ID NO: 187244 - RNA, 23 nt, Human
caccuggaaucccagcacuuugg

SEQ ID NO: 187245 - RNA, 24 nt, Human
caccuggaaucccagcacuuuggg

SEQ ID NO: 187246 - RNA, 22 nt, Human
cacuccagccugggccacagag

SEQ ID NO: 187247 - RNA, 22 nt, Human
cacuccagccugggccacagag

SEQ ID NO: 187248 - RNA, 24 nt, Human
cacuccagccugggccacagagug

SEQ ID NO: 187249 - RNA, 18 nt, Human
cacugcacuccagccugg

SEQ ID NO: 187250 - RNA, 19 nt, Human
cacugcacuccagccuggg

SEQ ID NO: 187251 - RNA, 20 nt, Human
cacugcacuccagccugggc

SEQ ID NO: 187252 - RNA, 24 nt, Human
cacugcacuccagccugggccaca

SEQ ID NO: 187253 - RNA, 23 nt, Human
cacuugaggucaggaguucgaga

SEQ ID NO: 187254 - RNA, 19 nt, Human
cagagguagggggcaugga

SEQ ID NO: 187255 - RNA, 19 nt, Human
cagagugagacuccaucuc

SEQ ID NO: 187256 - RNA, 27 nt, Human
cagaucacuugaggucaggaguucgag

SEQ ID NO: 187257 - RNA, 24 nt, Human
cagcacuuuggggguccgaagugg

SEQ ID NO: 187258 - RNA, 18 nt, Human
cagcccagaguagggcaa

SEQ ID NO: 187259 - RNA, 20 nt, Human
cagcccggcaaacauggcaa

SEQ ID NO: 187260 - RNA, 19 nt, Human
caggccgaagcggggacag

SEQ ID NO: 187261 - RNA, 21 nt, Human
caggcgcccgccaccacaccc

SEQ ID NO: 187262 - RNA, 23 nt, Human
cagggauccugggccauggucuu

SEQ ID NO: 187263 - RNA, 24 nt, Human
cagugaccuugacucucuucagcu

SEQ ID NO: 187264 - RNA, 24 nt, Human
caucaaauguguuaaaagcaugau

SEQ ID NO: 187265 - RNA, 22 nt, Human
caucuccaaauccaaagcccaa

SEQ ID NO: 187266 - RNA, 20 nt, Human
caugacaaaccccugcuaac

SEQ ID NO: 187267 - RNA, 21 nt, Human
caugacaaaccccugcuaacu

SEQ ID NO: 187268 - RNA, 22 nt, Human
caugccauucuccugccucagc

SEQ ID NO: 187269 - RNA, 18 nt, Human
cauguugacagguagcaa

SEQ ID NO: 187270 - RNA, 22 nt, Human
ccaaagugcugggauuauaggc

SEQ ID NO: 187271 - RNA, 24 nt, Human
ccaaagugcugggauuauaggcgu

SEQ ID NO: 187272 - RNA, 18 nt, Human
ccaagaccgcgccacugc

SEQ ID NO: 187273 - RNA, 24 nt, Human
ccaauucauucuccucaucuaccc

SEQ ID NO: 187274 - RNA, 19 nt, Human
ccacugcacccggccaugg

SEQ ID NO: 187275 - RNA, 19 nt, Human
ccacugcacccggccaugg

SEQ ID NO: 187276 - RNA, 20 nt, Human
ccacugcacuccagccuggg

SEQ ID NO: 187277 - RNA, 21 nt, Human
ccacugcacuccagccugggc

SEQ ID NO: 187278 - RNA, 24 nt, Human
ccacugcacuccagccugggccac

SEQ ID NO: 187279 - RNA, 23 nt, Human
ccagaguagcugggacuacaggc

SEQ ID NO: 187280 - RNA, 21 nt, Human
ccagcacuuuggggguccgaa

SEQ ID NO: 187281 - RNA, 20 nt, Human
ccagccccagcaggcuuagc

SEQ ID NO: 187282 - RNA, 20 nt, Human
ccagguaaguuuaugauggg

SEQ ID NO: 187283 - RNA, 23 nt, Human
ccauccaagacagucuuccacaa

SEQ ID NO: 187284 - RNA, 26 nt, Human
ccaucucaaaaaacaaacaaaaacac

SEQ ID NO: 187285 - RNA, 22 nt, Human
ccauuggcagcagcucaugggc

SEQ ID NO: 187286 - RNA, 26 nt, Human
ccauuggcagcagcucuguuucuccc

SEQ ID NO: 187287 - RNA, 20 nt, Human
cccaucuccaaauccaaagc

SEQ ID NO: 187288 - RNA, 23 nt, Human
ccccaaagcaaggaucuuggccu

SEQ ID NO: 187289 - RNA, 22 nt, Human
cccugcuaacuuuaaaaccacc

SEQ ID NO: 187290 - RNA, 23 nt, Human
ccucaaguagaccacccuaauuc

SEQ ID NO: 187291 - RNA, 22 nt, Human
ccuccccucucucccucuuaaa

SEQ ID NO: 187292 - RNA, 18 nt, Human
ccucugcugauugacuuc

SEQ ID NO: 187293 - RNA, 18 nt, Human
ccugcagucccagcuacu

SEQ ID NO: 187294 - RNA, 18 nt, Human
ccugcagucccagcuacu

SEQ ID NO: 187295 - RNA, 21 nt, Human
ccugcagucccagcuacuugg

SEQ ID NO: 187296 - RNA, 19 nt, Human
ccuguucacacagagagag

SEQ ID NO: 187297 - RNA, 24 nt, Human
cgaagugggcagaucacuugaggu

SEQ ID NO: 187298 - RNA, 26 nt, Human
cgaagugggcagaucacuugagguca

SEQ ID NO: 187299 - RNA, 26 nt, Human
cgccacugcacuccagccugggccac

SEQ ID NO: 187300 - RNA, 19 nt, Human
cgccucccgggcucaugcc

SEQ ID NO: 187301 - RNA, 22 nt, Human
cggcaaacauggcaaaacccca

SEQ ID NO: 187302 - RNA, 22 nt, Human
cggcucacaccuggaaucccag

SEQ ID NO: 187303 - RNA, 24 nt, Human
cgggaggcggagguugcagugagc

SEQ ID NO: 187304 - RNA, 21 nt, Human
cguugaaacaaaaugagugcc

SEQ ID NO: 187305 - RNA, 20 nt, Human
cuaaaaacacaaaaaaccag

SEQ ID NO: 187306 - RNA, 24 nt, Human
cucacaccuggaaucccagcacuu

SEQ ID NO: 187307 - RNA, 24 nt, Human
cucagccuccagaguagcugggac

SEQ ID NO: 187308 - RNA, 24 nt, Human
cucaugccugcagucccagcuacu

SEQ ID NO: 187309 - RNA, 21 nt, Human
cucauugccuggagaugcucu

SEQ ID NO: 187310 - RNA, 18 nt, Human
cuccacaugagcuccagg

SEQ ID NO: 187311 - RNA, 22 nt, Human
cuccaucucaaaaaacaaacaa

SEQ ID NO: 187312 - RNA, 20 nt, Human
cucccuuucuucucgaguuu

SEQ ID NO: 187313 - RNA, 24 nt, Human
cuccugaccucgugauccgcccgc

SEQ ID NO: 187314 - RNA, 21 nt, Human
cuccuggagucuuccucuucu

SEQ ID NO: 187315 - RNA, 23 nt, Human
cucgacacuggaaucagcaguug

SEQ ID NO: 187316 - RNA, 20 nt, Human
cucugaagcaacgcugccau

SEQ ID NO: 187317 - RNA, 23 nt, Human
cucugucacccaggcuggagugc

SEQ ID NO: 187318 - RNA, 21 nt, Human
cucuucccaucuccaaaucca

SEQ ID NO: 187319 - RNA, 19 nt, Human
cugagaaauaauucccuuu

SEQ ID NO: 187320 - RNA, 23 nt, Human
cugccucagccuccagaguagcu

SEQ ID NO: 187321 - RNA, 23 nt, Human
cuuccacucugauaaccaauuca

SEQ ID NO: 187322 - RNA, 18 nt, Human
cuucucuuuccuucaggc

SEQ ID NO: 187323 - RNA, 23 nt, Human
cuuuagagauggugagagauugg

SEQ ID NO: 187324 - RNA, 19 nt, Human
gaaaacuagcuuguccaca

SEQ ID NO: 187325 - RNA, 18 nt, Human
gaaagggaacaguuccca

SEQ ID NO: 187326 - RNA, 18 nt, Human
gacagguagcaacagagu

SEQ ID NO: 187327 - RNA, 22 nt, Human
gaccucgugauccgcccgccuc

SEQ ID NO: 187328 - RNA, 22 nt, Human
gaccucgugauccgcccgccuc

SEQ ID NO: 187329 - RNA, 23 nt, Human
gagaaucacuugaacccgggagg

SEQ ID NO: 187330 - RNA, 21 nt, Human
gaggcacccccaaagcaagga

SEQ ID NO: 187331 - RNA, 18 nt, Human
gagguugcagugagccaa

SEQ ID NO: 187332 - RNA, 23 nt, Human
gagguugcagugagccaagaccg

SEQ ID NO: 187333 - RNA, 25 nt, Human
gaguagcugggacuacaggcgcccg

SEQ ID NO: 187334 - RNA, 24 nt, Human
gaucacuugaggucaggaguucga

SEQ ID NO: 187335 - RNA, 24 nt, Human
gauggcucaugccugcagucccag

SEQ ID NO: 187336 - RNA, 18 nt, Human
gauuauaggcgugagcca

SEQ ID NO: 187337 - RNA, 22 nt, Human
gauuauaggcgugagccacugc

SEQ ID NO: 187338 - RNA, 23 nt, Human
gauuauaggcgugagccacugca

SEQ ID NO: 187339 - RNA, 21 nt, Human
gcaaacauggcaaaaccccau

SEQ ID NO: 187340 - RNA, 23 nt, Human
gcacuccagccugggccacagag

SEQ ID NO: 187341 - RNA, 19 nt, Human
gcagcagcucuguuucucc

SEQ ID NO: 187342 - RNA, 22 nt, Human
gcaggggcgcgaucuuggcuca

SEQ ID NO: 187343 - RNA, 20 nt, Human
gccaagaccgcgccacugca

SEQ ID NO: 187344 - RNA, 22 nt, Human
gccacugcacuccagccugggc

SEQ ID NO: 187345 - RNA, 18 nt, Human
gcccaccaacaggacagc

SEQ ID NO: 187346 - RNA, 26 nt, Human
gccgaaguucagagaucuucggaccg

SEQ ID NO: 187347 - RNA, 18 nt, Human
gccuccccucucucccuc

SEQ ID NO: 187348 - RNA, 23 nt, Human
gccucggccucccaaagugcugg

SEQ ID NO: 187349 - RNA, 25 nt, Human
gcugcaaaugccuucuuccugcugg

SEQ ID NO: 187350 - RNA, 25 nt, Human
gcuggagugcaggggcgcgaucuug

SEQ ID NO: 187351 - RNA, 18 nt, Human
ggacagcagagagcaagg

SEQ ID NO: 187352 - RNA, 18 nt, Human
ggagguugcagugagcca

SEQ ID NO: 187353 - RNA, 20 nt, Human
ggagguugcagugagccaag

SEQ ID NO: 187354 - RNA, 20 nt, Human
ggagugcaggggcgcgaucu

SEQ ID NO: 187355 - RNA, 25 nt, Human
ggcagaucacuugaggucaggaguu

SEQ ID NO: 187356 - RNA, 19 nt, Human
ggcagcagcucaugggcac

SEQ ID NO: 187357 - RNA, 24 nt, Human
ggcucugucacccaggcuggagug

SEQ ID NO: 187358 - RNA, 21 nt, Human
gggaauuggaggugaaaggga

SEQ ID NO: 187359 - RNA, 22 nt, Human
gggaauuggaggugaaagggaa

SEQ ID NO: 187360 - RNA, 24 nt, Human
gggagggagaaacgcagggugugu

SEQ ID NO: 187361 - RNA, 22 nt, Human
gggcuucaccgucguagccagg

SEQ ID NO: 187362 - RNA, 25 nt, Human
ggggagcuugacgguccaucgguuu

SEQ ID NO: 187363 - RNA, 20 nt, Human
ggucucaaucuccugaccuc

SEQ ID NO: 187364 - RNA, 20 nt, Human
ggugugauggcucaugccug

SEQ ID NO: 187365 - RNA, 21 nt, Human
ggugugauggcucaugccugc

SEQ ID NO: 187366 - RNA, 21 nt, Human
guccucagguucacagaucua

SEQ ID NO: 187367 - RNA, 24 nt, Human
gugauccgcccgccucggccuccc

SEQ ID NO: 187368 - RNA, 19 nt, Human
guggcuuucuugaguucug

SEQ ID NO: 187369 - RNA, 21 nt, Human
gugggguagagagagugccua

SEQ ID NO: 187370 - RNA, 23 nt, Human
uaaaaaacaaacaucaguugcaa

SEQ ID NO: 187371 - RNA, 20 nt, Human
uaaaaacacaaaaaaccagc

SEQ ID NO: 187372 - RNA, 21 nt, Human
uaaaaacacaaaaaaccagcc

SEQ ID NO: 187373 - RNA, 23 nt, Human
uaaaagauacaguaauucaacac

SEQ ID NO: 187374 - RNA, 24 nt, Human
uaaaagauacaguaauucaacaca

SEQ ID NO: 187375 - RNA, 18 nt, Human
uaaagagcacagcaacug

SEQ ID NO: 187376 - RNA, 23 nt, Human
uaaagagcacagcaacugacuca

SEQ ID NO: 187377 - RNA, 22 nt, Human
uaacaaggaauuccagaaacag

SEQ ID NO: 187378 - RNA, 20 nt, Human
uaaccuacuaguauacuccc

SEQ ID NO: 187379 - RNA, 23 nt, Human
uaagugaucccugggucuuacaa

SEQ ID NO: 187380 - RNA, 23 nt, Human
uacaggcgcccgccaccacaccc

SEQ ID NO: 187381 - RNA, 24 nt, Human
uacccuaaaguuuccuguucacac

SEQ ID NO: 187382 - RNA, 19 nt, Human
uagaggcaggcaagggugg

SEQ ID NO: 187383 - RNA, 22 nt, Human
uagcuaauaggaaggaggggag

SEQ ID NO: 187384 - RNA, 19 nt, Human
uauaggcgugagccacugc

SEQ ID NO: 187385 - RNA, 23 nt, Human
ucaaaaaacaaacaaaaacacaa

SEQ ID NO: 187386 - RNA, 24 nt, Human
ucaaaugcucuccucugcugauug

SEQ ID NO: 187387 - RNA, 18 nt, Human
ucacccaggcuggagugc

SEQ ID NO: 187388 - RNA, 24 nt, Human
ucaccgcaaucuccgccucccggg

SEQ ID NO: 187389 - RNA, 25 nt, Human
ucaccgcaaucuccgccucccgggc

SEQ ID NO: 187390 - RNA, 24 nt, Human
ucaccgucguagccaggauggucu

SEQ ID NO: 187391 - RNA, 18 nt, Human
ucacgcugcauuucucag

SEQ ID NO: 187392 - RNA, 24 nt, Human
ucacuugaacccgggaggcggagg

SEQ ID NO: 187393 - RNA, 20 nt, Human
ucacuugaggucaggaguuc

SEQ ID NO: 187394 - RNA, 22 nt, Human
ucagaagauguggagaaaaaga

SEQ ID NO: 187395 - RNA, 18 nt, Human
ucaggccgaagcggggac

SEQ ID NO: 187396 - RNA, 20 nt, Human
uccaagcagugaagcugggg

SEQ ID NO: 187397 - RNA, 26 nt, Human
uccacaagauccagccucuuuucacc

SEQ ID NO: 187398 - RNA, 24 nt, Human
uccagaaacaggaaacacucugaa

SEQ ID NO: 187399 - RNA, 24 nt, Human
uccagaguagcugggacuacaggc

SEQ ID NO: 187400 - RNA, 23 nt, Human
uccagccugggccacagagugag

SEQ ID NO: 187401 - RNA, 24 nt, Human
uccagccugggccacagagugaga

SEQ ID NO: 187402 - RNA, 24 nt, Human
ucccaaagugcugggauuauaggc

SEQ ID NO: 187403 - RNA, 19 nt, Human
ucccauuggcagcagcucu

SEQ ID NO: 187404 - RNA, 18 nt, Human
uccccugaggccuccauu

SEQ ID NO: 187405 - RNA, 21 nt, Human
ucccgggcucaugccauucuc

SEQ ID NO: 187406 - RNA, 24 nt, Human
ucccgggcucaugccauucuccug

SEQ ID NO: 187407 - RNA, 18 nt, Human
ucccgugcaugagaagac

SEQ ID NO: 187408 - RNA, 18 nt, Human
uccugaaucacaauggcc

SEQ ID NO: 187409 - RNA, 18 nt, Human
ucggccucccaaagugcu

SEQ ID NO: 187410 - RNA, 19 nt, Human
ucuccaaauccaaagccca

SEQ ID NO: 187411 - RNA, 19 nt, Human
ucuccgccucccgggcuca

SEQ ID NO: 187412 - RNA, 24 nt, Human
ucuccugccucagccuccagagua

SEQ ID NO: 187413 - RNA, 20 nt, Human
ucucugccaacaaacuacuu

SEQ ID NO: 187414 - RNA, 19 nt, Human
ucuggcucugucacccagg

SEQ ID NO: 187415 - RNA, 23 nt, Human
ucuggcucugucacccaggcugg

SEQ ID NO: 187416 - RNA, 24 nt, Human
ucuggcucugucacccaggcugga

SEQ ID NO: 187417 - RNA, 24 nt, Human
ucugucacccaggcuggagugcag

SEQ ID NO: 187418 - RNA, 21 nt, Human
ugaaacaaaaugagugccccc

SEQ ID NO: 187419 - RNA, 19 nt, Human
ugaaaucuccagguaguac

SEQ ID NO: 187420 - RNA, 22 nt, Human
ugaagcaacgcugccauccaag

SEQ ID NO: 187421 - RNA, 26 nt, Human
ugaagcuggggccaagugucuacagg

SEQ ID NO: 187422 - RNA, 19 nt, Human
ugacaggccaacggcugcu

SEQ ID NO: 187423 - RNA, 20 nt, Human
ugagacaggagaaucacuug

SEQ ID NO: 187424 - RNA, 24 nt, Human
ugagacaggagaaucacuugaacc

SEQ ID NO: 187425 - RNA, 22 nt, Human
ugagaugaucauggagaugagu

SEQ ID NO: 187426 - RNA, 18 nt, Human
ugaguucugucuuggucc

SEQ ID NO: 187427 - RNA, 22 nt, Human
ugauaaacugaguagugaauca

SEQ ID NO: 187428 - RNA, 24 nt, Human
ugauggcucaugccugcaguccca

SEQ ID NO: 187429 - RNA, 21 nt, Human
ugccuauuguaaacaaaagca

SEQ ID NO: 187430 - RNA, 24 nt, Human
ugccucagccuccagaguagcugg

SEQ ID NO: 187431 - RNA, 19 nt, Human
ugccuccccucucucccuc

SEQ ID NO: 187432 - RNA, 24 nt, Human
ugccugcagucccagcuacuuggg

SEQ ID NO: 187433 - RNA, 22 nt, Human
uggaggaacagaaauauuaaga

SEQ ID NO: 187434 - RNA, 23 nt, Human
uggagugcaggggcgcgaucuug

SEQ ID NO: 187435 - RNA, 24 nt, Human
uggagugcaggggcgcgaucuugg

SEQ ID NO: 187436 - RNA, 20 nt, Human
uggauuguaucucacugaug

SEQ ID NO: 187437 - RNA, 19 nt, Human
uggcagagagguuccuagc

SEQ ID NO: 187438 - RNA, 26 nt, Human
uggcagagagguuccuagccugggag

SEQ ID NO: 187439 - RNA, 20 nt, Human
uggcagcagcucaugggcac

SEQ ID NO: 187440 - RNA, 21 nt, Human
uggcagcagcucuguuucucc

SEQ ID NO: 187441 - RNA, 22 nt, Human
uggcauucuuuagcuacgaaau

SEQ ID NO: 187442 - RNA, 24 nt, Human
uggcucugucacccaggcuggagu

SEQ ID NO: 187443 - RNA, 21 nt, Human
ugggacuacaggcgcccgcca

SEQ ID NO: 187444 - RNA, 22 nt, Human
ugggacuacaggcgcccgccac

SEQ ID NO: 187445 - RNA, 24 nt, Human
ugggacuacaggcgcccgccacca

SEQ ID NO: 187446 - RNA, 19 nt, Human
ugggagcagagauggguga

SEQ ID NO: 187447 - RNA, 24 nt, Human
ugggaggcugagacaggagaauca

SEQ ID NO: 187448 - RNA, 19 nt, Human
ugggauuauaggcgugagc

SEQ ID NO: 187449 - RNA, 21 nt, Human
ugggauuauaggcgugagcca

SEQ ID NO: 187450 - RNA, 22 nt, Human
ugggauuauaggcgugagccac

SEQ ID NO: 187451 - RNA, 22 nt, Human
ugggauuauaggcgugagccac

SEQ ID NO: 187452 - RNA, 24 nt, Human
ugggauuauaggcgugagccacug

SEQ ID NO: 187453 - RNA, 18 nt, Human
ugggcagaucacuugagg

SEQ ID NO: 187454 - RNA, 24 nt, Human
ugggcagaucacuugaggucagga

SEQ ID NO: 187455 - RNA, 24 nt, Human
uggggguaccaagaaauacaccug

SEQ ID NO: 187456 - RNA, 25 nt, Human
uggggguaccaagaaauacaccuga

SEQ ID NO: 187457 - RNA, 20 nt, Human
uggggguccgaagugggcag

SEQ ID NO: 187458 - RNA, 24 nt, Human
uggggguccgaagugggcagauca

SEQ ID NO: 187459 - RNA, 24 nt, Human
ugggguagagagagugccuauugu

SEQ ID NO: 187460 - RNA, 22 nt, Human
ugguagugucucgcuugcuccu

SEQ ID NO: 187461 - RNA, 22 nt, Human
ugucuugguccuguccauucuu

SEQ ID NO: 187462 - RNA, 24 nt, Human
uguuagaaaaccauucaaaaaaag

SEQ ID NO: 187463 - RNA, 25 nt, Human
uguuagaaaaccauucaaaaaaagu

SEQ ID NO: 187464 - RNA, 23 nt, Human
uuaacccucuucauccugcaugc

SEQ ID NO: 187465 - RNA, 24 nt, Human
uuagcagagacggggcuucaccgu

SEQ ID NO: 187466 - RNA, 22 nt, Human
uucaaaaaaaaaaaguaaaaga

SEQ ID NO: 187467 - RNA, 24 nt, Human
uucagagaucuccuuuucuaacuc

SEQ ID NO: 187468 - RNA, 18 nt, Human
uuccuccacaugagcucc

SEQ ID NO: 187469 - RNA, 20 nt, Human
uuccuccacaugagcuccag

SEQ ID NO: 187470 - RNA, 20 nt, Human
uucugucuugguccugucca

SEQ ID NO: 187471 - RNA, 18 nt, Human
uucuugcaguacugaugc

SEQ ID NO: 187472 - RNA, 24 nt, Human
uugaacccgggaggcggagguugc

SEQ ID NO: 187473 - RNA, 22 nt, Human
uugcagugagccaagaccgcgc

SEQ ID NO: 187474 - RNA, 25 nt, Human
uugggaggcugagacaggagaauca

SEQ ID NO: 187475 - RNA, 24 nt, Human
uuuaaaguucccuaacaaggaauu

SEQ ID NO: 187476 - RNA, 24 nt, Human
uuucucaguggcaaagagaaaugg

SEQ ID NO: 187477 - RNA, 22 nt, Human
uuuguagcuaauaggaaggagg

SEQ ID NO: 187478 - RNA, 23 nt, Human
uuuuauuuuuuugguuugguuuu

SEQ ID NO: 187479 - RNA, 23 nt, Human
uuuuccccaguggcuuucuugag

SEQ ID NO: 187480 - RNA, 22 nt, Human
aacgugaagcuuuuggaagaga

SEQ ID NO: 187481 - RNA, 26 nt, Human
aagcaagugucaauauuauucuccac

SEQ ID NO: 187482 - RNA, 20 nt, Human
aagggagacaaauucaagca

SEQ ID NO: 187483 - RNA, 18 nt, Human
accacucugaaagagggu

SEQ ID NO: 187484 - RNA, 20 nt, Human
acugugccuccuccucccca

SEQ ID NO: 187485 - RNA, 19 nt, Human
agcaucagaguuacugcau

SEQ ID NO: 187486 - RNA, 19 nt, Human
agcuucuguccccugaaga

SEQ ID NO: 187487 - RNA, 19 nt, Human
aggcagauguagauagaug

SEQ ID NO: 187488 - RNA, 18 nt, Human
auggauccacuuugugcu

SEQ ID NO: 187489 - RNA, 24 nt, Human
auuucauuucccugccccccuccc

SEQ ID NO: 187490 - RNA, 23 nt, Human
caagaagggagacaaauucaagc

SEQ ID NO: 187491 - RNA, 24 nt, Human
cacaccccugaggggggcagaaaa

SEQ ID NO: 187492 - RNA, 24 nt, Human
caccccugaggggggcagaaaagc

SEQ ID NO: 187493 - RNA, 21 nt, Human
caccucuuacucccuccucca

SEQ ID NO: 187494 - RNA, 26 nt, Human
cagacaaaaagcuucuguccccugaa

SEQ ID NO: 187495 - RNA, 18 nt, Human
cagccuuuuuuccuugcc

SEQ ID NO: 187496 - RNA, 19 nt, Human
caggacaaaacuccauuuc

SEQ ID NO: 187497 - RNA, 28 nt, Human
cauuaacugugccuccuccuccccaccu

SEQ ID NO: 187498 - RNA, 22 nt, Human
ccccaccucuuacucccuccuc

SEQ ID NO: 187499 - RNA, 24 nt, Human
ccccaccucuuacucccuccucca

SEQ ID NO: 187500 - RNA, 25 nt, Human
ccccaccucuuacucccuccuccaa

SEQ ID NO: 187501 - RNA, 25 nt, Human
ccccacugccuuccacacaccccug

SEQ ID NO: 187502 - RNA, 22 nt, Human
ccccccucccaacucccccacu

SEQ ID NO: 187503 - RNA, 19 nt, Human
cccccucccaacuccccca

SEQ ID NO: 187504 - RNA, 20 nt, Human
cccugaggggggcagaaaag

SEQ ID NO: 187505 - RNA, 25 nt, Human
ccuccaaacuaacccuagucagccc

SEQ ID NO: 187506 - RNA, 27 nt, Human
ccuccaaacuaacccuagucagcccug

SEQ ID NO: 187507 - RNA, 22 nt, Human
ccucccaacucccccacugccu

SEQ ID NO: 187508 - RNA, 21 nt, Human
ccucuuacucccuccuccaaa

SEQ ID NO: 187509 - RNA, 23 nt, Human
ccugccccccucccaacuccccc

SEQ ID NO: 187510 - RNA, 23 nt, Human
cucccaacucccccacugccuuc

SEQ ID NO: 187511 - RNA, 21 nt, Human
cucccuccuccaaacuaaccc

SEQ ID NO: 187512 - RNA, 22 nt, Human
cugccccccucccaacuccccc

SEQ ID NO: 187513 - RNA, 18 nt, Human
gaagagaagggguugagu

SEQ ID NO: 187514 - RNA, 24 nt, Human
gaagggagacaaauucaagcauca

SEQ ID NO: 187515 - RNA, 26 nt, Human
gcagcuccagacaaaaagggaacgcc

SEQ ID NO: 187516 - RNA, 20 nt, Human
ggggggcagaaaagcaagug

SEQ ID NO: 187517 - RNA, 24 nt, Human
gggguugaguuuaugucuuggcuu

SEQ ID NO: 187518 - RNA, 24 nt, Human
guauguauauauagucauggaguc

SEQ ID NO: 187519 - RNA, 25 nt, Human
gucuuggcuuugacaccgaguuauu

SEQ ID NO: 187520 - RNA, 27 nt, Human
gugccuccuccuccccaccucuuacuc

SEQ ID NO: 187521 - RNA, 23 nt, Human
guugaguuuaugucuuggcuuug

SEQ ID NO: 187522 - RNA, 25 nt, Human
uaaaaaguuguguguguacacaggc

SEQ ID NO: 187523 - RNA, 23 nt, Human
uaauuaccagcccaauugccaau

SEQ ID NO: 187524 - RNA, 21 nt, Human
ucauggaguccagccuuuuuu

SEQ ID NO: 187525 - RNA, 22 nt, Human
ucccugccccccucccaacucc

SEQ ID NO: 187526 - RNA, 18 nt, Human
ucuugugggcagcuccag

SEQ ID NO: 187527 - RNA, 18 nt, Human
ugaagcuuuuggaagaga

SEQ ID NO: 187528 - RNA, 22 nt, Human
ugcaucaacuaauuaccagccc

SEQ ID NO: 187529 - RNA, 18 nt, Human
ugccuuccacacaccccu

SEQ ID NO: 187530 - RNA, 20 nt, Human
uggaagagaagggguugagu

SEQ ID NO: 187531 - RNA, 24 nt, Human
ugugccuccuccuccccaccucuu

SEQ ID NO: 187532 - RNA, 23 nt, Human
ugugcugucuuccauguaccacu

SEQ ID NO: 187533 - RNA, 18 nt, Human
uuccauguaccacucuga

SEQ ID NO: 187534 - RNA, 18 nt, Human
uuucccugccccccuccc

SEQ ID NO: 187535 - RNA, 20 nt, Human
aaaaagaaauccuagaguug

SEQ ID NO: 187536 - RNA, 24 nt, Human
aaaacaaagaaggagugcaaaaaa

SEQ ID NO: 187537 - RNA, 21 nt, Human
aaaacucuuccauguccacaa

SEQ ID NO: 187538 - RNA, 23 nt, Human
aaaacucuuccauguccacaacc

SEQ ID NO: 187539 - RNA, 21 nt, Human
aaacaaagaaggagugcaagg

SEQ ID NO: 187540 - RNA, 24 nt, Human
aaagaaggagugcaaaaaagugau

SEQ ID NO: 187541 - RNA, 19 nt, Human
aaagcacauggaauaaagg

SEQ ID NO: 187542 - RNA, 21 nt, Human
aaagcacauggaauaaagguu

SEQ ID NO: 187543 - RNA, 25 nt, Human
aaaugccuaccacagugacaccuuu

SEQ ID NO: 187544 - RNA, 19 nt, Human
aacaaaagaacauucugga

SEQ ID NO: 187545 - RNA, 24 nt, Human
aacgggucaccaacagaaccaaaa

SEQ ID NO: 187546 - RNA, 19 nt, Human
aaggcugaaguacccaggu

SEQ ID NO: 187547 - RNA, 22 nt, Human
aagugaucaauacaaaaaaagu

SEQ ID NO: 187548 - RNA, 22 nt, Human
acaaaaauaaaagucaaauguc

SEQ ID NO: 187549 - RNA, 19 nt, Human
acaaaauaugccaaaugcc

SEQ ID NO: 187550 - RNA, 20 nt, Human
acaacccugagcuguccccu

SEQ ID NO: 187551 - RNA, 20 nt, Human
acaagacacacuaauaacaa

SEQ ID NO: 187552 - RNA, 20 nt, Human
acacgccaggccaauuuaca

SEQ ID NO: 187553 - RNA, 19 nt, Human
acagaaccaaaaaaaaggu

SEQ ID NO: 187554 - RNA, 21 nt, Human
acagaaccaaaaaaaaggucc

SEQ ID NO: 187555 - RNA, 23 nt, Human
acagcacgaagacaaccaggugc

SEQ ID NO: 187556 - RNA, 24 nt, Human
acagcacgaagacaaccaggugcc

SEQ ID NO: 187557 - RNA, 19 nt, Human
acaguggguaucacguggc

SEQ ID NO: 187558 - RNA, 22 nt, Human
acaucacaaaucuaccgccagc

SEQ ID NO: 187559 - RNA, 22 nt, Human
accaacagaaccaaaaaaaagg

SEQ ID NO: 187560 - RNA, 22 nt, Human
acccaucucgcucugggucccc

SEQ ID NO: 187561 - RNA, 22 nt, Human
acugugguugcuugacugaguc

SEQ ID NO: 187562 - RNA, 23 nt, Human
agaaaagaaaaucacaggcagag

SEQ ID NO: 187563 - RNA, 21 nt, Human
agagaagacaaaacaucuagg

SEQ ID NO: 187564 - RNA, 20 nt, Human
agcaaacaaaagaacauucu

SEQ ID NO: 187565 - RNA, 22 nt, Human
agcagcagggguaaggcaguga

SEQ ID NO: 187566 - RNA, 23 nt, Human
agccugugccuguggccccugca

SEQ ID NO: 187567 - RNA, 19 nt, Human
aggaagaaaaugcaauuga

SEQ ID NO: 187568 - RNA, 26 nt, Human
aggcagagauacaaagucaacaggcu

SEQ ID NO: 187569 - RNA, 19 nt, Human
aggcagucgucaggcaggc

SEQ ID NO: 187570 - RNA, 22 nt, Human
aggcgaggccauucagccugcu

SEQ ID NO: 187571 - RNA, 19 nt, Human
agggacaucagccgugaaa

SEQ ID NO: 187572 - RNA, 18 nt, Human
agggggccacccgagggg

SEQ ID NO: 187573 - RNA, 24 nt, Human
aguguuacuauacgguagacugac

SEQ ID NO: 187574 - RNA, 18 nt, Human
augaagcaaagcacaugg

SEQ ID NO: 187575 - RNA, 19 nt, Human
auggaauaaagguuuuguc

SEQ ID NO: 187576 - RNA, 25 nt, Human
auuucuaauuacaagaaacagaaca

SEQ ID NO: 187577 - RNA, 21 nt, Human
caaaaaaaagguccuccguac

SEQ ID NO: 187578 - RNA, 19 nt, Human
caaaacaacccugagcugu

SEQ ID NO: 187579 - RNA, 24 nt, Human
caaaacaucuaggcugaggcacau

SEQ ID NO: 187580 - RNA, 22 nt, Human
caaaugccuaccacagugacag

SEQ ID NO: 187581 - RNA, 19 nt, Human
caacccugagcuguccccu

SEQ ID NO: 187582 - RNA, 21 nt, Human
caagacacacuaauaacaaga

SEQ ID NO: 187583 - RNA, 26 nt, Human
cacauggaauaaagguuuugucucuu

SEQ ID NO: 187584 - RNA, 25 nt, Human
caccaacagaaccaaaaaaaagguc

SEQ ID NO: 187585 - RNA, 22 nt, Human
caccacaguaguuugucgccug

SEQ ID NO: 187586 - RNA, 21 nt, Human
caccacugcagcagcaggggu

SEQ ID NO: 187587 - RNA, 20 nt, Human
cacccgaggggcggagggga

SEQ ID NO: 187588 - RNA, 21 nt, Human
caccgcuggccgaugacgggu

SEQ ID NO: 187589 - RNA, 19 nt, Human
caccgcuuggacuccacac

SEQ ID NO: 187590 - RNA, 18 nt, Human
cacgaagacaaccaggug

SEQ ID NO: 187591 - RNA, 21 nt, Human
cacuaauaacaagaggaucug

SEQ ID NO: 187592 - RNA, 22 nt, Human
cacuccaguguucacuuccucc

SEQ ID NO: 187593 - RNA, 24 nt, Human
cacucucacaccugaucacuaagc

SEQ ID NO: 187594 - RNA, 22 nt, Human
cagaaaagagaagacaaaacau

SEQ ID NO: 187595 - RNA, 18 nt, Human
cagcagcagggguaaggc

SEQ ID NO: 187596 - RNA, 21 nt, Human
caggcggcggcccccaggagc

SEQ ID NO: 187597 - RNA, 22 nt, Human
caggcuccaaaacaacccugag

SEQ ID NO: 187598 - RNA, 21 nt, Human
caggugugucucaaggaggcu

SEQ ID NO: 187599 - RNA, 19 nt, Human
cagucggagcacccggggc

SEQ ID NO: 187600 - RNA, 22 nt, Human
cagucgucaggcaggcguuugg

SEQ ID NO: 187601 - RNA, 23 nt, Human
caguggggcggauuuggggcaau

SEQ ID NO: 187602 - RNA, 19 nt, Human
caucagccgugaaacgacu

SEQ ID NO: 187603 - RNA, 18 nt, Human
ccaaaacaacccugagcu

SEQ ID NO: 187604 - RNA, 24 nt, Human
ccaaaugccuaccacagugacacc

SEQ ID NO: 187605 - RNA, 24 nt, Human
ccaagccaagaugaucauuccagu

SEQ ID NO: 187606 - RNA, 19 nt, Human
ccacugucccggacgcccg

SEQ ID NO: 187607 - RNA, 23 nt, Human
ccagcacacauuaauagaagcca

SEQ ID NO: 187608 - RNA, 18 nt, Human
ccaugcccuccccaauuu

SEQ ID NO: 187609 - RNA, 19 nt, Human
ccucugggaacauuugggg

SEQ ID NO: 187610 - RNA, 20 nt, Human
ccugcagcguuuccuugucu

SEQ ID NO: 187611 - RNA, 21 nt, Human
ccugcagcugcugcuuccugc

SEQ ID NO: 187612 - RNA, 22 nt, Human
ccugggcgcccacccucccagg

SEQ ID NO: 187613 - RNA, 22 nt, Human
ccugugcacaauauuuucagaa

SEQ ID NO: 187614 - RNA, 24 nt, Human
ccuguggccccugcagcguuuccu

SEQ ID NO: 187615 - RNA, 19 nt, Human
ccuugaaaaggguuuaccu

SEQ ID NO: 187616 - RNA, 21 nt, Human
cgccacaucccccuccuacaa

SEQ ID NO: 187617 - RNA, 21 nt, Human
cgcccggacgcccgggcgcgc

SEQ ID NO: 187618 - RNA, 20 nt, Human
cgcucuggguccccaggugc

SEQ ID NO: 187619 - RNA, 26 nt, Human
cggcggcuaacgggucaccaacagaa

SEQ ID NO: 187620 - RNA, 23 nt, Human
cgggucaccaacagaaccaaaaa

SEQ ID NO: 187621 - RNA, 22 nt, Human
cuagcugcucuguguucacugg

SEQ ID NO: 187622 - RNA, 22 nt, Human
cuauguacagaaugaagcaaag

SEQ ID NO: 187623 - RNA, 24 nt, Human
cucaacuugguguuaggccccagc

SEQ ID NO: 187624 - RNA, 23 nt, Human
cucuguagcacugucugcugggg

SEQ ID NO: 187625 - RNA, 19 nt, Human
cugacccuaagccagcaga

SEQ ID NO: 187626 - RNA, 18 nt, Human
cugaggcacauguuucuu

SEQ ID NO: 187627 - RNA, 22 nt, Human
cugaguccacaaaauaugccaa

SEQ ID NO: 187628 - RNA, 18 nt, Human
cugcccauucaaaacucu

SEQ ID NO: 187629 - RNA, 21 nt, Human
cuggcugccggucacugggcu

SEQ ID NO: 187630 - RNA, 18 nt, Human
cugggaacauuuggggac

SEQ ID NO: 187631 - RNA, 18 nt, Human
cugugaaucagagucaag

SEQ ID NO: 187632 - RNA, 18 nt, Human
cuuauuuguacaaaaaua

SEQ ID NO: 187633 - RNA, 20 nt, Human
cuugcccgcccccagaaagg

SEQ ID NO: 187634 - RNA, 22 nt, Human
gaaaauucuucauuuguauacc

SEQ ID NO: 187635 - RNA, 20 nt, Human
gaaacagaacaucagucccu

SEQ ID NO: 187636 - RNA, 20 nt, Human
gaaacgccacaucccccucc

SEQ ID NO: 187637 - RNA, 22 nt, Human
gacacacuaauaacaagaggau

SEQ ID NO: 187638 - RNA, 21 nt, Human
gaccaagugacaacucaagcc

SEQ ID NO: 187639 - RNA, 22 nt, Human
gagcgcggccuugaccgcagcc

SEQ ID NO: 187640 - RNA, 23 nt, Human
gaggguguggaggacccucuggg

SEQ ID NO: 187641 - RNA, 18 nt, Human
gccacaucccccuccuac

SEQ ID NO: 187642 - RNA, 22 nt, Human
gcccaagccaagaugaucauuc

SEQ ID NO: 187643 - RNA, 24 nt, Human
gcccauucaaaacucuuucuguau

SEQ ID NO: 187644 - RNA, 22 nt, Human
gcccccaggagcgcggccuuga

SEQ ID NO: 187645 - RNA, 22 nt, Human
gccgugaaacgacucacaccac

SEQ ID NO: 187646 - RNA, 20 nt, Human
gccugugccuguggccccug

SEQ ID NO: 187647 - RNA, 21 nt, Human
gcgcccacccucccaggcggc

SEQ ID NO: 187648 - RNA, 21 nt, Human
gcgcgaggccagcgagcuggg

SEQ ID NO: 187649 - RNA, 24 nt, Human
gcucuggguccccaggugcagaau

SEQ ID NO: 187650 - RNA, 19 nt, Human
ggacgcccgggcgcgcgcg

SEQ ID NO: 187651 - RNA, 18 nt, Human
ggagagccccgcggggcg

SEQ ID NO: 187652 - RNA, 20 nt, Human
ggcagugaucguucuagaac

SEQ ID NO: 187653 - RNA, 24 nt, Human
ggcggaggggaccaagugacaacu

SEQ ID NO: 187654 - RNA, 18 nt, Human
gggcgcccacccucccag

SEQ ID NO: 187655 - RNA, 23 nt, Human
ggggaccaagugacaacucaagc

SEQ ID NO: 187656 - RNA, 21 nt, Human
guacacagaaaaaagaaaucc

SEQ ID NO: 187657 - RNA, 24 nt, Human
guaccgcucuuaucacauuuccac

SEQ ID NO: 187658 - RNA, 23 nt, Human
uaacaagaaagcuuuucaaguau

SEQ ID NO: 187659 - RNA, 18 nt, Human
uaacgggucaccaacaga

SEQ ID NO: 187660 - RNA, 21 nt, Human
uaacugcaauguccgucccua

SEQ ID NO: 187661 - RNA, 18 nt, Human
uaagccagcagaggagga

SEQ ID NO: 187662 - RNA, 18 nt, Human
uaagcggcccaagccaag

SEQ ID NO: 187663 - RNA, 22 nt, Human
uacaaaaauaccugaaaguuua

SEQ ID NO: 187664 - RNA, 21 nt, Human
uacauggaguuucauuuagaa

SEQ ID NO: 187665 - RNA, 23 nt, Human
uaccgccagcuugcccgccccca

SEQ ID NO: 187666 - RNA, 20 nt, Human
uaccucgagccagugaagag

SEQ ID NO: 187667 - RNA, 24 nt, Human
uacguacacagaaaaaagaaaucc

SEQ ID NO: 187668 - RNA, 18 nt, Human
uagaguuguuuuuccuug

SEQ ID NO: 187669 - RNA, 19 nt, Human
uauaaauaugaaauacugc

SEQ ID NO: 187670 - RNA, 19 nt, Human
uauaaauaugaaauacugc

SEQ ID NO: 187671 - RNA, 28 nt, Human
uaugccaaaugccuaccacagugacacc

SEQ ID NO: 187672 - RNA, 22 nt, Human
uauguacagaaugaagcaaagc

SEQ ID NO: 187673 - RNA, 18 nt, Human
uauuaagugcagaaaaga

SEQ ID NO: 187674 - RNA, 20 nt, Human
ucaaauguccuuccgucccc

SEQ ID NO: 187675 - RNA, 19 nt, Human
ucaaggaggcuggcccacg

SEQ ID NO: 187676 - RNA, 27 nt, Human
ucacagcagcaaaucgucguuuaaguc

SEQ ID NO: 187677 - RNA, 21 nt, Human
ucacgagccaaagagcuaugu

SEQ ID NO: 187678 - RNA, 22 nt, Human
ucacugcaguuugcacugugac

SEQ ID NO: 187679 - RNA, 20 nt, Human
ucagaaauuuccuucugcaa

SEQ ID NO: 187680 - RNA, 21 nt, Human
ucagccgugaaacgacucaca

SEQ ID NO: 187681 - RNA, 20 nt, Human
ucauacugucagguauuaag

SEQ ID NO: 187682 - RNA, 20 nt, Human
uccaaaggaauaaagucucc

SEQ ID NO: 187683 - RNA, 25 nt, Human
uccacaccgugguagucggcagagg

SEQ ID NO: 187684 - RNA, 21 nt, Human
uccaguguucacuuccuccag

SEQ ID NO: 187685 - RNA, 22 nt, Human
uccaguguucacuuccuccagu

SEQ ID NO: 187686 - RNA, 18 nt, Human
uccauguccacaaccacu

SEQ ID NO: 187687 - RNA, 18 nt, Human
ucccaggcggcggccccc

SEQ ID NO: 187688 - RNA, 21 nt, Human
uccccaggugcagaaucgaug

SEQ ID NO: 187689 - RNA, 20 nt, Human
ucccggacgcccggacgccc

SEQ ID NO: 187690 - RNA, 21 nt, Human
uccuaagcggcccaagccaag

SEQ ID NO: 187691 - RNA, 19 nt, Human
uccucagccugcccugugc

SEQ ID NO: 187692 - RNA, 18 nt, Human
uccugcacugugcagaac

SEQ ID NO: 187693 - RNA, 19 nt, Human
ucucacaccugaucacuaa

SEQ ID NO: 187694 - RNA, 19 nt, Human
ucugacccuaagccagcag

SEQ ID NO: 187695 - RNA, 21 nt, Human
ugaagcuugugacacugcucu

SEQ ID NO: 187696 - RNA, 21 nt, Human
ugacaaaacucuuccaugucc

SEQ ID NO: 187697 - RNA, 22 nt, Human
ugacaucacaaaucuaccgcca

SEQ ID NO: 187698 - RNA, 20 nt, Human
ugacucaucucccggagcgg

SEQ ID NO: 187699 - RNA, 25 nt, Human
ugagaggacccaggugaggaccugg

SEQ ID NO: 187700 - RNA, 22 nt, Human
ugagcuguccccuuuacauuca

SEQ ID NO: 187701 - RNA, 26 nt, Human
ugaggaccuggcugccggucacuggg

SEQ ID NO: 187702 - RNA, 23 nt, Human
ugcagaacaagacacacuaauaa

SEQ ID NO: 187703 - RNA, 20 nt, Human
ugcagcagcagggguaaggc

SEQ ID NO: 187704 - RNA, 23 nt, Human
ugcaucagaaauuuccuucugca

SEQ ID NO: 187705 - RNA, 24 nt, Human
ugcgaaaggaagaaaaugcaauug

SEQ ID NO: 187706 - RNA, 21 nt, Human
ugcuggggcggccacccuggc

SEQ ID NO: 187707 - RNA, 18 nt, Human
uggaaaacaacuagagug

SEQ ID NO: 187708 - RNA, 25 nt, Human
uggaaaacaacuagaguguggucug

SEQ ID NO: 187709 - RNA, 20 nt, Human
uggccccugcagcguuuccu

SEQ ID NO: 187710 - RNA, 19 nt, Human
uggcgggcggcuaauccgc

SEQ ID NO: 187711 - RNA, 19 nt, Human
uggcuuauggggguuuuca

SEQ ID NO: 187712 - RNA, 21 nt, Human
ugggaagggcuggguuuguca

SEQ ID NO: 187713 - RNA, 23 nt, Human
ugggaagggcuggguuugucauu

SEQ ID NO: 187714 - RNA, 19 nt, Human
ugggccugcagcugcugcu

SEQ ID NO: 187715 - RNA, 23 nt, Human
ugggccugcagcugcugcuuccu

SEQ ID NO: 187716 - RNA, 24 nt, Human
uguacagaaugaagcaaagcacau

SEQ ID NO: 187717 - RNA, 25 nt, Human
ugucccggacgcccggacgcccggg

SEQ ID NO: 187718 - RNA, 18 nt, Human
uguggaaacgcaaggcug

SEQ ID NO: 187719 - RNA, 19 nt, Human
uguggucagcgccaaagcc

SEQ ID NO: 187720 - RNA, 20 nt, Human
uguucacuggcuuauggggg

SEQ ID NO: 187721 - RNA, 19 nt, Human
uuaaaaacauguuuugcua

SEQ ID NO: 187722 - RNA, 23 nt, Human
uuauggggguuuucagcaggacg

SEQ ID NO: 187723 - RNA, 21 nt, Human
uucacagcagcaaaucgucgu

SEQ ID NO: 187724 - RNA, 21 nt, Human
uucuucacuccaguguucacu

SEQ ID NO: 187725 - RNA, 20 nt, Human
uuggggacccauauucaguu

SEQ ID NO: 187726 - RNA, 21 nt, Human
uuuccaaaggaauaaagucuc

SEQ ID NO: 187727 - RNA, 23 nt, Human
uuuguacaaaaauaccugaaagu

SEQ ID NO: 187728 - RNA, 18 nt, Human
agcgcucugcaggugugg

SEQ ID NO: 187729 - RNA, 27 nt, Human
agggggcggaggaggaggguggggagg

SEQ ID NO: 187730 - RNA, 24 nt, Human
agggggcggggagggcgcgagagc

SEQ ID NO: 187731 - RNA, 18 nt, Human
aggguggggagaggggag

SEQ ID NO: 187732 - RNA, 18 nt, Human
cacuggcauugcucccgc

SEQ ID NO: 187733 - RNA, 21 nt, Human
cacuggcauugcucccgcgcc

SEQ ID NO: 187734 - RNA, 18 nt, Human
cccauccgggacgcgagg

SEQ ID NO: 187735 - RNA, 21 nt, Human
ccccggcgcgcuggaggcggg

SEQ ID NO: 187736 - RNA, 22 nt, Human
ccgggaccgccgccuccucagg

SEQ ID NO: 187737 - RNA, 24 nt, Human
cgcucggggccacuggcauugcuc

SEQ ID NO: 187738 - RNA, 18 nt, Human
cgcucggggccccggcgg

SEQ ID NO: 187739 - RNA, 20 nt, Human
cggccggggggcucgggcgu

SEQ ID NO: 187740 - RNA, 19 nt, Human
cgguggguggggcgcgcgg

SEQ ID NO: 187741 - RNA, 19 nt, Human
cuggcauugcucccgcgcc

SEQ ID NO: 187742 - RNA, 19 nt, Human
gaccgccgccuccucaggu

SEQ ID NO: 187743 - RNA, 21 nt, Human
gacgcaggcgggauagggguc

SEQ ID NO: 187744 - RNA, 20 nt, Human
gagagcggcuggccggcccc

SEQ ID NO: 187745 - RNA, 18 nt, Human
gagaggggaggagcggcc

SEQ ID NO: 187746 - RNA, 25 nt, Human
gagcuaucugcgaggcggcggggga

SEQ ID NO: 187747 - RNA, 20 nt, Human
gaggggaggagcggccggug

SEQ ID NO: 187748 - RNA, 23 nt, Human
gcaggugaaauacauucuuuuca

SEQ ID NO: 187749 - RNA, 22 nt, Human
gccccggcgcgcuggaggcggg

SEQ ID NO: 187750 - RNA, 18 nt, Human
gcgaggcaaggcgcggag

SEQ ID NO: 187751 - RNA, 20 nt, Human
gcggagggggcggggagggc

SEQ ID NO: 187752 - RNA, 21 nt, Human
ggagaagggguuugcgcggcg

SEQ ID NO: 187753 - RNA, 23 nt, Human
ggaggaggaggguggggagaggg

SEQ ID NO: 187754 - RNA, 19 nt, Human
ggaggaggguggggagagg

SEQ ID NO: 187755 - RNA, 23 nt, Human
ggcggggagggcgcgagagcggc

SEQ ID NO: 187756 - RNA, 20 nt, Human
ggcgggggaggggagggggc

SEQ ID NO: 187757 - RNA, 25 nt, Human
gggcggggagggcgcgagagcggcu

SEQ ID NO: 187758 - RNA, 18 nt, Human
ggggaggggagggggcgg

SEQ ID NO: 187759 - RNA, 20 nt, Human
ggggagggggcggaggagga

SEQ ID NO: 187760 - RNA, 19 nt, Human
ggggcggggagggcgcgag

SEQ ID NO: 187761 - RNA, 20 nt, Human
ucacaugauaauguuuucgc

SEQ ID NO: 187762 - RNA, 22 nt, Human
ucaggugggcaccggggcgcga

SEQ ID NO: 187763 - RNA, 20 nt, Human
ucgccgccugcgcucggggc

SEQ ID NO: 187764 - RNA, 18 nt, Human
ugccgggaggacgcaggc

SEQ ID NO: 187765 - RNA, 23 nt, Human
ugcgcucggggccccggcggcug

SEQ ID NO: 187766 - RNA, 20 nt, Human
uggggagaggggaggagcgg

SEQ ID NO: 187767 - RNA, 22 nt, Human
ugugguggccucgccgccugcg

SEQ ID NO: 187768 - RNA, 24 nt, Human
uuuauggucuuuuauuauuuuucu

SEQ ID NO: 187769 - RNA, 20 nt, Human
uuuuauuauuuuucuugagu

SEQ ID NO: 187770 - RNA, 30 nt, Human
aaaaaaaagacaaaggaggggaaagaggaa

SEQ ID NO: 187771 - RNA, 30 nt, Human
aaauccaacgcccccucccacccccuaaag

SEQ ID NO: 187772 - RNA, 24 nt, Human
agaagagaaaaaaggaugaaaaaa

SEQ ID NO: 187773 - RNA, 25 nt, Human
agaagagaaaaaaggaugaaaaaaa

SEQ ID NO: 187774 - RNA, 21 nt, Human
agggagggaggagggcugagc

SEQ ID NO: 187775 - RNA, 24 nt, Human
augaaaaaaaagacaaaggagggg

SEQ ID NO: 187776 - RNA, 24 nt, Human
cccccucccacccccuaaaguucc

SEQ ID NO: 187777 - RNA, 25 nt, Human
ccccuaaaguuccaaccaaagugag

SEQ ID NO: 187778 - RNA, 25 nt, Human
cucccacccccuaaaguuccaacca

SEQ ID NO: 187779 - RNA, 21 nt, Human
cugagcccccgaauucacugg

SEQ ID NO: 187780 - RNA, 20 nt, Human
cugcacucccucacaggcug

SEQ ID NO: 187781 - RNA, 18 nt, Human
gaagggagggaggagggc

SEQ ID NO: 187782 - RNA, 18 nt, Human
gacaaaggaggggaaaga

SEQ ID NO: 187783 - RNA, 19 nt, Human
gagcagcagugaaaauuug

SEQ ID NO: 187784 - RNA, 20 nt, Human
ggaagggagggaggagggcu

SEQ ID NO: 187785 - RNA, 18 nt, Human
gggggaagggagggagga

SEQ ID NO: 187786 - RNA, 20 nt, Human
guuccaaccaaagugagagg

SEQ ID NO: 187787 - RNA, 21 nt, Human
uaaaguuccaaccaaagugag

SEQ ID NO: 187788 - RNA, 21 nt, Human
uaaauccaacgcccccuccca

SEQ ID NO: 187789 - RNA, 18 nt, Human
ucagaggcagcuuguggg

SEQ ID NO: 187790 - RNA, 22 nt, Human
ucagugcucagcagccugaagc

SEQ ID NO: 187791 - RNA, 18 nt, Human
uccaaccaaagugagagg

SEQ ID NO: 187792 - RNA, 25 nt, Human
ucccucacaggcugcugucagaggc

SEQ ID NO: 187793 - RNA, 25 nt, Human
ugauggacagaagagaaaaaaggau

SEQ ID NO: 187794 - RNA, 25 nt, Human
ugcugucagaggcagcuuguggguu

SEQ ID NO: 187795 - RNA, 25 nt, Human
uuuuuuauuauuggcgucagcuagg

SEQ ID NO: 187796 - RNA, 19 nt, Human
uuuuuugguuucuuguuuu

SEQ ID NO: 187797 - RNA, 26 nt, Human
uuuuuuuuuuuugguuucuuguuuuu

SEQ ID NO: 187798 - RNA, 19 nt, Human
aaccgccugggcugccccc

SEQ ID NO: 187799 - RNA, 21 nt, Human
aaggagagggggccacccaag

SEQ ID NO: 187800 - RNA, 22 nt, Human
accuccagagcuaggagaagga

SEQ ID NO: 187801 - RNA, 18 nt, Human
acuaguauaaaacagagc

SEQ ID NO: 187802 - RNA, 29 nt, Human
aggcaaagaagcagaggagaagggacccc

SEQ ID NO: 187803 - RNA, 20 nt, Human
agggaggcaaagaagcagag

SEQ ID NO: 187804 - RNA, 20 nt, Human
agggaggcaaagaagcagag

SEQ ID NO: 187805 - RNA, 18 nt, Human
aggugguaggaggguguc

SEQ ID NO: 187806 - RNA, 19 nt, Human
cagagcagaucaacuggcc

SEQ ID NO: 187807 - RNA, 25 nt, Human
cagagcuaggagaaggagagggggg

SEQ ID NO: 187808 - RNA, 22 nt, Human
cagcaccuccagagcuaggaga

SEQ ID NO: 187809 - RNA, 27 nt, Human
caucccguccccuguggccgcgcccca

SEQ ID NO: 187810 - RNA, 19 nt, Human
ccacccaaggccuucccuu

SEQ ID NO: 187811 - RNA, 21 nt, Human
ccacccaaggccuucccuuga

SEQ ID NO: 187812 - RNA, 22 nt, Human
cccccacuucucccauaauucc

SEQ ID NO: 187813 - RNA, 23 nt, Human
cccugcccuagagcagcaccucc

SEQ ID NO: 187814 - RNA, 19 nt, Human
cccuugaggagagggguca

SEQ ID NO: 187815 - RNA, 20 nt, Human
ccgcuccucaucccgucccc

SEQ ID NO: 187816 - RNA, 18 nt, Human
ccugcccuagagcagcac

SEQ ID NO: 187817 - RNA, 18 nt, Human
ccuguggccgcgccccag

SEQ ID NO: 187818 - RNA, 20 nt, Human
cgucuaggaacccccagauu

SEQ ID NO: 187819 - RNA, 21 nt, Human
cucaucccguccccuguggcc

SEQ ID NO: 187820 - RNA, 23 nt, Human
cugagggaggcaaagaagcagag

SEQ ID NO: 187821 - RNA, 20 nt, Human
cuggaguggcggaacccucc

SEQ ID NO: 187822 - RNA, 23 nt, Human
gagcagaucaacuggccucucgg

SEQ ID NO: 187823 - RNA, 21 nt, Human
gagcagcaccuccagagcuag

SEQ ID NO: 187824 - RNA, 18 nt, Human
gaggcaaagaagcagagg

SEQ ID NO: 187825 - RNA, 23 nt, Human
gagggggccacccaaggccuucc

SEQ ID NO: 187826 - RNA, 18 nt, Human
gccuucccuugaggagag

SEQ ID NO: 187827 - RNA, 19 nt, Human
gcgugaaaccgccugggcu

SEQ ID NO: 187828 - RNA, 21 nt, Human
ggcaaagaagcagaggagaaa

SEQ ID NO: 187829 - RNA, 25 nt, Human
gggggcuguuuucuaucugagggag

SEQ ID NO: 187830 - RNA, 24 nt, Human
guccccuguggccgcgccccagag

SEQ ID NO: 187831 - RNA, 19 nt, Human
gucuguacaaagugugggg

SEQ ID NO: 187832 - RNA, 18 nt, Human
uacaggugguaggagggu

SEQ ID NO: 187833 - RNA, 24 nt, Human
uauugucacuaguauaaaacagag

SEQ ID NO: 187834 - RNA, 23 nt, Human
ucagaggcgggggggagcccugu

SEQ ID NO: 187835 - RNA, 19 nt, Human
ucucccauaauucccugcc

SEQ ID NO: 187836 - RNA, 25 nt, Human
ucucccauaauucccugcccuagag

SEQ ID NO: 187837 - RNA, 19 nt, Human
ucugagcgagagaggggcu

SEQ ID NO: 187838 - RNA, 19 nt, Human
ucugagggaggcaaagaag

SEQ ID NO: 187839 - RNA, 23 nt, Human
ugcccccacuucucccauaauuc

SEQ ID NO: 187840 - RNA, 23 nt, Human
uggagugggggcuguuuucuauc

SEQ ID NO: 187841 - RNA, 23 nt, Human
uggauggguggaggggcggcggg

SEQ ID NO: 187842 - RNA, 23 nt, Human
uguggggcgugaaaccgccuggg

SEQ ID NO: 187843 - RNA, 22 nt, Human
aaaacaaaaccaaaccagaaaa

SEQ ID NO: 187844 - RNA, 23 nt, Human
aaaacaaaaccaaaccagaaaac

SEQ ID NO: 187845 - RNA, 18 nt, Human
aaacaaaaccaaaccaga

SEQ ID NO: 187846 - RNA, 22 nt, Human
aaacaaaaccaaaccagaaaac

SEQ ID NO: 187847 - RNA, 23 nt, Human
aaagcagaaaacaaaaccaaacc

SEQ ID NO: 187848 - RNA, 18 nt, Human
aagaccugccugcuggcu

SEQ ID NO: 187849 - RNA, 22 nt, Human
aagcagaaaacaaaaccaaacc

SEQ ID NO: 187850 - RNA, 24 nt, Human
aagcagaaaacaaaaccaaaccag

SEQ ID NO: 187851 - RNA, 26 nt, Human
aagcagaaaacaaaaccaaaccagaa

SEQ ID NO: 187852 - RNA, 20 nt, Human
aagcggaaagugaaaggagg

SEQ ID NO: 187853 - RNA, 21 nt, Human
accaaaccagaaaaccaccgg

SEQ ID NO: 187854 - RNA, 19 nt, Human
acgggaugacagagacugc

SEQ ID NO: 187855 - RNA, 23 nt, Human
acuuucaucuacaacccccuagc

SEQ ID NO: 187856 - RNA, 24 nt, Human
agaaaacaaaaccaaaccagaaaa

SEQ ID NO: 187857 - RNA, 26 nt, Human
agaaaacaaaaccaaaccagaaaacc

SEQ ID NO: 187858 - RNA, 23 nt, Human
agaaacugugcuagguuagacaa

SEQ ID NO: 187859 - RNA, 20 nt, Human
agaggaaggaggcaggaagc

SEQ ID NO: 187860 - RNA, 21 nt, Human
agcacccaccacuuccuuggu

SEQ ID NO: 187861 - RNA, 25 nt, Human
agcagaaaacaaaaccaaaccagaa

SEQ ID NO: 187862 - RNA, 21 nt, Human
agcagaaggcggugcccagaa

SEQ ID NO: 187863 - RNA, 24 nt, Human
agcugcuugcccccauuccagggc

SEQ ID NO: 187864 - RNA, 21 nt, Human
agcuuagaaacugugcuaggu

SEQ ID NO: 187865 - RNA, 23 nt, Human
aggauccucccccgagucuacuc

SEQ ID NO: 187866 - RNA, 22 nt, Human
aguaaaagcagaaaacaaaacc

SEQ ID NO: 187867 - RNA, 18 nt, Human
aucagaaggggaagcgga

SEQ ID NO: 187868 - RNA, 19 nt, Human
caacaagaccugccugcug

SEQ ID NO: 187869 - RNA, 18 nt, Human
caagaccugccugcuggc

SEQ ID NO: 187870 - RNA, 21 nt, Human
cacaccauccuccaugcauca

SEQ ID NO: 187871 - RNA, 23 nt, Human
caggcacuuucaucuacaacccc

SEQ ID NO: 187872 - RNA, 18 nt, Human
cccacgggucugcuccca

SEQ ID NO: 187873 - RNA, 18 nt, Human
cccccgagucuacucugc

SEQ ID NO: 187874 - RNA, 19 nt, Human
cccucugcgccccucgagc

SEQ ID NO: 187875 - RNA, 20 nt, Human
ccgggccugcugaaaagcuc

SEQ ID NO: 187876 - RNA, 19 nt, Human
cgcccggccccgcugaggg

SEQ ID NO: 187877 - RNA, 26 nt, Human
cggucuggcagccuggguagcuuaga

SEQ ID NO: 187878 - RNA, 22 nt, Human
cuagcagaaggcggugcccaga

SEQ ID NO: 187879 - RNA, 19 nt, Human
cuccuggaucccggcgucu

SEQ ID NO: 187880 - RNA, 19 nt, Human
cugcucucaggcgggcaag

SEQ ID NO: 187881 - RNA, 22 nt, Human
cugcugcucucaggcgggcaag

SEQ ID NO: 187882 - RNA, 25 nt, Human
cuuuccgggccugcugaaaagcuca

SEQ ID NO: 187883 - RNA, 21 nt, Human
gaaggucaagaggggagagau

SEQ ID NO: 187884 - RNA, 24 nt, Human
gagggggagcacccaccacuuccu

SEQ ID NO: 187885 - RNA, 21 nt, Human
gcccugaggcccacggguccc

SEQ ID NO: 187886 - RNA, 18 nt, Human
ggagggggagcacccacc

SEQ ID NO: 187887 - RNA, 22 nt, Human
ggcagagcaccagcugcggggc

SEQ ID NO: 187888 - RNA, 22 nt, Human
ggcagcacggucgcucggucug

SEQ ID NO: 187889 - RNA, 21 nt, Human
uaccgcggggcagagcaccag

SEQ ID NO: 187890 - RNA, 23 nt, Human
ucacaccauccuccaugcaucag

SEQ ID NO: 187891 - RNA, 21 nt, Human
ucaggcgggcaagggaggccc

SEQ ID NO: 187892 - RNA, 21 nt, Human
ucccuggaggggagugggugg

SEQ ID NO: 187893 - RNA, 21 nt, Human
uccgggccugcugaaaagcuc

SEQ ID NO: 187894 - RNA, 22 nt, Human
uccuggaucccggcgucugcuc

SEQ ID NO: 187895 - RNA, 20 nt, Human
ugaggucucugcugcucucc

SEQ ID NO: 187896 - RNA, 20 nt, Human
ugcccagaaaagggaauucc

SEQ ID NO: 187897 - RNA, 20 nt, Human
ugcugcugcucucaggcggg

SEQ ID NO: 187898 - RNA, 25 nt, Human
uggaaguaaaagcagaaaacaaaac

SEQ ID NO: 187899 - RNA, 19 nt, Human
uggcaggcuccagcucccg

SEQ ID NO: 187900 - RNA, 19 nt, Human
uggguagcuuagaaacugu

SEQ ID NO: 187901 - RNA, 24 nt, Human
uucaucuacaacccccuagcagaa

SEQ ID NO: 187902 - RNA, 22 nt, Human
uuccuuggucugcugaugaggu

SEQ ID NO: 187903 - RNA, 22 nt, Human
acaauaccagggcacgguuugc

SEQ ID NO: 187904 - RNA, 19 nt, Human
agagaaucacaccuucccu

SEQ ID NO: 187905 - RNA, 21 nt, Human
aucagaaucacucuuuccuca

SEQ ID NO: 187906 - RNA, 20 nt, Human
cccggaccuggcaguacaga

SEQ ID NO: 187907 - RNA, 22 nt, Human
ccgacccggaccuggcaguaca

SEQ ID NO: 187908 - RNA, 23 nt, Human
ccugggugugucugacaauacca

SEQ ID NO: 187909 - RNA, 21 nt, Human
guuugcuucccggcccuccau

SEQ ID NO: 187910 - RNA, 23 nt, Human
uaccagggcacgguuugcuuccc

SEQ ID NO: 187911 - RNA, 24 nt, Human
ugcuucccggcccuccaucucuac

SEQ ID NO: 187912 - RNA, 19 nt, Human
uggcucugccuguggaucc

SEQ ID NO: 187913 - RNA, 25 nt, Human
uucccuuggcucugccuguggaucc

SEQ ID NO: 187914 - RNA, 21 nt, Human
uuccucagagaaucacaccuu

SEQ ID NO: 187915 - RNA, 27 nt, Human
aaaaagaagcccagguccaaucauaga

SEQ ID NO: 187916 - RNA, 26 nt, Human
aaagaacaucaaaaaaggaaaaggga

SEQ ID NO: 187917 - RNA, 21 nt, Human
acacacuaagacacacuaaca

SEQ ID NO: 187918 - RNA, 25 nt, Human
agaaaagggugaaagaacaucaaaa

SEQ ID NO: 187919 - RNA, 18 nt, Human
agacacacuaacaacuga

SEQ ID NO: 187920 - RNA, 21 nt, Human
aucaaaaaaggaaaagggaca

SEQ ID NO: 187921 - RNA, 21 nt, Human
caaaaaaggaaaagggacagc

SEQ ID NO: 187922 - RNA, 22 nt, Human
cacacuaagacacacuaacaac

SEQ ID NO: 187923 - RNA, 18 nt, Human
caucaaaaaaggaaaagg

SEQ ID NO: 187924 - RNA, 22 nt, Human
caucaaaaaaggaaaagggaca

SEQ ID NO: 187925 - RNA, 19 nt, Human
ccccccuuucccuuuauuc

SEQ ID NO: 187926 - RNA, 21 nt, Human
ccuccugcaguuccuuccuug

SEQ ID NO: 187927 - RNA, 22 nt, Human
ccuugcuugcuugcuuccuucc

SEQ ID NO: 187928 - RNA, 23 nt, Human
ccuugcuugcuugcuuccuuccu

SEQ ID NO: 187929 - RNA, 20 nt, Human
cuguucuuuuccuccugcag

SEQ ID NO: 187930 - RNA, 18 nt, Human
cuuuucgcuguucugccu

SEQ ID NO: 187931 - RNA, 19 nt, Human
gcacugaaggguuugggau

SEQ ID NO: 187932 - RNA, 24 nt, Human
gccugcuccccaaggggucuccau

SEQ ID NO: 187933 - RNA, 21 nt, Human
gccuguucuuuuccuccugca

SEQ ID NO: 187934 - RNA, 20 nt, Human
ggguuugggauggggcuggg

SEQ ID NO: 187935 - RNA, 23 nt, Human
ggugaaagaacaucaaaaaagga

SEQ ID NO: 187936 - RNA, 21 nt, Human
ggugguugcguuucauuuugu

SEQ ID NO: 187937 - RNA, 21 nt, Human
ucaaaaaaggaaaagggacag

SEQ ID NO: 187938 - RNA, 23 nt, Human
ugaaagaacaucaaaaaaggaaa

SEQ ID NO: 187939 - RNA, 18 nt, Human
ugcaguuuccucauuagu

SEQ ID NO: 187940 - RNA, 20 nt, Human
ugcaguuuccucauuagugu

SEQ ID NO: 187941 - RNA, 20 nt, Human
ugcauuggcgaaaaagaagc

SEQ ID NO: 187942 - RNA, 21 nt, Human
uggcacugaaggguuugggau

SEQ ID NO: 187943 - RNA, 18 nt, Human
ugggauggggcuggggag

SEQ ID NO: 187944 - RNA, 22 nt, Human
uggggagccgagccugcucccc

SEQ ID NO: 187945 - RNA, 26 nt, Human
ugguugcguuucauuuuguuguuguu

SEQ ID NO: 187946 - RNA, 23 nt, Human
ugguuuuucaauucuucaggaaa

SEQ ID NO: 187947 - RNA, 21 nt, Human
uguucuuuuccuccugcaguu

SEQ ID NO: 187948 - RNA, 23 nt, Human
uguuguuuuuggcacugaagggu

SEQ ID NO: 187949 - RNA, 25 nt, Human
uugaaucauccuucuuguggucgca

SEQ ID NO: 187950 - RNA, 18 nt, Human
uugcuugcuuccuuccuu

SEQ ID NO: 187951 - RNA, 26 nt, Human
uuugguguuucccccccuuucccuuu

SEQ ID NO: 187952 - RNA, 21 nt, Human
uuuucauccucacuuagcaaa

SEQ ID NO: 187953 - RNA, 24 nt, Human
aaacacacaagaaaaccauugugu

SEQ ID NO: 187954 - RNA, 22 nt, Human
aaccauuguguaaggcacucaa

SEQ ID NO: 187955 - RNA, 21 nt, Human
aagaaaaguagagcauccaca

SEQ ID NO: 187956 - RNA, 21 nt, Human
aauaaacacacaagaaaacca

SEQ ID NO: 187957 - RNA, 20 nt, Human
aauauaccccuuuuuuuuuu

SEQ ID NO: 187958 - RNA, 23 nt, Human
aauuaaucauuccuuacaauuca

SEQ ID NO: 187959 - RNA, 18 nt, Human
aggacucacguaagggac

SEQ ID NO: 187960 - RNA, 19 nt, Human
auaccccuuuuuuuuuccu

SEQ ID NO: 187961 - RNA, 21 nt, Human
auaccccuuuuuuuuuccuuu

SEQ ID NO: 187962 - RNA, 21 nt, Human
caagagacuaacaauaguggc

SEQ ID NO: 187963 - RNA, 22 nt, Human
cauguccaccacgcuuugucug

SEQ ID NO: 187964 - RNA, 18 nt, Human
ccccuuuuuuuuuccuuu

SEQ ID NO: 187965 - RNA, 18 nt, Human
ccuccucuuccuucuuug

SEQ ID NO: 187966 - RNA, 23 nt, Human
ccuccucuuccuucuuuggcugu

SEQ ID NO: 187967 - RNA, 18 nt, Human
ccuuguuccucauggcau

SEQ ID NO: 187968 - RNA, 24 nt, Human
cucacguaagggacagcaugcacu

SEQ ID NO: 187969 - RNA, 22 nt, Human
cucuuccuucuuuggcuguuuu

SEQ ID NO: 187970 - RNA, 19 nt, Human
cugcuuugggaaauucugg

SEQ ID NO: 187971 - RNA, 22 nt, Human
cuuccauguuagcugugcaugu

SEQ ID NO: 187972 - RNA, 22 nt, Human
cuuuuuuuuuccuuuuccuccu

SEQ ID NO: 187973 - RNA, 24 nt, Human
gacuaacaauaguggcugcagaaa

SEQ ID NO: 187974 - RNA, 19 nt, Human
gucacacugacauucauuc

SEQ ID NO: 187975 - RNA, 20 nt, Human
uaacaauaguggcugcagaa

SEQ ID NO: 187976 - RNA, 19 nt, Human
uaccccuuuuuuuuuccuu

SEQ ID NO: 187977 - RNA, 22 nt, Human
uagagcauccacaauauacccc

SEQ ID NO: 187978 - RNA, 29 nt, Human
uagauccucugcauuuugagacagcaauu

SEQ ID NO: 187979 - RNA, 21 nt, Human
uaguggcugcagaaacagguu

SEQ ID NO: 187980 - RNA, 22 nt, Human
uauaccccuuuuuuuuuccuuu

SEQ ID NO: 187981 - RNA, 23 nt, Human
uauaccccuuuuuuuuuccuuuu

SEQ ID NO: 187982 - RNA, 20 nt, Human
uauuuaagaauucuuggcug

SEQ ID NO: 187983 - RNA, 18 nt, Human
ucacgagagaucagucac

SEQ ID NO: 187984 - RNA, 19 nt, Human
ugcagaaacagguuuguug

SEQ ID NO: 187985 - RNA, 19 nt, Human
ugccaggacucacguaagg

SEQ ID NO: 187986 - RNA, 26 nt, Human
ugccuuguuccucauggcaucauuca

SEQ ID NO: 187987 - RNA, 20 nt, Human
uggaugccucucaccacuuu

SEQ ID NO: 187988 - RNA, 21 nt, Human
uggcugaaagaaaagucuuca

SEQ ID NO: 187989 - RNA, 20 nt, Human
uuagcaccaagcugcuaaaa

SEQ ID NO: 187990 - RNA, 21 nt, Human
aaaacgaagcugacaagagca

SEQ ID NO: 187991 - RNA, 21 nt, Human
aaaacgaagcugacaagagca

SEQ ID NO: 187992 - RNA, 20 nt, Human
aaacgaagcugacaagagca

SEQ ID NO: 187993 - RNA, 20 nt, Human
aaacgaagcugacaagagca

SEQ ID NO: 187994 - RNA, 19 nt, Human
aacgugcaugccaugcacg

SEQ ID NO: 187995 - RNA, 21 nt, Human
aacucaggagucgucaaaaua

SEQ ID NO: 187996 - RNA, 22 nt, Human
acucucucucuuauucgcuggc

SEQ ID NO: 187997 - RNA, 26 nt, Human
aggcacugaaggaaaaaaaaaaucag

SEQ ID NO: 187998 - RNA, 19 nt, Human
aucacgccucacaggugug

SEQ ID NO: 187999 - RNA, 19 nt, Human
cacccccuccccuuaacuu

SEQ ID NO: 188000 - RNA, 19 nt, Human
cacccccuccccuuaacuu

SEQ ID NO: 188001 - RNA, 24 nt, Human
caucacgccucacaggggucuucc

SEQ ID NO: 188002 - RNA, 27 nt, Human
ccacacuaguccuccuccuccuccgcg

SEQ ID NO: 188003 - RNA, 23 nt, Human
ccacguuuucggugauuuccucu

SEQ ID NO: 188004 - RNA, 22 nt, Human
ccccacacuaguccuccuccuc

SEQ ID NO: 188005 - RNA, 21 nt, Human
ccgcgccgccgccuccucuuc

SEQ ID NO: 188006 - RNA, 21 nt, Human
ccguuuucggugauuuccucu

SEQ ID NO: 188007 - RNA, 20 nt, Human
ccuccucuucuuccucuucu

SEQ ID NO: 188008 - RNA, 18 nt, Human
ccucuucuucucucuccc

SEQ ID NO: 188009 - RNA, 18 nt, Human
ccucuucuucucucuccc

SEQ ID NO: 188010 - RNA, 25 nt, Human
cgccuaaaacgaagcugacaagagc

SEQ ID NO: 188011 - RNA, 18 nt, Human
cucacucuuccuuuccac

SEQ ID NO: 188012 - RNA, 20 nt, Human
cuccgcgccgccgccuccuc

SEQ ID NO: 188013 - RNA, 24 nt, Human
cucgcucacucuuccuuuccaccc

SEQ ID NO: 188014 - RNA, 24 nt, Human
cucucucccucuuacucucucucu

SEQ ID NO: 188015 - RNA, 19 nt, Human
cuuccuuuccaccccacac

SEQ ID NO: 188016 - RNA, 22 nt, Human
cuugcucgcucacucuuccuuu

SEQ ID NO: 188017 - RNA, 22 nt, Human
gcacugaaggaaaaaaaaaauc

SEQ ID NO: 188018 - RNA, 24 nt, Human
gccuaaaacgaagcugacaagagc

SEQ ID NO: 188019 - RNA, 23 nt, Human
gcgcaacucaggagucgucaaaa

SEQ ID NO: 188020 - RNA, 20 nt, Human
gcucgcucacucuuccuuuc

SEQ ID NO: 188021 - RNA, 20 nt, Human
uaauagaaaaagaaaaagaa

SEQ ID NO: 188022 - RNA, 22 nt, Human
uaauagaaaaagaaaaagaauu

SEQ ID NO: 188023 - RNA, 19 nt, Human
uauaauaaauauuaauaca

SEQ ID NO: 188024 - RNA, 22 nt, Human
uauaauaaauauuaauacauca

SEQ ID NO: 188025 - RNA, 19 nt, Human
ucaaggguuugaugcaugu

SEQ ID NO: 188026 - RNA, 21 nt, Human
uccuccgcgccgccgccuccu

SEQ ID NO: 188027 - RNA, 19 nt, Human
ucgcuggcucuuacacccc

SEQ ID NO: 188028 - RNA, 21 nt, Human
ucgcuggcucuuacacccccu

SEQ ID NO: 188029 - RNA, 23 nt, Human
ucgcuggcucuuacacccccucc

SEQ ID NO: 188030 - RNA, 23 nt, Human
ucgcuggcucuuacacccccucc

SEQ ID NO: 188031 - RNA, 19 nt, Human
ucucucucccucuuacucu

SEQ ID NO: 188032 - RNA, 21 nt, Human
ucucucuuauucgcuggcucu

SEQ ID NO: 188033 - RNA, 22 nt, Human
ucuuccucuucuucucucuccc

SEQ ID NO: 188034 - RNA, 19 nt, Human
ucuuccuuuccaccccaca

SEQ ID NO: 188035 - RNA, 21 nt, Human
ugaagcagccacguuuucggu

SEQ ID NO: 188036 - RNA, 21 nt, Human
ugacaagagcaugggcgcaac

SEQ ID NO: 188037 - RNA, 21 nt, Human
ugacaagagcaugggcgcaac

SEQ ID NO: 188038 - RNA, 24 nt, Human
ugacagaacucuuacaaugcagcu

SEQ ID NO: 188039 - RNA, 19 nt, Human
ugcucgcucacucuuccuu

SEQ ID NO: 188040 - RNA, 23 nt, Human
uggcucaggauccuugaagcagg

SEQ ID NO: 188041 - RNA, 18 nt, Human
uucaagcaaagcaaaaag

SEQ ID NO: 188042 - RNA, 24 nt, Human
uugcauugucgcgagucucagagu

SEQ ID NO: 188043 - RNA, 21 nt, Human
agcuggcuggcaaggcugagc

SEQ ID NO: 188044 - RNA, 21 nt, Human
caaaagucgggggauaggcac

SEQ ID NO: 188045 - RNA, 20 nt, Human
ccgcggagcuggcuggcaag

SEQ ID NO: 188046 - RNA, 22 nt, Human
ccggacgcccgagagaugcacc

SEQ ID NO: 188047 - RNA, 22 nt, Human
cucagugcugucgcuagcccau

SEQ ID NO: 188048 - RNA, 22 nt, Human
cucccggagcccagagaccagc

SEQ ID NO: 188049 - RNA, 19 nt, Human
cucuggaugcuccgguucc

SEQ ID NO: 188050 - RNA, 20 nt, Human
gagcucucucggggcuccuc

SEQ ID NO: 188051 - RNA, 22 nt, Human
gaucugcaggaacgucucccuc

SEQ ID NO: 188052 - RNA, 24 nt, Human
gcggagcuggcuggcaaggcugag

SEQ ID NO: 188053 - RNA, 21 nt, Human
gcuccuccuccuccucuucca

SEQ ID NO: 188054 - RNA, 25 nt, Human
gcugccggacgcccgagagaugcac

SEQ ID NO: 188055 - RNA, 23 nt, Human
ggauaggcacagacagaggaggg

SEQ ID NO: 188056 - RNA, 19 nt, Human
gggccgcagaccgcggagg

SEQ ID NO: 188057 - RNA, 21 nt, Human
gggggauaggcacagacagag

SEQ ID NO: 188058 - RNA, 23 nt, Human
ucccggagcccagagaccagcug

SEQ ID NO: 188059 - RNA, 22 nt, Human
ucccucauucguccuuugguca

SEQ ID NO: 188060 - RNA, 22 nt, Human
uggcucccggagcccagagacc

SEQ ID NO: 188061 - RNA, 21 nt, Human
agaacauccuuaaggcgccga

SEQ ID NO: 188062 - RNA, 20 nt, Human
aggaggccugggcucuugug

SEQ ID NO: 188063 - RNA, 20 nt, Human
aggaggccugggcucuugug

SEQ ID NO: 188064 - RNA, 22 nt, Human
aggcagguggcagcucuggucc

SEQ ID NO: 188065 - RNA, 23 nt, Human
agggaugaagucuuccuucugcc

SEQ ID NO: 188066 - RNA, 21 nt, Human
aucccucaccaugagcuccca

SEQ ID NO: 188067 - RNA, 18 nt, Human
caaacuccucuuuucccc

SEQ ID NO: 188068 - RNA, 19 nt, Human
caaacuccucuuuuccccc

SEQ ID NO: 188069 - RNA, 18 nt, Human
cagccccagagggaugaa

SEQ ID NO: 188070 - RNA, 19 nt, Human
caggaggcuccuggcccaa

SEQ ID NO: 188071 - RNA, 20 nt, Human
caggggguccucucuccucu

SEQ ID NO: 188072 - RNA, 19 nt, Human
ccaaacuccucuuuucccc

SEQ ID NO: 188073 - RNA, 21 nt, Human
ccaagcagcuggccugagagc

SEQ ID NO: 188074 - RNA, 21 nt, Human
cccaaacuccucuuuuccccu

SEQ ID NO: 188075 - RNA, 19 nt, Human
cccaagcagcuggccugag

SEQ ID NO: 188076 - RNA, 20 nt, Human
cccaagcagcuggccugaga

SEQ ID NO: 188077 - RNA, 23 nt, Human
cccaggccugagguccccacccc

SEQ ID NO: 188078 - RNA, 30 nt, Human
ccccagagggaugaagucuuccuucugccc

SEQ ID NO: 188079 - RNA, 18 nt, Human
ccucugcagggcugcggc

SEQ ID NO: 188080 - RNA, 19 nt, Human
ccucugcccagcccccagg

SEQ ID NO: 188081 - RNA, 21 nt, Human
ccugagguccccaccccaguu

SEQ ID NO: 188082 - RNA, 24 nt, Human
cuuuggccuuggcuaucucggccg

SEQ ID NO: 188083 - RNA, 21 nt, Human
gaggaugaagcccaagcagcu

SEQ ID NO: 188084 - RNA, 21 nt, Human
gaggggcaggugaguuuggcc

SEQ ID NO: 188085 - RNA, 20 nt, Human
gccagaacaggggcugccag

SEQ ID NO: 188086 - RNA, 21 nt, Human
gcggcagaaacuucugacucu

SEQ ID NO: 188087 - RNA, 20 nt, Human
gcugcaucuuugggcauccu

SEQ ID NO: 188088 - RNA, 23 nt, Human
ggaggagaguugaggggcagggg

SEQ ID NO: 188089 - RNA, 21 nt, Human
ggcagccaugcuagaacaucc

SEQ ID NO: 188090 - RNA, 23 nt, Human
guaggaggccugggcucuugugg

SEQ ID NO: 188091 - RNA, 24 nt, Human
uaagggcaggaggcuccuggccca

SEQ ID NO: 188092 - RNA, 20 nt, Human
uagaacauccuuaaggcgcc

SEQ ID NO: 188093 - RNA, 20 nt, Human
uaucucggcuggcagcuuua

SEQ ID NO: 188094 - RNA, 18 nt, Human
ucagaagauuaggaccac

SEQ ID NO: 188095 - RNA, 20 nt, Human
ucccauaccccaaacuccuc

SEQ ID NO: 188096 - RNA, 25 nt, Human
uccccuguguagcucugucuucaac

SEQ ID NO: 188097 - RNA, 19 nt, Human
uccuagaggauuaggaacc

SEQ ID NO: 188098 - RNA, 19 nt, Human
ugcuuccuuuggccuuggc

SEQ ID NO: 188099 - RNA, 20 nt, Human
uggaagaaauggcaauauaa

SEQ ID NO: 188100 - RNA, 22 nt, Human
uggaggagaguugaggggcagg

SEQ ID NO: 188101 - RNA, 23 nt, Human
uggcagcucugguccccaagccc

SEQ ID NO: 188102 - RNA, 21 nt, Human
uggcagcuuuagaaacccaca

SEQ ID NO: 188103 - RNA, 23 nt, Human
uggccugagagccugcuggcuuc

SEQ ID NO: 188104 - RNA, 25 nt, Human
uggcggccucuguuugugcauucuc

SEQ ID NO: 188105 - RNA, 24 nt, Human
uggguaucccucaccaugagcucc

SEQ ID NO: 188106 - RNA, 20 nt, Human
ugugagaaauucaggggguc

SEQ ID NO: 188107 - RNA, 19 nt, Human
ugugucucuggccucacgg

SEQ ID NO: 188108 - RNA, 20 nt, Human
uucagaagauuaggaccacg

SEQ ID NO: 188109 - RNA, 21 nt, Human
uuccuuuggccuuggcuaucu

SEQ ID NO: 188110 - RNA, 18 nt, Human
uugaggggcaggugaguu

SEQ ID NO: 188111 - RNA, 24 nt, Human
uuggccuuggcuaucucggcuggc

SEQ ID NO: 188112 - RNA, 25 nt, Human
uuuggccuuggcuaucucggcuggc

SEQ ID NO: 188113 - RNA, 21 nt, Human
aacgagggagccugggaagga

SEQ ID NO: 188114 - RNA, 22 nt, Human
aagagaaacccaacgagggagc

SEQ ID NO: 188115 - RNA, 21 nt, Human
aaggggaagaaggggcuuuga

SEQ ID NO: 188116 - RNA, 24 nt, Human
aauagauaacuaacacaagaauca

SEQ ID NO: 188117 - RNA, 18 nt, Human
acaacaaacagagccugg

SEQ ID NO: 188118 - RNA, 18 nt, Human
accgagaagagaagcagu

SEQ ID NO: 188119 - RNA, 18 nt, Human
agaccgagaagagaagca

SEQ ID NO: 188120 - RNA, 26 nt, Human
agagaaacccaacgagggagccuggg

SEQ ID NO: 188121 - RNA, 19 nt, Human
agagaagcagucuaaggac

SEQ ID NO: 188122 - RNA, 23 nt, Human
agagaagcagucuaaggacugag

SEQ ID NO: 188123 - RNA, 21 nt, Human
aggggaagaaggggcuuugag

SEQ ID NO: 188124 - RNA, 22 nt, Human
cccacaacaaacagagccuggg

SEQ ID NO: 188125 - RNA, 23 nt, Human
gacugagcccuggagccccacaa

SEQ ID NO: 188126 - RNA, 20 nt, Human
gagccuggggagaaagagaa

SEQ ID NO: 188127 - RNA, 18 nt, Human
uaagagccauuuggcugg

SEQ ID NO: 188128 - RNA, 22 nt, Human
uagauaacuaacacaagaauca

SEQ ID NO: 188129 - RNA, 19 nt, Human
ugaaguaguggagaaagac

SEQ ID NO: 188130 - RNA, 18 nt, Human
ugagagugacuggcugug

SEQ ID NO: 188131 - RNA, 21 nt, Human
ugggagaaggggaagaagggg

SEQ ID NO: 188132 - RNA, 20 nt, Human
uuuggcuggugggaucauug

SEQ ID NO: 188133 - RNA, 21 nt, Human
uuuuuuuuuuuuaaaagcugu

SEQ ID NO: 188134 - RNA, 21 nt, Human
uuuuuuuuuuuuuuuuaaaag

SEQ ID NO: 188135 - RNA, 25 nt, Human
aaaaaaaauggauaucauuucaugu

SEQ ID NO: 188136 - RNA, 20 nt, Human
aaaagagccaacaacaacaa

SEQ ID NO: 188137 - RNA, 24 nt, Human
aaaagagccaacaacaacaacaac

SEQ ID NO: 188138 - RNA, 21 nt, Human
aaaauaccucccuacaucuuc

SEQ ID NO: 188139 - RNA, 22 nt, Human
aaacuagaaaauccugaucuga

SEQ ID NO: 188140 - RNA, 20 nt, Human
aaagagauuccuguagcucu

SEQ ID NO: 188141 - RNA, 24 nt, Human
aaauaccucccuacaucuucuucc

SEQ ID NO: 188142 - RNA, 19 nt, Human
aacaaaauaccucccuaca

SEQ ID NO: 188143 - RNA, 20 nt, Human
aacaacaacaacaacaaaau

SEQ ID NO: 188144 - RNA, 22 nt, Human
aaccuaaaaccaugcuagccuu

SEQ ID NO: 188145 - RNA, 19 nt, Human
aagagccaacaacaacaac

SEQ ID NO: 188146 - RNA, 21 nt, Human
aauauaggaaaucauaacauc

SEQ ID NO: 188147 - RNA, 21 nt, Human
aaugacaaauacuuugaggaa

SEQ ID NO: 188148 - RNA, 23 nt, Human
aaugcaucauuauugccaacaua

SEQ ID NO: 188149 - RNA, 23 nt, Human
acuauaaugaagguagcacaguc

SEQ ID NO: 188150 - RNA, 18 nt, Human
acucugggagggaagggg

SEQ ID NO: 188151 - RNA, 19 nt, Human
acuguuuuuauuuugucug

SEQ ID NO: 188152 - RNA, 18 nt, Human
agauuauggcaugaagcc

SEQ ID NO: 188153 - RNA, 21 nt, Human
aggggagccuggaguucuugg

SEQ ID NO: 188154 - RNA, 21 nt, Human
auaaaacauuaauggaagauu

SEQ ID NO: 188155 - RNA, 20 nt, Human
aucacgaacacacugauuug

SEQ ID NO: 188156 - RNA, 25 nt, Human
auccaaugcaucauuauugccaaca

SEQ ID NO: 188157 - RNA, 18 nt, Human
caacaacaacaaaauacc

SEQ ID NO: 188158 - RNA, 23 nt, Human
caacaacaacaacaaaauaccuc

SEQ ID NO: 188159 - RNA, 18 nt, Human
caacaacaacaacaacaa

SEQ ID NO: 188160 - RNA, 21 nt, Human
caagaccaucgaagccgaggg

SEQ ID NO: 188161 - RNA, 19 nt, Human
cacacuuagaucucggaga

SEQ ID NO: 188162 - RNA, 22 nt, Human
cacauaguucucagcaguggcc

SEQ ID NO: 188163 - RNA, 23 nt, Human
caccaacagagagaauaacucag

SEQ ID NO: 188164 - RNA, 18 nt, Human
caccagaagggaggaaau

SEQ ID NO: 188165 - RNA, 22 nt, Human
cagcgcgcuccccuggcugucc

SEQ ID NO: 188166 - RNA, 19 nt, Human
cagggcugauggcugcggc

SEQ ID NO: 188167 - RNA, 20 nt, Human
cagggcugauggcugcggcc

SEQ ID NO: 188168 - RNA, 21 nt, Human
caggguagauccaagagugcc

SEQ ID NO: 188169 - RNA, 21 nt, Human
caucucggccgccucagcagc

SEQ ID NO: 188170 - RNA, 21 nt, Human
ccaacaacaacaacaacaaaa

SEQ ID NO: 188171 - RNA, 23 nt, Human
ccaccggguuuagcggguucccg

SEQ ID NO: 188172 - RNA, 19 nt, Human
ccagaagggaggaaaugca

SEQ ID NO: 188173 - RNA, 23 nt, Human
ccccaugcauaaguauuccccuc

SEQ ID NO: 188174 - RNA, 23 nt, Human
cccucucuguuucuaacuuaaaa

SEQ ID NO: 188175 - RNA, 23 nt, Human
ccucagcagccaccggguuuagc

SEQ ID NO: 188176 - RNA, 18 nt, Human
ccugaucugagaaagugu

SEQ ID NO: 188177 - RNA, 18 nt, Human
ccuggaguucuuggggug

SEQ ID NO: 188178 - RNA, 18 nt, Human
ccuggcugucccgcgcug

SEQ ID NO: 188179 - RNA, 24 nt, Human
ccuguagcucuccccaccugaggg

SEQ ID NO: 188180 - RNA, 22 nt, Human
cgagaaggucgaggaugcagug

SEQ ID NO: 188181 - RNA, 21 nt, Human
cgcuccuggucaucuccaggg

SEQ ID NO: 188182 - RNA, 20 nt, Human
cuaaaaccaugcuagccuuc

SEQ ID NO: 188183 - RNA, 24 nt, Human
cuagccuucggcagacagauggca

SEQ ID NO: 188184 - RNA, 20 nt, Human
cuccagggcugauggcugcg

SEQ ID NO: 188185 - RNA, 21 nt, Human
cuccagggcugauggcugcgg

SEQ ID NO: 188186 - RNA, 20 nt, Human
cucccuacaucuucuuccuc

SEQ ID NO: 188187 - RNA, 20 nt, Human
cugaacaagaccaucgaagc

SEQ ID NO: 188188 - RNA, 24 nt, Human
cugauggcugcggccgcgauucuc

SEQ ID NO: 188189 - RNA, 23 nt, Human
cugcggccccagcgcgcuccccu

SEQ ID NO: 188190 - RNA, 19 nt, Human
cugugcuaacaggcucccc

SEQ ID NO: 188191 - RNA, 19 nt, Human
gagaauaacucagaaggga

SEQ ID NO: 188192 - RNA, 23 nt, Human
gagggucccucgggccuuuggcu

SEQ ID NO: 188193 - RNA, 23 nt, Human
gaugugucuuggaaaugaacuau

SEQ ID NO: 188194 - RNA, 21 nt, Human
gauuauggcaugaagccgugu

SEQ ID NO: 188195 - RNA, 21 nt, Human
gauuugaggaguuuggggugg

SEQ ID NO: 188196 - RNA, 24 nt, Human
gcagcagggcucgcagccucucuc

SEQ ID NO: 188197 - RNA, 29 nt, Human
gccaccaacagagagaauaaccgguuucg

SEQ ID NO: 188198 - RNA, 24 nt, Human
gcuaauuggacaccaccauggcug

SEQ ID NO: 188199 - RNA, 21 nt, Human
gcuccuggucaucuccagggc

SEQ ID NO: 188200 - RNA, 24 nt, Human
gcuguuggugcaugucaccacauu

SEQ ID NO: 188201 - RNA, 28 nt, Human
ggacauccaacauuuacccuccagaaca

SEQ ID NO: 188202 - RNA, 23 nt, Human
ggaguucuuggggugagccuggg

SEQ ID NO: 188203 - RNA, 23 nt, Human
ggccuuuggcuccagaugugucu

SEQ ID NO: 188204 - RNA, 21 nt, Human
ggcucugcagcagggcucgca

SEQ ID NO: 188205 - RNA, 22 nt, Human
ggguucccgcaugcugcggccc

SEQ ID NO: 188206 - RNA, 22 nt, Human
ggugagccugggcugugaugga

SEQ ID NO: 188207 - RNA, 21 nt, Human
uaacagauacuauacaacccu

SEQ ID NO: 188208 - RNA, 20 nt, Human
uaauuuuuaaacuagaaaaa

SEQ ID NO: 188209 - RNA, 20 nt, Human
uacagugcagaugcauucuu

SEQ ID NO: 188210 - RNA, 20 nt, Human
uacauggugggcugaccuua

SEQ ID NO: 188211 - RNA, 21 nt, Human
uacccuccagaacauuggcca

SEQ ID NO: 188212 - RNA, 22 nt, Human
uagauaaaacauuaauggaaga

SEQ ID NO: 188213 - RNA, 21 nt, Human
uauacaacccugagucaucac

SEQ ID NO: 188214 - RNA, 20 nt, Human
uaugaagugguuugccacca

SEQ ID NO: 188215 - RNA, 21 nt, Human
uauggcaugaagccgugugca

SEQ ID NO: 188216 - RNA, 24 nt, Human
ucacaagauuccuugaguggaaga

SEQ ID NO: 188217 - RNA, 19 nt, Human
uccagggcugauggcugcg

SEQ ID NO: 188218 - RNA, 21 nt, Human
ucccagccggaggcucugcag

SEQ ID NO: 188219 - RNA, 18 nt, Human
uccccuggcugucccgcg

SEQ ID NO: 188220 - RNA, 24 nt, Human
uccgcaucgcccccacggggggcg

SEQ ID NO: 188221 - RNA, 20 nt, Human
uccuacaucucuguuggugc

SEQ ID NO: 188222 - RNA, 19 nt, Human
uccugaucugagaaagugu

SEQ ID NO: 188223 - RNA, 18 nt, Human
ucuaacuuaaaaaaaaaa

SEQ ID NO: 188224 - RNA, 21 nt, Human
ucucacuaaacuguauccaca

SEQ ID NO: 188225 - RNA, 18 nt, Human
ugaagccgugugcaaaag

SEQ ID NO: 188226 - RNA, 24 nt, Human
ugaagccgugugcaaaagagccaa

SEQ ID NO: 188227 - RNA, 19 nt, Human
ugaaggcuuuugauuugag

SEQ ID NO: 188228 - RNA, 18 nt, Human
ugagaaaauuacauggug

SEQ ID NO: 188229 - RNA, 23 nt, Human
ugagaaagugucauaacauagca

SEQ ID NO: 188230 - RNA, 18 nt, Human
ugaguggaagauuauggc

SEQ ID NO: 188231 - RNA, 19 nt, Human
ugaguggaagauuauggca

SEQ ID NO: 188232 - RNA, 19 nt, Human
ugcuaugaagugguuugcc

SEQ ID NO: 188233 - RNA, 19 nt, Human
ugcucagcacacaccucac

SEQ ID NO: 188234 - RNA, 20 nt, Human
uggaggauacucaggguaga

SEQ ID NO: 188235 - RNA, 19 nt, Human
uggcaugaagccgugugca

SEQ ID NO: 188236 - RNA, 21 nt, Human
uggcauuguacuucuuacaga

SEQ ID NO: 188237 - RNA, 19 nt, Human
ugggagggaagggguaaca

SEQ ID NO: 188238 - RNA, 20 nt, Human
uguauuagagaaaccauuag

SEQ ID NO: 188239 - RNA, 21 nt, Human
ugucugugucagguuuacaug

SEQ ID NO: 188240 - RNA, 24 nt, Human
uuacucugggagggaagggguaac

SEQ ID NO: 188241 - RNA, 22 nt, Human
uucccuauagauaaaacauuaa

SEQ ID NO: 188242 - RNA, 22 nt, Human
uucucagcgcucacccgguccc

SEQ ID NO: 188243 - RNA, 19 nt, Human
uugcuuauucuguauuaga

SEQ ID NO: 188244 - RNA, 23 nt, Human
uuguacuucuuacagaucacagu

SEQ ID NO: 188245 - RNA, 23 nt, Human
uuucaugucauauaugcacaggu

SEQ ID NO: 188246 - RNA, 22 nt, Human
aaacaagaaaggagcaaauggg

SEQ ID NO: 188247 - RNA, 19 nt, Human
aaacacaaauggccuccca

SEQ ID NO: 188248 - RNA, 24 nt, Human
aaagcauaggaaacaucccccucu

SEQ ID NO: 188249 - RNA, 23 nt, Human
aaaggagcaaaugggaaccaagu

SEQ ID NO: 188250 - RNA, 20 nt, Human
aaauggccucccaaccucug

SEQ ID NO: 188251 - RNA, 22 nt, Human
aacucgucgacucccuugguuu

SEQ ID NO: 188252 - RNA, 22 nt, Human
aagaaagacgaaggauaaauga

SEQ ID NO: 188253 - RNA, 19 nt, Human
aagaagccugcucgucuag

SEQ ID NO: 188254 - RNA, 25 nt, Human
aagaaggagagaacugugaaaagga

SEQ ID NO: 188255 - RNA, 20 nt, Human
aagacgaaggauaaaugaac

SEQ ID NO: 188256 - RNA, 22 nt, Human
aagcagcaugaauuuagccaga

SEQ ID NO: 188257 - RNA, 25 nt, Human
aagcagcaugaauuuagccagagcc

SEQ ID NO: 188258 - RNA, 20 nt, Human
aaggagcucuuccacaccag

SEQ ID NO: 188259 - RNA, 20 nt, Human
aaucauggcugugaaauucg

SEQ ID NO: 188260 - RNA, 22 nt, Human
acagaaucuucuuuaucaagga

SEQ ID NO: 188261 - RNA, 25 nt, Human
acccaccuuaaccucucuguucccu

SEQ ID NO: 188262 - RNA, 22 nt, Human
acucugggcucaagucacauuc

SEQ ID NO: 188263 - RNA, 25 nt, Human
acucugggcucaagucacauuccca

SEQ ID NO: 188264 - RNA, 19 nt, Human
acuuguuuauguaccuugc

SEQ ID NO: 188265 - RNA, 24 nt, Human
agaaacaauaaaagagucaagguu

SEQ ID NO: 188266 - RNA, 19 nt, Human
agaaggagagaacugugaa

SEQ ID NO: 188267 - RNA, 24 nt, Human
agaagggaucaaagcauaggaaac

SEQ ID NO: 188268 - RNA, 18 nt, Human
agcauaggaaacaucccc

SEQ ID NO: 188269 - RNA, 21 nt, Human
agccaaaccucuagacggaca

SEQ ID NO: 188270 - RNA, 19 nt, Human
aggaagcccgcaugcagcc

SEQ ID NO: 188271 - RNA, 19 nt, Human
aggaagguagaagggcuuc

SEQ ID NO: 188272 - RNA, 21 nt, Human
aggaggagagauggugcuggu

SEQ ID NO: 188273 - RNA, 25 nt, Human
agugcagcucauuucucuuaaaugu

SEQ ID NO: 188274 - RNA, 26 nt, Human
agugugcaugaacacacaugcacgca

SEQ ID NO: 188275 - RNA, 22 nt, Human
caaagcauaggaaacauccccc

SEQ ID NO: 188276 - RNA, 22 nt, Human
caagaaaggagcaaaugggaac

SEQ ID NO: 188277 - RNA, 21 nt, Human
caagucucuuccccucuuuuc

SEQ ID NO: 188278 - RNA, 19 nt, Human
caaguugaaacaguugcca

SEQ ID NO: 188279 - RNA, 21 nt, Human
caauccaccugcucuuguccc

SEQ ID NO: 188280 - RNA, 18 nt, Human
caccaccacuaucgaguc

SEQ ID NO: 188281 - RNA, 27 nt, Human
cacgcgacccacagccuuacccucccg

SEQ ID NO: 188282 - RNA, 19 nt, Human
cacucugccaccaaugacc

SEQ ID NO: 188283 - RNA, 19 nt, Human
cagaaucuucuuuaucaag

SEQ ID NO: 188284 - RNA, 22 nt, Human
cagaugucaucuaagcagcaug

SEQ ID NO: 188285 - RNA, 21 nt, Human
cagccaggcccaaagaggugg

SEQ ID NO: 188286 - RNA, 22 nt, Human
cagcuucacucaaagaggauau

SEQ ID NO: 188287 - RNA, 26 nt, Human
caugaacacacaugcacgcacaaucc

SEQ ID NO: 188288 - RNA, 18 nt, Human
cauucuccuuauuccaga

SEQ ID NO: 188289 - RNA, 20 nt, Human
ccagagcugcacucauggag

SEQ ID NO: 188290 - RNA, 22 nt, Human
cccacccagccaggcccaaaga

SEQ ID NO: 188291 - RNA, 20 nt, Human
ccccgucacccuccgugaca

SEQ ID NO: 188292 - RNA, 18 nt, Human
ccccugcugagagggccc

SEQ ID NO: 188293 - RNA, 25 nt, Human
cccgcaugcagcccuuccuuucucc

SEQ ID NO: 188294 - RNA, 22 nt, Human
cccucccguacccaccuuaacc

SEQ ID NO: 188295 - RNA, 23 nt, Human
cccucccguacccaccuuaaccu

SEQ ID NO: 188296 - RNA, 23 nt, Human
cccucucugcccccgucucccau

SEQ ID NO: 188297 - RNA, 22 nt, Human
ccuuggguucuguucaccacca

SEQ ID NO: 188298 - RNA, 19 nt, Human
cuaaauggucucacauaga

SEQ ID NO: 188299 - RNA, 19 nt, Human
cugcugagagggcccaugg

SEQ ID NO: 188300 - RNA, 18 nt, Human
gaaaagcuaccuuugugc

SEQ ID NO: 188301 - RNA, 26 nt, Human
gaagaaggagagaacugugaaaagga

SEQ ID NO: 188302 - RNA, 19 nt, Human
gaagcccgcaugcagcccu

SEQ ID NO: 188303 - RNA, 23 nt, Human
gacuccuuacuucuucaaagguc

SEQ ID NO: 188304 - RNA, 24 nt, Human
gacuccuuacuucuucaaaggucc

SEQ ID NO: 188305 - RNA, 23 nt, Human
gagcaaaugggaaccaaguucac

SEQ ID NO: 188306 - RNA, 27 nt, Human
gagccucuuuccuuucacaaggcacuc

SEQ ID NO: 188307 - RNA, 22 nt, Human
gcagcccuuccuuucuccgcuc

SEQ ID NO: 188308 - RNA, 21 nt, Human
gccuuacccucccguacccac

SEQ ID NO: 188309 - RNA, 23 nt, Human
gcgacccacagccuuacccuccc

SEQ ID NO: 188310 - RNA, 21 nt, Human
gcucaaugguacaaucugaga

SEQ ID NO: 188311 - RNA, 18 nt, Human
ggaggaagcccgcaugca

SEQ ID NO: 188312 - RNA, 26 nt, Human
ggucccucucugcccccgucucccau

SEQ ID NO: 188313 - RNA, 21 nt, Human
guuuguagaagccaaaccucu

SEQ ID NO: 188314 - RNA, 22 nt, Human
guuuuggggggaagaagccugc

SEQ ID NO: 188315 - RNA, 24 nt, Human
uaaaugucaagcucauuucucuua

SEQ ID NO: 188316 - RNA, 18 nt, Human
uacacaugggugcaagug

SEQ ID NO: 188317 - RNA, 20 nt, Human
uacccuaccauacacgacuc

SEQ ID NO: 188318 - RNA, 22 nt, Human
uaccuuugugcucacauagccu

SEQ ID NO: 188319 - RNA, 23 nt, Human
uagacggacagauuaagggagug

SEQ ID NO: 188320 - RNA, 23 nt, Human
uagccagagccucuuuccuuuca

SEQ ID NO: 188321 - RNA, 24 nt, Human
uaucauaacguacuuuccaguuug

SEQ ID NO: 188322 - RNA, 22 nt, Human
ucaaacaaguugaaacaguugc

SEQ ID NO: 188323 - RNA, 25 nt, Human
ucaaacaaguugaaacaguugccaa

SEQ ID NO: 188324 - RNA, 23 nt, Human
ucaucucaugggaacaggaauug

SEQ ID NO: 188325 - RNA, 26 nt, Human
uccaagucucuuccccucuuuucgua

SEQ ID NO: 188326 - RNA, 23 nt, Human
uccacauaagaaagacgaaggau

SEQ ID NO: 188327 - RNA, 20 nt, Human
uccacucugccaccaaugac

SEQ ID NO: 188328 - RNA, 20 nt, Human
ucccacccagccaggcccaa

SEQ ID NO: 188329 - RNA, 24 nt, Human
ucccauuuccaagucucuuccccu

SEQ ID NO: 188330 - RNA, 21 nt, Human
uccccugcugagagggcccau

SEQ ID NO: 188331 - RNA, 18 nt, Human
ucccuuuagccuuccugg

SEQ ID NO: 188332 - RNA, 21 nt, Human
uccucaccuaaaugaaaagau

SEQ ID NO: 188333 - RNA, 21 nt, Human
uccuggaagguucuugguuca

SEQ ID NO: 188334 - RNA, 23 nt, Human
uccuuacuucuucaaagguccgu

SEQ ID NO: 188335 - RNA, 20 nt, Human
ucuagacggacagauuaagg

SEQ ID NO: 188336 - RNA, 22 nt, Human
ucuagcuucagguuaagugaga

SEQ ID NO: 188337 - RNA, 24 nt, Human
ucugagagggaacagguguugcag

SEQ ID NO: 188338 - RNA, 23 nt, Human
ucugcuuggcacaugauuccuag

SEQ ID NO: 188339 - RNA, 22 nt, Human
ucugggcucaagucacauuccc

SEQ ID NO: 188340 - RNA, 23 nt, Human
ucuugcaggauugcucaccgccu

SEQ ID NO: 188341 - RNA, 24 nt, Human
ucuuuuugguucucccagcuucac

SEQ ID NO: 188342 - RNA, 21 nt, Human
ugaacacacaugcacgcacaa

SEQ ID NO: 188343 - RNA, 25 nt, Human
ugacaugcgcaucacgcgacccaca

SEQ ID NO: 188344 - RNA, 21 nt, Human
ugagagggcccauggcaucau

SEQ ID NO: 188345 - RNA, 23 nt, Human
ugcaagugugcaugaacacacau

SEQ ID NO: 188346 - RNA, 19 nt, Human
ugcagcccuuccuuucucc

SEQ ID NO: 188347 - RNA, 22 nt, Human
ugccaccaaugaccuuggguuc

SEQ ID NO: 188348 - RNA, 18 nt, Human
ugcugagagggcccaugg

SEQ ID NO: 188349 - RNA, 22 nt, Human
ugggaauguccagucccuucuu

SEQ ID NO: 188350 - RNA, 18 nt, Human
uguagaagccaaaccucu

SEQ ID NO: 188351 - RNA, 19 nt, Human
ugugucuugaagagaugca

SEQ ID NO: 188352 - RNA, 22 nt, Human
uucaccaccacuaucgagucuc

SEQ ID NO: 188353 - RNA, 24 nt, Human
uucacccccgucacccuccgugac

SEQ ID NO: 188354 - RNA, 18 nt, Human
uucguucuuccccaaacc

SEQ ID NO: 188355 - RNA, 25 nt, Human
uucuaccaagaguguucacucuggg

SEQ ID NO: 188356 - RNA, 22 nt, Human
uugggaauguccagucccuucu

SEQ ID NO: 188357 - RNA, 22 nt, Human
uuuguagaaucuuuucguccca

SEQ ID NO: 188358 - RNA, 20 nt, Human
uuuguucaagaauccacucu

SEQ ID NO: 188359 - RNA, 21 nt, Human
uuuucgucccaagugugggca

SEQ ID NO: 188360 - RNA, 20 nt, Human
uuuuggggggaagaagccug

SEQ ID NO: 188361 - RNA, 22 nt, Human
uuuuugggcuuauauauaaaca

SEQ ID NO: 188362 - RNA, 19 nt, Human
aaagcccagcccucaccau

SEQ ID NO: 188363 - RNA, 19 nt, Human
aaagguggguuuaaugucc

SEQ ID NO: 188364 - RNA, 22 nt, Human
aagaaacucuagccagguagag

SEQ ID NO: 188365 - RNA, 19 nt, Human
aagacaucaucugucacug

SEQ ID NO: 188366 - RNA, 28 nt, Human
agagaauccagcuggcucggagccugag

SEQ ID NO: 188367 - RNA, 18 nt, Human
agcaaaagcccagcccuc

SEQ ID NO: 188368 - RNA, 18 nt, Human
aggcagagaauccagcug

SEQ ID NO: 188369 - RNA, 20 nt, Human
augucccagugcucugauga

SEQ ID NO: 188370 - RNA, 24 nt, Human
caaguuccagccuccaugcccaca

SEQ ID NO: 188371 - RNA, 19 nt, Human
cagcaaaagcccagcccuc

SEQ ID NO: 188372 - RNA, 20 nt, Human
cagcaaaagcccagcccuca

SEQ ID NO: 188373 - RNA, 25 nt, Human
cagcaaaagcccagcccucaccaug

SEQ ID NO: 188374 - RNA, 22 nt, Human
cagcacacccuccuggcagaac

SEQ ID NO: 188375 - RNA, 21 nt, Human
caggcuccccccgcgggagga

SEQ ID NO: 188376 - RNA, 18 nt, Human
caguaacuggcuagcccc

SEQ ID NO: 188377 - RNA, 19 nt, Human
caugcccacagcaggcaug

SEQ ID NO: 188378 - RNA, 22 nt, Human
cccacagcacacccuccuggca

SEQ ID NO: 188379 - RNA, 19 nt, Human
ccccacagcacacccuccu

SEQ ID NO: 188380 - RNA, 22 nt, Human
ccccagggaagggagagccuca

SEQ ID NO: 188381 - RNA, 21 nt, Human
ccccccgcgggaggagggggc

SEQ ID NO: 188382 - RNA, 23 nt, Human
ccugccugccgcuuaacccugac

SEQ ID NO: 188383 - RNA, 20 nt, Human
cggcucaaggacacucgcga

SEQ ID NO: 188384 - RNA, 24 nt, Human
cuagccccagggaagggagagccu

SEQ ID NO: 188385 - RNA, 23 nt, Human
gacaucaucugucacuggggucc

SEQ ID NO: 188386 - RNA, 20 nt, Human
gaggacagcaaaagcccagc

SEQ ID NO: 188387 - RNA, 24 nt, Human
gcucugaugagaagaaacucuagc

SEQ ID NO: 188388 - RNA, 18 nt, Human
ggacacucgcgauggcuc

SEQ ID NO: 188389 - RNA, 21 nt, Human
ggaucgggauggcccugccuc

SEQ ID NO: 188390 - RNA, 20 nt, Human
gguagaagccagaaaagccc

SEQ ID NO: 188391 - RNA, 23 nt, Human
gguagaagccagaaaagcccaau

SEQ ID NO: 188392 - RNA, 18 nt, Human
gucacccgcggcucaagg

SEQ ID NO: 188393 - RNA, 21 nt, Human
gucccauggccaggauuucau

SEQ ID NO: 188394 - RNA, 18 nt, Human
guuuaaugucccagugcu

SEQ ID NO: 188395 - RNA, 18 nt, Human
ucacugaugaccauggaa

SEQ ID NO: 188396 - RNA, 22 nt, Human
ucaggagucugacccccacagc

SEQ ID NO: 188397 - RNA, 19 nt, Human
ugacccccacagcacaccc

SEQ ID NO: 188398 - RNA, 23 nt, Human
ugacccccacagcacacccuccu

SEQ ID NO: 188399 - RNA, 21 nt, Human
ugagaagaggacagcaaaagc

SEQ ID NO: 188400 - RNA, 19 nt, Human
ugaggcuacugaggucacu

SEQ ID NO: 188401 - RNA, 18 nt, Human
ugaggucacugaugacca

SEQ ID NO: 188402 - RNA, 22 nt, Human
ugccucaaccacaaguuccagc

SEQ ID NO: 188403 - RNA, 21 nt, Human
uggcucgaguguacguggcaa

SEQ ID NO: 188404 - RNA, 19 nt, Human
uucaugguagaagccagaa

SEQ ID NO: 188405 - RNA, 22 nt, Human
uuuuuuuuuucugggaaaaggu

SEQ ID NO: 188406 - RNA, 24 nt, Human
uuuuuuuuuuuuuuuuuuucuggg

SEQ ID NO: 188407 - RNA, 21 nt, Human
agggggcgguggggcccccgg

SEQ ID NO: 188408 - RNA, 20 nt, Human
augacccuguucuguugggg

SEQ ID NO: 188409 - RNA, 19 nt, Human
caguuccacugcuuuccuu

SEQ ID NO: 188410 - RNA, 18 nt, Human
ccagaaccagggggcgca

SEQ ID NO: 188411 - RNA, 19 nt, Human
cccgccgggcggccucuuu

SEQ ID NO: 188412 - RNA, 26 nt, Human
cuucccaacccacgcggguccugucc

SEQ ID NO: 188413 - RNA, 27 nt, Human
guugagggaccaaauccucuccggcuu

SEQ ID NO: 188414 - RNA, 22 nt, Human
guuggggggauggcgggggggc

SEQ ID NO: 188415 - RNA, 22 nt, Human
uccacugcuuuccuucccaacc

SEQ ID NO: 188416 - RNA, 23 nt, Human
uccagaaccagggggcgcaggac

SEQ ID NO: 188417 - RNA, 21 nt, Human
uggccugcgcugaccaagggg

SEQ ID NO: 188418 - RNA, 24 nt, Human
uguuggggggauggcgggggggcc

SEQ ID NO: 188419 - RNA, 22 nt, Human
uucccaacccacgcggguccug

SEQ ID NO: 188420 - RNA, 26 nt, Human
aaaaaaaaacacaaaaccaaacaaac

SEQ ID NO: 188421 - RNA, 23 nt, Human
aaaaaaacacaaccuucacuaag

SEQ ID NO: 188422 - RNA, 22 nt, Human
aaaaaaagagcaaauucuccaa

SEQ ID NO: 188423 - RNA, 25 nt, Human
aaaaaagagcaaauucuccaagcaa

SEQ ID NO: 188424 - RNA, 19 nt, Human
aaaaacccagaaggcccag

SEQ ID NO: 188425 - RNA, 23 nt, Human
aaacaaacaaaccaacaaaaaaa

SEQ ID NO: 188426 - RNA, 22 nt, Human
aaacaaaccaacaaaaaaaacc

SEQ ID NO: 188427 - RNA, 21 nt, Human
aaacaacuucuauacugaaau

SEQ ID NO: 188428 - RNA, 24 nt, Human
aaacacaaaaccaaacaaacaaac

SEQ ID NO: 188429 - RNA, 22 nt, Human
aaaccaaacaaacaaaccaaca

SEQ ID NO: 188430 - RNA, 22 nt, Human
aaaccaacaaaaaaaaccucca

SEQ ID NO: 188431 - RNA, 20 nt, Human
aaacccagaaggcccagaaa

SEQ ID NO: 188432 - RNA, 20 nt, Human
aacaauaucugacacugauc

SEQ ID NO: 188433 - RNA, 30 nt, Human
aacacaaaaccaaacaaacaaaccaacaag

SEQ ID NO: 188434 - RNA, 24 nt, Human
aacacaauauucaaauauuaaacu

SEQ ID NO: 188435 - RNA, 24 nt, Human
aaccaaacaaacaaaccaacaaaa

SEQ ID NO: 188436 - RNA, 20 nt, Human
aacccagaaggcccagaaau

SEQ ID NO: 188437 - RNA, 22 nt, Human
aagaaaaaaaaaguauguucua

SEQ ID NO: 188438 - RNA, 20 nt, Human
aagaaaaacaaauacaaauu

SEQ ID NO: 188439 - RNA, 20 nt, Human
aagaaaauacuagaagaaaa

SEQ ID NO: 188440 - RNA, 20 nt, Human
aagagcaaauucuccaagca

SEQ ID NO: 188441 - RNA, 20 nt, Human
aagcaaaaacacaacaucaa

SEQ ID NO: 188442 - RNA, 26 nt, Human
aagcaagcaacagaaaaaagggaccc

SEQ ID NO: 188443 - RNA, 25 nt, Human
aagcacauacacaaagguagacucc

SEQ ID NO: 188444 - RNA, 22 nt, Human
acaaaaccaaacaaacaaacca

SEQ ID NO: 188445 - RNA, 28 nt, Human
acaaaaccaaacaaacaaaccaacaaaa

SEQ ID NO: 188446 - RNA, 22 nt, Human
acacaaaaccaaacaaacaaac

SEQ ID NO: 188447 - RNA, 24 nt, Human
acacaaaaccaaacaaacaaacca

SEQ ID NO: 188448 - RNA, 19 nt, Human
acacaaaagacacauaaga

SEQ ID NO: 188449 - RNA, 20 nt, Human
acagagcaagaccccaucuc

SEQ ID NO: 188450 - RNA, 24 nt, Human
acagagcaagaccccaucucaaaa

SEQ ID NO: 188451 - RNA, 27 nt, Human
acaugucuuccuagguauuucacaucc

SEQ ID NO: 188452 - RNA, 22 nt, Human
accaaacaaacaaaccaacaaa

SEQ ID NO: 188453 - RNA, 18 nt, Human
accccaucucaaaaaaaa

SEQ ID NO: 188454 - RNA, 23 nt, Human
accccaucucaaaaaaaaacaca

SEQ ID NO: 188455 - RNA, 19 nt, Human
acuccuaaagaaaacaacu

SEQ ID NO: 188456 - RNA, 24 nt, Human
acugcacuccagccugggcgacag

SEQ ID NO: 188457 - RNA, 26 nt, Human
acugcacuccagccugggcgacagag

SEQ ID NO: 188458 - RNA, 21 nt, Human
agaaaaaggaaaaaagcaaag

SEQ ID NO: 188459 - RNA, 19 nt, Human
agaaaaauaagcaaaaaca

SEQ ID NO: 188460 - RNA, 22 nt, Human
agaaaacaacuucuauacugaa

SEQ ID NO: 188461 - RNA, 22 nt, Human
agaaggcccagaaauuggccua

SEQ ID NO: 188462 - RNA, 26 nt, Human
agacagaaaaaggagaagagggaccc

SEQ ID NO: 188463 - RNA, 27 nt, Human
agacugcucccuucauuacccaaaaaa

SEQ ID NO: 188464 - RNA, 22 nt, Human
agauugcagugagccgagaucc

SEQ ID NO: 188465 - RNA, 20 nt, Human
agcaaaaacacaacaucaaa

SEQ ID NO: 188466 - RNA, 21 nt, Human
agcaaaaacacaacaucaaaa

SEQ ID NO: 188467 - RNA, 18 nt, Human
aggcuggcgcggcggcgg

SEQ ID NO: 188468 - RNA, 24 nt, Human
auaaaauauccuacagcugucuaa

SEQ ID NO: 188469 - RNA, 18 nt, Human
auacuaaaauaucagacc

SEQ ID NO: 188470 - RNA, 19 nt, Human
auagagcagacuacaaagc

SEQ ID NO: 188471 - RNA, 23 nt, Human
auaugggaacauauugacaauau

SEQ ID NO: 188472 - RNA, 24 nt, Human
auccugccacugcacuccagccug

SEQ ID NO: 188473 - RNA, 24 nt, Human
auugcagugagccgagauccugcc

SEQ ID NO: 188474 - RNA, 20 nt, Human
caaaaacacuuucaccuaac

SEQ ID NO: 188475 - RNA, 22 nt, Human
caaaaccaaacaaacaaaccaa

SEQ ID NO: 188476 - RNA, 21 nt, Human
caaacaaacaaaccaacaaag

SEQ ID NO: 188477 - RNA, 24 nt, Human
caaaccaacaaaaaaaaccuccac

SEQ ID NO: 188478 - RNA, 22 nt, Human
caaaggacggacauucuuaaga

SEQ ID NO: 188479 - RNA, 18 nt, Human
caacaaaaaaaaccucca

SEQ ID NO: 188480 - RNA, 19 nt, Human
caacaaaaaaaaccuccac

SEQ ID NO: 188481 - RNA, 26 nt, Human
caacaaaaaaaaccuccacuuuccag

SEQ ID NO: 188482 - RNA, 19 nt, Human
caagcaagcaacagaaaaa

SEQ ID NO: 188483 - RNA, 23 nt, Human
caauacacaauauauugcaaaau

SEQ ID NO: 188484 - RNA, 20 nt, Human
cacagcuguugcuuuaccca

SEQ ID NO: 188485 - RNA, 23 nt, Human
cacaugaacucuuccauaucauc

SEQ ID NO: 188486 - RNA, 23 nt, Human
cacuccagccugggcgacagagc

SEQ ID NO: 188487 - RNA, 19 nt, Human
cacugcacuccagccuggg

SEQ ID NO: 188488 - RNA, 20 nt, Human
cacugcacuccagccugggc

SEQ ID NO: 188489 - RNA, 20 nt, Human
cacugcacuccagccugggc

SEQ ID NO: 188490 - RNA, 22 nt, Human
cacugcacuccagccugggcga

SEQ ID NO: 188491 - RNA, 24 nt, Human
cacugcacuccagccugggcgaca

SEQ ID NO: 188492 - RNA, 26 nt, Human
cacugcacuccagccugggcgacaga

SEQ ID NO: 188493 - RNA, 19 nt, Human
cagaaaaaggagaagagca

SEQ ID NO: 188494 - RNA, 18 nt, Human
cagcaaggaacucaagcc

SEQ ID NO: 188495 - RNA, 22 nt, Human
cagcaucuacucaaaagggaag

SEQ ID NO: 188496 - RNA, 19 nt, Human
caggccccgcuacuagcgc

SEQ ID NO: 188497 - RNA, 20 nt, Human
cagugagccgagauccugcc

SEQ ID NO: 188498 - RNA, 25 nt, Human
caugaaagucaccuucugaaagaca

SEQ ID NO: 188499 - RNA, 20 nt, Human
caugcaaacaugcauacaau

SEQ ID NO: 188500 - RNA, 23 nt, Human
cauggccaaugaauaugaaaaaa

SEQ ID NO: 188501 - RNA, 18 nt, Human
ccaaacaaacaaaccaac

SEQ ID NO: 188502 - RNA, 21 nt, Human
ccaaacaaacaaaccaacaaa

SEQ ID NO: 188503 - RNA, 20 nt, Human
ccaaauauuaacaccaauua

SEQ ID NO: 188504 - RNA, 20 nt, Human
ccacugcacuccagccuggg

SEQ ID NO: 188505 - RNA, 21 nt, Human
ccacugcacuccagccugggc

SEQ ID NO: 188506 - RNA, 21 nt, Human
ccacugcacuccagccugggc

SEQ ID NO: 188507 - RNA, 24 nt, Human
ccacugcacuccagccugggcgac

SEQ ID NO: 188508 - RNA, 22 nt, Human
ccauaucauccagcuuccagaa

SEQ ID NO: 188509 - RNA, 18 nt, Human
ccccaucucaaaaaaaaa

SEQ ID NO: 188510 - RNA, 21 nt, Human
cgaaauaaaaucaaaucccua

SEQ ID NO: 188511 - RNA, 19 nt, Human
cgacagagcaagaccccau

SEQ ID NO: 188512 - RNA, 22 nt, Human
cgagauccugccacugcacucc

SEQ ID NO: 188513 - RNA, 24 nt, Human
cgagauccugccacugcacuccag

SEQ ID NO: 188514 - RNA, 22 nt, Human
cuauacugaaauaccacaaacu

SEQ ID NO: 188515 - RNA, 20 nt, Human
cuauuugauagguaagaaaa

SEQ ID NO: 188516 - RNA, 19 nt, Human
cuccaagcaagcaacagaa

SEQ ID NO: 188517 - RNA, 23 nt, Human
cuccggggcacgagcggggcaaa

SEQ ID NO: 188518 - RNA, 24 nt, Human
cucuuccauaucauccagcuucca

SEQ ID NO: 188519 - RNA, 22 nt, Human
cugaucuugauacuaguuagaa

SEQ ID NO: 188520 - RNA, 19 nt, Human
gaaaaaaaacacaaccuuc

SEQ ID NO: 188521 - RNA, 22 nt, Human
gaaaaaacccagaaggcccaga

SEQ ID NO: 188522 - RNA, 25 nt, Human
gaaaaauaagcaaaaacacaacauc

SEQ ID NO: 188523 - RNA, 24 nt, Human
gaacucuuccauaucauccagcuu

SEQ ID NO: 188524 - RNA, 19 nt, Human
gauuacagggaacugugug

SEQ ID NO: 188525 - RNA, 24 nt, Human
gcacuccagccugggcgacagagc

SEQ ID NO: 188526 - RNA, 22 nt, Human
gccacugcacuccagccugggc

SEQ ID NO: 188527 - RNA, 24 nt, Human
gccacugcacuccagccugggcga

SEQ ID NO: 188528 - RNA, 23 nt, Human
ggaaacagugagugucaagaggg

SEQ ID NO: 188529 - RNA, 21 nt, Human
ggacauucuuaagaacuuaua

SEQ ID NO: 188530 - RNA, 18 nt, Human
ggcuucuccuguaccaga

SEQ ID NO: 188531 - RNA, 23 nt, Human
gguaagaaaaaggaaaaaagcaa

SEQ ID NO: 188532 - RNA, 19 nt, Human
guguacuaccaaauauuaa

SEQ ID NO: 188533 - RNA, 23 nt, Human
guuugugauuacacagcuguugc

SEQ ID NO: 188534 - RNA, 24 nt, Human
uaaaacuaaugagaaucuuagguc

SEQ ID NO: 188535 - RNA, 20 nt, Human
uaaaauauccuacagcuguc

SEQ ID NO: 188536 - RNA, 21 nt, Human
uaaaauauccuacagcugucu

SEQ ID NO: 188537 - RNA, 22 nt, Human
uaaacaaaauuuaaauuccuuu

SEQ ID NO: 188538 - RNA, 22 nt, Human
uaagaaaaaggaaaaaagcaaa

SEQ ID NO: 188539 - RNA, 22 nt, Human
uaagaaaauacuagaagaaaau

SEQ ID NO: 188540 - RNA, 21 nt, Human
uaagacacaaaagacacauaa

SEQ ID NO: 188541 - RNA, 24 nt, Human
uaagcaaaaacacaacaaccccgg

SEQ ID NO: 188542 - RNA, 25 nt, Human
uaagcaaaaacacaacaucaaaaug

SEQ ID NO: 188543 - RNA, 18 nt, Human
uaauuauucaauuugcaa

SEQ ID NO: 188544 - RNA, 21 nt, Human
uacaaaaauacuuucaagcac

SEQ ID NO: 188545 - RNA, 23 nt, Human
uacaauauaugacaaaggacgga

SEQ ID NO: 188546 - RNA, 19 nt, Human
uaccaaauauuaacaccaa

SEQ ID NO: 188547 - RNA, 20 nt, Human
uagaaaaaacccagaaggcc

SEQ ID NO: 188548 - RNA, 20 nt, Human
uaggugccuggaacaacuaa

SEQ ID NO: 188549 - RNA, 18 nt, Human
uauaagucaaaagugagc

SEQ ID NO: 188550 - RNA, 22 nt, Human
uaugccaaaaaaagagcaaauu

SEQ ID NO: 188551 - RNA, 21 nt, Human
ucaaaaacacuuucaccuaac

SEQ ID NO: 188552 - RNA, 20 nt, Human
ucaagcacaugaaagucacc

SEQ ID NO: 188553 - RNA, 19 nt, Human
ucaagccaggugaugcaca

SEQ ID NO: 188554 - RNA, 21 nt, Human
ucacauacugaaccaauuggu

SEQ ID NO: 188555 - RNA, 28 nt, Human
uccaagcaagcaacagaaaaaauaugaa

SEQ ID NO: 188556 - RNA, 26 nt, Human
uccaagcaagcaacagaaaggaguuc

SEQ ID NO: 188557 - RNA, 25 nt, Human
uccagcaucuacucaaaagggaagu

SEQ ID NO: 188558 - RNA, 24 nt, Human
uccagccugggcgacagagcaaga

SEQ ID NO: 188559 - RNA, 24 nt, Human
ucccucaacaauaucugacacuga

SEQ ID NO: 188560 - RNA, 21 nt, Human
ucuauacugaaauaccacaaa

SEQ ID NO: 188561 - RNA, 20 nt, Human
ucuauggaugugauuaagau

SEQ ID NO: 188562 - RNA, 22 nt, Human
ucucaaaaaaaaacacaaaacu

SEQ ID NO: 188563 - RNA, 18 nt, Human
ucucaaaaacacuuucac

SEQ ID NO: 188564 - RNA, 23 nt, Human
ucucaaaaacacuuucaccuaac

SEQ ID NO: 188565 - RNA, 22 nt, Human
ugaaaaaaaacacaaccuucac

SEQ ID NO: 188566 - RNA, 26 nt, Human
ugaaaaaaaacacaaccuucacuaag

SEQ ID NO: 188567 - RNA, 20 nt, Human
ugaaagacauguaauaaaug

SEQ ID NO: 188568 - RNA, 22 nt, Human
ugaaauaagaaaauacuagaag

SEQ ID NO: 188569 - RNA, 21 nt, Human
ugaaauaccacaaacuauguu

SEQ ID NO: 188570 - RNA, 24 nt, Human
ugaaugagcaauucucaaaagaau

SEQ ID NO: 188571 - RNA, 19 nt, Human
ugacacugaucuugauacu

SEQ ID NO: 188572 - RNA, 22 nt, Human
ugagccgagauccugccacugc

SEQ ID NO: 188573 - RNA, 19 nt, Human
ugcgcgggcugaggcuggc

SEQ ID NO: 188574 - RNA, 19 nt, Human
ugggcuuuuuuuauaacua

SEQ ID NO: 188575 - RNA, 22 nt, Human
uguaaaagugaaauaagaaaau

SEQ ID NO: 188576 - RNA, 23 nt, Human
uguaaguuaauuucucuggagac

SEQ ID NO: 188577 - RNA, 23 nt, Human
uguagaaaaaacccagaaggccc

SEQ ID NO: 188578 - RNA, 24 nt, Human
uguagaaaaaacccagaaggccca

SEQ ID NO: 188579 - RNA, 22 nt, Human
ugucaagaggggacacacagag

SEQ ID NO: 188580 - RNA, 28 nt, Human
uuaaaaauuuccuuuucaccccaaacuu

SEQ ID NO: 188581 - RNA, 20 nt, Human
uuaaagcgauaauuauugac

SEQ ID NO: 188582 - RNA, 18 nt, Human
uuacagggaacugugugu

SEQ ID NO: 188583 - RNA, 18 nt, Human
uucaagcacauacacaaa

SEQ ID NO: 188584 - RNA, 21 nt, Human
uucaagcacaugaaagucacc

SEQ ID NO: 188585 - RNA, 22 nt, Human
uucacugaaagacauguaauaa

SEQ ID NO: 188586 - RNA, 24 nt, Human
uucuauacugaaauaccacaaacu

SEQ ID NO: 188587 - RNA, 19 nt, Human
uugcagugagccgagaucc

SEQ ID NO: 188588 - RNA, 21 nt, Human
uugcagugagccgagaucccc

SEQ ID NO: 188589 - RNA, 21 nt, Human
uugcagugagccgagauccug

SEQ ID NO: 188590 - RNA, 22 nt, Human
uugcagugagccgagauccugc

SEQ ID NO: 188591 - RNA, 19 nt, Human
uuggcuuaaagaaaaaaaa

SEQ ID NO: 188592 - RNA, 19 nt, Human
uuuaacaaaaaaaaaaugc

SEQ ID NO: 188593 - RNA, 21 nt, Human
uuucaagcacaugaaagucac

SEQ ID NO: 188594 - RNA, 22 nt, Human
uuucaagcacaugaaagucacc

SEQ ID NO: 188595 - RNA, 20 nt, Human
aaacgaaacacagaugucac

SEQ ID NO: 188596 - RNA, 23 nt, Human
aagaaucugggucgcagcaggug

SEQ ID NO: 188597 - RNA, 19 nt, Human
aagagcagcaggagcugag

SEQ ID NO: 188598 - RNA, 23 nt, Human
aagcgggagugggggcagcaugg

SEQ ID NO: 188599 - RNA, 25 nt, Human
aagcgggagugggggcagcaugguc

SEQ ID NO: 188600 - RNA, 20 nt, Human
aagcugccacagucccugcc

SEQ ID NO: 188601 - RNA, 22 nt, Human
aaggcgguggaggcaggagagc

SEQ ID NO: 188602 - RNA, 23 nt, Human
aagggccacucccgucuccaacc

SEQ ID NO: 188603 - RNA, 20 nt, Human
acaaagacagacacauccug

SEQ ID NO: 188604 - RNA, 24 nt, Human
acaaagacagacacauccugcaga

SEQ ID NO: 188605 - RNA, 26 nt, Human
acacaccuuccagaacuuagagcccc

SEQ ID NO: 188606 - RNA, 21 nt, Human
accacccccuccacacuccug

SEQ ID NO: 188607 - RNA, 18 nt, Human
accauuggcuggugcucc

SEQ ID NO: 188608 - RNA, 25 nt, Human
acccaggccuccuuucccuaagagc

SEQ ID NO: 188609 - RNA, 24 nt, Human
acccugaaucucagagcauccucc

SEQ ID NO: 188610 - RNA, 21 nt, Human
acccugggccuacagggcccc

SEQ ID NO: 188611 - RNA, 22 nt, Human
accuagugguggcagagccgug

SEQ ID NO: 188612 - RNA, 18 nt, Human
acgagggucagcuccacc

SEQ ID NO: 188613 - RNA, 21 nt, Human
acugccaucuccccagcuguc

SEQ ID NO: 188614 - RNA, 22 nt, Human
agacagacgccccgaagcucuc

SEQ ID NO: 188615 - RNA, 18 nt, Human
agagacagaccaacagga

SEQ ID NO: 188616 - RNA, 20 nt, Human
agagcauccuccuccccggc

SEQ ID NO: 188617 - RNA, 19 nt, Human
agagccagcgcccucagca

SEQ ID NO: 188618 - RNA, 18 nt, Human
agagcccaggugcuccuc

SEQ ID NO: 188619 - RNA, 24 nt, Human
agagggaggcacccggaggcuggu

SEQ ID NO: 188620 - RNA, 18 nt, Human
agccacgccacccagccu

SEQ ID NO: 188621 - RNA, 21 nt, Human
agccccacccugaaucucaga

SEQ ID NO: 188622 - RNA, 24 nt, Human
agcgccaggcccaggguaccuggc

SEQ ID NO: 188623 - RNA, 18 nt, Human
agcugcagacgcccggga

SEQ ID NO: 188624 - RNA, 24 nt, Human
aggaaguguucucuucagggguug

SEQ ID NO: 188625 - RNA, 19 nt, Human
aggaggccgccagccgggc

SEQ ID NO: 188626 - RNA, 25 nt, Human
aggaggccgccagccgggcuguacc

SEQ ID NO: 188627 - RNA, 18 nt, Human
aggcacccggaggcuggu

SEQ ID NO: 188628 - RNA, 19 nt, Human
aggcgguggaggcaggaga

SEQ ID NO: 188629 - RNA, 22 nt, Human
agggaggcacccggaggcuggu

SEQ ID NO: 188630 - RNA, 21 nt, Human
aggguaccuggcagcccagcc

SEQ ID NO: 188631 - RNA, 22 nt, Human
aguucaguccucaaaugggucc

SEQ ID NO: 188632 - RNA, 20 nt, Human
augccccucaaacgaccgag

SEQ ID NO: 188633 - RNA, 20 nt, Human
caaggcgguggaggcaggag

SEQ ID NO: 188634 - RNA, 20 nt, Human
cacagaaaacacgccugaag

SEQ ID NO: 188635 - RNA, 22 nt, Human
cacagggaugcccccauccccu

SEQ ID NO: 188636 - RNA, 21 nt, Human
caccagaagagacaaaaauuc

SEQ ID NO: 188637 - RNA, 19 nt, Human
caccccacuagcucucgcc

SEQ ID NO: 188638 - RNA, 25 nt, Human
caccccacuagcucucgccuggggg

SEQ ID NO: 188639 - RNA, 23 nt, Human
caccccgucagagagaggaccgg

SEQ ID NO: 188640 - RNA, 20 nt, Human
cacccucugugcacacaccu

SEQ ID NO: 188641 - RNA, 19 nt, Human
cacucccgucuccaaccac

SEQ ID NO: 188642 - RNA, 22 nt, Human
cacugccaucuccccagcuguc

SEQ ID NO: 188643 - RNA, 28 nt, Human
cagaaaacacgccugaacccccugaaag

SEQ ID NO: 188644 - RNA, 21 nt, Human
cagagccaggaucagucucug

SEQ ID NO: 188645 - RNA, 21 nt, Human
cagcaggaagcaaaaccaagg

SEQ ID NO: 188646 - RNA, 20 nt, Human
cagccccacccugaaucuca

SEQ ID NO: 188647 - RNA, 18 nt, Human
cagccccccgcgcggcag

SEQ ID NO: 188648 - RNA, 19 nt, Human
cagccccccgcgcggcagg

SEQ ID NO: 188649 - RNA, 18 nt, Human
cagccgaugguaccauug

SEQ ID NO: 188650 - RNA, 19 nt, Human
cagcuaaaacgaaacacag

SEQ ID NO: 188651 - RNA, 23 nt, Human
caggcccccuggaauacaccaca

SEQ ID NO: 188652 - RNA, 23 nt, Human
cagggacggcccagggcaccacc

SEQ ID NO: 188653 - RNA, 24 nt, Human
cagggcaccaccaugcuuucccuc

SEQ ID NO: 188654 - RNA, 18 nt, Human
cagguacuucugugagga

SEQ ID NO: 188655 - RNA, 22 nt, Human
cagguggcuugggacguggcuu

SEQ ID NO: 188656 - RNA, 19 nt, Human
caguaaauggggccguuuc

SEQ ID NO: 188657 - RNA, 19 nt, Human
cauccugguuuugcugcca

SEQ ID NO: 188658 - RNA, 22 nt, Human
caucuccccagcuguccccacc

SEQ ID NO: 188659 - RNA, 20 nt, Human
caugcuuucccuccaccccc

SEQ ID NO: 188660 - RNA, 19 nt, Human
ccaacauucacagaaaaca

SEQ ID NO: 188661 - RNA, 18 nt, Human
ccaagggcugcugucccc

SEQ ID NO: 188662 - RNA, 19 nt, Human
ccacccccuccacacuccu

SEQ ID NO: 188663 - RNA, 19 nt, Human
ccagacccagccccccgcg

SEQ ID NO: 188664 - RNA, 20 nt, Human
ccagggaacagagggagggc

SEQ ID NO: 188665 - RNA, 19 nt, Human
ccagguuccagccugcacu

SEQ ID NO: 188666 - RNA, 23 nt, Human
cccacacucucuggguccaggca

SEQ ID NO: 188667 - RNA, 21 nt, Human
cccacguccccauucuggaca

SEQ ID NO: 188668 - RNA, 18 nt, Human
cccagccccccgcgcggc

SEQ ID NO: 188669 - RNA, 21 nt, Human
cccaugagcacccucugugca

SEQ ID NO: 188670 - RNA, 18 nt, Human
ccccagagggagcucggg

SEQ ID NO: 188671 - RNA, 20 nt, Human
ccccauccccuucuggccag

SEQ ID NO: 188672 - RNA, 22 nt, Human
ccccgcgcggcaggggcccucc

SEQ ID NO: 188673 - RNA, 21 nt, Human
ccccggaucccugcgcugccc

SEQ ID NO: 188674 - RNA, 22 nt, Human
cccucccacccagugcugagag

SEQ ID NO: 188675 - RNA, 20 nt, Human
ccuacagggccaggcacagc

SEQ ID NO: 188676 - RNA, 18 nt, Human
ccucagcccggagcagca

SEQ ID NO: 188677 - RNA, 23 nt, Human
ccucuagucccucagcccggagc

SEQ ID NO: 188678 - RNA, 19 nt, Human
ccugcacugccaucucccc

SEQ ID NO: 188679 - RNA, 18 nt, Human
ccuuccagccaacccugg

SEQ ID NO: 188680 - RNA, 20 nt, Human
cgaaacacagaugucaccuu

SEQ ID NO: 188681 - RNA, 19 nt, Human
cgacacaagccaagaauuc

SEQ ID NO: 188682 - RNA, 27 nt, Human
cggacccgcgacagaaacugcccccuu

SEQ ID NO: 188683 - RNA, 21 nt, Human
cggacgcugaaggccggccug

SEQ ID NO: 188684 - RNA, 20 nt, Human
cggcaaaggccagggcacug

SEQ ID NO: 188685 - RNA, 21 nt, Human
cggccgcgcccccaccggacc

SEQ ID NO: 188686 - RNA, 20 nt, Human
cuaguguuccuuuguuugcc

SEQ ID NO: 188687 - RNA, 21 nt, Human
cucucucccuguuccucccca

SEQ ID NO: 188688 - RNA, 21 nt, Human
cugcccccuuccugggccacu

SEQ ID NO: 188689 - RNA, 22 nt, Human
cugccuccagcaggaagcaaaa

SEQ ID NO: 188690 - RNA, 20 nt, Human
cuggagccauugccugccua

SEQ ID NO: 188691 - RNA, 22 nt, Human
cuguggagugggacggugggga

SEQ ID NO: 188692 - RNA, 20 nt, Human
cuucagggguugccagcccc

SEQ ID NO: 188693 - RNA, 22 nt, Human
cuuccagaacuuagagccccaa

SEQ ID NO: 188694 - RNA, 18 nt, Human
cuugacccaggccuccuu

SEQ ID NO: 188695 - RNA, 19 nt, Human
gaaaacacgccugaacccu

SEQ ID NO: 188696 - RNA, 18 nt, Human
gaaaggaugggagggggg

SEQ ID NO: 188697 - RNA, 22 nt, Human
gaaugccugguggccugcgggg

SEQ ID NO: 188698 - RNA, 18 nt, Human
gacccagccccccgcgcg

SEQ ID NO: 188699 - RNA, 19 nt, Human
gacgcugaaggccggccug

SEQ ID NO: 188700 - RNA, 19 nt, Human
gacggcccagggcaccacc

SEQ ID NO: 188701 - RNA, 19 nt, Human
gagauguccucuagucccu

SEQ ID NO: 188702 - RNA, 21 nt, Human
gagcagcaggagcugagugag

SEQ ID NO: 188703 - RNA, 24 nt, Human
gagcauccuccuccccggcaaagg

SEQ ID NO: 188704 - RNA, 22 nt, Human
gaggagagggguagagagccca

SEQ ID NO: 188705 - RNA, 18 nt, Human
gcacacaccuuccagaac

SEQ ID NO: 188706 - RNA, 18 nt, Human
gcagggguggcugcccca

SEQ ID NO: 188707 - RNA, 21 nt, Human
gcauaaccucgaaaagggggc

SEQ ID NO: 188708 - RNA, 18 nt, Human
gccaacgcccucccaccc

SEQ ID NO: 188709 - RNA, 19 nt, Human
gcccaggguaccuggcagc

SEQ ID NO: 188710 - RNA, 20 nt, Human
gccccugccucuguccccag

SEQ ID NO: 188711 - RNA, 20 nt, Human
gccugguggccugcgggggu

SEQ ID NO: 188712 - RNA, 20 nt, Human
gcugcccucgggaaagcagc

SEQ ID NO: 188713 - RNA, 21 nt, Human
gcuuugcaccaagggcugcug

SEQ ID NO: 188714 - RNA, 22 nt, Human
ggaaagacggggacaaugcaga

SEQ ID NO: 188715 - RNA, 21 nt, Human
ggaagagacagaccaacagga

SEQ ID NO: 188716 - RNA, 19 nt, Human
ggagcagcagaugagaggc

SEQ ID NO: 188717 - RNA, 21 nt, Human
ggagcugagugaggcacaggg

SEQ ID NO: 188718 - RNA, 20 nt, Human
gggacugggcugcuuuugcc

SEQ ID NO: 188719 - RNA, 20 nt, Human
gggaggggggcgcagcugag

SEQ ID NO: 188720 - RNA, 22 nt, Human
gggaggggggcgcagcugaggu

SEQ ID NO: 188721 - RNA, 21 nt, Human
gggcccuccuggccaccgcac

SEQ ID NO: 188722 - RNA, 21 nt, Human
ggggacugggcugcuuuugcc

SEQ ID NO: 188723 - RNA, 18 nt, Human
guaaaugugugccgugac

SEQ ID NO: 188724 - RNA, 21 nt, Human
gucacccucuguccaccguga

SEQ ID NO: 188725 - RNA, 18 nt, Human
gugcguguccagaaugcc

SEQ ID NO: 188726 - RNA, 18 nt, Human
gugugugcagauggaagg

SEQ ID NO: 188727 - RNA, 21 nt, Human
gugugugugugugugugugug

SEQ ID NO: 188728 - RNA, 22 nt, Human
uagccggcgcccccaaagcagu

SEQ ID NO: 188729 - RNA, 18 nt, Human
ucacugcagcuggccugc

SEQ ID NO: 188730 - RNA, 26 nt, Human
ucacugcagcuggccugccggucccc

SEQ ID NO: 188731 - RNA, 27 nt, Human
ucacugcagcuggccugccggucccuc

SEQ ID NO: 188732 - RNA, 21 nt, Human
ucaggccacagcuccaggcau

SEQ ID NO: 188733 - RNA, 21 nt, Human
uccaagccagcucaggucugc

SEQ ID NO: 188734 - RNA, 23 nt, Human
uccccaguggacuugguuuuguu

SEQ ID NO: 188735 - RNA, 18 nt, Human
ucccuaagagcagcagga

SEQ ID NO: 188736 - RNA, 21 nt, Human
ucccugccugcccaccuuggc

SEQ ID NO: 188737 - RNA, 18 nt, Human
ucgcugggcagggguggc

SEQ ID NO: 188738 - RNA, 20 nt, Human
ucucuggcuuugcaccaagg

SEQ ID NO: 188739 - RNA, 22 nt, Human
ucugcgcucucgcugggcaggg

SEQ ID NO: 188740 - RNA, 21 nt, Human
ucuuaaagugcaacgagcccc

SEQ ID NO: 188741 - RNA, 19 nt, Human
ugacaaagacagacacauc

SEQ ID NO: 188742 - RNA, 21 nt, Human
ugacccaggccuccuuucccu

SEQ ID NO: 188743 - RNA, 24 nt, Human
ugagcauaaccucgaaaagggggc

SEQ ID NO: 188744 - RNA, 22 nt, Human
ugaggagagggguagagagccc

SEQ ID NO: 188745 - RNA, 23 nt, Human
ugaucugcagagccagcgcccuc

SEQ ID NO: 188746 - RNA, 22 nt, Human
ugcacugccaucuccccagcug

SEQ ID NO: 188747 - RNA, 23 nt, Human
ugcacugccaucuccccagcugu

SEQ ID NO: 188748 - RNA, 18 nt, Human
ugccccagaccuaguuuc

SEQ ID NO: 188749 - RNA, 24 nt, Human
ugcccccauccccuucuggccagc

SEQ ID NO: 188750 - RNA, 18 nt, Human
ugccccugccucuguccc

SEQ ID NO: 188751 - RNA, 23 nt, Human
ugccgugacacccaguaugcgac

SEQ ID NO: 188752 - RNA, 18 nt, Human
ugcgagucccaugagcac

SEQ ID NO: 188753 - RNA, 25 nt, Human
ugcugggguccagggcugggggagu

SEQ ID NO: 188754 - RNA, 19 nt, Human
uggaaggugggaagagaca

SEQ ID NO: 188755 - RNA, 18 nt, Human
uggaauacaccacagauc

SEQ ID NO: 188756 - RNA, 19 nt, Human
uggacaagccaacgcccuc

SEQ ID NO: 188757 - RNA, 18 nt, Human
uggacacagacgaugucc

SEQ ID NO: 188758 - RNA, 23 nt, Human
uggcucccaugcaagugcccucc

SEQ ID NO: 188759 - RNA, 19 nt, Human
ugggaggggggcgcagcug

SEQ ID NO: 188760 - RNA, 20 nt, Human
ugggaggggggcgcagcuga

SEQ ID NO: 188761 - RNA, 21 nt, Human
uggugugagcagcuacguggg

SEQ ID NO: 188762 - RNA, 31 nt, Human
ugugaaguuuugugugugugugugugugugg

SEQ ID NO: 188763 - RNA, 19 nt, Human
ugugcaugggggcucccuu

SEQ ID NO: 188764 - RNA, 18 nt, Human
ugugugugugcgugucca

SEQ ID NO: 188765 - RNA, 18 nt, Human
ugugugugugugcguguc

SEQ ID NO: 188766 - RNA, 18 nt, Human
ugugugugugugugugug

SEQ ID NO: 188767 - RNA, 18 nt, Human
ugugugugugugugugug

SEQ ID NO: 188768 - RNA, 18 nt, Human
ugugugugugugugugug

SEQ ID NO: 188769 - RNA, 18 nt, Human
ugugugugugugugugug

SEQ ID NO: 188770 - RNA, 18 nt, Human
ugugugugugugugugug

SEQ ID NO: 188771 - RNA, 18 nt, Human
ugugugugugugugugug

SEQ ID NO: 188772 - RNA, 18 nt, Human
ugugugugugugugugug

SEQ ID NO: 188773 - RNA, 21 nt, Human
ugugugugugugugugugugc

SEQ ID NO: 188774 - RNA, 24 nt, Human
ugugugugugugugugugugcgug

SEQ ID NO: 188775 - RNA, 21 nt, Human
ugugugugugugugugugugu

SEQ ID NO: 188776 - RNA, 21 nt, Human
ugugugugugugugugugugu

SEQ ID NO: 188777 - RNA, 21 nt, Human
ugugugugugugugugugugu

SEQ ID NO: 188778 - RNA, 21 nt, Human
ugugugugugugugugugugu

SEQ ID NO: 188779 - RNA, 21 nt, Human
ugugugugugugugugugugu

SEQ ID NO: 188780 - RNA, 21 nt, Human
ugugugugugugugugugugu

SEQ ID NO: 188781 - RNA, 21 nt, Human
ugugugugugugugugugugu

SEQ ID NO: 188782 - RNA, 21 nt, Human
ugugugugugugugugugugu

SEQ ID NO: 188783 - RNA, 21 nt, Human
ugugugugugugugugugugu

SEQ ID NO: 188784 - RNA, 21 nt, Human
ugugugugugugugugugugu

SEQ ID NO: 188785 - RNA, 21 nt, Human
ugugugugugugugugugugu

SEQ ID NO: 188786 - RNA, 21 nt, Human
ugugugugugugugugugugu

SEQ ID NO: 188787 - RNA, 22 nt, Human
ugugugugugugugugugugug

SEQ ID NO: 188788 - RNA, 22 nt, Human
ugugugugugugugugugugug

SEQ ID NO: 188789 - RNA, 22 nt, Human
ugugugugugugugugugugug

SEQ ID NO: 188790 - RNA, 22 nt, Human
ugugugugugugugugugugug

SEQ ID NO: 188791 - RNA, 19 nt, Human
uuaauuacuggaaggguuu

SEQ ID NO: 188792 - RNA, 18 nt, Human
uuccagccaacccugggc

SEQ ID NO: 188793 - RNA, 22 nt, Human
uuccagccaacccugggccuac

SEQ ID NO: 188794 - RNA, 23 nt, Human
uugccagccccacccugaaucuc

SEQ ID NO: 188795 - RNA, 19 nt, Human
uuggccauugagaacugga

SEQ ID NO: 188796 - RNA, 19 nt, Human
uuggcuggugcucccacug

SEQ ID NO: 188797 - RNA, 24 nt, Human
uuugugugugugugugugugugug

SEQ ID NO: 188798 - RNA, 19 nt, Human
aaaaaaaugauauaaccug

SEQ ID NO: 188799 - RNA, 18 nt, Human
aaacauggaaccaaaguc

SEQ ID NO: 188800 - RNA, 19 nt, Human
aaauagcagaaauaaaaag

SEQ ID NO: 188801 - RNA, 28 nt, Human
aaccacuucauuaauaacauaucuccac

SEQ ID NO: 188802 - RNA, 18 nt, Human
aagaauccgaauccuggc

SEQ ID NO: 188803 - RNA, 23 nt, Human
aagaggccacaaugugauugaua

SEQ ID NO: 188804 - RNA, 20 nt, Human
aagaguuucggcccucuugg

SEQ ID NO: 188805 - RNA, 20 nt, Human
aagcacuuuuuggugauaau

SEQ ID NO: 188806 - RNA, 25 nt, Human
aaggcuucgaguaauucaagaaucc

SEQ ID NO: 188807 - RNA, 20 nt, Human
aaguagcuguggaaaaucuu

SEQ ID NO: 188808 - RNA, 22 nt, Human
aaguggauuacauguccaugga

SEQ ID NO: 188809 - RNA, 19 nt, Human
acaacagcaaauagcagaa

SEQ ID NO: 188810 - RNA, 24 nt, Human
acaaugaaaacauggaaccaaaag

SEQ ID NO: 188811 - RNA, 21 nt, Human
acacaacagcaaauagcagaa

SEQ ID NO: 188812 - RNA, 19 nt, Human
acgcuggucccgcugcagg

SEQ ID NO: 188813 - RNA, 21 nt, Human
acucucaguuuuugugcacuu

SEQ ID NO: 188814 - RNA, 21 nt, Human
acuggaugccacguggucugu

SEQ ID NO: 188815 - RNA, 26 nt, Human
agaaaaaauccuuuuauuggugguaa

SEQ ID NO: 188816 - RNA, 23 nt, Human
agaguaauaaagugaucacaguu

SEQ ID NO: 188817 - RNA, 19 nt, Human
agaguuucggcccucuugg

SEQ ID NO: 188818 - RNA, 20 nt, Human
agcagcaggggguccaugca

SEQ ID NO: 188819 - RNA, 20 nt, Human
aggcagcagcagcaguagcg

SEQ ID NO: 188820 - RNA, 25 nt, Human
agugacaauaggauagaauuauuug

SEQ ID NO: 188821 - RNA, 23 nt, Human
caaacacaagucaaucuacaaaa

SEQ ID NO: 188822 - RNA, 20 nt, Human
caaagucucaugcugaugga

SEQ ID NO: 188823 - RNA, 24 nt, Human
caaauaauagaagaaaucaaaaca

SEQ ID NO: 188824 - RNA, 23 nt, Human
caacaauggucguccaaggccuu

SEQ ID NO: 188825 - RNA, 24 nt, Human
caagaagcugaacaacuuguauca

SEQ ID NO: 188826 - RNA, 23 nt, Human
caagccgaaggaaaacacauuua

SEQ ID NO: 188827 - RNA, 25 nt, Human
caagccgaaggaaaacacauuuaca

SEQ ID NO: 188828 - RNA, 21 nt, Human
caaggugaagaguuucggccc

SEQ ID NO: 188829 - RNA, 20 nt, Human
caauaggauagaauuauuug

SEQ ID NO: 188830 - RNA, 21 nt, Human
cacaaacacaagucaaucuac

SEQ ID NO: 188831 - RNA, 21 nt, Human
cacaacagcaaauagcagaag

SEQ ID NO: 188832 - RNA, 19 nt, Human
caccgccuccuuccccuuc

SEQ ID NO: 188833 - RNA, 23 nt, Human
cagcagcaguagcggcagcagca

SEQ ID NO: 188834 - RNA, 22 nt, Human
cagcagcggucuccuguccucc

SEQ ID NO: 188835 - RNA, 25 nt, Human
cagcaggggguccaugcaccuuucu

SEQ ID NO: 188836 - RNA, 19 nt, Human
cagcucacuccgaaugcau

SEQ ID NO: 188837 - RNA, 26 nt, Human
ccaacaauggucguccaaggccuuuu

SEQ ID NO: 188838 - RNA, 23 nt, Human
ccacucccaggcuuuuccuccca

SEQ ID NO: 188839 - RNA, 21 nt, Human
ccagcgccgccucucccggag

SEQ ID NO: 188840 - RNA, 24 nt, Human
cccauaaucaggauaauaguaggc

SEQ ID NO: 188841 - RNA, 27 nt, Human
ccccaagacgcccagcgccgccucucc

SEQ ID NO: 188842 - RNA, 25 nt, Human
cccgcaccugcucugucuggcucca

SEQ ID NO: 188843 - RNA, 18 nt, Human
cccucucuuccuacuuaa

SEQ ID NO: 188844 - RNA, 20 nt, Human
ccgccucuacaagcuggagg

SEQ ID NO: 188845 - RNA, 23 nt, Human
ccuccuccaccaccgccuccuuc

SEQ ID NO: 188846 - RNA, 18 nt, Human
ccugagucuccugaagau

SEQ ID NO: 188847 - RNA, 20 nt, Human
ccuugccaagcauggcccag

SEQ ID NO: 188848 - RNA, 19 nt, Human
ccuuucuucccagagaagg

SEQ ID NO: 188849 - RNA, 23 nt, Human
cgaaggaaaacacauuuacaaga

SEQ ID NO: 188850 - RNA, 24 nt, Human
cgaggccccccacucccaggcuuu

SEQ ID NO: 188851 - RNA, 20 nt, Human
cgcacccccaagacgcccag

SEQ ID NO: 188852 - RNA, 24 nt, Human
cgccaacaauggucguccaaggcc

SEQ ID NO: 188853 - RNA, 23 nt, Human
cggcgcgcacccccaagacgccc

SEQ ID NO: 188854 - RNA, 23 nt, Human
cgucuccuccucuggguccucca

SEQ ID NO: 188855 - RNA, 25 nt, Human
cuacuagguugacauugacagguca

SEQ ID NO: 188856 - RNA, 19 nt, Human
cucccaggcuuuuccuccc

SEQ ID NO: 188857 - RNA, 19 nt, Human
cuccuccaccaccgccucc

SEQ ID NO: 188858 - RNA, 19 nt, Human
cuggucccgcugcaggcuc

SEQ ID NO: 188859 - RNA, 19 nt, Human
gaacauaaggcauaaacaa

SEQ ID NO: 188860 - RNA, 19 nt, Human
gacacaggaauaaaagucc

SEQ ID NO: 188861 - RNA, 23 nt, Human
gaggacgagguccacagccugcc

SEQ ID NO: 188862 - RNA, 21 nt, Human
gcauauauauaucuaugcaca

SEQ ID NO: 188863 - RNA, 20 nt, Human
ggcucccggcgcgcaccccc

SEQ ID NO: 188864 - RNA, 20 nt, Human
gggaaucugcagagcagcag

SEQ ID NO: 188865 - RNA, 19 nt, Human
guagcacgccugaugaagc

SEQ ID NO: 188866 - RNA, 19 nt, Human
guccaaggccuuugccucc

SEQ ID NO: 188867 - RNA, 25 nt, Human
gucuggccuggcccuucccuucccc

SEQ ID NO: 188868 - RNA, 21 nt, Human
uaaauucugaacaaaugaugc

SEQ ID NO: 188869 - RNA, 18 nt, Human
uacaaugaaaacauggaa

SEQ ID NO: 188870 - RNA, 18 nt, Human
uagcacgccugaugaagc

SEQ ID NO: 188871 - RNA, 25 nt, Human
uagcagaaauaaaaaguuaugacag

SEQ ID NO: 188872 - RNA, 25 nt, Human
uagcggcagcagcagcagcggucuc

SEQ ID NO: 188873 - RNA, 21 nt, Human
uauaaaauguaccuuuuauuu

SEQ ID NO: 188874 - RNA, 24 nt, Human
uauaucuaugcacaauugugcaaa

SEQ ID NO: 188875 - RNA, 22 nt, Human
uauuacacaacagcaaauagca

SEQ ID NO: 188876 - RNA, 20 nt, Human
uauuagggauguauauuagu

SEQ ID NO: 188877 - RNA, 23 nt, Human
uauuagggauguauauuaguggc

SEQ ID NO: 188878 - RNA, 19 nt, Human
ucaaaacagcaagaaaaaa

SEQ ID NO: 188879 - RNA, 22 nt, Human
ucaaaacagcaagaaaaaaucc

SEQ ID NO: 188880 - RNA, 23 nt, Human
ucacucucaguuuuugugcacuu

SEQ ID NO: 188881 - RNA, 26 nt, Human
ucagaaaauaucugaaaaauaaguuc

SEQ ID NO: 188882 - RNA, 18 nt, Human
uccaaggccuuugccucc

SEQ ID NO: 188883 - RNA, 24 nt, Human
uccacaaauaauagaagaaaucaa

SEQ ID NO: 188884 - RNA, 21 nt, Human
ucccggcgcgcacccccaaga

SEQ ID NO: 188885 - RNA, 21 nt, Human
ucccucucuuccuacuuaagg

SEQ ID NO: 188886 - RNA, 23 nt, Human
ucccucucuuccuacuuaaggca

SEQ ID NO: 188887 - RNA, 22 nt, Human
ucgccaacaauggucguccaag

SEQ ID NO: 188888 - RNA, 19 nt, Human
ucucaaagcuggcacugga

SEQ ID NO: 188889 - RNA, 21 nt, Human
ucucccggaguggugccccuc

SEQ ID NO: 188890 - RNA, 21 nt, Human
ucuuguuccggccuuuucccc

SEQ ID NO: 188891 - RNA, 19 nt, Human
ugaaaaccuugagccauag

SEQ ID NO: 188892 - RNA, 19 nt, Human
ugaaauauaaguaauacaa

SEQ ID NO: 188893 - RNA, 23 nt, Human
ugaacguguucaccaaaagucuu

SEQ ID NO: 188894 - RNA, 23 nt, Human
ugaagagagaccccuguaccgcu

SEQ ID NO: 188895 - RNA, 23 nt, Human
ugacaauaggauagaauuauuug

SEQ ID NO: 188896 - RNA, 19 nt, Human
ugacauaaagacuaauacu

SEQ ID NO: 188897 - RNA, 21 nt, Human
ugacauaaagacuaauacucu

SEQ ID NO: 188898 - RNA, 20 nt, Human
ugagaaaucagcagcuucaa

SEQ ID NO: 188899 - RNA, 22 nt, Human
ugagaagcugaucauguguuuu

SEQ ID NO: 188900 - RNA, 21 nt, Human
ugaggagucugucagcccagc

SEQ ID NO: 188901 - RNA, 19 nt, Human
ugccagccgcguucccacg

SEQ ID NO: 188902 - RNA, 22 nt, Human
ugccuccuccaccaccgccucc

SEQ ID NO: 188903 - RNA, 20 nt, Human
uggaauggauguuaaauucu

SEQ ID NO: 188904 - RNA, 25 nt, Human
uggcacaaacacaagucaaucuaca

SEQ ID NO: 188905 - RNA, 22 nt, Human
uggcccuucccuuccccgcacc

SEQ ID NO: 188906 - RNA, 18 nt, Human
uggccugaacauuuuuug

SEQ ID NO: 188907 - RNA, 20 nt, Human
ugguauaggguauguaugug

SEQ ID NO: 188908 - RNA, 20 nt, Human
ugugggcauauauauaucua

SEQ ID NO: 188909 - RNA, 19 nt, Human
uuacacaacagcaaauagc

SEQ ID NO: 188910 - RNA, 23 nt, Human
uucaaaccacuucauuaauaaca

SEQ ID NO: 188911 - RNA, 22 nt, Human
uucccacgcuggucccgcugca

SEQ ID NO: 188912 - RNA, 21 nt, Human
uuccugagucuccugaagaug

SEQ ID NO: 188913 - RNA, 21 nt, Human
uuggugguaaaaagggauugu

SEQ ID NO: 188914 - RNA, 26 nt, Human
uuuaaaccaguaauaguugcuaugag

SEQ ID NO: 188915 - RNA, 21 nt, Human
uuugcucuuauuccuguuuuc

SEQ ID NO: 188916 - RNA, 18 nt, Human
uuuguucuuuaacugaag

SEQ ID NO: 188917 - RNA, 24 nt, Human
uuuuuuuucaaagucucaugcuga

SEQ ID NO: 188918 - RNA, 23 nt, Human
aagaacugaacugcaauucacaa

SEQ ID NO: 188919 - RNA, 21 nt, Human
acagaugcuuuuuauuuugug

SEQ ID NO: 188920 - RNA, 18 nt, Human
acuucauaggaaaaaagg

SEQ ID NO: 188921 - RNA, 22 nt, Human
agagccugucacaaaauuccuc

SEQ ID NO: 188922 - RNA, 19 nt, Human
agccuagaaaguucuagca

SEQ ID NO: 188923 - RNA, 21 nt, Human
caacaaggaccuacaaaaaac

SEQ ID NO: 188924 - RNA, 23 nt, Human
cacuuuugucuaacagucuaaaa

SEQ ID NO: 188925 - RNA, 25 nt, Human
ccaaugugucaugcuaguccucucu

SEQ ID NO: 188926 - RNA, 18 nt, Human
ccucgcaccgacaacucc

SEQ ID NO: 188927 - RNA, 22 nt, Human
ccucucucauuuccaaacugga

SEQ ID NO: 188928 - RNA, 23 nt, Human
cuguuacacauaauguaacuuua

SEQ ID NO: 188929 - RNA, 20 nt, Human
gagcacuuuugucuaacagu

SEQ ID NO: 188930 - RNA, 21 nt, Human
gagccugcacccgggcucugg

SEQ ID NO: 188931 - RNA, 21 nt, Human
gcgguggcagcggcggcggug

SEQ ID NO: 188932 - RNA, 21 nt, Human
gcucuguuuccauauucugga

SEQ ID NO: 188933 - RNA, 21 nt, Human
ggaaaaaagguuacauaauau

SEQ ID NO: 188934 - RNA, 20 nt, Human
ggcagcggcggcggugagcc

SEQ ID NO: 188935 - RNA, 19 nt, Human
uaaaaacacaagaacugaa

SEQ ID NO: 188936 - RNA, 22 nt, Human
uaauacagaugcuuuuuauuuu

SEQ ID NO: 188937 - RNA, 22 nt, Human
uacaacaaggaccuacaaaaaa

SEQ ID NO: 188938 - RNA, 25 nt, Human
uacaacaaggaccuacaaaaaacuu

SEQ ID NO: 188939 - RNA, 18 nt, Human
uauucuggagcugcacgu

SEQ ID NO: 188940 - RNA, 23 nt, Human
ucaaugguggagccaauguguca

SEQ ID NO: 188941 - RNA, 22 nt, Human
ucacuauauacaguccucaaaa

SEQ ID NO: 188942 - RNA, 20 nt, Human
ucaugguugguccuccucau

SEQ ID NO: 188943 - RNA, 18 nt, Human
uccauauucuggagcugc

SEQ ID NO: 188944 - RNA, 24 nt, Human
uccauauucuggagcugcacguga

SEQ ID NO: 188945 - RNA, 19 nt, Human
ugaccaugucagacccugu

SEQ ID NO: 188946 - RNA, 23 nt, Human
ugagcacuuuugucuaacagucu

SEQ ID NO: 188947 - RNA, 21 nt, Human
uggcagcggcggcggugagcc

SEQ ID NO: 188948 - RNA, 18 nt, Human
ugguggagccaauguguc

SEQ ID NO: 188949 - RNA, 21 nt, Human
ugucaugcuaguccucucuca

SEQ ID NO: 188950 - RNA, 23 nt, Human
uguuuuuuuuuuuuuguuuuuuu

SEQ ID NO: 188951 - RNA, 22 nt, Human
uuaauacagaugcuuuuuauuu

SEQ ID NO: 188952 - RNA, 22 nt, Human
uuacacauaauguaacuuuaau

SEQ ID NO: 188953 - RNA, 21 nt, Human
uucuaaaaaaagguacuaggg

SEQ ID NO: 188954 - RNA, 22 nt, Human
uucuaaaaaaagguacuagggu

SEQ ID NO: 188955 - RNA, 19 nt, Human
uucugggggaauuguuaau

SEQ ID NO: 188956 - RNA, 23 nt, Human
uugcucuguuuccauauucugga

SEQ ID NO: 188957 - RNA, 26 nt, Human
uuguuuuuuuuuuuuuguuuuuuuuu

SEQ ID NO: 188958 - RNA, 20 nt, Human
uuuccaaacuggaucuuugg

SEQ ID NO: 188959 - RNA, 25 nt, Human
uuuugcucuguuuccauauucugga

SEQ ID NO: 188960 - RNA, 24 nt, Human
uuuuuauuuuuuucuuuuguuuuu

SEQ ID NO: 188961 - RNA, 25 nt, Human
uuuuuguuuuuuuuuuuuguuuuuu

SEQ ID NO: 188962 - RNA, 33 nt, Human
uuuuuucuuuuguuuuuuuuuuuuuguuuuuuu

SEQ ID NO: 188963 - RNA, 21 nt, Human
aaaaggccaagaguacaagca

SEQ ID NO: 188964 - RNA, 21 nt, Human
aaacaaagagauaagagaaca

SEQ ID NO: 188965 - RNA, 18 nt, Human
aacagcacagacagagac

SEQ ID NO: 188966 - RNA, 24 nt, Human
aagaaagcaggaggagccgguacc

SEQ ID NO: 188967 - RNA, 23 nt, Human
aagaguacaagcagccggggacg

SEQ ID NO: 188968 - RNA, 23 nt, Human
aagcagccggggacgccagagag

SEQ ID NO: 188969 - RNA, 21 nt, Human
aagcagccggggacgccagga

SEQ ID NO: 188970 - RNA, 22 nt, Human
acagaggccaccaggaggacgc

SEQ ID NO: 188971 - RNA, 24 nt, Human
acagcacagacagagacgaaggga

SEQ ID NO: 188972 - RNA, 18 nt, Human
acagggcuggagacagac

SEQ ID NO: 188973 - RNA, 21 nt, Human
accaucaccaaacacccaggc

SEQ ID NO: 188974 - RNA, 23 nt, Human
agaaagacagggcuggagacaga

SEQ ID NO: 188975 - RNA, 23 nt, Human
agaaaggagacacagaaaaggcc

SEQ ID NO: 188976 - RNA, 24 nt, Human
agaaaggagacacagaaaaggcca

SEQ ID NO: 188977 - RNA, 26 nt, Human
agaacaggaaagaaaacggcagaaaa

SEQ ID NO: 188978 - RNA, 21 nt, Human
agagacgaagggagggagaga

SEQ ID NO: 188979 - RNA, 24 nt, Human
agagggaaaaggugaaacaaagag

SEQ ID NO: 188980 - RNA, 20 nt, Human
agccagaaaggagacacaga

SEQ ID NO: 188981 - RNA, 21 nt, Human
aggaaagaaaacggcagaaaa

SEQ ID NO: 188982 - RNA, 21 nt, Human
aggcaagagccagaaaggaga

SEQ ID NO: 188983 - RNA, 21 nt, Human
aggccccuggccccacggccu

SEQ ID NO: 188984 - RNA, 21 nt, Human
aggcggaggcaagagccagaa

SEQ ID NO: 188985 - RNA, 20 nt, Human
augaagcagaggagaacagg

SEQ ID NO: 188986 - RNA, 24 nt, Human
auuuuuuuuccuuuuuucucuuuu

SEQ ID NO: 188987 - RNA, 22 nt, Human
caacacacucgagauuuguuuu

SEQ ID NO: 188988 - RNA, 23 nt, Human
caacagcacagacagagacgaag

SEQ ID NO: 188989 - RNA, 21 nt, Human
caagagccagaaaggagacac

SEQ ID NO: 188990 - RNA, 23 nt, Human
caagagccagaaaggagacacag

SEQ ID NO: 188991 - RNA, 23 nt, Human
cacacggcagaugggcggggcag

SEQ ID NO: 188992 - RNA, 19 nt, Human
cacagacagagacgaaggg

SEQ ID NO: 188993 - RNA, 26 nt, Human
cacagaggccaccaggaggacgcagc

SEQ ID NO: 188994 - RNA, 25 nt, Human
caccaggaggacgcagcacuuggca

SEQ ID NO: 188995 - RNA, 22 nt, Human
cacuccuagcccuggcaggccc

SEQ ID NO: 188996 - RNA, 19 nt, Human
cagaaagacagggcuggag

SEQ ID NO: 188997 - RNA, 19 nt, Human
cagaaagacagggcuggag

SEQ ID NO: 188998 - RNA, 22 nt, Human
cagaaagacagggcuggagaca

SEQ ID NO: 188999 - RNA, 18 nt, Human
cagacgggcggggcaggc

SEQ ID NO: 189000 - RNA, 20 nt, Human
cagcagugauggcugggggc

SEQ ID NO: 189001 - RNA, 21 nt, Human
cagcagugauggcugggggcu

SEQ ID NO: 189002 - RNA, 23 nt, Human
cagccaaccgcguagcccaugcu

SEQ ID NO: 189003 - RNA, 19 nt, Human
caggccccuggccccacgg

SEQ ID NO: 189004 - RNA, 18 nt, Human
cagggcagcuucagcagc

SEQ ID NO: 189005 - RNA, 20 nt, Human
ccaugcugcuacccucuccc

SEQ ID NO: 189006 - RNA, 22 nt, Human
cccacgggcaggcaagacagcu

SEQ ID NO: 189007 - RNA, 21 nt, Human
ccccucguccuccuguugcuc

SEQ ID NO: 189008 - RNA, 22 nt, Human
ccccucguccuccuguugcuca

SEQ ID NO: 189009 - RNA, 19 nt, Human
cccggccccucguccuccc

SEQ ID NO: 189010 - RNA, 18 nt, Human
ccgcguagcccaugcugc

SEQ ID NO: 189011 - RNA, 20 nt, Human
ccguguggucggcaggaggg

SEQ ID NO: 189012 - RNA, 21 nt, Human
ccugagccccugugguuuggg

SEQ ID NO: 189013 - RNA, 25 nt, Human
ccugugguuuggggccgggaggggc

SEQ ID NO: 189014 - RNA, 22 nt, Human
ccuuggguguggcccuggcccc

SEQ ID NO: 189015 - RNA, 20 nt, Human
cggcagaaaagugacacugg

SEQ ID NO: 189016 - RNA, 27 nt, Human
cggcagaaaagugacacuggugggacc

SEQ ID NO: 189017 - RNA, 19 nt, Human
cggggcaggcgggcaggcu

SEQ ID NO: 189018 - RNA, 24 nt, Human
cguagcccaugcugcuacccucuc

SEQ ID NO: 189019 - RNA, 23 nt, Human
cgucaauaaccaucaccaaacac

SEQ ID NO: 189020 - RNA, 20 nt, Human
cuccuagcccuggcaggccc

SEQ ID NO: 189021 - RNA, 18 nt, Human
cuccugcugcucagcucc

SEQ ID NO: 189022 - RNA, 23 nt, Human
cucuuuugcaacauguaagguuu

SEQ ID NO: 189023 - RNA, 21 nt, Human
cuggggaaggguggcagggag

SEQ ID NO: 189024 - RNA, 19 nt, Human
gaaagcaggaggagcugag

SEQ ID NO: 189025 - RNA, 21 nt, Human
gacgcagcacuuggcaacaca

SEQ ID NO: 189026 - RNA, 21 nt, Human
gagaacaggaaagaaaacggc

SEQ ID NO: 189027 - RNA, 19 nt, Human
gaggacaaagaggaugaga

SEQ ID NO: 189028 - RNA, 25 nt, Human
gaggcaagagccagaaaggagacac

SEQ ID NO: 189029 - RNA, 18 nt, Human
gcagcuucagcagcaggg

SEQ ID NO: 189030 - RNA, 23 nt, Human
gcaggcugcgggccacagggaca

SEQ ID NO: 189031 - RNA, 20 nt, Human
gccccggccccucguccucc

SEQ ID NO: 189032 - RNA, 18 nt, Human
ggagacacagaaaaggcc

SEQ ID NO: 189033 - RNA, 21 nt, Human
ggcacugaacuccgugugguc

SEQ ID NO: 189034 - RNA, 21 nt, Human
ggcggggcaggcgggcaagac

SEQ ID NO: 189035 - RNA, 22 nt, Human
gggaaggguggcagggagaggg

SEQ ID NO: 189036 - RNA, 20 nt, Human
gggcagcuucagcagcaggg

SEQ ID NO: 189037 - RNA, 21 nt, Human
gggcagcuucagcagcagggg

SEQ ID NO: 189038 - RNA, 19 nt, Human
ggggaaggguggcagggag

SEQ ID NO: 189039 - RNA, 18 nt, Human
ggggacgccagagaggga

SEQ ID NO: 189040 - RNA, 22 nt, Human
guggcccuggcccgacgcaccu

SEQ ID NO: 189041 - RNA, 22 nt, Human
guggucggcaggaggggcaggc

SEQ ID NO: 189042 - RNA, 24 nt, Human
uacaagcagccggggacgccagag

SEQ ID NO: 189043 - RNA, 23 nt, Human
uacccucucccaccuccuuguca

SEQ ID NO: 189044 - RNA, 24 nt, Human
uccuagcccuggcaggccccuggc

SEQ ID NO: 189045 - RNA, 21 nt, Human
ucucccaccuccuugucacuc

SEQ ID NO: 189046 - RNA, 21 nt, Human
ugaaacaaagagauaagagaa

SEQ ID NO: 189047 - RNA, 19 nt, Human
ugcccacgggcaggcaaga

SEQ ID NO: 189048 - RNA, 19 nt, Human
uggcaggccccuggcccca

SEQ ID NO: 189049 - RNA, 19 nt, Human
uggcagggagaggggagca

SEQ ID NO: 189050 - RNA, 20 nt, Human
uggcagggagaggggagcaa

SEQ ID NO: 189051 - RNA, 23 nt, Human
uggcagggagaggggagcaaugg

SEQ ID NO: 189052 - RNA, 22 nt, Human
uggcccgacgcaccuuccacag

SEQ ID NO: 189053 - RNA, 22 nt, Human
uggcuuuuuuguguuuugauua

SEQ ID NO: 189054 - RNA, 22 nt, Human
ugggcggggcaggcgggcaggc

SEQ ID NO: 189055 - RNA, 19 nt, Human
uggggccgggaggggcaau

SEQ ID NO: 189056 - RNA, 21 nt, Human
uguggcccuggcccgacgcac

SEQ ID NO: 189057 - RNA, 21 nt, Human
ugugguuuggggccgggaggg

SEQ ID NO: 189058 - RNA, 19 nt, Human
uuagaaauguucuugguau

SEQ ID NO: 189059 - RNA, 18 nt, Human
uuguuuucguuuuggcuu

SEQ ID NO: 189060 - RNA, 23 nt, Human
uuuuguguuuugauuuuuuuucc

SEQ ID NO: 189061 - RNA, 18 nt, Human
uuuuuuccuuuuuucucu

SEQ ID NO: 189062 - RNA, 24 nt, Human
aaaacuaucagugaaaaacaaaug

SEQ ID NO: 189063 - RNA, 23 nt, Human
aaaacuguggaaaaguuuucagc

SEQ ID NO: 189064 - RNA, 21 nt, Human
aaaccacaugaauguaaaacu

SEQ ID NO: 189065 - RNA, 22 nt, Human
aaacuaucagugaaaaacaaau

SEQ ID NO: 189066 - RNA, 24 nt, Human
aaagugcugggauuacagguguga

SEQ ID NO: 189067 - RNA, 20 nt, Human
aacauagugagaccucgucu

SEQ ID NO: 189068 - RNA, 25 nt, Human
aagagcccuauacaaucacgagggu

SEQ ID NO: 189069 - RNA, 21 nt, Human
aagccuccaacccagaacucc

SEQ ID NO: 189070 - RNA, 22 nt, Human
aagccuccaacccagaacucca

SEQ ID NO: 189071 - RNA, 19 nt, Human
aaguaacugggauuacagg

SEQ ID NO: 189072 - RNA, 25 nt, Human
aaguaacugggauuacaggcaccca

SEQ ID NO: 189073 - RNA, 18 nt, Human
aagugcugggauuacagg

SEQ ID NO: 189074 - RNA, 19 nt, Human
aagugcugggauuacaggu

SEQ ID NO: 189075 - RNA, 21 nt, Human
aauuacuuaaaaccugcagaa

SEQ ID NO: 189076 - RNA, 18 nt, Human
aauuccauaacuuaaacc

SEQ ID NO: 189077 - RNA, 20 nt, Human
acaaaugcaccccugcuccu

SEQ ID NO: 189078 - RNA, 22 nt, Human
acacaaaugcaccccugcuccu

SEQ ID NO: 189079 - RNA, 22 nt, Human
acagaggggaggaaaacagcug

SEQ ID NO: 189080 - RNA, 18 nt, Human
acagcucacugcaaccuc

SEQ ID NO: 189081 - RNA, 21 nt, Human
acaggcacccaccaucacacc

SEQ ID NO: 189082 - RNA, 20 nt, Human
acaggguuucaccacauugg

SEQ ID NO: 189083 - RNA, 24 nt, Human
acaggguuucaccacauuggccag

SEQ ID NO: 189084 - RNA, 21 nt, Human
acauuggccaggcuggucucg

SEQ ID NO: 189085 - RNA, 23 nt, Human
accacaugaauguaaaacugugg

SEQ ID NO: 189086 - RNA, 22 nt, Human
accacggccaugacucucuguc

SEQ ID NO: 189087 - RNA, 19 nt, Human
acccaggcuggaguacagu

SEQ ID NO: 189088 - RNA, 22 nt, Human
acccauccccaacccgaacaca

SEQ ID NO: 189089 - RNA, 21 nt, Human
acccccacugaacaccacaga

SEQ ID NO: 189090 - RNA, 22 nt, Human
accucgucucuacaaaaaauaa

SEQ ID NO: 189091 - RNA, 24 nt, Human
acucuaagucugaccuugcccaau

SEQ ID NO: 189092 - RNA, 23 nt, Human
agaaguucgagaccagccugggc

SEQ ID NO: 189093 - RNA, 23 nt, Human
agacagaggggcggggagcgcuc

SEQ ID NO: 189094 - RNA, 23 nt, Human
agaggggcggggagcgcucugag

SEQ ID NO: 189095 - RNA, 21 nt, Human
agaguuccugccagagaggcc

SEQ ID NO: 189096 - RNA, 24 nt, Human
agaugcacagccccaggucuccuc

SEQ ID NO: 189097 - RNA, 18 nt, Human
agcccauggcauugggaa

SEQ ID NO: 189098 - RNA, 23 nt, Human
agccugggcaacauagugagacc

SEQ ID NO: 189099 - RNA, 24 nt, Human
agccugggcaacauagugagaccu

SEQ ID NO: 189100 - RNA, 25 nt, Human
agccugggcaacauagugagaccuc

SEQ ID NO: 189101 - RNA, 22 nt, Human
aggcaagaggaagaaaggagag

SEQ ID NO: 189102 - RNA, 18 nt, Human
aggcaggaggaucgcucg

SEQ ID NO: 189103 - RNA, 21 nt, Human
aggcugaagcgggaggauugc

SEQ ID NO: 189104 - RNA, 24 nt, Human
aggcugaagcgggaggauugcuug

SEQ ID NO: 189105 - RNA, 21 nt, Human
agggaguacacagaggggagg

SEQ ID NO: 189106 - RNA, 21 nt, Human
aggucgaaacuucagugagcu

SEQ ID NO: 189107 - RNA, 24 nt, Human
aggugauccaccugccucggccuc

SEQ ID NO: 189108 - RNA, 24 nt, Human
aggugcgauggcucacguuuguaa

SEQ ID NO: 189109 - RNA, 20 nt, Human
agguggaggcaggaggaucg

SEQ ID NO: 189110 - RNA, 23 nt, Human
aguacaguggcacaaucacagcu

SEQ ID NO: 189111 - RNA, 20 nt, Human
aguuaauuacuuaaaaccug

SEQ ID NO: 189112 - RNA, 23 nt, Human
aucgugccacugcacuccagccu

SEQ ID NO: 189113 - RNA, 20 nt, Human
auggcucacguuuguaaucc

SEQ ID NO: 189114 - RNA, 24 nt, Human
augguuacuauacagaagcucuuc

SEQ ID NO: 189115 - RNA, 24 nt, Human
auuuuuguauuuuuaguagagaca

SEQ ID NO: 189116 - RNA, 24 nt, Human
caaagugcugggauuacaggugug

SEQ ID NO: 189117 - RNA, 25 nt, Human
caaaugaaacguccuaaugugcacu

SEQ ID NO: 189118 - RNA, 23 nt, Human
caacacaaaugcaccccugcucc

SEQ ID NO: 189119 - RNA, 24 nt, Human
caacauagugagaccucgucucua

SEQ ID NO: 189120 - RNA, 19 nt, Human
caaccccauguuucauucu

SEQ ID NO: 189121 - RNA, 19 nt, Human
caacccccacugaacacca

SEQ ID NO: 189122 - RNA, 23 nt, Human
caaccuccaccucccagguucaa

SEQ ID NO: 189123 - RNA, 22 nt, Human
caagcgauucuccugccucagc

SEQ ID NO: 189124 - RNA, 27 nt, Human
caagcgauucuccugccucagccuccc

SEQ ID NO: 189125 - RNA, 21 nt, Human
cacaccuggcuaauuuuugua

SEQ ID NO: 189126 - RNA, 24 nt, Human
cacauuggccaggcuggucucgaa

SEQ ID NO: 189127 - RNA, 21 nt, Human
caccacauuggccaggcuggu

SEQ ID NO: 189128 - RNA, 24 nt, Human
caccacauuggccaggcuggucuc

SEQ ID NO: 189129 - RNA, 27 nt, Human
caccacauuggccaggcuggucucgaa

SEQ ID NO: 189130 - RNA, 22 nt, Human
caccaugccuggccaagguugg

SEQ ID NO: 189131 - RNA, 18 nt, Human
cacccaccaucacaccug

SEQ ID NO: 189132 - RNA, 19 nt, Human
cacccucaccacggccaug

SEQ ID NO: 189133 - RNA, 20 nt, Human
caccgaguguggaaaagccc

SEQ ID NO: 189134 - RNA, 23 nt, Human
caccugccucggccucccaaagu

SEQ ID NO: 189135 - RNA, 25 nt, Human
cacgccccauuacccaugagagagc

SEQ ID NO: 189136 - RNA, 24 nt, Human
cacggucaaaaccaacugcgcacc

SEQ ID NO: 189137 - RNA, 24 nt, Human
cacguuuguaauccgaacacuuug

SEQ ID NO: 189138 - RNA, 21 nt, Human
cacugcaaccuccaccuccca

SEQ ID NO: 189139 - RNA, 25 nt, Human
cacugcacuccagccuaaaacagug

SEQ ID NO: 189140 - RNA, 19 nt, Human
cacugcacuccagccuaag

SEQ ID NO: 189141 - RNA, 19 nt, Human
cacugcacuccagccuaag

SEQ ID NO: 189142 - RNA, 27 nt, Human
cacugcacuccagccuaagaaauugag

SEQ ID NO: 189143 - RNA, 25 nt, Human
cacuuuggcucuggggaguuagcuc

SEQ ID NO: 189144 - RNA, 23 nt, Human
cagaagcucuucuguagaagucu

SEQ ID NO: 189145 - RNA, 22 nt, Human
cagacuagagaauguauacuga

SEQ ID NO: 189146 - RNA, 18 nt, Human
cagaugcacagccccagg

SEQ ID NO: 189147 - RNA, 23 nt, Human
cagcaaaugcaggaaaacuuucc

SEQ ID NO: 189148 - RNA, 24 nt, Human
cagcccaagccucuuccuccccag

SEQ ID NO: 189149 - RNA, 23 nt, Human
cagccucccaaguaacugggauu

SEQ ID NO: 189150 - RNA, 21 nt, Human
cagcucacugcaaccuccacc

SEQ ID NO: 189151 - RNA, 24 nt, Human
cagcuccuccuccacuccaacccc

SEQ ID NO: 189152 - RNA, 24 nt, Human
cagggacauaaaauuccauaacuu

SEQ ID NO: 189153 - RNA, 24 nt, Human
caggguuucaccacauuggccagg

SEQ ID NO: 189154 - RNA, 22 nt, Human
caggugauccaccugccucggc

SEQ ID NO: 189155 - RNA, 21 nt, Human
caguggaccacaggugagacc

SEQ ID NO: 189156 - RNA, 21 nt, Human
ccaaagugcugggauuacagg

SEQ ID NO: 189157 - RNA, 21 nt, Human
ccaaagugcugggauuacagg

SEQ ID NO: 189158 - RNA, 24 nt, Human
ccaaagugcugggauuacaggugu

SEQ ID NO: 189159 - RNA, 23 nt, Human
ccaaguaacugggauuacaggca

SEQ ID NO: 189160 - RNA, 18 nt, Human
ccacacugcccaaucccc

SEQ ID NO: 189161 - RNA, 24 nt, Human
ccaccucccagguucaagcgauuc

SEQ ID NO: 189162 - RNA, 20 nt, Human
ccacugcacuccagccuaag

SEQ ID NO: 189163 - RNA, 23 nt, Human
ccacugcacuccagccuaagaaa

SEQ ID NO: 189164 - RNA, 24 nt, Human
ccacugcacuccagccuaagaaau

SEQ ID NO: 189165 - RNA, 18 nt, Human
ccagggcuucaucauccu

SEQ ID NO: 189166 - RNA, 21 nt, Human
ccauccacuugggauucaccc

SEQ ID NO: 189167 - RNA, 22 nt, Human
cccaagccucuuccuccccagg

SEQ ID NO: 189168 - RNA, 19 nt, Human
cccaaguaacugggauuac

SEQ ID NO: 189169 - RNA, 24 nt, Human
cccaaguaacugggauuacaggca

SEQ ID NO: 189170 - RNA, 19 nt, Human
cccacugaacaccacagaa

SEQ ID NO: 189171 - RNA, 23 nt, Human
cccaggccuggcgcucagcuugc

SEQ ID NO: 189172 - RNA, 20 nt, Human
cccagggcuucaucauccuc

SEQ ID NO: 189173 - RNA, 20 nt, Human
cccagguucaagcgauucuc

SEQ ID NO: 189174 - RNA, 23 nt, Human
cccagguucaagcgauucuccug

SEQ ID NO: 189175 - RNA, 20 nt, Human
cccauccccaacccgaacac

SEQ ID NO: 189176 - RNA, 20 nt, Human
cccaugcaugcaaaaaaaca

SEQ ID NO: 189177 - RNA, 21 nt, Human
cccauguuucauucugggguc

SEQ ID NO: 189178 - RNA, 19 nt, Human
cccucaaaacuagcuccag

SEQ ID NO: 189179 - RNA, 19 nt, Human
cccuccgugccagaggaau

SEQ ID NO: 189180 - RNA, 18 nt, Human
ccgcaaaccaggcaaagc

SEQ ID NO: 189181 - RNA, 24 nt, Human
ccggaccucaggugauccaccugc

SEQ ID NO: 189182 - RNA, 19 nt, Human
ccucaaagaauucaaaccc

SEQ ID NO: 189183 - RNA, 19 nt, Human
ccuccaacccagaacucca

SEQ ID NO: 189184 - RNA, 24 nt, Human
ccucccagguucaagcgauucucc

SEQ ID NO: 189185 - RNA, 21 nt, Human
ccugcagaagcaccuaguccc

SEQ ID NO: 189186 - RNA, 18 nt, Human
ccuggcgcucagcuugca

SEQ ID NO: 189187 - RNA, 21 nt, Human
ccugggcaacauagugagacc

SEQ ID NO: 189188 - RNA, 21 nt, Human
ccuugcccaaucccgggggga

SEQ ID NO: 189189 - RNA, 23 nt, Human
cgaacacaacacaaaugcacccc

SEQ ID NO: 189190 - RNA, 18 nt, Human
cgaaugugagaaagccac

SEQ ID NO: 189191 - RNA, 24 nt, Human
cgagaccagccugggcaacauagu

SEQ ID NO: 189192 - RNA, 23 nt, Human
cgccccauuacccaugagagagc

SEQ ID NO: 189193 - RNA, 22 nt, Human
cgcucugucacccaggcuggag

SEQ ID NO: 189194 - RNA, 22 nt, Human
cggggagggacaccgggguccu

SEQ ID NO: 189195 - RNA, 19 nt, Human
cuaaacccauccccaaccc

SEQ ID NO: 189196 - RNA, 23 nt, Human
cuaauuuuuguauuuuuaguaga

SEQ ID NO: 189197 - RNA, 22 nt, Human
cuacaaaaaauaaaacauuagc

SEQ ID NO: 189198 - RNA, 20 nt, Human
cuauacagcuuccaccucga

SEQ ID NO: 189199 - RNA, 24 nt, Human
cucacguuuguaauccgaacacuu

SEQ ID NO: 189200 - RNA, 19 nt, Human
cucacucccgcgcccacug

SEQ ID NO: 189201 - RNA, 24 nt, Human
cucacugcaaccuccaccucccag

SEQ ID NO: 189202 - RNA, 22 nt, Human
cucagcucacucccgcgcccac

SEQ ID NO: 189203 - RNA, 18 nt, Human
cucaggaggcugaagcgg

SEQ ID NO: 189204 - RNA, 21 nt, Human
cuccagccuaagaaauugagc

SEQ ID NO: 189205 - RNA, 19 nt, Human
cucccgcaaaccaggcaaa

SEQ ID NO: 189206 - RNA, 23 nt, Human
cuccugccucagccucccaagua

SEQ ID NO: 189207 - RNA, 24 nt, Human
cucgcucugucacccaggcuggag

SEQ ID NO: 189208 - RNA, 25 nt, Human
cugaucuuaaacaguggucaauuua

SEQ ID NO: 189209 - RNA, 23 nt, Human
cugcaaccuccaccucccagguu

SEQ ID NO: 189210 - RNA, 24 nt, Human
cugcaaccuccaccucccagguuc

SEQ ID NO: 189211 - RNA, 21 nt, Human
cugcaugggaaaguuuguaug

SEQ ID NO: 189212 - RNA, 23 nt, Human
cugccucggccucccaaagugcu

SEQ ID NO: 189213 - RNA, 19 nt, Human
cugucacccaggcuggagu

SEQ ID NO: 189214 - RNA, 19 nt, Human
cuguggugaggaagcauga

SEQ ID NO: 189215 - RNA, 23 nt, Human
cuucacacuggggagauauccuc

SEQ ID NO: 189216 - RNA, 21 nt, Human
cuuccacuuuggcucugggga

SEQ ID NO: 189217 - RNA, 21 nt, Human
cuucggugcaggucagcucuc

SEQ ID NO: 189218 - RNA, 23 nt, Human
cuuucuagagcuagaaccuucuc

SEQ ID NO: 189219 - RNA, 24 nt, Human
gaagcgggaggauugcuugagccc

SEQ ID NO: 189220 - RNA, 25 nt, Human
gaccgaaugugagaaagccacagga

SEQ ID NO: 189221 - RNA, 23 nt, Human
gaccucaggugauccaccugccu

SEQ ID NO: 189222 - RNA, 24 nt, Human
gaccucaggugauccaccugccuc

SEQ ID NO: 189223 - RNA, 20 nt, Human
gagaagcugcaugggaaagu

SEQ ID NO: 189224 - RNA, 22 nt, Human
gaguucacaguggagaaaacca

SEQ ID NO: 189225 - RNA, 21 nt, Human
gaucgugccacugcacuccag

SEQ ID NO: 189226 - RNA, 18 nt, Human
gauuacaggugugagcca

SEQ ID NO: 189227 - RNA, 21 nt, Human
gauuacaggugugagccacca

SEQ ID NO: 189228 - RNA, 24 nt, Human
gauuacaggugugagccaccaugc

SEQ ID NO: 189229 - RNA, 21 nt, Human
gauucuccugccucagccucc

SEQ ID NO: 189230 - RNA, 19 nt, Human
gauucugaaucacagaguu

SEQ ID NO: 189231 - RNA, 22 nt, Human
gcaaccuccaccucccagguuc

SEQ ID NO: 189232 - RNA, 19 nt, Human
gccagagaggcccacaggc

SEQ ID NO: 189233 - RNA, 19 nt, Human
gccccaggucuccucuugc

SEQ ID NO: 189234 - RNA, 24 nt, Human
gcgauucuccugccucagccuccc

SEQ ID NO: 189235 - RNA, 19 nt, Human
gcgcgggcucggggcgcgg

SEQ ID NO: 189236 - RNA, 21 nt, Human
gcgcggggagggacaccgggg

SEQ ID NO: 189237 - RNA, 23 nt, Human
gcgcggggagggacaccgggguc

SEQ ID NO: 189238 - RNA, 19 nt, Human
gcuaggugcgauggcucac

SEQ ID NO: 189239 - RNA, 21 nt, Human
gcuccuccuccacuccaaccc

SEQ ID NO: 189240 - RNA, 25 nt, Human
gcucugucacccaggcuggaguaca

SEQ ID NO: 189241 - RNA, 19 nt, Human
gcuggaguacaguggcaca

SEQ ID NO: 189242 - RNA, 18 nt, Human
ggaaaacuuucccuugga

SEQ ID NO: 189243 - RNA, 18 nt, Human
ggaaggagagcgcgggcu

SEQ ID NO: 189244 - RNA, 24 nt, Human
ggaccucaggugauccaccugccu

SEQ ID NO: 189245 - RNA, 18 nt, Human
ggagacagaggggcgggg

SEQ ID NO: 189246 - RNA, 24 nt, Human
ggauuacaggugugagccaccaug

SEQ ID NO: 189247 - RNA, 25 nt, Human
ggcggggagcgcucugagggcgggg

SEQ ID NO: 189248 - RNA, 24 nt, Human
gggcgcggggagggacaccggggu

SEQ ID NO: 189249 - RNA, 23 nt, Human
ggggagacagaggggcggggagc

SEQ ID NO: 189250 - RNA, 21 nt, Human
ggggagcgcucugagggcggg

SEQ ID NO: 189251 - RNA, 22 nt, Human
ggggaugggggaaagcccaugg

SEQ ID NO: 189252 - RNA, 28 nt, Human
ggggugauuuaagggaguacacagaggg

SEQ ID NO: 189253 - RNA, 18 nt, Human
ggguccuggggagaaggc

SEQ ID NO: 189254 - RNA, 24 nt, Human
gucaacccccacugaacaccacag

SEQ ID NO: 189255 - RNA, 24 nt, Human
gugauccaccugccucggccuccc

SEQ ID NO: 189256 - RNA, 18 nt, Human
gugcaugcuguggagaua

SEQ ID NO: 189257 - RNA, 19 nt, Human
gugcaugcuguggagauac

SEQ ID NO: 189258 - RNA, 23 nt, Human
guggcacaaucacagcucacugc

SEQ ID NO: 189259 - RNA, 18 nt, Human
uaaaaccugcagaagcac

SEQ ID NO: 189260 - RNA, 21 nt, Human
uaaauaugacaacaucuucag

SEQ ID NO: 189261 - RNA, 19 nt, Human
uaagagaaaccacacugga

SEQ ID NO: 189262 - RNA, 21 nt, Human
uaagagaaaccacacuggaag

SEQ ID NO: 189263 - RNA, 24 nt, Human
uaauuuuuguauuuuuaguagaga

SEQ ID NO: 189264 - RNA, 23 nt, Human
uacagcuuccaccucgaggcaag

SEQ ID NO: 189265 - RNA, 22 nt, Human
uacaggugugagccaccaugcc

SEQ ID NO: 189266 - RNA, 23 nt, Human
uacaggugugagccaccaugccu

SEQ ID NO: 189267 - RNA, 21 nt, Human
uagaagaaaacccacaaaacu

SEQ ID NO: 189268 - RNA, 18 nt, Human
uagcuccagacaucacag

SEQ ID NO: 189269 - RNA, 19 nt, Human
uaguagagacaggguuuca

SEQ ID NO: 189270 - RNA, 23 nt, Human
ucaaaaccaacugcgcaccagag

SEQ ID NO: 189271 - RNA, 19 nt, Human
ucaacacaguggaccacag

SEQ ID NO: 189272 - RNA, 24 nt, Human
ucacugcaaccuccaccucccagg

SEQ ID NO: 189273 - RNA, 25 nt, Human
ucacugcaaccuccaccucccaggu

SEQ ID NO: 189274 - RNA, 27 nt, Human
ucacugcaaccuccaccucccagguuc

SEQ ID NO: 189275 - RNA, 18 nt, Human
ucacugcucccaaccugg

SEQ ID NO: 189276 - RNA, 18 nt, Human
ucagcucacucccgcgcc

SEQ ID NO: 189277 - RNA, 21 nt, Human
ucaggugauccaccugccucg

SEQ ID NO: 189278 - RNA, 23 nt, Human
uccaaauaaauuggaccucaaag

SEQ ID NO: 189279 - RNA, 19 nt, Human
uccacacauagaagaaaac

SEQ ID NO: 189280 - RNA, 25 nt, Human
uccacacauagaagaaaacccacaa

SEQ ID NO: 189281 - RNA, 18 nt, Human
uccacuuuggcucugggg

SEQ ID NO: 189282 - RNA, 24 nt, Human
uccauacccguccugagccaucca

SEQ ID NO: 189283 - RNA, 23 nt, Human
ucccaaagugcugggauuacagg

SEQ ID NO: 189284 - RNA, 23 nt, Human
ucccaaccuggagcuccuaaacc

SEQ ID NO: 189285 - RNA, 24 nt, Human
ucccaaguaacugggauuacaggc

SEQ ID NO: 189286 - RNA, 20 nt, Human
ucccagagaggaacacugca

SEQ ID NO: 189287 - RNA, 21 nt, Human
ucccagguucaagcgauucuc

SEQ ID NO: 189288 - RNA, 24 nt, Human
ucccagguucaagcgauucuccug

SEQ ID NO: 189289 - RNA, 23 nt, Human
uccccaggccuggcgcucagcuu

SEQ ID NO: 189290 - RNA, 24 nt, Human
ucccggggggaugggggaaagccc

SEQ ID NO: 189291 - RNA, 21 nt, Human
uccuaaacccauccccaaccc

SEQ ID NO: 189292 - RNA, 20 nt, Human
uccucuugcugagacagcuc

SEQ ID NO: 189293 - RNA, 18 nt, Human
ucggccucccaaagugcu

SEQ ID NO: 189294 - RNA, 21 nt, Human
ucucacaucacuaacauuaca

SEQ ID NO: 189295 - RNA, 21 nt, Human
ucucccgcaaaccaggcaaag

SEQ ID NO: 189296 - RNA, 19 nt, Human
ucucgcucugucacccagg

SEQ ID NO: 189297 - RNA, 23 nt, Human
ucucgcucugucacccaggcugg

SEQ ID NO: 189298 - RNA, 24 nt, Human
ucucgcucugucacccaggcugga

SEQ ID NO: 189299 - RNA, 25 nt, Human
ucucgcucugucacccaggcuggag

SEQ ID NO: 189300 - RNA, 26 nt, Human
ucucgcucugucacccaggcuggagu

SEQ ID NO: 189301 - RNA, 18 nt, Human
ucugucacccaggcugga

SEQ ID NO: 189302 - RNA, 24 nt, Human
ucugucacccaggcuggaguacag

SEQ ID NO: 189303 - RNA, 25 nt, Human
ucugucacugcucccaaccuggagc

SEQ ID NO: 189304 - RNA, 23 nt, Human
ucuguggugaggaagcaugaagc

SEQ ID NO: 189305 - RNA, 22 nt, Human
ugaaaaacaaaugugcgugcaa

SEQ ID NO: 189306 - RNA, 18 nt, Human
ugaaacguccuaaugugc

SEQ ID NO: 189307 - RNA, 20 nt, Human
ugacaacaucuucaguaacu

SEQ ID NO: 189308 - RNA, 20 nt, Human
ugacugaggggaggaaaucu

SEQ ID NO: 189309 - RNA, 22 nt, Human
ugagcaagacccuaucucgaaa

SEQ ID NO: 189310 - RNA, 19 nt, Human
ugaggggaggaaaucuccc

SEQ ID NO: 189311 - RNA, 20 nt, Human
ugaggggaggaaaucucccg

SEQ ID NO: 189312 - RNA, 19 nt, Human
ugagugccuccauccagau

SEQ ID NO: 189313 - RNA, 23 nt, Human
ugaucaaagaggcuaggugcgau

SEQ ID NO: 189314 - RNA, 21 nt, Human
ugcaaucaguguagaaaugcc

SEQ ID NO: 189315 - RNA, 21 nt, Human
ugccagaggaauccuacccag

SEQ ID NO: 189316 - RNA, 24 nt, Human
ugccucagccucccaaguaacugg

SEQ ID NO: 189317 - RNA, 21 nt, Human
ugccucggccucccaaagugc

SEQ ID NO: 189318 - RNA, 24 nt, Human
ugccucggccucccaaagugcugg

SEQ ID NO: 189319 - RNA, 18 nt, Human
ugccuggccaagguuggg

SEQ ID NO: 189320 - RNA, 19 nt, Human
ugccuggccaagguugggg

SEQ ID NO: 189321 - RNA, 19 nt, Human
ugcgggaagccaggacucu

SEQ ID NO: 189322 - RNA, 24 nt, Human
ugcugggauuacaggugugagcca

SEQ ID NO: 189323 - RNA, 20 nt, Human
uggaauaaauaauucuggaa

SEQ ID NO: 189324 - RNA, 21 nt, Human
uggaauaaauaauucuggaaa

SEQ ID NO: 189325 - RNA, 20 nt, Human
uggaauaagccuccaaccca

SEQ ID NO: 189326 - RNA, 19 nt, Human
uggaguacaguggcacaau

SEQ ID NO: 189327 - RNA, 21 nt, Human
uggcaagaaaacacgccccau

SEQ ID NO: 189328 - RNA, 20 nt, Human
uggcacaaucacagcucacu

SEQ ID NO: 189329 - RNA, 24 nt, Human
uggcacaaucacagcucacugcaa

SEQ ID NO: 189330 - RNA, 28 nt, Human
uggcacaaucacagcucacugcaaccuc

SEQ ID NO: 189331 - RNA, 19 nt, Human
uggcagagugugaaagucg

SEQ ID NO: 189332 - RNA, 23 nt, Human
uggccaggcuggucucgaacucc

SEQ ID NO: 189333 - RNA, 19 nt, Human
uggcucacguuuguaaucc

SEQ ID NO: 189334 - RNA, 20 nt, Human
uggcucacguuuguaauccg

SEQ ID NO: 189335 - RNA, 19 nt, Human
ugggagguggaggcaggag

SEQ ID NO: 189336 - RNA, 23 nt, Human
ugggagguggaggcaggaggauc

SEQ ID NO: 189337 - RNA, 19 nt, Human
ugggauuacaggcacccac

SEQ ID NO: 189338 - RNA, 21 nt, Human
ugggauuacaggcacccacca

SEQ ID NO: 189339 - RNA, 22 nt, Human
ugggauuacaggcacccaccau

SEQ ID NO: 189340 - RNA, 18 nt, Human
ugggauuacaggugugag

SEQ ID NO: 189341 - RNA, 22 nt, Human
ugggauuacaggugugagccac

SEQ ID NO: 189342 - RNA, 23 nt, Human
ugggauuacaggugugagccacc

SEQ ID NO: 189343 - RNA, 24 nt, Human
ugggauuacaggugugagccacca

SEQ ID NO: 189344 - RNA, 25 nt, Human
ugggauuacaggugugagccaccau

SEQ ID NO: 189345 - RNA, 20 nt, Human
ugggccucgcggugcaucag

SEQ ID NO: 189346 - RNA, 21 nt, Human
uggggagaaggcgcucggggc

SEQ ID NO: 189347 - RNA, 23 nt, Human
ugggggaaagcccauggcauugg

SEQ ID NO: 189348 - RNA, 20 nt, Human
uggguauggucgugcgcacc

SEQ ID NO: 189349 - RNA, 24 nt, Human
uguaaacauggaauaagccuccaa

SEQ ID NO: 189350 - RNA, 20 nt, Human
uguaauccgaacacuuuggg

SEQ ID NO: 189351 - RNA, 22 nt, Human
uguauguuggauaaaguguggu

SEQ ID NO: 189352 - RNA, 21 nt, Human
uguggaaaagcccucuugugg

SEQ ID NO: 189353 - RNA, 18 nt, Human
uguggugaggaagcauga

SEQ ID NO: 189354 - RNA, 20 nt, Human
uguggugaggaagcaugaag

SEQ ID NO: 189355 - RNA, 22 nt, Human
uguggugaggaagcaugaagcu

SEQ ID NO: 189356 - RNA, 20 nt, Human
uuagcuggguauggucgugc

SEQ ID NO: 189357 - RNA, 20 nt, Human
uuagcuggguauggucgugc

SEQ ID NO: 189358 - RNA, 18 nt, Human
uuaguagagacaggguuu

SEQ ID NO: 189359 - RNA, 21 nt, Human
uucaagcgauucuccugccuc

SEQ ID NO: 189360 - RNA, 23 nt, Human
uucaagcgauucuccugccucag

SEQ ID NO: 189361 - RNA, 24 nt, Human
uucaagcgauucuccugccucagc

SEQ ID NO: 189362 - RNA, 21 nt, Human
uucacccucaccacggccaug

SEQ ID NO: 189363 - RNA, 20 nt, Human
uucauucuggggucuacacg

SEQ ID NO: 189364 - RNA, 19 nt, Human
uuccacacugcccaauccc

SEQ ID NO: 189365 - RNA, 19 nt, Human
uuccauacccguccugagc

SEQ ID NO: 189366 - RNA, 22 nt, Human
uuccugccagagaggcccacag

SEQ ID NO: 189367 - RNA, 18 nt, Human
uugagcaagacccuaucu

SEQ ID NO: 189368 - RNA, 20 nt, Human
uuuguuuuuuugagacagag

SEQ ID NO: 189369 - RNA, 24 nt, Human
uuuuuaguagagacaggguuucac

SEQ ID NO: 189370 - RNA, 20 nt, Human
uuuuuguauuuuuaguagag

SEQ ID NO: 189371 - RNA, 23 nt, Human
aaaaaaaaaaacaugaugugcag

SEQ ID NO: 189372 - RNA, 18 nt, Human
aaaauauucauauacccu

SEQ ID NO: 189373 - RNA, 22 nt, Human
aaaauuucaaaaccuugcaacc

SEQ ID NO: 189374 - RNA, 23 nt, Human
aaaauuuuuccaaauauuccacu

SEQ ID NO: 189375 - RNA, 21 nt, Human
aaacaaggcauucgaaaacaa

SEQ ID NO: 189376 - RNA, 23 nt, Human
aaagagccggggcgggacuugag

SEQ ID NO: 189377 - RNA, 19 nt, Human
aacauggugaaacccaauc

SEQ ID NO: 189378 - RNA, 20 nt, Human
aacauggugaaacccaaucu

SEQ ID NO: 189379 - RNA, 21 nt, Human
aacauggugaaacccaaucuc

SEQ ID NO: 189380 - RNA, 18 nt, Human
aagacaggucagccccaa

SEQ ID NO: 189381 - RNA, 23 nt, Human
aagugcaaagguccucacaaacu

SEQ ID NO: 189382 - RNA, 19 nt, Human
acaauaucacagaauugaa

SEQ ID NO: 189383 - RNA, 24 nt, Human
acauaagcagcaagauuaacgaaa

SEQ ID NO: 189384 - RNA, 18 nt, Human
accuggguguugggaauu

SEQ ID NO: 189385 - RNA, 20 nt, Human
agaaaauuucaaaaccuugc

SEQ ID NO: 189386 - RNA, 19 nt, Human
agccaauaccuuccuuuua

SEQ ID NO: 189387 - RNA, 21 nt, Human
agccaauaccuuccuuuuaug

SEQ ID NO: 189388 - RNA, 19 nt, Human
agggggcaugaacaaaacc

SEQ ID NO: 189389 - RNA, 18 nt, Human
agugacuuauuaagccca

SEQ ID NO: 189390 - RNA, 25 nt, Human
auacaugcuuuuuuuccuaaagucc

SEQ ID NO: 189391 - RNA, 21 nt, Human
auccuggccaacauggugaaa

SEQ ID NO: 189392 - RNA, 21 nt, Human
augaacaaaaccucaagacau

SEQ ID NO: 189393 - RNA, 19 nt, Human
augccuguaaucccagcac

SEQ ID NO: 189394 - RNA, 24 nt, Human
caacauggugaaacccaaucucua

SEQ ID NO: 189395 - RNA, 24 nt, Human
cacaaacuguacagaaaauuucaa

SEQ ID NO: 189396 - RNA, 21 nt, Human
cacaauugcagccaaguuggc

SEQ ID NO: 189397 - RNA, 24 nt, Human
cacuuuuggagaccaagccaggag

SEQ ID NO: 189398 - RNA, 18 nt, Human
caggucagccccaaaacg

SEQ ID NO: 189399 - RNA, 25 nt, Human
caugccuguaaucccagcacuuuug

SEQ ID NO: 189400 - RNA, 21 nt, Human
cccaaaacgguccuguggcuc

SEQ ID NO: 189401 - RNA, 20 nt, Human
cccgaggucaagagauggag

SEQ ID NO: 189402 - RNA, 21 nt, Human
ccgggaaagcccaggggcucc

SEQ ID NO: 189403 - RNA, 21 nt, Human
ccuccggugaugggaagcggg

SEQ ID NO: 189404 - RNA, 19 nt, Human
ccugcaggcacggaggggg

SEQ ID NO: 189405 - RNA, 22 nt, Human
ccuggccaacauggugaaaccc

SEQ ID NO: 189406 - RNA, 22 nt, Human
ccuggccaacauggugaaaccc

SEQ ID NO: 189407 - RNA, 23 nt, Human
ccuggccaacauggugaaaccca

SEQ ID NO: 189408 - RNA, 22 nt, Human
cgaaaacaaacagugaaccgag

SEQ ID NO: 189409 - RNA, 18 nt, Human
cucaagacaugaaaaauc

SEQ ID NO: 189410 - RNA, 19 nt, Human
cucaagacaugaaaaaucc

SEQ ID NO: 189411 - RNA, 24 nt, Human
cucaugccuguaaucccagcacuu

SEQ ID NO: 189412 - RNA, 19 nt, Human
cuccggcugcugcgguggc

SEQ ID NO: 189413 - RNA, 20 nt, Human
cugagggucuuccuccucca

SEQ ID NO: 189414 - RNA, 22 nt, Human
cugcgguggcggcggcggcgcu

SEQ ID NO: 189415 - RNA, 21 nt, Human
gaaaacaaggcauucgaaaac

SEQ ID NO: 189416 - RNA, 25 nt, Human
gaaaacaaggcauucgaaaacaaac

SEQ ID NO: 189417 - RNA, 24 nt, Human
gccaacauggugaaacccaaucuc

SEQ ID NO: 189418 - RNA, 21 nt, Human
gcuccugcaggcacggagggu

SEQ ID NO: 189419 - RNA, 20 nt, Human
gcugcgguggcggcggcggc

SEQ ID NO: 189420 - RNA, 22 nt, Human
gcuggauauggugacucaugcc

SEQ ID NO: 189421 - RNA, 24 nt, Human
ggagaccauccuggccaacauggu

SEQ ID NO: 189422 - RNA, 24 nt, Human
ggauauggugacucaugccuguaa

SEQ ID NO: 189423 - RNA, 23 nt, Human
ggcugcugcgguggcggcggcgg

SEQ ID NO: 189424 - RNA, 21 nt, Human
ggcuggauauggugacucaug

SEQ ID NO: 189425 - RNA, 22 nt, Human
ggcuggauauggugacucaugc

SEQ ID NO: 189426 - RNA, 18 nt, Human
gggaagcuccuccgguga

SEQ ID NO: 189427 - RNA, 22 nt, Human
gggcucgccgagguccgggccc

SEQ ID NO: 189428 - RNA, 22 nt, Human
gggugggggaauccggggaggg

SEQ ID NO: 189429 - RNA, 24 nt, Human
ggugacucaugccuguaaucccag

SEQ ID NO: 189430 - RNA, 25 nt, Human
guggcggcggcggcgcugacgacgc

SEQ ID NO: 189431 - RNA, 21 nt, Human
guggggcauacuuucucagca

SEQ ID NO: 189432 - RNA, 22 nt, Human
uacaaacaguaaaaaacauaca

SEQ ID NO: 189433 - RNA, 18 nt, Human
uaccaaagauaggugggg

SEQ ID NO: 189434 - RNA, 19 nt, Human
uaccuggguguugggaauu

SEQ ID NO: 189435 - RNA, 20 nt, Human
uacgacaucagauggcaaag

SEQ ID NO: 189436 - RNA, 23 nt, Human
uacuggcaugcauuccaaagauc

SEQ ID NO: 189437 - RNA, 26 nt, Human
uagggaagguccacaauugcagccaa

SEQ ID NO: 189438 - RNA, 22 nt, Human
uauuccaccgucugagagaaua

SEQ ID NO: 189439 - RNA, 19 nt, Human
ucaagagauggagaccauc

SEQ ID NO: 189440 - RNA, 20 nt, Human
ucacacugaucagucaaagg

SEQ ID NO: 189441 - RNA, 22 nt, Human
ucagccaaguguuugccccaua

SEQ ID NO: 189442 - RNA, 23 nt, Human
ucagugguccauucuaaagagcc

SEQ ID NO: 189443 - RNA, 22 nt, Human
ucaugccuguaaucccagcacu

SEQ ID NO: 189444 - RNA, 18 nt, Human
uccucacaaacuguacag

SEQ ID NO: 189445 - RNA, 23 nt, Human
uccuccaugguuccauggaaugg

SEQ ID NO: 189446 - RNA, 22 nt, Human
uccucuaacacuggucucccgg

SEQ ID NO: 189447 - RNA, 19 nt, Human
uccuguggcucucaguggu

SEQ ID NO: 189448 - RNA, 23 nt, Human
ucucuacuaaaaauacaaaaauu

SEQ ID NO: 189449 - RNA, 20 nt, Human
ugaaaacaaggcauucgaaa

SEQ ID NO: 189450 - RNA, 23 nt, Human
ugaaaacaaggcauucgaaaaca

SEQ ID NO: 189451 - RNA, 21 nt, Human
ugaacaaaaccucaagacaug

SEQ ID NO: 189452 - RNA, 21 nt, Human
ugacucaugccuguaauccca

SEQ ID NO: 189453 - RNA, 24 nt, Human
ugacucaugccuguaaucccagca

SEQ ID NO: 189454 - RNA, 19 nt, Human
ugaguuucaacacucccuu

SEQ ID NO: 189455 - RNA, 21 nt, Human
ugcaaagguccucacaaacug

SEQ ID NO: 189456 - RNA, 18 nt, Human
ugccuggagucagccagg

SEQ ID NO: 189457 - RNA, 23 nt, Human
ugccuguaaucccagcacuuuug

SEQ ID NO: 189458 - RNA, 18 nt, Human
ugcgguggcggcggcggc

SEQ ID NO: 189459 - RNA, 25 nt, Human
ugcugcgguggcggcggcggcgcug

SEQ ID NO: 189460 - RNA, 19 nt, Human
uggaaagagggaauuuuuc

SEQ ID NO: 189461 - RNA, 22 nt, Human
uggaaagagggaauuuuucagc

SEQ ID NO: 189462 - RNA, 18 nt, Human
uggagggaacgguggugg

SEQ ID NO: 189463 - RNA, 19 nt, Human
uggcagugcugaugucagu

SEQ ID NO: 189464 - RNA, 23 nt, Human
uggcagugcugaugucagugacu

SEQ ID NO: 189465 - RNA, 24 nt, Human
uggccaacauggugaaacccaauc

SEQ ID NO: 189466 - RNA, 22 nt, Human
ugggaagcggguaggaccaaag

SEQ ID NO: 189467 - RNA, 23 nt, Human
ugggcucgccgagguccgggccc

SEQ ID NO: 189468 - RNA, 25 nt, Human
ugguagggaagguccacaauugcag

SEQ ID NO: 189469 - RNA, 24 nt, Human
uggugacucaugccuguaauccca

SEQ ID NO: 189470 - RNA, 19 nt, Human
uggugggcucgccgagguc

SEQ ID NO: 189471 - RNA, 24 nt, Human
ugucagugacuuauuaagcccaga

SEQ ID NO: 189472 - RNA, 21 nt, Human
uguuuuagucugccaagauug

SEQ ID NO: 189473 - RNA, 18 nt, Human
uuaaaauuuuaauuguuu

SEQ ID NO: 189474 - RNA, 25 nt, Human
uuauacagucauguacagauguacu

SEQ ID NO: 189475 - RNA, 23 nt, Human
uucaaaaccuugcaaccuagaag

SEQ ID NO: 189476 - RNA, 20 nt, Human
uucagccaaguguuugcccc

SEQ ID NO: 189477 - RNA, 24 nt, Human
uuggcuggauauggugacucaugc

SEQ ID NO: 189478 - RNA, 23 nt, Human
uugucuuaaaaaaaaaaaacaug

SEQ ID NO: 189479 - RNA, 25 nt, Human
uuuaaaauuuuuccaaauauuccuu

SEQ ID NO: 189480 - RNA, 19 nt, Human
uuuagaaaaccuggguuca

SEQ ID NO: 189481 - RNA, 23 nt, Human
uuuagaaaaccuggguucagcca

SEQ ID NO: 189482 - RNA, 21 nt, Human
uuucaaaaccuugcaaccuag

SEQ ID NO: 189483 - RNA, 23 nt, Human
uuuggucuuuaaacaucuuuuuu

SEQ ID NO: 189484 - RNA, 25 nt, Human
aaacauuccuuuauuauuagaaaua

SEQ ID NO: 189485 - RNA, 24 nt, Human
cacaaucacagaaaaauacaagaa

SEQ ID NO: 189486 - RNA, 22 nt, Human
cucacaaucacagaaaaauaca

SEQ ID NO: 189487 - RNA, 23 nt, Human
cucgaguuuuuuuuuuuuuuuuu

SEQ ID NO: 189488 - RNA, 20 nt, Human
gaguuuuuuuuuuuuuuuuu

SEQ ID NO: 189489 - RNA, 21 nt, Human
guuuuuuuuuuuuuuuuuugg

SEQ ID NO: 189490 - RNA, 24 nt, Human
uaacugcucaugaauaagcaauac

SEQ ID NO: 189491 - RNA, 18 nt, Human
uacaagaauaacaucaga

SEQ ID NO: 189492 - RNA, 25 nt, Human
ucacaaucacagaaaaauacaagaa

SEQ ID NO: 189493 - RNA, 18 nt, Human
ucuacggagaucuccagg

SEQ ID NO: 189494 - RNA, 23 nt, Human
ugaauaagcaauacuuuagcuug

SEQ ID NO: 189495 - RNA, 19 nt, Human
ugugggacaggaacgggag

SEQ ID NO: 189496 - RNA, 20 nt, Human
uuagcuugacacucauuggu

SEQ ID NO: 189497 - RNA, 21 nt, Human
uugcauuuauuuuuagcacaa

SEQ ID NO: 189498 - RNA, 22 nt, Human
aaaagcaccuggccacaggguc

SEQ ID NO: 189499 - RNA, 20 nt, Human
aaccggguagcgcucagacu

SEQ ID NO: 189500 - RNA, 21 nt, Human
acgcacacgcgcacacacaca

SEQ ID NO: 189501 - RNA, 19 nt, Human
cacacaaacaccccugugg

SEQ ID NO: 189502 - RNA, 23 nt, Human
cacacgcgcacacacacaaacac

SEQ ID NO: 189503 - RNA, 19 nt, Human
cacccuccgaguggggucc

SEQ ID NO: 189504 - RNA, 23 nt, Human
cagaaugggguccagggagaauu

SEQ ID NO: 189505 - RNA, 18 nt, Human
cagcaaccggguagcgcu

SEQ ID NO: 189506 - RNA, 18 nt, Human
ccacugaaacggggaggg

SEQ ID NO: 189507 - RNA, 20 nt, Human
ccgaguggggucccgagggc

SEQ ID NO: 189508 - RNA, 18 nt, Human
cgcacacacacaaacacc

SEQ ID NO: 189509 - RNA, 19 nt, Human
cgcacacgcgcacacacac

SEQ ID NO: 189510 - RNA, 21 nt, Human
cgcgcacacacacaaacaccc

SEQ ID NO: 189511 - RNA, 20 nt, Human
cuugggcagcagcaaccggg

SEQ ID NO: 189512 - RNA, 21 nt, Human
gagaauuugguuagggggagg

SEQ ID NO: 189513 - RNA, 21 nt, Human
gagcagagggcacccuccgag

SEQ ID NO: 189514 - RNA, 18 nt, Human
gcagcaaccggguagcgc

SEQ ID NO: 189515 - RNA, 19 nt, Human
ggaggccugagcagagggc

SEQ ID NO: 189516 - RNA, 23 nt, Human
ggcugcagagucuucaguacugu

SEQ ID NO: 189517 - RNA, 24 nt, Human
gggcacccuccgaguggggucccg

SEQ ID NO: 189518 - RNA, 18 nt, Human
gggcagcagcaaccgggu

SEQ ID NO: 189519 - RNA, 21 nt, Human
uagggaaaagcaccuggccac

SEQ ID NO: 189520 - RNA, 20 nt, Human
ucugccugcguccgacuccg

SEQ ID NO: 189521 - RNA, 23 nt, Human
ugagcagagggcacccuccgagu

SEQ ID NO: 189522 - RNA, 18 nt, Human
ugcagagucuucaguacu

SEQ ID NO: 189523 - RNA, 23 nt, Human
uggccacaggguccacugaaacg

SEQ ID NO: 189524 - RNA, 26 nt, Human
uuuauugaaacgcacacgcgcacaca

SEQ ID NO: 189525 - RNA, 22 nt, Human
uuugccacaacccccuucugac

SEQ ID NO: 189526 - RNA, 18 nt, Human
uuuuuuuuuuuuuuuuug

SEQ ID NO: 189527 - RNA, 23 nt, Human
aaaaaagcauuaauuggaagacu

SEQ ID NO: 189528 - RNA, 19 nt, Human
aaacaaguuuaaaccagaa

SEQ ID NO: 189529 - RNA, 23 nt, Human
accaacagguagccuagauauaa

SEQ ID NO: 189530 - RNA, 23 nt, Human
caaggaaaucuuguugaugaucc

SEQ ID NO: 189531 - RNA, 22 nt, Human
cacagcaaacaaguuuaaacca

SEQ ID NO: 189532 - RNA, 20 nt, Human
uauuuugcacaaggaaaucu

SEQ ID NO: 189533 - RNA, 25 nt, Human
ugaaugguaacagcucggggccuuu

SEQ ID NO: 189534 - RNA, 20 nt, Human
ugcagaacucagucucuuag

SEQ ID NO: 189535 - RNA, 22 nt, Human
uggagcgcgccggagaggcugg

SEQ ID NO: 189536 - RNA, 22 nt, Human
uuaaaccagaagaugcugcuug

SEQ ID NO: 189537 - RNA, 26 nt, Human
aaaaccacaaacauaaacugguccug

SEQ ID NO: 189538 - RNA, 26 nt, Human
aaaauacccccaacucaaccccaccc

SEQ ID NO: 189539 - RNA, 19 nt, Human
aaacugguccugguauuuc

SEQ ID NO: 189540 - RNA, 22 nt, Human
aaccacaaacauaaacuggucc

SEQ ID NO: 189541 - RNA, 20 nt, Human
aacucaaccccacccccaca

SEQ ID NO: 189542 - RNA, 27 nt, Human
accccacccccacaacauuucccccaa

SEQ ID NO: 189543 - RNA, 23 nt, Human
aggugggguggggacggccggaa

SEQ ID NO: 189544 - RNA, 23 nt, Human
auccauucuguccucucggcccu

SEQ ID NO: 189545 - RNA, 23 nt, Human
auuagaaaauacccccaacucaa

SEQ ID NO: 189546 - RNA, 20 nt, Human
caaaaccacaaacauaaacu

SEQ ID NO: 189547 - RNA, 21 nt, Human
caaaaccacaaacauaaacug

SEQ ID NO: 189548 - RNA, 23 nt, Human
caaauaauuuuucccaaaaccac

SEQ ID NO: 189549 - RNA, 18 nt, Human
caacucaaccccaccccc

SEQ ID NO: 189550 - RNA, 24 nt, Human
cagcuaagaaacaguuuagagaaa

SEQ ID NO: 189551 - RNA, 22 nt, Human
cauucuguccucucggcccuga

SEQ ID NO: 189552 - RNA, 23 nt, Human
ccaacucaaccccacccccacaa

SEQ ID NO: 189553 - RNA, 26 nt, Human
ccaacucaaccccacccccacaacau

SEQ ID NO: 189554 - RNA, 22 nt, Human
ccacaacauuucccccaacaca

SEQ ID NO: 189555 - RNA, 23 nt, Human
ccacccccacaacauuuccccca

SEQ ID NO: 189556 - RNA, 25 nt, Human
ccacccccacaacauuucccccaac

SEQ ID NO: 189557 - RNA, 24 nt, Human
cccaacucaaccccacccccacaa

SEQ ID NO: 189558 - RNA, 24 nt, Human
cccacccccacaacauuuccccca

SEQ ID NO: 189559 - RNA, 23 nt, Human
ccccaacucaaccccacccccac

SEQ ID NO: 189560 - RNA, 27 nt, Human
ccccacccccacaacauuucccccaac

SEQ ID NO: 189561 - RNA, 18 nt, Human
ccucucggcccugagagg

SEQ ID NO: 189562 - RNA, 19 nt, Human
cgaggugggguggggacgg

SEQ ID NO: 189563 - RNA, 21 nt, Human
cgcgcgaccacuaacccgcuu

SEQ ID NO: 189564 - RNA, 18 nt, Human
cggcugggacugcggagg

SEQ ID NO: 189565 - RNA, 25 nt, Human
cucauuuauugucacuguuccaaau

SEQ ID NO: 189566 - RNA, 18 nt, Human
gcucggcugggacugcgg

SEQ ID NO: 189567 - RNA, 19 nt, Human
gggcgcgcgaccacuaacc

SEQ ID NO: 189568 - RNA, 24 nt, Human
uacccccaacucaaccccaccccc

SEQ ID NO: 189569 - RNA, 24 nt, Human
ucacuguuccaaauguacaaaaaa

SEQ ID NO: 189570 - RNA, 21 nt, Human
ucccaaaaccacaaacauaaa

SEQ ID NO: 189571 - RNA, 19 nt, Human
ucucugauggaagaguccu

SEQ ID NO: 189572 - RNA, 23 nt, Human
ugcagcuaagaaacaguuuagag

SEQ ID NO: 189573 - RNA, 26 nt, Human
uguacaaaaaaaauuagaaaauaccc

SEQ ID NO: 189574 - RNA, 21 nt, Human
uucccaaaaccacaaacauaa

SEQ ID NO: 189575 - RNA, 23 nt, Human
uuuauugucacuguuccaaaugu

SEQ ID NO: 189576 - RNA, 30 nt, Human
uuuuuuuuugacaguuuaaaggggucucaa

SEQ ID NO: 189577 - RNA, 22 nt, Human
uuuuuuuuuuuuuuuuugacag

SEQ ID NO: 189578 - RNA, 27 nt, Human
uuuuuuuuuuuuuuuuuuuuuuugggg

SEQ ID NO: 189579 - RNA, 20 nt, Human
aaaggcuuagaauuaaaccc

SEQ ID NO: 189580 - RNA, 24 nt, Human
aaccgagugaagaugaagauaaga

SEQ ID NO: 189581 - RNA, 18 nt, Human
aaggcuuagaauuaaacc

SEQ ID NO: 189582 - RNA, 19 nt, Human
aaggcuuagaauuaaaccc

SEQ ID NO: 189583 - RNA, 22 nt, Human
acaacaauggaugcaaggguuc

SEQ ID NO: 189584 - RNA, 22 nt, Human
acccccaccuacaccacucagg

SEQ ID NO: 189585 - RNA, 21 nt, Human
agccauaaagcaaaaccgucc

SEQ ID NO: 189586 - RNA, 19 nt, Human
auaaagcaaaaccgucccu

SEQ ID NO: 189587 - RNA, 19 nt, Human
caccuacaccacucaggag

SEQ ID NO: 189588 - RNA, 18 nt, Human
cagggggcaaaaucaagg

SEQ ID NO: 189589 - RNA, 19 nt, Human
cagggggcaaaaucaaggg

SEQ ID NO: 189590 - RNA, 22 nt, Human
ccacccccaccuacaccacuca

SEQ ID NO: 189591 - RNA, 27 nt, Human
cccacccccaccuacaccacucaggag

SEQ ID NO: 189592 - RNA, 21 nt, Human
ccccacccccaccuacaccac

SEQ ID NO: 189593 - RNA, 20 nt, Human
cucucugucacuauuuugac

SEQ ID NO: 189594 - RNA, 24 nt, Human
cugcaucaguucuuucuaccucca

SEQ ID NO: 189595 - RNA, 25 nt, Human
gcaaaaccgucccucagggggcaaa

SEQ ID NO: 189596 - RNA, 26 nt, Human
gcaaaaccgucccucagggggcaaaa

SEQ ID NO: 189597 - RNA, 20 nt, Human
gccuccccacccccaccuac

SEQ ID NO: 189598 - RNA, 23 nt, Human
gccuccccacccccaccuacacc

SEQ ID NO: 189599 - RNA, 19 nt, Human
gcucuuugccuucuuuaau

SEQ ID NO: 189600 - RNA, 21 nt, Human
gcugcaguuuacuaagaacuu

SEQ ID NO: 189601 - RNA, 23 nt, Human
gugauccaucauuugggccuccc

SEQ ID NO: 189602 - RNA, 21 nt, Human
uaacaacaacaaaacuuagcc

SEQ ID NO: 189603 - RNA, 21 nt, Human
uaaguuaacaacaacaaaacu

SEQ ID NO: 189604 - RNA, 23 nt, Human
uacaccacucaggagcauucuga

SEQ ID NO: 189605 - RNA, 21 nt, Human
uagaauuaaacccacucugca

SEQ ID NO: 189606 - RNA, 22 nt, Human
uagucugagucucccuggcugc

SEQ ID NO: 189607 - RNA, 22 nt, Human
uauaauggugauccaucauuug

SEQ ID NO: 189608 - RNA, 20 nt, Human
ucccuggcugcaguuuacua

SEQ ID NO: 189609 - RNA, 21 nt, Human
ucuaccuccauucuagucuga

SEQ ID NO: 189610 - RNA, 23 nt, Human
uucaaaacucucugucacuauuu

SEQ ID NO: 189611 - RNA, 21 nt, Human
uuccugucuagccauaaagca

SEQ ID NO: 189612 - RNA, 27 nt, Human
aaaaauaacagaauggcuuucauugac

SEQ ID NO: 189613 - RNA, 27 nt, Human
aaaaauucaaaacacagaauagaaacc

SEQ ID NO: 189614 - RNA, 20 nt, Human
aaaccaagaaggagcccaug

SEQ ID NO: 189615 - RNA, 26 nt, Human
aaagaagagagagacaaagaggugac

SEQ ID NO: 189616 - RNA, 25 nt, Human
aaauuugaagauacauugcuaagcu

SEQ ID NO: 189617 - RNA, 18 nt, Human
aagaagagagagacaaag

SEQ ID NO: 189618 - RNA, 19 nt, Human
aagacagaagggauuaaac

SEQ ID NO: 189619 - RNA, 24 nt, Human
aauagaaaccauacucagaaagaa

SEQ ID NO: 189620 - RNA, 25 nt, Human
aauggcuuucauugaccuuaauuuu

SEQ ID NO: 189621 - RNA, 23 nt, Human
aauuugcguaucuacuuuuccuc

SEQ ID NO: 189622 - RNA, 19 nt, Human
acaccacacucuccccucu

SEQ ID NO: 189623 - RNA, 19 nt, Human
accagcacucucugccucu

SEQ ID NO: 189624 - RNA, 21 nt, Human
acuugugacacaacucacaaa

SEQ ID NO: 189625 - RNA, 18 nt, Human
agaagagagagacaaaga

SEQ ID NO: 189626 - RNA, 18 nt, Human
agacagaccagcacucuc

SEQ ID NO: 189627 - RNA, 22 nt, Human
agacgaugacaaaaaugagagc

SEQ ID NO: 189628 - RNA, 22 nt, Human
agagagacaaagaggugacugg

SEQ ID NO: 189629 - RNA, 23 nt, Human
agcaaaaaccaagaaggagccca

SEQ ID NO: 189630 - RNA, 19 nt, Human
aggguggguggauguauuu

SEQ ID NO: 189631 - RNA, 20 nt, Human
augaggccuguaugccuucc

SEQ ID NO: 189632 - RNA, 24 nt, Human
augcuaagucaaguccugcccagc

SEQ ID NO: 189633 - RNA, 24 nt, Human
cacagaauagaaaccauacucaga

SEQ ID NO: 189634 - RNA, 22 nt, Human
cacagauugcaggcuggggcaa

SEQ ID NO: 189635 - RNA, 20 nt, Human
caccucucuccugucuauug

SEQ ID NO: 189636 - RNA, 28 nt, Human
cacugcauuagaaaauaaaaauucaaaa

SEQ ID NO: 189637 - RNA, 21 nt, Human
cagaaaccgaaccccagugcu

SEQ ID NO: 189638 - RNA, 19 nt, Human
cagaagggauuaaacaguu

SEQ ID NO: 189639 - RNA, 26 nt, Human
cagcaaaaaccaagaaggagcccaug

SEQ ID NO: 189640 - RNA, 19 nt, Human
cagcagcaaaaaccaagaa

SEQ ID NO: 189641 - RNA, 24 nt, Human
cauuuaggaugaucuguuucuuuu

SEQ ID NO: 189642 - RNA, 22 nt, Human
ccucucuaacuggcaacaggga

SEQ ID NO: 189643 - RNA, 22 nt, Human
cgugaauugauccagaagaugc

SEQ ID NO: 189644 - RNA, 19 nt, Human
cugaaucuucaagucagac

SEQ ID NO: 189645 - RNA, 19 nt, Human
cuuaagauaggacaggaga

SEQ ID NO: 189646 - RNA, 20 nt, Human
cuucccagacagaccagcac

SEQ ID NO: 189647 - RNA, 19 nt, Human
gacaggagaaauaaaagac

SEQ ID NO: 189648 - RNA, 19 nt, Human
gagaacagaaagacagaag

SEQ ID NO: 189649 - RNA, 18 nt, Human
ggacaauauacagaccuc

SEQ ID NO: 189650 - RNA, 19 nt, Human
gggucuuaggaacaucacc

SEQ ID NO: 189651 - RNA, 21 nt, Human
guaucugggacaagggucuua

SEQ ID NO: 189652 - RNA, 25 nt, Human
uaacagaauggcuuucauugaccuu

SEQ ID NO: 189653 - RNA, 19 nt, Human
uaagucaaguccugcccag

SEQ ID NO: 189654 - RNA, 24 nt, Human
uaagugagaaugcuaaaaauaaca

SEQ ID NO: 189655 - RNA, 23 nt, Human
uagaaaauaaaaauucaaaacac

SEQ ID NO: 189656 - RNA, 22 nt, Human
ucaaaacacagaauagaaacca

SEQ ID NO: 189657 - RNA, 23 nt, Human
ucaaaacacagaauagaaaccau

SEQ ID NO: 189658 - RNA, 19 nt, Human
ucaccagagacauuuggac

SEQ ID NO: 189659 - RNA, 20 nt, Human
ucagaaagaagagagagaca

SEQ ID NO: 189660 - RNA, 21 nt, Human
uccacugcauuagaaaauaaa

SEQ ID NO: 189661 - RNA, 21 nt, Human
ucuacuuuuccuccuucuaaa

SEQ ID NO: 189662 - RNA, 20 nt, Human
ugacaaaaaugagagcagaa

SEQ ID NO: 189663 - RNA, 21 nt, Human
ugacaaaaaugagagcagaaa

SEQ ID NO: 189664 - RNA, 20 nt, Human
ugacacaacucacaaauguu

SEQ ID NO: 189665 - RNA, 21 nt, Human
ugacucacuugugacacaacu

SEQ ID NO: 189666 - RNA, 20 nt, Human
ugaguuagaguccaaacauu

SEQ ID NO: 189667 - RNA, 19 nt, Human
ugauaaugacucacuugug

SEQ ID NO: 189668 - RNA, 27 nt, Human
ugcauuagaaaauaaaaauucaaaaca

SEQ ID NO: 189669 - RNA, 21 nt, Human
ugccugguggaugaggccugu

SEQ ID NO: 189670 - RNA, 23 nt, Human
ugcuaaaaauaacagaauggcuu

SEQ ID NO: 189671 - RNA, 18 nt, Human
ugguaucaucagccaagg

SEQ ID NO: 189672 - RNA, 27 nt, Human
uggugggcuggguugacucccccagcu

SEQ ID NO: 189673 - RNA, 21 nt, Human
ugugagaacagaaagacagaa

SEQ ID NO: 189674 - RNA, 22 nt, Human
uucaaaacacagaauagaaacc

SEQ ID NO: 189675 - RNA, 22 nt, Human
uuccuccuucuaaaaauaguuc

SEQ ID NO: 189676 - RNA, 22 nt, Human
uugacucccccagcucauacau

SEQ ID NO: 189677 - RNA, 19 nt, Human
uugcguaucuacuuuuccu

SEQ ID NO: 189678 - RNA, 19 nt, Human
acagaagaaaaagaaaaag

SEQ ID NO: 189679 - RNA, 20 nt, Human
acagaagaaaaagaaaaaga

SEQ ID NO: 189680 - RNA, 18 nt, Human
agaagaaaaagaaaaaga

SEQ ID NO: 189681 - RNA, 20 nt, Human
aguaacuggugguuuuuccu

SEQ ID NO: 189682 - RNA, 19 nt, Human
caccuuuuccuuccuuccu

SEQ ID NO: 189683 - RNA, 21 nt, Human
cagcauuaaguucucccacag

SEQ ID NO: 189684 - RNA, 18 nt, Human
cccacagaagaaaaagaa

SEQ ID NO: 189685 - RNA, 19 nt, Human
ccucuuggcuuuucacucc

SEQ ID NO: 189686 - RNA, 20 nt, Human
ccugugcagcuggcugcucg

SEQ ID NO: 189687 - RNA, 18 nt, Human
ccuuccuccuuuucuucc

SEQ ID NO: 189688 - RNA, 23 nt, Human
ccuuccuccuuuucuuccuuuug

SEQ ID NO: 189689 - RNA, 18 nt, Human
ccuuccuuccuccuuuuc

SEQ ID NO: 189690 - RNA, 19 nt, Human
ccuuccuuccuccuuuucu

SEQ ID NO: 189691 - RNA, 28 nt, Human
ccuuuuccuuccuuccuccuuuuuuuuc

SEQ ID NO: 189692 - RNA, 25 nt, Human
cuuccuuccuccuuuucuuccuuuu

SEQ ID NO: 189693 - RNA, 23 nt, Human
gacuucguccucuuggcuuuuca

SEQ ID NO: 189694 - RNA, 18 nt, Human
gugcagcuggcugcucgg

SEQ ID NO: 189695 - RNA, 19 nt, Human
gugcagcuggcugcucggg

SEQ ID NO: 189696 - RNA, 19 nt, Human
ucaccuuuuccuuccuucc

SEQ ID NO: 189697 - RNA, 22 nt, Human
uccuuccuccuuuucuuccuuu

SEQ ID NO: 189698 - RNA, 22 nt, Human
uccuuuugucuuuauguugggg

SEQ ID NO: 189699 - RNA, 24 nt, Human
ucucccacagaagaaaaagaaaaa

SEQ ID NO: 189700 - RNA, 26 nt, Human
uuuuccuuccuuccuccuuuucuucc

SEQ ID NO: 189701 - RNA, 22 nt, Human
aaaaaaaaaaagaaacaacaca

SEQ ID NO: 189702 - RNA, 23 nt, Human
aaaaaaaaaagaaacaacacaca

SEQ ID NO: 189703 - RNA, 30 nt, Human
aagaaacaacacacacacacacacacagug

SEQ ID NO: 189704 - RNA, 22 nt, Human
acacacacacucauagcagagc

SEQ ID NO: 189705 - RNA, 24 nt, Human
caacacacacacacacacacacuc

SEQ ID NO: 189706 - RNA, 18 nt, Human
cacacacacacacacaca

SEQ ID NO: 189707 - RNA, 25 nt, Human
cacacacacacacacacucauagca

SEQ ID NO: 189708 - RNA, 25 nt, Human
cacacacacacacucauagcagagc

SEQ ID NO: 189709 - RNA, 23 nt, Human
cacacacacacucauagcagagc

SEQ ID NO: 189710 - RNA, 19 nt, Human
gcagagcugcucugcucgc

SEQ ID NO: 189711 - RNA, 19 nt, Human
ggacaguuccaaaaggcaa

SEQ ID NO: 189712 - RNA, 24 nt, Human
ugacaugggugggcccugccccuc

SEQ ID NO: 189713 - RNA, 19 nt, Human
ugacauuuuagacaauuuu

SEQ ID NO: 189714 - RNA, 25 nt, Human
ugagggaaggacaguuccaaaaggc

SEQ ID NO: 189715 - RNA, 23 nt, Human
uggauacuguaaaaaaaaaaaaa

SEQ ID NO: 189716 - RNA, 22 nt, Human
uguaaaaaaaaaaaaaagaaac

SEQ ID NO: 189717 - RNA, 24 nt, Human
uuggauacuguaaaaaaaaaaaaa

SEQ ID NO: 189718 - RNA, 21 nt, Human
uuuuuggauacuguaaaaaaa

SEQ ID NO: 189719 - RNA, 20 nt, Human
aaauggaggcaggggcgccc

SEQ ID NO: 189720 - RNA, 18 nt, Human
aagggcccggcccggggg

SEQ ID NO: 189721 - RNA, 19 nt, Human
acaaagcuauugccaaauc

SEQ ID NO: 189722 - RNA, 23 nt, Human
acaugugcacacacacucgcaca

SEQ ID NO: 189723 - RNA, 22 nt, Human
agagcucucaauaugagaaagc

SEQ ID NO: 189724 - RNA, 18 nt, Human
agaggcggcggcggcagc

SEQ ID NO: 189725 - RNA, 20 nt, Human
aggcggcggggcagaagggc

SEQ ID NO: 189726 - RNA, 23 nt, Human
aggcggcggggcagaagggccgg

SEQ ID NO: 189727 - RNA, 20 nt, Human
agggcccggcccgggggcuu

SEQ ID NO: 189728 - RNA, 23 nt, Human
augugcacacacacucgcacacu

SEQ ID NO: 189729 - RNA, 21 nt, Human
cagaagggccgggagcuagcg

SEQ ID NO: 189730 - RNA, 23 nt, Human
cagcagcucaacccuccuccucg

SEQ ID NO: 189731 - RNA, 18 nt, Human
cagcugaauuugaaccuu

SEQ ID NO: 189732 - RNA, 18 nt, Human
caguggcauagcagagcu

SEQ ID NO: 189733 - RNA, 20 nt, Human
caguggcauagcagagcucu

SEQ ID NO: 189734 - RNA, 21 nt, Human
cccgcgccgcugccggcuccg

SEQ ID NO: 189735 - RNA, 23 nt, Human
cccgcgccgcugccggcuccgug

SEQ ID NO: 189736 - RNA, 22 nt, Human
ccgcacggccucccgcgccgcu

SEQ ID NO: 189737 - RNA, 31 nt, Human
ccgccgccgccagggaagccgccgccgccgg

SEQ ID NO: 189738 - RNA, 18 nt, Human
ccgccgccgccgccgcca

SEQ ID NO: 189739 - RNA, 26 nt, Human
ccgccgccgccgccgccacugcccgg

SEQ ID NO: 189740 - RNA, 18 nt, Human
ccgccgccgccgccgccg

SEQ ID NO: 189741 - RNA, 18 nt, Human
ccgccgccgccgccgccg

SEQ ID NO: 189742 - RNA, 18 nt, Human
ccgccgccgccgccgccg

SEQ ID NO: 189743 - RNA, 18 nt, Human
ccgccgccgccgccgccg

SEQ ID NO: 189744 - RNA, 18 nt, Human
ccgccgccgccgccgccg

SEQ ID NO: 189745 - RNA, 24 nt, Human
ccgccgccgccgccgccgccgccg

SEQ ID NO: 189746 - RNA, 24 nt, Human
ccgccgccgccgccgccgccgccg

SEQ ID NO: 189747 - RNA, 24 nt, Human
ccgccgccgccgccgccgccgccg

SEQ ID NO: 189748 - RNA, 20 nt, Human
ccgcugcugcucccgccgcc

SEQ ID NO: 189749 - RNA, 23 nt, Human
ccgcugcugcucccgccgccgcc

SEQ ID NO: 189750 - RNA, 21 nt, Human
ccgugugugugguggacagag

SEQ ID NO: 189751 - RNA, 20 nt, Human
ccucccgcgccgcugccggc

SEQ ID NO: 189752 - RNA, 21 nt, Human
cgccgccgccgccgccgccac

SEQ ID NO: 189753 - RNA, 23 nt, Human
cggcagcagcucaacccuccucc

SEQ ID NO: 189754 - RNA, 25 nt, Human
cggcagcagcuccagucccgacugg

SEQ ID NO: 189755 - RNA, 26 nt, Human
cggcggcguggacguuggggccccgg

SEQ ID NO: 189756 - RNA, 19 nt, Human
cuaaggggaaaaugaaaaa

SEQ ID NO: 189757 - RNA, 22 nt, Human
cugcugcugccgcugcugcucc

SEQ ID NO: 189758 - RNA, 19 nt, Human
gaaaaauucaacaguggca

SEQ ID NO: 189759 - RNA, 21 nt, Human
gcagcagcucaacccuccucc

SEQ ID NO: 189760 - RNA, 19 nt, Human
gccccgcaggaaggacggc

SEQ ID NO: 189761 - RNA, 23 nt, Human
gccgagucgcugcugcugcugcc

SEQ ID NO: 189762 - RNA, 22 nt, Human
gccgcaagggcccggcccgggg

SEQ ID NO: 189763 - RNA, 30 nt, Human
gccgccgccgccagggaagccgccgccggc

SEQ ID NO: 189764 - RNA, 22 nt, Human
gccgcugcugcucccgccgccg

SEQ ID NO: 189765 - RNA, 22 nt, Human
gcugcucccgccgccgccgccg

SEQ ID NO: 189766 - RNA, 21 nt, Human
ggaaggacggcacgaacucgg

SEQ ID NO: 189767 - RNA, 21 nt, Human
ggccgcgcugagguucucccg

SEQ ID NO: 189768 - RNA, 23 nt, Human
ggccggagaggagugggcaacgc

SEQ ID NO: 189769 - RNA, 20 nt, Human
gggaaggcggcggggcagaa

SEQ ID NO: 189770 - RNA, 18 nt, Human
ggggagagguuuaucaau

SEQ ID NO: 189771 - RNA, 19 nt, Human
uaacaugguaguugccuuu

SEQ ID NO: 189772 - RNA, 27 nt, Human
uagcagagcucucaauaugagaaagcu

SEQ ID NO: 189773 - RNA, 19 nt, Human
uaggcuucugcagucaauu

SEQ ID NO: 189774 - RNA, 25 nt, Human
ucaacaguggcauagcagagcucuc

SEQ ID NO: 189775 - RNA, 25 nt, Human
uccacacucgcgacgacgacagagg

SEQ ID NO: 189776 - RNA, 21 nt, Human
ucccgccgccgccgccgccgc

SEQ ID NO: 189777 - RNA, 23 nt, Human
ucccgccgccgccgccgccgccg

SEQ ID NO: 189778 - RNA, 18 nt, Human
ucccgcugggccucggcc

SEQ ID NO: 189779 - RNA, 19 nt, Human
uccucuugagaggauucca

SEQ ID NO: 189780 - RNA, 21 nt, Human
ucgccgcggcagcagcuccag

SEQ ID NO: 189781 - RNA, 19 nt, Human
ucgccgcggcagcagcucu

SEQ ID NO: 189782 - RNA, 19 nt, Human
ugaagugagggcuagggac

SEQ ID NO: 189783 - RNA, 18 nt, Human
ugccggcugaaggccgcg

SEQ ID NO: 189784 - RNA, 26 nt, Human
ugccggcugaaggccgcgcugagguu

SEQ ID NO: 189785 - RNA, 21 nt, Human
ugcucccgccgccgccgccgc

SEQ ID NO: 189786 - RNA, 21 nt, Human
ugcugcugcugccgcugcugc

SEQ ID NO: 189787 - RNA, 19 nt, Human
ugggaaaaauucaacagug

SEQ ID NO: 189788 - RNA, 22 nt, Human
uggggguggcggcgcugccggg

SEQ ID NO: 189789 - RNA, 20 nt, Human
ugugaaguaggcuucugcag

SEQ ID NO: 189790 - RNA, 23 nt, Human
ugugaaguaggcuucugcaguca

SEQ ID NO: 189791 - RNA, 20 nt, Human
ugugcacacacacucgcaca

SEQ ID NO: 189792 - RNA, 25 nt, Human
ugugcacacacacucgcacacucac

SEQ ID NO: 189793 - RNA, 21 nt, Human
cagaagaucuaugggucccac

SEQ ID NO: 189794 - RNA, 24 nt, Human
ccacugcccgccacacgugucucc

SEQ ID NO: 189795 - RNA, 24 nt, Human
ccagcucggucccgcgccggcgcu

SEQ ID NO: 189796 - RNA, 18 nt, Human
ccgcccgccgccagcucg

SEQ ID NO: 189797 - RNA, 24 nt, Human
cgcgggcucgggcagaagcagcag

SEQ ID NO: 189798 - RNA, 24 nt, Human
cgggagagggcgcgcgugagggcc

SEQ ID NO: 189799 - RNA, 25 nt, Human
gcagaagcagcaggaagccucggaa

SEQ ID NO: 189800 - RNA, 20 nt, Human
gcgcgcgugagggccgcggg

SEQ ID NO: 189801 - RNA, 20 nt, Human
ggaaggcgcgcgccgcccgc

SEQ ID NO: 189802 - RNA, 21 nt, Human
gggcucgggcagaagcagcag

SEQ ID NO: 189803 - RNA, 18 nt, Human
aaugacaaauacagagga

SEQ ID NO: 189804 - RNA, 21 nt, Human
aggaggauaccccucaggagg

SEQ ID NO: 189805 - RNA, 24 nt, Human
auggaaagcugggggaagguacca

SEQ ID NO: 189806 - RNA, 23 nt, Human
caagucaggcacuggaaccugcu

SEQ ID NO: 189807 - RNA, 21 nt, Human
cacucccccuccuccuaccac

SEQ ID NO: 189808 - RNA, 20 nt, Human
caguccuaucccaagucagg

SEQ ID NO: 189809 - RNA, 27 nt, Human
caguuuuauuuaaggcagaauuaggga

SEQ ID NO: 189810 - RNA, 21 nt, Human
ccccuccacucccccuccucc

SEQ ID NO: 189811 - RNA, 22 nt, Human
ccccuccuccuaccacucaguc

SEQ ID NO: 189812 - RNA, 20 nt, Human
cccuccacucccccuccucc

SEQ ID NO: 189813 - RNA, 20 nt, Human
ccuuccauaaaaacuuugga

SEQ ID NO: 189814 - RNA, 19 nt, Human
ccuuuaccucagagcagcu

SEQ ID NO: 189815 - RNA, 19 nt, Human
cugaugaggggcugacagg

SEQ ID NO: 189816 - RNA, 21 nt, Human
cuuccauaaaaacuuuggagg

SEQ ID NO: 189817 - RNA, 25 nt, Human
gacaaauacagaggauagaaggucc

SEQ ID NO: 189818 - RNA, 19 nt, Human
gacaggaguggggcagggu

SEQ ID NO: 189819 - RNA, 19 nt, Human
gaggggcugacaggagugg

SEQ ID NO: 189820 - RNA, 25 nt, Human
gcacuggaaccugcugaaaaggcug

SEQ ID NO: 189821 - RNA, 20 nt, Human
gccccuccacucccccuccu

SEQ ID NO: 189822 - RNA, 23 nt, Human
gcuaugccccuccacucccccuc

SEQ ID NO: 189823 - RNA, 23 nt, Human
uaagggagacacaacuuuucugg

SEQ ID NO: 189824 - RNA, 18 nt, Human
uauacccacaucucaagg

SEQ ID NO: 189825 - RNA, 18 nt, Human
ugacaggaguggggcagg

SEQ ID NO: 189826 - RNA, 19 nt, Human
ugagcuauacccacaucuc

SEQ ID NO: 189827 - RNA, 18 nt, Human
ugaugaggggcugacagg

SEQ ID NO: 189828 - RNA, 22 nt, Human
ugaugaggggcugacaggagug

SEQ ID NO: 189829 - RNA, 20 nt, Human
uggaaagcugggggaaggua

SEQ ID NO: 189830 - RNA, 24 nt, Human
uggaccuuuaccucagagcagcuu

SEQ ID NO: 189831 - RNA, 20 nt, Human
uggggcaggguucauggacc

SEQ ID NO: 189832 - RNA, 20 nt, Human
ugggggcgucuagaucucau

SEQ ID NO: 189833 - RNA, 23 nt, Human
uuaaggcagaauuagggaaaggc

SEQ ID NO: 189834 - RNA, 20 nt, Human
uuagggaaaggcuaugcccc

SEQ ID NO: 189835 - RNA, 18 nt, Human
uucauggaccuuuaccuc

SEQ ID NO: 189836 - RNA, 21 nt, Human
aaaucaauuuuaacuaagugg

SEQ ID NO: 189837 - RNA, 22 nt, Human
aacacuuagguaaagcacuuaa

SEQ ID NO: 189838 - RNA, 24 nt, Human
agaaaucaauuuuaacuaaguggg

SEQ ID NO: 189839 - RNA, 23 nt, Human
cagauccuaaugagaagaaauca

SEQ ID NO: 189840 - RNA, 21 nt, Human
gcuuuguuaaaugcugucacc

SEQ ID NO: 189841 - RNA, 25 nt, Human
guagcagucuccuggagguuucucu

SEQ ID NO: 189842 - RNA, 19 nt, Human
uagcagucuccuggagguu

SEQ ID NO: 189843 - RNA, 21 nt, Human
ucuccuggagguuucucuaag

SEQ ID NO: 189844 - RNA, 24 nt, Human
cuugcauguucuuagccuccaugg

SEQ ID NO: 189845 - RNA, 22 nt, Human
uaaagcacuucauuguugcaaa

SEQ ID NO: 189846 - RNA, 22 nt, Human
uucauuagcuuuacaacaggca

SEQ ID NO: 189847 - RNA, 21 nt, Human
uuuuuuuuuuuuuugcaaaua

SEQ ID NO: 189848 - RNA, 18 nt, Human
uuuuuuuuuuuuuuuuug

SEQ ID NO: 189849 - RNA, 21 nt, Human
uuuuuuuuuuuuuuuuugcaa

SEQ ID NO: 189850 - RNA, 23 nt, Human
uuuuuuuuuuuuuuuuugcaaau

SEQ ID NO: 189851 - RNA, 23 nt, Human
aagagaacaggauaaggagagca

SEQ ID NO: 189852 - RNA, 19 nt, Human
agagaacaggauaaggaga

SEQ ID NO: 189853 - RNA, 21 nt, Human
aggauaaggagagcagaaaga

SEQ ID NO: 189854 - RNA, 23 nt, Human
aggggauaaggauaagagaacag

SEQ ID NO: 189855 - RNA, 22 nt, Human
auuaggcagagacuggagggga

SEQ ID NO: 189856 - RNA, 24 nt, Human
auugcauucauuacuaccauuuua

SEQ ID NO: 189857 - RNA, 24 nt, Human
auugcauucauuacuaccauuuuc

SEQ ID NO: 189858 - RNA, 23 nt, Human
caaaaaaguuuuccaauaaagau

SEQ ID NO: 189859 - RNA, 25 nt, Human
caaaagacccaacuuaggacccaac

SEQ ID NO: 189860 - RNA, 18 nt, Human
caaagcgccaggucagcg

SEQ ID NO: 189861 - RNA, 22 nt, Human
caacuuaauacauagauagcac

SEQ ID NO: 189862 - RNA, 25 nt, Human
cacaaaagacccaacuuaggaccca

SEQ ID NO: 189863 - RNA, 21 nt, Human
caggaacaugaguagcccaau

SEQ ID NO: 189864 - RNA, 20 nt, Human
cuaacuuaaauaccagccuc

SEQ ID NO: 189865 - RNA, 23 nt, Human
cuuuucaggcuuucuggagucca

SEQ ID NO: 189866 - RNA, 21 nt, Human
gauaagagaacaggauaagga

SEQ ID NO: 189867 - RNA, 24 nt, Human
ggaggccuggagccgcacaaagcg

SEQ ID NO: 189868 - RNA, 22 nt, Human
ggauaagagaacaggauaagga

SEQ ID NO: 189869 - RNA, 18 nt, Human
uagaaagacacucaggag

SEQ ID NO: 189870 - RNA, 18 nt, Human
uagcuuuucaggcuuucu

SEQ ID NO: 189871 - RNA, 23 nt, Human
ucucuaggaacacacugucacuc

SEQ ID NO: 189872 - RNA, 21 nt, Human
uggcuaacacugauugcauuc

SEQ ID NO: 189873 - RNA, 23 nt, Human
uuacuaccauuuuauuuauuaca

SEQ ID NO: 189874 - RNA, 24 nt, Human
uuucaggcuuucuggaguccacuc

SEQ ID NO: 189875 - RNA, 23 nt, Human
uuuuuuuuuuuuuuuuuuuaaug

SEQ ID NO: 189876 - RNA, 20 nt, Human
aaacaggagaaaggaacgaa

SEQ ID NO: 189877 - RNA, 24 nt, Human
aaagaugggaauaaacaggagaaa

SEQ ID NO: 189878 - RNA, 19 nt, Human
aagcagacacaaccacuaa

SEQ ID NO: 189879 - RNA, 21 nt, Human
aagcagacacaaccacuaaca

SEQ ID NO: 189880 - RNA, 23 nt, Human
aagcagacacaaccacuaacagg

SEQ ID NO: 189881 - RNA, 23 nt, Human
aaggcagggaccaugcugcagga

SEQ ID NO: 189882 - RNA, 19 nt, Human
agcaggcugaguaugggcu

SEQ ID NO: 189883 - RNA, 19 nt, Human
aggcagggaccaugcugca

SEQ ID NO: 189884 - RNA, 24 nt, Human
aggccuaaaccgagcagggcucag

SEQ ID NO: 189885 - RNA, 23 nt, Human
agggaaggguaaugaugggaggg

SEQ ID NO: 189886 - RNA, 18 nt, Human
augcagaguccagcugcg

SEQ ID NO: 189887 - RNA, 20 nt, Human
cagcaggcugaguaugggcu

SEQ ID NO: 189888 - RNA, 29 nt, Human
cagcucggggcugagcuccacaggcgagg

SEQ ID NO: 189889 - RNA, 18 nt, Human
ccaggcaggcccuuuaaa

SEQ ID NO: 189890 - RNA, 18 nt, Human
ccagucaaugcugcuccu

SEQ ID NO: 189891 - RNA, 25 nt, Human
cugaggcuucaaagggccugcaugg

SEQ ID NO: 189892 - RNA, 20 nt, Human
cugcacagccugggcagcag

SEQ ID NO: 189893 - RNA, 22 nt, Human
gacagggguuuagggggaguga

SEQ ID NO: 189894 - RNA, 20 nt, Human
gccuaaaccgagcagggcuc

SEQ ID NO: 189895 - RNA, 19 nt, Human
gcgcugcacagccugggca

SEQ ID NO: 189896 - RNA, 21 nt, Human
gcucggggcugagcuccacag

SEQ ID NO: 189897 - RNA, 18 nt, Human
gcugggaugcagagucca

SEQ ID NO: 189898 - RNA, 19 nt, Human
gcugguuggugcggauucc

SEQ ID NO: 189899 - RNA, 18 nt, Human
ggccuaaaccgagcaggg

SEQ ID NO: 189900 - RNA, 19 nt, Human
uagugcagggaaggguaau

SEQ ID NO: 189901 - RNA, 18 nt, Human
uaguggguagcugaggcu

SEQ ID NO: 189902 - RNA, 23 nt, Human
uccuucaugcaacacggggacag

SEQ ID NO: 189903 - RNA, 19 nt, Human
ugcacagccugggcagcag

SEQ ID NO: 189904 - RNA, 18 nt, Human
ugcaggagcagggccugu

SEQ ID NO: 189905 - RNA, 23 nt, Human
ugcgcugcacagccugggcagca

SEQ ID NO: 189906 - RNA, 21 nt, Human
uggcuuuagugcagggaaggg

SEQ ID NO: 189907 - RNA, 22 nt, Human
ugggaggggauguucacgaagg

SEQ ID NO: 189908 - RNA, 19 nt, Human
uuuagggggagugaagagg

SEQ ID NO: 189909 - RNA, 20 nt, Human
aaacaggagaaaggaacgaa

SEQ ID NO: 189910 - RNA, 24 nt, Human
aaagaugggaauaaacaggagaaa

SEQ ID NO: 189911 - RNA, 20 nt, Human
aagcagacacaaccacuaac

SEQ ID NO: 189912 - RNA, 21 nt, Human
aagcagacacaaccacuaaca

SEQ ID NO: 189913 - RNA, 23 nt, Human
aagcagacacaaccacuaacagg

SEQ ID NO: 189914 - RNA, 23 nt, Human
aaggcagggaccaugcugcagga

SEQ ID NO: 189915 - RNA, 24 nt, Human
acucccaccuccugccuucaaggc

SEQ ID NO: 189916 - RNA, 19 nt, Human
agcaggcugaguaugggcu

SEQ ID NO: 189917 - RNA, 19 nt, Human
aggcagggaccaugcugca

SEQ ID NO: 189918 - RNA, 18 nt, Human
augcagaguccagcugcg

SEQ ID NO: 189919 - RNA, 22 nt, Human
cagcaggcugaguaugggcucc

SEQ ID NO: 189920 - RNA, 29 nt, Human
cagcucggggcugagcuccacaggcgagg

SEQ ID NO: 189921 - RNA, 18 nt, Human
ccaggcaggcccuuuaaa

SEQ ID NO: 189922 - RNA, 20 nt, Human
ccagucaaugcugcuccuuc

SEQ ID NO: 189923 - RNA, 23 nt, Human
ccucacucccaccuccugccuuc

SEQ ID NO: 189924 - RNA, 21 nt, Human
cuccucacucccaccuccugc

SEQ ID NO: 189925 - RNA, 25 nt, Human
cugaggcuucaaagggccugcaugg

SEQ ID NO: 189926 - RNA, 20 nt, Human
cugcacagccugggcagcag

SEQ ID NO: 189927 - RNA, 22 nt, Human
gacagggguuuagggggaguga

SEQ ID NO: 189928 - RNA, 23 nt, Human
gcgcugcacagccugggcagcag

SEQ ID NO: 189929 - RNA, 21 nt, Human
gcucggggcugagcuccacag

SEQ ID NO: 189930 - RNA, 23 nt, Human
gcugcgcugcacagccugggcag

SEQ ID NO: 189931 - RNA, 18 nt, Human
gcugggaugcagagucca

SEQ ID NO: 189932 - RNA, 18 nt, Human
ggaauaaacaggagaaag

SEQ ID NO: 189933 - RNA, 19 nt, Human
uagugcagggaaggguaau

SEQ ID NO: 189934 - RNA, 18 nt, Human
uaguggguagcugaggcu

SEQ ID NO: 189935 - RNA, 23 nt, Human
uccuucaugcaacacggggacag

SEQ ID NO: 189936 - RNA, 19 nt, Human
ugcacagccugggcagcag

SEQ ID NO: 189937 - RNA, 18 nt, Human
ugcaggagcagggccugu

SEQ ID NO: 189938 - RNA, 26 nt, Human
ugcagggaaggguaaugaugggaggg

SEQ ID NO: 189939 - RNA, 23 nt, Human
ugcgcugcacagccugggcagca

SEQ ID NO: 189940 - RNA, 21 nt, Human
uggcuuuagugcagggaaggg

SEQ ID NO: 189941 - RNA, 22 nt, Human
ugggaggggauguucacgaagg

SEQ ID NO: 189942 - RNA, 19 nt, Human
uuuagggggagugaagagg

SEQ ID NO: 189943 - RNA, 21 nt, Human
aagagcgcugaccccuuacgg

SEQ ID NO: 189944 - RNA, 22 nt, Human
aagcucugcaagucugccuccu

SEQ ID NO: 189945 - RNA, 24 nt, Human
aaucucguuuuuucuaguacccac

SEQ ID NO: 189946 - RNA, 23 nt, Human
aaugucugccuauuccuugaagc

SEQ ID NO: 189947 - RNA, 24 nt, Human
acaagcucugcaagucugccuccu

SEQ ID NO: 189948 - RNA, 19 nt, Human
acauaagugcuauucauug

SEQ ID NO: 189949 - RNA, 21 nt, Human
aggacuagggaaacugugagc

SEQ ID NO: 189950 - RNA, 24 nt, Human
caacugugcaaucucguuuuuucu

SEQ ID NO: 189951 - RNA, 23 nt, Human
caagagaaacucagcuggacacc

SEQ ID NO: 189952 - RNA, 18 nt, Human
cacagccuauccuuccuc

SEQ ID NO: 189953 - RNA, 21 nt, Human
cagcagccuugcugaaauguc

SEQ ID NO: 189954 - RNA, 22 nt, Human
cagccuauccuuccucagcagc

SEQ ID NO: 189955 - RNA, 24 nt, Human
caggacgguuuccgaacuccgguu

SEQ ID NO: 189956 - RNA, 19 nt, Human
cauaagggggcggggccca

SEQ ID NO: 189957 - RNA, 19 nt, Human
cauccuaauuuccacagcc

SEQ ID NO: 189958 - RNA, 20 nt, Human
ccccgaggcgggacccgggc

SEQ ID NO: 189959 - RNA, 22 nt, Human
ccccuuacggacaggaugaaac

SEQ ID NO: 189960 - RNA, 24 nt, Human
ccccuuacggacaggaugaaacaa

SEQ ID NO: 189961 - RNA, 19 nt, Human
ccgccccguucuccguccc

SEQ ID NO: 189962 - RNA, 20 nt, Human
ccuacagcccuugaacucag

SEQ ID NO: 189963 - RNA, 22 nt, Human
ccuugccuccgcggcuccacag

SEQ ID NO: 189964 - RNA, 24 nt, Human
cggcguugggguucagggccuggc

SEQ ID NO: 189965 - RNA, 22 nt, Human
cuauucauugaaaagagcaaag

SEQ ID NO: 189966 - RNA, 18 nt, Human
cucacccagucuucacag

SEQ ID NO: 189967 - RNA, 22 nt, Human
cucuccaacugugcaaucucgu

SEQ ID NO: 189968 - RNA, 21 nt, Human
cugacuccgccuccgccccgu

SEQ ID NO: 189969 - RNA, 18 nt, Human
gaagccuucucagaacca

SEQ ID NO: 189970 - RNA, 22 nt, Human
gaggacuagggaaacugugagc

SEQ ID NO: 189971 - RNA, 22 nt, Human
gcaaagcaagagcgcugacccc

SEQ ID NO: 189972 - RNA, 24 nt, Human
ggcuagcccaccagucugaaauac

SEQ ID NO: 189973 - RNA, 19 nt, Human
gucccuugccuccgcggcu

SEQ ID NO: 189974 - RNA, 23 nt, Human
uagcccaccagucugaaauacug

SEQ ID NO: 189975 - RNA, 19 nt, Human
ucaguuggggaguagggaa

SEQ ID NO: 189976 - RNA, 24 nt, Human
uccacagccuauccuuccucagca

SEQ ID NO: 189977 - RNA, 20 nt, Human
ucugcaagucugccuccugc

SEQ ID NO: 189978 - RNA, 22 nt, Human
ugaaaagagcaaagcaagagcg

SEQ ID NO: 189979 - RNA, 21 nt, Human
ugaaacaaaacaagcucugca

SEQ ID NO: 189980 - RNA, 22 nt, Human
ugaaacaaaacaagcucugcaa

SEQ ID NO: 189981 - RNA, 20 nt, Human
ugccuuuaucacacuaaacu

SEQ ID NO: 189982 - RNA, 23 nt, Human
ugcgcaggcgcgacuaaugccgg

SEQ ID NO: 189983 - RNA, 19 nt, Human
ugggcaugaaccuacagcc

SEQ ID NO: 189984 - RNA, 19 nt, Human
uucuccgucccuugccucc

SEQ ID NO: 189985 - RNA, 20 nt, Human
aaacaggagaaaggaacgaa

SEQ ID NO: 189986 - RNA, 24 nt, Human
aaagaugggaauaaacaggagaaa

SEQ ID NO: 189987 - RNA, 20 nt, Human
aagcagauacaaccacuaac

SEQ ID NO: 189988 - RNA, 23 nt, Human
aagcagauacaaccacuaacagg

SEQ ID NO: 189989 - RNA, 19 nt, Human
agcaggcugaguaugggcu

SEQ ID NO: 189990 - RNA, 19 nt, Human
aggcaggggccaugcugca

SEQ ID NO: 189991 - RNA, 22 nt, Human
aggcaggggccaugcugcagga

SEQ ID NO: 189992 - RNA, 23 nt, Human
agggaaggguaguguugggaggg

SEQ ID NO: 189993 - RNA, 22 nt, Human
agucaaugcugucaugcaacac

SEQ ID NO: 189994 - RNA, 23 nt, Human
agugcagggaaggguaguguugg

SEQ ID NO: 189995 - RNA, 24 nt, Human
aucuucaaggucgucacuuccaac

SEQ ID NO: 189996 - RNA, 24 nt, Human
aucuucaaggucgucacuuccaac

SEQ ID NO: 189997 - RNA, 18 nt, Human
augcagaguccagcugcg

SEQ ID NO: 189998 - RNA, 22 nt, Human
cagcaggcugaguaugggcucc

SEQ ID NO: 189999 - RNA, 29 nt, Human
cagcucagggcugagcuccacaggcgagg

SEQ ID NO: 190000 - RNA, 25 nt, Human
ccaccgccaccuccgaguguucagg

SEQ ID NO: 190001 - RNA, 21 nt, Human
ccccucggccccgcugcgccc

SEQ ID NO: 190002 - RNA, 18 nt, Human
cccgcccccucggccccg

SEQ ID NO: 190003 - RNA, 20 nt, Human
cccucggccccgcugcgccc

SEQ ID NO: 190004 - RNA, 23 nt, Human
ccuagcgccagacccgcccccuc

SEQ ID NO: 190005 - RNA, 18 nt, Human
cgcugcacagccugggca

SEQ ID NO: 190006 - RNA, 25 nt, Human
cugaggcuucaaagggccugcaugg

SEQ ID NO: 190007 - RNA, 19 nt, Human
cugaggcuuuauuuugauc

SEQ ID NO: 190008 - RNA, 19 nt, Human
cugcacagccugggcagca

SEQ ID NO: 190009 - RNA, 20 nt, Human
cugcacagccugggcagcag

SEQ ID NO: 190010 - RNA, 18 nt, Human
gaacugcgaccuccucug

SEQ ID NO: 190011 - RNA, 20 nt, Human
gacccgcccccucggccccg

SEQ ID NO: 190012 - RNA, 24 nt, Human
gaucuucaaggucgucacuuccaa

SEQ ID NO: 190013 - RNA, 24 nt, Human
gaucuucaaggucgucacuuccaa

SEQ ID NO: 190014 - RNA, 21 nt, Human
gcucagggcugagcuccacag

SEQ ID NO: 190015 - RNA, 23 nt, Human
gcugcgcugcacagccugggcag

SEQ ID NO: 190016 - RNA, 18 nt, Human
gcugggaugcagagucca

SEQ ID NO: 190017 - RNA, 18 nt, Human
ggaauaaacaggagaaag

SEQ ID NO: 190018 - RNA, 18 nt, Human
ggaggcacggagcagguu

SEQ ID NO: 190019 - RNA, 23 nt, Human
ggcacggagcagguugcuggauc

SEQ ID NO: 190020 - RNA, 22 nt, Human
ggguucccggcacgcaggggcu

SEQ ID NO: 190021 - RNA, 19 nt, Human
uagugcagggaaggguagu

SEQ ID NO: 190022 - RNA, 24 nt, Human
ucaaagcagauacaaccacuaaca

SEQ ID NO: 190023 - RNA, 18 nt, Human
ucaaugcugucaugcaac

SEQ ID NO: 190024 - RNA, 20 nt, Human
ugaggcuuuauuuugaucag

SEQ ID NO: 190025 - RNA, 19 nt, Human
ugcacagccugggcagcag

SEQ ID NO: 190026 - RNA, 18 nt, Human
ugcaggagcagggccugu

SEQ ID NO: 190027 - RNA, 19 nt, Human
uggaaggaguaagauccac

SEQ ID NO: 190028 - RNA, 21 nt, Human
uggcuuuagugcagggaaggg

SEQ ID NO: 190029 - RNA, 21 nt, Human
ugggguucccggcacgcaggg

SEQ ID NO: 190030 - RNA, 20 nt, Human
uuuuuuuuuuuuuuuguggc

SEQ ID NO: 190031 - RNA, 18 nt, Human
uuuuuuuuuuuuuuuuug

SEQ ID NO: 190032 - RNA, 19 nt, Human
uuuuuuuuuuuuuuuuugu

SEQ ID NO: 190033 - RNA, 23 nt, Human
uuuuuuuuuuuuuuuuuuugugg

SEQ ID NO: 190034 - RNA, 23 nt, Human
aaaaaggaagaaggcagguccag

SEQ ID NO: 190035 - RNA, 22 nt, Human
aaagaaggaaaaaggaagaagg

SEQ ID NO: 190036 - RNA, 24 nt, Human
aaaugaccaaggaaauuuaugaac

SEQ ID NO: 190037 - RNA, 26 nt, Human
aacagaagacaaaaaaccacccacaa

SEQ ID NO: 190038 - RNA, 23 nt, Human
acacccauccacuaagcucuggc

SEQ ID NO: 190039 - RNA, 21 nt, Human
acagaagacaaaaaaccaccc

SEQ ID NO: 190040 - RNA, 24 nt, Human
acagaagacaaaaaaccacccaca

SEQ ID NO: 190041 - RNA, 21 nt, Human
accacccacaauucgaggaca

SEQ ID NO: 190042 - RNA, 18 nt, Human
agaagacaaaaaaccacc

SEQ ID NO: 190043 - RNA, 26 nt, Human
agaagagaaaagcacugacaggaaaa

SEQ ID NO: 190044 - RNA, 18 nt, Human
agaaggaaaaaggaagaa

SEQ ID NO: 190045 - RNA, 22 nt, Human
agaaggcagguccagggaguca

SEQ ID NO: 190046 - RNA, 22 nt, Human
agagaaaagcacugacaggaaa

SEQ ID NO: 190047 - RNA, 21 nt, Human
agcaaagggagcagggcauac

SEQ ID NO: 190048 - RNA, 21 nt, Human
aggaacagagggauguggccg

SEQ ID NO: 190049 - RNA, 19 nt, Human
aggaagaaggcagguccag

SEQ ID NO: 190050 - RNA, 21 nt, Human
aggaagaaggcagguccaggg

SEQ ID NO: 190051 - RNA, 24 nt, Human
aggagggggacuuugauggaggac

SEQ ID NO: 190052 - RNA, 21 nt, Human
aggauaucuagaucagggaag

SEQ ID NO: 190053 - RNA, 20 nt, Human
agggaagucuaucaggacag

SEQ ID NO: 190054 - RNA, 22 nt, Human
agggagucaggcuguccuccag

SEQ ID NO: 190055 - RNA, 19 nt, Human
agucaggcuguccuccagg

SEQ ID NO: 190056 - RNA, 21 nt, Human
aguccugaguucaagggagcc

SEQ ID NO: 190057 - RNA, 22 nt, Human
agucugccugggagcugcucag

SEQ ID NO: 190058 - RNA, 25 nt, Human
auggucuuugaggacagugcuaggg

SEQ ID NO: 190059 - RNA, 23 nt, Human
auucugcagacaggcaucagcgg

SEQ ID NO: 190060 - RNA, 18 nt, Human
caaaaaaccacccacaau

SEQ ID NO: 190061 - RNA, 22 nt, Human
cacacacacacacacacccauc

SEQ ID NO: 190062 - RNA, 21 nt, Human
cagcccccuuccccaucagcc

SEQ ID NO: 190063 - RNA, 20 nt, Human
cagcggagcggggcucagac

SEQ ID NO: 190064 - RNA, 18 nt, Human
cagugcuagggagcucag

SEQ ID NO: 190065 - RNA, 19 nt, Human
caucacacggagcuggggu

SEQ ID NO: 190066 - RNA, 21 nt, Human
ccacccacaauucgaggacag

SEQ ID NO: 190067 - RNA, 18 nt, Human
cccacacacacacacaca

SEQ ID NO: 190068 - RNA, 21 nt, Human
cccacacacacacacacaccc

SEQ ID NO: 190069 - RNA, 22 nt, Human
cccacacacacacacacaccca

SEQ ID NO: 190070 - RNA, 19 nt, Human
cccacagugaggaacagag

SEQ ID NO: 190071 - RNA, 21 nt, Human
ccccacacacacacacacacc

SEQ ID NO: 190072 - RNA, 22 nt, Human
ccccacacacacacacacaccc

SEQ ID NO: 190073 - RNA, 22 nt, Human
ccccaucagccuagccccucuu

SEQ ID NO: 190074 - RNA, 24 nt, Human
cccccacacacacacacacaccca

SEQ ID NO: 190075 - RNA, 24 nt, Human
cccccuuccccaucagccuagccc

SEQ ID NO: 190076 - RNA, 19 nt, Human
ccugggagcugcucagccc

SEQ ID NO: 190077 - RNA, 25 nt, Human
ccugggagcugcucagcccccuucc

SEQ ID NO: 190078 - RNA, 18 nt, Human
cucaaagaagagaaaagc

SEQ ID NO: 190079 - RNA, 23 nt, Human
cucaaagaagagaaaagcacuga

SEQ ID NO: 190080 - RNA, 24 nt, Human
cugaucaccacccccacacacaca

SEQ ID NO: 190081 - RNA, 20 nt, Human
cugccugaucaccaccccca

SEQ ID NO: 190082 - RNA, 18 nt, Human
gacagggugaaagaaggc

SEQ ID NO: 190083 - RNA, 21 nt, Human
gacauggcaggcaugguucag

SEQ ID NO: 190084 - RNA, 19 nt, Human
gaguagaaagaaggaaaaa

SEQ ID NO: 190085 - RNA, 25 nt, Human
ggaaaggaagacguuaggaggggga

SEQ ID NO: 190086 - RNA, 22 nt, Human
gggacuuugauggaggacagug

SEQ ID NO: 190087 - RNA, 23 nt, Human
ggggagcugaagcuuuaaagagc

SEQ ID NO: 190088 - RNA, 23 nt, Human
ggugcggauucugcagacaggca

SEQ ID NO: 190089 - RNA, 21 nt, Human
guuggcuccucccucccaucu

SEQ ID NO: 190090 - RNA, 21 nt, Human
uaauccccacagugaggaaca

SEQ ID NO: 190091 - RNA, 18 nt, Human
uagaagaaaggaagccaa

SEQ ID NO: 190092 - RNA, 20 nt, Human
ucacacggagcugggguagg

SEQ ID NO: 190093 - RNA, 18 nt, Human
ucagcccccuuccccauc

SEQ ID NO: 190094 - RNA, 23 nt, Human
ucaggacagggugaaagaaggca

SEQ ID NO: 190095 - RNA, 21 nt, Human
uccugaguucaagggagccuc

SEQ ID NO: 190096 - RNA, 23 nt, Human
ugaaccugccugaucaccacccc

SEQ ID NO: 190097 - RNA, 18 nt, Human
ugaggaacuuggcacaga

SEQ ID NO: 190098 - RNA, 22 nt, Human
ugcuagggagcucagagaucag

SEQ ID NO: 190099 - RNA, 18 nt, Human
uggcuccucccucccauc

SEQ ID NO: 190100 - RNA, 24 nt, Human
uggcuguggacaacagaagacaaa

SEQ ID NO: 190101 - RNA, 29 nt, Human
ugggauacguuuuauugagaagugucauu

SEQ ID NO: 190102 - RNA, 19 nt, Human
cccgcucagagucccccca

SEQ ID NO: 190103 - RNA, 21 nt, Human
ccuggagaaaggaaggcaaac

SEQ ID NO: 190104 - RNA, 21 nt, Human
cgcucagaguccccccaaccc

SEQ ID NO: 190105 - RNA, 20 nt, Human
gacugcggcggcgaaacucc

SEQ ID NO: 190106 - RNA, 23 nt, Human
uggcgaagacugcggcggcgaaa

SEQ ID NO: 190107 - RNA, 18 nt, Human
ugguccuggagaaaggaa

SEQ ID NO: 190108 - RNA, 24 nt, Human
aagcagaggcucaggcugagccca

SEQ ID NO: 190109 - RNA, 18 nt, Human
acacaaggccucagugug

SEQ ID NO: 190110 - RNA, 22 nt, Human
auuauccaaaaucaaaaugaaa

SEQ ID NO: 190111 - RNA, 19 nt, Human
caggcggcuguggaagaca

SEQ ID NO: 190112 - RNA, 22 nt, Human
ccaaaaucaaaaugaaaugcag

SEQ ID NO: 190113 - RNA, 19 nt, Human
gacaggguggggauggugg

SEQ ID NO: 190114 - RNA, 28 nt, Human
gcucccaugggccauuagaaaugaaaau

SEQ ID NO: 190115 - RNA, 19 nt, Human
gcucugggacuugggcaag

SEQ ID NO: 190116 - RNA, 18 nt, Human
gcuguggaagacagggug

SEQ ID NO: 190117 - RNA, 20 nt, Human
ggaagacaggguggggaugg

SEQ ID NO: 190118 - RNA, 21 nt, Human
gggcaagucuuaggcaagcca

SEQ ID NO: 190119 - RNA, 20 nt, Human
ggggaugguggcuucgggag

SEQ ID NO: 190120 - RNA, 23 nt, Human
ggugaggugcucugggacuuggg

SEQ ID NO: 190121 - RNA, 23 nt, Human
ggugcaagggugagguuucccag

SEQ ID NO: 190122 - RNA, 21 nt, Human
guuuauuauccaaaaucaaaa

SEQ ID NO: 190123 - RNA, 20 nt, Human
ugcucugggacuugggcaag

SEQ ID NO: 190124 - RNA, 18 nt, Human
uggaagacagggugggga

SEQ ID NO: 190125 - RNA, 20 nt, Human
uggaagacaggguggggaug

SEQ ID NO: 190126 - RNA, 21 nt, Human
ugggacuugggcaagucuuag

SEQ ID NO: 190127 - RNA, 22 nt, Human
ugggcaagucuuaggcaagcca

SEQ ID NO: 190128 - RNA, 19 nt, Human
aaggacagcggggauggcc

SEQ ID NO: 190129 - RNA, 19 nt, Human
acgcggugugggcagcagc

SEQ ID NO: 190130 - RNA, 22 nt, Human
agcucuuuauauauugcagauu

SEQ ID NO: 190131 - RNA, 18 nt, Human
agggacuggggcaagagg

SEQ ID NO: 190132 - RNA, 21 nt, Human
gaauccuuguugcuaaucucc

SEQ ID NO: 190133 - RNA, 20 nt, Human
ggcggcaaggacagcgggga

SEQ ID NO: 190134 - RNA, 21 nt, Human
uaaaaaggggcaaguaaguaa

SEQ ID NO: 190135 - RNA, 19 nt, Human
uagcagcacugccaaggac

SEQ ID NO: 190136 - RNA, 22 nt, Human
ucugugcagagcuucacaugaa

SEQ ID NO: 190137 - RNA, 24 nt, Human
ucuuacugguuauguaugcugcac

SEQ ID NO: 190138 - RNA, 23 nt, Human
ugaagcuggagagaagggacugg

SEQ ID NO: 190139 - RNA, 21 nt, Human
ugaggaguagcagcacugcca

SEQ ID NO: 190140 - RNA, 20 nt, Human
ugugcagagcuucacaugaa

SEQ ID NO: 190141 - RNA, 19 nt, Human
uguuacugauuuguaggag

SEQ ID NO: 190142 - RNA, 24 nt, Human
uuuguaggagcucuuuauauauug

SEQ ID NO: 190143 - RNA, 20 nt, Human
acccugcuccccgcaucucc

SEQ ID NO: 190144 - RNA, 18 nt, Human
agaaaaggcacacagccu

SEQ ID NO: 190145 - RNA, 22 nt, Human
aggcagauccagggcuagaguu

SEQ ID NO: 190146 - RNA, 21 nt, Human
aggccucuucagcccacccag

SEQ ID NO: 190147 - RNA, 24 nt, Human
cacaacaaaagcggaugagaaaag

SEQ ID NO: 190148 - RNA, 24 nt, Human
cacaugcgugugacagaugagggg

SEQ ID NO: 190149 - RNA, 19 nt, Human
cacccugcuccccgcaucu

SEQ ID NO: 190150 - RNA, 22 nt, Human
caucucagccucacgacugccc

SEQ ID NO: 190151 - RNA, 20 nt, Human
caucucccuacuccacccca

SEQ ID NO: 190152 - RNA, 21 nt, Human
ccaucuccucaauuaagacuc

SEQ ID NO: 190153 - RNA, 18 nt, Human
cccugcuccccgcaucuc

SEQ ID NO: 190154 - RNA, 21 nt, Human
cccugcuccccgcaucucccu

SEQ ID NO: 190155 - RNA, 24 nt, Human
ccgacgacuaaggcucagugagac

SEQ ID NO: 190156 - RNA, 18 nt, Human
ccuacuccaccccacaug

SEQ ID NO: 190157 - RNA, 22 nt, Human
ccuccaggccgagaaacuucgc

SEQ ID NO: 190158 - RNA, 23 nt, Human
cgccaggcauuuuaauccgcauu

SEQ ID NO: 190159 - RNA, 25 nt, Human
cgccaggcauuuuaauccgcauucu

SEQ ID NO: 190160 - RNA, 22 nt, Human
cgccugggaccugccgacgacu

SEQ ID NO: 190161 - RNA, 19 nt, Human
cucuucagcccacccagcu

SEQ ID NO: 190162 - RNA, 22 nt, Human
cuucgcgcgacccccuccucca

SEQ ID NO: 190163 - RNA, 18 nt, Human
gaaaaggcacacagccuu

SEQ ID NO: 190164 - RNA, 21 nt, Human
gaaaaggcacacagccuuccc

SEQ ID NO: 190165 - RNA, 24 nt, Human
gacagaugaggggacugaggugga

SEQ ID NO: 190166 - RNA, 22 nt, Human
gcgacccccuccuccaggccga

SEQ ID NO: 190167 - RNA, 19 nt, Human
gguguuacggugagcacgc

SEQ ID NO: 190168 - RNA, 19 nt, Human
uccccgcaucucccuacuc

SEQ ID NO: 190169 - RNA, 21 nt, Human
uccccgcaucucccuacuccc

SEQ ID NO: 190170 - RNA, 22 nt, Human
ucucccaucuccucaauuaaga

SEQ ID NO: 190171 - RNA, 19 nt, Human
ugagaaaaggcacacagcc

SEQ ID NO: 190172 - RNA, 24 nt, Human
ugagguggaacaaguuucagcagg

SEQ ID NO: 190173 - RNA, 24 nt, Human
ugcgugugacagaugaggggacug

SEQ ID NO: 190174 - RNA, 18 nt, Human
uuuccaggccucuucagc

SEQ ID NO: 190175 - RNA, 21 nt, Human
aaacacagcaaagacaccugc

SEQ ID NO: 190176 - RNA, 20 nt, Human
aagaagcagauaggaagaca

SEQ ID NO: 190177 - RNA, 26 nt, Human
aaguaacaaacgaggaagaaaggaac

SEQ ID NO: 190178 - RNA, 22 nt, Human
acccucuuccugcuucucguca

SEQ ID NO: 190179 - RNA, 18 nt, Human
agaaaaacacagcaaaga

SEQ ID NO: 190180 - RNA, 26 nt, Human
aggaagacagucuucagaccccgaag

SEQ ID NO: 190181 - RNA, 25 nt, Human
agggaguaacagaagguuaacaggg

SEQ ID NO: 190182 - RNA, 19 nt, Human
cacugcacccucuuccugc

SEQ ID NO: 190183 - RNA, 21 nt, Human
cagaccccgagcaucagcaag

SEQ ID NO: 190184 - RNA, 23 nt, Human
cagaccccgagcaucagcaagaa

SEQ ID NO: 190185 - RNA, 19 nt, Human
caucacauugcccaugagc

SEQ ID NO: 190186 - RNA, 22 nt, Human
caucacauugcccaugagcccc

SEQ ID NO: 190187 - RNA, 27 nt, Human
ccacuggcgguggcggcggcggcggcg

SEQ ID NO: 190188 - RNA, 22 nt, Human
ccacuggcgguggcggcggcuu

SEQ ID NO: 190189 - RNA, 19 nt, Human
cccacgccggcacugcacc

SEQ ID NO: 190190 - RNA, 20 nt, Human
cccaugagcccauucuacuc

SEQ ID NO: 190191 - RNA, 25 nt, Human
ccccgccugcccgcacgcacgccca

SEQ ID NO: 190192 - RNA, 19 nt, Human
cccgcacgcacgcccagcg

SEQ ID NO: 190193 - RNA, 21 nt, Human
ccgagcaucagcaagaacacu

SEQ ID NO: 190194 - RNA, 19 nt, Human
ccucgcacgacucgccgcc

SEQ ID NO: 190195 - RNA, 20 nt, Human
cgccgcccccuuccugcgcc

SEQ ID NO: 190196 - RNA, 21 nt, Human
cgccuccgccucggccggccg

SEQ ID NO: 190197 - RNA, 22 nt, Human
cggcacugcacccucuuccugc

SEQ ID NO: 190198 - RNA, 21 nt, Human
cggcagcggcgguagcugagg

SEQ ID NO: 190199 - RNA, 22 nt, Human
cuaugggcaaacuugcucuaaa

SEQ ID NO: 190200 - RNA, 23 nt, Human
cucuugauuguguaucuguaacu

SEQ ID NO: 190201 - RNA, 26 nt, Human
cugaacugcuccucuccucagccgca

SEQ ID NO: 190202 - RNA, 22 nt, Human
cugcacccucuuccugcuucuc

SEQ ID NO: 190203 - RNA, 24 nt, Human
cuucucgucagcgcccccgccugc

SEQ ID NO: 190204 - RNA, 23 nt, Human
gaaccauuuagaaguggagaaaa

SEQ ID NO: 190205 - RNA, 26 nt, Human
gacucgccgcccccuuccugcgccuc

SEQ ID NO: 190206 - RNA, 18 nt, Human
gagcaucagcaagaacac

SEQ ID NO: 190207 - RNA, 24 nt, Human
gcaagaagcagauaggaagacagu

SEQ ID NO: 190208 - RNA, 18 nt, Human
gcccccgccugcccgcac

SEQ ID NO: 190209 - RNA, 24 nt, Human
gcgcugacccgccaggucgggguc

SEQ ID NO: 190210 - RNA, 19 nt, Human
gcggcggcggcagcggcgg

SEQ ID NO: 190211 - RNA, 20 nt, Human
gcggcggcggcggcggcagc

SEQ ID NO: 190212 - RNA, 20 nt, Human
gcgguggcggcggcggcggc

SEQ ID NO: 190213 - RNA, 19 nt, Human
ggagaaaaacacagcaaag

SEQ ID NO: 190214 - RNA, 23 nt, Human
ggcggcggcagcggcgguagcug

SEQ ID NO: 190215 - RNA, 25 nt, Human
ggcggcggcggcggcagcggcggua

SEQ ID NO: 190216 - RNA, 20 nt, Human
ggcgguggcggcggcggcgg

SEQ ID NO: 190217 - RNA, 23 nt, Human
ggcgguggcggcggcggcggcgg

SEQ ID NO: 190218 - RNA, 28 nt, Human
gggaguaacagaagguuaaccgguaccc

SEQ ID NO: 190219 - RNA, 25 nt, Human
gguggcggcggcggcggcggcagcg

SEQ ID NO: 190220 - RNA, 20 nt, Human
guggcggcggcggcggcggc

SEQ ID NO: 190221 - RNA, 21 nt, Human
guggcggcggcggcggcggca

SEQ ID NO: 190222 - RNA, 22 nt, Human
uaacaaacgaggaagaaaggaa

SEQ ID NO: 190223 - RNA, 23 nt, Human
uagaaguggagaaaaacacagca

SEQ ID NO: 190224 - RNA, 23 nt, Human
ucagcaagaacacucuugauugu

SEQ ID NO: 190225 - RNA, 22 nt, Human
ucgccgcccccuuccugcgccu

SEQ ID NO: 190226 - RNA, 19 nt, Human
ucuguuccagggcaaaacu

SEQ ID NO: 190227 - RNA, 22 nt, Human
ucuucagaccccgagcaucagc

SEQ ID NO: 190228 - RNA, 18 nt, Human
ugaguuugguaauuugca

SEQ ID NO: 190229 - RNA, 21 nt, Human
ugcccgcacgcacgcccagcg

SEQ ID NO: 190230 - RNA, 18 nt, Human
uggcggcggcggcggcgg

SEQ ID NO: 190231 - RNA, 18 nt, Human
uggcgguggcggcggcgg

SEQ ID NO: 190232 - RNA, 18 nt, Human
uucucccagggaguaaca

SEQ ID NO: 190233 - RNA, 21 nt, Human
uuggaauaaacaaauauugca

SEQ ID NO: 190234 - RNA, 22 nt, Human
aagccgccgcucggugucgggu

SEQ ID NO: 190235 - RNA, 22 nt, Human
aagggucacugagagccugaag

SEQ ID NO: 190236 - RNA, 20 nt, Human
aaguagcugggacugcaggc

SEQ ID NO: 190237 - RNA, 20 nt, Human
aaguagcugggacugcaggc

SEQ ID NO: 190238 - RNA, 23 nt, Human
aaugcaguggcaccaucauaguu

SEQ ID NO: 190239 - RNA, 27 nt, Human
acagagccucacucuaggauggcgaag

SEQ ID NO: 190240 - RNA, 24 nt, Human
acccaggcuggagugcaguggcgu

SEQ ID NO: 190241 - RNA, 22 nt, Human
acccagugggcagcacaggccc

SEQ ID NO: 190242 - RNA, 21 nt, Human
acggggcccugggagucaggg

SEQ ID NO: 190243 - RNA, 21 nt, Human
acuuuuuuuuuuuugugccag

SEQ ID NO: 190244 - RNA, 22 nt, Human
agaaguuacccagugggcagca

SEQ ID NO: 190245 - RNA, 20 nt, Human
agccaaaacugaagacuuac

SEQ ID NO: 190246 - RNA, 20 nt, Human
aggaccccaacccuaggcgc

SEQ ID NO: 190247 - RNA, 23 nt, Human
aggaccccaacccuaggcgccuc

SEQ ID NO: 190248 - RNA, 19 nt, Human
aggaggaggaggacaauaa

SEQ ID NO: 190249 - RNA, 22 nt, Human
aggaggaggaggacaauaagaa

SEQ ID NO: 190250 - RNA, 21 nt, Human
aggcaucugaagauuccagaa

SEQ ID NO: 190251 - RNA, 23 nt, Human
aggcaucugaagauuccagaagg

SEQ ID NO: 190252 - RNA, 19 nt, Human
aggccgagccaggaggagg

SEQ ID NO: 190253 - RNA, 18 nt, Human
aggcuggagugcaguggc

SEQ ID NO: 190254 - RNA, 19 nt, Human
agggaggccgagccaggag

SEQ ID NO: 190255 - RNA, 23 nt, Human
agugcaguggcguggugucagcu

SEQ ID NO: 190256 - RNA, 24 nt, Human
agugcaguggcguggugucagcuc

SEQ ID NO: 190257 - RNA, 18 nt, Human
auaguucacugcagccuu

SEQ ID NO: 190258 - RNA, 20 nt, Human
aucccggggaagccgccgcu

SEQ ID NO: 190259 - RNA, 22 nt, Human
augugguggauaagucacagcu

SEQ ID NO: 190260 - RNA, 25 nt, Human
auucugucacccaggcuggaaugca

SEQ ID NO: 190261 - RNA, 23 nt, Human
caaccuccaccucccagguucaa

SEQ ID NO: 190262 - RNA, 20 nt, Human
caagugaaucucgugccuca

SEQ ID NO: 190263 - RNA, 22 nt, Human
cacagcaaccuccaccucccag

SEQ ID NO: 190264 - RNA, 24 nt, Human
cacccaggcuggagugcaguggcg

SEQ ID NO: 190265 - RNA, 26 nt, Human
cagaaggaagggccagaggaggagau

SEQ ID NO: 190266 - RNA, 21 nt, Human
cagcugggacaacaggcuccc

SEQ ID NO: 190267 - RNA, 19 nt, Human
caucaugcccagccaaaac

SEQ ID NO: 190268 - RNA, 24 nt, Human
cauucugucacccaggcuggaaug

SEQ ID NO: 190269 - RNA, 22 nt, Human
cccaacccuaggcgccucuggc

SEQ ID NO: 190270 - RNA, 23 nt, Human
cccaaguagcugggacugcaggc

SEQ ID NO: 190271 - RNA, 25 nt, Human
cccaaguagcugggacugcaggcgc

SEQ ID NO: 190272 - RNA, 22 nt, Human
ccucccagguucaagugaaucu

SEQ ID NO: 190273 - RNA, 22 nt, Human
ccugagcgaggaccccaacccu

SEQ ID NO: 190274 - RNA, 19 nt, Human
cuaggauggcgaaggggca

SEQ ID NO: 190275 - RNA, 22 nt, Human
cucacagcaaccuccaccuccc

SEQ ID NO: 190276 - RNA, 27 nt, Human
cucacagcaaccuccaccucccagguu

SEQ ID NO: 190277 - RNA, 23 nt, Human
cucugugccugagcgaggacccc

SEQ ID NO: 190278 - RNA, 18 nt, Human
cugucacccaggcuggag

SEQ ID NO: 190279 - RNA, 24 nt, Human
cuuagccucccaaguagcugggac

SEQ ID NO: 190280 - RNA, 22 nt, Human
gcaaccuccaccucccagguuc

SEQ ID NO: 190281 - RNA, 21 nt, Human
gcgugcgcgucccucgauccc

SEQ ID NO: 190282 - RNA, 20 nt, Human
gcuggaaugcaguggcacca

SEQ ID NO: 190283 - RNA, 19 nt, Human
gcuggagugcaguggcgug

SEQ ID NO: 190284 - RNA, 24 nt, Human
ggacugcaggcgcucaccaucaug

SEQ ID NO: 190285 - RNA, 23 nt, Human
ggagauggcuuaacuuuuccaga

SEQ ID NO: 190286 - RNA, 18 nt, Human
ggcgaaggggcagugaga

SEQ ID NO: 190287 - RNA, 20 nt, Human
ggcuggagugcaguggcgug

SEQ ID NO: 190288 - RNA, 18 nt, Human
gggcccugggagucaggg

SEQ ID NO: 190289 - RNA, 23 nt, Human
gucucacugucacccaggcugga

SEQ ID NO: 190290 - RNA, 19 nt, Human
uaagaaggccuaacaggca

SEQ ID NO: 190291 - RNA, 18 nt, Human
uaagucacagcugaagag

SEQ ID NO: 190292 - RNA, 22 nt, Human
uaguucacugcagccuugaacu

SEQ ID NO: 190293 - RNA, 24 nt, Human
ucacagcaaccuccaccucccagg

SEQ ID NO: 190294 - RNA, 19 nt, Human
ucacccaggcuggaaugca

SEQ ID NO: 190295 - RNA, 24 nt, Human
ucacccaggcuggagugcaguggc

SEQ ID NO: 190296 - RNA, 18 nt, Human
ucacugcagccuugaacu

SEQ ID NO: 190297 - RNA, 21 nt, Human
ucacugcagccuugaacuggg

SEQ ID NO: 190298 - RNA, 22 nt, Human
ucauucugucacccaggcugga

SEQ ID NO: 190299 - RNA, 24 nt, Human
ucccaaguagcugggacugcaggc

SEQ ID NO: 190300 - RNA, 21 nt, Human
ucccagguucaagugaaucuc

SEQ ID NO: 190301 - RNA, 21 nt, Human
ucccagguucaagugaaucuc

SEQ ID NO: 190302 - RNA, 22 nt, Human
ucucacugucacccaggcugga

SEQ ID NO: 190303 - RNA, 24 nt, Human
ucucacugucacccaggcuggagu

SEQ ID NO: 190304 - RNA, 19 nt, Human
ucucugugccugagcgagg

SEQ ID NO: 190305 - RNA, 24 nt, Human
ucugucacccaggcuggaaugcag

SEQ ID NO: 190306 - RNA, 19 nt, Human
ugagacagagucucacugu

SEQ ID NO: 190307 - RNA, 22 nt, Human
ugagggaggccgagccaggagg

SEQ ID NO: 190308 - RNA, 21 nt, Human
ugcccagccaaaacugaagac

SEQ ID NO: 190309 - RNA, 24 nt, Human
ugccucagccuacggaacagcugg

SEQ ID NO: 190310 - RNA, 19 nt, Human
uggaaugcaguggcaccau

SEQ ID NO: 190311 - RNA, 26 nt, Human
uggagugcaguggcguggggcucuag

SEQ ID NO: 190312 - RNA, 22 nt, Human
uggagugcaguggcgugguguc

SEQ ID NO: 190313 - RNA, 23 nt, Human
uggagugcaguggcgugguguca

SEQ ID NO: 190314 - RNA, 19 nt, Human
uggcaccaucauaguucac

SEQ ID NO: 190315 - RNA, 24 nt, Human
uggcguggugucagcucacagcaa

SEQ ID NO: 190316 - RNA, 19 nt, Human
uggcuacuuuuuuuuuuuu

SEQ ID NO: 190317 - RNA, 21 nt, Human
ugggacugcaggcgcucacca

SEQ ID NO: 190318 - RNA, 24 nt, Human
ugggcuuagccucccaaguagcug

SEQ ID NO: 190319 - RNA, 21 nt, Human
ugucacccaggcuggagugca

SEQ ID NO: 190320 - RNA, 23 nt, Human
uucaagugaaucucgugccucag

SEQ ID NO: 190321 - RNA, 27 nt, Human
uucacugcagccuugaacugggcuccg

SEQ ID NO: 190322 - RNA, 22 nt, Human
uuucauucugucacccaggcug

SEQ ID NO: 190323 - RNA, 23 nt, Human
uuucauucugucacccaggcugg

SEQ ID NO: 190324 - RNA, 24 nt, Human
uuucauucugucacccaggcugga

SEQ ID NO: 190325 - RNA, 26 nt, Human
uuuuuuuuuuuugugccaggauuuca

SEQ ID NO: 190326 - RNA, 22 nt, Human
aaaaaaauguacacagaaaaaa

SEQ ID NO: 190327 - RNA, 24 nt, Human
aaauguacacagaaaaaaacgaca

SEQ ID NO: 190328 - RNA, 22 nt, Human
aacaucuuuuuuuuuuuuuuuu

SEQ ID NO: 190329 - RNA, 20 nt, Human
aagaaugaaggauggaggag

SEQ ID NO: 190330 - RNA, 23 nt, Human
aagaaugaaggauggaggaggaa

SEQ ID NO: 190331 - RNA, 18 nt, Human
acaaccaaaaaaccucag

SEQ ID NO: 190332 - RNA, 21 nt, Human
acagaaaaaaacgacaaccaa

SEQ ID NO: 190333 - RNA, 22 nt, Human
acagaaaaaaacgacaaccaaa

SEQ ID NO: 190334 - RNA, 24 nt, Human
acaguaacagucaaauacuagaga

SEQ ID NO: 190335 - RNA, 26 nt, Human
acauacacauguacauauaugugugu

SEQ ID NO: 190336 - RNA, 21 nt, Human
acauguacauauaugugugug

SEQ ID NO: 190337 - RNA, 23 nt, Human
aggaaaaaaauguacacagaaaa

SEQ ID NO: 190338 - RNA, 26 nt, Human
aggaaaaaaauguacacagaaaaaaa

SEQ ID NO: 190339 - RNA, 21 nt, Human
aggaggaauacuuaaggucua

SEQ ID NO: 190340 - RNA, 25 nt, Human
agucuuuuaaaauauauauguacau

SEQ ID NO: 190341 - RNA, 21 nt, Human
auacacauguacauauaugug

SEQ ID NO: 190342 - RNA, 30 nt, Human
auauguacauacacauguacauauaugugg

SEQ ID NO: 190343 - RNA, 19 nt, Human
aucgauucgccaaggacag

SEQ ID NO: 190344 - RNA, 20 nt, Human
aucuuaaaaaaaucuuagca

SEQ ID NO: 190345 - RNA, 18 nt, Human
auguacauauaugugugu

SEQ ID NO: 190346 - RNA, 25 nt, Human
caaccaaaaaaccucagauuuuauc

SEQ ID NO: 190347 - RNA, 21 nt, Human
caacucuagacaggaaguaac

SEQ ID NO: 190348 - RNA, 18 nt, Human
cacagaaaaaaacgacaa

SEQ ID NO: 190349 - RNA, 24 nt, Human
cacagaaccaaugaugucuucuga

SEQ ID NO: 190350 - RNA, 18 nt, Human
cacuccugugaggucauc

SEQ ID NO: 190351 - RNA, 18 nt, Human
cagcgccauugucuucug

SEQ ID NO: 190352 - RNA, 25 nt, Human
cagcgccauugucuucugacaaaau

SEQ ID NO: 190353 - RNA, 23 nt, Human
caggaacaaaauauggcacgaag

SEQ ID NO: 190354 - RNA, 22 nt, Human
caggaaguaacuaacuggguug

SEQ ID NO: 190355 - RNA, 20 nt, Human
cagggacuccaaaccacaaa

SEQ ID NO: 190356 - RNA, 20 nt, Human
cauacacauguacauauaug

SEQ ID NO: 190357 - RNA, 21 nt, Human
cauaguucucucaaucucaca

SEQ ID NO: 190358 - RNA, 24 nt, Human
cauguacauauaugugugugugug

SEQ ID NO: 190359 - RNA, 21 nt, Human
cauuugcacucaaagaaaaac

SEQ ID NO: 190360 - RNA, 22 nt, Human
ccaucuuaaaaaaaucuuagca

SEQ ID NO: 190361 - RNA, 19 nt, Human
cccuucuuuccuuucaguc

SEQ ID NO: 190362 - RNA, 21 nt, Human
ccugugccauaaacuuaggaa

SEQ ID NO: 190363 - RNA, 19 nt, Human
cgcagcaguagccaccgcc

SEQ ID NO: 190364 - RNA, 18 nt, Human
cucugggaguuggcgugg

SEQ ID NO: 190365 - RNA, 25 nt, Human
cugacaacuguuuccugaugguuga

SEQ ID NO: 190366 - RNA, 27 nt, Human
cuuaggaaaaaaauguacacagaaaaa

SEQ ID NO: 190367 - RNA, 24 nt, Human
cuuuuuuuuuuuuuuuuugcacuu

SEQ ID NO: 190368 - RNA, 20 nt, Human
gaaacacagaaccaaugaug

SEQ ID NO: 190369 - RNA, 24 nt, Human
gaaggauggaggaggaauacuuaa

SEQ ID NO: 190370 - RNA, 18 nt, Human
gagcaacagucucccuuu

SEQ ID NO: 190371 - RNA, 23 nt, Human
gcgccauugucuucugacaaaau

SEQ ID NO: 190372 - RNA, 21 nt, Human
ggucgaguuccgcugcgcuuc

SEQ ID NO: 190373 - RNA, 22 nt, Human
guacauauaugugugugugugu

SEQ ID NO: 190374 - RNA, 20 nt, Human
uacacagaaaaaaacgacaa

SEQ ID NO: 190375 - RNA, 23 nt, Human
uacacagaaaaaaacgacaacca

SEQ ID NO: 190376 - RNA, 18 nt, Human
uacacauguacauauaug

SEQ ID NO: 190377 - RNA, 20 nt, Human
uacauacacauguacauaua

SEQ ID NO: 190378 - RNA, 20 nt, Human
uacauacacauguacauaua

SEQ ID NO: 190379 - RNA, 24 nt, Human
uacauauauguguguguguguaua

SEQ ID NO: 190380 - RNA, 21 nt, Human
uacccugugccauaaacuuag

SEQ ID NO: 190381 - RNA, 20 nt, Human
uauguacauacacauguaca

SEQ ID NO: 190382 - RNA, 20 nt, Human
ucaaaagcaguuccugagca

SEQ ID NO: 190383 - RNA, 20 nt, Human
ucaaagaaaaacaugcagcg

SEQ ID NO: 190384 - RNA, 22 nt, Human
ucaaagaaaaacaugcagcgcc

SEQ ID NO: 190385 - RNA, 23 nt, Human
ucaaucucacaaaaccuguaagc

SEQ ID NO: 190386 - RNA, 21 nt, Human
ucccuucuuuccuuucagucu

SEQ ID NO: 190387 - RNA, 18 nt, Human
uccggucgaguuccgcug

SEQ ID NO: 190388 - RNA, 20 nt, Human
uccguaggaaacacagaacc

SEQ ID NO: 190389 - RNA, 23 nt, Human
uccguaggaaacacagaaccaau

SEQ ID NO: 190390 - RNA, 19 nt, Human
ucuucuaaagaggugaaaa

SEQ ID NO: 190391 - RNA, 22 nt, Human
ucuucugacaacuguuuccuga

SEQ ID NO: 190392 - RNA, 21 nt, Human
ucuuuuuuuuuuuuuuuuugg

SEQ ID NO: 190393 - RNA, 25 nt, Human
ugaaucaaaagcaguuccugagcaa

SEQ ID NO: 190394 - RNA, 22 nt, Human
ugccauaaacuuaggaaaaaaa

SEQ ID NO: 190395 - RNA, 25 nt, Human
uggaggaggaauacuuaaggucuac

SEQ ID NO: 190396 - RNA, 19 nt, Human
uggcuagaaggugcaggug

SEQ ID NO: 190397 - RNA, 19 nt, Human
ugggaagaggccgaaaccc

SEQ ID NO: 190398 - RNA, 22 nt, Human
ugggaagaggccgaaacccagu

SEQ ID NO: 190399 - RNA, 23 nt, Human
ugggaagaggccgaaacccagug

SEQ ID NO: 190400 - RNA, 20 nt, Human
uguacacagaaaaaaacgac

SEQ ID NO: 190401 - RNA, 23 nt, Human
ugucaggccagguuuccagaguu

SEQ ID NO: 190402 - RNA, 23 nt, Human
ugucuuaauuuaccuccccagca

SEQ ID NO: 190403 - RNA, 18 nt, Human
uguguguauauauauaua

SEQ ID NO: 190404 - RNA, 18 nt, Human
uguguguguauauauaua

SEQ ID NO: 190405 - RNA, 18 nt, Human
uguguguguauauauaua

SEQ ID NO: 190406 - RNA, 23 nt, Human
uguguguguguauauauauauau

SEQ ID NO: 190407 - RNA, 23 nt, Human
uguguguguguguauauauauau

SEQ ID NO: 190408 - RNA, 27 nt, Human
uguguguguguguauauauauauauuu

SEQ ID NO: 190409 - RNA, 19 nt, Human
uuaacuugcugauguaagg

SEQ ID NO: 190410 - RNA, 22 nt, Human
uuagucccuucuuuccuuucag

SEQ ID NO: 190411 - RNA, 18 nt, Human
uucagggacuccaaacca

SEQ ID NO: 190412 - RNA, 23 nt, Human
uuccugagcaacugcaguaaaca

SEQ ID NO: 190413 - RNA, 18 nt, Human
uuggcguggagcagaugu

SEQ ID NO: 190414 - RNA, 21 nt, Human
uuuuuuuuuuuuuugcacuua

SEQ ID NO: 190415 - RNA, 19 nt, Human
uuuuuuuuuuuuuuuuuaa

SEQ ID NO: 190416 - RNA, 19 nt, Human
aaaaaucuggugagauuca

SEQ ID NO: 190417 - RNA, 22 nt, Human
aaaauagaagcaacacauaaaa

SEQ ID NO: 190418 - RNA, 25 nt, Human
aacaccguaacucaaggcucugcug

SEQ ID NO: 190419 - RNA, 19 nt, Human
aacauaggaaccaugagag

SEQ ID NO: 190420 - RNA, 21 nt, Human
aagaagaacuaggaaauaaug

SEQ ID NO: 190421 - RNA, 20 nt, Human
aauagaagcaacacauaaaa

SEQ ID NO: 190422 - RNA, 20 nt, Human
aauccucaacccgaucuuca

SEQ ID NO: 190423 - RNA, 24 nt, Human
acaccguaacucaaggcucugcug

SEQ ID NO: 190424 - RNA, 21 nt, Human
accagccauuccagacccaca

SEQ ID NO: 190425 - RNA, 24 nt, Human
acugaacuaucacaggaauuuuuc

SEQ ID NO: 190426 - RNA, 22 nt, Human
agagguugcauccuuagccccc

SEQ ID NO: 190427 - RNA, 27 nt, Human
aggaaccaugagagauagccgguaccc

SEQ ID NO: 190428 - RNA, 18 nt, Human
aggaacuguucacucagu

SEQ ID NO: 190429 - RNA, 21 nt, Human
aggcagaggccggggugaccg

SEQ ID NO: 190430 - RNA, 22 nt, Human
aggcagggccucgcucagcgcc

SEQ ID NO: 190431 - RNA, 24 nt, Human
aggcagggccucgcucagcgccuu

SEQ ID NO: 190432 - RNA, 22 nt, Human
auaaugccggccacgcgacccc

SEQ ID NO: 190433 - RNA, 18 nt, Human
auuccugucauuuucccu

SEQ ID NO: 190434 - RNA, 24 nt, Human
caacaaauaguggaaaauaugcaa

SEQ ID NO: 190435 - RNA, 22 nt, Human
caagaagaacuaggaaauaaug

SEQ ID NO: 190436 - RNA, 19 nt, Human
caccagccauuccagaccc

SEQ ID NO: 190437 - RNA, 26 nt, Human
caccgccgcauggccgccccgcaggc

SEQ ID NO: 190438 - RNA, 22 nt, Human
cagcauugcuguaaaauccuga

SEQ ID NO: 190439 - RNA, 20 nt, Human
caggucccgcgauguugggg

SEQ ID NO: 190440 - RNA, 22 nt, Human
cauuucuaucuaaaaguagaaa

SEQ ID NO: 190441 - RNA, 22 nt, Human
ccaauccucaacccgaucuuca

SEQ ID NO: 190442 - RNA, 23 nt, Human
ccaauccucaacccgaucuucaa

SEQ ID NO: 190443 - RNA, 18 nt, Human
cccacagucacucugcuc

SEQ ID NO: 190444 - RNA, 19 nt, Human
ccccaauccucaacccgau

SEQ ID NO: 190445 - RNA, 18 nt, Human
ccccgcgcuggcaccucc

SEQ ID NO: 190446 - RNA, 19 nt, Human
ccccuuuucucugcucucc

SEQ ID NO: 190447 - RNA, 21 nt, Human
ccccuuuucucugcucuccca

SEQ ID NO: 190448 - RNA, 19 nt, Human
ccgccuccaggcagcuccg

SEQ ID NO: 190449 - RNA, 19 nt, Human
ccgccuccaggcagcuccg

SEQ ID NO: 190450 - RNA, 20 nt, Human
ccgcgcgcgggcugcggccg

SEQ ID NO: 190451 - RNA, 26 nt, Human
ccgguggccccuuuucucugcucucc

SEQ ID NO: 190452 - RNA, 19 nt, Human
ccugaccccuccucacucc

SEQ ID NO: 190453 - RNA, 29 nt, Human
ccugaccccuccucacuccccgcgcuggc

SEQ ID NO: 190454 - RNA, 21 nt, Human
ccugucaccgccgcauggccg

SEQ ID NO: 190455 - RNA, 23 nt, Human
cgucagagguugcauccuuagcc

SEQ ID NO: 190456 - RNA, 19 nt, Human
cucucacccuccuccuccu

SEQ ID NO: 190457 - RNA, 25 nt, Human
cucugcucucccagcuucucucuca

SEQ ID NO: 190458 - RNA, 22 nt, Human
gaaaauaugcaaucucuuuuuc

SEQ ID NO: 190459 - RNA, 26 nt, Human
gaacgucagagguugcauccuuagcc

SEQ ID NO: 190460 - RNA, 20 nt, Human
gaacugaacuaucacaggaa

SEQ ID NO: 190461 - RNA, 20 nt, Human
gaccgcggcaggcgggcggc

SEQ ID NO: 190462 - RNA, 18 nt, Human
gagagggggcgaggggcc

SEQ ID NO: 190463 - RNA, 24 nt, Human
gagccuagcuucuuguagagcugg

SEQ ID NO: 190464 - RNA, 18 nt, Human
gaucuucaacuucuggua

SEQ ID NO: 190465 - RNA, 26 nt, Human
gcagcuccggggccggggccucgugc

SEQ ID NO: 190466 - RNA, 20 nt, Human
gccgccgcggagcagccucg

SEQ ID NO: 190467 - RNA, 18 nt, Human
gccgggggugccgagggg

SEQ ID NO: 190468 - RNA, 18 nt, Human
gcgaccgguggccccuuu

SEQ ID NO: 190469 - RNA, 20 nt, Human
gcgcgugcggggaagcgggg

SEQ ID NO: 190470 - RNA, 20 nt, Human
gcgcgugcggggaagcgggg

SEQ ID NO: 190471 - RNA, 22 nt, Human
gcggccgccuccaggcagcucc

SEQ ID NO: 190472 - RNA, 22 nt, Human
gcggccgccuccaggcagcucc

SEQ ID NO: 190473 - RNA, 23 nt, Human
gcgggcugcggccgccgcggagc

SEQ ID NO: 190474 - RNA, 22 nt, Human
gggccgggggugccgaggggag

SEQ ID NO: 190475 - RNA, 23 nt, Human
gggcugcggccgccgcggagcag

SEQ ID NO: 190476 - RNA, 24 nt, Human
ggggagcuggcgagcggacgggag

SEQ ID NO: 190477 - RNA, 21 nt, Human
gggggcgaggggcccgugcgu

SEQ ID NO: 190478 - RNA, 19 nt, Human
gguccgaaaagcucuucuc

SEQ ID NO: 190479 - RNA, 28 nt, Human
uaaaauagaauaaacauacaacaaauag

SEQ ID NO: 190480 - RNA, 19 nt, Human
uaaggagagccgugaacaa

SEQ ID NO: 190481 - RNA, 21 nt, Human
uaauucacacgcugagauacu

SEQ ID NO: 190482 - RNA, 20 nt, Human
uacaccagccauuccagacc

SEQ ID NO: 190483 - RNA, 21 nt, Human
uagaaaaacuaaagaacugaa

SEQ ID NO: 190484 - RNA, 22 nt, Human
uagaagguauuucuguuauaca

SEQ ID NO: 190485 - RNA, 24 nt, Human
uagaauaaacauacaacaaauagu

SEQ ID NO: 190486 - RNA, 27 nt, Human
uagcccccugaccccuccucacucccu

SEQ ID NO: 190487 - RNA, 20 nt, Human
uaggaaauaaugccggccac

SEQ ID NO: 190488 - RNA, 23 nt, Human
uauaaaauagaauaaacauacaa

SEQ ID NO: 190489 - RNA, 24 nt, Human
uauuacacagcuugggguaguaac

SEQ ID NO: 190490 - RNA, 24 nt, Human
ucacugggggacagaggcagaggc

SEQ ID NO: 190491 - RNA, 22 nt, Human
ucaucgagcuagccccaauccu

SEQ ID NO: 190492 - RNA, 22 nt, Human
uccccgagugcggccgccucca

SEQ ID NO: 190493 - RNA, 22 nt, Human
uccccgagugcggccgccucca

SEQ ID NO: 190494 - RNA, 21 nt, Human
uccgaaaagcucuucucaacc

SEQ ID NO: 190495 - RNA, 23 nt, Human
uccgcgccacagcaggucccgcg

SEQ ID NO: 190496 - RNA, 24 nt, Human
uccgcgccacagcaggucccgcga

SEQ ID NO: 190497 - RNA, 22 nt, Human
uccucaacccgaucuucaacuu

SEQ ID NO: 190498 - RNA, 26 nt, Human
ucuaaaaguagaaaaaaagguuugua

SEQ ID NO: 190499 - RNA, 18 nt, Human
ucucucacccuccuccuc

SEQ ID NO: 190500 - RNA, 21 nt, Human
ucuggugagauucauuccugu

SEQ ID NO: 190501 - RNA, 20 nt, Human
ugaggggagcuggcgagcgg

SEQ ID NO: 190502 - RNA, 18 nt, Human
ugcggggaagcggggggg

SEQ ID NO: 190503 - RNA, 24 nt, Human
ugcuugugaaaucucaacacaugu

SEQ ID NO: 190504 - RNA, 18 nt, Human
ugggggacagaggcagag

SEQ ID NO: 190505 - RNA, 19 nt, Human
uguuauacaaguauauuac

SEQ ID NO: 190506 - RNA, 20 nt, Human
uguuauacaaguauauuaca

SEQ ID NO: 190507 - RNA, 23 nt, Human
uuccaaauaagguguuuuaagga

SEQ ID NO: 190508 - RNA, 18 nt, Human
uuccagacccacagucac

SEQ ID NO: 190509 - RNA, 22 nt, Human
uuccugucauuuucccugucau

SEQ ID NO: 190510 - RNA, 26 nt, Human
uucucugcucucccagcuucucucuc

SEQ ID NO: 190511 - RNA, 28 nt, Human
uuucccagcauugcuguaaaauccugag

SEQ ID NO: 190512 - RNA, 21 nt, Human
uuuuuuuuuuuuuuuuaccaa

SEQ ID NO: 190513 - RNA, 24 nt, Human
uuuuuuuuuuuuuuuuuaccaagg

SEQ ID NO: 190514 - RNA, 20 nt, Human
agggggcgcggggggggaau

SEQ ID NO: 190515 - RNA, 20 nt, Human
auauccgaauauacauuuug

SEQ ID NO: 190516 - RNA, 20 nt, Human
caacaccacccuccauuggc

SEQ ID NO: 190517 - RNA, 21 nt, Human
ccagccccgcgcaacaccacc

SEQ ID NO: 190518 - RNA, 21 nt, Human
ccccgcgcaacaccacccucc

SEQ ID NO: 190519 - RNA, 19 nt, Human
ccccggccccggcccgcgg

SEQ ID NO: 190520 - RNA, 22 nt, Human
ccccggcccgcggccaggacuc

SEQ ID NO: 190521 - RNA, 21 nt, Human
cccgcgcaacaccacccucca

SEQ ID NO: 190522 - RNA, 27 nt, Human
cccggccccggcccgcggccaggacuc

SEQ ID NO: 190523 - RNA, 27 nt, Human
cccggcccuaaucccagccccgcgcaa

SEQ ID NO: 190524 - RNA, 18 nt, Human
ccuccugccgcugccucc

SEQ ID NO: 190525 - RNA, 26 nt, Human
ccugccagcggcgccccggccccggc

SEQ ID NO: 190526 - RNA, 21 nt, Human
cgccccggcccuaaucccagc

SEQ ID NO: 190527 - RNA, 22 nt, Human
cggcggcgcggcgagggcgggg

SEQ ID NO: 190528 - RNA, 20 nt, Human
cggggagaggagcggagagc

SEQ ID NO: 190529 - RNA, 19 nt, Human
cggggagggggcgcggggg

SEQ ID NO: 190530 - RNA, 20 nt, Human
cugcggcggagggcggggcg

SEQ ID NO: 190531 - RNA, 22 nt, Human
cugcggcggagggcggggcggc

SEQ ID NO: 190532 - RNA, 22 nt, Human
gagggggcgcggggggggaauc

SEQ ID NO: 190533 - RNA, 22 nt, Human
gccccggcccuaaucccagccc

SEQ ID NO: 190534 - RNA, 19 nt, Human
gcggcgcggggagaggagc

SEQ ID NO: 190535 - RNA, 22 nt, Human
gcuggcgcucggcggcccccac

SEQ ID NO: 190536 - RNA, 19 nt, Human
ggaaucggccggccggggg

SEQ ID NO: 190537 - RNA, 21 nt, Human
ggagaggcagagggaggcgag

SEQ ID NO: 190538 - RNA, 20 nt, Human
ggagggaggcgcggggaggg

SEQ ID NO: 190539 - RNA, 20 nt, Human
ggagggaggcgcggggaggg

SEQ ID NO: 190540 - RNA, 20 nt, Human
ggagggggcgcgggggggga

SEQ ID NO: 190541 - RNA, 18 nt, Human
gggaaggagaggcagagg

SEQ ID NO: 190542 - RNA, 21 nt, Human
gggcggcgcggggagaggagc

SEQ ID NO: 190543 - RNA, 23 nt, Human
ggggaaggagaggcagagggagg

SEQ ID NO: 190544 - RNA, 18 nt, Human
ggggagaggagcggagag

SEQ ID NO: 190545 - RNA, 19 nt, Human
ggggagggaggcgcgggga

SEQ ID NO: 190546 - RNA, 23 nt, Human
ggggagggaggcgcggggagggg

SEQ ID NO: 190547 - RNA, 21 nt, Human
ggggagggggcgcgggggggg

SEQ ID NO: 190548 - RNA, 20 nt, Human
ucugagugagguccugauuc

SEQ ID NO: 190549 - RNA, 23 nt, Human
ucuguaaucccaguaagauugcc

SEQ ID NO: 190550 - RNA, 23 nt, Human
ugagugagguccugauucaguac

SEQ ID NO: 190551 - RNA, 21 nt, Human
uguaaucccaguaagauugcc

SEQ ID NO: 190552 - RNA, 20 nt, Human
uuaaaaaggccuugguggca

SEQ ID NO: 190553 - RNA, 19 nt, Human
uucgccccggcccuaaucc

SEQ ID NO: 190554 - RNA, 21 nt, Human
uuggaaaaacuaaaaggcauc

SEQ ID NO: 190555 - RNA, 27 nt, Human
uuuuuuuuuuuuuuuuuacuuauuuaa

SEQ ID NO: 190556 - RNA, 27 nt, Human
aauaaagaaaagcaugcucugagagaa

SEQ ID NO: 190557 - RNA, 22 nt, Human
cgacuccuuggucugcaguccu

SEQ ID NO: 190558 - RNA, 22 nt, Human
uaaagaaaagcaugcucugaga

SEQ ID NO: 190559 - RNA, 20 nt, Human
aggcaggcagugggcaagcc

SEQ ID NO: 190560 - RNA, 18 nt, Human
aggccuccagucacccag

SEQ ID NO: 190561 - RNA, 19 nt, Human
agguugagcugcugggagu

SEQ ID NO: 190562 - RNA, 21 nt, Human
cauggguggcccuuucugcag

SEQ ID NO: 190563 - RNA, 22 nt, Human
ccuccccgggcugcuccucccg

SEQ ID NO: 190564 - RNA, 24 nt, Human
cuccucccgacuggaccaggguag

SEQ ID NO: 190565 - RNA, 20 nt, Human
ggagaaaagagcuucccugc

SEQ ID NO: 190566 - RNA, 23 nt, Human
ggaggcaggcagugggcaagccc

SEQ ID NO: 190567 - RNA, 18 nt, Human
ggggaggcaggcaguggg

SEQ ID NO: 190568 - RNA, 19 nt, Human
uccccgggcugcuccuccc

SEQ ID NO: 190569 - RNA, 20 nt, Human
ugaaguggcagggaaggaca

SEQ ID NO: 190570 - RNA, 21 nt, Human
ugcuccucccgacuggaccag

SEQ ID NO: 190571 - RNA, 22 nt, Human
ugcugggaguggaguaucaugg

SEQ ID NO: 190572 - RNA, 20 nt, Human
ugggaguggaguaucauggg

SEQ ID NO: 190573 - RNA, 22 nt, Human
caggggccucccccuccaacuc

SEQ ID NO: 190574 - RNA, 18 nt, Human
ccccuccaacucuauguc

SEQ ID NO: 190575 - RNA, 20 nt, Human
ccucaggggccucccccucc

SEQ ID NO: 190576 - RNA, 23 nt, Human
cuuuguaccagauccagcugcuc

SEQ ID NO: 190577 - RNA, 24 nt, Human
gcugccucaggggccucccccucc

SEQ ID NO: 190578 - RNA, 24 nt, Human
gcugcucaggcccuggaagggugg

SEQ ID NO: 190579 - RNA, 20 nt, Human
ggauggaagccugccagggu

SEQ ID NO: 190580 - RNA, 20 nt, Human
ggcccuggaaggguggugau

SEQ ID NO: 190581 - RNA, 19 nt, Human
gggccucccccuccaacuc

SEQ ID NO: 190582 - RNA, 23 nt, Human
uauguccgauugcuuuguaccag

SEQ ID NO: 190583 - RNA, 20 nt, Human
ucaggagcugggcugccuca

SEQ ID NO: 190584 - RNA, 18 nt, Human
uccaacucuauguccgau

SEQ ID NO: 190585 - RNA, 21 nt, Human
ugaagggcgaggugucccugg

SEQ ID NO: 190586 - RNA, 23 nt, Human
ugccucaggggccucccccucca

SEQ ID NO: 190587 - RNA, 20 nt, Human
uggaagccugccaggguggu

SEQ ID NO: 190588 - RNA, 24 nt, Human
uguagaaucuuuauucaggagcug

SEQ ID NO: 190589 - RNA, 22 nt, Human
aaacaagaaaacauggaaucua

SEQ ID NO: 190590 - RNA, 22 nt, Human
accacucauaugaauggacaca

SEQ ID NO: 190591 - RNA, 24 nt, Human
acggggaggcuccgagagugugug

SEQ ID NO: 190592 - RNA, 21 nt, Human
agcgacaacguuaagcgcguc

SEQ ID NO: 190593 - RNA, 20 nt, Human
agcggcggcggaggcggcgg

SEQ ID NO: 190594 - RNA, 21 nt, Human
aggcggcgguggcgggaccgg

SEQ ID NO: 190595 - RNA, 20 nt, Human
auauauguguauauauauga

SEQ ID NO: 190596 - RNA, 21 nt, Human
aucucuuuccaccccccauug

SEQ ID NO: 190597 - RNA, 22 nt, Human
aucuuauuucccucauccuccg

SEQ ID NO: 190598 - RNA, 19 nt, Human
caaagcaaugaaagagaca

SEQ ID NO: 190599 - RNA, 25 nt, Human
caacaaagcaaugaaagagacacaa

SEQ ID NO: 190600 - RNA, 21 nt, Human
cacaaucucuuuccacccccc

SEQ ID NO: 190601 - RNA, 26 nt, Human
cacucauaugaauggacacaucuuau

SEQ ID NO: 190602 - RNA, 27 nt, Human
cagcggucaccuccaccuuuuaguagg

SEQ ID NO: 190603 - RNA, 22 nt, Human
ccccggggccgcggagcccccc

SEQ ID NO: 190604 - RNA, 20 nt, Human
ccgccucagcgcccgccucg

SEQ ID NO: 190605 - RNA, 18 nt, Human
cgccgcgcucccgcucac

SEQ ID NO: 190606 - RNA, 19 nt, Human
cggcgccgccucagcgccc

SEQ ID NO: 190607 - RNA, 20 nt, Human
cgggcugggcugggggccgc

SEQ ID NO: 190608 - RNA, 20 nt, Human
cgucggggccgcggggcgcu

SEQ ID NO: 190609 - RNA, 20 nt, Human
gacacaucuuauuucccuca

SEQ ID NO: 190610 - RNA, 22 nt, Human
gagccccccgagccggcugcuc

SEQ ID NO: 190611 - RNA, 20 nt, Human
gccgggcugggcugggggcc

SEQ ID NO: 190612 - RNA, 19 nt, Human
gcgaggacgcgagcggcgg

SEQ ID NO: 190613 - RNA, 19 nt, Human
gcgcaucgccgugcgccgc

SEQ ID NO: 190614 - RNA, 23 nt, Human
gcggccgaggcgguggcggcgac

SEQ ID NO: 190615 - RNA, 18 nt, Human
gcggcggcgccgggcugg

SEQ ID NO: 190616 - RNA, 18 nt, Human
gcggcggcggaggcggcg

SEQ ID NO: 190617 - RNA, 23 nt, Human
gcggcggcggaggcggcgguggc

SEQ ID NO: 190618 - RNA, 18 nt, Human
gcgggaacuuggggcgcc

SEQ ID NO: 190619 - RNA, 21 nt, Human
ggaggcggcgguggcgggacc

SEQ ID NO: 190620 - RNA, 20 nt, Human
ggccgaggcgguggcggcga

SEQ ID NO: 190621 - RNA, 24 nt, Human
ggccgccgccgccucugcugcugc

SEQ ID NO: 190622 - RNA, 23 nt, Human
ggcggcggaggcggcgguggcgg

SEQ ID NO: 190623 - RNA, 22 nt, Human
ggcggcgguggcgggaccggca

SEQ ID NO: 190624 - RNA, 20 nt, Human
ggcugggcugggggccgccg

SEQ ID NO: 190625 - RNA, 20 nt, Human
gggcccgggcucggcggcgg

SEQ ID NO: 190626 - RNA, 19 nt, Human
gggcggggagggcugcggc

SEQ ID NO: 190627 - RNA, 18 nt, Human
gggcugggcugggggccg

SEQ ID NO: 190628 - RNA, 21 nt, Human
uauauguguauauauaugacc

SEQ ID NO: 190629 - RNA, 18 nt, Human
uauguguauauauaugac

SEQ ID NO: 190630 - RNA, 21 nt, Human
ucaacaaagcaaugaaagaga

SEQ ID NO: 190631 - RNA, 20 nt, Human
ucugcugcugcucgcgcggc

SEQ ID NO: 190632 - RNA, 20 nt, Human
ugauaaacaagaaaacaugg

SEQ ID NO: 190633 - RNA, 22 nt, Human
uggacacaucuuauuucccuca

SEQ ID NO: 190634 - RNA, 18 nt, Human
ugguuaguucugaaaggg

SEQ ID NO: 190635 - RNA, 21 nt, Human
uguaugugugauaaacaagaa

SEQ ID NO: 190636 - RNA, 24 nt, Human
uucugggcuugugcuuuuuggagg

SEQ ID NO: 190637 - RNA, 23 nt, Human
uuuccaccccccauuggugaccc

SEQ ID NO: 190638 - RNA, 19 nt, Human
uuuugcugcuuguucucaa

SEQ ID NO: 190639 - RNA, 21 nt, Human
aacugaguccuggucucugca

SEQ ID NO: 190640 - RNA, 22 nt, Human
aagauugugacuuggcuccuga

SEQ ID NO: 190641 - RNA, 20 nt, Human
aggcgacagggugcagacag

SEQ ID NO: 190642 - RNA, 22 nt, Human
aggcgcggagaccgcgguggcc

SEQ ID NO: 190643 - RNA, 20 nt, Human
aggcgcucccucccccacag

SEQ ID NO: 190644 - RNA, 23 nt, Human
agggcaggggaacugaguccugg

SEQ ID NO: 190645 - RNA, 18 nt, Human
aggggaacugaguccugg

SEQ ID NO: 190646 - RNA, 21 nt, Human
agguguccuccgccugggucu

SEQ ID NO: 190647 - RNA, 21 nt, Human
caaacacacuuuaauaaccau

SEQ ID NO: 190648 - RNA, 28 nt, Human
caaacagaagccacuaucaaucaacggg

SEQ ID NO: 190649 - RNA, 18 nt, Human
caaugagucaaaccccaa

SEQ ID NO: 190650 - RNA, 22 nt, Human
caccauggugagaucacgcccg

SEQ ID NO: 190651 - RNA, 18 nt, Human
caccucggggcugugcuu

SEQ ID NO: 190652 - RNA, 22 nt, Human
cacuaggcucagacuagggcag

SEQ ID NO: 190653 - RNA, 18 nt, Human
cagcucaggcgacagggu

SEQ ID NO: 190654 - RNA, 21 nt, Human
cagguguccuccgccuggguc

SEQ ID NO: 190655 - RNA, 25 nt, Human
cagguguccuccgccugggucuguu

SEQ ID NO: 190656 - RNA, 22 nt, Human
cccacagguguccuccgccugg

SEQ ID NO: 190657 - RNA, 21 nt, Human
ccccaaagacuuauaaauagg

SEQ ID NO: 190658 - RNA, 28 nt, Human
cccccugcucacgcuuucuccaagagcc

SEQ ID NO: 190659 - RNA, 21 nt, Human
cccugcugcgaucuccuccug

SEQ ID NO: 190660 - RNA, 18 nt, Human
ccggaucucuagcagcuc

SEQ ID NO: 190661 - RNA, 20 nt, Human
ccuccaggcgcucccucccc

SEQ ID NO: 190662 - RNA, 22 nt, Human
ccugcucacgcuuucuccaaga

SEQ ID NO: 190663 - RNA, 21 nt, Human
ccugcugcgaucuccuccuga

SEQ ID NO: 190664 - RNA, 23 nt, Human
cgacacuaucacaaacacacuuu

SEQ ID NO: 190665 - RNA, 21 nt, Human
cucccucccccacaggugucc

SEQ ID NO: 190666 - RNA, 21 nt, Human
cucugcacugaaaccugcuuc

SEQ ID NO: 190667 - RNA, 19 nt, Human
gccugggucuguuccaggc

SEQ ID NO: 190668 - RNA, 22 nt, Human
gcuuccggaucucuagcagcuc

SEQ ID NO: 190669 - RNA, 24 nt, Human
gcuuccggaucucuagcagcucca

SEQ ID NO: 190670 - RNA, 18 nt, Human
ggagaccgcgguggcccc

SEQ ID NO: 190671 - RNA, 20 nt, Human
ggugucucuuacccugcugc

SEQ ID NO: 190672 - RNA, 19 nt, Human
gugcagacaggcgcggagg

SEQ ID NO: 190673 - RNA, 24 nt, Human
uagggcaggggaacugaguccugg

SEQ ID NO: 190674 - RNA, 22 nt, Human
ucagacuagggcaggggaacug

SEQ ID NO: 190675 - RNA, 24 nt, Human
ucagaggcucuacacaucuucaag

SEQ ID NO: 190676 - RNA, 22 nt, Human
uccuccaggcgcucccuccccc

SEQ ID NO: 190677 - RNA, 18 nt, Human
ucgcaaauccgcaccaug

SEQ ID NO: 190678 - RNA, 18 nt, Human
ucgcugcucuagcgcagg

SEQ ID NO: 190679 - RNA, 19 nt, Human
ugacuacaauuaucugaua

SEQ ID NO: 190680 - RNA, 19 nt, Human
ugacucugagcugaguccc

SEQ ID NO: 190681 - RNA, 21 nt, Human
ugacucugagcugagucccuc

SEQ ID NO: 190682 - RNA, 23 nt, Human
ugagauugcaggugacuccauca

SEQ ID NO: 190683 - RNA, 24 nt, Human
ugcuuucagaggcucuacacaucu

SEQ ID NO: 190684 - RNA, 26 nt, Human
uuaagguuuuuuuuuuuuuucuugaa

SEQ ID NO: 190685 - RNA, 18 nt, Human
uuucuugaagagcugaag

SEQ ID NO: 190686 - RNA, 20 nt, Human
uuuuuuuuucuugaagagcu

SEQ ID NO: 190687 - RNA, 20 nt, Human
uuuuuuuuuucuugaagagc

SEQ ID NO: 190688 - RNA, 18 nt, Human
uuuuuuuuuuuuuucuug

SEQ ID NO: 190689 - RNA, 20 nt, Human
aauccauacauguuccugcc

SEQ ID NO: 190690 - RNA, 26 nt, Human
acaaaacacagaaaccagacggcaaa

SEQ ID NO: 190691 - RNA, 23 nt, Human
acaaaucauuccccagcuaccag

SEQ ID NO: 190692 - RNA, 25 nt, Human
acgcccagagaagaaccuugaagac

SEQ ID NO: 190693 - RNA, 21 nt, Human
agacagguguugauaaaucca

SEQ ID NO: 190694 - RNA, 21 nt, Human
agcuggaucuaucggcccagc

SEQ ID NO: 190695 - RNA, 18 nt, Human
aggauggcuuccauggag

SEQ ID NO: 190696 - RNA, 21 nt, Human
augacggcagcaguucuccug

SEQ ID NO: 190697 - RNA, 21 nt, Human
auggcugccgaagugggagac

SEQ ID NO: 190698 - RNA, 19 nt, Human
caaaacacagaaaccagac

SEQ ID NO: 190699 - RNA, 22 nt, Human
caaaacacagaaaccagacggc

SEQ ID NO: 190700 - RNA, 21 nt, Human
caccaaauuucucuaucacaa

SEQ ID NO: 190701 - RNA, 18 nt, Human
cagaauguugcaggccuc

SEQ ID NO: 190702 - RNA, 18 nt, Human
caucaggagcgucugcau

SEQ ID NO: 190703 - RNA, 20 nt, Human
ccagagaagaaccuugaaga

SEQ ID NO: 190704 - RNA, 19 nt, Human
ccaucuggcccugcacucc

SEQ ID NO: 190705 - RNA, 18 nt, Human
cccagaauguugcaggcc

SEQ ID NO: 190706 - RNA, 21 nt, Human
cggcagcaguucuccugucuu

SEQ ID NO: 190707 - RNA, 24 nt, Human
cggucggcugucuccauggagucc

SEQ ID NO: 190708 - RNA, 27 nt, Human
cucaugacggcagcaguucuccugucu

SEQ ID NO: 190709 - RNA, 21 nt, Human
cuccauggaguccccaucugg

SEQ ID NO: 190710 - RNA, 21 nt, Human
cuccuggggccacagggauug

SEQ ID NO: 190711 - RNA, 19 nt, Human
gaaaguauucuccaaagag

SEQ ID NO: 190712 - RNA, 18 nt, Human
gaaccuugaagacuaaug

SEQ ID NO: 190713 - RNA, 18 nt, Human
gagaggaaggaaaaguga

SEQ ID NO: 190714 - RNA, 21 nt, Human
gcaggccucuuggaugagcuu

SEQ ID NO: 190715 - RNA, 21 nt, Human
gcccagagaagaaccuugaag

SEQ ID NO: 190716 - RNA, 20 nt, Human
gccgcagcugcuccuggggc

SEQ ID NO: 190717 - RNA, 18 nt, Human
gggaaaauuaagcccagg

SEQ ID NO: 190718 - RNA, 20 nt, Human
uaaccuguuacaacaaaaca

SEQ ID NO: 190719 - RNA, 24 nt, Human
uagaacucuucagcuggaucuauc

SEQ ID NO: 190720 - RNA, 18 nt, Human
uagggaggcugaaggaca

SEQ ID NO: 190721 - RNA, 25 nt, Human
ucagcugcugacugucggcauagcu

SEQ ID NO: 190722 - RNA, 20 nt, Human
uccauacauguuccugccgc

SEQ ID NO: 190723 - RNA, 21 nt, Human
uccauacauguuccugccgca

SEQ ID NO: 190724 - RNA, 24 nt, Human
uccauggagacacccagaauguug

SEQ ID NO: 190725 - RNA, 25 nt, Human
uccauggagacacccagaauguugc

SEQ ID NO: 190726 - RNA, 23 nt, Human
uccauggaguccccaucuggccc

SEQ ID NO: 190727 - RNA, 20 nt, Human
ucccugagcacuugcuucug

SEQ ID NO: 190728 - RNA, 24 nt, Human
ucuccugucuucauuucccugagc

SEQ ID NO: 190729 - RNA, 22 nt, Human
ucugcugcguuucugucgggga

SEQ ID NO: 190730 - RNA, 19 nt, Human
ucuggcccugcacucccca

SEQ ID NO: 190731 - RNA, 19 nt, Human
ucuucauuucccugagcac

SEQ ID NO: 190732 - RNA, 28 nt, Human
ugaaaguauucuccaaagaguuucagga

SEQ ID NO: 190733 - RNA, 23 nt, Human
ugaaggacauuuaacguguuuca

SEQ ID NO: 190734 - RNA, 24 nt, Human
ugacggcagcaguucuccugucuu

SEQ ID NO: 190735 - RNA, 22 nt, Human
ugacugucggcauagcucauga

SEQ ID NO: 190736 - RNA, 18 nt, Human
ugagaggaaggaaaagug

SEQ ID NO: 190737 - RNA, 19 nt, Human
ugccgcagcugcuccuggg

SEQ ID NO: 190738 - RNA, 20 nt, Human
ugccgcagcugcuccugggg

SEQ ID NO: 190739 - RNA, 18 nt, Human
ugccucugaacaucggcu

SEQ ID NO: 190740 - RNA, 18 nt, Human
uggaucuaucggcccagc

SEQ ID NO: 190741 - RNA, 18 nt, Human
uguagaacucuucagcug

SEQ ID NO: 190742 - RNA, 20 nt, Human
uguuccugccgcagcugcuc

SEQ ID NO: 190743 - RNA, 22 nt, Human
uuaaccuguuacaacaaaacac

SEQ ID NO: 190744 - RNA, 20 nt, Human
uuacaacaaaacacagaaac

SEQ ID NO: 190745 - RNA, 27 nt, Human
uucagaauugaaaguauucuccaaaga

SEQ ID NO: 190746 - RNA, 19 nt, Human
uugaagacuaauguaugua

SEQ ID NO: 190747 - RNA, 20 nt, Human
uuuggaugccucugaacauc

SEQ ID NO: 190748 - RNA, 21 nt, Human
uuuucaauuuuucccauguuu

SEQ ID NO: 190749 - RNA, 21 nt, Human
uuuuuuggaugccucugaaca

SEQ ID NO: 190750 - RNA, 24 nt, Human
aaaaguaauagaaagcagagccgg

SEQ ID NO: 190751 - RNA, 22 nt, Human
aaacagauuugguaaacaugau

SEQ ID NO: 190752 - RNA, 18 nt, Human
aagaacugcuccugggcu

SEQ ID NO: 190753 - RNA, 23 nt, Human
aggcagaggcggcagcggcgggg

SEQ ID NO: 190754 - RNA, 20 nt, Human
aggcggcagcggcggggggg

SEQ ID NO: 190755 - RNA, 22 nt, Human
aguagauuuuaagacacaugaa

SEQ ID NO: 190756 - RNA, 18 nt, Human
auauacauauacauauau

SEQ ID NO: 190757 - RNA, 21 nt, Human
caaaagaaaaucuguauccau

SEQ ID NO: 190758 - RNA, 21 nt, Human
caacaugauauaaacuuuauu

SEQ ID NO: 190759 - RNA, 18 nt, Human
cacguguuaggagaaaac

SEQ ID NO: 190760 - RNA, 22 nt, Human
cccccacgcagagguacggccg

SEQ ID NO: 190761 - RNA, 20 nt, Human
ccuaaaaaguaauagaaagc

SEQ ID NO: 190762 - RNA, 22 nt, Human
ccuacuacuugcagaucaccau

SEQ ID NO: 190763 - RNA, 21 nt, Human
cuagucuguacuccucuucac

SEQ ID NO: 190764 - RNA, 21 nt, Human
cuccucuucaccccauaaucc

SEQ ID NO: 190765 - RNA, 22 nt, Human
cuguacuccucuucaccccaua

SEQ ID NO: 190766 - RNA, 24 nt, Human
uaaacagauuugguaaacaugaua

SEQ ID NO: 190767 - RNA, 18 nt, Human
uaaagccuaaaaaguaau

SEQ ID NO: 190768 - RNA, 20 nt, Human
uaaauauacacauggccaaa

SEQ ID NO: 190769 - RNA, 19 nt, Human
uaggagaaaacuggaaccu

SEQ ID NO: 190770 - RNA, 18 nt, Human
uagggaagaacugcuccu

SEQ ID NO: 190771 - RNA, 21 nt, Human
uauacacauggccaaacacug

SEQ ID NO: 190772 - RNA, 20 nt, Human
ucaaaagccaaacuuuagau

SEQ ID NO: 190773 - RNA, 18 nt, Human
uccugggcuuggcacgug

SEQ ID NO: 190774 - RNA, 20 nt, Human
ucuguauccauagggaagaa

SEQ ID NO: 190775 - RNA, 22 nt, Human
ugagagauauaucuagaagaaa

SEQ ID NO: 190776 - RNA, 18 nt, Human
uggacaaggacaaaagaa

SEQ ID NO: 190777 - RNA, 22 nt, Human
uggacaaggacaaaagaaaauc

SEQ ID NO: 190778 - RNA, 19 nt, Human
ugguaaacaugauauaaau

SEQ ID NO: 190779 - RNA, 19 nt, Human
aagccaguaaacaaaaacg

SEQ ID NO: 190780 - RNA, 26 nt, Human
aauuuaaaaaaucuuaugaauacaga

SEQ ID NO: 190781 - RNA, 24 nt, Human
agaacacacaucugauucaugcaa

SEQ ID NO: 190782 - RNA, 23 nt, Human
agaaggaaagccaguaaacaaaa

SEQ ID NO: 190783 - RNA, 19 nt, Human
agacagggcagccaagccu

SEQ ID NO: 190784 - RNA, 21 nt, Human
auaaaaucuucucaaguucua

SEQ ID NO: 190785 - RNA, 22 nt, Human
auaaaaucuucucaaguucuag

SEQ ID NO: 190786 - RNA, 25 nt, Human
auaagaauaaaaucuucucaaguuc

SEQ ID NO: 190787 - RNA, 21 nt, Human
cuagauagucuauucauuucu

SEQ ID NO: 190788 - RNA, 18 nt, Human
cucaggaaaauguaagcu

SEQ ID NO: 190789 - RNA, 22 nt, Human
cuucucaaguucuagauagucu

SEQ ID NO: 190790 - RNA, 21 nt, Human
gaacacacaucugauucaugc

SEQ ID NO: 190791 - RNA, 21 nt, Human
gaacacacaucugauucaugc

SEQ ID NO: 190792 - RNA, 21 nt, Human
gccaguaaacaaaaacgauaa

SEQ ID NO: 190793 - RNA, 21 nt, Human
uaaaaucuucucaaguucuag

SEQ ID NO: 190794 - RNA, 21 nt, Human
uagcuuuuauucuugccuaau

SEQ ID NO: 190795 - RNA, 19 nt, Human
uccauguuccagacagggc

SEQ ID NO: 190796 - RNA, 21 nt, Human
ucccuggaacaacugcuggaa

SEQ ID NO: 190797 - RNA, 20 nt, Human
ucgcugccucagugcagcug

SEQ ID NO: 190798 - RNA, 21 nt, Human
ugagaacacacaucugauuca

SEQ ID NO: 190799 - RNA, 22 nt, Human
ugcaagaaaguccauguuccag

SEQ ID NO: 190800 - RNA, 19 nt, Human
uguaagcuuucaggacacu

SEQ ID NO: 190801 - RNA, 18 nt, Human
aaauaccauggcacaugg

SEQ ID NO: 190802 - RNA, 19 nt, Human
aagguccagaagagcccga

SEQ ID NO: 190803 - RNA, 23 nt, Human
accccaccuccucaaaggggggu

SEQ ID NO: 190804 - RNA, 24 nt, Human
agaagagcccgaggaacacagccc

SEQ ID NO: 190805 - RNA, 21 nt, Human
agcaguucaccccaccuccuc

SEQ ID NO: 190806 - RNA, 22 nt, Human
agcaguucaccccaccuccuca

SEQ ID NO: 190807 - RNA, 24 nt, Human
caaaucccugccaaggagcaguuc

SEQ ID NO: 190808 - RNA, 23 nt, Human
cacccacccucccaggacccaaa

SEQ ID NO: 190809 - RNA, 19 nt, Human
caguucaccccaccuccuc

SEQ ID NO: 190810 - RNA, 22 nt, Human
cauggccugguauccacggugc

SEQ ID NO: 190811 - RNA, 21 nt, Human
ccagcaaugcagugucacaaa

SEQ ID NO: 190812 - RNA, 25 nt, Human
ccauggcacauggccugguauccac

SEQ ID NO: 190813 - RNA, 19 nt, Human
cccaggacccaaauaccau

SEQ ID NO: 190814 - RNA, 21 nt, Human
ccugguauccacggugcaagg

SEQ ID NO: 190815 - RNA, 21 nt, Human
ccuuuauuucacccacccucc

SEQ ID NO: 190816 - RNA, 20 nt, Human
gggaaguccggggcucgggc

SEQ ID NO: 190817 - RNA, 23 nt, Human
gggagcagggcccagacccuguc

SEQ ID NO: 190818 - RNA, 25 nt, Human
uauuucacccacccucccaggaccc

SEQ ID NO: 190819 - RNA, 20 nt, Human
ucacagggccggucccccug

SEQ ID NO: 190820 - RNA, 25 nt, Human
ucacccacccucccaggacccaaau

SEQ ID NO: 190821 - RNA, 22 nt, Human
uccacggugcaagguccagaag

SEQ ID NO: 190822 - RNA, 25 nt, Human
uccacggugcaagguccagaagagc

SEQ ID NO: 190823 - RNA, 20 nt, Human
uccggggccgggccucacuu

SEQ ID NO: 190824 - RNA, 18 nt, Human
ugccugggguccacugca

SEQ ID NO: 190825 - RNA, 19 nt, Human
ugccugggguccacugcag

SEQ ID NO: 190826 - RNA, 21 nt, Human
ugccugggguccacugcagau

SEQ ID NO: 190827 - RNA, 24 nt, Human
ugucacaaaucccugccaaggagc

SEQ ID NO: 190828 - RNA, 22 nt, Human
uucacccacccucccaggaccc

SEQ ID NO: 190829 - RNA, 24 nt, Human
aacaauuucuugaacugaagugag

SEQ ID NO: 190830 - RNA, 18 nt, Human
agagaagauucaaauccu

SEQ ID NO: 190831 - RNA, 23 nt, Human
agauacuggagaguuauucugcu

SEQ ID NO: 190832 - RNA, 21 nt, Human
cagaacaauuucuugaacuga

SEQ ID NO: 190833 - RNA, 21 nt, Human
caugcagaccacuggcauagc

SEQ ID NO: 190834 - RNA, 24 nt, Human
ccaggcagaacaauuucuugaacc

SEQ ID NO: 190835 - RNA, 24 nt, Human
cguaauuucuugcccaggcagaac

SEQ ID NO: 190836 - RNA, 27 nt, Human
cuaugcauucacaauccugucaaggac

SEQ ID NO: 190837 - RNA, 23 nt, Human
cucaaaugucuucaguuuacugc

SEQ ID NO: 190838 - RNA, 22 nt, Human
guaauuucuugcccaggcagaa

SEQ ID NO: 190839 - RNA, 18 nt, Human
ucaaauccuggagcccuu

SEQ ID NO: 190840 - RNA, 20 nt, Human
ugaagugagcuuucccauug

SEQ ID NO: 190841 - RNA, 18 nt, Human
ugccaaguaauucaccgc

SEQ ID NO: 190842 - RNA, 20 nt, Human
ugucaaggacuccagucugu

SEQ ID NO: 190843 - RNA, 23 nt, Human
uguccauuucuuugcauccucua

SEQ ID NO: 190844 - RNA, 20 nt, Human
uguuuugaaaaucacucugc

SEQ ID NO: 190845 - RNA, 25 nt, Human
uugaaaaucacucugcggaugcuga

SEQ ID NO: 190846 - RNA, 24 nt, Human
aaggggguggcucaaugcugcugc

SEQ ID NO: 190847 - RNA, 21 nt, Human
accccaggauguuccaaccac

SEQ ID NO: 190848 - RNA, 23 nt, Human
accccagguaaagagcagagcaa

SEQ ID NO: 190849 - RNA, 18 nt, Human
aggcugggucggggguca

SEQ ID NO: 190850 - RNA, 24 nt, Human
cagcaaccccagguaaagagcaga

SEQ ID NO: 190851 - RNA, 21 nt, Human
ccacagaggagugaaggcccc

SEQ ID NO: 190852 - RNA, 19 nt, Human
cccagggcggccgcagcca

SEQ ID NO: 190853 - RNA, 22 nt, Human
ccgcagccagcccggccagcgc

SEQ ID NO: 190854 - RNA, 19 nt, Human
cggcccagggcggccgcag

SEQ ID NO: 190855 - RNA, 26 nt, Human
gagaaagaaaaaccggccgagucuug

SEQ ID NO: 190856 - RNA, 20 nt, Human
gcggccgcagccagcccggc

SEQ ID NO: 190857 - RNA, 22 nt, Human
gggcggccgcagccagcccggc

SEQ ID NO: 190858 - RNA, 18 nt, Human
gggucuguccaucaggga

SEQ ID NO: 190859 - RNA, 22 nt, Human
gguaaagagcagagcaagccgu

SEQ ID NO: 190860 - RNA, 21 nt, Human
ggugccgagaacagacagcaa

SEQ ID NO: 190861 - RNA, 18 nt, Human
gguggggcccggcccagg

SEQ ID NO: 190862 - RNA, 24 nt, Human
guccaucagggagaaagaaaaacc

SEQ ID NO: 190863 - RNA, 22 nt, Human
guccucgacagcaaccccagga

SEQ ID NO: 190864 - RNA, 20 nt, Human
uccacaugcuggccaagggc

SEQ ID NO: 190865 - RNA, 19 nt, Human
uccagagugagagauaggg

SEQ ID NO: 190866 - RNA, 20 nt, Human
ucgccugccaaggggguggc

SEQ ID NO: 190867 - RNA, 24 nt, Human
ugaaggccccagcccuucacgaug

SEQ ID NO: 190868 - RNA, 24 nt, Human
ugaggaaaucgggcucuuccagag

SEQ ID NO: 190869 - RNA, 25 nt, Human
uggccaagggcacagagcugccgua

SEQ ID NO: 190870 - RNA, 21 nt, Human
uggggcccggcccagggcggc

SEQ ID NO: 190871 - RNA, 20 nt, Human
agaaaaucuuuuauuuccac

SEQ ID NO: 190872 - RNA, 23 nt, Human
aggaggcacuuguucugcugcug

SEQ ID NO: 190873 - RNA, 24 nt, Human
augaccacaaaacccaggccagaa

SEQ ID NO: 190874 - RNA, 20 nt, Human
ccacaaaacccaggccagaa

SEQ ID NO: 190875 - RNA, 21 nt, Human
cggggaggaagggacacgcag

SEQ ID NO: 190876 - RNA, 21 nt, Human
ggaagggacacgcagguggua

SEQ ID NO: 190877 - RNA, 19 nt, Human
uagaugaccacaaaaccca

SEQ ID NO: 190878 - RNA, 25 nt, Human
ucccugcuagaauagaugaccacaa

SEQ ID NO: 190879 - RNA, 22 nt, Human
ucggggaggaagggacacgcag

SEQ ID NO: 190880 - RNA, 27 nt, Human
ucggggaggaagggacacgcagguggu

SEQ ID NO: 190881 - RNA, 24 nt, Human
ucugccgugaacaguccaggaggc

SEQ ID NO: 190882 - RNA, 23 nt, Human
aaauauccagaacugaacaaaag

SEQ ID NO: 190883 - RNA, 21 nt, Human
aagcagaacacuguccauaua

SEQ ID NO: 190884 - RNA, 22 nt, Human
aagcauuuuagcaugcugccuu

SEQ ID NO: 190885 - RNA, 21 nt, Human
aaugaaaaccucuagcaacug

SEQ ID NO: 190886 - RNA, 22 nt, Human
accaauaagucuuuuauuuuuu

SEQ ID NO: 190887 - RNA, 23 nt, Human
acugauuuugaaccaggcucugc

SEQ ID NO: 190888 - RNA, 23 nt, Human
caagcuaaauaggauuaaaaagc

SEQ ID NO: 190889 - RNA, 22 nt, Human
cacugcagguaaccaucagaga

SEQ ID NO: 190890 - RNA, 21 nt, Human
cacugggcaauucuaaaauuc

SEQ ID NO: 190891 - RNA, 20 nt, Human
cacuguccauauaacagaau

SEQ ID NO: 190892 - RNA, 22 nt, Human
caggcggccggggcagccucag

SEQ ID NO: 190893 - RNA, 19 nt, Human
caggcucugcagauuuuaa

SEQ ID NO: 190894 - RNA, 21 nt, Human
caucuucagacacuaaggaca

SEQ ID NO: 190895 - RNA, 23 nt, Human
ccaacaagcaagcaaggaacaga

SEQ ID NO: 190896 - RNA, 22 nt, Human
ccgggugcgcaggcggccgggg

SEQ ID NO: 190897 - RNA, 18 nt, Human
cggccggggcagccucag

SEQ ID NO: 190898 - RNA, 25 nt, Human
cugcagguaaccaucagagaacaca

SEQ ID NO: 190899 - RNA, 21 nt, Human
gaauugcugcuucacaacuuu

SEQ ID NO: 190900 - RNA, 18 nt, Human
gagaauuucugaaacaag

SEQ ID NO: 190901 - RNA, 20 nt, Human
gcagaacacuguccauauaa

SEQ ID NO: 190902 - RNA, 22 nt, Human
uacacucacucacucuggcagc

SEQ ID NO: 190903 - RNA, 23 nt, Human
uacuguacacagaaaacugguga

SEQ ID NO: 190904 - RNA, 21 nt, Human
uaggauuaaaaagcagaacac

SEQ ID NO: 190905 - RNA, 21 nt, Human
uauccagaacugaacaaaagc

SEQ ID NO: 190906 - RNA, 23 nt, Human
uccauauaacagaauugcugcuu

SEQ ID NO: 190907 - RNA, 23 nt, Human
ucucaacccagcucuagauacua

SEQ ID NO: 190908 - RNA, 22 nt, Human
ugaaacaagcuaaauaggauua

SEQ ID NO: 190909 - RNA, 21 nt, Human
ugaaaggagaauuacacucac

SEQ ID NO: 190910 - RNA, 18 nt, Human
ugaaagguacacaaccaa

SEQ ID NO: 190911 - RNA, 24 nt, Human
ugaagggagugacugauuuugaac

SEQ ID NO: 190912 - RNA, 21 nt, Human
ugaguuucccuuacuuuguau

SEQ ID NO: 190913 - RNA, 19 nt, Human
ugccaugucugcuucugaa

SEQ ID NO: 190914 - RNA, 23 nt, Human
uuacuguacacagaaaacuggug

SEQ ID NO: 190915 - RNA, 23 nt, Human
uucagacacuaaggacaggaaau

SEQ ID NO: 190916 - RNA, 24 nt, Human
aaaaaaugccaccacuaaugccau

SEQ ID NO: 190917 - RNA, 20 nt, Human
aaaaagaaacagccccucca

SEQ ID NO: 190918 - RNA, 18 nt, Human
aaacagccccuccaucac

SEQ ID NO: 190919 - RNA, 18 nt, Human
aaccaggaagugaaucgg

SEQ ID NO: 190920 - RNA, 23 nt, Human
aagcagagagaccacagccgagg

SEQ ID NO: 190921 - RNA, 18 nt, Human
aagcccucguugcuucuc

SEQ ID NO: 190922 - RNA, 23 nt, Human
aagccgaugaccauccaacccug

SEQ ID NO: 190923 - RNA, 19 nt, Human
aagugaccucugaagaaag

SEQ ID NO: 190924 - RNA, 22 nt, Human
acagccccuccaucacccacau

SEQ ID NO: 190925 - RNA, 24 nt, Human
acagccgagguguuucucagauac

SEQ ID NO: 190926 - RNA, 20 nt, Human
acaggacauugucuaacuac

SEQ ID NO: 190927 - RNA, 25 nt, Human
accacccaacaggacauugucuaac

SEQ ID NO: 190928 - RNA, 23 nt, Human
accuuccaaacauuucaaaaguc

SEQ ID NO: 190929 - RNA, 21 nt, Human
acgacacucucgguggccccu

SEQ ID NO: 190930 - RNA, 22 nt, Human
acgcaacaggaccacccaacag

SEQ ID NO: 190931 - RNA, 22 nt, Human
agaacugagguagugaggguag

SEQ ID NO: 190932 - RNA, 20 nt, Human
agcagagagaccacagccga

SEQ ID NO: 190933 - RNA, 19 nt, Human
agcagagagcaucucuaga

SEQ ID NO: 190934 - RNA, 18 nt, Human
agcagaggcgccgucucc

SEQ ID NO: 190935 - RNA, 19 nt, Human
agcccagaaggcguuggug

SEQ ID NO: 190936 - RNA, 26 nt, Human
agccggcgcuggaggccccgagggca

SEQ ID NO: 190937 - RNA, 20 nt, Human
auaaaguuucccgucucaua

SEQ ID NO: 190938 - RNA, 21 nt, Human
auaaaguuucccgucucauaa

SEQ ID NO: 190939 - RNA, 21 nt, Human
aucuuucuucccaacguccac

SEQ ID NO: 190940 - RNA, 18 nt, Human
auuacugcucgcuuuugc

SEQ ID NO: 190941 - RNA, 21 nt, Human
caacagcguuucccuuugaaa

SEQ ID NO: 190942 - RNA, 20 nt, Human
cacacaacgcccaccagcug

SEQ ID NO: 190943 - RNA, 19 nt, Human
cacccacauuccccaagcc

SEQ ID NO: 190944 - RNA, 21 nt, Human
caccuguacaacacagaucca

SEQ ID NO: 190945 - RNA, 18 nt, Human
cacgaacccgcagagcag

SEQ ID NO: 190946 - RNA, 21 nt, Human
cacggaaaaagaaacagcccc

SEQ ID NO: 190947 - RNA, 22 nt, Human
cagaggagaucuccacgcaaca

SEQ ID NO: 190948 - RNA, 22 nt, Human
cauccaacccugacucaccuga

SEQ ID NO: 190949 - RNA, 23 nt, Human
cauuuuuaacgacacucucggug

SEQ ID NO: 190950 - RNA, 23 nt, Human
ccaaaggcuaaacugcuucaggu

SEQ ID NO: 190951 - RNA, 22 nt, Human
ccaagccaagagcagucaaggg

SEQ ID NO: 190952 - RNA, 24 nt, Human
ccacacggaaaaagaaacagcccc

SEQ ID NO: 190953 - RNA, 20 nt, Human
ccacccacacggaaaaagaa

SEQ ID NO: 190954 - RNA, 18 nt, Human
cccacacggaaaaagaaa

SEQ ID NO: 190955 - RNA, 21 nt, Human
cccacauuccccaagccaccu

SEQ ID NO: 190956 - RNA, 25 nt, Human
cccacggccuuccuaucccgucucu

SEQ ID NO: 190957 - RNA, 21 nt, Human
cccccgcgggcgcggguccuc

SEQ ID NO: 190958 - RNA, 22 nt, Human
cccggccccgccuccgcccagc

SEQ ID NO: 190959 - RNA, 22 nt, Human
ccgagggcagcgauuggccucu

SEQ ID NO: 190960 - RNA, 19 nt, Human
ccgccuccgcccagccccc

SEQ ID NO: 190961 - RNA, 24 nt, Human
ccgcgcucuggcugccucggccca

SEQ ID NO: 190962 - RNA, 25 nt, Human
ccgggagcaguggguggacuuccuc

SEQ ID NO: 190963 - RNA, 24 nt, Human
ccucccugcagccccugcccgcaa

SEQ ID NO: 190964 - RNA, 18 nt, Human
ccuccgcccagcccccgc

SEQ ID NO: 190965 - RNA, 22 nt, Human
ccucugaaagccgaugaccauc

SEQ ID NO: 190966 - RNA, 23 nt, Human
ccucugaaagccgaugaccaucc

SEQ ID NO: 190967 - RNA, 23 nt, Human
cgagcaucgcccuccgagacuga

SEQ ID NO: 190968 - RNA, 24 nt, Human
cgaugaccauccaacccugacuca

SEQ ID NO: 190969 - RNA, 23 nt, Human
cgcggaccugcagaccugcgccc

SEQ ID NO: 190970 - RNA, 18 nt, Human
cgcggguccucuccuccu

SEQ ID NO: 190971 - RNA, 18 nt, Human
cggaagcccggccccgcc

SEQ ID NO: 190972 - RNA, 22 nt, Human
cggcgcuggaggccccgagggc

SEQ ID NO: 190973 - RNA, 21 nt, Human
cgggcaagagcggagaccacc

SEQ ID NO: 190974 - RNA, 23 nt, Human
cuaaaaaguggccacgccucucc

SEQ ID NO: 190975 - RNA, 23 nt, Human
cuaagccacccacauuccccaag

SEQ ID NO: 190976 - RNA, 26 nt, Human
cuccaucacccacaucuuguacacaa

SEQ ID NO: 190977 - RNA, 24 nt, Human
cuccucccugcagccccugcccgc

SEQ ID NO: 190978 - RNA, 18 nt, Human
cuccuccucccugcagcc

SEQ ID NO: 190979 - RNA, 18 nt, Human
cugaaauauccuacgagc

SEQ ID NO: 190980 - RNA, 19 nt, Human
cugcgcccgggagcagugg

SEQ ID NO: 190981 - RNA, 21 nt, Human
gacagcuucaaggguagaagu

SEQ ID NO: 190982 - RNA, 20 nt, Human
gaccauccaacccugacuca

SEQ ID NO: 190983 - RNA, 20 nt, Human
gaccucugaagaaagcccag

SEQ ID NO: 190984 - RNA, 20 nt, Human
gagaccaagccaagagcagu

SEQ ID NO: 190985 - RNA, 20 nt, Human
gaguucucccacggccuucc

SEQ ID NO: 190986 - RNA, 18 nt, Human
gccucuuccgcgcucugg

SEQ ID NO: 190987 - RNA, 21 nt, Human
gcgccgucuccgggaauccgc

SEQ ID NO: 190988 - RNA, 20 nt, Human
gcggaccugcagaccugcgc

SEQ ID NO: 190989 - RNA, 18 nt, Human
ggaaaaagaaacagcccc

SEQ ID NO: 190990 - RNA, 25 nt, Human
ggccacgccucuccacguaaacaca

SEQ ID NO: 190991 - RNA, 18 nt, Human
ggccccgccuccgcccag

SEQ ID NO: 190992 - RNA, 20 nt, Human
ggcuuugaggagggcaguga

SEQ ID NO: 190993 - RNA, 18 nt, Human
gggcagugggcgcggacc

SEQ ID NO: 190994 - RNA, 19 nt, Human
gugaggguagagaccaagc

SEQ ID NO: 190995 - RNA, 22 nt, Human
uaaacacauccagcugacacag

SEQ ID NO: 190996 - RNA, 22 nt, Human
uaaagcagagagaccacagccg

SEQ ID NO: 190997 - RNA, 23 nt, Human
uagauccucuaagccacccacau

SEQ ID NO: 190998 - RNA, 21 nt, Human
uaggauuuaaagcagagagac

SEQ ID NO: 190999 - RNA, 22 nt, Human
ucacccacaucuuguacacaaa

SEQ ID NO: 191000 - RNA, 19 nt, Human
ucagaggugcuaaauaccu

SEQ ID NO: 191001 - RNA, 18 nt, Human
uccaaaggcuaaacugcu

SEQ ID NO: 191002 - RNA, 21 nt, Human
uccaaaugaaagucagucacc

SEQ ID NO: 191003 - RNA, 18 nt, Human
uccacgaguagaauuucu

SEQ ID NO: 191004 - RNA, 19 nt, Human
ucccugaacauucccgugg

SEQ ID NO: 191005 - RNA, 25 nt, Human
uccuccuuuauuacaacgaugccca

SEQ ID NO: 191006 - RNA, 25 nt, Human
uccucuauccaaaggcuaaacugcu

SEQ ID NO: 191007 - RNA, 21 nt, Human
uccuucgggcaagagcggaga

SEQ ID NO: 191008 - RNA, 20 nt, Human
ucuaaauguuuccuuagccc

SEQ ID NO: 191009 - RNA, 20 nt, Human
ucuguccggaagcccggccc

SEQ ID NO: 191010 - RNA, 27 nt, Human
ugaaauauccuacgagcaucgcccucc

SEQ ID NO: 191011 - RNA, 18 nt, Human
ugaccucugaagaaagcc

SEQ ID NO: 191012 - RNA, 26 nt, Human
ugagauacacagcauauugugccccc

SEQ ID NO: 191013 - RNA, 19 nt, Human
uggaaagagcugaguggaa

SEQ ID NO: 191014 - RNA, 20 nt, Human
uggaaagagcugaguggaaa

SEQ ID NO: 191015 - RNA, 19 nt, Human
uggaaugugcaugagaaau

SEQ ID NO: 191016 - RNA, 20 nt, Human
uggccccugacagcuaccuu

SEQ ID NO: 191017 - RNA, 20 nt, Human
ugggcgcggaccugcagacc

SEQ ID NO: 191018 - RNA, 23 nt, Human
uggguggacuuccucgccacgaa

SEQ ID NO: 191019 - RNA, 24 nt, Human
ugucuaacuacacacaacgcccac

SEQ ID NO: 191020 - RNA, 21 nt, Human
uguugucaagcagagagcauc

SEQ ID NO: 191021 - RNA, 19 nt, Human
uucaaggguagaagugacc

SEQ ID NO: 191022 - RNA, 22 nt, Human
uucccuggaaugugcaugagaa

SEQ ID NO: 191023 - RNA, 30 nt, Human
uucucgugaaauaaaguuucccgucucauu

SEQ ID NO: 191024 - RNA, 21 nt, Human
uucugguccucagagaagcug

SEQ ID NO: 191025 - RNA, 23 nt, Human
uuuaacgacacucucgguggccc

SEQ ID NO: 191026 - RNA, 19 nt, Human
uuuagagcaagcccucguu

SEQ ID NO: 191027 - RNA, 24 nt, Human
uuuugugugaggcacucaaaugga

SEQ ID NO: 191028 - RNA, 19 nt, Human
aaaaaaacuaccaaagaca

SEQ ID NO: 191029 - RNA, 21 nt, Human
aaaaagguuaaucucacccuc

SEQ ID NO: 191030 - RNA, 23 nt, Human
aaacaaacguagaugaauucaac

SEQ ID NO: 191031 - RNA, 22 nt, Human
aacaaugaaaccagacucaaaa

SEQ ID NO: 191032 - RNA, 21 nt, Human
aacacacaaaagcaagcauuc

SEQ ID NO: 191033 - RNA, 20 nt, Human
aacgccuuauagagggaaug

SEQ ID NO: 191034 - RNA, 22 nt, Human
aagaaaaucuaaacuucaucua

SEQ ID NO: 191035 - RNA, 24 nt, Human
aaguagucaauauaguacaaaaac

SEQ ID NO: 191036 - RNA, 23 nt, Human
aauguguguguuugugugugugu

SEQ ID NO: 191037 - RNA, 22 nt, Human
aggaggucaaagcaguuuguac

SEQ ID NO: 191038 - RNA, 28 nt, Human
aggcagaugucagugccaugcccuuccu

SEQ ID NO: 191039 - RNA, 24 nt, Human
auguguguguuugugugugugugu

SEQ ID NO: 191040 - RNA, 28 nt, Human
auuaugcuaacacacaaaagcaagcauu

SEQ ID NO: 191041 - RNA, 22 nt, Human
caaaagcaagcauucaaggaaa

SEQ ID NO: 191042 - RNA, 24 nt, Human
caaaagcaagcauucaaggaaaca

SEQ ID NO: 191043 - RNA, 19 nt, Human
cagaauucucaaacaauuc

SEQ ID NO: 191044 - RNA, 21 nt, Human
cagccuccagaacuaggaaga

SEQ ID NO: 191045 - RNA, 20 nt, Human
ccagaacuaggaagaaaaua

SEQ ID NO: 191046 - RNA, 31 nt, Human
ccaugcccuucgccuucccagccuccagaaa

SEQ ID NO: 191047 - RNA, 21 nt, Human
cccuucgccuucccagccucc

SEQ ID NO: 191048 - RNA, 23 nt, Human
ccuuauagagggaaugggcuucu

SEQ ID NO: 191049 - RNA, 24 nt, Human
cuuuuuuguuuuuuguuuuugcuu

SEQ ID NO: 191050 - RNA, 24 nt, Human
gagcagagauuuuuuuccccauca

SEQ ID NO: 191051 - RNA, 21 nt, Human
gcaaaaaaacuaccaaagaca

SEQ ID NO: 191052 - RNA, 21 nt, Human
gcccuucgccuucccagccuc

SEQ ID NO: 191053 - RNA, 18 nt, Human
ggaaacauuuguucuuua

SEQ ID NO: 191054 - RNA, 20 nt, Human
ggaaugggcuucugaugaaa

SEQ ID NO: 191055 - RNA, 24 nt, Human
ggcagaugucagugccaugcccuu

SEQ ID NO: 191056 - RNA, 21 nt, Human
ggucaugguaucuucacagga

SEQ ID NO: 191057 - RNA, 19 nt, Human
guaauauuauaucuugccu

SEQ ID NO: 191058 - RNA, 23 nt, Human
gucacgauuaggucaugaggacu

SEQ ID NO: 191059 - RNA, 20 nt, Human
guuuuuuguuuuugcuuuuu

SEQ ID NO: 191060 - RNA, 22 nt, Human
uaaaaauuaugcuaacacacaa

SEQ ID NO: 191061 - RNA, 21 nt, Human
uaaaguaucacaggaaggucu

SEQ ID NO: 191062 - RNA, 19 nt, Human
uaaaugauaaaugugugug

SEQ ID NO: 191063 - RNA, 26 nt, Human
uaaauucuguagcucugguuaagaag

SEQ ID NO: 191064 - RNA, 18 nt, Human
uacaaaaacacucuccga

SEQ ID NO: 191065 - RNA, 21 nt, Human
uagcaaaaagguuaaucucac

SEQ ID NO: 191066 - RNA, 23 nt, Human
uaggacuuuaguguccccuuaau

SEQ ID NO: 191067 - RNA, 22 nt, Human
uauaguaaccuauuaaaauauu

SEQ ID NO: 191068 - RNA, 18 nt, Human
uauaguaaucauucaugu

SEQ ID NO: 191069 - RNA, 21 nt, Human
ucacaggaaggucuuuuuugu

SEQ ID NO: 191070 - RNA, 18 nt, Human
ucauuuccucucucuuca

SEQ ID NO: 191071 - RNA, 20 nt, Human
uccacauuugguuuggugaa

SEQ ID NO: 191072 - RNA, 21 nt, Human
ugaaauuguacaacuuaggca

SEQ ID NO: 191073 - RNA, 22 nt, Human
ugacagcuguauagucacaguc

SEQ ID NO: 191074 - RNA, 21 nt, Human
ugagcugguuccugaaguuag

SEQ ID NO: 191075 - RNA, 24 nt, Human
ugcaaaaaaacuaccaaagacaac

SEQ ID NO: 191076 - RNA, 22 nt, Human
ugccauuguaacaguguuggga

SEQ ID NO: 191077 - RNA, 22 nt, Human
ugcccuucgccuucccagccuc

SEQ ID NO: 191078 - RNA, 21 nt, Human
ugccuugcugcuuuguuauca

SEQ ID NO: 191079 - RNA, 24 nt, Human
ugccuugcugcuuuguuaucaugc

SEQ ID NO: 191080 - RNA, 20 nt, Human
ugcuugccuugcugcuuugu

SEQ ID NO: 191081 - RNA, 18 nt, Human
ugcuuuguuaucaugcag

SEQ ID NO: 191082 - RNA, 20 nt, Human
uggaacucauuauaaugaaa

SEQ ID NO: 191083 - RNA, 21 nt, Human
uguccgguuugcacaucuugu

SEQ ID NO: 191084 - RNA, 19 nt, Human
uguguguguauggcauuuc

SEQ ID NO: 191085 - RNA, 23 nt, Human
uguguguguguauggcauuucug

SEQ ID NO: 191086 - RNA, 24 nt, Human
uguguguguguguauggcauuucu

SEQ ID NO: 191087 - RNA, 18 nt, Human
ugugugugugugugugug

SEQ ID NO: 191088 - RNA, 18 nt, Human
ugugugugugugugugug

SEQ ID NO: 191089 - RNA, 18 nt, Human
ugugugugugugugugug

SEQ ID NO: 191090 - RNA, 22 nt, Human
ugugugugugugugugugugag

SEQ ID NO: 191091 - RNA, 21 nt, Human
ugugugugugugugugugugu

SEQ ID NO: 191092 - RNA, 21 nt, Human
ugugugugugugugugugugu

SEQ ID NO: 191093 - RNA, 23 nt, Human
uguguguguguguguguguguaa

SEQ ID NO: 191094 - RNA, 22 nt, Human
uguguguguguguguguguguu

SEQ ID NO: 191095 - RNA, 18 nt, Human
uguguguguuugugugug

SEQ ID NO: 191096 - RNA, 31 nt, Human
uguguguguuugugugugugugugugugugg

SEQ ID NO: 191097 - RNA, 26 nt, Human
uguguguguuuguguguguguguguu

SEQ ID NO: 191098 - RNA, 22 nt, Human
uguuuuugcuuuuuaaguuuua

SEQ ID NO: 191099 - RNA, 23 nt, Human
uuaaaaaacauguaucaacagaa

SEQ ID NO: 191100 - RNA, 18 nt, Human
uuaauaagagaaacuggg

SEQ ID NO: 191101 - RNA, 25 nt, Human
uuaauauuaaacaaacguagaugaa

SEQ ID NO: 191102 - RNA, 23 nt, Human
uuaauuauucacuaaauucugua

SEQ ID NO: 191103 - RNA, 21 nt, Human
uucaaggaggucaaagcaguu

SEQ ID NO: 191104 - RNA, 23 nt, Human
uuccugaaguuagugcaaaaaaa

SEQ ID NO: 191105 - RNA, 18 nt, Human
uugccuguucagcaauga

SEQ ID NO: 191106 - RNA, 22 nt, Human
uuguuuuuuguuuuugcuuuuu

SEQ ID NO: 191107 - RNA, 24 nt, Human
uuucaguggaaugcaagcuucagu

SEQ ID NO: 191108 - RNA, 19 nt, Human
uuugcacaucuuguugaau

SEQ ID NO: 191109 - RNA, 24 nt, Human
uuugugugugugugugugugugug

SEQ ID NO: 191110 - RNA, 22 nt, Human
uuuguguucuuuccacauuugg

SEQ ID NO: 191111 - RNA, 25 nt, Human
uuuuccccaucauugagucacugga

SEQ ID NO: 191112 - RNA, 23 nt, Human
uuuuguuuuuuguuuuugcuuuu

SEQ ID NO: 191113 - RNA, 21 nt, Human
uuuuucacuugacugaagucu

SEQ ID NO: 191114 - RNA, 21 nt, Human
uuuuuguuuuuuguuuuugcu

SEQ ID NO: 191115 - RNA, 19 nt, Human
aaaaaaacuaccaaagaca

SEQ ID NO: 191116 - RNA, 18 nt, Human
acaggcagcaugcaggcc

SEQ ID NO: 191117 - RNA, 22 nt, Human
aggggcauaagcaaaggaauag

SEQ ID NO: 191118 - RNA, 18 nt, Human
gaggcaggagaacaggga

SEQ ID NO: 191119 - RNA, 21 nt, Human
gcaaaaaaacuaccaaagaca

SEQ ID NO: 191120 - RNA, 21 nt, Human
gugaggcaggagaacagggaa

SEQ ID NO: 191121 - RNA, 20 nt, Human
uagaaguagagaauacagua

SEQ ID NO: 191122 - RNA, 22 nt, Human
uaggauagccagggguaggggc

SEQ ID NO: 191123 - RNA, 23 nt, Human
uaggauagccagggguaggggca

SEQ ID NO: 191124 - RNA, 21 nt, Human
ugagcugguuccugaaguuag

SEQ ID NO: 191125 - RNA, 22 nt, Human
ugaggcaggagaacagggaauu

SEQ ID NO: 191126 - RNA, 24 nt, Human
ugcaaaaaaacuaccaaagacaac

SEQ ID NO: 191127 - RNA, 23 nt, Human
uuccugaaguuagugcaaaaaaa

SEQ ID NO: 191128 - RNA, 21 nt, Human
accccagcacccccucacccu

SEQ ID NO: 191129 - RNA, 26 nt, Human
agcacccccucacccucaacaaggac

SEQ ID NO: 191130 - RNA, 26 nt, Human
agcccccggguaccccagcacccccu

SEQ ID NO: 191131 - RNA, 25 nt, Human
aggccgggccaggccgggccggggg

SEQ ID NO: 191132 - RNA, 23 nt, Human
aggggugcugggcgauggggugu

SEQ ID NO: 191133 - RNA, 21 nt, Human
agguggcuaucucgggaagaa

SEQ ID NO: 191134 - RNA, 24 nt, Human
cacuccucccgcgcgggccgaggg

SEQ ID NO: 191135 - RNA, 27 nt, Human
cagcccccggguaccccagcacccccu

SEQ ID NO: 191136 - RNA, 24 nt, Human
ccagugagcugauguuguccugca

SEQ ID NO: 191137 - RNA, 19 nt, Human
cccagcacccccucacccu

SEQ ID NO: 191138 - RNA, 23 nt, Human
cccagcacccccucacccucaac

SEQ ID NO: 191139 - RNA, 24 nt, Human
cccagcacccccucacccucaaca

SEQ ID NO: 191140 - RNA, 22 nt, Human
cccagcccccggguaccccagc

SEQ ID NO: 191141 - RNA, 24 nt, Human
cccaugugcccagauuuucuccca

SEQ ID NO: 191142 - RNA, 24 nt, Human
cccugggucccugggaguggccuc

SEQ ID NO: 191143 - RNA, 21 nt, Human
ccucccugggcaggcaccuag

SEQ ID NO: 191144 - RNA, 22 nt, Human
ccucccugggcaggcaccuagu

SEQ ID NO: 191145 - RNA, 22 nt, Human
ccuccuccguuccucccugggc

SEQ ID NO: 191146 - RNA, 21 nt, Human
ccucugggguggccaucgccu

SEQ ID NO: 191147 - RNA, 18 nt, Human
ccugggcgucagcccggg

SEQ ID NO: 191148 - RNA, 22 nt, Human
cgcgcgggccgaggggaggggc

SEQ ID NO: 191149 - RNA, 21 nt, Human
cgcucccgggcuccugacccu

SEQ ID NO: 191150 - RNA, 21 nt, Human
cggcaccugggucacacuccu

SEQ ID NO: 191151 - RNA, 20 nt, Human
cggcgagaggaagcggcacc

SEQ ID NO: 191152 - RNA, 23 nt, Human
cucugggguggccaucgccuccc

SEQ ID NO: 191153 - RNA, 23 nt, Human
cuggaucaauggcagacaaaggu

SEQ ID NO: 191154 - RNA, 25 nt, Human
cugggcgaugggguguauuuuuccu

SEQ ID NO: 191155 - RNA, 22 nt, Human
cugggguggccaucgccucccu

SEQ ID NO: 191156 - RNA, 22 nt, Human
cuuccccagcccccggguaccc

SEQ ID NO: 191157 - RNA, 21 nt, Human
cuuguagcgcgaguccuccuc

SEQ ID NO: 191158 - RNA, 21 nt, Human
cuuuuagcucuggcaccugcu

SEQ ID NO: 191159 - RNA, 19 nt, Human
gagaugggggaggcauuca

SEQ ID NO: 191160 - RNA, 21 nt, Human
gaguccuccuccguuccuccc

SEQ ID NO: 191161 - RNA, 20 nt, Human
ggagaugggggaggcauuca

SEQ ID NO: 191162 - RNA, 23 nt, Human
ggccgggccaggccgggccgggg

SEQ ID NO: 191163 - RNA, 22 nt, Human
ggggagggucgcgcucccgggc

SEQ ID NO: 191164 - RNA, 20 nt, Human
guccuccuccguuccucccu

SEQ ID NO: 191165 - RNA, 19 nt, Human
guggagcaaaagguggccu

SEQ ID NO: 191166 - RNA, 18 nt, Human
guggcuaucucgggaaga

SEQ ID NO: 191167 - RNA, 25 nt, Human
uaccccagcacccccucacccucaa

SEQ ID NO: 191168 - RNA, 21 nt, Human
ucccugggcaggcaccuagug

SEQ ID NO: 191169 - RNA, 23 nt, Human
ucccugggucccugggaguggcc

SEQ ID NO: 191170 - RNA, 22 nt, Human
ucucccaccuccguggagcaaa

SEQ ID NO: 191171 - RNA, 21 nt, Human
ucuggugguaucagcaggggu

SEQ ID NO: 191172 - RNA, 22 nt, Human
ugacuuauuuccuugcuucccc

SEQ ID NO: 191173 - RNA, 19 nt, Human
ugagcugauguuguccugc

SEQ ID NO: 191174 - RNA, 23 nt, Human
uggagaugggggaggcauucagg

SEQ ID NO: 191175 - RNA, 21 nt, Human
uggaucaauggcagacaaagg

SEQ ID NO: 191176 - RNA, 23 nt, Human
uggaucaauggcagacaaaggua

SEQ ID NO: 191177 - RNA, 24 nt, Human
ugggcgaugggguguauuuuuccu

SEQ ID NO: 191178 - RNA, 22 nt, Human
ugggggaggcauucagggaagu

SEQ ID NO: 191179 - RNA, 21 nt, Human
uuccccagcccccggguaccc

SEQ ID NO: 191180 - RNA, 24 nt, Human
uuccugauggagaugggggaggca

SEQ ID NO: 191181 - RNA, 18 nt, Human
uucucccaccuccgugga

SEQ ID NO: 191182 - RNA, 19 nt, Human
aaaaaaacuaccaaagaca

SEQ ID NO: 191183 - RNA, 22 nt, Human
aggcaagaucaggcagcaugca

SEQ ID NO: 191184 - RNA, 24 nt, Human
caagaucaggcagcaugcaggcca

SEQ ID NO: 191185 - RNA, 23 nt, Human
cuccugaaguuagugcaaaaaaa

SEQ ID NO: 191186 - RNA, 21 nt, Human
gaauacaguaauaggcaggag

SEQ ID NO: 191187 - RNA, 21 nt, Human
gcaaaaaaacuaccaaagaca

SEQ ID NO: 191188 - RNA, 19 nt, Human
uacaguaauaggcaggaga

SEQ ID NO: 191189 - RNA, 21 nt, Human
uacaguaauaggcaggagaac

SEQ ID NO: 191190 - RNA, 24 nt, Human
ugcaaaaaaacuaccaaagacaac

SEQ ID NO: 191191 - RNA, 22 nt, Human
uggggcauaagcaaaggaauag

SEQ ID NO: 191192 - RNA, 21 nt, Human
uuagaaguagagaauacagua

SEQ ID NO: 191193 - RNA, 23 nt, Human
uuuuauuuuuauuuagaaguaga

SEQ ID NO: 191194 - RNA, 25 nt, Human
aaaccucuggcaccaccgcagagua

SEQ ID NO: 191195 - RNA, 18 nt, Human
aaagccccagaccugaaa

SEQ ID NO: 191196 - RNA, 19 nt, Human
aaucacaccccuccugccc

SEQ ID NO: 191197 - RNA, 22 nt, Human
acagcacagcacacaugagggg

SEQ ID NO: 191198 - RNA, 19 nt, Human
accccggaggugucuaggg

SEQ ID NO: 191199 - RNA, 22 nt, Human
accccggaggugucuagggaau

SEQ ID NO: 191200 - RNA, 25 nt, Human
accccuccugcccuccccucucaac

SEQ ID NO: 191201 - RNA, 22 nt, Human
agaaagacaggaaggcaucugg

SEQ ID NO: 191202 - RNA, 22 nt, Human
agaaaggaagaguaggaucugg

SEQ ID NO: 191203 - RNA, 19 nt, Human
agaacccagugaccucagu

SEQ ID NO: 191204 - RNA, 22 nt, Human
agagcaguugggaauaagccag

SEQ ID NO: 191205 - RNA, 24 nt, Human
agcagagaggcaggacaggcgggg

SEQ ID NO: 191206 - RNA, 18 nt, Human
agccagguuagggguggg

SEQ ID NO: 191207 - RNA, 25 nt, Human
aggaaggcaucuggacugagacugu

SEQ ID NO: 191208 - RNA, 26 nt, Human
aggcagagccuggcucugacauggug

SEQ ID NO: 191209 - RNA, 18 nt, Human
aggcaggacaggcgggga

SEQ ID NO: 191210 - RNA, 21 nt, Human
aggcagggcacaguuugggga

SEQ ID NO: 191211 - RNA, 18 nt, Human
agggccagaaagacagga

SEQ ID NO: 191212 - RNA, 22 nt, Human
agggugcggggccgaguagcug

SEQ ID NO: 191213 - RNA, 18 nt, Human
aggugcaggacgcucggc

SEQ ID NO: 191214 - RNA, 24 nt, Human
agugcagaucuggagcggggguuu

SEQ ID NO: 191215 - RNA, 19 nt, Human
cacaccccuccugcccucc

SEQ ID NO: 191216 - RNA, 21 nt, Human
caccaaagcugaaggcagggc

SEQ ID NO: 191217 - RNA, 19 nt, Human
caccccuccugcccucccc

SEQ ID NO: 191218 - RNA, 23 nt, Human
cacuccaaucacaccccuccugc

SEQ ID NO: 191219 - RNA, 18 nt, Human
caggaaggggggcuccgg

SEQ ID NO: 191220 - RNA, 20 nt, Human
caggacaggcggggagugug

SEQ ID NO: 191221 - RNA, 23 nt, Human
caucccucccagagccccacuuc

SEQ ID NO: 191222 - RNA, 23 nt, Human
ccaagcggugcagacacagcaca

SEQ ID NO: 191223 - RNA, 20 nt, Human
ccaaucacaccccuccugcc

SEQ ID NO: 191224 - RNA, 18 nt, Human
ccacagaguugcgcuugc

SEQ ID NO: 191225 - RNA, 26 nt, Human
ccagcggcccguuccggggauccucc

SEQ ID NO: 191226 - RNA, 22 nt, Human
ccaugccagguuuccuaaaacc

SEQ ID NO: 191227 - RNA, 24 nt, Human
ccccuccugcccuccccucucaac

SEQ ID NO: 191228 - RNA, 21 nt, Human
cccuccugcccuccccucuca

SEQ ID NO: 191229 - RNA, 21 nt, Human
cccucucaacugcaaaccaag

SEQ ID NO: 191230 - RNA, 21 nt, Human
cccuuucaccaaagcugaagg

SEQ ID NO: 191231 - RNA, 21 nt, Human
ccuccaggcagagccuggcuc

SEQ ID NO: 191232 - RNA, 26 nt, Human
ccuccccucucaacugcaaaccaagc

SEQ ID NO: 191233 - RNA, 27 nt, Human
ccuccugcccuccccucucaacugcaa

SEQ ID NO: 191234 - RNA, 21 nt, Human
cggggugcugagugagcugga

SEQ ID NO: 191235 - RNA, 21 nt, Human
cuaaaaccucuggcaccaccg

SEQ ID NO: 191236 - RNA, 23 nt, Human
cuaaaaccucuggcaccaccgca

SEQ ID NO: 191237 - RNA, 22 nt, Human
cuccugcccuccccucucaacu

SEQ ID NO: 191238 - RNA, 21 nt, Human
cugaaagugccccggcucugg

SEQ ID NO: 191239 - RNA, 22 nt, Human
cuggagccagagaaaggcacgg

SEQ ID NO: 191240 - RNA, 24 nt, Human
cuggaggggguggaguguuuggcg

SEQ ID NO: 191241 - RNA, 21 nt, Human
cuggagugcaggaacuuggaa

SEQ ID NO: 191242 - RNA, 20 nt, Human
cuucuggaguugaaauggag

SEQ ID NO: 191243 - RNA, 22 nt, Human
gaacaucccucccagagcccca

SEQ ID NO: 191244 - RNA, 19 nt, Human
gacugggugggggcacugc

SEQ ID NO: 191245 - RNA, 18 nt, Human
gacuguguguccuccaga

SEQ ID NO: 191246 - RNA, 22 nt, Human
gacuguguguccuccagaagga

SEQ ID NO: 191247 - RNA, 19 nt, Human
gagccagagaaaggcacgg

SEQ ID NO: 191248 - RNA, 25 nt, Human
gagggcuagaacaucccucccagag

SEQ ID NO: 191249 - RNA, 20 nt, Human
gaggugcaggacgcucggcc

SEQ ID NO: 191250 - RNA, 24 nt, Human
gaugacaggagccggauggaggga

SEQ ID NO: 191251 - RNA, 20 nt, Human
gauucuggagugcaggaacu

SEQ ID NO: 191252 - RNA, 23 nt, Human
gcagagccuggcucugacaugcc

SEQ ID NO: 191253 - RNA, 20 nt, Human
gcaggaacuuggaaacugga

SEQ ID NO: 191254 - RNA, 21 nt, Human
gcaggaaggggggcuccgggg

SEQ ID NO: 191255 - RNA, 20 nt, Human
gcauccucucucuggagcag

SEQ ID NO: 191256 - RNA, 23 nt, Human
gcggugcagacacagcacagcac

SEQ ID NO: 191257 - RNA, 19 nt, Human
gcucugacaugccagggag

SEQ ID NO: 191258 - RNA, 19 nt, Human
ggaagcuugcaagacgcuc

SEQ ID NO: 191259 - RNA, 24 nt, Human
ggccagaaagacaggaaggcaucu

SEQ ID NO: 191260 - RNA, 21 nt, Human
ggcucugacaugccagggagg

SEQ ID NO: 191261 - RNA, 21 nt, Human
ggcucuggacuugaucgcccc

SEQ ID NO: 191262 - RNA, 20 nt, Human
gggaagacagccagcucugu

SEQ ID NO: 191263 - RNA, 21 nt, Human
gggcuagaacaucccucccag

SEQ ID NO: 191264 - RNA, 19 nt, Human
ggggaagacagccagcucu

SEQ ID NO: 191265 - RNA, 18 nt, Human
gggggcucuaaaagcccc

SEQ ID NO: 191266 - RNA, 18 nt, Human
uaaaaccucuggcaccac

SEQ ID NO: 191267 - RNA, 31 nt, Human
uaccuucaaacucugaaagugccccggcucu

SEQ ID NO: 191268 - RNA, 18 nt, Human
uagaagccaggaccuaga

SEQ ID NO: 191269 - RNA, 19 nt, Human
ucacaccccuccugcccuc

SEQ ID NO: 191270 - RNA, 21 nt, Human
ucaguucuggaucaugggaaa

SEQ ID NO: 191271 - RNA, 19 nt, Human
uccagaaggaaugagcagc

SEQ ID NO: 191272 - RNA, 25 nt, Human
uccugcccuccccucucaacugcaa

SEQ ID NO: 191273 - RNA, 26 nt, Human
ucuaaaagccccagaccugaaagcac

SEQ ID NO: 191274 - RNA, 25 nt, Human
ucucaacugcaaaccaagcggugca

SEQ ID NO: 191275 - RNA, 21 nt, Human
ucuccagguagggaccccgga

SEQ ID NO: 191276 - RNA, 25 nt, Human
ucuccagguagggaccccggaggug

SEQ ID NO: 191277 - RNA, 22 nt, Human
ucuccggacacacuccaaucac

SEQ ID NO: 191278 - RNA, 24 nt, Human
ucuccggacacacuccaaucacac

SEQ ID NO: 191279 - RNA, 22 nt, Human
ucugaaagugccccggcucugg

SEQ ID NO: 191280 - RNA, 25 nt, Human
ucuggagugcaggaacuuggaaacu

SEQ ID NO: 191281 - RNA, 23 nt, Human
ugaaagugccccggcucuggacu

SEQ ID NO: 191282 - RNA, 21 nt, Human
ugaaauggaggaccaucugcu

SEQ ID NO: 191283 - RNA, 18 nt, Human
ugccccggcucuggacuu

SEQ ID NO: 191284 - RNA, 24 nt, Human
ugcccuccccucucaacugcaaac

SEQ ID NO: 191285 - RNA, 18 nt, Human
ugcugagugagcuggagg

SEQ ID NO: 191286 - RNA, 20 nt, Human
uggagccagagaaaggcacg

SEQ ID NO: 191287 - RNA, 23 nt, Human
ugggaagcgguccaggcccaggg

SEQ ID NO: 191288 - RNA, 24 nt, Human
ugggcagagcaguugggaauaagc

SEQ ID NO: 191289 - RNA, 18 nt, Human
ugggggcacugcggggcc

SEQ ID NO: 191290 - RNA, 22 nt, Human
uggugcccgacgggaagcuugc

SEQ ID NO: 191291 - RNA, 20 nt, Human
uguaugcuguagaauuugua

SEQ ID NO: 191292 - RNA, 23 nt, Human
uguccacagaguugcgcuugcug

SEQ ID NO: 191293 - RNA, 19 nt, Human
uucccuggagggagaucuc

SEQ ID NO: 191294 - RNA, 23 nt, Human
uuccuaaaaccucuggcaccacc

SEQ ID NO: 191295 - RNA, 21 nt, Human
uucuggaucaugggaaaggga

SEQ ID NO: 191296 - RNA, 25 nt, Human
uugcugccgcugguggaggaggugc

SEQ ID NO: 191297 - RNA, 19 nt, Human
uuggcggacuggguggggg

SEQ ID NO: 191298 - RNA, 27 nt, Human
uuuucaucucaucuccggacacacucc

SEQ ID NO: 191299 - RNA, 23 nt, Human
cgggggcuuaguuugcuuccugu

SEQ ID NO: 191300 - RNA, 20 nt, Human
cuucucaggaaggcugcccu

SEQ ID NO: 191301 - RNA, 22 nt, Human
uaaaucuggacuuggcuccaga

SEQ ID NO: 191302 - RNA, 19 nt, Human
ucucaggaaggcugcccug

SEQ ID NO: 191303 - RNA, 22 nt, Human
ucucaggaaggcugcccugguu

SEQ ID NO: 191304 - RNA, 20 nt, Human
cacccaccccacugcacccc

SEQ ID NO: 191305 - RNA, 24 nt, Human
cacccaccccacugcaccccugga

SEQ ID NO: 191306 - RNA, 19 nt, Human
cacccguccucacccaccc

SEQ ID NO: 191307 - RNA, 22 nt, Human
cccaccccacugcaccccugga

SEQ ID NO: 191308 - RNA, 24 nt, Human
ccucccugucccucccacccgucc

SEQ ID NO: 191309 - RNA, 18 nt, Human
gacagcgagggggucccc

SEQ ID NO: 191310 - RNA, 19 nt, Human
gagacccagugugggugcu

SEQ ID NO: 191311 - RNA, 26 nt, Human
gcuggccccggccccgagccgguucc

SEQ ID NO: 191312 - RNA, 23 nt, Human
ggaaggguccuguggagacagcg

SEQ ID NO: 191313 - RNA, 20 nt, Human
gguccuguggagacagcgag

SEQ ID NO: 191314 - RNA, 23 nt, Human
uauuggucccucccugucccucc

SEQ ID NO: 191315 - RNA, 19 nt, Human
ucccugucccucccacccg

SEQ ID NO: 191316 - RNA, 18 nt, Human
uccuguggagacagcgag

SEQ ID NO: 191317 - RNA, 20 nt, Human
ugauuuauuggucccucccu

SEQ ID NO: 191318 - RNA, 21 nt, Human
ugggugcuggccccggccccg

SEQ ID NO: 191319 - RNA, 19 nt, Human
uggucccucccugucccuc

SEQ ID NO: 191320 - RNA, 20 nt, Human
uggucccucccugucccucc

SEQ ID NO: 191321 - RNA, 20 nt, Human
ugucccucccacccguccuc

SEQ ID NO: 191322 - RNA, 22 nt, Human
uuaugauuuauuggucccuccc

SEQ ID NO: 191323 - RNA, 20 nt, Human
aaaacacacaagcccccccc

SEQ ID NO: 191324 - RNA, 24 nt, Human
aaaaggagaaaauuauuuacagaa

SEQ ID NO: 191325 - RNA, 25 nt, Human
aaacaagccaacaaaacacacaagc

SEQ ID NO: 191326 - RNA, 19 nt, Human
aaacacacaagcccccccc

SEQ ID NO: 191327 - RNA, 24 nt, Human
aaacuaaguacuagcccuagauau

SEQ ID NO: 191328 - RNA, 22 nt, Human
aaagacagcaaaauuuucccgg

SEQ ID NO: 191329 - RNA, 18 nt, Human
aacaaaacacacaagccc

SEQ ID NO: 191330 - RNA, 22 nt, Human
aacaaaacacacaagccccccc

SEQ ID NO: 191331 - RNA, 19 nt, Human
aacuacuuauaauaaagga

SEQ ID NO: 191332 - RNA, 25 nt, Human
aagaaaauagggaggccgaaagggc

SEQ ID NO: 191333 - RNA, 19 nt, Human
aagacagcaaaauuuuccc

SEQ ID NO: 191334 - RNA, 21 nt, Human
aagcaaagacaccucuuguac

SEQ ID NO: 191335 - RNA, 19 nt, Human
aaggaaaacucacucaccc

SEQ ID NO: 191336 - RNA, 20 nt, Human
aaggaaacuggguuugggcc

SEQ ID NO: 191337 - RNA, 19 nt, Human
acaaaacacacaagccccc

SEQ ID NO: 191338 - RNA, 22 nt, Human
acaaaacacacaagcccccccc

SEQ ID NO: 191339 - RNA, 24 nt, Human
acagcaaaauuuucccggcacaag

SEQ ID NO: 191340 - RNA, 18 nt, Human
accccacuccccuucccu

SEQ ID NO: 191341 - RNA, 22 nt, Human
accucuuguacaggaggaacaa

SEQ ID NO: 191342 - RNA, 25 nt, Human
acugcccgcccacucccccuccccc

SEQ ID NO: 191343 - RNA, 22 nt, Human
acugccuugugucuucucccca

SEQ ID NO: 191344 - RNA, 23 nt, Human
agaacaaacugccuugugucuuc

SEQ ID NO: 191345 - RNA, 21 nt, Human
agaacagaagggggcaaaagg

SEQ ID NO: 191346 - RNA, 23 nt, Human
agaacagaagggggcaaaaggug

SEQ ID NO: 191347 - RNA, 19 nt, Human
agaaggaaacuggguuugg

SEQ ID NO: 191348 - RNA, 22 nt, Human
agccaacaaaacacacaagccc

SEQ ID NO: 191349 - RNA, 19 nt, Human
agccggcuuugcgaggccc

SEQ ID NO: 191350 - RNA, 25 nt, Human
agccggcuuugcgaggcccagcccc

SEQ ID NO: 191351 - RNA, 22 nt, Human
aggcgccuuccaaagggccagc

SEQ ID NO: 191352 - RNA, 19 nt, Human
auccaucgauugcguggaa

SEQ ID NO: 191353 - RNA, 23 nt, Human
aucgauugcguggaaaaaccuag

SEQ ID NO: 191354 - RNA, 21 nt, Human
auggcaaacaagccaacaaaa

SEQ ID NO: 191355 - RNA, 23 nt, Human
auggcaaacaagccaacaaaaca

SEQ ID NO: 191356 - RNA, 22 nt, Human
auuuacagaaaauaggagacag

SEQ ID NO: 191357 - RNA, 21 nt, Human
caaaacacacaagcccccccc

SEQ ID NO: 191358 - RNA, 19 nt, Human
caaacaagccaacaaaaca

SEQ ID NO: 191359 - RNA, 24 nt, Human
caaacaagccaacaaaacacacaa

SEQ ID NO: 191360 - RNA, 21 nt, Human
caaagacagcaaaauuuuccc

SEQ ID NO: 191361 - RNA, 24 nt, Human
caacaaaacacacaagcccccccc

SEQ ID NO: 191362 - RNA, 21 nt, Human
caagcaaagacaccucuugua

SEQ ID NO: 191363 - RNA, 20 nt, Human
caagccaacaaaacacacaa

SEQ ID NO: 191364 - RNA, 24 nt, Human
caagccaacaaaacacacaagccc

SEQ ID NO: 191365 - RNA, 19 nt, Human
caccaaaccaagcaaagac

SEQ ID NO: 191366 - RNA, 24 nt, Human
caccucucuccugcuggccaaagg

SEQ ID NO: 191367 - RNA, 19 nt, Human
cacucccccucccccuccc

SEQ ID NO: 191368 - RNA, 24 nt, Human
cagaacaaacugccuugugucuuc

SEQ ID NO: 191369 - RNA, 20 nt, Human
cagaagggggcaaaaggugg

SEQ ID NO: 191370 - RNA, 22 nt, Human
cagaagggggcaaaagguggug

SEQ ID NO: 191371 - RNA, 18 nt, Human
cagaucuagcucuguaaa

SEQ ID NO: 191372 - RNA, 22 nt, Human
cagccccaccaaaccaagcaaa

SEQ ID NO: 191373 - RNA, 21 nt, Human
caggaggaacaaaaauccaga

SEQ ID NO: 191374 - RNA, 22 nt, Human
caucaagagagaaaaaaggaga

SEQ ID NO: 191375 - RNA, 18 nt, Human
ccaaaccaagcaaagaca

SEQ ID NO: 191376 - RNA, 18 nt, Human
ccaacaaaacacacaagc

SEQ ID NO: 191377 - RNA, 20 nt, Human
ccaacaaaacacacaagccc

SEQ ID NO: 191378 - RNA, 21 nt, Human
ccaacaaaacacacaagcccc

SEQ ID NO: 191379 - RNA, 23 nt, Human
ccaacaaaacacacaagcccccc

SEQ ID NO: 191380 - RNA, 21 nt, Human
ccacucccccucccccucccg

SEQ ID NO: 191381 - RNA, 20 nt, Human
ccagccccgccggucugucg

SEQ ID NO: 191382 - RNA, 21 nt, Human
ccccaccaaaccaagcaaaga

SEQ ID NO: 191383 - RNA, 26 nt, Human
ccccaccaaaccaagcaaagacaccu

SEQ ID NO: 191384 - RNA, 30 nt, Human
ccccaccaaaccaagcaaagacaccucuuu

SEQ ID NO: 191385 - RNA, 18 nt, Human
cccgcaaaucccuaaccc

SEQ ID NO: 191386 - RNA, 20 nt, Human
ccucucuccugcuggccaaa

SEQ ID NO: 191387 - RNA, 25 nt, Human
ccucuuguacaggaggaacaaaaau

SEQ ID NO: 191388 - RNA, 21 nt, Human
ccugagccccugacuaccggg

SEQ ID NO: 191389 - RNA, 21 nt, Human
cuaacaaaaaugagaaggaaa

SEQ ID NO: 191390 - RNA, 22 nt, Human
cuaccgggccagucuggagugc

SEQ ID NO: 191391 - RNA, 19 nt, Human
cucaaggaaaacucacuca

SEQ ID NO: 191392 - RNA, 18 nt, Human
cucccuuuucccagcucc

SEQ ID NO: 191393 - RNA, 18 nt, Human
cucgccgagccggcuuug

SEQ ID NO: 191394 - RNA, 21 nt, Human
cucggcaccgggcucugccuc

SEQ ID NO: 191395 - RNA, 21 nt, Human
cugaagccacaaagauccccc

SEQ ID NO: 191396 - RNA, 26 nt, Human
cugaagccacaaagaucccccaaugg

SEQ ID NO: 191397 - RNA, 18 nt, Human
cugagccccugacuaccg

SEQ ID NO: 191398 - RNA, 21 nt, Human
cugagccccugacuaccgggc

SEQ ID NO: 191399 - RNA, 18 nt, Human
cugcccgcccacuccccc

SEQ ID NO: 191400 - RNA, 22 nt, Human
cugccucccuuuucccagcucc

SEQ ID NO: 191401 - RNA, 22 nt, Human
cugcucccuaccaccucucucc

SEQ ID NO: 191402 - RNA, 22 nt, Human
cuuggcugacuccccacccuuc

SEQ ID NO: 191403 - RNA, 21 nt, Human
gaaaauaggagacaggaggga

SEQ ID NO: 191404 - RNA, 20 nt, Human
gaccgcggugaggacagggc

SEQ ID NO: 191405 - RNA, 22 nt, Human
gagccccugacuaccgggccag

SEQ ID NO: 191406 - RNA, 18 nt, Human
gagcucgccgagccggcu

SEQ ID NO: 191407 - RNA, 20 nt, Human
gauauguauauauacacaaa

SEQ ID NO: 191408 - RNA, 19 nt, Human
gauauuccugcuaaccuca

SEQ ID NO: 191409 - RNA, 25 nt, Human
gcaaaacaaaauauaaguacauucu

SEQ ID NO: 191410 - RNA, 20 nt, Human
gcagccccaccaaaccaagc

SEQ ID NO: 191411 - RNA, 21 nt, Human
gcccacucccccucccccucc

SEQ ID NO: 191412 - RNA, 23 nt, Human
gcugaagccacaaagauccccca

SEQ ID NO: 191413 - RNA, 21 nt, Human
gggggggggacgcgcaagugc

SEQ ID NO: 191414 - RNA, 24 nt, Human
gggugggggggggacgcgcaagug

SEQ ID NO: 191415 - RNA, 21 nt, Human
gguggugagcaucaagagaga

SEQ ID NO: 191416 - RNA, 20 nt, Human
gucuuccuaggacacaaucc

SEQ ID NO: 191417 - RNA, 24 nt, Human
gugggggggggacgcgcaagugcg

SEQ ID NO: 191418 - RNA, 23 nt, Human
uaaaaauaagagaaagacaacug

SEQ ID NO: 191419 - RNA, 22 nt, Human
uaaaauuacaaagacagcaaaa

SEQ ID NO: 191420 - RNA, 18 nt, Human
uaacaaaaaugagaagga

SEQ ID NO: 191421 - RNA, 30 nt, Human
uacacaaacacacacaugcacacagaucuu

SEQ ID NO: 191422 - RNA, 18 nt, Human
uagauauguauauauaca

SEQ ID NO: 191423 - RNA, 20 nt, Human
uagccagaacaaacugccuu

SEQ ID NO: 191424 - RNA, 19 nt, Human
uagggaggccgaaagggca

SEQ ID NO: 191425 - RNA, 18 nt, Human
uauaaagucagaacagaa

SEQ ID NO: 191426 - RNA, 23 nt, Human
uauaauaaaggacucaaaaagag

SEQ ID NO: 191427 - RNA, 24 nt, Human
uauauacacaaacacacacaugca

SEQ ID NO: 191428 - RNA, 26 nt, Human
uauauacacaaacacacacaugcaca

SEQ ID NO: 191429 - RNA, 28 nt, Human
uauauacacaaacacacacaugcacaca

SEQ ID NO: 191430 - RNA, 18 nt, Human
uauauauacacaaacaca

SEQ ID NO: 191431 - RNA, 18 nt, Human
ucaaaaagagaucgggag

SEQ ID NO: 191432 - RNA, 22 nt, Human
ucaguuucucccuuuuccaauu

SEQ ID NO: 191433 - RNA, 24 nt, Human
ucccaaaucgacugcaguaagucu

SEQ ID NO: 191434 - RNA, 21 nt, Human
uccgcaagaaaagacuucauu

SEQ ID NO: 191435 - RNA, 19 nt, Human
uccugagccccugacuacc

SEQ ID NO: 191436 - RNA, 19 nt, Human
ucuccugcuggccaaaggu

SEQ ID NO: 191437 - RNA, 22 nt, Human
ucugccucccuuuucccagcuc

SEQ ID NO: 191438 - RNA, 22 nt, Human
ucugccuccucugccucccccc

SEQ ID NO: 191439 - RNA, 19 nt, Human
ucugccucugccuccucuc

SEQ ID NO: 191440 - RNA, 21 nt, Human
ucugccucugccucugccucc

SEQ ID NO: 191441 - RNA, 21 nt, Human
ucugccucugccucugccucc

SEQ ID NO: 191442 - RNA, 20 nt, Human
ucugcuccugagccccugac

SEQ ID NO: 191443 - RNA, 23 nt, Human
ugaaacucucacaacgggugccc

SEQ ID NO: 191444 - RNA, 18 nt, Human
ugacuaccgggccagucu

SEQ ID NO: 191445 - RNA, 18 nt, Human
ugacuccccacccuuccc

SEQ ID NO: 191446 - RNA, 18 nt, Human
ugagaaggaaacuggguu

SEQ ID NO: 191447 - RNA, 26 nt, Human
ugagccccugacuaccgggccagucu

SEQ ID NO: 191448 - RNA, 21 nt, Human
ugcccaacucaaggaaaacuc

SEQ ID NO: 191449 - RNA, 18 nt, Human
ugccucugccucugccuc

SEQ ID NO: 191450 - RNA, 18 nt, Human
ugccucugccucugccuc

SEQ ID NO: 191451 - RNA, 19 nt, Human
ugccuugugucuucucccc

SEQ ID NO: 191452 - RNA, 21 nt, Human
ugcucaccacugggaggugga

SEQ ID NO: 191453 - RNA, 21 nt, Human
ugcuguccuugcacaacuggu

SEQ ID NO: 191454 - RNA, 22 nt, Human
uggcaaacaagccaacaaaaca

SEQ ID NO: 191455 - RNA, 19 nt, Human
uggcuacauccuagcugac

SEQ ID NO: 191456 - RNA, 20 nt, Human
uggcuacauccuagcugacu

SEQ ID NO: 191457 - RNA, 20 nt, Human
uuagcggcggcgggcggacc

SEQ ID NO: 191458 - RNA, 20 nt, Human
uuuacagaaaauaggagaca

SEQ ID NO: 191459 - RNA, 19 nt, Human
uauaaaccugacgaagcag

SEQ ID NO: 191460 - RNA, 18 nt, Human
agccuuuuggguuuuaga

SEQ ID NO: 191461 - RNA, 27 nt, Human
cagaaaagacaauaaguaaucucaaac

SEQ ID NO: 191462 - RNA, 21 nt, Human
uaaucucaaacugucagaaca

SEQ ID NO: 191463 - RNA, 21 nt, Human
uggguggcucugaaaagagcc

SEQ ID NO: 191464 - RNA, 21 nt, Human
aagcgugagcgagagcaauuc

SEQ ID NO: 191465 - RNA, 22 nt, Human
aagcgugagcgagagcaauucg

SEQ ID NO: 191466 - RNA, 19 nt, Human
gccggaagcagaggcacug

SEQ ID NO: 191467 - RNA, 22 nt, Human
gcucugaaaagagccuuugggu

SEQ ID NO: 191468 - RNA, 21 nt, Human
uggguggcucugaaaagagcc

SEQ ID NO: 191469 - RNA, 22 nt, Human
aacugcuagaagagaauaagcu

SEQ ID NO: 191470 - RNA, 21 nt, Human
agccuuuggggcuuuguugcg

SEQ ID NO: 191471 - RNA, 25 nt, Human
cuuuggggcuuuguugcgguuuuca

SEQ ID NO: 191472 - RNA, 27 nt, Human
cuuuggggcuuuguugcgguuuucaca

SEQ ID NO: 191473 - RNA, 18 nt, Human
gcuuuguugcgguuuuca

SEQ ID NO: 191474 - RNA, 22 nt, Human
ggcaagaaacugcuagaagaga

SEQ ID NO: 191475 - RNA, 24 nt, Human
ggcuuuguugcgguuuucacacgc

SEQ ID NO: 191476 - RNA, 19 nt, Human
uggcaagaaacugcuagaa

SEQ ID NO: 191477 - RNA, 24 nt, Human
uggcaagaaacugcuagaagagaa

SEQ ID NO: 191478 - RNA, 21 nt, Human
uggguggcucugaaaagagcc

SEQ ID NO: 191479 - RNA, 21 nt, Human
uguugcgguuuucacacgcca

SEQ ID NO: 191480 - RNA, 23 nt, Human
aacuccugccuggcgaucgggaa

SEQ ID NO: 191481 - RNA, 24 nt, Human
agcgauaguagucaccgagagaaa

SEQ ID NO: 191482 - RNA, 18 nt, Human
cacaggugccccuucgag

SEQ ID NO: 191483 - RNA, 22 nt, Human
cgagagaaacuccugccuggcg

SEQ ID NO: 191484 - RNA, 20 nt, Human
cgggcugggcccacuugggc

SEQ ID NO: 191485 - RNA, 18 nt, Human
cuuuugaguucacaggug

SEQ ID NO: 191486 - RNA, 19 nt, Human
gacagcgauaguagucacc

SEQ ID NO: 191487 - RNA, 22 nt, Human
gaguucacaggugccccuucga

SEQ ID NO: 191488 - RNA, 19 nt, Human
ucacaggugccccuucgag

SEQ ID NO: 191489 - RNA, 21 nt, Human
uggguggcucugaaaagagcc

SEQ ID NO: 191490 - RNA, 22 nt, Human
uuugaguucacaggugccccuu

SEQ ID NO: 191491 - RNA, 23 nt, Human
aaccaguuuuauugcaaaaggac

SEQ ID NO: 191492 - RNA, 20 nt, Human
acaagaaaaagaacuucggu

SEQ ID NO: 191493 - RNA, 24 nt, Human
accgccgcgccgcuuccgcugccc

SEQ ID NO: 191494 - RNA, 24 nt, Human
accuaguuaugagaccaaccacac

SEQ ID NO: 191495 - RNA, 24 nt, Human
agaaaaacucaaccuaguuaugag

SEQ ID NO: 191496 - RNA, 21 nt, Human
agagcccuuauaaauaaaauc

SEQ ID NO: 191497 - RNA, 23 nt, Human
agauguaaccuaacccaacacca

SEQ ID NO: 191498 - RNA, 24 nt, Human
agcaacuugucacuccugagcaac

SEQ ID NO: 191499 - RNA, 25 nt, Human
agcaagaaguaucacccaucccuuc

SEQ ID NO: 191500 - RNA, 21 nt, Human
aguaucacccaucccuucugc

SEQ ID NO: 191501 - RNA, 21 nt, Human
aucaagucauaaccaguuuua

SEQ ID NO: 191502 - RNA, 24 nt, Human
aucucuauaaaaaugauuuuccca

SEQ ID NO: 191503 - RNA, 28 nt, Human
cacuccugagcaacagugcucacauugc

SEQ ID NO: 191504 - RNA, 20 nt, Human
cacuuggaucaagucauaac

SEQ ID NO: 191505 - RNA, 24 nt, Human
cagaagaaaaccaacuggacucua

SEQ ID NO: 191506 - RNA, 18 nt, Human
cagcagaggagaaaaacu

SEQ ID NO: 191507 - RNA, 21 nt, Human
cagccccaauuguuaaacacu

SEQ ID NO: 191508 - RNA, 20 nt, Human
cagugcucacaucacugagg

SEQ ID NO: 191509 - RNA, 24 nt, Human
ccaggacaguaaccagauguaacc

SEQ ID NO: 191510 - RNA, 21 nt, Human
cccuuauaaauaaaauccccc

SEQ ID NO: 191511 - RNA, 22 nt, Human
cccuugaaaaagcccacauucu

SEQ ID NO: 191512 - RNA, 18 nt, Human
ccgccgcgccgcuuccgc

SEQ ID NO: 191513 - RNA, 23 nt, Human
ccgccgcgccgcuuccgcugccc

SEQ ID NO: 191514 - RNA, 18 nt, Human
ccgcgccgcuuccgcugc

SEQ ID NO: 191515 - RNA, 24 nt, Human
cgaaaaaccagcaccgcccaacga

SEQ ID NO: 191516 - RNA, 21 nt, Human
gcuggugugaauaacucguuu

SEQ ID NO: 191517 - RNA, 24 nt, Human
gcuuccgcugcccgaggaagagcc

SEQ ID NO: 191518 - RNA, 18 nt, Human
guuuugugcuccuccccc

SEQ ID NO: 191519 - RNA, 25 nt, Human
uaaauuacacacaccuuaaugacaa

SEQ ID NO: 191520 - RNA, 23 nt, Human
uaacagccccaauuguuaaacac

SEQ ID NO: 191521 - RNA, 18 nt, Human
uaacccaacaccaucuua

SEQ ID NO: 191522 - RNA, 19 nt, Human
uacaaaacgccauaaaaac

SEQ ID NO: 191523 - RNA, 22 nt, Human
uaucacagugauguauggucag

SEQ ID NO: 191524 - RNA, 21 nt, Human
uaugcaagguauaaaugcgca

SEQ ID NO: 191525 - RNA, 23 nt, Human
ugaccuaaaaacuucaguaaauu

SEQ ID NO: 191526 - RNA, 19 nt, Human
ugagaccaaccacacaaca

SEQ ID NO: 191527 - RNA, 18 nt, Human
ugccacaagaaaaagaac

SEQ ID NO: 191528 - RNA, 18 nt, Human
ugcuccucccccacacca

SEQ ID NO: 191529 - RNA, 22 nt, Human
uggaaggccaucucuauaaaaa

SEQ ID NO: 191530 - RNA, 23 nt, Human
uggaaggccaucucuauaaaaau

SEQ ID NO: 191531 - RNA, 22 nt, Human
uggcagagguucagugggcugg

SEQ ID NO: 191532 - RNA, 22 nt, Human
uucuauagcugccagguuuacu

SEQ ID NO: 191533 - RNA, 21 nt, Human
uucuccgaccgccgcgccgcu

SEQ ID NO: 191534 - RNA, 24 nt, Human
uuuuuuuuuuuuuaaaggaaacug

SEQ ID NO: 191535 - RNA, 20 nt, Human
gaguggcucugaaaagagcc

SEQ ID NO: 191536 - RNA, 19 nt, Human
ggcucugagaagagccuuu

SEQ ID NO: 191537 - RNA, 18 nt, Human
aggggcucugaaaagagc

SEQ ID NO: 191538 - RNA, 21 nt, Human
cuucuugggcugauaggaaua

SEQ ID NO: 191539 - RNA, 20 nt, Human
gcucugaaaagagccuuuug

SEQ ID NO: 191540 - RNA, 18 nt, Human
guuggacagacuucuugg

SEQ ID NO: 191541 - RNA, 20 nt, Human
ugaaaagagccuuuuggggu

SEQ ID NO: 191542 - RNA, 20 nt, Human
ugaaaagagccuuuuggggu

SEQ ID NO: 191543 - RNA, 22 nt, Human
gcucugaaaagagccuuugggu

SEQ ID NO: 191544 - RNA, 26 nt, Human
ucugaaaagagccuuuggguuuuaag

SEQ ID NO: 191545 - RNA, 21 nt, Human
uggguggcucugaaaagagcc

SEQ ID NO: 191546 - RNA, 21 nt, Human
ucucagguggcgagauagccc

SEQ ID NO: 191547 - RNA, 21 nt, Human
uggggugaacguugcgcaacc

SEQ ID NO: 191548 - RNA, 20 nt, Human
uuaaaagagccuuuggggug

SEQ ID NO: 191549 - RNA, 22 nt, Human
aagcccccacguccauagccaa

SEQ ID NO: 191550 - RNA, 21 nt, Human
aagggccuuugggaucgaaac

SEQ ID NO: 191551 - RNA, 21 nt, Human
aagggccuuugggaucgaaac

SEQ ID NO: 191552 - RNA, 23 nt, Human
aaguguccaacuccucagaugag

SEQ ID NO: 191553 - RNA, 23 nt, Human
accaauaaagcaacugcugguuu

SEQ ID NO: 191554 - RNA, 22 nt, Human
agccagugacuucuguagcauu

SEQ ID NO: 191555 - RNA, 22 nt, Human
aguguuugcagccacaucugaa

SEQ ID NO: 191556 - RNA, 19 nt, Human
auaguaguuauugucuaca

SEQ ID NO: 191557 - RNA, 24 nt, Human
auucagaguccgacacaagccccc

SEQ ID NO: 191558 - RNA, 19 nt, Human
caaguguuugcagccacau

SEQ ID NO: 191559 - RNA, 20 nt, Human
caaguguuugcagccacauc

SEQ ID NO: 191560 - RNA, 23 nt, Human
cacaucugaagaccaauaaagca

SEQ ID NO: 191561 - RNA, 25 nt, Human
ccgacacaagcccccacguccauag

SEQ ID NO: 191562 - RNA, 20 nt, Human
cucagaugagcaaguggucg

SEQ ID NO: 191563 - RNA, 19 nt, Human
cuggaaggcaaggcuugca

SEQ ID NO: 191564 - RNA, 20 nt, Human
cugguaagcuucuggaaggc

SEQ ID NO: 191565 - RNA, 24 nt, Human
guaagcuucuggaaggcaaggcuu

SEQ ID NO: 191566 - RNA, 24 nt, Human
guugugaugguaagcuccuggagg

SEQ ID NO: 191567 - RNA, 22 nt, Human
uaagcuccuggagggcaagucu

SEQ ID NO: 191568 - RNA, 23 nt, Human
uacuggacuguuuauucuuaaau

SEQ ID NO: 191569 - RNA, 21 nt, Human
uauugucuacauuucucagca

SEQ ID NO: 191570 - RNA, 19 nt, Human
ucuguagcauuaggauucu

SEQ ID NO: 191571 - RNA, 20 nt, Human
uuccccgguuucccagcagc

SEQ ID NO: 191572 - RNA, 18 nt, Human
uucucccaaauacauaca

SEQ ID NO: 191573 - RNA, 21 nt, Human
caagcuguggagaaaucagca

SEQ ID NO: 191574 - RNA, 20 nt, Human
ggcggcccugaaaagggccu

SEQ ID NO: 191575 - RNA, 19 nt, Human
gggccuuugguucagaaau

SEQ ID NO: 191576 - RNA, 23 nt, Human
ugcaagcuguggagaaaucagca

SEQ ID NO: 191577 - RNA, 19 nt, Human
uguggagaaaucagcaacc

SEQ ID NO: 191578 - RNA, 19 nt, Human
aaagggccguugguuuugc

SEQ ID NO: 191579 - RNA, 19 nt, Human
cgguaguguacuguagagg

SEQ ID NO: 191580 - RNA, 23 nt, Human
uuugcgguaguguacuguagagg

SEQ ID NO: 191581 - RNA, 21 nt, Human
aagggccuuuuaugggugagc

SEQ ID NO: 191582 - RNA, 22 nt, Human
ugaaaagggccuuuuaugggug

SEQ ID NO: 191583 - RNA, 18 nt, Human
uaaaaagggccuuuuguu

SEQ ID NO: 191584 - RNA, 22 nt, Human
uaaaaagggccuuuuguugaua

SEQ ID NO: 191585 - RNA, 23 nt, Human
ugggggcccuaaaaagggccuuu

SEQ ID NO: 191586 - RNA, 24 nt, Human
ugggggcccuaaaaagggccuuuu

SEQ ID NO: 191587 - RNA, 23 nt, Human
caggagaccgcguauucuuagau

SEQ ID NO: 191588 - RNA, 24 nt, Human
uuuuuguuuuuugaaguucucagg

SEQ ID NO: 191589 - RNA, 21 nt, Human
ccuuugguugaaaaugaaaau

SEQ ID NO: 191590 - RNA, 21 nt, Human
ggccuuugguugaaaaugaaa

SEQ ID NO: 191591 - RNA, 20 nt, Human
ggcggcccugaaaagggccu

SEQ ID NO: 191592 - RNA, 23 nt, Human
ugaaaaugaaaauaagagugcag

SEQ ID NO: 191593 - RNA, 23 nt, Human
ggccauuggaagaaaacugacgg

SEQ ID NO: 191594 - RNA, 20 nt, Human
uggaagaaaacugacgaaaa

SEQ ID NO: 191595 - RNA, 18 nt, Human
gcccugagaagggccuuu

SEQ ID NO: 191596 - RNA, 18 nt, Human
ugagaagggccuuugagg

SEQ ID NO: 191597 - RNA, 19 nt, Human
cucacuuaaccgccaaagc

SEQ ID NO: 191598 - RNA, 21 nt, Human
ugcaaggaaaggccuggccuc

SEQ ID NO: 191599 - RNA, 22 nt, Human
cuuaggggcccuaaaaagggcc

SEQ ID NO: 191600 - RNA, 21 nt, Human
uuuuuagagaaugacugggcu

SEQ ID NO: 191601 - RNA, 24 nt, Human
aagcuggagaguaguaccccaggg

SEQ ID NO: 191602 - RNA, 23 nt, Human
agcguguguuuucucugccuucu

SEQ ID NO: 191603 - RNA, 23 nt, Human
aggcacagagggcgacugguagg

SEQ ID NO: 191604 - RNA, 19 nt, Human
aggcaguuacaaaauggcu

SEQ ID NO: 191605 - RNA, 26 nt, Human
caaaauggcuacugggcuuccuccca

SEQ ID NO: 191606 - RNA, 23 nt, Human
ccagggaaaggaagggcagagga

SEQ ID NO: 191607 - RNA, 27 nt, Human
ccucccaagcuggagaguaguacccca

SEQ ID NO: 191608 - RNA, 20 nt, Human
ggaaaggaagggcagaggag

SEQ ID NO: 191609 - RNA, 18 nt, Human
uaggcaguuacaaaaugg

SEQ ID NO: 191610 - RNA, 19 nt, Human
ucccaagcuggagaguagu

SEQ ID NO: 191611 - RNA, 26 nt, Human
uccucccaagcuggagaguaguaccc

SEQ ID NO: 191612 - RNA, 19 nt, Human
uuuuuuuuuuuuuuuuugu

SEQ ID NO: 191613 - RNA, 27 nt, Human
uuuuuuuuuuuuuuuuuuuuuuugggg

SEQ ID NO: 191614 - RNA, 19 nt, Human
acagacagguguguguggu

SEQ ID NO: 191615 - RNA, 18 nt, Human
acagggcuuucuuccaga

SEQ ID NO: 191616 - RNA, 24 nt, Human
acccagugccggaguuugucuucu

SEQ ID NO: 191617 - RNA, 23 nt, Human
accccuggccacccuggccucuc

SEQ ID NO: 191618 - RNA, 21 nt, Human
acugccggcagcugggguuag

SEQ ID NO: 191619 - RNA, 21 nt, Human
agaacugcccucaccaccccu

SEQ ID NO: 191620 - RNA, 18 nt, Human
agagagguggcuucagau

SEQ ID NO: 191621 - RNA, 18 nt, Human
agcaaacccagugccgga

SEQ ID NO: 191622 - RNA, 24 nt, Human
aggcacuuuaaucagggagcaacg

SEQ ID NO: 191623 - RNA, 18 nt, Human
aucccagucccucccuaa

SEQ ID NO: 191624 - RNA, 21 nt, Human
caccccuggccacccuggccu

SEQ ID NO: 191625 - RNA, 21 nt, Human
caccguggugagaagccuggg

SEQ ID NO: 191626 - RNA, 19 nt, Human
cacugccggcagcuggggu

SEQ ID NO: 191627 - RNA, 21 nt, Human
cagugggcucuaccuuccaau

SEQ ID NO: 191628 - RNA, 24 nt, Human
caucugcacagacaggugugugug

SEQ ID NO: 191629 - RNA, 20 nt, Human
ccaccccuggccacccuggc

SEQ ID NO: 191630 - RNA, 22 nt, Human
cccagugccggaguuugucuuc

SEQ ID NO: 191631 - RNA, 23 nt, Human
ccccaaagcacagggcuuucuuc

SEQ ID NO: 191632 - RNA, 20 nt, Human
ccucuugggaggaacaggca

SEQ ID NO: 191633 - RNA, 19 nt, Human
cucuuggcugccacucuag

SEQ ID NO: 191634 - RNA, 22 nt, Human
cucuugggaggaacaggcagag

SEQ ID NO: 191635 - RNA, 23 nt, Human
cugcccucaccaccccuggccac

SEQ ID NO: 191636 - RNA, 21 nt, Human
gagagauggucuuggcugaag

SEQ ID NO: 191637 - RNA, 20 nt, Human
gaggaacaggcagagaggug

SEQ ID NO: 191638 - RNA, 23 nt, Human
ggccucuugggaggaacaggcag

SEQ ID NO: 191639 - RNA, 18 nt, Human
uagugcacugacugagcg

SEQ ID NO: 191640 - RNA, 25 nt, Human
ucccccaaagcacagggcuuucuuc

SEQ ID NO: 191641 - RNA, 25 nt, Human
ucuuggcugaaggcacuuuaaucag

SEQ ID NO: 191642 - RNA, 23 nt, Human
ucuuggcugccacucuaggccuc

SEQ ID NO: 191643 - RNA, 20 nt, Human
ugagaagccugggcaaagca

SEQ ID NO: 191644 - RNA, 19 nt, Human
ugccggcagcugggguuag

SEQ ID NO: 191645 - RNA, 19 nt, Human
ugccuagaauucugcacac

SEQ ID NO: 191646 - RNA, 20 nt, Human
ugcuuuuugaaggaggcguu

SEQ ID NO: 191647 - RNA, 23 nt, Human
uggcugccacucuaggccucggg

SEQ ID NO: 191648 - RNA, 23 nt, Human
uggggaaagagguuuaauauccc

SEQ ID NO: 191649 - RNA, 22 nt, Human
uuagugcacugacugagcgagg

SEQ ID NO: 191650 - RNA, 23 nt, Human
uucgaagucacacuucaccagga

SEQ ID NO: 191651 - RNA, 19 nt, Human
uugggaggaacaggcagag

SEQ ID NO: 191652 - RNA, 19 nt, Human
uugucuucucguuacucug

SEQ ID NO: 191653 - RNA, 18 nt, Human
uuuuuuuuuuuuuuuuug

SEQ ID NO: 191654 - RNA, 20 nt, Human
uuuuuuuuuuuuuuuuugcu

SEQ ID NO: 191655 - RNA, 27 nt, Human
uuuuuuuuuuuuuuuuuuuugcugggg

SEQ ID NO: 191656 - RNA, 21 nt, Human
aaacaaccacccacacaucuc

SEQ ID NO: 191657 - RNA, 19 nt, Human
aagcucagaacacuggcaa

SEQ ID NO: 191658 - RNA, 19 nt, Human
aaucucaguugaccucuuu

SEQ ID NO: 191659 - RNA, 21 nt, Human
acaacagagaccaaaaacaac

SEQ ID NO: 191660 - RNA, 21 nt, Human
acagagaccaaaaacaaccac

SEQ ID NO: 191661 - RNA, 23 nt, Human
accaccauauuuauguaucuaaa

SEQ ID NO: 191662 - RNA, 28 nt, Human
agagaacacaucuuuaggacacagauaa

SEQ ID NO: 191663 - RNA, 22 nt, Human
caacagagaccaaaaacaacca

SEQ ID NO: 191664 - RNA, 24 nt, Human
caacagagaccaaaaacaaccacc

SEQ ID NO: 191665 - RNA, 19 nt, Human
caaccacccacacaucuca

SEQ ID NO: 191666 - RNA, 28 nt, Human
caguugaccucuuucccaacugcaaacc

SEQ ID NO: 191667 - RNA, 18 nt, Human
cccaacugcaaacccuca

SEQ ID NO: 191668 - RNA, 21 nt, Human
cccacacaucucaugugagau

SEQ ID NO: 191669 - RNA, 24 nt, Human
cugauuauugaaaagcucagaaca

SEQ ID NO: 191670 - RNA, 18 nt, Human
cuuucccaacugcaaacc

SEQ ID NO: 191671 - RNA, 25 nt, Human
gacaacagagaccaaaaacaaccac

SEQ ID NO: 191672 - RNA, 19 nt, Human
gaggagcuaggaacuacaa

SEQ ID NO: 191673 - RNA, 20 nt, Human
uaacgcugaccaccauauuu

SEQ ID NO: 191674 - RNA, 31 nt, Human
uccaaaucucaguugaccucuuucccaacuu

SEQ ID NO: 191675 - RNA, 21 nt, Human
uccaauauuucuccacuuuau

SEQ ID NO: 191676 - RNA, 23 nt, Human
uccacuuuauuaacgcugaccac

SEQ ID NO: 191677 - RNA, 19 nt, Human
ucccugaaagagcaguaaa

SEQ ID NO: 191678 - RNA, 19 nt, Human
ugccuagugugaguguugc

SEQ ID NO: 191679 - RNA, 25 nt, Human
uggaaucuuggcugacguccgcgag

SEQ ID NO: 191680 - RNA, 26 nt, Human
uggaaucuuggcugacguccgcgagg

SEQ ID NO: 191681 - RNA, 19 nt, Human
ugugaguguugcacagaaa

SEQ ID NO: 191682 - RNA, 23 nt, Human
aaaggcaagauccaggugcugcu

SEQ ID NO: 191683 - RNA, 19 nt, Human
aacugaaugaccaugaaac

SEQ ID NO: 191684 - RNA, 18 nt, Human
aagccagacucugggggc

SEQ ID NO: 191685 - RNA, 18 nt, Human
aagcugcagguaguaaaa

SEQ ID NO: 191686 - RNA, 25 nt, Human
aauuauuucuuaauggagaaucuau

SEQ ID NO: 191687 - RNA, 24 nt, Human
acaaaaaugacaagguucaaaaaa

SEQ ID NO: 191688 - RNA, 22 nt, Human
acgcagcaacagugagcauggu

SEQ ID NO: 191689 - RNA, 18 nt, Human
acgcgcgaggcgggcagc

SEQ ID NO: 191690 - RNA, 18 nt, Human
agcauucccacaggcacu

SEQ ID NO: 191691 - RNA, 18 nt, Human
aggcaauucuucacaaaa

SEQ ID NO: 191692 - RNA, 21 nt, Human
caaaauguagggcaagacuca

SEQ ID NO: 191693 - RNA, 25 nt, Human
caaaccaugcaaacagagauaugcu

SEQ ID NO: 191694 - RNA, 19 nt, Human
caaagagcauucccacagg

SEQ ID NO: 191695 - RNA, 18 nt, Human
cacucggggcacuggcug

SEQ ID NO: 191696 - RNA, 18 nt, Human
cacuugcuugccaguggc

SEQ ID NO: 191697 - RNA, 20 nt, Human
cagcgaggagacccgggcag

SEQ ID NO: 191698 - RNA, 23 nt, Human
cagcggcggcgacagcgaggagg

SEQ ID NO: 191699 - RNA, 20 nt, Human
caugaaaaccgaccuccugc

SEQ ID NO: 191700 - RNA, 25 nt, Human
cauguuugcuccaaggcaccaaggg

SEQ ID NO: 191701 - RNA, 21 nt, Human
ccaaaauguagggcaagacuc

SEQ ID NO: 191702 - RNA, 25 nt, Human
ccaaggcaccaaggguguaaagcug

SEQ ID NO: 191703 - RNA, 24 nt, Human
ccaggugcugcucgcugcagugcu

SEQ ID NO: 191704 - RNA, 21 nt, Human
cccacgcagcaacagugagca

SEQ ID NO: 191705 - RNA, 27 nt, Human
ccuccugcaaaccaugcaaacagagau

SEQ ID NO: 191706 - RNA, 19 nt, Human
cgcugcagugcuucacaga

SEQ ID NO: 191707 - RNA, 19 nt, Human
cggcgacagcgaggagacc

SEQ ID NO: 191708 - RNA, 27 nt, Human
cgggcagggaagacgcgcgaggcgggc

SEQ ID NO: 191709 - RNA, 18 nt, Human
cugacccauucagcagca

SEQ ID NO: 191710 - RNA, 19 nt, Human
cugacccauucagcagcag

SEQ ID NO: 191711 - RNA, 22 nt, Human
cugacccauucagcagcagcau

SEQ ID NO: 191712 - RNA, 19 nt, Human
gaaaaaagacacagacaga

SEQ ID NO: 191713 - RNA, 20 nt, Human
gaccuccugcaaaccaugca

SEQ ID NO: 191714 - RNA, 24 nt, Human
gaggcgggcagccgcggaaagcca

SEQ ID NO: 191715 - RNA, 19 nt, Human
gccgcggaaagccagacuc

SEQ ID NO: 191716 - RNA, 19 nt, Human
ggaaaaaagacacagacag

SEQ ID NO: 191717 - RNA, 20 nt, Human
ggaaaaaagacacagacaga

SEQ ID NO: 191718 - RNA, 19 nt, Human
ggcagccgcggaaagccag

SEQ ID NO: 191719 - RNA, 21 nt, Human
guggcagcggcggcgacagcg

SEQ ID NO: 191720 - RNA, 20 nt, Human
ucaaaaaacauguuugcucc

SEQ ID NO: 191721 - RNA, 19 nt, Human
ucuuauaaaggcaagaucc

SEQ ID NO: 191722 - RNA, 21 nt, Human
ugaacagacuaaaaaagggaa

SEQ ID NO: 191723 - RNA, 21 nt, Human
ugaccaaagagcauucccaca

SEQ ID NO: 191724 - RNA, 19 nt, Human
ugcagguaguaaaauguuc

SEQ ID NO: 191725 - RNA, 19 nt, Human
ugcccaaaauguagggcaa

SEQ ID NO: 191726 - RNA, 22 nt, Human
ugccuaaauuaccaacuuuuac

SEQ ID NO: 191727 - RNA, 24 nt, Human
ugcugacccauucagcagcagcau

SEQ ID NO: 191728 - RNA, 19 nt, Human
uggaaagcgcucucaggug

SEQ ID NO: 191729 - RNA, 21 nt, Human
uggcagcggcggcgacagcga

SEQ ID NO: 191730 - RNA, 24 nt, Human
ugugugagggaaugucugaccaaa

SEQ ID NO: 191731 - RNA, 19 nt, Human
uucacaaaaaugacaaggu

SEQ ID NO: 191732 - RNA, 22 nt, Human
uucacgacgagcugaauaaaga

SEQ ID NO: 191733 - RNA, 25 nt, Human
uucagcagcagcaucuucacgacga

SEQ ID NO: 191734 - RNA, 21 nt, Human
uuuuuuuuuuuuuuuuugccu

SEQ ID NO: 191735 - RNA, 24 nt, Human
uuuuuuuuuuuuuuuuuugccuaa

SEQ ID NO: 191736 - RNA, 27 nt, Human
uuuuuuuuuuuuuuuuuuuuuuugggg

SEQ ID NO: 191737 - RNA, 24 nt, Human
aacuuguuuucuccgcgagccccg

SEQ ID NO: 191738 - RNA, 23 nt, Human
aagagccuaauccccaaauccgc

SEQ ID NO: 191739 - RNA, 22 nt, Human
agacugaauuucccgcacggaa

SEQ ID NO: 191740 - RNA, 24 nt, Human
agccccgacugccacgggccggga

SEQ ID NO: 191741 - RNA, 23 nt, Human
agcccucggcccaccaccaugac

SEQ ID NO: 191742 - RNA, 18 nt, Human
agcggcggcggcggcggc

SEQ ID NO: 191743 - RNA, 19 nt, Human
aggcugcggcggccgagca

SEQ ID NO: 191744 - RNA, 21 nt, Human
caaaacaccggcgucggcgcg

SEQ ID NO: 191745 - RNA, 21 nt, Human
cacaguggaucccuggaggcc

SEQ ID NO: 191746 - RNA, 20 nt, Human
caccaugacccgggccgggc

SEQ ID NO: 191747 - RNA, 21 nt, Human
cagcagggcuggaccgaggcc

SEQ ID NO: 191748 - RNA, 22 nt, Human
cagcagggcuggaccgaggccu

SEQ ID NO: 191749 - RNA, 20 nt, Human
cagcgcggcgaggcugcggc

SEQ ID NO: 191750 - RNA, 22 nt, Human
cagcgcggcgaggcugcggcgg

SEQ ID NO: 191751 - RNA, 24 nt, Human
caggacugcaaaacaccggcgucg

SEQ ID NO: 191752 - RNA, 20 nt, Human
caguggaucccuggaggccg

SEQ ID NO: 191753 - RNA, 23 nt, Human
cauuagaauguccgauaacacaa

SEQ ID NO: 191754 - RNA, 20 nt, Human
ccaugacccgggccgggcug

SEQ ID NO: 191755 - RNA, 22 nt, Human
cccucagccaaucagcguccac

SEQ ID NO: 191756 - RNA, 18 nt, Human
ccgcgagccccgacugcc

SEQ ID NO: 191757 - RNA, 20 nt, Human
ccgggccgggcuggacugcc

SEQ ID NO: 191758 - RNA, 19 nt, Human
ccucgcaccguccgccaac

SEQ ID NO: 191759 - RNA, 21 nt, Human
cgccacgccgcccggguaccc

SEQ ID NO: 191760 - RNA, 23 nt, Human
cgccacgccgcccggguacccgg

SEQ ID NO: 191761 - RNA, 21 nt, Human
cgcccggguacccggcagauc

SEQ ID NO: 191762 - RNA, 20 nt, Human
cggcccgagagcugcgccgg

SEQ ID NO: 191763 - RNA, 19 nt, Human
cggcggcccgagagcugcg

SEQ ID NO: 191764 - RNA, 23 nt, Human
cggcggcggcggcggcccgagag

SEQ ID NO: 191765 - RNA, 18 nt, Human
cgggagagcugugccgcg

SEQ ID NO: 191766 - RNA, 19 nt, Human
cgggccgucgcugcgccuc

SEQ ID NO: 191767 - RNA, 18 nt, Human
cgggccugggagcggcgg

SEQ ID NO: 191768 - RNA, 23 nt, Human
cguccgccaaccaaucaacgcgc

SEQ ID NO: 191769 - RNA, 19 nt, Human
cucgcaccguccgccaacc

SEQ ID NO: 191770 - RNA, 22 nt, Human
cugccgagcugcccaggacugc

SEQ ID NO: 191771 - RNA, 28 nt, Human
cugggagcggcggcggcggcggcccuuu

SEQ ID NO: 191772 - RNA, 19 nt, Human
gagcagcccucggcccacc

SEQ ID NO: 191773 - RNA, 20 nt, Human
gagcggcggcggcggcggcc

SEQ ID NO: 191774 - RNA, 24 nt, Human
gcccucggcccaccaccaugaccc

SEQ ID NO: 191775 - RNA, 18 nt, Human
gccgggcuggacugccga

SEQ ID NO: 191776 - RNA, 19 nt, Human
gcggcggcggcggcggccc

SEQ ID NO: 191777 - RNA, 18 nt, Human
ggaaagccaguuaccuaa

SEQ ID NO: 191778 - RNA, 19 nt, Human
ggaccagcaggaaagccag

SEQ ID NO: 191779 - RNA, 20 nt, Human
ggccgagcagcccucggccc

SEQ ID NO: 191780 - RNA, 20 nt, Human
ggcggcggcggcggcccgag

SEQ ID NO: 191781 - RNA, 25 nt, Human
ggcggcggcggcggcccgagagcug

SEQ ID NO: 191782 - RNA, 21 nt, Human
ggcugcggcggccgagcagcc

SEQ ID NO: 191783 - RNA, 20 nt, Human
gggagcggcggcggcggcgg

SEQ ID NO: 191784 - RNA, 18 nt, Human
gggcuggacugccgagcg

SEQ ID NO: 191785 - RNA, 23 nt, Human
uagaauguccgauaacacaagcc

SEQ ID NO: 191786 - RNA, 19 nt, Human
ucccgcacggaccagcagg

SEQ ID NO: 191787 - RNA, 21 nt, Human
ucggcgcgucgcagccaauca

SEQ ID NO: 191788 - RNA, 22 nt, Human
ugcauuagaauguccgauaaca

SEQ ID NO: 191789 - RNA, 23 nt, Human
ugccacgggccgggagacgggcc

SEQ ID NO: 191790 - RNA, 21 nt, Human
uggcagaaaacucccagcagg

SEQ ID NO: 191791 - RNA, 18 nt, Human
ugggagcggcggcggcgg

SEQ ID NO: 191792 - RNA, 19 nt, Human
ugggagcggcggcggcggc

SEQ ID NO: 191793 - RNA, 22 nt, Human
uucuccgcgagccccgacugcc

SEQ ID NO: 191794 - RNA, 22 nt, Human
aaaacagucaaagcuuaaaaga

SEQ ID NO: 191795 - RNA, 19 nt, Human
aacaauacuucugaaguaa

SEQ ID NO: 191796 - RNA, 20 nt, Human
aguaaaacaaugaaaaauuu

SEQ ID NO: 191797 - RNA, 22 nt, Human
caaccauauugaaauuuaaucc

SEQ ID NO: 191798 - RNA, 23 nt, Human
caacugagccacuuaucuguacu

SEQ ID NO: 191799 - RNA, 25 nt, Human
caagaaaaacuaaacguuggguuua

SEQ ID NO: 191800 - RNA, 27 nt, Human
cacauaaguuuuuuucccccucauauc

SEQ ID NO: 191801 - RNA, 24 nt, Human
cccccucauaucuuccauucaaaa

SEQ ID NO: 191802 - RNA, 20 nt, Human
gcucaacugagccacuuauc

SEQ ID NO: 191803 - RNA, 19 nt, Human
uaacaaaacaauacuucug

SEQ ID NO: 191804 - RNA, 28 nt, Human
uaacaaaauguaucacaagaaaaacuaa

SEQ ID NO: 191805 - RNA, 30 nt, Human
uccuucccaaaacagucaaagcuuaaaaaa

SEQ ID NO: 191806 - RNA, 25 nt, Human
ucuguacuacaguaugguacuugaa

SEQ ID NO: 191807 - RNA, 23 nt, Human
uggguuuaacaaaacaauacuuc

SEQ ID NO: 191808 - RNA, 22 nt, Human
ugugcucaacugagccacuuau

SEQ ID NO: 191809 - RNA, 23 nt, Human
uuacacagguuaacaaaauguau

SEQ ID NO: 191810 - RNA, 23 nt, Human
aaaaaaaaaaagguuaacaaaag

SEQ ID NO: 191811 - RNA, 19 nt, Human
aaaaagcagcuuaaggaca

SEQ ID NO: 191812 - RNA, 19 nt, Human
aaaguaaaauuagccaaag

SEQ ID NO: 191813 - RNA, 19 nt, Human
aaaguucucaggucucucc

SEQ ID NO: 191814 - RNA, 26 nt, Human
aagaaagaaaaguuuuauaaucugag

SEQ ID NO: 191815 - RNA, 18 nt, Human
aagagccacccaaauagc

SEQ ID NO: 191816 - RNA, 23 nt, Human
acacaguuuaauaagagccaccc

SEQ ID NO: 191817 - RNA, 20 nt, Human
acccugggaggugcuguucu

SEQ ID NO: 191818 - RNA, 19 nt, Human
accuaccugcugcuggccc

SEQ ID NO: 191819 - RNA, 19 nt, Human
accugcugcuggcccccuu

SEQ ID NO: 191820 - RNA, 22 nt, Human
acuguuaagaaagaaagaaaag

SEQ ID NO: 191821 - RNA, 24 nt, Human
agaaaaaagcagcuuaaggacaaa

SEQ ID NO: 191822 - RNA, 23 nt, Human
agaagaaaaaagcagcuuaagga

SEQ ID NO: 191823 - RNA, 22 nt, Human
agcaaauuuaaaaaaaaaaaaa

SEQ ID NO: 191824 - RNA, 18 nt, Human
agcaggggcaggagcagg

SEQ ID NO: 191825 - RNA, 20 nt, Human
agccugagguccucagcugg

SEQ ID NO: 191826 - RNA, 18 nt, Human
aggaagguuacaauaaga

SEQ ID NO: 191827 - RNA, 22 nt, Human
aguaaaaaacaggcacauacaa

SEQ ID NO: 191828 - RNA, 26 nt, Human
aguacuaacaccaaggaagugaaaau

SEQ ID NO: 191829 - RNA, 20 nt, Human
caauuucucucucuucccuc

SEQ ID NO: 191830 - RNA, 22 nt, Human
caccucuacaauuaauagcuga

SEQ ID NO: 191831 - RNA, 22 nt, Human
cagaaaggagguugguuaaucc

SEQ ID NO: 191832 - RNA, 24 nt, Human
cagugcugaauuuagcaacuauaa

SEQ ID NO: 191833 - RNA, 20 nt, Human
caucuaaugcuaagaguaaa

SEQ ID NO: 191834 - RNA, 24 nt, Human
caucuaaugcuaagaguaaaaaac

SEQ ID NO: 191835 - RNA, 19 nt, Human
ccaauuaauagaagaaaaa

SEQ ID NO: 191836 - RNA, 19 nt, Human
cccaauuucucucucuucc

SEQ ID NO: 191837 - RNA, 24 nt, Human
ccccaaagauuccuuaucugugaa

SEQ ID NO: 191838 - RNA, 23 nt, Human
ccugcugcuggcccccuuucuuc

SEQ ID NO: 191839 - RNA, 23 nt, Human
ccuggggucucccacccugggag

SEQ ID NO: 191840 - RNA, 22 nt, Human
cucaucugcuacuucaugacaa

SEQ ID NO: 191841 - RNA, 18 nt, Human
cuggggucucccacccug

SEQ ID NO: 191842 - RNA, 18 nt, Human
cuuaaggacaaauuauga

SEQ ID NO: 191843 - RNA, 18 nt, Human
cuuugcacaugaaacucc

SEQ ID NO: 191844 - RNA, 24 nt, Human
cuuugugcuaaacugacugcccuc

SEQ ID NO: 191845 - RNA, 19 nt, Human
gaaaauaccuggugggucu

SEQ ID NO: 191846 - RNA, 25 nt, Human
gagcaggggcaggagcaggggaugc

SEQ ID NO: 191847 - RNA, 23 nt, Human
gccagaaaggccuggggucuccc

SEQ ID NO: 191848 - RNA, 27 nt, Human
ggaggggagagcuuuaugcaggagugg

SEQ ID NO: 191849 - RNA, 24 nt, Human
gggcaggagcaggggaugcagacg

SEQ ID NO: 191850 - RNA, 19 nt, Human
ggggucucccacccuggga

SEQ ID NO: 191851 - RNA, 20 nt, Human
uaaaaaacaggcacauacaa

SEQ ID NO: 191852 - RNA, 21 nt, Human
uaaaaugguuauuuaugaagg

SEQ ID NO: 191853 - RNA, 23 nt, Human
uaaaaugguuauuuaugaaggca

SEQ ID NO: 191854 - RNA, 19 nt, Human
uaaacugacugcccucuca

SEQ ID NO: 191855 - RNA, 23 nt, Human
uaacaccaaggaagugaaaauac

SEQ ID NO: 191856 - RNA, 23 nt, Human
uacaauaagaaugugaauagagu

SEQ ID NO: 191857 - RNA, 22 nt, Human
uacacaguuuaauaagagccac

SEQ ID NO: 191858 - RNA, 18 nt, Human
uaccuaggaaaguucuca

SEQ ID NO: 191859 - RNA, 24 nt, Human
uaccuaggaaaguucucaggucuc

SEQ ID NO: 191860 - RNA, 22 nt, Human
uacuaaccucaaacucccaugu

SEQ ID NO: 191861 - RNA, 19 nt, Human
ucaggguccccaauuucuc

SEQ ID NO: 191862 - RNA, 23 nt, Human
uccagaccugcugccagaaaggc

SEQ ID NO: 191863 - RNA, 21 nt, Human
ucccacccugggaggugcugu

SEQ ID NO: 191864 - RNA, 22 nt, Human
ucccauguaagcauuuggggga

SEQ ID NO: 191865 - RNA, 20 nt, Human
ucuacaauuaauagcugaag

SEQ ID NO: 191866 - RNA, 18 nt, Human
ucugaaaauaccuggugg

SEQ ID NO: 191867 - RNA, 24 nt, Human
ugagguccucagcuggucacagga

SEQ ID NO: 191868 - RNA, 21 nt, Human
ugauaaguacaaaauacacag

SEQ ID NO: 191869 - RNA, 22 nt, Human
ugccagaaaggccuggggucuc

SEQ ID NO: 191870 - RNA, 19 nt, Human
ugccaucagccuaaccaac

SEQ ID NO: 191871 - RNA, 21 nt, Human
ugcuuugugcuaaacugacca

SEQ ID NO: 191872 - RNA, 21 nt, Human
uggcuaccgggguguggucag

SEQ ID NO: 191873 - RNA, 21 nt, Human
ugggggauacguguagugaua

SEQ ID NO: 191874 - RNA, 22 nt, Human
uguagugauaaguacaaaauac

SEQ ID NO: 191875 - RNA, 18 nt, Human
ugugguuauucuucucac

SEQ ID NO: 191876 - RNA, 18 nt, Human
uucaggguccccaauuuc

SEQ ID NO: 191877 - RNA, 21 nt, Human
uucuugucccugauggcaccu

SEQ ID NO: 191878 - RNA, 19 nt, Human
uugcuaucaaucuguuucc

SEQ ID NO: 191879 - RNA, 21 nt, Human
uuuaaaaaaaaaaaaaaaggu

SEQ ID NO: 191880 - RNA, 26 nt, Human
uuuaaaaaaaaaaaaaaagguuaaca

SEQ ID NO: 191881 - RNA, 26 nt, Human
uuuuguagccgagcaggggcaggagc

SEQ ID NO: 191882 - RNA, 18 nt, Human
aggaagggaggggacggg

SEQ ID NO: 191883 - RNA, 26 nt, Human
aggaagggaggggacgggggcagggc

SEQ ID NO: 191884 - RNA, 19 nt, Human
agggaggggacgggggcag

SEQ ID NO: 191885 - RNA, 18 nt, Human
caggaauaaauaaggaag

SEQ ID NO: 191886 - RNA, 21 nt, Human
cgucugucuggcugucccacu

SEQ ID NO: 191887 - RNA, 18 nt, Human
ggaaaacaaaagaaccag

SEQ ID NO: 191888 - RNA, 23 nt, Human
ggaagggaggggacgggggcagg

SEQ ID NO: 191889 - RNA, 18 nt, Human
gggacgggggcagggcag

SEQ ID NO: 191890 - RNA, 24 nt, Human
ucuggggcagcaggaauaaauaag

SEQ ID NO: 191891 - RNA, 18 nt, Human
uguucuggggcagcagga

SEQ ID NO: 191892 - RNA, 21 nt, Human
uguucuggggcagcaggaaua

SEQ ID NO: 191893 - RNA, 25 nt, Human
aaacagaauacagguuaauaaacaa

SEQ ID NO: 191894 - RNA, 23 nt, Human
aagaaguaucaccaauuaccgcc

SEQ ID NO: 191895 - RNA, 27 nt, Human
aagcaaugaaauaaaagggauugcuau

SEQ ID NO: 191896 - RNA, 21 nt, Human
acccauuccaauucucuccag

SEQ ID NO: 191897 - RNA, 26 nt, Human
acccucugcacagugucucuuuguca

SEQ ID NO: 191898 - RNA, 22 nt, Human
aggacacccauugaaaagucaa

SEQ ID NO: 191899 - RNA, 18 nt, Human
caccaauuaccgccaccc

SEQ ID NO: 191900 - RNA, 24 nt, Human
cacccauugaaaagucaaaagcaa

SEQ ID NO: 191901 - RNA, 20 nt, Human
cacccucugcacagugucuc

SEQ ID NO: 191902 - RNA, 18 nt, Human
cacuuuagccugccaggg

SEQ ID NO: 191903 - RNA, 18 nt, Human
ccgccacccauuccaauu

SEQ ID NO: 191904 - RNA, 24 nt, Human
cuaaacacauuuucaauguuuucu

SEQ ID NO: 191905 - RNA, 24 nt, Human
cuaaagaugugauuggaaaucuac

SEQ ID NO: 191906 - RNA, 19 nt, Human
cugccaggggaugacguug

SEQ ID NO: 191907 - RNA, 22 nt, Human
gcuuuauuucucucuaagaagu

SEQ ID NO: 191908 - RNA, 26 nt, Human
gucaaguaauacaugcugaaaaaaaa

SEQ ID NO: 191909 - RNA, 22 nt, Human
uaaaagguuccuaggacaccca

SEQ ID NO: 191910 - RNA, 23 nt, Human
uaaaagguuccuaggacacccau

SEQ ID NO: 191911 - RNA, 26 nt, Human
uaaaagguuccuaggacacccauuga

SEQ ID NO: 191912 - RNA, 23 nt, Human
uaggacacccauugaaaagggag

SEQ ID NO: 191913 - RNA, 19 nt, Human
ucagacacuaaagauguga

SEQ ID NO: 191914 - RNA, 25 nt, Human
ucuaaacacauuuucaauguuuucu

SEQ ID NO: 191915 - RNA, 24 nt, Human
ugaaaagucaaaagcaaugaaaua

SEQ ID NO: 191916 - RNA, 18 nt, Human
ugaaguggggaauuacag

SEQ ID NO: 191917 - RNA, 20 nt, Human
uggaaaagaacgacacccuu

SEQ ID NO: 191918 - RNA, 20 nt, Human
uucuucccaaaaaugcuuua

SEQ ID NO: 191919 - RNA, 18 nt, Human
uugcuaccuccaauuuua

SEQ ID NO: 191920 - RNA, 20 nt, Human
acaaagaagggcauggaaca

SEQ ID NO: 191921 - RNA, 28 nt, Human
acagaaugggguccaggaaggacagcau

SEQ ID NO: 191922 - RNA, 24 nt, Human
agaaaugugggaaauaugggccgg

SEQ ID NO: 191923 - RNA, 19 nt, Human
agaaugggguccaggaagg

SEQ ID NO: 191924 - RNA, 18 nt, Human
agggccugaagcacaggg

SEQ ID NO: 191925 - RNA, 22 nt, Human
agggguuuggagggccugaagc

SEQ ID NO: 191926 - RNA, 21 nt, Human
ccuccugugggcaaccucagc

SEQ ID NO: 191927 - RNA, 23 nt, Human
ccugugggcaaccucagcagucu

SEQ ID NO: 191928 - RNA, 21 nt, Human
gaaggacagcaucacacacug

SEQ ID NO: 191929 - RNA, 18 nt, Human
gacagaaugggguccagg

SEQ ID NO: 191930 - RNA, 20 nt, Human
gacgcagccacucaaagccu

SEQ ID NO: 191931 - RNA, 21 nt, Human
gcaagagagcaacauauaaua

SEQ ID NO: 191932 - RNA, 20 nt, Human
ggccugaagcacaggggugg

SEQ ID NO: 191933 - RNA, 21 nt, Human
gugggcaaccucagcagucug

SEQ ID NO: 191934 - RNA, 21 nt, Human
uccuccugugggcaaccucag

SEQ ID NO: 191935 - RNA, 24 nt, Human
ugaucuguccuuuugagaucuuuu

SEQ ID NO: 191936 - RNA, 20 nt, Human
uggggaacacagggguuugg

SEQ ID NO: 191937 - RNA, 21 nt, Human
aaacaaguguccuuagcucuc

SEQ ID NO: 191938 - RNA, 24 nt, Human
aaauaagcacagcagguagagcug

SEQ ID NO: 191939 - RNA, 18 nt, Human
aacacagagggugggcug

SEQ ID NO: 191940 - RNA, 21 nt, Human
aacagcaaagccuggaagaga

SEQ ID NO: 191941 - RNA, 21 nt, Human
aacccugcaggaggcccuagc

SEQ ID NO: 191942 - RNA, 22 nt, Human
aagaaccaggguggcuaguggg

SEQ ID NO: 191943 - RNA, 18 nt, Human
aagccaggggcagggagg

SEQ ID NO: 191944 - RNA, 18 nt, Human
aagccaggggcagggagg

SEQ ID NO: 191945 - RNA, 24 nt, Human
aagccaggggcagggaggggggga

SEQ ID NO: 191946 - RNA, 22 nt, Human
acagacacagggucccauuuca

SEQ ID NO: 191947 - RNA, 18 nt, Human
acauaaaugagcacugac

SEQ ID NO: 191948 - RNA, 22 nt, Human
accacacgcacacaggcugaca

SEQ ID NO: 191949 - RNA, 21 nt, Human
accacaggccuggccugggcg

SEQ ID NO: 191950 - RNA, 18 nt, Human
acccccagcccagccccc

SEQ ID NO: 191951 - RNA, 22 nt, Human
acccuguuccaccccacaaccc

SEQ ID NO: 191952 - RNA, 20 nt, Human
agaaaggaugaagaacaggg

SEQ ID NO: 191953 - RNA, 26 nt, Human
agacagccaggucccucaagucaaca

SEQ ID NO: 191954 - RNA, 24 nt, Human
agagaagcagguggaugugaacug

SEQ ID NO: 191955 - RNA, 20 nt, Human
agaggaggcagggguugggg

SEQ ID NO: 191956 - RNA, 19 nt, Human
agagggagggagggagagg

SEQ ID NO: 191957 - RNA, 20 nt, Human
agaggggagaggggcugggc

SEQ ID NO: 191958 - RNA, 21 nt, Human
agaggggagaggggcugggcc

SEQ ID NO: 191959 - RNA, 20 nt, Human
agaggugcugugugaagggg

SEQ ID NO: 191960 - RNA, 22 nt, Human
agaucuggaauccuaagcaaau

SEQ ID NO: 191961 - RNA, 21 nt, Human
agcaagcgggcagagauggga

SEQ ID NO: 191962 - RNA, 22 nt, Human
agccaggggcagggaggggggg

SEQ ID NO: 191963 - RNA, 24 nt, Human
agccugggcagucccagaaggccu

SEQ ID NO: 191964 - RNA, 21 nt, Human
aggaggccucagucccagccc

SEQ ID NO: 191965 - RNA, 20 nt, Human
aggcagggguuggggguagg

SEQ ID NO: 191966 - RNA, 21 nt, Human
aggcagggguuggggguaggg

SEQ ID NO: 191967 - RNA, 21 nt, Human
aggcugacaagcaauaggaga

SEQ ID NO: 191968 - RNA, 19 nt, Human
aggcuggggcaggugagca

SEQ ID NO: 191969 - RNA, 19 nt, Human
agggagggagggagaggag

SEQ ID NO: 191970 - RNA, 19 nt, Human
aggggcagggaggggggga

SEQ ID NO: 191971 - RNA, 20 nt, Human
aggggcugggccauggaugg

SEQ ID NO: 191972 - RNA, 18 nt, Human
aguggauggagaucugga

SEQ ID NO: 191973 - RNA, 19 nt, Human
aucccacccaccgcccccc

SEQ ID NO: 191974 - RNA, 20 nt, Human
augaggcugaugggagcuga

SEQ ID NO: 191975 - RNA, 25 nt, Human
caaauaagcacagcagguagagcca

SEQ ID NO: 191976 - RNA, 18 nt, Human
caacaagaaccagggugg

SEQ ID NO: 191977 - RNA, 21 nt, Human
cacagcagguagagccaggcu

SEQ ID NO: 191978 - RNA, 21 nt, Human
caccccacaacccugcaggag

SEQ ID NO: 191979 - RNA, 25 nt, Human
cagagggugggcuggugacagacac

SEQ ID NO: 191980 - RNA, 19 nt, Human
cagaguuggagagccuggg

SEQ ID NO: 191981 - RNA, 19 nt, Human
cagcacaggaguagagagg

SEQ ID NO: 191982 - RNA, 20 nt, Human
cagcacaggaguagagagga

SEQ ID NO: 191983 - RNA, 21 nt, Human
cagccaggucccucaagucaa

SEQ ID NO: 191984 - RNA, 23 nt, Human
caggaggcccuagcccaccuucu

SEQ ID NO: 191985 - RNA, 26 nt, Human
caggaggguauagauccuuuauuucc

SEQ ID NO: 191986 - RNA, 18 nt, Human
caggggcagggagggggg

SEQ ID NO: 191987 - RNA, 21 nt, Human
caggggcagggagggggggau

SEQ ID NO: 191988 - RNA, 19 nt, Human
caggucccucaagucaaca

SEQ ID NO: 191989 - RNA, 26 nt, Human
caggugagcacucggggagcuuaucc

SEQ ID NO: 191990 - RNA, 21 nt, Human
cagugaccaaagggccaugag

SEQ ID NO: 191991 - RNA, 20 nt, Human
ccaacaugugggaaagggca

SEQ ID NO: 191992 - RNA, 21 nt, Human
ccagaaggccucucuuccucc

SEQ ID NO: 191993 - RNA, 24 nt, Human
cccagcccuaacccccagcccagc

SEQ ID NO: 191994 - RNA, 18 nt, Human
cccaggccacuggcagaa

SEQ ID NO: 191995 - RNA, 27 nt, Human
cccauagccugggcagucccagaaggc

SEQ ID NO: 191996 - RNA, 24 nt, Human
ccccacaacccugcaggaggcccu

SEQ ID NO: 191997 - RNA, 23 nt, Human
cccccagcuauugaggaacaaag

SEQ ID NO: 191998 - RNA, 22 nt, Human
ccccugggcugccauguggccc

SEQ ID NO: 191999 - RNA, 21 nt, Human
cccuaacccccagcccagccc

SEQ ID NO: 192000 - RNA, 21 nt, Human
cccugggcugccauguggccc

SEQ ID NO: 192001 - RNA, 26 nt, Human
ccuaacccccagcccagcccccagga

SEQ ID NO: 192002 - RNA, 25 nt, Human
ccuagcccaccuucugguccccugg

SEQ ID NO: 192003 - RNA, 23 nt, Human
ccucaagcugucuguggggccuc

SEQ ID NO: 192004 - RNA, 19 nt, Human
ccucacccacccacacaca

SEQ ID NO: 192005 - RNA, 19 nt, Human
ccucucccgggcuucuccu

SEQ ID NO: 192006 - RNA, 21 nt, Human
ccugcaccacacgcacacagg

SEQ ID NO: 192007 - RNA, 19 nt, Human
ccugcaggaggcccuagcc

SEQ ID NO: 192008 - RNA, 20 nt, Human
ccugcaggaggccucagucc

SEQ ID NO: 192009 - RNA, 20 nt, Human
ccuggacacccccaggccac

SEQ ID NO: 192010 - RNA, 19 nt, Human
ccugggguauagaggaggc

SEQ ID NO: 192011 - RNA, 18 nt, Human
ccugggucagcccccagg

SEQ ID NO: 192012 - RNA, 18 nt, Human
ccuuagcucucugagccu

SEQ ID NO: 192013 - RNA, 19 nt, Human
ccuugcuggugaaggccuu

SEQ ID NO: 192014 - RNA, 23 nt, Human
cgcacacaggcugacaagcaaua

SEQ ID NO: 192015 - RNA, 24 nt, Human
cggaaugaggcugaugggagcuga

SEQ ID NO: 192016 - RNA, 21 nt, Human
cuagcccaccuucugacaccc

SEQ ID NO: 192017 - RNA, 18 nt, Human
cuccaccaucccacccac

SEQ ID NO: 192018 - RNA, 22 nt, Human
cucccagacuuugggguuucug

SEQ ID NO: 192019 - RNA, 24 nt, Human
cugaggcgcagugugggggcacag

SEQ ID NO: 192020 - RNA, 22 nt, Human
cuggggagaggagacccuguuc

SEQ ID NO: 192021 - RNA, 18 nt, Human
cuuccucccaggccgugg

SEQ ID NO: 192022 - RNA, 23 nt, Human
gacaggcugggacgggucggacc

SEQ ID NO: 192023 - RNA, 23 nt, Human
gaccacaggccuggccugggcgg

SEQ ID NO: 192024 - RNA, 20 nt, Human
gacggguaccaggacagcac

SEQ ID NO: 192025 - RNA, 21 nt, Human
gagaauggggacaggcuggga

SEQ ID NO: 192026 - RNA, 21 nt, Human
gagggucugcggguguggggc

SEQ ID NO: 192027 - RNA, 20 nt, Human
gcacacaggcugacaagcaa

SEQ ID NO: 192028 - RNA, 20 nt, Human
gcagggguuggggguagggg

SEQ ID NO: 192029 - RNA, 20 nt, Human
gccaggggcagggagggggg

SEQ ID NO: 192030 - RNA, 20 nt, Human
gccccccguguuuguuuuga

SEQ ID NO: 192031 - RNA, 27 nt, Human
gcuguguggccccaaacaaguguccuu

SEQ ID NO: 192032 - RNA, 21 nt, Human
ggaacagcaaagccuggaaga

SEQ ID NO: 192033 - RNA, 19 nt, Human
ggaacagcaaagccuggag

SEQ ID NO: 192034 - RNA, 18 nt, Human
ggaagacagccagguccc

SEQ ID NO: 192035 - RNA, 25 nt, Human
ggacaggcugggacgggucggaccc

SEQ ID NO: 192036 - RNA, 24 nt, Human
ggaugggaaggagggucugcgggu

SEQ ID NO: 192037 - RNA, 20 nt, Human
gggacuguuccaacuguggc

SEQ ID NO: 192038 - RNA, 22 nt, Human
gggcagaacauggaagaggaag

SEQ ID NO: 192039 - RNA, 22 nt, Human
gggcagaacauggaagaggaag

SEQ ID NO: 192040 - RNA, 19 nt, Human
gggcagagaugggaagcug

SEQ ID NO: 192041 - RNA, 19 nt, Human
gggcaucaaggggugaggg

SEQ ID NO: 192042 - RNA, 27 nt, Human
gggcuuggccaggcagcaggaggggcc

SEQ ID NO: 192043 - RNA, 21 nt, Human
ggggcuuggccaggcagcagg

SEQ ID NO: 192044 - RNA, 19 nt, Human
gggguuggggguaggggaa

SEQ ID NO: 192045 - RNA, 19 nt, Human
ggguuucuggcuggggaga

SEQ ID NO: 192046 - RNA, 21 nt, Human
ggguuucuggcuggggagagg

SEQ ID NO: 192047 - RNA, 20 nt, Human
gguauagaggaggcaggggu

SEQ ID NO: 192048 - RNA, 20 nt, Human
guccuuagcucucugagccu

SEQ ID NO: 192049 - RNA, 18 nt, Human
gugaaggccuuugucccc

SEQ ID NO: 192050 - RNA, 25 nt, Human
guggccccaaacaaguguccuuagc

SEQ ID NO: 192051 - RNA, 20 nt, Human
uaacccccagcccagccccc

SEQ ID NO: 192052 - RNA, 18 nt, Human
uagauccuuuauuuccug

SEQ ID NO: 192053 - RNA, 18 nt, Human
uaucagaaggacacggaa

SEQ ID NO: 192054 - RNA, 19 nt, Human
uaugcaaaguccaugcaaa

SEQ ID NO: 192055 - RNA, 18 nt, Human
ucacccacccacacacag

SEQ ID NO: 192056 - RNA, 21 nt, Human
uccaccaucccacccaccgcc

SEQ ID NO: 192057 - RNA, 18 nt, Human
uccaugcaaauaagcaca

SEQ ID NO: 192058 - RNA, 20 nt, Human
ucccagaaggccucucuucc

SEQ ID NO: 192059 - RNA, 20 nt, Human
ucccucaagucaacaagaac

SEQ ID NO: 192060 - RNA, 21 nt, Human
ucccugaagacguuggaaaag

SEQ ID NO: 192061 - RNA, 27 nt, Human
ucccugaagacguuggaaaagccucca

SEQ ID NO: 192062 - RNA, 23 nt, Human
uccuccagccugggucagccccc

SEQ ID NO: 192063 - RNA, 21 nt, Human
ucucccgggcuucuccugccc

SEQ ID NO: 192064 - RNA, 19 nt, Human
ucuuccucccaggccgugg

SEQ ID NO: 192065 - RNA, 22 nt, Human
ugaagaacagggaagacagcca

SEQ ID NO: 192066 - RNA, 22 nt, Human
ugaaggggaucagaggugucua

SEQ ID NO: 192067 - RNA, 23 nt, Human
ugaaggggaucagaggugucuau

SEQ ID NO: 192068 - RNA, 23 nt, Human
ugacaagcaauaggagauugaga

SEQ ID NO: 192069 - RNA, 20 nt, Human
ugacacgccugcugaagcca

SEQ ID NO: 192070 - RNA, 19 nt, Human
ugacagacacaggguccca

SEQ ID NO: 192071 - RNA, 18 nt, Human
ugaggaacaaaggugugg

SEQ ID NO: 192072 - RNA, 19 nt, Human
ugaggaacaaagguguggg

SEQ ID NO: 192073 - RNA, 19 nt, Human
ugaggcgcagugugggggc

SEQ ID NO: 192074 - RNA, 18 nt, Human
ugaggcugaugggagcug

SEQ ID NO: 192075 - RNA, 25 nt, Human
ugcaccacacgcacacaggcugaca

SEQ ID NO: 192076 - RNA, 26 nt, Human
ugcaggcugcugggaacagcaaagcc

SEQ ID NO: 192077 - RNA, 24 nt, Human
ugcaugagugucacaaggucaucu

SEQ ID NO: 192078 - RNA, 18 nt, Human
ugccauguggcccaggcc

SEQ ID NO: 192079 - RNA, 22 nt, Human
ugccauguggcccaggccuggc

SEQ ID NO: 192080 - RNA, 20 nt, Human
ugcuccaccaucccacccac

SEQ ID NO: 192081 - RNA, 19 nt, Human
ugcugccacugcugcagag

SEQ ID NO: 192082 - RNA, 18 nt, Human
ugcugcugccacugcugc

SEQ ID NO: 192083 - RNA, 20 nt, Human
ugcugugugaaggggggcag

SEQ ID NO: 192084 - RNA, 20 nt, Human
uggaauccuaagcaaaugcc

SEQ ID NO: 192085 - RNA, 21 nt, Human
uggccaggcagcaggaggggc

SEQ ID NO: 192086 - RNA, 18 nt, Human
uggcccaggccuggcagc

SEQ ID NO: 192087 - RNA, 20 nt, Human
uggccccaaacaaguguccu

SEQ ID NO: 192088 - RNA, 22 nt, Human
uggccccaaacaaguguccuuc

SEQ ID NO: 192089 - RNA, 27 nt, Human
ugggaagcugaggcgcaggacagagag

SEQ ID NO: 192090 - RNA, 24 nt, Human
ugggcaucaaggggugaggggcac

SEQ ID NO: 192091 - RNA, 24 nt, Human
uggggcauugaugaccacaggccu

SEQ ID NO: 192092 - RNA, 24 nt, Human
uguggggcuuggccaggcagcagg

SEQ ID NO: 192093 - RNA, 21 nt, Human
uguuccaacuguggcccuugc

SEQ ID NO: 192094 - RNA, 20 nt, Human
uuaaagaggcagggcucaca

SEQ ID NO: 192095 - RNA, 21 nt, Human
uuccaccccacaacccugcag

SEQ ID NO: 192096 - RNA, 21 nt, Human
uugcccccugcaugcgccaua

SEQ ID NO: 192097 - RNA, 19 nt, Human
uuugggguuucuggcuggg

SEQ ID NO: 192098 - RNA, 30 nt, Human
uuuguuuugacugcugcugccacugcugcc

SEQ ID NO: 192099 - RNA, 19 nt, Human
aauaaaaaucaaaggcucu

SEQ ID NO: 192100 - RNA, 23 nt, Human
accacucuucaggucuuccgcug

SEQ ID NO: 192101 - RNA, 27 nt, Human
aggcucuguucugaccacucuucaggu

SEQ ID NO: 192102 - RNA, 18 nt, Human
cagccucagcaaggauga

SEQ ID NO: 192103 - RNA, 20 nt, Human
ccccagccucagcaaggaug

SEQ ID NO: 192104 - RNA, 18 nt, Human
ccgccugcugucucgacc

SEQ ID NO: 192105 - RNA, 21 nt, Human
ccugcggugguugccccagcc

SEQ ID NO: 192106 - RNA, 25 nt, Human
ccuuguagcccaggagcacagacug

SEQ ID NO: 192107 - RNA, 33 nt, Human
cucgaccugcggugguugccccagccucagccg

SEQ ID NO: 192108 - RNA, 20 nt, Human
cucuguucugaccacucuuc

SEQ ID NO: 192109 - RNA, 22 nt, Human
cugaccacucuucaggucuucc

SEQ ID NO: 192110 - RNA, 21 nt, Human
gaggcaucugcuccaacuggu

SEQ ID NO: 192111 - RNA, 22 nt, Human
uccgcugaaacggaaaagugca

SEQ ID NO: 192112 - RNA, 20 nt, Human
ugaaaaagguguuguaccug

SEQ ID NO: 192113 - RNA, 26 nt, Human
ugccccagccucagcaaggaugacuu

SEQ ID NO: 192114 - RNA, 27 nt, Human
ugcuccaacuggugcggggcccugcug

SEQ ID NO: 192115 - RNA, 21 nt, Human
ugggaccaucucaggcugggu

SEQ ID NO: 192116 - RNA, 24 nt, Human
uuaaccucaaauagugccaguccc

SEQ ID NO: 192117 - RNA, 19 nt, Human
uuuccucugauaguuuguu

SEQ ID NO: 192118 - RNA, 18 nt, Human
uuuuuuuuuuuuuuuccg

SEQ ID NO: 192119 - RNA, 21 nt, Human
uuuuuuuuuuuuuuuccgugg

SEQ ID NO: 192120 - RNA, 19 nt, Human
uuuuuuuuuuuuuuuuccg

SEQ ID NO: 192121 - RNA, 21 nt, Human
uuuuuuuuuuuuuuuuuccgu

SEQ ID NO: 192122 - RNA, 20 nt, Human
acccagcaaguucguggcuc

SEQ ID NO: 192123 - RNA, 21 nt, Human
aggacccuuuccccuccacuc

SEQ ID NO: 192124 - RNA, 22 nt, Human
caaguucguggcucggggccca

SEQ ID NO: 192125 - RNA, 25 nt, Human
caauaaauacccucccuggagaccc

SEQ ID NO: 192126 - RNA, 24 nt, Human
ccagcagcucuccucuggccuccc

SEQ ID NO: 192127 - RNA, 18 nt, Human
ccccugaagacccuugag

SEQ ID NO: 192128 - RNA, 21 nt, Human
cccucccuggagacccagaag

SEQ ID NO: 192129 - RNA, 22 nt, Human
ccugaccaauaaauacccuccc

SEQ ID NO: 192130 - RNA, 18 nt, Human
ggagacccagaaguccca

SEQ ID NO: 192131 - RNA, 24 nt, Human
gggaaacugaggcccagagaacca

SEQ ID NO: 192132 - RNA, 21 nt, Human
guggcucggggcccagcagcu

SEQ ID NO: 192133 - RNA, 21 nt, Human
ucccuggagacccagaagucc

SEQ ID NO: 192134 - RNA, 18 nt, Human
uccucuggccuccccuga

SEQ ID NO: 192135 - RNA, 22 nt, Human
ucggggcccagcagcucuccuc

SEQ ID NO: 192136 - RNA, 21 nt, Human
ugaccaauaaauacccucccu

SEQ ID NO: 192137 - RNA, 21 nt, Human
uggcagaggagggaaacugag

SEQ ID NO: 192138 - RNA, 18 nt, Human
uggccgggcucucucuuc

SEQ ID NO: 192139 - RNA, 18 nt, Human
uggcucggggcccagcag

SEQ ID NO: 192140 - RNA, 19 nt, Human
uggcucggggcccagcagc

SEQ ID NO: 192141 - RNA, 24 nt, Human
uggcucggggcccagcagcucucc

SEQ ID NO: 192142 - RNA, 19 nt, Human
uuggcagaggagggaaacu

SEQ ID NO: 192143 - RNA, 21 nt, Human
aaaaaaaaaaaaaaaaagccu

SEQ ID NO: 192144 - RNA, 24 nt, Human
aaaaaaaaaaaaaaaagccugugg

SEQ ID NO: 192145 - RNA, 26 nt, Human
aaaaaaaaaaaaaaagccuguggaag

SEQ ID NO: 192146 - RNA, 23 nt, Human
aaaaaaaaaaagccuguggaaga

SEQ ID NO: 192147 - RNA, 26 nt, Human
aaaaacaacauuuaaaaaggauaggg

SEQ ID NO: 192148 - RNA, 19 nt, Human
aaaaagccuguggaagacu

SEQ ID NO: 192149 - RNA, 21 nt, Human
aaaagaaauaaaaacaaaaag

SEQ ID NO: 192150 - RNA, 24 nt, Human
aaagaaauaaaaacaaaaaguuaa

SEQ ID NO: 192151 - RNA, 19 nt, Human
aaauacagcacagccacgg

SEQ ID NO: 192152 - RNA, 21 nt, Human
aaguuagguuguauagguuga

SEQ ID NO: 192153 - RNA, 26 nt, Human
aauccuuuucuuccaugauaacccac

SEQ ID NO: 192154 - RNA, 22 nt, Human
acaguaaggaaaaagugcauaa

SEQ ID NO: 192155 - RNA, 18 nt, Human
agaaaaguaaaauagaga

SEQ ID NO: 192156 - RNA, 21 nt, Human
agaauugggagaaaagucuuu

SEQ ID NO: 192157 - RNA, 20 nt, Human
agacucagcagaacccagga

SEQ ID NO: 192158 - RNA, 22 nt, Human
agucccagcagcagugauaugu

SEQ ID NO: 192159 - RNA, 23 nt, Human
augaaaauaaacccauauaaaug

SEQ ID NO: 192160 - RNA, 24 nt, Human
cacagccacggccuuuaaaacuuc

SEQ ID NO: 192161 - RNA, 21 nt, Human
caugauaacccacauaaagca

SEQ ID NO: 192162 - RNA, 22 nt, Human
ccaggacuggguaauucuuucc

SEQ ID NO: 192163 - RNA, 18 nt, Human
ccugucuguguggucccg

SEQ ID NO: 192164 - RNA, 19 nt, Human
cuguguggucccggagggu

SEQ ID NO: 192165 - RNA, 18 nt, Human
cuuaaaaaaaaaaaaaaa

SEQ ID NO: 192166 - RNA, 18 nt, Human
cuuaaaaaaaaaaaaaaa

SEQ ID NO: 192167 - RNA, 21 nt, Human
gagacgaccggccaaaaaaaa

SEQ ID NO: 192168 - RNA, 20 nt, Human
uaaaaagaaaauccuuccua

SEQ ID NO: 192169 - RNA, 22 nt, Human
uaaaaaggauaggggagucuua

SEQ ID NO: 192170 - RNA, 23 nt, Human
uacagcacagccacggccuuuaa

SEQ ID NO: 192171 - RNA, 23 nt, Human
uaggccaaaacacuuucaggcgg

SEQ ID NO: 192172 - RNA, 24 nt, Human
uauaaauuuuuuaagaacuuauuu

SEQ ID NO: 192173 - RNA, 21 nt, Human
uaucaaacaguccauaaguua

SEQ ID NO: 192174 - RNA, 23 nt, Human
uauuggccuuuucuaaaagaaau

SEQ ID NO: 192175 - RNA, 22 nt, Human
uauuuuaaaaaaggaagaacag

SEQ ID NO: 192176 - RNA, 21 nt, Human
ucaucuaucaaacaguccaua

SEQ ID NO: 192177 - RNA, 19 nt, Human
ucccagcagcagugauaug

SEQ ID NO: 192178 - RNA, 19 nt, Human
ucgguggcgggcaguuucc

SEQ ID NO: 192179 - RNA, 26 nt, Human
ucuaaaagaaauaaaaacaaaaaguu

SEQ ID NO: 192180 - RNA, 22 nt, Human
ucuuuucuuuucuuuucuuuuu

SEQ ID NO: 192181 - RNA, 18 nt, Human
ucuuuuuuuuuuuuuuug

SEQ ID NO: 192182 - RNA, 23 nt, Human
ucuuuuuuuuuuuuuuugugcuu

SEQ ID NO: 192183 - RNA, 19 nt, Human
ugagguauauaggccaaaa

SEQ ID NO: 192184 - RNA, 19 nt, Human
ugcauaaacaaagaauuca

SEQ ID NO: 192185 - RNA, 23 nt, Human
uggcagaaaaguaaaauagagaa

SEQ ID NO: 192186 - RNA, 24 nt, Human
ugguucaaugggcugcucgaagcc

SEQ ID NO: 192187 - RNA, 23 nt, Human
uguggaagacucagcagaaccca

SEQ ID NO: 192188 - RNA, 19 nt, Human
uguuuuacuuuggcagaau

SEQ ID NO: 192189 - RNA, 20 nt, Human
uuaaaaaaaaaaaaaaaaaa

SEQ ID NO: 192190 - RNA, 20 nt, Human
uuaaaaaaaaaaaaaaaaaa

SEQ ID NO: 192191 - RNA, 22 nt, Human
uucucuuuauguuuccguugca

SEQ ID NO: 192192 - RNA, 21 nt, Human
uuuaaaagguagagagagaga

SEQ ID NO: 192193 - RNA, 29 nt, Human
uuucuuuucuuuucuuuuuuuuuuuuuuu

SEQ ID NO: 192194 - RNA, 25 nt, Human
uuucuuuuuuuuuuuuuuugugcuu

SEQ ID NO: 192195 - RNA, 19 nt, Human
uuugucuuuaagauuggca

SEQ ID NO: 192196 - RNA, 23 nt, Human
uuuucuuuuuucuuuucuuuuuu

SEQ ID NO: 192197 - RNA, 25 nt, Human
aaaaaaaaaaaaaaaagcagguaaa

SEQ ID NO: 192198 - RNA, 19 nt, Human
aaaaaaaaaaaaaagcagg

SEQ ID NO: 192199 - RNA, 19 nt, Human
aaaaaacuugaccugaaaa

SEQ ID NO: 192200 - RNA, 20 nt, Human
aaaaaagcagguaaaaauaa

SEQ ID NO: 192201 - RNA, 21 nt, Human
aaaaagcagguaaaaauaaau

SEQ ID NO: 192202 - RNA, 18 nt, Human
aaaacacagcacucccuc

SEQ ID NO: 192203 - RNA, 24 nt, Human
aaaacacagcacucccuccucccu

SEQ ID NO: 192204 - RNA, 22 nt, Human
aaacagccaaaaacagccucag

SEQ ID NO: 192205 - RNA, 21 nt, Human
aaagcaagaaccuuaggaugu

SEQ ID NO: 192206 - RNA, 25 nt, Human
aaauaagugcaguauaaaaaacuug

SEQ ID NO: 192207 - RNA, 22 nt, Human
aaaugcugaagaaaaacaagcc

SEQ ID NO: 192208 - RNA, 21 nt, Human
aacacagcacucccuccuccc

SEQ ID NO: 192209 - RNA, 25 nt, Human
aaccagucgaggucaaacguuguga

SEQ ID NO: 192210 - RNA, 22 nt, Human
aagaaaaacaagcccuuagcga

SEQ ID NO: 192211 - RNA, 21 nt, Human
aagaaacggggauaaagcuga

SEQ ID NO: 192212 - RNA, 18 nt, Human
aagaacaguagccugaaa

SEQ ID NO: 192213 - RNA, 22 nt, Human
aagcaacccuuaagucaaaggc

SEQ ID NO: 192214 - RNA, 23 nt, Human
aagcaagcaacccuuaagucaaa

SEQ ID NO: 192215 - RNA, 22 nt, Human
aagcagacaggcagucugaaaa

SEQ ID NO: 192216 - RNA, 19 nt, Human
aagcagcagagggaaaaca

SEQ ID NO: 192217 - RNA, 22 nt, Human
acacagaauccccugcagcccu

SEQ ID NO: 192218 - RNA, 23 nt, Human
acacagcacucccuccucccucc

SEQ ID NO: 192219 - RNA, 23 nt, Human
acacccaaggccucuguguagcu

SEQ ID NO: 192220 - RNA, 18 nt, Human
acagacaagcuaagaacc

SEQ ID NO: 192221 - RNA, 24 nt, Human
acccugucuuuucucuuccauucc

SEQ ID NO: 192222 - RNA, 21 nt, Human
accuccuuccgcagguugccg

SEQ ID NO: 192223 - RNA, 22 nt, Human
agaaaaacaagcccuuagcgaa

SEQ ID NO: 192224 - RNA, 22 nt, Human
agaaaaaccagucgaggucaaa

SEQ ID NO: 192225 - RNA, 22 nt, Human
agagaaaggaucuccagccucc

SEQ ID NO: 192226 - RNA, 21 nt, Human
agcacucccuccucccuccca

SEQ ID NO: 192227 - RNA, 18 nt, Human
agccaaaaacagccucag

SEQ ID NO: 192228 - RNA, 22 nt, Human
agccaaaaacagccucaggagg

SEQ ID NO: 192229 - RNA, 18 nt, Human
agccggggcuccgcccca

SEQ ID NO: 192230 - RNA, 21 nt, Human
aggccagcccagcaaccuggg

SEQ ID NO: 192231 - RNA, 22 nt, Human
aggugacugcagugauaccuca

SEQ ID NO: 192232 - RNA, 22 nt, Human
aguaaaugcugaagaaaaacaa

SEQ ID NO: 192233 - RNA, 31 nt, Human
auaaaaaacuugaccugaaaauuaaaaaaag

SEQ ID NO: 192234 - RNA, 25 nt, Human
auuaaaaaaaaaaaaaaaagcaggu

SEQ ID NO: 192235 - RNA, 18 nt, Human
auuuguccuuuggaccau

SEQ ID NO: 192236 - RNA, 20 nt, Human
caaaaacagccucaggaggc

SEQ ID NO: 192237 - RNA, 18 nt, Human
caaaacgcugagaacagc

SEQ ID NO: 192238 - RNA, 21 nt, Human
caaaacgcugagaacagccug

SEQ ID NO: 192239 - RNA, 20 nt, Human
caaagauaaccauuuuggau

SEQ ID NO: 192240 - RNA, 19 nt, Human
caaccagcagucuuaccag

SEQ ID NO: 192241 - RNA, 19 nt, Human
caacuucugagugcccucu

SEQ ID NO: 192242 - RNA, 22 nt, Human
caagaaacggggauaaagcuga

SEQ ID NO: 192243 - RNA, 19 nt, Human
caagcagacaggcagucug

SEQ ID NO: 192244 - RNA, 22 nt, Human
caagcagacaggcagucugaaa

SEQ ID NO: 192245 - RNA, 19 nt, Human
caaggccagcccagcaacc

SEQ ID NO: 192246 - RNA, 21 nt, Human
cacaacuucugagugcccucu

SEQ ID NO: 192247 - RNA, 23 nt, Human
cacagacaagcuaagaacccauc

SEQ ID NO: 192248 - RNA, 18 nt, Human
cacagugcaaggcagagc

SEQ ID NO: 192249 - RNA, 25 nt, Human
caccacaaucucuuuguuccuccug

SEQ ID NO: 192250 - RNA, 21 nt, Human
caccauuccuggacccuguuu

SEQ ID NO: 192251 - RNA, 23 nt, Human
cacccugucuuuucucuuccauu

SEQ ID NO: 192252 - RNA, 23 nt, Human
caccuggaaaacccuugaguucg

SEQ ID NO: 192253 - RNA, 20 nt, Human
cagcagaacgauugccugga

SEQ ID NO: 192254 - RNA, 22 nt, Human
cagcagucuuaccagaaacucg

SEQ ID NO: 192255 - RNA, 22 nt, Human
caggaucccagguuuuaaacuc

SEQ ID NO: 192256 - RNA, 19 nt, Human
caggucaaagcagccgcga

SEQ ID NO: 192257 - RNA, 30 nt, Human
cagugauaccucaaaaaauguggcuuugaa

SEQ ID NO: 192258 - RNA, 22 nt, Human
cauacacuaaccggcccagcuc

SEQ ID NO: 192259 - RNA, 20 nt, Human
cauugcacuuuacccgcucu

SEQ ID NO: 192260 - RNA, 22 nt, Human
ccaaggccagcccagcaaccug

SEQ ID NO: 192261 - RNA, 21 nt, Human
ccacugaaugggacuuaacuu

SEQ ID NO: 192262 - RNA, 24 nt, Human
ccagcaaccugggcgcuggcgccc

SEQ ID NO: 192263 - RNA, 19 nt, Human
ccagcccagcaaccugggc

SEQ ID NO: 192264 - RNA, 24 nt, Human
ccccaaaagcagcagagggaaaac

SEQ ID NO: 192265 - RNA, 18 nt, Human
ccccugcagcccugcauc

SEQ ID NO: 192266 - RNA, 18 nt, Human
cccuccucccucccaccc

SEQ ID NO: 192267 - RNA, 22 nt, Human
cccuccucccucccacccuguc

SEQ ID NO: 192268 - RNA, 18 nt, Human
cccucuugucugcugucc

SEQ ID NO: 192269 - RNA, 23 nt, Human
cccugucuuuucucuuccauucc

SEQ ID NO: 192270 - RNA, 26 nt, Human
ccugaaaauuaaaaaaaaaaaaaaaa

SEQ ID NO: 192271 - RNA, 21 nt, Human
ccugcagcccugcaucugggg

SEQ ID NO: 192272 - RNA, 18 nt, Human
ccuguaccugccuguuuu

SEQ ID NO: 192273 - RNA, 20 nt, Human
ccuguaccugccuguuuuug

SEQ ID NO: 192274 - RNA, 24 nt, Human
ccugucuuuucucuuccauucccc

SEQ ID NO: 192275 - RNA, 22 nt, Human
ccuuagcaaaugccugcugccu

SEQ ID NO: 192276 - RNA, 18 nt, Human
ccuuaggauguaggaacc

SEQ ID NO: 192277 - RNA, 19 nt, Human
cgcggcgggaccccccugc

SEQ ID NO: 192278 - RNA, 21 nt, Human
cggcccagcucgcucaguagg

SEQ ID NO: 192279 - RNA, 23 nt, Human
cuaaaacacagcacucccuccuc

SEQ ID NO: 192280 - RNA, 21 nt, Human
cucaaaacgcugagaacagcc

SEQ ID NO: 192281 - RNA, 18 nt, Human
cugagcaguuuccaggug

SEQ ID NO: 192282 - RNA, 20 nt, Human
cugccuuccagccuucaugg

SEQ ID NO: 192283 - RNA, 21 nt, Human
cugccuuccagccuucauggg

SEQ ID NO: 192284 - RNA, 21 nt, Human
cuuuccuuuuuaaugugcacu

SEQ ID NO: 192285 - RNA, 21 nt, Human
cuuuucugaacauguuggggc

SEQ ID NO: 192286 - RNA, 18 nt, Human
cuuuuuaucuccccagca

SEQ ID NO: 192287 - RNA, 21 nt, Human
gaucuccagccucccagaagc

SEQ ID NO: 192288 - RNA, 23 nt, Human
gcagcagagggaaaacagccaaa

SEQ ID NO: 192289 - RNA, 23 nt, Human
gcagugccggaggcggcgcccac

SEQ ID NO: 192290 - RNA, 23 nt, Human
gccaaaaacagccucaggaggca

SEQ ID NO: 192291 - RNA, 23 nt, Human
gccccaauugccaccuugaaaac

SEQ ID NO: 192292 - RNA, 24 nt, Human
gccccaauugccaccuugaaaacc

SEQ ID NO: 192293 - RNA, 18 nt, Human
gccucaggaggcaugaga

SEQ ID NO: 192294 - RNA, 19 nt, Human
gccugcugccuuccagccu

SEQ ID NO: 192295 - RNA, 18 nt, Human
gcggcggcuccaugcccc

SEQ ID NO: 192296 - RNA, 20 nt, Human
gggcugggagaaccuccuuc

SEQ ID NO: 192297 - RNA, 24 nt, Human
gucuuuucucuuccauuccccuuc

SEQ ID NO: 192298 - RNA, 23 nt, Human
gugcagugccggaggcggcgccc

SEQ ID NO: 192299 - RNA, 19 nt, Human
guguugccuccucuaaaca

SEQ ID NO: 192300 - RNA, 24 nt, Human
uacaaaauaacuuagaaaaaccag

SEQ ID NO: 192301 - RNA, 25 nt, Human
uacagguuaaaauacccaagacuuc

SEQ ID NO: 192302 - RNA, 20 nt, Human
uacccgcucugcuugggggc

SEQ ID NO: 192303 - RNA, 22 nt, Human
ucaaaaaauguggcuuugaaga

SEQ ID NO: 192304 - RNA, 18 nt, Human
ucagcaggcccgcggcgg

SEQ ID NO: 192305 - RNA, 22 nt, Human
uccaagauuguagccaauuuga

SEQ ID NO: 192306 - RNA, 23 nt, Human
uccaagauuguagccaauuugau

SEQ ID NO: 192307 - RNA, 18 nt, Human
ucccagaagccugcugug

SEQ ID NO: 192308 - RNA, 19 nt, Human
ucccagaagccugcugugc

SEQ ID NO: 192309 - RNA, 21 nt, Human
ucccagguuuuaaacucaaaa

SEQ ID NO: 192310 - RNA, 25 nt, Human
ucccuccucccucccacccugucuu

SEQ ID NO: 192311 - RNA, 19 nt, Human
ucccuggaauguugaugug

SEQ ID NO: 192312 - RNA, 23 nt, Human
ucucaaagauaaccauuuuggau

SEQ ID NO: 192313 - RNA, 23 nt, Human
ucuccagccucccagaagccugc

SEQ ID NO: 192314 - RNA, 21 nt, Human
ucuccugccaccucugguugu

SEQ ID NO: 192315 - RNA, 19 nt, Human
ucuggguaggggaaggggg

SEQ ID NO: 192316 - RNA, 18 nt, Human
ucuuuucugaacauguug

SEQ ID NO: 192317 - RNA, 25 nt, Human
ugaaaacacagaauccccugcagcc

SEQ ID NO: 192318 - RNA, 21 nt, Human
ugaaaagcuuuccauuggaga

SEQ ID NO: 192319 - RNA, 23 nt, Human
ugaagaaagugaaguggggagug

SEQ ID NO: 192320 - RNA, 21 nt, Human
ugagaaaggacauuuggaggg

SEQ ID NO: 192321 - RNA, 24 nt, Human
ugagaaaggacauuuggagggcaa

SEQ ID NO: 192322 - RNA, 22 nt, Human
ugagaacacgcuugccuccugc

SEQ ID NO: 192323 - RNA, 24 nt, Human
ugaggaaaguugacgaccacagug

SEQ ID NO: 192324 - RNA, 25 nt, Human
ugaggagaauggauggucucaaaga

SEQ ID NO: 192325 - RNA, 21 nt, Human
ugagugcccucuggagcccag

SEQ ID NO: 192326 - RNA, 24 nt, Human
ugaugaggguagaagaggugacug

SEQ ID NO: 192327 - RNA, 18 nt, Human
ugcagugccggaggcggc

SEQ ID NO: 192328 - RNA, 23 nt, Human
ugccaaggaauccguccaagcag

SEQ ID NO: 192329 - RNA, 21 nt, Human
ugcccaaagaucaggcuucug

SEQ ID NO: 192330 - RNA, 27 nt, Human
ugcccauuguuucuuacuaguuucuug

SEQ ID NO: 192331 - RNA, 19 nt, Human
ugccugccugcgcucuggg

SEQ ID NO: 192332 - RNA, 21 nt, Human
ugccuuagcaaaugccugcug

SEQ ID NO: 192333 - RNA, 22 nt, Human
ugcugguucugcacggguuagc

SEQ ID NO: 192334 - RNA, 18 nt, Human
uggaacacccaaggccuc

SEQ ID NO: 192335 - RNA, 21 nt, Human
uggacccuguuuucugaugcc

SEQ ID NO: 192336 - RNA, 24 nt, Human
uggagggcaagcaagcaacccuua

SEQ ID NO: 192337 - RNA, 18 nt, Human
uggccugcaggucccagu

SEQ ID NO: 192338 - RNA, 22 nt, Human
uggcuguaagaauucccuggag

SEQ ID NO: 192339 - RNA, 21 nt, Human
ugggaauaauccugcccuuga

SEQ ID NO: 192340 - RNA, 21 nt, Human
ugggagaaccuccuuccgcag

SEQ ID NO: 192341 - RNA, 18 nt, Human
ugggguaucucacauaaa

SEQ ID NO: 192342 - RNA, 21 nt, Human
ugugcagaugcaagcagacag

SEQ ID NO: 192343 - RNA, 18 nt, Human
uguggcuuugaagaaagu

SEQ ID NO: 192344 - RNA, 23 nt, Human
uguggcuuugaagaaagugaagu

SEQ ID NO: 192345 - RNA, 24 nt, Human
uuagcaaaugccugcugccuucca

SEQ ID NO: 192346 - RNA, 23 nt, Human
uuagcacaacuucugagugcccu

SEQ ID NO: 192347 - RNA, 21 nt, Human
uucagugcuaacucccugcug

SEQ ID NO: 192348 - RNA, 22 nt, Human
uuucucuuccauuccccuuccc

SEQ ID NO: 192349 - RNA, 23 nt, Human
uuuuccuuugcguuuuucuugac

SEQ ID NO: 192350 - RNA, 21 nt, Human
uuuuuuuuuuccuuugcguuu

SEQ ID NO: 192351 - RNA, 22 nt, Human
uuuuuuuuuuuuuuuuuccuuu

SEQ ID NO: 192352 - RNA, 23 nt, Human
uuuuuuuuuuuuuuuuuuccuuu

SEQ ID NO: 192353 - RNA, 27 nt, Human
uuuuuuuuuuuuuuuuuuccuuugggg

SEQ ID NO: 192354 - RNA, 21 nt, Human
acucuaaacaguauuuuaaaa

SEQ ID NO: 192355 - RNA, 19 nt, Human
agucaucagauuuuucaca

SEQ ID NO: 192356 - RNA, 24 nt, Human
auaacuuuuaguauaagcaaaaug

SEQ ID NO: 192357 - RNA, 18 nt, Human
auuuauuauacuguuuaa

SEQ ID NO: 192358 - RNA, 18 nt, Human
cccgcggcugaggaagga

SEQ ID NO: 192359 - RNA, 23 nt, Human
uaaaugcaauauaugcucauaaa

SEQ ID NO: 192360 - RNA, 19 nt, Human
uauaagcaaaaugucacaa

SEQ ID NO: 192361 - RNA, 20 nt, Human
uaugcucauaaacucuaaac

SEQ ID NO: 192362 - RNA, 23 nt, Human
ucucuccaaaagaaaauauucaa

SEQ ID NO: 192363 - RNA, 23 nt, Human
uguacagaaaauuugcaagcuuc

SEQ ID NO: 192364 - RNA, 18 nt, Human
uugcaagcuuccuguaca

SEQ ID NO: 192365 - RNA, 20 nt, Human
aagcaagcccgcgauccuga

SEQ ID NO: 192366 - RNA, 23 nt, Human
aaggccucugaggguuaacaagg

SEQ ID NO: 192367 - RNA, 23 nt, Human
aauggugggcaaugggugagagg

SEQ ID NO: 192368 - RNA, 23 nt, Human
acgggggaaaccugcgcagcccu

SEQ ID NO: 192369 - RNA, 28 nt, Human
caagagaagcuaagcuuauuaauggugg

SEQ ID NO: 192370 - RNA, 21 nt, Human
ccacauauccaagccccugaa

SEQ ID NO: 192371 - RNA, 30 nt, Human
ccaguucacuauuccacauauccaagcccu

SEQ ID NO: 192372 - RNA, 18 nt, Human
cccguacugggacgcgaa

SEQ ID NO: 192373 - RNA, 22 nt, Human
gcgaaccuuugaaccccuccag

SEQ ID NO: 192374 - RNA, 20 nt, Human
ggaaagcaagcccgcgaucc

SEQ ID NO: 192375 - RNA, 18 nt, Human
ggcaaugggugagaggug

SEQ ID NO: 192376 - RNA, 25 nt, Human
ggcaaugggugagagguggaaagga

SEQ ID NO: 192377 - RNA, 23 nt, Human
uaagcuuauuaauggugggcaau

SEQ ID NO: 192378 - RNA, 21 nt, Human
ugagguggcaagagaagcuaa

SEQ ID NO: 192379 - RNA, 19 nt, Human
ugagugacaaacugacaug

SEQ ID NO: 192380 - RNA, 18 nt, Human
uggaaaggacuugaaggc

SEQ ID NO: 192381 - RNA, 20 nt, Human
uggaaaggacuugaaggccu

SEQ ID NO: 192382 - RNA, 23 nt, Human
uggcaagagaagcuaagcuuauu

SEQ ID NO: 192383 - RNA, 20 nt, Human
ugugagaaauugagcgaggc

SEQ ID NO: 192384 - RNA, 24 nt, Human
uuuuagcauaaauaaagguuuuau

SEQ ID NO: 192385 - RNA, 19 nt, Human
acgggugcaggaaggggag

SEQ ID NO: 192386 - RNA, 19 nt, Human
aggaaggggaggaggggcu

SEQ ID NO: 192387 - RNA, 25 nt, Human
aggggcuggggggaggcccaagggg

SEQ ID NO: 192388 - RNA, 18 nt, Human
agucuguggggaccagaa

SEQ ID NO: 192389 - RNA, 22 nt, Human
cacucagacuuuauucaaagac

SEQ ID NO: 192390 - RNA, 18 nt, Human
ccacucagacuuuauuca

SEQ ID NO: 192391 - RNA, 20 nt, Human
cgggugcaggaaggggagga

SEQ ID NO: 192392 - RNA, 22 nt, Human
gaggaggggcuggggggaggcc

SEQ ID NO: 192393 - RNA, 18 nt, Human
gcaggaaggggaggaggg

SEQ ID NO: 192394 - RNA, 23 nt, Human
ggcuggggggaggcccaaggggc

SEQ ID NO: 192395 - RNA, 23 nt, Human
gggaggcccaaggggcaagaagc

SEQ ID NO: 192396 - RNA, 22 nt, Human
gggugcaggaaggggaggaggg

SEQ ID NO: 192397 - RNA, 21 nt, Human
ucaaagaccacggggguacgg

SEQ ID NO: 192398 - RNA, 20 nt, Human
ucucucugagucugugggga

SEQ ID NO: 192399 - RNA, 23 nt, Human
ugcaggaaggggaggaggggcug

SEQ ID NO: 192400 - RNA, 19 nt, Human
agaccaggaagggccggug

SEQ ID NO: 192401 - RNA, 21 nt, Human
aggaagggccggugcaaggag

SEQ ID NO: 192402 - RNA, 18 nt, Human
aggaggggaggagggccc

SEQ ID NO: 192403 - RNA, 18 nt, Human
agucuguggggaccagaa

SEQ ID NO: 192404 - RNA, 24 nt, Human
caaagaccaggaagggccggugca

SEQ ID NO: 192405 - RNA, 22 nt, Human
cacucagacuuuauucaaagac

SEQ ID NO: 192406 - RNA, 23 nt, Human
gccgcccacucagacuuuauuca

SEQ ID NO: 192407 - RNA, 24 nt, Human
gugcaaggaggggaggagggcccg

SEQ ID NO: 192408 - RNA, 19 nt, Human
ucucucugagucugugggg

SEQ ID NO: 192409 - RNA, 23 nt, Human
ugcaaggaggggaggagggcccg

SEQ ID NO: 192410 - RNA, 21 nt, Human
aaggcccuucauaauaucccc

SEQ ID NO: 192411 - RNA, 21 nt, Human
auuggacagcaagaaagcgag

SEQ ID NO: 192412 - RNA, 18 nt, Human
cuagugaacacaguugug

SEQ ID NO: 192413 - RNA, 19 nt, Human
ggaacaaaggaaccuuuaa

SEQ ID NO: 192414 - RNA, 18 nt, Human
uaguaguuggacuuaggg

SEQ ID NO: 192415 - RNA, 24 nt, Human
ucaaggcccuucauaauauccccc

SEQ ID NO: 192416 - RNA, 23 nt, Human
agaaaauagaaucuagggaaaua

SEQ ID NO: 192417 - RNA, 18 nt, Human
aggaaacaguccaggauc

SEQ ID NO: 192418 - RNA, 19 nt, Human
cagaagccauacccuugaa

SEQ ID NO: 192419 - RNA, 21 nt, Human
uaggcagaagccauacccuug

SEQ ID NO: 192420 - RNA, 21 nt, Human
ugaaguaggcauuguguuccc

SEQ ID NO: 192421 - RNA, 23 nt, Human
uuaggcagaagccauacccuuga

SEQ ID NO: 192422 - RNA, 18 nt, Human
aagcagauaugugcugcu

SEQ ID NO: 192423 - RNA, 21 nt, Human
aggccugagagcuugcuagug

SEQ ID NO: 192424 - RNA, 25 nt, Human
cagaaggcuuucucucaaggccaag

SEQ ID NO: 192425 - RNA, 20 nt, Human
ccuguguccucaggggugga

SEQ ID NO: 192426 - RNA, 20 nt, Human
cugcugccucucugucuggc

SEQ ID NO: 192427 - RNA, 19 nt, Human
gccaggccugagagcuugc

SEQ ID NO: 192428 - RNA, 20 nt, Human
gcuggauccugaggcucuuu

SEQ ID NO: 192429 - RNA, 21 nt, Human
gcuugcuagugauugcagcug

SEQ ID NO: 192430 - RNA, 20 nt, Human
gugcagaaggagggugucag

SEQ ID NO: 192431 - RNA, 22 nt, Human
gugcagaaggagggugucaggg

SEQ ID NO: 192432 - RNA, 21 nt, Human
ucucaaggccaagcccagucc

SEQ ID NO: 192433 - RNA, 18 nt, Human
ugcuggauccugaggcuc

SEQ ID NO: 192434 - RNA, 25 nt, Human
uuacugccgaaguucuggcccccug

SEQ ID NO: 192435 - RNA, 22 nt, Human
aaagccuauccuugaaagcucu

SEQ ID NO: 192436 - RNA, 22 nt, Human
ucucagacguuccagaagcgag

SEQ ID NO: 192437 - RNA, 23 nt, Human
ugcagaauaaagccuauccuuga

SEQ ID NO: 192438 - RNA, 22 nt, Human
aaagccuauccuugaaagcucu

SEQ ID NO: 192439 - RNA, 21 nt, Human
aggagcuuauugauaaccuca

SEQ ID NO: 192440 - RNA, 22 nt, Human
ccucagacguuccagaagcgag

SEQ ID NO: 192441 - RNA, 21 nt, Human
gcucugcaucaugggcaguga

SEQ ID NO: 192442 - RNA, 23 nt, Human
ugcagaauaaagccuauccuuga

SEQ ID NO: 192443 - RNA, 19 nt, Human
uugaaagcucugcaucaug

SEQ ID NO: 192444 - RNA, 23 nt, Human
aacccgccgcgcccugcgacccc

SEQ ID NO: 192445 - RNA, 23 nt, Human
caggggucccgcggccuccaggg

SEQ ID NO: 192446 - RNA, 25 nt, Human
ccccgcgcuggaacccgccgcgccc

SEQ ID NO: 192447 - RNA, 18 nt, Human
ccgcagcuucgccgcccg

SEQ ID NO: 192448 - RNA, 18 nt, Human
ccgccgcgcccugcgacc

SEQ ID NO: 192449 - RNA, 19 nt, Human
ccgccgcgcccugcgaccc

SEQ ID NO: 192450 - RNA, 20 nt, Human
ccgcugcgccugcgcggacc

SEQ ID NO: 192451 - RNA, 24 nt, Human
cgccgcgccgcagcuucgccgccc

SEQ ID NO: 192452 - RNA, 24 nt, Human
cgccuggggaucccgcggccaccc

SEQ ID NO: 192453 - RNA, 24 nt, Human
cuccagggggcgccgcgccgcagc

SEQ ID NO: 192454 - RNA, 25 nt, Human
gcgccgcgccgcagcuucgccgccc

SEQ ID NO: 192455 - RNA, 23 nt, Human
ggcagggugggcagcugcacugg

SEQ ID NO: 192456 - RNA, 20 nt, Human
guggggcuggggaaccucca

SEQ ID NO: 192457 - RNA, 18 nt, Human
accugcuccagcccgugg

SEQ ID NO: 192458 - RNA, 21 nt, Human
agucgccaacccgaacccaga

SEQ ID NO: 192459 - RNA, 20 nt, Human
caacccgaacccagagcagc

SEQ ID NO: 192460 - RNA, 22 nt, Human
caacccgaacccagagcagcag

SEQ ID NO: 192461 - RNA, 18 nt, Human
cacgccgccgccgccgcc

SEQ ID NO: 192462 - RNA, 22 nt, Human
cagcccgugguccccagaccaa

SEQ ID NO: 192463 - RNA, 20 nt, Human
ccgcggccagccugcccuuc

SEQ ID NO: 192464 - RNA, 19 nt, Human
cgccgccgccgccgccccg

SEQ ID NO: 192465 - RNA, 20 nt, Human
cuucacgccgccgccgccgc

SEQ ID NO: 192466 - RNA, 24 nt, Human
gcuccagcccgugguccccagacc

SEQ ID NO: 192467 - RNA, 19 nt, Human
uaaauuuccaccugcucca

SEQ ID NO: 192468 - RNA, 21 nt, Human
aaaaaacaaaaacaaaacaaa

SEQ ID NO: 192469 - RNA, 22 nt, Human
aaaaaagagaaaagaaaaaaga

SEQ ID NO: 192470 - RNA, 21 nt, Human
aaaaacacaacaaaugcagca

SEQ ID NO: 192471 - RNA, 23 nt, Human
aaaacaaaacaaaacaaaaaaaa

SEQ ID NO: 192472 - RNA, 24 nt, Human
aaaagaaaacagaaccagacaccc

SEQ ID NO: 192473 - RNA, 24 nt, Human
aaacaaaaacaaaacaaaacaaaa

SEQ ID NO: 192474 - RNA, 19 nt, Human
aaacaaaacaaaacaaaaa

SEQ ID NO: 192475 - RNA, 22 nt, Human
aaacaaaacaaaacaaaacaaa

SEQ ID NO: 192476 - RNA, 25 nt, Human
aaaguaaaaaaacaaaaacaaaaca

SEQ ID NO: 192477 - RNA, 25 nt, Human
aacaaaacaaaacaaaaaaaagaga

SEQ ID NO: 192478 - RNA, 26 nt, Human
aacaaaacaaaacaaaacaaaaaaaa

SEQ ID NO: 192479 - RNA, 18 nt, Human
aacaacaacaaaaaaggg

SEQ ID NO: 192480 - RNA, 24 nt, Human
aagaaaaaagauuacacauucugu

SEQ ID NO: 192481 - RNA, 21 nt, Human
aagaagaaaaaaguaaaaaaa

SEQ ID NO: 192482 - RNA, 24 nt, Human
aagaagaaaaaaguaaaaaaacaa

SEQ ID NO: 192483 - RNA, 26 nt, Human
aagaagaaaaaaguaaaaaaacaaaa

SEQ ID NO: 192484 - RNA, 29 nt, Human
aagaagagggggaggguagaagagguggg

SEQ ID NO: 192485 - RNA, 19 nt, Human
aagagaaaggggagaggag

SEQ ID NO: 192486 - RNA, 20 nt, Human
aagcgggaagggagccccuc

SEQ ID NO: 192487 - RNA, 20 nt, Human
aaugcugggacgggguggga

SEQ ID NO: 192488 - RNA, 19 nt, Human
aauuccuuucacacacccc

SEQ ID NO: 192489 - RNA, 24 nt, Human
acaaaacaaaaaaaagagaaaaga

SEQ ID NO: 192490 - RNA, 24 nt, Human
acaaaacaaaacaaaaaaaagaga

SEQ ID NO: 192491 - RNA, 22 nt, Human
acaaaacaaaacaaaacaaaaa

SEQ ID NO: 192492 - RNA, 22 nt, Human
acaacaacaaaaaagggacaaa

SEQ ID NO: 192493 - RNA, 19 nt, Human
acaggaccaggugaguggg

SEQ ID NO: 192494 - RNA, 24 nt, Human
acuccaagcagaucccccagccuc

SEQ ID NO: 192495 - RNA, 22 nt, Human
acucuggggagggccaagaggg

SEQ ID NO: 192496 - RNA, 21 nt, Human
agaaaacagaaccagacaccc

SEQ ID NO: 192497 - RNA, 19 nt, Human
agaaaacuccaagcagauc

SEQ ID NO: 192498 - RNA, 18 nt, Human
agaagaggugggagcaca

SEQ ID NO: 192499 - RNA, 23 nt, Human
agaagcuggaggccgcugagucc

SEQ ID NO: 192500 - RNA, 20 nt, Human
agagagaaagagaaagggga

SEQ ID NO: 192501 - RNA, 25 nt, Human
agagggggaggguagaagagguggg

SEQ ID NO: 192502 - RNA, 18 nt, Human
agccugaggaagggaagu

SEQ ID NO: 192503 - RNA, 26 nt, Human
agcuaacaacaacaaaaaagggacaa

SEQ ID NO: 192504 - RNA, 19 nt, Human
agcuguccuuccuuuguuc

SEQ ID NO: 192505 - RNA, 23 nt, Human
aggacaggcaaaagggcagaggg

SEQ ID NO: 192506 - RNA, 23 nt, Human
aggcaaaagggcagagggcaggg

SEQ ID NO: 192507 - RNA, 19 nt, Human
aggcgcgcgagagaaggga

SEQ ID NO: 192508 - RNA, 20 nt, Human
agggacaaaaccccacacgc

SEQ ID NO: 192509 - RNA, 22 nt, Human
aggggagggcuggaaagauugg

SEQ ID NO: 192510 - RNA, 23 nt, Human
aggggagggcuggaaagauuggc

SEQ ID NO: 192511 - RNA, 22 nt, Human
aggggggucuggagaagaaucc

SEQ ID NO: 192512 - RNA, 22 nt, Human
auccaggacaaggaggccccag

SEQ ID NO: 192513 - RNA, 19 nt, Human
auccaggggcuagucagcu

SEQ ID NO: 192514 - RNA, 25 nt, Human
augguaauauugagucacagggguu

SEQ ID NO: 192515 - RNA, 24 nt, Human
caaaaacaaaacaaaacaaaacaa

SEQ ID NO: 192516 - RNA, 25 nt, Human
caaaaacaaaacaaaacaaaacaaa

SEQ ID NO: 192517 - RNA, 20 nt, Human
caaaauagcacaaaacgaca

SEQ ID NO: 192518 - RNA, 23 nt, Human
caacaaaaaagggacaaaacccc

SEQ ID NO: 192519 - RNA, 20 nt, Human
caacaggaaguugggcuggg

SEQ ID NO: 192520 - RNA, 23 nt, Human
caacaggaaguugggcugggugg

SEQ ID NO: 192521 - RNA, 23 nt, Human
caagcagaucccccagccucgga

SEQ ID NO: 192522 - RNA, 18 nt, Human
caaggggaagaaaagaaa

SEQ ID NO: 192523 - RNA, 18 nt, Human
cacaaggggaagaaaaga

SEQ ID NO: 192524 - RNA, 20 nt, Human
cacacagcgguagacgacuc

SEQ ID NO: 192525 - RNA, 19 nt, Human
cacagcgguagacgacucc

SEQ ID NO: 192526 - RNA, 23 nt, Human
cacagcuaacaacaacaaaaaag

SEQ ID NO: 192527 - RNA, 25 nt, Human
cacccaggccagggugccaggaaag

SEQ ID NO: 192528 - RNA, 19 nt, Human
cacccccuuucgucuaagg

SEQ ID NO: 192529 - RNA, 21 nt, Human
cacccuuuccaugacgauuug

SEQ ID NO: 192530 - RNA, 18 nt, Human
cacugagcagggugggcc

SEQ ID NO: 192531 - RNA, 18 nt, Human
cagaaagaucccugccaa

SEQ ID NO: 192532 - RNA, 28 nt, Human
cagaaccagacacccaggccagggugcc

SEQ ID NO: 192533 - RNA, 21 nt, Human
cagaaccagacacccaggccg

SEQ ID NO: 192534 - RNA, 22 nt, Human
cagaaguuugggguggggggca

SEQ ID NO: 192535 - RNA, 23 nt, Human
cagaaguuugggguggggggcag

SEQ ID NO: 192536 - RNA, 24 nt, Human
cagaggucgguaggggagggcugg

SEQ ID NO: 192537 - RNA, 22 nt, Human
cagcaggccccucguggcagau

SEQ ID NO: 192538 - RNA, 23 nt, Human
cagcccucccucaagcuccccua

SEQ ID NO: 192539 - RNA, 23 nt, Human
ccaagaagaaaaaaguaaaaaaa

SEQ ID NO: 192540 - RNA, 18 nt, Human
ccaagcugccuccaagga

SEQ ID NO: 192541 - RNA, 21 nt, Human
ccaaggugacuaaacgugaca

SEQ ID NO: 192542 - RNA, 20 nt, Human
ccagcagcccuguuugggag

SEQ ID NO: 192543 - RNA, 18 nt, Human
cccaagcugccuccaagg

SEQ ID NO: 192544 - RNA, 23 nt, Human
ccccagcuuuuccuccagaaaga

SEQ ID NO: 192545 - RNA, 23 nt, Human
cccccagccucggagccuggccu

SEQ ID NO: 192546 - RNA, 18 nt, Human
ccccuuuuuucuuuuucc

SEQ ID NO: 192547 - RNA, 21 nt, Human
ccccuuuuuucuuuuuccuuc

SEQ ID NO: 192548 - RNA, 25 nt, Human
cccgucgccccgacuacuuguccgg

SEQ ID NO: 192549 - RNA, 24 nt, Human
cccucaauuccuuucacacacccc

SEQ ID NO: 192550 - RNA, 18 nt, Human
cccucguggcagauuuca

SEQ ID NO: 192551 - RNA, 21 nt, Human
cccuggaggacacaggcugcu

SEQ ID NO: 192552 - RNA, 24 nt, Human
cccugggagccgccaucuugagcc

SEQ ID NO: 192553 - RNA, 22 nt, Human
ccgccaucuuaacugcccuccu

SEQ ID NO: 192554 - RNA, 18 nt, Human
ccuaggcucgacccuaua

SEQ ID NO: 192555 - RNA, 23 nt, Human
ccuauagaugcggagugaucgcc

SEQ ID NO: 192556 - RNA, 24 nt, Human
ccuccccgcaaaagucucucccca

SEQ ID NO: 192557 - RNA, 22 nt, Human
ccucccucaagcuccccuaggc

SEQ ID NO: 192558 - RNA, 21 nt, Human
ccugcccuggcuggccccagc

SEQ ID NO: 192559 - RNA, 21 nt, Human
ccugguuccccuccauucucc

SEQ ID NO: 192560 - RNA, 23 nt, Human
ccuuuggcucuucccuuucuucu

SEQ ID NO: 192561 - RNA, 19 nt, Human
cgacuccauggaggccgcc

SEQ ID NO: 192562 - RNA, 18 nt, Human
cgccuaggcucaagaagc

SEQ ID NO: 192563 - RNA, 21 nt, Human
cgcgcuccucucucugcuuuc

SEQ ID NO: 192564 - RNA, 19 nt, Human
cgcugcccaggccgccgcg

SEQ ID NO: 192565 - RNA, 23 nt, Human
cggggcuccuugccccuuuuuuc

SEQ ID NO: 192566 - RNA, 19 nt, Human
cggggugggaggggugggc

SEQ ID NO: 192567 - RNA, 26 nt, Human
cgugacauuuuccacagcgaaauaua

SEQ ID NO: 192568 - RNA, 23 nt, Human
cuacacagucacccucccaagcu

SEQ ID NO: 192569 - RNA, 25 nt, Human
cuccaaggacgccugguuccccucc

SEQ ID NO: 192570 - RNA, 18 nt, Human
cuccccuaggcucgaccc

SEQ ID NO: 192571 - RNA, 18 nt, Human
cucccucaagcuccccua

SEQ ID NO: 192572 - RNA, 20 nt, Human
cuccucucucugcuuuccca

SEQ ID NO: 192573 - RNA, 18 nt, Human
cugcccaggccgccgcgg

SEQ ID NO: 192574 - RNA, 18 nt, Human
cugcccaggccgccgcgg

SEQ ID NO: 192575 - RNA, 21 nt, Human
cugccucugcuuccucccaac

SEQ ID NO: 192576 - RNA, 18 nt, Human
cugcuuccucccaacagc

SEQ ID NO: 192577 - RNA, 20 nt, Human
cugcuuccucccaacagcaa

SEQ ID NO: 192578 - RNA, 21 nt, Human
cuggccccagcuuuuccucca

SEQ ID NO: 192579 - RNA, 20 nt, Human
cugggacggggugggagggg

SEQ ID NO: 192580 - RNA, 22 nt, Human
gaaagagaaaggggagaggagu

SEQ ID NO: 192581 - RNA, 18 nt, Human
gaagaaaagaaaacagaa

SEQ ID NO: 192582 - RNA, 23 nt, Human
gaagcaggggggucuggagaaga

SEQ ID NO: 192583 - RNA, 21 nt, Human
gacaaggaggccccagcccuc

SEQ ID NO: 192584 - RNA, 20 nt, Human
gacagaaguuuggggugggg

SEQ ID NO: 192585 - RNA, 20 nt, Human
gaggguagaagaggugggag

SEQ ID NO: 192586 - RNA, 19 nt, Human
gccccuuuuuucuuuuucc

SEQ ID NO: 192587 - RNA, 21 nt, Human
gccgcggggcuccuugccccu

SEQ ID NO: 192588 - RNA, 24 nt, Human
gccuaggcucaagaagcuggaggc

SEQ ID NO: 192589 - RNA, 18 nt, Human
gccuccaaggacgccugg

SEQ ID NO: 192590 - RNA, 19 nt, Human
gcgaaauauacuauaauac

SEQ ID NO: 192591 - RNA, 20 nt, Human
gcgccuaggcucaagaagcu

SEQ ID NO: 192592 - RNA, 18 nt, Human
gcuccucucucugcuuuc

SEQ ID NO: 192593 - RNA, 19 nt, Human
gcuccuugccccuuuuuuc

SEQ ID NO: 192594 - RNA, 19 nt, Human
gcucgcgagggugaagugc

SEQ ID NO: 192595 - RNA, 18 nt, Human
ggacaaggaggccccagc

SEQ ID NO: 192596 - RNA, 23 nt, Human
ggagggggcauggggagagcugg

SEQ ID NO: 192597 - RNA, 21 nt, Human
ggcagagggcaggggccagca

SEQ ID NO: 192598 - RNA, 18 nt, Human
ggccugaguuccaugcug

SEQ ID NO: 192599 - RNA, 20 nt, Human
ggcgggaggcccugggagcc

SEQ ID NO: 192600 - RNA, 20 nt, Human
ggcggugccgguggugcuca

SEQ ID NO: 192601 - RNA, 20 nt, Human
ggcuggguggcaaacagcag

SEQ ID NO: 192602 - RNA, 21 nt, Human
gggaagaaaagaaaacagaac

SEQ ID NO: 192603 - RNA, 21 nt, Human
gggagcacaaaggccucugag

SEQ ID NO: 192604 - RNA, 21 nt, Human
gggcagagggcaggggccagc

SEQ ID NO: 192605 - RNA, 18 nt, Human
gggcauggggagagcugg

SEQ ID NO: 192606 - RNA, 23 nt, Human
gggcgggaggcccugggagccgc

SEQ ID NO: 192607 - RNA, 20 nt, Human
ggggagaggagugaacagcg

SEQ ID NO: 192608 - RNA, 24 nt, Human
ggggagaggagugaacagcggcuc

SEQ ID NO: 192609 - RNA, 19 nt, Human
ggggaggguagaagaggug

SEQ ID NO: 192610 - RNA, 22 nt, Human
ggggccagcaacaggaaguugg

SEQ ID NO: 192611 - RNA, 20 nt, Human
gggggagguggagcaguggc

SEQ ID NO: 192612 - RNA, 18 nt, Human
ggggugggcccuggcggg

SEQ ID NO: 192613 - RNA, 20 nt, Human
gggugggaggggugggcccu

SEQ ID NO: 192614 - RNA, 23 nt, Human
ggugggccgggggagccugagga

SEQ ID NO: 192615 - RNA, 21 nt, Human
gguuccccuccauucuccacc

SEQ ID NO: 192616 - RNA, 25 nt, Human
guaaaaaaacaaaaacaaaacaaaa

SEQ ID NO: 192617 - RNA, 23 nt, Human
guaaaacaacaggaccaggugag

SEQ ID NO: 192618 - RNA, 22 nt, Human
gucacccucccaagcugccucc

SEQ ID NO: 192619 - RNA, 23 nt, Human
guccuuccuuuguuccagcggcc

SEQ ID NO: 192620 - RNA, 22 nt, Human
gugcggccugcagggaggucug

SEQ ID NO: 192621 - RNA, 28 nt, Human
uaaaaaaacaaaaacaaaacaaaacaaa

SEQ ID NO: 192622 - RNA, 23 nt, Human
uaaaaaacacaacaaaugcagca

SEQ ID NO: 192623 - RNA, 19 nt, Human
uaaaacaacaggaccaggu

SEQ ID NO: 192624 - RNA, 19 nt, Human
uaacugcccuccuucccuu

SEQ ID NO: 192625 - RNA, 20 nt, Human
uaauacaacaaaccagaggc

SEQ ID NO: 192626 - RNA, 24 nt, Human
uaggggagggcuggaaagauuggc

SEQ ID NO: 192627 - RNA, 21 nt, Human
uauuuuaaaaacagagagaaa

SEQ ID NO: 192628 - RNA, 21 nt, Human
ucacaccucuccugcccuggc

SEQ ID NO: 192629 - RNA, 21 nt, Human
uccaugacgauuugggggagg

SEQ ID NO: 192630 - RNA, 21 nt, Human
uccaugcugcacagcugcugc

SEQ ID NO: 192631 - RNA, 19 nt, Human
ucccccagccucggagccu

SEQ ID NO: 192632 - RNA, 24 nt, Human
ucccccagccucggagccuggccu

SEQ ID NO: 192633 - RNA, 22 nt, Human
uccccgcaaaagucucucccca

SEQ ID NO: 192634 - RNA, 19 nt, Human
uccccuaggcucgacccua

SEQ ID NO: 192635 - RNA, 21 nt, Human
ucccuuuggcucuucccuuuc

SEQ ID NO: 192636 - RNA, 19 nt, Human
uccgcaagagccgcccgaa

SEQ ID NO: 192637 - RNA, 23 nt, Human
uccuccagaaagaucccugccaa

SEQ ID NO: 192638 - RNA, 22 nt, Human
ucgacagaaguuuggggugggg

SEQ ID NO: 192639 - RNA, 23 nt, Human
ucucgcucaccccgucuccgcaa

SEQ ID NO: 192640 - RNA, 22 nt, Human
ucugccucugcuuccucccccc

SEQ ID NO: 192641 - RNA, 23 nt, Human
ugaaagugugaacuucaccaauu

SEQ ID NO: 192642 - RNA, 19 nt, Human
ugaacagcggcucgcgagg

SEQ ID NO: 192643 - RNA, 23 nt, Human
ugagaaaauguguaagcuuccug

SEQ ID NO: 192644 - RNA, 20 nt, Human
ugaggacaggcaaaagggca

SEQ ID NO: 192645 - RNA, 18 nt, Human
ugagugggcuccaaggug

SEQ ID NO: 192646 - RNA, 19 nt, Human
ugcaaccuaaaaaacacaa

SEQ ID NO: 192647 - RNA, 19 nt, Human
ugccaggaaagccacucug

SEQ ID NO: 192648 - RNA, 18 nt, Human
ugcccuagccucccuugu

SEQ ID NO: 192649 - RNA, 19 nt, Human
ugccugcccccgaccuggc

SEQ ID NO: 192650 - RNA, 19 nt, Human
ugcggaaaccagcagcccu

SEQ ID NO: 192651 - RNA, 19 nt, Human
ugcggccugcagggagguc

SEQ ID NO: 192652 - RNA, 22 nt, Human
ugcuggcaagccuugcuccucg

SEQ ID NO: 192653 - RNA, 20 nt, Human
uggagaagaauccaggggcu

SEQ ID NO: 192654 - RNA, 19 nt, Human
uggagcaguggcugcggaa

SEQ ID NO: 192655 - RNA, 18 nt, Human
uggcaaacagcaggcccc

SEQ ID NO: 192656 - RNA, 22 nt, Human
uggcagauuucacaccucuccu

SEQ ID NO: 192657 - RNA, 21 nt, Human
uggcggguguuccugaagcag

SEQ ID NO: 192658 - RNA, 18 nt, Human
uggcucuucccuuucuuc

SEQ ID NO: 192659 - RNA, 18 nt, Human
ugggaaagaagaggggga

SEQ ID NO: 192660 - RNA, 21 nt, Human
ugggaggggugggcccuggcg

SEQ ID NO: 192661 - RNA, 19 nt, Human
ugggguggggggcagaaaa

SEQ ID NO: 192662 - RNA, 25 nt, Human
uguacacagcuaacaacaacaaaaa

SEQ ID NO: 192663 - RNA, 20 nt, Human
uguccgggcgcucccgcuua

SEQ ID NO: 192664 - RNA, 21 nt, Human
uuacucuacaauagugaacgg

SEQ ID NO: 192665 - RNA, 23 nt, Human
uuagccaagaagaaaaaaguaaa

SEQ ID NO: 192666 - RNA, 23 nt, Human
uuccaugcugcacagcugcugcu

SEQ ID NO: 192667 - RNA, 22 nt, Human
uucuccacccuuuccaugacga

SEQ ID NO: 192668 - RNA, 20 nt, Human
uuuaaaaugggaaagaagag

SEQ ID NO: 192669 - RNA, 23 nt, Human
uuucuuuuuccuucuuuucuuuu

SEQ ID NO: 192670 - RNA, 18 nt, Human
aggaagggggugugggcc

SEQ ID NO: 192671 - RNA, 19 nt, Human
aggaagggggugugggccc

SEQ ID NO: 192672 - RNA, 18 nt, Human
auuuugaaaguuucccuu

SEQ ID NO: 192673 - RNA, 20 nt, Human
auuuugaaaguuucccuucc

SEQ ID NO: 192674 - RNA, 26 nt, Human
caccugggcacccccuggcccugccc

SEQ ID NO: 192675 - RNA, 18 nt, Human
caccuugcagccaccacc

SEQ ID NO: 192676 - RNA, 23 nt, Human
cauuccaggaaauagaaauauca

SEQ ID NO: 192677 - RNA, 21 nt, Human
ccaccaccugggcacccccug

SEQ ID NO: 192678 - RNA, 21 nt, Human
ccaccugggcacccccuggcc

SEQ ID NO: 192679 - RNA, 22 nt, Human
ccccccagcucggcagccccug

SEQ ID NO: 192680 - RNA, 19 nt, Human
cccccuggcccugcccugg

SEQ ID NO: 192681 - RNA, 22 nt, Human
cccccuggcccugcccuggucc

SEQ ID NO: 192682 - RNA, 22 nt, Human
ccucgcagcuugagcgcccccc

SEQ ID NO: 192683 - RNA, 19 nt, Human
ccugggcacccccuggccc

SEQ ID NO: 192684 - RNA, 19 nt, Human
cgcagcuugagcgcccccc

SEQ ID NO: 192685 - RNA, 21 nt, Human
cgcagcuugagcgccccccca

SEQ ID NO: 192686 - RNA, 21 nt, Human
cgucucgcgggcagcccggau

SEQ ID NO: 192687 - RNA, 18 nt, Human
cucgcagcuugagcgccc

SEQ ID NO: 192688 - RNA, 23 nt, Human
gcugaagcgagggugggugucug

SEQ ID NO: 192689 - RNA, 26 nt, Human
gggugucugggaguaggaagggggug

SEQ ID NO: 192690 - RNA, 23 nt, Human
gggugugggcccuggcggauggu

SEQ ID NO: 192691 - RNA, 22 nt, Human
uauuuugaaaguuucccuucca

SEQ ID NO: 192692 - RNA, 24 nt, Human
uccaaaucacagcuguaacuaaaa

SEQ ID NO: 192693 - RNA, 22 nt, Human
uccaaccuacccacuggacaga

SEQ ID NO: 192694 - RNA, 19 nt, Human
uccaggaaauagaaauauc

SEQ ID NO: 192695 - RNA, 22 nt, Human
ucgcagcuugagcgccccccca

SEQ ID NO: 192696 - RNA, 19 nt, Human
ucugggaguaggaaggggg

SEQ ID NO: 192697 - RNA, 20 nt, Human
uggcauuuauaucuuuuauu

SEQ ID NO: 192698 - RNA, 20 nt, Human
uggcugaagcgagggugggu

SEQ ID NO: 192699 - RNA, 23 nt, Human
ugggaguaggaaggggguguggg

SEQ ID NO: 192700 - RNA, 19 nt, Human
uggugcuggagccaccuug

SEQ ID NO: 192701 - RNA, 22 nt, Human
uguggcugaagcgagggugggu

SEQ ID NO: 192702 - RNA, 23 nt, Human
uugaaaguuucccuuccaaauca

SEQ ID NO: 192703 - RNA, 21 nt, Human
uuugaaaguuucccuuccaaa

SEQ ID NO: 192704 - RNA, 20 nt, Human
aggcggcgccgggcagugcg

SEQ ID NO: 192705 - RNA, 18 nt, Human
aggguggggggcgggcgg

SEQ ID NO: 192706 - RNA, 24 nt, Human
auggggguguggggguuaaugggg

SEQ ID NO: 192707 - RNA, 26 nt, Human
caaguauugcacuuagaaaacgaucc

SEQ ID NO: 192708 - RNA, 19 nt, Human
cacggcggcgggaccccag

SEQ ID NO: 192709 - RNA, 18 nt, Human
cagccacugggccgcccc

SEQ ID NO: 192710 - RNA, 20 nt, Human
ccaccuagaggguggggggc

SEQ ID NO: 192711 - RNA, 21 nt, Human
ccccagccucccccccgcgcc

SEQ ID NO: 192712 - RNA, 22 nt, Human
ccccagccucccccccgcgccc

SEQ ID NO: 192713 - RNA, 21 nt, Human
cccccgcgcccugcgcagcca

SEQ ID NO: 192714 - RNA, 21 nt, Human
cccccgcgcccugcgcagccg

SEQ ID NO: 192715 - RNA, 22 nt, Human
ccccgccggcccugcccguccg

SEQ ID NO: 192716 - RNA, 24 nt, Human
ccccuggcccgccugggcccgcgg

SEQ ID NO: 192717 - RNA, 26 nt, Human
cccugcgcagccaggccugccccucc

SEQ ID NO: 192718 - RNA, 18 nt, Human
ccgccgccgccgccgccg

SEQ ID NO: 192719 - RNA, 20 nt, Human
ccgccgccgccgccgccggg

SEQ ID NO: 192720 - RNA, 19 nt, Human
ccgccggcccugcccgucc

SEQ ID NO: 192721 - RNA, 24 nt, Human
ccuggcccgccugggguccccugg

SEQ ID NO: 192722 - RNA, 20 nt, Human
cgcagccaggccugccccuc

SEQ ID NO: 192723 - RNA, 26 nt, Human
cgcagccaggccugccccucggugcc

SEQ ID NO: 192724 - RNA, 19 nt, Human
cgccugggcccgcggggcg

SEQ ID NO: 192725 - RNA, 19 nt, Human
cgcgcgcggacgggggccg

SEQ ID NO: 192726 - RNA, 21 nt, Human
cguccaacuacggcuaccuac

SEQ ID NO: 192727 - RNA, 23 nt, Human
cgucccugucuuacagcuggggg

SEQ ID NO: 192728 - RNA, 21 nt, Human
cuccccgaggucaccggggga

SEQ ID NO: 192729 - RNA, 23 nt, Human
cugcgcagccaggccugccccuc

SEQ ID NO: 192730 - RNA, 19 nt, Human
gaggguggggggcgggcgg

SEQ ID NO: 192731 - RNA, 22 nt, Human
gaggguggggggcgggcggggc

SEQ ID NO: 192732 - RNA, 25 nt, Human
gcagccaggccugccccucggugcc

SEQ ID NO: 192733 - RNA, 23 nt, Human
gcaggggcgaugggggugggcgc

SEQ ID NO: 192734 - RNA, 18 nt, Human
gccgggggcgcggagggg

SEQ ID NO: 192735 - RNA, 24 nt, Human
gcggagccgccgccgccgccgccg

SEQ ID NO: 192736 - RNA, 20 nt, Human
gcgggaccccagccuccccc

SEQ ID NO: 192737 - RNA, 21 nt, Human
gcuuuggucuggaugacggcc

SEQ ID NO: 192738 - RNA, 29 nt, Human
ggaccccagccucccccccgcgcccugcc

SEQ ID NO: 192739 - RNA, 18 nt, Human
ggagggaggcggggugcu

SEQ ID NO: 192740 - RNA, 19 nt, Human
ggagggggcugccccgccg

SEQ ID NO: 192741 - RNA, 22 nt, Human
ggcagcgggaagccggcgggcc

SEQ ID NO: 192742 - RNA, 18 nt, Human
ggcauggcuuuggucugg

SEQ ID NO: 192743 - RNA, 21 nt, Human
gggacggccgggggcgcggag

SEQ ID NO: 192744 - RNA, 19 nt, Human
gggcgcggggcgaugaggg

SEQ ID NO: 192745 - RNA, 22 nt, Human
gggcugccccgccggcccugcc

SEQ ID NO: 192746 - RNA, 19 nt, Human
ggggcaggggcgauggggg

SEQ ID NO: 192747 - RNA, 24 nt, Human
ggggcguggggggccacggugggg

SEQ ID NO: 192748 - RNA, 18 nt, Human
ggggggccacgguggggg

SEQ ID NO: 192749 - RNA, 21 nt, Human
gggguguggggguuaaugggg

SEQ ID NO: 192750 - RNA, 23 nt, Human
ggugccagugcuggagggaggcg

SEQ ID NO: 192751 - RNA, 19 nt, Human
gucuggaugacggccccgc

SEQ ID NO: 192752 - RNA, 21 nt, Human
uacagcugggggaacugaggc

SEQ ID NO: 192753 - RNA, 18 nt, Human
ucuauggcuucugggcgg

SEQ ID NO: 192754 - RNA, 18 nt, Human
ugaggcaccgaggugaag

SEQ ID NO: 192755 - RNA, 19 nt, Human
ugaggggggacggccgggg

SEQ ID NO: 192756 - RNA, 18 nt, Human
ugcacuuagaaaacgauc

SEQ ID NO: 192757 - RNA, 22 nt, Human
ugcgcggaaugggggugugggg

SEQ ID NO: 192758 - RNA, 21 nt, Human
ugcuggagggaggcggggugc

SEQ ID NO: 192759 - RNA, 21 nt, Human
ugcuggagggaggcggggugc

SEQ ID NO: 192760 - RNA, 21 nt, Human
uggcuuuggucuggaugacgg

SEQ ID NO: 192761 - RNA, 19 nt, Human
ugggggaacugaggcaccc

SEQ ID NO: 192762 - RNA, 24 nt, Human
uggggggcgggcggggcuccacag

SEQ ID NO: 192763 - RNA, 19 nt, Human
uguggggguuaauggggcg

SEQ ID NO: 192764 - RNA, 18 nt, Human
uuuuuuuuuuuuuuuuug

SEQ ID NO: 192765 - RNA, 22 nt, Human
uuuuuuuuuuuuuuuuuuuggc

SEQ ID NO: 192766 - RNA, 24 nt, Human
aaauagucuauaaaagcaagugac

SEQ ID NO: 192767 - RNA, 20 nt, Human
aagaagaaagaagagggaag

SEQ ID NO: 192768 - RNA, 25 nt, Human
acaguuaaaccugaaggaagaagga

SEQ ID NO: 192769 - RNA, 31 nt, Human
acauauacacaucuuacauacauauacauag

SEQ ID NO: 192770 - RNA, 25 nt, Human
acauauacauauacauauucauaua

SEQ ID NO: 192771 - RNA, 20 nt, Human
accccaucugccuuucucug

SEQ ID NO: 192772 - RNA, 23 nt, Human
accccaucugccuuucucuggcu

SEQ ID NO: 192773 - RNA, 28 nt, Human
accugccugcucccuccucccucccccu

SEQ ID NO: 192774 - RNA, 21 nt, Human
acucccaccccugcccagccc

SEQ ID NO: 192775 - RNA, 22 nt, Human
acucccaccccugcccagcccc

SEQ ID NO: 192776 - RNA, 21 nt, Human
agaaaagaagaaagaagaggg

SEQ ID NO: 192777 - RNA, 23 nt, Human
agaagaaagaagagggaaggaag

SEQ ID NO: 192778 - RNA, 23 nt, Human
agaagaaagaagagggaaggaag

SEQ ID NO: 192779 - RNA, 25 nt, Human
agaagaaagaagagggaaggaaggg

SEQ ID NO: 192780 - RNA, 25 nt, Human
agaagaaagaagagggaaggaaggg

SEQ ID NO: 192781 - RNA, 21 nt, Human
agagggaaggaagggcccagc

SEQ ID NO: 192782 - RNA, 20 nt, Human
agcaagugaccaaaaaucua

SEQ ID NO: 192783 - RNA, 22 nt, Human
agcaagugaccaaaaaucuaua

SEQ ID NO: 192784 - RNA, 19 nt, Human
agcucgccucgccuccucu

SEQ ID NO: 192785 - RNA, 24 nt, Human
agcucgccucgccuccucugcccc

SEQ ID NO: 192786 - RNA, 20 nt, Human
agggaaccgcuccggagugc

SEQ ID NO: 192787 - RNA, 23 nt, Human
agggcagccccuuucugggggcc

SEQ ID NO: 192788 - RNA, 24 nt, Human
aguggcuaucuacauggcucuaca

SEQ ID NO: 192789 - RNA, 21 nt, Human
auauacauauacauauucaua

SEQ ID NO: 192790 - RNA, 21 nt, Human
auggcagcuguuucucuaaau

SEQ ID NO: 192791 - RNA, 24 nt, Human
cacaucugcucuaagaaccgccaa

SEQ ID NO: 192792 - RNA, 21 nt, Human
caccuccucccgggcccggcu

SEQ ID NO: 192793 - RNA, 22 nt, Human
cacuggccacucccaccccugc

SEQ ID NO: 192794 - RNA, 21 nt, Human
cagagauggggagagaggggg

SEQ ID NO: 192795 - RNA, 25 nt, Human
cagaguggagcuccaaguuacagcu

SEQ ID NO: 192796 - RNA, 19 nt, Human
cagccugcgggccaaggcg

SEQ ID NO: 192797 - RNA, 20 nt, Human
cagggcccuggcccuuuucu

SEQ ID NO: 192798 - RNA, 19 nt, Human
cagugcacagccugcgggc

SEQ ID NO: 192799 - RNA, 22 nt, Human
caguuaaaccugaaggaagaag

SEQ ID NO: 192800 - RNA, 20 nt, Human
cauuugggaccugccugcuc

SEQ ID NO: 192801 - RNA, 20 nt, Human
ccaaggcggguugcugggug

SEQ ID NO: 192802 - RNA, 23 nt, Human
ccaccccugcccagccccggaga

SEQ ID NO: 192803 - RNA, 19 nt, Human
ccccgcccccgcggggaac

SEQ ID NO: 192804 - RNA, 19 nt, Human
ccccggagaccccaucugc

SEQ ID NO: 192805 - RNA, 21 nt, Human
ccccugcccagccccggagac

SEQ ID NO: 192806 - RNA, 18 nt, Human
cccgcccccgcggggaac

SEQ ID NO: 192807 - RNA, 21 nt, Human
cccgcgcucccuucuugccuc

SEQ ID NO: 192808 - RNA, 23 nt, Human
cccgcgggagggcuggcuguccg

SEQ ID NO: 192809 - RNA, 19 nt, Human
cccgggcuuuguggcuggc

SEQ ID NO: 192810 - RNA, 18 nt, Human
cccggggcucccgccgca

SEQ ID NO: 192811 - RNA, 22 nt, Human
cccggggcucccgccgcaaccg

SEQ ID NO: 192812 - RNA, 20 nt, Human
cccugcccagccccggagag

SEQ ID NO: 192813 - RNA, 24 nt, Human
cccuuucugggggcagaguggagc

SEQ ID NO: 192814 - RNA, 20 nt, Human
ccgagcggagcccagcgacc

SEQ ID NO: 192815 - RNA, 23 nt, Human
ccgcacacgugugcgcacaugug

SEQ ID NO: 192816 - RNA, 18 nt, Human
ccgcccgccggucagucc

SEQ ID NO: 192817 - RNA, 19 nt, Human
ccgcgcuacaccuccuccc

SEQ ID NO: 192818 - RNA, 22 nt, Human
ccggcccgucccggggcucccg

SEQ ID NO: 192819 - RNA, 21 nt, Human
ccgggcccggcugggcgcggg

SEQ ID NO: 192820 - RNA, 22 nt, Human
ccuagaccaugcagugcacagc

SEQ ID NO: 192821 - RNA, 26 nt, Human
ccuagaccaugcagugcacagccugc

SEQ ID NO: 192822 - RNA, 18 nt, Human
ccucagggcccuggcccu

SEQ ID NO: 192823 - RNA, 19 nt, Human
cgccgcgcuacaccuccuc

SEQ ID NO: 192824 - RNA, 25 nt, Human
cgcuacauagcuauacauauacaca

SEQ ID NO: 192825 - RNA, 21 nt, Human
cgcuccgaguccccgggcucg

SEQ ID NO: 192826 - RNA, 21 nt, Human
cggccggagaggcucugcggc

SEQ ID NO: 192827 - RNA, 21 nt, Human
cggggcucccgccgcaaccga

SEQ ID NO: 192828 - RNA, 22 nt, Human
cgugugcgcacaugugaguggc

SEQ ID NO: 192829 - RNA, 23 nt, Human
cuaggcccucagggcccuggccg

SEQ ID NO: 192830 - RNA, 28 nt, Human
cuccagguccgcccgccggucaguccgc

SEQ ID NO: 192831 - RNA, 18 nt, Human
cuccgaguccccgggcuc

SEQ ID NO: 192832 - RNA, 22 nt, Human
cucuaaaugaacacaaugacac

SEQ ID NO: 192833 - RNA, 21 nt, Human
cucugccccggcccguccggc

SEQ ID NO: 192834 - RNA, 18 nt, Human
cugaaggaagaaggaagg

SEQ ID NO: 192835 - RNA, 18 nt, Human
cugucucgccgcccgggc

SEQ ID NO: 192836 - RNA, 18 nt, Human
cuucuugccucccucccu

SEQ ID NO: 192837 - RNA, 22 nt, Human
cuuucucuggcuuuugcauuug

SEQ ID NO: 192838 - RNA, 20 nt, Human
gaaagaagagggaaggaagg

SEQ ID NO: 192839 - RNA, 20 nt, Human
gaccugccugcucccuccuc

SEQ ID NO: 192840 - RNA, 21 nt, Human
gagcgcggcgccgcggacggg

SEQ ID NO: 192841 - RNA, 24 nt, Human
gcacagccugcgggccaaggcggg

SEQ ID NO: 192842 - RNA, 23 nt, Human
gccccggagaccccaucugccuu

SEQ ID NO: 192843 - RNA, 19 nt, Human
gccccuuucugggggcaga

SEQ ID NO: 192844 - RNA, 21 nt, Human
gcccgcgcgggucccgggcgu

SEQ ID NO: 192845 - RNA, 18 nt, Human
gcccggcugggcgcgggg

SEQ ID NO: 192846 - RNA, 20 nt, Human
gcccucagggcccuggcccu

SEQ ID NO: 192847 - RNA, 19 nt, Human
gcccuggcccuuuucuccc

SEQ ID NO: 192848 - RNA, 20 nt, Human
gcccuggcccuuuucuccca

SEQ ID NO: 192849 - RNA, 23 nt, Human
gcggcgcgccgcccggcuccagg

SEQ ID NO: 192850 - RNA, 18 nt, Human
ggagagagggggccugcu

SEQ ID NO: 192851 - RNA, 22 nt, Human
ggccaaggcggguugcugggug

SEQ ID NO: 192852 - RNA, 24 nt, Human
ggcccuggcccuuuucucccaagg

SEQ ID NO: 192853 - RNA, 25 nt, Human
ggcccuggcccuuuucucccaaggu

SEQ ID NO: 192854 - RNA, 18 nt, Human
gggaacaaugggcgccgg

SEQ ID NO: 192855 - RNA, 23 nt, Human
gggcccuggcccuuuucucccaa

SEQ ID NO: 192856 - RNA, 20 nt, Human
gggcuccagguccgcccgcc

SEQ ID NO: 192857 - RNA, 18 nt, Human
ggugugugcuugaggccc

SEQ ID NO: 192858 - RNA, 24 nt, Human
gguuauuuucugcugucuuuuguu

SEQ ID NO: 192859 - RNA, 23 nt, Human
gugggggcagccucaggcgccca

SEQ ID NO: 192860 - RNA, 24 nt, Human
guuaaaccugaaggaagaaggaag

SEQ ID NO: 192861 - RNA, 19 nt, Human
uaaacuagaccgcacacgg

SEQ ID NO: 192862 - RNA, 26 nt, Human
uaaacuagaccgcacacgugugcgca

SEQ ID NO: 192863 - RNA, 21 nt, Human
uacauauucauauacagaucu

SEQ ID NO: 192864 - RNA, 22 nt, Human
uagaaaaaaugcuaggcccuca

SEQ ID NO: 192865 - RNA, 21 nt, Human
uccggcccgucccggggcucc

SEQ ID NO: 192866 - RNA, 23 nt, Human
uccuuugccgccggcgugggggc

SEQ ID NO: 192867 - RNA, 21 nt, Human
ucuaaaugaacacaaugacac

SEQ ID NO: 192868 - RNA, 22 nt, Human
ucuacagagcgcuacauagcua

SEQ ID NO: 192869 - RNA, 22 nt, Human
ucuauaaaagcaagugaccaaa

SEQ ID NO: 192870 - RNA, 23 nt, Human
ucucccaaggucgcaggcuucug

SEQ ID NO: 192871 - RNA, 20 nt, Human
ucugccuuucucuggcuuuu

SEQ ID NO: 192872 - RNA, 23 nt, Human
ucugcggccgcggcgcucaggga

SEQ ID NO: 192873 - RNA, 20 nt, Human
ugaccaaaaaucuauagcuu

SEQ ID NO: 192874 - RNA, 19 nt, Human
ugagaggucaggcugggac

SEQ ID NO: 192875 - RNA, 19 nt, Human
ugccccggcccguccggcc

SEQ ID NO: 192876 - RNA, 24 nt, Human
ugcggccgcggcgcucagggaacc

SEQ ID NO: 192877 - RNA, 19 nt, Human
ugcuaggcccucagggccc

SEQ ID NO: 192878 - RNA, 23 nt, Human
ugcugucuuuuguuuuucuggag

SEQ ID NO: 192879 - RNA, 21 nt, Human
ugcuugggcaggcugcgcgcc

SEQ ID NO: 192880 - RNA, 18 nt, Human
uggccacccgcgagcucg

SEQ ID NO: 192881 - RNA, 24 nt, Human
uggggagagagggggccugcugcg

SEQ ID NO: 192882 - RNA, 20 nt, Human
ugggggcagaguggagcucc

SEQ ID NO: 192883 - RNA, 23 nt, Human
ugugaguggcuaucuacauggcu

SEQ ID NO: 192884 - RNA, 23 nt, Human
uuacauacauauacauauacaua

SEQ ID NO: 192885 - RNA, 22 nt, Human
uucucuggcuuuugcauuuggg

SEQ ID NO: 192886 - RNA, 23 nt, Human
uuuuucuggugugugugguuuuu

SEQ ID NO: 192887 - RNA, 23 nt, Human
acccacuucuccaggauccuccc

SEQ ID NO: 192888 - RNA, 19 nt, Human
auccucccagcccccaggc

SEQ ID NO: 192889 - RNA, 20 nt, Human
ccaggauccucccagccccc

SEQ ID NO: 192890 - RNA, 20 nt, Human
cccaggcuggcuuucccucc

SEQ ID NO: 192891 - RNA, 21 nt, Human
cccccaggcuggcuuucccuc

SEQ ID NO: 192892 - RNA, 24 nt, Human
gggcaaccccaggauggggaaggg

SEQ ID NO: 192893 - RNA, 23 nt, Human
uagagcagaauucagacucagcu

SEQ ID NO: 192894 - RNA, 18 nt, Human
ucagccaucuauguuccc

SEQ ID NO: 192895 - RNA, 19 nt, Human
uccccaaccgcgagagccc

SEQ ID NO: 192896 - RNA, 18 nt, Human
uccccacccacuucucca

SEQ ID NO: 192897 - RNA, 18 nt, Human
ucuguccccacccacuuc

SEQ ID NO: 192898 - RNA, 21 nt, Human
uuccccaaccgcgagagcccc

SEQ ID NO: 192899 - RNA, 25 nt, Human
uucuccaggauccucccagccccca

SEQ ID NO: 192900 - RNA, 20 nt, Human
aaaaagccaggaaccuugag

SEQ ID NO: 192901 - RNA, 20 nt, Human
agggcagaggccugggccag

SEQ ID NO: 192902 - RNA, 23 nt, Human
caggacagggcccgaagaacgac

SEQ ID NO: 192903 - RNA, 18 nt, Human
ccaggacagggcccgaag

SEQ ID NO: 192904 - RNA, 20 nt, Human
ccuuuuuucugggggcugac

SEQ ID NO: 192905 - RNA, 23 nt, Human
cgggaaaggagaugucuguggug

SEQ ID NO: 192906 - RNA, 26 nt, Human
cucagggugggguagccgggaaagga

SEQ ID NO: 192907 - RNA, 19 nt, Human
gcagaggccugggccagga

SEQ ID NO: 192908 - RNA, 18 nt, Human
gggcagaggccugggcca

SEQ ID NO: 192909 - RNA, 19 nt, Human
gggccaggacagggcccga

SEQ ID NO: 192910 - RNA, 23 nt, Human
gggccaggacagggcccgaagaa

SEQ ID NO: 192911 - RNA, 19 nt, Human
ucuguggugguucaaaaag

SEQ ID NO: 192912 - RNA, 18 nt, Human
ugccuuuuuucugggggc

SEQ ID NO: 192913 - RNA, 22 nt, Human
ugggugggcagagggcagaggc

SEQ ID NO: 192914 - RNA, 22 nt, Human
ugguucaaaaagccaggaaccu

SEQ ID NO: 192915 - RNA, 20 nt, Human
uuuauugccuuuuuucuggg

SEQ ID NO: 192916 - RNA, 24 nt, Human
aaaaaaaucaacucucuagccuuc

SEQ ID NO: 192917 - RNA, 24 nt, Human
aaaaacacaaaauaagcugggcau

SEQ ID NO: 192918 - RNA, 18 nt, Human
aaaauauccaucgucaca

SEQ ID NO: 192919 - RNA, 20 nt, Human
aaaauauccaucgucacaga

SEQ ID NO: 192920 - RNA, 20 nt, Human
aaagcaccauucccaaucaa

SEQ ID NO: 192921 - RNA, 24 nt, Human
aaagugcugggaccacaggcauga

SEQ ID NO: 192922 - RNA, 20 nt, Human
aaaguuacagaaucacauuu

SEQ ID NO: 192923 - RNA, 20 nt, Human
aacauggcaguuacucaucu

SEQ ID NO: 192924 - RNA, 19 nt, Human
aacauggugaaacaccauc

SEQ ID NO: 192925 - RNA, 20 nt, Human
aacauggugaaacaccaucu

SEQ ID NO: 192926 - RNA, 21 nt, Human
aacauggugaaacaccaucuc

SEQ ID NO: 192927 - RNA, 23 nt, Human
aacccuugccuuuaagaggcaaa

SEQ ID NO: 192928 - RNA, 18 nt, Human
aaccuagccacuuacagc

SEQ ID NO: 192929 - RNA, 20 nt, Human
aaccuagccacuuacagcga

SEQ ID NO: 192930 - RNA, 21 nt, Human
aacuauagacauugcaaccuu

SEQ ID NO: 192931 - RNA, 22 nt, Human
aagaggcaaaugaacaugaaca

SEQ ID NO: 192932 - RNA, 24 nt, Human
aagugagagaaucgcuugagccug

SEQ ID NO: 192933 - RNA, 24 nt, Human
aagugaucugccugccuuggccuc

SEQ ID NO: 192934 - RNA, 25 nt, Human
aagugcuuggguauaacugaccuag

SEQ ID NO: 192935 - RNA, 20 nt, Human
aaucgcuugaaccuggaagg

SEQ ID NO: 192936 - RNA, 18 nt, Human
aaucgcuugagccuggga

SEQ ID NO: 192937 - RNA, 22 nt, Human
aauucucuuuuuagucgcuggc

SEQ ID NO: 192938 - RNA, 21 nt, Human
acaaaacuaugaccacaggca

SEQ ID NO: 192939 - RNA, 19 nt, Human
acaccuguaauccuagaac

SEQ ID NO: 192940 - RNA, 22 nt, Human
acagcgugaccaugucucaaaa

SEQ ID NO: 192941 - RNA, 18 nt, Human
acaggguuucgccauguu

SEQ ID NO: 192942 - RNA, 19 nt, Human
acaggguuucgccauguug

SEQ ID NO: 192943 - RNA, 24 nt, Human
acaggguuucgccauguugaccag

SEQ ID NO: 192944 - RNA, 21 nt, Human
acaggugcccaccaccacacc

SEQ ID NO: 192945 - RNA, 19 nt, Human
acauggcaaaacuccaucu

SEQ ID NO: 192946 - RNA, 19 nt, Human
acauggugaaacaccaucu

SEQ ID NO: 192947 - RNA, 24 nt, Human
accacacuaaaaugccuuucaaua

SEQ ID NO: 192948 - RNA, 24 nt, Human
accacaggcaugagcgaccaugcc

SEQ ID NO: 192949 - RNA, 23 nt, Human
accacuguacucagccugggcga

SEQ ID NO: 192950 - RNA, 24 nt, Human
acccugucucuacuaaaaacacaa

SEQ ID NO: 192951 - RNA, 25 nt, Human
acuccagccugggcaacaagaguga

SEQ ID NO: 192952 - RNA, 19 nt, Human
acucgucacccaggcuuga

SEQ ID NO: 192953 - RNA, 18 nt, Human
acugcacuccagccuugg

SEQ ID NO: 192954 - RNA, 19 nt, Human
acugcacuccagccuuggc

SEQ ID NO: 192955 - RNA, 19 nt, Human
acugcacuccagccuuggg

SEQ ID NO: 192956 - RNA, 24 nt, Human
acuggacagcaaaagucuacaaaa

SEQ ID NO: 192957 - RNA, 20 nt, Human
acuuuauacagucaccaagu

SEQ ID NO: 192958 - RNA, 20 nt, Human
agaacuuugggaggccaagg

SEQ ID NO: 192959 - RNA, 24 nt, Human
agaacuuugggaggccaagguggg

SEQ ID NO: 192960 - RNA, 22 nt, Human
agaaucacauuuuaaaccacca

SEQ ID NO: 192961 - RNA, 18 nt, Human
agacaaaauaagcaugua

SEQ ID NO: 192962 - RNA, 18 nt, Human
agacaggguuucgccaug

SEQ ID NO: 192963 - RNA, 18 nt, Human
agacaggguuucgccaug

SEQ ID NO: 192964 - RNA, 24 nt, Human
agcacuuugggaggccgaggcagg

SEQ ID NO: 192965 - RNA, 21 nt, Human
agccagccgagaucgcaccac

SEQ ID NO: 192966 - RNA, 23 nt, Human
agccaggcgugguggcgggugcc

SEQ ID NO: 192967 - RNA, 24 nt, Human
agcgaucacgccauugcacuccag

SEQ ID NO: 192968 - RNA, 22 nt, Human
agcugggcaugguggcgcaugc

SEQ ID NO: 192969 - RNA, 23 nt, Human
aggaggcugaggcaggagaauca

SEQ ID NO: 192970 - RNA, 23 nt, Human
aggaguccaagaccagucuggcc

SEQ ID NO: 192971 - RNA, 20 nt, Human
aggaguuugagaccagccug

SEQ ID NO: 192972 - RNA, 26 nt, Human
aggcagaucacccgacgucgggaguu

SEQ ID NO: 192973 - RNA, 18 nt, Human
aggcaggagaaucacuug

SEQ ID NO: 192974 - RNA, 22 nt, Human
aggcaggcagaucacccgacgu

SEQ ID NO: 192975 - RNA, 21 nt, Human
aggccaagguggguggaucac

SEQ ID NO: 192976 - RNA, 19 nt, Human
aggcggagguugcagugag

SEQ ID NO: 192977 - RNA, 19 nt, Human
aggcggagguugcggugag

SEQ ID NO: 192978 - RNA, 22 nt, Human
aggcggagguugcggugagcag

SEQ ID NO: 192979 - RNA, 24 nt, Human
aggcgugguggcucacgccuguaa

SEQ ID NO: 192980 - RNA, 24 nt, Human
aggcugaggcaggagaaucacuug

SEQ ID NO: 192981 - RNA, 24 nt, Human
aggcugagucaggagaaucgcuug

SEQ ID NO: 192982 - RNA, 27 nt, Human
aggcugcagccagccgagaucgcacca

SEQ ID NO: 192983 - RNA, 22 nt, Human
aggucaggaguccaagaccagu

SEQ ID NO: 192984 - RNA, 24 nt, Human
agguggguggaucacgaggucagg

SEQ ID NO: 192985 - RNA, 24 nt, Human
agucaggagaaucgcuugaaccug

SEQ ID NO: 192986 - RNA, 19 nt, Human
agucuggccaacaugguga

SEQ ID NO: 192987 - RNA, 24 nt, Human
agugauucuugugccucagccucc

SEQ ID NO: 192988 - RNA, 20 nt, Human
agugcaguggcacaauccug

SEQ ID NO: 192989 - RNA, 19 nt, Human
agugcucuuuuuuuccccu

SEQ ID NO: 192990 - RNA, 22 nt, Human
aguggcuaccacacuggacagc

SEQ ID NO: 192991 - RNA, 24 nt, Human
aucacaaaacuaugaccacaggca

SEQ ID NO: 192992 - RNA, 20 nt, Human
aucacgaggucaggaguccc

SEQ ID NO: 192993 - RNA, 24 nt, Human
aucacgccauugcacuccagccug

SEQ ID NO: 192994 - RNA, 19 nt, Human
aucauaucuuuaaaagggg

SEQ ID NO: 192995 - RNA, 25 nt, Human
aucgcaccacugcacuccagccuug

SEQ ID NO: 192996 - RNA, 23 nt, Human
auugcaccacuguacucagccug

SEQ ID NO: 192997 - RNA, 24 nt, Human
auugcacuccagccugggcaacaa

SEQ ID NO: 192998 - RNA, 25 nt, Human
auugcacuccagccugggcaacaag

SEQ ID NO: 192999 - RNA, 24 nt, Human
auugcuugagcucaggaguuugag

SEQ ID NO: 193000 - RNA, 24 nt, Human
auuggccggacgugguggcucaca

SEQ ID NO: 193001 - RNA, 21 nt, Human
caaaauaagcauguagguggc

SEQ ID NO: 193002 - RNA, 24 nt, Human
caaagugcugggaccacaggcaug

SEQ ID NO: 193003 - RNA, 23 nt, Human
caaaugaacaugaacacaaaaca

SEQ ID NO: 193004 - RNA, 23 nt, Human
caaccuccaccucccaaguucaa

SEQ ID NO: 193005 - RNA, 24 nt, Human
caagaccagucuggccaacauggu

SEQ ID NO: 193006 - RNA, 24 nt, Human
caagccagucuuaguuuuaaauca

SEQ ID NO: 193007 - RNA, 24 nt, Human
caagguggguggaucacgagguca

SEQ ID NO: 193008 - RNA, 22 nt, Human
caagugaucugccugccuuggc

SEQ ID NO: 193009 - RNA, 22 nt, Human
caagugauucuugugccucagc

SEQ ID NO: 193010 - RNA, 27 nt, Human
caagugauucuugugccucagccuccc

SEQ ID NO: 193011 - RNA, 19 nt, Human
cacaaaacuaugaccacag

SEQ ID NO: 193012 - RNA, 24 nt, Human
cacaccuguaauccuagaacuuug

SEQ ID NO: 193013 - RNA, 20 nt, Human
cacagaaaguucuauuagac

SEQ ID NO: 193014 - RNA, 24 nt, Human
cacccgcagucccagcuacuuggg

SEQ ID NO: 193015 - RNA, 23 nt, Human
caccuguaauccuagaacuuugg

SEQ ID NO: 193016 - RNA, 24 nt, Human
caccuguaauccuagaacuuuggg

SEQ ID NO: 193017 - RNA, 24 nt, Human
cacgccugcaaucccagcacuuug

SEQ ID NO: 193018 - RNA, 24 nt, Human
cacgccuguaaucccagcacuuug

SEQ ID NO: 193019 - RNA, 23 nt, Human
cacuccagccugggcaacaagag

SEQ ID NO: 193020 - RNA, 24 nt, Human
cacuccagccugggcaacaagagu

SEQ ID NO: 193021 - RNA, 25 nt, Human
cacuccagccugggcaacaagagug

SEQ ID NO: 193022 - RNA, 21 nt, Human
cacucccgcuccgaagccgga

SEQ ID NO: 193023 - RNA, 18 nt, Human
cacucgucacccaggcuu

SEQ ID NO: 193024 - RNA, 21 nt, Human
cacugcaaccuccaccuccca

SEQ ID NO: 193025 - RNA, 19 nt, Human
cacugcacuccagccuugg

SEQ ID NO: 193026 - RNA, 20 nt, Human
cacugcacuccagccuuggc

SEQ ID NO: 193027 - RNA, 20 nt, Human
cacugcacuccagccuuggc

SEQ ID NO: 193028 - RNA, 22 nt, Human
cacugcacuccagccuuggcga

SEQ ID NO: 193029 - RNA, 24 nt, Human
cacugcacuccagccuuggcgaca

SEQ ID NO: 193030 - RNA, 19 nt, Human
cacuguacucagccugggc

SEQ ID NO: 193031 - RNA, 24 nt, Human
cagaucacccgacgucgggaguuc

SEQ ID NO: 193032 - RNA, 24 nt, Human
cagcacuuugggaggccgaggcag

SEQ ID NO: 193033 - RNA, 24 nt, Human
cagcacuuugggaggccgaggcag

SEQ ID NO: 193034 - RNA, 20 nt, Human
cagcacuuuggggagccaag

SEQ ID NO: 193035 - RNA, 21 nt, Human
cagcacuuuggggagccaagg

SEQ ID NO: 193036 - RNA, 22 nt, Human
cagcauggagaaacccugucuc

SEQ ID NO: 193037 - RNA, 24 nt, Human
cagccuguccagcauggagaaacc

SEQ ID NO: 193038 - RNA, 24 nt, Human
cagcuacucaggaggcugaggcag

SEQ ID NO: 193039 - RNA, 24 nt, Human
caggcagaucacccgacgucggga

SEQ ID NO: 193040 - RNA, 24 nt, Human
caggguuucgccauguugaccagg

SEQ ID NO: 193041 - RNA, 24 nt, Human
caggugcccaccaccacaccuggc

SEQ ID NO: 193042 - RNA, 22 nt, Human
caucugaauaccccuuaaauac

SEQ ID NO: 193043 - RNA, 21 nt, Human
caugagacauuucuguuuugu

SEQ ID NO: 193044 - RNA, 24 nt, Human
caugcuuguaaucccagcuacuug

SEQ ID NO: 193045 - RNA, 24 nt, Human
cauguugaccaggcuggucucaaa

SEQ ID NO: 193046 - RNA, 18 nt, Human
cauugcacuccagccugg

SEQ ID NO: 193047 - RNA, 19 nt, Human
cauugcacuccagccuggg

SEQ ID NO: 193048 - RNA, 21 nt, Human
cauugcacuccagccugggca

SEQ ID NO: 193049 - RNA, 23 nt, Human
cauugcacuccagccugggcaac

SEQ ID NO: 193050 - RNA, 24 nt, Human
cauugcacuccagccugggcaaca

SEQ ID NO: 193051 - RNA, 20 nt, Human
cauuuaaccacaagccaguc

SEQ ID NO: 193052 - RNA, 18 nt, Human
cauuuagggcuccugcac

SEQ ID NO: 193053 - RNA, 24 nt, Human
ccaaagugcugggaccacaggcau

SEQ ID NO: 193054 - RNA, 20 nt, Human
ccacugcacuccagccuugg

SEQ ID NO: 193055 - RNA, 20 nt, Human
ccacugcacuccagccuugg

SEQ ID NO: 193056 - RNA, 21 nt, Human
ccacugcacuccagccuuggc

SEQ ID NO: 193057 - RNA, 23 nt, Human
ccacugcacuccagccuuggcga

SEQ ID NO: 193058 - RNA, 24 nt, Human
ccacugcacuccagccuuggcgac

SEQ ID NO: 193059 - RNA, 19 nt, Human
ccacuguacucagccuggg

SEQ ID NO: 193060 - RNA, 20 nt, Human
ccacuguacucagccugggc

SEQ ID NO: 193061 - RNA, 20 nt, Human
ccacuguacucagccugggc

SEQ ID NO: 193062 - RNA, 23 nt, Human
ccagcauggagaaacccugucuc

SEQ ID NO: 193063 - RNA, 24 nt, Human
ccaggaugccaaaaaaaaaaaaaa

SEQ ID NO: 193064 - RNA, 24 nt, Human
ccaggcagggccugguggcucacg

SEQ ID NO: 193065 - RNA, 22 nt, Human
ccauguugaccaggcuggucuc

SEQ ID NO: 193066 - RNA, 20 nt, Human
ccauugcacuccagccuggg

SEQ ID NO: 193067 - RNA, 21 nt, Human
ccauugcacuccagccugggc

SEQ ID NO: 193068 - RNA, 22 nt, Human
ccauugcacuccagccugggca

SEQ ID NO: 193069 - RNA, 23 nt, Human
ccauugcacuccagccugggcaa

SEQ ID NO: 193070 - RNA, 24 nt, Human
ccauugcacuccagccugggcaac

SEQ ID NO: 193071 - RNA, 22 nt, Human
cccaaguagcugagacuacagg

SEQ ID NO: 193072 - RNA, 23 nt, Human
cccgaccucaagugaucugccug

SEQ ID NO: 193073 - RNA, 23 nt, Human
cccgacgucgggaguucaagacc

SEQ ID NO: 193074 - RNA, 21 nt, Human
cccgcagucccagcuacuugg

SEQ ID NO: 193075 - RNA, 22 nt, Human
ccugcaaucccagcacuuuggg

SEQ ID NO: 193076 - RNA, 19 nt, Human
ccugcaaucccagcuacuc

SEQ ID NO: 193077 - RNA, 21 nt, Human
ccugcaaucccagcuacucag

SEQ ID NO: 193078 - RNA, 22 nt, Human
ccugcaaucccagcuacucagg

SEQ ID NO: 193079 - RNA, 22 nt, Human
ccugccuuggccucccaaagug

SEQ ID NO: 193080 - RNA, 19 nt, Human
ccuugugcucaccaucucc

SEQ ID NO: 193081 - RNA, 24 nt, Human
cgaagcacuagaaaugaaaacaug

SEQ ID NO: 193082 - RNA, 18 nt, Human
cgaccucaagugaucugc

SEQ ID NO: 193083 - RNA, 24 nt, Human
cgagaucgcaccacugcacuccag

SEQ ID NO: 193084 - RNA, 21 nt, Human
cgcaccacugcacuccagccu

SEQ ID NO: 193085 - RNA, 24 nt, Human
cgccauguugaccaggcuggucuc

SEQ ID NO: 193086 - RNA, 22 nt, Human
cgcccgaccucaagugaucugc

SEQ ID NO: 193087 - RNA, 23 nt, Human
cgccugcaaucccagcacuuugg

SEQ ID NO: 193088 - RNA, 23 nt, Human
cgccuguaaucccagcacuuugg

SEQ ID NO: 193089 - RNA, 24 nt, Human
cgccuguaaucccagcacuuuggg

SEQ ID NO: 193090 - RNA, 24 nt, Human
cggauugcuugagcucaggaguuu

SEQ ID NO: 193091 - RNA, 22 nt, Human
cuaccacacuggacagcaaaag

SEQ ID NO: 193092 - RNA, 24 nt, Human
cuagaaaaccaaguaaacaaucua

SEQ ID NO: 193093 - RNA, 19 nt, Human
cuagaacauggcaguuacu

SEQ ID NO: 193094 - RNA, 18 nt, Human
cucaagugaucugccugc

SEQ ID NO: 193095 - RNA, 20 nt, Human
cucaagugaucugccugccu

SEQ ID NO: 193096 - RNA, 22 nt, Human
cucacaccuguaauccuagaac

SEQ ID NO: 193097 - RNA, 24 nt, Human
cucacaccuguaauccuagaacuu

SEQ ID NO: 193098 - RNA, 22 nt, Human
cucacgccugcaaucccagcac

SEQ ID NO: 193099 - RNA, 24 nt, Human
cucacgccugcaaucccagcacuu

SEQ ID NO: 193100 - RNA, 22 nt, Human
cucacgccuguaaucccagcac

SEQ ID NO: 193101 - RNA, 24 nt, Human
cucacgccuguaaucccagcacuu

SEQ ID NO: 193102 - RNA, 24 nt, Human
cucacugcaaccuccaccucccaa

SEQ ID NO: 193103 - RNA, 21 nt, Human
cucccaaguagcugagacuac

SEQ ID NO: 193104 - RNA, 18 nt, Human
cugaaaucuuuaaaggau

SEQ ID NO: 193105 - RNA, 18 nt, Human
cugaagguauauaucccu

SEQ ID NO: 193106 - RNA, 23 nt, Human
cugcaaccuccaccucccaaguu

SEQ ID NO: 193107 - RNA, 24 nt, Human
cugcaaccuccaccucccaaguuc

SEQ ID NO: 193108 - RNA, 20 nt, Human
cugcagccagccgagaucgc

SEQ ID NO: 193109 - RNA, 21 nt, Human
cugcagccagccgagaucgca

SEQ ID NO: 193110 - RNA, 23 nt, Human
cugccuuggccucccaaagugcu

SEQ ID NO: 193111 - RNA, 23 nt, Human
cuggccaacauggugaaacacca

SEQ ID NO: 193112 - RNA, 18 nt, Human
cuggucucaaacgcccga

SEQ ID NO: 193113 - RNA, 20 nt, Human
cugguucuaguccuagaccc

SEQ ID NO: 193114 - RNA, 19 nt, Human
cuucucagucuucucacug

SEQ ID NO: 193115 - RNA, 23 nt, Human
cuugagcucaggaguuugagacc

SEQ ID NO: 193116 - RNA, 25 nt, Human
cuugugccucagccucccaaguagc

SEQ ID NO: 193117 - RNA, 19 nt, Human
gaaaaaauaaaugagaaaa

SEQ ID NO: 193118 - RNA, 23 nt, Human
gaacacucccgcuccgaagccgg

SEQ ID NO: 193119 - RNA, 22 nt, Human
gaaccuggaaggcggagguugc

SEQ ID NO: 193120 - RNA, 18 nt, Human
gaagcacuagaaaugaaa

SEQ ID NO: 193121 - RNA, 23 nt, Human
gaccucaagugaucugccugccu

SEQ ID NO: 193122 - RNA, 23 nt, Human
gacgugguggcucacaccuguaa

SEQ ID NO: 193123 - RNA, 21 nt, Human
gagaaacccugucucuacuaa

SEQ ID NO: 193124 - RNA, 21 nt, Human
gagugcaguggcacaauccug

SEQ ID NO: 193125 - RNA, 22 nt, Human
gagugcaguggcacaauccugg

SEQ ID NO: 193126 - RNA, 24 nt, Human
gaucacccgacgucgggaguucaa

SEQ ID NO: 193127 - RNA, 24 nt, Human
gaucacgaggucaggaguccaaga

SEQ ID NO: 193128 - RNA, 22 nt, Human
gauugcuugagcucaggaguuu

SEQ ID NO: 193129 - RNA, 24 nt, Human
gauugcuugagcucaggaguuuga

SEQ ID NO: 193130 - RNA, 20 nt, Human
gcaccacugcacuccagccu

SEQ ID NO: 193131 - RNA, 22 nt, Human
gcaccauucccaaucaaauaca

SEQ ID NO: 193132 - RNA, 24 nt, Human
gccaacauggugaaacaccaucuc

SEQ ID NO: 193133 - RNA, 22 nt, Human
gccauugcacuccagccugggc

SEQ ID NO: 193134 - RNA, 24 nt, Human
gccauugcacuccagccugggcaa

SEQ ID NO: 193135 - RNA, 20 nt, Human
gccgagaucgcaccacugca

SEQ ID NO: 193136 - RNA, 22 nt, Human
gccuuggccucccaaagugcug

SEQ ID NO: 193137 - RNA, 20 nt, Human
gcuuguaaucccagcuacuu

SEQ ID NO: 193138 - RNA, 24 nt, Human
ggaccacaggcaugagcgaccaug

SEQ ID NO: 193139 - RNA, 19 nt, Human
ggagguugcagugagauug

SEQ ID NO: 193140 - RNA, 18 nt, Human
ggagguugcggugagcag

SEQ ID NO: 193141 - RNA, 24 nt, Human
ggagguugcggugagcagcgauca

SEQ ID NO: 193142 - RNA, 26 nt, Human
ggagguugcggugagcagcggcuagg

SEQ ID NO: 193143 - RNA, 22 nt, Human
ggauugcuugagcucaggaguu

SEQ ID NO: 193144 - RNA, 23 nt, Human
ggcaaaugaacaugaacacaaaa

SEQ ID NO: 193145 - RNA, 21 nt, Human
ggccaggcgugguggcucacg

SEQ ID NO: 193146 - RNA, 21 nt, Human
ggcgcaugcuuguaaucccag

SEQ ID NO: 193147 - RNA, 22 nt, Human
ggcgcaugcuuguaaucccagc

SEQ ID NO: 193148 - RNA, 20 nt, Human
gggcaugguggcgaacaccc

SEQ ID NO: 193149 - RNA, 24 nt, Human
gggccugguggcucacgccugcaa

SEQ ID NO: 193150 - RNA, 23 nt, Human
ggguggaucacgaggucaggagu

SEQ ID NO: 193151 - RNA, 24 nt, Human
gguggcgcaugcuuguaaucccag

SEQ ID NO: 193152 - RNA, 24 nt, Human
gguggcucacaccuguaauccuag

SEQ ID NO: 193153 - RNA, 24 nt, Human
gguggcucacgccugcaaucccag

SEQ ID NO: 193154 - RNA, 24 nt, Human
gguggcucacgccuguaaucccag

SEQ ID NO: 193155 - RNA, 21 nt, Human
guagagacaggguuucgccau

SEQ ID NO: 193156 - RNA, 19 nt, Human
guagcugagacuacaggug

SEQ ID NO: 193157 - RNA, 23 nt, Human
gucaauacaguagccacuagcca

SEQ ID NO: 193158 - RNA, 18 nt, Human
gucaugagacauuucugu

SEQ ID NO: 193159 - RNA, 24 nt, Human
gugauucuugugccucagccuccc

SEQ ID NO: 193160 - RNA, 22 nt, Human
gugccucagccucccaaguagc

SEQ ID NO: 193161 - RNA, 23 nt, Human
gugccucagccucccaaguagcu

SEQ ID NO: 193162 - RNA, 20 nt, Human
guggcucacaccuguaaucc

SEQ ID NO: 193163 - RNA, 22 nt, Human
uaaaaacacaaaauaagcuggg

SEQ ID NO: 193164 - RNA, 21 nt, Human
uaaaaauacaaaaauuagcca

SEQ ID NO: 193165 - RNA, 19 nt, Human
uaaaaucuccaaggacuac

SEQ ID NO: 193166 - RNA, 21 nt, Human
uaaaaucuccaaggacuacuc

SEQ ID NO: 193167 - RNA, 31 nt, Human
uaaauauauucacauaaccaguuauauaaaa

SEQ ID NO: 193168 - RNA, 19 nt, Human
uaaauuccccaccagaacu

SEQ ID NO: 193169 - RNA, 20 nt, Human
uaacugaccuagaacauggc

SEQ ID NO: 193170 - RNA, 25 nt, Human
uaacuugcuacuauuuuaaaagcau

SEQ ID NO: 193171 - RNA, 23 nt, Human
uaagaggcaaaugaacaugaaca

SEQ ID NO: 193172 - RNA, 22 nt, Human
uacaggugcccaccaccacacc

SEQ ID NO: 193173 - RNA, 22 nt, Human
uacauaauuggccaggcguggu

SEQ ID NO: 193174 - RNA, 19 nt, Human
uacaucuggcccuuguuuu

SEQ ID NO: 193175 - RNA, 24 nt, Human
uagaacuuugggaggccaaggugg

SEQ ID NO: 193176 - RNA, 21 nt, Human
uagagacaggguuucgccaug

SEQ ID NO: 193177 - RNA, 22 nt, Human
uagagacaggguuucgccaugu

SEQ ID NO: 193178 - RNA, 21 nt, Human
uaggacuucaaauaugaauua

SEQ ID NO: 193179 - RNA, 18 nt, Human
uauacagucaccaagucc

SEQ ID NO: 193180 - RNA, 18 nt, Human
ucaaaaaacaaacuaaac

SEQ ID NO: 193181 - RNA, 25 nt, Human
ucaaaaaacaaacuaaacgccacaa

SEQ ID NO: 193182 - RNA, 26 nt, Human
ucacacauaauuuuaaaauuugugua

SEQ ID NO: 193183 - RNA, 19 nt, Human
ucacaucuucucagucuuc

SEQ ID NO: 193184 - RNA, 18 nt, Human
ucaccaaguccucugcua

SEQ ID NO: 193185 - RNA, 23 nt, Human
ucacccgacgucgggaguucaag

SEQ ID NO: 193186 - RNA, 24 nt, Human
ucacgaggucaggaguccaagacc

SEQ ID NO: 193187 - RNA, 23 nt, Human
ucacgccauugcacuccagccug

SEQ ID NO: 193188 - RNA, 18 nt, Human
ucacugcaaccuccaccu

SEQ ID NO: 193189 - RNA, 19 nt, Human
ucacugcaaccuccaccuc

SEQ ID NO: 193190 - RNA, 24 nt, Human
ucacugcaaccuccaccucccaag

SEQ ID NO: 193191 - RNA, 27 nt, Human
ucacugcaaccuccaccucccaaguuc

SEQ ID NO: 193192 - RNA, 18 nt, Human
ucagccucccaaguagcu

SEQ ID NO: 193193 - RNA, 21 nt, Human
ucagccucccaaguagcugag

SEQ ID NO: 193194 - RNA, 23 nt, Human
ucaguauguaauuauacacuguu

SEQ ID NO: 193195 - RNA, 27 nt, Human
uccaggaugccaaaaaaaaaaaaaauc

SEQ ID NO: 193196 - RNA, 23 nt, Human
uccaucgucacagaaaguucuau

SEQ ID NO: 193197 - RNA, 24 nt, Human
uccaucgucacagaaaguucuauu

SEQ ID NO: 193198 - RNA, 18 nt, Human
ucccaaagugcugggacc

SEQ ID NO: 193199 - RNA, 24 nt, Human
ucccaaagugcugggaccacaggc

SEQ ID NO: 193200 - RNA, 23 nt, Human
ucccaaguagcugagacuacagg

SEQ ID NO: 193201 - RNA, 20 nt, Human
ucccaaguucaagugauucu

SEQ ID NO: 193202 - RNA, 20 nt, Human
ucccaaguucaagugauucu

SEQ ID NO: 193203 - RNA, 21 nt, Human
ucccacaaagauacaguucuc

SEQ ID NO: 193204 - RNA, 20 nt, Human
ucccugaauaccacuaacuu

SEQ ID NO: 193205 - RNA, 23 nt, Human
ucgcaccacugcacuccagccuu

SEQ ID NO: 193206 - RNA, 22 nt, Human
ucgccauguugaccaggcuggu

SEQ ID NO: 193207 - RNA, 24 nt, Human
ucgcuugaaccuggaaggcggagg

SEQ ID NO: 193208 - RNA, 24 nt, Human
ucgcuugagccugggaaauagagg

SEQ ID NO: 193209 - RNA, 21 nt, Human
ucuacaaaauauccaucguca

SEQ ID NO: 193210 - RNA, 21 nt, Human
ucucaaacgcccgaccucaag

SEQ ID NO: 193211 - RNA, 19 nt, Human
ucuccaaggacuacucuaa

SEQ ID NO: 193212 - RNA, 19 nt, Human
ucuggccaacauggugaaa

SEQ ID NO: 193213 - RNA, 24 nt, Human
ucuggccaacauggugaaacacca

SEQ ID NO: 193214 - RNA, 28 nt, Human
ucuguaucuaucuuaauauguuuccugu

SEQ ID NO: 193215 - RNA, 23 nt, Human
ugaaaaccaggcagggccuggug

SEQ ID NO: 193216 - RNA, 20 nt, Human
ugaaacaccaucuccacuaa

SEQ ID NO: 193217 - RNA, 21 nt, Human
ugaaacaccaucuccacuaaa

SEQ ID NO: 193218 - RNA, 22 nt, Human
ugaaacaccaucuccacuaaaa

SEQ ID NO: 193219 - RNA, 18 nt, Human
ugaauuacagcaagcuuu

SEQ ID NO: 193220 - RNA, 19 nt, Human
ugacauuuagggcugcugc

SEQ ID NO: 193221 - RNA, 23 nt, Human
ugaccaggcuggucucaaacgcc

SEQ ID NO: 193222 - RNA, 18 nt, Human
ugagaccauggauucaca

SEQ ID NO: 193223 - RNA, 21 nt, Human
ugagacuacaggugcccacca

SEQ ID NO: 193224 - RNA, 24 nt, Human
ugagacuacaggugcccaccacca

SEQ ID NO: 193225 - RNA, 24 nt, Human
ugagccugggaaauagaggcugca

SEQ ID NO: 193226 - RNA, 20 nt, Human
ugaggcaggagaaucacuug

SEQ ID NO: 193227 - RNA, 21 nt, Human
ugaggcaggagaaucacuugc

SEQ ID NO: 193228 - RNA, 24 nt, Human
ugaggcaggagaaucacuugcaac

SEQ ID NO: 193229 - RNA, 24 nt, Human
ugagucaggagaaucgcuugaacc

SEQ ID NO: 193230 - RNA, 20 nt, Human
ugauucuugugccucagccu

SEQ ID NO: 193231 - RNA, 21 nt, Human
ugcaccacuguacucagccug

SEQ ID NO: 193232 - RNA, 19 nt, Human
ugcacuccagccugggcaa

SEQ ID NO: 193233 - RNA, 27 nt, Human
ugccaaaaaaaaaaaaaaucaacucuc

SEQ ID NO: 193234 - RNA, 25 nt, Human
ugcccaccaccacaccuggcuaacu

SEQ ID NO: 193235 - RNA, 24 nt, Human
ugccucagccucccaaguagcuga

SEQ ID NO: 193236 - RNA, 24 nt, Human
ugccugcaaucccagcuacucagg

SEQ ID NO: 193237 - RNA, 18 nt, Human
ugccugccuuggccuccc

SEQ ID NO: 193238 - RNA, 19 nt, Human
ugcugggaccacaggcaug

SEQ ID NO: 193239 - RNA, 20 nt, Human
ugcugggaccacaggcauga

SEQ ID NO: 193240 - RNA, 21 nt, Human
ugcuugguucuaagacaguga

SEQ ID NO: 193241 - RNA, 22 nt, Human
ugcuuguaaucccagcuacuug

SEQ ID NO: 193242 - RNA, 23 nt, Human
ugcuuguaaucccagcuacuuga

SEQ ID NO: 193243 - RNA, 29 nt, Human
uggaaggcggagguugcagugacaacggu

SEQ ID NO: 193244 - RNA, 24 nt, Human
uggaaggcggagguugcggugagc

SEQ ID NO: 193245 - RNA, 19 nt, Human
uggcaaaagcaccauuccc

SEQ ID NO: 193246 - RNA, 24 nt, Human
uggcacaauccuggcucacugcaa

SEQ ID NO: 193247 - RNA, 18 nt, Human
uggccaacauggugaaac

SEQ ID NO: 193248 - RNA, 21 nt, Human
uggcgcaugcuuguaauccca

SEQ ID NO: 193249 - RNA, 22 nt, Human
uggcgcaugcuuguaaucccag

SEQ ID NO: 193250 - RNA, 24 nt, Human
uggcgggugccugcaaucccagcu

SEQ ID NO: 193251 - RNA, 19 nt, Human
uggcucacaccuguaaucc

SEQ ID NO: 193252 - RNA, 21 nt, Human
uggcucacaccuguaauccua

SEQ ID NO: 193253 - RNA, 24 nt, Human
uggcucacgccugcaaucccagca

SEQ ID NO: 193254 - RNA, 22 nt, Human
uggcucacgccuguaaucccag

SEQ ID NO: 193255 - RNA, 24 nt, Human
uggcucacgccuguaaucccagca

SEQ ID NO: 193256 - RNA, 24 nt, Human
ugggaagcugaagugagagaaucg

SEQ ID NO: 193257 - RNA, 24 nt, Human
ugggaccacaggcaugagcgacca

SEQ ID NO: 193258 - RNA, 22 nt, Human
ugggaccacauggcaaaacucc

SEQ ID NO: 193259 - RNA, 23 nt, Human
ugggaggccaagguggguggauc

SEQ ID NO: 193260 - RNA, 24 nt, Human
ugggaggccaagguggguggauca

SEQ ID NO: 193261 - RNA, 20 nt, Human
ugggaggccgaggcaggcag

SEQ ID NO: 193262 - RNA, 24 nt, Human
ugggaggccgaggcaggcagauca

SEQ ID NO: 193263 - RNA, 25 nt, Human
ugggcaugguggcgcaugcuuguaa

SEQ ID NO: 193264 - RNA, 22 nt, Human
ugggcgaaaagggcgaaacucc

SEQ ID NO: 193265 - RNA, 24 nt, Human
ugguggcgcaugcuuguaauccca

SEQ ID NO: 193266 - RNA, 22 nt, Human
ugguggcucacaccuguaaucc

SEQ ID NO: 193267 - RNA, 24 nt, Human
ugguggcucacgccugcaauccca

SEQ ID NO: 193268 - RNA, 24 nt, Human
ugguggcucacgccuguaauccca

SEQ ID NO: 193269 - RNA, 18 nt, Human
uguaaucccagcuacuug

SEQ ID NO: 193270 - RNA, 24 nt, Human
uguagagacaggguuucgccaugu

SEQ ID NO: 193271 - RNA, 21 nt, Human
ugucuggcauaaaugcugcag

SEQ ID NO: 193272 - RNA, 21 nt, Human
uuacacaucacaaaacuauga

SEQ ID NO: 193273 - RNA, 23 nt, Human
uuacuaacgaagucuaaucauau

SEQ ID NO: 193274 - RNA, 18 nt, Human
uuagcugggcaugguggc

SEQ ID NO: 193275 - RNA, 18 nt, Human
uuaguuugacuuagauug

SEQ ID NO: 193276 - RNA, 20 nt, Human
uucaaagucugaaaucuuua

SEQ ID NO: 193277 - RNA, 23 nt, Human
uucaagugauucuugugccucag

SEQ ID NO: 193278 - RNA, 18 nt, Human
uucucagcugcaccagca

SEQ ID NO: 193279 - RNA, 24 nt, Human
uugaaccuggaaggcggagguugc

SEQ ID NO: 193280 - RNA, 25 nt, Human
uugagaggcugagucaggagaaucg

SEQ ID NO: 193281 - RNA, 24 nt, Human
uugagugcaguggcacaauccugg

SEQ ID NO: 193282 - RNA, 22 nt, Human
uugcaccacuguacucagccug

SEQ ID NO: 193283 - RNA, 24 nt, Human
uugggaagcugaagugagagaauc

SEQ ID NO: 193284 - RNA, 25 nt, Human
uugggaggccgaggcaggcagauca

SEQ ID NO: 193285 - RNA, 24 nt, Human
uuguagagacaggguuucgccaug

SEQ ID NO: 193286 - RNA, 21 nt, Human
uuuaucuucaacccuugccuu

SEQ ID NO: 193287 - RNA, 24 nt, Human
uuucacucgucacccaggcuugag

SEQ ID NO: 193288 - RNA, 24 nt, Human
uuucgccauguugaccaggcuggu

SEQ ID NO: 193289 - RNA, 24 nt, Human
uuuguagagacaggguuucgccau

SEQ ID NO: 193290 - RNA, 23 nt, Human
uuuuaaauuccccaccagaacuc

SEQ ID NO: 193291 - RNA, 23 nt, Human
uuuuuuguagagacaggguuucg

SEQ ID NO: 193292 - RNA, 24 nt, Human
uuuuuuguagagacaggguuucgc

SEQ ID NO: 193293 - RNA, 24 nt, Human
aaaacacagcucagugacacucuu

SEQ ID NO: 193294 - RNA, 19 nt, Human
aaacacagcucagugacac

SEQ ID NO: 193295 - RNA, 19 nt, Human
aaacaggaacauguacaac

SEQ ID NO: 193296 - RNA, 21 nt, Human
aaacaggaggcugguccaggg

SEQ ID NO: 193297 - RNA, 19 nt, Human
aaacaucaccuacauagac

SEQ ID NO: 193298 - RNA, 22 nt, Human
aaaugacccccuccaugaagau

SEQ ID NO: 193299 - RNA, 27 nt, Human
aacaaaagcaaucuccccacagcccac

SEQ ID NO: 193300 - RNA, 21 nt, Human
aaccucacuccaccccgcaac

SEQ ID NO: 193301 - RNA, 24 nt, Human
acaaaagcaaucuccccacagccc

SEQ ID NO: 193302 - RNA, 21 nt, Human
acaaagagcacuucugccaca

SEQ ID NO: 193303 - RNA, 20 nt, Human
acaaguccacaucucagcug

SEQ ID NO: 193304 - RNA, 19 nt, Human
acagcccacccccaaaacu

SEQ ID NO: 193305 - RNA, 24 nt, Human
acgccaccccagggcuagcaagga

SEQ ID NO: 193306 - RNA, 18 nt, Human
acgggaggaaguuccacc

SEQ ID NO: 193307 - RNA, 20 nt, Human
acggugcaaagcagugagac

SEQ ID NO: 193308 - RNA, 20 nt, Human
agagggacagguggaagcuu

SEQ ID NO: 193309 - RNA, 24 nt, Human
agaguuccaacauuuccuccacuu

SEQ ID NO: 193310 - RNA, 20 nt, Human
agaugugucuauaugcacau

SEQ ID NO: 193311 - RNA, 25 nt, Human
agcagagcucccaaauccagcuccu

SEQ ID NO: 193312 - RNA, 21 nt, Human
agcagcaacaguucugagaac

SEQ ID NO: 193313 - RNA, 22 nt, Human
agcagcucccuccuucccagga

SEQ ID NO: 193314 - RNA, 24 nt, Human
agccacaugacagucgccaaccuu

SEQ ID NO: 193315 - RNA, 20 nt, Human
agcccagcgauaugcauucc

SEQ ID NO: 193316 - RNA, 18 nt, Human
agccccugccucgucuca

SEQ ID NO: 193317 - RNA, 23 nt, Human
aggaagcgggggagggacaaagc

SEQ ID NO: 193318 - RNA, 19 nt, Human
aggcagacgccaccccagg

SEQ ID NO: 193319 - RNA, 21 nt, Human
aggcagcaccugcacagaguu

SEQ ID NO: 193320 - RNA, 18 nt, Human
aggcagguccacguuggc

SEQ ID NO: 193321 - RNA, 18 nt, Human
aggccuggcagaggcugc

SEQ ID NO: 193322 - RNA, 25 nt, Human
aggcgggaggcgggugggggggacc

SEQ ID NO: 193323 - RNA, 26 nt, Human
aggcgggaggcgggugggggggaccc

SEQ ID NO: 193324 - RNA, 19 nt, Human
aggcucagacaaaacacag

SEQ ID NO: 193325 - RNA, 24 nt, Human
agggaaccagcccgccccugcccc

SEQ ID NO: 193326 - RNA, 22 nt, Human
agggaccuguccuggggauagg

SEQ ID NO: 193327 - RNA, 22 nt, Human
aggggcucccuuugagcagggg

SEQ ID NO: 193328 - RNA, 21 nt, Human
aggugacuaucaggagaaagg

SEQ ID NO: 193329 - RNA, 23 nt, Human
aguggaggcugcucacagccagg

SEQ ID NO: 193330 - RNA, 19 nt, Human
aguuccaccugccaggcgg

SEQ ID NO: 193331 - RNA, 18 nt, Human
auccagaauccacuucca

SEQ ID NO: 193332 - RNA, 24 nt, Human
aucucuuuacugauauaauuaaau

SEQ ID NO: 193333 - RNA, 21 nt, Human
augagaaacaggagcccccaa

SEQ ID NO: 193334 - RNA, 24 nt, Human
augucagcgggugcucaggagggc

SEQ ID NO: 193335 - RNA, 18 nt, Human
auucaucuccggagcaca

SEQ ID NO: 193336 - RNA, 19 nt, Human
caaagccugcucacggcac

SEQ ID NO: 193337 - RNA, 22 nt, Human
caacauuuccuccacuuaccac

SEQ ID NO: 193338 - RNA, 22 nt, Human
caagcucagcugacagucccuc

SEQ ID NO: 193339 - RNA, 23 nt, Human
caagggcacagacuuccaaaggc

SEQ ID NO: 193340 - RNA, 20 nt, Human
caaugaaugagcccugcccu

SEQ ID NO: 193341 - RNA, 22 nt, Human
cacacagaacuaaccucacucc

SEQ ID NO: 193342 - RNA, 21 nt, Human
cacaccccaccagggagaccc

SEQ ID NO: 193343 - RNA, 23 nt, Human
cacagccagucggcaagcagagc

SEQ ID NO: 193344 - RNA, 20 nt, Human
cacauggggugcagcacagc

SEQ ID NO: 193345 - RNA, 21 nt, Human
caccccaccagggagacccag

SEQ ID NO: 193346 - RNA, 22 nt, Human
caccggggcaaugaauggggcu

SEQ ID NO: 193347 - RNA, 19 nt, Human
caccgugcaagaugucagc

SEQ ID NO: 193348 - RNA, 18 nt, Human
cagaagcauucaggucug

SEQ ID NO: 193349 - RNA, 21 nt, Human
cagacacacagaacuaaccuc

SEQ ID NO: 193350 - RNA, 22 nt, Human
cagagcucccaaauccagcucc

SEQ ID NO: 193351 - RNA, 25 nt, Human
cagcccacccccaaaacuugacaac

SEQ ID NO: 193352 - RNA, 19 nt, Human
cagcggaagggaggcacau

SEQ ID NO: 193353 - RNA, 20 nt, Human
caggaaaaagcuaggaugag

SEQ ID NO: 193354 - RNA, 28 nt, Human
caggaaaacaaaagcaaucuccccacag

SEQ ID NO: 193355 - RNA, 22 nt, Human
caggagcccccaaccaauacgg

SEQ ID NO: 193356 - RNA, 21 nt, Human
caguccccggaggccucgggc

SEQ ID NO: 193357 - RNA, 19 nt, Human
cauccagaauccacuucca

SEQ ID NO: 193358 - RNA, 23 nt, Human
cauccugagcucuccaagguccc

SEQ ID NO: 193359 - RNA, 23 nt, Human
ccaaauccagcuccuacaucagc

SEQ ID NO: 193360 - RNA, 18 nt, Human
ccaagcuuugcuguugac

SEQ ID NO: 193361 - RNA, 22 nt, Human
ccaccaggacugcagacacucc

SEQ ID NO: 193362 - RNA, 22 nt, Human
ccaccagggagacccaggccag

SEQ ID NO: 193363 - RNA, 20 nt, Human
ccacccccaaaacuugacaa

SEQ ID NO: 193364 - RNA, 19 nt, Human
ccaccugcccacuaacgcc

SEQ ID NO: 193365 - RNA, 18 nt, Human
ccacgccggccagcauga

SEQ ID NO: 193366 - RNA, 27 nt, Human
ccagagcgggguguucuccgggucucc

SEQ ID NO: 193367 - RNA, 20 nt, Human
ccagcaggaaaacaaaagca

SEQ ID NO: 193368 - RNA, 23 nt, Human
ccagcaggaaaacaaaagcaauc

SEQ ID NO: 193369 - RNA, 22 nt, Human
ccaggaagaaccgacacgggca

SEQ ID NO: 193370 - RNA, 28 nt, Human
ccagggcuagcaaggaacaggaguggga

SEQ ID NO: 193371 - RNA, 21 nt, Human
ccaucuucgccagugggaucc

SEQ ID NO: 193372 - RNA, 18 nt, Human
cccacagcccacccccaa

SEQ ID NO: 193373 - RNA, 19 nt, Human
cccacagcccacccccaaa

SEQ ID NO: 193374 - RNA, 21 nt, Human
cccacagcccacccccaaaac

SEQ ID NO: 193375 - RNA, 22 nt, Human
cccaccaggacugcagacacuc

SEQ ID NO: 193376 - RNA, 20 nt, Human
ccccacuugggucagagccc

SEQ ID NO: 193377 - RNA, 21 nt, Human
cccccaaaacuugacaaccaa

SEQ ID NO: 193378 - RNA, 25 nt, Human
ccccuuucuaccgcuccugcugccc

SEQ ID NO: 193379 - RNA, 18 nt, Human
cccgcagcggaagggagg

SEQ ID NO: 193380 - RNA, 19 nt, Human
cccucuggaggacagcucc

SEQ ID NO: 193381 - RNA, 19 nt, Human
cccugcuggcuccagggga

SEQ ID NO: 193382 - RNA, 21 nt, Human
ccgaggaggaggggcugcagu

SEQ ID NO: 193383 - RNA, 21 nt, Human
ccucacuccaccccgcaacgg

SEQ ID NO: 193384 - RNA, 23 nt, Human
ccuccuucccaggagggccaggc

SEQ ID NO: 193385 - RNA, 18 nt, Human
ccugacuccacccaccag

SEQ ID NO: 193386 - RNA, 20 nt, Human
ccugacugguggguggagaa

SEQ ID NO: 193387 - RNA, 21 nt, Human
ccugcccccgcagguucugcc

SEQ ID NO: 193388 - RNA, 18 nt, Human
ccugcccugaccacgucc

SEQ ID NO: 193389 - RNA, 22 nt, Human
ccuggccagcagcugugguccc

SEQ ID NO: 193390 - RNA, 23 nt, Human
ccuggccagcagcuguggucccg

SEQ ID NO: 193391 - RNA, 19 nt, Human
ccuggcucgccucuagggc

SEQ ID NO: 193392 - RNA, 21 nt, Human
ccugugauacugcugucucag

SEQ ID NO: 193393 - RNA, 18 nt, Human
ccuugugaaugcauaaac

SEQ ID NO: 193394 - RNA, 24 nt, Human
ccuuuagggcacagggccuucuca

SEQ ID NO: 193395 - RNA, 19 nt, Human
cgacgggcaugaccaaacc

SEQ ID NO: 193396 - RNA, 23 nt, Human
cgacgggcaugaccaaaccaagc

SEQ ID NO: 193397 - RNA, 23 nt, Human
cgaugagcacagaucugcacucu

SEQ ID NO: 193398 - RNA, 21 nt, Human
cgccccugcccccgcagguuc

SEQ ID NO: 193399 - RNA, 24 nt, Human
cggaccccuuucuaccgcuccugc

SEQ ID NO: 193400 - RNA, 23 nt, Human
cggggccacgccggccagcauga

SEQ ID NO: 193401 - RNA, 18 nt, Human
cgggggcagaagggaugc

SEQ ID NO: 193402 - RNA, 19 nt, Human
cgucucacagccagucggc

SEQ ID NO: 193403 - RNA, 23 nt, Human
cguggccgggggcccuguccacc

SEQ ID NO: 193404 - RNA, 19 nt, Human
cuaaccucacuccaccccg

SEQ ID NO: 193405 - RNA, 19 nt, Human
cucacagguagcaagagag

SEQ ID NO: 193406 - RNA, 24 nt, Human
cucagagcugcugacauaaccugc

SEQ ID NO: 193407 - RNA, 23 nt, Human
cucagcagcucucaagaucuucc

SEQ ID NO: 193408 - RNA, 23 nt, Human
cucaggcucagccccaccaggac

SEQ ID NO: 193409 - RNA, 20 nt, Human
cuccaaggcuggcaguuacc

SEQ ID NO: 193410 - RNA, 22 nt, Human
cuccggagcacacaggcagguc

SEQ ID NO: 193411 - RNA, 26 nt, Human
cuccuacaucagcagcagcccggcca

SEQ ID NO: 193412 - RNA, 18 nt, Human
cucuauguugagcccagc

SEQ ID NO: 193413 - RNA, 23 nt, Human
cugacuccacccaccagacacac

SEQ ID NO: 193414 - RNA, 19 nt, Human
cugacugguggguggagaa

SEQ ID NO: 193415 - RNA, 18 nt, Human
cugagcagcucccuccuu

SEQ ID NO: 193416 - RNA, 23 nt, Human
cuggcccagaugcaagagcagcu

SEQ ID NO: 193417 - RNA, 22 nt, Human
cugucccugacuggugggugga

SEQ ID NO: 193418 - RNA, 18 nt, Human
cuuccaggaagaaccgac

SEQ ID NO: 193419 - RNA, 18 nt, Human
cuuccagguugccuucag

SEQ ID NO: 193420 - RNA, 21 nt, Human
cuucccaggagggccaggccc

SEQ ID NO: 193421 - RNA, 18 nt, Human
cuucuacugcaggacagc

SEQ ID NO: 193422 - RNA, 20 nt, Human
cuuugggggugggggacacc

SEQ ID NO: 193423 - RNA, 18 nt, Human
gaagaugggggcgagggg

SEQ ID NO: 193424 - RNA, 25 nt, Human
gaccacggugcaaagcagugagacc

SEQ ID NO: 193425 - RNA, 18 nt, Human
gaccaucuucgccagugg

SEQ ID NO: 193426 - RNA, 18 nt, Human
gagagaagggagaauggu

SEQ ID NO: 193427 - RNA, 21 nt, Human
gagcucccaaauccagcuccu

SEQ ID NO: 193428 - RNA, 19 nt, Human
gagcucuccaaggucccuc

SEQ ID NO: 193429 - RNA, 18 nt, Human
gaggaugucugcugggaa

SEQ ID NO: 193430 - RNA, 18 nt, Human
gaugcaagagcagcugca

SEQ ID NO: 193431 - RNA, 18 nt, Human
gauguacaauguuugcag

SEQ ID NO: 193432 - RNA, 19 nt, Human
gauguacaauguuugcagc

SEQ ID NO: 193433 - RNA, 19 nt, Human
gcaacaaccagcaggugac

SEQ ID NO: 193434 - RNA, 19 nt, Human
gcaaggaacaggaguggga

SEQ ID NO: 193435 - RNA, 21 nt, Human
gcacaccccaccagggagacc

SEQ ID NO: 193436 - RNA, 23 nt, Human
gcacggcaguccccggaggccuc

SEQ ID NO: 193437 - RNA, 19 nt, Human
gcaggacagcagaggggcc

SEQ ID NO: 193438 - RNA, 19 nt, Human
gccaccugcccacuaacgc

SEQ ID NO: 193439 - RNA, 18 nt, Human
gccaggcggccacacacc

SEQ ID NO: 193440 - RNA, 19 nt, Human
gccagucggcaagcagagc

SEQ ID NO: 193441 - RNA, 22 nt, Human
gcucugaaaugacccccuccau

SEQ ID NO: 193442 - RNA, 24 nt, Human
ggaaaacaaaagcaaucuccccac

SEQ ID NO: 193443 - RNA, 19 nt, Human
ggaaggccucaggcucagc

SEQ ID NO: 193444 - RNA, 20 nt, Human
ggaggaggggcugcaguuga

SEQ ID NO: 193445 - RNA, 19 nt, Human
ggagggcuaugccaguggc

SEQ ID NO: 193446 - RNA, 18 nt, Human
ggcacagggccuucucag

SEQ ID NO: 193447 - RNA, 23 nt, Human
ggccugugauacugcugucucag

SEQ ID NO: 193448 - RNA, 21 nt, Human
ggcgagggguguccuuuaggg

SEQ ID NO: 193449 - RNA, 19 nt, Human
ggcugcugucccugacugg

SEQ ID NO: 193450 - RNA, 22 nt, Human
gggagacccaggccaguguucc

SEQ ID NO: 193451 - RNA, 18 nt, Human
gggcaaugaauggggcuc

SEQ ID NO: 193452 - RNA, 18 nt, Human
gggccaacagccagccug

SEQ ID NO: 193453 - RNA, 22 nt, Human
gggcgagggguguccuuuaggg

SEQ ID NO: 193454 - RNA, 24 nt, Human
ggggcaaugaauggggcucugggc

SEQ ID NO: 193455 - RNA, 21 nt, Human
ggggcagaagggaugcugggc

SEQ ID NO: 193456 - RNA, 20 nt, Human
gguggggcuccgggacucgc

SEQ ID NO: 193457 - RNA, 19 nt, Human
gguggguggagaacgacag

SEQ ID NO: 193458 - RNA, 18 nt, Human
guccucaguccugcugug

SEQ ID NO: 193459 - RNA, 19 nt, Human
uaaccucacuccaccccgc

SEQ ID NO: 193460 - RNA, 24 nt, Human
uacaucagcagcagcccggccauc

SEQ ID NO: 193461 - RNA, 22 nt, Human
uaccagcaggaaaacaaaagca

SEQ ID NO: 193462 - RNA, 25 nt, Human
uacccaaaacaucgacgggcaugac

SEQ ID NO: 193463 - RNA, 19 nt, Human
uacgaugggugcuugccac

SEQ ID NO: 193464 - RNA, 19 nt, Human
uacuuuauguauaugcgug

SEQ ID NO: 193465 - RNA, 24 nt, Human
uaggaugagaaacaggagccccca

SEQ ID NO: 193466 - RNA, 18 nt, Human
uagggaccaagcuggcuc

SEQ ID NO: 193467 - RNA, 19 nt, Human
uagggcugaggaagcagag

SEQ ID NO: 193468 - RNA, 22 nt, Human
uauagaugugucuauaugcaca

SEQ ID NO: 193469 - RNA, 20 nt, Human
uaucaggagaaaggaccugg

SEQ ID NO: 193470 - RNA, 20 nt, Human
uaugccaguggcuacaggag

SEQ ID NO: 193471 - RNA, 18 nt, Human
uauugcugucuacuaucc

SEQ ID NO: 193472 - RNA, 22 nt, Human
ucagacaaaacacagcucagug

SEQ ID NO: 193473 - RNA, 22 nt, Human
uccaaaggcuccggccccagcu

SEQ ID NO: 193474 - RNA, 21 nt, Human
uccaaggucccucagcagcuc

SEQ ID NO: 193475 - RNA, 18 nt, Human
uccaggaagaaccgacac

SEQ ID NO: 193476 - RNA, 21 nt, Human
ucccaaaccuucuagcgggcu

SEQ ID NO: 193477 - RNA, 19 nt, Human
uccccggaggccucgggcc

SEQ ID NO: 193478 - RNA, 22 nt, Human
ucccgagcuccacguggggcuc

SEQ ID NO: 193479 - RNA, 24 nt, Human
ucccuuugagcaggggcucccuuu

SEQ ID NO: 193480 - RNA, 18 nt, Human
ucggaccccuuucuaccg

SEQ ID NO: 193481 - RNA, 27 nt, Human
ucggaccccuuucuaccgcuccugcug

SEQ ID NO: 193482 - RNA, 18 nt, Human
ucgggccgacucgcggcg

SEQ ID NO: 193483 - RNA, 19 nt, Human
ucgggccgacucgcggcgc

SEQ ID NO: 193484 - RNA, 18 nt, Human
ucuaccgcuccugcugcc

SEQ ID NO: 193485 - RNA, 22 nt, Human
ucuagggcugaggaagcagagc

SEQ ID NO: 193486 - RNA, 20 nt, Human
ucucacuccuacacgugacc

SEQ ID NO: 193487 - RNA, 20 nt, Human
ucucgucaguccuucccuuu

SEQ ID NO: 193488 - RNA, 18 nt, Human
ucugagccauccugagcu

SEQ ID NO: 193489 - RNA, 21 nt, Human
ucuggguggggcuccgggacu

SEQ ID NO: 193490 - RNA, 22 nt, Human
ucugugcccgaggaggaggggc

SEQ ID NO: 193491 - RNA, 24 nt, Human
ugaaaugacccccuccaugaagau

SEQ ID NO: 193492 - RNA, 22 nt, Human
ugaagucauuuuuacuaaugag

SEQ ID NO: 193493 - RNA, 24 nt, Human
ugacagggaggcugcugucccugg

SEQ ID NO: 193494 - RNA, 20 nt, Human
ugacugguggguggagaacg

SEQ ID NO: 193495 - RNA, 18 nt, Human
ugagaaacaggagccccc

SEQ ID NO: 193496 - RNA, 18 nt, Human
ugagaagaaaagagagaa

SEQ ID NO: 193497 - RNA, 20 nt, Human
ugagaagaaaagagagaagg

SEQ ID NO: 193498 - RNA, 21 nt, Human
ugagcagcucccuccuuccca

SEQ ID NO: 193499 - RNA, 22 nt, Human
ugagcagcucccuccuucccag

SEQ ID NO: 193500 - RNA, 20 nt, Human
ugagcaggggcucccuuuca

SEQ ID NO: 193501 - RNA, 23 nt, Human
ugcaaagcagugagaccugggca

SEQ ID NO: 193502 - RNA, 21 nt, Human
ugccaagacaccaagcuuugc

SEQ ID NO: 193503 - RNA, 22 nt, Human
ugccacauggcagagacacgca

SEQ ID NO: 193504 - RNA, 19 nt, Human
ugcccgaggaggaggggcu

SEQ ID NO: 193505 - RNA, 23 nt, Human
ugccgggugucuagcacccccag

SEQ ID NO: 193506 - RNA, 19 nt, Human
ugcgccggcggaggcgggg

SEQ ID NO: 193507 - RNA, 22 nt, Human
ugcugggcucugucacuaacag

SEQ ID NO: 193508 - RNA, 19 nt, Human
uggaacgggggcagaaggg

SEQ ID NO: 193509 - RNA, 19 nt, Human
uggcagaaaugagggugga

SEQ ID NO: 193510 - RNA, 18 nt, Human
uggcaugcacaccccacc

SEQ ID NO: 193511 - RNA, 20 nt, Human
uggcccagaugcaagagcag

SEQ ID NO: 193512 - RNA, 23 nt, Human
ugggaaggaugcucacagguagc

SEQ ID NO: 193513 - RNA, 25 nt, Human
ugggagcuggugggaaaagccucau

SEQ ID NO: 193514 - RNA, 20 nt, Human
uggggauaggaguggcggcu

SEQ ID NO: 193515 - RNA, 22 nt, Human
ugggggugggggacaccuacug

SEQ ID NO: 193516 - RNA, 21 nt, Human
uggucacccacauggggugca

SEQ ID NO: 193517 - RNA, 27 nt, Human
ugguuuccauuuuuucccuuuaauuug

SEQ ID NO: 193518 - RNA, 24 nt, Human
uguccgucacgcggcuaacuugac

SEQ ID NO: 193519 - RNA, 18 nt, Human
uguccuuuagggcacagg

SEQ ID NO: 193520 - RNA, 21 nt, Human
ugugauacugcugucucagag

SEQ ID NO: 193521 - RNA, 23 nt, Human
ugugauacugcugucucagagcu

SEQ ID NO: 193522 - RNA, 24 nt, Human
uguggccaccugcccacuaacgcc

SEQ ID NO: 193523 - RNA, 18 nt, Human
ugugggcagcauacaagu

SEQ ID NO: 193524 - RNA, 21 nt, Human
uguugggagcuggugggaaaa

SEQ ID NO: 193525 - RNA, 19 nt, Human
uuaagggccuccucaaaca

SEQ ID NO: 193526 - RNA, 24 nt, Human
uuacaaauguaaacaucuagccaa

SEQ ID NO: 193527 - RNA, 24 nt, Human
uuccauuuuuucccuuuaauuugg

SEQ ID NO: 193528 - RNA, 20 nt, Human
uugccuggcucgccucuagg

SEQ ID NO: 193529 - RNA, 19 nt, Human
uuuaaugacuuggcuccuc

SEQ ID NO: 193530 - RNA, 28 nt, Human
aaaaaugaaaauaguaucucaaaaagga

SEQ ID NO: 193531 - RNA, 22 nt, Human
aaaacagaaccaaucuaaaaau

SEQ ID NO: 193532 - RNA, 20 nt, Human
aagaauggguggcaaggugg

SEQ ID NO: 193533 - RNA, 21 nt, Human
aagcuacuaagcaggcacuug

SEQ ID NO: 193534 - RNA, 23 nt, Human
accuccaccugcagaauuaggag

SEQ ID NO: 193535 - RNA, 20 nt, Human
aggaagccagagcuggagag

SEQ ID NO: 193536 - RNA, 24 nt, Human
aggcacuuggcauuucaggaguuu

SEQ ID NO: 193537 - RNA, 23 nt, Human
auaagggcaccuuuccaaagcua

SEQ ID NO: 193538 - RNA, 22 nt, Human
ccucccgucccuaccgucaguc

SEQ ID NO: 193539 - RNA, 19 nt, Human
ccuugguuucugucccugg

SEQ ID NO: 193540 - RNA, 18 nt, Human
cgggaagaauggguggca

SEQ ID NO: 193541 - RNA, 19 nt, Human
cuacuaagcaggcacuugg

SEQ ID NO: 193542 - RNA, 24 nt, Human
cucaaaaaggaaacuagacuagca

SEQ ID NO: 193543 - RNA, 20 nt, Human
cuggaagagcucacccagca

SEQ ID NO: 193544 - RNA, 23 nt, Human
cuuuccaaagcuacuaagcaggc

SEQ ID NO: 193545 - RNA, 22 nt, Human
gaaaauaguaucucaaaaagga

SEQ ID NO: 193546 - RNA, 22 nt, Human
gaaccaaucuaaaaauggcuga

SEQ ID NO: 193547 - RNA, 19 nt, Human
gaacgggaagaaugggugg

SEQ ID NO: 193548 - RNA, 19 nt, Human
gagaagacagacagagggc

SEQ ID NO: 193549 - RNA, 22 nt, Human
gagaagacagacagagggcagg

SEQ ID NO: 193550 - RNA, 22 nt, Human
gagcucacccagcacagcugcc

SEQ ID NO: 193551 - RNA, 18 nt, Human
gccuugguuucugucccu

SEQ ID NO: 193552 - RNA, 19 nt, Human
gccuugguuucugucccug

SEQ ID NO: 193553 - RNA, 20 nt, Human
ggagccugaaaaaaacagga

SEQ ID NO: 193554 - RNA, 23 nt, Human
gugagggacucagcaggaagcca

SEQ ID NO: 193555 - RNA, 20 nt, Human
uacacagagaaauagaaaau

SEQ ID NO: 193556 - RNA, 19 nt, Human
uacgaaaacagaaccaauc

SEQ ID NO: 193557 - RNA, 19 nt, Human
uagaaaauauaaaaucuga

SEQ ID NO: 193558 - RNA, 22 nt, Human
uagaauguucaauaagggcacc

SEQ ID NO: 193559 - RNA, 22 nt, Human
uagcaaccuccaccugcagaau

SEQ ID NO: 193560 - RNA, 22 nt, Human
ucagucgguccguccgcccucc

SEQ ID NO: 193561 - RNA, 22 nt, Human
uccuugaagacccagccacccc

SEQ ID NO: 193562 - RNA, 20 nt, Human
ucugagggguuggggaagaa

SEQ ID NO: 193563 - RNA, 24 nt, Human
ucuuaugguugcauaaaaguaucc

SEQ ID NO: 193564 - RNA, 22 nt, Human
ugagggguuggggaagaaacgu

SEQ ID NO: 193565 - RNA, 23 nt, Human
ugagggguuggggaagaaacgug

SEQ ID NO: 193566 - RNA, 23 nt, Human
ugcagaauuaggagaagacagac

SEQ ID NO: 193567 - RNA, 19 nt, Human
uggcucacuugaggccagu

SEQ ID NO: 193568 - RNA, 22 nt, Human
ugucuuaugguugcauaaaagu

SEQ ID NO: 193569 - RNA, 22 nt, Human
uucaaaguuaagaacgggaaga

SEQ ID NO: 193570 - RNA, 19 nt, Human
uuucaggaguuugucuuau

SEQ ID NO: 193571 - RNA, 23 nt, Human
aaaauaaauacaguccaugccaa

SEQ ID NO: 193572 - RNA, 21 nt, Human
aagaaaaacaaaaacgaaaaa

SEQ ID NO: 193573 - RNA, 23 nt, Human
aauuacuucuuuaauagaucagu

SEQ ID NO: 193574 - RNA, 23 nt, Human
acauuuuccuuucaauauuuucu

SEQ ID NO: 193575 - RNA, 21 nt, Human
agaaaaacaaaaacgaaaaag

SEQ ID NO: 193576 - RNA, 22 nt, Human
aggccggugggaggagaggagg

SEQ ID NO: 193577 - RNA, 24 nt, Human
aucaguuuuuuugacauaauaacu

SEQ ID NO: 193578 - RNA, 23 nt, Human
caaaaacgaaaaagccauuugaa

SEQ ID NO: 193579 - RNA, 22 nt, Human
caaaguaguauaaaaugaagcc

SEQ ID NO: 193580 - RNA, 27 nt, Human
caaaguaguauaaaaugaagccagaag

SEQ ID NO: 193581 - RNA, 24 nt, Human
cacaauaaaacuugccaagaaaaa

SEQ ID NO: 193582 - RNA, 21 nt, Human
caccgggcuccuccuccugcu

SEQ ID NO: 193583 - RNA, 23 nt, Human
cagcucagaaaggccaauuacuu

SEQ ID NO: 193584 - RNA, 18 nt, Human
ccgggcuccuccuccugc

SEQ ID NO: 193585 - RNA, 19 nt, Human
ccggugggaggagaggagg

SEQ ID NO: 193586 - RNA, 20 nt, Human
ccuccuccugcugcugcugc

SEQ ID NO: 193587 - RNA, 22 nt, Human
ccuccuccugcugcugcugcua

SEQ ID NO: 193588 - RNA, 23 nt, Human
ccuccugcugcugcugcugcugc

SEQ ID NO: 193589 - RNA, 21 nt, Human
cgaaaaagccauuugaaaaua

SEQ ID NO: 193590 - RNA, 21 nt, Human
cucacaauaaaacuugccaag

SEQ ID NO: 193591 - RNA, 23 nt, Human
gagaaaagggcugagggaaacgu

SEQ ID NO: 193592 - RNA, 21 nt, Human
gaucaguuuuuuugacauaau

SEQ ID NO: 193593 - RNA, 20 nt, Human
gcugcugccgccgcggcucg

SEQ ID NO: 193594 - RNA, 19 nt, Human
gcugcugcugcugccgccg

SEQ ID NO: 193595 - RNA, 22 nt, Human
ggagagaaaagggcugagggaa

SEQ ID NO: 193596 - RNA, 23 nt, Human
ggaggagaggagggggcgccggg

SEQ ID NO: 193597 - RNA, 18 nt, Human
guggagaaaagaaauuuu

SEQ ID NO: 193598 - RNA, 19 nt, Human
uaaaaugaagccagaaguc

SEQ ID NO: 193599 - RNA, 23 nt, Human
uaaaaugaagccagaagucuuca

SEQ ID NO: 193600 - RNA, 22 nt, Human
uauaaaaugaagccagaagucu

SEQ ID NO: 193601 - RNA, 26 nt, Human
uauaaaaugaagccagaagucuucaa

SEQ ID NO: 193602 - RNA, 22 nt, Human
uccaugccaaaguaguauaaaa

SEQ ID NO: 193603 - RNA, 21 nt, Human
uccuccugcugcugcugcugc

SEQ ID NO: 193604 - RNA, 22 nt, Human
uccugcugcugcugcugcugcc

SEQ ID NO: 193605 - RNA, 19 nt, Human
ugagggaaacgugggggcg

SEQ ID NO: 193606 - RNA, 21 nt, Human
ugcugcugcugcugcugcugc

SEQ ID NO: 193607 - RNA, 21 nt, Human
ugcugcugcugcugcugcugc

SEQ ID NO: 193608 - RNA, 18 nt, Human
ugggaggagaggaggggg

SEQ ID NO: 193609 - RNA, 20 nt, Human
ugggaggagaggagggggcg

SEQ ID NO: 193610 - RNA, 22 nt, Human
aaaaauaauuaaaaaccuuuga

SEQ ID NO: 193611 - RNA, 23 nt, Human
aaaacaaaacaaaacaaaauucc

SEQ ID NO: 193612 - RNA, 19 nt, Human
aaaauuccuccaaaucaac

SEQ ID NO: 193613 - RNA, 24 nt, Human
aaaauuccuccaaaucaacucccc

SEQ ID NO: 193614 - RNA, 18 nt, Human
aaacaaaacaaaacaaaa

SEQ ID NO: 193615 - RNA, 22 nt, Human
aaacaaaacaaaacaaaacaaa

SEQ ID NO: 193616 - RNA, 26 nt, Human
aaacaaaacaaaacaaaauuccucca

SEQ ID NO: 193617 - RNA, 18 nt, Human
aaacaagucccaagaccg
